United States Patent Application Publication US 2013/0267429 A1 - sequence listing, part 25

SEQ ID NO: 592037 - DNA, 55 bp, Artificial; identical to SEQ ID NO: 431652
  Synthetic oligonucleotide

SEQ ID NO: 592038 - DNA, 56 bp, Artificial; identical to SEQ ID NO: 431653
  Synthetic oligonucleotide

SEQ ID NO: 592039 - DNA, 59 bp, Artificial; identical to SEQ ID NO: 431654
  Synthetic oligonucleotide

SEQ ID NO: 592040 - DNA, 55 bp, Artificial; identical to SEQ ID NO: 431655
  Synthetic oligonucleotide

SEQ ID NO: 592041 - DNA, 57 bp, Artificial; identical to SEQ ID NO: 431657
  Synthetic oligonucleotide

SEQ ID NO: 592042 - DNA, 55 bp, Artificial; identical to SEQ ID NO: 431659
  Synthetic oligonucleotide

SEQ ID NO: 592043 - DNA, 54 bp, Artificial; identical to SEQ ID NO: 431660
  Synthetic oligonucleotide

SEQ ID NO: 592044 - DNA, 55 bp, Artificial; identical to SEQ ID NO: 431662
  Synthetic oligonucleotide

SEQ ID NO: 592045 - DNA, 55 bp, Artificial; identical to SEQ ID NO: 431663
  Synthetic oligonucleotide

SEQ ID NO: 592046 - DNA, 55 bp, Artificial; identical to SEQ ID NO: 431665
  Synthetic oligonucleotide

SEQ ID NO: 592047 - DNA, 60 bp, Artificial; identical to SEQ ID NO: 431667
  Synthetic oligonucleotide

SEQ ID NO: 592048 - DNA, 60 bp, Artificial; identical to SEQ ID NO: 431669
  Synthetic oligonucleotide

SEQ ID NO: 592049 - DNA, 55 bp, Artificial; identical to SEQ ID NO: 431672
  Synthetic oligonucleotide

SEQ ID NO: 592050 - DNA, 60 bp, Artificial; identical to SEQ ID NO: 431674
  Synthetic oligonucleotide

SEQ ID NO: 592051 - DNA, 55 bp, Artificial; identical to SEQ ID NO: 431675
  Synthetic oligonucleotide

SEQ ID NO: 592052 - DNA, 55 bp, Artificial; identical to SEQ ID NO: 431680
  Synthetic oligonucleotide

SEQ ID NO: 592053 - DNA, 54 bp, Artificial; identical to SEQ ID NO: 431683
  Synthetic oligonucleotide

SEQ ID NO: 592054 - DNA, 57 bp, Artificial; identical to SEQ ID NO: 431684
  Synthetic oligonucleotide

SEQ ID NO: 592055 - DNA, 52 bp, Artificial; identical to SEQ ID NO: 431688
  Synthetic oligonucleotide

SEQ ID NO: 592056 - DNA, 56 bp, Artificial; identical to SEQ ID NO: 431690
  Synthetic oligonucleotide

SEQ ID NO: 592057 - DNA, 59 bp, Artificial; identical to SEQ ID NO: 431691
  Synthetic oligonucleotide

SEQ ID NO: 592058 - DNA, 60 bp, Artificial; identical to SEQ ID NO: 431692
  Synthetic oligonucleotide

SEQ ID NO: 592059 - DNA, 60 bp, Artificial; identical to SEQ ID NO: 431696
  Synthetic oligonucleotide

SEQ ID NO: 592060 - DNA, 51 bp, Artificial; identical to SEQ ID NO: 431698
  Synthetic oligonucleotide

SEQ ID NO: 592061 - DNA, 60 bp, Artificial; identical to SEQ ID NO: 431699
  Synthetic oligonucleotide

SEQ ID NO: 592062 - DNA, 50 bp, Artificial; identical to SEQ ID NO: 431701
  Synthetic oligonucleotide

SEQ ID NO: 592063 - DNA, 60 bp, Artificial; identical to SEQ ID NO: 431703
  Synthetic oligonucleotide

SEQ ID NO: 592064 - DNA, 55 bp, Artificial; identical to SEQ ID NO: 431704
  Synthetic oligonucleotide

SEQ ID NO: 592065 - DNA, 57 bp, Artificial; identical to SEQ ID NO: 431708
  Synthetic oligonucleotide

SEQ ID NO: 592066 - DNA, 58 bp, Artificial; identical to SEQ ID NO: 431709
  Synthetic oligonucleotide

SEQ ID NO: 592067 - DNA, 60 bp, Artificial; identical to SEQ ID NO: 431710
  Synthetic oligonucleotide

SEQ ID NO: 592068 - DNA, 49 bp, Artificial; identical to SEQ ID NO: 431711
  Synthetic oligonucleotide

SEQ ID NO: 592069 - DNA, 57 bp, Artificial; identical to SEQ ID NO: 431712
  Synthetic oligonucleotide

SEQ ID NO: 592070 - DNA, 56 bp, Artificial; identical to SEQ ID NO: 431718
  Synthetic oligonucleotide

SEQ ID NO: 592071 - DNA, 60 bp, Artificial; identical to SEQ ID NO: 431719
  Synthetic oligonucleotide

SEQ ID NO: 592072 - DNA, 58 bp, Artificial; identical to SEQ ID NO: 431721
  Synthetic oligonucleotide

SEQ ID NO: 592073 - DNA, 60 bp, Artificial; identical to SEQ ID NO: 431723
  Synthetic oligonucleotide

SEQ ID NO: 592074 - DNA, 59 bp, Artificial; identical to SEQ ID NO: 431724
  Synthetic oligonucleotide

SEQ ID NO: 592075 - DNA, 59 bp, Artificial; identical to SEQ ID NO: 431725
  Synthetic oligonucleotide

SEQ ID NO: 592076 - DNA, 55 bp, Artificial; identical to SEQ ID NO: 431726
  Synthetic oligonucleotide

SEQ ID NO: 592077 - DNA, 55 bp, Artificial; identical to SEQ ID NO: 431731
  Synthetic oligonucleotide

SEQ ID NO: 592078 - DNA, 55 bp, Artificial; identical to SEQ ID NO: 431734
  Synthetic oligonucleotide

SEQ ID NO: 592079 - DNA, 56 bp, Artificial; identical to SEQ ID NO: 431737
  Synthetic oligonucleotide

SEQ ID NO: 592080 - DNA, 55 bp, Artificial; identical to SEQ ID NO: 431742
  Synthetic oligonucleotide

SEQ ID NO: 592081 - DNA, 60 bp, Artificial; identical to SEQ ID NO: 431744
  Synthetic oligonucleotide

SEQ ID NO: 592082 - DNA, 55 bp, Artificial; identical to SEQ ID NO: 431745
  Synthetic oligonucleotide

SEQ ID NO: 592083 - DNA, 55 bp, Artificial; identical to SEQ ID NO: 431746
  Synthetic oligonucleotide

SEQ ID NO: 592084 - DNA, 58 bp, Artificial; identical to SEQ ID NO: 431748
  Synthetic oligonucleotide

SEQ ID NO: 592085 - DNA, 55 bp, Artificial; identical to SEQ ID NO: 431749
  Synthetic oligonucleotide

SEQ ID NO: 592086 - DNA, 60 bp, Artificial; identical to SEQ ID NO: 431754
  Synthetic oligonucleotide

SEQ ID NO: 592087 - DNA, 60 bp, Artificial; identical to SEQ ID NO: 431757
  Synthetic oligonucleotide

SEQ ID NO: 592088 - DNA, 54 bp, Artificial; identical to SEQ ID NO: 431761
  Synthetic oligonucleotide

SEQ ID NO: 592089 - DNA, 60 bp, Artificial; identical to SEQ ID NO: 431765
  Synthetic oligonucleotide

SEQ ID NO: 592090 - DNA, 58 bp, Artificial; identical to SEQ ID NO: 431766
  Synthetic oligonucleotide

SEQ ID NO: 592091 - DNA, 55 bp, Artificial; identical to SEQ ID NO: 431770
  Synthetic oligonucleotide

SEQ ID NO: 592092 - DNA, 55 bp, Artificial; identical to SEQ ID NO: 431772
  Synthetic oligonucleotide

SEQ ID NO: 592093 - DNA, 55 bp, Artificial; identical to SEQ ID NO: 431773
  Synthetic oligonucleotide

SEQ ID NO: 592094 - DNA, 55 bp, Artificial; identical to SEQ ID NO: 431776
  Synthetic oligonucleotide

SEQ ID NO: 592095 - DNA, 60 bp, Artificial; identical to SEQ ID NO: 431777
  Synthetic oligonucleotide

SEQ ID NO: 592096 - DNA, 60 bp, Artificial; identical to SEQ ID NO: 431780
  Synthetic oligonucleotide

SEQ ID NO: 592097 - DNA, 55 bp, Artificial; identical to SEQ ID NO: 431783
  Synthetic oligonucleotide

SEQ ID NO: 592098 - DNA, 58 bp, Artificial; identical to SEQ ID NO: 431784
  Synthetic oligonucleotide

SEQ ID NO: 592099 - DNA, 58 bp, Artificial; identical to SEQ ID NO: 431789
  Synthetic oligonucleotide

SEQ ID NO: 592100 - DNA, 59 bp, Artificial; identical to SEQ ID NO: 431790
  Synthetic oligonucleotide

SEQ ID NO: 592101 - DNA, 55 bp, Artificial; identical to SEQ ID NO: 431800
  Synthetic oligonucleotide

SEQ ID NO: 592102 - DNA, 55 bp, Artificial; identical to SEQ ID NO: 431802
  Synthetic oligonucleotide

SEQ ID NO: 592103 - DNA, 55 bp, Artificial; identical to SEQ ID NO: 15566
  Synthetic oligonucleotide

SEQ ID NO: 592104 - DNA, 59 bp, Artificial; identical to SEQ ID NO: 431805
  Synthetic oligonucleotide

SEQ ID NO: 592105 - DNA, 55 bp, Artificial; identical to SEQ ID NO: 431806
  Synthetic oligonucleotide

SEQ ID NO: 592106 - DNA, 55 bp, Artificial; identical to SEQ ID NO: 431809
  Synthetic oligonucleotide

SEQ ID NO: 592107 - DNA, 55 bp, Artificial; identical to SEQ ID NO: 431811
  Synthetic oligonucleotide

SEQ ID NO: 592108 - DNA, 55 bp, Artificial; identical to SEQ ID NO: 431812
  Synthetic oligonucleotide

SEQ ID NO: 592109 - DNA, 51 bp, Artificial; identical to SEQ ID NO: 431814
  Synthetic oligonucleotide

SEQ ID NO: 592110 - DNA, 57 bp, Artificial; identical to SEQ ID NO: 431818
  Synthetic oligonucleotide

SEQ ID NO: 592111 - DNA, 58 bp, Artificial; identical to SEQ ID NO: 431820
  Synthetic oligonucleotide

SEQ ID NO: 592112 - DNA, 52 bp, Artificial; identical to SEQ ID NO: 431822
  Synthetic oligonucleotide

SEQ ID NO: 592113 - DNA, 51 bp, Artificial; identical to SEQ ID NO: 431826
  Synthetic oligonucleotide

SEQ ID NO: 592114 - DNA, 54 bp, Artificial; identical to SEQ ID NO: 431827
  Synthetic oligonucleotide

SEQ ID NO: 592115 - DNA, 55 bp, Artificial; identical to SEQ ID NO: 431829
  Synthetic oligonucleotide

SEQ ID NO: 592116 - DNA, 60 bp, Artificial; identical to SEQ ID NO: 431833
  Synthetic oligonucleotide

SEQ ID NO: 592117 - DNA, 55 bp, Artificial; identical to SEQ ID NO: 431834
  Synthetic oligonucleotide

SEQ ID NO: 592118 - DNA, 55 bp, Artificial; identical to SEQ ID NO: 431835
  Synthetic oligonucleotide

SEQ ID NO: 592119 - DNA, 52 bp, Artificial; identical to SEQ ID NO: 431836
  Synthetic oligonucleotide

SEQ ID NO: 592120 - DNA, 60 bp, Artificial; identical to SEQ ID NO: 431841
  Synthetic oligonucleotide

SEQ ID NO: 592121 - DNA, 55 bp, Artificial; identical to SEQ ID NO: 431842
  Synthetic oligonucleotide

SEQ ID NO: 592122 - DNA, 58 bp, Artificial; identical to SEQ ID NO: 431843
  Synthetic oligonucleotide

SEQ ID NO: 592123 - DNA, 50 bp, Artificial; identical to SEQ ID NO: 431846
  Synthetic oligonucleotide

SEQ ID NO: 592124 - DNA, 60 bp, Artificial; identical to SEQ ID NO: 431847
  Synthetic oligonucleotide

SEQ ID NO: 592125 - DNA, 55 bp, Artificial; identical to SEQ ID NO: 431848
  Synthetic oligonucleotide

SEQ ID NO: 592126 - DNA, 55 bp, Artificial; identical to SEQ ID NO: 431849
  Synthetic oligonucleotide

SEQ ID NO: 592127 - DNA, 60 bp, Artificial; identical to SEQ ID NO: 431850
  Synthetic oligonucleotide

SEQ ID NO: 592128 - DNA, 60 bp, Artificial; identical to SEQ ID NO: 431852
  Synthetic oligonucleotide

SEQ ID NO: 592129 - DNA, 57 bp, Artificial; identical to SEQ ID NO: 431853
  Synthetic oligonucleotide

SEQ ID NO: 592130 - DNA, 55 bp, Artificial; identical to SEQ ID NO: 10755
  Synthetic oligonucleotide

SEQ ID NO: 592131 - DNA, 50 bp, Artificial; identical to SEQ ID NO: 431854
  Synthetic oligonucleotide

SEQ ID NO: 592132 - DNA, 58 bp, Artificial; identical to SEQ ID NO: 431855
  Synthetic oligonucleotide

SEQ ID NO: 592133 - DNA, 60 bp, Artificial; identical to SEQ ID NO: 6045
  Synthetic oligonucleotide

SEQ ID NO: 592134 - DNA, 57 bp, Artificial; identical to SEQ ID NO: 431859
  Synthetic oligonucleotide

SEQ ID NO: 592135 - DNA, 51 bp, Artificial; identical to SEQ ID NO: 431860
  Synthetic oligonucleotide

SEQ ID NO: 592136 - DNA, 59 bp, Artificial; identical to SEQ ID NO: 431863
  Synthetic oligonucleotide

SEQ ID NO: 592137 - DNA, 55 bp, Artificial; identical to SEQ ID NO: 431864
  Synthetic oligonucleotide

SEQ ID NO: 592138 - DNA, 55 bp, Artificial; identical to SEQ ID NO: 431865
  Synthetic oligonucleotide

SEQ ID NO: 592139 - DNA, 55 bp, Artificial; identical to SEQ ID NO: 431866
  Synthetic oligonucleotide

SEQ ID NO: 592140 - DNA, 60 bp, Artificial; identical to SEQ ID NO: 13532
  Synthetic oligonucleotide

SEQ ID NO: 592141 - DNA, 55 bp, Artificial; identical to SEQ ID NO: 431867
  Synthetic oligonucleotide

SEQ ID NO: 592142 - DNA, 55 bp, Artificial; identical to SEQ ID NO: 431868
  Synthetic oligonucleotide

SEQ ID NO: 592143 - DNA, 60 bp, Artificial; identical to SEQ ID NO: 431882
  Synthetic oligonucleotide

SEQ ID NO: 592144 - DNA, 55 bp, Artificial; identical to SEQ ID NO: 431885
  Synthetic oligonucleotide

SEQ ID NO: 592145 - DNA, 60 bp, Artificial; identical to SEQ ID NO: 431888
  Synthetic oligonucleotide

SEQ ID NO: 592146 - DNA, 60 bp, Artificial; identical to SEQ ID NO: 431890
  Synthetic oligonucleotide

SEQ ID NO: 592147 - DNA, 55 bp, Artificial; identical to SEQ ID NO: 431891
  Synthetic oligonucleotide

SEQ ID NO: 592148 - DNA, 54 bp, Artificial; identical to SEQ ID NO: 16307
  Synthetic oligonucleotide

SEQ ID NO: 592149 - DNA, 52 bp, Artificial; identical to SEQ ID NO: 431899
  Synthetic oligonucleotide

SEQ ID NO: 592150 - DNA, 60 bp, Artificial; identical to SEQ ID NO: 431904
  Synthetic oligonucleotide

SEQ ID NO: 592151 - DNA, 54 bp, Artificial; identical to SEQ ID NO: 431906
  Synthetic oligonucleotide

SEQ ID NO: 592152 - DNA, 50 bp, Artificial; identical to SEQ ID NO: 431908
  Synthetic oligonucleotide

SEQ ID NO: 592153 - DNA, 60 bp, Artificial; identical to SEQ ID NO: 431909
  Synthetic oligonucleotide

SEQ ID NO: 592154 - DNA, 51 bp, Artificial; identical to SEQ ID NO: 431910
  Synthetic oligonucleotide

SEQ ID NO: 592155 - DNA, 52 bp, Artificial; identical to SEQ ID NO: 431911
  Synthetic oligonucleotide

SEQ ID NO: 592156 - DNA, 55 bp, Artificial; identical to SEQ ID NO: 431919
  Synthetic oligonucleotide

SEQ ID NO: 592157 - DNA, 60 bp, Artificial; identical to SEQ ID NO: 431920
  Synthetic oligonucleotide

SEQ ID NO: 592158 - DNA, 55 bp, Artificial; identical to SEQ ID NO: 431922
  Synthetic oligonucleotide

SEQ ID NO: 592159 - DNA, 51 bp, Artificial; identical to SEQ ID NO: 431924
  Synthetic oligonucleotide

SEQ ID NO: 592160 - DNA, 60 bp, Artificial; identical to SEQ ID NO: 431925
  Synthetic oligonucleotide

SEQ ID NO: 592161 - DNA, 56 bp, Artificial; identical to SEQ ID NO: 431930
  Synthetic oligonucleotide

SEQ ID NO: 592162 - DNA, 55 bp, Artificial; identical to SEQ ID NO: 431934
  Synthetic oligonucleotide

SEQ ID NO: 592163 - DNA, 53 bp, Artificial; identical to SEQ ID NO: 431935
  Synthetic oligonucleotide

SEQ ID NO: 592164 - DNA, 55 bp, Artificial; identical to SEQ ID NO: 431936
  Synthetic oligonucleotide

SEQ ID NO: 592165 - DNA, 59 bp, Artificial; identical to SEQ ID NO: 18704
  Synthetic oligonucleotide

SEQ ID NO: 592166 - DNA, 59 bp, Artificial; identical to SEQ ID NO: 431938
  Synthetic oligonucleotide

SEQ ID NO: 592167 - DNA, 55 bp, Artificial; identical to SEQ ID NO: 431942
  Synthetic oligonucleotide

SEQ ID NO: 592168 - DNA, 58 bp, Artificial; identical to SEQ ID NO: 431944
  Synthetic oligonucleotide

SEQ ID NO: 592169 - DNA, 59 bp, Artificial; identical to SEQ ID NO: 431945
  Synthetic oligonucleotide

SEQ ID NO: 592170 - DNA, 60 bp, Artificial; identical to SEQ ID NO: 431947
  Synthetic oligonucleotide

SEQ ID NO: 592171 - DNA, 55 bp, Artificial; identical to SEQ ID NO: 431950
  Synthetic oligonucleotide

SEQ ID NO: 592172 - DNA, 54 bp, Artificial; identical to SEQ ID NO: 431952
  Synthetic oligonucleotide

SEQ ID NO: 592173 - DNA, 52 bp, Artificial; identical to SEQ ID NO: 431953
  Synthetic oligonucleotide

SEQ ID NO: 592174 - DNA, 59 bp, Artificial; identical to SEQ ID NO: 431955
  Synthetic oligonucleotide

SEQ ID NO: 592175 - DNA, 60 bp, Artificial; identical to SEQ ID NO: 12032
  Synthetic oligonucleotide

SEQ ID NO: 592176 - DNA, 55 bp, Artificial; identical to SEQ ID NO: 431957
  Synthetic oligonucleotide

SEQ ID NO: 592177 - DNA, 60 bp, Artificial; identical to SEQ ID NO: 431958
  Synthetic oligonucleotide

SEQ ID NO: 592178 - DNA, 55 bp, Artificial; identical to SEQ ID NO: 431966
  Synthetic oligonucleotide

SEQ ID NO: 592179 - DNA, 54 bp, Artificial; identical to SEQ ID NO: 431967
  Synthetic oligonucleotide

SEQ ID NO: 592180 - DNA, 60 bp, Artificial; identical to SEQ ID NO: 431977
  Synthetic oligonucleotide

SEQ ID NO: 592181 - DNA, 60 bp, Artificial; identical to SEQ ID NO: 431979
  Synthetic oligonucleotide

SEQ ID NO: 592182 - DNA, 55 bp, Artificial; identical to SEQ ID NO: 431980
  Synthetic oligonucleotide

SEQ ID NO: 592183 - DNA, 55 bp, Artificial; identical to SEQ ID NO: 431982
  Synthetic oligonucleotide

SEQ ID NO: 592184 - DNA, 55 bp, Artificial; identical to SEQ ID NO: 431983
  Synthetic oligonucleotide

SEQ ID NO: 592185 - DNA, 55 bp, Artificial; identical to SEQ ID NO: 431985
  Synthetic oligonucleotide

SEQ ID NO: 592186 - DNA, 55 bp, Artificial; identical to SEQ ID NO: 431986
  Synthetic oligonucleotide

SEQ ID NO: 592187 - DNA, 55 bp, Artificial; identical to SEQ ID NO: 431987
  Synthetic oligonucleotide

SEQ ID NO: 592188 - DNA, 58 bp, Artificial; identical to SEQ ID NO: 431988
  Synthetic oligonucleotide

SEQ ID NO: 592189 - DNA, 58 bp, Artificial; identical to SEQ ID NO: 431990
  Synthetic oligonucleotide

SEQ ID NO: 592190 - DNA, 55 bp, Artificial; identical to SEQ ID NO: 431998
  Synthetic oligonucleotide

SEQ ID NO: 592191 - DNA, 60 bp, Artificial; identical to SEQ ID NO: 432000
  Synthetic oligonucleotide

SEQ ID NO: 592192 - DNA, 60 bp, Artificial; identical to SEQ ID NO: 432001
  Synthetic oligonucleotide

SEQ ID NO: 592193 - DNA, 60 bp, Artificial; identical to SEQ ID NO: 432003
  Synthetic oligonucleotide

SEQ ID NO: 592194 - DNA, 55 bp, Artificial; identical to SEQ ID NO: 432004
  Synthetic oligonucleotide

SEQ ID NO: 592195 - DNA, 60 bp, Artificial; identical to SEQ ID NO: 432005
  Synthetic oligonucleotide

SEQ ID NO: 592196 - DNA, 60 bp, Artificial; identical to SEQ ID NO: 432006
  Synthetic oligonucleotide

SEQ ID NO: 592197 - DNA, 51 bp, Artificial; identical to SEQ ID NO: 432009
  Synthetic oligonucleotide

SEQ ID NO: 592198 - DNA, 55 bp, Artificial; identical to SEQ ID NO: 432010
  Synthetic oligonucleotide

SEQ ID NO: 592199 - DNA, 55 bp, Artificial; identical to SEQ ID NO: 432011
  Synthetic oligonucleotide

SEQ ID NO: 592200 - DNA, 60 bp, Artificial; identical to SEQ ID NO: 432012
  Synthetic oligonucleotide

SEQ ID NO: 592201 - DNA, 55 bp, Artificial; identical to SEQ ID NO: 432015
  Synthetic oligonucleotide

SEQ ID NO: 592202 - DNA, 59 bp, Artificial; identical to SEQ ID NO: 432016
  Synthetic oligonucleotide

SEQ ID NO: 592203 - DNA, 60 bp, Artificial; identical to SEQ ID NO: 432019
  Synthetic oligonucleotide

SEQ ID NO: 592204 - DNA, 55 bp, Artificial; identical to SEQ ID NO: 432023
  Synthetic oligonucleotide

SEQ ID NO: 592205 - DNA, 51 bp, Artificial; identical to SEQ ID NO: 432024
  Synthetic oligonucleotide

SEQ ID NO: 592206 - DNA, 60 bp, Artificial; identical to SEQ ID NO: 432033
  Synthetic oligonucleotide

SEQ ID NO: 592207 - DNA, 55 bp, Artificial; identical to SEQ ID NO: 432037
  Synthetic oligonucleotide

SEQ ID NO: 592208 - DNA, 53 bp, Artificial; identical to SEQ ID NO: 432039
  Synthetic oligonucleotide

SEQ ID NO: 592209 - DNA, 60 bp, Artificial; identical to SEQ ID NO: 432040
  Synthetic oligonucleotide

SEQ ID NO: 592210 - DNA, 55 bp, Artificial; identical to SEQ ID NO: 432041
  Synthetic oligonucleotide

SEQ ID NO: 592211 - DNA, 55 bp, Artificial; identical to SEQ ID NO: 432045
  Synthetic oligonucleotide

SEQ ID NO: 592212 - DNA, 58 bp, Artificial; identical to SEQ ID NO: 432047
  Synthetic oligonucleotide

SEQ ID NO: 592213 - DNA, 60 bp, Artificial; identical to SEQ ID NO: 432054
  Synthetic oligonucleotide

SEQ ID NO: 592214 - DNA, 56 bp, Artificial; identical to SEQ ID NO: 10355
  Synthetic oligonucleotide

SEQ ID NO: 592215 - DNA, 60 bp, Artificial; identical to SEQ ID NO: 432060
  Synthetic oligonucleotide

SEQ ID NO: 592216 - DNA, 54 bp, Artificial; identical to SEQ ID NO: 432064
  Synthetic oligonucleotide

SEQ ID NO: 592217 - DNA, 60 bp, Artificial; identical to SEQ ID NO: 432068
  Synthetic oligonucleotide

SEQ ID NO: 592218 - DNA, 56 bp, Artificial; identical to SEQ ID NO: 432073
  Synthetic oligonucleotide

SEQ ID NO: 592219 - DNA, 55 bp, Artificial; identical to SEQ ID NO: 432075
  Synthetic oligonucleotide

SEQ ID NO: 592220 - DNA, 60 bp, Artificial; identical to SEQ ID NO: 432079
  Synthetic oligonucleotide

SEQ ID NO: 592221 - DNA, 55 bp, Artificial; identical to SEQ ID NO: 432080
  Synthetic oligonucleotide

SEQ ID NO: 592222 - DNA, 55 bp, Artificial; identical to SEQ ID NO: 432082
  Synthetic oligonucleotide

SEQ ID NO: 592223 - DNA, 60 bp, Artificial; identical to SEQ ID NO: 432083
  Synthetic oligonucleotide

SEQ ID NO: 592224 - DNA, 59 bp, Artificial; identical to SEQ ID NO: 432084
  Synthetic oligonucleotide

SEQ ID NO: 592225 - DNA, 55 bp, Artificial; identical to SEQ ID NO: 432085
  Synthetic oligonucleotide

SEQ ID NO: 592226 - DNA, 58 bp, Artificial; identical to SEQ ID NO: 432087
  Synthetic oligonucleotide

SEQ ID NO: 592227 - DNA, 60 bp, Artificial; identical to SEQ ID NO: 432088
  Synthetic oligonucleotide

SEQ ID NO: 592228 - DNA, 58 bp, Artificial; identical to SEQ ID NO: 432089
  Synthetic oligonucleotide

SEQ ID NO: 592229 - DNA, 56 bp, Artificial; identical to SEQ ID NO: 10277
  Synthetic oligonucleotide

SEQ ID NO: 592230 - DNA, 59 bp, Artificial; identical to SEQ ID NO: 432090
  Synthetic oligonucleotide

SEQ ID NO: 592231 - DNA, 54 bp, Artificial; identical to SEQ ID NO: 432093
  Synthetic oligonucleotide

SEQ ID NO: 592232 - DNA, 55 bp, Artificial; identical to SEQ ID NO: 432094
  Synthetic oligonucleotide

SEQ ID NO: 592233 - DNA, 55 bp, Artificial; identical to SEQ ID NO: 432096
  Synthetic oligonucleotide

SEQ ID NO: 592234 - DNA, 59 bp, Artificial; identical to SEQ ID NO: 432097
  Synthetic oligonucleotide

SEQ ID NO: 592235 - DNA, 55 bp, Artificial; identical to SEQ ID NO: 432098
  Synthetic oligonucleotide

SEQ ID NO: 592236 - DNA, 55 bp, Artificial; identical to SEQ ID NO: 432099
  Synthetic oligonucleotide

SEQ ID NO: 592237 - DNA, 53 bp, Artificial; identical to SEQ ID NO: 432100
  Synthetic oligonucleotide

SEQ ID NO: 592238 - DNA, 53 bp, Artificial; identical to SEQ ID NO: 432102
  Synthetic oligonucleotide

SEQ ID NO: 592239 - DNA, 55 bp, Artificial; identical to SEQ ID NO: 432103
  Synthetic oligonucleotide

SEQ ID NO: 592240 - DNA, 55 bp, Artificial; identical to SEQ ID NO: 432105
  Synthetic oligonucleotide

SEQ ID NO: 592241 - DNA, 49 bp, Artificial; identical to SEQ ID NO: 432106
  Synthetic oligonucleotide

SEQ ID NO: 592242 - DNA, 55 bp, Artificial; identical to SEQ ID NO: 432107
  Synthetic oligonucleotide

SEQ ID NO: 592243 - DNA, 55 bp, Artificial; identical to SEQ ID NO: 432112
  Synthetic oligonucleotide

SEQ ID NO: 592244 - DNA, 54 bp, Artificial; identical to SEQ ID NO: 432114
  Synthetic oligonucleotide

SEQ ID NO: 592245 - DNA, 56 bp, Artificial; identical to SEQ ID NO: 432119
  Synthetic oligonucleotide

SEQ ID NO: 592246 - DNA, 60 bp, Artificial; identical to SEQ ID NO: 432120
  Synthetic oligonucleotide

SEQ ID NO: 592247 - DNA, 55 bp, Artificial; identical to SEQ ID NO: 432121
  Synthetic oligonucleotide

SEQ ID NO: 592248 - DNA, 56 bp, Artificial; identical to SEQ ID NO: 432125
  Synthetic oligonucleotide

SEQ ID NO: 592249 - DNA, 57 bp, Artificial; identical to SEQ ID NO: 432126
  Synthetic oligonucleotide

SEQ ID NO: 592250 - DNA, 59 bp, Artificial; identical to SEQ ID NO: 432131
  Synthetic oligonucleotide

SEQ ID NO: 592251 - DNA, 59 bp, Artificial; identical to SEQ ID NO: 432132
  Synthetic oligonucleotide

SEQ ID NO: 592252 - DNA, 60 bp, Artificial; identical to SEQ ID NO: 432133
  Synthetic oligonucleotide

SEQ ID NO: 592253 - DNA, 60 bp, Artificial; identical to SEQ ID NO: 432134
  Synthetic oligonucleotide

SEQ ID NO: 592254 - DNA, 60 bp, Artificial; identical to SEQ ID NO: 432135
  Synthetic oligonucleotide

SEQ ID NO: 592255 - DNA, 55 bp, Artificial; identical to SEQ ID NO: 432136
  Synthetic oligonucleotide

SEQ ID NO: 592256 - DNA, 55 bp, Artificial; identical to SEQ ID NO: 432148
  Synthetic oligonucleotide

SEQ ID NO: 592257 - DNA, 60 bp, Artificial; identical to SEQ ID NO: 432149
  Synthetic oligonucleotide

SEQ ID NO: 592258 - DNA, 56 bp, Artificial; identical to SEQ ID NO: 432150
  Synthetic oligonucleotide

SEQ ID NO: 592259 - DNA, 58 bp, Artificial; identical to SEQ ID NO: 432157
  Synthetic oligonucleotide

SEQ ID NO: 592260 - DNA, 59 bp, Artificial; identical to SEQ ID NO: 432158
  Synthetic oligonucleotide

SEQ ID NO: 592261 - DNA, 60 bp, Artificial; identical to SEQ ID NO: 432159
  Synthetic oligonucleotide

SEQ ID NO: 592262 - DNA, 55 bp, Artificial; identical to SEQ ID NO: 432160
  Synthetic oligonucleotide

SEQ ID NO: 592263 - DNA, 60 bp, Artificial; identical to SEQ ID NO: 432162
  Synthetic oligonucleotide

SEQ ID NO: 592264 - DNA, 55 bp, Artificial; identical to SEQ ID NO: 432165
  Synthetic oligonucleotide

SEQ ID NO: 592265 - DNA, 55 bp, Artificial; identical to SEQ ID NO: 432167
  Synthetic oligonucleotide

SEQ ID NO: 592266 - DNA, 55 bp, Artificial; identical to SEQ ID NO: 432169
  Synthetic oligonucleotide

SEQ ID NO: 592267 - DNA, 60 bp, Artificial; identical to SEQ ID NO: 432173
  Synthetic oligonucleotide

SEQ ID NO: 592268 - DNA, 55 bp, Artificial; identical to SEQ ID NO: 432180
  Synthetic oligonucleotide

SEQ ID NO: 592269 - DNA, 53 bp, Artificial; identical to SEQ ID NO: 432182
  Synthetic oligonucleotide

SEQ ID NO: 592270 - DNA, 55 bp, Artificial; identical to SEQ ID NO: 432183
  Synthetic oligonucleotide

SEQ ID NO: 592271 - DNA, 58 bp, Artificial; identical to SEQ ID NO: 432190
  Synthetic oligonucleotide

SEQ ID NO: 592272 - DNA, 55 bp, Artificial; identical to SEQ ID NO: 432191
  Synthetic oligonucleotide

SEQ ID NO: 592273 - DNA, 55 bp, Artificial; identical to SEQ ID NO: 432192
  Synthetic oligonucleotide

SEQ ID NO: 592274 - DNA, 55 bp, Artificial; identical to SEQ ID NO: 432193
  Synthetic oligonucleotide

SEQ ID NO: 592275 - DNA, 55 bp, Artificial; identical to SEQ ID NO: 432197
  Synthetic oligonucleotide

SEQ ID NO: 592276 - DNA, 59 bp, Artificial; identical to SEQ ID NO: 432198
  Synthetic oligonucleotide

SEQ ID NO: 592277 - DNA, 55 bp, Artificial; identical to SEQ ID NO: 432202
  Synthetic oligonucleotide

SEQ ID NO: 592278 - DNA, 55 bp, Artificial; identical to SEQ ID NO: 432203
  Synthetic oligonucleotide

SEQ ID NO: 592279 - DNA, 55 bp, Artificial; identical to SEQ ID NO: 432204
  Synthetic oligonucleotide

SEQ ID NO: 592280 - DNA, 56 bp, Artificial; identical to SEQ ID NO: 432206
  Synthetic oligonucleotide

SEQ ID NO: 592281 - DNA, 60 bp, Artificial; identical to SEQ ID NO: 432207
  Synthetic oligonucleotide

SEQ ID NO: 592282 - DNA, 55 bp, Artificial; identical to SEQ ID NO: 432208
  Synthetic oligonucleotide

SEQ ID NO: 592283 - DNA, 55 bp, Artificial; identical to SEQ ID NO: 432209
  Synthetic oligonucleotide

SEQ ID NO: 592284 - DNA, 55 bp, Artificial; identical to SEQ ID NO: 432211
  Synthetic oligonucleotide

SEQ ID NO: 592285 - DNA, 55 bp, Artificial; identical to SEQ ID NO: 432214
  Synthetic oligonucleotide

SEQ ID NO: 592286 - DNA, 60 bp, Artificial; identical to SEQ ID NO: 432217
  Synthetic oligonucleotide

SEQ ID NO: 592287 - DNA, 58 bp, Artificial; identical to SEQ ID NO: 432218
  Synthetic oligonucleotide

SEQ ID NO: 592288 - DNA, 55 bp, Artificial; identical to SEQ ID NO: 432219
  Synthetic oligonucleotide

SEQ ID NO: 592289 - DNA, 55 bp, Artificial; identical to SEQ ID NO: 432221
  Synthetic oligonucleotide

SEQ ID NO: 592290 - DNA, 57 bp, Artificial; identical to SEQ ID NO: 432222
  Synthetic oligonucleotide

SEQ ID NO: 592291 - DNA, 60 bp, Artificial; identical to SEQ ID NO: 432223
  Synthetic oligonucleotide

SEQ ID NO: 592292 - DNA, 56 bp, Artificial; identical to SEQ ID NO: 432224
  Synthetic oligonucleotide

SEQ ID NO: 592293 - DNA, 59 bp, Artificial; identical to SEQ ID NO: 432228
  Synthetic oligonucleotide

SEQ ID NO: 592294 - DNA, 57 bp, Artificial; identical to SEQ ID NO: 432229
  Synthetic oligonucleotide

SEQ ID NO: 592295 - DNA, 53 bp, Artificial; identical to SEQ ID NO: 432231
  Synthetic oligonucleotide

SEQ ID NO: 592296 - DNA, 54 bp, Artificial; identical to SEQ ID NO: 432232
  Synthetic oligonucleotide

SEQ ID NO: 592297 - DNA, 52 bp, Artificial; identical to SEQ ID NO: 432234
  Synthetic oligonucleotide

SEQ ID NO: 592298 - DNA, 55 bp, Artificial; identical to SEQ ID NO: 432235
  Synthetic oligonucleotide

SEQ ID NO: 592299 - DNA, 60 bp, Artificial; identical to SEQ ID NO: 432237
  Synthetic oligonucleotide

SEQ ID NO: 592300 - DNA, 55 bp, Artificial; identical to SEQ ID NO: 432239
  Synthetic oligonucleotide

SEQ ID NO: 592301 - DNA, 59 bp, Artificial; identical to SEQ ID NO: 432241
  Synthetic oligonucleotide

SEQ ID NO: 592302 - DNA, 55 bp, Artificial; identical to SEQ ID NO: 432244
  Synthetic oligonucleotide

SEQ ID NO: 592303 - DNA, 60 bp, Artificial; identical to SEQ ID NO: 432245
  Synthetic oligonucleotide

SEQ ID NO: 592304 - DNA, 60 bp, Artificial; identical to SEQ ID NO: 432246
  Synthetic oligonucleotide

SEQ ID NO: 592305 - DNA, 60 bp, Artificial; identical to SEQ ID NO: 432247
  Synthetic oligonucleotide

SEQ ID NO: 592306 - DNA, 55 bp, Artificial; identical to SEQ ID NO: 432251
  Synthetic oligonucleotide

SEQ ID NO: 592307 - DNA, 56 bp, Artificial; identical to SEQ ID NO: 432252
  Synthetic oligonucleotide

SEQ ID NO: 592308 - DNA, 55 bp, Artificial; identical to SEQ ID NO: 432255
  Synthetic oligonucleotide

SEQ ID NO: 592309 - DNA, 55 bp, Artificial; identical to SEQ ID NO: 432256
  Synthetic oligonucleotide

SEQ ID NO: 592310 - DNA, 52 bp, Artificial; identical to SEQ ID NO: 432258
  Synthetic oligonucleotide

SEQ ID NO: 592311 - DNA, 60 bp, Artificial; identical to SEQ ID NO: 432261
  Synthetic oligonucleotide

SEQ ID NO: 592312 - DNA, 55 bp, Artificial; identical to SEQ ID NO: 432263
  Synthetic oligonucleotide

SEQ ID NO: 592313 - DNA, 55 bp, Artificial; identical to SEQ ID NO: 432267
  Synthetic oligonucleotide

SEQ ID NO: 592314 - DNA, 54 bp, Artificial; identical to SEQ ID NO: 432269
  Synthetic oligonucleotide

SEQ ID NO: 592315 - DNA, 55 bp, Artificial; identical to SEQ ID NO: 432272
  Synthetic oligonucleotide

SEQ ID NO: 592316 - DNA, 53 bp, Artificial; identical to SEQ ID NO: 432274
  Synthetic oligonucleotide

SEQ ID NO: 592317 - DNA, 55 bp, Artificial; identical to SEQ ID NO: 432275
  Synthetic oligonucleotide

SEQ ID NO: 592318 - DNA, 55 bp, Artificial; identical to SEQ ID NO: 432277
  Synthetic oligonucleotide

SEQ ID NO: 592319 - DNA, 57 bp, Artificial; identical to SEQ ID NO: 432280
  Synthetic oligonucleotide

SEQ ID NO: 592320 - DNA, 60 bp, Artificial; identical to SEQ ID NO: 432284
  Synthetic oligonucleotide

SEQ ID NO: 592321 - DNA, 55 bp, Artificial; identical to SEQ ID NO: 432286
  Synthetic oligonucleotide

SEQ ID NO: 592322 - DNA, 56 bp, Artificial; identical to SEQ ID NO: 432287
  Synthetic oligonucleotide

SEQ ID NO: 592323 - DNA, 59 bp, Artificial; identical to SEQ ID NO: 432289
  Synthetic oligonucleotide

SEQ ID NO: 592324 - DNA, 55 bp, Artificial; identical to SEQ ID NO: 432291
  Synthetic oligonucleotide

SEQ ID NO: 592325 - DNA, 54 bp, Artificial; identical to SEQ ID NO: 432292
  Synthetic oligonucleotide

SEQ ID NO: 592326 - DNA, 52 bp, Artificial; identical to SEQ ID NO: 432301
  Synthetic oligonucleotide

SEQ ID NO: 592327 - DNA, 60 bp, Artificial; identical to SEQ ID NO: 432303
  Synthetic oligonucleotide

SEQ ID NO: 592328 - DNA, 53 bp, Artificial; identical to SEQ ID NO: 432304
  Synthetic oligonucleotide

SEQ ID NO: 592329 - DNA, 55 bp, Artificial; identical to SEQ ID NO: 432305
  Synthetic oligonucleotide

SEQ ID NO: 592330 - DNA, 50 bp, Artificial; identical to SEQ ID NO: 432306
  Synthetic oligonucleotide

SEQ ID NO: 592331 - DNA, 54 bp, Artificial; identical to SEQ ID NO: 432310
  Synthetic oligonucleotide

SEQ ID NO: 592332 - DNA, 60 bp, Artificial; identical to SEQ ID NO: 432312
  Synthetic oligonucleotide

SEQ ID NO: 592333 - DNA, 60 bp, Artificial; identical to SEQ ID NO: 432314
  Synthetic oligonucleotide

SEQ ID NO: 592334 - DNA, 55 bp, Artificial; identical to SEQ ID NO: 432316
  Synthetic oligonucleotide

SEQ ID NO: 592335 - DNA, 51 bp, Artificial; identical to SEQ ID NO: 432318
  Synthetic oligonucleotide

SEQ ID NO: 592336 - DNA, 59 bp, Artificial; identical to SEQ ID NO: 432320
  Synthetic oligonucleotide

SEQ ID NO: 592337 - DNA, 58 bp, Artificial; identical to SEQ ID NO: 432321
  Synthetic oligonucleotide

SEQ ID NO: 592338 - DNA, 55 bp, Artificial; identical to SEQ ID NO: 432324
  Synthetic oligonucleotide

SEQ ID NO: 592339 - DNA, 60 bp, Artificial; identical to SEQ ID NO: 432326
  Synthetic oligonucleotide

SEQ ID NO: 592340 - DNA, 60 bp, Artificial; identical to SEQ ID NO: 432334
  Synthetic oligonucleotide

SEQ ID NO: 592341 - DNA, 55 bp, Artificial; identical to SEQ ID NO: 432338
  Synthetic oligonucleotide

SEQ ID NO: 592342 - DNA, 60 bp, Artificial; identical to SEQ ID NO: 432344
  Synthetic oligonucleotide

SEQ ID NO: 592343 - DNA, 57 bp, Artificial; identical to SEQ ID NO: 432345
  Synthetic oligonucleotide

SEQ ID NO: 592344 - DNA, 54 bp, Artificial; identical to SEQ ID NO: 432346
  Synthetic oligonucleotide

SEQ ID NO: 592345 - DNA, 55 bp, Artificial; identical to SEQ ID NO: 432349
  Synthetic oligonucleotide

SEQ ID NO: 592346 - DNA, 59 bp, Artificial; identical to SEQ ID NO: 432350
  Synthetic oligonucleotide

SEQ ID NO: 592347 - DNA, 55 bp, Artificial; identical to SEQ ID NO: 432354
  Synthetic oligonucleotide

SEQ ID NO: 592348 - DNA, 55 bp, Artificial; identical to SEQ ID NO: 432359
  Synthetic oligonucleotide

SEQ ID NO: 592349 - DNA, 54 bp, Artificial; identical to SEQ ID NO: 432361
  Synthetic oligonucleotide

SEQ ID NO: 592350 - DNA, 53 bp, Artificial; identical to SEQ ID NO: 432362
  Synthetic oligonucleotide

SEQ ID NO: 592351 - DNA, 55 bp, Artificial; identical to SEQ ID NO: 432365
  Synthetic oligonucleotide

SEQ ID NO: 592352 - DNA, 55 bp, Artificial; identical to SEQ ID NO: 432367
  Synthetic oligonucleotide

SEQ ID NO: 592353 - DNA, 60 bp, Artificial; identical to SEQ ID NO: 432369
  Synthetic oligonucleotide

SEQ ID NO: 592354 - DNA, 53 bp, Artificial; identical to SEQ ID NO: 432370
  Synthetic oligonucleotide

SEQ ID NO: 592355 - DNA, 57 bp, Artificial; identical to SEQ ID NO: 17018
  Synthetic oligonucleotide

SEQ ID NO: 592356 - DNA, 59 bp, Artificial; identical to SEQ ID NO: 432373
  Synthetic oligonucleotide

SEQ ID NO: 592357 - DNA, 58 bp, Artificial; identical to SEQ ID NO: 432374
  Synthetic oligonucleotide

SEQ ID NO: 592358 - DNA, 57 bp, Artificial; identical to SEQ ID NO: 432377
  Synthetic oligonucleotide

SEQ ID NO: 592359 - DNA, 50 bp, Artificial; identical to SEQ ID NO: 432380
  Synthetic oligonucleotide

SEQ ID NO: 592360 - DNA, 60 bp, Artificial; identical to SEQ ID NO: 432391
  Synthetic oligonucleotide

SEQ ID NO: 592361 - DNA, 51 bp, Artificial; identical to SEQ ID NO: 432392
  Synthetic oligonucleotide

SEQ ID NO: 592362 - DNA, 57 bp, Artificial; identical to SEQ ID NO: 432393
  Synthetic oligonucleotide

SEQ ID NO: 592363 - DNA, 60 bp, Artificial; identical to SEQ ID NO: 432399
  Synthetic oligonucleotide

SEQ ID NO: 592364 - DNA, 59 bp, Artificial; identical to SEQ ID NO: 432401
  Synthetic oligonucleotide

SEQ ID NO: 592365 - DNA, 60 bp, Artificial; identical to SEQ ID NO: 432402
  Synthetic oligonucleotide

SEQ ID NO: 592366 - DNA, 60 bp, Artificial; identical to SEQ ID NO: 432407
  Synthetic oligonucleotide

SEQ ID NO: 592367 - DNA, 55 bp, Artificial; identical to SEQ ID NO: 432408
  Synthetic oligonucleotide

SEQ ID NO: 592368 - DNA, 55 bp, Artificial; identical to SEQ ID NO: 432409
  Synthetic oligonucleotide

SEQ ID NO: 592369 - DNA, 58 bp, Artificial; identical to SEQ ID NO: 432410
  Synthetic oligonucleotide

SEQ ID NO: 592370 - DNA, 59 bp, Artificial; identical to SEQ ID NO: 432411
  Synthetic oligonucleotide

SEQ ID NO: 592371 - DNA, 55 bp, Artificial; identical to SEQ ID NO: 432414
  Synthetic oligonucleotide

SEQ ID NO: 592372 - DNA, 55 bp, Artificial; identical to SEQ ID NO: 432416
  Synthetic oligonucleotide

SEQ ID NO: 592373 - DNA, 55 bp, Artificial; identical to SEQ ID NO: 432422
  Synthetic oligonucleotide

SEQ ID NO: 592374 - DNA, 53 bp, Artificial; identical to SEQ ID NO: 432425
  Synthetic oligonucleotide

SEQ ID NO: 592375 - DNA, 55 bp, Artificial; identical to SEQ ID NO: 432426
  Synthetic oligonucleotide

SEQ ID NO: 592376 - DNA, 54 bp, Artificial; identical to SEQ ID NO: 432427
  Synthetic oligonucleotide

SEQ ID NO: 592377 - DNA, 58 bp, Artificial; identical to SEQ ID NO: 432432
  Synthetic oligonucleotide

SEQ ID NO: 592378 - DNA, 55 bp, Artificial; identical to SEQ ID NO: 432434
  Synthetic oligonucleotide

SEQ ID NO: 592379 - DNA, 59 bp, Artificial; identical to SEQ ID NO: 432435
  Synthetic oligonucleotide

SEQ ID NO: 592380 - DNA, 55 bp, Artificial; identical to SEQ ID NO: 432445
  Synthetic oligonucleotide

SEQ ID NO: 592381 - DNA, 55 bp, Artificial; identical to SEQ ID NO: 432450
  Synthetic oligonucleotide

SEQ ID NO: 592382 - DNA, 55 bp, Artificial; identical to SEQ ID NO: 432451
  Synthetic oligonucleotide

SEQ ID NO: 592383 - DNA, 53 bp, Artificial; identical to SEQ ID NO: 432452
  Synthetic oligonucleotide

SEQ ID NO: 592384 - DNA, 55 bp, Artificial; identical to SEQ ID NO: 432454
  Synthetic oligonucleotide

SEQ ID NO: 592385 - DNA, 55 bp, Artificial; identical to SEQ ID NO: 432458
  Synthetic oligonucleotide

SEQ ID NO: 592386 - DNA, 60 bp, Artificial; identical to SEQ ID NO: 432460
  Synthetic oligonucleotide

SEQ ID NO: 592387 - DNA, 60 bp, Artificial; identical to SEQ ID NO: 31431
  Synthetic oligonucleotide

SEQ ID NO: 592388 - DNA, 60 bp, Artificial; identical to SEQ ID NO: 432462
  Synthetic oligonucleotide

SEQ ID NO: 592389 - DNA, 55 bp, Artificial; identical to SEQ ID NO: 432466
  Synthetic oligonucleotide

SEQ ID NO: 592390 - DNA, 51 bp, Artificial; identical to SEQ ID NO: 432468
  Synthetic oligonucleotide

SEQ ID NO: 592391 - DNA, 59 bp, Artificial; identical to SEQ ID NO: 432472
  Synthetic oligonucleotide

SEQ ID NO: 592392 - DNA, 59 bp, Artificial; identical to SEQ ID NO: 432474
  Synthetic oligonucleotide

SEQ ID NO: 592393 - DNA, 55 bp, Artificial; identical to SEQ ID NO: 432477
  Synthetic oligonucleotide

SEQ ID NO: 592394 - DNA, 60 bp, Artificial; identical to SEQ ID NO: 432478
  Synthetic oligonucleotide

SEQ ID NO: 592395 - DNA, 57 bp, Artificial; identical to SEQ ID NO: 432479
  Synthetic oligonucleotide

SEQ ID NO: 592396 - DNA, 54 bp, Artificial; identical to SEQ ID NO: 432481
  Synthetic oligonucleotide

SEQ ID NO: 592397 - DNA, 55 bp, Artificial; identical to SEQ ID NO: 432484
  Synthetic oligonucleotide

SEQ ID NO: 592398 - DNA, 51 bp, Artificial; identical to SEQ ID NO: 432485
  Synthetic oligonucleotide

SEQ ID NO: 592399 - DNA, 60 bp, Artificial; identical to SEQ ID NO: 432488
  Synthetic oligonucleotide

SEQ ID NO: 592400 - DNA, 55 bp, Artificial; identical to SEQ ID NO: 432492
  Synthetic oligonucleotide

SEQ ID NO: 592401 - DNA, 60 bp, Artificial; identical to SEQ ID NO: 432495
  Synthetic oligonucleotide

SEQ ID NO: 592402 - DNA, 54 bp, Artificial; identical to SEQ ID NO: 432496
  Synthetic oligonucleotide

SEQ ID NO: 592403 - DNA, 55 bp, Artificial; identical to SEQ ID NO: 432497
  Synthetic oligonucleotide

SEQ ID NO: 592404 - DNA, 55 bp, Artificial; identical to SEQ ID NO: 432499
  Synthetic oligonucleotide

SEQ ID NO: 592405 - DNA, 57 bp, Artificial; identical to SEQ ID NO: 432500
  Synthetic oligonucleotide

SEQ ID NO: 592406 - DNA, 60 bp, Artificial; identical to SEQ ID NO: 11875
  Synthetic oligonucleotide

SEQ ID NO: 592407 - DNA, 55 bp, Artificial; identical to SEQ ID NO: 16383
  Synthetic oligonucleotide

SEQ ID NO: 592408 - DNA, 55 bp, Artificial; identical to SEQ ID NO: 432510
  Synthetic oligonucleotide

SEQ ID NO: 592409 - DNA, 57 bp, Artificial; identical to SEQ ID NO: 20588
  Synthetic oligonucleotide

SEQ ID NO: 592410 - DNA, 55 bp, Artificial; identical to SEQ ID NO: 432511
  Synthetic oligonucleotide

SEQ ID NO: 592411 - DNA, 60 bp, Artificial; identical to SEQ ID NO: 432514
  Synthetic oligonucleotide

SEQ ID NO: 592412 - DNA, 55 bp, Artificial; identical to SEQ ID NO: 432516
  Synthetic oligonucleotide

SEQ ID NO: 592413 - DNA, 60 bp, Artificial; identical to SEQ ID NO: 432517
  Synthetic oligonucleotide

SEQ ID NO: 592414 - DNA, 55 bp, Artificial; identical to SEQ ID NO: 432521
  Synthetic oligonucleotide

SEQ ID NO: 592415 - DNA, 58 bp, Artificial; identical to SEQ ID NO: 432525
  Synthetic oligonucleotide

SEQ ID NO: 592416 - DNA, 55 bp, Artificial; identical to SEQ ID NO: 432528
  Synthetic oligonucleotide

SEQ ID NO: 592417 - DNA, 52 bp, Artificial; identical to SEQ ID NO: 432530
  Synthetic oligonucleotide

SEQ ID NO: 592418 - DNA, 55 bp, Artificial; identical to SEQ ID NO: 432536
  Synthetic oligonucleotide

SEQ ID NO: 592419 - DNA, 58 bp, Artificial; identical to SEQ ID NO: 432537
  Synthetic oligonucleotide

SEQ ID NO: 592420 - DNA, 55 bp, Artificial; identical to SEQ ID NO: 432540
  Synthetic oligonucleotide

SEQ ID NO: 592421 - DNA, 59 bp, Artificial; identical to SEQ ID NO: 432541
  Synthetic oligonucleotide

SEQ ID NO: 592422 - DNA, 53 bp, Artificial; identical to SEQ ID NO: 432542
  Synthetic oligonucleotide

SEQ ID NO: 592423 - DNA, 59 bp, Artificial; identical to SEQ ID NO: 432544
  Synthetic oligonucleotide

SEQ ID NO: 592424 - DNA, 60 bp, Artificial; identical to SEQ ID NO: 432546
  Synthetic oligonucleotide

SEQ ID NO: 592425 - DNA, 60 bp, Artificial; identical to SEQ ID NO: 432547
  Synthetic oligonucleotide

SEQ ID NO: 592426 - DNA, 55 bp, Artificial; identical to SEQ ID NO: 432548
  Synthetic oligonucleotide

SEQ ID NO: 592427 - DNA, 60 bp, Artificial; identical to SEQ ID NO: 432550
  Synthetic oligonucleotide

SEQ ID NO: 592428 - DNA, 55 bp, Artificial; identical to SEQ ID NO: 432555
  Synthetic oligonucleotide

SEQ ID NO: 592429 - DNA, 54 bp, Artificial; identical to SEQ ID NO: 432556
  Synthetic oligonucleotide

SEQ ID NO: 592430 - DNA, 55 bp, Artificial; identical to SEQ ID NO: 432558
  Synthetic oligonucleotide

SEQ ID NO: 592431 - DNA, 54 bp, Artificial; identical to SEQ ID NO: 432564
  Synthetic oligonucleotide

SEQ ID NO: 592432 - DNA, 55 bp, Artificial; identical to SEQ ID NO: 432565
  Synthetic oligonucleotide

SEQ ID NO: 592433 - DNA, 55 bp, Artificial; identical to SEQ ID NO: 432568
  Synthetic oligonucleotide

SEQ ID NO: 592434 - DNA, 55 bp, Artificial; identical to SEQ ID NO: 432572
  Synthetic oligonucleotide

SEQ ID NO: 592435 - DNA, 55 bp, Artificial; identical to SEQ ID NO: 432575
  Synthetic oligonucleotide

SEQ ID NO: 592436 - DNA, 55 bp, Artificial; identical to SEQ ID NO: 432577
  Synthetic oligonucleotide

SEQ ID NO: 592437 - DNA, 58 bp, Artificial; identical to SEQ ID NO: 432579
  Synthetic oligonucleotide

SEQ ID NO: 592438 - DNA, 55 bp, Artificial; identical to SEQ ID NO: 432580
  Synthetic oligonucleotide

SEQ ID NO: 592439 - DNA, 55 bp, Artificial; identical to SEQ ID NO: 432583
  Synthetic oligonucleotide

SEQ ID NO: 592440 - DNA, 59 bp, Artificial; identical to SEQ ID NO: 432585
  Synthetic oligonucleotide

SEQ ID NO: 592441 - DNA, 60 bp, Artificial; identical to SEQ ID NO: 432587
  Synthetic oligonucleotide

SEQ ID NO: 592442 - DNA, 55 bp, Artificial; identical to SEQ ID NO: 432590
  Synthetic oligonucleotide

SEQ ID NO: 592443 - DNA, 58 bp, Artificial; identical to SEQ ID NO: 432592
  Synthetic oligonucleotide

SEQ ID NO: 592444 - DNA, 55 bp, Artificial; identical to SEQ ID NO: 432595
  Synthetic oligonucleotide

SEQ ID NO: 592445 - DNA, 53 bp, Artificial; identical to SEQ ID NO: 432596
  Synthetic oligonucleotide

SEQ ID NO: 592446 - DNA, 55 bp, Artificial; identical to SEQ ID NO: 432598
  Synthetic oligonucleotide

SEQ ID NO: 592447 - DNA, 52 bp, Artificial; identical to SEQ ID NO: 432599
  Synthetic oligonucleotide

SEQ ID NO: 592448 - DNA, 55 bp, Artificial; identical to SEQ ID NO: 432602
  Synthetic oligonucleotide

SEQ ID NO: 592449 - DNA, 57 bp, Artificial; identical to SEQ ID NO: 246
  Synthetic oligonucleotide

SEQ ID NO: 592450 - DNA, 52 bp, Artificial; identical to SEQ ID NO: 432616
  Synthetic oligonucleotide

SEQ ID NO: 592451 - DNA, 60 bp, Artificial; identical to SEQ ID NO: 432622
  Synthetic oligonucleotide

SEQ ID NO: 592452 - DNA, 55 bp, Artificial; identical to SEQ ID NO: 432623
  Synthetic oligonucleotide

SEQ ID NO: 592453 - DNA, 60 bp, Artificial; identical to SEQ ID NO: 432626
  Synthetic oligonucleotide

SEQ ID NO: 592454 - DNA, 55 bp, Artificial; identical to SEQ ID NO: 432629
  Synthetic oligonucleotide

SEQ ID NO: 592455 - DNA, 55 bp, Artificial; identical to SEQ ID NO: 432632
  Synthetic oligonucleotide

SEQ ID NO: 592456 - DNA, 54 bp, Artificial; identical to SEQ ID NO: 432636
  Synthetic oligonucleotide

SEQ ID NO: 592457 - DNA, 55 bp, Artificial; identical to SEQ ID NO: 432644
  Synthetic oligonucleotide

SEQ ID NO: 592458 - DNA, 60 bp, Artificial; identical to SEQ ID NO: 432645
  Synthetic oligonucleotide

SEQ ID NO: 592459 - DNA, 60 bp, Artificial; identical to SEQ ID NO: 432647
  Synthetic oligonucleotide

SEQ ID NO: 592460 - DNA, 59 bp, Artificial; identical to SEQ ID NO: 432650
  Synthetic oligonucleotide

SEQ ID NO: 592461 - DNA, 55 bp, Artificial; identical to SEQ ID NO: 17776
  Synthetic oligonucleotide

SEQ ID NO: 592462 - DNA, 52 bp, Artificial; identical to SEQ ID NO: 432652
  Synthetic oligonucleotide

SEQ ID NO: 592463 - DNA, 53 bp, Artificial; identical to SEQ ID NO: 432659
  Synthetic oligonucleotide

SEQ ID NO: 592464 - DNA, 60 bp, Artificial; identical to SEQ ID NO: 432660
  Synthetic oligonucleotide

SEQ ID NO: 592465 - DNA, 55 bp, Artificial; identical to SEQ ID NO: 432661
  Synthetic oligonucleotide

SEQ ID NO: 592466 - DNA, 55 bp, Artificial; identical to SEQ ID NO: 432664
  Synthetic oligonucleotide

SEQ ID NO: 592467 - DNA, 52 bp, Artificial; identical to SEQ ID NO: 432665
  Synthetic oligonucleotide

SEQ ID NO: 592468 - DNA, 56 bp, Artificial; identical to SEQ ID NO: 432666
  Synthetic oligonucleotide

SEQ ID NO: 592469 - DNA, 56 bp, Artificial; identical to SEQ ID NO: 432667
  Synthetic oligonucleotide

SEQ ID NO: 592470 - DNA, 55 bp, Artificial; identical to SEQ ID NO: 432674
  Synthetic oligonucleotide

SEQ ID NO: 592471 - DNA, 57 bp, Artificial; identical to SEQ ID NO: 432684
  Synthetic oligonucleotide

SEQ ID NO: 592472 - DNA, 51 bp, Artificial; identical to SEQ ID NO: 432686
  Synthetic oligonucleotide

SEQ ID NO: 592473 - DNA, 54 bp, Artificial; identical to SEQ ID NO: 432687
  Synthetic oligonucleotide

SEQ ID NO: 592474 - DNA, 60 bp, Artificial; identical to SEQ ID NO: 432689
  Synthetic oligonucleotide

SEQ ID NO: 592475 - DNA, 50 bp, Artificial; identical to SEQ ID NO: 432690
  Synthetic oligonucleotide

SEQ ID NO: 592476 - DNA, 54 bp, Artificial; identical to SEQ ID NO: 20252
  Synthetic oligonucleotide

SEQ ID NO: 592477 - DNA, 55 bp, Artificial; identical to SEQ ID NO: 432695
  Synthetic oligonucleotide

SEQ ID NO: 592478 - DNA, 55 bp, Artificial; identical to SEQ ID NO: 432701
  Synthetic oligonucleotide

SEQ ID NO: 592479 - DNA, 50 bp, Artificial; identical to SEQ ID NO: 432703
  Synthetic oligonucleotide

SEQ ID NO: 592480 - DNA, 60 bp, Artificial; identical to SEQ ID NO: 432707
  Synthetic oligonucleotide

SEQ ID NO: 592481 - DNA, 51 bp, Artificial; identical to SEQ ID NO: 432709
  Synthetic oligonucleotide

SEQ ID NO: 592482 - DNA, 60 bp, Artificial; identical to SEQ ID NO: 432710
  Synthetic oligonucleotide

SEQ ID NO: 592483 - DNA, 56 bp, Artificial; identical to SEQ ID NO: 432711
  Synthetic oligonucleotide

SEQ ID NO: 592484 - DNA, 60 bp, Artificial; identical to SEQ ID NO: 432712
  Synthetic oligonucleotide

SEQ ID NO: 592485 - DNA, 55 bp, Artificial; identical to SEQ ID NO: 432713
  Synthetic oligonucleotide

SEQ ID NO: 592486 - DNA, 55 bp, Artificial; identical to SEQ ID NO: 432715
  Synthetic oligonucleotide

SEQ ID NO: 592487 - DNA, 55 bp, Artificial; identical to SEQ ID NO: 432716
  Synthetic oligonucleotide

SEQ ID NO: 592488 - DNA, 59 bp, Artificial; identical to SEQ ID NO: 432719
  Synthetic oligonucleotide

SEQ ID NO: 592489 - DNA, 55 bp, Artificial; identical to SEQ ID NO: 432723
  Synthetic oligonucleotide

SEQ ID NO: 592490 - DNA, 55 bp, Artificial; identical to SEQ ID NO: 432724
  Synthetic oligonucleotide

SEQ ID NO: 592491 - DNA, 53 bp, Artificial; identical to SEQ ID NO: 432726
  Synthetic oligonucleotide

SEQ ID NO: 592492 - DNA, 56 bp, Artificial; identical to SEQ ID NO: 6215
  Synthetic oligonucleotide

SEQ ID NO: 592493 - DNA, 55 bp, Artificial; identical to SEQ ID NO: 432727
  Synthetic oligonucleotide

SEQ ID NO: 592494 - DNA, 55 bp, Artificial; identical to SEQ ID NO: 432738
  Synthetic oligonucleotide

SEQ ID NO: 592495 - DNA, 59 bp, Artificial; identical to SEQ ID NO: 16261
  Synthetic oligonucleotide

SEQ ID NO: 592496 - DNA, 55 bp, Artificial; identical to SEQ ID NO: 432740
  Synthetic oligonucleotide

SEQ ID NO: 592497 - DNA, 59 bp, Artificial; identical to SEQ ID NO: 432744
  Synthetic oligonucleotide

SEQ ID NO: 592498 - DNA, 59 bp, Artificial; identical to SEQ ID NO: 432746
  Synthetic oligonucleotide

SEQ ID NO: 592499 - DNA, 57 bp, Artificial; identical to SEQ ID NO: 432749
  Synthetic oligonucleotide

SEQ ID NO: 592500 - DNA, 55 bp, Artificial; identical to SEQ ID NO: 432752
  Synthetic oligonucleotide

SEQ ID NO: 592501 - DNA, 60 bp, Artificial; identical to SEQ ID NO: 432754
  Synthetic oligonucleotide

SEQ ID NO: 592502 - DNA, 53 bp, Artificial; identical to SEQ ID NO: 432759
  Synthetic oligonucleotide

SEQ ID NO: 592503 - DNA, 55 bp, Artificial; identical to SEQ ID NO: 432760
  Synthetic oligonucleotide

SEQ ID NO: 592504 - DNA, 55 bp, Artificial; identical to SEQ ID NO: 432761
  Synthetic oligonucleotide

SEQ ID NO: 592505 - DNA, 55 bp, Artificial; identical to SEQ ID NO: 432765
  Synthetic oligonucleotide

SEQ ID NO: 592506 - DNA, 57 bp, Artificial; identical to SEQ ID NO: 432770
  Synthetic oligonucleotide

SEQ ID NO: 592507 - DNA, 55 bp, Artificial; identical to SEQ ID NO: 432771
  Synthetic oligonucleotide

SEQ ID NO: 592508 - DNA, 55 bp, Artificial; identical to SEQ ID NO: 432772
  Synthetic oligonucleotide

SEQ ID NO: 592509 - DNA, 53 bp, Artificial; identical to SEQ ID NO: 432774
  Synthetic oligonucleotide

SEQ ID NO: 592510 - DNA, 55 bp, Artificial; identical to SEQ ID NO: 432775
  Synthetic oligonucleotide

SEQ ID NO: 592511 - DNA, 56 bp, Artificial; identical to SEQ ID NO: 432780
  Synthetic oligonucleotide

SEQ ID NO: 592512 - DNA, 60 bp, Artificial; identical to SEQ ID NO: 432782
  Synthetic oligonucleotide

SEQ ID NO: 592513 - DNA, 55 bp, Artificial; identical to SEQ ID NO: 432783
  Synthetic oligonucleotide

SEQ ID NO: 592514 - DNA, 60 bp, Artificial; identical to SEQ ID NO: 432788
  Synthetic oligonucleotide

SEQ ID NO: 592515 - DNA, 51 bp, Artificial; identical to SEQ ID NO: 432789
  Synthetic oligonucleotide

SEQ ID NO: 592516 - DNA, 59 bp, Artificial; identical to SEQ ID NO: 432790
  Synthetic oligonucleotide

SEQ ID NO: 592517 - DNA, 60 bp, Artificial; identical to SEQ ID NO: 432791
  Synthetic oligonucleotide

SEQ ID NO: 592518 - DNA, 58 bp, Artificial; identical to SEQ ID NO: 432793
  Synthetic oligonucleotide

SEQ ID NO: 592519 - DNA, 59 bp, Artificial; identical to SEQ ID NO: 432794
  Synthetic oligonucleotide

SEQ ID NO: 592520 - DNA, 55 bp, Artificial; identical to SEQ ID NO: 432797
  Synthetic oligonucleotide

SEQ ID NO: 592521 - DNA, 50 bp, Artificial; identical to SEQ ID NO: 432798
  Synthetic oligonucleotide

SEQ ID NO: 592522 - DNA, 59 bp, Artificial; identical to SEQ ID NO: 7786
  Synthetic oligonucleotide

SEQ ID NO: 592523 - DNA, 51 bp, Artificial; identical to SEQ ID NO: 432801
  Synthetic oligonucleotide

SEQ ID NO: 592524 - DNA, 54 bp, Artificial; identical to SEQ ID NO: 432804
  Synthetic oligonucleotide

SEQ ID NO: 592525 - DNA, 55 bp, Artificial; identical to SEQ ID NO: 432809
  Synthetic oligonucleotide

SEQ ID NO: 592526 - DNA, 59 bp, Artificial; identical to SEQ ID NO: 432813
  Synthetic oligonucleotide

SEQ ID NO: 592527 - DNA, 52 bp, Artificial; identical to SEQ ID NO: 16557
  Synthetic oligonucleotide

SEQ ID NO: 592528 - DNA, 53 bp, Artificial; identical to SEQ ID NO: 432814
  Synthetic oligonucleotide

SEQ ID NO: 592529 - DNA, 56 bp, Artificial; identical to SEQ ID NO: 432822
  Synthetic oligonucleotide

SEQ ID NO: 592530 - DNA, 60 bp, Artificial; identical to SEQ ID NO: 432823
  Synthetic oligonucleotide

SEQ ID NO: 592531 - DNA, 57 bp, Artificial; identical to SEQ ID NO: 432824
  Synthetic oligonucleotide

SEQ ID NO: 592532 - DNA, 51 bp, Artificial; identical to SEQ ID NO: 432825
  Synthetic oligonucleotide

SEQ ID NO: 592533 - DNA, 55 bp, Artificial; identical to SEQ ID NO: 432826
  Synthetic oligonucleotide

SEQ ID NO: 592534 - DNA, 55 bp, Artificial; identical to SEQ ID NO: 432827
  Synthetic oligonucleotide

SEQ ID NO: 592535 - DNA, 55 bp, Artificial; identical to SEQ ID NO: 432830
  Synthetic oligonucleotide

SEQ ID NO: 592536 - DNA, 54 bp, Artificial; identical to SEQ ID NO: 432837
  Synthetic oligonucleotide

SEQ ID NO: 592537 - DNA, 60 bp, Artificial; identical to SEQ ID NO: 432840
  Synthetic oligonucleotide

SEQ ID NO: 592538 - DNA, 60 bp, Artificial; identical to SEQ ID NO: 432841
  Synthetic oligonucleotide

SEQ ID NO: 592539 - DNA, 56 bp, Artificial; identical to SEQ ID NO: 432843
  Synthetic oligonucleotide

SEQ ID NO: 592540 - DNA, 56 bp, Artificial; identical to SEQ ID NO: 432845
  Synthetic oligonucleotide

SEQ ID NO: 592541 - DNA, 55 bp, Artificial; identical to SEQ ID NO: 432849
  Synthetic oligonucleotide

SEQ ID NO: 592542 - DNA, 60 bp, Artificial; identical to SEQ ID NO: 432850
  Synthetic oligonucleotide

SEQ ID NO: 592543 - DNA, 59 bp, Artificial; identical to SEQ ID NO: 432851
  Synthetic oligonucleotide

SEQ ID NO: 592544 - DNA, 59 bp, Artificial; identical to SEQ ID NO: 432852
  Synthetic oligonucleotide

SEQ ID NO: 592545 - DNA, 55 bp, Artificial; identical to SEQ ID NO: 432856
  Synthetic oligonucleotide

SEQ ID NO: 592546 - DNA, 55 bp, Artificial; identical to SEQ ID NO: 432857
  Synthetic oligonucleotide

SEQ ID NO: 592547 - DNA, 54 bp, Artificial; identical to SEQ ID NO: 432858
  Synthetic oligonucleotide

SEQ ID NO: 592548 - DNA, 52 bp, Artificial; identical to SEQ ID NO: 432860
  Synthetic oligonucleotide

SEQ ID NO: 592549 - DNA, 54 bp, Artificial; identical to SEQ ID NO: 432865
  Synthetic oligonucleotide

SEQ ID NO: 592550 - DNA, 55 bp, Artificial; identical to SEQ ID NO: 432867
  Synthetic oligonucleotide

SEQ ID NO: 592551 - DNA, 60 bp, Artificial; identical to SEQ ID NO: 432872
  Synthetic oligonucleotide

SEQ ID NO: 592552 - DNA, 50 bp, Artificial; identical to SEQ ID NO: 432876
  Synthetic oligonucleotide

SEQ ID NO: 592553 - DNA, 60 bp, Artificial; identical to SEQ ID NO: 432882
  Synthetic oligonucleotide

SEQ ID NO: 592554 - DNA, 60 bp, Artificial; identical to SEQ ID NO: 432888
  Synthetic oligonucleotide

SEQ ID NO: 592555 - DNA, 53 bp, Artificial; identical to SEQ ID NO: 432892
  Synthetic oligonucleotide

SEQ ID NO: 592556 - DNA, 55 bp, Artificial; identical to SEQ ID NO: 432894
  Synthetic oligonucleotide

SEQ ID NO: 592557 - DNA, 52 bp, Artificial; identical to SEQ ID NO: 432895
  Synthetic oligonucleotide

SEQ ID NO: 592558 - DNA, 54 bp, Artificial; identical to SEQ ID NO: 432896
  Synthetic oligonucleotide

SEQ ID NO: 592559 - DNA, 60 bp, Artificial; identical to SEQ ID NO: 432901
  Synthetic oligonucleotide

SEQ ID NO: 592560 - DNA, 59 bp, Artificial; identical to SEQ ID NO: 11319
  Synthetic oligonucleotide

SEQ ID NO: 592561 - DNA, 52 bp, Artificial; identical to SEQ ID NO: 432904
  Synthetic oligonucleotide

SEQ ID NO: 592562 - DNA, 55 bp, Artificial; identical to SEQ ID NO: 432908
  Synthetic oligonucleotide

SEQ ID NO: 592563 - DNA, 60 bp, Artificial; identical to SEQ ID NO: 10700
  Synthetic oligonucleotide

SEQ ID NO: 592564 - DNA, 52 bp, Artificial; identical to SEQ ID NO: 432911
  Synthetic oligonucleotide

SEQ ID NO: 592565 - DNA, 60 bp, Artificial; identical to SEQ ID NO: 432912
  Synthetic oligonucleotide

SEQ ID NO: 592566 - DNA, 55 bp, Artificial; identical to SEQ ID NO: 432913
  Synthetic oligonucleotide

SEQ ID NO: 592567 - DNA, 55 bp, Artificial; identical to SEQ ID NO: 432914
  Synthetic oligonucleotide

SEQ ID NO: 592568 - DNA, 55 bp, Artificial; identical to SEQ ID NO: 432916
  Synthetic oligonucleotide

SEQ ID NO: 592569 - DNA, 56 bp, Artificial; identical to SEQ ID NO: 432921
  Synthetic oligonucleotide

SEQ ID NO: 592570 - DNA, 55 bp, Artificial; identical to SEQ ID NO: 432922
  Synthetic oligonucleotide

SEQ ID NO: 592571 - DNA, 56 bp, Artificial; identical to SEQ ID NO: 432924
  Synthetic oligonucleotide

SEQ ID NO: 592572 - DNA, 55 bp, Artificial; identical to SEQ ID NO: 432925
  Synthetic oligonucleotide

SEQ ID NO: 592573 - DNA, 55 bp, Artificial; identical to SEQ ID NO: 432928
  Synthetic oligonucleotide

SEQ ID NO: 592574 - DNA, 60 bp, Artificial; identical to SEQ ID NO: 432931
  Synthetic oligonucleotide

SEQ ID NO: 592575 - DNA, 55 bp, Artificial; identical to SEQ ID NO: 432932
  Synthetic oligonucleotide

SEQ ID NO: 592576 - DNA, 55 bp, Artificial; identical to SEQ ID NO: 432933
  Synthetic oligonucleotide

SEQ ID NO: 592577 - DNA, 54 bp, Artificial; identical to SEQ ID NO: 432938
  Synthetic oligonucleotide

SEQ ID NO: 592578 - DNA, 55 bp, Artificial; identical to SEQ ID NO: 432940
  Synthetic oligonucleotide

SEQ ID NO: 592579 - DNA, 56 bp, Artificial; identical to SEQ ID NO: 7171
  Synthetic oligonucleotide

SEQ ID NO: 592580 - DNA, 57 bp, Artificial; identical to SEQ ID NO: 432943
  Synthetic oligonucleotide

SEQ ID NO: 592581 - DNA, 55 bp, Artificial; identical to SEQ ID NO: 432944
  Synthetic oligonucleotide

SEQ ID NO: 592582 - DNA, 55 bp, Artificial; identical to SEQ ID NO: 432945
  Synthetic oligonucleotide

SEQ ID NO: 592583 - DNA, 55 bp, Artificial; identical to SEQ ID NO: 432949
  Synthetic oligonucleotide

SEQ ID NO: 592584 - DNA, 53 bp, Artificial; identical to SEQ ID NO: 432953
  Synthetic oligonucleotide

SEQ ID NO: 592585 - DNA, 50 bp, Artificial; identical to SEQ ID NO: 432954
  Synthetic oligonucleotide

SEQ ID NO: 592586 - DNA, 55 bp, Artificial; identical to SEQ ID NO: 432955
  Synthetic oligonucleotide

SEQ ID NO: 592587 - DNA, 50 bp, Artificial; identical to SEQ ID NO: 432958
  Synthetic oligonucleotide

SEQ ID NO: 592588 - DNA, 52 bp, Artificial; identical to SEQ ID NO: 432961
  Synthetic oligonucleotide

SEQ ID NO: 592589 - DNA, 54 bp, Artificial; identical to SEQ ID NO: 432966
  Synthetic oligonucleotide

SEQ ID NO: 592590 - DNA, 60 bp, Artificial; identical to SEQ ID NO: 432967
  Synthetic oligonucleotide

SEQ ID NO: 592591 - DNA, 52 bp, Artificial; identical to SEQ ID NO: 432969
  Synthetic oligonucleotide

SEQ ID NO: 592592 - DNA, 57 bp, Artificial; identical to SEQ ID NO: 432972
  Synthetic oligonucleotide

SEQ ID NO: 592593 - DNA, 60 bp, Artificial; identical to SEQ ID NO: 432974
  Synthetic oligonucleotide

SEQ ID NO: 592594 - DNA, 60 bp, Artificial; identical to SEQ ID NO: 432979
  Synthetic oligonucleotide

SEQ ID NO: 592595 - DNA, 58 bp, Artificial; identical to SEQ ID NO: 432980
  Synthetic oligonucleotide

SEQ ID NO: 592596 - DNA, 59 bp, Artificial; identical to SEQ ID NO: 432981
  Synthetic oligonucleotide

SEQ ID NO: 592597 - DNA, 55 bp, Artificial; identical to SEQ ID NO: 432982
  Synthetic oligonucleotide

SEQ ID NO: 592598 - DNA, 55 bp, Artificial; identical to SEQ ID NO: 432985
  Synthetic oligonucleotide

SEQ ID NO: 592599 - DNA, 55 bp, Artificial; identical to SEQ ID NO: 432987
  Synthetic oligonucleotide

SEQ ID NO: 592600 - DNA, 52 bp, Artificial; identical to SEQ ID NO: 432991
  Synthetic oligonucleotide

SEQ ID NO: 592601 - DNA, 60 bp, Artificial; identical to SEQ ID NO: 432994
  Synthetic oligonucleotide

SEQ ID NO: 592602 - DNA, 55 bp, Artificial; identical to SEQ ID NO: 432997
  Synthetic oligonucleotide

SEQ ID NO: 592603 - DNA, 57 bp, Artificial; identical to SEQ ID NO: 433003
  Synthetic oligonucleotide

SEQ ID NO: 592604 - DNA, 57 bp, Artificial; identical to SEQ ID NO: 433008
  Synthetic oligonucleotide

SEQ ID NO: 592605 - DNA, 55 bp, Artificial; identical to SEQ ID NO: 433009
  Synthetic oligonucleotide

SEQ ID NO: 592606 - DNA, 59 bp, Artificial; identical to SEQ ID NO: 19488
  Synthetic oligonucleotide

SEQ ID NO: 592607 - DNA, 54 bp, Artificial; identical to SEQ ID NO: 433014
  Synthetic oligonucleotide

SEQ ID NO: 592608 - DNA, 50 bp, Artificial; identical to SEQ ID NO: 9981
  Synthetic oligonucleotide

SEQ ID NO: 592609 - DNA, 56 bp, Artificial; identical to SEQ ID NO: 433025
  Synthetic oligonucleotide

SEQ ID NO: 592610 - DNA, 55 bp, Artificial; identical to SEQ ID NO: 433028
  Synthetic oligonucleotide

SEQ ID NO: 592611 - DNA, 55 bp, Artificial; identical to SEQ ID NO: 433033
  Synthetic oligonucleotide

SEQ ID NO: 592612 - DNA, 55 bp, Artificial; identical to SEQ ID NO: 433034
  Synthetic oligonucleotide

SEQ ID NO: 592613 - DNA, 56 bp, Artificial; identical to SEQ ID NO: 433037
  Synthetic oligonucleotide

SEQ ID NO: 592614 - DNA, 60 bp, Artificial; identical to SEQ ID NO: 433038
  Synthetic oligonucleotide

SEQ ID NO: 592615 - DNA, 57 bp, Artificial; identical to SEQ ID NO: 433041
  Synthetic oligonucleotide

SEQ ID NO: 592616 - DNA, 55 bp, Artificial; identical to SEQ ID NO: 433042
  Synthetic oligonucleotide

SEQ ID NO: 592617 - DNA, 53 bp, Artificial; identical to SEQ ID NO: 433043
  Synthetic oligonucleotide

SEQ ID NO: 592618 - DNA, 60 bp, Artificial; identical to SEQ ID NO: 433044
  Synthetic oligonucleotide

SEQ ID NO: 592619 - DNA, 59 bp, Artificial; identical to SEQ ID NO: 433045
  Synthetic oligonucleotide

SEQ ID NO: 592620 - DNA, 58 bp, Artificial; identical to SEQ ID NO: 433046
  Synthetic oligonucleotide

SEQ ID NO: 592621 - DNA, 60 bp, Artificial; identical to SEQ ID NO: 433050
  Synthetic oligonucleotide

SEQ ID NO: 592622 - DNA, 60 bp, Artificial; identical to SEQ ID NO: 433054
  Synthetic oligonucleotide

SEQ ID NO: 592623 - DNA, 60 bp, Artificial; identical to SEQ ID NO: 433055
  Synthetic oligonucleotide

SEQ ID NO: 592624 - DNA, 56 bp, Artificial; identical to SEQ ID NO: 433056
  Synthetic oligonucleotide

SEQ ID NO: 592625 - DNA, 55 bp, Artificial; identical to SEQ ID NO: 433057
  Synthetic oligonucleotide

SEQ ID NO: 592626 - DNA, 55 bp, Artificial; identical to SEQ ID NO: 433058
  Synthetic oligonucleotide

SEQ ID NO: 592627 - DNA, 60 bp, Artificial; identical to SEQ ID NO: 433063
  Synthetic oligonucleotide

SEQ ID NO: 592628 - DNA, 57 bp, Artificial; identical to SEQ ID NO: 433064
  Synthetic oligonucleotide

SEQ ID NO: 592629 - DNA, 52 bp, Artificial; identical to SEQ ID NO: 433065
  Synthetic oligonucleotide

SEQ ID NO: 592630 - DNA, 53 bp, Artificial; identical to SEQ ID NO: 433067
  Synthetic oligonucleotide

SEQ ID NO: 592631 - DNA, 60 bp, Artificial; identical to SEQ ID NO: 14154
  Synthetic oligonucleotide

SEQ ID NO: 592632 - DNA, 57 bp, Artificial; identical to SEQ ID NO: 433069
  Synthetic oligonucleotide

SEQ ID NO: 592633 - DNA, 55 bp, Artificial; identical to SEQ ID NO: 433073
  Synthetic oligonucleotide

SEQ ID NO: 592634 - DNA, 59 bp, Artificial; identical to SEQ ID NO: 433074
  Synthetic oligonucleotide

SEQ ID NO: 592635 - DNA, 57 bp, Artificial; identical to SEQ ID NO: 433075
  Synthetic oligonucleotide

SEQ ID NO: 592636 - DNA, 55 bp, Artificial; identical to SEQ ID NO: 433077
  Synthetic oligonucleotide

SEQ ID NO: 592637 - DNA, 60 bp, Artificial; identical to SEQ ID NO: 433078
  Synthetic oligonucleotide

SEQ ID NO: 592638 - DNA, 55 bp, Artificial; identical to SEQ ID NO: 433079
  Synthetic oligonucleotide

SEQ ID NO: 592639 - DNA, 57 bp, Artificial; identical to SEQ ID NO: 433083
  Synthetic oligonucleotide

SEQ ID NO: 592640 - DNA, 59 bp, Artificial; identical to SEQ ID NO: 433084
  Synthetic oligonucleotide

SEQ ID NO: 592641 - DNA, 48 bp, Artificial; identical to SEQ ID NO: 433085
  Synthetic oligonucleotide

SEQ ID NO: 592642 - DNA, 57 bp, Artificial; identical to SEQ ID NO: 433086
  Synthetic oligonucleotide

SEQ ID NO: 592643 - DNA, 59 bp, Artificial; identical to SEQ ID NO: 433092
  Synthetic oligonucleotide

SEQ ID NO: 592644 - DNA, 54 bp, Artificial; identical to SEQ ID NO: 433094
  Synthetic oligonucleotide

SEQ ID NO: 592645 - DNA, 55 bp, Artificial; identical to SEQ ID NO: 433096
  Synthetic oligonucleotide

SEQ ID NO: 592646 - DNA, 55 bp, Artificial; identical to SEQ ID NO: 433103
  Synthetic oligonucleotide

SEQ ID NO: 592647 - DNA, 55 bp, Artificial; identical to SEQ ID NO: 433104
  Synthetic oligonucleotide

SEQ ID NO: 592648 - DNA, 56 bp, Artificial; identical to SEQ ID NO: 433109
  Synthetic oligonucleotide

SEQ ID NO: 592649 - DNA, 55 bp, Artificial; identical to SEQ ID NO: 433110
  Synthetic oligonucleotide

SEQ ID NO: 592650 - DNA, 60 bp, Artificial; identical to SEQ ID NO: 433112
  Synthetic oligonucleotide

SEQ ID NO: 592651 - DNA, 50 bp, Artificial; identical to SEQ ID NO: 433115
  Synthetic oligonucleotide

SEQ ID NO: 592652 - DNA, 54 bp, Artificial; identical to SEQ ID NO: 433124
  Synthetic oligonucleotide

SEQ ID NO: 592653 - DNA, 55 bp, Artificial; identical to SEQ ID NO: 433125
  Synthetic oligonucleotide

SEQ ID NO: 592654 - DNA, 51 bp, Artificial; identical to SEQ ID NO: 433127
  Synthetic oligonucleotide

SEQ ID NO: 592655 - DNA, 60 bp, Artificial; identical to SEQ ID NO: 6649
  Synthetic oligonucleotide

SEQ ID NO: 592656 - DNA, 58 bp, Artificial; identical to SEQ ID NO: 433128
  Synthetic oligonucleotide

SEQ ID NO: 592657 - DNA, 55 bp, Artificial; identical to SEQ ID NO: 433130
  Synthetic oligonucleotide

SEQ ID NO: 592658 - DNA, 60 bp, Artificial; identical to SEQ ID NO: 433135
  Synthetic oligonucleotide

SEQ ID NO: 592659 - DNA, 55 bp, Artificial; identical to SEQ ID NO: 433136
  Synthetic oligonucleotide

SEQ ID NO: 592660 - DNA, 57 bp, Artificial; identical to SEQ ID NO: 433138
  Synthetic oligonucleotide

SEQ ID NO: 592661 - DNA, 60 bp, Artificial; identical to SEQ ID NO: 433144
  Synthetic oligonucleotide

SEQ ID NO: 592662 - DNA, 60 bp, Artificial; identical to SEQ ID NO: 433147
  Synthetic oligonucleotide

SEQ ID NO: 592663 - DNA, 55 bp, Artificial; identical to SEQ ID NO: 433150
  Synthetic oligonucleotide

SEQ ID NO: 592664 - DNA, 55 bp, Artificial; identical to SEQ ID NO: 433153
  Synthetic oligonucleotide

SEQ ID NO: 592665 - DNA, 60 bp, Artificial; identical to SEQ ID NO: 433154
  Synthetic oligonucleotide

SEQ ID NO: 592666 - DNA, 54 bp, Artificial; identical to SEQ ID NO: 433155
  Synthetic oligonucleotide

SEQ ID NO: 592667 - DNA, 56 bp, Artificial; identical to SEQ ID NO: 433158
  Synthetic oligonucleotide

SEQ ID NO: 592668 - DNA, 55 bp, Artificial; identical to SEQ ID NO: 433162
  Synthetic oligonucleotide

SEQ ID NO: 592669 - DNA, 55 bp, Artificial; identical to SEQ ID NO: 433163
  Synthetic oligonucleotide

SEQ ID NO: 592670 - DNA, 52 bp, Artificial; identical to SEQ ID NO: 433170
  Synthetic oligonucleotide

SEQ ID NO: 592671 - DNA, 56 bp, Artificial; identical to SEQ ID NO: 433174
  Synthetic oligonucleotide

SEQ ID NO: 592672 - DNA, 59 bp, Artificial; identical to SEQ ID NO: 433176
  Synthetic oligonucleotide

SEQ ID NO: 592673 - DNA, 56 bp, Artificial; identical to SEQ ID NO: 433178
  Synthetic oligonucleotide

SEQ ID NO: 592674 - DNA, 55 bp, Artificial; identical to SEQ ID NO: 433179
  Synthetic oligonucleotide

SEQ ID NO: 592675 - DNA, 60 bp, Artificial; identical to SEQ ID NO: 433180
  Synthetic oligonucleotide

SEQ ID NO: 592676 - DNA, 56 bp, Artificial; identical to SEQ ID NO: 433183
  Synthetic oligonucleotide

SEQ ID NO: 592677 - DNA, 60 bp, Artificial; identical to SEQ ID NO: 433186
  Synthetic oligonucleotide

SEQ ID NO: 592678 - DNA, 56 bp, Artificial; identical to SEQ ID NO: 433192
  Synthetic oligonucleotide

SEQ ID NO: 592679 - DNA, 57 bp, Artificial; identical to SEQ ID NO: 433194
  Synthetic oligonucleotide

SEQ ID NO: 592680 - DNA, 60 bp, Artificial; identical to SEQ ID NO: 433196
  Synthetic oligonucleotide

SEQ ID NO: 592681 - DNA, 55 bp, Artificial; identical to SEQ ID NO: 433198
  Synthetic oligonucleotide

SEQ ID NO: 592682 - DNA, 54 bp, Artificial; identical to SEQ ID NO: 433199
  Synthetic oligonucleotide

SEQ ID NO: 592683 - DNA, 55 bp, Artificial; identical to SEQ ID NO: 433204
  Synthetic oligonucleotide

SEQ ID NO: 592684 - DNA, 58 bp, Artificial; identical to SEQ ID NO: 433206
  Synthetic oligonucleotide

SEQ ID NO: 592685 - DNA, 55 bp, Artificial; identical to SEQ ID NO: 433207
  Synthetic oligonucleotide

SEQ ID NO: 592686 - DNA, 56 bp, Artificial; identical to SEQ ID NO: 433208
  Synthetic oligonucleotide

SEQ ID NO: 592687 - DNA, 58 bp, Artificial; identical to SEQ ID NO: 433209
  Synthetic oligonucleotide

SEQ ID NO: 592688 - DNA, 51 bp, Artificial; identical to SEQ ID NO: 433210
  Synthetic oligonucleotide

SEQ ID NO: 592689 - DNA, 55 bp, Artificial; identical to SEQ ID NO: 433214
  Synthetic oligonucleotide

SEQ ID NO: 592690 - DNA, 58 bp, Artificial; identical to SEQ ID NO: 433215
  Synthetic oligonucleotide

SEQ ID NO: 592691 - DNA, 60 bp, Artificial; identical to SEQ ID NO: 433216
  Synthetic oligonucleotide

SEQ ID NO: 592692 - DNA, 58 bp, Artificial; identical to SEQ ID NO: 433217
  Synthetic oligonucleotide

SEQ ID NO: 592693 - DNA, 59 bp, Artificial; identical to SEQ ID NO: 433219
  Synthetic oligonucleotide

SEQ ID NO: 592694 - DNA, 50 bp, Artificial; identical to SEQ ID NO: 433220
  Synthetic oligonucleotide

SEQ ID NO: 592695 - DNA, 55 bp, Artificial; identical to SEQ ID NO: 433221
  Synthetic oligonucleotide

SEQ ID NO: 592696 - DNA, 55 bp, Artificial; identical to SEQ ID NO: 433227
  Synthetic oligonucleotide

SEQ ID NO: 592697 - DNA, 54 bp, Artificial; identical to SEQ ID NO: 433232
  Synthetic oligonucleotide

SEQ ID NO: 592698 - DNA, 55 bp, Artificial; identical to SEQ ID NO: 433237
  Synthetic oligonucleotide

SEQ ID NO: 592699 - DNA, 57 bp, Artificial; identical to SEQ ID NO: 433238
  Synthetic oligonucleotide

SEQ ID NO: 592700 - DNA, 59 bp, Artificial; identical to SEQ ID NO: 433244
  Synthetic oligonucleotide

SEQ ID NO: 592701 - DNA, 56 bp, Artificial; identical to SEQ ID NO: 433246
  Synthetic oligonucleotide

SEQ ID NO: 592702 - DNA, 55 bp, Artificial; identical to SEQ ID NO: 433248
  Synthetic oligonucleotide

SEQ ID NO: 592703 - DNA, 60 bp, Artificial; identical to SEQ ID NO: 433249
  Synthetic oligonucleotide

SEQ ID NO: 592704 - DNA, 55 bp, Artificial; identical to SEQ ID NO: 433252
  Synthetic oligonucleotide

SEQ ID NO: 592705 - DNA, 55 bp, Artificial; identical to SEQ ID NO: 433253
  Synthetic oligonucleotide

SEQ ID NO: 592706 - DNA, 60 bp, Artificial; identical to SEQ ID NO: 433254
  Synthetic oligonucleotide

SEQ ID NO: 592707 - DNA, 55 bp, Artificial; identical to SEQ ID NO: 433255
  Synthetic oligonucleotide

SEQ ID NO: 592708 - DNA, 59 bp, Artificial; identical to SEQ ID NO: 7450
  Synthetic oligonucleotide

SEQ ID NO: 592709 - DNA, 53 bp, Artificial; identical to SEQ ID NO: 433262
  Synthetic oligonucleotide

SEQ ID NO: 592710 - DNA, 57 bp, Artificial; identical to SEQ ID NO: 17115
  Synthetic oligonucleotide

SEQ ID NO: 592711 - DNA, 60 bp, Artificial; identical to SEQ ID NO: 433269
  Synthetic oligonucleotide

SEQ ID NO: 592712 - DNA, 58 bp, Artificial; identical to SEQ ID NO: 433270
  Synthetic oligonucleotide

SEQ ID NO: 592713 - DNA, 59 bp, Artificial; identical to SEQ ID NO: 433271
  Synthetic oligonucleotide

SEQ ID NO: 592714 - DNA, 57 bp, Artificial; identical to SEQ ID NO: 433272
  Synthetic oligonucleotide

SEQ ID NO: 592715 - DNA, 55 bp, Artificial; identical to SEQ ID NO: 433273
  Synthetic oligonucleotide

SEQ ID NO: 592716 - DNA, 58 bp, Artificial; identical to SEQ ID NO: 16230
  Synthetic oligonucleotide

SEQ ID NO: 592717 - DNA, 55 bp, Artificial; identical to SEQ ID NO: 433279
  Synthetic oligonucleotide

SEQ ID NO: 592718 - DNA, 51 bp, Artificial; identical to SEQ ID NO: 433292
  Synthetic oligonucleotide

SEQ ID NO: 592719 - DNA, 53 bp, Artificial; identical to SEQ ID NO: 433293
  Synthetic oligonucleotide

SEQ ID NO: 592720 - DNA, 55 bp, Artificial; identical to SEQ ID NO: 11484
  Synthetic oligonucleotide

SEQ ID NO: 592721 - DNA, 55 bp, Artificial; identical to SEQ ID NO: 433294
  Synthetic oligonucleotide

SEQ ID NO: 592722 - DNA, 58 bp, Artificial; identical to SEQ ID NO: 433296
  Synthetic oligonucleotide

SEQ ID NO: 592723 - DNA, 53 bp, Artificial; identical to SEQ ID NO: 433297
  Synthetic oligonucleotide

SEQ ID NO: 592724 - DNA, 57 bp, Artificial; identical to SEQ ID NO: 433298
  Synthetic oligonucleotide

SEQ ID NO: 592725 - DNA, 54 bp, Artificial; identical to SEQ ID NO: 433299
  Synthetic oligonucleotide

SEQ ID NO: 592726 - DNA, 58 bp, Artificial; identical to SEQ ID NO: 433314
  Synthetic oligonucleotide

SEQ ID NO: 592727 - DNA, 51 bp, Artificial; identical to SEQ ID NO: 433318
  Synthetic oligonucleotide

SEQ ID NO: 592728 - DNA, 52 bp, Artificial; identical to SEQ ID NO: 433322
  Synthetic oligonucleotide

SEQ ID NO: 592729 - DNA, 58 bp, Artificial; identical to SEQ ID NO: 7201
  Synthetic oligonucleotide

SEQ ID NO: 592730 - DNA, 56 bp, Artificial; identical to SEQ ID NO: 433324
  Synthetic oligonucleotide

SEQ ID NO: 592731 - DNA, 55 bp, Artificial; identical to SEQ ID NO: 433328
  Synthetic oligonucleotide

SEQ ID NO: 592732 - DNA, 60 bp, Artificial; identical to SEQ ID NO: 433329
  Synthetic oligonucleotide

SEQ ID NO: 592733 - DNA, 56 bp, Artificial; identical to SEQ ID NO: 433332
  Synthetic oligonucleotide

SEQ ID NO: 592734 - DNA, 55 bp, Artificial; identical to SEQ ID NO: 433333
  Synthetic oligonucleotide

SEQ ID NO: 592735 - DNA, 53 bp, Artificial; identical to SEQ ID NO: 433340
  Synthetic oligonucleotide

SEQ ID NO: 592736 - DNA, 55 bp, Artificial; identical to SEQ ID NO: 433345
  Synthetic oligonucleotide

SEQ ID NO: 592737 - DNA, 60 bp, Artificial; identical to SEQ ID NO: 433346
  Synthetic oligonucleotide

SEQ ID NO: 592738 - DNA, 55 bp, Artificial; identical to SEQ ID NO: 433352
  Synthetic oligonucleotide

SEQ ID NO: 592739 - DNA, 55 bp, Artificial; identical to SEQ ID NO: 433354
  Synthetic oligonucleotide

SEQ ID NO: 592740 - DNA, 55 bp, Artificial; identical to SEQ ID NO: 433356
  Synthetic oligonucleotide

SEQ ID NO: 592741 - DNA, 56 bp, Artificial; identical to SEQ ID NO: 433358
  Synthetic oligonucleotide

SEQ ID NO: 592742 - DNA, 60 bp, Artificial; identical to SEQ ID NO: 433359
  Synthetic oligonucleotide

SEQ ID NO: 592743 - DNA, 59 bp, Artificial; identical to SEQ ID NO: 433363
  Synthetic oligonucleotide

SEQ ID NO: 592744 - DNA, 54 bp, Artificial; identical to SEQ ID NO: 433364
  Synthetic oligonucleotide

SEQ ID NO: 592745 - DNA, 53 bp, Artificial; identical to SEQ ID NO: 433365
  Synthetic oligonucleotide

SEQ ID NO: 592746 - DNA, 59 bp, Artificial; identical to SEQ ID NO: 433370
  Synthetic oligonucleotide

SEQ ID NO: 592747 - DNA, 55 bp, Artificial; identical to SEQ ID NO: 433371
  Synthetic oligonucleotide

SEQ ID NO: 592748 - DNA, 55 bp, Artificial; identical to SEQ ID NO: 433373
  Synthetic oligonucleotide

SEQ ID NO: 592749 - DNA, 58 bp, Artificial; identical to SEQ ID NO: 433374
  Synthetic oligonucleotide

SEQ ID NO: 592750 - DNA, 60 bp, Artificial; identical to SEQ ID NO: 433375
  Synthetic oligonucleotide

SEQ ID NO: 592751 - DNA, 56 bp, Artificial; identical to SEQ ID NO: 433376
  Synthetic oligonucleotide

SEQ ID NO: 592752 - DNA, 57 bp, Artificial; identical to SEQ ID NO: 433381
  Synthetic oligonucleotide

SEQ ID NO: 592753 - DNA, 54 bp, Artificial; identical to SEQ ID NO: 433382
  Synthetic oligonucleotide

SEQ ID NO: 592754 - DNA, 52 bp, Artificial; identical to SEQ ID NO: 433386
  Synthetic oligonucleotide

SEQ ID NO: 592755 - DNA, 51 bp, Artificial; identical to SEQ ID NO: 433388
  Synthetic oligonucleotide

SEQ ID NO: 592756 - DNA, 47 bp, Artificial; identical to SEQ ID NO: 433389
  Synthetic oligonucleotide

SEQ ID NO: 592757 - DNA, 53 bp, Artificial; identical to SEQ ID NO: 433393
  Synthetic oligonucleotide

SEQ ID NO: 592758 - DNA, 60 bp, Artificial; identical to SEQ ID NO: 433400
  Synthetic oligonucleotide

SEQ ID NO: 592759 - DNA, 53 bp, Artificial; identical to SEQ ID NO: 433402
  Synthetic oligonucleotide

SEQ ID NO: 592760 - DNA, 59 bp, Artificial; identical to SEQ ID NO: 433405
  Synthetic oligonucleotide

SEQ ID NO: 592761 - DNA, 57 bp, Artificial; identical to SEQ ID NO: 433407
  Synthetic oligonucleotide

SEQ ID NO: 592762 - DNA, 54 bp, Artificial; identical to SEQ ID NO: 433409
  Synthetic oligonucleotide

SEQ ID NO: 592763 - DNA, 55 bp, Artificial; identical to SEQ ID NO: 433413
  Synthetic oligonucleotide

SEQ ID NO: 592764 - DNA, 55 bp, Artificial; identical to SEQ ID NO: 433414
  Synthetic oligonucleotide

SEQ ID NO: 592765 - DNA, 60 bp, Artificial; identical to SEQ ID NO: 13221
  Synthetic oligonucleotide

SEQ ID NO: 592766 - DNA, 60 bp, Artificial; identical to SEQ ID NO: 433417
  Synthetic oligonucleotide

SEQ ID NO: 592767 - DNA, 54 bp, Artificial; identical to SEQ ID NO: 433418
  Synthetic oligonucleotide

SEQ ID NO: 592768 - DNA, 50 bp, Artificial; identical to SEQ ID NO: 433419
  Synthetic oligonucleotide

SEQ ID NO: 592769 - DNA, 59 bp, Artificial; identical to SEQ ID NO: 433422
  Synthetic oligonucleotide

SEQ ID NO: 592770 - DNA, 52 bp, Artificial; identical to SEQ ID NO: 433425
  Synthetic oligonucleotide

SEQ ID NO: 592771 - DNA, 59 bp, Artificial; identical to SEQ ID NO: 433427
  Synthetic oligonucleotide

SEQ ID NO: 592772 - DNA, 60 bp, Artificial; identical to SEQ ID NO: 433431
  Synthetic oligonucleotide

SEQ ID NO: 592773 - DNA, 55 bp, Artificial; identical to SEQ ID NO: 6855
  Synthetic oligonucleotide

SEQ ID NO: 592774 - DNA, 53 bp, Artificial; identical to SEQ ID NO: 433437
  Synthetic oligonucleotide

SEQ ID NO: 592775 - DNA, 54 bp, Artificial; identical to SEQ ID NO: 433439
  Synthetic oligonucleotide

SEQ ID NO: 592776 - DNA, 55 bp, Artificial; identical to SEQ ID NO: 433440
  Synthetic oligonucleotide

SEQ ID NO: 592777 - DNA, 60 bp, Artificial; identical to SEQ ID NO: 433442
  Synthetic oligonucleotide

SEQ ID NO: 592778 - DNA, 56 bp, Artificial; identical to SEQ ID NO: 433443
  Synthetic oligonucleotide

SEQ ID NO: 592779 - DNA, 60 bp, Artificial; identical to SEQ ID NO: 433444
  Synthetic oligonucleotide

SEQ ID NO: 592780 - DNA, 52 bp, Artificial; identical to SEQ ID NO: 433452
  Synthetic oligonucleotide

SEQ ID NO: 592781 - DNA, 55 bp, Artificial; identical to SEQ ID NO: 433453
  Synthetic oligonucleotide

SEQ ID NO: 592782 - DNA, 55 bp, Artificial; identical to SEQ ID NO: 433454
  Synthetic oligonucleotide

SEQ ID NO: 592783 - DNA, 55 bp, Artificial; identical to SEQ ID NO: 433458
  Synthetic oligonucleotide

SEQ ID NO: 592784 - DNA, 56 bp, Artificial; identical to SEQ ID NO: 433461
  Synthetic oligonucleotide

SEQ ID NO: 592785 - DNA, 55 bp, Artificial; identical to SEQ ID NO: 433463
  Synthetic oligonucleotide

SEQ ID NO: 592786 - DNA, 50 bp, Artificial; identical to SEQ ID NO: 433467
  Synthetic oligonucleotide

SEQ ID NO: 592787 - DNA, 55 bp, Artificial; identical to SEQ ID NO: 433468
  Synthetic oligonucleotide

SEQ ID NO: 592788 - DNA, 54 bp, Artificial; identical to SEQ ID NO: 433471
  Synthetic oligonucleotide

SEQ ID NO: 592789 - DNA, 51 bp, Artificial; identical to SEQ ID NO: 433477
  Synthetic oligonucleotide

SEQ ID NO: 592790 - DNA, 54 bp, Artificial; identical to SEQ ID NO: 433478
  Synthetic oligonucleotide

SEQ ID NO: 592791 - DNA, 60 bp, Artificial; identical to SEQ ID NO: 433481
  Synthetic oligonucleotide

SEQ ID NO: 592792 - DNA, 50 bp, Artificial; identical to SEQ ID NO: 433484
  Synthetic oligonucleotide

SEQ ID NO: 592793 - DNA, 55 bp, Artificial; identical to SEQ ID NO: 433488
  Synthetic oligonucleotide

SEQ ID NO: 592794 - DNA, 60 bp, Artificial; identical to SEQ ID NO: 433492
  Synthetic oligonucleotide

SEQ ID NO: 592795 - DNA, 55 bp, Artificial; identical to SEQ ID NO: 433493
  Synthetic oligonucleotide

SEQ ID NO: 592796 - DNA, 55 bp, Artificial; identical to SEQ ID NO: 433494
  Synthetic oligonucleotide

SEQ ID NO: 592797 - DNA, 54 bp, Artificial; identical to SEQ ID NO: 433495
  Synthetic oligonucleotide

SEQ ID NO: 592798 - DNA, 54 bp, Artificial; identical to SEQ ID NO: 433496
  Synthetic oligonucleotide

SEQ ID NO: 592799 - DNA, 53 bp, Artificial; identical to SEQ ID NO: 11861
  Synthetic oligonucleotide

SEQ ID NO: 592800 - DNA, 56 bp, Artificial; identical to SEQ ID NO: 433501
  Synthetic oligonucleotide

SEQ ID NO: 592801 - DNA, 60 bp, Artificial; identical to SEQ ID NO: 433502
  Synthetic oligonucleotide

SEQ ID NO: 592802 - DNA, 60 bp, Artificial; identical to SEQ ID NO: 433507
  Synthetic oligonucleotide

SEQ ID NO: 592803 - DNA, 55 bp, Artificial; identical to SEQ ID NO: 433509
  Synthetic oligonucleotide

SEQ ID NO: 592804 - DNA, 58 bp, Artificial; identical to SEQ ID NO: 433510
  Synthetic oligonucleotide

SEQ ID NO: 592805 - DNA, 55 bp, Artificial; identical to SEQ ID NO: 433519
  Synthetic oligonucleotide

SEQ ID NO: 592806 - DNA, 55 bp, Artificial; identical to SEQ ID NO: 433527
  Synthetic oligonucleotide

SEQ ID NO: 592807 - DNA, 55 bp, Artificial; identical to SEQ ID NO: 433528
  Synthetic oligonucleotide

SEQ ID NO: 592808 - DNA, 55 bp, Artificial; identical to SEQ ID NO: 433529
  Synthetic oligonucleotide

SEQ ID NO: 592809 - DNA, 54 bp, Artificial; identical to SEQ ID NO: 433531
  Synthetic oligonucleotide

SEQ ID NO: 592810 - DNA, 55 bp, Artificial; identical to SEQ ID NO: 433534
  Synthetic oligonucleotide

SEQ ID NO: 592811 - DNA, 52 bp, Artificial; identical to SEQ ID NO: 433537
  Synthetic oligonucleotide

SEQ ID NO: 592812 - DNA, 52 bp, Artificial; identical to SEQ ID NO: 433541
  Synthetic oligonucleotide

SEQ ID NO: 592813 - DNA, 55 bp, Artificial; identical to SEQ ID NO: 433543
  Synthetic oligonucleotide

SEQ ID NO: 592814 - DNA, 57 bp, Artificial; identical to SEQ ID NO: 433552
  Synthetic oligonucleotide

SEQ ID NO: 592815 - DNA, 58 bp, Artificial; identical to SEQ ID NO: 433553
  Synthetic oligonucleotide

SEQ ID NO: 592816 - DNA, 60 bp, Artificial; identical to SEQ ID NO: 433554
  Synthetic oligonucleotide

SEQ ID NO: 592817 - DNA, 55 bp, Artificial; identical to SEQ ID NO: 433555
  Synthetic oligonucleotide

SEQ ID NO: 592818 - DNA, 55 bp, Artificial; identical to SEQ ID NO: 433557
  Synthetic oligonucleotide

SEQ ID NO: 592819 - DNA, 57 bp, Artificial; identical to SEQ ID NO: 433559
  Synthetic oligonucleotide

SEQ ID NO: 592820 - DNA, 53 bp, Artificial; identical to SEQ ID NO: 433560
  Synthetic oligonucleotide

SEQ ID NO: 592821 - DNA, 59 bp, Artificial; identical to SEQ ID NO: 433564
  Synthetic oligonucleotide

SEQ ID NO: 592822 - DNA, 55 bp, Artificial; identical to SEQ ID NO: 433566
  Synthetic oligonucleotide

SEQ ID NO: 592823 - DNA, 60 bp, Artificial; identical to SEQ ID NO: 433568
  Synthetic oligonucleotide

SEQ ID NO: 592824 - DNA, 60 bp, Artificial; identical to SEQ ID NO: 433573
  Synthetic oligonucleotide

SEQ ID NO: 592825 - DNA, 55 bp, Artificial; identical to SEQ ID NO: 433579
  Synthetic oligonucleotide

SEQ ID NO: 592826 - DNA, 56 bp, Artificial; identical to SEQ ID NO: 433581
  Synthetic oligonucleotide

SEQ ID NO: 592827 - DNA, 55 bp, Artificial; identical to SEQ ID NO: 433582
  Synthetic oligonucleotide

SEQ ID NO: 592828 - DNA, 54 bp, Artificial; identical to SEQ ID NO: 433584
  Synthetic oligonucleotide

SEQ ID NO: 592829 - DNA, 57 bp, Artificial; identical to SEQ ID NO: 433586
  Synthetic oligonucleotide

SEQ ID NO: 592830 - DNA, 59 bp, Artificial; identical to SEQ ID NO: 433587
  Synthetic oligonucleotide

SEQ ID NO: 592831 - DNA, 55 bp, Artificial; identical to SEQ ID NO: 433591
  Synthetic oligonucleotide

SEQ ID NO: 592832 - DNA, 51 bp, Artificial; identical to SEQ ID NO: 7651
  Synthetic oligonucleotide

SEQ ID NO: 592833 - DNA, 56 bp, Artificial; identical to SEQ ID NO: 433593
  Synthetic oligonucleotide

SEQ ID NO: 592834 - DNA, 59 bp, Artificial; identical to SEQ ID NO: 433594
  Synthetic oligonucleotide

SEQ ID NO: 592835 - DNA, 59 bp, Artificial; identical to SEQ ID NO: 433596
  Synthetic oligonucleotide

SEQ ID NO: 592836 - DNA, 50 bp, Artificial; identical to SEQ ID NO: 433599
  Synthetic oligonucleotide

SEQ ID NO: 592837 - DNA, 60 bp, Artificial; identical to SEQ ID NO: 7869
  Synthetic oligonucleotide

SEQ ID NO: 592838 - DNA, 58 bp, Artificial; identical to SEQ ID NO: 433601
  Synthetic oligonucleotide

SEQ ID NO: 592839 - DNA, 53 bp, Artificial; identical to SEQ ID NO: 433603
  Synthetic oligonucleotide

SEQ ID NO: 592840 - DNA, 56 bp, Artificial; identical to SEQ ID NO: 433604
  Synthetic oligonucleotide

SEQ ID NO: 592841 - DNA, 57 bp, Artificial; identical to SEQ ID NO: 433605
  Synthetic oligonucleotide

SEQ ID NO: 592842 - DNA, 56 bp, Artificial; identical to SEQ ID NO: 433606
  Synthetic oligonucleotide

SEQ ID NO: 592843 - DNA, 54 bp, Artificial; identical to SEQ ID NO: 433607
  Synthetic oligonucleotide

SEQ ID NO: 592844 - DNA, 56 bp, Artificial; identical to SEQ ID NO: 433608
  Synthetic oligonucleotide

SEQ ID NO: 592845 - DNA, 60 bp, Artificial; identical to SEQ ID NO: 433609
  Synthetic oligonucleotide

SEQ ID NO: 592846 - DNA, 60 bp, Artificial; identical to SEQ ID NO: 433610
  Synthetic oligonucleotide

SEQ ID NO: 592847 - DNA, 58 bp, Artificial; identical to SEQ ID NO: 433611
  Synthetic oligonucleotide

SEQ ID NO: 592848 - DNA, 60 bp, Artificial; identical to SEQ ID NO: 433612
  Synthetic oligonucleotide

SEQ ID NO: 592849 - DNA, 50 bp, Artificial; identical to SEQ ID NO: 433615
  Synthetic oligonucleotide

SEQ ID NO: 592850 - DNA, 55 bp, Artificial; identical to SEQ ID NO: 433617
  Synthetic oligonucleotide

SEQ ID NO: 592851 - DNA, 58 bp, Artificial; identical to SEQ ID NO: 433620
  Synthetic oligonucleotide

SEQ ID NO: 592852 - DNA, 51 bp, Artificial; identical to SEQ ID NO: 8903
  Synthetic oligonucleotide

SEQ ID NO: 592853 - DNA, 60 bp, Artificial; identical to SEQ ID NO: 433623
  Synthetic oligonucleotide

SEQ ID NO: 592854 - DNA, 55 bp, Artificial; identical to SEQ ID NO: 433625
  Synthetic oligonucleotide

SEQ ID NO: 592855 - DNA, 52 bp, Artificial; identical to SEQ ID NO: 433629
  Synthetic oligonucleotide

SEQ ID NO: 592856 - DNA, 59 bp, Artificial; identical to SEQ ID NO: 433630
  Synthetic oligonucleotide

SEQ ID NO: 592857 - DNA, 58 bp, Artificial; identical to SEQ ID NO: 433632
  Synthetic oligonucleotide

SEQ ID NO: 592858 - DNA, 60 bp, Artificial; identical to SEQ ID NO: 433635
  Synthetic oligonucleotide

SEQ ID NO: 592859 - DNA, 58 bp, Artificial; identical to SEQ ID NO: 433637
  Synthetic oligonucleotide

SEQ ID NO: 592860 - DNA, 60 bp, Artificial; identical to SEQ ID NO: 433639
  Synthetic oligonucleotide

SEQ ID NO: 592861 - DNA, 55 bp, Artificial; identical to SEQ ID NO: 433641
  Synthetic oligonucleotide

SEQ ID NO: 592862 - DNA, 52 bp, Artificial; identical to SEQ ID NO: 433645
  Synthetic oligonucleotide

SEQ ID NO: 592863 - DNA, 58 bp, Artificial; identical to SEQ ID NO: 433649
  Synthetic oligonucleotide

SEQ ID NO: 592864 - DNA, 57 bp, Artificial; identical to SEQ ID NO: 433652
  Synthetic oligonucleotide

SEQ ID NO: 592865 - DNA, 54 bp, Artificial; identical to SEQ ID NO: 433654
  Synthetic oligonucleotide

SEQ ID NO: 592866 - DNA, 52 bp, Artificial; identical to SEQ ID NO: 433658
  Synthetic oligonucleotide

SEQ ID NO: 592867 - DNA, 60 bp, Artificial; identical to SEQ ID NO: 433659
  Synthetic oligonucleotide

SEQ ID NO: 592868 - DNA, 56 bp, Artificial; identical to SEQ ID NO: 433661
  Synthetic oligonucleotide

SEQ ID NO: 592869 - DNA, 60 bp, Artificial; identical to SEQ ID NO: 433662
  Synthetic oligonucleotide

SEQ ID NO: 592870 - DNA, 58 bp, Artificial; identical to SEQ ID NO: 433663
  Synthetic oligonucleotide

SEQ ID NO: 592871 - DNA, 59 bp, Artificial; identical to SEQ ID NO: 433665
  Synthetic oligonucleotide

SEQ ID NO: 592872 - DNA, 55 bp, Artificial; identical to SEQ ID NO: 433666
  Synthetic oligonucleotide

SEQ ID NO: 592873 - DNA, 53 bp, Artificial; identical to SEQ ID NO: 433669
  Synthetic oligonucleotide

SEQ ID NO: 592874 - DNA, 60 bp, Artificial; identical to SEQ ID NO: 30579
  Synthetic oligonucleotide

SEQ ID NO: 592875 - DNA, 54 bp, Artificial; identical to SEQ ID NO: 433672
  Synthetic oligonucleotide

SEQ ID NO: 592876 - DNA, 60 bp, Artificial; identical to SEQ ID NO: 433678
  Synthetic oligonucleotide

SEQ ID NO: 592877 - DNA, 58 bp, Artificial; identical to SEQ ID NO: 433684
  Synthetic oligonucleotide

SEQ ID NO: 592878 - DNA, 55 bp, Artificial; identical to SEQ ID NO: 433687
  Synthetic oligonucleotide

SEQ ID NO: 592879 - DNA, 58 bp, Artificial; identical to SEQ ID NO: 433691
  Synthetic oligonucleotide

SEQ ID NO: 592880 - DNA, 56 bp, Artificial; identical to SEQ ID NO: 433696
  Synthetic oligonucleotide

SEQ ID NO: 592881 - DNA, 60 bp, Artificial; identical to SEQ ID NO: 433699
  Synthetic oligonucleotide

SEQ ID NO: 592882 - DNA, 55 bp, Artificial; identical to SEQ ID NO: 433701
  Synthetic oligonucleotide

SEQ ID NO: 592883 - DNA, 53 bp, Artificial; identical to SEQ ID NO: 433702
  Synthetic oligonucleotide

SEQ ID NO: 592884 - DNA, 58 bp, Artificial; identical to SEQ ID NO: 433710
  Synthetic oligonucleotide

SEQ ID NO: 592885 - DNA, 53 bp, Artificial; identical to SEQ ID NO: 433711
  Synthetic oligonucleotide

SEQ ID NO: 592886 - DNA, 51 bp, Artificial; identical to SEQ ID NO: 433712
  Synthetic oligonucleotide

SEQ ID NO: 592887 - DNA, 60 bp, Artificial; identical to SEQ ID NO: 433713
  Synthetic oligonucleotide

SEQ ID NO: 592888 - DNA, 57 bp, Artificial; identical to SEQ ID NO: 433716
  Synthetic oligonucleotide

SEQ ID NO: 592889 - DNA, 55 bp, Artificial; identical to SEQ ID NO: 433717
  Synthetic oligonucleotide

SEQ ID NO: 592890 - DNA, 60 bp, Artificial; identical to SEQ ID NO: 433721
  Synthetic oligonucleotide

SEQ ID NO: 592891 - DNA, 58 bp, Artificial; identical to SEQ ID NO: 433722
  Synthetic oligonucleotide

SEQ ID NO: 592892 - DNA, 58 bp, Artificial; identical to SEQ ID NO: 433724
  Synthetic oligonucleotide

SEQ ID NO: 592893 - DNA, 56 bp, Artificial; identical to SEQ ID NO: 433728
  Synthetic oligonucleotide

SEQ ID NO: 592894 - DNA, 60 bp, Artificial; identical to SEQ ID NO: 433729
  Synthetic oligonucleotide

SEQ ID NO: 592895 - DNA, 60 bp, Artificial; identical to SEQ ID NO: 433730
  Synthetic oligonucleotide

SEQ ID NO: 592896 - DNA, 57 bp, Artificial; identical to SEQ ID NO: 433731
  Synthetic oligonucleotide

SEQ ID NO: 592897 - DNA, 56 bp, Artificial; identical to SEQ ID NO: 433736
  Synthetic oligonucleotide

SEQ ID NO: 592898 - DNA, 59 bp, Artificial; identical to SEQ ID NO: 433738
  Synthetic oligonucleotide

SEQ ID NO: 592899 - DNA, 57 bp, Artificial; identical to SEQ ID NO: 433741
  Synthetic oligonucleotide

SEQ ID NO: 592900 - DNA, 60 bp, Artificial; identical to SEQ ID NO: 433753
  Synthetic oligonucleotide

SEQ ID NO: 592901 - DNA, 60 bp, Artificial; identical to SEQ ID NO: 433757
  Synthetic oligonucleotide

SEQ ID NO: 592902 - DNA, 54 bp, Artificial; identical to SEQ ID NO: 433758
  Synthetic oligonucleotide

SEQ ID NO: 592903 - DNA, 57 bp, Artificial; identical to SEQ ID NO: 19959
  Synthetic oligonucleotide

SEQ ID NO: 592904 - DNA, 60 bp, Artificial; identical to SEQ ID NO: 433759
  Synthetic oligonucleotide

SEQ ID NO: 592905 - DNA, 56 bp, Artificial; identical to SEQ ID NO: 433763
  Synthetic oligonucleotide

SEQ ID NO: 592906 - DNA, 55 bp, Artificial; identical to SEQ ID NO: 433767
  Synthetic oligonucleotide

SEQ ID NO: 592907 - DNA, 51 bp, Artificial; identical to SEQ ID NO: 433769
  Synthetic oligonucleotide

SEQ ID NO: 592908 - DNA, 55 bp, Artificial; identical to SEQ ID NO: 433771
  Synthetic oligonucleotide

SEQ ID NO: 592909 - DNA, 60 bp, Artificial; identical to SEQ ID NO: 433775
  Synthetic oligonucleotide

SEQ ID NO: 592910 - DNA, 60 bp, Artificial; identical to SEQ ID NO: 433779
  Synthetic oligonucleotide

SEQ ID NO: 592911 - DNA, 54 bp, Artificial; identical to SEQ ID NO: 433781
  Synthetic oligonucleotide

SEQ ID NO: 592912 - DNA, 60 bp, Artificial; identical to SEQ ID NO: 433783
  Synthetic oligonucleotide

SEQ ID NO: 592913 - DNA, 60 bp, Artificial; identical to SEQ ID NO: 433786
  Synthetic oligonucleotide

SEQ ID NO: 592914 - DNA, 60 bp, Artificial; identical to SEQ ID NO: 433787
  Synthetic oligonucleotide

SEQ ID NO: 592915 - DNA, 60 bp, Artificial; identical to SEQ ID NO: 433789
  Synthetic oligonucleotide

SEQ ID NO: 592916 - DNA, 60 bp, Artificial; identical to SEQ ID NO: 12313
  Synthetic oligonucleotide

SEQ ID NO: 592917 - DNA, 55 bp, Artificial; identical to SEQ ID NO: 433795
  Synthetic oligonucleotide

SEQ ID NO: 592918 - DNA, 53 bp, Artificial; identical to SEQ ID NO: 433796
  Synthetic oligonucleotide

SEQ ID NO: 592919 - DNA, 58 bp, Artificial; identical to SEQ ID NO: 433800
  Synthetic oligonucleotide

SEQ ID NO: 592920 - DNA, 50 bp, Artificial; identical to SEQ ID NO: 433801
  Synthetic oligonucleotide

SEQ ID NO: 592921 - DNA, 57 bp, Artificial; identical to SEQ ID NO: 433802
  Synthetic oligonucleotide

SEQ ID NO: 592922 - DNA, 55 bp, Artificial; identical to SEQ ID NO: 433804
  Synthetic oligonucleotide

SEQ ID NO: 592923 - DNA, 58 bp, Artificial; identical to SEQ ID NO: 433807
  Synthetic oligonucleotide

SEQ ID NO: 592924 - DNA, 50 bp, Artificial; identical to SEQ ID NO: 433808
  Synthetic oligonucleotide

SEQ ID NO: 592925 - DNA, 59 bp, Artificial; identical to SEQ ID NO: 433809
  Synthetic oligonucleotide

SEQ ID NO: 592926 - DNA, 58 bp, Artificial; identical to SEQ ID NO: 16017
  Synthetic oligonucleotide

SEQ ID NO: 592927 - DNA, 50 bp, Artificial; identical to SEQ ID NO: 433811
  Synthetic oligonucleotide

SEQ ID NO: 592928 - DNA, 59 bp, Artificial; identical to SEQ ID NO: 433812
  Synthetic oligonucleotide

SEQ ID NO: 592929 - DNA, 59 bp, Artificial; identical to SEQ ID NO: 433813
  Synthetic oligonucleotide

SEQ ID NO: 592930 - DNA, 60 bp, Artificial; identical to SEQ ID NO: 433815
  Synthetic oligonucleotide

SEQ ID NO: 592931 - DNA, 59 bp, Artificial; identical to SEQ ID NO: 433820
  Synthetic oligonucleotide

SEQ ID NO: 592932 - DNA, 55 bp, Artificial; identical to SEQ ID NO: 433822
  Synthetic oligonucleotide

SEQ ID NO: 592933 - DNA, 58 bp, Artificial; identical to SEQ ID NO: 433824
  Synthetic oligonucleotide

SEQ ID NO: 592934 - DNA, 56 bp, Artificial; identical to SEQ ID NO: 18182
  Synthetic oligonucleotide

SEQ ID NO: 592935 - DNA, 55 bp, Artificial; identical to SEQ ID NO: 433829
  Synthetic oligonucleotide

SEQ ID NO: 592936 - DNA, 55 bp, Artificial; identical to SEQ ID NO: 433831
  Synthetic oligonucleotide

SEQ ID NO: 592937 - DNA, 55 bp, Artificial; identical to SEQ ID NO: 433833
  Synthetic oligonucleotide

SEQ ID NO: 592938 - DNA, 60 bp, Artificial; identical to SEQ ID NO: 433834
  Synthetic oligonucleotide

SEQ ID NO: 592939 - DNA, 57 bp, Artificial; identical to SEQ ID NO: 433835
  Synthetic oligonucleotide

SEQ ID NO: 592940 - DNA, 53 bp, Artificial; identical to SEQ ID NO: 433838
  Synthetic oligonucleotide

SEQ ID NO: 592941 - DNA, 58 bp, Artificial; identical to SEQ ID NO: 433839
  Synthetic oligonucleotide

SEQ ID NO: 592942 - DNA, 60 bp, Artificial; identical to SEQ ID NO: 433841
  Synthetic oligonucleotide

SEQ ID NO: 592943 - DNA, 51 bp, Artificial; identical to SEQ ID NO: 433843
  Synthetic oligonucleotide

SEQ ID NO: 592944 - DNA, 50 bp, Artificial; identical to SEQ ID NO: 433844
  Synthetic oligonucleotide

SEQ ID NO: 592945 - DNA, 55 bp, Artificial; identical to SEQ ID NO: 433845
  Synthetic oligonucleotide

SEQ ID NO: 592946 - DNA, 60 bp, Artificial; identical to SEQ ID NO: 433846
  Synthetic oligonucleotide

SEQ ID NO: 592947 - DNA, 50 bp, Artificial; identical to SEQ ID NO: 433847
  Synthetic oligonucleotide

SEQ ID NO: 592948 - DNA, 56 bp, Artificial; identical to SEQ ID NO: 433850
  Synthetic oligonucleotide

SEQ ID NO: 592949 - DNA, 60 bp, Artificial; identical to SEQ ID NO: 433851
  Synthetic oligonucleotide

SEQ ID NO: 592950 - DNA, 52 bp, Artificial; identical to SEQ ID NO: 433852
  Synthetic oligonucleotide

SEQ ID NO: 592951 - DNA, 55 bp, Artificial; identical to SEQ ID NO: 433853
  Synthetic oligonucleotide

SEQ ID NO: 592952 - DNA, 50 bp, Artificial; identical to SEQ ID NO: 433854
  Synthetic oligonucleotide

SEQ ID NO: 592953 - DNA, 56 bp, Artificial; identical to SEQ ID NO: 433856
  Synthetic oligonucleotide

SEQ ID NO: 592954 - DNA, 60 bp, Artificial; identical to SEQ ID NO: 433858
  Synthetic oligonucleotide

SEQ ID NO: 592955 - DNA, 52 bp, Artificial; identical to SEQ ID NO: 433859
  Synthetic oligonucleotide

SEQ ID NO: 592956 - DNA, 55 bp, Artificial; identical to SEQ ID NO: 433863
  Synthetic oligonucleotide

SEQ ID NO: 592957 - DNA, 59 bp, Artificial; identical to SEQ ID NO: 433866
  Synthetic oligonucleotide

SEQ ID NO: 592958 - DNA, 60 bp, Artificial; identical to SEQ ID NO: 433868
  Synthetic oligonucleotide

SEQ ID NO: 592959 - DNA, 51 bp, Artificial; identical to SEQ ID NO: 433870
  Synthetic oligonucleotide

SEQ ID NO: 592960 - DNA, 55 bp, Artificial; identical to SEQ ID NO: 433873
  Synthetic oligonucleotide

SEQ ID NO: 592961 - DNA, 59 bp, Artificial; identical to SEQ ID NO: 433874
  Synthetic oligonucleotide

SEQ ID NO: 592962 - DNA, 60 bp, Artificial; identical to SEQ ID NO: 433878
  Synthetic oligonucleotide

SEQ ID NO: 592963 - DNA, 58 bp, Artificial; identical to SEQ ID NO: 433879
  Synthetic oligonucleotide

SEQ ID NO: 592964 - DNA, 55 bp, Artificial; identical to SEQ ID NO: 433880
  Synthetic oligonucleotide

SEQ ID NO: 592965 - DNA, 60 bp, Artificial; identical to SEQ ID NO: 433885
  Synthetic oligonucleotide

SEQ ID NO: 592966 - DNA, 55 bp, Artificial; identical to SEQ ID NO: 433888
  Synthetic oligonucleotide

SEQ ID NO: 592967 - DNA, 55 bp, Artificial; identical to SEQ ID NO: 433889
  Synthetic oligonucleotide

SEQ ID NO: 592968 - DNA, 56 bp, Artificial; identical to SEQ ID NO: 433892
  Synthetic oligonucleotide

SEQ ID NO: 592969 - DNA, 55 bp, Artificial; identical to SEQ ID NO: 433893
  Synthetic oligonucleotide

SEQ ID NO: 592970 - DNA, 59 bp, Artificial; identical to SEQ ID NO: 433896
  Synthetic oligonucleotide

SEQ ID NO: 592971 - DNA, 50 bp, Artificial; identical to SEQ ID NO: 433897
  Synthetic oligonucleotide

SEQ ID NO: 592972 - DNA, 56 bp, Artificial; identical to SEQ ID NO: 433898
  Synthetic oligonucleotide

SEQ ID NO: 592973 - DNA, 60 bp, Artificial; identical to SEQ ID NO: 433900
  Synthetic oligonucleotide

SEQ ID NO: 592974 - DNA, 60 bp, Artificial; identical to SEQ ID NO: 14274
  Synthetic oligonucleotide

SEQ ID NO: 592975 - DNA, 59 bp, Artificial; identical to SEQ ID NO: 433904
  Synthetic oligonucleotide

SEQ ID NO: 592976 - DNA, 55 bp, Artificial; identical to SEQ ID NO: 433906
  Synthetic oligonucleotide

SEQ ID NO: 592977 - DNA, 53 bp, Artificial; identical to SEQ ID NO: 433909
  Synthetic oligonucleotide

SEQ ID NO: 592978 - DNA, 60 bp, Artificial; identical to SEQ ID NO: 14100
  Synthetic oligonucleotide

SEQ ID NO: 592979 - DNA, 57 bp, Artificial; identical to SEQ ID NO: 433913
  Synthetic oligonucleotide

SEQ ID NO: 592980 - DNA, 60 bp, Artificial; identical to SEQ ID NO: 433916
  Synthetic oligonucleotide

SEQ ID NO: 592981 - DNA, 52 bp, Artificial; identical to SEQ ID NO: 433917
  Synthetic oligonucleotide

SEQ ID NO: 592982 - DNA, 50 bp, Artificial; identical to SEQ ID NO: 433921
  Synthetic oligonucleotide

SEQ ID NO: 592983 - DNA, 56 bp, Artificial; identical to SEQ ID NO: 18688
  Synthetic oligonucleotide

SEQ ID NO: 592984 - DNA, 55 bp, Artificial; identical to SEQ ID NO: 433922
  Synthetic oligonucleotide

SEQ ID NO: 592985 - DNA, 55 bp, Artificial; identical to SEQ ID NO: 433923
  Synthetic oligonucleotide

SEQ ID NO: 592986 - DNA, 56 bp, Artificial; identical to SEQ ID NO: 433924
  Synthetic oligonucleotide

SEQ ID NO: 592987 - DNA, 55 bp, Artificial; identical to SEQ ID NO: 433926
  Synthetic oligonucleotide

SEQ ID NO: 592988 - DNA, 59 bp, Artificial; identical to SEQ ID NO: 433927
  Synthetic oligonucleotide

SEQ ID NO: 592989 - DNA, 58 bp, Artificial; identical to SEQ ID NO: 433929
  Synthetic oligonucleotide

SEQ ID NO: 592990 - DNA, 55 bp, Artificial; identical to SEQ ID NO: 433931
  Synthetic oligonucleotide

SEQ ID NO: 592991 - DNA, 60 bp, Artificial; identical to SEQ ID NO: 433936
  Synthetic oligonucleotide

SEQ ID NO: 592992 - DNA, 54 bp, Artificial; identical to SEQ ID NO: 433938
  Synthetic oligonucleotide

SEQ ID NO: 592993 - DNA, 60 bp, Artificial; identical to SEQ ID NO: 433940
  Synthetic oligonucleotide

SEQ ID NO: 592994 - DNA, 53 bp, Artificial; identical to SEQ ID NO: 433941
  Synthetic oligonucleotide

SEQ ID NO: 592995 - DNA, 55 bp, Artificial; identical to SEQ ID NO: 433942
  Synthetic oligonucleotide

SEQ ID NO: 592996 - DNA, 55 bp, Artificial; identical to SEQ ID NO: 433943
  Synthetic oligonucleotide

SEQ ID NO: 592997 - DNA, 50 bp, Artificial; identical to SEQ ID NO: 223
  Synthetic oligonucleotide

SEQ ID NO: 592998 - DNA, 60 bp, Artificial; identical to SEQ ID NO: 433947
  Synthetic oligonucleotide

SEQ ID NO: 592999 - DNA, 60 bp, Artificial; identical to SEQ ID NO: 433952
  Synthetic oligonucleotide

SEQ ID NO: 593000 - DNA, 55 bp, Artificial; identical to SEQ ID NO: 433954
  Synthetic oligonucleotide

SEQ ID NO: 593001 - DNA, 55 bp, Artificial; identical to SEQ ID NO: 433955
  Synthetic oligonucleotide

SEQ ID NO: 593002 - DNA, 54 bp, Artificial; identical to SEQ ID NO: 433957
  Synthetic oligonucleotide

SEQ ID NO: 593003 - DNA, 54 bp, Artificial; identical to SEQ ID NO: 433958
  Synthetic oligonucleotide

SEQ ID NO: 593004 - DNA, 58 bp, Artificial; identical to SEQ ID NO: 433959
  Synthetic oligonucleotide

SEQ ID NO: 593005 - DNA, 51 bp, Artificial; identical to SEQ ID NO: 433963
  Synthetic oligonucleotide

SEQ ID NO: 593006 - DNA, 57 bp, Artificial; identical to SEQ ID NO: 433965
  Synthetic oligonucleotide

SEQ ID NO: 593007 - DNA, 57 bp, Artificial; identical to SEQ ID NO: 433967
  Synthetic oligonucleotide

SEQ ID NO: 593008 - DNA, 60 bp, Artificial; identical to SEQ ID NO: 433970
  Synthetic oligonucleotide

SEQ ID NO: 593009 - DNA, 54 bp, Artificial; identical to SEQ ID NO: 433971
  Synthetic oligonucleotide

SEQ ID NO: 593010 - DNA, 60 bp, Artificial; identical to SEQ ID NO: 433972
  Synthetic oligonucleotide

SEQ ID NO: 593011 - DNA, 55 bp, Artificial; identical to SEQ ID NO: 433976
  Synthetic oligonucleotide

SEQ ID NO: 593012 - DNA, 60 bp, Artificial; identical to SEQ ID NO: 9490
  Synthetic oligonucleotide

SEQ ID NO: 593013 - DNA, 55 bp, Artificial; identical to SEQ ID NO: 10552
  Synthetic oligonucleotide

SEQ ID NO: 593014 - DNA, 53 bp, Artificial; identical to SEQ ID NO: 433981
  Synthetic oligonucleotide

SEQ ID NO: 593015 - DNA, 50 bp, Artificial; identical to SEQ ID NO: 433982
  Synthetic oligonucleotide

SEQ ID NO: 593016 - DNA, 54 bp, Artificial; identical to SEQ ID NO: 433985
  Synthetic oligonucleotide

SEQ ID NO: 593017 - DNA, 56 bp, Artificial; identical to SEQ ID NO: 433987
  Synthetic oligonucleotide

SEQ ID NO: 593018 - DNA, 55 bp, Artificial; identical to SEQ ID NO: 433990
  Synthetic oligonucleotide

SEQ ID NO: 593019 - DNA, 60 bp, Artificial; identical to SEQ ID NO: 433991
  Synthetic oligonucleotide

SEQ ID NO: 593020 - DNA, 56 bp, Artificial; identical to SEQ ID NO: 433992
  Synthetic oligonucleotide

SEQ ID NO: 593021 - DNA, 60 bp, Artificial; identical to SEQ ID NO: 433994
  Synthetic oligonucleotide

SEQ ID NO: 593022 - DNA, 56 bp, Artificial; identical to SEQ ID NO: 433998
  Synthetic oligonucleotide

SEQ ID NO: 593023 - DNA, 60 bp, Artificial; identical to SEQ ID NO: 433999
  Synthetic oligonucleotide

SEQ ID NO: 593024 - DNA, 55 bp, Artificial; identical to SEQ ID NO: 434000
  Synthetic oligonucleotide

SEQ ID NO: 593025 - DNA, 53 bp, Artificial; identical to SEQ ID NO: 434004
  Synthetic oligonucleotide

SEQ ID NO: 593026 - DNA, 55 bp, Artificial; identical to SEQ ID NO: 434005
  Synthetic oligonucleotide

SEQ ID NO: 593027 - DNA, 55 bp, Artificial; identical to SEQ ID NO: 434007
  Synthetic oligonucleotide

SEQ ID NO: 593028 - DNA, 55 bp, Artificial; identical to SEQ ID NO: 434008
  Synthetic oligonucleotide

SEQ ID NO: 593029 - DNA, 60 bp, Artificial; identical to SEQ ID NO: 434014
  Synthetic oligonucleotide

SEQ ID NO: 593030 - DNA, 60 bp, Artificial; identical to SEQ ID NO: 434015
  Synthetic oligonucleotide

SEQ ID NO: 593031 - DNA, 60 bp, Artificial; identical to SEQ ID NO: 434018
  Synthetic oligonucleotide

SEQ ID NO: 593032 - DNA, 50 bp, Artificial; identical to SEQ ID NO: 434019
  Synthetic oligonucleotide

SEQ ID NO: 593033 - DNA, 60 bp, Artificial; identical to SEQ ID NO: 434025
  Synthetic oligonucleotide

SEQ ID NO: 593034 - DNA, 55 bp, Artificial; identical to SEQ ID NO: 434031
  Synthetic oligonucleotide

SEQ ID NO: 593035 - DNA, 51 bp, Artificial; identical to SEQ ID NO: 434032
  Synthetic oligonucleotide

SEQ ID NO: 593036 - DNA, 51 bp, Artificial; identical to SEQ ID NO: 434033
  Synthetic oligonucleotide

SEQ ID NO: 593037 - DNA, 55 bp, Artificial; identical to SEQ ID NO: 434037
  Synthetic oligonucleotide

SEQ ID NO: 593038 - DNA, 57 bp, Artificial; identical to SEQ ID NO: 434039
  Synthetic oligonucleotide

SEQ ID NO: 593039 - DNA, 60 bp, Artificial; identical to SEQ ID NO: 6392
  Synthetic oligonucleotide

SEQ ID NO: 593040 - DNA, 52 bp, Artificial; identical to SEQ ID NO: 434052
  Synthetic oligonucleotide

SEQ ID NO: 593041 - DNA, 55 bp, Artificial; identical to SEQ ID NO: 434053
  Synthetic oligonucleotide

SEQ ID NO: 593042 - DNA, 54 bp, Artificial; identical to SEQ ID NO: 434054
  Synthetic oligonucleotide

SEQ ID NO: 593043 - DNA, 60 bp, Artificial; identical to SEQ ID NO: 434055
  Synthetic oligonucleotide

SEQ ID NO: 593044 - DNA, 51 bp, Artificial; identical to SEQ ID NO: 434058
  Synthetic oligonucleotide

SEQ ID NO: 593045 - DNA, 60 bp, Artificial; identical to SEQ ID NO: 434065
  Synthetic oligonucleotide

SEQ ID NO: 593046 - DNA, 57 bp, Artificial; identical to SEQ ID NO: 434069
  Synthetic oligonucleotide

SEQ ID NO: 593047 - DNA, 53 bp, Artificial; identical to SEQ ID NO: 434071
  Synthetic oligonucleotide

SEQ ID NO: 593048 - DNA, 58 bp, Artificial; identical to SEQ ID NO: 434073
  Synthetic oligonucleotide

SEQ ID NO: 593049 - DNA, 55 bp, Artificial; identical to SEQ ID NO: 434075
  Synthetic oligonucleotide

SEQ ID NO: 593050 - DNA, 60 bp, Artificial; identical to SEQ ID NO: 434078
  Synthetic oligonucleotide

SEQ ID NO: 593051 - DNA, 52 bp, Artificial; identical to SEQ ID NO: 434079
  Synthetic oligonucleotide

SEQ ID NO: 593052 - DNA, 54 bp, Artificial; identical to SEQ ID NO: 434081
  Synthetic oligonucleotide

SEQ ID NO: 593053 - DNA, 55 bp, Artificial; identical to SEQ ID NO: 434084
  Synthetic oligonucleotide

SEQ ID NO: 593054 - DNA, 56 bp, Artificial; identical to SEQ ID NO: 434089
  Synthetic oligonucleotide

SEQ ID NO: 593055 - DNA, 56 bp, Artificial; identical to SEQ ID NO: 434090
  Synthetic oligonucleotide

SEQ ID NO: 593056 - DNA, 54 bp, Artificial; identical to SEQ ID NO: 434094
  Synthetic oligonucleotide

SEQ ID NO: 593057 - DNA, 55 bp, Artificial; identical to SEQ ID NO: 434096
  Synthetic oligonucleotide

SEQ ID NO: 593058 - DNA, 58 bp, Artificial; identical to SEQ ID NO: 434097
  Synthetic oligonucleotide

SEQ ID NO: 593059 - DNA, 60 bp, Artificial; identical to SEQ ID NO: 434099
  Synthetic oligonucleotide

SEQ ID NO: 593060 - DNA, 60 bp, Artificial; identical to SEQ ID NO: 434101
  Synthetic oligonucleotide

SEQ ID NO: 593061 - DNA, 58 bp, Artificial; identical to SEQ ID NO: 434103
  Synthetic oligonucleotide

SEQ ID NO: 593062 - DNA, 58 bp, Artificial; identical to SEQ ID NO: 434104
  Synthetic oligonucleotide

SEQ ID NO: 593063 - DNA, 57 bp, Artificial; identical to SEQ ID NO: 434114
  Synthetic oligonucleotide

SEQ ID NO: 593064 - DNA, 54 bp, Artificial; identical to SEQ ID NO: 434119
  Synthetic oligonucleotide

SEQ ID NO: 593065 - DNA, 57 bp, Artificial; identical to SEQ ID NO: 434120
  Synthetic oligonucleotide

SEQ ID NO: 593066 - DNA, 55 bp, Artificial; identical to SEQ ID NO: 14159
  Synthetic oligonucleotide

SEQ ID NO: 593067 - DNA, 55 bp, Artificial; identical to SEQ ID NO: 434122
  Synthetic oligonucleotide

SEQ ID NO: 593068 - DNA, 55 bp, Artificial; identical to SEQ ID NO: 434125
  Synthetic oligonucleotide

SEQ ID NO: 593069 - DNA, 60 bp, Artificial; identical to SEQ ID NO: 7915
  Synthetic oligonucleotide

SEQ ID NO: 593070 - DNA, 58 bp, Artificial; identical to SEQ ID NO: 434126
  Synthetic oligonucleotide

SEQ ID NO: 593071 - DNA, 59 bp, Artificial; identical to SEQ ID NO: 434127
  Synthetic oligonucleotide

SEQ ID NO: 593072 - DNA, 60 bp, Artificial; identical to SEQ ID NO: 434129
  Synthetic oligonucleotide

SEQ ID NO: 593073 - DNA, 60 bp, Artificial; identical to SEQ ID NO: 434130
  Synthetic oligonucleotide

SEQ ID NO: 593074 - DNA, 60 bp, Artificial; identical to SEQ ID NO: 434131
  Synthetic oligonucleotide

SEQ ID NO: 593075 - DNA, 59 bp, Artificial; identical to SEQ ID NO: 434133
  Synthetic oligonucleotide

SEQ ID NO: 593076 - DNA, 55 bp, Artificial; identical to SEQ ID NO: 434135
  Synthetic oligonucleotide

SEQ ID NO: 593077 - DNA, 59 bp, Artificial; identical to SEQ ID NO: 434140
  Synthetic oligonucleotide

SEQ ID NO: 593078 - DNA, 55 bp, Artificial; identical to SEQ ID NO: 9420
  Synthetic oligonucleotide

SEQ ID NO: 593079 - DNA, 55 bp, Artificial; identical to SEQ ID NO: 434141
  Synthetic oligonucleotide

SEQ ID NO: 593080 - DNA, 59 bp, Artificial; identical to SEQ ID NO: 434144
  Synthetic oligonucleotide

SEQ ID NO: 593081 - DNA, 60 bp, Artificial; identical to SEQ ID NO: 434145
  Synthetic oligonucleotide

SEQ ID NO: 593082 - DNA, 59 bp, Artificial; identical to SEQ ID NO: 434154
  Synthetic oligonucleotide

SEQ ID NO: 593083 - DNA, 57 bp, Artificial; identical to SEQ ID NO: 434156
  Synthetic oligonucleotide

SEQ ID NO: 593084 - DNA, 53 bp, Artificial; identical to SEQ ID NO: 434159
  Synthetic oligonucleotide

SEQ ID NO: 593085 - DNA, 55 bp, Artificial; identical to SEQ ID NO: 434160
  Synthetic oligonucleotide

SEQ ID NO: 593086 - DNA, 60 bp, Artificial; identical to SEQ ID NO: 434162
  Synthetic oligonucleotide

SEQ ID NO: 593087 - DNA, 54 bp, Artificial; identical to SEQ ID NO: 434164
  Synthetic oligonucleotide

SEQ ID NO: 593088 - DNA, 60 bp, Artificial; identical to SEQ ID NO: 434165
  Synthetic oligonucleotide

SEQ ID NO: 593089 - DNA, 50 bp, Artificial; identical to SEQ ID NO: 434167
  Synthetic oligonucleotide

SEQ ID NO: 593090 - DNA, 58 bp, Artificial; identical to SEQ ID NO: 434169
  Synthetic oligonucleotide

SEQ ID NO: 593091 - DNA, 50 bp, Artificial; identical to SEQ ID NO: 434170
  Synthetic oligonucleotide

SEQ ID NO: 593092 - DNA, 54 bp, Artificial; identical to SEQ ID NO: 434172
  Synthetic oligonucleotide

SEQ ID NO: 593093 - DNA, 57 bp, Artificial; identical to SEQ ID NO: 434173
  Synthetic oligonucleotide

SEQ ID NO: 593094 - DNA, 55 bp, Artificial; identical to SEQ ID NO: 434177
  Synthetic oligonucleotide

SEQ ID NO: 593095 - DNA, 55 bp, Artificial; identical to SEQ ID NO: 434179
  Synthetic oligonucleotide

SEQ ID NO: 593096 - DNA, 60 bp, Artificial; identical to SEQ ID NO: 434183
  Synthetic oligonucleotide

SEQ ID NO: 593097 - DNA, 58 bp, Artificial; identical to SEQ ID NO: 434185
  Synthetic oligonucleotide

SEQ ID NO: 593098 - DNA, 57 bp, Artificial; identical to SEQ ID NO: 434187
  Synthetic oligonucleotide

SEQ ID NO: 593099 - DNA, 56 bp, Artificial; identical to SEQ ID NO: 434190
  Synthetic oligonucleotide

SEQ ID NO: 593100 - DNA, 58 bp, Artificial; identical to SEQ ID NO: 434192
  Synthetic oligonucleotide

SEQ ID NO: 593101 - DNA, 51 bp, Artificial; identical to SEQ ID NO: 434195
  Synthetic oligonucleotide

SEQ ID NO: 593102 - DNA, 60 bp, Artificial; identical to SEQ ID NO: 434196
  Synthetic oligonucleotide

SEQ ID NO: 593103 - DNA, 60 bp, Artificial; identical to SEQ ID NO: 64345
  Synthetic oligonucleotide

SEQ ID NO: 593104 - DNA, 60 bp, Artificial; identical to SEQ ID NO: 434201
  Synthetic oligonucleotide

SEQ ID NO: 593105 - DNA, 50 bp, Artificial; identical to SEQ ID NO: 434202
  Synthetic oligonucleotide

SEQ ID NO: 593106 - DNA, 59 bp, Artificial; identical to SEQ ID NO: 434204
  Synthetic oligonucleotide

SEQ ID NO: 593107 - DNA, 56 bp, Artificial; identical to SEQ ID NO: 434206
  Synthetic oligonucleotide

SEQ ID NO: 593108 - DNA, 60 bp, Artificial; identical to SEQ ID NO: 434208
  Synthetic oligonucleotide

SEQ ID NO: 593109 - DNA, 55 bp, Artificial; identical to SEQ ID NO: 19530
  Synthetic oligonucleotide

SEQ ID NO: 593110 - DNA, 60 bp, Artificial; identical to SEQ ID NO: 106779
  Synthetic oligonucleotide

SEQ ID NO: 593111 - DNA, 60 bp, Artificial; identical to SEQ ID NO: 434214
  Synthetic oligonucleotide

SEQ ID NO: 593112 - DNA, 57 bp, Artificial; identical to SEQ ID NO: 434215
  Synthetic oligonucleotide

SEQ ID NO: 593113 - DNA, 60 bp, Artificial; identical to SEQ ID NO: 434217
  Synthetic oligonucleotide

SEQ ID NO: 593114 - DNA, 56 bp, Artificial; identical to SEQ ID NO: 434222
  Synthetic oligonucleotide

SEQ ID NO: 593115 - DNA, 60 bp, Artificial; identical to SEQ ID NO: 434223
  Synthetic oligonucleotide

SEQ ID NO: 593116 - DNA, 55 bp, Artificial; identical to SEQ ID NO: 434224
  Synthetic oligonucleotide

SEQ ID NO: 593117 - DNA, 56 bp, Artificial; identical to SEQ ID NO: 434227
  Synthetic oligonucleotide

SEQ ID NO: 593118 - DNA, 56 bp, Artificial; identical to SEQ ID NO: 434228
  Synthetic oligonucleotide

SEQ ID NO: 593119 - DNA, 55 bp, Artificial; identical to SEQ ID NO: 434231
  Synthetic oligonucleotide

SEQ ID NO: 593120 - DNA, 54 bp, Artificial; identical to SEQ ID NO: 434236
  Synthetic oligonucleotide

SEQ ID NO: 593121 - DNA, 60 bp, Artificial; identical to SEQ ID NO: 434240
  Synthetic oligonucleotide

SEQ ID NO: 593122 - DNA, 56 bp, Artificial; identical to SEQ ID NO: 434241
  Synthetic oligonucleotide

SEQ ID NO: 593123 - DNA, 60 bp, Artificial; identical to SEQ ID NO: 434243
  Synthetic oligonucleotide

SEQ ID NO: 593124 - DNA, 51 bp, Artificial; identical to SEQ ID NO: 434246
  Synthetic oligonucleotide

SEQ ID NO: 593125 - DNA, 59 bp, Artificial; identical to SEQ ID NO: 19905
  Synthetic oligonucleotide

SEQ ID NO: 593126 - DNA, 60 bp, Artificial; identical to SEQ ID NO: 434251
  Synthetic oligonucleotide

SEQ ID NO: 593127 - DNA, 57 bp, Artificial; identical to SEQ ID NO: 434253
  Synthetic oligonucleotide

SEQ ID NO: 593128 - DNA, 51 bp, Artificial; identical to SEQ ID NO: 434254
  Synthetic oligonucleotide

SEQ ID NO: 593129 - DNA, 55 bp, Artificial; identical to SEQ ID NO: 434259
  Synthetic oligonucleotide

SEQ ID NO: 593130 - DNA, 51 bp, Artificial; identical to SEQ ID NO: 434263
  Synthetic oligonucleotide

SEQ ID NO: 593131 - DNA, 59 bp, Artificial; identical to SEQ ID NO: 434265
  Synthetic oligonucleotide

SEQ ID NO: 593132 - DNA, 57 bp, Artificial; identical to SEQ ID NO: 434267
  Synthetic oligonucleotide

SEQ ID NO: 593133 - DNA, 60 bp, Artificial; identical to SEQ ID NO: 434271
  Synthetic oligonucleotide

SEQ ID NO: 593134 - DNA, 55 bp, Artificial; identical to SEQ ID NO: 434275
  Synthetic oligonucleotide

SEQ ID NO: 593135 - DNA, 60 bp, Artificial; identical to SEQ ID NO: 434276
  Synthetic oligonucleotide

SEQ ID NO: 593136 - DNA, 54 bp, Artificial; identical to SEQ ID NO: 434281
  Synthetic oligonucleotide

SEQ ID NO: 593137 - DNA, 58 bp, Artificial; identical to SEQ ID NO: 434284
  Synthetic oligonucleotide

SEQ ID NO: 593138 - DNA, 55 bp, Artificial; identical to SEQ ID NO: 434289
  Synthetic oligonucleotide

SEQ ID NO: 593139 - DNA, 52 bp, Artificial; identical to SEQ ID NO: 434290
  Synthetic oligonucleotide

SEQ ID NO: 593140 - DNA, 54 bp, Artificial; identical to SEQ ID NO: 434294
  Synthetic oligonucleotide

SEQ ID NO: 593141 - DNA, 60 bp, Artificial; identical to SEQ ID NO: 434297
  Synthetic oligonucleotide

SEQ ID NO: 593142 - DNA, 51 bp, Artificial; identical to SEQ ID NO: 434298
  Synthetic oligonucleotide

SEQ ID NO: 593143 - DNA, 55 bp, Artificial; identical to SEQ ID NO: 434299
  Synthetic oligonucleotide

SEQ ID NO: 593144 - DNA, 55 bp, Artificial; identical to SEQ ID NO: 434303
  Synthetic oligonucleotide

SEQ ID NO: 593145 - DNA, 60 bp, Artificial; identical to SEQ ID NO: 434305
  Synthetic oligonucleotide

SEQ ID NO: 593146 - DNA, 52 bp, Artificial; identical to SEQ ID NO: 434311
  Synthetic oligonucleotide

SEQ ID NO: 593147 - DNA, 50 bp, Artificial; identical to SEQ ID NO: 434313
  Synthetic oligonucleotide

SEQ ID NO: 593148 - DNA, 59 bp, Artificial; identical to SEQ ID NO: 434314
  Synthetic oligonucleotide

SEQ ID NO: 593149 - DNA, 58 bp, Artificial; identical to SEQ ID NO: 434317
  Synthetic oligonucleotide

SEQ ID NO: 593150 - DNA, 50 bp, Artificial; identical to SEQ ID NO: 434319
  Synthetic oligonucleotide

SEQ ID NO: 593151 - DNA, 59 bp, Artificial; identical to SEQ ID NO: 434320
  Synthetic oligonucleotide

SEQ ID NO: 593152 - DNA, 53 bp, Artificial; identical to SEQ ID NO: 434323
  Synthetic oligonucleotide

SEQ ID NO: 593153 - DNA, 57 bp, Artificial; identical to SEQ ID NO: 434327
  Synthetic oligonucleotide

SEQ ID NO: 593154 - DNA, 53 bp, Artificial; identical to SEQ ID NO: 434328
  Synthetic oligonucleotide

SEQ ID NO: 593155 - DNA, 60 bp, Artificial; identical to SEQ ID NO: 434329
  Synthetic oligonucleotide

SEQ ID NO: 593156 - DNA, 55 bp, Artificial; identical to SEQ ID NO: 434332
  Synthetic oligonucleotide

SEQ ID NO: 593157 - DNA, 59 bp, Artificial; identical to SEQ ID NO: 434334
  Synthetic oligonucleotide

SEQ ID NO: 593158 - DNA, 56 bp, Artificial; identical to SEQ ID NO: 434336
  Synthetic oligonucleotide

SEQ ID NO: 593159 - DNA, 55 bp, Artificial; identical to SEQ ID NO: 434337
  Synthetic oligonucleotide

SEQ ID NO: 593160 - DNA, 53 bp, Artificial; identical to SEQ ID NO: 434338
  Synthetic oligonucleotide

SEQ ID NO: 593161 - DNA, 55 bp, Artificial; identical to SEQ ID NO: 434339
  Synthetic oligonucleotide

SEQ ID NO: 593162 - DNA, 55 bp, Artificial; identical to SEQ ID NO: 434340
  Synthetic oligonucleotide

SEQ ID NO: 593163 - DNA, 55 bp, Artificial; identical to SEQ ID NO: 434348
  Synthetic oligonucleotide

SEQ ID NO: 593164 - DNA, 58 bp, Artificial; identical to SEQ ID NO: 434352
  Synthetic oligonucleotide

SEQ ID NO: 593165 - DNA, 60 bp, Artificial; identical to SEQ ID NO: 434353
  Synthetic oligonucleotide

SEQ ID NO: 593166 - DNA, 56 bp, Artificial; identical to SEQ ID NO: 434354
  Synthetic oligonucleotide

SEQ ID NO: 593167 - DNA, 56 bp, Artificial; identical to SEQ ID NO: 434357
  Synthetic oligonucleotide

SEQ ID NO: 593168 - DNA, 60 bp, Artificial; identical to SEQ ID NO: 434360
  Synthetic oligonucleotide

SEQ ID NO: 593169 - DNA, 60 bp, Artificial; identical to SEQ ID NO: 434361
  Synthetic oligonucleotide

SEQ ID NO: 593170 - DNA, 50 bp, Artificial; identical to SEQ ID NO: 434362
  Synthetic oligonucleotide

SEQ ID NO: 593171 - DNA, 55 bp, Artificial; identical to SEQ ID NO: 434363
  Synthetic oligonucleotide

SEQ ID NO: 593172 - DNA, 60 bp, Artificial; identical to SEQ ID NO: 434364
  Synthetic oligonucleotide

SEQ ID NO: 593173 - DNA, 59 bp, Artificial; identical to SEQ ID NO: 434365
  Synthetic oligonucleotide

SEQ ID NO: 593174 - DNA, 60 bp, Artificial; identical to SEQ ID NO: 14795
  Synthetic oligonucleotide

SEQ ID NO: 593175 - DNA, 58 bp, Artificial; identical to SEQ ID NO: 434370
  Synthetic oligonucleotide

SEQ ID NO: 593176 - DNA, 58 bp, Artificial; identical to SEQ ID NO: 434371
  Synthetic oligonucleotide

SEQ ID NO: 593177 - DNA, 53 bp, Artificial; identical to SEQ ID NO: 434372
  Synthetic oligonucleotide

SEQ ID NO: 593178 - DNA, 56 bp, Artificial; identical to SEQ ID NO: 434373
  Synthetic oligonucleotide

SEQ ID NO: 593179 - DNA, 60 bp, Artificial; identical to SEQ ID NO: 434376
  Synthetic oligonucleotide

SEQ ID NO: 593180 - DNA, 54 bp, Artificial; identical to SEQ ID NO: 434379
  Synthetic oligonucleotide

SEQ ID NO: 593181 - DNA, 57 bp, Artificial; identical to SEQ ID NO: 434380
  Synthetic oligonucleotide

SEQ ID NO: 593182 - DNA, 60 bp, Artificial; identical to SEQ ID NO: 434381
  Synthetic oligonucleotide

SEQ ID NO: 593183 - DNA, 60 bp, Artificial; identical to SEQ ID NO: 434382
  Synthetic oligonucleotide

SEQ ID NO: 593184 - DNA, 60 bp, Artificial; identical to SEQ ID NO: 434387
  Synthetic oligonucleotide

SEQ ID NO: 593185 - DNA, 55 bp, Artificial; identical to SEQ ID NO: 434392
  Synthetic oligonucleotide

SEQ ID NO: 593186 - DNA, 55 bp, Artificial; identical to SEQ ID NO: 434393
  Synthetic oligonucleotide

SEQ ID NO: 593187 - DNA, 60 bp, Artificial; identical to SEQ ID NO: 434396
  Synthetic oligonucleotide

SEQ ID NO: 593188 - DNA, 55 bp, Artificial; identical to SEQ ID NO: 434397
  Synthetic oligonucleotide

SEQ ID NO: 593189 - DNA, 60 bp, Artificial; identical to SEQ ID NO: 434398
  Synthetic oligonucleotide

SEQ ID NO: 593190 - DNA, 58 bp, Artificial; identical to SEQ ID NO: 434400
  Synthetic oligonucleotide

SEQ ID NO: 593191 - DNA, 53 bp, Artificial; identical to SEQ ID NO: 434401
  Synthetic oligonucleotide

SEQ ID NO: 593192 - DNA, 55 bp, Artificial; identical to SEQ ID NO: 434403
  Synthetic oligonucleotide

SEQ ID NO: 593193 - DNA, 60 bp, Artificial; identical to SEQ ID NO: 434404
  Synthetic oligonucleotide

SEQ ID NO: 593194 - DNA, 54 bp, Artificial; identical to SEQ ID NO: 434405
  Synthetic oligonucleotide

SEQ ID NO: 593195 - DNA, 51 bp, Artificial; identical to SEQ ID NO: 434406
  Synthetic oligonucleotide

SEQ ID NO: 593196 - DNA, 60 bp, Artificial; identical to SEQ ID NO: 434407
  Synthetic oligonucleotide

SEQ ID NO: 593197 - DNA, 55 bp, Artificial; identical to SEQ ID NO: 434410
  Synthetic oligonucleotide

SEQ ID NO: 593198 - DNA, 60 bp, Artificial; identical to SEQ ID NO: 434415
  Synthetic oligonucleotide

SEQ ID NO: 593199 - DNA, 58 bp, Artificial; identical to SEQ ID NO: 434416
  Synthetic oligonucleotide

SEQ ID NO: 593200 - DNA, 56 bp, Artificial; identical to SEQ ID NO: 10415
  Synthetic oligonucleotide

SEQ ID NO: 593201 - DNA, 60 bp, Artificial; identical to SEQ ID NO: 7360
  Synthetic oligonucleotide

SEQ ID NO: 593202 - DNA, 60 bp, Artificial; identical to SEQ ID NO: 15780
  Synthetic oligonucleotide

SEQ ID NO: 593203 - DNA, 60 bp, Artificial; identical to SEQ ID NO: 434426
  Synthetic oligonucleotide

SEQ ID NO: 593204 - DNA, 59 bp, Artificial; identical to SEQ ID NO: 434427
  Synthetic oligonucleotide

SEQ ID NO: 593205 - DNA, 54 bp, Artificial; identical to SEQ ID NO: 434428
  Synthetic oligonucleotide

SEQ ID NO: 593206 - DNA, 60 bp, Artificial; identical to SEQ ID NO: 434429
  Synthetic oligonucleotide

SEQ ID NO: 593207 - DNA, 60 bp, Artificial; identical to SEQ ID NO: 434431
  Synthetic oligonucleotide

SEQ ID NO: 593208 - DNA, 55 bp, Artificial; identical to SEQ ID NO: 434434
  Synthetic oligonucleotide

SEQ ID NO: 593209 - DNA, 55 bp, Artificial; identical to SEQ ID NO: 434437
  Synthetic oligonucleotide

SEQ ID NO: 593210 - DNA, 55 bp, Artificial; identical to SEQ ID NO: 434439
  Synthetic oligonucleotide

SEQ ID NO: 593211 - DNA, 55 bp, Artificial; identical to SEQ ID NO: 434440
  Synthetic oligonucleotide

SEQ ID NO: 593212 - DNA, 60 bp, Artificial; identical to SEQ ID NO: 6418
  Synthetic oligonucleotide

SEQ ID NO: 593213 - DNA, 60 bp, Artificial; identical to SEQ ID NO: 434441
  Synthetic oligonucleotide

SEQ ID NO: 593214 - DNA, 60 bp, Artificial; identical to SEQ ID NO: 434442
  Synthetic oligonucleotide

SEQ ID NO: 593215 - DNA, 56 bp, Artificial; identical to SEQ ID NO: 434445
  Synthetic oligonucleotide

SEQ ID NO: 593216 - DNA, 50 bp, Artificial; identical to SEQ ID NO: 434446
  Synthetic oligonucleotide

SEQ ID NO: 593217 - DNA, 60 bp, Artificial; identical to SEQ ID NO: 434449
  Synthetic oligonucleotide

SEQ ID NO: 593218 - DNA, 58 bp, Artificial; identical to SEQ ID NO: 434450
  Synthetic oligonucleotide

SEQ ID NO: 593219 - DNA, 60 bp, Artificial; identical to SEQ ID NO: 434452
  Synthetic oligonucleotide

SEQ ID NO: 593220 - DNA, 60 bp, Artificial; identical to SEQ ID NO: 434453
  Synthetic oligonucleotide

SEQ ID NO: 593221 - DNA, 60 bp, Artificial; identical to SEQ ID NO: 434454
  Synthetic oligonucleotide

SEQ ID NO: 593222 - DNA, 55 bp, Artificial; identical to SEQ ID NO: 434458
  Synthetic oligonucleotide

SEQ ID NO: 593223 - DNA, 53 bp, Artificial; identical to SEQ ID NO: 434461
  Synthetic oligonucleotide

SEQ ID NO: 593224 - DNA, 60 bp, Artificial; identical to SEQ ID NO: 434462
  Synthetic oligonucleotide

SEQ ID NO: 593225 - DNA, 60 bp, Artificial; identical to SEQ ID NO: 434465
  Synthetic oligonucleotide

SEQ ID NO: 593226 - DNA, 60 bp, Artificial; identical to SEQ ID NO: 434468
  Synthetic oligonucleotide

SEQ ID NO: 593227 - DNA, 60 bp, Artificial; identical to SEQ ID NO: 434471
  Synthetic oligonucleotide

SEQ ID NO: 593228 - DNA, 55 bp, Artificial; identical to SEQ ID NO: 434475
  Synthetic oligonucleotide

SEQ ID NO: 593229 - DNA, 53 bp, Artificial; identical to SEQ ID NO: 434476
  Synthetic oligonucleotide

SEQ ID NO: 593230 - DNA, 54 bp, Artificial; identical to SEQ ID NO: 434477
  Synthetic oligonucleotide

SEQ ID NO: 593231 - DNA, 60 bp, Artificial; identical to SEQ ID NO: 434479
  Synthetic oligonucleotide

SEQ ID NO: 593232 - DNA, 60 bp, Artificial; identical to SEQ ID NO: 434482
  Synthetic oligonucleotide

SEQ ID NO: 593233 - DNA, 55 bp, Artificial; identical to SEQ ID NO: 434486
  Synthetic oligonucleotide

SEQ ID NO: 593234 - DNA, 60 bp, Artificial; identical to SEQ ID NO: 434487
  Synthetic oligonucleotide

SEQ ID NO: 593235 - DNA, 55 bp, Artificial; identical to SEQ ID NO: 434488
  Synthetic oligonucleotide

SEQ ID NO: 593236 - DNA, 60 bp, Artificial; identical to SEQ ID NO: 434490
  Synthetic oligonucleotide

SEQ ID NO: 593237 - DNA, 59 bp, Artificial; identical to SEQ ID NO: 434492
  Synthetic oligonucleotide

SEQ ID NO: 593238 - DNA, 55 bp, Artificial; identical to SEQ ID NO: 434504
  Synthetic oligonucleotide

SEQ ID NO: 593239 - DNA, 53 bp, Artificial; identical to SEQ ID NO: 434505
  Synthetic oligonucleotide

SEQ ID NO: 593240 - DNA, 51 bp, Artificial; identical to SEQ ID NO: 434509
  Synthetic oligonucleotide

SEQ ID NO: 593241 - DNA, 57 bp, Artificial; identical to SEQ ID NO: 434510
  Synthetic oligonucleotide

SEQ ID NO: 593242 - DNA, 55 bp, Artificial; identical to SEQ ID NO: 434513
  Synthetic oligonucleotide

SEQ ID NO: 593243 - DNA, 57 bp, Artificial; identical to SEQ ID NO: 434516
  Synthetic oligonucleotide

SEQ ID NO: 593244 - DNA, 55 bp, Artificial; identical to SEQ ID NO: 434520
  Synthetic oligonucleotide

SEQ ID NO: 593245 - DNA, 60 bp, Artificial; identical to SEQ ID NO: 434522
  Synthetic oligonucleotide

SEQ ID NO: 593246 - DNA, 55 bp, Artificial; identical to SEQ ID NO: 434523
  Synthetic oligonucleotide

SEQ ID NO: 593247 - DNA, 52 bp, Artificial; identical to SEQ ID NO: 434527
  Synthetic oligonucleotide

SEQ ID NO: 593248 - DNA, 59 bp, Artificial; identical to SEQ ID NO: 434529
  Synthetic oligonucleotide

SEQ ID NO: 593249 - DNA, 50 bp, Artificial; identical to SEQ ID NO: 434532
  Synthetic oligonucleotide

SEQ ID NO: 593250 - DNA, 60 bp, Artificial; identical to SEQ ID NO: 434534
  Synthetic oligonucleotide

SEQ ID NO: 593251 - DNA, 58 bp, Artificial; identical to SEQ ID NO: 434537
  Synthetic oligonucleotide

SEQ ID NO: 593252 - DNA, 60 bp, Artificial; identical to SEQ ID NO: 434538
  Synthetic oligonucleotide

SEQ ID NO: 593253 - DNA, 60 bp, Artificial; identical to SEQ ID NO: 434539
  Synthetic oligonucleotide

SEQ ID NO: 593254 - DNA, 56 bp, Artificial; identical to SEQ ID NO: 434540
  Synthetic oligonucleotide

SEQ ID NO: 593255 - DNA, 58 bp, Artificial; identical to SEQ ID NO: 434543
  Synthetic oligonucleotide

SEQ ID NO: 593256 - DNA, 60 bp, Artificial; identical to SEQ ID NO: 434545
  Synthetic oligonucleotide

SEQ ID NO: 593257 - DNA, 53 bp, Artificial; identical to SEQ ID NO: 434546
  Synthetic oligonucleotide

SEQ ID NO: 593258 - DNA, 59 bp, Artificial; identical to SEQ ID NO: 434547
  Synthetic oligonucleotide

SEQ ID NO: 593259 - DNA, 54 bp, Artificial; identical to SEQ ID NO: 16081
  Synthetic oligonucleotide

SEQ ID NO: 593260 - DNA, 58 bp, Artificial; identical to SEQ ID NO: 434549
  Synthetic oligonucleotide

SEQ ID NO: 593261 - DNA, 55 bp, Artificial; identical to SEQ ID NO: 434551
  Synthetic oligonucleotide

SEQ ID NO: 593262 - DNA, 55 bp, Artificial; identical to SEQ ID NO: 434556
  Synthetic oligonucleotide

SEQ ID NO: 593263 - DNA, 55 bp, Artificial; identical to SEQ ID NO: 434558
  Synthetic oligonucleotide

SEQ ID NO: 593264 - DNA, 57 bp, Artificial; identical to SEQ ID NO: 434561
  Synthetic oligonucleotide

SEQ ID NO: 593265 - DNA, 57 bp, Artificial; identical to SEQ ID NO: 434562
  Synthetic oligonucleotide

SEQ ID NO: 593266 - DNA, 60 bp, Artificial; identical to SEQ ID NO: 434565
  Synthetic oligonucleotide

SEQ ID NO: 593267 - DNA, 57 bp, Artificial; identical to SEQ ID NO: 434568
  Synthetic oligonucleotide

SEQ ID NO: 593268 - DNA, 55 bp, Artificial; identical to SEQ ID NO: 434570
  Synthetic oligonucleotide

SEQ ID NO: 593269 - DNA, 54 bp, Artificial; identical to SEQ ID NO: 434571
  Synthetic oligonucleotide

SEQ ID NO: 593270 - DNA, 57 bp, Artificial; identical to SEQ ID NO: 434573
  Synthetic oligonucleotide

SEQ ID NO: 593271 - DNA, 55 bp, Artificial; identical to SEQ ID NO: 434574
  Synthetic oligonucleotide

SEQ ID NO: 593272 - DNA, 53 bp, Artificial; identical to SEQ ID NO: 434576
  Synthetic oligonucleotide

SEQ ID NO: 593273 - DNA, 60 bp, Artificial; identical to SEQ ID NO: 434579
  Synthetic oligonucleotide

SEQ ID NO: 593274 - DNA, 59 bp, Artificial; identical to SEQ ID NO: 434580
  Synthetic oligonucleotide

SEQ ID NO: 593275 - DNA, 55 bp, Artificial; identical to SEQ ID NO: 434588
  Synthetic oligonucleotide

SEQ ID NO: 593276 - DNA, 58 bp, Artificial; identical to SEQ ID NO: 434589
  Synthetic oligonucleotide

SEQ ID NO: 593277 - DNA, 53 bp, Artificial; identical to SEQ ID NO: 434593
  Synthetic oligonucleotide

SEQ ID NO: 593278 - DNA, 55 bp, Artificial; identical to SEQ ID NO: 434594
  Synthetic oligonucleotide

SEQ ID NO: 593279 - DNA, 55 bp, Artificial; identical to SEQ ID NO: 434595
  Synthetic oligonucleotide

SEQ ID NO: 593280 - DNA, 55 bp, Artificial; identical to SEQ ID NO: 434596
  Synthetic oligonucleotide

SEQ ID NO: 593281 - DNA, 55 bp, Artificial; identical to SEQ ID NO: 434598
  Synthetic oligonucleotide

SEQ ID NO: 593282 - DNA, 60 bp, Artificial; identical to SEQ ID NO: 434603
  Synthetic oligonucleotide

SEQ ID NO: 593283 - DNA, 59 bp, Artificial; identical to SEQ ID NO: 434604
  Synthetic oligonucleotide

SEQ ID NO: 593284 - DNA, 60 bp, Artificial; identical to SEQ ID NO: 11917
  Synthetic oligonucleotide

SEQ ID NO: 593285 - DNA, 57 bp, Artificial; identical to SEQ ID NO: 434605
  Synthetic oligonucleotide

SEQ ID NO: 593286 - DNA, 55 bp, Artificial; identical to SEQ ID NO: 434606
  Synthetic oligonucleotide

SEQ ID NO: 593287 - DNA, 56 bp, Artificial; identical to SEQ ID NO: 434607
  Synthetic oligonucleotide

SEQ ID NO: 593288 - DNA, 59 bp, Artificial; identical to SEQ ID NO: 434609
  Synthetic oligonucleotide

SEQ ID NO: 593289 - DNA, 57 bp, Artificial; identical to SEQ ID NO: 434610
  Synthetic oligonucleotide

SEQ ID NO: 593290 - DNA, 53 bp, Artificial; identical to SEQ ID NO: 434611
  Synthetic oligonucleotide

SEQ ID NO: 593291 - DNA, 57 bp, Artificial; identical to SEQ ID NO: 434612
  Synthetic oligonucleotide

SEQ ID NO: 593292 - DNA, 55 bp, Artificial; identical to SEQ ID NO: 434622
  Synthetic oligonucleotide

SEQ ID NO: 593293 - DNA, 54 bp, Artificial; identical to SEQ ID NO: 434623
  Synthetic oligonucleotide

SEQ ID NO: 593294 - DNA, 50 bp, Artificial; identical to SEQ ID NO: 434624
  Synthetic oligonucleotide

SEQ ID NO: 593295 - DNA, 56 bp, Artificial; identical to SEQ ID NO: 434625
  Synthetic oligonucleotide

SEQ ID NO: 593296 - DNA, 55 bp, Artificial; identical to SEQ ID NO: 434627
  Synthetic oligonucleotide

SEQ ID NO: 593297 - DNA, 58 bp, Artificial; identical to SEQ ID NO: 434631
  Synthetic oligonucleotide

SEQ ID NO: 593298 - DNA, 60 bp, Artificial; identical to SEQ ID NO: 434632
  Synthetic oligonucleotide

SEQ ID NO: 593299 - DNA, 60 bp, Artificial; identical to SEQ ID NO: 434633
  Synthetic oligonucleotide

SEQ ID NO: 593300 - DNA, 55 bp, Artificial; identical to SEQ ID NO: 16197
  Synthetic oligonucleotide

SEQ ID NO: 593301 - DNA, 54 bp, Artificial; identical to SEQ ID NO: 11949
  Synthetic oligonucleotide

SEQ ID NO: 593302 - DNA, 58 bp, Artificial; identical to SEQ ID NO: 434635
  Synthetic oligonucleotide

SEQ ID NO: 593303 - DNA, 51 bp, Artificial; identical to SEQ ID NO: 434642
  Synthetic oligonucleotide

SEQ ID NO: 593304 - DNA, 55 bp, Artificial; identical to SEQ ID NO: 434648
  Synthetic oligonucleotide

SEQ ID NO: 593305 - DNA, 57 bp, Artificial; identical to SEQ ID NO: 434649
  Synthetic oligonucleotide

SEQ ID NO: 593306 - DNA, 56 bp, Artificial; identical to SEQ ID NO: 434651
  Synthetic oligonucleotide

SEQ ID NO: 593307 - DNA, 54 bp, Artificial; identical to SEQ ID NO: 434657
  Synthetic oligonucleotide

SEQ ID NO: 593308 - DNA, 60 bp, Artificial; identical to SEQ ID NO: 434661
  Synthetic oligonucleotide

SEQ ID NO: 593309 - DNA, 56 bp, Artificial; identical to SEQ ID NO: 434664
  Synthetic oligonucleotide

SEQ ID NO: 593310 - DNA, 60 bp, Artificial; identical to SEQ ID NO: 114327
  Synthetic oligonucleotide

SEQ ID NO: 593311 - DNA, 58 bp, Artificial; identical to SEQ ID NO: 434669
  Synthetic oligonucleotide

SEQ ID NO: 593312 - DNA, 53 bp, Artificial; identical to SEQ ID NO: 434670
  Synthetic oligonucleotide

SEQ ID NO: 593313 - DNA, 55 bp, Artificial; identical to SEQ ID NO: 434671
  Synthetic oligonucleotide

SEQ ID NO: 593314 - DNA, 55 bp, Artificial; identical to SEQ ID NO: 434672
  Synthetic oligonucleotide

SEQ ID NO: 593315 - DNA, 55 bp, Artificial; identical to SEQ ID NO: 434673
  Synthetic oligonucleotide

SEQ ID NO: 593316 - DNA, 55 bp, Artificial; identical to SEQ ID NO: 434674
  Synthetic oligonucleotide

SEQ ID NO: 593317 - DNA, 55 bp, Artificial; identical to SEQ ID NO: 434679
  Synthetic oligonucleotide

SEQ ID NO: 593318 - DNA, 59 bp, Artificial; identical to SEQ ID NO: 434680
  Synthetic oligonucleotide

SEQ ID NO: 593319 - DNA, 52 bp, Artificial; identical to SEQ ID NO: 6072
  Synthetic oligonucleotide

SEQ ID NO: 593320 - DNA, 55 bp, Artificial; identical to SEQ ID NO: 434688
  Synthetic oligonucleotide

SEQ ID NO: 593321 - DNA, 55 bp, Artificial; identical to SEQ ID NO: 434697
  Synthetic oligonucleotide

SEQ ID NO: 593322 - DNA, 58 bp, Artificial; identical to SEQ ID NO: 434699
  Synthetic oligonucleotide

SEQ ID NO: 593323 - DNA, 60 bp, Artificial; identical to SEQ ID NO: 434700
  Synthetic oligonucleotide

SEQ ID NO: 593324 - DNA, 59 bp, Artificial; identical to SEQ ID NO: 434702
  Synthetic oligonucleotide

SEQ ID NO: 593325 - DNA, 59 bp, Artificial; identical to SEQ ID NO: 434703
  Synthetic oligonucleotide

SEQ ID NO: 593326 - DNA, 53 bp, Artificial; identical to SEQ ID NO: 434706
  Synthetic oligonucleotide

SEQ ID NO: 593327 - DNA, 57 bp, Artificial; identical to SEQ ID NO: 13935
  Synthetic oligonucleotide

SEQ ID NO: 593328 - DNA, 55 bp, Artificial; identical to SEQ ID NO: 434708
  Synthetic oligonucleotide

SEQ ID NO: 593329 - DNA, 59 bp, Artificial; identical to SEQ ID NO: 434713
  Synthetic oligonucleotide

SEQ ID NO: 593330 - DNA, 56 bp, Artificial; identical to SEQ ID NO: 434714
  Synthetic oligonucleotide

SEQ ID NO: 593331 - DNA, 60 bp, Artificial; identical to SEQ ID NO: 434721
  Synthetic oligonucleotide

SEQ ID NO: 593332 - DNA, 60 bp, Artificial; identical to SEQ ID NO: 434722
  Synthetic oligonucleotide

SEQ ID NO: 593333 - DNA, 58 bp, Artificial; identical to SEQ ID NO: 434726
  Synthetic oligonucleotide

SEQ ID NO: 593334 - DNA, 55 bp, Artificial; identical to SEQ ID NO: 434729
  Synthetic oligonucleotide

SEQ ID NO: 593335 - DNA, 58 bp, Artificial; identical to SEQ ID NO: 19616
  Synthetic oligonucleotide

SEQ ID NO: 593336 - DNA, 60 bp, Artificial; identical to SEQ ID NO: 13019
  Synthetic oligonucleotide

SEQ ID NO: 593337 - DNA, 58 bp, Artificial; identical to SEQ ID NO: 434730
  Synthetic oligonucleotide

SEQ ID NO: 593338 - DNA, 55 bp, Artificial; identical to SEQ ID NO: 434733
  Synthetic oligonucleotide

SEQ ID NO: 593339 - DNA, 53 bp, Artificial; identical to SEQ ID NO: 434736
  Synthetic oligonucleotide

SEQ ID NO: 593340 - DNA, 53 bp, Artificial; identical to SEQ ID NO: 434737
  Synthetic oligonucleotide

SEQ ID NO: 593341 - DNA, 60 bp, Artificial; identical to SEQ ID NO: 434739
  Synthetic oligonucleotide

SEQ ID NO: 593342 - DNA, 54 bp, Artificial; identical to SEQ ID NO: 434741
  Synthetic oligonucleotide

SEQ ID NO: 593343 - DNA, 55 bp, Artificial; identical to SEQ ID NO: 434745
  Synthetic oligonucleotide

SEQ ID NO: 593344 - DNA, 58 bp, Artificial; identical to SEQ ID NO: 434746
  Synthetic oligonucleotide

SEQ ID NO: 593345 - DNA, 50 bp, Artificial; identical to SEQ ID NO: 434748
  Synthetic oligonucleotide

SEQ ID NO: 593346 - DNA, 55 bp, Artificial; identical to SEQ ID NO: 434751
  Synthetic oligonucleotide

SEQ ID NO: 593347 - DNA, 60 bp, Artificial; identical to SEQ ID NO: 434753
  Synthetic oligonucleotide

SEQ ID NO: 593348 - DNA, 55 bp, Artificial; identical to SEQ ID NO: 434754
  Synthetic oligonucleotide

SEQ ID NO: 593349 - DNA, 59 bp, Artificial; identical to SEQ ID NO: 434755
  Synthetic oligonucleotide

SEQ ID NO: 593350 - DNA, 59 bp, Artificial; identical to SEQ ID NO: 434756
  Synthetic oligonucleotide

SEQ ID NO: 593351 - DNA, 60 bp, Artificial; identical to SEQ ID NO: 434758
  Synthetic oligonucleotide

SEQ ID NO: 593352 - DNA, 55 bp, Artificial; identical to SEQ ID NO: 434760
  Synthetic oligonucleotide

SEQ ID NO: 593353 - DNA, 55 bp, Artificial; identical to SEQ ID NO: 434761
  Synthetic oligonucleotide

SEQ ID NO: 593354 - DNA, 55 bp, Artificial; identical to SEQ ID NO: 434762
  Synthetic oligonucleotide

SEQ ID NO: 593355 - DNA, 55 bp, Artificial; identical to SEQ ID NO: 434764
  Synthetic oligonucleotide

SEQ ID NO: 593356 - DNA, 56 bp, Artificial; identical to SEQ ID NO: 434766
  Synthetic oligonucleotide

SEQ ID NO: 593357 - DNA, 57 bp, Artificial; identical to SEQ ID NO: 434769
  Synthetic oligonucleotide

SEQ ID NO: 593358 - DNA, 60 bp, Artificial; identical to SEQ ID NO: 434770
  Synthetic oligonucleotide

SEQ ID NO: 593359 - DNA, 60 bp, Artificial; identical to SEQ ID NO: 434771
  Synthetic oligonucleotide

SEQ ID NO: 593360 - DNA, 50 bp, Artificial; identical to SEQ ID NO: 434774
  Synthetic oligonucleotide

SEQ ID NO: 593361 - DNA, 58 bp, Artificial; identical to SEQ ID NO: 434775
  Synthetic oligonucleotide

SEQ ID NO: 593362 - DNA, 55 bp, Artificial; identical to SEQ ID NO: 434777
  Synthetic oligonucleotide

SEQ ID NO: 593363 - DNA, 56 bp, Artificial; identical to SEQ ID NO: 19153
  Synthetic oligonucleotide

SEQ ID NO: 593364 - DNA, 60 bp, Artificial; identical to SEQ ID NO: 434780
  Synthetic oligonucleotide

SEQ ID NO: 593365 - DNA, 55 bp, Artificial; identical to SEQ ID NO: 434783
  Synthetic oligonucleotide

SEQ ID NO: 593366 - DNA, 60 bp, Artificial; identical to SEQ ID NO: 434784
  Synthetic oligonucleotide

SEQ ID NO: 593367 - DNA, 54 bp, Artificial; identical to SEQ ID NO: 434785
  Synthetic oligonucleotide

SEQ ID NO: 593368 - DNA, 55 bp, Artificial; identical to SEQ ID NO: 434787
  Synthetic oligonucleotide

SEQ ID NO: 593369 - DNA, 56 bp, Artificial; identical to SEQ ID NO: 434788
  Synthetic oligonucleotide

SEQ ID NO: 593370 - DNA, 55 bp, Artificial; identical to SEQ ID NO: 434789
  Synthetic oligonucleotide

SEQ ID NO: 593371 - DNA, 58 bp, Artificial; identical to SEQ ID NO: 434791
  Synthetic oligonucleotide

SEQ ID NO: 593372 - DNA, 55 bp, Artificial; identical to SEQ ID NO: 434792
  Synthetic oligonucleotide

SEQ ID NO: 593373 - DNA, 57 bp, Artificial; identical to SEQ ID NO: 434793
  Synthetic oligonucleotide

SEQ ID NO: 593374 - DNA, 55 bp, Artificial; identical to SEQ ID NO: 434794
  Synthetic oligonucleotide

SEQ ID NO: 593375 - DNA, 60 bp, Artificial; identical to SEQ ID NO: 434795
  Synthetic oligonucleotide

SEQ ID NO: 593376 - DNA, 55 bp, Artificial; identical to SEQ ID NO: 434796
  Synthetic oligonucleotide

SEQ ID NO: 593377 - DNA, 55 bp, Artificial; identical to SEQ ID NO: 434797
  Synthetic oligonucleotide

SEQ ID NO: 593378 - DNA, 55 bp, Artificial; identical to SEQ ID NO: 7785
  Synthetic oligonucleotide

SEQ ID NO: 593379 - DNA, 55 bp, Artificial; identical to SEQ ID NO: 434800
  Synthetic oligonucleotide

SEQ ID NO: 593380 - DNA, 55 bp, Artificial; identical to SEQ ID NO: 434802
  Synthetic oligonucleotide

SEQ ID NO: 593381 - DNA, 55 bp, Artificial; identical to SEQ ID NO: 434803
  Synthetic oligonucleotide

SEQ ID NO: 593382 - DNA, 53 bp, Artificial; identical to SEQ ID NO: 434805
  Synthetic oligonucleotide

SEQ ID NO: 593383 - DNA, 55 bp, Artificial; identical to SEQ ID NO: 434809
  Synthetic oligonucleotide

SEQ ID NO: 593384 - DNA, 60 bp, Artificial; identical to SEQ ID NO: 434811
  Synthetic oligonucleotide

SEQ ID NO: 593385 - DNA, 55 bp, Artificial; identical to SEQ ID NO: 434813
  Synthetic oligonucleotide

SEQ ID NO: 593386 - DNA, 58 bp, Artificial; identical to SEQ ID NO: 434814
  Synthetic oligonucleotide

SEQ ID NO: 593387 - DNA, 55 bp, Artificial; identical to SEQ ID NO: 16564
  Synthetic oligonucleotide

SEQ ID NO: 593388 - DNA, 56 bp, Artificial; identical to SEQ ID NO: 434816
  Synthetic oligonucleotide

SEQ ID NO: 593389 - DNA, 55 bp, Artificial; identical to SEQ ID NO: 434819
  Synthetic oligonucleotide

SEQ ID NO: 593390 - DNA, 55 bp, Artificial; identical to SEQ ID NO: 434831
  Synthetic oligonucleotide

SEQ ID NO: 593391 - DNA, 54 bp, Artificial; identical to SEQ ID NO: 434832
  Synthetic oligonucleotide

SEQ ID NO: 593392 - DNA, 59 bp, Artificial; identical to SEQ ID NO: 16910
  Synthetic oligonucleotide

SEQ ID NO: 593393 - DNA, 60 bp, Artificial; identical to SEQ ID NO: 434834
  Synthetic oligonucleotide

SEQ ID NO: 593394 - DNA, 59 bp, Artificial; identical to SEQ ID NO: 434838
  Synthetic oligonucleotide

SEQ ID NO: 593395 - DNA, 55 bp, Artificial; identical to SEQ ID NO: 434842
  Synthetic oligonucleotide

SEQ ID NO: 593396 - DNA, 55 bp, Artificial; identical to SEQ ID NO: 434843
  Synthetic oligonucleotide

SEQ ID NO: 593397 - DNA, 60 bp, Artificial; identical to SEQ ID NO: 434846
  Synthetic oligonucleotide

SEQ ID NO: 593398 - DNA, 60 bp, Artificial; identical to SEQ ID NO: 434849
  Synthetic oligonucleotide

SEQ ID NO: 593399 - DNA, 60 bp, Artificial; identical to SEQ ID NO: 434852
  Synthetic oligonucleotide

SEQ ID NO: 593400 - DNA, 55 bp, Artificial; identical to SEQ ID NO: 434855
  Synthetic oligonucleotide

SEQ ID NO: 593401 - DNA, 60 bp, Artificial; identical to SEQ ID NO: 434856
  Synthetic oligonucleotide

SEQ ID NO: 593402 - DNA, 58 bp, Artificial; identical to SEQ ID NO: 434859
  Synthetic oligonucleotide

SEQ ID NO: 593403 - DNA, 55 bp, Artificial; identical to SEQ ID NO: 11299
  Synthetic oligonucleotide

SEQ ID NO: 593404 - DNA, 57 bp, Artificial; identical to SEQ ID NO: 434861
  Synthetic oligonucleotide

SEQ ID NO: 593405 - DNA, 55 bp, Artificial; identical to SEQ ID NO: 434863
  Synthetic oligonucleotide

SEQ ID NO: 593406 - DNA, 53 bp, Artificial; identical to SEQ ID NO: 434864
  Synthetic oligonucleotide

SEQ ID NO: 593407 - DNA, 55 bp, Artificial; identical to SEQ ID NO: 434865
  Synthetic oligonucleotide

SEQ ID NO: 593408 - DNA, 55 bp, Artificial; identical to SEQ ID NO: 434866
  Synthetic oligonucleotide

SEQ ID NO: 593409 - DNA, 55 bp, Artificial; identical to SEQ ID NO: 434869
  Synthetic oligonucleotide

SEQ ID NO: 593410 - DNA, 55 bp, Artificial; identical to SEQ ID NO: 434872
  Synthetic oligonucleotide

SEQ ID NO: 593411 - DNA, 59 bp, Artificial; identical to SEQ ID NO: 434874
  Synthetic oligonucleotide

SEQ ID NO: 593412 - DNA, 60 bp, Artificial; identical to SEQ ID NO: 434875
  Synthetic oligonucleotide

SEQ ID NO: 593413 - DNA, 51 bp, Artificial; identical to SEQ ID NO: 434876
  Synthetic oligonucleotide

SEQ ID NO: 593414 - DNA, 60 bp, Artificial; identical to SEQ ID NO: 434879
  Synthetic oligonucleotide

SEQ ID NO: 593415 - DNA, 60 bp, Artificial; identical to SEQ ID NO: 434882
  Synthetic oligonucleotide

SEQ ID NO: 593416 - DNA, 57 bp, Artificial; identical to SEQ ID NO: 434883
  Synthetic oligonucleotide

SEQ ID NO: 593417 - DNA, 57 bp, Artificial; identical to SEQ ID NO: 434886
  Synthetic oligonucleotide

SEQ ID NO: 593418 - DNA, 57 bp, Artificial; identical to SEQ ID NO: 434887
  Synthetic oligonucleotide

SEQ ID NO: 593419 - DNA, 53 bp, Artificial; identical to SEQ ID NO: 434888
  Synthetic oligonucleotide

SEQ ID NO: 593420 - DNA, 51 bp, Artificial; identical to SEQ ID NO: 434893
  Synthetic oligonucleotide

SEQ ID NO: 593421 - DNA, 60 bp, Artificial; identical to SEQ ID NO: 434899
  Synthetic oligonucleotide

SEQ ID NO: 593422 - DNA, 55 bp, Artificial; identical to SEQ ID NO: 434900
  Synthetic oligonucleotide

SEQ ID NO: 593423 - DNA, 58 bp, Artificial; identical to SEQ ID NO: 434901
  Synthetic oligonucleotide

SEQ ID NO: 593424 - DNA, 56 bp, Artificial; identical to SEQ ID NO: 434904
  Synthetic oligonucleotide

SEQ ID NO: 593425 - DNA, 56 bp, Artificial; identical to SEQ ID NO: 434907
  Synthetic oligonucleotide

SEQ ID NO: 593426 - DNA, 59 bp, Artificial; identical to SEQ ID NO: 434909
  Synthetic oligonucleotide

SEQ ID NO: 593427 - DNA, 52 bp, Artificial; identical to SEQ ID NO: 434912
  Synthetic oligonucleotide

SEQ ID NO: 593428 - DNA, 58 bp, Artificial; identical to SEQ ID NO: 434913
  Synthetic oligonucleotide

SEQ ID NO: 593429 - DNA, 55 bp, Artificial; identical to SEQ ID NO: 434914
  Synthetic oligonucleotide

SEQ ID NO: 593430 - DNA, 55 bp, Artificial; identical to SEQ ID NO: 434916
  Synthetic oligonucleotide

SEQ ID NO: 593431 - DNA, 55 bp, Artificial; identical to SEQ ID NO: 434917
  Synthetic oligonucleotide

SEQ ID NO: 593432 - DNA, 55 bp, Artificial; identical to SEQ ID NO: 434919
  Synthetic oligonucleotide

SEQ ID NO: 593433 - DNA, 60 bp, Artificial; identical to SEQ ID NO: 434920
  Synthetic oligonucleotide

SEQ ID NO: 593434 - DNA, 55 bp, Artificial; identical to SEQ ID NO: 434923
  Synthetic oligonucleotide

SEQ ID NO: 593435 - DNA, 55 bp, Artificial; identical to SEQ ID NO: 434924
  Synthetic oligonucleotide

SEQ ID NO: 593436 - DNA, 60 bp, Artificial; identical to SEQ ID NO: 434926
  Synthetic oligonucleotide

SEQ ID NO: 593437 - DNA, 59 bp, Artificial; identical to SEQ ID NO: 434932
  Synthetic oligonucleotide

SEQ ID NO: 593438 - DNA, 55 bp, Artificial; identical to SEQ ID NO: 13953
  Synthetic oligonucleotide

SEQ ID NO: 593439 - DNA, 55 bp, Artificial; identical to SEQ ID NO: 434938
  Synthetic oligonucleotide

SEQ ID NO: 593440 - DNA, 56 bp, Artificial; identical to SEQ ID NO: 434943
  Synthetic oligonucleotide

SEQ ID NO: 593441 - DNA, 60 bp, Artificial; identical to SEQ ID NO: 434944
  Synthetic oligonucleotide

SEQ ID NO: 593442 - DNA, 59 bp, Artificial; identical to SEQ ID NO: 19323
  Synthetic oligonucleotide

SEQ ID NO: 593443 - DNA, 52 bp, Artificial; identical to SEQ ID NO: 434949
  Synthetic oligonucleotide

SEQ ID NO: 593444 - DNA, 58 bp, Artificial; identical to SEQ ID NO: 434953
  Synthetic oligonucleotide

SEQ ID NO: 593445 - DNA, 60 bp, Artificial; identical to SEQ ID NO: 434954
  Synthetic oligonucleotide

SEQ ID NO: 593446 - DNA, 55 bp, Artificial; identical to SEQ ID NO: 434956
  Synthetic oligonucleotide

SEQ ID NO: 593447 - DNA, 60 bp, Artificial; identical to SEQ ID NO: 434959
  Synthetic oligonucleotide

SEQ ID NO: 593448 - DNA, 55 bp, Artificial; identical to SEQ ID NO: 434960
  Synthetic oligonucleotide

SEQ ID NO: 593449 - DNA, 55 bp, Artificial; identical to SEQ ID NO: 434962
  Synthetic oligonucleotide

SEQ ID NO: 593450 - DNA, 60 bp, Artificial; identical to SEQ ID NO: 434966
  Synthetic oligonucleotide

SEQ ID NO: 593451 - DNA, 55 bp, Artificial; identical to SEQ ID NO: 434968
  Synthetic oligonucleotide

SEQ ID NO: 593452 - DNA, 55 bp, Artificial; identical to SEQ ID NO: 18703
  Synthetic oligonucleotide

SEQ ID NO: 593453 - DNA, 60 bp, Artificial; identical to SEQ ID NO: 10948
  Synthetic oligonucleotide

SEQ ID NO: 593454 - DNA, 60 bp, Artificial; identical to SEQ ID NO: 434971
  Synthetic oligonucleotide

SEQ ID NO: 593455 - DNA, 51 bp, Artificial; identical to SEQ ID NO: 434973
  Synthetic oligonucleotide

SEQ ID NO: 593456 - DNA, 58 bp, Artificial; identical to SEQ ID NO: 434974
  Synthetic oligonucleotide

SEQ ID NO: 593457 - DNA, 57 bp, Artificial; identical to SEQ ID NO: 434975
  Synthetic oligonucleotide

SEQ ID NO: 593458 - DNA, 55 bp, Artificial; identical to SEQ ID NO: 434978
  Synthetic oligonucleotide

SEQ ID NO: 593459 - DNA, 57 bp, Artificial; identical to SEQ ID NO: 434979
  Synthetic oligonucleotide

SEQ ID NO: 593460 - DNA, 55 bp, Artificial; identical to SEQ ID NO: 434980
  Synthetic oligonucleotide

SEQ ID NO: 593461 - DNA, 55 bp, Artificial; identical to SEQ ID NO: 434981
  Synthetic oligonucleotide

SEQ ID NO: 593462 - DNA, 59 bp, Artificial; identical to SEQ ID NO: 434988
  Synthetic oligonucleotide

SEQ ID NO: 593463 - DNA, 52 bp, Artificial; identical to SEQ ID NO: 434993
  Synthetic oligonucleotide

SEQ ID NO: 593464 - DNA, 50 bp, Artificial; identical to SEQ ID NO: 434994
  Synthetic oligonucleotide

SEQ ID NO: 593465 - DNA, 55 bp, Artificial; identical to SEQ ID NO: 434998
  Synthetic oligonucleotide

SEQ ID NO: 593466 - DNA, 55 bp, Artificial; identical to SEQ ID NO: 435000
  Synthetic oligonucleotide

SEQ ID NO: 593467 - DNA, 56 bp, Artificial; identical to SEQ ID NO: 17805
  Synthetic oligonucleotide

SEQ ID NO: 593468 - DNA, 57 bp, Artificial; identical to SEQ ID NO: 435002
  Synthetic oligonucleotide

SEQ ID NO: 593469 - DNA, 60 bp, Artificial; identical to SEQ ID NO: 435004
  Synthetic oligonucleotide

SEQ ID NO: 593470 - DNA, 60 bp, Artificial; identical to SEQ ID NO: 7770
  Synthetic oligonucleotide

SEQ ID NO: 593471 - DNA, 60 bp, Artificial; identical to SEQ ID NO: 435008
  Synthetic oligonucleotide

SEQ ID NO: 593472 - DNA, 60 bp, Artificial; identical to SEQ ID NO: 435009
  Synthetic oligonucleotide

SEQ ID NO: 593473 - DNA, 58 bp, Artificial; identical to SEQ ID NO: 435013
  Synthetic oligonucleotide

SEQ ID NO: 593474 - DNA, 60 bp, Artificial; identical to SEQ ID NO: 435015
  Synthetic oligonucleotide

SEQ ID NO: 593475 - DNA, 59 bp, Artificial; identical to SEQ ID NO: 435017
  Synthetic oligonucleotide

SEQ ID NO: 593476 - DNA, 60 bp, Artificial; identical to SEQ ID NO: 435018
  Synthetic oligonucleotide

SEQ ID NO: 593477 - DNA, 56 bp, Artificial; identical to SEQ ID NO: 435021
  Synthetic oligonucleotide

SEQ ID NO: 593478 - DNA, 55 bp, Artificial; identical to SEQ ID NO: 435023
  Synthetic oligonucleotide

SEQ ID NO: 593479 - DNA, 59 bp, Artificial; identical to SEQ ID NO: 435024
  Synthetic oligonucleotide

SEQ ID NO: 593480 - DNA, 55 bp, Artificial; identical to SEQ ID NO: 435025
  Synthetic oligonucleotide

SEQ ID NO: 593481 - DNA, 56 bp, Artificial; identical to SEQ ID NO: 435026
  Synthetic oligonucleotide

SEQ ID NO: 593482 - DNA, 59 bp, Artificial; identical to SEQ ID NO: 435028
  Synthetic oligonucleotide

SEQ ID NO: 593483 - DNA, 57 bp, Artificial; identical to SEQ ID NO: 435029
  Synthetic oligonucleotide

SEQ ID NO: 593484 - DNA, 55 bp, Artificial; identical to SEQ ID NO: 435030
  Synthetic oligonucleotide

SEQ ID NO: 593485 - DNA, 55 bp, Artificial; identical to SEQ ID NO: 435031
  Synthetic oligonucleotide

SEQ ID NO: 593486 - DNA, 57 bp, Artificial; identical to SEQ ID NO: 16815
  Synthetic oligonucleotide

SEQ ID NO: 593487 - DNA, 56 bp, Artificial; identical to SEQ ID NO: 435035
  Synthetic oligonucleotide

SEQ ID NO: 593488 - DNA, 57 bp, Artificial; identical to SEQ ID NO: 435037
  Synthetic oligonucleotide

SEQ ID NO: 593489 - DNA, 57 bp, Artificial; identical to SEQ ID NO: 435041
  Synthetic oligonucleotide

SEQ ID NO: 593490 - DNA, 55 bp, Artificial; identical to SEQ ID NO: 435043
  Synthetic oligonucleotide

SEQ ID NO: 593491 - DNA, 60 bp, Artificial; identical to SEQ ID NO: 435045
  Synthetic oligonucleotide

SEQ ID NO: 593492 - DNA, 60 bp, Artificial; identical to SEQ ID NO: 435047
  Synthetic oligonucleotide

SEQ ID NO: 593493 - DNA, 60 bp, Artificial; identical to SEQ ID NO: 435048
  Synthetic oligonucleotide

SEQ ID NO: 593494 - DNA, 55 bp, Artificial; identical to SEQ ID NO: 435053
  Synthetic oligonucleotide

SEQ ID NO: 593495 - DNA, 55 bp, Artificial; identical to SEQ ID NO: 435056
  Synthetic oligonucleotide

SEQ ID NO: 593496 - DNA, 59 bp, Artificial; identical to SEQ ID NO: 435058
  Synthetic oligonucleotide

SEQ ID NO: 593497 - DNA, 59 bp, Artificial; identical to SEQ ID NO: 435059
  Synthetic oligonucleotide

SEQ ID NO: 593498 - DNA, 58 bp, Artificial; identical to SEQ ID NO: 435060
  Synthetic oligonucleotide

SEQ ID NO: 593499 - DNA, 60 bp, Artificial; identical to SEQ ID NO: 435064
  Synthetic oligonucleotide

SEQ ID NO: 593500 - DNA, 54 bp, Artificial; identical to SEQ ID NO: 435065
  Synthetic oligonucleotide

SEQ ID NO: 593501 - DNA, 56 bp, Artificial; identical to SEQ ID NO: 435072
  Synthetic oligonucleotide

SEQ ID NO: 593502 - DNA, 57 bp, Artificial; identical to SEQ ID NO: 435075
  Synthetic oligonucleotide

SEQ ID NO: 593503 - DNA, 55 bp, Artificial; identical to SEQ ID NO: 435077
  Synthetic oligonucleotide

SEQ ID NO: 593504 - DNA, 55 bp, Artificial; identical to SEQ ID NO: 435079
  Synthetic oligonucleotide

SEQ ID NO: 593505 - DNA, 57 bp, Artificial; identical to SEQ ID NO: 435080
  Synthetic oligonucleotide

SEQ ID NO: 593506 - DNA, 59 bp, Artificial; identical to SEQ ID NO: 435081
  Synthetic oligonucleotide

SEQ ID NO: 593507 - DNA, 52 bp, Artificial; identical to SEQ ID NO: 435082
  Synthetic oligonucleotide

SEQ ID NO: 593508 - DNA, 55 bp, Artificial; identical to SEQ ID NO: 435088
  Synthetic oligonucleotide

SEQ ID NO: 593509 - DNA, 52 bp, Artificial; identical to SEQ ID NO: 435089
  Synthetic oligonucleotide

SEQ ID NO: 593510 - DNA, 56 bp, Artificial; identical to SEQ ID NO: 435092
  Synthetic oligonucleotide

SEQ ID NO: 593511 - DNA, 55 bp, Artificial; identical to SEQ ID NO: 435094
  Synthetic oligonucleotide

SEQ ID NO: 593512 - DNA, 59 bp, Artificial; identical to SEQ ID NO: 435097
  Synthetic oligonucleotide

SEQ ID NO: 593513 - DNA, 56 bp, Artificial; identical to SEQ ID NO: 435098
  Synthetic oligonucleotide

SEQ ID NO: 593514 - DNA, 55 bp, Artificial; identical to SEQ ID NO: 435102
  Synthetic oligonucleotide

SEQ ID NO: 593515 - DNA, 58 bp, Artificial; identical to SEQ ID NO: 435105
  Synthetic oligonucleotide

SEQ ID NO: 593516 - DNA, 59 bp, Artificial; identical to SEQ ID NO: 435108
  Synthetic oligonucleotide

SEQ ID NO: 593517 - DNA, 55 bp, Artificial; identical to SEQ ID NO: 435110
  Synthetic oligonucleotide

SEQ ID NO: 593518 - DNA, 55 bp, Artificial; identical to SEQ ID NO: 435114
  Synthetic oligonucleotide

SEQ ID NO: 593519 - DNA, 52 bp, Artificial; identical to SEQ ID NO: 435117
  Synthetic oligonucleotide

SEQ ID NO: 593520 - DNA, 60 bp, Artificial; identical to SEQ ID NO: 435118
  Synthetic oligonucleotide

SEQ ID NO: 593521 - DNA, 55 bp, Artificial; identical to SEQ ID NO: 435119
  Synthetic oligonucleotide

SEQ ID NO: 593522 - DNA, 55 bp, Artificial; identical to SEQ ID NO: 435120
  Synthetic oligonucleotide

SEQ ID NO: 593523 - DNA, 57 bp, Artificial; identical to SEQ ID NO: 435122
  Synthetic oligonucleotide

SEQ ID NO: 593524 - DNA, 57 bp, Artificial; identical to SEQ ID NO: 435123
  Synthetic oligonucleotide

SEQ ID NO: 593525 - DNA, 55 bp, Artificial; identical to SEQ ID NO: 435124
  Synthetic oligonucleotide

SEQ ID NO: 593526 - DNA, 57 bp, Artificial; identical to SEQ ID NO: 435125
  Synthetic oligonucleotide

SEQ ID NO: 593527 - DNA, 60 bp, Artificial; identical to SEQ ID NO: 435126
  Synthetic oligonucleotide

SEQ ID NO: 593528 - DNA, 60 bp, Artificial; identical to SEQ ID NO: 435127
  Synthetic oligonucleotide

SEQ ID NO: 593529 - DNA, 57 bp, Artificial; identical to SEQ ID NO: 435129
  Synthetic oligonucleotide

SEQ ID NO: 593530 - DNA, 53 bp, Artificial; identical to SEQ ID NO: 435131
  Synthetic oligonucleotide

SEQ ID NO: 593531 - DNA, 55 bp, Artificial; identical to SEQ ID NO: 435132
  Synthetic oligonucleotide

SEQ ID NO: 593532 - DNA, 57 bp, Artificial; identical to SEQ ID NO: 435136
  Synthetic oligonucleotide

SEQ ID NO: 593533 - DNA, 55 bp, Artificial; identical to SEQ ID NO: 435138
  Synthetic oligonucleotide

SEQ ID NO: 593534 - DNA, 59 bp, Artificial; identical to SEQ ID NO: 435139
  Synthetic oligonucleotide

SEQ ID NO: 593535 - DNA, 60 bp, Artificial; identical to SEQ ID NO: 435142
  Synthetic oligonucleotide

SEQ ID NO: 593536 - DNA, 55 bp, Artificial; identical to SEQ ID NO: 435143
  Synthetic oligonucleotide

SEQ ID NO: 593537 - DNA, 58 bp, Artificial; identical to SEQ ID NO: 435151
  Synthetic oligonucleotide

SEQ ID NO: 593538 - DNA, 55 bp, Artificial; identical to SEQ ID NO: 435157
  Synthetic oligonucleotide

SEQ ID NO: 593539 - DNA, 60 bp, Artificial; identical to SEQ ID NO: 435159
  Synthetic oligonucleotide

SEQ ID NO: 593540 - DNA, 55 bp, Artificial; identical to SEQ ID NO: 435160
  Synthetic oligonucleotide

SEQ ID NO: 593541 - DNA, 58 bp, Artificial; identical to SEQ ID NO: 435162
  Synthetic oligonucleotide

SEQ ID NO: 593542 - DNA, 51 bp, Artificial; identical to SEQ ID NO: 435164
  Synthetic oligonucleotide

SEQ ID NO: 593543 - DNA, 50 bp, Artificial; identical to SEQ ID NO: 435165
  Synthetic oligonucleotide

SEQ ID NO: 593544 - DNA, 54 bp, Artificial; identical to SEQ ID NO: 435166
  Synthetic oligonucleotide

SEQ ID NO: 593545 - DNA, 60 bp, Artificial; identical to SEQ ID NO: 435168
  Synthetic oligonucleotide

SEQ ID NO: 593546 - DNA, 55 bp, Artificial; identical to SEQ ID NO: 435171
  Synthetic oligonucleotide

SEQ ID NO: 593547 - DNA, 55 bp, Artificial; identical to SEQ ID NO: 435177
  Synthetic oligonucleotide

SEQ ID NO: 593548 - DNA, 59 bp, Artificial; identical to SEQ ID NO: 435181
  Synthetic oligonucleotide

SEQ ID NO: 593549 - DNA, 55 bp, Artificial; identical to SEQ ID NO: 435182
  Synthetic oligonucleotide

SEQ ID NO: 593550 - DNA, 54 bp, Artificial; identical to SEQ ID NO: 435186
  Synthetic oligonucleotide

SEQ ID NO: 593551 - DNA, 60 bp, Artificial; identical to SEQ ID NO: 435187
  Synthetic oligonucleotide

SEQ ID NO: 593552 - DNA, 60 bp, Artificial; identical to SEQ ID NO: 435188
  Synthetic oligonucleotide

SEQ ID NO: 593553 - DNA, 56 bp, Artificial; identical to SEQ ID NO: 435192
  Synthetic oligonucleotide

SEQ ID NO: 593554 - DNA, 55 bp, Artificial; identical to SEQ ID NO: 435193
  Synthetic oligonucleotide

SEQ ID NO: 593555 - DNA, 60 bp, Artificial; identical to SEQ ID NO: 435195
  Synthetic oligonucleotide

SEQ ID NO: 593556 - DNA, 52 bp, Artificial; identical to SEQ ID NO: 435197
  Synthetic oligonucleotide

SEQ ID NO: 593557 - DNA, 60 bp, Artificial; identical to SEQ ID NO: 435199
  Synthetic oligonucleotide

SEQ ID NO: 593558 - DNA, 60 bp, Artificial; identical to SEQ ID NO: 435200
  Synthetic oligonucleotide

SEQ ID NO: 593559 - DNA, 53 bp, Artificial; identical to SEQ ID NO: 435202
  Synthetic oligonucleotide

SEQ ID NO: 593560 - DNA, 55 bp, Artificial; identical to SEQ ID NO: 435203
  Synthetic oligonucleotide

SEQ ID NO: 593561 - DNA, 60 bp, Artificial; identical to SEQ ID NO: 435206
  Synthetic oligonucleotide

SEQ ID NO: 593562 - DNA, 50 bp, Artificial; identical to SEQ ID NO: 435210
  Synthetic oligonucleotide

SEQ ID NO: 593563 - DNA, 55 bp, Artificial; identical to SEQ ID NO: 435213
  Synthetic oligonucleotide

SEQ ID NO: 593564 - DNA, 56 bp, Artificial; identical to SEQ ID NO: 435214
  Synthetic oligonucleotide

SEQ ID NO: 593565 - DNA, 60 bp, Artificial; identical to SEQ ID NO: 435217
  Synthetic oligonucleotide

SEQ ID NO: 593566 - DNA, 55 bp, Artificial; identical to SEQ ID NO: 435218
  Synthetic oligonucleotide

SEQ ID NO: 593567 - DNA, 55 bp, Artificial; identical to SEQ ID NO: 435225
  Synthetic oligonucleotide

SEQ ID NO: 593568 - DNA, 55 bp, Artificial; identical to SEQ ID NO: 435230
  Synthetic oligonucleotide

SEQ ID NO: 593569 - DNA, 58 bp, Artificial; identical to SEQ ID NO: 435231
  Synthetic oligonucleotide

SEQ ID NO: 593570 - DNA, 60 bp, Artificial; identical to SEQ ID NO: 435232
  Synthetic oligonucleotide

SEQ ID NO: 593571 - DNA, 59 bp, Artificial; identical to SEQ ID NO: 435239
  Synthetic oligonucleotide

SEQ ID NO: 593572 - DNA, 55 bp, Artificial; identical to SEQ ID NO: 435240
  Synthetic oligonucleotide

SEQ ID NO: 593573 - DNA, 59 bp, Artificial; identical to SEQ ID NO: 435247
  Synthetic oligonucleotide

SEQ ID NO: 593574 - DNA, 51 bp, Artificial; identical to SEQ ID NO: 435249
  Synthetic oligonucleotide

SEQ ID NO: 593575 - DNA, 55 bp, Artificial; identical to SEQ ID NO: 435250
  Synthetic oligonucleotide

SEQ ID NO: 593576 - DNA, 55 bp, Artificial; identical to SEQ ID NO: 435251
  Synthetic oligonucleotide

SEQ ID NO: 593577 - DNA, 55 bp, Artificial; identical to SEQ ID NO: 435253
  Synthetic oligonucleotide

SEQ ID NO: 593578 - DNA, 60 bp, Artificial; identical to SEQ ID NO: 435254
  Synthetic oligonucleotide

SEQ ID NO: 593579 - DNA, 60 bp, Artificial; identical to SEQ ID NO: 435256
  Synthetic oligonucleotide

SEQ ID NO: 593580 - DNA, 55 bp, Artificial; identical to SEQ ID NO: 435259
  Synthetic oligonucleotide

SEQ ID NO: 593581 - DNA, 55 bp, Artificial; identical to SEQ ID NO: 435260
  Synthetic oligonucleotide

SEQ ID NO: 593582 - DNA, 55 bp, Artificial; identical to SEQ ID NO: 13075
  Synthetic oligonucleotide

SEQ ID NO: 593583 - DNA, 55 bp, Artificial; identical to SEQ ID NO: 435261
  Synthetic oligonucleotide

SEQ ID NO: 593584 - DNA, 55 bp, Artificial; identical to SEQ ID NO: 435262
  Synthetic oligonucleotide

SEQ ID NO: 593585 - DNA, 51 bp, Artificial; identical to SEQ ID NO: 435263
  Synthetic oligonucleotide

SEQ ID NO: 593586 - DNA, 56 bp, Artificial; identical to SEQ ID NO: 435264
  Synthetic oligonucleotide

SEQ ID NO: 593587 - DNA, 55 bp, Artificial; identical to SEQ ID NO: 435269
  Synthetic oligonucleotide

SEQ ID NO: 593588 - DNA, 55 bp, Artificial; identical to SEQ ID NO: 435271
  Synthetic oligonucleotide

SEQ ID NO: 593589 - DNA, 54 bp, Artificial; identical to SEQ ID NO: 435277
  Synthetic oligonucleotide

SEQ ID NO: 593590 - DNA, 54 bp, Artificial; identical to SEQ ID NO: 435279
  Synthetic oligonucleotide

SEQ ID NO: 593591 - DNA, 55 bp, Artificial; identical to SEQ ID NO: 435280
  Synthetic oligonucleotide

SEQ ID NO: 593592 - DNA, 55 bp, Artificial; identical to SEQ ID NO: 435281
  Synthetic oligonucleotide

SEQ ID NO: 593593 - DNA, 55 bp, Artificial; identical to SEQ ID NO: 435283
  Synthetic oligonucleotide

SEQ ID NO: 593594 - DNA, 53 bp, Artificial; identical to SEQ ID NO: 435284
  Synthetic oligonucleotide

SEQ ID NO: 593595 - DNA, 55 bp, Artificial; identical to SEQ ID NO: 435285
  Synthetic oligonucleotide

SEQ ID NO: 593596 - DNA, 60 bp, Artificial; identical to SEQ ID NO: 435297
  Synthetic oligonucleotide

SEQ ID NO: 593597 - DNA, 60 bp, Artificial; identical to SEQ ID NO: 435298
  Synthetic oligonucleotide

SEQ ID NO: 593598 - DNA, 56 bp, Artificial; identical to SEQ ID NO: 435300
  Synthetic oligonucleotide

SEQ ID NO: 593599 - DNA, 60 bp, Artificial; identical to SEQ ID NO: 435303
  Synthetic oligonucleotide

SEQ ID NO: 593600 - DNA, 60 bp, Artificial; identical to SEQ ID NO: 435304
  Synthetic oligonucleotide

SEQ ID NO: 593601 - DNA, 55 bp, Artificial; identical to SEQ ID NO: 435308
  Synthetic oligonucleotide

SEQ ID NO: 593602 - DNA, 60 bp, Artificial; identical to SEQ ID NO: 435309
  Synthetic oligonucleotide

SEQ ID NO: 593603 - DNA, 51 bp, Artificial; identical to SEQ ID NO: 435326
  Synthetic oligonucleotide

SEQ ID NO: 593604 - DNA, 60 bp, Artificial; identical to SEQ ID NO: 435328
  Synthetic oligonucleotide

SEQ ID NO: 593605 - DNA, 60 bp, Artificial; identical to SEQ ID NO: 435329
  Synthetic oligonucleotide

SEQ ID NO: 593606 - DNA, 55 bp, Artificial; identical to SEQ ID NO: 435333
  Synthetic oligonucleotide

SEQ ID NO: 593607 - DNA, 58 bp, Artificial; identical to SEQ ID NO: 435336
  Synthetic oligonucleotide

SEQ ID NO: 593608 - DNA, 55 bp, Artificial; identical to SEQ ID NO: 435337
  Synthetic oligonucleotide

SEQ ID NO: 593609 - DNA, 60 bp, Artificial; identical to SEQ ID NO: 435339
  Synthetic oligonucleotide

SEQ ID NO: 593610 - DNA, 60 bp, Artificial; identical to SEQ ID NO: 435342
  Synthetic oligonucleotide

SEQ ID NO: 593611 - DNA, 60 bp, Artificial; identical to SEQ ID NO: 435343
  Synthetic oligonucleotide

SEQ ID NO: 593612 - DNA, 60 bp, Artificial; identical to SEQ ID NO: 435344
  Synthetic oligonucleotide

SEQ ID NO: 593613 - DNA, 57 bp, Artificial; identical to SEQ ID NO: 435345
  Synthetic oligonucleotide

SEQ ID NO: 593614 - DNA, 52 bp, Artificial; identical to SEQ ID NO: 435346
  Synthetic oligonucleotide

SEQ ID NO: 593615 - DNA, 59 bp, Artificial; identical to SEQ ID NO: 435349
  Synthetic oligonucleotide

SEQ ID NO: 593616 - DNA, 58 bp, Artificial; identical to SEQ ID NO: 435350
  Synthetic oligonucleotide

SEQ ID NO: 593617 - DNA, 60 bp, Artificial; identical to SEQ ID NO: 435351
  Synthetic oligonucleotide

SEQ ID NO: 593618 - DNA, 55 bp, Artificial; identical to SEQ ID NO: 435352
  Synthetic oligonucleotide

SEQ ID NO: 593619 - DNA, 60 bp, Artificial; identical to SEQ ID NO: 435353
  Synthetic oligonucleotide

SEQ ID NO: 593620 - DNA, 58 bp, Artificial; identical to SEQ ID NO: 435356
  Synthetic oligonucleotide

SEQ ID NO: 593621 - DNA, 55 bp, Artificial; identical to SEQ ID NO: 435358
  Synthetic oligonucleotide

SEQ ID NO: 593622 - DNA, 56 bp, Artificial; identical to SEQ ID NO: 435359
  Synthetic oligonucleotide

SEQ ID NO: 593623 - DNA, 60 bp, Artificial; identical to SEQ ID NO: 435360
  Synthetic oligonucleotide

SEQ ID NO: 593624 - DNA, 60 bp, Artificial; identical to SEQ ID NO: 435361
  Synthetic oligonucleotide

SEQ ID NO: 593625 - DNA, 55 bp, Artificial; identical to SEQ ID NO: 435362
  Synthetic oligonucleotide

SEQ ID NO: 593626 - DNA, 60 bp, Artificial; identical to SEQ ID NO: 7696
  Synthetic oligonucleotide

SEQ ID NO: 593627 - DNA, 60 bp, Artificial; identical to SEQ ID NO: 435365
  Synthetic oligonucleotide

SEQ ID NO: 593628 - DNA, 60 bp, Artificial; identical to SEQ ID NO: 435368
  Synthetic oligonucleotide

SEQ ID NO: 593629 - DNA, 55 bp, Artificial; identical to SEQ ID NO: 435369
  Synthetic oligonucleotide

SEQ ID NO: 593630 - DNA, 57 bp, Artificial; identical to SEQ ID NO: 435373
  Synthetic oligonucleotide

SEQ ID NO: 593631 - DNA, 55 bp, Artificial; identical to SEQ ID NO: 435377
  Synthetic oligonucleotide

SEQ ID NO: 593632 - DNA, 53 bp, Artificial; identical to SEQ ID NO: 435378
  Synthetic oligonucleotide

SEQ ID NO: 593633 - DNA, 55 bp, Artificial; identical to SEQ ID NO: 435380
  Synthetic oligonucleotide

SEQ ID NO: 593634 - DNA, 56 bp, Artificial; identical to SEQ ID NO: 435381
  Synthetic oligonucleotide

SEQ ID NO: 593635 - DNA, 50 bp, Artificial; identical to SEQ ID NO: 435383
  Synthetic oligonucleotide

SEQ ID NO: 593636 - DNA, 51 bp, Artificial; identical to SEQ ID NO: 435384
  Synthetic oligonucleotide

SEQ ID NO: 593637 - DNA, 58 bp, Artificial; identical to SEQ ID NO: 435388
  Synthetic oligonucleotide

SEQ ID NO: 593638 - DNA, 55 bp, Artificial; identical to SEQ ID NO: 435389
  Synthetic oligonucleotide

SEQ ID NO: 593639 - DNA, 60 bp, Artificial; identical to SEQ ID NO: 435393
  Synthetic oligonucleotide

SEQ ID NO: 593640 - DNA, 54 bp, Artificial; identical to SEQ ID NO: 435395
  Synthetic oligonucleotide

SEQ ID NO: 593641 - DNA, 55 bp, Artificial; identical to SEQ ID NO: 435398
  Synthetic oligonucleotide

SEQ ID NO: 593642 - DNA, 50 bp, Artificial; identical to SEQ ID NO: 435399
  Synthetic oligonucleotide

SEQ ID NO: 593643 - DNA, 54 bp, Artificial; identical to SEQ ID NO: 435401
  Synthetic oligonucleotide

SEQ ID NO: 593644 - DNA, 60 bp, Artificial; identical to SEQ ID NO: 435404
  Synthetic oligonucleotide

SEQ ID NO: 593645 - DNA, 60 bp, Artificial; identical to SEQ ID NO: 435406
  Synthetic oligonucleotide

SEQ ID NO: 593646 - DNA, 55 bp, Artificial; identical to SEQ ID NO: 435407
  Synthetic oligonucleotide

SEQ ID NO: 593647 - DNA, 51 bp, Artificial; identical to SEQ ID NO: 435409
  Synthetic oligonucleotide

SEQ ID NO: 593648 - DNA, 55 bp, Artificial; identical to SEQ ID NO: 435411
  Synthetic oligonucleotide

SEQ ID NO: 593649 - DNA, 55 bp, Artificial; identical to SEQ ID NO: 435412
  Synthetic oligonucleotide

SEQ ID NO: 593650 - DNA, 55 bp, Artificial; identical to SEQ ID NO: 435418
  Synthetic oligonucleotide

SEQ ID NO: 593651 - DNA, 60 bp, Artificial; identical to SEQ ID NO: 435419
  Synthetic oligonucleotide

SEQ ID NO: 593652 - DNA, 59 bp, Artificial; identical to SEQ ID NO: 435421
  Synthetic oligonucleotide

SEQ ID NO: 593653 - DNA, 60 bp, Artificial; identical to SEQ ID NO: 435425
  Synthetic oligonucleotide

SEQ ID NO: 593654 - DNA, 51 bp, Artificial; identical to SEQ ID NO: 435428
  Synthetic oligonucleotide

SEQ ID NO: 593655 - DNA, 55 bp, Artificial; identical to SEQ ID NO: 16643
  Synthetic oligonucleotide

SEQ ID NO: 593656 - DNA, 60 bp, Artificial; identical to SEQ ID NO: 435431
  Synthetic oligonucleotide

SEQ ID NO: 593657 - DNA, 51 bp, Artificial; identical to SEQ ID NO: 435433
  Synthetic oligonucleotide

SEQ ID NO: 593658 - DNA, 55 bp, Artificial; identical to SEQ ID NO: 435434
  Synthetic oligonucleotide

SEQ ID NO: 593659 - DNA, 55 bp, Artificial; identical to SEQ ID NO: 435435
  Synthetic oligonucleotide

SEQ ID NO: 593660 - DNA, 55 bp, Artificial; identical to SEQ ID NO: 435436
  Synthetic oligonucleotide

SEQ ID NO: 593661 - DNA, 58 bp, Artificial; identical to SEQ ID NO: 435437
  Synthetic oligonucleotide

SEQ ID NO: 593662 - DNA, 55 bp, Artificial; identical to SEQ ID NO: 435443
  Synthetic oligonucleotide

SEQ ID NO: 593663 - DNA, 55 bp, Artificial; identical to SEQ ID NO: 435444
  Synthetic oligonucleotide

SEQ ID NO: 593664 - DNA, 55 bp, Artificial; identical to SEQ ID NO: 435450
  Synthetic oligonucleotide

SEQ ID NO: 593665 - DNA, 51 bp, Artificial; identical to SEQ ID NO: 435451
  Synthetic oligonucleotide

SEQ ID NO: 593666 - DNA, 60 bp, Artificial; identical to SEQ ID NO: 435453
  Synthetic oligonucleotide

SEQ ID NO: 593667 - DNA, 58 bp, Artificial; identical to SEQ ID NO: 435457
  Synthetic oligonucleotide

SEQ ID NO: 593668 - DNA, 55 bp, Artificial; identical to SEQ ID NO: 435458
  Synthetic oligonucleotide

SEQ ID NO: 593669 - DNA, 60 bp, Artificial; identical to SEQ ID NO: 435459
  Synthetic oligonucleotide

SEQ ID NO: 593670 - DNA, 55 bp, Artificial; identical to SEQ ID NO: 435462
  Synthetic oligonucleotide

SEQ ID NO: 593671 - DNA, 54 bp, Artificial; identical to SEQ ID NO: 435464
  Synthetic oligonucleotide

SEQ ID NO: 593672 - DNA, 55 bp, Artificial; identical to SEQ ID NO: 435466
  Synthetic oligonucleotide

SEQ ID NO: 593673 - DNA, 60 bp, Artificial; identical to SEQ ID NO: 435467
  Synthetic oligonucleotide

SEQ ID NO: 593674 - DNA, 59 bp, Artificial; identical to SEQ ID NO: 435470
  Synthetic oligonucleotide

SEQ ID NO: 593675 - DNA, 57 bp, Artificial; identical to SEQ ID NO: 435472
  Synthetic oligonucleotide

SEQ ID NO: 593676 - DNA, 60 bp, Artificial; identical to SEQ ID NO: 435473
  Synthetic oligonucleotide

SEQ ID NO: 593677 - DNA, 58 bp, Artificial; identical to SEQ ID NO: 435474
  Synthetic oligonucleotide

SEQ ID NO: 593678 - DNA, 60 bp, Artificial; identical to SEQ ID NO: 435475
  Synthetic oligonucleotide

SEQ ID NO: 593679 - DNA, 60 bp, Artificial; identical to SEQ ID NO: 435476
  Synthetic oligonucleotide

SEQ ID NO: 593680 - DNA, 58 bp, Artificial; identical to SEQ ID NO: 435477
  Synthetic oligonucleotide

SEQ ID NO: 593681 - DNA, 59 bp, Artificial; identical to SEQ ID NO: 435478
  Synthetic oligonucleotide

SEQ ID NO: 593682 - DNA, 60 bp, Artificial; identical to SEQ ID NO: 435481
  Synthetic oligonucleotide

SEQ ID NO: 593683 - DNA, 57 bp, Artificial; identical to SEQ ID NO: 435482
  Synthetic oligonucleotide

SEQ ID NO: 593684 - DNA, 55 bp, Artificial; identical to SEQ ID NO: 435484
  Synthetic oligonucleotide

SEQ ID NO: 593685 - DNA, 56 bp, Artificial; identical to SEQ ID NO: 435485
  Synthetic oligonucleotide

SEQ ID NO: 593686 - DNA, 50 bp, Artificial; identical to SEQ ID NO: 435486
  Synthetic oligonucleotide

SEQ ID NO: 593687 - DNA, 55 bp, Artificial; identical to SEQ ID NO: 435492
  Synthetic oligonucleotide

SEQ ID NO: 593688 - DNA, 55 bp, Artificial; identical to SEQ ID NO: 435496
  Synthetic oligonucleotide

SEQ ID NO: 593689 - DNA, 60 bp, Artificial; identical to SEQ ID NO: 435501
  Synthetic oligonucleotide

SEQ ID NO: 593690 - DNA, 53 bp, Artificial; identical to SEQ ID NO: 48126
  Synthetic oligonucleotide

SEQ ID NO: 593691 - DNA, 51 bp, Artificial; identical to SEQ ID NO: 435502
  Synthetic oligonucleotide

SEQ ID NO: 593692 - DNA, 58 bp, Artificial; identical to SEQ ID NO: 435503
  Synthetic oligonucleotide

SEQ ID NO: 593693 - DNA, 56 bp, Artificial; identical to SEQ ID NO: 435507
  Synthetic oligonucleotide

SEQ ID NO: 593694 - DNA, 60 bp, Artificial; identical to SEQ ID NO: 435513
  Synthetic oligonucleotide

SEQ ID NO: 593695 - DNA, 60 bp, Artificial; identical to SEQ ID NO: 435514
  Synthetic oligonucleotide

SEQ ID NO: 593696 - DNA, 60 bp, Artificial; identical to SEQ ID NO: 435516
  Synthetic oligonucleotide

SEQ ID NO: 593697 - DNA, 55 bp, Artificial; identical to SEQ ID NO: 435517
  Synthetic oligonucleotide

SEQ ID NO: 593698 - DNA, 57 bp, Artificial; identical to SEQ ID NO: 435518
  Synthetic oligonucleotide

SEQ ID NO: 593699 - DNA, 56 bp, Artificial; identical to SEQ ID NO: 435519
  Synthetic oligonucleotide

SEQ ID NO: 593700 - DNA, 60 bp, Artificial; identical to SEQ ID NO: 435520
  Synthetic oligonucleotide

SEQ ID NO: 593701 - DNA, 55 bp, Artificial; identical to SEQ ID NO: 435522
  Synthetic oligonucleotide

SEQ ID NO: 593702 - DNA, 60 bp, Artificial; identical to SEQ ID NO: 435523
  Synthetic oligonucleotide

SEQ ID NO: 593703 - DNA, 55 bp, Artificial; identical to SEQ ID NO: 435524
  Synthetic oligonucleotide

SEQ ID NO: 593704 - DNA, 55 bp, Artificial; identical to SEQ ID NO: 435526
  Synthetic oligonucleotide

SEQ ID NO: 593705 - DNA, 60 bp, Artificial; identical to SEQ ID NO: 435527
  Synthetic oligonucleotide

SEQ ID NO: 593706 - DNA, 60 bp, Artificial; identical to SEQ ID NO: 435528
  Synthetic oligonucleotide

SEQ ID NO: 593707 - DNA, 59 bp, Artificial; identical to SEQ ID NO: 435531
  Synthetic oligonucleotide

SEQ ID NO: 593708 - DNA, 59 bp, Artificial; identical to SEQ ID NO: 435532
  Synthetic oligonucleotide

SEQ ID NO: 593709 - DNA, 55 bp, Artificial; identical to SEQ ID NO: 435533
  Synthetic oligonucleotide

SEQ ID NO: 593710 - DNA, 59 bp, Artificial; identical to SEQ ID NO: 435534
  Synthetic oligonucleotide

SEQ ID NO: 593711 - DNA, 55 bp, Artificial; identical to SEQ ID NO: 435540
  Synthetic oligonucleotide

SEQ ID NO: 593712 - DNA, 60 bp, Artificial; identical to SEQ ID NO: 435543
  Synthetic oligonucleotide

SEQ ID NO: 593713 - DNA, 60 bp, Artificial; identical to SEQ ID NO: 11200
  Synthetic oligonucleotide

SEQ ID NO: 593714 - DNA, 58 bp, Artificial; identical to SEQ ID NO: 435553
  Synthetic oligonucleotide

SEQ ID NO: 593715 - DNA, 55 bp, Artificial; identical to SEQ ID NO: 435559
  Synthetic oligonucleotide

SEQ ID NO: 593716 - DNA, 60 bp, Artificial; identical to SEQ ID NO: 435561
  Synthetic oligonucleotide

SEQ ID NO: 593717 - DNA, 55 bp, Artificial; identical to SEQ ID NO: 18530
  Synthetic oligonucleotide

SEQ ID NO: 593718 - DNA, 51 bp, Artificial; identical to SEQ ID NO: 435573
  Synthetic oligonucleotide

SEQ ID NO: 593719 - DNA, 60 bp, Artificial; identical to SEQ ID NO: 435577
  Synthetic oligonucleotide

SEQ ID NO: 593720 - DNA, 53 bp, Artificial; identical to SEQ ID NO: 435578
  Synthetic oligonucleotide

SEQ ID NO: 593721 - DNA, 55 bp, Artificial; identical to SEQ ID NO: 435579
  Synthetic oligonucleotide

SEQ ID NO: 593722 - DNA, 55 bp, Artificial; identical to SEQ ID NO: 435580
  Synthetic oligonucleotide

SEQ ID NO: 593723 - DNA, 56 bp, Artificial; identical to SEQ ID NO: 435582
  Synthetic oligonucleotide

SEQ ID NO: 593724 - DNA, 55 bp, Artificial; identical to SEQ ID NO: 435583
  Synthetic oligonucleotide

SEQ ID NO: 593725 - DNA, 55 bp, Artificial; identical to SEQ ID NO: 435585
  Synthetic oligonucleotide

SEQ ID NO: 593726 - DNA, 55 bp, Artificial; identical to SEQ ID NO: 435587
  Synthetic oligonucleotide

SEQ ID NO: 593727 - DNA, 54 bp, Artificial; identical to SEQ ID NO: 435589
  Synthetic oligonucleotide

SEQ ID NO: 593728 - DNA, 57 bp, Artificial; identical to SEQ ID NO: 435591
  Synthetic oligonucleotide

SEQ ID NO: 593729 - DNA, 55 bp, Artificial; identical to SEQ ID NO: 435593
  Synthetic oligonucleotide

SEQ ID NO: 593730 - DNA, 60 bp, Artificial; identical to SEQ ID NO: 435595
  Synthetic oligonucleotide

SEQ ID NO: 593731 - DNA, 50 bp, Artificial; identical to SEQ ID NO: 435596
  Synthetic oligonucleotide

SEQ ID NO: 593732 - DNA, 60 bp, Artificial; identical to SEQ ID NO: 435597
  Synthetic oligonucleotide

SEQ ID NO: 593733 - DNA, 60 bp, Artificial; identical to SEQ ID NO: 435598
  Synthetic oligonucleotide

SEQ ID NO: 593734 - DNA, 55 bp, Artificial; identical to SEQ ID NO: 435599
  Synthetic oligonucleotide

SEQ ID NO: 593735 - DNA, 60 bp, Artificial; identical to SEQ ID NO: 435605
  Synthetic oligonucleotide

SEQ ID NO: 593736 - DNA, 60 bp, Artificial; identical to SEQ ID NO: 435606
  Synthetic oligonucleotide

SEQ ID NO: 593737 - DNA, 56 bp, Artificial; identical to SEQ ID NO: 435608
  Synthetic oligonucleotide

SEQ ID NO: 593738 - DNA, 57 bp, Artificial; identical to SEQ ID NO: 435612
  Synthetic oligonucleotide

SEQ ID NO: 593739 - DNA, 60 bp, Artificial; identical to SEQ ID NO: 12429
  Synthetic oligonucleotide

SEQ ID NO: 593740 - DNA, 50 bp, Artificial; identical to SEQ ID NO: 435615
  Synthetic oligonucleotide

SEQ ID NO: 593741 - DNA, 52 bp, Artificial; identical to SEQ ID NO: 435617
  Synthetic oligonucleotide

SEQ ID NO: 593742 - DNA, 60 bp, Artificial; identical to SEQ ID NO: 435618
  Synthetic oligonucleotide

SEQ ID NO: 593743 - DNA, 54 bp, Artificial; identical to SEQ ID NO: 435620
  Synthetic oligonucleotide

SEQ ID NO: 593744 - DNA, 60 bp, Artificial; identical to SEQ ID NO: 435622
  Synthetic oligonucleotide

SEQ ID NO: 593745 - DNA, 55 bp, Artificial; identical to SEQ ID NO: 435623
  Synthetic oligonucleotide

SEQ ID NO: 593746 - DNA, 52 bp, Artificial; identical to SEQ ID NO: 435626
  Synthetic oligonucleotide

SEQ ID NO: 593747 - DNA, 60 bp, Artificial; identical to SEQ ID NO: 435627
  Synthetic oligonucleotide

SEQ ID NO: 593748 - DNA, 55 bp, Artificial; identical to SEQ ID NO: 435629
  Synthetic oligonucleotide

SEQ ID NO: 593749 - DNA, 60 bp, Artificial; identical to SEQ ID NO: 435630
  Synthetic oligonucleotide

SEQ ID NO: 593750 - DNA, 60 bp, Artificial; identical to SEQ ID NO: 435631
  Synthetic oligonucleotide

SEQ ID NO: 593751 - DNA, 55 bp, Artificial; identical to SEQ ID NO: 435632
  Synthetic oligonucleotide

SEQ ID NO: 593752 - DNA, 55 bp, Artificial; identical to SEQ ID NO: 435633
  Synthetic oligonucleotide

SEQ ID NO: 593753 - DNA, 60 bp, Artificial; identical to SEQ ID NO: 10452
  Synthetic oligonucleotide

SEQ ID NO: 593754 - DNA, 60 bp, Artificial; identical to SEQ ID NO: 435636
  Synthetic oligonucleotide

SEQ ID NO: 593755 - DNA, 52 bp, Artificial; identical to SEQ ID NO: 435637
  Synthetic oligonucleotide

SEQ ID NO: 593756 - DNA, 54 bp, Artificial; identical to SEQ ID NO: 435638
  Synthetic oligonucleotide

SEQ ID NO: 593757 - DNA, 52 bp, Artificial; identical to SEQ ID NO: 435641
  Synthetic oligonucleotide

SEQ ID NO: 593758 - DNA, 59 bp, Artificial; identical to SEQ ID NO: 435644
  Synthetic oligonucleotide

SEQ ID NO: 593759 - DNA, 55 bp, Artificial; identical to SEQ ID NO: 435647
  Synthetic oligonucleotide

SEQ ID NO: 593760 - DNA, 53 bp, Artificial; identical to SEQ ID NO: 435650
  Synthetic oligonucleotide

SEQ ID NO: 593761 - DNA, 55 bp, Artificial; identical to SEQ ID NO: 435651
  Synthetic oligonucleotide

SEQ ID NO: 593762 - DNA, 60 bp, Artificial; identical to SEQ ID NO: 435652
  Synthetic oligonucleotide

SEQ ID NO: 593763 - DNA, 55 bp, Artificial; identical to SEQ ID NO: 435654
  Synthetic oligonucleotide

SEQ ID NO: 593764 - DNA, 55 bp, Artificial; identical to SEQ ID NO: 19508
  Synthetic oligonucleotide

SEQ ID NO: 593765 - DNA, 55 bp, Artificial; identical to SEQ ID NO: 435658
  Synthetic oligonucleotide

SEQ ID NO: 593766 - DNA, 55 bp, Artificial; identical to SEQ ID NO: 435659
  Synthetic oligonucleotide

SEQ ID NO: 593767 - DNA, 56 bp, Artificial; identical to SEQ ID NO: 435661
  Synthetic oligonucleotide

SEQ ID NO: 593768 - DNA, 59 bp, Artificial; identical to SEQ ID NO: 20189
  Synthetic oligonucleotide

SEQ ID NO: 593769 - DNA, 53 bp, Artificial; identical to SEQ ID NO: 435662
  Synthetic oligonucleotide

SEQ ID NO: 593770 - DNA, 60 bp, Artificial; identical to SEQ ID NO: 435665
  Synthetic oligonucleotide

SEQ ID NO: 593771 - DNA, 60 bp, Artificial; identical to SEQ ID NO: 435667
  Synthetic oligonucleotide

SEQ ID NO: 593772 - DNA, 57 bp, Artificial; identical to SEQ ID NO: 435668
  Synthetic oligonucleotide

SEQ ID NO: 593773 - DNA, 58 bp, Artificial; identical to SEQ ID NO: 435669
  Synthetic oligonucleotide

SEQ ID NO: 593774 - DNA, 55 bp, Artificial; identical to SEQ ID NO: 435674
  Synthetic oligonucleotide

SEQ ID NO: 593775 - DNA, 55 bp, Artificial; identical to SEQ ID NO: 435676
  Synthetic oligonucleotide

SEQ ID NO: 593776 - DNA, 60 bp, Artificial; identical to SEQ ID NO: 435678
  Synthetic oligonucleotide

SEQ ID NO: 593777 - DNA, 60 bp, Artificial; identical to SEQ ID NO: 14176
  Synthetic oligonucleotide

SEQ ID NO: 593778 - DNA, 60 bp, Artificial; identical to SEQ ID NO: 435687
  Synthetic oligonucleotide

SEQ ID NO: 593779 - DNA, 60 bp, Artificial; identical to SEQ ID NO: 435688
  Synthetic oligonucleotide

SEQ ID NO: 593780 - DNA, 53 bp, Artificial; identical to SEQ ID NO: 435690
  Synthetic oligonucleotide

SEQ ID NO: 593781 - DNA, 56 bp, Artificial; identical to SEQ ID NO: 435691
  Synthetic oligonucleotide

SEQ ID NO: 593782 - DNA, 58 bp, Artificial; identical to SEQ ID NO: 435693
  Synthetic oligonucleotide

SEQ ID NO: 593783 - DNA, 54 bp, Artificial; identical to SEQ ID NO: 435703
  Synthetic oligonucleotide

SEQ ID NO: 593784 - DNA, 60 bp, Artificial; identical to SEQ ID NO: 435706
  Synthetic oligonucleotide

SEQ ID NO: 593785 - DNA, 60 bp, Artificial; identical to SEQ ID NO: 435708
  Synthetic oligonucleotide

SEQ ID NO: 593786 - DNA, 55 bp, Artificial; identical to SEQ ID NO: 435709
  Synthetic oligonucleotide

SEQ ID NO: 593787 - DNA, 60 bp, Artificial; identical to SEQ ID NO: 435711
  Synthetic oligonucleotide

SEQ ID NO: 593788 - DNA, 54 bp, Artificial; identical to SEQ ID NO: 435715
  Synthetic oligonucleotide

SEQ ID NO: 593789 - DNA, 54 bp, Artificial; identical to SEQ ID NO: 18153
  Synthetic oligonucleotide

SEQ ID NO: 593790 - DNA, 55 bp, Artificial; identical to SEQ ID NO: 435720
  Synthetic oligonucleotide

SEQ ID NO: 593791 - DNA, 56 bp, Artificial; identical to SEQ ID NO: 435721
  Synthetic oligonucleotide

SEQ ID NO: 593792 - DNA, 51 bp, Artificial; identical to SEQ ID NO: 435723
  Synthetic oligonucleotide

SEQ ID NO: 593793 - DNA, 55 bp, Artificial; identical to SEQ ID NO: 435725
  Synthetic oligonucleotide

SEQ ID NO: 593794 - DNA, 57 bp, Artificial; identical to SEQ ID NO: 435726
  Synthetic oligonucleotide

SEQ ID NO: 593795 - DNA, 60 bp, Artificial; identical to SEQ ID NO: 13635
  Synthetic oligonucleotide

SEQ ID NO: 593796 - DNA, 59 bp, Artificial; identical to SEQ ID NO: 435727
  Synthetic oligonucleotide

SEQ ID NO: 593797 - DNA, 60 bp, Artificial; identical to SEQ ID NO: 435734
  Synthetic oligonucleotide

SEQ ID NO: 593798 - DNA, 53 bp, Artificial; identical to SEQ ID NO: 435735
  Synthetic oligonucleotide

SEQ ID NO: 593799 - DNA, 57 bp, Artificial; identical to SEQ ID NO: 435737
  Synthetic oligonucleotide

SEQ ID NO: 593800 - DNA, 59 bp, Artificial; identical to SEQ ID NO: 435741
  Synthetic oligonucleotide

SEQ ID NO: 593801 - DNA, 60 bp, Artificial; identical to SEQ ID NO: 435742
  Synthetic oligonucleotide

SEQ ID NO: 593802 - DNA, 60 bp, Artificial; identical to SEQ ID NO: 435746
  Synthetic oligonucleotide

SEQ ID NO: 593803 - DNA, 54 bp, Artificial; identical to SEQ ID NO: 435747
  Synthetic oligonucleotide

SEQ ID NO: 593804 - DNA, 50 bp, Artificial; identical to SEQ ID NO: 435750
  Synthetic oligonucleotide

SEQ ID NO: 593805 - DNA, 60 bp, Artificial; identical to SEQ ID NO: 435754
  Synthetic oligonucleotide

SEQ ID NO: 593806 - DNA, 60 bp, Artificial; identical to SEQ ID NO: 435756
  Synthetic oligonucleotide

SEQ ID NO: 593807 - DNA, 55 bp, Artificial; identical to SEQ ID NO: 435757
  Synthetic oligonucleotide

SEQ ID NO: 593808 - DNA, 57 bp, Artificial; identical to SEQ ID NO: 435759
  Synthetic oligonucleotide

SEQ ID NO: 593809 - DNA, 60 bp, Artificial; identical to SEQ ID NO: 435760
  Synthetic oligonucleotide

SEQ ID NO: 593810 - DNA, 60 bp, Artificial; identical to SEQ ID NO: 435761
  Synthetic oligonucleotide

SEQ ID NO: 593811 - DNA, 60 bp, Artificial; identical to SEQ ID NO: 435762
  Synthetic oligonucleotide

SEQ ID NO: 593812 - DNA, 53 bp, Artificial; identical to SEQ ID NO: 435764
  Synthetic oligonucleotide

SEQ ID NO: 593813 - DNA, 54 bp, Artificial; identical to SEQ ID NO: 435766
  Synthetic oligonucleotide

SEQ ID NO: 593814 - DNA, 54 bp, Artificial; identical to SEQ ID NO: 435774
  Synthetic oligonucleotide

SEQ ID NO: 593815 - DNA, 55 bp, Artificial; identical to SEQ ID NO: 435776
  Synthetic oligonucleotide

SEQ ID NO: 593816 - DNA, 55 bp, Artificial; identical to SEQ ID NO: 435779
  Synthetic oligonucleotide

SEQ ID NO: 593817 - DNA, 54 bp, Artificial; identical to SEQ ID NO: 435780
  Synthetic oligonucleotide

SEQ ID NO: 593818 - DNA, 55 bp, Artificial; identical to SEQ ID NO: 435781
  Synthetic oligonucleotide

SEQ ID NO: 593819 - DNA, 55 bp, Artificial; identical to SEQ ID NO: 435783
  Synthetic oligonucleotide

SEQ ID NO: 593820 - DNA, 60 bp, Artificial; identical to SEQ ID NO: 435784
  Synthetic oligonucleotide

SEQ ID NO: 593821 - DNA, 51 bp, Artificial; identical to SEQ ID NO: 435785
  Synthetic oligonucleotide

SEQ ID NO: 593822 - DNA, 53 bp, Artificial; identical to SEQ ID NO: 435786
  Synthetic oligonucleotide

SEQ ID NO: 593823 - DNA, 60 bp, Artificial; identical to SEQ ID NO: 435789
  Synthetic oligonucleotide

SEQ ID NO: 593824 - DNA, 55 bp, Artificial; identical to SEQ ID NO: 435790
  Synthetic oligonucleotide

SEQ ID NO: 593825 - DNA, 57 bp, Artificial; identical to SEQ ID NO: 435791
  Synthetic oligonucleotide

SEQ ID NO: 593826 - DNA, 60 bp, Artificial; identical to SEQ ID NO: 435796
  Synthetic oligonucleotide

SEQ ID NO: 593827 - DNA, 56 bp, Artificial; identical to SEQ ID NO: 435797
  Synthetic oligonucleotide

SEQ ID NO: 593828 - DNA, 55 bp, Artificial; identical to SEQ ID NO: 435799
  Synthetic oligonucleotide

SEQ ID NO: 593829 - DNA, 55 bp, Artificial; identical to SEQ ID NO: 435802
  Synthetic oligonucleotide

SEQ ID NO: 593830 - DNA, 59 bp, Artificial; identical to SEQ ID NO: 435805
  Synthetic oligonucleotide

SEQ ID NO: 593831 - DNA, 60 bp, Artificial; identical to SEQ ID NO: 435806
  Synthetic oligonucleotide

SEQ ID NO: 593832 - DNA, 59 bp, Artificial; identical to SEQ ID NO: 435807
  Synthetic oligonucleotide

SEQ ID NO: 593833 - DNA, 60 bp, Artificial; identical to SEQ ID NO: 435808
  Synthetic oligonucleotide

SEQ ID NO: 593834 - DNA, 53 bp, Artificial; identical to SEQ ID NO: 435812
  Synthetic oligonucleotide

SEQ ID NO: 593835 - DNA, 55 bp, Artificial; identical to SEQ ID NO: 435819
  Synthetic oligonucleotide

SEQ ID NO: 593836 - DNA, 55 bp, Artificial; identical to SEQ ID NO: 435820
  Synthetic oligonucleotide

SEQ ID NO: 593837 - DNA, 60 bp, Artificial; identical to SEQ ID NO: 435823
  Synthetic oligonucleotide

SEQ ID NO: 593838 - DNA, 55 bp, Artificial; identical to SEQ ID NO: 435828
  Synthetic oligonucleotide

SEQ ID NO: 593839 - DNA, 58 bp, Artificial; identical to SEQ ID NO: 435830
  Synthetic oligonucleotide

SEQ ID NO: 593840 - DNA, 60 bp, Artificial; identical to SEQ ID NO: 435831
  Synthetic oligonucleotide

SEQ ID NO: 593841 - DNA, 55 bp, Artificial; identical to SEQ ID NO: 435832
  Synthetic oligonucleotide

SEQ ID NO: 593842 - DNA, 59 bp, Artificial; identical to SEQ ID NO: 18209
  Synthetic oligonucleotide

SEQ ID NO: 593843 - DNA, 54 bp, Artificial; identical to SEQ ID NO: 435834
  Synthetic oligonucleotide

SEQ ID NO: 593844 - DNA, 57 bp, Artificial; identical to SEQ ID NO: 435839
  Synthetic oligonucleotide

SEQ ID NO: 593845 - DNA, 55 bp, Artificial; identical to SEQ ID NO: 435840
  Synthetic oligonucleotide

SEQ ID NO: 593846 - DNA, 59 bp, Artificial; identical to SEQ ID NO: 435842
  Synthetic oligonucleotide

SEQ ID NO: 593847 - DNA, 58 bp, Artificial; identical to SEQ ID NO: 435843
  Synthetic oligonucleotide

SEQ ID NO: 593848 - DNA, 56 bp, Artificial; identical to SEQ ID NO: 435844
  Synthetic oligonucleotide

SEQ ID NO: 593849 - DNA, 55 bp, Artificial; identical to SEQ ID NO: 435845
  Synthetic oligonucleotide

SEQ ID NO: 593850 - DNA, 60 bp, Artificial; identical to SEQ ID NO: 435846
  Synthetic oligonucleotide

SEQ ID NO: 593851 - DNA, 55 bp, Artificial; identical to SEQ ID NO: 435848
  Synthetic oligonucleotide

SEQ ID NO: 593852 - DNA, 51 bp, Artificial; identical to SEQ ID NO: 435849
  Synthetic oligonucleotide

SEQ ID NO: 593853 - DNA, 55 bp, Artificial; identical to SEQ ID NO: 435852
  Synthetic oligonucleotide

SEQ ID NO: 593854 - DNA, 60 bp, Artificial; identical to SEQ ID NO: 435855
  Synthetic oligonucleotide

SEQ ID NO: 593855 - DNA, 59 bp, Artificial; identical to SEQ ID NO: 435857
  Synthetic oligonucleotide

SEQ ID NO: 593856 - DNA, 60 bp, Artificial; identical to SEQ ID NO: 435860
  Synthetic oligonucleotide

SEQ ID NO: 593857 - DNA, 59 bp, Artificial; identical to SEQ ID NO: 435863
  Synthetic oligonucleotide

SEQ ID NO: 593858 - DNA, 57 bp, Artificial; identical to SEQ ID NO: 435865
  Synthetic oligonucleotide

SEQ ID NO: 593859 - DNA, 53 bp, Artificial; identical to SEQ ID NO: 18783
  Synthetic oligonucleotide

SEQ ID NO: 593860 - DNA, 60 bp, Artificial; identical to SEQ ID NO: 8341
  Synthetic oligonucleotide

SEQ ID NO: 593861 - DNA, 55 bp, Artificial; identical to SEQ ID NO: 435870
  Synthetic oligonucleotide

SEQ ID NO: 593862 - DNA, 53 bp, Artificial; identical to SEQ ID NO: 435872
  Synthetic oligonucleotide

SEQ ID NO: 593863 - DNA, 55 bp, Artificial; identical to SEQ ID NO: 435875
  Synthetic oligonucleotide

SEQ ID NO: 593864 - DNA, 60 bp, Artificial; identical to SEQ ID NO: 9492
  Synthetic oligonucleotide

SEQ ID NO: 593865 - DNA, 53 bp, Artificial; identical to SEQ ID NO: 435876
  Synthetic oligonucleotide

SEQ ID NO: 593866 - DNA, 60 bp, Artificial; identical to SEQ ID NO: 11178
  Synthetic oligonucleotide

SEQ ID NO: 593867 - DNA, 56 bp, Artificial; identical to SEQ ID NO: 435882
  Synthetic oligonucleotide

SEQ ID NO: 593868 - DNA, 58 bp, Artificial; identical to SEQ ID NO: 435883
  Synthetic oligonucleotide

SEQ ID NO: 593869 - DNA, 57 bp, Artificial; identical to SEQ ID NO: 435886
  Synthetic oligonucleotide

SEQ ID NO: 593870 - DNA, 51 bp, Artificial; identical to SEQ ID NO: 435887
  Synthetic oligonucleotide

SEQ ID NO: 593871 - DNA, 58 bp, Artificial; identical to SEQ ID NO: 435888
  Synthetic oligonucleotide

SEQ ID NO: 593872 - DNA, 55 bp, Artificial; identical to SEQ ID NO: 435891
  Synthetic oligonucleotide

SEQ ID NO: 593873 - DNA, 56 bp, Artificial; identical to SEQ ID NO: 435893
  Synthetic oligonucleotide

SEQ ID NO: 593874 - DNA, 60 bp, Artificial; identical to SEQ ID NO: 435894
  Synthetic oligonucleotide

SEQ ID NO: 593875 - DNA, 60 bp, Artificial; identical to SEQ ID NO: 435896
  Synthetic oligonucleotide

SEQ ID NO: 593876 - DNA, 60 bp, Artificial; identical to SEQ ID NO: 435899
  Synthetic oligonucleotide

SEQ ID NO: 593877 - DNA, 55 bp, Artificial; identical to SEQ ID NO: 435900
  Synthetic oligonucleotide

SEQ ID NO: 593878 - DNA, 60 bp, Artificial; identical to SEQ ID NO: 435902
  Synthetic oligonucleotide

SEQ ID NO: 593879 - DNA, 60 bp, Artificial; identical to SEQ ID NO: 435903
  Synthetic oligonucleotide

SEQ ID NO: 593880 - DNA, 60 bp, Artificial; identical to SEQ ID NO: 435905
  Synthetic oligonucleotide

SEQ ID NO: 593881 - DNA, 52 bp, Artificial; identical to SEQ ID NO: 435907
  Synthetic oligonucleotide

SEQ ID NO: 593882 - DNA, 59 bp, Artificial; identical to SEQ ID NO: 19044
  Synthetic oligonucleotide

SEQ ID NO: 593883 - DNA, 59 bp, Artificial; identical to SEQ ID NO: 435908
  Synthetic oligonucleotide

SEQ ID NO: 593884 - DNA, 55 bp, Artificial; identical to SEQ ID NO: 435910
  Synthetic oligonucleotide

SEQ ID NO: 593885 - DNA, 60 bp, Artificial; identical to SEQ ID NO: 435911
  Synthetic oligonucleotide

SEQ ID NO: 593886 - DNA, 55 bp, Artificial; identical to SEQ ID NO: 435912
  Synthetic oligonucleotide

SEQ ID NO: 593887 - DNA, 56 bp, Artificial; identical to SEQ ID NO: 435915
  Synthetic oligonucleotide

SEQ ID NO: 593888 - DNA, 60 bp, Artificial; identical to SEQ ID NO: 435917
  Synthetic oligonucleotide

SEQ ID NO: 593889 - DNA, 55 bp, Artificial; identical to SEQ ID NO: 435918
  Synthetic oligonucleotide

SEQ ID NO: 593890 - DNA, 53 bp, Artificial; identical to SEQ ID NO: 435919
  Synthetic oligonucleotide

SEQ ID NO: 593891 - DNA, 57 bp, Artificial; identical to SEQ ID NO: 435922
  Synthetic oligonucleotide

SEQ ID NO: 593892 - DNA, 54 bp, Artificial; identical to SEQ ID NO: 435925
  Synthetic oligonucleotide

SEQ ID NO: 593893 - DNA, 56 bp, Artificial; identical to SEQ ID NO: 435926
  Synthetic oligonucleotide

SEQ ID NO: 593894 - DNA, 53 bp, Artificial; identical to SEQ ID NO: 435930
  Synthetic oligonucleotide

SEQ ID NO: 593895 - DNA, 56 bp, Artificial; identical to SEQ ID NO: 435931
  Synthetic oligonucleotide

SEQ ID NO: 593896 - DNA, 59 bp, Artificial; identical to SEQ ID NO: 18177
  Synthetic oligonucleotide

SEQ ID NO: 593897 - DNA, 60 bp, Artificial; identical to SEQ ID NO: 435932
  Synthetic oligonucleotide

SEQ ID NO: 593898 - DNA, 60 bp, Artificial; identical to SEQ ID NO: 435933
  Synthetic oligonucleotide

SEQ ID NO: 593899 - DNA, 55 bp, Artificial; identical to SEQ ID NO: 435937
  Synthetic oligonucleotide

SEQ ID NO: 593900 - DNA, 57 bp, Artificial; identical to SEQ ID NO: 435939
  Synthetic oligonucleotide

SEQ ID NO: 593901 - DNA, 55 bp, Artificial; identical to SEQ ID NO: 435940
  Synthetic oligonucleotide

SEQ ID NO: 593902 - DNA, 55 bp, Artificial; identical to SEQ ID NO: 435941
  Synthetic oligonucleotide

SEQ ID NO: 593903 - DNA, 60 bp, Artificial; identical to SEQ ID NO: 13728
  Synthetic oligonucleotide

SEQ ID NO: 593904 - DNA, 55 bp, Artificial; identical to SEQ ID NO: 435944
  Synthetic oligonucleotide

SEQ ID NO: 593905 - DNA, 58 bp, Artificial; identical to SEQ ID NO: 435945
  Synthetic oligonucleotide

SEQ ID NO: 593906 - DNA, 60 bp, Artificial; identical to SEQ ID NO: 435946
  Synthetic oligonucleotide

SEQ ID NO: 593907 - DNA, 60 bp, Artificial; identical to SEQ ID NO: 435947
  Synthetic oligonucleotide

SEQ ID NO: 593908 - DNA, 55 bp, Artificial; identical to SEQ ID NO: 435948
  Synthetic oligonucleotide

SEQ ID NO: 593909 - DNA, 58 bp, Artificial; identical to SEQ ID NO: 435950
  Synthetic oligonucleotide

SEQ ID NO: 593910 - DNA, 53 bp, Artificial; identical to SEQ ID NO: 435953
  Synthetic oligonucleotide

SEQ ID NO: 593911 - DNA, 58 bp, Artificial; identical to SEQ ID NO: 435957
  Synthetic oligonucleotide

SEQ ID NO: 593912 - DNA, 55 bp, Artificial; identical to SEQ ID NO: 435958
  Synthetic oligonucleotide

SEQ ID NO: 593913 - DNA, 55 bp, Artificial; identical to SEQ ID NO: 435959
  Synthetic oligonucleotide

SEQ ID NO: 593914 - DNA, 55 bp, Artificial; identical to SEQ ID NO: 435960
  Synthetic oligonucleotide

SEQ ID NO: 593915 - DNA, 55 bp, Artificial; identical to SEQ ID NO: 435962
  Synthetic oligonucleotide

SEQ ID NO: 593916 - DNA, 53 bp, Artificial; identical to SEQ ID NO: 435963
  Synthetic oligonucleotide

SEQ ID NO: 593917 - DNA, 55 bp, Artificial; identical to SEQ ID NO: 435964
  Synthetic oligonucleotide

SEQ ID NO: 593918 - DNA, 56 bp, Artificial; identical to SEQ ID NO: 435967
  Synthetic oligonucleotide

SEQ ID NO: 593919 - DNA, 58 bp, Artificial; identical to SEQ ID NO: 435970
  Synthetic oligonucleotide

SEQ ID NO: 593920 - DNA, 53 bp, Artificial; identical to SEQ ID NO: 435973
  Synthetic oligonucleotide

SEQ ID NO: 593921 - DNA, 55 bp, Artificial; identical to SEQ ID NO: 435974
  Synthetic oligonucleotide

SEQ ID NO: 593922 - DNA, 60 bp, Artificial; identical to SEQ ID NO: 435975
  Synthetic oligonucleotide

SEQ ID NO: 593923 - DNA, 55 bp, Artificial; identical to SEQ ID NO: 435976
  Synthetic oligonucleotide

SEQ ID NO: 593924 - DNA, 56 bp, Artificial; identical to SEQ ID NO: 435977
  Synthetic oligonucleotide

SEQ ID NO: 593925 - DNA, 58 bp, Artificial; identical to SEQ ID NO: 435980
  Synthetic oligonucleotide

SEQ ID NO: 593926 - DNA, 55 bp, Artificial; identical to SEQ ID NO: 435981
  Synthetic oligonucleotide

SEQ ID NO: 593927 - DNA, 54 bp, Artificial; identical to SEQ ID NO: 435988
  Synthetic oligonucleotide

SEQ ID NO: 593928 - DNA, 53 bp, Artificial; identical to SEQ ID NO: 435994
  Synthetic oligonucleotide

SEQ ID NO: 593929 - DNA, 54 bp, Artificial; identical to SEQ ID NO: 436001
  Synthetic oligonucleotide

SEQ ID NO: 593930 - DNA, 57 bp, Artificial; identical to SEQ ID NO: 436014
  Synthetic oligonucleotide

SEQ ID NO: 593931 - DNA, 54 bp, Artificial; identical to SEQ ID NO: 436015
  Synthetic oligonucleotide

SEQ ID NO: 593932 - DNA, 56 bp, Artificial; identical to SEQ ID NO: 436017
  Synthetic oligonucleotide

SEQ ID NO: 593933 - DNA, 53 bp, Artificial; identical to SEQ ID NO: 436018
  Synthetic oligonucleotide

SEQ ID NO: 593934 - DNA, 53 bp, Artificial; identical to SEQ ID NO: 436019
  Synthetic oligonucleotide

SEQ ID NO: 593935 - DNA, 60 bp, Artificial; identical to SEQ ID NO: 436020
  Synthetic oligonucleotide

SEQ ID NO: 593936 - DNA, 60 bp, Artificial; identical to SEQ ID NO: 436021
  Synthetic oligonucleotide

SEQ ID NO: 593937 - DNA, 60 bp, Artificial; identical to SEQ ID NO: 436022
  Synthetic oligonucleotide

SEQ ID NO: 593938 - DNA, 51 bp, Artificial; identical to SEQ ID NO: 436024
  Synthetic oligonucleotide

SEQ ID NO: 593939 - DNA, 55 bp, Artificial; identical to SEQ ID NO: 436028
  Synthetic oligonucleotide

SEQ ID NO: 593940 - DNA, 55 bp, Artificial; identical to SEQ ID NO: 436030
  Synthetic oligonucleotide

SEQ ID NO: 593941 - DNA, 56 bp, Artificial; identical to SEQ ID NO: 436031
  Synthetic oligonucleotide

SEQ ID NO: 593942 - DNA, 51 bp, Artificial; identical to SEQ ID NO: 436033
  Synthetic oligonucleotide

SEQ ID NO: 593943 - DNA, 55 bp, Artificial; identical to SEQ ID NO: 436034
  Synthetic oligonucleotide

SEQ ID NO: 593944 - DNA, 60 bp, Artificial; identical to SEQ ID NO: 436042
  Synthetic oligonucleotide

SEQ ID NO: 593945 - DNA, 58 bp, Artificial; identical to SEQ ID NO: 436044
  Synthetic oligonucleotide

SEQ ID NO: 593946 - DNA, 58 bp, Artificial; identical to SEQ ID NO: 436045
  Synthetic oligonucleotide

SEQ ID NO: 593947 - DNA, 60 bp, Artificial; identical to SEQ ID NO: 436047
  Synthetic oligonucleotide

SEQ ID NO: 593948 - DNA, 55 bp, Artificial; identical to SEQ ID NO: 436051
  Synthetic oligonucleotide

SEQ ID NO: 593949 - DNA, 60 bp, Artificial; identical to SEQ ID NO: 436052
  Synthetic oligonucleotide

SEQ ID NO: 593950 - DNA, 55 bp, Artificial; identical to SEQ ID NO: 436053
  Synthetic oligonucleotide

SEQ ID NO: 593951 - DNA, 60 bp, Artificial; identical to SEQ ID NO: 436055
  Synthetic oligonucleotide

SEQ ID NO: 593952 - DNA, 60 bp, Artificial; identical to SEQ ID NO: 436056
  Synthetic oligonucleotide

SEQ ID NO: 593953 - DNA, 55 bp, Artificial; identical to SEQ ID NO: 436058
  Synthetic oligonucleotide

SEQ ID NO: 593954 - DNA, 60 bp, Artificial; identical to SEQ ID NO: 436059
  Synthetic oligonucleotide

SEQ ID NO: 593955 - DNA, 55 bp, Artificial; identical to SEQ ID NO: 436064
  Synthetic oligonucleotide

SEQ ID NO: 593956 - DNA, 60 bp, Artificial; identical to SEQ ID NO: 436068
  Synthetic oligonucleotide

SEQ ID NO: 593957 - DNA, 60 bp, Artificial; identical to SEQ ID NO: 436073
  Synthetic oligonucleotide

SEQ ID NO: 593958 - DNA, 56 bp, Artificial; identical to SEQ ID NO: 436074
  Synthetic oligonucleotide

SEQ ID NO: 593959 - DNA, 58 bp, Artificial; identical to SEQ ID NO: 436075
  Synthetic oligonucleotide

SEQ ID NO: 593960 - DNA, 60 bp, Artificial; identical to SEQ ID NO: 436078
  Synthetic oligonucleotide

SEQ ID NO: 593961 - DNA, 60 bp, Artificial; identical to SEQ ID NO: 113671
  Synthetic oligonucleotide

SEQ ID NO: 593962 - DNA, 56 bp, Artificial; identical to SEQ ID NO: 436079
  Synthetic oligonucleotide

SEQ ID NO: 593963 - DNA, 54 bp, Artificial; identical to SEQ ID NO: 436081
  Synthetic oligonucleotide

SEQ ID NO: 593964 - DNA, 60 bp, Artificial; identical to SEQ ID NO: 12593
  Synthetic oligonucleotide

SEQ ID NO: 593965 - DNA, 60 bp, Artificial; identical to SEQ ID NO: 10182
  Synthetic oligonucleotide

SEQ ID NO: 593966 - DNA, 60 bp, Artificial; identical to SEQ ID NO: 436085
  Synthetic oligonucleotide

SEQ ID NO: 593967 - DNA, 60 bp, Artificial; identical to SEQ ID NO: 10705
  Synthetic oligonucleotide

SEQ ID NO: 593968 - DNA, 55 bp, Artificial; identical to SEQ ID NO: 436088
  Synthetic oligonucleotide

SEQ ID NO: 593969 - DNA, 60 bp, Artificial; identical to SEQ ID NO: 436089
  Synthetic oligonucleotide

SEQ ID NO: 593970 - DNA, 60 bp, Artificial; identical to SEQ ID NO: 436090
  Synthetic oligonucleotide

SEQ ID NO: 593971 - DNA, 60 bp, Artificial; identical to SEQ ID NO: 436091
  Synthetic oligonucleotide

SEQ ID NO: 593972 - DNA, 55 bp, Artificial; identical to SEQ ID NO: 436095
  Synthetic oligonucleotide

SEQ ID NO: 593973 - DNA, 60 bp, Artificial; identical to SEQ ID NO: 436099
  Synthetic oligonucleotide

SEQ ID NO: 593974 - DNA, 55 bp, Artificial; identical to SEQ ID NO: 436102
  Synthetic oligonucleotide

SEQ ID NO: 593975 - DNA, 60 bp, Artificial; identical to SEQ ID NO: 436109
  Synthetic oligonucleotide

SEQ ID NO: 593976 - DNA, 52 bp, Artificial; identical to SEQ ID NO: 436111
  Synthetic oligonucleotide

SEQ ID NO: 593977 - DNA, 55 bp, Artificial; identical to SEQ ID NO: 436112
  Synthetic oligonucleotide

SEQ ID NO: 593978 - DNA, 60 bp, Artificial; identical to SEQ ID NO: 436113
  Synthetic oligonucleotide

SEQ ID NO: 593979 - DNA, 60 bp, Artificial; identical to SEQ ID NO: 436119
  Synthetic oligonucleotide

SEQ ID NO: 593980 - DNA, 60 bp, Artificial; identical to SEQ ID NO: 436121
  Synthetic oligonucleotide

SEQ ID NO: 593981 - DNA, 51 bp, Artificial; identical to SEQ ID NO: 436123
  Synthetic oligonucleotide

SEQ ID NO: 593982 - DNA, 60 bp, Artificial; identical to SEQ ID NO: 436126
  Synthetic oligonucleotide

SEQ ID NO: 593983 - DNA, 57 bp, Artificial; identical to SEQ ID NO: 436127
  Synthetic oligonucleotide

SEQ ID NO: 593984 - DNA, 51 bp, Artificial; identical to SEQ ID NO: 436129
  Synthetic oligonucleotide

SEQ ID NO: 593985 - DNA, 55 bp, Artificial; identical to SEQ ID NO: 436130
  Synthetic oligonucleotide

SEQ ID NO: 593986 - DNA, 60 bp, Artificial; identical to SEQ ID NO: 436132
  Synthetic oligonucleotide

SEQ ID NO: 593987 - DNA, 60 bp, Artificial; identical to SEQ ID NO: 436134
  Synthetic oligonucleotide

SEQ ID NO: 593988 - DNA, 55 bp, Artificial; identical to SEQ ID NO: 436137
  Synthetic oligonucleotide

SEQ ID NO: 593989 - DNA, 60 bp, Artificial; identical to SEQ ID NO: 436138
  Synthetic oligonucleotide

SEQ ID NO: 593990 - DNA, 60 bp, Artificial; identical to SEQ ID NO: 436139
  Synthetic oligonucleotide

SEQ ID NO: 593991 - DNA, 60 bp, Artificial; identical to SEQ ID NO: 7846
  Synthetic oligonucleotide

SEQ ID NO: 593992 - DNA, 58 bp, Artificial; identical to SEQ ID NO: 436142
  Synthetic oligonucleotide

SEQ ID NO: 593993 - DNA, 55 bp, Artificial; identical to SEQ ID NO: 436145
  Synthetic oligonucleotide

SEQ ID NO: 593994 - DNA, 60 bp, Artificial; identical to SEQ ID NO: 436148
  Synthetic oligonucleotide

SEQ ID NO: 593995 - DNA, 53 bp, Artificial; identical to SEQ ID NO: 11703
  Synthetic oligonucleotide

SEQ ID NO: 593996 - DNA, 60 bp, Artificial; identical to SEQ ID NO: 436149
  Synthetic oligonucleotide

SEQ ID NO: 593997 - DNA, 55 bp, Artificial; identical to SEQ ID NO: 436152
  Synthetic oligonucleotide

SEQ ID NO: 593998 - DNA, 60 bp, Artificial; identical to SEQ ID NO: 436153
  Synthetic oligonucleotide

SEQ ID NO: 593999 - DNA, 55 bp, Artificial; identical to SEQ ID NO: 436155
  Synthetic oligonucleotide

SEQ ID NO: 594000 - DNA, 51 bp, Artificial; identical to SEQ ID NO: 436158
  Synthetic oligonucleotide

SEQ ID NO: 594001 - DNA, 58 bp, Artificial; identical to SEQ ID NO: 436159
  Synthetic oligonucleotide

SEQ ID NO: 594002 - DNA, 58 bp, Artificial; identical to SEQ ID NO: 436160
  Synthetic oligonucleotide

SEQ ID NO: 594003 - DNA, 60 bp, Artificial; identical to SEQ ID NO: 436161
  Synthetic oligonucleotide

SEQ ID NO: 594004 - DNA, 60 bp, Artificial; identical to SEQ ID NO: 436162
  Synthetic oligonucleotide

SEQ ID NO: 594005 - DNA, 60 bp, Artificial; identical to SEQ ID NO: 436164
  Synthetic oligonucleotide

SEQ ID NO: 594006 - DNA, 60 bp, Artificial; identical to SEQ ID NO: 436165
  Synthetic oligonucleotide

SEQ ID NO: 594007 - DNA, 55 bp, Artificial; identical to SEQ ID NO: 436166
  Synthetic oligonucleotide

SEQ ID NO: 594008 - DNA, 56 bp, Artificial; identical to SEQ ID NO: 18159
  Synthetic oligonucleotide

SEQ ID NO: 594009 - DNA, 57 bp, Artificial; identical to SEQ ID NO: 436167
  Synthetic oligonucleotide

SEQ ID NO: 594010 - DNA, 57 bp, Artificial; identical to SEQ ID NO: 436175
  Synthetic oligonucleotide

SEQ ID NO: 594011 - DNA, 60 bp, Artificial; identical to SEQ ID NO: 436176
  Synthetic oligonucleotide

SEQ ID NO: 594012 - DNA, 59 bp, Artificial; identical to SEQ ID NO: 436179
  Synthetic oligonucleotide

SEQ ID NO: 594013 - DNA, 50 bp, Artificial; identical to SEQ ID NO: 436181
  Synthetic oligonucleotide

SEQ ID NO: 594014 - DNA, 59 bp, Artificial; identical to SEQ ID NO: 436186
  Synthetic oligonucleotide

SEQ ID NO: 594015 - DNA, 55 bp, Artificial; identical to SEQ ID NO: 436188
  Synthetic oligonucleotide

SEQ ID NO: 594016 - DNA, 51 bp, Artificial; identical to SEQ ID NO: 436190
  Synthetic oligonucleotide

SEQ ID NO: 594017 - DNA, 55 bp, Artificial; identical to SEQ ID NO: 436192
  Synthetic oligonucleotide

SEQ ID NO: 594018 - DNA, 55 bp, Artificial; identical to SEQ ID NO: 436193
  Synthetic oligonucleotide

SEQ ID NO: 594019 - DNA, 57 bp, Artificial; identical to SEQ ID NO: 436199
  Synthetic oligonucleotide

SEQ ID NO: 594020 - DNA, 55 bp, Artificial; identical to SEQ ID NO: 436203
  Synthetic oligonucleotide

SEQ ID NO: 594021 - DNA, 55 bp, Artificial; identical to SEQ ID NO: 436207
  Synthetic oligonucleotide

SEQ ID NO: 594022 - DNA, 53 bp, Artificial; identical to SEQ ID NO: 436212
  Synthetic oligonucleotide

SEQ ID NO: 594023 - DNA, 60 bp, Artificial; identical to SEQ ID NO: 14243
  Synthetic oligonucleotide

SEQ ID NO: 594024 - DNA, 58 bp, Artificial; identical to SEQ ID NO: 436216
  Synthetic oligonucleotide

SEQ ID NO: 594025 - DNA, 57 bp, Artificial; identical to SEQ ID NO: 436217
  Synthetic oligonucleotide

SEQ ID NO: 594026 - DNA, 60 bp, Artificial; identical to SEQ ID NO: 436218
  Synthetic oligonucleotide

SEQ ID NO: 594027 - DNA, 51 bp, Artificial; identical to SEQ ID NO: 436225
  Synthetic oligonucleotide

SEQ ID NO: 594028 - DNA, 56 bp, Artificial; identical to SEQ ID NO: 436230
  Synthetic oligonucleotide

SEQ ID NO: 594029 - DNA, 56 bp, Artificial; identical to SEQ ID NO: 436231
  Synthetic oligonucleotide

SEQ ID NO: 594030 - DNA, 59 bp, Artificial; identical to SEQ ID NO: 436232
  Synthetic oligonucleotide

SEQ ID NO: 594031 - DNA, 52 bp, Artificial; identical to SEQ ID NO: 436235
  Synthetic oligonucleotide

SEQ ID NO: 594032 - DNA, 55 bp, Artificial; identical to SEQ ID NO: 436236
  Synthetic oligonucleotide

SEQ ID NO: 594033 - DNA, 54 bp, Artificial; identical to SEQ ID NO: 436238
  Synthetic oligonucleotide

SEQ ID NO: 594034 - DNA, 59 bp, Artificial; identical to SEQ ID NO: 16214
  Synthetic oligonucleotide

SEQ ID NO: 594035 - DNA, 56 bp, Artificial; identical to SEQ ID NO: 436244
  Synthetic oligonucleotide

SEQ ID NO: 594036 - DNA, 59 bp, Artificial; identical to SEQ ID NO: 436246
  Synthetic oligonucleotide

SEQ ID NO: 594037 - DNA, 60 bp, Artificial; identical to SEQ ID NO: 436249
  Synthetic oligonucleotide

SEQ ID NO: 594038 - DNA, 59 bp, Artificial; identical to SEQ ID NO: 436252
  Synthetic oligonucleotide

SEQ ID NO: 594039 - DNA, 55 bp, Artificial; identical to SEQ ID NO: 436255
  Synthetic oligonucleotide

SEQ ID NO: 594040 - DNA, 54 bp, Artificial; identical to SEQ ID NO: 436256
  Synthetic oligonucleotide

SEQ ID NO: 594041 - DNA, 60 bp, Artificial; identical to SEQ ID NO: 436257
  Synthetic oligonucleotide

SEQ ID NO: 594042 - DNA, 60 bp, Artificial; identical to SEQ ID NO: 436261
  Synthetic oligonucleotide

SEQ ID NO: 594043 - DNA, 56 bp, Artificial; identical to SEQ ID NO: 436263
  Synthetic oligonucleotide

SEQ ID NO: 594044 - DNA, 60 bp, Artificial; identical to SEQ ID NO: 436264
  Synthetic oligonucleotide

SEQ ID NO: 594045 - DNA, 60 bp, Artificial; identical to SEQ ID NO: 436265
  Synthetic oligonucleotide

SEQ ID NO: 594046 - DNA, 55 bp, Artificial; identical to SEQ ID NO: 436267
  Synthetic oligonucleotide

SEQ ID NO: 594047 - DNA, 58 bp, Artificial; identical to SEQ ID NO: 436268
  Synthetic oligonucleotide

SEQ ID NO: 594048 - DNA, 55 bp, Artificial; identical to SEQ ID NO: 436270
  Synthetic oligonucleotide

SEQ ID NO: 594049 - DNA, 59 bp, Artificial; identical to SEQ ID NO: 436277
  Synthetic oligonucleotide

SEQ ID NO: 594050 - DNA, 56 bp, Artificial; identical to SEQ ID NO: 436279
  Synthetic oligonucleotide

SEQ ID NO: 594051 - DNA, 58 bp, Artificial; identical to SEQ ID NO: 436280
  Synthetic oligonucleotide

SEQ ID NO: 594052 - DNA, 52 bp, Artificial; identical to SEQ ID NO: 436281
  Synthetic oligonucleotide

SEQ ID NO: 594053 - DNA, 59 bp, Artificial; identical to SEQ ID NO: 436282
  Synthetic oligonucleotide

SEQ ID NO: 594054 - DNA, 55 bp, Artificial; identical to SEQ ID NO: 436286
  Synthetic oligonucleotide

SEQ ID NO: 594055 - DNA, 55 bp, Artificial; identical to SEQ ID NO: 436287
  Synthetic oligonucleotide

SEQ ID NO: 594056 - DNA, 55 bp, Artificial; identical to SEQ ID NO: 436288
  Synthetic oligonucleotide

SEQ ID NO: 594057 - DNA, 50 bp, Artificial; identical to SEQ ID NO: 436289
  Synthetic oligonucleotide

SEQ ID NO: 594058 - DNA, 58 bp, Artificial; identical to SEQ ID NO: 436290
  Synthetic oligonucleotide

SEQ ID NO: 594059 - DNA, 60 bp, Artificial; identical to SEQ ID NO: 436292
  Synthetic oligonucleotide

SEQ ID NO: 594060 - DNA, 57 bp, Artificial; identical to SEQ ID NO: 436293
  Synthetic oligonucleotide

SEQ ID NO: 594061 - DNA, 55 bp, Artificial; identical to SEQ ID NO: 436295
  Synthetic oligonucleotide

SEQ ID NO: 594062 - DNA, 60 bp, Artificial; identical to SEQ ID NO: 436296
  Synthetic oligonucleotide

SEQ ID NO: 594063 - DNA, 55 bp, Artificial; identical to SEQ ID NO: 19734
  Synthetic oligonucleotide

SEQ ID NO: 594064 - DNA, 60 bp, Artificial; identical to SEQ ID NO: 436299
  Synthetic oligonucleotide

SEQ ID NO: 594065 - DNA, 60 bp, Artificial; identical to SEQ ID NO: 436300
  Synthetic oligonucleotide

SEQ ID NO: 594066 - DNA, 60 bp, Artificial; identical to SEQ ID NO: 436304
  Synthetic oligonucleotide

SEQ ID NO: 594067 - DNA, 60 bp, Artificial; identical to SEQ ID NO: 436307
  Synthetic oligonucleotide

SEQ ID NO: 594068 - DNA, 54 bp, Artificial; identical to SEQ ID NO: 436308
  Synthetic oligonucleotide

SEQ ID NO: 594069 - DNA, 60 bp, Artificial; identical to SEQ ID NO: 436310
  Synthetic oligonucleotide

SEQ ID NO: 594070 - DNA, 55 bp, Artificial; identical to SEQ ID NO: 436311
  Synthetic oligonucleotide

SEQ ID NO: 594071 - DNA, 59 bp, Artificial; identical to SEQ ID NO: 436313
  Synthetic oligonucleotide

SEQ ID NO: 594072 - DNA, 50 bp, Artificial; identical to SEQ ID NO: 436321
  Synthetic oligonucleotide

SEQ ID NO: 594073 - DNA, 60 bp, Artificial; identical to SEQ ID NO: 436323
  Synthetic oligonucleotide

SEQ ID NO: 594074 - DNA, 55 bp, Artificial; identical to SEQ ID NO: 436326
  Synthetic oligonucleotide

SEQ ID NO: 594075 - DNA, 55 bp, Artificial; identical to SEQ ID NO: 436331
  Synthetic oligonucleotide

SEQ ID NO: 594076 - DNA, 60 bp, Artificial; identical to SEQ ID NO: 436332
  Synthetic oligonucleotide

SEQ ID NO: 594077 - DNA, 54 bp, Artificial; identical to SEQ ID NO: 436342
  Synthetic oligonucleotide

SEQ ID NO: 594078 - DNA, 59 bp, Artificial; identical to SEQ ID NO: 436343
  Synthetic oligonucleotide

SEQ ID NO: 594079 - DNA, 54 bp, Artificial; identical to SEQ ID NO: 436351
  Synthetic oligonucleotide

SEQ ID NO: 594080 - DNA, 60 bp, Artificial; identical to SEQ ID NO: 436352
  Synthetic oligonucleotide

SEQ ID NO: 594081 - DNA, 52 bp, Artificial; identical to SEQ ID NO: 436357
  Synthetic oligonucleotide

SEQ ID NO: 594082 - DNA, 57 bp, Artificial; identical to SEQ ID NO: 436359
  Synthetic oligonucleotide

SEQ ID NO: 594083 - DNA, 50 bp, Artificial; identical to SEQ ID NO: 436361
  Synthetic oligonucleotide

SEQ ID NO: 594084 - DNA, 59 bp, Artificial; identical to SEQ ID NO: 19017
  Synthetic oligonucleotide

SEQ ID NO: 594085 - DNA, 51 bp, Artificial; identical to SEQ ID NO: 436362
  Synthetic oligonucleotide

SEQ ID NO: 594086 - DNA, 55 bp, Artificial; identical to SEQ ID NO: 436365
  Synthetic oligonucleotide

SEQ ID NO: 594087 - DNA, 58 bp, Artificial; identical to SEQ ID NO: 19562
  Synthetic oligonucleotide

SEQ ID NO: 594088 - DNA, 60 bp, Artificial; identical to SEQ ID NO: 436367
  Synthetic oligonucleotide

SEQ ID NO: 594089 - DNA, 55 bp, Artificial; identical to SEQ ID NO: 436368
  Synthetic oligonucleotide

SEQ ID NO: 594090 - DNA, 57 bp, Artificial; identical to SEQ ID NO: 436372
  Synthetic oligonucleotide

SEQ ID NO: 594091 - DNA, 58 bp, Artificial; identical to SEQ ID NO: 436373
  Synthetic oligonucleotide

SEQ ID NO: 594092 - DNA, 55 bp, Artificial; identical to SEQ ID NO: 436374
  Synthetic oligonucleotide

SEQ ID NO: 594093 - DNA, 58 bp, Artificial; identical to SEQ ID NO: 436376
  Synthetic oligonucleotide

SEQ ID NO: 594094 - DNA, 60 bp, Artificial; identical to SEQ ID NO: 436377
  Synthetic oligonucleotide

SEQ ID NO: 594095 - DNA, 59 bp, Artificial; identical to SEQ ID NO: 436379
  Synthetic oligonucleotide

SEQ ID NO: 594096 - DNA, 53 bp, Artificial; identical to SEQ ID NO: 436380
  Synthetic oligonucleotide

SEQ ID NO: 594097 - DNA, 55 bp, Artificial; identical to SEQ ID NO: 436383
  Synthetic oligonucleotide

SEQ ID NO: 594098 - DNA, 52 bp, Artificial; identical to SEQ ID NO: 436387
  Synthetic oligonucleotide

SEQ ID NO: 594099 - DNA, 58 bp, Artificial; identical to SEQ ID NO: 436388
  Synthetic oligonucleotide

SEQ ID NO: 594100 - DNA, 58 bp, Artificial; identical to SEQ ID NO: 436390
  Synthetic oligonucleotide

SEQ ID NO: 594101 - DNA, 53 bp, Artificial; identical to SEQ ID NO: 436397
  Synthetic oligonucleotide

SEQ ID NO: 594102 - DNA, 60 bp, Artificial; identical to SEQ ID NO: 436402
  Synthetic oligonucleotide

SEQ ID NO: 594103 - DNA, 55 bp, Artificial; identical to SEQ ID NO: 436403
  Synthetic oligonucleotide

SEQ ID NO: 594104 - DNA, 57 bp, Artificial; identical to SEQ ID NO: 436405
  Synthetic oligonucleotide

SEQ ID NO: 594105 - DNA, 60 bp, Artificial; identical to SEQ ID NO: 436410
  Synthetic oligonucleotide

SEQ ID NO: 594106 - DNA, 60 bp, Artificial; identical to SEQ ID NO: 436411
  Synthetic oligonucleotide

SEQ ID NO: 594107 - DNA, 55 bp, Artificial; identical to SEQ ID NO: 436412
  Synthetic oligonucleotide

SEQ ID NO: 594108 - DNA, 56 bp, Artificial; identical to SEQ ID NO: 436414
  Synthetic oligonucleotide

SEQ ID NO: 594109 - DNA, 59 bp, Artificial; identical to SEQ ID NO: 17562
  Synthetic oligonucleotide

SEQ ID NO: 594110 - DNA, 51 bp, Artificial; identical to SEQ ID NO: 436420
  Synthetic oligonucleotide

SEQ ID NO: 594111 - DNA, 58 bp, Artificial; identical to SEQ ID NO: 436425
  Synthetic oligonucleotide

SEQ ID NO: 594112 - DNA, 60 bp, Artificial; identical to SEQ ID NO: 436426
  Synthetic oligonucleotide

SEQ ID NO: 594113 - DNA, 55 bp, Artificial; identical to SEQ ID NO: 436432
  Synthetic oligonucleotide

SEQ ID NO: 594114 - DNA, 60 bp, Artificial; identical to SEQ ID NO: 436436
  Synthetic oligonucleotide

SEQ ID NO: 594115 - DNA, 55 bp, Artificial; identical to SEQ ID NO: 436437
  Synthetic oligonucleotide

SEQ ID NO: 594116 - DNA, 55 bp, Artificial; identical to SEQ ID NO: 436438
  Synthetic oligonucleotide

SEQ ID NO: 594117 - DNA, 57 bp, Artificial; identical to SEQ ID NO: 436442
  Synthetic oligonucleotide

SEQ ID NO: 594118 - DNA, 58 bp, Artificial; identical to SEQ ID NO: 436443
  Synthetic oligonucleotide

SEQ ID NO: 594119 - DNA, 59 bp, Artificial; identical to SEQ ID NO: 436446
  Synthetic oligonucleotide

SEQ ID NO: 594120 - DNA, 56 bp, Artificial; identical to SEQ ID NO: 436448
  Synthetic oligonucleotide

SEQ ID NO: 594121 - DNA, 56 bp, Artificial; identical to SEQ ID NO: 436449
  Synthetic oligonucleotide

SEQ ID NO: 594122 - DNA, 60 bp, Artificial; identical to SEQ ID NO: 436450
  Synthetic oligonucleotide

SEQ ID NO: 594123 - DNA, 60 bp, Artificial; identical to SEQ ID NO: 436451
  Synthetic oligonucleotide

SEQ ID NO: 594124 - DNA, 50 bp, Artificial; identical to SEQ ID NO: 436452
  Synthetic oligonucleotide

SEQ ID NO: 594125 - DNA, 58 bp, Artificial; identical to SEQ ID NO: 436453
  Synthetic oligonucleotide

SEQ ID NO: 594126 - DNA, 60 bp, Artificial; identical to SEQ ID NO: 436457
  Synthetic oligonucleotide

SEQ ID NO: 594127 - DNA, 55 bp, Artificial; identical to SEQ ID NO: 436459
  Synthetic oligonucleotide

SEQ ID NO: 594128 - DNA, 51 bp, Artificial; identical to SEQ ID NO: 436463
  Synthetic oligonucleotide

SEQ ID NO: 594129 - DNA, 55 bp, Artificial; identical to SEQ ID NO: 436467
  Synthetic oligonucleotide

SEQ ID NO: 594130 - DNA, 55 bp, Artificial; identical to SEQ ID NO: 436468
  Synthetic oligonucleotide

SEQ ID NO: 594131 - DNA, 55 bp, Artificial; identical to SEQ ID NO: 436471
  Synthetic oligonucleotide

SEQ ID NO: 594132 - DNA, 60 bp, Artificial; identical to SEQ ID NO: 436476
  Synthetic oligonucleotide

SEQ ID NO: 594133 - DNA, 59 bp, Artificial; identical to SEQ ID NO: 436477
  Synthetic oligonucleotide

SEQ ID NO: 594134 - DNA, 60 bp, Artificial; identical to SEQ ID NO: 436478
  Synthetic oligonucleotide

SEQ ID NO: 594135 - DNA, 55 bp, Artificial; identical to SEQ ID NO: 436479
  Synthetic oligonucleotide

SEQ ID NO: 594136 - DNA, 55 bp, Artificial; identical to SEQ ID NO: 436480
  Synthetic oligonucleotide

SEQ ID NO: 594137 - DNA, 60 bp, Artificial; identical to SEQ ID NO: 436482
  Synthetic oligonucleotide

SEQ ID NO: 594138 - DNA, 55 bp, Artificial; identical to SEQ ID NO: 436483
  Synthetic oligonucleotide

SEQ ID NO: 594139 - DNA, 60 bp, Artificial; identical to SEQ ID NO: 436484
  Synthetic oligonucleotide

SEQ ID NO: 594140 - DNA, 52 bp, Artificial; identical to SEQ ID NO: 436486
  Synthetic oligonucleotide

SEQ ID NO: 594141 - DNA, 55 bp, Artificial; identical to SEQ ID NO: 436490
  Synthetic oligonucleotide

SEQ ID NO: 594142 - DNA, 51 bp, Artificial; identical to SEQ ID NO: 436492
  Synthetic oligonucleotide

SEQ ID NO: 594143 - DNA, 60 bp, Artificial; identical to SEQ ID NO: 6170
  Synthetic oligonucleotide

SEQ ID NO: 594144 - DNA, 52 bp, Artificial; identical to SEQ ID NO: 436496
  Synthetic oligonucleotide

SEQ ID NO: 594145 - DNA, 57 bp, Artificial; identical to SEQ ID NO: 436497
  Synthetic oligonucleotide

SEQ ID NO: 594146 - DNA, 59 bp, Artificial; identical to SEQ ID NO: 436499
  Synthetic oligonucleotide

SEQ ID NO: 594147 - DNA, 58 bp, Artificial; identical to SEQ ID NO: 436500
  Synthetic oligonucleotide

SEQ ID NO: 594148 - DNA, 55 bp, Artificial; identical to SEQ ID NO: 436503
  Synthetic oligonucleotide

SEQ ID NO: 594149 - DNA, 58 bp, Artificial; identical to SEQ ID NO: 436506
  Synthetic oligonucleotide

SEQ ID NO: 594150 - DNA, 55 bp, Artificial; identical to SEQ ID NO: 436507
  Synthetic oligonucleotide

SEQ ID NO: 594151 - DNA, 60 bp, Artificial; identical to SEQ ID NO: 436509
  Synthetic oligonucleotide

SEQ ID NO: 594152 - DNA, 58 bp, Artificial; identical to SEQ ID NO: 436512
  Synthetic oligonucleotide

SEQ ID NO: 594153 - DNA, 57 bp, Artificial; identical to SEQ ID NO: 436516
  Synthetic oligonucleotide

SEQ ID NO: 594154 - DNA, 59 bp, Artificial; identical to SEQ ID NO: 436517
  Synthetic oligonucleotide

SEQ ID NO: 594155 - DNA, 60 bp, Artificial; identical to SEQ ID NO: 436518
  Synthetic oligonucleotide

SEQ ID NO: 594156 - DNA, 58 bp, Artificial; identical to SEQ ID NO: 436520
  Synthetic oligonucleotide

SEQ ID NO: 594157 - DNA, 54 bp, Artificial; identical to SEQ ID NO: 436521
  Synthetic oligonucleotide

SEQ ID NO: 594158 - DNA, 55 bp, Artificial; identical to SEQ ID NO: 436526
  Synthetic oligonucleotide

SEQ ID NO: 594159 - DNA, 57 bp, Artificial; identical to SEQ ID NO: 436530
  Synthetic oligonucleotide

SEQ ID NO: 594160 - DNA, 51 bp, Artificial; identical to SEQ ID NO: 436531
  Synthetic oligonucleotide

SEQ ID NO: 594161 - DNA, 60 bp, Artificial; identical to SEQ ID NO: 436532
  Synthetic oligonucleotide

SEQ ID NO: 594162 - DNA, 57 bp, Artificial; identical to SEQ ID NO: 436533
  Synthetic oligonucleotide

SEQ ID NO: 594163 - DNA, 55 bp, Artificial; identical to SEQ ID NO: 436534
  Synthetic oligonucleotide

SEQ ID NO: 594164 - DNA, 60 bp, Artificial; identical to SEQ ID NO: 14384
  Synthetic oligonucleotide

SEQ ID NO: 594165 - DNA, 52 bp, Artificial; identical to SEQ ID NO: 436535
  Synthetic oligonucleotide

SEQ ID NO: 594166 - DNA, 60 bp, Artificial; identical to SEQ ID NO: 436536
  Synthetic oligonucleotide

SEQ ID NO: 594167 - DNA, 55 bp, Artificial; identical to SEQ ID NO: 436538
  Synthetic oligonucleotide

SEQ ID NO: 594168 - DNA, 58 bp, Artificial; identical to SEQ ID NO: 436540
  Synthetic oligonucleotide

SEQ ID NO: 594169 - DNA, 60 bp, Artificial; identical to SEQ ID NO: 14794
  Synthetic oligonucleotide

SEQ ID NO: 594170 - DNA, 57 bp, Artificial; identical to SEQ ID NO: 19091
  Synthetic oligonucleotide

SEQ ID NO: 594171 - DNA, 60 bp, Artificial; identical to SEQ ID NO: 436542
  Synthetic oligonucleotide

SEQ ID NO: 594172 - DNA, 55 bp, Artificial; identical to SEQ ID NO: 436543
  Synthetic oligonucleotide

SEQ ID NO: 594173 - DNA, 55 bp, Artificial; identical to SEQ ID NO: 436544
  Synthetic oligonucleotide

SEQ ID NO: 594174 - DNA, 56 bp, Artificial; identical to SEQ ID NO: 436545
  Synthetic oligonucleotide

SEQ ID NO: 594175 - DNA, 59 bp, Artificial; identical to SEQ ID NO: 436546
  Synthetic oligonucleotide

SEQ ID NO: 594176 - DNA, 57 bp, Artificial; identical to SEQ ID NO: 436549
  Synthetic oligonucleotide

SEQ ID NO: 594177 - DNA, 51 bp, Artificial; identical to SEQ ID NO: 436552
  Synthetic oligonucleotide

SEQ ID NO: 594178 - DNA, 52 bp, Artificial; identical to SEQ ID NO: 19364
  Synthetic oligonucleotide

SEQ ID NO: 594179 - DNA, 51 bp, Artificial; identical to SEQ ID NO: 436563
  Synthetic oligonucleotide

SEQ ID NO: 594180 - DNA, 55 bp, Artificial; identical to SEQ ID NO: 436565
  Synthetic oligonucleotide

SEQ ID NO: 594181 - DNA, 56 bp, Artificial; identical to SEQ ID NO: 436566
  Synthetic oligonucleotide

SEQ ID NO: 594182 - DNA, 55 bp, Artificial; identical to SEQ ID NO: 436567
  Synthetic oligonucleotide

SEQ ID NO: 594183 - DNA, 60 bp, Artificial; identical to SEQ ID NO: 436568
  Synthetic oligonucleotide

SEQ ID NO: 594184 - DNA, 55 bp, Artificial; identical to SEQ ID NO: 436573
  Synthetic oligonucleotide

SEQ ID NO: 594185 - DNA, 54 bp, Artificial; identical to SEQ ID NO: 436576
  Synthetic oligonucleotide

SEQ ID NO: 594186 - DNA, 56 bp, Artificial; identical to SEQ ID NO: 436577
  Synthetic oligonucleotide

SEQ ID NO: 594187 - DNA, 58 bp, Artificial; identical to SEQ ID NO: 436578
  Synthetic oligonucleotide

SEQ ID NO: 594188 - DNA, 53 bp, Artificial; identical to SEQ ID NO: 436584
  Synthetic oligonucleotide

SEQ ID NO: 594189 - DNA, 51 bp, Artificial; identical to SEQ ID NO: 436587
  Synthetic oligonucleotide

SEQ ID NO: 594190 - DNA, 60 bp, Artificial; identical to SEQ ID NO: 436589
  Synthetic oligonucleotide

SEQ ID NO: 594191 - DNA, 57 bp, Artificial; identical to SEQ ID NO: 436590
  Synthetic oligonucleotide

SEQ ID NO: 594192 - DNA, 55 bp, Artificial; identical to SEQ ID NO: 436592
  Synthetic oligonucleotide

SEQ ID NO: 594193 - DNA, 60 bp, Artificial; identical to SEQ ID NO: 436593
  Synthetic oligonucleotide

SEQ ID NO: 594194 - DNA, 55 bp, Artificial; identical to SEQ ID NO: 436596
  Synthetic oligonucleotide

SEQ ID NO: 594195 - DNA, 56 bp, Artificial; identical to SEQ ID NO: 19083
  Synthetic oligonucleotide

SEQ ID NO: 594196 - DNA, 60 bp, Artificial; identical to SEQ ID NO: 436598
  Synthetic oligonucleotide

SEQ ID NO: 594197 - DNA, 55 bp, Artificial; identical to SEQ ID NO: 436599
  Synthetic oligonucleotide

SEQ ID NO: 594198 - DNA, 60 bp, Artificial; identical to SEQ ID NO: 436600
  Synthetic oligonucleotide

SEQ ID NO: 594199 - DNA, 55 bp, Artificial; identical to SEQ ID NO: 436603
  Synthetic oligonucleotide

SEQ ID NO: 594200 - DNA, 55 bp, Artificial; identical to SEQ ID NO: 436604
  Synthetic oligonucleotide

SEQ ID NO: 594201 - DNA, 60 bp, Artificial; identical to SEQ ID NO: 436605
  Synthetic oligonucleotide

SEQ ID NO: 594202 - DNA, 57 bp, Artificial; identical to SEQ ID NO: 436606
  Synthetic oligonucleotide

SEQ ID NO: 594203 - DNA, 60 bp, Artificial; identical to SEQ ID NO: 436610
  Synthetic oligonucleotide

SEQ ID NO: 594204 - DNA, 51 bp, Artificial; identical to SEQ ID NO: 436611
  Synthetic oligonucleotide

SEQ ID NO: 594205 - DNA, 58 bp, Artificial; identical to SEQ ID NO: 436612
  Synthetic oligonucleotide

SEQ ID NO: 594206 - DNA, 55 bp, Artificial; identical to SEQ ID NO: 436613
  Synthetic oligonucleotide

SEQ ID NO: 594207 - DNA, 60 bp, Artificial; identical to SEQ ID NO: 436615
  Synthetic oligonucleotide

SEQ ID NO: 594208 - DNA, 51 bp, Artificial; identical to SEQ ID NO: 436616
  Synthetic oligonucleotide

SEQ ID NO: 594209 - DNA, 60 bp, Artificial; identical to SEQ ID NO: 436617
  Synthetic oligonucleotide

SEQ ID NO: 594210 - DNA, 59 bp, Artificial; identical to SEQ ID NO: 436618
  Synthetic oligonucleotide

SEQ ID NO: 594211 - DNA, 60 bp, Artificial; identical to SEQ ID NO: 436620
  Synthetic oligonucleotide

SEQ ID NO: 594212 - DNA, 60 bp, Artificial; identical to SEQ ID NO: 436622
  Synthetic oligonucleotide

SEQ ID NO: 594213 - DNA, 51 bp, Artificial; identical to SEQ ID NO: 436626
  Synthetic oligonucleotide

SEQ ID NO: 594214 - DNA, 52 bp, Artificial; identical to SEQ ID NO: 436627
  Synthetic oligonucleotide

SEQ ID NO: 594215 - DNA, 60 bp, Artificial; identical to SEQ ID NO: 436628
  Synthetic oligonucleotide

SEQ ID NO: 594216 - DNA, 57 bp, Artificial; identical to SEQ ID NO: 436629
  Synthetic oligonucleotide

SEQ ID NO: 594217 - DNA, 60 bp, Artificial; identical to SEQ ID NO: 436633
  Synthetic oligonucleotide

SEQ ID NO: 594218 - DNA, 60 bp, Artificial; identical to SEQ ID NO: 436634
  Synthetic oligonucleotide

SEQ ID NO: 594219 - DNA, 54 bp, Artificial; identical to SEQ ID NO: 436637
  Synthetic oligonucleotide

SEQ ID NO: 594220 - DNA, 54 bp, Artificial; identical to SEQ ID NO: 436638
  Synthetic oligonucleotide

SEQ ID NO: 594221 - DNA, 53 bp, Artificial; identical to SEQ ID NO: 436639
  Synthetic oligonucleotide

SEQ ID NO: 594222 - DNA, 60 bp, Artificial; identical to SEQ ID NO: 436640
  Synthetic oligonucleotide

SEQ ID NO: 594223 - DNA, 60 bp, Artificial; identical to SEQ ID NO: 436642
  Synthetic oligonucleotide

SEQ ID NO: 594224 - DNA, 55 bp, Artificial; identical to SEQ ID NO: 436643
  Synthetic oligonucleotide

SEQ ID NO: 594225 - DNA, 53 bp, Artificial; identical to SEQ ID NO: 7952
  Synthetic oligonucleotide

SEQ ID NO: 594226 - DNA, 55 bp, Artificial; identical to SEQ ID NO: 436645
  Synthetic oligonucleotide

SEQ ID NO: 594227 - DNA, 53 bp, Artificial; identical to SEQ ID NO: 436650
  Synthetic oligonucleotide

SEQ ID NO: 594228 - DNA, 58 bp, Artificial; identical to SEQ ID NO: 436653
  Synthetic oligonucleotide

SEQ ID NO: 594229 - DNA, 53 bp, Artificial; identical to SEQ ID NO: 436654
  Synthetic oligonucleotide

SEQ ID NO: 594230 - DNA, 60 bp, Artificial; identical to SEQ ID NO: 10859
  Synthetic oligonucleotide

SEQ ID NO: 594231 - DNA, 60 bp, Artificial; identical to SEQ ID NO: 436658
  Synthetic oligonucleotide

SEQ ID NO: 594232 - DNA, 60 bp, Artificial; identical to SEQ ID NO: 436662
  Synthetic oligonucleotide

SEQ ID NO: 594233 - DNA, 60 bp, Artificial; identical to SEQ ID NO: 436664
  Synthetic oligonucleotide

SEQ ID NO: 594234 - DNA, 55 bp, Artificial; identical to SEQ ID NO: 436665
  Synthetic oligonucleotide

SEQ ID NO: 594235 - DNA, 55 bp, Artificial; identical to SEQ ID NO: 436666
  Synthetic oligonucleotide

SEQ ID NO: 594236 - DNA, 55 bp, Artificial; identical to SEQ ID NO: 436667
  Synthetic oligonucleotide

SEQ ID NO: 594237 - DNA, 56 bp, Artificial; identical to SEQ ID NO: 436672
  Synthetic oligonucleotide

SEQ ID NO: 594238 - DNA, 50 bp, Artificial; identical to SEQ ID NO: 436674
  Synthetic oligonucleotide

SEQ ID NO: 594239 - DNA, 57 bp, Artificial; identical to SEQ ID NO: 436675
  Synthetic oligonucleotide

SEQ ID NO: 594240 - DNA, 55 bp, Artificial; identical to SEQ ID NO: 436676
  Synthetic oligonucleotide

SEQ ID NO: 594241 - DNA, 60 bp, Artificial; identical to SEQ ID NO: 436681
  Synthetic oligonucleotide

SEQ ID NO: 594242 - DNA, 60 bp, Artificial; identical to SEQ ID NO: 436682
  Synthetic oligonucleotide

SEQ ID NO: 594243 - DNA, 55 bp, Artificial; identical to SEQ ID NO: 436683
  Synthetic oligonucleotide

SEQ ID NO: 594244 - DNA, 60 bp, Artificial; identical to SEQ ID NO: 436685
  Synthetic oligonucleotide

SEQ ID NO: 594245 - DNA, 60 bp, Artificial; identical to SEQ ID NO: 436687
  Synthetic oligonucleotide

SEQ ID NO: 594246 - DNA, 55 bp, Artificial; identical to SEQ ID NO: 436688
  Synthetic oligonucleotide

SEQ ID NO: 594247 - DNA, 58 bp, Artificial; identical to SEQ ID NO: 436689
  Synthetic oligonucleotide

SEQ ID NO: 594248 - DNA, 60 bp, Artificial; identical to SEQ ID NO: 7096
  Synthetic oligonucleotide

SEQ ID NO: 594249 - DNA, 59 bp, Artificial; identical to SEQ ID NO: 436690
  Synthetic oligonucleotide

SEQ ID NO: 594250 - DNA, 58 bp, Artificial; identical to SEQ ID NO: 436691
  Synthetic oligonucleotide

SEQ ID NO: 594251 - DNA, 60 bp, Artificial; identical to SEQ ID NO: 436694
  Synthetic oligonucleotide

SEQ ID NO: 594252 - DNA, 60 bp, Artificial; identical to SEQ ID NO: 436695
  Synthetic oligonucleotide

SEQ ID NO: 594253 - DNA, 54 bp, Artificial; identical to SEQ ID NO: 436698
  Synthetic oligonucleotide

SEQ ID NO: 594254 - DNA, 51 bp, Artificial; identical to SEQ ID NO: 436699
  Synthetic oligonucleotide

SEQ ID NO: 594255 - DNA, 55 bp, Artificial; identical to SEQ ID NO: 436701
  Synthetic oligonucleotide

SEQ ID NO: 594256 - DNA, 55 bp, Artificial; identical to SEQ ID NO: 436703
  Synthetic oligonucleotide

SEQ ID NO: 594257 - DNA, 56 bp, Artificial; identical to SEQ ID NO: 436704
  Synthetic oligonucleotide

SEQ ID NO: 594258 - DNA, 53 bp, Artificial; identical to SEQ ID NO: 436708
  Synthetic oligonucleotide

SEQ ID NO: 594259 - DNA, 50 bp, Artificial; identical to SEQ ID NO: 436711
  Synthetic oligonucleotide

SEQ ID NO: 594260 - DNA, 55 bp, Artificial; identical to SEQ ID NO: 436712
  Synthetic oligonucleotide

SEQ ID NO: 594261 - DNA, 60 bp, Artificial; identical to SEQ ID NO: 436713
  Synthetic oligonucleotide

SEQ ID NO: 594262 - DNA, 60 bp, Artificial; identical to SEQ ID NO: 436715
  Synthetic oligonucleotide

SEQ ID NO: 594263 - DNA, 55 bp, Artificial; identical to SEQ ID NO: 436723
  Synthetic oligonucleotide

SEQ ID NO: 594264 - DNA, 60 bp, Artificial; identical to SEQ ID NO: 436725
  Synthetic oligonucleotide

SEQ ID NO: 594265 - DNA, 53 bp, Artificial; identical to SEQ ID NO: 13425
  Synthetic oligonucleotide

SEQ ID NO: 594266 - DNA, 55 bp, Artificial; identical to SEQ ID NO: 436726
  Synthetic oligonucleotide

SEQ ID NO: 594267 - DNA, 53 bp, Artificial; identical to SEQ ID NO: 436728
  Synthetic oligonucleotide

SEQ ID NO: 594268 - DNA, 58 bp, Artificial; identical to SEQ ID NO: 436740
  Synthetic oligonucleotide

SEQ ID NO: 594269 - DNA, 51 bp, Artificial; identical to SEQ ID NO: 436741
  Synthetic oligonucleotide

SEQ ID NO: 594270 - DNA, 55 bp, Artificial; identical to SEQ ID NO: 436742
  Synthetic oligonucleotide

SEQ ID NO: 594271 - DNA, 55 bp, Artificial; identical to SEQ ID NO: 436743
  Synthetic oligonucleotide

SEQ ID NO: 594272 - DNA, 58 bp, Artificial; identical to SEQ ID NO: 436744
  Synthetic oligonucleotide

SEQ ID NO: 594273 - DNA, 60 bp, Artificial; identical to SEQ ID NO: 12760
  Synthetic oligonucleotide

SEQ ID NO: 594274 - DNA, 60 bp, Artificial; identical to SEQ ID NO: 436749
  Synthetic oligonucleotide

SEQ ID NO: 594275 - DNA, 60 bp, Artificial; identical to SEQ ID NO: 436750
  Synthetic oligonucleotide

SEQ ID NO: 594276 - DNA, 56 bp, Artificial; identical to SEQ ID NO: 436752
  Synthetic oligonucleotide

SEQ ID NO: 594277 - DNA, 60 bp, Artificial; identical to SEQ ID NO: 436753
  Synthetic oligonucleotide

SEQ ID NO: 594278 - DNA, 55 bp, Artificial; identical to SEQ ID NO: 436755
  Synthetic oligonucleotide

SEQ ID NO: 594279 - DNA, 55 bp, Artificial; identical to SEQ ID NO: 436756
  Synthetic oligonucleotide

SEQ ID NO: 594280 - DNA, 55 bp, Artificial; identical to SEQ ID NO: 436758
  Synthetic oligonucleotide

SEQ ID NO: 594281 - DNA, 55 bp, Artificial; identical to SEQ ID NO: 436760
  Synthetic oligonucleotide

SEQ ID NO: 594282 - DNA, 54 bp, Artificial; identical to SEQ ID NO: 436766
  Synthetic oligonucleotide

SEQ ID NO: 594283 - DNA, 54 bp, Artificial; identical to SEQ ID NO: 436769
  Synthetic oligonucleotide

SEQ ID NO: 594284 - DNA, 59 bp, Artificial; identical to SEQ ID NO: 436770
  Synthetic oligonucleotide

SEQ ID NO: 594285 - DNA, 60 bp, Artificial; identical to SEQ ID NO: 436772
  Synthetic oligonucleotide

SEQ ID NO: 594286 - DNA, 60 bp, Artificial; identical to SEQ ID NO: 436773
  Synthetic oligonucleotide

SEQ ID NO: 594287 - DNA, 60 bp, Artificial; identical to SEQ ID NO: 436775
  Synthetic oligonucleotide

SEQ ID NO: 594288 - DNA, 55 bp, Artificial; identical to SEQ ID NO: 436776
  Synthetic oligonucleotide

SEQ ID NO: 594289 - DNA, 54 bp, Artificial; identical to SEQ ID NO: 436779
  Synthetic oligonucleotide

SEQ ID NO: 594290 - DNA, 57 bp, Artificial; identical to SEQ ID NO: 436783
  Synthetic oligonucleotide

SEQ ID NO: 594291 - DNA, 59 bp, Artificial; identical to SEQ ID NO: 436785
  Synthetic oligonucleotide

SEQ ID NO: 594292 - DNA, 54 bp, Artificial; identical to SEQ ID NO: 436787
  Synthetic oligonucleotide

SEQ ID NO: 594293 - DNA, 60 bp, Artificial; identical to SEQ ID NO: 436788
  Synthetic oligonucleotide

SEQ ID NO: 594294 - DNA, 59 bp, Artificial; identical to SEQ ID NO: 436789
  Synthetic oligonucleotide

SEQ ID NO: 594295 - DNA, 60 bp, Artificial; identical to SEQ ID NO: 436790
  Synthetic oligonucleotide

SEQ ID NO: 594296 - DNA, 60 bp, Artificial; identical to SEQ ID NO: 436791
  Synthetic oligonucleotide

SEQ ID NO: 594297 - DNA, 57 bp, Artificial; identical to SEQ ID NO: 436793
  Synthetic oligonucleotide

SEQ ID NO: 594298 - DNA, 55 bp, Artificial; identical to SEQ ID NO: 436794
  Synthetic oligonucleotide

SEQ ID NO: 594299 - DNA, 60 bp, Artificial; identical to SEQ ID NO: 436796
  Synthetic oligonucleotide

SEQ ID NO: 594300 - DNA, 55 bp, Artificial; identical to SEQ ID NO: 436799
  Synthetic oligonucleotide

SEQ ID NO: 594301 - DNA, 55 bp, Artificial; identical to SEQ ID NO: 436800
  Synthetic oligonucleotide

SEQ ID NO: 594302 - DNA, 54 bp, Artificial; identical to SEQ ID NO: 436801
  Synthetic oligonucleotide

SEQ ID NO: 594303 - DNA, 51 bp, Artificial; identical to SEQ ID NO: 436802
  Synthetic oligonucleotide

SEQ ID NO: 594304 - DNA, 52 bp, Artificial; identical to SEQ ID NO: 436803
  Synthetic oligonucleotide

SEQ ID NO: 594305 - DNA, 54 bp, Artificial; identical to SEQ ID NO: 436807
  Synthetic oligonucleotide

SEQ ID NO: 594306 - DNA, 56 bp, Artificial; identical to SEQ ID NO: 436810
  Synthetic oligonucleotide

SEQ ID NO: 594307 - DNA, 57 bp, Artificial; identical to SEQ ID NO: 16678
  Synthetic oligonucleotide

SEQ ID NO: 594308 - DNA, 55 bp, Artificial; identical to SEQ ID NO: 436812
  Synthetic oligonucleotide

SEQ ID NO: 594309 - DNA, 55 bp, Artificial; identical to SEQ ID NO: 436814
  Synthetic oligonucleotide

SEQ ID NO: 594310 - DNA, 60 bp, Artificial; identical to SEQ ID NO: 436817
  Synthetic oligonucleotide

SEQ ID NO: 594311 - DNA, 60 bp, Artificial; identical to SEQ ID NO: 436818
  Synthetic oligonucleotide

SEQ ID NO: 594312 - DNA, 60 bp, Artificial; identical to SEQ ID NO: 436820
  Synthetic oligonucleotide

SEQ ID NO: 594313 - DNA, 58 bp, Artificial; identical to SEQ ID NO: 436828
  Synthetic oligonucleotide

SEQ ID NO: 594314 - DNA, 59 bp, Artificial; identical to SEQ ID NO: 436829
  Synthetic oligonucleotide

SEQ ID NO: 594315 - DNA, 55 bp, Artificial; identical to SEQ ID NO: 436831
  Synthetic oligonucleotide

SEQ ID NO: 594316 - DNA, 55 bp, Artificial; identical to SEQ ID NO: 436833
  Synthetic oligonucleotide

SEQ ID NO: 594317 - DNA, 55 bp, Artificial; identical to SEQ ID NO: 436834
  Synthetic oligonucleotide

SEQ ID NO: 594318 - DNA, 60 bp, Artificial; identical to SEQ ID NO: 436837
  Synthetic oligonucleotide

SEQ ID NO: 594319 - DNA, 55 bp, Artificial; identical to SEQ ID NO: 436840
  Synthetic oligonucleotide

SEQ ID NO: 594320 - DNA, 60 bp, Artificial; identical to SEQ ID NO: 436846
  Synthetic oligonucleotide

SEQ ID NO: 594321 - DNA, 56 bp, Artificial; identical to SEQ ID NO: 436849
  Synthetic oligonucleotide

SEQ ID NO: 594322 - DNA, 55 bp, Artificial; identical to SEQ ID NO: 436853
  Synthetic oligonucleotide

SEQ ID NO: 594323 - DNA, 60 bp, Artificial; identical to SEQ ID NO: 436854
  Synthetic oligonucleotide

SEQ ID NO: 594324 - DNA, 56 bp, Artificial; identical to SEQ ID NO: 436855
  Synthetic oligonucleotide

SEQ ID NO: 594325 - DNA, 54 bp, Artificial; identical to SEQ ID NO: 436856
  Synthetic oligonucleotide

SEQ ID NO: 594326 - DNA, 58 bp, Artificial; identical to SEQ ID NO: 436858
  Synthetic oligonucleotide

SEQ ID NO: 594327 - DNA, 60 bp, Artificial; identical to SEQ ID NO: 436861
  Synthetic oligonucleotide

SEQ ID NO: 594328 - DNA, 60 bp, Artificial; identical to SEQ ID NO: 436862
  Synthetic oligonucleotide

SEQ ID NO: 594329 - DNA, 51 bp, Artificial; identical to SEQ ID NO: 436864
  Synthetic oligonucleotide

SEQ ID NO: 594330 - DNA, 60 bp, Artificial; identical to SEQ ID NO: 436868
  Synthetic oligonucleotide

SEQ ID NO: 594331 - DNA, 60 bp, Artificial; identical to SEQ ID NO: 436869
  Synthetic oligonucleotide

SEQ ID NO: 594332 - DNA, 56 bp, Artificial; identical to SEQ ID NO: 436873
  Synthetic oligonucleotide

SEQ ID NO: 594333 - DNA, 58 bp, Artificial; identical to SEQ ID NO: 436880
  Synthetic oligonucleotide

SEQ ID NO: 594334 - DNA, 55 bp, Artificial; identical to SEQ ID NO: 436881
  Synthetic oligonucleotide

SEQ ID NO: 594335 - DNA, 52 bp, Artificial; identical to SEQ ID NO: 436883
  Synthetic oligonucleotide

SEQ ID NO: 594336 - DNA, 60 bp, Artificial; identical to SEQ ID NO: 436884
  Synthetic oligonucleotide

SEQ ID NO: 594337 - DNA, 60 bp, Artificial; identical to SEQ ID NO: 12231
  Synthetic oligonucleotide

SEQ ID NO: 594338 - DNA, 59 bp, Artificial; identical to SEQ ID NO: 436885
  Synthetic oligonucleotide

SEQ ID NO: 594339 - DNA, 58 bp, Artificial; identical to SEQ ID NO: 436888
  Synthetic oligonucleotide

SEQ ID NO: 594340 - DNA, 55 bp, Artificial; identical to SEQ ID NO: 436889
  Synthetic oligonucleotide

SEQ ID NO: 594341 - DNA, 60 bp, Artificial; identical to SEQ ID NO: 6406
  Synthetic oligonucleotide

SEQ ID NO: 594342 - DNA, 60 bp, Artificial; identical to SEQ ID NO: 436895
  Synthetic oligonucleotide

SEQ ID NO: 594343 - DNA, 59 bp, Artificial; identical to SEQ ID NO: 436897
  Synthetic oligonucleotide

SEQ ID NO: 594344 - DNA, 56 bp, Artificial; identical to SEQ ID NO: 436898
  Synthetic oligonucleotide

SEQ ID NO: 594345 - DNA, 60 bp, Artificial; identical to SEQ ID NO: 436899
  Synthetic oligonucleotide

SEQ ID NO: 594346 - DNA, 60 bp, Artificial; identical to SEQ ID NO: 436901
  Synthetic oligonucleotide

SEQ ID NO: 594347 - DNA, 54 bp, Artificial; identical to SEQ ID NO: 436902
  Synthetic oligonucleotide

SEQ ID NO: 594348 - DNA, 58 bp, Artificial; identical to SEQ ID NO: 436903
  Synthetic oligonucleotide

SEQ ID NO: 594349 - DNA, 60 bp, Artificial; identical to SEQ ID NO: 12850
  Synthetic oligonucleotide

SEQ ID NO: 594350 - DNA, 55 bp, Artificial; identical to SEQ ID NO: 436905
  Synthetic oligonucleotide

SEQ ID NO: 594351 - DNA, 52 bp, Artificial; identical to SEQ ID NO: 436909
  Synthetic oligonucleotide

SEQ ID NO: 594352 - DNA, 56 bp, Artificial; identical to SEQ ID NO: 436914
  Synthetic oligonucleotide

SEQ ID NO: 594353 - DNA, 55 bp, Artificial; identical to SEQ ID NO: 436915
  Synthetic oligonucleotide

SEQ ID NO: 594354 - DNA, 58 bp, Artificial; identical to SEQ ID NO: 436917
  Synthetic oligonucleotide

SEQ ID NO: 594355 - DNA, 57 bp, Artificial; identical to SEQ ID NO: 8111
  Synthetic oligonucleotide

SEQ ID NO: 594356 - DNA, 53 bp, Artificial; identical to SEQ ID NO: 436923
  Synthetic oligonucleotide

SEQ ID NO: 594357 - DNA, 55 bp, Artificial; identical to SEQ ID NO: 436925
  Synthetic oligonucleotide

SEQ ID NO: 594358 - DNA, 60 bp, Artificial; identical to SEQ ID NO: 436929
  Synthetic oligonucleotide

SEQ ID NO: 594359 - DNA, 55 bp, Artificial; identical to SEQ ID NO: 436935
  Synthetic oligonucleotide

SEQ ID NO: 594360 - DNA, 51 bp, Artificial; identical to SEQ ID NO: 436936
  Synthetic oligonucleotide

SEQ ID NO: 594361 - DNA, 56 bp, Artificial; identical to SEQ ID NO: 436937
  Synthetic oligonucleotide

SEQ ID NO: 594362 - DNA, 50 bp, Artificial; identical to SEQ ID NO: 436940
  Synthetic oligonucleotide

SEQ ID NO: 594363 - DNA, 50 bp, Artificial; identical to SEQ ID NO: 436941
  Synthetic oligonucleotide

SEQ ID NO: 594364 - DNA, 60 bp, Artificial; identical to SEQ ID NO: 7912
  Synthetic oligonucleotide

SEQ ID NO: 594365 - DNA, 55 bp, Artificial; identical to SEQ ID NO: 436944
  Synthetic oligonucleotide

SEQ ID NO: 594366 - DNA, 55 bp, Artificial; identical to SEQ ID NO: 436945
  Synthetic oligonucleotide

SEQ ID NO: 594367 - DNA, 60 bp, Artificial; identical to SEQ ID NO: 436946
  Synthetic oligonucleotide

SEQ ID NO: 594368 - DNA, 55 bp, Artificial; identical to SEQ ID NO: 436947
  Synthetic oligonucleotide

SEQ ID NO: 594369 - DNA, 60 bp, Artificial; identical to SEQ ID NO: 436948
  Synthetic oligonucleotide

SEQ ID NO: 594370 - DNA, 55 bp, Artificial; identical to SEQ ID NO: 436955
  Synthetic oligonucleotide

SEQ ID NO: 594371 - DNA, 55 bp, Artificial; identical to SEQ ID NO: 436960
  Synthetic oligonucleotide

SEQ ID NO: 594372 - DNA, 55 bp, Artificial; identical to SEQ ID NO: 436962
  Synthetic oligonucleotide

SEQ ID NO: 594373 - DNA, 60 bp, Artificial; identical to SEQ ID NO: 436963
  Synthetic oligonucleotide

SEQ ID NO: 594374 - DNA, 60 bp, Artificial; identical to SEQ ID NO: 436964
  Synthetic oligonucleotide

SEQ ID NO: 594375 - DNA, 55 bp, Artificial; identical to SEQ ID NO: 436965
  Synthetic oligonucleotide

SEQ ID NO: 594376 - DNA, 60 bp, Artificial; identical to SEQ ID NO: 436966
  Synthetic oligonucleotide

SEQ ID NO: 594377 - DNA, 50 bp, Artificial; identical to SEQ ID NO: 436968
  Synthetic oligonucleotide

SEQ ID NO: 594378 - DNA, 50 bp, Artificial; identical to SEQ ID NO: 436969
  Synthetic oligonucleotide

SEQ ID NO: 594379 - DNA, 54 bp, Artificial; identical to SEQ ID NO: 20107
  Synthetic oligonucleotide

SEQ ID NO: 594380 - DNA, 54 bp, Artificial; identical to SEQ ID NO: 436970
  Synthetic oligonucleotide

SEQ ID NO: 594381 - DNA, 60 bp, Artificial; identical to SEQ ID NO: 436971
  Synthetic oligonucleotide

SEQ ID NO: 594382 - DNA, 53 bp, Artificial; identical to SEQ ID NO: 436974
  Synthetic oligonucleotide

SEQ ID NO: 594383 - DNA, 60 bp, Artificial; identical to SEQ ID NO: 15391
  Synthetic oligonucleotide

SEQ ID NO: 594384 - DNA, 55 bp, Artificial; identical to SEQ ID NO: 436977
  Synthetic oligonucleotide

SEQ ID NO: 594385 - DNA, 55 bp, Artificial; identical to SEQ ID NO: 436978
  Synthetic oligonucleotide

SEQ ID NO: 594386 - DNA, 55 bp, Artificial; identical to SEQ ID NO: 436979
  Synthetic oligonucleotide

SEQ ID NO: 594387 - DNA, 55 bp, Artificial; identical to SEQ ID NO: 436983
  Synthetic oligonucleotide

SEQ ID NO: 594388 - DNA, 55 bp, Artificial; identical to SEQ ID NO: 436994
  Synthetic oligonucleotide

SEQ ID NO: 594389 - DNA, 60 bp, Artificial; identical to SEQ ID NO: 436995
  Synthetic oligonucleotide

SEQ ID NO: 594390 - DNA, 50 bp, Artificial; identical to SEQ ID NO: 436996
  Synthetic oligonucleotide

SEQ ID NO: 594391 - DNA, 60 bp, Artificial; identical to SEQ ID NO: 436997
  Synthetic oligonucleotide

SEQ ID NO: 594392 - DNA, 59 bp, Artificial; identical to SEQ ID NO: 436998
  Synthetic oligonucleotide

SEQ ID NO: 594393 - DNA, 55 bp, Artificial; identical to SEQ ID NO: 436999
  Synthetic oligonucleotide

SEQ ID NO: 594394 - DNA, 55 bp, Artificial; identical to SEQ ID NO: 437003
  Synthetic oligonucleotide

SEQ ID NO: 594395 - DNA, 57 bp, Artificial; identical to SEQ ID NO: 437008
  Synthetic oligonucleotide

SEQ ID NO: 594396 - DNA, 51 bp, Artificial; identical to SEQ ID NO: 437010
  Synthetic oligonucleotide

SEQ ID NO: 594397 - DNA, 60 bp, Artificial; identical to SEQ ID NO: 437012
  Synthetic oligonucleotide

SEQ ID NO: 594398 - DNA, 55 bp, Artificial; identical to SEQ ID NO: 16009
  Synthetic oligonucleotide

SEQ ID NO: 594399 - DNA, 60 bp, Artificial; identical to SEQ ID NO: 437013
  Synthetic oligonucleotide

SEQ ID NO: 594400 - DNA, 53 bp, Artificial; identical to SEQ ID NO: 437016
  Synthetic oligonucleotide

SEQ ID NO: 594401 - DNA, 57 bp, Artificial; identical to SEQ ID NO: 437018
  Synthetic oligonucleotide

SEQ ID NO: 594402 - DNA, 55 bp, Artificial; identical to SEQ ID NO: 437019
  Synthetic oligonucleotide

SEQ ID NO: 594403 - DNA, 60 bp, Artificial; identical to SEQ ID NO: 437020
  Synthetic oligonucleotide

SEQ ID NO: 594404 - DNA, 55 bp, Artificial; identical to SEQ ID NO: 437021
  Synthetic oligonucleotide

SEQ ID NO: 594405 - DNA, 55 bp, Artificial; identical to SEQ ID NO: 437022
  Synthetic oligonucleotide

SEQ ID NO: 594406 - DNA, 55 bp, Artificial; identical to SEQ ID NO: 437024
  Synthetic oligonucleotide

SEQ ID NO: 594407 - DNA, 54 bp, Artificial; identical to SEQ ID NO: 437025
  Synthetic oligonucleotide

SEQ ID NO: 594408 - DNA, 55 bp, Artificial; identical to SEQ ID NO: 437028
  Synthetic oligonucleotide

SEQ ID NO: 594409 - DNA, 55 bp, Artificial; identical to SEQ ID NO: 437031
  Synthetic oligonucleotide

SEQ ID NO: 594410 - DNA, 60 bp, Artificial; identical to SEQ ID NO: 7964
  Synthetic oligonucleotide

SEQ ID NO: 594411 - DNA, 57 bp, Artificial; identical to SEQ ID NO: 437033
  Synthetic oligonucleotide

SEQ ID NO: 594412 - DNA, 55 bp, Artificial; identical to SEQ ID NO: 437035
  Synthetic oligonucleotide

SEQ ID NO: 594413 - DNA, 60 bp, Artificial; identical to SEQ ID NO: 437036
  Synthetic oligonucleotide

SEQ ID NO: 594414 - DNA, 55 bp, Artificial; identical to SEQ ID NO: 437037
  Synthetic oligonucleotide

SEQ ID NO: 594415 - DNA, 60 bp, Artificial; identical to SEQ ID NO: 437040
  Synthetic oligonucleotide

SEQ ID NO: 594416 - DNA, 58 bp, Artificial; identical to SEQ ID NO: 437041
  Synthetic oligonucleotide

SEQ ID NO: 594417 - DNA, 60 bp, Artificial; identical to SEQ ID NO: 437044
  Synthetic oligonucleotide

SEQ ID NO: 594418 - DNA, 58 bp, Artificial; identical to SEQ ID NO: 437045
  Synthetic oligonucleotide

SEQ ID NO: 594419 - DNA, 53 bp, Artificial; identical to SEQ ID NO: 437046
  Synthetic oligonucleotide

SEQ ID NO: 594420 - DNA, 56 bp, Artificial; identical to SEQ ID NO: 437047
  Synthetic oligonucleotide

SEQ ID NO: 594421 - DNA, 59 bp, Artificial; identical to SEQ ID NO: 437048
  Synthetic oligonucleotide

SEQ ID NO: 594422 - DNA, 56 bp, Artificial; identical to SEQ ID NO: 437049
  Synthetic oligonucleotide

SEQ ID NO: 594423 - DNA, 50 bp, Artificial; identical to SEQ ID NO: 437050
  Synthetic oligonucleotide

SEQ ID NO: 594424 - DNA, 50 bp, Artificial; identical to SEQ ID NO: 437051
  Synthetic oligonucleotide

SEQ ID NO: 594425 - DNA, 51 bp, Artificial; identical to SEQ ID NO: 437055
  Synthetic oligonucleotide

SEQ ID NO: 594426 - DNA, 54 bp, Artificial; identical to SEQ ID NO: 437056
  Synthetic oligonucleotide

SEQ ID NO: 594427 - DNA, 59 bp, Artificial; identical to SEQ ID NO: 437059
  Synthetic oligonucleotide

SEQ ID NO: 594428 - DNA, 55 bp, Artificial; identical to SEQ ID NO: 437063
  Synthetic oligonucleotide

SEQ ID NO: 594429 - DNA, 55 bp, Artificial; identical to SEQ ID NO: 437068
  Synthetic oligonucleotide

SEQ ID NO: 594430 - DNA, 55 bp, Artificial; identical to SEQ ID NO: 437076
  Synthetic oligonucleotide

SEQ ID NO: 594431 - DNA, 58 bp, Artificial; identical to SEQ ID NO: 437079
  Synthetic oligonucleotide

SEQ ID NO: 594432 - DNA, 60 bp, Artificial; identical to SEQ ID NO: 437080
  Synthetic oligonucleotide

SEQ ID NO: 594433 - DNA, 60 bp, Artificial; identical to SEQ ID NO: 437082
  Synthetic oligonucleotide

SEQ ID NO: 594434 - DNA, 60 bp, Artificial; identical to SEQ ID NO: 437083
  Synthetic oligonucleotide

SEQ ID NO: 594435 - DNA, 53 bp, Artificial; identical to SEQ ID NO: 437084
  Synthetic oligonucleotide

SEQ ID NO: 594436 - DNA, 55 bp, Artificial; identical to SEQ ID NO: 437089
  Synthetic oligonucleotide

SEQ ID NO: 594437 - DNA, 56 bp, Artificial; identical to SEQ ID NO: 437093
  Synthetic oligonucleotide

SEQ ID NO: 594438 - DNA, 57 bp, Artificial; identical to SEQ ID NO: 19533
  Synthetic oligonucleotide

SEQ ID NO: 594439 - DNA, 57 bp, Artificial; identical to SEQ ID NO: 437098
  Synthetic oligonucleotide

SEQ ID NO: 594440 - DNA, 60 bp, Artificial; identical to SEQ ID NO: 437099
  Synthetic oligonucleotide

SEQ ID NO: 594441 - DNA, 55 bp, Artificial; identical to SEQ ID NO: 437100
  Synthetic oligonucleotide

SEQ ID NO: 594442 - DNA, 57 bp, Artificial; identical to SEQ ID NO: 19146
  Synthetic oligonucleotide

SEQ ID NO: 594443 - DNA, 55 bp, Artificial; identical to SEQ ID NO: 437101
  Synthetic oligonucleotide

SEQ ID NO: 594444 - DNA, 55 bp, Artificial; identical to SEQ ID NO: 437103
  Synthetic oligonucleotide

SEQ ID NO: 594445 - DNA, 55 bp, Artificial; identical to SEQ ID NO: 437104
  Synthetic oligonucleotide

SEQ ID NO: 594446 - DNA, 60 bp, Artificial; identical to SEQ ID NO: 437105
  Synthetic oligonucleotide

SEQ ID NO: 594447 - DNA, 60 bp, Artificial; identical to SEQ ID NO: 437106
  Synthetic oligonucleotide

SEQ ID NO: 594448 - DNA, 57 bp, Artificial; identical to SEQ ID NO: 437108
  Synthetic oligonucleotide

SEQ ID NO: 594449 - DNA, 55 bp, Artificial; identical to SEQ ID NO: 437109
  Synthetic oligonucleotide

SEQ ID NO: 594450 - DNA, 51 bp, Artificial; identical to SEQ ID NO: 437110
  Synthetic oligonucleotide

SEQ ID NO: 594451 - DNA, 59 bp, Artificial; identical to SEQ ID NO: 437111
  Synthetic oligonucleotide

SEQ ID NO: 594452 - DNA, 60 bp, Artificial; identical to SEQ ID NO: 437112
  Synthetic oligonucleotide

SEQ ID NO: 594453 - DNA, 53 bp, Artificial; identical to SEQ ID NO: 437116
  Synthetic oligonucleotide

SEQ ID NO: 594454 - DNA, 55 bp, Artificial; identical to SEQ ID NO: 437120
  Synthetic oligonucleotide

SEQ ID NO: 594455 - DNA, 60 bp, Artificial; identical to SEQ ID NO: 437121
  Synthetic oligonucleotide

SEQ ID NO: 594456 - DNA, 60 bp, Artificial; identical to SEQ ID NO: 437122
  Synthetic oligonucleotide

SEQ ID NO: 594457 - DNA, 58 bp, Artificial; identical to SEQ ID NO: 437124
  Synthetic oligonucleotide

SEQ ID NO: 594458 - DNA, 60 bp, Artificial; identical to SEQ ID NO: 7676
  Synthetic oligonucleotide

SEQ ID NO: 594459 - DNA, 60 bp, Artificial; identical to SEQ ID NO: 437130
  Synthetic oligonucleotide

SEQ ID NO: 594460 - DNA, 57 bp, Artificial; identical to SEQ ID NO: 437131
  Synthetic oligonucleotide

SEQ ID NO: 594461 - DNA, 55 bp, Artificial; identical to SEQ ID NO: 437132
  Synthetic oligonucleotide

SEQ ID NO: 594462 - DNA, 60 bp, Artificial; identical to SEQ ID NO: 437134
  Synthetic oligonucleotide

SEQ ID NO: 594463 - DNA, 60 bp, Artificial; identical to SEQ ID NO: 437136
  Synthetic oligonucleotide

SEQ ID NO: 594464 - DNA, 55 bp, Artificial; identical to SEQ ID NO: 437137
  Synthetic oligonucleotide

SEQ ID NO: 594465 - DNA, 55 bp, Artificial; identical to SEQ ID NO: 437143
  Synthetic oligonucleotide

SEQ ID NO: 594466 - DNA, 60 bp, Artificial; identical to SEQ ID NO: 437149
  Synthetic oligonucleotide

SEQ ID NO: 594467 - DNA, 60 bp, Artificial; identical to SEQ ID NO: 437165
  Synthetic oligonucleotide

SEQ ID NO: 594468 - DNA, 55 bp, Artificial; identical to SEQ ID NO: 437167
  Synthetic oligonucleotide

SEQ ID NO: 594469 - DNA, 55 bp, Artificial; identical to SEQ ID NO: 437175
  Synthetic oligonucleotide

SEQ ID NO: 594470 - DNA, 59 bp, Artificial; identical to SEQ ID NO: 437176
  Synthetic oligonucleotide

SEQ ID NO: 594471 - DNA, 50 bp, Artificial; identical to SEQ ID NO: 437179
  Synthetic oligonucleotide

SEQ ID NO: 594472 - DNA, 55 bp, Artificial; identical to SEQ ID NO: 437182
  Synthetic oligonucleotide

SEQ ID NO: 594473 - DNA, 60 bp, Artificial; identical to SEQ ID NO: 437184
  Synthetic oligonucleotide

SEQ ID NO: 594474 - DNA, 53 bp, Artificial; identical to SEQ ID NO: 437187
  Synthetic oligonucleotide

SEQ ID NO: 594475 - DNA, 50 bp, Artificial; identical to SEQ ID NO: 437197
  Synthetic oligonucleotide

SEQ ID NO: 594476 - DNA, 55 bp, Artificial; identical to SEQ ID NO: 437199
  Synthetic oligonucleotide

SEQ ID NO: 594477 - DNA, 55 bp, Artificial; identical to SEQ ID NO: 437201
  Synthetic oligonucleotide

SEQ ID NO: 594478 - DNA, 53 bp, Artificial; identical to SEQ ID NO: 437204
  Synthetic oligonucleotide

SEQ ID NO: 594479 - DNA, 52 bp, Artificial; identical to SEQ ID NO: 437205
  Synthetic oligonucleotide

SEQ ID NO: 594480 - DNA, 54 bp, Artificial; identical to SEQ ID NO: 437206
  Synthetic oligonucleotide

SEQ ID NO: 594481 - DNA, 60 bp, Artificial; identical to SEQ ID NO: 437212
  Synthetic oligonucleotide

SEQ ID NO: 594482 - DNA, 52 bp, Artificial; identical to SEQ ID NO: 437213
  Synthetic oligonucleotide

SEQ ID NO: 594483 - DNA, 60 bp, Artificial; identical to SEQ ID NO: 437214
  Synthetic oligonucleotide

SEQ ID NO: 594484 - DNA, 60 bp, Artificial; identical to SEQ ID NO: 437215
  Synthetic oligonucleotide

SEQ ID NO: 594485 - DNA, 60 bp, Artificial; identical to SEQ ID NO: 13080
  Synthetic oligonucleotide

SEQ ID NO: 594486 - DNA, 55 bp, Artificial; identical to SEQ ID NO: 437219
  Synthetic oligonucleotide

SEQ ID NO: 594487 - DNA, 60 bp, Artificial; identical to SEQ ID NO: 437220
  Synthetic oligonucleotide

SEQ ID NO: 594488 - DNA, 55 bp, Artificial; identical to SEQ ID NO: 437221
  Synthetic oligonucleotide

SEQ ID NO: 594489 - DNA, 59 bp, Artificial; identical to SEQ ID NO: 437223
  Synthetic oligonucleotide

SEQ ID NO: 594490 - DNA, 60 bp, Artificial; identical to SEQ ID NO: 437226
  Synthetic oligonucleotide

SEQ ID NO: 594491 - DNA, 60 bp, Artificial; identical to SEQ ID NO: 437228
  Synthetic oligonucleotide

SEQ ID NO: 594492 - DNA, 55 bp, Artificial; identical to SEQ ID NO: 437229
  Synthetic oligonucleotide

SEQ ID NO: 594493 - DNA, 59 bp, Artificial; identical to SEQ ID NO: 437231
  Synthetic oligonucleotide

SEQ ID NO: 594494 - DNA, 60 bp, Artificial; identical to SEQ ID NO: 437232
  Synthetic oligonucleotide

SEQ ID NO: 594495 - DNA, 58 bp, Artificial; identical to SEQ ID NO: 437234
  Synthetic oligonucleotide

SEQ ID NO: 594496 - DNA, 60 bp, Artificial; identical to SEQ ID NO: 437235
  Synthetic oligonucleotide

SEQ ID NO: 594497 - DNA, 55 bp, Artificial; identical to SEQ ID NO: 437240
  Synthetic oligonucleotide

SEQ ID NO: 594498 - DNA, 60 bp, Artificial; identical to SEQ ID NO: 437241
  Synthetic oligonucleotide

SEQ ID NO: 594499 - DNA, 60 bp, Artificial; identical to SEQ ID NO: 13041
  Synthetic oligonucleotide

SEQ ID NO: 594500 - DNA, 55 bp, Artificial; identical to SEQ ID NO: 437244
  Synthetic oligonucleotide

SEQ ID NO: 594501 - DNA, 55 bp, Artificial; identical to SEQ ID NO: 437253
  Synthetic oligonucleotide

SEQ ID NO: 594502 - DNA, 52 bp, Artificial; identical to SEQ ID NO: 437258
  Synthetic oligonucleotide

SEQ ID NO: 594503 - DNA, 60 bp, Artificial; identical to SEQ ID NO: 437259
  Synthetic oligonucleotide

SEQ ID NO: 594504 - DNA, 56 bp, Artificial; identical to SEQ ID NO: 437260
  Synthetic oligonucleotide

SEQ ID NO: 594505 - DNA, 60 bp, Artificial; identical to SEQ ID NO: 437261
  Synthetic oligonucleotide

SEQ ID NO: 594506 - DNA, 60 bp, Artificial; identical to SEQ ID NO: 437263
  Synthetic oligonucleotide

SEQ ID NO: 594507 - DNA, 60 bp, Artificial; identical to SEQ ID NO: 437265
  Synthetic oligonucleotide

SEQ ID NO: 594508 - DNA, 60 bp, Artificial; identical to SEQ ID NO: 437266
  Synthetic oligonucleotide

SEQ ID NO: 594509 - DNA, 58 bp, Artificial; identical to SEQ ID NO: 437267
  Synthetic oligonucleotide

SEQ ID NO: 594510 - DNA, 55 bp, Artificial; identical to SEQ ID NO: 437270
  Synthetic oligonucleotide

SEQ ID NO: 594511 - DNA, 60 bp, Artificial; identical to SEQ ID NO: 437276
  Synthetic oligonucleotide

SEQ ID NO: 594512 - DNA, 55 bp, Artificial; identical to SEQ ID NO: 437280
  Synthetic oligonucleotide

SEQ ID NO: 594513 - DNA, 50 bp, Artificial; identical to SEQ ID NO: 437281
  Synthetic oligonucleotide

SEQ ID NO: 594514 - DNA, 55 bp, Artificial; identical to SEQ ID NO: 437282
  Synthetic oligonucleotide

SEQ ID NO: 594515 - DNA, 56 bp, Artificial; identical to SEQ ID NO: 437283
  Synthetic oligonucleotide

SEQ ID NO: 594516 - DNA, 60 bp, Artificial; identical to SEQ ID NO: 437284
  Synthetic oligonucleotide

SEQ ID NO: 594517 - DNA, 60 bp, Artificial; identical to SEQ ID NO: 437287
  Synthetic oligonucleotide

SEQ ID NO: 594518 - DNA, 60 bp, Artificial; identical to SEQ ID NO: 437291
  Synthetic oligonucleotide

SEQ ID NO: 594519 - DNA, 56 bp, Artificial; identical to SEQ ID NO: 437292
  Synthetic oligonucleotide

SEQ ID NO: 594520 - DNA, 55 bp, Artificial; identical to SEQ ID NO: 437298
  Synthetic oligonucleotide

SEQ ID NO: 594521 - DNA, 55 bp, Artificial; identical to SEQ ID NO: 437300
  Synthetic oligonucleotide

SEQ ID NO: 594522 - DNA, 55 bp, Artificial; identical to SEQ ID NO: 437301
  Synthetic oligonucleotide

SEQ ID NO: 594523 - DNA, 55 bp, Artificial; identical to SEQ ID NO: 437302
  Synthetic oligonucleotide

SEQ ID NO: 594524 - DNA, 60 bp, Artificial; identical to SEQ ID NO: 437304
  Synthetic oligonucleotide

SEQ ID NO: 594525 - DNA, 56 bp, Artificial; identical to SEQ ID NO: 437306
  Synthetic oligonucleotide

SEQ ID NO: 594526 - DNA, 55 bp, Artificial; identical to SEQ ID NO: 437307
  Synthetic oligonucleotide

SEQ ID NO: 594527 - DNA, 54 bp, Artificial; identical to SEQ ID NO: 437309
  Synthetic oligonucleotide

SEQ ID NO: 594528 - DNA, 60 bp, Artificial; identical to SEQ ID NO: 437310
  Synthetic oligonucleotide

SEQ ID NO: 594529 - DNA, 54 bp, Artificial; identical to SEQ ID NO: 437311
  Synthetic oligonucleotide

SEQ ID NO: 594530 - DNA, 50 bp, Artificial; identical to SEQ ID NO: 437318
  Synthetic oligonucleotide

SEQ ID NO: 594531 - DNA, 60 bp, Artificial; identical to SEQ ID NO: 437321
  Synthetic oligonucleotide

SEQ ID NO: 594532 - DNA, 51 bp, Artificial; identical to SEQ ID NO: 437322
  Synthetic oligonucleotide

SEQ ID NO: 594533 - DNA, 55 bp, Artificial; identical to SEQ ID NO: 437323
  Synthetic oligonucleotide

SEQ ID NO: 594534 - DNA, 58 bp, Artificial; identical to SEQ ID NO: 437325
  Synthetic oligonucleotide

SEQ ID NO: 594535 - DNA, 57 bp, Artificial; identical to SEQ ID NO: 437326
  Synthetic oligonucleotide

SEQ ID NO: 594536 - DNA, 55 bp, Artificial; identical to SEQ ID NO: 437328
  Synthetic oligonucleotide

SEQ ID NO: 594537 - DNA, 57 bp, Artificial; identical to SEQ ID NO: 437332
  Synthetic oligonucleotide

SEQ ID NO: 594538 - DNA, 60 bp, Artificial; identical to SEQ ID NO: 437333
  Synthetic oligonucleotide

SEQ ID NO: 594539 - DNA, 59 bp, Artificial; identical to SEQ ID NO: 437334
  Synthetic oligonucleotide

SEQ ID NO: 594540 - DNA, 60 bp, Artificial; identical to SEQ ID NO: 437336
  Synthetic oligonucleotide

SEQ ID NO: 594541 - DNA, 59 bp, Artificial; identical to SEQ ID NO: 437337
  Synthetic oligonucleotide

SEQ ID NO: 594542 - DNA, 51 bp, Artificial; identical to SEQ ID NO: 437338
  Synthetic oligonucleotide

SEQ ID NO: 594543 - DNA, 53 bp, Artificial; identical to SEQ ID NO: 437341
  Synthetic oligonucleotide

SEQ ID NO: 594544 - DNA, 59 bp, Artificial; identical to SEQ ID NO: 437345
  Synthetic oligonucleotide

SEQ ID NO: 594545 - DNA, 55 bp, Artificial; identical to SEQ ID NO: 437347
  Synthetic oligonucleotide

SEQ ID NO: 594546 - DNA, 59 bp, Artificial; identical to SEQ ID NO: 437349
  Synthetic oligonucleotide

SEQ ID NO: 594547 - DNA, 58 bp, Artificial; identical to SEQ ID NO: 437350
  Synthetic oligonucleotide

SEQ ID NO: 594548 - DNA, 55 bp, Artificial; identical to SEQ ID NO: 437351
  Synthetic oligonucleotide

SEQ ID NO: 594549 - DNA, 56 bp, Artificial; identical to SEQ ID NO: 437352
  Synthetic oligonucleotide

SEQ ID NO: 594550 - DNA, 52 bp, Artificial; identical to SEQ ID NO: 437354
  Synthetic oligonucleotide

SEQ ID NO: 594551 - DNA, 52 bp, Artificial; identical to SEQ ID NO: 437355
  Synthetic oligonucleotide

SEQ ID NO: 594552 - DNA, 58 bp, Artificial; identical to SEQ ID NO: 437356
  Synthetic oligonucleotide

SEQ ID NO: 594553 - DNA, 55 bp, Artificial; identical to SEQ ID NO: 437365
  Synthetic oligonucleotide

SEQ ID NO: 594554 - DNA, 56 bp, Artificial; identical to SEQ ID NO: 16566
  Synthetic oligonucleotide

SEQ ID NO: 594555 - DNA, 54 bp, Artificial; identical to SEQ ID NO: 10970
  Synthetic oligonucleotide

SEQ ID NO: 594556 - DNA, 60 bp, Artificial; identical to SEQ ID NO: 437370
  Synthetic oligonucleotide

SEQ ID NO: 594557 - DNA, 55 bp, Artificial; identical to SEQ ID NO: 437373
  Synthetic oligonucleotide

SEQ ID NO: 594558 - DNA, 60 bp, Artificial; identical to SEQ ID NO: 437377
  Synthetic oligonucleotide

SEQ ID NO: 594559 - DNA, 59 bp, Artificial; identical to SEQ ID NO: 437379
  Synthetic oligonucleotide

SEQ ID NO: 594560 - DNA, 55 bp, Artificial; identical to SEQ ID NO: 437380
  Synthetic oligonucleotide

SEQ ID NO: 594561 - DNA, 55 bp, Artificial; identical to SEQ ID NO: 437381
  Synthetic oligonucleotide

SEQ ID NO: 594562 - DNA, 55 bp, Artificial; identical to SEQ ID NO: 437384
  Synthetic oligonucleotide

SEQ ID NO: 594563 - DNA, 56 bp, Artificial; identical to SEQ ID NO: 437385
  Synthetic oligonucleotide

SEQ ID NO: 594564 - DNA, 55 bp, Artificial; identical to SEQ ID NO: 437387
  Synthetic oligonucleotide

SEQ ID NO: 594565 - DNA, 60 bp, Artificial; identical to SEQ ID NO: 437390
  Synthetic oligonucleotide

SEQ ID NO: 594566 - DNA, 56 bp, Artificial; identical to SEQ ID NO: 437393
  Synthetic oligonucleotide

SEQ ID NO: 594567 - DNA, 60 bp, Artificial; identical to SEQ ID NO: 437396
  Synthetic oligonucleotide

SEQ ID NO: 594568 - DNA, 60 bp, Artificial; identical to SEQ ID NO: 437399
  Synthetic oligonucleotide

SEQ ID NO: 594569 - DNA, 56 bp, Artificial; identical to SEQ ID NO: 437400
  Synthetic oligonucleotide

SEQ ID NO: 594570 - DNA, 57 bp, Artificial; identical to SEQ ID NO: 437402
  Synthetic oligonucleotide

SEQ ID NO: 594571 - DNA, 54 bp, Artificial; identical to SEQ ID NO: 8311
  Synthetic oligonucleotide

SEQ ID NO: 594572 - DNA, 55 bp, Artificial; identical to SEQ ID NO: 437409
  Synthetic oligonucleotide

SEQ ID NO: 594573 - DNA, 60 bp, Artificial; identical to SEQ ID NO: 437411
  Synthetic oligonucleotide

SEQ ID NO: 594574 - DNA, 56 bp, Artificial; identical to SEQ ID NO: 437414
  Synthetic oligonucleotide

SEQ ID NO: 594575 - DNA, 51 bp, Artificial; identical to SEQ ID NO: 437416
  Synthetic oligonucleotide

SEQ ID NO: 594576 - DNA, 60 bp, Artificial; identical to SEQ ID NO: 437418
  Synthetic oligonucleotide

SEQ ID NO: 594577 - DNA, 55 bp, Artificial; identical to SEQ ID NO: 437419
  Synthetic oligonucleotide

SEQ ID NO: 594578 - DNA, 58 bp, Artificial; identical to SEQ ID NO: 437421
  Synthetic oligonucleotide

SEQ ID NO: 594579 - DNA, 57 bp, Artificial; identical to SEQ ID NO: 437426
  Synthetic oligonucleotide

SEQ ID NO: 594580 - DNA, 54 bp, Artificial; identical to SEQ ID NO: 437428
  Synthetic oligonucleotide

SEQ ID NO: 594581 - DNA, 57 bp, Artificial; identical to SEQ ID NO: 437429
  Synthetic oligonucleotide

SEQ ID NO: 594582 - DNA, 53 bp, Artificial; identical to SEQ ID NO: 437431
  Synthetic oligonucleotide

SEQ ID NO: 594583 - DNA, 55 bp, Artificial; identical to SEQ ID NO: 437432
  Synthetic oligonucleotide

SEQ ID NO: 594584 - DNA, 50 bp, Artificial; identical to SEQ ID NO: 437435
  Synthetic oligonucleotide

SEQ ID NO: 594585 - DNA, 55 bp, Artificial; identical to SEQ ID NO: 437437
  Synthetic oligonucleotide

SEQ ID NO: 594586 - DNA, 55 bp, Artificial; identical to SEQ ID NO: 437438
  Synthetic oligonucleotide

SEQ ID NO: 594587 - DNA, 57 bp, Artificial; identical to SEQ ID NO: 437440
  Synthetic oligonucleotide

SEQ ID NO: 594588 - DNA, 53 bp, Artificial; identical to SEQ ID NO: 437441
  Synthetic oligonucleotide

SEQ ID NO: 594589 - DNA, 56 bp, Artificial; identical to SEQ ID NO: 437442
  Synthetic oligonucleotide

SEQ ID NO: 594590 - DNA, 60 bp, Artificial; identical to SEQ ID NO: 437443
  Synthetic oligonucleotide

SEQ ID NO: 594591 - DNA, 60 bp, Artificial; identical to SEQ ID NO: 437446
  Synthetic oligonucleotide

SEQ ID NO: 594592 - DNA, 58 bp, Artificial; identical to SEQ ID NO: 437448
  Synthetic oligonucleotide

SEQ ID NO: 594593 - DNA, 60 bp, Artificial; identical to SEQ ID NO: 437453
  Synthetic oligonucleotide

SEQ ID NO: 594594 - DNA, 60 bp, Artificial; identical to SEQ ID NO: 437457
  Synthetic oligonucleotide

SEQ ID NO: 594595 - DNA, 55 bp, Artificial; identical to SEQ ID NO: 437458
  Synthetic oligonucleotide

SEQ ID NO: 594596 - DNA, 55 bp, Artificial; identical to SEQ ID NO: 437459
  Synthetic oligonucleotide

SEQ ID NO: 594597 - DNA, 60 bp, Artificial; identical to SEQ ID NO: 437462
  Synthetic oligonucleotide

SEQ ID NO: 594598 - DNA, 55 bp, Artificial; identical to SEQ ID NO: 437464
  Synthetic oligonucleotide

SEQ ID NO: 594599 - DNA, 55 bp, Artificial; identical to SEQ ID NO: 437466
  Synthetic oligonucleotide

SEQ ID NO: 594600 - DNA, 60 bp, Artificial; identical to SEQ ID NO: 437468
  Synthetic oligonucleotide

SEQ ID NO: 594601 - DNA, 59 bp, Artificial; identical to SEQ ID NO: 16185
  Synthetic oligonucleotide

SEQ ID NO: 594602 - DNA, 55 bp, Artificial; identical to SEQ ID NO: 437474
  Synthetic oligonucleotide

SEQ ID NO: 594603 - DNA, 55 bp, Artificial; identical to SEQ ID NO: 437475
  Synthetic oligonucleotide

SEQ ID NO: 594604 - DNA, 55 bp, Artificial; identical to SEQ ID NO: 437479
  Synthetic oligonucleotide

SEQ ID NO: 594605 - DNA, 55 bp, Artificial; identical to SEQ ID NO: 437481
  Synthetic oligonucleotide

SEQ ID NO: 594606 - DNA, 55 bp, Artificial; identical to SEQ ID NO: 437482
  Synthetic oligonucleotide

SEQ ID NO: 594607 - DNA, 55 bp, Artificial; identical to SEQ ID NO: 437485
  Synthetic oligonucleotide

SEQ ID NO: 594608 - DNA, 60 bp, Artificial; identical to SEQ ID NO: 437487
  Synthetic oligonucleotide

SEQ ID NO: 594609 - DNA, 55 bp, Artificial; identical to SEQ ID NO: 437493
  Synthetic oligonucleotide

SEQ ID NO: 594610 - DNA, 55 bp, Artificial; identical to SEQ ID NO: 437495
  Synthetic oligonucleotide

SEQ ID NO: 594611 - DNA, 55 bp, Artificial; identical to SEQ ID NO: 437498
  Synthetic oligonucleotide

SEQ ID NO: 594612 - DNA, 60 bp, Artificial; identical to SEQ ID NO: 437499
  Synthetic oligonucleotide

SEQ ID NO: 594613 - DNA, 55 bp, Artificial; identical to SEQ ID NO: 14114
  Synthetic oligonucleotide

SEQ ID NO: 594614 - DNA, 57 bp, Artificial; identical to SEQ ID NO: 437515
  Synthetic oligonucleotide

SEQ ID NO: 594615 - DNA, 60 bp, Artificial; identical to SEQ ID NO: 437518
  Synthetic oligonucleotide

SEQ ID NO: 594616 - DNA, 55 bp, Artificial; identical to SEQ ID NO: 437520
  Synthetic oligonucleotide

SEQ ID NO: 594617 - DNA, 60 bp, Artificial; identical to SEQ ID NO: 14670
  Synthetic oligonucleotide

SEQ ID NO: 594618 - DNA, 55 bp, Artificial; identical to SEQ ID NO: 437525
  Synthetic oligonucleotide

SEQ ID NO: 594619 - DNA, 55 bp, Artificial; identical to SEQ ID NO: 437529
  Synthetic oligonucleotide

SEQ ID NO: 594620 - DNA, 55 bp, Artificial; identical to SEQ ID NO: 437533
  Synthetic oligonucleotide

SEQ ID NO: 594621 - DNA, 55 bp, Artificial; identical to SEQ ID NO: 437534
  Synthetic oligonucleotide

SEQ ID NO: 594622 - DNA, 53 bp, Artificial; identical to SEQ ID NO: 437535
  Synthetic oligonucleotide

SEQ ID NO: 594623 - DNA, 60 bp, Artificial; identical to SEQ ID NO: 437536
  Synthetic oligonucleotide

SEQ ID NO: 594624 - DNA, 55 bp, Artificial; identical to SEQ ID NO: 437539
  Synthetic oligonucleotide

SEQ ID NO: 594625 - DNA, 55 bp, Artificial; identical to SEQ ID NO: 437540
  Synthetic oligonucleotide

SEQ ID NO: 594626 - DNA, 60 bp, Artificial; identical to SEQ ID NO: 437542
  Synthetic oligonucleotide

SEQ ID NO: 594627 - DNA, 55 bp, Artificial; identical to SEQ ID NO: 437544
  Synthetic oligonucleotide

SEQ ID NO: 594628 - DNA, 57 bp, Artificial; identical to SEQ ID NO: 437545
  Synthetic oligonucleotide

SEQ ID NO: 594629 - DNA, 60 bp, Artificial; identical to SEQ ID NO: 437546
  Synthetic oligonucleotide

SEQ ID NO: 594630 - DNA, 55 bp, Artificial; identical to SEQ ID NO: 437547
  Synthetic oligonucleotide

SEQ ID NO: 594631 - DNA, 60 bp, Artificial; identical to SEQ ID NO: 437548
  Synthetic oligonucleotide

SEQ ID NO: 594632 - DNA, 55 bp, Artificial; identical to SEQ ID NO: 437549
  Synthetic oligonucleotide

SEQ ID NO: 594633 - DNA, 55 bp, Artificial; identical to SEQ ID NO: 437551
  Synthetic oligonucleotide

SEQ ID NO: 594634 - DNA, 55 bp, Artificial; identical to SEQ ID NO: 437553
  Synthetic oligonucleotide

SEQ ID NO: 594635 - DNA, 55 bp, Artificial; identical to SEQ ID NO: 437554
  Synthetic oligonucleotide

SEQ ID NO: 594636 - DNA, 57 bp, Artificial; identical to SEQ ID NO: 437557
  Synthetic oligonucleotide

SEQ ID NO: 594637 - DNA, 51 bp, Artificial; identical to SEQ ID NO: 437558
  Synthetic oligonucleotide

SEQ ID NO: 594638 - DNA, 56 bp, Artificial; identical to SEQ ID NO: 437566
  Synthetic oligonucleotide

SEQ ID NO: 594639 - DNA, 55 bp, Artificial; identical to SEQ ID NO: 437571
  Synthetic oligonucleotide

SEQ ID NO: 594640 - DNA, 60 bp, Artificial; identical to SEQ ID NO: 437579
  Synthetic oligonucleotide

SEQ ID NO: 594641 - DNA, 55 bp, Artificial; identical to SEQ ID NO: 437580
  Synthetic oligonucleotide

SEQ ID NO: 594642 - DNA, 60 bp, Artificial; identical to SEQ ID NO: 437584
  Synthetic oligonucleotide

SEQ ID NO: 594643 - DNA, 55 bp, Artificial; identical to SEQ ID NO: 437585
  Synthetic oligonucleotide

SEQ ID NO: 594644 - DNA, 55 bp, Artificial; identical to SEQ ID NO: 437586
  Synthetic oligonucleotide

SEQ ID NO: 594645 - DNA, 55 bp, Artificial; identical to SEQ ID NO: 437590
  Synthetic oligonucleotide

SEQ ID NO: 594646 - DNA, 60 bp, Artificial; identical to SEQ ID NO: 437593
  Synthetic oligonucleotide

SEQ ID NO: 594647 - DNA, 58 bp, Artificial; identical to SEQ ID NO: 437597
  Synthetic oligonucleotide

SEQ ID NO: 594648 - DNA, 55 bp, Artificial; identical to SEQ ID NO: 437598
  Synthetic oligonucleotide

SEQ ID NO: 594649 - DNA, 60 bp, Artificial; identical to SEQ ID NO: 437599
  Synthetic oligonucleotide

SEQ ID NO: 594650 - DNA, 53 bp, Artificial; identical to SEQ ID NO: 437608
  Synthetic oligonucleotide

SEQ ID NO: 594651 - DNA, 60 bp, Artificial; identical to SEQ ID NO: 437611
  Synthetic oligonucleotide

SEQ ID NO: 594652 - DNA, 52 bp, Artificial; identical to SEQ ID NO: 437619
  Synthetic oligonucleotide

SEQ ID NO: 594653 - DNA, 58 bp, Artificial; identical to SEQ ID NO: 16729
  Synthetic oligonucleotide

SEQ ID NO: 594654 - DNA, 50 bp, Artificial; identical to SEQ ID NO: 437620
  Synthetic oligonucleotide

SEQ ID NO: 594655 - DNA, 55 bp, Artificial; identical to SEQ ID NO: 437626
  Synthetic oligonucleotide

SEQ ID NO: 594656 - DNA, 55 bp, Artificial; identical to SEQ ID NO: 437629
  Synthetic oligonucleotide

SEQ ID NO: 594657 - DNA, 55 bp, Artificial; identical to SEQ ID NO: 437634
  Synthetic oligonucleotide

SEQ ID NO: 594658 - DNA, 52 bp, Artificial; identical to SEQ ID NO: 437638
  Synthetic oligonucleotide

SEQ ID NO: 594659 - DNA, 52 bp, Artificial; identical to SEQ ID NO: 437643
  Synthetic oligonucleotide

SEQ ID NO: 594660 - DNA, 55 bp, Artificial; identical to SEQ ID NO: 437647
  Synthetic oligonucleotide

SEQ ID NO: 594661 - DNA, 59 bp, Artificial; identical to SEQ ID NO: 437650
  Synthetic oligonucleotide

SEQ ID NO: 594662 - DNA, 60 bp, Artificial; identical to SEQ ID NO: 437652
  Synthetic oligonucleotide

SEQ ID NO: 594663 - DNA, 60 bp, Artificial; identical to SEQ ID NO: 437653
  Synthetic oligonucleotide

SEQ ID NO: 594664 - DNA, 55 bp, Artificial; identical to SEQ ID NO: 437655
  Synthetic oligonucleotide

SEQ ID NO: 594665 - DNA, 59 bp, Artificial; identical to SEQ ID NO: 437658
  Synthetic oligonucleotide

SEQ ID NO: 594666 - DNA, 55 bp, Artificial; identical to SEQ ID NO: 437659
  Synthetic oligonucleotide

SEQ ID NO: 594667 - DNA, 55 bp, Artificial; identical to SEQ ID NO: 437662
  Synthetic oligonucleotide

SEQ ID NO: 594668 - DNA, 56 bp, Artificial; identical to SEQ ID NO: 437663
  Synthetic oligonucleotide

SEQ ID NO: 594669 - DNA, 55 bp, Artificial; identical to SEQ ID NO: 437666
  Synthetic oligonucleotide

SEQ ID NO: 594670 - DNA, 60 bp, Artificial; identical to SEQ ID NO: 437668
  Synthetic oligonucleotide

SEQ ID NO: 594671 - DNA, 55 bp, Artificial; identical to SEQ ID NO: 437670
  Synthetic oligonucleotide

SEQ ID NO: 594672 - DNA, 55 bp, Artificial; identical to SEQ ID NO: 437671
  Synthetic oligonucleotide

SEQ ID NO: 594673 - DNA, 51 bp, Artificial; identical to SEQ ID NO: 17973
  Synthetic oligonucleotide

SEQ ID NO: 594674 - DNA, 60 bp, Artificial; identical to SEQ ID NO: 437673
  Synthetic oligonucleotide

SEQ ID NO: 594675 - DNA, 58 bp, Artificial; identical to SEQ ID NO: 437676
  Synthetic oligonucleotide

SEQ ID NO: 594676 - DNA, 52 bp, Artificial; identical to SEQ ID NO: 437680
  Synthetic oligonucleotide

SEQ ID NO: 594677 - DNA, 55 bp, Artificial; identical to SEQ ID NO: 437681
  Synthetic oligonucleotide

SEQ ID NO: 594678 - DNA, 55 bp, Artificial; identical to SEQ ID NO: 437682
  Synthetic oligonucleotide

SEQ ID NO: 594679 - DNA, 55 bp, Artificial; identical to SEQ ID NO: 437686
  Synthetic oligonucleotide

SEQ ID NO: 594680 - DNA, 55 bp, Artificial; identical to SEQ ID NO: 437687
  Synthetic oligonucleotide

SEQ ID NO: 594681 - DNA, 53 bp, Artificial; identical to SEQ ID NO: 437696
  Synthetic oligonucleotide

SEQ ID NO: 594682 - DNA, 55 bp, Artificial; identical to SEQ ID NO: 437699
  Synthetic oligonucleotide

SEQ ID NO: 594683 - DNA, 59 bp, Artificial; identical to SEQ ID NO: 437703
  Synthetic oligonucleotide

SEQ ID NO: 594684 - DNA, 55 bp, Artificial; identical to SEQ ID NO: 437707
  Synthetic oligonucleotide

SEQ ID NO: 594685 - DNA, 55 bp, Artificial; identical to SEQ ID NO: 437709
  Synthetic oligonucleotide

SEQ ID NO: 594686 - DNA, 57 bp, Artificial; identical to SEQ ID NO: 437711
  Synthetic oligonucleotide

SEQ ID NO: 594687 - DNA, 60 bp, Artificial; identical to SEQ ID NO: 437714
  Synthetic oligonucleotide

SEQ ID NO: 594688 - DNA, 55 bp, Artificial; identical to SEQ ID NO: 437715
  Synthetic oligonucleotide

SEQ ID NO: 594689 - DNA, 54 bp, Artificial; identical to SEQ ID NO: 437719
  Synthetic oligonucleotide

SEQ ID NO: 594690 - DNA, 58 bp, Artificial; identical to SEQ ID NO: 437720
  Synthetic oligonucleotide

SEQ ID NO: 594691 - DNA, 55 bp, Artificial; identical to SEQ ID NO: 437721
  Synthetic oligonucleotide

SEQ ID NO: 594692 - DNA, 60 bp, Artificial; identical to SEQ ID NO: 6128
  Synthetic oligonucleotide

SEQ ID NO: 594693 - DNA, 57 bp, Artificial; identical to SEQ ID NO: 437724
  Synthetic oligonucleotide

SEQ ID NO: 594694 - DNA, 60 bp, Artificial; identical to SEQ ID NO: 13438
  Synthetic oligonucleotide

SEQ ID NO: 594695 - DNA, 55 bp, Artificial; identical to SEQ ID NO: 437727
  Synthetic oligonucleotide

SEQ ID NO: 594696 - DNA, 55 bp, Artificial; identical to SEQ ID NO: 437731
  Synthetic oligonucleotide

SEQ ID NO: 594697 - DNA, 54 bp, Artificial; identical to SEQ ID NO: 437733
  Synthetic oligonucleotide

SEQ ID NO: 594698 - DNA, 54 bp, Artificial; identical to SEQ ID NO: 437736
  Synthetic oligonucleotide

SEQ ID NO: 594699 - DNA, 51 bp, Artificial; identical to SEQ ID NO: 437738
  Synthetic oligonucleotide

SEQ ID NO: 594700 - DNA, 50 bp, Artificial; identical to SEQ ID NO: 437739
  Synthetic oligonucleotide

SEQ ID NO: 594701 - DNA, 51 bp, Artificial; identical to SEQ ID NO: 437740
  Synthetic oligonucleotide

SEQ ID NO: 594702 - DNA, 56 bp, Artificial; identical to SEQ ID NO: 437741
  Synthetic oligonucleotide

SEQ ID NO: 594703 - DNA, 55 bp, Artificial; identical to SEQ ID NO: 437746
  Synthetic oligonucleotide

SEQ ID NO: 594704 - DNA, 59 bp, Artificial; identical to SEQ ID NO: 17184
  Synthetic oligonucleotide

SEQ ID NO: 594705 - DNA, 60 bp, Artificial; identical to SEQ ID NO: 437759
  Synthetic oligonucleotide

SEQ ID NO: 594706 - DNA, 55 bp, Artificial; identical to SEQ ID NO: 437763
  Synthetic oligonucleotide

SEQ ID NO: 594707 - DNA, 58 bp, Artificial; identical to SEQ ID NO: 437765
  Synthetic oligonucleotide

SEQ ID NO: 594708 - DNA, 57 bp, Artificial; identical to SEQ ID NO: 437766
  Synthetic oligonucleotide

SEQ ID NO: 594709 - DNA, 50 bp, Artificial; identical to SEQ ID NO: 437767
  Synthetic oligonucleotide

SEQ ID NO: 594710 - DNA, 58 bp, Artificial; identical to SEQ ID NO: 17371
  Synthetic oligonucleotide

SEQ ID NO: 594711 - DNA, 56 bp, Artificial; identical to SEQ ID NO: 437769
  Synthetic oligonucleotide

SEQ ID NO: 594712 - DNA, 59 bp, Artificial; identical to SEQ ID NO: 437770
  Synthetic oligonucleotide

SEQ ID NO: 594713 - DNA, 60 bp, Artificial; identical to SEQ ID NO: 437775
  Synthetic oligonucleotide

SEQ ID NO: 594714 - DNA, 51 bp, Artificial; identical to SEQ ID NO: 437777
  Synthetic oligonucleotide

SEQ ID NO: 594715 - DNA, 60 bp, Artificial; identical to SEQ ID NO: 437778
  Synthetic oligonucleotide

SEQ ID NO: 594716 - DNA, 55 bp, Artificial; identical to SEQ ID NO: 437782
  Synthetic oligonucleotide

SEQ ID NO: 594717 - DNA, 55 bp, Artificial; identical to SEQ ID NO: 437783
  Synthetic oligonucleotide

SEQ ID NO: 594718 - DNA, 60 bp, Artificial; identical to SEQ ID NO: 437785
  Synthetic oligonucleotide

SEQ ID NO: 594719 - DNA, 52 bp, Artificial; identical to SEQ ID NO: 437789
  Synthetic oligonucleotide

SEQ ID NO: 594720 - DNA, 56 bp, Artificial; identical to SEQ ID NO: 437790
  Synthetic oligonucleotide

SEQ ID NO: 594721 - DNA, 55 bp, Artificial; identical to SEQ ID NO: 437792
  Synthetic oligonucleotide

SEQ ID NO: 594722 - DNA, 55 bp, Artificial; identical to SEQ ID NO: 437793
  Synthetic oligonucleotide

SEQ ID NO: 594723 - DNA, 55 bp, Artificial; identical to SEQ ID NO: 437799
  Synthetic oligonucleotide

SEQ ID NO: 594724 - DNA, 57 bp, Artificial; identical to SEQ ID NO: 437801
  Synthetic oligonucleotide

SEQ ID NO: 594725 - DNA, 55 bp, Artificial; identical to SEQ ID NO: 437803
  Synthetic oligonucleotide

SEQ ID NO: 594726 - DNA, 52 bp, Artificial; identical to SEQ ID NO: 437806
  Synthetic oligonucleotide

SEQ ID NO: 594727 - DNA, 60 bp, Artificial; identical to SEQ ID NO: 437808
  Synthetic oligonucleotide

SEQ ID NO: 594728 - DNA, 51 bp, Artificial; identical to SEQ ID NO: 437810
  Synthetic oligonucleotide

SEQ ID NO: 594729 - DNA, 55 bp, Artificial; identical to SEQ ID NO: 437813
  Synthetic oligonucleotide

SEQ ID NO: 594730 - DNA, 55 bp, Artificial; identical to SEQ ID NO: 437816
  Synthetic oligonucleotide

SEQ ID NO: 594731 - DNA, 51 bp, Artificial; identical to SEQ ID NO: 437818
  Synthetic oligonucleotide

SEQ ID NO: 594732 - DNA, 60 bp, Artificial; identical to SEQ ID NO: 437824
  Synthetic oligonucleotide

SEQ ID NO: 594733 - DNA, 55 bp, Artificial; identical to SEQ ID NO: 437828
  Synthetic oligonucleotide

SEQ ID NO: 594734 - DNA, 52 bp, Artificial; identical to SEQ ID NO: 437829
  Synthetic oligonucleotide

SEQ ID NO: 594735 - DNA, 52 bp, Artificial; identical to SEQ ID NO: 12173
  Synthetic oligonucleotide

SEQ ID NO: 594736 - DNA, 57 bp, Artificial; identical to SEQ ID NO: 437837
  Synthetic oligonucleotide

SEQ ID NO: 594737 - DNA, 52 bp, Artificial; identical to SEQ ID NO: 437839
  Synthetic oligonucleotide

SEQ ID NO: 594738 - DNA, 55 bp, Artificial; identical to SEQ ID NO: 437840
  Synthetic oligonucleotide

SEQ ID NO: 594739 - DNA, 59 bp, Artificial; identical to SEQ ID NO: 437844
  Synthetic oligonucleotide

SEQ ID NO: 594740 - DNA, 60 bp, Artificial; identical to SEQ ID NO: 9111
  Synthetic oligonucleotide

SEQ ID NO: 594741 - DNA, 58 bp, Artificial; identical to SEQ ID NO: 437849
  Synthetic oligonucleotide

SEQ ID NO: 594742 - DNA, 58 bp, Artificial; identical to SEQ ID NO: 437853
  Synthetic oligonucleotide

SEQ ID NO: 594743 - DNA, 55 bp, Artificial; identical to SEQ ID NO: 437854
  Synthetic oligonucleotide

SEQ ID NO: 594744 - DNA, 53 bp, Artificial; identical to SEQ ID NO: 437855
  Synthetic oligonucleotide

SEQ ID NO: 594745 - DNA, 53 bp, Artificial; identical to SEQ ID NO: 437857
  Synthetic oligonucleotide

SEQ ID NO: 594746 - DNA, 52 bp, Artificial; identical to SEQ ID NO: 437858
  Synthetic oligonucleotide

SEQ ID NO: 594747 - DNA, 54 bp, Artificial; identical to SEQ ID NO: 437859
  Synthetic oligonucleotide

SEQ ID NO: 594748 - DNA, 55 bp, Artificial; identical to SEQ ID NO: 437861
  Synthetic oligonucleotide

SEQ ID NO: 594749 - DNA, 55 bp, Artificial; identical to SEQ ID NO: 437866
  Synthetic oligonucleotide

SEQ ID NO: 594750 - DNA, 55 bp, Artificial; identical to SEQ ID NO: 437867
  Synthetic oligonucleotide

SEQ ID NO: 594751 - DNA, 54 bp, Artificial; identical to SEQ ID NO: 437871
  Synthetic oligonucleotide

SEQ ID NO: 594752 - DNA, 59 bp, Artificial; identical to SEQ ID NO: 437874
  Synthetic oligonucleotide

SEQ ID NO: 594753 - DNA, 55 bp, Artificial; identical to SEQ ID NO: 437875
  Synthetic oligonucleotide

SEQ ID NO: 594754 - DNA, 59 bp, Artificial; identical to SEQ ID NO: 9977
  Synthetic oligonucleotide

SEQ ID NO: 594755 - DNA, 55 bp, Artificial; identical to SEQ ID NO: 437881
  Synthetic oligonucleotide

SEQ ID NO: 594756 - DNA, 50 bp, Artificial; identical to SEQ ID NO: 437882
  Synthetic oligonucleotide

SEQ ID NO: 594757 - DNA, 55 bp, Artificial; identical to SEQ ID NO: 437884
  Synthetic oligonucleotide

SEQ ID NO: 594758 - DNA, 60 bp, Artificial; identical to SEQ ID NO: 437885
  Synthetic oligonucleotide

SEQ ID NO: 594759 - DNA, 54 bp, Artificial; identical to SEQ ID NO: 437886
  Synthetic oligonucleotide

SEQ ID NO: 594760 - DNA, 56 bp, Artificial; identical to SEQ ID NO: 437887
  Synthetic oligonucleotide

SEQ ID NO: 594761 - DNA, 55 bp, Artificial; identical to SEQ ID NO: 437888
  Synthetic oligonucleotide

SEQ ID NO: 594762 - DNA, 58 bp, Artificial; identical to SEQ ID NO: 437900
  Synthetic oligonucleotide

SEQ ID NO: 594763 - DNA, 55 bp, Artificial; identical to SEQ ID NO: 437904
  Synthetic oligonucleotide

SEQ ID NO: 594764 - DNA, 60 bp, Artificial; identical to SEQ ID NO: 437905
  Synthetic oligonucleotide

SEQ ID NO: 594765 - DNA, 55 bp, Artificial; identical to SEQ ID NO: 437908
  Synthetic oligonucleotide

SEQ ID NO: 594766 - DNA, 60 bp, Artificial; identical to SEQ ID NO: 7599
  Synthetic oligonucleotide

SEQ ID NO: 594767 - DNA, 60 bp, Artificial; identical to SEQ ID NO: 437910
  Synthetic oligonucleotide

SEQ ID NO: 594768 - DNA, 60 bp, Artificial; identical to SEQ ID NO: 437911
  Synthetic oligonucleotide

SEQ ID NO: 594769 - DNA, 57 bp, Artificial; identical to SEQ ID NO: 437916
  Synthetic oligonucleotide

SEQ ID NO: 594770 - DNA, 60 bp, Artificial; identical to SEQ ID NO: 437918
  Synthetic oligonucleotide

SEQ ID NO: 594771 - DNA, 54 bp, Artificial; identical to SEQ ID NO: 14513
  Synthetic oligonucleotide

SEQ ID NO: 594772 - DNA, 60 bp, Artificial; identical to SEQ ID NO: 437920
  Synthetic oligonucleotide

SEQ ID NO: 594773 - DNA, 60 bp, Artificial; identical to SEQ ID NO: 437921
  Synthetic oligonucleotide

SEQ ID NO: 594774 - DNA, 60 bp, Artificial; identical to SEQ ID NO: 437926
  Synthetic oligonucleotide

SEQ ID NO: 594775 - DNA, 55 bp, Artificial; identical to SEQ ID NO: 437931
  Synthetic oligonucleotide

SEQ ID NO: 594776 - DNA, 60 bp, Artificial; identical to SEQ ID NO: 437932
  Synthetic oligonucleotide

SEQ ID NO: 594777 - DNA, 59 bp, Artificial; identical to SEQ ID NO: 437933
  Synthetic oligonucleotide

SEQ ID NO: 594778 - DNA, 55 bp, Artificial; identical to SEQ ID NO: 437942
  Synthetic oligonucleotide

SEQ ID NO: 594779 - DNA, 52 bp, Artificial; identical to SEQ ID NO: 437944
  Synthetic oligonucleotide

SEQ ID NO: 594780 - DNA, 55 bp, Artificial; identical to SEQ ID NO: 437945
  Synthetic oligonucleotide

SEQ ID NO: 594781 - DNA, 60 bp, Artificial; identical to SEQ ID NO: 437946
  Synthetic oligonucleotide

SEQ ID NO: 594782 - DNA, 50 bp, Artificial; identical to SEQ ID NO: 437949
  Synthetic oligonucleotide

SEQ ID NO: 594783 - DNA, 54 bp, Artificial; identical to SEQ ID NO: 7475
  Synthetic oligonucleotide

SEQ ID NO: 594784 - DNA, 55 bp, Artificial; identical to SEQ ID NO: 437957
  Synthetic oligonucleotide

SEQ ID NO: 594785 - DNA, 56 bp, Artificial; identical to SEQ ID NO: 437959
  Synthetic oligonucleotide

SEQ ID NO: 594786 - DNA, 60 bp, Artificial; identical to SEQ ID NO: 437970
  Synthetic oligonucleotide

SEQ ID NO: 594787 - DNA, 55 bp, Artificial; identical to SEQ ID NO: 437973
  Synthetic oligonucleotide

SEQ ID NO: 594788 - DNA, 54 bp, Artificial; identical to SEQ ID NO: 437974
  Synthetic oligonucleotide

SEQ ID NO: 594789 - DNA, 60 bp, Artificial; identical to SEQ ID NO: 437976
  Synthetic oligonucleotide

SEQ ID NO: 594790 - DNA, 55 bp, Artificial; identical to SEQ ID NO: 437977
  Synthetic oligonucleotide

SEQ ID NO: 594791 - DNA, 52 bp, Artificial; identical to SEQ ID NO: 437987
  Synthetic oligonucleotide

SEQ ID NO: 594792 - DNA, 50 bp, Artificial; identical to SEQ ID NO: 437988
  Synthetic oligonucleotide

SEQ ID NO: 594793 - DNA, 60 bp, Artificial; identical to SEQ ID NO: 437992
  Synthetic oligonucleotide

SEQ ID NO: 594794 - DNA, 57 bp, Artificial; identical to SEQ ID NO: 437993
  Synthetic oligonucleotide

SEQ ID NO: 594795 - DNA, 55 bp, Artificial; identical to SEQ ID NO: 437995
  Synthetic oligonucleotide

SEQ ID NO: 594796 - DNA, 55 bp, Artificial; identical to SEQ ID NO: 437999
  Synthetic oligonucleotide

SEQ ID NO: 594797 - DNA, 58 bp, Artificial; identical to SEQ ID NO: 438000
  Synthetic oligonucleotide

SEQ ID NO: 594798 - DNA, 50 bp, Artificial; identical to SEQ ID NO: 438001
  Synthetic oligonucleotide

SEQ ID NO: 594799 - DNA, 55 bp, Artificial; identical to SEQ ID NO: 438005
  Synthetic oligonucleotide

SEQ ID NO: 594800 - DNA, 60 bp, Artificial; identical to SEQ ID NO: 438007
  Synthetic oligonucleotide

SEQ ID NO: 594801 - DNA, 58 bp, Artificial; identical to SEQ ID NO: 438008
  Synthetic oligonucleotide

SEQ ID NO: 594802 - DNA, 55 bp, Artificial; identical to SEQ ID NO: 438009
  Synthetic oligonucleotide

SEQ ID NO: 594803 - DNA, 55 bp, Artificial; identical to SEQ ID NO: 438010
  Synthetic oligonucleotide

SEQ ID NO: 594804 - DNA, 55 bp, Artificial; identical to SEQ ID NO: 438013
  Synthetic oligonucleotide

SEQ ID NO: 594805 - DNA, 60 bp, Artificial; identical to SEQ ID NO: 438018
  Synthetic oligonucleotide

SEQ ID NO: 594806 - DNA, 55 bp, Artificial; identical to SEQ ID NO: 438019
  Synthetic oligonucleotide

SEQ ID NO: 594807 - DNA, 51 bp, Artificial; identical to SEQ ID NO: 438021
  Synthetic oligonucleotide

SEQ ID NO: 594808 - DNA, 55 bp, Artificial; identical to SEQ ID NO: 438022
  Synthetic oligonucleotide

SEQ ID NO: 594809 - DNA, 55 bp, Artificial; identical to SEQ ID NO: 438029
  Synthetic oligonucleotide

SEQ ID NO: 594810 - DNA, 60 bp, Artificial; identical to SEQ ID NO: 438031
  Synthetic oligonucleotide

SEQ ID NO: 594811 - DNA, 55 bp, Artificial; identical to SEQ ID NO: 438035
  Synthetic oligonucleotide

SEQ ID NO: 594812 - DNA, 59 bp, Artificial; identical to SEQ ID NO: 438037
  Synthetic oligonucleotide

SEQ ID NO: 594813 - DNA, 55 bp, Artificial; identical to SEQ ID NO: 438038
  Synthetic oligonucleotide

SEQ ID NO: 594814 - DNA, 55 bp, Artificial; identical to SEQ ID NO: 438039
  Synthetic oligonucleotide

SEQ ID NO: 594815 - DNA, 58 bp, Artificial; identical to SEQ ID NO: 438042
  Synthetic oligonucleotide

SEQ ID NO: 594816 - DNA, 60 bp, Artificial; identical to SEQ ID NO: 438044
  Synthetic oligonucleotide

SEQ ID NO: 594817 - DNA, 57 bp, Artificial; identical to SEQ ID NO: 438053
  Synthetic oligonucleotide

SEQ ID NO: 594818 - DNA, 55 bp, Artificial; identical to SEQ ID NO: 12577
  Synthetic oligonucleotide

SEQ ID NO: 594819 - DNA, 55 bp, Artificial; identical to SEQ ID NO: 438065
  Synthetic oligonucleotide

SEQ ID NO: 594820 - DNA, 59 bp, Artificial; identical to SEQ ID NO: 438071
  Synthetic oligonucleotide

SEQ ID NO: 594821 - DNA, 55 bp, Artificial; identical to SEQ ID NO: 12283
  Synthetic oligonucleotide

SEQ ID NO: 594822 - DNA, 55 bp, Artificial; identical to SEQ ID NO: 438080
  Synthetic oligonucleotide

SEQ ID NO: 594823 - DNA, 55 bp, Artificial; identical to SEQ ID NO: 438081
  Synthetic oligonucleotide

SEQ ID NO: 594824 - DNA, 55 bp, Artificial; identical to SEQ ID NO: 438085
  Synthetic oligonucleotide

SEQ ID NO: 594825 - DNA, 55 bp, Artificial; identical to SEQ ID NO: 438086
  Synthetic oligonucleotide

SEQ ID NO: 594826 - DNA, 60 bp, Artificial; identical to SEQ ID NO: 438094
  Synthetic oligonucleotide

SEQ ID NO: 594827 - DNA, 59 bp, Artificial; identical to SEQ ID NO: 438095
  Synthetic oligonucleotide

SEQ ID NO: 594828 - DNA, 60 bp, Artificial; identical to SEQ ID NO: 438097
  Synthetic oligonucleotide

SEQ ID NO: 594829 - DNA, 60 bp, Artificial; identical to SEQ ID NO: 438098
  Synthetic oligonucleotide

SEQ ID NO: 594830 - DNA, 52 bp, Artificial; identical to SEQ ID NO: 438100
  Synthetic oligonucleotide

SEQ ID NO: 594831 - DNA, 60 bp, Artificial; identical to SEQ ID NO: 438110
  Synthetic oligonucleotide

SEQ ID NO: 594832 - DNA, 55 bp, Artificial; identical to SEQ ID NO: 438118
  Synthetic oligonucleotide

SEQ ID NO: 594833 - DNA, 55 bp, Artificial; identical to SEQ ID NO: 438119
  Synthetic oligonucleotide

SEQ ID NO: 594834 - DNA, 56 bp, Artificial; identical to SEQ ID NO: 438123
  Synthetic oligonucleotide

SEQ ID NO: 594835 - DNA, 54 bp, Artificial; identical to SEQ ID NO: 438129
  Synthetic oligonucleotide

SEQ ID NO: 594836 - DNA, 55 bp, Artificial; identical to SEQ ID NO: 438138
  Synthetic oligonucleotide

SEQ ID NO: 594837 - DNA, 54 bp, Artificial; identical to SEQ ID NO: 438142
  Synthetic oligonucleotide

SEQ ID NO: 594838 - DNA, 60 bp, Artificial; identical to SEQ ID NO: 438145
  Synthetic oligonucleotide

SEQ ID NO: 594839 - DNA, 60 bp, Artificial; identical to SEQ ID NO: 438146
  Synthetic oligonucleotide

SEQ ID NO: 594840 - DNA, 55 bp, Artificial; identical to SEQ ID NO: 438147
  Synthetic oligonucleotide

SEQ ID NO: 594841 - DNA, 59 bp, Artificial; identical to SEQ ID NO: 438148
  Synthetic oligonucleotide

SEQ ID NO: 594842 - DNA, 55 bp, Artificial; identical to SEQ ID NO: 438150
  Synthetic oligonucleotide

SEQ ID NO: 594843 - DNA, 55 bp, Artificial; identical to SEQ ID NO: 438151
  Synthetic oligonucleotide

SEQ ID NO: 594844 - DNA, 55 bp, Artificial; identical to SEQ ID NO: 438152
  Synthetic oligonucleotide

SEQ ID NO: 594845 - DNA, 60 bp, Artificial; identical to SEQ ID NO: 438154
  Synthetic oligonucleotide

SEQ ID NO: 594846 - DNA, 57 bp, Artificial; identical to SEQ ID NO: 438156
  Synthetic oligonucleotide

SEQ ID NO: 594847 - DNA, 60 bp, Artificial; identical to SEQ ID NO: 438163
  Synthetic oligonucleotide

SEQ ID NO: 594848 - DNA, 60 bp, Artificial; identical to SEQ ID NO: 438166
  Synthetic oligonucleotide

SEQ ID NO: 594849 - DNA, 60 bp, Artificial; identical to SEQ ID NO: 438169
  Synthetic oligonucleotide

SEQ ID NO: 594850 - DNA, 55 bp, Artificial; identical to SEQ ID NO: 438171
  Synthetic oligonucleotide

SEQ ID NO: 594851 - DNA, 55 bp, Artificial; identical to SEQ ID NO: 438174
  Synthetic oligonucleotide

SEQ ID NO: 594852 - DNA, 50 bp, Artificial; identical to SEQ ID NO: 438175
  Synthetic oligonucleotide

SEQ ID NO: 594853 - DNA, 55 bp, Artificial; identical to SEQ ID NO: 438184
  Synthetic oligonucleotide

SEQ ID NO: 594854 - DNA, 60 bp, Artificial; identical to SEQ ID NO: 9144
  Synthetic oligonucleotide

SEQ ID NO: 594855 - DNA, 52 bp, Artificial; identical to SEQ ID NO: 438188
  Synthetic oligonucleotide

SEQ ID NO: 594856 - DNA, 55 bp, Artificial; identical to SEQ ID NO: 438192
  Synthetic oligonucleotide

SEQ ID NO: 594857 - DNA, 54 bp, Artificial; identical to SEQ ID NO: 438194
  Synthetic oligonucleotide

SEQ ID NO: 594858 - DNA, 55 bp, Artificial; identical to SEQ ID NO: 14025
  Synthetic oligonucleotide

SEQ ID NO: 594859 - DNA, 60 bp, Artificial; identical to SEQ ID NO: 438201
  Synthetic oligonucleotide

SEQ ID NO: 594860 - DNA, 54 bp, Artificial; identical to SEQ ID NO: 438204
  Synthetic oligonucleotide

SEQ ID NO: 594861 - DNA, 56 bp, Artificial; identical to SEQ ID NO: 438207
  Synthetic oligonucleotide

SEQ ID NO: 594862 - DNA, 51 bp, Artificial; identical to SEQ ID NO: 438214
  Synthetic oligonucleotide

SEQ ID NO: 594863 - DNA, 59 bp, Artificial; identical to SEQ ID NO: 438216
  Synthetic oligonucleotide

SEQ ID NO: 594864 - DNA, 55 bp, Artificial; identical to SEQ ID NO: 438218
  Synthetic oligonucleotide

SEQ ID NO: 594865 - DNA, 57 bp, Artificial; identical to SEQ ID NO: 438220
  Synthetic oligonucleotide

SEQ ID NO: 594866 - DNA, 55 bp, Artificial; identical to SEQ ID NO: 438225
  Synthetic oligonucleotide

SEQ ID NO: 594867 - DNA, 60 bp, Artificial; identical to SEQ ID NO: 438227
  Synthetic oligonucleotide

SEQ ID NO: 594868 - DNA, 58 bp, Artificial; identical to SEQ ID NO: 438229
  Synthetic oligonucleotide

SEQ ID NO: 594869 - DNA, 55 bp, Artificial; identical to SEQ ID NO: 438233
  Synthetic oligonucleotide

SEQ ID NO: 594870 - DNA, 56 bp, Artificial; identical to SEQ ID NO: 438234
  Synthetic oligonucleotide

SEQ ID NO: 594871 - DNA, 55 bp, Artificial; identical to SEQ ID NO: 438236
  Synthetic oligonucleotide

SEQ ID NO: 594872 - DNA, 50 bp, Artificial; identical to SEQ ID NO: 438237
  Synthetic oligonucleotide

SEQ ID NO: 594873 - DNA, 56 bp, Artificial; identical to SEQ ID NO: 438239
  Synthetic oligonucleotide

SEQ ID NO: 594874 - DNA, 55 bp, Artificial; identical to SEQ ID NO: 438240
  Synthetic oligonucleotide

SEQ ID NO: 594875 - DNA, 60 bp, Artificial; identical to SEQ ID NO: 438242
  Synthetic oligonucleotide

SEQ ID NO: 594876 - DNA, 55 bp, Artificial; identical to SEQ ID NO: 438243
  Synthetic oligonucleotide

SEQ ID NO: 594877 - DNA, 60 bp, Artificial; identical to SEQ ID NO: 438245
  Synthetic oligonucleotide

SEQ ID NO: 594878 - DNA, 59 bp, Artificial; identical to SEQ ID NO: 438250
  Synthetic oligonucleotide

SEQ ID NO: 594879 - DNA, 60 bp, Artificial; identical to SEQ ID NO: 438254
  Synthetic oligonucleotide

SEQ ID NO: 594880 - DNA, 60 bp, Artificial; identical to SEQ ID NO: 438255
  Synthetic oligonucleotide

SEQ ID NO: 594881 - DNA, 56 bp, Artificial; identical to SEQ ID NO: 438256
  Synthetic oligonucleotide

SEQ ID NO: 594882 - DNA, 50 bp, Artificial; identical to SEQ ID NO: 438260
  Synthetic oligonucleotide

SEQ ID NO: 594883 - DNA, 55 bp, Artificial; identical to SEQ ID NO: 438262
  Synthetic oligonucleotide

SEQ ID NO: 594884 - DNA, 60 bp, Artificial; identical to SEQ ID NO: 438263
  Synthetic oligonucleotide

SEQ ID NO: 594885 - DNA, 60 bp, Artificial; identical to SEQ ID NO: 438268
  Synthetic oligonucleotide

SEQ ID NO: 594886 - DNA, 59 bp, Artificial; identical to SEQ ID NO: 438273
  Synthetic oligonucleotide

SEQ ID NO: 594887 - DNA, 60 bp, Artificial; identical to SEQ ID NO: 438275
  Synthetic oligonucleotide

SEQ ID NO: 594888 - DNA, 60 bp, Artificial; identical to SEQ ID NO: 438277
  Synthetic oligonucleotide

SEQ ID NO: 594889 - DNA, 60 bp, Artificial; identical to SEQ ID NO: 438278
  Synthetic oligonucleotide

SEQ ID NO: 594890 - DNA, 58 bp, Artificial; identical to SEQ ID NO: 438282
  Synthetic oligonucleotide

SEQ ID NO: 594891 - DNA, 55 bp, Artificial; identical to SEQ ID NO: 438283
  Synthetic oligonucleotide

SEQ ID NO: 594892 - DNA, 55 bp, Artificial; identical to SEQ ID NO: 438285
  Synthetic oligonucleotide

SEQ ID NO: 594893 - DNA, 59 bp, Artificial; identical to SEQ ID NO: 438286
  Synthetic oligonucleotide

SEQ ID NO: 594894 - DNA, 54 bp, Artificial; identical to SEQ ID NO: 438290
  Synthetic oligonucleotide

SEQ ID NO: 594895 - DNA, 54 bp, Artificial; identical to SEQ ID NO: 438293
  Synthetic oligonucleotide

SEQ ID NO: 594896 - DNA, 60 bp, Artificial; identical to SEQ ID NO: 438296
  Synthetic oligonucleotide

SEQ ID NO: 594897 - DNA, 54 bp, Artificial; identical to SEQ ID NO: 438301
  Synthetic oligonucleotide

SEQ ID NO: 594898 - DNA, 52 bp, Artificial; identical to SEQ ID NO: 438308
  Synthetic oligonucleotide

SEQ ID NO: 594899 - DNA, 55 bp, Artificial; identical to SEQ ID NO: 438309
  Synthetic oligonucleotide

SEQ ID NO: 594900 - DNA, 60 bp, Artificial; identical to SEQ ID NO: 438318
  Synthetic oligonucleotide

SEQ ID NO: 594901 - DNA, 52 bp, Artificial; identical to SEQ ID NO: 438319
  Synthetic oligonucleotide

SEQ ID NO: 594902 - DNA, 55 bp, Artificial; identical to SEQ ID NO: 438322
  Synthetic oligonucleotide

SEQ ID NO: 594903 - DNA, 55 bp, Artificial; identical to SEQ ID NO: 438324
  Synthetic oligonucleotide

SEQ ID NO: 594904 - DNA, 55 bp, Artificial; identical to SEQ ID NO: 18452
  Synthetic oligonucleotide

SEQ ID NO: 594905 - DNA, 52 bp, Artificial; identical to SEQ ID NO: 438327
  Synthetic oligonucleotide

SEQ ID NO: 594906 - DNA, 52 bp, Artificial; identical to SEQ ID NO: 13583
  Synthetic oligonucleotide

SEQ ID NO: 594907 - DNA, 59 bp, Artificial; identical to SEQ ID NO: 438332
  Synthetic oligonucleotide

SEQ ID NO: 594908 - DNA, 56 bp, Artificial; identical to SEQ ID NO: 438338
  Synthetic oligonucleotide

SEQ ID NO: 594909 - DNA, 56 bp, Artificial; identical to SEQ ID NO: 438339
  Synthetic oligonucleotide

SEQ ID NO: 594910 - DNA, 54 bp, Artificial; identical to SEQ ID NO: 438342
  Synthetic oligonucleotide

SEQ ID NO: 594911 - DNA, 52 bp, Artificial; identical to SEQ ID NO: 438343
  Synthetic oligonucleotide

SEQ ID NO: 594912 - DNA, 55 bp, Artificial; identical to SEQ ID NO: 438347
  Synthetic oligonucleotide

SEQ ID NO: 594913 - DNA, 55 bp, Artificial; identical to SEQ ID NO: 438352
  Synthetic oligonucleotide

SEQ ID NO: 594914 - DNA, 55 bp, Artificial; identical to SEQ ID NO: 438353
  Synthetic oligonucleotide

SEQ ID NO: 594915 - DNA, 60 bp, Artificial; identical to SEQ ID NO: 6678
  Synthetic oligonucleotide

SEQ ID NO: 594916 - DNA, 55 bp, Artificial; identical to SEQ ID NO: 438360
  Synthetic oligonucleotide

SEQ ID NO: 594917 - DNA, 55 bp, Artificial; identical to SEQ ID NO: 438362
  Synthetic oligonucleotide

SEQ ID NO: 594918 - DNA, 60 bp, Artificial; identical to SEQ ID NO: 438365
  Synthetic oligonucleotide

SEQ ID NO: 594919 - DNA, 54 bp, Artificial; identical to SEQ ID NO: 438366
  Synthetic oligonucleotide

SEQ ID NO: 594920 - DNA, 52 bp, Artificial; identical to SEQ ID NO: 438367
  Synthetic oligonucleotide

SEQ ID NO: 594921 - DNA, 52 bp, Artificial; identical to SEQ ID NO: 8116
  Synthetic oligonucleotide

SEQ ID NO: 594922 - DNA, 52 bp, Artificial; identical to SEQ ID NO: 438368
  Synthetic oligonucleotide

SEQ ID NO: 594923 - DNA, 56 bp, Artificial; identical to SEQ ID NO: 438372
  Synthetic oligonucleotide

SEQ ID NO: 594924 - DNA, 57 bp, Artificial; identical to SEQ ID NO: 438373
  Synthetic oligonucleotide

SEQ ID NO: 594925 - DNA, 59 bp, Artificial; identical to SEQ ID NO: 438378
  Synthetic oligonucleotide

SEQ ID NO: 594926 - DNA, 53 bp, Artificial; identical to SEQ ID NO: 438380
  Synthetic oligonucleotide

SEQ ID NO: 594927 - DNA, 54 bp, Artificial; identical to SEQ ID NO: 438381
  Synthetic oligonucleotide

SEQ ID NO: 594928 - DNA, 56 bp, Artificial; identical to SEQ ID NO: 438388
  Synthetic oligonucleotide

SEQ ID NO: 594929 - DNA, 55 bp, Artificial; identical to SEQ ID NO: 438390
  Synthetic oligonucleotide

SEQ ID NO: 594930 - DNA, 56 bp, Artificial; identical to SEQ ID NO: 438394
  Synthetic oligonucleotide

SEQ ID NO: 594931 - DNA, 60 bp, Artificial; identical to SEQ ID NO: 438395
  Synthetic oligonucleotide

SEQ ID NO: 594932 - DNA, 53 bp, Artificial; identical to SEQ ID NO: 438396
  Synthetic oligonucleotide

SEQ ID NO: 594933 - DNA, 50 bp, Artificial; identical to SEQ ID NO: 438400
  Synthetic oligonucleotide

SEQ ID NO: 594934 - DNA, 52 bp, Artificial; identical to SEQ ID NO: 438402
  Synthetic oligonucleotide

SEQ ID NO: 594935 - DNA, 55 bp, Artificial; identical to SEQ ID NO: 438406
  Synthetic oligonucleotide

SEQ ID NO: 594936 - DNA, 50 bp, Artificial; identical to SEQ ID NO: 438411
  Synthetic oligonucleotide

SEQ ID NO: 594937 - DNA, 60 bp, Artificial; identical to SEQ ID NO: 438413
  Synthetic oligonucleotide

SEQ ID NO: 594938 - DNA, 60 bp, Artificial; identical to SEQ ID NO: 438414
  Synthetic oligonucleotide

SEQ ID NO: 594939 - DNA, 56 bp, Artificial; identical to SEQ ID NO: 19333
  Synthetic oligonucleotide

SEQ ID NO: 594940 - DNA, 54 bp, Artificial; identical to SEQ ID NO: 438417
  Synthetic oligonucleotide

SEQ ID NO: 594941 - DNA, 55 bp, Artificial; identical to SEQ ID NO: 438420
  Synthetic oligonucleotide

SEQ ID NO: 594942 - DNA, 54 bp, Artificial; identical to SEQ ID NO: 438421
  Synthetic oligonucleotide

SEQ ID NO: 594943 - DNA, 55 bp, Artificial; identical to SEQ ID NO: 438424
  Synthetic oligonucleotide

SEQ ID NO: 594944 - DNA, 52 bp, Artificial; identical to SEQ ID NO: 438425
  Synthetic oligonucleotide

SEQ ID NO: 594945 - DNA, 55 bp, Artificial; identical to SEQ ID NO: 438433
  Synthetic oligonucleotide

SEQ ID NO: 594946 - DNA, 60 bp, Artificial; identical to SEQ ID NO: 438434
  Synthetic oligonucleotide

SEQ ID NO: 594947 - DNA, 51 bp, Artificial; identical to SEQ ID NO: 438436
  Synthetic oligonucleotide

SEQ ID NO: 594948 - DNA, 52 bp, Artificial; identical to SEQ ID NO: 438438
  Synthetic oligonucleotide

SEQ ID NO: 594949 - DNA, 60 bp, Artificial; identical to SEQ ID NO: 8982
  Synthetic oligonucleotide

SEQ ID NO: 594950 - DNA, 59 bp, Artificial; identical to SEQ ID NO: 438441
  Synthetic oligonucleotide

SEQ ID NO: 594951 - DNA, 53 bp, Artificial; identical to SEQ ID NO: 17518
  Synthetic oligonucleotide

SEQ ID NO: 594952 - DNA, 55 bp, Artificial; identical to SEQ ID NO: 438445
  Synthetic oligonucleotide

SEQ ID NO: 594953 - DNA, 55 bp, Artificial; identical to SEQ ID NO: 438447
  Synthetic oligonucleotide

SEQ ID NO: 594954 - DNA, 60 bp, Artificial; identical to SEQ ID NO: 438450
  Synthetic oligonucleotide

SEQ ID NO: 594955 - DNA, 60 bp, Artificial; identical to SEQ ID NO: 438451
  Synthetic oligonucleotide

SEQ ID NO: 594956 - DNA, 60 bp, Artificial; identical to SEQ ID NO: 438453
  Synthetic oligonucleotide

SEQ ID NO: 594957 - DNA, 55 bp, Artificial; identical to SEQ ID NO: 438456
  Synthetic oligonucleotide

SEQ ID NO: 594958 - DNA, 55 bp, Artificial; identical to SEQ ID NO: 438465
  Synthetic oligonucleotide

SEQ ID NO: 594959 - DNA, 53 bp, Artificial; identical to SEQ ID NO: 438466
  Synthetic oligonucleotide

SEQ ID NO: 594960 - DNA, 56 bp, Artificial; identical to SEQ ID NO: 438467
  Synthetic oligonucleotide

SEQ ID NO: 594961 - DNA, 60 bp, Artificial; identical to SEQ ID NO: 438473
  Synthetic oligonucleotide

SEQ ID NO: 594962 - DNA, 51 bp, Artificial; identical to SEQ ID NO: 438477
  Synthetic oligonucleotide

SEQ ID NO: 594963 - DNA, 55 bp, Artificial; identical to SEQ ID NO: 438480
  Synthetic oligonucleotide

SEQ ID NO: 594964 - DNA, 55 bp, Artificial; identical to SEQ ID NO: 438481
  Synthetic oligonucleotide

SEQ ID NO: 594965 - DNA, 60 bp, Artificial; identical to SEQ ID NO: 438483
  Synthetic oligonucleotide

SEQ ID NO: 594966 - DNA, 60 bp, Artificial; identical to SEQ ID NO: 12676
  Synthetic oligonucleotide

SEQ ID NO: 594967 - DNA, 60 bp, Artificial; identical to SEQ ID NO: 438496
  Synthetic oligonucleotide

SEQ ID NO: 594968 - DNA, 60 bp, Artificial; identical to SEQ ID NO: 438497
  Synthetic oligonucleotide

SEQ ID NO: 594969 - DNA, 55 bp, Artificial; identical to SEQ ID NO: 438500
  Synthetic oligonucleotide

SEQ ID NO: 594970 - DNA, 55 bp, Artificial; identical to SEQ ID NO: 438503
  Synthetic oligonucleotide

SEQ ID NO: 594971 - DNA, 55 bp, Artificial; identical to SEQ ID NO: 438511
  Synthetic oligonucleotide

SEQ ID NO: 594972 - DNA, 53 bp, Artificial; identical to SEQ ID NO: 438515
  Synthetic oligonucleotide

SEQ ID NO: 594973 - DNA, 57 bp, Artificial; identical to SEQ ID NO: 438516
  Synthetic oligonucleotide

SEQ ID NO: 594974 - DNA, 60 bp, Artificial; identical to SEQ ID NO: 438517
  Synthetic oligonucleotide

SEQ ID NO: 594975 - DNA, 55 bp, Artificial; identical to SEQ ID NO: 438520
  Synthetic oligonucleotide

SEQ ID NO: 594976 - DNA, 55 bp, Artificial; identical to SEQ ID NO: 438522
  Synthetic oligonucleotide

SEQ ID NO: 594977 - DNA, 51 bp, Artificial; identical to SEQ ID NO: 438524
  Synthetic oligonucleotide

SEQ ID NO: 594978 - DNA, 60 bp, Artificial; identical to SEQ ID NO: 438530
  Synthetic oligonucleotide

SEQ ID NO: 594979 - DNA, 55 bp, Artificial; identical to SEQ ID NO: 438532
  Synthetic oligonucleotide

SEQ ID NO: 594980 - DNA, 58 bp, Artificial; identical to SEQ ID NO: 438533
  Synthetic oligonucleotide

SEQ ID NO: 594981 - DNA, 60 bp, Artificial; identical to SEQ ID NO: 438534
  Synthetic oligonucleotide

SEQ ID NO: 594982 - DNA, 56 bp, Artificial; identical to SEQ ID NO: 438536
  Synthetic oligonucleotide

SEQ ID NO: 594983 - DNA, 55 bp, Artificial; identical to SEQ ID NO: 438537
  Synthetic oligonucleotide

SEQ ID NO: 594984 - DNA, 52 bp, Artificial; identical to SEQ ID NO: 438538
  Synthetic oligonucleotide

SEQ ID NO: 594985 - DNA, 55 bp, Artificial; identical to SEQ ID NO: 438540
  Synthetic oligonucleotide

SEQ ID NO: 594986 - DNA, 55 bp, Artificial; identical to SEQ ID NO: 438541
  Synthetic oligonucleotide

SEQ ID NO: 594987 - DNA, 56 bp, Artificial; identical to SEQ ID NO: 19440
  Synthetic oligonucleotide

SEQ ID NO: 594988 - DNA, 55 bp, Artificial; identical to SEQ ID NO: 438545
  Synthetic oligonucleotide

SEQ ID NO: 594989 - DNA, 55 bp, Artificial; identical to SEQ ID NO: 438549
  Synthetic oligonucleotide

SEQ ID NO: 594990 - DNA, 55 bp, Artificial; identical to SEQ ID NO: 438554
  Synthetic oligonucleotide

SEQ ID NO: 594991 - DNA, 59 bp, Artificial; identical to SEQ ID NO: 438555
  Synthetic oligonucleotide

SEQ ID NO: 594992 - DNA, 59 bp, Artificial; identical to SEQ ID NO: 438558
  Synthetic oligonucleotide

SEQ ID NO: 594993 - DNA, 53 bp, Artificial; identical to SEQ ID NO: 438563
  Synthetic oligonucleotide

SEQ ID NO: 594994 - DNA, 55 bp, Artificial; identical to SEQ ID NO: 438565
  Synthetic oligonucleotide

SEQ ID NO: 594995 - DNA, 51 bp, Artificial; identical to SEQ ID NO: 438568
  Synthetic oligonucleotide

SEQ ID NO: 594996 - DNA, 54 bp, Artificial; identical to SEQ ID NO: 438571
  Synthetic oligonucleotide

SEQ ID NO: 594997 - DNA, 58 bp, Artificial; identical to SEQ ID NO: 438572
  Synthetic oligonucleotide

SEQ ID NO: 594998 - DNA, 55 bp, Artificial; identical to SEQ ID NO: 438573
  Synthetic oligonucleotide

SEQ ID NO: 594999 - DNA, 59 bp, Artificial; identical to SEQ ID NO: 438574
  Synthetic oligonucleotide

SEQ ID NO: 595000 - DNA, 60 bp, Artificial; identical to SEQ ID NO: 438575
  Synthetic oligonucleotide

SEQ ID NO: 595001 - DNA, 59 bp, Artificial; identical to SEQ ID NO: 438578
  Synthetic oligonucleotide

SEQ ID NO: 595002 - DNA, 55 bp, Artificial; identical to SEQ ID NO: 438580
  Synthetic oligonucleotide

SEQ ID NO: 595003 - DNA, 55 bp, Artificial; identical to SEQ ID NO: 438581
  Synthetic oligonucleotide

SEQ ID NO: 595004 - DNA, 55 bp, Artificial; identical to SEQ ID NO: 438582
  Synthetic oligonucleotide

SEQ ID NO: 595005 - DNA, 60 bp, Artificial; identical to SEQ ID NO: 438583
  Synthetic oligonucleotide

SEQ ID NO: 595006 - DNA, 60 bp, Artificial; identical to SEQ ID NO: 438585
  Synthetic oligonucleotide

SEQ ID NO: 595007 - DNA, 59 bp, Artificial; identical to SEQ ID NO: 17517
  Synthetic oligonucleotide

SEQ ID NO: 595008 - DNA, 59 bp, Artificial; identical to SEQ ID NO: 438588
  Synthetic oligonucleotide

SEQ ID NO: 595009 - DNA, 56 bp, Artificial; identical to SEQ ID NO: 438589
  Synthetic oligonucleotide

SEQ ID NO: 595010 - DNA, 55 bp, Artificial; identical to SEQ ID NO: 438591
  Synthetic oligonucleotide

SEQ ID NO: 595011 - DNA, 55 bp, Artificial; identical to SEQ ID NO: 438596
  Synthetic oligonucleotide

SEQ ID NO: 595012 - DNA, 55 bp, Artificial; identical to SEQ ID NO: 438598
  Synthetic oligonucleotide

SEQ ID NO: 595013 - DNA, 49 bp, Artificial; identical to SEQ ID NO: 438600
  Synthetic oligonucleotide

SEQ ID NO: 595014 - DNA, 60 bp, Artificial; identical to SEQ ID NO: 12213
  Synthetic oligonucleotide

SEQ ID NO: 595015 - DNA, 55 bp, Artificial; identical to SEQ ID NO: 438602
  Synthetic oligonucleotide

SEQ ID NO: 595016 - DNA, 50 bp, Artificial; identical to SEQ ID NO: 18013
  Synthetic oligonucleotide

SEQ ID NO: 595017 - DNA, 60 bp, Artificial; identical to SEQ ID NO: 438604
  Synthetic oligonucleotide

SEQ ID NO: 595018 - DNA, 55 bp, Artificial; identical to SEQ ID NO: 438606
  Synthetic oligonucleotide

SEQ ID NO: 595019 - DNA, 60 bp, Artificial; identical to SEQ ID NO: 438608
  Synthetic oligonucleotide

SEQ ID NO: 595020 - DNA, 57 bp, Artificial; identical to SEQ ID NO: 438613
  Synthetic oligonucleotide

SEQ ID NO: 595021 - DNA, 60 bp, Artificial; identical to SEQ ID NO: 438616
  Synthetic oligonucleotide

SEQ ID NO: 595022 - DNA, 52 bp, Artificial; identical to SEQ ID NO: 438617
  Synthetic oligonucleotide

SEQ ID NO: 595023 - DNA, 58 bp, Artificial; identical to SEQ ID NO: 438618
  Synthetic oligonucleotide

SEQ ID NO: 595024 - DNA, 53 bp, Artificial; identical to SEQ ID NO: 438620
  Synthetic oligonucleotide

SEQ ID NO: 595025 - DNA, 60 bp, Artificial; identical to SEQ ID NO: 438624
  Synthetic oligonucleotide

SEQ ID NO: 595026 - DNA, 60 bp, Artificial; identical to SEQ ID NO: 438625
  Synthetic oligonucleotide

SEQ ID NO: 595027 - DNA, 52 bp, Artificial; identical to SEQ ID NO: 438630
  Synthetic oligonucleotide

SEQ ID NO: 595028 - DNA, 55 bp, Artificial; identical to SEQ ID NO: 438631
  Synthetic oligonucleotide

SEQ ID NO: 595029 - DNA, 55 bp, Artificial; identical to SEQ ID NO: 438632
  Synthetic oligonucleotide

SEQ ID NO: 595030 - DNA, 55 bp, Artificial; identical to SEQ ID NO: 438634
  Synthetic oligonucleotide

SEQ ID NO: 595031 - DNA, 56 bp, Artificial; identical to SEQ ID NO: 438636
  Synthetic oligonucleotide

SEQ ID NO: 595032 - DNA, 60 bp, Artificial; identical to SEQ ID NO: 438637
  Synthetic oligonucleotide

SEQ ID NO: 595033 - DNA, 55 bp, Artificial; identical to SEQ ID NO: 438638
  Synthetic oligonucleotide

SEQ ID NO: 595034 - DNA, 55 bp, Artificial; identical to SEQ ID NO: 438639
  Synthetic oligonucleotide

SEQ ID NO: 595035 - DNA, 60 bp, Artificial; identical to SEQ ID NO: 438640
  Synthetic oligonucleotide

SEQ ID NO: 595036 - DNA, 58 bp, Artificial; identical to SEQ ID NO: 438642
  Synthetic oligonucleotide

SEQ ID NO: 595037 - DNA, 60 bp, Artificial; identical to SEQ ID NO: 438644
  Synthetic oligonucleotide

SEQ ID NO: 595038 - DNA, 55 bp, Artificial; identical to SEQ ID NO: 438647
  Synthetic oligonucleotide

SEQ ID NO: 595039 - DNA, 59 bp, Artificial; identical to SEQ ID NO: 438651
  Synthetic oligonucleotide

SEQ ID NO: 595040 - DNA, 60 bp, Artificial; identical to SEQ ID NO: 438652
  Synthetic oligonucleotide

SEQ ID NO: 595041 - DNA, 55 bp, Artificial; identical to SEQ ID NO: 438653
  Synthetic oligonucleotide

SEQ ID NO: 595042 - DNA, 60 bp, Artificial; identical to SEQ ID NO: 438655
  Synthetic oligonucleotide

SEQ ID NO: 595043 - DNA, 53 bp, Artificial; identical to SEQ ID NO: 438656
  Synthetic oligonucleotide

SEQ ID NO: 595044 - DNA, 50 bp, Artificial; identical to SEQ ID NO: 438662
  Synthetic oligonucleotide

SEQ ID NO: 595045 - DNA, 57 bp, Artificial; identical to SEQ ID NO: 438664
  Synthetic oligonucleotide

SEQ ID NO: 595046 - DNA, 60 bp, Artificial; identical to SEQ ID NO: 438666
  Synthetic oligonucleotide

SEQ ID NO: 595047 - DNA, 50 bp, Artificial; identical to SEQ ID NO: 438669
  Synthetic oligonucleotide

SEQ ID NO: 595048 - DNA, 55 bp, Artificial; identical to SEQ ID NO: 438671
  Synthetic oligonucleotide

SEQ ID NO: 595049 - DNA, 53 bp, Artificial; identical to SEQ ID NO: 438672
  Synthetic oligonucleotide

SEQ ID NO: 595050 - DNA, 55 bp, Artificial; identical to SEQ ID NO: 438673
  Synthetic oligonucleotide

SEQ ID NO: 595051 - DNA, 54 bp, Artificial; identical to SEQ ID NO: 438674
  Synthetic oligonucleotide

SEQ ID NO: 595052 - DNA, 54 bp, Artificial; identical to SEQ ID NO: 438676
  Synthetic oligonucleotide

SEQ ID NO: 595053 - DNA, 60 bp, Artificial; identical to SEQ ID NO: 438680
  Synthetic oligonucleotide

SEQ ID NO: 595054 - DNA, 60 bp, Artificial; identical to SEQ ID NO: 438683
  Synthetic oligonucleotide

SEQ ID NO: 595055 - DNA, 54 bp, Artificial; identical to SEQ ID NO: 18067
  Synthetic oligonucleotide

SEQ ID NO: 595056 - DNA, 55 bp, Artificial; identical to SEQ ID NO: 438689
  Synthetic oligonucleotide

SEQ ID NO: 595057 - DNA, 60 bp, Artificial; identical to SEQ ID NO: 438690
  Synthetic oligonucleotide

SEQ ID NO: 595058 - DNA, 50 bp, Artificial; identical to SEQ ID NO: 438691
  Synthetic oligonucleotide

SEQ ID NO: 595059 - DNA, 56 bp, Artificial; identical to SEQ ID NO: 438692
  Synthetic oligonucleotide

SEQ ID NO: 595060 - DNA, 56 bp, Artificial; identical to SEQ ID NO: 438693
  Synthetic oligonucleotide

SEQ ID NO: 595061 - DNA, 59 bp, Artificial; identical to SEQ ID NO: 438695
  Synthetic oligonucleotide

SEQ ID NO: 595062 - DNA, 60 bp, Artificial; identical to SEQ ID NO: 438697
  Synthetic oligonucleotide

SEQ ID NO: 595063 - DNA, 60 bp, Artificial; identical to SEQ ID NO: 438698
  Synthetic oligonucleotide

SEQ ID NO: 595064 - DNA, 60 bp, Artificial; identical to SEQ ID NO: 438704
  Synthetic oligonucleotide

SEQ ID NO: 595065 - DNA, 57 bp, Artificial; identical to SEQ ID NO: 438705
  Synthetic oligonucleotide

SEQ ID NO: 595066 - DNA, 55 bp, Artificial; identical to SEQ ID NO: 438708
  Synthetic oligonucleotide

SEQ ID NO: 595067 - DNA, 58 bp, Artificial; identical to SEQ ID NO: 438709
  Synthetic oligonucleotide

SEQ ID NO: 595068 - DNA, 55 bp, Artificial; identical to SEQ ID NO: 438710
  Synthetic oligonucleotide

SEQ ID NO: 595069 - DNA, 60 bp, Artificial; identical to SEQ ID NO: 438716
  Synthetic oligonucleotide

SEQ ID NO: 595070 - DNA, 60 bp, Artificial; identical to SEQ ID NO: 7761
  Synthetic oligonucleotide

SEQ ID NO: 595071 - DNA, 53 bp, Artificial; identical to SEQ ID NO: 438720
  Synthetic oligonucleotide

SEQ ID NO: 595072 - DNA, 55 bp, Artificial; identical to SEQ ID NO: 438726
  Synthetic oligonucleotide

SEQ ID NO: 595073 - DNA, 60 bp, Artificial; identical to SEQ ID NO: 438727
  Synthetic oligonucleotide

SEQ ID NO: 595074 - DNA, 60 bp, Artificial; identical to SEQ ID NO: 438730
  Synthetic oligonucleotide

SEQ ID NO: 595075 - DNA, 60 bp, Artificial; identical to SEQ ID NO: 438731
  Synthetic oligonucleotide

SEQ ID NO: 595076 - DNA, 55 bp, Artificial; identical to SEQ ID NO: 438734
  Synthetic oligonucleotide

SEQ ID NO: 595077 - DNA, 60 bp, Artificial; identical to SEQ ID NO: 438736
  Synthetic oligonucleotide

SEQ ID NO: 595078 - DNA, 51 bp, Artificial; identical to SEQ ID NO: 438737
  Synthetic oligonucleotide

SEQ ID NO: 595079 - DNA, 57 bp, Artificial; identical to SEQ ID NO: 438739
  Synthetic oligonucleotide

SEQ ID NO: 595080 - DNA, 58 bp, Artificial; identical to SEQ ID NO: 438741
  Synthetic oligonucleotide

SEQ ID NO: 595081 - DNA, 60 bp, Artificial; identical to SEQ ID NO: 438742
  Synthetic oligonucleotide

SEQ ID NO: 595082 - DNA, 60 bp, Artificial; identical to SEQ ID NO: 438743
  Synthetic oligonucleotide

SEQ ID NO: 595083 - DNA, 60 bp, Artificial; identical to SEQ ID NO: 438744
  Synthetic oligonucleotide

SEQ ID NO: 595084 - DNA, 60 bp, Artificial; identical to SEQ ID NO: 438745
  Synthetic oligonucleotide

SEQ ID NO: 595085 - DNA, 60 bp, Artificial; identical to SEQ ID NO: 438747
  Synthetic oligonucleotide

SEQ ID NO: 595086 - DNA, 55 bp, Artificial; identical to SEQ ID NO: 438748
  Synthetic oligonucleotide

SEQ ID NO: 595087 - DNA, 60 bp, Artificial; identical to SEQ ID NO: 438752
  Synthetic oligonucleotide

SEQ ID NO: 595088 - DNA, 51 bp, Artificial; identical to SEQ ID NO: 438754
  Synthetic oligonucleotide

SEQ ID NO: 595089 - DNA, 50 bp, Artificial; identical to SEQ ID NO: 438755
  Synthetic oligonucleotide

SEQ ID NO: 595090 - DNA, 54 bp, Artificial; identical to SEQ ID NO: 438757
  Synthetic oligonucleotide

SEQ ID NO: 595091 - DNA, 54 bp, Artificial; identical to SEQ ID NO: 438758
  Synthetic oligonucleotide

SEQ ID NO: 595092 - DNA, 55 bp, Artificial; identical to SEQ ID NO: 438759
  Synthetic oligonucleotide

SEQ ID NO: 595093 - DNA, 55 bp, Artificial; identical to SEQ ID NO: 438762
  Synthetic oligonucleotide

SEQ ID NO: 595094 - DNA, 60 bp, Artificial; identical to SEQ ID NO: 438763
  Synthetic oligonucleotide

SEQ ID NO: 595095 - DNA, 58 bp, Artificial; identical to SEQ ID NO: 438765
  Synthetic oligonucleotide

SEQ ID NO: 595096 - DNA, 60 bp, Artificial; identical to SEQ ID NO: 438766
  Synthetic oligonucleotide

SEQ ID NO: 595097 - DNA, 60 bp, Artificial; identical to SEQ ID NO: 438773
  Synthetic oligonucleotide

SEQ ID NO: 595098 - DNA, 56 bp, Artificial; identical to SEQ ID NO: 438774
  Synthetic oligonucleotide

SEQ ID NO: 595099 - DNA, 55 bp, Artificial; identical to SEQ ID NO: 438775
  Synthetic oligonucleotide

SEQ ID NO: 595100 - DNA, 55 bp, Artificial; identical to SEQ ID NO: 438778
  Synthetic oligonucleotide

SEQ ID NO: 595101 - DNA, 55 bp, Artificial; identical to SEQ ID NO: 438779
  Synthetic oligonucleotide

SEQ ID NO: 595102 - DNA, 51 bp, Artificial; identical to SEQ ID NO: 438785
  Synthetic oligonucleotide

SEQ ID NO: 595103 - DNA, 55 bp, Artificial; identical to SEQ ID NO: 438787
  Synthetic oligonucleotide

SEQ ID NO: 595104 - DNA, 60 bp, Artificial; identical to SEQ ID NO: 438788
  Synthetic oligonucleotide

SEQ ID NO: 595105 - DNA, 55 bp, Artificial; identical to SEQ ID NO: 438789
  Synthetic oligonucleotide

SEQ ID NO: 595106 - DNA, 57 bp, Artificial; identical to SEQ ID NO: 438790
  Synthetic oligonucleotide

SEQ ID NO: 595107 - DNA, 60 bp, Artificial; identical to SEQ ID NO: 438795
  Synthetic oligonucleotide

SEQ ID NO: 595108 - DNA, 59 bp, Artificial; identical to SEQ ID NO: 438799
  Synthetic oligonucleotide

SEQ ID NO: 595109 - DNA, 53 bp, Artificial; identical to SEQ ID NO: 438804
  Synthetic oligonucleotide

SEQ ID NO: 595110 - DNA, 53 bp, Artificial; identical to SEQ ID NO: 438805
  Synthetic oligonucleotide

SEQ ID NO: 595111 - DNA, 58 bp, Artificial; identical to SEQ ID NO: 438807
  Synthetic oligonucleotide

SEQ ID NO: 595112 - DNA, 58 bp, Artificial; identical to SEQ ID NO: 438808
  Synthetic oligonucleotide

SEQ ID NO: 595113 - DNA, 57 bp, Artificial; identical to SEQ ID NO: 438814
  Synthetic oligonucleotide

SEQ ID NO: 595114 - DNA, 58 bp, Artificial; identical to SEQ ID NO: 438815
  Synthetic oligonucleotide

SEQ ID NO: 595115 - DNA, 52 bp, Artificial; identical to SEQ ID NO: 438816
  Synthetic oligonucleotide

SEQ ID NO: 595116 - DNA, 55 bp, Artificial; identical to SEQ ID NO: 438823
  Synthetic oligonucleotide

SEQ ID NO: 595117 - DNA, 56 bp, Artificial; identical to SEQ ID NO: 438824
  Synthetic oligonucleotide

SEQ ID NO: 595118 - DNA, 58 bp, Artificial; identical to SEQ ID NO: 438826
  Synthetic oligonucleotide

SEQ ID NO: 595119 - DNA, 60 bp, Artificial; identical to SEQ ID NO: 438827
  Synthetic oligonucleotide

SEQ ID NO: 595120 - DNA, 60 bp, Artificial; identical to SEQ ID NO: 438828
  Synthetic oligonucleotide

SEQ ID NO: 595121 - DNA, 55 bp, Artificial; identical to SEQ ID NO: 438834
  Synthetic oligonucleotide

SEQ ID NO: 595122 - DNA, 54 bp, Artificial; identical to SEQ ID NO: 16956
  Synthetic oligonucleotide

SEQ ID NO: 595123 - DNA, 55 bp, Artificial; identical to SEQ ID NO: 438836
  Synthetic oligonucleotide

SEQ ID NO: 595124 - DNA, 60 bp, Artificial; identical to SEQ ID NO: 438838
  Synthetic oligonucleotide

SEQ ID NO: 595125 - DNA, 60 bp, Artificial; identical to SEQ ID NO: 438840
  Synthetic oligonucleotide

SEQ ID NO: 595126 - DNA, 60 bp, Artificial; identical to SEQ ID NO: 438843
  Synthetic oligonucleotide

SEQ ID NO: 595127 - DNA, 60 bp, Artificial; identical to SEQ ID NO: 438853
  Synthetic oligonucleotide

SEQ ID NO: 595128 - DNA, 60 bp, Artificial; identical to SEQ ID NO: 438854
  Synthetic oligonucleotide

SEQ ID NO: 595129 - DNA, 55 bp, Artificial; identical to SEQ ID NO: 438856
  Synthetic oligonucleotide

SEQ ID NO: 595130 - DNA, 55 bp, Artificial; identical to SEQ ID NO: 438857
  Synthetic oligonucleotide

SEQ ID NO: 595131 - DNA, 55 bp, Artificial; identical to SEQ ID NO: 438858
  Synthetic oligonucleotide

SEQ ID NO: 595132 - DNA, 60 bp, Artificial; identical to SEQ ID NO: 438862
  Synthetic oligonucleotide

SEQ ID NO: 595133 - DNA, 56 bp, Artificial; identical to SEQ ID NO: 438865
  Synthetic oligonucleotide

SEQ ID NO: 595134 - DNA, 54 bp, Artificial; identical to SEQ ID NO: 438866
  Synthetic oligonucleotide

SEQ ID NO: 595135 - DNA, 55 bp, Artificial; identical to SEQ ID NO: 438870
  Synthetic oligonucleotide

SEQ ID NO: 595136 - DNA, 55 bp, Artificial; identical to SEQ ID NO: 438871
  Synthetic oligonucleotide

SEQ ID NO: 595137 - DNA, 58 bp, Artificial; identical to SEQ ID NO: 438872
  Synthetic oligonucleotide

SEQ ID NO: 595138 - DNA, 55 bp, Artificial; identical to SEQ ID NO: 438873
  Synthetic oligonucleotide

SEQ ID NO: 595139 - DNA, 58 bp, Artificial; identical to SEQ ID NO: 17138
  Synthetic oligonucleotide

SEQ ID NO: 595140 - DNA, 55 bp, Artificial; identical to SEQ ID NO: 438875
  Synthetic oligonucleotide

SEQ ID NO: 595141 - DNA, 52 bp, Artificial; identical to SEQ ID NO: 438876
  Synthetic oligonucleotide

SEQ ID NO: 595142 - DNA, 58 bp, Artificial; identical to SEQ ID NO: 438880
  Synthetic oligonucleotide

SEQ ID NO: 595143 - DNA, 60 bp, Artificial; identical to SEQ ID NO: 438884
  Synthetic oligonucleotide

SEQ ID NO: 595144 - DNA, 60 bp, Artificial; identical to SEQ ID NO: 438886
  Synthetic oligonucleotide

SEQ ID NO: 595145 - DNA, 55 bp, Artificial; identical to SEQ ID NO: 438888
  Synthetic oligonucleotide

SEQ ID NO: 595146 - DNA, 57 bp, Artificial; identical to SEQ ID NO: 438889
  Synthetic oligonucleotide

SEQ ID NO: 595147 - DNA, 60 bp, Artificial; identical to SEQ ID NO: 438890
  Synthetic oligonucleotide

SEQ ID NO: 595148 - DNA, 57 bp, Artificial; identical to SEQ ID NO: 438891
  Synthetic oligonucleotide

SEQ ID NO: 595149 - DNA, 58 bp, Artificial; identical to SEQ ID NO: 17387
  Synthetic oligonucleotide

SEQ ID NO: 595150 - DNA, 55 bp, Artificial; identical to SEQ ID NO: 438893
  Synthetic oligonucleotide

SEQ ID NO: 595151 - DNA, 60 bp, Artificial; identical to SEQ ID NO: 438894
  Synthetic oligonucleotide

SEQ ID NO: 595152 - DNA, 55 bp, Artificial; identical to SEQ ID NO: 438898
  Synthetic oligonucleotide

SEQ ID NO: 595153 - DNA, 54 bp, Artificial; identical to SEQ ID NO: 438900
  Synthetic oligonucleotide

SEQ ID NO: 595154 - DNA, 57 bp, Artificial; identical to SEQ ID NO: 438901
  Synthetic oligonucleotide

SEQ ID NO: 595155 - DNA, 59 bp, Artificial; identical to SEQ ID NO: 438903
  Synthetic oligonucleotide

SEQ ID NO: 595156 - DNA, 55 bp, Artificial; identical to SEQ ID NO: 438905
  Synthetic oligonucleotide

SEQ ID NO: 595157 - DNA, 59 bp, Artificial; identical to SEQ ID NO: 20495
  Synthetic oligonucleotide

SEQ ID NO: 595158 - DNA, 59 bp, Artificial; identical to SEQ ID NO: 438908
  Synthetic oligonucleotide

SEQ ID NO: 595159 - DNA, 60 bp, Artificial; identical to SEQ ID NO: 438909
  Synthetic oligonucleotide

SEQ ID NO: 595160 - DNA, 59 bp, Artificial; identical to SEQ ID NO: 438911
  Synthetic oligonucleotide

SEQ ID NO: 595161 - DNA, 53 bp, Artificial; identical to SEQ ID NO: 438913
  Synthetic oligonucleotide

SEQ ID NO: 595162 - DNA, 60 bp, Artificial; identical to SEQ ID NO: 438917
  Synthetic oligonucleotide

SEQ ID NO: 595163 - DNA, 56 bp, Artificial; identical to SEQ ID NO: 438920
  Synthetic oligonucleotide

SEQ ID NO: 595164 - DNA, 60 bp, Artificial; identical to SEQ ID NO: 438923
  Synthetic oligonucleotide

SEQ ID NO: 595165 - DNA, 55 bp, Artificial; identical to SEQ ID NO: 438934
  Synthetic oligonucleotide

SEQ ID NO: 595166 - DNA, 55 bp, Artificial; identical to SEQ ID NO: 438936
  Synthetic oligonucleotide

SEQ ID NO: 595167 - DNA, 56 bp, Artificial; identical to SEQ ID NO: 438937
  Synthetic oligonucleotide

SEQ ID NO: 595168 - DNA, 60 bp, Artificial; identical to SEQ ID NO: 438939
  Synthetic oligonucleotide

SEQ ID NO: 595169 - DNA, 51 bp, Artificial; identical to SEQ ID NO: 5979
  Synthetic oligonucleotide

SEQ ID NO: 595170 - DNA, 59 bp, Artificial; identical to SEQ ID NO: 438943
  Synthetic oligonucleotide

SEQ ID NO: 595171 - DNA, 58 bp, Artificial; identical to SEQ ID NO: 438945
  Synthetic oligonucleotide

SEQ ID NO: 595172 - DNA, 58 bp, Artificial; identical to SEQ ID NO: 438954
  Synthetic oligonucleotide

SEQ ID NO: 595173 - DNA, 55 bp, Artificial; identical to SEQ ID NO: 438959
  Synthetic oligonucleotide

SEQ ID NO: 595174 - DNA, 60 bp, Artificial; identical to SEQ ID NO: 438960
  Synthetic oligonucleotide

SEQ ID NO: 595175 - DNA, 51 bp, Artificial; identical to SEQ ID NO: 438962
  Synthetic oligonucleotide

SEQ ID NO: 595176 - DNA, 55 bp, Artificial; identical to SEQ ID NO: 438964
  Synthetic oligonucleotide

SEQ ID NO: 595177 - DNA, 60 bp, Artificial; identical to SEQ ID NO: 438965
  Synthetic oligonucleotide

SEQ ID NO: 595178 - DNA, 58 bp, Artificial; identical to SEQ ID NO: 438966
  Synthetic oligonucleotide

SEQ ID NO: 595179 - DNA, 60 bp, Artificial; identical to SEQ ID NO: 438967
  Synthetic oligonucleotide

SEQ ID NO: 595180 - DNA, 57 bp, Artificial; identical to SEQ ID NO: 438968
  Synthetic oligonucleotide

SEQ ID NO: 595181 - DNA, 60 bp, Artificial; identical to SEQ ID NO: 438970
  Synthetic oligonucleotide

SEQ ID NO: 595182 - DNA, 55 bp, Artificial; identical to SEQ ID NO: 438972
  Synthetic oligonucleotide

SEQ ID NO: 595183 - DNA, 57 bp, Artificial; identical to SEQ ID NO: 438974
  Synthetic oligonucleotide

SEQ ID NO: 595184 - DNA, 60 bp, Artificial; identical to SEQ ID NO: 438979
  Synthetic oligonucleotide

SEQ ID NO: 595185 - DNA, 55 bp, Artificial; identical to SEQ ID NO: 438980
  Synthetic oligonucleotide

SEQ ID NO: 595186 - DNA, 54 bp, Artificial; identical to SEQ ID NO: 438983
  Synthetic oligonucleotide

SEQ ID NO: 595187 - DNA, 50 bp, Artificial; identical to SEQ ID NO: 438985
  Synthetic oligonucleotide

SEQ ID NO: 595188 - DNA, 58 bp, Artificial; identical to SEQ ID NO: 438990
  Synthetic oligonucleotide

SEQ ID NO: 595189 - DNA, 60 bp, Artificial; identical to SEQ ID NO: 438991
  Synthetic oligonucleotide

SEQ ID NO: 595190 - DNA, 55 bp, Artificial; identical to SEQ ID NO: 438992
  Synthetic oligonucleotide

SEQ ID NO: 595191 - DNA, 59 bp, Artificial; identical to SEQ ID NO: 438993
  Synthetic oligonucleotide

SEQ ID NO: 595192 - DNA, 50 bp, Artificial; identical to SEQ ID NO: 438999
  Synthetic oligonucleotide

SEQ ID NO: 595193 - DNA, 60 bp, Artificial; identical to SEQ ID NO: 439003
  Synthetic oligonucleotide

SEQ ID NO: 595194 - DNA, 60 bp, Artificial; identical to SEQ ID NO: 439004
  Synthetic oligonucleotide

SEQ ID NO: 595195 - DNA, 60 bp, Artificial; identical to SEQ ID NO: 439009
  Synthetic oligonucleotide

SEQ ID NO: 595196 - DNA, 55 bp, Artificial; identical to SEQ ID NO: 439010
  Synthetic oligonucleotide

SEQ ID NO: 595197 - DNA, 60 bp, Artificial; identical to SEQ ID NO: 439013
  Synthetic oligonucleotide

SEQ ID NO: 595198 - DNA, 52 bp, Artificial; identical to SEQ ID NO: 439016
  Synthetic oligonucleotide

SEQ ID NO: 595199 - DNA, 56 bp, Artificial; identical to SEQ ID NO: 439017
  Synthetic oligonucleotide

SEQ ID NO: 595200 - DNA, 58 bp, Artificial; identical to SEQ ID NO: 439021
  Synthetic oligonucleotide

SEQ ID NO: 595201 - DNA, 60 bp, Artificial; identical to SEQ ID NO: 439024
  Synthetic oligonucleotide

SEQ ID NO: 595202 - DNA, 51 bp, Artificial; identical to SEQ ID NO: 439025
  Synthetic oligonucleotide

SEQ ID NO: 595203 - DNA, 57 bp, Artificial; identical to SEQ ID NO: 439026
  Synthetic oligonucleotide

SEQ ID NO: 595204 - DNA, 60 bp, Artificial; identical to SEQ ID NO: 439028
  Synthetic oligonucleotide

SEQ ID NO: 595205 - DNA, 55 bp, Artificial; identical to SEQ ID NO: 439029
  Synthetic oligonucleotide

SEQ ID NO: 595206 - DNA, 60 bp, Artificial; identical to SEQ ID NO: 439032
  Synthetic oligonucleotide

SEQ ID NO: 595207 - DNA, 55 bp, Artificial; identical to SEQ ID NO: 439033
  Synthetic oligonucleotide

SEQ ID NO: 595208 - DNA, 55 bp, Artificial; identical to SEQ ID NO: 439034
  Synthetic oligonucleotide

SEQ ID NO: 595209 - DNA, 55 bp, Artificial; identical to SEQ ID NO: 439035
  Synthetic oligonucleotide

SEQ ID NO: 595210 - DNA, 54 bp, Artificial; identical to SEQ ID NO: 439038
  Synthetic oligonucleotide

SEQ ID NO: 595211 - DNA, 55 bp, Artificial; identical to SEQ ID NO: 439040
  Synthetic oligonucleotide

SEQ ID NO: 595212 - DNA, 55 bp, Artificial; identical to SEQ ID NO: 439043
  Synthetic oligonucleotide

SEQ ID NO: 595213 - DNA, 53 bp, Artificial; identical to SEQ ID NO: 439048
  Synthetic oligonucleotide

SEQ ID NO: 595214 - DNA, 55 bp, Artificial; identical to SEQ ID NO: 439050
  Synthetic oligonucleotide

SEQ ID NO: 595215 - DNA, 60 bp, Artificial; identical to SEQ ID NO: 439051
  Synthetic oligonucleotide

SEQ ID NO: 595216 - DNA, 55 bp, Artificial; identical to SEQ ID NO: 439056
  Synthetic oligonucleotide

SEQ ID NO: 595217 - DNA, 60 bp, Artificial; identical to SEQ ID NO: 439058
  Synthetic oligonucleotide

SEQ ID NO: 595218 - DNA, 60 bp, Artificial; identical to SEQ ID NO: 439059
  Synthetic oligonucleotide

SEQ ID NO: 595219 - DNA, 58 bp, Artificial; identical to SEQ ID NO: 439061
  Synthetic oligonucleotide

SEQ ID NO: 595220 - DNA, 60 bp, Artificial; identical to SEQ ID NO: 439064
  Synthetic oligonucleotide

SEQ ID NO: 595221 - DNA, 60 bp, Artificial; identical to SEQ ID NO: 439065
  Synthetic oligonucleotide

SEQ ID NO: 595222 - DNA, 60 bp, Artificial; identical to SEQ ID NO: 6588
  Synthetic oligonucleotide

SEQ ID NO: 595223 - DNA, 56 bp, Artificial; identical to SEQ ID NO: 439068
  Synthetic oligonucleotide

SEQ ID NO: 595224 - DNA, 60 bp, Artificial; identical to SEQ ID NO: 439069
  Synthetic oligonucleotide

SEQ ID NO: 595225 - DNA, 53 bp, Artificial; identical to SEQ ID NO: 439071
  Synthetic oligonucleotide

SEQ ID NO: 595226 - DNA, 59 bp, Artificial; identical to SEQ ID NO: 439074
  Synthetic oligonucleotide

SEQ ID NO: 595227 - DNA, 57 bp, Artificial; identical to SEQ ID NO: 439078
  Synthetic oligonucleotide

SEQ ID NO: 595228 - DNA, 60 bp, Artificial; identical to SEQ ID NO: 439085
  Synthetic oligonucleotide

SEQ ID NO: 595229 - DNA, 55 bp, Artificial; identical to SEQ ID NO: 439087
  Synthetic oligonucleotide

SEQ ID NO: 595230 - DNA, 55 bp, Artificial; identical to SEQ ID NO: 439091
  Synthetic oligonucleotide

SEQ ID NO: 595231 - DNA, 55 bp, Artificial; identical to SEQ ID NO: 439093
  Synthetic oligonucleotide

SEQ ID NO: 595232 - DNA, 60 bp, Artificial; identical to SEQ ID NO: 439098
  Synthetic oligonucleotide

SEQ ID NO: 595233 - DNA, 55 bp, Artificial; identical to SEQ ID NO: 439101
  Synthetic oligonucleotide

SEQ ID NO: 595234 - DNA, 55 bp, Artificial; identical to SEQ ID NO: 439103
  Synthetic oligonucleotide

SEQ ID NO: 595235 - DNA, 53 bp, Artificial; identical to SEQ ID NO: 439109
  Synthetic oligonucleotide

SEQ ID NO: 595236 - DNA, 60 bp, Artificial; identical to SEQ ID NO: 439111
  Synthetic oligonucleotide

SEQ ID NO: 595237 - DNA, 58 bp, Artificial; identical to SEQ ID NO: 439121
  Synthetic oligonucleotide

SEQ ID NO: 595238 - DNA, 55 bp, Artificial; identical to SEQ ID NO: 439129
  Synthetic oligonucleotide

SEQ ID NO: 595239 - DNA, 51 bp, Artificial; identical to SEQ ID NO: 439138
  Synthetic oligonucleotide

SEQ ID NO: 595240 - DNA, 60 bp, Artificial; identical to SEQ ID NO: 439139
  Synthetic oligonucleotide

SEQ ID NO: 595241 - DNA, 54 bp, Artificial; identical to SEQ ID NO: 439140
  Synthetic oligonucleotide

SEQ ID NO: 595242 - DNA, 55 bp, Artificial; identical to SEQ ID NO: 439142
  Synthetic oligonucleotide

SEQ ID NO: 595243 - DNA, 60 bp, Artificial; identical to SEQ ID NO: 439145
  Synthetic oligonucleotide

SEQ ID NO: 595244 - DNA, 52 bp, Artificial; identical to SEQ ID NO: 439147
  Synthetic oligonucleotide

SEQ ID NO: 595245 - DNA, 57 bp, Artificial; identical to SEQ ID NO: 439149
  Synthetic oligonucleotide

SEQ ID NO: 595246 - DNA, 60 bp, Artificial; identical to SEQ ID NO: 439151
  Synthetic oligonucleotide

SEQ ID NO: 595247 - DNA, 60 bp, Artificial; identical to SEQ ID NO: 439154
  Synthetic oligonucleotide

SEQ ID NO: 595248 - DNA, 60 bp, Artificial; identical to SEQ ID NO: 439158
  Synthetic oligonucleotide

SEQ ID NO: 595249 - DNA, 55 bp, Artificial; identical to SEQ ID NO: 439162
  Synthetic oligonucleotide

SEQ ID NO: 595250 - DNA, 57 bp, Artificial; identical to SEQ ID NO: 439163
  Synthetic oligonucleotide

SEQ ID NO: 595251 - DNA, 60 bp, Artificial; identical to SEQ ID NO: 439164
  Synthetic oligonucleotide

SEQ ID NO: 595252 - DNA, 60 bp, Artificial; identical to SEQ ID NO: 439165
  Synthetic oligonucleotide

SEQ ID NO: 595253 - DNA, 55 bp, Artificial; identical to SEQ ID NO: 439169
  Synthetic oligonucleotide

SEQ ID NO: 595254 - DNA, 58 bp, Artificial; identical to SEQ ID NO: 439171
  Synthetic oligonucleotide

SEQ ID NO: 595255 - DNA, 55 bp, Artificial; identical to SEQ ID NO: 439172
  Synthetic oligonucleotide

SEQ ID NO: 595256 - DNA, 58 bp, Artificial; identical to SEQ ID NO: 439173
  Synthetic oligonucleotide

SEQ ID NO: 595257 - DNA, 60 bp, Artificial; identical to SEQ ID NO: 439175
  Synthetic oligonucleotide

SEQ ID NO: 595258 - DNA, 57 bp, Artificial; identical to SEQ ID NO: 439180
  Synthetic oligonucleotide

SEQ ID NO: 595259 - DNA, 55 bp, Artificial; identical to SEQ ID NO: 439191
  Synthetic oligonucleotide

SEQ ID NO: 595260 - DNA, 55 bp, Artificial; identical to SEQ ID NO: 439192
  Synthetic oligonucleotide

SEQ ID NO: 595261 - DNA, 52 bp, Artificial; identical to SEQ ID NO: 439195
  Synthetic oligonucleotide

SEQ ID NO: 595262 - DNA, 60 bp, Artificial; identical to SEQ ID NO: 439207
  Synthetic oligonucleotide

SEQ ID NO: 595263 - DNA, 60 bp, Artificial; identical to SEQ ID NO: 13320
  Synthetic oligonucleotide

SEQ ID NO: 595264 - DNA, 60 bp, Artificial; identical to SEQ ID NO: 439208
  Synthetic oligonucleotide

SEQ ID NO: 595265 - DNA, 56 bp, Artificial; identical to SEQ ID NO: 439210
  Synthetic oligonucleotide

SEQ ID NO: 595266 - DNA, 54 bp, Artificial; identical to SEQ ID NO: 439213
  Synthetic oligonucleotide

SEQ ID NO: 595267 - DNA, 60 bp, Artificial; identical to SEQ ID NO: 10562
  Synthetic oligonucleotide

SEQ ID NO: 595268 - DNA, 54 bp, Artificial; identical to SEQ ID NO: 439214
  Synthetic oligonucleotide

SEQ ID NO: 595269 - DNA, 57 bp, Artificial; identical to SEQ ID NO: 439218
  Synthetic oligonucleotide

SEQ ID NO: 595270 - DNA, 55 bp, Artificial; identical to SEQ ID NO: 439219
  Synthetic oligonucleotide

SEQ ID NO: 595271 - DNA, 55 bp, Artificial; identical to SEQ ID NO: 439222
  Synthetic oligonucleotide

SEQ ID NO: 595272 - DNA, 53 bp, Artificial; identical to SEQ ID NO: 439223
  Synthetic oligonucleotide

SEQ ID NO: 595273 - DNA, 60 bp, Artificial; identical to SEQ ID NO: 439229
  Synthetic oligonucleotide

SEQ ID NO: 595274 - DNA, 55 bp, Artificial; identical to SEQ ID NO: 439231
  Synthetic oligonucleotide

SEQ ID NO: 595275 - DNA, 52 bp, Artificial; identical to SEQ ID NO: 439233
  Synthetic oligonucleotide

SEQ ID NO: 595276 - DNA, 60 bp, Artificial; identical to SEQ ID NO: 439234
  Synthetic oligonucleotide

SEQ ID NO: 595277 - DNA, 50 bp, Artificial; identical to SEQ ID NO: 439238
  Synthetic oligonucleotide

SEQ ID NO: 595278 - DNA, 56 bp, Artificial; identical to SEQ ID NO: 439239
  Synthetic oligonucleotide

SEQ ID NO: 595279 - DNA, 55 bp, Artificial; identical to SEQ ID NO: 439240
  Synthetic oligonucleotide

SEQ ID NO: 595280 - DNA, 60 bp, Artificial; identical to SEQ ID NO: 439241
  Synthetic oligonucleotide

SEQ ID NO: 595281 - DNA, 60 bp, Artificial; identical to SEQ ID NO: 439242
  Synthetic oligonucleotide

SEQ ID NO: 595282 - DNA, 53 bp, Artificial; identical to SEQ ID NO: 7992
  Synthetic oligonucleotide

SEQ ID NO: 595283 - DNA, 55 bp, Artificial; identical to SEQ ID NO: 439251
  Synthetic oligonucleotide

SEQ ID NO: 595284 - DNA, 57 bp, Artificial; identical to SEQ ID NO: 439254
  Synthetic oligonucleotide

SEQ ID NO: 595285 - DNA, 55 bp, Artificial; identical to SEQ ID NO: 439255
  Synthetic oligonucleotide

SEQ ID NO: 595286 - DNA, 57 bp, Artificial; identical to SEQ ID NO: 439257
  Synthetic oligonucleotide

SEQ ID NO: 595287 - DNA, 54 bp, Artificial; identical to SEQ ID NO: 439259
  Synthetic oligonucleotide

SEQ ID NO: 595288 - DNA, 60 bp, Artificial; identical to SEQ ID NO: 439262
  Synthetic oligonucleotide

SEQ ID NO: 595289 - DNA, 54 bp, Artificial; identical to SEQ ID NO: 439269
  Synthetic oligonucleotide

SEQ ID NO: 595290 - DNA, 60 bp, Artificial; identical to SEQ ID NO: 439271
  Synthetic oligonucleotide

SEQ ID NO: 595291 - DNA, 56 bp, Artificial; identical to SEQ ID NO: 17200
  Synthetic oligonucleotide

SEQ ID NO: 595292 - DNA, 55 bp, Artificial; identical to SEQ ID NO: 439273
  Synthetic oligonucleotide

SEQ ID NO: 595293 - DNA, 55 bp, Artificial; identical to SEQ ID NO: 439277
  Synthetic oligonucleotide

SEQ ID NO: 595294 - DNA, 60 bp, Artificial; identical to SEQ ID NO: 439279
  Synthetic oligonucleotide

SEQ ID NO: 595295 - DNA, 55 bp, Artificial; identical to SEQ ID NO: 439282
  Synthetic oligonucleotide

SEQ ID NO: 595296 - DNA, 55 bp, Artificial; identical to SEQ ID NO: 439283
  Synthetic oligonucleotide

SEQ ID NO: 595297 - DNA, 59 bp, Artificial; identical to SEQ ID NO: 439284
  Synthetic oligonucleotide

SEQ ID NO: 595298 - DNA, 54 bp, Artificial; identical to SEQ ID NO: 439285
  Synthetic oligonucleotide

SEQ ID NO: 595299 - DNA, 55 bp, Artificial; identical to SEQ ID NO: 9165
  Synthetic oligonucleotide

SEQ ID NO: 595300 - DNA, 57 bp, Artificial; identical to SEQ ID NO: 439286
  Synthetic oligonucleotide

SEQ ID NO: 595301 - DNA, 53 bp, Artificial; identical to SEQ ID NO: 439287
  Synthetic oligonucleotide

SEQ ID NO: 595302 - DNA, 51 bp, Artificial; identical to SEQ ID NO: 439290
  Synthetic oligonucleotide

SEQ ID NO: 595303 - DNA, 55 bp, Artificial; identical to SEQ ID NO: 439293
  Synthetic oligonucleotide

SEQ ID NO: 595304 - DNA, 55 bp, Artificial; identical to SEQ ID NO: 439294
  Synthetic oligonucleotide

SEQ ID NO: 595305 - DNA, 60 bp, Artificial; identical to SEQ ID NO: 439296
  Synthetic oligonucleotide

SEQ ID NO: 595306 - DNA, 60 bp, Artificial; identical to SEQ ID NO: 439298
  Synthetic oligonucleotide

SEQ ID NO: 595307 - DNA, 60 bp, Artificial; identical to SEQ ID NO: 439299
  Synthetic oligonucleotide

SEQ ID NO: 595308 - DNA, 55 bp, Artificial; identical to SEQ ID NO: 439303
  Synthetic oligonucleotide

SEQ ID NO: 595309 - DNA, 53 bp, Artificial; identical to SEQ ID NO: 439305
  Synthetic oligonucleotide

SEQ ID NO: 595310 - DNA, 50 bp, Artificial; identical to SEQ ID NO: 439308
  Synthetic oligonucleotide

SEQ ID NO: 595311 - DNA, 60 bp, Artificial; identical to SEQ ID NO: 439311
  Synthetic oligonucleotide

SEQ ID NO: 595312 - DNA, 50 bp, Artificial; identical to SEQ ID NO: 439317
  Synthetic oligonucleotide

SEQ ID NO: 595313 - DNA, 60 bp, Artificial; identical to SEQ ID NO: 439318
  Synthetic oligonucleotide

SEQ ID NO: 595314 - DNA, 57 bp, Artificial; identical to SEQ ID NO: 439322
  Synthetic oligonucleotide

SEQ ID NO: 595315 - DNA, 52 bp, Artificial; identical to SEQ ID NO: 439323
  Synthetic oligonucleotide

SEQ ID NO: 595316 - DNA, 60 bp, Artificial; identical to SEQ ID NO: 439333
  Synthetic oligonucleotide

SEQ ID NO: 595317 - DNA, 54 bp, Artificial; identical to SEQ ID NO: 439334
  Synthetic oligonucleotide

SEQ ID NO: 595318 - DNA, 60 bp, Artificial; identical to SEQ ID NO: 439335
  Synthetic oligonucleotide

SEQ ID NO: 595319 - DNA, 58 bp, Artificial; identical to SEQ ID NO: 439337
  Synthetic oligonucleotide

SEQ ID NO: 595320 - DNA, 57 bp, Artificial; identical to SEQ ID NO: 439338
  Synthetic oligonucleotide

SEQ ID NO: 595321 - DNA, 55 bp, Artificial; identical to SEQ ID NO: 439339
  Synthetic oligonucleotide

SEQ ID NO: 595322 - DNA, 55 bp, Artificial; identical to SEQ ID NO: 439344
  Synthetic oligonucleotide

SEQ ID NO: 595323 - DNA, 55 bp, Artificial; identical to SEQ ID NO: 439347
  Synthetic oligonucleotide

SEQ ID NO: 595324 - DNA, 50 bp, Artificial; identical to SEQ ID NO: 439349
  Synthetic oligonucleotide

SEQ ID NO: 595325 - DNA, 59 bp, Artificial; identical to SEQ ID NO: 439351
  Synthetic oligonucleotide

SEQ ID NO: 595326 - DNA, 60 bp, Artificial; identical to SEQ ID NO: 439352
  Synthetic oligonucleotide

SEQ ID NO: 595327 - DNA, 60 bp, Artificial; identical to SEQ ID NO: 439353
  Synthetic oligonucleotide

SEQ ID NO: 595328 - DNA, 60 bp, Artificial; identical to SEQ ID NO: 439355
  Synthetic oligonucleotide

SEQ ID NO: 595329 - DNA, 60 bp, Artificial; identical to SEQ ID NO: 439356
  Synthetic oligonucleotide

SEQ ID NO: 595330 - DNA, 55 bp, Artificial; identical to SEQ ID NO: 439357
  Synthetic oligonucleotide

SEQ ID NO: 595331 - DNA, 57 bp, Artificial; identical to SEQ ID NO: 439362
  Synthetic oligonucleotide

SEQ ID NO: 595332 - DNA, 52 bp, Artificial; identical to SEQ ID NO: 439365
  Synthetic oligonucleotide

SEQ ID NO: 595333 - DNA, 58 bp, Artificial; identical to SEQ ID NO: 439366
  Synthetic oligonucleotide

SEQ ID NO: 595334 - DNA, 60 bp, Artificial; identical to SEQ ID NO: 439367
  Synthetic oligonucleotide

SEQ ID NO: 595335 - DNA, 60 bp, Artificial; identical to SEQ ID NO: 439368
  Synthetic oligonucleotide

SEQ ID NO: 595336 - DNA, 60 bp, Artificial; identical to SEQ ID NO: 439369
  Synthetic oligonucleotide

SEQ ID NO: 595337 - DNA, 55 bp, Artificial; identical to SEQ ID NO: 439374
  Synthetic oligonucleotide

SEQ ID NO: 595338 - DNA, 59 bp, Artificial; identical to SEQ ID NO: 18608
  Synthetic oligonucleotide

SEQ ID NO: 595339 - DNA, 56 bp, Artificial; identical to SEQ ID NO: 439377
  Synthetic oligonucleotide

SEQ ID NO: 595340 - DNA, 55 bp, Artificial; identical to SEQ ID NO: 439378
  Synthetic oligonucleotide

SEQ ID NO: 595341 - DNA, 60 bp, Artificial; identical to SEQ ID NO: 439380
  Synthetic oligonucleotide

SEQ ID NO: 595342 - DNA, 58 bp, Artificial; identical to SEQ ID NO: 439384
  Synthetic oligonucleotide

SEQ ID NO: 595343 - DNA, 55 bp, Artificial; identical to SEQ ID NO: 439386
  Synthetic oligonucleotide

SEQ ID NO: 595344 - DNA, 55 bp, Artificial; identical to SEQ ID NO: 6335
  Synthetic oligonucleotide

SEQ ID NO: 595345 - DNA, 55 bp, Artificial; identical to SEQ ID NO: 439390
  Synthetic oligonucleotide

SEQ ID NO: 595346 - DNA, 52 bp, Artificial; identical to SEQ ID NO: 439394
  Synthetic oligonucleotide

SEQ ID NO: 595347 - DNA, 60 bp, Artificial; identical to SEQ ID NO: 439395
  Synthetic oligonucleotide

SEQ ID NO: 595348 - DNA, 60 bp, Artificial; identical to SEQ ID NO: 439399
  Synthetic oligonucleotide

SEQ ID NO: 595349 - DNA, 60 bp, Artificial; identical to SEQ ID NO: 439400
  Synthetic oligonucleotide

SEQ ID NO: 595350 - DNA, 60 bp, Artificial; identical to SEQ ID NO: 439401
  Synthetic oligonucleotide

SEQ ID NO: 595351 - DNA, 59 bp, Artificial; identical to SEQ ID NO: 439402
  Synthetic oligonucleotide

SEQ ID NO: 595352 - DNA, 52 bp, Artificial; identical to SEQ ID NO: 439403
  Synthetic oligonucleotide

SEQ ID NO: 595353 - DNA, 60 bp, Artificial; identical to SEQ ID NO: 439408
  Synthetic oligonucleotide

SEQ ID NO: 595354 - DNA, 57 bp, Artificial; identical to SEQ ID NO: 439414
  Synthetic oligonucleotide

SEQ ID NO: 595355 - DNA, 55 bp, Artificial; identical to SEQ ID NO: 439415
  Synthetic oligonucleotide

SEQ ID NO: 595356 - DNA, 60 bp, Artificial; identical to SEQ ID NO: 439417
  Synthetic oligonucleotide

SEQ ID NO: 595357 - DNA, 60 bp, Artificial; identical to SEQ ID NO: 439422
  Synthetic oligonucleotide

SEQ ID NO: 595358 - DNA, 60 bp, Artificial; identical to SEQ ID NO: 439432
  Synthetic oligonucleotide

SEQ ID NO: 595359 - DNA, 55 bp, Artificial; identical to SEQ ID NO: 439433
  Synthetic oligonucleotide

SEQ ID NO: 595360 - DNA, 55 bp, Artificial; identical to SEQ ID NO: 439435
  Synthetic oligonucleotide

SEQ ID NO: 595361 - DNA, 60 bp, Artificial; identical to SEQ ID NO: 439437
  Synthetic oligonucleotide

SEQ ID NO: 595362 - DNA, 60 bp, Artificial; identical to SEQ ID NO: 439442
  Synthetic oligonucleotide

SEQ ID NO: 595363 - DNA, 60 bp, Artificial; identical to SEQ ID NO: 49263
  Synthetic oligonucleotide

SEQ ID NO: 595364 - DNA, 50 bp, Artificial; identical to SEQ ID NO: 439443
  Synthetic oligonucleotide

SEQ ID NO: 595365 - DNA, 55 bp, Artificial; identical to SEQ ID NO: 439445
  Synthetic oligonucleotide

SEQ ID NO: 595366 - DNA, 59 bp, Artificial; identical to SEQ ID NO: 439446
  Synthetic oligonucleotide

SEQ ID NO: 595367 - DNA, 60 bp, Artificial; identical to SEQ ID NO: 439447
  Synthetic oligonucleotide

SEQ ID NO: 595368 - DNA, 52 bp, Artificial; identical to SEQ ID NO: 439448
  Synthetic oligonucleotide

SEQ ID NO: 595369 - DNA, 60 bp, Artificial; identical to SEQ ID NO: 439450
  Synthetic oligonucleotide

SEQ ID NO: 595370 - DNA, 60 bp, Artificial; identical to SEQ ID NO: 439452
  Synthetic oligonucleotide

SEQ ID NO: 595371 - DNA, 60 bp, Artificial; identical to SEQ ID NO: 439454
  Synthetic oligonucleotide

SEQ ID NO: 595372 - DNA, 52 bp, Artificial; identical to SEQ ID NO: 439457
  Synthetic oligonucleotide

SEQ ID NO: 595373 - DNA, 60 bp, Artificial; identical to SEQ ID NO: 439458
  Synthetic oligonucleotide

SEQ ID NO: 595374 - DNA, 55 bp, Artificial; identical to SEQ ID NO: 439460
  Synthetic oligonucleotide

SEQ ID NO: 595375 - DNA, 52 bp, Artificial; identical to SEQ ID NO: 439464
  Synthetic oligonucleotide

SEQ ID NO: 595376 - DNA, 58 bp, Artificial; identical to SEQ ID NO: 439467
  Synthetic oligonucleotide

SEQ ID NO: 595377 - DNA, 54 bp, Artificial; identical to SEQ ID NO: 439472
  Synthetic oligonucleotide

SEQ ID NO: 595378 - DNA, 57 bp, Artificial; identical to SEQ ID NO: 439476
  Synthetic oligonucleotide

SEQ ID NO: 595379 - DNA, 60 bp, Artificial; identical to SEQ ID NO: 439485
  Synthetic oligonucleotide

SEQ ID NO: 595380 - DNA, 55 bp, Artificial; identical to SEQ ID NO: 15200
  Synthetic oligonucleotide

SEQ ID NO: 595381 - DNA, 60 bp, Artificial; identical to SEQ ID NO: 439489
  Synthetic oligonucleotide

SEQ ID NO: 595382 - DNA, 60 bp, Artificial; identical to SEQ ID NO: 439490
  Synthetic oligonucleotide

SEQ ID NO: 595383 - DNA, 55 bp, Artificial; identical to SEQ ID NO: 439492
  Synthetic oligonucleotide

SEQ ID NO: 595384 - DNA, 60 bp, Artificial; identical to SEQ ID NO: 439493
  Synthetic oligonucleotide

SEQ ID NO: 595385 - DNA, 55 bp, Artificial; identical to SEQ ID NO: 439494
  Synthetic oligonucleotide

SEQ ID NO: 595386 - DNA, 60 bp, Artificial; identical to SEQ ID NO: 439495
  Synthetic oligonucleotide

SEQ ID NO: 595387 - DNA, 60 bp, Artificial; identical to SEQ ID NO: 439496
  Synthetic oligonucleotide

SEQ ID NO: 595388 - DNA, 60 bp, Artificial; identical to SEQ ID NO: 439498
  Synthetic oligonucleotide

SEQ ID NO: 595389 - DNA, 55 bp, Artificial; identical to SEQ ID NO: 11836
  Synthetic oligonucleotide

SEQ ID NO: 595390 - DNA, 55 bp, Artificial; identical to SEQ ID NO: 439507
  Synthetic oligonucleotide

SEQ ID NO: 595391 - DNA, 59 bp, Artificial; identical to SEQ ID NO: 439508
  Synthetic oligonucleotide

SEQ ID NO: 595392 - DNA, 56 bp, Artificial; identical to SEQ ID NO: 439510
  Synthetic oligonucleotide

SEQ ID NO: 595393 - DNA, 55 bp, Artificial; identical to SEQ ID NO: 39349
  Synthetic oligonucleotide

SEQ ID NO: 595394 - DNA, 51 bp, Artificial; identical to SEQ ID NO: 439512
  Synthetic oligonucleotide

SEQ ID NO: 595395 - DNA, 55 bp, Artificial; identical to SEQ ID NO: 439513
  Synthetic oligonucleotide

SEQ ID NO: 595396 - DNA, 55 bp, Artificial; identical to SEQ ID NO: 439514
  Synthetic oligonucleotide

SEQ ID NO: 595397 - DNA, 55 bp, Artificial; identical to SEQ ID NO: 439516
  Synthetic oligonucleotide

SEQ ID NO: 595398 - DNA, 60 bp, Artificial; identical to SEQ ID NO: 6331
  Synthetic oligonucleotide

SEQ ID NO: 595399 - DNA, 60 bp, Artificial; identical to SEQ ID NO: 439522
  Synthetic oligonucleotide

SEQ ID NO: 595400 - DNA, 60 bp, Artificial; identical to SEQ ID NO: 439524
  Synthetic oligonucleotide

SEQ ID NO: 595401 - DNA, 55 bp, Artificial; identical to SEQ ID NO: 439532
  Synthetic oligonucleotide

SEQ ID NO: 595402 - DNA, 59 bp, Artificial; identical to SEQ ID NO: 439535
  Synthetic oligonucleotide

SEQ ID NO: 595403 - DNA, 60 bp, Artificial; identical to SEQ ID NO: 439536
  Synthetic oligonucleotide

SEQ ID NO: 595404 - DNA, 50 bp, Artificial; identical to SEQ ID NO: 439541
  Synthetic oligonucleotide

SEQ ID NO: 595405 - DNA, 52 bp, Artificial; identical to SEQ ID NO: 439543
  Synthetic oligonucleotide

SEQ ID NO: 595406 - DNA, 58 bp, Artificial; identical to SEQ ID NO: 439548
  Synthetic oligonucleotide

SEQ ID NO: 595407 - DNA, 57 bp, Artificial; identical to SEQ ID NO: 439549
  Synthetic oligonucleotide

SEQ ID NO: 595408 - DNA, 60 bp, Artificial; identical to SEQ ID NO: 439550
  Synthetic oligonucleotide

SEQ ID NO: 595409 - DNA, 60 bp, Artificial; identical to SEQ ID NO: 439551
  Synthetic oligonucleotide

SEQ ID NO: 595410 - DNA, 60 bp, Artificial; identical to SEQ ID NO: 7134
  Synthetic oligonucleotide

SEQ ID NO: 595411 - DNA, 55 bp, Artificial; identical to SEQ ID NO: 439553
  Synthetic oligonucleotide

SEQ ID NO: 595412 - DNA, 58 bp, Artificial; identical to SEQ ID NO: 439555
  Synthetic oligonucleotide

SEQ ID NO: 595413 - DNA, 58 bp, Artificial; identical to SEQ ID NO: 439556
  Synthetic oligonucleotide

SEQ ID NO: 595414 - DNA, 60 bp, Artificial; identical to SEQ ID NO: 439558
  Synthetic oligonucleotide

SEQ ID NO: 595415 - DNA, 59 bp, Artificial; identical to SEQ ID NO: 439559
  Synthetic oligonucleotide

SEQ ID NO: 595416 - DNA, 60 bp, Artificial; identical to SEQ ID NO: 439560
  Synthetic oligonucleotide

SEQ ID NO: 595417 - DNA, 57 bp, Artificial; identical to SEQ ID NO: 439563
  Synthetic oligonucleotide

SEQ ID NO: 595418 - DNA, 55 bp, Artificial; identical to SEQ ID NO: 439565
  Synthetic oligonucleotide

SEQ ID NO: 595419 - DNA, 58 bp, Artificial; identical to SEQ ID NO: 439568
  Synthetic oligonucleotide

SEQ ID NO: 595420 - DNA, 56 bp, Artificial; identical to SEQ ID NO: 439571
  Synthetic oligonucleotide

SEQ ID NO: 595421 - DNA, 56 bp, Artificial; identical to SEQ ID NO: 439573
  Synthetic oligonucleotide

SEQ ID NO: 595422 - DNA, 60 bp, Artificial; identical to SEQ ID NO: 10662
  Synthetic oligonucleotide

SEQ ID NO: 595423 - DNA, 51 bp, Artificial; identical to SEQ ID NO: 439578
  Synthetic oligonucleotide

SEQ ID NO: 595424 - DNA, 55 bp, Artificial; identical to SEQ ID NO: 439580
  Synthetic oligonucleotide

SEQ ID NO: 595425 - DNA, 57 bp, Artificial; identical to SEQ ID NO: 439582
  Synthetic oligonucleotide

SEQ ID NO: 595426 - DNA, 60 bp, Artificial; identical to SEQ ID NO: 439593
  Synthetic oligonucleotide

SEQ ID NO: 595427 - DNA, 60 bp, Artificial; identical to SEQ ID NO: 439594
  Synthetic oligonucleotide

SEQ ID NO: 595428 - DNA, 55 bp, Artificial; identical to SEQ ID NO: 439595
  Synthetic oligonucleotide

SEQ ID NO: 595429 - DNA, 60 bp, Artificial; identical to SEQ ID NO: 439596
  Synthetic oligonucleotide

SEQ ID NO: 595430 - DNA, 55 bp, Artificial; identical to SEQ ID NO: 439597
  Synthetic oligonucleotide

SEQ ID NO: 595431 - DNA, 60 bp, Artificial; identical to SEQ ID NO: 439598
  Synthetic oligonucleotide

SEQ ID NO: 595432 - DNA, 60 bp, Artificial; identical to SEQ ID NO: 51574
  Synthetic oligonucleotide

SEQ ID NO: 595433 - DNA, 51 bp, Artificial; identical to SEQ ID NO: 439599
  Synthetic oligonucleotide

SEQ ID NO: 595434 - DNA, 55 bp, Artificial; identical to SEQ ID NO: 439602
  Synthetic oligonucleotide

SEQ ID NO: 595435 - DNA, 60 bp, Artificial; identical to SEQ ID NO: 439604
  Synthetic oligonucleotide

SEQ ID NO: 595436 - DNA, 55 bp, Artificial; identical to SEQ ID NO: 439605
  Synthetic oligonucleotide

SEQ ID NO: 595437 - DNA, 60 bp, Artificial; identical to SEQ ID NO: 439607
  Synthetic oligonucleotide

SEQ ID NO: 595438 - DNA, 60 bp, Artificial; identical to SEQ ID NO: 439608
  Synthetic oligonucleotide

SEQ ID NO: 595439 - DNA, 53 bp, Artificial; identical to SEQ ID NO: 439614
  Synthetic oligonucleotide

SEQ ID NO: 595440 - DNA, 54 bp, Artificial; identical to SEQ ID NO: 439615
  Synthetic oligonucleotide

SEQ ID NO: 595441 - DNA, 60 bp, Artificial; identical to SEQ ID NO: 439618
  Synthetic oligonucleotide

SEQ ID NO: 595442 - DNA, 55 bp, Artificial; identical to SEQ ID NO: 439622
  Synthetic oligonucleotide

SEQ ID NO: 595443 - DNA, 60 bp, Artificial; identical to SEQ ID NO: 439624
  Synthetic oligonucleotide

SEQ ID NO: 595444 - DNA, 60 bp, Artificial; identical to SEQ ID NO: 439626
  Synthetic oligonucleotide

SEQ ID NO: 595445 - DNA, 55 bp, Artificial; identical to SEQ ID NO: 439629
  Synthetic oligonucleotide

SEQ ID NO: 595446 - DNA, 60 bp, Artificial; identical to SEQ ID NO: 439631
  Synthetic oligonucleotide

SEQ ID NO: 595447 - DNA, 60 bp, Artificial; identical to SEQ ID NO: 439632
  Synthetic oligonucleotide

SEQ ID NO: 595448 - DNA, 52 bp, Artificial; identical to SEQ ID NO: 439635
  Synthetic oligonucleotide

SEQ ID NO: 595449 - DNA, 59 bp, Artificial; identical to SEQ ID NO: 439639
  Synthetic oligonucleotide

SEQ ID NO: 595450 - DNA, 55 bp, Artificial; identical to SEQ ID NO: 439649
  Synthetic oligonucleotide

SEQ ID NO: 595451 - DNA, 50 bp, Artificial; identical to SEQ ID NO: 439650
  Synthetic oligonucleotide

SEQ ID NO: 595452 - DNA, 60 bp, Artificial; identical to SEQ ID NO: 439652
  Synthetic oligonucleotide

SEQ ID NO: 595453 - DNA, 52 bp, Artificial; identical to SEQ ID NO: 439653
  Synthetic oligonucleotide

SEQ ID NO: 595454 - DNA, 60 bp, Artificial; identical to SEQ ID NO: 439655
  Synthetic oligonucleotide

SEQ ID NO: 595455 - DNA, 56 bp, Artificial; identical to SEQ ID NO: 439657
  Synthetic oligonucleotide

SEQ ID NO: 595456 - DNA, 55 bp, Artificial; identical to SEQ ID NO: 439665
  Synthetic oligonucleotide

SEQ ID NO: 595457 - DNA, 59 bp, Artificial; identical to SEQ ID NO: 439666
  Synthetic oligonucleotide

SEQ ID NO: 595458 - DNA, 60 bp, Artificial; identical to SEQ ID NO: 439670
  Synthetic oligonucleotide

SEQ ID NO: 595459 - DNA, 60 bp, Artificial; identical to SEQ ID NO: 439673
  Synthetic oligonucleotide

SEQ ID NO: 595460 - DNA, 57 bp, Artificial; identical to SEQ ID NO: 439675
  Synthetic oligonucleotide

SEQ ID NO: 595461 - DNA, 51 bp, Artificial; identical to SEQ ID NO: 439681
  Synthetic oligonucleotide

SEQ ID NO: 595462 - DNA, 59 bp, Artificial; identical to SEQ ID NO: 439686
  Synthetic oligonucleotide

SEQ ID NO: 595463 - DNA, 52 bp, Artificial; identical to SEQ ID NO: 439687
  Synthetic oligonucleotide

SEQ ID NO: 595464 - DNA, 55 bp, Artificial; identical to SEQ ID NO: 439688
  Synthetic oligonucleotide

SEQ ID NO: 595465 - DNA, 58 bp, Artificial; identical to SEQ ID NO: 439689
  Synthetic oligonucleotide

SEQ ID NO: 595466 - DNA, 58 bp, Artificial; identical to SEQ ID NO: 439690
  Synthetic oligonucleotide

SEQ ID NO: 595467 - DNA, 55 bp, Artificial; identical to SEQ ID NO: 439695
  Synthetic oligonucleotide

SEQ ID NO: 595468 - DNA, 55 bp, Artificial; identical to SEQ ID NO: 439698
  Synthetic oligonucleotide

SEQ ID NO: 595469 - DNA, 60 bp, Artificial; identical to SEQ ID NO: 13827
  Synthetic oligonucleotide

SEQ ID NO: 595470 - DNA, 57 bp, Artificial; identical to SEQ ID NO: 439700
  Synthetic oligonucleotide

SEQ ID NO: 595471 - DNA, 55 bp, Artificial; identical to SEQ ID NO: 439703
  Synthetic oligonucleotide

SEQ ID NO: 595472 - DNA, 59 bp, Artificial; identical to SEQ ID NO: 19197
  Synthetic oligonucleotide

SEQ ID NO: 595473 - DNA, 50 bp, Artificial; identical to SEQ ID NO: 439707
  Synthetic oligonucleotide

SEQ ID NO: 595474 - DNA, 53 bp, Artificial; identical to SEQ ID NO: 439709
  Synthetic oligonucleotide

SEQ ID NO: 595475 - DNA, 59 bp, Artificial; identical to SEQ ID NO: 439710
  Synthetic oligonucleotide

SEQ ID NO: 595476 - DNA, 51 bp, Artificial; identical to SEQ ID NO: 439711
  Synthetic oligonucleotide

SEQ ID NO: 595477 - DNA, 55 bp, Artificial; identical to SEQ ID NO: 439712
  Synthetic oligonucleotide

SEQ ID NO: 595478 - DNA, 55 bp, Artificial; identical to SEQ ID NO: 439714
  Synthetic oligonucleotide

SEQ ID NO: 595479 - DNA, 51 bp, Artificial; identical to SEQ ID NO: 439717
  Synthetic oligonucleotide

SEQ ID NO: 595480 - DNA, 60 bp, Artificial; identical to SEQ ID NO: 439719
  Synthetic oligonucleotide

SEQ ID NO: 595481 - DNA, 55 bp, Artificial; identical to SEQ ID NO: 439720
  Synthetic oligonucleotide

SEQ ID NO: 595482 - DNA, 56 bp, Artificial; identical to SEQ ID NO: 439726
  Synthetic oligonucleotide

SEQ ID NO: 595483 - DNA, 60 bp, Artificial; identical to SEQ ID NO: 439729
  Synthetic oligonucleotide

SEQ ID NO: 595484 - DNA, 60 bp, Artificial; identical to SEQ ID NO: 439733
  Synthetic oligonucleotide

SEQ ID NO: 595485 - DNA, 55 bp, Artificial; identical to SEQ ID NO: 439735
  Synthetic oligonucleotide

SEQ ID NO: 595486 - DNA, 55 bp, Artificial; identical to SEQ ID NO: 439738
  Synthetic oligonucleotide

SEQ ID NO: 595487 - DNA, 60 bp, Artificial; identical to SEQ ID NO: 439740
  Synthetic oligonucleotide

SEQ ID NO: 595488 - DNA, 55 bp, Artificial; identical to SEQ ID NO: 439745
  Synthetic oligonucleotide

SEQ ID NO: 595489 - DNA, 55 bp, Artificial; identical to SEQ ID NO: 439747
  Synthetic oligonucleotide

SEQ ID NO: 595490 - DNA, 55 bp, Artificial; identical to SEQ ID NO: 439752
  Synthetic oligonucleotide

SEQ ID NO: 595491 - DNA, 54 bp, Artificial; identical to SEQ ID NO: 439754
  Synthetic oligonucleotide

SEQ ID NO: 595492 - DNA, 55 bp, Artificial; identical to SEQ ID NO: 439756
  Synthetic oligonucleotide

SEQ ID NO: 595493 - DNA, 60 bp, Artificial; identical to SEQ ID NO: 439759
  Synthetic oligonucleotide

SEQ ID NO: 595494 - DNA, 58 bp, Artificial; identical to SEQ ID NO: 439764
  Synthetic oligonucleotide

SEQ ID NO: 595495 - DNA, 55 bp, Artificial; identical to SEQ ID NO: 439765
  Synthetic oligonucleotide

SEQ ID NO: 595496 - DNA, 58 bp, Artificial; identical to SEQ ID NO: 439768
  Synthetic oligonucleotide

SEQ ID NO: 595497 - DNA, 60 bp, Artificial; identical to SEQ ID NO: 10334
  Synthetic oligonucleotide

SEQ ID NO: 595498 - DNA, 55 bp, Artificial; identical to SEQ ID NO: 439770
  Synthetic oligonucleotide

SEQ ID NO: 595499 - DNA, 59 bp, Artificial; identical to SEQ ID NO: 439772
  Synthetic oligonucleotide

SEQ ID NO: 595500 - DNA, 52 bp, Artificial; identical to SEQ ID NO: 439775
  Synthetic oligonucleotide

SEQ ID NO: 595501 - DNA, 59 bp, Artificial; identical to SEQ ID NO: 439776
  Synthetic oligonucleotide

SEQ ID NO: 595502 - DNA, 60 bp, Artificial; identical to SEQ ID NO: 439781
  Synthetic oligonucleotide

SEQ ID NO: 595503 - DNA, 55 bp, Artificial; identical to SEQ ID NO: 439787
  Synthetic oligonucleotide

SEQ ID NO: 595504 - DNA, 48 bp, Artificial; identical to SEQ ID NO: 439788
  Synthetic oligonucleotide

SEQ ID NO: 595505 - DNA, 60 bp, Artificial; identical to SEQ ID NO: 439790
  Synthetic oligonucleotide

SEQ ID NO: 595506 - DNA, 60 bp, Artificial; identical to SEQ ID NO: 439791
  Synthetic oligonucleotide

SEQ ID NO: 595507 - DNA, 53 bp, Artificial; identical to SEQ ID NO: 439799
  Synthetic oligonucleotide

SEQ ID NO: 595508 - DNA, 60 bp, Artificial; identical to SEQ ID NO: 439800
  Synthetic oligonucleotide

SEQ ID NO: 595509 - DNA, 59 bp, Artificial; identical to SEQ ID NO: 439802
  Synthetic oligonucleotide

SEQ ID NO: 595510 - DNA, 60 bp, Artificial; identical to SEQ ID NO: 439804
  Synthetic oligonucleotide

SEQ ID NO: 595511 - DNA, 59 bp, Artificial; identical to SEQ ID NO: 439806
  Synthetic oligonucleotide

SEQ ID NO: 595512 - DNA, 60 bp, Artificial; identical to SEQ ID NO: 439807
  Synthetic oligonucleotide

SEQ ID NO: 595513 - DNA, 55 bp, Artificial; identical to SEQ ID NO: 439809
  Synthetic oligonucleotide

SEQ ID NO: 595514 - DNA, 59 bp, Artificial; identical to SEQ ID NO: 439810
  Synthetic oligonucleotide

SEQ ID NO: 595515 - DNA, 60 bp, Artificial; identical to SEQ ID NO: 439811
  Synthetic oligonucleotide

SEQ ID NO: 595516 - DNA, 59 bp, Artificial; identical to SEQ ID NO: 439813
  Synthetic oligonucleotide

SEQ ID NO: 595517 - DNA, 60 bp, Artificial; identical to SEQ ID NO: 439815
  Synthetic oligonucleotide

SEQ ID NO: 595518 - DNA, 60 bp, Artificial; identical to SEQ ID NO: 439817
  Synthetic oligonucleotide

SEQ ID NO: 595519 - DNA, 56 bp, Artificial; identical to SEQ ID NO: 439818
  Synthetic oligonucleotide

SEQ ID NO: 595520 - DNA, 53 bp, Artificial; identical to SEQ ID NO: 439821
  Synthetic oligonucleotide

SEQ ID NO: 595521 - DNA, 60 bp, Artificial; identical to SEQ ID NO: 439822
  Synthetic oligonucleotide

SEQ ID NO: 595522 - DNA, 51 bp, Artificial; identical to SEQ ID NO: 439827
  Synthetic oligonucleotide

SEQ ID NO: 595523 - DNA, 55 bp, Artificial; identical to SEQ ID NO: 439828
  Synthetic oligonucleotide

SEQ ID NO: 595524 - DNA, 60 bp, Artificial; identical to SEQ ID NO: 439831
  Synthetic oligonucleotide

SEQ ID NO: 595525 - DNA, 58 bp, Artificial; identical to SEQ ID NO: 439833
  Synthetic oligonucleotide

SEQ ID NO: 595526 - DNA, 55 bp, Artificial; identical to SEQ ID NO: 439835
  Synthetic oligonucleotide

SEQ ID NO: 595527 - DNA, 50 bp, Artificial; identical to SEQ ID NO: 439836
  Synthetic oligonucleotide

SEQ ID NO: 595528 - DNA, 60 bp, Artificial; identical to SEQ ID NO: 439837
  Synthetic oligonucleotide

SEQ ID NO: 595529 - DNA, 60 bp, Artificial; identical to SEQ ID NO: 439842
  Synthetic oligonucleotide

SEQ ID NO: 595530 - DNA, 58 bp, Artificial; identical to SEQ ID NO: 439846
  Synthetic oligonucleotide

SEQ ID NO: 595531 - DNA, 58 bp, Artificial; identical to SEQ ID NO: 439852
  Synthetic oligonucleotide

SEQ ID NO: 595532 - DNA, 51 bp, Artificial; identical to SEQ ID NO: 439855
  Synthetic oligonucleotide

SEQ ID NO: 595533 - DNA, 54 bp, Artificial; identical to SEQ ID NO: 439856
  Synthetic oligonucleotide

SEQ ID NO: 595534 - DNA, 60 bp, Artificial; identical to SEQ ID NO: 439857
  Synthetic oligonucleotide

SEQ ID NO: 595535 - DNA, 55 bp, Artificial; identical to SEQ ID NO: 439858
  Synthetic oligonucleotide

SEQ ID NO: 595536 - DNA, 60 bp, Artificial; identical to SEQ ID NO: 439859
  Synthetic oligonucleotide

SEQ ID NO: 595537 - DNA, 55 bp, Artificial; identical to SEQ ID NO: 439861
  Synthetic oligonucleotide

SEQ ID NO: 595538 - DNA, 55 bp, Artificial; identical to SEQ ID NO: 439862
  Synthetic oligonucleotide

SEQ ID NO: 595539 - DNA, 60 bp, Artificial; identical to SEQ ID NO: 439863
  Synthetic oligonucleotide

SEQ ID NO: 595540 - DNA, 57 bp, Artificial; identical to SEQ ID NO: 17129
  Synthetic oligonucleotide

SEQ ID NO: 595541 - DNA, 60 bp, Artificial; identical to SEQ ID NO: 439866
  Synthetic oligonucleotide

SEQ ID NO: 595542 - DNA, 54 bp, Artificial; identical to SEQ ID NO: 14498
  Synthetic oligonucleotide

SEQ ID NO: 595543 - DNA, 60 bp, Artificial; identical to SEQ ID NO: 439874
  Synthetic oligonucleotide

SEQ ID NO: 595544 - DNA, 53 bp, Artificial; identical to SEQ ID NO: 439883
  Synthetic oligonucleotide

SEQ ID NO: 595545 - DNA, 55 bp, Artificial; identical to SEQ ID NO: 439884
  Synthetic oligonucleotide

SEQ ID NO: 595546 - DNA, 55 bp, Artificial; identical to SEQ ID NO: 439885
  Synthetic oligonucleotide

SEQ ID NO: 595547 - DNA, 55 bp, Artificial; identical to SEQ ID NO: 439890
  Synthetic oligonucleotide

SEQ ID NO: 595548 - DNA, 60 bp, Artificial; identical to SEQ ID NO: 439894
  Synthetic oligonucleotide

SEQ ID NO: 595549 - DNA, 55 bp, Artificial; identical to SEQ ID NO: 439899
  Synthetic oligonucleotide

SEQ ID NO: 595550 - DNA, 58 bp, Artificial; identical to SEQ ID NO: 16464
  Synthetic oligonucleotide

SEQ ID NO: 595551 - DNA, 60 bp, Artificial; identical to SEQ ID NO: 439904
  Synthetic oligonucleotide

SEQ ID NO: 595552 - DNA, 60 bp, Artificial; identical to SEQ ID NO: 439905
  Synthetic oligonucleotide

SEQ ID NO: 595553 - DNA, 56 bp, Artificial; identical to SEQ ID NO: 439906
  Synthetic oligonucleotide

SEQ ID NO: 595554 - DNA, 60 bp, Artificial; identical to SEQ ID NO: 439911
  Synthetic oligonucleotide

SEQ ID NO: 595555 - DNA, 59 bp, Artificial; identical to SEQ ID NO: 439912
  Synthetic oligonucleotide

SEQ ID NO: 595556 - DNA, 58 bp, Artificial; identical to SEQ ID NO: 439915
  Synthetic oligonucleotide

SEQ ID NO: 595557 - DNA, 55 bp, Artificial; identical to SEQ ID NO: 14814
  Synthetic oligonucleotide

SEQ ID NO: 595558 - DNA, 60 bp, Artificial; identical to SEQ ID NO: 439916
  Synthetic oligonucleotide

SEQ ID NO: 595559 - DNA, 60 bp, Artificial; identical to SEQ ID NO: 439917
  Synthetic oligonucleotide

SEQ ID NO: 595560 - DNA, 56 bp, Artificial; identical to SEQ ID NO: 439918
  Synthetic oligonucleotide

SEQ ID NO: 595561 - DNA, 58 bp, Artificial; identical to SEQ ID NO: 439919
  Synthetic oligonucleotide

SEQ ID NO: 595562 - DNA, 55 bp, Artificial; identical to SEQ ID NO: 17972
  Synthetic oligonucleotide

SEQ ID NO: 595563 - DNA, 60 bp, Artificial; identical to SEQ ID NO: 439922
  Synthetic oligonucleotide

SEQ ID NO: 595564 - DNA, 52 bp, Artificial; identical to SEQ ID NO: 439928
  Synthetic oligonucleotide

SEQ ID NO: 595565 - DNA, 60 bp, Artificial; identical to SEQ ID NO: 439932
  Synthetic oligonucleotide

SEQ ID NO: 595566 - DNA, 55 bp, Artificial; identical to SEQ ID NO: 439933
  Synthetic oligonucleotide

SEQ ID NO: 595567 - DNA, 50 bp, Artificial; identical to SEQ ID NO: 439936
  Synthetic oligonucleotide

SEQ ID NO: 595568 - DNA, 55 bp, Artificial; identical to SEQ ID NO: 439939
  Synthetic oligonucleotide

SEQ ID NO: 595569 - DNA, 55 bp, Artificial; identical to SEQ ID NO: 439942
  Synthetic oligonucleotide

SEQ ID NO: 595570 - DNA, 55 bp, Artificial; identical to SEQ ID NO: 439946
  Synthetic oligonucleotide

SEQ ID NO: 595571 - DNA, 57 bp, Artificial; identical to SEQ ID NO: 439952
  Synthetic oligonucleotide

SEQ ID NO: 595572 - DNA, 60 bp, Artificial; identical to SEQ ID NO: 439959
  Synthetic oligonucleotide

SEQ ID NO: 595573 - DNA, 60 bp, Artificial; identical to SEQ ID NO: 439960
  Synthetic oligonucleotide

SEQ ID NO: 595574 - DNA, 56 bp, Artificial; identical to SEQ ID NO: 439961
  Synthetic oligonucleotide

SEQ ID NO: 595575 - DNA, 60 bp, Artificial; identical to SEQ ID NO: 439963
  Synthetic oligonucleotide

SEQ ID NO: 595576 - DNA, 60 bp, Artificial; identical to SEQ ID NO: 439966
  Synthetic oligonucleotide

SEQ ID NO: 595577 - DNA, 60 bp, Artificial; identical to SEQ ID NO: 439969
  Synthetic oligonucleotide

SEQ ID NO: 595578 - DNA, 60 bp, Artificial; identical to SEQ ID NO: 439971
  Synthetic oligonucleotide

SEQ ID NO: 595579 - DNA, 55 bp, Artificial; identical to SEQ ID NO: 439973
  Synthetic oligonucleotide

SEQ ID NO: 595580 - DNA, 55 bp, Artificial; identical to SEQ ID NO: 439978
  Synthetic oligonucleotide

SEQ ID NO: 595581 - DNA, 60 bp, Artificial; identical to SEQ ID NO: 439982
  Synthetic oligonucleotide

SEQ ID NO: 595582 - DNA, 60 bp, Artificial; identical to SEQ ID NO: 439985
  Synthetic oligonucleotide

SEQ ID NO: 595583 - DNA, 55 bp, Artificial; identical to SEQ ID NO: 439988
  Synthetic oligonucleotide

SEQ ID NO: 595584 - DNA, 60 bp, Artificial; identical to SEQ ID NO: 439992
  Synthetic oligonucleotide

SEQ ID NO: 595585 - DNA, 60 bp, Artificial; identical to SEQ ID NO: 11721
  Synthetic oligonucleotide

SEQ ID NO: 595586 - DNA, 52 bp, Artificial; identical to SEQ ID NO: 439994
  Synthetic oligonucleotide

SEQ ID NO: 595587 - DNA, 55 bp, Artificial; identical to SEQ ID NO: 439998
  Synthetic oligonucleotide

SEQ ID NO: 595588 - DNA, 60 bp, Artificial; identical to SEQ ID NO: 440001
  Synthetic oligonucleotide

SEQ ID NO: 595589 - DNA, 60 bp, Artificial; identical to SEQ ID NO: 440003
  Synthetic oligonucleotide

SEQ ID NO: 595590 - DNA, 54 bp, Artificial; identical to SEQ ID NO: 440004
  Synthetic oligonucleotide

SEQ ID NO: 595591 - DNA, 60 bp, Artificial; identical to SEQ ID NO: 440005
  Synthetic oligonucleotide

SEQ ID NO: 595592 - DNA, 55 bp, Artificial; identical to SEQ ID NO: 440007
  Synthetic oligonucleotide

SEQ ID NO: 595593 - DNA, 59 bp, Artificial; identical to SEQ ID NO: 440011
  Synthetic oligonucleotide

SEQ ID NO: 595594 - DNA, 55 bp, Artificial; identical to SEQ ID NO: 440013
  Synthetic oligonucleotide

SEQ ID NO: 595595 - DNA, 55 bp, Artificial; identical to SEQ ID NO: 440016
  Synthetic oligonucleotide

SEQ ID NO: 595596 - DNA, 50 bp, Artificial; identical to SEQ ID NO: 440018
  Synthetic oligonucleotide

SEQ ID NO: 595597 - DNA, 60 bp, Artificial; identical to SEQ ID NO: 440020
  Synthetic oligonucleotide

SEQ ID NO: 595598 - DNA, 55 bp, Artificial; identical to SEQ ID NO: 440024
  Synthetic oligonucleotide

SEQ ID NO: 595599 - DNA, 55 bp, Artificial; identical to SEQ ID NO: 440025
  Synthetic oligonucleotide

SEQ ID NO: 595600 - DNA, 55 bp, Artificial; identical to SEQ ID NO: 440031
  Synthetic oligonucleotide

SEQ ID NO: 595601 - DNA, 53 bp, Artificial; identical to SEQ ID NO: 440032
  Synthetic oligonucleotide

SEQ ID NO: 595602 - DNA, 60 bp, Artificial; identical to SEQ ID NO: 440033
  Synthetic oligonucleotide

SEQ ID NO: 595603 - DNA, 58 bp, Artificial; identical to SEQ ID NO: 440039
  Synthetic oligonucleotide

SEQ ID NO: 595604 - DNA, 55 bp, Artificial; identical to SEQ ID NO: 440040
  Synthetic oligonucleotide

SEQ ID NO: 595605 - DNA, 58 bp, Artificial; identical to SEQ ID NO: 440042
  Synthetic oligonucleotide

SEQ ID NO: 595606 - DNA, 57 bp, Artificial; identical to SEQ ID NO: 440043
  Synthetic oligonucleotide

SEQ ID NO: 595607 - DNA, 52 bp, Artificial; identical to SEQ ID NO: 440046
  Synthetic oligonucleotide

SEQ ID NO: 595608 - DNA, 59 bp, Artificial; identical to SEQ ID NO: 440047
  Synthetic oligonucleotide

SEQ ID NO: 595609 - DNA, 55 bp, Artificial; identical to SEQ ID NO: 440051
  Synthetic oligonucleotide

SEQ ID NO: 595610 - DNA, 56 bp, Artificial; identical to SEQ ID NO: 440052
  Synthetic oligonucleotide

SEQ ID NO: 595611 - DNA, 60 bp, Artificial; identical to SEQ ID NO: 440061
  Synthetic oligonucleotide

SEQ ID NO: 595612 - DNA, 60 bp, Artificial; identical to SEQ ID NO: 440063
  Synthetic oligonucleotide

SEQ ID NO: 595613 - DNA, 55 bp, Artificial; identical to SEQ ID NO: 440064
  Synthetic oligonucleotide

SEQ ID NO: 595614 - DNA, 60 bp, Artificial; identical to SEQ ID NO: 440065
  Synthetic oligonucleotide

SEQ ID NO: 595615 - DNA, 53 bp, Artificial; identical to SEQ ID NO: 440066
  Synthetic oligonucleotide

SEQ ID NO: 595616 - DNA, 52 bp, Artificial; identical to SEQ ID NO: 440068
  Synthetic oligonucleotide

SEQ ID NO: 595617 - DNA, 60 bp, Artificial; identical to SEQ ID NO: 440069
  Synthetic oligonucleotide

SEQ ID NO: 595618 - DNA, 60 bp, Artificial; identical to SEQ ID NO: 440072
  Synthetic oligonucleotide

SEQ ID NO: 595619 - DNA, 60 bp, Artificial; identical to SEQ ID NO: 10076
  Synthetic oligonucleotide

SEQ ID NO: 595620 - DNA, 54 bp, Artificial; identical to SEQ ID NO: 440075
  Synthetic oligonucleotide

SEQ ID NO: 595621 - DNA, 60 bp, Artificial; identical to SEQ ID NO: 440076
  Synthetic oligonucleotide

SEQ ID NO: 595622 - DNA, 57 bp, Artificial; identical to SEQ ID NO: 440077
  Synthetic oligonucleotide

SEQ ID NO: 595623 - DNA, 60 bp, Artificial; identical to SEQ ID NO: 14376
  Synthetic oligonucleotide

SEQ ID NO: 595624 - DNA, 59 bp, Artificial; identical to SEQ ID NO: 440082
  Synthetic oligonucleotide

SEQ ID NO: 595625 - DNA, 55 bp, Artificial; identical to SEQ ID NO: 440083
  Synthetic oligonucleotide

SEQ ID NO: 595626 - DNA, 55 bp, Artificial; identical to SEQ ID NO: 440086
  Synthetic oligonucleotide

SEQ ID NO: 595627 - DNA, 60 bp, Artificial; identical to SEQ ID NO: 440087
  Synthetic oligonucleotide

SEQ ID NO: 595628 - DNA, 55 bp, Artificial; identical to SEQ ID NO: 440089
  Synthetic oligonucleotide

SEQ ID NO: 595629 - DNA, 60 bp, Artificial; identical to SEQ ID NO: 440092
  Synthetic oligonucleotide

SEQ ID NO: 595630 - DNA, 60 bp, Artificial; identical to SEQ ID NO: 8691
  Synthetic oligonucleotide

SEQ ID NO: 595631 - DNA, 60 bp, Artificial; identical to SEQ ID NO: 440097
  Synthetic oligonucleotide

SEQ ID NO: 595632 - DNA, 55 bp, Artificial; identical to SEQ ID NO: 440098
  Synthetic oligonucleotide

SEQ ID NO: 595633 - DNA, 60 bp, Artificial; identical to SEQ ID NO: 440099
  Synthetic oligonucleotide

SEQ ID NO: 595634 - DNA, 60 bp, Artificial; identical to SEQ ID NO: 440103
  Synthetic oligonucleotide

SEQ ID NO: 595635 - DNA, 55 bp, Artificial; identical to SEQ ID NO: 440105
  Synthetic oligonucleotide

SEQ ID NO: 595636 - DNA, 60 bp, Artificial; identical to SEQ ID NO: 440108
  Synthetic oligonucleotide

SEQ ID NO: 595637 - DNA, 54 bp, Artificial; identical to SEQ ID NO: 440113
  Synthetic oligonucleotide

SEQ ID NO: 595638 - DNA, 58 bp, Artificial; identical to SEQ ID NO: 440120
  Synthetic oligonucleotide

SEQ ID NO: 595639 - DNA, 55 bp, Artificial; identical to SEQ ID NO: 440121
  Synthetic oligonucleotide

SEQ ID NO: 595640 - DNA, 55 bp, Artificial; identical to SEQ ID NO: 440128
  Synthetic oligonucleotide

SEQ ID NO: 595641 - DNA, 58 bp, Artificial; identical to SEQ ID NO: 440129
  Synthetic oligonucleotide

SEQ ID NO: 595642 - DNA, 60 bp, Artificial; identical to SEQ ID NO: 440130
  Synthetic oligonucleotide

SEQ ID NO: 595643 - DNA, 60 bp, Artificial; identical to SEQ ID NO: 440131
  Synthetic oligonucleotide

SEQ ID NO: 595644 - DNA, 56 bp, Artificial; identical to SEQ ID NO: 440135
  Synthetic oligonucleotide

SEQ ID NO: 595645 - DNA, 60 bp, Artificial; identical to SEQ ID NO: 440136
  Synthetic oligonucleotide

SEQ ID NO: 595646 - DNA, 60 bp, Artificial; identical to SEQ ID NO: 440142
  Synthetic oligonucleotide

SEQ ID NO: 595647 - DNA, 54 bp, Artificial; identical to SEQ ID NO: 440144
  Synthetic oligonucleotide

SEQ ID NO: 595648 - DNA, 60 bp, Artificial; identical to SEQ ID NO: 440148
  Synthetic oligonucleotide

SEQ ID NO: 595649 - DNA, 55 bp, Artificial; identical to SEQ ID NO: 440149
  Synthetic oligonucleotide

SEQ ID NO: 595650 - DNA, 56 bp, Artificial; identical to SEQ ID NO: 440155
  Synthetic oligonucleotide

SEQ ID NO: 595651 - DNA, 54 bp, Artificial; identical to SEQ ID NO: 440158
  Synthetic oligonucleotide

SEQ ID NO: 595652 - DNA, 53 bp, Artificial; identical to SEQ ID NO: 440164
  Synthetic oligonucleotide

SEQ ID NO: 595653 - DNA, 57 bp, Artificial; identical to SEQ ID NO: 440166
  Synthetic oligonucleotide

SEQ ID NO: 595654 - DNA, 59 bp, Artificial; identical to SEQ ID NO: 440167
  Synthetic oligonucleotide

SEQ ID NO: 595655 - DNA, 55 bp, Artificial; identical to SEQ ID NO: 440172
  Synthetic oligonucleotide

SEQ ID NO: 595656 - DNA, 55 bp, Artificial; identical to SEQ ID NO: 440176
  Synthetic oligonucleotide

SEQ ID NO: 595657 - DNA, 50 bp, Artificial; identical to SEQ ID NO: 440182
  Synthetic oligonucleotide

SEQ ID NO: 595658 - DNA, 59 bp, Artificial; identical to SEQ ID NO: 440183
  Synthetic oligonucleotide

SEQ ID NO: 595659 - DNA, 55 bp, Artificial; identical to SEQ ID NO: 440184
  Synthetic oligonucleotide

SEQ ID NO: 595660 - DNA, 57 bp, Artificial; identical to SEQ ID NO: 440185
  Synthetic oligonucleotide

SEQ ID NO: 595661 - DNA, 58 bp, Artificial; identical to SEQ ID NO: 440190
  Synthetic oligonucleotide

SEQ ID NO: 595662 - DNA, 58 bp, Artificial; identical to SEQ ID NO: 440193
  Synthetic oligonucleotide

SEQ ID NO: 595663 - DNA, 55 bp, Artificial; identical to SEQ ID NO: 440194
  Synthetic oligonucleotide

SEQ ID NO: 595664 - DNA, 55 bp, Artificial; identical to SEQ ID NO: 440199
  Synthetic oligonucleotide

SEQ ID NO: 595665 - DNA, 55 bp, Artificial; identical to SEQ ID NO: 440200
  Synthetic oligonucleotide

SEQ ID NO: 595666 - DNA, 57 bp, Artificial; identical to SEQ ID NO: 440201
  Synthetic oligonucleotide

SEQ ID NO: 595667 - DNA, 55 bp, Artificial; identical to SEQ ID NO: 440204
  Synthetic oligonucleotide

SEQ ID NO: 595668 - DNA, 60 bp, Artificial; identical to SEQ ID NO: 440205
  Synthetic oligonucleotide

SEQ ID NO: 595669 - DNA, 54 bp, Artificial; identical to SEQ ID NO: 440206
  Synthetic oligonucleotide

SEQ ID NO: 595670 - DNA, 51 bp, Artificial; identical to SEQ ID NO: 440207
  Synthetic oligonucleotide

SEQ ID NO: 595671 - DNA, 55 bp, Artificial; identical to SEQ ID NO: 440208
  Synthetic oligonucleotide

SEQ ID NO: 595672 - DNA, 59 bp, Artificial; identical to SEQ ID NO: 440211
  Synthetic oligonucleotide

SEQ ID NO: 595673 - DNA, 60 bp, Artificial; identical to SEQ ID NO: 440217
  Synthetic oligonucleotide

SEQ ID NO: 595674 - DNA, 60 bp, Artificial; identical to SEQ ID NO: 440220
  Synthetic oligonucleotide

SEQ ID NO: 595675 - DNA, 60 bp, Artificial; identical to SEQ ID NO: 440222
  Synthetic oligonucleotide

SEQ ID NO: 595676 - DNA, 60 bp, Artificial; identical to SEQ ID NO: 440223
  Synthetic oligonucleotide

SEQ ID NO: 595677 - DNA, 55 bp, Artificial; identical to SEQ ID NO: 440225
  Synthetic oligonucleotide

SEQ ID NO: 595678 - DNA, 60 bp, Artificial; identical to SEQ ID NO: 440226
  Synthetic oligonucleotide

SEQ ID NO: 595679 - DNA, 60 bp, Artificial; identical to SEQ ID NO: 440228
  Synthetic oligonucleotide

SEQ ID NO: 595680 - DNA, 55 bp, Artificial; identical to SEQ ID NO: 440230
  Synthetic oligonucleotide

SEQ ID NO: 595681 - DNA, 58 bp, Artificial; identical to SEQ ID NO: 440231
  Synthetic oligonucleotide

SEQ ID NO: 595682 - DNA, 60 bp, Artificial; identical to SEQ ID NO: 440232
  Synthetic oligonucleotide

SEQ ID NO: 595683 - DNA, 55 bp, Artificial; identical to SEQ ID NO: 440234
  Synthetic oligonucleotide

SEQ ID NO: 595684 - DNA, 55 bp, Artificial; identical to SEQ ID NO: 440239
  Synthetic oligonucleotide

SEQ ID NO: 595685 - DNA, 60 bp, Artificial; identical to SEQ ID NO: 70371
  Synthetic oligonucleotide

SEQ ID NO: 595686 - DNA, 60 bp, Artificial; identical to SEQ ID NO: 440244
  Synthetic oligonucleotide

SEQ ID NO: 595687 - DNA, 55 bp, Artificial; identical to SEQ ID NO: 440245
  Synthetic oligonucleotide

SEQ ID NO: 595688 - DNA, 60 bp, Artificial; identical to SEQ ID NO: 440248
  Synthetic oligonucleotide

SEQ ID NO: 595689 - DNA, 60 bp, Artificial; identical to SEQ ID NO: 440253
  Synthetic oligonucleotide

SEQ ID NO: 595690 - DNA, 60 bp, Artificial; identical to SEQ ID NO: 440257
  Synthetic oligonucleotide

SEQ ID NO: 595691 - DNA, 55 bp, Artificial; identical to SEQ ID NO: 440258
  Synthetic oligonucleotide

SEQ ID NO: 595692 - DNA, 55 bp, Artificial; identical to SEQ ID NO: 440259
  Synthetic oligonucleotide

SEQ ID NO: 595693 - DNA, 52 bp, Artificial; identical to SEQ ID NO: 440260
  Synthetic oligonucleotide

SEQ ID NO: 595694 - DNA, 55 bp, Artificial; identical to SEQ ID NO: 440262
  Synthetic oligonucleotide

SEQ ID NO: 595695 - DNA, 60 bp, Artificial; identical to SEQ ID NO: 440265
  Synthetic oligonucleotide

SEQ ID NO: 595696 - DNA, 60 bp, Artificial; identical to SEQ ID NO: 440266
  Synthetic oligonucleotide

SEQ ID NO: 595697 - DNA, 60 bp, Artificial; identical to SEQ ID NO: 440267
  Synthetic oligonucleotide

SEQ ID NO: 595698 - DNA, 60 bp, Artificial; identical to SEQ ID NO: 440276
  Synthetic oligonucleotide

SEQ ID NO: 595699 - DNA, 58 bp, Artificial; identical to SEQ ID NO: 440280
  Synthetic oligonucleotide

SEQ ID NO: 595700 - DNA, 54 bp, Artificial; identical to SEQ ID NO: 440281
  Synthetic oligonucleotide

SEQ ID NO: 595701 - DNA, 60 bp, Artificial; identical to SEQ ID NO: 440283
  Synthetic oligonucleotide

SEQ ID NO: 595702 - DNA, 56 bp, Artificial; identical to SEQ ID NO: 440284
  Synthetic oligonucleotide

SEQ ID NO: 595703 - DNA, 60 bp, Artificial; identical to SEQ ID NO: 440289
  Synthetic oligonucleotide

SEQ ID NO: 595704 - DNA, 59 bp, Artificial; identical to SEQ ID NO: 440292
  Synthetic oligonucleotide

SEQ ID NO: 595705 - DNA, 60 bp, Artificial; identical to SEQ ID NO: 440296
  Synthetic oligonucleotide

SEQ ID NO: 595706 - DNA, 59 bp, Artificial; identical to SEQ ID NO: 6022
  Synthetic oligonucleotide

SEQ ID NO: 595707 - DNA, 60 bp, Artificial; identical to SEQ ID NO: 440299
  Synthetic oligonucleotide

SEQ ID NO: 595708 - DNA, 55 bp, Artificial; identical to SEQ ID NO: 440301
  Synthetic oligonucleotide

SEQ ID NO: 595709 - DNA, 55 bp, Artificial; identical to SEQ ID NO: 440303
  Synthetic oligonucleotide

SEQ ID NO: 595710 - DNA, 55 bp, Artificial; identical to SEQ ID NO: 440306
  Synthetic oligonucleotide

SEQ ID NO: 595711 - DNA, 55 bp, Artificial; identical to SEQ ID NO: 440307
  Synthetic oligonucleotide

SEQ ID NO: 595712 - DNA, 56 bp, Artificial; identical to SEQ ID NO: 440309
  Synthetic oligonucleotide

SEQ ID NO: 595713 - DNA, 55 bp, Artificial; identical to SEQ ID NO: 440310
  Synthetic oligonucleotide

SEQ ID NO: 595714 - DNA, 55 bp, Artificial; identical to SEQ ID NO: 440314
  Synthetic oligonucleotide

SEQ ID NO: 595715 - DNA, 60 bp, Artificial; identical to SEQ ID NO: 13422
  Synthetic oligonucleotide

SEQ ID NO: 595716 - DNA, 55 bp, Artificial; identical to SEQ ID NO: 11018
  Synthetic oligonucleotide

SEQ ID NO: 595717 - DNA, 55 bp, Artificial; identical to SEQ ID NO: 440319
  Synthetic oligonucleotide

SEQ ID NO: 595718 - DNA, 60 bp, Artificial; identical to SEQ ID NO: 440321
  Synthetic oligonucleotide

SEQ ID NO: 595719 - DNA, 60 bp, Artificial; identical to SEQ ID NO: 440323
  Synthetic oligonucleotide

SEQ ID NO: 595720 - DNA, 60 bp, Artificial; identical to SEQ ID NO: 440325
  Synthetic oligonucleotide

SEQ ID NO: 595721 - DNA, 51 bp, Artificial; identical to SEQ ID NO: 440327
  Synthetic oligonucleotide

SEQ ID NO: 595722 - DNA, 55 bp, Artificial; identical to SEQ ID NO: 440328
  Synthetic oligonucleotide

SEQ ID NO: 595723 - DNA, 58 bp, Artificial; identical to SEQ ID NO: 440329
  Synthetic oligonucleotide

SEQ ID NO: 595724 - DNA, 55 bp, Artificial; identical to SEQ ID NO: 440331
  Synthetic oligonucleotide

SEQ ID NO: 595725 - DNA, 60 bp, Artificial; identical to SEQ ID NO: 440332
  Synthetic oligonucleotide

SEQ ID NO: 595726 - DNA, 51 bp, Artificial; identical to SEQ ID NO: 440333
  Synthetic oligonucleotide

SEQ ID NO: 595727 - DNA, 51 bp, Artificial; identical to SEQ ID NO: 440338
  Synthetic oligonucleotide

SEQ ID NO: 595728 - DNA, 60 bp, Artificial; identical to SEQ ID NO: 440341
  Synthetic oligonucleotide

SEQ ID NO: 595729 - DNA, 60 bp, Artificial; identical to SEQ ID NO: 13283
  Synthetic oligonucleotide

SEQ ID NO: 595730 - DNA, 55 bp, Artificial; identical to SEQ ID NO: 440346
  Synthetic oligonucleotide

SEQ ID NO: 595731 - DNA, 55 bp, Artificial; identical to SEQ ID NO: 440353
  Synthetic oligonucleotide

SEQ ID NO: 595732 - DNA, 60 bp, Artificial; identical to SEQ ID NO: 440354
  Synthetic oligonucleotide

SEQ ID NO: 595733 - DNA, 60 bp, Artificial; identical to SEQ ID NO: 440360
  Synthetic oligonucleotide

SEQ ID NO: 595734 - DNA, 55 bp, Artificial; identical to SEQ ID NO: 440362
  Synthetic oligonucleotide

SEQ ID NO: 595735 - DNA, 55 bp, Artificial; identical to SEQ ID NO: 440364
  Synthetic oligonucleotide

SEQ ID NO: 595736 - DNA, 55 bp, Artificial; identical to SEQ ID NO: 440367
  Synthetic oligonucleotide

SEQ ID NO: 595737 - DNA, 55 bp, Artificial; identical to SEQ ID NO: 440368
  Synthetic oligonucleotide

SEQ ID NO: 595738 - DNA, 60 bp, Artificial; identical to SEQ ID NO: 440371
  Synthetic oligonucleotide

SEQ ID NO: 595739 - DNA, 55 bp, Artificial; identical to SEQ ID NO: 440373
  Synthetic oligonucleotide

SEQ ID NO: 595740 - DNA, 52 bp, Artificial; identical to SEQ ID NO: 440376
  Synthetic oligonucleotide

SEQ ID NO: 595741 - DNA, 55 bp, Artificial; identical to SEQ ID NO: 440379
  Synthetic oligonucleotide

SEQ ID NO: 595742 - DNA, 60 bp, Artificial; identical to SEQ ID NO: 440380
  Synthetic oligonucleotide

SEQ ID NO: 595743 - DNA, 60 bp, Artificial; identical to SEQ ID NO: 440381
  Synthetic oligonucleotide

SEQ ID NO: 595744 - DNA, 55 bp, Artificial; identical to SEQ ID NO: 440383
  Synthetic oligonucleotide

SEQ ID NO: 595745 - DNA, 60 bp, Artificial; identical to SEQ ID NO: 440385
  Synthetic oligonucleotide

SEQ ID NO: 595746 - DNA, 51 bp, Artificial; identical to SEQ ID NO: 440386
  Synthetic oligonucleotide

SEQ ID NO: 595747 - DNA, 60 bp, Artificial; identical to SEQ ID NO: 440389
  Synthetic oligonucleotide

SEQ ID NO: 595748 - DNA, 59 bp, Artificial; identical to SEQ ID NO: 440392
  Synthetic oligonucleotide

SEQ ID NO: 595749 - DNA, 55 bp, Artificial; identical to SEQ ID NO: 440393
  Synthetic oligonucleotide

SEQ ID NO: 595750 - DNA, 60 bp, Artificial; identical to SEQ ID NO: 440398
  Synthetic oligonucleotide

SEQ ID NO: 595751 - DNA, 51 bp, Artificial; identical to SEQ ID NO: 440402
  Synthetic oligonucleotide

SEQ ID NO: 595752 - DNA, 54 bp, Artificial; identical to SEQ ID NO: 19593
  Synthetic oligonucleotide

SEQ ID NO: 595753 - DNA, 56 bp, Artificial; identical to SEQ ID NO: 440403
  Synthetic oligonucleotide

SEQ ID NO: 595754 - DNA, 59 bp, Artificial; identical to SEQ ID NO: 440404
  Synthetic oligonucleotide

SEQ ID NO: 595755 - DNA, 52 bp, Artificial; identical to SEQ ID NO: 440406
  Synthetic oligonucleotide

SEQ ID NO: 595756 - DNA, 55 bp, Artificial; identical to SEQ ID NO: 440408
  Synthetic oligonucleotide

SEQ ID NO: 595757 - DNA, 55 bp, Artificial; identical to SEQ ID NO: 440409
  Synthetic oligonucleotide

SEQ ID NO: 595758 - DNA, 59 bp, Artificial; identical to SEQ ID NO: 440410
  Synthetic oligonucleotide

SEQ ID NO: 595759 - DNA, 60 bp, Artificial; identical to SEQ ID NO: 440412
  Synthetic oligonucleotide

SEQ ID NO: 595760 - DNA, 55 bp, Artificial; identical to SEQ ID NO: 440413
  Synthetic oligonucleotide

SEQ ID NO: 595761 - DNA, 55 bp, Artificial; identical to SEQ ID NO: 440416
  Synthetic oligonucleotide

SEQ ID NO: 595762 - DNA, 60 bp, Artificial; identical to SEQ ID NO: 440417
  Synthetic oligonucleotide

SEQ ID NO: 595763 - DNA, 50 bp, Artificial; identical to SEQ ID NO: 440418
  Synthetic oligonucleotide

SEQ ID NO: 595764 - DNA, 60 bp, Artificial; identical to SEQ ID NO: 440420
  Synthetic oligonucleotide

SEQ ID NO: 595765 - DNA, 51 bp, Artificial; identical to SEQ ID NO: 440421
  Synthetic oligonucleotide

SEQ ID NO: 595766 - DNA, 60 bp, Artificial; identical to SEQ ID NO: 14951
  Synthetic oligonucleotide

SEQ ID NO: 595767 - DNA, 55 bp, Artificial; identical to SEQ ID NO: 440424
  Synthetic oligonucleotide

SEQ ID NO: 595768 - DNA, 55 bp, Artificial; identical to SEQ ID NO: 440430
  Synthetic oligonucleotide

SEQ ID NO: 595769 - DNA, 55 bp, Artificial; identical to SEQ ID NO: 440431
  Synthetic oligonucleotide

SEQ ID NO: 595770 - DNA, 55 bp, Artificial; identical to SEQ ID NO: 440432
  Synthetic oligonucleotide

SEQ ID NO: 595771 - DNA, 60 bp, Artificial; identical to SEQ ID NO: 440435
  Synthetic oligonucleotide

SEQ ID NO: 595772 - DNA, 59 bp, Artificial; identical to SEQ ID NO: 440438
  Synthetic oligonucleotide

SEQ ID NO: 595773 - DNA, 60 bp, Artificial; identical to SEQ ID NO: 440442
  Synthetic oligonucleotide

SEQ ID NO: 595774 - DNA, 55 bp, Artificial; identical to SEQ ID NO: 440446
  Synthetic oligonucleotide

SEQ ID NO: 595775 - DNA, 60 bp, Artificial; identical to SEQ ID NO: 440447
  Synthetic oligonucleotide

SEQ ID NO: 595776 - DNA, 59 bp, Artificial; identical to SEQ ID NO: 19081
  Synthetic oligonucleotide

SEQ ID NO: 595777 - DNA, 60 bp, Artificial; identical to SEQ ID NO: 440452
  Synthetic oligonucleotide

SEQ ID NO: 595778 - DNA, 51 bp, Artificial; identical to SEQ ID NO: 440456
  Synthetic oligonucleotide

SEQ ID NO: 595779 - DNA, 55 bp, Artificial; identical to SEQ ID NO: 440457
  Synthetic oligonucleotide

SEQ ID NO: 595780 - DNA, 54 bp, Artificial; identical to SEQ ID NO: 440463
  Synthetic oligonucleotide

SEQ ID NO: 595781 - DNA, 58 bp, Artificial; identical to SEQ ID NO: 440465
  Synthetic oligonucleotide

SEQ ID NO: 595782 - DNA, 55 bp, Artificial; identical to SEQ ID NO: 440470
  Synthetic oligonucleotide

SEQ ID NO: 595783 - DNA, 57 bp, Artificial; identical to SEQ ID NO: 440471
  Synthetic oligonucleotide

SEQ ID NO: 595784 - DNA, 55 bp, Artificial; identical to SEQ ID NO: 440472
  Synthetic oligonucleotide

SEQ ID NO: 595785 - DNA, 60 bp, Artificial; identical to SEQ ID NO: 440473
  Synthetic oligonucleotide

SEQ ID NO: 595786 - DNA, 52 bp, Artificial; identical to SEQ ID NO: 440476
  Synthetic oligonucleotide

SEQ ID NO: 595787 - DNA, 59 bp, Artificial; identical to SEQ ID NO: 440478
  Synthetic oligonucleotide

SEQ ID NO: 595788 - DNA, 60 bp, Artificial; identical to SEQ ID NO: 10003
  Synthetic oligonucleotide

SEQ ID NO: 595789 - DNA, 60 bp, Artificial; identical to SEQ ID NO: 440481
  Synthetic oligonucleotide

SEQ ID NO: 595790 - DNA, 55 bp, Artificial; identical to SEQ ID NO: 6379
  Synthetic oligonucleotide

SEQ ID NO: 595791 - DNA, 52 bp, Artificial; identical to SEQ ID NO: 440483
  Synthetic oligonucleotide

SEQ ID NO: 595792 - DNA, 60 bp, Artificial; identical to SEQ ID NO: 440487
  Synthetic oligonucleotide

SEQ ID NO: 595793 - DNA, 55 bp, Artificial; identical to SEQ ID NO: 440490
  Synthetic oligonucleotide

SEQ ID NO: 595794 - DNA, 55 bp, Artificial; identical to SEQ ID NO: 6990
  Synthetic oligonucleotide

SEQ ID NO: 595795 - DNA, 60 bp, Artificial; identical to SEQ ID NO: 440497
  Synthetic oligonucleotide

SEQ ID NO: 595796 - DNA, 56 bp, Artificial; identical to SEQ ID NO: 440498
  Synthetic oligonucleotide

SEQ ID NO: 595797 - DNA, 56 bp, Artificial; identical to SEQ ID NO: 440500
  Synthetic oligonucleotide

SEQ ID NO: 595798 - DNA, 59 bp, Artificial; identical to SEQ ID NO: 440501
  Synthetic oligonucleotide

SEQ ID NO: 595799 - DNA, 55 bp, Artificial; identical to SEQ ID NO: 8441
  Synthetic oligonucleotide

SEQ ID NO: 595800 - DNA, 57 bp, Artificial; identical to SEQ ID NO: 440506
  Synthetic oligonucleotide

SEQ ID NO: 595801 - DNA, 60 bp, Artificial; identical to SEQ ID NO: 440507
  Synthetic oligonucleotide

SEQ ID NO: 595802 - DNA, 55 bp, Artificial; identical to SEQ ID NO: 440508
  Synthetic oligonucleotide

SEQ ID NO: 595803 - DNA, 55 bp, Artificial; identical to SEQ ID NO: 440509
  Synthetic oligonucleotide

SEQ ID NO: 595804 - DNA, 60 bp, Artificial; identical to SEQ ID NO: 440510
  Synthetic oligonucleotide

SEQ ID NO: 595805 - DNA, 60 bp, Artificial; identical to SEQ ID NO: 440512
  Synthetic oligonucleotide

SEQ ID NO: 595806 - DNA, 55 bp, Artificial; identical to SEQ ID NO: 440514
  Synthetic oligonucleotide

SEQ ID NO: 595807 - DNA, 58 bp, Artificial; identical to SEQ ID NO: 19063
  Synthetic oligonucleotide

SEQ ID NO: 595808 - DNA, 58 bp, Artificial; identical to SEQ ID NO: 440526
  Synthetic oligonucleotide

SEQ ID NO: 595809 - DNA, 55 bp, Artificial; identical to SEQ ID NO: 14186
  Synthetic oligonucleotide

SEQ ID NO: 595810 - DNA, 55 bp, Artificial; identical to SEQ ID NO: 440530
  Synthetic oligonucleotide

SEQ ID NO: 595811 - DNA, 60 bp, Artificial; identical to SEQ ID NO: 440534
  Synthetic oligonucleotide

SEQ ID NO: 595812 - DNA, 55 bp, Artificial; identical to SEQ ID NO: 440538
  Synthetic oligonucleotide

SEQ ID NO: 595813 - DNA, 60 bp, Artificial; identical to SEQ ID NO: 10454
  Synthetic oligonucleotide

SEQ ID NO: 595814 - DNA, 60 bp, Artificial; identical to SEQ ID NO: 440545
  Synthetic oligonucleotide

SEQ ID NO: 595815 - DNA, 60 bp, Artificial; identical to SEQ ID NO: 440546
  Synthetic oligonucleotide

SEQ ID NO: 595816 - DNA, 60 bp, Artificial; identical to SEQ ID NO: 440552
  Synthetic oligonucleotide

SEQ ID NO: 595817 - DNA, 55 bp, Artificial; identical to SEQ ID NO: 440554
  Synthetic oligonucleotide

SEQ ID NO: 595818 - DNA, 57 bp, Artificial; identical to SEQ ID NO: 440557
  Synthetic oligonucleotide

SEQ ID NO: 595819 - DNA, 56 bp, Artificial; identical to SEQ ID NO: 440563
  Synthetic oligonucleotide

SEQ ID NO: 595820 - DNA, 55 bp, Artificial; identical to SEQ ID NO: 440564
  Synthetic oligonucleotide

SEQ ID NO: 595821 - DNA, 55 bp, Artificial; identical to SEQ ID NO: 440565
  Synthetic oligonucleotide

SEQ ID NO: 595822 - DNA, 54 bp, Artificial; identical to SEQ ID NO: 440566
  Synthetic oligonucleotide

SEQ ID NO: 595823 - DNA, 56 bp, Artificial; identical to SEQ ID NO: 440570
  Synthetic oligonucleotide

SEQ ID NO: 595824 - DNA, 60 bp, Artificial; identical to SEQ ID NO: 440575
  Synthetic oligonucleotide

SEQ ID NO: 595825 - DNA, 53 bp, Artificial; identical to SEQ ID NO: 440576
  Synthetic oligonucleotide

SEQ ID NO: 595826 - DNA, 60 bp, Artificial; identical to SEQ ID NO: 440579
  Synthetic oligonucleotide

SEQ ID NO: 595827 - DNA, 57 bp, Artificial; identical to SEQ ID NO: 440583
  Synthetic oligonucleotide

SEQ ID NO: 595828 - DNA, 58 bp, Artificial; identical to SEQ ID NO: 440587
  Synthetic oligonucleotide

SEQ ID NO: 595829 - DNA, 57 bp, Artificial; identical to SEQ ID NO: 440589
  Synthetic oligonucleotide

SEQ ID NO: 595830 - DNA, 56 bp, Artificial; identical to SEQ ID NO: 440590
  Synthetic oligonucleotide

SEQ ID NO: 595831 - DNA, 55 bp, Artificial; identical to SEQ ID NO: 440595
  Synthetic oligonucleotide

SEQ ID NO: 595832 - DNA, 60 bp, Artificial; identical to SEQ ID NO: 440597
  Synthetic oligonucleotide

SEQ ID NO: 595833 - DNA, 60 bp, Artificial; identical to SEQ ID NO: 440600
  Synthetic oligonucleotide

SEQ ID NO: 595834 - DNA, 57 bp, Artificial; identical to SEQ ID NO: 440601
  Synthetic oligonucleotide

SEQ ID NO: 595835 - DNA, 54 bp, Artificial; identical to SEQ ID NO: 440602
  Synthetic oligonucleotide

SEQ ID NO: 595836 - DNA, 58 bp, Artificial; identical to SEQ ID NO: 440604
  Synthetic oligonucleotide

SEQ ID NO: 595837 - DNA, 60 bp, Artificial; identical to SEQ ID NO: 440608
  Synthetic oligonucleotide

SEQ ID NO: 595838 - DNA, 55 bp, Artificial; identical to SEQ ID NO: 440610
  Synthetic oligonucleotide

SEQ ID NO: 595839 - DNA, 55 bp, Artificial; identical to SEQ ID NO: 440616
  Synthetic oligonucleotide

SEQ ID NO: 595840 - DNA, 60 bp, Artificial; identical to SEQ ID NO: 440617
  Synthetic oligonucleotide

SEQ ID NO: 595841 - DNA, 55 bp, Artificial; identical to SEQ ID NO: 440622
  Synthetic oligonucleotide

SEQ ID NO: 595842 - DNA, 55 bp, Artificial; identical to SEQ ID NO: 440623
  Synthetic oligonucleotide

SEQ ID NO: 595843 - DNA, 55 bp, Artificial; identical to SEQ ID NO: 440627
  Synthetic oligonucleotide

SEQ ID NO: 595844 - DNA, 55 bp, Artificial; identical to SEQ ID NO: 440629
  Synthetic oligonucleotide

SEQ ID NO: 595845 - DNA, 53 bp, Artificial; identical to SEQ ID NO: 440630
  Synthetic oligonucleotide

SEQ ID NO: 595846 - DNA, 54 bp, Artificial; identical to SEQ ID NO: 440631
  Synthetic oligonucleotide

SEQ ID NO: 595847 - DNA, 60 bp, Artificial; identical to SEQ ID NO: 12553
  Synthetic oligonucleotide

SEQ ID NO: 595848 - DNA, 59 bp, Artificial; identical to SEQ ID NO: 440634
  Synthetic oligonucleotide

SEQ ID NO: 595849 - DNA, 53 bp, Artificial; identical to SEQ ID NO: 440640
  Synthetic oligonucleotide

SEQ ID NO: 595850 - DNA, 60 bp, Artificial; identical to SEQ ID NO: 440641
  Synthetic oligonucleotide

SEQ ID NO: 595851 - DNA, 60 bp, Artificial; identical to SEQ ID NO: 440642
  Synthetic oligonucleotide

SEQ ID NO: 595852 - DNA, 55 bp, Artificial; identical to SEQ ID NO: 440643
  Synthetic oligonucleotide

SEQ ID NO: 595853 - DNA, 55 bp, Artificial; identical to SEQ ID NO: 440644
  Synthetic oligonucleotide

SEQ ID NO: 595854 - DNA, 55 bp, Artificial; identical to SEQ ID NO: 440646
  Synthetic oligonucleotide

SEQ ID NO: 595855 - DNA, 55 bp, Artificial; identical to SEQ ID NO: 440647
  Synthetic oligonucleotide

SEQ ID NO: 595856 - DNA, 58 bp, Artificial; identical to SEQ ID NO: 440648
  Synthetic oligonucleotide

SEQ ID NO: 595857 - DNA, 50 bp, Artificial; identical to SEQ ID NO: 6891
  Synthetic oligonucleotide

SEQ ID NO: 595858 - DNA, 55 bp, Artificial; identical to SEQ ID NO: 440654
  Synthetic oligonucleotide

SEQ ID NO: 595859 - DNA, 60 bp, Artificial; identical to SEQ ID NO: 440656
  Synthetic oligonucleotide

SEQ ID NO: 595860 - DNA, 59 bp, Artificial; identical to SEQ ID NO: 440659
  Synthetic oligonucleotide

SEQ ID NO: 595861 - DNA, 55 bp, Artificial; identical to SEQ ID NO: 440662
  Synthetic oligonucleotide

SEQ ID NO: 595862 - DNA, 55 bp, Artificial; identical to SEQ ID NO: 440665
  Synthetic oligonucleotide

SEQ ID NO: 595863 - DNA, 56 bp, Artificial; identical to SEQ ID NO: 440669
  Synthetic oligonucleotide

SEQ ID NO: 595864 - DNA, 53 bp, Artificial; identical to SEQ ID NO: 16187
  Synthetic oligonucleotide

SEQ ID NO: 595865 - DNA, 52 bp, Artificial; identical to SEQ ID NO: 440675
  Synthetic oligonucleotide

SEQ ID NO: 595866 - DNA, 59 bp, Artificial; identical to SEQ ID NO: 440676
  Synthetic oligonucleotide

SEQ ID NO: 595867 - DNA, 53 bp, Artificial; identical to SEQ ID NO: 440677
  Synthetic oligonucleotide

SEQ ID NO: 595868 - DNA, 55 bp, Artificial; identical to SEQ ID NO: 440678
  Synthetic oligonucleotide

SEQ ID NO: 595869 - DNA, 54 bp, Artificial; identical to SEQ ID NO: 440681
  Synthetic oligonucleotide

SEQ ID NO: 595870 - DNA, 60 bp, Artificial; identical to SEQ ID NO: 440682
  Synthetic oligonucleotide

SEQ ID NO: 595871 - DNA, 55 bp, Artificial; identical to SEQ ID NO: 440683
  Synthetic oligonucleotide

SEQ ID NO: 595872 - DNA, 55 bp, Artificial; identical to SEQ ID NO: 440685
  Synthetic oligonucleotide

SEQ ID NO: 595873 - DNA, 60 bp, Artificial; identical to SEQ ID NO: 440689
  Synthetic oligonucleotide

SEQ ID NO: 595874 - DNA, 55 bp, Artificial; identical to SEQ ID NO: 440699
  Synthetic oligonucleotide

SEQ ID NO: 595875 - DNA, 60 bp, Artificial; identical to SEQ ID NO: 15645
  Synthetic oligonucleotide

SEQ ID NO: 595876 - DNA, 58 bp, Artificial; identical to SEQ ID NO: 18122
  Synthetic oligonucleotide

SEQ ID NO: 595877 - DNA, 52 bp, Artificial; identical to SEQ ID NO: 440703
  Synthetic oligonucleotide

SEQ ID NO: 595878 - DNA, 55 bp, Artificial; identical to SEQ ID NO: 440709
  Synthetic oligonucleotide

SEQ ID NO: 595879 - DNA, 60 bp, Artificial; identical to SEQ ID NO: 440710
  Synthetic oligonucleotide

SEQ ID NO: 595880 - DNA, 58 bp, Artificial; identical to SEQ ID NO: 440713
  Synthetic oligonucleotide

SEQ ID NO: 595881 - DNA, 55 bp, Artificial; identical to SEQ ID NO: 440714
  Synthetic oligonucleotide

SEQ ID NO: 595882 - DNA, 55 bp, Artificial; identical to SEQ ID NO: 440717
  Synthetic oligonucleotide

SEQ ID NO: 595883 - DNA, 55 bp, Artificial; identical to SEQ ID NO: 440721
  Synthetic oligonucleotide

SEQ ID NO: 595884 - DNA, 60 bp, Artificial; identical to SEQ ID NO: 440722
  Synthetic oligonucleotide

SEQ ID NO: 595885 - DNA, 55 bp, Artificial; identical to SEQ ID NO: 440724
  Synthetic oligonucleotide

SEQ ID NO: 595886 - DNA, 52 bp, Artificial; identical to SEQ ID NO: 440725
  Synthetic oligonucleotide

SEQ ID NO: 595887 - DNA, 53 bp, Artificial; identical to SEQ ID NO: 14400
  Synthetic oligonucleotide

SEQ ID NO: 595888 - DNA, 55 bp, Artificial; identical to SEQ ID NO: 440727
  Synthetic oligonucleotide

SEQ ID NO: 595889 - DNA, 55 bp, Artificial; identical to SEQ ID NO: 440730
  Synthetic oligonucleotide

SEQ ID NO: 595890 - DNA, 55 bp, Artificial; identical to SEQ ID NO: 440733
  Synthetic oligonucleotide

SEQ ID NO: 595891 - DNA, 60 bp, Artificial; identical to SEQ ID NO: 440734
  Synthetic oligonucleotide

SEQ ID NO: 595892 - DNA, 60 bp, Artificial; identical to SEQ ID NO: 14529
  Synthetic oligonucleotide

SEQ ID NO: 595893 - DNA, 60 bp, Artificial; identical to SEQ ID NO: 14276
  Synthetic oligonucleotide

SEQ ID NO: 595894 - DNA, 55 bp, Artificial; identical to SEQ ID NO: 440743
  Synthetic oligonucleotide

SEQ ID NO: 595895 - DNA, 60 bp, Artificial; identical to SEQ ID NO: 31824
  Synthetic oligonucleotide

SEQ ID NO: 595896 - DNA, 60 bp, Artificial; identical to SEQ ID NO: 440752
  Synthetic oligonucleotide

SEQ ID NO: 595897 - DNA, 55 bp, Artificial; identical to SEQ ID NO: 440753
  Synthetic oligonucleotide

SEQ ID NO: 595898 - DNA, 59 bp, Artificial; identical to SEQ ID NO: 440755
  Synthetic oligonucleotide

SEQ ID NO: 595899 - DNA, 55 bp, Artificial; identical to SEQ ID NO: 440756
  Synthetic oligonucleotide

SEQ ID NO: 595900 - DNA, 59 bp, Artificial; identical to SEQ ID NO: 440757
  Synthetic oligonucleotide

SEQ ID NO: 595901 - DNA, 57 bp, Artificial; identical to SEQ ID NO: 440764
  Synthetic oligonucleotide

SEQ ID NO: 595902 - DNA, 55 bp, Artificial; identical to SEQ ID NO: 440766
  Synthetic oligonucleotide

SEQ ID NO: 595903 - DNA, 55 bp, Artificial; identical to SEQ ID NO: 440767
  Synthetic oligonucleotide

SEQ ID NO: 595904 - DNA, 50 bp, Artificial; identical to SEQ ID NO: 440770
  Synthetic oligonucleotide

SEQ ID NO: 595905 - DNA, 55 bp, Artificial; identical to SEQ ID NO: 440774
  Synthetic oligonucleotide

SEQ ID NO: 595906 - DNA, 59 bp, Artificial; identical to SEQ ID NO: 440776
  Synthetic oligonucleotide

SEQ ID NO: 595907 - DNA, 50 bp, Artificial; identical to SEQ ID NO: 440779
  Synthetic oligonucleotide

SEQ ID NO: 595908 - DNA, 52 bp, Artificial; identical to SEQ ID NO: 440783
  Synthetic oligonucleotide

SEQ ID NO: 595909 - DNA, 55 bp, Artificial; identical to SEQ ID NO: 440786
  Synthetic oligonucleotide

SEQ ID NO: 595910 - DNA, 60 bp, Artificial; identical to SEQ ID NO: 440793
  Synthetic oligonucleotide

SEQ ID NO: 595911 - DNA, 52 bp, Artificial; identical to SEQ ID NO: 440794
  Synthetic oligonucleotide

SEQ ID NO: 595912 - DNA, 57 bp, Artificial; identical to SEQ ID NO: 440796
  Synthetic oligonucleotide

SEQ ID NO: 595913 - DNA, 55 bp, Artificial; identical to SEQ ID NO: 440797
  Synthetic oligonucleotide

SEQ ID NO: 595914 - DNA, 58 bp, Artificial; identical to SEQ ID NO: 440801
  Synthetic oligonucleotide

SEQ ID NO: 595915 - DNA, 52 bp, Artificial; identical to SEQ ID NO: 440802
  Synthetic oligonucleotide

SEQ ID NO: 595916 - DNA, 51 bp, Artificial; identical to SEQ ID NO: 440803
  Synthetic oligonucleotide

SEQ ID NO: 595917 - DNA, 57 bp, Artificial; identical to SEQ ID NO: 440804
  Synthetic oligonucleotide

SEQ ID NO: 595918 - DNA, 59 bp, Artificial; identical to SEQ ID NO: 440807
  Synthetic oligonucleotide

SEQ ID NO: 595919 - DNA, 55 bp, Artificial; identical to SEQ ID NO: 440810
  Synthetic oligonucleotide

SEQ ID NO: 595920 - DNA, 55 bp, Artificial; identical to SEQ ID NO: 440824
  Synthetic oligonucleotide

SEQ ID NO: 595921 - DNA, 60 bp, Artificial; identical to SEQ ID NO: 440834
  Synthetic oligonucleotide

SEQ ID NO: 595922 - DNA, 51 bp, Artificial; identical to SEQ ID NO: 440835
  Synthetic oligonucleotide

SEQ ID NO: 595923 - DNA, 60 bp, Artificial; identical to SEQ ID NO: 440838
  Synthetic oligonucleotide

SEQ ID NO: 595924 - DNA, 60 bp, Artificial; identical to SEQ ID NO: 440844
  Synthetic oligonucleotide

SEQ ID NO: 595925 - DNA, 55 bp, Artificial; identical to SEQ ID NO: 440851
  Synthetic oligonucleotide

SEQ ID NO: 595926 - DNA, 52 bp, Artificial; identical to SEQ ID NO: 10262
  Synthetic oligonucleotide

SEQ ID NO: 595927 - DNA, 56 bp, Artificial; identical to SEQ ID NO: 16536
  Synthetic oligonucleotide

SEQ ID NO: 595928 - DNA, 60 bp, Artificial; identical to SEQ ID NO: 440856
  Synthetic oligonucleotide

SEQ ID NO: 595929 - DNA, 60 bp, Artificial; identical to SEQ ID NO: 440861
  Synthetic oligonucleotide

SEQ ID NO: 595930 - DNA, 60 bp, Artificial; identical to SEQ ID NO: 440863
  Synthetic oligonucleotide

SEQ ID NO: 595931 - DNA, 60 bp, Artificial; identical to SEQ ID NO: 440865
  Synthetic oligonucleotide

SEQ ID NO: 595932 - DNA, 55 bp, Artificial; identical to SEQ ID NO: 440866
  Synthetic oligonucleotide

SEQ ID NO: 595933 - DNA, 55 bp, Artificial; identical to SEQ ID NO: 440867
  Synthetic oligonucleotide

SEQ ID NO: 595934 - DNA, 60 bp, Artificial; identical to SEQ ID NO: 15475
  Synthetic oligonucleotide

SEQ ID NO: 595935 - DNA, 57 bp, Artificial; identical to SEQ ID NO: 440869
  Synthetic oligonucleotide

SEQ ID NO: 595936 - DNA, 55 bp, Artificial; identical to SEQ ID NO: 440870
  Synthetic oligonucleotide

SEQ ID NO: 595937 - DNA, 60 bp, Artificial; identical to SEQ ID NO: 440872
  Synthetic oligonucleotide

SEQ ID NO: 595938 - DNA, 55 bp, Artificial; identical to SEQ ID NO: 440874
  Synthetic oligonucleotide

SEQ ID NO: 595939 - DNA, 55 bp, Artificial; identical to SEQ ID NO: 440876
  Synthetic oligonucleotide

SEQ ID NO: 595940 - DNA, 60 bp, Artificial; identical to SEQ ID NO: 440878
  Synthetic oligonucleotide

SEQ ID NO: 595941 - DNA, 57 bp, Artificial; identical to SEQ ID NO: 440880
  Synthetic oligonucleotide

SEQ ID NO: 595942 - DNA, 60 bp, Artificial; identical to SEQ ID NO: 440881
  Synthetic oligonucleotide

SEQ ID NO: 595943 - DNA, 55 bp, Artificial; identical to SEQ ID NO: 440884
  Synthetic oligonucleotide

SEQ ID NO: 595944 - DNA, 57 bp, Artificial; identical to SEQ ID NO: 440885
  Synthetic oligonucleotide

SEQ ID NO: 595945 - DNA, 55 bp, Artificial; identical to SEQ ID NO: 440887
  Synthetic oligonucleotide

SEQ ID NO: 595946 - DNA, 60 bp, Artificial; identical to SEQ ID NO: 440888
  Synthetic oligonucleotide

SEQ ID NO: 595947 - DNA, 59 bp, Artificial; identical to SEQ ID NO: 440891
  Synthetic oligonucleotide

SEQ ID NO: 595948 - DNA, 55 bp, Artificial; identical to SEQ ID NO: 440892
  Synthetic oligonucleotide

SEQ ID NO: 595949 - DNA, 52 bp, Artificial; identical to SEQ ID NO: 440894
  Synthetic oligonucleotide

SEQ ID NO: 595950 - DNA, 60 bp, Artificial; identical to SEQ ID NO: 440895
  Synthetic oligonucleotide

SEQ ID NO: 595951 - DNA, 60 bp, Artificial; identical to SEQ ID NO: 440897
  Synthetic oligonucleotide

SEQ ID NO: 595952 - DNA, 55 bp, Artificial; identical to SEQ ID NO: 440898
  Synthetic oligonucleotide

SEQ ID NO: 595953 - DNA, 58 bp, Artificial; identical to SEQ ID NO: 440905
  Synthetic oligonucleotide

SEQ ID NO: 595954 - DNA, 55 bp, Artificial; identical to SEQ ID NO: 440907
  Synthetic oligonucleotide

SEQ ID NO: 595955 - DNA, 60 bp, Artificial; identical to SEQ ID NO: 440910
  Synthetic oligonucleotide

SEQ ID NO: 595956 - DNA, 60 bp, Artificial; identical to SEQ ID NO: 440911
  Synthetic oligonucleotide

SEQ ID NO: 595957 - DNA, 60 bp, Artificial; identical to SEQ ID NO: 440912
  Synthetic oligonucleotide

SEQ ID NO: 595958 - DNA, 60 bp, Artificial; identical to SEQ ID NO: 440913
  Synthetic oligonucleotide

SEQ ID NO: 595959 - DNA, 54 bp, Artificial; identical to SEQ ID NO: 440918
  Synthetic oligonucleotide

SEQ ID NO: 595960 - DNA, 55 bp, Artificial; identical to SEQ ID NO: 440926
  Synthetic oligonucleotide

SEQ ID NO: 595961 - DNA, 60 bp, Artificial; identical to SEQ ID NO: 14608
  Synthetic oligonucleotide

SEQ ID NO: 595962 - DNA, 55 bp, Artificial; identical to SEQ ID NO: 440932
  Synthetic oligonucleotide

SEQ ID NO: 595963 - DNA, 60 bp, Artificial; identical to SEQ ID NO: 440933
  Synthetic oligonucleotide

SEQ ID NO: 595964 - DNA, 60 bp, Artificial; identical to SEQ ID NO: 440936
  Synthetic oligonucleotide

SEQ ID NO: 595965 - DNA, 55 bp, Artificial; identical to SEQ ID NO: 440938
  Synthetic oligonucleotide

SEQ ID NO: 595966 - DNA, 55 bp, Artificial; identical to SEQ ID NO: 440939
  Synthetic oligonucleotide

SEQ ID NO: 595967 - DNA, 55 bp, Artificial; identical to SEQ ID NO: 440940
  Synthetic oligonucleotide

SEQ ID NO: 595968 - DNA, 60 bp, Artificial; identical to SEQ ID NO: 440943
  Synthetic oligonucleotide

SEQ ID NO: 595969 - DNA, 60 bp, Artificial; identical to SEQ ID NO: 440945
  Synthetic oligonucleotide

SEQ ID NO: 595970 - DNA, 55 bp, Artificial; identical to SEQ ID NO: 440946
  Synthetic oligonucleotide

SEQ ID NO: 595971 - DNA, 60 bp, Artificial; identical to SEQ ID NO: 440947
  Synthetic oligonucleotide

SEQ ID NO: 595972 - DNA, 55 bp, Artificial; identical to SEQ ID NO: 440950
  Synthetic oligonucleotide

SEQ ID NO: 595973 - DNA, 58 bp, Artificial; identical to SEQ ID NO: 440960
  Synthetic oligonucleotide

SEQ ID NO: 595974 - DNA, 58 bp, Artificial; identical to SEQ ID NO: 440961
  Synthetic oligonucleotide

SEQ ID NO: 595975 - DNA, 53 bp, Artificial; identical to SEQ ID NO: 8971
  Synthetic oligonucleotide

SEQ ID NO: 595976 - DNA, 57 bp, Artificial; identical to SEQ ID NO: 440965
  Synthetic oligonucleotide

SEQ ID NO: 595977 - DNA, 60 bp, Artificial; identical to SEQ ID NO: 440966
  Synthetic oligonucleotide

SEQ ID NO: 595978 - DNA, 54 bp, Artificial; identical to SEQ ID NO: 7367
  Synthetic oligonucleotide

SEQ ID NO: 595979 - DNA, 55 bp, Artificial; identical to SEQ ID NO: 440974
  Synthetic oligonucleotide

SEQ ID NO: 595980 - DNA, 58 bp, Artificial; identical to SEQ ID NO: 440976
  Synthetic oligonucleotide

SEQ ID NO: 595981 - DNA, 60 bp, Artificial; identical to SEQ ID NO: 440977
  Synthetic oligonucleotide

SEQ ID NO: 595982 - DNA, 59 bp, Artificial; identical to SEQ ID NO: 440980
  Synthetic oligonucleotide

SEQ ID NO: 595983 - DNA, 60 bp, Artificial; identical to SEQ ID NO: 440981
  Synthetic oligonucleotide

SEQ ID NO: 595984 - DNA, 58 bp, Artificial; identical to SEQ ID NO: 440983
  Synthetic oligonucleotide

SEQ ID NO: 595985 - DNA, 60 bp, Artificial; identical to SEQ ID NO: 440986
  Synthetic oligonucleotide

SEQ ID NO: 595986 - DNA, 60 bp, Artificial; identical to SEQ ID NO: 440992
  Synthetic oligonucleotide

SEQ ID NO: 595987 - DNA, 55 bp, Artificial; identical to SEQ ID NO: 440993
  Synthetic oligonucleotide

SEQ ID NO: 595988 - DNA, 55 bp, Artificial; identical to SEQ ID NO: 440995
  Synthetic oligonucleotide

SEQ ID NO: 595989 - DNA, 60 bp, Artificial; identical to SEQ ID NO: 11274
  Synthetic oligonucleotide

SEQ ID NO: 595990 - DNA, 60 bp, Artificial; identical to SEQ ID NO: 441000
  Synthetic oligonucleotide

SEQ ID NO: 595991 - DNA, 60 bp, Artificial; identical to SEQ ID NO: 441004
  Synthetic oligonucleotide

SEQ ID NO: 595992 - DNA, 55 bp, Artificial; identical to SEQ ID NO: 441011
  Synthetic oligonucleotide

SEQ ID NO: 595993 - DNA, 55 bp, Artificial; identical to SEQ ID NO: 441015
  Synthetic oligonucleotide

SEQ ID NO: 595994 - DNA, 60 bp, Artificial; identical to SEQ ID NO: 441016
  Synthetic oligonucleotide

SEQ ID NO: 595995 - DNA, 60 bp, Artificial; identical to SEQ ID NO: 441017
  Synthetic oligonucleotide

SEQ ID NO: 595996 - DNA, 55 bp, Artificial; identical to SEQ ID NO: 441018
  Synthetic oligonucleotide

SEQ ID NO: 595997 - DNA, 55 bp, Artificial; identical to SEQ ID NO: 441021
  Synthetic oligonucleotide

SEQ ID NO: 595998 - DNA, 55 bp, Artificial; identical to SEQ ID NO: 441023
  Synthetic oligonucleotide

SEQ ID NO: 595999 - DNA, 55 bp, Artificial; identical to SEQ ID NO: 441025
  Synthetic oligonucleotide

SEQ ID NO: 596000 - DNA, 60 bp, Artificial; identical to SEQ ID NO: 441027
  Synthetic oligonucleotide

SEQ ID NO: 596001 - DNA, 55 bp, Artificial; identical to SEQ ID NO: 441029
  Synthetic oligonucleotide

SEQ ID NO: 596002 - DNA, 59 bp, Artificial; identical to SEQ ID NO: 441030
  Synthetic oligonucleotide

SEQ ID NO: 596003 - DNA, 60 bp, Artificial; identical to SEQ ID NO: 441031
  Synthetic oligonucleotide

SEQ ID NO: 596004 - DNA, 60 bp, Artificial; identical to SEQ ID NO: 441033
  Synthetic oligonucleotide

SEQ ID NO: 596005 - DNA, 60 bp, Artificial; identical to SEQ ID NO: 441036
  Synthetic oligonucleotide

SEQ ID NO: 596006 - DNA, 56 bp, Artificial; identical to SEQ ID NO: 441037
  Synthetic oligonucleotide

SEQ ID NO: 596007 - DNA, 55 bp, Artificial; identical to SEQ ID NO: 441038
  Synthetic oligonucleotide

SEQ ID NO: 596008 - DNA, 58 bp, Artificial; identical to SEQ ID NO: 441040
  Synthetic oligonucleotide

SEQ ID NO: 596009 - DNA, 60 bp, Artificial; identical to SEQ ID NO: 441042
  Synthetic oligonucleotide

SEQ ID NO: 596010 - DNA, 60 bp, Artificial; identical to SEQ ID NO: 441045
  Synthetic oligonucleotide

SEQ ID NO: 596011 - DNA, 55 bp, Artificial; identical to SEQ ID NO: 441046
  Synthetic oligonucleotide

SEQ ID NO: 596012 - DNA, 58 bp, Artificial; identical to SEQ ID NO: 441050
  Synthetic oligonucleotide

SEQ ID NO: 596013 - DNA, 60 bp, Artificial; identical to SEQ ID NO: 441054
  Synthetic oligonucleotide

SEQ ID NO: 596014 - DNA, 54 bp, Artificial; identical to SEQ ID NO: 441057
  Synthetic oligonucleotide

SEQ ID NO: 596015 - DNA, 57 bp, Artificial; identical to SEQ ID NO: 441059
  Synthetic oligonucleotide

SEQ ID NO: 596016 - DNA, 57 bp, Artificial; identical to SEQ ID NO: 441061
  Synthetic oligonucleotide

SEQ ID NO: 596017 - DNA, 55 bp, Artificial; identical to SEQ ID NO: 441064
  Synthetic oligonucleotide

SEQ ID NO: 596018 - DNA, 56 bp, Artificial; identical to SEQ ID NO: 441067
  Synthetic oligonucleotide

SEQ ID NO: 596019 - DNA, 60 bp, Artificial; identical to SEQ ID NO: 441068
  Synthetic oligonucleotide

SEQ ID NO: 596020 - DNA, 55 bp, Artificial; identical to SEQ ID NO: 441069
  Synthetic oligonucleotide

SEQ ID NO: 596021 - DNA, 60 bp, Artificial; identical to SEQ ID NO: 441071
  Synthetic oligonucleotide

SEQ ID NO: 596022 - DNA, 54 bp, Artificial; identical to SEQ ID NO: 441072
  Synthetic oligonucleotide

SEQ ID NO: 596023 - DNA, 60 bp, Artificial; identical to SEQ ID NO: 441073
  Synthetic oligonucleotide

SEQ ID NO: 596024 - DNA, 58 bp, Artificial; identical to SEQ ID NO: 441075
  Synthetic oligonucleotide

SEQ ID NO: 596025 - DNA, 55 bp, Artificial; identical to SEQ ID NO: 441076
  Synthetic oligonucleotide

SEQ ID NO: 596026 - DNA, 60 bp, Artificial; identical to SEQ ID NO: 441077
  Synthetic oligonucleotide

SEQ ID NO: 596027 - DNA, 58 bp, Artificial; identical to SEQ ID NO: 441078
  Synthetic oligonucleotide

SEQ ID NO: 596028 - DNA, 55 bp, Artificial; identical to SEQ ID NO: 441079
  Synthetic oligonucleotide

SEQ ID NO: 596029 - DNA, 55 bp, Artificial; identical to SEQ ID NO: 441081
  Synthetic oligonucleotide

SEQ ID NO: 596030 - DNA, 60 bp, Artificial; identical to SEQ ID NO: 441083
  Synthetic oligonucleotide

SEQ ID NO: 596031 - DNA, 55 bp, Artificial; identical to SEQ ID NO: 441085
  Synthetic oligonucleotide

SEQ ID NO: 596032 - DNA, 60 bp, Artificial; identical to SEQ ID NO: 441086
  Synthetic oligonucleotide

SEQ ID NO: 596033 - DNA, 55 bp, Artificial; identical to SEQ ID NO: 441087
  Synthetic oligonucleotide

SEQ ID NO: 596034 - DNA, 60 bp, Artificial; identical to SEQ ID NO: 441089
  Synthetic oligonucleotide

SEQ ID NO: 596035 - DNA, 55 bp, Artificial; identical to SEQ ID NO: 441090
  Synthetic oligonucleotide

SEQ ID NO: 596036 - DNA, 55 bp, Artificial; identical to SEQ ID NO: 441094
  Synthetic oligonucleotide

SEQ ID NO: 596037 - DNA, 55 bp, Artificial; identical to SEQ ID NO: 441095
  Synthetic oligonucleotide

SEQ ID NO: 596038 - DNA, 60 bp, Artificial; identical to SEQ ID NO: 441096
  Synthetic oligonucleotide

SEQ ID NO: 596039 - DNA, 55 bp, Artificial; identical to SEQ ID NO: 441100
  Synthetic oligonucleotide

SEQ ID NO: 596040 - DNA, 56 bp, Artificial; identical to SEQ ID NO: 13510
  Synthetic oligonucleotide

SEQ ID NO: 596041 - DNA, 60 bp, Artificial; identical to SEQ ID NO: 441104
  Synthetic oligonucleotide

SEQ ID NO: 596042 - DNA, 55 bp, Artificial; identical to SEQ ID NO: 441110
  Synthetic oligonucleotide

SEQ ID NO: 596043 - DNA, 52 bp, Artificial; identical to SEQ ID NO: 441111
  Synthetic oligonucleotide

SEQ ID NO: 596044 - DNA, 55 bp, Artificial; identical to SEQ ID NO: 441113
  Synthetic oligonucleotide

SEQ ID NO: 596045 - DNA, 58 bp, Artificial; identical to SEQ ID NO: 441114
  Synthetic oligonucleotide

SEQ ID NO: 596046 - DNA, 60 bp, Artificial; identical to SEQ ID NO: 441115
  Synthetic oligonucleotide

SEQ ID NO: 596047 - DNA, 59 bp, Artificial; identical to SEQ ID NO: 441120
  Synthetic oligonucleotide

SEQ ID NO: 596048 - DNA, 60 bp, Artificial; identical to SEQ ID NO: 441127
  Synthetic oligonucleotide

SEQ ID NO: 596049 - DNA, 53 bp, Artificial; identical to SEQ ID NO: 441128
  Synthetic oligonucleotide

SEQ ID NO: 596050 - DNA, 58 bp, Artificial; identical to SEQ ID NO: 441130
  Synthetic oligonucleotide

SEQ ID NO: 596051 - DNA, 60 bp, Artificial; identical to SEQ ID NO: 441131
  Synthetic oligonucleotide

SEQ ID NO: 596052 - DNA, 60 bp, Artificial; identical to SEQ ID NO: 441134
  Synthetic oligonucleotide

SEQ ID NO: 596053 - DNA, 55 bp, Artificial; identical to SEQ ID NO: 441136
  Synthetic oligonucleotide

SEQ ID NO: 596054 - DNA, 57 bp, Artificial; identical to SEQ ID NO: 441137
  Synthetic oligonucleotide

SEQ ID NO: 596055 - DNA, 55 bp, Artificial; identical to SEQ ID NO: 441139
  Synthetic oligonucleotide

SEQ ID NO: 596056 - DNA, 59 bp, Artificial; identical to SEQ ID NO: 441140
  Synthetic oligonucleotide

SEQ ID NO: 596057 - DNA, 55 bp, Artificial; identical to SEQ ID NO: 441144
  Synthetic oligonucleotide

SEQ ID NO: 596058 - DNA, 59 bp, Artificial; identical to SEQ ID NO: 441149
  Synthetic oligonucleotide

SEQ ID NO: 596059 - DNA, 60 bp, Artificial; identical to SEQ ID NO: 441153
  Synthetic oligonucleotide

SEQ ID NO: 596060 - DNA, 55 bp, Artificial; identical to SEQ ID NO: 441154
  Synthetic oligonucleotide

SEQ ID NO: 596061 - DNA, 60 bp, Artificial; identical to SEQ ID NO: 8159
  Synthetic oligonucleotide

SEQ ID NO: 596062 - DNA, 58 bp, Artificial; identical to SEQ ID NO: 441159
  Synthetic oligonucleotide

SEQ ID NO: 596063 - DNA, 58 bp, Artificial; identical to SEQ ID NO: 441160
  Synthetic oligonucleotide

SEQ ID NO: 596064 - DNA, 50 bp, Artificial; identical to SEQ ID NO: 441163
  Synthetic oligonucleotide

SEQ ID NO: 596065 - DNA, 58 bp, Artificial; identical to SEQ ID NO: 441168
  Synthetic oligonucleotide

SEQ ID NO: 596066 - DNA, 58 bp, Artificial; identical to SEQ ID NO: 441170
  Synthetic oligonucleotide

SEQ ID NO: 596067 - DNA, 60 bp, Artificial; identical to SEQ ID NO: 441171
  Synthetic oligonucleotide

SEQ ID NO: 596068 - DNA, 60 bp, Artificial; identical to SEQ ID NO: 441172
  Synthetic oligonucleotide

SEQ ID NO: 596069 - DNA, 60 bp, Artificial; identical to SEQ ID NO: 441173
  Synthetic oligonucleotide

SEQ ID NO: 596070 - DNA, 60 bp, Artificial; identical to SEQ ID NO: 441175
  Synthetic oligonucleotide

SEQ ID NO: 596071 - DNA, 57 bp, Artificial; identical to SEQ ID NO: 441185
  Synthetic oligonucleotide

SEQ ID NO: 596072 - DNA, 55 bp, Artificial; identical to SEQ ID NO: 441187
  Synthetic oligonucleotide

SEQ ID NO: 596073 - DNA, 60 bp, Artificial; identical to SEQ ID NO: 441189
  Synthetic oligonucleotide

SEQ ID NO: 596074 - DNA, 60 bp, Artificial; identical to SEQ ID NO: 441190
  Synthetic oligonucleotide

SEQ ID NO: 596075 - DNA, 55 bp, Artificial; identical to SEQ ID NO: 441194
  Synthetic oligonucleotide

SEQ ID NO: 596076 - DNA, 60 bp, Artificial; identical to SEQ ID NO: 441195
  Synthetic oligonucleotide

SEQ ID NO: 596077 - DNA, 50 bp, Artificial; identical to SEQ ID NO: 441197
  Synthetic oligonucleotide

SEQ ID NO: 596078 - DNA, 55 bp, Artificial; identical to SEQ ID NO: 441199
  Synthetic oligonucleotide

SEQ ID NO: 596079 - DNA, 55 bp, Artificial; identical to SEQ ID NO: 441200
  Synthetic oligonucleotide

SEQ ID NO: 596080 - DNA, 58 bp, Artificial; identical to SEQ ID NO: 441204
  Synthetic oligonucleotide

SEQ ID NO: 596081 - DNA, 55 bp, Artificial; identical to SEQ ID NO: 441205
  Synthetic oligonucleotide

SEQ ID NO: 596082 - DNA, 60 bp, Artificial; identical to SEQ ID NO: 441209
  Synthetic oligonucleotide

SEQ ID NO: 596083 - DNA, 60 bp, Artificial; identical to SEQ ID NO: 7409
  Synthetic oligonucleotide

SEQ ID NO: 596084 - DNA, 55 bp, Artificial; identical to SEQ ID NO: 441211
  Synthetic oligonucleotide

SEQ ID NO: 596085 - DNA, 56 bp, Artificial; identical to SEQ ID NO: 441214
  Synthetic oligonucleotide

SEQ ID NO: 596086 - DNA, 58 bp, Artificial; identical to SEQ ID NO: 441217
  Synthetic oligonucleotide

SEQ ID NO: 596087 - DNA, 55 bp, Artificial; identical to SEQ ID NO: 441218
  Synthetic oligonucleotide

SEQ ID NO: 596088 - DNA, 60 bp, Artificial; identical to SEQ ID NO: 441220
  Synthetic oligonucleotide

SEQ ID NO: 596089 - DNA, 55 bp, Artificial; identical to SEQ ID NO: 441223
  Synthetic oligonucleotide

SEQ ID NO: 596090 - DNA, 60 bp, Artificial; identical to SEQ ID NO: 441232
  Synthetic oligonucleotide

SEQ ID NO: 596091 - DNA, 55 bp, Artificial; identical to SEQ ID NO: 441236
  Synthetic oligonucleotide

SEQ ID NO: 596092 - DNA, 58 bp, Artificial; identical to SEQ ID NO: 441238
  Synthetic oligonucleotide

SEQ ID NO: 596093 - DNA, 52 bp, Artificial; identical to SEQ ID NO: 441240
  Synthetic oligonucleotide

SEQ ID NO: 596094 - DNA, 55 bp, Artificial; identical to SEQ ID NO: 441244
  Synthetic oligonucleotide

SEQ ID NO: 596095 - DNA, 59 bp, Artificial; identical to SEQ ID NO: 441245
  Synthetic oligonucleotide

SEQ ID NO: 596096 - DNA, 58 bp, Artificial; identical to SEQ ID NO: 441249
  Synthetic oligonucleotide

SEQ ID NO: 596097 - DNA, 59 bp, Artificial; identical to SEQ ID NO: 441250
  Synthetic oligonucleotide

SEQ ID NO: 596098 - DNA, 57 bp, Artificial; identical to SEQ ID NO: 441251
  Synthetic oligonucleotide

SEQ ID NO: 596099 - DNA, 55 bp, Artificial; identical to SEQ ID NO: 441254
  Synthetic oligonucleotide

SEQ ID NO: 596100 - DNA, 56 bp, Artificial; identical to SEQ ID NO: 441255
  Synthetic oligonucleotide

SEQ ID NO: 596101 - DNA, 55 bp, Artificial; identical to SEQ ID NO: 441257
  Synthetic oligonucleotide

SEQ ID NO: 596102 - DNA, 54 bp, Artificial; identical to SEQ ID NO: 441258
  Synthetic oligonucleotide

SEQ ID NO: 596103 - DNA, 60 bp, Artificial; identical to SEQ ID NO: 441259
  Synthetic oligonucleotide

SEQ ID NO: 596104 - DNA, 55 bp, Artificial; identical to SEQ ID NO: 441264
  Synthetic oligonucleotide

SEQ ID NO: 596105 - DNA, 60 bp, Artificial; identical to SEQ ID NO: 441267
  Synthetic oligonucleotide

SEQ ID NO: 596106 - DNA, 55 bp, Artificial; identical to SEQ ID NO: 441269
  Synthetic oligonucleotide

SEQ ID NO: 596107 - DNA, 55 bp, Artificial; identical to SEQ ID NO: 441272
  Synthetic oligonucleotide

SEQ ID NO: 596108 - DNA, 55 bp, Artificial; identical to SEQ ID NO: 441273
  Synthetic oligonucleotide

SEQ ID NO: 596109 - DNA, 53 bp, Artificial; identical to SEQ ID NO: 441277
  Synthetic oligonucleotide

SEQ ID NO: 596110 - DNA, 56 bp, Artificial; identical to SEQ ID NO: 441279
  Synthetic oligonucleotide

SEQ ID NO: 596111 - DNA, 60 bp, Artificial; identical to SEQ ID NO: 14380
  Synthetic oligonucleotide

SEQ ID NO: 596112 - DNA, 60 bp, Artificial; identical to SEQ ID NO: 441281
  Synthetic oligonucleotide

SEQ ID NO: 596113 - DNA, 55 bp, Artificial; identical to SEQ ID NO: 441283
  Synthetic oligonucleotide

SEQ ID NO: 596114 - DNA, 55 bp, Artificial; identical to SEQ ID NO: 441286
  Synthetic oligonucleotide

SEQ ID NO: 596115 - DNA, 60 bp, Artificial; identical to SEQ ID NO: 441287
  Synthetic oligonucleotide

SEQ ID NO: 596116 - DNA, 60 bp, Artificial; identical to SEQ ID NO: 441290
  Synthetic oligonucleotide

SEQ ID NO: 596117 - DNA, 59 bp, Artificial; identical to SEQ ID NO: 441291
  Synthetic oligonucleotide

SEQ ID NO: 596118 - DNA, 55 bp, Artificial; identical to SEQ ID NO: 441292
  Synthetic oligonucleotide

SEQ ID NO: 596119 - DNA, 60 bp, Artificial; identical to SEQ ID NO: 441301
  Synthetic oligonucleotide

SEQ ID NO: 596120 - DNA, 59 bp, Artificial; identical to SEQ ID NO: 441302
  Synthetic oligonucleotide

SEQ ID NO: 596121 - DNA, 60 bp, Artificial; identical to SEQ ID NO: 441303
  Synthetic oligonucleotide

SEQ ID NO: 596122 - DNA, 57 bp, Artificial; identical to SEQ ID NO: 441308
  Synthetic oligonucleotide

SEQ ID NO: 596123 - DNA, 55 bp, Artificial; identical to SEQ ID NO: 441309
  Synthetic oligonucleotide

SEQ ID NO: 596124 - DNA, 55 bp, Artificial; identical to SEQ ID NO: 441311
  Synthetic oligonucleotide

SEQ ID NO: 596125 - DNA, 55 bp, Artificial; identical to SEQ ID NO: 441312
  Synthetic oligonucleotide

SEQ ID NO: 596126 - DNA, 60 bp, Artificial; identical to SEQ ID NO: 441313
  Synthetic oligonucleotide

SEQ ID NO: 596127 - DNA, 60 bp, Artificial; identical to SEQ ID NO: 441317
  Synthetic oligonucleotide

SEQ ID NO: 596128 - DNA, 59 bp, Artificial; identical to SEQ ID NO: 441319
  Synthetic oligonucleotide

SEQ ID NO: 596129 - DNA, 55 bp, Artificial; identical to SEQ ID NO: 441320
  Synthetic oligonucleotide

SEQ ID NO: 596130 - DNA, 55 bp, Artificial; identical to SEQ ID NO: 441321
  Synthetic oligonucleotide

SEQ ID NO: 596131 - DNA, 53 bp, Artificial; identical to SEQ ID NO: 441322
  Synthetic oligonucleotide

SEQ ID NO: 596132 - DNA, 55 bp, Artificial; identical to SEQ ID NO: 441324
  Synthetic oligonucleotide

SEQ ID NO: 596133 - DNA, 54 bp, Artificial; identical to SEQ ID NO: 441325
  Synthetic oligonucleotide

SEQ ID NO: 596134 - DNA, 58 bp, Artificial; identical to SEQ ID NO: 441326
  Synthetic oligonucleotide

SEQ ID NO: 596135 - DNA, 60 bp, Artificial; identical to SEQ ID NO: 441329
  Synthetic oligonucleotide

SEQ ID NO: 596136 - DNA, 55 bp, Artificial; identical to SEQ ID NO: 441330
  Synthetic oligonucleotide

SEQ ID NO: 596137 - DNA, 59 bp, Artificial; identical to SEQ ID NO: 441332
  Synthetic oligonucleotide

SEQ ID NO: 596138 - DNA, 60 bp, Artificial; identical to SEQ ID NO: 441334
  Synthetic oligonucleotide

SEQ ID NO: 596139 - DNA, 51 bp, Artificial; identical to SEQ ID NO: 441336
  Synthetic oligonucleotide

SEQ ID NO: 596140 - DNA, 60 bp, Artificial; identical to SEQ ID NO: 59571
  Synthetic oligonucleotide

SEQ ID NO: 596141 - DNA, 60 bp, Artificial; identical to SEQ ID NO: 441340
  Synthetic oligonucleotide

SEQ ID NO: 596142 - DNA, 55 bp, Artificial; identical to SEQ ID NO: 441341
  Synthetic oligonucleotide

SEQ ID NO: 596143 - DNA, 55 bp, Artificial; identical to SEQ ID NO: 441343
  Synthetic oligonucleotide

SEQ ID NO: 596144 - DNA, 55 bp, Artificial; identical to SEQ ID NO: 441345
  Synthetic oligonucleotide

SEQ ID NO: 596145 - DNA, 60 bp, Artificial; identical to SEQ ID NO: 441351
  Synthetic oligonucleotide

SEQ ID NO: 596146 - DNA, 55 bp, Artificial; identical to SEQ ID NO: 441352
  Synthetic oligonucleotide

SEQ ID NO: 596147 - DNA, 56 bp, Artificial; identical to SEQ ID NO: 441353
  Synthetic oligonucleotide

SEQ ID NO: 596148 - DNA, 58 bp, Artificial; identical to SEQ ID NO: 17528
  Synthetic oligonucleotide

SEQ ID NO: 596149 - DNA, 55 bp, Artificial; identical to SEQ ID NO: 441355
  Synthetic oligonucleotide

SEQ ID NO: 596150 - DNA, 60 bp, Artificial; identical to SEQ ID NO: 441357
  Synthetic oligonucleotide

SEQ ID NO: 596151 - DNA, 60 bp, Artificial; identical to SEQ ID NO: 441358
  Synthetic oligonucleotide

SEQ ID NO: 596152 - DNA, 52 bp, Artificial; identical to SEQ ID NO: 441363
  Synthetic oligonucleotide

SEQ ID NO: 596153 - DNA, 60 bp, Artificial; identical to SEQ ID NO: 441364
  Synthetic oligonucleotide

SEQ ID NO: 596154 - DNA, 60 bp, Artificial; identical to SEQ ID NO: 441365
  Synthetic oligonucleotide

SEQ ID NO: 596155 - DNA, 57 bp, Artificial; identical to SEQ ID NO: 441366
  Synthetic oligonucleotide

SEQ ID NO: 596156 - DNA, 52 bp, Artificial; identical to SEQ ID NO: 441367
  Synthetic oligonucleotide

SEQ ID NO: 596157 - DNA, 57 bp, Artificial; identical to SEQ ID NO: 441368
  Synthetic oligonucleotide

SEQ ID NO: 596158 - DNA, 59 bp, Artificial; identical to SEQ ID NO: 441369
  Synthetic oligonucleotide

SEQ ID NO: 596159 - DNA, 60 bp, Artificial; identical to SEQ ID NO: 6768
  Synthetic oligonucleotide

SEQ ID NO: 596160 - DNA, 54 bp, Artificial; identical to SEQ ID NO: 441371
  Synthetic oligonucleotide

SEQ ID NO: 596161 - DNA, 56 bp, Artificial; identical to SEQ ID NO: 441373
  Synthetic oligonucleotide

SEQ ID NO: 596162 - DNA, 60 bp, Artificial; identical to SEQ ID NO: 12385
  Synthetic oligonucleotide

SEQ ID NO: 596163 - DNA, 60 bp, Artificial; identical to SEQ ID NO: 441375
  Synthetic oligonucleotide

SEQ ID NO: 596164 - DNA, 54 bp, Artificial; identical to SEQ ID NO: 441377
  Synthetic oligonucleotide

SEQ ID NO: 596165 - DNA, 60 bp, Artificial; identical to SEQ ID NO: 441378
  Synthetic oligonucleotide

SEQ ID NO: 596166 - DNA, 59 bp, Artificial; identical to SEQ ID NO: 441381
  Synthetic oligonucleotide

SEQ ID NO: 596167 - DNA, 55 bp, Artificial; identical to SEQ ID NO: 441387
  Synthetic oligonucleotide

SEQ ID NO: 596168 - DNA, 60 bp, Artificial; identical to SEQ ID NO: 441388
  Synthetic oligonucleotide

SEQ ID NO: 596169 - DNA, 55 bp, Artificial; identical to SEQ ID NO: 441389
  Synthetic oligonucleotide

SEQ ID NO: 596170 - DNA, 55 bp, Artificial; identical to SEQ ID NO: 441393
  Synthetic oligonucleotide

SEQ ID NO: 596171 - DNA, 57 bp, Artificial; identical to SEQ ID NO: 441396
  Synthetic oligonucleotide

SEQ ID NO: 596172 - DNA, 55 bp, Artificial; identical to SEQ ID NO: 441397
  Synthetic oligonucleotide

SEQ ID NO: 596173 - DNA, 59 bp, Artificial; identical to SEQ ID NO: 441402
  Synthetic oligonucleotide

SEQ ID NO: 596174 - DNA, 57 bp, Artificial; identical to SEQ ID NO: 441403
  Synthetic oligonucleotide

SEQ ID NO: 596175 - DNA, 60 bp, Artificial; identical to SEQ ID NO: 441408
  Synthetic oligonucleotide

SEQ ID NO: 596176 - DNA, 55 bp, Artificial; identical to SEQ ID NO: 441412
  Synthetic oligonucleotide

SEQ ID NO: 596177 - DNA, 59 bp, Artificial; identical to SEQ ID NO: 441413
  Synthetic oligonucleotide

SEQ ID NO: 596178 - DNA, 60 bp, Artificial; identical to SEQ ID NO: 441414
  Synthetic oligonucleotide

SEQ ID NO: 596179 - DNA, 55 bp, Artificial; identical to SEQ ID NO: 441417
  Synthetic oligonucleotide

SEQ ID NO: 596180 - DNA, 60 bp, Artificial; identical to SEQ ID NO: 441421
  Synthetic oligonucleotide

SEQ ID NO: 596181 - DNA, 55 bp, Artificial; identical to SEQ ID NO: 441424
  Synthetic oligonucleotide

SEQ ID NO: 596182 - DNA, 54 bp, Artificial; identical to SEQ ID NO: 441425
  Synthetic oligonucleotide

SEQ ID NO: 596183 - DNA, 51 bp, Artificial; identical to SEQ ID NO: 441427
  Synthetic oligonucleotide

SEQ ID NO: 596184 - DNA, 55 bp, Artificial; identical to SEQ ID NO: 441428
  Synthetic oligonucleotide

SEQ ID NO: 596185 - DNA, 60 bp, Artificial; identical to SEQ ID NO: 441429
  Synthetic oligonucleotide

SEQ ID NO: 596186 - DNA, 55 bp, Artificial; identical to SEQ ID NO: 441432
  Synthetic oligonucleotide

SEQ ID NO: 596187 - DNA, 59 bp, Artificial; identical to SEQ ID NO: 441434
  Synthetic oligonucleotide

SEQ ID NO: 596188 - DNA, 55 bp, Artificial; identical to SEQ ID NO: 441437
  Synthetic oligonucleotide

SEQ ID NO: 596189 - DNA, 53 bp, Artificial; identical to SEQ ID NO: 441439
  Synthetic oligonucleotide

SEQ ID NO: 596190 - DNA, 56 bp, Artificial; identical to SEQ ID NO: 441441
  Synthetic oligonucleotide

SEQ ID NO: 596191 - DNA, 55 bp, Artificial; identical to SEQ ID NO: 441445
  Synthetic oligonucleotide

SEQ ID NO: 596192 - DNA, 60 bp, Artificial; identical to SEQ ID NO: 441447
  Synthetic oligonucleotide

SEQ ID NO: 596193 - DNA, 53 bp, Artificial; identical to SEQ ID NO: 441448
  Synthetic oligonucleotide

SEQ ID NO: 596194 - DNA, 55 bp, Artificial; identical to SEQ ID NO: 441451
  Synthetic oligonucleotide

SEQ ID NO: 596195 - DNA, 55 bp, Artificial; identical to SEQ ID NO: 441452
  Synthetic oligonucleotide

SEQ ID NO: 596196 - DNA, 56 bp, Artificial; identical to SEQ ID NO: 441457
  Synthetic oligonucleotide

SEQ ID NO: 596197 - DNA, 58 bp, Artificial; identical to SEQ ID NO: 441459
  Synthetic oligonucleotide

SEQ ID NO: 596198 - DNA, 55 bp, Artificial; identical to SEQ ID NO: 441464
  Synthetic oligonucleotide

SEQ ID NO: 596199 - DNA, 55 bp, Artificial; identical to SEQ ID NO: 441465
  Synthetic oligonucleotide

SEQ ID NO: 596200 - DNA, 55 bp, Artificial; identical to SEQ ID NO: 441466
  Synthetic oligonucleotide

SEQ ID NO: 596201 - DNA, 55 bp, Artificial; identical to SEQ ID NO: 441471
  Synthetic oligonucleotide

SEQ ID NO: 596202 - DNA, 60 bp, Artificial; identical to SEQ ID NO: 441472
  Synthetic oligonucleotide

SEQ ID NO: 596203 - DNA, 60 bp, Artificial; identical to SEQ ID NO: 441474
  Synthetic oligonucleotide

SEQ ID NO: 596204 - DNA, 60 bp, Artificial; identical to SEQ ID NO: 441475
  Synthetic oligonucleotide

SEQ ID NO: 596205 - DNA, 55 bp, Artificial; identical to SEQ ID NO: 441480
  Synthetic oligonucleotide

SEQ ID NO: 596206 - DNA, 55 bp, Artificial; identical to SEQ ID NO: 441481
  Synthetic oligonucleotide

SEQ ID NO: 596207 - DNA, 55 bp, Artificial; identical to SEQ ID NO: 441483
  Synthetic oligonucleotide

SEQ ID NO: 596208 - DNA, 55 bp, Artificial; identical to SEQ ID NO: 441484
  Synthetic oligonucleotide

SEQ ID NO: 596209 - DNA, 54 bp, Artificial; identical to SEQ ID NO: 441485
  Synthetic oligonucleotide

SEQ ID NO: 596210 - DNA, 51 bp, Artificial; identical to SEQ ID NO: 441486
  Synthetic oligonucleotide

SEQ ID NO: 596211 - DNA, 54 bp, Artificial; identical to SEQ ID NO: 441488
  Synthetic oligonucleotide

SEQ ID NO: 596212 - DNA, 55 bp, Artificial; identical to SEQ ID NO: 441489
  Synthetic oligonucleotide

SEQ ID NO: 596213 - DNA, 55 bp, Artificial; identical to SEQ ID NO: 441490
  Synthetic oligonucleotide

SEQ ID NO: 596214 - DNA, 60 bp, Artificial; identical to SEQ ID NO: 441492
  Synthetic oligonucleotide

SEQ ID NO: 596215 - DNA, 53 bp, Artificial; identical to SEQ ID NO: 441493
  Synthetic oligonucleotide

SEQ ID NO: 596216 - DNA, 55 bp, Artificial; identical to SEQ ID NO: 441496
  Synthetic oligonucleotide

SEQ ID NO: 596217 - DNA, 50 bp, Artificial; identical to SEQ ID NO: 441498
  Synthetic oligonucleotide

SEQ ID NO: 596218 - DNA, 55 bp, Artificial; identical to SEQ ID NO: 441499
  Synthetic oligonucleotide

SEQ ID NO: 596219 - DNA, 55 bp, Artificial; identical to SEQ ID NO: 441503
  Synthetic oligonucleotide

SEQ ID NO: 596220 - DNA, 59 bp, Artificial; identical to SEQ ID NO: 441504
  Synthetic oligonucleotide

SEQ ID NO: 596221 - DNA, 57 bp, Artificial; identical to SEQ ID NO: 441507
  Synthetic oligonucleotide

SEQ ID NO: 596222 - DNA, 55 bp, Artificial; identical to SEQ ID NO: 441511
  Synthetic oligonucleotide

SEQ ID NO: 596223 - DNA, 53 bp, Artificial; identical to SEQ ID NO: 441512
  Synthetic oligonucleotide

SEQ ID NO: 596224 - DNA, 55 bp, Artificial; identical to SEQ ID NO: 441515
  Synthetic oligonucleotide

SEQ ID NO: 596225 - DNA, 55 bp, Artificial; identical to SEQ ID NO: 441518
  Synthetic oligonucleotide

SEQ ID NO: 596226 - DNA, 53 bp, Artificial; identical to SEQ ID NO: 441523
  Synthetic oligonucleotide

SEQ ID NO: 596227 - DNA, 54 bp, Artificial; identical to SEQ ID NO: 17400
  Synthetic oligonucleotide

SEQ ID NO: 596228 - DNA, 60 bp, Artificial; identical to SEQ ID NO: 6539
  Synthetic oligonucleotide

SEQ ID NO: 596229 - DNA, 58 bp, Artificial; identical to SEQ ID NO: 441527
  Synthetic oligonucleotide

SEQ ID NO: 596230 - DNA, 57 bp, Artificial; identical to SEQ ID NO: 441528
  Synthetic oligonucleotide

SEQ ID NO: 596231 - DNA, 60 bp, Artificial; identical to SEQ ID NO: 441530
  Synthetic oligonucleotide

SEQ ID NO: 596232 - DNA, 60 bp, Artificial; identical to SEQ ID NO: 441532
  Synthetic oligonucleotide

SEQ ID NO: 596233 - DNA, 60 bp, Artificial; identical to SEQ ID NO: 441533
  Synthetic oligonucleotide

SEQ ID NO: 596234 - DNA, 55 bp, Artificial; identical to SEQ ID NO: 441534
  Synthetic oligonucleotide

SEQ ID NO: 596235 - DNA, 56 bp, Artificial; identical to SEQ ID NO: 441535
  Synthetic oligonucleotide

SEQ ID NO: 596236 - DNA, 55 bp, Artificial; identical to SEQ ID NO: 441536
  Synthetic oligonucleotide

SEQ ID NO: 596237 - DNA, 54 bp, Artificial; identical to SEQ ID NO: 441539
  Synthetic oligonucleotide

SEQ ID NO: 596238 - DNA, 55 bp, Artificial; identical to SEQ ID NO: 441540
  Synthetic oligonucleotide

SEQ ID NO: 596239 - DNA, 50 bp, Artificial; identical to SEQ ID NO: 441541
  Synthetic oligonucleotide

SEQ ID NO: 596240 - DNA, 55 bp, Artificial; identical to SEQ ID NO: 441542
  Synthetic oligonucleotide

SEQ ID NO: 596241 - DNA, 60 bp, Artificial; identical to SEQ ID NO: 441546
  Synthetic oligonucleotide

SEQ ID NO: 596242 - DNA, 57 bp, Artificial; identical to SEQ ID NO: 441549
  Synthetic oligonucleotide

SEQ ID NO: 596243 - DNA, 51 bp, Artificial; identical to SEQ ID NO: 441550
  Synthetic oligonucleotide

SEQ ID NO: 596244 - DNA, 56 bp, Artificial; identical to SEQ ID NO: 18071
  Synthetic oligonucleotide

SEQ ID NO: 596245 - DNA, 55 bp, Artificial; identical to SEQ ID NO: 441554
  Synthetic oligonucleotide

SEQ ID NO: 596246 - DNA, 53 bp, Artificial; identical to SEQ ID NO: 441557
  Synthetic oligonucleotide

SEQ ID NO: 596247 - DNA, 55 bp, Artificial; identical to SEQ ID NO: 441558
  Synthetic oligonucleotide

SEQ ID NO: 596248 - DNA, 55 bp, Artificial; identical to SEQ ID NO: 441560
  Synthetic oligonucleotide

SEQ ID NO: 596249 - DNA, 55 bp, Artificial; identical to SEQ ID NO: 441561
  Synthetic oligonucleotide

SEQ ID NO: 596250 - DNA, 55 bp, Artificial; identical to SEQ ID NO: 441562
  Synthetic oligonucleotide

SEQ ID NO: 596251 - DNA, 60 bp, Artificial; identical to SEQ ID NO: 441566
  Synthetic oligonucleotide

SEQ ID NO: 596252 - DNA, 54 bp, Artificial; identical to SEQ ID NO: 441568
  Synthetic oligonucleotide

SEQ ID NO: 596253 - DNA, 60 bp, Artificial; identical to SEQ ID NO: 441572
  Synthetic oligonucleotide

SEQ ID NO: 596254 - DNA, 60 bp, Artificial; identical to SEQ ID NO: 441574
  Synthetic oligonucleotide

SEQ ID NO: 596255 - DNA, 57 bp, Artificial; identical to SEQ ID NO: 441575
  Synthetic oligonucleotide

SEQ ID NO: 596256 - DNA, 57 bp, Artificial; identical to SEQ ID NO: 441577
  Synthetic oligonucleotide

SEQ ID NO: 596257 - DNA, 59 bp, Artificial; identical to SEQ ID NO: 441578
  Synthetic oligonucleotide

SEQ ID NO: 596258 - DNA, 58 bp, Artificial; identical to SEQ ID NO: 441579
  Synthetic oligonucleotide

SEQ ID NO: 596259 - DNA, 58 bp, Artificial; identical to SEQ ID NO: 441583
  Synthetic oligonucleotide

SEQ ID NO: 596260 - DNA, 51 bp, Artificial; identical to SEQ ID NO: 441585
  Synthetic oligonucleotide

SEQ ID NO: 596261 - DNA, 51 bp, Artificial; identical to SEQ ID NO: 441586
  Synthetic oligonucleotide

SEQ ID NO: 596262 - DNA, 56 bp, Artificial; identical to SEQ ID NO: 18186
  Synthetic oligonucleotide

SEQ ID NO: 596263 - DNA, 56 bp, Artificial; identical to SEQ ID NO: 441591
  Synthetic oligonucleotide

SEQ ID NO: 596264 - DNA, 55 bp, Artificial; identical to SEQ ID NO: 441593
  Synthetic oligonucleotide

SEQ ID NO: 596265 - DNA, 51 bp, Artificial; identical to SEQ ID NO: 441594
  Synthetic oligonucleotide

SEQ ID NO: 596266 - DNA, 55 bp, Artificial; identical to SEQ ID NO: 441597
  Synthetic oligonucleotide

SEQ ID NO: 596267 - DNA, 58 bp, Artificial; identical to SEQ ID NO: 441598
  Synthetic oligonucleotide

SEQ ID NO: 596268 - DNA, 55 bp, Artificial; identical to SEQ ID NO: 441601
  Synthetic oligonucleotide

SEQ ID NO: 596269 - DNA, 55 bp, Artificial; identical to SEQ ID NO: 441603
  Synthetic oligonucleotide

SEQ ID NO: 596270 - DNA, 56 bp, Artificial; identical to SEQ ID NO: 441604
  Synthetic oligonucleotide

SEQ ID NO: 596271 - DNA, 55 bp, Artificial; identical to SEQ ID NO: 441605
  Synthetic oligonucleotide

SEQ ID NO: 596272 - DNA, 60 bp, Artificial; identical to SEQ ID NO: 441606
  Synthetic oligonucleotide

SEQ ID NO: 596273 - DNA, 55 bp, Artificial; identical to SEQ ID NO: 441607
  Synthetic oligonucleotide

SEQ ID NO: 596274 - DNA, 55 bp, Artificial; identical to SEQ ID NO: 441610
  Synthetic oligonucleotide

SEQ ID NO: 596275 - DNA, 55 bp, Artificial; identical to SEQ ID NO: 441611
  Synthetic oligonucleotide

SEQ ID NO: 596276 - DNA, 60 bp, Artificial; identical to SEQ ID NO: 441613
  Synthetic oligonucleotide

SEQ ID NO: 596277 - DNA, 60 bp, Artificial; identical to SEQ ID NO: 441614
  Synthetic oligonucleotide

SEQ ID NO: 596278 - DNA, 56 bp, Artificial; identical to SEQ ID NO: 441615
  Synthetic oligonucleotide

SEQ ID NO: 596279 - DNA, 57 bp, Artificial; identical to SEQ ID NO: 441617
  Synthetic oligonucleotide

SEQ ID NO: 596280 - DNA, 55 bp, Artificial; identical to SEQ ID NO: 441618
  Synthetic oligonucleotide

SEQ ID NO: 596281 - DNA, 55 bp, Artificial; identical to SEQ ID NO: 441623
  Synthetic oligonucleotide

SEQ ID NO: 596282 - DNA, 56 bp, Artificial; identical to SEQ ID NO: 441626
  Synthetic oligonucleotide

SEQ ID NO: 596283 - DNA, 55 bp, Artificial; identical to SEQ ID NO: 441627
  Synthetic oligonucleotide

SEQ ID NO: 596284 - DNA, 55 bp, Artificial; identical to SEQ ID NO: 441630
  Synthetic oligonucleotide

SEQ ID NO: 596285 - DNA, 55 bp, Artificial; identical to SEQ ID NO: 441632
  Synthetic oligonucleotide

SEQ ID NO: 596286 - DNA, 55 bp, Artificial; identical to SEQ ID NO: 441633
  Synthetic oligonucleotide

SEQ ID NO: 596287 - DNA, 55 bp, Artificial; identical to SEQ ID NO: 441635
  Synthetic oligonucleotide

SEQ ID NO: 596288 - DNA, 56 bp, Artificial; identical to SEQ ID NO: 441641
  Synthetic oligonucleotide

SEQ ID NO: 596289 - DNA, 56 bp, Artificial; identical to SEQ ID NO: 441643
  Synthetic oligonucleotide

SEQ ID NO: 596290 - DNA, 60 bp, Artificial; identical to SEQ ID NO: 441647
  Synthetic oligonucleotide

SEQ ID NO: 596291 - DNA, 52 bp, Artificial; identical to SEQ ID NO: 441649
  Synthetic oligonucleotide

SEQ ID NO: 596292 - DNA, 60 bp, Artificial; identical to SEQ ID NO: 441651
  Synthetic oligonucleotide

SEQ ID NO: 596293 - DNA, 60 bp, Artificial; identical to SEQ ID NO: 441652
  Synthetic oligonucleotide

SEQ ID NO: 596294 - DNA, 55 bp, Artificial; identical to SEQ ID NO: 441653
  Synthetic oligonucleotide

SEQ ID NO: 596295 - DNA, 51 bp, Artificial; identical to SEQ ID NO: 441654
  Synthetic oligonucleotide

SEQ ID NO: 596296 - DNA, 55 bp, Artificial; identical to SEQ ID NO: 441655
  Synthetic oligonucleotide

SEQ ID NO: 596297 - DNA, 56 bp, Artificial; identical to SEQ ID NO: 441657
  Synthetic oligonucleotide

SEQ ID NO: 596298 - DNA, 55 bp, Artificial; identical to SEQ ID NO: 441659
  Synthetic oligonucleotide

SEQ ID NO: 596299 - DNA, 59 bp, Artificial; identical to SEQ ID NO: 441662
  Synthetic oligonucleotide

SEQ ID NO: 596300 - DNA, 55 bp, Artificial; identical to SEQ ID NO: 441663
  Synthetic oligonucleotide

SEQ ID NO: 596301 - DNA, 59 bp, Artificial; identical to SEQ ID NO: 441670
  Synthetic oligonucleotide

SEQ ID NO: 596302 - DNA, 57 bp, Artificial; identical to SEQ ID NO: 441671
  Synthetic oligonucleotide

SEQ ID NO: 596303 - DNA, 59 bp, Artificial; identical to SEQ ID NO: 441675
  Synthetic oligonucleotide

SEQ ID NO: 596304 - DNA, 60 bp, Artificial; identical to SEQ ID NO: 441677
  Synthetic oligonucleotide

SEQ ID NO: 596305 - DNA, 55 bp, Artificial; identical to SEQ ID NO: 441678
  Synthetic oligonucleotide

SEQ ID NO: 596306 - DNA, 57 bp, Artificial; identical to SEQ ID NO: 441681
  Synthetic oligonucleotide

SEQ ID NO: 596307 - DNA, 60 bp, Artificial; identical to SEQ ID NO: 441684
  Synthetic oligonucleotide

SEQ ID NO: 596308 - DNA, 57 bp, Artificial; identical to SEQ ID NO: 441686
  Synthetic oligonucleotide

SEQ ID NO: 596309 - DNA, 55 bp, Artificial; identical to SEQ ID NO: 441687
  Synthetic oligonucleotide

SEQ ID NO: 596310 - DNA, 55 bp, Artificial; identical to SEQ ID NO: 441688
  Synthetic oligonucleotide

SEQ ID NO: 596311 - DNA, 55 bp, Artificial; identical to SEQ ID NO: 9822
  Synthetic oligonucleotide

SEQ ID NO: 596312 - DNA, 55 bp, Artificial; identical to SEQ ID NO: 441694
  Synthetic oligonucleotide

SEQ ID NO: 596313 - DNA, 57 bp, Artificial; identical to SEQ ID NO: 441698
  Synthetic oligonucleotide

SEQ ID NO: 596314 - DNA, 59 bp, Artificial; identical to SEQ ID NO: 441699
  Synthetic oligonucleotide

SEQ ID NO: 596315 - DNA, 58 bp, Artificial; identical to SEQ ID NO: 441700
  Synthetic oligonucleotide

SEQ ID NO: 596316 - DNA, 51 bp, Artificial; identical to SEQ ID NO: 441702
  Synthetic oligonucleotide

SEQ ID NO: 596317 - DNA, 58 bp, Artificial; identical to SEQ ID NO: 441703
  Synthetic oligonucleotide

SEQ ID NO: 596318 - DNA, 52 bp, Artificial; identical to SEQ ID NO: 441704
  Synthetic oligonucleotide

SEQ ID NO: 596319 - DNA, 54 bp, Artificial; identical to SEQ ID NO: 441707
  Synthetic oligonucleotide

SEQ ID NO: 596320 - DNA, 60 bp, Artificial; identical to SEQ ID NO: 441709
  Synthetic oligonucleotide

SEQ ID NO: 596321 - DNA, 55 bp, Artificial; identical to SEQ ID NO: 441712
  Synthetic oligonucleotide

SEQ ID NO: 596322 - DNA, 53 bp, Artificial; identical to SEQ ID NO: 441713
  Synthetic oligonucleotide

SEQ ID NO: 596323 - DNA, 60 bp, Artificial; identical to SEQ ID NO: 441714
  Synthetic oligonucleotide

SEQ ID NO: 596324 - DNA, 60 bp, Artificial; identical to SEQ ID NO: 441716
  Synthetic oligonucleotide

SEQ ID NO: 596325 - DNA, 60 bp, Artificial; identical to SEQ ID NO: 441717
  Synthetic oligonucleotide

SEQ ID NO: 596326 - DNA, 56 bp, Artificial; identical to SEQ ID NO: 441720
  Synthetic oligonucleotide

SEQ ID NO: 596327 - DNA, 59 bp, Artificial; identical to SEQ ID NO: 441722
  Synthetic oligonucleotide

SEQ ID NO: 596328 - DNA, 55 bp, Artificial; identical to SEQ ID NO: 441724
  Synthetic oligonucleotide

SEQ ID NO: 596329 - DNA, 60 bp, Artificial; identical to SEQ ID NO: 441725
  Synthetic oligonucleotide

SEQ ID NO: 596330 - DNA, 55 bp, Artificial; identical to SEQ ID NO: 441726
  Synthetic oligonucleotide

SEQ ID NO: 596331 - DNA, 54 bp, Artificial; identical to SEQ ID NO: 441729
  Synthetic oligonucleotide

SEQ ID NO: 596332 - DNA, 55 bp, Artificial; identical to SEQ ID NO: 441731
  Synthetic oligonucleotide

SEQ ID NO: 596333 - DNA, 58 bp, Artificial; identical to SEQ ID NO: 441732
  Synthetic oligonucleotide

SEQ ID NO: 596334 - DNA, 60 bp, Artificial; identical to SEQ ID NO: 441735
  Synthetic oligonucleotide

SEQ ID NO: 596335 - DNA, 58 bp, Artificial; identical to SEQ ID NO: 441737
  Synthetic oligonucleotide

SEQ ID NO: 596336 - DNA, 60 bp, Artificial; identical to SEQ ID NO: 441745
  Synthetic oligonucleotide

SEQ ID NO: 596337 - DNA, 58 bp, Artificial; identical to SEQ ID NO: 441750
  Synthetic oligonucleotide

SEQ ID NO: 596338 - DNA, 55 bp, Artificial; identical to SEQ ID NO: 441751
  Synthetic oligonucleotide

SEQ ID NO: 596339 - DNA, 55 bp, Artificial; identical to SEQ ID NO: 441752
  Synthetic oligonucleotide

SEQ ID NO: 596340 - DNA, 60 bp, Artificial; identical to SEQ ID NO: 441755
  Synthetic oligonucleotide

SEQ ID NO: 596341 - DNA, 54 bp, Artificial; identical to SEQ ID NO: 441757
  Synthetic oligonucleotide

SEQ ID NO: 596342 - DNA, 60 bp, Artificial; identical to SEQ ID NO: 441760
  Synthetic oligonucleotide

SEQ ID NO: 596343 - DNA, 60 bp, Artificial; identical to SEQ ID NO: 441763
  Synthetic oligonucleotide

SEQ ID NO: 596344 - DNA, 57 bp, Artificial; identical to SEQ ID NO: 441764
  Synthetic oligonucleotide

SEQ ID NO: 596345 - DNA, 56 bp, Artificial; identical to SEQ ID NO: 441765
  Synthetic oligonucleotide

SEQ ID NO: 596346 - DNA, 57 bp, Artificial; identical to SEQ ID NO: 441767
  Synthetic oligonucleotide

SEQ ID NO: 596347 - DNA, 57 bp, Artificial; identical to SEQ ID NO: 441768
  Synthetic oligonucleotide

SEQ ID NO: 596348 - DNA, 55 bp, Artificial; identical to SEQ ID NO: 18409
  Synthetic oligonucleotide

SEQ ID NO: 596349 - DNA, 55 bp, Artificial; identical to SEQ ID NO: 441772
  Synthetic oligonucleotide

SEQ ID NO: 596350 - DNA, 57 bp, Artificial; identical to SEQ ID NO: 441775
  Synthetic oligonucleotide

SEQ ID NO: 596351 - DNA, 50 bp, Artificial; identical to SEQ ID NO: 441776
  Synthetic oligonucleotide

SEQ ID NO: 596352 - DNA, 55 bp, Artificial; identical to SEQ ID NO: 441779
  Synthetic oligonucleotide

SEQ ID NO: 596353 - DNA, 60 bp, Artificial; identical to SEQ ID NO: 441781
  Synthetic oligonucleotide

SEQ ID NO: 596354 - DNA, 60 bp, Artificial; identical to SEQ ID NO: 441782
  Synthetic oligonucleotide

SEQ ID NO: 596355 - DNA, 57 bp, Artificial; identical to SEQ ID NO: 441783
  Synthetic oligonucleotide

SEQ ID NO: 596356 - DNA, 58 bp, Artificial; identical to SEQ ID NO: 441784
  Synthetic oligonucleotide

SEQ ID NO: 596357 - DNA, 55 bp, Artificial; identical to SEQ ID NO: 441787
  Synthetic oligonucleotide

SEQ ID NO: 596358 - DNA, 55 bp, Artificial; identical to SEQ ID NO: 441789
  Synthetic oligonucleotide

SEQ ID NO: 596359 - DNA, 54 bp, Artificial; identical to SEQ ID NO: 441790
  Synthetic oligonucleotide

SEQ ID NO: 596360 - DNA, 60 bp, Artificial; identical to SEQ ID NO: 13876
  Synthetic oligonucleotide

SEQ ID NO: 596361 - DNA, 55 bp, Artificial; identical to SEQ ID NO: 441792
  Synthetic oligonucleotide

SEQ ID NO: 596362 - DNA, 55 bp, Artificial; identical to SEQ ID NO: 441798
  Synthetic oligonucleotide

SEQ ID NO: 596363 - DNA, 60 bp, Artificial; identical to SEQ ID NO: 441799
  Synthetic oligonucleotide

SEQ ID NO: 596364 - DNA, 55 bp, Artificial; identical to SEQ ID NO: 8445
  Synthetic oligonucleotide

SEQ ID NO: 596365 - DNA, 59 bp, Artificial; identical to SEQ ID NO: 441801
  Synthetic oligonucleotide

SEQ ID NO: 596366 - DNA, 53 bp, Artificial; identical to SEQ ID NO: 20439
  Synthetic oligonucleotide

SEQ ID NO: 596367 - DNA, 58 bp, Artificial; identical to SEQ ID NO: 441802
  Synthetic oligonucleotide

SEQ ID NO: 596368 - DNA, 58 bp, Artificial; identical to SEQ ID NO: 441803
  Synthetic oligonucleotide

SEQ ID NO: 596369 - DNA, 59 bp, Artificial; identical to SEQ ID NO: 441813
  Synthetic oligonucleotide

SEQ ID NO: 596370 - DNA, 60 bp, Artificial; identical to SEQ ID NO: 441815
  Synthetic oligonucleotide

SEQ ID NO: 596371 - DNA, 54 bp, Artificial; identical to SEQ ID NO: 441818
  Synthetic oligonucleotide

SEQ ID NO: 596372 - DNA, 55 bp, Artificial; identical to SEQ ID NO: 441819
  Synthetic oligonucleotide

SEQ ID NO: 596373 - DNA, 59 bp, Artificial; identical to SEQ ID NO: 441822
  Synthetic oligonucleotide

SEQ ID NO: 596374 - DNA, 55 bp, Artificial; identical to SEQ ID NO: 441834
  Synthetic oligonucleotide

SEQ ID NO: 596375 - DNA, 60 bp, Artificial; identical to SEQ ID NO: 441835
  Synthetic oligonucleotide

SEQ ID NO: 596376 - DNA, 60 bp, Artificial; identical to SEQ ID NO: 441837
  Synthetic oligonucleotide

SEQ ID NO: 596377 - DNA, 55 bp, Artificial; identical to SEQ ID NO: 441838
  Synthetic oligonucleotide

SEQ ID NO: 596378 - DNA, 52 bp, Artificial; identical to SEQ ID NO: 441841
  Synthetic oligonucleotide

SEQ ID NO: 596379 - DNA, 53 bp, Artificial; identical to SEQ ID NO: 7586
  Synthetic oligonucleotide

SEQ ID NO: 596380 - DNA, 57 bp, Artificial; identical to SEQ ID NO: 441843
  Synthetic oligonucleotide

SEQ ID NO: 596381 - DNA, 55 bp, Artificial; identical to SEQ ID NO: 441845
  Synthetic oligonucleotide

SEQ ID NO: 596382 - DNA, 55 bp, Artificial; identical to SEQ ID NO: 441846
  Synthetic oligonucleotide

SEQ ID NO: 596383 - DNA, 56 bp, Artificial; identical to SEQ ID NO: 441847
  Synthetic oligonucleotide

SEQ ID NO: 596384 - DNA, 59 bp, Artificial; identical to SEQ ID NO: 15938
  Synthetic oligonucleotide

SEQ ID NO: 596385 - DNA, 60 bp, Artificial; identical to SEQ ID NO: 441849
  Synthetic oligonucleotide

SEQ ID NO: 596386 - DNA, 60 bp, Artificial; identical to SEQ ID NO: 441851
  Synthetic oligonucleotide

SEQ ID NO: 596387 - DNA, 54 bp, Artificial; identical to SEQ ID NO: 441853
  Synthetic oligonucleotide

SEQ ID NO: 596388 - DNA, 54 bp, Artificial; identical to SEQ ID NO: 441858
  Synthetic oligonucleotide

SEQ ID NO: 596389 - DNA, 54 bp, Artificial; identical to SEQ ID NO: 441860
  Synthetic oligonucleotide

SEQ ID NO: 596390 - DNA, 55 bp, Artificial; identical to SEQ ID NO: 441862
  Synthetic oligonucleotide

SEQ ID NO: 596391 - DNA, 55 bp, Artificial; identical to SEQ ID NO: 441866
  Synthetic oligonucleotide

SEQ ID NO: 596392 - DNA, 59 bp, Artificial; identical to SEQ ID NO: 7403
  Synthetic oligonucleotide

SEQ ID NO: 596393 - DNA, 59 bp, Artificial; identical to SEQ ID NO: 441867
  Synthetic oligonucleotide

SEQ ID NO: 596394 - DNA, 55 bp, Artificial; identical to SEQ ID NO: 441868
  Synthetic oligonucleotide

SEQ ID NO: 596395 - DNA, 55 bp, Artificial; identical to SEQ ID NO: 441871
  Synthetic oligonucleotide

SEQ ID NO: 596396 - DNA, 57 bp, Artificial; identical to SEQ ID NO: 17001
  Synthetic oligonucleotide

SEQ ID NO: 596397 - DNA, 55 bp, Artificial; identical to SEQ ID NO: 441872
  Synthetic oligonucleotide

SEQ ID NO: 596398 - DNA, 51 bp, Artificial; identical to SEQ ID NO: 441873
  Synthetic oligonucleotide

SEQ ID NO: 596399 - DNA, 57 bp, Artificial; identical to SEQ ID NO: 441879
  Synthetic oligonucleotide

SEQ ID NO: 596400 - DNA, 54 bp, Artificial; identical to SEQ ID NO: 441880
  Synthetic oligonucleotide

SEQ ID NO: 596401 - DNA, 55 bp, Artificial; identical to SEQ ID NO: 441881
  Synthetic oligonucleotide

SEQ ID NO: 596402 - DNA, 60 bp, Artificial; identical to SEQ ID NO: 441882
  Synthetic oligonucleotide

SEQ ID NO: 596403 - DNA, 53 bp, Artificial; identical to SEQ ID NO: 441885
  Synthetic oligonucleotide

SEQ ID NO: 596404 - DNA, 53 bp, Artificial; identical to SEQ ID NO: 441889
  Synthetic oligonucleotide

SEQ ID NO: 596405 - DNA, 55 bp, Artificial; identical to SEQ ID NO: 441892
  Synthetic oligonucleotide

SEQ ID NO: 596406 - DNA, 55 bp, Artificial; identical to SEQ ID NO: 441894
  Synthetic oligonucleotide

SEQ ID NO: 596407 - DNA, 58 bp, Artificial; identical to SEQ ID NO: 441896
  Synthetic oligonucleotide

SEQ ID NO: 596408 - DNA, 55 bp, Artificial; identical to SEQ ID NO: 441898
  Synthetic oligonucleotide

SEQ ID NO: 596409 - DNA, 58 bp, Artificial; identical to SEQ ID NO: 441900
  Synthetic oligonucleotide

SEQ ID NO: 596410 - DNA, 55 bp, Artificial; identical to SEQ ID NO: 441901
  Synthetic oligonucleotide

SEQ ID NO: 596411 - DNA, 57 bp, Artificial; identical to SEQ ID NO: 441903
  Synthetic oligonucleotide

SEQ ID NO: 596412 - DNA, 55 bp, Artificial; identical to SEQ ID NO: 441907
  Synthetic oligonucleotide

SEQ ID NO: 596413 - DNA, 60 bp, Artificial; identical to SEQ ID NO: 441910
  Synthetic oligonucleotide

SEQ ID NO: 596414 - DNA, 58 bp, Artificial; identical to SEQ ID NO: 441913
  Synthetic oligonucleotide

SEQ ID NO: 596415 - DNA, 55 bp, Artificial; identical to SEQ ID NO: 441917
  Synthetic oligonucleotide

SEQ ID NO: 596416 - DNA, 50 bp, Artificial; identical to SEQ ID NO: 441918
  Synthetic oligonucleotide

SEQ ID NO: 596417 - DNA, 59 bp, Artificial; identical to SEQ ID NO: 441921
  Synthetic oligonucleotide

SEQ ID NO: 596418 - DNA, 57 bp, Artificial; identical to SEQ ID NO: 441922
  Synthetic oligonucleotide

SEQ ID NO: 596419 - DNA, 59 bp, Artificial; identical to SEQ ID NO: 441926
  Synthetic oligonucleotide

SEQ ID NO: 596420 - DNA, 56 bp, Artificial; identical to SEQ ID NO: 441927
  Synthetic oligonucleotide

SEQ ID NO: 596421 - DNA, 56 bp, Artificial; identical to SEQ ID NO: 441928
  Synthetic oligonucleotide

SEQ ID NO: 596422 - DNA, 57 bp, Artificial; identical to SEQ ID NO: 441933
  Synthetic oligonucleotide

SEQ ID NO: 596423 - DNA, 56 bp, Artificial; identical to SEQ ID NO: 441934
  Synthetic oligonucleotide

SEQ ID NO: 596424 - DNA, 51 bp, Artificial; identical to SEQ ID NO: 441942
  Synthetic oligonucleotide

SEQ ID NO: 596425 - DNA, 56 bp, Artificial; identical to SEQ ID NO: 441943
  Synthetic oligonucleotide

SEQ ID NO: 596426 - DNA, 57 bp, Artificial; identical to SEQ ID NO: 441949
  Synthetic oligonucleotide

SEQ ID NO: 596427 - DNA, 57 bp, Artificial; identical to SEQ ID NO: 441950
  Synthetic oligonucleotide

SEQ ID NO: 596428 - DNA, 53 bp, Artificial; identical to SEQ ID NO: 441956
  Synthetic oligonucleotide

SEQ ID NO: 596429 - DNA, 60 bp, Artificial; identical to SEQ ID NO: 441961
  Synthetic oligonucleotide

SEQ ID NO: 596430 - DNA, 60 bp, Artificial; identical to SEQ ID NO: 441962
  Synthetic oligonucleotide

SEQ ID NO: 596431 - DNA, 57 bp, Artificial; identical to SEQ ID NO: 441965
  Synthetic oligonucleotide

SEQ ID NO: 596432 - DNA, 55 bp, Artificial; identical to SEQ ID NO: 441970
  Synthetic oligonucleotide

SEQ ID NO: 596433 - DNA, 60 bp, Artificial; identical to SEQ ID NO: 12043
  Synthetic oligonucleotide

SEQ ID NO: 596434 - DNA, 60 bp, Artificial; identical to SEQ ID NO: 441973
  Synthetic oligonucleotide

SEQ ID NO: 596435 - DNA, 60 bp, Artificial; identical to SEQ ID NO: 12033
  Synthetic oligonucleotide

SEQ ID NO: 596436 - DNA, 55 bp, Artificial; identical to SEQ ID NO: 441975
  Synthetic oligonucleotide

SEQ ID NO: 596437 - DNA, 60 bp, Artificial; identical to SEQ ID NO: 441977
  Synthetic oligonucleotide

SEQ ID NO: 596438 - DNA, 60 bp, Artificial; identical to SEQ ID NO: 441980
  Synthetic oligonucleotide

SEQ ID NO: 596439 - DNA, 50 bp, Artificial; identical to SEQ ID NO: 441981
  Synthetic oligonucleotide

SEQ ID NO: 596440 - DNA, 55 bp, Artificial; identical to SEQ ID NO: 441984
  Synthetic oligonucleotide

SEQ ID NO: 596441 - DNA, 60 bp, Artificial; identical to SEQ ID NO: 441985
  Synthetic oligonucleotide

SEQ ID NO: 596442 - DNA, 60 bp, Artificial; identical to SEQ ID NO: 441986
  Synthetic oligonucleotide

SEQ ID NO: 596443 - DNA, 60 bp, Artificial; identical to SEQ ID NO: 441987
  Synthetic oligonucleotide

SEQ ID NO: 596444 - DNA, 53 bp, Artificial; identical to SEQ ID NO: 441988
  Synthetic oligonucleotide

SEQ ID NO: 596445 - DNA, 55 bp, Artificial; identical to SEQ ID NO: 441989
  Synthetic oligonucleotide

SEQ ID NO: 596446 - DNA, 55 bp, Artificial; identical to SEQ ID NO: 441992
  Synthetic oligonucleotide

SEQ ID NO: 596447 - DNA, 50 bp, Artificial; identical to SEQ ID NO: 441998
  Synthetic oligonucleotide

SEQ ID NO: 596448 - DNA, 53 bp, Artificial; identical to SEQ ID NO: 442000
  Synthetic oligonucleotide

SEQ ID NO: 596449 - DNA, 58 bp, Artificial; identical to SEQ ID NO: 442002
  Synthetic oligonucleotide

SEQ ID NO: 596450 - DNA, 60 bp, Artificial; identical to SEQ ID NO: 442003
  Synthetic oligonucleotide

SEQ ID NO: 596451 - DNA, 55 bp, Artificial; identical to SEQ ID NO: 442005
  Synthetic oligonucleotide

SEQ ID NO: 596452 - DNA, 60 bp, Artificial; identical to SEQ ID NO: 6584
  Synthetic oligonucleotide

SEQ ID NO: 596453 - DNA, 58 bp, Artificial; identical to SEQ ID NO: 442020
  Synthetic oligonucleotide

SEQ ID NO: 596454 - DNA, 53 bp, Artificial; identical to SEQ ID NO: 442026
  Synthetic oligonucleotide

SEQ ID NO: 596455 - DNA, 60 bp, Artificial; identical to SEQ ID NO: 442029
  Synthetic oligonucleotide

SEQ ID NO: 596456 - DNA, 60 bp, Artificial; identical to SEQ ID NO: 7313
  Synthetic oligonucleotide

SEQ ID NO: 596457 - DNA, 60 bp, Artificial; identical to SEQ ID NO: 442033
  Synthetic oligonucleotide

SEQ ID NO: 596458 - DNA, 55 bp, Artificial; identical to SEQ ID NO: 442034
  Synthetic oligonucleotide

SEQ ID NO: 596459 - DNA, 55 bp, Artificial; identical to SEQ ID NO: 442035
  Synthetic oligonucleotide

SEQ ID NO: 596460 - DNA, 54 bp, Artificial; identical to SEQ ID NO: 16865
  Synthetic oligonucleotide

SEQ ID NO: 596461 - DNA, 57 bp, Artificial; identical to SEQ ID NO: 442039
  Synthetic oligonucleotide

SEQ ID NO: 596462 - DNA, 53 bp, Artificial; identical to SEQ ID NO: 442043
  Synthetic oligonucleotide

SEQ ID NO: 596463 - DNA, 59 bp, Artificial; identical to SEQ ID NO: 442053
  Synthetic oligonucleotide

SEQ ID NO: 596464 - DNA, 57 bp, Artificial; identical to SEQ ID NO: 442056
  Synthetic oligonucleotide

SEQ ID NO: 596465 - DNA, 55 bp, Artificial; identical to SEQ ID NO: 442057
  Synthetic oligonucleotide

SEQ ID NO: 596466 - DNA, 55 bp, Artificial; identical to SEQ ID NO: 442059
  Synthetic oligonucleotide

SEQ ID NO: 596467 - DNA, 55 bp, Artificial; identical to SEQ ID NO: 442065
  Synthetic oligonucleotide

SEQ ID NO: 596468 - DNA, 60 bp, Artificial; identical to SEQ ID NO: 442066
  Synthetic oligonucleotide

SEQ ID NO: 596469 - DNA, 55 bp, Artificial; identical to SEQ ID NO: 442070
  Synthetic oligonucleotide

SEQ ID NO: 596470 - DNA, 60 bp, Artificial; identical to SEQ ID NO: 442076
  Synthetic oligonucleotide

SEQ ID NO: 596471 - DNA, 60 bp, Artificial; identical to SEQ ID NO: 11471
  Synthetic oligonucleotide

SEQ ID NO: 596472 - DNA, 55 bp, Artificial; identical to SEQ ID NO: 442078
  Synthetic oligonucleotide

SEQ ID NO: 596473 - DNA, 60 bp, Artificial; identical to SEQ ID NO: 442080
  Synthetic oligonucleotide

SEQ ID NO: 596474 - DNA, 60 bp, Artificial; identical to SEQ ID NO: 442081
  Synthetic oligonucleotide

SEQ ID NO: 596475 - DNA, 52 bp, Artificial; identical to SEQ ID NO: 442088
  Synthetic oligonucleotide

SEQ ID NO: 596476 - DNA, 58 bp, Artificial; identical to SEQ ID NO: 442094
  Synthetic oligonucleotide

SEQ ID NO: 596477 - DNA, 55 bp, Artificial; identical to SEQ ID NO: 442095
  Synthetic oligonucleotide

SEQ ID NO: 596478 - DNA, 58 bp, Artificial; identical to SEQ ID NO: 442096
  Synthetic oligonucleotide

SEQ ID NO: 596479 - DNA, 55 bp, Artificial; identical to SEQ ID NO: 442097
  Synthetic oligonucleotide

SEQ ID NO: 596480 - DNA, 53 bp, Artificial; identical to SEQ ID NO: 442101
  Synthetic oligonucleotide

SEQ ID NO: 596481 - DNA, 53 bp, Artificial; identical to SEQ ID NO: 442102
  Synthetic oligonucleotide

SEQ ID NO: 596482 - DNA, 59 bp, Artificial; identical to SEQ ID NO: 442103
  Synthetic oligonucleotide

SEQ ID NO: 596483 - DNA, 60 bp, Artificial; identical to SEQ ID NO: 13471
  Synthetic oligonucleotide

SEQ ID NO: 596484 - DNA, 58 bp, Artificial; identical to SEQ ID NO: 442105
  Synthetic oligonucleotide

SEQ ID NO: 596485 - DNA, 51 bp, Artificial; identical to SEQ ID NO: 442106
  Synthetic oligonucleotide

SEQ ID NO: 596486 - DNA, 58 bp, Artificial; identical to SEQ ID NO: 442109
  Synthetic oligonucleotide

SEQ ID NO: 596487 - DNA, 55 bp, Artificial; identical to SEQ ID NO: 442110
  Synthetic oligonucleotide

SEQ ID NO: 596488 - DNA, 52 bp, Artificial; identical to SEQ ID NO: 442113
  Synthetic oligonucleotide

SEQ ID NO: 596489 - DNA, 55 bp, Artificial; identical to SEQ ID NO: 442119
  Synthetic oligonucleotide

SEQ ID NO: 596490 - DNA, 60 bp, Artificial; identical to SEQ ID NO: 442121
  Synthetic oligonucleotide

SEQ ID NO: 596491 - DNA, 60 bp, Artificial; identical to SEQ ID NO: 442123
  Synthetic oligonucleotide

SEQ ID NO: 596492 - DNA, 55 bp, Artificial; identical to SEQ ID NO: 442126
  Synthetic oligonucleotide

SEQ ID NO: 596493 - DNA, 55 bp, Artificial; identical to SEQ ID NO: 442127
  Synthetic oligonucleotide

SEQ ID NO: 596494 - DNA, 55 bp, Artificial; identical to SEQ ID NO: 442129
  Synthetic oligonucleotide

SEQ ID NO: 596495 - DNA, 58 bp, Artificial; identical to SEQ ID NO: 442134
  Synthetic oligonucleotide

SEQ ID NO: 596496 - DNA, 54 bp, Artificial; identical to SEQ ID NO: 442140
  Synthetic oligonucleotide

SEQ ID NO: 596497 - DNA, 53 bp, Artificial; identical to SEQ ID NO: 442141
  Synthetic oligonucleotide

SEQ ID NO: 596498 - DNA, 58 bp, Artificial; identical to SEQ ID NO: 18955
  Synthetic oligonucleotide

SEQ ID NO: 596499 - DNA, 55 bp, Artificial; identical to SEQ ID NO: 442149
  Synthetic oligonucleotide

SEQ ID NO: 596500 - DNA, 53 bp, Artificial; identical to SEQ ID NO: 442150
  Synthetic oligonucleotide

SEQ ID NO: 596501 - DNA, 54 bp, Artificial; identical to SEQ ID NO: 442153
  Synthetic oligonucleotide

SEQ ID NO: 596502 - DNA, 55 bp, Artificial; identical to SEQ ID NO: 442154
  Synthetic oligonucleotide

SEQ ID NO: 596503 - DNA, 55 bp, Artificial; identical to SEQ ID NO: 442155
  Synthetic oligonucleotide

SEQ ID NO: 596504 - DNA, 52 bp, Artificial; identical to SEQ ID NO: 442158
  Synthetic oligonucleotide

SEQ ID NO: 596505 - DNA, 60 bp, Artificial; identical to SEQ ID NO: 442160
  Synthetic oligonucleotide

SEQ ID NO: 596506 - DNA, 56 bp, Artificial; identical to SEQ ID NO: 442161
  Synthetic oligonucleotide

SEQ ID NO: 596507 - DNA, 55 bp, Artificial; identical to SEQ ID NO: 442163
  Synthetic oligonucleotide

SEQ ID NO: 596508 - DNA, 60 bp, Artificial; identical to SEQ ID NO: 442165
  Synthetic oligonucleotide

SEQ ID NO: 596509 - DNA, 55 bp, Artificial; identical to SEQ ID NO: 442167
  Synthetic oligonucleotide

SEQ ID NO: 596510 - DNA, 52 bp, Artificial; identical to SEQ ID NO: 442171
  Synthetic oligonucleotide

SEQ ID NO: 596511 - DNA, 55 bp, Artificial; identical to SEQ ID NO: 442172
  Synthetic oligonucleotide

SEQ ID NO: 596512 - DNA, 60 bp, Artificial; identical to SEQ ID NO: 113586
  Synthetic oligonucleotide

SEQ ID NO: 596513 - DNA, 60 bp, Artificial; identical to SEQ ID NO: 442174
  Synthetic oligonucleotide

SEQ ID NO: 596514 - DNA, 51 bp, Artificial; identical to SEQ ID NO: 6151
  Synthetic oligonucleotide

SEQ ID NO: 596515 - DNA, 60 bp, Artificial; identical to SEQ ID NO: 442175
  Synthetic oligonucleotide

SEQ ID NO: 596516 - DNA, 60 bp, Artificial; identical to SEQ ID NO: 442176
  Synthetic oligonucleotide

SEQ ID NO: 596517 - DNA, 60 bp, Artificial; identical to SEQ ID NO: 442183
  Synthetic oligonucleotide

SEQ ID NO: 596518 - DNA, 55 bp, Artificial; identical to SEQ ID NO: 442187
  Synthetic oligonucleotide

SEQ ID NO: 596519 - DNA, 53 bp, Artificial; identical to SEQ ID NO: 442189
  Synthetic oligonucleotide

SEQ ID NO: 596520 - DNA, 55 bp, Artificial; identical to SEQ ID NO: 442193
  Synthetic oligonucleotide

SEQ ID NO: 596521 - DNA, 60 bp, Artificial; identical to SEQ ID NO: 442194
  Synthetic oligonucleotide

SEQ ID NO: 596522 - DNA, 60 bp, Artificial; identical to SEQ ID NO: 442201
  Synthetic oligonucleotide

SEQ ID NO: 596523 - DNA, 59 bp, Artificial; identical to SEQ ID NO: 442202
  Synthetic oligonucleotide

SEQ ID NO: 596524 - DNA, 60 bp, Artificial; identical to SEQ ID NO: 442203
  Synthetic oligonucleotide

SEQ ID NO: 596525 - DNA, 60 bp, Artificial; identical to SEQ ID NO: 7226
  Synthetic oligonucleotide

SEQ ID NO: 596526 - DNA, 50 bp, Artificial; identical to SEQ ID NO: 442209
  Synthetic oligonucleotide

SEQ ID NO: 596527 - DNA, 59 bp, Artificial; identical to SEQ ID NO: 442212
  Synthetic oligonucleotide

SEQ ID NO: 596528 - DNA, 55 bp, Artificial; identical to SEQ ID NO: 442213
  Synthetic oligonucleotide

SEQ ID NO: 596529 - DNA, 53 bp, Artificial; identical to SEQ ID NO: 442214
  Synthetic oligonucleotide

SEQ ID NO: 596530 - DNA, 54 bp, Artificial; identical to SEQ ID NO: 442216
  Synthetic oligonucleotide

SEQ ID NO: 596531 - DNA, 55 bp, Artificial; identical to SEQ ID NO: 442217
  Synthetic oligonucleotide

SEQ ID NO: 596532 - DNA, 55 bp, Artificial; identical to SEQ ID NO: 442219
  Synthetic oligonucleotide

SEQ ID NO: 596533 - DNA, 57 bp, Artificial; identical to SEQ ID NO: 442220
  Synthetic oligonucleotide

SEQ ID NO: 596534 - DNA, 56 bp, Artificial; identical to SEQ ID NO: 442222
  Synthetic oligonucleotide

SEQ ID NO: 596535 - DNA, 51 bp, Artificial; identical to SEQ ID NO: 442225
  Synthetic oligonucleotide

SEQ ID NO: 596536 - DNA, 57 bp, Artificial; identical to SEQ ID NO: 442228
  Synthetic oligonucleotide

SEQ ID NO: 596537 - DNA, 56 bp, Artificial; identical to SEQ ID NO: 442238
  Synthetic oligonucleotide

SEQ ID NO: 596538 - DNA, 56 bp, Artificial; identical to SEQ ID NO: 442239
  Synthetic oligonucleotide

SEQ ID NO: 596539 - DNA, 60 bp, Artificial; identical to SEQ ID NO: 442240
  Synthetic oligonucleotide

SEQ ID NO: 596540 - DNA, 49 bp, Artificial; identical to SEQ ID NO: 442241
  Synthetic oligonucleotide

SEQ ID NO: 596541 - DNA, 58 bp, Artificial; identical to SEQ ID NO: 442245
  Synthetic oligonucleotide

SEQ ID NO: 596542 - DNA, 51 bp, Artificial; identical to SEQ ID NO: 442247
  Synthetic oligonucleotide

SEQ ID NO: 596543 - DNA, 51 bp, Artificial; identical to SEQ ID NO: 442248
  Synthetic oligonucleotide

SEQ ID NO: 596544 - DNA, 60 bp, Artificial; identical to SEQ ID NO: 442251
  Synthetic oligonucleotide

SEQ ID NO: 596545 - DNA, 60 bp, Artificial; identical to SEQ ID NO: 442256
  Synthetic oligonucleotide

SEQ ID NO: 596546 - DNA, 60 bp, Artificial; identical to SEQ ID NO: 442257
  Synthetic oligonucleotide

SEQ ID NO: 596547 - DNA, 60 bp, Artificial; identical to SEQ ID NO: 442259
  Synthetic oligonucleotide

SEQ ID NO: 596548 - DNA, 58 bp, Artificial; identical to SEQ ID NO: 442264
  Synthetic oligonucleotide

SEQ ID NO: 596549 - DNA, 55 bp, Artificial; identical to SEQ ID NO: 442267
  Synthetic oligonucleotide

SEQ ID NO: 596550 - DNA, 56 bp, Artificial; identical to SEQ ID NO: 442268
  Synthetic oligonucleotide

SEQ ID NO: 596551 - DNA, 56 bp, Artificial; identical to SEQ ID NO: 442269
  Synthetic oligonucleotide

SEQ ID NO: 596552 - DNA, 57 bp, Artificial; identical to SEQ ID NO: 442270
  Synthetic oligonucleotide

SEQ ID NO: 596553 - DNA, 55 bp, Artificial; identical to SEQ ID NO: 442272
  Synthetic oligonucleotide

SEQ ID NO: 596554 - DNA, 55 bp, Artificial; identical to SEQ ID NO: 442273
  Synthetic oligonucleotide

SEQ ID NO: 596555 - DNA, 59 bp, Artificial; identical to SEQ ID NO: 442276
  Synthetic oligonucleotide

SEQ ID NO: 596556 - DNA, 56 bp, Artificial; identical to SEQ ID NO: 442277
  Synthetic oligonucleotide

SEQ ID NO: 596557 - DNA, 60 bp, Artificial; identical to SEQ ID NO: 442278
  Synthetic oligonucleotide

SEQ ID NO: 596558 - DNA, 59 bp, Artificial; identical to SEQ ID NO: 442283
  Synthetic oligonucleotide

SEQ ID NO: 596559 - DNA, 58 bp, Artificial; identical to SEQ ID NO: 442287
  Synthetic oligonucleotide

SEQ ID NO: 596560 - DNA, 56 bp, Artificial; identical to SEQ ID NO: 442291
  Synthetic oligonucleotide

SEQ ID NO: 596561 - DNA, 55 bp, Artificial; identical to SEQ ID NO: 442294
  Synthetic oligonucleotide

SEQ ID NO: 596562 - DNA, 54 bp, Artificial; identical to SEQ ID NO: 442296
  Synthetic oligonucleotide

SEQ ID NO: 596563 - DNA, 58 bp, Artificial; identical to SEQ ID NO: 442297
  Synthetic oligonucleotide

SEQ ID NO: 596564 - DNA, 54 bp, Artificial; identical to SEQ ID NO: 6041
  Synthetic oligonucleotide

SEQ ID NO: 596565 - DNA, 51 bp, Artificial; identical to SEQ ID NO: 442302
  Synthetic oligonucleotide

SEQ ID NO: 596566 - DNA, 59 bp, Artificial; identical to SEQ ID NO: 442303
  Synthetic oligonucleotide

SEQ ID NO: 596567 - DNA, 53 bp, Artificial; identical to SEQ ID NO: 442304
  Synthetic oligonucleotide

SEQ ID NO: 596568 - DNA, 55 bp, Artificial; identical to SEQ ID NO: 442305
  Synthetic oligonucleotide

SEQ ID NO: 596569 - DNA, 53 bp, Artificial; identical to SEQ ID NO: 442311
  Synthetic oligonucleotide

SEQ ID NO: 596570 - DNA, 59 bp, Artificial; identical to SEQ ID NO: 442312
  Synthetic oligonucleotide

SEQ ID NO: 596571 - DNA, 53 bp, Artificial; identical to SEQ ID NO: 442313
  Synthetic oligonucleotide

SEQ ID NO: 596572 - DNA, 51 bp, Artificial; identical to SEQ ID NO: 442314
  Synthetic oligonucleotide

SEQ ID NO: 596573 - DNA, 55 bp, Artificial; identical to SEQ ID NO: 442315
  Synthetic oligonucleotide

SEQ ID NO: 596574 - DNA, 60 bp, Artificial; identical to SEQ ID NO: 442320
  Synthetic oligonucleotide

SEQ ID NO: 596575 - DNA, 54 bp, Artificial; identical to SEQ ID NO: 442322
  Synthetic oligonucleotide

SEQ ID NO: 596576 - DNA, 55 bp, Artificial; identical to SEQ ID NO: 442326
  Synthetic oligonucleotide

SEQ ID NO: 596577 - DNA, 59 bp, Artificial; identical to SEQ ID NO: 442327
  Synthetic oligonucleotide

SEQ ID NO: 596578 - DNA, 57 bp, Artificial; identical to SEQ ID NO: 442330
  Synthetic oligonucleotide

SEQ ID NO: 596579 - DNA, 60 bp, Artificial; identical to SEQ ID NO: 442336
  Synthetic oligonucleotide

SEQ ID NO: 596580 - DNA, 55 bp, Artificial; identical to SEQ ID NO: 442337
  Synthetic oligonucleotide

SEQ ID NO: 596581 - DNA, 53 bp, Artificial; identical to SEQ ID NO: 442338
  Synthetic oligonucleotide

SEQ ID NO: 596582 - DNA, 51 bp, Artificial; identical to SEQ ID NO: 442345
  Synthetic oligonucleotide

SEQ ID NO: 596583 - DNA, 55 bp, Artificial; identical to SEQ ID NO: 442351
  Synthetic oligonucleotide

SEQ ID NO: 596584 - DNA, 57 bp, Artificial; identical to SEQ ID NO: 442353
  Synthetic oligonucleotide

SEQ ID NO: 596585 - DNA, 55 bp, Artificial; identical to SEQ ID NO: 442354
  Synthetic oligonucleotide

SEQ ID NO: 596586 - DNA, 60 bp, Artificial; identical to SEQ ID NO: 442355
  Synthetic oligonucleotide

SEQ ID NO: 596587 - DNA, 60 bp, Artificial; identical to SEQ ID NO: 442356
  Synthetic oligonucleotide

SEQ ID NO: 596588 - DNA, 57 bp, Artificial; identical to SEQ ID NO: 442357
  Synthetic oligonucleotide

SEQ ID NO: 596589 - DNA, 55 bp, Artificial; identical to SEQ ID NO: 442359
  Synthetic oligonucleotide

SEQ ID NO: 596590 - DNA, 55 bp, Artificial; identical to SEQ ID NO: 442360
  Synthetic oligonucleotide

SEQ ID NO: 596591 - DNA, 60 bp, Artificial; identical to SEQ ID NO: 442361
  Synthetic oligonucleotide

SEQ ID NO: 596592 - DNA, 55 bp, Artificial; identical to SEQ ID NO: 442362
  Synthetic oligonucleotide

SEQ ID NO: 596593 - DNA, 57 bp, Artificial; identical to SEQ ID NO: 442369
  Synthetic oligonucleotide

SEQ ID NO: 596594 - DNA, 55 bp, Artificial; identical to SEQ ID NO: 442374
  Synthetic oligonucleotide

SEQ ID NO: 596595 - DNA, 51 bp, Artificial; identical to SEQ ID NO: 442380
  Synthetic oligonucleotide

SEQ ID NO: 596596 - DNA, 55 bp, Artificial; identical to SEQ ID NO: 442385
  Synthetic oligonucleotide

SEQ ID NO: 596597 - DNA, 54 bp, Artificial; identical to SEQ ID NO: 442387
  Synthetic oligonucleotide

SEQ ID NO: 596598 - DNA, 57 bp, Artificial; identical to SEQ ID NO: 442389
  Synthetic oligonucleotide

SEQ ID NO: 596599 - DNA, 58 bp, Artificial; identical to SEQ ID NO: 442391
  Synthetic oligonucleotide

SEQ ID NO: 596600 - DNA, 60 bp, Artificial; identical to SEQ ID NO: 442392
  Synthetic oligonucleotide

SEQ ID NO: 596601 - DNA, 55 bp, Artificial; identical to SEQ ID NO: 442394
  Synthetic oligonucleotide

SEQ ID NO: 596602 - DNA, 60 bp, Artificial; identical to SEQ ID NO: 442395
  Synthetic oligonucleotide

SEQ ID NO: 596603 - DNA, 56 bp, Artificial; identical to SEQ ID NO: 442396
  Synthetic oligonucleotide

SEQ ID NO: 596604 - DNA, 50 bp, Artificial; identical to SEQ ID NO: 442397
  Synthetic oligonucleotide

SEQ ID NO: 596605 - DNA, 55 bp, Artificial; identical to SEQ ID NO: 442398
  Synthetic oligonucleotide

SEQ ID NO: 596606 - DNA, 55 bp, Artificial; identical to SEQ ID NO: 442402
  Synthetic oligonucleotide

SEQ ID NO: 596607 - DNA, 57 bp, Artificial; identical to SEQ ID NO: 442403
  Synthetic oligonucleotide

SEQ ID NO: 596608 - DNA, 52 bp, Artificial; identical to SEQ ID NO: 442404
  Synthetic oligonucleotide

SEQ ID NO: 596609 - DNA, 60 bp, Artificial; identical to SEQ ID NO: 442408
  Synthetic oligonucleotide

SEQ ID NO: 596610 - DNA, 60 bp, Artificial; identical to SEQ ID NO: 442413
  Synthetic oligonucleotide

SEQ ID NO: 596611 - DNA, 52 bp, Artificial; identical to SEQ ID NO: 442415
  Synthetic oligonucleotide

SEQ ID NO: 596612 - DNA, 60 bp, Artificial; identical to SEQ ID NO: 442418
  Synthetic oligonucleotide

SEQ ID NO: 596613 - DNA, 55 bp, Artificial; identical to SEQ ID NO: 442419
  Synthetic oligonucleotide

SEQ ID NO: 596614 - DNA, 60 bp, Artificial; identical to SEQ ID NO: 442420
  Synthetic oligonucleotide

SEQ ID NO: 596615 - DNA, 60 bp, Artificial; identical to SEQ ID NO: 442421
  Synthetic oligonucleotide

SEQ ID NO: 596616 - DNA, 60 bp, Artificial; identical to SEQ ID NO: 442426
  Synthetic oligonucleotide

SEQ ID NO: 596617 - DNA, 60 bp, Artificial; identical to SEQ ID NO: 442429
  Synthetic oligonucleotide

SEQ ID NO: 596618 - DNA, 55 bp, Artificial; identical to SEQ ID NO: 442430
  Synthetic oligonucleotide

SEQ ID NO: 596619 - DNA, 60 bp, Artificial; identical to SEQ ID NO: 12086
  Synthetic oligonucleotide

SEQ ID NO: 596620 - DNA, 55 bp, Artificial; identical to SEQ ID NO: 442431
  Synthetic oligonucleotide

SEQ ID NO: 596621 - DNA, 59 bp, Artificial; identical to SEQ ID NO: 442433
  Synthetic oligonucleotide

SEQ ID NO: 596622 - DNA, 60 bp, Artificial; identical to SEQ ID NO: 442436
  Synthetic oligonucleotide

SEQ ID NO: 596623 - DNA, 60 bp, Artificial; identical to SEQ ID NO: 442438
  Synthetic oligonucleotide

SEQ ID NO: 596624 - DNA, 55 bp, Artificial; identical to SEQ ID NO: 442439
  Synthetic oligonucleotide

SEQ ID NO: 596625 - DNA, 55 bp, Artificial; identical to SEQ ID NO: 442440
  Synthetic oligonucleotide

SEQ ID NO: 596626 - DNA, 59 bp, Artificial; identical to SEQ ID NO: 10380
  Synthetic oligonucleotide

SEQ ID NO: 596627 - DNA, 55 bp, Artificial; identical to SEQ ID NO: 442445
  Synthetic oligonucleotide

SEQ ID NO: 596628 - DNA, 57 bp, Artificial; identical to SEQ ID NO: 442446
  Synthetic oligonucleotide

SEQ ID NO: 596629 - DNA, 55 bp, Artificial; identical to SEQ ID NO: 442448
  Synthetic oligonucleotide

SEQ ID NO: 596630 - DNA, 55 bp, Artificial; identical to SEQ ID NO: 442450
  Synthetic oligonucleotide

SEQ ID NO: 596631 - DNA, 54 bp, Artificial; identical to SEQ ID NO: 442452
  Synthetic oligonucleotide

SEQ ID NO: 596632 - DNA, 55 bp, Artificial; identical to SEQ ID NO: 442457
  Synthetic oligonucleotide

SEQ ID NO: 596633 - DNA, 60 bp, Artificial; identical to SEQ ID NO: 442459
  Synthetic oligonucleotide

SEQ ID NO: 596634 - DNA, 55 bp, Artificial; identical to SEQ ID NO: 442461
  Synthetic oligonucleotide

SEQ ID NO: 596635 - DNA, 60 bp, Artificial; identical to SEQ ID NO: 442464
  Synthetic oligonucleotide

SEQ ID NO: 596636 - DNA, 60 bp, Artificial; identical to SEQ ID NO: 442465
  Synthetic oligonucleotide

SEQ ID NO: 596637 - DNA, 60 bp, Artificial; identical to SEQ ID NO: 442468
  Synthetic oligonucleotide

SEQ ID NO: 596638 - DNA, 55 bp, Artificial; identical to SEQ ID NO: 442470
  Synthetic oligonucleotide

SEQ ID NO: 596639 - DNA, 60 bp, Artificial; identical to SEQ ID NO: 442475
  Synthetic oligonucleotide

SEQ ID NO: 596640 - DNA, 56 bp, Artificial; identical to SEQ ID NO: 442480
  Synthetic oligonucleotide

SEQ ID NO: 596641 - DNA, 51 bp, Artificial; identical to SEQ ID NO: 442481
  Synthetic oligonucleotide

SEQ ID NO: 596642 - DNA, 59 bp, Artificial; identical to SEQ ID NO: 442487
  Synthetic oligonucleotide

SEQ ID NO: 596643 - DNA, 55 bp, Artificial; identical to SEQ ID NO: 442488
  Synthetic oligonucleotide

SEQ ID NO: 596644 - DNA, 55 bp, Artificial; identical to SEQ ID NO: 442491
  Synthetic oligonucleotide

SEQ ID NO: 596645 - DNA, 59 bp, Artificial; identical to SEQ ID NO: 442494
  Synthetic oligonucleotide

SEQ ID NO: 596646 - DNA, 55 bp, Artificial; identical to SEQ ID NO: 442496
  Synthetic oligonucleotide

SEQ ID NO: 596647 - DNA, 55 bp, Artificial; identical to SEQ ID NO: 18387
  Synthetic oligonucleotide

SEQ ID NO: 596648 - DNA, 58 bp, Artificial; identical to SEQ ID NO: 442501
  Synthetic oligonucleotide

SEQ ID NO: 596649 - DNA, 60 bp, Artificial; identical to SEQ ID NO: 6020
  Synthetic oligonucleotide

SEQ ID NO: 596650 - DNA, 57 bp, Artificial; identical to SEQ ID NO: 442504
  Synthetic oligonucleotide

SEQ ID NO: 596651 - DNA, 60 bp, Artificial; identical to SEQ ID NO: 442512
  Synthetic oligonucleotide

SEQ ID NO: 596652 - DNA, 55 bp, Artificial; identical to SEQ ID NO: 442519
  Synthetic oligonucleotide

SEQ ID NO: 596653 - DNA, 52 bp, Artificial; identical to SEQ ID NO: 12772
  Synthetic oligonucleotide

SEQ ID NO: 596654 - DNA, 55 bp, Artificial; identical to SEQ ID NO: 442527
  Synthetic oligonucleotide

SEQ ID NO: 596655 - DNA, 60 bp, Artificial; identical to SEQ ID NO: 442539
  Synthetic oligonucleotide

SEQ ID NO: 596656 - DNA, 55 bp, Artificial; identical to SEQ ID NO: 442542
  Synthetic oligonucleotide

SEQ ID NO: 596657 - DNA, 55 bp, Artificial; identical to SEQ ID NO: 442543
  Synthetic oligonucleotide

SEQ ID NO: 596658 - DNA, 51 bp, Artificial; identical to SEQ ID NO: 442552
  Synthetic oligonucleotide

SEQ ID NO: 596659 - DNA, 55 bp, Artificial; identical to SEQ ID NO: 442554
  Synthetic oligonucleotide

SEQ ID NO: 596660 - DNA, 60 bp, Artificial; identical to SEQ ID NO: 6654
  Synthetic oligonucleotide

SEQ ID NO: 596661 - DNA, 55 bp, Artificial; identical to SEQ ID NO: 442559
  Synthetic oligonucleotide

SEQ ID NO: 596662 - DNA, 55 bp, Artificial; identical to SEQ ID NO: 442560
  Synthetic oligonucleotide

SEQ ID NO: 596663 - DNA, 60 bp, Artificial; identical to SEQ ID NO: 442561
  Synthetic oligonucleotide

SEQ ID NO: 596664 - DNA, 55 bp, Artificial; identical to SEQ ID NO: 442563
  Synthetic oligonucleotide

SEQ ID NO: 596665 - DNA, 60 bp, Artificial; identical to SEQ ID NO: 442567
  Synthetic oligonucleotide

SEQ ID NO: 596666 - DNA, 57 bp, Artificial; identical to SEQ ID NO: 442571
  Synthetic oligonucleotide

SEQ ID NO: 596667 - DNA, 55 bp, Artificial; identical to SEQ ID NO: 442575
  Synthetic oligonucleotide

SEQ ID NO: 596668 - DNA, 57 bp, Artificial; identical to SEQ ID NO: 442578
  Synthetic oligonucleotide

SEQ ID NO: 596669 - DNA, 55 bp, Artificial; identical to SEQ ID NO: 442579
  Synthetic oligonucleotide

SEQ ID NO: 596670 - DNA, 55 bp, Artificial; identical to SEQ ID NO: 442580
  Synthetic oligonucleotide

SEQ ID NO: 596671 - DNA, 59 bp, Artificial; identical to SEQ ID NO: 442581
  Synthetic oligonucleotide

SEQ ID NO: 596672 - DNA, 51 bp, Artificial; identical to SEQ ID NO: 442584
  Synthetic oligonucleotide

SEQ ID NO: 596673 - DNA, 59 bp, Artificial; identical to SEQ ID NO: 442586
  Synthetic oligonucleotide

SEQ ID NO: 596674 - DNA, 57 bp, Artificial; identical to SEQ ID NO: 442589
  Synthetic oligonucleotide

SEQ ID NO: 596675 - DNA, 55 bp, Artificial; identical to SEQ ID NO: 442590
  Synthetic oligonucleotide

SEQ ID NO: 596676 - DNA, 59 bp, Artificial; identical to SEQ ID NO: 442592
  Synthetic oligonucleotide

SEQ ID NO: 596677 - DNA, 60 bp, Artificial; identical to SEQ ID NO: 442594
  Synthetic oligonucleotide

SEQ ID NO: 596678 - DNA, 60 bp, Artificial; identical to SEQ ID NO: 442595
  Synthetic oligonucleotide

SEQ ID NO: 596679 - DNA, 56 bp, Artificial; identical to SEQ ID NO: 442596
  Synthetic oligonucleotide

SEQ ID NO: 596680 - DNA, 55 bp, Artificial; identical to SEQ ID NO: 442597
  Synthetic oligonucleotide

SEQ ID NO: 596681 - DNA, 56 bp, Artificial; identical to SEQ ID NO: 442600
  Synthetic oligonucleotide

SEQ ID NO: 596682 - DNA, 57 bp, Artificial; identical to SEQ ID NO: 442601
  Synthetic oligonucleotide

SEQ ID NO: 596683 - DNA, 50 bp, Artificial; identical to SEQ ID NO: 442602
  Synthetic oligonucleotide

SEQ ID NO: 596684 - DNA, 55 bp, Artificial; identical to SEQ ID NO: 442604
  Synthetic oligonucleotide

SEQ ID NO: 596685 - DNA, 58 bp, Artificial; identical to SEQ ID NO: 19262
  Synthetic oligonucleotide

SEQ ID NO: 596686 - DNA, 60 bp, Artificial; identical to SEQ ID NO: 442606
  Synthetic oligonucleotide

SEQ ID NO: 596687 - DNA, 56 bp, Artificial; identical to SEQ ID NO: 442607
  Synthetic oligonucleotide

SEQ ID NO: 596688 - DNA, 56 bp, Artificial; identical to SEQ ID NO: 442608
  Synthetic oligonucleotide

SEQ ID NO: 596689 - DNA, 55 bp, Artificial; identical to SEQ ID NO: 442612
  Synthetic oligonucleotide

SEQ ID NO: 596690 - DNA, 53 bp, Artificial; identical to SEQ ID NO: 442613
  Synthetic oligonucleotide

SEQ ID NO: 596691 - DNA, 58 bp, Artificial; identical to SEQ ID NO: 442614
  Synthetic oligonucleotide

SEQ ID NO: 596692 - DNA, 55 bp, Artificial; identical to SEQ ID NO: 442615
  Synthetic oligonucleotide

SEQ ID NO: 596693 - DNA, 51 bp, Artificial; identical to SEQ ID NO: 442617
  Synthetic oligonucleotide

SEQ ID NO: 596694 - DNA, 50 bp, Artificial; identical to SEQ ID NO: 13186
  Synthetic oligonucleotide

SEQ ID NO: 596695 - DNA, 55 bp, Artificial; identical to SEQ ID NO: 442618
  Synthetic oligonucleotide

SEQ ID NO: 596696 - DNA, 57 bp, Artificial; identical to SEQ ID NO: 442621
  Synthetic oligonucleotide

SEQ ID NO: 596697 - DNA, 55 bp, Artificial; identical to SEQ ID NO: 11096
  Synthetic oligonucleotide

SEQ ID NO: 596698 - DNA, 58 bp, Artificial; identical to SEQ ID NO: 442624
  Synthetic oligonucleotide

SEQ ID NO: 596699 - DNA, 60 bp, Artificial; identical to SEQ ID NO: 442626
  Synthetic oligonucleotide

SEQ ID NO: 596700 - DNA, 60 bp, Artificial; identical to SEQ ID NO: 442627
  Synthetic oligonucleotide

SEQ ID NO: 596701 - DNA, 59 bp, Artificial; identical to SEQ ID NO: 442630
  Synthetic oligonucleotide

SEQ ID NO: 596702 - DNA, 57 bp, Artificial; identical to SEQ ID NO: 442634
  Synthetic oligonucleotide

SEQ ID NO: 596703 - DNA, 52 bp, Artificial; identical to SEQ ID NO: 442635
  Synthetic oligonucleotide

SEQ ID NO: 596704 - DNA, 50 bp, Artificial; identical to SEQ ID NO: 442638
  Synthetic oligonucleotide

SEQ ID NO: 596705 - DNA, 60 bp, Artificial; identical to SEQ ID NO: 442639
  Synthetic oligonucleotide

SEQ ID NO: 596706 - DNA, 56 bp, Artificial; identical to SEQ ID NO: 442640
  Synthetic oligonucleotide

SEQ ID NO: 596707 - DNA, 55 bp, Artificial; identical to SEQ ID NO: 442645
  Synthetic oligonucleotide

SEQ ID NO: 596708 - DNA, 55 bp, Artificial; identical to SEQ ID NO: 442649
  Synthetic oligonucleotide

SEQ ID NO: 596709 - DNA, 60 bp, Artificial; identical to SEQ ID NO: 442651
  Synthetic oligonucleotide

SEQ ID NO: 596710 - DNA, 53 bp, Artificial; identical to SEQ ID NO: 442652
  Synthetic oligonucleotide

SEQ ID NO: 596711 - DNA, 60 bp, Artificial; identical to SEQ ID NO: 442653
  Synthetic oligonucleotide

SEQ ID NO: 596712 - DNA, 55 bp, Artificial; identical to SEQ ID NO: 442654
  Synthetic oligonucleotide

SEQ ID NO: 596713 - DNA, 56 bp, Artificial; identical to SEQ ID NO: 442655
  Synthetic oligonucleotide

SEQ ID NO: 596714 - DNA, 55 bp, Artificial; identical to SEQ ID NO: 442657
  Synthetic oligonucleotide

SEQ ID NO: 596715 - DNA, 58 bp, Artificial; identical to SEQ ID NO: 442659
  Synthetic oligonucleotide

SEQ ID NO: 596716 - DNA, 57 bp, Artificial; identical to SEQ ID NO: 442660
  Synthetic oligonucleotide

SEQ ID NO: 596717 - DNA, 55 bp, Artificial; identical to SEQ ID NO: 442662
  Synthetic oligonucleotide

SEQ ID NO: 596718 - DNA, 55 bp, Artificial; identical to SEQ ID NO: 442666
  Synthetic oligonucleotide

SEQ ID NO: 596719 - DNA, 55 bp, Artificial; identical to SEQ ID NO: 442668
  Synthetic oligonucleotide

SEQ ID NO: 596720 - DNA, 57 bp, Artificial; identical to SEQ ID NO: 442670
  Synthetic oligonucleotide

SEQ ID NO: 596721 - DNA, 59 bp, Artificial; identical to SEQ ID NO: 442674
  Synthetic oligonucleotide

SEQ ID NO: 596722 - DNA, 55 bp, Artificial; identical to SEQ ID NO: 442678
  Synthetic oligonucleotide

SEQ ID NO: 596723 - DNA, 55 bp, Artificial; identical to SEQ ID NO: 442681
  Synthetic oligonucleotide

SEQ ID NO: 596724 - DNA, 51 bp, Artificial; identical to SEQ ID NO: 442683
  Synthetic oligonucleotide

SEQ ID NO: 596725 - DNA, 55 bp, Artificial; identical to SEQ ID NO: 442684
  Synthetic oligonucleotide

SEQ ID NO: 596726 - DNA, 60 bp, Artificial; identical to SEQ ID NO: 442686
  Synthetic oligonucleotide

SEQ ID NO: 596727 - DNA, 57 bp, Artificial; identical to SEQ ID NO: 442687
  Synthetic oligonucleotide

SEQ ID NO: 596728 - DNA, 60 bp, Artificial; identical to SEQ ID NO: 442688
  Synthetic oligonucleotide

SEQ ID NO: 596729 - DNA, 58 bp, Artificial; identical to SEQ ID NO: 442693
  Synthetic oligonucleotide

SEQ ID NO: 596730 - DNA, 55 bp, Artificial; identical to SEQ ID NO: 442695
  Synthetic oligonucleotide

SEQ ID NO: 596731 - DNA, 55 bp, Artificial; identical to SEQ ID NO: 442696
  Synthetic oligonucleotide

SEQ ID NO: 596732 - DNA, 60 bp, Artificial; identical to SEQ ID NO: 442699
  Synthetic oligonucleotide

SEQ ID NO: 596733 - DNA, 59 bp, Artificial; identical to SEQ ID NO: 442700
  Synthetic oligonucleotide

SEQ ID NO: 596734 - DNA, 59 bp, Artificial; identical to SEQ ID NO: 442702
  Synthetic oligonucleotide

SEQ ID NO: 596735 - DNA, 57 bp, Artificial; identical to SEQ ID NO: 442703
  Synthetic oligonucleotide

SEQ ID NO: 596736 - DNA, 60 bp, Artificial; identical to SEQ ID NO: 442705
  Synthetic oligonucleotide

SEQ ID NO: 596737 - DNA, 55 bp, Artificial; identical to SEQ ID NO: 442706
  Synthetic oligonucleotide

SEQ ID NO: 596738 - DNA, 60 bp, Artificial; identical to SEQ ID NO: 442707
  Synthetic oligonucleotide

SEQ ID NO: 596739 - DNA, 60 bp, Artificial; identical to SEQ ID NO: 442708
  Synthetic oligonucleotide

SEQ ID NO: 596740 - DNA, 51 bp, Artificial; identical to SEQ ID NO: 442710
  Synthetic oligonucleotide

SEQ ID NO: 596741 - DNA, 55 bp, Artificial; identical to SEQ ID NO: 442714
  Synthetic oligonucleotide

SEQ ID NO: 596742 - DNA, 52 bp, Artificial; identical to SEQ ID NO: 442716
  Synthetic oligonucleotide

SEQ ID NO: 596743 - DNA, 55 bp, Artificial; identical to SEQ ID NO: 442717
  Synthetic oligonucleotide

SEQ ID NO: 596744 - DNA, 55 bp, Artificial; identical to SEQ ID NO: 442720
  Synthetic oligonucleotide

SEQ ID NO: 596745 - DNA, 60 bp, Artificial; identical to SEQ ID NO: 442722
  Synthetic oligonucleotide

SEQ ID NO: 596746 - DNA, 55 bp, Artificial; identical to SEQ ID NO: 442724
  Synthetic oligonucleotide

SEQ ID NO: 596747 - DNA, 55 bp, Artificial; identical to SEQ ID NO: 442725
  Synthetic oligonucleotide

SEQ ID NO: 596748 - DNA, 54 bp, Artificial; identical to SEQ ID NO: 442728
  Synthetic oligonucleotide

SEQ ID NO: 596749 - DNA, 60 bp, Artificial; identical to SEQ ID NO: 442729
  Synthetic oligonucleotide

SEQ ID NO: 596750 - DNA, 60 bp, Artificial; identical to SEQ ID NO: 10269
  Synthetic oligonucleotide

SEQ ID NO: 596751 - DNA, 55 bp, Artificial; identical to SEQ ID NO: 442732
  Synthetic oligonucleotide

SEQ ID NO: 596752 - DNA, 54 bp, Artificial; identical to SEQ ID NO: 442735
  Synthetic oligonucleotide

SEQ ID NO: 596753 - DNA, 60 bp, Artificial; identical to SEQ ID NO: 442736
  Synthetic oligonucleotide

SEQ ID NO: 596754 - DNA, 52 bp, Artificial; identical to SEQ ID NO: 442739
  Synthetic oligonucleotide

SEQ ID NO: 596755 - DNA, 55 bp, Artificial; identical to SEQ ID NO: 442742
  Synthetic oligonucleotide

SEQ ID NO: 596756 - DNA, 55 bp, Artificial; identical to SEQ ID NO: 442744
  Synthetic oligonucleotide

SEQ ID NO: 596757 - DNA, 60 bp, Artificial; identical to SEQ ID NO: 442745
  Synthetic oligonucleotide

SEQ ID NO: 596758 - DNA, 60 bp, Artificial; identical to SEQ ID NO: 8295
  Synthetic oligonucleotide

SEQ ID NO: 596759 - DNA, 55 bp, Artificial; identical to SEQ ID NO: 442746
  Synthetic oligonucleotide

SEQ ID NO: 596760 - DNA, 51 bp, Artificial; identical to SEQ ID NO: 442747
  Synthetic oligonucleotide

SEQ ID NO: 596761 - DNA, 55 bp, Artificial; identical to SEQ ID NO: 442748
  Synthetic oligonucleotide

SEQ ID NO: 596762 - DNA, 55 bp, Artificial; identical to SEQ ID NO: 442752
  Synthetic oligonucleotide

SEQ ID NO: 596763 - DNA, 54 bp, Artificial; identical to SEQ ID NO: 442756
  Synthetic oligonucleotide

SEQ ID NO: 596764 - DNA, 59 bp, Artificial; identical to SEQ ID NO: 442757
  Synthetic oligonucleotide

SEQ ID NO: 596765 - DNA, 55 bp, Artificial; identical to SEQ ID NO: 442758
  Synthetic oligonucleotide

SEQ ID NO: 596766 - DNA, 55 bp, Artificial; identical to SEQ ID NO: 442761
  Synthetic oligonucleotide

SEQ ID NO: 596767 - DNA, 60 bp, Artificial; identical to SEQ ID NO: 442764
  Synthetic oligonucleotide

SEQ ID NO: 596768 - DNA, 60 bp, Artificial; identical to SEQ ID NO: 7102
  Synthetic oligonucleotide

SEQ ID NO: 596769 - DNA, 55 bp, Artificial; identical to SEQ ID NO: 442767
  Synthetic oligonucleotide

SEQ ID NO: 596770 - DNA, 56 bp, Artificial; identical to SEQ ID NO: 442768
  Synthetic oligonucleotide

SEQ ID NO: 596771 - DNA, 55 bp, Artificial; identical to SEQ ID NO: 442770
  Synthetic oligonucleotide

SEQ ID NO: 596772 - DNA, 53 bp, Artificial; identical to SEQ ID NO: 442772
  Synthetic oligonucleotide

SEQ ID NO: 596773 - DNA, 56 bp, Artificial; identical to SEQ ID NO: 442774
  Synthetic oligonucleotide

SEQ ID NO: 596774 - DNA, 58 bp, Artificial; identical to SEQ ID NO: 18095
  Synthetic oligonucleotide

SEQ ID NO: 596775 - DNA, 55 bp, Artificial; identical to SEQ ID NO: 442776
  Synthetic oligonucleotide

SEQ ID NO: 596776 - DNA, 60 bp, Artificial; identical to SEQ ID NO: 8122
  Synthetic oligonucleotide

SEQ ID NO: 596777 - DNA, 55 bp, Artificial; identical to SEQ ID NO: 442778
  Synthetic oligonucleotide

SEQ ID NO: 596778 - DNA, 60 bp, Artificial; identical to SEQ ID NO: 11652
  Synthetic oligonucleotide

SEQ ID NO: 596779 - DNA, 55 bp, Artificial; identical to SEQ ID NO: 442782
  Synthetic oligonucleotide

SEQ ID NO: 596780 - DNA, 55 bp, Artificial; identical to SEQ ID NO: 442783
  Synthetic oligonucleotide

SEQ ID NO: 596781 - DNA, 55 bp, Artificial; identical to SEQ ID NO: 442784
  Synthetic oligonucleotide

SEQ ID NO: 596782 - DNA, 55 bp, Artificial; identical to SEQ ID NO: 442788
  Synthetic oligonucleotide

SEQ ID NO: 596783 - DNA, 60 bp, Artificial; identical to SEQ ID NO: 442790
  Synthetic oligonucleotide

SEQ ID NO: 596784 - DNA, 57 bp, Artificial; identical to SEQ ID NO: 442793
  Synthetic oligonucleotide

SEQ ID NO: 596785 - DNA, 55 bp, Artificial; identical to SEQ ID NO: 442794
  Synthetic oligonucleotide

SEQ ID NO: 596786 - DNA, 58 bp, Artificial; identical to SEQ ID NO: 442795
  Synthetic oligonucleotide

SEQ ID NO: 596787 - DNA, 60 bp, Artificial; identical to SEQ ID NO: 6201
  Synthetic oligonucleotide

SEQ ID NO: 596788 - DNA, 55 bp, Artificial; identical to SEQ ID NO: 442801
  Synthetic oligonucleotide

SEQ ID NO: 596789 - DNA, 55 bp, Artificial; identical to SEQ ID NO: 442806
  Synthetic oligonucleotide

SEQ ID NO: 596790 - DNA, 60 bp, Artificial; identical to SEQ ID NO: 6854
  Synthetic oligonucleotide

SEQ ID NO: 596791 - DNA, 55 bp, Artificial; identical to SEQ ID NO: 442814
  Synthetic oligonucleotide

SEQ ID NO: 596792 - DNA, 51 bp, Artificial; identical to SEQ ID NO: 442816
  Synthetic oligonucleotide

SEQ ID NO: 596793 - DNA, 60 bp, Artificial; identical to SEQ ID NO: 442817
  Synthetic oligonucleotide

SEQ ID NO: 596794 - DNA, 52 bp, Artificial; identical to SEQ ID NO: 442818
  Synthetic oligonucleotide

SEQ ID NO: 596795 - DNA, 60 bp, Artificial; identical to SEQ ID NO: 442819
  Synthetic oligonucleotide

SEQ ID NO: 596796 - DNA, 60 bp, Artificial; identical to SEQ ID NO: 442821
  Synthetic oligonucleotide

SEQ ID NO: 596797 - DNA, 60 bp, Artificial; identical to SEQ ID NO: 442822
  Synthetic oligonucleotide

SEQ ID NO: 596798 - DNA, 58 bp, Artificial; identical to SEQ ID NO: 442825
  Synthetic oligonucleotide

SEQ ID NO: 596799 - DNA, 60 bp, Artificial; identical to SEQ ID NO: 442827
  Synthetic oligonucleotide

SEQ ID NO: 596800 - DNA, 55 bp, Artificial; identical to SEQ ID NO: 442829
  Synthetic oligonucleotide

SEQ ID NO: 596801 - DNA, 53 bp, Artificial; identical to SEQ ID NO: 442833
  Synthetic oligonucleotide

SEQ ID NO: 596802 - DNA, 55 bp, Artificial; identical to SEQ ID NO: 442835
  Synthetic oligonucleotide

SEQ ID NO: 596803 - DNA, 60 bp, Artificial; identical to SEQ ID NO: 10325
  Synthetic oligonucleotide

SEQ ID NO: 596804 - DNA, 60 bp, Artificial; identical to SEQ ID NO: 442838
  Synthetic oligonucleotide

SEQ ID NO: 596805 - DNA, 60 bp, Artificial; identical to SEQ ID NO: 442844
  Synthetic oligonucleotide

SEQ ID NO: 596806 - DNA, 60 bp, Artificial; identical to SEQ ID NO: 442845
  Synthetic oligonucleotide

SEQ ID NO: 596807 - DNA, 59 bp, Artificial; identical to SEQ ID NO: 442847
  Synthetic oligonucleotide

SEQ ID NO: 596808 - DNA, 55 bp, Artificial; identical to SEQ ID NO: 442851
  Synthetic oligonucleotide

SEQ ID NO: 596809 - DNA, 60 bp, Artificial; identical to SEQ ID NO: 10548
  Synthetic oligonucleotide

SEQ ID NO: 596810 - DNA, 60 bp, Artificial; identical to SEQ ID NO: 442853
  Synthetic oligonucleotide

SEQ ID NO: 596811 - DNA, 55 bp, Artificial; identical to SEQ ID NO: 442855
  Synthetic oligonucleotide

SEQ ID NO: 596812 - DNA, 53 bp, Artificial; identical to SEQ ID NO: 442856
  Synthetic oligonucleotide

SEQ ID NO: 596813 - DNA, 55 bp, Artificial; identical to SEQ ID NO: 442860
  Synthetic oligonucleotide

SEQ ID NO: 596814 - DNA, 55 bp, Artificial; identical to SEQ ID NO: 442862
  Synthetic oligonucleotide

SEQ ID NO: 596815 - DNA, 55 bp, Artificial; identical to SEQ ID NO: 442864
  Synthetic oligonucleotide

SEQ ID NO: 596816 - DNA, 55 bp, Artificial; identical to SEQ ID NO: 442868
  Synthetic oligonucleotide

SEQ ID NO: 596817 - DNA, 54 bp, Artificial; identical to SEQ ID NO: 442869
  Synthetic oligonucleotide

SEQ ID NO: 596818 - DNA, 55 bp, Artificial; identical to SEQ ID NO: 442872
  Synthetic oligonucleotide

SEQ ID NO: 596819 - DNA, 57 bp, Artificial; identical to SEQ ID NO: 442874
  Synthetic oligonucleotide

SEQ ID NO: 596820 - DNA, 57 bp, Artificial; identical to SEQ ID NO: 442878
  Synthetic oligonucleotide

SEQ ID NO: 596821 - DNA, 55 bp, Artificial; identical to SEQ ID NO: 442881
  Synthetic oligonucleotide

SEQ ID NO: 596822 - DNA, 60 bp, Artificial; identical to SEQ ID NO: 442883
  Synthetic oligonucleotide

SEQ ID NO: 596823 - DNA, 55 bp, Artificial; identical to SEQ ID NO: 442884
  Synthetic oligonucleotide

SEQ ID NO: 596824 - DNA, 58 bp, Artificial; identical to SEQ ID NO: 442887
  Synthetic oligonucleotide

SEQ ID NO: 596825 - DNA, 51 bp, Artificial; identical to SEQ ID NO: 442888
  Synthetic oligonucleotide

SEQ ID NO: 596826 - DNA, 57 bp, Artificial; identical to SEQ ID NO: 442892
  Synthetic oligonucleotide

SEQ ID NO: 596827 - DNA, 58 bp, Artificial; identical to SEQ ID NO: 442894
  Synthetic oligonucleotide

SEQ ID NO: 596828 - DNA, 53 bp, Artificial; identical to SEQ ID NO: 442895
  Synthetic oligonucleotide

SEQ ID NO: 596829 - DNA, 60 bp, Artificial; identical to SEQ ID NO: 442897
  Synthetic oligonucleotide

SEQ ID NO: 596830 - DNA, 51 bp, Artificial; identical to SEQ ID NO: 442898
  Synthetic oligonucleotide

SEQ ID NO: 596831 - DNA, 51 bp, Artificial; identical to SEQ ID NO: 442899
  Synthetic oligonucleotide

SEQ ID NO: 596832 - DNA, 57 bp, Artificial; identical to SEQ ID NO: 442903
  Synthetic oligonucleotide

SEQ ID NO: 596833 - DNA, 53 bp, Artificial; identical to SEQ ID NO: 12879
  Synthetic oligonucleotide

SEQ ID NO: 596834 - DNA, 55 bp, Artificial; identical to SEQ ID NO: 442904
  Synthetic oligonucleotide

SEQ ID NO: 596835 - DNA, 60 bp, Artificial; identical to SEQ ID NO: 442905
  Synthetic oligonucleotide

SEQ ID NO: 596836 - DNA, 55 bp, Artificial; identical to SEQ ID NO: 442910
  Synthetic oligonucleotide

SEQ ID NO: 596837 - DNA, 52 bp, Artificial; identical to SEQ ID NO: 442911
  Synthetic oligonucleotide

SEQ ID NO: 596838 - DNA, 60 bp, Artificial; identical to SEQ ID NO: 442913
  Synthetic oligonucleotide

SEQ ID NO: 596839 - DNA, 55 bp, Artificial; identical to SEQ ID NO: 442914
  Synthetic oligonucleotide

SEQ ID NO: 596840 - DNA, 55 bp, Artificial; identical to SEQ ID NO: 442916
  Synthetic oligonucleotide

SEQ ID NO: 596841 - DNA, 59 bp, Artificial; identical to SEQ ID NO: 442917
  Synthetic oligonucleotide

SEQ ID NO: 596842 - DNA, 52 bp, Artificial; identical to SEQ ID NO: 442918
  Synthetic oligonucleotide

SEQ ID NO: 596843 - DNA, 55 bp, Artificial; identical to SEQ ID NO: 442920
  Synthetic oligonucleotide

SEQ ID NO: 596844 - DNA, 55 bp, Artificial; identical to SEQ ID NO: 442924
  Synthetic oligonucleotide

SEQ ID NO: 596845 - DNA, 53 bp, Artificial; identical to SEQ ID NO: 442925
  Synthetic oligonucleotide

SEQ ID NO: 596846 - DNA, 57 bp, Artificial; identical to SEQ ID NO: 442926
  Synthetic oligonucleotide

SEQ ID NO: 596847 - DNA, 55 bp, Artificial; identical to SEQ ID NO: 442927
  Synthetic oligonucleotide

SEQ ID NO: 596848 - DNA, 56 bp, Artificial; identical to SEQ ID NO: 442928
  Synthetic oligonucleotide

SEQ ID NO: 596849 - DNA, 55 bp, Artificial; identical to SEQ ID NO: 442934
  Synthetic oligonucleotide

SEQ ID NO: 596850 - DNA, 55 bp, Artificial; identical to SEQ ID NO: 442936
  Synthetic oligonucleotide

SEQ ID NO: 596851 - DNA, 56 bp, Artificial; identical to SEQ ID NO: 10546
  Synthetic oligonucleotide

SEQ ID NO: 596852 - DNA, 55 bp, Artificial; identical to SEQ ID NO: 442939
  Synthetic oligonucleotide

SEQ ID NO: 596853 - DNA, 58 bp, Artificial; identical to SEQ ID NO: 442940
  Synthetic oligonucleotide

SEQ ID NO: 596854 - DNA, 57 bp, Artificial; identical to SEQ ID NO: 442942
  Synthetic oligonucleotide

SEQ ID NO: 596855 - DNA, 60 bp, Artificial; identical to SEQ ID NO: 442943
  Synthetic oligonucleotide

SEQ ID NO: 596856 - DNA, 52 bp, Artificial; identical to SEQ ID NO: 442946
  Synthetic oligonucleotide

SEQ ID NO: 596857 - DNA, 55 bp, Artificial; identical to SEQ ID NO: 442947
  Synthetic oligonucleotide

SEQ ID NO: 596858 - DNA, 59 bp, Artificial; identical to SEQ ID NO: 442949
  Synthetic oligonucleotide

SEQ ID NO: 596859 - DNA, 55 bp, Artificial; identical to SEQ ID NO: 442951
  Synthetic oligonucleotide

SEQ ID NO: 596860 - DNA, 51 bp, Artificial; identical to SEQ ID NO: 442955
  Synthetic oligonucleotide

SEQ ID NO: 596861 - DNA, 55 bp, Artificial; identical to SEQ ID NO: 442958
  Synthetic oligonucleotide

SEQ ID NO: 596862 - DNA, 60 bp, Artificial; identical to SEQ ID NO: 442962
  Synthetic oligonucleotide

SEQ ID NO: 596863 - DNA, 60 bp, Artificial; identical to SEQ ID NO: 82289
  Synthetic oligonucleotide

SEQ ID NO: 596864 - DNA, 60 bp, Artificial; identical to SEQ ID NO: 442967
  Synthetic oligonucleotide

SEQ ID NO: 596865 - DNA, 55 bp, Artificial; identical to SEQ ID NO: 442969
  Synthetic oligonucleotide

SEQ ID NO: 596866 - DNA, 60 bp, Artificial; identical to SEQ ID NO: 442971
  Synthetic oligonucleotide

SEQ ID NO: 596867 - DNA, 58 bp, Artificial; identical to SEQ ID NO: 442972
  Synthetic oligonucleotide

SEQ ID NO: 596868 - DNA, 53 bp, Artificial; identical to SEQ ID NO: 442974
  Synthetic oligonucleotide

SEQ ID NO: 596869 - DNA, 60 bp, Artificial; identical to SEQ ID NO: 442975
  Synthetic oligonucleotide

SEQ ID NO: 596870 - DNA, 55 bp, Artificial; identical to SEQ ID NO: 442978
  Synthetic oligonucleotide

SEQ ID NO: 596871 - DNA, 60 bp, Artificial; identical to SEQ ID NO: 442979
  Synthetic oligonucleotide

SEQ ID NO: 596872 - DNA, 60 bp, Artificial; identical to SEQ ID NO: 442983
  Synthetic oligonucleotide

SEQ ID NO: 596873 - DNA, 50 bp, Artificial; identical to SEQ ID NO: 442989
  Synthetic oligonucleotide

SEQ ID NO: 596874 - DNA, 55 bp, Artificial; identical to SEQ ID NO: 442990
  Synthetic oligonucleotide

SEQ ID NO: 596875 - DNA, 59 bp, Artificial; identical to SEQ ID NO: 442991
  Synthetic oligonucleotide

SEQ ID NO: 596876 - DNA, 55 bp, Artificial; identical to SEQ ID NO: 442992
  Synthetic oligonucleotide

SEQ ID NO: 596877 - DNA, 55 bp, Artificial; identical to SEQ ID NO: 442997
  Synthetic oligonucleotide

SEQ ID NO: 596878 - DNA, 55 bp, Artificial; identical to SEQ ID NO: 442998
  Synthetic oligonucleotide

SEQ ID NO: 596879 - DNA, 55 bp, Artificial; identical to SEQ ID NO: 442999
  Synthetic oligonucleotide

SEQ ID NO: 596880 - DNA, 59 bp, Artificial; identical to SEQ ID NO: 443001
  Synthetic oligonucleotide

SEQ ID NO: 596881 - DNA, 50 bp, Artificial; identical to SEQ ID NO: 443002
  Synthetic oligonucleotide

SEQ ID NO: 596882 - DNA, 55 bp, Artificial; identical to SEQ ID NO: 443009
  Synthetic oligonucleotide

SEQ ID NO: 596883 - DNA, 58 bp, Artificial; identical to SEQ ID NO: 20037
  Synthetic oligonucleotide

SEQ ID NO: 596884 - DNA, 51 bp, Artificial; identical to SEQ ID NO: 443011
  Synthetic oligonucleotide

SEQ ID NO: 596885 - DNA, 50 bp, Artificial; identical to SEQ ID NO: 443016
  Synthetic oligonucleotide

SEQ ID NO: 596886 - DNA, 60 bp, Artificial; identical to SEQ ID NO: 443017
  Synthetic oligonucleotide

SEQ ID NO: 596887 - DNA, 52 bp, Artificial; identical to SEQ ID NO: 443019
  Synthetic oligonucleotide

SEQ ID NO: 596888 - DNA, 57 bp, Artificial; identical to SEQ ID NO: 443020
  Synthetic oligonucleotide

SEQ ID NO: 596889 - DNA, 58 bp, Artificial; identical to SEQ ID NO: 443023
  Synthetic oligonucleotide

SEQ ID NO: 596890 - DNA, 54 bp, Artificial; identical to SEQ ID NO: 443024
  Synthetic oligonucleotide

SEQ ID NO: 596891 - DNA, 52 bp, Artificial; identical to SEQ ID NO: 443027
  Synthetic oligonucleotide

SEQ ID NO: 596892 - DNA, 52 bp, Artificial; identical to SEQ ID NO: 443031
  Synthetic oligonucleotide

SEQ ID NO: 596893 - DNA, 57 bp, Artificial; identical to SEQ ID NO: 443033
  Synthetic oligonucleotide

SEQ ID NO: 596894 - DNA, 60 bp, Artificial; identical to SEQ ID NO: 443034
  Synthetic oligonucleotide

SEQ ID NO: 596895 - DNA, 51 bp, Artificial; identical to SEQ ID NO: 443041
  Synthetic oligonucleotide

SEQ ID NO: 596896 - DNA, 60 bp, Artificial; identical to SEQ ID NO: 443043
  Synthetic oligonucleotide

SEQ ID NO: 596897 - DNA, 57 bp, Artificial; identical to SEQ ID NO: 443044
  Synthetic oligonucleotide

SEQ ID NO: 596898 - DNA, 60 bp, Artificial; identical to SEQ ID NO: 443045
  Synthetic oligonucleotide

SEQ ID NO: 596899 - DNA, 55 bp, Artificial; identical to SEQ ID NO: 443053
  Synthetic oligonucleotide

SEQ ID NO: 596900 - DNA, 50 bp, Artificial; identical to SEQ ID NO: 443054
  Synthetic oligonucleotide

SEQ ID NO: 596901 - DNA, 55 bp, Artificial; identical to SEQ ID NO: 443058
  Synthetic oligonucleotide

SEQ ID NO: 596902 - DNA, 55 bp, Artificial; identical to SEQ ID NO: 443059
  Synthetic oligonucleotide

SEQ ID NO: 596903 - DNA, 60 bp, Artificial; identical to SEQ ID NO: 443064
  Synthetic oligonucleotide

SEQ ID NO: 596904 - DNA, 55 bp, Artificial; identical to SEQ ID NO: 443065
  Synthetic oligonucleotide

SEQ ID NO: 596905 - DNA, 59 bp, Artificial; identical to SEQ ID NO: 443068
  Synthetic oligonucleotide

SEQ ID NO: 596906 - DNA, 55 bp, Artificial; identical to SEQ ID NO: 443069
  Synthetic oligonucleotide

SEQ ID NO: 596907 - DNA, 55 bp, Artificial; identical to SEQ ID NO: 443071
  Synthetic oligonucleotide

SEQ ID NO: 596908 - DNA, 55 bp, Artificial; identical to SEQ ID NO: 443074
  Synthetic oligonucleotide

SEQ ID NO: 596909 - DNA, 55 bp, Artificial; identical to SEQ ID NO: 443076
  Synthetic oligonucleotide

SEQ ID NO: 596910 - DNA, 60 bp, Artificial; identical to SEQ ID NO: 443084
  Synthetic oligonucleotide

SEQ ID NO: 596911 - DNA, 55 bp, Artificial; identical to SEQ ID NO: 443085
  Synthetic oligonucleotide

SEQ ID NO: 596912 - DNA, 52 bp, Artificial; identical to SEQ ID NO: 443086
  Synthetic oligonucleotide

SEQ ID NO: 596913 - DNA, 60 bp, Artificial; identical to SEQ ID NO: 443092
  Synthetic oligonucleotide

SEQ ID NO: 596914 - DNA, 54 bp, Artificial; identical to SEQ ID NO: 443099
  Synthetic oligonucleotide

SEQ ID NO: 596915 - DNA, 59 bp, Artificial; identical to SEQ ID NO: 443102
  Synthetic oligonucleotide

SEQ ID NO: 596916 - DNA, 55 bp, Artificial; identical to SEQ ID NO: 443108
  Synthetic oligonucleotide

SEQ ID NO: 596917 - DNA, 57 bp, Artificial; identical to SEQ ID NO: 443112
  Synthetic oligonucleotide

SEQ ID NO: 596918 - DNA, 59 bp, Artificial; identical to SEQ ID NO: 443113
  Synthetic oligonucleotide

SEQ ID NO: 596919 - DNA, 60 bp, Artificial; identical to SEQ ID NO: 443116
  Synthetic oligonucleotide

SEQ ID NO: 596920 - DNA, 55 bp, Artificial; identical to SEQ ID NO: 443117
  Synthetic oligonucleotide

SEQ ID NO: 596921 - DNA, 55 bp, Artificial; identical to SEQ ID NO: 443119
  Synthetic oligonucleotide

SEQ ID NO: 596922 - DNA, 55 bp, Artificial; identical to SEQ ID NO: 443121
  Synthetic oligonucleotide

SEQ ID NO: 596923 - DNA, 60 bp, Artificial; identical to SEQ ID NO: 443122
  Synthetic oligonucleotide

SEQ ID NO: 596924 - DNA, 60 bp, Artificial; identical to SEQ ID NO: 443123
  Synthetic oligonucleotide

SEQ ID NO: 596925 - DNA, 60 bp, Artificial; identical to SEQ ID NO: 443124
  Synthetic oligonucleotide

SEQ ID NO: 596926 - DNA, 59 bp, Artificial; identical to SEQ ID NO: 443125
  Synthetic oligonucleotide

SEQ ID NO: 596927 - DNA, 57 bp, Artificial; identical to SEQ ID NO: 443126
  Synthetic oligonucleotide

SEQ ID NO: 596928 - DNA, 54 bp, Artificial; identical to SEQ ID NO: 443127
  Synthetic oligonucleotide

SEQ ID NO: 596929 - DNA, 60 bp, Artificial; identical to SEQ ID NO: 443128
  Synthetic oligonucleotide

SEQ ID NO: 596930 - DNA, 58 bp, Artificial; identical to SEQ ID NO: 443129
  Synthetic oligonucleotide

SEQ ID NO: 596931 - DNA, 57 bp, Artificial; identical to SEQ ID NO: 443130
  Synthetic oligonucleotide

SEQ ID NO: 596932 - DNA, 50 bp, Artificial; identical to SEQ ID NO: 443131
  Synthetic oligonucleotide

SEQ ID NO: 596933 - DNA, 51 bp, Artificial; identical to SEQ ID NO: 13063
  Synthetic oligonucleotide

SEQ ID NO: 596934 - DNA, 60 bp, Artificial; identical to SEQ ID NO: 443132
  Synthetic oligonucleotide

SEQ ID NO: 596935 - DNA, 60 bp, Artificial; identical to SEQ ID NO: 443133
  Synthetic oligonucleotide

SEQ ID NO: 596936 - DNA, 59 bp, Artificial; identical to SEQ ID NO: 443134
  Synthetic oligonucleotide

SEQ ID NO: 596937 - DNA, 60 bp, Artificial; identical to SEQ ID NO: 112590
  Synthetic oligonucleotide

SEQ ID NO: 596938 - DNA, 55 bp, Artificial; identical to SEQ ID NO: 443135
  Synthetic oligonucleotide

SEQ ID NO: 596939 - DNA, 60 bp, Artificial; identical to SEQ ID NO: 443137
  Synthetic oligonucleotide

SEQ ID NO: 596940 - DNA, 60 bp, Artificial; identical to SEQ ID NO: 13039
  Synthetic oligonucleotide

SEQ ID NO: 596941 - DNA, 60 bp, Artificial; identical to SEQ ID NO: 443138
  Synthetic oligonucleotide

SEQ ID NO: 596942 - DNA, 57 bp, Artificial; identical to SEQ ID NO: 443140
  Synthetic oligonucleotide

SEQ ID NO: 596943 - DNA, 50 bp, Artificial; identical to SEQ ID NO: 443141
  Synthetic oligonucleotide

SEQ ID NO: 596944 - DNA, 52 bp, Artificial; identical to SEQ ID NO: 443143
  Synthetic oligonucleotide

SEQ ID NO: 596945 - DNA, 56 bp, Artificial; identical to SEQ ID NO: 443144
  Synthetic oligonucleotide

SEQ ID NO: 596946 - DNA, 53 bp, Artificial; identical to SEQ ID NO: 443145
  Synthetic oligonucleotide

SEQ ID NO: 596947 - DNA, 60 bp, Artificial; identical to SEQ ID NO: 6056
  Synthetic oligonucleotide

SEQ ID NO: 596948 - DNA, 58 bp, Artificial; identical to SEQ ID NO: 443147
  Synthetic oligonucleotide

SEQ ID NO: 596949 - DNA, 51 bp, Artificial; identical to SEQ ID NO: 443148
  Synthetic oligonucleotide

SEQ ID NO: 596950 - DNA, 60 bp, Artificial; identical to SEQ ID NO: 14424
  Synthetic oligonucleotide

SEQ ID NO: 596951 - DNA, 57 bp, Artificial; identical to SEQ ID NO: 443149
  Synthetic oligonucleotide

SEQ ID NO: 596952 - DNA, 55 bp, Artificial; identical to SEQ ID NO: 443151
  Synthetic oligonucleotide

SEQ ID NO: 596953 - DNA, 59 bp, Artificial; identical to SEQ ID NO: 443153
  Synthetic oligonucleotide

SEQ ID NO: 596954 - DNA, 56 bp, Artificial; identical to SEQ ID NO: 443154
  Synthetic oligonucleotide

SEQ ID NO: 596955 - DNA, 55 bp, Artificial; identical to SEQ ID NO: 443155
  Synthetic oligonucleotide

SEQ ID NO: 596956 - DNA, 59 bp, Artificial; identical to SEQ ID NO: 443159
  Synthetic oligonucleotide

SEQ ID NO: 596957 - DNA, 60 bp, Artificial; identical to SEQ ID NO: 13910
  Synthetic oligonucleotide

SEQ ID NO: 596958 - DNA, 55 bp, Artificial; identical to SEQ ID NO: 443161
  Synthetic oligonucleotide

SEQ ID NO: 596959 - DNA, 56 bp, Artificial; identical to SEQ ID NO: 443162
  Synthetic oligonucleotide

SEQ ID NO: 596960 - DNA, 60 bp, Artificial; identical to SEQ ID NO: 443163
  Synthetic oligonucleotide

SEQ ID NO: 596961 - DNA, 55 bp, Artificial; identical to SEQ ID NO: 443164
  Synthetic oligonucleotide

SEQ ID NO: 596962 - DNA, 60 bp, Artificial; identical to SEQ ID NO: 443170
  Synthetic oligonucleotide

SEQ ID NO: 596963 - DNA, 53 bp, Artificial; identical to SEQ ID NO: 443171
  Synthetic oligonucleotide

SEQ ID NO: 596964 - DNA, 60 bp, Artificial; identical to SEQ ID NO: 443172
  Synthetic oligonucleotide

SEQ ID NO: 596965 - DNA, 54 bp, Artificial; identical to SEQ ID NO: 443176
  Synthetic oligonucleotide

SEQ ID NO: 596966 - DNA, 49 bp, Artificial; identical to SEQ ID NO: 443178
  Synthetic oligonucleotide

SEQ ID NO: 596967 - DNA, 56 bp, Artificial; identical to SEQ ID NO: 443181
  Synthetic oligonucleotide

SEQ ID NO: 596968 - DNA, 53 bp, Artificial; identical to SEQ ID NO: 443182
  Synthetic oligonucleotide

SEQ ID NO: 596969 - DNA, 55 bp, Artificial; identical to SEQ ID NO: 443185
  Synthetic oligonucleotide

SEQ ID NO: 596970 - DNA, 57 bp, Artificial; identical to SEQ ID NO: 443186
  Synthetic oligonucleotide

SEQ ID NO: 596971 - DNA, 55 bp, Artificial; identical to SEQ ID NO: 443187
  Synthetic oligonucleotide

SEQ ID NO: 596972 - DNA, 57 bp, Artificial; identical to SEQ ID NO: 443189
  Synthetic oligonucleotide

SEQ ID NO: 596973 - DNA, 58 bp, Artificial; identical to SEQ ID NO: 443191
  Synthetic oligonucleotide

SEQ ID NO: 596974 - DNA, 57 bp, Artificial; identical to SEQ ID NO: 19050
  Synthetic oligonucleotide

SEQ ID NO: 596975 - DNA, 60 bp, Artificial; identical to SEQ ID NO: 443192
  Synthetic oligonucleotide

SEQ ID NO: 596976 - DNA, 60 bp, Artificial; identical to SEQ ID NO: 443193
  Synthetic oligonucleotide

SEQ ID NO: 596977 - DNA, 57 bp, Artificial; identical to SEQ ID NO: 443195
  Synthetic oligonucleotide

SEQ ID NO: 596978 - DNA, 57 bp, Artificial; identical to SEQ ID NO: 443199
  Synthetic oligonucleotide

SEQ ID NO: 596979 - DNA, 58 bp, Artificial; identical to SEQ ID NO: 443201
  Synthetic oligonucleotide

SEQ ID NO: 596980 - DNA, 58 bp, Artificial; identical to SEQ ID NO: 443202
  Synthetic oligonucleotide

SEQ ID NO: 596981 - DNA, 57 bp, Artificial; identical to SEQ ID NO: 443203
  Synthetic oligonucleotide

SEQ ID NO: 596982 - DNA, 60 bp, Artificial; identical to SEQ ID NO: 13588
  Synthetic oligonucleotide

SEQ ID NO: 596983 - DNA, 55 bp, Artificial; identical to SEQ ID NO: 443207
  Synthetic oligonucleotide

SEQ ID NO: 596984 - DNA, 55 bp, Artificial; identical to SEQ ID NO: 443209
  Synthetic oligonucleotide

SEQ ID NO: 596985 - DNA, 54 bp, Artificial; identical to SEQ ID NO: 443210
  Synthetic oligonucleotide

SEQ ID NO: 596986 - DNA, 58 bp, Artificial; identical to SEQ ID NO: 443211
  Synthetic oligonucleotide

SEQ ID NO: 596987 - DNA, 54 bp, Artificial; identical to SEQ ID NO: 443214
  Synthetic oligonucleotide

SEQ ID NO: 596988 - DNA, 52 bp, Artificial; identical to SEQ ID NO: 443216
  Synthetic oligonucleotide

SEQ ID NO: 596989 - DNA, 54 bp, Artificial; identical to SEQ ID NO: 443217
  Synthetic oligonucleotide

SEQ ID NO: 596990 - DNA, 57 bp, Artificial; identical to SEQ ID NO: 443220
  Synthetic oligonucleotide

SEQ ID NO: 596991 - DNA, 60 bp, Artificial; identical to SEQ ID NO: 443221
  Synthetic oligonucleotide

SEQ ID NO: 596992 - DNA, 57 bp, Artificial; identical to SEQ ID NO: 443222
  Synthetic oligonucleotide

SEQ ID NO: 596993 - DNA, 52 bp, Artificial; identical to SEQ ID NO: 443228
  Synthetic oligonucleotide

SEQ ID NO: 596994 - DNA, 55 bp, Artificial; identical to SEQ ID NO: 443230
  Synthetic oligonucleotide

SEQ ID NO: 596995 - DNA, 57 bp, Artificial; identical to SEQ ID NO: 443231
  Synthetic oligonucleotide

SEQ ID NO: 596996 - DNA, 52 bp, Artificial; identical to SEQ ID NO: 443232
  Synthetic oligonucleotide

SEQ ID NO: 596997 - DNA, 60 bp, Artificial; identical to SEQ ID NO: 443235
  Synthetic oligonucleotide

SEQ ID NO: 596998 - DNA, 53 bp, Artificial; identical to SEQ ID NO: 443238
  Synthetic oligonucleotide

SEQ ID NO: 596999 - DNA, 55 bp, Artificial; identical to SEQ ID NO: 443242
  Synthetic oligonucleotide

SEQ ID NO: 597000 - DNA, 55 bp, Artificial; identical to SEQ ID NO: 443249
  Synthetic oligonucleotide

SEQ ID NO: 597001 - DNA, 50 bp, Artificial; identical to SEQ ID NO: 443250
  Synthetic oligonucleotide

SEQ ID NO: 597002 - DNA, 56 bp, Artificial; identical to SEQ ID NO: 443251
  Synthetic oligonucleotide

SEQ ID NO: 597003 - DNA, 53 bp, Artificial; identical to SEQ ID NO: 443252
  Synthetic oligonucleotide

SEQ ID NO: 597004 - DNA, 55 bp, Artificial; identical to SEQ ID NO: 443254
  Synthetic oligonucleotide

SEQ ID NO: 597005 - DNA, 55 bp, Artificial; identical to SEQ ID NO: 443255
  Synthetic oligonucleotide

SEQ ID NO: 597006 - DNA, 58 bp, Artificial; identical to SEQ ID NO: 443257
  Synthetic oligonucleotide

SEQ ID NO: 597007 - DNA, 52 bp, Artificial; identical to SEQ ID NO: 443258
  Synthetic oligonucleotide

SEQ ID NO: 597008 - DNA, 51 bp, Artificial; identical to SEQ ID NO: 443263
  Synthetic oligonucleotide

SEQ ID NO: 597009 - DNA, 60 bp, Artificial; identical to SEQ ID NO: 443266
  Synthetic oligonucleotide

SEQ ID NO: 597010 - DNA, 59 bp, Artificial; identical to SEQ ID NO: 443268
  Synthetic oligonucleotide

SEQ ID NO: 597011 - DNA, 53 bp, Artificial; identical to SEQ ID NO: 443270
  Synthetic oligonucleotide

SEQ ID NO: 597012 - DNA, 54 bp, Artificial; identical to SEQ ID NO: 443271
  Synthetic oligonucleotide

SEQ ID NO: 597013 - DNA, 55 bp, Artificial; identical to SEQ ID NO: 443272
  Synthetic oligonucleotide

SEQ ID NO: 597014 - DNA, 56 bp, Artificial; identical to SEQ ID NO: 443274
  Synthetic oligonucleotide

SEQ ID NO: 597015 - DNA, 60 bp, Artificial; identical to SEQ ID NO: 6414
  Synthetic oligonucleotide

SEQ ID NO: 597016 - DNA, 58 bp, Artificial; identical to SEQ ID NO: 12038
  Synthetic oligonucleotide

SEQ ID NO: 597017 - DNA, 58 bp, Artificial; identical to SEQ ID NO: 443289
  Synthetic oligonucleotide

SEQ ID NO: 597018 - DNA, 56 bp, Artificial; identical to SEQ ID NO: 19544
  Synthetic oligonucleotide

SEQ ID NO: 597019 - DNA, 60 bp, Artificial; identical to SEQ ID NO: 443297
  Synthetic oligonucleotide

SEQ ID NO: 597020 - DNA, 49 bp, Artificial; identical to SEQ ID NO: 443300
  Synthetic oligonucleotide

SEQ ID NO: 597021 - DNA, 59 bp, Artificial; identical to SEQ ID NO: 443302
  Synthetic oligonucleotide

SEQ ID NO: 597022 - DNA, 53 bp, Artificial; identical to SEQ ID NO: 443306
  Synthetic oligonucleotide

SEQ ID NO: 597023 - DNA, 60 bp, Artificial; identical to SEQ ID NO: 443307
  Synthetic oligonucleotide

SEQ ID NO: 597024 - DNA, 55 bp, Artificial; identical to SEQ ID NO: 443308
  Synthetic oligonucleotide

SEQ ID NO: 597025 - DNA, 59 bp, Artificial; identical to SEQ ID NO: 443314
  Synthetic oligonucleotide

SEQ ID NO: 597026 - DNA, 60 bp, Artificial; identical to SEQ ID NO: 443317
  Synthetic oligonucleotide

SEQ ID NO: 597027 - DNA, 53 bp, Artificial; identical to SEQ ID NO: 443320
  Synthetic oligonucleotide

SEQ ID NO: 597028 - DNA, 60 bp, Artificial; identical to SEQ ID NO: 443321
  Synthetic oligonucleotide

SEQ ID NO: 597029 - DNA, 60 bp, Artificial; identical to SEQ ID NO: 7823
  Synthetic oligonucleotide

SEQ ID NO: 597030 - DNA, 55 bp, Artificial; identical to SEQ ID NO: 443325
  Synthetic oligonucleotide

SEQ ID NO: 597031 - DNA, 55 bp, Artificial; identical to SEQ ID NO: 443326
  Synthetic oligonucleotide

SEQ ID NO: 597032 - DNA, 54 bp, Artificial; identical to SEQ ID NO: 443328
  Synthetic oligonucleotide

SEQ ID NO: 597033 - DNA, 54 bp, Artificial; identical to SEQ ID NO: 443331
  Synthetic oligonucleotide

SEQ ID NO: 597034 - DNA, 53 bp, Artificial; identical to SEQ ID NO: 443333
  Synthetic oligonucleotide

SEQ ID NO: 597035 - DNA, 55 bp, Artificial; identical to SEQ ID NO: 443341
  Synthetic oligonucleotide

SEQ ID NO: 597036 - DNA, 50 bp, Artificial; identical to SEQ ID NO: 443343
  Synthetic oligonucleotide

SEQ ID NO: 597037 - DNA, 58 bp, Artificial; identical to SEQ ID NO: 443351
  Synthetic oligonucleotide

SEQ ID NO: 597038 - DNA, 56 bp, Artificial; identical to SEQ ID NO: 443352
  Synthetic oligonucleotide

SEQ ID NO: 597039 - DNA, 60 bp, Artificial; identical to SEQ ID NO: 13321
  Synthetic oligonucleotide

SEQ ID NO: 597040 - DNA, 53 bp, Artificial; identical to SEQ ID NO: 18236
  Synthetic oligonucleotide

SEQ ID NO: 597041 - DNA, 58 bp, Artificial; identical to SEQ ID NO: 443354
  Synthetic oligonucleotide

SEQ ID NO: 597042 - DNA, 55 bp, Artificial; identical to SEQ ID NO: 443357
  Synthetic oligonucleotide

SEQ ID NO: 597043 - DNA, 54 bp, Artificial; identical to SEQ ID NO: 443358
  Synthetic oligonucleotide

SEQ ID NO: 597044 - DNA, 60 bp, Artificial; identical to SEQ ID NO: 7288
  Synthetic oligonucleotide

SEQ ID NO: 597045 - DNA, 55 bp, Artificial; identical to SEQ ID NO: 443360
  Synthetic oligonucleotide

SEQ ID NO: 597046 - DNA, 50 bp, Artificial; identical to SEQ ID NO: 443361
  Synthetic oligonucleotide

SEQ ID NO: 597047 - DNA, 55 bp, Artificial; identical to SEQ ID NO: 443363
  Synthetic oligonucleotide

SEQ ID NO: 597048 - DNA, 60 bp, Artificial; identical to SEQ ID NO: 15142
  Synthetic oligonucleotide

SEQ ID NO: 597049 - DNA, 55 bp, Artificial; identical to SEQ ID NO: 443371
  Synthetic oligonucleotide

SEQ ID NO: 597050 - DNA, 50 bp, Artificial; identical to SEQ ID NO: 443378
  Synthetic oligonucleotide

SEQ ID NO: 597051 - DNA, 60 bp, Artificial; identical to SEQ ID NO: 443381
  Synthetic oligonucleotide

SEQ ID NO: 597052 - DNA, 55 bp, Artificial; identical to SEQ ID NO: 443382
  Synthetic oligonucleotide

SEQ ID NO: 597053 - DNA, 60 bp, Artificial; identical to SEQ ID NO: 8981
  Synthetic oligonucleotide

SEQ ID NO: 597054 - DNA, 60 bp, Artificial; identical to SEQ ID NO: 443388
  Synthetic oligonucleotide

SEQ ID NO: 597055 - DNA, 55 bp, Artificial; identical to SEQ ID NO: 443389
  Synthetic oligonucleotide

SEQ ID NO: 597056 - DNA, 55 bp, Artificial; identical to SEQ ID NO: 443390
  Synthetic oligonucleotide

SEQ ID NO: 597057 - DNA, 59 bp, Artificial; identical to SEQ ID NO: 443392
  Synthetic oligonucleotide

SEQ ID NO: 597058 - DNA, 55 bp, Artificial; identical to SEQ ID NO: 443393
  Synthetic oligonucleotide

SEQ ID NO: 597059 - DNA, 56 bp, Artificial; identical to SEQ ID NO: 443394
  Synthetic oligonucleotide

SEQ ID NO: 597060 - DNA, 60 bp, Artificial; identical to SEQ ID NO: 443399
  Synthetic oligonucleotide

SEQ ID NO: 597061 - DNA, 60 bp, Artificial; identical to SEQ ID NO: 443402
  Synthetic oligonucleotide

SEQ ID NO: 597062 - DNA, 60 bp, Artificial; identical to SEQ ID NO: 443406
  Synthetic oligonucleotide

SEQ ID NO: 597063 - DNA, 55 bp, Artificial; identical to SEQ ID NO: 443408
  Synthetic oligonucleotide

SEQ ID NO: 597064 - DNA, 52 bp, Artificial; identical to SEQ ID NO: 443409
  Synthetic oligonucleotide

SEQ ID NO: 597065 - DNA, 55 bp, Artificial; identical to SEQ ID NO: 16575
  Synthetic oligonucleotide

SEQ ID NO: 597066 - DNA, 55 bp, Artificial; identical to SEQ ID NO: 443410
  Synthetic oligonucleotide

SEQ ID NO: 597067 - DNA, 57 bp, Artificial; identical to SEQ ID NO: 443412
  Synthetic oligonucleotide

SEQ ID NO: 597068 - DNA, 57 bp, Artificial; identical to SEQ ID NO: 443415
  Synthetic oligonucleotide

SEQ ID NO: 597069 - DNA, 60 bp, Artificial; identical to SEQ ID NO: 443416
  Synthetic oligonucleotide

SEQ ID NO: 597070 - DNA, 56 bp, Artificial; identical to SEQ ID NO: 443418
  Synthetic oligonucleotide

SEQ ID NO: 597071 - DNA, 57 bp, Artificial; identical to SEQ ID NO: 443422
  Synthetic oligonucleotide

SEQ ID NO: 597072 - DNA, 54 bp, Artificial; identical to SEQ ID NO: 443423
  Synthetic oligonucleotide

SEQ ID NO: 597073 - DNA, 53 bp, Artificial; identical to SEQ ID NO: 443424
  Synthetic oligonucleotide

SEQ ID NO: 597074 - DNA, 55 bp, Artificial; identical to SEQ ID NO: 443425
  Synthetic oligonucleotide

SEQ ID NO: 597075 - DNA, 57 bp, Artificial; identical to SEQ ID NO: 443429
  Synthetic oligonucleotide

SEQ ID NO: 597076 - DNA, 51 bp, Artificial; identical to SEQ ID NO: 443430
  Synthetic oligonucleotide

SEQ ID NO: 597077 - DNA, 55 bp, Artificial; identical to SEQ ID NO: 443432
  Synthetic oligonucleotide

SEQ ID NO: 597078 - DNA, 60 bp, Artificial; identical to SEQ ID NO: 8623
  Synthetic oligonucleotide

SEQ ID NO: 597079 - DNA, 55 bp, Artificial; identical to SEQ ID NO: 443434
  Synthetic oligonucleotide

SEQ ID NO: 597080 - DNA, 58 bp, Artificial; identical to SEQ ID NO: 443436
  Synthetic oligonucleotide

SEQ ID NO: 597081 - DNA, 51 bp, Artificial; identical to SEQ ID NO: 443438
  Synthetic oligonucleotide

SEQ ID NO: 597082 - DNA, 55 bp, Artificial; identical to SEQ ID NO: 443441
  Synthetic oligonucleotide

SEQ ID NO: 597083 - DNA, 55 bp, Artificial; identical to SEQ ID NO: 443443
  Synthetic oligonucleotide

SEQ ID NO: 597084 - DNA, 58 bp, Artificial; identical to SEQ ID NO: 443446
  Synthetic oligonucleotide

SEQ ID NO: 597085 - DNA, 56 bp, Artificial; identical to SEQ ID NO: 18162
  Synthetic oligonucleotide

SEQ ID NO: 597086 - DNA, 55 bp, Artificial; identical to SEQ ID NO: 443461
  Synthetic oligonucleotide

SEQ ID NO: 597087 - DNA, 53 bp, Artificial; identical to SEQ ID NO: 443465
  Synthetic oligonucleotide

SEQ ID NO: 597088 - DNA, 56 bp, Artificial; identical to SEQ ID NO: 443467
  Synthetic oligonucleotide

SEQ ID NO: 597089 - DNA, 52 bp, Artificial; identical to SEQ ID NO: 443468
  Synthetic oligonucleotide

SEQ ID NO: 597090 - DNA, 50 bp, Artificial; identical to SEQ ID NO: 443469
  Synthetic oligonucleotide

SEQ ID NO: 597091 - DNA, 54 bp, Artificial; identical to SEQ ID NO: 443471
  Synthetic oligonucleotide

SEQ ID NO: 597092 - DNA, 60 bp, Artificial; identical to SEQ ID NO: 443475
  Synthetic oligonucleotide

SEQ ID NO: 597093 - DNA, 57 bp, Artificial; identical to SEQ ID NO: 443477
  Synthetic oligonucleotide

SEQ ID NO: 597094 - DNA, 58 bp, Artificial; identical to SEQ ID NO: 443479
  Synthetic oligonucleotide

SEQ ID NO: 597095 - DNA, 53 bp, Artificial; identical to SEQ ID NO: 443482
  Synthetic oligonucleotide

SEQ ID NO: 597096 - DNA, 60 bp, Artificial; identical to SEQ ID NO: 443484
  Synthetic oligonucleotide

SEQ ID NO: 597097 - DNA, 53 bp, Artificial; identical to SEQ ID NO: 443488
  Synthetic oligonucleotide

SEQ ID NO: 597098 - DNA, 58 bp, Artificial; identical to SEQ ID NO: 443491
  Synthetic oligonucleotide

SEQ ID NO: 597099 - DNA, 55 bp, Artificial; identical to SEQ ID NO: 443492
  Synthetic oligonucleotide

SEQ ID NO: 597100 - DNA, 60 bp, Artificial; identical to SEQ ID NO: 443493
  Synthetic oligonucleotide

SEQ ID NO: 597101 - DNA, 60 bp, Artificial; identical to SEQ ID NO: 443496
  Synthetic oligonucleotide

SEQ ID NO: 597102 - DNA, 57 bp, Artificial; identical to SEQ ID NO: 443498
  Synthetic oligonucleotide

SEQ ID NO: 597103 - DNA, 59 bp, Artificial; identical to SEQ ID NO: 443499
  Synthetic oligonucleotide

SEQ ID NO: 597104 - DNA, 55 bp, Artificial; identical to SEQ ID NO: 443507
  Synthetic oligonucleotide

SEQ ID NO: 597105 - DNA, 55 bp, Artificial; identical to SEQ ID NO: 443515
  Synthetic oligonucleotide

SEQ ID NO: 597106 - DNA, 53 bp, Artificial; identical to SEQ ID NO: 443516
  Synthetic oligonucleotide

SEQ ID NO: 597107 - DNA, 60 bp, Artificial; identical to SEQ ID NO: 443517
  Synthetic oligonucleotide

SEQ ID NO: 597108 - DNA, 60 bp, Artificial; identical to SEQ ID NO: 443518
  Synthetic oligonucleotide

SEQ ID NO: 597109 - DNA, 60 bp, Artificial; identical to SEQ ID NO: 443521
  Synthetic oligonucleotide

SEQ ID NO: 597110 - DNA, 57 bp, Artificial; identical to SEQ ID NO: 443522
  Synthetic oligonucleotide

SEQ ID NO: 597111 - DNA, 60 bp, Artificial; identical to SEQ ID NO: 443526
  Synthetic oligonucleotide

SEQ ID NO: 597112 - DNA, 54 bp, Artificial; identical to SEQ ID NO: 443528
  Synthetic oligonucleotide

SEQ ID NO: 597113 - DNA, 51 bp, Artificial; identical to SEQ ID NO: 443529
  Synthetic oligonucleotide

SEQ ID NO: 597114 - DNA, 60 bp, Artificial; identical to SEQ ID NO: 443530
  Synthetic oligonucleotide

SEQ ID NO: 597115 - DNA, 54 bp, Artificial; identical to SEQ ID NO: 443531
  Synthetic oligonucleotide

SEQ ID NO: 597116 - DNA, 55 bp, Artificial; identical to SEQ ID NO: 443532
  Synthetic oligonucleotide

SEQ ID NO: 597117 - DNA, 52 bp, Artificial; identical to SEQ ID NO: 443533
  Synthetic oligonucleotide

SEQ ID NO: 597118 - DNA, 53 bp, Artificial; identical to SEQ ID NO: 443537
  Synthetic oligonucleotide

SEQ ID NO: 597119 - DNA, 55 bp, Artificial; identical to SEQ ID NO: 443538
  Synthetic oligonucleotide

SEQ ID NO: 597120 - DNA, 55 bp, Artificial; identical to SEQ ID NO: 443541
  Synthetic oligonucleotide

SEQ ID NO: 597121 - DNA, 59 bp, Artificial; identical to SEQ ID NO: 443545
  Synthetic oligonucleotide

SEQ ID NO: 597122 - DNA, 55 bp, Artificial; identical to SEQ ID NO: 443549
  Synthetic oligonucleotide

SEQ ID NO: 597123 - DNA, 53 bp, Artificial; identical to SEQ ID NO: 443551
  Synthetic oligonucleotide

SEQ ID NO: 597124 - DNA, 60 bp, Artificial; identical to SEQ ID NO: 443552
  Synthetic oligonucleotide

SEQ ID NO: 597125 - DNA, 53 bp, Artificial; identical to SEQ ID NO: 443553
  Synthetic oligonucleotide

SEQ ID NO: 597126 - DNA, 60 bp, Artificial; identical to SEQ ID NO: 443555
  Synthetic oligonucleotide

SEQ ID NO: 597127 - DNA, 55 bp, Artificial; identical to SEQ ID NO: 443557
  Synthetic oligonucleotide

SEQ ID NO: 597128 - DNA, 60 bp, Artificial; identical to SEQ ID NO: 443560
  Synthetic oligonucleotide

SEQ ID NO: 597129 - DNA, 55 bp, Artificial; identical to SEQ ID NO: 443562
  Synthetic oligonucleotide

SEQ ID NO: 597130 - DNA, 60 bp, Artificial; identical to SEQ ID NO: 443564
  Synthetic oligonucleotide

SEQ ID NO: 597131 - DNA, 60 bp, Artificial; identical to SEQ ID NO: 443565
  Synthetic oligonucleotide

SEQ ID NO: 597132 - DNA, 55 bp, Artificial; identical to SEQ ID NO: 443566
  Synthetic oligonucleotide

SEQ ID NO: 597133 - DNA, 60 bp, Artificial; identical to SEQ ID NO: 443567
  Synthetic oligonucleotide

SEQ ID NO: 597134 - DNA, 55 bp, Artificial; identical to SEQ ID NO: 443570
  Synthetic oligonucleotide

SEQ ID NO: 597135 - DNA, 57 bp, Artificial; identical to SEQ ID NO: 443571
  Synthetic oligonucleotide

SEQ ID NO: 597136 - DNA, 60 bp, Artificial; identical to SEQ ID NO: 443572
  Synthetic oligonucleotide

SEQ ID NO: 597137 - DNA, 60 bp, Artificial; identical to SEQ ID NO: 443573
  Synthetic oligonucleotide

SEQ ID NO: 597138 - DNA, 55 bp, Artificial; identical to SEQ ID NO: 443574
  Synthetic oligonucleotide

SEQ ID NO: 597139 - DNA, 60 bp, Artificial; identical to SEQ ID NO: 443580
  Synthetic oligonucleotide

SEQ ID NO: 597140 - DNA, 54 bp, Artificial; identical to SEQ ID NO: 443585
  Synthetic oligonucleotide

SEQ ID NO: 597141 - DNA, 53 bp, Artificial; identical to SEQ ID NO: 443587
  Synthetic oligonucleotide

SEQ ID NO: 597142 - DNA, 55 bp, Artificial; identical to SEQ ID NO: 19926
  Synthetic oligonucleotide

SEQ ID NO: 597143 - DNA, 56 bp, Artificial; identical to SEQ ID NO: 443590
  Synthetic oligonucleotide

SEQ ID NO: 597144 - DNA, 57 bp, Artificial; identical to SEQ ID NO: 19479
  Synthetic oligonucleotide

SEQ ID NO: 597145 - DNA, 55 bp, Artificial; identical to SEQ ID NO: 443605
  Synthetic oligonucleotide

SEQ ID NO: 597146 - DNA, 54 bp, Artificial; identical to SEQ ID NO: 443609
  Synthetic oligonucleotide

SEQ ID NO: 597147 - DNA, 54 bp, Artificial; identical to SEQ ID NO: 443611
  Synthetic oligonucleotide

SEQ ID NO: 597148 - DNA, 60 bp, Artificial; identical to SEQ ID NO: 443612
  Synthetic oligonucleotide

SEQ ID NO: 597149 - DNA, 56 bp, Artificial; identical to SEQ ID NO: 443613
  Synthetic oligonucleotide

SEQ ID NO: 597150 - DNA, 55 bp, Artificial; identical to SEQ ID NO: 443616
  Synthetic oligonucleotide

SEQ ID NO: 597151 - DNA, 55 bp, Artificial; identical to SEQ ID NO: 443617
  Synthetic oligonucleotide

SEQ ID NO: 597152 - DNA, 58 bp, Artificial; identical to SEQ ID NO: 443619
  Synthetic oligonucleotide

SEQ ID NO: 597153 - DNA, 58 bp, Artificial; identical to SEQ ID NO: 443620
  Synthetic oligonucleotide

SEQ ID NO: 597154 - DNA, 57 bp, Artificial; identical to SEQ ID NO: 443622
  Synthetic oligonucleotide

SEQ ID NO: 597155 - DNA, 59 bp, Artificial; identical to SEQ ID NO: 443624
  Synthetic oligonucleotide

SEQ ID NO: 597156 - DNA, 60 bp, Artificial; identical to SEQ ID NO: 443629
  Synthetic oligonucleotide

SEQ ID NO: 597157 - DNA, 57 bp, Artificial; identical to SEQ ID NO: 443631
  Synthetic oligonucleotide

SEQ ID NO: 597158 - DNA, 60 bp, Artificial; identical to SEQ ID NO: 7940
  Synthetic oligonucleotide

SEQ ID NO: 597159 - DNA, 60 bp, Artificial; identical to SEQ ID NO: 15432
  Synthetic oligonucleotide

SEQ ID NO: 597160 - DNA, 50 bp, Artificial; identical to SEQ ID NO: 443640
  Synthetic oligonucleotide

SEQ ID NO: 597161 - DNA, 51 bp, Artificial; identical to SEQ ID NO: 443642
  Synthetic oligonucleotide

SEQ ID NO: 597162 - DNA, 59 bp, Artificial; identical to SEQ ID NO: 443644
  Synthetic oligonucleotide

SEQ ID NO: 597163 - DNA, 50 bp, Artificial; identical to SEQ ID NO: 443648
  Synthetic oligonucleotide

SEQ ID NO: 597164 - DNA, 53 bp, Artificial; identical to SEQ ID NO: 443656
  Synthetic oligonucleotide

SEQ ID NO: 597165 - DNA, 57 bp, Artificial; identical to SEQ ID NO: 443658
  Synthetic oligonucleotide

SEQ ID NO: 597166 - DNA, 55 bp, Artificial; identical to SEQ ID NO: 11051
  Synthetic oligonucleotide

SEQ ID NO: 597167 - DNA, 55 bp, Artificial; identical to SEQ ID NO: 443662
  Synthetic oligonucleotide

SEQ ID NO: 597168 - DNA, 54 bp, Artificial; identical to SEQ ID NO: 443664
  Synthetic oligonucleotide

SEQ ID NO: 597169 - DNA, 55 bp, Artificial; identical to SEQ ID NO: 443665
  Synthetic oligonucleotide

SEQ ID NO: 597170 - DNA, 54 bp, Artificial; identical to SEQ ID NO: 13419
  Synthetic oligonucleotide

SEQ ID NO: 597171 - DNA, 55 bp, Artificial; identical to SEQ ID NO: 443669
  Synthetic oligonucleotide

SEQ ID NO: 597172 - DNA, 54 bp, Artificial; identical to SEQ ID NO: 443670
  Synthetic oligonucleotide

SEQ ID NO: 597173 - DNA, 60 bp, Artificial; identical to SEQ ID NO: 443672
  Synthetic oligonucleotide

SEQ ID NO: 597174 - DNA, 55 bp, Artificial; identical to SEQ ID NO: 443679
  Synthetic oligonucleotide

SEQ ID NO: 597175 - DNA, 56 bp, Artificial; identical to SEQ ID NO: 443681
  Synthetic oligonucleotide

SEQ ID NO: 597176 - DNA, 59 bp, Artificial; identical to SEQ ID NO: 443682
  Synthetic oligonucleotide

SEQ ID NO: 597177 - DNA, 60 bp, Artificial; identical to SEQ ID NO: 443683
  Synthetic oligonucleotide

SEQ ID NO: 597178 - DNA, 55 bp, Artificial; identical to SEQ ID NO: 443686
  Synthetic oligonucleotide

SEQ ID NO: 597179 - DNA, 56 bp, Artificial; identical to SEQ ID NO: 443690
  Synthetic oligonucleotide

SEQ ID NO: 597180 - DNA, 55 bp, Artificial; identical to SEQ ID NO: 443692
  Synthetic oligonucleotide

SEQ ID NO: 597181 - DNA, 55 bp, Artificial; identical to SEQ ID NO: 443695
  Synthetic oligonucleotide

SEQ ID NO: 597182 - DNA, 57 bp, Artificial; identical to SEQ ID NO: 443697
  Synthetic oligonucleotide

SEQ ID NO: 597183 - DNA, 50 bp, Artificial; identical to SEQ ID NO: 443699
  Synthetic oligonucleotide

SEQ ID NO: 597184 - DNA, 53 bp, Artificial; identical to SEQ ID NO: 443701
  Synthetic oligonucleotide

SEQ ID NO: 597185 - DNA, 55 bp, Artificial; identical to SEQ ID NO: 443702
  Synthetic oligonucleotide

SEQ ID NO: 597186 - DNA, 60 bp, Artificial; identical to SEQ ID NO: 443703
  Synthetic oligonucleotide

SEQ ID NO: 597187 - DNA, 55 bp, Artificial; identical to SEQ ID NO: 443704
  Synthetic oligonucleotide

SEQ ID NO: 597188 - DNA, 60 bp, Artificial; identical to SEQ ID NO: 443705
  Synthetic oligonucleotide

SEQ ID NO: 597189 - DNA, 59 bp, Artificial; identical to SEQ ID NO: 443706
  Synthetic oligonucleotide

SEQ ID NO: 597190 - DNA, 53 bp, Artificial; identical to SEQ ID NO: 443707
  Synthetic oligonucleotide

SEQ ID NO: 597191 - DNA, 55 bp, Artificial; identical to SEQ ID NO: 443709
  Synthetic oligonucleotide

SEQ ID NO: 597192 - DNA, 58 bp, Artificial; identical to SEQ ID NO: 443710
  Synthetic oligonucleotide

SEQ ID NO: 597193 - DNA, 56 bp, Artificial; identical to SEQ ID NO: 443712
  Synthetic oligonucleotide

SEQ ID NO: 597194 - DNA, 55 bp, Artificial; identical to SEQ ID NO: 443714
  Synthetic oligonucleotide

SEQ ID NO: 597195 - DNA, 60 bp, Artificial; identical to SEQ ID NO: 443715
  Synthetic oligonucleotide

SEQ ID NO: 597196 - DNA, 60 bp, Artificial; identical to SEQ ID NO: 443719
  Synthetic oligonucleotide

SEQ ID NO: 597197 - DNA, 60 bp, Artificial; identical to SEQ ID NO: 443725
  Synthetic oligonucleotide

SEQ ID NO: 597198 - DNA, 53 bp, Artificial; identical to SEQ ID NO: 443738
  Synthetic oligonucleotide

SEQ ID NO: 597199 - DNA, 55 bp, Artificial; identical to SEQ ID NO: 443742
  Synthetic oligonucleotide

SEQ ID NO: 597200 - DNA, 60 bp, Artificial; identical to SEQ ID NO: 443745
  Synthetic oligonucleotide

SEQ ID NO: 597201 - DNA, 60 bp, Artificial; identical to SEQ ID NO: 443746
  Synthetic oligonucleotide

SEQ ID NO: 597202 - DNA, 57 bp, Artificial; identical to SEQ ID NO: 443747
  Synthetic oligonucleotide

SEQ ID NO: 597203 - DNA, 54 bp, Artificial; identical to SEQ ID NO: 443750
  Synthetic oligonucleotide

SEQ ID NO: 597204 - DNA, 58 bp, Artificial; identical to SEQ ID NO: 443751
  Synthetic oligonucleotide

SEQ ID NO: 597205 - DNA, 58 bp, Artificial; identical to SEQ ID NO: 443753
  Synthetic oligonucleotide

SEQ ID NO: 597206 - DNA, 57 bp, Artificial; identical to SEQ ID NO: 443755
  Synthetic oligonucleotide

SEQ ID NO: 597207 - DNA, 59 bp, Artificial; identical to SEQ ID NO: 443756
  Synthetic oligonucleotide

SEQ ID NO: 597208 - DNA, 56 bp, Artificial; identical to SEQ ID NO: 443759
  Synthetic oligonucleotide

SEQ ID NO: 597209 - DNA, 50 bp, Artificial; identical to SEQ ID NO: 443760
  Synthetic oligonucleotide

SEQ ID NO: 597210 - DNA, 57 bp, Artificial; identical to SEQ ID NO: 443763
  Synthetic oligonucleotide

SEQ ID NO: 597211 - DNA, 56 bp, Artificial; identical to SEQ ID NO: 443770
  Synthetic oligonucleotide

SEQ ID NO: 597212 - DNA, 56 bp, Artificial; identical to SEQ ID NO: 443771
  Synthetic oligonucleotide

SEQ ID NO: 597213 - DNA, 55 bp, Artificial; identical to SEQ ID NO: 443772
  Synthetic oligonucleotide

SEQ ID NO: 597214 - DNA, 57 bp, Artificial; identical to SEQ ID NO: 18809
  Synthetic oligonucleotide

SEQ ID NO: 597215 - DNA, 50 bp, Artificial; identical to SEQ ID NO: 443776
  Synthetic oligonucleotide

SEQ ID NO: 597216 - DNA, 59 bp, Artificial; identical to SEQ ID NO: 18761
  Synthetic oligonucleotide

SEQ ID NO: 597217 - DNA, 60 bp, Artificial; identical to SEQ ID NO: 443777
  Synthetic oligonucleotide

SEQ ID NO: 597218 - DNA, 57 bp, Artificial; identical to SEQ ID NO: 443778
  Synthetic oligonucleotide

SEQ ID NO: 597219 - DNA, 58 bp, Artificial; identical to SEQ ID NO: 20494
  Synthetic oligonucleotide

SEQ ID NO: 597220 - DNA, 55 bp, Artificial; identical to SEQ ID NO: 443783
  Synthetic oligonucleotide

SEQ ID NO: 597221 - DNA, 56 bp, Artificial; identical to SEQ ID NO: 443784
  Synthetic oligonucleotide

SEQ ID NO: 597222 - DNA, 55 bp, Artificial; identical to SEQ ID NO: 443786
  Synthetic oligonucleotide

SEQ ID NO: 597223 - DNA, 60 bp, Artificial; identical to SEQ ID NO: 443789
  Synthetic oligonucleotide

SEQ ID NO: 597224 - DNA, 54 bp, Artificial; identical to SEQ ID NO: 443791
  Synthetic oligonucleotide

SEQ ID NO: 597225 - DNA, 60 bp, Artificial; identical to SEQ ID NO: 443797
  Synthetic oligonucleotide

SEQ ID NO: 597226 - DNA, 60 bp, Artificial; identical to SEQ ID NO: 443798
  Synthetic oligonucleotide

SEQ ID NO: 597227 - DNA, 57 bp, Artificial; identical to SEQ ID NO: 19013
  Synthetic oligonucleotide

SEQ ID NO: 597228 - DNA, 56 bp, Artificial; identical to SEQ ID NO: 443802
  Synthetic oligonucleotide

SEQ ID NO: 597229 - DNA, 60 bp, Artificial; identical to SEQ ID NO: 443805
  Synthetic oligonucleotide

SEQ ID NO: 597230 - DNA, 53 bp, Artificial; identical to SEQ ID NO: 443807
  Synthetic oligonucleotide

SEQ ID NO: 597231 - DNA, 60 bp, Artificial; identical to SEQ ID NO: 443815
  Synthetic oligonucleotide

SEQ ID NO: 597232 - DNA, 56 bp, Artificial; identical to SEQ ID NO: 443817
  Synthetic oligonucleotide

SEQ ID NO: 597233 - DNA, 57 bp, Artificial; identical to SEQ ID NO: 443820
  Synthetic oligonucleotide

SEQ ID NO: 597234 - DNA, 55 bp, Artificial; identical to SEQ ID NO: 443826
  Synthetic oligonucleotide

SEQ ID NO: 597235 - DNA, 55 bp, Artificial; identical to SEQ ID NO: 443827
  Synthetic oligonucleotide

SEQ ID NO: 597236 - DNA, 55 bp, Artificial; identical to SEQ ID NO: 443830
  Synthetic oligonucleotide

SEQ ID NO: 597237 - DNA, 60 bp, Artificial; identical to SEQ ID NO: 443836
  Synthetic oligonucleotide

SEQ ID NO: 597238 - DNA, 57 bp, Artificial; identical to SEQ ID NO: 443838
  Synthetic oligonucleotide

SEQ ID NO: 597239 - DNA, 53 bp, Artificial; identical to SEQ ID NO: 443839
  Synthetic oligonucleotide

SEQ ID NO: 597240 - DNA, 54 bp, Artificial; identical to SEQ ID NO: 443840
  Synthetic oligonucleotide

SEQ ID NO: 597241 - DNA, 57 bp, Artificial; identical to SEQ ID NO: 443841
  Synthetic oligonucleotide

SEQ ID NO: 597242 - DNA, 60 bp, Artificial; identical to SEQ ID NO: 443843
  Synthetic oligonucleotide

SEQ ID NO: 597243 - DNA, 55 bp, Artificial; identical to SEQ ID NO: 443848
  Synthetic oligonucleotide

SEQ ID NO: 597244 - DNA, 55 bp, Artificial; identical to SEQ ID NO: 443850
  Synthetic oligonucleotide

SEQ ID NO: 597245 - DNA, 60 bp, Artificial; identical to SEQ ID NO: 443858
  Synthetic oligonucleotide

SEQ ID NO: 597246 - DNA, 56 bp, Artificial; identical to SEQ ID NO: 443863
  Synthetic oligonucleotide

SEQ ID NO: 597247 - DNA, 54 bp, Artificial; identical to SEQ ID NO: 443864
  Synthetic oligonucleotide

SEQ ID NO: 597248 - DNA, 59 bp, Artificial; identical to SEQ ID NO: 443865
  Synthetic oligonucleotide

SEQ ID NO: 597249 - DNA, 55 bp, Artificial; identical to SEQ ID NO: 443866
  Synthetic oligonucleotide

SEQ ID NO: 597250 - DNA, 54 bp, Artificial; identical to SEQ ID NO: 443868
  Synthetic oligonucleotide

SEQ ID NO: 597251 - DNA, 55 bp, Artificial; identical to SEQ ID NO: 443869
  Synthetic oligonucleotide

SEQ ID NO: 597252 - DNA, 60 bp, Artificial; identical to SEQ ID NO: 13248
  Synthetic oligonucleotide

SEQ ID NO: 597253 - DNA, 60 bp, Artificial; identical to SEQ ID NO: 443870
  Synthetic oligonucleotide

SEQ ID NO: 597254 - DNA, 58 bp, Artificial; identical to SEQ ID NO: 443872
  Synthetic oligonucleotide

SEQ ID NO: 597255 - DNA, 59 bp, Artificial; identical to SEQ ID NO: 443873
  Synthetic oligonucleotide

SEQ ID NO: 597256 - DNA, 52 bp, Artificial; identical to SEQ ID NO: 443874
  Synthetic oligonucleotide

SEQ ID NO: 597257 - DNA, 58 bp, Artificial; identical to SEQ ID NO: 443875
  Synthetic oligonucleotide

SEQ ID NO: 597258 - DNA, 55 bp, Artificial; identical to SEQ ID NO: 443876
  Synthetic oligonucleotide

SEQ ID NO: 597259 - DNA, 55 bp, Artificial; identical to SEQ ID NO: 443879
  Synthetic oligonucleotide

SEQ ID NO: 597260 - DNA, 55 bp, Artificial; identical to SEQ ID NO: 443881
  Synthetic oligonucleotide

SEQ ID NO: 597261 - DNA, 55 bp, Artificial; identical to SEQ ID NO: 443887
  Synthetic oligonucleotide

SEQ ID NO: 597262 - DNA, 54 bp, Artificial; identical to SEQ ID NO: 443891
  Synthetic oligonucleotide

SEQ ID NO: 597263 - DNA, 59 bp, Artificial; identical to SEQ ID NO: 443893
  Synthetic oligonucleotide

SEQ ID NO: 597264 - DNA, 54 bp, Artificial; identical to SEQ ID NO: 443895
  Synthetic oligonucleotide

SEQ ID NO: 597265 - DNA, 60 bp, Artificial; identical to SEQ ID NO: 443896
  Synthetic oligonucleotide

SEQ ID NO: 597266 - DNA, 60 bp, Artificial; identical to SEQ ID NO: 443900
  Synthetic oligonucleotide

SEQ ID NO: 597267 - DNA, 60 bp, Artificial; identical to SEQ ID NO: 443905
  Synthetic oligonucleotide

SEQ ID NO: 597268 - DNA, 59 bp, Artificial; identical to SEQ ID NO: 443906
  Synthetic oligonucleotide

SEQ ID NO: 597269 - DNA, 55 bp, Artificial; identical to SEQ ID NO: 443910
  Synthetic oligonucleotide

SEQ ID NO: 597270 - DNA, 60 bp, Artificial; identical to SEQ ID NO: 117220
  Synthetic oligonucleotide

SEQ ID NO: 597271 - DNA, 59 bp, Artificial; identical to SEQ ID NO: 443918
  Synthetic oligonucleotide

SEQ ID NO: 597272 - DNA, 51 bp, Artificial; identical to SEQ ID NO: 443920
  Synthetic oligonucleotide

SEQ ID NO: 597273 - DNA, 50 bp, Artificial; identical to SEQ ID NO: 443921
  Synthetic oligonucleotide

SEQ ID NO: 597274 - DNA, 55 bp, Artificial; identical to SEQ ID NO: 443925
  Synthetic oligonucleotide

SEQ ID NO: 597275 - DNA, 59 bp, Artificial; identical to SEQ ID NO: 443927
  Synthetic oligonucleotide

SEQ ID NO: 597276 - DNA, 55 bp, Artificial; identical to SEQ ID NO: 443928
  Synthetic oligonucleotide

SEQ ID NO: 597277 - DNA, 55 bp, Artificial; identical to SEQ ID NO: 443929
  Synthetic oligonucleotide

SEQ ID NO: 597278 - DNA, 58 bp, Artificial; identical to SEQ ID NO: 443930
  Synthetic oligonucleotide

SEQ ID NO: 597279 - DNA, 57 bp, Artificial; identical to SEQ ID NO: 443932
  Synthetic oligonucleotide

SEQ ID NO: 597280 - DNA, 59 bp, Artificial; identical to SEQ ID NO: 443934
  Synthetic oligonucleotide

SEQ ID NO: 597281 - DNA, 53 bp, Artificial; identical to SEQ ID NO: 443935
  Synthetic oligonucleotide

SEQ ID NO: 597282 - DNA, 56 bp, Artificial; identical to SEQ ID NO: 443936
  Synthetic oligonucleotide

SEQ ID NO: 597283 - DNA, 55 bp, Artificial; identical to SEQ ID NO: 443940
  Synthetic oligonucleotide

SEQ ID NO: 597284 - DNA, 55 bp, Artificial; identical to SEQ ID NO: 443942
  Synthetic oligonucleotide

SEQ ID NO: 597285 - DNA, 60 bp, Artificial; identical to SEQ ID NO: 443944
  Synthetic oligonucleotide

SEQ ID NO: 597286 - DNA, 52 bp, Artificial; identical to SEQ ID NO: 443946
  Synthetic oligonucleotide

SEQ ID NO: 597287 - DNA, 52 bp, Artificial; identical to SEQ ID NO: 443949
  Synthetic oligonucleotide

SEQ ID NO: 597288 - DNA, 59 bp, Artificial; identical to SEQ ID NO: 19512
  Synthetic oligonucleotide

SEQ ID NO: 597289 - DNA, 57 bp, Artificial; identical to SEQ ID NO: 443956
  Synthetic oligonucleotide

SEQ ID NO: 597290 - DNA, 60 bp, Artificial; identical to SEQ ID NO: 443959
  Synthetic oligonucleotide

SEQ ID NO: 597291 - DNA, 59 bp, Artificial; identical to SEQ ID NO: 443960
  Synthetic oligonucleotide

SEQ ID NO: 597292 - DNA, 53 bp, Artificial; identical to SEQ ID NO: 443965
  Synthetic oligonucleotide

SEQ ID NO: 597293 - DNA, 58 bp, Artificial; identical to SEQ ID NO: 443966
  Synthetic oligonucleotide

SEQ ID NO: 597294 - DNA, 60 bp, Artificial; identical to SEQ ID NO: 443969
  Synthetic oligonucleotide

SEQ ID NO: 597295 - DNA, 59 bp, Artificial; identical to SEQ ID NO: 443970
  Synthetic oligonucleotide

SEQ ID NO: 597296 - DNA, 56 bp, Artificial; identical to SEQ ID NO: 443971
  Synthetic oligonucleotide

SEQ ID NO: 597297 - DNA, 60 bp, Artificial; identical to SEQ ID NO: 443973
  Synthetic oligonucleotide

SEQ ID NO: 597298 - DNA, 55 bp, Artificial; identical to SEQ ID NO: 443974
  Synthetic oligonucleotide

SEQ ID NO: 597299 - DNA, 58 bp, Artificial; identical to SEQ ID NO: 443981
  Synthetic oligonucleotide

SEQ ID NO: 597300 - DNA, 60 bp, Artificial; identical to SEQ ID NO: 443982
  Synthetic oligonucleotide

SEQ ID NO: 597301 - DNA, 51 bp, Artificial; identical to SEQ ID NO: 443985
  Synthetic oligonucleotide

SEQ ID NO: 597302 - DNA, 54 bp, Artificial; identical to SEQ ID NO: 443987
  Synthetic oligonucleotide

SEQ ID NO: 597303 - DNA, 55 bp, Artificial; identical to SEQ ID NO: 443994
  Synthetic oligonucleotide

SEQ ID NO: 597304 - DNA, 57 bp, Artificial; identical to SEQ ID NO: 443998
  Synthetic oligonucleotide

SEQ ID NO: 597305 - DNA, 55 bp, Artificial; identical to SEQ ID NO: 443999
  Synthetic oligonucleotide

SEQ ID NO: 597306 - DNA, 55 bp, Artificial; identical to SEQ ID NO: 11971
  Synthetic oligonucleotide

SEQ ID NO: 597307 - DNA, 56 bp, Artificial; identical to SEQ ID NO: 444008
  Synthetic oligonucleotide

SEQ ID NO: 597308 - DNA, 55 bp, Artificial; identical to SEQ ID NO: 444011
  Synthetic oligonucleotide

SEQ ID NO: 597309 - DNA, 56 bp, Artificial; identical to SEQ ID NO: 444012
  Synthetic oligonucleotide

SEQ ID NO: 597310 - DNA, 50 bp, Artificial; identical to SEQ ID NO: 444015
  Synthetic oligonucleotide

SEQ ID NO: 597311 - DNA, 52 bp, Artificial; identical to SEQ ID NO: 444016
  Synthetic oligonucleotide

SEQ ID NO: 597312 - DNA, 54 bp, Artificial; identical to SEQ ID NO: 444018
  Synthetic oligonucleotide

SEQ ID NO: 597313 - DNA, 55 bp, Artificial; identical to SEQ ID NO: 444019
  Synthetic oligonucleotide

SEQ ID NO: 597314 - DNA, 60 bp, Artificial; identical to SEQ ID NO: 444021
  Synthetic oligonucleotide

SEQ ID NO: 597315 - DNA, 60 bp, Artificial; identical to SEQ ID NO: 444022
  Synthetic oligonucleotide

SEQ ID NO: 597316 - DNA, 54 bp, Artificial; identical to SEQ ID NO: 444023
  Synthetic oligonucleotide

SEQ ID NO: 597317 - DNA, 60 bp, Artificial; identical to SEQ ID NO: 444024
  Synthetic oligonucleotide

SEQ ID NO: 597318 - DNA, 52 bp, Artificial; identical to SEQ ID NO: 444029
  Synthetic oligonucleotide

SEQ ID NO: 597319 - DNA, 59 bp, Artificial; identical to SEQ ID NO: 444034
  Synthetic oligonucleotide

SEQ ID NO: 597320 - DNA, 50 bp, Artificial; identical to SEQ ID NO: 444035
  Synthetic oligonucleotide

SEQ ID NO: 597321 - DNA, 60 bp, Artificial; identical to SEQ ID NO: 444036
  Synthetic oligonucleotide

SEQ ID NO: 597322 - DNA, 60 bp, Artificial; identical to SEQ ID NO: 444037
  Synthetic oligonucleotide

SEQ ID NO: 597323 - DNA, 55 bp, Artificial; identical to SEQ ID NO: 444039
  Synthetic oligonucleotide

SEQ ID NO: 597324 - DNA, 60 bp, Artificial; identical to SEQ ID NO: 444041
  Synthetic oligonucleotide

SEQ ID NO: 597325 - DNA, 57 bp, Artificial; identical to SEQ ID NO: 16234
  Synthetic oligonucleotide

SEQ ID NO: 597326 - DNA, 60 bp, Artificial; identical to SEQ ID NO: 444046
  Synthetic oligonucleotide

SEQ ID NO: 597327 - DNA, 60 bp, Artificial; identical to SEQ ID NO: 444048
  Synthetic oligonucleotide

SEQ ID NO: 597328 - DNA, 55 bp, Artificial; identical to SEQ ID NO: 444049
  Synthetic oligonucleotide

SEQ ID NO: 597329 - DNA, 60 bp, Artificial; identical to SEQ ID NO: 444050
  Synthetic oligonucleotide

SEQ ID NO: 597330 - DNA, 55 bp, Artificial; identical to SEQ ID NO: 444052
  Synthetic oligonucleotide

SEQ ID NO: 597331 - DNA, 52 bp, Artificial; identical to SEQ ID NO: 444054
  Synthetic oligonucleotide

SEQ ID NO: 597332 - DNA, 51 bp, Artificial; identical to SEQ ID NO: 444055
  Synthetic oligonucleotide

SEQ ID NO: 597333 - DNA, 50 bp, Artificial; identical to SEQ ID NO: 12088
  Synthetic oligonucleotide

SEQ ID NO: 597334 - DNA, 55 bp, Artificial; identical to SEQ ID NO: 444056
  Synthetic oligonucleotide

SEQ ID NO: 597335 - DNA, 55 bp, Artificial; identical to SEQ ID NO: 444058
  Synthetic oligonucleotide

SEQ ID NO: 597336 - DNA, 56 bp, Artificial; identical to SEQ ID NO: 444060
  Synthetic oligonucleotide

SEQ ID NO: 597337 - DNA, 55 bp, Artificial; identical to SEQ ID NO: 444063
  Synthetic oligonucleotide

SEQ ID NO: 597338 - DNA, 55 bp, Artificial; identical to SEQ ID NO: 444065
  Synthetic oligonucleotide

SEQ ID NO: 597339 - DNA, 60 bp, Artificial; identical to SEQ ID NO: 444067
  Synthetic oligonucleotide

SEQ ID NO: 597340 - DNA, 60 bp, Artificial; identical to SEQ ID NO: 444070
  Synthetic oligonucleotide

SEQ ID NO: 597341 - DNA, 55 bp, Artificial; identical to SEQ ID NO: 444075
  Synthetic oligonucleotide

SEQ ID NO: 597342 - DNA, 60 bp, Artificial; identical to SEQ ID NO: 444078
  Synthetic oligonucleotide

SEQ ID NO: 597343 - DNA, 60 bp, Artificial; identical to SEQ ID NO: 444079
  Synthetic oligonucleotide

SEQ ID NO: 597344 - DNA, 53 bp, Artificial; identical to SEQ ID NO: 444083
  Synthetic oligonucleotide

SEQ ID NO: 597345 - DNA, 55 bp, Artificial; identical to SEQ ID NO: 444084
  Synthetic oligonucleotide

SEQ ID NO: 597346 - DNA, 58 bp, Artificial; identical to SEQ ID NO: 444086
  Synthetic oligonucleotide

SEQ ID NO: 597347 - DNA, 60 bp, Artificial; identical to SEQ ID NO: 444087
  Synthetic oligonucleotide

SEQ ID NO: 597348 - DNA, 60 bp, Artificial; identical to SEQ ID NO: 444088
  Synthetic oligonucleotide

SEQ ID NO: 597349 - DNA, 55 bp, Artificial; identical to SEQ ID NO: 444089
  Synthetic oligonucleotide

SEQ ID NO: 597350 - DNA, 54 bp, Artificial; identical to SEQ ID NO: 444090
  Synthetic oligonucleotide

SEQ ID NO: 597351 - DNA, 60 bp, Artificial; identical to SEQ ID NO: 444094
  Synthetic oligonucleotide

SEQ ID NO: 597352 - DNA, 50 bp, Artificial; identical to SEQ ID NO: 444099
  Synthetic oligonucleotide

SEQ ID NO: 597353 - DNA, 54 bp, Artificial; identical to SEQ ID NO: 444107
  Synthetic oligonucleotide

SEQ ID NO: 597354 - DNA, 55 bp, Artificial; identical to SEQ ID NO: 11469
  Synthetic oligonucleotide

SEQ ID NO: 597355 - DNA, 58 bp, Artificial; identical to SEQ ID NO: 444108
  Synthetic oligonucleotide

SEQ ID NO: 597356 - DNA, 60 bp, Artificial; identical to SEQ ID NO: 444109
  Synthetic oligonucleotide

SEQ ID NO: 597357 - DNA, 60 bp, Artificial; identical to SEQ ID NO: 444112
  Synthetic oligonucleotide

SEQ ID NO: 597358 - DNA, 59 bp, Artificial; identical to SEQ ID NO: 444114
  Synthetic oligonucleotide

SEQ ID NO: 597359 - DNA, 55 bp, Artificial; identical to SEQ ID NO: 444116
  Synthetic oligonucleotide

SEQ ID NO: 597360 - DNA, 60 bp, Artificial; identical to SEQ ID NO: 444118
  Synthetic oligonucleotide

SEQ ID NO: 597361 - DNA, 54 bp, Artificial; identical to SEQ ID NO: 444120
  Synthetic oligonucleotide

SEQ ID NO: 597362 - DNA, 60 bp, Artificial; identical to SEQ ID NO: 444125
  Synthetic oligonucleotide

SEQ ID NO: 597363 - DNA, 56 bp, Artificial; identical to SEQ ID NO: 444130
  Synthetic oligonucleotide

SEQ ID NO: 597364 - DNA, 55 bp, Artificial; identical to SEQ ID NO: 444133
  Synthetic oligonucleotide

SEQ ID NO: 597365 - DNA, 60 bp, Artificial; identical to SEQ ID NO: 444139
  Synthetic oligonucleotide

SEQ ID NO: 597366 - DNA, 60 bp, Artificial; identical to SEQ ID NO: 444140
  Synthetic oligonucleotide

SEQ ID NO: 597367 - DNA, 55 bp, Artificial; identical to SEQ ID NO: 444143
  Synthetic oligonucleotide

SEQ ID NO: 597368 - DNA, 59 bp, Artificial; identical to SEQ ID NO: 18612
  Synthetic oligonucleotide

SEQ ID NO: 597369 - DNA, 55 bp, Artificial; identical to SEQ ID NO: 444151
  Synthetic oligonucleotide

SEQ ID NO: 597370 - DNA, 56 bp, Artificial; identical to SEQ ID NO: 444152
  Synthetic oligonucleotide

SEQ ID NO: 597371 - DNA, 57 bp, Artificial; identical to SEQ ID NO: 444153
  Synthetic oligonucleotide

SEQ ID NO: 597372 - DNA, 55 bp, Artificial; identical to SEQ ID NO: 10686
  Synthetic oligonucleotide

SEQ ID NO: 597373 - DNA, 54 bp, Artificial; identical to SEQ ID NO: 444154
  Synthetic oligonucleotide

SEQ ID NO: 597374 - DNA, 54 bp, Artificial; identical to SEQ ID NO: 444155
  Synthetic oligonucleotide

SEQ ID NO: 597375 - DNA, 60 bp, Artificial; identical to SEQ ID NO: 444156
  Synthetic oligonucleotide

SEQ ID NO: 597376 - DNA, 54 bp, Artificial; identical to SEQ ID NO: 444159
  Synthetic oligonucleotide

SEQ ID NO: 597377 - DNA, 60 bp, Artificial; identical to SEQ ID NO: 444162
  Synthetic oligonucleotide

SEQ ID NO: 597378 - DNA, 55 bp, Artificial; identical to SEQ ID NO: 444163
  Synthetic oligonucleotide

SEQ ID NO: 597379 - DNA, 56 bp, Artificial; identical to SEQ ID NO: 444164
  Synthetic oligonucleotide

SEQ ID NO: 597380 - DNA, 60 bp, Artificial; identical to SEQ ID NO: 444169
  Synthetic oligonucleotide

SEQ ID NO: 597381 - DNA, 60 bp, Artificial; identical to SEQ ID NO: 444173
  Synthetic oligonucleotide

SEQ ID NO: 597382 - DNA, 51 bp, Artificial; identical to SEQ ID NO: 444174
  Synthetic oligonucleotide

SEQ ID NO: 597383 - DNA, 60 bp, Artificial; identical to SEQ ID NO: 444175
  Synthetic oligonucleotide

SEQ ID NO: 597384 - DNA, 55 bp, Artificial; identical to SEQ ID NO: 444182
  Synthetic oligonucleotide

SEQ ID NO: 597385 - DNA, 59 bp, Artificial; identical to SEQ ID NO: 444185
  Synthetic oligonucleotide

SEQ ID NO: 597386 - DNA, 55 bp, Artificial; identical to SEQ ID NO: 444190
  Synthetic oligonucleotide

SEQ ID NO: 597387 - DNA, 55 bp, Artificial; identical to SEQ ID NO: 444192
  Synthetic oligonucleotide

SEQ ID NO: 597388 - DNA, 57 bp, Artificial; identical to SEQ ID NO: 20250
  Synthetic oligonucleotide

SEQ ID NO: 597389 - DNA, 53 bp, Artificial; identical to SEQ ID NO: 444193
  Synthetic oligonucleotide

SEQ ID NO: 597390 - DNA, 54 bp, Artificial; identical to SEQ ID NO: 444206
  Synthetic oligonucleotide

SEQ ID NO: 597391 - DNA, 60 bp, Artificial; identical to SEQ ID NO: 444211
  Synthetic oligonucleotide

SEQ ID NO: 597392 - DNA, 55 bp, Artificial; identical to SEQ ID NO: 444212
  Synthetic oligonucleotide

SEQ ID NO: 597393 - DNA, 53 bp, Artificial; identical to SEQ ID NO: 444213
  Synthetic oligonucleotide

SEQ ID NO: 597394 - DNA, 58 bp, Artificial; identical to SEQ ID NO: 5801
  Synthetic oligonucleotide

SEQ ID NO: 597395 - DNA, 52 bp, Artificial; identical to SEQ ID NO: 444214
  Synthetic oligonucleotide

SEQ ID NO: 597396 - DNA, 58 bp, Artificial; identical to SEQ ID NO: 20462
  Synthetic oligonucleotide

SEQ ID NO: 597397 - DNA, 54 bp, Artificial; identical to SEQ ID NO: 444219
  Synthetic oligonucleotide

SEQ ID NO: 597398 - DNA, 60 bp, Artificial; identical to SEQ ID NO: 444220
  Synthetic oligonucleotide

SEQ ID NO: 597399 - DNA, 59 bp, Artificial; identical to SEQ ID NO: 444221
  Synthetic oligonucleotide

SEQ ID NO: 597400 - DNA, 59 bp, Artificial; identical to SEQ ID NO: 444222
  Synthetic oligonucleotide

SEQ ID NO: 597401 - DNA, 55 bp, Artificial; identical to SEQ ID NO: 444226
  Synthetic oligonucleotide

SEQ ID NO: 597402 - DNA, 52 bp, Artificial; identical to SEQ ID NO: 18618
  Synthetic oligonucleotide

SEQ ID NO: 597403 - DNA, 51 bp, Artificial; identical to SEQ ID NO: 444235
  Synthetic oligonucleotide

SEQ ID NO: 597404 - DNA, 55 bp, Artificial; identical to SEQ ID NO: 444237
  Synthetic oligonucleotide

SEQ ID NO: 597405 - DNA, 51 bp, Artificial; identical to SEQ ID NO: 444239
  Synthetic oligonucleotide

SEQ ID NO: 597406 - DNA, 59 bp, Artificial; identical to SEQ ID NO: 444242
  Synthetic oligonucleotide

SEQ ID NO: 597407 - DNA, 50 bp, Artificial; identical to SEQ ID NO: 444244
  Synthetic oligonucleotide

SEQ ID NO: 597408 - DNA, 59 bp, Artificial; identical to SEQ ID NO: 444247
  Synthetic oligonucleotide

SEQ ID NO: 597409 - DNA, 55 bp, Artificial; identical to SEQ ID NO: 444249
  Synthetic oligonucleotide

SEQ ID NO: 597410 - DNA, 58 bp, Artificial; identical to SEQ ID NO: 444250
  Synthetic oligonucleotide

SEQ ID NO: 597411 - DNA, 60 bp, Artificial; identical to SEQ ID NO: 444251
  Synthetic oligonucleotide

SEQ ID NO: 597412 - DNA, 53 bp, Artificial; identical to SEQ ID NO: 444252
  Synthetic oligonucleotide

SEQ ID NO: 597413 - DNA, 55 bp, Artificial; identical to SEQ ID NO: 13443
  Synthetic oligonucleotide

SEQ ID NO: 597414 - DNA, 56 bp, Artificial; identical to SEQ ID NO: 444263
  Synthetic oligonucleotide

SEQ ID NO: 597415 - DNA, 60 bp, Artificial; identical to SEQ ID NO: 444266
  Synthetic oligonucleotide

SEQ ID NO: 597416 - DNA, 57 bp, Artificial; identical to SEQ ID NO: 444267
  Synthetic oligonucleotide

SEQ ID NO: 597417 - DNA, 55 bp, Artificial; identical to SEQ ID NO: 444273
  Synthetic oligonucleotide

SEQ ID NO: 597418 - DNA, 52 bp, Artificial; identical to SEQ ID NO: 444274
  Synthetic oligonucleotide

SEQ ID NO: 597419 - DNA, 59 bp, Artificial; identical to SEQ ID NO: 444276
  Synthetic oligonucleotide

SEQ ID NO: 597420 - DNA, 59 bp, Artificial; identical to SEQ ID NO: 444280
  Synthetic oligonucleotide

SEQ ID NO: 597421 - DNA, 59 bp, Artificial; identical to SEQ ID NO: 18130
  Synthetic oligonucleotide

SEQ ID NO: 597422 - DNA, 55 bp, Artificial; identical to SEQ ID NO: 444283
  Synthetic oligonucleotide

SEQ ID NO: 597423 - DNA, 55 bp, Artificial; identical to SEQ ID NO: 444284
  Synthetic oligonucleotide

SEQ ID NO: 597424 - DNA, 53 bp, Artificial; identical to SEQ ID NO: 444286
  Synthetic oligonucleotide

SEQ ID NO: 597425 - DNA, 55 bp, Artificial; identical to SEQ ID NO: 444287
  Synthetic oligonucleotide

SEQ ID NO: 597426 - DNA, 60 bp, Artificial; identical to SEQ ID NO: 444293
  Synthetic oligonucleotide

SEQ ID NO: 597427 - DNA, 51 bp, Artificial; identical to SEQ ID NO: 444294
  Synthetic oligonucleotide

SEQ ID NO: 597428 - DNA, 55 bp, Artificial; identical to SEQ ID NO: 444296
  Synthetic oligonucleotide

SEQ ID NO: 597429 - DNA, 53 bp, Artificial; identical to SEQ ID NO: 444300
  Synthetic oligonucleotide

SEQ ID NO: 597430 - DNA, 60 bp, Artificial; identical to SEQ ID NO: 444301
  Synthetic oligonucleotide

SEQ ID NO: 597431 - DNA, 55 bp, Artificial; identical to SEQ ID NO: 444304
  Synthetic oligonucleotide

SEQ ID NO: 597432 - DNA, 55 bp, Artificial; identical to SEQ ID NO: 444306
  Synthetic oligonucleotide

SEQ ID NO: 597433 - DNA, 58 bp, Artificial; identical to SEQ ID NO: 444309
  Synthetic oligonucleotide

SEQ ID NO: 597434 - DNA, 55 bp, Artificial; identical to SEQ ID NO: 444310
  Synthetic oligonucleotide

SEQ ID NO: 597435 - DNA, 55 bp, Artificial; identical to SEQ ID NO: 444311
  Synthetic oligonucleotide

SEQ ID NO: 597436 - DNA, 60 bp, Artificial; identical to SEQ ID NO: 444312
  Synthetic oligonucleotide

SEQ ID NO: 597437 - DNA, 55 bp, Artificial; identical to SEQ ID NO: 444313
  Synthetic oligonucleotide

SEQ ID NO: 597438 - DNA, 57 bp, Artificial; identical to SEQ ID NO: 444316
  Synthetic oligonucleotide

SEQ ID NO: 597439 - DNA, 55 bp, Artificial; identical to SEQ ID NO: 444320
  Synthetic oligonucleotide

SEQ ID NO: 597440 - DNA, 60 bp, Artificial; identical to SEQ ID NO: 444323
  Synthetic oligonucleotide

SEQ ID NO: 597441 - DNA, 51 bp, Artificial; identical to SEQ ID NO: 16061
  Synthetic oligonucleotide

SEQ ID NO: 597442 - DNA, 55 bp, Artificial; identical to SEQ ID NO: 444327
  Synthetic oligonucleotide

SEQ ID NO: 597443 - DNA, 51 bp, Artificial; identical to SEQ ID NO: 444328
  Synthetic oligonucleotide

SEQ ID NO: 597444 - DNA, 55 bp, Artificial; identical to SEQ ID NO: 9607
  Synthetic oligonucleotide

SEQ ID NO: 597445 - DNA, 55 bp, Artificial; identical to SEQ ID NO: 444330
  Synthetic oligonucleotide

SEQ ID NO: 597446 - DNA, 55 bp, Artificial; identical to SEQ ID NO: 444335
  Synthetic oligonucleotide

SEQ ID NO: 597447 - DNA, 60 bp, Artificial; identical to SEQ ID NO: 444336
  Synthetic oligonucleotide

SEQ ID NO: 597448 - DNA, 57 bp, Artificial; identical to SEQ ID NO: 444337
  Synthetic oligonucleotide

SEQ ID NO: 597449 - DNA, 49 bp, Artificial; identical to SEQ ID NO: 444338
  Synthetic oligonucleotide

SEQ ID NO: 597450 - DNA, 58 bp, Artificial; identical to SEQ ID NO: 19651
  Synthetic oligonucleotide

SEQ ID NO: 597451 - DNA, 58 bp, Artificial; identical to SEQ ID NO: 444345
  Synthetic oligonucleotide

SEQ ID NO: 597452 - DNA, 55 bp, Artificial; identical to SEQ ID NO: 444347
  Synthetic oligonucleotide

SEQ ID NO: 597453 - DNA, 55 bp, Artificial; identical to SEQ ID NO: 444355
  Synthetic oligonucleotide

SEQ ID NO: 597454 - DNA, 60 bp, Artificial; identical to SEQ ID NO: 444358
  Synthetic oligonucleotide

SEQ ID NO: 597455 - DNA, 55 bp, Artificial; identical to SEQ ID NO: 444359
  Synthetic oligonucleotide

SEQ ID NO: 597456 - DNA, 60 bp, Artificial; identical to SEQ ID NO: 444360
  Synthetic oligonucleotide

SEQ ID NO: 597457 - DNA, 53 bp, Artificial; identical to SEQ ID NO: 444362
  Synthetic oligonucleotide

SEQ ID NO: 597458 - DNA, 59 bp, Artificial; identical to SEQ ID NO: 444364
  Synthetic oligonucleotide

SEQ ID NO: 597459 - DNA, 59 bp, Artificial; identical to SEQ ID NO: 444365
  Synthetic oligonucleotide

SEQ ID NO: 597460 - DNA, 55 bp, Artificial; identical to SEQ ID NO: 444369
  Synthetic oligonucleotide

SEQ ID NO: 597461 - DNA, 55 bp, Artificial; identical to SEQ ID NO: 444370
  Synthetic oligonucleotide

SEQ ID NO: 597462 - DNA, 54 bp, Artificial; identical to SEQ ID NO: 444373
  Synthetic oligonucleotide

SEQ ID NO: 597463 - DNA, 60 bp, Artificial; identical to SEQ ID NO: 444375
  Synthetic oligonucleotide

SEQ ID NO: 597464 - DNA, 55 bp, Artificial; identical to SEQ ID NO: 444376
  Synthetic oligonucleotide

SEQ ID NO: 597465 - DNA, 59 bp, Artificial; identical to SEQ ID NO: 444378
  Synthetic oligonucleotide

SEQ ID NO: 597466 - DNA, 59 bp, Artificial; identical to SEQ ID NO: 444379
  Synthetic oligonucleotide

SEQ ID NO: 597467 - DNA, 60 bp, Artificial; identical to SEQ ID NO: 444380
  Synthetic oligonucleotide

SEQ ID NO: 597468 - DNA, 60 bp, Artificial; identical to SEQ ID NO: 444381
  Synthetic oligonucleotide

SEQ ID NO: 597469 - DNA, 55 bp, Artificial; identical to SEQ ID NO: 444382
  Synthetic oligonucleotide

SEQ ID NO: 597470 - DNA, 60 bp, Artificial; identical to SEQ ID NO: 8404
  Synthetic oligonucleotide

SEQ ID NO: 597471 - DNA, 58 bp, Artificial; identical to SEQ ID NO: 444390
  Synthetic oligonucleotide

SEQ ID NO: 597472 - DNA, 60 bp, Artificial; identical to SEQ ID NO: 444392
  Synthetic oligonucleotide

SEQ ID NO: 597473 - DNA, 55 bp, Artificial; identical to SEQ ID NO: 444394
  Synthetic oligonucleotide

SEQ ID NO: 597474 - DNA, 55 bp, Artificial; identical to SEQ ID NO: 444398
  Synthetic oligonucleotide

SEQ ID NO: 597475 - DNA, 60 bp, Artificial; identical to SEQ ID NO: 444403
  Synthetic oligonucleotide

SEQ ID NO: 597476 - DNA, 55 bp, Artificial; identical to SEQ ID NO: 444405
  Synthetic oligonucleotide

SEQ ID NO: 597477 - DNA, 60 bp, Artificial; identical to SEQ ID NO: 444407
  Synthetic oligonucleotide

SEQ ID NO: 597478 - DNA, 53 bp, Artificial; identical to SEQ ID NO: 444413
  Synthetic oligonucleotide

SEQ ID NO: 597479 - DNA, 57 bp, Artificial; identical to SEQ ID NO: 444414
  Synthetic oligonucleotide

SEQ ID NO: 597480 - DNA, 51 bp, Artificial; identical to SEQ ID NO: 444416
  Synthetic oligonucleotide

SEQ ID NO: 597481 - DNA, 52 bp, Artificial; identical to SEQ ID NO: 444417
  Synthetic oligonucleotide

SEQ ID NO: 597482 - DNA, 57 bp, Artificial; identical to SEQ ID NO: 444419
  Synthetic oligonucleotide

SEQ ID NO: 597483 - DNA, 59 bp, Artificial; identical to SEQ ID NO: 444422
  Synthetic oligonucleotide

SEQ ID NO: 597484 - DNA, 58 bp, Artificial; identical to SEQ ID NO: 444425
  Synthetic oligonucleotide

SEQ ID NO: 597485 - DNA, 53 bp, Artificial; identical to SEQ ID NO: 444427
  Synthetic oligonucleotide

SEQ ID NO: 597486 - DNA, 57 bp, Artificial; identical to SEQ ID NO: 444428
  Synthetic oligonucleotide

SEQ ID NO: 597487 - DNA, 53 bp, Artificial; identical to SEQ ID NO: 444429
  Synthetic oligonucleotide

SEQ ID NO: 597488 - DNA, 52 bp, Artificial; identical to SEQ ID NO: 444431
  Synthetic oligonucleotide

SEQ ID NO: 597489 - DNA, 52 bp, Artificial; identical to SEQ ID NO: 444433
  Synthetic oligonucleotide

SEQ ID NO: 597490 - DNA, 54 bp, Artificial; identical to SEQ ID NO: 444438
  Synthetic oligonucleotide

SEQ ID NO: 597491 - DNA, 54 bp, Artificial; identical to SEQ ID NO: 444439
  Synthetic oligonucleotide

SEQ ID NO: 597492 - DNA, 55 bp, Artificial; identical to SEQ ID NO: 444441
  Synthetic oligonucleotide

SEQ ID NO: 597493 - DNA, 60 bp, Artificial; identical to SEQ ID NO: 444443
  Synthetic oligonucleotide

SEQ ID NO: 597494 - DNA, 60 bp, Artificial; identical to SEQ ID NO: 444446
  Synthetic oligonucleotide

SEQ ID NO: 597495 - DNA, 53 bp, Artificial; identical to SEQ ID NO: 444448
  Synthetic oligonucleotide

SEQ ID NO: 597496 - DNA, 60 bp, Artificial; identical to SEQ ID NO: 444451
  Synthetic oligonucleotide

SEQ ID NO: 597497 - DNA, 54 bp, Artificial; identical to SEQ ID NO: 444452
  Synthetic oligonucleotide

SEQ ID NO: 597498 - DNA, 54 bp, Artificial; identical to SEQ ID NO: 444455
  Synthetic oligonucleotide

SEQ ID NO: 597499 - DNA, 55 bp, Artificial; identical to SEQ ID NO: 444459
  Synthetic oligonucleotide

SEQ ID NO: 597500 - DNA, 57 bp, Artificial; identical to SEQ ID NO: 444460
  Synthetic oligonucleotide

SEQ ID NO: 597501 - DNA, 60 bp, Artificial; identical to SEQ ID NO: 444464
  Synthetic oligonucleotide

SEQ ID NO: 597502 - DNA, 59 bp, Artificial; identical to SEQ ID NO: 444466
  Synthetic oligonucleotide

SEQ ID NO: 597503 - DNA, 58 bp, Artificial; identical to SEQ ID NO: 444467
  Synthetic oligonucleotide

SEQ ID NO: 597504 - DNA, 51 bp, Artificial; identical to SEQ ID NO: 444473
  Synthetic oligonucleotide

SEQ ID NO: 597505 - DNA, 55 bp, Artificial; identical to SEQ ID NO: 444474
  Synthetic oligonucleotide

SEQ ID NO: 597506 - DNA, 55 bp, Artificial; identical to SEQ ID NO: 444476
  Synthetic oligonucleotide

SEQ ID NO: 597507 - DNA, 55 bp, Artificial; identical to SEQ ID NO: 444477
  Synthetic oligonucleotide

SEQ ID NO: 597508 - DNA, 55 bp, Artificial; identical to SEQ ID NO: 444479
  Synthetic oligonucleotide

SEQ ID NO: 597509 - DNA, 52 bp, Artificial; identical to SEQ ID NO: 444480
  Synthetic oligonucleotide

SEQ ID NO: 597510 - DNA, 58 bp, Artificial; identical to SEQ ID NO: 444482
  Synthetic oligonucleotide

SEQ ID NO: 597511 - DNA, 60 bp, Artificial; identical to SEQ ID NO: 444483
  Synthetic oligonucleotide

SEQ ID NO: 597512 - DNA, 57 bp, Artificial; identical to SEQ ID NO: 444489
  Synthetic oligonucleotide

SEQ ID NO: 597513 - DNA, 60 bp, Artificial; identical to SEQ ID NO: 444490
  Synthetic oligonucleotide

SEQ ID NO: 597514 - DNA, 57 bp, Artificial; identical to SEQ ID NO: 444491
  Synthetic oligonucleotide

SEQ ID NO: 597515 - DNA, 59 bp, Artificial; identical to SEQ ID NO: 444492
  Synthetic oligonucleotide

SEQ ID NO: 597516 - DNA, 52 bp, Artificial; identical to SEQ ID NO: 444493
  Synthetic oligonucleotide

SEQ ID NO: 597517 - DNA, 55 bp, Artificial; identical to SEQ ID NO: 444494
  Synthetic oligonucleotide

SEQ ID NO: 597518 - DNA, 52 bp, Artificial; identical to SEQ ID NO: 444495
  Synthetic oligonucleotide

SEQ ID NO: 597519 - DNA, 55 bp, Artificial; identical to SEQ ID NO: 444497
  Synthetic oligonucleotide

SEQ ID NO: 597520 - DNA, 58 bp, Artificial; identical to SEQ ID NO: 444500
  Synthetic oligonucleotide

SEQ ID NO: 597521 - DNA, 60 bp, Artificial; identical to SEQ ID NO: 444501
  Synthetic oligonucleotide

SEQ ID NO: 597522 - DNA, 53 bp, Artificial; identical to SEQ ID NO: 444503
  Synthetic oligonucleotide

SEQ ID NO: 597523 - DNA, 56 bp, Artificial; identical to SEQ ID NO: 16517
  Synthetic oligonucleotide

SEQ ID NO: 597524 - DNA, 60 bp, Artificial; identical to SEQ ID NO: 444508
  Synthetic oligonucleotide

SEQ ID NO: 597525 - DNA, 52 bp, Artificial; identical to SEQ ID NO: 444513
  Synthetic oligonucleotide

SEQ ID NO: 597526 - DNA, 51 bp, Artificial; identical to SEQ ID NO: 444517
  Synthetic oligonucleotide

SEQ ID NO: 597527 - DNA, 55 bp, Artificial; identical to SEQ ID NO: 444519
  Synthetic oligonucleotide

SEQ ID NO: 597528 - DNA, 60 bp, Artificial; identical to SEQ ID NO: 444523
  Synthetic oligonucleotide

SEQ ID NO: 597529 - DNA, 50 bp, Artificial; identical to SEQ ID NO: 444524
  Synthetic oligonucleotide

SEQ ID NO: 597530 - DNA, 59 bp, Artificial; identical to SEQ ID NO: 444526
  Synthetic oligonucleotide

SEQ ID NO: 597531 - DNA, 57 bp, Artificial; identical to SEQ ID NO: 444528
  Synthetic oligonucleotide

SEQ ID NO: 597532 - DNA, 53 bp, Artificial; identical to SEQ ID NO: 444542
  Synthetic oligonucleotide

SEQ ID NO: 597533 - DNA, 60 bp, Artificial; identical to SEQ ID NO: 444543
  Synthetic oligonucleotide

SEQ ID NO: 597534 - DNA, 59 bp, Artificial; identical to SEQ ID NO: 444552
  Synthetic oligonucleotide

SEQ ID NO: 597535 - DNA, 55 bp, Artificial; identical to SEQ ID NO: 444554
  Synthetic oligonucleotide

SEQ ID NO: 597536 - DNA, 55 bp, Artificial; identical to SEQ ID NO: 444562
  Synthetic oligonucleotide

SEQ ID NO: 597537 - DNA, 60 bp, Artificial; identical to SEQ ID NO: 444564
  Synthetic oligonucleotide

SEQ ID NO: 597538 - DNA, 54 bp, Artificial; identical to SEQ ID NO: 444567
  Synthetic oligonucleotide

SEQ ID NO: 597539 - DNA, 55 bp, Artificial; identical to SEQ ID NO: 444568
  Synthetic oligonucleotide

SEQ ID NO: 597540 - DNA, 51 bp, Artificial; identical to SEQ ID NO: 444571
  Synthetic oligonucleotide

SEQ ID NO: 597541 - DNA, 58 bp, Artificial; identical to SEQ ID NO: 444574
  Synthetic oligonucleotide

SEQ ID NO: 597542 - DNA, 55 bp, Artificial; identical to SEQ ID NO: 444576
  Synthetic oligonucleotide

SEQ ID NO: 597543 - DNA, 55 bp, Artificial; identical to SEQ ID NO: 444580
  Synthetic oligonucleotide

SEQ ID NO: 597544 - DNA, 57 bp, Artificial; identical to SEQ ID NO: 444581
  Synthetic oligonucleotide

SEQ ID NO: 597545 - DNA, 54 bp, Artificial; identical to SEQ ID NO: 444584
  Synthetic oligonucleotide

SEQ ID NO: 597546 - DNA, 53 bp, Artificial; identical to SEQ ID NO: 444585
  Synthetic oligonucleotide

SEQ ID NO: 597547 - DNA, 60 bp, Artificial; identical to SEQ ID NO: 444586
  Synthetic oligonucleotide

SEQ ID NO: 597548 - DNA, 60 bp, Artificial; identical to SEQ ID NO: 444592
  Synthetic oligonucleotide

SEQ ID NO: 597549 - DNA, 54 bp, Artificial; identical to SEQ ID NO: 444597
  Synthetic oligonucleotide

SEQ ID NO: 597550 - DNA, 60 bp, Artificial; identical to SEQ ID NO: 444600
  Synthetic oligonucleotide

SEQ ID NO: 597551 - DNA, 60 bp, Artificial; identical to SEQ ID NO: 444601
  Synthetic oligonucleotide

SEQ ID NO: 597552 - DNA, 59 bp, Artificial; identical to SEQ ID NO: 444602
  Synthetic oligonucleotide

SEQ ID NO: 597553 - DNA, 55 bp, Artificial; identical to SEQ ID NO: 444607
  Synthetic oligonucleotide

SEQ ID NO: 597554 - DNA, 60 bp, Artificial; identical to SEQ ID NO: 444612
  Synthetic oligonucleotide

SEQ ID NO: 597555 - DNA, 60 bp, Artificial; identical to SEQ ID NO: 8702
  Synthetic oligonucleotide

SEQ ID NO: 597556 - DNA, 60 bp, Artificial; identical to SEQ ID NO: 444616
  Synthetic oligonucleotide

SEQ ID NO: 597557 - DNA, 52 bp, Artificial; identical to SEQ ID NO: 444617
  Synthetic oligonucleotide

SEQ ID NO: 597558 - DNA, 56 bp, Artificial; identical to SEQ ID NO: 444620
  Synthetic oligonucleotide

SEQ ID NO: 597559 - DNA, 52 bp, Artificial; identical to SEQ ID NO: 444621
  Synthetic oligonucleotide

SEQ ID NO: 597560 - DNA, 55 bp, Artificial; identical to SEQ ID NO: 444622
  Synthetic oligonucleotide

SEQ ID NO: 597561 - DNA, 59 bp, Artificial; identical to SEQ ID NO: 444623
  Synthetic oligonucleotide

SEQ ID NO: 597562 - DNA, 60 bp, Artificial; identical to SEQ ID NO: 444624
  Synthetic oligonucleotide

SEQ ID NO: 597563 - DNA, 60 bp, Artificial; identical to SEQ ID NO: 444625
  Synthetic oligonucleotide

SEQ ID NO: 597564 - DNA, 60 bp, Artificial; identical to SEQ ID NO: 444635
  Synthetic oligonucleotide

SEQ ID NO: 597565 - DNA, 53 bp, Artificial; identical to SEQ ID NO: 444638
  Synthetic oligonucleotide

SEQ ID NO: 597566 - DNA, 52 bp, Artificial; identical to SEQ ID NO: 444644
  Synthetic oligonucleotide

SEQ ID NO: 597567 - DNA, 53 bp, Artificial; identical to SEQ ID NO: 444647
  Synthetic oligonucleotide

SEQ ID NO: 597568 - DNA, 55 bp, Artificial; identical to SEQ ID NO: 444649
  Synthetic oligonucleotide

SEQ ID NO: 597569 - DNA, 60 bp, Artificial; identical to SEQ ID NO: 444653
  Synthetic oligonucleotide

SEQ ID NO: 597570 - DNA, 55 bp, Artificial; identical to SEQ ID NO: 444655
  Synthetic oligonucleotide

SEQ ID NO: 597571 - DNA, 60 bp, Artificial; identical to SEQ ID NO: 444656
  Synthetic oligonucleotide

SEQ ID NO: 597572 - DNA, 55 bp, Artificial; identical to SEQ ID NO: 444657
  Synthetic oligonucleotide

SEQ ID NO: 597573 - DNA, 60 bp, Artificial; identical to SEQ ID NO: 444658
  Synthetic oligonucleotide

SEQ ID NO: 597574 - DNA, 55 bp, Artificial; identical to SEQ ID NO: 444664
  Synthetic oligonucleotide

SEQ ID NO: 597575 - DNA, 55 bp, Artificial; identical to SEQ ID NO: 444665
  Synthetic oligonucleotide

SEQ ID NO: 597576 - DNA, 59 bp, Artificial; identical to SEQ ID NO: 444671
  Synthetic oligonucleotide

SEQ ID NO: 597577 - DNA, 60 bp, Artificial; identical to SEQ ID NO: 444673
  Synthetic oligonucleotide

SEQ ID NO: 597578 - DNA, 60 bp, Artificial; identical to SEQ ID NO: 444674
  Synthetic oligonucleotide

SEQ ID NO: 597579 - DNA, 55 bp, Artificial; identical to SEQ ID NO: 444677
  Synthetic oligonucleotide

SEQ ID NO: 597580 - DNA, 52 bp, Artificial; identical to SEQ ID NO: 444679
  Synthetic oligonucleotide

SEQ ID NO: 597581 - DNA, 51 bp, Artificial; identical to SEQ ID NO: 444680
  Synthetic oligonucleotide

SEQ ID NO: 597582 - DNA, 56 bp, Artificial; identical to SEQ ID NO: 444685
  Synthetic oligonucleotide

SEQ ID NO: 597583 - DNA, 54 bp, Artificial; identical to SEQ ID NO: 444689
  Synthetic oligonucleotide

SEQ ID NO: 597584 - DNA, 58 bp, Artificial; identical to SEQ ID NO: 444690
  Synthetic oligonucleotide

SEQ ID NO: 597585 - DNA, 55 bp, Artificial; identical to SEQ ID NO: 444691
  Synthetic oligonucleotide

SEQ ID NO: 597586 - DNA, 59 bp, Artificial; identical to SEQ ID NO: 444694
  Synthetic oligonucleotide

SEQ ID NO: 597587 - DNA, 60 bp, Artificial; identical to SEQ ID NO: 444695
  Synthetic oligonucleotide

SEQ ID NO: 597588 - DNA, 52 bp, Artificial; identical to SEQ ID NO: 444697
  Synthetic oligonucleotide

SEQ ID NO: 597589 - DNA, 59 bp, Artificial; identical to SEQ ID NO: 16948
  Synthetic oligonucleotide

SEQ ID NO: 597590 - DNA, 54 bp, Artificial; identical to SEQ ID NO: 444699
  Synthetic oligonucleotide

SEQ ID NO: 597591 - DNA, 55 bp, Artificial; identical to SEQ ID NO: 444700
  Synthetic oligonucleotide

SEQ ID NO: 597592 - DNA, 59 bp, Artificial; identical to SEQ ID NO: 19166
  Synthetic oligonucleotide

SEQ ID NO: 597593 - DNA, 60 bp, Artificial; identical to SEQ ID NO: 444708
  Synthetic oligonucleotide

SEQ ID NO: 597594 - DNA, 60 bp, Artificial; identical to SEQ ID NO: 444709
  Synthetic oligonucleotide

SEQ ID NO: 597595 - DNA, 60 bp, Artificial; identical to SEQ ID NO: 444710
  Synthetic oligonucleotide

SEQ ID NO: 597596 - DNA, 60 bp, Artificial; identical to SEQ ID NO: 444713
  Synthetic oligonucleotide

SEQ ID NO: 597597 - DNA, 50 bp, Artificial; identical to SEQ ID NO: 444714
  Synthetic oligonucleotide

SEQ ID NO: 597598 - DNA, 60 bp, Artificial; identical to SEQ ID NO: 444716
  Synthetic oligonucleotide

SEQ ID NO: 597599 - DNA, 59 bp, Artificial; identical to SEQ ID NO: 444719
  Synthetic oligonucleotide

SEQ ID NO: 597600 - DNA, 57 bp, Artificial; identical to SEQ ID NO: 8182
  Synthetic oligonucleotide

SEQ ID NO: 597601 - DNA, 57 bp, Artificial; identical to SEQ ID NO: 444723
  Synthetic oligonucleotide

SEQ ID NO: 597602 - DNA, 60 bp, Artificial; identical to SEQ ID NO: 444724
  Synthetic oligonucleotide

SEQ ID NO: 597603 - DNA, 58 bp, Artificial; identical to SEQ ID NO: 444725
  Synthetic oligonucleotide

SEQ ID NO: 597604 - DNA, 60 bp, Artificial; identical to SEQ ID NO: 444727
  Synthetic oligonucleotide

SEQ ID NO: 597605 - DNA, 55 bp, Artificial; identical to SEQ ID NO: 444730
  Synthetic oligonucleotide

SEQ ID NO: 597606 - DNA, 57 bp, Artificial; identical to SEQ ID NO: 444735
  Synthetic oligonucleotide

SEQ ID NO: 597607 - DNA, 60 bp, Artificial; identical to SEQ ID NO: 444742
  Synthetic oligonucleotide

SEQ ID NO: 597608 - DNA, 59 bp, Artificial; identical to SEQ ID NO: 444743
  Synthetic oligonucleotide

SEQ ID NO: 597609 - DNA, 55 bp, Artificial; identical to SEQ ID NO: 444745
  Synthetic oligonucleotide

SEQ ID NO: 597610 - DNA, 55 bp, Artificial; identical to SEQ ID NO: 444749
  Synthetic oligonucleotide

SEQ ID NO: 597611 - DNA, 50 bp, Artificial; identical to SEQ ID NO: 444752
  Synthetic oligonucleotide

SEQ ID NO: 597612 - DNA, 60 bp, Artificial; identical to SEQ ID NO: 444754
  Synthetic oligonucleotide

SEQ ID NO: 597613 - DNA, 60 bp, Artificial; identical to SEQ ID NO: 444755
  Synthetic oligonucleotide

SEQ ID NO: 597614 - DNA, 55 bp, Artificial; identical to SEQ ID NO: 444756
  Synthetic oligonucleotide

SEQ ID NO: 597615 - DNA, 57 bp, Artificial; identical to SEQ ID NO: 18010
  Synthetic oligonucleotide

SEQ ID NO: 597616 - DNA, 51 bp, Artificial; identical to SEQ ID NO: 444762
  Synthetic oligonucleotide

SEQ ID NO: 597617 - DNA, 56 bp, Artificial; identical to SEQ ID NO: 444763
  Synthetic oligonucleotide

SEQ ID NO: 597618 - DNA, 60 bp, Artificial; identical to SEQ ID NO: 444773
  Synthetic oligonucleotide

SEQ ID NO: 597619 - DNA, 55 bp, Artificial; identical to SEQ ID NO: 444777
  Synthetic oligonucleotide

SEQ ID NO: 597620 - DNA, 60 bp, Artificial; identical to SEQ ID NO: 444778
  Synthetic oligonucleotide

SEQ ID NO: 597621 - DNA, 52 bp, Artificial; identical to SEQ ID NO: 444782
  Synthetic oligonucleotide

SEQ ID NO: 597622 - DNA, 55 bp, Artificial; identical to SEQ ID NO: 444783
  Synthetic oligonucleotide

SEQ ID NO: 597623 - DNA, 60 bp, Artificial; identical to SEQ ID NO: 444784
  Synthetic oligonucleotide

SEQ ID NO: 597624 - DNA, 60 bp, Artificial; identical to SEQ ID NO: 444786
  Synthetic oligonucleotide

SEQ ID NO: 597625 - DNA, 55 bp, Artificial; identical to SEQ ID NO: 444788
  Synthetic oligonucleotide

SEQ ID NO: 597626 - DNA, 56 bp, Artificial; identical to SEQ ID NO: 444790
  Synthetic oligonucleotide

SEQ ID NO: 597627 - DNA, 56 bp, Artificial; identical to SEQ ID NO: 444791
  Synthetic oligonucleotide

SEQ ID NO: 597628 - DNA, 57 bp, Artificial; identical to SEQ ID NO: 444794
  Synthetic oligonucleotide

SEQ ID NO: 597629 - DNA, 55 bp, Artificial; identical to SEQ ID NO: 444796
  Synthetic oligonucleotide

SEQ ID NO: 597630 - DNA, 60 bp, Artificial; identical to SEQ ID NO: 444805
  Synthetic oligonucleotide

SEQ ID NO: 597631 - DNA, 59 bp, Artificial; identical to SEQ ID NO: 444808
  Synthetic oligonucleotide

SEQ ID NO: 597632 - DNA, 55 bp, Artificial; identical to SEQ ID NO: 444810
  Synthetic oligonucleotide

SEQ ID NO: 597633 - DNA, 59 bp, Artificial; identical to SEQ ID NO: 444814
  Synthetic oligonucleotide

SEQ ID NO: 597634 - DNA, 55 bp, Artificial; identical to SEQ ID NO: 444818
  Synthetic oligonucleotide

SEQ ID NO: 597635 - DNA, 58 bp, Artificial; identical to SEQ ID NO: 444821
  Synthetic oligonucleotide

SEQ ID NO: 597636 - DNA, 60 bp, Artificial; identical to SEQ ID NO: 444824
  Synthetic oligonucleotide

SEQ ID NO: 597637 - DNA, 55 bp, Artificial; identical to SEQ ID NO: 444827
  Synthetic oligonucleotide

SEQ ID NO: 597638 - DNA, 57 bp, Artificial; identical to SEQ ID NO: 444828
  Synthetic oligonucleotide

SEQ ID NO: 597639 - DNA, 60 bp, Artificial; identical to SEQ ID NO: 444835
  Synthetic oligonucleotide

SEQ ID NO: 597640 - DNA, 55 bp, Artificial; identical to SEQ ID NO: 444838
  Synthetic oligonucleotide

SEQ ID NO: 597641 - DNA, 60 bp, Artificial; identical to SEQ ID NO: 444840
  Synthetic oligonucleotide

SEQ ID NO: 597642 - DNA, 58 bp, Artificial; identical to SEQ ID NO: 444841
  Synthetic oligonucleotide

SEQ ID NO: 597643 - DNA, 60 bp, Artificial; identical to SEQ ID NO: 444843
  Synthetic oligonucleotide

SEQ ID NO: 597644 - DNA, 50 bp, Artificial; identical to SEQ ID NO: 444844
  Synthetic oligonucleotide

SEQ ID NO: 597645 - DNA, 60 bp, Artificial; identical to SEQ ID NO: 444849
  Synthetic oligonucleotide

SEQ ID NO: 597646 - DNA, 60 bp, Artificial; identical to SEQ ID NO: 444850
  Synthetic oligonucleotide

SEQ ID NO: 597647 - DNA, 60 bp, Artificial; identical to SEQ ID NO: 444852
  Synthetic oligonucleotide

SEQ ID NO: 597648 - DNA, 60 bp, Artificial; identical to SEQ ID NO: 444853
  Synthetic oligonucleotide

SEQ ID NO: 597649 - DNA, 59 bp, Artificial; identical to SEQ ID NO: 444855
  Synthetic oligonucleotide

SEQ ID NO: 597650 - DNA, 60 bp, Artificial; identical to SEQ ID NO: 444857
  Synthetic oligonucleotide

SEQ ID NO: 597651 - DNA, 58 bp, Artificial; identical to SEQ ID NO: 444860
  Synthetic oligonucleotide

SEQ ID NO: 597652 - DNA, 56 bp, Artificial; identical to SEQ ID NO: 444861
  Synthetic oligonucleotide

SEQ ID NO: 597653 - DNA, 57 bp, Artificial; identical to SEQ ID NO: 444865
  Synthetic oligonucleotide

SEQ ID NO: 597654 - DNA, 52 bp, Artificial; identical to SEQ ID NO: 444866
  Synthetic oligonucleotide

SEQ ID NO: 597655 - DNA, 56 bp, Artificial; identical to SEQ ID NO: 444867
  Synthetic oligonucleotide

SEQ ID NO: 597656 - DNA, 58 bp, Artificial; identical to SEQ ID NO: 444870
  Synthetic oligonucleotide

SEQ ID NO: 597657 - DNA, 57 bp, Artificial; identical to SEQ ID NO: 444874
  Synthetic oligonucleotide

SEQ ID NO: 597658 - DNA, 60 bp, Artificial; identical to SEQ ID NO: 444876
  Synthetic oligonucleotide

SEQ ID NO: 597659 - DNA, 50 bp, Artificial; identical to SEQ ID NO: 444879
  Synthetic oligonucleotide

SEQ ID NO: 597660 - DNA, 60 bp, Artificial; identical to SEQ ID NO: 444882
  Synthetic oligonucleotide

SEQ ID NO: 597661 - DNA, 55 bp, Artificial; identical to SEQ ID NO: 444887
  Synthetic oligonucleotide

SEQ ID NO: 597662 - DNA, 60 bp, Artificial; identical to SEQ ID NO: 444888
  Synthetic oligonucleotide

SEQ ID NO: 597663 - DNA, 60 bp, Artificial; identical to SEQ ID NO: 444892
  Synthetic oligonucleotide

SEQ ID NO: 597664 - DNA, 60 bp, Artificial; identical to SEQ ID NO: 444894
  Synthetic oligonucleotide

SEQ ID NO: 597665 - DNA, 60 bp, Artificial; identical to SEQ ID NO: 444895
  Synthetic oligonucleotide

SEQ ID NO: 597666 - DNA, 60 bp, Artificial; identical to SEQ ID NO: 444896
  Synthetic oligonucleotide

SEQ ID NO: 597667 - DNA, 60 bp, Artificial; identical to SEQ ID NO: 444899
  Synthetic oligonucleotide

SEQ ID NO: 597668 - DNA, 56 bp, Artificial; identical to SEQ ID NO: 444900
  Synthetic oligonucleotide

SEQ ID NO: 597669 - DNA, 60 bp, Artificial; identical to SEQ ID NO: 444903
  Synthetic oligonucleotide

SEQ ID NO: 597670 - DNA, 58 bp, Artificial; identical to SEQ ID NO: 444904
  Synthetic oligonucleotide

SEQ ID NO: 597671 - DNA, 55 bp, Artificial; identical to SEQ ID NO: 444908
  Synthetic oligonucleotide

SEQ ID NO: 597672 - DNA, 60 bp, Artificial; identical to SEQ ID NO: 444910
  Synthetic oligonucleotide

SEQ ID NO: 597673 - DNA, 60 bp, Artificial; identical to SEQ ID NO: 12546
  Synthetic oligonucleotide

SEQ ID NO: 597674 - DNA, 56 bp, Artificial; identical to SEQ ID NO: 444913
  Synthetic oligonucleotide

SEQ ID NO: 597675 - DNA, 60 bp, Artificial; identical to SEQ ID NO: 444916
  Synthetic oligonucleotide

SEQ ID NO: 597676 - DNA, 60 bp, Artificial; identical to SEQ ID NO: 444917
  Synthetic oligonucleotide

SEQ ID NO: 597677 - DNA, 55 bp, Artificial; identical to SEQ ID NO: 444918
  Synthetic oligonucleotide

SEQ ID NO: 597678 - DNA, 58 bp, Artificial; identical to SEQ ID NO: 444924
  Synthetic oligonucleotide

SEQ ID NO: 597679 - DNA, 58 bp, Artificial; identical to SEQ ID NO: 444931
  Synthetic oligonucleotide

SEQ ID NO: 597680 - DNA, 54 bp, Artificial; identical to SEQ ID NO: 444932
  Synthetic oligonucleotide

SEQ ID NO: 597681 - DNA, 60 bp, Artificial; identical to SEQ ID NO: 444933
  Synthetic oligonucleotide

SEQ ID NO: 597682 - DNA, 55 bp, Artificial; identical to SEQ ID NO: 17466
  Synthetic oligonucleotide

SEQ ID NO: 597683 - DNA, 56 bp, Artificial; identical to SEQ ID NO: 11297
  Synthetic oligonucleotide

SEQ ID NO: 597684 - DNA, 59 bp, Artificial; identical to SEQ ID NO: 444941
  Synthetic oligonucleotide

SEQ ID NO: 597685 - DNA, 55 bp, Artificial; identical to SEQ ID NO: 444943
  Synthetic oligonucleotide

SEQ ID NO: 597686 - DNA, 55 bp, Artificial; identical to SEQ ID NO: 444945
  Synthetic oligonucleotide

SEQ ID NO: 597687 - DNA, 55 bp, Artificial; identical to SEQ ID NO: 444946
  Synthetic oligonucleotide

SEQ ID NO: 597688 - DNA, 60 bp, Artificial; identical to SEQ ID NO: 444949
  Synthetic oligonucleotide

SEQ ID NO: 597689 - DNA, 60 bp, Artificial; identical to SEQ ID NO: 444952
  Synthetic oligonucleotide

SEQ ID NO: 597690 - DNA, 59 bp, Artificial; identical to SEQ ID NO: 444954
  Synthetic oligonucleotide

SEQ ID NO: 597691 - DNA, 55 bp, Artificial; identical to SEQ ID NO: 444956
  Synthetic oligonucleotide

SEQ ID NO: 597692 - DNA, 55 bp, Artificial; identical to SEQ ID NO: 444958
  Synthetic oligonucleotide

SEQ ID NO: 597693 - DNA, 56 bp, Artificial; identical to SEQ ID NO: 444963
  Synthetic oligonucleotide

SEQ ID NO: 597694 - DNA, 57 bp, Artificial; identical to SEQ ID NO: 444965
  Synthetic oligonucleotide

SEQ ID NO: 597695 - DNA, 59 bp, Artificial; identical to SEQ ID NO: 444966
  Synthetic oligonucleotide

SEQ ID NO: 597696 - DNA, 56 bp, Artificial; identical to SEQ ID NO: 444967
  Synthetic oligonucleotide

SEQ ID NO: 597697 - DNA, 56 bp, Artificial; identical to SEQ ID NO: 444968
  Synthetic oligonucleotide

SEQ ID NO: 597698 - DNA, 57 bp, Artificial; identical to SEQ ID NO: 444970
  Synthetic oligonucleotide

SEQ ID NO: 597699 - DNA, 57 bp, Artificial; identical to SEQ ID NO: 444975
  Synthetic oligonucleotide

SEQ ID NO: 597700 - DNA, 55 bp, Artificial; identical to SEQ ID NO: 444976
  Synthetic oligonucleotide

SEQ ID NO: 597701 - DNA, 55 bp, Artificial; identical to SEQ ID NO: 444987
  Synthetic oligonucleotide

SEQ ID NO: 597702 - DNA, 60 bp, Artificial; identical to SEQ ID NO: 14078
  Synthetic oligonucleotide

SEQ ID NO: 597703 - DNA, 50 bp, Artificial; identical to SEQ ID NO: 444988
  Synthetic oligonucleotide

SEQ ID NO: 597704 - DNA, 60 bp, Artificial; identical to SEQ ID NO: 444989
  Synthetic oligonucleotide

SEQ ID NO: 597705 - DNA, 60 bp, Artificial; identical to SEQ ID NO: 444990
  Synthetic oligonucleotide

SEQ ID NO: 597706 - DNA, 55 bp, Artificial; identical to SEQ ID NO: 444993
  Synthetic oligonucleotide

SEQ ID NO: 597707 - DNA, 55 bp, Artificial; identical to SEQ ID NO: 444994
  Synthetic oligonucleotide

SEQ ID NO: 597708 - DNA, 55 bp, Artificial; identical to SEQ ID NO: 444995
  Synthetic oligonucleotide

SEQ ID NO: 597709 - DNA, 60 bp, Artificial; identical to SEQ ID NO: 444998
  Synthetic oligonucleotide

SEQ ID NO: 597710 - DNA, 56 bp, Artificial; identical to SEQ ID NO: 445000
  Synthetic oligonucleotide

SEQ ID NO: 597711 - DNA, 60 bp, Artificial; identical to SEQ ID NO: 445002
  Synthetic oligonucleotide

SEQ ID NO: 597712 - DNA, 57 bp, Artificial; identical to SEQ ID NO: 445004
  Synthetic oligonucleotide

SEQ ID NO: 597713 - DNA, 58 bp, Artificial; identical to SEQ ID NO: 445005
  Synthetic oligonucleotide

SEQ ID NO: 597714 - DNA, 58 bp, Artificial; identical to SEQ ID NO: 445006
  Synthetic oligonucleotide

SEQ ID NO: 597715 - DNA, 60 bp, Artificial; identical to SEQ ID NO: 445007
  Synthetic oligonucleotide

SEQ ID NO: 597716 - DNA, 52 bp, Artificial; identical to SEQ ID NO: 445009
  Synthetic oligonucleotide

SEQ ID NO: 597717 - DNA, 51 bp, Artificial; identical to SEQ ID NO: 445010
  Synthetic oligonucleotide

SEQ ID NO: 597718 - DNA, 55 bp, Artificial; identical to SEQ ID NO: 445011
  Synthetic oligonucleotide

SEQ ID NO: 597719 - DNA, 55 bp, Artificial; identical to SEQ ID NO: 445013
  Synthetic oligonucleotide

SEQ ID NO: 597720 - DNA, 55 bp, Artificial; identical to SEQ ID NO: 445014
  Synthetic oligonucleotide

SEQ ID NO: 597721 - DNA, 60 bp, Artificial; identical to SEQ ID NO: 7982
  Synthetic oligonucleotide

SEQ ID NO: 597722 - DNA, 59 bp, Artificial; identical to SEQ ID NO: 445015
  Synthetic oligonucleotide

SEQ ID NO: 597723 - DNA, 55 bp, Artificial; identical to SEQ ID NO: 445016
  Synthetic oligonucleotide

SEQ ID NO: 597724 - DNA, 55 bp, Artificial; identical to SEQ ID NO: 445017
  Synthetic oligonucleotide

SEQ ID NO: 597725 - DNA, 54 bp, Artificial; identical to SEQ ID NO: 445018
  Synthetic oligonucleotide

SEQ ID NO: 597726 - DNA, 55 bp, Artificial; identical to SEQ ID NO: 445020
  Synthetic oligonucleotide

SEQ ID NO: 597727 - DNA, 50 bp, Artificial; identical to SEQ ID NO: 445022
  Synthetic oligonucleotide

SEQ ID NO: 597728 - DNA, 54 bp, Artificial; identical to SEQ ID NO: 445024
  Synthetic oligonucleotide

SEQ ID NO: 597729 - DNA, 55 bp, Artificial; identical to SEQ ID NO: 8777
  Synthetic oligonucleotide

SEQ ID NO: 597730 - DNA, 59 bp, Artificial; identical to SEQ ID NO: 445025
  Synthetic oligonucleotide

SEQ ID NO: 597731 - DNA, 54 bp, Artificial; identical to SEQ ID NO: 445027
  Synthetic oligonucleotide

SEQ ID NO: 597732 - DNA, 56 bp, Artificial; identical to SEQ ID NO: 445028
  Synthetic oligonucleotide

SEQ ID NO: 597733 - DNA, 55 bp, Artificial; identical to SEQ ID NO: 445029
  Synthetic oligonucleotide

SEQ ID NO: 597734 - DNA, 55 bp, Artificial; identical to SEQ ID NO: 445030
  Synthetic oligonucleotide

SEQ ID NO: 597735 - DNA, 55 bp, Artificial; identical to SEQ ID NO: 9219
  Synthetic oligonucleotide

SEQ ID NO: 597736 - DNA, 55 bp, Artificial; identical to SEQ ID NO: 445034
  Synthetic oligonucleotide

SEQ ID NO: 597737 - DNA, 51 bp, Artificial; identical to SEQ ID NO: 445035
  Synthetic oligonucleotide

SEQ ID NO: 597738 - DNA, 60 bp, Artificial; identical to SEQ ID NO: 445036
  Synthetic oligonucleotide

SEQ ID NO: 597739 - DNA, 53 bp, Artificial; identical to SEQ ID NO: 445038
  Synthetic oligonucleotide

SEQ ID NO: 597740 - DNA, 60 bp, Artificial; identical to SEQ ID NO: 445045
  Synthetic oligonucleotide

SEQ ID NO: 597741 - DNA, 60 bp, Artificial; identical to SEQ ID NO: 445049
  Synthetic oligonucleotide

SEQ ID NO: 597742 - DNA, 60 bp, Artificial; identical to SEQ ID NO: 445054
  Synthetic oligonucleotide

SEQ ID NO: 597743 - DNA, 55 bp, Artificial; identical to SEQ ID NO: 445055
  Synthetic oligonucleotide

SEQ ID NO: 597744 - DNA, 55 bp, Artificial; identical to SEQ ID NO: 445058
  Synthetic oligonucleotide

SEQ ID NO: 597745 - DNA, 58 bp, Artificial; identical to SEQ ID NO: 445061
  Synthetic oligonucleotide

SEQ ID NO: 597746 - DNA, 55 bp, Artificial; identical to SEQ ID NO: 445066
  Synthetic oligonucleotide

SEQ ID NO: 597747 - DNA, 56 bp, Artificial; identical to SEQ ID NO: 445076
  Synthetic oligonucleotide

SEQ ID NO: 597748 - DNA, 58 bp, Artificial; identical to SEQ ID NO: 445077
  Synthetic oligonucleotide

SEQ ID NO: 597749 - DNA, 59 bp, Artificial; identical to SEQ ID NO: 445078
  Synthetic oligonucleotide

SEQ ID NO: 597750 - DNA, 56 bp, Artificial; identical to SEQ ID NO: 445080
  Synthetic oligonucleotide

SEQ ID NO: 597751 - DNA, 55 bp, Artificial; identical to SEQ ID NO: 445081
  Synthetic oligonucleotide

SEQ ID NO: 597752 - DNA, 56 bp, Artificial; identical to SEQ ID NO: 445082
  Synthetic oligonucleotide

SEQ ID NO: 597753 - DNA, 55 bp, Artificial; identical to SEQ ID NO: 445086
  Synthetic oligonucleotide

SEQ ID NO: 597754 - DNA, 60 bp, Artificial; identical to SEQ ID NO: 445088
  Synthetic oligonucleotide

SEQ ID NO: 597755 - DNA, 58 bp, Artificial; identical to SEQ ID NO: 445090
  Synthetic oligonucleotide

SEQ ID NO: 597756 - DNA, 60 bp, Artificial; identical to SEQ ID NO: 445092
  Synthetic oligonucleotide

SEQ ID NO: 597757 - DNA, 59 bp, Artificial; identical to SEQ ID NO: 445095
  Synthetic oligonucleotide

SEQ ID NO: 597758 - DNA, 59 bp, Artificial; identical to SEQ ID NO: 445096
  Synthetic oligonucleotide

SEQ ID NO: 597759 - DNA, 57 bp, Artificial; identical to SEQ ID NO: 445097
  Synthetic oligonucleotide

SEQ ID NO: 597760 - DNA, 60 bp, Artificial; identical to SEQ ID NO: 445099
  Synthetic oligonucleotide

SEQ ID NO: 597761 - DNA, 59 bp, Artificial; identical to SEQ ID NO: 445101
  Synthetic oligonucleotide

SEQ ID NO: 597762 - DNA, 60 bp, Artificial; identical to SEQ ID NO: 445104
  Synthetic oligonucleotide

SEQ ID NO: 597763 - DNA, 55 bp, Artificial; identical to SEQ ID NO: 445107
  Synthetic oligonucleotide

SEQ ID NO: 597764 - DNA, 56 bp, Artificial; identical to SEQ ID NO: 445108
  Synthetic oligonucleotide

SEQ ID NO: 597765 - DNA, 55 bp, Artificial; identical to SEQ ID NO: 445112
  Synthetic oligonucleotide

SEQ ID NO: 597766 - DNA, 60 bp, Artificial; identical to SEQ ID NO: 445113
  Synthetic oligonucleotide

SEQ ID NO: 597767 - DNA, 57 bp, Artificial; identical to SEQ ID NO: 445117
  Synthetic oligonucleotide

SEQ ID NO: 597768 - DNA, 60 bp, Artificial; identical to SEQ ID NO: 9833
  Synthetic oligonucleotide

SEQ ID NO: 597769 - DNA, 55 bp, Artificial; identical to SEQ ID NO: 445132
  Synthetic oligonucleotide

SEQ ID NO: 597770 - DNA, 55 bp, Artificial; identical to SEQ ID NO: 445135
  Synthetic oligonucleotide

SEQ ID NO: 597771 - DNA, 53 bp, Artificial; identical to SEQ ID NO: 445137
  Synthetic oligonucleotide

SEQ ID NO: 597772 - DNA, 50 bp, Artificial; identical to SEQ ID NO: 445139
  Synthetic oligonucleotide

SEQ ID NO: 597773 - DNA, 60 bp, Artificial; identical to SEQ ID NO: 445144
  Synthetic oligonucleotide

SEQ ID NO: 597774 - DNA, 60 bp, Artificial; identical to SEQ ID NO: 445145
  Synthetic oligonucleotide

SEQ ID NO: 597775 - DNA, 55 bp, Artificial; identical to SEQ ID NO: 445146
  Synthetic oligonucleotide

SEQ ID NO: 597776 - DNA, 52 bp, Artificial; identical to SEQ ID NO: 445147
  Synthetic oligonucleotide

SEQ ID NO: 597777 - DNA, 59 bp, Artificial; identical to SEQ ID NO: 445148
  Synthetic oligonucleotide

SEQ ID NO: 597778 - DNA, 59 bp, Artificial; identical to SEQ ID NO: 445149
  Synthetic oligonucleotide

SEQ ID NO: 597779 - DNA, 55 bp, Artificial; identical to SEQ ID NO: 445151
  Synthetic oligonucleotide

SEQ ID NO: 597780 - DNA, 58 bp, Artificial; identical to SEQ ID NO: 445156
  Synthetic oligonucleotide

SEQ ID NO: 597781 - DNA, 56 bp, Artificial; identical to SEQ ID NO: 445157
  Synthetic oligonucleotide

SEQ ID NO: 597782 - DNA, 60 bp, Artificial; identical to SEQ ID NO: 445158
  Synthetic oligonucleotide

SEQ ID NO: 597783 - DNA, 54 bp, Artificial; identical to SEQ ID NO: 445161
  Synthetic oligonucleotide

SEQ ID NO: 597784 - DNA, 55 bp, Artificial; identical to SEQ ID NO: 445162
  Synthetic oligonucleotide

SEQ ID NO: 597785 - DNA, 58 bp, Artificial; identical to SEQ ID NO: 445163
  Synthetic oligonucleotide

SEQ ID NO: 597786 - DNA, 57 bp, Artificial; identical to SEQ ID NO: 18800
  Synthetic oligonucleotide

SEQ ID NO: 597787 - DNA, 58 bp, Artificial; identical to SEQ ID NO: 19868
  Synthetic oligonucleotide

SEQ ID NO: 597788 - DNA, 51 bp, Artificial; identical to SEQ ID NO: 445169
  Synthetic oligonucleotide

SEQ ID NO: 597789 - DNA, 59 bp, Artificial; identical to SEQ ID NO: 445174
  Synthetic oligonucleotide

SEQ ID NO: 597790 - DNA, 59 bp, Artificial; identical to SEQ ID NO: 445175
  Synthetic oligonucleotide

SEQ ID NO: 597791 - DNA, 60 bp, Artificial; identical to SEQ ID NO: 445177
  Synthetic oligonucleotide

SEQ ID NO: 597792 - DNA, 60 bp, Artificial; identical to SEQ ID NO: 445179
  Synthetic oligonucleotide

SEQ ID NO: 597793 - DNA, 55 bp, Artificial; identical to SEQ ID NO: 445180
  Synthetic oligonucleotide

SEQ ID NO: 597794 - DNA, 55 bp, Artificial; identical to SEQ ID NO: 445181
  Synthetic oligonucleotide

SEQ ID NO: 597795 - DNA, 52 bp, Artificial; identical to SEQ ID NO: 445185
  Synthetic oligonucleotide

SEQ ID NO: 597796 - DNA, 60 bp, Artificial; identical to SEQ ID NO: 445186
  Synthetic oligonucleotide

SEQ ID NO: 597797 - DNA, 55 bp, Artificial; identical to SEQ ID NO: 445189
  Synthetic oligonucleotide

SEQ ID NO: 597798 - DNA, 55 bp, Artificial; identical to SEQ ID NO: 445190
  Synthetic oligonucleotide

SEQ ID NO: 597799 - DNA, 58 bp, Artificial; identical to SEQ ID NO: 445192
  Synthetic oligonucleotide

SEQ ID NO: 597800 - DNA, 54 bp, Artificial; identical to SEQ ID NO: 445197
  Synthetic oligonucleotide

SEQ ID NO: 597801 - DNA, 54 bp, Artificial; identical to SEQ ID NO: 445206
  Synthetic oligonucleotide

SEQ ID NO: 597802 - DNA, 55 bp, Artificial; identical to SEQ ID NO: 445207
  Synthetic oligonucleotide

SEQ ID NO: 597803 - DNA, 58 bp, Artificial; identical to SEQ ID NO: 17595
  Synthetic oligonucleotide

SEQ ID NO: 597804 - DNA, 60 bp, Artificial; identical to SEQ ID NO: 9700
  Synthetic oligonucleotide

SEQ ID NO: 597805 - DNA, 55 bp, Artificial; identical to SEQ ID NO: 445210
  Synthetic oligonucleotide

SEQ ID NO: 597806 - DNA, 59 bp, Artificial; identical to SEQ ID NO: 445211
  Synthetic oligonucleotide

SEQ ID NO: 597807 - DNA, 58 bp, Artificial; identical to SEQ ID NO: 445212
  Synthetic oligonucleotide

SEQ ID NO: 597808 - DNA, 55 bp, Artificial; identical to SEQ ID NO: 445213
  Synthetic oligonucleotide

SEQ ID NO: 597809 - DNA, 60 bp, Artificial; identical to SEQ ID NO: 445215
  Synthetic oligonucleotide

SEQ ID NO: 597810 - DNA, 60 bp, Artificial; identical to SEQ ID NO: 445216
  Synthetic oligonucleotide

SEQ ID NO: 597811 - DNA, 60 bp, Artificial; identical to SEQ ID NO: 445219
  Synthetic oligonucleotide

SEQ ID NO: 597812 - DNA, 58 bp, Artificial; identical to SEQ ID NO: 18310
  Synthetic oligonucleotide

SEQ ID NO: 597813 - DNA, 60 bp, Artificial; identical to SEQ ID NO: 445222
  Synthetic oligonucleotide

SEQ ID NO: 597814 - DNA, 51 bp, Artificial; identical to SEQ ID NO: 445223
  Synthetic oligonucleotide

SEQ ID NO: 597815 - DNA, 53 bp, Artificial; identical to SEQ ID NO: 445224
  Synthetic oligonucleotide

SEQ ID NO: 597816 - DNA, 55 bp, Artificial; identical to SEQ ID NO: 445225
  Synthetic oligonucleotide

SEQ ID NO: 597817 - DNA, 55 bp, Artificial; identical to SEQ ID NO: 445227
  Synthetic oligonucleotide

SEQ ID NO: 597818 - DNA, 55 bp, Artificial; identical to SEQ ID NO: 445228
  Synthetic oligonucleotide

SEQ ID NO: 597819 - DNA, 50 bp, Artificial; identical to SEQ ID NO: 445231
  Synthetic oligonucleotide

SEQ ID NO: 597820 - DNA, 55 bp, Artificial; identical to SEQ ID NO: 445234
  Synthetic oligonucleotide

SEQ ID NO: 597821 - DNA, 60 bp, Artificial; identical to SEQ ID NO: 12164
  Synthetic oligonucleotide

SEQ ID NO: 597822 - DNA, 55 bp, Artificial; identical to SEQ ID NO: 445243
  Synthetic oligonucleotide

SEQ ID NO: 597823 - DNA, 54 bp, Artificial; identical to SEQ ID NO: 445250
  Synthetic oligonucleotide

SEQ ID NO: 597824 - DNA, 58 bp, Artificial; identical to SEQ ID NO: 445253
  Synthetic oligonucleotide

SEQ ID NO: 597825 - DNA, 55 bp, Artificial; identical to SEQ ID NO: 445256
  Synthetic oligonucleotide

SEQ ID NO: 597826 - DNA, 55 bp, Artificial; identical to SEQ ID NO: 445259
  Synthetic oligonucleotide

SEQ ID NO: 597827 - DNA, 55 bp, Artificial; identical to SEQ ID NO: 445266
  Synthetic oligonucleotide

SEQ ID NO: 597828 - DNA, 59 bp, Artificial; identical to SEQ ID NO: 445268
  Synthetic oligonucleotide

SEQ ID NO: 597829 - DNA, 55 bp, Artificial; identical to SEQ ID NO: 445272
  Synthetic oligonucleotide

SEQ ID NO: 597830 - DNA, 55 bp, Artificial; identical to SEQ ID NO: 445275
  Synthetic oligonucleotide

SEQ ID NO: 597831 - DNA, 56 bp, Artificial; identical to SEQ ID NO: 445278
  Synthetic oligonucleotide

SEQ ID NO: 597832 - DNA, 55 bp, Artificial; identical to SEQ ID NO: 445280
  Synthetic oligonucleotide

SEQ ID NO: 597833 - DNA, 56 bp, Artificial; identical to SEQ ID NO: 445281
  Synthetic oligonucleotide

SEQ ID NO: 597834 - DNA, 60 bp, Artificial; identical to SEQ ID NO: 445285
  Synthetic oligonucleotide

SEQ ID NO: 597835 - DNA, 55 bp, Artificial; identical to SEQ ID NO: 445286
  Synthetic oligonucleotide

SEQ ID NO: 597836 - DNA, 59 bp, Artificial; identical to SEQ ID NO: 445288
  Synthetic oligonucleotide

SEQ ID NO: 597837 - DNA, 50 bp, Artificial; identical to SEQ ID NO: 445290
  Synthetic oligonucleotide

SEQ ID NO: 597838 - DNA, 55 bp, Artificial; identical to SEQ ID NO: 445291
  Synthetic oligonucleotide

SEQ ID NO: 597839 - DNA, 53 bp, Artificial; identical to SEQ ID NO: 445294
  Synthetic oligonucleotide

SEQ ID NO: 597840 - DNA, 55 bp, Artificial; identical to SEQ ID NO: 445295
  Synthetic oligonucleotide

SEQ ID NO: 597841 - DNA, 52 bp, Artificial; identical to SEQ ID NO: 445299
  Synthetic oligonucleotide

SEQ ID NO: 597842 - DNA, 50 bp, Artificial; identical to SEQ ID NO: 445301
  Synthetic oligonucleotide

SEQ ID NO: 597843 - DNA, 55 bp, Artificial; identical to SEQ ID NO: 445303
  Synthetic oligonucleotide

SEQ ID NO: 597844 - DNA, 55 bp, Artificial; identical to SEQ ID NO: 445315
  Synthetic oligonucleotide

SEQ ID NO: 597845 - DNA, 50 bp, Artificial; identical to SEQ ID NO: 445316
  Synthetic oligonucleotide

SEQ ID NO: 597846 - DNA, 54 bp, Artificial; identical to SEQ ID NO: 445319
  Synthetic oligonucleotide

SEQ ID NO: 597847 - DNA, 55 bp, Artificial; identical to SEQ ID NO: 445321
  Synthetic oligonucleotide

SEQ ID NO: 597848 - DNA, 54 bp, Artificial; identical to SEQ ID NO: 445322
  Synthetic oligonucleotide

SEQ ID NO: 597849 - DNA, 55 bp, Artificial; identical to SEQ ID NO: 445325
  Synthetic oligonucleotide

SEQ ID NO: 597850 - DNA, 60 bp, Artificial; identical to SEQ ID NO: 445333
  Synthetic oligonucleotide

SEQ ID NO: 597851 - DNA, 53 bp, Artificial; identical to SEQ ID NO: 445337
  Synthetic oligonucleotide

SEQ ID NO: 597852 - DNA, 58 bp, Artificial; identical to SEQ ID NO: 445341
  Synthetic oligonucleotide

SEQ ID NO: 597853 - DNA, 55 bp, Artificial; identical to SEQ ID NO: 445342
  Synthetic oligonucleotide

SEQ ID NO: 597854 - DNA, 55 bp, Artificial; identical to SEQ ID NO: 445345
  Synthetic oligonucleotide

SEQ ID NO: 597855 - DNA, 60 bp, Artificial; identical to SEQ ID NO: 445346
  Synthetic oligonucleotide

SEQ ID NO: 597856 - DNA, 55 bp, Artificial; identical to SEQ ID NO: 445348
  Synthetic oligonucleotide

SEQ ID NO: 597857 - DNA, 60 bp, Artificial; identical to SEQ ID NO: 445351
  Synthetic oligonucleotide

SEQ ID NO: 597858 - DNA, 55 bp, Artificial; identical to SEQ ID NO: 445352
  Synthetic oligonucleotide

SEQ ID NO: 597859 - DNA, 52 bp, Artificial; identical to SEQ ID NO: 445355
  Synthetic oligonucleotide

SEQ ID NO: 597860 - DNA, 55 bp, Artificial; identical to SEQ ID NO: 445357
  Synthetic oligonucleotide

SEQ ID NO: 597861 - DNA, 55 bp, Artificial; identical to SEQ ID NO: 445360
  Synthetic oligonucleotide

SEQ ID NO: 597862 - DNA, 60 bp, Artificial; identical to SEQ ID NO: 445362
  Synthetic oligonucleotide

SEQ ID NO: 597863 - DNA, 58 bp, Artificial; identical to SEQ ID NO: 445365
  Synthetic oligonucleotide

SEQ ID NO: 597864 - DNA, 52 bp, Artificial; identical to SEQ ID NO: 445369
  Synthetic oligonucleotide

SEQ ID NO: 597865 - DNA, 55 bp, Artificial; identical to SEQ ID NO: 13474
  Synthetic oligonucleotide

SEQ ID NO: 597866 - DNA, 54 bp, Artificial; identical to SEQ ID NO: 445371
  Synthetic oligonucleotide

SEQ ID NO: 597867 - DNA, 50 bp, Artificial; identical to SEQ ID NO: 445378
  Synthetic oligonucleotide

SEQ ID NO: 597868 - DNA, 60 bp, Artificial; identical to SEQ ID NO: 445379
  Synthetic oligonucleotide

SEQ ID NO: 597869 - DNA, 55 bp, Artificial; identical to SEQ ID NO: 445380
  Synthetic oligonucleotide

SEQ ID NO: 597870 - DNA, 55 bp, Artificial; identical to SEQ ID NO: 445382
  Synthetic oligonucleotide

SEQ ID NO: 597871 - DNA, 50 bp, Artificial; identical to SEQ ID NO: 445383
  Synthetic oligonucleotide

SEQ ID NO: 597872 - DNA, 57 bp, Artificial; identical to SEQ ID NO: 445384
  Synthetic oligonucleotide

SEQ ID NO: 597873 - DNA, 60 bp, Artificial; identical to SEQ ID NO: 445387
  Synthetic oligonucleotide

SEQ ID NO: 597874 - DNA, 55 bp, Artificial; identical to SEQ ID NO: 445389
  Synthetic oligonucleotide

SEQ ID NO: 597875 - DNA, 51 bp, Artificial; identical to SEQ ID NO: 445390
  Synthetic oligonucleotide

SEQ ID NO: 597876 - DNA, 50 bp, Artificial; identical to SEQ ID NO: 445393
  Synthetic oligonucleotide

SEQ ID NO: 597877 - DNA, 58 bp, Artificial; identical to SEQ ID NO: 445397
  Synthetic oligonucleotide

SEQ ID NO: 597878 - DNA, 57 bp, Artificial; identical to SEQ ID NO: 445401
  Synthetic oligonucleotide

SEQ ID NO: 597879 - DNA, 53 bp, Artificial; identical to SEQ ID NO: 445403
  Synthetic oligonucleotide

SEQ ID NO: 597880 - DNA, 55 bp, Artificial; identical to SEQ ID NO: 445404
  Synthetic oligonucleotide

SEQ ID NO: 597881 - DNA, 59 bp, Artificial; identical to SEQ ID NO: 445411
  Synthetic oligonucleotide

SEQ ID NO: 597882 - DNA, 55 bp, Artificial; identical to SEQ ID NO: 445413
  Synthetic oligonucleotide

SEQ ID NO: 597883 - DNA, 55 bp, Artificial; identical to SEQ ID NO: 445416
  Synthetic oligonucleotide

SEQ ID NO: 597884 - DNA, 51 bp, Artificial; identical to SEQ ID NO: 445417
  Synthetic oligonucleotide

SEQ ID NO: 597885 - DNA, 54 bp, Artificial; identical to SEQ ID NO: 445418
  Synthetic oligonucleotide

SEQ ID NO: 597886 - DNA, 55 bp, Artificial; identical to SEQ ID NO: 445421
  Synthetic oligonucleotide

SEQ ID NO: 597887 - DNA, 60 bp, Artificial; identical to SEQ ID NO: 445422
  Synthetic oligonucleotide

SEQ ID NO: 597888 - DNA, 57 bp, Artificial; identical to SEQ ID NO: 445423
  Synthetic oligonucleotide

SEQ ID NO: 597889 - DNA, 57 bp, Artificial; identical to SEQ ID NO: 445427
  Synthetic oligonucleotide

SEQ ID NO: 597890 - DNA, 55 bp, Artificial; identical to SEQ ID NO: 445428
  Synthetic oligonucleotide

SEQ ID NO: 597891 - DNA, 55 bp, Artificial; identical to SEQ ID NO: 445433
  Synthetic oligonucleotide

SEQ ID NO: 597892 - DNA, 60 bp, Artificial; identical to SEQ ID NO: 445441
  Synthetic oligonucleotide

SEQ ID NO: 597893 - DNA, 51 bp, Artificial; identical to SEQ ID NO: 445442
  Synthetic oligonucleotide

SEQ ID NO: 597894 - DNA, 60 bp, Artificial; identical to SEQ ID NO: 445445
  Synthetic oligonucleotide

SEQ ID NO: 597895 - DNA, 54 bp, Artificial; identical to SEQ ID NO: 445446
  Synthetic oligonucleotide

SEQ ID NO: 597896 - DNA, 59 bp, Artificial; identical to SEQ ID NO: 445448
  Synthetic oligonucleotide

SEQ ID NO: 597897 - DNA, 60 bp, Artificial; identical to SEQ ID NO: 445449
  Synthetic oligonucleotide

SEQ ID NO: 597898 - DNA, 53 bp, Artificial; identical to SEQ ID NO: 445450
  Synthetic oligonucleotide

SEQ ID NO: 597899 - DNA, 58 bp, Artificial; identical to SEQ ID NO: 445453
  Synthetic oligonucleotide

SEQ ID NO: 597900 - DNA, 58 bp, Artificial; identical to SEQ ID NO: 445456
  Synthetic oligonucleotide

SEQ ID NO: 597901 - DNA, 55 bp, Artificial; identical to SEQ ID NO: 445457
  Synthetic oligonucleotide

SEQ ID NO: 597902 - DNA, 60 bp, Artificial; identical to SEQ ID NO: 15043
  Synthetic oligonucleotide

SEQ ID NO: 597903 - DNA, 58 bp, Artificial; identical to SEQ ID NO: 445459
  Synthetic oligonucleotide

SEQ ID NO: 597904 - DNA, 58 bp, Artificial; identical to SEQ ID NO: 445463
  Synthetic oligonucleotide

SEQ ID NO: 597905 - DNA, 54 bp, Artificial; identical to SEQ ID NO: 445467
  Synthetic oligonucleotide

SEQ ID NO: 597906 - DNA, 55 bp, Artificial; identical to SEQ ID NO: 445468
  Synthetic oligonucleotide

SEQ ID NO: 597907 - DNA, 57 bp, Artificial; identical to SEQ ID NO: 445469
  Synthetic oligonucleotide

SEQ ID NO: 597908 - DNA, 60 bp, Artificial; identical to SEQ ID NO: 445471
  Synthetic oligonucleotide

SEQ ID NO: 597909 - DNA, 59 bp, Artificial; identical to SEQ ID NO: 445475
  Synthetic oligonucleotide

SEQ ID NO: 597910 - DNA, 52 bp, Artificial; identical to SEQ ID NO: 445476
  Synthetic oligonucleotide

SEQ ID NO: 597911 - DNA, 58 bp, Artificial; identical to SEQ ID NO: 445485
  Synthetic oligonucleotide

SEQ ID NO: 597912 - DNA, 59 bp, Artificial; identical to SEQ ID NO: 445487
  Synthetic oligonucleotide

SEQ ID NO: 597913 - DNA, 57 bp, Artificial; identical to SEQ ID NO: 445488
  Synthetic oligonucleotide

SEQ ID NO: 597914 - DNA, 55 bp, Artificial; identical to SEQ ID NO: 445492
  Synthetic oligonucleotide

SEQ ID NO: 597915 - DNA, 52 bp, Artificial; identical to SEQ ID NO: 445496
  Synthetic oligonucleotide

SEQ ID NO: 597916 - DNA, 55 bp, Artificial; identical to SEQ ID NO: 445499
  Synthetic oligonucleotide

SEQ ID NO: 597917 - DNA, 50 bp, Artificial; identical to SEQ ID NO: 445501
  Synthetic oligonucleotide

SEQ ID NO: 597918 - DNA, 55 bp, Artificial; identical to SEQ ID NO: 445502
  Synthetic oligonucleotide

SEQ ID NO: 597919 - DNA, 59 bp, Artificial; identical to SEQ ID NO: 445503
  Synthetic oligonucleotide

SEQ ID NO: 597920 - DNA, 50 bp, Artificial; identical to SEQ ID NO: 445504
  Synthetic oligonucleotide

SEQ ID NO: 597921 - DNA, 60 bp, Artificial; identical to SEQ ID NO: 445506
  Synthetic oligonucleotide

SEQ ID NO: 597922 - DNA, 58 bp, Artificial; identical to SEQ ID NO: 445509
  Synthetic oligonucleotide

SEQ ID NO: 597923 - DNA, 57 bp, Artificial; identical to SEQ ID NO: 445512
  Synthetic oligonucleotide

SEQ ID NO: 597924 - DNA, 55 bp, Artificial; identical to SEQ ID NO: 6136
  Synthetic oligonucleotide

SEQ ID NO: 597925 - DNA, 60 bp, Artificial; identical to SEQ ID NO: 445517
  Synthetic oligonucleotide

SEQ ID NO: 597926 - DNA, 60 bp, Artificial; identical to SEQ ID NO: 8124
  Synthetic oligonucleotide

SEQ ID NO: 597927 - DNA, 55 bp, Artificial; identical to SEQ ID NO: 445524
  Synthetic oligonucleotide

SEQ ID NO: 597928 - DNA, 51 bp, Artificial; identical to SEQ ID NO: 445525
  Synthetic oligonucleotide

SEQ ID NO: 597929 - DNA, 59 bp, Artificial; identical to SEQ ID NO: 445526
  Synthetic oligonucleotide

SEQ ID NO: 597930 - DNA, 55 bp, Artificial; identical to SEQ ID NO: 445529
  Synthetic oligonucleotide

SEQ ID NO: 597931 - DNA, 54 bp, Artificial; identical to SEQ ID NO: 445532
  Synthetic oligonucleotide

SEQ ID NO: 597932 - DNA, 58 bp, Artificial; identical to SEQ ID NO: 445535
  Synthetic oligonucleotide

SEQ ID NO: 597933 - DNA, 60 bp, Artificial; identical to SEQ ID NO: 445538
  Synthetic oligonucleotide

SEQ ID NO: 597934 - DNA, 60 bp, Artificial; identical to SEQ ID NO: 445539
  Synthetic oligonucleotide

SEQ ID NO: 597935 - DNA, 55 bp, Artificial; identical to SEQ ID NO: 445553
  Synthetic oligonucleotide

SEQ ID NO: 597936 - DNA, 60 bp, Artificial; identical to SEQ ID NO: 9205
  Synthetic oligonucleotide

SEQ ID NO: 597937 - DNA, 55 bp, Artificial; identical to SEQ ID NO: 445562
  Synthetic oligonucleotide

SEQ ID NO: 597938 - DNA, 55 bp, Artificial; identical to SEQ ID NO: 445566
  Synthetic oligonucleotide

SEQ ID NO: 597939 - DNA, 56 bp, Artificial; identical to SEQ ID NO: 445568
  Synthetic oligonucleotide

SEQ ID NO: 597940 - DNA, 55 bp, Artificial; identical to SEQ ID NO: 445575
  Synthetic oligonucleotide

SEQ ID NO: 597941 - DNA, 59 bp, Artificial; identical to SEQ ID NO: 445578
  Synthetic oligonucleotide

SEQ ID NO: 597942 - DNA, 60 bp, Artificial; identical to SEQ ID NO: 445580
  Synthetic oligonucleotide

SEQ ID NO: 597943 - DNA, 55 bp, Artificial; identical to SEQ ID NO: 445581
  Synthetic oligonucleotide

SEQ ID NO: 597944 - DNA, 52 bp, Artificial; identical to SEQ ID NO: 445583
  Synthetic oligonucleotide

SEQ ID NO: 597945 - DNA, 60 bp, Artificial; identical to SEQ ID NO: 445584
  Synthetic oligonucleotide

SEQ ID NO: 597946 - DNA, 52 bp, Artificial; identical to SEQ ID NO: 445588
  Synthetic oligonucleotide

SEQ ID NO: 597947 - DNA, 59 bp, Artificial; identical to SEQ ID NO: 445593
  Synthetic oligonucleotide

SEQ ID NO: 597948 - DNA, 55 bp, Artificial; identical to SEQ ID NO: 445594
  Synthetic oligonucleotide

SEQ ID NO: 597949 - DNA, 60 bp, Artificial; identical to SEQ ID NO: 445595
  Synthetic oligonucleotide

SEQ ID NO: 597950 - DNA, 55 bp, Artificial; identical to SEQ ID NO: 445597
  Synthetic oligonucleotide

SEQ ID NO: 597951 - DNA, 60 bp, Artificial; identical to SEQ ID NO: 445603
  Synthetic oligonucleotide

SEQ ID NO: 597952 - DNA, 58 bp, Artificial; identical to SEQ ID NO: 16525
  Synthetic oligonucleotide

SEQ ID NO: 597953 - DNA, 58 bp, Artificial; identical to SEQ ID NO: 445609
  Synthetic oligonucleotide

SEQ ID NO: 597954 - DNA, 55 bp, Artificial; identical to SEQ ID NO: 445617
  Synthetic oligonucleotide

SEQ ID NO: 597955 - DNA, 60 bp, Artificial; identical to SEQ ID NO: 445620
  Synthetic oligonucleotide

SEQ ID NO: 597956 - DNA, 60 bp, Artificial; identical to SEQ ID NO: 445622
  Synthetic oligonucleotide

SEQ ID NO: 597957 - DNA, 56 bp, Artificial; identical to SEQ ID NO: 445623
  Synthetic oligonucleotide

SEQ ID NO: 597958 - DNA, 55 bp, Artificial; identical to SEQ ID NO: 445624
  Synthetic oligonucleotide

SEQ ID NO: 597959 - DNA, 60 bp, Artificial; identical to SEQ ID NO: 445626
  Synthetic oligonucleotide

SEQ ID NO: 597960 - DNA, 55 bp, Artificial; identical to SEQ ID NO: 445630
  Synthetic oligonucleotide

SEQ ID NO: 597961 - DNA, 58 bp, Artificial; identical to SEQ ID NO: 445631
  Synthetic oligonucleotide

SEQ ID NO: 597962 - DNA, 55 bp, Artificial; identical to SEQ ID NO: 445634
  Synthetic oligonucleotide

SEQ ID NO: 597963 - DNA, 51 bp, Artificial; identical to SEQ ID NO: 445636
  Synthetic oligonucleotide

SEQ ID NO: 597964 - DNA, 55 bp, Artificial; identical to SEQ ID NO: 445639
  Synthetic oligonucleotide

SEQ ID NO: 597965 - DNA, 53 bp, Artificial; identical to SEQ ID NO: 445641
  Synthetic oligonucleotide

SEQ ID NO: 597966 - DNA, 56 bp, Artificial; identical to SEQ ID NO: 445643
  Synthetic oligonucleotide

SEQ ID NO: 597967 - DNA, 57 bp, Artificial; identical to SEQ ID NO: 445647
  Synthetic oligonucleotide

SEQ ID NO: 597968 - DNA, 60 bp, Artificial; identical to SEQ ID NO: 445649
  Synthetic oligonucleotide

SEQ ID NO: 597969 - DNA, 58 bp, Artificial; identical to SEQ ID NO: 445650
  Synthetic oligonucleotide

SEQ ID NO: 597970 - DNA, 57 bp, Artificial; identical to SEQ ID NO: 445658
  Synthetic oligonucleotide

SEQ ID NO: 597971 - DNA, 55 bp, Artificial; identical to SEQ ID NO: 445661
  Synthetic oligonucleotide

SEQ ID NO: 597972 - DNA, 58 bp, Artificial; identical to SEQ ID NO: 445665
  Synthetic oligonucleotide

SEQ ID NO: 597973 - DNA, 55 bp, Artificial; identical to SEQ ID NO: 445666
  Synthetic oligonucleotide

SEQ ID NO: 597974 - DNA, 60 bp, Artificial; identical to SEQ ID NO: 445669
  Synthetic oligonucleotide

SEQ ID NO: 597975 - DNA, 54 bp, Artificial; identical to SEQ ID NO: 445673
  Synthetic oligonucleotide

SEQ ID NO: 597976 - DNA, 52 bp, Artificial; identical to SEQ ID NO: 445679
  Synthetic oligonucleotide

SEQ ID NO: 597977 - DNA, 55 bp, Artificial; identical to SEQ ID NO: 445687
  Synthetic oligonucleotide

SEQ ID NO: 597978 - DNA, 59 bp, Artificial; identical to SEQ ID NO: 445688
  Synthetic oligonucleotide

SEQ ID NO: 597979 - DNA, 53 bp, Artificial; identical to SEQ ID NO: 445689
  Synthetic oligonucleotide

SEQ ID NO: 597980 - DNA, 56 bp, Artificial; identical to SEQ ID NO: 445694
  Synthetic oligonucleotide

SEQ ID NO: 597981 - DNA, 60 bp, Artificial; identical to SEQ ID NO: 445695
  Synthetic oligonucleotide

SEQ ID NO: 597982 - DNA, 54 bp, Artificial; identical to SEQ ID NO: 445697
  Synthetic oligonucleotide

SEQ ID NO: 597983 - DNA, 55 bp, Artificial; identical to SEQ ID NO: 445704
  Synthetic oligonucleotide

SEQ ID NO: 597984 - DNA, 53 bp, Artificial; identical to SEQ ID NO: 445706
  Synthetic oligonucleotide

SEQ ID NO: 597985 - DNA, 55 bp, Artificial; identical to SEQ ID NO: 18922
  Synthetic oligonucleotide

SEQ ID NO: 597986 - DNA, 48 bp, Artificial; identical to SEQ ID NO: 445712
  Synthetic oligonucleotide

SEQ ID NO: 597987 - DNA, 51 bp, Artificial; identical to SEQ ID NO: 445715
  Synthetic oligonucleotide

SEQ ID NO: 597988 - DNA, 52 bp, Artificial; identical to SEQ ID NO: 445718
  Synthetic oligonucleotide

SEQ ID NO: 597989 - DNA, 55 bp, Artificial; identical to SEQ ID NO: 445721
  Synthetic oligonucleotide

SEQ ID NO: 597990 - DNA, 60 bp, Artificial; identical to SEQ ID NO: 445722
  Synthetic oligonucleotide

SEQ ID NO: 597991 - DNA, 53 bp, Artificial; identical to SEQ ID NO: 445723
  Synthetic oligonucleotide

SEQ ID NO: 597992 - DNA, 58 bp, Artificial; identical to SEQ ID NO: 445726
  Synthetic oligonucleotide

SEQ ID NO: 597993 - DNA, 59 bp, Artificial; identical to SEQ ID NO: 18393
  Synthetic oligonucleotide

SEQ ID NO: 597994 - DNA, 57 bp, Artificial; identical to SEQ ID NO: 445727
  Synthetic oligonucleotide

SEQ ID NO: 597995 - DNA, 53 bp, Artificial; identical to SEQ ID NO: 445730
  Synthetic oligonucleotide

SEQ ID NO: 597996 - DNA, 59 bp, Artificial; identical to SEQ ID NO: 445732
  Synthetic oligonucleotide

SEQ ID NO: 597997 - DNA, 60 bp, Artificial; identical to SEQ ID NO: 445734
  Synthetic oligonucleotide

SEQ ID NO: 597998 - DNA, 56 bp, Artificial; identical to SEQ ID NO: 445735
  Synthetic oligonucleotide

SEQ ID NO: 597999 - DNA, 60 bp, Artificial; identical to SEQ ID NO: 445740
  Synthetic oligonucleotide

SEQ ID NO: 598000 - DNA, 60 bp, Artificial; identical to SEQ ID NO: 445742
  Synthetic oligonucleotide

SEQ ID NO: 598001 - DNA, 59 bp, Artificial; identical to SEQ ID NO: 445753
  Synthetic oligonucleotide

SEQ ID NO: 598002 - DNA, 52 bp, Artificial; identical to SEQ ID NO: 445755
  Synthetic oligonucleotide

SEQ ID NO: 598003 - DNA, 55 bp, Artificial; identical to SEQ ID NO: 445759
  Synthetic oligonucleotide

SEQ ID NO: 598004 - DNA, 54 bp, Artificial; identical to SEQ ID NO: 445762
  Synthetic oligonucleotide

SEQ ID NO: 598005 - DNA, 59 bp, Artificial; identical to SEQ ID NO: 445763
  Synthetic oligonucleotide

SEQ ID NO: 598006 - DNA, 57 bp, Artificial; identical to SEQ ID NO: 445765
  Synthetic oligonucleotide

SEQ ID NO: 598007 - DNA, 59 bp, Artificial; identical to SEQ ID NO: 445770
  Synthetic oligonucleotide

SEQ ID NO: 598008 - DNA, 51 bp, Artificial; identical to SEQ ID NO: 445773
  Synthetic oligonucleotide

SEQ ID NO: 598009 - DNA, 60 bp, Artificial; identical to SEQ ID NO: 445776
  Synthetic oligonucleotide

SEQ ID NO: 598010 - DNA, 59 bp, Artificial; identical to SEQ ID NO: 445777
  Synthetic oligonucleotide

SEQ ID NO: 598011 - DNA, 50 bp, Artificial; identical to SEQ ID NO: 445784
  Synthetic oligonucleotide

SEQ ID NO: 598012 - DNA, 55 bp, Artificial; identical to SEQ ID NO: 445795
  Synthetic oligonucleotide

SEQ ID NO: 598013 - DNA, 50 bp, Artificial; identical to SEQ ID NO: 445797
  Synthetic oligonucleotide

SEQ ID NO: 598014 - DNA, 52 bp, Artificial; identical to SEQ ID NO: 445798
  Synthetic oligonucleotide

SEQ ID NO: 598015 - DNA, 50 bp, Artificial; identical to SEQ ID NO: 445804
  Synthetic oligonucleotide

SEQ ID NO: 598016 - DNA, 60 bp, Artificial; identical to SEQ ID NO: 445808
  Synthetic oligonucleotide

SEQ ID NO: 598017 - DNA, 55 bp, Artificial; identical to SEQ ID NO: 445809
  Synthetic oligonucleotide

SEQ ID NO: 598018 - DNA, 57 bp, Artificial; identical to SEQ ID NO: 445815
  Synthetic oligonucleotide

SEQ ID NO: 598019 - DNA, 53 bp, Artificial; identical to SEQ ID NO: 445817
  Synthetic oligonucleotide

SEQ ID NO: 598020 - DNA, 55 bp, Artificial; identical to SEQ ID NO: 445818
  Synthetic oligonucleotide

SEQ ID NO: 598021 - DNA, 55 bp, Artificial; identical to SEQ ID NO: 445821
  Synthetic oligonucleotide

SEQ ID NO: 598022 - DNA, 57 bp, Artificial; identical to SEQ ID NO: 445823
  Synthetic oligonucleotide

SEQ ID NO: 598023 - DNA, 55 bp, Artificial; identical to SEQ ID NO: 445824
  Synthetic oligonucleotide

SEQ ID NO: 598024 - DNA, 55 bp, Artificial; identical to SEQ ID NO: 445825
  Synthetic oligonucleotide

SEQ ID NO: 598025 - DNA, 55 bp, Artificial; identical to SEQ ID NO: 445826
  Synthetic oligonucleotide

SEQ ID NO: 598026 - DNA, 53 bp, Artificial; identical to SEQ ID NO: 445828
  Synthetic oligonucleotide

SEQ ID NO: 598027 - DNA, 55 bp, Artificial; identical to SEQ ID NO: 445832
  Synthetic oligonucleotide

SEQ ID NO: 598028 - DNA, 55 bp, Artificial; identical to SEQ ID NO: 445834
  Synthetic oligonucleotide

SEQ ID NO: 598029 - DNA, 52 bp, Artificial; identical to SEQ ID NO: 445836
  Synthetic oligonucleotide

SEQ ID NO: 598030 - DNA, 60 bp, Artificial; identical to SEQ ID NO: 445837
  Synthetic oligonucleotide

SEQ ID NO: 598031 - DNA, 56 bp, Artificial; identical to SEQ ID NO: 445840
  Synthetic oligonucleotide

SEQ ID NO: 598032 - DNA, 52 bp, Artificial; identical to SEQ ID NO: 445842
  Synthetic oligonucleotide

SEQ ID NO: 598033 - DNA, 55 bp, Artificial; identical to SEQ ID NO: 445845
  Synthetic oligonucleotide

SEQ ID NO: 598034 - DNA, 60 bp, Artificial; identical to SEQ ID NO: 445849
  Synthetic oligonucleotide

SEQ ID NO: 598035 - DNA, 58 bp, Artificial; identical to SEQ ID NO: 445852
  Synthetic oligonucleotide

SEQ ID NO: 598036 - DNA, 58 bp, Artificial; identical to SEQ ID NO: 445855
  Synthetic oligonucleotide

SEQ ID NO: 598037 - DNA, 58 bp, Artificial; identical to SEQ ID NO: 445864
  Synthetic oligonucleotide

SEQ ID NO: 598038 - DNA, 55 bp, Artificial; identical to SEQ ID NO: 445867
  Synthetic oligonucleotide

SEQ ID NO: 598039 - DNA, 54 bp, Artificial; identical to SEQ ID NO: 445874
  Synthetic oligonucleotide

SEQ ID NO: 598040 - DNA, 52 bp, Artificial; identical to SEQ ID NO: 445876
  Synthetic oligonucleotide

SEQ ID NO: 598041 - DNA, 58 bp, Artificial; identical to SEQ ID NO: 445878
  Synthetic oligonucleotide

SEQ ID NO: 598042 - DNA, 56 bp, Artificial; identical to SEQ ID NO: 445879
  Synthetic oligonucleotide

SEQ ID NO: 598043 - DNA, 60 bp, Artificial; identical to SEQ ID NO: 445883
  Synthetic oligonucleotide

SEQ ID NO: 598044 - DNA, 57 bp, Artificial; identical to SEQ ID NO: 445885
  Synthetic oligonucleotide

SEQ ID NO: 598045 - DNA, 58 bp, Artificial; identical to SEQ ID NO: 445889
  Synthetic oligonucleotide

SEQ ID NO: 598046 - DNA, 54 bp, Artificial; identical to SEQ ID NO: 445890
  Synthetic oligonucleotide

SEQ ID NO: 598047 - DNA, 54 bp, Artificial; identical to SEQ ID NO: 445893
  Synthetic oligonucleotide

SEQ ID NO: 598048 - DNA, 55 bp, Artificial; identical to SEQ ID NO: 445894
  Synthetic oligonucleotide

SEQ ID NO: 598049 - DNA, 60 bp, Artificial; identical to SEQ ID NO: 445895
  Synthetic oligonucleotide

SEQ ID NO: 598050 - DNA, 55 bp, Artificial; identical to SEQ ID NO: 445896
  Synthetic oligonucleotide

SEQ ID NO: 598051 - DNA, 49 bp, Artificial; identical to SEQ ID NO: 18155
  Synthetic oligonucleotide

SEQ ID NO: 598052 - DNA, 57 bp, Artificial; identical to SEQ ID NO: 445900
  Synthetic oligonucleotide

SEQ ID NO: 598053 - DNA, 50 bp, Artificial; identical to SEQ ID NO: 445905
  Synthetic oligonucleotide

SEQ ID NO: 598054 - DNA, 60 bp, Artificial; identical to SEQ ID NO: 445906
  Synthetic oligonucleotide

SEQ ID NO: 598055 - DNA, 60 bp, Artificial; identical to SEQ ID NO: 445908
  Synthetic oligonucleotide

SEQ ID NO: 598056 - DNA, 55 bp, Artificial; identical to SEQ ID NO: 445913
  Synthetic oligonucleotide

SEQ ID NO: 598057 - DNA, 52 bp, Artificial; identical to SEQ ID NO: 445914
  Synthetic oligonucleotide

SEQ ID NO: 598058 - DNA, 60 bp, Artificial; identical to SEQ ID NO: 445921
  Synthetic oligonucleotide

SEQ ID NO: 598059 - DNA, 52 bp, Artificial; identical to SEQ ID NO: 445923
  Synthetic oligonucleotide

SEQ ID NO: 598060 - DNA, 58 bp, Artificial; identical to SEQ ID NO: 445926
  Synthetic oligonucleotide

SEQ ID NO: 598061 - DNA, 56 bp, Artificial; identical to SEQ ID NO: 445930
  Synthetic oligonucleotide

SEQ ID NO: 598062 - DNA, 50 bp, Artificial; identical to SEQ ID NO: 445932
  Synthetic oligonucleotide

SEQ ID NO: 598063 - DNA, 53 bp, Artificial; identical to SEQ ID NO: 445933
  Synthetic oligonucleotide

SEQ ID NO: 598064 - DNA, 60 bp, Artificial; identical to SEQ ID NO: 445934
  Synthetic oligonucleotide

SEQ ID NO: 598065 - DNA, 59 bp, Artificial; identical to SEQ ID NO: 445940
  Synthetic oligonucleotide

SEQ ID NO: 598066 - DNA, 57 bp, Artificial; identical to SEQ ID NO: 445941
  Synthetic oligonucleotide

SEQ ID NO: 598067 - DNA, 55 bp, Artificial; identical to SEQ ID NO: 445942
  Synthetic oligonucleotide

SEQ ID NO: 598068 - DNA, 60 bp, Artificial; identical to SEQ ID NO: 445944
  Synthetic oligonucleotide

SEQ ID NO: 598069 - DNA, 60 bp, Artificial; identical to SEQ ID NO: 445946
  Synthetic oligonucleotide

SEQ ID NO: 598070 - DNA, 54 bp, Artificial; identical to SEQ ID NO: 445947
  Synthetic oligonucleotide

SEQ ID NO: 598071 - DNA, 57 bp, Artificial; identical to SEQ ID NO: 445949
  Synthetic oligonucleotide

SEQ ID NO: 598072 - DNA, 52 bp, Artificial; identical to SEQ ID NO: 445950
  Synthetic oligonucleotide

SEQ ID NO: 598073 - DNA, 55 bp, Artificial; identical to SEQ ID NO: 445952
  Synthetic oligonucleotide

SEQ ID NO: 598074 - DNA, 55 bp, Artificial; identical to SEQ ID NO: 445953
  Synthetic oligonucleotide

SEQ ID NO: 598075 - DNA, 52 bp, Artificial; identical to SEQ ID NO: 445954
  Synthetic oligonucleotide

SEQ ID NO: 598076 - DNA, 56 bp, Artificial; identical to SEQ ID NO: 445962
  Synthetic oligonucleotide

SEQ ID NO: 598077 - DNA, 60 bp, Artificial; identical to SEQ ID NO: 445964
  Synthetic oligonucleotide

SEQ ID NO: 598078 - DNA, 57 bp, Artificial; identical to SEQ ID NO: 445966
  Synthetic oligonucleotide

SEQ ID NO: 598079 - DNA, 60 bp, Artificial; identical to SEQ ID NO: 445972
  Synthetic oligonucleotide

SEQ ID NO: 598080 - DNA, 55 bp, Artificial; identical to SEQ ID NO: 445978
  Synthetic oligonucleotide

SEQ ID NO: 598081 - DNA, 60 bp, Artificial; identical to SEQ ID NO: 445980
  Synthetic oligonucleotide

SEQ ID NO: 598082 - DNA, 57 bp, Artificial; identical to SEQ ID NO: 445981
  Synthetic oligonucleotide

SEQ ID NO: 598083 - DNA, 53 bp, Artificial; identical to SEQ ID NO: 445985
  Synthetic oligonucleotide

SEQ ID NO: 598084 - DNA, 60 bp, Artificial; identical to SEQ ID NO: 445988
  Synthetic oligonucleotide

SEQ ID NO: 598085 - DNA, 60 bp, Artificial; identical to SEQ ID NO: 445989
  Synthetic oligonucleotide

SEQ ID NO: 598086 - DNA, 55 bp, Artificial; identical to SEQ ID NO: 445990
  Synthetic oligonucleotide

SEQ ID NO: 598087 - DNA, 55 bp, Artificial; identical to SEQ ID NO: 445991
  Synthetic oligonucleotide

SEQ ID NO: 598088 - DNA, 55 bp, Artificial; identical to SEQ ID NO: 445992
  Synthetic oligonucleotide

SEQ ID NO: 598089 - DNA, 60 bp, Artificial; identical to SEQ ID NO: 58765
  Synthetic oligonucleotide

SEQ ID NO: 598090 - DNA, 60 bp, Artificial; identical to SEQ ID NO: 445996
  Synthetic oligonucleotide

SEQ ID NO: 598091 - DNA, 52 bp, Artificial; identical to SEQ ID NO: 446001
  Synthetic oligonucleotide

SEQ ID NO: 598092 - DNA, 56 bp, Artificial; identical to SEQ ID NO: 17885
  Synthetic oligonucleotide

SEQ ID NO: 598093 - DNA, 55 bp, Artificial; identical to SEQ ID NO: 446005
  Synthetic oligonucleotide

SEQ ID NO: 598094 - DNA, 55 bp, Artificial; identical to SEQ ID NO: 446008
  Synthetic oligonucleotide

SEQ ID NO: 598095 - DNA, 60 bp, Artificial; identical to SEQ ID NO: 446013
  Synthetic oligonucleotide

SEQ ID NO: 598096 - DNA, 53 bp, Artificial; identical to SEQ ID NO: 446014
  Synthetic oligonucleotide

SEQ ID NO: 598097 - DNA, 60 bp, Artificial; identical to SEQ ID NO: 446015
  Synthetic oligonucleotide

SEQ ID NO: 598098 - DNA, 55 bp, Artificial; identical to SEQ ID NO: 446016
  Synthetic oligonucleotide

SEQ ID NO: 598099 - DNA, 50 bp, Artificial; identical to SEQ ID NO: 446017
  Synthetic oligonucleotide

SEQ ID NO: 598100 - DNA, 55 bp, Artificial; identical to SEQ ID NO: 446022
  Synthetic oligonucleotide

SEQ ID NO: 598101 - DNA, 60 bp, Artificial; identical to SEQ ID NO: 446025
  Synthetic oligonucleotide

SEQ ID NO: 598102 - DNA, 59 bp, Artificial; identical to SEQ ID NO: 446026
  Synthetic oligonucleotide

SEQ ID NO: 598103 - DNA, 50 bp, Artificial; identical to SEQ ID NO: 446027
  Synthetic oligonucleotide

SEQ ID NO: 598104 - DNA, 59 bp, Artificial; identical to SEQ ID NO: 446032
  Synthetic oligonucleotide

SEQ ID NO: 598105 - DNA, 60 bp, Artificial; identical to SEQ ID NO: 446033
  Synthetic oligonucleotide

SEQ ID NO: 598106 - DNA, 60 bp, Artificial; identical to SEQ ID NO: 446034
  Synthetic oligonucleotide

SEQ ID NO: 598107 - DNA, 60 bp, Artificial; identical to SEQ ID NO: 446035
  Synthetic oligonucleotide

SEQ ID NO: 598108 - DNA, 55 bp, Artificial; identical to SEQ ID NO: 446043
  Synthetic oligonucleotide

SEQ ID NO: 598109 - DNA, 58 bp, Artificial; identical to SEQ ID NO: 446044
  Synthetic oligonucleotide

SEQ ID NO: 598110 - DNA, 52 bp, Artificial; identical to SEQ ID NO: 6670
  Synthetic oligonucleotide

SEQ ID NO: 598111 - DNA, 55 bp, Artificial; identical to SEQ ID NO: 446047
  Synthetic oligonucleotide

SEQ ID NO: 598112 - DNA, 57 bp, Artificial; identical to SEQ ID NO: 446048
  Synthetic oligonucleotide

SEQ ID NO: 598113 - DNA, 54 bp, Artificial; identical to SEQ ID NO: 446049
  Synthetic oligonucleotide

SEQ ID NO: 598114 - DNA, 60 bp, Artificial; identical to SEQ ID NO: 446051
  Synthetic oligonucleotide

SEQ ID NO: 598115 - DNA, 57 bp, Artificial; identical to SEQ ID NO: 446053
  Synthetic oligonucleotide

SEQ ID NO: 598116 - DNA, 55 bp, Artificial; identical to SEQ ID NO: 446054
  Synthetic oligonucleotide

SEQ ID NO: 598117 - DNA, 51 bp, Artificial; identical to SEQ ID NO: 446056
  Synthetic oligonucleotide

SEQ ID NO: 598118 - DNA, 51 bp, Artificial; identical to SEQ ID NO: 446057
  Synthetic oligonucleotide

SEQ ID NO: 598119 - DNA, 60 bp, Artificial; identical to SEQ ID NO: 9812
  Synthetic oligonucleotide

SEQ ID NO: 598120 - DNA, 53 bp, Artificial; identical to SEQ ID NO: 446064
  Synthetic oligonucleotide

SEQ ID NO: 598121 - DNA, 58 bp, Artificial; identical to SEQ ID NO: 446066
  Synthetic oligonucleotide

SEQ ID NO: 598122 - DNA, 57 bp, Artificial; identical to SEQ ID NO: 446067
  Synthetic oligonucleotide

SEQ ID NO: 598123 - DNA, 60 bp, Artificial; identical to SEQ ID NO: 446069
  Synthetic oligonucleotide

SEQ ID NO: 598124 - DNA, 60 bp, Artificial; identical to SEQ ID NO: 446072
  Synthetic oligonucleotide

SEQ ID NO: 598125 - DNA, 60 bp, Artificial; identical to SEQ ID NO: 446073
  Synthetic oligonucleotide

SEQ ID NO: 598126 - DNA, 55 bp, Artificial; identical to SEQ ID NO: 446074
  Synthetic oligonucleotide

SEQ ID NO: 598127 - DNA, 55 bp, Artificial; identical to SEQ ID NO: 446076
  Synthetic oligonucleotide

SEQ ID NO: 598128 - DNA, 53 bp, Artificial; identical to SEQ ID NO: 446078
  Synthetic oligonucleotide

SEQ ID NO: 598129 - DNA, 55 bp, Artificial; identical to SEQ ID NO: 446081
  Synthetic oligonucleotide

SEQ ID NO: 598130 - DNA, 55 bp, Artificial; identical to SEQ ID NO: 446082
  Synthetic oligonucleotide

SEQ ID NO: 598131 - DNA, 50 bp, Artificial; identical to SEQ ID NO: 446083
  Synthetic oligonucleotide

SEQ ID NO: 598132 - DNA, 60 bp, Artificial; identical to SEQ ID NO: 446084
  Synthetic oligonucleotide

SEQ ID NO: 598133 - DNA, 60 bp, Artificial; identical to SEQ ID NO: 446085
  Synthetic oligonucleotide

SEQ ID NO: 598134 - DNA, 55 bp, Artificial; identical to SEQ ID NO: 446087
  Synthetic oligonucleotide

SEQ ID NO: 598135 - DNA, 59 bp, Artificial; identical to SEQ ID NO: 446095
  Synthetic oligonucleotide

SEQ ID NO: 598136 - DNA, 57 bp, Artificial; identical to SEQ ID NO: 446097
  Synthetic oligonucleotide

SEQ ID NO: 598137 - DNA, 55 bp, Artificial; identical to SEQ ID NO: 446098
  Synthetic oligonucleotide

SEQ ID NO: 598138 - DNA, 60 bp, Artificial; identical to SEQ ID NO: 446099
  Synthetic oligonucleotide

SEQ ID NO: 598139 - DNA, 60 bp, Artificial; identical to SEQ ID NO: 446104
  Synthetic oligonucleotide

SEQ ID NO: 598140 - DNA, 55 bp, Artificial; identical to SEQ ID NO: 446105
  Synthetic oligonucleotide

SEQ ID NO: 598141 - DNA, 59 bp, Artificial; identical to SEQ ID NO: 446106
  Synthetic oligonucleotide

SEQ ID NO: 598142 - DNA, 60 bp, Artificial; identical to SEQ ID NO: 7970
  Synthetic oligonucleotide

SEQ ID NO: 598143 - DNA, 56 bp, Artificial; identical to SEQ ID NO: 446113
  Synthetic oligonucleotide

SEQ ID NO: 598144 - DNA, 60 bp, Artificial; identical to SEQ ID NO: 446124
  Synthetic oligonucleotide

SEQ ID NO: 598145 - DNA, 55 bp, Artificial; identical to SEQ ID NO: 446132
  Synthetic oligonucleotide

SEQ ID NO: 598146 - DNA, 60 bp, Artificial; identical to SEQ ID NO: 446135
  Synthetic oligonucleotide

SEQ ID NO: 598147 - DNA, 51 bp, Artificial; identical to SEQ ID NO: 446140
  Synthetic oligonucleotide

SEQ ID NO: 598148 - DNA, 55 bp, Artificial; identical to SEQ ID NO: 446146
  Synthetic oligonucleotide

SEQ ID NO: 598149 - DNA, 60 bp, Artificial; identical to SEQ ID NO: 446150
  Synthetic oligonucleotide

SEQ ID NO: 598150 - DNA, 54 bp, Artificial; identical to SEQ ID NO: 446151
  Synthetic oligonucleotide

SEQ ID NO: 598151 - DNA, 60 bp, Artificial; identical to SEQ ID NO: 446156
  Synthetic oligonucleotide

SEQ ID NO: 598152 - DNA, 55 bp, Artificial; identical to SEQ ID NO: 446157
  Synthetic oligonucleotide

SEQ ID NO: 598153 - DNA, 60 bp, Artificial; identical to SEQ ID NO: 446158
  Synthetic oligonucleotide

SEQ ID NO: 598154 - DNA, 57 bp, Artificial; identical to SEQ ID NO: 446159
  Synthetic oligonucleotide

SEQ ID NO: 598155 - DNA, 55 bp, Artificial; identical to SEQ ID NO: 446164
  Synthetic oligonucleotide

SEQ ID NO: 598156 - DNA, 60 bp, Artificial; identical to SEQ ID NO: 446166
  Synthetic oligonucleotide

SEQ ID NO: 598157 - DNA, 60 bp, Artificial; identical to SEQ ID NO: 446173
  Synthetic oligonucleotide

SEQ ID NO: 598158 - DNA, 60 bp, Artificial; identical to SEQ ID NO: 446176
  Synthetic oligonucleotide

SEQ ID NO: 598159 - DNA, 60 bp, Artificial; identical to SEQ ID NO: 446178
  Synthetic oligonucleotide

SEQ ID NO: 598160 - DNA, 54 bp, Artificial; identical to SEQ ID NO: 446179
  Synthetic oligonucleotide

SEQ ID NO: 598161 - DNA, 56 bp, Artificial; identical to SEQ ID NO: 446181
  Synthetic oligonucleotide

SEQ ID NO: 598162 - DNA, 57 bp, Artificial; identical to SEQ ID NO: 446183
  Synthetic oligonucleotide

SEQ ID NO: 598163 - DNA, 57 bp, Artificial; identical to SEQ ID NO: 446185
  Synthetic oligonucleotide

SEQ ID NO: 598164 - DNA, 55 bp, Artificial; identical to SEQ ID NO: 446187
  Synthetic oligonucleotide

SEQ ID NO: 598165 - DNA, 55 bp, Artificial; identical to SEQ ID NO: 446190
  Synthetic oligonucleotide

SEQ ID NO: 598166 - DNA, 59 bp, Artificial; identical to SEQ ID NO: 446191
  Synthetic oligonucleotide

SEQ ID NO: 598167 - DNA, 56 bp, Artificial; identical to SEQ ID NO: 446193
  Synthetic oligonucleotide

SEQ ID NO: 598168 - DNA, 55 bp, Artificial; identical to SEQ ID NO: 19727
  Synthetic oligonucleotide

SEQ ID NO: 598169 - DNA, 56 bp, Artificial; identical to SEQ ID NO: 446194
  Synthetic oligonucleotide

SEQ ID NO: 598170 - DNA, 52 bp, Artificial; identical to SEQ ID NO: 446195
  Synthetic oligonucleotide

SEQ ID NO: 598171 - DNA, 56 bp, Artificial; identical to SEQ ID NO: 446197
  Synthetic oligonucleotide

SEQ ID NO: 598172 - DNA, 58 bp, Artificial; identical to SEQ ID NO: 446199
  Synthetic oligonucleotide

SEQ ID NO: 598173 - DNA, 53 bp, Artificial; identical to SEQ ID NO: 446200
  Synthetic oligonucleotide

SEQ ID NO: 598174 - DNA, 53 bp, Artificial; identical to SEQ ID NO: 446202
  Synthetic oligonucleotide

SEQ ID NO: 598175 - DNA, 54 bp, Artificial; identical to SEQ ID NO: 446203
  Synthetic oligonucleotide

SEQ ID NO: 598176 - DNA, 60 bp, Artificial; identical to SEQ ID NO: 446204
  Synthetic oligonucleotide

SEQ ID NO: 598177 - DNA, 54 bp, Artificial; identical to SEQ ID NO: 8344
  Synthetic oligonucleotide

SEQ ID NO: 598178 - DNA, 55 bp, Artificial; identical to SEQ ID NO: 446215
  Synthetic oligonucleotide

SEQ ID NO: 598179 - DNA, 57 bp, Artificial; identical to SEQ ID NO: 446218
  Synthetic oligonucleotide

SEQ ID NO: 598180 - DNA, 60 bp, Artificial; identical to SEQ ID NO: 446219
  Synthetic oligonucleotide

SEQ ID NO: 598181 - DNA, 55 bp, Artificial; identical to SEQ ID NO: 446220
  Synthetic oligonucleotide

SEQ ID NO: 598182 - DNA, 52 bp, Artificial; identical to SEQ ID NO: 446224
  Synthetic oligonucleotide

SEQ ID NO: 598183 - DNA, 55 bp, Artificial; identical to SEQ ID NO: 446226
  Synthetic oligonucleotide

SEQ ID NO: 598184 - DNA, 58 bp, Artificial; identical to SEQ ID NO: 446227
  Synthetic oligonucleotide

SEQ ID NO: 598185 - DNA, 56 bp, Artificial; identical to SEQ ID NO: 446228
  Synthetic oligonucleotide

SEQ ID NO: 598186 - DNA, 57 bp, Artificial; identical to SEQ ID NO: 446231
  Synthetic oligonucleotide

SEQ ID NO: 598187 - DNA, 57 bp, Artificial; identical to SEQ ID NO: 446232
  Synthetic oligonucleotide

SEQ ID NO: 598188 - DNA, 55 bp, Artificial; identical to SEQ ID NO: 446235
  Synthetic oligonucleotide

SEQ ID NO: 598189 - DNA, 50 bp, Artificial; identical to SEQ ID NO: 446236
  Synthetic oligonucleotide

SEQ ID NO: 598190 - DNA, 57 bp, Artificial; identical to SEQ ID NO: 446237
  Synthetic oligonucleotide

SEQ ID NO: 598191 - DNA, 53 bp, Artificial; identical to SEQ ID NO: 446239
  Synthetic oligonucleotide

SEQ ID NO: 598192 - DNA, 53 bp, Artificial; identical to SEQ ID NO: 446243
  Synthetic oligonucleotide

SEQ ID NO: 598193 - DNA, 56 bp, Artificial; identical to SEQ ID NO: 16303
  Synthetic oligonucleotide

SEQ ID NO: 598194 - DNA, 55 bp, Artificial; identical to SEQ ID NO: 446246
  Synthetic oligonucleotide

SEQ ID NO: 598195 - DNA, 57 bp, Artificial; identical to SEQ ID NO: 446247
  Synthetic oligonucleotide

SEQ ID NO: 598196 - DNA, 53 bp, Artificial; identical to SEQ ID NO: 446248
  Synthetic oligonucleotide

SEQ ID NO: 598197 - DNA, 56 bp, Artificial; identical to SEQ ID NO: 446253
  Synthetic oligonucleotide

SEQ ID NO: 598198 - DNA, 52 bp, Artificial; identical to SEQ ID NO: 446254
  Synthetic oligonucleotide

SEQ ID NO: 598199 - DNA, 56 bp, Artificial; identical to SEQ ID NO: 446256
  Synthetic oligonucleotide

SEQ ID NO: 598200 - DNA, 55 bp, Artificial; identical to SEQ ID NO: 446258
  Synthetic oligonucleotide

SEQ ID NO: 598201 - DNA, 57 bp, Artificial; identical to SEQ ID NO: 446262
  Synthetic oligonucleotide

SEQ ID NO: 598202 - DNA, 51 bp, Artificial; identical to SEQ ID NO: 446267
  Synthetic oligonucleotide

SEQ ID NO: 598203 - DNA, 57 bp, Artificial; identical to SEQ ID NO: 17675
  Synthetic oligonucleotide

SEQ ID NO: 598204 - DNA, 49 bp, Artificial; identical to SEQ ID NO: 446268
  Synthetic oligonucleotide

SEQ ID NO: 598205 - DNA, 51 bp, Artificial; identical to SEQ ID NO: 446269
  Synthetic oligonucleotide

SEQ ID NO: 598206 - DNA, 57 bp, Artificial; identical to SEQ ID NO: 18951
  Synthetic oligonucleotide

SEQ ID NO: 598207 - DNA, 54 bp, Artificial; identical to SEQ ID NO: 446272
  Synthetic oligonucleotide

SEQ ID NO: 598208 - DNA, 55 bp, Artificial; identical to SEQ ID NO: 446280
  Synthetic oligonucleotide

SEQ ID NO: 598209 - DNA, 59 bp, Artificial; identical to SEQ ID NO: 446281
  Synthetic oligonucleotide

SEQ ID NO: 598210 - DNA, 60 bp, Artificial; identical to SEQ ID NO: 446284
  Synthetic oligonucleotide

SEQ ID NO: 598211 - DNA, 58 bp, Artificial; identical to SEQ ID NO: 446288
  Synthetic oligonucleotide

SEQ ID NO: 598212 - DNA, 60 bp, Artificial; identical to SEQ ID NO: 446290
  Synthetic oligonucleotide

SEQ ID NO: 598213 - DNA, 54 bp, Artificial; identical to SEQ ID NO: 446293
  Synthetic oligonucleotide

SEQ ID NO: 598214 - DNA, 59 bp, Artificial; identical to SEQ ID NO: 446294
  Synthetic oligonucleotide

SEQ ID NO: 598215 - DNA, 55 bp, Artificial; identical to SEQ ID NO: 8626
  Synthetic oligonucleotide

SEQ ID NO: 598216 - DNA, 54 bp, Artificial; identical to SEQ ID NO: 446308
  Synthetic oligonucleotide

SEQ ID NO: 598217 - DNA, 55 bp, Artificial; identical to SEQ ID NO: 446310
  Synthetic oligonucleotide

SEQ ID NO: 598218 - DNA, 60 bp, Artificial; identical to SEQ ID NO: 446313
  Synthetic oligonucleotide

SEQ ID NO: 598219 - DNA, 55 bp, Artificial; identical to SEQ ID NO: 446325
  Synthetic oligonucleotide

SEQ ID NO: 598220 - DNA, 52 bp, Artificial; identical to SEQ ID NO: 446327
  Synthetic oligonucleotide

SEQ ID NO: 598221 - DNA, 58 bp, Artificial; identical to SEQ ID NO: 20266
  Synthetic oligonucleotide

SEQ ID NO: 598222 - DNA, 55 bp, Artificial; identical to SEQ ID NO: 446328
  Synthetic oligonucleotide

SEQ ID NO: 598223 - DNA, 55 bp, Artificial; identical to SEQ ID NO: 446331
  Synthetic oligonucleotide

SEQ ID NO: 598224 - DNA, 54 bp, Artificial; identical to SEQ ID NO: 446332
  Synthetic oligonucleotide

SEQ ID NO: 598225 - DNA, 60 bp, Artificial; identical to SEQ ID NO: 446333
  Synthetic oligonucleotide

SEQ ID NO: 598226 - DNA, 55 bp, Artificial; identical to SEQ ID NO: 446334
  Synthetic oligonucleotide

SEQ ID NO: 598227 - DNA, 55 bp, Artificial; identical to SEQ ID NO: 446336
  Synthetic oligonucleotide

SEQ ID NO: 598228 - DNA, 55 bp, Artificial; identical to SEQ ID NO: 446337
  Synthetic oligonucleotide

SEQ ID NO: 598229 - DNA, 54 bp, Artificial; identical to SEQ ID NO: 446339
  Synthetic oligonucleotide

SEQ ID NO: 598230 - DNA, 58 bp, Artificial; identical to SEQ ID NO: 446345
  Synthetic oligonucleotide

SEQ ID NO: 598231 - DNA, 53 bp, Artificial; identical to SEQ ID NO: 446346
  Synthetic oligonucleotide

SEQ ID NO: 598232 - DNA, 53 bp, Artificial; identical to SEQ ID NO: 446347
  Synthetic oligonucleotide

SEQ ID NO: 598233 - DNA, 60 bp, Artificial; identical to SEQ ID NO: 446349
  Synthetic oligonucleotide

SEQ ID NO: 598234 - DNA, 51 bp, Artificial; identical to SEQ ID NO: 446351
  Synthetic oligonucleotide

SEQ ID NO: 598235 - DNA, 55 bp, Artificial; identical to SEQ ID NO: 446358
  Synthetic oligonucleotide

SEQ ID NO: 598236 - DNA, 52 bp, Artificial; identical to SEQ ID NO: 446362
  Synthetic oligonucleotide

SEQ ID NO: 598237 - DNA, 58 bp, Artificial; identical to SEQ ID NO: 446368
  Synthetic oligonucleotide

SEQ ID NO: 598238 - DNA, 54 bp, Artificial; identical to SEQ ID NO: 446369
  Synthetic oligonucleotide

SEQ ID NO: 598239 - DNA, 55 bp, Artificial; identical to SEQ ID NO: 446370
  Synthetic oligonucleotide

SEQ ID NO: 598240 - DNA, 51 bp, Artificial; identical to SEQ ID NO: 446374
  Synthetic oligonucleotide

SEQ ID NO: 598241 - DNA, 54 bp, Artificial; identical to SEQ ID NO: 446375
  Synthetic oligonucleotide

SEQ ID NO: 598242 - DNA, 60 bp, Artificial; identical to SEQ ID NO: 446377
  Synthetic oligonucleotide

SEQ ID NO: 598243 - DNA, 53 bp, Artificial; identical to SEQ ID NO: 446381
  Synthetic oligonucleotide

SEQ ID NO: 598244 - DNA, 59 bp, Artificial; identical to SEQ ID NO: 446382
  Synthetic oligonucleotide

SEQ ID NO: 598245 - DNA, 54 bp, Artificial; identical to SEQ ID NO: 446383
  Synthetic oligonucleotide

SEQ ID NO: 598246 - DNA, 58 bp, Artificial; identical to SEQ ID NO: 446385
  Synthetic oligonucleotide

SEQ ID NO: 598247 - DNA, 50 bp, Artificial; identical to SEQ ID NO: 446386
  Synthetic oligonucleotide

SEQ ID NO: 598248 - DNA, 57 bp, Artificial; identical to SEQ ID NO: 446389
  Synthetic oligonucleotide

SEQ ID NO: 598249 - DNA, 56 bp, Artificial; identical to SEQ ID NO: 446390
  Synthetic oligonucleotide

SEQ ID NO: 598250 - DNA, 53 bp, Artificial; identical to SEQ ID NO: 446393
  Synthetic oligonucleotide

SEQ ID NO: 598251 - DNA, 53 bp, Artificial; identical to SEQ ID NO: 446394
  Synthetic oligonucleotide

SEQ ID NO: 598252 - DNA, 60 bp, Artificial; identical to SEQ ID NO: 446395
  Synthetic oligonucleotide

SEQ ID NO: 598253 - DNA, 57 bp, Artificial; identical to SEQ ID NO: 446396
  Synthetic oligonucleotide

SEQ ID NO: 598254 - DNA, 54 bp, Artificial; identical to SEQ ID NO: 446398
  Synthetic oligonucleotide

SEQ ID NO: 598255 - DNA, 58 bp, Artificial; identical to SEQ ID NO: 446400
  Synthetic oligonucleotide

SEQ ID NO: 598256 - DNA, 50 bp, Artificial; identical to SEQ ID NO: 446401
  Synthetic oligonucleotide

SEQ ID NO: 598257 - DNA, 52 bp, Artificial; identical to SEQ ID NO: 18213
  Synthetic oligonucleotide

SEQ ID NO: 598258 - DNA, 55 bp, Artificial; identical to SEQ ID NO: 446405
  Synthetic oligonucleotide

SEQ ID NO: 598259 - DNA, 58 bp, Artificial; identical to SEQ ID NO: 446406
  Synthetic oligonucleotide

SEQ ID NO: 598260 - DNA, 55 bp, Artificial; identical to SEQ ID NO: 446408
  Synthetic oligonucleotide

SEQ ID NO: 598261 - DNA, 50 bp, Artificial; identical to SEQ ID NO: 446411
  Synthetic oligonucleotide

SEQ ID NO: 598262 - DNA, 53 bp, Artificial; identical to SEQ ID NO: 446412
  Synthetic oligonucleotide

SEQ ID NO: 598263 - DNA, 51 bp, Artificial; identical to SEQ ID NO: 446413
  Synthetic oligonucleotide

SEQ ID NO: 598264 - DNA, 54 bp, Artificial; identical to SEQ ID NO: 446415
  Synthetic oligonucleotide

SEQ ID NO: 598265 - DNA, 56 bp, Artificial; identical to SEQ ID NO: 446416
  Synthetic oligonucleotide

SEQ ID NO: 598266 - DNA, 55 bp, Artificial; identical to SEQ ID NO: 446418
  Synthetic oligonucleotide

SEQ ID NO: 598267 - DNA, 60 bp, Artificial; identical to SEQ ID NO: 446419
  Synthetic oligonucleotide

SEQ ID NO: 598268 - DNA, 55 bp, Artificial; identical to SEQ ID NO: 446420
  Synthetic oligonucleotide

SEQ ID NO: 598269 - DNA, 58 bp, Artificial; identical to SEQ ID NO: 446421
  Synthetic oligonucleotide

SEQ ID NO: 598270 - DNA, 55 bp, Artificial; identical to SEQ ID NO: 446422
  Synthetic oligonucleotide

SEQ ID NO: 598271 - DNA, 60 bp, Artificial; identical to SEQ ID NO: 446424
  Synthetic oligonucleotide

SEQ ID NO: 598272 - DNA, 57 bp, Artificial; identical to SEQ ID NO: 446427
  Synthetic oligonucleotide

SEQ ID NO: 598273 - DNA, 55 bp, Artificial; identical to SEQ ID NO: 446428
  Synthetic oligonucleotide

SEQ ID NO: 598274 - DNA, 60 bp, Artificial; identical to SEQ ID NO: 446429
  Synthetic oligonucleotide

SEQ ID NO: 598275 - DNA, 55 bp, Artificial; identical to SEQ ID NO: 446432
  Synthetic oligonucleotide

SEQ ID NO: 598276 - DNA, 60 bp, Artificial; identical to SEQ ID NO: 446434
  Synthetic oligonucleotide

SEQ ID NO: 598277 - DNA, 55 bp, Artificial; identical to SEQ ID NO: 446435
  Synthetic oligonucleotide

SEQ ID NO: 598278 - DNA, 54 bp, Artificial; identical to SEQ ID NO: 18188
  Synthetic oligonucleotide

SEQ ID NO: 598279 - DNA, 60 bp, Artificial; identical to SEQ ID NO: 446436
  Synthetic oligonucleotide

SEQ ID NO: 598280 - DNA, 57 bp, Artificial; identical to SEQ ID NO: 446437
  Synthetic oligonucleotide

SEQ ID NO: 598281 - DNA, 55 bp, Artificial; identical to SEQ ID NO: 446439
  Synthetic oligonucleotide

SEQ ID NO: 598282 - DNA, 57 bp, Artificial; identical to SEQ ID NO: 446441
  Synthetic oligonucleotide

SEQ ID NO: 598283 - DNA, 50 bp, Artificial; identical to SEQ ID NO: 446442
  Synthetic oligonucleotide

SEQ ID NO: 598284 - DNA, 60 bp, Artificial; identical to SEQ ID NO: 446443
  Synthetic oligonucleotide

SEQ ID NO: 598285 - DNA, 60 bp, Artificial; identical to SEQ ID NO: 446447
  Synthetic oligonucleotide

SEQ ID NO: 598286 - DNA, 58 bp, Artificial; identical to SEQ ID NO: 446452
  Synthetic oligonucleotide

SEQ ID NO: 598287 - DNA, 55 bp, Artificial; identical to SEQ ID NO: 446453
  Synthetic oligonucleotide

SEQ ID NO: 598288 - DNA, 56 bp, Artificial; identical to SEQ ID NO: 446454
  Synthetic oligonucleotide

SEQ ID NO: 598289 - DNA, 60 bp, Artificial; identical to SEQ ID NO: 75982
  Synthetic oligonucleotide

SEQ ID NO: 598290 - DNA, 60 bp, Artificial; identical to SEQ ID NO: 446456
  Synthetic oligonucleotide

SEQ ID NO: 598291 - DNA, 56 bp, Artificial; identical to SEQ ID NO: 446457
  Synthetic oligonucleotide

SEQ ID NO: 598292 - DNA, 51 bp, Artificial; identical to SEQ ID NO: 16041
  Synthetic oligonucleotide

SEQ ID NO: 598293 - DNA, 60 bp, Artificial; identical to SEQ ID NO: 446462
  Synthetic oligonucleotide

SEQ ID NO: 598294 - DNA, 60 bp, Artificial; identical to SEQ ID NO: 446463
  Synthetic oligonucleotide

SEQ ID NO: 598295 - DNA, 55 bp, Artificial; identical to SEQ ID NO: 446464
  Synthetic oligonucleotide

SEQ ID NO: 598296 - DNA, 53 bp, Artificial; identical to SEQ ID NO: 446465
  Synthetic oligonucleotide

SEQ ID NO: 598297 - DNA, 56 bp, Artificial; identical to SEQ ID NO: 15688
  Synthetic oligonucleotide

SEQ ID NO: 598298 - DNA, 60 bp, Artificial; identical to SEQ ID NO: 446467
  Synthetic oligonucleotide

SEQ ID NO: 598299 - DNA, 56 bp, Artificial; identical to SEQ ID NO: 446468
  Synthetic oligonucleotide

SEQ ID NO: 598300 - DNA, 60 bp, Artificial; identical to SEQ ID NO: 446470
  Synthetic oligonucleotide

SEQ ID NO: 598301 - DNA, 58 bp, Artificial; identical to SEQ ID NO: 446471
  Synthetic oligonucleotide

SEQ ID NO: 598302 - DNA, 55 bp, Artificial; identical to SEQ ID NO: 446473
  Synthetic oligonucleotide

SEQ ID NO: 598303 - DNA, 60 bp, Artificial; identical to SEQ ID NO: 446476
  Synthetic oligonucleotide

SEQ ID NO: 598304 - DNA, 58 bp, Artificial; identical to SEQ ID NO: 446477
  Synthetic oligonucleotide

SEQ ID NO: 598305 - DNA, 50 bp, Artificial; identical to SEQ ID NO: 446483
  Synthetic oligonucleotide

SEQ ID NO: 598306 - DNA, 55 bp, Artificial; identical to SEQ ID NO: 446486
  Synthetic oligonucleotide

SEQ ID NO: 598307 - DNA, 57 bp, Artificial; identical to SEQ ID NO: 446487
  Synthetic oligonucleotide

SEQ ID NO: 598308 - DNA, 59 bp, Artificial; identical to SEQ ID NO: 446490
  Synthetic oligonucleotide

SEQ ID NO: 598309 - DNA, 57 bp, Artificial; identical to SEQ ID NO: 446492
  Synthetic oligonucleotide

SEQ ID NO: 598310 - DNA, 55 bp, Artificial; identical to SEQ ID NO: 446497
  Synthetic oligonucleotide

SEQ ID NO: 598311 - DNA, 57 bp, Artificial; identical to SEQ ID NO: 446498
  Synthetic oligonucleotide

SEQ ID NO: 598312 - DNA, 60 bp, Artificial; identical to SEQ ID NO: 446499
  Synthetic oligonucleotide

SEQ ID NO: 598313 - DNA, 60 bp, Artificial; identical to SEQ ID NO: 15330
  Synthetic oligonucleotide

SEQ ID NO: 598314 - DNA, 56 bp, Artificial; identical to SEQ ID NO: 446500
  Synthetic oligonucleotide

SEQ ID NO: 598315 - DNA, 57 bp, Artificial; identical to SEQ ID NO: 446502
  Synthetic oligonucleotide

SEQ ID NO: 598316 - DNA, 50 bp, Artificial; identical to SEQ ID NO: 446504
  Synthetic oligonucleotide

SEQ ID NO: 598317 - DNA, 51 bp, Artificial; identical to SEQ ID NO: 446505
  Synthetic oligonucleotide

SEQ ID NO: 598318 - DNA, 58 bp, Artificial; identical to SEQ ID NO: 446506
  Synthetic oligonucleotide

SEQ ID NO: 598319 - DNA, 54 bp, Artificial; identical to SEQ ID NO: 446509
  Synthetic oligonucleotide

SEQ ID NO: 598320 - DNA, 60 bp, Artificial; identical to SEQ ID NO: 446511
  Synthetic oligonucleotide

SEQ ID NO: 598321 - DNA, 58 bp, Artificial; identical to SEQ ID NO: 446512
  Synthetic oligonucleotide

SEQ ID NO: 598322 - DNA, 58 bp, Artificial; identical to SEQ ID NO: 446514
  Synthetic oligonucleotide

SEQ ID NO: 598323 - DNA, 60 bp, Artificial; identical to SEQ ID NO: 446519
  Synthetic oligonucleotide

SEQ ID NO: 598324 - DNA, 59 bp, Artificial; identical to SEQ ID NO: 446520
  Synthetic oligonucleotide

SEQ ID NO: 598325 - DNA, 60 bp, Artificial; identical to SEQ ID NO: 446522
  Synthetic oligonucleotide

SEQ ID NO: 598326 - DNA, 60 bp, Artificial; identical to SEQ ID NO: 446523
  Synthetic oligonucleotide

SEQ ID NO: 598327 - DNA, 60 bp, Artificial; identical to SEQ ID NO: 446524
  Synthetic oligonucleotide

SEQ ID NO: 598328 - DNA, 60 bp, Artificial; identical to SEQ ID NO: 446526
  Synthetic oligonucleotide

SEQ ID NO: 598329 - DNA, 54 bp, Artificial; identical to SEQ ID NO: 446527
  Synthetic oligonucleotide

SEQ ID NO: 598330 - DNA, 54 bp, Artificial; identical to SEQ ID NO: 446528
  Synthetic oligonucleotide

SEQ ID NO: 598331 - DNA, 55 bp, Artificial; identical to SEQ ID NO: 446531
  Synthetic oligonucleotide

SEQ ID NO: 598332 - DNA, 55 bp, Artificial; identical to SEQ ID NO: 446533
  Synthetic oligonucleotide

SEQ ID NO: 598333 - DNA, 58 bp, Artificial; identical to SEQ ID NO: 446536
  Synthetic oligonucleotide

SEQ ID NO: 598334 - DNA, 55 bp, Artificial; identical to SEQ ID NO: 446538
  Synthetic oligonucleotide

SEQ ID NO: 598335 - DNA, 55 bp, Artificial; identical to SEQ ID NO: 446540
  Synthetic oligonucleotide

SEQ ID NO: 598336 - DNA, 60 bp, Artificial; identical to SEQ ID NO: 446541
  Synthetic oligonucleotide

SEQ ID NO: 598337 - DNA, 54 bp, Artificial; identical to SEQ ID NO: 446542
  Synthetic oligonucleotide

SEQ ID NO: 598338 - DNA, 53 bp, Artificial; identical to SEQ ID NO: 446545
  Synthetic oligonucleotide

SEQ ID NO: 598339 - DNA, 57 bp, Artificial; identical to SEQ ID NO: 446547
  Synthetic oligonucleotide

SEQ ID NO: 598340 - DNA, 60 bp, Artificial; identical to SEQ ID NO: 446550
  Synthetic oligonucleotide

SEQ ID NO: 598341 - DNA, 57 bp, Artificial; identical to SEQ ID NO: 446551
  Synthetic oligonucleotide

SEQ ID NO: 598342 - DNA, 54 bp, Artificial; identical to SEQ ID NO: 446552
  Synthetic oligonucleotide

SEQ ID NO: 598343 - DNA, 60 bp, Artificial; identical to SEQ ID NO: 446555
  Synthetic oligonucleotide

SEQ ID NO: 598344 - DNA, 60 bp, Artificial; identical to SEQ ID NO: 446564
  Synthetic oligonucleotide

SEQ ID NO: 598345 - DNA, 60 bp, Artificial; identical to SEQ ID NO: 446566
  Synthetic oligonucleotide

SEQ ID NO: 598346 - DNA, 55 bp, Artificial; identical to SEQ ID NO: 446568
  Synthetic oligonucleotide

SEQ ID NO: 598347 - DNA, 59 bp, Artificial; identical to SEQ ID NO: 446569
  Synthetic oligonucleotide

SEQ ID NO: 598348 - DNA, 59 bp, Artificial; identical to SEQ ID NO: 6152
  Synthetic oligonucleotide

SEQ ID NO: 598349 - DNA, 55 bp, Artificial; identical to SEQ ID NO: 446575
  Synthetic oligonucleotide

SEQ ID NO: 598350 - DNA, 57 bp, Artificial; identical to SEQ ID NO: 446576
  Synthetic oligonucleotide

SEQ ID NO: 598351 - DNA, 57 bp, Artificial; identical to SEQ ID NO: 446582
  Synthetic oligonucleotide

SEQ ID NO: 598352 - DNA, 55 bp, Artificial; identical to SEQ ID NO: 446584
  Synthetic oligonucleotide

SEQ ID NO: 598353 - DNA, 54 bp, Artificial; identical to SEQ ID NO: 446585
  Synthetic oligonucleotide

SEQ ID NO: 598354 - DNA, 57 bp, Artificial; identical to SEQ ID NO: 446587
  Synthetic oligonucleotide

SEQ ID NO: 598355 - DNA, 55 bp, Artificial; identical to SEQ ID NO: 446588
  Synthetic oligonucleotide

SEQ ID NO: 598356 - DNA, 53 bp, Artificial; identical to SEQ ID NO: 446589
  Synthetic oligonucleotide

SEQ ID NO: 598357 - DNA, 52 bp, Artificial; identical to SEQ ID NO: 446591
  Synthetic oligonucleotide

SEQ ID NO: 598358 - DNA, 55 bp, Artificial; identical to SEQ ID NO: 446592
  Synthetic oligonucleotide

SEQ ID NO: 598359 - DNA, 58 bp, Artificial; identical to SEQ ID NO: 16768
  Synthetic oligonucleotide

SEQ ID NO: 598360 - DNA, 60 bp, Artificial; identical to SEQ ID NO: 446598
  Synthetic oligonucleotide

SEQ ID NO: 598361 - DNA, 55 bp, Artificial; identical to SEQ ID NO: 446600
  Synthetic oligonucleotide

SEQ ID NO: 598362 - DNA, 54 bp, Artificial; identical to SEQ ID NO: 446601
  Synthetic oligonucleotide

SEQ ID NO: 598363 - DNA, 57 bp, Artificial; identical to SEQ ID NO: 446602
  Synthetic oligonucleotide

SEQ ID NO: 598364 - DNA, 60 bp, Artificial; identical to SEQ ID NO: 446603
  Synthetic oligonucleotide

SEQ ID NO: 598365 - DNA, 58 bp, Artificial; identical to SEQ ID NO: 446604
  Synthetic oligonucleotide

SEQ ID NO: 598366 - DNA, 56 bp, Artificial; identical to SEQ ID NO: 446605
  Synthetic oligonucleotide

SEQ ID NO: 598367 - DNA, 55 bp, Artificial; identical to SEQ ID NO: 446607
  Synthetic oligonucleotide

SEQ ID NO: 598368 - DNA, 55 bp, Artificial; identical to SEQ ID NO: 446609
  Synthetic oligonucleotide

SEQ ID NO: 598369 - DNA, 57 bp, Artificial; identical to SEQ ID NO: 446611
  Synthetic oligonucleotide

SEQ ID NO: 598370 - DNA, 60 bp, Artificial; identical to SEQ ID NO: 446613
  Synthetic oligonucleotide

SEQ ID NO: 598371 - DNA, 56 bp, Artificial; identical to SEQ ID NO: 446616
  Synthetic oligonucleotide

SEQ ID NO: 598372 - DNA, 60 bp, Artificial; identical to SEQ ID NO: 446617
  Synthetic oligonucleotide

SEQ ID NO: 598373 - DNA, 60 bp, Artificial; identical to SEQ ID NO: 446618
  Synthetic oligonucleotide

SEQ ID NO: 598374 - DNA, 56 bp, Artificial; identical to SEQ ID NO: 446620
  Synthetic oligonucleotide

SEQ ID NO: 598375 - DNA, 60 bp, Artificial; identical to SEQ ID NO: 446630
  Synthetic oligonucleotide

SEQ ID NO: 598376 - DNA, 55 bp, Artificial; identical to SEQ ID NO: 446636
  Synthetic oligonucleotide

SEQ ID NO: 598377 - DNA, 60 bp, Artificial; identical to SEQ ID NO: 446639
  Synthetic oligonucleotide

SEQ ID NO: 598378 - DNA, 60 bp, Artificial; identical to SEQ ID NO: 446640
  Synthetic oligonucleotide

SEQ ID NO: 598379 - DNA, 60 bp, Artificial; identical to SEQ ID NO: 446642
  Synthetic oligonucleotide

SEQ ID NO: 598380 - DNA, 55 bp, Artificial; identical to SEQ ID NO: 446644
  Synthetic oligonucleotide

SEQ ID NO: 598381 - DNA, 60 bp, Artificial; identical to SEQ ID NO: 13081
  Synthetic oligonucleotide

SEQ ID NO: 598382 - DNA, 55 bp, Artificial; identical to SEQ ID NO: 446647
  Synthetic oligonucleotide

SEQ ID NO: 598383 - DNA, 51 bp, Artificial; identical to SEQ ID NO: 446648
  Synthetic oligonucleotide

SEQ ID NO: 598384 - DNA, 60 bp, Artificial; identical to SEQ ID NO: 446649
  Synthetic oligonucleotide

SEQ ID NO: 598385 - DNA, 51 bp, Artificial; identical to SEQ ID NO: 446651
  Synthetic oligonucleotide

SEQ ID NO: 598386 - DNA, 60 bp, Artificial; identical to SEQ ID NO: 446652
  Synthetic oligonucleotide

SEQ ID NO: 598387 - DNA, 55 bp, Artificial; identical to SEQ ID NO: 446653
  Synthetic oligonucleotide

SEQ ID NO: 598388 - DNA, 59 bp, Artificial; identical to SEQ ID NO: 446657
  Synthetic oligonucleotide

SEQ ID NO: 598389 - DNA, 55 bp, Artificial; identical to SEQ ID NO: 446658
  Synthetic oligonucleotide

SEQ ID NO: 598390 - DNA, 60 bp, Artificial; identical to SEQ ID NO: 446661
  Synthetic oligonucleotide

SEQ ID NO: 598391 - DNA, 60 bp, Artificial; identical to SEQ ID NO: 446664
  Synthetic oligonucleotide

SEQ ID NO: 598392 - DNA, 54 bp, Artificial; identical to SEQ ID NO: 446666
  Synthetic oligonucleotide

SEQ ID NO: 598393 - DNA, 57 bp, Artificial; identical to SEQ ID NO: 446667
  Synthetic oligonucleotide

SEQ ID NO: 598394 - DNA, 60 bp, Artificial; identical to SEQ ID NO: 446668
  Synthetic oligonucleotide

SEQ ID NO: 598395 - DNA, 57 bp, Artificial; identical to SEQ ID NO: 446670
  Synthetic oligonucleotide

SEQ ID NO: 598396 - DNA, 60 bp, Artificial; identical to SEQ ID NO: 446674
  Synthetic oligonucleotide

SEQ ID NO: 598397 - DNA, 55 bp, Artificial; identical to SEQ ID NO: 446677
  Synthetic oligonucleotide

SEQ ID NO: 598398 - DNA, 57 bp, Artificial; identical to SEQ ID NO: 446681
  Synthetic oligonucleotide

SEQ ID NO: 598399 - DNA, 52 bp, Artificial; identical to SEQ ID NO: 446683
  Synthetic oligonucleotide

SEQ ID NO: 598400 - DNA, 56 bp, Artificial; identical to SEQ ID NO: 446684
  Synthetic oligonucleotide

SEQ ID NO: 598401 - DNA, 54 bp, Artificial; identical to SEQ ID NO: 446686
  Synthetic oligonucleotide

SEQ ID NO: 598402 - DNA, 57 bp, Artificial; identical to SEQ ID NO: 446687
  Synthetic oligonucleotide

SEQ ID NO: 598403 - DNA, 55 bp, Artificial; identical to SEQ ID NO: 446690
  Synthetic oligonucleotide

SEQ ID NO: 598404 - DNA, 55 bp, Artificial; identical to SEQ ID NO: 446691
  Synthetic oligonucleotide

SEQ ID NO: 598405 - DNA, 55 bp, Artificial; identical to SEQ ID NO: 446693
  Synthetic oligonucleotide

SEQ ID NO: 598406 - DNA, 60 bp, Artificial; identical to SEQ ID NO: 446695
  Synthetic oligonucleotide

SEQ ID NO: 598407 - DNA, 60 bp, Artificial; identical to SEQ ID NO: 446696
  Synthetic oligonucleotide

SEQ ID NO: 598408 - DNA, 56 bp, Artificial; identical to SEQ ID NO: 446706
  Synthetic oligonucleotide

SEQ ID NO: 598409 - DNA, 56 bp, Artificial; identical to SEQ ID NO: 446707
  Synthetic oligonucleotide

SEQ ID NO: 598410 - DNA, 53 bp, Artificial; identical to SEQ ID NO: 446708
  Synthetic oligonucleotide

SEQ ID NO: 598411 - DNA, 60 bp, Artificial; identical to SEQ ID NO: 446709
  Synthetic oligonucleotide

SEQ ID NO: 598412 - DNA, 55 bp, Artificial; identical to SEQ ID NO: 446712
  Synthetic oligonucleotide

SEQ ID NO: 598413 - DNA, 60 bp, Artificial; identical to SEQ ID NO: 446713
  Synthetic oligonucleotide

SEQ ID NO: 598414 - DNA, 58 bp, Artificial; identical to SEQ ID NO: 446714
  Synthetic oligonucleotide

SEQ ID NO: 598415 - DNA, 55 bp, Artificial; identical to SEQ ID NO: 446716
  Synthetic oligonucleotide

SEQ ID NO: 598416 - DNA, 58 bp, Artificial; identical to SEQ ID NO: 446717
  Synthetic oligonucleotide

SEQ ID NO: 598417 - DNA, 54 bp, Artificial; identical to SEQ ID NO: 14340
  Synthetic oligonucleotide

SEQ ID NO: 598418 - DNA, 51 bp, Artificial; identical to SEQ ID NO: 446718
  Synthetic oligonucleotide

SEQ ID NO: 598419 - DNA, 55 bp, Artificial; identical to SEQ ID NO: 446720
  Synthetic oligonucleotide

SEQ ID NO: 598420 - DNA, 60 bp, Artificial; identical to SEQ ID NO: 446723
  Synthetic oligonucleotide

SEQ ID NO: 598421 - DNA, 59 bp, Artificial; identical to SEQ ID NO: 446724
  Synthetic oligonucleotide

SEQ ID NO: 598422 - DNA, 60 bp, Artificial; identical to SEQ ID NO: 446725
  Synthetic oligonucleotide

SEQ ID NO: 598423 - DNA, 57 bp, Artificial; identical to SEQ ID NO: 446730
  Synthetic oligonucleotide

SEQ ID NO: 598424 - DNA, 55 bp, Artificial; identical to SEQ ID NO: 446733
  Synthetic oligonucleotide

SEQ ID NO: 598425 - DNA, 55 bp, Artificial; identical to SEQ ID NO: 446734
  Synthetic oligonucleotide

SEQ ID NO: 598426 - DNA, 50 bp, Artificial; identical to SEQ ID NO: 446736
  Synthetic oligonucleotide

SEQ ID NO: 598427 - DNA, 58 bp, Artificial; identical to SEQ ID NO: 446737
  Synthetic oligonucleotide

SEQ ID NO: 598428 - DNA, 57 bp, Artificial; identical to SEQ ID NO: 446743
  Synthetic oligonucleotide

SEQ ID NO: 598429 - DNA, 60 bp, Artificial; identical to SEQ ID NO: 7826
  Synthetic oligonucleotide

SEQ ID NO: 598430 - DNA, 54 bp, Artificial; identical to SEQ ID NO: 446745
  Synthetic oligonucleotide

SEQ ID NO: 598431 - DNA, 57 bp, Artificial; identical to SEQ ID NO: 446746
  Synthetic oligonucleotide

SEQ ID NO: 598432 - DNA, 57 bp, Artificial; identical to SEQ ID NO: 446748
  Synthetic oligonucleotide

SEQ ID NO: 598433 - DNA, 60 bp, Artificial; identical to SEQ ID NO: 446749
  Synthetic oligonucleotide

SEQ ID NO: 598434 - DNA, 54 bp, Artificial; identical to SEQ ID NO: 446750
  Synthetic oligonucleotide

SEQ ID NO: 598435 - DNA, 60 bp, Artificial; identical to SEQ ID NO: 341
  Synthetic oligonucleotide

SEQ ID NO: 598436 - DNA, 58 bp, Artificial; identical to SEQ ID NO: 446752
  Synthetic oligonucleotide

SEQ ID NO: 598437 - DNA, 57 bp, Artificial; identical to SEQ ID NO: 446756
  Synthetic oligonucleotide

SEQ ID NO: 598438 - DNA, 60 bp, Artificial; identical to SEQ ID NO: 446758
  Synthetic oligonucleotide

SEQ ID NO: 598439 - DNA, 58 bp, Artificial; identical to SEQ ID NO: 446762
  Synthetic oligonucleotide

SEQ ID NO: 598440 - DNA, 57 bp, Artificial; identical to SEQ ID NO: 7747
  Synthetic oligonucleotide

SEQ ID NO: 598441 - DNA, 57 bp, Artificial; identical to SEQ ID NO: 7748
  Synthetic oligonucleotide

SEQ ID NO: 598442 - DNA, 53 bp, Artificial; identical to SEQ ID NO: 446767
  Synthetic oligonucleotide

SEQ ID NO: 598443 - DNA, 58 bp, Artificial; identical to SEQ ID NO: 446771
  Synthetic oligonucleotide

SEQ ID NO: 598444 - DNA, 60 bp, Artificial; identical to SEQ ID NO: 446773
  Synthetic oligonucleotide

SEQ ID NO: 598445 - DNA, 53 bp, Artificial; identical to SEQ ID NO: 446774
  Synthetic oligonucleotide

SEQ ID NO: 598446 - DNA, 59 bp, Artificial; identical to SEQ ID NO: 446777
  Synthetic oligonucleotide

SEQ ID NO: 598447 - DNA, 58 bp, Artificial; identical to SEQ ID NO: 446780
  Synthetic oligonucleotide

SEQ ID NO: 598448 - DNA, 58 bp, Artificial; identical to SEQ ID NO: 19662
  Synthetic oligonucleotide

SEQ ID NO: 598449 - DNA, 55 bp, Artificial; identical to SEQ ID NO: 446785
  Synthetic oligonucleotide

SEQ ID NO: 598450 - DNA, 55 bp, Artificial; identical to SEQ ID NO: 446787
  Synthetic oligonucleotide

SEQ ID NO: 598451 - DNA, 50 bp, Artificial; identical to SEQ ID NO: 446788
  Synthetic oligonucleotide

SEQ ID NO: 598452 - DNA, 55 bp, Artificial; identical to SEQ ID NO: 446789
  Synthetic oligonucleotide

SEQ ID NO: 598453 - DNA, 53 bp, Artificial; identical to SEQ ID NO: 446792
  Synthetic oligonucleotide

SEQ ID NO: 598454 - DNA, 60 bp, Artificial; identical to SEQ ID NO: 446794
  Synthetic oligonucleotide

SEQ ID NO: 598455 - DNA, 56 bp, Artificial; identical to SEQ ID NO: 446797
  Synthetic oligonucleotide

SEQ ID NO: 598456 - DNA, 57 bp, Artificial; identical to SEQ ID NO: 446799
  Synthetic oligonucleotide

SEQ ID NO: 598457 - DNA, 57 bp, Artificial; identical to SEQ ID NO: 446801
  Synthetic oligonucleotide

SEQ ID NO: 598458 - DNA, 60 bp, Artificial; identical to SEQ ID NO: 446806
  Synthetic oligonucleotide

SEQ ID NO: 598459 - DNA, 59 bp, Artificial; identical to SEQ ID NO: 446813
  Synthetic oligonucleotide

SEQ ID NO: 598460 - DNA, 57 bp, Artificial; identical to SEQ ID NO: 446816
  Synthetic oligonucleotide

SEQ ID NO: 598461 - DNA, 56 bp, Artificial; identical to SEQ ID NO: 446817
  Synthetic oligonucleotide

SEQ ID NO: 598462 - DNA, 59 bp, Artificial; identical to SEQ ID NO: 446820
  Synthetic oligonucleotide

SEQ ID NO: 598463 - DNA, 56 bp, Artificial; identical to SEQ ID NO: 446822
  Synthetic oligonucleotide

SEQ ID NO: 598464 - DNA, 58 bp, Artificial; identical to SEQ ID NO: 446831
  Synthetic oligonucleotide

SEQ ID NO: 598465 - DNA, 60 bp, Artificial; identical to SEQ ID NO: 446833
  Synthetic oligonucleotide

SEQ ID NO: 598466 - DNA, 59 bp, Artificial; identical to SEQ ID NO: 446834
  Synthetic oligonucleotide

SEQ ID NO: 598467 - DNA, 55 bp, Artificial; identical to SEQ ID NO: 446837
  Synthetic oligonucleotide

SEQ ID NO: 598468 - DNA, 56 bp, Artificial; identical to SEQ ID NO: 446838
  Synthetic oligonucleotide

SEQ ID NO: 598469 - DNA, 60 bp, Artificial; identical to SEQ ID NO: 446841
  Synthetic oligonucleotide

SEQ ID NO: 598470 - DNA, 58 bp, Artificial; identical to SEQ ID NO: 446842
  Synthetic oligonucleotide

SEQ ID NO: 598471 - DNA, 60 bp, Artificial; identical to SEQ ID NO: 446843
  Synthetic oligonucleotide

SEQ ID NO: 598472 - DNA, 60 bp, Artificial; identical to SEQ ID NO: 446849
  Synthetic oligonucleotide

SEQ ID NO: 598473 - DNA, 57 bp, Artificial; identical to SEQ ID NO: 446850
  Synthetic oligonucleotide

SEQ ID NO: 598474 - DNA, 60 bp, Artificial; identical to SEQ ID NO: 115870
  Synthetic oligonucleotide

SEQ ID NO: 598475 - DNA, 53 bp, Artificial; identical to SEQ ID NO: 446854
  Synthetic oligonucleotide

SEQ ID NO: 598476 - DNA, 60 bp, Artificial; identical to SEQ ID NO: 6994
  Synthetic oligonucleotide

SEQ ID NO: 598477 - DNA, 58 bp, Artificial; identical to SEQ ID NO: 446858
  Synthetic oligonucleotide

SEQ ID NO: 598478 - DNA, 54 bp, Artificial; identical to SEQ ID NO: 446860
  Synthetic oligonucleotide

SEQ ID NO: 598479 - DNA, 55 bp, Artificial; identical to SEQ ID NO: 446861
  Synthetic oligonucleotide

SEQ ID NO: 598480 - DNA, 60 bp, Artificial; identical to SEQ ID NO: 446862
  Synthetic oligonucleotide

SEQ ID NO: 598481 - DNA, 59 bp, Artificial; identical to SEQ ID NO: 446864
  Synthetic oligonucleotide

SEQ ID NO: 598482 - DNA, 60 bp, Artificial; identical to SEQ ID NO: 446865
  Synthetic oligonucleotide

SEQ ID NO: 598483 - DNA, 57 bp, Artificial; identical to SEQ ID NO: 446868
  Synthetic oligonucleotide

SEQ ID NO: 598484 - DNA, 59 bp, Artificial; identical to SEQ ID NO: 446871
  Synthetic oligonucleotide

SEQ ID NO: 598485 - DNA, 59 bp, Artificial; identical to SEQ ID NO: 446872
  Synthetic oligonucleotide

SEQ ID NO: 598486 - DNA, 60 bp, Artificial; identical to SEQ ID NO: 446873
  Synthetic oligonucleotide

SEQ ID NO: 598487 - DNA, 58 bp, Artificial; identical to SEQ ID NO: 446874
  Synthetic oligonucleotide

SEQ ID NO: 598488 - DNA, 55 bp, Artificial; identical to SEQ ID NO: 446875
  Synthetic oligonucleotide

SEQ ID NO: 598489 - DNA, 59 bp, Artificial; identical to SEQ ID NO: 446878
  Synthetic oligonucleotide

SEQ ID NO: 598490 - DNA, 56 bp, Artificial; identical to SEQ ID NO: 446880
  Synthetic oligonucleotide

SEQ ID NO: 598491 - DNA, 57 bp, Artificial; identical to SEQ ID NO: 446881
  Synthetic oligonucleotide

SEQ ID NO: 598492 - DNA, 58 bp, Artificial; identical to SEQ ID NO: 446887
  Synthetic oligonucleotide

SEQ ID NO: 598493 - DNA, 60 bp, Artificial; identical to SEQ ID NO: 446891
  Synthetic oligonucleotide

SEQ ID NO: 598494 - DNA, 60 bp, Artificial; identical to SEQ ID NO: 446892
  Synthetic oligonucleotide

SEQ ID NO: 598495 - DNA, 55 bp, Artificial; identical to SEQ ID NO: 446894
  Synthetic oligonucleotide

SEQ ID NO: 598496 - DNA, 56 bp, Artificial; identical to SEQ ID NO: 446900
  Synthetic oligonucleotide

SEQ ID NO: 598497 - DNA, 58 bp, Artificial; identical to SEQ ID NO: 446906
  Synthetic oligonucleotide

SEQ ID NO: 598498 - DNA, 57 bp, Artificial; identical to SEQ ID NO: 446907
  Synthetic oligonucleotide

SEQ ID NO: 598499 - DNA, 60 bp, Artificial; identical to SEQ ID NO: 446908
  Synthetic oligonucleotide

SEQ ID NO: 598500 - DNA, 60 bp, Artificial; identical to SEQ ID NO: 446913
  Synthetic oligonucleotide

SEQ ID NO: 598501 - DNA, 60 bp, Artificial; identical to SEQ ID NO: 446915
  Synthetic oligonucleotide

SEQ ID NO: 598502 - DNA, 60 bp, Artificial; identical to SEQ ID NO: 446917
  Synthetic oligonucleotide

SEQ ID NO: 598503 - DNA, 58 bp, Artificial; identical to SEQ ID NO: 446919
  Synthetic oligonucleotide

SEQ ID NO: 598504 - DNA, 54 bp, Artificial; identical to SEQ ID NO: 446921
  Synthetic oligonucleotide

SEQ ID NO: 598505 - DNA, 50 bp, Artificial; identical to SEQ ID NO: 446922
  Synthetic oligonucleotide

SEQ ID NO: 598506 - DNA, 58 bp, Artificial; identical to SEQ ID NO: 446928
  Synthetic oligonucleotide

SEQ ID NO: 598507 - DNA, 58 bp, Artificial; identical to SEQ ID NO: 446929
  Synthetic oligonucleotide

SEQ ID NO: 598508 - DNA, 52 bp, Artificial; identical to SEQ ID NO: 446931
  Synthetic oligonucleotide

SEQ ID NO: 598509 - DNA, 57 bp, Artificial; identical to SEQ ID NO: 446932
  Synthetic oligonucleotide

SEQ ID NO: 598510 - DNA, 60 bp, Artificial; identical to SEQ ID NO: 446935
  Synthetic oligonucleotide

SEQ ID NO: 598511 - DNA, 60 bp, Artificial; identical to SEQ ID NO: 446936
  Synthetic oligonucleotide

SEQ ID NO: 598512 - DNA, 60 bp, Artificial; identical to SEQ ID NO: 446937
  Synthetic oligonucleotide

SEQ ID NO: 598513 - DNA, 50 bp, Artificial; identical to SEQ ID NO: 446938
  Synthetic oligonucleotide

SEQ ID NO: 598514 - DNA, 54 bp, Artificial; identical to SEQ ID NO: 446939
  Synthetic oligonucleotide

SEQ ID NO: 598515 - DNA, 50 bp, Artificial; identical to SEQ ID NO: 446945
  Synthetic oligonucleotide

SEQ ID NO: 598516 - DNA, 55 bp, Artificial; identical to SEQ ID NO: 446948
  Synthetic oligonucleotide

SEQ ID NO: 598517 - DNA, 58 bp, Artificial; identical to SEQ ID NO: 446949
  Synthetic oligonucleotide

SEQ ID NO: 598518 - DNA, 50 bp, Artificial; identical to SEQ ID NO: 446950
  Synthetic oligonucleotide

SEQ ID NO: 598519 - DNA, 58 bp, Artificial; identical to SEQ ID NO: 446951
  Synthetic oligonucleotide

SEQ ID NO: 598520 - DNA, 50 bp, Artificial; identical to SEQ ID NO: 446952
  Synthetic oligonucleotide

SEQ ID NO: 598521 - DNA, 55 bp, Artificial; identical to SEQ ID NO: 446955
  Synthetic oligonucleotide

SEQ ID NO: 598522 - DNA, 51 bp, Artificial; identical to SEQ ID NO: 13403
  Synthetic oligonucleotide

SEQ ID NO: 598523 - DNA, 59 bp, Artificial; identical to SEQ ID NO: 446957
  Synthetic oligonucleotide

SEQ ID NO: 598524 - DNA, 60 bp, Artificial; identical to SEQ ID NO: 446959
  Synthetic oligonucleotide

SEQ ID NO: 598525 - DNA, 55 bp, Artificial; identical to SEQ ID NO: 446960
  Synthetic oligonucleotide

SEQ ID NO: 598526 - DNA, 55 bp, Artificial; identical to SEQ ID NO: 446963
  Synthetic oligonucleotide

SEQ ID NO: 598527 - DNA, 51 bp, Artificial; identical to SEQ ID NO: 446965
  Synthetic oligonucleotide

SEQ ID NO: 598528 - DNA, 53 bp, Artificial; identical to SEQ ID NO: 446968
  Synthetic oligonucleotide

SEQ ID NO: 598529 - DNA, 59 bp, Artificial; identical to SEQ ID NO: 446969
  Synthetic oligonucleotide

SEQ ID NO: 598530 - DNA, 58 bp, Artificial; identical to SEQ ID NO: 446970
  Synthetic oligonucleotide

SEQ ID NO: 598531 - DNA, 55 bp, Artificial; identical to SEQ ID NO: 446971
  Synthetic oligonucleotide

SEQ ID NO: 598532 - DNA, 58 bp, Artificial; identical to SEQ ID NO: 446972
  Synthetic oligonucleotide

SEQ ID NO: 598533 - DNA, 56 bp, Artificial; identical to SEQ ID NO: 446974
  Synthetic oligonucleotide

SEQ ID NO: 598534 - DNA, 56 bp, Artificial; identical to SEQ ID NO: 446978
  Synthetic oligonucleotide

SEQ ID NO: 598535 - DNA, 60 bp, Artificial; identical to SEQ ID NO: 446980
  Synthetic oligonucleotide

SEQ ID NO: 598536 - DNA, 60 bp, Artificial; identical to SEQ ID NO: 446981
  Synthetic oligonucleotide

SEQ ID NO: 598537 - DNA, 55 bp, Artificial; identical to SEQ ID NO: 446983
  Synthetic oligonucleotide

SEQ ID NO: 598538 - DNA, 55 bp, Artificial; identical to SEQ ID NO: 446985
  Synthetic oligonucleotide

SEQ ID NO: 598539 - DNA, 55 bp, Artificial; identical to SEQ ID NO: 446988
  Synthetic oligonucleotide

SEQ ID NO: 598540 - DNA, 60 bp, Artificial; identical to SEQ ID NO: 446989
  Synthetic oligonucleotide

SEQ ID NO: 598541 - DNA, 60 bp, Artificial; identical to SEQ ID NO: 446990
  Synthetic oligonucleotide

SEQ ID NO: 598542 - DNA, 57 bp, Artificial; identical to SEQ ID NO: 446995
  Synthetic oligonucleotide

SEQ ID NO: 598543 - DNA, 59 bp, Artificial; identical to SEQ ID NO: 446997
  Synthetic oligonucleotide

SEQ ID NO: 598544 - DNA, 54 bp, Artificial; identical to SEQ ID NO: 446998
  Synthetic oligonucleotide

SEQ ID NO: 598545 - DNA, 56 bp, Artificial; identical to SEQ ID NO: 447000
  Synthetic oligonucleotide

SEQ ID NO: 598546 - DNA, 60 bp, Artificial; identical to SEQ ID NO: 447002
  Synthetic oligonucleotide

SEQ ID NO: 598547 - DNA, 55 bp, Artificial; identical to SEQ ID NO: 447004
  Synthetic oligonucleotide

SEQ ID NO: 598548 - DNA, 59 bp, Artificial; identical to SEQ ID NO: 447009
  Synthetic oligonucleotide

SEQ ID NO: 598549 - DNA, 57 bp, Artificial; identical to SEQ ID NO: 447014
  Synthetic oligonucleotide

SEQ ID NO: 598550 - DNA, 60 bp, Artificial; identical to SEQ ID NO: 447017
  Synthetic oligonucleotide

SEQ ID NO: 598551 - DNA, 55 bp, Artificial; identical to SEQ ID NO: 447019
  Synthetic oligonucleotide

SEQ ID NO: 598552 - DNA, 51 bp, Artificial; identical to SEQ ID NO: 447020
  Synthetic oligonucleotide

SEQ ID NO: 598553 - DNA, 57 bp, Artificial; identical to SEQ ID NO: 447024
  Synthetic oligonucleotide

SEQ ID NO: 598554 - DNA, 60 bp, Artificial; identical to SEQ ID NO: 447026
  Synthetic oligonucleotide

SEQ ID NO: 598555 - DNA, 57 bp, Artificial; identical to SEQ ID NO: 447027
  Synthetic oligonucleotide

SEQ ID NO: 598556 - DNA, 60 bp, Artificial; identical to SEQ ID NO: 447028
  Synthetic oligonucleotide

SEQ ID NO: 598557 - DNA, 60 bp, Artificial; identical to SEQ ID NO: 447029
  Synthetic oligonucleotide

SEQ ID NO: 598558 - DNA, 54 bp, Artificial; identical to SEQ ID NO: 447030
  Synthetic oligonucleotide

SEQ ID NO: 598559 - DNA, 60 bp, Artificial; identical to SEQ ID NO: 447031
  Synthetic oligonucleotide

SEQ ID NO: 598560 - DNA, 52 bp, Artificial; identical to SEQ ID NO: 447035
  Synthetic oligonucleotide

SEQ ID NO: 598561 - DNA, 60 bp, Artificial; identical to SEQ ID NO: 447038
  Synthetic oligonucleotide

SEQ ID NO: 598562 - DNA, 57 bp, Artificial; identical to SEQ ID NO: 447040
  Synthetic oligonucleotide

SEQ ID NO: 598563 - DNA, 53 bp, Artificial; identical to SEQ ID NO: 447041
  Synthetic oligonucleotide

SEQ ID NO: 598564 - DNA, 60 bp, Artificial; identical to SEQ ID NO: 447043
  Synthetic oligonucleotide

SEQ ID NO: 598565 - DNA, 60 bp, Artificial; identical to SEQ ID NO: 447047
  Synthetic oligonucleotide

SEQ ID NO: 598566 - DNA, 59 bp, Artificial; identical to SEQ ID NO: 447049
  Synthetic oligonucleotide

SEQ ID NO: 598567 - DNA, 60 bp, Artificial; identical to SEQ ID NO: 447050
  Synthetic oligonucleotide

SEQ ID NO: 598568 - DNA, 57 bp, Artificial; identical to SEQ ID NO: 447053
  Synthetic oligonucleotide

SEQ ID NO: 598569 - DNA, 60 bp, Artificial; identical to SEQ ID NO: 447054
  Synthetic oligonucleotide

SEQ ID NO: 598570 - DNA, 56 bp, Artificial; identical to SEQ ID NO: 447055
  Synthetic oligonucleotide

SEQ ID NO: 598571 - DNA, 60 bp, Artificial; identical to SEQ ID NO: 447061
  Synthetic oligonucleotide

SEQ ID NO: 598572 - DNA, 51 bp, Artificial; identical to SEQ ID NO: 447065
  Synthetic oligonucleotide

SEQ ID NO: 598573 - DNA, 55 bp, Artificial; identical to SEQ ID NO: 447066
  Synthetic oligonucleotide

SEQ ID NO: 598574 - DNA, 54 bp, Artificial; identical to SEQ ID NO: 447069
  Synthetic oligonucleotide

SEQ ID NO: 598575 - DNA, 50 bp, Artificial; identical to SEQ ID NO: 447070
  Synthetic oligonucleotide

SEQ ID NO: 598576 - DNA, 60 bp, Artificial; identical to SEQ ID NO: 447077
  Synthetic oligonucleotide

SEQ ID NO: 598577 - DNA, 60 bp, Artificial; identical to SEQ ID NO: 447079
  Synthetic oligonucleotide

SEQ ID NO: 598578 - DNA, 55 bp, Artificial; identical to SEQ ID NO: 447080
  Synthetic oligonucleotide

SEQ ID NO: 598579 - DNA, 60 bp, Artificial; identical to SEQ ID NO: 447081
  Synthetic oligonucleotide

SEQ ID NO: 598580 - DNA, 60 bp, Artificial; identical to SEQ ID NO: 447082
  Synthetic oligonucleotide

SEQ ID NO: 598581 - DNA, 56 bp, Artificial; identical to SEQ ID NO: 447083
  Synthetic oligonucleotide

SEQ ID NO: 598582 - DNA, 55 bp, Artificial; identical to SEQ ID NO: 447084
  Synthetic oligonucleotide

SEQ ID NO: 598583 - DNA, 59 bp, Artificial; identical to SEQ ID NO: 447085
  Synthetic oligonucleotide

SEQ ID NO: 598584 - DNA, 60 bp, Artificial; identical to SEQ ID NO: 14646
  Synthetic oligonucleotide

SEQ ID NO: 598585 - DNA, 58 bp, Artificial; identical to SEQ ID NO: 7765
  Synthetic oligonucleotide

SEQ ID NO: 598586 - DNA, 55 bp, Artificial; identical to SEQ ID NO: 447091
  Synthetic oligonucleotide

SEQ ID NO: 598587 - DNA, 60 bp, Artificial; identical to SEQ ID NO: 447092
  Synthetic oligonucleotide

SEQ ID NO: 598588 - DNA, 60 bp, Artificial; identical to SEQ ID NO: 447093
  Synthetic oligonucleotide

SEQ ID NO: 598589 - DNA, 55 bp, Artificial; identical to SEQ ID NO: 447095
  Synthetic oligonucleotide

SEQ ID NO: 598590 - DNA, 60 bp, Artificial; identical to SEQ ID NO: 447096
  Synthetic oligonucleotide

SEQ ID NO: 598591 - DNA, 60 bp, Artificial; identical to SEQ ID NO: 447101
  Synthetic oligonucleotide

SEQ ID NO: 598592 - DNA, 58 bp, Artificial; identical to SEQ ID NO: 447102
  Synthetic oligonucleotide

SEQ ID NO: 598593 - DNA, 60 bp, Artificial; identical to SEQ ID NO: 447103
  Synthetic oligonucleotide

SEQ ID NO: 598594 - DNA, 52 bp, Artificial; identical to SEQ ID NO: 447104
  Synthetic oligonucleotide

SEQ ID NO: 598595 - DNA, 55 bp, Artificial; identical to SEQ ID NO: 447105
  Synthetic oligonucleotide

SEQ ID NO: 598596 - DNA, 60 bp, Artificial; identical to SEQ ID NO: 447106
  Synthetic oligonucleotide

SEQ ID NO: 598597 - DNA, 52 bp, Artificial; identical to SEQ ID NO: 447108
  Synthetic oligonucleotide

SEQ ID NO: 598598 - DNA, 57 bp, Artificial; identical to SEQ ID NO: 447110
  Synthetic oligonucleotide

SEQ ID NO: 598599 - DNA, 53 bp, Artificial; identical to SEQ ID NO: 447111
  Synthetic oligonucleotide

SEQ ID NO: 598600 - DNA, 60 bp, Artificial; identical to SEQ ID NO: 447112
  Synthetic oligonucleotide

SEQ ID NO: 598601 - DNA, 60 bp, Artificial; identical to SEQ ID NO: 447115
  Synthetic oligonucleotide

SEQ ID NO: 598602 - DNA, 55 bp, Artificial; identical to SEQ ID NO: 447118
  Synthetic oligonucleotide

SEQ ID NO: 598603 - DNA, 50 bp, Artificial; identical to SEQ ID NO: 447121
  Synthetic oligonucleotide

SEQ ID NO: 598604 - DNA, 55 bp, Artificial; identical to SEQ ID NO: 447123
  Synthetic oligonucleotide

SEQ ID NO: 598605 - DNA, 60 bp, Artificial; identical to SEQ ID NO: 15810
  Synthetic oligonucleotide

SEQ ID NO: 598606 - DNA, 53 bp, Artificial; identical to SEQ ID NO: 447124
  Synthetic oligonucleotide

SEQ ID NO: 598607 - DNA, 60 bp, Artificial; identical to SEQ ID NO: 447126
  Synthetic oligonucleotide

SEQ ID NO: 598608 - DNA, 58 bp, Artificial; identical to SEQ ID NO: 447128
  Synthetic oligonucleotide

SEQ ID NO: 598609 - DNA, 58 bp, Artificial; identical to SEQ ID NO: 447132
  Synthetic oligonucleotide

SEQ ID NO: 598610 - DNA, 54 bp, Artificial; identical to SEQ ID NO: 447134
  Synthetic oligonucleotide

SEQ ID NO: 598611 - DNA, 60 bp, Artificial; identical to SEQ ID NO: 447136
  Synthetic oligonucleotide

SEQ ID NO: 598612 - DNA, 60 bp, Artificial; identical to SEQ ID NO: 447137
  Synthetic oligonucleotide

SEQ ID NO: 598613 - DNA, 60 bp, Artificial; identical to SEQ ID NO: 447138
  Synthetic oligonucleotide

SEQ ID NO: 598614 - DNA, 60 bp, Artificial; identical to SEQ ID NO: 447139
  Synthetic oligonucleotide

SEQ ID NO: 598615 - DNA, 60 bp, Artificial; identical to SEQ ID NO: 447142
  Synthetic oligonucleotide

SEQ ID NO: 598616 - DNA, 53 bp, Artificial; identical to SEQ ID NO: 447143
  Synthetic oligonucleotide

SEQ ID NO: 598617 - DNA, 57 bp, Artificial; identical to SEQ ID NO: 447146
  Synthetic oligonucleotide

SEQ ID NO: 598618 - DNA, 56 bp, Artificial; identical to SEQ ID NO: 447147
  Synthetic oligonucleotide

SEQ ID NO: 598619 - DNA, 55 bp, Artificial; identical to SEQ ID NO: 447156
  Synthetic oligonucleotide

SEQ ID NO: 598620 - DNA, 51 bp, Artificial; identical to SEQ ID NO: 18161
  Synthetic oligonucleotide

SEQ ID NO: 598621 - DNA, 54 bp, Artificial; identical to SEQ ID NO: 447159
  Synthetic oligonucleotide

SEQ ID NO: 598622 - DNA, 54 bp, Artificial; identical to SEQ ID NO: 447161
  Synthetic oligonucleotide

SEQ ID NO: 598623 - DNA, 51 bp, Artificial; identical to SEQ ID NO: 447165
  Synthetic oligonucleotide

SEQ ID NO: 598624 - DNA, 55 bp, Artificial; identical to SEQ ID NO: 447172
  Synthetic oligonucleotide

SEQ ID NO: 598625 - DNA, 55 bp, Artificial; identical to SEQ ID NO: 447175
  Synthetic oligonucleotide

SEQ ID NO: 598626 - DNA, 55 bp, Artificial; identical to SEQ ID NO: 447181
  Synthetic oligonucleotide

SEQ ID NO: 598627 - DNA, 60 bp, Artificial; identical to SEQ ID NO: 447183
  Synthetic oligonucleotide

SEQ ID NO: 598628 - DNA, 59 bp, Artificial; identical to SEQ ID NO: 447185
  Synthetic oligonucleotide

SEQ ID NO: 598629 - DNA, 54 bp, Artificial; identical to SEQ ID NO: 447187
  Synthetic oligonucleotide

SEQ ID NO: 598630 - DNA, 52 bp, Artificial; identical to SEQ ID NO: 447188
  Synthetic oligonucleotide

SEQ ID NO: 598631 - DNA, 57 bp, Artificial; identical to SEQ ID NO: 447193
  Synthetic oligonucleotide

SEQ ID NO: 598632 - DNA, 58 bp, Artificial; identical to SEQ ID NO: 19775
  Synthetic oligonucleotide

SEQ ID NO: 598633 - DNA, 58 bp, Artificial; identical to SEQ ID NO: 447196
  Synthetic oligonucleotide

SEQ ID NO: 598634 - DNA, 60 bp, Artificial; identical to SEQ ID NO: 447198
  Synthetic oligonucleotide

SEQ ID NO: 598635 - DNA, 55 bp, Artificial; identical to SEQ ID NO: 447199
  Synthetic oligonucleotide

SEQ ID NO: 598636 - DNA, 60 bp, Artificial; identical to SEQ ID NO: 13338
  Synthetic oligonucleotide

SEQ ID NO: 598637 - DNA, 58 bp, Artificial; identical to SEQ ID NO: 447204
  Synthetic oligonucleotide

SEQ ID NO: 598638 - DNA, 56 bp, Artificial; identical to SEQ ID NO: 447206
  Synthetic oligonucleotide

SEQ ID NO: 598639 - DNA, 60 bp, Artificial; identical to SEQ ID NO: 447207
  Synthetic oligonucleotide

SEQ ID NO: 598640 - DNA, 59 bp, Artificial; identical to SEQ ID NO: 447208
  Synthetic oligonucleotide

SEQ ID NO: 598641 - DNA, 55 bp, Artificial; identical to SEQ ID NO: 447209
  Synthetic oligonucleotide

SEQ ID NO: 598642 - DNA, 55 bp, Artificial; identical to SEQ ID NO: 447211
  Synthetic oligonucleotide

SEQ ID NO: 598643 - DNA, 55 bp, Artificial; identical to SEQ ID NO: 447216
  Synthetic oligonucleotide

SEQ ID NO: 598644 - DNA, 60 bp, Artificial; identical to SEQ ID NO: 447220
  Synthetic oligonucleotide

SEQ ID NO: 598645 - DNA, 55 bp, Artificial; identical to SEQ ID NO: 447222
  Synthetic oligonucleotide

SEQ ID NO: 598646 - DNA, 60 bp, Artificial; identical to SEQ ID NO: 447224
  Synthetic oligonucleotide

SEQ ID NO: 598647 - DNA, 59 bp, Artificial; identical to SEQ ID NO: 447225
  Synthetic oligonucleotide

SEQ ID NO: 598648 - DNA, 58 bp, Artificial; identical to SEQ ID NO: 447226
  Synthetic oligonucleotide

SEQ ID NO: 598649 - DNA, 56 bp, Artificial; identical to SEQ ID NO: 447231
  Synthetic oligonucleotide

SEQ ID NO: 598650 - DNA, 59 bp, Artificial; identical to SEQ ID NO: 447232
  Synthetic oligonucleotide

SEQ ID NO: 598651 - DNA, 60 bp, Artificial; identical to SEQ ID NO: 447233
  Synthetic oligonucleotide

SEQ ID NO: 598652 - DNA, 55 bp, Artificial; identical to SEQ ID NO: 447234
  Synthetic oligonucleotide

SEQ ID NO: 598653 - DNA, 56 bp, Artificial; identical to SEQ ID NO: 447235
  Synthetic oligonucleotide

SEQ ID NO: 598654 - DNA, 51 bp, Artificial; identical to SEQ ID NO: 447242
  Synthetic oligonucleotide

SEQ ID NO: 598655 - DNA, 59 bp, Artificial; identical to SEQ ID NO: 447245
  Synthetic oligonucleotide

SEQ ID NO: 598656 - DNA, 54 bp, Artificial; identical to SEQ ID NO: 447246
  Synthetic oligonucleotide

SEQ ID NO: 598657 - DNA, 57 bp, Artificial; identical to SEQ ID NO: 447248
  Synthetic oligonucleotide

SEQ ID NO: 598658 - DNA, 60 bp, Artificial; identical to SEQ ID NO: 447254
  Synthetic oligonucleotide

SEQ ID NO: 598659 - DNA, 55 bp, Artificial; identical to SEQ ID NO: 447257
  Synthetic oligonucleotide

SEQ ID NO: 598660 - DNA, 59 bp, Artificial; identical to SEQ ID NO: 447258
  Synthetic oligonucleotide

SEQ ID NO: 598661 - DNA, 56 bp, Artificial; identical to SEQ ID NO: 19222
  Synthetic oligonucleotide

SEQ ID NO: 598662 - DNA, 56 bp, Artificial; identical to SEQ ID NO: 447265
  Synthetic oligonucleotide

SEQ ID NO: 598663 - DNA, 60 bp, Artificial; identical to SEQ ID NO: 15426
  Synthetic oligonucleotide

SEQ ID NO: 598664 - DNA, 51 bp, Artificial; identical to SEQ ID NO: 447268
  Synthetic oligonucleotide

SEQ ID NO: 598665 - DNA, 55 bp, Artificial; identical to SEQ ID NO: 447269
  Synthetic oligonucleotide

SEQ ID NO: 598666 - DNA, 55 bp, Artificial; identical to SEQ ID NO: 447270
  Synthetic oligonucleotide

SEQ ID NO: 598667 - DNA, 59 bp, Artificial; identical to SEQ ID NO: 447272
  Synthetic oligonucleotide

SEQ ID NO: 598668 - DNA, 54 bp, Artificial; identical to SEQ ID NO: 447273
  Synthetic oligonucleotide

SEQ ID NO: 598669 - DNA, 57 bp, Artificial; identical to SEQ ID NO: 447274
  Synthetic oligonucleotide

SEQ ID NO: 598670 - DNA, 55 bp, Artificial; identical to SEQ ID NO: 447275
  Synthetic oligonucleotide

SEQ ID NO: 598671 - DNA, 54 bp, Artificial; identical to SEQ ID NO: 447280
  Synthetic oligonucleotide

SEQ ID NO: 598672 - DNA, 58 bp, Artificial; identical to SEQ ID NO: 447281
  Synthetic oligonucleotide

SEQ ID NO: 598673 - DNA, 55 bp, Artificial; identical to SEQ ID NO: 447285
  Synthetic oligonucleotide

SEQ ID NO: 598674 - DNA, 50 bp, Artificial; identical to SEQ ID NO: 447288
  Synthetic oligonucleotide

SEQ ID NO: 598675 - DNA, 59 bp, Artificial; identical to SEQ ID NO: 447290
  Synthetic oligonucleotide

SEQ ID NO: 598676 - DNA, 60 bp, Artificial; identical to SEQ ID NO: 447295
  Synthetic oligonucleotide

SEQ ID NO: 598677 - DNA, 60 bp, Artificial; identical to SEQ ID NO: 447296
  Synthetic oligonucleotide

SEQ ID NO: 598678 - DNA, 57 bp, Artificial; identical to SEQ ID NO: 447301
  Synthetic oligonucleotide

SEQ ID NO: 598679 - DNA, 51 bp, Artificial; identical to SEQ ID NO: 447307
  Synthetic oligonucleotide

SEQ ID NO: 598680 - DNA, 55 bp, Artificial; identical to SEQ ID NO: 447312
  Synthetic oligonucleotide

SEQ ID NO: 598681 - DNA, 58 bp, Artificial; identical to SEQ ID NO: 447313
  Synthetic oligonucleotide

SEQ ID NO: 598682 - DNA, 59 bp, Artificial; identical to SEQ ID NO: 447314
  Synthetic oligonucleotide

SEQ ID NO: 598683 - DNA, 54 bp, Artificial; identical to SEQ ID NO: 447316
  Synthetic oligonucleotide

SEQ ID NO: 598684 - DNA, 57 bp, Artificial; identical to SEQ ID NO: 447317
  Synthetic oligonucleotide

SEQ ID NO: 598685 - DNA, 53 bp, Artificial; identical to SEQ ID NO: 447318
  Synthetic oligonucleotide

SEQ ID NO: 598686 - DNA, 50 bp, Artificial; identical to SEQ ID NO: 447319
  Synthetic oligonucleotide

SEQ ID NO: 598687 - DNA, 50 bp, Artificial; identical to SEQ ID NO: 447321
  Synthetic oligonucleotide

SEQ ID NO: 598688 - DNA, 55 bp, Artificial; identical to SEQ ID NO: 447324
  Synthetic oligonucleotide

SEQ ID NO: 598689 - DNA, 52 bp, Artificial; identical to SEQ ID NO: 447325
  Synthetic oligonucleotide

SEQ ID NO: 598690 - DNA, 51 bp, Artificial; identical to SEQ ID NO: 447327
  Synthetic oligonucleotide

SEQ ID NO: 598691 - DNA, 55 bp, Artificial; identical to SEQ ID NO: 447329
  Synthetic oligonucleotide

SEQ ID NO: 598692 - DNA, 51 bp, Artificial; identical to SEQ ID NO: 447330
  Synthetic oligonucleotide

SEQ ID NO: 598693 - DNA, 57 bp, Artificial; identical to SEQ ID NO: 447333
  Synthetic oligonucleotide

SEQ ID NO: 598694 - DNA, 55 bp, Artificial; identical to SEQ ID NO: 447334
  Synthetic oligonucleotide

SEQ ID NO: 598695 - DNA, 55 bp, Artificial; identical to SEQ ID NO: 447335
  Synthetic oligonucleotide

SEQ ID NO: 598696 - DNA, 60 bp, Artificial; identical to SEQ ID NO: 447336
  Synthetic oligonucleotide

SEQ ID NO: 598697 - DNA, 58 bp, Artificial; identical to SEQ ID NO: 447337
  Synthetic oligonucleotide

SEQ ID NO: 598698 - DNA, 52 bp, Artificial; identical to SEQ ID NO: 447339
  Synthetic oligonucleotide

SEQ ID NO: 598699 - DNA, 56 bp, Artificial; identical to SEQ ID NO: 447341
  Synthetic oligonucleotide

SEQ ID NO: 598700 - DNA, 54 bp, Artificial; identical to SEQ ID NO: 447346
  Synthetic oligonucleotide

SEQ ID NO: 598701 - DNA, 60 bp, Artificial; identical to SEQ ID NO: 447352
  Synthetic oligonucleotide

SEQ ID NO: 598702 - DNA, 57 bp, Artificial; identical to SEQ ID NO: 447355
  Synthetic oligonucleotide

SEQ ID NO: 598703 - DNA, 60 bp, Artificial; identical to SEQ ID NO: 447358
  Synthetic oligonucleotide

SEQ ID NO: 598704 - DNA, 60 bp, Artificial; identical to SEQ ID NO: 13163
  Synthetic oligonucleotide

SEQ ID NO: 598705 - DNA, 60 bp, Artificial; identical to SEQ ID NO: 447359
  Synthetic oligonucleotide

SEQ ID NO: 598706 - DNA, 55 bp, Artificial; identical to SEQ ID NO: 447360
  Synthetic oligonucleotide

SEQ ID NO: 598707 - DNA, 60 bp, Artificial; identical to SEQ ID NO: 447361
  Synthetic oligonucleotide

SEQ ID NO: 598708 - DNA, 60 bp, Artificial; identical to SEQ ID NO: 447362
  Synthetic oligonucleotide

SEQ ID NO: 598709 - DNA, 60 bp, Artificial; identical to SEQ ID NO: 447365
  Synthetic oligonucleotide

SEQ ID NO: 598710 - DNA, 60 bp, Artificial; identical to SEQ ID NO: 447370
  Synthetic oligonucleotide

SEQ ID NO: 598711 - DNA, 60 bp, Artificial; identical to SEQ ID NO: 447371
  Synthetic oligonucleotide

SEQ ID NO: 598712 - DNA, 56 bp, Artificial; identical to SEQ ID NO: 447372
  Synthetic oligonucleotide

SEQ ID NO: 598713 - DNA, 60 bp, Artificial; identical to SEQ ID NO: 447374
  Synthetic oligonucleotide

SEQ ID NO: 598714 - DNA, 60 bp, Artificial; identical to SEQ ID NO: 447375
  Synthetic oligonucleotide

SEQ ID NO: 598715 - DNA, 51 bp, Artificial; identical to SEQ ID NO: 447376
  Synthetic oligonucleotide

SEQ ID NO: 598716 - DNA, 60 bp, Artificial; identical to SEQ ID NO: 447377
  Synthetic oligonucleotide

SEQ ID NO: 598717 - DNA, 53 bp, Artificial; identical to SEQ ID NO: 447379
  Synthetic oligonucleotide

SEQ ID NO: 598718 - DNA, 53 bp, Artificial; identical to SEQ ID NO: 17703
  Synthetic oligonucleotide

SEQ ID NO: 598719 - DNA, 55 bp, Artificial; identical to SEQ ID NO: 447383
  Synthetic oligonucleotide

SEQ ID NO: 598720 - DNA, 55 bp, Artificial; identical to SEQ ID NO: 447385
  Synthetic oligonucleotide

SEQ ID NO: 598721 - DNA, 60 bp, Artificial; identical to SEQ ID NO: 447387
  Synthetic oligonucleotide

SEQ ID NO: 598722 - DNA, 55 bp, Artificial; identical to SEQ ID NO: 447391
  Synthetic oligonucleotide

SEQ ID NO: 598723 - DNA, 60 bp, Artificial; identical to SEQ ID NO: 447394
  Synthetic oligonucleotide

SEQ ID NO: 598724 - DNA, 56 bp, Artificial; identical to SEQ ID NO: 447396
  Synthetic oligonucleotide

SEQ ID NO: 598725 - DNA, 59 bp, Artificial; identical to SEQ ID NO: 447397
  Synthetic oligonucleotide

SEQ ID NO: 598726 - DNA, 57 bp, Artificial; identical to SEQ ID NO: 447401
  Synthetic oligonucleotide

SEQ ID NO: 598727 - DNA, 54 bp, Artificial; identical to SEQ ID NO: 447403
  Synthetic oligonucleotide

SEQ ID NO: 598728 - DNA, 55 bp, Artificial; identical to SEQ ID NO: 7398
  Synthetic oligonucleotide

SEQ ID NO: 598729 - DNA, 55 bp, Artificial; identical to SEQ ID NO: 447408
  Synthetic oligonucleotide

SEQ ID NO: 598730 - DNA, 55 bp, Artificial; identical to SEQ ID NO: 16403
  Synthetic oligonucleotide

SEQ ID NO: 598731 - DNA, 56 bp, Artificial; identical to SEQ ID NO: 447410
  Synthetic oligonucleotide

SEQ ID NO: 598732 - DNA, 60 bp, Artificial; identical to SEQ ID NO: 447412
  Synthetic oligonucleotide

SEQ ID NO: 598733 - DNA, 60 bp, Artificial; identical to SEQ ID NO: 447414
  Synthetic oligonucleotide

SEQ ID NO: 598734 - DNA, 60 bp, Artificial; identical to SEQ ID NO: 447416
  Synthetic oligonucleotide

SEQ ID NO: 598735 - DNA, 59 bp, Artificial; identical to SEQ ID NO: 447417
  Synthetic oligonucleotide

SEQ ID NO: 598736 - DNA, 58 bp, Artificial; identical to SEQ ID NO: 447418
  Synthetic oligonucleotide

SEQ ID NO: 598737 - DNA, 57 bp, Artificial; identical to SEQ ID NO: 447420
  Synthetic oligonucleotide

SEQ ID NO: 598738 - DNA, 54 bp, Artificial; identical to SEQ ID NO: 447422
  Synthetic oligonucleotide

SEQ ID NO: 598739 - DNA, 57 bp, Artificial; identical to SEQ ID NO: 447423
  Synthetic oligonucleotide

SEQ ID NO: 598740 - DNA, 55 bp, Artificial; identical to SEQ ID NO: 447424
  Synthetic oligonucleotide

SEQ ID NO: 598741 - DNA, 60 bp, Artificial; identical to SEQ ID NO: 447425
  Synthetic oligonucleotide

SEQ ID NO: 598742 - DNA, 55 bp, Artificial; identical to SEQ ID NO: 447426
  Synthetic oligonucleotide

SEQ ID NO: 598743 - DNA, 57 bp, Artificial; identical to SEQ ID NO: 447427
  Synthetic oligonucleotide

SEQ ID NO: 598744 - DNA, 58 bp, Artificial; identical to SEQ ID NO: 447429
  Synthetic oligonucleotide

SEQ ID NO: 598745 - DNA, 60 bp, Artificial; identical to SEQ ID NO: 10455
  Synthetic oligonucleotide

SEQ ID NO: 598746 - DNA, 59 bp, Artificial; identical to SEQ ID NO: 447432
  Synthetic oligonucleotide

SEQ ID NO: 598747 - DNA, 58 bp, Artificial; identical to SEQ ID NO: 447434
  Synthetic oligonucleotide

SEQ ID NO: 598748 - DNA, 59 bp, Artificial; identical to SEQ ID NO: 447436
  Synthetic oligonucleotide

SEQ ID NO: 598749 - DNA, 55 bp, Artificial; identical to SEQ ID NO: 447438
  Synthetic oligonucleotide

SEQ ID NO: 598750 - DNA, 55 bp, Artificial; identical to SEQ ID NO: 447442
  Synthetic oligonucleotide

SEQ ID NO: 598751 - DNA, 51 bp, Artificial; identical to SEQ ID NO: 447444
  Synthetic oligonucleotide

SEQ ID NO: 598752 - DNA, 53 bp, Artificial; identical to SEQ ID NO: 447445
  Synthetic oligonucleotide

SEQ ID NO: 598753 - DNA, 55 bp, Artificial; identical to SEQ ID NO: 447446
  Synthetic oligonucleotide

SEQ ID NO: 598754 - DNA, 54 bp, Artificial; identical to SEQ ID NO: 18365
  Synthetic oligonucleotide

SEQ ID NO: 598755 - DNA, 60 bp, Artificial; identical to SEQ ID NO: 447448
  Synthetic oligonucleotide

SEQ ID NO: 598756 - DNA, 60 bp, Artificial; identical to SEQ ID NO: 447449
  Synthetic oligonucleotide

SEQ ID NO: 598757 - DNA, 60 bp, Artificial; identical to SEQ ID NO: 447451
  Synthetic oligonucleotide

SEQ ID NO: 598758 - DNA, 60 bp, Artificial; identical to SEQ ID NO: 447452
  Synthetic oligonucleotide

SEQ ID NO: 598759 - DNA, 60 bp, Artificial; identical to SEQ ID NO: 447459
  Synthetic oligonucleotide

SEQ ID NO: 598760 - DNA, 60 bp, Artificial; identical to SEQ ID NO: 447461
  Synthetic oligonucleotide

SEQ ID NO: 598761 - DNA, 58 bp, Artificial; identical to SEQ ID NO: 447463
  Synthetic oligonucleotide

SEQ ID NO: 598762 - DNA, 53 bp, Artificial; identical to SEQ ID NO: 447467
  Synthetic oligonucleotide

SEQ ID NO: 598763 - DNA, 60 bp, Artificial; identical to SEQ ID NO: 447468
  Synthetic oligonucleotide

SEQ ID NO: 598764 - DNA, 54 bp, Artificial; identical to SEQ ID NO: 447469
  Synthetic oligonucleotide

SEQ ID NO: 598765 - DNA, 53 bp, Artificial; identical to SEQ ID NO: 447470
  Synthetic oligonucleotide

SEQ ID NO: 598766 - DNA, 60 bp, Artificial; identical to SEQ ID NO: 447474
  Synthetic oligonucleotide

SEQ ID NO: 598767 - DNA, 50 bp, Artificial; identical to SEQ ID NO: 447478
  Synthetic oligonucleotide

SEQ ID NO: 598768 - DNA, 54 bp, Artificial; identical to SEQ ID NO: 447481
  Synthetic oligonucleotide

SEQ ID NO: 598769 - DNA, 57 bp, Artificial; identical to SEQ ID NO: 6393
  Synthetic oligonucleotide

SEQ ID NO: 598770 - DNA, 58 bp, Artificial; identical to SEQ ID NO: 447484
  Synthetic oligonucleotide

SEQ ID NO: 598771 - DNA, 60 bp, Artificial; identical to SEQ ID NO: 447490
  Synthetic oligonucleotide

SEQ ID NO: 598772 - DNA, 60 bp, Artificial; identical to SEQ ID NO: 447492
  Synthetic oligonucleotide

SEQ ID NO: 598773 - DNA, 57 bp, Artificial; identical to SEQ ID NO: 447493
  Synthetic oligonucleotide

SEQ ID NO: 598774 - DNA, 58 bp, Artificial; identical to SEQ ID NO: 16397
  Synthetic oligonucleotide

SEQ ID NO: 598775 - DNA, 57 bp, Artificial; identical to SEQ ID NO: 447495
  Synthetic oligonucleotide

SEQ ID NO: 598776 - DNA, 55 bp, Artificial; identical to SEQ ID NO: 447498
  Synthetic oligonucleotide

SEQ ID NO: 598777 - DNA, 60 bp, Artificial; identical to SEQ ID NO: 447500
  Synthetic oligonucleotide

SEQ ID NO: 598778 - DNA, 55 bp, Artificial; identical to SEQ ID NO: 447501
  Synthetic oligonucleotide

SEQ ID NO: 598779 - DNA, 60 bp, Artificial; identical to SEQ ID NO: 447503
  Synthetic oligonucleotide

SEQ ID NO: 598780 - DNA, 60 bp, Artificial; identical to SEQ ID NO: 447504
  Synthetic oligonucleotide

SEQ ID NO: 598781 - DNA, 60 bp, Artificial; identical to SEQ ID NO: 447507
  Synthetic oligonucleotide

SEQ ID NO: 598782 - DNA, 58 bp, Artificial; identical to SEQ ID NO: 447513
  Synthetic oligonucleotide

SEQ ID NO: 598783 - DNA, 60 bp, Artificial; identical to SEQ ID NO: 447514
  Synthetic oligonucleotide

SEQ ID NO: 598784 - DNA, 58 bp, Artificial; identical to SEQ ID NO: 447520
  Synthetic oligonucleotide

SEQ ID NO: 598785 - DNA, 60 bp, Artificial; identical to SEQ ID NO: 447522
  Synthetic oligonucleotide

SEQ ID NO: 598786 - DNA, 50 bp, Artificial; identical to SEQ ID NO: 447524
  Synthetic oligonucleotide

SEQ ID NO: 598787 - DNA, 53 bp, Artificial; identical to SEQ ID NO: 447526
  Synthetic oligonucleotide

SEQ ID NO: 598788 - DNA, 60 bp, Artificial; identical to SEQ ID NO: 447529
  Synthetic oligonucleotide

SEQ ID NO: 598789 - DNA, 54 bp, Artificial; identical to SEQ ID NO: 447530
  Synthetic oligonucleotide

SEQ ID NO: 598790 - DNA, 60 bp, Artificial; identical to SEQ ID NO: 447531
  Synthetic oligonucleotide

SEQ ID NO: 598791 - DNA, 60 bp, Artificial; identical to SEQ ID NO: 447532
  Synthetic oligonucleotide

SEQ ID NO: 598792 - DNA, 60 bp, Artificial; identical to SEQ ID NO: 447535
  Synthetic oligonucleotide

SEQ ID NO: 598793 - DNA, 57 bp, Artificial; identical to SEQ ID NO: 447537
  Synthetic oligonucleotide

SEQ ID NO: 598794 - DNA, 60 bp, Artificial; identical to SEQ ID NO: 447538
  Synthetic oligonucleotide

SEQ ID NO: 598795 - DNA, 60 bp, Artificial; identical to SEQ ID NO: 8756
  Synthetic oligonucleotide

SEQ ID NO: 598796 - DNA, 58 bp, Artificial; identical to SEQ ID NO: 447540
  Synthetic oligonucleotide

SEQ ID NO: 598797 - DNA, 59 bp, Artificial; identical to SEQ ID NO: 447541
  Synthetic oligonucleotide

SEQ ID NO: 598798 - DNA, 54 bp, Artificial; identical to SEQ ID NO: 447543
  Synthetic oligonucleotide

SEQ ID NO: 598799 - DNA, 60 bp, Artificial; identical to SEQ ID NO: 447545
  Synthetic oligonucleotide

SEQ ID NO: 598800 - DNA, 60 bp, Artificial; identical to SEQ ID NO: 447551
  Synthetic oligonucleotide

SEQ ID NO: 598801 - DNA, 53 bp, Artificial; identical to SEQ ID NO: 447552
  Synthetic oligonucleotide

SEQ ID NO: 598802 - DNA, 59 bp, Artificial; identical to SEQ ID NO: 447553
  Synthetic oligonucleotide

SEQ ID NO: 598803 - DNA, 58 bp, Artificial; identical to SEQ ID NO: 447555
  Synthetic oligonucleotide

SEQ ID NO: 598804 - DNA, 60 bp, Artificial; identical to SEQ ID NO: 447556
  Synthetic oligonucleotide

SEQ ID NO: 598805 - DNA, 60 bp, Artificial; identical to SEQ ID NO: 447557
  Synthetic oligonucleotide

SEQ ID NO: 598806 - DNA, 59 bp, Artificial; identical to SEQ ID NO: 447558
  Synthetic oligonucleotide

SEQ ID NO: 598807 - DNA, 60 bp, Artificial; identical to SEQ ID NO: 447559
  Synthetic oligonucleotide

SEQ ID NO: 598808 - DNA, 58 bp, Artificial; identical to SEQ ID NO: 447560
  Synthetic oligonucleotide

SEQ ID NO: 598809 - DNA, 59 bp, Artificial; identical to SEQ ID NO: 447561
  Synthetic oligonucleotide

SEQ ID NO: 598810 - DNA, 60 bp, Artificial; identical to SEQ ID NO: 447565
  Synthetic oligonucleotide

SEQ ID NO: 598811 - DNA, 57 bp, Artificial; identical to SEQ ID NO: 447566
  Synthetic oligonucleotide

SEQ ID NO: 598812 - DNA, 53 bp, Artificial; identical to SEQ ID NO: 447570
  Synthetic oligonucleotide

SEQ ID NO: 598813 - DNA, 60 bp, Artificial; identical to SEQ ID NO: 447571
  Synthetic oligonucleotide

SEQ ID NO: 598814 - DNA, 60 bp, Artificial; identical to SEQ ID NO: 447572
  Synthetic oligonucleotide

SEQ ID NO: 598815 - DNA, 51 bp, Artificial; identical to SEQ ID NO: 447575
  Synthetic oligonucleotide

SEQ ID NO: 598816 - DNA, 55 bp, Artificial; identical to SEQ ID NO: 447576
  Synthetic oligonucleotide

SEQ ID NO: 598817 - DNA, 60 bp, Artificial; identical to SEQ ID NO: 447577
  Synthetic oligonucleotide

SEQ ID NO: 598818 - DNA, 60 bp, Artificial; identical to SEQ ID NO: 447578
  Synthetic oligonucleotide

SEQ ID NO: 598819 - DNA, 51 bp, Artificial; identical to SEQ ID NO: 447579
  Synthetic oligonucleotide

SEQ ID NO: 598820 - DNA, 60 bp, Artificial; identical to SEQ ID NO: 447581
  Synthetic oligonucleotide

SEQ ID NO: 598821 - DNA, 60 bp, Artificial; identical to SEQ ID NO: 447582
  Synthetic oligonucleotide

SEQ ID NO: 598822 - DNA, 60 bp, Artificial; identical to SEQ ID NO: 447583
  Synthetic oligonucleotide

SEQ ID NO: 598823 - DNA, 60 bp, Artificial; identical to SEQ ID NO: 7619
  Synthetic oligonucleotide

SEQ ID NO: 598824 - DNA, 59 bp, Artificial; identical to SEQ ID NO: 447584
  Synthetic oligonucleotide

SEQ ID NO: 598825 - DNA, 54 bp, Artificial; identical to SEQ ID NO: 447587
  Synthetic oligonucleotide

SEQ ID NO: 598826 - DNA, 53 bp, Artificial; identical to SEQ ID NO: 447591
  Synthetic oligonucleotide

SEQ ID NO: 598827 - DNA, 58 bp, Artificial; identical to SEQ ID NO: 447593
  Synthetic oligonucleotide

SEQ ID NO: 598828 - DNA, 60 bp, Artificial; identical to SEQ ID NO: 447596
  Synthetic oligonucleotide

SEQ ID NO: 598829 - DNA, 55 bp, Artificial; identical to SEQ ID NO: 447599
  Synthetic oligonucleotide

SEQ ID NO: 598830 - DNA, 60 bp, Artificial; identical to SEQ ID NO: 447601
  Synthetic oligonucleotide

SEQ ID NO: 598831 - DNA, 60 bp, Artificial; identical to SEQ ID NO: 447605
  Synthetic oligonucleotide

SEQ ID NO: 598832 - DNA, 60 bp, Artificial; identical to SEQ ID NO: 447606
  Synthetic oligonucleotide

SEQ ID NO: 598833 - DNA, 55 bp, Artificial; identical to SEQ ID NO: 447612
  Synthetic oligonucleotide

SEQ ID NO: 598834 - DNA, 60 bp, Artificial; identical to SEQ ID NO: 447619
  Synthetic oligonucleotide

SEQ ID NO: 598835 - DNA, 60 bp, Artificial; identical to SEQ ID NO: 447620
  Synthetic oligonucleotide

SEQ ID NO: 598836 - DNA, 54 bp, Artificial; identical to SEQ ID NO: 447621
  Synthetic oligonucleotide

SEQ ID NO: 598837 - DNA, 60 bp, Artificial; identical to SEQ ID NO: 447624
  Synthetic oligonucleotide

SEQ ID NO: 598838 - DNA, 50 bp, Artificial; identical to SEQ ID NO: 447629
  Synthetic oligonucleotide

SEQ ID NO: 598839 - DNA, 59 bp, Artificial; identical to SEQ ID NO: 447630
  Synthetic oligonucleotide

SEQ ID NO: 598840 - DNA, 55 bp, Artificial; identical to SEQ ID NO: 16483
  Synthetic oligonucleotide

SEQ ID NO: 598841 - DNA, 60 bp, Artificial; identical to SEQ ID NO: 447641
  Synthetic oligonucleotide

SEQ ID NO: 598842 - DNA, 57 bp, Artificial; identical to SEQ ID NO: 447642
  Synthetic oligonucleotide

SEQ ID NO: 598843 - DNA, 60 bp, Artificial; identical to SEQ ID NO: 447645
  Synthetic oligonucleotide

SEQ ID NO: 598844 - DNA, 59 bp, Artificial; identical to SEQ ID NO: 447646
  Synthetic oligonucleotide

SEQ ID NO: 598845 - DNA, 60 bp, Artificial; identical to SEQ ID NO: 447647
  Synthetic oligonucleotide

SEQ ID NO: 598846 - DNA, 59 bp, Artificial; identical to SEQ ID NO: 447653
  Synthetic oligonucleotide

SEQ ID NO: 598847 - DNA, 60 bp, Artificial; identical to SEQ ID NO: 447655
  Synthetic oligonucleotide

SEQ ID NO: 598848 - DNA, 60 bp, Artificial; identical to SEQ ID NO: 447661
  Synthetic oligonucleotide

SEQ ID NO: 598849 - DNA, 58 bp, Artificial; identical to SEQ ID NO: 447662
  Synthetic oligonucleotide

SEQ ID NO: 598850 - DNA, 56 bp, Artificial; identical to SEQ ID NO: 447663
  Synthetic oligonucleotide

SEQ ID NO: 598851 - DNA, 56 bp, Artificial; identical to SEQ ID NO: 447664
  Synthetic oligonucleotide

SEQ ID NO: 598852 - DNA, 60 bp, Artificial; identical to SEQ ID NO: 447665
  Synthetic oligonucleotide

SEQ ID NO: 598853 - DNA, 57 bp, Artificial; identical to SEQ ID NO: 447667
  Synthetic oligonucleotide

SEQ ID NO: 598854 - DNA, 49 bp, Artificial; identical to SEQ ID NO: 447669
  Synthetic oligonucleotide

SEQ ID NO: 598855 - DNA, 57 bp, Artificial; identical to SEQ ID NO: 447670
  Synthetic oligonucleotide

SEQ ID NO: 598856 - DNA, 56 bp, Artificial; identical to SEQ ID NO: 447676
  Synthetic oligonucleotide

SEQ ID NO: 598857 - DNA, 60 bp, Artificial; identical to SEQ ID NO: 447678
  Synthetic oligonucleotide

SEQ ID NO: 598858 - DNA, 55 bp, Artificial; identical to SEQ ID NO: 447679
  Synthetic oligonucleotide

SEQ ID NO: 598859 - DNA, 60 bp, Artificial; identical to SEQ ID NO: 447681
  Synthetic oligonucleotide

SEQ ID NO: 598860 - DNA, 50 bp, Artificial; identical to SEQ ID NO: 447682
  Synthetic oligonucleotide

SEQ ID NO: 598861 - DNA, 60 bp, Artificial; identical to SEQ ID NO: 15610
  Synthetic oligonucleotide

SEQ ID NO: 598862 - DNA, 60 bp, Artificial; identical to SEQ ID NO: 447683
  Synthetic oligonucleotide

SEQ ID NO: 598863 - DNA, 58 bp, Artificial; identical to SEQ ID NO: 447685
  Synthetic oligonucleotide

SEQ ID NO: 598864 - DNA, 59 bp, Artificial; identical to SEQ ID NO: 447689
  Synthetic oligonucleotide

SEQ ID NO: 598865 - DNA, 56 bp, Artificial; identical to SEQ ID NO: 447698
  Synthetic oligonucleotide

SEQ ID NO: 598866 - DNA, 56 bp, Artificial; identical to SEQ ID NO: 447702
  Synthetic oligonucleotide

SEQ ID NO: 598867 - DNA, 55 bp, Artificial; identical to SEQ ID NO: 447704
  Synthetic oligonucleotide

SEQ ID NO: 598868 - DNA, 60 bp, Artificial; identical to SEQ ID NO: 447706
  Synthetic oligonucleotide

SEQ ID NO: 598869 - DNA, 59 bp, Artificial; identical to SEQ ID NO: 18360
  Synthetic oligonucleotide

SEQ ID NO: 598870 - DNA, 56 bp, Artificial; identical to SEQ ID NO: 447711
  Synthetic oligonucleotide

SEQ ID NO: 598871 - DNA, 58 bp, Artificial; identical to SEQ ID NO: 447712
  Synthetic oligonucleotide

SEQ ID NO: 598872 - DNA, 55 bp, Artificial; identical to SEQ ID NO: 447715
  Synthetic oligonucleotide

SEQ ID NO: 598873 - DNA, 57 bp, Artificial; identical to SEQ ID NO: 447723
  Synthetic oligonucleotide

SEQ ID NO: 598874 - DNA, 59 bp, Artificial; identical to SEQ ID NO: 447725
  Synthetic oligonucleotide

SEQ ID NO: 598875 - DNA, 57 bp, Artificial; identical to SEQ ID NO: 447726
  Synthetic oligonucleotide

SEQ ID NO: 598876 - DNA, 60 bp, Artificial; identical to SEQ ID NO: 447727
  Synthetic oligonucleotide

SEQ ID NO: 598877 - DNA, 60 bp, Artificial; identical to SEQ ID NO: 447728
  Synthetic oligonucleotide

SEQ ID NO: 598878 - DNA, 55 bp, Artificial; identical to SEQ ID NO: 447729
  Synthetic oligonucleotide

SEQ ID NO: 598879 - DNA, 60 bp, Artificial; identical to SEQ ID NO: 447731
  Synthetic oligonucleotide

SEQ ID NO: 598880 - DNA, 60 bp, Artificial; identical to SEQ ID NO: 9341
  Synthetic oligonucleotide

SEQ ID NO: 598881 - DNA, 58 bp, Artificial; identical to SEQ ID NO: 447733
  Synthetic oligonucleotide

SEQ ID NO: 598882 - DNA, 51 bp, Artificial; identical to SEQ ID NO: 447734
  Synthetic oligonucleotide

SEQ ID NO: 598883 - DNA, 55 bp, Artificial; identical to SEQ ID NO: 447736
  Synthetic oligonucleotide

SEQ ID NO: 598884 - DNA, 59 bp, Artificial; identical to SEQ ID NO: 447739
  Synthetic oligonucleotide

SEQ ID NO: 598885 - DNA, 59 bp, Artificial; identical to SEQ ID NO: 447740
  Synthetic oligonucleotide

SEQ ID NO: 598886 - DNA, 52 bp, Artificial; identical to SEQ ID NO: 447742
  Synthetic oligonucleotide

SEQ ID NO: 598887 - DNA, 56 bp, Artificial; identical to SEQ ID NO: 447744
  Synthetic oligonucleotide

SEQ ID NO: 598888 - DNA, 59 bp, Artificial; identical to SEQ ID NO: 447747
  Synthetic oligonucleotide

SEQ ID NO: 598889 - DNA, 58 bp, Artificial; identical to SEQ ID NO: 447749
  Synthetic oligonucleotide

SEQ ID NO: 598890 - DNA, 60 bp, Artificial; identical to SEQ ID NO: 447750
  Synthetic oligonucleotide

SEQ ID NO: 598891 - DNA, 60 bp, Artificial; identical to SEQ ID NO: 447751
  Synthetic oligonucleotide

SEQ ID NO: 598892 - DNA, 51 bp, Artificial; identical to SEQ ID NO: 447753
  Synthetic oligonucleotide

SEQ ID NO: 598893 - DNA, 55 bp, Artificial; identical to SEQ ID NO: 447756
  Synthetic oligonucleotide

SEQ ID NO: 598894 - DNA, 54 bp, Artificial; identical to SEQ ID NO: 447762
  Synthetic oligonucleotide

SEQ ID NO: 598895 - DNA, 59 bp, Artificial; identical to SEQ ID NO: 447764
  Synthetic oligonucleotide

SEQ ID NO: 598896 - DNA, 58 bp, Artificial; identical to SEQ ID NO: 447773
  Synthetic oligonucleotide

SEQ ID NO: 598897 - DNA, 58 bp, Artificial; identical to SEQ ID NO: 447774
  Synthetic oligonucleotide

SEQ ID NO: 598898 - DNA, 55 bp, Artificial; identical to SEQ ID NO: 447775
  Synthetic oligonucleotide

SEQ ID NO: 598899 - DNA, 60 bp, Artificial; identical to SEQ ID NO: 447776
  Synthetic oligonucleotide

SEQ ID NO: 598900 - DNA, 60 bp, Artificial; identical to SEQ ID NO: 447777
  Synthetic oligonucleotide

SEQ ID NO: 598901 - DNA, 54 bp, Artificial; identical to SEQ ID NO: 447780
  Synthetic oligonucleotide

SEQ ID NO: 598902 - DNA, 60 bp, Artificial; identical to SEQ ID NO: 447782
  Synthetic oligonucleotide

SEQ ID NO: 598903 - DNA, 56 bp, Artificial; identical to SEQ ID NO: 447784
  Synthetic oligonucleotide

SEQ ID NO: 598904 - DNA, 57 bp, Artificial; identical to SEQ ID NO: 447789
  Synthetic oligonucleotide

SEQ ID NO: 598905 - DNA, 60 bp, Artificial; identical to SEQ ID NO: 447791
  Synthetic oligonucleotide

SEQ ID NO: 598906 - DNA, 53 bp, Artificial; identical to SEQ ID NO: 447795
  Synthetic oligonucleotide

SEQ ID NO: 598907 - DNA, 57 bp, Artificial; identical to SEQ ID NO: 447800
  Synthetic oligonucleotide

SEQ ID NO: 598908 - DNA, 54 bp, Artificial; identical to SEQ ID NO: 447802
  Synthetic oligonucleotide

SEQ ID NO: 598909 - DNA, 58 bp, Artificial; identical to SEQ ID NO: 447805
  Synthetic oligonucleotide

SEQ ID NO: 598910 - DNA, 57 bp, Artificial; identical to SEQ ID NO: 447806
  Synthetic oligonucleotide

SEQ ID NO: 598911 - DNA, 58 bp, Artificial; identical to SEQ ID NO: 447807
  Synthetic oligonucleotide

SEQ ID NO: 598912 - DNA, 53 bp, Artificial; identical to SEQ ID NO: 447808
  Synthetic oligonucleotide

SEQ ID NO: 598913 - DNA, 53 bp, Artificial; identical to SEQ ID NO: 447810
  Synthetic oligonucleotide

SEQ ID NO: 598914 - DNA, 55 bp, Artificial; identical to SEQ ID NO: 447813
  Synthetic oligonucleotide

SEQ ID NO: 598915 - DNA, 58 bp, Artificial; identical to SEQ ID NO: 447816
  Synthetic oligonucleotide

SEQ ID NO: 598916 - DNA, 60 bp, Artificial; identical to SEQ ID NO: 447818
  Synthetic oligonucleotide

SEQ ID NO: 598917 - DNA, 51 bp, Artificial; identical to SEQ ID NO: 447820
  Synthetic oligonucleotide

SEQ ID NO: 598918 - DNA, 56 bp, Artificial; identical to SEQ ID NO: 447822
  Synthetic oligonucleotide

SEQ ID NO: 598919 - DNA, 54 bp, Artificial; identical to SEQ ID NO: 447823
  Synthetic oligonucleotide

SEQ ID NO: 598920 - DNA, 53 bp, Artificial; identical to SEQ ID NO: 447827
  Synthetic oligonucleotide

SEQ ID NO: 598921 - DNA, 59 bp, Artificial; identical to SEQ ID NO: 447828
  Synthetic oligonucleotide

SEQ ID NO: 598922 - DNA, 50 bp, Artificial; identical to SEQ ID NO: 447829
  Synthetic oligonucleotide

SEQ ID NO: 598923 - DNA, 57 bp, Artificial; identical to SEQ ID NO: 447832
  Synthetic oligonucleotide

SEQ ID NO: 598924 - DNA, 60 bp, Artificial; identical to SEQ ID NO: 447833
  Synthetic oligonucleotide

SEQ ID NO: 598925 - DNA, 50 bp, Artificial; identical to SEQ ID NO: 447837
  Synthetic oligonucleotide

SEQ ID NO: 598926 - DNA, 60 bp, Artificial; identical to SEQ ID NO: 447840
  Synthetic oligonucleotide

SEQ ID NO: 598927 - DNA, 60 bp, Artificial; identical to SEQ ID NO: 447841
  Synthetic oligonucleotide

SEQ ID NO: 598928 - DNA, 60 bp, Artificial; identical to SEQ ID NO: 447842
  Synthetic oligonucleotide

SEQ ID NO: 598929 - DNA, 60 bp, Artificial; identical to SEQ ID NO: 447844
  Synthetic oligonucleotide

SEQ ID NO: 598930 - DNA, 56 bp, Artificial; identical to SEQ ID NO: 447847
  Synthetic oligonucleotide

SEQ ID NO: 598931 - DNA, 55 bp, Artificial; identical to SEQ ID NO: 447848
  Synthetic oligonucleotide

SEQ ID NO: 598932 - DNA, 52 bp, Artificial; identical to SEQ ID NO: 447851
  Synthetic oligonucleotide

SEQ ID NO: 598933 - DNA, 60 bp, Artificial; identical to SEQ ID NO: 447853
  Synthetic oligonucleotide

SEQ ID NO: 598934 - DNA, 58 bp, Artificial; identical to SEQ ID NO: 447855
  Synthetic oligonucleotide

SEQ ID NO: 598935 - DNA, 54 bp, Artificial; identical to SEQ ID NO: 447856
  Synthetic oligonucleotide

SEQ ID NO: 598936 - DNA, 59 bp, Artificial; identical to SEQ ID NO: 447859
  Synthetic oligonucleotide

SEQ ID NO: 598937 - DNA, 56 bp, Artificial; identical to SEQ ID NO: 447861
  Synthetic oligonucleotide

SEQ ID NO: 598938 - DNA, 60 bp, Artificial; identical to SEQ ID NO: 447862
  Synthetic oligonucleotide

SEQ ID NO: 598939 - DNA, 54 bp, Artificial; identical to SEQ ID NO: 447863
  Synthetic oligonucleotide

SEQ ID NO: 598940 - DNA, 60 bp, Artificial; identical to SEQ ID NO: 447864
  Synthetic oligonucleotide

SEQ ID NO: 598941 - DNA, 58 bp, Artificial; identical to SEQ ID NO: 447865
  Synthetic oligonucleotide

SEQ ID NO: 598942 - DNA, 59 bp, Artificial; identical to SEQ ID NO: 17118
  Synthetic oligonucleotide

SEQ ID NO: 598943 - DNA, 55 bp, Artificial; identical to SEQ ID NO: 447867
  Synthetic oligonucleotide

SEQ ID NO: 598944 - DNA, 51 bp, Artificial; identical to SEQ ID NO: 447870
  Synthetic oligonucleotide

SEQ ID NO: 598945 - DNA, 55 bp, Artificial; identical to SEQ ID NO: 447874
  Synthetic oligonucleotide

SEQ ID NO: 598946 - DNA, 58 bp, Artificial; identical to SEQ ID NO: 447875
  Synthetic oligonucleotide

SEQ ID NO: 598947 - DNA, 54 bp, Artificial; identical to SEQ ID NO: 447876
  Synthetic oligonucleotide

SEQ ID NO: 598948 - DNA, 53 bp, Artificial; identical to SEQ ID NO: 447877
  Synthetic oligonucleotide

SEQ ID NO: 598949 - DNA, 60 bp, Artificial; identical to SEQ ID NO: 447880
  Synthetic oligonucleotide

SEQ ID NO: 598950 - DNA, 53 bp, Artificial; identical to SEQ ID NO: 447882
  Synthetic oligonucleotide

SEQ ID NO: 598951 - DNA, 55 bp, Artificial; identical to SEQ ID NO: 447883
  Synthetic oligonucleotide

SEQ ID NO: 598952 - DNA, 60 bp, Artificial; identical to SEQ ID NO: 447889
  Synthetic oligonucleotide

SEQ ID NO: 598953 - DNA, 54 bp, Artificial; identical to SEQ ID NO: 447890
  Synthetic oligonucleotide

SEQ ID NO: 598954 - DNA, 57 bp, Artificial; identical to SEQ ID NO: 447893
  Synthetic oligonucleotide

SEQ ID NO: 598955 - DNA, 57 bp, Artificial; identical to SEQ ID NO: 447894
  Synthetic oligonucleotide

SEQ ID NO: 598956 - DNA, 51 bp, Artificial; identical to SEQ ID NO: 447897
  Synthetic oligonucleotide

SEQ ID NO: 598957 - DNA, 57 bp, Artificial; identical to SEQ ID NO: 447899
  Synthetic oligonucleotide

SEQ ID NO: 598958 - DNA, 57 bp, Artificial; identical to SEQ ID NO: 447903
  Synthetic oligonucleotide

SEQ ID NO: 598959 - DNA, 60 bp, Artificial; identical to SEQ ID NO: 447905
  Synthetic oligonucleotide

SEQ ID NO: 598960 - DNA, 60 bp, Artificial; identical to SEQ ID NO: 447907
  Synthetic oligonucleotide

SEQ ID NO: 598961 - DNA, 60 bp, Artificial; identical to SEQ ID NO: 447908
  Synthetic oligonucleotide

SEQ ID NO: 598962 - DNA, 60 bp, Artificial; identical to SEQ ID NO: 447909
  Synthetic oligonucleotide

SEQ ID NO: 598963 - DNA, 57 bp, Artificial; identical to SEQ ID NO: 447912
  Synthetic oligonucleotide

SEQ ID NO: 598964 - DNA, 55 bp, Artificial; identical to SEQ ID NO: 447913
  Synthetic oligonucleotide

SEQ ID NO: 598965 - DNA, 56 bp, Artificial; identical to SEQ ID NO: 447914
  Synthetic oligonucleotide

SEQ ID NO: 598966 - DNA, 59 bp, Artificial; identical to SEQ ID NO: 447915
  Synthetic oligonucleotide

SEQ ID NO: 598967 - DNA, 57 bp, Artificial; identical to SEQ ID NO: 447917
  Synthetic oligonucleotide

SEQ ID NO: 598968 - DNA, 53 bp, Artificial; identical to SEQ ID NO: 447919
  Synthetic oligonucleotide

SEQ ID NO: 598969 - DNA, 60 bp, Artificial; identical to SEQ ID NO: 447925
  Synthetic oligonucleotide

SEQ ID NO: 598970 - DNA, 58 bp, Artificial; identical to SEQ ID NO: 447929
  Synthetic oligonucleotide

SEQ ID NO: 598971 - DNA, 60 bp, Artificial; identical to SEQ ID NO: 447934
  Synthetic oligonucleotide

SEQ ID NO: 598972 - DNA, 51 bp, Artificial; identical to SEQ ID NO: 447942
  Synthetic oligonucleotide

SEQ ID NO: 598973 - DNA, 60 bp, Artificial; identical to SEQ ID NO: 447943
  Synthetic oligonucleotide

SEQ ID NO: 598974 - DNA, 55 bp, Artificial; identical to SEQ ID NO: 447944
  Synthetic oligonucleotide

SEQ ID NO: 598975 - DNA, 60 bp, Artificial; identical to SEQ ID NO: 447946
  Synthetic oligonucleotide

SEQ ID NO: 598976 - DNA, 60 bp, Artificial; identical to SEQ ID NO: 447947
  Synthetic oligonucleotide

SEQ ID NO: 598977 - DNA, 60 bp, Artificial; identical to SEQ ID NO: 447948
  Synthetic oligonucleotide

SEQ ID NO: 598978 - DNA, 60 bp, Artificial; identical to SEQ ID NO: 447960
  Synthetic oligonucleotide

SEQ ID NO: 598979 - DNA, 58 bp, Artificial; identical to SEQ ID NO: 447961
  Synthetic oligonucleotide

SEQ ID NO: 598980 - DNA, 60 bp, Artificial; identical to SEQ ID NO: 447963
  Synthetic oligonucleotide

SEQ ID NO: 598981 - DNA, 58 bp, Artificial; identical to SEQ ID NO: 447964
  Synthetic oligonucleotide

SEQ ID NO: 598982 - DNA, 57 bp, Artificial; identical to SEQ ID NO: 447965
  Synthetic oligonucleotide

SEQ ID NO: 598983 - DNA, 59 bp, Artificial; identical to SEQ ID NO: 447966
  Synthetic oligonucleotide

SEQ ID NO: 598984 - DNA, 51 bp, Artificial; identical to SEQ ID NO: 447967
  Synthetic oligonucleotide

SEQ ID NO: 598985 - DNA, 51 bp, Artificial; identical to SEQ ID NO: 447968
  Synthetic oligonucleotide

SEQ ID NO: 598986 - DNA, 50 bp, Artificial; identical to SEQ ID NO: 447972
  Synthetic oligonucleotide

SEQ ID NO: 598987 - DNA, 55 bp, Artificial; identical to SEQ ID NO: 447974
  Synthetic oligonucleotide

SEQ ID NO: 598988 - DNA, 55 bp, Artificial; identical to SEQ ID NO: 447975
  Synthetic oligonucleotide

SEQ ID NO: 598989 - DNA, 53 bp, Artificial; identical to SEQ ID NO: 447978
  Synthetic oligonucleotide

SEQ ID NO: 598990 - DNA, 55 bp, Artificial; identical to SEQ ID NO: 447981
  Synthetic oligonucleotide

SEQ ID NO: 598991 - DNA, 59 bp, Artificial; identical to SEQ ID NO: 447985
  Synthetic oligonucleotide

SEQ ID NO: 598992 - DNA, 59 bp, Artificial; identical to SEQ ID NO: 447986
  Synthetic oligonucleotide

SEQ ID NO: 598993 - DNA, 60 bp, Artificial; identical to SEQ ID NO: 447987
  Synthetic oligonucleotide

SEQ ID NO: 598994 - DNA, 60 bp, Artificial; identical to SEQ ID NO: 447989
  Synthetic oligonucleotide

SEQ ID NO: 598995 - DNA, 55 bp, Artificial; identical to SEQ ID NO: 447990
  Synthetic oligonucleotide

SEQ ID NO: 598996 - DNA, 57 bp, Artificial; identical to SEQ ID NO: 447992
  Synthetic oligonucleotide

SEQ ID NO: 598997 - DNA, 54 bp, Artificial; identical to SEQ ID NO: 447996
  Synthetic oligonucleotide

SEQ ID NO: 598998 - DNA, 55 bp, Artificial; identical to SEQ ID NO: 447997
  Synthetic oligonucleotide

SEQ ID NO: 598999 - DNA, 53 bp, Artificial; identical to SEQ ID NO: 447998
  Synthetic oligonucleotide

SEQ ID NO: 599000 - DNA, 57 bp, Artificial; identical to SEQ ID NO: 448000
  Synthetic oligonucleotide

SEQ ID NO: 599001 - DNA, 55 bp, Artificial; identical to SEQ ID NO: 448013
  Synthetic oligonucleotide

SEQ ID NO: 599002 - DNA, 60 bp, Artificial; identical to SEQ ID NO: 448014
  Synthetic oligonucleotide

SEQ ID NO: 599003 - DNA, 60 bp, Artificial; identical to SEQ ID NO: 448019
  Synthetic oligonucleotide

SEQ ID NO: 599004 - DNA, 53 bp, Artificial; identical to SEQ ID NO: 448021
  Synthetic oligonucleotide

SEQ ID NO: 599005 - DNA, 57 bp, Artificial; identical to SEQ ID NO: 448024
  Synthetic oligonucleotide

SEQ ID NO: 599006 - DNA, 60 bp, Artificial; identical to SEQ ID NO: 448025
  Synthetic oligonucleotide

SEQ ID NO: 599007 - DNA, 59 bp, Artificial; identical to SEQ ID NO: 448026
  Synthetic oligonucleotide

SEQ ID NO: 599008 - DNA, 60 bp, Artificial; identical to SEQ ID NO: 448027
  Synthetic oligonucleotide

SEQ ID NO: 599009 - DNA, 59 bp, Artificial; identical to SEQ ID NO: 448028
  Synthetic oligonucleotide

SEQ ID NO: 599010 - DNA, 60 bp, Artificial; identical to SEQ ID NO: 448030
  Synthetic oligonucleotide

SEQ ID NO: 599011 - DNA, 55 bp, Artificial; identical to SEQ ID NO: 448031
  Synthetic oligonucleotide

SEQ ID NO: 599012 - DNA, 60 bp, Artificial; identical to SEQ ID NO: 448035
  Synthetic oligonucleotide

SEQ ID NO: 599013 - DNA, 60 bp, Artificial; identical to SEQ ID NO: 448036
  Synthetic oligonucleotide

SEQ ID NO: 599014 - DNA, 55 bp, Artificial; identical to SEQ ID NO: 448037
  Synthetic oligonucleotide

SEQ ID NO: 599015 - DNA, 58 bp, Artificial; identical to SEQ ID NO: 448041
  Synthetic oligonucleotide

SEQ ID NO: 599016 - DNA, 51 bp, Artificial; identical to SEQ ID NO: 448042
  Synthetic oligonucleotide

SEQ ID NO: 599017 - DNA, 52 bp, Artificial; identical to SEQ ID NO: 448044
  Synthetic oligonucleotide

SEQ ID NO: 599018 - DNA, 59 bp, Artificial; identical to SEQ ID NO: 448045
  Synthetic oligonucleotide

SEQ ID NO: 599019 - DNA, 54 bp, Artificial; identical to SEQ ID NO: 448047
  Synthetic oligonucleotide

SEQ ID NO: 599020 - DNA, 60 bp, Artificial; identical to SEQ ID NO: 448048
  Synthetic oligonucleotide

SEQ ID NO: 599021 - DNA, 54 bp, Artificial; identical to SEQ ID NO: 448049
  Synthetic oligonucleotide

SEQ ID NO: 599022 - DNA, 50 bp, Artificial; identical to SEQ ID NO: 448051
  Synthetic oligonucleotide

SEQ ID NO: 599023 - DNA, 60 bp, Artificial; identical to SEQ ID NO: 13842
  Synthetic oligonucleotide

SEQ ID NO: 599024 - DNA, 58 bp, Artificial; identical to SEQ ID NO: 448052
  Synthetic oligonucleotide

SEQ ID NO: 599025 - DNA, 57 bp, Artificial; identical to SEQ ID NO: 448054
  Synthetic oligonucleotide

SEQ ID NO: 599026 - DNA, 60 bp, Artificial; identical to SEQ ID NO: 448055
  Synthetic oligonucleotide

SEQ ID NO: 599027 - DNA, 50 bp, Artificial; identical to SEQ ID NO: 448059
  Synthetic oligonucleotide

SEQ ID NO: 599028 - DNA, 54 bp, Artificial; identical to SEQ ID NO: 448060
  Synthetic oligonucleotide

SEQ ID NO: 599029 - DNA, 55 bp, Artificial; identical to SEQ ID NO: 448061
  Synthetic oligonucleotide

SEQ ID NO: 599030 - DNA, 58 bp, Artificial; identical to SEQ ID NO: 448062
  Synthetic oligonucleotide

SEQ ID NO: 599031 - DNA, 60 bp, Artificial; identical to SEQ ID NO: 448064
  Synthetic oligonucleotide

SEQ ID NO: 599032 - DNA, 54 bp, Artificial; identical to SEQ ID NO: 448066
  Synthetic oligonucleotide

SEQ ID NO: 599033 - DNA, 55 bp, Artificial; identical to SEQ ID NO: 448068
  Synthetic oligonucleotide

SEQ ID NO: 599034 - DNA, 58 bp, Artificial; identical to SEQ ID NO: 448069
  Synthetic oligonucleotide

SEQ ID NO: 599035 - DNA, 55 bp, Artificial; identical to SEQ ID NO: 448071
  Synthetic oligonucleotide

SEQ ID NO: 599036 - DNA, 60 bp, Artificial; identical to SEQ ID NO: 448072
  Synthetic oligonucleotide

SEQ ID NO: 599037 - DNA, 58 bp, Artificial; identical to SEQ ID NO: 19517
  Synthetic oligonucleotide

SEQ ID NO: 599038 - DNA, 57 bp, Artificial; identical to SEQ ID NO: 448077
  Synthetic oligonucleotide

SEQ ID NO: 599039 - DNA, 55 bp, Artificial; identical to SEQ ID NO: 448078
  Synthetic oligonucleotide

SEQ ID NO: 599040 - DNA, 56 bp, Artificial; identical to SEQ ID NO: 448082
  Synthetic oligonucleotide

SEQ ID NO: 599041 - DNA, 60 bp, Artificial; identical to SEQ ID NO: 448083
  Synthetic oligonucleotide

SEQ ID NO: 599042 - DNA, 60 bp, Artificial; identical to SEQ ID NO: 448086
  Synthetic oligonucleotide

SEQ ID NO: 599043 - DNA, 55 bp, Artificial; identical to SEQ ID NO: 448089
  Synthetic oligonucleotide

SEQ ID NO: 599044 - DNA, 60 bp, Artificial; identical to SEQ ID NO: 448090
  Synthetic oligonucleotide

SEQ ID NO: 599045 - DNA, 59 bp, Artificial; identical to SEQ ID NO: 448093
  Synthetic oligonucleotide

SEQ ID NO: 599046 - DNA, 55 bp, Artificial; identical to SEQ ID NO: 448095
  Synthetic oligonucleotide

SEQ ID NO: 599047 - DNA, 53 bp, Artificial; identical to SEQ ID NO: 448099
  Synthetic oligonucleotide

SEQ ID NO: 599048 - DNA, 51 bp, Artificial; identical to SEQ ID NO: 448100
  Synthetic oligonucleotide

SEQ ID NO: 599049 - DNA, 60 bp, Artificial; identical to SEQ ID NO: 448106
  Synthetic oligonucleotide

SEQ ID NO: 599050 - DNA, 60 bp, Artificial; identical to SEQ ID NO: 448109
  Synthetic oligonucleotide

SEQ ID NO: 599051 - DNA, 50 bp, Artificial; identical to SEQ ID NO: 448110
  Synthetic oligonucleotide

SEQ ID NO: 599052 - DNA, 60 bp, Artificial; identical to SEQ ID NO: 448111
  Synthetic oligonucleotide

SEQ ID NO: 599053 - DNA, 53 bp, Artificial; identical to SEQ ID NO: 448117
  Synthetic oligonucleotide

SEQ ID NO: 599054 - DNA, 57 bp, Artificial; identical to SEQ ID NO: 448118
  Synthetic oligonucleotide

SEQ ID NO: 599055 - DNA, 60 bp, Artificial; identical to SEQ ID NO: 448156
  Synthetic oligonucleotide

SEQ ID NO: 599056 - DNA, 60 bp, Artificial; identical to SEQ ID NO: 7262
  Synthetic oligonucleotide

SEQ ID NO: 599057 - DNA, 57 bp, Artificial; identical to SEQ ID NO: 448160
  Synthetic oligonucleotide

SEQ ID NO: 599058 - DNA, 60 bp, Artificial; identical to SEQ ID NO: 448161
  Synthetic oligonucleotide

SEQ ID NO: 599059 - DNA, 60 bp, Artificial; identical to SEQ ID NO: 448162
  Synthetic oligonucleotide

SEQ ID NO: 599060 - DNA, 59 bp, Artificial; identical to SEQ ID NO: 448163
  Synthetic oligonucleotide

SEQ ID NO: 599061 - DNA, 59 bp, Artificial; identical to SEQ ID NO: 448165
  Synthetic oligonucleotide

SEQ ID NO: 599062 - DNA, 58 bp, Artificial; identical to SEQ ID NO: 448166
  Synthetic oligonucleotide

SEQ ID NO: 599063 - DNA, 59 bp, Artificial; identical to SEQ ID NO: 448168
  Synthetic oligonucleotide

SEQ ID NO: 599064 - DNA, 60 bp, Artificial; identical to SEQ ID NO: 448169
  Synthetic oligonucleotide

SEQ ID NO: 599065 - DNA, 55 bp, Artificial; identical to SEQ ID NO: 448172
  Synthetic oligonucleotide

SEQ ID NO: 599066 - DNA, 58 bp, Artificial; identical to SEQ ID NO: 448173
  Synthetic oligonucleotide

SEQ ID NO: 599067 - DNA, 60 bp, Artificial; identical to SEQ ID NO: 448176
  Synthetic oligonucleotide

SEQ ID NO: 599068 - DNA, 58 bp, Artificial; identical to SEQ ID NO: 448178
  Synthetic oligonucleotide

SEQ ID NO: 599069 - DNA, 54 bp, Artificial; identical to SEQ ID NO: 448181
  Synthetic oligonucleotide

SEQ ID NO: 599070 - DNA, 54 bp, Artificial; identical to SEQ ID NO: 448183
  Synthetic oligonucleotide

SEQ ID NO: 599071 - DNA, 59 bp, Artificial; identical to SEQ ID NO: 18540
  Synthetic oligonucleotide

SEQ ID NO: 599072 - DNA, 59 bp, Artificial; identical to SEQ ID NO: 448185
  Synthetic oligonucleotide

SEQ ID NO: 599073 - DNA, 59 bp, Artificial; identical to SEQ ID NO: 448187
  Synthetic oligonucleotide

SEQ ID NO: 599074 - DNA, 60 bp, Artificial; identical to SEQ ID NO: 448191
  Synthetic oligonucleotide

SEQ ID NO: 599075 - DNA, 55 bp, Artificial; identical to SEQ ID NO: 448194
  Synthetic oligonucleotide

SEQ ID NO: 599076 - DNA, 60 bp, Artificial; identical to SEQ ID NO: 448200
  Synthetic oligonucleotide

SEQ ID NO: 599077 - DNA, 60 bp, Artificial; identical to SEQ ID NO: 448201
  Synthetic oligonucleotide

SEQ ID NO: 599078 - DNA, 59 bp, Artificial; identical to SEQ ID NO: 448203
  Synthetic oligonucleotide

SEQ ID NO: 599079 - DNA, 57 bp, Artificial; identical to SEQ ID NO: 448209
  Synthetic oligonucleotide

SEQ ID NO: 599080 - DNA, 60 bp, Artificial; identical to SEQ ID NO: 448213
  Synthetic oligonucleotide

SEQ ID NO: 599081 - DNA, 53 bp, Artificial; identical to SEQ ID NO: 448215
  Synthetic oligonucleotide

SEQ ID NO: 599082 - DNA, 57 bp, Artificial; identical to SEQ ID NO: 448218
  Synthetic oligonucleotide

SEQ ID NO: 599083 - DNA, 58 bp, Artificial; identical to SEQ ID NO: 448223
  Synthetic oligonucleotide

SEQ ID NO: 599084 - DNA, 60 bp, Artificial; identical to SEQ ID NO: 448227
  Synthetic oligonucleotide

SEQ ID NO: 599085 - DNA, 53 bp, Artificial; identical to SEQ ID NO: 448229
  Synthetic oligonucleotide

SEQ ID NO: 599086 - DNA, 60 bp, Artificial; identical to SEQ ID NO: 448230
  Synthetic oligonucleotide

SEQ ID NO: 599087 - DNA, 59 bp, Artificial; identical to SEQ ID NO: 448233
  Synthetic oligonucleotide

SEQ ID NO: 599088 - DNA, 55 bp, Artificial; identical to SEQ ID NO: 448245
  Synthetic oligonucleotide

SEQ ID NO: 599089 - DNA, 52 bp, Artificial; identical to SEQ ID NO: 448246
  Synthetic oligonucleotide

SEQ ID NO: 599090 - DNA, 54 bp, Artificial; identical to SEQ ID NO: 448247
  Synthetic oligonucleotide

SEQ ID NO: 599091 - DNA, 60 bp, Artificial; identical to SEQ ID NO: 448249
  Synthetic oligonucleotide

SEQ ID NO: 599092 - DNA, 60 bp, Artificial; identical to SEQ ID NO: 448250
  Synthetic oligonucleotide

SEQ ID NO: 599093 - DNA, 57 bp, Artificial; identical to SEQ ID NO: 448251
  Synthetic oligonucleotide

SEQ ID NO: 599094 - DNA, 55 bp, Artificial; identical to SEQ ID NO: 448254
  Synthetic oligonucleotide

SEQ ID NO: 599095 - DNA, 58 bp, Artificial; identical to SEQ ID NO: 448256
  Synthetic oligonucleotide

SEQ ID NO: 599096 - DNA, 55 bp, Artificial; identical to SEQ ID NO: 448262
  Synthetic oligonucleotide

SEQ ID NO: 599097 - DNA, 60 bp, Artificial; identical to SEQ ID NO: 448263
  Synthetic oligonucleotide

SEQ ID NO: 599098 - DNA, 50 bp, Artificial; identical to SEQ ID NO: 448268
  Synthetic oligonucleotide

SEQ ID NO: 599099 - DNA, 55 bp, Artificial; identical to SEQ ID NO: 448269
  Synthetic oligonucleotide

SEQ ID NO: 599100 - DNA, 51 bp, Artificial; identical to SEQ ID NO: 448270
  Synthetic oligonucleotide

SEQ ID NO: 599101 - DNA, 59 bp, Artificial; identical to SEQ ID NO: 448273
  Synthetic oligonucleotide

SEQ ID NO: 599102 - DNA, 60 bp, Artificial; identical to SEQ ID NO: 108397
  Synthetic oligonucleotide

SEQ ID NO: 599103 - DNA, 54 bp, Artificial; identical to SEQ ID NO: 448276
  Synthetic oligonucleotide

SEQ ID NO: 599104 - DNA, 50 bp, Artificial; identical to SEQ ID NO: 448278
  Synthetic oligonucleotide

SEQ ID NO: 599105 - DNA, 60 bp, Artificial; identical to SEQ ID NO: 448280
  Synthetic oligonucleotide

SEQ ID NO: 599106 - DNA, 58 bp, Artificial; identical to SEQ ID NO: 448282
  Synthetic oligonucleotide

SEQ ID NO: 599107 - DNA, 59 bp, Artificial; identical to SEQ ID NO: 448286
  Synthetic oligonucleotide

SEQ ID NO: 599108 - DNA, 57 bp, Artificial; identical to SEQ ID NO: 448287
  Synthetic oligonucleotide

SEQ ID NO: 599109 - DNA, 60 bp, Artificial; identical to SEQ ID NO: 448288
  Synthetic oligonucleotide

SEQ ID NO: 599110 - DNA, 60 bp, Artificial; identical to SEQ ID NO: 12781
  Synthetic oligonucleotide

SEQ ID NO: 599111 - DNA, 52 bp, Artificial; identical to SEQ ID NO: 448293
  Synthetic oligonucleotide

SEQ ID NO: 599112 - DNA, 60 bp, Artificial; identical to SEQ ID NO: 448296
  Synthetic oligonucleotide

SEQ ID NO: 599113 - DNA, 56 bp, Artificial; identical to SEQ ID NO: 448297
  Synthetic oligonucleotide

SEQ ID NO: 599114 - DNA, 60 bp, Artificial; identical to SEQ ID NO: 448299
  Synthetic oligonucleotide

SEQ ID NO: 599115 - DNA, 57 bp, Artificial; identical to SEQ ID NO: 448300
  Synthetic oligonucleotide

SEQ ID NO: 599116 - DNA, 60 bp, Artificial; identical to SEQ ID NO: 448306
  Synthetic oligonucleotide

SEQ ID NO: 599117 - DNA, 55 bp, Artificial; identical to SEQ ID NO: 448311
  Synthetic oligonucleotide

SEQ ID NO: 599118 - DNA, 60 bp, Artificial; identical to SEQ ID NO: 448312
  Synthetic oligonucleotide

SEQ ID NO: 599119 - DNA, 60 bp, Artificial; identical to SEQ ID NO: 448313
  Synthetic oligonucleotide

SEQ ID NO: 599120 - DNA, 58 bp, Artificial; identical to SEQ ID NO: 448314
  Synthetic oligonucleotide

SEQ ID NO: 599121 - DNA, 60 bp, Artificial; identical to SEQ ID NO: 448315
  Synthetic oligonucleotide

SEQ ID NO: 599122 - DNA, 53 bp, Artificial; identical to SEQ ID NO: 448317
  Synthetic oligonucleotide

SEQ ID NO: 599123 - DNA, 60 bp, Artificial; identical to SEQ ID NO: 448318
  Synthetic oligonucleotide

SEQ ID NO: 599124 - DNA, 60 bp, Artificial; identical to SEQ ID NO: 448321
  Synthetic oligonucleotide

SEQ ID NO: 599125 - DNA, 55 bp, Artificial; identical to SEQ ID NO: 448326
  Synthetic oligonucleotide

SEQ ID NO: 599126 - DNA, 55 bp, Artificial; identical to SEQ ID NO: 448327
  Synthetic oligonucleotide

SEQ ID NO: 599127 - DNA, 60 bp, Artificial; identical to SEQ ID NO: 448329
  Synthetic oligonucleotide

SEQ ID NO: 599128 - DNA, 57 bp, Artificial; identical to SEQ ID NO: 448334
  Synthetic oligonucleotide

SEQ ID NO: 599129 - DNA, 55 bp, Artificial; identical to SEQ ID NO: 448335
  Synthetic oligonucleotide

SEQ ID NO: 599130 - DNA, 55 bp, Artificial; identical to SEQ ID NO: 448341
  Synthetic oligonucleotide

SEQ ID NO: 599131 - DNA, 58 bp, Artificial; identical to SEQ ID NO: 448345
  Synthetic oligonucleotide

SEQ ID NO: 599132 - DNA, 56 bp, Artificial; identical to SEQ ID NO: 448348
  Synthetic oligonucleotide

SEQ ID NO: 599133 - DNA, 60 bp, Artificial; identical to SEQ ID NO: 448349
  Synthetic oligonucleotide

SEQ ID NO: 599134 - DNA, 60 bp, Artificial; identical to SEQ ID NO: 9352
  Synthetic oligonucleotide

SEQ ID NO: 599135 - DNA, 54 bp, Artificial; identical to SEQ ID NO: 448353
  Synthetic oligonucleotide

SEQ ID NO: 599136 - DNA, 58 bp, Artificial; identical to SEQ ID NO: 448357
  Synthetic oligonucleotide

SEQ ID NO: 599137 - DNA, 60 bp, Artificial; identical to SEQ ID NO: 448358
  Synthetic oligonucleotide

SEQ ID NO: 599138 - DNA, 60 bp, Artificial; identical to SEQ ID NO: 448359
  Synthetic oligonucleotide

SEQ ID NO: 599139 - DNA, 59 bp, Artificial; identical to SEQ ID NO: 448362
  Synthetic oligonucleotide

SEQ ID NO: 599140 - DNA, 55 bp, Artificial; identical to SEQ ID NO: 448364
  Synthetic oligonucleotide

SEQ ID NO: 599141 - DNA, 60 bp, Artificial; identical to SEQ ID NO: 448365
  Synthetic oligonucleotide

SEQ ID NO: 599142 - DNA, 60 bp, Artificial; identical to SEQ ID NO: 448371
  Synthetic oligonucleotide

SEQ ID NO: 599143 - DNA, 57 bp, Artificial; identical to SEQ ID NO: 448376
  Synthetic oligonucleotide

SEQ ID NO: 599144 - DNA, 60 bp, Artificial; identical to SEQ ID NO: 448378
  Synthetic oligonucleotide

SEQ ID NO: 599145 - DNA, 55 bp, Artificial; identical to SEQ ID NO: 448379
  Synthetic oligonucleotide

SEQ ID NO: 599146 - DNA, 59 bp, Artificial; identical to SEQ ID NO: 448381
  Synthetic oligonucleotide

SEQ ID NO: 599147 - DNA, 55 bp, Artificial; identical to SEQ ID NO: 448395
  Synthetic oligonucleotide

SEQ ID NO: 599148 - DNA, 60 bp, Artificial; identical to SEQ ID NO: 448397
  Synthetic oligonucleotide

SEQ ID NO: 599149 - DNA, 60 bp, Artificial; identical to SEQ ID NO: 448399
  Synthetic oligonucleotide

SEQ ID NO: 599150 - DNA, 60 bp, Artificial; identical to SEQ ID NO: 448405
  Synthetic oligonucleotide

SEQ ID NO: 599151 - DNA, 55 bp, Artificial; identical to SEQ ID NO: 448406
  Synthetic oligonucleotide

SEQ ID NO: 599152 - DNA, 52 bp, Artificial; identical to SEQ ID NO: 448407
  Synthetic oligonucleotide

SEQ ID NO: 599153 - DNA, 60 bp, Artificial; identical to SEQ ID NO: 448410
  Synthetic oligonucleotide

SEQ ID NO: 599154 - DNA, 57 bp, Artificial; identical to SEQ ID NO: 448415
  Synthetic oligonucleotide

SEQ ID NO: 599155 - DNA, 50 bp, Artificial; identical to SEQ ID NO: 448416
  Synthetic oligonucleotide

SEQ ID NO: 599156 - DNA, 58 bp, Artificial; identical to SEQ ID NO: 448420
  Synthetic oligonucleotide

SEQ ID NO: 599157 - DNA, 60 bp, Artificial; identical to SEQ ID NO: 448421
  Synthetic oligonucleotide

SEQ ID NO: 599158 - DNA, 55 bp, Artificial; identical to SEQ ID NO: 448427
  Synthetic oligonucleotide

SEQ ID NO: 599159 - DNA, 59 bp, Artificial; identical to SEQ ID NO: 19983
  Synthetic oligonucleotide

SEQ ID NO: 599160 - DNA, 60 bp, Artificial; identical to SEQ ID NO: 15294
  Synthetic oligonucleotide

SEQ ID NO: 599161 - DNA, 60 bp, Artificial; identical to SEQ ID NO: 448433
  Synthetic oligonucleotide

SEQ ID NO: 599162 - DNA, 60 bp, Artificial; identical to SEQ ID NO: 448439
  Synthetic oligonucleotide

SEQ ID NO: 599163 - DNA, 56 bp, Artificial; identical to SEQ ID NO: 448440
  Synthetic oligonucleotide

SEQ ID NO: 599164 - DNA, 60 bp, Artificial; identical to SEQ ID NO: 448441
  Synthetic oligonucleotide

SEQ ID NO: 599165 - DNA, 60 bp, Artificial; identical to SEQ ID NO: 448443
  Synthetic oligonucleotide

SEQ ID NO: 599166 - DNA, 58 bp, Artificial; identical to SEQ ID NO: 448444
  Synthetic oligonucleotide

SEQ ID NO: 599167 - DNA, 59 bp, Artificial; identical to SEQ ID NO: 448448
  Synthetic oligonucleotide

SEQ ID NO: 599168 - DNA, 59 bp, Artificial; identical to SEQ ID NO: 448449
  Synthetic oligonucleotide

SEQ ID NO: 599169 - DNA, 60 bp, Artificial; identical to SEQ ID NO: 448451
  Synthetic oligonucleotide

SEQ ID NO: 599170 - DNA, 57 bp, Artificial; identical to SEQ ID NO: 448452
  Synthetic oligonucleotide

SEQ ID NO: 599171 - DNA, 56 bp, Artificial; identical to SEQ ID NO: 448458
  Synthetic oligonucleotide

SEQ ID NO: 599172 - DNA, 55 bp, Artificial; identical to SEQ ID NO: 448459
  Synthetic oligonucleotide

SEQ ID NO: 599173 - DNA, 60 bp, Artificial; identical to SEQ ID NO: 448461
  Synthetic oligonucleotide

SEQ ID NO: 599174 - DNA, 60 bp, Artificial; identical to SEQ ID NO: 448469
  Synthetic oligonucleotide

SEQ ID NO: 599175 - DNA, 60 bp, Artificial; identical to SEQ ID NO: 448472
  Synthetic oligonucleotide

SEQ ID NO: 599176 - DNA, 57 bp, Artificial; identical to SEQ ID NO: 448473
  Synthetic oligonucleotide

SEQ ID NO: 599177 - DNA, 58 bp, Artificial; identical to SEQ ID NO: 448474
  Synthetic oligonucleotide

SEQ ID NO: 599178 - DNA, 57 bp, Artificial; identical to SEQ ID NO: 448475
  Synthetic oligonucleotide

SEQ ID NO: 599179 - DNA, 54 bp, Artificial; identical to SEQ ID NO: 448477
  Synthetic oligonucleotide

SEQ ID NO: 599180 - DNA, 59 bp, Artificial; identical to SEQ ID NO: 448478
  Synthetic oligonucleotide

SEQ ID NO: 599181 - DNA, 53 bp, Artificial; identical to SEQ ID NO: 12079
  Synthetic oligonucleotide

SEQ ID NO: 599182 - DNA, 54 bp, Artificial; identical to SEQ ID NO: 448482
  Synthetic oligonucleotide

SEQ ID NO: 599183 - DNA, 56 bp, Artificial; identical to SEQ ID NO: 448483
  Synthetic oligonucleotide

SEQ ID NO: 599184 - DNA, 60 bp, Artificial; identical to SEQ ID NO: 448484
  Synthetic oligonucleotide

SEQ ID NO: 599185 - DNA, 58 bp, Artificial; identical to SEQ ID NO: 448485
  Synthetic oligonucleotide

SEQ ID NO: 599186 - DNA, 60 bp, Artificial; identical to SEQ ID NO: 448486
  Synthetic oligonucleotide

SEQ ID NO: 599187 - DNA, 59 bp, Artificial; identical to SEQ ID NO: 19221
  Synthetic oligonucleotide

SEQ ID NO: 599188 - DNA, 55 bp, Artificial; identical to SEQ ID NO: 6664
  Synthetic oligonucleotide

SEQ ID NO: 599189 - DNA, 55 bp, Artificial; identical to SEQ ID NO: 448493
  Synthetic oligonucleotide

SEQ ID NO: 599190 - DNA, 58 bp, Artificial; identical to SEQ ID NO: 448498
  Synthetic oligonucleotide

SEQ ID NO: 599191 - DNA, 60 bp, Artificial; identical to SEQ ID NO: 448499
  Synthetic oligonucleotide

SEQ ID NO: 599192 - DNA, 56 bp, Artificial; identical to SEQ ID NO: 448501
  Synthetic oligonucleotide

SEQ ID NO: 599193 - DNA, 56 bp, Artificial; identical to SEQ ID NO: 448507
  Synthetic oligonucleotide

SEQ ID NO: 599194 - DNA, 60 bp, Artificial; identical to SEQ ID NO: 448512
  Synthetic oligonucleotide

SEQ ID NO: 599195 - DNA, 55 bp, Artificial; identical to SEQ ID NO: 448520
  Synthetic oligonucleotide

SEQ ID NO: 599196 - DNA, 60 bp, Artificial; identical to SEQ ID NO: 448524
  Synthetic oligonucleotide

SEQ ID NO: 599197 - DNA, 60 bp, Artificial; identical to SEQ ID NO: 448525
  Synthetic oligonucleotide

SEQ ID NO: 599198 - DNA, 60 bp, Artificial; identical to SEQ ID NO: 448527
  Synthetic oligonucleotide

SEQ ID NO: 599199 - DNA, 60 bp, Artificial; identical to SEQ ID NO: 448529
  Synthetic oligonucleotide

SEQ ID NO: 599200 - DNA, 51 bp, Artificial; identical to SEQ ID NO: 448531
  Synthetic oligonucleotide

SEQ ID NO: 599201 - DNA, 60 bp, Artificial; identical to SEQ ID NO: 448532
  Synthetic oligonucleotide

SEQ ID NO: 599202 - DNA, 58 bp, Artificial; identical to SEQ ID NO: 448534
  Synthetic oligonucleotide

SEQ ID NO: 599203 - DNA, 57 bp, Artificial; identical to SEQ ID NO: 448536
  Synthetic oligonucleotide

SEQ ID NO: 599204 - DNA, 55 bp, Artificial; identical to SEQ ID NO: 448538
  Synthetic oligonucleotide

SEQ ID NO: 599205 - DNA, 50 bp, Artificial; identical to SEQ ID NO: 448540
  Synthetic oligonucleotide

SEQ ID NO: 599206 - DNA, 60 bp, Artificial; identical to SEQ ID NO: 448543
  Synthetic oligonucleotide

SEQ ID NO: 599207 - DNA, 56 bp, Artificial; identical to SEQ ID NO: 448551
  Synthetic oligonucleotide

SEQ ID NO: 599208 - DNA, 56 bp, Artificial; identical to SEQ ID NO: 448552
  Synthetic oligonucleotide

SEQ ID NO: 599209 - DNA, 60 bp, Artificial; identical to SEQ ID NO: 448557
  Synthetic oligonucleotide

SEQ ID NO: 599210 - DNA, 55 bp, Artificial; identical to SEQ ID NO: 448559
  Synthetic oligonucleotide

SEQ ID NO: 599211 - DNA, 60 bp, Artificial; identical to SEQ ID NO: 448562
  Synthetic oligonucleotide

SEQ ID NO: 599212 - DNA, 55 bp, Artificial; identical to SEQ ID NO: 448566
  Synthetic oligonucleotide

SEQ ID NO: 599213 - DNA, 57 bp, Artificial; identical to SEQ ID NO: 448568
  Synthetic oligonucleotide

SEQ ID NO: 599214 - DNA, 58 bp, Artificial; identical to SEQ ID NO: 448573
  Synthetic oligonucleotide

SEQ ID NO: 599215 - DNA, 54 bp, Artificial; identical to SEQ ID NO: 448575
  Synthetic oligonucleotide

SEQ ID NO: 599216 - DNA, 60 bp, Artificial; identical to SEQ ID NO: 448579
  Synthetic oligonucleotide

SEQ ID NO: 599217 - DNA, 56 bp, Artificial; identical to SEQ ID NO: 448580
  Synthetic oligonucleotide

SEQ ID NO: 599218 - DNA, 59 bp, Artificial; identical to SEQ ID NO: 448585
  Synthetic oligonucleotide

SEQ ID NO: 599219 - DNA, 55 bp, Artificial; identical to SEQ ID NO: 448586
  Synthetic oligonucleotide

SEQ ID NO: 599220 - DNA, 59 bp, Artificial; identical to SEQ ID NO: 448589
  Synthetic oligonucleotide

SEQ ID NO: 599221 - DNA, 60 bp, Artificial; identical to SEQ ID NO: 448590
  Synthetic oligonucleotide

SEQ ID NO: 599222 - DNA, 52 bp, Artificial; identical to SEQ ID NO: 448591
  Synthetic oligonucleotide

SEQ ID NO: 599223 - DNA, 57 bp, Artificial; identical to SEQ ID NO: 448594
  Synthetic oligonucleotide

SEQ ID NO: 599224 - DNA, 60 bp, Artificial; identical to SEQ ID NO: 448597
  Synthetic oligonucleotide

SEQ ID NO: 599225 - DNA, 57 bp, Artificial; identical to SEQ ID NO: 448598
  Synthetic oligonucleotide

SEQ ID NO: 599226 - DNA, 55 bp, Artificial; identical to SEQ ID NO: 448601
  Synthetic oligonucleotide

SEQ ID NO: 599227 - DNA, 53 bp, Artificial; identical to SEQ ID NO: 448603
  Synthetic oligonucleotide

SEQ ID NO: 599228 - DNA, 55 bp, Artificial; identical to SEQ ID NO: 448605
  Synthetic oligonucleotide

SEQ ID NO: 599229 - DNA, 55 bp, Artificial; identical to SEQ ID NO: 448608
  Synthetic oligonucleotide

SEQ ID NO: 599230 - DNA, 59 bp, Artificial; identical to SEQ ID NO: 448610
  Synthetic oligonucleotide

SEQ ID NO: 599231 - DNA, 58 bp, Artificial; identical to SEQ ID NO: 448612
  Synthetic oligonucleotide

SEQ ID NO: 599232 - DNA, 55 bp, Artificial; identical to SEQ ID NO: 448613
  Synthetic oligonucleotide

SEQ ID NO: 599233 - DNA, 60 bp, Artificial; identical to SEQ ID NO: 448614
  Synthetic oligonucleotide

SEQ ID NO: 599234 - DNA, 58 bp, Artificial; identical to SEQ ID NO: 448615
  Synthetic oligonucleotide

SEQ ID NO: 599235 - DNA, 54 bp, Artificial; identical to SEQ ID NO: 448616
  Synthetic oligonucleotide

SEQ ID NO: 599236 - DNA, 57 bp, Artificial; identical to SEQ ID NO: 448617
  Synthetic oligonucleotide

SEQ ID NO: 599237 - DNA, 56 bp, Artificial; identical to SEQ ID NO: 5779
  Synthetic oligonucleotide

SEQ ID NO: 599238 - DNA, 58 bp, Artificial; identical to SEQ ID NO: 448624
  Synthetic oligonucleotide

SEQ ID NO: 599239 - DNA, 54 bp, Artificial; identical to SEQ ID NO: 448627
  Synthetic oligonucleotide

SEQ ID NO: 599240 - DNA, 50 bp, Artificial; identical to SEQ ID NO: 448629
  Synthetic oligonucleotide

SEQ ID NO: 599241 - DNA, 56 bp, Artificial; identical to SEQ ID NO: 20152
  Synthetic oligonucleotide

SEQ ID NO: 599242 - DNA, 51 bp, Artificial; identical to SEQ ID NO: 448631
  Synthetic oligonucleotide

SEQ ID NO: 599243 - DNA, 55 bp, Artificial; identical to SEQ ID NO: 448632
  Synthetic oligonucleotide

SEQ ID NO: 599244 - DNA, 51 bp, Artificial; identical to SEQ ID NO: 448636
  Synthetic oligonucleotide

SEQ ID NO: 599245 - DNA, 59 bp, Artificial; identical to SEQ ID NO: 448639
  Synthetic oligonucleotide

SEQ ID NO: 599246 - DNA, 56 bp, Artificial; identical to SEQ ID NO: 448642
  Synthetic oligonucleotide

SEQ ID NO: 599247 - DNA, 59 bp, Artificial; identical to SEQ ID NO: 448643
  Synthetic oligonucleotide

SEQ ID NO: 599248 - DNA, 52 bp, Artificial; identical to SEQ ID NO: 448644
  Synthetic oligonucleotide

SEQ ID NO: 599249 - DNA, 53 bp, Artificial; identical to SEQ ID NO: 448645
  Synthetic oligonucleotide

SEQ ID NO: 599250 - DNA, 60 bp, Artificial; identical to SEQ ID NO: 448648
  Synthetic oligonucleotide

SEQ ID NO: 599251 - DNA, 52 bp, Artificial; identical to SEQ ID NO: 448650
  Synthetic oligonucleotide

SEQ ID NO: 599252 - DNA, 54 bp, Artificial; identical to SEQ ID NO: 448655
  Synthetic oligonucleotide

SEQ ID NO: 599253 - DNA, 55 bp, Artificial; identical to SEQ ID NO: 448656
  Synthetic oligonucleotide

SEQ ID NO: 599254 - DNA, 55 bp, Artificial; identical to SEQ ID NO: 448658
  Synthetic oligonucleotide

SEQ ID NO: 599255 - DNA, 56 bp, Artificial; identical to SEQ ID NO: 448659
  Synthetic oligonucleotide

SEQ ID NO: 599256 - DNA, 60 bp, Artificial; identical to SEQ ID NO: 448661
  Synthetic oligonucleotide

SEQ ID NO: 599257 - DNA, 53 bp, Artificial; identical to SEQ ID NO: 448669
  Synthetic oligonucleotide

SEQ ID NO: 599258 - DNA, 56 bp, Artificial; identical to SEQ ID NO: 448671
  Synthetic oligonucleotide

SEQ ID NO: 599259 - DNA, 60 bp, Artificial; identical to SEQ ID NO: 448673
  Synthetic oligonucleotide

SEQ ID NO: 599260 - DNA, 58 bp, Artificial; identical to SEQ ID NO: 448675
  Synthetic oligonucleotide

SEQ ID NO: 599261 - DNA, 55 bp, Artificial; identical to SEQ ID NO: 448676
  Synthetic oligonucleotide

SEQ ID NO: 599262 - DNA, 56 bp, Artificial; identical to SEQ ID NO: 448677
  Synthetic oligonucleotide

SEQ ID NO: 599263 - DNA, 60 bp, Artificial; identical to SEQ ID NO: 448678
  Synthetic oligonucleotide

SEQ ID NO: 599264 - DNA, 59 bp, Artificial; identical to SEQ ID NO: 448685
  Synthetic oligonucleotide

SEQ ID NO: 599265 - DNA, 60 bp, Artificial; identical to SEQ ID NO: 448686
  Synthetic oligonucleotide

SEQ ID NO: 599266 - DNA, 55 bp, Artificial; identical to SEQ ID NO: 448687
  Synthetic oligonucleotide

SEQ ID NO: 599267 - DNA, 60 bp, Artificial; identical to SEQ ID NO: 448691
  Synthetic oligonucleotide

SEQ ID NO: 599268 - DNA, 56 bp, Artificial; identical to SEQ ID NO: 448696
  Synthetic oligonucleotide

SEQ ID NO: 599269 - DNA, 53 bp, Artificial; identical to SEQ ID NO: 448700
  Synthetic oligonucleotide

SEQ ID NO: 599270 - DNA, 60 bp, Artificial; identical to SEQ ID NO: 448701
  Synthetic oligonucleotide

SEQ ID NO: 599271 - DNA, 60 bp, Artificial; identical to SEQ ID NO: 28888
  Synthetic oligonucleotide

SEQ ID NO: 599272 - DNA, 57 bp, Artificial; identical to SEQ ID NO: 18098
  Synthetic oligonucleotide

SEQ ID NO: 599273 - DNA, 60 bp, Artificial; identical to SEQ ID NO: 448706
  Synthetic oligonucleotide

SEQ ID NO: 599274 - DNA, 58 bp, Artificial; identical to SEQ ID NO: 448707
  Synthetic oligonucleotide

SEQ ID NO: 599275 - DNA, 60 bp, Artificial; identical to SEQ ID NO: 448709
  Synthetic oligonucleotide

SEQ ID NO: 599276 - DNA, 55 bp, Artificial; identical to SEQ ID NO: 448711
  Synthetic oligonucleotide

SEQ ID NO: 599277 - DNA, 50 bp, Artificial; identical to SEQ ID NO: 448717
  Synthetic oligonucleotide

SEQ ID NO: 599278 - DNA, 56 bp, Artificial; identical to SEQ ID NO: 448718
  Synthetic oligonucleotide

SEQ ID NO: 599279 - DNA, 60 bp, Artificial; identical to SEQ ID NO: 448721
  Synthetic oligonucleotide

SEQ ID NO: 599280 - DNA, 59 bp, Artificial; identical to SEQ ID NO: 448724
  Synthetic oligonucleotide

SEQ ID NO: 599281 - DNA, 60 bp, Artificial; identical to SEQ ID NO: 448725
  Synthetic oligonucleotide

SEQ ID NO: 599282 - DNA, 53 bp, Artificial; identical to SEQ ID NO: 448729
  Synthetic oligonucleotide

SEQ ID NO: 599283 - DNA, 55 bp, Artificial; identical to SEQ ID NO: 448731
  Synthetic oligonucleotide

SEQ ID NO: 599284 - DNA, 55 bp, Artificial; identical to SEQ ID NO: 448735
  Synthetic oligonucleotide

SEQ ID NO: 599285 - DNA, 54 bp, Artificial; identical to SEQ ID NO: 448736
  Synthetic oligonucleotide

SEQ ID NO: 599286 - DNA, 59 bp, Artificial; identical to SEQ ID NO: 448743
  Synthetic oligonucleotide

SEQ ID NO: 599287 - DNA, 56 bp, Artificial; identical to SEQ ID NO: 448747
  Synthetic oligonucleotide

SEQ ID NO: 599288 - DNA, 60 bp, Artificial; identical to SEQ ID NO: 448749
  Synthetic oligonucleotide

SEQ ID NO: 599289 - DNA, 55 bp, Artificial; identical to SEQ ID NO: 6966
  Synthetic oligonucleotide

SEQ ID NO: 599290 - DNA, 54 bp, Artificial; identical to SEQ ID NO: 448750
  Synthetic oligonucleotide

SEQ ID NO: 599291 - DNA, 57 bp, Artificial; identical to SEQ ID NO: 448755
  Synthetic oligonucleotide

SEQ ID NO: 599292 - DNA, 58 bp, Artificial; identical to SEQ ID NO: 448756
  Synthetic oligonucleotide

SEQ ID NO: 599293 - DNA, 56 bp, Artificial; identical to SEQ ID NO: 448758
  Synthetic oligonucleotide

SEQ ID NO: 599294 - DNA, 60 bp, Artificial; identical to SEQ ID NO: 448759
  Synthetic oligonucleotide

SEQ ID NO: 599295 - DNA, 60 bp, Artificial; identical to SEQ ID NO: 448760
  Synthetic oligonucleotide

SEQ ID NO: 599296 - DNA, 57 bp, Artificial; identical to SEQ ID NO: 448761
  Synthetic oligonucleotide

SEQ ID NO: 599297 - DNA, 60 bp, Artificial; identical to SEQ ID NO: 448762
  Synthetic oligonucleotide

SEQ ID NO: 599298 - DNA, 55 bp, Artificial; identical to SEQ ID NO: 448766
  Synthetic oligonucleotide

SEQ ID NO: 599299 - DNA, 60 bp, Artificial; identical to SEQ ID NO: 448768
  Synthetic oligonucleotide

SEQ ID NO: 599300 - DNA, 52 bp, Artificial; identical to SEQ ID NO: 448769
  Synthetic oligonucleotide

SEQ ID NO: 599301 - DNA, 51 bp, Artificial; identical to SEQ ID NO: 448770
  Synthetic oligonucleotide

SEQ ID NO: 599302 - DNA, 54 bp, Artificial; identical to SEQ ID NO: 448771
  Synthetic oligonucleotide

SEQ ID NO: 599303 - DNA, 60 bp, Artificial; identical to SEQ ID NO: 448772
  Synthetic oligonucleotide

SEQ ID NO: 599304 - DNA, 60 bp, Artificial; identical to SEQ ID NO: 448774
  Synthetic oligonucleotide

SEQ ID NO: 599305 - DNA, 53 bp, Artificial; identical to SEQ ID NO: 448778
  Synthetic oligonucleotide

SEQ ID NO: 599306 - DNA, 57 bp, Artificial; identical to SEQ ID NO: 448781
  Synthetic oligonucleotide

SEQ ID NO: 599307 - DNA, 55 bp, Artificial; identical to SEQ ID NO: 448782
  Synthetic oligonucleotide

SEQ ID NO: 599308 - DNA, 53 bp, Artificial; identical to SEQ ID NO: 448783
  Synthetic oligonucleotide

SEQ ID NO: 599309 - DNA, 52 bp, Artificial; identical to SEQ ID NO: 448784
  Synthetic oligonucleotide

SEQ ID NO: 599310 - DNA, 51 bp, Artificial; identical to SEQ ID NO: 448786
  Synthetic oligonucleotide

SEQ ID NO: 599311 - DNA, 60 bp, Artificial; identical to SEQ ID NO: 448788
  Synthetic oligonucleotide

SEQ ID NO: 599312 - DNA, 60 bp, Artificial; identical to SEQ ID NO: 448793
  Synthetic oligonucleotide

SEQ ID NO: 599313 - DNA, 55 bp, Artificial; identical to SEQ ID NO: 448794
  Synthetic oligonucleotide

SEQ ID NO: 599314 - DNA, 56 bp, Artificial; identical to SEQ ID NO: 448796
  Synthetic oligonucleotide

SEQ ID NO: 599315 - DNA, 54 bp, Artificial; identical to SEQ ID NO: 448797
  Synthetic oligonucleotide

SEQ ID NO: 599316 - DNA, 52 bp, Artificial; identical to SEQ ID NO: 448798
  Synthetic oligonucleotide

SEQ ID NO: 599317 - DNA, 58 bp, Artificial; identical to SEQ ID NO: 448800
  Synthetic oligonucleotide

SEQ ID NO: 599318 - DNA, 60 bp, Artificial; identical to SEQ ID NO: 448810
  Synthetic oligonucleotide

SEQ ID NO: 599319 - DNA, 60 bp, Artificial; identical to SEQ ID NO: 448812
  Synthetic oligonucleotide

SEQ ID NO: 599320 - DNA, 50 bp, Artificial; identical to SEQ ID NO: 448817
  Synthetic oligonucleotide

SEQ ID NO: 599321 - DNA, 55 bp, Artificial; identical to SEQ ID NO: 448819
  Synthetic oligonucleotide

SEQ ID NO: 599322 - DNA, 60 bp, Artificial; identical to SEQ ID NO: 448820
  Synthetic oligonucleotide

SEQ ID NO: 599323 - DNA, 56 bp, Artificial; identical to SEQ ID NO: 448822
  Synthetic oligonucleotide

SEQ ID NO: 599324 - DNA, 60 bp, Artificial; identical to SEQ ID NO: 448827
  Synthetic oligonucleotide

SEQ ID NO: 599325 - DNA, 51 bp, Artificial; identical to SEQ ID NO: 448829
  Synthetic oligonucleotide

SEQ ID NO: 599326 - DNA, 60 bp, Artificial; identical to SEQ ID NO: 448832
  Synthetic oligonucleotide

SEQ ID NO: 599327 - DNA, 60 bp, Artificial; identical to SEQ ID NO: 448833
  Synthetic oligonucleotide

SEQ ID NO: 599328 - DNA, 58 bp, Artificial; identical to SEQ ID NO: 448837
  Synthetic oligonucleotide

SEQ ID NO: 599329 - DNA, 60 bp, Artificial; identical to SEQ ID NO: 448841
  Synthetic oligonucleotide

SEQ ID NO: 599330 - DNA, 51 bp, Artificial; identical to SEQ ID NO: 448842
  Synthetic oligonucleotide

SEQ ID NO: 599331 - DNA, 58 bp, Artificial; identical to SEQ ID NO: 9583
  Synthetic oligonucleotide

SEQ ID NO: 599332 - DNA, 50 bp, Artificial; identical to SEQ ID NO: 448845
  Synthetic oligonucleotide

SEQ ID NO: 599333 - DNA, 60 bp, Artificial; identical to SEQ ID NO: 448847
  Synthetic oligonucleotide

SEQ ID NO: 599334 - DNA, 55 bp, Artificial; identical to SEQ ID NO: 17936
  Synthetic oligonucleotide

SEQ ID NO: 599335 - DNA, 56 bp, Artificial; identical to SEQ ID NO: 448848
  Synthetic oligonucleotide

SEQ ID NO: 599336 - DNA, 60 bp, Artificial; identical to SEQ ID NO: 15394
  Synthetic oligonucleotide

SEQ ID NO: 599337 - DNA, 58 bp, Artificial; identical to SEQ ID NO: 448850
  Synthetic oligonucleotide

SEQ ID NO: 599338 - DNA, 60 bp, Artificial; identical to SEQ ID NO: 6629
  Synthetic oligonucleotide

SEQ ID NO: 599339 - DNA, 58 bp, Artificial; identical to SEQ ID NO: 448851
  Synthetic oligonucleotide

SEQ ID NO: 599340 - DNA, 55 bp, Artificial; identical to SEQ ID NO: 448852
  Synthetic oligonucleotide

SEQ ID NO: 599341 - DNA, 60 bp, Artificial; identical to SEQ ID NO: 448854
  Synthetic oligonucleotide

SEQ ID NO: 599342 - DNA, 54 bp, Artificial; identical to SEQ ID NO: 448856
  Synthetic oligonucleotide

SEQ ID NO: 599343 - DNA, 56 bp, Artificial; identical to SEQ ID NO: 448858
  Synthetic oligonucleotide

SEQ ID NO: 599344 - DNA, 55 bp, Artificial; identical to SEQ ID NO: 448859
  Synthetic oligonucleotide

SEQ ID NO: 599345 - DNA, 55 bp, Artificial; identical to SEQ ID NO: 448861
  Synthetic oligonucleotide

SEQ ID NO: 599346 - DNA, 60 bp, Artificial; identical to SEQ ID NO: 448862
  Synthetic oligonucleotide

SEQ ID NO: 599347 - DNA, 58 bp, Artificial; identical to SEQ ID NO: 448864
  Synthetic oligonucleotide

SEQ ID NO: 599348 - DNA, 55 bp, Artificial; identical to SEQ ID NO: 448871
  Synthetic oligonucleotide

SEQ ID NO: 599349 - DNA, 58 bp, Artificial; identical to SEQ ID NO: 448872
  Synthetic oligonucleotide

SEQ ID NO: 599350 - DNA, 60 bp, Artificial; identical to SEQ ID NO: 448873
  Synthetic oligonucleotide

SEQ ID NO: 599351 - DNA, 50 bp, Artificial; identical to SEQ ID NO: 8608
  Synthetic oligonucleotide

SEQ ID NO: 599352 - DNA, 52 bp, Artificial; identical to SEQ ID NO: 448876
  Synthetic oligonucleotide

SEQ ID NO: 599353 - DNA, 60 bp, Artificial; identical to SEQ ID NO: 448877
  Synthetic oligonucleotide

SEQ ID NO: 599354 - DNA, 50 bp, Artificial; identical to SEQ ID NO: 448881
  Synthetic oligonucleotide

SEQ ID NO: 599355 - DNA, 55 bp, Artificial; identical to SEQ ID NO: 448882
  Synthetic oligonucleotide

SEQ ID NO: 599356 - DNA, 57 bp, Artificial; identical to SEQ ID NO: 448883
  Synthetic oligonucleotide

SEQ ID NO: 599357 - DNA, 58 bp, Artificial; identical to SEQ ID NO: 448884
  Synthetic oligonucleotide

SEQ ID NO: 599358 - DNA, 57 bp, Artificial; identical to SEQ ID NO: 448885
  Synthetic oligonucleotide

SEQ ID NO: 599359 - DNA, 60 bp, Artificial; identical to SEQ ID NO: 448889
  Synthetic oligonucleotide

SEQ ID NO: 599360 - DNA, 59 bp, Artificial; identical to SEQ ID NO: 448891
  Synthetic oligonucleotide

SEQ ID NO: 599361 - DNA, 54 bp, Artificial; identical to SEQ ID NO: 8533
  Synthetic oligonucleotide

SEQ ID NO: 599362 - DNA, 58 bp, Artificial; identical to SEQ ID NO: 448901
  Synthetic oligonucleotide

SEQ ID NO: 599363 - DNA, 55 bp, Artificial; identical to SEQ ID NO: 448904
  Synthetic oligonucleotide

SEQ ID NO: 599364 - DNA, 55 bp, Artificial; identical to SEQ ID NO: 448906
  Synthetic oligonucleotide

SEQ ID NO: 599365 - DNA, 60 bp, Artificial; identical to SEQ ID NO: 448907
  Synthetic oligonucleotide

SEQ ID NO: 599366 - DNA, 60 bp, Artificial; identical to SEQ ID NO: 448909
  Synthetic oligonucleotide

SEQ ID NO: 599367 - DNA, 60 bp, Artificial; identical to SEQ ID NO: 448913
  Synthetic oligonucleotide

SEQ ID NO: 599368 - DNA, 58 bp, Artificial; identical to SEQ ID NO: 448914
  Synthetic oligonucleotide

SEQ ID NO: 599369 - DNA, 57 bp, Artificial; identical to SEQ ID NO: 448916
  Synthetic oligonucleotide

SEQ ID NO: 599370 - DNA, 54 bp, Artificial; identical to SEQ ID NO: 448927
  Synthetic oligonucleotide

SEQ ID NO: 599371 - DNA, 60 bp, Artificial; identical to SEQ ID NO: 448930
  Synthetic oligonucleotide

SEQ ID NO: 599372 - DNA, 55 bp, Artificial; identical to SEQ ID NO: 448935
  Synthetic oligonucleotide

SEQ ID NO: 599373 - DNA, 60 bp, Artificial; identical to SEQ ID NO: 448939
  Synthetic oligonucleotide

SEQ ID NO: 599374 - DNA, 57 bp, Artificial; identical to SEQ ID NO: 448941
  Synthetic oligonucleotide

SEQ ID NO: 599375 - DNA, 59 bp, Artificial; identical to SEQ ID NO: 448942
  Synthetic oligonucleotide

SEQ ID NO: 599376 - DNA, 58 bp, Artificial; identical to SEQ ID NO: 448943
  Synthetic oligonucleotide

SEQ ID NO: 599377 - DNA, 60 bp, Artificial; identical to SEQ ID NO: 448944
  Synthetic oligonucleotide

SEQ ID NO: 599378 - DNA, 55 bp, Artificial; identical to SEQ ID NO: 448945
  Synthetic oligonucleotide

SEQ ID NO: 599379 - DNA, 60 bp, Artificial; identical to SEQ ID NO: 10575
  Synthetic oligonucleotide

SEQ ID NO: 599380 - DNA, 59 bp, Artificial; identical to SEQ ID NO: 448954
  Synthetic oligonucleotide

SEQ ID NO: 599381 - DNA, 60 bp, Artificial; identical to SEQ ID NO: 448961
  Synthetic oligonucleotide

SEQ ID NO: 599382 - DNA, 60 bp, Artificial; identical to SEQ ID NO: 448965
  Synthetic oligonucleotide

SEQ ID NO: 599383 - DNA, 60 bp, Artificial; identical to SEQ ID NO: 448966
  Synthetic oligonucleotide

SEQ ID NO: 599384 - DNA, 51 bp, Artificial; identical to SEQ ID NO: 448967
  Synthetic oligonucleotide

SEQ ID NO: 599385 - DNA, 52 bp, Artificial; identical to SEQ ID NO: 448968
  Synthetic oligonucleotide

SEQ ID NO: 599386 - DNA, 55 bp, Artificial; identical to SEQ ID NO: 448970
  Synthetic oligonucleotide

SEQ ID NO: 599387 - DNA, 60 bp, Artificial; identical to SEQ ID NO: 11673
  Synthetic oligonucleotide

SEQ ID NO: 599388 - DNA, 60 bp, Artificial; identical to SEQ ID NO: 448975
  Synthetic oligonucleotide

SEQ ID NO: 599389 - DNA, 58 bp, Artificial; identical to SEQ ID NO: 448978
  Synthetic oligonucleotide

SEQ ID NO: 599390 - DNA, 60 bp, Artificial; identical to SEQ ID NO: 448981
  Synthetic oligonucleotide

SEQ ID NO: 599391 - DNA, 55 bp, Artificial; identical to SEQ ID NO: 448982
  Synthetic oligonucleotide

SEQ ID NO: 599392 - DNA, 60 bp, Artificial; identical to SEQ ID NO: 6131
  Synthetic oligonucleotide

SEQ ID NO: 599393 - DNA, 60 bp, Artificial; identical to SEQ ID NO: 448984
  Synthetic oligonucleotide

SEQ ID NO: 599394 - DNA, 57 bp, Artificial; identical to SEQ ID NO: 448988
  Synthetic oligonucleotide

SEQ ID NO: 599395 - DNA, 60 bp, Artificial; identical to SEQ ID NO: 448991
  Synthetic oligonucleotide

SEQ ID NO: 599396 - DNA, 56 bp, Artificial; identical to SEQ ID NO: 448996
  Synthetic oligonucleotide

SEQ ID NO: 599397 - DNA, 55 bp, Artificial; identical to SEQ ID NO: 449003
  Synthetic oligonucleotide

SEQ ID NO: 599398 - DNA, 51 bp, Artificial; identical to SEQ ID NO: 449007
  Synthetic oligonucleotide

SEQ ID NO: 599399 - DNA, 56 bp, Artificial; identical to SEQ ID NO: 449011
  Synthetic oligonucleotide

SEQ ID NO: 599400 - DNA, 60 bp, Artificial; identical to SEQ ID NO: 449013
  Synthetic oligonucleotide

SEQ ID NO: 599401 - DNA, 55 bp, Artificial; identical to SEQ ID NO: 449014
  Synthetic oligonucleotide

SEQ ID NO: 599402 - DNA, 54 bp, Artificial; identical to SEQ ID NO: 19999
  Synthetic oligonucleotide

SEQ ID NO: 599403 - DNA, 60 bp, Artificial; identical to SEQ ID NO: 449026
  Synthetic oligonucleotide

SEQ ID NO: 599404 - DNA, 55 bp, Artificial; identical to SEQ ID NO: 449027
  Synthetic oligonucleotide

SEQ ID NO: 599405 - DNA, 52 bp, Artificial; identical to SEQ ID NO: 449029
  Synthetic oligonucleotide

SEQ ID NO: 599406 - DNA, 57 bp, Artificial; identical to SEQ ID NO: 449030
  Synthetic oligonucleotide

SEQ ID NO: 599407 - DNA, 57 bp, Artificial; identical to SEQ ID NO: 449031
  Synthetic oligonucleotide

SEQ ID NO: 599408 - DNA, 57 bp, Artificial; identical to SEQ ID NO: 449033
  Synthetic oligonucleotide

SEQ ID NO: 599409 - DNA, 60 bp, Artificial; identical to SEQ ID NO: 449037
  Synthetic oligonucleotide

SEQ ID NO: 599410 - DNA, 52 bp, Artificial; identical to SEQ ID NO: 10795
  Synthetic oligonucleotide

SEQ ID NO: 599411 - DNA, 60 bp, Artificial; identical to SEQ ID NO: 449042
  Synthetic oligonucleotide

SEQ ID NO: 599412 - DNA, 60 bp, Artificial; identical to SEQ ID NO: 449043
  Synthetic oligonucleotide

SEQ ID NO: 599413 - DNA, 55 bp, Artificial; identical to SEQ ID NO: 449044
  Synthetic oligonucleotide

SEQ ID NO: 599414 - DNA, 60 bp, Artificial; identical to SEQ ID NO: 449045
  Synthetic oligonucleotide

SEQ ID NO: 599415 - DNA, 60 bp, Artificial; identical to SEQ ID NO: 449046
  Synthetic oligonucleotide

SEQ ID NO: 599416 - DNA, 53 bp, Artificial; identical to SEQ ID NO: 449048
  Synthetic oligonucleotide

SEQ ID NO: 599417 - DNA, 50 bp, Artificial; identical to SEQ ID NO: 449050
  Synthetic oligonucleotide

SEQ ID NO: 599418 - DNA, 57 bp, Artificial; identical to SEQ ID NO: 449051
  Synthetic oligonucleotide

SEQ ID NO: 599419 - DNA, 60 bp, Artificial; identical to SEQ ID NO: 449052
  Synthetic oligonucleotide

SEQ ID NO: 599420 - DNA, 56 bp, Artificial; identical to SEQ ID NO: 449056
  Synthetic oligonucleotide

SEQ ID NO: 599421 - DNA, 53 bp, Artificial; identical to SEQ ID NO: 449061
  Synthetic oligonucleotide

SEQ ID NO: 599422 - DNA, 59 bp, Artificial; identical to SEQ ID NO: 16424
  Synthetic oligonucleotide

SEQ ID NO: 599423 - DNA, 55 bp, Artificial; identical to SEQ ID NO: 449063
  Synthetic oligonucleotide

SEQ ID NO: 599424 - DNA, 55 bp, Artificial; identical to SEQ ID NO: 449064
  Synthetic oligonucleotide

SEQ ID NO: 599425 - DNA, 58 bp, Artificial; identical to SEQ ID NO: 449066
  Synthetic oligonucleotide

SEQ ID NO: 599426 - DNA, 54 bp, Artificial; identical to SEQ ID NO: 449069
  Synthetic oligonucleotide

SEQ ID NO: 599427 - DNA, 55 bp, Artificial; identical to SEQ ID NO: 449071
  Synthetic oligonucleotide

SEQ ID NO: 599428 - DNA, 52 bp, Artificial; identical to SEQ ID NO: 10245
  Synthetic oligonucleotide

SEQ ID NO: 599429 - DNA, 60 bp, Artificial; identical to SEQ ID NO: 449074
  Synthetic oligonucleotide

SEQ ID NO: 599430 - DNA, 59 bp, Artificial; identical to SEQ ID NO: 20571
  Synthetic oligonucleotide

SEQ ID NO: 599431 - DNA, 60 bp, Artificial; identical to SEQ ID NO: 449076
  Synthetic oligonucleotide

SEQ ID NO: 599432 - DNA, 60 bp, Artificial; identical to SEQ ID NO: 449077
  Synthetic oligonucleotide

SEQ ID NO: 599433 - DNA, 60 bp, Artificial; identical to SEQ ID NO: 449078
  Synthetic oligonucleotide

SEQ ID NO: 599434 - DNA, 53 bp, Artificial; identical to SEQ ID NO: 449079
  Synthetic oligonucleotide

SEQ ID NO: 599435 - DNA, 60 bp, Artificial; identical to SEQ ID NO: 449080
  Synthetic oligonucleotide

SEQ ID NO: 599436 - DNA, 59 bp, Artificial; identical to SEQ ID NO: 449084
  Synthetic oligonucleotide

SEQ ID NO: 599437 - DNA, 56 bp, Artificial; identical to SEQ ID NO: 449085
  Synthetic oligonucleotide

SEQ ID NO: 599438 - DNA, 60 bp, Artificial; identical to SEQ ID NO: 449088
  Synthetic oligonucleotide

SEQ ID NO: 599439 - DNA, 55 bp, Artificial; identical to SEQ ID NO: 449096
  Synthetic oligonucleotide

SEQ ID NO: 599440 - DNA, 60 bp, Artificial; identical to SEQ ID NO: 449097
  Synthetic oligonucleotide

SEQ ID NO: 599441 - DNA, 60 bp, Artificial; identical to SEQ ID NO: 449101
  Synthetic oligonucleotide

SEQ ID NO: 599442 - DNA, 60 bp, Artificial; identical to SEQ ID NO: 449107
  Synthetic oligonucleotide

SEQ ID NO: 599443 - DNA, 50 bp, Artificial; identical to SEQ ID NO: 449113
  Synthetic oligonucleotide

SEQ ID NO: 599444 - DNA, 55 bp, Artificial; identical to SEQ ID NO: 449114
  Synthetic oligonucleotide

SEQ ID NO: 599445 - DNA, 52 bp, Artificial; identical to SEQ ID NO: 449116
  Synthetic oligonucleotide

SEQ ID NO: 599446 - DNA, 50 bp, Artificial; identical to SEQ ID NO: 449117
  Synthetic oligonucleotide

SEQ ID NO: 599447 - DNA, 60 bp, Artificial; identical to SEQ ID NO: 449122
  Synthetic oligonucleotide

SEQ ID NO: 599448 - DNA, 55 bp, Artificial; identical to SEQ ID NO: 449125
  Synthetic oligonucleotide

SEQ ID NO: 599449 - DNA, 51 bp, Artificial; identical to SEQ ID NO: 449128
  Synthetic oligonucleotide

SEQ ID NO: 599450 - DNA, 60 bp, Artificial; identical to SEQ ID NO: 449130
  Synthetic oligonucleotide

SEQ ID NO: 599451 - DNA, 60 bp, Artificial; identical to SEQ ID NO: 449131
  Synthetic oligonucleotide

SEQ ID NO: 599452 - DNA, 60 bp, Artificial; identical to SEQ ID NO: 449132
  Synthetic oligonucleotide

SEQ ID NO: 599453 - DNA, 55 bp, Artificial; identical to SEQ ID NO: 449133
  Synthetic oligonucleotide

SEQ ID NO: 599454 - DNA, 60 bp, Artificial; identical to SEQ ID NO: 449135
  Synthetic oligonucleotide

SEQ ID NO: 599455 - DNA, 55 bp, Artificial; identical to SEQ ID NO: 14734
  Synthetic oligonucleotide

SEQ ID NO: 599456 - DNA, 56 bp, Artificial; identical to SEQ ID NO: 449137
  Synthetic oligonucleotide

SEQ ID NO: 599457 - DNA, 55 bp, Artificial; identical to SEQ ID NO: 449138
  Synthetic oligonucleotide

SEQ ID NO: 599458 - DNA, 60 bp, Artificial; identical to SEQ ID NO: 449139
  Synthetic oligonucleotide

SEQ ID NO: 599459 - DNA, 53 bp, Artificial; identical to SEQ ID NO: 449140
  Synthetic oligonucleotide

SEQ ID NO: 599460 - DNA, 60 bp, Artificial; identical to SEQ ID NO: 449145
  Synthetic oligonucleotide

SEQ ID NO: 599461 - DNA, 60 bp, Artificial; identical to SEQ ID NO: 449146
  Synthetic oligonucleotide

SEQ ID NO: 599462 - DNA, 60 bp, Artificial; identical to SEQ ID NO: 449150
  Synthetic oligonucleotide

SEQ ID NO: 599463 - DNA, 51 bp, Artificial; identical to SEQ ID NO: 449152
  Synthetic oligonucleotide

SEQ ID NO: 599464 - DNA, 56 bp, Artificial; identical to SEQ ID NO: 449154
  Synthetic oligonucleotide

SEQ ID NO: 599465 - DNA, 53 bp, Artificial; identical to SEQ ID NO: 449155
  Synthetic oligonucleotide

SEQ ID NO: 599466 - DNA, 55 bp, Artificial; identical to SEQ ID NO: 449156
  Synthetic oligonucleotide

SEQ ID NO: 599467 - DNA, 60 bp, Artificial; identical to SEQ ID NO: 449159
  Synthetic oligonucleotide

SEQ ID NO: 599468 - DNA, 60 bp, Artificial; identical to SEQ ID NO: 449160
  Synthetic oligonucleotide

SEQ ID NO: 599469 - DNA, 60 bp, Artificial; identical to SEQ ID NO: 449162
  Synthetic oligonucleotide

SEQ ID NO: 599470 - DNA, 55 bp, Artificial; identical to SEQ ID NO: 449163
  Synthetic oligonucleotide

SEQ ID NO: 599471 - DNA, 60 bp, Artificial; identical to SEQ ID NO: 449164
  Synthetic oligonucleotide

SEQ ID NO: 599472 - DNA, 58 bp, Artificial; identical to SEQ ID NO: 449165
  Synthetic oligonucleotide

SEQ ID NO: 599473 - DNA, 60 bp, Artificial; identical to SEQ ID NO: 449166
  Synthetic oligonucleotide

SEQ ID NO: 599474 - DNA, 60 bp, Artificial; identical to SEQ ID NO: 449170
  Synthetic oligonucleotide

SEQ ID NO: 599475 - DNA, 60 bp, Artificial; identical to SEQ ID NO: 449171
  Synthetic oligonucleotide

SEQ ID NO: 599476 - DNA, 59 bp, Artificial; identical to SEQ ID NO: 449172
  Synthetic oligonucleotide

SEQ ID NO: 599477 - DNA, 56 bp, Artificial; identical to SEQ ID NO: 449173
  Synthetic oligonucleotide

SEQ ID NO: 599478 - DNA, 55 bp, Artificial; identical to SEQ ID NO: 449174
  Synthetic oligonucleotide

SEQ ID NO: 599479 - DNA, 56 bp, Artificial; identical to SEQ ID NO: 449176
  Synthetic oligonucleotide

SEQ ID NO: 599480 - DNA, 56 bp, Artificial; identical to SEQ ID NO: 449181
  Synthetic oligonucleotide

SEQ ID NO: 599481 - DNA, 58 bp, Artificial; identical to SEQ ID NO: 449182
  Synthetic oligonucleotide

SEQ ID NO: 599482 - DNA, 60 bp, Artificial; identical to SEQ ID NO: 449183
  Synthetic oligonucleotide

SEQ ID NO: 599483 - DNA, 60 bp, Artificial; identical to SEQ ID NO: 449186
  Synthetic oligonucleotide

SEQ ID NO: 599484 - DNA, 59 bp, Artificial; identical to SEQ ID NO: 449189
  Synthetic oligonucleotide

SEQ ID NO: 599485 - DNA, 57 bp, Artificial; identical to SEQ ID NO: 449190
  Synthetic oligonucleotide

SEQ ID NO: 599486 - DNA, 60 bp, Artificial; identical to SEQ ID NO: 449191
  Synthetic oligonucleotide

SEQ ID NO: 599487 - DNA, 55 bp, Artificial; identical to SEQ ID NO: 449195
  Synthetic oligonucleotide

SEQ ID NO: 599488 - DNA, 55 bp, Artificial; identical to SEQ ID NO: 449197
  Synthetic oligonucleotide

SEQ ID NO: 599489 - DNA, 56 bp, Artificial; identical to SEQ ID NO: 449198
  Synthetic oligonucleotide

SEQ ID NO: 599490 - DNA, 57 bp, Artificial; identical to SEQ ID NO: 449201
  Synthetic oligonucleotide

SEQ ID NO: 599491 - DNA, 52 bp, Artificial; identical to SEQ ID NO: 449203
  Synthetic oligonucleotide

SEQ ID NO: 599492 - DNA, 60 bp, Artificial; identical to SEQ ID NO: 449205
  Synthetic oligonucleotide

SEQ ID NO: 599493 - DNA, 54 bp, Artificial; identical to SEQ ID NO: 449206
  Synthetic oligonucleotide

SEQ ID NO: 599494 - DNA, 56 bp, Artificial; identical to SEQ ID NO: 449208
  Synthetic oligonucleotide

SEQ ID NO: 599495 - DNA, 59 bp, Artificial; identical to SEQ ID NO: 449213
  Synthetic oligonucleotide

SEQ ID NO: 599496 - DNA, 60 bp, Artificial; identical to SEQ ID NO: 449216
  Synthetic oligonucleotide

SEQ ID NO: 599497 - DNA, 60 bp, Artificial; identical to SEQ ID NO: 449219
  Synthetic oligonucleotide

SEQ ID NO: 599498 - DNA, 60 bp, Artificial; identical to SEQ ID NO: 449225
  Synthetic oligonucleotide

SEQ ID NO: 599499 - DNA, 57 bp, Artificial; identical to SEQ ID NO: 449226
  Synthetic oligonucleotide

SEQ ID NO: 599500 - DNA, 57 bp, Artificial; identical to SEQ ID NO: 15969
  Synthetic oligonucleotide

SEQ ID NO: 599501 - DNA, 54 bp, Artificial; identical to SEQ ID NO: 449230
  Synthetic oligonucleotide

SEQ ID NO: 599502 - DNA, 56 bp, Artificial; identical to SEQ ID NO: 449235
  Synthetic oligonucleotide

SEQ ID NO: 599503 - DNA, 60 bp, Artificial; identical to SEQ ID NO: 449236
  Synthetic oligonucleotide

SEQ ID NO: 599504 - DNA, 58 bp, Artificial; identical to SEQ ID NO: 10893
  Synthetic oligonucleotide

SEQ ID NO: 599505 - DNA, 60 bp, Artificial; identical to SEQ ID NO: 449242
  Synthetic oligonucleotide

SEQ ID NO: 599506 - DNA, 60 bp, Artificial; identical to SEQ ID NO: 449244
  Synthetic oligonucleotide

SEQ ID NO: 599507 - DNA, 60 bp, Artificial; identical to SEQ ID NO: 449246
  Synthetic oligonucleotide

SEQ ID NO: 599508 - DNA, 58 bp, Artificial; identical to SEQ ID NO: 449248
  Synthetic oligonucleotide

SEQ ID NO: 599509 - DNA, 60 bp, Artificial; identical to SEQ ID NO: 449249
  Synthetic oligonucleotide

SEQ ID NO: 599510 - DNA, 60 bp, Artificial; identical to SEQ ID NO: 449252
  Synthetic oligonucleotide

SEQ ID NO: 599511 - DNA, 57 bp, Artificial; identical to SEQ ID NO: 449254
  Synthetic oligonucleotide

SEQ ID NO: 599512 - DNA, 59 bp, Artificial; identical to SEQ ID NO: 449256
  Synthetic oligonucleotide

SEQ ID NO: 599513 - DNA, 51 bp, Artificial; identical to SEQ ID NO: 449261
  Synthetic oligonucleotide

SEQ ID NO: 599514 - DNA, 60 bp, Artificial; identical to SEQ ID NO: 14756
  Synthetic oligonucleotide

SEQ ID NO: 599515 - DNA, 57 bp, Artificial; identical to SEQ ID NO: 449266
  Synthetic oligonucleotide

SEQ ID NO: 599516 - DNA, 59 bp, Artificial; identical to SEQ ID NO: 449267
  Synthetic oligonucleotide

SEQ ID NO: 599517 - DNA, 58 bp, Artificial; identical to SEQ ID NO: 449268
  Synthetic oligonucleotide

SEQ ID NO: 599518 - DNA, 55 bp, Artificial; identical to SEQ ID NO: 449270
  Synthetic oligonucleotide

SEQ ID NO: 599519 - DNA, 60 bp, Artificial; identical to SEQ ID NO: 449271
  Synthetic oligonucleotide

SEQ ID NO: 599520 - DNA, 60 bp, Artificial; identical to SEQ ID NO: 449273
  Synthetic oligonucleotide

SEQ ID NO: 599521 - DNA, 54 bp, Artificial; identical to SEQ ID NO: 449275
  Synthetic oligonucleotide

SEQ ID NO: 599522 - DNA, 56 bp, Artificial; identical to SEQ ID NO: 449277
  Synthetic oligonucleotide

SEQ ID NO: 599523 - DNA, 53 bp, Artificial; identical to SEQ ID NO: 449281
  Synthetic oligonucleotide

SEQ ID NO: 599524 - DNA, 60 bp, Artificial; identical to SEQ ID NO: 449282
  Synthetic oligonucleotide

SEQ ID NO: 599525 - DNA, 60 bp, Artificial; identical to SEQ ID NO: 449283
  Synthetic oligonucleotide

SEQ ID NO: 599526 - DNA, 51 bp, Artificial; identical to SEQ ID NO: 449285
  Synthetic oligonucleotide

SEQ ID NO: 599527 - DNA, 55 bp, Artificial; identical to SEQ ID NO: 449287
  Synthetic oligonucleotide

SEQ ID NO: 599528 - DNA, 60 bp, Artificial; identical to SEQ ID NO: 449299
  Synthetic oligonucleotide

SEQ ID NO: 599529 - DNA, 50 bp, Artificial; identical to SEQ ID NO: 449300
  Synthetic oligonucleotide

SEQ ID NO: 599530 - DNA, 60 bp, Artificial; identical to SEQ ID NO: 11982
  Synthetic oligonucleotide

SEQ ID NO: 599531 - DNA, 54 bp, Artificial; identical to SEQ ID NO: 449306
  Synthetic oligonucleotide

SEQ ID NO: 599532 - DNA, 55 bp, Artificial; identical to SEQ ID NO: 449307
  Synthetic oligonucleotide

SEQ ID NO: 599533 - DNA, 60 bp, Artificial; identical to SEQ ID NO: 449310
  Synthetic oligonucleotide

SEQ ID NO: 599534 - DNA, 55 bp, Artificial; identical to SEQ ID NO: 449312
  Synthetic oligonucleotide

SEQ ID NO: 599535 - DNA, 51 bp, Artificial; identical to SEQ ID NO: 449314
  Synthetic oligonucleotide

SEQ ID NO: 599536 - DNA, 60 bp, Artificial; identical to SEQ ID NO: 11010
  Synthetic oligonucleotide

SEQ ID NO: 599537 - DNA, 52 bp, Artificial; identical to SEQ ID NO: 449316
  Synthetic oligonucleotide

SEQ ID NO: 599538 - DNA, 60 bp, Artificial; identical to SEQ ID NO: 449320
  Synthetic oligonucleotide

SEQ ID NO: 599539 - DNA, 57 bp, Artificial; identical to SEQ ID NO: 449322
  Synthetic oligonucleotide

SEQ ID NO: 599540 - DNA, 58 bp, Artificial; identical to SEQ ID NO: 449323
  Synthetic oligonucleotide

SEQ ID NO: 599541 - DNA, 60 bp, Artificial; identical to SEQ ID NO: 449325
  Synthetic oligonucleotide

SEQ ID NO: 599542 - DNA, 55 bp, Artificial; identical to SEQ ID NO: 449328
  Synthetic oligonucleotide

SEQ ID NO: 599543 - DNA, 55 bp, Artificial; identical to SEQ ID NO: 449332
  Synthetic oligonucleotide

SEQ ID NO: 599544 - DNA, 60 bp, Artificial; identical to SEQ ID NO: 449335
  Synthetic oligonucleotide

SEQ ID NO: 599545 - DNA, 56 bp, Artificial; identical to SEQ ID NO: 449338
  Synthetic oligonucleotide

SEQ ID NO: 599546 - DNA, 60 bp, Artificial; identical to SEQ ID NO: 449340
  Synthetic oligonucleotide

SEQ ID NO: 599547 - DNA, 60 bp, Artificial; identical to SEQ ID NO: 449341
  Synthetic oligonucleotide

SEQ ID NO: 599548 - DNA, 60 bp, Artificial; identical to SEQ ID NO: 449342
  Synthetic oligonucleotide

SEQ ID NO: 599549 - DNA, 55 bp, Artificial; identical to SEQ ID NO: 449347
  Synthetic oligonucleotide

SEQ ID NO: 599550 - DNA, 60 bp, Artificial; identical to SEQ ID NO: 449348
  Synthetic oligonucleotide

SEQ ID NO: 599551 - DNA, 59 bp, Artificial; identical to SEQ ID NO: 449352
  Synthetic oligonucleotide

SEQ ID NO: 599552 - DNA, 60 bp, Artificial; identical to SEQ ID NO: 449357
  Synthetic oligonucleotide

SEQ ID NO: 599553 - DNA, 55 bp, Artificial; identical to SEQ ID NO: 449359
  Synthetic oligonucleotide

SEQ ID NO: 599554 - DNA, 52 bp, Artificial; identical to SEQ ID NO: 449361
  Synthetic oligonucleotide

SEQ ID NO: 599555 - DNA, 57 bp, Artificial; identical to SEQ ID NO: 10995
  Synthetic oligonucleotide

SEQ ID NO: 599556 - DNA, 56 bp, Artificial; identical to SEQ ID NO: 449363
  Synthetic oligonucleotide

SEQ ID NO: 599557 - DNA, 60 bp, Artificial; identical to SEQ ID NO: 449364
  Synthetic oligonucleotide

SEQ ID NO: 599558 - DNA, 60 bp, Artificial; identical to SEQ ID NO: 449365
  Synthetic oligonucleotide

SEQ ID NO: 599559 - DNA, 50 bp, Artificial; identical to SEQ ID NO: 449370
  Synthetic oligonucleotide

SEQ ID NO: 599560 - DNA, 58 bp, Artificial; identical to SEQ ID NO: 449374
  Synthetic oligonucleotide

SEQ ID NO: 599561 - DNA, 58 bp, Artificial; identical to SEQ ID NO: 449378
  Synthetic oligonucleotide

SEQ ID NO: 599562 - DNA, 57 bp, Artificial; identical to SEQ ID NO: 449381
  Synthetic oligonucleotide

SEQ ID NO: 599563 - DNA, 60 bp, Artificial; identical to SEQ ID NO: 449383
  Synthetic oligonucleotide

SEQ ID NO: 599564 - DNA, 59 bp, Artificial; identical to SEQ ID NO: 449385
  Synthetic oligonucleotide

SEQ ID NO: 599565 - DNA, 55 bp, Artificial; identical to SEQ ID NO: 449387
  Synthetic oligonucleotide

SEQ ID NO: 599566 - DNA, 60 bp, Artificial; identical to SEQ ID NO: 449388
  Synthetic oligonucleotide

SEQ ID NO: 599567 - DNA, 57 bp, Artificial; identical to SEQ ID NO: 449392
  Synthetic oligonucleotide

SEQ ID NO: 599568 - DNA, 55 bp, Artificial; identical to SEQ ID NO: 449393
  Synthetic oligonucleotide

SEQ ID NO: 599569 - DNA, 57 bp, Artificial; identical to SEQ ID NO: 449397
  Synthetic oligonucleotide

SEQ ID NO: 599570 - DNA, 59 bp, Artificial; identical to SEQ ID NO: 449402
  Synthetic oligonucleotide

SEQ ID NO: 599571 - DNA, 60 bp, Artificial; identical to SEQ ID NO: 449405
  Synthetic oligonucleotide

SEQ ID NO: 599572 - DNA, 53 bp, Artificial; identical to SEQ ID NO: 449406
  Synthetic oligonucleotide

SEQ ID NO: 599573 - DNA, 56 bp, Artificial; identical to SEQ ID NO: 449407
  Synthetic oligonucleotide

SEQ ID NO: 599574 - DNA, 50 bp, Artificial; identical to SEQ ID NO: 449410
  Synthetic oligonucleotide

SEQ ID NO: 599575 - DNA, 59 bp, Artificial; identical to SEQ ID NO: 449417
  Synthetic oligonucleotide

SEQ ID NO: 599576 - DNA, 59 bp, Artificial; identical to SEQ ID NO: 449418
  Synthetic oligonucleotide

SEQ ID NO: 599577 - DNA, 55 bp, Artificial; identical to SEQ ID NO: 449425
  Synthetic oligonucleotide

SEQ ID NO: 599578 - DNA, 59 bp, Artificial; identical to SEQ ID NO: 19799
  Synthetic oligonucleotide

SEQ ID NO: 599579 - DNA, 60 bp, Artificial; identical to SEQ ID NO: 449429
  Synthetic oligonucleotide

SEQ ID NO: 599580 - DNA, 57 bp, Artificial; identical to SEQ ID NO: 449430
  Synthetic oligonucleotide

SEQ ID NO: 599581 - DNA, 55 bp, Artificial; identical to SEQ ID NO: 449431
  Synthetic oligonucleotide

SEQ ID NO: 599582 - DNA, 54 bp, Artificial; identical to SEQ ID NO: 449433
  Synthetic oligonucleotide

SEQ ID NO: 599583 - DNA, 58 bp, Artificial; identical to SEQ ID NO: 449434
  Synthetic oligonucleotide

SEQ ID NO: 599584 - DNA, 60 bp, Artificial; identical to SEQ ID NO: 449437
  Synthetic oligonucleotide

SEQ ID NO: 599585 - DNA, 60 bp, Artificial; identical to SEQ ID NO: 122656
  Synthetic oligonucleotide

SEQ ID NO: 599586 - DNA, 60 bp, Artificial; identical to SEQ ID NO: 449442
  Synthetic oligonucleotide

SEQ ID NO: 599587 - DNA, 57 bp, Artificial; identical to SEQ ID NO: 19558
  Synthetic oligonucleotide

SEQ ID NO: 599588 - DNA, 58 bp, Artificial; identical to SEQ ID NO: 449444
  Synthetic oligonucleotide

SEQ ID NO: 599589 - DNA, 56 bp, Artificial; identical to SEQ ID NO: 11574
  Synthetic oligonucleotide

SEQ ID NO: 599590 - DNA, 59 bp, Artificial; identical to SEQ ID NO: 449450
  Synthetic oligonucleotide

SEQ ID NO: 599591 - DNA, 59 bp, Artificial; identical to SEQ ID NO: 449451
  Synthetic oligonucleotide

SEQ ID NO: 599592 - DNA, 57 bp, Artificial; identical to SEQ ID NO: 449452
  Synthetic oligonucleotide

SEQ ID NO: 599593 - DNA, 59 bp, Artificial; identical to SEQ ID NO: 449453
  Synthetic oligonucleotide

SEQ ID NO: 599594 - DNA, 60 bp, Artificial; identical to SEQ ID NO: 449454
  Synthetic oligonucleotide

SEQ ID NO: 599595 - DNA, 58 bp, Artificial; identical to SEQ ID NO: 449458
  Synthetic oligonucleotide

SEQ ID NO: 599596 - DNA, 54 bp, Artificial; identical to SEQ ID NO: 449459
  Synthetic oligonucleotide

SEQ ID NO: 599597 - DNA, 54 bp, Artificial; identical to SEQ ID NO: 449460
  Synthetic oligonucleotide

SEQ ID NO: 599598 - DNA, 54 bp, Artificial; identical to SEQ ID NO: 449461
  Synthetic oligonucleotide

SEQ ID NO: 599599 - DNA, 57 bp, Artificial; identical to SEQ ID NO: 449462
  Synthetic oligonucleotide

SEQ ID NO: 599600 - DNA, 58 bp, Artificial; identical to SEQ ID NO: 449464
  Synthetic oligonucleotide

SEQ ID NO: 599601 - DNA, 56 bp, Artificial; identical to SEQ ID NO: 449465
  Synthetic oligonucleotide

SEQ ID NO: 599602 - DNA, 60 bp, Artificial; identical to SEQ ID NO: 449466
  Synthetic oligonucleotide

SEQ ID NO: 599603 - DNA, 56 bp, Artificial; identical to SEQ ID NO: 449467
  Synthetic oligonucleotide

SEQ ID NO: 599604 - DNA, 58 bp, Artificial; identical to SEQ ID NO: 449468
  Synthetic oligonucleotide

SEQ ID NO: 599605 - DNA, 51 bp, Artificial; identical to SEQ ID NO: 449470
  Synthetic oligonucleotide

SEQ ID NO: 599606 - DNA, 55 bp, Artificial; identical to SEQ ID NO: 449474
  Synthetic oligonucleotide

SEQ ID NO: 599607 - DNA, 60 bp, Artificial; identical to SEQ ID NO: 449475
  Synthetic oligonucleotide

SEQ ID NO: 599608 - DNA, 60 bp, Artificial; identical to SEQ ID NO: 105850
  Synthetic oligonucleotide

SEQ ID NO: 599609 - DNA, 60 bp, Artificial; identical to SEQ ID NO: 449482
  Synthetic oligonucleotide

SEQ ID NO: 599610 - DNA, 58 bp, Artificial; identical to SEQ ID NO: 449483
  Synthetic oligonucleotide

SEQ ID NO: 599611 - DNA, 55 bp, Artificial; identical to SEQ ID NO: 449487
  Synthetic oligonucleotide

SEQ ID NO: 599612 - DNA, 51 bp, Artificial; identical to SEQ ID NO: 449489
  Synthetic oligonucleotide

SEQ ID NO: 599613 - DNA, 58 bp, Artificial; identical to SEQ ID NO: 449491
  Synthetic oligonucleotide

SEQ ID NO: 599614 - DNA, 59 bp, Artificial; identical to SEQ ID NO: 449495
  Synthetic oligonucleotide

SEQ ID NO: 599615 - DNA, 59 bp, Artificial; identical to SEQ ID NO: 19904
  Synthetic oligonucleotide

SEQ ID NO: 599616 - DNA, 58 bp, Artificial; identical to SEQ ID NO: 449497
  Synthetic oligonucleotide

SEQ ID NO: 599617 - DNA, 59 bp, Artificial; identical to SEQ ID NO: 449498
  Synthetic oligonucleotide

SEQ ID NO: 599618 - DNA, 60 bp, Artificial; identical to SEQ ID NO: 449501
  Synthetic oligonucleotide

SEQ ID NO: 599619 - DNA, 60 bp, Artificial; identical to SEQ ID NO: 449503
  Synthetic oligonucleotide

SEQ ID NO: 599620 - DNA, 58 bp, Artificial; identical to SEQ ID NO: 449507
  Synthetic oligonucleotide

SEQ ID NO: 599621 - DNA, 60 bp, Artificial; identical to SEQ ID NO: 449508
  Synthetic oligonucleotide

SEQ ID NO: 599622 - DNA, 59 bp, Artificial; identical to SEQ ID NO: 449510
  Synthetic oligonucleotide

SEQ ID NO: 599623 - DNA, 55 bp, Artificial; identical to SEQ ID NO: 449511
  Synthetic oligonucleotide

SEQ ID NO: 599624 - DNA, 58 bp, Artificial; identical to SEQ ID NO: 449519
  Synthetic oligonucleotide

SEQ ID NO: 599625 - DNA, 54 bp, Artificial; identical to SEQ ID NO: 449522
  Synthetic oligonucleotide

SEQ ID NO: 599626 - DNA, 53 bp, Artificial; identical to SEQ ID NO: 449523
  Synthetic oligonucleotide

SEQ ID NO: 599627 - DNA, 55 bp, Artificial; identical to SEQ ID NO: 449527
  Synthetic oligonucleotide

SEQ ID NO: 599628 - DNA, 55 bp, Artificial; identical to SEQ ID NO: 449528
  Synthetic oligonucleotide

SEQ ID NO: 599629 - DNA, 59 bp, Artificial; identical to SEQ ID NO: 449534
  Synthetic oligonucleotide

SEQ ID NO: 599630 - DNA, 53 bp, Artificial; identical to SEQ ID NO: 449535
  Synthetic oligonucleotide

SEQ ID NO: 599631 - DNA, 60 bp, Artificial; identical to SEQ ID NO: 449536
  Synthetic oligonucleotide

SEQ ID NO: 599632 - DNA, 60 bp, Artificial; identical to SEQ ID NO: 449541
  Synthetic oligonucleotide

SEQ ID NO: 599633 - DNA, 57 bp, Artificial; identical to SEQ ID NO: 449543
  Synthetic oligonucleotide

SEQ ID NO: 599634 - DNA, 58 bp, Artificial; identical to SEQ ID NO: 449545
  Synthetic oligonucleotide

SEQ ID NO: 599635 - DNA, 60 bp, Artificial; identical to SEQ ID NO: 449547
  Synthetic oligonucleotide

SEQ ID NO: 599636 - DNA, 60 bp, Artificial; identical to SEQ ID NO: 449548
  Synthetic oligonucleotide

SEQ ID NO: 599637 - DNA, 60 bp, Artificial; identical to SEQ ID NO: 449549
  Synthetic oligonucleotide

SEQ ID NO: 599638 - DNA, 55 bp, Artificial; identical to SEQ ID NO: 449551
  Synthetic oligonucleotide

SEQ ID NO: 599639 - DNA, 53 bp, Artificial; identical to SEQ ID NO: 449552
  Synthetic oligonucleotide

SEQ ID NO: 599640 - DNA, 51 bp, Artificial; identical to SEQ ID NO: 7989
  Synthetic oligonucleotide

SEQ ID NO: 599641 - DNA, 58 bp, Artificial; identical to SEQ ID NO: 449555
  Synthetic oligonucleotide

SEQ ID NO: 599642 - DNA, 58 bp, Artificial; identical to SEQ ID NO: 449560
  Synthetic oligonucleotide

SEQ ID NO: 599643 - DNA, 52 bp, Artificial; identical to SEQ ID NO: 449564
  Synthetic oligonucleotide

SEQ ID NO: 599644 - DNA, 55 bp, Artificial; identical to SEQ ID NO: 449565
  Synthetic oligonucleotide

SEQ ID NO: 599645 - DNA, 54 bp, Artificial; identical to SEQ ID NO: 449569
  Synthetic oligonucleotide

SEQ ID NO: 599646 - DNA, 60 bp, Artificial; identical to SEQ ID NO: 449571
  Synthetic oligonucleotide

SEQ ID NO: 599647 - DNA, 60 bp, Artificial; identical to SEQ ID NO: 449572
  Synthetic oligonucleotide

SEQ ID NO: 599648 - DNA, 55 bp, Artificial; identical to SEQ ID NO: 449574
  Synthetic oligonucleotide

SEQ ID NO: 599649 - DNA, 58 bp, Artificial; identical to SEQ ID NO: 449577
  Synthetic oligonucleotide

SEQ ID NO: 599650 - DNA, 55 bp, Artificial; identical to SEQ ID NO: 449587
  Synthetic oligonucleotide

SEQ ID NO: 599651 - DNA, 57 bp, Artificial; identical to SEQ ID NO: 449590
  Synthetic oligonucleotide

SEQ ID NO: 599652 - DNA, 55 bp, Artificial; identical to SEQ ID NO: 449592
  Synthetic oligonucleotide

SEQ ID NO: 599653 - DNA, 58 bp, Artificial; identical to SEQ ID NO: 449595
  Synthetic oligonucleotide

SEQ ID NO: 599654 - DNA, 57 bp, Artificial; identical to SEQ ID NO: 449596
  Synthetic oligonucleotide

SEQ ID NO: 599655 - DNA, 53 bp, Artificial; identical to SEQ ID NO: 449597
  Synthetic oligonucleotide

SEQ ID NO: 599656 - DNA, 59 bp, Artificial; identical to SEQ ID NO: 449601
  Synthetic oligonucleotide

SEQ ID NO: 599657 - DNA, 51 bp, Artificial; identical to SEQ ID NO: 449602
  Synthetic oligonucleotide

SEQ ID NO: 599658 - DNA, 58 bp, Artificial; identical to SEQ ID NO: 449603
  Synthetic oligonucleotide

SEQ ID NO: 599659 - DNA, 60 bp, Artificial; identical to SEQ ID NO: 449609
  Synthetic oligonucleotide

SEQ ID NO: 599660 - DNA, 60 bp, Artificial; identical to SEQ ID NO: 449610
  Synthetic oligonucleotide

SEQ ID NO: 599661 - DNA, 52 bp, Artificial; identical to SEQ ID NO: 15652
  Synthetic oligonucleotide

SEQ ID NO: 599662 - DNA, 53 bp, Artificial; identical to SEQ ID NO: 449612
  Synthetic oligonucleotide

SEQ ID NO: 599663 - DNA, 60 bp, Artificial; identical to SEQ ID NO: 449613
  Synthetic oligonucleotide

SEQ ID NO: 599664 - DNA, 60 bp, Artificial; identical to SEQ ID NO: 449617
  Synthetic oligonucleotide

SEQ ID NO: 599665 - DNA, 53 bp, Artificial; identical to SEQ ID NO: 449624
  Synthetic oligonucleotide

SEQ ID NO: 599666 - DNA, 60 bp, Artificial; identical to SEQ ID NO: 449626
  Synthetic oligonucleotide

SEQ ID NO: 599667 - DNA, 59 bp, Artificial; identical to SEQ ID NO: 18926
  Synthetic oligonucleotide

SEQ ID NO: 599668 - DNA, 53 bp, Artificial; identical to SEQ ID NO: 449629
  Synthetic oligonucleotide

SEQ ID NO: 599669 - DNA, 51 bp, Artificial; identical to SEQ ID NO: 449633
  Synthetic oligonucleotide

SEQ ID NO: 599670 - DNA, 52 bp, Artificial; identical to SEQ ID NO: 449634
  Synthetic oligonucleotide

SEQ ID NO: 599671 - DNA, 50 bp, Artificial; identical to SEQ ID NO: 449635
  Synthetic oligonucleotide

SEQ ID NO: 599672 - DNA, 60 bp, Artificial; identical to SEQ ID NO: 13964
  Synthetic oligonucleotide

SEQ ID NO: 599673 - DNA, 54 bp, Artificial; identical to SEQ ID NO: 449640
  Synthetic oligonucleotide

SEQ ID NO: 599674 - DNA, 49 bp, Artificial; identical to SEQ ID NO: 449641
  Synthetic oligonucleotide

SEQ ID NO: 599675 - DNA, 50 bp, Artificial; identical to SEQ ID NO: 449644
  Synthetic oligonucleotide

SEQ ID NO: 599676 - DNA, 60 bp, Artificial; identical to SEQ ID NO: 449650
  Synthetic oligonucleotide

SEQ ID NO: 599677 - DNA, 59 bp, Artificial; identical to SEQ ID NO: 449652
  Synthetic oligonucleotide

SEQ ID NO: 599678 - DNA, 54 bp, Artificial; identical to SEQ ID NO: 449653
  Synthetic oligonucleotide

SEQ ID NO: 599679 - DNA, 57 bp, Artificial; identical to SEQ ID NO: 449655
  Synthetic oligonucleotide

SEQ ID NO: 599680 - DNA, 60 bp, Artificial; identical to SEQ ID NO: 449657
  Synthetic oligonucleotide

SEQ ID NO: 599681 - DNA, 55 bp, Artificial; identical to SEQ ID NO: 11396
  Synthetic oligonucleotide

SEQ ID NO: 599682 - DNA, 55 bp, Artificial; identical to SEQ ID NO: 449660
  Synthetic oligonucleotide

SEQ ID NO: 599683 - DNA, 55 bp, Artificial; identical to SEQ ID NO: 449663
  Synthetic oligonucleotide

SEQ ID NO: 599684 - DNA, 57 bp, Artificial; identical to SEQ ID NO: 449664
  Synthetic oligonucleotide

SEQ ID NO: 599685 - DNA, 53 bp, Artificial; identical to SEQ ID NO: 449666
  Synthetic oligonucleotide

SEQ ID NO: 599686 - DNA, 60 bp, Artificial; identical to SEQ ID NO: 449670
  Synthetic oligonucleotide

SEQ ID NO: 599687 - DNA, 52 bp, Artificial; identical to SEQ ID NO: 449679
  Synthetic oligonucleotide

SEQ ID NO: 599688 - DNA, 55 bp, Artificial; identical to SEQ ID NO: 449680
  Synthetic oligonucleotide

SEQ ID NO: 599689 - DNA, 56 bp, Artificial; identical to SEQ ID NO: 449683
  Synthetic oligonucleotide

SEQ ID NO: 599690 - DNA, 55 bp, Artificial; identical to SEQ ID NO: 449692
  Synthetic oligonucleotide

SEQ ID NO: 599691 - DNA, 53 bp, Artificial; identical to SEQ ID NO: 449693
  Synthetic oligonucleotide

SEQ ID NO: 599692 - DNA, 60 bp, Artificial; identical to SEQ ID NO: 10476
  Synthetic oligonucleotide

SEQ ID NO: 599693 - DNA, 52 bp, Artificial; identical to SEQ ID NO: 449694
  Synthetic oligonucleotide

SEQ ID NO: 599694 - DNA, 53 bp, Artificial; identical to SEQ ID NO: 449701
  Synthetic oligonucleotide

SEQ ID NO: 599695 - DNA, 56 bp, Artificial; identical to SEQ ID NO: 449702
  Synthetic oligonucleotide

SEQ ID NO: 599696 - DNA, 51 bp, Artificial; identical to SEQ ID NO: 449704
  Synthetic oligonucleotide

SEQ ID NO: 599697 - DNA, 58 bp, Artificial; identical to SEQ ID NO: 449705
  Synthetic oligonucleotide

SEQ ID NO: 599698 - DNA, 54 bp, Artificial; identical to SEQ ID NO: 449707
  Synthetic oligonucleotide

SEQ ID NO: 599699 - DNA, 55 bp, Artificial; identical to SEQ ID NO: 449712
  Synthetic oligonucleotide

SEQ ID NO: 599700 - DNA, 54 bp, Artificial; identical to SEQ ID NO: 449713
  Synthetic oligonucleotide

SEQ ID NO: 599701 - DNA, 60 bp, Artificial; identical to SEQ ID NO: 10844
  Synthetic oligonucleotide

SEQ ID NO: 599702 - DNA, 60 bp, Artificial; identical to SEQ ID NO: 449718
  Synthetic oligonucleotide

SEQ ID NO: 599703 - DNA, 57 bp, Artificial; identical to SEQ ID NO: 449719
  Synthetic oligonucleotide

SEQ ID NO: 599704 - DNA, 52 bp, Artificial; identical to SEQ ID NO: 449725
  Synthetic oligonucleotide

SEQ ID NO: 599705 - DNA, 60 bp, Artificial; identical to SEQ ID NO: 11414
  Synthetic oligonucleotide

SEQ ID NO: 599706 - DNA, 57 bp, Artificial; identical to SEQ ID NO: 449733
  Synthetic oligonucleotide

SEQ ID NO: 599707 - DNA, 52 bp, Artificial; identical to SEQ ID NO: 449734
  Synthetic oligonucleotide

SEQ ID NO: 599708 - DNA, 60 bp, Artificial; identical to SEQ ID NO: 449735
  Synthetic oligonucleotide

SEQ ID NO: 599709 - DNA, 58 bp, Artificial; identical to SEQ ID NO: 449736
  Synthetic oligonucleotide

SEQ ID NO: 599710 - DNA, 54 bp, Artificial; identical to SEQ ID NO: 449739
  Synthetic oligonucleotide

SEQ ID NO: 599711 - DNA, 57 bp, Artificial; identical to SEQ ID NO: 449740
  Synthetic oligonucleotide

SEQ ID NO: 599712 - DNA, 54 bp, Artificial; identical to SEQ ID NO: 449746
  Synthetic oligonucleotide

SEQ ID NO: 599713 - DNA, 60 bp, Artificial; identical to SEQ ID NO: 449749
  Synthetic oligonucleotide

SEQ ID NO: 599714 - DNA, 55 bp, Artificial; identical to SEQ ID NO: 449750
  Synthetic oligonucleotide

SEQ ID NO: 599715 - DNA, 60 bp, Artificial; identical to SEQ ID NO: 449753
  Synthetic oligonucleotide

SEQ ID NO: 599716 - DNA, 55 bp, Artificial; identical to SEQ ID NO: 449754
  Synthetic oligonucleotide

SEQ ID NO: 599717 - DNA, 55 bp, Artificial; identical to SEQ ID NO: 449762
  Synthetic oligonucleotide

SEQ ID NO: 599718 - DNA, 58 bp, Artificial; identical to SEQ ID NO: 449765
  Synthetic oligonucleotide

SEQ ID NO: 599719 - DNA, 52 bp, Artificial; identical to SEQ ID NO: 449766
  Synthetic oligonucleotide

SEQ ID NO: 599720 - DNA, 55 bp, Artificial; identical to SEQ ID NO: 449767
  Synthetic oligonucleotide

SEQ ID NO: 599721 - DNA, 55 bp, Artificial; identical to SEQ ID NO: 449769
  Synthetic oligonucleotide

SEQ ID NO: 599722 - DNA, 58 bp, Artificial; identical to SEQ ID NO: 449770
  Synthetic oligonucleotide

SEQ ID NO: 599723 - DNA, 55 bp, Artificial; identical to SEQ ID NO: 449771
  Synthetic oligonucleotide

SEQ ID NO: 599724 - DNA, 60 bp, Artificial; identical to SEQ ID NO: 449774
  Synthetic oligonucleotide

SEQ ID NO: 599725 - DNA, 58 bp, Artificial; identical to SEQ ID NO: 16503
  Synthetic oligonucleotide

SEQ ID NO: 599726 - DNA, 60 bp, Artificial; identical to SEQ ID NO: 449779
  Synthetic oligonucleotide

SEQ ID NO: 599727 - DNA, 60 bp, Artificial; identical to SEQ ID NO: 449781
  Synthetic oligonucleotide

SEQ ID NO: 599728 - DNA, 56 bp, Artificial; identical to SEQ ID NO: 449782
  Synthetic oligonucleotide

SEQ ID NO: 599729 - DNA, 53 bp, Artificial; identical to SEQ ID NO: 449784
  Synthetic oligonucleotide

SEQ ID NO: 599730 - DNA, 55 bp, Artificial; identical to SEQ ID NO: 449785
  Synthetic oligonucleotide

SEQ ID NO: 599731 - DNA, 57 bp, Artificial; identical to SEQ ID NO: 18687
  Synthetic oligonucleotide

SEQ ID NO: 599732 - DNA, 55 bp, Artificial; identical to SEQ ID NO: 449789
  Synthetic oligonucleotide

SEQ ID NO: 599733 - DNA, 53 bp, Artificial; identical to SEQ ID NO: 449790
  Synthetic oligonucleotide

SEQ ID NO: 599734 - DNA, 57 bp, Artificial; identical to SEQ ID NO: 449791
  Synthetic oligonucleotide

SEQ ID NO: 599735 - DNA, 55 bp, Artificial; identical to SEQ ID NO: 449793
  Synthetic oligonucleotide

SEQ ID NO: 599736 - DNA, 60 bp, Artificial; identical to SEQ ID NO: 449796
  Synthetic oligonucleotide

SEQ ID NO: 599737 - DNA, 50 bp, Artificial; identical to SEQ ID NO: 449797
  Synthetic oligonucleotide

SEQ ID NO: 599738 - DNA, 60 bp, Artificial; identical to SEQ ID NO: 449798
  Synthetic oligonucleotide

SEQ ID NO: 599739 - DNA, 58 bp, Artificial; identical to SEQ ID NO: 449799
  Synthetic oligonucleotide

SEQ ID NO: 599740 - DNA, 58 bp, Artificial; identical to SEQ ID NO: 19821
  Synthetic oligonucleotide

SEQ ID NO: 599741 - DNA, 60 bp, Artificial; identical to SEQ ID NO: 449803
  Synthetic oligonucleotide

SEQ ID NO: 599742 - DNA, 55 bp, Artificial; identical to SEQ ID NO: 449808
  Synthetic oligonucleotide

SEQ ID NO: 599743 - DNA, 58 bp, Artificial; identical to SEQ ID NO: 449809
  Synthetic oligonucleotide

SEQ ID NO: 599744 - DNA, 52 bp, Artificial; identical to SEQ ID NO: 449810
  Synthetic oligonucleotide

SEQ ID NO: 599745 - DNA, 60 bp, Artificial; identical to SEQ ID NO: 449813
  Synthetic oligonucleotide

SEQ ID NO: 599746 - DNA, 55 bp, Artificial; identical to SEQ ID NO: 449815
  Synthetic oligonucleotide

SEQ ID NO: 599747 - DNA, 60 bp, Artificial; identical to SEQ ID NO: 449821
  Synthetic oligonucleotide

SEQ ID NO: 599748 - DNA, 52 bp, Artificial; identical to SEQ ID NO: 449822
  Synthetic oligonucleotide

SEQ ID NO: 599749 - DNA, 54 bp, Artificial; identical to SEQ ID NO: 449828
  Synthetic oligonucleotide

SEQ ID NO: 599750 - DNA, 56 bp, Artificial; identical to SEQ ID NO: 20396
  Synthetic oligonucleotide

SEQ ID NO: 599751 - DNA, 58 bp, Artificial; identical to SEQ ID NO: 17026
  Synthetic oligonucleotide

SEQ ID NO: 599752 - DNA, 54 bp, Artificial; identical to SEQ ID NO: 449833
  Synthetic oligonucleotide

SEQ ID NO: 599753 - DNA, 59 bp, Artificial; identical to SEQ ID NO: 8103
  Synthetic oligonucleotide

SEQ ID NO: 599754 - DNA, 55 bp, Artificial; identical to SEQ ID NO: 449841
  Synthetic oligonucleotide

SEQ ID NO: 599755 - DNA, 55 bp, Artificial; identical to SEQ ID NO: 449842
  Synthetic oligonucleotide

SEQ ID NO: 599756 - DNA, 54 bp, Artificial; identical to SEQ ID NO: 449843
  Synthetic oligonucleotide

SEQ ID NO: 599757 - DNA, 56 bp, Artificial; identical to SEQ ID NO: 449846
  Synthetic oligonucleotide

SEQ ID NO: 599758 - DNA, 51 bp, Artificial; identical to SEQ ID NO: 449848
  Synthetic oligonucleotide

SEQ ID NO: 599759 - DNA, 52 bp, Artificial; identical to SEQ ID NO: 449850
  Synthetic oligonucleotide

SEQ ID NO: 599760 - DNA, 56 bp, Artificial; identical to SEQ ID NO: 17524
  Synthetic oligonucleotide

SEQ ID NO: 599761 - DNA, 56 bp, Artificial; identical to SEQ ID NO: 449856
  Synthetic oligonucleotide

SEQ ID NO: 599762 - DNA, 55 bp, Artificial; identical to SEQ ID NO: 449859
  Synthetic oligonucleotide

SEQ ID NO: 599763 - DNA, 55 bp, Artificial; identical to SEQ ID NO: 449860
  Synthetic oligonucleotide

SEQ ID NO: 599764 - DNA, 59 bp, Artificial; identical to SEQ ID NO: 449862
  Synthetic oligonucleotide

SEQ ID NO: 599765 - DNA, 53 bp, Artificial; identical to SEQ ID NO: 449864
  Synthetic oligonucleotide

SEQ ID NO: 599766 - DNA, 55 bp, Artificial; identical to SEQ ID NO: 449871
  Synthetic oligonucleotide

SEQ ID NO: 599767 - DNA, 57 bp, Artificial; identical to SEQ ID NO: 449873
  Synthetic oligonucleotide

SEQ ID NO: 599768 - DNA, 58 bp, Artificial; identical to SEQ ID NO: 449875
  Synthetic oligonucleotide

SEQ ID NO: 599769 - DNA, 54 bp, Artificial; identical to SEQ ID NO: 12070
  Synthetic oligonucleotide

SEQ ID NO: 599770 - DNA, 59 bp, Artificial; identical to SEQ ID NO: 20072
  Synthetic oligonucleotide

SEQ ID NO: 599771 - DNA, 54 bp, Artificial; identical to SEQ ID NO: 449882
  Synthetic oligonucleotide

SEQ ID NO: 599772 - DNA, 60 bp, Artificial; identical to SEQ ID NO: 449883
  Synthetic oligonucleotide

SEQ ID NO: 599773 - DNA, 54 bp, Artificial; identical to SEQ ID NO: 449885
  Synthetic oligonucleotide

SEQ ID NO: 599774 - DNA, 54 bp, Artificial; identical to SEQ ID NO: 449886
  Synthetic oligonucleotide

SEQ ID NO: 599775 - DNA, 60 bp, Artificial; identical to SEQ ID NO: 449887
  Synthetic oligonucleotide

SEQ ID NO: 599776 - DNA, 60 bp, Artificial; identical to SEQ ID NO: 449888
  Synthetic oligonucleotide

SEQ ID NO: 599777 - DNA, 51 bp, Artificial; identical to SEQ ID NO: 449889
  Synthetic oligonucleotide

SEQ ID NO: 599778 - DNA, 50 bp, Artificial; identical to SEQ ID NO: 449890
  Synthetic oligonucleotide

SEQ ID NO: 599779 - DNA, 60 bp, Artificial; identical to SEQ ID NO: 449892
  Synthetic oligonucleotide

SEQ ID NO: 599780 - DNA, 60 bp, Artificial; identical to SEQ ID NO: 449895
  Synthetic oligonucleotide

SEQ ID NO: 599781 - DNA, 58 bp, Artificial; identical to SEQ ID NO: 449896
  Synthetic oligonucleotide

SEQ ID NO: 599782 - DNA, 55 bp, Artificial; identical to SEQ ID NO: 449897
  Synthetic oligonucleotide

SEQ ID NO: 599783 - DNA, 55 bp, Artificial; identical to SEQ ID NO: 449898
  Synthetic oligonucleotide

SEQ ID NO: 599784 - DNA, 59 bp, Artificial; identical to SEQ ID NO: 449900
  Synthetic oligonucleotide

SEQ ID NO: 599785 - DNA, 52 bp, Artificial; identical to SEQ ID NO: 449901
  Synthetic oligonucleotide

SEQ ID NO: 599786 - DNA, 60 bp, Artificial; identical to SEQ ID NO: 449902
  Synthetic oligonucleotide

SEQ ID NO: 599787 - DNA, 60 bp, Artificial; identical to SEQ ID NO: 449903
  Synthetic oligonucleotide

SEQ ID NO: 599788 - DNA, 57 bp, Artificial; identical to SEQ ID NO: 449904
  Synthetic oligonucleotide

SEQ ID NO: 599789 - DNA, 58 bp, Artificial; identical to SEQ ID NO: 449905
  Synthetic oligonucleotide

SEQ ID NO: 599790 - DNA, 55 bp, Artificial; identical to SEQ ID NO: 449907
  Synthetic oligonucleotide

SEQ ID NO: 599791 - DNA, 60 bp, Artificial; identical to SEQ ID NO: 449908
  Synthetic oligonucleotide

SEQ ID NO: 599792 - DNA, 60 bp, Artificial; identical to SEQ ID NO: 449911
  Synthetic oligonucleotide

SEQ ID NO: 599793 - DNA, 56 bp, Artificial; identical to SEQ ID NO: 449912
  Synthetic oligonucleotide

SEQ ID NO: 599794 - DNA, 60 bp, Artificial; identical to SEQ ID NO: 449913
  Synthetic oligonucleotide

SEQ ID NO: 599795 - DNA, 52 bp, Artificial; identical to SEQ ID NO: 449916
  Synthetic oligonucleotide

SEQ ID NO: 599796 - DNA, 56 bp, Artificial; identical to SEQ ID NO: 449919
  Synthetic oligonucleotide

SEQ ID NO: 599797 - DNA, 59 bp, Artificial; identical to SEQ ID NO: 16288
  Synthetic oligonucleotide

SEQ ID NO: 599798 - DNA, 55 bp, Artificial; identical to SEQ ID NO: 449929
  Synthetic oligonucleotide

SEQ ID NO: 599799 - DNA, 57 bp, Artificial; identical to SEQ ID NO: 449935
  Synthetic oligonucleotide

SEQ ID NO: 599800 - DNA, 58 bp, Artificial; identical to SEQ ID NO: 449936
  Synthetic oligonucleotide

SEQ ID NO: 599801 - DNA, 52 bp, Artificial; identical to SEQ ID NO: 449938
  Synthetic oligonucleotide

SEQ ID NO: 599802 - DNA, 59 bp, Artificial; identical to SEQ ID NO: 449940
  Synthetic oligonucleotide

SEQ ID NO: 599803 - DNA, 60 bp, Artificial; identical to SEQ ID NO: 449943
  Synthetic oligonucleotide

SEQ ID NO: 599804 - DNA, 56 bp, Artificial; identical to SEQ ID NO: 449947
  Synthetic oligonucleotide

SEQ ID NO: 599805 - DNA, 55 bp, Artificial; identical to SEQ ID NO: 449955
  Synthetic oligonucleotide

SEQ ID NO: 599806 - DNA, 59 bp, Artificial; identical to SEQ ID NO: 449956
  Synthetic oligonucleotide

SEQ ID NO: 599807 - DNA, 58 bp, Artificial; identical to SEQ ID NO: 449962
  Synthetic oligonucleotide

SEQ ID NO: 599808 - DNA, 57 bp, Artificial; identical to SEQ ID NO: 449963
  Synthetic oligonucleotide

SEQ ID NO: 599809 - DNA, 59 bp, Artificial; identical to SEQ ID NO: 449964
  Synthetic oligonucleotide

SEQ ID NO: 599810 - DNA, 55 bp, Artificial; identical to SEQ ID NO: 449970
  Synthetic oligonucleotide

SEQ ID NO: 599811 - DNA, 51 bp, Artificial; identical to SEQ ID NO: 449971
  Synthetic oligonucleotide

SEQ ID NO: 599812 - DNA, 60 bp, Artificial; identical to SEQ ID NO: 449972
  Synthetic oligonucleotide

SEQ ID NO: 599813 - DNA, 60 bp, Artificial; identical to SEQ ID NO: 449973
  Synthetic oligonucleotide

SEQ ID NO: 599814 - DNA, 56 bp, Artificial; identical to SEQ ID NO: 449975
  Synthetic oligonucleotide

SEQ ID NO: 599815 - DNA, 55 bp, Artificial; identical to SEQ ID NO: 449979
  Synthetic oligonucleotide

SEQ ID NO: 599816 - DNA, 60 bp, Artificial; identical to SEQ ID NO: 449981
  Synthetic oligonucleotide

SEQ ID NO: 599817 - DNA, 50 bp, Artificial; identical to SEQ ID NO: 449983
  Synthetic oligonucleotide

SEQ ID NO: 599818 - DNA, 55 bp, Artificial; identical to SEQ ID NO: 449985
  Synthetic oligonucleotide

SEQ ID NO: 599819 - DNA, 57 bp, Artificial; identical to SEQ ID NO: 449986
  Synthetic oligonucleotide

SEQ ID NO: 599820 - DNA, 59 bp, Artificial; identical to SEQ ID NO: 449994
  Synthetic oligonucleotide

SEQ ID NO: 599821 - DNA, 56 bp, Artificial; identical to SEQ ID NO: 449995
  Synthetic oligonucleotide

SEQ ID NO: 599822 - DNA, 52 bp, Artificial; identical to SEQ ID NO: 449996
  Synthetic oligonucleotide

SEQ ID NO: 599823 - DNA, 58 bp, Artificial; identical to SEQ ID NO: 449998
  Synthetic oligonucleotide

SEQ ID NO: 599824 - DNA, 52 bp, Artificial; identical to SEQ ID NO: 450006
  Synthetic oligonucleotide

SEQ ID NO: 599825 - DNA, 56 bp, Artificial; identical to SEQ ID NO: 450010
  Synthetic oligonucleotide

SEQ ID NO: 599826 - DNA, 58 bp, Artificial; identical to SEQ ID NO: 450012
  Synthetic oligonucleotide

SEQ ID NO: 599827 - DNA, 59 bp, Artificial; identical to SEQ ID NO: 450013
  Synthetic oligonucleotide

SEQ ID NO: 599828 - DNA, 51 bp, Artificial; identical to SEQ ID NO: 450015
  Synthetic oligonucleotide

SEQ ID NO: 599829 - DNA, 60 bp, Artificial; identical to SEQ ID NO: 450018
  Synthetic oligonucleotide

SEQ ID NO: 599830 - DNA, 60 bp, Artificial; identical to SEQ ID NO: 450025
  Synthetic oligonucleotide

SEQ ID NO: 599831 - DNA, 60 bp, Artificial; identical to SEQ ID NO: 450029
  Synthetic oligonucleotide

SEQ ID NO: 599832 - DNA, 52 bp, Artificial; identical to SEQ ID NO: 450032
  Synthetic oligonucleotide

SEQ ID NO: 599833 - DNA, 60 bp, Artificial; identical to SEQ ID NO: 450035
  Synthetic oligonucleotide

SEQ ID NO: 599834 - DNA, 55 bp, Artificial; identical to SEQ ID NO: 450040
  Synthetic oligonucleotide

SEQ ID NO: 599835 - DNA, 59 bp, Artificial; identical to SEQ ID NO: 450042
  Synthetic oligonucleotide

SEQ ID NO: 599836 - DNA, 56 bp, Artificial; identical to SEQ ID NO: 450048
  Synthetic oligonucleotide

SEQ ID NO: 599837 - DNA, 60 bp, Artificial; identical to SEQ ID NO: 450049
  Synthetic oligonucleotide

SEQ ID NO: 599838 - DNA, 56 bp, Artificial; identical to SEQ ID NO: 450051
  Synthetic oligonucleotide

SEQ ID NO: 599839 - DNA, 55 bp, Artificial; identical to SEQ ID NO: 450055
  Synthetic oligonucleotide

SEQ ID NO: 599840 - DNA, 60 bp, Artificial; identical to SEQ ID NO: 9845
  Synthetic oligonucleotide

SEQ ID NO: 599841 - DNA, 56 bp, Artificial; identical to SEQ ID NO: 14413
  Synthetic oligonucleotide

SEQ ID NO: 599842 - DNA, 55 bp, Artificial; identical to SEQ ID NO: 450061
  Synthetic oligonucleotide

SEQ ID NO: 599843 - DNA, 60 bp, Artificial; identical to SEQ ID NO: 450067
  Synthetic oligonucleotide

SEQ ID NO: 599844 - DNA, 50 bp, Artificial; identical to SEQ ID NO: 450068
  Synthetic oligonucleotide

SEQ ID NO: 599845 - DNA, 55 bp, Artificial; identical to SEQ ID NO: 450073
  Synthetic oligonucleotide

SEQ ID NO: 599846 - DNA, 55 bp, Artificial; identical to SEQ ID NO: 450074
  Synthetic oligonucleotide

SEQ ID NO: 599847 - DNA, 56 bp, Artificial; identical to SEQ ID NO: 450075
  Synthetic oligonucleotide

SEQ ID NO: 599848 - DNA, 57 bp, Artificial; identical to SEQ ID NO: 450076
  Synthetic oligonucleotide

SEQ ID NO: 599849 - DNA, 60 bp, Artificial; identical to SEQ ID NO: 450077
  Synthetic oligonucleotide

SEQ ID NO: 599850 - DNA, 57 bp, Artificial; identical to SEQ ID NO: 450081
  Synthetic oligonucleotide

SEQ ID NO: 599851 - DNA, 54 bp, Artificial; identical to SEQ ID NO: 450082
  Synthetic oligonucleotide

SEQ ID NO: 599852 - DNA, 57 bp, Artificial; identical to SEQ ID NO: 450086
  Synthetic oligonucleotide

SEQ ID NO: 599853 - DNA, 53 bp, Artificial; identical to SEQ ID NO: 450087
  Synthetic oligonucleotide

SEQ ID NO: 599854 - DNA, 59 bp, Artificial; identical to SEQ ID NO: 450088
  Synthetic oligonucleotide

SEQ ID NO: 599855 - DNA, 55 bp, Artificial; identical to SEQ ID NO: 450089
  Synthetic oligonucleotide

SEQ ID NO: 599856 - DNA, 54 bp, Artificial; identical to SEQ ID NO: 450093
  Synthetic oligonucleotide

SEQ ID NO: 599857 - DNA, 58 bp, Artificial; identical to SEQ ID NO: 450095
  Synthetic oligonucleotide

SEQ ID NO: 599858 - DNA, 50 bp, Artificial; identical to SEQ ID NO: 450101
  Synthetic oligonucleotide

SEQ ID NO: 599859 - DNA, 60 bp, Artificial; identical to SEQ ID NO: 14519
  Synthetic oligonucleotide

SEQ ID NO: 599860 - DNA, 60 bp, Artificial; identical to SEQ ID NO: 450102
  Synthetic oligonucleotide

SEQ ID NO: 599861 - DNA, 57 bp, Artificial; identical to SEQ ID NO: 450103
  Synthetic oligonucleotide

SEQ ID NO: 599862 - DNA, 60 bp, Artificial; identical to SEQ ID NO: 450104
  Synthetic oligonucleotide

SEQ ID NO: 599863 - DNA, 59 bp, Artificial; identical to SEQ ID NO: 450109
  Synthetic oligonucleotide

SEQ ID NO: 599864 - DNA, 59 bp, Artificial; identical to SEQ ID NO: 450116
  Synthetic oligonucleotide

SEQ ID NO: 599865 - DNA, 56 bp, Artificial; identical to SEQ ID NO: 450120
  Synthetic oligonucleotide

SEQ ID NO: 599866 - DNA, 57 bp, Artificial; identical to SEQ ID NO: 450122
  Synthetic oligonucleotide

SEQ ID NO: 599867 - DNA, 54 bp, Artificial; identical to SEQ ID NO: 450124
  Synthetic oligonucleotide

SEQ ID NO: 599868 - DNA, 60 bp, Artificial; identical to SEQ ID NO: 450128
  Synthetic oligonucleotide

SEQ ID NO: 599869 - DNA, 55 bp, Artificial; identical to SEQ ID NO: 450134
  Synthetic oligonucleotide

SEQ ID NO: 599870 - DNA, 55 bp, Artificial; identical to SEQ ID NO: 450136
  Synthetic oligonucleotide

SEQ ID NO: 599871 - DNA, 55 bp, Artificial; identical to SEQ ID NO: 450140
  Synthetic oligonucleotide

SEQ ID NO: 599872 - DNA, 50 bp, Artificial; identical to SEQ ID NO: 16004
  Synthetic oligonucleotide

SEQ ID NO: 599873 - DNA, 56 bp, Artificial; identical to SEQ ID NO: 450141
  Synthetic oligonucleotide

SEQ ID NO: 599874 - DNA, 59 bp, Artificial; identical to SEQ ID NO: 450144
  Synthetic oligonucleotide

SEQ ID NO: 599875 - DNA, 60 bp, Artificial; identical to SEQ ID NO: 450145
  Synthetic oligonucleotide

SEQ ID NO: 599876 - DNA, 57 bp, Artificial; identical to SEQ ID NO: 19514
  Synthetic oligonucleotide

SEQ ID NO: 599877 - DNA, 55 bp, Artificial; identical to SEQ ID NO: 450147
  Synthetic oligonucleotide

SEQ ID NO: 599878 - DNA, 60 bp, Artificial; identical to SEQ ID NO: 450149
  Synthetic oligonucleotide

SEQ ID NO: 599879 - DNA, 59 bp, Artificial; identical to SEQ ID NO: 450152
  Synthetic oligonucleotide

SEQ ID NO: 599880 - DNA, 58 bp, Artificial; identical to SEQ ID NO: 450153
  Synthetic oligonucleotide

SEQ ID NO: 599881 - DNA, 60 bp, Artificial; identical to SEQ ID NO: 10851
  Synthetic oligonucleotide

SEQ ID NO: 599882 - DNA, 57 bp, Artificial; identical to SEQ ID NO: 450162
  Synthetic oligonucleotide

SEQ ID NO: 599883 - DNA, 51 bp, Artificial; identical to SEQ ID NO: 450164
  Synthetic oligonucleotide

SEQ ID NO: 599884 - DNA, 53 bp, Artificial; identical to SEQ ID NO: 450172
  Synthetic oligonucleotide

SEQ ID NO: 599885 - DNA, 55 bp, Artificial; identical to SEQ ID NO: 450173
  Synthetic oligonucleotide

SEQ ID NO: 599886 - DNA, 58 bp, Artificial; identical to SEQ ID NO: 450176
  Synthetic oligonucleotide

SEQ ID NO: 599887 - DNA, 55 bp, Artificial; identical to SEQ ID NO: 450182
  Synthetic oligonucleotide

SEQ ID NO: 599888 - DNA, 53 bp, Artificial; identical to SEQ ID NO: 450183
  Synthetic oligonucleotide

SEQ ID NO: 599889 - DNA, 55 bp, Artificial; identical to SEQ ID NO: 450187
  Synthetic oligonucleotide

SEQ ID NO: 599890 - DNA, 57 bp, Artificial; identical to SEQ ID NO: 450190
  Synthetic oligonucleotide

SEQ ID NO: 599891 - DNA, 60 bp, Artificial; identical to SEQ ID NO: 450191
  Synthetic oligonucleotide

SEQ ID NO: 599892 - DNA, 59 bp, Artificial; identical to SEQ ID NO: 450194
  Synthetic oligonucleotide

SEQ ID NO: 599893 - DNA, 54 bp, Artificial; identical to SEQ ID NO: 450197
  Synthetic oligonucleotide

SEQ ID NO: 599894 - DNA, 59 bp, Artificial; identical to SEQ ID NO: 450201
  Synthetic oligonucleotide

SEQ ID NO: 599895 - DNA, 55 bp, Artificial; identical to SEQ ID NO: 450203
  Synthetic oligonucleotide

SEQ ID NO: 599896 - DNA, 57 bp, Artificial; identical to SEQ ID NO: 450205
  Synthetic oligonucleotide

SEQ ID NO: 599897 - DNA, 60 bp, Artificial; identical to SEQ ID NO: 450209
  Synthetic oligonucleotide

SEQ ID NO: 599898 - DNA, 60 bp, Artificial; identical to SEQ ID NO: 450210
  Synthetic oligonucleotide

SEQ ID NO: 599899 - DNA, 60 bp, Artificial; identical to SEQ ID NO: 450213
  Synthetic oligonucleotide

SEQ ID NO: 599900 - DNA, 55 bp, Artificial; identical to SEQ ID NO: 450215
  Synthetic oligonucleotide

SEQ ID NO: 599901 - DNA, 56 bp, Artificial; identical to SEQ ID NO: 16660
  Synthetic oligonucleotide

SEQ ID NO: 599902 - DNA, 50 bp, Artificial; identical to SEQ ID NO: 10006
  Synthetic oligonucleotide

SEQ ID NO: 599903 - DNA, 55 bp, Artificial; identical to SEQ ID NO: 450217
  Synthetic oligonucleotide

SEQ ID NO: 599904 - DNA, 60 bp, Artificial; identical to SEQ ID NO: 450220
  Synthetic oligonucleotide

SEQ ID NO: 599905 - DNA, 60 bp, Artificial; identical to SEQ ID NO: 450222
  Synthetic oligonucleotide

SEQ ID NO: 599906 - DNA, 59 bp, Artificial; identical to SEQ ID NO: 450224
  Synthetic oligonucleotide

SEQ ID NO: 599907 - DNA, 58 bp, Artificial; identical to SEQ ID NO: 450225
  Synthetic oligonucleotide

SEQ ID NO: 599908 - DNA, 60 bp, Artificial; identical to SEQ ID NO: 450226
  Synthetic oligonucleotide

SEQ ID NO: 599909 - DNA, 60 bp, Artificial; identical to SEQ ID NO: 450228
  Synthetic oligonucleotide

SEQ ID NO: 599910 - DNA, 57 bp, Artificial; identical to SEQ ID NO: 450229
  Synthetic oligonucleotide

SEQ ID NO: 599911 - DNA, 60 bp, Artificial; identical to SEQ ID NO: 450230
  Synthetic oligonucleotide

SEQ ID NO: 599912 - DNA, 60 bp, Artificial; identical to SEQ ID NO: 450232
  Synthetic oligonucleotide

SEQ ID NO: 599913 - DNA, 50 bp, Artificial; identical to SEQ ID NO: 450234
  Synthetic oligonucleotide

SEQ ID NO: 599914 - DNA, 60 bp, Artificial; identical to SEQ ID NO: 450235
  Synthetic oligonucleotide

SEQ ID NO: 599915 - DNA, 52 bp, Artificial; identical to SEQ ID NO: 450236
  Synthetic oligonucleotide

SEQ ID NO: 599916 - DNA, 58 bp, Artificial; identical to SEQ ID NO: 19505
  Synthetic oligonucleotide

SEQ ID NO: 599917 - DNA, 53 bp, Artificial; identical to SEQ ID NO: 450237
  Synthetic oligonucleotide

SEQ ID NO: 599918 - DNA, 60 bp, Artificial; identical to SEQ ID NO: 450240
  Synthetic oligonucleotide

SEQ ID NO: 599919 - DNA, 54 bp, Artificial; identical to SEQ ID NO: 450242
  Synthetic oligonucleotide

SEQ ID NO: 599920 - DNA, 56 bp, Artificial; identical to SEQ ID NO: 450245
  Synthetic oligonucleotide

SEQ ID NO: 599921 - DNA, 57 bp, Artificial; identical to SEQ ID NO: 450247
  Synthetic oligonucleotide

SEQ ID NO: 599922 - DNA, 50 bp, Artificial; identical to SEQ ID NO: 450248
  Synthetic oligonucleotide

SEQ ID NO: 599923 - DNA, 60 bp, Artificial; identical to SEQ ID NO: 450249
  Synthetic oligonucleotide

SEQ ID NO: 599924 - DNA, 59 bp, Artificial; identical to SEQ ID NO: 450251
  Synthetic oligonucleotide

SEQ ID NO: 599925 - DNA, 55 bp, Artificial; identical to SEQ ID NO: 450260
  Synthetic oligonucleotide

SEQ ID NO: 599926 - DNA, 58 bp, Artificial; identical to SEQ ID NO: 450261
  Synthetic oligonucleotide

SEQ ID NO: 599927 - DNA, 51 bp, Artificial; identical to SEQ ID NO: 450263
  Synthetic oligonucleotide

SEQ ID NO: 599928 - DNA, 59 bp, Artificial; identical to SEQ ID NO: 450265
  Synthetic oligonucleotide

SEQ ID NO: 599929 - DNA, 60 bp, Artificial; identical to SEQ ID NO: 450268
  Synthetic oligonucleotide

SEQ ID NO: 599930 - DNA, 57 bp, Artificial; identical to SEQ ID NO: 450272
  Synthetic oligonucleotide

SEQ ID NO: 599931 - DNA, 56 bp, Artificial; identical to SEQ ID NO: 450273
  Synthetic oligonucleotide

SEQ ID NO: 599932 - DNA, 59 bp, Artificial; identical to SEQ ID NO: 450277
  Synthetic oligonucleotide

SEQ ID NO: 599933 - DNA, 60 bp, Artificial; identical to SEQ ID NO: 10663
  Synthetic oligonucleotide

SEQ ID NO: 599934 - DNA, 59 bp, Artificial; identical to SEQ ID NO: 450282
  Synthetic oligonucleotide

SEQ ID NO: 599935 - DNA, 51 bp, Artificial; identical to SEQ ID NO: 450284
  Synthetic oligonucleotide

SEQ ID NO: 599936 - DNA, 60 bp, Artificial; identical to SEQ ID NO: 450286
  Synthetic oligonucleotide

SEQ ID NO: 599937 - DNA, 59 bp, Artificial; identical to SEQ ID NO: 450287
  Synthetic oligonucleotide

SEQ ID NO: 599938 - DNA, 50 bp, Artificial; identical to SEQ ID NO: 450288
  Synthetic oligonucleotide

SEQ ID NO: 599939 - DNA, 55 bp, Artificial; identical to SEQ ID NO: 450291
  Synthetic oligonucleotide

SEQ ID NO: 599940 - DNA, 60 bp, Artificial; identical to SEQ ID NO: 450292
  Synthetic oligonucleotide

SEQ ID NO: 599941 - DNA, 51 bp, Artificial; identical to SEQ ID NO: 450299
  Synthetic oligonucleotide

SEQ ID NO: 599942 - DNA, 57 bp, Artificial; identical to SEQ ID NO: 450302
  Synthetic oligonucleotide

SEQ ID NO: 599943 - DNA, 59 bp, Artificial; identical to SEQ ID NO: 450304
  Synthetic oligonucleotide

SEQ ID NO: 599944 - DNA, 50 bp, Artificial; identical to SEQ ID NO: 450307
  Synthetic oligonucleotide

SEQ ID NO: 599945 - DNA, 56 bp, Artificial; identical to SEQ ID NO: 450308
  Synthetic oligonucleotide

SEQ ID NO: 599946 - DNA, 52 bp, Artificial; identical to SEQ ID NO: 450311
  Synthetic oligonucleotide

SEQ ID NO: 599947 - DNA, 60 bp, Artificial; identical to SEQ ID NO: 450314
  Synthetic oligonucleotide

SEQ ID NO: 599948 - DNA, 58 bp, Artificial; identical to SEQ ID NO: 450316
  Synthetic oligonucleotide

SEQ ID NO: 599949 - DNA, 59 bp, Artificial; identical to SEQ ID NO: 450322
  Synthetic oligonucleotide

SEQ ID NO: 599950 - DNA, 57 bp, Artificial; identical to SEQ ID NO: 450323
  Synthetic oligonucleotide

SEQ ID NO: 599951 - DNA, 55 bp, Artificial; identical to SEQ ID NO: 450325
  Synthetic oligonucleotide

SEQ ID NO: 599952 - DNA, 59 bp, Artificial; identical to SEQ ID NO: 450330
  Synthetic oligonucleotide

SEQ ID NO: 599953 - DNA, 55 bp, Artificial; identical to SEQ ID NO: 450333
  Synthetic oligonucleotide

SEQ ID NO: 599954 - DNA, 55 bp, Artificial; identical to SEQ ID NO: 450335
  Synthetic oligonucleotide

SEQ ID NO: 599955 - DNA, 60 bp, Artificial; identical to SEQ ID NO: 450339
  Synthetic oligonucleotide

SEQ ID NO: 599956 - DNA, 60 bp, Artificial; identical to SEQ ID NO: 450340
  Synthetic oligonucleotide

SEQ ID NO: 599957 - DNA, 60 bp, Artificial; identical to SEQ ID NO: 450341
  Synthetic oligonucleotide

SEQ ID NO: 599958 - DNA, 51 bp, Artificial; identical to SEQ ID NO: 450343
  Synthetic oligonucleotide

SEQ ID NO: 599959 - DNA, 52 bp, Artificial; identical to SEQ ID NO: 450344
  Synthetic oligonucleotide

SEQ ID NO: 599960 - DNA, 52 bp, Artificial; identical to SEQ ID NO: 450348
  Synthetic oligonucleotide

SEQ ID NO: 599961 - DNA, 55 bp, Artificial; identical to SEQ ID NO: 450351
  Synthetic oligonucleotide

SEQ ID NO: 599962 - DNA, 60 bp, Artificial; identical to SEQ ID NO: 450353
  Synthetic oligonucleotide

SEQ ID NO: 599963 - DNA, 52 bp, Artificial; identical to SEQ ID NO: 450355
  Synthetic oligonucleotide

SEQ ID NO: 599964 - DNA, 55 bp, Artificial; identical to SEQ ID NO: 450357
  Synthetic oligonucleotide

SEQ ID NO: 599965 - DNA, 60 bp, Artificial; identical to SEQ ID NO: 450358
  Synthetic oligonucleotide

SEQ ID NO: 599966 - DNA, 56 bp, Artificial; identical to SEQ ID NO: 450359
  Synthetic oligonucleotide

SEQ ID NO: 599967 - DNA, 51 bp, Artificial; identical to SEQ ID NO: 450367
  Synthetic oligonucleotide

SEQ ID NO: 599968 - DNA, 60 bp, Artificial; identical to SEQ ID NO: 450368
  Synthetic oligonucleotide

SEQ ID NO: 599969 - DNA, 55 bp, Artificial; identical to SEQ ID NO: 450370
  Synthetic oligonucleotide

SEQ ID NO: 599970 - DNA, 60 bp, Artificial; identical to SEQ ID NO: 13805
  Synthetic oligonucleotide

SEQ ID NO: 599971 - DNA, 60 bp, Artificial; identical to SEQ ID NO: 450371
  Synthetic oligonucleotide

SEQ ID NO: 599972 - DNA, 60 bp, Artificial; identical to SEQ ID NO: 450372
  Synthetic oligonucleotide

SEQ ID NO: 599973 - DNA, 59 bp, Artificial; identical to SEQ ID NO: 450374
  Synthetic oligonucleotide

SEQ ID NO: 599974 - DNA, 60 bp, Artificial; identical to SEQ ID NO: 450377
  Synthetic oligonucleotide

SEQ ID NO: 599975 - DNA, 56 bp, Artificial; identical to SEQ ID NO: 450379
  Synthetic oligonucleotide

SEQ ID NO: 599976 - DNA, 50 bp, Artificial; identical to SEQ ID NO: 450380
  Synthetic oligonucleotide

SEQ ID NO: 599977 - DNA, 59 bp, Artificial; identical to SEQ ID NO: 450384
  Synthetic oligonucleotide

SEQ ID NO: 599978 - DNA, 58 bp, Artificial; identical to SEQ ID NO: 450389
  Synthetic oligonucleotide

SEQ ID NO: 599979 - DNA, 55 bp, Artificial; identical to SEQ ID NO: 450390
  Synthetic oligonucleotide

SEQ ID NO: 599980 - DNA, 59 bp, Artificial; identical to SEQ ID NO: 450392
  Synthetic oligonucleotide

SEQ ID NO: 599981 - DNA, 60 bp, Artificial; identical to SEQ ID NO: 450393
  Synthetic oligonucleotide

SEQ ID NO: 599982 - DNA, 57 bp, Artificial; identical to SEQ ID NO: 450397
  Synthetic oligonucleotide

SEQ ID NO: 599983 - DNA, 60 bp, Artificial; identical to SEQ ID NO: 450399
  Synthetic oligonucleotide

SEQ ID NO: 599984 - DNA, 60 bp, Artificial; identical to SEQ ID NO: 450400
  Synthetic oligonucleotide

SEQ ID NO: 599985 - DNA, 55 bp, Artificial; identical to SEQ ID NO: 450401
  Synthetic oligonucleotide

SEQ ID NO: 599986 - DNA, 55 bp, Artificial; identical to SEQ ID NO: 450404
  Synthetic oligonucleotide

SEQ ID NO: 599987 - DNA, 53 bp, Artificial; identical to SEQ ID NO: 450406
  Synthetic oligonucleotide

SEQ ID NO: 599988 - DNA, 56 bp, Artificial; identical to SEQ ID NO: 450411
  Synthetic oligonucleotide

SEQ ID NO: 599989 - DNA, 52 bp, Artificial; identical to SEQ ID NO: 450412
  Synthetic oligonucleotide

SEQ ID NO: 599990 - DNA, 60 bp, Artificial; identical to SEQ ID NO: 118380
  Synthetic oligonucleotide

SEQ ID NO: 599991 - DNA, 57 bp, Artificial; identical to SEQ ID NO: 450415
  Synthetic oligonucleotide

SEQ ID NO: 599992 - DNA, 60 bp, Artificial; identical to SEQ ID NO: 450418
  Synthetic oligonucleotide

SEQ ID NO: 599993 - DNA, 50 bp, Artificial; identical to SEQ ID NO: 450419
  Synthetic oligonucleotide

SEQ ID NO: 599994 - DNA, 58 bp, Artificial; identical to SEQ ID NO: 450422
  Synthetic oligonucleotide

SEQ ID NO: 599995 - DNA, 50 bp, Artificial; identical to SEQ ID NO: 450424
  Synthetic oligonucleotide

SEQ ID NO: 599996 - DNA, 56 bp, Artificial; identical to SEQ ID NO: 450428
  Synthetic oligonucleotide

SEQ ID NO: 599997 - DNA, 55 bp, Artificial; identical to SEQ ID NO: 450429
  Synthetic oligonucleotide

SEQ ID NO: 599998 - DNA, 52 bp, Artificial; identical to SEQ ID NO: 450436
  Synthetic oligonucleotide

SEQ ID NO: 599999 - DNA, 58 bp, Artificial; identical to SEQ ID NO: 450443
  Synthetic oligonucleotide

SEQ ID NO: 600000 - DNA, 60 bp, Artificial; identical to SEQ ID NO: 450444
  Synthetic oligonucleotide

SEQ ID NO: 600001 - DNA, 57 bp, Artificial; identical to SEQ ID NO: 450446
  Synthetic oligonucleotide

SEQ ID NO: 600002 - DNA, 59 bp, Artificial; identical to SEQ ID NO: 450447
  Synthetic oligonucleotide

SEQ ID NO: 600003 - DNA, 57 bp, Artificial; identical to SEQ ID NO: 450448
  Synthetic oligonucleotide

SEQ ID NO: 600004 - DNA, 60 bp, Artificial; identical to SEQ ID NO: 450455
  Synthetic oligonucleotide

SEQ ID NO: 600005 - DNA, 50 bp, Artificial; identical to SEQ ID NO: 450457
  Synthetic oligonucleotide

SEQ ID NO: 600006 - DNA, 60 bp, Artificial; identical to SEQ ID NO: 450461
  Synthetic oligonucleotide

SEQ ID NO: 600007 - DNA, 55 bp, Artificial; identical to SEQ ID NO: 450462
  Synthetic oligonucleotide

SEQ ID NO: 600008 - DNA, 50 bp, Artificial; identical to SEQ ID NO: 15733
  Synthetic oligonucleotide

SEQ ID NO: 600009 - DNA, 58 bp, Artificial; identical to SEQ ID NO: 450464
  Synthetic oligonucleotide

SEQ ID NO: 600010 - DNA, 60 bp, Artificial; identical to SEQ ID NO: 450466
  Synthetic oligonucleotide

SEQ ID NO: 600011 - DNA, 51 bp, Artificial; identical to SEQ ID NO: 450469
  Synthetic oligonucleotide

SEQ ID NO: 600012 - DNA, 55 bp, Artificial; identical to SEQ ID NO: 450471
  Synthetic oligonucleotide

SEQ ID NO: 600013 - DNA, 60 bp, Artificial; identical to SEQ ID NO: 450472
  Synthetic oligonucleotide

SEQ ID NO: 600014 - DNA, 60 bp, Artificial; identical to SEQ ID NO: 450475
  Synthetic oligonucleotide

SEQ ID NO: 600015 - DNA, 51 bp, Artificial; identical to SEQ ID NO: 450478
  Synthetic oligonucleotide

SEQ ID NO: 600016 - DNA, 59 bp, Artificial; identical to SEQ ID NO: 450479
  Synthetic oligonucleotide

SEQ ID NO: 600017 - DNA, 55 bp, Artificial; identical to SEQ ID NO: 450480
  Synthetic oligonucleotide

SEQ ID NO: 600018 - DNA, 58 bp, Artificial; identical to SEQ ID NO: 450481
  Synthetic oligonucleotide

SEQ ID NO: 600019 - DNA, 57 bp, Artificial; identical to SEQ ID NO: 450486
  Synthetic oligonucleotide

SEQ ID NO: 600020 - DNA, 60 bp, Artificial; identical to SEQ ID NO: 450489
  Synthetic oligonucleotide

SEQ ID NO: 600021 - DNA, 60 bp, Artificial; identical to SEQ ID NO: 450491
  Synthetic oligonucleotide

SEQ ID NO: 600022 - DNA, 55 bp, Artificial; identical to SEQ ID NO: 450493
  Synthetic oligonucleotide

SEQ ID NO: 600023 - DNA, 60 bp, Artificial; identical to SEQ ID NO: 450495
  Synthetic oligonucleotide

SEQ ID NO: 600024 - DNA, 56 bp, Artificial; identical to SEQ ID NO: 450496
  Synthetic oligonucleotide

SEQ ID NO: 600025 - DNA, 50 bp, Artificial; identical to SEQ ID NO: 450497
  Synthetic oligonucleotide

SEQ ID NO: 600026 - DNA, 60 bp, Artificial; identical to SEQ ID NO: 450499
  Synthetic oligonucleotide

SEQ ID NO: 600027 - DNA, 59 bp, Artificial; identical to SEQ ID NO: 450501
  Synthetic oligonucleotide

SEQ ID NO: 600028 - DNA, 60 bp, Artificial; identical to SEQ ID NO: 450504
  Synthetic oligonucleotide

SEQ ID NO: 600029 - DNA, 50 bp, Artificial; identical to SEQ ID NO: 450506
  Synthetic oligonucleotide

SEQ ID NO: 600030 - DNA, 55 bp, Artificial; identical to SEQ ID NO: 450508
  Synthetic oligonucleotide

SEQ ID NO: 600031 - DNA, 58 bp, Artificial; identical to SEQ ID NO: 450510
  Synthetic oligonucleotide

SEQ ID NO: 600032 - DNA, 50 bp, Artificial; identical to SEQ ID NO: 450511
  Synthetic oligonucleotide

SEQ ID NO: 600033 - DNA, 52 bp, Artificial; identical to SEQ ID NO: 450514
  Synthetic oligonucleotide

SEQ ID NO: 600034 - DNA, 59 bp, Artificial; identical to SEQ ID NO: 450519
  Synthetic oligonucleotide

SEQ ID NO: 600035 - DNA, 60 bp, Artificial; identical to SEQ ID NO: 450520
  Synthetic oligonucleotide

SEQ ID NO: 600036 - DNA, 60 bp, Artificial; identical to SEQ ID NO: 450526
  Synthetic oligonucleotide

SEQ ID NO: 600037 - DNA, 56 bp, Artificial; identical to SEQ ID NO: 450527
  Synthetic oligonucleotide

SEQ ID NO: 600038 - DNA, 60 bp, Artificial; identical to SEQ ID NO: 450532
  Synthetic oligonucleotide

SEQ ID NO: 600039 - DNA, 57 bp, Artificial; identical to SEQ ID NO: 450534
  Synthetic oligonucleotide

SEQ ID NO: 600040 - DNA, 58 bp, Artificial; identical to SEQ ID NO: 450537
  Synthetic oligonucleotide

SEQ ID NO: 600041 - DNA, 60 bp, Artificial; identical to SEQ ID NO: 450539
  Synthetic oligonucleotide

SEQ ID NO: 600042 - DNA, 53 bp, Artificial; identical to SEQ ID NO: 450541
  Synthetic oligonucleotide

SEQ ID NO: 600043 - DNA, 60 bp, Artificial; identical to SEQ ID NO: 450542
  Synthetic oligonucleotide

SEQ ID NO: 600044 - DNA, 58 bp, Artificial; identical to SEQ ID NO: 450543
  Synthetic oligonucleotide

SEQ ID NO: 600045 - DNA, 58 bp, Artificial; identical to SEQ ID NO: 450544
  Synthetic oligonucleotide

SEQ ID NO: 600046 - DNA, 50 bp, Artificial; identical to SEQ ID NO: 450545
  Synthetic oligonucleotide

SEQ ID NO: 600047 - DNA, 52 bp, Artificial; identical to SEQ ID NO: 450546
  Synthetic oligonucleotide

SEQ ID NO: 600048 - DNA, 57 bp, Artificial; identical to SEQ ID NO: 450547
  Synthetic oligonucleotide

SEQ ID NO: 600049 - DNA, 54 bp, Artificial; identical to SEQ ID NO: 450550
  Synthetic oligonucleotide

SEQ ID NO: 600050 - DNA, 54 bp, Artificial; identical to SEQ ID NO: 450557
  Synthetic oligonucleotide

SEQ ID NO: 600051 - DNA, 60 bp, Artificial; identical to SEQ ID NO: 450558
  Synthetic oligonucleotide

SEQ ID NO: 600052 - DNA, 52 bp, Artificial; identical to SEQ ID NO: 450559
  Synthetic oligonucleotide

SEQ ID NO: 600053 - DNA, 55 bp, Artificial; identical to SEQ ID NO: 450560
  Synthetic oligonucleotide

SEQ ID NO: 600054 - DNA, 59 bp, Artificial; identical to SEQ ID NO: 450564
  Synthetic oligonucleotide

SEQ ID NO: 600055 - DNA, 60 bp, Artificial; identical to SEQ ID NO: 7219
  Synthetic oligonucleotide

SEQ ID NO: 600056 - DNA, 54 bp, Artificial; identical to SEQ ID NO: 450568
  Synthetic oligonucleotide

SEQ ID NO: 600057 - DNA, 60 bp, Artificial; identical to SEQ ID NO: 7220
  Synthetic oligonucleotide

SEQ ID NO: 600058 - DNA, 54 bp, Artificial; identical to SEQ ID NO: 450569
  Synthetic oligonucleotide

SEQ ID NO: 600059 - DNA, 60 bp, Artificial; identical to SEQ ID NO: 450572
  Synthetic oligonucleotide

SEQ ID NO: 600060 - DNA, 60 bp, Artificial; identical to SEQ ID NO: 450576
  Synthetic oligonucleotide

SEQ ID NO: 600061 - DNA, 55 bp, Artificial; identical to SEQ ID NO: 450580
  Synthetic oligonucleotide

SEQ ID NO: 600062 - DNA, 52 bp, Artificial; identical to SEQ ID NO: 450583
  Synthetic oligonucleotide

SEQ ID NO: 600063 - DNA, 60 bp, Artificial; identical to SEQ ID NO: 450587
  Synthetic oligonucleotide

SEQ ID NO: 600064 - DNA, 58 bp, Artificial; identical to SEQ ID NO: 450588
  Synthetic oligonucleotide

SEQ ID NO: 600065 - DNA, 57 bp, Artificial; identical to SEQ ID NO: 450589
  Synthetic oligonucleotide

SEQ ID NO: 600066 - DNA, 54 bp, Artificial; identical to SEQ ID NO: 450590
  Synthetic oligonucleotide

SEQ ID NO: 600067 - DNA, 55 bp, Artificial; identical to SEQ ID NO: 450591
  Synthetic oligonucleotide

SEQ ID NO: 600068 - DNA, 55 bp, Artificial; identical to SEQ ID NO: 450594
  Synthetic oligonucleotide

SEQ ID NO: 600069 - DNA, 57 bp, Artificial; identical to SEQ ID NO: 450595
  Synthetic oligonucleotide

SEQ ID NO: 600070 - DNA, 60 bp, Artificial; identical to SEQ ID NO: 450596
  Synthetic oligonucleotide

SEQ ID NO: 600071 - DNA, 55 bp, Artificial; identical to SEQ ID NO: 450597
  Synthetic oligonucleotide

SEQ ID NO: 600072 - DNA, 53 bp, Artificial; identical to SEQ ID NO: 450598
  Synthetic oligonucleotide

SEQ ID NO: 600073 - DNA, 60 bp, Artificial; identical to SEQ ID NO: 450600
  Synthetic oligonucleotide

SEQ ID NO: 600074 - DNA, 60 bp, Artificial; identical to SEQ ID NO: 450601
  Synthetic oligonucleotide

SEQ ID NO: 600075 - DNA, 53 bp, Artificial; identical to SEQ ID NO: 450606
  Synthetic oligonucleotide

SEQ ID NO: 600076 - DNA, 59 bp, Artificial; identical to SEQ ID NO: 450607
  Synthetic oligonucleotide

SEQ ID NO: 600077 - DNA, 60 bp, Artificial; identical to SEQ ID NO: 450612
  Synthetic oligonucleotide

SEQ ID NO: 600078 - DNA, 50 bp, Artificial; identical to SEQ ID NO: 10759
  Synthetic oligonucleotide

SEQ ID NO: 600079 - DNA, 55 bp, Artificial; identical to SEQ ID NO: 450614
  Synthetic oligonucleotide

SEQ ID NO: 600080 - DNA, 60 bp, Artificial; identical to SEQ ID NO: 450615
  Synthetic oligonucleotide

SEQ ID NO: 600081 - DNA, 55 bp, Artificial; identical to SEQ ID NO: 450616
  Synthetic oligonucleotide

SEQ ID NO: 600082 - DNA, 60 bp, Artificial; identical to SEQ ID NO: 450620
  Synthetic oligonucleotide

SEQ ID NO: 600083 - DNA, 60 bp, Artificial; identical to SEQ ID NO: 450623
  Synthetic oligonucleotide

SEQ ID NO: 600084 - DNA, 59 bp, Artificial; identical to SEQ ID NO: 450627
  Synthetic oligonucleotide

SEQ ID NO: 600085 - DNA, 53 bp, Artificial; identical to SEQ ID NO: 450629
  Synthetic oligonucleotide

SEQ ID NO: 600086 - DNA, 57 bp, Artificial; identical to SEQ ID NO: 450630
  Synthetic oligonucleotide

SEQ ID NO: 600087 - DNA, 58 bp, Artificial; identical to SEQ ID NO: 450632
  Synthetic oligonucleotide

SEQ ID NO: 600088 - DNA, 59 bp, Artificial; identical to SEQ ID NO: 450633
  Synthetic oligonucleotide

SEQ ID NO: 600089 - DNA, 60 bp, Artificial; identical to SEQ ID NO: 450634
  Synthetic oligonucleotide

SEQ ID NO: 600090 - DNA, 55 bp, Artificial; identical to SEQ ID NO: 450636
  Synthetic oligonucleotide

SEQ ID NO: 600091 - DNA, 60 bp, Artificial; identical to SEQ ID NO: 450637
  Synthetic oligonucleotide

SEQ ID NO: 600092 - DNA, 50 bp, Artificial; identical to SEQ ID NO: 450639
  Synthetic oligonucleotide

SEQ ID NO: 600093 - DNA, 60 bp, Artificial; identical to SEQ ID NO: 450641
  Synthetic oligonucleotide

SEQ ID NO: 600094 - DNA, 54 bp, Artificial; identical to SEQ ID NO: 450643
  Synthetic oligonucleotide

SEQ ID NO: 600095 - DNA, 60 bp, Artificial; identical to SEQ ID NO: 450648
  Synthetic oligonucleotide

SEQ ID NO: 600096 - DNA, 51 bp, Artificial; identical to SEQ ID NO: 450650
  Synthetic oligonucleotide

SEQ ID NO: 600097 - DNA, 60 bp, Artificial; identical to SEQ ID NO: 450653
  Synthetic oligonucleotide

SEQ ID NO: 600098 - DNA, 50 bp, Artificial; identical to SEQ ID NO: 450654
  Synthetic oligonucleotide

SEQ ID NO: 600099 - DNA, 51 bp, Artificial; identical to SEQ ID NO: 450656
  Synthetic oligonucleotide

SEQ ID NO: 600100 - DNA, 60 bp, Artificial; identical to SEQ ID NO: 11120
  Synthetic oligonucleotide

SEQ ID NO: 600101 - DNA, 60 bp, Artificial; identical to SEQ ID NO: 450657
  Synthetic oligonucleotide

SEQ ID NO: 600102 - DNA, 60 bp, Artificial; identical to SEQ ID NO: 450662
  Synthetic oligonucleotide

SEQ ID NO: 600103 - DNA, 51 bp, Artificial; identical to SEQ ID NO: 450663
  Synthetic oligonucleotide

SEQ ID NO: 600104 - DNA, 51 bp, Artificial; identical to SEQ ID NO: 450664
  Synthetic oligonucleotide

SEQ ID NO: 600105 - DNA, 59 bp, Artificial; identical to SEQ ID NO: 450667
  Synthetic oligonucleotide

SEQ ID NO: 600106 - DNA, 60 bp, Artificial; identical to SEQ ID NO: 450669
  Synthetic oligonucleotide

SEQ ID NO: 600107 - DNA, 55 bp, Artificial; identical to SEQ ID NO: 450671
  Synthetic oligonucleotide

SEQ ID NO: 600108 - DNA, 52 bp, Artificial; identical to SEQ ID NO: 10464
  Synthetic oligonucleotide

SEQ ID NO: 600109 - DNA, 54 bp, Artificial; identical to SEQ ID NO: 450673
  Synthetic oligonucleotide

SEQ ID NO: 600110 - DNA, 55 bp, Artificial; identical to SEQ ID NO: 450675
  Synthetic oligonucleotide

SEQ ID NO: 600111 - DNA, 58 bp, Artificial; identical to SEQ ID NO: 18590
  Synthetic oligonucleotide

SEQ ID NO: 600112 - DNA, 54 bp, Artificial; identical to SEQ ID NO: 450680
  Synthetic oligonucleotide

SEQ ID NO: 600113 - DNA, 60 bp, Artificial; identical to SEQ ID NO: 450681
  Synthetic oligonucleotide

SEQ ID NO: 600114 - DNA, 60 bp, Artificial; identical to SEQ ID NO: 450682
  Synthetic oligonucleotide

SEQ ID NO: 600115 - DNA, 60 bp, Artificial; identical to SEQ ID NO: 450683
  Synthetic oligonucleotide

SEQ ID NO: 600116 - DNA, 51 bp, Artificial; identical to SEQ ID NO: 450684
  Synthetic oligonucleotide

SEQ ID NO: 600117 - DNA, 60 bp, Artificial; identical to SEQ ID NO: 11102
  Synthetic oligonucleotide

SEQ ID NO: 600118 - DNA, 60 bp, Artificial; identical to SEQ ID NO: 450685
  Synthetic oligonucleotide

SEQ ID NO: 600119 - DNA, 60 bp, Artificial; identical to SEQ ID NO: 450689
  Synthetic oligonucleotide

SEQ ID NO: 600120 - DNA, 60 bp, Artificial; identical to SEQ ID NO: 450690
  Synthetic oligonucleotide

SEQ ID NO: 600121 - DNA, 51 bp, Artificial; identical to SEQ ID NO: 450692
  Synthetic oligonucleotide

SEQ ID NO: 600122 - DNA, 55 bp, Artificial; identical to SEQ ID NO: 450694
  Synthetic oligonucleotide

SEQ ID NO: 600123 - DNA, 60 bp, Artificial; identical to SEQ ID NO: 10370
  Synthetic oligonucleotide

SEQ ID NO: 600124 - DNA, 55 bp, Artificial; identical to SEQ ID NO: 450698
  Synthetic oligonucleotide

SEQ ID NO: 600125 - DNA, 60 bp, Artificial; identical to SEQ ID NO: 450702
  Synthetic oligonucleotide

SEQ ID NO: 600126 - DNA, 58 bp, Artificial; identical to SEQ ID NO: 450704
  Synthetic oligonucleotide

SEQ ID NO: 600127 - DNA, 60 bp, Artificial; identical to SEQ ID NO: 450706
  Synthetic oligonucleotide

SEQ ID NO: 600128 - DNA, 60 bp, Artificial; identical to SEQ ID NO: 450714
  Synthetic oligonucleotide

SEQ ID NO: 600129 - DNA, 59 bp, Artificial; identical to SEQ ID NO: 450718
  Synthetic oligonucleotide

SEQ ID NO: 600130 - DNA, 58 bp, Artificial; identical to SEQ ID NO: 450720
  Synthetic oligonucleotide

SEQ ID NO: 600131 - DNA, 57 bp, Artificial; identical to SEQ ID NO: 450723
  Synthetic oligonucleotide

SEQ ID NO: 600132 - DNA, 57 bp, Artificial; identical to SEQ ID NO: 450724
  Synthetic oligonucleotide

SEQ ID NO: 600133 - DNA, 54 bp, Artificial; identical to SEQ ID NO: 450725
  Synthetic oligonucleotide

SEQ ID NO: 600134 - DNA, 60 bp, Artificial; identical to SEQ ID NO: 450727
  Synthetic oligonucleotide

SEQ ID NO: 600135 - DNA, 55 bp, Artificial; identical to SEQ ID NO: 450728
  Synthetic oligonucleotide

SEQ ID NO: 600136 - DNA, 60 bp, Artificial; identical to SEQ ID NO: 450730
  Synthetic oligonucleotide

SEQ ID NO: 600137 - DNA, 53 bp, Artificial; identical to SEQ ID NO: 450731
  Synthetic oligonucleotide

SEQ ID NO: 600138 - DNA, 57 bp, Artificial; identical to SEQ ID NO: 450735
  Synthetic oligonucleotide

SEQ ID NO: 600139 - DNA, 60 bp, Artificial; identical to SEQ ID NO: 450737
  Synthetic oligonucleotide

SEQ ID NO: 600140 - DNA, 53 bp, Artificial; identical to SEQ ID NO: 450738
  Synthetic oligonucleotide

SEQ ID NO: 600141 - DNA, 60 bp, Artificial; identical to SEQ ID NO: 450743
  Synthetic oligonucleotide

SEQ ID NO: 600142 - DNA, 58 bp, Artificial; identical to SEQ ID NO: 450745
  Synthetic oligonucleotide

SEQ ID NO: 600143 - DNA, 56 bp, Artificial; identical to SEQ ID NO: 450748
  Synthetic oligonucleotide

SEQ ID NO: 600144 - DNA, 52 bp, Artificial; identical to SEQ ID NO: 450749
  Synthetic oligonucleotide

SEQ ID NO: 600145 - DNA, 55 bp, Artificial; identical to SEQ ID NO: 450753
  Synthetic oligonucleotide

SEQ ID NO: 600146 - DNA, 60 bp, Artificial; identical to SEQ ID NO: 450754
  Synthetic oligonucleotide

SEQ ID NO: 600147 - DNA, 57 bp, Artificial; identical to SEQ ID NO: 450759
  Synthetic oligonucleotide

SEQ ID NO: 600148 - DNA, 59 bp, Artificial; identical to SEQ ID NO: 450761
  Synthetic oligonucleotide

SEQ ID NO: 600149 - DNA, 58 bp, Artificial; identical to SEQ ID NO: 450762
  Synthetic oligonucleotide

SEQ ID NO: 600150 - DNA, 51 bp, Artificial; identical to SEQ ID NO: 450763
  Synthetic oligonucleotide

SEQ ID NO: 600151 - DNA, 59 bp, Artificial; identical to SEQ ID NO: 450766
  Synthetic oligonucleotide

SEQ ID NO: 600152 - DNA, 54 bp, Artificial; identical to SEQ ID NO: 450768
  Synthetic oligonucleotide

SEQ ID NO: 600153 - DNA, 60 bp, Artificial; identical to SEQ ID NO: 450771
  Synthetic oligonucleotide

SEQ ID NO: 600154 - DNA, 59 bp, Artificial; identical to SEQ ID NO: 450772
  Synthetic oligonucleotide

SEQ ID NO: 600155 - DNA, 56 bp, Artificial; identical to SEQ ID NO: 450775
  Synthetic oligonucleotide

SEQ ID NO: 600156 - DNA, 58 bp, Artificial; identical to SEQ ID NO: 17272
  Synthetic oligonucleotide

SEQ ID NO: 600157 - DNA, 60 bp, Artificial; identical to SEQ ID NO: 450776
  Synthetic oligonucleotide

SEQ ID NO: 600158 - DNA, 60 bp, Artificial; identical to SEQ ID NO: 450777
  Synthetic oligonucleotide

SEQ ID NO: 600159 - DNA, 59 bp, Artificial; identical to SEQ ID NO: 450780
  Synthetic oligonucleotide

SEQ ID NO: 600160 - DNA, 60 bp, Artificial; identical to SEQ ID NO: 450782
  Synthetic oligonucleotide

SEQ ID NO: 600161 - DNA, 51 bp, Artificial; identical to SEQ ID NO: 450783
  Synthetic oligonucleotide

SEQ ID NO: 600162 - DNA, 60 bp, Artificial; identical to SEQ ID NO: 450784
  Synthetic oligonucleotide

SEQ ID NO: 600163 - DNA, 53 bp, Artificial; identical to SEQ ID NO: 450785
  Synthetic oligonucleotide

SEQ ID NO: 600164 - DNA, 56 bp, Artificial; identical to SEQ ID NO: 450786
  Synthetic oligonucleotide

SEQ ID NO: 600165 - DNA, 60 bp, Artificial; identical to SEQ ID NO: 450788
  Synthetic oligonucleotide

SEQ ID NO: 600166 - DNA, 50 bp, Artificial; identical to SEQ ID NO: 450789
  Synthetic oligonucleotide

SEQ ID NO: 600167 - DNA, 55 bp, Artificial; identical to SEQ ID NO: 450790
  Synthetic oligonucleotide

SEQ ID NO: 600168 - DNA, 60 bp, Artificial; identical to SEQ ID NO: 6512
  Synthetic oligonucleotide

SEQ ID NO: 600169 - DNA, 57 bp, Artificial; identical to SEQ ID NO: 450791
  Synthetic oligonucleotide

SEQ ID NO: 600170 - DNA, 60 bp, Artificial; identical to SEQ ID NO: 450793
  Synthetic oligonucleotide

SEQ ID NO: 600171 - DNA, 54 bp, Artificial; identical to SEQ ID NO: 450794
  Synthetic oligonucleotide

SEQ ID NO: 600172 - DNA, 56 bp, Artificial; identical to SEQ ID NO: 450795
  Synthetic oligonucleotide

SEQ ID NO: 600173 - DNA, 58 bp, Artificial; identical to SEQ ID NO: 450799
  Synthetic oligonucleotide

SEQ ID NO: 600174 - DNA, 59 bp, Artificial; identical to SEQ ID NO: 450800
  Synthetic oligonucleotide

SEQ ID NO: 600175 - DNA, 51 bp, Artificial; identical to SEQ ID NO: 450801
  Synthetic oligonucleotide

SEQ ID NO: 600176 - DNA, 55 bp, Artificial; identical to SEQ ID NO: 450802
  Synthetic oligonucleotide

SEQ ID NO: 600177 - DNA, 60 bp, Artificial; identical to SEQ ID NO: 450805
  Synthetic oligonucleotide

SEQ ID NO: 600178 - DNA, 57 bp, Artificial; identical to SEQ ID NO: 450806
  Synthetic oligonucleotide

SEQ ID NO: 600179 - DNA, 60 bp, Artificial; identical to SEQ ID NO: 450809
  Synthetic oligonucleotide

SEQ ID NO: 600180 - DNA, 60 bp, Artificial; identical to SEQ ID NO: 450812
  Synthetic oligonucleotide

SEQ ID NO: 600181 - DNA, 58 bp, Artificial; identical to SEQ ID NO: 450814
  Synthetic oligonucleotide

SEQ ID NO: 600182 - DNA, 59 bp, Artificial; identical to SEQ ID NO: 450815
  Synthetic oligonucleotide

SEQ ID NO: 600183 - DNA, 60 bp, Artificial; identical to SEQ ID NO: 450818
  Synthetic oligonucleotide

SEQ ID NO: 600184 - DNA, 60 bp, Artificial; identical to SEQ ID NO: 450821
  Synthetic oligonucleotide

SEQ ID NO: 600185 - DNA, 60 bp, Artificial; identical to SEQ ID NO: 450822
  Synthetic oligonucleotide

SEQ ID NO: 600186 - DNA, 60 bp, Artificial; identical to SEQ ID NO: 450823
  Synthetic oligonucleotide

SEQ ID NO: 600187 - DNA, 59 bp, Artificial; identical to SEQ ID NO: 450826
  Synthetic oligonucleotide

SEQ ID NO: 600188 - DNA, 53 bp, Artificial; identical to SEQ ID NO: 450828
  Synthetic oligonucleotide

SEQ ID NO: 600189 - DNA, 60 bp, Artificial; identical to SEQ ID NO: 450835
  Synthetic oligonucleotide

SEQ ID NO: 600190 - DNA, 59 bp, Artificial; identical to SEQ ID NO: 450839
  Synthetic oligonucleotide

SEQ ID NO: 600191 - DNA, 60 bp, Artificial; identical to SEQ ID NO: 450842
  Synthetic oligonucleotide

SEQ ID NO: 600192 - DNA, 60 bp, Artificial; identical to SEQ ID NO: 450844
  Synthetic oligonucleotide

SEQ ID NO: 600193 - DNA, 60 bp, Artificial; identical to SEQ ID NO: 450848
  Synthetic oligonucleotide

SEQ ID NO: 600194 - DNA, 55 bp, Artificial; identical to SEQ ID NO: 450850
  Synthetic oligonucleotide

SEQ ID NO: 600195 - DNA, 57 bp, Artificial; identical to SEQ ID NO: 450853
  Synthetic oligonucleotide

SEQ ID NO: 600196 - DNA, 60 bp, Artificial; identical to SEQ ID NO: 450857
  Synthetic oligonucleotide

SEQ ID NO: 600197 - DNA, 55 bp, Artificial; identical to SEQ ID NO: 450858
  Synthetic oligonucleotide

SEQ ID NO: 600198 - DNA, 56 bp, Artificial; identical to SEQ ID NO: 450859
  Synthetic oligonucleotide

SEQ ID NO: 600199 - DNA, 58 bp, Artificial; identical to SEQ ID NO: 450860
  Synthetic oligonucleotide

SEQ ID NO: 600200 - DNA, 55 bp, Artificial; identical to SEQ ID NO: 450863
  Synthetic oligonucleotide

SEQ ID NO: 600201 - DNA, 52 bp, Artificial; identical to SEQ ID NO: 450867
  Synthetic oligonucleotide

SEQ ID NO: 600202 - DNA, 60 bp, Artificial; identical to SEQ ID NO: 450868
  Synthetic oligonucleotide

SEQ ID NO: 600203 - DNA, 60 bp, Artificial; identical to SEQ ID NO: 450869
  Synthetic oligonucleotide

SEQ ID NO: 600204 - DNA, 60 bp, Artificial; identical to SEQ ID NO: 450870
  Synthetic oligonucleotide

SEQ ID NO: 600205 - DNA, 60 bp, Artificial; identical to SEQ ID NO: 450871
  Synthetic oligonucleotide

SEQ ID NO: 600206 - DNA, 60 bp, Artificial; identical to SEQ ID NO: 450872
  Synthetic oligonucleotide

SEQ ID NO: 600207 - DNA, 56 bp, Artificial; identical to SEQ ID NO: 450873
  Synthetic oligonucleotide

SEQ ID NO: 600208 - DNA, 52 bp, Artificial; identical to SEQ ID NO: 450874
  Synthetic oligonucleotide

SEQ ID NO: 600209 - DNA, 60 bp, Artificial; identical to SEQ ID NO: 450875
  Synthetic oligonucleotide

SEQ ID NO: 600210 - DNA, 58 bp, Artificial; identical to SEQ ID NO: 450877
  Synthetic oligonucleotide

SEQ ID NO: 600211 - DNA, 60 bp, Artificial; identical to SEQ ID NO: 450878
  Synthetic oligonucleotide

SEQ ID NO: 600212 - DNA, 60 bp, Artificial; identical to SEQ ID NO: 450879
  Synthetic oligonucleotide

SEQ ID NO: 600213 - DNA, 60 bp, Artificial; identical to SEQ ID NO: 450881
  Synthetic oligonucleotide

SEQ ID NO: 600214 - DNA, 57 bp, Artificial; identical to SEQ ID NO: 450884
  Synthetic oligonucleotide

SEQ ID NO: 600215 - DNA, 57 bp, Artificial; identical to SEQ ID NO: 450887
  Synthetic oligonucleotide

SEQ ID NO: 600216 - DNA, 60 bp, Artificial; identical to SEQ ID NO: 450888
  Synthetic oligonucleotide

SEQ ID NO: 600217 - DNA, 59 bp, Artificial; identical to SEQ ID NO: 450890
  Synthetic oligonucleotide

SEQ ID NO: 600218 - DNA, 60 bp, Artificial; identical to SEQ ID NO: 450893
  Synthetic oligonucleotide

SEQ ID NO: 600219 - DNA, 56 bp, Artificial; identical to SEQ ID NO: 450894
  Synthetic oligonucleotide

SEQ ID NO: 600220 - DNA, 60 bp, Artificial; identical to SEQ ID NO: 450895
  Synthetic oligonucleotide

SEQ ID NO: 600221 - DNA, 55 bp, Artificial; identical to SEQ ID NO: 450896
  Synthetic oligonucleotide

SEQ ID NO: 600222 - DNA, 54 bp, Artificial; identical to SEQ ID NO: 450897
  Synthetic oligonucleotide

SEQ ID NO: 600223 - DNA, 60 bp, Artificial; identical to SEQ ID NO: 450902
  Synthetic oligonucleotide

SEQ ID NO: 600224 - DNA, 60 bp, Artificial; identical to SEQ ID NO: 15181
  Synthetic oligonucleotide

SEQ ID NO: 600225 - DNA, 60 bp, Artificial; identical to SEQ ID NO: 450907
  Synthetic oligonucleotide

SEQ ID NO: 600226 - DNA, 59 bp, Artificial; identical to SEQ ID NO: 19101
  Synthetic oligonucleotide

SEQ ID NO: 600227 - DNA, 58 bp, Artificial; identical to SEQ ID NO: 450910
  Synthetic oligonucleotide

SEQ ID NO: 600228 - DNA, 60 bp, Artificial; identical to SEQ ID NO: 450912
  Synthetic oligonucleotide

SEQ ID NO: 600229 - DNA, 55 bp, Artificial; identical to SEQ ID NO: 450913
  Synthetic oligonucleotide

SEQ ID NO: 600230 - DNA, 54 bp, Artificial; identical to SEQ ID NO: 450915
  Synthetic oligonucleotide

SEQ ID NO: 600231 - DNA, 59 bp, Artificial; identical to SEQ ID NO: 450916
  Synthetic oligonucleotide

SEQ ID NO: 600232 - DNA, 57 bp, Artificial; identical to SEQ ID NO: 450917
  Synthetic oligonucleotide

SEQ ID NO: 600233 - DNA, 60 bp, Artificial; identical to SEQ ID NO: 450919
  Synthetic oligonucleotide

SEQ ID NO: 600234 - DNA, 59 bp, Artificial; identical to SEQ ID NO: 450922
  Synthetic oligonucleotide

SEQ ID NO: 600235 - DNA, 60 bp, Artificial; identical to SEQ ID NO: 450923
  Synthetic oligonucleotide

SEQ ID NO: 600236 - DNA, 52 bp, Artificial; identical to SEQ ID NO: 450924
  Synthetic oligonucleotide

SEQ ID NO: 600237 - DNA, 60 bp, Artificial; identical to SEQ ID NO: 450931
  Synthetic oligonucleotide

SEQ ID NO: 600238 - DNA, 54 bp, Artificial; identical to SEQ ID NO: 450933
  Synthetic oligonucleotide

SEQ ID NO: 600239 - DNA, 55 bp, Artificial; identical to SEQ ID NO: 450936
  Synthetic oligonucleotide

SEQ ID NO: 600240 - DNA, 60 bp, Artificial; identical to SEQ ID NO: 450939
  Synthetic oligonucleotide

SEQ ID NO: 600241 - DNA, 60 bp, Artificial; identical to SEQ ID NO: 450941
  Synthetic oligonucleotide

SEQ ID NO: 600242 - DNA, 60 bp, Artificial; identical to SEQ ID NO: 7980
  Synthetic oligonucleotide

SEQ ID NO: 600243 - DNA, 55 bp, Artificial; identical to SEQ ID NO: 450946
  Synthetic oligonucleotide

SEQ ID NO: 600244 - DNA, 60 bp, Artificial; identical to SEQ ID NO: 450947
  Synthetic oligonucleotide

SEQ ID NO: 600245 - DNA, 60 bp, Artificial; identical to SEQ ID NO: 450951
  Synthetic oligonucleotide

SEQ ID NO: 600246 - DNA, 60 bp, Artificial; identical to SEQ ID NO: 450952
  Synthetic oligonucleotide

SEQ ID NO: 600247 - DNA, 60 bp, Artificial; identical to SEQ ID NO: 8749
  Synthetic oligonucleotide

SEQ ID NO: 600248 - DNA, 55 bp, Artificial; identical to SEQ ID NO: 450960
  Synthetic oligonucleotide

SEQ ID NO: 600249 - DNA, 57 bp, Artificial; identical to SEQ ID NO: 450962
  Synthetic oligonucleotide

SEQ ID NO: 600250 - DNA, 51 bp, Artificial; identical to SEQ ID NO: 450964
  Synthetic oligonucleotide

SEQ ID NO: 600251 - DNA, 60 bp, Artificial; identical to SEQ ID NO: 450965
  Synthetic oligonucleotide

SEQ ID NO: 600252 - DNA, 54 bp, Artificial; identical to SEQ ID NO: 450966
  Synthetic oligonucleotide

SEQ ID NO: 600253 - DNA, 53 bp, Artificial; identical to SEQ ID NO: 450967
  Synthetic oligonucleotide

SEQ ID NO: 600254 - DNA, 60 bp, Artificial; identical to SEQ ID NO: 450969
  Synthetic oligonucleotide

SEQ ID NO: 600255 - DNA, 55 bp, Artificial; identical to SEQ ID NO: 450971
  Synthetic oligonucleotide

SEQ ID NO: 600256 - DNA, 54 bp, Artificial; identical to SEQ ID NO: 450972
  Synthetic oligonucleotide

SEQ ID NO: 600257 - DNA, 60 bp, Artificial; identical to SEQ ID NO: 450973
  Synthetic oligonucleotide

SEQ ID NO: 600258 - DNA, 58 bp, Artificial; identical to SEQ ID NO: 16524
  Synthetic oligonucleotide

SEQ ID NO: 600259 - DNA, 52 bp, Artificial; identical to SEQ ID NO: 450976
  Synthetic oligonucleotide

SEQ ID NO: 600260 - DNA, 55 bp, Artificial; identical to SEQ ID NO: 450978
  Synthetic oligonucleotide

SEQ ID NO: 600261 - DNA, 60 bp, Artificial; identical to SEQ ID NO: 450981
  Synthetic oligonucleotide

SEQ ID NO: 600262 - DNA, 56 bp, Artificial; identical to SEQ ID NO: 450984
  Synthetic oligonucleotide

SEQ ID NO: 600263 - DNA, 50 bp, Artificial; identical to SEQ ID NO: 450986
  Synthetic oligonucleotide

SEQ ID NO: 600264 - DNA, 60 bp, Artificial; identical to SEQ ID NO: 450987
  Synthetic oligonucleotide

SEQ ID NO: 600265 - DNA, 59 bp, Artificial; identical to SEQ ID NO: 450988
  Synthetic oligonucleotide

SEQ ID NO: 600266 - DNA, 57 bp, Artificial; identical to SEQ ID NO: 450991
  Synthetic oligonucleotide

SEQ ID NO: 600267 - DNA, 58 bp, Artificial; identical to SEQ ID NO: 450992
  Synthetic oligonucleotide

SEQ ID NO: 600268 - DNA, 56 bp, Artificial; identical to SEQ ID NO: 450993
  Synthetic oligonucleotide

SEQ ID NO: 600269 - DNA, 54 bp, Artificial; identical to SEQ ID NO: 450994
  Synthetic oligonucleotide

SEQ ID NO: 600270 - DNA, 55 bp, Artificial; identical to SEQ ID NO: 450996
  Synthetic oligonucleotide

SEQ ID NO: 600271 - DNA, 53 bp, Artificial; identical to SEQ ID NO: 450997
  Synthetic oligonucleotide

SEQ ID NO: 600272 - DNA, 60 bp, Artificial; identical to SEQ ID NO: 451000
  Synthetic oligonucleotide

SEQ ID NO: 600273 - DNA, 57 bp, Artificial; identical to SEQ ID NO: 451002
  Synthetic oligonucleotide

SEQ ID NO: 600274 - DNA, 57 bp, Artificial; identical to SEQ ID NO: 451004
  Synthetic oligonucleotide

SEQ ID NO: 600275 - DNA, 60 bp, Artificial; identical to SEQ ID NO: 451005
  Synthetic oligonucleotide

SEQ ID NO: 600276 - DNA, 56 bp, Artificial; identical to SEQ ID NO: 451007
  Synthetic oligonucleotide

SEQ ID NO: 600277 - DNA, 60 bp, Artificial; identical to SEQ ID NO: 451008
  Synthetic oligonucleotide

SEQ ID NO: 600278 - DNA, 57 bp, Artificial; identical to SEQ ID NO: 451009
  Synthetic oligonucleotide

SEQ ID NO: 600279 - DNA, 59 bp, Artificial; identical to SEQ ID NO: 451010
  Synthetic oligonucleotide

SEQ ID NO: 600280 - DNA, 52 bp, Artificial; identical to SEQ ID NO: 451013
  Synthetic oligonucleotide

SEQ ID NO: 600281 - DNA, 55 bp, Artificial; identical to SEQ ID NO: 451014
  Synthetic oligonucleotide

SEQ ID NO: 600282 - DNA, 59 bp, Artificial; identical to SEQ ID NO: 451019
  Synthetic oligonucleotide

SEQ ID NO: 600283 - DNA, 60 bp, Artificial; identical to SEQ ID NO: 451020
  Synthetic oligonucleotide

SEQ ID NO: 600284 - DNA, 51 bp, Artificial; identical to SEQ ID NO: 451024
  Synthetic oligonucleotide

SEQ ID NO: 600285 - DNA, 55 bp, Artificial; identical to SEQ ID NO: 451025
  Synthetic oligonucleotide

SEQ ID NO: 600286 - DNA, 55 bp, Artificial; identical to SEQ ID NO: 451026
  Synthetic oligonucleotide

SEQ ID NO: 600287 - DNA, 54 bp, Artificial; identical to SEQ ID NO: 451027
  Synthetic oligonucleotide

SEQ ID NO: 600288 - DNA, 57 bp, Artificial; identical to SEQ ID NO: 451028
  Synthetic oligonucleotide

SEQ ID NO: 600289 - DNA, 56 bp, Artificial; identical to SEQ ID NO: 451031
  Synthetic oligonucleotide

SEQ ID NO: 600290 - DNA, 60 bp, Artificial; identical to SEQ ID NO: 451032
  Synthetic oligonucleotide

SEQ ID NO: 600291 - DNA, 60 bp, Artificial; identical to SEQ ID NO: 451034
  Synthetic oligonucleotide

SEQ ID NO: 600292 - DNA, 60 bp, Artificial; identical to SEQ ID NO: 451035
  Synthetic oligonucleotide

SEQ ID NO: 600293 - DNA, 60 bp, Artificial; identical to SEQ ID NO: 451036
  Synthetic oligonucleotide

SEQ ID NO: 600294 - DNA, 58 bp, Artificial; identical to SEQ ID NO: 451038
  Synthetic oligonucleotide

SEQ ID NO: 600295 - DNA, 60 bp, Artificial; identical to SEQ ID NO: 451040
  Synthetic oligonucleotide

SEQ ID NO: 600296 - DNA, 52 bp, Artificial; identical to SEQ ID NO: 19058
  Synthetic oligonucleotide

SEQ ID NO: 600297 - DNA, 52 bp, Artificial; identical to SEQ ID NO: 451044
  Synthetic oligonucleotide

SEQ ID NO: 600298 - DNA, 58 bp, Artificial; identical to SEQ ID NO: 451045
  Synthetic oligonucleotide

SEQ ID NO: 600299 - DNA, 59 bp, Artificial; identical to SEQ ID NO: 451048
  Synthetic oligonucleotide

SEQ ID NO: 600300 - DNA, 50 bp, Artificial; identical to SEQ ID NO: 451059
  Synthetic oligonucleotide

SEQ ID NO: 600301 - DNA, 57 bp, Artificial; identical to SEQ ID NO: 451062
  Synthetic oligonucleotide

SEQ ID NO: 600302 - DNA, 60 bp, Artificial; identical to SEQ ID NO: 451067
  Synthetic oligonucleotide

SEQ ID NO: 600303 - DNA, 60 bp, Artificial; identical to SEQ ID NO: 451070
  Synthetic oligonucleotide

SEQ ID NO: 600304 - DNA, 60 bp, Artificial; identical to SEQ ID NO: 451073
  Synthetic oligonucleotide

SEQ ID NO: 600305 - DNA, 58 bp, Artificial; identical to SEQ ID NO: 451074
  Synthetic oligonucleotide

SEQ ID NO: 600306 - DNA, 54 bp, Artificial; identical to SEQ ID NO: 451075
  Synthetic oligonucleotide

SEQ ID NO: 600307 - DNA, 58 bp, Artificial; identical to SEQ ID NO: 451079
  Synthetic oligonucleotide

SEQ ID NO: 600308 - DNA, 60 bp, Artificial; identical to SEQ ID NO: 451080
  Synthetic oligonucleotide

SEQ ID NO: 600309 - DNA, 60 bp, Artificial; identical to SEQ ID NO: 451083
  Synthetic oligonucleotide

SEQ ID NO: 600310 - DNA, 57 bp, Artificial; identical to SEQ ID NO: 20468
  Synthetic oligonucleotide

SEQ ID NO: 600311 - DNA, 58 bp, Artificial; identical to SEQ ID NO: 451087
  Synthetic oligonucleotide

SEQ ID NO: 600312 - DNA, 58 bp, Artificial; identical to SEQ ID NO: 451089
  Synthetic oligonucleotide

SEQ ID NO: 600313 - DNA, 57 bp, Artificial; identical to SEQ ID NO: 451090
  Synthetic oligonucleotide

SEQ ID NO: 600314 - DNA, 59 bp, Artificial; identical to SEQ ID NO: 451093
  Synthetic oligonucleotide

SEQ ID NO: 600315 - DNA, 57 bp, Artificial; identical to SEQ ID NO: 451098
  Synthetic oligonucleotide

SEQ ID NO: 600316 - DNA, 52 bp, Artificial; identical to SEQ ID NO: 451101
  Synthetic oligonucleotide

SEQ ID NO: 600317 - DNA, 55 bp, Artificial; identical to SEQ ID NO: 451102
  Synthetic oligonucleotide

SEQ ID NO: 600318 - DNA, 57 bp, Artificial; identical to SEQ ID NO: 451106
  Synthetic oligonucleotide

SEQ ID NO: 600319 - DNA, 51 bp, Artificial; identical to SEQ ID NO: 451108
  Synthetic oligonucleotide

SEQ ID NO: 600320 - DNA, 55 bp, Artificial; identical to SEQ ID NO: 451109
  Synthetic oligonucleotide

SEQ ID NO: 600321 - DNA, 55 bp, Artificial; identical to SEQ ID NO: 451110
  Synthetic oligonucleotide

SEQ ID NO: 600322 - DNA, 60 bp, Artificial; identical to SEQ ID NO: 451111
  Synthetic oligonucleotide

SEQ ID NO: 600323 - DNA, 57 bp, Artificial; identical to SEQ ID NO: 451113
  Synthetic oligonucleotide

SEQ ID NO: 600324 - DNA, 56 bp, Artificial; identical to SEQ ID NO: 451119
  Synthetic oligonucleotide

SEQ ID NO: 600325 - DNA, 57 bp, Artificial; identical to SEQ ID NO: 451120
  Synthetic oligonucleotide

SEQ ID NO: 600326 - DNA, 57 bp, Artificial; identical to SEQ ID NO: 451123
  Synthetic oligonucleotide

SEQ ID NO: 600327 - DNA, 60 bp, Artificial; identical to SEQ ID NO: 451124
  Synthetic oligonucleotide

SEQ ID NO: 600328 - DNA, 55 bp, Artificial; identical to SEQ ID NO: 451129
  Synthetic oligonucleotide

SEQ ID NO: 600329 - DNA, 56 bp, Artificial; identical to SEQ ID NO: 19367
  Synthetic oligonucleotide

SEQ ID NO: 600330 - DNA, 57 bp, Artificial; identical to SEQ ID NO: 451134
  Synthetic oligonucleotide

SEQ ID NO: 600331 - DNA, 54 bp, Artificial; identical to SEQ ID NO: 451136
  Synthetic oligonucleotide

SEQ ID NO: 600332 - DNA, 59 bp, Artificial; identical to SEQ ID NO: 451137
  Synthetic oligonucleotide

SEQ ID NO: 600333 - DNA, 60 bp, Artificial; identical to SEQ ID NO: 451138
  Synthetic oligonucleotide

SEQ ID NO: 600334 - DNA, 58 bp, Artificial; identical to SEQ ID NO: 451139
  Synthetic oligonucleotide

SEQ ID NO: 600335 - DNA, 60 bp, Artificial; identical to SEQ ID NO: 451140
  Synthetic oligonucleotide

SEQ ID NO: 600336 - DNA, 60 bp, Artificial; identical to SEQ ID NO: 451142
  Synthetic oligonucleotide

SEQ ID NO: 600337 - DNA, 55 bp, Artificial; identical to SEQ ID NO: 451143
  Synthetic oligonucleotide

SEQ ID NO: 600338 - DNA, 58 bp, Artificial; identical to SEQ ID NO: 451144
  Synthetic oligonucleotide

SEQ ID NO: 600339 - DNA, 54 bp, Artificial; identical to SEQ ID NO: 451146
  Synthetic oligonucleotide

SEQ ID NO: 600340 - DNA, 58 bp, Artificial; identical to SEQ ID NO: 451152
  Synthetic oligonucleotide

SEQ ID NO: 600341 - DNA, 55 bp, Artificial; identical to SEQ ID NO: 451153
  Synthetic oligonucleotide

SEQ ID NO: 600342 - DNA, 57 bp, Artificial; identical to SEQ ID NO: 451154
  Synthetic oligonucleotide

SEQ ID NO: 600343 - DNA, 56 bp, Artificial; identical to SEQ ID NO: 19114
  Synthetic oligonucleotide

SEQ ID NO: 600344 - DNA, 53 bp, Artificial; identical to SEQ ID NO: 451161
  Synthetic oligonucleotide

SEQ ID NO: 600345 - DNA, 60 bp, Artificial; identical to SEQ ID NO: 451166
  Synthetic oligonucleotide

SEQ ID NO: 600346 - DNA, 55 bp, Artificial; identical to SEQ ID NO: 451170
  Synthetic oligonucleotide

SEQ ID NO: 600347 - DNA, 60 bp, Artificial; identical to SEQ ID NO: 451171
  Synthetic oligonucleotide

SEQ ID NO: 600348 - DNA, 60 bp, Artificial; identical to SEQ ID NO: 451175
  Synthetic oligonucleotide

SEQ ID NO: 600349 - DNA, 51 bp, Artificial; identical to SEQ ID NO: 451176
  Synthetic oligonucleotide

SEQ ID NO: 600350 - DNA, 58 bp, Artificial; identical to SEQ ID NO: 451177
  Synthetic oligonucleotide

SEQ ID NO: 600351 - DNA, 54 bp, Artificial; identical to SEQ ID NO: 451179
  Synthetic oligonucleotide

SEQ ID NO: 600352 - DNA, 55 bp, Artificial; identical to SEQ ID NO: 451181
  Synthetic oligonucleotide

SEQ ID NO: 600353 - DNA, 59 bp, Artificial; identical to SEQ ID NO: 451182
  Synthetic oligonucleotide

SEQ ID NO: 600354 - DNA, 55 bp, Artificial; identical to SEQ ID NO: 451183
  Synthetic oligonucleotide

SEQ ID NO: 600355 - DNA, 55 bp, Artificial; identical to SEQ ID NO: 451185
  Synthetic oligonucleotide

SEQ ID NO: 600356 - DNA, 60 bp, Artificial; identical to SEQ ID NO: 451187
  Synthetic oligonucleotide

SEQ ID NO: 600357 - DNA, 54 bp, Artificial; identical to SEQ ID NO: 451188
  Synthetic oligonucleotide

SEQ ID NO: 600358 - DNA, 59 bp, Artificial; identical to SEQ ID NO: 451189
  Synthetic oligonucleotide

SEQ ID NO: 600359 - DNA, 58 bp, Artificial; identical to SEQ ID NO: 451191
  Synthetic oligonucleotide

SEQ ID NO: 600360 - DNA, 60 bp, Artificial; identical to SEQ ID NO: 451193
  Synthetic oligonucleotide

SEQ ID NO: 600361 - DNA, 60 bp, Artificial; identical to SEQ ID NO: 451195
  Synthetic oligonucleotide

SEQ ID NO: 600362 - DNA, 55 bp, Artificial; identical to SEQ ID NO: 451203
  Synthetic oligonucleotide

SEQ ID NO: 600363 - DNA, 55 bp, Artificial; identical to SEQ ID NO: 451204
  Synthetic oligonucleotide

SEQ ID NO: 600364 - DNA, 59 bp, Artificial; identical to SEQ ID NO: 451205
  Synthetic oligonucleotide

SEQ ID NO: 600365 - DNA, 52 bp, Artificial; identical to SEQ ID NO: 451208
  Synthetic oligonucleotide

SEQ ID NO: 600366 - DNA, 55 bp, Artificial; identical to SEQ ID NO: 451210
  Synthetic oligonucleotide

SEQ ID NO: 600367 - DNA, 60 bp, Artificial; identical to SEQ ID NO: 451212
  Synthetic oligonucleotide

SEQ ID NO: 600368 - DNA, 60 bp, Artificial; identical to SEQ ID NO: 451213
  Synthetic oligonucleotide

SEQ ID NO: 600369 - DNA, 56 bp, Artificial; identical to SEQ ID NO: 451214
  Synthetic oligonucleotide

SEQ ID NO: 600370 - DNA, 56 bp, Artificial; identical to SEQ ID NO: 451216
  Synthetic oligonucleotide

SEQ ID NO: 600371 - DNA, 56 bp, Artificial; identical to SEQ ID NO: 451217
  Synthetic oligonucleotide

SEQ ID NO: 600372 - DNA, 52 bp, Artificial; identical to SEQ ID NO: 451220
  Synthetic oligonucleotide

SEQ ID NO: 600373 - DNA, 55 bp, Artificial; identical to SEQ ID NO: 12620
  Synthetic oligonucleotide

SEQ ID NO: 600374 - DNA, 58 bp, Artificial; identical to SEQ ID NO: 451225
  Synthetic oligonucleotide

SEQ ID NO: 600375 - DNA, 60 bp, Artificial; identical to SEQ ID NO: 451229
  Synthetic oligonucleotide

SEQ ID NO: 600376 - DNA, 60 bp, Artificial; identical to SEQ ID NO: 451230
  Synthetic oligonucleotide

SEQ ID NO: 600377 - DNA, 56 bp, Artificial; identical to SEQ ID NO: 451231
  Synthetic oligonucleotide

SEQ ID NO: 600378 - DNA, 52 bp, Artificial; identical to SEQ ID NO: 451232
  Synthetic oligonucleotide

SEQ ID NO: 600379 - DNA, 60 bp, Artificial; identical to SEQ ID NO: 451234
  Synthetic oligonucleotide

SEQ ID NO: 600380 - DNA, 53 bp, Artificial; identical to SEQ ID NO: 451235
  Synthetic oligonucleotide

SEQ ID NO: 600381 - DNA, 60 bp, Artificial; identical to SEQ ID NO: 451236
  Synthetic oligonucleotide

SEQ ID NO: 600382 - DNA, 54 bp, Artificial; identical to SEQ ID NO: 451237
  Synthetic oligonucleotide

SEQ ID NO: 600383 - DNA, 59 bp, Artificial; identical to SEQ ID NO: 451239
  Synthetic oligonucleotide

SEQ ID NO: 600384 - DNA, 60 bp, Artificial; identical to SEQ ID NO: 451241
  Synthetic oligonucleotide

SEQ ID NO: 600385 - DNA, 59 bp, Artificial; identical to SEQ ID NO: 451243
  Synthetic oligonucleotide

SEQ ID NO: 600386 - DNA, 60 bp, Artificial; identical to SEQ ID NO: 451249
  Synthetic oligonucleotide

SEQ ID NO: 600387 - DNA, 59 bp, Artificial; identical to SEQ ID NO: 451253
  Synthetic oligonucleotide

SEQ ID NO: 600388 - DNA, 56 bp, Artificial; identical to SEQ ID NO: 11155
  Synthetic oligonucleotide

SEQ ID NO: 600389 - DNA, 60 bp, Artificial; identical to SEQ ID NO: 451254
  Synthetic oligonucleotide

SEQ ID NO: 600390 - DNA, 60 bp, Artificial; identical to SEQ ID NO: 451256
  Synthetic oligonucleotide

SEQ ID NO: 600391 - DNA, 59 bp, Artificial; identical to SEQ ID NO: 451257
  Synthetic oligonucleotide

SEQ ID NO: 600392 - DNA, 60 bp, Artificial; identical to SEQ ID NO: 451258
  Synthetic oligonucleotide

SEQ ID NO: 600393 - DNA, 57 bp, Artificial; identical to SEQ ID NO: 451260
  Synthetic oligonucleotide

SEQ ID NO: 600394 - DNA, 60 bp, Artificial; identical to SEQ ID NO: 451262
  Synthetic oligonucleotide

SEQ ID NO: 600395 - DNA, 53 bp, Artificial; identical to SEQ ID NO: 451266
  Synthetic oligonucleotide

SEQ ID NO: 600396 - DNA, 53 bp, Artificial; identical to SEQ ID NO: 451267
  Synthetic oligonucleotide

SEQ ID NO: 600397 - DNA, 60 bp, Artificial; identical to SEQ ID NO: 451268
  Synthetic oligonucleotide

SEQ ID NO: 600398 - DNA, 50 bp, Artificial; identical to SEQ ID NO: 451272
  Synthetic oligonucleotide

SEQ ID NO: 600399 - DNA, 50 bp, Artificial; identical to SEQ ID NO: 451273
  Synthetic oligonucleotide

SEQ ID NO: 600400 - DNA, 51 bp, Artificial; identical to SEQ ID NO: 451274
  Synthetic oligonucleotide

SEQ ID NO: 600401 - DNA, 59 bp, Artificial; identical to SEQ ID NO: 451278
  Synthetic oligonucleotide

SEQ ID NO: 600402 - DNA, 60 bp, Artificial; identical to SEQ ID NO: 451281
  Synthetic oligonucleotide

SEQ ID NO: 600403 - DNA, 59 bp, Artificial; identical to SEQ ID NO: 451283
  Synthetic oligonucleotide

SEQ ID NO: 600404 - DNA, 60 bp, Artificial; identical to SEQ ID NO: 451284
  Synthetic oligonucleotide

SEQ ID NO: 600405 - DNA, 55 bp, Artificial; identical to SEQ ID NO: 451285
  Synthetic oligonucleotide

SEQ ID NO: 600406 - DNA, 56 bp, Artificial; identical to SEQ ID NO: 8973
  Synthetic oligonucleotide

SEQ ID NO: 600407 - DNA, 51 bp, Artificial; identical to SEQ ID NO: 451287
  Synthetic oligonucleotide

SEQ ID NO: 600408 - DNA, 60 bp, Artificial; identical to SEQ ID NO: 8469
  Synthetic oligonucleotide

SEQ ID NO: 600409 - DNA, 55 bp, Artificial; identical to SEQ ID NO: 451292
  Synthetic oligonucleotide

SEQ ID NO: 600410 - DNA, 58 bp, Artificial; identical to SEQ ID NO: 451294
  Synthetic oligonucleotide

SEQ ID NO: 600411 - DNA, 55 bp, Artificial; identical to SEQ ID NO: 451297
  Synthetic oligonucleotide

SEQ ID NO: 600412 - DNA, 60 bp, Artificial; identical to SEQ ID NO: 451298
  Synthetic oligonucleotide

SEQ ID NO: 600413 - DNA, 51 bp, Artificial; identical to SEQ ID NO: 451300
  Synthetic oligonucleotide

SEQ ID NO: 600414 - DNA, 55 bp, Artificial; identical to SEQ ID NO: 451302
  Synthetic oligonucleotide

SEQ ID NO: 600415 - DNA, 58 bp, Artificial; identical to SEQ ID NO: 451303
  Synthetic oligonucleotide

SEQ ID NO: 600416 - DNA, 60 bp, Artificial; identical to SEQ ID NO: 451304
  Synthetic oligonucleotide

SEQ ID NO: 600417 - DNA, 60 bp, Artificial; identical to SEQ ID NO: 451306
  Synthetic oligonucleotide

SEQ ID NO: 600418 - DNA, 60 bp, Artificial; identical to SEQ ID NO: 451308
  Synthetic oligonucleotide

SEQ ID NO: 600419 - DNA, 59 bp, Artificial; identical to SEQ ID NO: 451309
  Synthetic oligonucleotide

SEQ ID NO: 600420 - DNA, 55 bp, Artificial; identical to SEQ ID NO: 451311
  Synthetic oligonucleotide

SEQ ID NO: 600421 - DNA, 55 bp, Artificial; identical to SEQ ID NO: 451312
  Synthetic oligonucleotide

SEQ ID NO: 600422 - DNA, 52 bp, Artificial; identical to SEQ ID NO: 451314
  Synthetic oligonucleotide

SEQ ID NO: 600423 - DNA, 60 bp, Artificial; identical to SEQ ID NO: 451315
  Synthetic oligonucleotide

SEQ ID NO: 600424 - DNA, 54 bp, Artificial; identical to SEQ ID NO: 451318
  Synthetic oligonucleotide

SEQ ID NO: 600425 - DNA, 60 bp, Artificial; identical to SEQ ID NO: 451331
  Synthetic oligonucleotide

SEQ ID NO: 600426 - DNA, 53 bp, Artificial; identical to SEQ ID NO: 451332
  Synthetic oligonucleotide

SEQ ID NO: 600427 - DNA, 58 bp, Artificial; identical to SEQ ID NO: 451333
  Synthetic oligonucleotide

SEQ ID NO: 600428 - DNA, 52 bp, Artificial; identical to SEQ ID NO: 451338
  Synthetic oligonucleotide

SEQ ID NO: 600429 - DNA, 60 bp, Artificial; identical to SEQ ID NO: 451342
  Synthetic oligonucleotide

SEQ ID NO: 600430 - DNA, 55 bp, Artificial; identical to SEQ ID NO: 451343
  Synthetic oligonucleotide

SEQ ID NO: 600431 - DNA, 55 bp, Artificial; identical to SEQ ID NO: 451344
  Synthetic oligonucleotide

SEQ ID NO: 600432 - DNA, 53 bp, Artificial; identical to SEQ ID NO: 451345
  Synthetic oligonucleotide

SEQ ID NO: 600433 - DNA, 54 bp, Artificial; identical to SEQ ID NO: 451351
  Synthetic oligonucleotide

SEQ ID NO: 600434 - DNA, 57 bp, Artificial; identical to SEQ ID NO: 451354
  Synthetic oligonucleotide

SEQ ID NO: 600435 - DNA, 51 bp, Artificial; identical to SEQ ID NO: 451355
  Synthetic oligonucleotide

SEQ ID NO: 600436 - DNA, 53 bp, Artificial; identical to SEQ ID NO: 451357
  Synthetic oligonucleotide

SEQ ID NO: 600437 - DNA, 57 bp, Artificial; identical to SEQ ID NO: 451359
  Synthetic oligonucleotide

SEQ ID NO: 600438 - DNA, 55 bp, Artificial; identical to SEQ ID NO: 451360
  Synthetic oligonucleotide

SEQ ID NO: 600439 - DNA, 55 bp, Artificial; identical to SEQ ID NO: 451361
  Synthetic oligonucleotide

SEQ ID NO: 600440 - DNA, 58 bp, Artificial; identical to SEQ ID NO: 451365
  Synthetic oligonucleotide

SEQ ID NO: 600441 - DNA, 55 bp, Artificial; identical to SEQ ID NO: 451367
  Synthetic oligonucleotide

SEQ ID NO: 600442 - DNA, 54 bp, Artificial; identical to SEQ ID NO: 451368
  Synthetic oligonucleotide

SEQ ID NO: 600443 - DNA, 57 bp, Artificial; identical to SEQ ID NO: 8990
  Synthetic oligonucleotide

SEQ ID NO: 600444 - DNA, 58 bp, Artificial; identical to SEQ ID NO: 6212
  Synthetic oligonucleotide

SEQ ID NO: 600445 - DNA, 59 bp, Artificial; identical to SEQ ID NO: 451373
  Synthetic oligonucleotide

SEQ ID NO: 600446 - DNA, 60 bp, Artificial; identical to SEQ ID NO: 14679
  Synthetic oligonucleotide

SEQ ID NO: 600447 - DNA, 54 bp, Artificial; identical to SEQ ID NO: 451379
  Synthetic oligonucleotide

SEQ ID NO: 600448 - DNA, 58 bp, Artificial; identical to SEQ ID NO: 5912
  Synthetic oligonucleotide

SEQ ID NO: 600449 - DNA, 52 bp, Artificial; identical to SEQ ID NO: 451386
  Synthetic oligonucleotide

SEQ ID NO: 600450 - DNA, 60 bp, Artificial; identical to SEQ ID NO: 451389
  Synthetic oligonucleotide

SEQ ID NO: 600451 - DNA, 54 bp, Artificial; identical to SEQ ID NO: 451390
  Synthetic oligonucleotide

SEQ ID NO: 600452 - DNA, 55 bp, Artificial; identical to SEQ ID NO: 451392
  Synthetic oligonucleotide

SEQ ID NO: 600453 - DNA, 59 bp, Artificial; identical to SEQ ID NO: 451394
  Synthetic oligonucleotide

SEQ ID NO: 600454 - DNA, 60 bp, Artificial; identical to SEQ ID NO: 451397
  Synthetic oligonucleotide

SEQ ID NO: 600455 - DNA, 60 bp, Artificial; identical to SEQ ID NO: 451399
  Synthetic oligonucleotide

SEQ ID NO: 600456 - DNA, 56 bp, Artificial; identical to SEQ ID NO: 451400
  Synthetic oligonucleotide

SEQ ID NO: 600457 - DNA, 56 bp, Artificial; identical to SEQ ID NO: 451403
  Synthetic oligonucleotide

SEQ ID NO: 600458 - DNA, 55 bp, Artificial; identical to SEQ ID NO: 451405
  Synthetic oligonucleotide

SEQ ID NO: 600459 - DNA, 49 bp, Artificial; identical to SEQ ID NO: 451406
  Synthetic oligonucleotide

SEQ ID NO: 600460 - DNA, 60 bp, Artificial; identical to SEQ ID NO: 12255
  Synthetic oligonucleotide

SEQ ID NO: 600461 - DNA, 58 bp, Artificial; identical to SEQ ID NO: 451408
  Synthetic oligonucleotide

SEQ ID NO: 600462 - DNA, 60 bp, Artificial; identical to SEQ ID NO: 451409
  Synthetic oligonucleotide

SEQ ID NO: 600463 - DNA, 58 bp, Artificial; identical to SEQ ID NO: 451411
  Synthetic oligonucleotide

SEQ ID NO: 600464 - DNA, 52 bp, Artificial; identical to SEQ ID NO: 451412
  Synthetic oligonucleotide

SEQ ID NO: 600465 - DNA, 56 bp, Artificial; identical to SEQ ID NO: 451414
  Synthetic oligonucleotide

SEQ ID NO: 600466 - DNA, 60 bp, Artificial; identical to SEQ ID NO: 451419
  Synthetic oligonucleotide

SEQ ID NO: 600467 - DNA, 56 bp, Artificial; identical to SEQ ID NO: 451423
  Synthetic oligonucleotide

SEQ ID NO: 600468 - DNA, 58 bp, Artificial; identical to SEQ ID NO: 451424
  Synthetic oligonucleotide

SEQ ID NO: 600469 - DNA, 54 bp, Artificial; identical to SEQ ID NO: 451425
  Synthetic oligonucleotide

SEQ ID NO: 600470 - DNA, 52 bp, Artificial; identical to SEQ ID NO: 451427
  Synthetic oligonucleotide

SEQ ID NO: 600471 - DNA, 60 bp, Artificial; identical to SEQ ID NO: 451432
  Synthetic oligonucleotide

SEQ ID NO: 600472 - DNA, 56 bp, Artificial; identical to SEQ ID NO: 451434
  Synthetic oligonucleotide

SEQ ID NO: 600473 - DNA, 59 bp, Artificial; identical to SEQ ID NO: 451437
  Synthetic oligonucleotide

SEQ ID NO: 600474 - DNA, 53 bp, Artificial; identical to SEQ ID NO: 451438
  Synthetic oligonucleotide

SEQ ID NO: 600475 - DNA, 60 bp, Artificial; identical to SEQ ID NO: 451442
  Synthetic oligonucleotide

SEQ ID NO: 600476 - DNA, 60 bp, Artificial; identical to SEQ ID NO: 451443
  Synthetic oligonucleotide

SEQ ID NO: 600477 - DNA, 58 bp, Artificial; identical to SEQ ID NO: 451445
  Synthetic oligonucleotide

SEQ ID NO: 600478 - DNA, 60 bp, Artificial; identical to SEQ ID NO: 451447
  Synthetic oligonucleotide

SEQ ID NO: 600479 - DNA, 56 bp, Artificial; identical to SEQ ID NO: 451456
  Synthetic oligonucleotide

SEQ ID NO: 600480 - DNA, 60 bp, Artificial; identical to SEQ ID NO: 451458
  Synthetic oligonucleotide

SEQ ID NO: 600481 - DNA, 60 bp, Artificial; identical to SEQ ID NO: 451459
  Synthetic oligonucleotide

SEQ ID NO: 600482 - DNA, 55 bp, Artificial; identical to SEQ ID NO: 451460
  Synthetic oligonucleotide

SEQ ID NO: 600483 - DNA, 60 bp, Artificial; identical to SEQ ID NO: 451461
  Synthetic oligonucleotide

SEQ ID NO: 600484 - DNA, 54 bp, Artificial; identical to SEQ ID NO: 451462
  Synthetic oligonucleotide

SEQ ID NO: 600485 - DNA, 60 bp, Artificial; identical to SEQ ID NO: 451464
  Synthetic oligonucleotide

SEQ ID NO: 600486 - DNA, 55 bp, Artificial; identical to SEQ ID NO: 451465
  Synthetic oligonucleotide

SEQ ID NO: 600487 - DNA, 52 bp, Artificial; identical to SEQ ID NO: 451467
  Synthetic oligonucleotide

SEQ ID NO: 600488 - DNA, 55 bp, Artificial; identical to SEQ ID NO: 451468
  Synthetic oligonucleotide

SEQ ID NO: 600489 - DNA, 60 bp, Artificial; identical to SEQ ID NO: 451471
  Synthetic oligonucleotide

SEQ ID NO: 600490 - DNA, 53 bp, Artificial; identical to SEQ ID NO: 451472
  Synthetic oligonucleotide

SEQ ID NO: 600491 - DNA, 51 bp, Artificial; identical to SEQ ID NO: 451473
  Synthetic oligonucleotide

SEQ ID NO: 600492 - DNA, 60 bp, Artificial; identical to SEQ ID NO: 451476
  Synthetic oligonucleotide

SEQ ID NO: 600493 - DNA, 60 bp, Artificial; identical to SEQ ID NO: 451477
  Synthetic oligonucleotide

SEQ ID NO: 600494 - DNA, 60 bp, Artificial; identical to SEQ ID NO: 451478
  Synthetic oligonucleotide

SEQ ID NO: 600495 - DNA, 60 bp, Artificial; identical to SEQ ID NO: 451479
  Synthetic oligonucleotide

SEQ ID NO: 600496 - DNA, 60 bp, Artificial; identical to SEQ ID NO: 451480
  Synthetic oligonucleotide

SEQ ID NO: 600497 - DNA, 52 bp, Artificial; identical to SEQ ID NO: 451481
  Synthetic oligonucleotide

SEQ ID NO: 600498 - DNA, 51 bp, Artificial; identical to SEQ ID NO: 451485
  Synthetic oligonucleotide

SEQ ID NO: 600499 - DNA, 60 bp, Artificial; identical to SEQ ID NO: 451486
  Synthetic oligonucleotide

SEQ ID NO: 600500 - DNA, 60 bp, Artificial; identical to SEQ ID NO: 451489
  Synthetic oligonucleotide

SEQ ID NO: 600501 - DNA, 54 bp, Artificial; identical to SEQ ID NO: 451491
  Synthetic oligonucleotide

SEQ ID NO: 600502 - DNA, 60 bp, Artificial; identical to SEQ ID NO: 451496
  Synthetic oligonucleotide

SEQ ID NO: 600503 - DNA, 60 bp, Artificial; identical to SEQ ID NO: 451497
  Synthetic oligonucleotide

SEQ ID NO: 600504 - DNA, 55 bp, Artificial; identical to SEQ ID NO: 451498
  Synthetic oligonucleotide

SEQ ID NO: 600505 - DNA, 60 bp, Artificial; identical to SEQ ID NO: 451499
  Synthetic oligonucleotide

SEQ ID NO: 600506 - DNA, 60 bp, Artificial; identical to SEQ ID NO: 451500
  Synthetic oligonucleotide

SEQ ID NO: 600507 - DNA, 56 bp, Artificial; identical to SEQ ID NO: 451502
  Synthetic oligonucleotide

SEQ ID NO: 600508 - DNA, 60 bp, Artificial; identical to SEQ ID NO: 451503
  Synthetic oligonucleotide

SEQ ID NO: 600509 - DNA, 51 bp, Artificial; identical to SEQ ID NO: 451505
  Synthetic oligonucleotide

SEQ ID NO: 600510 - DNA, 58 bp, Artificial; identical to SEQ ID NO: 451506
  Synthetic oligonucleotide

SEQ ID NO: 600511 - DNA, 52 bp, Artificial; identical to SEQ ID NO: 451508
  Synthetic oligonucleotide

SEQ ID NO: 600512 - DNA, 60 bp, Artificial; identical to SEQ ID NO: 451510
  Synthetic oligonucleotide

SEQ ID NO: 600513 - DNA, 57 bp, Artificial; identical to SEQ ID NO: 451515
  Synthetic oligonucleotide

SEQ ID NO: 600514 - DNA, 60 bp, Artificial; identical to SEQ ID NO: 451516
  Synthetic oligonucleotide

SEQ ID NO: 600515 - DNA, 60 bp, Artificial; identical to SEQ ID NO: 451517
  Synthetic oligonucleotide

SEQ ID NO: 600516 - DNA, 55 bp, Artificial; identical to SEQ ID NO: 451518
  Synthetic oligonucleotide

SEQ ID NO: 600517 - DNA, 60 bp, Artificial; identical to SEQ ID NO: 7704
  Synthetic oligonucleotide

SEQ ID NO: 600518 - DNA, 55 bp, Artificial; identical to SEQ ID NO: 451519
  Synthetic oligonucleotide

SEQ ID NO: 600519 - DNA, 55 bp, Artificial; identical to SEQ ID NO: 451520
  Synthetic oligonucleotide

SEQ ID NO: 600520 - DNA, 60 bp, Artificial; identical to SEQ ID NO: 451521
  Synthetic oligonucleotide

SEQ ID NO: 600521 - DNA, 60 bp, Artificial; identical to SEQ ID NO: 451522
  Synthetic oligonucleotide

SEQ ID NO: 600522 - DNA, 51 bp, Artificial; identical to SEQ ID NO: 451527
  Synthetic oligonucleotide

SEQ ID NO: 600523 - DNA, 50 bp, Artificial; identical to SEQ ID NO: 451528
  Synthetic oligonucleotide

SEQ ID NO: 600524 - DNA, 54 bp, Artificial; identical to SEQ ID NO: 451529
  Synthetic oligonucleotide

SEQ ID NO: 600525 - DNA, 60 bp, Artificial; identical to SEQ ID NO: 451530
  Synthetic oligonucleotide

SEQ ID NO: 600526 - DNA, 55 bp, Artificial; identical to SEQ ID NO: 451532
  Synthetic oligonucleotide

SEQ ID NO: 600527 - DNA, 57 bp, Artificial; identical to SEQ ID NO: 451533
  Synthetic oligonucleotide

SEQ ID NO: 600528 - DNA, 53 bp, Artificial; identical to SEQ ID NO: 451536
  Synthetic oligonucleotide

SEQ ID NO: 600529 - DNA, 60 bp, Artificial; identical to SEQ ID NO: 451539
  Synthetic oligonucleotide

SEQ ID NO: 600530 - DNA, 59 bp, Artificial; identical to SEQ ID NO: 18255
  Synthetic oligonucleotide

SEQ ID NO: 600531 - DNA, 56 bp, Artificial; identical to SEQ ID NO: 451541
  Synthetic oligonucleotide

SEQ ID NO: 600532 - DNA, 58 bp, Artificial; identical to SEQ ID NO: 451542
  Synthetic oligonucleotide

SEQ ID NO: 600533 - DNA, 60 bp, Artificial; identical to SEQ ID NO: 451543
  Synthetic oligonucleotide

SEQ ID NO: 600534 - DNA, 60 bp, Artificial; identical to SEQ ID NO: 451545
  Synthetic oligonucleotide

SEQ ID NO: 600535 - DNA, 60 bp, Artificial; identical to SEQ ID NO: 451548
  Synthetic oligonucleotide

SEQ ID NO: 600536 - DNA, 60 bp, Artificial; identical to SEQ ID NO: 451550
  Synthetic oligonucleotide

SEQ ID NO: 600537 - DNA, 55 bp, Artificial; identical to SEQ ID NO: 451553
  Synthetic oligonucleotide

SEQ ID NO: 600538 - DNA, 56 bp, Artificial; identical to SEQ ID NO: 451554
  Synthetic oligonucleotide

SEQ ID NO: 600539 - DNA, 57 bp, Artificial; identical to SEQ ID NO: 451555
  Synthetic oligonucleotide

SEQ ID NO: 600540 - DNA, 56 bp, Artificial; identical to SEQ ID NO: 451558
  Synthetic oligonucleotide

SEQ ID NO: 600541 - DNA, 59 bp, Artificial; identical to SEQ ID NO: 451568
  Synthetic oligonucleotide

SEQ ID NO: 600542 - DNA, 56 bp, Artificial; identical to SEQ ID NO: 451572
  Synthetic oligonucleotide

SEQ ID NO: 600543 - DNA, 59 bp, Artificial; identical to SEQ ID NO: 451578
  Synthetic oligonucleotide

SEQ ID NO: 600544 - DNA, 55 bp, Artificial; identical to SEQ ID NO: 451580
  Synthetic oligonucleotide

SEQ ID NO: 600545 - DNA, 60 bp, Artificial; identical to SEQ ID NO: 451582
  Synthetic oligonucleotide

SEQ ID NO: 600546 - DNA, 55 bp, Artificial; identical to SEQ ID NO: 451583
  Synthetic oligonucleotide

SEQ ID NO: 600547 - DNA, 60 bp, Artificial; identical to SEQ ID NO: 451585
  Synthetic oligonucleotide

SEQ ID NO: 600548 - DNA, 54 bp, Artificial; identical to SEQ ID NO: 451586
  Synthetic oligonucleotide

SEQ ID NO: 600549 - DNA, 60 bp, Artificial; identical to SEQ ID NO: 9099
  Synthetic oligonucleotide

SEQ ID NO: 600550 - DNA, 60 bp, Artificial; identical to SEQ ID NO: 451587
  Synthetic oligonucleotide

SEQ ID NO: 600551 - DNA, 55 bp, Artificial; identical to SEQ ID NO: 451588
  Synthetic oligonucleotide

SEQ ID NO: 600552 - DNA, 60 bp, Artificial; identical to SEQ ID NO: 6040
  Synthetic oligonucleotide

SEQ ID NO: 600553 - DNA, 60 bp, Artificial; identical to SEQ ID NO: 451592
  Synthetic oligonucleotide

SEQ ID NO: 600554 - DNA, 60 bp, Artificial; identical to SEQ ID NO: 451593
  Synthetic oligonucleotide

SEQ ID NO: 600555 - DNA, 53 bp, Artificial; identical to SEQ ID NO: 451594
  Synthetic oligonucleotide

SEQ ID NO: 600556 - DNA, 60 bp, Artificial; identical to SEQ ID NO: 451596
  Synthetic oligonucleotide

SEQ ID NO: 600557 - DNA, 58 bp, Artificial; identical to SEQ ID NO: 451598
  Synthetic oligonucleotide

SEQ ID NO: 600558 - DNA, 60 bp, Artificial; identical to SEQ ID NO: 451599
  Synthetic oligonucleotide

SEQ ID NO: 600559 - DNA, 50 bp, Artificial; identical to SEQ ID NO: 451601
  Synthetic oligonucleotide

SEQ ID NO: 600560 - DNA, 52 bp, Artificial; identical to SEQ ID NO: 451602
  Synthetic oligonucleotide

SEQ ID NO: 600561 - DNA, 55 bp, Artificial; identical to SEQ ID NO: 451603
  Synthetic oligonucleotide

SEQ ID NO: 600562 - DNA, 60 bp, Artificial; identical to SEQ ID NO: 451605
  Synthetic oligonucleotide

SEQ ID NO: 600563 - DNA, 60 bp, Artificial; identical to SEQ ID NO: 451606
  Synthetic oligonucleotide

SEQ ID NO: 600564 - DNA, 58 bp, Artificial; identical to SEQ ID NO: 451610
  Synthetic oligonucleotide

SEQ ID NO: 600565 - DNA, 60 bp, Artificial; identical to SEQ ID NO: 451611
  Synthetic oligonucleotide

SEQ ID NO: 600566 - DNA, 55 bp, Artificial; identical to SEQ ID NO: 451612
  Synthetic oligonucleotide

SEQ ID NO: 600567 - DNA, 60 bp, Artificial; identical to SEQ ID NO: 451613
  Synthetic oligonucleotide

SEQ ID NO: 600568 - DNA, 60 bp, Artificial; identical to SEQ ID NO: 451614
  Synthetic oligonucleotide

SEQ ID NO: 600569 - DNA, 59 bp, Artificial; identical to SEQ ID NO: 451615
  Synthetic oligonucleotide

SEQ ID NO: 600570 - DNA, 53 bp, Artificial; identical to SEQ ID NO: 451618
  Synthetic oligonucleotide

SEQ ID NO: 600571 - DNA, 57 bp, Artificial; identical to SEQ ID NO: 451619
  Synthetic oligonucleotide

SEQ ID NO: 600572 - DNA, 60 bp, Artificial; identical to SEQ ID NO: 451622
  Synthetic oligonucleotide

SEQ ID NO: 600573 - DNA, 54 bp, Artificial; identical to SEQ ID NO: 451628
  Synthetic oligonucleotide

SEQ ID NO: 600574 - DNA, 55 bp, Artificial; identical to SEQ ID NO: 451629
  Synthetic oligonucleotide

SEQ ID NO: 600575 - DNA, 55 bp, Artificial; identical to SEQ ID NO: 451631
  Synthetic oligonucleotide

SEQ ID NO: 600576 - DNA, 56 bp, Artificial; identical to SEQ ID NO: 451632
  Synthetic oligonucleotide

SEQ ID NO: 600577 - DNA, 60 bp, Artificial; identical to SEQ ID NO: 451634
  Synthetic oligonucleotide

SEQ ID NO: 600578 - DNA, 56 bp, Artificial; identical to SEQ ID NO: 451636
  Synthetic oligonucleotide

SEQ ID NO: 600579 - DNA, 60 bp, Artificial; identical to SEQ ID NO: 451639
  Synthetic oligonucleotide

SEQ ID NO: 600580 - DNA, 60 bp, Artificial; identical to SEQ ID NO: 451645
  Synthetic oligonucleotide

SEQ ID NO: 600581 - DNA, 57 bp, Artificial; identical to SEQ ID NO: 451646
  Synthetic oligonucleotide

SEQ ID NO: 600582 - DNA, 60 bp, Artificial; identical to SEQ ID NO: 451648
  Synthetic oligonucleotide

SEQ ID NO: 600583 - DNA, 54 bp, Artificial; identical to SEQ ID NO: 451649
  Synthetic oligonucleotide

SEQ ID NO: 600584 - DNA, 60 bp, Artificial; identical to SEQ ID NO: 451650
  Synthetic oligonucleotide

SEQ ID NO: 600585 - DNA, 60 bp, Artificial; identical to SEQ ID NO: 451652
  Synthetic oligonucleotide

SEQ ID NO: 600586 - DNA, 60 bp, Artificial; identical to SEQ ID NO: 451653
  Synthetic oligonucleotide

SEQ ID NO: 600587 - DNA, 54 bp, Artificial; identical to SEQ ID NO: 14876
  Synthetic oligonucleotide

SEQ ID NO: 600588 - DNA, 59 bp, Artificial; identical to SEQ ID NO: 451657
  Synthetic oligonucleotide

SEQ ID NO: 600589 - DNA, 60 bp, Artificial; identical to SEQ ID NO: 451659
  Synthetic oligonucleotide

SEQ ID NO: 600590 - DNA, 50 bp, Artificial; identical to SEQ ID NO: 451663
  Synthetic oligonucleotide

SEQ ID NO: 600591 - DNA, 60 bp, Artificial; identical to SEQ ID NO: 451664
  Synthetic oligonucleotide

SEQ ID NO: 600592 - DNA, 57 bp, Artificial; identical to SEQ ID NO: 451665
  Synthetic oligonucleotide

SEQ ID NO: 600593 - DNA, 59 bp, Artificial; identical to SEQ ID NO: 451666
  Synthetic oligonucleotide

SEQ ID NO: 600594 - DNA, 58 bp, Artificial; identical to SEQ ID NO: 18014
  Synthetic oligonucleotide

SEQ ID NO: 600595 - DNA, 58 bp, Artificial; identical to SEQ ID NO: 451671
  Synthetic oligonucleotide

SEQ ID NO: 600596 - DNA, 60 bp, Artificial; identical to SEQ ID NO: 451676
  Synthetic oligonucleotide

SEQ ID NO: 600597 - DNA, 60 bp, Artificial; identical to SEQ ID NO: 451677
  Synthetic oligonucleotide

SEQ ID NO: 600598 - DNA, 52 bp, Artificial; identical to SEQ ID NO: 15564
  Synthetic oligonucleotide

SEQ ID NO: 600599 - DNA, 57 bp, Artificial; identical to SEQ ID NO: 451679
  Synthetic oligonucleotide

SEQ ID NO: 600600 - DNA, 60 bp, Artificial; identical to SEQ ID NO: 451680
  Synthetic oligonucleotide

SEQ ID NO: 600601 - DNA, 50 bp, Artificial; identical to SEQ ID NO: 451684
  Synthetic oligonucleotide

SEQ ID NO: 600602 - DNA, 52 bp, Artificial; identical to SEQ ID NO: 451687
  Synthetic oligonucleotide

SEQ ID NO: 600603 - DNA, 59 bp, Artificial; identical to SEQ ID NO: 451688
  Synthetic oligonucleotide

SEQ ID NO: 600604 - DNA, 60 bp, Artificial; identical to SEQ ID NO: 451689
  Synthetic oligonucleotide

SEQ ID NO: 600605 - DNA, 58 bp, Artificial; identical to SEQ ID NO: 451692
  Synthetic oligonucleotide

SEQ ID NO: 600606 - DNA, 57 bp, Artificial; identical to SEQ ID NO: 451697
  Synthetic oligonucleotide

SEQ ID NO: 600607 - DNA, 59 bp, Artificial; identical to SEQ ID NO: 451698
  Synthetic oligonucleotide

SEQ ID NO: 600608 - DNA, 55 bp, Artificial; identical to SEQ ID NO: 451699
  Synthetic oligonucleotide

SEQ ID NO: 600609 - DNA, 60 bp, Artificial; identical to SEQ ID NO: 451700
  Synthetic oligonucleotide

SEQ ID NO: 600610 - DNA, 60 bp, Artificial; identical to SEQ ID NO: 451702
  Synthetic oligonucleotide

SEQ ID NO: 600611 - DNA, 57 bp, Artificial; identical to SEQ ID NO: 451703
  Synthetic oligonucleotide

SEQ ID NO: 600612 - DNA, 60 bp, Artificial; identical to SEQ ID NO: 451704
  Synthetic oligonucleotide

SEQ ID NO: 600613 - DNA, 60 bp, Artificial; identical to SEQ ID NO: 451705
  Synthetic oligonucleotide

SEQ ID NO: 600614 - DNA, 59 bp, Artificial; identical to SEQ ID NO: 451714
  Synthetic oligonucleotide

SEQ ID NO: 600615 - DNA, 58 bp, Artificial; identical to SEQ ID NO: 451717
  Synthetic oligonucleotide

SEQ ID NO: 600616 - DNA, 54 bp, Artificial; identical to SEQ ID NO: 451721
  Synthetic oligonucleotide

SEQ ID NO: 600617 - DNA, 50 bp, Artificial; identical to SEQ ID NO: 451724
  Synthetic oligonucleotide

SEQ ID NO: 600618 - DNA, 60 bp, Artificial; identical to SEQ ID NO: 451725
  Synthetic oligonucleotide

SEQ ID NO: 600619 - DNA, 60 bp, Artificial; identical to SEQ ID NO: 451727
  Synthetic oligonucleotide

SEQ ID NO: 600620 - DNA, 60 bp, Artificial; identical to SEQ ID NO: 451731
  Synthetic oligonucleotide

SEQ ID NO: 600621 - DNA, 60 bp, Artificial; identical to SEQ ID NO: 451733
  Synthetic oligonucleotide

SEQ ID NO: 600622 - DNA, 53 bp, Artificial; identical to SEQ ID NO: 451735
  Synthetic oligonucleotide

SEQ ID NO: 600623 - DNA, 60 bp, Artificial; identical to SEQ ID NO: 451737
  Synthetic oligonucleotide

SEQ ID NO: 600624 - DNA, 56 bp, Artificial; identical to SEQ ID NO: 451738
  Synthetic oligonucleotide

SEQ ID NO: 600625 - DNA, 50 bp, Artificial; identical to SEQ ID NO: 451740
  Synthetic oligonucleotide

SEQ ID NO: 600626 - DNA, 57 bp, Artificial; identical to SEQ ID NO: 451744
  Synthetic oligonucleotide

SEQ ID NO: 600627 - DNA, 60 bp, Artificial; identical to SEQ ID NO: 451746
  Synthetic oligonucleotide

SEQ ID NO: 600628 - DNA, 57 bp, Artificial; identical to SEQ ID NO: 451748
  Synthetic oligonucleotide

SEQ ID NO: 600629 - DNA, 54 bp, Artificial; identical to SEQ ID NO: 451749
  Synthetic oligonucleotide

SEQ ID NO: 600630 - DNA, 51 bp, Artificial; identical to SEQ ID NO: 451752
  Synthetic oligonucleotide

SEQ ID NO: 600631 - DNA, 57 bp, Artificial; identical to SEQ ID NO: 451755
  Synthetic oligonucleotide

SEQ ID NO: 600632 - DNA, 57 bp, Artificial; identical to SEQ ID NO: 451756
  Synthetic oligonucleotide

SEQ ID NO: 600633 - DNA, 59 bp, Artificial; identical to SEQ ID NO: 451757
  Synthetic oligonucleotide

SEQ ID NO: 600634 - DNA, 60 bp, Artificial; identical to SEQ ID NO: 451758
  Synthetic oligonucleotide

SEQ ID NO: 600635 - DNA, 60 bp, Artificial; identical to SEQ ID NO: 451759
  Synthetic oligonucleotide

SEQ ID NO: 600636 - DNA, 59 bp, Artificial; identical to SEQ ID NO: 451760
  Synthetic oligonucleotide

SEQ ID NO: 600637 - DNA, 60 bp, Artificial; identical to SEQ ID NO: 10951
  Synthetic oligonucleotide

SEQ ID NO: 600638 - DNA, 60 bp, Artificial; identical to SEQ ID NO: 451761
  Synthetic oligonucleotide

SEQ ID NO: 600639 - DNA, 60 bp, Artificial; identical to SEQ ID NO: 451765
  Synthetic oligonucleotide

SEQ ID NO: 600640 - DNA, 60 bp, Artificial; identical to SEQ ID NO: 451766
  Synthetic oligonucleotide

SEQ ID NO: 600641 - DNA, 57 bp, Artificial; identical to SEQ ID NO: 451770
  Synthetic oligonucleotide

SEQ ID NO: 600642 - DNA, 60 bp, Artificial; identical to SEQ ID NO: 451773
  Synthetic oligonucleotide

SEQ ID NO: 600643 - DNA, 55 bp, Artificial; identical to SEQ ID NO: 451775
  Synthetic oligonucleotide

SEQ ID NO: 600644 - DNA, 60 bp, Artificial; identical to SEQ ID NO: 451776
  Synthetic oligonucleotide

SEQ ID NO: 600645 - DNA, 54 bp, Artificial; identical to SEQ ID NO: 451777
  Synthetic oligonucleotide

SEQ ID NO: 600646 - DNA, 55 bp, Artificial; identical to SEQ ID NO: 10512
  Synthetic oligonucleotide

SEQ ID NO: 600647 - DNA, 55 bp, Artificial; identical to SEQ ID NO: 451781
  Synthetic oligonucleotide

SEQ ID NO: 600648 - DNA, 60 bp, Artificial; identical to SEQ ID NO: 451783
  Synthetic oligonucleotide

SEQ ID NO: 600649 - DNA, 60 bp, Artificial; identical to SEQ ID NO: 451784
  Synthetic oligonucleotide

SEQ ID NO: 600650 - DNA, 52 bp, Artificial; identical to SEQ ID NO: 7618
  Synthetic oligonucleotide

SEQ ID NO: 600651 - DNA, 60 bp, Artificial; identical to SEQ ID NO: 6103
  Synthetic oligonucleotide

SEQ ID NO: 600652 - DNA, 52 bp, Artificial; identical to SEQ ID NO: 451786
  Synthetic oligonucleotide

SEQ ID NO: 600653 - DNA, 60 bp, Artificial; identical to SEQ ID NO: 451788
  Synthetic oligonucleotide

SEQ ID NO: 600654 - DNA, 56 bp, Artificial; identical to SEQ ID NO: 16030
  Synthetic oligonucleotide

SEQ ID NO: 600655 - DNA, 51 bp, Artificial; identical to SEQ ID NO: 451789
  Synthetic oligonucleotide

SEQ ID NO: 600656 - DNA, 51 bp, Artificial; identical to SEQ ID NO: 451790
  Synthetic oligonucleotide

SEQ ID NO: 600657 - DNA, 60 bp, Artificial; identical to SEQ ID NO: 451797
  Synthetic oligonucleotide

SEQ ID NO: 600658 - DNA, 59 bp, Artificial; identical to SEQ ID NO: 451799
  Synthetic oligonucleotide

SEQ ID NO: 600659 - DNA, 54 bp, Artificial; identical to SEQ ID NO: 451805
  Synthetic oligonucleotide

SEQ ID NO: 600660 - DNA, 60 bp, Artificial; identical to SEQ ID NO: 451807
  Synthetic oligonucleotide

SEQ ID NO: 600661 - DNA, 54 bp, Artificial; identical to SEQ ID NO: 451809
  Synthetic oligonucleotide

SEQ ID NO: 600662 - DNA, 55 bp, Artificial; identical to SEQ ID NO: 451811
  Synthetic oligonucleotide

SEQ ID NO: 600663 - DNA, 58 bp, Artificial; identical to SEQ ID NO: 451812
  Synthetic oligonucleotide

SEQ ID NO: 600664 - DNA, 59 bp, Artificial; identical to SEQ ID NO: 451813
  Synthetic oligonucleotide

SEQ ID NO: 600665 - DNA, 60 bp, Artificial; identical to SEQ ID NO: 451816
  Synthetic oligonucleotide

SEQ ID NO: 600666 - DNA, 60 bp, Artificial; identical to SEQ ID NO: 451820
  Synthetic oligonucleotide

SEQ ID NO: 600667 - DNA, 57 bp, Artificial; identical to SEQ ID NO: 451822
  Synthetic oligonucleotide

SEQ ID NO: 600668 - DNA, 55 bp, Artificial; identical to SEQ ID NO: 10222
  Synthetic oligonucleotide

SEQ ID NO: 600669 - DNA, 58 bp, Artificial; identical to SEQ ID NO: 451823
  Synthetic oligonucleotide

SEQ ID NO: 600670 - DNA, 54 bp, Artificial; identical to SEQ ID NO: 451824
  Synthetic oligonucleotide

SEQ ID NO: 600671 - DNA, 60 bp, Artificial; identical to SEQ ID NO: 451825
  Synthetic oligonucleotide

SEQ ID NO: 600672 - DNA, 60 bp, Artificial; identical to SEQ ID NO: 451827
  Synthetic oligonucleotide

SEQ ID NO: 600673 - DNA, 56 bp, Artificial; identical to SEQ ID NO: 451830
  Synthetic oligonucleotide

SEQ ID NO: 600674 - DNA, 58 bp, Artificial; identical to SEQ ID NO: 451831
  Synthetic oligonucleotide

SEQ ID NO: 600675 - DNA, 54 bp, Artificial; identical to SEQ ID NO: 451835
  Synthetic oligonucleotide

SEQ ID NO: 600676 - DNA, 52 bp, Artificial; identical to SEQ ID NO: 451836
  Synthetic oligonucleotide

SEQ ID NO: 600677 - DNA, 54 bp, Artificial; identical to SEQ ID NO: 451839
  Synthetic oligonucleotide

SEQ ID NO: 600678 - DNA, 60 bp, Artificial; identical to SEQ ID NO: 14959
  Synthetic oligonucleotide

SEQ ID NO: 600679 - DNA, 59 bp, Artificial; identical to SEQ ID NO: 451842
  Synthetic oligonucleotide

SEQ ID NO: 600680 - DNA, 57 bp, Artificial; identical to SEQ ID NO: 451843
  Synthetic oligonucleotide

SEQ ID NO: 600681 - DNA, 50 bp, Artificial; identical to SEQ ID NO: 451844
  Synthetic oligonucleotide

SEQ ID NO: 600682 - DNA, 60 bp, Artificial; identical to SEQ ID NO: 451847
  Synthetic oligonucleotide

SEQ ID NO: 600683 - DNA, 55 bp, Artificial; identical to SEQ ID NO: 451849
  Synthetic oligonucleotide

SEQ ID NO: 600684 - DNA, 60 bp, Artificial; identical to SEQ ID NO: 451850
  Synthetic oligonucleotide

SEQ ID NO: 600685 - DNA, 54 bp, Artificial; identical to SEQ ID NO: 451851
  Synthetic oligonucleotide

SEQ ID NO: 600686 - DNA, 60 bp, Artificial; identical to SEQ ID NO: 451853
  Synthetic oligonucleotide

SEQ ID NO: 600687 - DNA, 60 bp, Artificial; identical to SEQ ID NO: 451855
  Synthetic oligonucleotide

SEQ ID NO: 600688 - DNA, 55 bp, Artificial; identical to SEQ ID NO: 451856
  Synthetic oligonucleotide

SEQ ID NO: 600689 - DNA, 57 bp, Artificial; identical to SEQ ID NO: 451859
  Synthetic oligonucleotide

SEQ ID NO: 600690 - DNA, 60 bp, Artificial; identical to SEQ ID NO: 451862
  Synthetic oligonucleotide

SEQ ID NO: 600691 - DNA, 60 bp, Artificial; identical to SEQ ID NO: 451863
  Synthetic oligonucleotide

SEQ ID NO: 600692 - DNA, 60 bp, Artificial; identical to SEQ ID NO: 451864
  Synthetic oligonucleotide

SEQ ID NO: 600693 - DNA, 60 bp, Artificial; identical to SEQ ID NO: 451865
  Synthetic oligonucleotide

SEQ ID NO: 600694 - DNA, 56 bp, Artificial; identical to SEQ ID NO: 451869
  Synthetic oligonucleotide

SEQ ID NO: 600695 - DNA, 52 bp, Artificial; identical to SEQ ID NO: 451870
  Synthetic oligonucleotide

SEQ ID NO: 600696 - DNA, 55 bp, Artificial; identical to SEQ ID NO: 451871
  Synthetic oligonucleotide

SEQ ID NO: 600697 - DNA, 55 bp, Artificial; identical to SEQ ID NO: 451872
  Synthetic oligonucleotide

SEQ ID NO: 600698 - DNA, 52 bp, Artificial; identical to SEQ ID NO: 451873
  Synthetic oligonucleotide

SEQ ID NO: 600699 - DNA, 58 bp, Artificial; identical to SEQ ID NO: 451874
  Synthetic oligonucleotide

SEQ ID NO: 600700 - DNA, 59 bp, Artificial; identical to SEQ ID NO: 451875
  Synthetic oligonucleotide

SEQ ID NO: 600701 - DNA, 60 bp, Artificial; identical to SEQ ID NO: 451876
  Synthetic oligonucleotide

SEQ ID NO: 600702 - DNA, 60 bp, Artificial; identical to SEQ ID NO: 451877
  Synthetic oligonucleotide

SEQ ID NO: 600703 - DNA, 60 bp, Artificial; identical to SEQ ID NO: 451878
  Synthetic oligonucleotide

SEQ ID NO: 600704 - DNA, 54 bp, Artificial; identical to SEQ ID NO: 451884
  Synthetic oligonucleotide

SEQ ID NO: 600705 - DNA, 60 bp, Artificial; identical to SEQ ID NO: 451888
  Synthetic oligonucleotide

SEQ ID NO: 600706 - DNA, 60 bp, Artificial; identical to SEQ ID NO: 451889
  Synthetic oligonucleotide

SEQ ID NO: 600707 - DNA, 55 bp, Artificial; identical to SEQ ID NO: 451890
  Synthetic oligonucleotide

SEQ ID NO: 600708 - DNA, 55 bp, Artificial; identical to SEQ ID NO: 451891
  Synthetic oligonucleotide

SEQ ID NO: 600709 - DNA, 60 bp, Artificial; identical to SEQ ID NO: 451893
  Synthetic oligonucleotide

SEQ ID NO: 600710 - DNA, 56 bp, Artificial; identical to SEQ ID NO: 451894
  Synthetic oligonucleotide

SEQ ID NO: 600711 - DNA, 55 bp, Artificial; identical to SEQ ID NO: 451896
  Synthetic oligonucleotide

SEQ ID NO: 600712 - DNA, 60 bp, Artificial; identical to SEQ ID NO: 451897
  Synthetic oligonucleotide

SEQ ID NO: 600713 - DNA, 60 bp, Artificial; identical to SEQ ID NO: 15076
  Synthetic oligonucleotide

SEQ ID NO: 600714 - DNA, 58 bp, Artificial; identical to SEQ ID NO: 451898
  Synthetic oligonucleotide

SEQ ID NO: 600715 - DNA, 60 bp, Artificial; identical to SEQ ID NO: 451902
  Synthetic oligonucleotide

SEQ ID NO: 600716 - DNA, 60 bp, Artificial; identical to SEQ ID NO: 451903
  Synthetic oligonucleotide

SEQ ID NO: 600717 - DNA, 60 bp, Artificial; identical to SEQ ID NO: 451905
  Synthetic oligonucleotide

SEQ ID NO: 600718 - DNA, 53 bp, Artificial; identical to SEQ ID NO: 451906
  Synthetic oligonucleotide

SEQ ID NO: 600719 - DNA, 57 bp, Artificial; identical to SEQ ID NO: 451907
  Synthetic oligonucleotide

SEQ ID NO: 600720 - DNA, 54 bp, Artificial; identical to SEQ ID NO: 451908
  Synthetic oligonucleotide

SEQ ID NO: 600721 - DNA, 60 bp, Artificial; identical to SEQ ID NO: 451909
  Synthetic oligonucleotide

SEQ ID NO: 600722 - DNA, 53 bp, Artificial; identical to SEQ ID NO: 451910
  Synthetic oligonucleotide

SEQ ID NO: 600723 - DNA, 59 bp, Artificial; identical to SEQ ID NO: 451914
  Synthetic oligonucleotide

SEQ ID NO: 600724 - DNA, 60 bp, Artificial; identical to SEQ ID NO: 451915
  Synthetic oligonucleotide

SEQ ID NO: 600725 - DNA, 57 bp, Artificial; identical to SEQ ID NO: 451924
  Synthetic oligonucleotide

SEQ ID NO: 600726 - DNA, 60 bp, Artificial; identical to SEQ ID NO: 451925
  Synthetic oligonucleotide

SEQ ID NO: 600727 - DNA, 60 bp, Artificial; identical to SEQ ID NO: 8198
  Synthetic oligonucleotide

SEQ ID NO: 600728 - DNA, 60 bp, Artificial; identical to SEQ ID NO: 451929
  Synthetic oligonucleotide

SEQ ID NO: 600729 - DNA, 59 bp, Artificial; identical to SEQ ID NO: 451934
  Synthetic oligonucleotide

SEQ ID NO: 600730 - DNA, 60 bp, Artificial; identical to SEQ ID NO: 451938
  Synthetic oligonucleotide

SEQ ID NO: 600731 - DNA, 60 bp, Artificial; identical to SEQ ID NO: 451939
  Synthetic oligonucleotide

SEQ ID NO: 600732 - DNA, 55 bp, Artificial; identical to SEQ ID NO: 451940
  Synthetic oligonucleotide

SEQ ID NO: 600733 - DNA, 60 bp, Artificial; identical to SEQ ID NO: 451941
  Synthetic oligonucleotide

SEQ ID NO: 600734 - DNA, 60 bp, Artificial; identical to SEQ ID NO: 8336
  Synthetic oligonucleotide

SEQ ID NO: 600735 - DNA, 58 bp, Artificial; identical to SEQ ID NO: 451944
  Synthetic oligonucleotide

SEQ ID NO: 600736 - DNA, 60 bp, Artificial; identical to SEQ ID NO: 451945
  Synthetic oligonucleotide

SEQ ID NO: 600737 - DNA, 53 bp, Artificial; identical to SEQ ID NO: 451947
  Synthetic oligonucleotide

SEQ ID NO: 600738 - DNA, 60 bp, Artificial; identical to SEQ ID NO: 10263
  Synthetic oligonucleotide

SEQ ID NO: 600739 - DNA, 60 bp, Artificial; identical to SEQ ID NO: 451951
  Synthetic oligonucleotide

SEQ ID NO: 600740 - DNA, 55 bp, Artificial; identical to SEQ ID NO: 451953
  Synthetic oligonucleotide

SEQ ID NO: 600741 - DNA, 53 bp, Artificial; identical to SEQ ID NO: 451955
  Synthetic oligonucleotide

SEQ ID NO: 600742 - DNA, 53 bp, Artificial; identical to SEQ ID NO: 451960
  Synthetic oligonucleotide

SEQ ID NO: 600743 - DNA, 56 bp, Artificial; identical to SEQ ID NO: 451963
  Synthetic oligonucleotide

SEQ ID NO: 600744 - DNA, 53 bp, Artificial; identical to SEQ ID NO: 451964
  Synthetic oligonucleotide

SEQ ID NO: 600745 - DNA, 55 bp, Artificial; identical to SEQ ID NO: 451967
  Synthetic oligonucleotide

SEQ ID NO: 600746 - DNA, 55 bp, Artificial; identical to SEQ ID NO: 451970
  Synthetic oligonucleotide

SEQ ID NO: 600747 - DNA, 57 bp, Artificial; identical to SEQ ID NO: 451977
  Synthetic oligonucleotide

SEQ ID NO: 600748 - DNA, 53 bp, Artificial; identical to SEQ ID NO: 451978
  Synthetic oligonucleotide

SEQ ID NO: 600749 - DNA, 58 bp, Artificial; identical to SEQ ID NO: 451979
  Synthetic oligonucleotide

SEQ ID NO: 600750 - DNA, 58 bp, Artificial; identical to SEQ ID NO: 451981
  Synthetic oligonucleotide

SEQ ID NO: 600751 - DNA, 60 bp, Artificial; identical to SEQ ID NO: 451983
  Synthetic oligonucleotide

SEQ ID NO: 600752 - DNA, 58 bp, Artificial; identical to SEQ ID NO: 451988
  Synthetic oligonucleotide

SEQ ID NO: 600753 - DNA, 55 bp, Artificial; identical to SEQ ID NO: 451989
  Synthetic oligonucleotide

SEQ ID NO: 600754 - DNA, 50 bp, Artificial; identical to SEQ ID NO: 451990
  Synthetic oligonucleotide

SEQ ID NO: 600755 - DNA, 50 bp, Artificial; identical to SEQ ID NO: 451998
  Synthetic oligonucleotide

SEQ ID NO: 600756 - DNA, 51 bp, Artificial; identical to SEQ ID NO: 451999
  Synthetic oligonucleotide

SEQ ID NO: 600757 - DNA, 60 bp, Artificial; identical to SEQ ID NO: 12660
  Synthetic oligonucleotide

SEQ ID NO: 600758 - DNA, 58 bp, Artificial; identical to SEQ ID NO: 452002
  Synthetic oligonucleotide

SEQ ID NO: 600759 - DNA, 51 bp, Artificial; identical to SEQ ID NO: 452009
  Synthetic oligonucleotide

SEQ ID NO: 600760 - DNA, 58 bp, Artificial; identical to SEQ ID NO: 17748
  Synthetic oligonucleotide

SEQ ID NO: 600761 - DNA, 55 bp, Artificial; identical to SEQ ID NO: 452011
  Synthetic oligonucleotide

SEQ ID NO: 600762 - DNA, 60 bp, Artificial; identical to SEQ ID NO: 452014
  Synthetic oligonucleotide

SEQ ID NO: 600763 - DNA, 55 bp, Artificial; identical to SEQ ID NO: 452016
  Synthetic oligonucleotide

SEQ ID NO: 600764 - DNA, 56 bp, Artificial; identical to SEQ ID NO: 6398
  Synthetic oligonucleotide

SEQ ID NO: 600765 - DNA, 52 bp, Artificial; identical to SEQ ID NO: 452017
  Synthetic oligonucleotide

SEQ ID NO: 600766 - DNA, 55 bp, Artificial; identical to SEQ ID NO: 452020
  Synthetic oligonucleotide

SEQ ID NO: 600767 - DNA, 50 bp, Artificial; identical to SEQ ID NO: 452022
  Synthetic oligonucleotide

SEQ ID NO: 600768 - DNA, 58 bp, Artificial; identical to SEQ ID NO: 452024
  Synthetic oligonucleotide

SEQ ID NO: 600769 - DNA, 57 bp, Artificial; identical to SEQ ID NO: 452027
  Synthetic oligonucleotide

SEQ ID NO: 600770 - DNA, 51 bp, Artificial; identical to SEQ ID NO: 452029
  Synthetic oligonucleotide

SEQ ID NO: 600771 - DNA, 60 bp, Artificial; identical to SEQ ID NO: 452031
  Synthetic oligonucleotide

SEQ ID NO: 600772 - DNA, 58 bp, Artificial; identical to SEQ ID NO: 452032
  Synthetic oligonucleotide

SEQ ID NO: 600773 - DNA, 59 bp, Artificial; identical to SEQ ID NO: 17853
  Synthetic oligonucleotide

SEQ ID NO: 600774 - DNA, 60 bp, Artificial; identical to SEQ ID NO: 452034
  Synthetic oligonucleotide

SEQ ID NO: 600775 - DNA, 59 bp, Artificial; identical to SEQ ID NO: 452036
  Synthetic oligonucleotide

SEQ ID NO: 600776 - DNA, 60 bp, Artificial; identical to SEQ ID NO: 452037
  Synthetic oligonucleotide

SEQ ID NO: 600777 - DNA, 60 bp, Artificial; identical to SEQ ID NO: 452039
  Synthetic oligonucleotide

SEQ ID NO: 600778 - DNA, 55 bp, Artificial; identical to SEQ ID NO: 452040
  Synthetic oligonucleotide

SEQ ID NO: 600779 - DNA, 58 bp, Artificial; identical to SEQ ID NO: 452043
  Synthetic oligonucleotide

SEQ ID NO: 600780 - DNA, 58 bp, Artificial; identical to SEQ ID NO: 452045
  Synthetic oligonucleotide

SEQ ID NO: 600781 - DNA, 54 bp, Artificial; identical to SEQ ID NO: 452046
  Synthetic oligonucleotide

SEQ ID NO: 600782 - DNA, 59 bp, Artificial; identical to SEQ ID NO: 452047
  Synthetic oligonucleotide

SEQ ID NO: 600783 - DNA, 60 bp, Artificial; identical to SEQ ID NO: 452048
  Synthetic oligonucleotide

SEQ ID NO: 600784 - DNA, 60 bp, Artificial; identical to SEQ ID NO: 452050
  Synthetic oligonucleotide

SEQ ID NO: 600785 - DNA, 58 bp, Artificial; identical to SEQ ID NO: 452051
  Synthetic oligonucleotide

SEQ ID NO: 600786 - DNA, 60 bp, Artificial; identical to SEQ ID NO: 452052
  Synthetic oligonucleotide

SEQ ID NO: 600787 - DNA, 53 bp, Artificial; identical to SEQ ID NO: 452055
  Synthetic oligonucleotide

SEQ ID NO: 600788 - DNA, 60 bp, Artificial; identical to SEQ ID NO: 452057
  Synthetic oligonucleotide

SEQ ID NO: 600789 - DNA, 60 bp, Artificial; identical to SEQ ID NO: 452059
  Synthetic oligonucleotide

SEQ ID NO: 600790 - DNA, 59 bp, Artificial; identical to SEQ ID NO: 452064
  Synthetic oligonucleotide

SEQ ID NO: 600791 - DNA, 56 bp, Artificial; identical to SEQ ID NO: 452066
  Synthetic oligonucleotide

SEQ ID NO: 600792 - DNA, 55 bp, Artificial; identical to SEQ ID NO: 15945
  Synthetic oligonucleotide

SEQ ID NO: 600793 - DNA, 58 bp, Artificial; identical to SEQ ID NO: 452068
  Synthetic oligonucleotide

SEQ ID NO: 600794 - DNA, 58 bp, Artificial; identical to SEQ ID NO: 452071
  Synthetic oligonucleotide

SEQ ID NO: 600795 - DNA, 59 bp, Artificial; identical to SEQ ID NO: 452072
  Synthetic oligonucleotide

SEQ ID NO: 600796 - DNA, 58 bp, Artificial; identical to SEQ ID NO: 452074
  Synthetic oligonucleotide

SEQ ID NO: 600797 - DNA, 60 bp, Artificial; identical to SEQ ID NO: 452082
  Synthetic oligonucleotide

SEQ ID NO: 600798 - DNA, 55 bp, Artificial; identical to SEQ ID NO: 452085
  Synthetic oligonucleotide

SEQ ID NO: 600799 - DNA, 57 bp, Artificial; identical to SEQ ID NO: 452086
  Synthetic oligonucleotide

SEQ ID NO: 600800 - DNA, 57 bp, Artificial; identical to SEQ ID NO: 452088
  Synthetic oligonucleotide

SEQ ID NO: 600801 - DNA, 54 bp, Artificial; identical to SEQ ID NO: 452096
  Synthetic oligonucleotide

SEQ ID NO: 600802 - DNA, 60 bp, Artificial; identical to SEQ ID NO: 452097
  Synthetic oligonucleotide

SEQ ID NO: 600803 - DNA, 55 bp, Artificial; identical to SEQ ID NO: 452098
  Synthetic oligonucleotide

SEQ ID NO: 600804 - DNA, 56 bp, Artificial; identical to SEQ ID NO: 452100
  Synthetic oligonucleotide

SEQ ID NO: 600805 - DNA, 60 bp, Artificial; identical to SEQ ID NO: 452103
  Synthetic oligonucleotide

SEQ ID NO: 600806 - DNA, 54 bp, Artificial; identical to SEQ ID NO: 452108
  Synthetic oligonucleotide

SEQ ID NO: 600807 - DNA, 55 bp, Artificial; identical to SEQ ID NO: 452109
  Synthetic oligonucleotide

SEQ ID NO: 600808 - DNA, 60 bp, Artificial; identical to SEQ ID NO: 452111
  Synthetic oligonucleotide

SEQ ID NO: 600809 - DNA, 57 bp, Artificial; identical to SEQ ID NO: 452112
  Synthetic oligonucleotide

SEQ ID NO: 600810 - DNA, 60 bp, Artificial; identical to SEQ ID NO: 452113
  Synthetic oligonucleotide

SEQ ID NO: 600811 - DNA, 57 bp, Artificial; identical to SEQ ID NO: 452115
  Synthetic oligonucleotide

SEQ ID NO: 600812 - DNA, 51 bp, Artificial; identical to SEQ ID NO: 13481
  Synthetic oligonucleotide

SEQ ID NO: 600813 - DNA, 52 bp, Artificial; identical to SEQ ID NO: 452116
  Synthetic oligonucleotide

SEQ ID NO: 600814 - DNA, 51 bp, Artificial; identical to SEQ ID NO: 452120
  Synthetic oligonucleotide

SEQ ID NO: 600815 - DNA, 56 bp, Artificial; identical to SEQ ID NO: 452121
  Synthetic oligonucleotide

SEQ ID NO: 600816 - DNA, 56 bp, Artificial; identical to SEQ ID NO: 452123
  Synthetic oligonucleotide

SEQ ID NO: 600817 - DNA, 60 bp, Artificial; identical to SEQ ID NO: 452125
  Synthetic oligonucleotide

SEQ ID NO: 600818 - DNA, 57 bp, Artificial; identical to SEQ ID NO: 452126
  Synthetic oligonucleotide

SEQ ID NO: 600819 - DNA, 57 bp, Artificial; identical to SEQ ID NO: 452128
  Synthetic oligonucleotide

SEQ ID NO: 600820 - DNA, 60 bp, Artificial; identical to SEQ ID NO: 452129
  Synthetic oligonucleotide

SEQ ID NO: 600821 - DNA, 55 bp, Artificial; identical to SEQ ID NO: 452130
  Synthetic oligonucleotide

SEQ ID NO: 600822 - DNA, 57 bp, Artificial; identical to SEQ ID NO: 19319
  Synthetic oligonucleotide

SEQ ID NO: 600823 - DNA, 52 bp, Artificial; identical to SEQ ID NO: 452131
  Synthetic oligonucleotide

SEQ ID NO: 600824 - DNA, 50 bp, Artificial; identical to SEQ ID NO: 452133
  Synthetic oligonucleotide

SEQ ID NO: 600825 - DNA, 55 bp, Artificial; identical to SEQ ID NO: 452134
  Synthetic oligonucleotide

SEQ ID NO: 600826 - DNA, 60 bp, Artificial; identical to SEQ ID NO: 452135
  Synthetic oligonucleotide

SEQ ID NO: 600827 - DNA, 55 bp, Artificial; identical to SEQ ID NO: 452137
  Synthetic oligonucleotide

SEQ ID NO: 600828 - DNA, 50 bp, Artificial; identical to SEQ ID NO: 452139
  Synthetic oligonucleotide

SEQ ID NO: 600829 - DNA, 56 bp, Artificial; identical to SEQ ID NO: 452142
  Synthetic oligonucleotide

SEQ ID NO: 600830 - DNA, 60 bp, Artificial; identical to SEQ ID NO: 452145
  Synthetic oligonucleotide

SEQ ID NO: 600831 - DNA, 55 bp, Artificial; identical to SEQ ID NO: 452147
  Synthetic oligonucleotide

SEQ ID NO: 600832 - DNA, 60 bp, Artificial; identical to SEQ ID NO: 452148
  Synthetic oligonucleotide

SEQ ID NO: 600833 - DNA, 57 bp, Artificial; identical to SEQ ID NO: 452153
  Synthetic oligonucleotide

SEQ ID NO: 600834 - DNA, 51 bp, Artificial; identical to SEQ ID NO: 452155
  Synthetic oligonucleotide

SEQ ID NO: 600835 - DNA, 55 bp, Artificial; identical to SEQ ID NO: 452159
  Synthetic oligonucleotide

SEQ ID NO: 600836 - DNA, 55 bp, Artificial; identical to SEQ ID NO: 452163
  Synthetic oligonucleotide

SEQ ID NO: 600837 - DNA, 60 bp, Artificial; identical to SEQ ID NO: 452165
  Synthetic oligonucleotide

SEQ ID NO: 600838 - DNA, 53 bp, Artificial; identical to SEQ ID NO: 452169
  Synthetic oligonucleotide

SEQ ID NO: 600839 - DNA, 60 bp, Artificial; identical to SEQ ID NO: 452172
  Synthetic oligonucleotide

SEQ ID NO: 600840 - DNA, 60 bp, Artificial; identical to SEQ ID NO: 452174
  Synthetic oligonucleotide

SEQ ID NO: 600841 - DNA, 60 bp, Artificial; identical to SEQ ID NO: 452185
  Synthetic oligonucleotide

SEQ ID NO: 600842 - DNA, 55 bp, Artificial; identical to SEQ ID NO: 452188
  Synthetic oligonucleotide

SEQ ID NO: 600843 - DNA, 55 bp, Artificial; identical to SEQ ID NO: 452192
  Synthetic oligonucleotide

SEQ ID NO: 600844 - DNA, 60 bp, Artificial; identical to SEQ ID NO: 452193
  Synthetic oligonucleotide

SEQ ID NO: 600845 - DNA, 60 bp, Artificial; identical to SEQ ID NO: 452196
  Synthetic oligonucleotide

SEQ ID NO: 600846 - DNA, 60 bp, Artificial; identical to SEQ ID NO: 452200
  Synthetic oligonucleotide

SEQ ID NO: 600847 - DNA, 58 bp, Artificial; identical to SEQ ID NO: 452202
  Synthetic oligonucleotide

SEQ ID NO: 600848 - DNA, 60 bp, Artificial; identical to SEQ ID NO: 452204
  Synthetic oligonucleotide

SEQ ID NO: 600849 - DNA, 60 bp, Artificial; identical to SEQ ID NO: 452208
  Synthetic oligonucleotide

SEQ ID NO: 600850 - DNA, 53 bp, Artificial; identical to SEQ ID NO: 452210
  Synthetic oligonucleotide

SEQ ID NO: 600851 - DNA, 51 bp, Artificial; identical to SEQ ID NO: 452214
  Synthetic oligonucleotide

SEQ ID NO: 600852 - DNA, 60 bp, Artificial; identical to SEQ ID NO: 452217
  Synthetic oligonucleotide

SEQ ID NO: 600853 - DNA, 57 bp, Artificial; identical to SEQ ID NO: 12952
  Synthetic oligonucleotide

SEQ ID NO: 600854 - DNA, 55 bp, Artificial; identical to SEQ ID NO: 452218
  Synthetic oligonucleotide

SEQ ID NO: 600855 - DNA, 60 bp, Artificial; identical to SEQ ID NO: 452220
  Synthetic oligonucleotide

SEQ ID NO: 600856 - DNA, 59 bp, Artificial; identical to SEQ ID NO: 452222
  Synthetic oligonucleotide

SEQ ID NO: 600857 - DNA, 60 bp, Artificial; identical to SEQ ID NO: 452225
  Synthetic oligonucleotide

SEQ ID NO: 600858 - DNA, 60 bp, Artificial; identical to SEQ ID NO: 452228
  Synthetic oligonucleotide

SEQ ID NO: 600859 - DNA, 60 bp, Artificial; identical to SEQ ID NO: 452232
  Synthetic oligonucleotide

SEQ ID NO: 600860 - DNA, 59 bp, Artificial; identical to SEQ ID NO: 452233
  Synthetic oligonucleotide

SEQ ID NO: 600861 - DNA, 54 bp, Artificial; identical to SEQ ID NO: 452236
  Synthetic oligonucleotide

SEQ ID NO: 600862 - DNA, 55 bp, Artificial; identical to SEQ ID NO: 452239
  Synthetic oligonucleotide

SEQ ID NO: 600863 - DNA, 54 bp, Artificial; identical to SEQ ID NO: 452240
  Synthetic oligonucleotide

SEQ ID NO: 600864 - DNA, 53 bp, Artificial; identical to SEQ ID NO: 452246
  Synthetic oligonucleotide

SEQ ID NO: 600865 - DNA, 55 bp, Artificial; identical to SEQ ID NO: 452248
  Synthetic oligonucleotide

SEQ ID NO: 600866 - DNA, 55 bp, Artificial; identical to SEQ ID NO: 452250
  Synthetic oligonucleotide

SEQ ID NO: 600867 - DNA, 55 bp, Artificial; identical to SEQ ID NO: 452252
  Synthetic oligonucleotide

SEQ ID NO: 600868 - DNA, 58 bp, Artificial; identical to SEQ ID NO: 452253
  Synthetic oligonucleotide

SEQ ID NO: 600869 - DNA, 60 bp, Artificial; identical to SEQ ID NO: 452255
  Synthetic oligonucleotide

SEQ ID NO: 600870 - DNA, 60 bp, Artificial; identical to SEQ ID NO: 452256
  Synthetic oligonucleotide

SEQ ID NO: 600871 - DNA, 54 bp, Artificial; identical to SEQ ID NO: 452257
  Synthetic oligonucleotide

SEQ ID NO: 600872 - DNA, 53 bp, Artificial; identical to SEQ ID NO: 452261
  Synthetic oligonucleotide

SEQ ID NO: 600873 - DNA, 54 bp, Artificial; identical to SEQ ID NO: 175
  Synthetic oligonucleotide

SEQ ID NO: 600874 - DNA, 60 bp, Artificial; identical to SEQ ID NO: 452262
  Synthetic oligonucleotide

SEQ ID NO: 600875 - DNA, 55 bp, Artificial; identical to SEQ ID NO: 452263
  Synthetic oligonucleotide

SEQ ID NO: 600876 - DNA, 52 bp, Artificial; identical to SEQ ID NO: 452266
  Synthetic oligonucleotide

SEQ ID NO: 600877 - DNA, 60 bp, Artificial; identical to SEQ ID NO: 452267
  Synthetic oligonucleotide

SEQ ID NO: 600878 - DNA, 52 bp, Artificial; identical to SEQ ID NO: 452269
  Synthetic oligonucleotide

SEQ ID NO: 600879 - DNA, 55 bp, Artificial; identical to SEQ ID NO: 452276
  Synthetic oligonucleotide

SEQ ID NO: 600880 - DNA, 55 bp, Artificial; identical to SEQ ID NO: 452279
  Synthetic oligonucleotide

SEQ ID NO: 600881 - DNA, 60 bp, Artificial; identical to SEQ ID NO: 452283
  Synthetic oligonucleotide

SEQ ID NO: 600882 - DNA, 55 bp, Artificial; identical to SEQ ID NO: 452284
  Synthetic oligonucleotide

SEQ ID NO: 600883 - DNA, 52 bp, Artificial; identical to SEQ ID NO: 452287
  Synthetic oligonucleotide

SEQ ID NO: 600884 - DNA, 57 bp, Artificial; identical to SEQ ID NO: 452288
  Synthetic oligonucleotide

SEQ ID NO: 600885 - DNA, 55 bp, Artificial; identical to SEQ ID NO: 452291
  Synthetic oligonucleotide

SEQ ID NO: 600886 - DNA, 60 bp, Artificial; identical to SEQ ID NO: 452292
  Synthetic oligonucleotide

SEQ ID NO: 600887 - DNA, 59 bp, Artificial; identical to SEQ ID NO: 452293
  Synthetic oligonucleotide

SEQ ID NO: 600888 - DNA, 53 bp, Artificial; identical to SEQ ID NO: 452294
  Synthetic oligonucleotide

SEQ ID NO: 600889 - DNA, 60 bp, Artificial; identical to SEQ ID NO: 452295
  Synthetic oligonucleotide

SEQ ID NO: 600890 - DNA, 60 bp, Artificial; identical to SEQ ID NO: 452297
  Synthetic oligonucleotide

SEQ ID NO: 600891 - DNA, 60 bp, Artificial; identical to SEQ ID NO: 452299
  Synthetic oligonucleotide

SEQ ID NO: 600892 - DNA, 60 bp, Artificial; identical to SEQ ID NO: 452300
  Synthetic oligonucleotide

SEQ ID NO: 600893 - DNA, 58 bp, Artificial; identical to SEQ ID NO: 452301
  Synthetic oligonucleotide

SEQ ID NO: 600894 - DNA, 52 bp, Artificial; identical to SEQ ID NO: 452302
  Synthetic oligonucleotide

SEQ ID NO: 600895 - DNA, 53 bp, Artificial; identical to SEQ ID NO: 452303
  Synthetic oligonucleotide

SEQ ID NO: 600896 - DNA, 60 bp, Artificial; identical to SEQ ID NO: 452305
  Synthetic oligonucleotide

SEQ ID NO: 600897 - DNA, 51 bp, Artificial; identical to SEQ ID NO: 452306
  Synthetic oligonucleotide

SEQ ID NO: 600898 - DNA, 60 bp, Artificial; identical to SEQ ID NO: 452307
  Synthetic oligonucleotide

SEQ ID NO: 600899 - DNA, 56 bp, Artificial; identical to SEQ ID NO: 452308
  Synthetic oligonucleotide

SEQ ID NO: 600900 - DNA, 56 bp, Artificial; identical to SEQ ID NO: 452309
  Synthetic oligonucleotide

SEQ ID NO: 600901 - DNA, 58 bp, Artificial; identical to SEQ ID NO: 452311
  Synthetic oligonucleotide

SEQ ID NO: 600902 - DNA, 58 bp, Artificial; identical to SEQ ID NO: 452312
  Synthetic oligonucleotide

SEQ ID NO: 600903 - DNA, 60 bp, Artificial; identical to SEQ ID NO: 452314
  Synthetic oligonucleotide

SEQ ID NO: 600904 - DNA, 55 bp, Artificial; identical to SEQ ID NO: 452318
  Synthetic oligonucleotide

SEQ ID NO: 600905 - DNA, 58 bp, Artificial; identical to SEQ ID NO: 452319
  Synthetic oligonucleotide

SEQ ID NO: 600906 - DNA, 54 bp, Artificial; identical to SEQ ID NO: 452323
  Synthetic oligonucleotide

SEQ ID NO: 600907 - DNA, 60 bp, Artificial; identical to SEQ ID NO: 10860
  Synthetic oligonucleotide

SEQ ID NO: 600908 - DNA, 59 bp, Artificial; identical to SEQ ID NO: 10634
  Synthetic oligonucleotide

SEQ ID NO: 600909 - DNA, 52 bp, Artificial; identical to SEQ ID NO: 452329
  Synthetic oligonucleotide

SEQ ID NO: 600910 - DNA, 59 bp, Artificial; identical to SEQ ID NO: 452330
  Synthetic oligonucleotide

SEQ ID NO: 600911 - DNA, 60 bp, Artificial; identical to SEQ ID NO: 452331
  Synthetic oligonucleotide

SEQ ID NO: 600912 - DNA, 56 bp, Artificial; identical to SEQ ID NO: 452337
  Synthetic oligonucleotide

SEQ ID NO: 600913 - DNA, 60 bp, Artificial; identical to SEQ ID NO: 452339
  Synthetic oligonucleotide

SEQ ID NO: 600914 - DNA, 60 bp, Artificial; identical to SEQ ID NO: 452340
  Synthetic oligonucleotide

SEQ ID NO: 600915 - DNA, 55 bp, Artificial; identical to SEQ ID NO: 452341
  Synthetic oligonucleotide

SEQ ID NO: 600916 - DNA, 55 bp, Artificial; identical to SEQ ID NO: 452342
  Synthetic oligonucleotide

SEQ ID NO: 600917 - DNA, 60 bp, Artificial; identical to SEQ ID NO: 23177
  Synthetic oligonucleotide

SEQ ID NO: 600918 - DNA, 50 bp, Artificial; identical to SEQ ID NO: 452343
  Synthetic oligonucleotide

SEQ ID NO: 600919 - DNA, 54 bp, Artificial; identical to SEQ ID NO: 20340
  Synthetic oligonucleotide

SEQ ID NO: 600920 - DNA, 58 bp, Artificial; identical to SEQ ID NO: 452346
  Synthetic oligonucleotide

SEQ ID NO: 600921 - DNA, 55 bp, Artificial; identical to SEQ ID NO: 452347
  Synthetic oligonucleotide

SEQ ID NO: 600922 - DNA, 57 bp, Artificial; identical to SEQ ID NO: 452348
  Synthetic oligonucleotide

SEQ ID NO: 600923 - DNA, 59 bp, Artificial; identical to SEQ ID NO: 452350
  Synthetic oligonucleotide

SEQ ID NO: 600924 - DNA, 55 bp, Artificial; identical to SEQ ID NO: 452356
  Synthetic oligonucleotide

SEQ ID NO: 600925 - DNA, 56 bp, Artificial; identical to SEQ ID NO: 452358
  Synthetic oligonucleotide

SEQ ID NO: 600926 - DNA, 55 bp, Artificial; identical to SEQ ID NO: 452359
  Synthetic oligonucleotide

SEQ ID NO: 600927 - DNA, 60 bp, Artificial; identical to SEQ ID NO: 452363
  Synthetic oligonucleotide

SEQ ID NO: 600928 - DNA, 59 bp, Artificial; identical to SEQ ID NO: 13184
  Synthetic oligonucleotide

SEQ ID NO: 600929 - DNA, 55 bp, Artificial; identical to SEQ ID NO: 452365
  Synthetic oligonucleotide

SEQ ID NO: 600930 - DNA, 60 bp, Artificial; identical to SEQ ID NO: 452369
  Synthetic oligonucleotide

SEQ ID NO: 600931 - DNA, 60 bp, Artificial; identical to SEQ ID NO: 452370
  Synthetic oligonucleotide

SEQ ID NO: 600932 - DNA, 54 bp, Artificial; identical to SEQ ID NO: 452373
  Synthetic oligonucleotide

SEQ ID NO: 600933 - DNA, 57 bp, Artificial; identical to SEQ ID NO: 452378
  Synthetic oligonucleotide

SEQ ID NO: 600934 - DNA, 55 bp, Artificial; identical to SEQ ID NO: 452380
  Synthetic oligonucleotide

SEQ ID NO: 600935 - DNA, 55 bp, Artificial; identical to SEQ ID NO: 452382
  Synthetic oligonucleotide

SEQ ID NO: 600936 - DNA, 60 bp, Artificial; identical to SEQ ID NO: 452384
  Synthetic oligonucleotide

SEQ ID NO: 600937 - DNA, 56 bp, Artificial; identical to SEQ ID NO: 452385
  Synthetic oligonucleotide

SEQ ID NO: 600938 - DNA, 60 bp, Artificial; identical to SEQ ID NO: 452386
  Synthetic oligonucleotide

SEQ ID NO: 600939 - DNA, 60 bp, Artificial; identical to SEQ ID NO: 452387
  Synthetic oligonucleotide

SEQ ID NO: 600940 - DNA, 60 bp, Artificial; identical to SEQ ID NO: 452388
  Synthetic oligonucleotide

SEQ ID NO: 600941 - DNA, 60 bp, Artificial; identical to SEQ ID NO: 452389
  Synthetic oligonucleotide

SEQ ID NO: 600942 - DNA, 58 bp, Artificial; identical to SEQ ID NO: 452390
  Synthetic oligonucleotide

SEQ ID NO: 600943 - DNA, 55 bp, Artificial; identical to SEQ ID NO: 452391
  Synthetic oligonucleotide

SEQ ID NO: 600944 - DNA, 60 bp, Artificial; identical to SEQ ID NO: 452394
  Synthetic oligonucleotide

SEQ ID NO: 600945 - DNA, 60 bp, Artificial; identical to SEQ ID NO: 452396
  Synthetic oligonucleotide

SEQ ID NO: 600946 - DNA, 60 bp, Artificial; identical to SEQ ID NO: 452399
  Synthetic oligonucleotide

SEQ ID NO: 600947 - DNA, 50 bp, Artificial; identical to SEQ ID NO: 452400
  Synthetic oligonucleotide

SEQ ID NO: 600948 - DNA, 60 bp, Artificial; identical to SEQ ID NO: 452405
  Synthetic oligonucleotide

SEQ ID NO: 600949 - DNA, 60 bp, Artificial; identical to SEQ ID NO: 452406
  Synthetic oligonucleotide

SEQ ID NO: 600950 - DNA, 50 bp, Artificial; identical to SEQ ID NO: 452408
  Synthetic oligonucleotide

SEQ ID NO: 600951 - DNA, 60 bp, Artificial; identical to SEQ ID NO: 10532
  Synthetic oligonucleotide

SEQ ID NO: 600952 - DNA, 59 bp, Artificial; identical to SEQ ID NO: 452409
  Synthetic oligonucleotide

SEQ ID NO: 600953 - DNA, 60 bp, Artificial; identical to SEQ ID NO: 452411
  Synthetic oligonucleotide

SEQ ID NO: 600954 - DNA, 55 bp, Artificial; identical to SEQ ID NO: 452413
  Synthetic oligonucleotide

SEQ ID NO: 600955 - DNA, 59 bp, Artificial; identical to SEQ ID NO: 452414
  Synthetic oligonucleotide

SEQ ID NO: 600956 - DNA, 60 bp, Artificial; identical to SEQ ID NO: 452422
  Synthetic oligonucleotide

SEQ ID NO: 600957 - DNA, 55 bp, Artificial; identical to SEQ ID NO: 452424
  Synthetic oligonucleotide

SEQ ID NO: 600958 - DNA, 55 bp, Artificial; identical to SEQ ID NO: 452425
  Synthetic oligonucleotide

SEQ ID NO: 600959 - DNA, 60 bp, Artificial; identical to SEQ ID NO: 452433
  Synthetic oligonucleotide

SEQ ID NO: 600960 - DNA, 60 bp, Artificial; identical to SEQ ID NO: 79145
  Synthetic oligonucleotide

SEQ ID NO: 600961 - DNA, 60 bp, Artificial; identical to SEQ ID NO: 452435
  Synthetic oligonucleotide

SEQ ID NO: 600962 - DNA, 55 bp, Artificial; identical to SEQ ID NO: 452436
  Synthetic oligonucleotide

SEQ ID NO: 600963 - DNA, 56 bp, Artificial; identical to SEQ ID NO: 452437
  Synthetic oligonucleotide

SEQ ID NO: 600964 - DNA, 58 bp, Artificial; identical to SEQ ID NO: 16422
  Synthetic oligonucleotide

SEQ ID NO: 600965 - DNA, 60 bp, Artificial; identical to SEQ ID NO: 452440
  Synthetic oligonucleotide

SEQ ID NO: 600966 - DNA, 60 bp, Artificial; identical to SEQ ID NO: 452441
  Synthetic oligonucleotide

SEQ ID NO: 600967 - DNA, 60 bp, Artificial; identical to SEQ ID NO: 452442
  Synthetic oligonucleotide

SEQ ID NO: 600968 - DNA, 55 bp, Artificial; identical to SEQ ID NO: 452448
  Synthetic oligonucleotide

SEQ ID NO: 600969 - DNA, 54 bp, Artificial; identical to SEQ ID NO: 452449
  Synthetic oligonucleotide

SEQ ID NO: 600970 - DNA, 55 bp, Artificial; identical to SEQ ID NO: 452452
  Synthetic oligonucleotide

SEQ ID NO: 600971 - DNA, 50 bp, Artificial; identical to SEQ ID NO: 452457
  Synthetic oligonucleotide

SEQ ID NO: 600972 - DNA, 55 bp, Artificial; identical to SEQ ID NO: 452458
  Synthetic oligonucleotide

SEQ ID NO: 600973 - DNA, 59 bp, Artificial; identical to SEQ ID NO: 452459
  Synthetic oligonucleotide

SEQ ID NO: 600974 - DNA, 58 bp, Artificial; identical to SEQ ID NO: 452460
  Synthetic oligonucleotide

SEQ ID NO: 600975 - DNA, 60 bp, Artificial; identical to SEQ ID NO: 452462
  Synthetic oligonucleotide

SEQ ID NO: 600976 - DNA, 60 bp, Artificial; identical to SEQ ID NO: 452464
  Synthetic oligonucleotide

SEQ ID NO: 600977 - DNA, 51 bp, Artificial; identical to SEQ ID NO: 452466
  Synthetic oligonucleotide

SEQ ID NO: 600978 - DNA, 55 bp, Artificial; identical to SEQ ID NO: 452467
  Synthetic oligonucleotide

SEQ ID NO: 600979 - DNA, 52 bp, Artificial; identical to SEQ ID NO: 452468
  Synthetic oligonucleotide

SEQ ID NO: 600980 - DNA, 53 bp, Artificial; identical to SEQ ID NO: 452472
  Synthetic oligonucleotide

SEQ ID NO: 600981 - DNA, 60 bp, Artificial; identical to SEQ ID NO: 452476
  Synthetic oligonucleotide

SEQ ID NO: 600982 - DNA, 58 bp, Artificial; identical to SEQ ID NO: 452477
  Synthetic oligonucleotide

SEQ ID NO: 600983 - DNA, 60 bp, Artificial; identical to SEQ ID NO: 452480
  Synthetic oligonucleotide

SEQ ID NO: 600984 - DNA, 57 bp, Artificial; identical to SEQ ID NO: 452483
  Synthetic oligonucleotide

SEQ ID NO: 600985 - DNA, 60 bp, Artificial; identical to SEQ ID NO: 452487
  Synthetic oligonucleotide

SEQ ID NO: 600986 - DNA, 51 bp, Artificial; identical to SEQ ID NO: 452488
  Synthetic oligonucleotide

SEQ ID NO: 600987 - DNA, 54 bp, Artificial; identical to SEQ ID NO: 452494
  Synthetic oligonucleotide

SEQ ID NO: 600988 - DNA, 55 bp, Artificial; identical to SEQ ID NO: 452495
  Synthetic oligonucleotide

SEQ ID NO: 600989 - DNA, 59 bp, Artificial; identical to SEQ ID NO: 452497
  Synthetic oligonucleotide

SEQ ID NO: 600990 - DNA, 51 bp, Artificial; identical to SEQ ID NO: 452498
  Synthetic oligonucleotide

SEQ ID NO: 600991 - DNA, 50 bp, Artificial; identical to SEQ ID NO: 452500
  Synthetic oligonucleotide

SEQ ID NO: 600992 - DNA, 57 bp, Artificial; identical to SEQ ID NO: 452503
  Synthetic oligonucleotide

SEQ ID NO: 600993 - DNA, 50 bp, Artificial; identical to SEQ ID NO: 452510
  Synthetic oligonucleotide

SEQ ID NO: 600994 - DNA, 56 bp, Artificial; identical to SEQ ID NO: 452516
  Synthetic oligonucleotide

SEQ ID NO: 600995 - DNA, 56 bp, Artificial; identical to SEQ ID NO: 452517
  Synthetic oligonucleotide

SEQ ID NO: 600996 - DNA, 58 bp, Artificial; identical to SEQ ID NO: 452518
  Synthetic oligonucleotide

SEQ ID NO: 600997 - DNA, 55 bp, Artificial; identical to SEQ ID NO: 452519
  Synthetic oligonucleotide

SEQ ID NO: 600998 - DNA, 60 bp, Artificial; identical to SEQ ID NO: 452523
  Synthetic oligonucleotide

SEQ ID NO: 600999 - DNA, 57 bp, Artificial; identical to SEQ ID NO: 452524
  Synthetic oligonucleotide

SEQ ID NO: 601000 - DNA, 60 bp, Artificial; identical to SEQ ID NO: 452526
  Synthetic oligonucleotide

SEQ ID NO: 601001 - DNA, 60 bp, Artificial; identical to SEQ ID NO: 7466
  Synthetic oligonucleotide

SEQ ID NO: 601002 - DNA, 57 bp, Artificial; identical to SEQ ID NO: 18795
  Synthetic oligonucleotide

SEQ ID NO: 601003 - DNA, 51 bp, Artificial; identical to SEQ ID NO: 452530
  Synthetic oligonucleotide

SEQ ID NO: 601004 - DNA, 54 bp, Artificial; identical to SEQ ID NO: 452532
  Synthetic oligonucleotide

SEQ ID NO: 601005 - DNA, 60 bp, Artificial; identical to SEQ ID NO: 452533
  Synthetic oligonucleotide

SEQ ID NO: 601006 - DNA, 57 bp, Artificial; identical to SEQ ID NO: 452534
  Synthetic oligonucleotide

SEQ ID NO: 601007 - DNA, 50 bp, Artificial; identical to SEQ ID NO: 452536
  Synthetic oligonucleotide

SEQ ID NO: 601008 - DNA, 60 bp, Artificial; identical to SEQ ID NO: 452537
  Synthetic oligonucleotide

SEQ ID NO: 601009 - DNA, 58 bp, Artificial; identical to SEQ ID NO: 452538
  Synthetic oligonucleotide

SEQ ID NO: 601010 - DNA, 55 bp, Artificial; identical to SEQ ID NO: 452540
  Synthetic oligonucleotide

SEQ ID NO: 601011 - DNA, 54 bp, Artificial; identical to SEQ ID NO: 452541
  Synthetic oligonucleotide

SEQ ID NO: 601012 - DNA, 60 bp, Artificial; identical to SEQ ID NO: 452547
  Synthetic oligonucleotide

SEQ ID NO: 601013 - DNA, 54 bp, Artificial; identical to SEQ ID NO: 452548
  Synthetic oligonucleotide

SEQ ID NO: 601014 - DNA, 60 bp, Artificial; identical to SEQ ID NO: 452549
  Synthetic oligonucleotide

SEQ ID NO: 601015 - DNA, 59 bp, Artificial; identical to SEQ ID NO: 452550
  Synthetic oligonucleotide

SEQ ID NO: 601016 - DNA, 58 bp, Artificial; identical to SEQ ID NO: 452551
  Synthetic oligonucleotide

SEQ ID NO: 601017 - DNA, 51 bp, Artificial; identical to SEQ ID NO: 452553
  Synthetic oligonucleotide

SEQ ID NO: 601018 - DNA, 60 bp, Artificial; identical to SEQ ID NO: 452554
  Synthetic oligonucleotide

SEQ ID NO: 601019 - DNA, 56 bp, Artificial; identical to SEQ ID NO: 452555
  Synthetic oligonucleotide

SEQ ID NO: 601020 - DNA, 59 bp, Artificial; identical to SEQ ID NO: 452556
  Synthetic oligonucleotide

SEQ ID NO: 601021 - DNA, 60 bp, Artificial; identical to SEQ ID NO: 452557
  Synthetic oligonucleotide

SEQ ID NO: 601022 - DNA, 57 bp, Artificial; identical to SEQ ID NO: 452558
  Synthetic oligonucleotide

SEQ ID NO: 601023 - DNA, 60 bp, Artificial; identical to SEQ ID NO: 452561
  Synthetic oligonucleotide

SEQ ID NO: 601024 - DNA, 59 bp, Artificial; identical to SEQ ID NO: 452562
  Synthetic oligonucleotide

SEQ ID NO: 601025 - DNA, 55 bp, Artificial; identical to SEQ ID NO: 452564
  Synthetic oligonucleotide

SEQ ID NO: 601026 - DNA, 50 bp, Artificial; identical to SEQ ID NO: 452565
  Synthetic oligonucleotide

SEQ ID NO: 601027 - DNA, 60 bp, Artificial; identical to SEQ ID NO: 452566
  Synthetic oligonucleotide

SEQ ID NO: 601028 - DNA, 59 bp, Artificial; identical to SEQ ID NO: 7684
  Synthetic oligonucleotide

SEQ ID NO: 601029 - DNA, 56 bp, Artificial; identical to SEQ ID NO: 452570
  Synthetic oligonucleotide

SEQ ID NO: 601030 - DNA, 58 bp, Artificial; identical to SEQ ID NO: 452571
  Synthetic oligonucleotide

SEQ ID NO: 601031 - DNA, 55 bp, Artificial; identical to SEQ ID NO: 452573
  Synthetic oligonucleotide

SEQ ID NO: 601032 - DNA, 45 bp, Artificial; identical to SEQ ID NO: 452574
  Synthetic oligonucleotide

SEQ ID NO: 601033 - DNA, 53 bp, Artificial; identical to SEQ ID NO: 452575
  Synthetic oligonucleotide

SEQ ID NO: 601034 - DNA, 56 bp, Artificial; identical to SEQ ID NO: 16932
  Synthetic oligonucleotide

SEQ ID NO: 601035 - DNA, 51 bp, Artificial; identical to SEQ ID NO: 452576
  Synthetic oligonucleotide

SEQ ID NO: 601036 - DNA, 59 bp, Artificial; identical to SEQ ID NO: 452577
  Synthetic oligonucleotide

SEQ ID NO: 601037 - DNA, 60 bp, Artificial; identical to SEQ ID NO: 452581
  Synthetic oligonucleotide

SEQ ID NO: 601038 - DNA, 58 bp, Artificial; identical to SEQ ID NO: 452582
  Synthetic oligonucleotide

SEQ ID NO: 601039 - DNA, 60 bp, Artificial; identical to SEQ ID NO: 452583
  Synthetic oligonucleotide

SEQ ID NO: 601040 - DNA, 53 bp, Artificial; identical to SEQ ID NO: 452584
  Synthetic oligonucleotide

SEQ ID NO: 601041 - DNA, 59 bp, Artificial; identical to SEQ ID NO: 452585
  Synthetic oligonucleotide

SEQ ID NO: 601042 - DNA, 60 bp, Artificial; identical to SEQ ID NO: 452587
  Synthetic oligonucleotide

SEQ ID NO: 601043 - DNA, 51 bp, Artificial; identical to SEQ ID NO: 452588
  Synthetic oligonucleotide

SEQ ID NO: 601044 - DNA, 59 bp, Artificial; identical to SEQ ID NO: 452592
  Synthetic oligonucleotide

SEQ ID NO: 601045 - DNA, 58 bp, Artificial; identical to SEQ ID NO: 452600
  Synthetic oligonucleotide

SEQ ID NO: 601046 - DNA, 58 bp, Artificial; identical to SEQ ID NO: 452601
  Synthetic oligonucleotide

SEQ ID NO: 601047 - DNA, 51 bp, Artificial; identical to SEQ ID NO: 452603
  Synthetic oligonucleotide

SEQ ID NO: 601048 - DNA, 53 bp, Artificial; identical to SEQ ID NO: 452604
  Synthetic oligonucleotide

SEQ ID NO: 601049 - DNA, 56 bp, Artificial; identical to SEQ ID NO: 452607
  Synthetic oligonucleotide

SEQ ID NO: 601050 - DNA, 55 bp, Artificial; identical to SEQ ID NO: 452608
  Synthetic oligonucleotide

SEQ ID NO: 601051 - DNA, 53 bp, Artificial; identical to SEQ ID NO: 452609
  Synthetic oligonucleotide

SEQ ID NO: 601052 - DNA, 55 bp, Artificial; identical to SEQ ID NO: 452611
  Synthetic oligonucleotide

SEQ ID NO: 601053 - DNA, 59 bp, Artificial; identical to SEQ ID NO: 452612
  Synthetic oligonucleotide

SEQ ID NO: 601054 - DNA, 58 bp, Artificial; identical to SEQ ID NO: 452615
  Synthetic oligonucleotide

SEQ ID NO: 601055 - DNA, 58 bp, Artificial; identical to SEQ ID NO: 452623
  Synthetic oligonucleotide

SEQ ID NO: 601056 - DNA, 59 bp, Artificial; identical to SEQ ID NO: 18633
  Synthetic oligonucleotide

SEQ ID NO: 601057 - DNA, 57 bp, Artificial; identical to SEQ ID NO: 452626
  Synthetic oligonucleotide

SEQ ID NO: 601058 - DNA, 55 bp, Artificial; identical to SEQ ID NO: 452627
  Synthetic oligonucleotide

SEQ ID NO: 601059 - DNA, 50 bp, Artificial; identical to SEQ ID NO: 452628
  Synthetic oligonucleotide

SEQ ID NO: 601060 - DNA, 54 bp, Artificial; identical to SEQ ID NO: 452630
  Synthetic oligonucleotide

SEQ ID NO: 601061 - DNA, 53 bp, Artificial; identical to SEQ ID NO: 452631
  Synthetic oligonucleotide

SEQ ID NO: 601062 - DNA, 60 bp, Artificial; identical to SEQ ID NO: 452633
  Synthetic oligonucleotide

SEQ ID NO: 601063 - DNA, 51 bp, Artificial; identical to SEQ ID NO: 452635
  Synthetic oligonucleotide

SEQ ID NO: 601064 - DNA, 55 bp, Artificial; identical to SEQ ID NO: 452636
  Synthetic oligonucleotide

SEQ ID NO: 601065 - DNA, 53 bp, Artificial; identical to SEQ ID NO: 452642
  Synthetic oligonucleotide

SEQ ID NO: 601066 - DNA, 60 bp, Artificial; identical to SEQ ID NO: 452643
  Synthetic oligonucleotide

SEQ ID NO: 601067 - DNA, 60 bp, Artificial; identical to SEQ ID NO: 452644
  Synthetic oligonucleotide

SEQ ID NO: 601068 - DNA, 58 bp, Artificial; identical to SEQ ID NO: 452651
  Synthetic oligonucleotide

SEQ ID NO: 601069 - DNA, 59 bp, Artificial; identical to SEQ ID NO: 452655
  Synthetic oligonucleotide

SEQ ID NO: 601070 - DNA, 58 bp, Artificial; identical to SEQ ID NO: 452656
  Synthetic oligonucleotide

SEQ ID NO: 601071 - DNA, 60 bp, Artificial; identical to SEQ ID NO: 109198
  Synthetic oligonucleotide

SEQ ID NO: 601072 - DNA, 59 bp, Artificial; identical to SEQ ID NO: 452660
  Synthetic oligonucleotide

SEQ ID NO: 601073 - DNA, 55 bp, Artificial; identical to SEQ ID NO: 452667
  Synthetic oligonucleotide

SEQ ID NO: 601074 - DNA, 60 bp, Artificial; identical to SEQ ID NO: 452668
  Synthetic oligonucleotide

SEQ ID NO: 601075 - DNA, 54 bp, Artificial; identical to SEQ ID NO: 452669
  Synthetic oligonucleotide

SEQ ID NO: 601076 - DNA, 52 bp, Artificial; identical to SEQ ID NO: 452671
  Synthetic oligonucleotide

SEQ ID NO: 601077 - DNA, 59 bp, Artificial; identical to SEQ ID NO: 452675
  Synthetic oligonucleotide

SEQ ID NO: 601078 - DNA, 56 bp, Artificial; identical to SEQ ID NO: 452679
  Synthetic oligonucleotide

SEQ ID NO: 601079 - DNA, 60 bp, Artificial; identical to SEQ ID NO: 13739
  Synthetic oligonucleotide

SEQ ID NO: 601080 - DNA, 52 bp, Artificial; identical to SEQ ID NO: 452685
  Synthetic oligonucleotide

SEQ ID NO: 601081 - DNA, 60 bp, Artificial; identical to SEQ ID NO: 452686
  Synthetic oligonucleotide

SEQ ID NO: 601082 - DNA, 55 bp, Artificial; identical to SEQ ID NO: 452689
  Synthetic oligonucleotide

SEQ ID NO: 601083 - DNA, 60 bp, Artificial; identical to SEQ ID NO: 452690
  Synthetic oligonucleotide

SEQ ID NO: 601084 - DNA, 60 bp, Artificial; identical to SEQ ID NO: 452691
  Synthetic oligonucleotide

SEQ ID NO: 601085 - DNA, 60 bp, Artificial; identical to SEQ ID NO: 452695
  Synthetic oligonucleotide

SEQ ID NO: 601086 - DNA, 54 bp, Artificial; identical to SEQ ID NO: 16116
  Synthetic oligonucleotide

SEQ ID NO: 601087 - DNA, 53 bp, Artificial; identical to SEQ ID NO: 452698
  Synthetic oligonucleotide

SEQ ID NO: 601088 - DNA, 60 bp, Artificial; identical to SEQ ID NO: 452699
  Synthetic oligonucleotide

SEQ ID NO: 601089 - DNA, 50 bp, Artificial; identical to SEQ ID NO: 452702
  Synthetic oligonucleotide

SEQ ID NO: 601090 - DNA, 60 bp, Artificial; identical to SEQ ID NO: 12011
  Synthetic oligonucleotide

SEQ ID NO: 601091 - DNA, 60 bp, Artificial; identical to SEQ ID NO: 452704
  Synthetic oligonucleotide

SEQ ID NO: 601092 - DNA, 60 bp, Artificial; identical to SEQ ID NO: 452706
  Synthetic oligonucleotide

SEQ ID NO: 601093 - DNA, 53 bp, Artificial; identical to SEQ ID NO: 452707
  Synthetic oligonucleotide

SEQ ID NO: 601094 - DNA, 56 bp, Artificial; identical to SEQ ID NO: 452709
  Synthetic oligonucleotide

SEQ ID NO: 601095 - DNA, 53 bp, Artificial; identical to SEQ ID NO: 452714
  Synthetic oligonucleotide

SEQ ID NO: 601096 - DNA, 60 bp, Artificial; identical to SEQ ID NO: 452716
  Synthetic oligonucleotide

SEQ ID NO: 601097 - DNA, 57 bp, Artificial; identical to SEQ ID NO: 452718
  Synthetic oligonucleotide

SEQ ID NO: 601098 - DNA, 60 bp, Artificial; identical to SEQ ID NO: 452724
  Synthetic oligonucleotide

SEQ ID NO: 601099 - DNA, 60 bp, Artificial; identical to SEQ ID NO: 452726
  Synthetic oligonucleotide

SEQ ID NO: 601100 - DNA, 50 bp, Artificial; identical to SEQ ID NO: 452727
  Synthetic oligonucleotide

SEQ ID NO: 601101 - DNA, 57 bp, Artificial; identical to SEQ ID NO: 452729
  Synthetic oligonucleotide

SEQ ID NO: 601102 - DNA, 55 bp, Artificial; identical to SEQ ID NO: 452732
  Synthetic oligonucleotide

SEQ ID NO: 601103 - DNA, 59 bp, Artificial; identical to SEQ ID NO: 452738
  Synthetic oligonucleotide

SEQ ID NO: 601104 - DNA, 58 bp, Artificial; identical to SEQ ID NO: 452739
  Synthetic oligonucleotide

SEQ ID NO: 601105 - DNA, 58 bp, Artificial; identical to SEQ ID NO: 452740
  Synthetic oligonucleotide

SEQ ID NO: 601106 - DNA, 58 bp, Artificial; identical to SEQ ID NO: 452741
  Synthetic oligonucleotide

SEQ ID NO: 601107 - DNA, 60 bp, Artificial; identical to SEQ ID NO: 452742
  Synthetic oligonucleotide

SEQ ID NO: 601108 - DNA, 60 bp, Artificial; identical to SEQ ID NO: 452744
  Synthetic oligonucleotide

SEQ ID NO: 601109 - DNA, 55 bp, Artificial; identical to SEQ ID NO: 452745
  Synthetic oligonucleotide

SEQ ID NO: 601110 - DNA, 57 bp, Artificial; identical to SEQ ID NO: 452747
  Synthetic oligonucleotide

SEQ ID NO: 601111 - DNA, 59 bp, Artificial; identical to SEQ ID NO: 452748
  Synthetic oligonucleotide

SEQ ID NO: 601112 - DNA, 59 bp, Artificial; identical to SEQ ID NO: 19181
  Synthetic oligonucleotide

SEQ ID NO: 601113 - DNA, 60 bp, Artificial; identical to SEQ ID NO: 11810
  Synthetic oligonucleotide

SEQ ID NO: 601114 - DNA, 59 bp, Artificial; identical to SEQ ID NO: 452755
  Synthetic oligonucleotide

SEQ ID NO: 601115 - DNA, 60 bp, Artificial; identical to SEQ ID NO: 452756
  Synthetic oligonucleotide

SEQ ID NO: 601116 - DNA, 56 bp, Artificial; identical to SEQ ID NO: 452758
  Synthetic oligonucleotide

SEQ ID NO: 601117 - DNA, 56 bp, Artificial; identical to SEQ ID NO: 452759
  Synthetic oligonucleotide

SEQ ID NO: 601118 - DNA, 57 bp, Artificial; identical to SEQ ID NO: 452760
  Synthetic oligonucleotide

SEQ ID NO: 601119 - DNA, 60 bp, Artificial; identical to SEQ ID NO: 452761
  Synthetic oligonucleotide

SEQ ID NO: 601120 - DNA, 53 bp, Artificial; identical to SEQ ID NO: 452763
  Synthetic oligonucleotide

SEQ ID NO: 601121 - DNA, 55 bp, Artificial; identical to SEQ ID NO: 452764
  Synthetic oligonucleotide

SEQ ID NO: 601122 - DNA, 59 bp, Artificial; identical to SEQ ID NO: 452765
  Synthetic oligonucleotide

SEQ ID NO: 601123 - DNA, 52 bp, Artificial; identical to SEQ ID NO: 452766
  Synthetic oligonucleotide

SEQ ID NO: 601124 - DNA, 50 bp, Artificial; identical to SEQ ID NO: 452768
  Synthetic oligonucleotide

SEQ ID NO: 601125 - DNA, 58 bp, Artificial; identical to SEQ ID NO: 452769
  Synthetic oligonucleotide

SEQ ID NO: 601126 - DNA, 54 bp, Artificial; identical to SEQ ID NO: 452770
  Synthetic oligonucleotide

SEQ ID NO: 601127 - DNA, 56 bp, Artificial; identical to SEQ ID NO: 452773
  Synthetic oligonucleotide

SEQ ID NO: 601128 - DNA, 55 bp, Artificial; identical to SEQ ID NO: 452774
  Synthetic oligonucleotide

SEQ ID NO: 601129 - DNA, 53 bp, Artificial; identical to SEQ ID NO: 452775
  Synthetic oligonucleotide

SEQ ID NO: 601130 - DNA, 60 bp, Artificial; identical to SEQ ID NO: 452776
  Synthetic oligonucleotide

SEQ ID NO: 601131 - DNA, 55 bp, Artificial; identical to SEQ ID NO: 452778
  Synthetic oligonucleotide

SEQ ID NO: 601132 - DNA, 52 bp, Artificial; identical to SEQ ID NO: 452781
  Synthetic oligonucleotide

SEQ ID NO: 601133 - DNA, 60 bp, Artificial; identical to SEQ ID NO: 452783
  Synthetic oligonucleotide

SEQ ID NO: 601134 - DNA, 60 bp, Artificial; identical to SEQ ID NO: 452785
  Synthetic oligonucleotide

SEQ ID NO: 601135 - DNA, 55 bp, Artificial; identical to SEQ ID NO: 452791
  Synthetic oligonucleotide

SEQ ID NO: 601136 - DNA, 60 bp, Artificial; identical to SEQ ID NO: 452793
  Synthetic oligonucleotide

SEQ ID NO: 601137 - DNA, 60 bp, Artificial; identical to SEQ ID NO: 452799
  Synthetic oligonucleotide

SEQ ID NO: 601138 - DNA, 56 bp, Artificial; identical to SEQ ID NO: 452801
  Synthetic oligonucleotide

SEQ ID NO: 601139 - DNA, 60 bp, Artificial; identical to SEQ ID NO: 452802
  Synthetic oligonucleotide

SEQ ID NO: 601140 - DNA, 58 bp, Artificial; identical to SEQ ID NO: 452803
  Synthetic oligonucleotide

SEQ ID NO: 601141 - DNA, 58 bp, Artificial; identical to SEQ ID NO: 452805
  Synthetic oligonucleotide

SEQ ID NO: 601142 - DNA, 59 bp, Artificial; identical to SEQ ID NO: 452807
  Synthetic oligonucleotide

SEQ ID NO: 601143 - DNA, 60 bp, Artificial; identical to SEQ ID NO: 452808
  Synthetic oligonucleotide

SEQ ID NO: 601144 - DNA, 60 bp, Artificial; identical to SEQ ID NO: 13367
  Synthetic oligonucleotide

SEQ ID NO: 601145 - DNA, 59 bp, Artificial; identical to SEQ ID NO: 452810
  Synthetic oligonucleotide

SEQ ID NO: 601146 - DNA, 54 bp, Artificial; identical to SEQ ID NO: 11820
  Synthetic oligonucleotide

SEQ ID NO: 601147 - DNA, 57 bp, Artificial; identical to SEQ ID NO: 452811
  Synthetic oligonucleotide

SEQ ID NO: 601148 - DNA, 51 bp, Artificial; identical to SEQ ID NO: 452813
  Synthetic oligonucleotide

SEQ ID NO: 601149 - DNA, 57 bp, Artificial; identical to SEQ ID NO: 452814
  Synthetic oligonucleotide

SEQ ID NO: 601150 - DNA, 60 bp, Artificial; identical to SEQ ID NO: 452817
  Synthetic oligonucleotide

SEQ ID NO: 601151 - DNA, 53 bp, Artificial; identical to SEQ ID NO: 452819
  Synthetic oligonucleotide

SEQ ID NO: 601152 - DNA, 56 bp, Artificial; identical to SEQ ID NO: 17746
  Synthetic oligonucleotide

SEQ ID NO: 601153 - DNA, 60 bp, Artificial; identical to SEQ ID NO: 9917
  Synthetic oligonucleotide

SEQ ID NO: 601154 - DNA, 56 bp, Artificial; identical to SEQ ID NO: 452824
  Synthetic oligonucleotide

SEQ ID NO: 601155 - DNA, 60 bp, Artificial; identical to SEQ ID NO: 452825
  Synthetic oligonucleotide

SEQ ID NO: 601156 - DNA, 50 bp, Artificial; identical to SEQ ID NO: 452827
  Synthetic oligonucleotide

SEQ ID NO: 601157 - DNA, 55 bp, Artificial; identical to SEQ ID NO: 452831
  Synthetic oligonucleotide

SEQ ID NO: 601158 - DNA, 60 bp, Artificial; identical to SEQ ID NO: 14633
  Synthetic oligonucleotide

SEQ ID NO: 601159 - DNA, 60 bp, Artificial; identical to SEQ ID NO: 452832
  Synthetic oligonucleotide

SEQ ID NO: 601160 - DNA, 59 bp, Artificial; identical to SEQ ID NO: 452833
  Synthetic oligonucleotide

SEQ ID NO: 601161 - DNA, 60 bp, Artificial; identical to SEQ ID NO: 452834
  Synthetic oligonucleotide

SEQ ID NO: 601162 - DNA, 55 bp, Artificial; identical to SEQ ID NO: 10688
  Synthetic oligonucleotide

SEQ ID NO: 601163 - DNA, 60 bp, Artificial; identical to SEQ ID NO: 452840
  Synthetic oligonucleotide

SEQ ID NO: 601164 - DNA, 60 bp, Artificial; identical to SEQ ID NO: 255
  Synthetic oligonucleotide

SEQ ID NO: 601165 - DNA, 59 bp, Artificial; identical to SEQ ID NO: 452841
  Synthetic oligonucleotide

SEQ ID NO: 601166 - DNA, 60 bp, Artificial; identical to SEQ ID NO: 452842
  Synthetic oligonucleotide

SEQ ID NO: 601167 - DNA, 54 bp, Artificial; identical to SEQ ID NO: 452843
  Synthetic oligonucleotide

SEQ ID NO: 601168 - DNA, 59 bp, Artificial; identical to SEQ ID NO: 452844
  Synthetic oligonucleotide

SEQ ID NO: 601169 - DNA, 60 bp, Artificial; identical to SEQ ID NO: 452845
  Synthetic oligonucleotide

SEQ ID NO: 601170 - DNA, 60 bp, Artificial; identical to SEQ ID NO: 452846
  Synthetic oligonucleotide

SEQ ID NO: 601171 - DNA, 60 bp, Artificial; identical to SEQ ID NO: 452847
  Synthetic oligonucleotide

SEQ ID NO: 601172 - DNA, 54 bp, Artificial; identical to SEQ ID NO: 452848
  Synthetic oligonucleotide

SEQ ID NO: 601173 - DNA, 56 bp, Artificial; identical to SEQ ID NO: 452849
  Synthetic oligonucleotide

SEQ ID NO: 601174 - DNA, 54 bp, Artificial; identical to SEQ ID NO: 452850
  Synthetic oligonucleotide

SEQ ID NO: 601175 - DNA, 56 bp, Artificial; identical to SEQ ID NO: 452851
  Synthetic oligonucleotide

SEQ ID NO: 601176 - DNA, 55 bp, Artificial; identical to SEQ ID NO: 452853
  Synthetic oligonucleotide

SEQ ID NO: 601177 - DNA, 59 bp, Artificial; identical to SEQ ID NO: 452854
  Synthetic oligonucleotide

SEQ ID NO: 601178 - DNA, 57 bp, Artificial; identical to SEQ ID NO: 452855
  Synthetic oligonucleotide

SEQ ID NO: 601179 - DNA, 56 bp, Artificial; identical to SEQ ID NO: 452857
  Synthetic oligonucleotide

SEQ ID NO: 601180 - DNA, 52 bp, Artificial; identical to SEQ ID NO: 452860
  Synthetic oligonucleotide

SEQ ID NO: 601181 - DNA, 58 bp, Artificial; identical to SEQ ID NO: 452864
  Synthetic oligonucleotide

SEQ ID NO: 601182 - DNA, 51 bp, Artificial; identical to SEQ ID NO: 452866
  Synthetic oligonucleotide

SEQ ID NO: 601183 - DNA, 60 bp, Artificial; identical to SEQ ID NO: 452873
  Synthetic oligonucleotide

SEQ ID NO: 601184 - DNA, 60 bp, Artificial; identical to SEQ ID NO: 452875
  Synthetic oligonucleotide

SEQ ID NO: 601185 - DNA, 55 bp, Artificial; identical to SEQ ID NO: 452879
  Synthetic oligonucleotide

SEQ ID NO: 601186 - DNA, 58 bp, Artificial; identical to SEQ ID NO: 452880
  Synthetic oligonucleotide

SEQ ID NO: 601187 - DNA, 59 bp, Artificial; identical to SEQ ID NO: 452881
  Synthetic oligonucleotide

SEQ ID NO: 601188 - DNA, 57 bp, Artificial; identical to SEQ ID NO: 20065
  Synthetic oligonucleotide

SEQ ID NO: 601189 - DNA, 60 bp, Artificial; identical to SEQ ID NO: 75379
  Synthetic oligonucleotide

SEQ ID NO: 601190 - DNA, 57 bp, Artificial; identical to SEQ ID NO: 452887
  Synthetic oligonucleotide

SEQ ID NO: 601191 - DNA, 60 bp, Artificial; identical to SEQ ID NO: 452888
  Synthetic oligonucleotide

SEQ ID NO: 601192 - DNA, 60 bp, Artificial; identical to SEQ ID NO: 452890
  Synthetic oligonucleotide

SEQ ID NO: 601193 - DNA, 60 bp, Artificial; identical to SEQ ID NO: 452891
  Synthetic oligonucleotide

SEQ ID NO: 601194 - DNA, 55 bp, Artificial; identical to SEQ ID NO: 452893
  Synthetic oligonucleotide

SEQ ID NO: 601195 - DNA, 60 bp, Artificial; identical to SEQ ID NO: 13094
  Synthetic oligonucleotide

SEQ ID NO: 601196 - DNA, 56 bp, Artificial; identical to SEQ ID NO: 452898
  Synthetic oligonucleotide

SEQ ID NO: 601197 - DNA, 60 bp, Artificial; identical to SEQ ID NO: 452899
  Synthetic oligonucleotide

SEQ ID NO: 601198 - DNA, 60 bp, Artificial; identical to SEQ ID NO: 452902
  Synthetic oligonucleotide

SEQ ID NO: 601199 - DNA, 55 bp, Artificial; identical to SEQ ID NO: 452903
  Synthetic oligonucleotide

SEQ ID NO: 601200 - DNA, 51 bp, Artificial; identical to SEQ ID NO: 452905
  Synthetic oligonucleotide

SEQ ID NO: 601201 - DNA, 60 bp, Artificial; identical to SEQ ID NO: 452908
  Synthetic oligonucleotide

SEQ ID NO: 601202 - DNA, 51 bp, Artificial; identical to SEQ ID NO: 452909
  Synthetic oligonucleotide

SEQ ID NO: 601203 - DNA, 52 bp, Artificial; identical to SEQ ID NO: 452910
  Synthetic oligonucleotide

SEQ ID NO: 601204 - DNA, 60 bp, Artificial; identical to SEQ ID NO: 452914
  Synthetic oligonucleotide

SEQ ID NO: 601205 - DNA, 60 bp, Artificial; identical to SEQ ID NO: 452920
  Synthetic oligonucleotide

SEQ ID NO: 601206 - DNA, 50 bp, Artificial; identical to SEQ ID NO: 452922
  Synthetic oligonucleotide

SEQ ID NO: 601207 - DNA, 60 bp, Artificial; identical to SEQ ID NO: 452925
  Synthetic oligonucleotide

SEQ ID NO: 601208 - DNA, 55 bp, Artificial; identical to SEQ ID NO: 452930
  Synthetic oligonucleotide

SEQ ID NO: 601209 - DNA, 60 bp, Artificial; identical to SEQ ID NO: 15538
  Synthetic oligonucleotide

SEQ ID NO: 601210 - DNA, 59 bp, Artificial; identical to SEQ ID NO: 452938
  Synthetic oligonucleotide

SEQ ID NO: 601211 - DNA, 60 bp, Artificial; identical to SEQ ID NO: 452939
  Synthetic oligonucleotide

SEQ ID NO: 601212 - DNA, 59 bp, Artificial; identical to SEQ ID NO: 452940
  Synthetic oligonucleotide

SEQ ID NO: 601213 - DNA, 57 bp, Artificial; identical to SEQ ID NO: 452945
  Synthetic oligonucleotide

SEQ ID NO: 601214 - DNA, 60 bp, Artificial; identical to SEQ ID NO: 452950
  Synthetic oligonucleotide

SEQ ID NO: 601215 - DNA, 55 bp, Artificial; identical to SEQ ID NO: 452951
  Synthetic oligonucleotide

SEQ ID NO: 601216 - DNA, 60 bp, Artificial; identical to SEQ ID NO: 452954
  Synthetic oligonucleotide

SEQ ID NO: 601217 - DNA, 58 bp, Artificial; identical to SEQ ID NO: 452955
  Synthetic oligonucleotide

SEQ ID NO: 601218 - DNA, 60 bp, Artificial; identical to SEQ ID NO: 5762
  Synthetic oligonucleotide

SEQ ID NO: 601219 - DNA, 57 bp, Artificial; identical to SEQ ID NO: 452956
  Synthetic oligonucleotide

SEQ ID NO: 601220 - DNA, 59 bp, Artificial; identical to SEQ ID NO: 452960
  Synthetic oligonucleotide

SEQ ID NO: 601221 - DNA, 60 bp, Artificial; identical to SEQ ID NO: 452964
  Synthetic oligonucleotide

SEQ ID NO: 601222 - DNA, 60 bp, Artificial; identical to SEQ ID NO: 12471
  Synthetic oligonucleotide

SEQ ID NO: 601223 - DNA, 55 bp, Artificial; identical to SEQ ID NO: 452968
  Synthetic oligonucleotide

SEQ ID NO: 601224 - DNA, 60 bp, Artificial; identical to SEQ ID NO: 452969
  Synthetic oligonucleotide

SEQ ID NO: 601225 - DNA, 60 bp, Artificial; identical to SEQ ID NO: 452970
  Synthetic oligonucleotide

SEQ ID NO: 601226 - DNA, 60 bp, Artificial; identical to SEQ ID NO: 452971
  Synthetic oligonucleotide

SEQ ID NO: 601227 - DNA, 55 bp, Artificial; identical to SEQ ID NO: 452975
  Synthetic oligonucleotide

SEQ ID NO: 601228 - DNA, 60 bp, Artificial; identical to SEQ ID NO: 452976
  Synthetic oligonucleotide

SEQ ID NO: 601229 - DNA, 60 bp, Artificial; identical to SEQ ID NO: 452978
  Synthetic oligonucleotide

SEQ ID NO: 601230 - DNA, 51 bp, Artificial; identical to SEQ ID NO: 452979
  Synthetic oligonucleotide

SEQ ID NO: 601231 - DNA, 53 bp, Artificial; identical to SEQ ID NO: 452983
  Synthetic oligonucleotide

SEQ ID NO: 601232 - DNA, 55 bp, Artificial; identical to SEQ ID NO: 452984
  Synthetic oligonucleotide

SEQ ID NO: 601233 - DNA, 51 bp, Artificial; identical to SEQ ID NO: 452987
  Synthetic oligonucleotide

SEQ ID NO: 601234 - DNA, 58 bp, Artificial; identical to SEQ ID NO: 452988
  Synthetic oligonucleotide

SEQ ID NO: 601235 - DNA, 56 bp, Artificial; identical to SEQ ID NO: 452991
  Synthetic oligonucleotide

SEQ ID NO: 601236 - DNA, 57 bp, Artificial; identical to SEQ ID NO: 452993
  Synthetic oligonucleotide

SEQ ID NO: 601237 - DNA, 56 bp, Artificial; identical to SEQ ID NO: 452996
  Synthetic oligonucleotide

SEQ ID NO: 601238 - DNA, 59 bp, Artificial; identical to SEQ ID NO: 452997
  Synthetic oligonucleotide

SEQ ID NO: 601239 - DNA, 51 bp, Artificial; identical to SEQ ID NO: 453000
  Synthetic oligonucleotide

SEQ ID NO: 601240 - DNA, 50 bp, Artificial; identical to SEQ ID NO: 453001
  Synthetic oligonucleotide

SEQ ID NO: 601241 - DNA, 60 bp, Artificial; identical to SEQ ID NO: 453009
  Synthetic oligonucleotide

SEQ ID NO: 601242 - DNA, 50 bp, Artificial; identical to SEQ ID NO: 453012
  Synthetic oligonucleotide

SEQ ID NO: 601243 - DNA, 60 bp, Artificial; identical to SEQ ID NO: 9014
  Synthetic oligonucleotide

SEQ ID NO: 601244 - DNA, 60 bp, Artificial; identical to SEQ ID NO: 453016
  Synthetic oligonucleotide

SEQ ID NO: 601245 - DNA, 59 bp, Artificial; identical to SEQ ID NO: 453021
  Synthetic oligonucleotide

SEQ ID NO: 601246 - DNA, 59 bp, Artificial; identical to SEQ ID NO: 453023
  Synthetic oligonucleotide

SEQ ID NO: 601247 - DNA, 59 bp, Artificial; identical to SEQ ID NO: 453026
  Synthetic oligonucleotide

SEQ ID NO: 601248 - DNA, 55 bp, Artificial; identical to SEQ ID NO: 453030
  Synthetic oligonucleotide

SEQ ID NO: 601249 - DNA, 54 bp, Artificial; identical to SEQ ID NO: 453032
  Synthetic oligonucleotide

SEQ ID NO: 601250 - DNA, 58 bp, Artificial; identical to SEQ ID NO: 453037
  Synthetic oligonucleotide

SEQ ID NO: 601251 - DNA, 56 bp, Artificial; identical to SEQ ID NO: 453040
  Synthetic oligonucleotide

SEQ ID NO: 601252 - DNA, 60 bp, Artificial; identical to SEQ ID NO: 453041
  Synthetic oligonucleotide

SEQ ID NO: 601253 - DNA, 60 bp, Artificial; identical to SEQ ID NO: 453042
  Synthetic oligonucleotide

SEQ ID NO: 601254 - DNA, 60 bp, Artificial; identical to SEQ ID NO: 8008
  Synthetic oligonucleotide

SEQ ID NO: 601255 - DNA, 53 bp, Artificial; identical to SEQ ID NO: 453050
  Synthetic oligonucleotide

SEQ ID NO: 601256 - DNA, 58 bp, Artificial; identical to SEQ ID NO: 453052
  Synthetic oligonucleotide

SEQ ID NO: 601257 - DNA, 55 bp, Artificial; identical to SEQ ID NO: 16428
  Synthetic oligonucleotide

SEQ ID NO: 601258 - DNA, 52 bp, Artificial; identical to SEQ ID NO: 453057
  Synthetic oligonucleotide

SEQ ID NO: 601259 - DNA, 59 bp, Artificial; identical to SEQ ID NO: 453061
  Synthetic oligonucleotide

SEQ ID NO: 601260 - DNA, 55 bp, Artificial; identical to SEQ ID NO: 453062
  Synthetic oligonucleotide

SEQ ID NO: 601261 - DNA, 55 bp, Artificial; identical to SEQ ID NO: 453063
  Synthetic oligonucleotide

SEQ ID NO: 601262 - DNA, 60 bp, Artificial; identical to SEQ ID NO: 453065
  Synthetic oligonucleotide

SEQ ID NO: 601263 - DNA, 60 bp, Artificial; identical to SEQ ID NO: 453067
  Synthetic oligonucleotide

SEQ ID NO: 601264 - DNA, 54 bp, Artificial; identical to SEQ ID NO: 453068
  Synthetic oligonucleotide

SEQ ID NO: 601265 - DNA, 55 bp, Artificial; identical to SEQ ID NO: 453070
  Synthetic oligonucleotide

SEQ ID NO: 601266 - DNA, 57 bp, Artificial; identical to SEQ ID NO: 15937
  Synthetic oligonucleotide

SEQ ID NO: 601267 - DNA, 60 bp, Artificial; identical to SEQ ID NO: 453073
  Synthetic oligonucleotide

SEQ ID NO: 601268 - DNA, 52 bp, Artificial; identical to SEQ ID NO: 453075
  Synthetic oligonucleotide

SEQ ID NO: 601269 - DNA, 59 bp, Artificial; identical to SEQ ID NO: 453076
  Synthetic oligonucleotide

SEQ ID NO: 601270 - DNA, 54 bp, Artificial; identical to SEQ ID NO: 453079
  Synthetic oligonucleotide

SEQ ID NO: 601271 - DNA, 60 bp, Artificial; identical to SEQ ID NO: 453083
  Synthetic oligonucleotide

SEQ ID NO: 601272 - DNA, 54 bp, Artificial; identical to SEQ ID NO: 453084
  Synthetic oligonucleotide

SEQ ID NO: 601273 - DNA, 60 bp, Artificial; identical to SEQ ID NO: 453090
  Synthetic oligonucleotide

SEQ ID NO: 601274 - DNA, 51 bp, Artificial; identical to SEQ ID NO: 453092
  Synthetic oligonucleotide

SEQ ID NO: 601275 - DNA, 60 bp, Artificial; identical to SEQ ID NO: 453093
  Synthetic oligonucleotide

SEQ ID NO: 601276 - DNA, 60 bp, Artificial; identical to SEQ ID NO: 453097
  Synthetic oligonucleotide

SEQ ID NO: 601277 - DNA, 59 bp, Artificial; identical to SEQ ID NO: 453098
  Synthetic oligonucleotide

SEQ ID NO: 601278 - DNA, 52 bp, Artificial; identical to SEQ ID NO: 453099
  Synthetic oligonucleotide

SEQ ID NO: 601279 - DNA, 51 bp, Artificial; identical to SEQ ID NO: 453101
  Synthetic oligonucleotide

SEQ ID NO: 601280 - DNA, 53 bp, Artificial; identical to SEQ ID NO: 453104
  Synthetic oligonucleotide

SEQ ID NO: 601281 - DNA, 57 bp, Artificial; identical to SEQ ID NO: 20386
  Synthetic oligonucleotide

SEQ ID NO: 601282 - DNA, 53 bp, Artificial; identical to SEQ ID NO: 453110
  Synthetic oligonucleotide

SEQ ID NO: 601283 - DNA, 60 bp, Artificial; identical to SEQ ID NO: 453111
  Synthetic oligonucleotide

SEQ ID NO: 601284 - DNA, 60 bp, Artificial; identical to SEQ ID NO: 453115
  Synthetic oligonucleotide

SEQ ID NO: 601285 - DNA, 60 bp, Artificial; identical to SEQ ID NO: 453116
  Synthetic oligonucleotide

SEQ ID NO: 601286 - DNA, 52 bp, Artificial; identical to SEQ ID NO: 453118
  Synthetic oligonucleotide

SEQ ID NO: 601287 - DNA, 60 bp, Artificial; identical to SEQ ID NO: 453119
  Synthetic oligonucleotide

SEQ ID NO: 601288 - DNA, 55 bp, Artificial; identical to SEQ ID NO: 453122
  Synthetic oligonucleotide

SEQ ID NO: 601289 - DNA, 56 bp, Artificial; identical to SEQ ID NO: 453124
  Synthetic oligonucleotide

SEQ ID NO: 601290 - DNA, 57 bp, Artificial; identical to SEQ ID NO: 453132
  Synthetic oligonucleotide

SEQ ID NO: 601291 - DNA, 55 bp, Artificial; identical to SEQ ID NO: 453138
  Synthetic oligonucleotide

SEQ ID NO: 601292 - DNA, 53 bp, Artificial; identical to SEQ ID NO: 453139
  Synthetic oligonucleotide

SEQ ID NO: 601293 - DNA, 53 bp, Artificial; identical to SEQ ID NO: 453140
  Synthetic oligonucleotide

SEQ ID NO: 601294 - DNA, 60 bp, Artificial; identical to SEQ ID NO: 453141
  Synthetic oligonucleotide

SEQ ID NO: 601295 - DNA, 60 bp, Artificial; identical to SEQ ID NO: 453143
  Synthetic oligonucleotide

SEQ ID NO: 601296 - DNA, 60 bp, Artificial; identical to SEQ ID NO: 453144
  Synthetic oligonucleotide

SEQ ID NO: 601297 - DNA, 58 bp, Artificial; identical to SEQ ID NO: 453145
  Synthetic oligonucleotide

SEQ ID NO: 601298 - DNA, 58 bp, Artificial; identical to SEQ ID NO: 453146
  Synthetic oligonucleotide

SEQ ID NO: 601299 - DNA, 60 bp, Artificial; identical to SEQ ID NO: 453152
  Synthetic oligonucleotide

SEQ ID NO: 601300 - DNA, 56 bp, Artificial; identical to SEQ ID NO: 453156
  Synthetic oligonucleotide

SEQ ID NO: 601301 - DNA, 55 bp, Artificial; identical to SEQ ID NO: 453157
  Synthetic oligonucleotide

SEQ ID NO: 601302 - DNA, 59 bp, Artificial; identical to SEQ ID NO: 453161
  Synthetic oligonucleotide

SEQ ID NO: 601303 - DNA, 58 bp, Artificial; identical to SEQ ID NO: 453165
  Synthetic oligonucleotide

SEQ ID NO: 601304 - DNA, 59 bp, Artificial; identical to SEQ ID NO: 453166
  Synthetic oligonucleotide

SEQ ID NO: 601305 - DNA, 54 bp, Artificial; identical to SEQ ID NO: 76
  Synthetic oligonucleotide

SEQ ID NO: 601306 - DNA, 60 bp, Artificial; identical to SEQ ID NO: 453169
  Synthetic oligonucleotide

SEQ ID NO: 601307 - DNA, 51 bp, Artificial; identical to SEQ ID NO: 453171
  Synthetic oligonucleotide

SEQ ID NO: 601308 - DNA, 55 bp, Artificial; identical to SEQ ID NO: 453173
  Synthetic oligonucleotide

SEQ ID NO: 601309 - DNA, 60 bp, Artificial; identical to SEQ ID NO: 453176
  Synthetic oligonucleotide

SEQ ID NO: 601310 - DNA, 55 bp, Artificial; identical to SEQ ID NO: 453180
  Synthetic oligonucleotide

SEQ ID NO: 601311 - DNA, 58 bp, Artificial; identical to SEQ ID NO: 453183
  Synthetic oligonucleotide

SEQ ID NO: 601312 - DNA, 53 bp, Artificial; identical to SEQ ID NO: 453185
  Synthetic oligonucleotide

SEQ ID NO: 601313 - DNA, 60 bp, Artificial; identical to SEQ ID NO: 453188
  Synthetic oligonucleotide

SEQ ID NO: 601314 - DNA, 54 bp, Artificial; identical to SEQ ID NO: 453193
  Synthetic oligonucleotide

SEQ ID NO: 601315 - DNA, 55 bp, Artificial; identical to SEQ ID NO: 453195
  Synthetic oligonucleotide

SEQ ID NO: 601316 - DNA, 60 bp, Artificial; identical to SEQ ID NO: 453199
  Synthetic oligonucleotide

SEQ ID NO: 601317 - DNA, 55 bp, Artificial; identical to SEQ ID NO: 453203
  Synthetic oligonucleotide

SEQ ID NO: 601318 - DNA, 60 bp, Artificial; identical to SEQ ID NO: 453204
  Synthetic oligonucleotide

SEQ ID NO: 601319 - DNA, 57 bp, Artificial; identical to SEQ ID NO: 453208
  Synthetic oligonucleotide

SEQ ID NO: 601320 - DNA, 60 bp, Artificial; identical to SEQ ID NO: 453209
  Synthetic oligonucleotide

SEQ ID NO: 601321 - DNA, 55 bp, Artificial; identical to SEQ ID NO: 453210
  Synthetic oligonucleotide

SEQ ID NO: 601322 - DNA, 55 bp, Artificial; identical to SEQ ID NO: 453214
  Synthetic oligonucleotide

SEQ ID NO: 601323 - DNA, 60 bp, Artificial; identical to SEQ ID NO: 453215
  Synthetic oligonucleotide

SEQ ID NO: 601324 - DNA, 58 bp, Artificial; identical to SEQ ID NO: 453216
  Synthetic oligonucleotide

SEQ ID NO: 601325 - DNA, 60 bp, Artificial; identical to SEQ ID NO: 453217
  Synthetic oligonucleotide

SEQ ID NO: 601326 - DNA, 60 bp, Artificial; identical to SEQ ID NO: 453223
  Synthetic oligonucleotide

SEQ ID NO: 601327 - DNA, 60 bp, Artificial; identical to SEQ ID NO: 453224
  Synthetic oligonucleotide

SEQ ID NO: 601328 - DNA, 60 bp, Artificial; identical to SEQ ID NO: 453225
  Synthetic oligonucleotide

SEQ ID NO: 601329 - DNA, 56 bp, Artificial; identical to SEQ ID NO: 453226
  Synthetic oligonucleotide

SEQ ID NO: 601330 - DNA, 60 bp, Artificial; identical to SEQ ID NO: 453231
  Synthetic oligonucleotide

SEQ ID NO: 601331 - DNA, 60 bp, Artificial; identical to SEQ ID NO: 453232
  Synthetic oligonucleotide

SEQ ID NO: 601332 - DNA, 51 bp, Artificial; identical to SEQ ID NO: 453234
  Synthetic oligonucleotide

SEQ ID NO: 601333 - DNA, 60 bp, Artificial; identical to SEQ ID NO: 453236
  Synthetic oligonucleotide

SEQ ID NO: 601334 - DNA, 55 bp, Artificial; identical to SEQ ID NO: 453242
  Synthetic oligonucleotide

SEQ ID NO: 601335 - DNA, 60 bp, Artificial; identical to SEQ ID NO: 453248
  Synthetic oligonucleotide

SEQ ID NO: 601336 - DNA, 60 bp, Artificial; identical to SEQ ID NO: 453249
  Synthetic oligonucleotide

SEQ ID NO: 601337 - DNA, 56 bp, Artificial; identical to SEQ ID NO: 453250
  Synthetic oligonucleotide

SEQ ID NO: 601338 - DNA, 58 bp, Artificial; identical to SEQ ID NO: 16418
  Synthetic oligonucleotide

SEQ ID NO: 601339 - DNA, 60 bp, Artificial; identical to SEQ ID NO: 453252
  Synthetic oligonucleotide

SEQ ID NO: 601340 - DNA, 60 bp, Artificial; identical to SEQ ID NO: 453254
  Synthetic oligonucleotide

SEQ ID NO: 601341 - DNA, 56 bp, Artificial; identical to SEQ ID NO: 453261
  Synthetic oligonucleotide

SEQ ID NO: 601342 - DNA, 55 bp, Artificial; identical to SEQ ID NO: 453262
  Synthetic oligonucleotide

SEQ ID NO: 601343 - DNA, 55 bp, Artificial; identical to SEQ ID NO: 453264
  Synthetic oligonucleotide

SEQ ID NO: 601344 - DNA, 58 bp, Artificial; identical to SEQ ID NO: 453266
  Synthetic oligonucleotide

SEQ ID NO: 601345 - DNA, 50 bp, Artificial; identical to SEQ ID NO: 453267
  Synthetic oligonucleotide

SEQ ID NO: 601346 - DNA, 55 bp, Artificial; identical to SEQ ID NO: 453268
  Synthetic oligonucleotide

SEQ ID NO: 601347 - DNA, 57 bp, Artificial; identical to SEQ ID NO: 453269
  Synthetic oligonucleotide

SEQ ID NO: 601348 - DNA, 53 bp, Artificial; identical to SEQ ID NO: 453272
  Synthetic oligonucleotide

SEQ ID NO: 601349 - DNA, 57 bp, Artificial; identical to SEQ ID NO: 453273
  Synthetic oligonucleotide

SEQ ID NO: 601350 - DNA, 50 bp, Artificial; identical to SEQ ID NO: 453277
  Synthetic oligonucleotide

SEQ ID NO: 601351 - DNA, 53 bp, Artificial; identical to SEQ ID NO: 453279
  Synthetic oligonucleotide

SEQ ID NO: 601352 - DNA, 51 bp, Artificial; identical to SEQ ID NO: 453282
  Synthetic oligonucleotide

SEQ ID NO: 601353 - DNA, 60 bp, Artificial; identical to SEQ ID NO: 453284
  Synthetic oligonucleotide

SEQ ID NO: 601354 - DNA, 60 bp, Artificial; identical to SEQ ID NO: 453285
  Synthetic oligonucleotide

SEQ ID NO: 601355 - DNA, 60 bp, Artificial; identical to SEQ ID NO: 453287
  Synthetic oligonucleotide

SEQ ID NO: 601356 - DNA, 58 bp, Artificial; identical to SEQ ID NO: 453288
  Synthetic oligonucleotide

SEQ ID NO: 601357 - DNA, 55 bp, Artificial; identical to SEQ ID NO: 453291
  Synthetic oligonucleotide

SEQ ID NO: 601358 - DNA, 56 bp, Artificial; identical to SEQ ID NO: 453294
  Synthetic oligonucleotide

SEQ ID NO: 601359 - DNA, 56 bp, Artificial; identical to SEQ ID NO: 453296
  Synthetic oligonucleotide

SEQ ID NO: 601360 - DNA, 60 bp, Artificial; identical to SEQ ID NO: 453301
  Synthetic oligonucleotide

SEQ ID NO: 601361 - DNA, 51 bp, Artificial; identical to SEQ ID NO: 453302
  Synthetic oligonucleotide

SEQ ID NO: 601362 - DNA, 54 bp, Artificial; identical to SEQ ID NO: 453303
  Synthetic oligonucleotide

SEQ ID NO: 601363 - DNA, 55 bp, Artificial; identical to SEQ ID NO: 20429
  Synthetic oligonucleotide

SEQ ID NO: 601364 - DNA, 58 bp, Artificial; identical to SEQ ID NO: 453305
  Synthetic oligonucleotide

SEQ ID NO: 601365 - DNA, 57 bp, Artificial; identical to SEQ ID NO: 453308
  Synthetic oligonucleotide

SEQ ID NO: 601366 - DNA, 55 bp, Artificial; identical to SEQ ID NO: 453310
  Synthetic oligonucleotide

SEQ ID NO: 601367 - DNA, 60 bp, Artificial; identical to SEQ ID NO: 453313
  Synthetic oligonucleotide

SEQ ID NO: 601368 - DNA, 60 bp, Artificial; identical to SEQ ID NO: 453314
  Synthetic oligonucleotide

SEQ ID NO: 601369 - DNA, 56 bp, Artificial; identical to SEQ ID NO: 453315
  Synthetic oligonucleotide

SEQ ID NO: 601370 - DNA, 59 bp, Artificial; identical to SEQ ID NO: 453317
  Synthetic oligonucleotide

SEQ ID NO: 601371 - DNA, 57 bp, Artificial; identical to SEQ ID NO: 453325
  Synthetic oligonucleotide

SEQ ID NO: 601372 - DNA, 57 bp, Artificial; identical to SEQ ID NO: 453327
  Synthetic oligonucleotide

SEQ ID NO: 601373 - DNA, 60 bp, Artificial; identical to SEQ ID NO: 453331
  Synthetic oligonucleotide

SEQ ID NO: 601374 - DNA, 55 bp, Artificial; identical to SEQ ID NO: 453333
  Synthetic oligonucleotide

SEQ ID NO: 601375 - DNA, 55 bp, Artificial; identical to SEQ ID NO: 453334
  Synthetic oligonucleotide

SEQ ID NO: 601376 - DNA, 52 bp, Artificial; identical to SEQ ID NO: 453335
  Synthetic oligonucleotide

SEQ ID NO: 601377 - DNA, 60 bp, Artificial; identical to SEQ ID NO: 453338
  Synthetic oligonucleotide

SEQ ID NO: 601378 - DNA, 60 bp, Artificial; identical to SEQ ID NO: 453339
  Synthetic oligonucleotide

SEQ ID NO: 601379 - DNA, 55 bp, Artificial; identical to SEQ ID NO: 453340
  Synthetic oligonucleotide

SEQ ID NO: 601380 - DNA, 60 bp, Artificial; identical to SEQ ID NO: 453343
  Synthetic oligonucleotide

SEQ ID NO: 601381 - DNA, 59 bp, Artificial; identical to SEQ ID NO: 453344
  Synthetic oligonucleotide

SEQ ID NO: 601382 - DNA, 56 bp, Artificial; identical to SEQ ID NO: 453346
  Synthetic oligonucleotide

SEQ ID NO: 601383 - DNA, 59 bp, Artificial; identical to SEQ ID NO: 16718
  Synthetic oligonucleotide

SEQ ID NO: 601384 - DNA, 57 bp, Artificial; identical to SEQ ID NO: 453352
  Synthetic oligonucleotide

SEQ ID NO: 601385 - DNA, 60 bp, Artificial; identical to SEQ ID NO: 453355
  Synthetic oligonucleotide

SEQ ID NO: 601386 - DNA, 60 bp, Artificial; identical to SEQ ID NO: 453361
  Synthetic oligonucleotide

SEQ ID NO: 601387 - DNA, 55 bp, Artificial; identical to SEQ ID NO: 453365
  Synthetic oligonucleotide

SEQ ID NO: 601388 - DNA, 60 bp, Artificial; identical to SEQ ID NO: 453366
  Synthetic oligonucleotide

SEQ ID NO: 601389 - DNA, 51 bp, Artificial; identical to SEQ ID NO: 453372
  Synthetic oligonucleotide

SEQ ID NO: 601390 - DNA, 52 bp, Artificial; identical to SEQ ID NO: 453376
  Synthetic oligonucleotide

SEQ ID NO: 601391 - DNA, 59 bp, Artificial; identical to SEQ ID NO: 453378
  Synthetic oligonucleotide

SEQ ID NO: 601392 - DNA, 58 bp, Artificial; identical to SEQ ID NO: 453380
  Synthetic oligonucleotide

SEQ ID NO: 601393 - DNA, 53 bp, Artificial; identical to SEQ ID NO: 453383
  Synthetic oligonucleotide

SEQ ID NO: 601394 - DNA, 60 bp, Artificial; identical to SEQ ID NO: 453389
  Synthetic oligonucleotide

SEQ ID NO: 601395 - DNA, 51 bp, Artificial; identical to SEQ ID NO: 453391
  Synthetic oligonucleotide

SEQ ID NO: 601396 - DNA, 60 bp, Artificial; identical to SEQ ID NO: 453392
  Synthetic oligonucleotide

SEQ ID NO: 601397 - DNA, 50 bp, Artificial; identical to SEQ ID NO: 453393
  Synthetic oligonucleotide

SEQ ID NO: 601398 - DNA, 57 bp, Artificial; identical to SEQ ID NO: 453395
  Synthetic oligonucleotide

SEQ ID NO: 601399 - DNA, 60 bp, Artificial; identical to SEQ ID NO: 453396
  Synthetic oligonucleotide

SEQ ID NO: 601400 - DNA, 60 bp, Artificial; identical to SEQ ID NO: 453397
  Synthetic oligonucleotide

SEQ ID NO: 601401 - DNA, 55 bp, Artificial; identical to SEQ ID NO: 453401
  Synthetic oligonucleotide

SEQ ID NO: 601402 - DNA, 55 bp, Artificial; identical to SEQ ID NO: 453403
  Synthetic oligonucleotide

SEQ ID NO: 601403 - DNA, 60 bp, Artificial; identical to SEQ ID NO: 453412
  Synthetic oligonucleotide

SEQ ID NO: 601404 - DNA, 53 bp, Artificial; identical to SEQ ID NO: 453414
  Synthetic oligonucleotide

SEQ ID NO: 601405 - DNA, 52 bp, Artificial; identical to SEQ ID NO: 453416
  Synthetic oligonucleotide

SEQ ID NO: 601406 - DNA, 50 bp, Artificial; identical to SEQ ID NO: 453422
  Synthetic oligonucleotide

SEQ ID NO: 601407 - DNA, 58 bp, Artificial; identical to SEQ ID NO: 13966
  Synthetic oligonucleotide

SEQ ID NO: 601408 - DNA, 58 bp, Artificial; identical to SEQ ID NO: 453427
  Synthetic oligonucleotide

SEQ ID NO: 601409 - DNA, 56 bp, Artificial; identical to SEQ ID NO: 453428
  Synthetic oligonucleotide

SEQ ID NO: 601410 - DNA, 59 bp, Artificial; identical to SEQ ID NO: 453436
  Synthetic oligonucleotide

SEQ ID NO: 601411 - DNA, 55 bp, Artificial; identical to SEQ ID NO: 453438
  Synthetic oligonucleotide

SEQ ID NO: 601412 - DNA, 56 bp, Artificial; identical to SEQ ID NO: 453439
  Synthetic oligonucleotide

SEQ ID NO: 601413 - DNA, 60 bp, Artificial; identical to SEQ ID NO: 453440
  Synthetic oligonucleotide

SEQ ID NO: 601414 - DNA, 58 bp, Artificial; identical to SEQ ID NO: 453443
  Synthetic oligonucleotide

SEQ ID NO: 601415 - DNA, 60 bp, Artificial; identical to SEQ ID NO: 453445
  Synthetic oligonucleotide

SEQ ID NO: 601416 - DNA, 60 bp, Artificial; identical to SEQ ID NO: 453447
  Synthetic oligonucleotide

SEQ ID NO: 601417 - DNA, 60 bp, Artificial; identical to SEQ ID NO: 453451
  Synthetic oligonucleotide

SEQ ID NO: 601418 - DNA, 56 bp, Artificial; identical to SEQ ID NO: 453454
  Synthetic oligonucleotide

SEQ ID NO: 601419 - DNA, 59 bp, Artificial; identical to SEQ ID NO: 453455
  Synthetic oligonucleotide

SEQ ID NO: 601420 - DNA, 60 bp, Artificial; identical to SEQ ID NO: 453457
  Synthetic oligonucleotide

SEQ ID NO: 601421 - DNA, 60 bp, Artificial; identical to SEQ ID NO: 453459
  Synthetic oligonucleotide

SEQ ID NO: 601422 - DNA, 55 bp, Artificial; identical to SEQ ID NO: 453460
  Synthetic oligonucleotide

SEQ ID NO: 601423 - DNA, 60 bp, Artificial; identical to SEQ ID NO: 453463
  Synthetic oligonucleotide

SEQ ID NO: 601424 - DNA, 60 bp, Artificial; identical to SEQ ID NO: 453464
  Synthetic oligonucleotide

SEQ ID NO: 601425 - DNA, 58 bp, Artificial; identical to SEQ ID NO: 453465
  Synthetic oligonucleotide

SEQ ID NO: 601426 - DNA, 58 bp, Artificial; identical to SEQ ID NO: 453466
  Synthetic oligonucleotide

SEQ ID NO: 601427 - DNA, 60 bp, Artificial; identical to SEQ ID NO: 453468
  Synthetic oligonucleotide

SEQ ID NO: 601428 - DNA, 54 bp, Artificial; identical to SEQ ID NO: 453471
  Synthetic oligonucleotide

SEQ ID NO: 601429 - DNA, 56 bp, Artificial; identical to SEQ ID NO: 9079
  Synthetic oligonucleotide

SEQ ID NO: 601430 - DNA, 60 bp, Artificial; identical to SEQ ID NO: 453474
  Synthetic oligonucleotide

SEQ ID NO: 601431 - DNA, 50 bp, Artificial; identical to SEQ ID NO: 453475
  Synthetic oligonucleotide

SEQ ID NO: 601432 - DNA, 60 bp, Artificial; identical to SEQ ID NO: 453476
  Synthetic oligonucleotide

SEQ ID NO: 601433 - DNA, 60 bp, Artificial; identical to SEQ ID NO: 453478
  Synthetic oligonucleotide

SEQ ID NO: 601434 - DNA, 51 bp, Artificial; identical to SEQ ID NO: 453480
  Synthetic oligonucleotide

SEQ ID NO: 601435 - DNA, 53 bp, Artificial; identical to SEQ ID NO: 453484
  Synthetic oligonucleotide

SEQ ID NO: 601436 - DNA, 50 bp, Artificial; identical to SEQ ID NO: 7275
  Synthetic oligonucleotide

SEQ ID NO: 601437 - DNA, 60 bp, Artificial; identical to SEQ ID NO: 453488
  Synthetic oligonucleotide

SEQ ID NO: 601438 - DNA, 55 bp, Artificial; identical to SEQ ID NO: 453489
  Synthetic oligonucleotide

SEQ ID NO: 601439 - DNA, 56 bp, Artificial; identical to SEQ ID NO: 453490
  Synthetic oligonucleotide

SEQ ID NO: 601440 - DNA, 60 bp, Artificial; identical to SEQ ID NO: 453492
  Synthetic oligonucleotide

SEQ ID NO: 601441 - DNA, 54 bp, Artificial; identical to SEQ ID NO: 453494
  Synthetic oligonucleotide

SEQ ID NO: 601442 - DNA, 60 bp, Artificial; identical to SEQ ID NO: 453495
  Synthetic oligonucleotide

SEQ ID NO: 601443 - DNA, 55 bp, Artificial; identical to SEQ ID NO: 453496
  Synthetic oligonucleotide

SEQ ID NO: 601444 - DNA, 60 bp, Artificial; identical to SEQ ID NO: 453498
  Synthetic oligonucleotide

SEQ ID NO: 601445 - DNA, 53 bp, Artificial; identical to SEQ ID NO: 13754
  Synthetic oligonucleotide

SEQ ID NO: 601446 - DNA, 54 bp, Artificial; identical to SEQ ID NO: 453502
  Synthetic oligonucleotide

SEQ ID NO: 601447 - DNA, 58 bp, Artificial; identical to SEQ ID NO: 453506
  Synthetic oligonucleotide

SEQ ID NO: 601448 - DNA, 53 bp, Artificial; identical to SEQ ID NO: 453507
  Synthetic oligonucleotide

SEQ ID NO: 601449 - DNA, 53 bp, Artificial; identical to SEQ ID NO: 453509
  Synthetic oligonucleotide

SEQ ID NO: 601450 - DNA, 60 bp, Artificial; identical to SEQ ID NO: 453510
  Synthetic oligonucleotide

SEQ ID NO: 601451 - DNA, 60 bp, Artificial; identical to SEQ ID NO: 453512
  Synthetic oligonucleotide

SEQ ID NO: 601452 - DNA, 60 bp, Artificial; identical to SEQ ID NO: 453518
  Synthetic oligonucleotide

SEQ ID NO: 601453 - DNA, 55 bp, Artificial; identical to SEQ ID NO: 453520
  Synthetic oligonucleotide

SEQ ID NO: 601454 - DNA, 55 bp, Artificial; identical to SEQ ID NO: 453522
  Synthetic oligonucleotide

SEQ ID NO: 601455 - DNA, 51 bp, Artificial; identical to SEQ ID NO: 453523
  Synthetic oligonucleotide

SEQ ID NO: 601456 - DNA, 57 bp, Artificial; identical to SEQ ID NO: 453529
  Synthetic oligonucleotide

SEQ ID NO: 601457 - DNA, 55 bp, Artificial; identical to SEQ ID NO: 453531
  Synthetic oligonucleotide

SEQ ID NO: 601458 - DNA, 60 bp, Artificial; identical to SEQ ID NO: 453537
  Synthetic oligonucleotide

SEQ ID NO: 601459 - DNA, 57 bp, Artificial; identical to SEQ ID NO: 453539
  Synthetic oligonucleotide

SEQ ID NO: 601460 - DNA, 56 bp, Artificial; identical to SEQ ID NO: 453543
  Synthetic oligonucleotide

SEQ ID NO: 601461 - DNA, 60 bp, Artificial; identical to SEQ ID NO: 453546
  Synthetic oligonucleotide

SEQ ID NO: 601462 - DNA, 50 bp, Artificial; identical to SEQ ID NO: 453555
  Synthetic oligonucleotide

SEQ ID NO: 601463 - DNA, 60 bp, Artificial; identical to SEQ ID NO: 453556
  Synthetic oligonucleotide

SEQ ID NO: 601464 - DNA, 60 bp, Artificial; identical to SEQ ID NO: 13264
  Synthetic oligonucleotide

SEQ ID NO: 601465 - DNA, 57 bp, Artificial; identical to SEQ ID NO: 453558
  Synthetic oligonucleotide

SEQ ID NO: 601466 - DNA, 59 bp, Artificial; identical to SEQ ID NO: 453561
  Synthetic oligonucleotide

SEQ ID NO: 601467 - DNA, 55 bp, Artificial; identical to SEQ ID NO: 453572
  Synthetic oligonucleotide

SEQ ID NO: 601468 - DNA, 58 bp, Artificial; identical to SEQ ID NO: 453573
  Synthetic oligonucleotide

SEQ ID NO: 601469 - DNA, 56 bp, Artificial; identical to SEQ ID NO: 453574
  Synthetic oligonucleotide

SEQ ID NO: 601470 - DNA, 60 bp, Artificial; identical to SEQ ID NO: 453576
  Synthetic oligonucleotide

SEQ ID NO: 601471 - DNA, 57 bp, Artificial; identical to SEQ ID NO: 16413
  Synthetic oligonucleotide

SEQ ID NO: 601472 - DNA, 60 bp, Artificial; identical to SEQ ID NO: 453584
  Synthetic oligonucleotide

SEQ ID NO: 601473 - DNA, 55 bp, Artificial; identical to SEQ ID NO: 453585
  Synthetic oligonucleotide

SEQ ID NO: 601474 - DNA, 60 bp, Artificial; identical to SEQ ID NO: 453588
  Synthetic oligonucleotide

SEQ ID NO: 601475 - DNA, 60 bp, Artificial; identical to SEQ ID NO: 453589
  Synthetic oligonucleotide

SEQ ID NO: 601476 - DNA, 56 bp, Artificial; identical to SEQ ID NO: 20440
  Synthetic oligonucleotide

SEQ ID NO: 601477 - DNA, 56 bp, Artificial; identical to SEQ ID NO: 453595
  Synthetic oligonucleotide

SEQ ID NO: 601478 - DNA, 60 bp, Artificial; identical to SEQ ID NO: 453596
  Synthetic oligonucleotide

SEQ ID NO: 601479 - DNA, 60 bp, Artificial; identical to SEQ ID NO: 453597
  Synthetic oligonucleotide

SEQ ID NO: 601480 - DNA, 55 bp, Artificial; identical to SEQ ID NO: 453599
  Synthetic oligonucleotide

SEQ ID NO: 601481 - DNA, 60 bp, Artificial; identical to SEQ ID NO: 453603
  Synthetic oligonucleotide

SEQ ID NO: 601482 - DNA, 59 bp, Artificial; identical to SEQ ID NO: 453605
  Synthetic oligonucleotide

SEQ ID NO: 601483 - DNA, 60 bp, Artificial; identical to SEQ ID NO: 453606
  Synthetic oligonucleotide

SEQ ID NO: 601484 - DNA, 60 bp, Artificial; identical to SEQ ID NO: 453609
  Synthetic oligonucleotide

SEQ ID NO: 601485 - DNA, 60 bp, Artificial; identical to SEQ ID NO: 453613
  Synthetic oligonucleotide

SEQ ID NO: 601486 - DNA, 59 bp, Artificial; identical to SEQ ID NO: 453614
  Synthetic oligonucleotide

SEQ ID NO: 601487 - DNA, 57 bp, Artificial; identical to SEQ ID NO: 453615
  Synthetic oligonucleotide

SEQ ID NO: 601488 - DNA, 55 bp, Artificial; identical to SEQ ID NO: 453618
  Synthetic oligonucleotide

SEQ ID NO: 601489 - DNA, 60 bp, Artificial; identical to SEQ ID NO: 453619
  Synthetic oligonucleotide

SEQ ID NO: 601490 - DNA, 60 bp, Artificial; identical to SEQ ID NO: 453624
  Synthetic oligonucleotide

SEQ ID NO: 601491 - DNA, 56 bp, Artificial; identical to SEQ ID NO: 453626
  Synthetic oligonucleotide

SEQ ID NO: 601492 - DNA, 60 bp, Artificial; identical to SEQ ID NO: 453627
  Synthetic oligonucleotide

SEQ ID NO: 601493 - DNA, 60 bp, Artificial; identical to SEQ ID NO: 453629
  Synthetic oligonucleotide

SEQ ID NO: 601494 - DNA, 55 bp, Artificial; identical to SEQ ID NO: 453630
  Synthetic oligonucleotide

SEQ ID NO: 601495 - DNA, 60 bp, Artificial; identical to SEQ ID NO: 453631
  Synthetic oligonucleotide

SEQ ID NO: 601496 - DNA, 56 bp, Artificial; identical to SEQ ID NO: 453638
  Synthetic oligonucleotide

SEQ ID NO: 601497 - DNA, 51 bp, Artificial; identical to SEQ ID NO: 453643
  Synthetic oligonucleotide

SEQ ID NO: 601498 - DNA, 60 bp, Artificial; identical to SEQ ID NO: 453644
  Synthetic oligonucleotide

SEQ ID NO: 601499 - DNA, 55 bp, Artificial; identical to SEQ ID NO: 453649
  Synthetic oligonucleotide

SEQ ID NO: 601500 - DNA, 55 bp, Artificial; identical to SEQ ID NO: 453651
  Synthetic oligonucleotide

SEQ ID NO: 601501 - DNA, 55 bp, Artificial; identical to SEQ ID NO: 453655
  Synthetic oligonucleotide

SEQ ID NO: 601502 - DNA, 52 bp, Artificial; identical to SEQ ID NO: 453666
  Synthetic oligonucleotide

SEQ ID NO: 601503 - DNA, 52 bp, Artificial; identical to SEQ ID NO: 16699
  Synthetic oligonucleotide

SEQ ID NO: 601504 - DNA, 52 bp, Artificial; identical to SEQ ID NO: 453670
  Synthetic oligonucleotide

SEQ ID NO: 601505 - DNA, 60 bp, Artificial; identical to SEQ ID NO: 453672
  Synthetic oligonucleotide

SEQ ID NO: 601506 - DNA, 55 bp, Artificial; identical to SEQ ID NO: 453674
  Synthetic oligonucleotide

SEQ ID NO: 601507 - DNA, 55 bp, Artificial; identical to SEQ ID NO: 453679
  Synthetic oligonucleotide

SEQ ID NO: 601508 - DNA, 53 bp, Artificial; identical to SEQ ID NO: 453681
  Synthetic oligonucleotide

SEQ ID NO: 601509 - DNA, 55 bp, Artificial; identical to SEQ ID NO: 453683
  Synthetic oligonucleotide

SEQ ID NO: 601510 - DNA, 55 bp, Artificial; identical to SEQ ID NO: 453688
  Synthetic oligonucleotide

SEQ ID NO: 601511 - DNA, 55 bp, Artificial; identical to SEQ ID NO: 453692
  Synthetic oligonucleotide

SEQ ID NO: 601512 - DNA, 60 bp, Artificial; identical to SEQ ID NO: 7089
  Synthetic oligonucleotide

SEQ ID NO: 601513 - DNA, 58 bp, Artificial; identical to SEQ ID NO: 453695
  Synthetic oligonucleotide

SEQ ID NO: 601514 - DNA, 59 bp, Artificial; identical to SEQ ID NO: 453696
  Synthetic oligonucleotide

SEQ ID NO: 601515 - DNA, 60 bp, Artificial; identical to SEQ ID NO: 453697
  Synthetic oligonucleotide

SEQ ID NO: 601516 - DNA, 53 bp, Artificial; identical to SEQ ID NO: 453700
  Synthetic oligonucleotide

SEQ ID NO: 601517 - DNA, 60 bp, Artificial; identical to SEQ ID NO: 453702
  Synthetic oligonucleotide

SEQ ID NO: 601518 - DNA, 52 bp, Artificial; identical to SEQ ID NO: 453704
  Synthetic oligonucleotide

SEQ ID NO: 601519 - DNA, 60 bp, Artificial; identical to SEQ ID NO: 453705
  Synthetic oligonucleotide

SEQ ID NO: 601520 - DNA, 58 bp, Artificial; identical to SEQ ID NO: 453707
  Synthetic oligonucleotide

SEQ ID NO: 601521 - DNA, 60 bp, Artificial; identical to SEQ ID NO: 453709
  Synthetic oligonucleotide

SEQ ID NO: 601522 - DNA, 50 bp, Artificial; identical to SEQ ID NO: 453710
  Synthetic oligonucleotide

SEQ ID NO: 601523 - DNA, 55 bp, Artificial; identical to SEQ ID NO: 6132
  Synthetic oligonucleotide

SEQ ID NO: 601524 - DNA, 56 bp, Artificial; identical to SEQ ID NO: 453715
  Synthetic oligonucleotide

SEQ ID NO: 601525 - DNA, 59 bp, Artificial; identical to SEQ ID NO: 453716
  Synthetic oligonucleotide

SEQ ID NO: 601526 - DNA, 60 bp, Artificial; identical to SEQ ID NO: 453717
  Synthetic oligonucleotide

SEQ ID NO: 601527 - DNA, 60 bp, Artificial; identical to SEQ ID NO: 12985
  Synthetic oligonucleotide

SEQ ID NO: 601528 - DNA, 59 bp, Artificial; identical to SEQ ID NO: 453720
  Synthetic oligonucleotide

SEQ ID NO: 601529 - DNA, 57 bp, Artificial; identical to SEQ ID NO: 453721
  Synthetic oligonucleotide

SEQ ID NO: 601530 - DNA, 60 bp, Artificial; identical to SEQ ID NO: 453722
  Synthetic oligonucleotide

SEQ ID NO: 601531 - DNA, 57 bp, Artificial; identical to SEQ ID NO: 453726
  Synthetic oligonucleotide

SEQ ID NO: 601532 - DNA, 59 bp, Artificial; identical to SEQ ID NO: 453727
  Synthetic oligonucleotide

SEQ ID NO: 601533 - DNA, 55 bp, Artificial; identical to SEQ ID NO: 453728
  Synthetic oligonucleotide

SEQ ID NO: 601534 - DNA, 59 bp, Artificial; identical to SEQ ID NO: 453731
  Synthetic oligonucleotide

SEQ ID NO: 601535 - DNA, 60 bp, Artificial; identical to SEQ ID NO: 453732
  Synthetic oligonucleotide

SEQ ID NO: 601536 - DNA, 60 bp, Artificial; identical to SEQ ID NO: 453735
  Synthetic oligonucleotide

SEQ ID NO: 601537 - DNA, 60 bp, Artificial; identical to SEQ ID NO: 453737
  Synthetic oligonucleotide

SEQ ID NO: 601538 - DNA, 60 bp, Artificial; identical to SEQ ID NO: 453738
  Synthetic oligonucleotide

SEQ ID NO: 601539 - DNA, 60 bp, Artificial; identical to SEQ ID NO: 453739
  Synthetic oligonucleotide

SEQ ID NO: 601540 - DNA, 60 bp, Artificial; identical to SEQ ID NO: 453740
  Synthetic oligonucleotide

SEQ ID NO: 601541 - DNA, 57 bp, Artificial; identical to SEQ ID NO: 453741
  Synthetic oligonucleotide

SEQ ID NO: 601542 - DNA, 60 bp, Artificial; identical to SEQ ID NO: 453743
  Synthetic oligonucleotide

SEQ ID NO: 601543 - DNA, 54 bp, Artificial; identical to SEQ ID NO: 453744
  Synthetic oligonucleotide

SEQ ID NO: 601544 - DNA, 60 bp, Artificial; identical to SEQ ID NO: 453751
  Synthetic oligonucleotide

SEQ ID NO: 601545 - DNA, 58 bp, Artificial; identical to SEQ ID NO: 453756
  Synthetic oligonucleotide

SEQ ID NO: 601546 - DNA, 60 bp, Artificial; identical to SEQ ID NO: 453759
  Synthetic oligonucleotide

SEQ ID NO: 601547 - DNA, 60 bp, Artificial; identical to SEQ ID NO: 453762
  Synthetic oligonucleotide

SEQ ID NO: 601548 - DNA, 60 bp, Artificial; identical to SEQ ID NO: 453763
  Synthetic oligonucleotide

SEQ ID NO: 601549 - DNA, 60 bp, Artificial; identical to SEQ ID NO: 453765
  Synthetic oligonucleotide

SEQ ID NO: 601550 - DNA, 57 bp, Artificial; identical to SEQ ID NO: 453766
  Synthetic oligonucleotide

SEQ ID NO: 601551 - DNA, 60 bp, Artificial; identical to SEQ ID NO: 453768
  Synthetic oligonucleotide

SEQ ID NO: 601552 - DNA, 60 bp, Artificial; identical to SEQ ID NO: 453771
  Synthetic oligonucleotide

SEQ ID NO: 601553 - DNA, 60 bp, Artificial; identical to SEQ ID NO: 453772
  Synthetic oligonucleotide

SEQ ID NO: 601554 - DNA, 60 bp, Artificial; identical to SEQ ID NO: 453775
  Synthetic oligonucleotide

SEQ ID NO: 601555 - DNA, 59 bp, Artificial; identical to SEQ ID NO: 453776
  Synthetic oligonucleotide

SEQ ID NO: 601556 - DNA, 60 bp, Artificial; identical to SEQ ID NO: 453781
  Synthetic oligonucleotide

SEQ ID NO: 601557 - DNA, 59 bp, Artificial; identical to SEQ ID NO: 453784
  Synthetic oligonucleotide

SEQ ID NO: 601558 - DNA, 55 bp, Artificial; identical to SEQ ID NO: 453785
  Synthetic oligonucleotide

SEQ ID NO: 601559 - DNA, 59 bp, Artificial; identical to SEQ ID NO: 453787
  Synthetic oligonucleotide

SEQ ID NO: 601560 - DNA, 59 bp, Artificial; identical to SEQ ID NO: 453789
  Synthetic oligonucleotide

SEQ ID NO: 601561 - DNA, 53 bp, Artificial; identical to SEQ ID NO: 453790
  Synthetic oligonucleotide

SEQ ID NO: 601562 - DNA, 57 bp, Artificial; identical to SEQ ID NO: 453792
  Synthetic oligonucleotide

SEQ ID NO: 601563 - DNA, 56 bp, Artificial; identical to SEQ ID NO: 453797
  Synthetic oligonucleotide

SEQ ID NO: 601564 - DNA, 52 bp, Artificial; identical to SEQ ID NO: 453804
  Synthetic oligonucleotide

SEQ ID NO: 601565 - DNA, 60 bp, Artificial; identical to SEQ ID NO: 453806
  Synthetic oligonucleotide

SEQ ID NO: 601566 - DNA, 60 bp, Artificial; identical to SEQ ID NO: 453807
  Synthetic oligonucleotide

SEQ ID NO: 601567 - DNA, 58 bp, Artificial; identical to SEQ ID NO: 453810
  Synthetic oligonucleotide

SEQ ID NO: 601568 - DNA, 59 bp, Artificial; identical to SEQ ID NO: 453811
  Synthetic oligonucleotide

SEQ ID NO: 601569 - DNA, 55 bp, Artificial; identical to SEQ ID NO: 453814
  Synthetic oligonucleotide

SEQ ID NO: 601570 - DNA, 60 bp, Artificial; identical to SEQ ID NO: 453816
  Synthetic oligonucleotide

SEQ ID NO: 601571 - DNA, 60 bp, Artificial; identical to SEQ ID NO: 453818
  Synthetic oligonucleotide

SEQ ID NO: 601572 - DNA, 60 bp, Artificial; identical to SEQ ID NO: 453819
  Synthetic oligonucleotide

SEQ ID NO: 601573 - DNA, 60 bp, Artificial; identical to SEQ ID NO: 453820
  Synthetic oligonucleotide

SEQ ID NO: 601574 - DNA, 60 bp, Artificial; identical to SEQ ID NO: 453821
  Synthetic oligonucleotide

SEQ ID NO: 601575 - DNA, 53 bp, Artificial; identical to SEQ ID NO: 453822
  Synthetic oligonucleotide

SEQ ID NO: 601576 - DNA, 51 bp, Artificial; identical to SEQ ID NO: 453824
  Synthetic oligonucleotide

SEQ ID NO: 601577 - DNA, 60 bp, Artificial; identical to SEQ ID NO: 453827
  Synthetic oligonucleotide

SEQ ID NO: 601578 - DNA, 54 bp, Artificial; identical to SEQ ID NO: 453828
  Synthetic oligonucleotide

SEQ ID NO: 601579 - DNA, 55 bp, Artificial; identical to SEQ ID NO: 453830
  Synthetic oligonucleotide

SEQ ID NO: 601580 - DNA, 57 bp, Artificial; identical to SEQ ID NO: 453838
  Synthetic oligonucleotide

SEQ ID NO: 601581 - DNA, 60 bp, Artificial; identical to SEQ ID NO: 453840
  Synthetic oligonucleotide

SEQ ID NO: 601582 - DNA, 60 bp, Artificial; identical to SEQ ID NO: 453842
  Synthetic oligonucleotide

SEQ ID NO: 601583 - DNA, 60 bp, Artificial; identical to SEQ ID NO: 453843
  Synthetic oligonucleotide

SEQ ID NO: 601584 - DNA, 57 bp, Artificial; identical to SEQ ID NO: 453846
  Synthetic oligonucleotide

SEQ ID NO: 601585 - DNA, 52 bp, Artificial; identical to SEQ ID NO: 453850
  Synthetic oligonucleotide

SEQ ID NO: 601586 - DNA, 56 bp, Artificial; identical to SEQ ID NO: 453854
  Synthetic oligonucleotide

SEQ ID NO: 601587 - DNA, 60 bp, Artificial; identical to SEQ ID NO: 453855
  Synthetic oligonucleotide

SEQ ID NO: 601588 - DNA, 55 bp, Artificial; identical to SEQ ID NO: 453859
  Synthetic oligonucleotide

SEQ ID NO: 601589 - DNA, 60 bp, Artificial; identical to SEQ ID NO: 453860
  Synthetic oligonucleotide

SEQ ID NO: 601590 - DNA, 59 bp, Artificial; identical to SEQ ID NO: 453862
  Synthetic oligonucleotide

SEQ ID NO: 601591 - DNA, 60 bp, Artificial; identical to SEQ ID NO: 453866
  Synthetic oligonucleotide

SEQ ID NO: 601592 - DNA, 55 bp, Artificial; identical to SEQ ID NO: 453867
  Synthetic oligonucleotide

SEQ ID NO: 601593 - DNA, 59 bp, Artificial; identical to SEQ ID NO: 453872
  Synthetic oligonucleotide

SEQ ID NO: 601594 - DNA, 60 bp, Artificial; identical to SEQ ID NO: 453875
  Synthetic oligonucleotide

SEQ ID NO: 601595 - DNA, 60 bp, Artificial; identical to SEQ ID NO: 453876
  Synthetic oligonucleotide

SEQ ID NO: 601596 - DNA, 56 bp, Artificial; identical to SEQ ID NO: 453879
  Synthetic oligonucleotide

SEQ ID NO: 601597 - DNA, 55 bp, Artificial; identical to SEQ ID NO: 453882
  Synthetic oligonucleotide

SEQ ID NO: 601598 - DNA, 56 bp, Artificial; identical to SEQ ID NO: 453890
  Synthetic oligonucleotide

SEQ ID NO: 601599 - DNA, 60 bp, Artificial; identical to SEQ ID NO: 80906
  Synthetic oligonucleotide

SEQ ID NO: 601600 - DNA, 60 bp, Artificial; identical to SEQ ID NO: 453892
  Synthetic oligonucleotide

SEQ ID NO: 601601 - DNA, 55 bp, Artificial; identical to SEQ ID NO: 453893
  Synthetic oligonucleotide

SEQ ID NO: 601602 - DNA, 60 bp, Artificial; identical to SEQ ID NO: 453895
  Synthetic oligonucleotide

SEQ ID NO: 601603 - DNA, 51 bp, Artificial; identical to SEQ ID NO: 453897
  Synthetic oligonucleotide

SEQ ID NO: 601604 - DNA, 58 bp, Artificial; identical to SEQ ID NO: 453898
  Synthetic oligonucleotide

SEQ ID NO: 601605 - DNA, 60 bp, Artificial; identical to SEQ ID NO: 453899
  Synthetic oligonucleotide

SEQ ID NO: 601606 - DNA, 51 bp, Artificial; identical to SEQ ID NO: 453902
  Synthetic oligonucleotide

SEQ ID NO: 601607 - DNA, 54 bp, Artificial; identical to SEQ ID NO: 453904
  Synthetic oligonucleotide

SEQ ID NO: 601608 - DNA, 59 bp, Artificial; identical to SEQ ID NO: 453905
  Synthetic oligonucleotide

SEQ ID NO: 601609 - DNA, 60 bp, Artificial; identical to SEQ ID NO: 453906
  Synthetic oligonucleotide

SEQ ID NO: 601610 - DNA, 58 bp, Artificial; identical to SEQ ID NO: 453907
  Synthetic oligonucleotide

SEQ ID NO: 601611 - DNA, 60 bp, Artificial; identical to SEQ ID NO: 453908
  Synthetic oligonucleotide

SEQ ID NO: 601612 - DNA, 60 bp, Artificial; identical to SEQ ID NO: 453910
  Synthetic oligonucleotide

SEQ ID NO: 601613 - DNA, 51 bp, Artificial; identical to SEQ ID NO: 453912
  Synthetic oligonucleotide

SEQ ID NO: 601614 - DNA, 59 bp, Artificial; identical to SEQ ID NO: 453914
  Synthetic oligonucleotide

SEQ ID NO: 601615 - DNA, 59 bp, Artificial; identical to SEQ ID NO: 453915
  Synthetic oligonucleotide

SEQ ID NO: 601616 - DNA, 55 bp, Artificial; identical to SEQ ID NO: 453917
  Synthetic oligonucleotide

SEQ ID NO: 601617 - DNA, 60 bp, Artificial; identical to SEQ ID NO: 15627
  Synthetic oligonucleotide

SEQ ID NO: 601618 - DNA, 60 bp, Artificial; identical to SEQ ID NO: 453918
  Synthetic oligonucleotide

SEQ ID NO: 601619 - DNA, 54 bp, Artificial; identical to SEQ ID NO: 453919
  Synthetic oligonucleotide

SEQ ID NO: 601620 - DNA, 60 bp, Artificial; identical to SEQ ID NO: 14386
  Synthetic oligonucleotide

SEQ ID NO: 601621 - DNA, 60 bp, Artificial; identical to SEQ ID NO: 453924
  Synthetic oligonucleotide

SEQ ID NO: 601622 - DNA, 55 bp, Artificial; identical to SEQ ID NO: 453926
  Synthetic oligonucleotide

SEQ ID NO: 601623 - DNA, 60 bp, Artificial; identical to SEQ ID NO: 453927
  Synthetic oligonucleotide

SEQ ID NO: 601624 - DNA, 60 bp, Artificial; identical to SEQ ID NO: 453928
  Synthetic oligonucleotide

SEQ ID NO: 601625 - DNA, 60 bp, Artificial; identical to SEQ ID NO: 453930
  Synthetic oligonucleotide

SEQ ID NO: 601626 - DNA, 57 bp, Artificial; identical to SEQ ID NO: 453932
  Synthetic oligonucleotide

SEQ ID NO: 601627 - DNA, 55 bp, Artificial; identical to SEQ ID NO: 453936
  Synthetic oligonucleotide

SEQ ID NO: 601628 - DNA, 60 bp, Artificial; identical to SEQ ID NO: 453938
  Synthetic oligonucleotide

SEQ ID NO: 601629 - DNA, 60 bp, Artificial; identical to SEQ ID NO: 453941
  Synthetic oligonucleotide

SEQ ID NO: 601630 - DNA, 60 bp, Artificial; identical to SEQ ID NO: 453945
  Synthetic oligonucleotide

SEQ ID NO: 601631 - DNA, 59 bp, Artificial; identical to SEQ ID NO: 453952
  Synthetic oligonucleotide

SEQ ID NO: 601632 - DNA, 51 bp, Artificial; identical to SEQ ID NO: 453953
  Synthetic oligonucleotide

SEQ ID NO: 601633 - DNA, 55 bp, Artificial; identical to SEQ ID NO: 453955
  Synthetic oligonucleotide

SEQ ID NO: 601634 - DNA, 60 bp, Artificial; identical to SEQ ID NO: 453956
  Synthetic oligonucleotide

SEQ ID NO: 601635 - DNA, 60 bp, Artificial; identical to SEQ ID NO: 453959
  Synthetic oligonucleotide

SEQ ID NO: 601636 - DNA, 55 bp, Artificial; identical to SEQ ID NO: 453960
  Synthetic oligonucleotide

SEQ ID NO: 601637 - DNA, 58 bp, Artificial; identical to SEQ ID NO: 453961
  Synthetic oligonucleotide

SEQ ID NO: 601638 - DNA, 60 bp, Artificial; identical to SEQ ID NO: 14453
  Synthetic oligonucleotide

SEQ ID NO: 601639 - DNA, 60 bp, Artificial; identical to SEQ ID NO: 453965
  Synthetic oligonucleotide

SEQ ID NO: 601640 - DNA, 60 bp, Artificial; identical to SEQ ID NO: 453967
  Synthetic oligonucleotide

SEQ ID NO: 601641 - DNA, 60 bp, Artificial; identical to SEQ ID NO: 12880
  Synthetic oligonucleotide

SEQ ID NO: 601642 - DNA, 60 bp, Artificial; identical to SEQ ID NO: 453968
  Synthetic oligonucleotide

SEQ ID NO: 601643 - DNA, 60 bp, Artificial; identical to SEQ ID NO: 453971
  Synthetic oligonucleotide

SEQ ID NO: 601644 - DNA, 60 bp, Artificial; identical to SEQ ID NO: 453972
  Synthetic oligonucleotide

SEQ ID NO: 601645 - DNA, 60 bp, Artificial; identical to SEQ ID NO: 8942
  Synthetic oligonucleotide

SEQ ID NO: 601646 - DNA, 60 bp, Artificial; identical to SEQ ID NO: 453973
  Synthetic oligonucleotide

SEQ ID NO: 601647 - DNA, 55 bp, Artificial; identical to SEQ ID NO: 453974
  Synthetic oligonucleotide

SEQ ID NO: 601648 - DNA, 60 bp, Artificial; identical to SEQ ID NO: 453976
  Synthetic oligonucleotide

SEQ ID NO: 601649 - DNA, 55 bp, Artificial; identical to SEQ ID NO: 453978
  Synthetic oligonucleotide

SEQ ID NO: 601650 - DNA, 60 bp, Artificial; identical to SEQ ID NO: 453979
  Synthetic oligonucleotide

SEQ ID NO: 601651 - DNA, 50 bp, Artificial; identical to SEQ ID NO: 453980
  Synthetic oligonucleotide

SEQ ID NO: 601652 - DNA, 56 bp, Artificial; identical to SEQ ID NO: 453981
  Synthetic oligonucleotide

SEQ ID NO: 601653 - DNA, 51 bp, Artificial; identical to SEQ ID NO: 453982
  Synthetic oligonucleotide

SEQ ID NO: 601654 - DNA, 55 bp, Artificial; identical to SEQ ID NO: 453983
  Synthetic oligonucleotide

SEQ ID NO: 601655 - DNA, 58 bp, Artificial; identical to SEQ ID NO: 453984
  Synthetic oligonucleotide

SEQ ID NO: 601656 - DNA, 60 bp, Artificial; identical to SEQ ID NO: 453986
  Synthetic oligonucleotide

SEQ ID NO: 601657 - DNA, 58 bp, Artificial; identical to SEQ ID NO: 453990
  Synthetic oligonucleotide

SEQ ID NO: 601658 - DNA, 55 bp, Artificial; identical to SEQ ID NO: 453991
  Synthetic oligonucleotide

SEQ ID NO: 601659 - DNA, 58 bp, Artificial; identical to SEQ ID NO: 453992
  Synthetic oligonucleotide

SEQ ID NO: 601660 - DNA, 56 bp, Artificial; identical to SEQ ID NO: 453993
  Synthetic oligonucleotide

SEQ ID NO: 601661 - DNA, 59 bp, Artificial; identical to SEQ ID NO: 453994
  Synthetic oligonucleotide

SEQ ID NO: 601662 - DNA, 60 bp, Artificial; identical to SEQ ID NO: 453995
  Synthetic oligonucleotide

SEQ ID NO: 601663 - DNA, 60 bp, Artificial; identical to SEQ ID NO: 5994
  Synthetic oligonucleotide

SEQ ID NO: 601664 - DNA, 60 bp, Artificial; identical to SEQ ID NO: 453998
  Synthetic oligonucleotide

SEQ ID NO: 601665 - DNA, 50 bp, Artificial; identical to SEQ ID NO: 453999
  Synthetic oligonucleotide

SEQ ID NO: 601666 - DNA, 55 bp, Artificial; identical to SEQ ID NO: 454003
  Synthetic oligonucleotide

SEQ ID NO: 601667 - DNA, 60 bp, Artificial; identical to SEQ ID NO: 5931
  Synthetic oligonucleotide

SEQ ID NO: 601668 - DNA, 60 bp, Artificial; identical to SEQ ID NO: 454007
  Synthetic oligonucleotide

SEQ ID NO: 601669 - DNA, 59 bp, Artificial; identical to SEQ ID NO: 18191
  Synthetic oligonucleotide

SEQ ID NO: 601670 - DNA, 54 bp, Artificial; identical to SEQ ID NO: 454009
  Synthetic oligonucleotide

SEQ ID NO: 601671 - DNA, 60 bp, Artificial; identical to SEQ ID NO: 454011
  Synthetic oligonucleotide

SEQ ID NO: 601672 - DNA, 57 bp, Artificial; identical to SEQ ID NO: 454014
  Synthetic oligonucleotide

SEQ ID NO: 601673 - DNA, 60 bp, Artificial; identical to SEQ ID NO: 454015
  Synthetic oligonucleotide

SEQ ID NO: 601674 - DNA, 60 bp, Artificial; identical to SEQ ID NO: 454018
  Synthetic oligonucleotide

SEQ ID NO: 601675 - DNA, 60 bp, Artificial; identical to SEQ ID NO: 12263
  Synthetic oligonucleotide

SEQ ID NO: 601676 - DNA, 54 bp, Artificial; identical to SEQ ID NO: 454023
  Synthetic oligonucleotide

SEQ ID NO: 601677 - DNA, 60 bp, Artificial; identical to SEQ ID NO: 454027
  Synthetic oligonucleotide

SEQ ID NO: 601678 - DNA, 57 bp, Artificial; identical to SEQ ID NO: 454033
  Synthetic oligonucleotide

SEQ ID NO: 601679 - DNA, 59 bp, Artificial; identical to SEQ ID NO: 454035
  Synthetic oligonucleotide

SEQ ID NO: 601680 - DNA, 60 bp, Artificial; identical to SEQ ID NO: 454036
  Synthetic oligonucleotide

SEQ ID NO: 601681 - DNA, 54 bp, Artificial; identical to SEQ ID NO: 15061
  Synthetic oligonucleotide

SEQ ID NO: 601682 - DNA, 56 bp, Artificial; identical to SEQ ID NO: 454041
  Synthetic oligonucleotide

SEQ ID NO: 601683 - DNA, 60 bp, Artificial; identical to SEQ ID NO: 454043
  Synthetic oligonucleotide

SEQ ID NO: 601684 - DNA, 55 bp, Artificial; identical to SEQ ID NO: 454049
  Synthetic oligonucleotide

SEQ ID NO: 601685 - DNA, 60 bp, Artificial; identical to SEQ ID NO: 454050
  Synthetic oligonucleotide

SEQ ID NO: 601686 - DNA, 56 bp, Artificial; identical to SEQ ID NO: 454051
  Synthetic oligonucleotide

SEQ ID NO: 601687 - DNA, 58 bp, Artificial; identical to SEQ ID NO: 18720
  Synthetic oligonucleotide

SEQ ID NO: 601688 - DNA, 58 bp, Artificial; identical to SEQ ID NO: 454054
  Synthetic oligonucleotide

SEQ ID NO: 601689 - DNA, 60 bp, Artificial; identical to SEQ ID NO: 454055
  Synthetic oligonucleotide

SEQ ID NO: 601690 - DNA, 60 bp, Artificial; identical to SEQ ID NO: 454057
  Synthetic oligonucleotide

SEQ ID NO: 601691 - DNA, 57 bp, Artificial; identical to SEQ ID NO: 454060
  Synthetic oligonucleotide

SEQ ID NO: 601692 - DNA, 60 bp, Artificial; identical to SEQ ID NO: 15536
  Synthetic oligonucleotide

SEQ ID NO: 601693 - DNA, 60 bp, Artificial; identical to SEQ ID NO: 454064
  Synthetic oligonucleotide

SEQ ID NO: 601694 - DNA, 59 bp, Artificial; identical to SEQ ID NO: 454065
  Synthetic oligonucleotide

SEQ ID NO: 601695 - DNA, 58 bp, Artificial; identical to SEQ ID NO: 454067
  Synthetic oligonucleotide

SEQ ID NO: 601696 - DNA, 60 bp, Artificial; identical to SEQ ID NO: 454071
  Synthetic oligonucleotide

SEQ ID NO: 601697 - DNA, 60 bp, Artificial; identical to SEQ ID NO: 454072
  Synthetic oligonucleotide

SEQ ID NO: 601698 - DNA, 58 bp, Artificial; identical to SEQ ID NO: 454074
  Synthetic oligonucleotide

SEQ ID NO: 601699 - DNA, 53 bp, Artificial; identical to SEQ ID NO: 454075
  Synthetic oligonucleotide

SEQ ID NO: 601700 - DNA, 55 bp, Artificial; identical to SEQ ID NO: 454077
  Synthetic oligonucleotide

SEQ ID NO: 601701 - DNA, 55 bp, Artificial; identical to SEQ ID NO: 454083
  Synthetic oligonucleotide

SEQ ID NO: 601702 - DNA, 57 bp, Artificial; identical to SEQ ID NO: 454084
  Synthetic oligonucleotide

SEQ ID NO: 601703 - DNA, 59 bp, Artificial; identical to SEQ ID NO: 454085
  Synthetic oligonucleotide

SEQ ID NO: 601704 - DNA, 58 bp, Artificial; identical to SEQ ID NO: 454086
  Synthetic oligonucleotide

SEQ ID NO: 601705 - DNA, 50 bp, Artificial; identical to SEQ ID NO: 454089
  Synthetic oligonucleotide

SEQ ID NO: 601706 - DNA, 56 bp, Artificial; identical to SEQ ID NO: 454090
  Synthetic oligonucleotide

SEQ ID NO: 601707 - DNA, 51 bp, Artificial; identical to SEQ ID NO: 454092
  Synthetic oligonucleotide

SEQ ID NO: 601708 - DNA, 58 bp, Artificial; identical to SEQ ID NO: 454100
  Synthetic oligonucleotide

SEQ ID NO: 601709 - DNA, 56 bp, Artificial; identical to SEQ ID NO: 454104
  Synthetic oligonucleotide

SEQ ID NO: 601710 - DNA, 60 bp, Artificial; identical to SEQ ID NO: 14166
  Synthetic oligonucleotide

SEQ ID NO: 601711 - DNA, 55 bp, Artificial; identical to SEQ ID NO: 454109
  Synthetic oligonucleotide

SEQ ID NO: 601712 - DNA, 60 bp, Artificial; identical to SEQ ID NO: 454111
  Synthetic oligonucleotide

SEQ ID NO: 601713 - DNA, 58 bp, Artificial; identical to SEQ ID NO: 454113
  Synthetic oligonucleotide

SEQ ID NO: 601714 - DNA, 52 bp, Artificial; identical to SEQ ID NO: 454114
  Synthetic oligonucleotide

SEQ ID NO: 601715 - DNA, 53 bp, Artificial; identical to SEQ ID NO: 18690
  Synthetic oligonucleotide

SEQ ID NO: 601716 - DNA, 60 bp, Artificial; identical to SEQ ID NO: 454117
  Synthetic oligonucleotide

SEQ ID NO: 601717 - DNA, 56 bp, Artificial; identical to SEQ ID NO: 454122
  Synthetic oligonucleotide

SEQ ID NO: 601718 - DNA, 60 bp, Artificial; identical to SEQ ID NO: 454123
  Synthetic oligonucleotide

SEQ ID NO: 601719 - DNA, 60 bp, Artificial; identical to SEQ ID NO: 454125
  Synthetic oligonucleotide

SEQ ID NO: 601720 - DNA, 60 bp, Artificial; identical to SEQ ID NO: 454127
  Synthetic oligonucleotide

SEQ ID NO: 601721 - DNA, 57 bp, Artificial; identical to SEQ ID NO: 454128
  Synthetic oligonucleotide

SEQ ID NO: 601722 - DNA, 58 bp, Artificial; identical to SEQ ID NO: 454133
  Synthetic oligonucleotide

SEQ ID NO: 601723 - DNA, 58 bp, Artificial; identical to SEQ ID NO: 454138
  Synthetic oligonucleotide

SEQ ID NO: 601724 - DNA, 58 bp, Artificial; identical to SEQ ID NO: 454140
  Synthetic oligonucleotide

SEQ ID NO: 601725 - DNA, 59 bp, Artificial; identical to SEQ ID NO: 454142
  Synthetic oligonucleotide

SEQ ID NO: 601726 - DNA, 54 bp, Artificial; identical to SEQ ID NO: 454145
  Synthetic oligonucleotide

SEQ ID NO: 601727 - DNA, 55 bp, Artificial; identical to SEQ ID NO: 454146
  Synthetic oligonucleotide

SEQ ID NO: 601728 - DNA, 53 bp, Artificial; identical to SEQ ID NO: 454147
  Synthetic oligonucleotide

SEQ ID NO: 601729 - DNA, 55 bp, Artificial; identical to SEQ ID NO: 454148
  Synthetic oligonucleotide

SEQ ID NO: 601730 - DNA, 55 bp, Artificial; identical to SEQ ID NO: 454151
  Synthetic oligonucleotide

SEQ ID NO: 601731 - DNA, 59 bp, Artificial; identical to SEQ ID NO: 454153
  Synthetic oligonucleotide

SEQ ID NO: 601732 - DNA, 54 bp, Artificial; identical to SEQ ID NO: 454157
  Synthetic oligonucleotide

SEQ ID NO: 601733 - DNA, 60 bp, Artificial; identical to SEQ ID NO: 454160
  Synthetic oligonucleotide

SEQ ID NO: 601734 - DNA, 55 bp, Artificial; identical to SEQ ID NO: 454161
  Synthetic oligonucleotide

SEQ ID NO: 601735 - DNA, 55 bp, Artificial; identical to SEQ ID NO: 454162
  Synthetic oligonucleotide

SEQ ID NO: 601736 - DNA, 60 bp, Artificial; identical to SEQ ID NO: 454164
  Synthetic oligonucleotide

SEQ ID NO: 601737 - DNA, 55 bp, Artificial; identical to SEQ ID NO: 454166
  Synthetic oligonucleotide

SEQ ID NO: 601738 - DNA, 60 bp, Artificial; identical to SEQ ID NO: 454167
  Synthetic oligonucleotide

SEQ ID NO: 601739 - DNA, 50 bp, Artificial; identical to SEQ ID NO: 454173
  Synthetic oligonucleotide

SEQ ID NO: 601740 - DNA, 55 bp, Artificial; identical to SEQ ID NO: 454178
  Synthetic oligonucleotide

SEQ ID NO: 601741 - DNA, 54 bp, Artificial; identical to SEQ ID NO: 454180
  Synthetic oligonucleotide

SEQ ID NO: 601742 - DNA, 52 bp, Artificial; identical to SEQ ID NO: 454181
  Synthetic oligonucleotide

SEQ ID NO: 601743 - DNA, 55 bp, Artificial; identical to SEQ ID NO: 454182
  Synthetic oligonucleotide

SEQ ID NO: 601744 - DNA, 60 bp, Artificial; identical to SEQ ID NO: 454186
  Synthetic oligonucleotide

SEQ ID NO: 601745 - DNA, 60 bp, Artificial; identical to SEQ ID NO: 454188
  Synthetic oligonucleotide

SEQ ID NO: 601746 - DNA, 58 bp, Artificial; identical to SEQ ID NO: 454192
  Synthetic oligonucleotide

SEQ ID NO: 601747 - DNA, 54 bp, Artificial; identical to SEQ ID NO: 454193
  Synthetic oligonucleotide

SEQ ID NO: 601748 - DNA, 60 bp, Artificial; identical to SEQ ID NO: 454196
  Synthetic oligonucleotide

SEQ ID NO: 601749 - DNA, 60 bp, Artificial; identical to SEQ ID NO: 454198
  Synthetic oligonucleotide

SEQ ID NO: 601750 - DNA, 60 bp, Artificial; identical to SEQ ID NO: 454199
  Synthetic oligonucleotide

SEQ ID NO: 601751 - DNA, 60 bp, Artificial; identical to SEQ ID NO: 454202
  Synthetic oligonucleotide

SEQ ID NO: 601752 - DNA, 57 bp, Artificial; identical to SEQ ID NO: 454203
  Synthetic oligonucleotide

SEQ ID NO: 601753 - DNA, 60 bp, Artificial; identical to SEQ ID NO: 454207
  Synthetic oligonucleotide

SEQ ID NO: 601754 - DNA, 60 bp, Artificial; identical to SEQ ID NO: 454208
  Synthetic oligonucleotide

SEQ ID NO: 601755 - DNA, 60 bp, Artificial; identical to SEQ ID NO: 454210
  Synthetic oligonucleotide

SEQ ID NO: 601756 - DNA, 57 bp, Artificial; identical to SEQ ID NO: 454214
  Synthetic oligonucleotide

SEQ ID NO: 601757 - DNA, 53 bp, Artificial; identical to SEQ ID NO: 454217
  Synthetic oligonucleotide

SEQ ID NO: 601758 - DNA, 55 bp, Artificial; identical to SEQ ID NO: 454218
  Synthetic oligonucleotide

SEQ ID NO: 601759 - DNA, 54 bp, Artificial; identical to SEQ ID NO: 454223
  Synthetic oligonucleotide

SEQ ID NO: 601760 - DNA, 51 bp, Artificial; identical to SEQ ID NO: 454224
  Synthetic oligonucleotide

SEQ ID NO: 601761 - DNA, 60 bp, Artificial; identical to SEQ ID NO: 454225
  Synthetic oligonucleotide

SEQ ID NO: 601762 - DNA, 59 bp, Artificial; identical to SEQ ID NO: 454228
  Synthetic oligonucleotide

SEQ ID NO: 601763 - DNA, 59 bp, Artificial; identical to SEQ ID NO: 454235
  Synthetic oligonucleotide

SEQ ID NO: 601764 - DNA, 60 bp, Artificial; identical to SEQ ID NO: 454236
  Synthetic oligonucleotide

SEQ ID NO: 601765 - DNA, 60 bp, Artificial; identical to SEQ ID NO: 454246
  Synthetic oligonucleotide

SEQ ID NO: 601766 - DNA, 60 bp, Artificial; identical to SEQ ID NO: 454247
  Synthetic oligonucleotide

SEQ ID NO: 601767 - DNA, 57 bp, Artificial; identical to SEQ ID NO: 454249
  Synthetic oligonucleotide

SEQ ID NO: 601768 - DNA, 60 bp, Artificial; identical to SEQ ID NO: 454253
  Synthetic oligonucleotide

SEQ ID NO: 601769 - DNA, 60 bp, Artificial; identical to SEQ ID NO: 454255
  Synthetic oligonucleotide

SEQ ID NO: 601770 - DNA, 57 bp, Artificial; identical to SEQ ID NO: 454258
  Synthetic oligonucleotide

SEQ ID NO: 601771 - DNA, 59 bp, Artificial; identical to SEQ ID NO: 454268
  Synthetic oligonucleotide

SEQ ID NO: 601772 - DNA, 59 bp, Artificial; identical to SEQ ID NO: 454269
  Synthetic oligonucleotide

SEQ ID NO: 601773 - DNA, 55 bp, Artificial; identical to SEQ ID NO: 454270
  Synthetic oligonucleotide

SEQ ID NO: 601774 - DNA, 60 bp, Artificial; identical to SEQ ID NO: 23367
  Synthetic oligonucleotide

SEQ ID NO: 601775 - DNA, 55 bp, Artificial; identical to SEQ ID NO: 454275
  Synthetic oligonucleotide

SEQ ID NO: 601776 - DNA, 60 bp, Artificial; identical to SEQ ID NO: 454276
  Synthetic oligonucleotide

SEQ ID NO: 601777 - DNA, 60 bp, Artificial; identical to SEQ ID NO: 454282
  Synthetic oligonucleotide

SEQ ID NO: 601778 - DNA, 57 bp, Artificial; identical to SEQ ID NO: 454284
  Synthetic oligonucleotide

SEQ ID NO: 601779 - DNA, 55 bp, Artificial; identical to SEQ ID NO: 454285
  Synthetic oligonucleotide

SEQ ID NO: 601780 - DNA, 52 bp, Artificial; identical to SEQ ID NO: 454287
  Synthetic oligonucleotide

SEQ ID NO: 601781 - DNA, 55 bp, Artificial; identical to SEQ ID NO: 454288
  Synthetic oligonucleotide

SEQ ID NO: 601782 - DNA, 60 bp, Artificial; identical to SEQ ID NO: 454289
  Synthetic oligonucleotide

SEQ ID NO: 601783 - DNA, 60 bp, Artificial; identical to SEQ ID NO: 454292
  Synthetic oligonucleotide

SEQ ID NO: 601784 - DNA, 57 bp, Artificial; identical to SEQ ID NO: 454295
  Synthetic oligonucleotide

SEQ ID NO: 601785 - DNA, 58 bp, Artificial; identical to SEQ ID NO: 454299
  Synthetic oligonucleotide

SEQ ID NO: 601786 - DNA, 59 bp, Artificial; identical to SEQ ID NO: 454300
  Synthetic oligonucleotide

SEQ ID NO: 601787 - DNA, 55 bp, Artificial; identical to SEQ ID NO: 454301
  Synthetic oligonucleotide

SEQ ID NO: 601788 - DNA, 55 bp, Artificial; identical to SEQ ID NO: 454302
  Synthetic oligonucleotide

SEQ ID NO: 601789 - DNA, 58 bp, Artificial; identical to SEQ ID NO: 454303
  Synthetic oligonucleotide

SEQ ID NO: 601790 - DNA, 60 bp, Artificial; identical to SEQ ID NO: 454304
  Synthetic oligonucleotide

SEQ ID NO: 601791 - DNA, 50 bp, Artificial; identical to SEQ ID NO: 454305
  Synthetic oligonucleotide

SEQ ID NO: 601792 - DNA, 60 bp, Artificial; identical to SEQ ID NO: 454306
  Synthetic oligonucleotide

SEQ ID NO: 601793 - DNA, 60 bp, Artificial; identical to SEQ ID NO: 454310
  Synthetic oligonucleotide

SEQ ID NO: 601794 - DNA, 55 bp, Artificial; identical to SEQ ID NO: 454311
  Synthetic oligonucleotide

SEQ ID NO: 601795 - DNA, 60 bp, Artificial; identical to SEQ ID NO: 454312
  Synthetic oligonucleotide

SEQ ID NO: 601796 - DNA, 60 bp, Artificial; identical to SEQ ID NO: 454315
  Synthetic oligonucleotide

SEQ ID NO: 601797 - DNA, 60 bp, Artificial; identical to SEQ ID NO: 14162
  Synthetic oligonucleotide

SEQ ID NO: 601798 - DNA, 50 bp, Artificial; identical to SEQ ID NO: 454319
  Synthetic oligonucleotide

SEQ ID NO: 601799 - DNA, 60 bp, Artificial; identical to SEQ ID NO: 454320
  Synthetic oligonucleotide

SEQ ID NO: 601800 - DNA, 60 bp, Artificial; identical to SEQ ID NO: 454323
  Synthetic oligonucleotide

SEQ ID NO: 601801 - DNA, 54 bp, Artificial; identical to SEQ ID NO: 454324
  Synthetic oligonucleotide

SEQ ID NO: 601802 - DNA, 55 bp, Artificial; identical to SEQ ID NO: 454329
  Synthetic oligonucleotide

SEQ ID NO: 601803 - DNA, 55 bp, Artificial; identical to SEQ ID NO: 454330
  Synthetic oligonucleotide

SEQ ID NO: 601804 - DNA, 58 bp, Artificial; identical to SEQ ID NO: 454333
  Synthetic oligonucleotide

SEQ ID NO: 601805 - DNA, 54 bp, Artificial; identical to SEQ ID NO: 454337
  Synthetic oligonucleotide

SEQ ID NO: 601806 - DNA, 58 bp, Artificial; identical to SEQ ID NO: 454338
  Synthetic oligonucleotide

SEQ ID NO: 601807 - DNA, 60 bp, Artificial; identical to SEQ ID NO: 454340
  Synthetic oligonucleotide

SEQ ID NO: 601808 - DNA, 56 bp, Artificial; identical to SEQ ID NO: 454343
  Synthetic oligonucleotide

SEQ ID NO: 601809 - DNA, 55 bp, Artificial; identical to SEQ ID NO: 454344
  Synthetic oligonucleotide

SEQ ID NO: 601810 - DNA, 57 bp, Artificial; identical to SEQ ID NO: 454347
  Synthetic oligonucleotide

SEQ ID NO: 601811 - DNA, 50 bp, Artificial; identical to SEQ ID NO: 454349
  Synthetic oligonucleotide

SEQ ID NO: 601812 - DNA, 60 bp, Artificial; identical to SEQ ID NO: 12405
  Synthetic oligonucleotide

SEQ ID NO: 601813 - DNA, 60 bp, Artificial; identical to SEQ ID NO: 454354
  Synthetic oligonucleotide

SEQ ID NO: 601814 - DNA, 60 bp, Artificial; identical to SEQ ID NO: 454355
  Synthetic oligonucleotide

SEQ ID NO: 601815 - DNA, 55 bp, Artificial; identical to SEQ ID NO: 454356
  Synthetic oligonucleotide

SEQ ID NO: 601816 - DNA, 60 bp, Artificial; identical to SEQ ID NO: 7597
  Synthetic oligonucleotide

SEQ ID NO: 601817 - DNA, 60 bp, Artificial; identical to SEQ ID NO: 454358
  Synthetic oligonucleotide

SEQ ID NO: 601818 - DNA, 60 bp, Artificial; identical to SEQ ID NO: 454359
  Synthetic oligonucleotide

SEQ ID NO: 601819 - DNA, 53 bp, Artificial; identical to SEQ ID NO: 454360
  Synthetic oligonucleotide

SEQ ID NO: 601820 - DNA, 60 bp, Artificial; identical to SEQ ID NO: 454362
  Synthetic oligonucleotide

SEQ ID NO: 601821 - DNA, 60 bp, Artificial; identical to SEQ ID NO: 454363
  Synthetic oligonucleotide

SEQ ID NO: 601822 - DNA, 60 bp, Artificial; identical to SEQ ID NO: 454367
  Synthetic oligonucleotide

SEQ ID NO: 601823 - DNA, 51 bp, Artificial; identical to SEQ ID NO: 454369
  Synthetic oligonucleotide

SEQ ID NO: 601824 - DNA, 54 bp, Artificial; identical to SEQ ID NO: 454372
  Synthetic oligonucleotide

SEQ ID NO: 601825 - DNA, 57 bp, Artificial; identical to SEQ ID NO: 454374
  Synthetic oligonucleotide

SEQ ID NO: 601826 - DNA, 60 bp, Artificial; identical to SEQ ID NO: 6605
  Synthetic oligonucleotide

SEQ ID NO: 601827 - DNA, 55 bp, Artificial; identical to SEQ ID NO: 454377
  Synthetic oligonucleotide

SEQ ID NO: 601828 - DNA, 60 bp, Artificial; identical to SEQ ID NO: 454379
  Synthetic oligonucleotide

SEQ ID NO: 601829 - DNA, 56 bp, Artificial; identical to SEQ ID NO: 454384
  Synthetic oligonucleotide

SEQ ID NO: 601830 - DNA, 60 bp, Artificial; identical to SEQ ID NO: 454385
  Synthetic oligonucleotide

SEQ ID NO: 601831 - DNA, 60 bp, Artificial; identical to SEQ ID NO: 454390
  Synthetic oligonucleotide

SEQ ID NO: 601832 - DNA, 54 bp, Artificial; identical to SEQ ID NO: 454395
  Synthetic oligonucleotide

SEQ ID NO: 601833 - DNA, 54 bp, Artificial; identical to SEQ ID NO: 454397
  Synthetic oligonucleotide

SEQ ID NO: 601834 - DNA, 50 bp, Artificial; identical to SEQ ID NO: 454398
  Synthetic oligonucleotide

SEQ ID NO: 601835 - DNA, 58 bp, Artificial; identical to SEQ ID NO: 454400
  Synthetic oligonucleotide

SEQ ID NO: 601836 - DNA, 60 bp, Artificial; identical to SEQ ID NO: 454402
  Synthetic oligonucleotide

SEQ ID NO: 601837 - DNA, 60 bp, Artificial; identical to SEQ ID NO: 454403
  Synthetic oligonucleotide

SEQ ID NO: 601838 - DNA, 60 bp, Artificial; identical to SEQ ID NO: 454404
  Synthetic oligonucleotide

SEQ ID NO: 601839 - DNA, 59 bp, Artificial; identical to SEQ ID NO: 454416
  Synthetic oligonucleotide

SEQ ID NO: 601840 - DNA, 55 bp, Artificial; identical to SEQ ID NO: 454418
  Synthetic oligonucleotide

SEQ ID NO: 601841 - DNA, 57 bp, Artificial; identical to SEQ ID NO: 454424
  Synthetic oligonucleotide

SEQ ID NO: 601842 - DNA, 51 bp, Artificial; identical to SEQ ID NO: 454429
  Synthetic oligonucleotide

SEQ ID NO: 601843 - DNA, 58 bp, Artificial; identical to SEQ ID NO: 454430
  Synthetic oligonucleotide

SEQ ID NO: 601844 - DNA, 52 bp, Artificial; identical to SEQ ID NO: 454431
  Synthetic oligonucleotide

SEQ ID NO: 601845 - DNA, 55 bp, Artificial; identical to SEQ ID NO: 454433
  Synthetic oligonucleotide

SEQ ID NO: 601846 - DNA, 60 bp, Artificial; identical to SEQ ID NO: 454436
  Synthetic oligonucleotide

SEQ ID NO: 601847 - DNA, 50 bp, Artificial; identical to SEQ ID NO: 454439
  Synthetic oligonucleotide

SEQ ID NO: 601848 - DNA, 60 bp, Artificial; identical to SEQ ID NO: 454442
  Synthetic oligonucleotide

SEQ ID NO: 601849 - DNA, 57 bp, Artificial; identical to SEQ ID NO: 20307
  Synthetic oligonucleotide

SEQ ID NO: 601850 - DNA, 54 bp, Artificial; identical to SEQ ID NO: 454443
  Synthetic oligonucleotide

SEQ ID NO: 601851 - DNA, 60 bp, Artificial; identical to SEQ ID NO: 454446
  Synthetic oligonucleotide

SEQ ID NO: 601852 - DNA, 60 bp, Artificial; identical to SEQ ID NO: 454449
  Synthetic oligonucleotide

SEQ ID NO: 601853 - DNA, 60 bp, Artificial; identical to SEQ ID NO: 7870
  Synthetic oligonucleotide

SEQ ID NO: 601854 - DNA, 59 bp, Artificial; identical to SEQ ID NO: 454456
  Synthetic oligonucleotide

SEQ ID NO: 601855 - DNA, 60 bp, Artificial; identical to SEQ ID NO: 454457
  Synthetic oligonucleotide

SEQ ID NO: 601856 - DNA, 60 bp, Artificial; identical to SEQ ID NO: 13369
  Synthetic oligonucleotide

SEQ ID NO: 601857 - DNA, 50 bp, Artificial; identical to SEQ ID NO: 454459
  Synthetic oligonucleotide

SEQ ID NO: 601858 - DNA, 55 bp, Artificial; identical to SEQ ID NO: 454461
  Synthetic oligonucleotide

SEQ ID NO: 601859 - DNA, 60 bp, Artificial; identical to SEQ ID NO: 454468
  Synthetic oligonucleotide

SEQ ID NO: 601860 - DNA, 55 bp, Artificial; identical to SEQ ID NO: 454470
  Synthetic oligonucleotide

SEQ ID NO: 601861 - DNA, 60 bp, Artificial; identical to SEQ ID NO: 454473
  Synthetic oligonucleotide

SEQ ID NO: 601862 - DNA, 60 bp, Artificial; identical to SEQ ID NO: 454474
  Synthetic oligonucleotide

SEQ ID NO: 601863 - DNA, 55 bp, Artificial; identical to SEQ ID NO: 454475
  Synthetic oligonucleotide

SEQ ID NO: 601864 - DNA, 53 bp, Artificial; identical to SEQ ID NO: 454476
  Synthetic oligonucleotide

SEQ ID NO: 601865 - DNA, 55 bp, Artificial; identical to SEQ ID NO: 454478
  Synthetic oligonucleotide

SEQ ID NO: 601866 - DNA, 58 bp, Artificial; identical to SEQ ID NO: 454480
  Synthetic oligonucleotide

SEQ ID NO: 601867 - DNA, 57 bp, Artificial; identical to SEQ ID NO: 454483
  Synthetic oligonucleotide

SEQ ID NO: 601868 - DNA, 53 bp, Artificial; identical to SEQ ID NO: 454488
  Synthetic oligonucleotide

SEQ ID NO: 601869 - DNA, 54 bp, Artificial; identical to SEQ ID NO: 454489
  Synthetic oligonucleotide

SEQ ID NO: 601870 - DNA, 55 bp, Artificial; identical to SEQ ID NO: 454490
  Synthetic oligonucleotide

SEQ ID NO: 601871 - DNA, 60 bp, Artificial; identical to SEQ ID NO: 454497
  Synthetic oligonucleotide

SEQ ID NO: 601872 - DNA, 60 bp, Artificial; identical to SEQ ID NO: 454499
  Synthetic oligonucleotide

SEQ ID NO: 601873 - DNA, 60 bp, Artificial; identical to SEQ ID NO: 454500
  Synthetic oligonucleotide

SEQ ID NO: 601874 - DNA, 60 bp, Artificial; identical to SEQ ID NO: 454502
  Synthetic oligonucleotide

SEQ ID NO: 601875 - DNA, 60 bp, Artificial; identical to SEQ ID NO: 454506
  Synthetic oligonucleotide

SEQ ID NO: 601876 - DNA, 60 bp, Artificial; identical to SEQ ID NO: 454510
  Synthetic oligonucleotide

SEQ ID NO: 601877 - DNA, 60 bp, Artificial; identical to SEQ ID NO: 454511
  Synthetic oligonucleotide

SEQ ID NO: 601878 - DNA, 58 bp, Artificial; identical to SEQ ID NO: 454517
  Synthetic oligonucleotide

SEQ ID NO: 601879 - DNA, 60 bp, Artificial; identical to SEQ ID NO: 454519
  Synthetic oligonucleotide

SEQ ID NO: 601880 - DNA, 60 bp, Artificial; identical to SEQ ID NO: 454520
  Synthetic oligonucleotide

SEQ ID NO: 601881 - DNA, 52 bp, Artificial; identical to SEQ ID NO: 454521
  Synthetic oligonucleotide

SEQ ID NO: 601882 - DNA, 55 bp, Artificial; identical to SEQ ID NO: 454522
  Synthetic oligonucleotide

SEQ ID NO: 601883 - DNA, 55 bp, Artificial; identical to SEQ ID NO: 454529
  Synthetic oligonucleotide

SEQ ID NO: 601884 - DNA, 60 bp, Artificial; identical to SEQ ID NO: 454530
  Synthetic oligonucleotide

SEQ ID NO: 601885 - DNA, 59 bp, Artificial; identical to SEQ ID NO: 454533
  Synthetic oligonucleotide

SEQ ID NO: 601886 - DNA, 57 bp, Artificial; identical to SEQ ID NO: 454534
  Synthetic oligonucleotide

SEQ ID NO: 601887 - DNA, 60 bp, Artificial; identical to SEQ ID NO: 14485
  Synthetic oligonucleotide

SEQ ID NO: 601888 - DNA, 60 bp, Artificial; identical to SEQ ID NO: 454537
  Synthetic oligonucleotide

SEQ ID NO: 601889 - DNA, 59 bp, Artificial; identical to SEQ ID NO: 454539
  Synthetic oligonucleotide

SEQ ID NO: 601890 - DNA, 60 bp, Artificial; identical to SEQ ID NO: 454540
  Synthetic oligonucleotide

SEQ ID NO: 601891 - DNA, 56 bp, Artificial; identical to SEQ ID NO: 454542
  Synthetic oligonucleotide

SEQ ID NO: 601892 - DNA, 58 bp, Artificial; identical to SEQ ID NO: 454550
  Synthetic oligonucleotide

SEQ ID NO: 601893 - DNA, 59 bp, Artificial; identical to SEQ ID NO: 454552
  Synthetic oligonucleotide

SEQ ID NO: 601894 - DNA, 60 bp, Artificial; identical to SEQ ID NO: 454554
  Synthetic oligonucleotide

SEQ ID NO: 601895 - DNA, 60 bp, Artificial; identical to SEQ ID NO: 454555
  Synthetic oligonucleotide

SEQ ID NO: 601896 - DNA, 59 bp, Artificial; identical to SEQ ID NO: 454558
  Synthetic oligonucleotide

SEQ ID NO: 601897 - DNA, 51 bp, Artificial; identical to SEQ ID NO: 454560
  Synthetic oligonucleotide

SEQ ID NO: 601898 - DNA, 56 bp, Artificial; identical to SEQ ID NO: 454562
  Synthetic oligonucleotide

SEQ ID NO: 601899 - DNA, 60 bp, Artificial; identical to SEQ ID NO: 454563
  Synthetic oligonucleotide

SEQ ID NO: 601900 - DNA, 60 bp, Artificial; identical to SEQ ID NO: 454566
  Synthetic oligonucleotide

SEQ ID NO: 601901 - DNA, 59 bp, Artificial; identical to SEQ ID NO: 454568
  Synthetic oligonucleotide

SEQ ID NO: 601902 - DNA, 56 bp, Artificial; identical to SEQ ID NO: 454569
  Synthetic oligonucleotide

SEQ ID NO: 601903 - DNA, 60 bp, Artificial; identical to SEQ ID NO: 454573
  Synthetic oligonucleotide

SEQ ID NO: 601904 - DNA, 55 bp, Artificial; identical to SEQ ID NO: 454574
  Synthetic oligonucleotide

SEQ ID NO: 601905 - DNA, 60 bp, Artificial; identical to SEQ ID NO: 454576
  Synthetic oligonucleotide

SEQ ID NO: 601906 - DNA, 60 bp, Artificial; identical to SEQ ID NO: 454578
  Synthetic oligonucleotide

SEQ ID NO: 601907 - DNA, 60 bp, Artificial; identical to SEQ ID NO: 454580
  Synthetic oligonucleotide

SEQ ID NO: 601908 - DNA, 55 bp, Artificial; identical to SEQ ID NO: 454585
  Synthetic oligonucleotide

SEQ ID NO: 601909 - DNA, 56 bp, Artificial; identical to SEQ ID NO: 454594
  Synthetic oligonucleotide

SEQ ID NO: 601910 - DNA, 60 bp, Artificial; identical to SEQ ID NO: 454597
  Synthetic oligonucleotide

SEQ ID NO: 601911 - DNA, 58 bp, Artificial; identical to SEQ ID NO: 454600
  Synthetic oligonucleotide

SEQ ID NO: 601912 - DNA, 59 bp, Artificial; identical to SEQ ID NO: 454604
  Synthetic oligonucleotide

SEQ ID NO: 601913 - DNA, 56 bp, Artificial; identical to SEQ ID NO: 454606
  Synthetic oligonucleotide

SEQ ID NO: 601914 - DNA, 55 bp, Artificial; identical to SEQ ID NO: 454607
  Synthetic oligonucleotide

SEQ ID NO: 601915 - DNA, 60 bp, Artificial; identical to SEQ ID NO: 454611
  Synthetic oligonucleotide

SEQ ID NO: 601916 - DNA, 60 bp, Artificial; identical to SEQ ID NO: 454618
  Synthetic oligonucleotide

SEQ ID NO: 601917 - DNA, 55 bp, Artificial; identical to SEQ ID NO: 454620
  Synthetic oligonucleotide

SEQ ID NO: 601918 - DNA, 60 bp, Artificial; identical to SEQ ID NO: 454621
  Synthetic oligonucleotide

SEQ ID NO: 601919 - DNA, 55 bp, Artificial; identical to SEQ ID NO: 454622
  Synthetic oligonucleotide

SEQ ID NO: 601920 - DNA, 60 bp, Artificial; identical to SEQ ID NO: 454624
  Synthetic oligonucleotide

SEQ ID NO: 601921 - DNA, 55 bp, Artificial; identical to SEQ ID NO: 454629
  Synthetic oligonucleotide

SEQ ID NO: 601922 - DNA, 60 bp, Artificial; identical to SEQ ID NO: 454630
  Synthetic oligonucleotide

SEQ ID NO: 601923 - DNA, 60 bp, Artificial; identical to SEQ ID NO: 454631
  Synthetic oligonucleotide

SEQ ID NO: 601924 - DNA, 60 bp, Artificial; identical to SEQ ID NO: 454633
  Synthetic oligonucleotide

SEQ ID NO: 601925 - DNA, 60 bp, Artificial; identical to SEQ ID NO: 454634
  Synthetic oligonucleotide

SEQ ID NO: 601926 - DNA, 56 bp, Artificial; identical to SEQ ID NO: 454637
  Synthetic oligonucleotide

SEQ ID NO: 601927 - DNA, 60 bp, Artificial; identical to SEQ ID NO: 454641
  Synthetic oligonucleotide

SEQ ID NO: 601928 - DNA, 58 bp, Artificial; identical to SEQ ID NO: 454642
  Synthetic oligonucleotide

SEQ ID NO: 601929 - DNA, 58 bp, Artificial; identical to SEQ ID NO: 454643
  Synthetic oligonucleotide

SEQ ID NO: 601930 - DNA, 58 bp, Artificial; identical to SEQ ID NO: 16296
  Synthetic oligonucleotide

SEQ ID NO: 601931 - DNA, 55 bp, Artificial; identical to SEQ ID NO: 454646
  Synthetic oligonucleotide

SEQ ID NO: 601932 - DNA, 56 bp, Artificial; identical to SEQ ID NO: 454647
  Synthetic oligonucleotide

SEQ ID NO: 601933 - DNA, 57 bp, Artificial; identical to SEQ ID NO: 454651
  Synthetic oligonucleotide

SEQ ID NO: 601934 - DNA, 59 bp, Artificial; identical to SEQ ID NO: 454653
  Synthetic oligonucleotide

SEQ ID NO: 601935 - DNA, 60 bp, Artificial; identical to SEQ ID NO: 454655
  Synthetic oligonucleotide

SEQ ID NO: 601936 - DNA, 55 bp, Artificial; identical to SEQ ID NO: 454656
  Synthetic oligonucleotide

SEQ ID NO: 601937 - DNA, 60 bp, Artificial; identical to SEQ ID NO: 454658
  Synthetic oligonucleotide

SEQ ID NO: 601938 - DNA, 58 bp, Artificial; identical to SEQ ID NO: 454660
  Synthetic oligonucleotide

SEQ ID NO: 601939 - DNA, 54 bp, Artificial; identical to SEQ ID NO: 454661
  Synthetic oligonucleotide

SEQ ID NO: 601940 - DNA, 59 bp, Artificial; identical to SEQ ID NO: 454662
  Synthetic oligonucleotide

SEQ ID NO: 601941 - DNA, 60 bp, Artificial; identical to SEQ ID NO: 454663
  Synthetic oligonucleotide

SEQ ID NO: 601942 - DNA, 51 bp, Artificial; identical to SEQ ID NO: 454664
  Synthetic oligonucleotide

SEQ ID NO: 601943 - DNA, 60 bp, Artificial; identical to SEQ ID NO: 454667
  Synthetic oligonucleotide

SEQ ID NO: 601944 - DNA, 60 bp, Artificial; identical to SEQ ID NO: 454668
  Synthetic oligonucleotide

SEQ ID NO: 601945 - DNA, 60 bp, Artificial; identical to SEQ ID NO: 454676
  Synthetic oligonucleotide

SEQ ID NO: 601946 - DNA, 57 bp, Artificial; identical to SEQ ID NO: 14593
  Synthetic oligonucleotide

SEQ ID NO: 601947 - DNA, 59 bp, Artificial; identical to SEQ ID NO: 454677
  Synthetic oligonucleotide

SEQ ID NO: 601948 - DNA, 53 bp, Artificial; identical to SEQ ID NO: 454678
  Synthetic oligonucleotide

SEQ ID NO: 601949 - DNA, 55 bp, Artificial; identical to SEQ ID NO: 454679
  Synthetic oligonucleotide

SEQ ID NO: 601950 - DNA, 60 bp, Artificial; identical to SEQ ID NO: 454680
  Synthetic oligonucleotide

SEQ ID NO: 601951 - DNA, 58 bp, Artificial; identical to SEQ ID NO: 454683
  Synthetic oligonucleotide

SEQ ID NO: 601952 - DNA, 55 bp, Artificial; identical to SEQ ID NO: 17366
  Synthetic oligonucleotide

SEQ ID NO: 601953 - DNA, 60 bp, Artificial; identical to SEQ ID NO: 454685
  Synthetic oligonucleotide

SEQ ID NO: 601954 - DNA, 59 bp, Artificial; identical to SEQ ID NO: 454692
  Synthetic oligonucleotide

SEQ ID NO: 601955 - DNA, 55 bp, Artificial; identical to SEQ ID NO: 13271
  Synthetic oligonucleotide

SEQ ID NO: 601956 - DNA, 52 bp, Artificial; identical to SEQ ID NO: 454699
  Synthetic oligonucleotide

SEQ ID NO: 601957 - DNA, 55 bp, Artificial; identical to SEQ ID NO: 454706
  Synthetic oligonucleotide

SEQ ID NO: 601958 - DNA, 60 bp, Artificial; identical to SEQ ID NO: 454709
  Synthetic oligonucleotide

SEQ ID NO: 601959 - DNA, 60 bp, Artificial; identical to SEQ ID NO: 454710
  Synthetic oligonucleotide

SEQ ID NO: 601960 - DNA, 60 bp, Artificial; identical to SEQ ID NO: 454711
  Synthetic oligonucleotide

SEQ ID NO: 601961 - DNA, 60 bp, Artificial; identical to SEQ ID NO: 454712
  Synthetic oligonucleotide

SEQ ID NO: 601962 - DNA, 52 bp, Artificial; identical to SEQ ID NO: 454713
  Synthetic oligonucleotide

SEQ ID NO: 601963 - DNA, 60 bp, Artificial; identical to SEQ ID NO: 454714
  Synthetic oligonucleotide

SEQ ID NO: 601964 - DNA, 56 bp, Artificial; identical to SEQ ID NO: 454721
  Synthetic oligonucleotide

SEQ ID NO: 601965 - DNA, 52 bp, Artificial; identical to SEQ ID NO: 454723
  Synthetic oligonucleotide

SEQ ID NO: 601966 - DNA, 60 bp, Artificial; identical to SEQ ID NO: 454724
  Synthetic oligonucleotide

SEQ ID NO: 601967 - DNA, 55 bp, Artificial; identical to SEQ ID NO: 454725
  Synthetic oligonucleotide

SEQ ID NO: 601968 - DNA, 60 bp, Artificial; identical to SEQ ID NO: 454726
  Synthetic oligonucleotide

SEQ ID NO: 601969 - DNA, 60 bp, Artificial; identical to SEQ ID NO: 454727
  Synthetic oligonucleotide

SEQ ID NO: 601970 - DNA, 58 bp, Artificial; identical to SEQ ID NO: 454729
  Synthetic oligonucleotide

SEQ ID NO: 601971 - DNA, 60 bp, Artificial; identical to SEQ ID NO: 37937
  Synthetic oligonucleotide

SEQ ID NO: 601972 - DNA, 55 bp, Artificial; identical to SEQ ID NO: 454736
  Synthetic oligonucleotide

SEQ ID NO: 601973 - DNA, 55 bp, Artificial; identical to SEQ ID NO: 454741
  Synthetic oligonucleotide

SEQ ID NO: 601974 - DNA, 55 bp, Artificial; identical to SEQ ID NO: 454742
  Synthetic oligonucleotide

SEQ ID NO: 601975 - DNA, 50 bp, Artificial; identical to SEQ ID NO: 454747
  Synthetic oligonucleotide

SEQ ID NO: 601976 - DNA, 54 bp, Artificial; identical to SEQ ID NO: 17435
  Synthetic oligonucleotide

SEQ ID NO: 601977 - DNA, 55 bp, Artificial; identical to SEQ ID NO: 454760
  Synthetic oligonucleotide

SEQ ID NO: 601978 - DNA, 60 bp, Artificial; identical to SEQ ID NO: 454761
  Synthetic oligonucleotide

SEQ ID NO: 601979 - DNA, 60 bp, Artificial; identical to SEQ ID NO: 454766
  Synthetic oligonucleotide

SEQ ID NO: 601980 - DNA, 53 bp, Artificial; identical to SEQ ID NO: 454768
  Synthetic oligonucleotide

SEQ ID NO: 601981 - DNA, 59 bp, Artificial; identical to SEQ ID NO: 454769
  Synthetic oligonucleotide

SEQ ID NO: 601982 - DNA, 52 bp, Artificial; identical to SEQ ID NO: 454772
  Synthetic oligonucleotide

SEQ ID NO: 601983 - DNA, 58 bp, Artificial; identical to SEQ ID NO: 454777
  Synthetic oligonucleotide

SEQ ID NO: 601984 - DNA, 53 bp, Artificial; identical to SEQ ID NO: 454779
  Synthetic oligonucleotide

SEQ ID NO: 601985 - DNA, 58 bp, Artificial; identical to SEQ ID NO: 454791
  Synthetic oligonucleotide

SEQ ID NO: 601986 - DNA, 60 bp, Artificial; identical to SEQ ID NO: 454794
  Synthetic oligonucleotide

SEQ ID NO: 601987 - DNA, 60 bp, Artificial; identical to SEQ ID NO: 454795
  Synthetic oligonucleotide

SEQ ID NO: 601988 - DNA, 60 bp, Artificial; identical to SEQ ID NO: 454796
  Synthetic oligonucleotide

SEQ ID NO: 601989 - DNA, 60 bp, Artificial; identical to SEQ ID NO: 454797
  Synthetic oligonucleotide

SEQ ID NO: 601990 - DNA, 51 bp, Artificial; identical to SEQ ID NO: 454801
  Synthetic oligonucleotide

SEQ ID NO: 601991 - DNA, 60 bp, Artificial; identical to SEQ ID NO: 454803
  Synthetic oligonucleotide

SEQ ID NO: 601992 - DNA, 57 bp, Artificial; identical to SEQ ID NO: 454806
  Synthetic oligonucleotide

SEQ ID NO: 601993 - DNA, 59 bp, Artificial; identical to SEQ ID NO: 454808
  Synthetic oligonucleotide

SEQ ID NO: 601994 - DNA, 55 bp, Artificial; identical to SEQ ID NO: 11960
  Synthetic oligonucleotide

SEQ ID NO: 601995 - DNA, 55 bp, Artificial; identical to SEQ ID NO: 454809
  Synthetic oligonucleotide

SEQ ID NO: 601996 - DNA, 60 bp, Artificial; identical to SEQ ID NO: 454814
  Synthetic oligonucleotide

SEQ ID NO: 601997 - DNA, 60 bp, Artificial; identical to SEQ ID NO: 454822
  Synthetic oligonucleotide

SEQ ID NO: 601998 - DNA, 60 bp, Artificial; identical to SEQ ID NO: 454827
  Synthetic oligonucleotide

SEQ ID NO: 601999 - DNA, 60 bp, Artificial; identical to SEQ ID NO: 454830
  Synthetic oligonucleotide

SEQ ID NO: 602000 - DNA, 58 bp, Artificial; identical to SEQ ID NO: 454834
  Synthetic oligonucleotide

SEQ ID NO: 602001 - DNA, 55 bp, Artificial; identical to SEQ ID NO: 454835
  Synthetic oligonucleotide

SEQ ID NO: 602002 - DNA, 52 bp, Artificial; identical to SEQ ID NO: 454836
  Synthetic oligonucleotide

SEQ ID NO: 602003 - DNA, 55 bp, Artificial; identical to SEQ ID NO: 454837
  Synthetic oligonucleotide

SEQ ID NO: 602004 - DNA, 60 bp, Artificial; identical to SEQ ID NO: 454839
  Synthetic oligonucleotide

SEQ ID NO: 602005 - DNA, 60 bp, Artificial; identical to SEQ ID NO: 454842
  Synthetic oligonucleotide

SEQ ID NO: 602006 - DNA, 60 bp, Artificial; identical to SEQ ID NO: 454843
  Synthetic oligonucleotide

SEQ ID NO: 602007 - DNA, 52 bp, Artificial; identical to SEQ ID NO: 454845
  Synthetic oligonucleotide

SEQ ID NO: 602008 - DNA, 54 bp, Artificial; identical to SEQ ID NO: 454846
  Synthetic oligonucleotide

SEQ ID NO: 602009 - DNA, 60 bp, Artificial; identical to SEQ ID NO: 454847
  Synthetic oligonucleotide

SEQ ID NO: 602010 - DNA, 60 bp, Artificial; identical to SEQ ID NO: 454848
  Synthetic oligonucleotide

SEQ ID NO: 602011 - DNA, 60 bp, Artificial; identical to SEQ ID NO: 454849
  Synthetic oligonucleotide

SEQ ID NO: 602012 - DNA, 60 bp, Artificial; identical to SEQ ID NO: 454850
  Synthetic oligonucleotide

SEQ ID NO: 602013 - DNA, 59 bp, Artificial; identical to SEQ ID NO: 454852
  Synthetic oligonucleotide

SEQ ID NO: 602014 - DNA, 60 bp, Artificial; identical to SEQ ID NO: 454853
  Synthetic oligonucleotide

SEQ ID NO: 602015 - DNA, 60 bp, Artificial; identical to SEQ ID NO: 454854
  Synthetic oligonucleotide

SEQ ID NO: 602016 - DNA, 53 bp, Artificial; identical to SEQ ID NO: 454863
  Synthetic oligonucleotide

SEQ ID NO: 602017 - DNA, 55 bp, Artificial; identical to SEQ ID NO: 454864
  Synthetic oligonucleotide

SEQ ID NO: 602018 - DNA, 60 bp, Artificial; identical to SEQ ID NO: 454865
  Synthetic oligonucleotide

SEQ ID NO: 602019 - DNA, 56 bp, Artificial; identical to SEQ ID NO: 454866
  Synthetic oligonucleotide

SEQ ID NO: 602020 - DNA, 60 bp, Artificial; identical to SEQ ID NO: 10857
  Synthetic oligonucleotide

SEQ ID NO: 602021 - DNA, 59 bp, Artificial; identical to SEQ ID NO: 454868
  Synthetic oligonucleotide

SEQ ID NO: 602022 - DNA, 55 bp, Artificial; identical to SEQ ID NO: 454869
  Synthetic oligonucleotide

SEQ ID NO: 602023 - DNA, 59 bp, Artificial; identical to SEQ ID NO: 454870
  Synthetic oligonucleotide

SEQ ID NO: 602024 - DNA, 58 bp, Artificial; identical to SEQ ID NO: 454873
  Synthetic oligonucleotide

SEQ ID NO: 602025 - DNA, 56 bp, Artificial; identical to SEQ ID NO: 454874
  Synthetic oligonucleotide

SEQ ID NO: 602026 - DNA, 51 bp, Artificial; identical to SEQ ID NO: 454882
  Synthetic oligonucleotide

SEQ ID NO: 602027 - DNA, 55 bp, Artificial; identical to SEQ ID NO: 454885
  Synthetic oligonucleotide

SEQ ID NO: 602028 - DNA, 58 bp, Artificial; identical to SEQ ID NO: 454888
  Synthetic oligonucleotide

SEQ ID NO: 602029 - DNA, 54 bp, Artificial; identical to SEQ ID NO: 454889
  Synthetic oligonucleotide

SEQ ID NO: 602030 - DNA, 59 bp, Artificial; identical to SEQ ID NO: 454890
  Synthetic oligonucleotide

SEQ ID NO: 602031 - DNA, 59 bp, Artificial; identical to SEQ ID NO: 454891
  Synthetic oligonucleotide

SEQ ID NO: 602032 - DNA, 56 bp, Artificial; identical to SEQ ID NO: 454897
  Synthetic oligonucleotide

SEQ ID NO: 602033 - DNA, 55 bp, Artificial; identical to SEQ ID NO: 454905
  Synthetic oligonucleotide

SEQ ID NO: 602034 - DNA, 60 bp, Artificial; identical to SEQ ID NO: 454907
  Synthetic oligonucleotide

SEQ ID NO: 602035 - DNA, 56 bp, Artificial; identical to SEQ ID NO: 454910
  Synthetic oligonucleotide

SEQ ID NO: 602036 - DNA, 60 bp, Artificial; identical to SEQ ID NO: 454911
  Synthetic oligonucleotide

SEQ ID NO: 602037 - DNA, 53 bp, Artificial; identical to SEQ ID NO: 454918
  Synthetic oligonucleotide

SEQ ID NO: 602038 - DNA, 60 bp, Artificial; identical to SEQ ID NO: 454924
  Synthetic oligonucleotide

SEQ ID NO: 602039 - DNA, 57 bp, Artificial; identical to SEQ ID NO: 454926
  Synthetic oligonucleotide

SEQ ID NO: 602040 - DNA, 60 bp, Artificial; identical to SEQ ID NO: 454927
  Synthetic oligonucleotide

SEQ ID NO: 602041 - DNA, 58 bp, Artificial; identical to SEQ ID NO: 454929
  Synthetic oligonucleotide

SEQ ID NO: 602042 - DNA, 60 bp, Artificial; identical to SEQ ID NO: 454930
  Synthetic oligonucleotide

SEQ ID NO: 602043 - DNA, 57 bp, Artificial; identical to SEQ ID NO: 454932
  Synthetic oligonucleotide

SEQ ID NO: 602044 - DNA, 58 bp, Artificial; identical to SEQ ID NO: 454933
  Synthetic oligonucleotide

SEQ ID NO: 602045 - DNA, 52 bp, Artificial; identical to SEQ ID NO: 454934
  Synthetic oligonucleotide

SEQ ID NO: 602046 - DNA, 60 bp, Artificial; identical to SEQ ID NO: 454935
  Synthetic oligonucleotide

SEQ ID NO: 602047 - DNA, 56 bp, Artificial; identical to SEQ ID NO: 10751
  Synthetic oligonucleotide

SEQ ID NO: 602048 - DNA, 59 bp, Artificial; identical to SEQ ID NO: 18913
  Synthetic oligonucleotide

SEQ ID NO: 602049 - DNA, 56 bp, Artificial; identical to SEQ ID NO: 6686
  Synthetic oligonucleotide

SEQ ID NO: 602050 - DNA, 52 bp, Artificial; identical to SEQ ID NO: 454939
  Synthetic oligonucleotide

SEQ ID NO: 602051 - DNA, 58 bp, Artificial; identical to SEQ ID NO: 454941
  Synthetic oligonucleotide

SEQ ID NO: 602052 - DNA, 57 bp, Artificial; identical to SEQ ID NO: 454942
  Synthetic oligonucleotide

SEQ ID NO: 602053 - DNA, 60 bp, Artificial; identical to SEQ ID NO: 454944
  Synthetic oligonucleotide

SEQ ID NO: 602054 - DNA, 60 bp, Artificial; identical to SEQ ID NO: 454945
  Synthetic oligonucleotide

SEQ ID NO: 602055 - DNA, 50 bp, Artificial; identical to SEQ ID NO: 454946
  Synthetic oligonucleotide

SEQ ID NO: 602056 - DNA, 60 bp, Artificial; identical to SEQ ID NO: 454947
  Synthetic oligonucleotide

SEQ ID NO: 602057 - DNA, 60 bp, Artificial; identical to SEQ ID NO: 454950
  Synthetic oligonucleotide

SEQ ID NO: 602058 - DNA, 60 bp, Artificial; identical to SEQ ID NO: 454951
  Synthetic oligonucleotide

SEQ ID NO: 602059 - DNA, 60 bp, Artificial; identical to SEQ ID NO: 454954
  Synthetic oligonucleotide

SEQ ID NO: 602060 - DNA, 53 bp, Artificial; identical to SEQ ID NO: 454955
  Synthetic oligonucleotide

SEQ ID NO: 602061 - DNA, 53 bp, Artificial; identical to SEQ ID NO: 454957
  Synthetic oligonucleotide

SEQ ID NO: 602062 - DNA, 60 bp, Artificial; identical to SEQ ID NO: 454959
  Synthetic oligonucleotide

SEQ ID NO: 602063 - DNA, 56 bp, Artificial; identical to SEQ ID NO: 454961
  Synthetic oligonucleotide

SEQ ID NO: 602064 - DNA, 57 bp, Artificial; identical to SEQ ID NO: 454962
  Synthetic oligonucleotide

SEQ ID NO: 602065 - DNA, 54 bp, Artificial; identical to SEQ ID NO: 454966
  Synthetic oligonucleotide

SEQ ID NO: 602066 - DNA, 60 bp, Artificial; identical to SEQ ID NO: 454968
  Synthetic oligonucleotide

SEQ ID NO: 602067 - DNA, 58 bp, Artificial; identical to SEQ ID NO: 454976
  Synthetic oligonucleotide

SEQ ID NO: 602068 - DNA, 54 bp, Artificial; identical to SEQ ID NO: 454977
  Synthetic oligonucleotide

SEQ ID NO: 602069 - DNA, 50 bp, Artificial; identical to SEQ ID NO: 454978
  Synthetic oligonucleotide

SEQ ID NO: 602070 - DNA, 60 bp, Artificial; identical to SEQ ID NO: 454980
  Synthetic oligonucleotide

SEQ ID NO: 602071 - DNA, 60 bp, Artificial; identical to SEQ ID NO: 5735
  Synthetic oligonucleotide

SEQ ID NO: 602072 - DNA, 58 bp, Artificial; identical to SEQ ID NO: 454994
  Synthetic oligonucleotide

SEQ ID NO: 602073 - DNA, 60 bp, Artificial; identical to SEQ ID NO: 454997
  Synthetic oligonucleotide

SEQ ID NO: 602074 - DNA, 58 bp, Artificial; identical to SEQ ID NO: 19626
  Synthetic oligonucleotide

SEQ ID NO: 602075 - DNA, 57 bp, Artificial; identical to SEQ ID NO: 455003
  Synthetic oligonucleotide

SEQ ID NO: 602076 - DNA, 55 bp, Artificial; identical to SEQ ID NO: 455004
  Synthetic oligonucleotide

SEQ ID NO: 602077 - DNA, 60 bp, Artificial; identical to SEQ ID NO: 455005
  Synthetic oligonucleotide

SEQ ID NO: 602078 - DNA, 52 bp, Artificial; identical to SEQ ID NO: 455007
  Synthetic oligonucleotide

SEQ ID NO: 602079 - DNA, 60 bp, Artificial; identical to SEQ ID NO: 455008
  Synthetic oligonucleotide

SEQ ID NO: 602080 - DNA, 60 bp, Artificial; identical to SEQ ID NO: 455011
  Synthetic oligonucleotide

SEQ ID NO: 602081 - DNA, 51 bp, Artificial; identical to SEQ ID NO: 455013
  Synthetic oligonucleotide

SEQ ID NO: 602082 - DNA, 60 bp, Artificial; identical to SEQ ID NO: 455014
  Synthetic oligonucleotide

SEQ ID NO: 602083 - DNA, 60 bp, Artificial; identical to SEQ ID NO: 455015
  Synthetic oligonucleotide

SEQ ID NO: 602084 - DNA, 60 bp, Artificial; identical to SEQ ID NO: 455016
  Synthetic oligonucleotide

SEQ ID NO: 602085 - DNA, 60 bp, Artificial; identical to SEQ ID NO: 455021
  Synthetic oligonucleotide

SEQ ID NO: 602086 - DNA, 55 bp, Artificial; identical to SEQ ID NO: 455023
  Synthetic oligonucleotide

SEQ ID NO: 602087 - DNA, 60 bp, Artificial; identical to SEQ ID NO: 455027
  Synthetic oligonucleotide

SEQ ID NO: 602088 - DNA, 58 bp, Artificial; identical to SEQ ID NO: 455029
  Synthetic oligonucleotide

SEQ ID NO: 602089 - DNA, 52 bp, Artificial; identical to SEQ ID NO: 455032
  Synthetic oligonucleotide

SEQ ID NO: 602090 - DNA, 60 bp, Artificial; identical to SEQ ID NO: 455033
  Synthetic oligonucleotide

SEQ ID NO: 602091 - DNA, 60 bp, Artificial; identical to SEQ ID NO: 455034
  Synthetic oligonucleotide

SEQ ID NO: 602092 - DNA, 55 bp, Artificial; identical to SEQ ID NO: 455035
  Synthetic oligonucleotide

SEQ ID NO: 602093 - DNA, 50 bp, Artificial; identical to SEQ ID NO: 455038
  Synthetic oligonucleotide

SEQ ID NO: 602094 - DNA, 60 bp, Artificial; identical to SEQ ID NO: 455039
  Synthetic oligonucleotide

SEQ ID NO: 602095 - DNA, 60 bp, Artificial; identical to SEQ ID NO: 455041
  Synthetic oligonucleotide

SEQ ID NO: 602096 - DNA, 55 bp, Artificial; identical to SEQ ID NO: 455048
  Synthetic oligonucleotide

SEQ ID NO: 602097 - DNA, 59 bp, Artificial; identical to SEQ ID NO: 455057
  Synthetic oligonucleotide

SEQ ID NO: 602098 - DNA, 55 bp, Artificial; identical to SEQ ID NO: 455059
  Synthetic oligonucleotide

SEQ ID NO: 602099 - DNA, 54 bp, Artificial; identical to SEQ ID NO: 455060
  Synthetic oligonucleotide

SEQ ID NO: 602100 - DNA, 60 bp, Artificial; identical to SEQ ID NO: 455061
  Synthetic oligonucleotide

SEQ ID NO: 602101 - DNA, 57 bp, Artificial; identical to SEQ ID NO: 455067
  Synthetic oligonucleotide

SEQ ID NO: 602102 - DNA, 55 bp, Artificial; identical to SEQ ID NO: 455069
  Synthetic oligonucleotide

SEQ ID NO: 602103 - DNA, 60 bp, Artificial; identical to SEQ ID NO: 455070
  Synthetic oligonucleotide

SEQ ID NO: 602104 - DNA, 53 bp, Artificial; identical to SEQ ID NO: 455071
  Synthetic oligonucleotide

SEQ ID NO: 602105 - DNA, 60 bp, Artificial; identical to SEQ ID NO: 455072
  Synthetic oligonucleotide

SEQ ID NO: 602106 - DNA, 60 bp, Artificial; identical to SEQ ID NO: 455073
  Synthetic oligonucleotide

SEQ ID NO: 602107 - DNA, 55 bp, Artificial; identical to SEQ ID NO: 455074
  Synthetic oligonucleotide

SEQ ID NO: 602108 - DNA, 60 bp, Artificial; identical to SEQ ID NO: 455078
  Synthetic oligonucleotide

SEQ ID NO: 602109 - DNA, 60 bp, Artificial; identical to SEQ ID NO: 455082
  Synthetic oligonucleotide

SEQ ID NO: 602110 - DNA, 60 bp, Artificial; identical to SEQ ID NO: 455089
  Synthetic oligonucleotide

SEQ ID NO: 602111 - DNA, 52 bp, Artificial; identical to SEQ ID NO: 455092
  Synthetic oligonucleotide

SEQ ID NO: 602112 - DNA, 53 bp, Artificial; identical to SEQ ID NO: 455097
  Synthetic oligonucleotide

SEQ ID NO: 602113 - DNA, 60 bp, Artificial; identical to SEQ ID NO: 455099
  Synthetic oligonucleotide

SEQ ID NO: 602114 - DNA, 52 bp, Artificial; identical to SEQ ID NO: 455101
  Synthetic oligonucleotide

SEQ ID NO: 602115 - DNA, 60 bp, Artificial; identical to SEQ ID NO: 455103
  Synthetic oligonucleotide

SEQ ID NO: 602116 - DNA, 55 bp, Artificial; identical to SEQ ID NO: 455106
  Synthetic oligonucleotide

SEQ ID NO: 602117 - DNA, 58 bp, Artificial; identical to SEQ ID NO: 455109
  Synthetic oligonucleotide

SEQ ID NO: 602118 - DNA, 53 bp, Artificial; identical to SEQ ID NO: 455110
  Synthetic oligonucleotide

SEQ ID NO: 602119 - DNA, 55 bp, Artificial; identical to SEQ ID NO: 455114
  Synthetic oligonucleotide

SEQ ID NO: 602120 - DNA, 55 bp, Artificial; identical to SEQ ID NO: 455116
  Synthetic oligonucleotide

SEQ ID NO: 602121 - DNA, 59 bp, Artificial; identical to SEQ ID NO: 455118
  Synthetic oligonucleotide

SEQ ID NO: 602122 - DNA, 60 bp, Artificial; identical to SEQ ID NO: 455119
  Synthetic oligonucleotide

SEQ ID NO: 602123 - DNA, 60 bp, Artificial; identical to SEQ ID NO: 455120
  Synthetic oligonucleotide

SEQ ID NO: 602124 - DNA, 58 bp, Artificial; identical to SEQ ID NO: 455123
  Synthetic oligonucleotide

SEQ ID NO: 602125 - DNA, 55 bp, Artificial; identical to SEQ ID NO: 455124
  Synthetic oligonucleotide

SEQ ID NO: 602126 - DNA, 52 bp, Artificial; identical to SEQ ID NO: 455125
  Synthetic oligonucleotide

SEQ ID NO: 602127 - DNA, 55 bp, Artificial; identical to SEQ ID NO: 455127
  Synthetic oligonucleotide

SEQ ID NO: 602128 - DNA, 58 bp, Artificial; identical to SEQ ID NO: 455130
  Synthetic oligonucleotide

SEQ ID NO: 602129 - DNA, 60 bp, Artificial; identical to SEQ ID NO: 455131
  Synthetic oligonucleotide

SEQ ID NO: 602130 - DNA, 60 bp, Artificial; identical to SEQ ID NO: 455136
  Synthetic oligonucleotide

SEQ ID NO: 602131 - DNA, 57 bp, Artificial; identical to SEQ ID NO: 455137
  Synthetic oligonucleotide

SEQ ID NO: 602132 - DNA, 60 bp, Artificial; identical to SEQ ID NO: 455138
  Synthetic oligonucleotide

SEQ ID NO: 602133 - DNA, 54 bp, Artificial; identical to SEQ ID NO: 455139
  Synthetic oligonucleotide

SEQ ID NO: 602134 - DNA, 55 bp, Artificial; identical to SEQ ID NO: 455146
  Synthetic oligonucleotide

SEQ ID NO: 602135 - DNA, 60 bp, Artificial; identical to SEQ ID NO: 455147
  Synthetic oligonucleotide

SEQ ID NO: 602136 - DNA, 55 bp, Artificial; identical to SEQ ID NO: 455148
  Synthetic oligonucleotide

SEQ ID NO: 602137 - DNA, 58 bp, Artificial; identical to SEQ ID NO: 455149
  Synthetic oligonucleotide

SEQ ID NO: 602138 - DNA, 52 bp, Artificial; identical to SEQ ID NO: 8704
  Synthetic oligonucleotide

SEQ ID NO: 602139 - DNA, 60 bp, Artificial; identical to SEQ ID NO: 6738
  Synthetic oligonucleotide

SEQ ID NO: 602140 - DNA, 55 bp, Artificial; identical to SEQ ID NO: 455152
  Synthetic oligonucleotide

SEQ ID NO: 602141 - DNA, 53 bp, Artificial; identical to SEQ ID NO: 455153
  Synthetic oligonucleotide

SEQ ID NO: 602142 - DNA, 58 bp, Artificial; identical to SEQ ID NO: 455154
  Synthetic oligonucleotide

SEQ ID NO: 602143 - DNA, 60 bp, Artificial; identical to SEQ ID NO: 455155
  Synthetic oligonucleotide

SEQ ID NO: 602144 - DNA, 55 bp, Artificial; identical to SEQ ID NO: 455158
  Synthetic oligonucleotide

SEQ ID NO: 602145 - DNA, 58 bp, Artificial; identical to SEQ ID NO: 455160
  Synthetic oligonucleotide

SEQ ID NO: 602146 - DNA, 57 bp, Artificial; identical to SEQ ID NO: 455161
  Synthetic oligonucleotide

SEQ ID NO: 602147 - DNA, 58 bp, Artificial; identical to SEQ ID NO: 455168
  Synthetic oligonucleotide

SEQ ID NO: 602148 - DNA, 60 bp, Artificial; identical to SEQ ID NO: 455175
  Synthetic oligonucleotide

SEQ ID NO: 602149 - DNA, 57 bp, Artificial; identical to SEQ ID NO: 455178
  Synthetic oligonucleotide

SEQ ID NO: 602150 - DNA, 59 bp, Artificial; identical to SEQ ID NO: 455182
  Synthetic oligonucleotide

SEQ ID NO: 602151 - DNA, 58 bp, Artificial; identical to SEQ ID NO: 455186
  Synthetic oligonucleotide

SEQ ID NO: 602152 - DNA, 55 bp, Artificial; identical to SEQ ID NO: 455187
  Synthetic oligonucleotide

SEQ ID NO: 602153 - DNA, 56 bp, Artificial; identical to SEQ ID NO: 455188
  Synthetic oligonucleotide

SEQ ID NO: 602154 - DNA, 60 bp, Artificial; identical to SEQ ID NO: 455190
  Synthetic oligonucleotide

SEQ ID NO: 602155 - DNA, 60 bp, Artificial; identical to SEQ ID NO: 455191
  Synthetic oligonucleotide

SEQ ID NO: 602156 - DNA, 60 bp, Artificial; identical to SEQ ID NO: 455192
  Synthetic oligonucleotide

SEQ ID NO: 602157 - DNA, 56 bp, Artificial; identical to SEQ ID NO: 455196
  Synthetic oligonucleotide

SEQ ID NO: 602158 - DNA, 60 bp, Artificial; identical to SEQ ID NO: 455198
  Synthetic oligonucleotide

SEQ ID NO: 602159 - DNA, 50 bp, Artificial; identical to SEQ ID NO: 455201
  Synthetic oligonucleotide

SEQ ID NO: 602160 - DNA, 54 bp, Artificial; identical to SEQ ID NO: 455203
  Synthetic oligonucleotide

SEQ ID NO: 602161 - DNA, 59 bp, Artificial; identical to SEQ ID NO: 455206
  Synthetic oligonucleotide

SEQ ID NO: 602162 - DNA, 53 bp, Artificial; identical to SEQ ID NO: 455209
  Synthetic oligonucleotide

SEQ ID NO: 602163 - DNA, 52 bp, Artificial; identical to SEQ ID NO: 455213
  Synthetic oligonucleotide

SEQ ID NO: 602164 - DNA, 54 bp, Artificial; identical to SEQ ID NO: 455214
  Synthetic oligonucleotide

SEQ ID NO: 602165 - DNA, 60 bp, Artificial; identical to SEQ ID NO: 455215
  Synthetic oligonucleotide

SEQ ID NO: 602166 - DNA, 60 bp, Artificial; identical to SEQ ID NO: 455217
  Synthetic oligonucleotide

SEQ ID NO: 602167 - DNA, 56 bp, Artificial; identical to SEQ ID NO: 455218
  Synthetic oligonucleotide

SEQ ID NO: 602168 - DNA, 55 bp, Artificial; identical to SEQ ID NO: 455219
  Synthetic oligonucleotide

SEQ ID NO: 602169 - DNA, 60 bp, Artificial; identical to SEQ ID NO: 455220
  Synthetic oligonucleotide

SEQ ID NO: 602170 - DNA, 59 bp, Artificial; identical to SEQ ID NO: 455223
  Synthetic oligonucleotide

SEQ ID NO: 602171 - DNA, 54 bp, Artificial; identical to SEQ ID NO: 455224
  Synthetic oligonucleotide

SEQ ID NO: 602172 - DNA, 54 bp, Artificial; identical to SEQ ID NO: 455228
  Synthetic oligonucleotide

SEQ ID NO: 602173 - DNA, 60 bp, Artificial; identical to SEQ ID NO: 455235
  Synthetic oligonucleotide

SEQ ID NO: 602174 - DNA, 50 bp, Artificial; identical to SEQ ID NO: 455236
  Synthetic oligonucleotide

SEQ ID NO: 602175 - DNA, 50 bp, Artificial; identical to SEQ ID NO: 455237
  Synthetic oligonucleotide

SEQ ID NO: 602176 - DNA, 55 bp, Artificial; identical to SEQ ID NO: 455238
  Synthetic oligonucleotide

SEQ ID NO: 602177 - DNA, 55 bp, Artificial; identical to SEQ ID NO: 455239
  Synthetic oligonucleotide

SEQ ID NO: 602178 - DNA, 52 bp, Artificial; identical to SEQ ID NO: 455240
  Synthetic oligonucleotide

SEQ ID NO: 602179 - DNA, 60 bp, Artificial; identical to SEQ ID NO: 455246
  Synthetic oligonucleotide

SEQ ID NO: 602180 - DNA, 58 bp, Artificial; identical to SEQ ID NO: 455247
  Synthetic oligonucleotide

SEQ ID NO: 602181 - DNA, 60 bp, Artificial; identical to SEQ ID NO: 455248
  Synthetic oligonucleotide

SEQ ID NO: 602182 - DNA, 59 bp, Artificial; identical to SEQ ID NO: 455251
  Synthetic oligonucleotide

SEQ ID NO: 602183 - DNA, 58 bp, Artificial; identical to SEQ ID NO: 455254
  Synthetic oligonucleotide

SEQ ID NO: 602184 - DNA, 55 bp, Artificial; identical to SEQ ID NO: 455257
  Synthetic oligonucleotide

SEQ ID NO: 602185 - DNA, 54 bp, Artificial; identical to SEQ ID NO: 455261
  Synthetic oligonucleotide

SEQ ID NO: 602186 - DNA, 58 bp, Artificial; identical to SEQ ID NO: 455262
  Synthetic oligonucleotide

SEQ ID NO: 602187 - DNA, 60 bp, Artificial; identical to SEQ ID NO: 455265
  Synthetic oligonucleotide

SEQ ID NO: 602188 - DNA, 58 bp, Artificial; identical to SEQ ID NO: 19592
  Synthetic oligonucleotide

SEQ ID NO: 602189 - DNA, 55 bp, Artificial; identical to SEQ ID NO: 455267
  Synthetic oligonucleotide

SEQ ID NO: 602190 - DNA, 59 bp, Artificial; identical to SEQ ID NO: 18054
  Synthetic oligonucleotide

SEQ ID NO: 602191 - DNA, 60 bp, Artificial; identical to SEQ ID NO: 455269
  Synthetic oligonucleotide

SEQ ID NO: 602192 - DNA, 59 bp, Artificial; identical to SEQ ID NO: 455271
  Synthetic oligonucleotide

SEQ ID NO: 602193 - DNA, 60 bp, Artificial; identical to SEQ ID NO: 455272
  Synthetic oligonucleotide

SEQ ID NO: 602194 - DNA, 51 bp, Artificial; identical to SEQ ID NO: 455275
  Synthetic oligonucleotide

SEQ ID NO: 602195 - DNA, 60 bp, Artificial; identical to SEQ ID NO: 455284
  Synthetic oligonucleotide

SEQ ID NO: 602196 - DNA, 52 bp, Artificial; identical to SEQ ID NO: 455285
  Synthetic oligonucleotide

SEQ ID NO: 602197 - DNA, 60 bp, Artificial; identical to SEQ ID NO: 455288
  Synthetic oligonucleotide

SEQ ID NO: 602198 - DNA, 57 bp, Artificial; identical to SEQ ID NO: 455295
  Synthetic oligonucleotide

SEQ ID NO: 602199 - DNA, 60 bp, Artificial; identical to SEQ ID NO: 455300
  Synthetic oligonucleotide

SEQ ID NO: 602200 - DNA, 60 bp, Artificial; identical to SEQ ID NO: 455301
  Synthetic oligonucleotide

SEQ ID NO: 602201 - DNA, 58 bp, Artificial; identical to SEQ ID NO: 455302
  Synthetic oligonucleotide

SEQ ID NO: 602202 - DNA, 52 bp, Artificial; identical to SEQ ID NO: 455304
  Synthetic oligonucleotide

SEQ ID NO: 602203 - DNA, 55 bp, Artificial; identical to SEQ ID NO: 455305
  Synthetic oligonucleotide

SEQ ID NO: 602204 - DNA, 55 bp, Artificial; identical to SEQ ID NO: 455309
  Synthetic oligonucleotide

SEQ ID NO: 602205 - DNA, 58 bp, Artificial; identical to SEQ ID NO: 455310
  Synthetic oligonucleotide

SEQ ID NO: 602206 - DNA, 50 bp, Artificial; identical to SEQ ID NO: 455311
  Synthetic oligonucleotide

SEQ ID NO: 602207 - DNA, 56 bp, Artificial; identical to SEQ ID NO: 455312
  Synthetic oligonucleotide

SEQ ID NO: 602208 - DNA, 51 bp, Artificial; identical to SEQ ID NO: 455313
  Synthetic oligonucleotide

SEQ ID NO: 602209 - DNA, 50 bp, Artificial; identical to SEQ ID NO: 455314
  Synthetic oligonucleotide

SEQ ID NO: 602210 - DNA, 60 bp, Artificial; identical to SEQ ID NO: 455316
  Synthetic oligonucleotide

SEQ ID NO: 602211 - DNA, 58 bp, Artificial; identical to SEQ ID NO: 455317
  Synthetic oligonucleotide

SEQ ID NO: 602212 - DNA, 53 bp, Artificial; identical to SEQ ID NO: 12265
  Synthetic oligonucleotide

SEQ ID NO: 602213 - DNA, 60 bp, Artificial; identical to SEQ ID NO: 455320
  Synthetic oligonucleotide

SEQ ID NO: 602214 - DNA, 60 bp, Artificial; identical to SEQ ID NO: 455325
  Synthetic oligonucleotide

SEQ ID NO: 602215 - DNA, 56 bp, Artificial; identical to SEQ ID NO: 455326
  Synthetic oligonucleotide

SEQ ID NO: 602216 - DNA, 60 bp, Artificial; identical to SEQ ID NO: 455328
  Synthetic oligonucleotide

SEQ ID NO: 602217 - DNA, 51 bp, Artificial; identical to SEQ ID NO: 455333
  Synthetic oligonucleotide

SEQ ID NO: 602218 - DNA, 60 bp, Artificial; identical to SEQ ID NO: 455335
  Synthetic oligonucleotide

SEQ ID NO: 602219 - DNA, 54 bp, Artificial; identical to SEQ ID NO: 455337
  Synthetic oligonucleotide

SEQ ID NO: 602220 - DNA, 60 bp, Artificial; identical to SEQ ID NO: 455340
  Synthetic oligonucleotide

SEQ ID NO: 602221 - DNA, 57 bp, Artificial; identical to SEQ ID NO: 455344
  Synthetic oligonucleotide

SEQ ID NO: 602222 - DNA, 60 bp, Artificial; identical to SEQ ID NO: 455346
  Synthetic oligonucleotide

SEQ ID NO: 602223 - DNA, 54 bp, Artificial; identical to SEQ ID NO: 455347
  Synthetic oligonucleotide

SEQ ID NO: 602224 - DNA, 60 bp, Artificial; identical to SEQ ID NO: 455348
  Synthetic oligonucleotide

SEQ ID NO: 602225 - DNA, 60 bp, Artificial; identical to SEQ ID NO: 455350
  Synthetic oligonucleotide

SEQ ID NO: 602226 - DNA, 60 bp, Artificial; identical to SEQ ID NO: 455352
  Synthetic oligonucleotide

SEQ ID NO: 602227 - DNA, 56 bp, Artificial; identical to SEQ ID NO: 455353
  Synthetic oligonucleotide

SEQ ID NO: 602228 - DNA, 60 bp, Artificial; identical to SEQ ID NO: 455354
  Synthetic oligonucleotide

SEQ ID NO: 602229 - DNA, 60 bp, Artificial; identical to SEQ ID NO: 455355
  Synthetic oligonucleotide

SEQ ID NO: 602230 - DNA, 60 bp, Artificial; identical to SEQ ID NO: 455356
  Synthetic oligonucleotide

SEQ ID NO: 602231 - DNA, 55 bp, Artificial; identical to SEQ ID NO: 455358
  Synthetic oligonucleotide

SEQ ID NO: 602232 - DNA, 54 bp, Artificial; identical to SEQ ID NO: 455359
  Synthetic oligonucleotide

SEQ ID NO: 602233 - DNA, 56 bp, Artificial; identical to SEQ ID NO: 455363
  Synthetic oligonucleotide

SEQ ID NO: 602234 - DNA, 57 bp, Artificial; identical to SEQ ID NO: 455364
  Synthetic oligonucleotide

SEQ ID NO: 602235 - DNA, 57 bp, Artificial; identical to SEQ ID NO: 455365
  Synthetic oligonucleotide

SEQ ID NO: 602236 - DNA, 56 bp, Artificial; identical to SEQ ID NO: 455367
  Synthetic oligonucleotide

SEQ ID NO: 602237 - DNA, 57 bp, Artificial; identical to SEQ ID NO: 455368
  Synthetic oligonucleotide

SEQ ID NO: 602238 - DNA, 54 bp, Artificial; identical to SEQ ID NO: 455369
  Synthetic oligonucleotide

SEQ ID NO: 602239 - DNA, 56 bp, Artificial; identical to SEQ ID NO: 455376
  Synthetic oligonucleotide

SEQ ID NO: 602240 - DNA, 53 bp, Artificial; identical to SEQ ID NO: 455378
  Synthetic oligonucleotide

SEQ ID NO: 602241 - DNA, 59 bp, Artificial; identical to SEQ ID NO: 455381
  Synthetic oligonucleotide

SEQ ID NO: 602242 - DNA, 55 bp, Artificial; identical to SEQ ID NO: 455383
  Synthetic oligonucleotide

SEQ ID NO: 602243 - DNA, 60 bp, Artificial; identical to SEQ ID NO: 455390
  Synthetic oligonucleotide

SEQ ID NO: 602244 - DNA, 55 bp, Artificial; identical to SEQ ID NO: 455393
  Synthetic oligonucleotide

SEQ ID NO: 602245 - DNA, 60 bp, Artificial; identical to SEQ ID NO: 455394
  Synthetic oligonucleotide

SEQ ID NO: 602246 - DNA, 55 bp, Artificial; identical to SEQ ID NO: 455396
  Synthetic oligonucleotide

SEQ ID NO: 602247 - DNA, 60 bp, Artificial; identical to SEQ ID NO: 455399
  Synthetic oligonucleotide

SEQ ID NO: 602248 - DNA, 59 bp, Artificial; identical to SEQ ID NO: 455403
  Synthetic oligonucleotide

SEQ ID NO: 602249 - DNA, 60 bp, Artificial; identical to SEQ ID NO: 455404
  Synthetic oligonucleotide

SEQ ID NO: 602250 - DNA, 55 bp, Artificial; identical to SEQ ID NO: 455405
  Synthetic oligonucleotide

SEQ ID NO: 602251 - DNA, 53 bp, Artificial; identical to SEQ ID NO: 455413
  Synthetic oligonucleotide

SEQ ID NO: 602252 - DNA, 55 bp, Artificial; identical to SEQ ID NO: 455415
  Synthetic oligonucleotide

SEQ ID NO: 602253 - DNA, 58 bp, Artificial; identical to SEQ ID NO: 455417
  Synthetic oligonucleotide

SEQ ID NO: 602254 - DNA, 54 bp, Artificial; identical to SEQ ID NO: 455423
  Synthetic oligonucleotide

SEQ ID NO: 602255 - DNA, 60 bp, Artificial; identical to SEQ ID NO: 455424
  Synthetic oligonucleotide

SEQ ID NO: 602256 - DNA, 55 bp, Artificial; identical to SEQ ID NO: 455425
  Synthetic oligonucleotide

SEQ ID NO: 602257 - DNA, 52 bp, Artificial; identical to SEQ ID NO: 455426
  Synthetic oligonucleotide

SEQ ID NO: 602258 - DNA, 52 bp, Artificial; identical to SEQ ID NO: 455430
  Synthetic oligonucleotide

SEQ ID NO: 602259 - DNA, 55 bp, Artificial; identical to SEQ ID NO: 455432
  Synthetic oligonucleotide

SEQ ID NO: 602260 - DNA, 58 bp, Artificial; identical to SEQ ID NO: 455433
  Synthetic oligonucleotide

SEQ ID NO: 602261 - DNA, 57 bp, Artificial; identical to SEQ ID NO: 455436
  Synthetic oligonucleotide

SEQ ID NO: 602262 - DNA, 57 bp, Artificial; identical to SEQ ID NO: 455437
  Synthetic oligonucleotide

SEQ ID NO: 602263 - DNA, 57 bp, Artificial; identical to SEQ ID NO: 20034
  Synthetic oligonucleotide

SEQ ID NO: 602264 - DNA, 60 bp, Artificial; identical to SEQ ID NO: 455438
  Synthetic oligonucleotide

SEQ ID NO: 602265 - DNA, 60 bp, Artificial; identical to SEQ ID NO: 455442
  Synthetic oligonucleotide

SEQ ID NO: 602266 - DNA, 51 bp, Artificial; identical to SEQ ID NO: 455444
  Synthetic oligonucleotide

SEQ ID NO: 602267 - DNA, 59 bp, Artificial; identical to SEQ ID NO: 455449
  Synthetic oligonucleotide

SEQ ID NO: 602268 - DNA, 58 bp, Artificial; identical to SEQ ID NO: 455451
  Synthetic oligonucleotide

SEQ ID NO: 602269 - DNA, 60 bp, Artificial; identical to SEQ ID NO: 455452
  Synthetic oligonucleotide

SEQ ID NO: 602270 - DNA, 50 bp, Artificial; identical to SEQ ID NO: 455453
  Synthetic oligonucleotide

SEQ ID NO: 602271 - DNA, 60 bp, Artificial; identical to SEQ ID NO: 455457
  Synthetic oligonucleotide

SEQ ID NO: 602272 - DNA, 60 bp, Artificial; identical to SEQ ID NO: 455458
  Synthetic oligonucleotide

SEQ ID NO: 602273 - DNA, 55 bp, Artificial; identical to SEQ ID NO: 12417
  Synthetic oligonucleotide

SEQ ID NO: 602274 - DNA, 60 bp, Artificial; identical to SEQ ID NO: 455461
  Synthetic oligonucleotide

SEQ ID NO: 602275 - DNA, 55 bp, Artificial; identical to SEQ ID NO: 455465
  Synthetic oligonucleotide

SEQ ID NO: 602276 - DNA, 55 bp, Artificial; identical to SEQ ID NO: 455466
  Synthetic oligonucleotide

SEQ ID NO: 602277 - DNA, 60 bp, Artificial; identical to SEQ ID NO: 455467
  Synthetic oligonucleotide

SEQ ID NO: 602278 - DNA, 52 bp, Artificial; identical to SEQ ID NO: 455468
  Synthetic oligonucleotide

SEQ ID NO: 602279 - DNA, 60 bp, Artificial; identical to SEQ ID NO: 455469
  Synthetic oligonucleotide

SEQ ID NO: 602280 - DNA, 57 bp, Artificial; identical to SEQ ID NO: 455472
  Synthetic oligonucleotide

SEQ ID NO: 602281 - DNA, 59 bp, Artificial; identical to SEQ ID NO: 455473
  Synthetic oligonucleotide

SEQ ID NO: 602282 - DNA, 59 bp, Artificial; identical to SEQ ID NO: 455475
  Synthetic oligonucleotide

SEQ ID NO: 602283 - DNA, 58 bp, Artificial; identical to SEQ ID NO: 455481
  Synthetic oligonucleotide

SEQ ID NO: 602284 - DNA, 60 bp, Artificial; identical to SEQ ID NO: 455482
  Synthetic oligonucleotide

SEQ ID NO: 602285 - DNA, 59 bp, Artificial; identical to SEQ ID NO: 455483
  Synthetic oligonucleotide

SEQ ID NO: 602286 - DNA, 60 bp, Artificial; identical to SEQ ID NO: 455484
  Synthetic oligonucleotide

SEQ ID NO: 602287 - DNA, 54 bp, Artificial; identical to SEQ ID NO: 455485
  Synthetic oligonucleotide

SEQ ID NO: 602288 - DNA, 59 bp, Artificial; identical to SEQ ID NO: 455491
  Synthetic oligonucleotide

SEQ ID NO: 602289 - DNA, 55 bp, Artificial; identical to SEQ ID NO: 455492
  Synthetic oligonucleotide

SEQ ID NO: 602290 - DNA, 55 bp, Artificial; identical to SEQ ID NO: 455493
  Synthetic oligonucleotide

SEQ ID NO: 602291 - DNA, 60 bp, Artificial; identical to SEQ ID NO: 455494
  Synthetic oligonucleotide

SEQ ID NO: 602292 - DNA, 58 bp, Artificial; identical to SEQ ID NO: 455497
  Synthetic oligonucleotide

SEQ ID NO: 602293 - DNA, 56 bp, Artificial; identical to SEQ ID NO: 455499
  Synthetic oligonucleotide

SEQ ID NO: 602294 - DNA, 60 bp, Artificial; identical to SEQ ID NO: 455501
  Synthetic oligonucleotide

SEQ ID NO: 602295 - DNA, 60 bp, Artificial; identical to SEQ ID NO: 455503
  Synthetic oligonucleotide

SEQ ID NO: 602296 - DNA, 57 bp, Artificial; identical to SEQ ID NO: 20287
  Synthetic oligonucleotide

SEQ ID NO: 602297 - DNA, 54 bp, Artificial; identical to SEQ ID NO: 455506
  Synthetic oligonucleotide

SEQ ID NO: 602298 - DNA, 56 bp, Artificial; identical to SEQ ID NO: 455511
  Synthetic oligonucleotide

SEQ ID NO: 602299 - DNA, 55 bp, Artificial; identical to SEQ ID NO: 455513
  Synthetic oligonucleotide

SEQ ID NO: 602300 - DNA, 55 bp, Artificial; identical to SEQ ID NO: 455518
  Synthetic oligonucleotide

SEQ ID NO: 602301 - DNA, 58 bp, Artificial; identical to SEQ ID NO: 455520
  Synthetic oligonucleotide

SEQ ID NO: 602302 - DNA, 60 bp, Artificial; identical to SEQ ID NO: 455522
  Synthetic oligonucleotide

SEQ ID NO: 602303 - DNA, 58 bp, Artificial; identical to SEQ ID NO: 455523
  Synthetic oligonucleotide

SEQ ID NO: 602304 - DNA, 60 bp, Artificial; identical to SEQ ID NO: 455525
  Synthetic oligonucleotide

SEQ ID NO: 602305 - DNA, 60 bp, Artificial; identical to SEQ ID NO: 455526
  Synthetic oligonucleotide

SEQ ID NO: 602306 - DNA, 55 bp, Artificial; identical to SEQ ID NO: 455527
  Synthetic oligonucleotide

SEQ ID NO: 602307 - DNA, 60 bp, Artificial; identical to SEQ ID NO: 455531
  Synthetic oligonucleotide

SEQ ID NO: 602308 - DNA, 60 bp, Artificial; identical to SEQ ID NO: 455533
  Synthetic oligonucleotide

SEQ ID NO: 602309 - DNA, 57 bp, Artificial; identical to SEQ ID NO: 455534
  Synthetic oligonucleotide

SEQ ID NO: 602310 - DNA, 52 bp, Artificial; identical to SEQ ID NO: 455536
  Synthetic oligonucleotide

SEQ ID NO: 602311 - DNA, 59 bp, Artificial; identical to SEQ ID NO: 455543
  Synthetic oligonucleotide

SEQ ID NO: 602312 - DNA, 60 bp, Artificial; identical to SEQ ID NO: 455546
  Synthetic oligonucleotide

SEQ ID NO: 602313 - DNA, 60 bp, Artificial; identical to SEQ ID NO: 455558
  Synthetic oligonucleotide

SEQ ID NO: 602314 - DNA, 60 bp, Artificial; identical to SEQ ID NO: 455562
  Synthetic oligonucleotide

SEQ ID NO: 602315 - DNA, 55 bp, Artificial; identical to SEQ ID NO: 455565
  Synthetic oligonucleotide

SEQ ID NO: 602316 - DNA, 56 bp, Artificial; identical to SEQ ID NO: 455568
  Synthetic oligonucleotide

SEQ ID NO: 602317 - DNA, 59 bp, Artificial; identical to SEQ ID NO: 455571
  Synthetic oligonucleotide

SEQ ID NO: 602318 - DNA, 51 bp, Artificial; identical to SEQ ID NO: 455575
  Synthetic oligonucleotide

SEQ ID NO: 602319 - DNA, 56 bp, Artificial; identical to SEQ ID NO: 455576
  Synthetic oligonucleotide

SEQ ID NO: 602320 - DNA, 60 bp, Artificial; identical to SEQ ID NO: 455578
  Synthetic oligonucleotide

SEQ ID NO: 602321 - DNA, 59 bp, Artificial; identical to SEQ ID NO: 455586
  Synthetic oligonucleotide

SEQ ID NO: 602322 - DNA, 54 bp, Artificial; identical to SEQ ID NO: 18176
  Synthetic oligonucleotide

SEQ ID NO: 602323 - DNA, 57 bp, Artificial; identical to SEQ ID NO: 455589
  Synthetic oligonucleotide

SEQ ID NO: 602324 - DNA, 54 bp, Artificial; identical to SEQ ID NO: 455591
  Synthetic oligonucleotide

SEQ ID NO: 602325 - DNA, 51 bp, Artificial; identical to SEQ ID NO: 455592
  Synthetic oligonucleotide

SEQ ID NO: 602326 - DNA, 55 bp, Artificial; identical to SEQ ID NO: 455596
  Synthetic oligonucleotide

SEQ ID NO: 602327 - DNA, 52 bp, Artificial; identical to SEQ ID NO: 455600
  Synthetic oligonucleotide

SEQ ID NO: 602328 - DNA, 60 bp, Artificial; identical to SEQ ID NO: 13123
  Synthetic oligonucleotide

SEQ ID NO: 602329 - DNA, 60 bp, Artificial; identical to SEQ ID NO: 6834
  Synthetic oligonucleotide

SEQ ID NO: 602330 - DNA, 60 bp, Artificial; identical to SEQ ID NO: 15131
  Synthetic oligonucleotide

SEQ ID NO: 602331 - DNA, 54 bp, Artificial; identical to SEQ ID NO: 13525
  Synthetic oligonucleotide

SEQ ID NO: 602332 - DNA, 60 bp, Artificial; identical to SEQ ID NO: 455611
  Synthetic oligonucleotide

SEQ ID NO: 602333 - DNA, 55 bp, Artificial; identical to SEQ ID NO: 455613
  Synthetic oligonucleotide

SEQ ID NO: 602334 - DNA, 59 bp, Artificial; identical to SEQ ID NO: 455614
  Synthetic oligonucleotide

SEQ ID NO: 602335 - DNA, 57 bp, Artificial; identical to SEQ ID NO: 455622
  Synthetic oligonucleotide

SEQ ID NO: 602336 - DNA, 54 bp, Artificial; identical to SEQ ID NO: 455626
  Synthetic oligonucleotide

SEQ ID NO: 602337 - DNA, 60 bp, Artificial; identical to SEQ ID NO: 455632
  Synthetic oligonucleotide

SEQ ID NO: 602338 - DNA, 51 bp, Artificial; identical to SEQ ID NO: 455639
  Synthetic oligonucleotide

SEQ ID NO: 602339 - DNA, 52 bp, Artificial; identical to SEQ ID NO: 455641
  Synthetic oligonucleotide

SEQ ID NO: 602340 - DNA, 51 bp, Artificial; identical to SEQ ID NO: 455643
  Synthetic oligonucleotide

SEQ ID NO: 602341 - DNA, 50 bp, Artificial; identical to SEQ ID NO: 16064
  Synthetic oligonucleotide

SEQ ID NO: 602342 - DNA, 60 bp, Artificial; identical to SEQ ID NO: 455645
  Synthetic oligonucleotide

SEQ ID NO: 602343 - DNA, 56 bp, Artificial; identical to SEQ ID NO: 455647
  Synthetic oligonucleotide

SEQ ID NO: 602344 - DNA, 60 bp, Artificial; identical to SEQ ID NO: 455648
  Synthetic oligonucleotide

SEQ ID NO: 602345 - DNA, 60 bp, Artificial; identical to SEQ ID NO: 455653
  Synthetic oligonucleotide

SEQ ID NO: 602346 - DNA, 60 bp, Artificial; identical to SEQ ID NO: 455654
  Synthetic oligonucleotide

SEQ ID NO: 602347 - DNA, 60 bp, Artificial; identical to SEQ ID NO: 455655
  Synthetic oligonucleotide

SEQ ID NO: 602348 - DNA, 60 bp, Artificial; identical to SEQ ID NO: 455656
  Synthetic oligonucleotide

SEQ ID NO: 602349 - DNA, 55 bp, Artificial; identical to SEQ ID NO: 455657
  Synthetic oligonucleotide

SEQ ID NO: 602350 - DNA, 60 bp, Artificial; identical to SEQ ID NO: 455660
  Synthetic oligonucleotide

SEQ ID NO: 602351 - DNA, 50 bp, Artificial; identical to SEQ ID NO: 455667
  Synthetic oligonucleotide

SEQ ID NO: 602352 - DNA, 53 bp, Artificial; identical to SEQ ID NO: 455668
  Synthetic oligonucleotide

SEQ ID NO: 602353 - DNA, 54 bp, Artificial; identical to SEQ ID NO: 455670
  Synthetic oligonucleotide

SEQ ID NO: 602354 - DNA, 58 bp, Artificial; identical to SEQ ID NO: 19115
  Synthetic oligonucleotide

SEQ ID NO: 602355 - DNA, 55 bp, Artificial; identical to SEQ ID NO: 455671
  Synthetic oligonucleotide

SEQ ID NO: 602356 - DNA, 60 bp, Artificial; identical to SEQ ID NO: 455676
  Synthetic oligonucleotide

SEQ ID NO: 602357 - DNA, 60 bp, Artificial; identical to SEQ ID NO: 455678
  Synthetic oligonucleotide

SEQ ID NO: 602358 - DNA, 60 bp, Artificial; identical to SEQ ID NO: 455679
  Synthetic oligonucleotide

SEQ ID NO: 602359 - DNA, 60 bp, Artificial; identical to SEQ ID NO: 455680
  Synthetic oligonucleotide

SEQ ID NO: 602360 - DNA, 60 bp, Artificial; identical to SEQ ID NO: 455682
  Synthetic oligonucleotide

SEQ ID NO: 602361 - DNA, 55 bp, Artificial; identical to SEQ ID NO: 455684
  Synthetic oligonucleotide

SEQ ID NO: 602362 - DNA, 60 bp, Artificial; identical to SEQ ID NO: 455685
  Synthetic oligonucleotide

SEQ ID NO: 602363 - DNA, 55 bp, Artificial; identical to SEQ ID NO: 455690
  Synthetic oligonucleotide

SEQ ID NO: 602364 - DNA, 50 bp, Artificial; identical to SEQ ID NO: 455692
  Synthetic oligonucleotide

SEQ ID NO: 602365 - DNA, 60 bp, Artificial; identical to SEQ ID NO: 455693
  Synthetic oligonucleotide

SEQ ID NO: 602366 - DNA, 54 bp, Artificial; identical to SEQ ID NO: 10646
  Synthetic oligonucleotide

SEQ ID NO: 602367 - DNA, 58 bp, Artificial; identical to SEQ ID NO: 455696
  Synthetic oligonucleotide

SEQ ID NO: 602368 - DNA, 57 bp, Artificial; identical to SEQ ID NO: 455698
  Synthetic oligonucleotide

SEQ ID NO: 602369 - DNA, 55 bp, Artificial; identical to SEQ ID NO: 455700
  Synthetic oligonucleotide

SEQ ID NO: 602370 - DNA, 55 bp, Artificial; identical to SEQ ID NO: 455701
  Synthetic oligonucleotide

SEQ ID NO: 602371 - DNA, 60 bp, Artificial; identical to SEQ ID NO: 455704
  Synthetic oligonucleotide

SEQ ID NO: 602372 - DNA, 55 bp, Artificial; identical to SEQ ID NO: 455706
  Synthetic oligonucleotide

SEQ ID NO: 602373 - DNA, 60 bp, Artificial; identical to SEQ ID NO: 455707
  Synthetic oligonucleotide

SEQ ID NO: 602374 - DNA, 60 bp, Artificial; identical to SEQ ID NO: 455708
  Synthetic oligonucleotide

SEQ ID NO: 602375 - DNA, 60 bp, Artificial; identical to SEQ ID NO: 8562
  Synthetic oligonucleotide

SEQ ID NO: 602376 - DNA, 60 bp, Artificial; identical to SEQ ID NO: 455711
  Synthetic oligonucleotide

SEQ ID NO: 602377 - DNA, 52 bp, Artificial; identical to SEQ ID NO: 455715
  Synthetic oligonucleotide

SEQ ID NO: 602378 - DNA, 57 bp, Artificial; identical to SEQ ID NO: 455717
  Synthetic oligonucleotide

SEQ ID NO: 602379 - DNA, 58 bp, Artificial; identical to SEQ ID NO: 455718
  Synthetic oligonucleotide

SEQ ID NO: 602380 - DNA, 60 bp, Artificial; identical to SEQ ID NO: 455720
  Synthetic oligonucleotide

SEQ ID NO: 602381 - DNA, 60 bp, Artificial; identical to SEQ ID NO: 455721
  Synthetic oligonucleotide

SEQ ID NO: 602382 - DNA, 60 bp, Artificial; identical to SEQ ID NO: 455723
  Synthetic oligonucleotide

SEQ ID NO: 602383 - DNA, 58 bp, Artificial; identical to SEQ ID NO: 455724
  Synthetic oligonucleotide

SEQ ID NO: 602384 - DNA, 60 bp, Artificial; identical to SEQ ID NO: 455725
  Synthetic oligonucleotide

SEQ ID NO: 602385 - DNA, 54 bp, Artificial; identical to SEQ ID NO: 455726
  Synthetic oligonucleotide

SEQ ID NO: 602386 - DNA, 55 bp, Artificial; identical to SEQ ID NO: 455727
  Synthetic oligonucleotide

SEQ ID NO: 602387 - DNA, 60 bp, Artificial; identical to SEQ ID NO: 455728
  Synthetic oligonucleotide

SEQ ID NO: 602388 - DNA, 60 bp, Artificial; identical to SEQ ID NO: 455731
  Synthetic oligonucleotide

SEQ ID NO: 602389 - DNA, 58 bp, Artificial; identical to SEQ ID NO: 455732
  Synthetic oligonucleotide

SEQ ID NO: 602390 - DNA, 55 bp, Artificial; identical to SEQ ID NO: 455735
  Synthetic oligonucleotide

SEQ ID NO: 602391 - DNA, 52 bp, Artificial; identical to SEQ ID NO: 455736
  Synthetic oligonucleotide

SEQ ID NO: 602392 - DNA, 50 bp, Artificial; identical to SEQ ID NO: 455737
  Synthetic oligonucleotide

SEQ ID NO: 602393 - DNA, 55 bp, Artificial; identical to SEQ ID NO: 455738
  Synthetic oligonucleotide

SEQ ID NO: 602394 - DNA, 56 bp, Artificial; identical to SEQ ID NO: 455740
  Synthetic oligonucleotide

SEQ ID NO: 602395 - DNA, 60 bp, Artificial; identical to SEQ ID NO: 455745
  Synthetic oligonucleotide

SEQ ID NO: 602396 - DNA, 55 bp, Artificial; identical to SEQ ID NO: 455749
  Synthetic oligonucleotide

SEQ ID NO: 602397 - DNA, 55 bp, Artificial; identical to SEQ ID NO: 455750
  Synthetic oligonucleotide

SEQ ID NO: 602398 - DNA, 54 bp, Artificial; identical to SEQ ID NO: 18094
  Synthetic oligonucleotide

SEQ ID NO: 602399 - DNA, 49 bp, Artificial; identical to SEQ ID NO: 455752
  Synthetic oligonucleotide

SEQ ID NO: 602400 - DNA, 53 bp, Artificial; identical to SEQ ID NO: 455756
  Synthetic oligonucleotide

SEQ ID NO: 602401 - DNA, 58 bp, Artificial; identical to SEQ ID NO: 455758
  Synthetic oligonucleotide

SEQ ID NO: 602402 - DNA, 58 bp, Artificial; identical to SEQ ID NO: 455759
  Synthetic oligonucleotide

SEQ ID NO: 602403 - DNA, 60 bp, Artificial; identical to SEQ ID NO: 455762
  Synthetic oligonucleotide

SEQ ID NO: 602404 - DNA, 60 bp, Artificial; identical to SEQ ID NO: 455763
  Synthetic oligonucleotide

SEQ ID NO: 602405 - DNA, 57 bp, Artificial; identical to SEQ ID NO: 455764
  Synthetic oligonucleotide

SEQ ID NO: 602406 - DNA, 60 bp, Artificial; identical to SEQ ID NO: 455765
  Synthetic oligonucleotide

SEQ ID NO: 602407 - DNA, 55 bp, Artificial; identical to SEQ ID NO: 455767
  Synthetic oligonucleotide

SEQ ID NO: 602408 - DNA, 55 bp, Artificial; identical to SEQ ID NO: 455769
  Synthetic oligonucleotide

SEQ ID NO: 602409 - DNA, 56 bp, Artificial; identical to SEQ ID NO: 455770
  Synthetic oligonucleotide

SEQ ID NO: 602410 - DNA, 56 bp, Artificial; identical to SEQ ID NO: 455772
  Synthetic oligonucleotide

SEQ ID NO: 602411 - DNA, 57 bp, Artificial; identical to SEQ ID NO: 455774
  Synthetic oligonucleotide

SEQ ID NO: 602412 - DNA, 60 bp, Artificial; identical to SEQ ID NO: 455781
  Synthetic oligonucleotide

SEQ ID NO: 602413 - DNA, 55 bp, Artificial; identical to SEQ ID NO: 455785
  Synthetic oligonucleotide

SEQ ID NO: 602414 - DNA, 60 bp, Artificial; identical to SEQ ID NO: 455787
  Synthetic oligonucleotide

SEQ ID NO: 602415 - DNA, 57 bp, Artificial; identical to SEQ ID NO: 19585
  Synthetic oligonucleotide

SEQ ID NO: 602416 - DNA, 60 bp, Artificial; identical to SEQ ID NO: 455794
  Synthetic oligonucleotide

SEQ ID NO: 602417 - DNA, 57 bp, Artificial; identical to SEQ ID NO: 455796
  Synthetic oligonucleotide

SEQ ID NO: 602418 - DNA, 50 bp, Artificial; identical to SEQ ID NO: 455797
  Synthetic oligonucleotide

SEQ ID NO: 602419 - DNA, 60 bp, Artificial; identical to SEQ ID NO: 455799
  Synthetic oligonucleotide

SEQ ID NO: 602420 - DNA, 51 bp, Artificial; identical to SEQ ID NO: 455803
  Synthetic oligonucleotide

SEQ ID NO: 602421 - DNA, 60 bp, Artificial; identical to SEQ ID NO: 455805
  Synthetic oligonucleotide

SEQ ID NO: 602422 - DNA, 55 bp, Artificial; identical to SEQ ID NO: 455806
  Synthetic oligonucleotide

SEQ ID NO: 602423 - DNA, 60 bp, Artificial; identical to SEQ ID NO: 455815
  Synthetic oligonucleotide

SEQ ID NO: 602424 - DNA, 60 bp, Artificial; identical to SEQ ID NO: 455816
  Synthetic oligonucleotide

SEQ ID NO: 602425 - DNA, 57 bp, Artificial; identical to SEQ ID NO: 455818
  Synthetic oligonucleotide

SEQ ID NO: 602426 - DNA, 60 bp, Artificial; identical to SEQ ID NO: 455823
  Synthetic oligonucleotide

SEQ ID NO: 602427 - DNA, 52 bp, Artificial; identical to SEQ ID NO: 455824
  Synthetic oligonucleotide

SEQ ID NO: 602428 - DNA, 54 bp, Artificial; identical to SEQ ID NO: 455825
  Synthetic oligonucleotide

SEQ ID NO: 602429 - DNA, 55 bp, Artificial; identical to SEQ ID NO: 455828
  Synthetic oligonucleotide

SEQ ID NO: 602430 - DNA, 55 bp, Artificial; identical to SEQ ID NO: 455832
  Synthetic oligonucleotide

SEQ ID NO: 602431 - DNA, 55 bp, Artificial; identical to SEQ ID NO: 455833
  Synthetic oligonucleotide

SEQ ID NO: 602432 - DNA, 60 bp, Artificial; identical to SEQ ID NO: 455836
  Synthetic oligonucleotide

SEQ ID NO: 602433 - DNA, 55 bp, Artificial; identical to SEQ ID NO: 455837
  Synthetic oligonucleotide

SEQ ID NO: 602434 - DNA, 60 bp, Artificial; identical to SEQ ID NO: 455840
  Synthetic oligonucleotide

SEQ ID NO: 602435 - DNA, 53 bp, Artificial; identical to SEQ ID NO: 455844
  Synthetic oligonucleotide

SEQ ID NO: 602436 - DNA, 59 bp, Artificial; identical to SEQ ID NO: 455845
  Synthetic oligonucleotide

SEQ ID NO: 602437 - DNA, 55 bp, Artificial; identical to SEQ ID NO: 455849
  Synthetic oligonucleotide

SEQ ID NO: 602438 - DNA, 58 bp, Artificial; identical to SEQ ID NO: 455852
  Synthetic oligonucleotide

SEQ ID NO: 602439 - DNA, 60 bp, Artificial; identical to SEQ ID NO: 455853
  Synthetic oligonucleotide

SEQ ID NO: 602440 - DNA, 60 bp, Artificial; identical to SEQ ID NO: 455854
  Synthetic oligonucleotide

SEQ ID NO: 602441 - DNA, 60 bp, Artificial; identical to SEQ ID NO: 455855
  Synthetic oligonucleotide

SEQ ID NO: 602442 - DNA, 59 bp, Artificial; identical to SEQ ID NO: 455858
  Synthetic oligonucleotide

SEQ ID NO: 602443 - DNA, 57 bp, Artificial; identical to SEQ ID NO: 455868
  Synthetic oligonucleotide

SEQ ID NO: 602444 - DNA, 60 bp, Artificial; identical to SEQ ID NO: 455869
  Synthetic oligonucleotide

SEQ ID NO: 602445 - DNA, 60 bp, Artificial; identical to SEQ ID NO: 455871
  Synthetic oligonucleotide

SEQ ID NO: 602446 - DNA, 60 bp, Artificial; identical to SEQ ID NO: 455872
  Synthetic oligonucleotide

SEQ ID NO: 602447 - DNA, 60 bp, Artificial; identical to SEQ ID NO: 455874
  Synthetic oligonucleotide

SEQ ID NO: 602448 - DNA, 60 bp, Artificial; identical to SEQ ID NO: 455877
  Synthetic oligonucleotide

SEQ ID NO: 602449 - DNA, 60 bp, Artificial; identical to SEQ ID NO: 455880
  Synthetic oligonucleotide

SEQ ID NO: 602450 - DNA, 51 bp, Artificial; identical to SEQ ID NO: 455882
  Synthetic oligonucleotide

SEQ ID NO: 602451 - DNA, 58 bp, Artificial; identical to SEQ ID NO: 455883
  Synthetic oligonucleotide

SEQ ID NO: 602452 - DNA, 60 bp, Artificial; identical to SEQ ID NO: 455885
  Synthetic oligonucleotide

SEQ ID NO: 602453 - DNA, 60 bp, Artificial; identical to SEQ ID NO: 455887
  Synthetic oligonucleotide

SEQ ID NO: 602454 - DNA, 60 bp, Artificial; identical to SEQ ID NO: 455888
  Synthetic oligonucleotide

SEQ ID NO: 602455 - DNA, 57 bp, Artificial; identical to SEQ ID NO: 455889
  Synthetic oligonucleotide

SEQ ID NO: 602456 - DNA, 60 bp, Artificial; identical to SEQ ID NO: 455891
  Synthetic oligonucleotide

SEQ ID NO: 602457 - DNA, 50 bp, Artificial; identical to SEQ ID NO: 455892
  Synthetic oligonucleotide

SEQ ID NO: 602458 - DNA, 56 bp, Artificial; identical to SEQ ID NO: 455897
  Synthetic oligonucleotide

SEQ ID NO: 602459 - DNA, 58 bp, Artificial; identical to SEQ ID NO: 455899
  Synthetic oligonucleotide

SEQ ID NO: 602460 - DNA, 57 bp, Artificial; identical to SEQ ID NO: 455900
  Synthetic oligonucleotide

SEQ ID NO: 602461 - DNA, 55 bp, Artificial; identical to SEQ ID NO: 455904
  Synthetic oligonucleotide

SEQ ID NO: 602462 - DNA, 59 bp, Artificial; identical to SEQ ID NO: 455905
  Synthetic oligonucleotide

SEQ ID NO: 602463 - DNA, 54 bp, Artificial; identical to SEQ ID NO: 455906
  Synthetic oligonucleotide

SEQ ID NO: 602464 - DNA, 54 bp, Artificial; identical to SEQ ID NO: 455909
  Synthetic oligonucleotide

SEQ ID NO: 602465 - DNA, 59 bp, Artificial; identical to SEQ ID NO: 455912
  Synthetic oligonucleotide

SEQ ID NO: 602466 - DNA, 60 bp, Artificial; identical to SEQ ID NO: 455913
  Synthetic oligonucleotide

SEQ ID NO: 602467 - DNA, 56 bp, Artificial; identical to SEQ ID NO: 14219
  Synthetic oligonucleotide

SEQ ID NO: 602468 - DNA, 60 bp, Artificial; identical to SEQ ID NO: 455917
  Synthetic oligonucleotide

SEQ ID NO: 602469 - DNA, 60 bp, Artificial; identical to SEQ ID NO: 455918
  Synthetic oligonucleotide

SEQ ID NO: 602470 - DNA, 60 bp, Artificial; identical to SEQ ID NO: 455921
  Synthetic oligonucleotide

SEQ ID NO: 602471 - DNA, 59 bp, Artificial; identical to SEQ ID NO: 455925
  Synthetic oligonucleotide

SEQ ID NO: 602472 - DNA, 55 bp, Artificial; identical to SEQ ID NO: 455928
  Synthetic oligonucleotide

SEQ ID NO: 602473 - DNA, 55 bp, Artificial; identical to SEQ ID NO: 455929
  Synthetic oligonucleotide

SEQ ID NO: 602474 - DNA, 60 bp, Artificial; identical to SEQ ID NO: 455931
  Synthetic oligonucleotide

SEQ ID NO: 602475 - DNA, 54 bp, Artificial; identical to SEQ ID NO: 455936
  Synthetic oligonucleotide

SEQ ID NO: 602476 - DNA, 60 bp, Artificial; identical to SEQ ID NO: 455937
  Synthetic oligonucleotide

SEQ ID NO: 602477 - DNA, 60 bp, Artificial; identical to SEQ ID NO: 455938
  Synthetic oligonucleotide

SEQ ID NO: 602478 - DNA, 60 bp, Artificial; identical to SEQ ID NO: 455941
  Synthetic oligonucleotide

SEQ ID NO: 602479 - DNA, 50 bp, Artificial; identical to SEQ ID NO: 455942
  Synthetic oligonucleotide

SEQ ID NO: 602480 - DNA, 57 bp, Artificial; identical to SEQ ID NO: 455945
  Synthetic oligonucleotide

SEQ ID NO: 602481 - DNA, 59 bp, Artificial; identical to SEQ ID NO: 455947
  Synthetic oligonucleotide

SEQ ID NO: 602482 - DNA, 50 bp, Artificial; identical to SEQ ID NO: 455950
  Synthetic oligonucleotide

SEQ ID NO: 602483 - DNA, 60 bp, Artificial; identical to SEQ ID NO: 455953
  Synthetic oligonucleotide

SEQ ID NO: 602484 - DNA, 60 bp, Artificial; identical to SEQ ID NO: 455955
  Synthetic oligonucleotide

SEQ ID NO: 602485 - DNA, 60 bp, Artificial; identical to SEQ ID NO: 455956
  Synthetic oligonucleotide

SEQ ID NO: 602486 - DNA, 54 bp, Artificial; identical to SEQ ID NO: 455958
  Synthetic oligonucleotide

SEQ ID NO: 602487 - DNA, 50 bp, Artificial; identical to SEQ ID NO: 455960
  Synthetic oligonucleotide

SEQ ID NO: 602488 - DNA, 60 bp, Artificial; identical to SEQ ID NO: 455961
  Synthetic oligonucleotide

SEQ ID NO: 602489 - DNA, 58 bp, Artificial; identical to SEQ ID NO: 455964
  Synthetic oligonucleotide

SEQ ID NO: 602490 - DNA, 56 bp, Artificial; identical to SEQ ID NO: 455965
  Synthetic oligonucleotide

SEQ ID NO: 602491 - DNA, 60 bp, Artificial; identical to SEQ ID NO: 455969
  Synthetic oligonucleotide

SEQ ID NO: 602492 - DNA, 57 bp, Artificial; identical to SEQ ID NO: 455971
  Synthetic oligonucleotide

SEQ ID NO: 602493 - DNA, 52 bp, Artificial; identical to SEQ ID NO: 455975
  Synthetic oligonucleotide

SEQ ID NO: 602494 - DNA, 57 bp, Artificial; identical to SEQ ID NO: 455976
  Synthetic oligonucleotide

SEQ ID NO: 602495 - DNA, 55 bp, Artificial; identical to SEQ ID NO: 455977
  Synthetic oligonucleotide

SEQ ID NO: 602496 - DNA, 60 bp, Artificial; identical to SEQ ID NO: 455978
  Synthetic oligonucleotide

SEQ ID NO: 602497 - DNA, 58 bp, Artificial; identical to SEQ ID NO: 455979
  Synthetic oligonucleotide

SEQ ID NO: 602498 - DNA, 55 bp, Artificial; identical to SEQ ID NO: 455981
  Synthetic oligonucleotide

SEQ ID NO: 602499 - DNA, 60 bp, Artificial; identical to SEQ ID NO: 455983
  Synthetic oligonucleotide

SEQ ID NO: 602500 - DNA, 50 bp, Artificial; identical to SEQ ID NO: 13295
  Synthetic oligonucleotide

SEQ ID NO: 602501 - DNA, 59 bp, Artificial; identical to SEQ ID NO: 455986
  Synthetic oligonucleotide

SEQ ID NO: 602502 - DNA, 60 bp, Artificial; identical to SEQ ID NO: 455991
  Synthetic oligonucleotide

SEQ ID NO: 602503 - DNA, 59 bp, Artificial; identical to SEQ ID NO: 455994
  Synthetic oligonucleotide

SEQ ID NO: 602504 - DNA, 60 bp, Artificial; identical to SEQ ID NO: 455995
  Synthetic oligonucleotide

SEQ ID NO: 602505 - DNA, 60 bp, Artificial; identical to SEQ ID NO: 455996
  Synthetic oligonucleotide

SEQ ID NO: 602506 - DNA, 52 bp, Artificial; identical to SEQ ID NO: 456000
  Synthetic oligonucleotide

SEQ ID NO: 602507 - DNA, 55 bp, Artificial; identical to SEQ ID NO: 456002
  Synthetic oligonucleotide

SEQ ID NO: 602508 - DNA, 60 bp, Artificial; identical to SEQ ID NO: 456003
  Synthetic oligonucleotide

SEQ ID NO: 602509 - DNA, 60 bp, Artificial; identical to SEQ ID NO: 456005
  Synthetic oligonucleotide

SEQ ID NO: 602510 - DNA, 55 bp, Artificial; identical to SEQ ID NO: 456008
  Synthetic oligonucleotide

SEQ ID NO: 602511 - DNA, 60 bp, Artificial; identical to SEQ ID NO: 456010
  Synthetic oligonucleotide

SEQ ID NO: 602512 - DNA, 60 bp, Artificial; identical to SEQ ID NO: 456013
  Synthetic oligonucleotide

SEQ ID NO: 602513 - DNA, 60 bp, Artificial; identical to SEQ ID NO: 456016
  Synthetic oligonucleotide

SEQ ID NO: 602514 - DNA, 60 bp, Artificial; identical to SEQ ID NO: 456017
  Synthetic oligonucleotide

SEQ ID NO: 602515 - DNA, 59 bp, Artificial; identical to SEQ ID NO: 456019
  Synthetic oligonucleotide

SEQ ID NO: 602516 - DNA, 60 bp, Artificial; identical to SEQ ID NO: 456020
  Synthetic oligonucleotide

SEQ ID NO: 602517 - DNA, 55 bp, Artificial; identical to SEQ ID NO: 456024
  Synthetic oligonucleotide

SEQ ID NO: 602518 - DNA, 58 bp, Artificial; identical to SEQ ID NO: 456030
  Synthetic oligonucleotide

SEQ ID NO: 602519 - DNA, 53 bp, Artificial; identical to SEQ ID NO: 456031
  Synthetic oligonucleotide

SEQ ID NO: 602520 - DNA, 59 bp, Artificial; identical to SEQ ID NO: 456033
  Synthetic oligonucleotide

SEQ ID NO: 602521 - DNA, 57 bp, Artificial; identical to SEQ ID NO: 456034
  Synthetic oligonucleotide

SEQ ID NO: 602522 - DNA, 58 bp, Artificial; identical to SEQ ID NO: 456038
  Synthetic oligonucleotide

SEQ ID NO: 602523 - DNA, 55 bp, Artificial; identical to SEQ ID NO: 456039
  Synthetic oligonucleotide

SEQ ID NO: 602524 - DNA, 59 bp, Artificial; identical to SEQ ID NO: 456041
  Synthetic oligonucleotide

SEQ ID NO: 602525 - DNA, 60 bp, Artificial; identical to SEQ ID NO: 11130
  Synthetic oligonucleotide

SEQ ID NO: 602526 - DNA, 60 bp, Artificial; identical to SEQ ID NO: 456044
  Synthetic oligonucleotide

SEQ ID NO: 602527 - DNA, 60 bp, Artificial; identical to SEQ ID NO: 456057
  Synthetic oligonucleotide

SEQ ID NO: 602528 - DNA, 55 bp, Artificial; identical to SEQ ID NO: 456058
  Synthetic oligonucleotide

SEQ ID NO: 602529 - DNA, 60 bp, Artificial; identical to SEQ ID NO: 456059
  Synthetic oligonucleotide

SEQ ID NO: 602530 - DNA, 55 bp, Artificial; identical to SEQ ID NO: 456061
  Synthetic oligonucleotide

SEQ ID NO: 602531 - DNA, 52 bp, Artificial; identical to SEQ ID NO: 456064
  Synthetic oligonucleotide

SEQ ID NO: 602532 - DNA, 52 bp, Artificial; identical to SEQ ID NO: 456067
  Synthetic oligonucleotide

SEQ ID NO: 602533 - DNA, 56 bp, Artificial; identical to SEQ ID NO: 456068
  Synthetic oligonucleotide

SEQ ID NO: 602534 - DNA, 57 bp, Artificial; identical to SEQ ID NO: 456069
  Synthetic oligonucleotide

SEQ ID NO: 602535 - DNA, 55 bp, Artificial; identical to SEQ ID NO: 456075
  Synthetic oligonucleotide

SEQ ID NO: 602536 - DNA, 51 bp, Artificial; identical to SEQ ID NO: 456076
  Synthetic oligonucleotide

SEQ ID NO: 602537 - DNA, 56 bp, Artificial; identical to SEQ ID NO: 456078
  Synthetic oligonucleotide

SEQ ID NO: 602538 - DNA, 58 bp, Artificial; identical to SEQ ID NO: 456081
  Synthetic oligonucleotide

SEQ ID NO: 602539 - DNA, 58 bp, Artificial; identical to SEQ ID NO: 456083
  Synthetic oligonucleotide

SEQ ID NO: 602540 - DNA, 53 bp, Artificial; identical to SEQ ID NO: 456084
  Synthetic oligonucleotide

SEQ ID NO: 602541 - DNA, 55 bp, Artificial; identical to SEQ ID NO: 456087
  Synthetic oligonucleotide

SEQ ID NO: 602542 - DNA, 59 bp, Artificial; identical to SEQ ID NO: 20455
  Synthetic oligonucleotide

SEQ ID NO: 602543 - DNA, 55 bp, Artificial; identical to SEQ ID NO: 12437
  Synthetic oligonucleotide

SEQ ID NO: 602544 - DNA, 51 bp, Artificial; identical to SEQ ID NO: 10668
  Synthetic oligonucleotide

SEQ ID NO: 602545 - DNA, 59 bp, Artificial; identical to SEQ ID NO: 456091
  Synthetic oligonucleotide

SEQ ID NO: 602546 - DNA, 60 bp, Artificial; identical to SEQ ID NO: 456092
  Synthetic oligonucleotide

SEQ ID NO: 602547 - DNA, 60 bp, Artificial; identical to SEQ ID NO: 456094
  Synthetic oligonucleotide

SEQ ID NO: 602548 - DNA, 57 bp, Artificial; identical to SEQ ID NO: 456101
  Synthetic oligonucleotide

SEQ ID NO: 602549 - DNA, 58 bp, Artificial; identical to SEQ ID NO: 456102
  Synthetic oligonucleotide

SEQ ID NO: 602550 - DNA, 55 bp, Artificial; identical to SEQ ID NO: 456108
  Synthetic oligonucleotide

SEQ ID NO: 602551 - DNA, 60 bp, Artificial; identical to SEQ ID NO: 456109
  Synthetic oligonucleotide

SEQ ID NO: 602552 - DNA, 58 bp, Artificial; identical to SEQ ID NO: 456110
  Synthetic oligonucleotide

SEQ ID NO: 602553 - DNA, 59 bp, Artificial; identical to SEQ ID NO: 456111
  Synthetic oligonucleotide

SEQ ID NO: 602554 - DNA, 56 bp, Artificial; identical to SEQ ID NO: 456112
  Synthetic oligonucleotide

SEQ ID NO: 602555 - DNA, 60 bp, Artificial; identical to SEQ ID NO: 456113
  Synthetic oligonucleotide

SEQ ID NO: 602556 - DNA, 60 bp, Artificial; identical to SEQ ID NO: 456116
  Synthetic oligonucleotide

SEQ ID NO: 602557 - DNA, 60 bp, Artificial; identical to SEQ ID NO: 456117
  Synthetic oligonucleotide

SEQ ID NO: 602558 - DNA, 57 bp, Artificial; identical to SEQ ID NO: 456120
  Synthetic oligonucleotide

SEQ ID NO: 602559 - DNA, 56 bp, Artificial; identical to SEQ ID NO: 456122
  Synthetic oligonucleotide

SEQ ID NO: 602560 - DNA, 59 bp, Artificial; identical to SEQ ID NO: 456123
  Synthetic oligonucleotide

SEQ ID NO: 602561 - DNA, 60 bp, Artificial; identical to SEQ ID NO: 456125
  Synthetic oligonucleotide

SEQ ID NO: 602562 - DNA, 59 bp, Artificial; identical to SEQ ID NO: 456126
  Synthetic oligonucleotide

SEQ ID NO: 602563 - DNA, 60 bp, Artificial; identical to SEQ ID NO: 456127
  Synthetic oligonucleotide

SEQ ID NO: 602564 - DNA, 53 bp, Artificial; identical to SEQ ID NO: 456128
  Synthetic oligonucleotide

SEQ ID NO: 602565 - DNA, 60 bp, Artificial; identical to SEQ ID NO: 456130
  Synthetic oligonucleotide

SEQ ID NO: 602566 - DNA, 55 bp, Artificial; identical to SEQ ID NO: 456134
  Synthetic oligonucleotide

SEQ ID NO: 602567 - DNA, 59 bp, Artificial; identical to SEQ ID NO: 456136
  Synthetic oligonucleotide

SEQ ID NO: 602568 - DNA, 60 bp, Artificial; identical to SEQ ID NO: 456137
  Synthetic oligonucleotide

SEQ ID NO: 602569 - DNA, 59 bp, Artificial; identical to SEQ ID NO: 456139
  Synthetic oligonucleotide

SEQ ID NO: 602570 - DNA, 54 bp, Artificial; identical to SEQ ID NO: 456140
  Synthetic oligonucleotide

SEQ ID NO: 602571 - DNA, 60 bp, Artificial; identical to SEQ ID NO: 456143
  Synthetic oligonucleotide

SEQ ID NO: 602572 - DNA, 60 bp, Artificial; identical to SEQ ID NO: 456144
  Synthetic oligonucleotide

SEQ ID NO: 602573 - DNA, 60 bp, Artificial; identical to SEQ ID NO: 456146
  Synthetic oligonucleotide

SEQ ID NO: 602574 - DNA, 60 bp, Artificial; identical to SEQ ID NO: 456147
  Synthetic oligonucleotide

SEQ ID NO: 602575 - DNA, 60 bp, Artificial; identical to SEQ ID NO: 456148
  Synthetic oligonucleotide

SEQ ID NO: 602576 - DNA, 55 bp, Artificial; identical to SEQ ID NO: 456149
  Synthetic oligonucleotide

SEQ ID NO: 602577 - DNA, 60 bp, Artificial; identical to SEQ ID NO: 456158
  Synthetic oligonucleotide

SEQ ID NO: 602578 - DNA, 60 bp, Artificial; identical to SEQ ID NO: 456159
  Synthetic oligonucleotide

SEQ ID NO: 602579 - DNA, 50 bp, Artificial; identical to SEQ ID NO: 456162
  Synthetic oligonucleotide

SEQ ID NO: 602580 - DNA, 50 bp, Artificial; identical to SEQ ID NO: 456167
  Synthetic oligonucleotide

SEQ ID NO: 602581 - DNA, 60 bp, Artificial; identical to SEQ ID NO: 456170
  Synthetic oligonucleotide

SEQ ID NO: 602582 - DNA, 55 bp, Artificial; identical to SEQ ID NO: 14045
  Synthetic oligonucleotide

SEQ ID NO: 602583 - DNA, 57 bp, Artificial; identical to SEQ ID NO: 456172
  Synthetic oligonucleotide

SEQ ID NO: 602584 - DNA, 59 bp, Artificial; identical to SEQ ID NO: 456174
  Synthetic oligonucleotide

SEQ ID NO: 602585 - DNA, 60 bp, Artificial; identical to SEQ ID NO: 456175
  Synthetic oligonucleotide

SEQ ID NO: 602586 - DNA, 55 bp, Artificial; identical to SEQ ID NO: 456176
  Synthetic oligonucleotide

SEQ ID NO: 602587 - DNA, 60 bp, Artificial; identical to SEQ ID NO: 456177
  Synthetic oligonucleotide

SEQ ID NO: 602588 - DNA, 60 bp, Artificial; identical to SEQ ID NO: 456179
  Synthetic oligonucleotide

SEQ ID NO: 602589 - DNA, 60 bp, Artificial; identical to SEQ ID NO: 456181
  Synthetic oligonucleotide

SEQ ID NO: 602590 - DNA, 58 bp, Artificial; identical to SEQ ID NO: 456183
  Synthetic oligonucleotide

SEQ ID NO: 602591 - DNA, 60 bp, Artificial; identical to SEQ ID NO: 456187
  Synthetic oligonucleotide

SEQ ID NO: 602592 - DNA, 55 bp, Artificial; identical to SEQ ID NO: 456191
  Synthetic oligonucleotide

SEQ ID NO: 602593 - DNA, 60 bp, Artificial; identical to SEQ ID NO: 456194
  Synthetic oligonucleotide

SEQ ID NO: 602594 - DNA, 59 bp, Artificial; identical to SEQ ID NO: 20434
  Synthetic oligonucleotide

SEQ ID NO: 602595 - DNA, 58 bp, Artificial; identical to SEQ ID NO: 456196
  Synthetic oligonucleotide

SEQ ID NO: 602596 - DNA, 55 bp, Artificial; identical to SEQ ID NO: 456197
  Synthetic oligonucleotide

SEQ ID NO: 602597 - DNA, 60 bp, Artificial; identical to SEQ ID NO: 456198
  Synthetic oligonucleotide

SEQ ID NO: 602598 - DNA, 60 bp, Artificial; identical to SEQ ID NO: 456202
  Synthetic oligonucleotide

SEQ ID NO: 602599 - DNA, 55 bp, Artificial; identical to SEQ ID NO: 456203
  Synthetic oligonucleotide

SEQ ID NO: 602600 - DNA, 59 bp, Artificial; identical to SEQ ID NO: 19186
  Synthetic oligonucleotide

SEQ ID NO: 602601 - DNA, 57 bp, Artificial; identical to SEQ ID NO: 18655
  Synthetic oligonucleotide

SEQ ID NO: 602602 - DNA, 60 bp, Artificial; identical to SEQ ID NO: 12663
  Synthetic oligonucleotide

SEQ ID NO: 602603 - DNA, 58 bp, Artificial; identical to SEQ ID NO: 456208
  Synthetic oligonucleotide

SEQ ID NO: 602604 - DNA, 58 bp, Artificial; identical to SEQ ID NO: 456211
  Synthetic oligonucleotide

SEQ ID NO: 602605 - DNA, 57 bp, Artificial; identical to SEQ ID NO: 19624
  Synthetic oligonucleotide

SEQ ID NO: 602606 - DNA, 60 bp, Artificial; identical to SEQ ID NO: 456213
  Synthetic oligonucleotide

SEQ ID NO: 602607 - DNA, 60 bp, Artificial; identical to SEQ ID NO: 456217
  Synthetic oligonucleotide

SEQ ID NO: 602608 - DNA, 55 bp, Artificial; identical to SEQ ID NO: 456218
  Synthetic oligonucleotide

SEQ ID NO: 602609 - DNA, 60 bp, Artificial; identical to SEQ ID NO: 456219
  Synthetic oligonucleotide

SEQ ID NO: 602610 - DNA, 60 bp, Artificial; identical to SEQ ID NO: 456220
  Synthetic oligonucleotide

SEQ ID NO: 602611 - DNA, 60 bp, Artificial; identical to SEQ ID NO: 456221
  Synthetic oligonucleotide

SEQ ID NO: 602612 - DNA, 54 bp, Artificial; identical to SEQ ID NO: 456223
  Synthetic oligonucleotide

SEQ ID NO: 602613 - DNA, 57 bp, Artificial; identical to SEQ ID NO: 456226
  Synthetic oligonucleotide

SEQ ID NO: 602614 - DNA, 52 bp, Artificial; identical to SEQ ID NO: 456228
  Synthetic oligonucleotide

SEQ ID NO: 602615 - DNA, 56 bp, Artificial; identical to SEQ ID NO: 456234
  Synthetic oligonucleotide

SEQ ID NO: 602616 - DNA, 60 bp, Artificial; identical to SEQ ID NO: 456236
  Synthetic oligonucleotide

SEQ ID NO: 602617 - DNA, 57 bp, Artificial; identical to SEQ ID NO: 456237
  Synthetic oligonucleotide

SEQ ID NO: 602618 - DNA, 60 bp, Artificial; identical to SEQ ID NO: 456238
  Synthetic oligonucleotide

SEQ ID NO: 602619 - DNA, 50 bp, Artificial; identical to SEQ ID NO: 456239
  Synthetic oligonucleotide

SEQ ID NO: 602620 - DNA, 60 bp, Artificial; identical to SEQ ID NO: 456240
  Synthetic oligonucleotide

SEQ ID NO: 602621 - DNA, 52 bp, Artificial; identical to SEQ ID NO: 456243
  Synthetic oligonucleotide

SEQ ID NO: 602622 - DNA, 60 bp, Artificial; identical to SEQ ID NO: 456245
  Synthetic oligonucleotide

SEQ ID NO: 602623 - DNA, 57 bp, Artificial; identical to SEQ ID NO: 17978
  Synthetic oligonucleotide

SEQ ID NO: 602624 - DNA, 60 bp, Artificial; identical to SEQ ID NO: 456246
  Synthetic oligonucleotide

SEQ ID NO: 602625 - DNA, 55 bp, Artificial; identical to SEQ ID NO: 456247
  Synthetic oligonucleotide

SEQ ID NO: 602626 - DNA, 60 bp, Artificial; identical to SEQ ID NO: 456252
  Synthetic oligonucleotide

SEQ ID NO: 602627 - DNA, 56 bp, Artificial; identical to SEQ ID NO: 456253
  Synthetic oligonucleotide

SEQ ID NO: 602628 - DNA, 55 bp, Artificial; identical to SEQ ID NO: 456254
  Synthetic oligonucleotide

SEQ ID NO: 602629 - DNA, 60 bp, Artificial; identical to SEQ ID NO: 456267
  Synthetic oligonucleotide

SEQ ID NO: 602630 - DNA, 55 bp, Artificial; identical to SEQ ID NO: 456269
  Synthetic oligonucleotide

SEQ ID NO: 602631 - DNA, 58 bp, Artificial; identical to SEQ ID NO: 456272
  Synthetic oligonucleotide

SEQ ID NO: 602632 - DNA, 60 bp, Artificial; identical to SEQ ID NO: 456274
  Synthetic oligonucleotide

SEQ ID NO: 602633 - DNA, 55 bp, Artificial; identical to SEQ ID NO: 456275
  Synthetic oligonucleotide

SEQ ID NO: 602634 - DNA, 60 bp, Artificial; identical to SEQ ID NO: 456277
  Synthetic oligonucleotide

SEQ ID NO: 602635 - DNA, 54 bp, Artificial; identical to SEQ ID NO: 456279
  Synthetic oligonucleotide

SEQ ID NO: 602636 - DNA, 55 bp, Artificial; identical to SEQ ID NO: 456281
  Synthetic oligonucleotide

SEQ ID NO: 602637 - DNA, 60 bp, Artificial; identical to SEQ ID NO: 456283
  Synthetic oligonucleotide

SEQ ID NO: 602638 - DNA, 59 bp, Artificial; identical to SEQ ID NO: 456287
  Synthetic oligonucleotide

SEQ ID NO: 602639 - DNA, 60 bp, Artificial; identical to SEQ ID NO: 456288
  Synthetic oligonucleotide

SEQ ID NO: 602640 - DNA, 60 bp, Artificial; identical to SEQ ID NO: 456289
  Synthetic oligonucleotide

SEQ ID NO: 602641 - DNA, 58 bp, Artificial; identical to SEQ ID NO: 456290
  Synthetic oligonucleotide

SEQ ID NO: 602642 - DNA, 57 bp, Artificial; identical to SEQ ID NO: 456295
  Synthetic oligonucleotide

SEQ ID NO: 602643 - DNA, 60 bp, Artificial; identical to SEQ ID NO: 456297
  Synthetic oligonucleotide

SEQ ID NO: 602644 - DNA, 60 bp, Artificial; identical to SEQ ID NO: 456298
  Synthetic oligonucleotide

SEQ ID NO: 602645 - DNA, 57 bp, Artificial; identical to SEQ ID NO: 456299
  Synthetic oligonucleotide

SEQ ID NO: 602646 - DNA, 60 bp, Artificial; identical to SEQ ID NO: 456300
  Synthetic oligonucleotide

SEQ ID NO: 602647 - DNA, 57 bp, Artificial; identical to SEQ ID NO: 456305
  Synthetic oligonucleotide

SEQ ID NO: 602648 - DNA, 51 bp, Artificial; identical to SEQ ID NO: 456308
  Synthetic oligonucleotide

SEQ ID NO: 602649 - DNA, 59 bp, Artificial; identical to SEQ ID NO: 456311
  Synthetic oligonucleotide

SEQ ID NO: 602650 - DNA, 56 bp, Artificial; identical to SEQ ID NO: 456312
  Synthetic oligonucleotide

SEQ ID NO: 602651 - DNA, 60 bp, Artificial; identical to SEQ ID NO: 456314
  Synthetic oligonucleotide

SEQ ID NO: 602652 - DNA, 60 bp, Artificial; identical to SEQ ID NO: 456315
  Synthetic oligonucleotide

SEQ ID NO: 602653 - DNA, 60 bp, Artificial; identical to SEQ ID NO: 456316
  Synthetic oligonucleotide

SEQ ID NO: 602654 - DNA, 56 bp, Artificial; identical to SEQ ID NO: 456320
  Synthetic oligonucleotide

SEQ ID NO: 602655 - DNA, 55 bp, Artificial; identical to SEQ ID NO: 456321
  Synthetic oligonucleotide

SEQ ID NO: 602656 - DNA, 58 bp, Artificial; identical to SEQ ID NO: 456323
  Synthetic oligonucleotide

SEQ ID NO: 602657 - DNA, 57 bp, Artificial; identical to SEQ ID NO: 456324
  Synthetic oligonucleotide

SEQ ID NO: 602658 - DNA, 60 bp, Artificial; identical to SEQ ID NO: 456327
  Synthetic oligonucleotide

SEQ ID NO: 602659 - DNA, 60 bp, Artificial; identical to SEQ ID NO: 456328
  Synthetic oligonucleotide

SEQ ID NO: 602660 - DNA, 58 bp, Artificial; identical to SEQ ID NO: 456330
  Synthetic oligonucleotide

SEQ ID NO: 602661 - DNA, 60 bp, Artificial; identical to SEQ ID NO: 456335
  Synthetic oligonucleotide

SEQ ID NO: 602662 - DNA, 56 bp, Artificial; identical to SEQ ID NO: 456336
  Synthetic oligonucleotide

SEQ ID NO: 602663 - DNA, 60 bp, Artificial; identical to SEQ ID NO: 456338
  Synthetic oligonucleotide

SEQ ID NO: 602664 - DNA, 50 bp, Artificial; identical to SEQ ID NO: 456339
  Synthetic oligonucleotide

SEQ ID NO: 602665 - DNA, 56 bp, Artificial; identical to SEQ ID NO: 16269
  Synthetic oligonucleotide

SEQ ID NO: 602666 - DNA, 60 bp, Artificial; identical to SEQ ID NO: 456340
  Synthetic oligonucleotide

SEQ ID NO: 602667 - DNA, 59 bp, Artificial; identical to SEQ ID NO: 456341
  Synthetic oligonucleotide

SEQ ID NO: 602668 - DNA, 51 bp, Artificial; identical to SEQ ID NO: 456343
  Synthetic oligonucleotide

SEQ ID NO: 602669 - DNA, 52 bp, Artificial; identical to SEQ ID NO: 456344
  Synthetic oligonucleotide

SEQ ID NO: 602670 - DNA, 55 bp, Artificial; identical to SEQ ID NO: 456347
  Synthetic oligonucleotide

SEQ ID NO: 602671 - DNA, 55 bp, Artificial; identical to SEQ ID NO: 456348
  Synthetic oligonucleotide

SEQ ID NO: 602672 - DNA, 60 bp, Artificial; identical to SEQ ID NO: 456349
  Synthetic oligonucleotide

SEQ ID NO: 602673 - DNA, 60 bp, Artificial; identical to SEQ ID NO: 456354
  Synthetic oligonucleotide

SEQ ID NO: 602674 - DNA, 52 bp, Artificial; identical to SEQ ID NO: 456355
  Synthetic oligonucleotide

SEQ ID NO: 602675 - DNA, 60 bp, Artificial; identical to SEQ ID NO: 456359
  Synthetic oligonucleotide

SEQ ID NO: 602676 - DNA, 51 bp, Artificial; identical to SEQ ID NO: 11485
  Synthetic oligonucleotide

SEQ ID NO: 602677 - DNA, 60 bp, Artificial; identical to SEQ ID NO: 456364
  Synthetic oligonucleotide

SEQ ID NO: 602678 - DNA, 60 bp, Artificial; identical to SEQ ID NO: 456365
  Synthetic oligonucleotide

SEQ ID NO: 602679 - DNA, 60 bp, Artificial; identical to SEQ ID NO: 456367
  Synthetic oligonucleotide

SEQ ID NO: 602680 - DNA, 55 bp, Artificial; identical to SEQ ID NO: 6677
  Synthetic oligonucleotide

SEQ ID NO: 602681 - DNA, 55 bp, Artificial; identical to SEQ ID NO: 456372
  Synthetic oligonucleotide

SEQ ID NO: 602682 - DNA, 51 bp, Artificial; identical to SEQ ID NO: 456373
  Synthetic oligonucleotide

SEQ ID NO: 602683 - DNA, 58 bp, Artificial; identical to SEQ ID NO: 456374
  Synthetic oligonucleotide

SEQ ID NO: 602684 - DNA, 55 bp, Artificial; identical to SEQ ID NO: 456376
  Synthetic oligonucleotide

SEQ ID NO: 602685 - DNA, 56 bp, Artificial; identical to SEQ ID NO: 456379
  Synthetic oligonucleotide

SEQ ID NO: 602686 - DNA, 55 bp, Artificial; identical to SEQ ID NO: 456384
  Synthetic oligonucleotide

SEQ ID NO: 602687 - DNA, 57 bp, Artificial; identical to SEQ ID NO: 18268
  Synthetic oligonucleotide

SEQ ID NO: 602688 - DNA, 54 bp, Artificial; identical to SEQ ID NO: 456385
  Synthetic oligonucleotide

SEQ ID NO: 602689 - DNA, 51 bp, Artificial; identical to SEQ ID NO: 456390
  Synthetic oligonucleotide

SEQ ID NO: 602690 - DNA, 54 bp, Artificial; identical to SEQ ID NO: 456391
  Synthetic oligonucleotide

SEQ ID NO: 602691 - DNA, 53 bp, Artificial; identical to SEQ ID NO: 456395
  Synthetic oligonucleotide

SEQ ID NO: 602692 - DNA, 60 bp, Artificial; identical to SEQ ID NO: 456396
  Synthetic oligonucleotide

SEQ ID NO: 602693 - DNA, 60 bp, Artificial; identical to SEQ ID NO: 456398
  Synthetic oligonucleotide

SEQ ID NO: 602694 - DNA, 60 bp, Artificial; identical to SEQ ID NO: 456400
  Synthetic oligonucleotide

SEQ ID NO: 602695 - DNA, 60 bp, Artificial; identical to SEQ ID NO: 456401
  Synthetic oligonucleotide

SEQ ID NO: 602696 - DNA, 60 bp, Artificial; identical to SEQ ID NO: 456404
  Synthetic oligonucleotide

SEQ ID NO: 602697 - DNA, 55 bp, Artificial; identical to SEQ ID NO: 456406
  Synthetic oligonucleotide

SEQ ID NO: 602698 - DNA, 60 bp, Artificial; identical to SEQ ID NO: 456408
  Synthetic oligonucleotide

SEQ ID NO: 602699 - DNA, 56 bp, Artificial; identical to SEQ ID NO: 456409
  Synthetic oligonucleotide

SEQ ID NO: 602700 - DNA, 60 bp, Artificial; identical to SEQ ID NO: 456414
  Synthetic oligonucleotide

SEQ ID NO: 602701 - DNA, 57 bp, Artificial; identical to SEQ ID NO: 456415
  Synthetic oligonucleotide

SEQ ID NO: 602702 - DNA, 59 bp, Artificial; identical to SEQ ID NO: 456416
  Synthetic oligonucleotide

SEQ ID NO: 602703 - DNA, 59 bp, Artificial; identical to SEQ ID NO: 456419
  Synthetic oligonucleotide

SEQ ID NO: 602704 - DNA, 60 bp, Artificial; identical to SEQ ID NO: 456420
  Synthetic oligonucleotide

SEQ ID NO: 602705 - DNA, 56 bp, Artificial; identical to SEQ ID NO: 456422
  Synthetic oligonucleotide

SEQ ID NO: 602706 - DNA, 60 bp, Artificial; identical to SEQ ID NO: 456426
  Synthetic oligonucleotide

SEQ ID NO: 602707 - DNA, 57 bp, Artificial; identical to SEQ ID NO: 456427
  Synthetic oligonucleotide

SEQ ID NO: 602708 - DNA, 55 bp, Artificial; identical to SEQ ID NO: 456429
  Synthetic oligonucleotide

SEQ ID NO: 602709 - DNA, 60 bp, Artificial; identical to SEQ ID NO: 456431
  Synthetic oligonucleotide

SEQ ID NO: 602710 - DNA, 60 bp, Artificial; identical to SEQ ID NO: 456434
  Synthetic oligonucleotide

SEQ ID NO: 602711 - DNA, 57 bp, Artificial; identical to SEQ ID NO: 13523
  Synthetic oligonucleotide

SEQ ID NO: 602712 - DNA, 56 bp, Artificial; identical to SEQ ID NO: 456436
  Synthetic oligonucleotide

SEQ ID NO: 602713 - DNA, 55 bp, Artificial; identical to SEQ ID NO: 456438
  Synthetic oligonucleotide

SEQ ID NO: 602714 - DNA, 53 bp, Artificial; identical to SEQ ID NO: 456445
  Synthetic oligonucleotide

SEQ ID NO: 602715 - DNA, 60 bp, Artificial; identical to SEQ ID NO: 456449
  Synthetic oligonucleotide

SEQ ID NO: 602716 - DNA, 55 bp, Artificial; identical to SEQ ID NO: 456451
  Synthetic oligonucleotide

SEQ ID NO: 602717 - DNA, 60 bp, Artificial; identical to SEQ ID NO: 456452
  Synthetic oligonucleotide

SEQ ID NO: 602718 - DNA, 55 bp, Artificial; identical to SEQ ID NO: 456454
  Synthetic oligonucleotide

SEQ ID NO: 602719 - DNA, 60 bp, Artificial; identical to SEQ ID NO: 456455
  Synthetic oligonucleotide

SEQ ID NO: 602720 - DNA, 60 bp, Artificial; identical to SEQ ID NO: 456458
  Synthetic oligonucleotide

SEQ ID NO: 602721 - DNA, 50 bp, Artificial; identical to SEQ ID NO: 456459
  Synthetic oligonucleotide

SEQ ID NO: 602722 - DNA, 59 bp, Artificial; identical to SEQ ID NO: 456463
  Synthetic oligonucleotide

SEQ ID NO: 602723 - DNA, 60 bp, Artificial; identical to SEQ ID NO: 456467
  Synthetic oligonucleotide

SEQ ID NO: 602724 - DNA, 59 bp, Artificial; identical to SEQ ID NO: 456470
  Synthetic oligonucleotide

SEQ ID NO: 602725 - DNA, 59 bp, Artificial; identical to SEQ ID NO: 456472
  Synthetic oligonucleotide

SEQ ID NO: 602726 - DNA, 60 bp, Artificial; identical to SEQ ID NO: 456475
  Synthetic oligonucleotide

SEQ ID NO: 602727 - DNA, 60 bp, Artificial; identical to SEQ ID NO: 456481
  Synthetic oligonucleotide

SEQ ID NO: 602728 - DNA, 55 bp, Artificial; identical to SEQ ID NO: 456485
  Synthetic oligonucleotide

SEQ ID NO: 602729 - DNA, 52 bp, Artificial; identical to SEQ ID NO: 456490
  Synthetic oligonucleotide

SEQ ID NO: 602730 - DNA, 55 bp, Artificial; identical to SEQ ID NO: 456491
  Synthetic oligonucleotide

SEQ ID NO: 602731 - DNA, 60 bp, Artificial; identical to SEQ ID NO: 456492
  Synthetic oligonucleotide

SEQ ID NO: 602732 - DNA, 53 bp, Artificial; identical to SEQ ID NO: 456493
  Synthetic oligonucleotide

SEQ ID NO: 602733 - DNA, 60 bp, Artificial; identical to SEQ ID NO: 456494
  Synthetic oligonucleotide

SEQ ID NO: 602734 - DNA, 60 bp, Artificial; identical to SEQ ID NO: 456495
  Synthetic oligonucleotide

SEQ ID NO: 602735 - DNA, 60 bp, Artificial; identical to SEQ ID NO: 456496
  Synthetic oligonucleotide

SEQ ID NO: 602736 - DNA, 60 bp, Artificial; identical to SEQ ID NO: 456497
  Synthetic oligonucleotide

SEQ ID NO: 602737 - DNA, 59 bp, Artificial; identical to SEQ ID NO: 456498
  Synthetic oligonucleotide

SEQ ID NO: 602738 - DNA, 57 bp, Artificial; identical to SEQ ID NO: 456500
  Synthetic oligonucleotide

SEQ ID NO: 602739 - DNA, 60 bp, Artificial; identical to SEQ ID NO: 456506
  Synthetic oligonucleotide

SEQ ID NO: 602740 - DNA, 56 bp, Artificial; identical to SEQ ID NO: 456509
  Synthetic oligonucleotide

SEQ ID NO: 602741 - DNA, 60 bp, Artificial; identical to SEQ ID NO: 456511
  Synthetic oligonucleotide

SEQ ID NO: 602742 - DNA, 60 bp, Artificial; identical to SEQ ID NO: 456513
  Synthetic oligonucleotide

SEQ ID NO: 602743 - DNA, 59 bp, Artificial; identical to SEQ ID NO: 456514
  Synthetic oligonucleotide

SEQ ID NO: 602744 - DNA, 59 bp, Artificial; identical to SEQ ID NO: 456516
  Synthetic oligonucleotide

SEQ ID NO: 602745 - DNA, 59 bp, Artificial; identical to SEQ ID NO: 456517
  Synthetic oligonucleotide

SEQ ID NO: 602746 - DNA, 54 bp, Artificial; identical to SEQ ID NO: 456522
  Synthetic oligonucleotide

SEQ ID NO: 602747 - DNA, 52 bp, Artificial; identical to SEQ ID NO: 456526
  Synthetic oligonucleotide

SEQ ID NO: 602748 - DNA, 51 bp, Artificial; identical to SEQ ID NO: 456527
  Synthetic oligonucleotide

SEQ ID NO: 602749 - DNA, 60 bp, Artificial; identical to SEQ ID NO: 10908
  Synthetic oligonucleotide

SEQ ID NO: 602750 - DNA, 57 bp, Artificial; identical to SEQ ID NO: 14343
  Synthetic oligonucleotide

SEQ ID NO: 602751 - DNA, 56 bp, Artificial; identical to SEQ ID NO: 456532
  Synthetic oligonucleotide

SEQ ID NO: 602752 - DNA, 55 bp, Artificial; identical to SEQ ID NO: 14714
  Synthetic oligonucleotide

SEQ ID NO: 602753 - DNA, 60 bp, Artificial; identical to SEQ ID NO: 456539
  Synthetic oligonucleotide

SEQ ID NO: 602754 - DNA, 60 bp, Artificial; identical to SEQ ID NO: 456543
  Synthetic oligonucleotide

SEQ ID NO: 602755 - DNA, 60 bp, Artificial; identical to SEQ ID NO: 456546
  Synthetic oligonucleotide

SEQ ID NO: 602756 - DNA, 54 bp, Artificial; identical to SEQ ID NO: 456548
  Synthetic oligonucleotide

SEQ ID NO: 602757 - DNA, 60 bp, Artificial; identical to SEQ ID NO: 456549
  Synthetic oligonucleotide

SEQ ID NO: 602758 - DNA, 60 bp, Artificial; identical to SEQ ID NO: 456550
  Synthetic oligonucleotide

SEQ ID NO: 602759 - DNA, 60 bp, Artificial; identical to SEQ ID NO: 456551
  Synthetic oligonucleotide

SEQ ID NO: 602760 - DNA, 54 bp, Artificial; identical to SEQ ID NO: 456552
  Synthetic oligonucleotide

SEQ ID NO: 602761 - DNA, 60 bp, Artificial; identical to SEQ ID NO: 456562
  Synthetic oligonucleotide

SEQ ID NO: 602762 - DNA, 60 bp, Artificial; identical to SEQ ID NO: 456564
  Synthetic oligonucleotide

SEQ ID NO: 602763 - DNA, 60 bp, Artificial; identical to SEQ ID NO: 456566
  Synthetic oligonucleotide

SEQ ID NO: 602764 - DNA, 60 bp, Artificial; identical to SEQ ID NO: 456567
  Synthetic oligonucleotide

SEQ ID NO: 602765 - DNA, 59 bp, Artificial; identical to SEQ ID NO: 456569
  Synthetic oligonucleotide

SEQ ID NO: 602766 - DNA, 58 bp, Artificial; identical to SEQ ID NO: 456570
  Synthetic oligonucleotide

SEQ ID NO: 602767 - DNA, 58 bp, Artificial; identical to SEQ ID NO: 456571
  Synthetic oligonucleotide

SEQ ID NO: 602768 - DNA, 52 bp, Artificial; identical to SEQ ID NO: 456572
  Synthetic oligonucleotide

SEQ ID NO: 602769 - DNA, 53 bp, Artificial; identical to SEQ ID NO: 456575
  Synthetic oligonucleotide

SEQ ID NO: 602770 - DNA, 60 bp, Artificial; identical to SEQ ID NO: 456577
  Synthetic oligonucleotide

SEQ ID NO: 602771 - DNA, 55 bp, Artificial; identical to SEQ ID NO: 456578
  Synthetic oligonucleotide

SEQ ID NO: 602772 - DNA, 55 bp, Artificial; identical to SEQ ID NO: 456582
  Synthetic oligonucleotide

SEQ ID NO: 602773 - DNA, 50 bp, Artificial; identical to SEQ ID NO: 456587
  Synthetic oligonucleotide

SEQ ID NO: 602774 - DNA, 60 bp, Artificial; identical to SEQ ID NO: 456589
  Synthetic oligonucleotide

SEQ ID NO: 602775 - DNA, 60 bp, Artificial; identical to SEQ ID NO: 456590
  Synthetic oligonucleotide

SEQ ID NO: 602776 - DNA, 56 bp, Artificial; identical to SEQ ID NO: 456591
  Synthetic oligonucleotide

SEQ ID NO: 602777 - DNA, 55 bp, Artificial; identical to SEQ ID NO: 456592
  Synthetic oligonucleotide

SEQ ID NO: 602778 - DNA, 58 bp, Artificial; identical to SEQ ID NO: 456602
  Synthetic oligonucleotide

SEQ ID NO: 602779 - DNA, 60 bp, Artificial; identical to SEQ ID NO: 15681
  Synthetic oligonucleotide

SEQ ID NO: 602780 - DNA, 57 bp, Artificial; identical to SEQ ID NO: 456604
  Synthetic oligonucleotide

SEQ ID NO: 602781 - DNA, 50 bp, Artificial; identical to SEQ ID NO: 456605
  Synthetic oligonucleotide

SEQ ID NO: 602782 - DNA, 60 bp, Artificial; identical to SEQ ID NO: 456606
  Synthetic oligonucleotide

SEQ ID NO: 602783 - DNA, 60 bp, Artificial; identical to SEQ ID NO: 456608
  Synthetic oligonucleotide

SEQ ID NO: 602784 - DNA, 59 bp, Artificial; identical to SEQ ID NO: 456609
  Synthetic oligonucleotide

SEQ ID NO: 602785 - DNA, 59 bp, Artificial; identical to SEQ ID NO: 456610
  Synthetic oligonucleotide

SEQ ID NO: 602786 - DNA, 57 bp, Artificial; identical to SEQ ID NO: 456614
  Synthetic oligonucleotide

SEQ ID NO: 602787 - DNA, 55 bp, Artificial; identical to SEQ ID NO: 456616
  Synthetic oligonucleotide

SEQ ID NO: 602788 - DNA, 55 bp, Artificial; identical to SEQ ID NO: 456621
  Synthetic oligonucleotide

SEQ ID NO: 602789 - DNA, 57 bp, Artificial; identical to SEQ ID NO: 456623
  Synthetic oligonucleotide

SEQ ID NO: 602790 - DNA, 55 bp, Artificial; identical to SEQ ID NO: 456627
  Synthetic oligonucleotide

SEQ ID NO: 602791 - DNA, 60 bp, Artificial; identical to SEQ ID NO: 456629
  Synthetic oligonucleotide

SEQ ID NO: 602792 - DNA, 55 bp, Artificial; identical to SEQ ID NO: 456631
  Synthetic oligonucleotide

SEQ ID NO: 602793 - DNA, 56 bp, Artificial; identical to SEQ ID NO: 456635
  Synthetic oligonucleotide

SEQ ID NO: 602794 - DNA, 51 bp, Artificial; identical to SEQ ID NO: 456637
  Synthetic oligonucleotide

SEQ ID NO: 602795 - DNA, 60 bp, Artificial; identical to SEQ ID NO: 456640
  Synthetic oligonucleotide

SEQ ID NO: 602796 - DNA, 60 bp, Artificial; identical to SEQ ID NO: 456641
  Synthetic oligonucleotide

SEQ ID NO: 602797 - DNA, 57 bp, Artificial; identical to SEQ ID NO: 456643
  Synthetic oligonucleotide

SEQ ID NO: 602798 - DNA, 60 bp, Artificial; identical to SEQ ID NO: 456646
  Synthetic oligonucleotide

SEQ ID NO: 602799 - DNA, 60 bp, Artificial; identical to SEQ ID NO: 456647
  Synthetic oligonucleotide

SEQ ID NO: 602800 - DNA, 60 bp, Artificial; identical to SEQ ID NO: 456649
  Synthetic oligonucleotide

SEQ ID NO: 602801 - DNA, 56 bp, Artificial; identical to SEQ ID NO: 456650
  Synthetic oligonucleotide

SEQ ID NO: 602802 - DNA, 54 bp, Artificial; identical to SEQ ID NO: 7807
  Synthetic oligonucleotide

SEQ ID NO: 602803 - DNA, 51 bp, Artificial; identical to SEQ ID NO: 456652
  Synthetic oligonucleotide

SEQ ID NO: 602804 - DNA, 56 bp, Artificial; identical to SEQ ID NO: 456653
  Synthetic oligonucleotide

SEQ ID NO: 602805 - DNA, 58 bp, Artificial; identical to SEQ ID NO: 456654
  Synthetic oligonucleotide

SEQ ID NO: 602806 - DNA, 60 bp, Artificial; identical to SEQ ID NO: 456656
  Synthetic oligonucleotide

SEQ ID NO: 602807 - DNA, 60 bp, Artificial; identical to SEQ ID NO: 456659
  Synthetic oligonucleotide

SEQ ID NO: 602808 - DNA, 60 bp, Artificial; identical to SEQ ID NO: 456661
  Synthetic oligonucleotide

SEQ ID NO: 602809 - DNA, 60 bp, Artificial; identical to SEQ ID NO: 456662
  Synthetic oligonucleotide

SEQ ID NO: 602810 - DNA, 50 bp, Artificial; identical to SEQ ID NO: 456667
  Synthetic oligonucleotide

SEQ ID NO: 602811 - DNA, 50 bp, Artificial; identical to SEQ ID NO: 456669
  Synthetic oligonucleotide

SEQ ID NO: 602812 - DNA, 53 bp, Artificial; identical to SEQ ID NO: 456670
  Synthetic oligonucleotide

SEQ ID NO: 602813 - DNA, 51 bp, Artificial; identical to SEQ ID NO: 456671
  Synthetic oligonucleotide

SEQ ID NO: 602814 - DNA, 60 bp, Artificial; identical to SEQ ID NO: 456672
  Synthetic oligonucleotide

SEQ ID NO: 602815 - DNA, 57 bp, Artificial; identical to SEQ ID NO: 456673
  Synthetic oligonucleotide

SEQ ID NO: 602816 - DNA, 60 bp, Artificial; identical to SEQ ID NO: 456676
  Synthetic oligonucleotide

SEQ ID NO: 602817 - DNA, 59 bp, Artificial; identical to SEQ ID NO: 456678
  Synthetic oligonucleotide

SEQ ID NO: 602818 - DNA, 54 bp, Artificial; identical to SEQ ID NO: 456680
  Synthetic oligonucleotide

SEQ ID NO: 602819 - DNA, 50 bp, Artificial; identical to SEQ ID NO: 456681
  Synthetic oligonucleotide

SEQ ID NO: 602820 - DNA, 57 bp, Artificial; identical to SEQ ID NO: 456683
  Synthetic oligonucleotide

SEQ ID NO: 602821 - DNA, 54 bp, Artificial; identical to SEQ ID NO: 456687
  Synthetic oligonucleotide

SEQ ID NO: 602822 - DNA, 53 bp, Artificial; identical to SEQ ID NO: 456701
  Synthetic oligonucleotide

SEQ ID NO: 602823 - DNA, 60 bp, Artificial; identical to SEQ ID NO: 456702
  Synthetic oligonucleotide

SEQ ID NO: 602824 - DNA, 60 bp, Artificial; identical to SEQ ID NO: 456703
  Synthetic oligonucleotide

SEQ ID NO: 602825 - DNA, 60 bp, Artificial; identical to SEQ ID NO: 456704
  Synthetic oligonucleotide

SEQ ID NO: 602826 - DNA, 60 bp, Artificial; identical to SEQ ID NO: 456705
  Synthetic oligonucleotide

SEQ ID NO: 602827 - DNA, 56 bp, Artificial; identical to SEQ ID NO: 456708
  Synthetic oligonucleotide

SEQ ID NO: 602828 - DNA, 53 bp, Artificial; identical to SEQ ID NO: 6914
  Synthetic oligonucleotide

SEQ ID NO: 602829 - DNA, 58 bp, Artificial; identical to SEQ ID NO: 19866
  Synthetic oligonucleotide

SEQ ID NO: 602830 - DNA, 51 bp, Artificial; identical to SEQ ID NO: 456710
  Synthetic oligonucleotide

SEQ ID NO: 602831 - DNA, 60 bp, Artificial; identical to SEQ ID NO: 456711
  Synthetic oligonucleotide

SEQ ID NO: 602832 - DNA, 60 bp, Artificial; identical to SEQ ID NO: 456713
  Synthetic oligonucleotide

SEQ ID NO: 602833 - DNA, 58 bp, Artificial; identical to SEQ ID NO: 456728
  Synthetic oligonucleotide

SEQ ID NO: 602834 - DNA, 59 bp, Artificial; identical to SEQ ID NO: 456730
  Synthetic oligonucleotide

SEQ ID NO: 602835 - DNA, 60 bp, Artificial; identical to SEQ ID NO: 456731
  Synthetic oligonucleotide

SEQ ID NO: 602836 - DNA, 56 bp, Artificial; identical to SEQ ID NO: 456733
  Synthetic oligonucleotide

SEQ ID NO: 602837 - DNA, 55 bp, Artificial; identical to SEQ ID NO: 456734
  Synthetic oligonucleotide

SEQ ID NO: 602838 - DNA, 58 bp, Artificial; identical to SEQ ID NO: 456735
  Synthetic oligonucleotide

SEQ ID NO: 602839 - DNA, 55 bp, Artificial; identical to SEQ ID NO: 456736
  Synthetic oligonucleotide

SEQ ID NO: 602840 - DNA, 55 bp, Artificial; identical to SEQ ID NO: 456737
  Synthetic oligonucleotide

SEQ ID NO: 602841 - DNA, 60 bp, Artificial; identical to SEQ ID NO: 456738
  Synthetic oligonucleotide

SEQ ID NO: 602842 - DNA, 55 bp, Artificial; identical to SEQ ID NO: 456742
  Synthetic oligonucleotide

SEQ ID NO: 602843 - DNA, 60 bp, Artificial; identical to SEQ ID NO: 456743
  Synthetic oligonucleotide

SEQ ID NO: 602844 - DNA, 60 bp, Artificial; identical to SEQ ID NO: 456744
  Synthetic oligonucleotide

SEQ ID NO: 602845 - DNA, 60 bp, Artificial; identical to SEQ ID NO: 456745
  Synthetic oligonucleotide

SEQ ID NO: 602846 - DNA, 55 bp, Artificial; identical to SEQ ID NO: 456746
  Synthetic oligonucleotide

SEQ ID NO: 602847 - DNA, 56 bp, Artificial; identical to SEQ ID NO: 456747
  Synthetic oligonucleotide

SEQ ID NO: 602848 - DNA, 51 bp, Artificial; identical to SEQ ID NO: 456748
  Synthetic oligonucleotide

SEQ ID NO: 602849 - DNA, 60 bp, Artificial; identical to SEQ ID NO: 456749
  Synthetic oligonucleotide

SEQ ID NO: 602850 - DNA, 60 bp, Artificial; identical to SEQ ID NO: 456750
  Synthetic oligonucleotide

SEQ ID NO: 602851 - DNA, 60 bp, Artificial; identical to SEQ ID NO: 456752
  Synthetic oligonucleotide

SEQ ID NO: 602852 - DNA, 50 bp, Artificial; identical to SEQ ID NO: 456755
  Synthetic oligonucleotide

SEQ ID NO: 602853 - DNA, 50 bp, Artificial; identical to SEQ ID NO: 456756
  Synthetic oligonucleotide

SEQ ID NO: 602854 - DNA, 60 bp, Artificial; identical to SEQ ID NO: 456758
  Synthetic oligonucleotide

SEQ ID NO: 602855 - DNA, 53 bp, Artificial; identical to SEQ ID NO: 456759
  Synthetic oligonucleotide

SEQ ID NO: 602856 - DNA, 60 bp, Artificial; identical to SEQ ID NO: 456760
  Synthetic oligonucleotide

SEQ ID NO: 602857 - DNA, 60 bp, Artificial; identical to SEQ ID NO: 456762
  Synthetic oligonucleotide

SEQ ID NO: 602858 - DNA, 60 bp, Artificial; identical to SEQ ID NO: 456765
  Synthetic oligonucleotide

SEQ ID NO: 602859 - DNA, 56 bp, Artificial; identical to SEQ ID NO: 456766
  Synthetic oligonucleotide

SEQ ID NO: 602860 - DNA, 60 bp, Artificial; identical to SEQ ID NO: 35936
  Synthetic oligonucleotide

SEQ ID NO: 602861 - DNA, 53 bp, Artificial; identical to SEQ ID NO: 456773
  Synthetic oligonucleotide

SEQ ID NO: 602862 - DNA, 51 bp, Artificial; identical to SEQ ID NO: 456774
  Synthetic oligonucleotide

SEQ ID NO: 602863 - DNA, 60 bp, Artificial; identical to SEQ ID NO: 456775
  Synthetic oligonucleotide

SEQ ID NO: 602864 - DNA, 60 bp, Artificial; identical to SEQ ID NO: 456779
  Synthetic oligonucleotide

SEQ ID NO: 602865 - DNA, 60 bp, Artificial; identical to SEQ ID NO: 456780
  Synthetic oligonucleotide

SEQ ID NO: 602866 - DNA, 58 bp, Artificial; identical to SEQ ID NO: 456783
  Synthetic oligonucleotide

SEQ ID NO: 602867 - DNA, 55 bp, Artificial; identical to SEQ ID NO: 456785
  Synthetic oligonucleotide

SEQ ID NO: 602868 - DNA, 55 bp, Artificial; identical to SEQ ID NO: 456789
  Synthetic oligonucleotide

SEQ ID NO: 602869 - DNA, 56 bp, Artificial; identical to SEQ ID NO: 456794
  Synthetic oligonucleotide

SEQ ID NO: 602870 - DNA, 60 bp, Artificial; identical to SEQ ID NO: 456796
  Synthetic oligonucleotide

SEQ ID NO: 602871 - DNA, 59 bp, Artificial; identical to SEQ ID NO: 456798
  Synthetic oligonucleotide

SEQ ID NO: 602872 - DNA, 60 bp, Artificial; identical to SEQ ID NO: 456801
  Synthetic oligonucleotide

SEQ ID NO: 602873 - DNA, 60 bp, Artificial; identical to SEQ ID NO: 456802
  Synthetic oligonucleotide

SEQ ID NO: 602874 - DNA, 60 bp, Artificial; identical to SEQ ID NO: 456804
  Synthetic oligonucleotide

SEQ ID NO: 602875 - DNA, 57 bp, Artificial; identical to SEQ ID NO: 456807
  Synthetic oligonucleotide

SEQ ID NO: 602876 - DNA, 54 bp, Artificial; identical to SEQ ID NO: 456810
  Synthetic oligonucleotide

SEQ ID NO: 602877 - DNA, 60 bp, Artificial; identical to SEQ ID NO: 456812
  Synthetic oligonucleotide

SEQ ID NO: 602878 - DNA, 60 bp, Artificial; identical to SEQ ID NO: 456817
  Synthetic oligonucleotide

SEQ ID NO: 602879 - DNA, 60 bp, Artificial; identical to SEQ ID NO: 11932
  Synthetic oligonucleotide

SEQ ID NO: 602880 - DNA, 60 bp, Artificial; identical to SEQ ID NO: 456819
  Synthetic oligonucleotide

SEQ ID NO: 602881 - DNA, 51 bp, Artificial; identical to SEQ ID NO: 456820
  Synthetic oligonucleotide

SEQ ID NO: 602882 - DNA, 55 bp, Artificial; identical to SEQ ID NO: 456823
  Synthetic oligonucleotide

SEQ ID NO: 602883 - DNA, 60 bp, Artificial; identical to SEQ ID NO: 456824
  Synthetic oligonucleotide

SEQ ID NO: 602884 - DNA, 55 bp, Artificial; identical to SEQ ID NO: 456828
  Synthetic oligonucleotide

SEQ ID NO: 602885 - DNA, 58 bp, Artificial; identical to SEQ ID NO: 456832
  Synthetic oligonucleotide

SEQ ID NO: 602886 - DNA, 55 bp, Artificial; identical to SEQ ID NO: 456833
  Synthetic oligonucleotide

SEQ ID NO: 602887 - DNA, 50 bp, Artificial; identical to SEQ ID NO: 456835
  Synthetic oligonucleotide

SEQ ID NO: 602888 - DNA, 60 bp, Artificial; identical to SEQ ID NO: 456837
  Synthetic oligonucleotide

SEQ ID NO: 602889 - DNA, 60 bp, Artificial; identical to SEQ ID NO: 456838
  Synthetic oligonucleotide

SEQ ID NO: 602890 - DNA, 58 bp, Artificial; identical to SEQ ID NO: 17394
  Synthetic oligonucleotide

SEQ ID NO: 602891 - DNA, 60 bp, Artificial; identical to SEQ ID NO: 456839
  Synthetic oligonucleotide

SEQ ID NO: 602892 - DNA, 57 bp, Artificial; identical to SEQ ID NO: 18320
  Synthetic oligonucleotide

SEQ ID NO: 602893 - DNA, 53 bp, Artificial; identical to SEQ ID NO: 456844
  Synthetic oligonucleotide

SEQ ID NO: 602894 - DNA, 58 bp, Artificial; identical to SEQ ID NO: 456845
  Synthetic oligonucleotide

SEQ ID NO: 602895 - DNA, 60 bp, Artificial; identical to SEQ ID NO: 456847
  Synthetic oligonucleotide

SEQ ID NO: 602896 - DNA, 53 bp, Artificial; identical to SEQ ID NO: 456848
  Synthetic oligonucleotide

SEQ ID NO: 602897 - DNA, 52 bp, Artificial; identical to SEQ ID NO: 456850
  Synthetic oligonucleotide

SEQ ID NO: 602898 - DNA, 57 bp, Artificial; identical to SEQ ID NO: 456852
  Synthetic oligonucleotide

SEQ ID NO: 602899 - DNA, 58 bp, Artificial; identical to SEQ ID NO: 456854
  Synthetic oligonucleotide

SEQ ID NO: 602900 - DNA, 60 bp, Artificial; identical to SEQ ID NO: 456855
  Synthetic oligonucleotide

SEQ ID NO: 602901 - DNA, 60 bp, Artificial; identical to SEQ ID NO: 456857
  Synthetic oligonucleotide

SEQ ID NO: 602902 - DNA, 57 bp, Artificial; identical to SEQ ID NO: 456858
  Synthetic oligonucleotide

SEQ ID NO: 602903 - DNA, 60 bp, Artificial; identical to SEQ ID NO: 456860
  Synthetic oligonucleotide

SEQ ID NO: 602904 - DNA, 60 bp, Artificial; identical to SEQ ID NO: 456862
  Synthetic oligonucleotide

SEQ ID NO: 602905 - DNA, 60 bp, Artificial; identical to SEQ ID NO: 456863
  Synthetic oligonucleotide

SEQ ID NO: 602906 - DNA, 55 bp, Artificial; identical to SEQ ID NO: 456865
  Synthetic oligonucleotide

SEQ ID NO: 602907 - DNA, 53 bp, Artificial; identical to SEQ ID NO: 456866
  Synthetic oligonucleotide

SEQ ID NO: 602908 - DNA, 60 bp, Artificial; identical to SEQ ID NO: 8607
  Synthetic oligonucleotide

SEQ ID NO: 602909 - DNA, 55 bp, Artificial; identical to SEQ ID NO: 456869
  Synthetic oligonucleotide

SEQ ID NO: 602910 - DNA, 60 bp, Artificial; identical to SEQ ID NO: 456873
  Synthetic oligonucleotide

SEQ ID NO: 602911 - DNA, 60 bp, Artificial; identical to SEQ ID NO: 456876
  Synthetic oligonucleotide

SEQ ID NO: 602912 - DNA, 60 bp, Artificial; identical to SEQ ID NO: 456878
  Synthetic oligonucleotide

SEQ ID NO: 602913 - DNA, 55 bp, Artificial; identical to SEQ ID NO: 456881
  Synthetic oligonucleotide

SEQ ID NO: 602914 - DNA, 58 bp, Artificial; identical to SEQ ID NO: 456885
  Synthetic oligonucleotide

SEQ ID NO: 602915 - DNA, 55 bp, Artificial; identical to SEQ ID NO: 456886
  Synthetic oligonucleotide

SEQ ID NO: 602916 - DNA, 57 bp, Artificial; identical to SEQ ID NO: 456889
  Synthetic oligonucleotide

SEQ ID NO: 602917 - DNA, 50 bp, Artificial; identical to SEQ ID NO: 456898
  Synthetic oligonucleotide

SEQ ID NO: 602918 - DNA, 54 bp, Artificial; identical to SEQ ID NO: 456900
  Synthetic oligonucleotide

SEQ ID NO: 602919 - DNA, 55 bp, Artificial; identical to SEQ ID NO: 456906
  Synthetic oligonucleotide

SEQ ID NO: 602920 - DNA, 50 bp, Artificial; identical to SEQ ID NO: 456910
  Synthetic oligonucleotide

SEQ ID NO: 602921 - DNA, 59 bp, Artificial; identical to SEQ ID NO: 456912
  Synthetic oligonucleotide

SEQ ID NO: 602922 - DNA, 59 bp, Artificial; identical to SEQ ID NO: 456922
  Synthetic oligonucleotide

SEQ ID NO: 602923 - DNA, 60 bp, Artificial; identical to SEQ ID NO: 456923
  Synthetic oligonucleotide

SEQ ID NO: 602924 - DNA, 60 bp, Artificial; identical to SEQ ID NO: 456924
  Synthetic oligonucleotide

SEQ ID NO: 602925 - DNA, 54 bp, Artificial; identical to SEQ ID NO: 456925
  Synthetic oligonucleotide

SEQ ID NO: 602926 - DNA, 56 bp, Artificial; identical to SEQ ID NO: 456926
  Synthetic oligonucleotide

SEQ ID NO: 602927 - DNA, 55 bp, Artificial; identical to SEQ ID NO: 456928
  Synthetic oligonucleotide

SEQ ID NO: 602928 - DNA, 55 bp, Artificial; identical to SEQ ID NO: 456937
  Synthetic oligonucleotide

SEQ ID NO: 602929 - DNA, 58 bp, Artificial; identical to SEQ ID NO: 456941
  Synthetic oligonucleotide

SEQ ID NO: 602930 - DNA, 55 bp, Artificial; identical to SEQ ID NO: 456943
  Synthetic oligonucleotide

SEQ ID NO: 602931 - DNA, 60 bp, Artificial; identical to SEQ ID NO: 456944
  Synthetic oligonucleotide

SEQ ID NO: 602932 - DNA, 59 bp, Artificial; identical to SEQ ID NO: 456945
  Synthetic oligonucleotide

SEQ ID NO: 602933 - DNA, 55 bp, Artificial; identical to SEQ ID NO: 456947
  Synthetic oligonucleotide

SEQ ID NO: 602934 - DNA, 60 bp, Artificial; identical to SEQ ID NO: 456948
  Synthetic oligonucleotide

SEQ ID NO: 602935 - DNA, 60 bp, Artificial; identical to SEQ ID NO: 456949
  Synthetic oligonucleotide

SEQ ID NO: 602936 - DNA, 51 bp, Artificial; identical to SEQ ID NO: 456950
  Synthetic oligonucleotide

SEQ ID NO: 602937 - DNA, 55 bp, Artificial; identical to SEQ ID NO: 456951
  Synthetic oligonucleotide

SEQ ID NO: 602938 - DNA, 60 bp, Artificial; identical to SEQ ID NO: 456956
  Synthetic oligonucleotide

SEQ ID NO: 602939 - DNA, 60 bp, Artificial; identical to SEQ ID NO: 456959
  Synthetic oligonucleotide

SEQ ID NO: 602940 - DNA, 60 bp, Artificial; identical to SEQ ID NO: 456964
  Synthetic oligonucleotide

SEQ ID NO: 602941 - DNA, 60 bp, Artificial; identical to SEQ ID NO: 456968
  Synthetic oligonucleotide

SEQ ID NO: 602942 - DNA, 54 bp, Artificial; identical to SEQ ID NO: 456970
  Synthetic oligonucleotide

SEQ ID NO: 602943 - DNA, 57 bp, Artificial; identical to SEQ ID NO: 456973
  Synthetic oligonucleotide

SEQ ID NO: 602944 - DNA, 60 bp, Artificial; identical to SEQ ID NO: 456976
  Synthetic oligonucleotide

SEQ ID NO: 602945 - DNA, 52 bp, Artificial; identical to SEQ ID NO: 18247
  Synthetic oligonucleotide

SEQ ID NO: 602946 - DNA, 60 bp, Artificial; identical to SEQ ID NO: 9366
  Synthetic oligonucleotide

SEQ ID NO: 602947 - DNA, 60 bp, Artificial; identical to SEQ ID NO: 456981
  Synthetic oligonucleotide

SEQ ID NO: 602948 - DNA, 57 bp, Artificial; identical to SEQ ID NO: 456982
  Synthetic oligonucleotide

SEQ ID NO: 602949 - DNA, 58 bp, Artificial; identical to SEQ ID NO: 456984
  Synthetic oligonucleotide

SEQ ID NO: 602950 - DNA, 58 bp, Artificial; identical to SEQ ID NO: 456985
  Synthetic oligonucleotide

SEQ ID NO: 602951 - DNA, 60 bp, Artificial; identical to SEQ ID NO: 456994
  Synthetic oligonucleotide

SEQ ID NO: 602952 - DNA, 57 bp, Artificial; identical to SEQ ID NO: 457001
  Synthetic oligonucleotide

SEQ ID NO: 602953 - DNA, 59 bp, Artificial; identical to SEQ ID NO: 457004
  Synthetic oligonucleotide

SEQ ID NO: 602954 - DNA, 55 bp, Artificial; identical to SEQ ID NO: 457006
  Synthetic oligonucleotide

SEQ ID NO: 602955 - DNA, 51 bp, Artificial; identical to SEQ ID NO: 457007
  Synthetic oligonucleotide

SEQ ID NO: 602956 - DNA, 60 bp, Artificial; identical to SEQ ID NO: 13557
  Synthetic oligonucleotide

SEQ ID NO: 602957 - DNA, 60 bp, Artificial; identical to SEQ ID NO: 457008
  Synthetic oligonucleotide

SEQ ID NO: 602958 - DNA, 60 bp, Artificial; identical to SEQ ID NO: 15855
  Synthetic oligonucleotide

SEQ ID NO: 602959 - DNA, 57 bp, Artificial; identical to SEQ ID NO: 457010
  Synthetic oligonucleotide

SEQ ID NO: 602960 - DNA, 57 bp, Artificial; identical to SEQ ID NO: 457011
  Synthetic oligonucleotide

SEQ ID NO: 602961 - DNA, 60 bp, Artificial; identical to SEQ ID NO: 9523
  Synthetic oligonucleotide

SEQ ID NO: 602962 - DNA, 59 bp, Artificial; identical to SEQ ID NO: 19177
  Synthetic oligonucleotide

SEQ ID NO: 602963 - DNA, 57 bp, Artificial; identical to SEQ ID NO: 457017
  Synthetic oligonucleotide

SEQ ID NO: 602964 - DNA, 56 bp, Artificial; identical to SEQ ID NO: 457019
  Synthetic oligonucleotide

SEQ ID NO: 602965 - DNA, 55 bp, Artificial; identical to SEQ ID NO: 457020
  Synthetic oligonucleotide

SEQ ID NO: 602966 - DNA, 55 bp, Artificial; identical to SEQ ID NO: 457021
  Synthetic oligonucleotide

SEQ ID NO: 602967 - DNA, 59 bp, Artificial; identical to SEQ ID NO: 457023
  Synthetic oligonucleotide

SEQ ID NO: 602968 - DNA, 60 bp, Artificial; identical to SEQ ID NO: 457029
  Synthetic oligonucleotide

SEQ ID NO: 602969 - DNA, 60 bp, Artificial; identical to SEQ ID NO: 457030
  Synthetic oligonucleotide

SEQ ID NO: 602970 - DNA, 52 bp, Artificial; identical to SEQ ID NO: 457031
  Synthetic oligonucleotide

SEQ ID NO: 602971 - DNA, 58 bp, Artificial; identical to SEQ ID NO: 457032
  Synthetic oligonucleotide

SEQ ID NO: 602972 - DNA, 58 bp, Artificial; identical to SEQ ID NO: 10871
  Synthetic oligonucleotide

SEQ ID NO: 602973 - DNA, 53 bp, Artificial; identical to SEQ ID NO: 457034
  Synthetic oligonucleotide

SEQ ID NO: 602974 - DNA, 55 bp, Artificial; identical to SEQ ID NO: 457036
  Synthetic oligonucleotide

SEQ ID NO: 602975 - DNA, 60 bp, Artificial; identical to SEQ ID NO: 457039
  Synthetic oligonucleotide

SEQ ID NO: 602976 - DNA, 53 bp, Artificial; identical to SEQ ID NO: 457040
  Synthetic oligonucleotide

SEQ ID NO: 602977 - DNA, 60 bp, Artificial; identical to SEQ ID NO: 457045
  Synthetic oligonucleotide

SEQ ID NO: 602978 - DNA, 56 bp, Artificial; identical to SEQ ID NO: 457047
  Synthetic oligonucleotide

SEQ ID NO: 602979 - DNA, 54 bp, Artificial; identical to SEQ ID NO: 457062
  Synthetic oligonucleotide

SEQ ID NO: 602980 - DNA, 55 bp, Artificial; identical to SEQ ID NO: 457065
  Synthetic oligonucleotide

SEQ ID NO: 602981 - DNA, 52 bp, Artificial; identical to SEQ ID NO: 457066
  Synthetic oligonucleotide

SEQ ID NO: 602982 - DNA, 60 bp, Artificial; identical to SEQ ID NO: 457069
  Synthetic oligonucleotide

SEQ ID NO: 602983 - DNA, 58 bp, Artificial; identical to SEQ ID NO: 457071
  Synthetic oligonucleotide

SEQ ID NO: 602984 - DNA, 60 bp, Artificial; identical to SEQ ID NO: 12157
  Synthetic oligonucleotide

SEQ ID NO: 602985 - DNA, 55 bp, Artificial; identical to SEQ ID NO: 457072
  Synthetic oligonucleotide

SEQ ID NO: 602986 - DNA, 58 bp, Artificial; identical to SEQ ID NO: 457073
  Synthetic oligonucleotide

SEQ ID NO: 602987 - DNA, 60 bp, Artificial; identical to SEQ ID NO: 457080
  Synthetic oligonucleotide

SEQ ID NO: 602988 - DNA, 51 bp, Artificial; identical to SEQ ID NO: 457081
  Synthetic oligonucleotide

SEQ ID NO: 602989 - DNA, 55 bp, Artificial; identical to SEQ ID NO: 457083
  Synthetic oligonucleotide

SEQ ID NO: 602990 - DNA, 60 bp, Artificial; identical to SEQ ID NO: 457085
  Synthetic oligonucleotide

SEQ ID NO: 602991 - DNA, 59 bp, Artificial; identical to SEQ ID NO: 457092
  Synthetic oligonucleotide

SEQ ID NO: 602992 - DNA, 59 bp, Artificial; identical to SEQ ID NO: 457093
  Synthetic oligonucleotide

SEQ ID NO: 602993 - DNA, 55 bp, Artificial; identical to SEQ ID NO: 457098
  Synthetic oligonucleotide

SEQ ID NO: 602994 - DNA, 60 bp, Artificial; identical to SEQ ID NO: 457100
  Synthetic oligonucleotide

SEQ ID NO: 602995 - DNA, 60 bp, Artificial; identical to SEQ ID NO: 457103
  Synthetic oligonucleotide

SEQ ID NO: 602996 - DNA, 52 bp, Artificial; identical to SEQ ID NO: 19235
  Synthetic oligonucleotide

SEQ ID NO: 602997 - DNA, 60 bp, Artificial; identical to SEQ ID NO: 457107
  Synthetic oligonucleotide

SEQ ID NO: 602998 - DNA, 56 bp, Artificial; identical to SEQ ID NO: 457112
  Synthetic oligonucleotide

SEQ ID NO: 602999 - DNA, 59 bp, Artificial; identical to SEQ ID NO: 457113
  Synthetic oligonucleotide

SEQ ID NO: 603000 - DNA, 51 bp, Artificial; identical to SEQ ID NO: 457118
  Synthetic oligonucleotide

SEQ ID NO: 603001 - DNA, 52 bp, Artificial; identical to SEQ ID NO: 457120
  Synthetic oligonucleotide

SEQ ID NO: 603002 - DNA, 60 bp, Artificial; identical to SEQ ID NO: 457121
  Synthetic oligonucleotide

SEQ ID NO: 603003 - DNA, 60 bp, Artificial; identical to SEQ ID NO: 457122
  Synthetic oligonucleotide

SEQ ID NO: 603004 - DNA, 51 bp, Artificial; identical to SEQ ID NO: 457125
  Synthetic oligonucleotide

SEQ ID NO: 603005 - DNA, 60 bp, Artificial; identical to SEQ ID NO: 457129
  Synthetic oligonucleotide

SEQ ID NO: 603006 - DNA, 60 bp, Artificial; identical to SEQ ID NO: 457131
  Synthetic oligonucleotide

SEQ ID NO: 603007 - DNA, 59 bp, Artificial; identical to SEQ ID NO: 457132
  Synthetic oligonucleotide

SEQ ID NO: 603008 - DNA, 51 bp, Artificial; identical to SEQ ID NO: 457133
  Synthetic oligonucleotide

SEQ ID NO: 603009 - DNA, 60 bp, Artificial; identical to SEQ ID NO: 457134
  Synthetic oligonucleotide

SEQ ID NO: 603010 - DNA, 60 bp, Artificial; identical to SEQ ID NO: 457136
  Synthetic oligonucleotide

SEQ ID NO: 603011 - DNA, 58 bp, Artificial; identical to SEQ ID NO: 457143
  Synthetic oligonucleotide

SEQ ID NO: 603012 - DNA, 53 bp, Artificial; identical to SEQ ID NO: 457144
  Synthetic oligonucleotide

SEQ ID NO: 603013 - DNA, 57 bp, Artificial; identical to SEQ ID NO: 457147
  Synthetic oligonucleotide

SEQ ID NO: 603014 - DNA, 51 bp, Artificial; identical to SEQ ID NO: 457153
  Synthetic oligonucleotide

SEQ ID NO: 603015 - DNA, 60 bp, Artificial; identical to SEQ ID NO: 457155
  Synthetic oligonucleotide

SEQ ID NO: 603016 - DNA, 55 bp, Artificial; identical to SEQ ID NO: 457157
  Synthetic oligonucleotide

SEQ ID NO: 603017 - DNA, 55 bp, Artificial; identical to SEQ ID NO: 457158
  Synthetic oligonucleotide

SEQ ID NO: 603018 - DNA, 60 bp, Artificial; identical to SEQ ID NO: 457161
  Synthetic oligonucleotide

SEQ ID NO: 603019 - DNA, 55 bp, Artificial; identical to SEQ ID NO: 457162
  Synthetic oligonucleotide

SEQ ID NO: 603020 - DNA, 60 bp, Artificial; identical to SEQ ID NO: 457163
  Synthetic oligonucleotide

SEQ ID NO: 603021 - DNA, 60 bp, Artificial; identical to SEQ ID NO: 457164
  Synthetic oligonucleotide

SEQ ID NO: 603022 - DNA, 60 bp, Artificial; identical to SEQ ID NO: 457165
  Synthetic oligonucleotide

SEQ ID NO: 603023 - DNA, 60 bp, Artificial; identical to SEQ ID NO: 457168
  Synthetic oligonucleotide

SEQ ID NO: 603024 - DNA, 60 bp, Artificial; identical to SEQ ID NO: 457169
  Synthetic oligonucleotide

SEQ ID NO: 603025 - DNA, 60 bp, Artificial; identical to SEQ ID NO: 457171
  Synthetic oligonucleotide

SEQ ID NO: 603026 - DNA, 55 bp, Artificial; identical to SEQ ID NO: 457172
  Synthetic oligonucleotide

SEQ ID NO: 603027 - DNA, 55 bp, Artificial; identical to SEQ ID NO: 457174
  Synthetic oligonucleotide

SEQ ID NO: 603028 - DNA, 59 bp, Artificial; identical to SEQ ID NO: 457175
  Synthetic oligonucleotide

SEQ ID NO: 603029 - DNA, 60 bp, Artificial; identical to SEQ ID NO: 457176
  Synthetic oligonucleotide

SEQ ID NO: 603030 - DNA, 59 bp, Artificial; identical to SEQ ID NO: 457177
  Synthetic oligonucleotide

SEQ ID NO: 603031 - DNA, 60 bp, Artificial; identical to SEQ ID NO: 457181
  Synthetic oligonucleotide

SEQ ID NO: 603032 - DNA, 55 bp, Artificial; identical to SEQ ID NO: 457182
  Synthetic oligonucleotide

SEQ ID NO: 603033 - DNA, 60 bp, Artificial; identical to SEQ ID NO: 457184
  Synthetic oligonucleotide

SEQ ID NO: 603034 - DNA, 60 bp, Artificial; identical to SEQ ID NO: 457186
  Synthetic oligonucleotide

SEQ ID NO: 603035 - DNA, 57 bp, Artificial; identical to SEQ ID NO: 457192
  Synthetic oligonucleotide

SEQ ID NO: 603036 - DNA, 59 bp, Artificial; identical to SEQ ID NO: 457193
  Synthetic oligonucleotide

SEQ ID NO: 603037 - DNA, 60 bp, Artificial; identical to SEQ ID NO: 457197
  Synthetic oligonucleotide

SEQ ID NO: 603038 - DNA, 56 bp, Artificial; identical to SEQ ID NO: 457199
  Synthetic oligonucleotide

SEQ ID NO: 603039 - DNA, 60 bp, Artificial; identical to SEQ ID NO: 457202
  Synthetic oligonucleotide

SEQ ID NO: 603040 - DNA, 55 bp, Artificial; identical to SEQ ID NO: 457207
  Synthetic oligonucleotide

SEQ ID NO: 603041 - DNA, 51 bp, Artificial; identical to SEQ ID NO: 457208
  Synthetic oligonucleotide

SEQ ID NO: 603042 - DNA, 52 bp, Artificial; identical to SEQ ID NO: 457209
  Synthetic oligonucleotide

SEQ ID NO: 603043 - DNA, 59 bp, Artificial; identical to SEQ ID NO: 457211
  Synthetic oligonucleotide

SEQ ID NO: 603044 - DNA, 54 bp, Artificial; identical to SEQ ID NO: 457214
  Synthetic oligonucleotide

SEQ ID NO: 603045 - DNA, 60 bp, Artificial; identical to SEQ ID NO: 457218
  Synthetic oligonucleotide

SEQ ID NO: 603046 - DNA, 55 bp, Artificial; identical to SEQ ID NO: 457219
  Synthetic oligonucleotide

SEQ ID NO: 603047 - DNA, 58 bp, Artificial; identical to SEQ ID NO: 457220
  Synthetic oligonucleotide

SEQ ID NO: 603048 - DNA, 60 bp, Artificial; identical to SEQ ID NO: 457225
  Synthetic oligonucleotide

SEQ ID NO: 603049 - DNA, 53 bp, Artificial; identical to SEQ ID NO: 457226
  Synthetic oligonucleotide

SEQ ID NO: 603050 - DNA, 51 bp, Artificial; identical to SEQ ID NO: 457227
  Synthetic oligonucleotide

SEQ ID NO: 603051 - DNA, 60 bp, Artificial; identical to SEQ ID NO: 457228
  Synthetic oligonucleotide

SEQ ID NO: 603052 - DNA, 52 bp, Artificial; identical to SEQ ID NO: 457232
  Synthetic oligonucleotide

SEQ ID NO: 603053 - DNA, 60 bp, Artificial; identical to SEQ ID NO: 457233
  Synthetic oligonucleotide

SEQ ID NO: 603054 - DNA, 58 bp, Artificial; identical to SEQ ID NO: 457235
  Synthetic oligonucleotide

SEQ ID NO: 603055 - DNA, 58 bp, Artificial; identical to SEQ ID NO: 457240
  Synthetic oligonucleotide

SEQ ID NO: 603056 - DNA, 57 bp, Artificial; identical to SEQ ID NO: 457241
  Synthetic oligonucleotide

SEQ ID NO: 603057 - DNA, 60 bp, Artificial; identical to SEQ ID NO: 457243
  Synthetic oligonucleotide

SEQ ID NO: 603058 - DNA, 60 bp, Artificial; identical to SEQ ID NO: 457244
  Synthetic oligonucleotide

SEQ ID NO: 603059 - DNA, 60 bp, Artificial; identical to SEQ ID NO: 457245
  Synthetic oligonucleotide

SEQ ID NO: 603060 - DNA, 60 bp, Artificial; identical to SEQ ID NO: 457250
  Synthetic oligonucleotide

SEQ ID NO: 603061 - DNA, 60 bp, Artificial; identical to SEQ ID NO: 457252
  Synthetic oligonucleotide

SEQ ID NO: 603062 - DNA, 51 bp, Artificial; identical to SEQ ID NO: 457256
  Synthetic oligonucleotide

SEQ ID NO: 603063 - DNA, 50 bp, Artificial; identical to SEQ ID NO: 457258
  Synthetic oligonucleotide

SEQ ID NO: 603064 - DNA, 60 bp, Artificial; identical to SEQ ID NO: 457259
  Synthetic oligonucleotide

SEQ ID NO: 603065 - DNA, 60 bp, Artificial; identical to SEQ ID NO: 457261
  Synthetic oligonucleotide

SEQ ID NO: 603066 - DNA, 54 bp, Artificial; identical to SEQ ID NO: 457262
  Synthetic oligonucleotide

SEQ ID NO: 603067 - DNA, 57 bp, Artificial; identical to SEQ ID NO: 457266
  Synthetic oligonucleotide

SEQ ID NO: 603068 - DNA, 55 bp, Artificial; identical to SEQ ID NO: 457269
  Synthetic oligonucleotide

SEQ ID NO: 603069 - DNA, 60 bp, Artificial; identical to SEQ ID NO: 457272
  Synthetic oligonucleotide

SEQ ID NO: 603070 - DNA, 58 bp, Artificial; identical to SEQ ID NO: 457273
  Synthetic oligonucleotide

SEQ ID NO: 603071 - DNA, 60 bp, Artificial; identical to SEQ ID NO: 457276
  Synthetic oligonucleotide

SEQ ID NO: 603072 - DNA, 60 bp, Artificial; identical to SEQ ID NO: 457278
  Synthetic oligonucleotide

SEQ ID NO: 603073 - DNA, 59 bp, Artificial; identical to SEQ ID NO: 457279
  Synthetic oligonucleotide

SEQ ID NO: 603074 - DNA, 60 bp, Artificial; identical to SEQ ID NO: 457280
  Synthetic oligonucleotide

SEQ ID NO: 603075 - DNA, 60 bp, Artificial; identical to SEQ ID NO: 457281
  Synthetic oligonucleotide

SEQ ID NO: 603076 - DNA, 59 bp, Artificial; identical to SEQ ID NO: 457283
  Synthetic oligonucleotide

SEQ ID NO: 603077 - DNA, 58 bp, Artificial; identical to SEQ ID NO: 457284
  Synthetic oligonucleotide

SEQ ID NO: 603078 - DNA, 52 bp, Artificial; identical to SEQ ID NO: 457286
  Synthetic oligonucleotide

SEQ ID NO: 603079 - DNA, 60 bp, Artificial; identical to SEQ ID NO: 457287
  Synthetic oligonucleotide

SEQ ID NO: 603080 - DNA, 58 bp, Artificial; identical to SEQ ID NO: 457290
  Synthetic oligonucleotide

SEQ ID NO: 603081 - DNA, 60 bp, Artificial; identical to SEQ ID NO: 457293
  Synthetic oligonucleotide

SEQ ID NO: 603082 - DNA, 55 bp, Artificial; identical to SEQ ID NO: 457296
  Synthetic oligonucleotide

SEQ ID NO: 603083 - DNA, 60 bp, Artificial; identical to SEQ ID NO: 457298
  Synthetic oligonucleotide

SEQ ID NO: 603084 - DNA, 60 bp, Artificial; identical to SEQ ID NO: 457300
  Synthetic oligonucleotide

SEQ ID NO: 603085 - DNA, 59 bp, Artificial; identical to SEQ ID NO: 457301
  Synthetic oligonucleotide

SEQ ID NO: 603086 - DNA, 57 bp, Artificial; identical to SEQ ID NO: 457306
  Synthetic oligonucleotide

SEQ ID NO: 603087 - DNA, 58 bp, Artificial; identical to SEQ ID NO: 457310
  Synthetic oligonucleotide

SEQ ID NO: 603088 - DNA, 60 bp, Artificial; identical to SEQ ID NO: 457311
  Synthetic oligonucleotide

SEQ ID NO: 603089 - DNA, 58 bp, Artificial; identical to SEQ ID NO: 17301
  Synthetic oligonucleotide

SEQ ID NO: 603090 - DNA, 60 bp, Artificial; identical to SEQ ID NO: 457312
  Synthetic oligonucleotide

SEQ ID NO: 603091 - DNA, 51 bp, Artificial; identical to SEQ ID NO: 457313
  Synthetic oligonucleotide

SEQ ID NO: 603092 - DNA, 60 bp, Artificial; identical to SEQ ID NO: 457318
  Synthetic oligonucleotide

SEQ ID NO: 603093 - DNA, 55 bp, Artificial; identical to SEQ ID NO: 457319
  Synthetic oligonucleotide

SEQ ID NO: 603094 - DNA, 51 bp, Artificial; identical to SEQ ID NO: 457323
  Synthetic oligonucleotide

SEQ ID NO: 603095 - DNA, 59 bp, Artificial; identical to SEQ ID NO: 457324
  Synthetic oligonucleotide

SEQ ID NO: 603096 - DNA, 55 bp, Artificial; identical to SEQ ID NO: 457326
  Synthetic oligonucleotide

SEQ ID NO: 603097 - DNA, 58 bp, Artificial; identical to SEQ ID NO: 457327
  Synthetic oligonucleotide

SEQ ID NO: 603098 - DNA, 54 bp, Artificial; identical to SEQ ID NO: 457329
  Synthetic oligonucleotide

SEQ ID NO: 603099 - DNA, 60 bp, Artificial; identical to SEQ ID NO: 457332
  Synthetic oligonucleotide

SEQ ID NO: 603100 - DNA, 60 bp, Artificial; identical to SEQ ID NO: 457333
  Synthetic oligonucleotide

SEQ ID NO: 603101 - DNA, 60 bp, Artificial; identical to SEQ ID NO: 457334
  Synthetic oligonucleotide

SEQ ID NO: 603102 - DNA, 55 bp, Artificial; identical to SEQ ID NO: 457335
  Synthetic oligonucleotide

SEQ ID NO: 603103 - DNA, 58 bp, Artificial; identical to SEQ ID NO: 457339
  Synthetic oligonucleotide

SEQ ID NO: 603104 - DNA, 60 bp, Artificial; identical to SEQ ID NO: 457342
  Synthetic oligonucleotide

SEQ ID NO: 603105 - DNA, 60 bp, Artificial; identical to SEQ ID NO: 457344
  Synthetic oligonucleotide

SEQ ID NO: 603106 - DNA, 60 bp, Artificial; identical to SEQ ID NO: 457345
  Synthetic oligonucleotide

SEQ ID NO: 603107 - DNA, 52 bp, Artificial; identical to SEQ ID NO: 457348
  Synthetic oligonucleotide

SEQ ID NO: 603108 - DNA, 57 bp, Artificial; identical to SEQ ID NO: 457351
  Synthetic oligonucleotide

SEQ ID NO: 603109 - DNA, 60 bp, Artificial; identical to SEQ ID NO: 11373
  Synthetic oligonucleotide

SEQ ID NO: 603110 - DNA, 57 bp, Artificial; identical to SEQ ID NO: 457356
  Synthetic oligonucleotide

SEQ ID NO: 603111 - DNA, 55 bp, Artificial; identical to SEQ ID NO: 12945
  Synthetic oligonucleotide

SEQ ID NO: 603112 - DNA, 57 bp, Artificial; identical to SEQ ID NO: 457357
  Synthetic oligonucleotide

SEQ ID NO: 603113 - DNA, 50 bp, Artificial; identical to SEQ ID NO: 457358
  Synthetic oligonucleotide

SEQ ID NO: 603114 - DNA, 56 bp, Artificial; identical to SEQ ID NO: 457359
  Synthetic oligonucleotide

SEQ ID NO: 603115 - DNA, 55 bp, Artificial; identical to SEQ ID NO: 457360
  Synthetic oligonucleotide

SEQ ID NO: 603116 - DNA, 59 bp, Artificial; identical to SEQ ID NO: 457362
  Synthetic oligonucleotide

SEQ ID NO: 603117 - DNA, 53 bp, Artificial; identical to SEQ ID NO: 457363
  Synthetic oligonucleotide

SEQ ID NO: 603118 - DNA, 55 bp, Artificial; identical to SEQ ID NO: 457364
  Synthetic oligonucleotide

SEQ ID NO: 603119 - DNA, 51 bp, Artificial; identical to SEQ ID NO: 457366
  Synthetic oligonucleotide

SEQ ID NO: 603120 - DNA, 55 bp, Artificial; identical to SEQ ID NO: 457380
  Synthetic oligonucleotide

SEQ ID NO: 603121 - DNA, 60 bp, Artificial; identical to SEQ ID NO: 457382
  Synthetic oligonucleotide

SEQ ID NO: 603122 - DNA, 58 bp, Artificial; identical to SEQ ID NO: 457385
  Synthetic oligonucleotide

SEQ ID NO: 603123 - DNA, 55 bp, Artificial; identical to SEQ ID NO: 457388
  Synthetic oligonucleotide

SEQ ID NO: 603124 - DNA, 58 bp, Artificial; identical to SEQ ID NO: 457389
  Synthetic oligonucleotide

SEQ ID NO: 603125 - DNA, 53 bp, Artificial; identical to SEQ ID NO: 457390
  Synthetic oligonucleotide

SEQ ID NO: 603126 - DNA, 57 bp, Artificial; identical to SEQ ID NO: 457392
  Synthetic oligonucleotide

SEQ ID NO: 603127 - DNA, 55 bp, Artificial; identical to SEQ ID NO: 457395
  Synthetic oligonucleotide

SEQ ID NO: 603128 - DNA, 50 bp, Artificial; identical to SEQ ID NO: 457397
  Synthetic oligonucleotide

SEQ ID NO: 603129 - DNA, 60 bp, Artificial; identical to SEQ ID NO: 457400
  Synthetic oligonucleotide

SEQ ID NO: 603130 - DNA, 58 bp, Artificial; identical to SEQ ID NO: 457403
  Synthetic oligonucleotide

SEQ ID NO: 603131 - DNA, 55 bp, Artificial; identical to SEQ ID NO: 457404
  Synthetic oligonucleotide

SEQ ID NO: 603132 - DNA, 55 bp, Artificial; identical to SEQ ID NO: 457407
  Synthetic oligonucleotide

SEQ ID NO: 603133 - DNA, 60 bp, Artificial; identical to SEQ ID NO: 457411
  Synthetic oligonucleotide

SEQ ID NO: 603134 - DNA, 60 bp, Artificial; identical to SEQ ID NO: 457414
  Synthetic oligonucleotide

SEQ ID NO: 603135 - DNA, 60 bp, Artificial; identical to SEQ ID NO: 457415
  Synthetic oligonucleotide

SEQ ID NO: 603136 - DNA, 59 bp, Artificial; identical to SEQ ID NO: 457416
  Synthetic oligonucleotide

SEQ ID NO: 603137 - DNA, 60 bp, Artificial; identical to SEQ ID NO: 457417
  Synthetic oligonucleotide

SEQ ID NO: 603138 - DNA, 60 bp, Artificial; identical to SEQ ID NO: 457419
  Synthetic oligonucleotide

SEQ ID NO: 603139 - DNA, 60 bp, Artificial; identical to SEQ ID NO: 457421
  Synthetic oligonucleotide

SEQ ID NO: 603140 - DNA, 60 bp, Artificial; identical to SEQ ID NO: 457422
  Synthetic oligonucleotide

SEQ ID NO: 603141 - DNA, 59 bp, Artificial; identical to SEQ ID NO: 457423
  Synthetic oligonucleotide

SEQ ID NO: 603142 - DNA, 55 bp, Artificial; identical to SEQ ID NO: 457427
  Synthetic oligonucleotide

SEQ ID NO: 603143 - DNA, 60 bp, Artificial; identical to SEQ ID NO: 457428
  Synthetic oligonucleotide

SEQ ID NO: 603144 - DNA, 55 bp, Artificial; identical to SEQ ID NO: 457429
  Synthetic oligonucleotide

SEQ ID NO: 603145 - DNA, 60 bp, Artificial; identical to SEQ ID NO: 457430
  Synthetic oligonucleotide

SEQ ID NO: 603146 - DNA, 60 bp, Artificial; identical to SEQ ID NO: 457432
  Synthetic oligonucleotide

SEQ ID NO: 603147 - DNA, 60 bp, Artificial; identical to SEQ ID NO: 457433
  Synthetic oligonucleotide

SEQ ID NO: 603148 - DNA, 53 bp, Artificial; identical to SEQ ID NO: 457436
  Synthetic oligonucleotide

SEQ ID NO: 603149 - DNA, 60 bp, Artificial; identical to SEQ ID NO: 457439
  Synthetic oligonucleotide

SEQ ID NO: 603150 - DNA, 60 bp, Artificial; identical to SEQ ID NO: 457440
  Synthetic oligonucleotide

SEQ ID NO: 603151 - DNA, 60 bp, Artificial; identical to SEQ ID NO: 457446
  Synthetic oligonucleotide

SEQ ID NO: 603152 - DNA, 58 bp, Artificial; identical to SEQ ID NO: 457450
  Synthetic oligonucleotide

SEQ ID NO: 603153 - DNA, 55 bp, Artificial; identical to SEQ ID NO: 457454
  Synthetic oligonucleotide

SEQ ID NO: 603154 - DNA, 58 bp, Artificial; identical to SEQ ID NO: 457455
  Synthetic oligonucleotide

SEQ ID NO: 603155 - DNA, 55 bp, Artificial; identical to SEQ ID NO: 457457
  Synthetic oligonucleotide

SEQ ID NO: 603156 - DNA, 59 bp, Artificial; identical to SEQ ID NO: 457461
  Synthetic oligonucleotide

SEQ ID NO: 603157 - DNA, 58 bp, Artificial; identical to SEQ ID NO: 457463
  Synthetic oligonucleotide

SEQ ID NO: 603158 - DNA, 55 bp, Artificial; identical to SEQ ID NO: 457464
  Synthetic oligonucleotide

SEQ ID NO: 603159 - DNA, 56 bp, Artificial; identical to SEQ ID NO: 457467
  Synthetic oligonucleotide

SEQ ID NO: 603160 - DNA, 53 bp, Artificial; identical to SEQ ID NO: 457469
  Synthetic oligonucleotide

SEQ ID NO: 603161 - DNA, 60 bp, Artificial; identical to SEQ ID NO: 457474
  Synthetic oligonucleotide

SEQ ID NO: 603162 - DNA, 60 bp, Artificial; identical to SEQ ID NO: 457485
  Synthetic oligonucleotide

SEQ ID NO: 603163 - DNA, 52 bp, Artificial; identical to SEQ ID NO: 457487
  Synthetic oligonucleotide

SEQ ID NO: 603164 - DNA, 60 bp, Artificial; identical to SEQ ID NO: 457488
  Synthetic oligonucleotide

SEQ ID NO: 603165 - DNA, 55 bp, Artificial; identical to SEQ ID NO: 457489
  Synthetic oligonucleotide

SEQ ID NO: 603166 - DNA, 51 bp, Artificial; identical to SEQ ID NO: 457491
  Synthetic oligonucleotide

SEQ ID NO: 603167 - DNA, 55 bp, Artificial; identical to SEQ ID NO: 457492
  Synthetic oligonucleotide

SEQ ID NO: 603168 - DNA, 57 bp, Artificial; identical to SEQ ID NO: 457493
  Synthetic oligonucleotide

SEQ ID NO: 603169 - DNA, 55 bp, Artificial; identical to SEQ ID NO: 457494
  Synthetic oligonucleotide

SEQ ID NO: 603170 - DNA, 50 bp, Artificial; identical to SEQ ID NO: 457500
  Synthetic oligonucleotide

SEQ ID NO: 603171 - DNA, 60 bp, Artificial; identical to SEQ ID NO: 15185
  Synthetic oligonucleotide

SEQ ID NO: 603172 - DNA, 54 bp, Artificial; identical to SEQ ID NO: 457503
  Synthetic oligonucleotide

SEQ ID NO: 603173 - DNA, 55 bp, Artificial; identical to SEQ ID NO: 457504
  Synthetic oligonucleotide

SEQ ID NO: 603174 - DNA, 51 bp, Artificial; identical to SEQ ID NO: 457507
  Synthetic oligonucleotide

SEQ ID NO: 603175 - DNA, 59 bp, Artificial; identical to SEQ ID NO: 457509
  Synthetic oligonucleotide

SEQ ID NO: 603176 - DNA, 54 bp, Artificial; identical to SEQ ID NO: 457510
  Synthetic oligonucleotide

SEQ ID NO: 603177 - DNA, 52 bp, Artificial; identical to SEQ ID NO: 457511
  Synthetic oligonucleotide

SEQ ID NO: 603178 - DNA, 58 bp, Artificial; identical to SEQ ID NO: 7101
  Synthetic oligonucleotide

SEQ ID NO: 603179 - DNA, 60 bp, Artificial; identical to SEQ ID NO: 457513
  Synthetic oligonucleotide

SEQ ID NO: 603180 - DNA, 58 bp, Artificial; identical to SEQ ID NO: 457514
  Synthetic oligonucleotide

SEQ ID NO: 603181 - DNA, 55 bp, Artificial; identical to SEQ ID NO: 457517
  Synthetic oligonucleotide

SEQ ID NO: 603182 - DNA, 60 bp, Artificial; identical to SEQ ID NO: 457518
  Synthetic oligonucleotide

SEQ ID NO: 603183 - DNA, 55 bp, Artificial; identical to SEQ ID NO: 457520
  Synthetic oligonucleotide

SEQ ID NO: 603184 - DNA, 55 bp, Artificial; identical to SEQ ID NO: 457521
  Synthetic oligonucleotide

SEQ ID NO: 603185 - DNA, 55 bp, Artificial; identical to SEQ ID NO: 457522
  Synthetic oligonucleotide

SEQ ID NO: 603186 - DNA, 54 bp, Artificial; identical to SEQ ID NO: 457523
  Synthetic oligonucleotide

SEQ ID NO: 603187 - DNA, 60 bp, Artificial; identical to SEQ ID NO: 457524
  Synthetic oligonucleotide

SEQ ID NO: 603188 - DNA, 60 bp, Artificial; identical to SEQ ID NO: 457525
  Synthetic oligonucleotide

SEQ ID NO: 603189 - DNA, 60 bp, Artificial; identical to SEQ ID NO: 457527
  Synthetic oligonucleotide

SEQ ID NO: 603190 - DNA, 60 bp, Artificial; identical to SEQ ID NO: 457530
  Synthetic oligonucleotide

SEQ ID NO: 603191 - DNA, 58 bp, Artificial; identical to SEQ ID NO: 457532
  Synthetic oligonucleotide

SEQ ID NO: 603192 - DNA, 54 bp, Artificial; identical to SEQ ID NO: 457533
  Synthetic oligonucleotide

SEQ ID NO: 603193 - DNA, 59 bp, Artificial; identical to SEQ ID NO: 457539
  Synthetic oligonucleotide

SEQ ID NO: 603194 - DNA, 57 bp, Artificial; identical to SEQ ID NO: 457541
  Synthetic oligonucleotide

SEQ ID NO: 603195 - DNA, 55 bp, Artificial; identical to SEQ ID NO: 457542
  Synthetic oligonucleotide

SEQ ID NO: 603196 - DNA, 60 bp, Artificial; identical to SEQ ID NO: 457543
  Synthetic oligonucleotide

SEQ ID NO: 603197 - DNA, 55 bp, Artificial; identical to SEQ ID NO: 457544
  Synthetic oligonucleotide

SEQ ID NO: 603198 - DNA, 57 bp, Artificial; identical to SEQ ID NO: 457546
  Synthetic oligonucleotide

SEQ ID NO: 603199 - DNA, 58 bp, Artificial; identical to SEQ ID NO: 457547
  Synthetic oligonucleotide

SEQ ID NO: 603200 - DNA, 51 bp, Artificial; identical to SEQ ID NO: 457548
  Synthetic oligonucleotide

SEQ ID NO: 603201 - DNA, 60 bp, Artificial; identical to SEQ ID NO: 457549
  Synthetic oligonucleotide

SEQ ID NO: 603202 - DNA, 60 bp, Artificial; identical to SEQ ID NO: 457550
  Synthetic oligonucleotide

SEQ ID NO: 603203 - DNA, 60 bp, Artificial; identical to SEQ ID NO: 457554
  Synthetic oligonucleotide

SEQ ID NO: 603204 - DNA, 58 bp, Artificial; identical to SEQ ID NO: 457556
  Synthetic oligonucleotide

SEQ ID NO: 603205 - DNA, 60 bp, Artificial; identical to SEQ ID NO: 12399
  Synthetic oligonucleotide

SEQ ID NO: 603206 - DNA, 56 bp, Artificial; identical to SEQ ID NO: 457559
  Synthetic oligonucleotide

SEQ ID NO: 603207 - DNA, 59 bp, Artificial; identical to SEQ ID NO: 457560
  Synthetic oligonucleotide

SEQ ID NO: 603208 - DNA, 60 bp, Artificial; identical to SEQ ID NO: 457562
  Synthetic oligonucleotide

SEQ ID NO: 603209 - DNA, 60 bp, Artificial; identical to SEQ ID NO: 457565
  Synthetic oligonucleotide

SEQ ID NO: 603210 - DNA, 60 bp, Artificial; identical to SEQ ID NO: 457566
  Synthetic oligonucleotide

SEQ ID NO: 603211 - DNA, 60 bp, Artificial; identical to SEQ ID NO: 457567
  Synthetic oligonucleotide

SEQ ID NO: 603212 - DNA, 55 bp, Artificial; identical to SEQ ID NO: 457569
  Synthetic oligonucleotide

SEQ ID NO: 603213 - DNA, 55 bp, Artificial; identical to SEQ ID NO: 457570
  Synthetic oligonucleotide

SEQ ID NO: 603214 - DNA, 60 bp, Artificial; identical to SEQ ID NO: 457573
  Synthetic oligonucleotide

SEQ ID NO: 603215 - DNA, 59 bp, Artificial; identical to SEQ ID NO: 457575
  Synthetic oligonucleotide

SEQ ID NO: 603216 - DNA, 60 bp, Artificial; identical to SEQ ID NO: 457576
  Synthetic oligonucleotide

SEQ ID NO: 603217 - DNA, 60 bp, Artificial; identical to SEQ ID NO: 457577
  Synthetic oligonucleotide

SEQ ID NO: 603218 - DNA, 53 bp, Artificial; identical to SEQ ID NO: 457579
  Synthetic oligonucleotide

SEQ ID NO: 603219 - DNA, 60 bp, Artificial; identical to SEQ ID NO: 457581
  Synthetic oligonucleotide

SEQ ID NO: 603220 - DNA, 60 bp, Artificial; identical to SEQ ID NO: 457585
  Synthetic oligonucleotide

SEQ ID NO: 603221 - DNA, 53 bp, Artificial; identical to SEQ ID NO: 457586
  Synthetic oligonucleotide

SEQ ID NO: 603222 - DNA, 60 bp, Artificial; identical to SEQ ID NO: 457589
  Synthetic oligonucleotide

SEQ ID NO: 603223 - DNA, 51 bp, Artificial; identical to SEQ ID NO: 457590
  Synthetic oligonucleotide

SEQ ID NO: 603224 - DNA, 53 bp, Artificial; identical to SEQ ID NO: 457594
  Synthetic oligonucleotide

SEQ ID NO: 603225 - DNA, 54 bp, Artificial; identical to SEQ ID NO: 457596
  Synthetic oligonucleotide

SEQ ID NO: 603226 - DNA, 55 bp, Artificial; identical to SEQ ID NO: 457597
  Synthetic oligonucleotide

SEQ ID NO: 603227 - DNA, 59 bp, Artificial; identical to SEQ ID NO: 457598
  Synthetic oligonucleotide

SEQ ID NO: 603228 - DNA, 55 bp, Artificial; identical to SEQ ID NO: 457601
  Synthetic oligonucleotide

SEQ ID NO: 603229 - DNA, 58 bp, Artificial; identical to SEQ ID NO: 457604
  Synthetic oligonucleotide

SEQ ID NO: 603230 - DNA, 54 bp, Artificial; identical to SEQ ID NO: 457605
  Synthetic oligonucleotide

SEQ ID NO: 603231 - DNA, 55 bp, Artificial; identical to SEQ ID NO: 457606
  Synthetic oligonucleotide

SEQ ID NO: 603232 - DNA, 60 bp, Artificial; identical to SEQ ID NO: 457607
  Synthetic oligonucleotide

SEQ ID NO: 603233 - DNA, 60 bp, Artificial; identical to SEQ ID NO: 457609
  Synthetic oligonucleotide

SEQ ID NO: 603234 - DNA, 60 bp, Artificial; identical to SEQ ID NO: 457613
  Synthetic oligonucleotide

SEQ ID NO: 603235 - DNA, 60 bp, Artificial; identical to SEQ ID NO: 457614
  Synthetic oligonucleotide

SEQ ID NO: 603236 - DNA, 60 bp, Artificial; identical to SEQ ID NO: 457615
  Synthetic oligonucleotide

SEQ ID NO: 603237 - DNA, 60 bp, Artificial; identical to SEQ ID NO: 457622
  Synthetic oligonucleotide

SEQ ID NO: 603238 - DNA, 60 bp, Artificial; identical to SEQ ID NO: 457627
  Synthetic oligonucleotide

SEQ ID NO: 603239 - DNA, 54 bp, Artificial; identical to SEQ ID NO: 457631
  Synthetic oligonucleotide

SEQ ID NO: 603240 - DNA, 60 bp, Artificial; identical to SEQ ID NO: 457632
  Synthetic oligonucleotide

SEQ ID NO: 603241 - DNA, 55 bp, Artificial; identical to SEQ ID NO: 457634
  Synthetic oligonucleotide

SEQ ID NO: 603242 - DNA, 59 bp, Artificial; identical to SEQ ID NO: 457636
  Synthetic oligonucleotide

SEQ ID NO: 603243 - DNA, 55 bp, Artificial; identical to SEQ ID NO: 457637
  Synthetic oligonucleotide

SEQ ID NO: 603244 - DNA, 60 bp, Artificial; identical to SEQ ID NO: 457639
  Synthetic oligonucleotide

SEQ ID NO: 603245 - DNA, 59 bp, Artificial; identical to SEQ ID NO: 457642
  Synthetic oligonucleotide

SEQ ID NO: 603246 - DNA, 53 bp, Artificial; identical to SEQ ID NO: 457643
  Synthetic oligonucleotide

SEQ ID NO: 603247 - DNA, 60 bp, Artificial; identical to SEQ ID NO: 457646
  Synthetic oligonucleotide

SEQ ID NO: 603248 - DNA, 60 bp, Artificial; identical to SEQ ID NO: 457650
  Synthetic oligonucleotide

SEQ ID NO: 603249 - DNA, 59 bp, Artificial; identical to SEQ ID NO: 457651
  Synthetic oligonucleotide

SEQ ID NO: 603250 - DNA, 60 bp, Artificial; identical to SEQ ID NO: 457654
  Synthetic oligonucleotide

SEQ ID NO: 603251 - DNA, 60 bp, Artificial; identical to SEQ ID NO: 457655
  Synthetic oligonucleotide

SEQ ID NO: 603252 - DNA, 57 bp, Artificial; identical to SEQ ID NO: 457656
  Synthetic oligonucleotide

SEQ ID NO: 603253 - DNA, 55 bp, Artificial; identical to SEQ ID NO: 457658
  Synthetic oligonucleotide

SEQ ID NO: 603254 - DNA, 54 bp, Artificial; identical to SEQ ID NO: 457659
  Synthetic oligonucleotide

SEQ ID NO: 603255 - DNA, 60 bp, Artificial; identical to SEQ ID NO: 457660
  Synthetic oligonucleotide

SEQ ID NO: 603256 - DNA, 60 bp, Artificial; identical to SEQ ID NO: 457661
  Synthetic oligonucleotide

SEQ ID NO: 603257 - DNA, 60 bp, Artificial; identical to SEQ ID NO: 457662
  Synthetic oligonucleotide

SEQ ID NO: 603258 - DNA, 60 bp, Artificial; identical to SEQ ID NO: 457664
  Synthetic oligonucleotide

SEQ ID NO: 603259 - DNA, 54 bp, Artificial; identical to SEQ ID NO: 457665
  Synthetic oligonucleotide

SEQ ID NO: 603260 - DNA, 60 bp, Artificial; identical to SEQ ID NO: 457666
  Synthetic oligonucleotide

SEQ ID NO: 603261 - DNA, 55 bp, Artificial; identical to SEQ ID NO: 457667
  Synthetic oligonucleotide

SEQ ID NO: 603262 - DNA, 59 bp, Artificial; identical to SEQ ID NO: 457668
  Synthetic oligonucleotide

SEQ ID NO: 603263 - DNA, 55 bp, Artificial; identical to SEQ ID NO: 457669
  Synthetic oligonucleotide

SEQ ID NO: 603264 - DNA, 60 bp, Artificial; identical to SEQ ID NO: 457672
  Synthetic oligonucleotide

SEQ ID NO: 603265 - DNA, 57 bp, Artificial; identical to SEQ ID NO: 457674
  Synthetic oligonucleotide

SEQ ID NO: 603266 - DNA, 55 bp, Artificial; identical to SEQ ID NO: 457675
  Synthetic oligonucleotide

SEQ ID NO: 603267 - DNA, 60 bp, Artificial; identical to SEQ ID NO: 457678
  Synthetic oligonucleotide

SEQ ID NO: 603268 - DNA, 58 bp, Artificial; identical to SEQ ID NO: 457683
  Synthetic oligonucleotide

SEQ ID NO: 603269 - DNA, 57 bp, Artificial; identical to SEQ ID NO: 457686
  Synthetic oligonucleotide

SEQ ID NO: 603270 - DNA, 55 bp, Artificial; identical to SEQ ID NO: 457687
  Synthetic oligonucleotide

SEQ ID NO: 603271 - DNA, 57 bp, Artificial; identical to SEQ ID NO: 457688
  Synthetic oligonucleotide

SEQ ID NO: 603272 - DNA, 55 bp, Artificial; identical to SEQ ID NO: 457689
  Synthetic oligonucleotide

SEQ ID NO: 603273 - DNA, 60 bp, Artificial; identical to SEQ ID NO: 457690
  Synthetic oligonucleotide

SEQ ID NO: 603274 - DNA, 60 bp, Artificial; identical to SEQ ID NO: 239
  Synthetic oligonucleotide

SEQ ID NO: 603275 - DNA, 57 bp, Artificial; identical to SEQ ID NO: 457692
  Synthetic oligonucleotide

SEQ ID NO: 603276 - DNA, 60 bp, Artificial; identical to SEQ ID NO: 457693
  Synthetic oligonucleotide

SEQ ID NO: 603277 - DNA, 60 bp, Artificial; identical to SEQ ID NO: 457694
  Synthetic oligonucleotide

SEQ ID NO: 603278 - DNA, 60 bp, Artificial; identical to SEQ ID NO: 457697
  Synthetic oligonucleotide

SEQ ID NO: 603279 - DNA, 60 bp, Artificial; identical to SEQ ID NO: 10557
  Synthetic oligonucleotide

SEQ ID NO: 603280 - DNA, 55 bp, Artificial; identical to SEQ ID NO: 457698
  Synthetic oligonucleotide

SEQ ID NO: 603281 - DNA, 60 bp, Artificial; identical to SEQ ID NO: 457699
  Synthetic oligonucleotide

SEQ ID NO: 603282 - DNA, 60 bp, Artificial; identical to SEQ ID NO: 28259
  Synthetic oligonucleotide

SEQ ID NO: 603283 - DNA, 56 bp, Artificial; identical to SEQ ID NO: 457701
  Synthetic oligonucleotide

SEQ ID NO: 603284 - DNA, 60 bp, Artificial; identical to SEQ ID NO: 457709
  Synthetic oligonucleotide

SEQ ID NO: 603285 - DNA, 60 bp, Artificial; identical to SEQ ID NO: 457713
  Synthetic oligonucleotide

SEQ ID NO: 603286 - DNA, 56 bp, Artificial; identical to SEQ ID NO: 457718
  Synthetic oligonucleotide

SEQ ID NO: 603287 - DNA, 58 bp, Artificial; identical to SEQ ID NO: 457719
  Synthetic oligonucleotide

SEQ ID NO: 603288 - DNA, 55 bp, Artificial; identical to SEQ ID NO: 457724
  Synthetic oligonucleotide

SEQ ID NO: 603289 - DNA, 55 bp, Artificial; identical to SEQ ID NO: 457726
  Synthetic oligonucleotide

SEQ ID NO: 603290 - DNA, 51 bp, Artificial; identical to SEQ ID NO: 457727
  Synthetic oligonucleotide

SEQ ID NO: 603291 - DNA, 56 bp, Artificial; identical to SEQ ID NO: 457729
  Synthetic oligonucleotide

SEQ ID NO: 603292 - DNA, 60 bp, Artificial; identical to SEQ ID NO: 457732
  Synthetic oligonucleotide

SEQ ID NO: 603293 - DNA, 50 bp, Artificial; identical to SEQ ID NO: 457733
  Synthetic oligonucleotide

SEQ ID NO: 603294 - DNA, 54 bp, Artificial; identical to SEQ ID NO: 457737
  Synthetic oligonucleotide

SEQ ID NO: 603295 - DNA, 55 bp, Artificial; identical to SEQ ID NO: 457740
  Synthetic oligonucleotide

SEQ ID NO: 603296 - DNA, 56 bp, Artificial; identical to SEQ ID NO: 457743
  Synthetic oligonucleotide

SEQ ID NO: 603297 - DNA, 60 bp, Artificial; identical to SEQ ID NO: 457745
  Synthetic oligonucleotide

SEQ ID NO: 603298 - DNA, 59 bp, Artificial; identical to SEQ ID NO: 18401
  Synthetic oligonucleotide

SEQ ID NO: 603299 - DNA, 58 bp, Artificial; identical to SEQ ID NO: 457747
  Synthetic oligonucleotide

SEQ ID NO: 603300 - DNA, 59 bp, Artificial; identical to SEQ ID NO: 457749
  Synthetic oligonucleotide

SEQ ID NO: 603301 - DNA, 58 bp, Artificial; identical to SEQ ID NO: 457752
  Synthetic oligonucleotide

SEQ ID NO: 603302 - DNA, 59 bp, Artificial; identical to SEQ ID NO: 457753
  Synthetic oligonucleotide

SEQ ID NO: 603303 - DNA, 60 bp, Artificial; identical to SEQ ID NO: 9719
  Synthetic oligonucleotide

SEQ ID NO: 603304 - DNA, 60 bp, Artificial; identical to SEQ ID NO: 457757
  Synthetic oligonucleotide

SEQ ID NO: 603305 - DNA, 57 bp, Artificial; identical to SEQ ID NO: 457758
  Synthetic oligonucleotide

SEQ ID NO: 603306 - DNA, 50 bp, Artificial; identical to SEQ ID NO: 457763
  Synthetic oligonucleotide

SEQ ID NO: 603307 - DNA, 56 bp, Artificial; identical to SEQ ID NO: 457765
  Synthetic oligonucleotide

SEQ ID NO: 603308 - DNA, 60 bp, Artificial; identical to SEQ ID NO: 457766
  Synthetic oligonucleotide

SEQ ID NO: 603309 - DNA, 60 bp, Artificial; identical to SEQ ID NO: 7325
  Synthetic oligonucleotide

SEQ ID NO: 603310 - DNA, 60 bp, Artificial; identical to SEQ ID NO: 457768
  Synthetic oligonucleotide

SEQ ID NO: 603311 - DNA, 53 bp, Artificial; identical to SEQ ID NO: 457769
  Synthetic oligonucleotide

SEQ ID NO: 603312 - DNA, 60 bp, Artificial; identical to SEQ ID NO: 457772
  Synthetic oligonucleotide

SEQ ID NO: 603313 - DNA, 60 bp, Artificial; identical to SEQ ID NO: 457776
  Synthetic oligonucleotide

SEQ ID NO: 603314 - DNA, 55 bp, Artificial; identical to SEQ ID NO: 457778
  Synthetic oligonucleotide

SEQ ID NO: 603315 - DNA, 54 bp, Artificial; identical to SEQ ID NO: 457782
  Synthetic oligonucleotide

SEQ ID NO: 603316 - DNA, 60 bp, Artificial; identical to SEQ ID NO: 7820
  Synthetic oligonucleotide

SEQ ID NO: 603317 - DNA, 60 bp, Artificial; identical to SEQ ID NO: 457785
  Synthetic oligonucleotide

SEQ ID NO: 603318 - DNA, 51 bp, Artificial; identical to SEQ ID NO: 457788
  Synthetic oligonucleotide

SEQ ID NO: 603319 - DNA, 59 bp, Artificial; identical to SEQ ID NO: 457790
  Synthetic oligonucleotide

SEQ ID NO: 603320 - DNA, 57 bp, Artificial; identical to SEQ ID NO: 457791
  Synthetic oligonucleotide

SEQ ID NO: 603321 - DNA, 55 bp, Artificial; identical to SEQ ID NO: 457792
  Synthetic oligonucleotide

SEQ ID NO: 603322 - DNA, 57 bp, Artificial; identical to SEQ ID NO: 457795
  Synthetic oligonucleotide

SEQ ID NO: 603323 - DNA, 59 bp, Artificial; identical to SEQ ID NO: 457796
  Synthetic oligonucleotide

SEQ ID NO: 603324 - DNA, 59 bp, Artificial; identical to SEQ ID NO: 457799
  Synthetic oligonucleotide

SEQ ID NO: 603325 - DNA, 53 bp, Artificial; identical to SEQ ID NO: 457800
  Synthetic oligonucleotide

SEQ ID NO: 603326 - DNA, 55 bp, Artificial; identical to SEQ ID NO: 457801
  Synthetic oligonucleotide

SEQ ID NO: 603327 - DNA, 56 bp, Artificial; identical to SEQ ID NO: 457803
  Synthetic oligonucleotide

SEQ ID NO: 603328 - DNA, 55 bp, Artificial; identical to SEQ ID NO: 457805
  Synthetic oligonucleotide

SEQ ID NO: 603329 - DNA, 53 bp, Artificial; identical to SEQ ID NO: 457807
  Synthetic oligonucleotide

SEQ ID NO: 603330 - DNA, 55 bp, Artificial; identical to SEQ ID NO: 457808
  Synthetic oligonucleotide

SEQ ID NO: 603331 - DNA, 59 bp, Artificial; identical to SEQ ID NO: 457809
  Synthetic oligonucleotide

SEQ ID NO: 603332 - DNA, 56 bp, Artificial; identical to SEQ ID NO: 457812
  Synthetic oligonucleotide

SEQ ID NO: 603333 - DNA, 60 bp, Artificial; identical to SEQ ID NO: 457818
  Synthetic oligonucleotide

SEQ ID NO: 603334 - DNA, 60 bp, Artificial; identical to SEQ ID NO: 457819
  Synthetic oligonucleotide

SEQ ID NO: 603335 - DNA, 58 bp, Artificial; identical to SEQ ID NO: 457820
  Synthetic oligonucleotide

SEQ ID NO: 603336 - DNA, 60 bp, Artificial; identical to SEQ ID NO: 457823
  Synthetic oligonucleotide

SEQ ID NO: 603337 - DNA, 60 bp, Artificial; identical to SEQ ID NO: 457826
  Synthetic oligonucleotide

SEQ ID NO: 603338 - DNA, 52 bp, Artificial; identical to SEQ ID NO: 457829
  Synthetic oligonucleotide

SEQ ID NO: 603339 - DNA, 60 bp, Artificial; identical to SEQ ID NO: 12601
  Synthetic oligonucleotide

SEQ ID NO: 603340 - DNA, 60 bp, Artificial; identical to SEQ ID NO: 457831
  Synthetic oligonucleotide

SEQ ID NO: 603341 - DNA, 52 bp, Artificial; identical to SEQ ID NO: 457832
  Synthetic oligonucleotide

SEQ ID NO: 603342 - DNA, 59 bp, Artificial; identical to SEQ ID NO: 457834
  Synthetic oligonucleotide

SEQ ID NO: 603343 - DNA, 55 bp, Artificial; identical to SEQ ID NO: 457835
  Synthetic oligonucleotide

SEQ ID NO: 603344 - DNA, 57 bp, Artificial; identical to SEQ ID NO: 457836
  Synthetic oligonucleotide

SEQ ID NO: 603345 - DNA, 60 bp, Artificial; identical to SEQ ID NO: 457838
  Synthetic oligonucleotide

SEQ ID NO: 603346 - DNA, 59 bp, Artificial; identical to SEQ ID NO: 457839
  Synthetic oligonucleotide

SEQ ID NO: 603347 - DNA, 59 bp, Artificial; identical to SEQ ID NO: 457841
  Synthetic oligonucleotide

SEQ ID NO: 603348 - DNA, 55 bp, Artificial; identical to SEQ ID NO: 457843
  Synthetic oligonucleotide

SEQ ID NO: 603349 - DNA, 55 bp, Artificial; identical to SEQ ID NO: 457845
  Synthetic oligonucleotide

SEQ ID NO: 603350 - DNA, 51 bp, Artificial; identical to SEQ ID NO: 457846
  Synthetic oligonucleotide

SEQ ID NO: 603351 - DNA, 60 bp, Artificial; identical to SEQ ID NO: 457847
  Synthetic oligonucleotide

SEQ ID NO: 603352 - DNA, 55 bp, Artificial; identical to SEQ ID NO: 457849
  Synthetic oligonucleotide

SEQ ID NO: 603353 - DNA, 59 bp, Artificial; identical to SEQ ID NO: 457852
  Synthetic oligonucleotide

SEQ ID NO: 603354 - DNA, 55 bp, Artificial; identical to SEQ ID NO: 457853
  Synthetic oligonucleotide

SEQ ID NO: 603355 - DNA, 60 bp, Artificial; identical to SEQ ID NO: 457854
  Synthetic oligonucleotide

SEQ ID NO: 603356 - DNA, 55 bp, Artificial; identical to SEQ ID NO: 457855
  Synthetic oligonucleotide

SEQ ID NO: 603357 - DNA, 60 bp, Artificial; identical to SEQ ID NO: 457857
  Synthetic oligonucleotide

SEQ ID NO: 603358 - DNA, 60 bp, Artificial; identical to SEQ ID NO: 457859
  Synthetic oligonucleotide

SEQ ID NO: 603359 - DNA, 60 bp, Artificial; identical to SEQ ID NO: 457860
  Synthetic oligonucleotide

SEQ ID NO: 603360 - DNA, 60 bp, Artificial; identical to SEQ ID NO: 457863
  Synthetic oligonucleotide

SEQ ID NO: 603361 - DNA, 60 bp, Artificial; identical to SEQ ID NO: 457864
  Synthetic oligonucleotide

SEQ ID NO: 603362 - DNA, 50 bp, Artificial; identical to SEQ ID NO: 457865
  Synthetic oligonucleotide

SEQ ID NO: 603363 - DNA, 53 bp, Artificial; identical to SEQ ID NO: 457869
  Synthetic oligonucleotide

SEQ ID NO: 603364 - DNA, 60 bp, Artificial; identical to SEQ ID NO: 457871
  Synthetic oligonucleotide

SEQ ID NO: 603365 - DNA, 53 bp, Artificial; identical to SEQ ID NO: 457872
  Synthetic oligonucleotide

SEQ ID NO: 603366 - DNA, 57 bp, Artificial; identical to SEQ ID NO: 457876
  Synthetic oligonucleotide

SEQ ID NO: 603367 - DNA, 57 bp, Artificial; identical to SEQ ID NO: 457878
  Synthetic oligonucleotide

SEQ ID NO: 603368 - DNA, 60 bp, Artificial; identical to SEQ ID NO: 457880
  Synthetic oligonucleotide

SEQ ID NO: 603369 - DNA, 55 bp, Artificial; identical to SEQ ID NO: 457881
  Synthetic oligonucleotide

SEQ ID NO: 603370 - DNA, 60 bp, Artificial; identical to SEQ ID NO: 457885
  Synthetic oligonucleotide

SEQ ID NO: 603371 - DNA, 55 bp, Artificial; identical to SEQ ID NO: 457887
  Synthetic oligonucleotide

SEQ ID NO: 603372 - DNA, 60 bp, Artificial; identical to SEQ ID NO: 457898
  Synthetic oligonucleotide

SEQ ID NO: 603373 - DNA, 60 bp, Artificial; identical to SEQ ID NO: 457899
  Synthetic oligonucleotide

SEQ ID NO: 603374 - DNA, 55 bp, Artificial; identical to SEQ ID NO: 457901
  Synthetic oligonucleotide

SEQ ID NO: 603375 - DNA, 60 bp, Artificial; identical to SEQ ID NO: 457902
  Synthetic oligonucleotide

SEQ ID NO: 603376 - DNA, 58 bp, Artificial; identical to SEQ ID NO: 457905
  Synthetic oligonucleotide

SEQ ID NO: 603377 - DNA, 53 bp, Artificial; identical to SEQ ID NO: 457908
  Synthetic oligonucleotide

SEQ ID NO: 603378 - DNA, 60 bp, Artificial; identical to SEQ ID NO: 15632
  Synthetic oligonucleotide

SEQ ID NO: 603379 - DNA, 60 bp, Artificial; identical to SEQ ID NO: 457914
  Synthetic oligonucleotide

SEQ ID NO: 603380 - DNA, 50 bp, Artificial; identical to SEQ ID NO: 457915
  Synthetic oligonucleotide

SEQ ID NO: 603381 - DNA, 55 bp, Artificial; identical to SEQ ID NO: 457916
  Synthetic oligonucleotide

SEQ ID NO: 603382 - DNA, 60 bp, Artificial; identical to SEQ ID NO: 457921
  Synthetic oligonucleotide

SEQ ID NO: 603383 - DNA, 56 bp, Artificial; identical to SEQ ID NO: 457922
  Synthetic oligonucleotide

SEQ ID NO: 603384 - DNA, 55 bp, Artificial; identical to SEQ ID NO: 457924
  Synthetic oligonucleotide

SEQ ID NO: 603385 - DNA, 59 bp, Artificial; identical to SEQ ID NO: 457925
  Synthetic oligonucleotide

SEQ ID NO: 603386 - DNA, 60 bp, Artificial; identical to SEQ ID NO: 457926
  Synthetic oligonucleotide

SEQ ID NO: 603387 - DNA, 60 bp, Artificial; identical to SEQ ID NO: 59469
  Synthetic oligonucleotide

SEQ ID NO: 603388 - DNA, 59 bp, Artificial; identical to SEQ ID NO: 457928
  Synthetic oligonucleotide

SEQ ID NO: 603389 - DNA, 60 bp, Artificial; identical to SEQ ID NO: 457930
  Synthetic oligonucleotide

SEQ ID NO: 603390 - DNA, 53 bp, Artificial; identical to SEQ ID NO: 457932
  Synthetic oligonucleotide

SEQ ID NO: 603391 - DNA, 55 bp, Artificial; identical to SEQ ID NO: 457934
  Synthetic oligonucleotide

SEQ ID NO: 603392 - DNA, 60 bp, Artificial; identical to SEQ ID NO: 457935
  Synthetic oligonucleotide

SEQ ID NO: 603393 - DNA, 54 bp, Artificial; identical to SEQ ID NO: 457937
  Synthetic oligonucleotide

SEQ ID NO: 603394 - DNA, 60 bp, Artificial; identical to SEQ ID NO: 457938
  Synthetic oligonucleotide

SEQ ID NO: 603395 - DNA, 60 bp, Artificial; identical to SEQ ID NO: 457941
  Synthetic oligonucleotide

SEQ ID NO: 603396 - DNA, 51 bp, Artificial; identical to SEQ ID NO: 457943
  Synthetic oligonucleotide

SEQ ID NO: 603397 - DNA, 60 bp, Artificial; identical to SEQ ID NO: 457945
  Synthetic oligonucleotide

SEQ ID NO: 603398 - DNA, 55 bp, Artificial; identical to SEQ ID NO: 457946
  Synthetic oligonucleotide

SEQ ID NO: 603399 - DNA, 55 bp, Artificial; identical to SEQ ID NO: 457948
  Synthetic oligonucleotide

SEQ ID NO: 603400 - DNA, 60 bp, Artificial; identical to SEQ ID NO: 457950
  Synthetic oligonucleotide

SEQ ID NO: 603401 - DNA, 56 bp, Artificial; identical to SEQ ID NO: 457960
  Synthetic oligonucleotide

SEQ ID NO: 603402 - DNA, 56 bp, Artificial; identical to SEQ ID NO: 457961
  Synthetic oligonucleotide

SEQ ID NO: 603403 - DNA, 60 bp, Artificial; identical to SEQ ID NO: 12308
  Synthetic oligonucleotide

SEQ ID NO: 603404 - DNA, 55 bp, Artificial; identical to SEQ ID NO: 457962
  Synthetic oligonucleotide

SEQ ID NO: 603405 - DNA, 60 bp, Artificial; identical to SEQ ID NO: 457963
  Synthetic oligonucleotide

SEQ ID NO: 603406 - DNA, 56 bp, Artificial; identical to SEQ ID NO: 457964
  Synthetic oligonucleotide

SEQ ID NO: 603407 - DNA, 53 bp, Artificial; identical to SEQ ID NO: 457965
  Synthetic oligonucleotide

SEQ ID NO: 603408 - DNA, 52 bp, Artificial; identical to SEQ ID NO: 457969
  Synthetic oligonucleotide

SEQ ID NO: 603409 - DNA, 60 bp, Artificial; identical to SEQ ID NO: 457974
  Synthetic oligonucleotide

SEQ ID NO: 603410 - DNA, 55 bp, Artificial; identical to SEQ ID NO: 457982
  Synthetic oligonucleotide

SEQ ID NO: 603411 - DNA, 60 bp, Artificial; identical to SEQ ID NO: 457983
  Synthetic oligonucleotide

SEQ ID NO: 603412 - DNA, 53 bp, Artificial; identical to SEQ ID NO: 457984
  Synthetic oligonucleotide

SEQ ID NO: 603413 - DNA, 50 bp, Artificial; identical to SEQ ID NO: 457985
  Synthetic oligonucleotide

SEQ ID NO: 603414 - DNA, 60 bp, Artificial; identical to SEQ ID NO: 457988
  Synthetic oligonucleotide

SEQ ID NO: 603415 - DNA, 58 bp, Artificial; identical to SEQ ID NO: 16285
  Synthetic oligonucleotide

SEQ ID NO: 603416 - DNA, 60 bp, Artificial; identical to SEQ ID NO: 457991
  Synthetic oligonucleotide

SEQ ID NO: 603417 - DNA, 60 bp, Artificial; identical to SEQ ID NO: 457993
  Synthetic oligonucleotide

SEQ ID NO: 603418 - DNA, 60 bp, Artificial; identical to SEQ ID NO: 457998
  Synthetic oligonucleotide

SEQ ID NO: 603419 - DNA, 60 bp, Artificial; identical to SEQ ID NO: 458002
  Synthetic oligonucleotide

SEQ ID NO: 603420 - DNA, 51 bp, Artificial; identical to SEQ ID NO: 458003
  Synthetic oligonucleotide

SEQ ID NO: 603421 - DNA, 58 bp, Artificial; identical to SEQ ID NO: 458004
  Synthetic oligonucleotide

SEQ ID NO: 603422 - DNA, 57 bp, Artificial; identical to SEQ ID NO: 458006
  Synthetic oligonucleotide

SEQ ID NO: 603423 - DNA, 50 bp, Artificial; identical to SEQ ID NO: 458007
  Synthetic oligonucleotide

SEQ ID NO: 603424 - DNA, 55 bp, Artificial; identical to SEQ ID NO: 458008
  Synthetic oligonucleotide

SEQ ID NO: 603425 - DNA, 58 bp, Artificial; identical to SEQ ID NO: 458010
  Synthetic oligonucleotide

SEQ ID NO: 603426 - DNA, 55 bp, Artificial; identical to SEQ ID NO: 458011
  Synthetic oligonucleotide

SEQ ID NO: 603427 - DNA, 55 bp, Artificial; identical to SEQ ID NO: 458012
  Synthetic oligonucleotide

SEQ ID NO: 603428 - DNA, 59 bp, Artificial; identical to SEQ ID NO: 458021
  Synthetic oligonucleotide

SEQ ID NO: 603429 - DNA, 55 bp, Artificial; identical to SEQ ID NO: 458027
  Synthetic oligonucleotide

SEQ ID NO: 603430 - DNA, 55 bp, Artificial; identical to SEQ ID NO: 458029
  Synthetic oligonucleotide

SEQ ID NO: 603431 - DNA, 58 bp, Artificial; identical to SEQ ID NO: 458030
  Synthetic oligonucleotide

SEQ ID NO: 603432 - DNA, 54 bp, Artificial; identical to SEQ ID NO: 458032
  Synthetic oligonucleotide

SEQ ID NO: 603433 - DNA, 54 bp, Artificial; identical to SEQ ID NO: 458034
  Synthetic oligonucleotide

SEQ ID NO: 603434 - DNA, 60 bp, Artificial; identical to SEQ ID NO: 458036
  Synthetic oligonucleotide

SEQ ID NO: 603435 - DNA, 51 bp, Artificial; identical to SEQ ID NO: 458037
  Synthetic oligonucleotide

SEQ ID NO: 603436 - DNA, 60 bp, Artificial; identical to SEQ ID NO: 458041
  Synthetic oligonucleotide

SEQ ID NO: 603437 - DNA, 57 bp, Artificial; identical to SEQ ID NO: 458042
  Synthetic oligonucleotide

SEQ ID NO: 603438 - DNA, 60 bp, Artificial; identical to SEQ ID NO: 458051
  Synthetic oligonucleotide

SEQ ID NO: 603439 - DNA, 58 bp, Artificial; identical to SEQ ID NO: 17966
  Synthetic oligonucleotide

SEQ ID NO: 603440 - DNA, 59 bp, Artificial; identical to SEQ ID NO: 458052
  Synthetic oligonucleotide

SEQ ID NO: 603441 - DNA, 60 bp, Artificial; identical to SEQ ID NO: 8020
  Synthetic oligonucleotide

SEQ ID NO: 603442 - DNA, 60 bp, Artificial; identical to SEQ ID NO: 458059
  Synthetic oligonucleotide

SEQ ID NO: 603443 - DNA, 58 bp, Artificial; identical to SEQ ID NO: 458062
  Synthetic oligonucleotide

SEQ ID NO: 603444 - DNA, 57 bp, Artificial; identical to SEQ ID NO: 458063
  Synthetic oligonucleotide

SEQ ID NO: 603445 - DNA, 59 bp, Artificial; identical to SEQ ID NO: 458065
  Synthetic oligonucleotide

SEQ ID NO: 603446 - DNA, 60 bp, Artificial; identical to SEQ ID NO: 458068
  Synthetic oligonucleotide

SEQ ID NO: 603447 - DNA, 57 bp, Artificial; identical to SEQ ID NO: 458070
  Synthetic oligonucleotide

SEQ ID NO: 603448 - DNA, 58 bp, Artificial; identical to SEQ ID NO: 458072
  Synthetic oligonucleotide

SEQ ID NO: 603449 - DNA, 60 bp, Artificial; identical to SEQ ID NO: 458073
  Synthetic oligonucleotide

SEQ ID NO: 603450 - DNA, 51 bp, Artificial; identical to SEQ ID NO: 458075
  Synthetic oligonucleotide

SEQ ID NO: 603451 - DNA, 53 bp, Artificial; identical to SEQ ID NO: 458080
  Synthetic oligonucleotide

SEQ ID NO: 603452 - DNA, 60 bp, Artificial; identical to SEQ ID NO: 458083
  Synthetic oligonucleotide

SEQ ID NO: 603453 - DNA, 60 bp, Artificial; identical to SEQ ID NO: 458085
  Synthetic oligonucleotide

SEQ ID NO: 603454 - DNA, 60 bp, Artificial; identical to SEQ ID NO: 458086
  Synthetic oligonucleotide

SEQ ID NO: 603455 - DNA, 60 bp, Artificial; identical to SEQ ID NO: 458089
  Synthetic oligonucleotide

SEQ ID NO: 603456 - DNA, 57 bp, Artificial; identical to SEQ ID NO: 458090
  Synthetic oligonucleotide

SEQ ID NO: 603457 - DNA, 50 bp, Artificial; identical to SEQ ID NO: 458091
  Synthetic oligonucleotide

SEQ ID NO: 603458 - DNA, 52 bp, Artificial; identical to SEQ ID NO: 12662
  Synthetic oligonucleotide

SEQ ID NO: 603459 - DNA, 55 bp, Artificial; identical to SEQ ID NO: 458094
  Synthetic oligonucleotide

SEQ ID NO: 603460 - DNA, 60 bp, Artificial; identical to SEQ ID NO: 458095
  Synthetic oligonucleotide

SEQ ID NO: 603461 - DNA, 60 bp, Artificial; identical to SEQ ID NO: 458105
  Synthetic oligonucleotide

SEQ ID NO: 603462 - DNA, 60 bp, Artificial; identical to SEQ ID NO: 458106
  Synthetic oligonucleotide

SEQ ID NO: 603463 - DNA, 53 bp, Artificial; identical to SEQ ID NO: 458107
  Synthetic oligonucleotide

SEQ ID NO: 603464 - DNA, 55 bp, Artificial; identical to SEQ ID NO: 458108
  Synthetic oligonucleotide

SEQ ID NO: 603465 - DNA, 60 bp, Artificial; identical to SEQ ID NO: 458109
  Synthetic oligonucleotide

SEQ ID NO: 603466 - DNA, 56 bp, Artificial; identical to SEQ ID NO: 458110
  Synthetic oligonucleotide

SEQ ID NO: 603467 - DNA, 57 bp, Artificial; identical to SEQ ID NO: 458111
  Synthetic oligonucleotide

SEQ ID NO: 603468 - DNA, 60 bp, Artificial; identical to SEQ ID NO: 458112
  Synthetic oligonucleotide

SEQ ID NO: 603469 - DNA, 60 bp, Artificial; identical to SEQ ID NO: 458114
  Synthetic oligonucleotide

SEQ ID NO: 603470 - DNA, 55 bp, Artificial; identical to SEQ ID NO: 458115
  Synthetic oligonucleotide

SEQ ID NO: 603471 - DNA, 53 bp, Artificial; identical to SEQ ID NO: 458116
  Synthetic oligonucleotide

SEQ ID NO: 603472 - DNA, 57 bp, Artificial; identical to SEQ ID NO: 458117
  Synthetic oligonucleotide

SEQ ID NO: 603473 - DNA, 60 bp, Artificial; identical to SEQ ID NO: 458119
  Synthetic oligonucleotide

SEQ ID NO: 603474 - DNA, 52 bp, Artificial; identical to SEQ ID NO: 458121
  Synthetic oligonucleotide

SEQ ID NO: 603475 - DNA, 60 bp, Artificial; identical to SEQ ID NO: 458122
  Synthetic oligonucleotide

SEQ ID NO: 603476 - DNA, 60 bp, Artificial; identical to SEQ ID NO: 458123
  Synthetic oligonucleotide

SEQ ID NO: 603477 - DNA, 59 bp, Artificial; identical to SEQ ID NO: 458129
  Synthetic oligonucleotide

SEQ ID NO: 603478 - DNA, 55 bp, Artificial; identical to SEQ ID NO: 458132
  Synthetic oligonucleotide

SEQ ID NO: 603479 - DNA, 56 bp, Artificial; identical to SEQ ID NO: 458134
  Synthetic oligonucleotide

SEQ ID NO: 603480 - DNA, 55 bp, Artificial; identical to SEQ ID NO: 458143
  Synthetic oligonucleotide

SEQ ID NO: 603481 - DNA, 60 bp, Artificial; identical to SEQ ID NO: 11263
  Synthetic oligonucleotide

SEQ ID NO: 603482 - DNA, 59 bp, Artificial; identical to SEQ ID NO: 458144
  Synthetic oligonucleotide

SEQ ID NO: 603483 - DNA, 60 bp, Artificial; identical to SEQ ID NO: 458146
  Synthetic oligonucleotide

SEQ ID NO: 603484 - DNA, 57 bp, Artificial; identical to SEQ ID NO: 458147
  Synthetic oligonucleotide

SEQ ID NO: 603485 - DNA, 60 bp, Artificial; identical to SEQ ID NO: 458148
  Synthetic oligonucleotide

SEQ ID NO: 603486 - DNA, 55 bp, Artificial; identical to SEQ ID NO: 458149
  Synthetic oligonucleotide

SEQ ID NO: 603487 - DNA, 60 bp, Artificial; identical to SEQ ID NO: 458150
  Synthetic oligonucleotide

SEQ ID NO: 603488 - DNA, 60 bp, Artificial; identical to SEQ ID NO: 458152
  Synthetic oligonucleotide

SEQ ID NO: 603489 - DNA, 52 bp, Artificial; identical to SEQ ID NO: 458153
  Synthetic oligonucleotide

SEQ ID NO: 603490 - DNA, 60 bp, Artificial; identical to SEQ ID NO: 458156
  Synthetic oligonucleotide

SEQ ID NO: 603491 - DNA, 53 bp, Artificial; identical to SEQ ID NO: 458157
  Synthetic oligonucleotide

SEQ ID NO: 603492 - DNA, 60 bp, Artificial; identical to SEQ ID NO: 458159
  Synthetic oligonucleotide

SEQ ID NO: 603493 - DNA, 55 bp, Artificial; identical to SEQ ID NO: 458166
  Synthetic oligonucleotide

SEQ ID NO: 603494 - DNA, 60 bp, Artificial; identical to SEQ ID NO: 458167
  Synthetic oligonucleotide

SEQ ID NO: 603495 - DNA, 60 bp, Artificial; identical to SEQ ID NO: 458168
  Synthetic oligonucleotide

SEQ ID NO: 603496 - DNA, 60 bp, Artificial; identical to SEQ ID NO: 458169
  Synthetic oligonucleotide

SEQ ID NO: 603497 - DNA, 60 bp, Artificial; identical to SEQ ID NO: 458170
  Synthetic oligonucleotide

SEQ ID NO: 603498 - DNA, 55 bp, Artificial; identical to SEQ ID NO: 458171
  Synthetic oligonucleotide

SEQ ID NO: 603499 - DNA, 56 bp, Artificial; identical to SEQ ID NO: 10740
  Synthetic oligonucleotide

SEQ ID NO: 603500 - DNA, 52 bp, Artificial; identical to SEQ ID NO: 458180
  Synthetic oligonucleotide

SEQ ID NO: 603501 - DNA, 56 bp, Artificial; identical to SEQ ID NO: 458185
  Synthetic oligonucleotide

SEQ ID NO: 603502 - DNA, 60 bp, Artificial; identical to SEQ ID NO: 458186
  Synthetic oligonucleotide

SEQ ID NO: 603503 - DNA, 51 bp, Artificial; identical to SEQ ID NO: 458192
  Synthetic oligonucleotide

SEQ ID NO: 603504 - DNA, 55 bp, Artificial; identical to SEQ ID NO: 458195
  Synthetic oligonucleotide

SEQ ID NO: 603505 - DNA, 60 bp, Artificial; identical to SEQ ID NO: 458197
  Synthetic oligonucleotide

SEQ ID NO: 603506 - DNA, 52 bp, Artificial; identical to SEQ ID NO: 458200
  Synthetic oligonucleotide

SEQ ID NO: 603507 - DNA, 56 bp, Artificial; identical to SEQ ID NO: 458205
  Synthetic oligonucleotide

SEQ ID NO: 603508 - DNA, 51 bp, Artificial; identical to SEQ ID NO: 458206
  Synthetic oligonucleotide

SEQ ID NO: 603509 - DNA, 58 bp, Artificial; identical to SEQ ID NO: 458207
  Synthetic oligonucleotide

SEQ ID NO: 603510 - DNA, 60 bp, Artificial; identical to SEQ ID NO: 458208
  Synthetic oligonucleotide

SEQ ID NO: 603511 - DNA, 53 bp, Artificial; identical to SEQ ID NO: 458209
  Synthetic oligonucleotide

SEQ ID NO: 603512 - DNA, 60 bp, Artificial; identical to SEQ ID NO: 458210
  Synthetic oligonucleotide

SEQ ID NO: 603513 - DNA, 55 bp, Artificial; identical to SEQ ID NO: 458212
  Synthetic oligonucleotide

SEQ ID NO: 603514 - DNA, 55 bp, Artificial; identical to SEQ ID NO: 458216
  Synthetic oligonucleotide

SEQ ID NO: 603515 - DNA, 60 bp, Artificial; identical to SEQ ID NO: 458219
  Synthetic oligonucleotide

SEQ ID NO: 603516 - DNA, 59 bp, Artificial; identical to SEQ ID NO: 458221
  Synthetic oligonucleotide

SEQ ID NO: 603517 - DNA, 60 bp, Artificial; identical to SEQ ID NO: 458223
  Synthetic oligonucleotide

SEQ ID NO: 603518 - DNA, 53 bp, Artificial; identical to SEQ ID NO: 458225
  Synthetic oligonucleotide

SEQ ID NO: 603519 - DNA, 60 bp, Artificial; identical to SEQ ID NO: 458226
  Synthetic oligonucleotide

SEQ ID NO: 603520 - DNA, 60 bp, Artificial; identical to SEQ ID NO: 458227
  Synthetic oligonucleotide

SEQ ID NO: 603521 - DNA, 58 bp, Artificial; identical to SEQ ID NO: 458231
  Synthetic oligonucleotide

SEQ ID NO: 603522 - DNA, 60 bp, Artificial; identical to SEQ ID NO: 458233
  Synthetic oligonucleotide

SEQ ID NO: 603523 - DNA, 60 bp, Artificial; identical to SEQ ID NO: 458237
  Synthetic oligonucleotide

SEQ ID NO: 603524 - DNA, 50 bp, Artificial; identical to SEQ ID NO: 458241
  Synthetic oligonucleotide

SEQ ID NO: 603525 - DNA, 59 bp, Artificial; identical to SEQ ID NO: 458242
  Synthetic oligonucleotide

SEQ ID NO: 603526 - DNA, 60 bp, Artificial; identical to SEQ ID NO: 458245
  Synthetic oligonucleotide

SEQ ID NO: 603527 - DNA, 56 bp, Artificial; identical to SEQ ID NO: 458248
  Synthetic oligonucleotide

SEQ ID NO: 603528 - DNA, 55 bp, Artificial; identical to SEQ ID NO: 458254
  Synthetic oligonucleotide

SEQ ID NO: 603529 - DNA, 60 bp, Artificial; identical to SEQ ID NO: 458255
  Synthetic oligonucleotide

SEQ ID NO: 603530 - DNA, 59 bp, Artificial; identical to SEQ ID NO: 458258
  Synthetic oligonucleotide

SEQ ID NO: 603531 - DNA, 60 bp, Artificial; identical to SEQ ID NO: 458259
  Synthetic oligonucleotide

SEQ ID NO: 603532 - DNA, 60 bp, Artificial; identical to SEQ ID NO: 458265
  Synthetic oligonucleotide

SEQ ID NO: 603533 - DNA, 60 bp, Artificial; identical to SEQ ID NO: 458268
  Synthetic oligonucleotide

SEQ ID NO: 603534 - DNA, 51 bp, Artificial; identical to SEQ ID NO: 458269
  Synthetic oligonucleotide

SEQ ID NO: 603535 - DNA, 51 bp, Artificial; identical to SEQ ID NO: 458271
  Synthetic oligonucleotide

SEQ ID NO: 603536 - DNA, 60 bp, Artificial; identical to SEQ ID NO: 458276
  Synthetic oligonucleotide

SEQ ID NO: 603537 - DNA, 58 bp, Artificial; identical to SEQ ID NO: 458277
  Synthetic oligonucleotide

SEQ ID NO: 603538 - DNA, 60 bp, Artificial; identical to SEQ ID NO: 458279
  Synthetic oligonucleotide

SEQ ID NO: 603539 - DNA, 55 bp, Artificial; identical to SEQ ID NO: 20411
  Synthetic oligonucleotide

SEQ ID NO: 603540 - DNA, 51 bp, Artificial; identical to SEQ ID NO: 458280
  Synthetic oligonucleotide

SEQ ID NO: 603541 - DNA, 60 bp, Artificial; identical to SEQ ID NO: 458285
  Synthetic oligonucleotide

SEQ ID NO: 603542 - DNA, 60 bp, Artificial; identical to SEQ ID NO: 458286
  Synthetic oligonucleotide

SEQ ID NO: 603543 - DNA, 60 bp, Artificial; identical to SEQ ID NO: 458287
  Synthetic oligonucleotide

SEQ ID NO: 603544 - DNA, 57 bp, Artificial; identical to SEQ ID NO: 458288
  Synthetic oligonucleotide

SEQ ID NO: 603545 - DNA, 60 bp, Artificial; identical to SEQ ID NO: 458290
  Synthetic oligonucleotide

SEQ ID NO: 603546 - DNA, 60 bp, Artificial; identical to SEQ ID NO: 458291
  Synthetic oligonucleotide

SEQ ID NO: 603547 - DNA, 60 bp, Artificial; identical to SEQ ID NO: 458293
  Synthetic oligonucleotide

SEQ ID NO: 603548 - DNA, 60 bp, Artificial; identical to SEQ ID NO: 458295
  Synthetic oligonucleotide

SEQ ID NO: 603549 - DNA, 59 bp, Artificial; identical to SEQ ID NO: 458297
  Synthetic oligonucleotide

SEQ ID NO: 603550 - DNA, 60 bp, Artificial; identical to SEQ ID NO: 458298
  Synthetic oligonucleotide

SEQ ID NO: 603551 - DNA, 50 bp, Artificial; identical to SEQ ID NO: 458299
  Synthetic oligonucleotide

SEQ ID NO: 603552 - DNA, 60 bp, Artificial; identical to SEQ ID NO: 458301
  Synthetic oligonucleotide

SEQ ID NO: 603553 - DNA, 55 bp, Artificial; identical to SEQ ID NO: 458302
  Synthetic oligonucleotide

SEQ ID NO: 603554 - DNA, 55 bp, Artificial; identical to SEQ ID NO: 458307
  Synthetic oligonucleotide

SEQ ID NO: 603555 - DNA, 55 bp, Artificial; identical to SEQ ID NO: 458310
  Synthetic oligonucleotide

SEQ ID NO: 603556 - DNA, 60 bp, Artificial; identical to SEQ ID NO: 6148
  Synthetic oligonucleotide

SEQ ID NO: 603557 - DNA, 51 bp, Artificial; identical to SEQ ID NO: 458314
  Synthetic oligonucleotide

SEQ ID NO: 603558 - DNA, 60 bp, Artificial; identical to SEQ ID NO: 458315
  Synthetic oligonucleotide

SEQ ID NO: 603559 - DNA, 58 bp, Artificial; identical to SEQ ID NO: 458316
  Synthetic oligonucleotide

SEQ ID NO: 603560 - DNA, 56 bp, Artificial; identical to SEQ ID NO: 458319
  Synthetic oligonucleotide

SEQ ID NO: 603561 - DNA, 60 bp, Artificial; identical to SEQ ID NO: 458320
  Synthetic oligonucleotide

SEQ ID NO: 603562 - DNA, 60 bp, Artificial; identical to SEQ ID NO: 458325
  Synthetic oligonucleotide

SEQ ID NO: 603563 - DNA, 57 bp, Artificial; identical to SEQ ID NO: 458326
  Synthetic oligonucleotide

SEQ ID NO: 603564 - DNA, 60 bp, Artificial; identical to SEQ ID NO: 458327
  Synthetic oligonucleotide

SEQ ID NO: 603565 - DNA, 60 bp, Artificial; identical to SEQ ID NO: 11910
  Synthetic oligonucleotide

SEQ ID NO: 603566 - DNA, 60 bp, Artificial; identical to SEQ ID NO: 458328
  Synthetic oligonucleotide

SEQ ID NO: 603567 - DNA, 60 bp, Artificial; identical to SEQ ID NO: 458329
  Synthetic oligonucleotide

SEQ ID NO: 603568 - DNA, 59 bp, Artificial; identical to SEQ ID NO: 458332
  Synthetic oligonucleotide

SEQ ID NO: 603569 - DNA, 60 bp, Artificial; identical to SEQ ID NO: 458335
  Synthetic oligonucleotide

SEQ ID NO: 603570 - DNA, 60 bp, Artificial; identical to SEQ ID NO: 458339
  Synthetic oligonucleotide

SEQ ID NO: 603571 - DNA, 60 bp, Artificial; identical to SEQ ID NO: 458345
  Synthetic oligonucleotide

SEQ ID NO: 603572 - DNA, 60 bp, Artificial; identical to SEQ ID NO: 458349
  Synthetic oligonucleotide

SEQ ID NO: 603573 - DNA, 60 bp, Artificial; identical to SEQ ID NO: 458350
  Synthetic oligonucleotide

SEQ ID NO: 603574 - DNA, 60 bp, Artificial; identical to SEQ ID NO: 458355
  Synthetic oligonucleotide

SEQ ID NO: 603575 - DNA, 60 bp, Artificial; identical to SEQ ID NO: 458358
  Synthetic oligonucleotide

SEQ ID NO: 603576 - DNA, 60 bp, Artificial; identical to SEQ ID NO: 458367
  Synthetic oligonucleotide

SEQ ID NO: 603577 - DNA, 59 bp, Artificial; identical to SEQ ID NO: 458368
  Synthetic oligonucleotide

SEQ ID NO: 603578 - DNA, 55 bp, Artificial; identical to SEQ ID NO: 458369
  Synthetic oligonucleotide

SEQ ID NO: 603579 - DNA, 60 bp, Artificial; identical to SEQ ID NO: 9338
  Synthetic oligonucleotide

SEQ ID NO: 603580 - DNA, 60 bp, Artificial; identical to SEQ ID NO: 458371
  Synthetic oligonucleotide

SEQ ID NO: 603581 - DNA, 59 bp, Artificial; identical to SEQ ID NO: 458372
  Synthetic oligonucleotide

SEQ ID NO: 603582 - DNA, 58 bp, Artificial; identical to SEQ ID NO: 458373
  Synthetic oligonucleotide

SEQ ID NO: 603583 - DNA, 55 bp, Artificial; identical to SEQ ID NO: 458376
  Synthetic oligonucleotide

SEQ ID NO: 603584 - DNA, 60 bp, Artificial; identical to SEQ ID NO: 458379
  Synthetic oligonucleotide

SEQ ID NO: 603585 - DNA, 60 bp, Artificial; identical to SEQ ID NO: 458381
  Synthetic oligonucleotide

SEQ ID NO: 603586 - DNA, 55 bp, Artificial; identical to SEQ ID NO: 458382
  Synthetic oligonucleotide

SEQ ID NO: 603587 - DNA, 60 bp, Artificial; identical to SEQ ID NO: 8617
  Synthetic oligonucleotide

SEQ ID NO: 603588 - DNA, 60 bp, Artificial; identical to SEQ ID NO: 458387
  Synthetic oligonucleotide

SEQ ID NO: 603589 - DNA, 55 bp, Artificial; identical to SEQ ID NO: 458390
  Synthetic oligonucleotide

SEQ ID NO: 603590 - DNA, 60 bp, Artificial; identical to SEQ ID NO: 8360
  Synthetic oligonucleotide

SEQ ID NO: 603591 - DNA, 60 bp, Artificial; identical to SEQ ID NO: 458395
  Synthetic oligonucleotide

SEQ ID NO: 603592 - DNA, 51 bp, Artificial; identical to SEQ ID NO: 458396
  Synthetic oligonucleotide

SEQ ID NO: 603593 - DNA, 55 bp, Artificial; identical to SEQ ID NO: 458398
  Synthetic oligonucleotide

SEQ ID NO: 603594 - DNA, 56 bp, Artificial; identical to SEQ ID NO: 458399
  Synthetic oligonucleotide

SEQ ID NO: 603595 - DNA, 60 bp, Artificial; identical to SEQ ID NO: 458403
  Synthetic oligonucleotide

SEQ ID NO: 603596 - DNA, 60 bp, Artificial; identical to SEQ ID NO: 458407
  Synthetic oligonucleotide

SEQ ID NO: 603597 - DNA, 60 bp, Artificial; identical to SEQ ID NO: 458408
  Synthetic oligonucleotide

SEQ ID NO: 603598 - DNA, 59 bp, Artificial; identical to SEQ ID NO: 458410
  Synthetic oligonucleotide

SEQ ID NO: 603599 - DNA, 57 bp, Artificial; identical to SEQ ID NO: 458411
  Synthetic oligonucleotide

SEQ ID NO: 603600 - DNA, 60 bp, Artificial; identical to SEQ ID NO: 458412
  Synthetic oligonucleotide

SEQ ID NO: 603601 - DNA, 55 bp, Artificial; identical to SEQ ID NO: 458416
  Synthetic oligonucleotide

SEQ ID NO: 603602 - DNA, 55 bp, Artificial; identical to SEQ ID NO: 458418
  Synthetic oligonucleotide

SEQ ID NO: 603603 - DNA, 60 bp, Artificial; identical to SEQ ID NO: 458421
  Synthetic oligonucleotide

SEQ ID NO: 603604 - DNA, 60 bp, Artificial; identical to SEQ ID NO: 458422
  Synthetic oligonucleotide

SEQ ID NO: 603605 - DNA, 60 bp, Artificial; identical to SEQ ID NO: 458428
  Synthetic oligonucleotide

SEQ ID NO: 603606 - DNA, 50 bp, Artificial; identical to SEQ ID NO: 458429
  Synthetic oligonucleotide

SEQ ID NO: 603607 - DNA, 60 bp, Artificial; identical to SEQ ID NO: 458430
  Synthetic oligonucleotide

SEQ ID NO: 603608 - DNA, 60 bp, Artificial; identical to SEQ ID NO: 458431
  Synthetic oligonucleotide

SEQ ID NO: 603609 - DNA, 60 bp, Artificial; identical to SEQ ID NO: 458435
  Synthetic oligonucleotide

SEQ ID NO: 603610 - DNA, 60 bp, Artificial; identical to SEQ ID NO: 458438
  Synthetic oligonucleotide

SEQ ID NO: 603611 - DNA, 51 bp, Artificial; identical to SEQ ID NO: 458444
  Synthetic oligonucleotide

SEQ ID NO: 603612 - DNA, 60 bp, Artificial; identical to SEQ ID NO: 13516
  Synthetic oligonucleotide

SEQ ID NO: 603613 - DNA, 60 bp, Artificial; identical to SEQ ID NO: 6283
  Synthetic oligonucleotide

SEQ ID NO: 603614 - DNA, 56 bp, Artificial; identical to SEQ ID NO: 458449
  Synthetic oligonucleotide

SEQ ID NO: 603615 - DNA, 55 bp, Artificial; identical to SEQ ID NO: 458450
  Synthetic oligonucleotide

SEQ ID NO: 603616 - DNA, 60 bp, Artificial; identical to SEQ ID NO: 458451
  Synthetic oligonucleotide

SEQ ID NO: 603617 - DNA, 60 bp, Artificial; identical to SEQ ID NO: 458456
  Synthetic oligonucleotide

SEQ ID NO: 603618 - DNA, 60 bp, Artificial; identical to SEQ ID NO: 458461
  Synthetic oligonucleotide

SEQ ID NO: 603619 - DNA, 60 bp, Artificial; identical to SEQ ID NO: 458462
  Synthetic oligonucleotide

SEQ ID NO: 603620 - DNA, 60 bp, Artificial; identical to SEQ ID NO: 458469
  Synthetic oligonucleotide

SEQ ID NO: 603621 - DNA, 54 bp, Artificial; identical to SEQ ID NO: 458474
  Synthetic oligonucleotide

SEQ ID NO: 603622 - DNA, 60 bp, Artificial; identical to SEQ ID NO: 458475
  Synthetic oligonucleotide

SEQ ID NO: 603623 - DNA, 60 bp, Artificial; identical to SEQ ID NO: 458480
  Synthetic oligonucleotide

SEQ ID NO: 603624 - DNA, 60 bp, Artificial; identical to SEQ ID NO: 458481
  Synthetic oligonucleotide

SEQ ID NO: 603625 - DNA, 58 bp, Artificial; identical to SEQ ID NO: 458485
  Synthetic oligonucleotide

SEQ ID NO: 603626 - DNA, 60 bp, Artificial; identical to SEQ ID NO: 458487
  Synthetic oligonucleotide

SEQ ID NO: 603627 - DNA, 50 bp, Artificial; identical to SEQ ID NO: 458490
  Synthetic oligonucleotide

SEQ ID NO: 603628 - DNA, 55 bp, Artificial; identical to SEQ ID NO: 458491
  Synthetic oligonucleotide

SEQ ID NO: 603629 - DNA, 56 bp, Artificial; identical to SEQ ID NO: 458494
  Synthetic oligonucleotide

SEQ ID NO: 603630 - DNA, 55 bp, Artificial; identical to SEQ ID NO: 458495
  Synthetic oligonucleotide

SEQ ID NO: 603631 - DNA, 60 bp, Artificial; identical to SEQ ID NO: 458498
  Synthetic oligonucleotide

SEQ ID NO: 603632 - DNA, 53 bp, Artificial; identical to SEQ ID NO: 458499
  Synthetic oligonucleotide

SEQ ID NO: 603633 - DNA, 58 bp, Artificial; identical to SEQ ID NO: 458506
  Synthetic oligonucleotide

SEQ ID NO: 603634 - DNA, 59 bp, Artificial; identical to SEQ ID NO: 458507
  Synthetic oligonucleotide

SEQ ID NO: 603635 - DNA, 60 bp, Artificial; identical to SEQ ID NO: 458509
  Synthetic oligonucleotide

SEQ ID NO: 603636 - DNA, 59 bp, Artificial; identical to SEQ ID NO: 458510
  Synthetic oligonucleotide

SEQ ID NO: 603637 - DNA, 60 bp, Artificial; identical to SEQ ID NO: 458515
  Synthetic oligonucleotide

SEQ ID NO: 603638 - DNA, 60 bp, Artificial; identical to SEQ ID NO: 458518
  Synthetic oligonucleotide

SEQ ID NO: 603639 - DNA, 60 bp, Artificial; identical to SEQ ID NO: 458519
  Synthetic oligonucleotide

SEQ ID NO: 603640 - DNA, 60 bp, Artificial; identical to SEQ ID NO: 458520
  Synthetic oligonucleotide

SEQ ID NO: 603641 - DNA, 59 bp, Artificial; identical to SEQ ID NO: 458521
  Synthetic oligonucleotide

SEQ ID NO: 603642 - DNA, 60 bp, Artificial; identical to SEQ ID NO: 8294
  Synthetic oligonucleotide

SEQ ID NO: 603643 - DNA, 56 bp, Artificial; identical to SEQ ID NO: 458523
  Synthetic oligonucleotide

SEQ ID NO: 603644 - DNA, 57 bp, Artificial; identical to SEQ ID NO: 458530
  Synthetic oligonucleotide

SEQ ID NO: 603645 - DNA, 60 bp, Artificial; identical to SEQ ID NO: 458532
  Synthetic oligonucleotide

SEQ ID NO: 603646 - DNA, 60 bp, Artificial; identical to SEQ ID NO: 458535
  Synthetic oligonucleotide

SEQ ID NO: 603647 - DNA, 55 bp, Artificial; identical to SEQ ID NO: 458537
  Synthetic oligonucleotide

SEQ ID NO: 603648 - DNA, 60 bp, Artificial; identical to SEQ ID NO: 458539
  Synthetic oligonucleotide

SEQ ID NO: 603649 - DNA, 60 bp, Artificial; identical to SEQ ID NO: 458540
  Synthetic oligonucleotide

SEQ ID NO: 603650 - DNA, 60 bp, Artificial; identical to SEQ ID NO: 458541
  Synthetic oligonucleotide

SEQ ID NO: 603651 - DNA, 60 bp, Artificial; identical to SEQ ID NO: 458542
  Synthetic oligonucleotide

SEQ ID NO: 603652 - DNA, 55 bp, Artificial; identical to SEQ ID NO: 458543
  Synthetic oligonucleotide

SEQ ID NO: 603653 - DNA, 52 bp, Artificial; identical to SEQ ID NO: 458545
  Synthetic oligonucleotide

SEQ ID NO: 603654 - DNA, 57 bp, Artificial; identical to SEQ ID NO: 458546
  Synthetic oligonucleotide

SEQ ID NO: 603655 - DNA, 58 bp, Artificial; identical to SEQ ID NO: 16349
  Synthetic oligonucleotide

SEQ ID NO: 603656 - DNA, 60 bp, Artificial; identical to SEQ ID NO: 458547
  Synthetic oligonucleotide

SEQ ID NO: 603657 - DNA, 60 bp, Artificial; identical to SEQ ID NO: 458551
  Synthetic oligonucleotide

SEQ ID NO: 603658 - DNA, 57 bp, Artificial; identical to SEQ ID NO: 458554
  Synthetic oligonucleotide

SEQ ID NO: 603659 - DNA, 59 bp, Artificial; identical to SEQ ID NO: 458558
  Synthetic oligonucleotide

SEQ ID NO: 603660 - DNA, 52 bp, Artificial; identical to SEQ ID NO: 458559
  Synthetic oligonucleotide

SEQ ID NO: 603661 - DNA, 60 bp, Artificial; identical to SEQ ID NO: 458560
  Synthetic oligonucleotide

SEQ ID NO: 603662 - DNA, 60 bp, Artificial; identical to SEQ ID NO: 458561
  Synthetic oligonucleotide

SEQ ID NO: 603663 - DNA, 60 bp, Artificial; identical to SEQ ID NO: 458562
  Synthetic oligonucleotide

SEQ ID NO: 603664 - DNA, 60 bp, Artificial; identical to SEQ ID NO: 458564
  Synthetic oligonucleotide

SEQ ID NO: 603665 - DNA, 60 bp, Artificial; identical to SEQ ID NO: 458568
  Synthetic oligonucleotide

SEQ ID NO: 603666 - DNA, 60 bp, Artificial; identical to SEQ ID NO: 458569
  Synthetic oligonucleotide

SEQ ID NO: 603667 - DNA, 57 bp, Artificial; identical to SEQ ID NO: 458571
  Synthetic oligonucleotide

SEQ ID NO: 603668 - DNA, 50 bp, Artificial; identical to SEQ ID NO: 458573
  Synthetic oligonucleotide

SEQ ID NO: 603669 - DNA, 56 bp, Artificial; identical to SEQ ID NO: 458574
  Synthetic oligonucleotide

SEQ ID NO: 603670 - DNA, 60 bp, Artificial; identical to SEQ ID NO: 458576
  Synthetic oligonucleotide

SEQ ID NO: 603671 - DNA, 55 bp, Artificial; identical to SEQ ID NO: 458577
  Synthetic oligonucleotide

SEQ ID NO: 603672 - DNA, 57 bp, Artificial; identical to SEQ ID NO: 9873
  Synthetic oligonucleotide

SEQ ID NO: 603673 - DNA, 54 bp, Artificial; identical to SEQ ID NO: 458578
  Synthetic oligonucleotide

SEQ ID NO: 603674 - DNA, 60 bp, Artificial; identical to SEQ ID NO: 458579
  Synthetic oligonucleotide

SEQ ID NO: 603675 - DNA, 55 bp, Artificial; identical to SEQ ID NO: 458585
  Synthetic oligonucleotide

SEQ ID NO: 603676 - DNA, 52 bp, Artificial; identical to SEQ ID NO: 458589
  Synthetic oligonucleotide

SEQ ID NO: 603677 - DNA, 52 bp, Artificial; identical to SEQ ID NO: 13897
  Synthetic oligonucleotide

SEQ ID NO: 603678 - DNA, 60 bp, Artificial; identical to SEQ ID NO: 458594
  Synthetic oligonucleotide

SEQ ID NO: 603679 - DNA, 55 bp, Artificial; identical to SEQ ID NO: 458595
  Synthetic oligonucleotide

SEQ ID NO: 603680 - DNA, 60 bp, Artificial; identical to SEQ ID NO: 458598
  Synthetic oligonucleotide

SEQ ID NO: 603681 - DNA, 58 bp, Artificial; identical to SEQ ID NO: 458602
  Synthetic oligonucleotide

SEQ ID NO: 603682 - DNA, 58 bp, Artificial; identical to SEQ ID NO: 458605
  Synthetic oligonucleotide

SEQ ID NO: 603683 - DNA, 60 bp, Artificial; identical to SEQ ID NO: 458608
  Synthetic oligonucleotide

SEQ ID NO: 603684 - DNA, 52 bp, Artificial; identical to SEQ ID NO: 458609
  Synthetic oligonucleotide

SEQ ID NO: 603685 - DNA, 58 bp, Artificial; identical to SEQ ID NO: 20490
  Synthetic oligonucleotide

SEQ ID NO: 603686 - DNA, 60 bp, Artificial; identical to SEQ ID NO: 6048
  Synthetic oligonucleotide

SEQ ID NO: 603687 - DNA, 60 bp, Artificial; identical to SEQ ID NO: 458612
  Synthetic oligonucleotide

SEQ ID NO: 603688 - DNA, 57 bp, Artificial; identical to SEQ ID NO: 458614
  Synthetic oligonucleotide

SEQ ID NO: 603689 - DNA, 60 bp, Artificial; identical to SEQ ID NO: 458615
  Synthetic oligonucleotide

SEQ ID NO: 603690 - DNA, 55 bp, Artificial; identical to SEQ ID NO: 458619
  Synthetic oligonucleotide

SEQ ID NO: 603691 - DNA, 56 bp, Artificial; identical to SEQ ID NO: 458622
  Synthetic oligonucleotide

SEQ ID NO: 603692 - DNA, 59 bp, Artificial; identical to SEQ ID NO: 458624
  Synthetic oligonucleotide

SEQ ID NO: 603693 - DNA, 56 bp, Artificial; identical to SEQ ID NO: 458626
  Synthetic oligonucleotide

SEQ ID NO: 603694 - DNA, 60 bp, Artificial; identical to SEQ ID NO: 458627
  Synthetic oligonucleotide

SEQ ID NO: 603695 - DNA, 60 bp, Artificial; identical to SEQ ID NO: 458628
  Synthetic oligonucleotide

SEQ ID NO: 603696 - DNA, 58 bp, Artificial; identical to SEQ ID NO: 458629
  Synthetic oligonucleotide

SEQ ID NO: 603697 - DNA, 54 bp, Artificial; identical to SEQ ID NO: 458631
  Synthetic oligonucleotide

SEQ ID NO: 603698 - DNA, 50 bp, Artificial; identical to SEQ ID NO: 458632
  Synthetic oligonucleotide

SEQ ID NO: 603699 - DNA, 54 bp, Artificial; identical to SEQ ID NO: 458634
  Synthetic oligonucleotide

SEQ ID NO: 603700 - DNA, 60 bp, Artificial; identical to SEQ ID NO: 458635
  Synthetic oligonucleotide

SEQ ID NO: 603701 - DNA, 60 bp, Artificial; identical to SEQ ID NO: 458637
  Synthetic oligonucleotide

SEQ ID NO: 603702 - DNA, 59 bp, Artificial; identical to SEQ ID NO: 458639
  Synthetic oligonucleotide

SEQ ID NO: 603703 - DNA, 55 bp, Artificial; identical to SEQ ID NO: 15647
  Synthetic oligonucleotide

SEQ ID NO: 603704 - DNA, 53 bp, Artificial; identical to SEQ ID NO: 458642
  Synthetic oligonucleotide

SEQ ID NO: 603705 - DNA, 60 bp, Artificial; identical to SEQ ID NO: 458644
  Synthetic oligonucleotide

SEQ ID NO: 603706 - DNA, 56 bp, Artificial; identical to SEQ ID NO: 458648
  Synthetic oligonucleotide

SEQ ID NO: 603707 - DNA, 52 bp, Artificial; identical to SEQ ID NO: 458649
  Synthetic oligonucleotide

SEQ ID NO: 603708 - DNA, 58 bp, Artificial; identical to SEQ ID NO: 458651
  Synthetic oligonucleotide

SEQ ID NO: 603709 - DNA, 58 bp, Artificial; identical to SEQ ID NO: 458653
  Synthetic oligonucleotide

SEQ ID NO: 603710 - DNA, 60 bp, Artificial; identical to SEQ ID NO: 458655
  Synthetic oligonucleotide

SEQ ID NO: 603711 - DNA, 50 bp, Artificial; identical to SEQ ID NO: 458657
  Synthetic oligonucleotide

SEQ ID NO: 603712 - DNA, 57 bp, Artificial; identical to SEQ ID NO: 19157
  Synthetic oligonucleotide

SEQ ID NO: 603713 - DNA, 60 bp, Artificial; identical to SEQ ID NO: 458659
  Synthetic oligonucleotide

SEQ ID NO: 603714 - DNA, 58 bp, Artificial; identical to SEQ ID NO: 458660
  Synthetic oligonucleotide

SEQ ID NO: 603715 - DNA, 60 bp, Artificial; identical to SEQ ID NO: 458661
  Synthetic oligonucleotide

SEQ ID NO: 603716 - DNA, 58 bp, Artificial; identical to SEQ ID NO: 458663
  Synthetic oligonucleotide

SEQ ID NO: 603717 - DNA, 60 bp, Artificial; identical to SEQ ID NO: 458664
  Synthetic oligonucleotide

SEQ ID NO: 603718 - DNA, 58 bp, Artificial; identical to SEQ ID NO: 458665
  Synthetic oligonucleotide

SEQ ID NO: 603719 - DNA, 57 bp, Artificial; identical to SEQ ID NO: 458666
  Synthetic oligonucleotide

SEQ ID NO: 603720 - DNA, 60 bp, Artificial; identical to SEQ ID NO: 458668
  Synthetic oligonucleotide

SEQ ID NO: 603721 - DNA, 60 bp, Artificial; identical to SEQ ID NO: 458669
  Synthetic oligonucleotide

SEQ ID NO: 603722 - DNA, 60 bp, Artificial; identical to SEQ ID NO: 458672
  Synthetic oligonucleotide

SEQ ID NO: 603723 - DNA, 53 bp, Artificial; identical to SEQ ID NO: 458674
  Synthetic oligonucleotide

SEQ ID NO: 603724 - DNA, 60 bp, Artificial; identical to SEQ ID NO: 458675
  Synthetic oligonucleotide

SEQ ID NO: 603725 - DNA, 59 bp, Artificial; identical to SEQ ID NO: 458686
  Synthetic oligonucleotide

SEQ ID NO: 603726 - DNA, 60 bp, Artificial; identical to SEQ ID NO: 458687
  Synthetic oligonucleotide

SEQ ID NO: 603727 - DNA, 51 bp, Artificial; identical to SEQ ID NO: 17459
  Synthetic oligonucleotide

SEQ ID NO: 603728 - DNA, 58 bp, Artificial; identical to SEQ ID NO: 458689
  Synthetic oligonucleotide

SEQ ID NO: 603729 - DNA, 58 bp, Artificial; identical to SEQ ID NO: 458690
  Synthetic oligonucleotide

SEQ ID NO: 603730 - DNA, 55 bp, Artificial; identical to SEQ ID NO: 458692
  Synthetic oligonucleotide

SEQ ID NO: 603731 - DNA, 55 bp, Artificial; identical to SEQ ID NO: 458694
  Synthetic oligonucleotide

SEQ ID NO: 603732 - DNA, 59 bp, Artificial; identical to SEQ ID NO: 458696
  Synthetic oligonucleotide

SEQ ID NO: 603733 - DNA, 60 bp, Artificial; identical to SEQ ID NO: 458697
  Synthetic oligonucleotide

SEQ ID NO: 603734 - DNA, 60 bp, Artificial; identical to SEQ ID NO: 458699
  Synthetic oligonucleotide

SEQ ID NO: 603735 - DNA, 60 bp, Artificial; identical to SEQ ID NO: 458700
  Synthetic oligonucleotide

SEQ ID NO: 603736 - DNA, 56 bp, Artificial; identical to SEQ ID NO: 458702
  Synthetic oligonucleotide

SEQ ID NO: 603737 - DNA, 60 bp, Artificial; identical to SEQ ID NO: 458706
  Synthetic oligonucleotide

SEQ ID NO: 603738 - DNA, 55 bp, Artificial; identical to SEQ ID NO: 458708
  Synthetic oligonucleotide

SEQ ID NO: 603739 - DNA, 52 bp, Artificial; identical to SEQ ID NO: 458711
  Synthetic oligonucleotide

SEQ ID NO: 603740 - DNA, 60 bp, Artificial; identical to SEQ ID NO: 458715
  Synthetic oligonucleotide

SEQ ID NO: 603741 - DNA, 55 bp, Artificial; identical to SEQ ID NO: 458720
  Synthetic oligonucleotide

SEQ ID NO: 603742 - DNA, 53 bp, Artificial; identical to SEQ ID NO: 458724
  Synthetic oligonucleotide

SEQ ID NO: 603743 - DNA, 60 bp, Artificial; identical to SEQ ID NO: 458726
  Synthetic oligonucleotide

SEQ ID NO: 603744 - DNA, 53 bp, Artificial; identical to SEQ ID NO: 458732
  Synthetic oligonucleotide

SEQ ID NO: 603745 - DNA, 53 bp, Artificial; identical to SEQ ID NO: 458734
  Synthetic oligonucleotide

SEQ ID NO: 603746 - DNA, 55 bp, Artificial; identical to SEQ ID NO: 458735
  Synthetic oligonucleotide

SEQ ID NO: 603747 - DNA, 51 bp, Artificial; identical to SEQ ID NO: 458737
  Synthetic oligonucleotide

SEQ ID NO: 603748 - DNA, 57 bp, Artificial; identical to SEQ ID NO: 458741
  Synthetic oligonucleotide

SEQ ID NO: 603749 - DNA, 60 bp, Artificial; identical to SEQ ID NO: 458742
  Synthetic oligonucleotide

SEQ ID NO: 603750 - DNA, 57 bp, Artificial; identical to SEQ ID NO: 458743
  Synthetic oligonucleotide

SEQ ID NO: 603751 - DNA, 60 bp, Artificial; identical to SEQ ID NO: 458744
  Synthetic oligonucleotide

SEQ ID NO: 603752 - DNA, 60 bp, Artificial; identical to SEQ ID NO: 458745
  Synthetic oligonucleotide

SEQ ID NO: 603753 - DNA, 60 bp, Artificial; identical to SEQ ID NO: 458746
  Synthetic oligonucleotide

SEQ ID NO: 603754 - DNA, 59 bp, Artificial; identical to SEQ ID NO: 458747
  Synthetic oligonucleotide

SEQ ID NO: 603755 - DNA, 60 bp, Artificial; identical to SEQ ID NO: 7008
  Synthetic oligonucleotide

SEQ ID NO: 603756 - DNA, 54 bp, Artificial; identical to SEQ ID NO: 458750
  Synthetic oligonucleotide

SEQ ID NO: 603757 - DNA, 55 bp, Artificial; identical to SEQ ID NO: 458751
  Synthetic oligonucleotide

SEQ ID NO: 603758 - DNA, 58 bp, Artificial; identical to SEQ ID NO: 458756
  Synthetic oligonucleotide

SEQ ID NO: 603759 - DNA, 60 bp, Artificial; identical to SEQ ID NO: 458760
  Synthetic oligonucleotide

SEQ ID NO: 603760 - DNA, 59 bp, Artificial; identical to SEQ ID NO: 458761
  Synthetic oligonucleotide

SEQ ID NO: 603761 - DNA, 55 bp, Artificial; identical to SEQ ID NO: 458764
  Synthetic oligonucleotide

SEQ ID NO: 603762 - DNA, 53 bp, Artificial; identical to SEQ ID NO: 458767
  Synthetic oligonucleotide

SEQ ID NO: 603763 - DNA, 56 bp, Artificial; identical to SEQ ID NO: 458768
  Synthetic oligonucleotide

SEQ ID NO: 603764 - DNA, 55 bp, Artificial; identical to SEQ ID NO: 458769
  Synthetic oligonucleotide

SEQ ID NO: 603765 - DNA, 60 bp, Artificial; identical to SEQ ID NO: 458771
  Synthetic oligonucleotide

SEQ ID NO: 603766 - DNA, 58 bp, Artificial; identical to SEQ ID NO: 458774
  Synthetic oligonucleotide

SEQ ID NO: 603767 - DNA, 59 bp, Artificial; identical to SEQ ID NO: 458776
  Synthetic oligonucleotide

SEQ ID NO: 603768 - DNA, 55 bp, Artificial; identical to SEQ ID NO: 458779
  Synthetic oligonucleotide

SEQ ID NO: 603769 - DNA, 60 bp, Artificial; identical to SEQ ID NO: 458784
  Synthetic oligonucleotide

SEQ ID NO: 603770 - DNA, 60 bp, Artificial; identical to SEQ ID NO: 458786
  Synthetic oligonucleotide

SEQ ID NO: 603771 - DNA, 60 bp, Artificial; identical to SEQ ID NO: 458787
  Synthetic oligonucleotide

SEQ ID NO: 603772 - DNA, 59 bp, Artificial; identical to SEQ ID NO: 458790
  Synthetic oligonucleotide

SEQ ID NO: 603773 - DNA, 50 bp, Artificial; identical to SEQ ID NO: 458791
  Synthetic oligonucleotide

SEQ ID NO: 603774 - DNA, 60 bp, Artificial; identical to SEQ ID NO: 458796
  Synthetic oligonucleotide

SEQ ID NO: 603775 - DNA, 60 bp, Artificial; identical to SEQ ID NO: 458797
  Synthetic oligonucleotide

SEQ ID NO: 603776 - DNA, 60 bp, Artificial; identical to SEQ ID NO: 458798
  Synthetic oligonucleotide

SEQ ID NO: 603777 - DNA, 60 bp, Artificial; identical to SEQ ID NO: 458805
  Synthetic oligonucleotide

SEQ ID NO: 603778 - DNA, 60 bp, Artificial; identical to SEQ ID NO: 458806
  Synthetic oligonucleotide

SEQ ID NO: 603779 - DNA, 55 bp, Artificial; identical to SEQ ID NO: 458808
  Synthetic oligonucleotide

SEQ ID NO: 603780 - DNA, 55 bp, Artificial; identical to SEQ ID NO: 458809
  Synthetic oligonucleotide

SEQ ID NO: 603781 - DNA, 55 bp, Artificial; identical to SEQ ID NO: 458811
  Synthetic oligonucleotide

SEQ ID NO: 603782 - DNA, 55 bp, Artificial; identical to SEQ ID NO: 458816
  Synthetic oligonucleotide

SEQ ID NO: 603783 - DNA, 58 bp, Artificial; identical to SEQ ID NO: 458817
  Synthetic oligonucleotide

SEQ ID NO: 603784 - DNA, 57 bp, Artificial; identical to SEQ ID NO: 458819
  Synthetic oligonucleotide

SEQ ID NO: 603785 - DNA, 56 bp, Artificial; identical to SEQ ID NO: 458820
  Synthetic oligonucleotide

SEQ ID NO: 603786 - DNA, 54 bp, Artificial; identical to SEQ ID NO: 18588
  Synthetic oligonucleotide

SEQ ID NO: 603787 - DNA, 60 bp, Artificial; identical to SEQ ID NO: 458821
  Synthetic oligonucleotide

SEQ ID NO: 603788 - DNA, 57 bp, Artificial; identical to SEQ ID NO: 458822
  Synthetic oligonucleotide

SEQ ID NO: 603789 - DNA, 60 bp, Artificial; identical to SEQ ID NO: 15808
  Synthetic oligonucleotide

SEQ ID NO: 603790 - DNA, 60 bp, Artificial; identical to SEQ ID NO: 458825
  Synthetic oligonucleotide

SEQ ID NO: 603791 - DNA, 60 bp, Artificial; identical to SEQ ID NO: 458829
  Synthetic oligonucleotide

SEQ ID NO: 603792 - DNA, 60 bp, Artificial; identical to SEQ ID NO: 458831
  Synthetic oligonucleotide

SEQ ID NO: 603793 - DNA, 57 bp, Artificial; identical to SEQ ID NO: 458833
  Synthetic oligonucleotide

SEQ ID NO: 603794 - DNA, 54 bp, Artificial; identical to SEQ ID NO: 458834
  Synthetic oligonucleotide

SEQ ID NO: 603795 - DNA, 56 bp, Artificial; identical to SEQ ID NO: 458835
  Synthetic oligonucleotide

SEQ ID NO: 603796 - DNA, 60 bp, Artificial; identical to SEQ ID NO: 458836
  Synthetic oligonucleotide

SEQ ID NO: 603797 - DNA, 58 bp, Artificial; identical to SEQ ID NO: 458841
  Synthetic oligonucleotide

SEQ ID NO: 603798 - DNA, 60 bp, Artificial; identical to SEQ ID NO: 458842
  Synthetic oligonucleotide

SEQ ID NO: 603799 - DNA, 60 bp, Artificial; identical to SEQ ID NO: 458844
  Synthetic oligonucleotide

SEQ ID NO: 603800 - DNA, 60 bp, Artificial; identical to SEQ ID NO: 8082
  Synthetic oligonucleotide

SEQ ID NO: 603801 - DNA, 58 bp, Artificial; identical to SEQ ID NO: 458853
  Synthetic oligonucleotide

SEQ ID NO: 603802 - DNA, 60 bp, Artificial; identical to SEQ ID NO: 458855
  Synthetic oligonucleotide

SEQ ID NO: 603803 - DNA, 59 bp, Artificial; identical to SEQ ID NO: 458860
  Synthetic oligonucleotide

SEQ ID NO: 603804 - DNA, 60 bp, Artificial; identical to SEQ ID NO: 458861
  Synthetic oligonucleotide

SEQ ID NO: 603805 - DNA, 51 bp, Artificial; identical to SEQ ID NO: 458862
  Synthetic oligonucleotide

SEQ ID NO: 603806 - DNA, 52 bp, Artificial; identical to SEQ ID NO: 458863
  Synthetic oligonucleotide

SEQ ID NO: 603807 - DNA, 50 bp, Artificial; identical to SEQ ID NO: 458865
  Synthetic oligonucleotide

SEQ ID NO: 603808 - DNA, 59 bp, Artificial; identical to SEQ ID NO: 458869
  Synthetic oligonucleotide

SEQ ID NO: 603809 - DNA, 60 bp, Artificial; identical to SEQ ID NO: 458870
  Synthetic oligonucleotide

SEQ ID NO: 603810 - DNA, 57 bp, Artificial; identical to SEQ ID NO: 458871
  Synthetic oligonucleotide

SEQ ID NO: 603811 - DNA, 60 bp, Artificial; identical to SEQ ID NO: 458873
  Synthetic oligonucleotide

SEQ ID NO: 603812 - DNA, 55 bp, Artificial; identical to SEQ ID NO: 458877
  Synthetic oligonucleotide

SEQ ID NO: 603813 - DNA, 55 bp, Artificial; identical to SEQ ID NO: 458879
  Synthetic oligonucleotide

SEQ ID NO: 603814 - DNA, 50 bp, Artificial; identical to SEQ ID NO: 458880
  Synthetic oligonucleotide

SEQ ID NO: 603815 - DNA, 60 bp, Artificial; identical to SEQ ID NO: 458881
  Synthetic oligonucleotide

SEQ ID NO: 603816 - DNA, 60 bp, Artificial; identical to SEQ ID NO: 458886
  Synthetic oligonucleotide

SEQ ID NO: 603817 - DNA, 60 bp, Artificial; identical to SEQ ID NO: 458890
  Synthetic oligonucleotide

SEQ ID NO: 603818 - DNA, 58 bp, Artificial; identical to SEQ ID NO: 458893
  Synthetic oligonucleotide

SEQ ID NO: 603819 - DNA, 60 bp, Artificial; identical to SEQ ID NO: 458895
  Synthetic oligonucleotide

SEQ ID NO: 603820 - DNA, 60 bp, Artificial; identical to SEQ ID NO: 8406
  Synthetic oligonucleotide

SEQ ID NO: 603821 - DNA, 52 bp, Artificial; identical to SEQ ID NO: 458898
  Synthetic oligonucleotide

SEQ ID NO: 603822 - DNA, 51 bp, Artificial; identical to SEQ ID NO: 458900
  Synthetic oligonucleotide

SEQ ID NO: 603823 - DNA, 56 bp, Artificial; identical to SEQ ID NO: 458905
  Synthetic oligonucleotide

SEQ ID NO: 603824 - DNA, 53 bp, Artificial; identical to SEQ ID NO: 458910
  Synthetic oligonucleotide

SEQ ID NO: 603825 - DNA, 55 bp, Artificial; identical to SEQ ID NO: 458911
  Synthetic oligonucleotide

SEQ ID NO: 603826 - DNA, 56 bp, Artificial; identical to SEQ ID NO: 458920
  Synthetic oligonucleotide

SEQ ID NO: 603827 - DNA, 56 bp, Artificial; identical to SEQ ID NO: 458922
  Synthetic oligonucleotide

SEQ ID NO: 603828 - DNA, 55 bp, Artificial; identical to SEQ ID NO: 458923
  Synthetic oligonucleotide

SEQ ID NO: 603829 - DNA, 60 bp, Artificial; identical to SEQ ID NO: 458928
  Synthetic oligonucleotide

SEQ ID NO: 603830 - DNA, 53 bp, Artificial; identical to SEQ ID NO: 458929
  Synthetic oligonucleotide

SEQ ID NO: 603831 - DNA, 58 bp, Artificial; identical to SEQ ID NO: 458931
  Synthetic oligonucleotide

SEQ ID NO: 603832 - DNA, 60 bp, Artificial; identical to SEQ ID NO: 458934
  Synthetic oligonucleotide

SEQ ID NO: 603833 - DNA, 56 bp, Artificial; identical to SEQ ID NO: 458936
  Synthetic oligonucleotide

SEQ ID NO: 603834 - DNA, 55 bp, Artificial; identical to SEQ ID NO: 458938
  Synthetic oligonucleotide

SEQ ID NO: 603835 - DNA, 60 bp, Artificial; identical to SEQ ID NO: 458944
  Synthetic oligonucleotide

SEQ ID NO: 603836 - DNA, 58 bp, Artificial; identical to SEQ ID NO: 458945
  Synthetic oligonucleotide

SEQ ID NO: 603837 - DNA, 60 bp, Artificial; identical to SEQ ID NO: 458947
  Synthetic oligonucleotide

SEQ ID NO: 603838 - DNA, 58 bp, Artificial; identical to SEQ ID NO: 458950
  Synthetic oligonucleotide

SEQ ID NO: 603839 - DNA, 55 bp, Artificial; identical to SEQ ID NO: 458951
  Synthetic oligonucleotide

SEQ ID NO: 603840 - DNA, 52 bp, Artificial; identical to SEQ ID NO: 458955
  Synthetic oligonucleotide

SEQ ID NO: 603841 - DNA, 54 bp, Artificial; identical to SEQ ID NO: 458958
  Synthetic oligonucleotide

SEQ ID NO: 603842 - DNA, 55 bp, Artificial; identical to SEQ ID NO: 458960
  Synthetic oligonucleotide

SEQ ID NO: 603843 - DNA, 52 bp, Artificial; identical to SEQ ID NO: 458964
  Synthetic oligonucleotide

SEQ ID NO: 603844 - DNA, 54 bp, Artificial; identical to SEQ ID NO: 458966
  Synthetic oligonucleotide

SEQ ID NO: 603845 - DNA, 55 bp, Artificial; identical to SEQ ID NO: 458967
  Synthetic oligonucleotide

SEQ ID NO: 603846 - DNA, 50 bp, Artificial; identical to SEQ ID NO: 458970
  Synthetic oligonucleotide

SEQ ID NO: 603847 - DNA, 60 bp, Artificial; identical to SEQ ID NO: 458972
  Synthetic oligonucleotide

SEQ ID NO: 603848 - DNA, 57 bp, Artificial; identical to SEQ ID NO: 19312
  Synthetic oligonucleotide

SEQ ID NO: 603849 - DNA, 53 bp, Artificial; identical to SEQ ID NO: 458977
  Synthetic oligonucleotide

SEQ ID NO: 603850 - DNA, 54 bp, Artificial; identical to SEQ ID NO: 20382
  Synthetic oligonucleotide

SEQ ID NO: 603851 - DNA, 58 bp, Artificial; identical to SEQ ID NO: 458980
  Synthetic oligonucleotide

SEQ ID NO: 603852 - DNA, 58 bp, Artificial; identical to SEQ ID NO: 458982
  Synthetic oligonucleotide

SEQ ID NO: 603853 - DNA, 55 bp, Artificial; identical to SEQ ID NO: 458983
  Synthetic oligonucleotide

SEQ ID NO: 603854 - DNA, 60 bp, Artificial; identical to SEQ ID NO: 458984
  Synthetic oligonucleotide

SEQ ID NO: 603855 - DNA, 56 bp, Artificial; identical to SEQ ID NO: 458985
  Synthetic oligonucleotide

SEQ ID NO: 603856 - DNA, 60 bp, Artificial; identical to SEQ ID NO: 458986
  Synthetic oligonucleotide

SEQ ID NO: 603857 - DNA, 60 bp, Artificial; identical to SEQ ID NO: 458987
  Synthetic oligonucleotide

SEQ ID NO: 603858 - DNA, 51 bp, Artificial; identical to SEQ ID NO: 458988
  Synthetic oligonucleotide

SEQ ID NO: 603859 - DNA, 53 bp, Artificial; identical to SEQ ID NO: 458989
  Synthetic oligonucleotide

SEQ ID NO: 603860 - DNA, 52 bp, Artificial; identical to SEQ ID NO: 458990
  Synthetic oligonucleotide

SEQ ID NO: 603861 - DNA, 55 bp, Artificial; identical to SEQ ID NO: 458991
  Synthetic oligonucleotide

SEQ ID NO: 603862 - DNA, 52 bp, Artificial; identical to SEQ ID NO: 458992
  Synthetic oligonucleotide

SEQ ID NO: 603863 - DNA, 55 bp, Artificial; identical to SEQ ID NO: 459001
  Synthetic oligonucleotide

SEQ ID NO: 603864 - DNA, 50 bp, Artificial; identical to SEQ ID NO: 459002
  Synthetic oligonucleotide

SEQ ID NO: 603865 - DNA, 53 bp, Artificial; identical to SEQ ID NO: 459003
  Synthetic oligonucleotide

SEQ ID NO: 603866 - DNA, 50 bp, Artificial; identical to SEQ ID NO: 459007
  Synthetic oligonucleotide

SEQ ID NO: 603867 - DNA, 60 bp, Artificial; identical to SEQ ID NO: 459008
  Synthetic oligonucleotide

SEQ ID NO: 603868 - DNA, 59 bp, Artificial; identical to SEQ ID NO: 459009
  Synthetic oligonucleotide

SEQ ID NO: 603869 - DNA, 55 bp, Artificial; identical to SEQ ID NO: 459011
  Synthetic oligonucleotide

SEQ ID NO: 603870 - DNA, 59 bp, Artificial; identical to SEQ ID NO: 459013
  Synthetic oligonucleotide

SEQ ID NO: 603871 - DNA, 50 bp, Artificial; identical to SEQ ID NO: 459014
  Synthetic oligonucleotide

SEQ ID NO: 603872 - DNA, 53 bp, Artificial; identical to SEQ ID NO: 459015
  Synthetic oligonucleotide

SEQ ID NO: 603873 - DNA, 60 bp, Artificial; identical to SEQ ID NO: 12403
  Synthetic oligonucleotide

SEQ ID NO: 603874 - DNA, 60 bp, Artificial; identical to SEQ ID NO: 459019
  Synthetic oligonucleotide

SEQ ID NO: 603875 - DNA, 53 bp, Artificial; identical to SEQ ID NO: 459020
  Synthetic oligonucleotide

SEQ ID NO: 603876 - DNA, 54 bp, Artificial; identical to SEQ ID NO: 459023
  Synthetic oligonucleotide

SEQ ID NO: 603877 - DNA, 55 bp, Artificial; identical to SEQ ID NO: 459025
  Synthetic oligonucleotide

SEQ ID NO: 603878 - DNA, 60 bp, Artificial; identical to SEQ ID NO: 459033
  Synthetic oligonucleotide

SEQ ID NO: 603879 - DNA, 52 bp, Artificial; identical to SEQ ID NO: 459034
  Synthetic oligonucleotide

SEQ ID NO: 603880 - DNA, 60 bp, Artificial; identical to SEQ ID NO: 459037
  Synthetic oligonucleotide

SEQ ID NO: 603881 - DNA, 59 bp, Artificial; identical to SEQ ID NO: 459043
  Synthetic oligonucleotide

SEQ ID NO: 603882 - DNA, 55 bp, Artificial; identical to SEQ ID NO: 459044
  Synthetic oligonucleotide

SEQ ID NO: 603883 - DNA, 60 bp, Artificial; identical to SEQ ID NO: 459045
  Synthetic oligonucleotide

SEQ ID NO: 603884 - DNA, 55 bp, Artificial; identical to SEQ ID NO: 459049
  Synthetic oligonucleotide

SEQ ID NO: 603885 - DNA, 57 bp, Artificial; identical to SEQ ID NO: 459052
  Synthetic oligonucleotide

SEQ ID NO: 603886 - DNA, 60 bp, Artificial; identical to SEQ ID NO: 459055
  Synthetic oligonucleotide

SEQ ID NO: 603887 - DNA, 59 bp, Artificial; identical to SEQ ID NO: 459058
  Synthetic oligonucleotide

SEQ ID NO: 603888 - DNA, 55 bp, Artificial; identical to SEQ ID NO: 459061
  Synthetic oligonucleotide

SEQ ID NO: 603889 - DNA, 60 bp, Artificial; identical to SEQ ID NO: 459063
  Synthetic oligonucleotide

SEQ ID NO: 603890 - DNA, 56 bp, Artificial; identical to SEQ ID NO: 459064
  Synthetic oligonucleotide

SEQ ID NO: 603891 - DNA, 51 bp, Artificial; identical to SEQ ID NO: 459068
  Synthetic oligonucleotide

SEQ ID NO: 603892 - DNA, 60 bp, Artificial; identical to SEQ ID NO: 459072
  Synthetic oligonucleotide

SEQ ID NO: 603893 - DNA, 58 bp, Artificial; identical to SEQ ID NO: 459074
  Synthetic oligonucleotide

SEQ ID NO: 603894 - DNA, 57 bp, Artificial; identical to SEQ ID NO: 459075
  Synthetic oligonucleotide

SEQ ID NO: 603895 - DNA, 60 bp, Artificial; identical to SEQ ID NO: 459076
  Synthetic oligonucleotide

SEQ ID NO: 603896 - DNA, 55 bp, Artificial; identical to SEQ ID NO: 459079
  Synthetic oligonucleotide

SEQ ID NO: 603897 - DNA, 60 bp, Artificial; identical to SEQ ID NO: 459080
  Synthetic oligonucleotide

SEQ ID NO: 603898 - DNA, 60 bp, Artificial; identical to SEQ ID NO: 459081
  Synthetic oligonucleotide

SEQ ID NO: 603899 - DNA, 60 bp, Artificial; identical to SEQ ID NO: 459082
  Synthetic oligonucleotide

SEQ ID NO: 603900 - DNA, 51 bp, Artificial; identical to SEQ ID NO: 459088
  Synthetic oligonucleotide

SEQ ID NO: 603901 - DNA, 60 bp, Artificial; identical to SEQ ID NO: 459092
  Synthetic oligonucleotide

SEQ ID NO: 603902 - DNA, 54 bp, Artificial; identical to SEQ ID NO: 459093
  Synthetic oligonucleotide

SEQ ID NO: 603903 - DNA, 59 bp, Artificial; identical to SEQ ID NO: 459098
  Synthetic oligonucleotide

SEQ ID NO: 603904 - DNA, 60 bp, Artificial; identical to SEQ ID NO: 459099
  Synthetic oligonucleotide

SEQ ID NO: 603905 - DNA, 57 bp, Artificial; identical to SEQ ID NO: 459101
  Synthetic oligonucleotide

SEQ ID NO: 603906 - DNA, 60 bp, Artificial; identical to SEQ ID NO: 459105
  Synthetic oligonucleotide

SEQ ID NO: 603907 - DNA, 59 bp, Artificial; identical to SEQ ID NO: 459106
  Synthetic oligonucleotide

SEQ ID NO: 603908 - DNA, 58 bp, Artificial; identical to SEQ ID NO: 459109
  Synthetic oligonucleotide

SEQ ID NO: 603909 - DNA, 55 bp, Artificial; identical to SEQ ID NO: 459110
  Synthetic oligonucleotide

SEQ ID NO: 603910 - DNA, 57 bp, Artificial; identical to SEQ ID NO: 459112
  Synthetic oligonucleotide

SEQ ID NO: 603911 - DNA, 60 bp, Artificial; identical to SEQ ID NO: 8051
  Synthetic oligonucleotide

SEQ ID NO: 603912 - DNA, 60 bp, Artificial; identical to SEQ ID NO: 14469
  Synthetic oligonucleotide

SEQ ID NO: 603913 - DNA, 60 bp, Artificial; identical to SEQ ID NO: 459118
  Synthetic oligonucleotide

SEQ ID NO: 603914 - DNA, 60 bp, Artificial; identical to SEQ ID NO: 459120
  Synthetic oligonucleotide

SEQ ID NO: 603915 - DNA, 55 bp, Artificial; identical to SEQ ID NO: 459121
  Synthetic oligonucleotide

SEQ ID NO: 603916 - DNA, 55 bp, Artificial; identical to SEQ ID NO: 459123
  Synthetic oligonucleotide

SEQ ID NO: 603917 - DNA, 55 bp, Artificial; identical to SEQ ID NO: 459124
  Synthetic oligonucleotide

SEQ ID NO: 603918 - DNA, 50 bp, Artificial; identical to SEQ ID NO: 459125
  Synthetic oligonucleotide

SEQ ID NO: 603919 - DNA, 50 bp, Artificial; identical to SEQ ID NO: 459126
  Synthetic oligonucleotide

SEQ ID NO: 603920 - DNA, 60 bp, Artificial; identical to SEQ ID NO: 459128
  Synthetic oligonucleotide

SEQ ID NO: 603921 - DNA, 55 bp, Artificial; identical to SEQ ID NO: 459131
  Synthetic oligonucleotide

SEQ ID NO: 603922 - DNA, 51 bp, Artificial; identical to SEQ ID NO: 459134
  Synthetic oligonucleotide

SEQ ID NO: 603923 - DNA, 57 bp, Artificial; identical to SEQ ID NO: 459135
  Synthetic oligonucleotide

SEQ ID NO: 603924 - DNA, 56 bp, Artificial; identical to SEQ ID NO: 459139
  Synthetic oligonucleotide

SEQ ID NO: 603925 - DNA, 52 bp, Artificial; identical to SEQ ID NO: 459141
  Synthetic oligonucleotide

SEQ ID NO: 603926 - DNA, 52 bp, Artificial; identical to SEQ ID NO: 459143
  Synthetic oligonucleotide

SEQ ID NO: 603927 - DNA, 58 bp, Artificial; identical to SEQ ID NO: 459144
  Synthetic oligonucleotide

SEQ ID NO: 603928 - DNA, 58 bp, Artificial; identical to SEQ ID NO: 459145
  Synthetic oligonucleotide

SEQ ID NO: 603929 - DNA, 57 bp, Artificial; identical to SEQ ID NO: 459146
  Synthetic oligonucleotide

SEQ ID NO: 603930 - DNA, 56 bp, Artificial; identical to SEQ ID NO: 459149
  Synthetic oligonucleotide

SEQ ID NO: 603931 - DNA, 58 bp, Artificial; identical to SEQ ID NO: 459150
  Synthetic oligonucleotide

SEQ ID NO: 603932 - DNA, 52 bp, Artificial; identical to SEQ ID NO: 459151
  Synthetic oligonucleotide

SEQ ID NO: 603933 - DNA, 60 bp, Artificial; identical to SEQ ID NO: 459152
  Synthetic oligonucleotide

SEQ ID NO: 603934 - DNA, 58 bp, Artificial; identical to SEQ ID NO: 459153
  Synthetic oligonucleotide

SEQ ID NO: 603935 - DNA, 55 bp, Artificial; identical to SEQ ID NO: 459156
  Synthetic oligonucleotide

SEQ ID NO: 603936 - DNA, 60 bp, Artificial; identical to SEQ ID NO: 459159
  Synthetic oligonucleotide

SEQ ID NO: 603937 - DNA, 60 bp, Artificial; identical to SEQ ID NO: 459160
  Synthetic oligonucleotide

SEQ ID NO: 603938 - DNA, 59 bp, Artificial; identical to SEQ ID NO: 459161
  Synthetic oligonucleotide

SEQ ID NO: 603939 - DNA, 60 bp, Artificial; identical to SEQ ID NO: 459164
  Synthetic oligonucleotide

SEQ ID NO: 603940 - DNA, 55 bp, Artificial; identical to SEQ ID NO: 459165
  Synthetic oligonucleotide

SEQ ID NO: 603941 - DNA, 58 bp, Artificial; identical to SEQ ID NO: 459167
  Synthetic oligonucleotide

SEQ ID NO: 603942 - DNA, 55 bp, Artificial; identical to SEQ ID NO: 459172
  Synthetic oligonucleotide

SEQ ID NO: 603943 - DNA, 60 bp, Artificial; identical to SEQ ID NO: 459175
  Synthetic oligonucleotide

SEQ ID NO: 603944 - DNA, 60 bp, Artificial; identical to SEQ ID NO: 459176
  Synthetic oligonucleotide

SEQ ID NO: 603945 - DNA, 54 bp, Artificial; identical to SEQ ID NO: 459179
  Synthetic oligonucleotide

SEQ ID NO: 603946 - DNA, 60 bp, Artificial; identical to SEQ ID NO: 459180
  Synthetic oligonucleotide

SEQ ID NO: 603947 - DNA, 55 bp, Artificial; identical to SEQ ID NO: 459183
  Synthetic oligonucleotide

SEQ ID NO: 603948 - DNA, 58 bp, Artificial; identical to SEQ ID NO: 459186
  Synthetic oligonucleotide

SEQ ID NO: 603949 - DNA, 53 bp, Artificial; identical to SEQ ID NO: 459189
  Synthetic oligonucleotide

SEQ ID NO: 603950 - DNA, 52 bp, Artificial; identical to SEQ ID NO: 459190
  Synthetic oligonucleotide

SEQ ID NO: 603951 - DNA, 60 bp, Artificial; identical to SEQ ID NO: 459193
  Synthetic oligonucleotide

SEQ ID NO: 603952 - DNA, 55 bp, Artificial; identical to SEQ ID NO: 459195
  Synthetic oligonucleotide

SEQ ID NO: 603953 - DNA, 60 bp, Artificial; identical to SEQ ID NO: 459200
  Synthetic oligonucleotide

SEQ ID NO: 603954 - DNA, 59 bp, Artificial; identical to SEQ ID NO: 459202
  Synthetic oligonucleotide

SEQ ID NO: 603955 - DNA, 51 bp, Artificial; identical to SEQ ID NO: 459203
  Synthetic oligonucleotide

SEQ ID NO: 603956 - DNA, 54 bp, Artificial; identical to SEQ ID NO: 459206
  Synthetic oligonucleotide

SEQ ID NO: 603957 - DNA, 60 bp, Artificial; identical to SEQ ID NO: 459208
  Synthetic oligonucleotide

SEQ ID NO: 603958 - DNA, 60 bp, Artificial; identical to SEQ ID NO: 459210
  Synthetic oligonucleotide

SEQ ID NO: 603959 - DNA, 60 bp, Artificial; identical to SEQ ID NO: 459211
  Synthetic oligonucleotide

SEQ ID NO: 603960 - DNA, 60 bp, Artificial; identical to SEQ ID NO: 9474
  Synthetic oligonucleotide

SEQ ID NO: 603961 - DNA, 56 bp, Artificial; identical to SEQ ID NO: 459216
  Synthetic oligonucleotide

SEQ ID NO: 603962 - DNA, 55 bp, Artificial; identical to SEQ ID NO: 459220
  Synthetic oligonucleotide

SEQ ID NO: 603963 - DNA, 60 bp, Artificial; identical to SEQ ID NO: 459222
  Synthetic oligonucleotide

SEQ ID NO: 603964 - DNA, 55 bp, Artificial; identical to SEQ ID NO: 6324
  Synthetic oligonucleotide

SEQ ID NO: 603965 - DNA, 57 bp, Artificial; identical to SEQ ID NO: 459224
  Synthetic oligonucleotide

SEQ ID NO: 603966 - DNA, 55 bp, Artificial; identical to SEQ ID NO: 459226
  Synthetic oligonucleotide

SEQ ID NO: 603967 - DNA, 54 bp, Artificial; identical to SEQ ID NO: 459231
  Synthetic oligonucleotide

SEQ ID NO: 603968 - DNA, 60 bp, Artificial; identical to SEQ ID NO: 459232
  Synthetic oligonucleotide

SEQ ID NO: 603969 - DNA, 54 bp, Artificial; identical to SEQ ID NO: 459233
  Synthetic oligonucleotide

SEQ ID NO: 603970 - DNA, 54 bp, Artificial; identical to SEQ ID NO: 459234
  Synthetic oligonucleotide

SEQ ID NO: 603971 - DNA, 55 bp, Artificial; identical to SEQ ID NO: 459235
  Synthetic oligonucleotide

SEQ ID NO: 603972 - DNA, 60 bp, Artificial; identical to SEQ ID NO: 459242
  Synthetic oligonucleotide

SEQ ID NO: 603973 - DNA, 55 bp, Artificial; identical to SEQ ID NO: 459243
  Synthetic oligonucleotide

SEQ ID NO: 603974 - DNA, 60 bp, Artificial; identical to SEQ ID NO: 459244
  Synthetic oligonucleotide

SEQ ID NO: 603975 - DNA, 60 bp, Artificial; identical to SEQ ID NO: 459245
  Synthetic oligonucleotide

SEQ ID NO: 603976 - DNA, 60 bp, Artificial; identical to SEQ ID NO: 459246
  Synthetic oligonucleotide

SEQ ID NO: 603977 - DNA, 56 bp, Artificial; identical to SEQ ID NO: 459251
  Synthetic oligonucleotide

SEQ ID NO: 603978 - DNA, 53 bp, Artificial; identical to SEQ ID NO: 459252
  Synthetic oligonucleotide

SEQ ID NO: 603979 - DNA, 59 bp, Artificial; identical to SEQ ID NO: 459253
  Synthetic oligonucleotide

SEQ ID NO: 603980 - DNA, 60 bp, Artificial; identical to SEQ ID NO: 459254
  Synthetic oligonucleotide

SEQ ID NO: 603981 - DNA, 60 bp, Artificial; identical to SEQ ID NO: 459256
  Synthetic oligonucleotide

SEQ ID NO: 603982 - DNA, 60 bp, Artificial; identical to SEQ ID NO: 459269
  Synthetic oligonucleotide

SEQ ID NO: 603983 - DNA, 60 bp, Artificial; identical to SEQ ID NO: 459270
  Synthetic oligonucleotide

SEQ ID NO: 603984 - DNA, 56 bp, Artificial; identical to SEQ ID NO: 459273
  Synthetic oligonucleotide

SEQ ID NO: 603985 - DNA, 59 bp, Artificial; identical to SEQ ID NO: 459275
  Synthetic oligonucleotide

SEQ ID NO: 603986 - DNA, 58 bp, Artificial; identical to SEQ ID NO: 459276
  Synthetic oligonucleotide

SEQ ID NO: 603987 - DNA, 54 bp, Artificial; identical to SEQ ID NO: 459279
  Synthetic oligonucleotide

SEQ ID NO: 603988 - DNA, 60 bp, Artificial; identical to SEQ ID NO: 459281
  Synthetic oligonucleotide

SEQ ID NO: 603989 - DNA, 60 bp, Artificial; identical to SEQ ID NO: 459282
  Synthetic oligonucleotide

SEQ ID NO: 603990 - DNA, 60 bp, Artificial; identical to SEQ ID NO: 459283
  Synthetic oligonucleotide

SEQ ID NO: 603991 - DNA, 60 bp, Artificial; identical to SEQ ID NO: 459284
  Synthetic oligonucleotide

SEQ ID NO: 603992 - DNA, 58 bp, Artificial; identical to SEQ ID NO: 459285
  Synthetic oligonucleotide

SEQ ID NO: 603993 - DNA, 52 bp, Artificial; identical to SEQ ID NO: 459287
  Synthetic oligonucleotide

SEQ ID NO: 603994 - DNA, 60 bp, Artificial; identical to SEQ ID NO: 7839
  Synthetic oligonucleotide

SEQ ID NO: 603995 - DNA, 60 bp, Artificial; identical to SEQ ID NO: 459304
  Synthetic oligonucleotide

SEQ ID NO: 603996 - DNA, 60 bp, Artificial; identical to SEQ ID NO: 459305
  Synthetic oligonucleotide

SEQ ID NO: 603997 - DNA, 60 bp, Artificial; identical to SEQ ID NO: 459306
  Synthetic oligonucleotide

SEQ ID NO: 603998 - DNA, 53 bp, Artificial; identical to SEQ ID NO: 459307
  Synthetic oligonucleotide

SEQ ID NO: 603999 - DNA, 58 bp, Artificial; identical to SEQ ID NO: 459308
  Synthetic oligonucleotide

SEQ ID NO: 604000 - DNA, 57 bp, Artificial; identical to SEQ ID NO: 459309
  Synthetic oligonucleotide

SEQ ID NO: 604001 - DNA, 60 bp, Artificial; identical to SEQ ID NO: 11293
  Synthetic oligonucleotide

SEQ ID NO: 604002 - DNA, 60 bp, Artificial; identical to SEQ ID NO: 459310
  Synthetic oligonucleotide

SEQ ID NO: 604003 - DNA, 60 bp, Artificial; identical to SEQ ID NO: 459311
  Synthetic oligonucleotide

SEQ ID NO: 604004 - DNA, 60 bp, Artificial; identical to SEQ ID NO: 459314
  Synthetic oligonucleotide

SEQ ID NO: 604005 - DNA, 55 bp, Artificial; identical to SEQ ID NO: 459316
  Synthetic oligonucleotide

SEQ ID NO: 604006 - DNA, 58 bp, Artificial; identical to SEQ ID NO: 459317
  Synthetic oligonucleotide

SEQ ID NO: 604007 - DNA, 53 bp, Artificial; identical to SEQ ID NO: 459318
  Synthetic oligonucleotide

SEQ ID NO: 604008 - DNA, 53 bp, Artificial; identical to SEQ ID NO: 459320
  Synthetic oligonucleotide

SEQ ID NO: 604009 - DNA, 60 bp, Artificial; identical to SEQ ID NO: 459321
  Synthetic oligonucleotide

SEQ ID NO: 604010 - DNA, 60 bp, Artificial; identical to SEQ ID NO: 459325
  Synthetic oligonucleotide

SEQ ID NO: 604011 - DNA, 51 bp, Artificial; identical to SEQ ID NO: 459328
  Synthetic oligonucleotide

SEQ ID NO: 604012 - DNA, 59 bp, Artificial; identical to SEQ ID NO: 459331
  Synthetic oligonucleotide

SEQ ID NO: 604013 - DNA, 59 bp, Artificial; identical to SEQ ID NO: 459333
  Synthetic oligonucleotide

SEQ ID NO: 604014 - DNA, 60 bp, Artificial; identical to SEQ ID NO: 459336
  Synthetic oligonucleotide

SEQ ID NO: 604015 - DNA, 60 bp, Artificial; identical to SEQ ID NO: 459337
  Synthetic oligonucleotide

SEQ ID NO: 604016 - DNA, 51 bp, Artificial; identical to SEQ ID NO: 459338
  Synthetic oligonucleotide

SEQ ID NO: 604017 - DNA, 51 bp, Artificial; identical to SEQ ID NO: 459341
  Synthetic oligonucleotide

SEQ ID NO: 604018 - DNA, 60 bp, Artificial; identical to SEQ ID NO: 15799
  Synthetic oligonucleotide

SEQ ID NO: 604019 - DNA, 55 bp, Artificial; identical to SEQ ID NO: 459346
  Synthetic oligonucleotide

SEQ ID NO: 604020 - DNA, 57 bp, Artificial; identical to SEQ ID NO: 459352
  Synthetic oligonucleotide

SEQ ID NO: 604021 - DNA, 55 bp, Artificial; identical to SEQ ID NO: 459353
  Synthetic oligonucleotide

SEQ ID NO: 604022 - DNA, 57 bp, Artificial; identical to SEQ ID NO: 459356
  Synthetic oligonucleotide

SEQ ID NO: 604023 - DNA, 60 bp, Artificial; identical to SEQ ID NO: 459358
  Synthetic oligonucleotide

SEQ ID NO: 604024 - DNA, 57 bp, Artificial; identical to SEQ ID NO: 459359
  Synthetic oligonucleotide

SEQ ID NO: 604025 - DNA, 55 bp, Artificial; identical to SEQ ID NO: 459360
  Synthetic oligonucleotide

SEQ ID NO: 604026 - DNA, 51 bp, Artificial; identical to SEQ ID NO: 459361
  Synthetic oligonucleotide

SEQ ID NO: 604027 - DNA, 60 bp, Artificial; identical to SEQ ID NO: 459364
  Synthetic oligonucleotide

SEQ ID NO: 604028 - DNA, 60 bp, Artificial; identical to SEQ ID NO: 459366
  Synthetic oligonucleotide

SEQ ID NO: 604029 - DNA, 57 bp, Artificial; identical to SEQ ID NO: 459368
  Synthetic oligonucleotide

SEQ ID NO: 604030 - DNA, 57 bp, Artificial; identical to SEQ ID NO: 459369
  Synthetic oligonucleotide

SEQ ID NO: 604031 - DNA, 57 bp, Artificial; identical to SEQ ID NO: 459370
  Synthetic oligonucleotide

SEQ ID NO: 604032 - DNA, 57 bp, Artificial; identical to SEQ ID NO: 459371
  Synthetic oligonucleotide

SEQ ID NO: 604033 - DNA, 55 bp, Artificial; identical to SEQ ID NO: 459374
  Synthetic oligonucleotide

SEQ ID NO: 604034 - DNA, 58 bp, Artificial; identical to SEQ ID NO: 459376
  Synthetic oligonucleotide

SEQ ID NO: 604035 - DNA, 59 bp, Artificial; identical to SEQ ID NO: 459379
  Synthetic oligonucleotide

SEQ ID NO: 604036 - DNA, 60 bp, Artificial; identical to SEQ ID NO: 12422
  Synthetic oligonucleotide

SEQ ID NO: 604037 - DNA, 60 bp, Artificial; identical to SEQ ID NO: 459381
  Synthetic oligonucleotide

SEQ ID NO: 604038 - DNA, 59 bp, Artificial; identical to SEQ ID NO: 459383
  Synthetic oligonucleotide

SEQ ID NO: 604039 - DNA, 57 bp, Artificial; identical to SEQ ID NO: 459394
  Synthetic oligonucleotide

SEQ ID NO: 604040 - DNA, 60 bp, Artificial; identical to SEQ ID NO: 459395
  Synthetic oligonucleotide

SEQ ID NO: 604041 - DNA, 60 bp, Artificial; identical to SEQ ID NO: 459396
  Synthetic oligonucleotide

SEQ ID NO: 604042 - DNA, 53 bp, Artificial; identical to SEQ ID NO: 459397
  Synthetic oligonucleotide

SEQ ID NO: 604043 - DNA, 53 bp, Artificial; identical to SEQ ID NO: 459399
  Synthetic oligonucleotide

SEQ ID NO: 604044 - DNA, 55 bp, Artificial; identical to SEQ ID NO: 11504
  Synthetic oligonucleotide

SEQ ID NO: 604045 - DNA, 51 bp, Artificial; identical to SEQ ID NO: 459401
  Synthetic oligonucleotide

SEQ ID NO: 604046 - DNA, 59 bp, Artificial; identical to SEQ ID NO: 459407
  Synthetic oligonucleotide

SEQ ID NO: 604047 - DNA, 56 bp, Artificial; identical to SEQ ID NO: 459409
  Synthetic oligonucleotide

SEQ ID NO: 604048 - DNA, 54 bp, Artificial; identical to SEQ ID NO: 18758
  Synthetic oligonucleotide

SEQ ID NO: 604049 - DNA, 57 bp, Artificial; identical to SEQ ID NO: 459413
  Synthetic oligonucleotide

SEQ ID NO: 604050 - DNA, 55 bp, Artificial; identical to SEQ ID NO: 459414
  Synthetic oligonucleotide

SEQ ID NO: 604051 - DNA, 50 bp, Artificial; identical to SEQ ID NO: 459416
  Synthetic oligonucleotide

SEQ ID NO: 604052 - DNA, 60 bp, Artificial; identical to SEQ ID NO: 459420
  Synthetic oligonucleotide

SEQ ID NO: 604053 - DNA, 60 bp, Artificial; identical to SEQ ID NO: 459423
  Synthetic oligonucleotide

SEQ ID NO: 604054 - DNA, 55 bp, Artificial; identical to SEQ ID NO: 459425
  Synthetic oligonucleotide

SEQ ID NO: 604055 - DNA, 60 bp, Artificial; identical to SEQ ID NO: 459428
  Synthetic oligonucleotide

SEQ ID NO: 604056 - DNA, 55 bp, Artificial; identical to SEQ ID NO: 459431
  Synthetic oligonucleotide

SEQ ID NO: 604057 - DNA, 56 bp, Artificial; identical to SEQ ID NO: 459434
  Synthetic oligonucleotide

SEQ ID NO: 604058 - DNA, 60 bp, Artificial; identical to SEQ ID NO: 459435
  Synthetic oligonucleotide

SEQ ID NO: 604059 - DNA, 55 bp, Artificial; identical to SEQ ID NO: 459440
  Synthetic oligonucleotide

SEQ ID NO: 604060 - DNA, 60 bp, Artificial; identical to SEQ ID NO: 459441
  Synthetic oligonucleotide

SEQ ID NO: 604061 - DNA, 59 bp, Artificial; identical to SEQ ID NO: 459442
  Synthetic oligonucleotide

SEQ ID NO: 604062 - DNA, 59 bp, Artificial; identical to SEQ ID NO: 459444
  Synthetic oligonucleotide

SEQ ID NO: 604063 - DNA, 60 bp, Artificial; identical to SEQ ID NO: 459445
  Synthetic oligonucleotide

SEQ ID NO: 604064 - DNA, 60 bp, Artificial; identical to SEQ ID NO: 459446
  Synthetic oligonucleotide

SEQ ID NO: 604065 - DNA, 60 bp, Artificial; identical to SEQ ID NO: 459447
  Synthetic oligonucleotide

SEQ ID NO: 604066 - DNA, 55 bp, Artificial; identical to SEQ ID NO: 459449
  Synthetic oligonucleotide

SEQ ID NO: 604067 - DNA, 55 bp, Artificial; identical to SEQ ID NO: 459451
  Synthetic oligonucleotide

SEQ ID NO: 604068 - DNA, 60 bp, Artificial; identical to SEQ ID NO: 459455
  Synthetic oligonucleotide

SEQ ID NO: 604069 - DNA, 60 bp, Artificial; identical to SEQ ID NO: 459457
  Synthetic oligonucleotide

SEQ ID NO: 604070 - DNA, 51 bp, Artificial; identical to SEQ ID NO: 459458
  Synthetic oligonucleotide

SEQ ID NO: 604071 - DNA, 56 bp, Artificial; identical to SEQ ID NO: 459462
  Synthetic oligonucleotide

SEQ ID NO: 604072 - DNA, 60 bp, Artificial; identical to SEQ ID NO: 6576
  Synthetic oligonucleotide

SEQ ID NO: 604073 - DNA, 55 bp, Artificial; identical to SEQ ID NO: 459467
  Synthetic oligonucleotide

SEQ ID NO: 604074 - DNA, 54 bp, Artificial; identical to SEQ ID NO: 16227
  Synthetic oligonucleotide

SEQ ID NO: 604075 - DNA, 57 bp, Artificial; identical to SEQ ID NO: 459472
  Synthetic oligonucleotide

SEQ ID NO: 604076 - DNA, 60 bp, Artificial; identical to SEQ ID NO: 459473
  Synthetic oligonucleotide

SEQ ID NO: 604077 - DNA, 55 bp, Artificial; identical to SEQ ID NO: 459476
  Synthetic oligonucleotide

SEQ ID NO: 604078 - DNA, 60 bp, Artificial; identical to SEQ ID NO: 459486
  Synthetic oligonucleotide

SEQ ID NO: 604079 - DNA, 60 bp, Artificial; identical to SEQ ID NO: 459487
  Synthetic oligonucleotide

SEQ ID NO: 604080 - DNA, 55 bp, Artificial; identical to SEQ ID NO: 459488
  Synthetic oligonucleotide

SEQ ID NO: 604081 - DNA, 58 bp, Artificial; identical to SEQ ID NO: 459491
  Synthetic oligonucleotide

SEQ ID NO: 604082 - DNA, 59 bp, Artificial; identical to SEQ ID NO: 18192
  Synthetic oligonucleotide

SEQ ID NO: 604083 - DNA, 56 bp, Artificial; identical to SEQ ID NO: 459496
  Synthetic oligonucleotide

SEQ ID NO: 604084 - DNA, 57 bp, Artificial; identical to SEQ ID NO: 459500
  Synthetic oligonucleotide

SEQ ID NO: 604085 - DNA, 59 bp, Artificial; identical to SEQ ID NO: 459505
  Synthetic oligonucleotide

SEQ ID NO: 604086 - DNA, 55 bp, Artificial; identical to SEQ ID NO: 459506
  Synthetic oligonucleotide

SEQ ID NO: 604087 - DNA, 54 bp, Artificial; identical to SEQ ID NO: 459507
  Synthetic oligonucleotide

SEQ ID NO: 604088 - DNA, 51 bp, Artificial; identical to SEQ ID NO: 459508
  Synthetic oligonucleotide

SEQ ID NO: 604089 - DNA, 55 bp, Artificial; identical to SEQ ID NO: 459509
  Synthetic oligonucleotide

SEQ ID NO: 604090 - DNA, 55 bp, Artificial; identical to SEQ ID NO: 459510
  Synthetic oligonucleotide

SEQ ID NO: 604091 - DNA, 55 bp, Artificial; identical to SEQ ID NO: 459511
  Synthetic oligonucleotide

SEQ ID NO: 604092 - DNA, 51 bp, Artificial; identical to SEQ ID NO: 459512
  Synthetic oligonucleotide

SEQ ID NO: 604093 - DNA, 52 bp, Artificial; identical to SEQ ID NO: 459513
  Synthetic oligonucleotide

SEQ ID NO: 604094 - DNA, 60 bp, Artificial; identical to SEQ ID NO: 459520
  Synthetic oligonucleotide

SEQ ID NO: 604095 - DNA, 56 bp, Artificial; identical to SEQ ID NO: 459521
  Synthetic oligonucleotide

SEQ ID NO: 604096 - DNA, 55 bp, Artificial; identical to SEQ ID NO: 459523
  Synthetic oligonucleotide

SEQ ID NO: 604097 - DNA, 57 bp, Artificial; identical to SEQ ID NO: 459527
  Synthetic oligonucleotide

SEQ ID NO: 604098 - DNA, 59 bp, Artificial; identical to SEQ ID NO: 459531
  Synthetic oligonucleotide

SEQ ID NO: 604099 - DNA, 57 bp, Artificial; identical to SEQ ID NO: 459535
  Synthetic oligonucleotide

SEQ ID NO: 604100 - DNA, 60 bp, Artificial; identical to SEQ ID NO: 459536
  Synthetic oligonucleotide

SEQ ID NO: 604101 - DNA, 60 bp, Artificial; identical to SEQ ID NO: 459540
  Synthetic oligonucleotide

SEQ ID NO: 604102 - DNA, 55 bp, Artificial; identical to SEQ ID NO: 459546
  Synthetic oligonucleotide

SEQ ID NO: 604103 - DNA, 60 bp, Artificial; identical to SEQ ID NO: 12508
  Synthetic oligonucleotide

SEQ ID NO: 604104 - DNA, 60 bp, Artificial; identical to SEQ ID NO: 459549
  Synthetic oligonucleotide

SEQ ID NO: 604105 - DNA, 54 bp, Artificial; identical to SEQ ID NO: 459550
  Synthetic oligonucleotide

SEQ ID NO: 604106 - DNA, 57 bp, Artificial; identical to SEQ ID NO: 459553
  Synthetic oligonucleotide

SEQ ID NO: 604107 - DNA, 60 bp, Artificial; identical to SEQ ID NO: 459554
  Synthetic oligonucleotide

SEQ ID NO: 604108 - DNA, 59 bp, Artificial; identical to SEQ ID NO: 459555
  Synthetic oligonucleotide

SEQ ID NO: 604109 - DNA, 58 bp, Artificial; identical to SEQ ID NO: 17346
  Synthetic oligonucleotide

SEQ ID NO: 604110 - DNA, 53 bp, Artificial; identical to SEQ ID NO: 459566
  Synthetic oligonucleotide

SEQ ID NO: 604111 - DNA, 60 bp, Artificial; identical to SEQ ID NO: 459569
  Synthetic oligonucleotide

SEQ ID NO: 604112 - DNA, 55 bp, Artificial; identical to SEQ ID NO: 459570
  Synthetic oligonucleotide

SEQ ID NO: 604113 - DNA, 53 bp, Artificial; identical to SEQ ID NO: 459571
  Synthetic oligonucleotide

SEQ ID NO: 604114 - DNA, 59 bp, Artificial; identical to SEQ ID NO: 9753
  Synthetic oligonucleotide

SEQ ID NO: 604115 - DNA, 60 bp, Artificial; identical to SEQ ID NO: 459573
  Synthetic oligonucleotide

SEQ ID NO: 604116 - DNA, 54 bp, Artificial; identical to SEQ ID NO: 18677
  Synthetic oligonucleotide

SEQ ID NO: 604117 - DNA, 55 bp, Artificial; identical to SEQ ID NO: 459576
  Synthetic oligonucleotide

SEQ ID NO: 604118 - DNA, 55 bp, Artificial; identical to SEQ ID NO: 459577
  Synthetic oligonucleotide

SEQ ID NO: 604119 - DNA, 55 bp, Artificial; identical to SEQ ID NO: 459578
  Synthetic oligonucleotide

SEQ ID NO: 604120 - DNA, 54 bp, Artificial; identical to SEQ ID NO: 459580
  Synthetic oligonucleotide

SEQ ID NO: 604121 - DNA, 59 bp, Artificial; identical to SEQ ID NO: 459582
  Synthetic oligonucleotide

SEQ ID NO: 604122 - DNA, 60 bp, Artificial; identical to SEQ ID NO: 459583
  Synthetic oligonucleotide

SEQ ID NO: 604123 - DNA, 56 bp, Artificial; identical to SEQ ID NO: 459585
  Synthetic oligonucleotide

SEQ ID NO: 604124 - DNA, 57 bp, Artificial; identical to SEQ ID NO: 459589
  Synthetic oligonucleotide

SEQ ID NO: 604125 - DNA, 55 bp, Artificial; identical to SEQ ID NO: 459590
  Synthetic oligonucleotide

SEQ ID NO: 604126 - DNA, 60 bp, Artificial; identical to SEQ ID NO: 459592
  Synthetic oligonucleotide

SEQ ID NO: 604127 - DNA, 55 bp, Artificial; identical to SEQ ID NO: 459593
  Synthetic oligonucleotide

SEQ ID NO: 604128 - DNA, 51 bp, Artificial; identical to SEQ ID NO: 459594
  Synthetic oligonucleotide

SEQ ID NO: 604129 - DNA, 59 bp, Artificial; identical to SEQ ID NO: 459597
  Synthetic oligonucleotide

SEQ ID NO: 604130 - DNA, 55 bp, Artificial; identical to SEQ ID NO: 459601
  Synthetic oligonucleotide

SEQ ID NO: 604131 - DNA, 57 bp, Artificial; identical to SEQ ID NO: 459604
  Synthetic oligonucleotide

SEQ ID NO: 604132 - DNA, 54 bp, Artificial; identical to SEQ ID NO: 459606
  Synthetic oligonucleotide

SEQ ID NO: 604133 - DNA, 54 bp, Artificial; identical to SEQ ID NO: 459610
  Synthetic oligonucleotide

SEQ ID NO: 604134 - DNA, 52 bp, Artificial; identical to SEQ ID NO: 459612
  Synthetic oligonucleotide

SEQ ID NO: 604135 - DNA, 56 bp, Artificial; identical to SEQ ID NO: 459614
  Synthetic oligonucleotide

SEQ ID NO: 604136 - DNA, 58 bp, Artificial; identical to SEQ ID NO: 459615
  Synthetic oligonucleotide

SEQ ID NO: 604137 - DNA, 54 bp, Artificial; identical to SEQ ID NO: 459617
  Synthetic oligonucleotide

SEQ ID NO: 604138 - DNA, 54 bp, Artificial; identical to SEQ ID NO: 459623
  Synthetic oligonucleotide

SEQ ID NO: 604139 - DNA, 56 bp, Artificial; identical to SEQ ID NO: 459624
  Synthetic oligonucleotide

SEQ ID NO: 604140 - DNA, 54 bp, Artificial; identical to SEQ ID NO: 459627
  Synthetic oligonucleotide

SEQ ID NO: 604141 - DNA, 60 bp, Artificial; identical to SEQ ID NO: 459628
  Synthetic oligonucleotide

SEQ ID NO: 604142 - DNA, 56 bp, Artificial; identical to SEQ ID NO: 459629
  Synthetic oligonucleotide

SEQ ID NO: 604143 - DNA, 54 bp, Artificial; identical to SEQ ID NO: 459630
  Synthetic oligonucleotide

SEQ ID NO: 604144 - DNA, 56 bp, Artificial; identical to SEQ ID NO: 459631
  Synthetic oligonucleotide

SEQ ID NO: 604145 - DNA, 56 bp, Artificial; identical to SEQ ID NO: 459633
  Synthetic oligonucleotide

SEQ ID NO: 604146 - DNA, 53 bp, Artificial; identical to SEQ ID NO: 459635
  Synthetic oligonucleotide

SEQ ID NO: 604147 - DNA, 55 bp, Artificial; identical to SEQ ID NO: 459638
  Synthetic oligonucleotide

SEQ ID NO: 604148 - DNA, 55 bp, Artificial; identical to SEQ ID NO: 459641
  Synthetic oligonucleotide

SEQ ID NO: 604149 - DNA, 55 bp, Artificial; identical to SEQ ID NO: 459645
  Synthetic oligonucleotide

SEQ ID NO: 604150 - DNA, 57 bp, Artificial; identical to SEQ ID NO: 459646
  Synthetic oligonucleotide

SEQ ID NO: 604151 - DNA, 57 bp, Artificial; identical to SEQ ID NO: 459647
  Synthetic oligonucleotide

SEQ ID NO: 604152 - DNA, 53 bp, Artificial; identical to SEQ ID NO: 459649
  Synthetic oligonucleotide

SEQ ID NO: 604153 - DNA, 55 bp, Artificial; identical to SEQ ID NO: 459651
  Synthetic oligonucleotide

SEQ ID NO: 604154 - DNA, 53 bp, Artificial; identical to SEQ ID NO: 459653
  Synthetic oligonucleotide

SEQ ID NO: 604155 - DNA, 60 bp, Artificial; identical to SEQ ID NO: 459655
  Synthetic oligonucleotide

SEQ ID NO: 604156 - DNA, 53 bp, Artificial; identical to SEQ ID NO: 459663
  Synthetic oligonucleotide

SEQ ID NO: 604157 - DNA, 54 bp, Artificial; identical to SEQ ID NO: 459664
  Synthetic oligonucleotide

SEQ ID NO: 604158 - DNA, 58 bp, Artificial; identical to SEQ ID NO: 459665
  Synthetic oligonucleotide

SEQ ID NO: 604159 - DNA, 57 bp, Artificial; identical to SEQ ID NO: 459667
  Synthetic oligonucleotide

SEQ ID NO: 604160 - DNA, 55 bp, Artificial; identical to SEQ ID NO: 459671
  Synthetic oligonucleotide

SEQ ID NO: 604161 - DNA, 57 bp, Artificial; identical to SEQ ID NO: 20262
  Synthetic oligonucleotide

SEQ ID NO: 604162 - DNA, 57 bp, Artificial; identical to SEQ ID NO: 459674
  Synthetic oligonucleotide

SEQ ID NO: 604163 - DNA, 60 bp, Artificial; identical to SEQ ID NO: 459677
  Synthetic oligonucleotide

SEQ ID NO: 604164 - DNA, 50 bp, Artificial; identical to SEQ ID NO: 459680
  Synthetic oligonucleotide

SEQ ID NO: 604165 - DNA, 60 bp, Artificial; identical to SEQ ID NO: 459682
  Synthetic oligonucleotide

SEQ ID NO: 604166 - DNA, 54 bp, Artificial; identical to SEQ ID NO: 13568
  Synthetic oligonucleotide

SEQ ID NO: 604167 - DNA, 52 bp, Artificial; identical to SEQ ID NO: 459688
  Synthetic oligonucleotide

SEQ ID NO: 604168 - DNA, 56 bp, Artificial; identical to SEQ ID NO: 459690
  Synthetic oligonucleotide

SEQ ID NO: 604169 - DNA, 54 bp, Artificial; identical to SEQ ID NO: 459691
  Synthetic oligonucleotide

SEQ ID NO: 604170 - DNA, 55 bp, Artificial; identical to SEQ ID NO: 459692
  Synthetic oligonucleotide

SEQ ID NO: 604171 - DNA, 55 bp, Artificial; identical to SEQ ID NO: 459698
  Synthetic oligonucleotide

SEQ ID NO: 604172 - DNA, 60 bp, Artificial; identical to SEQ ID NO: 459700
  Synthetic oligonucleotide

SEQ ID NO: 604173 - DNA, 60 bp, Artificial; identical to SEQ ID NO: 459701
  Synthetic oligonucleotide

SEQ ID NO: 604174 - DNA, 52 bp, Artificial; identical to SEQ ID NO: 459702
  Synthetic oligonucleotide

SEQ ID NO: 604175 - DNA, 54 bp, Artificial; identical to SEQ ID NO: 459703
  Synthetic oligonucleotide

SEQ ID NO: 604176 - DNA, 51 bp, Artificial; identical to SEQ ID NO: 459705
  Synthetic oligonucleotide

SEQ ID NO: 604177 - DNA, 55 bp, Artificial; identical to SEQ ID NO: 459706
  Synthetic oligonucleotide

SEQ ID NO: 604178 - DNA, 58 bp, Artificial; identical to SEQ ID NO: 459709
  Synthetic oligonucleotide

SEQ ID NO: 604179 - DNA, 59 bp, Artificial; identical to SEQ ID NO: 459712
  Synthetic oligonucleotide

SEQ ID NO: 604180 - DNA, 60 bp, Artificial; identical to SEQ ID NO: 459713
  Synthetic oligonucleotide

SEQ ID NO: 604181 - DNA, 60 bp, Artificial; identical to SEQ ID NO: 459714
  Synthetic oligonucleotide

SEQ ID NO: 604182 - DNA, 55 bp, Artificial; identical to SEQ ID NO: 459717
  Synthetic oligonucleotide

SEQ ID NO: 604183 - DNA, 60 bp, Artificial; identical to SEQ ID NO: 459725
  Synthetic oligonucleotide

SEQ ID NO: 604184 - DNA, 55 bp, Artificial; identical to SEQ ID NO: 459731
  Synthetic oligonucleotide

SEQ ID NO: 604185 - DNA, 60 bp, Artificial; identical to SEQ ID NO: 5946
  Synthetic oligonucleotide

SEQ ID NO: 604186 - DNA, 60 bp, Artificial; identical to SEQ ID NO: 459734
  Synthetic oligonucleotide

SEQ ID NO: 604187 - DNA, 59 bp, Artificial; identical to SEQ ID NO: 17379
  Synthetic oligonucleotide

SEQ ID NO: 604188 - DNA, 60 bp, Artificial; identical to SEQ ID NO: 459741
  Synthetic oligonucleotide

SEQ ID NO: 604189 - DNA, 58 bp, Artificial; identical to SEQ ID NO: 459742
  Synthetic oligonucleotide

SEQ ID NO: 604190 - DNA, 58 bp, Artificial; identical to SEQ ID NO: 459743
  Synthetic oligonucleotide

SEQ ID NO: 604191 - DNA, 60 bp, Artificial; identical to SEQ ID NO: 459744
  Synthetic oligonucleotide

SEQ ID NO: 604192 - DNA, 51 bp, Artificial; identical to SEQ ID NO: 459747
  Synthetic oligonucleotide

SEQ ID NO: 604193 - DNA, 51 bp, Artificial; identical to SEQ ID NO: 459751
  Synthetic oligonucleotide

SEQ ID NO: 604194 - DNA, 55 bp, Artificial; identical to SEQ ID NO: 459752
  Synthetic oligonucleotide

SEQ ID NO: 604195 - DNA, 60 bp, Artificial; identical to SEQ ID NO: 459753
  Synthetic oligonucleotide

SEQ ID NO: 604196 - DNA, 57 bp, Artificial; identical to SEQ ID NO: 459756
  Synthetic oligonucleotide

SEQ ID NO: 604197 - DNA, 60 bp, Artificial; identical to SEQ ID NO: 459757
  Synthetic oligonucleotide

SEQ ID NO: 604198 - DNA, 59 bp, Artificial; identical to SEQ ID NO: 459758
  Synthetic oligonucleotide

SEQ ID NO: 604199 - DNA, 60 bp, Artificial; identical to SEQ ID NO: 459762
  Synthetic oligonucleotide

SEQ ID NO: 604200 - DNA, 60 bp, Artificial; identical to SEQ ID NO: 459763
  Synthetic oligonucleotide

SEQ ID NO: 604201 - DNA, 55 bp, Artificial; identical to SEQ ID NO: 459769
  Synthetic oligonucleotide

SEQ ID NO: 604202 - DNA, 59 bp, Artificial; identical to SEQ ID NO: 459770
  Synthetic oligonucleotide

SEQ ID NO: 604203 - DNA, 58 bp, Artificial; identical to SEQ ID NO: 15792
  Synthetic oligonucleotide

SEQ ID NO: 604204 - DNA, 51 bp, Artificial; identical to SEQ ID NO: 459774
  Synthetic oligonucleotide

SEQ ID NO: 604205 - DNA, 55 bp, Artificial; identical to SEQ ID NO: 459775
  Synthetic oligonucleotide

SEQ ID NO: 604206 - DNA, 60 bp, Artificial; identical to SEQ ID NO: 459777
  Synthetic oligonucleotide

SEQ ID NO: 604207 - DNA, 57 bp, Artificial; identical to SEQ ID NO: 459783
  Synthetic oligonucleotide

SEQ ID NO: 604208 - DNA, 60 bp, Artificial; identical to SEQ ID NO: 459785
  Synthetic oligonucleotide

SEQ ID NO: 604209 - DNA, 56 bp, Artificial; identical to SEQ ID NO: 459791
  Synthetic oligonucleotide

SEQ ID NO: 604210 - DNA, 55 bp, Artificial; identical to SEQ ID NO: 459795
  Synthetic oligonucleotide

SEQ ID NO: 604211 - DNA, 60 bp, Artificial; identical to SEQ ID NO: 459797
  Synthetic oligonucleotide

SEQ ID NO: 604212 - DNA, 53 bp, Artificial; identical to SEQ ID NO: 16498
  Synthetic oligonucleotide

SEQ ID NO: 604213 - DNA, 54 bp, Artificial; identical to SEQ ID NO: 459801
  Synthetic oligonucleotide

SEQ ID NO: 604214 - DNA, 60 bp, Artificial; identical to SEQ ID NO: 459803
  Synthetic oligonucleotide

SEQ ID NO: 604215 - DNA, 55 bp, Artificial; identical to SEQ ID NO: 459805
  Synthetic oligonucleotide

SEQ ID NO: 604216 - DNA, 60 bp, Artificial; identical to SEQ ID NO: 459807
  Synthetic oligonucleotide

SEQ ID NO: 604217 - DNA, 60 bp, Artificial; identical to SEQ ID NO: 459808
  Synthetic oligonucleotide

SEQ ID NO: 604218 - DNA, 60 bp, Artificial; identical to SEQ ID NO: 459811
  Synthetic oligonucleotide

SEQ ID NO: 604219 - DNA, 57 bp, Artificial; identical to SEQ ID NO: 459812
  Synthetic oligonucleotide

SEQ ID NO: 604220 - DNA, 60 bp, Artificial; identical to SEQ ID NO: 459813
  Synthetic oligonucleotide

SEQ ID NO: 604221 - DNA, 60 bp, Artificial; identical to SEQ ID NO: 459816
  Synthetic oligonucleotide

SEQ ID NO: 604222 - DNA, 53 bp, Artificial; identical to SEQ ID NO: 459817
  Synthetic oligonucleotide

SEQ ID NO: 604223 - DNA, 57 bp, Artificial; identical to SEQ ID NO: 14962
  Synthetic oligonucleotide

SEQ ID NO: 604224 - DNA, 57 bp, Artificial; identical to SEQ ID NO: 459818
  Synthetic oligonucleotide

SEQ ID NO: 604225 - DNA, 57 bp, Artificial; identical to SEQ ID NO: 459824
  Synthetic oligonucleotide

SEQ ID NO: 604226 - DNA, 55 bp, Artificial; identical to SEQ ID NO: 459825
  Synthetic oligonucleotide

SEQ ID NO: 604227 - DNA, 55 bp, Artificial; identical to SEQ ID NO: 459826
  Synthetic oligonucleotide

SEQ ID NO: 604228 - DNA, 56 bp, Artificial; identical to SEQ ID NO: 459827
  Synthetic oligonucleotide

SEQ ID NO: 604229 - DNA, 57 bp, Artificial; identical to SEQ ID NO: 459829
  Synthetic oligonucleotide

SEQ ID NO: 604230 - DNA, 57 bp, Artificial; identical to SEQ ID NO: 459830
  Synthetic oligonucleotide

SEQ ID NO: 604231 - DNA, 55 bp, Artificial; identical to SEQ ID NO: 459832
  Synthetic oligonucleotide

SEQ ID NO: 604232 - DNA, 60 bp, Artificial; identical to SEQ ID NO: 459833
  Synthetic oligonucleotide

SEQ ID NO: 604233 - DNA, 60 bp, Artificial; identical to SEQ ID NO: 459840
  Synthetic oligonucleotide

SEQ ID NO: 604234 - DNA, 55 bp, Artificial; identical to SEQ ID NO: 459841
  Synthetic oligonucleotide

SEQ ID NO: 604235 - DNA, 60 bp, Artificial; identical to SEQ ID NO: 28863
  Synthetic oligonucleotide

SEQ ID NO: 604236 - DNA, 60 bp, Artificial; identical to SEQ ID NO: 459847
  Synthetic oligonucleotide

SEQ ID NO: 604237 - DNA, 60 bp, Artificial; identical to SEQ ID NO: 459848
  Synthetic oligonucleotide

SEQ ID NO: 604238 - DNA, 60 bp, Artificial; identical to SEQ ID NO: 459850
  Synthetic oligonucleotide

SEQ ID NO: 604239 - DNA, 60 bp, Artificial; identical to SEQ ID NO: 459853
  Synthetic oligonucleotide

SEQ ID NO: 604240 - DNA, 59 bp, Artificial; identical to SEQ ID NO: 459854
  Synthetic oligonucleotide

SEQ ID NO: 604241 - DNA, 59 bp, Artificial; identical to SEQ ID NO: 459856
  Synthetic oligonucleotide

SEQ ID NO: 604242 - DNA, 53 bp, Artificial; identical to SEQ ID NO: 459859
  Synthetic oligonucleotide

SEQ ID NO: 604243 - DNA, 55 bp, Artificial; identical to SEQ ID NO: 459865
  Synthetic oligonucleotide

SEQ ID NO: 604244 - DNA, 60 bp, Artificial; identical to SEQ ID NO: 459866
  Synthetic oligonucleotide

SEQ ID NO: 604245 - DNA, 57 bp, Artificial; identical to SEQ ID NO: 459867
  Synthetic oligonucleotide

SEQ ID NO: 604246 - DNA, 52 bp, Artificial; identical to SEQ ID NO: 459870
  Synthetic oligonucleotide

SEQ ID NO: 604247 - DNA, 58 bp, Artificial; identical to SEQ ID NO: 459875
  Synthetic oligonucleotide

SEQ ID NO: 604248 - DNA, 59 bp, Artificial; identical to SEQ ID NO: 19225
  Synthetic oligonucleotide

SEQ ID NO: 604249 - DNA, 60 bp, Artificial; identical to SEQ ID NO: 459878
  Synthetic oligonucleotide

SEQ ID NO: 604250 - DNA, 58 bp, Artificial; identical to SEQ ID NO: 459884
  Synthetic oligonucleotide

SEQ ID NO: 604251 - DNA, 60 bp, Artificial; identical to SEQ ID NO: 459885
  Synthetic oligonucleotide

SEQ ID NO: 604252 - DNA, 55 bp, Artificial; identical to SEQ ID NO: 459886
  Synthetic oligonucleotide

SEQ ID NO: 604253 - DNA, 60 bp, Artificial; identical to SEQ ID NO: 459888
  Synthetic oligonucleotide

SEQ ID NO: 604254 - DNA, 51 bp, Artificial; identical to SEQ ID NO: 459889
  Synthetic oligonucleotide

SEQ ID NO: 604255 - DNA, 60 bp, Artificial; identical to SEQ ID NO: 459892
  Synthetic oligonucleotide

SEQ ID NO: 604256 - DNA, 60 bp, Artificial; identical to SEQ ID NO: 9548
  Synthetic oligonucleotide

SEQ ID NO: 604257 - DNA, 60 bp, Artificial; identical to SEQ ID NO: 459895
  Synthetic oligonucleotide

SEQ ID NO: 604258 - DNA, 53 bp, Artificial; identical to SEQ ID NO: 459899
  Synthetic oligonucleotide

SEQ ID NO: 604259 - DNA, 57 bp, Artificial; identical to SEQ ID NO: 459900
  Synthetic oligonucleotide

SEQ ID NO: 604260 - DNA, 60 bp, Artificial; identical to SEQ ID NO: 459904
  Synthetic oligonucleotide

SEQ ID NO: 604261 - DNA, 53 bp, Artificial; identical to SEQ ID NO: 459906
  Synthetic oligonucleotide

SEQ ID NO: 604262 - DNA, 59 bp, Artificial; identical to SEQ ID NO: 459909
  Synthetic oligonucleotide

SEQ ID NO: 604263 - DNA, 55 bp, Artificial; identical to SEQ ID NO: 459920
  Synthetic oligonucleotide

SEQ ID NO: 604264 - DNA, 60 bp, Artificial; identical to SEQ ID NO: 459928
  Synthetic oligonucleotide

SEQ ID NO: 604265 - DNA, 60 bp, Artificial; identical to SEQ ID NO: 459931
  Synthetic oligonucleotide

SEQ ID NO: 604266 - DNA, 60 bp, Artificial; identical to SEQ ID NO: 459932
  Synthetic oligonucleotide

SEQ ID NO: 604267 - DNA, 53 bp, Artificial; identical to SEQ ID NO: 459934
  Synthetic oligonucleotide

SEQ ID NO: 604268 - DNA, 53 bp, Artificial; identical to SEQ ID NO: 459937
  Synthetic oligonucleotide

SEQ ID NO: 604269 - DNA, 54 bp, Artificial; identical to SEQ ID NO: 459945
  Synthetic oligonucleotide

SEQ ID NO: 604270 - DNA, 59 bp, Artificial; identical to SEQ ID NO: 459953
  Synthetic oligonucleotide

SEQ ID NO: 604271 - DNA, 52 bp, Artificial; identical to SEQ ID NO: 459954
  Synthetic oligonucleotide

SEQ ID NO: 604272 - DNA, 58 bp, Artificial; identical to SEQ ID NO: 459955
  Synthetic oligonucleotide

SEQ ID NO: 604273 - DNA, 57 bp, Artificial; identical to SEQ ID NO: 459958
  Synthetic oligonucleotide

SEQ ID NO: 604274 - DNA, 52 bp, Artificial; identical to SEQ ID NO: 459960
  Synthetic oligonucleotide

SEQ ID NO: 604275 - DNA, 60 bp, Artificial; identical to SEQ ID NO: 459965
  Synthetic oligonucleotide

SEQ ID NO: 604276 - DNA, 60 bp, Artificial; identical to SEQ ID NO: 459966
  Synthetic oligonucleotide

SEQ ID NO: 604277 - DNA, 60 bp, Artificial; identical to SEQ ID NO: 14237
  Synthetic oligonucleotide

SEQ ID NO: 604278 - DNA, 60 bp, Artificial; identical to SEQ ID NO: 459969
  Synthetic oligonucleotide

SEQ ID NO: 604279 - DNA, 58 bp, Artificial; identical to SEQ ID NO: 459972
  Synthetic oligonucleotide

SEQ ID NO: 604280 - DNA, 58 bp, Artificial; identical to SEQ ID NO: 459973
  Synthetic oligonucleotide

SEQ ID NO: 604281 - DNA, 55 bp, Artificial; identical to SEQ ID NO: 459974
  Synthetic oligonucleotide

SEQ ID NO: 604282 - DNA, 58 bp, Artificial; identical to SEQ ID NO: 459980
  Synthetic oligonucleotide

SEQ ID NO: 604283 - DNA, 53 bp, Artificial; identical to SEQ ID NO: 459982
  Synthetic oligonucleotide

SEQ ID NO: 604284 - DNA, 57 bp, Artificial; identical to SEQ ID NO: 459983
  Synthetic oligonucleotide

SEQ ID NO: 604285 - DNA, 55 bp, Artificial; identical to SEQ ID NO: 459984
  Synthetic oligonucleotide

SEQ ID NO: 604286 - DNA, 55 bp, Artificial; identical to SEQ ID NO: 459985
  Synthetic oligonucleotide

SEQ ID NO: 604287 - DNA, 60 bp, Artificial; identical to SEQ ID NO: 11553
  Synthetic oligonucleotide

SEQ ID NO: 604288 - DNA, 60 bp, Artificial; identical to SEQ ID NO: 459987
  Synthetic oligonucleotide

SEQ ID NO: 604289 - DNA, 55 bp, Artificial; identical to SEQ ID NO: 459991
  Synthetic oligonucleotide

SEQ ID NO: 604290 - DNA, 60 bp, Artificial; identical to SEQ ID NO: 459995
  Synthetic oligonucleotide

SEQ ID NO: 604291 - DNA, 60 bp, Artificial; identical to SEQ ID NO: 459997
  Synthetic oligonucleotide

SEQ ID NO: 604292 - DNA, 55 bp, Artificial; identical to SEQ ID NO: 459999
  Synthetic oligonucleotide

SEQ ID NO: 604293 - DNA, 55 bp, Artificial; identical to SEQ ID NO: 460005
  Synthetic oligonucleotide

SEQ ID NO: 604294 - DNA, 57 bp, Artificial; identical to SEQ ID NO: 460007
  Synthetic oligonucleotide

SEQ ID NO: 604295 - DNA, 50 bp, Artificial; identical to SEQ ID NO: 460008
  Synthetic oligonucleotide

SEQ ID NO: 604296 - DNA, 56 bp, Artificial; identical to SEQ ID NO: 460009
  Synthetic oligonucleotide

SEQ ID NO: 604297 - DNA, 55 bp, Artificial; identical to SEQ ID NO: 460013
  Synthetic oligonucleotide

SEQ ID NO: 604298 - DNA, 51 bp, Artificial; identical to SEQ ID NO: 460014
  Synthetic oligonucleotide

SEQ ID NO: 604299 - DNA, 51 bp, Artificial; identical to SEQ ID NO: 460015
  Synthetic oligonucleotide

SEQ ID NO: 604300 - DNA, 57 bp, Artificial; identical to SEQ ID NO: 460017
  Synthetic oligonucleotide

SEQ ID NO: 604301 - DNA, 60 bp, Artificial; identical to SEQ ID NO: 460019
  Synthetic oligonucleotide

SEQ ID NO: 604302 - DNA, 60 bp, Artificial; identical to SEQ ID NO: 460022
  Synthetic oligonucleotide

SEQ ID NO: 604303 - DNA, 52 bp, Artificial; identical to SEQ ID NO: 460023
  Synthetic oligonucleotide

SEQ ID NO: 604304 - DNA, 57 bp, Artificial; identical to SEQ ID NO: 460024
  Synthetic oligonucleotide

SEQ ID NO: 604305 - DNA, 56 bp, Artificial; identical to SEQ ID NO: 460027
  Synthetic oligonucleotide

SEQ ID NO: 604306 - DNA, 51 bp, Artificial; identical to SEQ ID NO: 18903
  Synthetic oligonucleotide

SEQ ID NO: 604307 - DNA, 60 bp, Artificial; identical to SEQ ID NO: 460029
  Synthetic oligonucleotide

SEQ ID NO: 604308 - DNA, 56 bp, Artificial; identical to SEQ ID NO: 460030
  Synthetic oligonucleotide

SEQ ID NO: 604309 - DNA, 60 bp, Artificial; identical to SEQ ID NO: 460034
  Synthetic oligonucleotide

SEQ ID NO: 604310 - DNA, 54 bp, Artificial; identical to SEQ ID NO: 460035
  Synthetic oligonucleotide

SEQ ID NO: 604311 - DNA, 60 bp, Artificial; identical to SEQ ID NO: 460037
  Synthetic oligonucleotide

SEQ ID NO: 604312 - DNA, 60 bp, Artificial; identical to SEQ ID NO: 460043
  Synthetic oligonucleotide

SEQ ID NO: 604313 - DNA, 57 bp, Artificial; identical to SEQ ID NO: 460051
  Synthetic oligonucleotide

SEQ ID NO: 604314 - DNA, 60 bp, Artificial; identical to SEQ ID NO: 460054
  Synthetic oligonucleotide

SEQ ID NO: 604315 - DNA, 58 bp, Artificial; identical to SEQ ID NO: 460056
  Synthetic oligonucleotide

SEQ ID NO: 604316 - DNA, 58 bp, Artificial; identical to SEQ ID NO: 460073
  Synthetic oligonucleotide

SEQ ID NO: 604317 - DNA, 58 bp, Artificial; identical to SEQ ID NO: 460075
  Synthetic oligonucleotide

SEQ ID NO: 604318 - DNA, 60 bp, Artificial; identical to SEQ ID NO: 460078
  Synthetic oligonucleotide

SEQ ID NO: 604319 - DNA, 59 bp, Artificial; identical to SEQ ID NO: 460081
  Synthetic oligonucleotide

SEQ ID NO: 604320 - DNA, 54 bp, Artificial; identical to SEQ ID NO: 460084
  Synthetic oligonucleotide

SEQ ID NO: 604321 - DNA, 60 bp, Artificial; identical to SEQ ID NO: 460085
  Synthetic oligonucleotide

SEQ ID NO: 604322 - DNA, 50 bp, Artificial; identical to SEQ ID NO: 460086
  Synthetic oligonucleotide

SEQ ID NO: 604323 - DNA, 58 bp, Artificial; identical to SEQ ID NO: 460090
  Synthetic oligonucleotide

SEQ ID NO: 604324 - DNA, 55 bp, Artificial; identical to SEQ ID NO: 460094
  Synthetic oligonucleotide

SEQ ID NO: 604325 - DNA, 57 bp, Artificial; identical to SEQ ID NO: 16489
  Synthetic oligonucleotide

SEQ ID NO: 604326 - DNA, 60 bp, Artificial; identical to SEQ ID NO: 460098
  Synthetic oligonucleotide

SEQ ID NO: 604327 - DNA, 51 bp, Artificial; identical to SEQ ID NO: 460099
  Synthetic oligonucleotide

SEQ ID NO: 604328 - DNA, 55 bp, Artificial; identical to SEQ ID NO: 460100
  Synthetic oligonucleotide

SEQ ID NO: 604329 - DNA, 55 bp, Artificial; identical to SEQ ID NO: 460106
  Synthetic oligonucleotide

SEQ ID NO: 604330 - DNA, 55 bp, Artificial; identical to SEQ ID NO: 460107
  Synthetic oligonucleotide

SEQ ID NO: 604331 - DNA, 60 bp, Artificial; identical to SEQ ID NO: 460109
  Synthetic oligonucleotide

SEQ ID NO: 604332 - DNA, 55 bp, Artificial; identical to SEQ ID NO: 460111
  Synthetic oligonucleotide

SEQ ID NO: 604333 - DNA, 58 bp, Artificial; identical to SEQ ID NO: 460117
  Synthetic oligonucleotide

SEQ ID NO: 604334 - DNA, 60 bp, Artificial; identical to SEQ ID NO: 12771
  Synthetic oligonucleotide

SEQ ID NO: 604335 - DNA, 52 bp, Artificial; identical to SEQ ID NO: 460127
  Synthetic oligonucleotide

SEQ ID NO: 604336 - DNA, 60 bp, Artificial; identical to SEQ ID NO: 460128
  Synthetic oligonucleotide

SEQ ID NO: 604337 - DNA, 53 bp, Artificial; identical to SEQ ID NO: 460130
  Synthetic oligonucleotide

SEQ ID NO: 604338 - DNA, 60 bp, Artificial; identical to SEQ ID NO: 460135
  Synthetic oligonucleotide

SEQ ID NO: 604339 - DNA, 55 bp, Artificial; identical to SEQ ID NO: 460136
  Synthetic oligonucleotide

SEQ ID NO: 604340 - DNA, 60 bp, Artificial; identical to SEQ ID NO: 460137
  Synthetic oligonucleotide

SEQ ID NO: 604341 - DNA, 57 bp, Artificial; identical to SEQ ID NO: 460143
  Synthetic oligonucleotide

SEQ ID NO: 604342 - DNA, 55 bp, Artificial; identical to SEQ ID NO: 460148
  Synthetic oligonucleotide

SEQ ID NO: 604343 - DNA, 51 bp, Artificial; identical to SEQ ID NO: 18728
  Synthetic oligonucleotide

SEQ ID NO: 604344 - DNA, 54 bp, Artificial; identical to SEQ ID NO: 460152
  Synthetic oligonucleotide

SEQ ID NO: 604345 - DNA, 60 bp, Artificial; identical to SEQ ID NO: 460156
  Synthetic oligonucleotide

SEQ ID NO: 604346 - DNA, 56 bp, Artificial; identical to SEQ ID NO: 460157
  Synthetic oligonucleotide

SEQ ID NO: 604347 - DNA, 53 bp, Artificial; identical to SEQ ID NO: 460160
  Synthetic oligonucleotide

SEQ ID NO: 604348 - DNA, 56 bp, Artificial; identical to SEQ ID NO: 460161
  Synthetic oligonucleotide

SEQ ID NO: 604349 - DNA, 56 bp, Artificial; identical to SEQ ID NO: 460163
  Synthetic oligonucleotide

SEQ ID NO: 604350 - DNA, 54 bp, Artificial; identical to SEQ ID NO: 460166
  Synthetic oligonucleotide

SEQ ID NO: 604351 - DNA, 51 bp, Artificial; identical to SEQ ID NO: 460167
  Synthetic oligonucleotide

SEQ ID NO: 604352 - DNA, 58 bp, Artificial; identical to SEQ ID NO: 460168
  Synthetic oligonucleotide

SEQ ID NO: 604353 - DNA, 53 bp, Artificial; identical to SEQ ID NO: 460173
  Synthetic oligonucleotide

SEQ ID NO: 604354 - DNA, 60 bp, Artificial; identical to SEQ ID NO: 460178
  Synthetic oligonucleotide

SEQ ID NO: 604355 - DNA, 52 bp, Artificial; identical to SEQ ID NO: 460180
  Synthetic oligonucleotide

SEQ ID NO: 604356 - DNA, 56 bp, Artificial; identical to SEQ ID NO: 460181
  Synthetic oligonucleotide

SEQ ID NO: 604357 - DNA, 58 bp, Artificial; identical to SEQ ID NO: 460184
  Synthetic oligonucleotide

SEQ ID NO: 604358 - DNA, 57 bp, Artificial; identical to SEQ ID NO: 460186
  Synthetic oligonucleotide

SEQ ID NO: 604359 - DNA, 60 bp, Artificial; identical to SEQ ID NO: 8031
  Synthetic oligonucleotide

SEQ ID NO: 604360 - DNA, 59 bp, Artificial; identical to SEQ ID NO: 460188
  Synthetic oligonucleotide

SEQ ID NO: 604361 - DNA, 60 bp, Artificial; identical to SEQ ID NO: 460190
  Synthetic oligonucleotide

SEQ ID NO: 604362 - DNA, 60 bp, Artificial; identical to SEQ ID NO: 460197
  Synthetic oligonucleotide

SEQ ID NO: 604363 - DNA, 60 bp, Artificial; identical to SEQ ID NO: 13515
  Synthetic oligonucleotide

SEQ ID NO: 604364 - DNA, 53 bp, Artificial; identical to SEQ ID NO: 460212
  Synthetic oligonucleotide

SEQ ID NO: 604365 - DNA, 56 bp, Artificial; identical to SEQ ID NO: 460213
  Synthetic oligonucleotide

SEQ ID NO: 604366 - DNA, 60 bp, Artificial; identical to SEQ ID NO: 460214
  Synthetic oligonucleotide

SEQ ID NO: 604367 - DNA, 60 bp, Artificial; identical to SEQ ID NO: 460215
  Synthetic oligonucleotide

SEQ ID NO: 604368 - DNA, 55 bp, Artificial; identical to SEQ ID NO: 460217
  Synthetic oligonucleotide

SEQ ID NO: 604369 - DNA, 56 bp, Artificial; identical to SEQ ID NO: 460218
  Synthetic oligonucleotide

SEQ ID NO: 604370 - DNA, 59 bp, Artificial; identical to SEQ ID NO: 460219
  Synthetic oligonucleotide

SEQ ID NO: 604371 - DNA, 50 bp, Artificial; identical to SEQ ID NO: 460225
  Synthetic oligonucleotide

SEQ ID NO: 604372 - DNA, 60 bp, Artificial; identical to SEQ ID NO: 460228
  Synthetic oligonucleotide

SEQ ID NO: 604373 - DNA, 53 bp, Artificial; identical to SEQ ID NO: 460229
  Synthetic oligonucleotide

SEQ ID NO: 604374 - DNA, 60 bp, Artificial; identical to SEQ ID NO: 460230
  Synthetic oligonucleotide

SEQ ID NO: 604375 - DNA, 56 bp, Artificial; identical to SEQ ID NO: 460233
  Synthetic oligonucleotide

SEQ ID NO: 604376 - DNA, 60 bp, Artificial; identical to SEQ ID NO: 460239
  Synthetic oligonucleotide

SEQ ID NO: 604377 - DNA, 60 bp, Artificial; identical to SEQ ID NO: 460240
  Synthetic oligonucleotide

SEQ ID NO: 604378 - DNA, 50 bp, Artificial; identical to SEQ ID NO: 460244
  Synthetic oligonucleotide

SEQ ID NO: 604379 - DNA, 55 bp, Artificial; identical to SEQ ID NO: 460246
  Synthetic oligonucleotide

SEQ ID NO: 604380 - DNA, 60 bp, Artificial; identical to SEQ ID NO: 460247
  Synthetic oligonucleotide

SEQ ID NO: 604381 - DNA, 59 bp, Artificial; identical to SEQ ID NO: 460248
  Synthetic oligonucleotide

SEQ ID NO: 604382 - DNA, 55 bp, Artificial; identical to SEQ ID NO: 460249
  Synthetic oligonucleotide

SEQ ID NO: 604383 - DNA, 50 bp, Artificial; identical to SEQ ID NO: 460252
  Synthetic oligonucleotide

SEQ ID NO: 604384 - DNA, 60 bp, Artificial; identical to SEQ ID NO: 460256
  Synthetic oligonucleotide

SEQ ID NO: 604385 - DNA, 55 bp, Artificial; identical to SEQ ID NO: 460258
  Synthetic oligonucleotide

SEQ ID NO: 604386 - DNA, 60 bp, Artificial; identical to SEQ ID NO: 460268
  Synthetic oligonucleotide

SEQ ID NO: 604387 - DNA, 55 bp, Artificial; identical to SEQ ID NO: 460269
  Synthetic oligonucleotide

SEQ ID NO: 604388 - DNA, 60 bp, Artificial; identical to SEQ ID NO: 460272
  Synthetic oligonucleotide

SEQ ID NO: 604389 - DNA, 58 bp, Artificial; identical to SEQ ID NO: 460276
  Synthetic oligonucleotide

SEQ ID NO: 604390 - DNA, 58 bp, Artificial; identical to SEQ ID NO: 460277
  Synthetic oligonucleotide

SEQ ID NO: 604391 - DNA, 59 bp, Artificial; identical to SEQ ID NO: 460278
  Synthetic oligonucleotide

SEQ ID NO: 604392 - DNA, 50 bp, Artificial; identical to SEQ ID NO: 460279
  Synthetic oligonucleotide

SEQ ID NO: 604393 - DNA, 59 bp, Artificial; identical to SEQ ID NO: 460280
  Synthetic oligonucleotide

SEQ ID NO: 604394 - DNA, 53 bp, Artificial; identical to SEQ ID NO: 460281
  Synthetic oligonucleotide

SEQ ID NO: 604395 - DNA, 55 bp, Artificial; identical to SEQ ID NO: 460283
  Synthetic oligonucleotide

SEQ ID NO: 604396 - DNA, 60 bp, Artificial; identical to SEQ ID NO: 460284
  Synthetic oligonucleotide

SEQ ID NO: 604397 - DNA, 57 bp, Artificial; identical to SEQ ID NO: 460288
  Synthetic oligonucleotide

SEQ ID NO: 604398 - DNA, 57 bp, Artificial; identical to SEQ ID NO: 460290
  Synthetic oligonucleotide

SEQ ID NO: 604399 - DNA, 56 bp, Artificial; identical to SEQ ID NO: 460291
  Synthetic oligonucleotide

SEQ ID NO: 604400 - DNA, 58 bp, Artificial; identical to SEQ ID NO: 460295
  Synthetic oligonucleotide

SEQ ID NO: 604401 - DNA, 51 bp, Artificial; identical to SEQ ID NO: 460298
  Synthetic oligonucleotide

SEQ ID NO: 604402 - DNA, 57 bp, Artificial; identical to SEQ ID NO: 17801
  Synthetic oligonucleotide

SEQ ID NO: 604403 - DNA, 55 bp, Artificial; identical to SEQ ID NO: 460302
  Synthetic oligonucleotide

SEQ ID NO: 604404 - DNA, 60 bp, Artificial; identical to SEQ ID NO: 460305
  Synthetic oligonucleotide

SEQ ID NO: 604405 - DNA, 60 bp, Artificial; identical to SEQ ID NO: 460307
  Synthetic oligonucleotide

SEQ ID NO: 604406 - DNA, 52 bp, Artificial; identical to SEQ ID NO: 460308
  Synthetic oligonucleotide

SEQ ID NO: 604407 - DNA, 59 bp, Artificial; identical to SEQ ID NO: 460315
  Synthetic oligonucleotide

SEQ ID NO: 604408 - DNA, 55 bp, Artificial; identical to SEQ ID NO: 9542
  Synthetic oligonucleotide

SEQ ID NO: 604409 - DNA, 50 bp, Artificial; identical to SEQ ID NO: 6506
  Synthetic oligonucleotide

SEQ ID NO: 604410 - DNA, 55 bp, Artificial; identical to SEQ ID NO: 460316
  Synthetic oligonucleotide

SEQ ID NO: 604411 - DNA, 50 bp, Artificial; identical to SEQ ID NO: 460317
  Synthetic oligonucleotide

SEQ ID NO: 604412 - DNA, 53 bp, Artificial; identical to SEQ ID NO: 460325
  Synthetic oligonucleotide

SEQ ID NO: 604413 - DNA, 50 bp, Artificial; identical to SEQ ID NO: 460326
  Synthetic oligonucleotide

SEQ ID NO: 604414 - DNA, 55 bp, Artificial; identical to SEQ ID NO: 460329
  Synthetic oligonucleotide

SEQ ID NO: 604415 - DNA, 52 bp, Artificial; identical to SEQ ID NO: 460331
  Synthetic oligonucleotide

SEQ ID NO: 604416 - DNA, 56 bp, Artificial; identical to SEQ ID NO: 10414
  Synthetic oligonucleotide

SEQ ID NO: 604417 - DNA, 55 bp, Artificial; identical to SEQ ID NO: 460334
  Synthetic oligonucleotide

SEQ ID NO: 604418 - DNA, 57 bp, Artificial; identical to SEQ ID NO: 460335
  Synthetic oligonucleotide

SEQ ID NO: 604419 - DNA, 50 bp, Artificial; identical to SEQ ID NO: 460336
  Synthetic oligonucleotide

SEQ ID NO: 604420 - DNA, 59 bp, Artificial; identical to SEQ ID NO: 460338
  Synthetic oligonucleotide

SEQ ID NO: 604421 - DNA, 60 bp, Artificial; identical to SEQ ID NO: 460340
  Synthetic oligonucleotide

SEQ ID NO: 604422 - DNA, 58 bp, Artificial; identical to SEQ ID NO: 460342
  Synthetic oligonucleotide

SEQ ID NO: 604423 - DNA, 56 bp, Artificial; identical to SEQ ID NO: 20033
  Synthetic oligonucleotide

SEQ ID NO: 604424 - DNA, 58 bp, Artificial; identical to SEQ ID NO: 460344
  Synthetic oligonucleotide

SEQ ID NO: 604425 - DNA, 55 bp, Artificial; identical to SEQ ID NO: 460347
  Synthetic oligonucleotide

SEQ ID NO: 604426 - DNA, 60 bp, Artificial; identical to SEQ ID NO: 460349
  Synthetic oligonucleotide

SEQ ID NO: 604427 - DNA, 56 bp, Artificial; identical to SEQ ID NO: 460350
  Synthetic oligonucleotide

SEQ ID NO: 604428 - DNA, 55 bp, Artificial; identical to SEQ ID NO: 460351
  Synthetic oligonucleotide

SEQ ID NO: 604429 - DNA, 60 bp, Artificial; identical to SEQ ID NO: 460353
  Synthetic oligonucleotide

SEQ ID NO: 604430 - DNA, 59 bp, Artificial; identical to SEQ ID NO: 460359
  Synthetic oligonucleotide

SEQ ID NO: 604431 - DNA, 60 bp, Artificial; identical to SEQ ID NO: 8016
  Synthetic oligonucleotide

SEQ ID NO: 604432 - DNA, 54 bp, Artificial; identical to SEQ ID NO: 460360
  Synthetic oligonucleotide

SEQ ID NO: 604433 - DNA, 60 bp, Artificial; identical to SEQ ID NO: 460361
  Synthetic oligonucleotide

SEQ ID NO: 604434 - DNA, 51 bp, Artificial; identical to SEQ ID NO: 460362
  Synthetic oligonucleotide

SEQ ID NO: 604435 - DNA, 60 bp, Artificial; identical to SEQ ID NO: 460363
  Synthetic oligonucleotide

SEQ ID NO: 604436 - DNA, 57 bp, Artificial; identical to SEQ ID NO: 460364
  Synthetic oligonucleotide

SEQ ID NO: 604437 - DNA, 55 bp, Artificial; identical to SEQ ID NO: 460366
  Synthetic oligonucleotide

SEQ ID NO: 604438 - DNA, 55 bp, Artificial; identical to SEQ ID NO: 460368
  Synthetic oligonucleotide

SEQ ID NO: 604439 - DNA, 54 bp, Artificial; identical to SEQ ID NO: 460370
  Synthetic oligonucleotide

SEQ ID NO: 604440 - DNA, 55 bp, Artificial; identical to SEQ ID NO: 460372
  Synthetic oligonucleotide

SEQ ID NO: 604441 - DNA, 55 bp, Artificial; identical to SEQ ID NO: 460373
  Synthetic oligonucleotide

SEQ ID NO: 604442 - DNA, 55 bp, Artificial; identical to SEQ ID NO: 460374
  Synthetic oligonucleotide

SEQ ID NO: 604443 - DNA, 55 bp, Artificial; identical to SEQ ID NO: 460375
  Synthetic oligonucleotide

SEQ ID NO: 604444 - DNA, 60 bp, Artificial; identical to SEQ ID NO: 460377
  Synthetic oligonucleotide

SEQ ID NO: 604445 - DNA, 60 bp, Artificial; identical to SEQ ID NO: 460385
  Synthetic oligonucleotide

SEQ ID NO: 604446 - DNA, 55 bp, Artificial; identical to SEQ ID NO: 460389
  Synthetic oligonucleotide

SEQ ID NO: 604447 - DNA, 59 bp, Artificial; identical to SEQ ID NO: 16174
  Synthetic oligonucleotide

SEQ ID NO: 604448 - DNA, 60 bp, Artificial; identical to SEQ ID NO: 460390
  Synthetic oligonucleotide

SEQ ID NO: 604449 - DNA, 52 bp, Artificial; identical to SEQ ID NO: 460392
  Synthetic oligonucleotide

SEQ ID NO: 604450 - DNA, 60 bp, Artificial; identical to SEQ ID NO: 460393
  Synthetic oligonucleotide

SEQ ID NO: 604451 - DNA, 55 bp, Artificial; identical to SEQ ID NO: 460396
  Synthetic oligonucleotide

SEQ ID NO: 604452 - DNA, 60 bp, Artificial; identical to SEQ ID NO: 460398
  Synthetic oligonucleotide

SEQ ID NO: 604453 - DNA, 59 bp, Artificial; identical to SEQ ID NO: 460399
  Synthetic oligonucleotide

SEQ ID NO: 604454 - DNA, 60 bp, Artificial; identical to SEQ ID NO: 460404
  Synthetic oligonucleotide

SEQ ID NO: 604455 - DNA, 60 bp, Artificial; identical to SEQ ID NO: 460406
  Synthetic oligonucleotide

SEQ ID NO: 604456 - DNA, 60 bp, Artificial; identical to SEQ ID NO: 460408
  Synthetic oligonucleotide

SEQ ID NO: 604457 - DNA, 50 bp, Artificial; identical to SEQ ID NO: 460412
  Synthetic oligonucleotide

SEQ ID NO: 604458 - DNA, 60 bp, Artificial; identical to SEQ ID NO: 460420
  Synthetic oligonucleotide

SEQ ID NO: 604459 - DNA, 59 bp, Artificial; identical to SEQ ID NO: 460423
  Synthetic oligonucleotide

SEQ ID NO: 604460 - DNA, 60 bp, Artificial; identical to SEQ ID NO: 460425
  Synthetic oligonucleotide

SEQ ID NO: 604461 - DNA, 59 bp, Artificial; identical to SEQ ID NO: 460431
  Synthetic oligonucleotide

SEQ ID NO: 604462 - DNA, 53 bp, Artificial; identical to SEQ ID NO: 460432
  Synthetic oligonucleotide

SEQ ID NO: 604463 - DNA, 55 bp, Artificial; identical to SEQ ID NO: 460435
  Synthetic oligonucleotide

SEQ ID NO: 604464 - DNA, 60 bp, Artificial; identical to SEQ ID NO: 460436
  Synthetic oligonucleotide

SEQ ID NO: 604465 - DNA, 58 bp, Artificial; identical to SEQ ID NO: 460439
  Synthetic oligonucleotide

SEQ ID NO: 604466 - DNA, 55 bp, Artificial; identical to SEQ ID NO: 460442
  Synthetic oligonucleotide

SEQ ID NO: 604467 - DNA, 55 bp, Artificial; identical to SEQ ID NO: 460444
  Synthetic oligonucleotide

SEQ ID NO: 604468 - DNA, 54 bp, Artificial; identical to SEQ ID NO: 460449
  Synthetic oligonucleotide

SEQ ID NO: 604469 - DNA, 56 bp, Artificial; identical to SEQ ID NO: 19138
  Synthetic oligonucleotide

SEQ ID NO: 604470 - DNA, 57 bp, Artificial; identical to SEQ ID NO: 460452
  Synthetic oligonucleotide

SEQ ID NO: 604471 - DNA, 52 bp, Artificial; identical to SEQ ID NO: 460454
  Synthetic oligonucleotide

SEQ ID NO: 604472 - DNA, 55 bp, Artificial; identical to SEQ ID NO: 460456
  Synthetic oligonucleotide

SEQ ID NO: 604473 - DNA, 55 bp, Artificial; identical to SEQ ID NO: 460457
  Synthetic oligonucleotide

SEQ ID NO: 604474 - DNA, 55 bp, Artificial; identical to SEQ ID NO: 460458
  Synthetic oligonucleotide

SEQ ID NO: 604475 - DNA, 60 bp, Artificial; identical to SEQ ID NO: 460460
  Synthetic oligonucleotide

SEQ ID NO: 604476 - DNA, 60 bp, Artificial; identical to SEQ ID NO: 460462
  Synthetic oligonucleotide

SEQ ID NO: 604477 - DNA, 58 bp, Artificial; identical to SEQ ID NO: 460469
  Synthetic oligonucleotide

SEQ ID NO: 604478 - DNA, 60 bp, Artificial; identical to SEQ ID NO: 460471
  Synthetic oligonucleotide

SEQ ID NO: 604479 - DNA, 55 bp, Artificial; identical to SEQ ID NO: 460474
  Synthetic oligonucleotide

SEQ ID NO: 604480 - DNA, 60 bp, Artificial; identical to SEQ ID NO: 460475
  Synthetic oligonucleotide

SEQ ID NO: 604481 - DNA, 55 bp, Artificial; identical to SEQ ID NO: 460482
  Synthetic oligonucleotide

SEQ ID NO: 604482 - DNA, 60 bp, Artificial; identical to SEQ ID NO: 460484
  Synthetic oligonucleotide

SEQ ID NO: 604483 - DNA, 53 bp, Artificial; identical to SEQ ID NO: 16287
  Synthetic oligonucleotide

SEQ ID NO: 604484 - DNA, 60 bp, Artificial; identical to SEQ ID NO: 460488
  Synthetic oligonucleotide

SEQ ID NO: 604485 - DNA, 58 bp, Artificial; identical to SEQ ID NO: 460489
  Synthetic oligonucleotide

SEQ ID NO: 604486 - DNA, 55 bp, Artificial; identical to SEQ ID NO: 460490
  Synthetic oligonucleotide

SEQ ID NO: 604487 - DNA, 53 bp, Artificial; identical to SEQ ID NO: 460494
  Synthetic oligonucleotide

SEQ ID NO: 604488 - DNA, 55 bp, Artificial; identical to SEQ ID NO: 460497
  Synthetic oligonucleotide

SEQ ID NO: 604489 - DNA, 57 bp, Artificial; identical to SEQ ID NO: 460500
  Synthetic oligonucleotide

SEQ ID NO: 604490 - DNA, 54 bp, Artificial; identical to SEQ ID NO: 460501
  Synthetic oligonucleotide

SEQ ID NO: 604491 - DNA, 60 bp, Artificial; identical to SEQ ID NO: 460502
  Synthetic oligonucleotide

SEQ ID NO: 604492 - DNA, 60 bp, Artificial; identical to SEQ ID NO: 460503
  Synthetic oligonucleotide

SEQ ID NO: 604493 - DNA, 60 bp, Artificial; identical to SEQ ID NO: 460505
  Synthetic oligonucleotide

SEQ ID NO: 604494 - DNA, 55 bp, Artificial; identical to SEQ ID NO: 460507
  Synthetic oligonucleotide

SEQ ID NO: 604495 - DNA, 60 bp, Artificial; identical to SEQ ID NO: 460508
  Synthetic oligonucleotide

SEQ ID NO: 604496 - DNA, 59 bp, Artificial; identical to SEQ ID NO: 18535
  Synthetic oligonucleotide

SEQ ID NO: 604497 - DNA, 53 bp, Artificial; identical to SEQ ID NO: 460515
  Synthetic oligonucleotide

SEQ ID NO: 604498 - DNA, 55 bp, Artificial; identical to SEQ ID NO: 460517
  Synthetic oligonucleotide

SEQ ID NO: 604499 - DNA, 56 bp, Artificial; identical to SEQ ID NO: 460518
  Synthetic oligonucleotide

SEQ ID NO: 604500 - DNA, 60 bp, Artificial; identical to SEQ ID NO: 460520
  Synthetic oligonucleotide

SEQ ID NO: 604501 - DNA, 58 bp, Artificial; identical to SEQ ID NO: 460526
  Synthetic oligonucleotide

SEQ ID NO: 604502 - DNA, 55 bp, Artificial; identical to SEQ ID NO: 460527
  Synthetic oligonucleotide

SEQ ID NO: 604503 - DNA, 60 bp, Artificial; identical to SEQ ID NO: 460537
  Synthetic oligonucleotide

SEQ ID NO: 604504 - DNA, 55 bp, Artificial; identical to SEQ ID NO: 460539
  Synthetic oligonucleotide

SEQ ID NO: 604505 - DNA, 55 bp, Artificial; identical to SEQ ID NO: 460540
  Synthetic oligonucleotide

SEQ ID NO: 604506 - DNA, 60 bp, Artificial; identical to SEQ ID NO: 460541
  Synthetic oligonucleotide

SEQ ID NO: 604507 - DNA, 57 bp, Artificial; identical to SEQ ID NO: 460543
  Synthetic oligonucleotide

SEQ ID NO: 604508 - DNA, 52 bp, Artificial; identical to SEQ ID NO: 460544
  Synthetic oligonucleotide

SEQ ID NO: 604509 - DNA, 55 bp, Artificial; identical to SEQ ID NO: 460545
  Synthetic oligonucleotide

SEQ ID NO: 604510 - DNA, 60 bp, Artificial; identical to SEQ ID NO: 460547
  Synthetic oligonucleotide

SEQ ID NO: 604511 - DNA, 60 bp, Artificial; identical to SEQ ID NO: 460548
  Synthetic oligonucleotide

SEQ ID NO: 604512 - DNA, 60 bp, Artificial; identical to SEQ ID NO: 460549
  Synthetic oligonucleotide

SEQ ID NO: 604513 - DNA, 51 bp, Artificial; identical to SEQ ID NO: 460554
  Synthetic oligonucleotide

SEQ ID NO: 604514 - DNA, 60 bp, Artificial; identical to SEQ ID NO: 460557
  Synthetic oligonucleotide

SEQ ID NO: 604515 - DNA, 57 bp, Artificial; identical to SEQ ID NO: 460562
  Synthetic oligonucleotide

SEQ ID NO: 604516 - DNA, 58 bp, Artificial; identical to SEQ ID NO: 460563
  Synthetic oligonucleotide

SEQ ID NO: 604517 - DNA, 60 bp, Artificial; identical to SEQ ID NO: 460565
  Synthetic oligonucleotide

SEQ ID NO: 604518 - DNA, 56 bp, Artificial; identical to SEQ ID NO: 460566
  Synthetic oligonucleotide

SEQ ID NO: 604519 - DNA, 59 bp, Artificial; identical to SEQ ID NO: 17226
  Synthetic oligonucleotide

SEQ ID NO: 604520 - DNA, 60 bp, Artificial; identical to SEQ ID NO: 460567
  Synthetic oligonucleotide

SEQ ID NO: 604521 - DNA, 60 bp, Artificial; identical to SEQ ID NO: 460571
  Synthetic oligonucleotide

SEQ ID NO: 604522 - DNA, 60 bp, Artificial; identical to SEQ ID NO: 460572
  Synthetic oligonucleotide

SEQ ID NO: 604523 - DNA, 60 bp, Artificial; identical to SEQ ID NO: 11095
  Synthetic oligonucleotide

SEQ ID NO: 604524 - DNA, 54 bp, Artificial; identical to SEQ ID NO: 460574
  Synthetic oligonucleotide

SEQ ID NO: 604525 - DNA, 57 bp, Artificial; identical to SEQ ID NO: 460577
  Synthetic oligonucleotide

SEQ ID NO: 604526 - DNA, 60 bp, Artificial; identical to SEQ ID NO: 460578
  Synthetic oligonucleotide

SEQ ID NO: 604527 - DNA, 58 bp, Artificial; identical to SEQ ID NO: 460584
  Synthetic oligonucleotide

SEQ ID NO: 604528 - DNA, 55 bp, Artificial; identical to SEQ ID NO: 460585
  Synthetic oligonucleotide

SEQ ID NO: 604529 - DNA, 60 bp, Artificial; identical to SEQ ID NO: 460586
  Synthetic oligonucleotide

SEQ ID NO: 604530 - DNA, 60 bp, Artificial; identical to SEQ ID NO: 460589
  Synthetic oligonucleotide

SEQ ID NO: 604531 - DNA, 60 bp, Artificial; identical to SEQ ID NO: 460590
  Synthetic oligonucleotide

SEQ ID NO: 604532 - DNA, 55 bp, Artificial; identical to SEQ ID NO: 460591
  Synthetic oligonucleotide

SEQ ID NO: 604533 - DNA, 60 bp, Artificial; identical to SEQ ID NO: 460594
  Synthetic oligonucleotide

SEQ ID NO: 604534 - DNA, 55 bp, Artificial; identical to SEQ ID NO: 460595
  Synthetic oligonucleotide

SEQ ID NO: 604535 - DNA, 60 bp, Artificial; identical to SEQ ID NO: 460596
  Synthetic oligonucleotide

SEQ ID NO: 604536 - DNA, 60 bp, Artificial; identical to SEQ ID NO: 460597
  Synthetic oligonucleotide

SEQ ID NO: 604537 - DNA, 60 bp, Artificial; identical to SEQ ID NO: 460598
  Synthetic oligonucleotide

SEQ ID NO: 604538 - DNA, 60 bp, Artificial; identical to SEQ ID NO: 460600
  Synthetic oligonucleotide

SEQ ID NO: 604539 - DNA, 60 bp, Artificial; identical to SEQ ID NO: 460601
  Synthetic oligonucleotide

SEQ ID NO: 604540 - DNA, 52 bp, Artificial; identical to SEQ ID NO: 460602
  Synthetic oligonucleotide

SEQ ID NO: 604541 - DNA, 55 bp, Artificial; identical to SEQ ID NO: 460603
  Synthetic oligonucleotide

SEQ ID NO: 604542 - DNA, 57 bp, Artificial; identical to SEQ ID NO: 460608
  Synthetic oligonucleotide

SEQ ID NO: 604543 - DNA, 58 bp, Artificial; identical to SEQ ID NO: 460615
  Synthetic oligonucleotide

SEQ ID NO: 604544 - DNA, 57 bp, Artificial; identical to SEQ ID NO: 460616
  Synthetic oligonucleotide

SEQ ID NO: 604545 - DNA, 58 bp, Artificial; identical to SEQ ID NO: 7502
  Synthetic oligonucleotide

SEQ ID NO: 604546 - DNA, 60 bp, Artificial; identical to SEQ ID NO: 14405
  Synthetic oligonucleotide

SEQ ID NO: 604547 - DNA, 57 bp, Artificial; identical to SEQ ID NO: 460621
  Synthetic oligonucleotide

SEQ ID NO: 604548 - DNA, 51 bp, Artificial; identical to SEQ ID NO: 460624
  Synthetic oligonucleotide

SEQ ID NO: 604549 - DNA, 55 bp, Artificial; identical to SEQ ID NO: 460626
  Synthetic oligonucleotide

SEQ ID NO: 604550 - DNA, 51 bp, Artificial; identical to SEQ ID NO: 6149
  Synthetic oligonucleotide

SEQ ID NO: 604551 - DNA, 54 bp, Artificial; identical to SEQ ID NO: 460631
  Synthetic oligonucleotide

SEQ ID NO: 604552 - DNA, 57 bp, Artificial; identical to SEQ ID NO: 460634
  Synthetic oligonucleotide

SEQ ID NO: 604553 - DNA, 57 bp, Artificial; identical to SEQ ID NO: 460635
  Synthetic oligonucleotide

SEQ ID NO: 604554 - DNA, 55 bp, Artificial; identical to SEQ ID NO: 460639
  Synthetic oligonucleotide

SEQ ID NO: 604555 - DNA, 60 bp, Artificial; identical to SEQ ID NO: 460643
  Synthetic oligonucleotide

SEQ ID NO: 604556 - DNA, 60 bp, Artificial; identical to SEQ ID NO: 460644
  Synthetic oligonucleotide

SEQ ID NO: 604557 - DNA, 59 bp, Artificial; identical to SEQ ID NO: 460645
  Synthetic oligonucleotide

SEQ ID NO: 604558 - DNA, 59 bp, Artificial; identical to SEQ ID NO: 460646
  Synthetic oligonucleotide

SEQ ID NO: 604559 - DNA, 60 bp, Artificial; identical to SEQ ID NO: 460650
  Synthetic oligonucleotide

SEQ ID NO: 604560 - DNA, 58 bp, Artificial; identical to SEQ ID NO: 460651
  Synthetic oligonucleotide

SEQ ID NO: 604561 - DNA, 60 bp, Artificial; identical to SEQ ID NO: 460655
  Synthetic oligonucleotide

SEQ ID NO: 604562 - DNA, 60 bp, Artificial; identical to SEQ ID NO: 460657
  Synthetic oligonucleotide

SEQ ID NO: 604563 - DNA, 60 bp, Artificial; identical to SEQ ID NO: 460658
  Synthetic oligonucleotide

SEQ ID NO: 604564 - DNA, 59 bp, Artificial; identical to SEQ ID NO: 460660
  Synthetic oligonucleotide

SEQ ID NO: 604565 - DNA, 53 bp, Artificial; identical to SEQ ID NO: 460662
  Synthetic oligonucleotide

SEQ ID NO: 604566 - DNA, 60 bp, Artificial; identical to SEQ ID NO: 11133
  Synthetic oligonucleotide

SEQ ID NO: 604567 - DNA, 60 bp, Artificial; identical to SEQ ID NO: 460664
  Synthetic oligonucleotide

SEQ ID NO: 604568 - DNA, 60 bp, Artificial; identical to SEQ ID NO: 460666
  Synthetic oligonucleotide

SEQ ID NO: 604569 - DNA, 57 bp, Artificial; identical to SEQ ID NO: 460668
  Synthetic oligonucleotide

SEQ ID NO: 604570 - DNA, 60 bp, Artificial; identical to SEQ ID NO: 460669
  Synthetic oligonucleotide

SEQ ID NO: 604571 - DNA, 55 bp, Artificial; identical to SEQ ID NO: 460671
  Synthetic oligonucleotide

SEQ ID NO: 604572 - DNA, 55 bp, Artificial; identical to SEQ ID NO: 460672
  Synthetic oligonucleotide

SEQ ID NO: 604573 - DNA, 56 bp, Artificial; identical to SEQ ID NO: 460674
  Synthetic oligonucleotide

SEQ ID NO: 604574 - DNA, 54 bp, Artificial; identical to SEQ ID NO: 460676
  Synthetic oligonucleotide

SEQ ID NO: 604575 - DNA, 60 bp, Artificial; identical to SEQ ID NO: 460677
  Synthetic oligonucleotide

SEQ ID NO: 604576 - DNA, 60 bp, Artificial; identical to SEQ ID NO: 460678
  Synthetic oligonucleotide

SEQ ID NO: 604577 - DNA, 60 bp, Artificial; identical to SEQ ID NO: 460680
  Synthetic oligonucleotide

SEQ ID NO: 604578 - DNA, 55 bp, Artificial; identical to SEQ ID NO: 460683
  Synthetic oligonucleotide

SEQ ID NO: 604579 - DNA, 57 bp, Artificial; identical to SEQ ID NO: 460685
  Synthetic oligonucleotide

SEQ ID NO: 604580 - DNA, 59 bp, Artificial; identical to SEQ ID NO: 460691
  Synthetic oligonucleotide

SEQ ID NO: 604581 - DNA, 59 bp, Artificial; identical to SEQ ID NO: 460692
  Synthetic oligonucleotide

SEQ ID NO: 604582 - DNA, 60 bp, Artificial; identical to SEQ ID NO: 460694
  Synthetic oligonucleotide

SEQ ID NO: 604583 - DNA, 60 bp, Artificial; identical to SEQ ID NO: 460695
  Synthetic oligonucleotide

SEQ ID NO: 604584 - DNA, 60 bp, Artificial; identical to SEQ ID NO: 460697
  Synthetic oligonucleotide

SEQ ID NO: 604585 - DNA, 60 bp, Artificial; identical to SEQ ID NO: 460704
  Synthetic oligonucleotide

SEQ ID NO: 604586 - DNA, 57 bp, Artificial; identical to SEQ ID NO: 460707
  Synthetic oligonucleotide

SEQ ID NO: 604587 - DNA, 60 bp, Artificial; identical to SEQ ID NO: 460713
  Synthetic oligonucleotide

SEQ ID NO: 604588 - DNA, 55 bp, Artificial; identical to SEQ ID NO: 460714
  Synthetic oligonucleotide

SEQ ID NO: 604589 - DNA, 53 bp, Artificial; identical to SEQ ID NO: 460717
  Synthetic oligonucleotide

SEQ ID NO: 604590 - DNA, 51 bp, Artificial; identical to SEQ ID NO: 460719
  Synthetic oligonucleotide

SEQ ID NO: 604591 - DNA, 60 bp, Artificial; identical to SEQ ID NO: 460722
  Synthetic oligonucleotide

SEQ ID NO: 604592 - DNA, 58 bp, Artificial; identical to SEQ ID NO: 460723
  Synthetic oligonucleotide

SEQ ID NO: 604593 - DNA, 57 bp, Artificial; identical to SEQ ID NO: 460724
  Synthetic oligonucleotide

SEQ ID NO: 604594 - DNA, 60 bp, Artificial; identical to SEQ ID NO: 460728
  Synthetic oligonucleotide

SEQ ID NO: 604595 - DNA, 60 bp, Artificial; identical to SEQ ID NO: 460729
  Synthetic oligonucleotide

SEQ ID NO: 604596 - DNA, 57 bp, Artificial; identical to SEQ ID NO: 460732
  Synthetic oligonucleotide

SEQ ID NO: 604597 - DNA, 60 bp, Artificial; identical to SEQ ID NO: 460733
  Synthetic oligonucleotide

SEQ ID NO: 604598 - DNA, 60 bp, Artificial; identical to SEQ ID NO: 460735
  Synthetic oligonucleotide

SEQ ID NO: 604599 - DNA, 60 bp, Artificial; identical to SEQ ID NO: 460736
  Synthetic oligonucleotide

SEQ ID NO: 604600 - DNA, 58 bp, Artificial; identical to SEQ ID NO: 460737
  Synthetic oligonucleotide

SEQ ID NO: 604601 - DNA, 60 bp, Artificial; identical to SEQ ID NO: 460739
  Synthetic oligonucleotide

SEQ ID NO: 604602 - DNA, 60 bp, Artificial; identical to SEQ ID NO: 460741
  Synthetic oligonucleotide

SEQ ID NO: 604603 - DNA, 60 bp, Artificial; identical to SEQ ID NO: 460743
  Synthetic oligonucleotide

SEQ ID NO: 604604 - DNA, 58 bp, Artificial; identical to SEQ ID NO: 460745
  Synthetic oligonucleotide

SEQ ID NO: 604605 - DNA, 56 bp, Artificial; identical to SEQ ID NO: 460746
  Synthetic oligonucleotide

SEQ ID NO: 604606 - DNA, 60 bp, Artificial; identical to SEQ ID NO: 460759
  Synthetic oligonucleotide

SEQ ID NO: 604607 - DNA, 59 bp, Artificial; identical to SEQ ID NO: 460760
  Synthetic oligonucleotide

SEQ ID NO: 604608 - DNA, 60 bp, Artificial; identical to SEQ ID NO: 460762
  Synthetic oligonucleotide

SEQ ID NO: 604609 - DNA, 58 bp, Artificial; identical to SEQ ID NO: 460763
  Synthetic oligonucleotide

SEQ ID NO: 604610 - DNA, 60 bp, Artificial; identical to SEQ ID NO: 460764
  Synthetic oligonucleotide

SEQ ID NO: 604611 - DNA, 53 bp, Artificial; identical to SEQ ID NO: 460768
  Synthetic oligonucleotide

SEQ ID NO: 604612 - DNA, 59 bp, Artificial; identical to SEQ ID NO: 460769
  Synthetic oligonucleotide

SEQ ID NO: 604613 - DNA, 54 bp, Artificial; identical to SEQ ID NO: 460772
  Synthetic oligonucleotide

SEQ ID NO: 604614 - DNA, 60 bp, Artificial; identical to SEQ ID NO: 460774
  Synthetic oligonucleotide

SEQ ID NO: 604615 - DNA, 57 bp, Artificial; identical to SEQ ID NO: 18012
  Synthetic oligonucleotide

SEQ ID NO: 604616 - DNA, 55 bp, Artificial; identical to SEQ ID NO: 460778
  Synthetic oligonucleotide

SEQ ID NO: 604617 - DNA, 60 bp, Artificial; identical to SEQ ID NO: 460779
  Synthetic oligonucleotide

SEQ ID NO: 604618 - DNA, 51 bp, Artificial; identical to SEQ ID NO: 460782
  Synthetic oligonucleotide

SEQ ID NO: 604619 - DNA, 59 bp, Artificial; identical to SEQ ID NO: 460783
  Synthetic oligonucleotide

SEQ ID NO: 604620 - DNA, 53 bp, Artificial; identical to SEQ ID NO: 460787
  Synthetic oligonucleotide

SEQ ID NO: 604621 - DNA, 50 bp, Artificial; identical to SEQ ID NO: 460789
  Synthetic oligonucleotide

SEQ ID NO: 604622 - DNA, 60 bp, Artificial; identical to SEQ ID NO: 460790
  Synthetic oligonucleotide

SEQ ID NO: 604623 - DNA, 60 bp, Artificial; identical to SEQ ID NO: 460794
  Synthetic oligonucleotide

SEQ ID NO: 604624 - DNA, 58 bp, Artificial; identical to SEQ ID NO: 460797
  Synthetic oligonucleotide

SEQ ID NO: 604625 - DNA, 60 bp, Artificial; identical to SEQ ID NO: 460801
  Synthetic oligonucleotide

SEQ ID NO: 604626 - DNA, 60 bp, Artificial; identical to SEQ ID NO: 460802
  Synthetic oligonucleotide

SEQ ID NO: 604627 - DNA, 60 bp, Artificial; identical to SEQ ID NO: 7153
  Synthetic oligonucleotide

SEQ ID NO: 604628 - DNA, 55 bp, Artificial; identical to SEQ ID NO: 460811
  Synthetic oligonucleotide

SEQ ID NO: 604629 - DNA, 55 bp, Artificial; identical to SEQ ID NO: 460812
  Synthetic oligonucleotide

SEQ ID NO: 604630 - DNA, 58 bp, Artificial; identical to SEQ ID NO: 460818
  Synthetic oligonucleotide

SEQ ID NO: 604631 - DNA, 53 bp, Artificial; identical to SEQ ID NO: 460828
  Synthetic oligonucleotide

SEQ ID NO: 604632 - DNA, 53 bp, Artificial; identical to SEQ ID NO: 460840
  Synthetic oligonucleotide

SEQ ID NO: 604633 - DNA, 60 bp, Artificial; identical to SEQ ID NO: 10650
  Synthetic oligonucleotide

SEQ ID NO: 604634 - DNA, 60 bp, Artificial; identical to SEQ ID NO: 460845
  Synthetic oligonucleotide

SEQ ID NO: 604635 - DNA, 60 bp, Artificial; identical to SEQ ID NO: 460848
  Synthetic oligonucleotide

SEQ ID NO: 604636 - DNA, 60 bp, Artificial; identical to SEQ ID NO: 460851
  Synthetic oligonucleotide

SEQ ID NO: 604637 - DNA, 56 bp, Artificial; identical to SEQ ID NO: 460857
  Synthetic oligonucleotide

SEQ ID NO: 604638 - DNA, 55 bp, Artificial; identical to SEQ ID NO: 460858
  Synthetic oligonucleotide

SEQ ID NO: 604639 - DNA, 57 bp, Artificial; identical to SEQ ID NO: 460860
  Synthetic oligonucleotide

SEQ ID NO: 604640 - DNA, 60 bp, Artificial; identical to SEQ ID NO: 460863
  Synthetic oligonucleotide

SEQ ID NO: 604641 - DNA, 60 bp, Artificial; identical to SEQ ID NO: 460866
  Synthetic oligonucleotide

SEQ ID NO: 604642 - DNA, 58 bp, Artificial; identical to SEQ ID NO: 460867
  Synthetic oligonucleotide

SEQ ID NO: 604643 - DNA, 60 bp, Artificial; identical to SEQ ID NO: 460868
  Synthetic oligonucleotide

SEQ ID NO: 604644 - DNA, 56 bp, Artificial; identical to SEQ ID NO: 460870
  Synthetic oligonucleotide

SEQ ID NO: 604645 - DNA, 53 bp, Artificial; identical to SEQ ID NO: 460872
  Synthetic oligonucleotide

SEQ ID NO: 604646 - DNA, 60 bp, Artificial; identical to SEQ ID NO: 460879
  Synthetic oligonucleotide

SEQ ID NO: 604647 - DNA, 57 bp, Artificial; identical to SEQ ID NO: 460880
  Synthetic oligonucleotide

SEQ ID NO: 604648 - DNA, 57 bp, Artificial; identical to SEQ ID NO: 460881
  Synthetic oligonucleotide

SEQ ID NO: 604649 - DNA, 53 bp, Artificial; identical to SEQ ID NO: 460884
  Synthetic oligonucleotide

SEQ ID NO: 604650 - DNA, 60 bp, Artificial; identical to SEQ ID NO: 460885
  Synthetic oligonucleotide

SEQ ID NO: 604651 - DNA, 60 bp, Artificial; identical to SEQ ID NO: 460889
  Synthetic oligonucleotide

SEQ ID NO: 604652 - DNA, 51 bp, Artificial; identical to SEQ ID NO: 460890
  Synthetic oligonucleotide

SEQ ID NO: 604653 - DNA, 56 bp, Artificial; identical to SEQ ID NO: 460891
  Synthetic oligonucleotide

SEQ ID NO: 604654 - DNA, 60 bp, Artificial; identical to SEQ ID NO: 460893
  Synthetic oligonucleotide

SEQ ID NO: 604655 - DNA, 60 bp, Artificial; identical to SEQ ID NO: 460894
  Synthetic oligonucleotide

SEQ ID NO: 604656 - DNA, 59 bp, Artificial; identical to SEQ ID NO: 16565
  Synthetic oligonucleotide

SEQ ID NO: 604657 - DNA, 60 bp, Artificial; identical to SEQ ID NO: 460900
  Synthetic oligonucleotide

SEQ ID NO: 604658 - DNA, 53 bp, Artificial; identical to SEQ ID NO: 460907
  Synthetic oligonucleotide

SEQ ID NO: 604659 - DNA, 55 bp, Artificial; identical to SEQ ID NO: 460909
  Synthetic oligonucleotide

SEQ ID NO: 604660 - DNA, 51 bp, Artificial; identical to SEQ ID NO: 460914
  Synthetic oligonucleotide

SEQ ID NO: 604661 - DNA, 56 bp, Artificial; identical to SEQ ID NO: 460916
  Synthetic oligonucleotide

SEQ ID NO: 604662 - DNA, 55 bp, Artificial; identical to SEQ ID NO: 460922
  Synthetic oligonucleotide

SEQ ID NO: 604663 - DNA, 60 bp, Artificial; identical to SEQ ID NO: 13866
  Synthetic oligonucleotide

SEQ ID NO: 604664 - DNA, 60 bp, Artificial; identical to SEQ ID NO: 10043
  Synthetic oligonucleotide

SEQ ID NO: 604665 - DNA, 59 bp, Artificial; identical to SEQ ID NO: 17549
  Synthetic oligonucleotide

SEQ ID NO: 604666 - DNA, 50 bp, Artificial; identical to SEQ ID NO: 460926
  Synthetic oligonucleotide

SEQ ID NO: 604667 - DNA, 51 bp, Artificial; identical to SEQ ID NO: 460936
  Synthetic oligonucleotide

SEQ ID NO: 604668 - DNA, 60 bp, Artificial; identical to SEQ ID NO: 460937
  Synthetic oligonucleotide

SEQ ID NO: 604669 - DNA, 60 bp, Artificial; identical to SEQ ID NO: 460943
  Synthetic oligonucleotide

SEQ ID NO: 604670 - DNA, 60 bp, Artificial; identical to SEQ ID NO: 460944
  Synthetic oligonucleotide

SEQ ID NO: 604671 - DNA, 55 bp, Artificial; identical to SEQ ID NO: 460945
  Synthetic oligonucleotide

SEQ ID NO: 604672 - DNA, 50 bp, Artificial; identical to SEQ ID NO: 460950
  Synthetic oligonucleotide

SEQ ID NO: 604673 - DNA, 55 bp, Artificial; identical to SEQ ID NO: 460953
  Synthetic oligonucleotide

SEQ ID NO: 604674 - DNA, 60 bp, Artificial; identical to SEQ ID NO: 460955
  Synthetic oligonucleotide

SEQ ID NO: 604675 - DNA, 55 bp, Artificial; identical to SEQ ID NO: 460956
  Synthetic oligonucleotide

SEQ ID NO: 604676 - DNA, 60 bp, Artificial; identical to SEQ ID NO: 460962
  Synthetic oligonucleotide

SEQ ID NO: 604677 - DNA, 55 bp, Artificial; identical to SEQ ID NO: 460964
  Synthetic oligonucleotide

SEQ ID NO: 604678 - DNA, 51 bp, Artificial; identical to SEQ ID NO: 460966
  Synthetic oligonucleotide

SEQ ID NO: 604679 - DNA, 60 bp, Artificial; identical to SEQ ID NO: 460967
  Synthetic oligonucleotide

SEQ ID NO: 604680 - DNA, 60 bp, Artificial; identical to SEQ ID NO: 460979
  Synthetic oligonucleotide

SEQ ID NO: 604681 - DNA, 60 bp, Artificial; identical to SEQ ID NO: 460983
  Synthetic oligonucleotide

SEQ ID NO: 604682 - DNA, 58 bp, Artificial; identical to SEQ ID NO: 15594
  Synthetic oligonucleotide

SEQ ID NO: 604683 - DNA, 57 bp, Artificial; identical to SEQ ID NO: 460987
  Synthetic oligonucleotide

SEQ ID NO: 604684 - DNA, 52 bp, Artificial; identical to SEQ ID NO: 460989
  Synthetic oligonucleotide

SEQ ID NO: 604685 - DNA, 54 bp, Artificial; identical to SEQ ID NO: 460994
  Synthetic oligonucleotide

SEQ ID NO: 604686 - DNA, 59 bp, Artificial; identical to SEQ ID NO: 460996
  Synthetic oligonucleotide

SEQ ID NO: 604687 - DNA, 53 bp, Artificial; identical to SEQ ID NO: 460997
  Synthetic oligonucleotide

SEQ ID NO: 604688 - DNA, 50 bp, Artificial; identical to SEQ ID NO: 460998
  Synthetic oligonucleotide

SEQ ID NO: 604689 - DNA, 55 bp, Artificial; identical to SEQ ID NO: 460999
  Synthetic oligonucleotide

SEQ ID NO: 604690 - DNA, 59 bp, Artificial; identical to SEQ ID NO: 461001
  Synthetic oligonucleotide

SEQ ID NO: 604691 - DNA, 52 bp, Artificial; identical to SEQ ID NO: 461007
  Synthetic oligonucleotide

SEQ ID NO: 604692 - DNA, 60 bp, Artificial; identical to SEQ ID NO: 461010
  Synthetic oligonucleotide

SEQ ID NO: 604693 - DNA, 59 bp, Artificial; identical to SEQ ID NO: 19224
  Synthetic oligonucleotide

SEQ ID NO: 604694 - DNA, 52 bp, Artificial; identical to SEQ ID NO: 13628
  Synthetic oligonucleotide

SEQ ID NO: 604695 - DNA, 60 bp, Artificial; identical to SEQ ID NO: 461014
  Synthetic oligonucleotide

SEQ ID NO: 604696 - DNA, 55 bp, Artificial; identical to SEQ ID NO: 461021
  Synthetic oligonucleotide

SEQ ID NO: 604697 - DNA, 56 bp, Artificial; identical to SEQ ID NO: 461022
  Synthetic oligonucleotide

SEQ ID NO: 604698 - DNA, 60 bp, Artificial; identical to SEQ ID NO: 461024
  Synthetic oligonucleotide

SEQ ID NO: 604699 - DNA, 59 bp, Artificial; identical to SEQ ID NO: 461027
  Synthetic oligonucleotide

SEQ ID NO: 604700 - DNA, 56 bp, Artificial; identical to SEQ ID NO: 461034
  Synthetic oligonucleotide

SEQ ID NO: 604701 - DNA, 55 bp, Artificial; identical to SEQ ID NO: 461037
  Synthetic oligonucleotide

SEQ ID NO: 604702 - DNA, 60 bp, Artificial; identical to SEQ ID NO: 461038
  Synthetic oligonucleotide

SEQ ID NO: 604703 - DNA, 58 bp, Artificial; identical to SEQ ID NO: 461045
  Synthetic oligonucleotide

SEQ ID NO: 604704 - DNA, 51 bp, Artificial; identical to SEQ ID NO: 461047
  Synthetic oligonucleotide

SEQ ID NO: 604705 - DNA, 57 bp, Artificial; identical to SEQ ID NO: 461048
  Synthetic oligonucleotide

SEQ ID NO: 604706 - DNA, 58 bp, Artificial; identical to SEQ ID NO: 461056
  Synthetic oligonucleotide

SEQ ID NO: 604707 - DNA, 60 bp, Artificial; identical to SEQ ID NO: 461057
  Synthetic oligonucleotide

SEQ ID NO: 604708 - DNA, 56 bp, Artificial; identical to SEQ ID NO: 461067
  Synthetic oligonucleotide

SEQ ID NO: 604709 - DNA, 55 bp, Artificial; identical to SEQ ID NO: 461069
  Synthetic oligonucleotide

SEQ ID NO: 604710 - DNA, 52 bp, Artificial; identical to SEQ ID NO: 461071
  Synthetic oligonucleotide

SEQ ID NO: 604711 - DNA, 56 bp, Artificial; identical to SEQ ID NO: 461072
  Synthetic oligonucleotide

SEQ ID NO: 604712 - DNA, 55 bp, Artificial; identical to SEQ ID NO: 461074
  Synthetic oligonucleotide

SEQ ID NO: 604713 - DNA, 56 bp, Artificial; identical to SEQ ID NO: 461081
  Synthetic oligonucleotide

SEQ ID NO: 604714 - DNA, 54 bp, Artificial; identical to SEQ ID NO: 461082
  Synthetic oligonucleotide

SEQ ID NO: 604715 - DNA, 53 bp, Artificial; identical to SEQ ID NO: 461083
  Synthetic oligonucleotide

SEQ ID NO: 604716 - DNA, 58 bp, Artificial; identical to SEQ ID NO: 461088
  Synthetic oligonucleotide

SEQ ID NO: 604717 - DNA, 50 bp, Artificial; identical to SEQ ID NO: 461093
  Synthetic oligonucleotide

SEQ ID NO: 604718 - DNA, 52 bp, Artificial; identical to SEQ ID NO: 461096
  Synthetic oligonucleotide

SEQ ID NO: 604719 - DNA, 55 bp, Artificial; identical to SEQ ID NO: 461098
  Synthetic oligonucleotide

SEQ ID NO: 604720 - DNA, 55 bp, Artificial; identical to SEQ ID NO: 461103
  Synthetic oligonucleotide

SEQ ID NO: 604721 - DNA, 60 bp, Artificial; identical to SEQ ID NO: 461105
  Synthetic oligonucleotide

SEQ ID NO: 604722 - DNA, 60 bp, Artificial; identical to SEQ ID NO: 461106
  Synthetic oligonucleotide

SEQ ID NO: 604723 - DNA, 60 bp, Artificial; identical to SEQ ID NO: 461107
  Synthetic oligonucleotide

SEQ ID NO: 604724 - DNA, 60 bp, Artificial; identical to SEQ ID NO: 461113
  Synthetic oligonucleotide

SEQ ID NO: 604725 - DNA, 60 bp, Artificial; identical to SEQ ID NO: 461115
  Synthetic oligonucleotide

SEQ ID NO: 604726 - DNA, 54 bp, Artificial; identical to SEQ ID NO: 461116
  Synthetic oligonucleotide

SEQ ID NO: 604727 - DNA, 60 bp, Artificial; identical to SEQ ID NO: 461117
  Synthetic oligonucleotide

SEQ ID NO: 604728 - DNA, 50 bp, Artificial; identical to SEQ ID NO: 461125
  Synthetic oligonucleotide

SEQ ID NO: 604729 - DNA, 52 bp, Artificial; identical to SEQ ID NO: 461133
  Synthetic oligonucleotide

SEQ ID NO: 604730 - DNA, 60 bp, Artificial; identical to SEQ ID NO: 461134
  Synthetic oligonucleotide

SEQ ID NO: 604731 - DNA, 55 bp, Artificial; identical to SEQ ID NO: 461136
  Synthetic oligonucleotide

SEQ ID NO: 604732 - DNA, 60 bp, Artificial; identical to SEQ ID NO: 461138
  Synthetic oligonucleotide

SEQ ID NO: 604733 - DNA, 60 bp, Artificial; identical to SEQ ID NO: 461151
  Synthetic oligonucleotide

SEQ ID NO: 604734 - DNA, 59 bp, Artificial; identical to SEQ ID NO: 461152
  Synthetic oligonucleotide

SEQ ID NO: 604735 - DNA, 57 bp, Artificial; identical to SEQ ID NO: 461155
  Synthetic oligonucleotide

SEQ ID NO: 604736 - DNA, 57 bp, Artificial; identical to SEQ ID NO: 461157
  Synthetic oligonucleotide

SEQ ID NO: 604737 - DNA, 59 bp, Artificial; identical to SEQ ID NO: 461160
  Synthetic oligonucleotide

SEQ ID NO: 604738 - DNA, 60 bp, Artificial; identical to SEQ ID NO: 461162
  Synthetic oligonucleotide

SEQ ID NO: 604739 - DNA, 59 bp, Artificial; identical to SEQ ID NO: 461163
  Synthetic oligonucleotide

SEQ ID NO: 604740 - DNA, 55 bp, Artificial; identical to SEQ ID NO: 461167
  Synthetic oligonucleotide

SEQ ID NO: 604741 - DNA, 55 bp, Artificial; identical to SEQ ID NO: 461169
  Synthetic oligonucleotide

SEQ ID NO: 604742 - DNA, 60 bp, Artificial; identical to SEQ ID NO: 461175
  Synthetic oligonucleotide

SEQ ID NO: 604743 - DNA, 60 bp, Artificial; identical to SEQ ID NO: 461176
  Synthetic oligonucleotide

SEQ ID NO: 604744 - DNA, 60 bp, Artificial; identical to SEQ ID NO: 461177
  Synthetic oligonucleotide

SEQ ID NO: 604745 - DNA, 60 bp, Artificial; identical to SEQ ID NO: 461179
  Synthetic oligonucleotide

SEQ ID NO: 604746 - DNA, 57 bp, Artificial; identical to SEQ ID NO: 461186
  Synthetic oligonucleotide

SEQ ID NO: 604747 - DNA, 55 bp, Artificial; identical to SEQ ID NO: 461187
  Synthetic oligonucleotide

SEQ ID NO: 604748 - DNA, 58 bp, Artificial; identical to SEQ ID NO: 461189
  Synthetic oligonucleotide

SEQ ID NO: 604749 - DNA, 60 bp, Artificial; identical to SEQ ID NO: 461190
  Synthetic oligonucleotide

SEQ ID NO: 604750 - DNA, 52 bp, Artificial; identical to SEQ ID NO: 461193
  Synthetic oligonucleotide

SEQ ID NO: 604751 - DNA, 60 bp, Artificial; identical to SEQ ID NO: 461194
  Synthetic oligonucleotide

SEQ ID NO: 604752 - DNA, 60 bp, Artificial; identical to SEQ ID NO: 461195
  Synthetic oligonucleotide

SEQ ID NO: 604753 - DNA, 59 bp, Artificial; identical to SEQ ID NO: 16426
  Synthetic oligonucleotide

SEQ ID NO: 604754 - DNA, 52 bp, Artificial; identical to SEQ ID NO: 461197
  Synthetic oligonucleotide

SEQ ID NO: 604755 - DNA, 59 bp, Artificial; identical to SEQ ID NO: 461198
  Synthetic oligonucleotide

SEQ ID NO: 604756 - DNA, 60 bp, Artificial; identical to SEQ ID NO: 461200
  Synthetic oligonucleotide

SEQ ID NO: 604757 - DNA, 57 bp, Artificial; identical to SEQ ID NO: 461202
  Synthetic oligonucleotide

SEQ ID NO: 604758 - DNA, 58 bp, Artificial; identical to SEQ ID NO: 461204
  Synthetic oligonucleotide

SEQ ID NO: 604759 - DNA, 60 bp, Artificial; identical to SEQ ID NO: 461207
  Synthetic oligonucleotide

SEQ ID NO: 604760 - DNA, 59 bp, Artificial; identical to SEQ ID NO: 461212
  Synthetic oligonucleotide

SEQ ID NO: 604761 - DNA, 58 bp, Artificial; identical to SEQ ID NO: 461215
  Synthetic oligonucleotide

SEQ ID NO: 604762 - DNA, 60 bp, Artificial; identical to SEQ ID NO: 461221
  Synthetic oligonucleotide

SEQ ID NO: 604763 - DNA, 60 bp, Artificial; identical to SEQ ID NO: 461223
  Synthetic oligonucleotide

SEQ ID NO: 604764 - DNA, 58 bp, Artificial; identical to SEQ ID NO: 17576
  Synthetic oligonucleotide

SEQ ID NO: 604765 - DNA, 60 bp, Artificial; identical to SEQ ID NO: 461226
  Synthetic oligonucleotide

SEQ ID NO: 604766 - DNA, 60 bp, Artificial; identical to SEQ ID NO: 461227
  Synthetic oligonucleotide

SEQ ID NO: 604767 - DNA, 60 bp, Artificial; identical to SEQ ID NO: 461228
  Synthetic oligonucleotide

SEQ ID NO: 604768 - DNA, 55 bp, Artificial; identical to SEQ ID NO: 461230
  Synthetic oligonucleotide

SEQ ID NO: 604769 - DNA, 60 bp, Artificial; identical to SEQ ID NO: 461232
  Synthetic oligonucleotide

SEQ ID NO: 604770 - DNA, 60 bp, Artificial; identical to SEQ ID NO: 461237
  Synthetic oligonucleotide

SEQ ID NO: 604771 - DNA, 59 bp, Artificial; identical to SEQ ID NO: 461240
  Synthetic oligonucleotide

SEQ ID NO: 604772 - DNA, 55 bp, Artificial; identical to SEQ ID NO: 461243
  Synthetic oligonucleotide

SEQ ID NO: 604773 - DNA, 60 bp, Artificial; identical to SEQ ID NO: 461246
  Synthetic oligonucleotide

SEQ ID NO: 604774 - DNA, 55 bp, Artificial; identical to SEQ ID NO: 461247
  Synthetic oligonucleotide

SEQ ID NO: 604775 - DNA, 58 bp, Artificial; identical to SEQ ID NO: 461248
  Synthetic oligonucleotide

SEQ ID NO: 604776 - DNA, 59 bp, Artificial; identical to SEQ ID NO: 461249
  Synthetic oligonucleotide

SEQ ID NO: 604777 - DNA, 56 bp, Artificial; identical to SEQ ID NO: 461257
  Synthetic oligonucleotide

SEQ ID NO: 604778 - DNA, 53 bp, Artificial; identical to SEQ ID NO: 461260
  Synthetic oligonucleotide

SEQ ID NO: 604779 - DNA, 52 bp, Artificial; identical to SEQ ID NO: 461263
  Synthetic oligonucleotide

SEQ ID NO: 604780 - DNA, 60 bp, Artificial; identical to SEQ ID NO: 461266
  Synthetic oligonucleotide

SEQ ID NO: 604781 - DNA, 55 bp, Artificial; identical to SEQ ID NO: 461268
  Synthetic oligonucleotide

SEQ ID NO: 604782 - DNA, 55 bp, Artificial; identical to SEQ ID NO: 461269
  Synthetic oligonucleotide

SEQ ID NO: 604783 - DNA, 60 bp, Artificial; identical to SEQ ID NO: 461270
  Synthetic oligonucleotide

SEQ ID NO: 604784 - DNA, 60 bp, Artificial; identical to SEQ ID NO: 461271
  Synthetic oligonucleotide

SEQ ID NO: 604785 - DNA, 59 bp, Artificial; identical to SEQ ID NO: 461272
  Synthetic oligonucleotide

SEQ ID NO: 604786 - DNA, 55 bp, Artificial; identical to SEQ ID NO: 461274
  Synthetic oligonucleotide

SEQ ID NO: 604787 - DNA, 60 bp, Artificial; identical to SEQ ID NO: 461287
  Synthetic oligonucleotide

SEQ ID NO: 604788 - DNA, 51 bp, Artificial; identical to SEQ ID NO: 461291
  Synthetic oligonucleotide

SEQ ID NO: 604789 - DNA, 50 bp, Artificial; identical to SEQ ID NO: 461293
  Synthetic oligonucleotide

SEQ ID NO: 604790 - DNA, 54 bp, Artificial; identical to SEQ ID NO: 461299
  Synthetic oligonucleotide

SEQ ID NO: 604791 - DNA, 55 bp, Artificial; identical to SEQ ID NO: 461302
  Synthetic oligonucleotide

SEQ ID NO: 604792 - DNA, 60 bp, Artificial; identical to SEQ ID NO: 461304
  Synthetic oligonucleotide

SEQ ID NO: 604793 - DNA, 59 bp, Artificial; identical to SEQ ID NO: 461305
  Synthetic oligonucleotide

SEQ ID NO: 604794 - DNA, 50 bp, Artificial; identical to SEQ ID NO: 461310
  Synthetic oligonucleotide

SEQ ID NO: 604795 - DNA, 59 bp, Artificial; identical to SEQ ID NO: 461312
  Synthetic oligonucleotide

SEQ ID NO: 604796 - DNA, 60 bp, Artificial; identical to SEQ ID NO: 7901
  Synthetic oligonucleotide

SEQ ID NO: 604797 - DNA, 55 bp, Artificial; identical to SEQ ID NO: 461316
  Synthetic oligonucleotide

SEQ ID NO: 604798 - DNA, 57 bp, Artificial; identical to SEQ ID NO: 461318
  Synthetic oligonucleotide

SEQ ID NO: 604799 - DNA, 54 bp, Artificial; identical to SEQ ID NO: 461323
  Synthetic oligonucleotide

SEQ ID NO: 604800 - DNA, 60 bp, Artificial; identical to SEQ ID NO: 461328
  Synthetic oligonucleotide

SEQ ID NO: 604801 - DNA, 60 bp, Artificial; identical to SEQ ID NO: 461331
  Synthetic oligonucleotide

SEQ ID NO: 604802 - DNA, 56 bp, Artificial; identical to SEQ ID NO: 461332
  Synthetic oligonucleotide

SEQ ID NO: 604803 - DNA, 51 bp, Artificial; identical to SEQ ID NO: 461333
  Synthetic oligonucleotide

SEQ ID NO: 604804 - DNA, 59 bp, Artificial; identical to SEQ ID NO: 461334
  Synthetic oligonucleotide

SEQ ID NO: 604805 - DNA, 59 bp, Artificial; identical to SEQ ID NO: 461339
  Synthetic oligonucleotide

SEQ ID NO: 604806 - DNA, 55 bp, Artificial; identical to SEQ ID NO: 461340
  Synthetic oligonucleotide

SEQ ID NO: 604807 - DNA, 55 bp, Artificial; identical to SEQ ID NO: 461342
  Synthetic oligonucleotide

SEQ ID NO: 604808 - DNA, 60 bp, Artificial; identical to SEQ ID NO: 461343
  Synthetic oligonucleotide

SEQ ID NO: 604809 - DNA, 60 bp, Artificial; identical to SEQ ID NO: 13010
  Synthetic oligonucleotide

SEQ ID NO: 604810 - DNA, 60 bp, Artificial; identical to SEQ ID NO: 461352
  Synthetic oligonucleotide

SEQ ID NO: 604811 - DNA, 55 bp, Artificial; identical to SEQ ID NO: 461354
  Synthetic oligonucleotide

SEQ ID NO: 604812 - DNA, 59 bp, Artificial; identical to SEQ ID NO: 461358
  Synthetic oligonucleotide

SEQ ID NO: 604813 - DNA, 58 bp, Artificial; identical to SEQ ID NO: 461366
  Synthetic oligonucleotide

SEQ ID NO: 604814 - DNA, 60 bp, Artificial; identical to SEQ ID NO: 461369
  Synthetic oligonucleotide

SEQ ID NO: 604815 - DNA, 60 bp, Artificial; identical to SEQ ID NO: 461370
  Synthetic oligonucleotide

SEQ ID NO: 604816 - DNA, 60 bp, Artificial; identical to SEQ ID NO: 461371
  Synthetic oligonucleotide

SEQ ID NO: 604817 - DNA, 60 bp, Artificial; identical to SEQ ID NO: 13737
  Synthetic oligonucleotide

SEQ ID NO: 604818 - DNA, 60 bp, Artificial; identical to SEQ ID NO: 461372
  Synthetic oligonucleotide

SEQ ID NO: 604819 - DNA, 60 bp, Artificial; identical to SEQ ID NO: 461373
  Synthetic oligonucleotide

SEQ ID NO: 604820 - DNA, 60 bp, Artificial; identical to SEQ ID NO: 461380
  Synthetic oligonucleotide

SEQ ID NO: 604821 - DNA, 60 bp, Artificial; identical to SEQ ID NO: 461387
  Synthetic oligonucleotide

SEQ ID NO: 604822 - DNA, 60 bp, Artificial; identical to SEQ ID NO: 461388
  Synthetic oligonucleotide

SEQ ID NO: 604823 - DNA, 60 bp, Artificial; identical to SEQ ID NO: 461390
  Synthetic oligonucleotide

SEQ ID NO: 604824 - DNA, 56 bp, Artificial; identical to SEQ ID NO: 15695
  Synthetic oligonucleotide

SEQ ID NO: 604825 - DNA, 59 bp, Artificial; identical to SEQ ID NO: 8221
  Synthetic oligonucleotide

SEQ ID NO: 604826 - DNA, 56 bp, Artificial; identical to SEQ ID NO: 461395
  Synthetic oligonucleotide

SEQ ID NO: 604827 - DNA, 60 bp, Artificial; identical to SEQ ID NO: 461399
  Synthetic oligonucleotide

SEQ ID NO: 604828 - DNA, 55 bp, Artificial; identical to SEQ ID NO: 461400
  Synthetic oligonucleotide

SEQ ID NO: 604829 - DNA, 60 bp, Artificial; identical to SEQ ID NO: 13743
  Synthetic oligonucleotide

SEQ ID NO: 604830 - DNA, 60 bp, Artificial; identical to SEQ ID NO: 461402
  Synthetic oligonucleotide

SEQ ID NO: 604831 - DNA, 60 bp, Artificial; identical to SEQ ID NO: 461403
  Synthetic oligonucleotide

SEQ ID NO: 604832 - DNA, 60 bp, Artificial; identical to SEQ ID NO: 461405
  Synthetic oligonucleotide

SEQ ID NO: 604833 - DNA, 60 bp, Artificial; identical to SEQ ID NO: 461409
  Synthetic oligonucleotide

SEQ ID NO: 604834 - DNA, 55 bp, Artificial; identical to SEQ ID NO: 16970
  Synthetic oligonucleotide

SEQ ID NO: 604835 - DNA, 56 bp, Artificial; identical to SEQ ID NO: 461429
  Synthetic oligonucleotide

SEQ ID NO: 604836 - DNA, 54 bp, Artificial; identical to SEQ ID NO: 461432
  Synthetic oligonucleotide

SEQ ID NO: 604837 - DNA, 60 bp, Artificial; identical to SEQ ID NO: 461435
  Synthetic oligonucleotide

SEQ ID NO: 604838 - DNA, 60 bp, Artificial; identical to SEQ ID NO: 461437
  Synthetic oligonucleotide

SEQ ID NO: 604839 - DNA, 58 bp, Artificial; identical to SEQ ID NO: 461438
  Synthetic oligonucleotide

SEQ ID NO: 604840 - DNA, 52 bp, Artificial; identical to SEQ ID NO: 461444
  Synthetic oligonucleotide

SEQ ID NO: 604841 - DNA, 57 bp, Artificial; identical to SEQ ID NO: 461446
  Synthetic oligonucleotide

SEQ ID NO: 604842 - DNA, 60 bp, Artificial; identical to SEQ ID NO: 461452
  Synthetic oligonucleotide

SEQ ID NO: 604843 - DNA, 60 bp, Artificial; identical to SEQ ID NO: 461455
  Synthetic oligonucleotide

SEQ ID NO: 604844 - DNA, 60 bp, Artificial; identical to SEQ ID NO: 13131
  Synthetic oligonucleotide

SEQ ID NO: 604845 - DNA, 52 bp, Artificial; identical to SEQ ID NO: 461458
  Synthetic oligonucleotide

SEQ ID NO: 604846 - DNA, 59 bp, Artificial; identical to SEQ ID NO: 461461
  Synthetic oligonucleotide

SEQ ID NO: 604847 - DNA, 56 bp, Artificial; identical to SEQ ID NO: 461464
  Synthetic oligonucleotide

SEQ ID NO: 604848 - DNA, 60 bp, Artificial; identical to SEQ ID NO: 461465
  Synthetic oligonucleotide

SEQ ID NO: 604849 - DNA, 50 bp, Artificial; identical to SEQ ID NO: 461466
  Synthetic oligonucleotide

SEQ ID NO: 604850 - DNA, 56 bp, Artificial; identical to SEQ ID NO: 461467
  Synthetic oligonucleotide

SEQ ID NO: 604851 - DNA, 55 bp, Artificial; identical to SEQ ID NO: 461474
  Synthetic oligonucleotide

SEQ ID NO: 604852 - DNA, 52 bp, Artificial; identical to SEQ ID NO: 461475
  Synthetic oligonucleotide

SEQ ID NO: 604853 - DNA, 60 bp, Artificial; identical to SEQ ID NO: 461476
  Synthetic oligonucleotide

SEQ ID NO: 604854 - DNA, 56 bp, Artificial; identical to SEQ ID NO: 461478
  Synthetic oligonucleotide

SEQ ID NO: 604855 - DNA, 60 bp, Artificial; identical to SEQ ID NO: 461479
  Synthetic oligonucleotide

SEQ ID NO: 604856 - DNA, 55 bp, Artificial; identical to SEQ ID NO: 461480
  Synthetic oligonucleotide

SEQ ID NO: 604857 - DNA, 60 bp, Artificial; identical to SEQ ID NO: 461483
  Synthetic oligonucleotide

SEQ ID NO: 604858 - DNA, 60 bp, Artificial; identical to SEQ ID NO: 461484
  Synthetic oligonucleotide

SEQ ID NO: 604859 - DNA, 60 bp, Artificial; identical to SEQ ID NO: 461487
  Synthetic oligonucleotide

SEQ ID NO: 604860 - DNA, 57 bp, Artificial; identical to SEQ ID NO: 461488
  Synthetic oligonucleotide

SEQ ID NO: 604861 - DNA, 57 bp, Artificial; identical to SEQ ID NO: 461491
  Synthetic oligonucleotide

SEQ ID NO: 604862 - DNA, 59 bp, Artificial; identical to SEQ ID NO: 461494
  Synthetic oligonucleotide

SEQ ID NO: 604863 - DNA, 60 bp, Artificial; identical to SEQ ID NO: 461495
  Synthetic oligonucleotide

SEQ ID NO: 604864 - DNA, 60 bp, Artificial; identical to SEQ ID NO: 461496
  Synthetic oligonucleotide

SEQ ID NO: 604865 - DNA, 60 bp, Artificial; identical to SEQ ID NO: 461497
  Synthetic oligonucleotide

SEQ ID NO: 604866 - DNA, 56 bp, Artificial; identical to SEQ ID NO: 461498
  Synthetic oligonucleotide

SEQ ID NO: 604867 - DNA, 55 bp, Artificial; identical to SEQ ID NO: 461500
  Synthetic oligonucleotide

SEQ ID NO: 604868 - DNA, 60 bp, Artificial; identical to SEQ ID NO: 461504
  Synthetic oligonucleotide

SEQ ID NO: 604869 - DNA, 60 bp, Artificial; identical to SEQ ID NO: 461508
  Synthetic oligonucleotide

SEQ ID NO: 604870 - DNA, 59 bp, Artificial; identical to SEQ ID NO: 18291
  Synthetic oligonucleotide

SEQ ID NO: 604871 - DNA, 60 bp, Artificial; identical to SEQ ID NO: 461512
  Synthetic oligonucleotide

SEQ ID NO: 604872 - DNA, 58 bp, Artificial; identical to SEQ ID NO: 461513
  Synthetic oligonucleotide

SEQ ID NO: 604873 - DNA, 60 bp, Artificial; identical to SEQ ID NO: 461514
  Synthetic oligonucleotide

SEQ ID NO: 604874 - DNA, 53 bp, Artificial; identical to SEQ ID NO: 461516
  Synthetic oligonucleotide

SEQ ID NO: 604875 - DNA, 52 bp, Artificial; identical to SEQ ID NO: 461520
  Synthetic oligonucleotide

SEQ ID NO: 604876 - DNA, 60 bp, Artificial; identical to SEQ ID NO: 461521
  Synthetic oligonucleotide

SEQ ID NO: 604877 - DNA, 60 bp, Artificial; identical to SEQ ID NO: 461522
  Synthetic oligonucleotide

SEQ ID NO: 604878 - DNA, 60 bp, Artificial; identical to SEQ ID NO: 461523
  Synthetic oligonucleotide

SEQ ID NO: 604879 - DNA, 52 bp, Artificial; identical to SEQ ID NO: 461527
  Synthetic oligonucleotide

SEQ ID NO: 604880 - DNA, 60 bp, Artificial; identical to SEQ ID NO: 461529
  Synthetic oligonucleotide

SEQ ID NO: 604881 - DNA, 59 bp, Artificial; identical to SEQ ID NO: 461532
  Synthetic oligonucleotide

SEQ ID NO: 604882 - DNA, 60 bp, Artificial; identical to SEQ ID NO: 461533
  Synthetic oligonucleotide

SEQ ID NO: 604883 - DNA, 60 bp, Artificial; identical to SEQ ID NO: 461540
  Synthetic oligonucleotide

SEQ ID NO: 604884 - DNA, 53 bp, Artificial; identical to SEQ ID NO: 461542
  Synthetic oligonucleotide

SEQ ID NO: 604885 - DNA, 50 bp, Artificial; identical to SEQ ID NO: 461543
  Synthetic oligonucleotide

SEQ ID NO: 604886 - DNA, 56 bp, Artificial; identical to SEQ ID NO: 461544
  Synthetic oligonucleotide

SEQ ID NO: 604887 - DNA, 56 bp, Artificial; identical to SEQ ID NO: 10312
  Synthetic oligonucleotide

SEQ ID NO: 604888 - DNA, 55 bp, Artificial; identical to SEQ ID NO: 461548
  Synthetic oligonucleotide

SEQ ID NO: 604889 - DNA, 60 bp, Artificial; identical to SEQ ID NO: 461552
  Synthetic oligonucleotide

SEQ ID NO: 604890 - DNA, 55 bp, Artificial; identical to SEQ ID NO: 461554
  Synthetic oligonucleotide

SEQ ID NO: 604891 - DNA, 58 bp, Artificial; identical to SEQ ID NO: 461556
  Synthetic oligonucleotide

SEQ ID NO: 604892 - DNA, 60 bp, Artificial; identical to SEQ ID NO: 461559
  Synthetic oligonucleotide

SEQ ID NO: 604893 - DNA, 56 bp, Artificial; identical to SEQ ID NO: 461560
  Synthetic oligonucleotide

SEQ ID NO: 604894 - DNA, 60 bp, Artificial; identical to SEQ ID NO: 461563
  Synthetic oligonucleotide

SEQ ID NO: 604895 - DNA, 60 bp, Artificial; identical to SEQ ID NO: 461564
  Synthetic oligonucleotide

SEQ ID NO: 604896 - DNA, 54 bp, Artificial; identical to SEQ ID NO: 461567
  Synthetic oligonucleotide

SEQ ID NO: 604897 - DNA, 56 bp, Artificial; identical to SEQ ID NO: 461568
  Synthetic oligonucleotide

SEQ ID NO: 604898 - DNA, 50 bp, Artificial; identical to SEQ ID NO: 461569
  Synthetic oligonucleotide

SEQ ID NO: 604899 - DNA, 60 bp, Artificial; identical to SEQ ID NO: 461574
  Synthetic oligonucleotide

SEQ ID NO: 604900 - DNA, 56 bp, Artificial; identical to SEQ ID NO: 461577
  Synthetic oligonucleotide

SEQ ID NO: 604901 - DNA, 54 bp, Artificial; identical to SEQ ID NO: 461578
  Synthetic oligonucleotide

SEQ ID NO: 604902 - DNA, 55 bp, Artificial; identical to SEQ ID NO: 461579
  Synthetic oligonucleotide

SEQ ID NO: 604903 - DNA, 57 bp, Artificial; identical to SEQ ID NO: 461585
  Synthetic oligonucleotide

SEQ ID NO: 604904 - DNA, 57 bp, Artificial; identical to SEQ ID NO: 461586
  Synthetic oligonucleotide

SEQ ID NO: 604905 - DNA, 60 bp, Artificial; identical to SEQ ID NO: 461592
  Synthetic oligonucleotide

SEQ ID NO: 604906 - DNA, 56 bp, Artificial; identical to SEQ ID NO: 461595
  Synthetic oligonucleotide

SEQ ID NO: 604907 - DNA, 60 bp, Artificial; identical to SEQ ID NO: 461598
  Synthetic oligonucleotide

SEQ ID NO: 604908 - DNA, 60 bp, Artificial; identical to SEQ ID NO: 6618
  Synthetic oligonucleotide

SEQ ID NO: 604909 - DNA, 60 bp, Artificial; identical to SEQ ID NO: 461606
  Synthetic oligonucleotide

SEQ ID NO: 604910 - DNA, 55 bp, Artificial; identical to SEQ ID NO: 461607
  Synthetic oligonucleotide

SEQ ID NO: 604911 - DNA, 56 bp, Artificial; identical to SEQ ID NO: 461610
  Synthetic oligonucleotide

SEQ ID NO: 604912 - DNA, 55 bp, Artificial; identical to SEQ ID NO: 461614
  Synthetic oligonucleotide

SEQ ID NO: 604913 - DNA, 52 bp, Artificial; identical to SEQ ID NO: 461615
  Synthetic oligonucleotide

SEQ ID NO: 604914 - DNA, 59 bp, Artificial; identical to SEQ ID NO: 461616
  Synthetic oligonucleotide

SEQ ID NO: 604915 - DNA, 60 bp, Artificial; identical to SEQ ID NO: 13723
  Synthetic oligonucleotide

SEQ ID NO: 604916 - DNA, 60 bp, Artificial; identical to SEQ ID NO: 461620
  Synthetic oligonucleotide

SEQ ID NO: 604917 - DNA, 58 bp, Artificial; identical to SEQ ID NO: 461621
  Synthetic oligonucleotide

SEQ ID NO: 604918 - DNA, 60 bp, Artificial; identical to SEQ ID NO: 461628
  Synthetic oligonucleotide

SEQ ID NO: 604919 - DNA, 59 bp, Artificial; identical to SEQ ID NO: 461635
  Synthetic oligonucleotide

SEQ ID NO: 604920 - DNA, 59 bp, Artificial; identical to SEQ ID NO: 461640
  Synthetic oligonucleotide

SEQ ID NO: 604921 - DNA, 60 bp, Artificial; identical to SEQ ID NO: 461642
  Synthetic oligonucleotide

SEQ ID NO: 604922 - DNA, 54 bp, Artificial; identical to SEQ ID NO: 461645
  Synthetic oligonucleotide

SEQ ID NO: 604923 - DNA, 60 bp, Artificial; identical to SEQ ID NO: 461651
  Synthetic oligonucleotide

SEQ ID NO: 604924 - DNA, 54 bp, Artificial; identical to SEQ ID NO: 461654
  Synthetic oligonucleotide

SEQ ID NO: 604925 - DNA, 57 bp, Artificial; identical to SEQ ID NO: 461656
  Synthetic oligonucleotide

SEQ ID NO: 604926 - DNA, 56 bp, Artificial; identical to SEQ ID NO: 461657
  Synthetic oligonucleotide

SEQ ID NO: 604927 - DNA, 59 bp, Artificial; identical to SEQ ID NO: 461663
  Synthetic oligonucleotide

SEQ ID NO: 604928 - DNA, 55 bp, Artificial; identical to SEQ ID NO: 461671
  Synthetic oligonucleotide

SEQ ID NO: 604929 - DNA, 60 bp, Artificial; identical to SEQ ID NO: 461673
  Synthetic oligonucleotide

SEQ ID NO: 604930 - DNA, 60 bp, Artificial; identical to SEQ ID NO: 461675
  Synthetic oligonucleotide

SEQ ID NO: 604931 - DNA, 55 bp, Artificial; identical to SEQ ID NO: 461678
  Synthetic oligonucleotide

SEQ ID NO: 604932 - DNA, 55 bp, Artificial; identical to SEQ ID NO: 461682
  Synthetic oligonucleotide

SEQ ID NO: 604933 - DNA, 52 bp, Artificial; identical to SEQ ID NO: 461684
  Synthetic oligonucleotide

SEQ ID NO: 604934 - DNA, 60 bp, Artificial; identical to SEQ ID NO: 461685
  Synthetic oligonucleotide

SEQ ID NO: 604935 - DNA, 60 bp, Artificial; identical to SEQ ID NO: 461695
  Synthetic oligonucleotide

SEQ ID NO: 604936 - DNA, 54 bp, Artificial; identical to SEQ ID NO: 461697
  Synthetic oligonucleotide

SEQ ID NO: 604937 - DNA, 58 bp, Artificial; identical to SEQ ID NO: 461698
  Synthetic oligonucleotide

SEQ ID NO: 604938 - DNA, 59 bp, Artificial; identical to SEQ ID NO: 461699
  Synthetic oligonucleotide

SEQ ID NO: 604939 - DNA, 55 bp, Artificial; identical to SEQ ID NO: 461701
  Synthetic oligonucleotide

SEQ ID NO: 604940 - DNA, 59 bp, Artificial; identical to SEQ ID NO: 461702
  Synthetic oligonucleotide

SEQ ID NO: 604941 - DNA, 60 bp, Artificial; identical to SEQ ID NO: 461705
  Synthetic oligonucleotide

SEQ ID NO: 604942 - DNA, 55 bp, Artificial; identical to SEQ ID NO: 461709
  Synthetic oligonucleotide

SEQ ID NO: 604943 - DNA, 60 bp, Artificial; identical to SEQ ID NO: 461712
  Synthetic oligonucleotide

SEQ ID NO: 604944 - DNA, 60 bp, Artificial; identical to SEQ ID NO: 461714
  Synthetic oligonucleotide

SEQ ID NO: 604945 - DNA, 60 bp, Artificial; identical to SEQ ID NO: 461715
  Synthetic oligonucleotide

SEQ ID NO: 604946 - DNA, 53 bp, Artificial; identical to SEQ ID NO: 461717
  Synthetic oligonucleotide

SEQ ID NO: 604947 - DNA, 52 bp, Artificial; identical to SEQ ID NO: 15077
  Synthetic oligonucleotide

SEQ ID NO: 604948 - DNA, 60 bp, Artificial; identical to SEQ ID NO: 461721
  Synthetic oligonucleotide

SEQ ID NO: 604949 - DNA, 55 bp, Artificial; identical to SEQ ID NO: 461722
  Synthetic oligonucleotide

SEQ ID NO: 604950 - DNA, 60 bp, Artificial; identical to SEQ ID NO: 461723
  Synthetic oligonucleotide

SEQ ID NO: 604951 - DNA, 60 bp, Artificial; identical to SEQ ID NO: 461724
  Synthetic oligonucleotide

SEQ ID NO: 604952 - DNA, 53 bp, Artificial; identical to SEQ ID NO: 461726
  Synthetic oligonucleotide

SEQ ID NO: 604953 - DNA, 60 bp, Artificial; identical to SEQ ID NO: 12904
  Synthetic oligonucleotide

SEQ ID NO: 604954 - DNA, 55 bp, Artificial; identical to SEQ ID NO: 461732
  Synthetic oligonucleotide

SEQ ID NO: 604955 - DNA, 60 bp, Artificial; identical to SEQ ID NO: 461738
  Synthetic oligonucleotide

SEQ ID NO: 604956 - DNA, 59 bp, Artificial; identical to SEQ ID NO: 461741
  Synthetic oligonucleotide

SEQ ID NO: 604957 - DNA, 55 bp, Artificial; identical to SEQ ID NO: 461743
  Synthetic oligonucleotide

SEQ ID NO: 604958 - DNA, 56 bp, Artificial; identical to SEQ ID NO: 461745
  Synthetic oligonucleotide

SEQ ID NO: 604959 - DNA, 59 bp, Artificial; identical to SEQ ID NO: 461747
  Synthetic oligonucleotide

SEQ ID NO: 604960 - DNA, 52 bp, Artificial; identical to SEQ ID NO: 461749
  Synthetic oligonucleotide

SEQ ID NO: 604961 - DNA, 60 bp, Artificial; identical to SEQ ID NO: 461752
  Synthetic oligonucleotide

SEQ ID NO: 604962 - DNA, 60 bp, Artificial; identical to SEQ ID NO: 461757
  Synthetic oligonucleotide

SEQ ID NO: 604963 - DNA, 60 bp, Artificial; identical to SEQ ID NO: 461758
  Synthetic oligonucleotide

SEQ ID NO: 604964 - DNA, 55 bp, Artificial; identical to SEQ ID NO: 461764
  Synthetic oligonucleotide

SEQ ID NO: 604965 - DNA, 56 bp, Artificial; identical to SEQ ID NO: 19009
  Synthetic oligonucleotide

SEQ ID NO: 604966 - DNA, 60 bp, Artificial; identical to SEQ ID NO: 461766
  Synthetic oligonucleotide

SEQ ID NO: 604967 - DNA, 55 bp, Artificial; identical to SEQ ID NO: 461768
  Synthetic oligonucleotide

SEQ ID NO: 604968 - DNA, 52 bp, Artificial; identical to SEQ ID NO: 461771
  Synthetic oligonucleotide

SEQ ID NO: 604969 - DNA, 58 bp, Artificial; identical to SEQ ID NO: 461775
  Synthetic oligonucleotide

SEQ ID NO: 604970 - DNA, 60 bp, Artificial; identical to SEQ ID NO: 461776
  Synthetic oligonucleotide

SEQ ID NO: 604971 - DNA, 55 bp, Artificial; identical to SEQ ID NO: 461779
  Synthetic oligonucleotide

SEQ ID NO: 604972 - DNA, 59 bp, Artificial; identical to SEQ ID NO: 461782
  Synthetic oligonucleotide

SEQ ID NO: 604973 - DNA, 59 bp, Artificial; identical to SEQ ID NO: 461783
  Synthetic oligonucleotide

SEQ ID NO: 604974 - DNA, 52 bp, Artificial; identical to SEQ ID NO: 461786
  Synthetic oligonucleotide

SEQ ID NO: 604975 - DNA, 56 bp, Artificial; identical to SEQ ID NO: 461787
  Synthetic oligonucleotide

SEQ ID NO: 604976 - DNA, 60 bp, Artificial; identical to SEQ ID NO: 461788
  Synthetic oligonucleotide

SEQ ID NO: 604977 - DNA, 58 bp, Artificial; identical to SEQ ID NO: 461789
  Synthetic oligonucleotide

SEQ ID NO: 604978 - DNA, 60 bp, Artificial; identical to SEQ ID NO: 461791
  Synthetic oligonucleotide

SEQ ID NO: 604979 - DNA, 59 bp, Artificial; identical to SEQ ID NO: 461794
  Synthetic oligonucleotide

SEQ ID NO: 604980 - DNA, 54 bp, Artificial; identical to SEQ ID NO: 461798
  Synthetic oligonucleotide

SEQ ID NO: 604981 - DNA, 55 bp, Artificial; identical to SEQ ID NO: 461807
  Synthetic oligonucleotide

SEQ ID NO: 604982 - DNA, 60 bp, Artificial; identical to SEQ ID NO: 461809
  Synthetic oligonucleotide

SEQ ID NO: 604983 - DNA, 52 bp, Artificial; identical to SEQ ID NO: 461810
  Synthetic oligonucleotide

SEQ ID NO: 604984 - DNA, 59 bp, Artificial; identical to SEQ ID NO: 461813
  Synthetic oligonucleotide

SEQ ID NO: 604985 - DNA, 55 bp, Artificial; identical to SEQ ID NO: 461821
  Synthetic oligonucleotide

SEQ ID NO: 604986 - DNA, 59 bp, Artificial; identical to SEQ ID NO: 461822
  Synthetic oligonucleotide

SEQ ID NO: 604987 - DNA, 60 bp, Artificial; identical to SEQ ID NO: 461824
  Synthetic oligonucleotide

SEQ ID NO: 604988 - DNA, 52 bp, Artificial; identical to SEQ ID NO: 461835
  Synthetic oligonucleotide

SEQ ID NO: 604989 - DNA, 60 bp, Artificial; identical to SEQ ID NO: 10564
  Synthetic oligonucleotide

SEQ ID NO: 604990 - DNA, 56 bp, Artificial; identical to SEQ ID NO: 461839
  Synthetic oligonucleotide

SEQ ID NO: 604991 - DNA, 55 bp, Artificial; identical to SEQ ID NO: 461840
  Synthetic oligonucleotide

SEQ ID NO: 604992 - DNA, 60 bp, Artificial; identical to SEQ ID NO: 461844
  Synthetic oligonucleotide

SEQ ID NO: 604993 - DNA, 60 bp, Artificial; identical to SEQ ID NO: 461846
  Synthetic oligonucleotide

SEQ ID NO: 604994 - DNA, 54 bp, Artificial; identical to SEQ ID NO: 461847
  Synthetic oligonucleotide

SEQ ID NO: 604995 - DNA, 60 bp, Artificial; identical to SEQ ID NO: 461851
  Synthetic oligonucleotide

SEQ ID NO: 604996 - DNA, 56 bp, Artificial; identical to SEQ ID NO: 17351
  Synthetic oligonucleotide

SEQ ID NO: 604997 - DNA, 57 bp, Artificial; identical to SEQ ID NO: 461854
  Synthetic oligonucleotide

SEQ ID NO: 604998 - DNA, 55 bp, Artificial; identical to SEQ ID NO: 461855
  Synthetic oligonucleotide

SEQ ID NO: 604999 - DNA, 50 bp, Artificial; identical to SEQ ID NO: 461858
  Synthetic oligonucleotide

SEQ ID NO: 605000 - DNA, 58 bp, Artificial; identical to SEQ ID NO: 16573
  Synthetic oligonucleotide

SEQ ID NO: 605001 - DNA, 56 bp, Artificial; identical to SEQ ID NO: 461861
  Synthetic oligonucleotide

SEQ ID NO: 605002 - DNA, 55 bp, Artificial; identical to SEQ ID NO: 461862
  Synthetic oligonucleotide

SEQ ID NO: 605003 - DNA, 54 bp, Artificial; identical to SEQ ID NO: 461864
  Synthetic oligonucleotide

SEQ ID NO: 605004 - DNA, 54 bp, Artificial; identical to SEQ ID NO: 461865
  Synthetic oligonucleotide

SEQ ID NO: 605005 - DNA, 60 bp, Artificial; identical to SEQ ID NO: 461871
  Synthetic oligonucleotide

SEQ ID NO: 605006 - DNA, 60 bp, Artificial; identical to SEQ ID NO: 461874
  Synthetic oligonucleotide

SEQ ID NO: 605007 - DNA, 60 bp, Artificial; identical to SEQ ID NO: 461880
  Synthetic oligonucleotide

SEQ ID NO: 605008 - DNA, 60 bp, Artificial; identical to SEQ ID NO: 461890
  Synthetic oligonucleotide

SEQ ID NO: 605009 - DNA, 60 bp, Artificial; identical to SEQ ID NO: 461893
  Synthetic oligonucleotide

SEQ ID NO: 605010 - DNA, 60 bp, Artificial; identical to SEQ ID NO: 8077
  Synthetic oligonucleotide

SEQ ID NO: 605011 - DNA, 60 bp, Artificial; identical to SEQ ID NO: 461894
  Synthetic oligonucleotide

SEQ ID NO: 605012 - DNA, 57 bp, Artificial; identical to SEQ ID NO: 461895
  Synthetic oligonucleotide

SEQ ID NO: 605013 - DNA, 57 bp, Artificial; identical to SEQ ID NO: 461897
  Synthetic oligonucleotide

SEQ ID NO: 605014 - DNA, 57 bp, Artificial; identical to SEQ ID NO: 461906
  Synthetic oligonucleotide

SEQ ID NO: 605015 - DNA, 53 bp, Artificial; identical to SEQ ID NO: 461907
  Synthetic oligonucleotide

SEQ ID NO: 605016 - DNA, 55 bp, Artificial; identical to SEQ ID NO: 461910
  Synthetic oligonucleotide

SEQ ID NO: 605017 - DNA, 55 bp, Artificial; identical to SEQ ID NO: 461921
  Synthetic oligonucleotide

SEQ ID NO: 605018 - DNA, 58 bp, Artificial; identical to SEQ ID NO: 461923
  Synthetic oligonucleotide

SEQ ID NO: 605019 - DNA, 53 bp, Artificial; identical to SEQ ID NO: 461926
  Synthetic oligonucleotide

SEQ ID NO: 605020 - DNA, 54 bp, Artificial; identical to SEQ ID NO: 461930
  Synthetic oligonucleotide

SEQ ID NO: 605021 - DNA, 59 bp, Artificial; identical to SEQ ID NO: 461931
  Synthetic oligonucleotide

SEQ ID NO: 605022 - DNA, 55 bp, Artificial; identical to SEQ ID NO: 461936
  Synthetic oligonucleotide

SEQ ID NO: 605023 - DNA, 56 bp, Artificial; identical to SEQ ID NO: 461941
  Synthetic oligonucleotide

SEQ ID NO: 605024 - DNA, 58 bp, Artificial; identical to SEQ ID NO: 461946
  Synthetic oligonucleotide

SEQ ID NO: 605025 - DNA, 55 bp, Artificial; identical to SEQ ID NO: 461947
  Synthetic oligonucleotide

SEQ ID NO: 605026 - DNA, 59 bp, Artificial; identical to SEQ ID NO: 461951
  Synthetic oligonucleotide

SEQ ID NO: 605027 - DNA, 53 bp, Artificial; identical to SEQ ID NO: 461953
  Synthetic oligonucleotide

SEQ ID NO: 605028 - DNA, 60 bp, Artificial; identical to SEQ ID NO: 461955
  Synthetic oligonucleotide

SEQ ID NO: 605029 - DNA, 52 bp, Artificial; identical to SEQ ID NO: 461958
  Synthetic oligonucleotide

SEQ ID NO: 605030 - DNA, 55 bp, Artificial; identical to SEQ ID NO: 461959
  Synthetic oligonucleotide

SEQ ID NO: 605031 - DNA, 55 bp, Artificial; identical to SEQ ID NO: 461960
  Synthetic oligonucleotide

SEQ ID NO: 605032 - DNA, 55 bp, Artificial; identical to SEQ ID NO: 461968
  Synthetic oligonucleotide

SEQ ID NO: 605033 - DNA, 52 bp, Artificial; identical to SEQ ID NO: 461971
  Synthetic oligonucleotide

SEQ ID NO: 605034 - DNA, 59 bp, Artificial; identical to SEQ ID NO: 461972
  Synthetic oligonucleotide

SEQ ID NO: 605035 - DNA, 60 bp, Artificial; identical to SEQ ID NO: 461973
  Synthetic oligonucleotide

SEQ ID NO: 605036 - DNA, 54 bp, Artificial; identical to SEQ ID NO: 461975
  Synthetic oligonucleotide

SEQ ID NO: 605037 - DNA, 55 bp, Artificial; identical to SEQ ID NO: 461978
  Synthetic oligonucleotide

SEQ ID NO: 605038 - DNA, 60 bp, Artificial; identical to SEQ ID NO: 461980
  Synthetic oligonucleotide

SEQ ID NO: 605039 - DNA, 60 bp, Artificial; identical to SEQ ID NO: 461982
  Synthetic oligonucleotide

SEQ ID NO: 605040 - DNA, 59 bp, Artificial; identical to SEQ ID NO: 461983
  Synthetic oligonucleotide

SEQ ID NO: 605041 - DNA, 57 bp, Artificial; identical to SEQ ID NO: 461984
  Synthetic oligonucleotide

SEQ ID NO: 605042 - DNA, 55 bp, Artificial; identical to SEQ ID NO: 461987
  Synthetic oligonucleotide

SEQ ID NO: 605043 - DNA, 60 bp, Artificial; identical to SEQ ID NO: 461988
  Synthetic oligonucleotide

SEQ ID NO: 605044 - DNA, 56 bp, Artificial; identical to SEQ ID NO: 15917
  Synthetic oligonucleotide

SEQ ID NO: 605045 - DNA, 60 bp, Artificial; identical to SEQ ID NO: 461989
  Synthetic oligonucleotide

SEQ ID NO: 605046 - DNA, 55 bp, Artificial; identical to SEQ ID NO: 461993
  Synthetic oligonucleotide

SEQ ID NO: 605047 - DNA, 59 bp, Artificial; identical to SEQ ID NO: 461995
  Synthetic oligonucleotide

SEQ ID NO: 605048 - DNA, 60 bp, Artificial; identical to SEQ ID NO: 461998
  Synthetic oligonucleotide

SEQ ID NO: 605049 - DNA, 51 bp, Artificial; identical to SEQ ID NO: 462001
  Synthetic oligonucleotide

SEQ ID NO: 605050 - DNA, 53 bp, Artificial; identical to SEQ ID NO: 462003
  Synthetic oligonucleotide

SEQ ID NO: 605051 - DNA, 57 bp, Artificial; identical to SEQ ID NO: 462005
  Synthetic oligonucleotide

SEQ ID NO: 605052 - DNA, 57 bp, Artificial; identical to SEQ ID NO: 462006
  Synthetic oligonucleotide

SEQ ID NO: 605053 - DNA, 51 bp, Artificial; identical to SEQ ID NO: 462011
  Synthetic oligonucleotide

SEQ ID NO: 605054 - DNA, 60 bp, Artificial; identical to SEQ ID NO: 462013
  Synthetic oligonucleotide

SEQ ID NO: 605055 - DNA, 55 bp, Artificial; identical to SEQ ID NO: 462015
  Synthetic oligonucleotide

SEQ ID NO: 605056 - DNA, 50 bp, Artificial; identical to SEQ ID NO: 462017
  Synthetic oligonucleotide

SEQ ID NO: 605057 - DNA, 60 bp, Artificial; identical to SEQ ID NO: 462018
  Synthetic oligonucleotide

SEQ ID NO: 605058 - DNA, 60 bp, Artificial; identical to SEQ ID NO: 8043
  Synthetic oligonucleotide

SEQ ID NO: 605059 - DNA, 58 bp, Artificial; identical to SEQ ID NO: 462020
  Synthetic oligonucleotide

SEQ ID NO: 605060 - DNA, 60 bp, Artificial; identical to SEQ ID NO: 462023
  Synthetic oligonucleotide

SEQ ID NO: 605061 - DNA, 56 bp, Artificial; identical to SEQ ID NO: 462024
  Synthetic oligonucleotide

SEQ ID NO: 605062 - DNA, 60 bp, Artificial; identical to SEQ ID NO: 462026
  Synthetic oligonucleotide

SEQ ID NO: 605063 - DNA, 55 bp, Artificial; identical to SEQ ID NO: 462028
  Synthetic oligonucleotide

SEQ ID NO: 605064 - DNA, 60 bp, Artificial; identical to SEQ ID NO: 14180
  Synthetic oligonucleotide

SEQ ID NO: 605065 - DNA, 59 bp, Artificial; identical to SEQ ID NO: 462029
  Synthetic oligonucleotide

SEQ ID NO: 605066 - DNA, 55 bp, Artificial; identical to SEQ ID NO: 462032
  Synthetic oligonucleotide

SEQ ID NO: 605067 - DNA, 56 bp, Artificial; identical to SEQ ID NO: 462041
  Synthetic oligonucleotide

SEQ ID NO: 605068 - DNA, 60 bp, Artificial; identical to SEQ ID NO: 12202
  Synthetic oligonucleotide

SEQ ID NO: 605069 - DNA, 51 bp, Artificial; identical to SEQ ID NO: 462043
  Synthetic oligonucleotide

SEQ ID NO: 605070 - DNA, 56 bp, Artificial; identical to SEQ ID NO: 462044
  Synthetic oligonucleotide

SEQ ID NO: 605071 - DNA, 60 bp, Artificial; identical to SEQ ID NO: 15755
  Synthetic oligonucleotide

SEQ ID NO: 605072 - DNA, 57 bp, Artificial; identical to SEQ ID NO: 462045
  Synthetic oligonucleotide

SEQ ID NO: 605073 - DNA, 60 bp, Artificial; identical to SEQ ID NO: 462046
  Synthetic oligonucleotide

SEQ ID NO: 605074 - DNA, 51 bp, Artificial; identical to SEQ ID NO: 462050
  Synthetic oligonucleotide

SEQ ID NO: 605075 - DNA, 57 bp, Artificial; identical to SEQ ID NO: 462051
  Synthetic oligonucleotide

SEQ ID NO: 605076 - DNA, 55 bp, Artificial; identical to SEQ ID NO: 462053
  Synthetic oligonucleotide

SEQ ID NO: 605077 - DNA, 60 bp, Artificial; identical to SEQ ID NO: 462057
  Synthetic oligonucleotide

SEQ ID NO: 605078 - DNA, 56 bp, Artificial; identical to SEQ ID NO: 462058
  Synthetic oligonucleotide

SEQ ID NO: 605079 - DNA, 55 bp, Artificial; identical to SEQ ID NO: 462059
  Synthetic oligonucleotide

SEQ ID NO: 605080 - DNA, 55 bp, Artificial; identical to SEQ ID NO: 462061
  Synthetic oligonucleotide

SEQ ID NO: 605081 - DNA, 60 bp, Artificial; identical to SEQ ID NO: 462062
  Synthetic oligonucleotide

SEQ ID NO: 605082 - DNA, 53 bp, Artificial; identical to SEQ ID NO: 462064
  Synthetic oligonucleotide

SEQ ID NO: 605083 - DNA, 59 bp, Artificial; identical to SEQ ID NO: 462071
  Synthetic oligonucleotide

SEQ ID NO: 605084 - DNA, 60 bp, Artificial; identical to SEQ ID NO: 11964
  Synthetic oligonucleotide

SEQ ID NO: 605085 - DNA, 60 bp, Artificial; identical to SEQ ID NO: 462077
  Synthetic oligonucleotide

SEQ ID NO: 605086 - DNA, 51 bp, Artificial; identical to SEQ ID NO: 462080
  Synthetic oligonucleotide

SEQ ID NO: 605087 - DNA, 60 bp, Artificial; identical to SEQ ID NO: 462081
  Synthetic oligonucleotide

SEQ ID NO: 605088 - DNA, 51 bp, Artificial; identical to SEQ ID NO: 462083
  Synthetic oligonucleotide

SEQ ID NO: 605089 - DNA, 60 bp, Artificial; identical to SEQ ID NO: 462091
  Synthetic oligonucleotide

SEQ ID NO: 605090 - DNA, 59 bp, Artificial; identical to SEQ ID NO: 462093
  Synthetic oligonucleotide

SEQ ID NO: 605091 - DNA, 57 bp, Artificial; identical to SEQ ID NO: 462094
  Synthetic oligonucleotide

SEQ ID NO: 605092 - DNA, 60 bp, Artificial; identical to SEQ ID NO: 462095
  Synthetic oligonucleotide

SEQ ID NO: 605093 - DNA, 56 bp, Artificial; identical to SEQ ID NO: 462097
  Synthetic oligonucleotide

SEQ ID NO: 605094 - DNA, 60 bp, Artificial; identical to SEQ ID NO: 462099
  Synthetic oligonucleotide

SEQ ID NO: 605095 - DNA, 60 bp, Artificial; identical to SEQ ID NO: 462101
  Synthetic oligonucleotide

SEQ ID NO: 605096 - DNA, 53 bp, Artificial; identical to SEQ ID NO: 17452
  Synthetic oligonucleotide

SEQ ID NO: 605097 - DNA, 52 bp, Artificial; identical to SEQ ID NO: 462102
  Synthetic oligonucleotide

SEQ ID NO: 605098 - DNA, 56 bp, Artificial; identical to SEQ ID NO: 462107
  Synthetic oligonucleotide

SEQ ID NO: 605099 - DNA, 57 bp, Artificial; identical to SEQ ID NO: 462108
  Synthetic oligonucleotide

SEQ ID NO: 605100 - DNA, 60 bp, Artificial; identical to SEQ ID NO: 126
  Synthetic oligonucleotide

SEQ ID NO: 605101 - DNA, 54 bp, Artificial; identical to SEQ ID NO: 462112
  Synthetic oligonucleotide

SEQ ID NO: 605102 - DNA, 55 bp, Artificial; identical to SEQ ID NO: 462113
  Synthetic oligonucleotide

SEQ ID NO: 605103 - DNA, 59 bp, Artificial; identical to SEQ ID NO: 462121
  Synthetic oligonucleotide

SEQ ID NO: 605104 - DNA, 55 bp, Artificial; identical to SEQ ID NO: 462122
  Synthetic oligonucleotide

SEQ ID NO: 605105 - DNA, 54 bp, Artificial; identical to SEQ ID NO: 462125
  Synthetic oligonucleotide

SEQ ID NO: 605106 - DNA, 60 bp, Artificial; identical to SEQ ID NO: 462126
  Synthetic oligonucleotide

SEQ ID NO: 605107 - DNA, 55 bp, Artificial; identical to SEQ ID NO: 462127
  Synthetic oligonucleotide

SEQ ID NO: 605108 - DNA, 53 bp, Artificial; identical to SEQ ID NO: 462128
  Synthetic oligonucleotide

SEQ ID NO: 605109 - DNA, 55 bp, Artificial; identical to SEQ ID NO: 462132
  Synthetic oligonucleotide

SEQ ID NO: 605110 - DNA, 55 bp, Artificial; identical to SEQ ID NO: 462138
  Synthetic oligonucleotide

SEQ ID NO: 605111 - DNA, 53 bp, Artificial; identical to SEQ ID NO: 462147
  Synthetic oligonucleotide

SEQ ID NO: 605112 - DNA, 55 bp, Artificial; identical to SEQ ID NO: 13179
  Synthetic oligonucleotide

SEQ ID NO: 605113 - DNA, 60 bp, Artificial; identical to SEQ ID NO: 462150
  Synthetic oligonucleotide

SEQ ID NO: 605114 - DNA, 55 bp, Artificial; identical to SEQ ID NO: 462154
  Synthetic oligonucleotide

SEQ ID NO: 605115 - DNA, 53 bp, Artificial; identical to SEQ ID NO: 462157
  Synthetic oligonucleotide

SEQ ID NO: 605116 - DNA, 55 bp, Artificial; identical to SEQ ID NO: 462160
  Synthetic oligonucleotide

SEQ ID NO: 605117 - DNA, 51 bp, Artificial; identical to SEQ ID NO: 462162
  Synthetic oligonucleotide

SEQ ID NO: 605118 - DNA, 57 bp, Artificial; identical to SEQ ID NO: 462163
  Synthetic oligonucleotide

SEQ ID NO: 605119 - DNA, 60 bp, Artificial; identical to SEQ ID NO: 462165
  Synthetic oligonucleotide

SEQ ID NO: 605120 - DNA, 56 bp, Artificial; identical to SEQ ID NO: 462167
  Synthetic oligonucleotide

SEQ ID NO: 605121 - DNA, 57 bp, Artificial; identical to SEQ ID NO: 462168
  Synthetic oligonucleotide

SEQ ID NO: 605122 - DNA, 52 bp, Artificial; identical to SEQ ID NO: 14612
  Synthetic oligonucleotide

SEQ ID NO: 605123 - DNA, 56 bp, Artificial; identical to SEQ ID NO: 462174
  Synthetic oligonucleotide

SEQ ID NO: 605124 - DNA, 55 bp, Artificial; identical to SEQ ID NO: 462177
  Synthetic oligonucleotide

SEQ ID NO: 605125 - DNA, 60 bp, Artificial; identical to SEQ ID NO: 462186
  Synthetic oligonucleotide

SEQ ID NO: 605126 - DNA, 56 bp, Artificial; identical to SEQ ID NO: 462187
  Synthetic oligonucleotide

SEQ ID NO: 605127 - DNA, 60 bp, Artificial; identical to SEQ ID NO: 462188
  Synthetic oligonucleotide

SEQ ID NO: 605128 - DNA, 56 bp, Artificial; identical to SEQ ID NO: 462191
  Synthetic oligonucleotide

SEQ ID NO: 605129 - DNA, 59 bp, Artificial; identical to SEQ ID NO: 19086
  Synthetic oligonucleotide

SEQ ID NO: 605130 - DNA, 59 bp, Artificial; identical to SEQ ID NO: 462192
  Synthetic oligonucleotide

SEQ ID NO: 605131 - DNA, 59 bp, Artificial; identical to SEQ ID NO: 462193
  Synthetic oligonucleotide

SEQ ID NO: 605132 - DNA, 58 bp, Artificial; identical to SEQ ID NO: 462197
  Synthetic oligonucleotide

SEQ ID NO: 605133 - DNA, 60 bp, Artificial; identical to SEQ ID NO: 462201
  Synthetic oligonucleotide

SEQ ID NO: 605134 - DNA, 55 bp, Artificial; identical to SEQ ID NO: 5816
  Synthetic oligonucleotide

SEQ ID NO: 605135 - DNA, 60 bp, Artificial; identical to SEQ ID NO: 462205
  Synthetic oligonucleotide

SEQ ID NO: 605136 - DNA, 55 bp, Artificial; identical to SEQ ID NO: 462207
  Synthetic oligonucleotide

SEQ ID NO: 605137 - DNA, 55 bp, Artificial; identical to SEQ ID NO: 462208
  Synthetic oligonucleotide

SEQ ID NO: 605138 - DNA, 55 bp, Artificial; identical to SEQ ID NO: 462210
  Synthetic oligonucleotide

SEQ ID NO: 605139 - DNA, 52 bp, Artificial; identical to SEQ ID NO: 462211
  Synthetic oligonucleotide

SEQ ID NO: 605140 - DNA, 60 bp, Artificial; identical to SEQ ID NO: 9222
  Synthetic oligonucleotide

SEQ ID NO: 605141 - DNA, 53 bp, Artificial; identical to SEQ ID NO: 462215
  Synthetic oligonucleotide

SEQ ID NO: 605142 - DNA, 58 bp, Artificial; identical to SEQ ID NO: 462217
  Synthetic oligonucleotide

SEQ ID NO: 605143 - DNA, 60 bp, Artificial; identical to SEQ ID NO: 462218
  Synthetic oligonucleotide

SEQ ID NO: 605144 - DNA, 59 bp, Artificial; identical to SEQ ID NO: 462222
  Synthetic oligonucleotide

SEQ ID NO: 605145 - DNA, 58 bp, Artificial; identical to SEQ ID NO: 462225
  Synthetic oligonucleotide

SEQ ID NO: 605146 - DNA, 57 bp, Artificial; identical to SEQ ID NO: 462233
  Synthetic oligonucleotide

SEQ ID NO: 605147 - DNA, 60 bp, Artificial; identical to SEQ ID NO: 462238
  Synthetic oligonucleotide

SEQ ID NO: 605148 - DNA, 60 bp, Artificial; identical to SEQ ID NO: 462239
  Synthetic oligonucleotide

SEQ ID NO: 605149 - DNA, 54 bp, Artificial; identical to SEQ ID NO: 462243
  Synthetic oligonucleotide

SEQ ID NO: 605150 - DNA, 57 bp, Artificial; identical to SEQ ID NO: 462246
  Synthetic oligonucleotide

SEQ ID NO: 605151 - DNA, 56 bp, Artificial; identical to SEQ ID NO: 462247
  Synthetic oligonucleotide

SEQ ID NO: 605152 - DNA, 59 bp, Artificial; identical to SEQ ID NO: 462249
  Synthetic oligonucleotide

SEQ ID NO: 605153 - DNA, 60 bp, Artificial; identical to SEQ ID NO: 462250
  Synthetic oligonucleotide

SEQ ID NO: 605154 - DNA, 55 bp, Artificial; identical to SEQ ID NO: 462253
  Synthetic oligonucleotide

SEQ ID NO: 605155 - DNA, 60 bp, Artificial; identical to SEQ ID NO: 462254
  Synthetic oligonucleotide

SEQ ID NO: 605156 - DNA, 55 bp, Artificial; identical to SEQ ID NO: 462255
  Synthetic oligonucleotide

SEQ ID NO: 605157 - DNA, 49 bp, Artificial; identical to SEQ ID NO: 462256
  Synthetic oligonucleotide

SEQ ID NO: 605158 - DNA, 55 bp, Artificial; identical to SEQ ID NO: 462258
  Synthetic oligonucleotide

SEQ ID NO: 605159 - DNA, 60 bp, Artificial; identical to SEQ ID NO: 462259
  Synthetic oligonucleotide

SEQ ID NO: 605160 - DNA, 58 bp, Artificial; identical to SEQ ID NO: 462260
  Synthetic oligonucleotide

SEQ ID NO: 605161 - DNA, 55 bp, Artificial; identical to SEQ ID NO: 462261
  Synthetic oligonucleotide

SEQ ID NO: 605162 - DNA, 55 bp, Artificial; identical to SEQ ID NO: 462267
  Synthetic oligonucleotide

SEQ ID NO: 605163 - DNA, 55 bp, Artificial; identical to SEQ ID NO: 462272
  Synthetic oligonucleotide

SEQ ID NO: 605164 - DNA, 56 bp, Artificial; identical to SEQ ID NO: 462277
  Synthetic oligonucleotide

SEQ ID NO: 605165 - DNA, 51 bp, Artificial; identical to SEQ ID NO: 462280
  Synthetic oligonucleotide

SEQ ID NO: 605166 - DNA, 57 bp, Artificial; identical to SEQ ID NO: 462281
  Synthetic oligonucleotide

SEQ ID NO: 605167 - DNA, 57 bp, Artificial; identical to SEQ ID NO: 462282
  Synthetic oligonucleotide

SEQ ID NO: 605168 - DNA, 54 bp, Artificial; identical to SEQ ID NO: 462283
  Synthetic oligonucleotide

SEQ ID NO: 605169 - DNA, 56 bp, Artificial; identical to SEQ ID NO: 462291
  Synthetic oligonucleotide

SEQ ID NO: 605170 - DNA, 60 bp, Artificial; identical to SEQ ID NO: 462292
  Synthetic oligonucleotide

SEQ ID NO: 605171 - DNA, 55 bp, Artificial; identical to SEQ ID NO: 462293
  Synthetic oligonucleotide

SEQ ID NO: 605172 - DNA, 60 bp, Artificial; identical to SEQ ID NO: 462294
  Synthetic oligonucleotide

SEQ ID NO: 605173 - DNA, 60 bp, Artificial; identical to SEQ ID NO: 462298
  Synthetic oligonucleotide

SEQ ID NO: 605174 - DNA, 53 bp, Artificial; identical to SEQ ID NO: 462299
  Synthetic oligonucleotide

SEQ ID NO: 605175 - DNA, 55 bp, Artificial; identical to SEQ ID NO: 462300
  Synthetic oligonucleotide

SEQ ID NO: 605176 - DNA, 59 bp, Artificial; identical to SEQ ID NO: 462305
  Synthetic oligonucleotide

SEQ ID NO: 605177 - DNA, 58 bp, Artificial; identical to SEQ ID NO: 462307
  Synthetic oligonucleotide

SEQ ID NO: 605178 - DNA, 55 bp, Artificial; identical to SEQ ID NO: 462308
  Synthetic oligonucleotide

SEQ ID NO: 605179 - DNA, 58 bp, Artificial; identical to SEQ ID NO: 462310
  Synthetic oligonucleotide

SEQ ID NO: 605180 - DNA, 55 bp, Artificial; identical to SEQ ID NO: 462311
  Synthetic oligonucleotide

SEQ ID NO: 605181 - DNA, 55 bp, Artificial; identical to SEQ ID NO: 462312
  Synthetic oligonucleotide

SEQ ID NO: 605182 - DNA, 55 bp, Artificial; identical to SEQ ID NO: 462313
  Synthetic oligonucleotide

SEQ ID NO: 605183 - DNA, 60 bp, Artificial; identical to SEQ ID NO: 462314
  Synthetic oligonucleotide

SEQ ID NO: 605184 - DNA, 50 bp, Artificial; identical to SEQ ID NO: 462318
  Synthetic oligonucleotide

SEQ ID NO: 605185 - DNA, 60 bp, Artificial; identical to SEQ ID NO: 462321
  Synthetic oligonucleotide

SEQ ID NO: 605186 - DNA, 57 bp, Artificial; identical to SEQ ID NO: 462326
  Synthetic oligonucleotide

SEQ ID NO: 605187 - DNA, 58 bp, Artificial; identical to SEQ ID NO: 462329
  Synthetic oligonucleotide

SEQ ID NO: 605188 - DNA, 58 bp, Artificial; identical to SEQ ID NO: 462330
  Synthetic oligonucleotide

SEQ ID NO: 605189 - DNA, 60 bp, Artificial; identical to SEQ ID NO: 462331
  Synthetic oligonucleotide

SEQ ID NO: 605190 - DNA, 56 bp, Artificial; identical to SEQ ID NO: 16705
  Synthetic oligonucleotide

SEQ ID NO: 605191 - DNA, 57 bp, Artificial; identical to SEQ ID NO: 462341
  Synthetic oligonucleotide

SEQ ID NO: 605192 - DNA, 55 bp, Artificial; identical to SEQ ID NO: 462343
  Synthetic oligonucleotide

SEQ ID NO: 605193 - DNA, 57 bp, Artificial; identical to SEQ ID NO: 462352
  Synthetic oligonucleotide

SEQ ID NO: 605194 - DNA, 53 bp, Artificial; identical to SEQ ID NO: 462353
  Synthetic oligonucleotide

SEQ ID NO: 605195 - DNA, 60 bp, Artificial; identical to SEQ ID NO: 462356
  Synthetic oligonucleotide

SEQ ID NO: 605196 - DNA, 55 bp, Artificial; identical to SEQ ID NO: 462359
  Synthetic oligonucleotide

SEQ ID NO: 605197 - DNA, 51 bp, Artificial; identical to SEQ ID NO: 462360
  Synthetic oligonucleotide

SEQ ID NO: 605198 - DNA, 57 bp, Artificial; identical to SEQ ID NO: 462361
  Synthetic oligonucleotide

SEQ ID NO: 605199 - DNA, 58 bp, Artificial; identical to SEQ ID NO: 462362
  Synthetic oligonucleotide

SEQ ID NO: 605200 - DNA, 60 bp, Artificial; identical to SEQ ID NO: 462365
  Synthetic oligonucleotide

SEQ ID NO: 605201 - DNA, 57 bp, Artificial; identical to SEQ ID NO: 462366
  Synthetic oligonucleotide

SEQ ID NO: 605202 - DNA, 57 bp, Artificial; identical to SEQ ID NO: 462368
  Synthetic oligonucleotide

SEQ ID NO: 605203 - DNA, 58 bp, Artificial; identical to SEQ ID NO: 462371
  Synthetic oligonucleotide

SEQ ID NO: 605204 - DNA, 53 bp, Artificial; identical to SEQ ID NO: 462374
  Synthetic oligonucleotide

SEQ ID NO: 605205 - DNA, 59 bp, Artificial; identical to SEQ ID NO: 462380
  Synthetic oligonucleotide

SEQ ID NO: 605206 - DNA, 60 bp, Artificial; identical to SEQ ID NO: 462386
  Synthetic oligonucleotide

SEQ ID NO: 605207 - DNA, 60 bp, Artificial; identical to SEQ ID NO: 462387
  Synthetic oligonucleotide

SEQ ID NO: 605208 - DNA, 60 bp, Artificial; identical to SEQ ID NO: 6424
  Synthetic oligonucleotide

SEQ ID NO: 605209 - DNA, 56 bp, Artificial; identical to SEQ ID NO: 462391
  Synthetic oligonucleotide

SEQ ID NO: 605210 - DNA, 60 bp, Artificial; identical to SEQ ID NO: 6411
  Synthetic oligonucleotide

SEQ ID NO: 605211 - DNA, 60 bp, Artificial; identical to SEQ ID NO: 462398
  Synthetic oligonucleotide

SEQ ID NO: 605212 - DNA, 51 bp, Artificial; identical to SEQ ID NO: 462399
  Synthetic oligonucleotide

SEQ ID NO: 605213 - DNA, 59 bp, Artificial; identical to SEQ ID NO: 462400
  Synthetic oligonucleotide

SEQ ID NO: 605214 - DNA, 57 bp, Artificial; identical to SEQ ID NO: 462405
  Synthetic oligonucleotide

SEQ ID NO: 605215 - DNA, 60 bp, Artificial; identical to SEQ ID NO: 462408
  Synthetic oligonucleotide

SEQ ID NO: 605216 - DNA, 50 bp, Artificial; identical to SEQ ID NO: 462411
  Synthetic oligonucleotide

SEQ ID NO: 605217 - DNA, 60 bp, Artificial; identical to SEQ ID NO: 462412
  Synthetic oligonucleotide

SEQ ID NO: 605218 - DNA, 60 bp, Artificial; identical to SEQ ID NO: 462413
  Synthetic oligonucleotide

SEQ ID NO: 605219 - DNA, 55 bp, Artificial; identical to SEQ ID NO: 462414
  Synthetic oligonucleotide

SEQ ID NO: 605220 - DNA, 59 bp, Artificial; identical to SEQ ID NO: 462419
  Synthetic oligonucleotide

SEQ ID NO: 605221 - DNA, 57 bp, Artificial; identical to SEQ ID NO: 462421
  Synthetic oligonucleotide

SEQ ID NO: 605222 - DNA, 60 bp, Artificial; identical to SEQ ID NO: 462422
  Synthetic oligonucleotide

SEQ ID NO: 605223 - DNA, 60 bp, Artificial; identical to SEQ ID NO: 462425
  Synthetic oligonucleotide

SEQ ID NO: 605224 - DNA, 60 bp, Artificial; identical to SEQ ID NO: 13944
  Synthetic oligonucleotide

SEQ ID NO: 605225 - DNA, 54 bp, Artificial; identical to SEQ ID NO: 462428
  Synthetic oligonucleotide

SEQ ID NO: 605226 - DNA, 54 bp, Artificial; identical to SEQ ID NO: 462431
  Synthetic oligonucleotide

SEQ ID NO: 605227 - DNA, 56 bp, Artificial; identical to SEQ ID NO: 462432
  Synthetic oligonucleotide

SEQ ID NO: 605228 - DNA, 51 bp, Artificial; identical to SEQ ID NO: 462433
  Synthetic oligonucleotide

SEQ ID NO: 605229 - DNA, 52 bp, Artificial; identical to SEQ ID NO: 462435
  Synthetic oligonucleotide

SEQ ID NO: 605230 - DNA, 53 bp, Artificial; identical to SEQ ID NO: 462439
  Synthetic oligonucleotide

SEQ ID NO: 605231 - DNA, 55 bp, Artificial; identical to SEQ ID NO: 462441
  Synthetic oligonucleotide

SEQ ID NO: 605232 - DNA, 52 bp, Artificial; identical to SEQ ID NO: 462442
  Synthetic oligonucleotide

SEQ ID NO: 605233 - DNA, 58 bp, Artificial; identical to SEQ ID NO: 462444
  Synthetic oligonucleotide

SEQ ID NO: 605234 - DNA, 55 bp, Artificial; identical to SEQ ID NO: 462445
  Synthetic oligonucleotide

SEQ ID NO: 605235 - DNA, 55 bp, Artificial; identical to SEQ ID NO: 462446
  Synthetic oligonucleotide

SEQ ID NO: 605236 - DNA, 55 bp, Artificial; identical to SEQ ID NO: 462447
  Synthetic oligonucleotide

SEQ ID NO: 605237 - DNA, 53 bp, Artificial; identical to SEQ ID NO: 462448
  Synthetic oligonucleotide

SEQ ID NO: 605238 - DNA, 53 bp, Artificial; identical to SEQ ID NO: 462451
  Synthetic oligonucleotide

SEQ ID NO: 605239 - DNA, 60 bp, Artificial; identical to SEQ ID NO: 462452
  Synthetic oligonucleotide

SEQ ID NO: 605240 - DNA, 58 bp, Artificial; identical to SEQ ID NO: 462454
  Synthetic oligonucleotide

SEQ ID NO: 605241 - DNA, 57 bp, Artificial; identical to SEQ ID NO: 462456
  Synthetic oligonucleotide

SEQ ID NO: 605242 - DNA, 60 bp, Artificial; identical to SEQ ID NO: 462461
  Synthetic oligonucleotide

SEQ ID NO: 605243 - DNA, 60 bp, Artificial; identical to SEQ ID NO: 462463
  Synthetic oligonucleotide

SEQ ID NO: 605244 - DNA, 55 bp, Artificial; identical to SEQ ID NO: 462466
  Synthetic oligonucleotide

SEQ ID NO: 605245 - DNA, 58 bp, Artificial; identical to SEQ ID NO: 462467
  Synthetic oligonucleotide

SEQ ID NO: 605246 - DNA, 55 bp, Artificial; identical to SEQ ID NO: 462469
  Synthetic oligonucleotide

SEQ ID NO: 605247 - DNA, 59 bp, Artificial; identical to SEQ ID NO: 462470
  Synthetic oligonucleotide

SEQ ID NO: 605248 - DNA, 60 bp, Artificial; identical to SEQ ID NO: 462474
  Synthetic oligonucleotide

SEQ ID NO: 605249 - DNA, 60 bp, Artificial; identical to SEQ ID NO: 462476
  Synthetic oligonucleotide

SEQ ID NO: 605250 - DNA, 55 bp, Artificial; identical to SEQ ID NO: 462484
  Synthetic oligonucleotide

SEQ ID NO: 605251 - DNA, 60 bp, Artificial; identical to SEQ ID NO: 462485
  Synthetic oligonucleotide

SEQ ID NO: 605252 - DNA, 60 bp, Artificial; identical to SEQ ID NO: 462487
  Synthetic oligonucleotide

SEQ ID NO: 605253 - DNA, 60 bp, Artificial; identical to SEQ ID NO: 462488
  Synthetic oligonucleotide

SEQ ID NO: 605254 - DNA, 55 bp, Artificial; identical to SEQ ID NO: 462490
  Synthetic oligonucleotide

SEQ ID NO: 605255 - DNA, 55 bp, Artificial; identical to SEQ ID NO: 462496
  Synthetic oligonucleotide

SEQ ID NO: 605256 - DNA, 59 bp, Artificial; identical to SEQ ID NO: 462497
  Synthetic oligonucleotide

SEQ ID NO: 605257 - DNA, 60 bp, Artificial; identical to SEQ ID NO: 462500
  Synthetic oligonucleotide

SEQ ID NO: 605258 - DNA, 60 bp, Artificial; identical to SEQ ID NO: 462503
  Synthetic oligonucleotide

SEQ ID NO: 605259 - DNA, 60 bp, Artificial; identical to SEQ ID NO: 462507
  Synthetic oligonucleotide

SEQ ID NO: 605260 - DNA, 60 bp, Artificial; identical to SEQ ID NO: 462508
  Synthetic oligonucleotide

SEQ ID NO: 605261 - DNA, 60 bp, Artificial; identical to SEQ ID NO: 462509
  Synthetic oligonucleotide

SEQ ID NO: 605262 - DNA, 59 bp, Artificial; identical to SEQ ID NO: 462510
  Synthetic oligonucleotide

SEQ ID NO: 605263 - DNA, 55 bp, Artificial; identical to SEQ ID NO: 462513
  Synthetic oligonucleotide

SEQ ID NO: 605264 - DNA, 59 bp, Artificial; identical to SEQ ID NO: 462519
  Synthetic oligonucleotide

SEQ ID NO: 605265 - DNA, 55 bp, Artificial; identical to SEQ ID NO: 462520
  Synthetic oligonucleotide

SEQ ID NO: 605266 - DNA, 55 bp, Artificial; identical to SEQ ID NO: 462521
  Synthetic oligonucleotide

SEQ ID NO: 605267 - DNA, 58 bp, Artificial; identical to SEQ ID NO: 462523
  Synthetic oligonucleotide

SEQ ID NO: 605268 - DNA, 60 bp, Artificial; identical to SEQ ID NO: 462530
  Synthetic oligonucleotide

SEQ ID NO: 605269 - DNA, 60 bp, Artificial; identical to SEQ ID NO: 462537
  Synthetic oligonucleotide

SEQ ID NO: 605270 - DNA, 60 bp, Artificial; identical to SEQ ID NO: 462538
  Synthetic oligonucleotide

SEQ ID NO: 605271 - DNA, 57 bp, Artificial; identical to SEQ ID NO: 462539
  Synthetic oligonucleotide

SEQ ID NO: 605272 - DNA, 59 bp, Artificial; identical to SEQ ID NO: 462546
  Synthetic oligonucleotide

SEQ ID NO: 605273 - DNA, 54 bp, Artificial; identical to SEQ ID NO: 462549
  Synthetic oligonucleotide

SEQ ID NO: 605274 - DNA, 60 bp, Artificial; identical to SEQ ID NO: 462551
  Synthetic oligonucleotide

SEQ ID NO: 605275 - DNA, 60 bp, Artificial; identical to SEQ ID NO: 462558
  Synthetic oligonucleotide

SEQ ID NO: 605276 - DNA, 60 bp, Artificial; identical to SEQ ID NO: 462563
  Synthetic oligonucleotide

SEQ ID NO: 605277 - DNA, 56 bp, Artificial; identical to SEQ ID NO: 462564
  Synthetic oligonucleotide

SEQ ID NO: 605278 - DNA, 50 bp, Artificial; identical to SEQ ID NO: 462565
  Synthetic oligonucleotide

SEQ ID NO: 605279 - DNA, 60 bp, Artificial; identical to SEQ ID NO: 462568
  Synthetic oligonucleotide

SEQ ID NO: 605280 - DNA, 60 bp, Artificial; identical to SEQ ID NO: 462569
  Synthetic oligonucleotide

SEQ ID NO: 605281 - DNA, 55 bp, Artificial; identical to SEQ ID NO: 462585
  Synthetic oligonucleotide

SEQ ID NO: 605282 - DNA, 55 bp, Artificial; identical to SEQ ID NO: 462589
  Synthetic oligonucleotide

SEQ ID NO: 605283 - DNA, 56 bp, Artificial; identical to SEQ ID NO: 462591
  Synthetic oligonucleotide

SEQ ID NO: 605284 - DNA, 55 bp, Artificial; identical to SEQ ID NO: 462596
  Synthetic oligonucleotide

SEQ ID NO: 605285 - DNA, 59 bp, Artificial; identical to SEQ ID NO: 462598
  Synthetic oligonucleotide

SEQ ID NO: 605286 - DNA, 54 bp, Artificial; identical to SEQ ID NO: 462602
  Synthetic oligonucleotide

SEQ ID NO: 605287 - DNA, 60 bp, Artificial; identical to SEQ ID NO: 462603
  Synthetic oligonucleotide

SEQ ID NO: 605288 - DNA, 59 bp, Artificial; identical to SEQ ID NO: 462604
  Synthetic oligonucleotide

SEQ ID NO: 605289 - DNA, 54 bp, Artificial; identical to SEQ ID NO: 462606
  Synthetic oligonucleotide

SEQ ID NO: 605290 - DNA, 58 bp, Artificial; identical to SEQ ID NO: 11546
  Synthetic oligonucleotide

SEQ ID NO: 605291 - DNA, 55 bp, Artificial; identical to SEQ ID NO: 462609
  Synthetic oligonucleotide

SEQ ID NO: 605292 - DNA, 60 bp, Artificial; identical to SEQ ID NO: 462610
  Synthetic oligonucleotide

SEQ ID NO: 605293 - DNA, 60 bp, Artificial; identical to SEQ ID NO: 462612
  Synthetic oligonucleotide

SEQ ID NO: 605294 - DNA, 60 bp, Artificial; identical to SEQ ID NO: 462617
  Synthetic oligonucleotide

SEQ ID NO: 605295 - DNA, 55 bp, Artificial; identical to SEQ ID NO: 462619
  Synthetic oligonucleotide

SEQ ID NO: 605296 - DNA, 52 bp, Artificial; identical to SEQ ID NO: 462621
  Synthetic oligonucleotide

SEQ ID NO: 605297 - DNA, 55 bp, Artificial; identical to SEQ ID NO: 18932
  Synthetic oligonucleotide

SEQ ID NO: 605298 - DNA, 55 bp, Artificial; identical to SEQ ID NO: 462623
  Synthetic oligonucleotide

SEQ ID NO: 605299 - DNA, 50 bp, Artificial; identical to SEQ ID NO: 462625
  Synthetic oligonucleotide

SEQ ID NO: 605300 - DNA, 60 bp, Artificial; identical to SEQ ID NO: 462632
  Synthetic oligonucleotide

SEQ ID NO: 605301 - DNA, 60 bp, Artificial; identical to SEQ ID NO: 462633
  Synthetic oligonucleotide

SEQ ID NO: 605302 - DNA, 55 bp, Artificial; identical to SEQ ID NO: 462635
  Synthetic oligonucleotide

SEQ ID NO: 605303 - DNA, 60 bp, Artificial; identical to SEQ ID NO: 462636
  Synthetic oligonucleotide

SEQ ID NO: 605304 - DNA, 59 bp, Artificial; identical to SEQ ID NO: 462639
  Synthetic oligonucleotide

SEQ ID NO: 605305 - DNA, 60 bp, Artificial; identical to SEQ ID NO: 462640
  Synthetic oligonucleotide

SEQ ID NO: 605306 - DNA, 59 bp, Artificial; identical to SEQ ID NO: 462647
  Synthetic oligonucleotide

SEQ ID NO: 605307 - DNA, 52 bp, Artificial; identical to SEQ ID NO: 462648
  Synthetic oligonucleotide

SEQ ID NO: 605308 - DNA, 55 bp, Artificial; identical to SEQ ID NO: 462649
  Synthetic oligonucleotide

SEQ ID NO: 605309 - DNA, 59 bp, Artificial; identical to SEQ ID NO: 462654
  Synthetic oligonucleotide

SEQ ID NO: 605310 - DNA, 60 bp, Artificial; identical to SEQ ID NO: 462656
  Synthetic oligonucleotide

SEQ ID NO: 605311 - DNA, 60 bp, Artificial; identical to SEQ ID NO: 462658
  Synthetic oligonucleotide

SEQ ID NO: 605312 - DNA, 54 bp, Artificial; identical to SEQ ID NO: 462660
  Synthetic oligonucleotide

SEQ ID NO: 605313 - DNA, 53 bp, Artificial; identical to SEQ ID NO: 19901
  Synthetic oligonucleotide

SEQ ID NO: 605314 - DNA, 54 bp, Artificial; identical to SEQ ID NO: 462664
  Synthetic oligonucleotide

SEQ ID NO: 605315 - DNA, 59 bp, Artificial; identical to SEQ ID NO: 462665
  Synthetic oligonucleotide

SEQ ID NO: 605316 - DNA, 55 bp, Artificial; identical to SEQ ID NO: 462666
  Synthetic oligonucleotide

SEQ ID NO: 605317 - DNA, 50 bp, Artificial; identical to SEQ ID NO: 462669
  Synthetic oligonucleotide

SEQ ID NO: 605318 - DNA, 53 bp, Artificial; identical to SEQ ID NO: 462670
  Synthetic oligonucleotide

SEQ ID NO: 605319 - DNA, 60 bp, Artificial; identical to SEQ ID NO: 462672
  Synthetic oligonucleotide

SEQ ID NO: 605320 - DNA, 60 bp, Artificial; identical to SEQ ID NO: 462673
  Synthetic oligonucleotide

SEQ ID NO: 605321 - DNA, 60 bp, Artificial; identical to SEQ ID NO: 462682
  Synthetic oligonucleotide

SEQ ID NO: 605322 - DNA, 55 bp, Artificial; identical to SEQ ID NO: 462683
  Synthetic oligonucleotide

SEQ ID NO: 605323 - DNA, 55 bp, Artificial; identical to SEQ ID NO: 462685
  Synthetic oligonucleotide

SEQ ID NO: 605324 - DNA, 53 bp, Artificial; identical to SEQ ID NO: 462691
  Synthetic oligonucleotide

SEQ ID NO: 605325 - DNA, 50 bp, Artificial; identical to SEQ ID NO: 462698
  Synthetic oligonucleotide

SEQ ID NO: 605326 - DNA, 58 bp, Artificial; identical to SEQ ID NO: 462699
  Synthetic oligonucleotide

SEQ ID NO: 605327 - DNA, 51 bp, Artificial; identical to SEQ ID NO: 462701
  Synthetic oligonucleotide

SEQ ID NO: 605328 - DNA, 60 bp, Artificial; identical to SEQ ID NO: 462709
  Synthetic oligonucleotide

SEQ ID NO: 605329 - DNA, 57 bp, Artificial; identical to SEQ ID NO: 462710
  Synthetic oligonucleotide

SEQ ID NO: 605330 - DNA, 51 bp, Artificial; identical to SEQ ID NO: 462715
  Synthetic oligonucleotide

SEQ ID NO: 605331 - DNA, 60 bp, Artificial; identical to SEQ ID NO: 462720
  Synthetic oligonucleotide

SEQ ID NO: 605332 - DNA, 60 bp, Artificial; identical to SEQ ID NO: 462721
  Synthetic oligonucleotide

SEQ ID NO: 605333 - DNA, 57 bp, Artificial; identical to SEQ ID NO: 11014
  Synthetic oligonucleotide

SEQ ID NO: 605334 - DNA, 60 bp, Artificial; identical to SEQ ID NO: 462724
  Synthetic oligonucleotide

SEQ ID NO: 605335 - DNA, 55 bp, Artificial; identical to SEQ ID NO: 462728
  Synthetic oligonucleotide

SEQ ID NO: 605336 - DNA, 60 bp, Artificial; identical to SEQ ID NO: 462730
  Synthetic oligonucleotide

SEQ ID NO: 605337 - DNA, 60 bp, Artificial; identical to SEQ ID NO: 462732
  Synthetic oligonucleotide

SEQ ID NO: 605338 - DNA, 50 bp, Artificial; identical to SEQ ID NO: 462733
  Synthetic oligonucleotide

SEQ ID NO: 605339 - DNA, 58 bp, Artificial; identical to SEQ ID NO: 462739
  Synthetic oligonucleotide

SEQ ID NO: 605340 - DNA, 58 bp, Artificial; identical to SEQ ID NO: 462746
  Synthetic oligonucleotide

SEQ ID NO: 605341 - DNA, 58 bp, Artificial; identical to SEQ ID NO: 462748
  Synthetic oligonucleotide

SEQ ID NO: 605342 - DNA, 51 bp, Artificial; identical to SEQ ID NO: 462749
  Synthetic oligonucleotide

SEQ ID NO: 605343 - DNA, 60 bp, Artificial; identical to SEQ ID NO: 462753
  Synthetic oligonucleotide

SEQ ID NO: 605344 - DNA, 56 bp, Artificial; identical to SEQ ID NO: 462760
  Synthetic oligonucleotide

SEQ ID NO: 605345 - DNA, 55 bp, Artificial; identical to SEQ ID NO: 462762
  Synthetic oligonucleotide

SEQ ID NO: 605346 - DNA, 60 bp, Artificial; identical to SEQ ID NO: 462763
  Synthetic oligonucleotide

SEQ ID NO: 605347 - DNA, 58 bp, Artificial; identical to SEQ ID NO: 462765
  Synthetic oligonucleotide

SEQ ID NO: 605348 - DNA, 55 bp, Artificial; identical to SEQ ID NO: 462767
  Synthetic oligonucleotide

SEQ ID NO: 605349 - DNA, 57 bp, Artificial; identical to SEQ ID NO: 462768
  Synthetic oligonucleotide

SEQ ID NO: 605350 - DNA, 56 bp, Artificial; identical to SEQ ID NO: 462769
  Synthetic oligonucleotide

SEQ ID NO: 605351 - DNA, 55 bp, Artificial; identical to SEQ ID NO: 462770
  Synthetic oligonucleotide

SEQ ID NO: 605352 - DNA, 57 bp, Artificial; identical to SEQ ID NO: 462774
  Synthetic oligonucleotide

SEQ ID NO: 605353 - DNA, 60 bp, Artificial; identical to SEQ ID NO: 462778
  Synthetic oligonucleotide

SEQ ID NO: 605354 - DNA, 50 bp, Artificial; identical to SEQ ID NO: 462783
  Synthetic oligonucleotide

SEQ ID NO: 605355 - DNA, 58 bp, Artificial; identical to SEQ ID NO: 462785
  Synthetic oligonucleotide

SEQ ID NO: 605356 - DNA, 52 bp, Artificial; identical to SEQ ID NO: 462786
  Synthetic oligonucleotide

SEQ ID NO: 605357 - DNA, 52 bp, Artificial; identical to SEQ ID NO: 462788
  Synthetic oligonucleotide

SEQ ID NO: 605358 - DNA, 51 bp, Artificial; identical to SEQ ID NO: 462790
  Synthetic oligonucleotide

SEQ ID NO: 605359 - DNA, 60 bp, Artificial; identical to SEQ ID NO: 462794
  Synthetic oligonucleotide

SEQ ID NO: 605360 - DNA, 54 bp, Artificial; identical to SEQ ID NO: 462795
  Synthetic oligonucleotide

SEQ ID NO: 605361 - DNA, 57 bp, Artificial; identical to SEQ ID NO: 462798
  Synthetic oligonucleotide

SEQ ID NO: 605362 - DNA, 60 bp, Artificial; identical to SEQ ID NO: 462799
  Synthetic oligonucleotide

SEQ ID NO: 605363 - DNA, 60 bp, Artificial; identical to SEQ ID NO: 462801
  Synthetic oligonucleotide

SEQ ID NO: 605364 - DNA, 60 bp, Artificial; identical to SEQ ID NO: 462803
  Synthetic oligonucleotide

SEQ ID NO: 605365 - DNA, 55 bp, Artificial; identical to SEQ ID NO: 462804
  Synthetic oligonucleotide

SEQ ID NO: 605366 - DNA, 55 bp, Artificial; identical to SEQ ID NO: 5949
  Synthetic oligonucleotide

SEQ ID NO: 605367 - DNA, 56 bp, Artificial; identical to SEQ ID NO: 462809
  Synthetic oligonucleotide

SEQ ID NO: 605368 - DNA, 54 bp, Artificial; identical to SEQ ID NO: 462813
  Synthetic oligonucleotide

SEQ ID NO: 605369 - DNA, 55 bp, Artificial; identical to SEQ ID NO: 462814
  Synthetic oligonucleotide

SEQ ID NO: 605370 - DNA, 60 bp, Artificial; identical to SEQ ID NO: 462815
  Synthetic oligonucleotide

SEQ ID NO: 605371 - DNA, 60 bp, Artificial; identical to SEQ ID NO: 462816
  Synthetic oligonucleotide

SEQ ID NO: 605372 - DNA, 51 bp, Artificial; identical to SEQ ID NO: 462820
  Synthetic oligonucleotide

SEQ ID NO: 605373 - DNA, 60 bp, Artificial; identical to SEQ ID NO: 462821
  Synthetic oligonucleotide

SEQ ID NO: 605374 - DNA, 55 bp, Artificial; identical to SEQ ID NO: 462822
  Synthetic oligonucleotide

SEQ ID NO: 605375 - DNA, 57 bp, Artificial; identical to SEQ ID NO: 462824
  Synthetic oligonucleotide

SEQ ID NO: 605376 - DNA, 55 bp, Artificial; identical to SEQ ID NO: 462827
  Synthetic oligonucleotide

SEQ ID NO: 605377 - DNA, 60 bp, Artificial; identical to SEQ ID NO: 100454
  Synthetic oligonucleotide

SEQ ID NO: 605378 - DNA, 53 bp, Artificial; identical to SEQ ID NO: 462830
  Synthetic oligonucleotide

SEQ ID NO: 605379 - DNA, 55 bp, Artificial; identical to SEQ ID NO: 462833
  Synthetic oligonucleotide

SEQ ID NO: 605380 - DNA, 60 bp, Artificial; identical to SEQ ID NO: 462834
  Synthetic oligonucleotide

SEQ ID NO: 605381 - DNA, 57 bp, Artificial; identical to SEQ ID NO: 462838
  Synthetic oligonucleotide

SEQ ID NO: 605382 - DNA, 56 bp, Artificial; identical to SEQ ID NO: 462839
  Synthetic oligonucleotide

SEQ ID NO: 605383 - DNA, 56 bp, Artificial; identical to SEQ ID NO: 462841
  Synthetic oligonucleotide

SEQ ID NO: 605384 - DNA, 57 bp, Artificial; identical to SEQ ID NO: 462843
  Synthetic oligonucleotide

SEQ ID NO: 605385 - DNA, 57 bp, Artificial; identical to SEQ ID NO: 462846
  Synthetic oligonucleotide

SEQ ID NO: 605386 - DNA, 55 bp, Artificial; identical to SEQ ID NO: 462852
  Synthetic oligonucleotide

SEQ ID NO: 605387 - DNA, 59 bp, Artificial; identical to SEQ ID NO: 462853
  Synthetic oligonucleotide

SEQ ID NO: 605388 - DNA, 57 bp, Artificial; identical to SEQ ID NO: 462854
  Synthetic oligonucleotide

SEQ ID NO: 605389 - DNA, 60 bp, Artificial; identical to SEQ ID NO: 462855
  Synthetic oligonucleotide

SEQ ID NO: 605390 - DNA, 58 bp, Artificial; identical to SEQ ID NO: 462856
  Synthetic oligonucleotide

SEQ ID NO: 605391 - DNA, 58 bp, Artificial; identical to SEQ ID NO: 462858
  Synthetic oligonucleotide

SEQ ID NO: 605392 - DNA, 56 bp, Artificial; identical to SEQ ID NO: 462862
  Synthetic oligonucleotide

SEQ ID NO: 605393 - DNA, 57 bp, Artificial; identical to SEQ ID NO: 462864
  Synthetic oligonucleotide

SEQ ID NO: 605394 - DNA, 55 bp, Artificial; identical to SEQ ID NO: 462872
  Synthetic oligonucleotide

SEQ ID NO: 605395 - DNA, 50 bp, Artificial; identical to SEQ ID NO: 462874
  Synthetic oligonucleotide

SEQ ID NO: 605396 - DNA, 60 bp, Artificial; identical to SEQ ID NO: 462875
  Synthetic oligonucleotide

SEQ ID NO: 605397 - DNA, 57 bp, Artificial; identical to SEQ ID NO: 462877
  Synthetic oligonucleotide

SEQ ID NO: 605398 - DNA, 60 bp, Artificial; identical to SEQ ID NO: 462880
  Synthetic oligonucleotide

SEQ ID NO: 605399 - DNA, 55 bp, Artificial; identical to SEQ ID NO: 462881
  Synthetic oligonucleotide

SEQ ID NO: 605400 - DNA, 59 bp, Artificial; identical to SEQ ID NO: 462882
  Synthetic oligonucleotide

SEQ ID NO: 605401 - DNA, 56 bp, Artificial; identical to SEQ ID NO: 462883
  Synthetic oligonucleotide

SEQ ID NO: 605402 - DNA, 58 bp, Artificial; identical to SEQ ID NO: 462885
  Synthetic oligonucleotide

SEQ ID NO: 605403 - DNA, 55 bp, Artificial; identical to SEQ ID NO: 462888
  Synthetic oligonucleotide

SEQ ID NO: 605404 - DNA, 60 bp, Artificial; identical to SEQ ID NO: 13519
  Synthetic oligonucleotide

SEQ ID NO: 605405 - DNA, 55 bp, Artificial; identical to SEQ ID NO: 462889
  Synthetic oligonucleotide

SEQ ID NO: 605406 - DNA, 60 bp, Artificial; identical to SEQ ID NO: 462894
  Synthetic oligonucleotide

SEQ ID NO: 605407 - DNA, 60 bp, Artificial; identical to SEQ ID NO: 462895
  Synthetic oligonucleotide

SEQ ID NO: 605408 - DNA, 55 bp, Artificial; identical to SEQ ID NO: 462899
  Synthetic oligonucleotide

SEQ ID NO: 605409 - DNA, 60 bp, Artificial; identical to SEQ ID NO: 462900
  Synthetic oligonucleotide

SEQ ID NO: 605410 - DNA, 60 bp, Artificial; identical to SEQ ID NO: 462903
  Synthetic oligonucleotide

SEQ ID NO: 605411 - DNA, 60 bp, Artificial; identical to SEQ ID NO: 462904
  Synthetic oligonucleotide

SEQ ID NO: 605412 - DNA, 60 bp, Artificial; identical to SEQ ID NO: 462907
  Synthetic oligonucleotide

SEQ ID NO: 605413 - DNA, 60 bp, Artificial; identical to SEQ ID NO: 462908
  Synthetic oligonucleotide

SEQ ID NO: 605414 - DNA, 60 bp, Artificial; identical to SEQ ID NO: 462911
  Synthetic oligonucleotide

SEQ ID NO: 605415 - DNA, 60 bp, Artificial; identical to SEQ ID NO: 462912
  Synthetic oligonucleotide

SEQ ID NO: 605416 - DNA, 60 bp, Artificial; identical to SEQ ID NO: 462913
  Synthetic oligonucleotide

SEQ ID NO: 605417 - DNA, 60 bp, Artificial; identical to SEQ ID NO: 462917
  Synthetic oligonucleotide

SEQ ID NO: 605418 - DNA, 51 bp, Artificial; identical to SEQ ID NO: 462918
  Synthetic oligonucleotide

SEQ ID NO: 605419 - DNA, 60 bp, Artificial; identical to SEQ ID NO: 462920
  Synthetic oligonucleotide

SEQ ID NO: 605420 - DNA, 60 bp, Artificial; identical to SEQ ID NO: 462921
  Synthetic oligonucleotide

SEQ ID NO: 605421 - DNA, 60 bp, Artificial; identical to SEQ ID NO: 462922
  Synthetic oligonucleotide

SEQ ID NO: 605422 - DNA, 60 bp, Artificial; identical to SEQ ID NO: 462924
  Synthetic oligonucleotide

SEQ ID NO: 605423 - DNA, 60 bp, Artificial; identical to SEQ ID NO: 462925
  Synthetic oligonucleotide

SEQ ID NO: 605424 - DNA, 60 bp, Artificial; identical to SEQ ID NO: 462926
  Synthetic oligonucleotide

SEQ ID NO: 605425 - DNA, 60 bp, Artificial; identical to SEQ ID NO: 462927
  Synthetic oligonucleotide

SEQ ID NO: 605426 - DNA, 50 bp, Artificial; identical to SEQ ID NO: 462928
  Synthetic oligonucleotide

SEQ ID NO: 605427 - DNA, 60 bp, Artificial; identical to SEQ ID NO: 462929
  Synthetic oligonucleotide

SEQ ID NO: 605428 - DNA, 52 bp, Artificial; identical to SEQ ID NO: 462930
  Synthetic oligonucleotide

SEQ ID NO: 605429 - DNA, 56 bp, Artificial; identical to SEQ ID NO: 462934
  Synthetic oligonucleotide

SEQ ID NO: 605430 - DNA, 60 bp, Artificial; identical to SEQ ID NO: 49027
  Synthetic oligonucleotide

SEQ ID NO: 605431 - DNA, 55 bp, Artificial; identical to SEQ ID NO: 462935
  Synthetic oligonucleotide

SEQ ID NO: 605432 - DNA, 60 bp, Artificial; identical to SEQ ID NO: 462937
  Synthetic oligonucleotide

SEQ ID NO: 605433 - DNA, 55 bp, Artificial; identical to SEQ ID NO: 462938
  Synthetic oligonucleotide

SEQ ID NO: 605434 - DNA, 60 bp, Artificial; identical to SEQ ID NO: 462941
  Synthetic oligonucleotide

SEQ ID NO: 605435 - DNA, 57 bp, Artificial; identical to SEQ ID NO: 462942
  Synthetic oligonucleotide

SEQ ID NO: 605436 - DNA, 54 bp, Artificial; identical to SEQ ID NO: 462943
  Synthetic oligonucleotide

SEQ ID NO: 605437 - DNA, 55 bp, Artificial; identical to SEQ ID NO: 462944
  Synthetic oligonucleotide

SEQ ID NO: 605438 - DNA, 54 bp, Artificial; identical to SEQ ID NO: 462945
  Synthetic oligonucleotide

SEQ ID NO: 605439 - DNA, 60 bp, Artificial; identical to SEQ ID NO: 462946
  Synthetic oligonucleotide

SEQ ID NO: 605440 - DNA, 60 bp, Artificial; identical to SEQ ID NO: 462948
  Synthetic oligonucleotide

SEQ ID NO: 605441 - DNA, 55 bp, Artificial; identical to SEQ ID NO: 462950
  Synthetic oligonucleotide

SEQ ID NO: 605442 - DNA, 51 bp, Artificial; identical to SEQ ID NO: 462957
  Synthetic oligonucleotide

SEQ ID NO: 605443 - DNA, 59 bp, Artificial; identical to SEQ ID NO: 462959
  Synthetic oligonucleotide

SEQ ID NO: 605444 - DNA, 59 bp, Artificial; identical to SEQ ID NO: 462964
  Synthetic oligonucleotide

SEQ ID NO: 605445 - DNA, 56 bp, Artificial; identical to SEQ ID NO: 462965
  Synthetic oligonucleotide

SEQ ID NO: 605446 - DNA, 50 bp, Artificial; identical to SEQ ID NO: 462966
  Synthetic oligonucleotide

SEQ ID NO: 605447 - DNA, 60 bp, Artificial; identical to SEQ ID NO: 462969
  Synthetic oligonucleotide

SEQ ID NO: 605448 - DNA, 55 bp, Artificial; identical to SEQ ID NO: 462977
  Synthetic oligonucleotide

SEQ ID NO: 605449 - DNA, 60 bp, Artificial; identical to SEQ ID NO: 10186
  Synthetic oligonucleotide

SEQ ID NO: 605450 - DNA, 58 bp, Artificial; identical to SEQ ID NO: 462978
  Synthetic oligonucleotide

SEQ ID NO: 605451 - DNA, 58 bp, Artificial; identical to SEQ ID NO: 462981
  Synthetic oligonucleotide

SEQ ID NO: 605452 - DNA, 60 bp, Artificial; identical to SEQ ID NO: 462985
  Synthetic oligonucleotide

SEQ ID NO: 605453 - DNA, 60 bp, Artificial; identical to SEQ ID NO: 10633
  Synthetic oligonucleotide

SEQ ID NO: 605454 - DNA, 60 bp, Artificial; identical to SEQ ID NO: 462987
  Synthetic oligonucleotide

SEQ ID NO: 605455 - DNA, 60 bp, Artificial; identical to SEQ ID NO: 462988
  Synthetic oligonucleotide

SEQ ID NO: 605456 - DNA, 56 bp, Artificial; identical to SEQ ID NO: 462991
  Synthetic oligonucleotide

SEQ ID NO: 605457 - DNA, 56 bp, Artificial; identical to SEQ ID NO: 462993
  Synthetic oligonucleotide

SEQ ID NO: 605458 - DNA, 60 bp, Artificial; identical to SEQ ID NO: 462994
  Synthetic oligonucleotide

SEQ ID NO: 605459 - DNA, 60 bp, Artificial; identical to SEQ ID NO: 462997
  Synthetic oligonucleotide

SEQ ID NO: 605460 - DNA, 55 bp, Artificial; identical to SEQ ID NO: 463004
  Synthetic oligonucleotide

SEQ ID NO: 605461 - DNA, 54 bp, Artificial; identical to SEQ ID NO: 463006
  Synthetic oligonucleotide

SEQ ID NO: 605462 - DNA, 57 bp, Artificial; identical to SEQ ID NO: 463007
  Synthetic oligonucleotide

SEQ ID NO: 605463 - DNA, 58 bp, Artificial; identical to SEQ ID NO: 463008
  Synthetic oligonucleotide

SEQ ID NO: 605464 - DNA, 60 bp, Artificial; identical to SEQ ID NO: 463011
  Synthetic oligonucleotide

SEQ ID NO: 605465 - DNA, 60 bp, Artificial; identical to SEQ ID NO: 463012
  Synthetic oligonucleotide

SEQ ID NO: 605466 - DNA, 54 bp, Artificial; identical to SEQ ID NO: 463020
  Synthetic oligonucleotide

SEQ ID NO: 605467 - DNA, 59 bp, Artificial; identical to SEQ ID NO: 463025
  Synthetic oligonucleotide

SEQ ID NO: 605468 - DNA, 52 bp, Artificial; identical to SEQ ID NO: 463026
  Synthetic oligonucleotide

SEQ ID NO: 605469 - DNA, 60 bp, Artificial; identical to SEQ ID NO: 463028
  Synthetic oligonucleotide

SEQ ID NO: 605470 - DNA, 60 bp, Artificial; identical to SEQ ID NO: 463029
  Synthetic oligonucleotide

SEQ ID NO: 605471 - DNA, 60 bp, Artificial; identical to SEQ ID NO: 463032
  Synthetic oligonucleotide

SEQ ID NO: 605472 - DNA, 59 bp, Artificial; identical to SEQ ID NO: 463033
  Synthetic oligonucleotide

SEQ ID NO: 605473 - DNA, 52 bp, Artificial; identical to SEQ ID NO: 463034
  Synthetic oligonucleotide

SEQ ID NO: 605474 - DNA, 60 bp, Artificial; identical to SEQ ID NO: 463036
  Synthetic oligonucleotide

SEQ ID NO: 605475 - DNA, 54 bp, Artificial; identical to SEQ ID NO: 463037
  Synthetic oligonucleotide

SEQ ID NO: 605476 - DNA, 51 bp, Artificial; identical to SEQ ID NO: 463039
  Synthetic oligonucleotide

SEQ ID NO: 605477 - DNA, 50 bp, Artificial; identical to SEQ ID NO: 463040
  Synthetic oligonucleotide

SEQ ID NO: 605478 - DNA, 60 bp, Artificial; identical to SEQ ID NO: 463042
  Synthetic oligonucleotide

SEQ ID NO: 605479 - DNA, 55 bp, Artificial; identical to SEQ ID NO: 463049
  Synthetic oligonucleotide

SEQ ID NO: 605480 - DNA, 60 bp, Artificial; identical to SEQ ID NO: 463050
  Synthetic oligonucleotide

SEQ ID NO: 605481 - DNA, 60 bp, Artificial; identical to SEQ ID NO: 463052
  Synthetic oligonucleotide

SEQ ID NO: 605482 - DNA, 54 bp, Artificial; identical to SEQ ID NO: 463053
  Synthetic oligonucleotide

SEQ ID NO: 605483 - DNA, 60 bp, Artificial; identical to SEQ ID NO: 463061
  Synthetic oligonucleotide

SEQ ID NO: 605484 - DNA, 57 bp, Artificial; identical to SEQ ID NO: 463062
  Synthetic oligonucleotide

SEQ ID NO: 605485 - DNA, 53 bp, Artificial; identical to SEQ ID NO: 463063
  Synthetic oligonucleotide

SEQ ID NO: 605486 - DNA, 59 bp, Artificial; identical to SEQ ID NO: 19413
  Synthetic oligonucleotide

SEQ ID NO: 605487 - DNA, 56 bp, Artificial; identical to SEQ ID NO: 463067
  Synthetic oligonucleotide

SEQ ID NO: 605488 - DNA, 60 bp, Artificial; identical to SEQ ID NO: 463070
  Synthetic oligonucleotide

SEQ ID NO: 605489 - DNA, 60 bp, Artificial; identical to SEQ ID NO: 463071
  Synthetic oligonucleotide

SEQ ID NO: 605490 - DNA, 59 bp, Artificial; identical to SEQ ID NO: 463072
  Synthetic oligonucleotide

SEQ ID NO: 605491 - DNA, 55 bp, Artificial; identical to SEQ ID NO: 463075
  Synthetic oligonucleotide

SEQ ID NO: 605492 - DNA, 55 bp, Artificial; identical to SEQ ID NO: 463077
  Synthetic oligonucleotide

SEQ ID NO: 605493 - DNA, 57 bp, Artificial; identical to SEQ ID NO: 463078
  Synthetic oligonucleotide

SEQ ID NO: 605494 - DNA, 53 bp, Artificial; identical to SEQ ID NO: 463081
  Synthetic oligonucleotide

SEQ ID NO: 605495 - DNA, 54 bp, Artificial; identical to SEQ ID NO: 463084
  Synthetic oligonucleotide

SEQ ID NO: 605496 - DNA, 53 bp, Artificial; identical to SEQ ID NO: 463087
  Synthetic oligonucleotide

SEQ ID NO: 605497 - DNA, 50 bp, Artificial; identical to SEQ ID NO: 463088
  Synthetic oligonucleotide

SEQ ID NO: 605498 - DNA, 53 bp, Artificial; identical to SEQ ID NO: 463093
  Synthetic oligonucleotide

SEQ ID NO: 605499 - DNA, 59 bp, Artificial; identical to SEQ ID NO: 463094
  Synthetic oligonucleotide

SEQ ID NO: 605500 - DNA, 56 bp, Artificial; identical to SEQ ID NO: 463095
  Synthetic oligonucleotide

SEQ ID NO: 605501 - DNA, 60 bp, Artificial; identical to SEQ ID NO: 463097
  Synthetic oligonucleotide

SEQ ID NO: 605502 - DNA, 56 bp, Artificial; identical to SEQ ID NO: 463103
  Synthetic oligonucleotide

SEQ ID NO: 605503 - DNA, 58 bp, Artificial; identical to SEQ ID NO: 463104
  Synthetic oligonucleotide

SEQ ID NO: 605504 - DNA, 56 bp, Artificial; identical to SEQ ID NO: 463105
  Synthetic oligonucleotide

SEQ ID NO: 605505 - DNA, 58 bp, Artificial; identical to SEQ ID NO: 463106
  Synthetic oligonucleotide

SEQ ID NO: 605506 - DNA, 60 bp, Artificial; identical to SEQ ID NO: 463113
  Synthetic oligonucleotide

SEQ ID NO: 605507 - DNA, 55 bp, Artificial; identical to SEQ ID NO: 463114
  Synthetic oligonucleotide

SEQ ID NO: 605508 - DNA, 54 bp, Artificial; identical to SEQ ID NO: 463118
  Synthetic oligonucleotide

SEQ ID NO: 605509 - DNA, 54 bp, Artificial; identical to SEQ ID NO: 463119
  Synthetic oligonucleotide

SEQ ID NO: 605510 - DNA, 60 bp, Artificial; identical to SEQ ID NO: 463120
  Synthetic oligonucleotide

SEQ ID NO: 605511 - DNA, 60 bp, Artificial; identical to SEQ ID NO: 463121
  Synthetic oligonucleotide

SEQ ID NO: 605512 - DNA, 55 bp, Artificial; identical to SEQ ID NO: 463130
  Synthetic oligonucleotide

SEQ ID NO: 605513 - DNA, 60 bp, Artificial; identical to SEQ ID NO: 463136
  Synthetic oligonucleotide

SEQ ID NO: 605514 - DNA, 60 bp, Artificial; identical to SEQ ID NO: 78181
  Synthetic oligonucleotide

SEQ ID NO: 605515 - DNA, 60 bp, Artificial; identical to SEQ ID NO: 463137
  Synthetic oligonucleotide

SEQ ID NO: 605516 - DNA, 51 bp, Artificial; identical to SEQ ID NO: 463138
  Synthetic oligonucleotide

SEQ ID NO: 605517 - DNA, 56 bp, Artificial; identical to SEQ ID NO: 463139
  Synthetic oligonucleotide

SEQ ID NO: 605518 - DNA, 58 bp, Artificial; identical to SEQ ID NO: 463146
  Synthetic oligonucleotide

SEQ ID NO: 605519 - DNA, 60 bp, Artificial; identical to SEQ ID NO: 463147
  Synthetic oligonucleotide

SEQ ID NO: 605520 - DNA, 50 bp, Artificial; identical to SEQ ID NO: 463151
  Synthetic oligonucleotide

SEQ ID NO: 605521 - DNA, 59 bp, Artificial; identical to SEQ ID NO: 463152
  Synthetic oligonucleotide

SEQ ID NO: 605522 - DNA, 60 bp, Artificial; identical to SEQ ID NO: 463157
  Synthetic oligonucleotide

SEQ ID NO: 605523 - DNA, 60 bp, Artificial; identical to SEQ ID NO: 463160
  Synthetic oligonucleotide

SEQ ID NO: 605524 - DNA, 60 bp, Artificial; identical to SEQ ID NO: 463162
  Synthetic oligonucleotide

SEQ ID NO: 605525 - DNA, 55 bp, Artificial; identical to SEQ ID NO: 463167
  Synthetic oligonucleotide

SEQ ID NO: 605526 - DNA, 58 bp, Artificial; identical to SEQ ID NO: 463168
  Synthetic oligonucleotide

SEQ ID NO: 605527 - DNA, 60 bp, Artificial; identical to SEQ ID NO: 10407
  Synthetic oligonucleotide

SEQ ID NO: 605528 - DNA, 60 bp, Artificial; identical to SEQ ID NO: 6634
  Synthetic oligonucleotide

SEQ ID NO: 605529 - DNA, 60 bp, Artificial; identical to SEQ ID NO: 463172
  Synthetic oligonucleotide

SEQ ID NO: 605530 - DNA, 57 bp, Artificial; identical to SEQ ID NO: 463173
  Synthetic oligonucleotide

SEQ ID NO: 605531 - DNA, 56 bp, Artificial; identical to SEQ ID NO: 463176
  Synthetic oligonucleotide

SEQ ID NO: 605532 - DNA, 54 bp, Artificial; identical to SEQ ID NO: 463180
  Synthetic oligonucleotide

SEQ ID NO: 605533 - DNA, 58 bp, Artificial; identical to SEQ ID NO: 463184
  Synthetic oligonucleotide

SEQ ID NO: 605534 - DNA, 60 bp, Artificial; identical to SEQ ID NO: 463186
  Synthetic oligonucleotide

SEQ ID NO: 605535 - DNA, 60 bp, Artificial; identical to SEQ ID NO: 463189
  Synthetic oligonucleotide

SEQ ID NO: 605536 - DNA, 56 bp, Artificial; identical to SEQ ID NO: 463192
  Synthetic oligonucleotide

SEQ ID NO: 605537 - DNA, 58 bp, Artificial; identical to SEQ ID NO: 463194
  Synthetic oligonucleotide

SEQ ID NO: 605538 - DNA, 60 bp, Artificial; identical to SEQ ID NO: 463195
  Synthetic oligonucleotide

SEQ ID NO: 605539 - DNA, 54 bp, Artificial; identical to SEQ ID NO: 463198
  Synthetic oligonucleotide

SEQ ID NO: 605540 - DNA, 60 bp, Artificial; identical to SEQ ID NO: 13601
  Synthetic oligonucleotide

SEQ ID NO: 605541 - DNA, 60 bp, Artificial; identical to SEQ ID NO: 463200
  Synthetic oligonucleotide

SEQ ID NO: 605542 - DNA, 60 bp, Artificial; identical to SEQ ID NO: 463202
  Synthetic oligonucleotide

SEQ ID NO: 605543 - DNA, 54 bp, Artificial; identical to SEQ ID NO: 463204
  Synthetic oligonucleotide

SEQ ID NO: 605544 - DNA, 60 bp, Artificial; identical to SEQ ID NO: 463205
  Synthetic oligonucleotide

SEQ ID NO: 605545 - DNA, 55 bp, Artificial; identical to SEQ ID NO: 463206
  Synthetic oligonucleotide

SEQ ID NO: 605546 - DNA, 55 bp, Artificial; identical to SEQ ID NO: 463211
  Synthetic oligonucleotide

SEQ ID NO: 605547 - DNA, 60 bp, Artificial; identical to SEQ ID NO: 463212
  Synthetic oligonucleotide

SEQ ID NO: 605548 - DNA, 55 bp, Artificial; identical to SEQ ID NO: 463214
  Synthetic oligonucleotide

SEQ ID NO: 605549 - DNA, 55 bp, Artificial; identical to SEQ ID NO: 11405
  Synthetic oligonucleotide

SEQ ID NO: 605550 - DNA, 55 bp, Artificial; identical to SEQ ID NO: 463215
  Synthetic oligonucleotide

SEQ ID NO: 605551 - DNA, 55 bp, Artificial; identical to SEQ ID NO: 463220
  Synthetic oligonucleotide

SEQ ID NO: 605552 - DNA, 56 bp, Artificial; identical to SEQ ID NO: 14351
  Synthetic oligonucleotide

SEQ ID NO: 605553 - DNA, 55 bp, Artificial; identical to SEQ ID NO: 463228
  Synthetic oligonucleotide

SEQ ID NO: 605554 - DNA, 57 bp, Artificial; identical to SEQ ID NO: 463230
  Synthetic oligonucleotide

SEQ ID NO: 605555 - DNA, 57 bp, Artificial; identical to SEQ ID NO: 463233
  Synthetic oligonucleotide

SEQ ID NO: 605556 - DNA, 56 bp, Artificial; identical to SEQ ID NO: 463238
  Synthetic oligonucleotide

SEQ ID NO: 605557 - DNA, 57 bp, Artificial; identical to SEQ ID NO: 463242
  Synthetic oligonucleotide

SEQ ID NO: 605558 - DNA, 56 bp, Artificial; identical to SEQ ID NO: 463244
  Synthetic oligonucleotide

SEQ ID NO: 605559 - DNA, 60 bp, Artificial; identical to SEQ ID NO: 463246
  Synthetic oligonucleotide

SEQ ID NO: 605560 - DNA, 60 bp, Artificial; identical to SEQ ID NO: 463251
  Synthetic oligonucleotide

SEQ ID NO: 605561 - DNA, 55 bp, Artificial; identical to SEQ ID NO: 8868
  Synthetic oligonucleotide

SEQ ID NO: 605562 - DNA, 50 bp, Artificial; identical to SEQ ID NO: 463255
  Synthetic oligonucleotide

SEQ ID NO: 605563 - DNA, 50 bp, Artificial; identical to SEQ ID NO: 6419
  Synthetic oligonucleotide

SEQ ID NO: 605564 - DNA, 60 bp, Artificial; identical to SEQ ID NO: 463256
  Synthetic oligonucleotide

SEQ ID NO: 605565 - DNA, 53 bp, Artificial; identical to SEQ ID NO: 463263
  Synthetic oligonucleotide

SEQ ID NO: 605566 - DNA, 60 bp, Artificial; identical to SEQ ID NO: 463264
  Synthetic oligonucleotide

SEQ ID NO: 605567 - DNA, 55 bp, Artificial; identical to SEQ ID NO: 463266
  Synthetic oligonucleotide

SEQ ID NO: 605568 - DNA, 59 bp, Artificial; identical to SEQ ID NO: 463267
  Synthetic oligonucleotide

SEQ ID NO: 605569 - DNA, 54 bp, Artificial; identical to SEQ ID NO: 463270
  Synthetic oligonucleotide

SEQ ID NO: 605570 - DNA, 55 bp, Artificial; identical to SEQ ID NO: 463271
  Synthetic oligonucleotide

SEQ ID NO: 605571 - DNA, 59 bp, Artificial; identical to SEQ ID NO: 463274
  Synthetic oligonucleotide

SEQ ID NO: 605572 - DNA, 60 bp, Artificial; identical to SEQ ID NO: 463275
  Synthetic oligonucleotide

SEQ ID NO: 605573 - DNA, 53 bp, Artificial; identical to SEQ ID NO: 463277
  Synthetic oligonucleotide

SEQ ID NO: 605574 - DNA, 56 bp, Artificial; identical to SEQ ID NO: 463279
  Synthetic oligonucleotide

SEQ ID NO: 605575 - DNA, 60 bp, Artificial; identical to SEQ ID NO: 10716
  Synthetic oligonucleotide

SEQ ID NO: 605576 - DNA, 52 bp, Artificial; identical to SEQ ID NO: 463281
  Synthetic oligonucleotide

SEQ ID NO: 605577 - DNA, 52 bp, Artificial; identical to SEQ ID NO: 463284
  Synthetic oligonucleotide

SEQ ID NO: 605578 - DNA, 60 bp, Artificial; identical to SEQ ID NO: 463288
  Synthetic oligonucleotide

SEQ ID NO: 605579 - DNA, 60 bp, Artificial; identical to SEQ ID NO: 463289
  Synthetic oligonucleotide

SEQ ID NO: 605580 - DNA, 60 bp, Artificial; identical to SEQ ID NO: 10571
  Synthetic oligonucleotide

SEQ ID NO: 605581 - DNA, 59 bp, Artificial; identical to SEQ ID NO: 463291
  Synthetic oligonucleotide

SEQ ID NO: 605582 - DNA, 51 bp, Artificial; identical to SEQ ID NO: 463293
  Synthetic oligonucleotide

SEQ ID NO: 605583 - DNA, 60 bp, Artificial; identical to SEQ ID NO: 463295
  Synthetic oligonucleotide

SEQ ID NO: 605584 - DNA, 60 bp, Artificial; identical to SEQ ID NO: 463297
  Synthetic oligonucleotide

SEQ ID NO: 605585 - DNA, 52 bp, Artificial; identical to SEQ ID NO: 463298
  Synthetic oligonucleotide

SEQ ID NO: 605586 - DNA, 60 bp, Artificial; identical to SEQ ID NO: 463299
  Synthetic oligonucleotide

SEQ ID NO: 605587 - DNA, 57 bp, Artificial; identical to SEQ ID NO: 463302
  Synthetic oligonucleotide

SEQ ID NO: 605588 - DNA, 55 bp, Artificial; identical to SEQ ID NO: 463304
  Synthetic oligonucleotide

SEQ ID NO: 605589 - DNA, 55 bp, Artificial; identical to SEQ ID NO: 463309
  Synthetic oligonucleotide

SEQ ID NO: 605590 - DNA, 58 bp, Artificial; identical to SEQ ID NO: 20335
  Synthetic oligonucleotide

SEQ ID NO: 605591 - DNA, 60 bp, Artificial; identical to SEQ ID NO: 463310
  Synthetic oligonucleotide

SEQ ID NO: 605592 - DNA, 50 bp, Artificial; identical to SEQ ID NO: 463311
  Synthetic oligonucleotide

SEQ ID NO: 605593 - DNA, 55 bp, Artificial; identical to SEQ ID NO: 463312
  Synthetic oligonucleotide

SEQ ID NO: 605594 - DNA, 60 bp, Artificial; identical to SEQ ID NO: 463318
  Synthetic oligonucleotide

SEQ ID NO: 605595 - DNA, 58 bp, Artificial; identical to SEQ ID NO: 463319
  Synthetic oligonucleotide

SEQ ID NO: 605596 - DNA, 59 bp, Artificial; identical to SEQ ID NO: 463321
  Synthetic oligonucleotide

SEQ ID NO: 605597 - DNA, 59 bp, Artificial; identical to SEQ ID NO: 463322
  Synthetic oligonucleotide

SEQ ID NO: 605598 - DNA, 60 bp, Artificial; identical to SEQ ID NO: 463323
  Synthetic oligonucleotide

SEQ ID NO: 605599 - DNA, 53 bp, Artificial; identical to SEQ ID NO: 463325
  Synthetic oligonucleotide

SEQ ID NO: 605600 - DNA, 55 bp, Artificial; identical to SEQ ID NO: 463330
  Synthetic oligonucleotide

SEQ ID NO: 605601 - DNA, 50 bp, Artificial; identical to SEQ ID NO: 463331
  Synthetic oligonucleotide

SEQ ID NO: 605602 - DNA, 55 bp, Artificial; identical to SEQ ID NO: 463333
  Synthetic oligonucleotide

SEQ ID NO: 605603 - DNA, 60 bp, Artificial; identical to SEQ ID NO: 463334
  Synthetic oligonucleotide

SEQ ID NO: 605604 - DNA, 50 bp, Artificial; identical to SEQ ID NO: 463335
  Synthetic oligonucleotide

SEQ ID NO: 605605 - DNA, 59 bp, Artificial; identical to SEQ ID NO: 463337
  Synthetic oligonucleotide

SEQ ID NO: 605606 - DNA, 60 bp, Artificial; identical to SEQ ID NO: 463341
  Synthetic oligonucleotide

SEQ ID NO: 605607 - DNA, 60 bp, Artificial; identical to SEQ ID NO: 463342
  Synthetic oligonucleotide

SEQ ID NO: 605608 - DNA, 53 bp, Artificial; identical to SEQ ID NO: 463347
  Synthetic oligonucleotide

SEQ ID NO: 605609 - DNA, 58 bp, Artificial; identical to SEQ ID NO: 463351
  Synthetic oligonucleotide

SEQ ID NO: 605610 - DNA, 55 bp, Artificial; identical to SEQ ID NO: 463357
  Synthetic oligonucleotide

SEQ ID NO: 605611 - DNA, 60 bp, Artificial; identical to SEQ ID NO: 463359
  Synthetic oligonucleotide

SEQ ID NO: 605612 - DNA, 58 bp, Artificial; identical to SEQ ID NO: 463360
  Synthetic oligonucleotide

SEQ ID NO: 605613 - DNA, 55 bp, Artificial; identical to SEQ ID NO: 463361
  Synthetic oligonucleotide

SEQ ID NO: 605614 - DNA, 60 bp, Artificial; identical to SEQ ID NO: 463362
  Synthetic oligonucleotide

SEQ ID NO: 605615 - DNA, 59 bp, Artificial; identical to SEQ ID NO: 463363
  Synthetic oligonucleotide

SEQ ID NO: 605616 - DNA, 60 bp, Artificial; identical to SEQ ID NO: 27418
  Synthetic oligonucleotide

SEQ ID NO: 605617 - DNA, 59 bp, Artificial; identical to SEQ ID NO: 463364
  Synthetic oligonucleotide

SEQ ID NO: 605618 - DNA, 57 bp, Artificial; identical to SEQ ID NO: 463365
  Synthetic oligonucleotide

SEQ ID NO: 605619 - DNA, 59 bp, Artificial; identical to SEQ ID NO: 463366
  Synthetic oligonucleotide

SEQ ID NO: 605620 - DNA, 60 bp, Artificial; identical to SEQ ID NO: 463367
  Synthetic oligonucleotide

SEQ ID NO: 605621 - DNA, 60 bp, Artificial; identical to SEQ ID NO: 37825
  Synthetic oligonucleotide

SEQ ID NO: 605622 - DNA, 60 bp, Artificial; identical to SEQ ID NO: 463368
  Synthetic oligonucleotide

SEQ ID NO: 605623 - DNA, 60 bp, Artificial; identical to SEQ ID NO: 463369
  Synthetic oligonucleotide

SEQ ID NO: 605624 - DNA, 51 bp, Artificial; identical to SEQ ID NO: 463380
  Synthetic oligonucleotide

SEQ ID NO: 605625 - DNA, 54 bp, Artificial; identical to SEQ ID NO: 463381
  Synthetic oligonucleotide

SEQ ID NO: 605626 - DNA, 53 bp, Artificial; identical to SEQ ID NO: 463386
  Synthetic oligonucleotide

SEQ ID NO: 605627 - DNA, 55 bp, Artificial; identical to SEQ ID NO: 463388
  Synthetic oligonucleotide

SEQ ID NO: 605628 - DNA, 56 bp, Artificial; identical to SEQ ID NO: 463389
  Synthetic oligonucleotide

SEQ ID NO: 605629 - DNA, 57 bp, Artificial; identical to SEQ ID NO: 463390
  Synthetic oligonucleotide

SEQ ID NO: 605630 - DNA, 60 bp, Artificial; identical to SEQ ID NO: 463394
  Synthetic oligonucleotide

SEQ ID NO: 605631 - DNA, 56 bp, Artificial; identical to SEQ ID NO: 463398
  Synthetic oligonucleotide

SEQ ID NO: 605632 - DNA, 60 bp, Artificial; identical to SEQ ID NO: 463400
  Synthetic oligonucleotide

SEQ ID NO: 605633 - DNA, 60 bp, Artificial; identical to SEQ ID NO: 463402
  Synthetic oligonucleotide

SEQ ID NO: 605634 - DNA, 60 bp, Artificial; identical to SEQ ID NO: 463406
  Synthetic oligonucleotide

SEQ ID NO: 605635 - DNA, 60 bp, Artificial; identical to SEQ ID NO: 463408
  Synthetic oligonucleotide

SEQ ID NO: 605636 - DNA, 50 bp, Artificial; identical to SEQ ID NO: 463409
  Synthetic oligonucleotide

SEQ ID NO: 605637 - DNA, 58 bp, Artificial; identical to SEQ ID NO: 463410
  Synthetic oligonucleotide

SEQ ID NO: 605638 - DNA, 57 bp, Artificial; identical to SEQ ID NO: 463411
  Synthetic oligonucleotide

SEQ ID NO: 605639 - DNA, 58 bp, Artificial; identical to SEQ ID NO: 11818
  Synthetic oligonucleotide

SEQ ID NO: 605640 - DNA, 60 bp, Artificial; identical to SEQ ID NO: 463412
  Synthetic oligonucleotide

SEQ ID NO: 605641 - DNA, 55 bp, Artificial; identical to SEQ ID NO: 463413
  Synthetic oligonucleotide

SEQ ID NO: 605642 - DNA, 58 bp, Artificial; identical to SEQ ID NO: 463414
  Synthetic oligonucleotide

SEQ ID NO: 605643 - DNA, 55 bp, Artificial; identical to SEQ ID NO: 463415
  Synthetic oligonucleotide

SEQ ID NO: 605644 - DNA, 60 bp, Artificial; identical to SEQ ID NO: 463419
  Synthetic oligonucleotide

SEQ ID NO: 605645 - DNA, 55 bp, Artificial; identical to SEQ ID NO: 463420
  Synthetic oligonucleotide

SEQ ID NO: 605646 - DNA, 57 bp, Artificial; identical to SEQ ID NO: 463421
  Synthetic oligonucleotide

SEQ ID NO: 605647 - DNA, 60 bp, Artificial; identical to SEQ ID NO: 463423
  Synthetic oligonucleotide

SEQ ID NO: 605648 - DNA, 52 bp, Artificial; identical to SEQ ID NO: 463427
  Synthetic oligonucleotide

SEQ ID NO: 605649 - DNA, 57 bp, Artificial; identical to SEQ ID NO: 18123
  Synthetic oligonucleotide

SEQ ID NO: 605650 - DNA, 58 bp, Artificial; identical to SEQ ID NO: 463428
  Synthetic oligonucleotide

SEQ ID NO: 605651 - DNA, 60 bp, Artificial; identical to SEQ ID NO: 463431
  Synthetic oligonucleotide

SEQ ID NO: 605652 - DNA, 60 bp, Artificial; identical to SEQ ID NO: 463432
  Synthetic oligonucleotide

SEQ ID NO: 605653 - DNA, 52 bp, Artificial; identical to SEQ ID NO: 463433
  Synthetic oligonucleotide

SEQ ID NO: 605654 - DNA, 58 bp, Artificial; identical to SEQ ID NO: 463436
  Synthetic oligonucleotide

SEQ ID NO: 605655 - DNA, 60 bp, Artificial; identical to SEQ ID NO: 463437
  Synthetic oligonucleotide

SEQ ID NO: 605656 - DNA, 57 bp, Artificial; identical to SEQ ID NO: 463440
  Synthetic oligonucleotide

SEQ ID NO: 605657 - DNA, 55 bp, Artificial; identical to SEQ ID NO: 463441
  Synthetic oligonucleotide

SEQ ID NO: 605658 - DNA, 57 bp, Artificial; identical to SEQ ID NO: 463443
  Synthetic oligonucleotide

SEQ ID NO: 605659 - DNA, 60 bp, Artificial; identical to SEQ ID NO: 463445
  Synthetic oligonucleotide

SEQ ID NO: 605660 - DNA, 58 bp, Artificial; identical to SEQ ID NO: 463447
  Synthetic oligonucleotide

SEQ ID NO: 605661 - DNA, 55 bp, Artificial; identical to SEQ ID NO: 463448
  Synthetic oligonucleotide

SEQ ID NO: 605662 - DNA, 60 bp, Artificial; identical to SEQ ID NO: 463449
  Synthetic oligonucleotide

SEQ ID NO: 605663 - DNA, 60 bp, Artificial; identical to SEQ ID NO: 463450
  Synthetic oligonucleotide

SEQ ID NO: 605664 - DNA, 55 bp, Artificial; identical to SEQ ID NO: 463452
  Synthetic oligonucleotide

SEQ ID NO: 605665 - DNA, 55 bp, Artificial; identical to SEQ ID NO: 463454
  Synthetic oligonucleotide

SEQ ID NO: 605666 - DNA, 60 bp, Artificial; identical to SEQ ID NO: 463456
  Synthetic oligonucleotide

SEQ ID NO: 605667 - DNA, 60 bp, Artificial; identical to SEQ ID NO: 463458
  Synthetic oligonucleotide

SEQ ID NO: 605668 - DNA, 51 bp, Artificial; identical to SEQ ID NO: 463459
  Synthetic oligonucleotide

SEQ ID NO: 605669 - DNA, 60 bp, Artificial; identical to SEQ ID NO: 15405
  Synthetic oligonucleotide

SEQ ID NO: 605670 - DNA, 55 bp, Artificial; identical to SEQ ID NO: 463461
  Synthetic oligonucleotide

SEQ ID NO: 605671 - DNA, 55 bp, Artificial; identical to SEQ ID NO: 463462
  Synthetic oligonucleotide

SEQ ID NO: 605672 - DNA, 60 bp, Artificial; identical to SEQ ID NO: 463465
  Synthetic oligonucleotide

SEQ ID NO: 605673 - DNA, 60 bp, Artificial; identical to SEQ ID NO: 463467
  Synthetic oligonucleotide

SEQ ID NO: 605674 - DNA, 60 bp, Artificial; identical to SEQ ID NO: 463470
  Synthetic oligonucleotide

SEQ ID NO: 605675 - DNA, 60 bp, Artificial; identical to SEQ ID NO: 463471
  Synthetic oligonucleotide

SEQ ID NO: 605676 - DNA, 60 bp, Artificial; identical to SEQ ID NO: 463472
  Synthetic oligonucleotide

SEQ ID NO: 605677 - DNA, 60 bp, Artificial; identical to SEQ ID NO: 463473
  Synthetic oligonucleotide

SEQ ID NO: 605678 - DNA, 55 bp, Artificial; identical to SEQ ID NO: 463476
  Synthetic oligonucleotide

SEQ ID NO: 605679 - DNA, 60 bp, Artificial; identical to SEQ ID NO: 463479
  Synthetic oligonucleotide

SEQ ID NO: 605680 - DNA, 60 bp, Artificial; identical to SEQ ID NO: 463481
  Synthetic oligonucleotide

SEQ ID NO: 605681 - DNA, 55 bp, Artificial; identical to SEQ ID NO: 463482
  Synthetic oligonucleotide

SEQ ID NO: 605682 - DNA, 60 bp, Artificial; identical to SEQ ID NO: 463486
  Synthetic oligonucleotide

SEQ ID NO: 605683 - DNA, 60 bp, Artificial; identical to SEQ ID NO: 463487
  Synthetic oligonucleotide

SEQ ID NO: 605684 - DNA, 60 bp, Artificial; identical to SEQ ID NO: 463488
  Synthetic oligonucleotide

SEQ ID NO: 605685 - DNA, 53 bp, Artificial; identical to SEQ ID NO: 463490
  Synthetic oligonucleotide

SEQ ID NO: 605686 - DNA, 58 bp, Artificial; identical to SEQ ID NO: 463492
  Synthetic oligonucleotide

SEQ ID NO: 605687 - DNA, 58 bp, Artificial; identical to SEQ ID NO: 463501
  Synthetic oligonucleotide

SEQ ID NO: 605688 - DNA, 55 bp, Artificial; identical to SEQ ID NO: 463502
  Synthetic oligonucleotide

SEQ ID NO: 605689 - DNA, 50 bp, Artificial; identical to SEQ ID NO: 463506
  Synthetic oligonucleotide

SEQ ID NO: 605690 - DNA, 60 bp, Artificial; identical to SEQ ID NO: 463507
  Synthetic oligonucleotide

SEQ ID NO: 605691 - DNA, 60 bp, Artificial; identical to SEQ ID NO: 463509
  Synthetic oligonucleotide

SEQ ID NO: 605692 - DNA, 60 bp, Artificial; identical to SEQ ID NO: 463510
  Synthetic oligonucleotide

SEQ ID NO: 605693 - DNA, 60 bp, Artificial; identical to SEQ ID NO: 463511
  Synthetic oligonucleotide

SEQ ID NO: 605694 - DNA, 52 bp, Artificial; identical to SEQ ID NO: 463512
  Synthetic oligonucleotide

SEQ ID NO: 605695 - DNA, 56 bp, Artificial; identical to SEQ ID NO: 463513
  Synthetic oligonucleotide

SEQ ID NO: 605696 - DNA, 60 bp, Artificial; identical to SEQ ID NO: 463515
  Synthetic oligonucleotide

SEQ ID NO: 605697 - DNA, 57 bp, Artificial; identical to SEQ ID NO: 463516
  Synthetic oligonucleotide

SEQ ID NO: 605698 - DNA, 58 bp, Artificial; identical to SEQ ID NO: 463519
  Synthetic oligonucleotide

SEQ ID NO: 605699 - DNA, 60 bp, Artificial; identical to SEQ ID NO: 463522
  Synthetic oligonucleotide

SEQ ID NO: 605700 - DNA, 55 bp, Artificial; identical to SEQ ID NO: 463530
  Synthetic oligonucleotide

SEQ ID NO: 605701 - DNA, 60 bp, Artificial; identical to SEQ ID NO: 463531
  Synthetic oligonucleotide

SEQ ID NO: 605702 - DNA, 60 bp, Artificial; identical to SEQ ID NO: 463532
  Synthetic oligonucleotide

SEQ ID NO: 605703 - DNA, 58 bp, Artificial; identical to SEQ ID NO: 463533
  Synthetic oligonucleotide

SEQ ID NO: 605704 - DNA, 58 bp, Artificial; identical to SEQ ID NO: 463537
  Synthetic oligonucleotide

SEQ ID NO: 605705 - DNA, 59 bp, Artificial; identical to SEQ ID NO: 19426
  Synthetic oligonucleotide

SEQ ID NO: 605706 - DNA, 55 bp, Artificial; identical to SEQ ID NO: 463539
  Synthetic oligonucleotide

SEQ ID NO: 605707 - DNA, 58 bp, Artificial; identical to SEQ ID NO: 463540
  Synthetic oligonucleotide

SEQ ID NO: 605708 - DNA, 58 bp, Artificial; identical to SEQ ID NO: 463542
  Synthetic oligonucleotide

SEQ ID NO: 605709 - DNA, 50 bp, Artificial; identical to SEQ ID NO: 463545
  Synthetic oligonucleotide

SEQ ID NO: 605710 - DNA, 52 bp, Artificial; identical to SEQ ID NO: 463547
  Synthetic oligonucleotide

SEQ ID NO: 605711 - DNA, 54 bp, Artificial; identical to SEQ ID NO: 463552
  Synthetic oligonucleotide

SEQ ID NO: 605712 - DNA, 55 bp, Artificial; identical to SEQ ID NO: 463563
  Synthetic oligonucleotide

SEQ ID NO: 605713 - DNA, 60 bp, Artificial; identical to SEQ ID NO: 463564
  Synthetic oligonucleotide

SEQ ID NO: 605714 - DNA, 58 bp, Artificial; identical to SEQ ID NO: 463569
  Synthetic oligonucleotide

SEQ ID NO: 605715 - DNA, 53 bp, Artificial; identical to SEQ ID NO: 463570
  Synthetic oligonucleotide

SEQ ID NO: 605716 - DNA, 51 bp, Artificial; identical to SEQ ID NO: 463571
  Synthetic oligonucleotide

SEQ ID NO: 605717 - DNA, 52 bp, Artificial; identical to SEQ ID NO: 463572
  Synthetic oligonucleotide

SEQ ID NO: 605718 - DNA, 55 bp, Artificial; identical to SEQ ID NO: 463573
  Synthetic oligonucleotide

SEQ ID NO: 605719 - DNA, 55 bp, Artificial; identical to SEQ ID NO: 463574
  Synthetic oligonucleotide

SEQ ID NO: 605720 - DNA, 60 bp, Artificial; identical to SEQ ID NO: 463577
  Synthetic oligonucleotide

SEQ ID NO: 605721 - DNA, 55 bp, Artificial; identical to SEQ ID NO: 463578
  Synthetic oligonucleotide

SEQ ID NO: 605722 - DNA, 59 bp, Artificial; identical to SEQ ID NO: 463580
  Synthetic oligonucleotide

SEQ ID NO: 605723 - DNA, 52 bp, Artificial; identical to SEQ ID NO: 463581
  Synthetic oligonucleotide

SEQ ID NO: 605724 - DNA, 51 bp, Artificial; identical to SEQ ID NO: 463583
  Synthetic oligonucleotide

SEQ ID NO: 605725 - DNA, 54 bp, Artificial; identical to SEQ ID NO: 463584
  Synthetic oligonucleotide

SEQ ID NO: 605726 - DNA, 55 bp, Artificial; identical to SEQ ID NO: 463585
  Synthetic oligonucleotide

SEQ ID NO: 605727 - DNA, 58 bp, Artificial; identical to SEQ ID NO: 463586
  Synthetic oligonucleotide

SEQ ID NO: 605728 - DNA, 60 bp, Artificial; identical to SEQ ID NO: 463587
  Synthetic oligonucleotide

SEQ ID NO: 605729 - DNA, 60 bp, Artificial; identical to SEQ ID NO: 463588
  Synthetic oligonucleotide

SEQ ID NO: 605730 - DNA, 56 bp, Artificial; identical to SEQ ID NO: 463590
  Synthetic oligonucleotide

SEQ ID NO: 605731 - DNA, 60 bp, Artificial; identical to SEQ ID NO: 463595
  Synthetic oligonucleotide

SEQ ID NO: 605732 - DNA, 54 bp, Artificial; identical to SEQ ID NO: 463596
  Synthetic oligonucleotide

SEQ ID NO: 605733 - DNA, 53 bp, Artificial; identical to SEQ ID NO: 463597
  Synthetic oligonucleotide

SEQ ID NO: 605734 - DNA, 57 bp, Artificial; identical to SEQ ID NO: 15909
  Synthetic oligonucleotide

SEQ ID NO: 605735 - DNA, 59 bp, Artificial; identical to SEQ ID NO: 20169
  Synthetic oligonucleotide

SEQ ID NO: 605736 - DNA, 58 bp, Artificial; identical to SEQ ID NO: 463602
  Synthetic oligonucleotide

SEQ ID NO: 605737 - DNA, 55 bp, Artificial; identical to SEQ ID NO: 463603
  Synthetic oligonucleotide

SEQ ID NO: 605738 - DNA, 60 bp, Artificial; identical to SEQ ID NO: 463606
  Synthetic oligonucleotide

SEQ ID NO: 605739 - DNA, 54 bp, Artificial; identical to SEQ ID NO: 463610
  Synthetic oligonucleotide

SEQ ID NO: 605740 - DNA, 60 bp, Artificial; identical to SEQ ID NO: 463611
  Synthetic oligonucleotide

SEQ ID NO: 605741 - DNA, 58 bp, Artificial; identical to SEQ ID NO: 463612
  Synthetic oligonucleotide

SEQ ID NO: 605742 - DNA, 55 bp, Artificial; identical to SEQ ID NO: 463613
  Synthetic oligonucleotide

SEQ ID NO: 605743 - DNA, 59 bp, Artificial; identical to SEQ ID NO: 463614
  Synthetic oligonucleotide

SEQ ID NO: 605744 - DNA, 57 bp, Artificial; identical to SEQ ID NO: 463615
  Synthetic oligonucleotide

SEQ ID NO: 605745 - DNA, 60 bp, Artificial; identical to SEQ ID NO: 463616
  Synthetic oligonucleotide

SEQ ID NO: 605746 - DNA, 60 bp, Artificial; identical to SEQ ID NO: 463618
  Synthetic oligonucleotide

SEQ ID NO: 605747 - DNA, 60 bp, Artificial; identical to SEQ ID NO: 463624
  Synthetic oligonucleotide

SEQ ID NO: 605748 - DNA, 60 bp, Artificial; identical to SEQ ID NO: 103517
  Synthetic oligonucleotide

SEQ ID NO: 605749 - DNA, 60 bp, Artificial; identical to SEQ ID NO: 463625
  Synthetic oligonucleotide

SEQ ID NO: 605750 - DNA, 60 bp, Artificial; identical to SEQ ID NO: 463627
  Synthetic oligonucleotide

SEQ ID NO: 605751 - DNA, 55 bp, Artificial; identical to SEQ ID NO: 463628
  Synthetic oligonucleotide

SEQ ID NO: 605752 - DNA, 55 bp, Artificial; identical to SEQ ID NO: 463630
  Synthetic oligonucleotide

SEQ ID NO: 605753 - DNA, 56 bp, Artificial; identical to SEQ ID NO: 463634
  Synthetic oligonucleotide

SEQ ID NO: 605754 - DNA, 57 bp, Artificial; identical to SEQ ID NO: 463637
  Synthetic oligonucleotide

SEQ ID NO: 605755 - DNA, 50 bp, Artificial; identical to SEQ ID NO: 463639
  Synthetic oligonucleotide

SEQ ID NO: 605756 - DNA, 52 bp, Artificial; identical to SEQ ID NO: 463641
  Synthetic oligonucleotide

SEQ ID NO: 605757 - DNA, 54 bp, Artificial; identical to SEQ ID NO: 463644
  Synthetic oligonucleotide

SEQ ID NO: 605758 - DNA, 59 bp, Artificial; identical to SEQ ID NO: 463646
  Synthetic oligonucleotide

SEQ ID NO: 605759 - DNA, 60 bp, Artificial; identical to SEQ ID NO: 463647
  Synthetic oligonucleotide

SEQ ID NO: 605760 - DNA, 55 bp, Artificial; identical to SEQ ID NO: 463648
  Synthetic oligonucleotide

SEQ ID NO: 605761 - DNA, 60 bp, Artificial; identical to SEQ ID NO: 463650
  Synthetic oligonucleotide

SEQ ID NO: 605762 - DNA, 60 bp, Artificial; identical to SEQ ID NO: 463653
  Synthetic oligonucleotide

SEQ ID NO: 605763 - DNA, 52 bp, Artificial; identical to SEQ ID NO: 463654
  Synthetic oligonucleotide

SEQ ID NO: 605764 - DNA, 60 bp, Artificial; identical to SEQ ID NO: 463656
  Synthetic oligonucleotide

SEQ ID NO: 605765 - DNA, 57 bp, Artificial; identical to SEQ ID NO: 463661
  Synthetic oligonucleotide

SEQ ID NO: 605766 - DNA, 55 bp, Artificial; identical to SEQ ID NO: 463664
  Synthetic oligonucleotide

SEQ ID NO: 605767 - DNA, 60 bp, Artificial; identical to SEQ ID NO: 463665
  Synthetic oligonucleotide

SEQ ID NO: 605768 - DNA, 60 bp, Artificial; identical to SEQ ID NO: 463670
  Synthetic oligonucleotide

SEQ ID NO: 605769 - DNA, 59 bp, Artificial; identical to SEQ ID NO: 463671
  Synthetic oligonucleotide

SEQ ID NO: 605770 - DNA, 54 bp, Artificial; identical to SEQ ID NO: 463672
  Synthetic oligonucleotide

SEQ ID NO: 605771 - DNA, 60 bp, Artificial; identical to SEQ ID NO: 463673
  Synthetic oligonucleotide

SEQ ID NO: 605772 - DNA, 56 bp, Artificial; identical to SEQ ID NO: 463675
  Synthetic oligonucleotide

SEQ ID NO: 605773 - DNA, 52 bp, Artificial; identical to SEQ ID NO: 463678
  Synthetic oligonucleotide

SEQ ID NO: 605774 - DNA, 60 bp, Artificial; identical to SEQ ID NO: 463684
  Synthetic oligonucleotide

SEQ ID NO: 605775 - DNA, 56 bp, Artificial; identical to SEQ ID NO: 463685
  Synthetic oligonucleotide

SEQ ID NO: 605776 - DNA, 60 bp, Artificial; identical to SEQ ID NO: 463689
  Synthetic oligonucleotide

SEQ ID NO: 605777 - DNA, 60 bp, Artificial; identical to SEQ ID NO: 463695
  Synthetic oligonucleotide

SEQ ID NO: 605778 - DNA, 59 bp, Artificial; identical to SEQ ID NO: 463696
  Synthetic oligonucleotide

SEQ ID NO: 605779 - DNA, 55 bp, Artificial; identical to SEQ ID NO: 463698
  Synthetic oligonucleotide

SEQ ID NO: 605780 - DNA, 57 bp, Artificial; identical to SEQ ID NO: 463699
  Synthetic oligonucleotide

SEQ ID NO: 605781 - DNA, 57 bp, Artificial; identical to SEQ ID NO: 463702
  Synthetic oligonucleotide

SEQ ID NO: 605782 - DNA, 59 bp, Artificial; identical to SEQ ID NO: 463703
  Synthetic oligonucleotide

SEQ ID NO: 605783 - DNA, 60 bp, Artificial; identical to SEQ ID NO: 463705
  Synthetic oligonucleotide

SEQ ID NO: 605784 - DNA, 56 bp, Artificial; identical to SEQ ID NO: 463707
  Synthetic oligonucleotide

SEQ ID NO: 605785 - DNA, 60 bp, Artificial; identical to SEQ ID NO: 463708
  Synthetic oligonucleotide

SEQ ID NO: 605786 - DNA, 54 bp, Artificial; identical to SEQ ID NO: 463712
  Synthetic oligonucleotide

SEQ ID NO: 605787 - DNA, 53 bp, Artificial; identical to SEQ ID NO: 463715
  Synthetic oligonucleotide

SEQ ID NO: 605788 - DNA, 55 bp, Artificial; identical to SEQ ID NO: 463719
  Synthetic oligonucleotide

SEQ ID NO: 605789 - DNA, 55 bp, Artificial; identical to SEQ ID NO: 463720
  Synthetic oligonucleotide

SEQ ID NO: 605790 - DNA, 58 bp, Artificial; identical to SEQ ID NO: 463721
  Synthetic oligonucleotide

SEQ ID NO: 605791 - DNA, 52 bp, Artificial; identical to SEQ ID NO: 463729
  Synthetic oligonucleotide

SEQ ID NO: 605792 - DNA, 60 bp, Artificial; identical to SEQ ID NO: 463731
  Synthetic oligonucleotide

SEQ ID NO: 605793 - DNA, 58 bp, Artificial; identical to SEQ ID NO: 463734
  Synthetic oligonucleotide

SEQ ID NO: 605794 - DNA, 55 bp, Artificial; identical to SEQ ID NO: 463735
  Synthetic oligonucleotide

SEQ ID NO: 605795 - DNA, 60 bp, Artificial; identical to SEQ ID NO: 463736
  Synthetic oligonucleotide

SEQ ID NO: 605796 - DNA, 60 bp, Artificial; identical to SEQ ID NO: 463743
  Synthetic oligonucleotide

SEQ ID NO: 605797 - DNA, 60 bp, Artificial; identical to SEQ ID NO: 463745
  Synthetic oligonucleotide

SEQ ID NO: 605798 - DNA, 55 bp, Artificial; identical to SEQ ID NO: 463746
  Synthetic oligonucleotide

SEQ ID NO: 605799 - DNA, 55 bp, Artificial; identical to SEQ ID NO: 463751
  Synthetic oligonucleotide

SEQ ID NO: 605800 - DNA, 60 bp, Artificial; identical to SEQ ID NO: 463752
  Synthetic oligonucleotide

SEQ ID NO: 605801 - DNA, 52 bp, Artificial; identical to SEQ ID NO: 463753
  Synthetic oligonucleotide

SEQ ID NO: 605802 - DNA, 55 bp, Artificial; identical to SEQ ID NO: 463754
  Synthetic oligonucleotide

SEQ ID NO: 605803 - DNA, 60 bp, Artificial; identical to SEQ ID NO: 463755
  Synthetic oligonucleotide

SEQ ID NO: 605804 - DNA, 60 bp, Artificial; identical to SEQ ID NO: 463757
  Synthetic oligonucleotide

SEQ ID NO: 605805 - DNA, 54 bp, Artificial; identical to SEQ ID NO: 463760
  Synthetic oligonucleotide

SEQ ID NO: 605806 - DNA, 55 bp, Artificial; identical to SEQ ID NO: 463761
  Synthetic oligonucleotide

SEQ ID NO: 605807 - DNA, 60 bp, Artificial; identical to SEQ ID NO: 463762
  Synthetic oligonucleotide

SEQ ID NO: 605808 - DNA, 51 bp, Artificial; identical to SEQ ID NO: 463763
  Synthetic oligonucleotide

SEQ ID NO: 605809 - DNA, 60 bp, Artificial; identical to SEQ ID NO: 463767
  Synthetic oligonucleotide

SEQ ID NO: 605810 - DNA, 52 bp, Artificial; identical to SEQ ID NO: 7456
  Synthetic oligonucleotide

SEQ ID NO: 605811 - DNA, 60 bp, Artificial; identical to SEQ ID NO: 463769
  Synthetic oligonucleotide

SEQ ID NO: 605812 - DNA, 60 bp, Artificial; identical to SEQ ID NO: 463770
  Synthetic oligonucleotide

SEQ ID NO: 605813 - DNA, 52 bp, Artificial; identical to SEQ ID NO: 463774
  Synthetic oligonucleotide

SEQ ID NO: 605814 - DNA, 59 bp, Artificial; identical to SEQ ID NO: 463776
  Synthetic oligonucleotide

SEQ ID NO: 605815 - DNA, 52 bp, Artificial; identical to SEQ ID NO: 463777
  Synthetic oligonucleotide

SEQ ID NO: 605816 - DNA, 60 bp, Artificial; identical to SEQ ID NO: 463779
  Synthetic oligonucleotide

SEQ ID NO: 605817 - DNA, 50 bp, Artificial; identical to SEQ ID NO: 463780
  Synthetic oligonucleotide

SEQ ID NO: 605818 - DNA, 58 bp, Artificial; identical to SEQ ID NO: 463783
  Synthetic oligonucleotide

SEQ ID NO: 605819 - DNA, 60 bp, Artificial; identical to SEQ ID NO: 463789
  Synthetic oligonucleotide

SEQ ID NO: 605820 - DNA, 58 bp, Artificial; identical to SEQ ID NO: 463797
  Synthetic oligonucleotide

SEQ ID NO: 605821 - DNA, 52 bp, Artificial; identical to SEQ ID NO: 463801
  Synthetic oligonucleotide

SEQ ID NO: 605822 - DNA, 58 bp, Artificial; identical to SEQ ID NO: 463803
  Synthetic oligonucleotide

SEQ ID NO: 605823 - DNA, 58 bp, Artificial; identical to SEQ ID NO: 463807
  Synthetic oligonucleotide

SEQ ID NO: 605824 - DNA, 60 bp, Artificial; identical to SEQ ID NO: 8449
  Synthetic oligonucleotide

SEQ ID NO: 605825 - DNA, 54 bp, Artificial; identical to SEQ ID NO: 463811
  Synthetic oligonucleotide

SEQ ID NO: 605826 - DNA, 59 bp, Artificial; identical to SEQ ID NO: 463823
  Synthetic oligonucleotide

SEQ ID NO: 605827 - DNA, 60 bp, Artificial; identical to SEQ ID NO: 10856
  Synthetic oligonucleotide

SEQ ID NO: 605828 - DNA, 60 bp, Artificial; identical to SEQ ID NO: 463830
  Synthetic oligonucleotide

SEQ ID NO: 605829 - DNA, 58 bp, Artificial; identical to SEQ ID NO: 463833
  Synthetic oligonucleotide

SEQ ID NO: 605830 - DNA, 59 bp, Artificial; identical to SEQ ID NO: 463839
  Synthetic oligonucleotide

SEQ ID NO: 605831 - DNA, 60 bp, Artificial; identical to SEQ ID NO: 463840
  Synthetic oligonucleotide

SEQ ID NO: 605832 - DNA, 60 bp, Artificial; identical to SEQ ID NO: 463845
  Synthetic oligonucleotide

SEQ ID NO: 605833 - DNA, 60 bp, Artificial; identical to SEQ ID NO: 463847
  Synthetic oligonucleotide

SEQ ID NO: 605834 - DNA, 58 bp, Artificial; identical to SEQ ID NO: 463851
  Synthetic oligonucleotide

SEQ ID NO: 605835 - DNA, 55 bp, Artificial; identical to SEQ ID NO: 463852
  Synthetic oligonucleotide

SEQ ID NO: 605836 - DNA, 60 bp, Artificial; identical to SEQ ID NO: 463853
  Synthetic oligonucleotide

SEQ ID NO: 605837 - DNA, 58 bp, Artificial; identical to SEQ ID NO: 463855
  Synthetic oligonucleotide

SEQ ID NO: 605838 - DNA, 54 bp, Artificial; identical to SEQ ID NO: 463861
  Synthetic oligonucleotide

SEQ ID NO: 605839 - DNA, 53 bp, Artificial; identical to SEQ ID NO: 463864
  Synthetic oligonucleotide

SEQ ID NO: 605840 - DNA, 55 bp, Artificial; identical to SEQ ID NO: 20205
  Synthetic oligonucleotide

SEQ ID NO: 605841 - DNA, 50 bp, Artificial; identical to SEQ ID NO: 463870
  Synthetic oligonucleotide

SEQ ID NO: 605842 - DNA, 52 bp, Artificial; identical to SEQ ID NO: 463871
  Synthetic oligonucleotide

SEQ ID NO: 605843 - DNA, 60 bp, Artificial; identical to SEQ ID NO: 463872
  Synthetic oligonucleotide

SEQ ID NO: 605844 - DNA, 53 bp, Artificial; identical to SEQ ID NO: 463877
  Synthetic oligonucleotide

SEQ ID NO: 605845 - DNA, 60 bp, Artificial; identical to SEQ ID NO: 463880
  Synthetic oligonucleotide

SEQ ID NO: 605846 - DNA, 59 bp, Artificial; identical to SEQ ID NO: 17990
  Synthetic oligonucleotide

SEQ ID NO: 605847 - DNA, 60 bp, Artificial; identical to SEQ ID NO: 463889
  Synthetic oligonucleotide

SEQ ID NO: 605848 - DNA, 58 bp, Artificial; identical to SEQ ID NO: 463891
  Synthetic oligonucleotide

SEQ ID NO: 605849 - DNA, 55 bp, Artificial; identical to SEQ ID NO: 463892
  Synthetic oligonucleotide

SEQ ID NO: 605850 - DNA, 60 bp, Artificial; identical to SEQ ID NO: 463893
  Synthetic oligonucleotide

SEQ ID NO: 605851 - DNA, 58 bp, Artificial; identical to SEQ ID NO: 463897
  Synthetic oligonucleotide

SEQ ID NO: 605852 - DNA, 59 bp, Artificial; identical to SEQ ID NO: 463901
  Synthetic oligonucleotide

SEQ ID NO: 605853 - DNA, 54 bp, Artificial; identical to SEQ ID NO: 463903
  Synthetic oligonucleotide

SEQ ID NO: 605854 - DNA, 60 bp, Artificial; identical to SEQ ID NO: 108391
  Synthetic oligonucleotide

SEQ ID NO: 605855 - DNA, 56 bp, Artificial; identical to SEQ ID NO: 463905
  Synthetic oligonucleotide

SEQ ID NO: 605856 - DNA, 57 bp, Artificial; identical to SEQ ID NO: 463907
  Synthetic oligonucleotide

SEQ ID NO: 605857 - DNA, 56 bp, Artificial; identical to SEQ ID NO: 463908
  Synthetic oligonucleotide

SEQ ID NO: 605858 - DNA, 58 bp, Artificial; identical to SEQ ID NO: 463911
  Synthetic oligonucleotide

SEQ ID NO: 605859 - DNA, 60 bp, Artificial; identical to SEQ ID NO: 463912
  Synthetic oligonucleotide

SEQ ID NO: 605860 - DNA, 55 bp, Artificial; identical to SEQ ID NO: 463913
  Synthetic oligonucleotide

SEQ ID NO: 605861 - DNA, 57 bp, Artificial; identical to SEQ ID NO: 463914
  Synthetic oligonucleotide

SEQ ID NO: 605862 - DNA, 55 bp, Artificial; identical to SEQ ID NO: 463916
  Synthetic oligonucleotide

SEQ ID NO: 605863 - DNA, 58 bp, Artificial; identical to SEQ ID NO: 463922
  Synthetic oligonucleotide

SEQ ID NO: 605864 - DNA, 60 bp, Artificial; identical to SEQ ID NO: 7429
  Synthetic oligonucleotide

SEQ ID NO: 605865 - DNA, 60 bp, Artificial; identical to SEQ ID NO: 463926
  Synthetic oligonucleotide

SEQ ID NO: 605866 - DNA, 60 bp, Artificial; identical to SEQ ID NO: 463927
  Synthetic oligonucleotide

SEQ ID NO: 605867 - DNA, 53 bp, Artificial; identical to SEQ ID NO: 463929
  Synthetic oligonucleotide

SEQ ID NO: 605868 - DNA, 60 bp, Artificial; identical to SEQ ID NO: 463931
  Synthetic oligonucleotide

SEQ ID NO: 605869 - DNA, 60 bp, Artificial; identical to SEQ ID NO: 463935
  Synthetic oligonucleotide

SEQ ID NO: 605870 - DNA, 55 bp, Artificial; identical to SEQ ID NO: 463942
  Synthetic oligonucleotide

SEQ ID NO: 605871 - DNA, 52 bp, Artificial; identical to SEQ ID NO: 463944
  Synthetic oligonucleotide

SEQ ID NO: 605872 - DNA, 60 bp, Artificial; identical to SEQ ID NO: 463945
  Synthetic oligonucleotide

SEQ ID NO: 605873 - DNA, 60 bp, Artificial; identical to SEQ ID NO: 463948
  Synthetic oligonucleotide

SEQ ID NO: 605874 - DNA, 53 bp, Artificial; identical to SEQ ID NO: 463949
  Synthetic oligonucleotide

SEQ ID NO: 605875 - DNA, 60 bp, Artificial; identical to SEQ ID NO: 463952
  Synthetic oligonucleotide

SEQ ID NO: 605876 - DNA, 50 bp, Artificial; identical to SEQ ID NO: 463954
  Synthetic oligonucleotide

SEQ ID NO: 605877 - DNA, 60 bp, Artificial; identical to SEQ ID NO: 7606
  Synthetic oligonucleotide

SEQ ID NO: 605878 - DNA, 60 bp, Artificial; identical to SEQ ID NO: 15376
  Synthetic oligonucleotide

SEQ ID NO: 605879 - DNA, 60 bp, Artificial; identical to SEQ ID NO: 6150
  Synthetic oligonucleotide

SEQ ID NO: 605880 - DNA, 58 bp, Artificial; identical to SEQ ID NO: 463958
  Synthetic oligonucleotide

SEQ ID NO: 605881 - DNA, 55 bp, Artificial; identical to SEQ ID NO: 463959
  Synthetic oligonucleotide

SEQ ID NO: 605882 - DNA, 60 bp, Artificial; identical to SEQ ID NO: 463962
  Synthetic oligonucleotide

SEQ ID NO: 605883 - DNA, 58 bp, Artificial; identical to SEQ ID NO: 463963
  Synthetic oligonucleotide

SEQ ID NO: 605884 - DNA, 60 bp, Artificial; identical to SEQ ID NO: 8619
  Synthetic oligonucleotide

SEQ ID NO: 605885 - DNA, 60 bp, Artificial; identical to SEQ ID NO: 463972
  Synthetic oligonucleotide

SEQ ID NO: 605886 - DNA, 57 bp, Artificial; identical to SEQ ID NO: 463973
  Synthetic oligonucleotide

SEQ ID NO: 605887 - DNA, 60 bp, Artificial; identical to SEQ ID NO: 463974
  Synthetic oligonucleotide

SEQ ID NO: 605888 - DNA, 60 bp, Artificial; identical to SEQ ID NO: 463975
  Synthetic oligonucleotide

SEQ ID NO: 605889 - DNA, 60 bp, Artificial; identical to SEQ ID NO: 463978
  Synthetic oligonucleotide

SEQ ID NO: 605890 - DNA, 55 bp, Artificial; identical to SEQ ID NO: 463980
  Synthetic oligonucleotide

SEQ ID NO: 605891 - DNA, 60 bp, Artificial; identical to SEQ ID NO: 463982
  Synthetic oligonucleotide

SEQ ID NO: 605892 - DNA, 54 bp, Artificial; identical to SEQ ID NO: 463986
  Synthetic oligonucleotide

SEQ ID NO: 605893 - DNA, 60 bp, Artificial; identical to SEQ ID NO: 13605
  Synthetic oligonucleotide

SEQ ID NO: 605894 - DNA, 52 bp, Artificial; identical to SEQ ID NO: 8697
  Synthetic oligonucleotide

SEQ ID NO: 605895 - DNA, 57 bp, Artificial; identical to SEQ ID NO: 463994
  Synthetic oligonucleotide

SEQ ID NO: 605896 - DNA, 60 bp, Artificial; identical to SEQ ID NO: 463995
  Synthetic oligonucleotide

SEQ ID NO: 605897 - DNA, 60 bp, Artificial; identical to SEQ ID NO: 463997
  Synthetic oligonucleotide

SEQ ID NO: 605898 - DNA, 60 bp, Artificial; identical to SEQ ID NO: 463998
  Synthetic oligonucleotide

SEQ ID NO: 605899 - DNA, 60 bp, Artificial; identical to SEQ ID NO: 464005
  Synthetic oligonucleotide

SEQ ID NO: 605900 - DNA, 50 bp, Artificial; identical to SEQ ID NO: 464008
  Synthetic oligonucleotide

SEQ ID NO: 605901 - DNA, 60 bp, Artificial; identical to SEQ ID NO: 464014
  Synthetic oligonucleotide

SEQ ID NO: 605902 - DNA, 55 bp, Artificial; identical to SEQ ID NO: 464015
  Synthetic oligonucleotide

SEQ ID NO: 605903 - DNA, 54 bp, Artificial; identical to SEQ ID NO: 464017
  Synthetic oligonucleotide

SEQ ID NO: 605904 - DNA, 60 bp, Artificial; identical to SEQ ID NO: 464018
  Synthetic oligonucleotide

SEQ ID NO: 605905 - DNA, 60 bp, Artificial; identical to SEQ ID NO: 464019
  Synthetic oligonucleotide

SEQ ID NO: 605906 - DNA, 60 bp, Artificial; identical to SEQ ID NO: 464025
  Synthetic oligonucleotide

SEQ ID NO: 605907 - DNA, 60 bp, Artificial; identical to SEQ ID NO: 464026
  Synthetic oligonucleotide

SEQ ID NO: 605908 - DNA, 60 bp, Artificial; identical to SEQ ID NO: 464027
  Synthetic oligonucleotide

SEQ ID NO: 605909 - DNA, 60 bp, Artificial; identical to SEQ ID NO: 464028
  Synthetic oligonucleotide

SEQ ID NO: 605910 - DNA, 55 bp, Artificial; identical to SEQ ID NO: 464029
  Synthetic oligonucleotide

SEQ ID NO: 605911 - DNA, 60 bp, Artificial; identical to SEQ ID NO: 464030
  Synthetic oligonucleotide

SEQ ID NO: 605912 - DNA, 57 bp, Artificial; identical to SEQ ID NO: 464031
  Synthetic oligonucleotide

SEQ ID NO: 605913 - DNA, 55 bp, Artificial; identical to SEQ ID NO: 464032
  Synthetic oligonucleotide

SEQ ID NO: 605914 - DNA, 60 bp, Artificial; identical to SEQ ID NO: 464038
  Synthetic oligonucleotide

SEQ ID NO: 605915 - DNA, 57 bp, Artificial; identical to SEQ ID NO: 464041
  Synthetic oligonucleotide

SEQ ID NO: 605916 - DNA, 60 bp, Artificial; identical to SEQ ID NO: 464042
  Synthetic oligonucleotide

SEQ ID NO: 605917 - DNA, 51 bp, Artificial; identical to SEQ ID NO: 12258
  Synthetic oligonucleotide

SEQ ID NO: 605918 - DNA, 55 bp, Artificial; identical to SEQ ID NO: 464045
  Synthetic oligonucleotide

SEQ ID NO: 605919 - DNA, 60 bp, Artificial; identical to SEQ ID NO: 464047
  Synthetic oligonucleotide

SEQ ID NO: 605920 - DNA, 60 bp, Artificial; identical to SEQ ID NO: 464048
  Synthetic oligonucleotide

SEQ ID NO: 605921 - DNA, 60 bp, Artificial; identical to SEQ ID NO: 464049
  Synthetic oligonucleotide

SEQ ID NO: 605922 - DNA, 60 bp, Artificial; identical to SEQ ID NO: 464054
  Synthetic oligonucleotide

SEQ ID NO: 605923 - DNA, 60 bp, Artificial; identical to SEQ ID NO: 464056
  Synthetic oligonucleotide

SEQ ID NO: 605924 - DNA, 60 bp, Artificial; identical to SEQ ID NO: 464059
  Synthetic oligonucleotide

SEQ ID NO: 605925 - DNA, 58 bp, Artificial; identical to SEQ ID NO: 464060
  Synthetic oligonucleotide

SEQ ID NO: 605926 - DNA, 60 bp, Artificial; identical to SEQ ID NO: 464062
  Synthetic oligonucleotide

SEQ ID NO: 605927 - DNA, 60 bp, Artificial; identical to SEQ ID NO: 464063
  Synthetic oligonucleotide

SEQ ID NO: 605928 - DNA, 55 bp, Artificial; identical to SEQ ID NO: 464068
  Synthetic oligonucleotide

SEQ ID NO: 605929 - DNA, 56 bp, Artificial; identical to SEQ ID NO: 15947
  Synthetic oligonucleotide

SEQ ID NO: 605930 - DNA, 52 bp, Artificial; identical to SEQ ID NO: 464075
  Synthetic oligonucleotide

SEQ ID NO: 605931 - DNA, 60 bp, Artificial; identical to SEQ ID NO: 464076
  Synthetic oligonucleotide

SEQ ID NO: 605932 - DNA, 60 bp, Artificial; identical to SEQ ID NO: 464079
  Synthetic oligonucleotide

SEQ ID NO: 605933 - DNA, 60 bp, Artificial; identical to SEQ ID NO: 464083
  Synthetic oligonucleotide

SEQ ID NO: 605934 - DNA, 55 bp, Artificial; identical to SEQ ID NO: 464085
  Synthetic oligonucleotide

SEQ ID NO: 605935 - DNA, 58 bp, Artificial; identical to SEQ ID NO: 464089
  Synthetic oligonucleotide

SEQ ID NO: 605936 - DNA, 60 bp, Artificial; identical to SEQ ID NO: 464090
  Synthetic oligonucleotide

SEQ ID NO: 605937 - DNA, 58 bp, Artificial; identical to SEQ ID NO: 464091
  Synthetic oligonucleotide

SEQ ID NO: 605938 - DNA, 59 bp, Artificial; identical to SEQ ID NO: 17780
  Synthetic oligonucleotide

SEQ ID NO: 605939 - DNA, 60 bp, Artificial; identical to SEQ ID NO: 464096
  Synthetic oligonucleotide

SEQ ID NO: 605940 - DNA, 55 bp, Artificial; identical to SEQ ID NO: 464097
  Synthetic oligonucleotide

SEQ ID NO: 605941 - DNA, 53 bp, Artificial; identical to SEQ ID NO: 464102
  Synthetic oligonucleotide

SEQ ID NO: 605942 - DNA, 58 bp, Artificial; identical to SEQ ID NO: 464106
  Synthetic oligonucleotide

SEQ ID NO: 605943 - DNA, 60 bp, Artificial; identical to SEQ ID NO: 464112
  Synthetic oligonucleotide

SEQ ID NO: 605944 - DNA, 60 bp, Artificial; identical to SEQ ID NO: 464114
  Synthetic oligonucleotide

SEQ ID NO: 605945 - DNA, 60 bp, Artificial; identical to SEQ ID NO: 464115
  Synthetic oligonucleotide

SEQ ID NO: 605946 - DNA, 60 bp, Artificial; identical to SEQ ID NO: 10078
  Synthetic oligonucleotide

SEQ ID NO: 605947 - DNA, 55 bp, Artificial; identical to SEQ ID NO: 464119
  Synthetic oligonucleotide

SEQ ID NO: 605948 - DNA, 59 bp, Artificial; identical to SEQ ID NO: 464126
  Synthetic oligonucleotide

SEQ ID NO: 605949 - DNA, 60 bp, Artificial; identical to SEQ ID NO: 464127
  Synthetic oligonucleotide

SEQ ID NO: 605950 - DNA, 55 bp, Artificial; identical to SEQ ID NO: 464130
  Synthetic oligonucleotide

SEQ ID NO: 605951 - DNA, 52 bp, Artificial; identical to SEQ ID NO: 464133
  Synthetic oligonucleotide

SEQ ID NO: 605952 - DNA, 60 bp, Artificial; identical to SEQ ID NO: 464136
  Synthetic oligonucleotide

SEQ ID NO: 605953 - DNA, 55 bp, Artificial; identical to SEQ ID NO: 464139
  Synthetic oligonucleotide

SEQ ID NO: 605954 - DNA, 55 bp, Artificial; identical to SEQ ID NO: 464140
  Synthetic oligonucleotide

SEQ ID NO: 605955 - DNA, 51 bp, Artificial; identical to SEQ ID NO: 464142
  Synthetic oligonucleotide

SEQ ID NO: 605956 - DNA, 60 bp, Artificial; identical to SEQ ID NO: 464143
  Synthetic oligonucleotide

SEQ ID NO: 605957 - DNA, 53 bp, Artificial; identical to SEQ ID NO: 464144
  Synthetic oligonucleotide

SEQ ID NO: 605958 - DNA, 55 bp, Artificial; identical to SEQ ID NO: 464146
  Synthetic oligonucleotide

SEQ ID NO: 605959 - DNA, 58 bp, Artificial; identical to SEQ ID NO: 464147
  Synthetic oligonucleotide

SEQ ID NO: 605960 - DNA, 60 bp, Artificial; identical to SEQ ID NO: 464152
  Synthetic oligonucleotide

SEQ ID NO: 605961 - DNA, 55 bp, Artificial; identical to SEQ ID NO: 464155
  Synthetic oligonucleotide

SEQ ID NO: 605962 - DNA, 60 bp, Artificial; identical to SEQ ID NO: 464157
  Synthetic oligonucleotide

SEQ ID NO: 605963 - DNA, 60 bp, Artificial; identical to SEQ ID NO: 464158
  Synthetic oligonucleotide

SEQ ID NO: 605964 - DNA, 60 bp, Artificial; identical to SEQ ID NO: 464159
  Synthetic oligonucleotide

SEQ ID NO: 605965 - DNA, 55 bp, Artificial; identical to SEQ ID NO: 464160
  Synthetic oligonucleotide

SEQ ID NO: 605966 - DNA, 60 bp, Artificial; identical to SEQ ID NO: 464161
  Synthetic oligonucleotide

SEQ ID NO: 605967 - DNA, 60 bp, Artificial; identical to SEQ ID NO: 464163
  Synthetic oligonucleotide

SEQ ID NO: 605968 - DNA, 56 bp, Artificial; identical to SEQ ID NO: 464165
  Synthetic oligonucleotide

SEQ ID NO: 605969 - DNA, 57 bp, Artificial; identical to SEQ ID NO: 464172
  Synthetic oligonucleotide

SEQ ID NO: 605970 - DNA, 54 bp, Artificial; identical to SEQ ID NO: 464177
  Synthetic oligonucleotide

SEQ ID NO: 605971 - DNA, 60 bp, Artificial; identical to SEQ ID NO: 464178
  Synthetic oligonucleotide

SEQ ID NO: 605972 - DNA, 52 bp, Artificial; identical to SEQ ID NO: 464181
  Synthetic oligonucleotide

SEQ ID NO: 605973 - DNA, 58 bp, Artificial; identical to SEQ ID NO: 464184
  Synthetic oligonucleotide

SEQ ID NO: 605974 - DNA, 54 bp, Artificial; identical to SEQ ID NO: 464186
  Synthetic oligonucleotide

SEQ ID NO: 605975 - DNA, 52 bp, Artificial; identical to SEQ ID NO: 6277
  Synthetic oligonucleotide

SEQ ID NO: 605976 - DNA, 60 bp, Artificial; identical to SEQ ID NO: 464187
  Synthetic oligonucleotide

SEQ ID NO: 605977 - DNA, 60 bp, Artificial; identical to SEQ ID NO: 464189
  Synthetic oligonucleotide

SEQ ID NO: 605978 - DNA, 60 bp, Artificial; identical to SEQ ID NO: 464190
  Synthetic oligonucleotide

SEQ ID NO: 605979 - DNA, 60 bp, Artificial; identical to SEQ ID NO: 464191
  Synthetic oligonucleotide

SEQ ID NO: 605980 - DNA, 55 bp, Artificial; identical to SEQ ID NO: 464193
  Synthetic oligonucleotide

SEQ ID NO: 605981 - DNA, 60 bp, Artificial; identical to SEQ ID NO: 464197
  Synthetic oligonucleotide

SEQ ID NO: 605982 - DNA, 55 bp, Artificial; identical to SEQ ID NO: 464199
  Synthetic oligonucleotide

SEQ ID NO: 605983 - DNA, 59 bp, Artificial; identical to SEQ ID NO: 464201
  Synthetic oligonucleotide

SEQ ID NO: 605984 - DNA, 60 bp, Artificial; identical to SEQ ID NO: 464207
  Synthetic oligonucleotide

SEQ ID NO: 605985 - DNA, 60 bp, Artificial; identical to SEQ ID NO: 464208
  Synthetic oligonucleotide

SEQ ID NO: 605986 - DNA, 55 bp, Artificial; identical to SEQ ID NO: 464210
  Synthetic oligonucleotide

SEQ ID NO: 605987 - DNA, 60 bp, Artificial; identical to SEQ ID NO: 464211
  Synthetic oligonucleotide

SEQ ID NO: 605988 - DNA, 60 bp, Artificial; identical to SEQ ID NO: 464218
  Synthetic oligonucleotide

SEQ ID NO: 605989 - DNA, 60 bp, Artificial; identical to SEQ ID NO: 464219
  Synthetic oligonucleotide

SEQ ID NO: 605990 - DNA, 58 bp, Artificial; identical to SEQ ID NO: 464221
  Synthetic oligonucleotide

SEQ ID NO: 605991 - DNA, 60 bp, Artificial; identical to SEQ ID NO: 464223
  Synthetic oligonucleotide

SEQ ID NO: 605992 - DNA, 55 bp, Artificial; identical to SEQ ID NO: 464224
  Synthetic oligonucleotide

SEQ ID NO: 605993 - DNA, 60 bp, Artificial; identical to SEQ ID NO: 464226
  Synthetic oligonucleotide

SEQ ID NO: 605994 - DNA, 59 bp, Artificial; identical to SEQ ID NO: 464227
  Synthetic oligonucleotide

SEQ ID NO: 605995 - DNA, 55 bp, Artificial; identical to SEQ ID NO: 464228
  Synthetic oligonucleotide

SEQ ID NO: 605996 - DNA, 55 bp, Artificial; identical to SEQ ID NO: 464230
  Synthetic oligonucleotide

SEQ ID NO: 605997 - DNA, 58 bp, Artificial; identical to SEQ ID NO: 464232
  Synthetic oligonucleotide

SEQ ID NO: 605998 - DNA, 58 bp, Artificial; identical to SEQ ID NO: 464233
  Synthetic oligonucleotide

SEQ ID NO: 605999 - DNA, 58 bp, Artificial; identical to SEQ ID NO: 464234
  Synthetic oligonucleotide

SEQ ID NO: 606000 - DNA, 59 bp, Artificial; identical to SEQ ID NO: 13574
  Synthetic oligonucleotide

SEQ ID NO: 606001 - DNA, 60 bp, Artificial; identical to SEQ ID NO: 464237
  Synthetic oligonucleotide

SEQ ID NO: 606002 - DNA, 55 bp, Artificial; identical to SEQ ID NO: 464240
  Synthetic oligonucleotide

SEQ ID NO: 606003 - DNA, 59 bp, Artificial; identical to SEQ ID NO: 464243
  Synthetic oligonucleotide

SEQ ID NO: 606004 - DNA, 60 bp, Artificial; identical to SEQ ID NO: 464245
  Synthetic oligonucleotide

SEQ ID NO: 606005 - DNA, 60 bp, Artificial; identical to SEQ ID NO: 464251
  Synthetic oligonucleotide

SEQ ID NO: 606006 - DNA, 56 bp, Artificial; identical to SEQ ID NO: 464255
  Synthetic oligonucleotide

SEQ ID NO: 606007 - DNA, 56 bp, Artificial; identical to SEQ ID NO: 464257
  Synthetic oligonucleotide

SEQ ID NO: 606008 - DNA, 60 bp, Artificial; identical to SEQ ID NO: 464258
  Synthetic oligonucleotide

SEQ ID NO: 606009 - DNA, 60 bp, Artificial; identical to SEQ ID NO: 464260
  Synthetic oligonucleotide

SEQ ID NO: 606010 - DNA, 54 bp, Artificial; identical to SEQ ID NO: 464261
  Synthetic oligonucleotide

SEQ ID NO: 606011 - DNA, 60 bp, Artificial; identical to SEQ ID NO: 464262
  Synthetic oligonucleotide

SEQ ID NO: 606012 - DNA, 58 bp, Artificial; identical to SEQ ID NO: 464264
  Synthetic oligonucleotide

SEQ ID NO: 606013 - DNA, 51 bp, Artificial; identical to SEQ ID NO: 464265
  Synthetic oligonucleotide

SEQ ID NO: 606014 - DNA, 60 bp, Artificial; identical to SEQ ID NO: 464269
  Synthetic oligonucleotide

SEQ ID NO: 606015 - DNA, 55 bp, Artificial; identical to SEQ ID NO: 464271
  Synthetic oligonucleotide

SEQ ID NO: 606016 - DNA, 58 bp, Artificial; identical to SEQ ID NO: 464273
  Synthetic oligonucleotide

SEQ ID NO: 606017 - DNA, 60 bp, Artificial; identical to SEQ ID NO: 464274
  Synthetic oligonucleotide

SEQ ID NO: 606018 - DNA, 60 bp, Artificial; identical to SEQ ID NO: 464277
  Synthetic oligonucleotide

SEQ ID NO: 606019 - DNA, 60 bp, Artificial; identical to SEQ ID NO: 464279
  Synthetic oligonucleotide

SEQ ID NO: 606020 - DNA, 51 bp, Artificial; identical to SEQ ID NO: 464281
  Synthetic oligonucleotide

SEQ ID NO: 606021 - DNA, 55 bp, Artificial; identical to SEQ ID NO: 464283
  Synthetic oligonucleotide

SEQ ID NO: 606022 - DNA, 55 bp, Artificial; identical to SEQ ID NO: 464284
  Synthetic oligonucleotide

SEQ ID NO: 606023 - DNA, 60 bp, Artificial; identical to SEQ ID NO: 464290
  Synthetic oligonucleotide

SEQ ID NO: 606024 - DNA, 55 bp, Artificial; identical to SEQ ID NO: 464291
  Synthetic oligonucleotide

SEQ ID NO: 606025 - DNA, 60 bp, Artificial; identical to SEQ ID NO: 464293
  Synthetic oligonucleotide

SEQ ID NO: 606026 - DNA, 56 bp, Artificial; identical to SEQ ID NO: 464294
  Synthetic oligonucleotide

SEQ ID NO: 606027 - DNA, 59 bp, Artificial; identical to SEQ ID NO: 464295
  Synthetic oligonucleotide

SEQ ID NO: 606028 - DNA, 60 bp, Artificial; identical to SEQ ID NO: 464303
  Synthetic oligonucleotide

SEQ ID NO: 606029 - DNA, 55 bp, Artificial; identical to SEQ ID NO: 464304
  Synthetic oligonucleotide

SEQ ID NO: 606030 - DNA, 55 bp, Artificial; identical to SEQ ID NO: 464307
  Synthetic oligonucleotide

SEQ ID NO: 606031 - DNA, 60 bp, Artificial; identical to SEQ ID NO: 464309
  Synthetic oligonucleotide

SEQ ID NO: 606032 - DNA, 60 bp, Artificial; identical to SEQ ID NO: 464311
  Synthetic oligonucleotide

SEQ ID NO: 606033 - DNA, 58 bp, Artificial; identical to SEQ ID NO: 17090
  Synthetic oligonucleotide

SEQ ID NO: 606034 - DNA, 55 bp, Artificial; identical to SEQ ID NO: 464314
  Synthetic oligonucleotide

SEQ ID NO: 606035 - DNA, 60 bp, Artificial; identical to SEQ ID NO: 464316
  Synthetic oligonucleotide

SEQ ID NO: 606036 - DNA, 54 bp, Artificial; identical to SEQ ID NO: 464319
  Synthetic oligonucleotide

SEQ ID NO: 606037 - DNA, 59 bp, Artificial; identical to SEQ ID NO: 464320
  Synthetic oligonucleotide

SEQ ID NO: 606038 - DNA, 59 bp, Artificial; identical to SEQ ID NO: 464325
  Synthetic oligonucleotide

SEQ ID NO: 606039 - DNA, 60 bp, Artificial; identical to SEQ ID NO: 464326
  Synthetic oligonucleotide

SEQ ID NO: 606040 - DNA, 55 bp, Artificial; identical to SEQ ID NO: 464330
  Synthetic oligonucleotide

SEQ ID NO: 606041 - DNA, 57 bp, Artificial; identical to SEQ ID NO: 464331
  Synthetic oligonucleotide

SEQ ID NO: 606042 - DNA, 57 bp, Artificial; identical to SEQ ID NO: 464335
  Synthetic oligonucleotide

SEQ ID NO: 606043 - DNA, 57 bp, Artificial; identical to SEQ ID NO: 464338
  Synthetic oligonucleotide

SEQ ID NO: 606044 - DNA, 53 bp, Artificial; identical to SEQ ID NO: 464341
  Synthetic oligonucleotide

SEQ ID NO: 606045 - DNA, 60 bp, Artificial; identical to SEQ ID NO: 464342
  Synthetic oligonucleotide

SEQ ID NO: 606046 - DNA, 60 bp, Artificial; identical to SEQ ID NO: 464346
  Synthetic oligonucleotide

SEQ ID NO: 606047 - DNA, 55 bp, Artificial; identical to SEQ ID NO: 464347
  Synthetic oligonucleotide

SEQ ID NO: 606048 - DNA, 55 bp, Artificial; identical to SEQ ID NO: 464350
  Synthetic oligonucleotide

SEQ ID NO: 606049 - DNA, 53 bp, Artificial; identical to SEQ ID NO: 464353
  Synthetic oligonucleotide

SEQ ID NO: 606050 - DNA, 51 bp, Artificial; identical to SEQ ID NO: 464354
  Synthetic oligonucleotide

SEQ ID NO: 606051 - DNA, 52 bp, Artificial; identical to SEQ ID NO: 464355
  Synthetic oligonucleotide

SEQ ID NO: 606052 - DNA, 60 bp, Artificial; identical to SEQ ID NO: 464360
  Synthetic oligonucleotide

SEQ ID NO: 606053 - DNA, 55 bp, Artificial; identical to SEQ ID NO: 464361
  Synthetic oligonucleotide

SEQ ID NO: 606054 - DNA, 59 bp, Artificial; identical to SEQ ID NO: 464362
  Synthetic oligonucleotide

SEQ ID NO: 606055 - DNA, 51 bp, Artificial; identical to SEQ ID NO: 464363
  Synthetic oligonucleotide

SEQ ID NO: 606056 - DNA, 60 bp, Artificial; identical to SEQ ID NO: 464364
  Synthetic oligonucleotide

SEQ ID NO: 606057 - DNA, 50 bp, Artificial; identical to SEQ ID NO: 464366
  Synthetic oligonucleotide

SEQ ID NO: 606058 - DNA, 59 bp, Artificial; identical to SEQ ID NO: 464367
  Synthetic oligonucleotide

SEQ ID NO: 606059 - DNA, 58 bp, Artificial; identical to SEQ ID NO: 464368
  Synthetic oligonucleotide

SEQ ID NO: 606060 - DNA, 55 bp, Artificial; identical to SEQ ID NO: 464369
  Synthetic oligonucleotide

SEQ ID NO: 606061 - DNA, 58 bp, Artificial; identical to SEQ ID NO: 464370
  Synthetic oligonucleotide

SEQ ID NO: 606062 - DNA, 52 bp, Artificial; identical to SEQ ID NO: 464374
  Synthetic oligonucleotide

SEQ ID NO: 606063 - DNA, 57 bp, Artificial; identical to SEQ ID NO: 464382
  Synthetic oligonucleotide

SEQ ID NO: 606064 - DNA, 60 bp, Artificial; identical to SEQ ID NO: 464385
  Synthetic oligonucleotide

SEQ ID NO: 606065 - DNA, 54 bp, Artificial; identical to SEQ ID NO: 464386
  Synthetic oligonucleotide

SEQ ID NO: 606066 - DNA, 60 bp, Artificial; identical to SEQ ID NO: 464388
  Synthetic oligonucleotide

SEQ ID NO: 606067 - DNA, 57 bp, Artificial; identical to SEQ ID NO: 464389
  Synthetic oligonucleotide

SEQ ID NO: 606068 - DNA, 55 bp, Artificial; identical to SEQ ID NO: 464395
  Synthetic oligonucleotide

SEQ ID NO: 606069 - DNA, 55 bp, Artificial; identical to SEQ ID NO: 464397
  Synthetic oligonucleotide

SEQ ID NO: 606070 - DNA, 59 bp, Artificial; identical to SEQ ID NO: 464398
  Synthetic oligonucleotide

SEQ ID NO: 606071 - DNA, 60 bp, Artificial; identical to SEQ ID NO: 464409
  Synthetic oligonucleotide

SEQ ID NO: 606072 - DNA, 59 bp, Artificial; identical to SEQ ID NO: 464410
  Synthetic oligonucleotide

SEQ ID NO: 606073 - DNA, 56 bp, Artificial; identical to SEQ ID NO: 464414
  Synthetic oligonucleotide

SEQ ID NO: 606074 - DNA, 50 bp, Artificial; identical to SEQ ID NO: 464420
  Synthetic oligonucleotide

SEQ ID NO: 606075 - DNA, 60 bp, Artificial; identical to SEQ ID NO: 464432
  Synthetic oligonucleotide

SEQ ID NO: 606076 - DNA, 55 bp, Artificial; identical to SEQ ID NO: 464437
  Synthetic oligonucleotide

SEQ ID NO: 606077 - DNA, 53 bp, Artificial; identical to SEQ ID NO: 464438
  Synthetic oligonucleotide

SEQ ID NO: 606078 - DNA, 55 bp, Artificial; identical to SEQ ID NO: 464439
  Synthetic oligonucleotide

SEQ ID NO: 606079 - DNA, 60 bp, Artificial; identical to SEQ ID NO: 464441
  Synthetic oligonucleotide

SEQ ID NO: 606080 - DNA, 60 bp, Artificial; identical to SEQ ID NO: 10815
  Synthetic oligonucleotide

SEQ ID NO: 606081 - DNA, 53 bp, Artificial; identical to SEQ ID NO: 464444
  Synthetic oligonucleotide

SEQ ID NO: 606082 - DNA, 50 bp, Artificial; identical to SEQ ID NO: 464448
  Synthetic oligonucleotide

SEQ ID NO: 606083 - DNA, 60 bp, Artificial; identical to SEQ ID NO: 464450
  Synthetic oligonucleotide

SEQ ID NO: 606084 - DNA, 54 bp, Artificial; identical to SEQ ID NO: 464451
  Synthetic oligonucleotide

SEQ ID NO: 606085 - DNA, 53 bp, Artificial; identical to SEQ ID NO: 464452
  Synthetic oligonucleotide

SEQ ID NO: 606086 - DNA, 60 bp, Artificial; identical to SEQ ID NO: 464454
  Synthetic oligonucleotide

SEQ ID NO: 606087 - DNA, 55 bp, Artificial; identical to SEQ ID NO: 464455
  Synthetic oligonucleotide

SEQ ID NO: 606088 - DNA, 55 bp, Artificial; identical to SEQ ID NO: 15139
  Synthetic oligonucleotide

SEQ ID NO: 606089 - DNA, 58 bp, Artificial; identical to SEQ ID NO: 464458
  Synthetic oligonucleotide

SEQ ID NO: 606090 - DNA, 60 bp, Artificial; identical to SEQ ID NO: 464460
  Synthetic oligonucleotide

SEQ ID NO: 606091 - DNA, 56 bp, Artificial; identical to SEQ ID NO: 464467
  Synthetic oligonucleotide

SEQ ID NO: 606092 - DNA, 60 bp, Artificial; identical to SEQ ID NO: 464469
  Synthetic oligonucleotide

SEQ ID NO: 606093 - DNA, 55 bp, Artificial; identical to SEQ ID NO: 464470
  Synthetic oligonucleotide

SEQ ID NO: 606094 - DNA, 59 bp, Artificial; identical to SEQ ID NO: 464479
  Synthetic oligonucleotide

SEQ ID NO: 606095 - DNA, 59 bp, Artificial; identical to SEQ ID NO: 464480
  Synthetic oligonucleotide

SEQ ID NO: 606096 - DNA, 60 bp, Artificial; identical to SEQ ID NO: 464483
  Synthetic oligonucleotide

SEQ ID NO: 606097 - DNA, 60 bp, Artificial; identical to SEQ ID NO: 464484
  Synthetic oligonucleotide

SEQ ID NO: 606098 - DNA, 54 bp, Artificial; identical to SEQ ID NO: 464487
  Synthetic oligonucleotide

SEQ ID NO: 606099 - DNA, 60 bp, Artificial; identical to SEQ ID NO: 464497
  Synthetic oligonucleotide

SEQ ID NO: 606100 - DNA, 60 bp, Artificial; identical to SEQ ID NO: 464501
  Synthetic oligonucleotide

SEQ ID NO: 606101 - DNA, 60 bp, Artificial; identical to SEQ ID NO: 12081
  Synthetic oligonucleotide

SEQ ID NO: 606102 - DNA, 55 bp, Artificial; identical to SEQ ID NO: 464505
  Synthetic oligonucleotide

SEQ ID NO: 606103 - DNA, 55 bp, Artificial; identical to SEQ ID NO: 464506
  Synthetic oligonucleotide

SEQ ID NO: 606104 - DNA, 55 bp, Artificial; identical to SEQ ID NO: 464507
  Synthetic oligonucleotide

SEQ ID NO: 606105 - DNA, 58 bp, Artificial; identical to SEQ ID NO: 464509
  Synthetic oligonucleotide

SEQ ID NO: 606106 - DNA, 60 bp, Artificial; identical to SEQ ID NO: 464510
  Synthetic oligonucleotide

SEQ ID NO: 606107 - DNA, 60 bp, Artificial; identical to SEQ ID NO: 464513
  Synthetic oligonucleotide

SEQ ID NO: 606108 - DNA, 55 bp, Artificial; identical to SEQ ID NO: 464514
  Synthetic oligonucleotide

SEQ ID NO: 606109 - DNA, 60 bp, Artificial; identical to SEQ ID NO: 464516
  Synthetic oligonucleotide

SEQ ID NO: 606110 - DNA, 55 bp, Artificial; identical to SEQ ID NO: 464518
  Synthetic oligonucleotide

SEQ ID NO: 606111 - DNA, 60 bp, Artificial; identical to SEQ ID NO: 10353
  Synthetic oligonucleotide

SEQ ID NO: 606112 - DNA, 54 bp, Artificial; identical to SEQ ID NO: 464521
  Synthetic oligonucleotide

SEQ ID NO: 606113 - DNA, 55 bp, Artificial; identical to SEQ ID NO: 464526
  Synthetic oligonucleotide

SEQ ID NO: 606114 - DNA, 60 bp, Artificial; identical to SEQ ID NO: 464527
  Synthetic oligonucleotide

SEQ ID NO: 606115 - DNA, 60 bp, Artificial; identical to SEQ ID NO: 464529
  Synthetic oligonucleotide

SEQ ID NO: 606116 - DNA, 57 bp, Artificial; identical to SEQ ID NO: 464532
  Synthetic oligonucleotide

SEQ ID NO: 606117 - DNA, 55 bp, Artificial; identical to SEQ ID NO: 464533
  Synthetic oligonucleotide

SEQ ID NO: 606118 - DNA, 60 bp, Artificial; identical to SEQ ID NO: 8018
  Synthetic oligonucleotide

SEQ ID NO: 606119 - DNA, 57 bp, Artificial; identical to SEQ ID NO: 464535
  Synthetic oligonucleotide

SEQ ID NO: 606120 - DNA, 54 bp, Artificial; identical to SEQ ID NO: 8670
  Synthetic oligonucleotide

SEQ ID NO: 606121 - DNA, 59 bp, Artificial; identical to SEQ ID NO: 464539
  Synthetic oligonucleotide

SEQ ID NO: 606122 - DNA, 60 bp, Artificial; identical to SEQ ID NO: 464541
  Synthetic oligonucleotide

SEQ ID NO: 606123 - DNA, 60 bp, Artificial; identical to SEQ ID NO: 464544
  Synthetic oligonucleotide

SEQ ID NO: 606124 - DNA, 51 bp, Artificial; identical to SEQ ID NO: 464560
  Synthetic oligonucleotide

SEQ ID NO: 606125 - DNA, 60 bp, Artificial; identical to SEQ ID NO: 464561
  Synthetic oligonucleotide

SEQ ID NO: 606126 - DNA, 60 bp, Artificial; identical to SEQ ID NO: 464563
  Synthetic oligonucleotide

SEQ ID NO: 606127 - DNA, 51 bp, Artificial; identical to SEQ ID NO: 464565
  Synthetic oligonucleotide

SEQ ID NO: 606128 - DNA, 59 bp, Artificial; identical to SEQ ID NO: 464567
  Synthetic oligonucleotide

SEQ ID NO: 606129 - DNA, 60 bp, Artificial; identical to SEQ ID NO: 464568
  Synthetic oligonucleotide

SEQ ID NO: 606130 - DNA, 56 bp, Artificial; identical to SEQ ID NO: 464569
  Synthetic oligonucleotide

SEQ ID NO: 606131 - DNA, 60 bp, Artificial; identical to SEQ ID NO: 464570
  Synthetic oligonucleotide

SEQ ID NO: 606132 - DNA, 58 bp, Artificial; identical to SEQ ID NO: 464571
  Synthetic oligonucleotide

SEQ ID NO: 606133 - DNA, 52 bp, Artificial; identical to SEQ ID NO: 464574
  Synthetic oligonucleotide

SEQ ID NO: 606134 - DNA, 55 bp, Artificial; identical to SEQ ID NO: 464577
  Synthetic oligonucleotide

SEQ ID NO: 606135 - DNA, 60 bp, Artificial; identical to SEQ ID NO: 464580
  Synthetic oligonucleotide

SEQ ID NO: 606136 - DNA, 60 bp, Artificial; identical to SEQ ID NO: 464585
  Synthetic oligonucleotide

SEQ ID NO: 606137 - DNA, 54 bp, Artificial; identical to SEQ ID NO: 464586
  Synthetic oligonucleotide

SEQ ID NO: 606138 - DNA, 60 bp, Artificial; identical to SEQ ID NO: 464587
  Synthetic oligonucleotide

SEQ ID NO: 606139 - DNA, 55 bp, Artificial; identical to SEQ ID NO: 464588
  Synthetic oligonucleotide

SEQ ID NO: 606140 - DNA, 53 bp, Artificial; identical to SEQ ID NO: 464590
  Synthetic oligonucleotide

SEQ ID NO: 606141 - DNA, 60 bp, Artificial; identical to SEQ ID NO: 464591
  Synthetic oligonucleotide

SEQ ID NO: 606142 - DNA, 58 bp, Artificial; identical to SEQ ID NO: 464592
  Synthetic oligonucleotide

SEQ ID NO: 606143 - DNA, 54 bp, Artificial; identical to SEQ ID NO: 464593
  Synthetic oligonucleotide

SEQ ID NO: 606144 - DNA, 59 bp, Artificial; identical to SEQ ID NO: 464600
  Synthetic oligonucleotide

SEQ ID NO: 606145 - DNA, 60 bp, Artificial; identical to SEQ ID NO: 464601
  Synthetic oligonucleotide

SEQ ID NO: 606146 - DNA, 53 bp, Artificial; identical to SEQ ID NO: 464603
  Synthetic oligonucleotide

SEQ ID NO: 606147 - DNA, 60 bp, Artificial; identical to SEQ ID NO: 464604
  Synthetic oligonucleotide

SEQ ID NO: 606148 - DNA, 57 bp, Artificial; identical to SEQ ID NO: 464606
  Synthetic oligonucleotide

SEQ ID NO: 606149 - DNA, 60 bp, Artificial; identical to SEQ ID NO: 11693
  Synthetic oligonucleotide

SEQ ID NO: 606150 - DNA, 58 bp, Artificial; identical to SEQ ID NO: 464608
  Synthetic oligonucleotide

SEQ ID NO: 606151 - DNA, 60 bp, Artificial; identical to SEQ ID NO: 464612
  Synthetic oligonucleotide

SEQ ID NO: 606152 - DNA, 55 bp, Artificial; identical to SEQ ID NO: 464614
  Synthetic oligonucleotide

SEQ ID NO: 606153 - DNA, 59 bp, Artificial; identical to SEQ ID NO: 464615
  Synthetic oligonucleotide

SEQ ID NO: 606154 - DNA, 60 bp, Artificial; identical to SEQ ID NO: 464621
  Synthetic oligonucleotide

SEQ ID NO: 606155 - DNA, 51 bp, Artificial; identical to SEQ ID NO: 464622
  Synthetic oligonucleotide

SEQ ID NO: 606156 - DNA, 60 bp, Artificial; identical to SEQ ID NO: 464623
  Synthetic oligonucleotide

SEQ ID NO: 606157 - DNA, 55 bp, Artificial; identical to SEQ ID NO: 464624
  Synthetic oligonucleotide

SEQ ID NO: 606158 - DNA, 55 bp, Artificial; identical to SEQ ID NO: 464628
  Synthetic oligonucleotide

SEQ ID NO: 606159 - DNA, 50 bp, Artificial; identical to SEQ ID NO: 464629
  Synthetic oligonucleotide

SEQ ID NO: 606160 - DNA, 55 bp, Artificial; identical to SEQ ID NO: 18698
  Synthetic oligonucleotide

SEQ ID NO: 606161 - DNA, 60 bp, Artificial; identical to SEQ ID NO: 7768
  Synthetic oligonucleotide

SEQ ID NO: 606162 - DNA, 58 bp, Artificial; identical to SEQ ID NO: 464636
  Synthetic oligonucleotide

SEQ ID NO: 606163 - DNA, 54 bp, Artificial; identical to SEQ ID NO: 464638
  Synthetic oligonucleotide

SEQ ID NO: 606164 - DNA, 58 bp, Artificial; identical to SEQ ID NO: 464642
  Synthetic oligonucleotide

SEQ ID NO: 606165 - DNA, 55 bp, Artificial; identical to SEQ ID NO: 464643
  Synthetic oligonucleotide

SEQ ID NO: 606166 - DNA, 53 bp, Artificial; identical to SEQ ID NO: 7953
  Synthetic oligonucleotide

SEQ ID NO: 606167 - DNA, 56 bp, Artificial; identical to SEQ ID NO: 464649
  Synthetic oligonucleotide

SEQ ID NO: 606168 - DNA, 60 bp, Artificial; identical to SEQ ID NO: 464651
  Synthetic oligonucleotide

SEQ ID NO: 606169 - DNA, 60 bp, Artificial; identical to SEQ ID NO: 464654
  Synthetic oligonucleotide

SEQ ID NO: 606170 - DNA, 55 bp, Artificial; identical to SEQ ID NO: 464655
  Synthetic oligonucleotide

SEQ ID NO: 606171 - DNA, 51 bp, Artificial; identical to SEQ ID NO: 464658
  Synthetic oligonucleotide

SEQ ID NO: 606172 - DNA, 55 bp, Artificial; identical to SEQ ID NO: 464660
  Synthetic oligonucleotide

SEQ ID NO: 606173 - DNA, 60 bp, Artificial; identical to SEQ ID NO: 464661
  Synthetic oligonucleotide

SEQ ID NO: 606174 - DNA, 60 bp, Artificial; identical to SEQ ID NO: 464668
  Synthetic oligonucleotide

SEQ ID NO: 606175 - DNA, 54 bp, Artificial; identical to SEQ ID NO: 464673
  Synthetic oligonucleotide

SEQ ID NO: 606176 - DNA, 54 bp, Artificial; identical to SEQ ID NO: 464675
  Synthetic oligonucleotide

SEQ ID NO: 606177 - DNA, 54 bp, Artificial; identical to SEQ ID NO: 464681
  Synthetic oligonucleotide

SEQ ID NO: 606178 - DNA, 53 bp, Artificial; identical to SEQ ID NO: 464682
  Synthetic oligonucleotide

SEQ ID NO: 606179 - DNA, 60 bp, Artificial; identical to SEQ ID NO: 464683
  Synthetic oligonucleotide

SEQ ID NO: 606180 - DNA, 55 bp, Artificial; identical to SEQ ID NO: 464687
  Synthetic oligonucleotide

SEQ ID NO: 606181 - DNA, 60 bp, Artificial; identical to SEQ ID NO: 464688
  Synthetic oligonucleotide

SEQ ID NO: 606182 - DNA, 60 bp, Artificial; identical to SEQ ID NO: 464692
  Synthetic oligonucleotide

SEQ ID NO: 606183 - DNA, 60 bp, Artificial; identical to SEQ ID NO: 464694
  Synthetic oligonucleotide

SEQ ID NO: 606184 - DNA, 60 bp, Artificial; identical to SEQ ID NO: 464696
  Synthetic oligonucleotide

SEQ ID NO: 606185 - DNA, 60 bp, Artificial; identical to SEQ ID NO: 464697
  Synthetic oligonucleotide

SEQ ID NO: 606186 - DNA, 55 bp, Artificial; identical to SEQ ID NO: 464701
  Synthetic oligonucleotide

SEQ ID NO: 606187 - DNA, 54 bp, Artificial; identical to SEQ ID NO: 464702
  Synthetic oligonucleotide

SEQ ID NO: 606188 - DNA, 51 bp, Artificial; identical to SEQ ID NO: 464705
  Synthetic oligonucleotide

SEQ ID NO: 606189 - DNA, 59 bp, Artificial; identical to SEQ ID NO: 464706
  Synthetic oligonucleotide

SEQ ID NO: 606190 - DNA, 57 bp, Artificial; identical to SEQ ID NO: 464707
  Synthetic oligonucleotide

SEQ ID NO: 606191 - DNA, 57 bp, Artificial; identical to SEQ ID NO: 464709
  Synthetic oligonucleotide

SEQ ID NO: 606192 - DNA, 50 bp, Artificial; identical to SEQ ID NO: 464710
  Synthetic oligonucleotide

SEQ ID NO: 606193 - DNA, 60 bp, Artificial; identical to SEQ ID NO: 464712
  Synthetic oligonucleotide

SEQ ID NO: 606194 - DNA, 55 bp, Artificial; identical to SEQ ID NO: 464715
  Synthetic oligonucleotide

SEQ ID NO: 606195 - DNA, 60 bp, Artificial; identical to SEQ ID NO: 464717
  Synthetic oligonucleotide

SEQ ID NO: 606196 - DNA, 57 bp, Artificial; identical to SEQ ID NO: 464719
  Synthetic oligonucleotide

SEQ ID NO: 606197 - DNA, 60 bp, Artificial; identical to SEQ ID NO: 464720
  Synthetic oligonucleotide

SEQ ID NO: 606198 - DNA, 60 bp, Artificial; identical to SEQ ID NO: 464722
  Synthetic oligonucleotide

SEQ ID NO: 606199 - DNA, 60 bp, Artificial; identical to SEQ ID NO: 464724
  Synthetic oligonucleotide

SEQ ID NO: 606200 - DNA, 60 bp, Artificial; identical to SEQ ID NO: 464725
  Synthetic oligonucleotide

SEQ ID NO: 606201 - DNA, 60 bp, Artificial; identical to SEQ ID NO: 464726
  Synthetic oligonucleotide

SEQ ID NO: 606202 - DNA, 60 bp, Artificial; identical to SEQ ID NO: 464728
  Synthetic oligonucleotide

SEQ ID NO: 606203 - DNA, 60 bp, Artificial; identical to SEQ ID NO: 464732
  Synthetic oligonucleotide

SEQ ID NO: 606204 - DNA, 51 bp, Artificial; identical to SEQ ID NO: 464733
  Synthetic oligonucleotide

SEQ ID NO: 606205 - DNA, 59 bp, Artificial; identical to SEQ ID NO: 464734
  Synthetic oligonucleotide

SEQ ID NO: 606206 - DNA, 57 bp, Artificial; identical to SEQ ID NO: 464739
  Synthetic oligonucleotide

SEQ ID NO: 606207 - DNA, 58 bp, Artificial; identical to SEQ ID NO: 464740
  Synthetic oligonucleotide

SEQ ID NO: 606208 - DNA, 60 bp, Artificial; identical to SEQ ID NO: 464741
  Synthetic oligonucleotide

SEQ ID NO: 606209 - DNA, 60 bp, Artificial; identical to SEQ ID NO: 464742
  Synthetic oligonucleotide

SEQ ID NO: 606210 - DNA, 60 bp, Artificial; identical to SEQ ID NO: 464744
  Synthetic oligonucleotide

SEQ ID NO: 606211 - DNA, 60 bp, Artificial; identical to SEQ ID NO: 464747
  Synthetic oligonucleotide

SEQ ID NO: 606212 - DNA, 56 bp, Artificial; identical to SEQ ID NO: 464753
  Synthetic oligonucleotide

SEQ ID NO: 606213 - DNA, 52 bp, Artificial; identical to SEQ ID NO: 464759
  Synthetic oligonucleotide

SEQ ID NO: 606214 - DNA, 55 bp, Artificial; identical to SEQ ID NO: 464761
  Synthetic oligonucleotide

SEQ ID NO: 606215 - DNA, 55 bp, Artificial; identical to SEQ ID NO: 464762
  Synthetic oligonucleotide

SEQ ID NO: 606216 - DNA, 60 bp, Artificial; identical to SEQ ID NO: 464768
  Synthetic oligonucleotide

SEQ ID NO: 606217 - DNA, 60 bp, Artificial; identical to SEQ ID NO: 464769
  Synthetic oligonucleotide

SEQ ID NO: 606218 - DNA, 58 bp, Artificial; identical to SEQ ID NO: 464770
  Synthetic oligonucleotide

SEQ ID NO: 606219 - DNA, 57 bp, Artificial; identical to SEQ ID NO: 464777
  Synthetic oligonucleotide

SEQ ID NO: 606220 - DNA, 55 bp, Artificial; identical to SEQ ID NO: 464779
  Synthetic oligonucleotide

SEQ ID NO: 606221 - DNA, 60 bp, Artificial; identical to SEQ ID NO: 464780
  Synthetic oligonucleotide

SEQ ID NO: 606222 - DNA, 59 bp, Artificial; identical to SEQ ID NO: 464781
  Synthetic oligonucleotide

SEQ ID NO: 606223 - DNA, 60 bp, Artificial; identical to SEQ ID NO: 464783
  Synthetic oligonucleotide

SEQ ID NO: 606224 - DNA, 60 bp, Artificial; identical to SEQ ID NO: 464785
  Synthetic oligonucleotide

SEQ ID NO: 606225 - DNA, 53 bp, Artificial; identical to SEQ ID NO: 464786
  Synthetic oligonucleotide

SEQ ID NO: 606226 - DNA, 60 bp, Artificial; identical to SEQ ID NO: 13741
  Synthetic oligonucleotide

SEQ ID NO: 606227 - DNA, 55 bp, Artificial; identical to SEQ ID NO: 464791
  Synthetic oligonucleotide

SEQ ID NO: 606228 - DNA, 55 bp, Artificial; identical to SEQ ID NO: 464792
  Synthetic oligonucleotide

SEQ ID NO: 606229 - DNA, 56 bp, Artificial; identical to SEQ ID NO: 464794
  Synthetic oligonucleotide

SEQ ID NO: 606230 - DNA, 52 bp, Artificial; identical to SEQ ID NO: 464797
  Synthetic oligonucleotide

SEQ ID NO: 606231 - DNA, 59 bp, Artificial; identical to SEQ ID NO: 464798
  Synthetic oligonucleotide

SEQ ID NO: 606232 - DNA, 60 bp, Artificial; identical to SEQ ID NO: 464799
  Synthetic oligonucleotide

SEQ ID NO: 606233 - DNA, 60 bp, Artificial; identical to SEQ ID NO: 464802
  Synthetic oligonucleotide

SEQ ID NO: 606234 - DNA, 55 bp, Artificial; identical to SEQ ID NO: 464810
  Synthetic oligonucleotide

SEQ ID NO: 606235 - DNA, 50 bp, Artificial; identical to SEQ ID NO: 464811
  Synthetic oligonucleotide

SEQ ID NO: 606236 - DNA, 56 bp, Artificial; identical to SEQ ID NO: 464813
  Synthetic oligonucleotide

SEQ ID NO: 606237 - DNA, 54 bp, Artificial; identical to SEQ ID NO: 464814
  Synthetic oligonucleotide

SEQ ID NO: 606238 - DNA, 53 bp, Artificial; identical to SEQ ID NO: 464816
  Synthetic oligonucleotide

SEQ ID NO: 606239 - DNA, 55 bp, Artificial; identical to SEQ ID NO: 464819
  Synthetic oligonucleotide

SEQ ID NO: 606240 - DNA, 56 bp, Artificial; identical to SEQ ID NO: 464825
  Synthetic oligonucleotide

SEQ ID NO: 606241 - DNA, 54 bp, Artificial; identical to SEQ ID NO: 7319
  Synthetic oligonucleotide

SEQ ID NO: 606242 - DNA, 60 bp, Artificial; identical to SEQ ID NO: 464826
  Synthetic oligonucleotide

SEQ ID NO: 606243 - DNA, 55 bp, Artificial; identical to SEQ ID NO: 464827
  Synthetic oligonucleotide

SEQ ID NO: 606244 - DNA, 60 bp, Artificial; identical to SEQ ID NO: 464828
  Synthetic oligonucleotide

SEQ ID NO: 606245 - DNA, 55 bp, Artificial; identical to SEQ ID NO: 464830
  Synthetic oligonucleotide

SEQ ID NO: 606246 - DNA, 55 bp, Artificial; identical to SEQ ID NO: 464836
  Synthetic oligonucleotide

SEQ ID NO: 606247 - DNA, 52 bp, Artificial; identical to SEQ ID NO: 464840
  Synthetic oligonucleotide

SEQ ID NO: 606248 - DNA, 60 bp, Artificial; identical to SEQ ID NO: 464841
  Synthetic oligonucleotide

SEQ ID NO: 606249 - DNA, 60 bp, Artificial; identical to SEQ ID NO: 464842
  Synthetic oligonucleotide

SEQ ID NO: 606250 - DNA, 60 bp, Artificial; identical to SEQ ID NO: 464843
  Synthetic oligonucleotide

SEQ ID NO: 606251 - DNA, 55 bp, Artificial; identical to SEQ ID NO: 464844
  Synthetic oligonucleotide

SEQ ID NO: 606252 - DNA, 55 bp, Artificial; identical to SEQ ID NO: 464846
  Synthetic oligonucleotide

SEQ ID NO: 606253 - DNA, 55 bp, Artificial; identical to SEQ ID NO: 464850
  Synthetic oligonucleotide

SEQ ID NO: 606254 - DNA, 50 bp, Artificial; identical to SEQ ID NO: 464852
  Synthetic oligonucleotide

SEQ ID NO: 606255 - DNA, 58 bp, Artificial; identical to SEQ ID NO: 464853
  Synthetic oligonucleotide

SEQ ID NO: 606256 - DNA, 60 bp, Artificial; identical to SEQ ID NO: 464855
  Synthetic oligonucleotide

SEQ ID NO: 606257 - DNA, 51 bp, Artificial; identical to SEQ ID NO: 464856
  Synthetic oligonucleotide

SEQ ID NO: 606258 - DNA, 60 bp, Artificial; identical to SEQ ID NO: 464857
  Synthetic oligonucleotide

SEQ ID NO: 606259 - DNA, 59 bp, Artificial; identical to SEQ ID NO: 464858
  Synthetic oligonucleotide

SEQ ID NO: 606260 - DNA, 60 bp, Artificial; identical to SEQ ID NO: 464859
  Synthetic oligonucleotide

SEQ ID NO: 606261 - DNA, 55 bp, Artificial; identical to SEQ ID NO: 464860
  Synthetic oligonucleotide

SEQ ID NO: 606262 - DNA, 60 bp, Artificial; identical to SEQ ID NO: 464864
  Synthetic oligonucleotide

SEQ ID NO: 606263 - DNA, 60 bp, Artificial; identical to SEQ ID NO: 464865
  Synthetic oligonucleotide

SEQ ID NO: 606264 - DNA, 60 bp, Artificial; identical to SEQ ID NO: 464866
  Synthetic oligonucleotide

SEQ ID NO: 606265 - DNA, 55 bp, Artificial; identical to SEQ ID NO: 464869
  Synthetic oligonucleotide

SEQ ID NO: 606266 - DNA, 60 bp, Artificial; identical to SEQ ID NO: 464870
  Synthetic oligonucleotide

SEQ ID NO: 606267 - DNA, 60 bp, Artificial; identical to SEQ ID NO: 464872
  Synthetic oligonucleotide

SEQ ID NO: 606268 - DNA, 59 bp, Artificial; identical to SEQ ID NO: 464873
  Synthetic oligonucleotide

SEQ ID NO: 606269 - DNA, 60 bp, Artificial; identical to SEQ ID NO: 7880
  Synthetic oligonucleotide

SEQ ID NO: 606270 - DNA, 60 bp, Artificial; identical to SEQ ID NO: 464879
  Synthetic oligonucleotide

SEQ ID NO: 606271 - DNA, 57 bp, Artificial; identical to SEQ ID NO: 464881
  Synthetic oligonucleotide

SEQ ID NO: 606272 - DNA, 59 bp, Artificial; identical to SEQ ID NO: 464882
  Synthetic oligonucleotide

SEQ ID NO: 606273 - DNA, 60 bp, Artificial; identical to SEQ ID NO: 464883
  Synthetic oligonucleotide

SEQ ID NO: 606274 - DNA, 60 bp, Artificial; identical to SEQ ID NO: 464885
  Synthetic oligonucleotide

SEQ ID NO: 606275 - DNA, 53 bp, Artificial; identical to SEQ ID NO: 464888
  Synthetic oligonucleotide

SEQ ID NO: 606276 - DNA, 60 bp, Artificial; identical to SEQ ID NO: 464892
  Synthetic oligonucleotide

SEQ ID NO: 606277 - DNA, 60 bp, Artificial; identical to SEQ ID NO: 464893
  Synthetic oligonucleotide

SEQ ID NO: 606278 - DNA, 60 bp, Artificial; identical to SEQ ID NO: 464894
  Synthetic oligonucleotide

SEQ ID NO: 606279 - DNA, 55 bp, Artificial; identical to SEQ ID NO: 464896
  Synthetic oligonucleotide

SEQ ID NO: 606280 - DNA, 53 bp, Artificial; identical to SEQ ID NO: 464902
  Synthetic oligonucleotide

SEQ ID NO: 606281 - DNA, 50 bp, Artificial; identical to SEQ ID NO: 464911
  Synthetic oligonucleotide

SEQ ID NO: 606282 - DNA, 53 bp, Artificial; identical to SEQ ID NO: 464912
  Synthetic oligonucleotide

SEQ ID NO: 606283 - DNA, 57 bp, Artificial; identical to SEQ ID NO: 464915
  Synthetic oligonucleotide

SEQ ID NO: 606284 - DNA, 59 bp, Artificial; identical to SEQ ID NO: 464919
  Synthetic oligonucleotide

SEQ ID NO: 606285 - DNA, 60 bp, Artificial; identical to SEQ ID NO: 464923
  Synthetic oligonucleotide

SEQ ID NO: 606286 - DNA, 60 bp, Artificial; identical to SEQ ID NO: 464924
  Synthetic oligonucleotide

SEQ ID NO: 606287 - DNA, 60 bp, Artificial; identical to SEQ ID NO: 464927
  Synthetic oligonucleotide

SEQ ID NO: 606288 - DNA, 50 bp, Artificial; identical to SEQ ID NO: 464929
  Synthetic oligonucleotide

SEQ ID NO: 606289 - DNA, 55 bp, Artificial; identical to SEQ ID NO: 464934
  Synthetic oligonucleotide

SEQ ID NO: 606290 - DNA, 60 bp, Artificial; identical to SEQ ID NO: 464935
  Synthetic oligonucleotide

SEQ ID NO: 606291 - DNA, 59 bp, Artificial; identical to SEQ ID NO: 464942
  Synthetic oligonucleotide

SEQ ID NO: 606292 - DNA, 60 bp, Artificial; identical to SEQ ID NO: 464943
  Synthetic oligonucleotide

SEQ ID NO: 606293 - DNA, 53 bp, Artificial; identical to SEQ ID NO: 464947
  Synthetic oligonucleotide

SEQ ID NO: 606294 - DNA, 59 bp, Artificial; identical to SEQ ID NO: 464952
  Synthetic oligonucleotide

SEQ ID NO: 606295 - DNA, 60 bp, Artificial; identical to SEQ ID NO: 464958
  Synthetic oligonucleotide

SEQ ID NO: 606296 - DNA, 60 bp, Artificial; identical to SEQ ID NO: 464959
  Synthetic oligonucleotide

SEQ ID NO: 606297 - DNA, 59 bp, Artificial; identical to SEQ ID NO: 464964
  Synthetic oligonucleotide

SEQ ID NO: 606298 - DNA, 59 bp, Artificial; identical to SEQ ID NO: 464966
  Synthetic oligonucleotide

SEQ ID NO: 606299 - DNA, 56 bp, Artificial; identical to SEQ ID NO: 464970
  Synthetic oligonucleotide

SEQ ID NO: 606300 - DNA, 56 bp, Artificial; identical to SEQ ID NO: 464971
  Synthetic oligonucleotide

SEQ ID NO: 606301 - DNA, 59 bp, Artificial; identical to SEQ ID NO: 464974
  Synthetic oligonucleotide

SEQ ID NO: 606302 - DNA, 60 bp, Artificial; identical to SEQ ID NO: 464979
  Synthetic oligonucleotide

SEQ ID NO: 606303 - DNA, 60 bp, Artificial; identical to SEQ ID NO: 464980
  Synthetic oligonucleotide

SEQ ID NO: 606304 - DNA, 60 bp, Artificial; identical to SEQ ID NO: 464981
  Synthetic oligonucleotide

SEQ ID NO: 606305 - DNA, 59 bp, Artificial; identical to SEQ ID NO: 19041
  Synthetic oligonucleotide

SEQ ID NO: 606306 - DNA, 57 bp, Artificial; identical to SEQ ID NO: 464985
  Synthetic oligonucleotide

SEQ ID NO: 606307 - DNA, 57 bp, Artificial; identical to SEQ ID NO: 464986
  Synthetic oligonucleotide

SEQ ID NO: 606308 - DNA, 51 bp, Artificial; identical to SEQ ID NO: 464987
  Synthetic oligonucleotide

SEQ ID NO: 606309 - DNA, 53 bp, Artificial; identical to SEQ ID NO: 464990
  Synthetic oligonucleotide

SEQ ID NO: 606310 - DNA, 55 bp, Artificial; identical to SEQ ID NO: 464996
  Synthetic oligonucleotide

SEQ ID NO: 606311 - DNA, 60 bp, Artificial; identical to SEQ ID NO: 464998
  Synthetic oligonucleotide

SEQ ID NO: 606312 - DNA, 60 bp, Artificial; identical to SEQ ID NO: 465003
  Synthetic oligonucleotide

SEQ ID NO: 606313 - DNA, 60 bp, Artificial; identical to SEQ ID NO: 465007
  Synthetic oligonucleotide

SEQ ID NO: 606314 - DNA, 55 bp, Artificial; identical to SEQ ID NO: 465014
  Synthetic oligonucleotide

SEQ ID NO: 606315 - DNA, 57 bp, Artificial; identical to SEQ ID NO: 465015
  Synthetic oligonucleotide

SEQ ID NO: 606316 - DNA, 58 bp, Artificial; identical to SEQ ID NO: 465018
  Synthetic oligonucleotide

SEQ ID NO: 606317 - DNA, 60 bp, Artificial; identical to SEQ ID NO: 465019
  Synthetic oligonucleotide

SEQ ID NO: 606318 - DNA, 60 bp, Artificial; identical to SEQ ID NO: 465026
  Synthetic oligonucleotide

SEQ ID NO: 606319 - DNA, 55 bp, Artificial; identical to SEQ ID NO: 465027
  Synthetic oligonucleotide

SEQ ID NO: 606320 - DNA, 55 bp, Artificial; identical to SEQ ID NO: 465029
  Synthetic oligonucleotide

SEQ ID NO: 606321 - DNA, 55 bp, Artificial; identical to SEQ ID NO: 465033
  Synthetic oligonucleotide

SEQ ID NO: 606322 - DNA, 55 bp, Artificial; identical to SEQ ID NO: 465034
  Synthetic oligonucleotide

SEQ ID NO: 606323 - DNA, 58 bp, Artificial; identical to SEQ ID NO: 465035
  Synthetic oligonucleotide

SEQ ID NO: 606324 - DNA, 54 bp, Artificial; identical to SEQ ID NO: 465037
  Synthetic oligonucleotide

SEQ ID NO: 606325 - DNA, 60 bp, Artificial; identical to SEQ ID NO: 465041
  Synthetic oligonucleotide

SEQ ID NO: 606326 - DNA, 60 bp, Artificial; identical to SEQ ID NO: 465042
  Synthetic oligonucleotide

SEQ ID NO: 606327 - DNA, 60 bp, Artificial; identical to SEQ ID NO: 465043
  Synthetic oligonucleotide

SEQ ID NO: 606328 - DNA, 50 bp, Artificial; identical to SEQ ID NO: 465044
  Synthetic oligonucleotide

SEQ ID NO: 606329 - DNA, 60 bp, Artificial; identical to SEQ ID NO: 465046
  Synthetic oligonucleotide

SEQ ID NO: 606330 - DNA, 60 bp, Artificial; identical to SEQ ID NO: 465050
  Synthetic oligonucleotide

SEQ ID NO: 606331 - DNA, 55 bp, Artificial; identical to SEQ ID NO: 465054
  Synthetic oligonucleotide

SEQ ID NO: 606332 - DNA, 60 bp, Artificial; identical to SEQ ID NO: 465059
  Synthetic oligonucleotide

SEQ ID NO: 606333 - DNA, 54 bp, Artificial; identical to SEQ ID NO: 465060
  Synthetic oligonucleotide

SEQ ID NO: 606334 - DNA, 54 bp, Artificial; identical to SEQ ID NO: 465064
  Synthetic oligonucleotide

SEQ ID NO: 606335 - DNA, 60 bp, Artificial; identical to SEQ ID NO: 9934
  Synthetic oligonucleotide

SEQ ID NO: 606336 - DNA, 60 bp, Artificial; identical to SEQ ID NO: 465069
  Synthetic oligonucleotide

SEQ ID NO: 606337 - DNA, 57 bp, Artificial; identical to SEQ ID NO: 465070
  Synthetic oligonucleotide

SEQ ID NO: 606338 - DNA, 54 bp, Artificial; identical to SEQ ID NO: 465071
  Synthetic oligonucleotide

SEQ ID NO: 606339 - DNA, 55 bp, Artificial; identical to SEQ ID NO: 465072
  Synthetic oligonucleotide

SEQ ID NO: 606340 - DNA, 60 bp, Artificial; identical to SEQ ID NO: 465079
  Synthetic oligonucleotide

SEQ ID NO: 606341 - DNA, 52 bp, Artificial; identical to SEQ ID NO: 465081
  Synthetic oligonucleotide

SEQ ID NO: 606342 - DNA, 54 bp, Artificial; identical to SEQ ID NO: 465083
  Synthetic oligonucleotide

SEQ ID NO: 606343 - DNA, 60 bp, Artificial; identical to SEQ ID NO: 465086
  Synthetic oligonucleotide

SEQ ID NO: 606344 - DNA, 60 bp, Artificial; identical to SEQ ID NO: 465087
  Synthetic oligonucleotide

SEQ ID NO: 606345 - DNA, 59 bp, Artificial; identical to SEQ ID NO: 465088
  Synthetic oligonucleotide

SEQ ID NO: 606346 - DNA, 60 bp, Artificial; identical to SEQ ID NO: 465091
  Synthetic oligonucleotide

SEQ ID NO: 606347 - DNA, 53 bp, Artificial; identical to SEQ ID NO: 465093
  Synthetic oligonucleotide

SEQ ID NO: 606348 - DNA, 60 bp, Artificial; identical to SEQ ID NO: 465094
  Synthetic oligonucleotide

SEQ ID NO: 606349 - DNA, 55 bp, Artificial; identical to SEQ ID NO: 465095
  Synthetic oligonucleotide

SEQ ID NO: 606350 - DNA, 55 bp, Artificial; identical to SEQ ID NO: 465096
  Synthetic oligonucleotide

SEQ ID NO: 606351 - DNA, 60 bp, Artificial; identical to SEQ ID NO: 465098
  Synthetic oligonucleotide

SEQ ID NO: 606352 - DNA, 60 bp, Artificial; identical to SEQ ID NO: 465099
  Synthetic oligonucleotide

SEQ ID NO: 606353 - DNA, 60 bp, Artificial; identical to SEQ ID NO: 465100
  Synthetic oligonucleotide

SEQ ID NO: 606354 - DNA, 60 bp, Artificial; identical to SEQ ID NO: 465101
  Synthetic oligonucleotide

SEQ ID NO: 606355 - DNA, 60 bp, Artificial; identical to SEQ ID NO: 465102
  Synthetic oligonucleotide

SEQ ID NO: 606356 - DNA, 60 bp, Artificial; identical to SEQ ID NO: 465103
  Synthetic oligonucleotide

SEQ ID NO: 606357 - DNA, 60 bp, Artificial; identical to SEQ ID NO: 465105
  Synthetic oligonucleotide

SEQ ID NO: 606358 - DNA, 57 bp, Artificial; identical to SEQ ID NO: 465107
  Synthetic oligonucleotide

SEQ ID NO: 606359 - DNA, 59 bp, Artificial; identical to SEQ ID NO: 465111
  Synthetic oligonucleotide

SEQ ID NO: 606360 - DNA, 60 bp, Artificial; identical to SEQ ID NO: 465113
  Synthetic oligonucleotide

SEQ ID NO: 606361 - DNA, 57 bp, Artificial; identical to SEQ ID NO: 465116
  Synthetic oligonucleotide

SEQ ID NO: 606362 - DNA, 58 bp, Artificial; identical to SEQ ID NO: 465121
  Synthetic oligonucleotide

SEQ ID NO: 606363 - DNA, 56 bp, Artificial; identical to SEQ ID NO: 465122
  Synthetic oligonucleotide

SEQ ID NO: 606364 - DNA, 55 bp, Artificial; identical to SEQ ID NO: 465123
  Synthetic oligonucleotide

SEQ ID NO: 606365 - DNA, 52 bp, Artificial; identical to SEQ ID NO: 465128
  Synthetic oligonucleotide

SEQ ID NO: 606366 - DNA, 60 bp, Artificial; identical to SEQ ID NO: 465129
  Synthetic oligonucleotide

SEQ ID NO: 606367 - DNA, 49 bp, Artificial; identical to SEQ ID NO: 465130
  Synthetic oligonucleotide

SEQ ID NO: 606368 - DNA, 58 bp, Artificial; identical to SEQ ID NO: 465132
  Synthetic oligonucleotide

SEQ ID NO: 606369 - DNA, 58 bp, Artificial; identical to SEQ ID NO: 465138
  Synthetic oligonucleotide

SEQ ID NO: 606370 - DNA, 55 bp, Artificial; identical to SEQ ID NO: 465139
  Synthetic oligonucleotide

SEQ ID NO: 606371 - DNA, 56 bp, Artificial; identical to SEQ ID NO: 465145
  Synthetic oligonucleotide

SEQ ID NO: 606372 - DNA, 53 bp, Artificial; identical to SEQ ID NO: 465146
  Synthetic oligonucleotide

SEQ ID NO: 606373 - DNA, 60 bp, Artificial; identical to SEQ ID NO: 465149
  Synthetic oligonucleotide

SEQ ID NO: 606374 - DNA, 57 bp, Artificial; identical to SEQ ID NO: 465154
  Synthetic oligonucleotide

SEQ ID NO: 606375 - DNA, 60 bp, Artificial; identical to SEQ ID NO: 465155
  Synthetic oligonucleotide

SEQ ID NO: 606376 - DNA, 60 bp, Artificial; identical to SEQ ID NO: 10651
  Synthetic oligonucleotide

SEQ ID NO: 606377 - DNA, 60 bp, Artificial; identical to SEQ ID NO: 465157
  Synthetic oligonucleotide

SEQ ID NO: 606378 - DNA, 59 bp, Artificial; identical to SEQ ID NO: 465158
  Synthetic oligonucleotide

SEQ ID NO: 606379 - DNA, 53 bp, Artificial; identical to SEQ ID NO: 465163
  Synthetic oligonucleotide

SEQ ID NO: 606380 - DNA, 55 bp, Artificial; identical to SEQ ID NO: 465167
  Synthetic oligonucleotide

SEQ ID NO: 606381 - DNA, 60 bp, Artificial; identical to SEQ ID NO: 465168
  Synthetic oligonucleotide

SEQ ID NO: 606382 - DNA, 58 bp, Artificial; identical to SEQ ID NO: 465169
  Synthetic oligonucleotide

SEQ ID NO: 606383 - DNA, 57 bp, Artificial; identical to SEQ ID NO: 465172
  Synthetic oligonucleotide

SEQ ID NO: 606384 - DNA, 60 bp, Artificial; identical to SEQ ID NO: 465175
  Synthetic oligonucleotide

SEQ ID NO: 606385 - DNA, 53 bp, Artificial; identical to SEQ ID NO: 465178
  Synthetic oligonucleotide

SEQ ID NO: 606386 - DNA, 59 bp, Artificial; identical to SEQ ID NO: 465179
  Synthetic oligonucleotide

SEQ ID NO: 606387 - DNA, 58 bp, Artificial; identical to SEQ ID NO: 465180
  Synthetic oligonucleotide

SEQ ID NO: 606388 - DNA, 60 bp, Artificial; identical to SEQ ID NO: 465184
  Synthetic oligonucleotide

SEQ ID NO: 606389 - DNA, 60 bp, Artificial; identical to SEQ ID NO: 465185
  Synthetic oligonucleotide

SEQ ID NO: 606390 - DNA, 60 bp, Artificial; identical to SEQ ID NO: 465188
  Synthetic oligonucleotide

SEQ ID NO: 606391 - DNA, 60 bp, Artificial; identical to SEQ ID NO: 465189
  Synthetic oligonucleotide

SEQ ID NO: 606392 - DNA, 60 bp, Artificial; identical to SEQ ID NO: 465190
  Synthetic oligonucleotide

SEQ ID NO: 606393 - DNA, 60 bp, Artificial; identical to SEQ ID NO: 465194
  Synthetic oligonucleotide

SEQ ID NO: 606394 - DNA, 56 bp, Artificial; identical to SEQ ID NO: 465196
  Synthetic oligonucleotide

SEQ ID NO: 606395 - DNA, 59 bp, Artificial; identical to SEQ ID NO: 465197
  Synthetic oligonucleotide

SEQ ID NO: 606396 - DNA, 60 bp, Artificial; identical to SEQ ID NO: 465198
  Synthetic oligonucleotide

SEQ ID NO: 606397 - DNA, 55 bp, Artificial; identical to SEQ ID NO: 465199
  Synthetic oligonucleotide

SEQ ID NO: 606398 - DNA, 58 bp, Artificial; identical to SEQ ID NO: 465204
  Synthetic oligonucleotide

SEQ ID NO: 606399 - DNA, 59 bp, Artificial; identical to SEQ ID NO: 465207
  Synthetic oligonucleotide

SEQ ID NO: 606400 - DNA, 55 bp, Artificial; identical to SEQ ID NO: 465209
  Synthetic oligonucleotide

SEQ ID NO: 606401 - DNA, 54 bp, Artificial; identical to SEQ ID NO: 465210
  Synthetic oligonucleotide

SEQ ID NO: 606402 - DNA, 60 bp, Artificial; identical to SEQ ID NO: 6651
  Synthetic oligonucleotide

SEQ ID NO: 606403 - DNA, 60 bp, Artificial; identical to SEQ ID NO: 465218
  Synthetic oligonucleotide

SEQ ID NO: 606404 - DNA, 55 bp, Artificial; identical to SEQ ID NO: 465219
  Synthetic oligonucleotide

SEQ ID NO: 606405 - DNA, 59 bp, Artificial; identical to SEQ ID NO: 465221
  Synthetic oligonucleotide

SEQ ID NO: 606406 - DNA, 60 bp, Artificial; identical to SEQ ID NO: 465226
  Synthetic oligonucleotide

SEQ ID NO: 606407 - DNA, 60 bp, Artificial; identical to SEQ ID NO: 465228
  Synthetic oligonucleotide

SEQ ID NO: 606408 - DNA, 60 bp, Artificial; identical to SEQ ID NO: 465231
  Synthetic oligonucleotide

SEQ ID NO: 606409 - DNA, 50 bp, Artificial; identical to SEQ ID NO: 465232
  Synthetic oligonucleotide

SEQ ID NO: 606410 - DNA, 58 bp, Artificial; identical to SEQ ID NO: 465234
  Synthetic oligonucleotide

SEQ ID NO: 606411 - DNA, 55 bp, Artificial; identical to SEQ ID NO: 465238
  Synthetic oligonucleotide

SEQ ID NO: 606412 - DNA, 53 bp, Artificial; identical to SEQ ID NO: 465239
  Synthetic oligonucleotide

SEQ ID NO: 606413 - DNA, 58 bp, Artificial; identical to SEQ ID NO: 465242
  Synthetic oligonucleotide

SEQ ID NO: 606414 - DNA, 57 bp, Artificial; identical to SEQ ID NO: 465248
  Synthetic oligonucleotide

SEQ ID NO: 606415 - DNA, 54 bp, Artificial; identical to SEQ ID NO: 465249
  Synthetic oligonucleotide

SEQ ID NO: 606416 - DNA, 57 bp, Artificial; identical to SEQ ID NO: 465250
  Synthetic oligonucleotide

SEQ ID NO: 606417 - DNA, 54 bp, Artificial; identical to SEQ ID NO: 465253
  Synthetic oligonucleotide

SEQ ID NO: 606418 - DNA, 60 bp, Artificial; identical to SEQ ID NO: 465254
  Synthetic oligonucleotide

SEQ ID NO: 606419 - DNA, 60 bp, Artificial; identical to SEQ ID NO: 465259
  Synthetic oligonucleotide

SEQ ID NO: 606420 - DNA, 58 bp, Artificial; identical to SEQ ID NO: 465260
  Synthetic oligonucleotide

SEQ ID NO: 606421 - DNA, 58 bp, Artificial; identical to SEQ ID NO: 465262
  Synthetic oligonucleotide

SEQ ID NO: 606422 - DNA, 60 bp, Artificial; identical to SEQ ID NO: 465263
  Synthetic oligonucleotide

SEQ ID NO: 606423 - DNA, 56 bp, Artificial; identical to SEQ ID NO: 465266
  Synthetic oligonucleotide

SEQ ID NO: 606424 - DNA, 60 bp, Artificial; identical to SEQ ID NO: 465267
  Synthetic oligonucleotide

SEQ ID NO: 606425 - DNA, 60 bp, Artificial; identical to SEQ ID NO: 465272
  Synthetic oligonucleotide

SEQ ID NO: 606426 - DNA, 60 bp, Artificial; identical to SEQ ID NO: 465275
  Synthetic oligonucleotide

SEQ ID NO: 606427 - DNA, 51 bp, Artificial; identical to SEQ ID NO: 465279
  Synthetic oligonucleotide

SEQ ID NO: 606428 - DNA, 60 bp, Artificial; identical to SEQ ID NO: 465280
  Synthetic oligonucleotide

SEQ ID NO: 606429 - DNA, 59 bp, Artificial; identical to SEQ ID NO: 465281
  Synthetic oligonucleotide

SEQ ID NO: 606430 - DNA, 60 bp, Artificial; identical to SEQ ID NO: 465283
  Synthetic oligonucleotide

SEQ ID NO: 606431 - DNA, 51 bp, Artificial; identical to SEQ ID NO: 465284
  Synthetic oligonucleotide

SEQ ID NO: 606432 - DNA, 56 bp, Artificial; identical to SEQ ID NO: 465285
  Synthetic oligonucleotide

SEQ ID NO: 606433 - DNA, 57 bp, Artificial; identical to SEQ ID NO: 465286
  Synthetic oligonucleotide

SEQ ID NO: 606434 - DNA, 58 bp, Artificial; identical to SEQ ID NO: 465291
  Synthetic oligonucleotide

SEQ ID NO: 606435 - DNA, 53 bp, Artificial; identical to SEQ ID NO: 465292
  Synthetic oligonucleotide

SEQ ID NO: 606436 - DNA, 54 bp, Artificial; identical to SEQ ID NO: 465293
  Synthetic oligonucleotide

SEQ ID NO: 606437 - DNA, 57 bp, Artificial; identical to SEQ ID NO: 465294
  Synthetic oligonucleotide

SEQ ID NO: 606438 - DNA, 60 bp, Artificial; identical to SEQ ID NO: 465296
  Synthetic oligonucleotide

SEQ ID NO: 606439 - DNA, 60 bp, Artificial; identical to SEQ ID NO: 465299
  Synthetic oligonucleotide

SEQ ID NO: 606440 - DNA, 60 bp, Artificial; identical to SEQ ID NO: 465300
  Synthetic oligonucleotide

SEQ ID NO: 606441 - DNA, 60 bp, Artificial; identical to SEQ ID NO: 465303
  Synthetic oligonucleotide

SEQ ID NO: 606442 - DNA, 60 bp, Artificial; identical to SEQ ID NO: 465304
  Synthetic oligonucleotide

SEQ ID NO: 606443 - DNA, 59 bp, Artificial; identical to SEQ ID NO: 19697
  Synthetic oligonucleotide

SEQ ID NO: 606444 - DNA, 51 bp, Artificial; identical to SEQ ID NO: 465305
  Synthetic oligonucleotide

SEQ ID NO: 606445 - DNA, 60 bp, Artificial; identical to SEQ ID NO: 465308
  Synthetic oligonucleotide

SEQ ID NO: 606446 - DNA, 60 bp, Artificial; identical to SEQ ID NO: 465309
  Synthetic oligonucleotide

SEQ ID NO: 606447 - DNA, 60 bp, Artificial; identical to SEQ ID NO: 465312
  Synthetic oligonucleotide

SEQ ID NO: 606448 - DNA, 57 bp, Artificial; identical to SEQ ID NO: 465313
  Synthetic oligonucleotide

SEQ ID NO: 606449 - DNA, 56 bp, Artificial; identical to SEQ ID NO: 465314
  Synthetic oligonucleotide

SEQ ID NO: 606450 - DNA, 53 bp, Artificial; identical to SEQ ID NO: 465319
  Synthetic oligonucleotide

SEQ ID NO: 606451 - DNA, 56 bp, Artificial; identical to SEQ ID NO: 465320
  Synthetic oligonucleotide

SEQ ID NO: 606452 - DNA, 60 bp, Artificial; identical to SEQ ID NO: 465323
  Synthetic oligonucleotide

SEQ ID NO: 606453 - DNA, 60 bp, Artificial; identical to SEQ ID NO: 465326
  Synthetic oligonucleotide

SEQ ID NO: 606454 - DNA, 55 bp, Artificial; identical to SEQ ID NO: 465327
  Synthetic oligonucleotide

SEQ ID NO: 606455 - DNA, 60 bp, Artificial; identical to SEQ ID NO: 465330
  Synthetic oligonucleotide

SEQ ID NO: 606456 - DNA, 55 bp, Artificial; identical to SEQ ID NO: 465331
  Synthetic oligonucleotide

SEQ ID NO: 606457 - DNA, 50 bp, Artificial; identical to SEQ ID NO: 465333
  Synthetic oligonucleotide

SEQ ID NO: 606458 - DNA, 60 bp, Artificial; identical to SEQ ID NO: 11650
  Synthetic oligonucleotide

SEQ ID NO: 606459 - DNA, 58 bp, Artificial; identical to SEQ ID NO: 465335
  Synthetic oligonucleotide

SEQ ID NO: 606460 - DNA, 60 bp, Artificial; identical to SEQ ID NO: 465338
  Synthetic oligonucleotide

SEQ ID NO: 606461 - DNA, 59 bp, Artificial; identical to SEQ ID NO: 465339
  Synthetic oligonucleotide

SEQ ID NO: 606462 - DNA, 60 bp, Artificial; identical to SEQ ID NO: 465341
  Synthetic oligonucleotide

SEQ ID NO: 606463 - DNA, 60 bp, Artificial; identical to SEQ ID NO: 465344
  Synthetic oligonucleotide

SEQ ID NO: 606464 - DNA, 60 bp, Artificial; identical to SEQ ID NO: 465348
  Synthetic oligonucleotide

SEQ ID NO: 606465 - DNA, 51 bp, Artificial; identical to SEQ ID NO: 465349
  Synthetic oligonucleotide

SEQ ID NO: 606466 - DNA, 57 bp, Artificial; identical to SEQ ID NO: 465351
  Synthetic oligonucleotide

SEQ ID NO: 606467 - DNA, 59 bp, Artificial; identical to SEQ ID NO: 465355
  Synthetic oligonucleotide

SEQ ID NO: 606468 - DNA, 59 bp, Artificial; identical to SEQ ID NO: 465356
  Synthetic oligonucleotide

SEQ ID NO: 606469 - DNA, 60 bp, Artificial; identical to SEQ ID NO: 465357
  Synthetic oligonucleotide

SEQ ID NO: 606470 - DNA, 60 bp, Artificial; identical to SEQ ID NO: 465358
  Synthetic oligonucleotide

SEQ ID NO: 606471 - DNA, 55 bp, Artificial; identical to SEQ ID NO: 465367
  Synthetic oligonucleotide

SEQ ID NO: 606472 - DNA, 60 bp, Artificial; identical to SEQ ID NO: 465375
  Synthetic oligonucleotide

SEQ ID NO: 606473 - DNA, 60 bp, Artificial; identical to SEQ ID NO: 465377
  Synthetic oligonucleotide

SEQ ID NO: 606474 - DNA, 52 bp, Artificial; identical to SEQ ID NO: 465379
  Synthetic oligonucleotide

SEQ ID NO: 606475 - DNA, 59 bp, Artificial; identical to SEQ ID NO: 465381
  Synthetic oligonucleotide

SEQ ID NO: 606476 - DNA, 54 bp, Artificial; identical to SEQ ID NO: 465382
  Synthetic oligonucleotide

SEQ ID NO: 606477 - DNA, 51 bp, Artificial; identical to SEQ ID NO: 465383
  Synthetic oligonucleotide

SEQ ID NO: 606478 - DNA, 59 bp, Artificial; identical to SEQ ID NO: 465385
  Synthetic oligonucleotide

SEQ ID NO: 606479 - DNA, 57 bp, Artificial; identical to SEQ ID NO: 465387
  Synthetic oligonucleotide

SEQ ID NO: 606480 - DNA, 55 bp, Artificial; identical to SEQ ID NO: 465390
  Synthetic oligonucleotide

SEQ ID NO: 606481 - DNA, 52 bp, Artificial; identical to SEQ ID NO: 465391
  Synthetic oligonucleotide

SEQ ID NO: 606482 - DNA, 60 bp, Artificial; identical to SEQ ID NO: 465393
  Synthetic oligonucleotide

SEQ ID NO: 606483 - DNA, 60 bp, Artificial; identical to SEQ ID NO: 11126
  Synthetic oligonucleotide

SEQ ID NO: 606484 - DNA, 60 bp, Artificial; identical to SEQ ID NO: 465397
  Synthetic oligonucleotide

SEQ ID NO: 606485 - DNA, 54 bp, Artificial; identical to SEQ ID NO: 465399
  Synthetic oligonucleotide

SEQ ID NO: 606486 - DNA, 55 bp, Artificial; identical to SEQ ID NO: 465402
  Synthetic oligonucleotide

SEQ ID NO: 606487 - DNA, 60 bp, Artificial; identical to SEQ ID NO: 465413
  Synthetic oligonucleotide

SEQ ID NO: 606488 - DNA, 60 bp, Artificial; identical to SEQ ID NO: 465414
  Synthetic oligonucleotide

SEQ ID NO: 606489 - DNA, 50 bp, Artificial; identical to SEQ ID NO: 465415
  Synthetic oligonucleotide

SEQ ID NO: 606490 - DNA, 60 bp, Artificial; identical to SEQ ID NO: 465417
  Synthetic oligonucleotide

SEQ ID NO: 606491 - DNA, 55 bp, Artificial; identical to SEQ ID NO: 465419
  Synthetic oligonucleotide

SEQ ID NO: 606492 - DNA, 58 bp, Artificial; identical to SEQ ID NO: 465427
  Synthetic oligonucleotide

SEQ ID NO: 606493 - DNA, 60 bp, Artificial; identical to SEQ ID NO: 465428
  Synthetic oligonucleotide

SEQ ID NO: 606494 - DNA, 57 bp, Artificial; identical to SEQ ID NO: 465433
  Synthetic oligonucleotide

SEQ ID NO: 606495 - DNA, 52 bp, Artificial; identical to SEQ ID NO: 465434
  Synthetic oligonucleotide

SEQ ID NO: 606496 - DNA, 57 bp, Artificial; identical to SEQ ID NO: 465438
  Synthetic oligonucleotide

SEQ ID NO: 606497 - DNA, 60 bp, Artificial; identical to SEQ ID NO: 465440
  Synthetic oligonucleotide

SEQ ID NO: 606498 - DNA, 56 bp, Artificial; identical to SEQ ID NO: 465443
  Synthetic oligonucleotide

SEQ ID NO: 606499 - DNA, 60 bp, Artificial; identical to SEQ ID NO: 465446
  Synthetic oligonucleotide

SEQ ID NO: 606500 - DNA, 54 bp, Artificial; identical to SEQ ID NO: 465450
  Synthetic oligonucleotide

SEQ ID NO: 606501 - DNA, 54 bp, Artificial; identical to SEQ ID NO: 18283
  Synthetic oligonucleotide

SEQ ID NO: 606502 - DNA, 60 bp, Artificial; identical to SEQ ID NO: 11989
  Synthetic oligonucleotide

SEQ ID NO: 606503 - DNA, 55 bp, Artificial; identical to SEQ ID NO: 465453
  Synthetic oligonucleotide

SEQ ID NO: 606504 - DNA, 55 bp, Artificial; identical to SEQ ID NO: 465455
  Synthetic oligonucleotide

SEQ ID NO: 606505 - DNA, 51 bp, Artificial; identical to SEQ ID NO: 465460
  Synthetic oligonucleotide

SEQ ID NO: 606506 - DNA, 60 bp, Artificial; identical to SEQ ID NO: 465465
  Synthetic oligonucleotide

SEQ ID NO: 606507 - DNA, 60 bp, Artificial; identical to SEQ ID NO: 465466
  Synthetic oligonucleotide

SEQ ID NO: 606508 - DNA, 55 bp, Artificial; identical to SEQ ID NO: 465467
  Synthetic oligonucleotide

SEQ ID NO: 606509 - DNA, 55 bp, Artificial; identical to SEQ ID NO: 465470
  Synthetic oligonucleotide

SEQ ID NO: 606510 - DNA, 55 bp, Artificial; identical to SEQ ID NO: 465475
  Synthetic oligonucleotide

SEQ ID NO: 606511 - DNA, 60 bp, Artificial; identical to SEQ ID NO: 465476
  Synthetic oligonucleotide

SEQ ID NO: 606512 - DNA, 55 bp, Artificial; identical to SEQ ID NO: 465478
  Synthetic oligonucleotide

SEQ ID NO: 606513 - DNA, 58 bp, Artificial; identical to SEQ ID NO: 465482
  Synthetic oligonucleotide

SEQ ID NO: 606514 - DNA, 56 bp, Artificial; identical to SEQ ID NO: 465483
  Synthetic oligonucleotide

SEQ ID NO: 606515 - DNA, 56 bp, Artificial; identical to SEQ ID NO: 465484
  Synthetic oligonucleotide

SEQ ID NO: 606516 - DNA, 56 bp, Artificial; identical to SEQ ID NO: 465487
  Synthetic oligonucleotide

SEQ ID NO: 606517 - DNA, 58 bp, Artificial; identical to SEQ ID NO: 465488
  Synthetic oligonucleotide

SEQ ID NO: 606518 - DNA, 60 bp, Artificial; identical to SEQ ID NO: 465491
  Synthetic oligonucleotide

SEQ ID NO: 606519 - DNA, 53 bp, Artificial; identical to SEQ ID NO: 465492
  Synthetic oligonucleotide

SEQ ID NO: 606520 - DNA, 58 bp, Artificial; identical to SEQ ID NO: 465493
  Synthetic oligonucleotide

SEQ ID NO: 606521 - DNA, 60 bp, Artificial; identical to SEQ ID NO: 465494
  Synthetic oligonucleotide

SEQ ID NO: 606522 - DNA, 60 bp, Artificial; identical to SEQ ID NO: 12306
  Synthetic oligonucleotide

SEQ ID NO: 606523 - DNA, 59 bp, Artificial; identical to SEQ ID NO: 465497
  Synthetic oligonucleotide

SEQ ID NO: 606524 - DNA, 55 bp, Artificial; identical to SEQ ID NO: 465501
  Synthetic oligonucleotide

SEQ ID NO: 606525 - DNA, 58 bp, Artificial; identical to SEQ ID NO: 465504
  Synthetic oligonucleotide

SEQ ID NO: 606526 - DNA, 60 bp, Artificial; identical to SEQ ID NO: 465506
  Synthetic oligonucleotide

SEQ ID NO: 606527 - DNA, 55 bp, Artificial; identical to SEQ ID NO: 18945
  Synthetic oligonucleotide

SEQ ID NO: 606528 - DNA, 60 bp, Artificial; identical to SEQ ID NO: 465507
  Synthetic oligonucleotide

SEQ ID NO: 606529 - DNA, 51 bp, Artificial; identical to SEQ ID NO: 465508
  Synthetic oligonucleotide

SEQ ID NO: 606530 - DNA, 60 bp, Artificial; identical to SEQ ID NO: 465509
  Synthetic oligonucleotide

SEQ ID NO: 606531 - DNA, 60 bp, Artificial; identical to SEQ ID NO: 465513
  Synthetic oligonucleotide

SEQ ID NO: 606532 - DNA, 60 bp, Artificial; identical to SEQ ID NO: 465517
  Synthetic oligonucleotide

SEQ ID NO: 606533 - DNA, 58 bp, Artificial; identical to SEQ ID NO: 465518
  Synthetic oligonucleotide

SEQ ID NO: 606534 - DNA, 58 bp, Artificial; identical to SEQ ID NO: 465519
  Synthetic oligonucleotide

SEQ ID NO: 606535 - DNA, 60 bp, Artificial; identical to SEQ ID NO: 465520
  Synthetic oligonucleotide

SEQ ID NO: 606536 - DNA, 60 bp, Artificial; identical to SEQ ID NO: 465522
  Synthetic oligonucleotide

SEQ ID NO: 606537 - DNA, 60 bp, Artificial; identical to SEQ ID NO: 465523
  Synthetic oligonucleotide

SEQ ID NO: 606538 - DNA, 55 bp, Artificial; identical to SEQ ID NO: 465529
  Synthetic oligonucleotide

SEQ ID NO: 606539 - DNA, 59 bp, Artificial; identical to SEQ ID NO: 16654
  Synthetic oligonucleotide

SEQ ID NO: 606540 - DNA, 51 bp, Artificial; identical to SEQ ID NO: 465532
  Synthetic oligonucleotide

SEQ ID NO: 606541 - DNA, 55 bp, Artificial; identical to SEQ ID NO: 465536
  Synthetic oligonucleotide

SEQ ID NO: 606542 - DNA, 60 bp, Artificial; identical to SEQ ID NO: 465540
  Synthetic oligonucleotide

SEQ ID NO: 606543 - DNA, 60 bp, Artificial; identical to SEQ ID NO: 465545
  Synthetic oligonucleotide

SEQ ID NO: 606544 - DNA, 60 bp, Artificial; identical to SEQ ID NO: 8874
  Synthetic oligonucleotide

SEQ ID NO: 606545 - DNA, 60 bp, Artificial; identical to SEQ ID NO: 465548
  Synthetic oligonucleotide

SEQ ID NO: 606546 - DNA, 55 bp, Artificial; identical to SEQ ID NO: 465549
  Synthetic oligonucleotide

SEQ ID NO: 606547 - DNA, 52 bp, Artificial; identical to SEQ ID NO: 465550
  Synthetic oligonucleotide

SEQ ID NO: 606548 - DNA, 57 bp, Artificial; identical to SEQ ID NO: 465556
  Synthetic oligonucleotide

SEQ ID NO: 606549 - DNA, 55 bp, Artificial; identical to SEQ ID NO: 465558
  Synthetic oligonucleotide

SEQ ID NO: 606550 - DNA, 57 bp, Artificial; identical to SEQ ID NO: 465560
  Synthetic oligonucleotide

SEQ ID NO: 606551 - DNA, 55 bp, Artificial; identical to SEQ ID NO: 465562
  Synthetic oligonucleotide

SEQ ID NO: 606552 - DNA, 58 bp, Artificial; identical to SEQ ID NO: 465565
  Synthetic oligonucleotide

SEQ ID NO: 606553 - DNA, 50 bp, Artificial; identical to SEQ ID NO: 465566
  Synthetic oligonucleotide

SEQ ID NO: 606554 - DNA, 60 bp, Artificial; identical to SEQ ID NO: 465569
  Synthetic oligonucleotide

SEQ ID NO: 606555 - DNA, 60 bp, Artificial; identical to SEQ ID NO: 465575
  Synthetic oligonucleotide

SEQ ID NO: 606556 - DNA, 60 bp, Artificial; identical to SEQ ID NO: 465581
  Synthetic oligonucleotide

SEQ ID NO: 606557 - DNA, 60 bp, Artificial; identical to SEQ ID NO: 465582
  Synthetic oligonucleotide

SEQ ID NO: 606558 - DNA, 54 bp, Artificial; identical to SEQ ID NO: 465586
  Synthetic oligonucleotide

SEQ ID NO: 606559 - DNA, 60 bp, Artificial; identical to SEQ ID NO: 465589
  Synthetic oligonucleotide

SEQ ID NO: 606560 - DNA, 60 bp, Artificial; identical to SEQ ID NO: 465594
  Synthetic oligonucleotide

SEQ ID NO: 606561 - DNA, 55 bp, Artificial; identical to SEQ ID NO: 465599
  Synthetic oligonucleotide

SEQ ID NO: 606562 - DNA, 58 bp, Artificial; identical to SEQ ID NO: 465602
  Synthetic oligonucleotide

SEQ ID NO: 606563 - DNA, 54 bp, Artificial; identical to SEQ ID NO: 465608
  Synthetic oligonucleotide

SEQ ID NO: 606564 - DNA, 60 bp, Artificial; identical to SEQ ID NO: 465609
  Synthetic oligonucleotide

SEQ ID NO: 606565 - DNA, 51 bp, Artificial; identical to SEQ ID NO: 465611
  Synthetic oligonucleotide

SEQ ID NO: 606566 - DNA, 60 bp, Artificial; identical to SEQ ID NO: 465613
  Synthetic oligonucleotide

SEQ ID NO: 606567 - DNA, 60 bp, Artificial; identical to SEQ ID NO: 465614
  Synthetic oligonucleotide

SEQ ID NO: 606568 - DNA, 60 bp, Artificial; identical to SEQ ID NO: 465617
  Synthetic oligonucleotide

SEQ ID NO: 606569 - DNA, 59 bp, Artificial; identical to SEQ ID NO: 465618
  Synthetic oligonucleotide

SEQ ID NO: 606570 - DNA, 60 bp, Artificial; identical to SEQ ID NO: 465619
  Synthetic oligonucleotide

SEQ ID NO: 606571 - DNA, 60 bp, Artificial; identical to SEQ ID NO: 465623
  Synthetic oligonucleotide

SEQ ID NO: 606572 - DNA, 55 bp, Artificial; identical to SEQ ID NO: 465624
  Synthetic oligonucleotide

SEQ ID NO: 606573 - DNA, 58 bp, Artificial; identical to SEQ ID NO: 465625
  Synthetic oligonucleotide

SEQ ID NO: 606574 - DNA, 54 bp, Artificial; identical to SEQ ID NO: 7437
  Synthetic oligonucleotide

SEQ ID NO: 606575 - DNA, 60 bp, Artificial; identical to SEQ ID NO: 465627
  Synthetic oligonucleotide

SEQ ID NO: 606576 - DNA, 58 bp, Artificial; identical to SEQ ID NO: 465632
  Synthetic oligonucleotide

SEQ ID NO: 606577 - DNA, 55 bp, Artificial; identical to SEQ ID NO: 465634
  Synthetic oligonucleotide

SEQ ID NO: 606578 - DNA, 60 bp, Artificial; identical to SEQ ID NO: 465638
  Synthetic oligonucleotide

SEQ ID NO: 606579 - DNA, 60 bp, Artificial; identical to SEQ ID NO: 465641
  Synthetic oligonucleotide

SEQ ID NO: 606580 - DNA, 51 bp, Artificial; identical to SEQ ID NO: 465642
  Synthetic oligonucleotide

SEQ ID NO: 606581 - DNA, 55 bp, Artificial; identical to SEQ ID NO: 465648
  Synthetic oligonucleotide

SEQ ID NO: 606582 - DNA, 60 bp, Artificial; identical to SEQ ID NO: 465650
  Synthetic oligonucleotide

SEQ ID NO: 606583 - DNA, 60 bp, Artificial; identical to SEQ ID NO: 465651
  Synthetic oligonucleotide

SEQ ID NO: 606584 - DNA, 51 bp, Artificial; identical to SEQ ID NO: 465652
  Synthetic oligonucleotide

SEQ ID NO: 606585 - DNA, 56 bp, Artificial; identical to SEQ ID NO: 465655
  Synthetic oligonucleotide

SEQ ID NO: 606586 - DNA, 59 bp, Artificial; identical to SEQ ID NO: 465658
  Synthetic oligonucleotide

SEQ ID NO: 606587 - DNA, 60 bp, Artificial; identical to SEQ ID NO: 465659
  Synthetic oligonucleotide

SEQ ID NO: 606588 - DNA, 58 bp, Artificial; identical to SEQ ID NO: 465660
  Synthetic oligonucleotide

SEQ ID NO: 606589 - DNA, 57 bp, Artificial; identical to SEQ ID NO: 465669
  Synthetic oligonucleotide

SEQ ID NO: 606590 - DNA, 60 bp, Artificial; identical to SEQ ID NO: 465670
  Synthetic oligonucleotide

SEQ ID NO: 606591 - DNA, 60 bp, Artificial; identical to SEQ ID NO: 465678
  Synthetic oligonucleotide

SEQ ID NO: 606592 - DNA, 54 bp, Artificial; identical to SEQ ID NO: 465681
  Synthetic oligonucleotide

SEQ ID NO: 606593 - DNA, 54 bp, Artificial; identical to SEQ ID NO: 465682
  Synthetic oligonucleotide

SEQ ID NO: 606594 - DNA, 55 bp, Artificial; identical to SEQ ID NO: 465687
  Synthetic oligonucleotide

SEQ ID NO: 606595 - DNA, 60 bp, Artificial; identical to SEQ ID NO: 465688
  Synthetic oligonucleotide

SEQ ID NO: 606596 - DNA, 57 bp, Artificial; identical to SEQ ID NO: 465692
  Synthetic oligonucleotide

SEQ ID NO: 606597 - DNA, 60 bp, Artificial; identical to SEQ ID NO: 465693
  Synthetic oligonucleotide

SEQ ID NO: 606598 - DNA, 55 bp, Artificial; identical to SEQ ID NO: 465694
  Synthetic oligonucleotide

SEQ ID NO: 606599 - DNA, 60 bp, Artificial; identical to SEQ ID NO: 465695
  Synthetic oligonucleotide

SEQ ID NO: 606600 - DNA, 50 bp, Artificial; identical to SEQ ID NO: 465697
  Synthetic oligonucleotide

SEQ ID NO: 606601 - DNA, 60 bp, Artificial; identical to SEQ ID NO: 465699
  Synthetic oligonucleotide

SEQ ID NO: 606602 - DNA, 48 bp, Artificial; identical to SEQ ID NO: 465700
  Synthetic oligonucleotide

SEQ ID NO: 606603 - DNA, 60 bp, Artificial; identical to SEQ ID NO: 465702
  Synthetic oligonucleotide

SEQ ID NO: 606604 - DNA, 60 bp, Artificial; identical to SEQ ID NO: 465703
  Synthetic oligonucleotide

SEQ ID NO: 606605 - DNA, 54 bp, Artificial; identical to SEQ ID NO: 465707
  Synthetic oligonucleotide

SEQ ID NO: 606606 - DNA, 60 bp, Artificial; identical to SEQ ID NO: 465709
  Synthetic oligonucleotide

SEQ ID NO: 606607 - DNA, 58 bp, Artificial; identical to SEQ ID NO: 16236
  Synthetic oligonucleotide

SEQ ID NO: 606608 - DNA, 58 bp, Artificial; identical to SEQ ID NO: 465714
  Synthetic oligonucleotide

SEQ ID NO: 606609 - DNA, 60 bp, Artificial; identical to SEQ ID NO: 465719
  Synthetic oligonucleotide

SEQ ID NO: 606610 - DNA, 60 bp, Artificial; identical to SEQ ID NO: 465721
  Synthetic oligonucleotide

SEQ ID NO: 606611 - DNA, 58 bp, Artificial; identical to SEQ ID NO: 465722
  Synthetic oligonucleotide

SEQ ID NO: 606612 - DNA, 55 bp, Artificial; identical to SEQ ID NO: 465724
  Synthetic oligonucleotide

SEQ ID NO: 606613 - DNA, 52 bp, Artificial; identical to SEQ ID NO: 465727
  Synthetic oligonucleotide

SEQ ID NO: 606614 - DNA, 60 bp, Artificial; identical to SEQ ID NO: 465733
  Synthetic oligonucleotide

SEQ ID NO: 606615 - DNA, 54 bp, Artificial; identical to SEQ ID NO: 465738
  Synthetic oligonucleotide

SEQ ID NO: 606616 - DNA, 55 bp, Artificial; identical to SEQ ID NO: 465739
  Synthetic oligonucleotide

SEQ ID NO: 606617 - DNA, 58 bp, Artificial; identical to SEQ ID NO: 465740
  Synthetic oligonucleotide

SEQ ID NO: 606618 - DNA, 60 bp, Artificial; identical to SEQ ID NO: 465742
  Synthetic oligonucleotide

SEQ ID NO: 606619 - DNA, 55 bp, Artificial; identical to SEQ ID NO: 465743
  Synthetic oligonucleotide

SEQ ID NO: 606620 - DNA, 60 bp, Artificial; identical to SEQ ID NO: 465745
  Synthetic oligonucleotide

SEQ ID NO: 606621 - DNA, 60 bp, Artificial; identical to SEQ ID NO: 465746
  Synthetic oligonucleotide

SEQ ID NO: 606622 - DNA, 60 bp, Artificial; identical to SEQ ID NO: 465747
  Synthetic oligonucleotide

SEQ ID NO: 606623 - DNA, 58 bp, Artificial; identical to SEQ ID NO: 465753
  Synthetic oligonucleotide

SEQ ID NO: 606624 - DNA, 60 bp, Artificial; identical to SEQ ID NO: 465757
  Synthetic oligonucleotide

SEQ ID NO: 606625 - DNA, 54 bp, Artificial; identical to SEQ ID NO: 465760
  Synthetic oligonucleotide

SEQ ID NO: 606626 - DNA, 60 bp, Artificial; identical to SEQ ID NO: 465762
  Synthetic oligonucleotide

SEQ ID NO: 606627 - DNA, 60 bp, Artificial; identical to SEQ ID NO: 465763
  Synthetic oligonucleotide

SEQ ID NO: 606628 - DNA, 55 bp, Artificial; identical to SEQ ID NO: 465764
  Synthetic oligonucleotide

SEQ ID NO: 606629 - DNA, 54 bp, Artificial; identical to SEQ ID NO: 465765
  Synthetic oligonucleotide

SEQ ID NO: 606630 - DNA, 59 bp, Artificial; identical to SEQ ID NO: 465766
  Synthetic oligonucleotide

SEQ ID NO: 606631 - DNA, 55 bp, Artificial; identical to SEQ ID NO: 465771
  Synthetic oligonucleotide

SEQ ID NO: 606632 - DNA, 54 bp, Artificial; identical to SEQ ID NO: 465773
  Synthetic oligonucleotide

SEQ ID NO: 606633 - DNA, 52 bp, Artificial; identical to SEQ ID NO: 465775
  Synthetic oligonucleotide

SEQ ID NO: 606634 - DNA, 58 bp, Artificial; identical to SEQ ID NO: 465778
  Synthetic oligonucleotide

SEQ ID NO: 606635 - DNA, 60 bp, Artificial; identical to SEQ ID NO: 465780
  Synthetic oligonucleotide

SEQ ID NO: 606636 - DNA, 60 bp, Artificial; identical to SEQ ID NO: 465784
  Synthetic oligonucleotide

SEQ ID NO: 606637 - DNA, 56 bp, Artificial; identical to SEQ ID NO: 465788
  Synthetic oligonucleotide

SEQ ID NO: 606638 - DNA, 57 bp, Artificial; identical to SEQ ID NO: 465791
  Synthetic oligonucleotide

SEQ ID NO: 606639 - DNA, 58 bp, Artificial; identical to SEQ ID NO: 465793
  Synthetic oligonucleotide

SEQ ID NO: 606640 - DNA, 55 bp, Artificial; identical to SEQ ID NO: 465799
  Synthetic oligonucleotide

SEQ ID NO: 606641 - DNA, 54 bp, Artificial; identical to SEQ ID NO: 465801
  Synthetic oligonucleotide

SEQ ID NO: 606642 - DNA, 60 bp, Artificial; identical to SEQ ID NO: 465802
  Synthetic oligonucleotide

SEQ ID NO: 606643 - DNA, 58 bp, Artificial; identical to SEQ ID NO: 465803
  Synthetic oligonucleotide

SEQ ID NO: 606644 - DNA, 60 bp, Artificial; identical to SEQ ID NO: 465805
  Synthetic oligonucleotide

SEQ ID NO: 606645 - DNA, 58 bp, Artificial; identical to SEQ ID NO: 465810
  Synthetic oligonucleotide

SEQ ID NO: 606646 - DNA, 60 bp, Artificial; identical to SEQ ID NO: 465812
  Synthetic oligonucleotide

SEQ ID NO: 606647 - DNA, 60 bp, Artificial; identical to SEQ ID NO: 465813
  Synthetic oligonucleotide

SEQ ID NO: 606648 - DNA, 57 bp, Artificial; identical to SEQ ID NO: 465814
  Synthetic oligonucleotide

SEQ ID NO: 606649 - DNA, 56 bp, Artificial; identical to SEQ ID NO: 465815
  Synthetic oligonucleotide

SEQ ID NO: 606650 - DNA, 60 bp, Artificial; identical to SEQ ID NO: 465819
  Synthetic oligonucleotide

SEQ ID NO: 606651 - DNA, 58 bp, Artificial; identical to SEQ ID NO: 465820
  Synthetic oligonucleotide

SEQ ID NO: 606652 - DNA, 57 bp, Artificial; identical to SEQ ID NO: 465824
  Synthetic oligonucleotide

SEQ ID NO: 606653 - DNA, 60 bp, Artificial; identical to SEQ ID NO: 465825
  Synthetic oligonucleotide

SEQ ID NO: 606654 - DNA, 60 bp, Artificial; identical to SEQ ID NO: 39095
  Synthetic oligonucleotide

SEQ ID NO: 606655 - DNA, 52 bp, Artificial; identical to SEQ ID NO: 465828
  Synthetic oligonucleotide

SEQ ID NO: 606656 - DNA, 60 bp, Artificial; identical to SEQ ID NO: 465830
  Synthetic oligonucleotide

SEQ ID NO: 606657 - DNA, 60 bp, Artificial; identical to SEQ ID NO: 465833
  Synthetic oligonucleotide

SEQ ID NO: 606658 - DNA, 52 bp, Artificial; identical to SEQ ID NO: 465834
  Synthetic oligonucleotide

SEQ ID NO: 606659 - DNA, 59 bp, Artificial; identical to SEQ ID NO: 465837
  Synthetic oligonucleotide

SEQ ID NO: 606660 - DNA, 60 bp, Artificial; identical to SEQ ID NO: 465838
  Synthetic oligonucleotide

SEQ ID NO: 606661 - DNA, 55 bp, Artificial; identical to SEQ ID NO: 465840
  Synthetic oligonucleotide

SEQ ID NO: 606662 - DNA, 60 bp, Artificial; identical to SEQ ID NO: 465841
  Synthetic oligonucleotide

SEQ ID NO: 606663 - DNA, 55 bp, Artificial; identical to SEQ ID NO: 465842
  Synthetic oligonucleotide

SEQ ID NO: 606664 - DNA, 60 bp, Artificial; identical to SEQ ID NO: 465846
  Synthetic oligonucleotide

SEQ ID NO: 606665 - DNA, 60 bp, Artificial; identical to SEQ ID NO: 465848
  Synthetic oligonucleotide

SEQ ID NO: 606666 - DNA, 60 bp, Artificial; identical to SEQ ID NO: 465849
  Synthetic oligonucleotide

SEQ ID NO: 606667 - DNA, 60 bp, Artificial; identical to SEQ ID NO: 465850
  Synthetic oligonucleotide

SEQ ID NO: 606668 - DNA, 52 bp, Artificial; identical to SEQ ID NO: 465851
  Synthetic oligonucleotide

SEQ ID NO: 606669 - DNA, 58 bp, Artificial; identical to SEQ ID NO: 465855
  Synthetic oligonucleotide

SEQ ID NO: 606670 - DNA, 55 bp, Artificial; identical to SEQ ID NO: 465857
  Synthetic oligonucleotide

SEQ ID NO: 606671 - DNA, 60 bp, Artificial; identical to SEQ ID NO: 465859
  Synthetic oligonucleotide

SEQ ID NO: 606672 - DNA, 60 bp, Artificial; identical to SEQ ID NO: 465860
  Synthetic oligonucleotide

SEQ ID NO: 606673 - DNA, 60 bp, Artificial; identical to SEQ ID NO: 465862
  Synthetic oligonucleotide

SEQ ID NO: 606674 - DNA, 60 bp, Artificial; identical to SEQ ID NO: 465864
  Synthetic oligonucleotide

SEQ ID NO: 606675 - DNA, 58 bp, Artificial; identical to SEQ ID NO: 465865
  Synthetic oligonucleotide

SEQ ID NO: 606676 - DNA, 60 bp, Artificial; identical to SEQ ID NO: 465866
  Synthetic oligonucleotide

SEQ ID NO: 606677 - DNA, 60 bp, Artificial; identical to SEQ ID NO: 465869
  Synthetic oligonucleotide

SEQ ID NO: 606678 - DNA, 56 bp, Artificial; identical to SEQ ID NO: 465872
  Synthetic oligonucleotide

SEQ ID NO: 606679 - DNA, 52 bp, Artificial; identical to SEQ ID NO: 465874
  Synthetic oligonucleotide

SEQ ID NO: 606680 - DNA, 54 bp, Artificial; identical to SEQ ID NO: 465875
  Synthetic oligonucleotide

SEQ ID NO: 606681 - DNA, 55 bp, Artificial; identical to SEQ ID NO: 465877
  Synthetic oligonucleotide

SEQ ID NO: 606682 - DNA, 59 bp, Artificial; identical to SEQ ID NO: 465879
  Synthetic oligonucleotide

SEQ ID NO: 606683 - DNA, 60 bp, Artificial; identical to SEQ ID NO: 465882
  Synthetic oligonucleotide

SEQ ID NO: 606684 - DNA, 55 bp, Artificial; identical to SEQ ID NO: 465885
  Synthetic oligonucleotide

SEQ ID NO: 606685 - DNA, 55 bp, Artificial; identical to SEQ ID NO: 465886
  Synthetic oligonucleotide

SEQ ID NO: 606686 - DNA, 58 bp, Artificial; identical to SEQ ID NO: 465887
  Synthetic oligonucleotide

SEQ ID NO: 606687 - DNA, 60 bp, Artificial; identical to SEQ ID NO: 465888
  Synthetic oligonucleotide

SEQ ID NO: 606688 - DNA, 60 bp, Artificial; identical to SEQ ID NO: 13912
  Synthetic oligonucleotide

SEQ ID NO: 606689 - DNA, 60 bp, Artificial; identical to SEQ ID NO: 465892
  Synthetic oligonucleotide

SEQ ID NO: 606690 - DNA, 60 bp, Artificial; identical to SEQ ID NO: 465893
  Synthetic oligonucleotide

SEQ ID NO: 606691 - DNA, 60 bp, Artificial; identical to SEQ ID NO: 465896
  Synthetic oligonucleotide

SEQ ID NO: 606692 - DNA, 56 bp, Artificial; identical to SEQ ID NO: 465908
  Synthetic oligonucleotide

SEQ ID NO: 606693 - DNA, 60 bp, Artificial; identical to SEQ ID NO: 465909
  Synthetic oligonucleotide

SEQ ID NO: 606694 - DNA, 58 bp, Artificial; identical to SEQ ID NO: 465911
  Synthetic oligonucleotide

SEQ ID NO: 606695 - DNA, 60 bp, Artificial; identical to SEQ ID NO: 465913
  Synthetic oligonucleotide

SEQ ID NO: 606696 - DNA, 55 bp, Artificial; identical to SEQ ID NO: 465914
  Synthetic oligonucleotide

SEQ ID NO: 606697 - DNA, 60 bp, Artificial; identical to SEQ ID NO: 465916
  Synthetic oligonucleotide

SEQ ID NO: 606698 - DNA, 53 bp, Artificial; identical to SEQ ID NO: 465917
  Synthetic oligonucleotide

SEQ ID NO: 606699 - DNA, 60 bp, Artificial; identical to SEQ ID NO: 465919
  Synthetic oligonucleotide

SEQ ID NO: 606700 - DNA, 55 bp, Artificial; identical to SEQ ID NO: 465920
  Synthetic oligonucleotide

SEQ ID NO: 606701 - DNA, 57 bp, Artificial; identical to SEQ ID NO: 465922
  Synthetic oligonucleotide

SEQ ID NO: 606702 - DNA, 60 bp, Artificial; identical to SEQ ID NO: 465924
  Synthetic oligonucleotide

SEQ ID NO: 606703 - DNA, 60 bp, Artificial; identical to SEQ ID NO: 465926
  Synthetic oligonucleotide

SEQ ID NO: 606704 - DNA, 59 bp, Artificial; identical to SEQ ID NO: 465928
  Synthetic oligonucleotide

SEQ ID NO: 606705 - DNA, 59 bp, Artificial; identical to SEQ ID NO: 465932
  Synthetic oligonucleotide

SEQ ID NO: 606706 - DNA, 60 bp, Artificial; identical to SEQ ID NO: 465933
  Synthetic oligonucleotide

SEQ ID NO: 606707 - DNA, 60 bp, Artificial; identical to SEQ ID NO: 465936
  Synthetic oligonucleotide

SEQ ID NO: 606708 - DNA, 60 bp, Artificial; identical to SEQ ID NO: 465940
  Synthetic oligonucleotide

SEQ ID NO: 606709 - DNA, 55 bp, Artificial; identical to SEQ ID NO: 465941
  Synthetic oligonucleotide

SEQ ID NO: 606710 - DNA, 60 bp, Artificial; identical to SEQ ID NO: 465943
  Synthetic oligonucleotide

SEQ ID NO: 606711 - DNA, 56 bp, Artificial; identical to SEQ ID NO: 465945
  Synthetic oligonucleotide

SEQ ID NO: 606712 - DNA, 54 bp, Artificial; identical to SEQ ID NO: 465946
  Synthetic oligonucleotide

SEQ ID NO: 606713 - DNA, 53 bp, Artificial; identical to SEQ ID NO: 465951
  Synthetic oligonucleotide

SEQ ID NO: 606714 - DNA, 60 bp, Artificial; identical to SEQ ID NO: 465954
  Synthetic oligonucleotide

SEQ ID NO: 606715 - DNA, 60 bp, Artificial; identical to SEQ ID NO: 465955
  Synthetic oligonucleotide

SEQ ID NO: 606716 - DNA, 60 bp, Artificial; identical to SEQ ID NO: 8470
  Synthetic oligonucleotide

SEQ ID NO: 606717 - DNA, 60 bp, Artificial; identical to SEQ ID NO: 465959
  Synthetic oligonucleotide

SEQ ID NO: 606718 - DNA, 59 bp, Artificial; identical to SEQ ID NO: 465960
  Synthetic oligonucleotide

SEQ ID NO: 606719 - DNA, 58 bp, Artificial; identical to SEQ ID NO: 465963
  Synthetic oligonucleotide

SEQ ID NO: 606720 - DNA, 55 bp, Artificial; identical to SEQ ID NO: 465965
  Synthetic oligonucleotide

SEQ ID NO: 606721 - DNA, 59 bp, Artificial; identical to SEQ ID NO: 465967
  Synthetic oligonucleotide

SEQ ID NO: 606722 - DNA, 58 bp, Artificial; identical to SEQ ID NO: 465968
  Synthetic oligonucleotide

SEQ ID NO: 606723 - DNA, 60 bp, Artificial; identical to SEQ ID NO: 465970
  Synthetic oligonucleotide

SEQ ID NO: 606724 - DNA, 57 bp, Artificial; identical to SEQ ID NO: 465971
  Synthetic oligonucleotide

SEQ ID NO: 606725 - DNA, 59 bp, Artificial; identical to SEQ ID NO: 465973
  Synthetic oligonucleotide

SEQ ID NO: 606726 - DNA, 60 bp, Artificial; identical to SEQ ID NO: 11168
  Synthetic oligonucleotide

SEQ ID NO: 606727 - DNA, 56 bp, Artificial; identical to SEQ ID NO: 465976
  Synthetic oligonucleotide

SEQ ID NO: 606728 - DNA, 51 bp, Artificial; identical to SEQ ID NO: 465977
  Synthetic oligonucleotide

SEQ ID NO: 606729 - DNA, 60 bp, Artificial; identical to SEQ ID NO: 465979
  Synthetic oligonucleotide

SEQ ID NO: 606730 - DNA, 55 bp, Artificial; identical to SEQ ID NO: 465980
  Synthetic oligonucleotide

SEQ ID NO: 606731 - DNA, 60 bp, Artificial; identical to SEQ ID NO: 465981
  Synthetic oligonucleotide

SEQ ID NO: 606732 - DNA, 60 bp, Artificial; identical to SEQ ID NO: 465983
  Synthetic oligonucleotide

SEQ ID NO: 606733 - DNA, 60 bp, Artificial; identical to SEQ ID NO: 465989
  Synthetic oligonucleotide

SEQ ID NO: 606734 - DNA, 59 bp, Artificial; identical to SEQ ID NO: 465991
  Synthetic oligonucleotide

SEQ ID NO: 606735 - DNA, 58 bp, Artificial; identical to SEQ ID NO: 465994
  Synthetic oligonucleotide

SEQ ID NO: 606736 - DNA, 59 bp, Artificial; identical to SEQ ID NO: 465998
  Synthetic oligonucleotide

SEQ ID NO: 606737 - DNA, 55 bp, Artificial; identical to SEQ ID NO: 6920
  Synthetic oligonucleotide

SEQ ID NO: 606738 - DNA, 57 bp, Artificial; identical to SEQ ID NO: 466001
  Synthetic oligonucleotide

SEQ ID NO: 606739 - DNA, 60 bp, Artificial; identical to SEQ ID NO: 6054
  Synthetic oligonucleotide

SEQ ID NO: 606740 - DNA, 58 bp, Artificial; identical to SEQ ID NO: 466007
  Synthetic oligonucleotide

SEQ ID NO: 606741 - DNA, 57 bp, Artificial; identical to SEQ ID NO: 8112
  Synthetic oligonucleotide

SEQ ID NO: 606742 - DNA, 55 bp, Artificial; identical to SEQ ID NO: 466008
  Synthetic oligonucleotide

SEQ ID NO: 606743 - DNA, 55 bp, Artificial; identical to SEQ ID NO: 466009
  Synthetic oligonucleotide

SEQ ID NO: 606744 - DNA, 60 bp, Artificial; identical to SEQ ID NO: 466011
  Synthetic oligonucleotide

SEQ ID NO: 606745 - DNA, 59 bp, Artificial; identical to SEQ ID NO: 466012
  Synthetic oligonucleotide

SEQ ID NO: 606746 - DNA, 50 bp, Artificial; identical to SEQ ID NO: 466014
  Synthetic oligonucleotide

SEQ ID NO: 606747 - DNA, 60 bp, Artificial; identical to SEQ ID NO: 466016
  Synthetic oligonucleotide

SEQ ID NO: 606748 - DNA, 60 bp, Artificial; identical to SEQ ID NO: 466017
  Synthetic oligonucleotide

SEQ ID NO: 606749 - DNA, 56 bp, Artificial; identical to SEQ ID NO: 466018
  Synthetic oligonucleotide

SEQ ID NO: 606750 - DNA, 57 bp, Artificial; identical to SEQ ID NO: 466019
  Synthetic oligonucleotide

SEQ ID NO: 606751 - DNA, 59 bp, Artificial; identical to SEQ ID NO: 466020
  Synthetic oligonucleotide

SEQ ID NO: 606752 - DNA, 60 bp, Artificial; identical to SEQ ID NO: 466022
  Synthetic oligonucleotide

SEQ ID NO: 606753 - DNA, 59 bp, Artificial; identical to SEQ ID NO: 466023
  Synthetic oligonucleotide

SEQ ID NO: 606754 - DNA, 58 bp, Artificial; identical to SEQ ID NO: 466024
  Synthetic oligonucleotide

SEQ ID NO: 606755 - DNA, 56 bp, Artificial; identical to SEQ ID NO: 466031
  Synthetic oligonucleotide

SEQ ID NO: 606756 - DNA, 60 bp, Artificial; identical to SEQ ID NO: 466039
  Synthetic oligonucleotide

SEQ ID NO: 606757 - DNA, 56 bp, Artificial; identical to SEQ ID NO: 466042
  Synthetic oligonucleotide

SEQ ID NO: 606758 - DNA, 60 bp, Artificial; identical to SEQ ID NO: 466043
  Synthetic oligonucleotide

SEQ ID NO: 606759 - DNA, 60 bp, Artificial; identical to SEQ ID NO: 466045
  Synthetic oligonucleotide

SEQ ID NO: 606760 - DNA, 60 bp, Artificial; identical to SEQ ID NO: 466047
  Synthetic oligonucleotide

SEQ ID NO: 606761 - DNA, 55 bp, Artificial; identical to SEQ ID NO: 466048
  Synthetic oligonucleotide

SEQ ID NO: 606762 - DNA, 53 bp, Artificial; identical to SEQ ID NO: 466050
  Synthetic oligonucleotide

SEQ ID NO: 606763 - DNA, 60 bp, Artificial; identical to SEQ ID NO: 466051
  Synthetic oligonucleotide

SEQ ID NO: 606764 - DNA, 60 bp, Artificial; identical to SEQ ID NO: 466053
  Synthetic oligonucleotide

SEQ ID NO: 606765 - DNA, 55 bp, Artificial; identical to SEQ ID NO: 466056
  Synthetic oligonucleotide

SEQ ID NO: 606766 - DNA, 60 bp, Artificial; identical to SEQ ID NO: 466059
  Synthetic oligonucleotide

SEQ ID NO: 606767 - DNA, 55 bp, Artificial; identical to SEQ ID NO: 466060
  Synthetic oligonucleotide

SEQ ID NO: 606768 - DNA, 55 bp, Artificial; identical to SEQ ID NO: 466061
  Synthetic oligonucleotide

SEQ ID NO: 606769 - DNA, 58 bp, Artificial; identical to SEQ ID NO: 466062
  Synthetic oligonucleotide

SEQ ID NO: 606770 - DNA, 55 bp, Artificial; identical to SEQ ID NO: 466065
  Synthetic oligonucleotide

SEQ ID NO: 606771 - DNA, 51 bp, Artificial; identical to SEQ ID NO: 466068
  Synthetic oligonucleotide

SEQ ID NO: 606772 - DNA, 52 bp, Artificial; identical to SEQ ID NO: 466071
  Synthetic oligonucleotide

SEQ ID NO: 606773 - DNA, 55 bp, Artificial; identical to SEQ ID NO: 466074
  Synthetic oligonucleotide

SEQ ID NO: 606774 - DNA, 55 bp, Artificial; identical to SEQ ID NO: 466077
  Synthetic oligonucleotide

SEQ ID NO: 606775 - DNA, 55 bp, Artificial; identical to SEQ ID NO: 466079
  Synthetic oligonucleotide

SEQ ID NO: 606776 - DNA, 60 bp, Artificial; identical to SEQ ID NO: 466082
  Synthetic oligonucleotide

SEQ ID NO: 606777 - DNA, 50 bp, Artificial; identical to SEQ ID NO: 466084
  Synthetic oligonucleotide

SEQ ID NO: 606778 - DNA, 51 bp, Artificial; identical to SEQ ID NO: 466086
  Synthetic oligonucleotide

SEQ ID NO: 606779 - DNA, 59 bp, Artificial; identical to SEQ ID NO: 19130
  Synthetic oligonucleotide

SEQ ID NO: 606780 - DNA, 60 bp, Artificial; identical to SEQ ID NO: 466087
  Synthetic oligonucleotide

SEQ ID NO: 606781 - DNA, 55 bp, Artificial; identical to SEQ ID NO: 466088
  Synthetic oligonucleotide

SEQ ID NO: 606782 - DNA, 60 bp, Artificial; identical to SEQ ID NO: 466090
  Synthetic oligonucleotide

SEQ ID NO: 606783 - DNA, 60 bp, Artificial; identical to SEQ ID NO: 466092
  Synthetic oligonucleotide

SEQ ID NO: 606784 - DNA, 58 bp, Artificial; identical to SEQ ID NO: 466094
  Synthetic oligonucleotide

SEQ ID NO: 606785 - DNA, 60 bp, Artificial; identical to SEQ ID NO: 466096
  Synthetic oligonucleotide

SEQ ID NO: 606786 - DNA, 60 bp, Artificial; identical to SEQ ID NO: 466097
  Synthetic oligonucleotide

SEQ ID NO: 606787 - DNA, 60 bp, Artificial; identical to SEQ ID NO: 466101
  Synthetic oligonucleotide

SEQ ID NO: 606788 - DNA, 60 bp, Artificial; identical to SEQ ID NO: 466103
  Synthetic oligonucleotide

SEQ ID NO: 606789 - DNA, 58 bp, Artificial; identical to SEQ ID NO: 466109
  Synthetic oligonucleotide

SEQ ID NO: 606790 - DNA, 55 bp, Artificial; identical to SEQ ID NO: 466110
  Synthetic oligonucleotide

SEQ ID NO: 606791 - DNA, 60 bp, Artificial; identical to SEQ ID NO: 466113
  Synthetic oligonucleotide

SEQ ID NO: 606792 - DNA, 60 bp, Artificial; identical to SEQ ID NO: 466114
  Synthetic oligonucleotide

SEQ ID NO: 606793 - DNA, 58 bp, Artificial; identical to SEQ ID NO: 17777
  Synthetic oligonucleotide

SEQ ID NO: 606794 - DNA, 53 bp, Artificial; identical to SEQ ID NO: 466115
  Synthetic oligonucleotide

SEQ ID NO: 606795 - DNA, 60 bp, Artificial; identical to SEQ ID NO: 466116
  Synthetic oligonucleotide

SEQ ID NO: 606796 - DNA, 52 bp, Artificial; identical to SEQ ID NO: 15653
  Synthetic oligonucleotide

SEQ ID NO: 606797 - DNA, 51 bp, Artificial; identical to SEQ ID NO: 466118
  Synthetic oligonucleotide

SEQ ID NO: 606798 - DNA, 56 bp, Artificial; identical to SEQ ID NO: 466119
  Synthetic oligonucleotide

SEQ ID NO: 606799 - DNA, 58 bp, Artificial; identical to SEQ ID NO: 466122
  Synthetic oligonucleotide

SEQ ID NO: 606800 - DNA, 60 bp, Artificial; identical to SEQ ID NO: 466124
  Synthetic oligonucleotide

SEQ ID NO: 606801 - DNA, 60 bp, Artificial; identical to SEQ ID NO: 466125
  Synthetic oligonucleotide

SEQ ID NO: 606802 - DNA, 60 bp, Artificial; identical to SEQ ID NO: 466126
  Synthetic oligonucleotide

SEQ ID NO: 606803 - DNA, 60 bp, Artificial; identical to SEQ ID NO: 466130
  Synthetic oligonucleotide

SEQ ID NO: 606804 - DNA, 60 bp, Artificial; identical to SEQ ID NO: 466131
  Synthetic oligonucleotide

SEQ ID NO: 606805 - DNA, 56 bp, Artificial; identical to SEQ ID NO: 466132
  Synthetic oligonucleotide

SEQ ID NO: 606806 - DNA, 55 bp, Artificial; identical to SEQ ID NO: 466135
  Synthetic oligonucleotide

SEQ ID NO: 606807 - DNA, 60 bp, Artificial; identical to SEQ ID NO: 466137
  Synthetic oligonucleotide

SEQ ID NO: 606808 - DNA, 60 bp, Artificial; identical to SEQ ID NO: 466139
  Synthetic oligonucleotide

SEQ ID NO: 606809 - DNA, 58 bp, Artificial; identical to SEQ ID NO: 466140
  Synthetic oligonucleotide

SEQ ID NO: 606810 - DNA, 57 bp, Artificial; identical to SEQ ID NO: 19906
  Synthetic oligonucleotide

SEQ ID NO: 606811 - DNA, 59 bp, Artificial; identical to SEQ ID NO: 466145
  Synthetic oligonucleotide

SEQ ID NO: 606812 - DNA, 60 bp, Artificial; identical to SEQ ID NO: 6197
  Synthetic oligonucleotide

SEQ ID NO: 606813 - DNA, 57 bp, Artificial; identical to SEQ ID NO: 466150
  Synthetic oligonucleotide

SEQ ID NO: 606814 - DNA, 55 bp, Artificial; identical to SEQ ID NO: 466154
  Synthetic oligonucleotide

SEQ ID NO: 606815 - DNA, 60 bp, Artificial; identical to SEQ ID NO: 466156
  Synthetic oligonucleotide

SEQ ID NO: 606816 - DNA, 56 bp, Artificial; identical to SEQ ID NO: 466157
  Synthetic oligonucleotide

SEQ ID NO: 606817 - DNA, 57 bp, Artificial; identical to SEQ ID NO: 466158
  Synthetic oligonucleotide

SEQ ID NO: 606818 - DNA, 60 bp, Artificial; identical to SEQ ID NO: 466160
  Synthetic oligonucleotide

SEQ ID NO: 606819 - DNA, 56 bp, Artificial; identical to SEQ ID NO: 466161
  Synthetic oligonucleotide

SEQ ID NO: 606820 - DNA, 60 bp, Artificial; identical to SEQ ID NO: 466162
  Synthetic oligonucleotide

SEQ ID NO: 606821 - DNA, 60 bp, Artificial; identical to SEQ ID NO: 466164
  Synthetic oligonucleotide

SEQ ID NO: 606822 - DNA, 52 bp, Artificial; identical to SEQ ID NO: 466165
  Synthetic oligonucleotide

SEQ ID NO: 606823 - DNA, 60 bp, Artificial; identical to SEQ ID NO: 466166
  Synthetic oligonucleotide

SEQ ID NO: 606824 - DNA, 50 bp, Artificial; identical to SEQ ID NO: 466168
  Synthetic oligonucleotide

SEQ ID NO: 606825 - DNA, 56 bp, Artificial; identical to SEQ ID NO: 466169
  Synthetic oligonucleotide

SEQ ID NO: 606826 - DNA, 60 bp, Artificial; identical to SEQ ID NO: 466171
  Synthetic oligonucleotide

SEQ ID NO: 606827 - DNA, 55 bp, Artificial; identical to SEQ ID NO: 466172
  Synthetic oligonucleotide

SEQ ID NO: 606828 - DNA, 60 bp, Artificial; identical to SEQ ID NO: 466178
  Synthetic oligonucleotide

SEQ ID NO: 606829 - DNA, 55 bp, Artificial; identical to SEQ ID NO: 466180
  Synthetic oligonucleotide

SEQ ID NO: 606830 - DNA, 60 bp, Artificial; identical to SEQ ID NO: 466182
  Synthetic oligonucleotide

SEQ ID NO: 606831 - DNA, 55 bp, Artificial; identical to SEQ ID NO: 466185
  Synthetic oligonucleotide

SEQ ID NO: 606832 - DNA, 55 bp, Artificial; identical to SEQ ID NO: 466186
  Synthetic oligonucleotide

SEQ ID NO: 606833 - DNA, 55 bp, Artificial; identical to SEQ ID NO: 466188
  Synthetic oligonucleotide

SEQ ID NO: 606834 - DNA, 58 bp, Artificial; identical to SEQ ID NO: 466190
  Synthetic oligonucleotide

SEQ ID NO: 606835 - DNA, 56 bp, Artificial; identical to SEQ ID NO: 466192
  Synthetic oligonucleotide

SEQ ID NO: 606836 - DNA, 55 bp, Artificial; identical to SEQ ID NO: 466193
  Synthetic oligonucleotide

SEQ ID NO: 606837 - DNA, 60 bp, Artificial; identical to SEQ ID NO: 10450
  Synthetic oligonucleotide

SEQ ID NO: 606838 - DNA, 55 bp, Artificial; identical to SEQ ID NO: 466196
  Synthetic oligonucleotide

SEQ ID NO: 606839 - DNA, 57 bp, Artificial; identical to SEQ ID NO: 466200
  Synthetic oligonucleotide

SEQ ID NO: 606840 - DNA, 60 bp, Artificial; identical to SEQ ID NO: 466201
  Synthetic oligonucleotide

SEQ ID NO: 606841 - DNA, 57 bp, Artificial; identical to SEQ ID NO: 466203
  Synthetic oligonucleotide

SEQ ID NO: 606842 - DNA, 60 bp, Artificial; identical to SEQ ID NO: 466207
  Synthetic oligonucleotide

SEQ ID NO: 606843 - DNA, 60 bp, Artificial; identical to SEQ ID NO: 466211
  Synthetic oligonucleotide

SEQ ID NO: 606844 - DNA, 54 bp, Artificial; identical to SEQ ID NO: 7987
  Synthetic oligonucleotide

SEQ ID NO: 606845 - DNA, 54 bp, Artificial; identical to SEQ ID NO: 466212
  Synthetic oligonucleotide

SEQ ID NO: 606846 - DNA, 60 bp, Artificial; identical to SEQ ID NO: 466214
  Synthetic oligonucleotide

SEQ ID NO: 606847 - DNA, 58 bp, Artificial; identical to SEQ ID NO: 466217
  Synthetic oligonucleotide

SEQ ID NO: 606848 - DNA, 55 bp, Artificial; identical to SEQ ID NO: 466218
  Synthetic oligonucleotide

SEQ ID NO: 606849 - DNA, 55 bp, Artificial; identical to SEQ ID NO: 466220
  Synthetic oligonucleotide

SEQ ID NO: 606850 - DNA, 60 bp, Artificial; identical to SEQ ID NO: 8639
  Synthetic oligonucleotide

SEQ ID NO: 606851 - DNA, 60 bp, Artificial; identical to SEQ ID NO: 466228
  Synthetic oligonucleotide

SEQ ID NO: 606852 - DNA, 60 bp, Artificial; identical to SEQ ID NO: 466229
  Synthetic oligonucleotide

SEQ ID NO: 606853 - DNA, 55 bp, Artificial; identical to SEQ ID NO: 466230
  Synthetic oligonucleotide

SEQ ID NO: 606854 - DNA, 60 bp, Artificial; identical to SEQ ID NO: 466233
  Synthetic oligonucleotide

SEQ ID NO: 606855 - DNA, 60 bp, Artificial; identical to SEQ ID NO: 11921
  Synthetic oligonucleotide

SEQ ID NO: 606856 - DNA, 60 bp, Artificial; identical to SEQ ID NO: 466239
  Synthetic oligonucleotide

SEQ ID NO: 606857 - DNA, 55 bp, Artificial; identical to SEQ ID NO: 466241
  Synthetic oligonucleotide

SEQ ID NO: 606858 - DNA, 55 bp, Artificial; identical to SEQ ID NO: 466244
  Synthetic oligonucleotide

SEQ ID NO: 606859 - DNA, 53 bp, Artificial; identical to SEQ ID NO: 9045
  Synthetic oligonucleotide

SEQ ID NO: 606860 - DNA, 60 bp, Artificial; identical to SEQ ID NO: 466252
  Synthetic oligonucleotide

SEQ ID NO: 606861 - DNA, 53 bp, Artificial; identical to SEQ ID NO: 466255
  Synthetic oligonucleotide

SEQ ID NO: 606862 - DNA, 56 bp, Artificial; identical to SEQ ID NO: 466256
  Synthetic oligonucleotide

SEQ ID NO: 606863 - DNA, 55 bp, Artificial; identical to SEQ ID NO: 466257
  Synthetic oligonucleotide

SEQ ID NO: 606864 - DNA, 54 bp, Artificial; identical to SEQ ID NO: 17734
  Synthetic oligonucleotide

SEQ ID NO: 606865 - DNA, 60 bp, Artificial; identical to SEQ ID NO: 7306
  Synthetic oligonucleotide

SEQ ID NO: 606866 - DNA, 60 bp, Artificial; identical to SEQ ID NO: 466260
  Synthetic oligonucleotide

SEQ ID NO: 606867 - DNA, 60 bp, Artificial; identical to SEQ ID NO: 466264
  Synthetic oligonucleotide

SEQ ID NO: 606868 - DNA, 51 bp, Artificial; identical to SEQ ID NO: 466266
  Synthetic oligonucleotide

SEQ ID NO: 606869 - DNA, 60 bp, Artificial; identical to SEQ ID NO: 11572
  Synthetic oligonucleotide

SEQ ID NO: 606870 - DNA, 58 bp, Artificial; identical to SEQ ID NO: 466273
  Synthetic oligonucleotide

SEQ ID NO: 606871 - DNA, 56 bp, Artificial; identical to SEQ ID NO: 466278
  Synthetic oligonucleotide

SEQ ID NO: 606872 - DNA, 56 bp, Artificial; identical to SEQ ID NO: 466279
  Synthetic oligonucleotide

SEQ ID NO: 606873 - DNA, 57 bp, Artificial; identical to SEQ ID NO: 466280
  Synthetic oligonucleotide

SEQ ID NO: 606874 - DNA, 60 bp, Artificial; identical to SEQ ID NO: 466284
  Synthetic oligonucleotide

SEQ ID NO: 606875 - DNA, 55 bp, Artificial; identical to SEQ ID NO: 466285
  Synthetic oligonucleotide

SEQ ID NO: 606876 - DNA, 60 bp, Artificial; identical to SEQ ID NO: 466286
  Synthetic oligonucleotide

SEQ ID NO: 606877 - DNA, 60 bp, Artificial; identical to SEQ ID NO: 466288
  Synthetic oligonucleotide

SEQ ID NO: 606878 - DNA, 54 bp, Artificial; identical to SEQ ID NO: 466289
  Synthetic oligonucleotide

SEQ ID NO: 606879 - DNA, 57 bp, Artificial; identical to SEQ ID NO: 19054
  Synthetic oligonucleotide

SEQ ID NO: 606880 - DNA, 50 bp, Artificial; identical to SEQ ID NO: 466301
  Synthetic oligonucleotide

SEQ ID NO: 606881 - DNA, 60 bp, Artificial; identical to SEQ ID NO: 466303
  Synthetic oligonucleotide

SEQ ID NO: 606882 - DNA, 57 bp, Artificial; identical to SEQ ID NO: 19178
  Synthetic oligonucleotide

SEQ ID NO: 606883 - DNA, 60 bp, Artificial; identical to SEQ ID NO: 466308
  Synthetic oligonucleotide

SEQ ID NO: 606884 - DNA, 60 bp, Artificial; identical to SEQ ID NO: 466309
  Synthetic oligonucleotide

SEQ ID NO: 606885 - DNA, 60 bp, Artificial; identical to SEQ ID NO: 12752
  Synthetic oligonucleotide

SEQ ID NO: 606886 - DNA, 60 bp, Artificial; identical to SEQ ID NO: 466310
  Synthetic oligonucleotide

SEQ ID NO: 606887 - DNA, 60 bp, Artificial; identical to SEQ ID NO: 466313
  Synthetic oligonucleotide

SEQ ID NO: 606888 - DNA, 58 bp, Artificial; identical to SEQ ID NO: 466315
  Synthetic oligonucleotide

SEQ ID NO: 606889 - DNA, 59 bp, Artificial; identical to SEQ ID NO: 466319
  Synthetic oligonucleotide

SEQ ID NO: 606890 - DNA, 60 bp, Artificial; identical to SEQ ID NO: 466320
  Synthetic oligonucleotide

SEQ ID NO: 606891 - DNA, 60 bp, Artificial; identical to SEQ ID NO: 466324
  Synthetic oligonucleotide

SEQ ID NO: 606892 - DNA, 60 bp, Artificial; identical to SEQ ID NO: 466327
  Synthetic oligonucleotide

SEQ ID NO: 606893 - DNA, 60 bp, Artificial; identical to SEQ ID NO: 466330
  Synthetic oligonucleotide

SEQ ID NO: 606894 - DNA, 60 bp, Artificial; identical to SEQ ID NO: 466331
  Synthetic oligonucleotide

SEQ ID NO: 606895 - DNA, 53 bp, Artificial; identical to SEQ ID NO: 466334
  Synthetic oligonucleotide

SEQ ID NO: 606896 - DNA, 60 bp, Artificial; identical to SEQ ID NO: 466336
  Synthetic oligonucleotide

SEQ ID NO: 606897 - DNA, 60 bp, Artificial; identical to SEQ ID NO: 466337
  Synthetic oligonucleotide

SEQ ID NO: 606898 - DNA, 60 bp, Artificial; identical to SEQ ID NO: 466338
  Synthetic oligonucleotide

SEQ ID NO: 606899 - DNA, 60 bp, Artificial; identical to SEQ ID NO: 466341
  Synthetic oligonucleotide

SEQ ID NO: 606900 - DNA, 55 bp, Artificial; identical to SEQ ID NO: 466344
  Synthetic oligonucleotide

SEQ ID NO: 606901 - DNA, 55 bp, Artificial; identical to SEQ ID NO: 466345
  Synthetic oligonucleotide

SEQ ID NO: 606902 - DNA, 60 bp, Artificial; identical to SEQ ID NO: 466347
  Synthetic oligonucleotide

SEQ ID NO: 606903 - DNA, 60 bp, Artificial; identical to SEQ ID NO: 466348
  Synthetic oligonucleotide

SEQ ID NO: 606904 - DNA, 55 bp, Artificial; identical to SEQ ID NO: 466352
  Synthetic oligonucleotide

SEQ ID NO: 606905 - DNA, 56 bp, Artificial; identical to SEQ ID NO: 10509
  Synthetic oligonucleotide

SEQ ID NO: 606906 - DNA, 60 bp, Artificial; identical to SEQ ID NO: 466354
  Synthetic oligonucleotide

SEQ ID NO: 606907 - DNA, 60 bp, Artificial; identical to SEQ ID NO: 11435
  Synthetic oligonucleotide

SEQ ID NO: 606908 - DNA, 56 bp, Artificial; identical to SEQ ID NO: 466362
  Synthetic oligonucleotide

SEQ ID NO: 606909 - DNA, 60 bp, Artificial; identical to SEQ ID NO: 466366
  Synthetic oligonucleotide

SEQ ID NO: 606910 - DNA, 55 bp, Artificial; identical to SEQ ID NO: 6744
  Synthetic oligonucleotide

SEQ ID NO: 606911 - DNA, 59 bp, Artificial; identical to SEQ ID NO: 466367
  Synthetic oligonucleotide

SEQ ID NO: 606912 - DNA, 60 bp, Artificial; identical to SEQ ID NO: 466369
  Synthetic oligonucleotide

SEQ ID NO: 606913 - DNA, 55 bp, Artificial; identical to SEQ ID NO: 466371
  Synthetic oligonucleotide

SEQ ID NO: 606914 - DNA, 60 bp, Artificial; identical to SEQ ID NO: 466374
  Synthetic oligonucleotide

SEQ ID NO: 606915 - DNA, 58 bp, Artificial; identical to SEQ ID NO: 466375
  Synthetic oligonucleotide

SEQ ID NO: 606916 - DNA, 55 bp, Artificial; identical to SEQ ID NO: 466384
  Synthetic oligonucleotide

SEQ ID NO: 606917 - DNA, 55 bp, Artificial; identical to SEQ ID NO: 466390
  Synthetic oligonucleotide

SEQ ID NO: 606918 - DNA, 60 bp, Artificial; identical to SEQ ID NO: 466394
  Synthetic oligonucleotide

SEQ ID NO: 606919 - DNA, 55 bp, Artificial; identical to SEQ ID NO: 466397
  Synthetic oligonucleotide

SEQ ID NO: 606920 - DNA, 55 bp, Artificial; identical to SEQ ID NO: 466403
  Synthetic oligonucleotide

SEQ ID NO: 606921 - DNA, 60 bp, Artificial; identical to SEQ ID NO: 466404
  Synthetic oligonucleotide

SEQ ID NO: 606922 - DNA, 60 bp, Artificial; identical to SEQ ID NO: 466407
  Synthetic oligonucleotide

SEQ ID NO: 606923 - DNA, 57 bp, Artificial; identical to SEQ ID NO: 466412
  Synthetic oligonucleotide

SEQ ID NO: 606924 - DNA, 55 bp, Artificial; identical to SEQ ID NO: 466413
  Synthetic oligonucleotide

SEQ ID NO: 606925 - DNA, 60 bp, Artificial; identical to SEQ ID NO: 466415
  Synthetic oligonucleotide

SEQ ID NO: 606926 - DNA, 51 bp, Artificial; identical to SEQ ID NO: 466418
  Synthetic oligonucleotide

SEQ ID NO: 606927 - DNA, 54 bp, Artificial; identical to SEQ ID NO: 466419
  Synthetic oligonucleotide

SEQ ID NO: 606928 - DNA, 55 bp, Artificial; identical to SEQ ID NO: 466420
  Synthetic oligonucleotide

SEQ ID NO: 606929 - DNA, 59 bp, Artificial; identical to SEQ ID NO: 16773
  Synthetic oligonucleotide

SEQ ID NO: 606930 - DNA, 60 bp, Artificial; identical to SEQ ID NO: 466422
  Synthetic oligonucleotide

SEQ ID NO: 606931 - DNA, 60 bp, Artificial; identical to SEQ ID NO: 466425
  Synthetic oligonucleotide

SEQ ID NO: 606932 - DNA, 60 bp, Artificial; identical to SEQ ID NO: 466426
  Synthetic oligonucleotide

SEQ ID NO: 606933 - DNA, 55 bp, Artificial; identical to SEQ ID NO: 466428
  Synthetic oligonucleotide

SEQ ID NO: 606934 - DNA, 55 bp, Artificial; identical to SEQ ID NO: 466429
  Synthetic oligonucleotide

SEQ ID NO: 606935 - DNA, 50 bp, Artificial; identical to SEQ ID NO: 466432
  Synthetic oligonucleotide

SEQ ID NO: 606936 - DNA, 60 bp, Artificial; identical to SEQ ID NO: 466444
  Synthetic oligonucleotide

SEQ ID NO: 606937 - DNA, 51 bp, Artificial; identical to SEQ ID NO: 466447
  Synthetic oligonucleotide

SEQ ID NO: 606938 - DNA, 50 bp, Artificial; identical to SEQ ID NO: 466451
  Synthetic oligonucleotide

SEQ ID NO: 606939 - DNA, 53 bp, Artificial; identical to SEQ ID NO: 466452
  Synthetic oligonucleotide

SEQ ID NO: 606940 - DNA, 54 bp, Artificial; identical to SEQ ID NO: 466454
  Synthetic oligonucleotide

SEQ ID NO: 606941 - DNA, 55 bp, Artificial; identical to SEQ ID NO: 466455
  Synthetic oligonucleotide

SEQ ID NO: 606942 - DNA, 60 bp, Artificial; identical to SEQ ID NO: 466456
  Synthetic oligonucleotide

SEQ ID NO: 606943 - DNA, 60 bp, Artificial; identical to SEQ ID NO: 466457
  Synthetic oligonucleotide

SEQ ID NO: 606944 - DNA, 52 bp, Artificial; identical to SEQ ID NO: 466458
  Synthetic oligonucleotide

SEQ ID NO: 606945 - DNA, 60 bp, Artificial; identical to SEQ ID NO: 466460
  Synthetic oligonucleotide

SEQ ID NO: 606946 - DNA, 56 bp, Artificial; identical to SEQ ID NO: 466461
  Synthetic oligonucleotide

SEQ ID NO: 606947 - DNA, 56 bp, Artificial; identical to SEQ ID NO: 466463
  Synthetic oligonucleotide

SEQ ID NO: 606948 - DNA, 60 bp, Artificial; identical to SEQ ID NO: 466470
  Synthetic oligonucleotide

SEQ ID NO: 606949 - DNA, 60 bp, Artificial; identical to SEQ ID NO: 466472
  Synthetic oligonucleotide

SEQ ID NO: 606950 - DNA, 60 bp, Artificial; identical to SEQ ID NO: 466474
  Synthetic oligonucleotide

SEQ ID NO: 606951 - DNA, 55 bp, Artificial; identical to SEQ ID NO: 466475
  Synthetic oligonucleotide

SEQ ID NO: 606952 - DNA, 59 bp, Artificial; identical to SEQ ID NO: 466484
  Synthetic oligonucleotide

SEQ ID NO: 606953 - DNA, 60 bp, Artificial; identical to SEQ ID NO: 466487
  Synthetic oligonucleotide

SEQ ID NO: 606954 - DNA, 60 bp, Artificial; identical to SEQ ID NO: 466488
  Synthetic oligonucleotide

SEQ ID NO: 606955 - DNA, 60 bp, Artificial; identical to SEQ ID NO: 466489
  Synthetic oligonucleotide

SEQ ID NO: 606956 - DNA, 60 bp, Artificial; identical to SEQ ID NO: 466493
  Synthetic oligonucleotide

SEQ ID NO: 606957 - DNA, 57 bp, Artificial; identical to SEQ ID NO: 466494
  Synthetic oligonucleotide

SEQ ID NO: 606958 - DNA, 55 bp, Artificial; identical to SEQ ID NO: 466496
  Synthetic oligonucleotide

SEQ ID NO: 606959 - DNA, 60 bp, Artificial; identical to SEQ ID NO: 466497
  Synthetic oligonucleotide

SEQ ID NO: 606960 - DNA, 60 bp, Artificial; identical to SEQ ID NO: 466498
  Synthetic oligonucleotide

SEQ ID NO: 606961 - DNA, 58 bp, Artificial; identical to SEQ ID NO: 12618
  Synthetic oligonucleotide

SEQ ID NO: 606962 - DNA, 57 bp, Artificial; identical to SEQ ID NO: 466499
  Synthetic oligonucleotide

SEQ ID NO: 606963 - DNA, 58 bp, Artificial; identical to SEQ ID NO: 466504
  Synthetic oligonucleotide

SEQ ID NO: 606964 - DNA, 60 bp, Artificial; identical to SEQ ID NO: 466507
  Synthetic oligonucleotide

SEQ ID NO: 606965 - DNA, 59 bp, Artificial; identical to SEQ ID NO: 466510
  Synthetic oligonucleotide

SEQ ID NO: 606966 - DNA, 58 bp, Artificial; identical to SEQ ID NO: 466512
  Synthetic oligonucleotide

SEQ ID NO: 606967 - DNA, 59 bp, Artificial; identical to SEQ ID NO: 466515
  Synthetic oligonucleotide

SEQ ID NO: 606968 - DNA, 59 bp, Artificial; identical to SEQ ID NO: 466517
  Synthetic oligonucleotide

SEQ ID NO: 606969 - DNA, 60 bp, Artificial; identical to SEQ ID NO: 466522
  Synthetic oligonucleotide

SEQ ID NO: 606970 - DNA, 55 bp, Artificial; identical to SEQ ID NO: 466523
  Synthetic oligonucleotide

SEQ ID NO: 606971 - DNA, 60 bp, Artificial; identical to SEQ ID NO: 12595
  Synthetic oligonucleotide

SEQ ID NO: 606972 - DNA, 57 bp, Artificial; identical to SEQ ID NO: 466525
  Synthetic oligonucleotide

SEQ ID NO: 606973 - DNA, 60 bp, Artificial; identical to SEQ ID NO: 466526
  Synthetic oligonucleotide

SEQ ID NO: 606974 - DNA, 60 bp, Artificial; identical to SEQ ID NO: 466527
  Synthetic oligonucleotide

SEQ ID NO: 606975 - DNA, 60 bp, Artificial; identical to SEQ ID NO: 466528
  Synthetic oligonucleotide

SEQ ID NO: 606976 - DNA, 59 bp, Artificial; identical to SEQ ID NO: 466531
  Synthetic oligonucleotide

SEQ ID NO: 606977 - DNA, 60 bp, Artificial; identical to SEQ ID NO: 466535
  Synthetic oligonucleotide

SEQ ID NO: 606978 - DNA, 60 bp, Artificial; identical to SEQ ID NO: 466539
  Synthetic oligonucleotide

SEQ ID NO: 606979 - DNA, 60 bp, Artificial; identical to SEQ ID NO: 466542
  Synthetic oligonucleotide

SEQ ID NO: 606980 - DNA, 57 bp, Artificial; identical to SEQ ID NO: 466543
  Synthetic oligonucleotide

SEQ ID NO: 606981 - DNA, 53 bp, Artificial; identical to SEQ ID NO: 466547
  Synthetic oligonucleotide

SEQ ID NO: 606982 - DNA, 60 bp, Artificial; identical to SEQ ID NO: 466549
  Synthetic oligonucleotide

SEQ ID NO: 606983 - DNA, 55 bp, Artificial; identical to SEQ ID NO: 466551
  Synthetic oligonucleotide

SEQ ID NO: 606984 - DNA, 52 bp, Artificial; identical to SEQ ID NO: 466552
  Synthetic oligonucleotide

SEQ ID NO: 606985 - DNA, 57 bp, Artificial; identical to SEQ ID NO: 466553
  Synthetic oligonucleotide

SEQ ID NO: 606986 - DNA, 50 bp, Artificial; identical to SEQ ID NO: 466554
  Synthetic oligonucleotide

SEQ ID NO: 606987 - DNA, 57 bp, Artificial; identical to SEQ ID NO: 466555
  Synthetic oligonucleotide

SEQ ID NO: 606988 - DNA, 50 bp, Artificial; identical to SEQ ID NO: 466557
  Synthetic oligonucleotide

SEQ ID NO: 606989 - DNA, 60 bp, Artificial; identical to SEQ ID NO: 466558
  Synthetic oligonucleotide

SEQ ID NO: 606990 - DNA, 60 bp, Artificial; identical to SEQ ID NO: 466561
  Synthetic oligonucleotide

SEQ ID NO: 606991 - DNA, 58 bp, Artificial; identical to SEQ ID NO: 466565
  Synthetic oligonucleotide

SEQ ID NO: 606992 - DNA, 59 bp, Artificial; identical to SEQ ID NO: 466571
  Synthetic oligonucleotide

SEQ ID NO: 606993 - DNA, 56 bp, Artificial; identical to SEQ ID NO: 466572
  Synthetic oligonucleotide

SEQ ID NO: 606994 - DNA, 55 bp, Artificial; identical to SEQ ID NO: 466578
  Synthetic oligonucleotide

SEQ ID NO: 606995 - DNA, 57 bp, Artificial; identical to SEQ ID NO: 466580
  Synthetic oligonucleotide

SEQ ID NO: 606996 - DNA, 56 bp, Artificial; identical to SEQ ID NO: 466582
  Synthetic oligonucleotide

SEQ ID NO: 606997 - DNA, 60 bp, Artificial; identical to SEQ ID NO: 466585
  Synthetic oligonucleotide

SEQ ID NO: 606998 - DNA, 60 bp, Artificial; identical to SEQ ID NO: 466588
  Synthetic oligonucleotide

SEQ ID NO: 606999 - DNA, 58 bp, Artificial; identical to SEQ ID NO: 466589
  Synthetic oligonucleotide

SEQ ID NO: 607000 - DNA, 60 bp, Artificial; identical to SEQ ID NO: 466590
  Synthetic oligonucleotide

SEQ ID NO: 607001 - DNA, 52 bp, Artificial; identical to SEQ ID NO: 466593
  Synthetic oligonucleotide

SEQ ID NO: 607002 - DNA, 60 bp, Artificial; identical to SEQ ID NO: 466594
  Synthetic oligonucleotide

SEQ ID NO: 607003 - DNA, 57 bp, Artificial; identical to SEQ ID NO: 466595
  Synthetic oligonucleotide

SEQ ID NO: 607004 - DNA, 56 bp, Artificial; identical to SEQ ID NO: 466598
  Synthetic oligonucleotide

SEQ ID NO: 607005 - DNA, 55 bp, Artificial; identical to SEQ ID NO: 466600
  Synthetic oligonucleotide

SEQ ID NO: 607006 - DNA, 60 bp, Artificial; identical to SEQ ID NO: 466601
  Synthetic oligonucleotide

SEQ ID NO: 607007 - DNA, 60 bp, Artificial; identical to SEQ ID NO: 466603
  Synthetic oligonucleotide

SEQ ID NO: 607008 - DNA, 60 bp, Artificial; identical to SEQ ID NO: 466606
  Synthetic oligonucleotide

SEQ ID NO: 607009 - DNA, 52 bp, Artificial; identical to SEQ ID NO: 466609
  Synthetic oligonucleotide

SEQ ID NO: 607010 - DNA, 60 bp, Artificial; identical to SEQ ID NO: 466611
  Synthetic oligonucleotide

SEQ ID NO: 607011 - DNA, 55 bp, Artificial; identical to SEQ ID NO: 466621
  Synthetic oligonucleotide

SEQ ID NO: 607012 - DNA, 55 bp, Artificial; identical to SEQ ID NO: 466622
  Synthetic oligonucleotide

SEQ ID NO: 607013 - DNA, 55 bp, Artificial; identical to SEQ ID NO: 466625
  Synthetic oligonucleotide

SEQ ID NO: 607014 - DNA, 59 bp, Artificial; identical to SEQ ID NO: 466626
  Synthetic oligonucleotide

SEQ ID NO: 607015 - DNA, 50 bp, Artificial; identical to SEQ ID NO: 466628
  Synthetic oligonucleotide

SEQ ID NO: 607016 - DNA, 60 bp, Artificial; identical to SEQ ID NO: 466629
  Synthetic oligonucleotide

SEQ ID NO: 607017 - DNA, 60 bp, Artificial; identical to SEQ ID NO: 466642
  Synthetic oligonucleotide

SEQ ID NO: 607018 - DNA, 60 bp, Artificial; identical to SEQ ID NO: 466645
  Synthetic oligonucleotide

SEQ ID NO: 607019 - DNA, 55 bp, Artificial; identical to SEQ ID NO: 466647
  Synthetic oligonucleotide

SEQ ID NO: 607020 - DNA, 56 bp, Artificial; identical to SEQ ID NO: 466649
  Synthetic oligonucleotide

SEQ ID NO: 607021 - DNA, 60 bp, Artificial; identical to SEQ ID NO: 466650
  Synthetic oligonucleotide

SEQ ID NO: 607022 - DNA, 56 bp, Artificial; identical to SEQ ID NO: 466651
  Synthetic oligonucleotide

SEQ ID NO: 607023 - DNA, 57 bp, Artificial; identical to SEQ ID NO: 466653
  Synthetic oligonucleotide

SEQ ID NO: 607024 - DNA, 60 bp, Artificial; identical to SEQ ID NO: 466654
  Synthetic oligonucleotide

SEQ ID NO: 607025 - DNA, 53 bp, Artificial; identical to SEQ ID NO: 466655
  Synthetic oligonucleotide

SEQ ID NO: 607026 - DNA, 50 bp, Artificial; identical to SEQ ID NO: 466656
  Synthetic oligonucleotide

SEQ ID NO: 607027 - DNA, 60 bp, Artificial; identical to SEQ ID NO: 466657
  Synthetic oligonucleotide

SEQ ID NO: 607028 - DNA, 60 bp, Artificial; identical to SEQ ID NO: 466662
  Synthetic oligonucleotide

SEQ ID NO: 607029 - DNA, 53 bp, Artificial; identical to SEQ ID NO: 466663
  Synthetic oligonucleotide

SEQ ID NO: 607030 - DNA, 60 bp, Artificial; identical to SEQ ID NO: 466665
  Synthetic oligonucleotide

SEQ ID NO: 607031 - DNA, 51 bp, Artificial; identical to SEQ ID NO: 466666
  Synthetic oligonucleotide

SEQ ID NO: 607032 - DNA, 60 bp, Artificial; identical to SEQ ID NO: 466673
  Synthetic oligonucleotide

SEQ ID NO: 607033 - DNA, 53 bp, Artificial; identical to SEQ ID NO: 466674
  Synthetic oligonucleotide

SEQ ID NO: 607034 - DNA, 56 bp, Artificial; identical to SEQ ID NO: 466676
  Synthetic oligonucleotide

SEQ ID NO: 607035 - DNA, 60 bp, Artificial; identical to SEQ ID NO: 466679
  Synthetic oligonucleotide

SEQ ID NO: 607036 - DNA, 55 bp, Artificial; identical to SEQ ID NO: 466681
  Synthetic oligonucleotide

SEQ ID NO: 607037 - DNA, 57 bp, Artificial; identical to SEQ ID NO: 466684
  Synthetic oligonucleotide

SEQ ID NO: 607038 - DNA, 60 bp, Artificial; identical to SEQ ID NO: 466686
  Synthetic oligonucleotide

SEQ ID NO: 607039 - DNA, 58 bp, Artificial; identical to SEQ ID NO: 466688
  Synthetic oligonucleotide

SEQ ID NO: 607040 - DNA, 60 bp, Artificial; identical to SEQ ID NO: 466689
  Synthetic oligonucleotide

SEQ ID NO: 607041 - DNA, 60 bp, Artificial; identical to SEQ ID NO: 466694
  Synthetic oligonucleotide

SEQ ID NO: 607042 - DNA, 55 bp, Artificial; identical to SEQ ID NO: 466696
  Synthetic oligonucleotide

SEQ ID NO: 607043 - DNA, 60 bp, Artificial; identical to SEQ ID NO: 466697
  Synthetic oligonucleotide

SEQ ID NO: 607044 - DNA, 60 bp, Artificial; identical to SEQ ID NO: 466699
  Synthetic oligonucleotide

SEQ ID NO: 607045 - DNA, 60 bp, Artificial; identical to SEQ ID NO: 466701
  Synthetic oligonucleotide

SEQ ID NO: 607046 - DNA, 60 bp, Artificial; identical to SEQ ID NO: 466702
  Synthetic oligonucleotide

SEQ ID NO: 607047 - DNA, 52 bp, Artificial; identical to SEQ ID NO: 466704
  Synthetic oligonucleotide

SEQ ID NO: 607048 - DNA, 60 bp, Artificial; identical to SEQ ID NO: 466705
  Synthetic oligonucleotide

SEQ ID NO: 607049 - DNA, 51 bp, Artificial; identical to SEQ ID NO: 466707
  Synthetic oligonucleotide

SEQ ID NO: 607050 - DNA, 57 bp, Artificial; identical to SEQ ID NO: 466708
  Synthetic oligonucleotide

SEQ ID NO: 607051 - DNA, 60 bp, Artificial; identical to SEQ ID NO: 466709
  Synthetic oligonucleotide

SEQ ID NO: 607052 - DNA, 55 bp, Artificial; identical to SEQ ID NO: 466710
  Synthetic oligonucleotide

SEQ ID NO: 607053 - DNA, 58 bp, Artificial; identical to SEQ ID NO: 466712
  Synthetic oligonucleotide

SEQ ID NO: 607054 - DNA, 60 bp, Artificial; identical to SEQ ID NO: 466714
  Synthetic oligonucleotide

SEQ ID NO: 607055 - DNA, 60 bp, Artificial; identical to SEQ ID NO: 466718
  Synthetic oligonucleotide

SEQ ID NO: 607056 - DNA, 60 bp, Artificial; identical to SEQ ID NO: 466719
  Synthetic oligonucleotide

SEQ ID NO: 607057 - DNA, 53 bp, Artificial; identical to SEQ ID NO: 466723
  Synthetic oligonucleotide

SEQ ID NO: 607058 - DNA, 55 bp, Artificial; identical to SEQ ID NO: 466724
  Synthetic oligonucleotide

SEQ ID NO: 607059 - DNA, 58 bp, Artificial; identical to SEQ ID NO: 466725
  Synthetic oligonucleotide

SEQ ID NO: 607060 - DNA, 55 bp, Artificial; identical to SEQ ID NO: 466726
  Synthetic oligonucleotide

SEQ ID NO: 607061 - DNA, 60 bp, Artificial; identical to SEQ ID NO: 14867
  Synthetic oligonucleotide

SEQ ID NO: 607062 - DNA, 56 bp, Artificial; identical to SEQ ID NO: 466730
  Synthetic oligonucleotide

SEQ ID NO: 607063 - DNA, 60 bp, Artificial; identical to SEQ ID NO: 466731
  Synthetic oligonucleotide

SEQ ID NO: 607064 - DNA, 59 bp, Artificial; identical to SEQ ID NO: 466732
  Synthetic oligonucleotide

SEQ ID NO: 607065 - DNA, 60 bp, Artificial; identical to SEQ ID NO: 466734
  Synthetic oligonucleotide

SEQ ID NO: 607066 - DNA, 58 bp, Artificial; identical to SEQ ID NO: 466736
  Synthetic oligonucleotide

SEQ ID NO: 607067 - DNA, 55 bp, Artificial; identical to SEQ ID NO: 466739
  Synthetic oligonucleotide

SEQ ID NO: 607068 - DNA, 56 bp, Artificial; identical to SEQ ID NO: 466740
  Synthetic oligonucleotide

SEQ ID NO: 607069 - DNA, 60 bp, Artificial; identical to SEQ ID NO: 466741
  Synthetic oligonucleotide

SEQ ID NO: 607070 - DNA, 60 bp, Artificial; identical to SEQ ID NO: 466743
  Synthetic oligonucleotide

SEQ ID NO: 607071 - DNA, 60 bp, Artificial; identical to SEQ ID NO: 7922
  Synthetic oligonucleotide

SEQ ID NO: 607072 - DNA, 60 bp, Artificial; identical to SEQ ID NO: 466745
  Synthetic oligonucleotide

SEQ ID NO: 607073 - DNA, 55 bp, Artificial; identical to SEQ ID NO: 466746
  Synthetic oligonucleotide

SEQ ID NO: 607074 - DNA, 57 bp, Artificial; identical to SEQ ID NO: 466747
  Synthetic oligonucleotide

SEQ ID NO: 607075 - DNA, 55 bp, Artificial; identical to SEQ ID NO: 466748
  Synthetic oligonucleotide

SEQ ID NO: 607076 - DNA, 55 bp, Artificial; identical to SEQ ID NO: 466749
  Synthetic oligonucleotide

SEQ ID NO: 607077 - DNA, 54 bp, Artificial; identical to SEQ ID NO: 466750
  Synthetic oligonucleotide

SEQ ID NO: 607078 - DNA, 55 bp, Artificial; identical to SEQ ID NO: 466752
  Synthetic oligonucleotide

SEQ ID NO: 607079 - DNA, 58 bp, Artificial; identical to SEQ ID NO: 17901
  Synthetic oligonucleotide

SEQ ID NO: 607080 - DNA, 50 bp, Artificial; identical to SEQ ID NO: 7978
  Synthetic oligonucleotide

SEQ ID NO: 607081 - DNA, 60 bp, Artificial; identical to SEQ ID NO: 466758
  Synthetic oligonucleotide

SEQ ID NO: 607082 - DNA, 55 bp, Artificial; identical to SEQ ID NO: 466762
  Synthetic oligonucleotide

SEQ ID NO: 607083 - DNA, 60 bp, Artificial; identical to SEQ ID NO: 466765
  Synthetic oligonucleotide

SEQ ID NO: 607084 - DNA, 60 bp, Artificial; identical to SEQ ID NO: 466766
  Synthetic oligonucleotide

SEQ ID NO: 607085 - DNA, 60 bp, Artificial; identical to SEQ ID NO: 466767
  Synthetic oligonucleotide

SEQ ID NO: 607086 - DNA, 57 bp, Artificial; identical to SEQ ID NO: 466768
  Synthetic oligonucleotide

SEQ ID NO: 607087 - DNA, 57 bp, Artificial; identical to SEQ ID NO: 466769
  Synthetic oligonucleotide

SEQ ID NO: 607088 - DNA, 53 bp, Artificial; identical to SEQ ID NO: 466771
  Synthetic oligonucleotide

SEQ ID NO: 607089 - DNA, 60 bp, Artificial; identical to SEQ ID NO: 466772
  Synthetic oligonucleotide

SEQ ID NO: 607090 - DNA, 60 bp, Artificial; identical to SEQ ID NO: 466773
  Synthetic oligonucleotide

SEQ ID NO: 607091 - DNA, 60 bp, Artificial; identical to SEQ ID NO: 466774
  Synthetic oligonucleotide

SEQ ID NO: 607092 - DNA, 60 bp, Artificial; identical to SEQ ID NO: 466775
  Synthetic oligonucleotide

SEQ ID NO: 607093 - DNA, 52 bp, Artificial; identical to SEQ ID NO: 466777
  Synthetic oligonucleotide

SEQ ID NO: 607094 - DNA, 60 bp, Artificial; identical to SEQ ID NO: 466779
  Synthetic oligonucleotide

SEQ ID NO: 607095 - DNA, 60 bp, Artificial; identical to SEQ ID NO: 466780
  Synthetic oligonucleotide

SEQ ID NO: 607096 - DNA, 60 bp, Artificial; identical to SEQ ID NO: 466784
  Synthetic oligonucleotide

SEQ ID NO: 607097 - DNA, 60 bp, Artificial; identical to SEQ ID NO: 466785
  Synthetic oligonucleotide

SEQ ID NO: 607098 - DNA, 60 bp, Artificial; identical to SEQ ID NO: 466787
  Synthetic oligonucleotide

SEQ ID NO: 607099 - DNA, 57 bp, Artificial; identical to SEQ ID NO: 466789
  Synthetic oligonucleotide

SEQ ID NO: 607100 - DNA, 55 bp, Artificial; identical to SEQ ID NO: 466792
  Synthetic oligonucleotide

SEQ ID NO: 607101 - DNA, 55 bp, Artificial; identical to SEQ ID NO: 466793
  Synthetic oligonucleotide

SEQ ID NO: 607102 - DNA, 55 bp, Artificial; identical to SEQ ID NO: 466797
  Synthetic oligonucleotide

SEQ ID NO: 607103 - DNA, 60 bp, Artificial; identical to SEQ ID NO: 466800
  Synthetic oligonucleotide

SEQ ID NO: 607104 - DNA, 57 bp, Artificial; identical to SEQ ID NO: 466807
  Synthetic oligonucleotide

SEQ ID NO: 607105 - DNA, 60 bp, Artificial; identical to SEQ ID NO: 466808
  Synthetic oligonucleotide

SEQ ID NO: 607106 - DNA, 59 bp, Artificial; identical to SEQ ID NO: 466809
  Synthetic oligonucleotide

SEQ ID NO: 607107 - DNA, 60 bp, Artificial; identical to SEQ ID NO: 466810
  Synthetic oligonucleotide

SEQ ID NO: 607108 - DNA, 60 bp, Artificial; identical to SEQ ID NO: 466813
  Synthetic oligonucleotide

SEQ ID NO: 607109 - DNA, 55 bp, Artificial; identical to SEQ ID NO: 466814
  Synthetic oligonucleotide

SEQ ID NO: 607110 - DNA, 60 bp, Artificial; identical to SEQ ID NO: 466820
  Synthetic oligonucleotide

SEQ ID NO: 607111 - DNA, 60 bp, Artificial; identical to SEQ ID NO: 466824
  Synthetic oligonucleotide

SEQ ID NO: 607112 - DNA, 60 bp, Artificial; identical to SEQ ID NO: 466826
  Synthetic oligonucleotide

SEQ ID NO: 607113 - DNA, 60 bp, Artificial; identical to SEQ ID NO: 466828
  Synthetic oligonucleotide

SEQ ID NO: 607114 - DNA, 60 bp, Artificial; identical to SEQ ID NO: 466830
  Synthetic oligonucleotide

SEQ ID NO: 607115 - DNA, 59 bp, Artificial; identical to SEQ ID NO: 466831
  Synthetic oligonucleotide

SEQ ID NO: 607116 - DNA, 56 bp, Artificial; identical to SEQ ID NO: 466834
  Synthetic oligonucleotide

SEQ ID NO: 607117 - DNA, 60 bp, Artificial; identical to SEQ ID NO: 466837
  Synthetic oligonucleotide

SEQ ID NO: 607118 - DNA, 57 bp, Artificial; identical to SEQ ID NO: 12753
  Synthetic oligonucleotide

SEQ ID NO: 607119 - DNA, 54 bp, Artificial; identical to SEQ ID NO: 466839
  Synthetic oligonucleotide

SEQ ID NO: 607120 - DNA, 60 bp, Artificial; identical to SEQ ID NO: 466843
  Synthetic oligonucleotide

SEQ ID NO: 607121 - DNA, 60 bp, Artificial; identical to SEQ ID NO: 8975
  Synthetic oligonucleotide

SEQ ID NO: 607122 - DNA, 59 bp, Artificial; identical to SEQ ID NO: 466844
  Synthetic oligonucleotide

SEQ ID NO: 607123 - DNA, 60 bp, Artificial; identical to SEQ ID NO: 466846
  Synthetic oligonucleotide

SEQ ID NO: 607124 - DNA, 57 bp, Artificial; identical to SEQ ID NO: 466848
  Synthetic oligonucleotide

SEQ ID NO: 607125 - DNA, 55 bp, Artificial; identical to SEQ ID NO: 466849
  Synthetic oligonucleotide

SEQ ID NO: 607126 - DNA, 55 bp, Artificial; identical to SEQ ID NO: 466853
  Synthetic oligonucleotide

SEQ ID NO: 607127 - DNA, 60 bp, Artificial; identical to SEQ ID NO: 7968
  Synthetic oligonucleotide

SEQ ID NO: 607128 - DNA, 59 bp, Artificial; identical to SEQ ID NO: 466859
  Synthetic oligonucleotide

SEQ ID NO: 607129 - DNA, 55 bp, Artificial; identical to SEQ ID NO: 466861
  Synthetic oligonucleotide

SEQ ID NO: 607130 - DNA, 60 bp, Artificial; identical to SEQ ID NO: 466865
  Synthetic oligonucleotide

SEQ ID NO: 607131 - DNA, 54 bp, Artificial; identical to SEQ ID NO: 466866
  Synthetic oligonucleotide

SEQ ID NO: 607132 - DNA, 56 bp, Artificial; identical to SEQ ID NO: 466867
  Synthetic oligonucleotide

SEQ ID NO: 607133 - DNA, 55 bp, Artificial; identical to SEQ ID NO: 466872
  Synthetic oligonucleotide

SEQ ID NO: 607134 - DNA, 55 bp, Artificial; identical to SEQ ID NO: 466873
  Synthetic oligonucleotide

SEQ ID NO: 607135 - DNA, 56 bp, Artificial; identical to SEQ ID NO: 466874
  Synthetic oligonucleotide

SEQ ID NO: 607136 - DNA, 60 bp, Artificial; identical to SEQ ID NO: 466884
  Synthetic oligonucleotide

SEQ ID NO: 607137 - DNA, 52 bp, Artificial; identical to SEQ ID NO: 466885
  Synthetic oligonucleotide

SEQ ID NO: 607138 - DNA, 60 bp, Artificial; identical to SEQ ID NO: 466886
  Synthetic oligonucleotide

SEQ ID NO: 607139 - DNA, 60 bp, Artificial; identical to SEQ ID NO: 466887
  Synthetic oligonucleotide

SEQ ID NO: 607140 - DNA, 55 bp, Artificial; identical to SEQ ID NO: 466893
  Synthetic oligonucleotide

SEQ ID NO: 607141 - DNA, 55 bp, Artificial; identical to SEQ ID NO: 466894
  Synthetic oligonucleotide

SEQ ID NO: 607142 - DNA, 60 bp, Artificial; identical to SEQ ID NO: 466895
  Synthetic oligonucleotide

SEQ ID NO: 607143 - DNA, 60 bp, Artificial; identical to SEQ ID NO: 466896
  Synthetic oligonucleotide

SEQ ID NO: 607144 - DNA, 60 bp, Artificial; identical to SEQ ID NO: 466897
  Synthetic oligonucleotide

SEQ ID NO: 607145 - DNA, 60 bp, Artificial; identical to SEQ ID NO: 5778
  Synthetic oligonucleotide

SEQ ID NO: 607146 - DNA, 55 bp, Artificial; identical to SEQ ID NO: 466901
  Synthetic oligonucleotide

SEQ ID NO: 607147 - DNA, 60 bp, Artificial; identical to SEQ ID NO: 466904
  Synthetic oligonucleotide

SEQ ID NO: 607148 - DNA, 59 bp, Artificial; identical to SEQ ID NO: 466908
  Synthetic oligonucleotide

SEQ ID NO: 607149 - DNA, 53 bp, Artificial; identical to SEQ ID NO: 466910
  Synthetic oligonucleotide

SEQ ID NO: 607150 - DNA, 51 bp, Artificial; identical to SEQ ID NO: 466915
  Synthetic oligonucleotide

SEQ ID NO: 607151 - DNA, 60 bp, Artificial; identical to SEQ ID NO: 466917
  Synthetic oligonucleotide

SEQ ID NO: 607152 - DNA, 60 bp, Artificial; identical to SEQ ID NO: 466918
  Synthetic oligonucleotide

SEQ ID NO: 607153 - DNA, 55 bp, Artificial; identical to SEQ ID NO: 466920
  Synthetic oligonucleotide

SEQ ID NO: 607154 - DNA, 60 bp, Artificial; identical to SEQ ID NO: 466921
  Synthetic oligonucleotide

SEQ ID NO: 607155 - DNA, 60 bp, Artificial; identical to SEQ ID NO: 466925
  Synthetic oligonucleotide

SEQ ID NO: 607156 - DNA, 52 bp, Artificial; identical to SEQ ID NO: 466927
  Synthetic oligonucleotide

SEQ ID NO: 607157 - DNA, 60 bp, Artificial; identical to SEQ ID NO: 466928
  Synthetic oligonucleotide

SEQ ID NO: 607158 - DNA, 55 bp, Artificial; identical to SEQ ID NO: 466929
  Synthetic oligonucleotide

SEQ ID NO: 607159 - DNA, 51 bp, Artificial; identical to SEQ ID NO: 466932
  Synthetic oligonucleotide

SEQ ID NO: 607160 - DNA, 56 bp, Artificial; identical to SEQ ID NO: 466936
  Synthetic oligonucleotide

SEQ ID NO: 607161 - DNA, 55 bp, Artificial; identical to SEQ ID NO: 466938
  Synthetic oligonucleotide

SEQ ID NO: 607162 - DNA, 50 bp, Artificial; identical to SEQ ID NO: 466939
  Synthetic oligonucleotide

SEQ ID NO: 607163 - DNA, 60 bp, Artificial; identical to SEQ ID NO: 466941
  Synthetic oligonucleotide

SEQ ID NO: 607164 - DNA, 58 bp, Artificial; identical to SEQ ID NO: 466942
  Synthetic oligonucleotide

SEQ ID NO: 607165 - DNA, 52 bp, Artificial; identical to SEQ ID NO: 466943
  Synthetic oligonucleotide

SEQ ID NO: 607166 - DNA, 56 bp, Artificial; identical to SEQ ID NO: 466944
  Synthetic oligonucleotide

SEQ ID NO: 607167 - DNA, 60 bp, Artificial; identical to SEQ ID NO: 466946
  Synthetic oligonucleotide

SEQ ID NO: 607168 - DNA, 51 bp, Artificial; identical to SEQ ID NO: 466948
  Synthetic oligonucleotide

SEQ ID NO: 607169 - DNA, 54 bp, Artificial; identical to SEQ ID NO: 466956
  Synthetic oligonucleotide

SEQ ID NO: 607170 - DNA, 60 bp, Artificial; identical to SEQ ID NO: 466957
  Synthetic oligonucleotide

SEQ ID NO: 607171 - DNA, 52 bp, Artificial; identical to SEQ ID NO: 466959
  Synthetic oligonucleotide

SEQ ID NO: 607172 - DNA, 58 bp, Artificial; identical to SEQ ID NO: 466961
  Synthetic oligonucleotide

SEQ ID NO: 607173 - DNA, 60 bp, Artificial; identical to SEQ ID NO: 466963
  Synthetic oligonucleotide

SEQ ID NO: 607174 - DNA, 60 bp, Artificial; identical to SEQ ID NO: 13129
  Synthetic oligonucleotide

SEQ ID NO: 607175 - DNA, 60 bp, Artificial; identical to SEQ ID NO: 466964
  Synthetic oligonucleotide

SEQ ID NO: 607176 - DNA, 59 bp, Artificial; identical to SEQ ID NO: 466965
  Synthetic oligonucleotide

SEQ ID NO: 607177 - DNA, 50 bp, Artificial; identical to SEQ ID NO: 466966
  Synthetic oligonucleotide

SEQ ID NO: 607178 - DNA, 58 bp, Artificial; identical to SEQ ID NO: 466968
  Synthetic oligonucleotide

SEQ ID NO: 607179 - DNA, 60 bp, Artificial; identical to SEQ ID NO: 466969
  Synthetic oligonucleotide

SEQ ID NO: 607180 - DNA, 56 bp, Artificial; identical to SEQ ID NO: 17598
  Synthetic oligonucleotide

SEQ ID NO: 607181 - DNA, 60 bp, Artificial; identical to SEQ ID NO: 466971
  Synthetic oligonucleotide

SEQ ID NO: 607182 - DNA, 55 bp, Artificial; identical to SEQ ID NO: 466973
  Synthetic oligonucleotide

SEQ ID NO: 607183 - DNA, 55 bp, Artificial; identical to SEQ ID NO: 466976
  Synthetic oligonucleotide

SEQ ID NO: 607184 - DNA, 52 bp, Artificial; identical to SEQ ID NO: 466979
  Synthetic oligonucleotide

SEQ ID NO: 607185 - DNA, 60 bp, Artificial; identical to SEQ ID NO: 466981
  Synthetic oligonucleotide

SEQ ID NO: 607186 - DNA, 51 bp, Artificial; identical to SEQ ID NO: 466982
  Synthetic oligonucleotide

SEQ ID NO: 607187 - DNA, 55 bp, Artificial; identical to SEQ ID NO: 466983
  Synthetic oligonucleotide

SEQ ID NO: 607188 - DNA, 60 bp, Artificial; identical to SEQ ID NO: 466984
  Synthetic oligonucleotide

SEQ ID NO: 607189 - DNA, 60 bp, Artificial; identical to SEQ ID NO: 466985
  Synthetic oligonucleotide

SEQ ID NO: 607190 - DNA, 60 bp, Artificial; identical to SEQ ID NO: 466987
  Synthetic oligonucleotide

SEQ ID NO: 607191 - DNA, 60 bp, Artificial; identical to SEQ ID NO: 466993
  Synthetic oligonucleotide

SEQ ID NO: 607192 - DNA, 60 bp, Artificial; identical to SEQ ID NO: 466996
  Synthetic oligonucleotide

SEQ ID NO: 607193 - DNA, 56 bp, Artificial; identical to SEQ ID NO: 466998
  Synthetic oligonucleotide

SEQ ID NO: 607194 - DNA, 59 bp, Artificial; identical to SEQ ID NO: 467000
  Synthetic oligonucleotide

SEQ ID NO: 607195 - DNA, 60 bp, Artificial; identical to SEQ ID NO: 467002
  Synthetic oligonucleotide

SEQ ID NO: 607196 - DNA, 60 bp, Artificial; identical to SEQ ID NO: 467003
  Synthetic oligonucleotide

SEQ ID NO: 607197 - DNA, 55 bp, Artificial; identical to SEQ ID NO: 15581
  Synthetic oligonucleotide

SEQ ID NO: 607198 - DNA, 60 bp, Artificial; identical to SEQ ID NO: 467004
  Synthetic oligonucleotide

SEQ ID NO: 607199 - DNA, 57 bp, Artificial; identical to SEQ ID NO: 6525
  Synthetic oligonucleotide

SEQ ID NO: 607200 - DNA, 60 bp, Artificial; identical to SEQ ID NO: 467005
  Synthetic oligonucleotide

SEQ ID NO: 607201 - DNA, 50 bp, Artificial; identical to SEQ ID NO: 467007
  Synthetic oligonucleotide

SEQ ID NO: 607202 - DNA, 60 bp, Artificial; identical to SEQ ID NO: 467008
  Synthetic oligonucleotide

SEQ ID NO: 607203 - DNA, 55 bp, Artificial; identical to SEQ ID NO: 467011
  Synthetic oligonucleotide

SEQ ID NO: 607204 - DNA, 60 bp, Artificial; identical to SEQ ID NO: 467012
  Synthetic oligonucleotide

SEQ ID NO: 607205 - DNA, 60 bp, Artificial; identical to SEQ ID NO: 467019
  Synthetic oligonucleotide

SEQ ID NO: 607206 - DNA, 55 bp, Artificial; identical to SEQ ID NO: 467020
  Synthetic oligonucleotide

SEQ ID NO: 607207 - DNA, 55 bp, Artificial; identical to SEQ ID NO: 20273
  Synthetic oligonucleotide

SEQ ID NO: 607208 - DNA, 56 bp, Artificial; identical to SEQ ID NO: 467023
  Synthetic oligonucleotide

SEQ ID NO: 607209 - DNA, 60 bp, Artificial; identical to SEQ ID NO: 467027
  Synthetic oligonucleotide

SEQ ID NO: 607210 - DNA, 60 bp, Artificial; identical to SEQ ID NO: 467028
  Synthetic oligonucleotide

SEQ ID NO: 607211 - DNA, 54 bp, Artificial; identical to SEQ ID NO: 467029
  Synthetic oligonucleotide

SEQ ID NO: 607212 - DNA, 60 bp, Artificial; identical to SEQ ID NO: 467031
  Synthetic oligonucleotide

SEQ ID NO: 607213 - DNA, 53 bp, Artificial; identical to SEQ ID NO: 467035
  Synthetic oligonucleotide

SEQ ID NO: 607214 - DNA, 60 bp, Artificial; identical to SEQ ID NO: 467036
  Synthetic oligonucleotide

SEQ ID NO: 607215 - DNA, 60 bp, Artificial; identical to SEQ ID NO: 467039
  Synthetic oligonucleotide

SEQ ID NO: 607216 - DNA, 60 bp, Artificial; identical to SEQ ID NO: 467040
  Synthetic oligonucleotide

SEQ ID NO: 607217 - DNA, 57 bp, Artificial; identical to SEQ ID NO: 467041
  Synthetic oligonucleotide

SEQ ID NO: 607218 - DNA, 60 bp, Artificial; identical to SEQ ID NO: 467043
  Synthetic oligonucleotide

SEQ ID NO: 607219 - DNA, 58 bp, Artificial; identical to SEQ ID NO: 467049
  Synthetic oligonucleotide

SEQ ID NO: 607220 - DNA, 60 bp, Artificial; identical to SEQ ID NO: 467052
  Synthetic oligonucleotide

SEQ ID NO: 607221 - DNA, 60 bp, Artificial; identical to SEQ ID NO: 467054
  Synthetic oligonucleotide

SEQ ID NO: 607222 - DNA, 60 bp, Artificial; identical to SEQ ID NO: 67130
  Synthetic oligonucleotide

SEQ ID NO: 607223 - DNA, 51 bp, Artificial; identical to SEQ ID NO: 467056
  Synthetic oligonucleotide

SEQ ID NO: 607224 - DNA, 55 bp, Artificial; identical to SEQ ID NO: 467057
  Synthetic oligonucleotide

SEQ ID NO: 607225 - DNA, 53 bp, Artificial; identical to SEQ ID NO: 467058
  Synthetic oligonucleotide

SEQ ID NO: 607226 - DNA, 56 bp, Artificial; identical to SEQ ID NO: 467060
  Synthetic oligonucleotide

SEQ ID NO: 607227 - DNA, 54 bp, Artificial; identical to SEQ ID NO: 467061
  Synthetic oligonucleotide

SEQ ID NO: 607228 - DNA, 55 bp, Artificial; identical to SEQ ID NO: 467062
  Synthetic oligonucleotide

SEQ ID NO: 607229 - DNA, 60 bp, Artificial; identical to SEQ ID NO: 467064
  Synthetic oligonucleotide

SEQ ID NO: 607230 - DNA, 60 bp, Artificial; identical to SEQ ID NO: 467069
  Synthetic oligonucleotide

SEQ ID NO: 607231 - DNA, 60 bp, Artificial; identical to SEQ ID NO: 467070
  Synthetic oligonucleotide

SEQ ID NO: 607232 - DNA, 57 bp, Artificial; identical to SEQ ID NO: 467071
  Synthetic oligonucleotide

SEQ ID NO: 607233 - DNA, 60 bp, Artificial; identical to SEQ ID NO: 467073
  Synthetic oligonucleotide

SEQ ID NO: 607234 - DNA, 55 bp, Artificial; identical to SEQ ID NO: 467075
  Synthetic oligonucleotide

SEQ ID NO: 607235 - DNA, 57 bp, Artificial; identical to SEQ ID NO: 467078
  Synthetic oligonucleotide

SEQ ID NO: 607236 - DNA, 60 bp, Artificial; identical to SEQ ID NO: 467080
  Synthetic oligonucleotide

SEQ ID NO: 607237 - DNA, 60 bp, Artificial; identical to SEQ ID NO: 467081
  Synthetic oligonucleotide

SEQ ID NO: 607238 - DNA, 60 bp, Artificial; identical to SEQ ID NO: 467083
  Synthetic oligonucleotide

SEQ ID NO: 607239 - DNA, 54 bp, Artificial; identical to SEQ ID NO: 467086
  Synthetic oligonucleotide

SEQ ID NO: 607240 - DNA, 60 bp, Artificial; identical to SEQ ID NO: 9272
  Synthetic oligonucleotide

SEQ ID NO: 607241 - DNA, 60 bp, Artificial; identical to SEQ ID NO: 467091
  Synthetic oligonucleotide

SEQ ID NO: 607242 - DNA, 57 bp, Artificial; identical to SEQ ID NO: 467096
  Synthetic oligonucleotide

SEQ ID NO: 607243 - DNA, 58 bp, Artificial; identical to SEQ ID NO: 467099
  Synthetic oligonucleotide

SEQ ID NO: 607244 - DNA, 60 bp, Artificial; identical to SEQ ID NO: 467102
  Synthetic oligonucleotide

SEQ ID NO: 607245 - DNA, 57 bp, Artificial; identical to SEQ ID NO: 467104
  Synthetic oligonucleotide

SEQ ID NO: 607246 - DNA, 55 bp, Artificial; identical to SEQ ID NO: 467112
  Synthetic oligonucleotide

SEQ ID NO: 607247 - DNA, 60 bp, Artificial; identical to SEQ ID NO: 467120
  Synthetic oligonucleotide

SEQ ID NO: 607248 - DNA, 60 bp, Artificial; identical to SEQ ID NO: 467121
  Synthetic oligonucleotide

SEQ ID NO: 607249 - DNA, 60 bp, Artificial; identical to SEQ ID NO: 467125
  Synthetic oligonucleotide

SEQ ID NO: 607250 - DNA, 58 bp, Artificial; identical to SEQ ID NO: 467126
  Synthetic oligonucleotide

SEQ ID NO: 607251 - DNA, 59 bp, Artificial; identical to SEQ ID NO: 467133
  Synthetic oligonucleotide

SEQ ID NO: 607252 - DNA, 56 bp, Artificial; identical to SEQ ID NO: 467134
  Synthetic oligonucleotide

SEQ ID NO: 607253 - DNA, 60 bp, Artificial; identical to SEQ ID NO: 467135
  Synthetic oligonucleotide

SEQ ID NO: 607254 - DNA, 60 bp, Artificial; identical to SEQ ID NO: 467136
  Synthetic oligonucleotide

SEQ ID NO: 607255 - DNA, 55 bp, Artificial; identical to SEQ ID NO: 467139
  Synthetic oligonucleotide

SEQ ID NO: 607256 - DNA, 55 bp, Artificial; identical to SEQ ID NO: 467140
  Synthetic oligonucleotide

SEQ ID NO: 607257 - DNA, 59 bp, Artificial; identical to SEQ ID NO: 467143
  Synthetic oligonucleotide

SEQ ID NO: 607258 - DNA, 60 bp, Artificial; identical to SEQ ID NO: 467144
  Synthetic oligonucleotide

SEQ ID NO: 607259 - DNA, 60 bp, Artificial; identical to SEQ ID NO: 467145
  Synthetic oligonucleotide

SEQ ID NO: 607260 - DNA, 58 bp, Artificial; identical to SEQ ID NO: 467146
  Synthetic oligonucleotide

SEQ ID NO: 607261 - DNA, 52 bp, Artificial; identical to SEQ ID NO: 467148
  Synthetic oligonucleotide

SEQ ID NO: 607262 - DNA, 60 bp, Artificial; identical to SEQ ID NO: 467150
  Synthetic oligonucleotide

SEQ ID NO: 607263 - DNA, 57 bp, Artificial; identical to SEQ ID NO: 467151
  Synthetic oligonucleotide

SEQ ID NO: 607264 - DNA, 51 bp, Artificial; identical to SEQ ID NO: 467152
  Synthetic oligonucleotide

SEQ ID NO: 607265 - DNA, 55 bp, Artificial; identical to SEQ ID NO: 467155
  Synthetic oligonucleotide

SEQ ID NO: 607266 - DNA, 53 bp, Artificial; identical to SEQ ID NO: 467157
  Synthetic oligonucleotide

SEQ ID NO: 607267 - DNA, 58 bp, Artificial; identical to SEQ ID NO: 467158
  Synthetic oligonucleotide

SEQ ID NO: 607268 - DNA, 54 bp, Artificial; identical to SEQ ID NO: 6112
  Synthetic oligonucleotide

SEQ ID NO: 607269 - DNA, 55 bp, Artificial; identical to SEQ ID NO: 467160
  Synthetic oligonucleotide

SEQ ID NO: 607270 - DNA, 60 bp, Artificial; identical to SEQ ID NO: 467164
  Synthetic oligonucleotide

SEQ ID NO: 607271 - DNA, 55 bp, Artificial; identical to SEQ ID NO: 467166
  Synthetic oligonucleotide

SEQ ID NO: 607272 - DNA, 60 bp, Artificial; identical to SEQ ID NO: 15704
  Synthetic oligonucleotide

SEQ ID NO: 607273 - DNA, 55 bp, Artificial; identical to SEQ ID NO: 467171
  Synthetic oligonucleotide

SEQ ID NO: 607274 - DNA, 52 bp, Artificial; identical to SEQ ID NO: 467172
  Synthetic oligonucleotide

SEQ ID NO: 607275 - DNA, 51 bp, Artificial; identical to SEQ ID NO: 467175
  Synthetic oligonucleotide

SEQ ID NO: 607276 - DNA, 60 bp, Artificial; identical to SEQ ID NO: 467176
  Synthetic oligonucleotide

SEQ ID NO: 607277 - DNA, 54 bp, Artificial; identical to SEQ ID NO: 467181
  Synthetic oligonucleotide

SEQ ID NO: 607278 - DNA, 60 bp, Artificial; identical to SEQ ID NO: 467183
  Synthetic oligonucleotide

SEQ ID NO: 607279 - DNA, 60 bp, Artificial; identical to SEQ ID NO: 467185
  Synthetic oligonucleotide

SEQ ID NO: 607280 - DNA, 55 bp, Artificial; identical to SEQ ID NO: 467186
  Synthetic oligonucleotide

SEQ ID NO: 607281 - DNA, 59 bp, Artificial; identical to SEQ ID NO: 467187
  Synthetic oligonucleotide

SEQ ID NO: 607282 - DNA, 50 bp, Artificial; identical to SEQ ID NO: 467189
  Synthetic oligonucleotide

SEQ ID NO: 607283 - DNA, 55 bp, Artificial; identical to SEQ ID NO: 467194
  Synthetic oligonucleotide

SEQ ID NO: 607284 - DNA, 60 bp, Artificial; identical to SEQ ID NO: 467195
  Synthetic oligonucleotide

SEQ ID NO: 607285 - DNA, 60 bp, Artificial; identical to SEQ ID NO: 467197
  Synthetic oligonucleotide

SEQ ID NO: 607286 - DNA, 52 bp, Artificial; identical to SEQ ID NO: 467198
  Synthetic oligonucleotide

SEQ ID NO: 607287 - DNA, 55 bp, Artificial; identical to SEQ ID NO: 467200
  Synthetic oligonucleotide

SEQ ID NO: 607288 - DNA, 56 bp, Artificial; identical to SEQ ID NO: 467203
  Synthetic oligonucleotide

SEQ ID NO: 607289 - DNA, 60 bp, Artificial; identical to SEQ ID NO: 467207
  Synthetic oligonucleotide

SEQ ID NO: 607290 - DNA, 55 bp, Artificial; identical to SEQ ID NO: 467208
  Synthetic oligonucleotide

SEQ ID NO: 607291 - DNA, 60 bp, Artificial; identical to SEQ ID NO: 467210
  Synthetic oligonucleotide

SEQ ID NO: 607292 - DNA, 60 bp, Artificial; identical to SEQ ID NO: 467211
  Synthetic oligonucleotide

SEQ ID NO: 607293 - DNA, 58 bp, Artificial; identical to SEQ ID NO: 467213
  Synthetic oligonucleotide

SEQ ID NO: 607294 - DNA, 60 bp, Artificial; identical to SEQ ID NO: 467214
  Synthetic oligonucleotide

SEQ ID NO: 607295 - DNA, 57 bp, Artificial; identical to SEQ ID NO: 467218
  Synthetic oligonucleotide

SEQ ID NO: 607296 - DNA, 52 bp, Artificial; identical to SEQ ID NO: 467224
  Synthetic oligonucleotide

SEQ ID NO: 607297 - DNA, 56 bp, Artificial; identical to SEQ ID NO: 16689
  Synthetic oligonucleotide

SEQ ID NO: 607298 - DNA, 56 bp, Artificial; identical to SEQ ID NO: 467227
  Synthetic oligonucleotide

SEQ ID NO: 607299 - DNA, 51 bp, Artificial; identical to SEQ ID NO: 467228
  Synthetic oligonucleotide

SEQ ID NO: 607300 - DNA, 58 bp, Artificial; identical to SEQ ID NO: 467229
  Synthetic oligonucleotide

SEQ ID NO: 607301 - DNA, 57 bp, Artificial; identical to SEQ ID NO: 467230
  Synthetic oligonucleotide

SEQ ID NO: 607302 - DNA, 50 bp, Artificial; identical to SEQ ID NO: 467232
  Synthetic oligonucleotide

SEQ ID NO: 607303 - DNA, 60 bp, Artificial; identical to SEQ ID NO: 467235
  Synthetic oligonucleotide

SEQ ID NO: 607304 - DNA, 59 bp, Artificial; identical to SEQ ID NO: 467237
  Synthetic oligonucleotide

SEQ ID NO: 607305 - DNA, 55 bp, Artificial; identical to SEQ ID NO: 467238
  Synthetic oligonucleotide

SEQ ID NO: 607306 - DNA, 54 bp, Artificial; identical to SEQ ID NO: 467239
  Synthetic oligonucleotide

SEQ ID NO: 607307 - DNA, 51 bp, Artificial; identical to SEQ ID NO: 467242
  Synthetic oligonucleotide

SEQ ID NO: 607308 - DNA, 50 bp, Artificial; identical to SEQ ID NO: 467250
  Synthetic oligonucleotide

SEQ ID NO: 607309 - DNA, 60 bp, Artificial; identical to SEQ ID NO: 467253
  Synthetic oligonucleotide

SEQ ID NO: 607310 - DNA, 60 bp, Artificial; identical to SEQ ID NO: 467255
  Synthetic oligonucleotide

SEQ ID NO: 607311 - DNA, 50 bp, Artificial; identical to SEQ ID NO: 467259
  Synthetic oligonucleotide

SEQ ID NO: 607312 - DNA, 60 bp, Artificial; identical to SEQ ID NO: 467262
  Synthetic oligonucleotide

SEQ ID NO: 607313 - DNA, 55 bp, Artificial; identical to SEQ ID NO: 467265
  Synthetic oligonucleotide

SEQ ID NO: 607314 - DNA, 58 bp, Artificial; identical to SEQ ID NO: 467266
  Synthetic oligonucleotide

SEQ ID NO: 607315 - DNA, 60 bp, Artificial; identical to SEQ ID NO: 467270
  Synthetic oligonucleotide

SEQ ID NO: 607316 - DNA, 60 bp, Artificial; identical to SEQ ID NO: 467273
  Synthetic oligonucleotide

SEQ ID NO: 607317 - DNA, 60 bp, Artificial; identical to SEQ ID NO: 467279
  Synthetic oligonucleotide

SEQ ID NO: 607318 - DNA, 58 bp, Artificial; identical to SEQ ID NO: 467280
  Synthetic oligonucleotide

SEQ ID NO: 607319 - DNA, 58 bp, Artificial; identical to SEQ ID NO: 467281
  Synthetic oligonucleotide

SEQ ID NO: 607320 - DNA, 55 bp, Artificial; identical to SEQ ID NO: 467284
  Synthetic oligonucleotide

SEQ ID NO: 607321 - DNA, 60 bp, Artificial; identical to SEQ ID NO: 467286
  Synthetic oligonucleotide

SEQ ID NO: 607322 - DNA, 55 bp, Artificial; identical to SEQ ID NO: 467289
  Synthetic oligonucleotide

SEQ ID NO: 607323 - DNA, 55 bp, Artificial; identical to SEQ ID NO: 467292
  Synthetic oligonucleotide

SEQ ID NO: 607324 - DNA, 60 bp, Artificial; identical to SEQ ID NO: 467293
  Synthetic oligonucleotide

SEQ ID NO: 607325 - DNA, 60 bp, Artificial; identical to SEQ ID NO: 467296
  Synthetic oligonucleotide

SEQ ID NO: 607326 - DNA, 54 bp, Artificial; identical to SEQ ID NO: 467298
  Synthetic oligonucleotide

SEQ ID NO: 607327 - DNA, 60 bp, Artificial; identical to SEQ ID NO: 467299
  Synthetic oligonucleotide

SEQ ID NO: 607328 - DNA, 58 bp, Artificial; identical to SEQ ID NO: 467300
  Synthetic oligonucleotide

SEQ ID NO: 607329 - DNA, 60 bp, Artificial; identical to SEQ ID NO: 467303
  Synthetic oligonucleotide

SEQ ID NO: 607330 - DNA, 60 bp, Artificial; identical to SEQ ID NO: 467311
  Synthetic oligonucleotide

SEQ ID NO: 607331 - DNA, 54 bp, Artificial; identical to SEQ ID NO: 467312
  Synthetic oligonucleotide

SEQ ID NO: 607332 - DNA, 58 bp, Artificial; identical to SEQ ID NO: 467320
  Synthetic oligonucleotide

SEQ ID NO: 607333 - DNA, 60 bp, Artificial; identical to SEQ ID NO: 467322
  Synthetic oligonucleotide

SEQ ID NO: 607334 - DNA, 50 bp, Artificial; identical to SEQ ID NO: 467323
  Synthetic oligonucleotide

SEQ ID NO: 607335 - DNA, 60 bp, Artificial; identical to SEQ ID NO: 467327
  Synthetic oligonucleotide

SEQ ID NO: 607336 - DNA, 54 bp, Artificial; identical to SEQ ID NO: 467328
  Synthetic oligonucleotide

SEQ ID NO: 607337 - DNA, 60 bp, Artificial; identical to SEQ ID NO: 467329
  Synthetic oligonucleotide

SEQ ID NO: 607338 - DNA, 58 bp, Artificial; identical to SEQ ID NO: 467330
  Synthetic oligonucleotide

SEQ ID NO: 607339 - DNA, 57 bp, Artificial; identical to SEQ ID NO: 467335
  Synthetic oligonucleotide

SEQ ID NO: 607340 - DNA, 55 bp, Artificial; identical to SEQ ID NO: 467337
  Synthetic oligonucleotide

SEQ ID NO: 607341 - DNA, 60 bp, Artificial; identical to SEQ ID NO: 467341
  Synthetic oligonucleotide

SEQ ID NO: 607342 - DNA, 60 bp, Artificial; identical to SEQ ID NO: 467342
  Synthetic oligonucleotide

SEQ ID NO: 607343 - DNA, 54 bp, Artificial; identical to SEQ ID NO: 467343
  Synthetic oligonucleotide

SEQ ID NO: 607344 - DNA, 55 bp, Artificial; identical to SEQ ID NO: 467344
  Synthetic oligonucleotide

SEQ ID NO: 607345 - DNA, 60 bp, Artificial; identical to SEQ ID NO: 11431
  Synthetic oligonucleotide

SEQ ID NO: 607346 - DNA, 60 bp, Artificial; identical to SEQ ID NO: 467347
  Synthetic oligonucleotide

SEQ ID NO: 607347 - DNA, 57 bp, Artificial; identical to SEQ ID NO: 467350
  Synthetic oligonucleotide

SEQ ID NO: 607348 - DNA, 56 bp, Artificial; identical to SEQ ID NO: 467351
  Synthetic oligonucleotide

SEQ ID NO: 607349 - DNA, 60 bp, Artificial; identical to SEQ ID NO: 467354
  Synthetic oligonucleotide

SEQ ID NO: 607350 - DNA, 56 bp, Artificial; identical to SEQ ID NO: 16610
  Synthetic oligonucleotide

SEQ ID NO: 607351 - DNA, 60 bp, Artificial; identical to SEQ ID NO: 467361
  Synthetic oligonucleotide

SEQ ID NO: 607352 - DNA, 54 bp, Artificial; identical to SEQ ID NO: 467364
  Synthetic oligonucleotide

SEQ ID NO: 607353 - DNA, 57 bp, Artificial; identical to SEQ ID NO: 467365
  Synthetic oligonucleotide

SEQ ID NO: 607354 - DNA, 60 bp, Artificial; identical to SEQ ID NO: 467368
  Synthetic oligonucleotide

SEQ ID NO: 607355 - DNA, 54 bp, Artificial; identical to SEQ ID NO: 467371
  Synthetic oligonucleotide

SEQ ID NO: 607356 - DNA, 60 bp, Artificial; identical to SEQ ID NO: 467372
  Synthetic oligonucleotide

SEQ ID NO: 607357 - DNA, 60 bp, Artificial; identical to SEQ ID NO: 467374
  Synthetic oligonucleotide

SEQ ID NO: 607358 - DNA, 58 bp, Artificial; identical to SEQ ID NO: 467377
  Synthetic oligonucleotide

SEQ ID NO: 607359 - DNA, 57 bp, Artificial; identical to SEQ ID NO: 467379
  Synthetic oligonucleotide

SEQ ID NO: 607360 - DNA, 60 bp, Artificial; identical to SEQ ID NO: 467380
  Synthetic oligonucleotide

SEQ ID NO: 607361 - DNA, 60 bp, Artificial; identical to SEQ ID NO: 467383
  Synthetic oligonucleotide

SEQ ID NO: 607362 - DNA, 55 bp, Artificial; identical to SEQ ID NO: 467387
  Synthetic oligonucleotide

SEQ ID NO: 607363 - DNA, 55 bp, Artificial; identical to SEQ ID NO: 467389
  Synthetic oligonucleotide

SEQ ID NO: 607364 - DNA, 58 bp, Artificial; identical to SEQ ID NO: 467390
  Synthetic oligonucleotide

SEQ ID NO: 607365 - DNA, 60 bp, Artificial; identical to SEQ ID NO: 467391
  Synthetic oligonucleotide

SEQ ID NO: 607366 - DNA, 60 bp, Artificial; identical to SEQ ID NO: 88989
  Synthetic oligonucleotide

SEQ ID NO: 607367 - DNA, 60 bp, Artificial; identical to SEQ ID NO: 467393
  Synthetic oligonucleotide

SEQ ID NO: 607368 - DNA, 57 bp, Artificial; identical to SEQ ID NO: 467394
  Synthetic oligonucleotide

SEQ ID NO: 607369 - DNA, 58 bp, Artificial; identical to SEQ ID NO: 467396
  Synthetic oligonucleotide

SEQ ID NO: 607370 - DNA, 60 bp, Artificial; identical to SEQ ID NO: 467399
  Synthetic oligonucleotide

SEQ ID NO: 607371 - DNA, 55 bp, Artificial; identical to SEQ ID NO: 467404
  Synthetic oligonucleotide

SEQ ID NO: 607372 - DNA, 60 bp, Artificial; identical to SEQ ID NO: 29880
  Synthetic oligonucleotide

SEQ ID NO: 607373 - DNA, 51 bp, Artificial; identical to SEQ ID NO: 467418
  Synthetic oligonucleotide

SEQ ID NO: 607374 - DNA, 60 bp, Artificial; identical to SEQ ID NO: 467422
  Synthetic oligonucleotide

SEQ ID NO: 607375 - DNA, 60 bp, Artificial; identical to SEQ ID NO: 467424
  Synthetic oligonucleotide

SEQ ID NO: 607376 - DNA, 60 bp, Artificial; identical to SEQ ID NO: 467425
  Synthetic oligonucleotide

SEQ ID NO: 607377 - DNA, 54 bp, Artificial; identical to SEQ ID NO: 467426
  Synthetic oligonucleotide

SEQ ID NO: 607378 - DNA, 60 bp, Artificial; identical to SEQ ID NO: 467429
  Synthetic oligonucleotide

SEQ ID NO: 607379 - DNA, 60 bp, Artificial; identical to SEQ ID NO: 467431
  Synthetic oligonucleotide

SEQ ID NO: 607380 - DNA, 60 bp, Artificial; identical to SEQ ID NO: 467435
  Synthetic oligonucleotide

SEQ ID NO: 607381 - DNA, 60 bp, Artificial; identical to SEQ ID NO: 467436
  Synthetic oligonucleotide

SEQ ID NO: 607382 - DNA, 60 bp, Artificial; identical to SEQ ID NO: 467439
  Synthetic oligonucleotide

SEQ ID NO: 607383 - DNA, 54 bp, Artificial; identical to SEQ ID NO: 467441
  Synthetic oligonucleotide

SEQ ID NO: 607384 - DNA, 60 bp, Artificial; identical to SEQ ID NO: 467447
  Synthetic oligonucleotide

SEQ ID NO: 607385 - DNA, 60 bp, Artificial; identical to SEQ ID NO: 467448
  Synthetic oligonucleotide

SEQ ID NO: 607386 - DNA, 55 bp, Artificial; identical to SEQ ID NO: 467450
  Synthetic oligonucleotide

SEQ ID NO: 607387 - DNA, 60 bp, Artificial; identical to SEQ ID NO: 467454
  Synthetic oligonucleotide

SEQ ID NO: 607388 - DNA, 58 bp, Artificial; identical to SEQ ID NO: 467455
  Synthetic oligonucleotide

SEQ ID NO: 607389 - DNA, 60 bp, Artificial; identical to SEQ ID NO: 467457
  Synthetic oligonucleotide

SEQ ID NO: 607390 - DNA, 54 bp, Artificial; identical to SEQ ID NO: 467459
  Synthetic oligonucleotide

SEQ ID NO: 607391 - DNA, 60 bp, Artificial; identical to SEQ ID NO: 467461
  Synthetic oligonucleotide

SEQ ID NO: 607392 - DNA, 60 bp, Artificial; identical to SEQ ID NO: 6687
  Synthetic oligonucleotide

SEQ ID NO: 607393 - DNA, 60 bp, Artificial; identical to SEQ ID NO: 467467
  Synthetic oligonucleotide

SEQ ID NO: 607394 - DNA, 60 bp, Artificial; identical to SEQ ID NO: 467468
  Synthetic oligonucleotide

SEQ ID NO: 607395 - DNA, 57 bp, Artificial; identical to SEQ ID NO: 467470
  Synthetic oligonucleotide

SEQ ID NO: 607396 - DNA, 60 bp, Artificial; identical to SEQ ID NO: 467473
  Synthetic oligonucleotide

SEQ ID NO: 607397 - DNA, 56 bp, Artificial; identical to SEQ ID NO: 467479
  Synthetic oligonucleotide

SEQ ID NO: 607398 - DNA, 51 bp, Artificial; identical to SEQ ID NO: 467480
  Synthetic oligonucleotide

SEQ ID NO: 607399 - DNA, 55 bp, Artificial; identical to SEQ ID NO: 467489
  Synthetic oligonucleotide

SEQ ID NO: 607400 - DNA, 60 bp, Artificial; identical to SEQ ID NO: 467490
  Synthetic oligonucleotide

SEQ ID NO: 607401 - DNA, 59 bp, Artificial; identical to SEQ ID NO: 467491
  Synthetic oligonucleotide

SEQ ID NO: 607402 - DNA, 60 bp, Artificial; identical to SEQ ID NO: 467492
  Synthetic oligonucleotide

SEQ ID NO: 607403 - DNA, 57 bp, Artificial; identical to SEQ ID NO: 467493
  Synthetic oligonucleotide

SEQ ID NO: 607404 - DNA, 60 bp, Artificial; identical to SEQ ID NO: 467495
  Synthetic oligonucleotide

SEQ ID NO: 607405 - DNA, 55 bp, Artificial; identical to SEQ ID NO: 467496
  Synthetic oligonucleotide

SEQ ID NO: 607406 - DNA, 58 bp, Artificial; identical to SEQ ID NO: 467499
  Synthetic oligonucleotide

SEQ ID NO: 607407 - DNA, 55 bp, Artificial; identical to SEQ ID NO: 467500
  Synthetic oligonucleotide

SEQ ID NO: 607408 - DNA, 60 bp, Artificial; identical to SEQ ID NO: 467501
  Synthetic oligonucleotide

SEQ ID NO: 607409 - DNA, 54 bp, Artificial; identical to SEQ ID NO: 467503
  Synthetic oligonucleotide

SEQ ID NO: 607410 - DNA, 55 bp, Artificial; identical to SEQ ID NO: 467504
  Synthetic oligonucleotide

SEQ ID NO: 607411 - DNA, 55 bp, Artificial; identical to SEQ ID NO: 467505
  Synthetic oligonucleotide

SEQ ID NO: 607412 - DNA, 54 bp, Artificial; identical to SEQ ID NO: 467506
  Synthetic oligonucleotide

SEQ ID NO: 607413 - DNA, 60 bp, Artificial; identical to SEQ ID NO: 467507
  Synthetic oligonucleotide

SEQ ID NO: 607414 - DNA, 60 bp, Artificial; identical to SEQ ID NO: 467508
  Synthetic oligonucleotide

SEQ ID NO: 607415 - DNA, 60 bp, Artificial; identical to SEQ ID NO: 467509
  Synthetic oligonucleotide

SEQ ID NO: 607416 - DNA, 55 bp, Artificial; identical to SEQ ID NO: 467510
  Synthetic oligonucleotide

SEQ ID NO: 607417 - DNA, 53 bp, Artificial; identical to SEQ ID NO: 467511
  Synthetic oligonucleotide

SEQ ID NO: 607418 - DNA, 50 bp, Artificial; identical to SEQ ID NO: 467512
  Synthetic oligonucleotide

SEQ ID NO: 607419 - DNA, 60 bp, Artificial; identical to SEQ ID NO: 467513
  Synthetic oligonucleotide

SEQ ID NO: 607420 - DNA, 55 bp, Artificial; identical to SEQ ID NO: 467516
  Synthetic oligonucleotide

SEQ ID NO: 607421 - DNA, 60 bp, Artificial; identical to SEQ ID NO: 467517
  Synthetic oligonucleotide

SEQ ID NO: 607422 - DNA, 60 bp, Artificial; identical to SEQ ID NO: 467518
  Synthetic oligonucleotide

SEQ ID NO: 607423 - DNA, 60 bp, Artificial; identical to SEQ ID NO: 467527
  Synthetic oligonucleotide

SEQ ID NO: 607424 - DNA, 60 bp, Artificial; identical to SEQ ID NO: 467528
  Synthetic oligonucleotide

SEQ ID NO: 607425 - DNA, 51 bp, Artificial; identical to SEQ ID NO: 467531
  Synthetic oligonucleotide

SEQ ID NO: 607426 - DNA, 52 bp, Artificial; identical to SEQ ID NO: 467532
  Synthetic oligonucleotide

SEQ ID NO: 607427 - DNA, 55 bp, Artificial; identical to SEQ ID NO: 7814
  Synthetic oligonucleotide

SEQ ID NO: 607428 - DNA, 60 bp, Artificial; identical to SEQ ID NO: 467535
  Synthetic oligonucleotide

SEQ ID NO: 607429 - DNA, 53 bp, Artificial; identical to SEQ ID NO: 467536
  Synthetic oligonucleotide

SEQ ID NO: 607430 - DNA, 58 bp, Artificial; identical to SEQ ID NO: 467537
  Synthetic oligonucleotide

SEQ ID NO: 607431 - DNA, 60 bp, Artificial; identical to SEQ ID NO: 467538
  Synthetic oligonucleotide

SEQ ID NO: 607432 - DNA, 51 bp, Artificial; identical to SEQ ID NO: 10031
  Synthetic oligonucleotide

SEQ ID NO: 607433 - DNA, 57 bp, Artificial; identical to SEQ ID NO: 467540
  Synthetic oligonucleotide

SEQ ID NO: 607434 - DNA, 57 bp, Artificial; identical to SEQ ID NO: 467544
  Synthetic oligonucleotide

SEQ ID NO: 607435 - DNA, 60 bp, Artificial; identical to SEQ ID NO: 467546
  Synthetic oligonucleotide

SEQ ID NO: 607436 - DNA, 60 bp, Artificial; identical to SEQ ID NO: 467548
  Synthetic oligonucleotide

SEQ ID NO: 607437 - DNA, 58 bp, Artificial; identical to SEQ ID NO: 467556
  Synthetic oligonucleotide

SEQ ID NO: 607438 - DNA, 60 bp, Artificial; identical to SEQ ID NO: 467557
  Synthetic oligonucleotide

SEQ ID NO: 607439 - DNA, 60 bp, Artificial; identical to SEQ ID NO: 467559
  Synthetic oligonucleotide

SEQ ID NO: 607440 - DNA, 60 bp, Artificial; identical to SEQ ID NO: 467560
  Synthetic oligonucleotide

SEQ ID NO: 607441 - DNA, 60 bp, Artificial; identical to SEQ ID NO: 467565
  Synthetic oligonucleotide

SEQ ID NO: 607442 - DNA, 60 bp, Artificial; identical to SEQ ID NO: 467568
  Synthetic oligonucleotide

SEQ ID NO: 607443 - DNA, 60 bp, Artificial; identical to SEQ ID NO: 467569
  Synthetic oligonucleotide

SEQ ID NO: 607444 - DNA, 60 bp, Artificial; identical to SEQ ID NO: 467572
  Synthetic oligonucleotide

SEQ ID NO: 607445 - DNA, 60 bp, Artificial; identical to SEQ ID NO: 467573
  Synthetic oligonucleotide

SEQ ID NO: 607446 - DNA, 60 bp, Artificial; identical to SEQ ID NO: 467575
  Synthetic oligonucleotide

SEQ ID NO: 607447 - DNA, 53 bp, Artificial; identical to SEQ ID NO: 467581
  Synthetic oligonucleotide

SEQ ID NO: 607448 - DNA, 60 bp, Artificial; identical to SEQ ID NO: 467583
  Synthetic oligonucleotide

SEQ ID NO: 607449 - DNA, 54 bp, Artificial; identical to SEQ ID NO: 467585
  Synthetic oligonucleotide

SEQ ID NO: 607450 - DNA, 53 bp, Artificial; identical to SEQ ID NO: 467589
  Synthetic oligonucleotide

SEQ ID NO: 607451 - DNA, 60 bp, Artificial; identical to SEQ ID NO: 467590
  Synthetic oligonucleotide

SEQ ID NO: 607452 - DNA, 58 bp, Artificial; identical to SEQ ID NO: 467591
  Synthetic oligonucleotide

SEQ ID NO: 607453 - DNA, 60 bp, Artificial; identical to SEQ ID NO: 467593
  Synthetic oligonucleotide

SEQ ID NO: 607454 - DNA, 60 bp, Artificial; identical to SEQ ID NO: 467595
  Synthetic oligonucleotide

SEQ ID NO: 607455 - DNA, 57 bp, Artificial; identical to SEQ ID NO: 467601
  Synthetic oligonucleotide

SEQ ID NO: 607456 - DNA, 55 bp, Artificial; identical to SEQ ID NO: 467602
  Synthetic oligonucleotide

SEQ ID NO: 607457 - DNA, 53 bp, Artificial; identical to SEQ ID NO: 467603
  Synthetic oligonucleotide

SEQ ID NO: 607458 - DNA, 55 bp, Artificial; identical to SEQ ID NO: 467604
  Synthetic oligonucleotide

SEQ ID NO: 607459 - DNA, 60 bp, Artificial; identical to SEQ ID NO: 467607
  Synthetic oligonucleotide

SEQ ID NO: 607460 - DNA, 56 bp, Artificial; identical to SEQ ID NO: 467609
  Synthetic oligonucleotide

SEQ ID NO: 607461 - DNA, 55 bp, Artificial; identical to SEQ ID NO: 467610
  Synthetic oligonucleotide

SEQ ID NO: 607462 - DNA, 60 bp, Artificial; identical to SEQ ID NO: 467611
  Synthetic oligonucleotide

SEQ ID NO: 607463 - DNA, 60 bp, Artificial; identical to SEQ ID NO: 467612
  Synthetic oligonucleotide

SEQ ID NO: 607464 - DNA, 60 bp, Artificial; identical to SEQ ID NO: 85250
  Synthetic oligonucleotide

SEQ ID NO: 607465 - DNA, 60 bp, Artificial; identical to SEQ ID NO: 467613
  Synthetic oligonucleotide

SEQ ID NO: 607466 - DNA, 54 bp, Artificial; identical to SEQ ID NO: 467617
  Synthetic oligonucleotide

SEQ ID NO: 607467 - DNA, 60 bp, Artificial; identical to SEQ ID NO: 467621
  Synthetic oligonucleotide

SEQ ID NO: 607468 - DNA, 60 bp, Artificial; identical to SEQ ID NO: 467623
  Synthetic oligonucleotide

SEQ ID NO: 607469 - DNA, 60 bp, Artificial; identical to SEQ ID NO: 467624
  Synthetic oligonucleotide

SEQ ID NO: 607470 - DNA, 56 bp, Artificial; identical to SEQ ID NO: 467625
  Synthetic oligonucleotide

SEQ ID NO: 607471 - DNA, 55 bp, Artificial; identical to SEQ ID NO: 467626
  Synthetic oligonucleotide

SEQ ID NO: 607472 - DNA, 60 bp, Artificial; identical to SEQ ID NO: 467627
  Synthetic oligonucleotide

SEQ ID NO: 607473 - DNA, 60 bp, Artificial; identical to SEQ ID NO: 467629
  Synthetic oligonucleotide

SEQ ID NO: 607474 - DNA, 60 bp, Artificial; identical to SEQ ID NO: 467633
  Synthetic oligonucleotide

SEQ ID NO: 607475 - DNA, 60 bp, Artificial; identical to SEQ ID NO: 467635
  Synthetic oligonucleotide

SEQ ID NO: 607476 - DNA, 60 bp, Artificial; identical to SEQ ID NO: 467639
  Synthetic oligonucleotide

SEQ ID NO: 607477 - DNA, 60 bp, Artificial; identical to SEQ ID NO: 467640
  Synthetic oligonucleotide

SEQ ID NO: 607478 - DNA, 60 bp, Artificial; identical to SEQ ID NO: 467641
  Synthetic oligonucleotide

SEQ ID NO: 607479 - DNA, 55 bp, Artificial; identical to SEQ ID NO: 467642
  Synthetic oligonucleotide

SEQ ID NO: 607480 - DNA, 55 bp, Artificial; identical to SEQ ID NO: 467644
  Synthetic oligonucleotide

SEQ ID NO: 607481 - DNA, 55 bp, Artificial; identical to SEQ ID NO: 467647
  Synthetic oligonucleotide

SEQ ID NO: 607482 - DNA, 58 bp, Artificial; identical to SEQ ID NO: 467648
  Synthetic oligonucleotide

SEQ ID NO: 607483 - DNA, 55 bp, Artificial; identical to SEQ ID NO: 467651
  Synthetic oligonucleotide

SEQ ID NO: 607484 - DNA, 60 bp, Artificial; identical to SEQ ID NO: 467653
  Synthetic oligonucleotide

SEQ ID NO: 607485 - DNA, 60 bp, Artificial; identical to SEQ ID NO: 467654
  Synthetic oligonucleotide

SEQ ID NO: 607486 - DNA, 56 bp, Artificial; identical to SEQ ID NO: 467655
  Synthetic oligonucleotide

SEQ ID NO: 607487 - DNA, 60 bp, Artificial; identical to SEQ ID NO: 467656
  Synthetic oligonucleotide

SEQ ID NO: 607488 - DNA, 60 bp, Artificial; identical to SEQ ID NO: 467657
  Synthetic oligonucleotide

SEQ ID NO: 607489 - DNA, 60 bp, Artificial; identical to SEQ ID NO: 467658
  Synthetic oligonucleotide

SEQ ID NO: 607490 - DNA, 60 bp, Artificial; identical to SEQ ID NO: 467664
  Synthetic oligonucleotide

SEQ ID NO: 607491 - DNA, 60 bp, Artificial; identical to SEQ ID NO: 467668
  Synthetic oligonucleotide

SEQ ID NO: 607492 - DNA, 55 bp, Artificial; identical to SEQ ID NO: 467669
  Synthetic oligonucleotide

SEQ ID NO: 607493 - DNA, 53 bp, Artificial; identical to SEQ ID NO: 467670
  Synthetic oligonucleotide

SEQ ID NO: 607494 - DNA, 56 bp, Artificial; identical to SEQ ID NO: 467672
  Synthetic oligonucleotide

SEQ ID NO: 607495 - DNA, 51 bp, Artificial; identical to SEQ ID NO: 467675
  Synthetic oligonucleotide

SEQ ID NO: 607496 - DNA, 60 bp, Artificial; identical to SEQ ID NO: 467677
  Synthetic oligonucleotide

SEQ ID NO: 607497 - DNA, 55 bp, Artificial; identical to SEQ ID NO: 467678
  Synthetic oligonucleotide

SEQ ID NO: 607498 - DNA, 60 bp, Artificial; identical to SEQ ID NO: 467682
  Synthetic oligonucleotide

SEQ ID NO: 607499 - DNA, 60 bp, Artificial; identical to SEQ ID NO: 467685
  Synthetic oligonucleotide

SEQ ID NO: 607500 - DNA, 51 bp, Artificial; identical to SEQ ID NO: 467687
  Synthetic oligonucleotide

SEQ ID NO: 607501 - DNA, 60 bp, Artificial; identical to SEQ ID NO: 467692
  Synthetic oligonucleotide

SEQ ID NO: 607502 - DNA, 59 bp, Artificial; identical to SEQ ID NO: 467694
  Synthetic oligonucleotide

SEQ ID NO: 607503 - DNA, 55 bp, Artificial; identical to SEQ ID NO: 467697
  Synthetic oligonucleotide

SEQ ID NO: 607504 - DNA, 59 bp, Artificial; identical to SEQ ID NO: 467698
  Synthetic oligonucleotide

SEQ ID NO: 607505 - DNA, 60 bp, Artificial; identical to SEQ ID NO: 467700
  Synthetic oligonucleotide

SEQ ID NO: 607506 - DNA, 56 bp, Artificial; identical to SEQ ID NO: 467702
  Synthetic oligonucleotide

SEQ ID NO: 607507 - DNA, 51 bp, Artificial; identical to SEQ ID NO: 467706
  Synthetic oligonucleotide

SEQ ID NO: 607508 - DNA, 53 bp, Artificial; identical to SEQ ID NO: 467708
  Synthetic oligonucleotide

SEQ ID NO: 607509 - DNA, 55 bp, Artificial; identical to SEQ ID NO: 467710
  Synthetic oligonucleotide

SEQ ID NO: 607510 - DNA, 58 bp, Artificial; identical to SEQ ID NO: 19663
  Synthetic oligonucleotide

SEQ ID NO: 607511 - DNA, 60 bp, Artificial; identical to SEQ ID NO: 467716
  Synthetic oligonucleotide

SEQ ID NO: 607512 - DNA, 59 bp, Artificial; identical to SEQ ID NO: 467718
  Synthetic oligonucleotide

SEQ ID NO: 607513 - DNA, 55 bp, Artificial; identical to SEQ ID NO: 467723
  Synthetic oligonucleotide

SEQ ID NO: 607514 - DNA, 60 bp, Artificial; identical to SEQ ID NO: 467725
  Synthetic oligonucleotide

SEQ ID NO: 607515 - DNA, 58 bp, Artificial; identical to SEQ ID NO: 467727
  Synthetic oligonucleotide

SEQ ID NO: 607516 - DNA, 58 bp, Artificial; identical to SEQ ID NO: 467734
  Synthetic oligonucleotide

SEQ ID NO: 607517 - DNA, 60 bp, Artificial; identical to SEQ ID NO: 467736
  Synthetic oligonucleotide

SEQ ID NO: 607518 - DNA, 58 bp, Artificial; identical to SEQ ID NO: 467737
  Synthetic oligonucleotide

SEQ ID NO: 607519 - DNA, 58 bp, Artificial; identical to SEQ ID NO: 467738
  Synthetic oligonucleotide

SEQ ID NO: 607520 - DNA, 60 bp, Artificial; identical to SEQ ID NO: 467745
  Synthetic oligonucleotide

SEQ ID NO: 607521 - DNA, 60 bp, Artificial; identical to SEQ ID NO: 467747
  Synthetic oligonucleotide

SEQ ID NO: 607522 - DNA, 60 bp, Artificial; identical to SEQ ID NO: 467748
  Synthetic oligonucleotide

SEQ ID NO: 607523 - DNA, 55 bp, Artificial; identical to SEQ ID NO: 467750
  Synthetic oligonucleotide

SEQ ID NO: 607524 - DNA, 59 bp, Artificial; identical to SEQ ID NO: 467751
  Synthetic oligonucleotide

SEQ ID NO: 607525 - DNA, 60 bp, Artificial; identical to SEQ ID NO: 467754
  Synthetic oligonucleotide

SEQ ID NO: 607526 - DNA, 53 bp, Artificial; identical to SEQ ID NO: 467755
  Synthetic oligonucleotide

SEQ ID NO: 607527 - DNA, 60 bp, Artificial; identical to SEQ ID NO: 467757
  Synthetic oligonucleotide

SEQ ID NO: 607528 - DNA, 60 bp, Artificial; identical to SEQ ID NO: 467759
  Synthetic oligonucleotide

SEQ ID NO: 607529 - DNA, 56 bp, Artificial; identical to SEQ ID NO: 467760
  Synthetic oligonucleotide

SEQ ID NO: 607530 - DNA, 59 bp, Artificial; identical to SEQ ID NO: 467764
  Synthetic oligonucleotide

SEQ ID NO: 607531 - DNA, 60 bp, Artificial; identical to SEQ ID NO: 467765
  Synthetic oligonucleotide

SEQ ID NO: 607532 - DNA, 60 bp, Artificial; identical to SEQ ID NO: 467767
  Synthetic oligonucleotide

SEQ ID NO: 607533 - DNA, 60 bp, Artificial; identical to SEQ ID NO: 467769
  Synthetic oligonucleotide

SEQ ID NO: 607534 - DNA, 60 bp, Artificial; identical to SEQ ID NO: 467771
  Synthetic oligonucleotide

SEQ ID NO: 607535 - DNA, 55 bp, Artificial; identical to SEQ ID NO: 467773
  Synthetic oligonucleotide

SEQ ID NO: 607536 - DNA, 59 bp, Artificial; identical to SEQ ID NO: 12575
  Synthetic oligonucleotide

SEQ ID NO: 607537 - DNA, 56 bp, Artificial; identical to SEQ ID NO: 467775
  Synthetic oligonucleotide

SEQ ID NO: 607538 - DNA, 51 bp, Artificial; identical to SEQ ID NO: 467776
  Synthetic oligonucleotide

SEQ ID NO: 607539 - DNA, 50 bp, Artificial; identical to SEQ ID NO: 467777
  Synthetic oligonucleotide

SEQ ID NO: 607540 - DNA, 60 bp, Artificial; identical to SEQ ID NO: 467792
  Synthetic oligonucleotide

SEQ ID NO: 607541 - DNA, 55 bp, Artificial; identical to SEQ ID NO: 467798
  Synthetic oligonucleotide

SEQ ID NO: 607542 - DNA, 60 bp, Artificial; identical to SEQ ID NO: 467805
  Synthetic oligonucleotide

SEQ ID NO: 607543 - DNA, 58 bp, Artificial; identical to SEQ ID NO: 467808
  Synthetic oligonucleotide

SEQ ID NO: 607544 - DNA, 50 bp, Artificial; identical to SEQ ID NO: 467809
  Synthetic oligonucleotide

SEQ ID NO: 607545 - DNA, 58 bp, Artificial; identical to SEQ ID NO: 467814
  Synthetic oligonucleotide

SEQ ID NO: 607546 - DNA, 60 bp, Artificial; identical to SEQ ID NO: 467817
  Synthetic oligonucleotide

SEQ ID NO: 607547 - DNA, 60 bp, Artificial; identical to SEQ ID NO: 467818
  Synthetic oligonucleotide

SEQ ID NO: 607548 - DNA, 60 bp, Artificial; identical to SEQ ID NO: 467819
  Synthetic oligonucleotide

SEQ ID NO: 607549 - DNA, 60 bp, Artificial; identical to SEQ ID NO: 467823
  Synthetic oligonucleotide

SEQ ID NO: 607550 - DNA, 50 bp, Artificial; identical to SEQ ID NO: 467825
  Synthetic oligonucleotide

SEQ ID NO: 607551 - DNA, 58 bp, Artificial; identical to SEQ ID NO: 467827
  Synthetic oligonucleotide

SEQ ID NO: 607552 - DNA, 60 bp, Artificial; identical to SEQ ID NO: 467832
  Synthetic oligonucleotide

SEQ ID NO: 607553 - DNA, 60 bp, Artificial; identical to SEQ ID NO: 467833
  Synthetic oligonucleotide

SEQ ID NO: 607554 - DNA, 60 bp, Artificial; identical to SEQ ID NO: 467835
  Synthetic oligonucleotide

SEQ ID NO: 607555 - DNA, 50 bp, Artificial; identical to SEQ ID NO: 467837
  Synthetic oligonucleotide

SEQ ID NO: 607556 - DNA, 58 bp, Artificial; identical to SEQ ID NO: 16339
  Synthetic oligonucleotide

SEQ ID NO: 607557 - DNA, 59 bp, Artificial; identical to SEQ ID NO: 467841
  Synthetic oligonucleotide

SEQ ID NO: 607558 - DNA, 60 bp, Artificial; identical to SEQ ID NO: 467842
  Synthetic oligonucleotide

SEQ ID NO: 607559 - DNA, 57 bp, Artificial; identical to SEQ ID NO: 467844
  Synthetic oligonucleotide

SEQ ID NO: 607560 - DNA, 60 bp, Artificial; identical to SEQ ID NO: 467845
  Synthetic oligonucleotide

SEQ ID NO: 607561 - DNA, 60 bp, Artificial; identical to SEQ ID NO: 467846
  Synthetic oligonucleotide

SEQ ID NO: 607562 - DNA, 51 bp, Artificial; identical to SEQ ID NO: 467847
  Synthetic oligonucleotide

SEQ ID NO: 607563 - DNA, 56 bp, Artificial; identical to SEQ ID NO: 9881
  Synthetic oligonucleotide

SEQ ID NO: 607564 - DNA, 60 bp, Artificial; identical to SEQ ID NO: 467849
  Synthetic oligonucleotide

SEQ ID NO: 607565 - DNA, 55 bp, Artificial; identical to SEQ ID NO: 467850
  Synthetic oligonucleotide

SEQ ID NO: 607566 - DNA, 60 bp, Artificial; identical to SEQ ID NO: 5839
  Synthetic oligonucleotide

SEQ ID NO: 607567 - DNA, 59 bp, Artificial; identical to SEQ ID NO: 13923
  Synthetic oligonucleotide

SEQ ID NO: 607568 - DNA, 59 bp, Artificial; identical to SEQ ID NO: 467854
  Synthetic oligonucleotide

SEQ ID NO: 607569 - DNA, 58 bp, Artificial; identical to SEQ ID NO: 467855
  Synthetic oligonucleotide

SEQ ID NO: 607570 - DNA, 60 bp, Artificial; identical to SEQ ID NO: 467856
  Synthetic oligonucleotide

SEQ ID NO: 607571 - DNA, 55 bp, Artificial; identical to SEQ ID NO: 467857
  Synthetic oligonucleotide

SEQ ID NO: 607572 - DNA, 60 bp, Artificial; identical to SEQ ID NO: 467859
  Synthetic oligonucleotide

SEQ ID NO: 607573 - DNA, 60 bp, Artificial; identical to SEQ ID NO: 467861
  Synthetic oligonucleotide

SEQ ID NO: 607574 - DNA, 60 bp, Artificial; identical to SEQ ID NO: 467867
  Synthetic oligonucleotide

SEQ ID NO: 607575 - DNA, 50 bp, Artificial; identical to SEQ ID NO: 467876
  Synthetic oligonucleotide

SEQ ID NO: 607576 - DNA, 53 bp, Artificial; identical to SEQ ID NO: 467877
  Synthetic oligonucleotide

SEQ ID NO: 607577 - DNA, 60 bp, Artificial; identical to SEQ ID NO: 467878
  Synthetic oligonucleotide

SEQ ID NO: 607578 - DNA, 60 bp, Artificial; identical to SEQ ID NO: 467881
  Synthetic oligonucleotide

SEQ ID NO: 607579 - DNA, 60 bp, Artificial; identical to SEQ ID NO: 467883
  Synthetic oligonucleotide

SEQ ID NO: 607580 - DNA, 58 bp, Artificial; identical to SEQ ID NO: 16192
  Synthetic oligonucleotide

SEQ ID NO: 607581 - DNA, 56 bp, Artificial; identical to SEQ ID NO: 467891
  Synthetic oligonucleotide

SEQ ID NO: 607582 - DNA, 54 bp, Artificial; identical to SEQ ID NO: 467894
  Synthetic oligonucleotide

SEQ ID NO: 607583 - DNA, 59 bp, Artificial; identical to SEQ ID NO: 467896
  Synthetic oligonucleotide

SEQ ID NO: 607584 - DNA, 55 bp, Artificial; identical to SEQ ID NO: 467897
  Synthetic oligonucleotide

SEQ ID NO: 607585 - DNA, 60 bp, Artificial; identical to SEQ ID NO: 467899
  Synthetic oligonucleotide

SEQ ID NO: 607586 - DNA, 60 bp, Artificial; identical to SEQ ID NO: 467902
  Synthetic oligonucleotide

SEQ ID NO: 607587 - DNA, 56 bp, Artificial; identical to SEQ ID NO: 467903
  Synthetic oligonucleotide

SEQ ID NO: 607588 - DNA, 60 bp, Artificial; identical to SEQ ID NO: 15698
  Synthetic oligonucleotide

SEQ ID NO: 607589 - DNA, 60 bp, Artificial; identical to SEQ ID NO: 467913
  Synthetic oligonucleotide

SEQ ID NO: 607590 - DNA, 60 bp, Artificial; identical to SEQ ID NO: 467919
  Synthetic oligonucleotide

SEQ ID NO: 607591 - DNA, 60 bp, Artificial; identical to SEQ ID NO: 467920
  Synthetic oligonucleotide

SEQ ID NO: 607592 - DNA, 60 bp, Artificial; identical to SEQ ID NO: 467922
  Synthetic oligonucleotide

SEQ ID NO: 607593 - DNA, 55 bp, Artificial; identical to SEQ ID NO: 467924
  Synthetic oligonucleotide

SEQ ID NO: 607594 - DNA, 60 bp, Artificial; identical to SEQ ID NO: 467925
  Synthetic oligonucleotide

SEQ ID NO: 607595 - DNA, 58 bp, Artificial; identical to SEQ ID NO: 467926
  Synthetic oligonucleotide

SEQ ID NO: 607596 - DNA, 56 bp, Artificial; identical to SEQ ID NO: 467927
  Synthetic oligonucleotide

SEQ ID NO: 607597 - DNA, 58 bp, Artificial; identical to SEQ ID NO: 467930
  Synthetic oligonucleotide

SEQ ID NO: 607598 - DNA, 57 bp, Artificial; identical to SEQ ID NO: 467932
  Synthetic oligonucleotide

SEQ ID NO: 607599 - DNA, 57 bp, Artificial; identical to SEQ ID NO: 467935
  Synthetic oligonucleotide

SEQ ID NO: 607600 - DNA, 56 bp, Artificial; identical to SEQ ID NO: 467941
  Synthetic oligonucleotide

SEQ ID NO: 607601 - DNA, 58 bp, Artificial; identical to SEQ ID NO: 17985
  Synthetic oligonucleotide

SEQ ID NO: 607602 - DNA, 55 bp, Artificial; identical to SEQ ID NO: 467943
  Synthetic oligonucleotide

SEQ ID NO: 607603 - DNA, 60 bp, Artificial; identical to SEQ ID NO: 467946
  Synthetic oligonucleotide

SEQ ID NO: 607604 - DNA, 60 bp, Artificial; identical to SEQ ID NO: 467948
  Synthetic oligonucleotide

SEQ ID NO: 607605 - DNA, 60 bp, Artificial; identical to SEQ ID NO: 467949
  Synthetic oligonucleotide

SEQ ID NO: 607606 - DNA, 54 bp, Artificial; identical to SEQ ID NO: 467952
  Synthetic oligonucleotide

SEQ ID NO: 607607 - DNA, 59 bp, Artificial; identical to SEQ ID NO: 467954
  Synthetic oligonucleotide

SEQ ID NO: 607608 - DNA, 54 bp, Artificial; identical to SEQ ID NO: 467955
  Synthetic oligonucleotide

SEQ ID NO: 607609 - DNA, 56 bp, Artificial; identical to SEQ ID NO: 467956
  Synthetic oligonucleotide

SEQ ID NO: 607610 - DNA, 60 bp, Artificial; identical to SEQ ID NO: 467957
  Synthetic oligonucleotide

SEQ ID NO: 607611 - DNA, 52 bp, Artificial; identical to SEQ ID NO: 467958
  Synthetic oligonucleotide

SEQ ID NO: 607612 - DNA, 51 bp, Artificial; identical to SEQ ID NO: 10605
  Synthetic oligonucleotide

SEQ ID NO: 607613 - DNA, 59 bp, Artificial; identical to SEQ ID NO: 467971
  Synthetic oligonucleotide

SEQ ID NO: 607614 - DNA, 54 bp, Artificial; identical to SEQ ID NO: 11724
  Synthetic oligonucleotide

SEQ ID NO: 607615 - DNA, 57 bp, Artificial; identical to SEQ ID NO: 467977
  Synthetic oligonucleotide

SEQ ID NO: 607616 - DNA, 57 bp, Artificial; identical to SEQ ID NO: 467978
  Synthetic oligonucleotide

SEQ ID NO: 607617 - DNA, 60 bp, Artificial; identical to SEQ ID NO: 467985
  Synthetic oligonucleotide

SEQ ID NO: 607618 - DNA, 60 bp, Artificial; identical to SEQ ID NO: 467991
  Synthetic oligonucleotide

SEQ ID NO: 607619 - DNA, 52 bp, Artificial; identical to SEQ ID NO: 467992
  Synthetic oligonucleotide

SEQ ID NO: 607620 - DNA, 52 bp, Artificial; identical to SEQ ID NO: 467995
  Synthetic oligonucleotide

SEQ ID NO: 607621 - DNA, 55 bp, Artificial; identical to SEQ ID NO: 467997
  Synthetic oligonucleotide

SEQ ID NO: 607622 - DNA, 60 bp, Artificial; identical to SEQ ID NO: 467999
  Synthetic oligonucleotide

SEQ ID NO: 607623 - DNA, 53 bp, Artificial; identical to SEQ ID NO: 468000
  Synthetic oligonucleotide

SEQ ID NO: 607624 - DNA, 55 bp, Artificial; identical to SEQ ID NO: 468002
  Synthetic oligonucleotide

SEQ ID NO: 607625 - DNA, 59 bp, Artificial; identical to SEQ ID NO: 468005
  Synthetic oligonucleotide

SEQ ID NO: 607626 - DNA, 55 bp, Artificial; identical to SEQ ID NO: 16661
  Synthetic oligonucleotide

SEQ ID NO: 607627 - DNA, 57 bp, Artificial; identical to SEQ ID NO: 468006
  Synthetic oligonucleotide

SEQ ID NO: 607628 - DNA, 59 bp, Artificial; identical to SEQ ID NO: 468008
  Synthetic oligonucleotide

SEQ ID NO: 607629 - DNA, 59 bp, Artificial; identical to SEQ ID NO: 468013
  Synthetic oligonucleotide

SEQ ID NO: 607630 - DNA, 58 bp, Artificial; identical to SEQ ID NO: 468020
  Synthetic oligonucleotide

SEQ ID NO: 607631 - DNA, 55 bp, Artificial; identical to SEQ ID NO: 468023
  Synthetic oligonucleotide

SEQ ID NO: 607632 - DNA, 60 bp, Artificial; identical to SEQ ID NO: 468024
  Synthetic oligonucleotide

SEQ ID NO: 607633 - DNA, 60 bp, Artificial; identical to SEQ ID NO: 468025
  Synthetic oligonucleotide

SEQ ID NO: 607634 - DNA, 59 bp, Artificial; identical to SEQ ID NO: 468028
  Synthetic oligonucleotide

SEQ ID NO: 607635 - DNA, 60 bp, Artificial; identical to SEQ ID NO: 468029
  Synthetic oligonucleotide

SEQ ID NO: 607636 - DNA, 60 bp, Artificial; identical to SEQ ID NO: 468030
  Synthetic oligonucleotide

SEQ ID NO: 607637 - DNA, 55 bp, Artificial; identical to SEQ ID NO: 468032
  Synthetic oligonucleotide

SEQ ID NO: 607638 - DNA, 53 bp, Artificial; identical to SEQ ID NO: 468033
  Synthetic oligonucleotide

SEQ ID NO: 607639 - DNA, 57 bp, Artificial; identical to SEQ ID NO: 468034
  Synthetic oligonucleotide

SEQ ID NO: 607640 - DNA, 60 bp, Artificial; identical to SEQ ID NO: 468036
  Synthetic oligonucleotide

SEQ ID NO: 607641 - DNA, 59 bp, Artificial; identical to SEQ ID NO: 468037
  Synthetic oligonucleotide

SEQ ID NO: 607642 - DNA, 52 bp, Artificial; identical to SEQ ID NO: 468042
  Synthetic oligonucleotide

SEQ ID NO: 607643 - DNA, 59 bp, Artificial; identical to SEQ ID NO: 468048
  Synthetic oligonucleotide

SEQ ID NO: 607644 - DNA, 51 bp, Artificial; identical to SEQ ID NO: 468051
  Synthetic oligonucleotide

SEQ ID NO: 607645 - DNA, 60 bp, Artificial; identical to SEQ ID NO: 468052
  Synthetic oligonucleotide

SEQ ID NO: 607646 - DNA, 60 bp, Artificial; identical to SEQ ID NO: 468053
  Synthetic oligonucleotide

SEQ ID NO: 607647 - DNA, 56 bp, Artificial; identical to SEQ ID NO: 468054
  Synthetic oligonucleotide

SEQ ID NO: 607648 - DNA, 55 bp, Artificial; identical to SEQ ID NO: 8806
  Synthetic oligonucleotide

SEQ ID NO: 607649 - DNA, 55 bp, Artificial; identical to SEQ ID NO: 468057
  Synthetic oligonucleotide

SEQ ID NO: 607650 - DNA, 54 bp, Artificial; identical to SEQ ID NO: 468058
  Synthetic oligonucleotide

SEQ ID NO: 607651 - DNA, 54 bp, Artificial; identical to SEQ ID NO: 468059
  Synthetic oligonucleotide

SEQ ID NO: 607652 - DNA, 60 bp, Artificial; identical to SEQ ID NO: 468060
  Synthetic oligonucleotide

SEQ ID NO: 607653 - DNA, 58 bp, Artificial; identical to SEQ ID NO: 10527
  Synthetic oligonucleotide

SEQ ID NO: 607654 - DNA, 60 bp, Artificial; identical to SEQ ID NO: 468061
  Synthetic oligonucleotide

SEQ ID NO: 607655 - DNA, 51 bp, Artificial; identical to SEQ ID NO: 468062
  Synthetic oligonucleotide

SEQ ID NO: 607656 - DNA, 53 bp, Artificial; identical to SEQ ID NO: 468064
  Synthetic oligonucleotide

SEQ ID NO: 607657 - DNA, 59 bp, Artificial; identical to SEQ ID NO: 468065
  Synthetic oligonucleotide

SEQ ID NO: 607658 - DNA, 55 bp, Artificial; identical to SEQ ID NO: 468068
  Synthetic oligonucleotide

SEQ ID NO: 607659 - DNA, 55 bp, Artificial; identical to SEQ ID NO: 468070
  Synthetic oligonucleotide

SEQ ID NO: 607660 - DNA, 60 bp, Artificial; identical to SEQ ID NO: 468071
  Synthetic oligonucleotide

SEQ ID NO: 607661 - DNA, 50 bp, Artificial; identical to SEQ ID NO: 468079
  Synthetic oligonucleotide

SEQ ID NO: 607662 - DNA, 60 bp, Artificial; identical to SEQ ID NO: 468080
  Synthetic oligonucleotide

SEQ ID NO: 607663 - DNA, 60 bp, Artificial; identical to SEQ ID NO: 14620
  Synthetic oligonucleotide

SEQ ID NO: 607664 - DNA, 60 bp, Artificial; identical to SEQ ID NO: 468083
  Synthetic oligonucleotide

SEQ ID NO: 607665 - DNA, 60 bp, Artificial; identical to SEQ ID NO: 468084
  Synthetic oligonucleotide

SEQ ID NO: 607666 - DNA, 59 bp, Artificial; identical to SEQ ID NO: 468085
  Synthetic oligonucleotide

SEQ ID NO: 607667 - DNA, 60 bp, Artificial; identical to SEQ ID NO: 468087
  Synthetic oligonucleotide

SEQ ID NO: 607668 - DNA, 55 bp, Artificial; identical to SEQ ID NO: 468090
  Synthetic oligonucleotide

SEQ ID NO: 607669 - DNA, 60 bp, Artificial; identical to SEQ ID NO: 468092
  Synthetic oligonucleotide

SEQ ID NO: 607670 - DNA, 59 bp, Artificial; identical to SEQ ID NO: 468093
  Synthetic oligonucleotide

SEQ ID NO: 607671 - DNA, 60 bp, Artificial; identical to SEQ ID NO: 468094
  Synthetic oligonucleotide

SEQ ID NO: 607672 - DNA, 60 bp, Artificial; identical to SEQ ID NO: 468096
  Synthetic oligonucleotide

SEQ ID NO: 607673 - DNA, 57 bp, Artificial; identical to SEQ ID NO: 468097
  Synthetic oligonucleotide

SEQ ID NO: 607674 - DNA, 55 bp, Artificial; identical to SEQ ID NO: 468099
  Synthetic oligonucleotide

SEQ ID NO: 607675 - DNA, 60 bp, Artificial; identical to SEQ ID NO: 468100
  Synthetic oligonucleotide

SEQ ID NO: 607676 - DNA, 60 bp, Artificial; identical to SEQ ID NO: 468101
  Synthetic oligonucleotide

SEQ ID NO: 607677 - DNA, 57 bp, Artificial; identical to SEQ ID NO: 468104
  Synthetic oligonucleotide

SEQ ID NO: 607678 - DNA, 60 bp, Artificial; identical to SEQ ID NO: 468106
  Synthetic oligonucleotide

SEQ ID NO: 607679 - DNA, 60 bp, Artificial; identical to SEQ ID NO: 9704
  Synthetic oligonucleotide

SEQ ID NO: 607680 - DNA, 54 bp, Artificial; identical to SEQ ID NO: 468108
  Synthetic oligonucleotide

SEQ ID NO: 607681 - DNA, 56 bp, Artificial; identical to SEQ ID NO: 468109
  Synthetic oligonucleotide

SEQ ID NO: 607682 - DNA, 52 bp, Artificial; identical to SEQ ID NO: 468113
  Synthetic oligonucleotide

SEQ ID NO: 607683 - DNA, 58 bp, Artificial; identical to SEQ ID NO: 468119
  Synthetic oligonucleotide

SEQ ID NO: 607684 - DNA, 60 bp, Artificial; identical to SEQ ID NO: 468121
  Synthetic oligonucleotide

SEQ ID NO: 607685 - DNA, 60 bp, Artificial; identical to SEQ ID NO: 468123
  Synthetic oligonucleotide

SEQ ID NO: 607686 - DNA, 60 bp, Artificial; identical to SEQ ID NO: 468126
  Synthetic oligonucleotide

SEQ ID NO: 607687 - DNA, 55 bp, Artificial; identical to SEQ ID NO: 468127
  Synthetic oligonucleotide

SEQ ID NO: 607688 - DNA, 60 bp, Artificial; identical to SEQ ID NO: 7463
  Synthetic oligonucleotide

SEQ ID NO: 607689 - DNA, 55 bp, Artificial; identical to SEQ ID NO: 468128
  Synthetic oligonucleotide

SEQ ID NO: 607690 - DNA, 60 bp, Artificial; identical to SEQ ID NO: 468129
  Synthetic oligonucleotide

SEQ ID NO: 607691 - DNA, 60 bp, Artificial; identical to SEQ ID NO: 468132
  Synthetic oligonucleotide

SEQ ID NO: 607692 - DNA, 58 bp, Artificial; identical to SEQ ID NO: 468135
  Synthetic oligonucleotide

SEQ ID NO: 607693 - DNA, 60 bp, Artificial; identical to SEQ ID NO: 468136
  Synthetic oligonucleotide

SEQ ID NO: 607694 - DNA, 59 bp, Artificial; identical to SEQ ID NO: 468138
  Synthetic oligonucleotide

SEQ ID NO: 607695 - DNA, 53 bp, Artificial; identical to SEQ ID NO: 468140
  Synthetic oligonucleotide

SEQ ID NO: 607696 - DNA, 60 bp, Artificial; identical to SEQ ID NO: 468141
  Synthetic oligonucleotide

SEQ ID NO: 607697 - DNA, 60 bp, Artificial; identical to SEQ ID NO: 468142
  Synthetic oligonucleotide

SEQ ID NO: 607698 - DNA, 50 bp, Artificial; identical to SEQ ID NO: 468143
  Synthetic oligonucleotide

SEQ ID NO: 607699 - DNA, 60 bp, Artificial; identical to SEQ ID NO: 468145
  Synthetic oligonucleotide

SEQ ID NO: 607700 - DNA, 55 bp, Artificial; identical to SEQ ID NO: 468147
  Synthetic oligonucleotide

SEQ ID NO: 607701 - DNA, 60 bp, Artificial; identical to SEQ ID NO: 468148
  Synthetic oligonucleotide

SEQ ID NO: 607702 - DNA, 55 bp, Artificial; identical to SEQ ID NO: 468150
  Synthetic oligonucleotide

SEQ ID NO: 607703 - DNA, 55 bp, Artificial; identical to SEQ ID NO: 468151
  Synthetic oligonucleotide

SEQ ID NO: 607704 - DNA, 59 bp, Artificial; identical to SEQ ID NO: 468152
  Synthetic oligonucleotide

SEQ ID NO: 607705 - DNA, 60 bp, Artificial; identical to SEQ ID NO: 468154
  Synthetic oligonucleotide

SEQ ID NO: 607706 - DNA, 60 bp, Artificial; identical to SEQ ID NO: 468155
  Synthetic oligonucleotide

SEQ ID NO: 607707 - DNA, 60 bp, Artificial; identical to SEQ ID NO: 468156
  Synthetic oligonucleotide

SEQ ID NO: 607708 - DNA, 52 bp, Artificial; identical to SEQ ID NO: 468158
  Synthetic oligonucleotide

SEQ ID NO: 607709 - DNA, 55 bp, Artificial; identical to SEQ ID NO: 468162
  Synthetic oligonucleotide

SEQ ID NO: 607710 - DNA, 58 bp, Artificial; identical to SEQ ID NO: 468169
  Synthetic oligonucleotide

SEQ ID NO: 607711 - DNA, 60 bp, Artificial; identical to SEQ ID NO: 468170
  Synthetic oligonucleotide

SEQ ID NO: 607712 - DNA, 59 bp, Artificial; identical to SEQ ID NO: 468172
  Synthetic oligonucleotide

SEQ ID NO: 607713 - DNA, 60 bp, Artificial; identical to SEQ ID NO: 468173
  Synthetic oligonucleotide

SEQ ID NO: 607714 - DNA, 52 bp, Artificial; identical to SEQ ID NO: 12248
  Synthetic oligonucleotide

SEQ ID NO: 607715 - DNA, 52 bp, Artificial; identical to SEQ ID NO: 468177
  Synthetic oligonucleotide

SEQ ID NO: 607716 - DNA, 60 bp, Artificial; identical to SEQ ID NO: 468178
  Synthetic oligonucleotide

SEQ ID NO: 607717 - DNA, 55 bp, Artificial; identical to SEQ ID NO: 20564
  Synthetic oligonucleotide

SEQ ID NO: 607718 - DNA, 60 bp, Artificial; identical to SEQ ID NO: 468181
  Synthetic oligonucleotide

SEQ ID NO: 607719 - DNA, 60 bp, Artificial; identical to SEQ ID NO: 468182
  Synthetic oligonucleotide

SEQ ID NO: 607720 - DNA, 60 bp, Artificial; identical to SEQ ID NO: 468185
  Synthetic oligonucleotide

SEQ ID NO: 607721 - DNA, 55 bp, Artificial; identical to SEQ ID NO: 468186
  Synthetic oligonucleotide

SEQ ID NO: 607722 - DNA, 55 bp, Artificial; identical to SEQ ID NO: 14997
  Synthetic oligonucleotide

SEQ ID NO: 607723 - DNA, 55 bp, Artificial; identical to SEQ ID NO: 468187
  Synthetic oligonucleotide

SEQ ID NO: 607724 - DNA, 58 bp, Artificial; identical to SEQ ID NO: 468189
  Synthetic oligonucleotide

SEQ ID NO: 607725 - DNA, 59 bp, Artificial; identical to SEQ ID NO: 468191
  Synthetic oligonucleotide

SEQ ID NO: 607726 - DNA, 60 bp, Artificial; identical to SEQ ID NO: 468193
  Synthetic oligonucleotide

SEQ ID NO: 607727 - DNA, 55 bp, Artificial; identical to SEQ ID NO: 468194
  Synthetic oligonucleotide

SEQ ID NO: 607728 - DNA, 60 bp, Artificial; identical to SEQ ID NO: 468199
  Synthetic oligonucleotide

SEQ ID NO: 607729 - DNA, 56 bp, Artificial; identical to SEQ ID NO: 468201
  Synthetic oligonucleotide

SEQ ID NO: 607730 - DNA, 60 bp, Artificial; identical to SEQ ID NO: 468202
  Synthetic oligonucleotide

SEQ ID NO: 607731 - DNA, 53 bp, Artificial; identical to SEQ ID NO: 11748
  Synthetic oligonucleotide

SEQ ID NO: 607732 - DNA, 53 bp, Artificial; identical to SEQ ID NO: 468206
  Synthetic oligonucleotide

SEQ ID NO: 607733 - DNA, 60 bp, Artificial; identical to SEQ ID NO: 468211
  Synthetic oligonucleotide

SEQ ID NO: 607734 - DNA, 58 bp, Artificial; identical to SEQ ID NO: 468214
  Synthetic oligonucleotide

SEQ ID NO: 607735 - DNA, 60 bp, Artificial; identical to SEQ ID NO: 468216
  Synthetic oligonucleotide

SEQ ID NO: 607736 - DNA, 60 bp, Artificial; identical to SEQ ID NO: 468220
  Synthetic oligonucleotide

SEQ ID NO: 607737 - DNA, 60 bp, Artificial; identical to SEQ ID NO: 468226
  Synthetic oligonucleotide

SEQ ID NO: 607738 - DNA, 59 bp, Artificial; identical to SEQ ID NO: 468227
  Synthetic oligonucleotide

SEQ ID NO: 607739 - DNA, 60 bp, Artificial; identical to SEQ ID NO: 468228
  Synthetic oligonucleotide

SEQ ID NO: 607740 - DNA, 60 bp, Artificial; identical to SEQ ID NO: 14906
  Synthetic oligonucleotide

SEQ ID NO: 607741 - DNA, 60 bp, Artificial; identical to SEQ ID NO: 468230
  Synthetic oligonucleotide

SEQ ID NO: 607742 - DNA, 60 bp, Artificial; identical to SEQ ID NO: 468233
  Synthetic oligonucleotide

SEQ ID NO: 607743 - DNA, 60 bp, Artificial; identical to SEQ ID NO: 468234
  Synthetic oligonucleotide

SEQ ID NO: 607744 - DNA, 55 bp, Artificial; identical to SEQ ID NO: 468235
  Synthetic oligonucleotide

SEQ ID NO: 607745 - DNA, 57 bp, Artificial; identical to SEQ ID NO: 468237
  Synthetic oligonucleotide

SEQ ID NO: 607746 - DNA, 57 bp, Artificial; identical to SEQ ID NO: 468240
  Synthetic oligonucleotide

SEQ ID NO: 607747 - DNA, 55 bp, Artificial; identical to SEQ ID NO: 468241
  Synthetic oligonucleotide

SEQ ID NO: 607748 - DNA, 54 bp, Artificial; identical to SEQ ID NO: 468242
  Synthetic oligonucleotide

SEQ ID NO: 607749 - DNA, 54 bp, Artificial; identical to SEQ ID NO: 468243
  Synthetic oligonucleotide

SEQ ID NO: 607750 - DNA, 55 bp, Artificial; identical to SEQ ID NO: 468244
  Synthetic oligonucleotide

SEQ ID NO: 607751 - DNA, 55 bp, Artificial; identical to SEQ ID NO: 468245
  Synthetic oligonucleotide

SEQ ID NO: 607752 - DNA, 60 bp, Artificial; identical to SEQ ID NO: 6376
  Synthetic oligonucleotide

SEQ ID NO: 607753 - DNA, 60 bp, Artificial; identical to SEQ ID NO: 468246
  Synthetic oligonucleotide

SEQ ID NO: 607754 - DNA, 60 bp, Artificial; identical to SEQ ID NO: 468247
  Synthetic oligonucleotide

SEQ ID NO: 607755 - DNA, 60 bp, Artificial; identical to SEQ ID NO: 5840
  Synthetic oligonucleotide

SEQ ID NO: 607756 - DNA, 60 bp, Artificial; identical to SEQ ID NO: 468249
  Synthetic oligonucleotide

SEQ ID NO: 607757 - DNA, 55 bp, Artificial; identical to SEQ ID NO: 468252
  Synthetic oligonucleotide

SEQ ID NO: 607758 - DNA, 53 bp, Artificial; identical to SEQ ID NO: 468253
  Synthetic oligonucleotide

SEQ ID NO: 607759 - DNA, 58 bp, Artificial; identical to SEQ ID NO: 468259
  Synthetic oligonucleotide

SEQ ID NO: 607760 - DNA, 60 bp, Artificial; identical to SEQ ID NO: 468260
  Synthetic oligonucleotide

SEQ ID NO: 607761 - DNA, 60 bp, Artificial; identical to SEQ ID NO: 468261
  Synthetic oligonucleotide

SEQ ID NO: 607762 - DNA, 55 bp, Artificial; identical to SEQ ID NO: 468263
  Synthetic oligonucleotide

SEQ ID NO: 607763 - DNA, 60 bp, Artificial; identical to SEQ ID NO: 468265
  Synthetic oligonucleotide

SEQ ID NO: 607764 - DNA, 54 bp, Artificial; identical to SEQ ID NO: 19056
  Synthetic oligonucleotide

SEQ ID NO: 607765 - DNA, 50 bp, Artificial; identical to SEQ ID NO: 468268
  Synthetic oligonucleotide

SEQ ID NO: 607766 - DNA, 60 bp, Artificial; identical to SEQ ID NO: 468275
  Synthetic oligonucleotide

SEQ ID NO: 607767 - DNA, 50 bp, Artificial; identical to SEQ ID NO: 468277
  Synthetic oligonucleotide

SEQ ID NO: 607768 - DNA, 60 bp, Artificial; identical to SEQ ID NO: 468278
  Synthetic oligonucleotide

SEQ ID NO: 607769 - DNA, 60 bp, Artificial; identical to SEQ ID NO: 14609
  Synthetic oligonucleotide

SEQ ID NO: 607770 - DNA, 60 bp, Artificial; identical to SEQ ID NO: 468281
  Synthetic oligonucleotide

SEQ ID NO: 607771 - DNA, 60 bp, Artificial; identical to SEQ ID NO: 468283
  Synthetic oligonucleotide

SEQ ID NO: 607772 - DNA, 60 bp, Artificial; identical to SEQ ID NO: 468286
  Synthetic oligonucleotide

SEQ ID NO: 607773 - DNA, 60 bp, Artificial; identical to SEQ ID NO: 5758
  Synthetic oligonucleotide

SEQ ID NO: 607774 - DNA, 60 bp, Artificial; identical to SEQ ID NO: 468289
  Synthetic oligonucleotide

SEQ ID NO: 607775 - DNA, 56 bp, Artificial; identical to SEQ ID NO: 468290
  Synthetic oligonucleotide

SEQ ID NO: 607776 - DNA, 60 bp, Artificial; identical to SEQ ID NO: 468291
  Synthetic oligonucleotide

SEQ ID NO: 607777 - DNA, 60 bp, Artificial; identical to SEQ ID NO: 468292
  Synthetic oligonucleotide

SEQ ID NO: 607778 - DNA, 60 bp, Artificial; identical to SEQ ID NO: 468293
  Synthetic oligonucleotide

SEQ ID NO: 607779 - DNA, 59 bp, Artificial; identical to SEQ ID NO: 15961
  Synthetic oligonucleotide

SEQ ID NO: 607780 - DNA, 58 bp, Artificial; identical to SEQ ID NO: 468297
  Synthetic oligonucleotide

SEQ ID NO: 607781 - DNA, 52 bp, Artificial; identical to SEQ ID NO: 468300
  Synthetic oligonucleotide

SEQ ID NO: 607782 - DNA, 59 bp, Artificial; identical to SEQ ID NO: 468303
  Synthetic oligonucleotide

SEQ ID NO: 607783 - DNA, 58 bp, Artificial; identical to SEQ ID NO: 468305
  Synthetic oligonucleotide

SEQ ID NO: 607784 - DNA, 51 bp, Artificial; identical to SEQ ID NO: 468309
  Synthetic oligonucleotide

SEQ ID NO: 607785 - DNA, 55 bp, Artificial; identical to SEQ ID NO: 468310
  Synthetic oligonucleotide

SEQ ID NO: 607786 - DNA, 60 bp, Artificial; identical to SEQ ID NO: 468311
  Synthetic oligonucleotide

SEQ ID NO: 607787 - DNA, 60 bp, Artificial; identical to SEQ ID NO: 468312
  Synthetic oligonucleotide

SEQ ID NO: 607788 - DNA, 56 bp, Artificial; identical to SEQ ID NO: 468316
  Synthetic oligonucleotide

SEQ ID NO: 607789 - DNA, 59 bp, Artificial; identical to SEQ ID NO: 468318
  Synthetic oligonucleotide

SEQ ID NO: 607790 - DNA, 60 bp, Artificial; identical to SEQ ID NO: 468319
  Synthetic oligonucleotide

SEQ ID NO: 607791 - DNA, 60 bp, Artificial; identical to SEQ ID NO: 468320
  Synthetic oligonucleotide

SEQ ID NO: 607792 - DNA, 60 bp, Artificial; identical to SEQ ID NO: 468321
  Synthetic oligonucleotide

SEQ ID NO: 607793 - DNA, 60 bp, Artificial; identical to SEQ ID NO: 468322
  Synthetic oligonucleotide

SEQ ID NO: 607794 - DNA, 56 bp, Artificial; identical to SEQ ID NO: 468324
  Synthetic oligonucleotide

SEQ ID NO: 607795 - DNA, 57 bp, Artificial; identical to SEQ ID NO: 468325
  Synthetic oligonucleotide

SEQ ID NO: 607796 - DNA, 60 bp, Artificial; identical to SEQ ID NO: 468327
  Synthetic oligonucleotide

SEQ ID NO: 607797 - DNA, 55 bp, Artificial; identical to SEQ ID NO: 468329
  Synthetic oligonucleotide

SEQ ID NO: 607798 - DNA, 60 bp, Artificial; identical to SEQ ID NO: 8592
  Synthetic oligonucleotide

SEQ ID NO: 607799 - DNA, 55 bp, Artificial; identical to SEQ ID NO: 468330
  Synthetic oligonucleotide

SEQ ID NO: 607800 - DNA, 60 bp, Artificial; identical to SEQ ID NO: 468333
  Synthetic oligonucleotide

SEQ ID NO: 607801 - DNA, 60 bp, Artificial; identical to SEQ ID NO: 468338
  Synthetic oligonucleotide

SEQ ID NO: 607802 - DNA, 58 bp, Artificial; identical to SEQ ID NO: 468344
  Synthetic oligonucleotide

SEQ ID NO: 607803 - DNA, 55 bp, Artificial; identical to SEQ ID NO: 468347
  Synthetic oligonucleotide

SEQ ID NO: 607804 - DNA, 60 bp, Artificial; identical to SEQ ID NO: 468349
  Synthetic oligonucleotide

SEQ ID NO: 607805 - DNA, 60 bp, Artificial; identical to SEQ ID NO: 468352
  Synthetic oligonucleotide

SEQ ID NO: 607806 - DNA, 54 bp, Artificial; identical to SEQ ID NO: 468354
  Synthetic oligonucleotide

SEQ ID NO: 607807 - DNA, 60 bp, Artificial; identical to SEQ ID NO: 468356
  Synthetic oligonucleotide

SEQ ID NO: 607808 - DNA, 58 bp, Artificial; identical to SEQ ID NO: 468358
  Synthetic oligonucleotide

SEQ ID NO: 607809 - DNA, 60 bp, Artificial; identical to SEQ ID NO: 468359
  Synthetic oligonucleotide

SEQ ID NO: 607810 - DNA, 60 bp, Artificial; identical to SEQ ID NO: 468364
  Synthetic oligonucleotide

SEQ ID NO: 607811 - DNA, 55 bp, Artificial; identical to SEQ ID NO: 468365
  Synthetic oligonucleotide

SEQ ID NO: 607812 - DNA, 59 bp, Artificial; identical to SEQ ID NO: 468366
  Synthetic oligonucleotide

SEQ ID NO: 607813 - DNA, 58 bp, Artificial; identical to SEQ ID NO: 468367
  Synthetic oligonucleotide

SEQ ID NO: 607814 - DNA, 60 bp, Artificial; identical to SEQ ID NO: 468369
  Synthetic oligonucleotide

SEQ ID NO: 607815 - DNA, 53 bp, Artificial; identical to SEQ ID NO: 468372
  Synthetic oligonucleotide

SEQ ID NO: 607816 - DNA, 55 bp, Artificial; identical to SEQ ID NO: 468375
  Synthetic oligonucleotide

SEQ ID NO: 607817 - DNA, 56 bp, Artificial; identical to SEQ ID NO: 7845
  Synthetic oligonucleotide

SEQ ID NO: 607818 - DNA, 58 bp, Artificial; identical to SEQ ID NO: 468377
  Synthetic oligonucleotide

SEQ ID NO: 607819 - DNA, 53 bp, Artificial; identical to SEQ ID NO: 468378
  Synthetic oligonucleotide

SEQ ID NO: 607820 - DNA, 60 bp, Artificial; identical to SEQ ID NO: 468379
  Synthetic oligonucleotide

SEQ ID NO: 607821 - DNA, 57 bp, Artificial; identical to SEQ ID NO: 468383
  Synthetic oligonucleotide

SEQ ID NO: 607822 - DNA, 60 bp, Artificial; identical to SEQ ID NO: 468384
  Synthetic oligonucleotide

SEQ ID NO: 607823 - DNA, 57 bp, Artificial; identical to SEQ ID NO: 468385
  Synthetic oligonucleotide

SEQ ID NO: 607824 - DNA, 55 bp, Artificial; identical to SEQ ID NO: 468386
  Synthetic oligonucleotide

SEQ ID NO: 607825 - DNA, 53 bp, Artificial; identical to SEQ ID NO: 468387
  Synthetic oligonucleotide

SEQ ID NO: 607826 - DNA, 60 bp, Artificial; identical to SEQ ID NO: 468388
  Synthetic oligonucleotide

SEQ ID NO: 607827 - DNA, 57 bp, Artificial; identical to SEQ ID NO: 468389
  Synthetic oligonucleotide

SEQ ID NO: 607828 - DNA, 60 bp, Artificial; identical to SEQ ID NO: 468393
  Synthetic oligonucleotide

SEQ ID NO: 607829 - DNA, 60 bp, Artificial; identical to SEQ ID NO: 468394
  Synthetic oligonucleotide

SEQ ID NO: 607830 - DNA, 60 bp, Artificial; identical to SEQ ID NO: 468395
  Synthetic oligonucleotide

SEQ ID NO: 607831 - DNA, 60 bp, Artificial; identical to SEQ ID NO: 468401
  Synthetic oligonucleotide

SEQ ID NO: 607832 - DNA, 60 bp, Artificial; identical to SEQ ID NO: 468402
  Synthetic oligonucleotide

SEQ ID NO: 607833 - DNA, 56 bp, Artificial; identical to SEQ ID NO: 468405
  Synthetic oligonucleotide

SEQ ID NO: 607834 - DNA, 51 bp, Artificial; identical to SEQ ID NO: 468406
  Synthetic oligonucleotide

SEQ ID NO: 607835 - DNA, 60 bp, Artificial; identical to SEQ ID NO: 6286
  Synthetic oligonucleotide

SEQ ID NO: 607836 - DNA, 60 bp, Artificial; identical to SEQ ID NO: 8357
  Synthetic oligonucleotide

SEQ ID NO: 607837 - DNA, 60 bp, Artificial; identical to SEQ ID NO: 468409
  Synthetic oligonucleotide

SEQ ID NO: 607838 - DNA, 60 bp, Artificial; identical to SEQ ID NO: 468410
  Synthetic oligonucleotide

SEQ ID NO: 607839 - DNA, 59 bp, Artificial; identical to SEQ ID NO: 468412
  Synthetic oligonucleotide

SEQ ID NO: 607840 - DNA, 60 bp, Artificial; identical to SEQ ID NO: 468414
  Synthetic oligonucleotide

SEQ ID NO: 607841 - DNA, 55 bp, Artificial; identical to SEQ ID NO: 468418
  Synthetic oligonucleotide

SEQ ID NO: 607842 - DNA, 60 bp, Artificial; identical to SEQ ID NO: 468419
  Synthetic oligonucleotide

SEQ ID NO: 607843 - DNA, 60 bp, Artificial; identical to SEQ ID NO: 468420
  Synthetic oligonucleotide

SEQ ID NO: 607844 - DNA, 55 bp, Artificial; identical to SEQ ID NO: 468421
  Synthetic oligonucleotide

SEQ ID NO: 607845 - DNA, 60 bp, Artificial; identical to SEQ ID NO: 468424
  Synthetic oligonucleotide

SEQ ID NO: 607846 - DNA, 60 bp, Artificial; identical to SEQ ID NO: 10456
  Synthetic oligonucleotide

SEQ ID NO: 607847 - DNA, 60 bp, Artificial; identical to SEQ ID NO: 468427
  Synthetic oligonucleotide

SEQ ID NO: 607848 - DNA, 60 bp, Artificial; identical to SEQ ID NO: 468429
  Synthetic oligonucleotide

SEQ ID NO: 607849 - DNA, 60 bp, Artificial; identical to SEQ ID NO: 468432
  Synthetic oligonucleotide

SEQ ID NO: 607850 - DNA, 60 bp, Artificial; identical to SEQ ID NO: 468434
  Synthetic oligonucleotide

SEQ ID NO: 607851 - DNA, 50 bp, Artificial; identical to SEQ ID NO: 468435
  Synthetic oligonucleotide

SEQ ID NO: 607852 - DNA, 60 bp, Artificial; identical to SEQ ID NO: 468436
  Synthetic oligonucleotide

SEQ ID NO: 607853 - DNA, 55 bp, Artificial; identical to SEQ ID NO: 468440
  Synthetic oligonucleotide

SEQ ID NO: 607854 - DNA, 54 bp, Artificial; identical to SEQ ID NO: 9336
  Synthetic oligonucleotide

SEQ ID NO: 607855 - DNA, 51 bp, Artificial; identical to SEQ ID NO: 468444
  Synthetic oligonucleotide

SEQ ID NO: 607856 - DNA, 52 bp, Artificial; identical to SEQ ID NO: 468447
  Synthetic oligonucleotide

SEQ ID NO: 607857 - DNA, 60 bp, Artificial; identical to SEQ ID NO: 468451
  Synthetic oligonucleotide

SEQ ID NO: 607858 - DNA, 60 bp, Artificial; identical to SEQ ID NO: 468454
  Synthetic oligonucleotide

SEQ ID NO: 607859 - DNA, 55 bp, Artificial; identical to SEQ ID NO: 468455
  Synthetic oligonucleotide

SEQ ID NO: 607860 - DNA, 55 bp, Artificial; identical to SEQ ID NO: 468457
  Synthetic oligonucleotide

SEQ ID NO: 607861 - DNA, 60 bp, Artificial; identical to SEQ ID NO: 468458
  Synthetic oligonucleotide

SEQ ID NO: 607862 - DNA, 60 bp, Artificial; identical to SEQ ID NO: 468459
  Synthetic oligonucleotide

SEQ ID NO: 607863 - DNA, 60 bp, Artificial; identical to SEQ ID NO: 468462
  Synthetic oligonucleotide

SEQ ID NO: 607864 - DNA, 59 bp, Artificial; identical to SEQ ID NO: 468463
  Synthetic oligonucleotide

SEQ ID NO: 607865 - DNA, 59 bp, Artificial; identical to SEQ ID NO: 468465
  Synthetic oligonucleotide

SEQ ID NO: 607866 - DNA, 57 bp, Artificial; identical to SEQ ID NO: 468470
  Synthetic oligonucleotide

SEQ ID NO: 607867 - DNA, 54 bp, Artificial; identical to SEQ ID NO: 10895
  Synthetic oligonucleotide

SEQ ID NO: 607868 - DNA, 55 bp, Artificial; identical to SEQ ID NO: 468476
  Synthetic oligonucleotide

SEQ ID NO: 607869 - DNA, 60 bp, Artificial; identical to SEQ ID NO: 468477
  Synthetic oligonucleotide

SEQ ID NO: 607870 - DNA, 52 bp, Artificial; identical to SEQ ID NO: 468479
  Synthetic oligonucleotide

SEQ ID NO: 607871 - DNA, 60 bp, Artificial; identical to SEQ ID NO: 468481
  Synthetic oligonucleotide

SEQ ID NO: 607872 - DNA, 52 bp, Artificial; identical to SEQ ID NO: 468482
  Synthetic oligonucleotide

SEQ ID NO: 607873 - DNA, 59 bp, Artificial; identical to SEQ ID NO: 468483
  Synthetic oligonucleotide

SEQ ID NO: 607874 - DNA, 59 bp, Artificial; identical to SEQ ID NO: 468484
  Synthetic oligonucleotide

SEQ ID NO: 607875 - DNA, 55 bp, Artificial; identical to SEQ ID NO: 468488
  Synthetic oligonucleotide

SEQ ID NO: 607876 - DNA, 60 bp, Artificial; identical to SEQ ID NO: 468489
  Synthetic oligonucleotide

SEQ ID NO: 607877 - DNA, 60 bp, Artificial; identical to SEQ ID NO: 468491
  Synthetic oligonucleotide

SEQ ID NO: 607878 - DNA, 53 bp, Artificial; identical to SEQ ID NO: 468501
  Synthetic oligonucleotide

SEQ ID NO: 607879 - DNA, 60 bp, Artificial; identical to SEQ ID NO: 468502
  Synthetic oligonucleotide

SEQ ID NO: 607880 - DNA, 53 bp, Artificial; identical to SEQ ID NO: 468507
  Synthetic oligonucleotide

SEQ ID NO: 607881 - DNA, 55 bp, Artificial; identical to SEQ ID NO: 468509
  Synthetic oligonucleotide

SEQ ID NO: 607882 - DNA, 60 bp, Artificial; identical to SEQ ID NO: 468511
  Synthetic oligonucleotide

SEQ ID NO: 607883 - DNA, 58 bp, Artificial; identical to SEQ ID NO: 468513
  Synthetic oligonucleotide

SEQ ID NO: 607884 - DNA, 58 bp, Artificial; identical to SEQ ID NO: 468514
  Synthetic oligonucleotide

SEQ ID NO: 607885 - DNA, 60 bp, Artificial; identical to SEQ ID NO: 468517
  Synthetic oligonucleotide

SEQ ID NO: 607886 - DNA, 51 bp, Artificial; identical to SEQ ID NO: 468518
  Synthetic oligonucleotide

SEQ ID NO: 607887 - DNA, 60 bp, Artificial; identical to SEQ ID NO: 468519
  Synthetic oligonucleotide

SEQ ID NO: 607888 - DNA, 60 bp, Artificial; identical to SEQ ID NO: 468520
  Synthetic oligonucleotide

SEQ ID NO: 607889 - DNA, 60 bp, Artificial; identical to SEQ ID NO: 468522
  Synthetic oligonucleotide

SEQ ID NO: 607890 - DNA, 60 bp, Artificial; identical to SEQ ID NO: 468525
  Synthetic oligonucleotide

SEQ ID NO: 607891 - DNA, 60 bp, Artificial; identical to SEQ ID NO: 468526
  Synthetic oligonucleotide

SEQ ID NO: 607892 - DNA, 60 bp, Artificial; identical to SEQ ID NO: 468529
  Synthetic oligonucleotide

SEQ ID NO: 607893 - DNA, 59 bp, Artificial; identical to SEQ ID NO: 468530
  Synthetic oligonucleotide

SEQ ID NO: 607894 - DNA, 60 bp, Artificial; identical to SEQ ID NO: 468531
  Synthetic oligonucleotide

SEQ ID NO: 607895 - DNA, 50 bp, Artificial; identical to SEQ ID NO: 468533
  Synthetic oligonucleotide

SEQ ID NO: 607896 - DNA, 57 bp, Artificial; identical to SEQ ID NO: 468539
  Synthetic oligonucleotide

SEQ ID NO: 607897 - DNA, 60 bp, Artificial; identical to SEQ ID NO: 109947
  Synthetic oligonucleotide

SEQ ID NO: 607898 - DNA, 59 bp, Artificial; identical to SEQ ID NO: 468541
  Synthetic oligonucleotide

SEQ ID NO: 607899 - DNA, 59 bp, Artificial; identical to SEQ ID NO: 468543
  Synthetic oligonucleotide

SEQ ID NO: 607900 - DNA, 60 bp, Artificial; identical to SEQ ID NO: 468545
  Synthetic oligonucleotide

SEQ ID NO: 607901 - DNA, 60 bp, Artificial; identical to SEQ ID NO: 468547
  Synthetic oligonucleotide

SEQ ID NO: 607902 - DNA, 60 bp, Artificial; identical to SEQ ID NO: 468548
  Synthetic oligonucleotide

SEQ ID NO: 607903 - DNA, 57 bp, Artificial; identical to SEQ ID NO: 468550
  Synthetic oligonucleotide

SEQ ID NO: 607904 - DNA, 60 bp, Artificial; identical to SEQ ID NO: 15569
  Synthetic oligonucleotide

SEQ ID NO: 607905 - DNA, 60 bp, Artificial; identical to SEQ ID NO: 468551
  Synthetic oligonucleotide

SEQ ID NO: 607906 - DNA, 60 bp, Artificial; identical to SEQ ID NO: 468553
  Synthetic oligonucleotide

SEQ ID NO: 607907 - DNA, 60 bp, Artificial; identical to SEQ ID NO: 468554
  Synthetic oligonucleotide

SEQ ID NO: 607908 - DNA, 58 bp, Artificial; identical to SEQ ID NO: 468555
  Synthetic oligonucleotide

SEQ ID NO: 607909 - DNA, 60 bp, Artificial; identical to SEQ ID NO: 468557
  Synthetic oligonucleotide

SEQ ID NO: 607910 - DNA, 60 bp, Artificial; identical to SEQ ID NO: 468558
  Synthetic oligonucleotide

SEQ ID NO: 607911 - DNA, 60 bp, Artificial; identical to SEQ ID NO: 468559
  Synthetic oligonucleotide

SEQ ID NO: 607912 - DNA, 60 bp, Artificial; identical to SEQ ID NO: 468560
  Synthetic oligonucleotide

SEQ ID NO: 607913 - DNA, 55 bp, Artificial; identical to SEQ ID NO: 468561
  Synthetic oligonucleotide

SEQ ID NO: 607914 - DNA, 60 bp, Artificial; identical to SEQ ID NO: 468564
  Synthetic oligonucleotide

SEQ ID NO: 607915 - DNA, 60 bp, Artificial; identical to SEQ ID NO: 468565
  Synthetic oligonucleotide

SEQ ID NO: 607916 - DNA, 60 bp, Artificial; identical to SEQ ID NO: 468566
  Synthetic oligonucleotide

SEQ ID NO: 607917 - DNA, 60 bp, Artificial; identical to SEQ ID NO: 468567
  Synthetic oligonucleotide

SEQ ID NO: 607918 - DNA, 60 bp, Artificial; identical to SEQ ID NO: 468568
  Synthetic oligonucleotide

SEQ ID NO: 607919 - DNA, 58 bp, Artificial; identical to SEQ ID NO: 468570
  Synthetic oligonucleotide

SEQ ID NO: 607920 - DNA, 58 bp, Artificial; identical to SEQ ID NO: 468571
  Synthetic oligonucleotide

SEQ ID NO: 607921 - DNA, 60 bp, Artificial; identical to SEQ ID NO: 468582
  Synthetic oligonucleotide

SEQ ID NO: 607922 - DNA, 60 bp, Artificial; identical to SEQ ID NO: 468584
  Synthetic oligonucleotide

SEQ ID NO: 607923 - DNA, 60 bp, Artificial; identical to SEQ ID NO: 468588
  Synthetic oligonucleotide

SEQ ID NO: 607924 - DNA, 54 bp, Artificial; identical to SEQ ID NO: 13289
  Synthetic oligonucleotide

SEQ ID NO: 607925 - DNA, 60 bp, Artificial; identical to SEQ ID NO: 468597
  Synthetic oligonucleotide

SEQ ID NO: 607926 - DNA, 55 bp, Artificial; identical to SEQ ID NO: 468598
  Synthetic oligonucleotide

SEQ ID NO: 607927 - DNA, 60 bp, Artificial; identical to SEQ ID NO: 468604
  Synthetic oligonucleotide

SEQ ID NO: 607928 - DNA, 60 bp, Artificial; identical to SEQ ID NO: 468607
  Synthetic oligonucleotide

SEQ ID NO: 607929 - DNA, 55 bp, Artificial; identical to SEQ ID NO: 468611
  Synthetic oligonucleotide

SEQ ID NO: 607930 - DNA, 60 bp, Artificial; identical to SEQ ID NO: 468612
  Synthetic oligonucleotide

SEQ ID NO: 607931 - DNA, 60 bp, Artificial; identical to SEQ ID NO: 7809
  Synthetic oligonucleotide

SEQ ID NO: 607932 - DNA, 55 bp, Artificial; identical to SEQ ID NO: 468615
  Synthetic oligonucleotide

SEQ ID NO: 607933 - DNA, 60 bp, Artificial; identical to SEQ ID NO: 468618
  Synthetic oligonucleotide

SEQ ID NO: 607934 - DNA, 59 bp, Artificial; identical to SEQ ID NO: 468622
  Synthetic oligonucleotide

SEQ ID NO: 607935 - DNA, 51 bp, Artificial; identical to SEQ ID NO: 468623
  Synthetic oligonucleotide

SEQ ID NO: 607936 - DNA, 60 bp, Artificial; identical to SEQ ID NO: 57185
  Synthetic oligonucleotide

SEQ ID NO: 607937 - DNA, 60 bp, Artificial; identical to SEQ ID NO: 468625
  Synthetic oligonucleotide

SEQ ID NO: 607938 - DNA, 60 bp, Artificial; identical to SEQ ID NO: 468626
  Synthetic oligonucleotide

SEQ ID NO: 607939 - DNA, 60 bp, Artificial; identical to SEQ ID NO: 468627
  Synthetic oligonucleotide

SEQ ID NO: 607940 - DNA, 58 bp, Artificial; identical to SEQ ID NO: 7228
  Synthetic oligonucleotide

SEQ ID NO: 607941 - DNA, 51 bp, Artificial; identical to SEQ ID NO: 468634
  Synthetic oligonucleotide

SEQ ID NO: 607942 - DNA, 55 bp, Artificial; identical to SEQ ID NO: 468635
  Synthetic oligonucleotide

SEQ ID NO: 607943 - DNA, 60 bp, Artificial; identical to SEQ ID NO: 468639
  Synthetic oligonucleotide

SEQ ID NO: 607944 - DNA, 60 bp, Artificial; identical to SEQ ID NO: 468641
  Synthetic oligonucleotide

SEQ ID NO: 607945 - DNA, 60 bp, Artificial; identical to SEQ ID NO: 468642
  Synthetic oligonucleotide

SEQ ID NO: 607946 - DNA, 56 bp, Artificial; identical to SEQ ID NO: 468643
  Synthetic oligonucleotide

SEQ ID NO: 607947 - DNA, 54 bp, Artificial; identical to SEQ ID NO: 468644
  Synthetic oligonucleotide

SEQ ID NO: 607948 - DNA, 55 bp, Artificial; identical to SEQ ID NO: 468646
  Synthetic oligonucleotide

SEQ ID NO: 607949 - DNA, 60 bp, Artificial; identical to SEQ ID NO: 468651
  Synthetic oligonucleotide

SEQ ID NO: 607950 - DNA, 60 bp, Artificial; identical to SEQ ID NO: 468654
  Synthetic oligonucleotide

SEQ ID NO: 607951 - DNA, 60 bp, Artificial; identical to SEQ ID NO: 468656
  Synthetic oligonucleotide

SEQ ID NO: 607952 - DNA, 57 bp, Artificial; identical to SEQ ID NO: 468657
  Synthetic oligonucleotide

SEQ ID NO: 607953 - DNA, 54 bp, Artificial; identical to SEQ ID NO: 468658
  Synthetic oligonucleotide

SEQ ID NO: 607954 - DNA, 60 bp, Artificial; identical to SEQ ID NO: 468660
  Synthetic oligonucleotide

SEQ ID NO: 607955 - DNA, 51 bp, Artificial; identical to SEQ ID NO: 468662
  Synthetic oligonucleotide

SEQ ID NO: 607956 - DNA, 54 bp, Artificial; identical to SEQ ID NO: 468664
  Synthetic oligonucleotide

SEQ ID NO: 607957 - DNA, 57 bp, Artificial; identical to SEQ ID NO: 468667
  Synthetic oligonucleotide

SEQ ID NO: 607958 - DNA, 60 bp, Artificial; identical to SEQ ID NO: 468669
  Synthetic oligonucleotide

SEQ ID NO: 607959 - DNA, 59 bp, Artificial; identical to SEQ ID NO: 468673
  Synthetic oligonucleotide

SEQ ID NO: 607960 - DNA, 60 bp, Artificial; identical to SEQ ID NO: 468674
  Synthetic oligonucleotide

SEQ ID NO: 607961 - DNA, 55 bp, Artificial; identical to SEQ ID NO: 468676
  Synthetic oligonucleotide

SEQ ID NO: 607962 - DNA, 60 bp, Artificial; identical to SEQ ID NO: 468682
  Synthetic oligonucleotide

SEQ ID NO: 607963 - DNA, 58 bp, Artificial; identical to SEQ ID NO: 468688
  Synthetic oligonucleotide

SEQ ID NO: 607964 - DNA, 60 bp, Artificial; identical to SEQ ID NO: 468689
  Synthetic oligonucleotide

SEQ ID NO: 607965 - DNA, 60 bp, Artificial; identical to SEQ ID NO: 468690
  Synthetic oligonucleotide

SEQ ID NO: 607966 - DNA, 55 bp, Artificial; identical to SEQ ID NO: 468691
  Synthetic oligonucleotide

SEQ ID NO: 607967 - DNA, 59 bp, Artificial; identical to SEQ ID NO: 468694
  Synthetic oligonucleotide

SEQ ID NO: 607968 - DNA, 59 bp, Artificial; identical to SEQ ID NO: 468695
  Synthetic oligonucleotide

SEQ ID NO: 607969 - DNA, 60 bp, Artificial; identical to SEQ ID NO: 468698
  Synthetic oligonucleotide

SEQ ID NO: 607970 - DNA, 60 bp, Artificial; identical to SEQ ID NO: 468703
  Synthetic oligonucleotide

SEQ ID NO: 607971 - DNA, 60 bp, Artificial; identical to SEQ ID NO: 10235
  Synthetic oligonucleotide

SEQ ID NO: 607972 - DNA, 57 bp, Artificial; identical to SEQ ID NO: 468706
  Synthetic oligonucleotide

SEQ ID NO: 607973 - DNA, 60 bp, Artificial; identical to SEQ ID NO: 468710
  Synthetic oligonucleotide

SEQ ID NO: 607974 - DNA, 52 bp, Artificial; identical to SEQ ID NO: 468715
  Synthetic oligonucleotide

SEQ ID NO: 607975 - DNA, 60 bp, Artificial; identical to SEQ ID NO: 468718
  Synthetic oligonucleotide

SEQ ID NO: 607976 - DNA, 60 bp, Artificial; identical to SEQ ID NO: 468719
  Synthetic oligonucleotide

SEQ ID NO: 607977 - DNA, 52 bp, Artificial; identical to SEQ ID NO: 468720
  Synthetic oligonucleotide

SEQ ID NO: 607978 - DNA, 51 bp, Artificial; identical to SEQ ID NO: 11983
  Synthetic oligonucleotide

SEQ ID NO: 607979 - DNA, 53 bp, Artificial; identical to SEQ ID NO: 468722
  Synthetic oligonucleotide

SEQ ID NO: 607980 - DNA, 60 bp, Artificial; identical to SEQ ID NO: 468724
  Synthetic oligonucleotide

SEQ ID NO: 607981 - DNA, 57 bp, Artificial; identical to SEQ ID NO: 468725
  Synthetic oligonucleotide

SEQ ID NO: 607982 - DNA, 59 bp, Artificial; identical to SEQ ID NO: 468727
  Synthetic oligonucleotide

SEQ ID NO: 607983 - DNA, 60 bp, Artificial; identical to SEQ ID NO: 468732
  Synthetic oligonucleotide

SEQ ID NO: 607984 - DNA, 57 bp, Artificial; identical to SEQ ID NO: 468735
  Synthetic oligonucleotide

SEQ ID NO: 607985 - DNA, 58 bp, Artificial; identical to SEQ ID NO: 468736
  Synthetic oligonucleotide

SEQ ID NO: 607986 - DNA, 60 bp, Artificial; identical to SEQ ID NO: 11512
  Synthetic oligonucleotide

SEQ ID NO: 607987 - DNA, 50 bp, Artificial; identical to SEQ ID NO: 468738
  Synthetic oligonucleotide

SEQ ID NO: 607988 - DNA, 60 bp, Artificial; identical to SEQ ID NO: 468739
  Synthetic oligonucleotide

SEQ ID NO: 607989 - DNA, 59 bp, Artificial; identical to SEQ ID NO: 468740
  Synthetic oligonucleotide

SEQ ID NO: 607990 - DNA, 52 bp, Artificial; identical to SEQ ID NO: 468742
  Synthetic oligonucleotide

SEQ ID NO: 607991 - DNA, 60 bp, Artificial; identical to SEQ ID NO: 468744
  Synthetic oligonucleotide

SEQ ID NO: 607992 - DNA, 60 bp, Artificial; identical to SEQ ID NO: 468746
  Synthetic oligonucleotide

SEQ ID NO: 607993 - DNA, 54 bp, Artificial; identical to SEQ ID NO: 468747
  Synthetic oligonucleotide

SEQ ID NO: 607994 - DNA, 54 bp, Artificial; identical to SEQ ID NO: 468749
  Synthetic oligonucleotide

SEQ ID NO: 607995 - DNA, 55 bp, Artificial; identical to SEQ ID NO: 468750
  Synthetic oligonucleotide

SEQ ID NO: 607996 - DNA, 58 bp, Artificial; identical to SEQ ID NO: 468753
  Synthetic oligonucleotide

SEQ ID NO: 607997 - DNA, 58 bp, Artificial; identical to SEQ ID NO: 468755
  Synthetic oligonucleotide

SEQ ID NO: 607998 - DNA, 58 bp, Artificial; identical to SEQ ID NO: 468758
  Synthetic oligonucleotide

SEQ ID NO: 607999 - DNA, 60 bp, Artificial; identical to SEQ ID NO: 468759
  Synthetic oligonucleotide

SEQ ID NO: 608000 - DNA, 60 bp, Artificial; identical to SEQ ID NO: 468762
  Synthetic oligonucleotide

SEQ ID NO: 608001 - DNA, 59 bp, Artificial; identical to SEQ ID NO: 468765
  Synthetic oligonucleotide

SEQ ID NO: 608002 - DNA, 60 bp, Artificial; identical to SEQ ID NO: 468767
  Synthetic oligonucleotide

SEQ ID NO: 608003 - DNA, 57 bp, Artificial; identical to SEQ ID NO: 17866
  Synthetic oligonucleotide

SEQ ID NO: 608004 - DNA, 55 bp, Artificial; identical to SEQ ID NO: 468768
  Synthetic oligonucleotide

SEQ ID NO: 608005 - DNA, 60 bp, Artificial; identical to SEQ ID NO: 468769
  Synthetic oligonucleotide

SEQ ID NO: 608006 - DNA, 58 bp, Artificial; identical to SEQ ID NO: 468770
  Synthetic oligonucleotide

SEQ ID NO: 608007 - DNA, 57 bp, Artificial; identical to SEQ ID NO: 468774
  Synthetic oligonucleotide

SEQ ID NO: 608008 - DNA, 55 bp, Artificial; identical to SEQ ID NO: 468775
  Synthetic oligonucleotide

SEQ ID NO: 608009 - DNA, 60 bp, Artificial; identical to SEQ ID NO: 468781
  Synthetic oligonucleotide

SEQ ID NO: 608010 - DNA, 60 bp, Artificial; identical to SEQ ID NO: 468782
  Synthetic oligonucleotide

SEQ ID NO: 608011 - DNA, 57 bp, Artificial; identical to SEQ ID NO: 468785
  Synthetic oligonucleotide

SEQ ID NO: 608012 - DNA, 60 bp, Artificial; identical to SEQ ID NO: 468787
  Synthetic oligonucleotide

SEQ ID NO: 608013 - DNA, 55 bp, Artificial; identical to SEQ ID NO: 468790
  Synthetic oligonucleotide

SEQ ID NO: 608014 - DNA, 60 bp, Artificial; identical to SEQ ID NO: 468792
  Synthetic oligonucleotide

SEQ ID NO: 608015 - DNA, 60 bp, Artificial; identical to SEQ ID NO: 468793
  Synthetic oligonucleotide

SEQ ID NO: 608016 - DNA, 60 bp, Artificial; identical to SEQ ID NO: 468794
  Synthetic oligonucleotide

SEQ ID NO: 608017 - DNA, 60 bp, Artificial; identical to SEQ ID NO: 468795
  Synthetic oligonucleotide

SEQ ID NO: 608018 - DNA, 55 bp, Artificial; identical to SEQ ID NO: 468796
  Synthetic oligonucleotide

SEQ ID NO: 608019 - DNA, 53 bp, Artificial; identical to SEQ ID NO: 468799
  Synthetic oligonucleotide

SEQ ID NO: 608020 - DNA, 60 bp, Artificial; identical to SEQ ID NO: 468801
  Synthetic oligonucleotide

SEQ ID NO: 608021 - DNA, 56 bp, Artificial; identical to SEQ ID NO: 468802
  Synthetic oligonucleotide

SEQ ID NO: 608022 - DNA, 60 bp, Artificial; identical to SEQ ID NO: 468803
  Synthetic oligonucleotide

SEQ ID NO: 608023 - DNA, 60 bp, Artificial; identical to SEQ ID NO: 468806
  Synthetic oligonucleotide

SEQ ID NO: 608024 - DNA, 60 bp, Artificial; identical to SEQ ID NO: 468807
  Synthetic oligonucleotide

SEQ ID NO: 608025 - DNA, 52 bp, Artificial; identical to SEQ ID NO: 468808
  Synthetic oligonucleotide

SEQ ID NO: 608026 - DNA, 60 bp, Artificial; identical to SEQ ID NO: 468809
  Synthetic oligonucleotide

SEQ ID NO: 608027 - DNA, 60 bp, Artificial; identical to SEQ ID NO: 468812
  Synthetic oligonucleotide

SEQ ID NO: 608028 - DNA, 51 bp, Artificial; identical to SEQ ID NO: 14824
  Synthetic oligonucleotide

SEQ ID NO: 608029 - DNA, 52 bp, Artificial; identical to SEQ ID NO: 468814
  Synthetic oligonucleotide

SEQ ID NO: 608030 - DNA, 60 bp, Artificial; identical to SEQ ID NO: 468815
  Synthetic oligonucleotide

SEQ ID NO: 608031 - DNA, 55 bp, Artificial; identical to SEQ ID NO: 468816
  Synthetic oligonucleotide

SEQ ID NO: 608032 - DNA, 55 bp, Artificial; identical to SEQ ID NO: 468818
  Synthetic oligonucleotide

SEQ ID NO: 608033 - DNA, 60 bp, Artificial; identical to SEQ ID NO: 77594
  Synthetic oligonucleotide

SEQ ID NO: 608034 - DNA, 55 bp, Artificial; identical to SEQ ID NO: 468820
  Synthetic oligonucleotide

SEQ ID NO: 608035 - DNA, 60 bp, Artificial; identical to SEQ ID NO: 468821
  Synthetic oligonucleotide

SEQ ID NO: 608036 - DNA, 60 bp, Artificial; identical to SEQ ID NO: 468822
  Synthetic oligonucleotide

SEQ ID NO: 608037 - DNA, 60 bp, Artificial; identical to SEQ ID NO: 468823
  Synthetic oligonucleotide

SEQ ID NO: 608038 - DNA, 60 bp, Artificial; identical to SEQ ID NO: 468824
  Synthetic oligonucleotide

SEQ ID NO: 608039 - DNA, 60 bp, Artificial; identical to SEQ ID NO: 468825
  Synthetic oligonucleotide

SEQ ID NO: 608040 - DNA, 60 bp, Artificial; identical to SEQ ID NO: 7346
  Synthetic oligonucleotide

SEQ ID NO: 608041 - DNA, 57 bp, Artificial; identical to SEQ ID NO: 468826
  Synthetic oligonucleotide

SEQ ID NO: 608042 - DNA, 60 bp, Artificial; identical to SEQ ID NO: 468831
  Synthetic oligonucleotide

SEQ ID NO: 608043 - DNA, 60 bp, Artificial; identical to SEQ ID NO: 8114
  Synthetic oligonucleotide

SEQ ID NO: 608044 - DNA, 60 bp, Artificial; identical to SEQ ID NO: 468836
  Synthetic oligonucleotide

SEQ ID NO: 608045 - DNA, 53 bp, Artificial; identical to SEQ ID NO: 468838
  Synthetic oligonucleotide

SEQ ID NO: 608046 - DNA, 60 bp, Artificial; identical to SEQ ID NO: 468839
  Synthetic oligonucleotide

SEQ ID NO: 608047 - DNA, 60 bp, Artificial; identical to SEQ ID NO: 468840
  Synthetic oligonucleotide

SEQ ID NO: 608048 - DNA, 58 bp, Artificial; identical to SEQ ID NO: 17217
  Synthetic oligonucleotide

SEQ ID NO: 608049 - DNA, 51 bp, Artificial; identical to SEQ ID NO: 468843
  Synthetic oligonucleotide

SEQ ID NO: 608050 - DNA, 60 bp, Artificial; identical to SEQ ID NO: 468846
  Synthetic oligonucleotide

SEQ ID NO: 608051 - DNA, 60 bp, Artificial; identical to SEQ ID NO: 468851
  Synthetic oligonucleotide

SEQ ID NO: 608052 - DNA, 55 bp, Artificial; identical to SEQ ID NO: 468852
  Synthetic oligonucleotide

SEQ ID NO: 608053 - DNA, 60 bp, Artificial; identical to SEQ ID NO: 468857
  Synthetic oligonucleotide

SEQ ID NO: 608054 - DNA, 52 bp, Artificial; identical to SEQ ID NO: 468858
  Synthetic oligonucleotide

SEQ ID NO: 608055 - DNA, 55 bp, Artificial; identical to SEQ ID NO: 468860
  Synthetic oligonucleotide

SEQ ID NO: 608056 - DNA, 60 bp, Artificial; identical to SEQ ID NO: 468861
  Synthetic oligonucleotide

SEQ ID NO: 608057 - DNA, 54 bp, Artificial; identical to SEQ ID NO: 468865
  Synthetic oligonucleotide

SEQ ID NO: 608058 - DNA, 60 bp, Artificial; identical to SEQ ID NO: 468867
  Synthetic oligonucleotide

SEQ ID NO: 608059 - DNA, 52 bp, Artificial; identical to SEQ ID NO: 468869
  Synthetic oligonucleotide

SEQ ID NO: 608060 - DNA, 55 bp, Artificial; identical to SEQ ID NO: 468871
  Synthetic oligonucleotide

SEQ ID NO: 608061 - DNA, 50 bp, Artificial; identical to SEQ ID NO: 468872
  Synthetic oligonucleotide

SEQ ID NO: 608062 - DNA, 60 bp, Artificial; identical to SEQ ID NO: 468873
  Synthetic oligonucleotide

SEQ ID NO: 608063 - DNA, 60 bp, Artificial; identical to SEQ ID NO: 6164
  Synthetic oligonucleotide

SEQ ID NO: 608064 - DNA, 50 bp, Artificial; identical to SEQ ID NO: 468875
  Synthetic oligonucleotide

SEQ ID NO: 608065 - DNA, 55 bp, Artificial; identical to SEQ ID NO: 468877
  Synthetic oligonucleotide

SEQ ID NO: 608066 - DNA, 55 bp, Artificial; identical to SEQ ID NO: 468878
  Synthetic oligonucleotide

SEQ ID NO: 608067 - DNA, 59 bp, Artificial; identical to SEQ ID NO: 468879
  Synthetic oligonucleotide

SEQ ID NO: 608068 - DNA, 60 bp, Artificial; identical to SEQ ID NO: 11602
  Synthetic oligonucleotide

SEQ ID NO: 608069 - DNA, 60 bp, Artificial; identical to SEQ ID NO: 468881
  Synthetic oligonucleotide

SEQ ID NO: 608070 - DNA, 58 bp, Artificial; identical to SEQ ID NO: 468882
  Synthetic oligonucleotide

SEQ ID NO: 608071 - DNA, 59 bp, Artificial; identical to SEQ ID NO: 468885
  Synthetic oligonucleotide

SEQ ID NO: 608072 - DNA, 54 bp, Artificial; identical to SEQ ID NO: 468893
  Synthetic oligonucleotide

SEQ ID NO: 608073 - DNA, 58 bp, Artificial; identical to SEQ ID NO: 468896
  Synthetic oligonucleotide

SEQ ID NO: 608074 - DNA, 55 bp, Artificial; identical to SEQ ID NO: 468897
  Synthetic oligonucleotide

SEQ ID NO: 608075 - DNA, 53 bp, Artificial; identical to SEQ ID NO: 468900
  Synthetic oligonucleotide

SEQ ID NO: 608076 - DNA, 60 bp, Artificial; identical to SEQ ID NO: 468904
  Synthetic oligonucleotide

SEQ ID NO: 608077 - DNA, 60 bp, Artificial; identical to SEQ ID NO: 468905
  Synthetic oligonucleotide

SEQ ID NO: 608078 - DNA, 58 bp, Artificial; identical to SEQ ID NO: 18627
  Synthetic oligonucleotide

SEQ ID NO: 608079 - DNA, 60 bp, Artificial; identical to SEQ ID NO: 468906
  Synthetic oligonucleotide

SEQ ID NO: 608080 - DNA, 60 bp, Artificial; identical to SEQ ID NO: 468907
  Synthetic oligonucleotide

SEQ ID NO: 608081 - DNA, 55 bp, Artificial; identical to SEQ ID NO: 468908
  Synthetic oligonucleotide

SEQ ID NO: 608082 - DNA, 55 bp, Artificial; identical to SEQ ID NO: 468910
  Synthetic oligonucleotide

SEQ ID NO: 608083 - DNA, 60 bp, Artificial; identical to SEQ ID NO: 468912
  Synthetic oligonucleotide

SEQ ID NO: 608084 - DNA, 57 bp, Artificial; identical to SEQ ID NO: 468913
  Synthetic oligonucleotide

SEQ ID NO: 608085 - DNA, 60 bp, Artificial; identical to SEQ ID NO: 468914
  Synthetic oligonucleotide

SEQ ID NO: 608086 - DNA, 53 bp, Artificial; identical to SEQ ID NO: 468920
  Synthetic oligonucleotide

SEQ ID NO: 608087 - DNA, 57 bp, Artificial; identical to SEQ ID NO: 16983
  Synthetic oligonucleotide

SEQ ID NO: 608088 - DNA, 51 bp, Artificial; identical to SEQ ID NO: 468923
  Synthetic oligonucleotide

SEQ ID NO: 608089 - DNA, 55 bp, Artificial; identical to SEQ ID NO: 468924
  Synthetic oligonucleotide

SEQ ID NO: 608090 - DNA, 55 bp, Artificial; identical to SEQ ID NO: 468925
  Synthetic oligonucleotide

SEQ ID NO: 608091 - DNA, 54 bp, Artificial; identical to SEQ ID NO: 468926
  Synthetic oligonucleotide

SEQ ID NO: 608092 - DNA, 58 bp, Artificial; identical to SEQ ID NO: 468928
  Synthetic oligonucleotide

SEQ ID NO: 608093 - DNA, 58 bp, Artificial; identical to SEQ ID NO: 468929
  Synthetic oligonucleotide

SEQ ID NO: 608094 - DNA, 52 bp, Artificial; identical to SEQ ID NO: 468930
  Synthetic oligonucleotide

SEQ ID NO: 608095 - DNA, 56 bp, Artificial; identical to SEQ ID NO: 468931
  Synthetic oligonucleotide

SEQ ID NO: 608096 - DNA, 60 bp, Artificial; identical to SEQ ID NO: 468934
  Synthetic oligonucleotide

SEQ ID NO: 608097 - DNA, 54 bp, Artificial; identical to SEQ ID NO: 468943
  Synthetic oligonucleotide

SEQ ID NO: 608098 - DNA, 55 bp, Artificial; identical to SEQ ID NO: 468944
  Synthetic oligonucleotide

SEQ ID NO: 608099 - DNA, 53 bp, Artificial; identical to SEQ ID NO: 468947
  Synthetic oligonucleotide

SEQ ID NO: 608100 - DNA, 55 bp, Artificial; identical to SEQ ID NO: 468948
  Synthetic oligonucleotide

SEQ ID NO: 608101 - DNA, 54 bp, Artificial; identical to SEQ ID NO: 468949
  Synthetic oligonucleotide

SEQ ID NO: 608102 - DNA, 51 bp, Artificial; identical to SEQ ID NO: 468950
  Synthetic oligonucleotide

SEQ ID NO: 608103 - DNA, 55 bp, Artificial; identical to SEQ ID NO: 468951
  Synthetic oligonucleotide

SEQ ID NO: 608104 - DNA, 55 bp, Artificial; identical to SEQ ID NO: 468955
  Synthetic oligonucleotide

SEQ ID NO: 608105 - DNA, 60 bp, Artificial; identical to SEQ ID NO: 468957
  Synthetic oligonucleotide

SEQ ID NO: 608106 - DNA, 60 bp, Artificial; identical to SEQ ID NO: 468960
  Synthetic oligonucleotide

SEQ ID NO: 608107 - DNA, 54 bp, Artificial; identical to SEQ ID NO: 468961
  Synthetic oligonucleotide

SEQ ID NO: 608108 - DNA, 55 bp, Artificial; identical to SEQ ID NO: 468962
  Synthetic oligonucleotide

SEQ ID NO: 608109 - DNA, 55 bp, Artificial; identical to SEQ ID NO: 468965
  Synthetic oligonucleotide

SEQ ID NO: 608110 - DNA, 53 bp, Artificial; identical to SEQ ID NO: 468971
  Synthetic oligonucleotide

SEQ ID NO: 608111 - DNA, 60 bp, Artificial; identical to SEQ ID NO: 468972
  Synthetic oligonucleotide

SEQ ID NO: 608112 - DNA, 55 bp, Artificial; identical to SEQ ID NO: 468975
  Synthetic oligonucleotide

SEQ ID NO: 608113 - DNA, 60 bp, Artificial; identical to SEQ ID NO: 468977
  Synthetic oligonucleotide

SEQ ID NO: 608114 - DNA, 60 bp, Artificial; identical to SEQ ID NO: 468981
  Synthetic oligonucleotide

SEQ ID NO: 608115 - DNA, 55 bp, Artificial; identical to SEQ ID NO: 468982
  Synthetic oligonucleotide

SEQ ID NO: 608116 - DNA, 53 bp, Artificial; identical to SEQ ID NO: 468983
  Synthetic oligonucleotide

SEQ ID NO: 608117 - DNA, 60 bp, Artificial; identical to SEQ ID NO: 468985
  Synthetic oligonucleotide

SEQ ID NO: 608118 - DNA, 60 bp, Artificial; identical to SEQ ID NO: 468988
  Synthetic oligonucleotide

SEQ ID NO: 608119 - DNA, 60 bp, Artificial; identical to SEQ ID NO: 468990
  Synthetic oligonucleotide

SEQ ID NO: 608120 - DNA, 60 bp, Artificial; identical to SEQ ID NO: 468992
  Synthetic oligonucleotide

SEQ ID NO: 608121 - DNA, 56 bp, Artificial; identical to SEQ ID NO: 468994
  Synthetic oligonucleotide

SEQ ID NO: 608122 - DNA, 55 bp, Artificial; identical to SEQ ID NO: 468995
  Synthetic oligonucleotide

SEQ ID NO: 608123 - DNA, 55 bp, Artificial; identical to SEQ ID NO: 468996
  Synthetic oligonucleotide

SEQ ID NO: 608124 - DNA, 55 bp, Artificial; identical to SEQ ID NO: 468999
  Synthetic oligonucleotide

SEQ ID NO: 608125 - DNA, 55 bp, Artificial; identical to SEQ ID NO: 469000
  Synthetic oligonucleotide

SEQ ID NO: 608126 - DNA, 58 bp, Artificial; identical to SEQ ID NO: 469003
  Synthetic oligonucleotide

SEQ ID NO: 608127 - DNA, 60 bp, Artificial; identical to SEQ ID NO: 469004
  Synthetic oligonucleotide

SEQ ID NO: 608128 - DNA, 60 bp, Artificial; identical to SEQ ID NO: 469005
  Synthetic oligonucleotide

SEQ ID NO: 608129 - DNA, 55 bp, Artificial; identical to SEQ ID NO: 469006
  Synthetic oligonucleotide

SEQ ID NO: 608130 - DNA, 55 bp, Artificial; identical to SEQ ID NO: 469007
  Synthetic oligonucleotide

SEQ ID NO: 608131 - DNA, 57 bp, Artificial; identical to SEQ ID NO: 16685
  Synthetic oligonucleotide

SEQ ID NO: 608132 - DNA, 60 bp, Artificial; identical to SEQ ID NO: 469008
  Synthetic oligonucleotide

SEQ ID NO: 608133 - DNA, 60 bp, Artificial; identical to SEQ ID NO: 469012
  Synthetic oligonucleotide

SEQ ID NO: 608134 - DNA, 60 bp, Artificial; identical to SEQ ID NO: 469016
  Synthetic oligonucleotide

SEQ ID NO: 608135 - DNA, 55 bp, Artificial; identical to SEQ ID NO: 469017
  Synthetic oligonucleotide

SEQ ID NO: 608136 - DNA, 60 bp, Artificial; identical to SEQ ID NO: 469019
  Synthetic oligonucleotide

SEQ ID NO: 608137 - DNA, 52 bp, Artificial; identical to SEQ ID NO: 469023
  Synthetic oligonucleotide

SEQ ID NO: 608138 - DNA, 58 bp, Artificial; identical to SEQ ID NO: 469025
  Synthetic oligonucleotide

SEQ ID NO: 608139 - DNA, 55 bp, Artificial; identical to SEQ ID NO: 469026
  Synthetic oligonucleotide

SEQ ID NO: 608140 - DNA, 60 bp, Artificial; identical to SEQ ID NO: 469027
  Synthetic oligonucleotide

SEQ ID NO: 608141 - DNA, 58 bp, Artificial; identical to SEQ ID NO: 18167
  Synthetic oligonucleotide

SEQ ID NO: 608142 - DNA, 55 bp, Artificial; identical to SEQ ID NO: 469029
  Synthetic oligonucleotide

SEQ ID NO: 608143 - DNA, 57 bp, Artificial; identical to SEQ ID NO: 469031
  Synthetic oligonucleotide

SEQ ID NO: 608144 - DNA, 58 bp, Artificial; identical to SEQ ID NO: 469033
  Synthetic oligonucleotide

SEQ ID NO: 608145 - DNA, 51 bp, Artificial; identical to SEQ ID NO: 469036
  Synthetic oligonucleotide

SEQ ID NO: 608146 - DNA, 60 bp, Artificial; identical to SEQ ID NO: 469037
  Synthetic oligonucleotide

SEQ ID NO: 608147 - DNA, 58 bp, Artificial; identical to SEQ ID NO: 469042
  Synthetic oligonucleotide

SEQ ID NO: 608148 - DNA, 60 bp, Artificial; identical to SEQ ID NO: 469043
  Synthetic oligonucleotide

SEQ ID NO: 608149 - DNA, 55 bp, Artificial; identical to SEQ ID NO: 469044
  Synthetic oligonucleotide

SEQ ID NO: 608150 - DNA, 60 bp, Artificial; identical to SEQ ID NO: 469047
  Synthetic oligonucleotide

SEQ ID NO: 608151 - DNA, 60 bp, Artificial; identical to SEQ ID NO: 469049
  Synthetic oligonucleotide

SEQ ID NO: 608152 - DNA, 56 bp, Artificial; identical to SEQ ID NO: 469053
  Synthetic oligonucleotide

SEQ ID NO: 608153 - DNA, 50 bp, Artificial; identical to SEQ ID NO: 469054
  Synthetic oligonucleotide

SEQ ID NO: 608154 - DNA, 60 bp, Artificial; identical to SEQ ID NO: 469057
  Synthetic oligonucleotide

SEQ ID NO: 608155 - DNA, 54 bp, Artificial; identical to SEQ ID NO: 469058
  Synthetic oligonucleotide

SEQ ID NO: 608156 - DNA, 50 bp, Artificial; identical to SEQ ID NO: 469061
  Synthetic oligonucleotide

SEQ ID NO: 608157 - DNA, 54 bp, Artificial; identical to SEQ ID NO: 469063
  Synthetic oligonucleotide

SEQ ID NO: 608158 - DNA, 56 bp, Artificial; identical to SEQ ID NO: 469064
  Synthetic oligonucleotide

SEQ ID NO: 608159 - DNA, 60 bp, Artificial; identical to SEQ ID NO: 8644
  Synthetic oligonucleotide

SEQ ID NO: 608160 - DNA, 56 bp, Artificial; identical to SEQ ID NO: 469067
  Synthetic oligonucleotide

SEQ ID NO: 608161 - DNA, 58 bp, Artificial; identical to SEQ ID NO: 469072
  Synthetic oligonucleotide

SEQ ID NO: 608162 - DNA, 55 bp, Artificial; identical to SEQ ID NO: 469074
  Synthetic oligonucleotide

SEQ ID NO: 608163 - DNA, 58 bp, Artificial; identical to SEQ ID NO: 469077
  Synthetic oligonucleotide

SEQ ID NO: 608164 - DNA, 58 bp, Artificial; identical to SEQ ID NO: 469079
  Synthetic oligonucleotide

SEQ ID NO: 608165 - DNA, 54 bp, Artificial; identical to SEQ ID NO: 469080
  Synthetic oligonucleotide

SEQ ID NO: 608166 - DNA, 58 bp, Artificial; identical to SEQ ID NO: 17758
  Synthetic oligonucleotide

SEQ ID NO: 608167 - DNA, 57 bp, Artificial; identical to SEQ ID NO: 469081
  Synthetic oligonucleotide

SEQ ID NO: 608168 - DNA, 60 bp, Artificial; identical to SEQ ID NO: 469083
  Synthetic oligonucleotide

SEQ ID NO: 608169 - DNA, 60 bp, Artificial; identical to SEQ ID NO: 469088
  Synthetic oligonucleotide

SEQ ID NO: 608170 - DNA, 60 bp, Artificial; identical to SEQ ID NO: 469092
  Synthetic oligonucleotide

SEQ ID NO: 608171 - DNA, 60 bp, Artificial; identical to SEQ ID NO: 469097
  Synthetic oligonucleotide

SEQ ID NO: 608172 - DNA, 58 bp, Artificial; identical to SEQ ID NO: 469098
  Synthetic oligonucleotide

SEQ ID NO: 608173 - DNA, 60 bp, Artificial; identical to SEQ ID NO: 12034
  Synthetic oligonucleotide

SEQ ID NO: 608174 - DNA, 58 bp, Artificial; identical to SEQ ID NO: 17807
  Synthetic oligonucleotide

SEQ ID NO: 608175 - DNA, 54 bp, Artificial; identical to SEQ ID NO: 469105
  Synthetic oligonucleotide

SEQ ID NO: 608176 - DNA, 55 bp, Artificial; identical to SEQ ID NO: 469106
  Synthetic oligonucleotide

SEQ ID NO: 608177 - DNA, 60 bp, Artificial; identical to SEQ ID NO: 469109
  Synthetic oligonucleotide

SEQ ID NO: 608178 - DNA, 60 bp, Artificial; identical to SEQ ID NO: 11601
  Synthetic oligonucleotide

SEQ ID NO: 608179 - DNA, 60 bp, Artificial; identical to SEQ ID NO: 469111
  Synthetic oligonucleotide

SEQ ID NO: 608180 - DNA, 58 bp, Artificial; identical to SEQ ID NO: 469112
  Synthetic oligonucleotide

SEQ ID NO: 608181 - DNA, 60 bp, Artificial; identical to SEQ ID NO: 469114
  Synthetic oligonucleotide

SEQ ID NO: 608182 - DNA, 54 bp, Artificial; identical to SEQ ID NO: 469116
  Synthetic oligonucleotide

SEQ ID NO: 608183 - DNA, 60 bp, Artificial; identical to SEQ ID NO: 10290
  Synthetic oligonucleotide

SEQ ID NO: 608184 - DNA, 54 bp, Artificial; identical to SEQ ID NO: 469119
  Synthetic oligonucleotide

SEQ ID NO: 608185 - DNA, 55 bp, Artificial; identical to SEQ ID NO: 469126
  Synthetic oligonucleotide

SEQ ID NO: 608186 - DNA, 60 bp, Artificial; identical to SEQ ID NO: 8649
  Synthetic oligonucleotide

SEQ ID NO: 608187 - DNA, 60 bp, Artificial; identical to SEQ ID NO: 469140
  Synthetic oligonucleotide

SEQ ID NO: 608188 - DNA, 56 bp, Artificial; identical to SEQ ID NO: 469141
  Synthetic oligonucleotide

SEQ ID NO: 608189 - DNA, 52 bp, Artificial; identical to SEQ ID NO: 469142
  Synthetic oligonucleotide

SEQ ID NO: 608190 - DNA, 60 bp, Artificial; identical to SEQ ID NO: 469146
  Synthetic oligonucleotide

SEQ ID NO: 608191 - DNA, 60 bp, Artificial; identical to SEQ ID NO: 469147
  Synthetic oligonucleotide

SEQ ID NO: 608192 - DNA, 55 bp, Artificial; identical to SEQ ID NO: 469148
  Synthetic oligonucleotide

SEQ ID NO: 608193 - DNA, 60 bp, Artificial; identical to SEQ ID NO: 469149
  Synthetic oligonucleotide

SEQ ID NO: 608194 - DNA, 54 bp, Artificial; identical to SEQ ID NO: 469150
  Synthetic oligonucleotide

SEQ ID NO: 608195 - DNA, 60 bp, Artificial; identical to SEQ ID NO: 469153
  Synthetic oligonucleotide

SEQ ID NO: 608196 - DNA, 57 bp, Artificial; identical to SEQ ID NO: 469155
  Synthetic oligonucleotide

SEQ ID NO: 608197 - DNA, 60 bp, Artificial; identical to SEQ ID NO: 469156
  Synthetic oligonucleotide

SEQ ID NO: 608198 - DNA, 52 bp, Artificial; identical to SEQ ID NO: 469158
  Synthetic oligonucleotide

SEQ ID NO: 608199 - DNA, 55 bp, Artificial; identical to SEQ ID NO: 469159
  Synthetic oligonucleotide

SEQ ID NO: 608200 - DNA, 55 bp, Artificial; identical to SEQ ID NO: 469162
  Synthetic oligonucleotide

SEQ ID NO: 608201 - DNA, 50 bp, Artificial; identical to SEQ ID NO: 10801
  Synthetic oligonucleotide

SEQ ID NO: 608202 - DNA, 59 bp, Artificial; identical to SEQ ID NO: 469164
  Synthetic oligonucleotide

SEQ ID NO: 608203 - DNA, 59 bp, Artificial; identical to SEQ ID NO: 469166
  Synthetic oligonucleotide

SEQ ID NO: 608204 - DNA, 56 bp, Artificial; identical to SEQ ID NO: 469167
  Synthetic oligonucleotide

SEQ ID NO: 608205 - DNA, 60 bp, Artificial; identical to SEQ ID NO: 469168
  Synthetic oligonucleotide

SEQ ID NO: 608206 - DNA, 55 bp, Artificial; identical to SEQ ID NO: 469172
  Synthetic oligonucleotide

SEQ ID NO: 608207 - DNA, 56 bp, Artificial; identical to SEQ ID NO: 469173
  Synthetic oligonucleotide

SEQ ID NO: 608208 - DNA, 60 bp, Artificial; identical to SEQ ID NO: 469178
  Synthetic oligonucleotide

SEQ ID NO: 608209 - DNA, 55 bp, Artificial; identical to SEQ ID NO: 469179
  Synthetic oligonucleotide

SEQ ID NO: 608210 - DNA, 58 bp, Artificial; identical to SEQ ID NO: 469180
  Synthetic oligonucleotide

SEQ ID NO: 608211 - DNA, 58 bp, Artificial; identical to SEQ ID NO: 469188
  Synthetic oligonucleotide

SEQ ID NO: 608212 - DNA, 55 bp, Artificial; identical to SEQ ID NO: 469190
  Synthetic oligonucleotide

SEQ ID NO: 608213 - DNA, 55 bp, Artificial; identical to SEQ ID NO: 469194
  Synthetic oligonucleotide

SEQ ID NO: 608214 - DNA, 60 bp, Artificial; identical to SEQ ID NO: 469196
  Synthetic oligonucleotide

SEQ ID NO: 608215 - DNA, 60 bp, Artificial; identical to SEQ ID NO: 469197
  Synthetic oligonucleotide

SEQ ID NO: 608216 - DNA, 52 bp, Artificial; identical to SEQ ID NO: 469200
  Synthetic oligonucleotide

SEQ ID NO: 608217 - DNA, 59 bp, Artificial; identical to SEQ ID NO: 469201
  Synthetic oligonucleotide

SEQ ID NO: 608218 - DNA, 60 bp, Artificial; identical to SEQ ID NO: 469203
  Synthetic oligonucleotide

SEQ ID NO: 608219 - DNA, 59 bp, Artificial; identical to SEQ ID NO: 469206
  Synthetic oligonucleotide

SEQ ID NO: 608220 - DNA, 60 bp, Artificial; identical to SEQ ID NO: 469207
  Synthetic oligonucleotide

SEQ ID NO: 608221 - DNA, 58 bp, Artificial; identical to SEQ ID NO: 469210
  Synthetic oligonucleotide

SEQ ID NO: 608222 - DNA, 58 bp, Artificial; identical to SEQ ID NO: 469211
  Synthetic oligonucleotide

SEQ ID NO: 608223 - DNA, 56 bp, Artificial; identical to SEQ ID NO: 469212
  Synthetic oligonucleotide

SEQ ID NO: 608224 - DNA, 56 bp, Artificial; identical to SEQ ID NO: 469215
  Synthetic oligonucleotide

SEQ ID NO: 608225 - DNA, 55 bp, Artificial; identical to SEQ ID NO: 469216
  Synthetic oligonucleotide

SEQ ID NO: 608226 - DNA, 59 bp, Artificial; identical to SEQ ID NO: 469218
  Synthetic oligonucleotide

SEQ ID NO: 608227 - DNA, 51 bp, Artificial; identical to SEQ ID NO: 469221
  Synthetic oligonucleotide

SEQ ID NO: 608228 - DNA, 60 bp, Artificial; identical to SEQ ID NO: 469222
  Synthetic oligonucleotide

SEQ ID NO: 608229 - DNA, 60 bp, Artificial; identical to SEQ ID NO: 469226
  Synthetic oligonucleotide

SEQ ID NO: 608230 - DNA, 59 bp, Artificial; identical to SEQ ID NO: 469228
  Synthetic oligonucleotide

SEQ ID NO: 608231 - DNA, 60 bp, Artificial; identical to SEQ ID NO: 469229
  Synthetic oligonucleotide

SEQ ID NO: 608232 - DNA, 60 bp, Artificial; identical to SEQ ID NO: 469230
  Synthetic oligonucleotide

SEQ ID NO: 608233 - DNA, 60 bp, Artificial; identical to SEQ ID NO: 469231
  Synthetic oligonucleotide

SEQ ID NO: 608234 - DNA, 58 bp, Artificial; identical to SEQ ID NO: 469232
  Synthetic oligonucleotide

SEQ ID NO: 608235 - DNA, 58 bp, Artificial; identical to SEQ ID NO: 469234
  Synthetic oligonucleotide

SEQ ID NO: 608236 - DNA, 50 bp, Artificial; identical to SEQ ID NO: 469241
  Synthetic oligonucleotide

SEQ ID NO: 608237 - DNA, 58 bp, Artificial; identical to SEQ ID NO: 469244
  Synthetic oligonucleotide

SEQ ID NO: 608238 - DNA, 58 bp, Artificial; identical to SEQ ID NO: 469252
  Synthetic oligonucleotide

SEQ ID NO: 608239 - DNA, 51 bp, Artificial; identical to SEQ ID NO: 469256
  Synthetic oligonucleotide

SEQ ID NO: 608240 - DNA, 55 bp, Artificial; identical to SEQ ID NO: 469258
  Synthetic oligonucleotide

SEQ ID NO: 608241 - DNA, 60 bp, Artificial; identical to SEQ ID NO: 469260
  Synthetic oligonucleotide

SEQ ID NO: 608242 - DNA, 59 bp, Artificial; identical to SEQ ID NO: 15671
  Synthetic oligonucleotide

SEQ ID NO: 608243 - DNA, 58 bp, Artificial; identical to SEQ ID NO: 469264
  Synthetic oligonucleotide

SEQ ID NO: 608244 - DNA, 60 bp, Artificial; identical to SEQ ID NO: 469267
  Synthetic oligonucleotide

SEQ ID NO: 608245 - DNA, 60 bp, Artificial; identical to SEQ ID NO: 469268
  Synthetic oligonucleotide

SEQ ID NO: 608246 - DNA, 60 bp, Artificial; identical to SEQ ID NO: 469272
  Synthetic oligonucleotide

SEQ ID NO: 608247 - DNA, 51 bp, Artificial; identical to SEQ ID NO: 469275
  Synthetic oligonucleotide

SEQ ID NO: 608248 - DNA, 53 bp, Artificial; identical to SEQ ID NO: 469279
  Synthetic oligonucleotide

SEQ ID NO: 608249 - DNA, 55 bp, Artificial; identical to SEQ ID NO: 469280
  Synthetic oligonucleotide

SEQ ID NO: 608250 - DNA, 60 bp, Artificial; identical to SEQ ID NO: 469283
  Synthetic oligonucleotide

SEQ ID NO: 608251 - DNA, 51 bp, Artificial; identical to SEQ ID NO: 469284
  Synthetic oligonucleotide

SEQ ID NO: 608252 - DNA, 60 bp, Artificial; identical to SEQ ID NO: 469288
  Synthetic oligonucleotide

SEQ ID NO: 608253 - DNA, 60 bp, Artificial; identical to SEQ ID NO: 469291
  Synthetic oligonucleotide

SEQ ID NO: 608254 - DNA, 60 bp, Artificial; identical to SEQ ID NO: 469292
  Synthetic oligonucleotide

SEQ ID NO: 608255 - DNA, 60 bp, Artificial; identical to SEQ ID NO: 469294
  Synthetic oligonucleotide

SEQ ID NO: 608256 - DNA, 60 bp, Artificial; identical to SEQ ID NO: 469296
  Synthetic oligonucleotide

SEQ ID NO: 608257 - DNA, 60 bp, Artificial; identical to SEQ ID NO: 469297
  Synthetic oligonucleotide

SEQ ID NO: 608258 - DNA, 60 bp, Artificial; identical to SEQ ID NO: 469298
  Synthetic oligonucleotide

SEQ ID NO: 608259 - DNA, 58 bp, Artificial; identical to SEQ ID NO: 469299
  Synthetic oligonucleotide

SEQ ID NO: 608260 - DNA, 57 bp, Artificial; identical to SEQ ID NO: 17600
  Synthetic oligonucleotide

SEQ ID NO: 608261 - DNA, 55 bp, Artificial; identical to SEQ ID NO: 469303
  Synthetic oligonucleotide

SEQ ID NO: 608262 - DNA, 60 bp, Artificial; identical to SEQ ID NO: 469304
  Synthetic oligonucleotide

SEQ ID NO: 608263 - DNA, 60 bp, Artificial; identical to SEQ ID NO: 15051
  Synthetic oligonucleotide

SEQ ID NO: 608264 - DNA, 55 bp, Artificial; identical to SEQ ID NO: 469305
  Synthetic oligonucleotide

SEQ ID NO: 608265 - DNA, 60 bp, Artificial; identical to SEQ ID NO: 469310
  Synthetic oligonucleotide

SEQ ID NO: 608266 - DNA, 60 bp, Artificial; identical to SEQ ID NO: 469312
  Synthetic oligonucleotide

SEQ ID NO: 608267 - DNA, 60 bp, Artificial; identical to SEQ ID NO: 469315
  Synthetic oligonucleotide

SEQ ID NO: 608268 - DNA, 55 bp, Artificial; identical to SEQ ID NO: 469321
  Synthetic oligonucleotide

SEQ ID NO: 608269 - DNA, 56 bp, Artificial; identical to SEQ ID NO: 469324
  Synthetic oligonucleotide

SEQ ID NO: 608270 - DNA, 60 bp, Artificial; identical to SEQ ID NO: 469329
  Synthetic oligonucleotide

SEQ ID NO: 608271 - DNA, 60 bp, Artificial; identical to SEQ ID NO: 469332
  Synthetic oligonucleotide

SEQ ID NO: 608272 - DNA, 55 bp, Artificial; identical to SEQ ID NO: 469334
  Synthetic oligonucleotide

SEQ ID NO: 608273 - DNA, 60 bp, Artificial; identical to SEQ ID NO: 469338
  Synthetic oligonucleotide

SEQ ID NO: 608274 - DNA, 58 bp, Artificial; identical to SEQ ID NO: 469339
  Synthetic oligonucleotide

SEQ ID NO: 608275 - DNA, 60 bp, Artificial; identical to SEQ ID NO: 469341
  Synthetic oligonucleotide

SEQ ID NO: 608276 - DNA, 60 bp, Artificial; identical to SEQ ID NO: 469342
  Synthetic oligonucleotide

SEQ ID NO: 608277 - DNA, 57 bp, Artificial; identical to SEQ ID NO: 469347
  Synthetic oligonucleotide

SEQ ID NO: 608278 - DNA, 60 bp, Artificial; identical to SEQ ID NO: 469348
  Synthetic oligonucleotide

SEQ ID NO: 608279 - DNA, 51 bp, Artificial; identical to SEQ ID NO: 469352
  Synthetic oligonucleotide

SEQ ID NO: 608280 - DNA, 59 bp, Artificial; identical to SEQ ID NO: 469358
  Synthetic oligonucleotide

SEQ ID NO: 608281 - DNA, 60 bp, Artificial; identical to SEQ ID NO: 469360
  Synthetic oligonucleotide

SEQ ID NO: 608282 - DNA, 58 bp, Artificial; identical to SEQ ID NO: 469365
  Synthetic oligonucleotide

SEQ ID NO: 608283 - DNA, 55 bp, Artificial; identical to SEQ ID NO: 469370
  Synthetic oligonucleotide

SEQ ID NO: 608284 - DNA, 60 bp, Artificial; identical to SEQ ID NO: 469373
  Synthetic oligonucleotide

SEQ ID NO: 608285 - DNA, 58 bp, Artificial; identical to SEQ ID NO: 469374
  Synthetic oligonucleotide

SEQ ID NO: 608286 - DNA, 60 bp, Artificial; identical to SEQ ID NO: 469375
  Synthetic oligonucleotide

SEQ ID NO: 608287 - DNA, 58 bp, Artificial; identical to SEQ ID NO: 469379
  Synthetic oligonucleotide

SEQ ID NO: 608288 - DNA, 60 bp, Artificial; identical to SEQ ID NO: 469381
  Synthetic oligonucleotide

SEQ ID NO: 608289 - DNA, 60 bp, Artificial; identical to SEQ ID NO: 469383
  Synthetic oligonucleotide

SEQ ID NO: 608290 - DNA, 57 bp, Artificial; identical to SEQ ID NO: 469386
  Synthetic oligonucleotide

SEQ ID NO: 608291 - DNA, 55 bp, Artificial; identical to SEQ ID NO: 469393
  Synthetic oligonucleotide

SEQ ID NO: 608292 - DNA, 55 bp, Artificial; identical to SEQ ID NO: 469394
  Synthetic oligonucleotide

SEQ ID NO: 608293 - DNA, 60 bp, Artificial; identical to SEQ ID NO: 120633
  Synthetic oligonucleotide

SEQ ID NO: 608294 - DNA, 53 bp, Artificial; identical to SEQ ID NO: 469395
  Synthetic oligonucleotide

SEQ ID NO: 608295 - DNA, 60 bp, Artificial; identical to SEQ ID NO: 469400
  Synthetic oligonucleotide

SEQ ID NO: 608296 - DNA, 60 bp, Artificial; identical to SEQ ID NO: 469402
  Synthetic oligonucleotide

SEQ ID NO: 608297 - DNA, 53 bp, Artificial; identical to SEQ ID NO: 469405
  Synthetic oligonucleotide

SEQ ID NO: 608298 - DNA, 60 bp, Artificial; identical to SEQ ID NO: 469406
  Synthetic oligonucleotide

SEQ ID NO: 608299 - DNA, 60 bp, Artificial; identical to SEQ ID NO: 469407
  Synthetic oligonucleotide

SEQ ID NO: 608300 - DNA, 60 bp, Artificial; identical to SEQ ID NO: 469408
  Synthetic oligonucleotide

SEQ ID NO: 608301 - DNA, 57 bp, Artificial; identical to SEQ ID NO: 469409
  Synthetic oligonucleotide

SEQ ID NO: 608302 - DNA, 55 bp, Artificial; identical to SEQ ID NO: 469413
  Synthetic oligonucleotide

SEQ ID NO: 608303 - DNA, 60 bp, Artificial; identical to SEQ ID NO: 469419
  Synthetic oligonucleotide

SEQ ID NO: 608304 - DNA, 60 bp, Artificial; identical to SEQ ID NO: 469420
  Synthetic oligonucleotide

SEQ ID NO: 608305 - DNA, 60 bp, Artificial; identical to SEQ ID NO: 469421
  Synthetic oligonucleotide

SEQ ID NO: 608306 - DNA, 52 bp, Artificial; identical to SEQ ID NO: 469424
  Synthetic oligonucleotide

SEQ ID NO: 608307 - DNA, 60 bp, Artificial; identical to SEQ ID NO: 469429
  Synthetic oligonucleotide

SEQ ID NO: 608308 - DNA, 60 bp, Artificial; identical to SEQ ID NO: 469430
  Synthetic oligonucleotide

SEQ ID NO: 608309 - DNA, 60 bp, Artificial; identical to SEQ ID NO: 469432
  Synthetic oligonucleotide

SEQ ID NO: 608310 - DNA, 60 bp, Artificial; identical to SEQ ID NO: 469435
  Synthetic oligonucleotide

SEQ ID NO: 608311 - DNA, 60 bp, Artificial; identical to SEQ ID NO: 469440
  Synthetic oligonucleotide

SEQ ID NO: 608312 - DNA, 56 bp, Artificial; identical to SEQ ID NO: 469441
  Synthetic oligonucleotide

SEQ ID NO: 608313 - DNA, 59 bp, Artificial; identical to SEQ ID NO: 469442
  Synthetic oligonucleotide

SEQ ID NO: 608314 - DNA, 55 bp, Artificial; identical to SEQ ID NO: 469443
  Synthetic oligonucleotide

SEQ ID NO: 608315 - DNA, 60 bp, Artificial; identical to SEQ ID NO: 469446
  Synthetic oligonucleotide

SEQ ID NO: 608316 - DNA, 60 bp, Artificial; identical to SEQ ID NO: 12424
  Synthetic oligonucleotide

SEQ ID NO: 608317 - DNA, 57 bp, Artificial; identical to SEQ ID NO: 16211
  Synthetic oligonucleotide

SEQ ID NO: 608318 - DNA, 58 bp, Artificial; identical to SEQ ID NO: 17731
  Synthetic oligonucleotide

SEQ ID NO: 608319 - DNA, 55 bp, Artificial; identical to SEQ ID NO: 469451
  Synthetic oligonucleotide

SEQ ID NO: 608320 - DNA, 60 bp, Artificial; identical to SEQ ID NO: 469452
  Synthetic oligonucleotide

SEQ ID NO: 608321 - DNA, 59 bp, Artificial; identical to SEQ ID NO: 469454
  Synthetic oligonucleotide

SEQ ID NO: 608322 - DNA, 60 bp, Artificial; identical to SEQ ID NO: 469457
  Synthetic oligonucleotide

SEQ ID NO: 608323 - DNA, 52 bp, Artificial; identical to SEQ ID NO: 469465
  Synthetic oligonucleotide

SEQ ID NO: 608324 - DNA, 60 bp, Artificial; identical to SEQ ID NO: 469468
  Synthetic oligonucleotide

SEQ ID NO: 608325 - DNA, 60 bp, Artificial; identical to SEQ ID NO: 469469
  Synthetic oligonucleotide

SEQ ID NO: 608326 - DNA, 60 bp, Artificial; identical to SEQ ID NO: 469470
  Synthetic oligonucleotide

SEQ ID NO: 608327 - DNA, 55 bp, Artificial; identical to SEQ ID NO: 469473
  Synthetic oligonucleotide

SEQ ID NO: 608328 - DNA, 53 bp, Artificial; identical to SEQ ID NO: 469475
  Synthetic oligonucleotide

SEQ ID NO: 608329 - DNA, 58 bp, Artificial; identical to SEQ ID NO: 469478
  Synthetic oligonucleotide

SEQ ID NO: 608330 - DNA, 58 bp, Artificial; identical to SEQ ID NO: 469479
  Synthetic oligonucleotide

SEQ ID NO: 608331 - DNA, 57 bp, Artificial; identical to SEQ ID NO: 469483
  Synthetic oligonucleotide

SEQ ID NO: 608332 - DNA, 59 bp, Artificial; identical to SEQ ID NO: 469485
  Synthetic oligonucleotide

SEQ ID NO: 608333 - DNA, 60 bp, Artificial; identical to SEQ ID NO: 469487
  Synthetic oligonucleotide

SEQ ID NO: 608334 - DNA, 60 bp, Artificial; identical to SEQ ID NO: 469488
  Synthetic oligonucleotide

SEQ ID NO: 608335 - DNA, 55 bp, Artificial; identical to SEQ ID NO: 469490
  Synthetic oligonucleotide

SEQ ID NO: 608336 - DNA, 50 bp, Artificial; identical to SEQ ID NO: 469492
  Synthetic oligonucleotide

SEQ ID NO: 608337 - DNA, 60 bp, Artificial; identical to SEQ ID NO: 469494
  Synthetic oligonucleotide

SEQ ID NO: 608338 - DNA, 51 bp, Artificial; identical to SEQ ID NO: 469497
  Synthetic oligonucleotide

SEQ ID NO: 608339 - DNA, 59 bp, Artificial; identical to SEQ ID NO: 469498
  Synthetic oligonucleotide

SEQ ID NO: 608340 - DNA, 52 bp, Artificial; identical to SEQ ID NO: 469500
  Synthetic oligonucleotide

SEQ ID NO: 608341 - DNA, 54 bp, Artificial; identical to SEQ ID NO: 469502
  Synthetic oligonucleotide

SEQ ID NO: 608342 - DNA, 57 bp, Artificial; identical to SEQ ID NO: 469503
  Synthetic oligonucleotide

SEQ ID NO: 608343 - DNA, 60 bp, Artificial; identical to SEQ ID NO: 469504
  Synthetic oligonucleotide

SEQ ID NO: 608344 - DNA, 52 bp, Artificial; identical to SEQ ID NO: 469505
  Synthetic oligonucleotide

SEQ ID NO: 608345 - DNA, 60 bp, Artificial; identical to SEQ ID NO: 469508
  Synthetic oligonucleotide

SEQ ID NO: 608346 - DNA, 52 bp, Artificial; identical to SEQ ID NO: 469509
  Synthetic oligonucleotide

SEQ ID NO: 608347 - DNA, 54 bp, Artificial; identical to SEQ ID NO: 469510
  Synthetic oligonucleotide

SEQ ID NO: 608348 - DNA, 55 bp, Artificial; identical to SEQ ID NO: 469511
  Synthetic oligonucleotide

SEQ ID NO: 608349 - DNA, 60 bp, Artificial; identical to SEQ ID NO: 469512
  Synthetic oligonucleotide

SEQ ID NO: 608350 - DNA, 59 bp, Artificial; identical to SEQ ID NO: 469514
  Synthetic oligonucleotide

SEQ ID NO: 608351 - DNA, 60 bp, Artificial; identical to SEQ ID NO: 469517
  Synthetic oligonucleotide

SEQ ID NO: 608352 - DNA, 60 bp, Artificial; identical to SEQ ID NO: 469518
  Synthetic oligonucleotide

SEQ ID NO: 608353 - DNA, 60 bp, Artificial; identical to SEQ ID NO: 469520
  Synthetic oligonucleotide

SEQ ID NO: 608354 - DNA, 55 bp, Artificial; identical to SEQ ID NO: 469523
  Synthetic oligonucleotide

SEQ ID NO: 608355 - DNA, 55 bp, Artificial; identical to SEQ ID NO: 469524
  Synthetic oligonucleotide

SEQ ID NO: 608356 - DNA, 53 bp, Artificial; identical to SEQ ID NO: 469526
  Synthetic oligonucleotide

SEQ ID NO: 608357 - DNA, 51 bp, Artificial; identical to SEQ ID NO: 469527
  Synthetic oligonucleotide

SEQ ID NO: 608358 - DNA, 55 bp, Artificial; identical to SEQ ID NO: 18136
  Synthetic oligonucleotide

SEQ ID NO: 608359 - DNA, 59 bp, Artificial; identical to SEQ ID NO: 469529
  Synthetic oligonucleotide

SEQ ID NO: 608360 - DNA, 59 bp, Artificial; identical to SEQ ID NO: 469532
  Synthetic oligonucleotide

SEQ ID NO: 608361 - DNA, 60 bp, Artificial; identical to SEQ ID NO: 469542
  Synthetic oligonucleotide

SEQ ID NO: 608362 - DNA, 60 bp, Artificial; identical to SEQ ID NO: 469543
  Synthetic oligonucleotide

SEQ ID NO: 608363 - DNA, 60 bp, Artificial; identical to SEQ ID NO: 469545
  Synthetic oligonucleotide

SEQ ID NO: 608364 - DNA, 52 bp, Artificial; identical to SEQ ID NO: 469551
  Synthetic oligonucleotide

SEQ ID NO: 608365 - DNA, 55 bp, Artificial; identical to SEQ ID NO: 469556
  Synthetic oligonucleotide

SEQ ID NO: 608366 - DNA, 60 bp, Artificial; identical to SEQ ID NO: 469558
  Synthetic oligonucleotide

SEQ ID NO: 608367 - DNA, 57 bp, Artificial; identical to SEQ ID NO: 9235
  Synthetic oligonucleotide

SEQ ID NO: 608368 - DNA, 60 bp, Artificial; identical to SEQ ID NO: 469567
  Synthetic oligonucleotide

SEQ ID NO: 608369 - DNA, 59 bp, Artificial; identical to SEQ ID NO: 469570
  Synthetic oligonucleotide

SEQ ID NO: 608370 - DNA, 57 bp, Artificial; identical to SEQ ID NO: 469571
  Synthetic oligonucleotide

SEQ ID NO: 608371 - DNA, 60 bp, Artificial; identical to SEQ ID NO: 469575
  Synthetic oligonucleotide

SEQ ID NO: 608372 - DNA, 59 bp, Artificial; identical to SEQ ID NO: 469576
  Synthetic oligonucleotide

SEQ ID NO: 608373 - DNA, 59 bp, Artificial; identical to SEQ ID NO: 469577
  Synthetic oligonucleotide

SEQ ID NO: 608374 - DNA, 60 bp, Artificial; identical to SEQ ID NO: 469579
  Synthetic oligonucleotide

SEQ ID NO: 608375 - DNA, 58 bp, Artificial; identical to SEQ ID NO: 469581
  Synthetic oligonucleotide

SEQ ID NO: 608376 - DNA, 60 bp, Artificial; identical to SEQ ID NO: 469582
  Synthetic oligonucleotide

SEQ ID NO: 608377 - DNA, 60 bp, Artificial; identical to SEQ ID NO: 469583
  Synthetic oligonucleotide

SEQ ID NO: 608378 - DNA, 58 bp, Artificial; identical to SEQ ID NO: 16730
  Synthetic oligonucleotide

SEQ ID NO: 608379 - DNA, 54 bp, Artificial; identical to SEQ ID NO: 469586
  Synthetic oligonucleotide

SEQ ID NO: 608380 - DNA, 59 bp, Artificial; identical to SEQ ID NO: 469588
  Synthetic oligonucleotide

SEQ ID NO: 608381 - DNA, 51 bp, Artificial; identical to SEQ ID NO: 469589
  Synthetic oligonucleotide

SEQ ID NO: 608382 - DNA, 58 bp, Artificial; identical to SEQ ID NO: 469592
  Synthetic oligonucleotide

SEQ ID NO: 608383 - DNA, 58 bp, Artificial; identical to SEQ ID NO: 469593
  Synthetic oligonucleotide

SEQ ID NO: 608384 - DNA, 58 bp, Artificial; identical to SEQ ID NO: 469600
  Synthetic oligonucleotide

SEQ ID NO: 608385 - DNA, 55 bp, Artificial; identical to SEQ ID NO: 469601
  Synthetic oligonucleotide

SEQ ID NO: 608386 - DNA, 56 bp, Artificial; identical to SEQ ID NO: 469605
  Synthetic oligonucleotide

SEQ ID NO: 608387 - DNA, 60 bp, Artificial; identical to SEQ ID NO: 469608
  Synthetic oligonucleotide

SEQ ID NO: 608388 - DNA, 60 bp, Artificial; identical to SEQ ID NO: 469610
  Synthetic oligonucleotide

SEQ ID NO: 608389 - DNA, 60 bp, Artificial; identical to SEQ ID NO: 469611
  Synthetic oligonucleotide

SEQ ID NO: 608390 - DNA, 60 bp, Artificial; identical to SEQ ID NO: 469614
  Synthetic oligonucleotide

SEQ ID NO: 608391 - DNA, 60 bp, Artificial; identical to SEQ ID NO: 469616
  Synthetic oligonucleotide

SEQ ID NO: 608392 - DNA, 60 bp, Artificial; identical to SEQ ID NO: 469617
  Synthetic oligonucleotide

SEQ ID NO: 608393 - DNA, 55 bp, Artificial; identical to SEQ ID NO: 469622
  Synthetic oligonucleotide

SEQ ID NO: 608394 - DNA, 60 bp, Artificial; identical to SEQ ID NO: 7931
  Synthetic oligonucleotide

SEQ ID NO: 608395 - DNA, 58 bp, Artificial; identical to SEQ ID NO: 469625
  Synthetic oligonucleotide

SEQ ID NO: 608396 - DNA, 57 bp, Artificial; identical to SEQ ID NO: 469626
  Synthetic oligonucleotide

SEQ ID NO: 608397 - DNA, 60 bp, Artificial; identical to SEQ ID NO: 469627
  Synthetic oligonucleotide

SEQ ID NO: 608398 - DNA, 60 bp, Artificial; identical to SEQ ID NO: 469629
  Synthetic oligonucleotide

SEQ ID NO: 608399 - DNA, 57 bp, Artificial; identical to SEQ ID NO: 469630
  Synthetic oligonucleotide

SEQ ID NO: 608400 - DNA, 59 bp, Artificial; identical to SEQ ID NO: 469636
  Synthetic oligonucleotide

SEQ ID NO: 608401 - DNA, 59 bp, Artificial; identical to SEQ ID NO: 469641
  Synthetic oligonucleotide

SEQ ID NO: 608402 - DNA, 57 bp, Artificial; identical to SEQ ID NO: 469646
  Synthetic oligonucleotide

SEQ ID NO: 608403 - DNA, 60 bp, Artificial; identical to SEQ ID NO: 469647
  Synthetic oligonucleotide

SEQ ID NO: 608404 - DNA, 60 bp, Artificial; identical to SEQ ID NO: 469650
  Synthetic oligonucleotide

SEQ ID NO: 608405 - DNA, 60 bp, Artificial; identical to SEQ ID NO: 469651
  Synthetic oligonucleotide

SEQ ID NO: 608406 - DNA, 60 bp, Artificial; identical to SEQ ID NO: 469655
  Synthetic oligonucleotide

SEQ ID NO: 608407 - DNA, 60 bp, Artificial; identical to SEQ ID NO: 469656
  Synthetic oligonucleotide

SEQ ID NO: 608408 - DNA, 60 bp, Artificial; identical to SEQ ID NO: 6349
  Synthetic oligonucleotide

SEQ ID NO: 608409 - DNA, 60 bp, Artificial; identical to SEQ ID NO: 469657
  Synthetic oligonucleotide

SEQ ID NO: 608410 - DNA, 60 bp, Artificial; identical to SEQ ID NO: 469658
  Synthetic oligonucleotide

SEQ ID NO: 608411 - DNA, 55 bp, Artificial; identical to SEQ ID NO: 469659
  Synthetic oligonucleotide

SEQ ID NO: 608412 - DNA, 52 bp, Artificial; identical to SEQ ID NO: 469662
  Synthetic oligonucleotide

SEQ ID NO: 608413 - DNA, 60 bp, Artificial; identical to SEQ ID NO: 7249
  Synthetic oligonucleotide

SEQ ID NO: 608414 - DNA, 60 bp, Artificial; identical to SEQ ID NO: 469664
  Synthetic oligonucleotide

SEQ ID NO: 608415 - DNA, 57 bp, Artificial; identical to SEQ ID NO: 469668
  Synthetic oligonucleotide

SEQ ID NO: 608416 - DNA, 51 bp, Artificial; identical to SEQ ID NO: 469673
  Synthetic oligonucleotide

SEQ ID NO: 608417 - DNA, 60 bp, Artificial; identical to SEQ ID NO: 469674
  Synthetic oligonucleotide

SEQ ID NO: 608418 - DNA, 54 bp, Artificial; identical to SEQ ID NO: 469677
  Synthetic oligonucleotide

SEQ ID NO: 608419 - DNA, 54 bp, Artificial; identical to SEQ ID NO: 469678
  Synthetic oligonucleotide

SEQ ID NO: 608420 - DNA, 60 bp, Artificial; identical to SEQ ID NO: 469679
  Synthetic oligonucleotide

SEQ ID NO: 608421 - DNA, 60 bp, Artificial; identical to SEQ ID NO: 469680
  Synthetic oligonucleotide

SEQ ID NO: 608422 - DNA, 54 bp, Artificial; identical to SEQ ID NO: 469682
  Synthetic oligonucleotide

SEQ ID NO: 608423 - DNA, 56 bp, Artificial; identical to SEQ ID NO: 15617
  Synthetic oligonucleotide

SEQ ID NO: 608424 - DNA, 60 bp, Artificial; identical to SEQ ID NO: 469685
  Synthetic oligonucleotide

SEQ ID NO: 608425 - DNA, 58 bp, Artificial; identical to SEQ ID NO: 469686
  Synthetic oligonucleotide

SEQ ID NO: 608426 - DNA, 60 bp, Artificial; identical to SEQ ID NO: 469687
  Synthetic oligonucleotide

SEQ ID NO: 608427 - DNA, 55 bp, Artificial; identical to SEQ ID NO: 469688
  Synthetic oligonucleotide

SEQ ID NO: 608428 - DNA, 58 bp, Artificial; identical to SEQ ID NO: 469690
  Synthetic oligonucleotide

SEQ ID NO: 608429 - DNA, 57 bp, Artificial; identical to SEQ ID NO: 469691
  Synthetic oligonucleotide

SEQ ID NO: 608430 - DNA, 56 bp, Artificial; identical to SEQ ID NO: 469692
  Synthetic oligonucleotide

SEQ ID NO: 608431 - DNA, 52 bp, Artificial; identical to SEQ ID NO: 469695
  Synthetic oligonucleotide

SEQ ID NO: 608432 - DNA, 60 bp, Artificial; identical to SEQ ID NO: 469697
  Synthetic oligonucleotide

SEQ ID NO: 608433 - DNA, 60 bp, Artificial; identical to SEQ ID NO: 469702
  Synthetic oligonucleotide

SEQ ID NO: 608434 - DNA, 57 bp, Artificial; identical to SEQ ID NO: 469704
  Synthetic oligonucleotide

SEQ ID NO: 608435 - DNA, 55 bp, Artificial; identical to SEQ ID NO: 469705
  Synthetic oligonucleotide

SEQ ID NO: 608436 - DNA, 54 bp, Artificial; identical to SEQ ID NO: 469711
  Synthetic oligonucleotide

SEQ ID NO: 608437 - DNA, 60 bp, Artificial; identical to SEQ ID NO: 469714
  Synthetic oligonucleotide

SEQ ID NO: 608438 - DNA, 60 bp, Artificial; identical to SEQ ID NO: 469715
  Synthetic oligonucleotide

SEQ ID NO: 608439 - DNA, 55 bp, Artificial; identical to SEQ ID NO: 469717
  Synthetic oligonucleotide

SEQ ID NO: 608440 - DNA, 60 bp, Artificial; identical to SEQ ID NO: 469721
  Synthetic oligonucleotide

SEQ ID NO: 608441 - DNA, 55 bp, Artificial; identical to SEQ ID NO: 469725
  Synthetic oligonucleotide

SEQ ID NO: 608442 - DNA, 50 bp, Artificial; identical to SEQ ID NO: 15373
  Synthetic oligonucleotide

SEQ ID NO: 608443 - DNA, 51 bp, Artificial; identical to SEQ ID NO: 469727
  Synthetic oligonucleotide

SEQ ID NO: 608444 - DNA, 60 bp, Artificial; identical to SEQ ID NO: 469728
  Synthetic oligonucleotide

SEQ ID NO: 608445 - DNA, 52 bp, Artificial; identical to SEQ ID NO: 469729
  Synthetic oligonucleotide

SEQ ID NO: 608446 - DNA, 60 bp, Artificial; identical to SEQ ID NO: 469732
  Synthetic oligonucleotide

SEQ ID NO: 608447 - DNA, 60 bp, Artificial; identical to SEQ ID NO: 10553
  Synthetic oligonucleotide

SEQ ID NO: 608448 - DNA, 55 bp, Artificial; identical to SEQ ID NO: 469734
  Synthetic oligonucleotide

SEQ ID NO: 608449 - DNA, 60 bp, Artificial; identical to SEQ ID NO: 469740
  Synthetic oligonucleotide

SEQ ID NO: 608450 - DNA, 55 bp, Artificial; identical to SEQ ID NO: 19358
  Synthetic oligonucleotide

SEQ ID NO: 608451 - DNA, 54 bp, Artificial; identical to SEQ ID NO: 469743
  Synthetic oligonucleotide

SEQ ID NO: 608452 - DNA, 60 bp, Artificial; identical to SEQ ID NO: 469747
  Synthetic oligonucleotide

SEQ ID NO: 608453 - DNA, 60 bp, Artificial; identical to SEQ ID NO: 469756
  Synthetic oligonucleotide

SEQ ID NO: 608454 - DNA, 55 bp, Artificial; identical to SEQ ID NO: 469757
  Synthetic oligonucleotide

SEQ ID NO: 608455 - DNA, 60 bp, Artificial; identical to SEQ ID NO: 469764
  Synthetic oligonucleotide

SEQ ID NO: 608456 - DNA, 60 bp, Artificial; identical to SEQ ID NO: 469765
  Synthetic oligonucleotide

SEQ ID NO: 608457 - DNA, 55 bp, Artificial; identical to SEQ ID NO: 469766
  Synthetic oligonucleotide

SEQ ID NO: 608458 - DNA, 53 bp, Artificial; identical to SEQ ID NO: 469767
  Synthetic oligonucleotide

SEQ ID NO: 608459 - DNA, 60 bp, Artificial; identical to SEQ ID NO: 469771
  Synthetic oligonucleotide

SEQ ID NO: 608460 - DNA, 60 bp, Artificial; identical to SEQ ID NO: 469775
  Synthetic oligonucleotide

SEQ ID NO: 608461 - DNA, 60 bp, Artificial; identical to SEQ ID NO: 469776
  Synthetic oligonucleotide

SEQ ID NO: 608462 - DNA, 55 bp, Artificial; identical to SEQ ID NO: 469777
  Synthetic oligonucleotide

SEQ ID NO: 608463 - DNA, 55 bp, Artificial; identical to SEQ ID NO: 469779
  Synthetic oligonucleotide

SEQ ID NO: 608464 - DNA, 55 bp, Artificial; identical to SEQ ID NO: 469784
  Synthetic oligonucleotide

SEQ ID NO: 608465 - DNA, 60 bp, Artificial; identical to SEQ ID NO: 469789
  Synthetic oligonucleotide

SEQ ID NO: 608466 - DNA, 55 bp, Artificial; identical to SEQ ID NO: 469791
  Synthetic oligonucleotide

SEQ ID NO: 608467 - DNA, 60 bp, Artificial; identical to SEQ ID NO: 7861
  Synthetic oligonucleotide

SEQ ID NO: 608468 - DNA, 55 bp, Artificial; identical to SEQ ID NO: 469793
  Synthetic oligonucleotide

SEQ ID NO: 608469 - DNA, 58 bp, Artificial; identical to SEQ ID NO: 469795
  Synthetic oligonucleotide

SEQ ID NO: 608470 - DNA, 56 bp, Artificial; identical to SEQ ID NO: 469799
  Synthetic oligonucleotide

SEQ ID NO: 608471 - DNA, 60 bp, Artificial; identical to SEQ ID NO: 113338
  Synthetic oligonucleotide

SEQ ID NO: 608472 - DNA, 57 bp, Artificial; identical to SEQ ID NO: 469803
  Synthetic oligonucleotide

SEQ ID NO: 608473 - DNA, 60 bp, Artificial; identical to SEQ ID NO: 469804
  Synthetic oligonucleotide

SEQ ID NO: 608474 - DNA, 59 bp, Artificial; identical to SEQ ID NO: 469805
  Synthetic oligonucleotide

SEQ ID NO: 608475 - DNA, 51 bp, Artificial; identical to SEQ ID NO: 469809
  Synthetic oligonucleotide

SEQ ID NO: 608476 - DNA, 59 bp, Artificial; identical to SEQ ID NO: 469812
  Synthetic oligonucleotide

SEQ ID NO: 608477 - DNA, 55 bp, Artificial; identical to SEQ ID NO: 469817
  Synthetic oligonucleotide

SEQ ID NO: 608478 - DNA, 59 bp, Artificial; identical to SEQ ID NO: 469818
  Synthetic oligonucleotide

SEQ ID NO: 608479 - DNA, 55 bp, Artificial; identical to SEQ ID NO: 469823
  Synthetic oligonucleotide

SEQ ID NO: 608480 - DNA, 60 bp, Artificial; identical to SEQ ID NO: 469825
  Synthetic oligonucleotide

SEQ ID NO: 608481 - DNA, 60 bp, Artificial; identical to SEQ ID NO: 469828
  Synthetic oligonucleotide

SEQ ID NO: 608482 - DNA, 57 bp, Artificial; identical to SEQ ID NO: 469830
  Synthetic oligonucleotide

SEQ ID NO: 608483 - DNA, 55 bp, Artificial; identical to SEQ ID NO: 469834
  Synthetic oligonucleotide

SEQ ID NO: 608484 - DNA, 60 bp, Artificial; identical to SEQ ID NO: 469837
  Synthetic oligonucleotide

SEQ ID NO: 608485 - DNA, 52 bp, Artificial; identical to SEQ ID NO: 469838
  Synthetic oligonucleotide

SEQ ID NO: 608486 - DNA, 60 bp, Artificial; identical to SEQ ID NO: 469839
  Synthetic oligonucleotide

SEQ ID NO: 608487 - DNA, 55 bp, Artificial; identical to SEQ ID NO: 469841
  Synthetic oligonucleotide

SEQ ID NO: 608488 - DNA, 56 bp, Artificial; identical to SEQ ID NO: 469842
  Synthetic oligonucleotide

SEQ ID NO: 608489 - DNA, 55 bp, Artificial; identical to SEQ ID NO: 469843
  Synthetic oligonucleotide

SEQ ID NO: 608490 - DNA, 60 bp, Artificial; identical to SEQ ID NO: 469845
  Synthetic oligonucleotide

SEQ ID NO: 608491 - DNA, 55 bp, Artificial; identical to SEQ ID NO: 469847
  Synthetic oligonucleotide

SEQ ID NO: 608492 - DNA, 54 bp, Artificial; identical to SEQ ID NO: 469848
  Synthetic oligonucleotide

SEQ ID NO: 608493 - DNA, 58 bp, Artificial; identical to SEQ ID NO: 469851
  Synthetic oligonucleotide

SEQ ID NO: 608494 - DNA, 59 bp, Artificial; identical to SEQ ID NO: 469853
  Synthetic oligonucleotide

SEQ ID NO: 608495 - DNA, 58 bp, Artificial; identical to SEQ ID NO: 469854
  Synthetic oligonucleotide

SEQ ID NO: 608496 - DNA, 54 bp, Artificial; identical to SEQ ID NO: 469856
  Synthetic oligonucleotide

SEQ ID NO: 608497 - DNA, 55 bp, Artificial; identical to SEQ ID NO: 469862
  Synthetic oligonucleotide

SEQ ID NO: 608498 - DNA, 55 bp, Artificial; identical to SEQ ID NO: 469865
  Synthetic oligonucleotide

SEQ ID NO: 608499 - DNA, 60 bp, Artificial; identical to SEQ ID NO: 469868
  Synthetic oligonucleotide

SEQ ID NO: 608500 - DNA, 60 bp, Artificial; identical to SEQ ID NO: 469869
  Synthetic oligonucleotide

SEQ ID NO: 608501 - DNA, 60 bp, Artificial; identical to SEQ ID NO: 469870
  Synthetic oligonucleotide

SEQ ID NO: 608502 - DNA, 60 bp, Artificial; identical to SEQ ID NO: 469872
  Synthetic oligonucleotide

SEQ ID NO: 608503 - DNA, 60 bp, Artificial; identical to SEQ ID NO: 469875
  Synthetic oligonucleotide

SEQ ID NO: 608504 - DNA, 60 bp, Artificial; identical to SEQ ID NO: 469876
  Synthetic oligonucleotide

SEQ ID NO: 608505 - DNA, 60 bp, Artificial; identical to SEQ ID NO: 469878
  Synthetic oligonucleotide

SEQ ID NO: 608506 - DNA, 60 bp, Artificial; identical to SEQ ID NO: 469879
  Synthetic oligonucleotide

SEQ ID NO: 608507 - DNA, 60 bp, Artificial; identical to SEQ ID NO: 469884
  Synthetic oligonucleotide

SEQ ID NO: 608508 - DNA, 60 bp, Artificial; identical to SEQ ID NO: 469885
  Synthetic oligonucleotide

SEQ ID NO: 608509 - DNA, 60 bp, Artificial; identical to SEQ ID NO: 469886
  Synthetic oligonucleotide

SEQ ID NO: 608510 - DNA, 60 bp, Artificial; identical to SEQ ID NO: 469888
  Synthetic oligonucleotide

SEQ ID NO: 608511 - DNA, 55 bp, Artificial; identical to SEQ ID NO: 469893
  Synthetic oligonucleotide

SEQ ID NO: 608512 - DNA, 60 bp, Artificial; identical to SEQ ID NO: 469895
  Synthetic oligonucleotide

SEQ ID NO: 608513 - DNA, 60 bp, Artificial; identical to SEQ ID NO: 12597
  Synthetic oligonucleotide

SEQ ID NO: 608514 - DNA, 58 bp, Artificial; identical to SEQ ID NO: 18754
  Synthetic oligonucleotide

SEQ ID NO: 608515 - DNA, 55 bp, Artificial; identical to SEQ ID NO: 469905
  Synthetic oligonucleotide

SEQ ID NO: 608516 - DNA, 52 bp, Artificial; identical to SEQ ID NO: 469906
  Synthetic oligonucleotide

SEQ ID NO: 608517 - DNA, 60 bp, Artificial; identical to SEQ ID NO: 8144
  Synthetic oligonucleotide

SEQ ID NO: 608518 - DNA, 52 bp, Artificial; identical to SEQ ID NO: 469907
  Synthetic oligonucleotide

SEQ ID NO: 608519 - DNA, 60 bp, Artificial; identical to SEQ ID NO: 9676
  Synthetic oligonucleotide

SEQ ID NO: 608520 - DNA, 60 bp, Artificial; identical to SEQ ID NO: 469908
  Synthetic oligonucleotide

SEQ ID NO: 608521 - DNA, 50 bp, Artificial; identical to SEQ ID NO: 469911
  Synthetic oligonucleotide

SEQ ID NO: 608522 - DNA, 54 bp, Artificial; identical to SEQ ID NO: 469912
  Synthetic oligonucleotide

SEQ ID NO: 608523 - DNA, 60 bp, Artificial; identical to SEQ ID NO: 469914
  Synthetic oligonucleotide

SEQ ID NO: 608524 - DNA, 57 bp, Artificial; identical to SEQ ID NO: 7534
  Synthetic oligonucleotide

SEQ ID NO: 608525 - DNA, 56 bp, Artificial; identical to SEQ ID NO: 469915
  Synthetic oligonucleotide

SEQ ID NO: 608526 - DNA, 53 bp, Artificial; identical to SEQ ID NO: 469916
  Synthetic oligonucleotide

SEQ ID NO: 608527 - DNA, 55 bp, Artificial; identical to SEQ ID NO: 469917
  Synthetic oligonucleotide

SEQ ID NO: 608528 - DNA, 55 bp, Artificial; identical to SEQ ID NO: 469921
  Synthetic oligonucleotide

SEQ ID NO: 608529 - DNA, 60 bp, Artificial; identical to SEQ ID NO: 469923
  Synthetic oligonucleotide

SEQ ID NO: 608530 - DNA, 55 bp, Artificial; identical to SEQ ID NO: 469926
  Synthetic oligonucleotide

SEQ ID NO: 608531 - DNA, 55 bp, Artificial; identical to SEQ ID NO: 469928
  Synthetic oligonucleotide

SEQ ID NO: 608532 - DNA, 51 bp, Artificial; identical to SEQ ID NO: 7616
  Synthetic oligonucleotide

SEQ ID NO: 608533 - DNA, 55 bp, Artificial; identical to SEQ ID NO: 469930
  Synthetic oligonucleotide

SEQ ID NO: 608534 - DNA, 52 bp, Artificial; identical to SEQ ID NO: 469931
  Synthetic oligonucleotide

SEQ ID NO: 608535 - DNA, 55 bp, Artificial; identical to SEQ ID NO: 469932
  Synthetic oligonucleotide

SEQ ID NO: 608536 - DNA, 60 bp, Artificial; identical to SEQ ID NO: 469937
  Synthetic oligonucleotide

SEQ ID NO: 608537 - DNA, 60 bp, Artificial; identical to SEQ ID NO: 469938
  Synthetic oligonucleotide

SEQ ID NO: 608538 - DNA, 56 bp, Artificial; identical to SEQ ID NO: 469939
  Synthetic oligonucleotide

SEQ ID NO: 608539 - DNA, 50 bp, Artificial; identical to SEQ ID NO: 469940
  Synthetic oligonucleotide

SEQ ID NO: 608540 - DNA, 59 bp, Artificial; identical to SEQ ID NO: 469941
  Synthetic oligonucleotide

SEQ ID NO: 608541 - DNA, 57 bp, Artificial; identical to SEQ ID NO: 469943
  Synthetic oligonucleotide

SEQ ID NO: 608542 - DNA, 50 bp, Artificial; identical to SEQ ID NO: 469948
  Synthetic oligonucleotide

SEQ ID NO: 608543 - DNA, 60 bp, Artificial; identical to SEQ ID NO: 469949
  Synthetic oligonucleotide

SEQ ID NO: 608544 - DNA, 58 bp, Artificial; identical to SEQ ID NO: 469950
  Synthetic oligonucleotide

SEQ ID NO: 608545 - DNA, 55 bp, Artificial; identical to SEQ ID NO: 469957
  Synthetic oligonucleotide

SEQ ID NO: 608546 - DNA, 60 bp, Artificial; identical to SEQ ID NO: 469958
  Synthetic oligonucleotide

SEQ ID NO: 608547 - DNA, 60 bp, Artificial; identical to SEQ ID NO: 469959
  Synthetic oligonucleotide

SEQ ID NO: 608548 - DNA, 60 bp, Artificial; identical to SEQ ID NO: 469960
  Synthetic oligonucleotide

SEQ ID NO: 608549 - DNA, 60 bp, Artificial; identical to SEQ ID NO: 469961
  Synthetic oligonucleotide

SEQ ID NO: 608550 - DNA, 60 bp, Artificial; identical to SEQ ID NO: 469962
  Synthetic oligonucleotide

SEQ ID NO: 608551 - DNA, 56 bp, Artificial; identical to SEQ ID NO: 469965
  Synthetic oligonucleotide

SEQ ID NO: 608552 - DNA, 60 bp, Artificial; identical to SEQ ID NO: 469966
  Synthetic oligonucleotide

SEQ ID NO: 608553 - DNA, 59 bp, Artificial; identical to SEQ ID NO: 469969
  Synthetic oligonucleotide

SEQ ID NO: 608554 - DNA, 55 bp, Artificial; identical to SEQ ID NO: 469970
  Synthetic oligonucleotide

SEQ ID NO: 608555 - DNA, 60 bp, Artificial; identical to SEQ ID NO: 469973
  Synthetic oligonucleotide

SEQ ID NO: 608556 - DNA, 55 bp, Artificial; identical to SEQ ID NO: 469977
  Synthetic oligonucleotide

SEQ ID NO: 608557 - DNA, 60 bp, Artificial; identical to SEQ ID NO: 469979
  Synthetic oligonucleotide

SEQ ID NO: 608558 - DNA, 60 bp, Artificial; identical to SEQ ID NO: 469980
  Synthetic oligonucleotide

SEQ ID NO: 608559 - DNA, 55 bp, Artificial; identical to SEQ ID NO: 469983
  Synthetic oligonucleotide

SEQ ID NO: 608560 - DNA, 60 bp, Artificial; identical to SEQ ID NO: 469992
  Synthetic oligonucleotide

SEQ ID NO: 608561 - DNA, 56 bp, Artificial; identical to SEQ ID NO: 469993
  Synthetic oligonucleotide

SEQ ID NO: 608562 - DNA, 60 bp, Artificial; identical to SEQ ID NO: 469998
  Synthetic oligonucleotide

SEQ ID NO: 608563 - DNA, 60 bp, Artificial; identical to SEQ ID NO: 8106
  Synthetic oligonucleotide

SEQ ID NO: 608564 - DNA, 60 bp, Artificial; identical to SEQ ID NO: 470001
  Synthetic oligonucleotide

SEQ ID NO: 608565 - DNA, 55 bp, Artificial; identical to SEQ ID NO: 470003
  Synthetic oligonucleotide

SEQ ID NO: 608566 - DNA, 58 bp, Artificial; identical to SEQ ID NO: 470006
  Synthetic oligonucleotide

SEQ ID NO: 608567 - DNA, 60 bp, Artificial; identical to SEQ ID NO: 470008
  Synthetic oligonucleotide

SEQ ID NO: 608568 - DNA, 60 bp, Artificial; identical to SEQ ID NO: 470014
  Synthetic oligonucleotide

SEQ ID NO: 608569 - DNA, 55 bp, Artificial; identical to SEQ ID NO: 470016
  Synthetic oligonucleotide

SEQ ID NO: 608570 - DNA, 60 bp, Artificial; identical to SEQ ID NO: 470017
  Synthetic oligonucleotide

SEQ ID NO: 608571 - DNA, 58 bp, Artificial; identical to SEQ ID NO: 470023
  Synthetic oligonucleotide

SEQ ID NO: 608572 - DNA, 59 bp, Artificial; identical to SEQ ID NO: 470024
  Synthetic oligonucleotide

SEQ ID NO: 608573 - DNA, 60 bp, Artificial; identical to SEQ ID NO: 470025
  Synthetic oligonucleotide

SEQ ID NO: 608574 - DNA, 60 bp, Artificial; identical to SEQ ID NO: 15721
  Synthetic oligonucleotide

SEQ ID NO: 608575 - DNA, 60 bp, Artificial; identical to SEQ ID NO: 470027
  Synthetic oligonucleotide

SEQ ID NO: 608576 - DNA, 60 bp, Artificial; identical to SEQ ID NO: 470028
  Synthetic oligonucleotide

SEQ ID NO: 608577 - DNA, 53 bp, Artificial; identical to SEQ ID NO: 14912
  Synthetic oligonucleotide

SEQ ID NO: 608578 - DNA, 55 bp, Artificial; identical to SEQ ID NO: 470029
  Synthetic oligonucleotide

SEQ ID NO: 608579 - DNA, 51 bp, Artificial; identical to SEQ ID NO: 470034
  Synthetic oligonucleotide

SEQ ID NO: 608580 - DNA, 53 bp, Artificial; identical to SEQ ID NO: 470035
  Synthetic oligonucleotide

SEQ ID NO: 608581 - DNA, 55 bp, Artificial; identical to SEQ ID NO: 470036
  Synthetic oligonucleotide

SEQ ID NO: 608582 - DNA, 60 bp, Artificial; identical to SEQ ID NO: 470039
  Synthetic oligonucleotide

SEQ ID NO: 608583 - DNA, 55 bp, Artificial; identical to SEQ ID NO: 470042
  Synthetic oligonucleotide

SEQ ID NO: 608584 - DNA, 55 bp, Artificial; identical to SEQ ID NO: 470043
  Synthetic oligonucleotide

SEQ ID NO: 608585 - DNA, 60 bp, Artificial; identical to SEQ ID NO: 33506
  Synthetic oligonucleotide

SEQ ID NO: 608586 - DNA, 53 bp, Artificial; identical to SEQ ID NO: 470045
  Synthetic oligonucleotide

SEQ ID NO: 608587 - DNA, 57 bp, Artificial; identical to SEQ ID NO: 470046
  Synthetic oligonucleotide

SEQ ID NO: 608588 - DNA, 60 bp, Artificial; identical to SEQ ID NO: 470047
  Synthetic oligonucleotide

SEQ ID NO: 608589 - DNA, 60 bp, Artificial; identical to SEQ ID NO: 470048
  Synthetic oligonucleotide

SEQ ID NO: 608590 - DNA, 60 bp, Artificial; identical to SEQ ID NO: 470051
  Synthetic oligonucleotide

SEQ ID NO: 608591 - DNA, 60 bp, Artificial; identical to SEQ ID NO: 470052
  Synthetic oligonucleotide

SEQ ID NO: 608592 - DNA, 60 bp, Artificial; identical to SEQ ID NO: 470055
  Synthetic oligonucleotide

SEQ ID NO: 608593 - DNA, 60 bp, Artificial; identical to SEQ ID NO: 470056
  Synthetic oligonucleotide

SEQ ID NO: 608594 - DNA, 60 bp, Artificial; identical to SEQ ID NO: 470058
  Synthetic oligonucleotide

SEQ ID NO: 608595 - DNA, 59 bp, Artificial; identical to SEQ ID NO: 470062
  Synthetic oligonucleotide

SEQ ID NO: 608596 - DNA, 57 bp, Artificial; identical to SEQ ID NO: 16711
  Synthetic oligonucleotide

SEQ ID NO: 608597 - DNA, 54 bp, Artificial; identical to SEQ ID NO: 470067
  Synthetic oligonucleotide

SEQ ID NO: 608598 - DNA, 60 bp, Artificial; identical to SEQ ID NO: 10363
  Synthetic oligonucleotide

SEQ ID NO: 608599 - DNA, 60 bp, Artificial; identical to SEQ ID NO: 470071
  Synthetic oligonucleotide

SEQ ID NO: 608600 - DNA, 55 bp, Artificial; identical to SEQ ID NO: 470076
  Synthetic oligonucleotide

SEQ ID NO: 608601 - DNA, 58 bp, Artificial; identical to SEQ ID NO: 470077
  Synthetic oligonucleotide

SEQ ID NO: 608602 - DNA, 60 bp, Artificial; identical to SEQ ID NO: 470080
  Synthetic oligonucleotide

SEQ ID NO: 608603 - DNA, 54 bp, Artificial; identical to SEQ ID NO: 470081
  Synthetic oligonucleotide

SEQ ID NO: 608604 - DNA, 60 bp, Artificial; identical to SEQ ID NO: 470084
  Synthetic oligonucleotide

SEQ ID NO: 608605 - DNA, 60 bp, Artificial; identical to SEQ ID NO: 470087
  Synthetic oligonucleotide

SEQ ID NO: 608606 - DNA, 60 bp, Artificial; identical to SEQ ID NO: 470090
  Synthetic oligonucleotide

SEQ ID NO: 608607 - DNA, 60 bp, Artificial; identical to SEQ ID NO: 470095
  Synthetic oligonucleotide

SEQ ID NO: 608608 - DNA, 55 bp, Artificial; identical to SEQ ID NO: 470100
  Synthetic oligonucleotide

SEQ ID NO: 608609 - DNA, 60 bp, Artificial; identical to SEQ ID NO: 470101
  Synthetic oligonucleotide

SEQ ID NO: 608610 - DNA, 55 bp, Artificial; identical to SEQ ID NO: 470104
  Synthetic oligonucleotide

SEQ ID NO: 608611 - DNA, 60 bp, Artificial; identical to SEQ ID NO: 470107
  Synthetic oligonucleotide

SEQ ID NO: 608612 - DNA, 54 bp, Artificial; identical to SEQ ID NO: 470109
  Synthetic oligonucleotide

SEQ ID NO: 608613 - DNA, 60 bp, Artificial; identical to SEQ ID NO: 470110
  Synthetic oligonucleotide

SEQ ID NO: 608614 - DNA, 60 bp, Artificial; identical to SEQ ID NO: 470111
  Synthetic oligonucleotide

SEQ ID NO: 608615 - DNA, 59 bp, Artificial; identical to SEQ ID NO: 470112
  Synthetic oligonucleotide

SEQ ID NO: 608616 - DNA, 60 bp, Artificial; identical to SEQ ID NO: 11827
  Synthetic oligonucleotide

SEQ ID NO: 608617 - DNA, 58 bp, Artificial; identical to SEQ ID NO: 360
  Synthetic oligonucleotide

SEQ ID NO: 608618 - DNA, 54 bp, Artificial; identical to SEQ ID NO: 470115
  Synthetic oligonucleotide

SEQ ID NO: 608619 - DNA, 60 bp, Artificial; identical to SEQ ID NO: 470118
  Synthetic oligonucleotide

SEQ ID NO: 608620 - DNA, 53 bp, Artificial; identical to SEQ ID NO: 470120
  Synthetic oligonucleotide

SEQ ID NO: 608621 - DNA, 50 bp, Artificial; identical to SEQ ID NO: 470121
  Synthetic oligonucleotide

SEQ ID NO: 608622 - DNA, 51 bp, Artificial; identical to SEQ ID NO: 470130
  Synthetic oligonucleotide

SEQ ID NO: 608623 - DNA, 55 bp, Artificial; identical to SEQ ID NO: 470135
  Synthetic oligonucleotide

SEQ ID NO: 608624 - DNA, 55 bp, Artificial; identical to SEQ ID NO: 470139
  Synthetic oligonucleotide

SEQ ID NO: 608625 - DNA, 60 bp, Artificial; identical to SEQ ID NO: 470140
  Synthetic oligonucleotide

SEQ ID NO: 608626 - DNA, 55 bp, Artificial; identical to SEQ ID NO: 470143
  Synthetic oligonucleotide

SEQ ID NO: 608627 - DNA, 52 bp, Artificial; identical to SEQ ID NO: 10542
  Synthetic oligonucleotide

SEQ ID NO: 608628 - DNA, 55 bp, Artificial; identical to SEQ ID NO: 470150
  Synthetic oligonucleotide

SEQ ID NO: 608629 - DNA, 60 bp, Artificial; identical to SEQ ID NO: 470151
  Synthetic oligonucleotide

SEQ ID NO: 608630 - DNA, 51 bp, Artificial; identical to SEQ ID NO: 6105
  Synthetic oligonucleotide

SEQ ID NO: 608631 - DNA, 60 bp, Artificial; identical to SEQ ID NO: 470155
  Synthetic oligonucleotide

SEQ ID NO: 608632 - DNA, 58 bp, Artificial; identical to SEQ ID NO: 470156
  Synthetic oligonucleotide

SEQ ID NO: 608633 - DNA, 60 bp, Artificial; identical to SEQ ID NO: 470159
  Synthetic oligonucleotide

SEQ ID NO: 608634 - DNA, 60 bp, Artificial; identical to SEQ ID NO: 12282
  Synthetic oligonucleotide

SEQ ID NO: 608635 - DNA, 55 bp, Artificial; identical to SEQ ID NO: 470161
  Synthetic oligonucleotide

SEQ ID NO: 608636 - DNA, 55 bp, Artificial; identical to SEQ ID NO: 470165
  Synthetic oligonucleotide

SEQ ID NO: 608637 - DNA, 59 bp, Artificial; identical to SEQ ID NO: 470166
  Synthetic oligonucleotide

SEQ ID NO: 608638 - DNA, 59 bp, Artificial; identical to SEQ ID NO: 470167
  Synthetic oligonucleotide

SEQ ID NO: 608639 - DNA, 60 bp, Artificial; identical to SEQ ID NO: 470170
  Synthetic oligonucleotide

SEQ ID NO: 608640 - DNA, 56 bp, Artificial; identical to SEQ ID NO: 470175
  Synthetic oligonucleotide

SEQ ID NO: 608641 - DNA, 58 bp, Artificial; identical to SEQ ID NO: 470181
  Synthetic oligonucleotide

SEQ ID NO: 608642 - DNA, 60 bp, Artificial; identical to SEQ ID NO: 470183
  Synthetic oligonucleotide

SEQ ID NO: 608643 - DNA, 56 bp, Artificial; identical to SEQ ID NO: 470184
  Synthetic oligonucleotide

SEQ ID NO: 608644 - DNA, 60 bp, Artificial; identical to SEQ ID NO: 470188
  Synthetic oligonucleotide

SEQ ID NO: 608645 - DNA, 57 bp, Artificial; identical to SEQ ID NO: 470190
  Synthetic oligonucleotide

SEQ ID NO: 608646 - DNA, 56 bp, Artificial; identical to SEQ ID NO: 470194
  Synthetic oligonucleotide

SEQ ID NO: 608647 - DNA, 60 bp, Artificial; identical to SEQ ID NO: 10410
  Synthetic oligonucleotide

SEQ ID NO: 608648 - DNA, 52 bp, Artificial; identical to SEQ ID NO: 15292
  Synthetic oligonucleotide

SEQ ID NO: 608649 - DNA, 53 bp, Artificial; identical to SEQ ID NO: 470197
  Synthetic oligonucleotide

SEQ ID NO: 608650 - DNA, 60 bp, Artificial; identical to SEQ ID NO: 470199
  Synthetic oligonucleotide

SEQ ID NO: 608651 - DNA, 60 bp, Artificial; identical to SEQ ID NO: 470200
  Synthetic oligonucleotide

SEQ ID NO: 608652 - DNA, 50 bp, Artificial; identical to SEQ ID NO: 470203
  Synthetic oligonucleotide

SEQ ID NO: 608653 - DNA, 60 bp, Artificial; identical to SEQ ID NO: 470205
  Synthetic oligonucleotide

SEQ ID NO: 608654 - DNA, 59 bp, Artificial; identical to SEQ ID NO: 470206
  Synthetic oligonucleotide

SEQ ID NO: 608655 - DNA, 54 bp, Artificial; identical to SEQ ID NO: 470207
  Synthetic oligonucleotide

SEQ ID NO: 608656 - DNA, 60 bp, Artificial; identical to SEQ ID NO: 470208
  Synthetic oligonucleotide

SEQ ID NO: 608657 - DNA, 55 bp, Artificial; identical to SEQ ID NO: 470209
  Synthetic oligonucleotide

SEQ ID NO: 608658 - DNA, 54 bp, Artificial; identical to SEQ ID NO: 470212
  Synthetic oligonucleotide

SEQ ID NO: 608659 - DNA, 52 bp, Artificial; identical to SEQ ID NO: 470218
  Synthetic oligonucleotide

SEQ ID NO: 608660 - DNA, 60 bp, Artificial; identical to SEQ ID NO: 470219
  Synthetic oligonucleotide

SEQ ID NO: 608661 - DNA, 60 bp, Artificial; identical to SEQ ID NO: 470220
  Synthetic oligonucleotide

SEQ ID NO: 608662 - DNA, 56 bp, Artificial; identical to SEQ ID NO: 470224
  Synthetic oligonucleotide

SEQ ID NO: 608663 - DNA, 58 bp, Artificial; identical to SEQ ID NO: 470226
  Synthetic oligonucleotide

SEQ ID NO: 608664 - DNA, 60 bp, Artificial; identical to SEQ ID NO: 470228
  Synthetic oligonucleotide

SEQ ID NO: 608665 - DNA, 60 bp, Artificial; identical to SEQ ID NO: 470231
  Synthetic oligonucleotide

SEQ ID NO: 608666 - DNA, 60 bp, Artificial; identical to SEQ ID NO: 470236
  Synthetic oligonucleotide

SEQ ID NO: 608667 - DNA, 60 bp, Artificial; identical to SEQ ID NO: 470240
  Synthetic oligonucleotide

SEQ ID NO: 608668 - DNA, 60 bp, Artificial; identical to SEQ ID NO: 470241
  Synthetic oligonucleotide

SEQ ID NO: 608669 - DNA, 60 bp, Artificial; identical to SEQ ID NO: 470243
  Synthetic oligonucleotide

SEQ ID NO: 608670 - DNA, 57 bp, Artificial; identical to SEQ ID NO: 470244
  Synthetic oligonucleotide

SEQ ID NO: 608671 - DNA, 60 bp, Artificial; identical to SEQ ID NO: 470248
  Synthetic oligonucleotide

SEQ ID NO: 608672 - DNA, 55 bp, Artificial; identical to SEQ ID NO: 470250
  Synthetic oligonucleotide

SEQ ID NO: 608673 - DNA, 60 bp, Artificial; identical to SEQ ID NO: 470257
  Synthetic oligonucleotide

SEQ ID NO: 608674 - DNA, 60 bp, Artificial; identical to SEQ ID NO: 470262
  Synthetic oligonucleotide

SEQ ID NO: 608675 - DNA, 60 bp, Artificial; identical to SEQ ID NO: 470263
  Synthetic oligonucleotide

SEQ ID NO: 608676 - DNA, 60 bp, Artificial; identical to SEQ ID NO: 470264
  Synthetic oligonucleotide

SEQ ID NO: 608677 - DNA, 60 bp, Artificial; identical to SEQ ID NO: 470266
  Synthetic oligonucleotide

SEQ ID NO: 608678 - DNA, 60 bp, Artificial; identical to SEQ ID NO: 470267
  Synthetic oligonucleotide

SEQ ID NO: 608679 - DNA, 60 bp, Artificial; identical to SEQ ID NO: 6018
  Synthetic oligonucleotide

SEQ ID NO: 608680 - DNA, 60 bp, Artificial; identical to SEQ ID NO: 470269
  Synthetic oligonucleotide

SEQ ID NO: 608681 - DNA, 60 bp, Artificial; identical to SEQ ID NO: 470271
  Synthetic oligonucleotide

SEQ ID NO: 608682 - DNA, 55 bp, Artificial; identical to SEQ ID NO: 470278
  Synthetic oligonucleotide

SEQ ID NO: 608683 - DNA, 60 bp, Artificial; identical to SEQ ID NO: 470281
  Synthetic oligonucleotide

SEQ ID NO: 608684 - DNA, 55 bp, Artificial; identical to SEQ ID NO: 470282
  Synthetic oligonucleotide

SEQ ID NO: 608685 - DNA, 60 bp, Artificial; identical to SEQ ID NO: 470284
  Synthetic oligonucleotide

SEQ ID NO: 608686 - DNA, 55 bp, Artificial; identical to SEQ ID NO: 470285
  Synthetic oligonucleotide

SEQ ID NO: 608687 - DNA, 54 bp, Artificial; identical to SEQ ID NO: 470291
  Synthetic oligonucleotide

SEQ ID NO: 608688 - DNA, 55 bp, Artificial; identical to SEQ ID NO: 470297
  Synthetic oligonucleotide

SEQ ID NO: 608689 - DNA, 54 bp, Artificial; identical to SEQ ID NO: 470298
  Synthetic oligonucleotide

SEQ ID NO: 608690 - DNA, 60 bp, Artificial; identical to SEQ ID NO: 470300
  Synthetic oligonucleotide

SEQ ID NO: 608691 - DNA, 52 bp, Artificial; identical to SEQ ID NO: 470301
  Synthetic oligonucleotide

SEQ ID NO: 608692 - DNA, 53 bp, Artificial; identical to SEQ ID NO: 470304
  Synthetic oligonucleotide

SEQ ID NO: 608693 - DNA, 60 bp, Artificial; identical to SEQ ID NO: 470306
  Synthetic oligonucleotide

SEQ ID NO: 608694 - DNA, 50 bp, Artificial; identical to SEQ ID NO: 470315
  Synthetic oligonucleotide

SEQ ID NO: 608695 - DNA, 60 bp, Artificial; identical to SEQ ID NO: 470318
  Synthetic oligonucleotide

SEQ ID NO: 608696 - DNA, 60 bp, Artificial; identical to SEQ ID NO: 470319
  Synthetic oligonucleotide

SEQ ID NO: 608697 - DNA, 60 bp, Artificial; identical to SEQ ID NO: 470320
  Synthetic oligonucleotide

SEQ ID NO: 608698 - DNA, 59 bp, Artificial; identical to SEQ ID NO: 470321
  Synthetic oligonucleotide

SEQ ID NO: 608699 - DNA, 55 bp, Artificial; identical to SEQ ID NO: 470322
  Synthetic oligonucleotide

SEQ ID NO: 608700 - DNA, 52 bp, Artificial; identical to SEQ ID NO: 470323
  Synthetic oligonucleotide

SEQ ID NO: 608701 - DNA, 57 bp, Artificial; identical to SEQ ID NO: 470324
  Synthetic oligonucleotide

SEQ ID NO: 608702 - DNA, 60 bp, Artificial; identical to SEQ ID NO: 470325
  Synthetic oligonucleotide

SEQ ID NO: 608703 - DNA, 57 bp, Artificial; identical to SEQ ID NO: 470326
  Synthetic oligonucleotide

SEQ ID NO: 608704 - DNA, 56 bp, Artificial; identical to SEQ ID NO: 470329
  Synthetic oligonucleotide

SEQ ID NO: 608705 - DNA, 58 bp, Artificial; identical to SEQ ID NO: 470330
  Synthetic oligonucleotide

SEQ ID NO: 608706 - DNA, 60 bp, Artificial; identical to SEQ ID NO: 470333
  Synthetic oligonucleotide

SEQ ID NO: 608707 - DNA, 56 bp, Artificial; identical to SEQ ID NO: 470334
  Synthetic oligonucleotide

SEQ ID NO: 608708 - DNA, 60 bp, Artificial; identical to SEQ ID NO: 470337
  Synthetic oligonucleotide

SEQ ID NO: 608709 - DNA, 60 bp, Artificial; identical to SEQ ID NO: 470338
  Synthetic oligonucleotide

SEQ ID NO: 608710 - DNA, 60 bp, Artificial; identical to SEQ ID NO: 470342
  Synthetic oligonucleotide

SEQ ID NO: 608711 - DNA, 58 bp, Artificial; identical to SEQ ID NO: 470345
  Synthetic oligonucleotide

SEQ ID NO: 608712 - DNA, 60 bp, Artificial; identical to SEQ ID NO: 470346
  Synthetic oligonucleotide

SEQ ID NO: 608713 - DNA, 60 bp, Artificial; identical to SEQ ID NO: 470347
  Synthetic oligonucleotide

SEQ ID NO: 608714 - DNA, 57 bp, Artificial; identical to SEQ ID NO: 470350
  Synthetic oligonucleotide

SEQ ID NO: 608715 - DNA, 55 bp, Artificial; identical to SEQ ID NO: 470352
  Synthetic oligonucleotide

SEQ ID NO: 608716 - DNA, 59 bp, Artificial; identical to SEQ ID NO: 470354
  Synthetic oligonucleotide

SEQ ID NO: 608717 - DNA, 60 bp, Artificial; identical to SEQ ID NO: 470357
  Synthetic oligonucleotide

SEQ ID NO: 608718 - DNA, 59 bp, Artificial; identical to SEQ ID NO: 470358
  Synthetic oligonucleotide

SEQ ID NO: 608719 - DNA, 53 bp, Artificial; identical to SEQ ID NO: 470359
  Synthetic oligonucleotide

SEQ ID NO: 608720 - DNA, 58 bp, Artificial; identical to SEQ ID NO: 470360
  Synthetic oligonucleotide

SEQ ID NO: 608721 - DNA, 60 bp, Artificial; identical to SEQ ID NO: 470363
  Synthetic oligonucleotide

SEQ ID NO: 608722 - DNA, 55 bp, Artificial; identical to SEQ ID NO: 470364
  Synthetic oligonucleotide

SEQ ID NO: 608723 - DNA, 60 bp, Artificial; identical to SEQ ID NO: 470366
  Synthetic oligonucleotide

SEQ ID NO: 608724 - DNA, 60 bp, Artificial; identical to SEQ ID NO: 8138
  Synthetic oligonucleotide

SEQ ID NO: 608725 - DNA, 58 bp, Artificial; identical to SEQ ID NO: 470370
  Synthetic oligonucleotide

SEQ ID NO: 608726 - DNA, 60 bp, Artificial; identical to SEQ ID NO: 470373
  Synthetic oligonucleotide

SEQ ID NO: 608727 - DNA, 60 bp, Artificial; identical to SEQ ID NO: 470374
  Synthetic oligonucleotide

SEQ ID NO: 608728 - DNA, 55 bp, Artificial; identical to SEQ ID NO: 470377
  Synthetic oligonucleotide

SEQ ID NO: 608729 - DNA, 59 bp, Artificial; identical to SEQ ID NO: 470382
  Synthetic oligonucleotide

SEQ ID NO: 608730 - DNA, 60 bp, Artificial; identical to SEQ ID NO: 470383
  Synthetic oligonucleotide

SEQ ID NO: 608731 - DNA, 55 bp, Artificial; identical to SEQ ID NO: 470385
  Synthetic oligonucleotide

SEQ ID NO: 608732 - DNA, 58 bp, Artificial; identical to SEQ ID NO: 470388
  Synthetic oligonucleotide

SEQ ID NO: 608733 - DNA, 60 bp, Artificial; identical to SEQ ID NO: 470390
  Synthetic oligonucleotide

SEQ ID NO: 608734 - DNA, 55 bp, Artificial; identical to SEQ ID NO: 470394
  Synthetic oligonucleotide

SEQ ID NO: 608735 - DNA, 60 bp, Artificial; identical to SEQ ID NO: 470398
  Synthetic oligonucleotide

SEQ ID NO: 608736 - DNA, 52 bp, Artificial; identical to SEQ ID NO: 470400
  Synthetic oligonucleotide

SEQ ID NO: 608737 - DNA, 60 bp, Artificial; identical to SEQ ID NO: 470401
  Synthetic oligonucleotide

SEQ ID NO: 608738 - DNA, 58 bp, Artificial; identical to SEQ ID NO: 470405
  Synthetic oligonucleotide

SEQ ID NO: 608739 - DNA, 59 bp, Artificial; identical to SEQ ID NO: 470407
  Synthetic oligonucleotide

SEQ ID NO: 608740 - DNA, 54 bp, Artificial; identical to SEQ ID NO: 470408
  Synthetic oligonucleotide

SEQ ID NO: 608741 - DNA, 55 bp, Artificial; identical to SEQ ID NO: 470409
  Synthetic oligonucleotide

SEQ ID NO: 608742 - DNA, 60 bp, Artificial; identical to SEQ ID NO: 470410
  Synthetic oligonucleotide

SEQ ID NO: 608743 - DNA, 60 bp, Artificial; identical to SEQ ID NO: 470411
  Synthetic oligonucleotide

SEQ ID NO: 608744 - DNA, 58 bp, Artificial; identical to SEQ ID NO: 470416
  Synthetic oligonucleotide

SEQ ID NO: 608745 - DNA, 60 bp, Artificial; identical to SEQ ID NO: 470421
  Synthetic oligonucleotide

SEQ ID NO: 608746 - DNA, 53 bp, Artificial; identical to SEQ ID NO: 470422
  Synthetic oligonucleotide

SEQ ID NO: 608747 - DNA, 59 bp, Artificial; identical to SEQ ID NO: 470424
  Synthetic oligonucleotide

SEQ ID NO: 608748 - DNA, 51 bp, Artificial; identical to SEQ ID NO: 470425
  Synthetic oligonucleotide

SEQ ID NO: 608749 - DNA, 55 bp, Artificial; identical to SEQ ID NO: 470426
  Synthetic oligonucleotide

SEQ ID NO: 608750 - DNA, 57 bp, Artificial; identical to SEQ ID NO: 470430
  Synthetic oligonucleotide

SEQ ID NO: 608751 - DNA, 53 bp, Artificial; identical to SEQ ID NO: 470432
  Synthetic oligonucleotide

SEQ ID NO: 608752 - DNA, 57 bp, Artificial; identical to SEQ ID NO: 470436
  Synthetic oligonucleotide

SEQ ID NO: 608753 - DNA, 54 bp, Artificial; identical to SEQ ID NO: 470437
  Synthetic oligonucleotide

SEQ ID NO: 608754 - DNA, 55 bp, Artificial; identical to SEQ ID NO: 470438
  Synthetic oligonucleotide

SEQ ID NO: 608755 - DNA, 60 bp, Artificial; identical to SEQ ID NO: 470439
  Synthetic oligonucleotide

SEQ ID NO: 608756 - DNA, 55 bp, Artificial; identical to SEQ ID NO: 470441
  Synthetic oligonucleotide

SEQ ID NO: 608757 - DNA, 55 bp, Artificial; identical to SEQ ID NO: 470444
  Synthetic oligonucleotide

SEQ ID NO: 608758 - DNA, 56 bp, Artificial; identical to SEQ ID NO: 470448
  Synthetic oligonucleotide

SEQ ID NO: 608759 - DNA, 60 bp, Artificial; identical to SEQ ID NO: 470454
  Synthetic oligonucleotide

SEQ ID NO: 608760 - DNA, 52 bp, Artificial; identical to SEQ ID NO: 470458
  Synthetic oligonucleotide

SEQ ID NO: 608761 - DNA, 58 bp, Artificial; identical to SEQ ID NO: 470462
  Synthetic oligonucleotide

SEQ ID NO: 608762 - DNA, 59 bp, Artificial; identical to SEQ ID NO: 470463
  Synthetic oligonucleotide

SEQ ID NO: 608763 - DNA, 55 bp, Artificial; identical to SEQ ID NO: 470465
  Synthetic oligonucleotide

SEQ ID NO: 608764 - DNA, 58 bp, Artificial; identical to SEQ ID NO: 470470
  Synthetic oligonucleotide

SEQ ID NO: 608765 - DNA, 55 bp, Artificial; identical to SEQ ID NO: 470474
  Synthetic oligonucleotide

SEQ ID NO: 608766 - DNA, 56 bp, Artificial; identical to SEQ ID NO: 470475
  Synthetic oligonucleotide

SEQ ID NO: 608767 - DNA, 53 bp, Artificial; identical to SEQ ID NO: 470476
  Synthetic oligonucleotide

SEQ ID NO: 608768 - DNA, 50 bp, Artificial; identical to SEQ ID NO: 470477
  Synthetic oligonucleotide

SEQ ID NO: 608769 - DNA, 55 bp, Artificial; identical to SEQ ID NO: 470478
  Synthetic oligonucleotide

SEQ ID NO: 608770 - DNA, 60 bp, Artificial; identical to SEQ ID NO: 470480
  Synthetic oligonucleotide

SEQ ID NO: 608771 - DNA, 55 bp, Artificial; identical to SEQ ID NO: 470484
  Synthetic oligonucleotide

SEQ ID NO: 608772 - DNA, 58 bp, Artificial; identical to SEQ ID NO: 470485
  Synthetic oligonucleotide

SEQ ID NO: 608773 - DNA, 60 bp, Artificial; identical to SEQ ID NO: 470486
  Synthetic oligonucleotide

SEQ ID NO: 608774 - DNA, 60 bp, Artificial; identical to SEQ ID NO: 470488
  Synthetic oligonucleotide

SEQ ID NO: 608775 - DNA, 57 bp, Artificial; identical to SEQ ID NO: 470493
  Synthetic oligonucleotide

SEQ ID NO: 608776 - DNA, 60 bp, Artificial; identical to SEQ ID NO: 470494
  Synthetic oligonucleotide

SEQ ID NO: 608777 - DNA, 56 bp, Artificial; identical to SEQ ID NO: 470496
  Synthetic oligonucleotide

SEQ ID NO: 608778 - DNA, 58 bp, Artificial; identical to SEQ ID NO: 14701
  Synthetic oligonucleotide

SEQ ID NO: 608779 - DNA, 58 bp, Artificial; identical to SEQ ID NO: 470499
  Synthetic oligonucleotide

SEQ ID NO: 608780 - DNA, 57 bp, Artificial; identical to SEQ ID NO: 470500
  Synthetic oligonucleotide

SEQ ID NO: 608781 - DNA, 58 bp, Artificial; identical to SEQ ID NO: 470505
  Synthetic oligonucleotide

SEQ ID NO: 608782 - DNA, 50 bp, Artificial; identical to SEQ ID NO: 470511
  Synthetic oligonucleotide

SEQ ID NO: 608783 - DNA, 60 bp, Artificial; identical to SEQ ID NO: 470512
  Synthetic oligonucleotide

SEQ ID NO: 608784 - DNA, 60 bp, Artificial; identical to SEQ ID NO: 470515
  Synthetic oligonucleotide

SEQ ID NO: 608785 - DNA, 60 bp, Artificial; identical to SEQ ID NO: 15214
  Synthetic oligonucleotide

SEQ ID NO: 608786 - DNA, 60 bp, Artificial; identical to SEQ ID NO: 470516
  Synthetic oligonucleotide

SEQ ID NO: 608787 - DNA, 60 bp, Artificial; identical to SEQ ID NO: 470517
  Synthetic oligonucleotide

SEQ ID NO: 608788 - DNA, 57 bp, Artificial; identical to SEQ ID NO: 470518
  Synthetic oligonucleotide

SEQ ID NO: 608789 - DNA, 58 bp, Artificial; identical to SEQ ID NO: 470519
  Synthetic oligonucleotide

SEQ ID NO: 608790 - DNA, 54 bp, Artificial; identical to SEQ ID NO: 470525
  Synthetic oligonucleotide

SEQ ID NO: 608791 - DNA, 60 bp, Artificial; identical to SEQ ID NO: 470529
  Synthetic oligonucleotide

SEQ ID NO: 608792 - DNA, 60 bp, Artificial; identical to SEQ ID NO: 470532
  Synthetic oligonucleotide

SEQ ID NO: 608793 - DNA, 60 bp, Artificial; identical to SEQ ID NO: 470537
  Synthetic oligonucleotide

SEQ ID NO: 608794 - DNA, 60 bp, Artificial; identical to SEQ ID NO: 470538
  Synthetic oligonucleotide

SEQ ID NO: 608795 - DNA, 60 bp, Artificial; identical to SEQ ID NO: 470539
  Synthetic oligonucleotide

SEQ ID NO: 608796 - DNA, 60 bp, Artificial; identical to SEQ ID NO: 470540
  Synthetic oligonucleotide

SEQ ID NO: 608797 - DNA, 54 bp, Artificial; identical to SEQ ID NO: 470542
  Synthetic oligonucleotide

SEQ ID NO: 608798 - DNA, 60 bp, Artificial; identical to SEQ ID NO: 470550
  Synthetic oligonucleotide

SEQ ID NO: 608799 - DNA, 60 bp, Artificial; identical to SEQ ID NO: 470551
  Synthetic oligonucleotide

SEQ ID NO: 608800 - DNA, 60 bp, Artificial; identical to SEQ ID NO: 470552
  Synthetic oligonucleotide

SEQ ID NO: 608801 - DNA, 60 bp, Artificial; identical to SEQ ID NO: 470553
  Synthetic oligonucleotide

SEQ ID NO: 608802 - DNA, 60 bp, Artificial; identical to SEQ ID NO: 470554
  Synthetic oligonucleotide

SEQ ID NO: 608803 - DNA, 60 bp, Artificial; identical to SEQ ID NO: 470555
  Synthetic oligonucleotide

SEQ ID NO: 608804 - DNA, 54 bp, Artificial; identical to SEQ ID NO: 470556
  Synthetic oligonucleotide

SEQ ID NO: 608805 - DNA, 55 bp, Artificial; identical to SEQ ID NO: 470557
  Synthetic oligonucleotide

SEQ ID NO: 608806 - DNA, 60 bp, Artificial; identical to SEQ ID NO: 470558
  Synthetic oligonucleotide

SEQ ID NO: 608807 - DNA, 60 bp, Artificial; identical to SEQ ID NO: 470559
  Synthetic oligonucleotide

SEQ ID NO: 608808 - DNA, 55 bp, Artificial; identical to SEQ ID NO: 470560
  Synthetic oligonucleotide

SEQ ID NO: 608809 - DNA, 60 bp, Artificial; identical to SEQ ID NO: 470562
  Synthetic oligonucleotide

SEQ ID NO: 608810 - DNA, 60 bp, Artificial; identical to SEQ ID NO: 470567
  Synthetic oligonucleotide

SEQ ID NO: 608811 - DNA, 55 bp, Artificial; identical to SEQ ID NO: 470568
  Synthetic oligonucleotide

SEQ ID NO: 608812 - DNA, 60 bp, Artificial; identical to SEQ ID NO: 470569
  Synthetic oligonucleotide

SEQ ID NO: 608813 - DNA, 60 bp, Artificial; identical to SEQ ID NO: 470574
  Synthetic oligonucleotide

SEQ ID NO: 608814 - DNA, 50 bp, Artificial; identical to SEQ ID NO: 470579
  Synthetic oligonucleotide

SEQ ID NO: 608815 - DNA, 52 bp, Artificial; identical to SEQ ID NO: 470583
  Synthetic oligonucleotide

SEQ ID NO: 608816 - DNA, 52 bp, Artificial; identical to SEQ ID NO: 470586
  Synthetic oligonucleotide

SEQ ID NO: 608817 - DNA, 57 bp, Artificial; identical to SEQ ID NO: 470589
  Synthetic oligonucleotide

SEQ ID NO: 608818 - DNA, 55 bp, Artificial; identical to SEQ ID NO: 470590
  Synthetic oligonucleotide

SEQ ID NO: 608819 - DNA, 51 bp, Artificial; identical to SEQ ID NO: 470592
  Synthetic oligonucleotide

SEQ ID NO: 608820 - DNA, 59 bp, Artificial; identical to SEQ ID NO: 470593
  Synthetic oligonucleotide

SEQ ID NO: 608821 - DNA, 60 bp, Artificial; identical to SEQ ID NO: 6137
  Synthetic oligonucleotide

SEQ ID NO: 608822 - DNA, 60 bp, Artificial; identical to SEQ ID NO: 470594
  Synthetic oligonucleotide

SEQ ID NO: 608823 - DNA, 56 bp, Artificial; identical to SEQ ID NO: 470598
  Synthetic oligonucleotide

SEQ ID NO: 608824 - DNA, 51 bp, Artificial; identical to SEQ ID NO: 470599
  Synthetic oligonucleotide

SEQ ID NO: 608825 - DNA, 57 bp, Artificial; identical to SEQ ID NO: 470600
  Synthetic oligonucleotide

SEQ ID NO: 608826 - DNA, 60 bp, Artificial; identical to SEQ ID NO: 470603
  Synthetic oligonucleotide

SEQ ID NO: 608827 - DNA, 59 bp, Artificial; identical to SEQ ID NO: 470605
  Synthetic oligonucleotide

SEQ ID NO: 608828 - DNA, 55 bp, Artificial; identical to SEQ ID NO: 470606
  Synthetic oligonucleotide

SEQ ID NO: 608829 - DNA, 60 bp, Artificial; identical to SEQ ID NO: 470607
  Synthetic oligonucleotide

SEQ ID NO: 608830 - DNA, 60 bp, Artificial; identical to SEQ ID NO: 470608
  Synthetic oligonucleotide

SEQ ID NO: 608831 - DNA, 60 bp, Artificial; identical to SEQ ID NO: 470609
  Synthetic oligonucleotide

SEQ ID NO: 608832 - DNA, 60 bp, Artificial; identical to SEQ ID NO: 10486
  Synthetic oligonucleotide

SEQ ID NO: 608833 - DNA, 60 bp, Artificial; identical to SEQ ID NO: 470613
  Synthetic oligonucleotide

SEQ ID NO: 608834 - DNA, 55 bp, Artificial; identical to SEQ ID NO: 470614
  Synthetic oligonucleotide

SEQ ID NO: 608835 - DNA, 50 bp, Artificial; identical to SEQ ID NO: 470616
  Synthetic oligonucleotide

SEQ ID NO: 608836 - DNA, 50 bp, Artificial; identical to SEQ ID NO: 470618
  Synthetic oligonucleotide

SEQ ID NO: 608837 - DNA, 56 bp, Artificial; identical to SEQ ID NO: 19549
  Synthetic oligonucleotide

SEQ ID NO: 608838 - DNA, 60 bp, Artificial; identical to SEQ ID NO: 470624
  Synthetic oligonucleotide

SEQ ID NO: 608839 - DNA, 60 bp, Artificial; identical to SEQ ID NO: 470626
  Synthetic oligonucleotide

SEQ ID NO: 608840 - DNA, 55 bp, Artificial; identical to SEQ ID NO: 470627
  Synthetic oligonucleotide

SEQ ID NO: 608841 - DNA, 59 bp, Artificial; identical to SEQ ID NO: 7327
  Synthetic oligonucleotide

SEQ ID NO: 608842 - DNA, 60 bp, Artificial; identical to SEQ ID NO: 470629
  Synthetic oligonucleotide

SEQ ID NO: 608843 - DNA, 60 bp, Artificial; identical to SEQ ID NO: 470632
  Synthetic oligonucleotide

SEQ ID NO: 608844 - DNA, 60 bp, Artificial; identical to SEQ ID NO: 470633
  Synthetic oligonucleotide

SEQ ID NO: 608845 - DNA, 51 bp, Artificial; identical to SEQ ID NO: 470636
  Synthetic oligonucleotide

SEQ ID NO: 608846 - DNA, 60 bp, Artificial; identical to SEQ ID NO: 470637
  Synthetic oligonucleotide

SEQ ID NO: 608847 - DNA, 60 bp, Artificial; identical to SEQ ID NO: 470638
  Synthetic oligonucleotide

SEQ ID NO: 608848 - DNA, 55 bp, Artificial; identical to SEQ ID NO: 470641
  Synthetic oligonucleotide

SEQ ID NO: 608849 - DNA, 60 bp, Artificial; identical to SEQ ID NO: 470642
  Synthetic oligonucleotide

SEQ ID NO: 608850 - DNA, 60 bp, Artificial; identical to SEQ ID NO: 470643
  Synthetic oligonucleotide

SEQ ID NO: 608851 - DNA, 56 bp, Artificial; identical to SEQ ID NO: 470644
  Synthetic oligonucleotide

SEQ ID NO: 608852 - DNA, 60 bp, Artificial; identical to SEQ ID NO: 470645
  Synthetic oligonucleotide

SEQ ID NO: 608853 - DNA, 51 bp, Artificial; identical to SEQ ID NO: 470646
  Synthetic oligonucleotide

SEQ ID NO: 608854 - DNA, 57 bp, Artificial; identical to SEQ ID NO: 470651
  Synthetic oligonucleotide

SEQ ID NO: 608855 - DNA, 60 bp, Artificial; identical to SEQ ID NO: 470652
  Synthetic oligonucleotide

SEQ ID NO: 608856 - DNA, 60 bp, Artificial; identical to SEQ ID NO: 470656
  Synthetic oligonucleotide

SEQ ID NO: 608857 - DNA, 60 bp, Artificial; identical to SEQ ID NO: 470657
  Synthetic oligonucleotide

SEQ ID NO: 608858 - DNA, 60 bp, Artificial; identical to SEQ ID NO: 470660
  Synthetic oligonucleotide

SEQ ID NO: 608859 - DNA, 50 bp, Artificial; identical to SEQ ID NO: 470661
  Synthetic oligonucleotide

SEQ ID NO: 608860 - DNA, 56 bp, Artificial; identical to SEQ ID NO: 470662
  Synthetic oligonucleotide

SEQ ID NO: 608861 - DNA, 58 bp, Artificial; identical to SEQ ID NO: 470663
  Synthetic oligonucleotide

SEQ ID NO: 608862 - DNA, 57 bp, Artificial; identical to SEQ ID NO: 470664
  Synthetic oligonucleotide

SEQ ID NO: 608863 - DNA, 56 bp, Artificial; identical to SEQ ID NO: 470665
  Synthetic oligonucleotide

SEQ ID NO: 608864 - DNA, 60 bp, Artificial; identical to SEQ ID NO: 470666
  Synthetic oligonucleotide

SEQ ID NO: 608865 - DNA, 60 bp, Artificial; identical to SEQ ID NO: 470667
  Synthetic oligonucleotide

SEQ ID NO: 608866 - DNA, 59 bp, Artificial; identical to SEQ ID NO: 470668
  Synthetic oligonucleotide

SEQ ID NO: 608867 - DNA, 57 bp, Artificial; identical to SEQ ID NO: 470670
  Synthetic oligonucleotide

SEQ ID NO: 608868 - DNA, 56 bp, Artificial; identical to SEQ ID NO: 470674
  Synthetic oligonucleotide

SEQ ID NO: 608869 - DNA, 59 bp, Artificial; identical to SEQ ID NO: 470677
  Synthetic oligonucleotide

SEQ ID NO: 608870 - DNA, 55 bp, Artificial; identical to SEQ ID NO: 470678
  Synthetic oligonucleotide

SEQ ID NO: 608871 - DNA, 56 bp, Artificial; identical to SEQ ID NO: 470679
  Synthetic oligonucleotide

SEQ ID NO: 608872 - DNA, 58 bp, Artificial; identical to SEQ ID NO: 470683
  Synthetic oligonucleotide

SEQ ID NO: 608873 - DNA, 60 bp, Artificial; identical to SEQ ID NO: 470684
  Synthetic oligonucleotide

SEQ ID NO: 608874 - DNA, 60 bp, Artificial; identical to SEQ ID NO: 470686
  Synthetic oligonucleotide

SEQ ID NO: 608875 - DNA, 60 bp, Artificial; identical to SEQ ID NO: 470689
  Synthetic oligonucleotide

SEQ ID NO: 608876 - DNA, 55 bp, Artificial; identical to SEQ ID NO: 470691
  Synthetic oligonucleotide

SEQ ID NO: 608877 - DNA, 60 bp, Artificial; identical to SEQ ID NO: 470692
  Synthetic oligonucleotide

SEQ ID NO: 608878 - DNA, 54 bp, Artificial; identical to SEQ ID NO: 470694
  Synthetic oligonucleotide

SEQ ID NO: 608879 - DNA, 60 bp, Artificial; identical to SEQ ID NO: 470697
  Synthetic oligonucleotide

SEQ ID NO: 608880 - DNA, 59 bp, Artificial; identical to SEQ ID NO: 16933
  Synthetic oligonucleotide

SEQ ID NO: 608881 - DNA, 60 bp, Artificial; identical to SEQ ID NO: 470701
  Synthetic oligonucleotide

SEQ ID NO: 608882 - DNA, 57 bp, Artificial; identical to SEQ ID NO: 470704
  Synthetic oligonucleotide

SEQ ID NO: 608883 - DNA, 60 bp, Artificial; identical to SEQ ID NO: 470710
  Synthetic oligonucleotide

SEQ ID NO: 608884 - DNA, 60 bp, Artificial; identical to SEQ ID NO: 470711
  Synthetic oligonucleotide

SEQ ID NO: 608885 - DNA, 52 bp, Artificial; identical to SEQ ID NO: 470712
  Synthetic oligonucleotide

SEQ ID NO: 608886 - DNA, 59 bp, Artificial; identical to SEQ ID NO: 470713
  Synthetic oligonucleotide

SEQ ID NO: 608887 - DNA, 60 bp, Artificial; identical to SEQ ID NO: 470715
  Synthetic oligonucleotide

SEQ ID NO: 608888 - DNA, 53 bp, Artificial; identical to SEQ ID NO: 470717
  Synthetic oligonucleotide

SEQ ID NO: 608889 - DNA, 55 bp, Artificial; identical to SEQ ID NO: 470718
  Synthetic oligonucleotide

SEQ ID NO: 608890 - DNA, 55 bp, Artificial; identical to SEQ ID NO: 470719
  Synthetic oligonucleotide

SEQ ID NO: 608891 - DNA, 58 bp, Artificial; identical to SEQ ID NO: 470722
  Synthetic oligonucleotide

SEQ ID NO: 608892 - DNA, 60 bp, Artificial; identical to SEQ ID NO: 470723
  Synthetic oligonucleotide

SEQ ID NO: 608893 - DNA, 60 bp, Artificial; identical to SEQ ID NO: 470724
  Synthetic oligonucleotide

SEQ ID NO: 608894 - DNA, 60 bp, Artificial; identical to SEQ ID NO: 470725
  Synthetic oligonucleotide

SEQ ID NO: 608895 - DNA, 58 bp, Artificial; identical to SEQ ID NO: 19201
  Synthetic oligonucleotide

SEQ ID NO: 608896 - DNA, 58 bp, Artificial; identical to SEQ ID NO: 470728
  Synthetic oligonucleotide

SEQ ID NO: 608897 - DNA, 60 bp, Artificial; identical to SEQ ID NO: 470730
  Synthetic oligonucleotide

SEQ ID NO: 608898 - DNA, 55 bp, Artificial; identical to SEQ ID NO: 470733
  Synthetic oligonucleotide

SEQ ID NO: 608899 - DNA, 59 bp, Artificial; identical to SEQ ID NO: 470734
  Synthetic oligonucleotide

SEQ ID NO: 608900 - DNA, 60 bp, Artificial; identical to SEQ ID NO: 470735
  Synthetic oligonucleotide

SEQ ID NO: 608901 - DNA, 60 bp, Artificial; identical to SEQ ID NO: 470736
  Synthetic oligonucleotide

SEQ ID NO: 608902 - DNA, 55 bp, Artificial; identical to SEQ ID NO: 470738
  Synthetic oligonucleotide

SEQ ID NO: 608903 - DNA, 55 bp, Artificial; identical to SEQ ID NO: 470739
  Synthetic oligonucleotide

SEQ ID NO: 608904 - DNA, 55 bp, Artificial; identical to SEQ ID NO: 470744
  Synthetic oligonucleotide

SEQ ID NO: 608905 - DNA, 60 bp, Artificial; identical to SEQ ID NO: 470748
  Synthetic oligonucleotide

SEQ ID NO: 608906 - DNA, 60 bp, Artificial; identical to SEQ ID NO: 470749
  Synthetic oligonucleotide

SEQ ID NO: 608907 - DNA, 55 bp, Artificial; identical to SEQ ID NO: 470750
  Synthetic oligonucleotide

SEQ ID NO: 608908 - DNA, 58 bp, Artificial; identical to SEQ ID NO: 10625
  Synthetic oligonucleotide

SEQ ID NO: 608909 - DNA, 57 bp, Artificial; identical to SEQ ID NO: 470753
  Synthetic oligonucleotide

SEQ ID NO: 608910 - DNA, 55 bp, Artificial; identical to SEQ ID NO: 470754
  Synthetic oligonucleotide

SEQ ID NO: 608911 - DNA, 60 bp, Artificial; identical to SEQ ID NO: 470755
  Synthetic oligonucleotide

SEQ ID NO: 608912 - DNA, 60 bp, Artificial; identical to SEQ ID NO: 470757
  Synthetic oligonucleotide

SEQ ID NO: 608913 - DNA, 58 bp, Artificial; identical to SEQ ID NO: 470759
  Synthetic oligonucleotide

SEQ ID NO: 608914 - DNA, 57 bp, Artificial; identical to SEQ ID NO: 13867
  Synthetic oligonucleotide

SEQ ID NO: 608915 - DNA, 59 bp, Artificial; identical to SEQ ID NO: 470760
  Synthetic oligonucleotide

SEQ ID NO: 608916 - DNA, 59 bp, Artificial; identical to SEQ ID NO: 470761
  Synthetic oligonucleotide

SEQ ID NO: 608917 - DNA, 56 bp, Artificial; identical to SEQ ID NO: 470773
  Synthetic oligonucleotide

SEQ ID NO: 608918 - DNA, 58 bp, Artificial; identical to SEQ ID NO: 470775
  Synthetic oligonucleotide

SEQ ID NO: 608919 - DNA, 55 bp, Artificial; identical to SEQ ID NO: 470780
  Synthetic oligonucleotide

SEQ ID NO: 608920 - DNA, 60 bp, Artificial; identical to SEQ ID NO: 470781
  Synthetic oligonucleotide

SEQ ID NO: 608921 - DNA, 60 bp, Artificial; identical to SEQ ID NO: 470782
  Synthetic oligonucleotide

SEQ ID NO: 608922 - DNA, 59 bp, Artificial; identical to SEQ ID NO: 470785
  Synthetic oligonucleotide

SEQ ID NO: 608923 - DNA, 56 bp, Artificial; identical to SEQ ID NO: 470786
  Synthetic oligonucleotide

SEQ ID NO: 608924 - DNA, 60 bp, Artificial; identical to SEQ ID NO: 470787
  Synthetic oligonucleotide

SEQ ID NO: 608925 - DNA, 58 bp, Artificial; identical to SEQ ID NO: 470791
  Synthetic oligonucleotide

SEQ ID NO: 608926 - DNA, 60 bp, Artificial; identical to SEQ ID NO: 470797
  Synthetic oligonucleotide

SEQ ID NO: 608927 - DNA, 60 bp, Artificial; identical to SEQ ID NO: 470798
  Synthetic oligonucleotide

SEQ ID NO: 608928 - DNA, 54 bp, Artificial; identical to SEQ ID NO: 470799
  Synthetic oligonucleotide

SEQ ID NO: 608929 - DNA, 57 bp, Artificial; identical to SEQ ID NO: 470802
  Synthetic oligonucleotide

SEQ ID NO: 608930 - DNA, 59 bp, Artificial; identical to SEQ ID NO: 470804
  Synthetic oligonucleotide

SEQ ID NO: 608931 - DNA, 57 bp, Artificial; identical to SEQ ID NO: 470805
  Synthetic oligonucleotide

SEQ ID NO: 608932 - DNA, 60 bp, Artificial; identical to SEQ ID NO: 470808
  Synthetic oligonucleotide

SEQ ID NO: 608933 - DNA, 57 bp, Artificial; identical to SEQ ID NO: 470809
  Synthetic oligonucleotide

SEQ ID NO: 608934 - DNA, 55 bp, Artificial; identical to SEQ ID NO: 470810
  Synthetic oligonucleotide

SEQ ID NO: 608935 - DNA, 60 bp, Artificial; identical to SEQ ID NO: 470811
  Synthetic oligonucleotide

SEQ ID NO: 608936 - DNA, 59 bp, Artificial; identical to SEQ ID NO: 470812
  Synthetic oligonucleotide

SEQ ID NO: 608937 - DNA, 60 bp, Artificial; identical to SEQ ID NO: 470818
  Synthetic oligonucleotide

SEQ ID NO: 608938 - DNA, 60 bp, Artificial; identical to SEQ ID NO: 470819
  Synthetic oligonucleotide

SEQ ID NO: 608939 - DNA, 60 bp, Artificial; identical to SEQ ID NO: 470820
  Synthetic oligonucleotide

SEQ ID NO: 608940 - DNA, 60 bp, Artificial; identical to SEQ ID NO: 470821
  Synthetic oligonucleotide

SEQ ID NO: 608941 - DNA, 55 bp, Artificial; identical to SEQ ID NO: 470824
  Synthetic oligonucleotide

SEQ ID NO: 608942 - DNA, 60 bp, Artificial; identical to SEQ ID NO: 470826
  Synthetic oligonucleotide

SEQ ID NO: 608943 - DNA, 55 bp, Artificial; identical to SEQ ID NO: 470829
  Synthetic oligonucleotide

SEQ ID NO: 608944 - DNA, 59 bp, Artificial; identical to SEQ ID NO: 470832
  Synthetic oligonucleotide

SEQ ID NO: 608945 - DNA, 54 bp, Artificial; identical to SEQ ID NO: 470833
  Synthetic oligonucleotide

SEQ ID NO: 608946 - DNA, 53 bp, Artificial; identical to SEQ ID NO: 470835
  Synthetic oligonucleotide

SEQ ID NO: 608947 - DNA, 60 bp, Artificial; identical to SEQ ID NO: 470836
  Synthetic oligonucleotide

SEQ ID NO: 608948 - DNA, 58 bp, Artificial; identical to SEQ ID NO: 470840
  Synthetic oligonucleotide

SEQ ID NO: 608949 - DNA, 60 bp, Artificial; identical to SEQ ID NO: 470842
  Synthetic oligonucleotide

SEQ ID NO: 608950 - DNA, 55 bp, Artificial; identical to SEQ ID NO: 470843
  Synthetic oligonucleotide

SEQ ID NO: 608951 - DNA, 60 bp, Artificial; identical to SEQ ID NO: 470845
  Synthetic oligonucleotide

SEQ ID NO: 608952 - DNA, 60 bp, Artificial; identical to SEQ ID NO: 470846
  Synthetic oligonucleotide

SEQ ID NO: 608953 - DNA, 55 bp, Artificial; identical to SEQ ID NO: 470848
  Synthetic oligonucleotide

SEQ ID NO: 608954 - DNA, 60 bp, Artificial; identical to SEQ ID NO: 470850
  Synthetic oligonucleotide

SEQ ID NO: 608955 - DNA, 56 bp, Artificial; identical to SEQ ID NO: 470851
  Synthetic oligonucleotide

SEQ ID NO: 608956 - DNA, 60 bp, Artificial; identical to SEQ ID NO: 470852
  Synthetic oligonucleotide

SEQ ID NO: 608957 - DNA, 60 bp, Artificial; identical to SEQ ID NO: 470855
  Synthetic oligonucleotide

SEQ ID NO: 608958 - DNA, 55 bp, Artificial; identical to SEQ ID NO: 470858
  Synthetic oligonucleotide

SEQ ID NO: 608959 - DNA, 57 bp, Artificial; identical to SEQ ID NO: 470860
  Synthetic oligonucleotide

SEQ ID NO: 608960 - DNA, 55 bp, Artificial; identical to SEQ ID NO: 470862
  Synthetic oligonucleotide

SEQ ID NO: 608961 - DNA, 51 bp, Artificial; identical to SEQ ID NO: 470866
  Synthetic oligonucleotide

SEQ ID NO: 608962 - DNA, 60 bp, Artificial; identical to SEQ ID NO: 470869
  Synthetic oligonucleotide

SEQ ID NO: 608963 - DNA, 57 bp, Artificial; identical to SEQ ID NO: 470871
  Synthetic oligonucleotide

SEQ ID NO: 608964 - DNA, 60 bp, Artificial; identical to SEQ ID NO: 470873
  Synthetic oligonucleotide

SEQ ID NO: 608965 - DNA, 54 bp, Artificial; identical to SEQ ID NO: 470875
  Synthetic oligonucleotide

SEQ ID NO: 608966 - DNA, 60 bp, Artificial; identical to SEQ ID NO: 470876
  Synthetic oligonucleotide

SEQ ID NO: 608967 - DNA, 60 bp, Artificial; identical to SEQ ID NO: 470877
  Synthetic oligonucleotide

SEQ ID NO: 608968 - DNA, 50 bp, Artificial; identical to SEQ ID NO: 470878
  Synthetic oligonucleotide

SEQ ID NO: 608969 - DNA, 60 bp, Artificial; identical to SEQ ID NO: 470879
  Synthetic oligonucleotide

SEQ ID NO: 608970 - DNA, 56 bp, Artificial; identical to SEQ ID NO: 470880
  Synthetic oligonucleotide

SEQ ID NO: 608971 - DNA, 59 bp, Artificial; identical to SEQ ID NO: 470885
  Synthetic oligonucleotide

SEQ ID NO: 608972 - DNA, 57 bp, Artificial; identical to SEQ ID NO: 17684
  Synthetic oligonucleotide

SEQ ID NO: 608973 - DNA, 55 bp, Artificial; identical to SEQ ID NO: 6340
  Synthetic oligonucleotide

SEQ ID NO: 608974 - DNA, 52 bp, Artificial; identical to SEQ ID NO: 470889
  Synthetic oligonucleotide

SEQ ID NO: 608975 - DNA, 55 bp, Artificial; identical to SEQ ID NO: 470893
  Synthetic oligonucleotide

SEQ ID NO: 608976 - DNA, 60 bp, Artificial; identical to SEQ ID NO: 470895
  Synthetic oligonucleotide

SEQ ID NO: 608977 - DNA, 55 bp, Artificial; identical to SEQ ID NO: 470896
  Synthetic oligonucleotide

SEQ ID NO: 608978 - DNA, 60 bp, Artificial; identical to SEQ ID NO: 470898
  Synthetic oligonucleotide

SEQ ID NO: 608979 - DNA, 59 bp, Artificial; identical to SEQ ID NO: 470899
  Synthetic oligonucleotide

SEQ ID NO: 608980 - DNA, 59 bp, Artificial; identical to SEQ ID NO: 470902
  Synthetic oligonucleotide

SEQ ID NO: 608981 - DNA, 60 bp, Artificial; identical to SEQ ID NO: 470903
  Synthetic oligonucleotide

SEQ ID NO: 608982 - DNA, 55 bp, Artificial; identical to SEQ ID NO: 470905
  Synthetic oligonucleotide

SEQ ID NO: 608983 - DNA, 55 bp, Artificial; identical to SEQ ID NO: 470906
  Synthetic oligonucleotide

SEQ ID NO: 608984 - DNA, 60 bp, Artificial; identical to SEQ ID NO: 470908
  Synthetic oligonucleotide

SEQ ID NO: 608985 - DNA, 55 bp, Artificial; identical to SEQ ID NO: 470909
  Synthetic oligonucleotide

SEQ ID NO: 608986 - DNA, 59 bp, Artificial; identical to SEQ ID NO: 470912
  Synthetic oligonucleotide

SEQ ID NO: 608987 - DNA, 57 bp, Artificial; identical to SEQ ID NO: 470913
  Synthetic oligonucleotide

SEQ ID NO: 608988 - DNA, 59 bp, Artificial; identical to SEQ ID NO: 470914
  Synthetic oligonucleotide

SEQ ID NO: 608989 - DNA, 60 bp, Artificial; identical to SEQ ID NO: 470915
  Synthetic oligonucleotide

SEQ ID NO: 608990 - DNA, 53 bp, Artificial; identical to SEQ ID NO: 470917
  Synthetic oligonucleotide

SEQ ID NO: 608991 - DNA, 58 bp, Artificial; identical to SEQ ID NO: 470918
  Synthetic oligonucleotide

SEQ ID NO: 608992 - DNA, 59 bp, Artificial; identical to SEQ ID NO: 470919
  Synthetic oligonucleotide

SEQ ID NO: 608993 - DNA, 55 bp, Artificial; identical to SEQ ID NO: 470920
  Synthetic oligonucleotide

SEQ ID NO: 608994 - DNA, 56 bp, Artificial; identical to SEQ ID NO: 470921
  Synthetic oligonucleotide

SEQ ID NO: 608995 - DNA, 52 bp, Artificial; identical to SEQ ID NO: 470922
  Synthetic oligonucleotide

SEQ ID NO: 608996 - DNA, 53 bp, Artificial; identical to SEQ ID NO: 470923
  Synthetic oligonucleotide

SEQ ID NO: 608997 - DNA, 60 bp, Artificial; identical to SEQ ID NO: 470925
  Synthetic oligonucleotide

SEQ ID NO: 608998 - DNA, 54 bp, Artificial; identical to SEQ ID NO: 470926
  Synthetic oligonucleotide

SEQ ID NO: 608999 - DNA, 55 bp, Artificial; identical to SEQ ID NO: 470928
  Synthetic oligonucleotide

SEQ ID NO: 609000 - DNA, 60 bp, Artificial; identical to SEQ ID NO: 470929
  Synthetic oligonucleotide

SEQ ID NO: 609001 - DNA, 55 bp, Artificial; identical to SEQ ID NO: 470931
  Synthetic oligonucleotide

SEQ ID NO: 609002 - DNA, 60 bp, Artificial; identical to SEQ ID NO: 470933
  Synthetic oligonucleotide

SEQ ID NO: 609003 - DNA, 59 bp, Artificial; identical to SEQ ID NO: 470935
  Synthetic oligonucleotide

SEQ ID NO: 609004 - DNA, 60 bp, Artificial; identical to SEQ ID NO: 470936
  Synthetic oligonucleotide

SEQ ID NO: 609005 - DNA, 51 bp, Artificial; identical to SEQ ID NO: 470937
  Synthetic oligonucleotide

SEQ ID NO: 609006 - DNA, 55 bp, Artificial; identical to SEQ ID NO: 470941
  Synthetic oligonucleotide

SEQ ID NO: 609007 - DNA, 58 bp, Artificial; identical to SEQ ID NO: 470942
  Synthetic oligonucleotide

SEQ ID NO: 609008 - DNA, 60 bp, Artificial; identical to SEQ ID NO: 470943
  Synthetic oligonucleotide

SEQ ID NO: 609009 - DNA, 60 bp, Artificial; identical to SEQ ID NO: 470944
  Synthetic oligonucleotide

SEQ ID NO: 609010 - DNA, 59 bp, Artificial; identical to SEQ ID NO: 470945
  Synthetic oligonucleotide

SEQ ID NO: 609011 - DNA, 60 bp, Artificial; identical to SEQ ID NO: 470947
  Synthetic oligonucleotide

SEQ ID NO: 609012 - DNA, 55 bp, Artificial; identical to SEQ ID NO: 470950
  Synthetic oligonucleotide

SEQ ID NO: 609013 - DNA, 55 bp, Artificial; identical to SEQ ID NO: 470953
  Synthetic oligonucleotide

SEQ ID NO: 609014 - DNA, 60 bp, Artificial; identical to SEQ ID NO: 470954
  Synthetic oligonucleotide

SEQ ID NO: 609015 - DNA, 60 bp, Artificial; identical to SEQ ID NO: 470955
  Synthetic oligonucleotide

SEQ ID NO: 609016 - DNA, 57 bp, Artificial; identical to SEQ ID NO: 470956
  Synthetic oligonucleotide

SEQ ID NO: 609017 - DNA, 55 bp, Artificial; identical to SEQ ID NO: 470959
  Synthetic oligonucleotide

SEQ ID NO: 609018 - DNA, 53 bp, Artificial; identical to SEQ ID NO: 470960
  Synthetic oligonucleotide

SEQ ID NO: 609019 - DNA, 60 bp, Artificial; identical to SEQ ID NO: 470963
  Synthetic oligonucleotide

SEQ ID NO: 609020 - DNA, 52 bp, Artificial; identical to SEQ ID NO: 470964
  Synthetic oligonucleotide

SEQ ID NO: 609021 - DNA, 60 bp, Artificial; identical to SEQ ID NO: 470965
  Synthetic oligonucleotide

SEQ ID NO: 609022 - DNA, 60 bp, Artificial; identical to SEQ ID NO: 470966
  Synthetic oligonucleotide

SEQ ID NO: 609023 - DNA, 60 bp, Artificial; identical to SEQ ID NO: 470967
  Synthetic oligonucleotide

SEQ ID NO: 609024 - DNA, 60 bp, Artificial; identical to SEQ ID NO: 470968
  Synthetic oligonucleotide

SEQ ID NO: 609025 - DNA, 60 bp, Artificial; identical to SEQ ID NO: 470969
  Synthetic oligonucleotide

SEQ ID NO: 609026 - DNA, 60 bp, Artificial; identical to SEQ ID NO: 11254
  Synthetic oligonucleotide

SEQ ID NO: 609027 - DNA, 60 bp, Artificial; identical to SEQ ID NO: 470972
  Synthetic oligonucleotide

SEQ ID NO: 609028 - DNA, 56 bp, Artificial; identical to SEQ ID NO: 470974
  Synthetic oligonucleotide

SEQ ID NO: 609029 - DNA, 60 bp, Artificial; identical to SEQ ID NO: 470980
  Synthetic oligonucleotide

SEQ ID NO: 609030 - DNA, 51 bp, Artificial; identical to SEQ ID NO: 470986
  Synthetic oligonucleotide

SEQ ID NO: 609031 - DNA, 60 bp, Artificial; identical to SEQ ID NO: 470990
  Synthetic oligonucleotide

SEQ ID NO: 609032 - DNA, 60 bp, Artificial; identical to SEQ ID NO: 9650
  Synthetic oligonucleotide

SEQ ID NO: 609033 - DNA, 60 bp, Artificial; identical to SEQ ID NO: 470992
  Synthetic oligonucleotide

SEQ ID NO: 609034 - DNA, 58 bp, Artificial; identical to SEQ ID NO: 470993
  Synthetic oligonucleotide

SEQ ID NO: 609035 - DNA, 60 bp, Artificial; identical to SEQ ID NO: 470994
  Synthetic oligonucleotide

SEQ ID NO: 609036 - DNA, 59 bp, Artificial; identical to SEQ ID NO: 470997
  Synthetic oligonucleotide

SEQ ID NO: 609037 - DNA, 57 bp, Artificial; identical to SEQ ID NO: 470999
  Synthetic oligonucleotide

SEQ ID NO: 609038 - DNA, 60 bp, Artificial; identical to SEQ ID NO: 471002
  Synthetic oligonucleotide

SEQ ID NO: 609039 - DNA, 59 bp, Artificial; identical to SEQ ID NO: 471003
  Synthetic oligonucleotide

SEQ ID NO: 609040 - DNA, 60 bp, Artificial; identical to SEQ ID NO: 8463
  Synthetic oligonucleotide

SEQ ID NO: 609041 - DNA, 58 bp, Artificial; identical to SEQ ID NO: 471004
  Synthetic oligonucleotide

SEQ ID NO: 609042 - DNA, 60 bp, Artificial; identical to SEQ ID NO: 471007
  Synthetic oligonucleotide

SEQ ID NO: 609043 - DNA, 50 bp, Artificial; identical to SEQ ID NO: 471008
  Synthetic oligonucleotide

SEQ ID NO: 609044 - DNA, 56 bp, Artificial; identical to SEQ ID NO: 471011
  Synthetic oligonucleotide

SEQ ID NO: 609045 - DNA, 53 bp, Artificial; identical to SEQ ID NO: 471013
  Synthetic oligonucleotide

SEQ ID NO: 609046 - DNA, 52 bp, Artificial; identical to SEQ ID NO: 471014
  Synthetic oligonucleotide

SEQ ID NO: 609047 - DNA, 52 bp, Artificial; identical to SEQ ID NO: 471015
  Synthetic oligonucleotide

SEQ ID NO: 609048 - DNA, 59 bp, Artificial; identical to SEQ ID NO: 471016
  Synthetic oligonucleotide

SEQ ID NO: 609049 - DNA, 59 bp, Artificial; identical to SEQ ID NO: 471017
  Synthetic oligonucleotide

SEQ ID NO: 609050 - DNA, 51 bp, Artificial; identical to SEQ ID NO: 471021
  Synthetic oligonucleotide

SEQ ID NO: 609051 - DNA, 55 bp, Artificial; identical to SEQ ID NO: 471022
  Synthetic oligonucleotide

SEQ ID NO: 609052 - DNA, 60 bp, Artificial; identical to SEQ ID NO: 471028
  Synthetic oligonucleotide

SEQ ID NO: 609053 - DNA, 58 bp, Artificial; identical to SEQ ID NO: 471029
  Synthetic oligonucleotide

SEQ ID NO: 609054 - DNA, 60 bp, Artificial; identical to SEQ ID NO: 471030
  Synthetic oligonucleotide

SEQ ID NO: 609055 - DNA, 54 bp, Artificial; identical to SEQ ID NO: 471032
  Synthetic oligonucleotide

SEQ ID NO: 609056 - DNA, 60 bp, Artificial; identical to SEQ ID NO: 471033
  Synthetic oligonucleotide

SEQ ID NO: 609057 - DNA, 55 bp, Artificial; identical to SEQ ID NO: 471034
  Synthetic oligonucleotide

SEQ ID NO: 609058 - DNA, 56 bp, Artificial; identical to SEQ ID NO: 471035
  Synthetic oligonucleotide

SEQ ID NO: 609059 - DNA, 55 bp, Artificial; identical to SEQ ID NO: 471036
  Synthetic oligonucleotide

SEQ ID NO: 609060 - DNA, 52 bp, Artificial; identical to SEQ ID NO: 471037
  Synthetic oligonucleotide

SEQ ID NO: 609061 - DNA, 60 bp, Artificial; identical to SEQ ID NO: 471038
  Synthetic oligonucleotide

SEQ ID NO: 609062 - DNA, 60 bp, Artificial; identical to SEQ ID NO: 471039
  Synthetic oligonucleotide

SEQ ID NO: 609063 - DNA, 60 bp, Artificial; identical to SEQ ID NO: 471040
  Synthetic oligonucleotide

SEQ ID NO: 609064 - DNA, 60 bp, Artificial; identical to SEQ ID NO: 471041
  Synthetic oligonucleotide

SEQ ID NO: 609065 - DNA, 58 bp, Artificial; identical to SEQ ID NO: 471044
  Synthetic oligonucleotide

SEQ ID NO: 609066 - DNA, 55 bp, Artificial; identical to SEQ ID NO: 471048
  Synthetic oligonucleotide

SEQ ID NO: 609067 - DNA, 60 bp, Artificial; identical to SEQ ID NO: 10810
  Synthetic oligonucleotide

SEQ ID NO: 609068 - DNA, 60 bp, Artificial; identical to SEQ ID NO: 471051
  Synthetic oligonucleotide

SEQ ID NO: 609069 - DNA, 60 bp, Artificial; identical to SEQ ID NO: 471052
  Synthetic oligonucleotide

SEQ ID NO: 609070 - DNA, 60 bp, Artificial; identical to SEQ ID NO: 471053
  Synthetic oligonucleotide

SEQ ID NO: 609071 - DNA, 57 bp, Artificial; identical to SEQ ID NO: 471058
  Synthetic oligonucleotide

SEQ ID NO: 609072 - DNA, 56 bp, Artificial; identical to SEQ ID NO: 471059
  Synthetic oligonucleotide

SEQ ID NO: 609073 - DNA, 55 bp, Artificial; identical to SEQ ID NO: 11905
  Synthetic oligonucleotide

SEQ ID NO: 609074 - DNA, 60 bp, Artificial; identical to SEQ ID NO: 471065
  Synthetic oligonucleotide

SEQ ID NO: 609075 - DNA, 58 bp, Artificial; identical to SEQ ID NO: 471069
  Synthetic oligonucleotide

SEQ ID NO: 609076 - DNA, 60 bp, Artificial; identical to SEQ ID NO: 471071
  Synthetic oligonucleotide

SEQ ID NO: 609077 - DNA, 60 bp, Artificial; identical to SEQ ID NO: 471073
  Synthetic oligonucleotide

SEQ ID NO: 609078 - DNA, 58 bp, Artificial; identical to SEQ ID NO: 18011
  Synthetic oligonucleotide

SEQ ID NO: 609079 - DNA, 59 bp, Artificial; identical to SEQ ID NO: 471074
  Synthetic oligonucleotide

SEQ ID NO: 609080 - DNA, 60 bp, Artificial; identical to SEQ ID NO: 471076
  Synthetic oligonucleotide

SEQ ID NO: 609081 - DNA, 50 bp, Artificial; identical to SEQ ID NO: 471078
  Synthetic oligonucleotide

SEQ ID NO: 609082 - DNA, 60 bp, Artificial; identical to SEQ ID NO: 471079
  Synthetic oligonucleotide

SEQ ID NO: 609083 - DNA, 55 bp, Artificial; identical to SEQ ID NO: 471080
  Synthetic oligonucleotide

SEQ ID NO: 609084 - DNA, 55 bp, Artificial; identical to SEQ ID NO: 471081
  Synthetic oligonucleotide

SEQ ID NO: 609085 - DNA, 60 bp, Artificial; identical to SEQ ID NO: 471083
  Synthetic oligonucleotide

SEQ ID NO: 609086 - DNA, 60 bp, Artificial; identical to SEQ ID NO: 471084
  Synthetic oligonucleotide

SEQ ID NO: 609087 - DNA, 56 bp, Artificial; identical to SEQ ID NO: 471086
  Synthetic oligonucleotide

SEQ ID NO: 609088 - DNA, 53 bp, Artificial; identical to SEQ ID NO: 471092
  Synthetic oligonucleotide

SEQ ID NO: 609089 - DNA, 53 bp, Artificial; identical to SEQ ID NO: 471093
  Synthetic oligonucleotide

SEQ ID NO: 609090 - DNA, 60 bp, Artificial; identical to SEQ ID NO: 471094
  Synthetic oligonucleotide

SEQ ID NO: 609091 - DNA, 60 bp, Artificial; identical to SEQ ID NO: 471095
  Synthetic oligonucleotide

SEQ ID NO: 609092 - DNA, 60 bp, Artificial; identical to SEQ ID NO: 471096
  Synthetic oligonucleotide

SEQ ID NO: 609093 - DNA, 60 bp, Artificial; identical to SEQ ID NO: 471097
  Synthetic oligonucleotide

SEQ ID NO: 609094 - DNA, 60 bp, Artificial; identical to SEQ ID NO: 471099
  Synthetic oligonucleotide

SEQ ID NO: 609095 - DNA, 60 bp, Artificial; identical to SEQ ID NO: 471100
  Synthetic oligonucleotide

SEQ ID NO: 609096 - DNA, 59 bp, Artificial; identical to SEQ ID NO: 471101
  Synthetic oligonucleotide

SEQ ID NO: 609097 - DNA, 59 bp, Artificial; identical to SEQ ID NO: 471103
  Synthetic oligonucleotide

SEQ ID NO: 609098 - DNA, 60 bp, Artificial; identical to SEQ ID NO: 471104
  Synthetic oligonucleotide

SEQ ID NO: 609099 - DNA, 56 bp, Artificial; identical to SEQ ID NO: 471106
  Synthetic oligonucleotide

SEQ ID NO: 609100 - DNA, 58 bp, Artificial; identical to SEQ ID NO: 471108
  Synthetic oligonucleotide

SEQ ID NO: 609101 - DNA, 60 bp, Artificial; identical to SEQ ID NO: 471109
  Synthetic oligonucleotide

SEQ ID NO: 609102 - DNA, 50 bp, Artificial; identical to SEQ ID NO: 471111
  Synthetic oligonucleotide

SEQ ID NO: 609103 - DNA, 60 bp, Artificial; identical to SEQ ID NO: 471112
  Synthetic oligonucleotide

SEQ ID NO: 609104 - DNA, 58 bp, Artificial; identical to SEQ ID NO: 471113
  Synthetic oligonucleotide

SEQ ID NO: 609105 - DNA, 59 bp, Artificial; identical to SEQ ID NO: 18254
  Synthetic oligonucleotide

SEQ ID NO: 609106 - DNA, 55 bp, Artificial; identical to SEQ ID NO: 471116
  Synthetic oligonucleotide

SEQ ID NO: 609107 - DNA, 60 bp, Artificial; identical to SEQ ID NO: 471120
  Synthetic oligonucleotide

SEQ ID NO: 609108 - DNA, 60 bp, Artificial; identical to SEQ ID NO: 471121
  Synthetic oligonucleotide

SEQ ID NO: 609109 - DNA, 60 bp, Artificial; identical to SEQ ID NO: 471122
  Synthetic oligonucleotide

SEQ ID NO: 609110 - DNA, 56 bp, Artificial; identical to SEQ ID NO: 471123
  Synthetic oligonucleotide

SEQ ID NO: 609111 - DNA, 60 bp, Artificial; identical to SEQ ID NO: 471124
  Synthetic oligonucleotide

SEQ ID NO: 609112 - DNA, 58 bp, Artificial; identical to SEQ ID NO: 471125
  Synthetic oligonucleotide

SEQ ID NO: 609113 - DNA, 58 bp, Artificial; identical to SEQ ID NO: 471126
  Synthetic oligonucleotide

SEQ ID NO: 609114 - DNA, 58 bp, Artificial; identical to SEQ ID NO: 471127
  Synthetic oligonucleotide

SEQ ID NO: 609115 - DNA, 60 bp, Artificial; identical to SEQ ID NO: 471128
  Synthetic oligonucleotide

SEQ ID NO: 609116 - DNA, 60 bp, Artificial; identical to SEQ ID NO: 471130
  Synthetic oligonucleotide

SEQ ID NO: 609117 - DNA, 60 bp, Artificial; identical to SEQ ID NO: 471134
  Synthetic oligonucleotide

SEQ ID NO: 609118 - DNA, 56 bp, Artificial; identical to SEQ ID NO: 471139
  Synthetic oligonucleotide

SEQ ID NO: 609119 - DNA, 55 bp, Artificial; identical to SEQ ID NO: 471143
  Synthetic oligonucleotide

SEQ ID NO: 609120 - DNA, 60 bp, Artificial; identical to SEQ ID NO: 471146
  Synthetic oligonucleotide

SEQ ID NO: 609121 - DNA, 60 bp, Artificial; identical to SEQ ID NO: 471148
  Synthetic oligonucleotide

SEQ ID NO: 609122 - DNA, 60 bp, Artificial; identical to SEQ ID NO: 471155
  Synthetic oligonucleotide

SEQ ID NO: 609123 - DNA, 59 bp, Artificial; identical to SEQ ID NO: 471159
  Synthetic oligonucleotide

SEQ ID NO: 609124 - DNA, 55 bp, Artificial; identical to SEQ ID NO: 471160
  Synthetic oligonucleotide

SEQ ID NO: 609125 - DNA, 57 bp, Artificial; identical to SEQ ID NO: 471162
  Synthetic oligonucleotide

SEQ ID NO: 609126 - DNA, 55 bp, Artificial; identical to SEQ ID NO: 471163
  Synthetic oligonucleotide

SEQ ID NO: 609127 - DNA, 60 bp, Artificial; identical to SEQ ID NO: 471165
  Synthetic oligonucleotide

SEQ ID NO: 609128 - DNA, 58 bp, Artificial; identical to SEQ ID NO: 471168
  Synthetic oligonucleotide

SEQ ID NO: 609129 - DNA, 60 bp, Artificial; identical to SEQ ID NO: 471170
  Synthetic oligonucleotide

SEQ ID NO: 609130 - DNA, 60 bp, Artificial; identical to SEQ ID NO: 471171
  Synthetic oligonucleotide

SEQ ID NO: 609131 - DNA, 60 bp, Artificial; identical to SEQ ID NO: 471173
  Synthetic oligonucleotide

SEQ ID NO: 609132 - DNA, 60 bp, Artificial; identical to SEQ ID NO: 471177
  Synthetic oligonucleotide

SEQ ID NO: 609133 - DNA, 60 bp, Artificial; identical to SEQ ID NO: 8064
  Synthetic oligonucleotide

SEQ ID NO: 609134 - DNA, 60 bp, Artificial; identical to SEQ ID NO: 471178
  Synthetic oligonucleotide

SEQ ID NO: 609135 - DNA, 55 bp, Artificial; identical to SEQ ID NO: 471179
  Synthetic oligonucleotide

SEQ ID NO: 609136 - DNA, 53 bp, Artificial; identical to SEQ ID NO: 471181
  Synthetic oligonucleotide

SEQ ID NO: 609137 - DNA, 59 bp, Artificial; identical to SEQ ID NO: 471182
  Synthetic oligonucleotide

SEQ ID NO: 609138 - DNA, 60 bp, Artificial; identical to SEQ ID NO: 471183
  Synthetic oligonucleotide

SEQ ID NO: 609139 - DNA, 56 bp, Artificial; identical to SEQ ID NO: 471186
  Synthetic oligonucleotide

SEQ ID NO: 609140 - DNA, 60 bp, Artificial; identical to SEQ ID NO: 471189
  Synthetic oligonucleotide

SEQ ID NO: 609141 - DNA, 57 bp, Artificial; identical to SEQ ID NO: 471190
  Synthetic oligonucleotide

SEQ ID NO: 609142 - DNA, 59 bp, Artificial; identical to SEQ ID NO: 471191
  Synthetic oligonucleotide

SEQ ID NO: 609143 - DNA, 60 bp, Artificial; identical to SEQ ID NO: 471192
  Synthetic oligonucleotide

SEQ ID NO: 609144 - DNA, 60 bp, Artificial; identical to SEQ ID NO: 471193
  Synthetic oligonucleotide

SEQ ID NO: 609145 - DNA, 60 bp, Artificial; identical to SEQ ID NO: 471194
  Synthetic oligonucleotide

SEQ ID NO: 609146 - DNA, 60 bp, Artificial; identical to SEQ ID NO: 471196
  Synthetic oligonucleotide

SEQ ID NO: 609147 - DNA, 55 bp, Artificial; identical to SEQ ID NO: 471197
  Synthetic oligonucleotide

SEQ ID NO: 609148 - DNA, 59 bp, Artificial; identical to SEQ ID NO: 471198
  Synthetic oligonucleotide

SEQ ID NO: 609149 - DNA, 59 bp, Artificial; identical to SEQ ID NO: 471202
  Synthetic oligonucleotide

SEQ ID NO: 609150 - DNA, 55 bp, Artificial; identical to SEQ ID NO: 471203
  Synthetic oligonucleotide

SEQ ID NO: 609151 - DNA, 54 bp, Artificial; identical to SEQ ID NO: 471205
  Synthetic oligonucleotide

SEQ ID NO: 609152 - DNA, 60 bp, Artificial; identical to SEQ ID NO: 471206
  Synthetic oligonucleotide

SEQ ID NO: 609153 - DNA, 58 bp, Artificial; identical to SEQ ID NO: 471207
  Synthetic oligonucleotide

SEQ ID NO: 609154 - DNA, 60 bp, Artificial; identical to SEQ ID NO: 471211
  Synthetic oligonucleotide

SEQ ID NO: 609155 - DNA, 56 bp, Artificial; identical to SEQ ID NO: 471215
  Synthetic oligonucleotide

SEQ ID NO: 609156 - DNA, 59 bp, Artificial; identical to SEQ ID NO: 471227
  Synthetic oligonucleotide

SEQ ID NO: 609157 - DNA, 60 bp, Artificial; identical to SEQ ID NO: 471233
  Synthetic oligonucleotide

SEQ ID NO: 609158 - DNA, 58 bp, Artificial; identical to SEQ ID NO: 471234
  Synthetic oligonucleotide

SEQ ID NO: 609159 - DNA, 57 bp, Artificial; identical to SEQ ID NO: 471236
  Synthetic oligonucleotide

SEQ ID NO: 609160 - DNA, 53 bp, Artificial; identical to SEQ ID NO: 471238
  Synthetic oligonucleotide

SEQ ID NO: 609161 - DNA, 58 bp, Artificial; identical to SEQ ID NO: 19723
  Synthetic oligonucleotide

SEQ ID NO: 609162 - DNA, 60 bp, Artificial; identical to SEQ ID NO: 471246
  Synthetic oligonucleotide

SEQ ID NO: 609163 - DNA, 50 bp, Artificial; identical to SEQ ID NO: 471247
  Synthetic oligonucleotide

SEQ ID NO: 609164 - DNA, 59 bp, Artificial; identical to SEQ ID NO: 471249
  Synthetic oligonucleotide

SEQ ID NO: 609165 - DNA, 58 bp, Artificial; identical to SEQ ID NO: 471250
  Synthetic oligonucleotide

SEQ ID NO: 609166 - DNA, 59 bp, Artificial; identical to SEQ ID NO: 471253
  Synthetic oligonucleotide

SEQ ID NO: 609167 - DNA, 53 bp, Artificial; identical to SEQ ID NO: 471255
  Synthetic oligonucleotide

SEQ ID NO: 609168 - DNA, 55 bp, Artificial; identical to SEQ ID NO: 471260
  Synthetic oligonucleotide

SEQ ID NO: 609169 - DNA, 60 bp, Artificial; identical to SEQ ID NO: 471262
  Synthetic oligonucleotide

SEQ ID NO: 609170 - DNA, 57 bp, Artificial; identical to SEQ ID NO: 471266
  Synthetic oligonucleotide

SEQ ID NO: 609171 - DNA, 60 bp, Artificial; identical to SEQ ID NO: 471269
  Synthetic oligonucleotide

SEQ ID NO: 609172 - DNA, 53 bp, Artificial; identical to SEQ ID NO: 471271
  Synthetic oligonucleotide

SEQ ID NO: 609173 - DNA, 60 bp, Artificial; identical to SEQ ID NO: 471273
  Synthetic oligonucleotide

SEQ ID NO: 609174 - DNA, 60 bp, Artificial; identical to SEQ ID NO: 14924
  Synthetic oligonucleotide

SEQ ID NO: 609175 - DNA, 52 bp, Artificial; identical to SEQ ID NO: 471274
  Synthetic oligonucleotide

SEQ ID NO: 609176 - DNA, 54 bp, Artificial; identical to SEQ ID NO: 471275
  Synthetic oligonucleotide

SEQ ID NO: 609177 - DNA, 51 bp, Artificial; identical to SEQ ID NO: 471276
  Synthetic oligonucleotide

SEQ ID NO: 609178 - DNA, 59 bp, Artificial; identical to SEQ ID NO: 471278
  Synthetic oligonucleotide

SEQ ID NO: 609179 - DNA, 60 bp, Artificial; identical to SEQ ID NO: 471281
  Synthetic oligonucleotide

SEQ ID NO: 609180 - DNA, 60 bp, Artificial; identical to SEQ ID NO: 471285
  Synthetic oligonucleotide

SEQ ID NO: 609181 - DNA, 60 bp, Artificial; identical to SEQ ID NO: 471294
  Synthetic oligonucleotide

SEQ ID NO: 609182 - DNA, 60 bp, Artificial; identical to SEQ ID NO: 471296
  Synthetic oligonucleotide

SEQ ID NO: 609183 - DNA, 60 bp, Artificial; identical to SEQ ID NO: 471297
  Synthetic oligonucleotide

SEQ ID NO: 609184 - DNA, 55 bp, Artificial; identical to SEQ ID NO: 471298
  Synthetic oligonucleotide

SEQ ID NO: 609185 - DNA, 60 bp, Artificial; identical to SEQ ID NO: 471300
  Synthetic oligonucleotide

SEQ ID NO: 609186 - DNA, 55 bp, Artificial; identical to SEQ ID NO: 471302
  Synthetic oligonucleotide

SEQ ID NO: 609187 - DNA, 60 bp, Artificial; identical to SEQ ID NO: 6471
  Synthetic oligonucleotide

SEQ ID NO: 609188 - DNA, 52 bp, Artificial; identical to SEQ ID NO: 471305
  Synthetic oligonucleotide

SEQ ID NO: 609189 - DNA, 55 bp, Artificial; identical to SEQ ID NO: 11506
  Synthetic oligonucleotide

SEQ ID NO: 609190 - DNA, 59 bp, Artificial; identical to SEQ ID NO: 471309
  Synthetic oligonucleotide

SEQ ID NO: 609191 - DNA, 59 bp, Artificial; identical to SEQ ID NO: 471311
  Synthetic oligonucleotide

SEQ ID NO: 609192 - DNA, 56 bp, Artificial; identical to SEQ ID NO: 471312
  Synthetic oligonucleotide

SEQ ID NO: 609193 - DNA, 55 bp, Artificial; identical to SEQ ID NO: 471314
  Synthetic oligonucleotide

SEQ ID NO: 609194 - DNA, 60 bp, Artificial; identical to SEQ ID NO: 9258
  Synthetic oligonucleotide

SEQ ID NO: 609195 - DNA, 58 bp, Artificial; identical to SEQ ID NO: 471317
  Synthetic oligonucleotide

SEQ ID NO: 609196 - DNA, 60 bp, Artificial; identical to SEQ ID NO: 471320
  Synthetic oligonucleotide

SEQ ID NO: 609197 - DNA, 56 bp, Artificial; identical to SEQ ID NO: 471321
  Synthetic oligonucleotide

SEQ ID NO: 609198 - DNA, 55 bp, Artificial; identical to SEQ ID NO: 471322
  Synthetic oligonucleotide

SEQ ID NO: 609199 - DNA, 52 bp, Artificial; identical to SEQ ID NO: 471323
  Synthetic oligonucleotide

SEQ ID NO: 609200 - DNA, 56 bp, Artificial; identical to SEQ ID NO: 19731
  Synthetic oligonucleotide

SEQ ID NO: 609201 - DNA, 59 bp, Artificial; identical to SEQ ID NO: 471325
  Synthetic oligonucleotide

SEQ ID NO: 609202 - DNA, 59 bp, Artificial; identical to SEQ ID NO: 6378
  Synthetic oligonucleotide

SEQ ID NO: 609203 - DNA, 52 bp, Artificial; identical to SEQ ID NO: 471327
  Synthetic oligonucleotide

SEQ ID NO: 609204 - DNA, 54 bp, Artificial; identical to SEQ ID NO: 471329
  Synthetic oligonucleotide

SEQ ID NO: 609205 - DNA, 50 bp, Artificial; identical to SEQ ID NO: 471330
  Synthetic oligonucleotide

SEQ ID NO: 609206 - DNA, 58 bp, Artificial; identical to SEQ ID NO: 471333
  Synthetic oligonucleotide

SEQ ID NO: 609207 - DNA, 55 bp, Artificial; identical to SEQ ID NO: 471336
  Synthetic oligonucleotide

SEQ ID NO: 609208 - DNA, 60 bp, Artificial; identical to SEQ ID NO: 471337
  Synthetic oligonucleotide

SEQ ID NO: 609209 - DNA, 53 bp, Artificial; identical to SEQ ID NO: 471339
  Synthetic oligonucleotide

SEQ ID NO: 609210 - DNA, 52 bp, Artificial; identical to SEQ ID NO: 471342
  Synthetic oligonucleotide

SEQ ID NO: 609211 - DNA, 55 bp, Artificial; identical to SEQ ID NO: 471343
  Synthetic oligonucleotide

SEQ ID NO: 609212 - DNA, 60 bp, Artificial; identical to SEQ ID NO: 15742
  Synthetic oligonucleotide

SEQ ID NO: 609213 - DNA, 55 bp, Artificial; identical to SEQ ID NO: 471348
  Synthetic oligonucleotide

SEQ ID NO: 609214 - DNA, 60 bp, Artificial; identical to SEQ ID NO: 471352
  Synthetic oligonucleotide

SEQ ID NO: 609215 - DNA, 57 bp, Artificial; identical to SEQ ID NO: 471353
  Synthetic oligonucleotide

SEQ ID NO: 609216 - DNA, 54 bp, Artificial; identical to SEQ ID NO: 471356
  Synthetic oligonucleotide

SEQ ID NO: 609217 - DNA, 60 bp, Artificial; identical to SEQ ID NO: 471357
  Synthetic oligonucleotide

SEQ ID NO: 609218 - DNA, 60 bp, Artificial; identical to SEQ ID NO: 471358
  Synthetic oligonucleotide

SEQ ID NO: 609219 - DNA, 54 bp, Artificial; identical to SEQ ID NO: 471359
  Synthetic oligonucleotide

SEQ ID NO: 609220 - DNA, 60 bp, Artificial; identical to SEQ ID NO: 471361
  Synthetic oligonucleotide

SEQ ID NO: 609221 - DNA, 60 bp, Artificial; identical to SEQ ID NO: 471362
  Synthetic oligonucleotide

SEQ ID NO: 609222 - DNA, 54 bp, Artificial; identical to SEQ ID NO: 471365
  Synthetic oligonucleotide

SEQ ID NO: 609223 - DNA, 60 bp, Artificial; identical to SEQ ID NO: 471367
  Synthetic oligonucleotide

SEQ ID NO: 609224 - DNA, 55 bp, Artificial; identical to SEQ ID NO: 471368
  Synthetic oligonucleotide

SEQ ID NO: 609225 - DNA, 56 bp, Artificial; identical to SEQ ID NO: 471369
  Synthetic oligonucleotide

SEQ ID NO: 609226 - DNA, 60 bp, Artificial; identical to SEQ ID NO: 11137
  Synthetic oligonucleotide

SEQ ID NO: 609227 - DNA, 60 bp, Artificial; identical to SEQ ID NO: 471372
  Synthetic oligonucleotide

SEQ ID NO: 609228 - DNA, 54 bp, Artificial; identical to SEQ ID NO: 471378
  Synthetic oligonucleotide

SEQ ID NO: 609229 - DNA, 60 bp, Artificial; identical to SEQ ID NO: 471379
  Synthetic oligonucleotide

SEQ ID NO: 609230 - DNA, 60 bp, Artificial; identical to SEQ ID NO: 471381
  Synthetic oligonucleotide

SEQ ID NO: 609231 - DNA, 60 bp, Artificial; identical to SEQ ID NO: 6445
  Synthetic oligonucleotide

SEQ ID NO: 609232 - DNA, 53 bp, Artificial; identical to SEQ ID NO: 471387
  Synthetic oligonucleotide

SEQ ID NO: 609233 - DNA, 60 bp, Artificial; identical to SEQ ID NO: 471391
  Synthetic oligonucleotide

SEQ ID NO: 609234 - DNA, 56 bp, Artificial; identical to SEQ ID NO: 471392
  Synthetic oligonucleotide

SEQ ID NO: 609235 - DNA, 60 bp, Artificial; identical to SEQ ID NO: 471394
  Synthetic oligonucleotide

SEQ ID NO: 609236 - DNA, 60 bp, Artificial; identical to SEQ ID NO: 471400
  Synthetic oligonucleotide

SEQ ID NO: 609237 - DNA, 60 bp, Artificial; identical to SEQ ID NO: 471402
  Synthetic oligonucleotide

SEQ ID NO: 609238 - DNA, 52 bp, Artificial; identical to SEQ ID NO: 471403
  Synthetic oligonucleotide

SEQ ID NO: 609239 - DNA, 60 bp, Artificial; identical to SEQ ID NO: 471406
  Synthetic oligonucleotide

SEQ ID NO: 609240 - DNA, 60 bp, Artificial; identical to SEQ ID NO: 471407
  Synthetic oligonucleotide

SEQ ID NO: 609241 - DNA, 55 bp, Artificial; identical to SEQ ID NO: 471410
  Synthetic oligonucleotide

SEQ ID NO: 609242 - DNA, 60 bp, Artificial; identical to SEQ ID NO: 471411
  Synthetic oligonucleotide

SEQ ID NO: 609243 - DNA, 55 bp, Artificial; identical to SEQ ID NO: 9415
  Synthetic oligonucleotide

SEQ ID NO: 609244 - DNA, 60 bp, Artificial; identical to SEQ ID NO: 471414
  Synthetic oligonucleotide

SEQ ID NO: 609245 - DNA, 55 bp, Artificial; identical to SEQ ID NO: 471415
  Synthetic oligonucleotide

SEQ ID NO: 609246 - DNA, 60 bp, Artificial; identical to SEQ ID NO: 471416
  Synthetic oligonucleotide

SEQ ID NO: 609247 - DNA, 54 bp, Artificial; identical to SEQ ID NO: 471418
  Synthetic oligonucleotide

SEQ ID NO: 609248 - DNA, 60 bp, Artificial; identical to SEQ ID NO: 471419
  Synthetic oligonucleotide

SEQ ID NO: 609249 - DNA, 60 bp, Artificial; identical to SEQ ID NO: 471420
  Synthetic oligonucleotide

SEQ ID NO: 609250 - DNA, 51 bp, Artificial; identical to SEQ ID NO: 8024
  Synthetic oligonucleotide

SEQ ID NO: 609251 - DNA, 60 bp, Artificial; identical to SEQ ID NO: 471422
  Synthetic oligonucleotide

SEQ ID NO: 609252 - DNA, 60 bp, Artificial; identical to SEQ ID NO: 471423
  Synthetic oligonucleotide

SEQ ID NO: 609253 - DNA, 60 bp, Artificial; identical to SEQ ID NO: 15105
  Synthetic oligonucleotide

SEQ ID NO: 609254 - DNA, 55 bp, Artificial; identical to SEQ ID NO: 471427
  Synthetic oligonucleotide

SEQ ID NO: 609255 - DNA, 52 bp, Artificial; identical to SEQ ID NO: 471431
  Synthetic oligonucleotide

SEQ ID NO: 609256 - DNA, 57 bp, Artificial; identical to SEQ ID NO: 17243
  Synthetic oligonucleotide

SEQ ID NO: 609257 - DNA, 54 bp, Artificial; identical to SEQ ID NO: 471433
  Synthetic oligonucleotide

SEQ ID NO: 609258 - DNA, 59 bp, Artificial; identical to SEQ ID NO: 471434
  Synthetic oligonucleotide

SEQ ID NO: 609259 - DNA, 60 bp, Artificial; identical to SEQ ID NO: 471436
  Synthetic oligonucleotide

SEQ ID NO: 609260 - DNA, 60 bp, Artificial; identical to SEQ ID NO: 471437
  Synthetic oligonucleotide

SEQ ID NO: 609261 - DNA, 60 bp, Artificial; identical to SEQ ID NO: 471441
  Synthetic oligonucleotide

SEQ ID NO: 609262 - DNA, 55 bp, Artificial; identical to SEQ ID NO: 471445
  Synthetic oligonucleotide

SEQ ID NO: 609263 - DNA, 53 bp, Artificial; identical to SEQ ID NO: 471447
  Synthetic oligonucleotide

SEQ ID NO: 609264 - DNA, 60 bp, Artificial; identical to SEQ ID NO: 471448
  Synthetic oligonucleotide

SEQ ID NO: 609265 - DNA, 55 bp, Artificial; identical to SEQ ID NO: 471450
  Synthetic oligonucleotide

SEQ ID NO: 609266 - DNA, 55 bp, Artificial; identical to SEQ ID NO: 471452
  Synthetic oligonucleotide

SEQ ID NO: 609267 - DNA, 60 bp, Artificial; identical to SEQ ID NO: 471454
  Synthetic oligonucleotide

SEQ ID NO: 609268 - DNA, 55 bp, Artificial; identical to SEQ ID NO: 471455
  Synthetic oligonucleotide

SEQ ID NO: 609269 - DNA, 60 bp, Artificial; identical to SEQ ID NO: 10913
  Synthetic oligonucleotide

SEQ ID NO: 609270 - DNA, 54 bp, Artificial; identical to SEQ ID NO: 471461
  Synthetic oligonucleotide

SEQ ID NO: 609271 - DNA, 55 bp, Artificial; identical to SEQ ID NO: 471462
  Synthetic oligonucleotide

SEQ ID NO: 609272 - DNA, 55 bp, Artificial; identical to SEQ ID NO: 471463
  Synthetic oligonucleotide

SEQ ID NO: 609273 - DNA, 60 bp, Artificial; identical to SEQ ID NO: 471465
  Synthetic oligonucleotide

SEQ ID NO: 609274 - DNA, 59 bp, Artificial; identical to SEQ ID NO: 471470
  Synthetic oligonucleotide

SEQ ID NO: 609275 - DNA, 51 bp, Artificial; identical to SEQ ID NO: 471471
  Synthetic oligonucleotide

SEQ ID NO: 609276 - DNA, 56 bp, Artificial; identical to SEQ ID NO: 471473
  Synthetic oligonucleotide

SEQ ID NO: 609277 - DNA, 60 bp, Artificial; identical to SEQ ID NO: 471474
  Synthetic oligonucleotide

SEQ ID NO: 609278 - DNA, 55 bp, Artificial; identical to SEQ ID NO: 471479
  Synthetic oligonucleotide

SEQ ID NO: 609279 - DNA, 58 bp, Artificial; identical to SEQ ID NO: 7566
  Synthetic oligonucleotide

SEQ ID NO: 609280 - DNA, 59 bp, Artificial; identical to SEQ ID NO: 471482
  Synthetic oligonucleotide

SEQ ID NO: 609281 - DNA, 55 bp, Artificial; identical to SEQ ID NO: 471483
  Synthetic oligonucleotide

SEQ ID NO: 609282 - DNA, 56 bp, Artificial; identical to SEQ ID NO: 471484
  Synthetic oligonucleotide

SEQ ID NO: 609283 - DNA, 58 bp, Artificial; identical to SEQ ID NO: 471485
  Synthetic oligonucleotide

SEQ ID NO: 609284 - DNA, 60 bp, Artificial; identical to SEQ ID NO: 471486
  Synthetic oligonucleotide

SEQ ID NO: 609285 - DNA, 56 bp, Artificial; identical to SEQ ID NO: 471488
  Synthetic oligonucleotide

SEQ ID NO: 609286 - DNA, 53 bp, Artificial; identical to SEQ ID NO: 471490
  Synthetic oligonucleotide

SEQ ID NO: 609287 - DNA, 56 bp, Artificial; identical to SEQ ID NO: 471491
  Synthetic oligonucleotide

SEQ ID NO: 609288 - DNA, 60 bp, Artificial; identical to SEQ ID NO: 471494
  Synthetic oligonucleotide

SEQ ID NO: 609289 - DNA, 56 bp, Artificial; identical to SEQ ID NO: 471495
  Synthetic oligonucleotide

SEQ ID NO: 609290 - DNA, 57 bp, Artificial; identical to SEQ ID NO: 471498
  Synthetic oligonucleotide

SEQ ID NO: 609291 - DNA, 60 bp, Artificial; identical to SEQ ID NO: 471504
  Synthetic oligonucleotide

SEQ ID NO: 609292 - DNA, 57 bp, Artificial; identical to SEQ ID NO: 471507
  Synthetic oligonucleotide

SEQ ID NO: 609293 - DNA, 60 bp, Artificial; identical to SEQ ID NO: 471509
  Synthetic oligonucleotide

SEQ ID NO: 609294 - DNA, 59 bp, Artificial; identical to SEQ ID NO: 471514
  Synthetic oligonucleotide

SEQ ID NO: 609295 - DNA, 59 bp, Artificial; identical to SEQ ID NO: 471516
  Synthetic oligonucleotide

SEQ ID NO: 609296 - DNA, 52 bp, Artificial; identical to SEQ ID NO: 6845
  Synthetic oligonucleotide

SEQ ID NO: 609297 - DNA, 60 bp, Artificial; identical to SEQ ID NO: 471521
  Synthetic oligonucleotide

SEQ ID NO: 609298 - DNA, 55 bp, Artificial; identical to SEQ ID NO: 471525
  Synthetic oligonucleotide

SEQ ID NO: 609299 - DNA, 59 bp, Artificial; identical to SEQ ID NO: 471526
  Synthetic oligonucleotide

SEQ ID NO: 609300 - DNA, 54 bp, Artificial; identical to SEQ ID NO: 471533
  Synthetic oligonucleotide

SEQ ID NO: 609301 - DNA, 56 bp, Artificial; identical to SEQ ID NO: 471535
  Synthetic oligonucleotide

SEQ ID NO: 609302 - DNA, 51 bp, Artificial; identical to SEQ ID NO: 471537
  Synthetic oligonucleotide

SEQ ID NO: 609303 - DNA, 51 bp, Artificial; identical to SEQ ID NO: 471539
  Synthetic oligonucleotide

SEQ ID NO: 609304 - DNA, 53 bp, Artificial; identical to SEQ ID NO: 471541
  Synthetic oligonucleotide

SEQ ID NO: 609305 - DNA, 60 bp, Artificial; identical to SEQ ID NO: 471543
  Synthetic oligonucleotide

SEQ ID NO: 609306 - DNA, 55 bp, Artificial; identical to SEQ ID NO: 471545
  Synthetic oligonucleotide

SEQ ID NO: 609307 - DNA, 58 bp, Artificial; identical to SEQ ID NO: 18412
  Synthetic oligonucleotide

SEQ ID NO: 609308 - DNA, 57 bp, Artificial; identical to SEQ ID NO: 471548
  Synthetic oligonucleotide

SEQ ID NO: 609309 - DNA, 55 bp, Artificial; identical to SEQ ID NO: 471549
  Synthetic oligonucleotide

SEQ ID NO: 609310 - DNA, 60 bp, Artificial; identical to SEQ ID NO: 471553
  Synthetic oligonucleotide

SEQ ID NO: 609311 - DNA, 55 bp, Artificial; identical to SEQ ID NO: 471554
  Synthetic oligonucleotide

SEQ ID NO: 609312 - DNA, 59 bp, Artificial; identical to SEQ ID NO: 471555
  Synthetic oligonucleotide

SEQ ID NO: 609313 - DNA, 52 bp, Artificial; identical to SEQ ID NO: 471558
  Synthetic oligonucleotide

SEQ ID NO: 609314 - DNA, 57 bp, Artificial; identical to SEQ ID NO: 471559
  Synthetic oligonucleotide

SEQ ID NO: 609315 - DNA, 52 bp, Artificial; identical to SEQ ID NO: 471560
  Synthetic oligonucleotide

SEQ ID NO: 609316 - DNA, 60 bp, Artificial; identical to SEQ ID NO: 471561
  Synthetic oligonucleotide

SEQ ID NO: 609317 - DNA, 60 bp, Artificial; identical to SEQ ID NO: 471562
  Synthetic oligonucleotide

SEQ ID NO: 609318 - DNA, 56 bp, Artificial; identical to SEQ ID NO: 471563
  Synthetic oligonucleotide

SEQ ID NO: 609319 - DNA, 55 bp, Artificial; identical to SEQ ID NO: 6842
  Synthetic oligonucleotide

SEQ ID NO: 609320 - DNA, 52 bp, Artificial; identical to SEQ ID NO: 471565
  Synthetic oligonucleotide

SEQ ID NO: 609321 - DNA, 52 bp, Artificial; identical to SEQ ID NO: 471570
  Synthetic oligonucleotide

SEQ ID NO: 609322 - DNA, 60 bp, Artificial; identical to SEQ ID NO: 471572
  Synthetic oligonucleotide

SEQ ID NO: 609323 - DNA, 55 bp, Artificial; identical to SEQ ID NO: 471573
  Synthetic oligonucleotide

SEQ ID NO: 609324 - DNA, 54 bp, Artificial; identical to SEQ ID NO: 471574
  Synthetic oligonucleotide

SEQ ID NO: 609325 - DNA, 58 bp, Artificial; identical to SEQ ID NO: 471575
  Synthetic oligonucleotide

SEQ ID NO: 609326 - DNA, 52 bp, Artificial; identical to SEQ ID NO: 471577
  Synthetic oligonucleotide

SEQ ID NO: 609327 - DNA, 60 bp, Artificial; identical to SEQ ID NO: 471580
  Synthetic oligonucleotide

SEQ ID NO: 609328 - DNA, 60 bp, Artificial; identical to SEQ ID NO: 471582
  Synthetic oligonucleotide

SEQ ID NO: 609329 - DNA, 59 bp, Artificial; identical to SEQ ID NO: 471583
  Synthetic oligonucleotide

SEQ ID NO: 609330 - DNA, 59 bp, Artificial; identical to SEQ ID NO: 471585
  Synthetic oligonucleotide

SEQ ID NO: 609331 - DNA, 60 bp, Artificial; identical to SEQ ID NO: 471587
  Synthetic oligonucleotide

SEQ ID NO: 609332 - DNA, 52 bp, Artificial; identical to SEQ ID NO: 471589
  Synthetic oligonucleotide

SEQ ID NO: 609333 - DNA, 59 bp, Artificial; identical to SEQ ID NO: 471591
  Synthetic oligonucleotide

SEQ ID NO: 609334 - DNA, 60 bp, Artificial; identical to SEQ ID NO: 471593
  Synthetic oligonucleotide

SEQ ID NO: 609335 - DNA, 51 bp, Artificial; identical to SEQ ID NO: 471594
  Synthetic oligonucleotide

SEQ ID NO: 609336 - DNA, 60 bp, Artificial; identical to SEQ ID NO: 471595
  Synthetic oligonucleotide

SEQ ID NO: 609337 - DNA, 60 bp, Artificial; identical to SEQ ID NO: 81264
  Synthetic oligonucleotide

SEQ ID NO: 609338 - DNA, 60 bp, Artificial; identical to SEQ ID NO: 471597
  Synthetic oligonucleotide

SEQ ID NO: 609339 - DNA, 60 bp, Artificial; identical to SEQ ID NO: 15358
  Synthetic oligonucleotide

SEQ ID NO: 609340 - DNA, 53 bp, Artificial; identical to SEQ ID NO: 471599
  Synthetic oligonucleotide

SEQ ID NO: 609341 - DNA, 60 bp, Artificial; identical to SEQ ID NO: 471600
  Synthetic oligonucleotide

SEQ ID NO: 609342 - DNA, 54 bp, Artificial; identical to SEQ ID NO: 471601
  Synthetic oligonucleotide

SEQ ID NO: 609343 - DNA, 55 bp, Artificial; identical to SEQ ID NO: 471606
  Synthetic oligonucleotide

SEQ ID NO: 609344 - DNA, 55 bp, Artificial; identical to SEQ ID NO: 471607
  Synthetic oligonucleotide

SEQ ID NO: 609345 - DNA, 60 bp, Artificial; identical to SEQ ID NO: 471608
  Synthetic oligonucleotide

SEQ ID NO: 609346 - DNA, 60 bp, Artificial; identical to SEQ ID NO: 471611
  Synthetic oligonucleotide

SEQ ID NO: 609347 - DNA, 50 bp, Artificial; identical to SEQ ID NO: 471612
  Synthetic oligonucleotide

SEQ ID NO: 609348 - DNA, 58 bp, Artificial; identical to SEQ ID NO: 471614
  Synthetic oligonucleotide

SEQ ID NO: 609349 - DNA, 60 bp, Artificial; identical to SEQ ID NO: 471618
  Synthetic oligonucleotide

SEQ ID NO: 609350 - DNA, 53 bp, Artificial; identical to SEQ ID NO: 471620
  Synthetic oligonucleotide

SEQ ID NO: 609351 - DNA, 59 bp, Artificial; identical to SEQ ID NO: 471621
  Synthetic oligonucleotide

SEQ ID NO: 609352 - DNA, 59 bp, Artificial; identical to SEQ ID NO: 471622
  Synthetic oligonucleotide

SEQ ID NO: 609353 - DNA, 60 bp, Artificial; identical to SEQ ID NO: 471623
  Synthetic oligonucleotide

SEQ ID NO: 609354 - DNA, 55 bp, Artificial; identical to SEQ ID NO: 471625
  Synthetic oligonucleotide

SEQ ID NO: 609355 - DNA, 60 bp, Artificial; identical to SEQ ID NO: 471631
  Synthetic oligonucleotide

SEQ ID NO: 609356 - DNA, 51 bp, Artificial; identical to SEQ ID NO: 471637
  Synthetic oligonucleotide

SEQ ID NO: 609357 - DNA, 60 bp, Artificial; identical to SEQ ID NO: 8989
  Synthetic oligonucleotide

SEQ ID NO: 609358 - DNA, 59 bp, Artificial; identical to SEQ ID NO: 471643
  Synthetic oligonucleotide

SEQ ID NO: 609359 - DNA, 56 bp, Artificial; identical to SEQ ID NO: 471644
  Synthetic oligonucleotide

SEQ ID NO: 609360 - DNA, 55 bp, Artificial; identical to SEQ ID NO: 471647
  Synthetic oligonucleotide

SEQ ID NO: 609361 - DNA, 59 bp, Artificial; identical to SEQ ID NO: 471648
  Synthetic oligonucleotide

SEQ ID NO: 609362 - DNA, 60 bp, Artificial; identical to SEQ ID NO: 471649
  Synthetic oligonucleotide

SEQ ID NO: 609363 - DNA, 60 bp, Artificial; identical to SEQ ID NO: 471650
  Synthetic oligonucleotide

SEQ ID NO: 609364 - DNA, 60 bp, Artificial; identical to SEQ ID NO: 471652
  Synthetic oligonucleotide

SEQ ID NO: 609365 - DNA, 55 bp, Artificial; identical to SEQ ID NO: 471653
  Synthetic oligonucleotide

SEQ ID NO: 609366 - DNA, 53 bp, Artificial; identical to SEQ ID NO: 471654
  Synthetic oligonucleotide

SEQ ID NO: 609367 - DNA, 55 bp, Artificial; identical to SEQ ID NO: 471655
  Synthetic oligonucleotide

SEQ ID NO: 609368 - DNA, 50 bp, Artificial; identical to SEQ ID NO: 471658
  Synthetic oligonucleotide

SEQ ID NO: 609369 - DNA, 54 bp, Artificial; identical to SEQ ID NO: 471659
  Synthetic oligonucleotide

SEQ ID NO: 609370 - DNA, 52 bp, Artificial; identical to SEQ ID NO: 471661
  Synthetic oligonucleotide

SEQ ID NO: 609371 - DNA, 60 bp, Artificial; identical to SEQ ID NO: 471662
  Synthetic oligonucleotide

SEQ ID NO: 609372 - DNA, 60 bp, Artificial; identical to SEQ ID NO: 12681
  Synthetic oligonucleotide

SEQ ID NO: 609373 - DNA, 53 bp, Artificial; identical to SEQ ID NO: 471663
  Synthetic oligonucleotide

SEQ ID NO: 609374 - DNA, 60 bp, Artificial; identical to SEQ ID NO: 471664
  Synthetic oligonucleotide

SEQ ID NO: 609375 - DNA, 56 bp, Artificial; identical to SEQ ID NO: 471665
  Synthetic oligonucleotide

SEQ ID NO: 609376 - DNA, 58 bp, Artificial; identical to SEQ ID NO: 471667
  Synthetic oligonucleotide

SEQ ID NO: 609377 - DNA, 60 bp, Artificial; identical to SEQ ID NO: 471668
  Synthetic oligonucleotide

SEQ ID NO: 609378 - DNA, 55 bp, Artificial; identical to SEQ ID NO: 471669
  Synthetic oligonucleotide

SEQ ID NO: 609379 - DNA, 55 bp, Artificial; identical to SEQ ID NO: 471671
  Synthetic oligonucleotide

SEQ ID NO: 609380 - DNA, 59 bp, Artificial; identical to SEQ ID NO: 471672
  Synthetic oligonucleotide

SEQ ID NO: 609381 - DNA, 60 bp, Artificial; identical to SEQ ID NO: 471674
  Synthetic oligonucleotide

SEQ ID NO: 609382 - DNA, 55 bp, Artificial; identical to SEQ ID NO: 471675
  Synthetic oligonucleotide

SEQ ID NO: 609383 - DNA, 57 bp, Artificial; identical to SEQ ID NO: 471679
  Synthetic oligonucleotide

SEQ ID NO: 609384 - DNA, 52 bp, Artificial; identical to SEQ ID NO: 471682
  Synthetic oligonucleotide

SEQ ID NO: 609385 - DNA, 55 bp, Artificial; identical to SEQ ID NO: 471683
  Synthetic oligonucleotide

SEQ ID NO: 609386 - DNA, 52 bp, Artificial; identical to SEQ ID NO: 471685
  Synthetic oligonucleotide

SEQ ID NO: 609387 - DNA, 53 bp, Artificial; identical to SEQ ID NO: 471689
  Synthetic oligonucleotide

SEQ ID NO: 609388 - DNA, 60 bp, Artificial; identical to SEQ ID NO: 471691
  Synthetic oligonucleotide

SEQ ID NO: 609389 - DNA, 51 bp, Artificial; identical to SEQ ID NO: 471692
  Synthetic oligonucleotide

SEQ ID NO: 609390 - DNA, 53 bp, Artificial; identical to SEQ ID NO: 471696
  Synthetic oligonucleotide

SEQ ID NO: 609391 - DNA, 60 bp, Artificial; identical to SEQ ID NO: 471705
  Synthetic oligonucleotide

SEQ ID NO: 609392 - DNA, 55 bp, Artificial; identical to SEQ ID NO: 471709
  Synthetic oligonucleotide

SEQ ID NO: 609393 - DNA, 60 bp, Artificial; identical to SEQ ID NO: 471711
  Synthetic oligonucleotide

SEQ ID NO: 609394 - DNA, 60 bp, Artificial; identical to SEQ ID NO: 471716
  Synthetic oligonucleotide

SEQ ID NO: 609395 - DNA, 60 bp, Artificial; identical to SEQ ID NO: 471718
  Synthetic oligonucleotide

SEQ ID NO: 609396 - DNA, 60 bp, Artificial; identical to SEQ ID NO: 471720
  Synthetic oligonucleotide

SEQ ID NO: 609397 - DNA, 59 bp, Artificial; identical to SEQ ID NO: 471721
  Synthetic oligonucleotide

SEQ ID NO: 609398 - DNA, 55 bp, Artificial; identical to SEQ ID NO: 471722
  Synthetic oligonucleotide

SEQ ID NO: 609399 - DNA, 51 bp, Artificial; identical to SEQ ID NO: 471727
  Synthetic oligonucleotide

SEQ ID NO: 609400 - DNA, 60 bp, Artificial; identical to SEQ ID NO: 7626
  Synthetic oligonucleotide

SEQ ID NO: 609401 - DNA, 60 bp, Artificial; identical to SEQ ID NO: 471731
  Synthetic oligonucleotide

SEQ ID NO: 609402 - DNA, 60 bp, Artificial; identical to SEQ ID NO: 471732
  Synthetic oligonucleotide

SEQ ID NO: 609403 - DNA, 54 bp, Artificial; identical to SEQ ID NO: 471736
  Synthetic oligonucleotide

SEQ ID NO: 609404 - DNA, 55 bp, Artificial; identical to SEQ ID NO: 471737
  Synthetic oligonucleotide

SEQ ID NO: 609405 - DNA, 57 bp, Artificial; identical to SEQ ID NO: 471739
  Synthetic oligonucleotide

SEQ ID NO: 609406 - DNA, 60 bp, Artificial; identical to SEQ ID NO: 471741
  Synthetic oligonucleotide

SEQ ID NO: 609407 - DNA, 60 bp, Artificial; identical to SEQ ID NO: 471742
  Synthetic oligonucleotide

SEQ ID NO: 609408 - DNA, 58 bp, Artificial; identical to SEQ ID NO: 471748
  Synthetic oligonucleotide

SEQ ID NO: 609409 - DNA, 56 bp, Artificial; identical to SEQ ID NO: 471750
  Synthetic oligonucleotide

SEQ ID NO: 609410 - DNA, 57 bp, Artificial; identical to SEQ ID NO: 471751
  Synthetic oligonucleotide

SEQ ID NO: 609411 - DNA, 60 bp, Artificial; identical to SEQ ID NO: 471752
  Synthetic oligonucleotide

SEQ ID NO: 609412 - DNA, 60 bp, Artificial; identical to SEQ ID NO: 471753
  Synthetic oligonucleotide

SEQ ID NO: 609413 - DNA, 60 bp, Artificial; identical to SEQ ID NO: 471755
  Synthetic oligonucleotide

SEQ ID NO: 609414 - DNA, 59 bp, Artificial; identical to SEQ ID NO: 471757
  Synthetic oligonucleotide

SEQ ID NO: 609415 - DNA, 55 bp, Artificial; identical to SEQ ID NO: 471758
  Synthetic oligonucleotide

SEQ ID NO: 609416 - DNA, 58 bp, Artificial; identical to SEQ ID NO: 471760
  Synthetic oligonucleotide

SEQ ID NO: 609417 - DNA, 60 bp, Artificial; identical to SEQ ID NO: 471764
  Synthetic oligonucleotide

SEQ ID NO: 609418 - DNA, 55 bp, Artificial; identical to SEQ ID NO: 471765
  Synthetic oligonucleotide

SEQ ID NO: 609419 - DNA, 60 bp, Artificial; identical to SEQ ID NO: 471766
  Synthetic oligonucleotide

SEQ ID NO: 609420 - DNA, 55 bp, Artificial; identical to SEQ ID NO: 471767
  Synthetic oligonucleotide

SEQ ID NO: 609421 - DNA, 59 bp, Artificial; identical to SEQ ID NO: 471771
  Synthetic oligonucleotide

SEQ ID NO: 609422 - DNA, 55 bp, Artificial; identical to SEQ ID NO: 471772
  Synthetic oligonucleotide

SEQ ID NO: 609423 - DNA, 59 bp, Artificial; identical to SEQ ID NO: 471773
  Synthetic oligonucleotide

SEQ ID NO: 609424 - DNA, 52 bp, Artificial; identical to SEQ ID NO: 471775
  Synthetic oligonucleotide

SEQ ID NO: 609425 - DNA, 53 bp, Artificial; identical to SEQ ID NO: 471776
  Synthetic oligonucleotide

SEQ ID NO: 609426 - DNA, 53 bp, Artificial; identical to SEQ ID NO: 471783
  Synthetic oligonucleotide

SEQ ID NO: 609427 - DNA, 55 bp, Artificial; identical to SEQ ID NO: 471784
  Synthetic oligonucleotide

SEQ ID NO: 609428 - DNA, 53 bp, Artificial; identical to SEQ ID NO: 471785
  Synthetic oligonucleotide

SEQ ID NO: 609429 - DNA, 60 bp, Artificial; identical to SEQ ID NO: 471786
  Synthetic oligonucleotide

SEQ ID NO: 609430 - DNA, 55 bp, Artificial; identical to SEQ ID NO: 471787
  Synthetic oligonucleotide

SEQ ID NO: 609431 - DNA, 55 bp, Artificial; identical to SEQ ID NO: 471788
  Synthetic oligonucleotide

SEQ ID NO: 609432 - DNA, 60 bp, Artificial; identical to SEQ ID NO: 471791
  Synthetic oligonucleotide

SEQ ID NO: 609433 - DNA, 55 bp, Artificial; identical to SEQ ID NO: 471794
  Synthetic oligonucleotide

SEQ ID NO: 609434 - DNA, 51 bp, Artificial; identical to SEQ ID NO: 471795
  Synthetic oligonucleotide

SEQ ID NO: 609435 - DNA, 60 bp, Artificial; identical to SEQ ID NO: 471797
  Synthetic oligonucleotide

SEQ ID NO: 609436 - DNA, 58 bp, Artificial; identical to SEQ ID NO: 471798
  Synthetic oligonucleotide

SEQ ID NO: 609437 - DNA, 60 bp, Artificial; identical to SEQ ID NO: 471800
  Synthetic oligonucleotide

SEQ ID NO: 609438 - DNA, 58 bp, Artificial; identical to SEQ ID NO: 471803
  Synthetic oligonucleotide

SEQ ID NO: 609439 - DNA, 60 bp, Artificial; identical to SEQ ID NO: 471804
  Synthetic oligonucleotide

SEQ ID NO: 609440 - DNA, 57 bp, Artificial; identical to SEQ ID NO: 471805
  Synthetic oligonucleotide

SEQ ID NO: 609441 - DNA, 50 bp, Artificial; identical to SEQ ID NO: 471816
  Synthetic oligonucleotide

SEQ ID NO: 609442 - DNA, 60 bp, Artificial; identical to SEQ ID NO: 6273
  Synthetic oligonucleotide

SEQ ID NO: 609443 - DNA, 60 bp, Artificial; identical to SEQ ID NO: 471818
  Synthetic oligonucleotide

SEQ ID NO: 609444 - DNA, 55 bp, Artificial; identical to SEQ ID NO: 471819
  Synthetic oligonucleotide

SEQ ID NO: 609445 - DNA, 60 bp, Artificial; identical to SEQ ID NO: 471822
  Synthetic oligonucleotide

SEQ ID NO: 609446 - DNA, 52 bp, Artificial; identical to SEQ ID NO: 471823
  Synthetic oligonucleotide

SEQ ID NO: 609447 - DNA, 55 bp, Artificial; identical to SEQ ID NO: 471825
  Synthetic oligonucleotide

SEQ ID NO: 609448 - DNA, 60 bp, Artificial; identical to SEQ ID NO: 471826
  Synthetic oligonucleotide

SEQ ID NO: 609449 - DNA, 55 bp, Artificial; identical to SEQ ID NO: 471827
  Synthetic oligonucleotide

SEQ ID NO: 609450 - DNA, 60 bp, Artificial; identical to SEQ ID NO: 471828
  Synthetic oligonucleotide

SEQ ID NO: 609451 - DNA, 53 bp, Artificial; identical to SEQ ID NO: 471831
  Synthetic oligonucleotide

SEQ ID NO: 609452 - DNA, 55 bp, Artificial; identical to SEQ ID NO: 471833
  Synthetic oligonucleotide

SEQ ID NO: 609453 - DNA, 55 bp, Artificial; identical to SEQ ID NO: 471836
  Synthetic oligonucleotide

SEQ ID NO: 609454 - DNA, 60 bp, Artificial; identical to SEQ ID NO: 471837
  Synthetic oligonucleotide

SEQ ID NO: 609455 - DNA, 60 bp, Artificial; identical to SEQ ID NO: 471838
  Synthetic oligonucleotide

SEQ ID NO: 609456 - DNA, 50 bp, Artificial; identical to SEQ ID NO: 471839
  Synthetic oligonucleotide

SEQ ID NO: 609457 - DNA, 60 bp, Artificial; identical to SEQ ID NO: 471841
  Synthetic oligonucleotide

SEQ ID NO: 609458 - DNA, 60 bp, Artificial; identical to SEQ ID NO: 471843
  Synthetic oligonucleotide

SEQ ID NO: 609459 - DNA, 60 bp, Artificial; identical to SEQ ID NO: 471844
  Synthetic oligonucleotide

SEQ ID NO: 609460 - DNA, 59 bp, Artificial; identical to SEQ ID NO: 471847
  Synthetic oligonucleotide

SEQ ID NO: 609461 - DNA, 60 bp, Artificial; identical to SEQ ID NO: 471853
  Synthetic oligonucleotide

SEQ ID NO: 609462 - DNA, 60 bp, Artificial; identical to SEQ ID NO: 471854
  Synthetic oligonucleotide

SEQ ID NO: 609463 - DNA, 60 bp, Artificial; identical to SEQ ID NO: 471859
  Synthetic oligonucleotide

SEQ ID NO: 609464 - DNA, 58 bp, Artificial; identical to SEQ ID NO: 471860
  Synthetic oligonucleotide

SEQ ID NO: 609465 - DNA, 53 bp, Artificial; identical to SEQ ID NO: 471864
  Synthetic oligonucleotide

SEQ ID NO: 609466 - DNA, 60 bp, Artificial; identical to SEQ ID NO: 471865
  Synthetic oligonucleotide

SEQ ID NO: 609467 - DNA, 60 bp, Artificial; identical to SEQ ID NO: 471866
  Synthetic oligonucleotide

SEQ ID NO: 609468 - DNA, 57 bp, Artificial; identical to SEQ ID NO: 471869
  Synthetic oligonucleotide

SEQ ID NO: 609469 - DNA, 60 bp, Artificial; identical to SEQ ID NO: 471870
  Synthetic oligonucleotide

SEQ ID NO: 609470 - DNA, 58 bp, Artificial; identical to SEQ ID NO: 471871
  Synthetic oligonucleotide

SEQ ID NO: 609471 - DNA, 58 bp, Artificial; identical to SEQ ID NO: 471875
  Synthetic oligonucleotide

SEQ ID NO: 609472 - DNA, 50 bp, Artificial; identical to SEQ ID NO: 471877
  Synthetic oligonucleotide

SEQ ID NO: 609473 - DNA, 60 bp, Artificial; identical to SEQ ID NO: 471881
  Synthetic oligonucleotide

SEQ ID NO: 609474 - DNA, 53 bp, Artificial; identical to SEQ ID NO: 471891
  Synthetic oligonucleotide

SEQ ID NO: 609475 - DNA, 56 bp, Artificial; identical to SEQ ID NO: 471892
  Synthetic oligonucleotide

SEQ ID NO: 609476 - DNA, 58 bp, Artificial; identical to SEQ ID NO: 471893
  Synthetic oligonucleotide

SEQ ID NO: 609477 - DNA, 60 bp, Artificial; identical to SEQ ID NO: 471897
  Synthetic oligonucleotide

SEQ ID NO: 609478 - DNA, 60 bp, Artificial; identical to SEQ ID NO: 471898
  Synthetic oligonucleotide

SEQ ID NO: 609479 - DNA, 60 bp, Artificial; identical to SEQ ID NO: 471899
  Synthetic oligonucleotide

SEQ ID NO: 609480 - DNA, 60 bp, Artificial; identical to SEQ ID NO: 471901
  Synthetic oligonucleotide

SEQ ID NO: 609481 - DNA, 56 bp, Artificial; identical to SEQ ID NO: 471902
  Synthetic oligonucleotide

SEQ ID NO: 609482 - DNA, 55 bp, Artificial; identical to SEQ ID NO: 471905
  Synthetic oligonucleotide

SEQ ID NO: 609483 - DNA, 57 bp, Artificial; identical to SEQ ID NO: 471908
  Synthetic oligonucleotide

SEQ ID NO: 609484 - DNA, 55 bp, Artificial; identical to SEQ ID NO: 471910
  Synthetic oligonucleotide

SEQ ID NO: 609485 - DNA, 60 bp, Artificial; identical to SEQ ID NO: 471911
  Synthetic oligonucleotide

SEQ ID NO: 609486 - DNA, 59 bp, Artificial; identical to SEQ ID NO: 471912
  Synthetic oligonucleotide

SEQ ID NO: 609487 - DNA, 57 bp, Artificial; identical to SEQ ID NO: 16029
  Synthetic oligonucleotide

SEQ ID NO: 609488 - DNA, 60 bp, Artificial; identical to SEQ ID NO: 471914
  Synthetic oligonucleotide

SEQ ID NO: 609489 - DNA, 59 bp, Artificial; identical to SEQ ID NO: 471915
  Synthetic oligonucleotide

SEQ ID NO: 609490 - DNA, 56 bp, Artificial; identical to SEQ ID NO: 471920
  Synthetic oligonucleotide

SEQ ID NO: 609491 - DNA, 53 bp, Artificial; identical to SEQ ID NO: 471924
  Synthetic oligonucleotide

SEQ ID NO: 609492 - DNA, 55 bp, Artificial; identical to SEQ ID NO: 471925
  Synthetic oligonucleotide

SEQ ID NO: 609493 - DNA, 55 bp, Artificial; identical to SEQ ID NO: 14518
  Synthetic oligonucleotide

SEQ ID NO: 609494 - DNA, 58 bp, Artificial; identical to SEQ ID NO: 471930
  Synthetic oligonucleotide

SEQ ID NO: 609495 - DNA, 55 bp, Artificial; identical to SEQ ID NO: 471933
  Synthetic oligonucleotide

SEQ ID NO: 609496 - DNA, 60 bp, Artificial; identical to SEQ ID NO: 471934
  Synthetic oligonucleotide

SEQ ID NO: 609497 - DNA, 57 bp, Artificial; identical to SEQ ID NO: 471935
  Synthetic oligonucleotide

SEQ ID NO: 609498 - DNA, 60 bp, Artificial; identical to SEQ ID NO: 471936
  Synthetic oligonucleotide

SEQ ID NO: 609499 - DNA, 55 bp, Artificial; identical to SEQ ID NO: 471937
  Synthetic oligonucleotide

SEQ ID NO: 609500 - DNA, 60 bp, Artificial; identical to SEQ ID NO: 471938
  Synthetic oligonucleotide

SEQ ID NO: 609501 - DNA, 60 bp, Artificial; identical to SEQ ID NO: 471939
  Synthetic oligonucleotide

SEQ ID NO: 609502 - DNA, 55 bp, Artificial; identical to SEQ ID NO: 471943
  Synthetic oligonucleotide

SEQ ID NO: 609503 - DNA, 50 bp, Artificial; identical to SEQ ID NO: 471948
  Synthetic oligonucleotide

SEQ ID NO: 609504 - DNA, 60 bp, Artificial; identical to SEQ ID NO: 471949
  Synthetic oligonucleotide

SEQ ID NO: 609505 - DNA, 60 bp, Artificial; identical to SEQ ID NO: 471951
  Synthetic oligonucleotide

SEQ ID NO: 609506 - DNA, 60 bp, Artificial; identical to SEQ ID NO: 471953
  Synthetic oligonucleotide

SEQ ID NO: 609507 - DNA, 60 bp, Artificial; identical to SEQ ID NO: 471954
  Synthetic oligonucleotide

SEQ ID NO: 609508 - DNA, 55 bp, Artificial; identical to SEQ ID NO: 16871
  Synthetic oligonucleotide

SEQ ID NO: 609509 - DNA, 55 bp, Artificial; identical to SEQ ID NO: 471955
  Synthetic oligonucleotide

SEQ ID NO: 609510 - DNA, 57 bp, Artificial; identical to SEQ ID NO: 471961
  Synthetic oligonucleotide

SEQ ID NO: 609511 - DNA, 55 bp, Artificial; identical to SEQ ID NO: 471967
  Synthetic oligonucleotide

SEQ ID NO: 609512 - DNA, 60 bp, Artificial; identical to SEQ ID NO: 471968
  Synthetic oligonucleotide

SEQ ID NO: 609513 - DNA, 59 bp, Artificial; identical to SEQ ID NO: 471970
  Synthetic oligonucleotide

SEQ ID NO: 609514 - DNA, 60 bp, Artificial; identical to SEQ ID NO: 471971
  Synthetic oligonucleotide

SEQ ID NO: 609515 - DNA, 60 bp, Artificial; identical to SEQ ID NO: 471973
  Synthetic oligonucleotide

SEQ ID NO: 609516 - DNA, 55 bp, Artificial; identical to SEQ ID NO: 471974
  Synthetic oligonucleotide

SEQ ID NO: 609517 - DNA, 56 bp, Artificial; identical to SEQ ID NO: 471977
  Synthetic oligonucleotide

SEQ ID NO: 609518 - DNA, 54 bp, Artificial; identical to SEQ ID NO: 471979
  Synthetic oligonucleotide

SEQ ID NO: 609519 - DNA, 55 bp, Artificial; identical to SEQ ID NO: 471980
  Synthetic oligonucleotide

SEQ ID NO: 609520 - DNA, 60 bp, Artificial; identical to SEQ ID NO: 471984
  Synthetic oligonucleotide

SEQ ID NO: 609521 - DNA, 56 bp, Artificial; identical to SEQ ID NO: 471986
  Synthetic oligonucleotide

SEQ ID NO: 609522 - DNA, 60 bp, Artificial; identical to SEQ ID NO: 471987
  Synthetic oligonucleotide

SEQ ID NO: 609523 - DNA, 55 bp, Artificial; identical to SEQ ID NO: 471988
  Synthetic oligonucleotide

SEQ ID NO: 609524 - DNA, 52 bp, Artificial; identical to SEQ ID NO: 471989
  Synthetic oligonucleotide

SEQ ID NO: 609525 - DNA, 60 bp, Artificial; identical to SEQ ID NO: 471993
  Synthetic oligonucleotide

SEQ ID NO: 609526 - DNA, 54 bp, Artificial; identical to SEQ ID NO: 471995
  Synthetic oligonucleotide

SEQ ID NO: 609527 - DNA, 54 bp, Artificial; identical to SEQ ID NO: 471997
  Synthetic oligonucleotide

SEQ ID NO: 609528 - DNA, 54 bp, Artificial; identical to SEQ ID NO: 471998
  Synthetic oligonucleotide

SEQ ID NO: 609529 - DNA, 51 bp, Artificial; identical to SEQ ID NO: 472000
  Synthetic oligonucleotide

SEQ ID NO: 609530 - DNA, 56 bp, Artificial; identical to SEQ ID NO: 472001
  Synthetic oligonucleotide

SEQ ID NO: 609531 - DNA, 55 bp, Artificial; identical to SEQ ID NO: 472003
  Synthetic oligonucleotide

SEQ ID NO: 609532 - DNA, 60 bp, Artificial; identical to SEQ ID NO: 472004
  Synthetic oligonucleotide

SEQ ID NO: 609533 - DNA, 60 bp, Artificial; identical to SEQ ID NO: 472005
  Synthetic oligonucleotide

SEQ ID NO: 609534 - DNA, 60 bp, Artificial; identical to SEQ ID NO: 472010
  Synthetic oligonucleotide

SEQ ID NO: 609535 - DNA, 51 bp, Artificial; identical to SEQ ID NO: 472012
  Synthetic oligonucleotide

SEQ ID NO: 609536 - DNA, 58 bp, Artificial; identical to SEQ ID NO: 472013
  Synthetic oligonucleotide

SEQ ID NO: 609537 - DNA, 60 bp, Artificial; identical to SEQ ID NO: 472024
  Synthetic oligonucleotide

SEQ ID NO: 609538 - DNA, 60 bp, Artificial; identical to SEQ ID NO: 472025
  Synthetic oligonucleotide

SEQ ID NO: 609539 - DNA, 60 bp, Artificial; identical to SEQ ID NO: 472027
  Synthetic oligonucleotide

SEQ ID NO: 609540 - DNA, 52 bp, Artificial; identical to SEQ ID NO: 472030
  Synthetic oligonucleotide

SEQ ID NO: 609541 - DNA, 51 bp, Artificial; identical to SEQ ID NO: 472033
  Synthetic oligonucleotide

SEQ ID NO: 609542 - DNA, 52 bp, Artificial; identical to SEQ ID NO: 472034
  Synthetic oligonucleotide

SEQ ID NO: 609543 - DNA, 60 bp, Artificial; identical to SEQ ID NO: 472035
  Synthetic oligonucleotide

SEQ ID NO: 609544 - DNA, 52 bp, Artificial; identical to SEQ ID NO: 472039
  Synthetic oligonucleotide

SEQ ID NO: 609545 - DNA, 60 bp, Artificial; identical to SEQ ID NO: 472040
  Synthetic oligonucleotide

SEQ ID NO: 609546 - DNA, 53 bp, Artificial; identical to SEQ ID NO: 472041
  Synthetic oligonucleotide

SEQ ID NO: 609547 - DNA, 60 bp, Artificial; identical to SEQ ID NO: 472042
  Synthetic oligonucleotide

SEQ ID NO: 609548 - DNA, 53 bp, Artificial; identical to SEQ ID NO: 472044
  Synthetic oligonucleotide

SEQ ID NO: 609549 - DNA, 60 bp, Artificial; identical to SEQ ID NO: 472046
  Synthetic oligonucleotide

SEQ ID NO: 609550 - DNA, 60 bp, Artificial; identical to SEQ ID NO: 472047
  Synthetic oligonucleotide

SEQ ID NO: 609551 - DNA, 58 bp, Artificial; identical to SEQ ID NO: 472048
  Synthetic oligonucleotide

SEQ ID NO: 609552 - DNA, 60 bp, Artificial; identical to SEQ ID NO: 472051
  Synthetic oligonucleotide

SEQ ID NO: 609553 - DNA, 51 bp, Artificial; identical to SEQ ID NO: 472052
  Synthetic oligonucleotide

SEQ ID NO: 609554 - DNA, 55 bp, Artificial; identical to SEQ ID NO: 472055
  Synthetic oligonucleotide

SEQ ID NO: 609555 - DNA, 55 bp, Artificial; identical to SEQ ID NO: 472056
  Synthetic oligonucleotide

SEQ ID NO: 609556 - DNA, 58 bp, Artificial; identical to SEQ ID NO: 472057
  Synthetic oligonucleotide

SEQ ID NO: 609557 - DNA, 53 bp, Artificial; identical to SEQ ID NO: 12690
  Synthetic oligonucleotide

SEQ ID NO: 609558 - DNA, 60 bp, Artificial; identical to SEQ ID NO: 472058
  Synthetic oligonucleotide

SEQ ID NO: 609559 - DNA, 55 bp, Artificial; identical to SEQ ID NO: 472060
  Synthetic oligonucleotide

SEQ ID NO: 609560 - DNA, 58 bp, Artificial; identical to SEQ ID NO: 472061
  Synthetic oligonucleotide

SEQ ID NO: 609561 - DNA, 59 bp, Artificial; identical to SEQ ID NO: 472062
  Synthetic oligonucleotide

SEQ ID NO: 609562 - DNA, 54 bp, Artificial; identical to SEQ ID NO: 472063
  Synthetic oligonucleotide

SEQ ID NO: 609563 - DNA, 55 bp, Artificial; identical to SEQ ID NO: 472065
  Synthetic oligonucleotide

SEQ ID NO: 609564 - DNA, 60 bp, Artificial; identical to SEQ ID NO: 472068
  Synthetic oligonucleotide

SEQ ID NO: 609565 - DNA, 52 bp, Artificial; identical to SEQ ID NO: 472069
  Synthetic oligonucleotide

SEQ ID NO: 609566 - DNA, 55 bp, Artificial; identical to SEQ ID NO: 472070
  Synthetic oligonucleotide

SEQ ID NO: 609567 - DNA, 53 bp, Artificial; identical to SEQ ID NO: 472072
  Synthetic oligonucleotide

SEQ ID NO: 609568 - DNA, 54 bp, Artificial; identical to SEQ ID NO: 472073
  Synthetic oligonucleotide

SEQ ID NO: 609569 - DNA, 60 bp, Artificial; identical to SEQ ID NO: 472074
  Synthetic oligonucleotide

SEQ ID NO: 609570 - DNA, 55 bp, Artificial; identical to SEQ ID NO: 472075
  Synthetic oligonucleotide

SEQ ID NO: 609571 - DNA, 54 bp, Artificial; identical to SEQ ID NO: 472076
  Synthetic oligonucleotide

SEQ ID NO: 609572 - DNA, 60 bp, Artificial; identical to SEQ ID NO: 5750
  Synthetic oligonucleotide

SEQ ID NO: 609573 - DNA, 55 bp, Artificial; identical to SEQ ID NO: 472079
  Synthetic oligonucleotide

SEQ ID NO: 609574 - DNA, 53 bp, Artificial; identical to SEQ ID NO: 472084
  Synthetic oligonucleotide

SEQ ID NO: 609575 - DNA, 52 bp, Artificial; identical to SEQ ID NO: 472085
  Synthetic oligonucleotide

SEQ ID NO: 609576 - DNA, 58 bp, Artificial; identical to SEQ ID NO: 472086
  Synthetic oligonucleotide

SEQ ID NO: 609577 - DNA, 60 bp, Artificial; identical to SEQ ID NO: 472088
  Synthetic oligonucleotide

SEQ ID NO: 609578 - DNA, 58 bp, Artificial; identical to SEQ ID NO: 472090
  Synthetic oligonucleotide

SEQ ID NO: 609579 - DNA, 60 bp, Artificial; identical to SEQ ID NO: 472091
  Synthetic oligonucleotide

SEQ ID NO: 609580 - DNA, 55 bp, Artificial; identical to SEQ ID NO: 472092
  Synthetic oligonucleotide

SEQ ID NO: 609581 - DNA, 50 bp, Artificial; identical to SEQ ID NO: 472094
  Synthetic oligonucleotide

SEQ ID NO: 609582 - DNA, 53 bp, Artificial; identical to SEQ ID NO: 472098
  Synthetic oligonucleotide

SEQ ID NO: 609583 - DNA, 60 bp, Artificial; identical to SEQ ID NO: 472099
  Synthetic oligonucleotide

SEQ ID NO: 609584 - DNA, 60 bp, Artificial; identical to SEQ ID NO: 472101
  Synthetic oligonucleotide

SEQ ID NO: 609585 - DNA, 60 bp, Artificial; identical to SEQ ID NO: 472102
  Synthetic oligonucleotide

SEQ ID NO: 609586 - DNA, 58 bp, Artificial; identical to SEQ ID NO: 472110
  Synthetic oligonucleotide

SEQ ID NO: 609587 - DNA, 59 bp, Artificial; identical to SEQ ID NO: 472111
  Synthetic oligonucleotide

SEQ ID NO: 609588 - DNA, 55 bp, Artificial; identical to SEQ ID NO: 472114
  Synthetic oligonucleotide

SEQ ID NO: 609589 - DNA, 57 bp, Artificial; identical to SEQ ID NO: 472117
  Synthetic oligonucleotide

SEQ ID NO: 609590 - DNA, 55 bp, Artificial; identical to SEQ ID NO: 472119
  Synthetic oligonucleotide

SEQ ID NO: 609591 - DNA, 58 bp, Artificial; identical to SEQ ID NO: 472121
  Synthetic oligonucleotide

SEQ ID NO: 609592 - DNA, 52 bp, Artificial; identical to SEQ ID NO: 472124
  Synthetic oligonucleotide

SEQ ID NO: 609593 - DNA, 59 bp, Artificial; identical to SEQ ID NO: 472126
  Synthetic oligonucleotide

SEQ ID NO: 609594 - DNA, 60 bp, Artificial; identical to SEQ ID NO: 472127
  Synthetic oligonucleotide

SEQ ID NO: 609595 - DNA, 60 bp, Artificial; identical to SEQ ID NO: 472131
  Synthetic oligonucleotide

SEQ ID NO: 609596 - DNA, 60 bp, Artificial; identical to SEQ ID NO: 10429
  Synthetic oligonucleotide

SEQ ID NO: 609597 - DNA, 60 bp, Artificial; identical to SEQ ID NO: 472132
  Synthetic oligonucleotide

SEQ ID NO: 609598 - DNA, 54 bp, Artificial; identical to SEQ ID NO: 472138
  Synthetic oligonucleotide

SEQ ID NO: 609599 - DNA, 60 bp, Artificial; identical to SEQ ID NO: 472141
  Synthetic oligonucleotide

SEQ ID NO: 609600 - DNA, 60 bp, Artificial; identical to SEQ ID NO: 472143
  Synthetic oligonucleotide

SEQ ID NO: 609601 - DNA, 55 bp, Artificial; identical to SEQ ID NO: 472144
  Synthetic oligonucleotide

SEQ ID NO: 609602 - DNA, 51 bp, Artificial; identical to SEQ ID NO: 472146
  Synthetic oligonucleotide

SEQ ID NO: 609603 - DNA, 55 bp, Artificial; identical to SEQ ID NO: 472147
  Synthetic oligonucleotide

SEQ ID NO: 609604 - DNA, 60 bp, Artificial; identical to SEQ ID NO: 472148
  Synthetic oligonucleotide

SEQ ID NO: 609605 - DNA, 55 bp, Artificial; identical to SEQ ID NO: 472150
  Synthetic oligonucleotide

SEQ ID NO: 609606 - DNA, 59 bp, Artificial; identical to SEQ ID NO: 472151
  Synthetic oligonucleotide

SEQ ID NO: 609607 - DNA, 52 bp, Artificial; identical to SEQ ID NO: 472154
  Synthetic oligonucleotide

SEQ ID NO: 609608 - DNA, 54 bp, Artificial; identical to SEQ ID NO: 472155
  Synthetic oligonucleotide

SEQ ID NO: 609609 - DNA, 60 bp, Artificial; identical to SEQ ID NO: 472156
  Synthetic oligonucleotide

SEQ ID NO: 609610 - DNA, 55 bp, Artificial; identical to SEQ ID NO: 472160
  Synthetic oligonucleotide

SEQ ID NO: 609611 - DNA, 60 bp, Artificial; identical to SEQ ID NO: 472162
  Synthetic oligonucleotide

SEQ ID NO: 609612 - DNA, 55 bp, Artificial; identical to SEQ ID NO: 472164
  Synthetic oligonucleotide

SEQ ID NO: 609613 - DNA, 58 bp, Artificial; identical to SEQ ID NO: 16841
  Synthetic oligonucleotide

SEQ ID NO: 609614 - DNA, 53 bp, Artificial; identical to SEQ ID NO: 472174
  Synthetic oligonucleotide

SEQ ID NO: 609615 - DNA, 60 bp, Artificial; identical to SEQ ID NO: 472176
  Synthetic oligonucleotide

SEQ ID NO: 609616 - DNA, 53 bp, Artificial; identical to SEQ ID NO: 472181
  Synthetic oligonucleotide

SEQ ID NO: 609617 - DNA, 60 bp, Artificial; identical to SEQ ID NO: 472182
  Synthetic oligonucleotide

SEQ ID NO: 609618 - DNA, 60 bp, Artificial; identical to SEQ ID NO: 472183
  Synthetic oligonucleotide

SEQ ID NO: 609619 - DNA, 60 bp, Artificial; identical to SEQ ID NO: 472187
  Synthetic oligonucleotide

SEQ ID NO: 609620 - DNA, 55 bp, Artificial; identical to SEQ ID NO: 472190
  Synthetic oligonucleotide

SEQ ID NO: 609621 - DNA, 52 bp, Artificial; identical to SEQ ID NO: 6176
  Synthetic oligonucleotide

SEQ ID NO: 609622 - DNA, 52 bp, Artificial; identical to SEQ ID NO: 472196
  Synthetic oligonucleotide

SEQ ID NO: 609623 - DNA, 55 bp, Artificial; identical to SEQ ID NO: 472212
  Synthetic oligonucleotide

SEQ ID NO: 609624 - DNA, 60 bp, Artificial; identical to SEQ ID NO: 472216
  Synthetic oligonucleotide

SEQ ID NO: 609625 - DNA, 56 bp, Artificial; identical to SEQ ID NO: 472219
  Synthetic oligonucleotide

SEQ ID NO: 609626 - DNA, 57 bp, Artificial; identical to SEQ ID NO: 472229
  Synthetic oligonucleotide

SEQ ID NO: 609627 - DNA, 58 bp, Artificial; identical to SEQ ID NO: 472232
  Synthetic oligonucleotide

SEQ ID NO: 609628 - DNA, 52 bp, Artificial; identical to SEQ ID NO: 472233
  Synthetic oligonucleotide

SEQ ID NO: 609629 - DNA, 54 bp, Artificial; identical to SEQ ID NO: 472234
  Synthetic oligonucleotide

SEQ ID NO: 609630 - DNA, 58 bp, Artificial; identical to SEQ ID NO: 16825
  Synthetic oligonucleotide

SEQ ID NO: 609631 - DNA, 55 bp, Artificial; identical to SEQ ID NO: 472235
  Synthetic oligonucleotide

SEQ ID NO: 609632 - DNA, 60 bp, Artificial; identical to SEQ ID NO: 472238
  Synthetic oligonucleotide

SEQ ID NO: 609633 - DNA, 60 bp, Artificial; identical to SEQ ID NO: 472239
  Synthetic oligonucleotide

SEQ ID NO: 609634 - DNA, 60 bp, Artificial; identical to SEQ ID NO: 472240
  Synthetic oligonucleotide

SEQ ID NO: 609635 - DNA, 56 bp, Artificial; identical to SEQ ID NO: 472242
  Synthetic oligonucleotide

SEQ ID NO: 609636 - DNA, 60 bp, Artificial; identical to SEQ ID NO: 472243
  Synthetic oligonucleotide

SEQ ID NO: 609637 - DNA, 60 bp, Artificial; identical to SEQ ID NO: 472244
  Synthetic oligonucleotide

SEQ ID NO: 609638 - DNA, 60 bp, Artificial; identical to SEQ ID NO: 472245
  Synthetic oligonucleotide

SEQ ID NO: 609639 - DNA, 55 bp, Artificial; identical to SEQ ID NO: 472246
  Synthetic oligonucleotide

SEQ ID NO: 609640 - DNA, 54 bp, Artificial; identical to SEQ ID NO: 472248
  Synthetic oligonucleotide

SEQ ID NO: 609641 - DNA, 59 bp, Artificial; identical to SEQ ID NO: 472249
  Synthetic oligonucleotide

SEQ ID NO: 609642 - DNA, 60 bp, Artificial; identical to SEQ ID NO: 472253
  Synthetic oligonucleotide

SEQ ID NO: 609643 - DNA, 54 bp, Artificial; identical to SEQ ID NO: 472258
  Synthetic oligonucleotide

SEQ ID NO: 609644 - DNA, 58 bp, Artificial; identical to SEQ ID NO: 472260
  Synthetic oligonucleotide

SEQ ID NO: 609645 - DNA, 51 bp, Artificial; identical to SEQ ID NO: 472261
  Synthetic oligonucleotide

SEQ ID NO: 609646 - DNA, 58 bp, Artificial; identical to SEQ ID NO: 472263
  Synthetic oligonucleotide

SEQ ID NO: 609647 - DNA, 53 bp, Artificial; identical to SEQ ID NO: 472266
  Synthetic oligonucleotide

SEQ ID NO: 609648 - DNA, 56 bp, Artificial; identical to SEQ ID NO: 472268
  Synthetic oligonucleotide

SEQ ID NO: 609649 - DNA, 55 bp, Artificial; identical to SEQ ID NO: 472269
  Synthetic oligonucleotide

SEQ ID NO: 609650 - DNA, 56 bp, Artificial; identical to SEQ ID NO: 472271
  Synthetic oligonucleotide

SEQ ID NO: 609651 - DNA, 60 bp, Artificial; identical to SEQ ID NO: 472272
  Synthetic oligonucleotide

SEQ ID NO: 609652 - DNA, 60 bp, Artificial; identical to SEQ ID NO: 472273
  Synthetic oligonucleotide

SEQ ID NO: 609653 - DNA, 60 bp, Artificial; identical to SEQ ID NO: 472275
  Synthetic oligonucleotide

SEQ ID NO: 609654 - DNA, 60 bp, Artificial; identical to SEQ ID NO: 472277
  Synthetic oligonucleotide

SEQ ID NO: 609655 - DNA, 58 bp, Artificial; identical to SEQ ID NO: 472279
  Synthetic oligonucleotide

SEQ ID NO: 609656 - DNA, 60 bp, Artificial; identical to SEQ ID NO: 12024
  Synthetic oligonucleotide

SEQ ID NO: 609657 - DNA, 60 bp, Artificial; identical to SEQ ID NO: 472280
  Synthetic oligonucleotide

SEQ ID NO: 609658 - DNA, 60 bp, Artificial; identical to SEQ ID NO: 472283
  Synthetic oligonucleotide

SEQ ID NO: 609659 - DNA, 57 bp, Artificial; identical to SEQ ID NO: 472284
  Synthetic oligonucleotide

SEQ ID NO: 609660 - DNA, 60 bp, Artificial; identical to SEQ ID NO: 472287
  Synthetic oligonucleotide

SEQ ID NO: 609661 - DNA, 56 bp, Artificial; identical to SEQ ID NO: 472288
  Synthetic oligonucleotide

SEQ ID NO: 609662 - DNA, 56 bp, Artificial; identical to SEQ ID NO: 472295
  Synthetic oligonucleotide

SEQ ID NO: 609663 - DNA, 53 bp, Artificial; identical to SEQ ID NO: 472300
  Synthetic oligonucleotide

SEQ ID NO: 609664 - DNA, 59 bp, Artificial; identical to SEQ ID NO: 472303
  Synthetic oligonucleotide

SEQ ID NO: 609665 - DNA, 59 bp, Artificial; identical to SEQ ID NO: 472304
  Synthetic oligonucleotide

SEQ ID NO: 609666 - DNA, 51 bp, Artificial; identical to SEQ ID NO: 472308
  Synthetic oligonucleotide

SEQ ID NO: 609667 - DNA, 55 bp, Artificial; identical to SEQ ID NO: 472309
  Synthetic oligonucleotide

SEQ ID NO: 609668 - DNA, 60 bp, Artificial; identical to SEQ ID NO: 472310
  Synthetic oligonucleotide

SEQ ID NO: 609669 - DNA, 60 bp, Artificial; identical to SEQ ID NO: 472317
  Synthetic oligonucleotide

SEQ ID NO: 609670 - DNA, 55 bp, Artificial; identical to SEQ ID NO: 472319
  Synthetic oligonucleotide

SEQ ID NO: 609671 - DNA, 53 bp, Artificial; identical to SEQ ID NO: 472321
  Synthetic oligonucleotide

SEQ ID NO: 609672 - DNA, 53 bp, Artificial; identical to SEQ ID NO: 472322
  Synthetic oligonucleotide

SEQ ID NO: 609673 - DNA, 54 bp, Artificial; identical to SEQ ID NO: 472324
  Synthetic oligonucleotide

SEQ ID NO: 609674 - DNA, 52 bp, Artificial; identical to SEQ ID NO: 472326
  Synthetic oligonucleotide

SEQ ID NO: 609675 - DNA, 60 bp, Artificial; identical to SEQ ID NO: 472328
  Synthetic oligonucleotide

SEQ ID NO: 609676 - DNA, 55 bp, Artificial; identical to SEQ ID NO: 472329
  Synthetic oligonucleotide

SEQ ID NO: 609677 - DNA, 55 bp, Artificial; identical to SEQ ID NO: 472335
  Synthetic oligonucleotide

SEQ ID NO: 609678 - DNA, 60 bp, Artificial; identical to SEQ ID NO: 472337
  Synthetic oligonucleotide

SEQ ID NO: 609679 - DNA, 53 bp, Artificial; identical to SEQ ID NO: 17679
  Synthetic oligonucleotide

SEQ ID NO: 609680 - DNA, 59 bp, Artificial; identical to SEQ ID NO: 472341
  Synthetic oligonucleotide

SEQ ID NO: 609681 - DNA, 59 bp, Artificial; identical to SEQ ID NO: 472342
  Synthetic oligonucleotide

SEQ ID NO: 609682 - DNA, 60 bp, Artificial; identical to SEQ ID NO: 472343
  Synthetic oligonucleotide

SEQ ID NO: 609683 - DNA, 60 bp, Artificial; identical to SEQ ID NO: 472344
  Synthetic oligonucleotide

SEQ ID NO: 609684 - DNA, 59 bp, Artificial; identical to SEQ ID NO: 472349
  Synthetic oligonucleotide

SEQ ID NO: 609685 - DNA, 55 bp, Artificial; identical to SEQ ID NO: 472350
  Synthetic oligonucleotide

SEQ ID NO: 609686 - DNA, 60 bp, Artificial; identical to SEQ ID NO: 472353
  Synthetic oligonucleotide

SEQ ID NO: 609687 - DNA, 60 bp, Artificial; identical to SEQ ID NO: 472354
  Synthetic oligonucleotide

SEQ ID NO: 609688 - DNA, 60 bp, Artificial; identical to SEQ ID NO: 472357
  Synthetic oligonucleotide

SEQ ID NO: 609689 - DNA, 53 bp, Artificial; identical to SEQ ID NO: 472359
  Synthetic oligonucleotide

SEQ ID NO: 609690 - DNA, 60 bp, Artificial; identical to SEQ ID NO: 472360
  Synthetic oligonucleotide

SEQ ID NO: 609691 - DNA, 58 bp, Artificial; identical to SEQ ID NO: 472361
  Synthetic oligonucleotide

SEQ ID NO: 609692 - DNA, 55 bp, Artificial; identical to SEQ ID NO: 472364
  Synthetic oligonucleotide

SEQ ID NO: 609693 - DNA, 60 bp, Artificial; identical to SEQ ID NO: 472365
  Synthetic oligonucleotide

SEQ ID NO: 609694 - DNA, 60 bp, Artificial; identical to SEQ ID NO: 472366
  Synthetic oligonucleotide

SEQ ID NO: 609695 - DNA, 55 bp, Artificial; identical to SEQ ID NO: 472367
  Synthetic oligonucleotide

SEQ ID NO: 609696 - DNA, 56 bp, Artificial; identical to SEQ ID NO: 472369
  Synthetic oligonucleotide

SEQ ID NO: 609697 - DNA, 60 bp, Artificial; identical to SEQ ID NO: 472370
  Synthetic oligonucleotide

SEQ ID NO: 609698 - DNA, 60 bp, Artificial; identical to SEQ ID NO: 472372
  Synthetic oligonucleotide

SEQ ID NO: 609699 - DNA, 53 bp, Artificial; identical to SEQ ID NO: 472373
  Synthetic oligonucleotide

SEQ ID NO: 609700 - DNA, 60 bp, Artificial; identical to SEQ ID NO: 472374
  Synthetic oligonucleotide

SEQ ID NO: 609701 - DNA, 55 bp, Artificial; identical to SEQ ID NO: 15883
  Synthetic oligonucleotide

SEQ ID NO: 609702 - DNA, 60 bp, Artificial; identical to SEQ ID NO: 472375
  Synthetic oligonucleotide

SEQ ID NO: 609703 - DNA, 60 bp, Artificial; identical to SEQ ID NO: 472378
  Synthetic oligonucleotide

SEQ ID NO: 609704 - DNA, 55 bp, Artificial; identical to SEQ ID NO: 472380
  Synthetic oligonucleotide

SEQ ID NO: 609705 - DNA, 59 bp, Artificial; identical to SEQ ID NO: 472384
  Synthetic oligonucleotide

SEQ ID NO: 609706 - DNA, 55 bp, Artificial; identical to SEQ ID NO: 472385
  Synthetic oligonucleotide

SEQ ID NO: 609707 - DNA, 60 bp, Artificial; identical to SEQ ID NO: 472386
  Synthetic oligonucleotide

SEQ ID NO: 609708 - DNA, 56 bp, Artificial; identical to SEQ ID NO: 472389
  Synthetic oligonucleotide

SEQ ID NO: 609709 - DNA, 59 bp, Artificial; identical to SEQ ID NO: 472390
  Synthetic oligonucleotide

SEQ ID NO: 609710 - DNA, 60 bp, Artificial; identical to SEQ ID NO: 472392
  Synthetic oligonucleotide

SEQ ID NO: 609711 - DNA, 51 bp, Artificial; identical to SEQ ID NO: 472396
  Synthetic oligonucleotide

SEQ ID NO: 609712 - DNA, 60 bp, Artificial; identical to SEQ ID NO: 472397
  Synthetic oligonucleotide

SEQ ID NO: 609713 - DNA, 60 bp, Artificial; identical to SEQ ID NO: 472399
  Synthetic oligonucleotide

SEQ ID NO: 609714 - DNA, 53 bp, Artificial; identical to SEQ ID NO: 472404
  Synthetic oligonucleotide

SEQ ID NO: 609715 - DNA, 60 bp, Artificial; identical to SEQ ID NO: 472406
  Synthetic oligonucleotide

SEQ ID NO: 609716 - DNA, 59 bp, Artificial; identical to SEQ ID NO: 472407
  Synthetic oligonucleotide

SEQ ID NO: 609717 - DNA, 60 bp, Artificial; identical to SEQ ID NO: 52048
  Synthetic oligonucleotide

SEQ ID NO: 609718 - DNA, 59 bp, Artificial; identical to SEQ ID NO: 472410
  Synthetic oligonucleotide

SEQ ID NO: 609719 - DNA, 56 bp, Artificial; identical to SEQ ID NO: 17946
  Synthetic oligonucleotide

SEQ ID NO: 609720 - DNA, 56 bp, Artificial; identical to SEQ ID NO: 472414
  Synthetic oligonucleotide

SEQ ID NO: 609721 - DNA, 55 bp, Artificial; identical to SEQ ID NO: 472418
  Synthetic oligonucleotide

SEQ ID NO: 609722 - DNA, 59 bp, Artificial; identical to SEQ ID NO: 472419
  Synthetic oligonucleotide

SEQ ID NO: 609723 - DNA, 58 bp, Artificial; identical to SEQ ID NO: 472420
  Synthetic oligonucleotide

SEQ ID NO: 609724 - DNA, 55 bp, Artificial; identical to SEQ ID NO: 472421
  Synthetic oligonucleotide

SEQ ID NO: 609725 - DNA, 54 bp, Artificial; identical to SEQ ID NO: 472422
  Synthetic oligonucleotide

SEQ ID NO: 609726 - DNA, 60 bp, Artificial; identical to SEQ ID NO: 472423
  Synthetic oligonucleotide

SEQ ID NO: 609727 - DNA, 55 bp, Artificial; identical to SEQ ID NO: 472426
  Synthetic oligonucleotide

SEQ ID NO: 609728 - DNA, 60 bp, Artificial; identical to SEQ ID NO: 472427
  Synthetic oligonucleotide

SEQ ID NO: 609729 - DNA, 50 bp, Artificial; identical to SEQ ID NO: 472428
  Synthetic oligonucleotide

SEQ ID NO: 609730 - DNA, 50 bp, Artificial; identical to SEQ ID NO: 472430
  Synthetic oligonucleotide

SEQ ID NO: 609731 - DNA, 55 bp, Artificial; identical to SEQ ID NO: 472431
  Synthetic oligonucleotide

SEQ ID NO: 609732 - DNA, 60 bp, Artificial; identical to SEQ ID NO: 472432
  Synthetic oligonucleotide

SEQ ID NO: 609733 - DNA, 58 bp, Artificial; identical to SEQ ID NO: 472438
  Synthetic oligonucleotide

SEQ ID NO: 609734 - DNA, 58 bp, Artificial; identical to SEQ ID NO: 472439
  Synthetic oligonucleotide

SEQ ID NO: 609735 - DNA, 59 bp, Artificial; identical to SEQ ID NO: 472440
  Synthetic oligonucleotide

SEQ ID NO: 609736 - DNA, 59 bp, Artificial; identical to SEQ ID NO: 17029
  Synthetic oligonucleotide

SEQ ID NO: 609737 - DNA, 60 bp, Artificial; identical to SEQ ID NO: 472444
  Synthetic oligonucleotide

SEQ ID NO: 609738 - DNA, 58 bp, Artificial; identical to SEQ ID NO: 472446
  Synthetic oligonucleotide

SEQ ID NO: 609739 - DNA, 56 bp, Artificial; identical to SEQ ID NO: 472447
  Synthetic oligonucleotide

SEQ ID NO: 609740 - DNA, 51 bp, Artificial; identical to SEQ ID NO: 472448
  Synthetic oligonucleotide

SEQ ID NO: 609741 - DNA, 57 bp, Artificial; identical to SEQ ID NO: 17984
  Synthetic oligonucleotide

SEQ ID NO: 609742 - DNA, 55 bp, Artificial; identical to SEQ ID NO: 472449
  Synthetic oligonucleotide

SEQ ID NO: 609743 - DNA, 54 bp, Artificial; identical to SEQ ID NO: 472450
  Synthetic oligonucleotide

SEQ ID NO: 609744 - DNA, 59 bp, Artificial; identical to SEQ ID NO: 472452
  Synthetic oligonucleotide

SEQ ID NO: 609745 - DNA, 60 bp, Artificial; identical to SEQ ID NO: 472453
  Synthetic oligonucleotide

SEQ ID NO: 609746 - DNA, 52 bp, Artificial; identical to SEQ ID NO: 472458
  Synthetic oligonucleotide

SEQ ID NO: 609747 - DNA, 56 bp, Artificial; identical to SEQ ID NO: 472464
  Synthetic oligonucleotide

SEQ ID NO: 609748 - DNA, 58 bp, Artificial; identical to SEQ ID NO: 472466
  Synthetic oligonucleotide

SEQ ID NO: 609749 - DNA, 52 bp, Artificial; identical to SEQ ID NO: 472467
  Synthetic oligonucleotide

SEQ ID NO: 609750 - DNA, 60 bp, Artificial; identical to SEQ ID NO: 472473
  Synthetic oligonucleotide

SEQ ID NO: 609751 - DNA, 59 bp, Artificial; identical to SEQ ID NO: 472474
  Synthetic oligonucleotide

SEQ ID NO: 609752 - DNA, 55 bp, Artificial; identical to SEQ ID NO: 472476
  Synthetic oligonucleotide

SEQ ID NO: 609753 - DNA, 54 bp, Artificial; identical to SEQ ID NO: 19179
  Synthetic oligonucleotide

SEQ ID NO: 609754 - DNA, 53 bp, Artificial; identical to SEQ ID NO: 472480
  Synthetic oligonucleotide

SEQ ID NO: 609755 - DNA, 60 bp, Artificial; identical to SEQ ID NO: 472481
  Synthetic oligonucleotide

SEQ ID NO: 609756 - DNA, 55 bp, Artificial; identical to SEQ ID NO: 472482
  Synthetic oligonucleotide

SEQ ID NO: 609757 - DNA, 55 bp, Artificial; identical to SEQ ID NO: 472487
  Synthetic oligonucleotide

SEQ ID NO: 609758 - DNA, 60 bp, Artificial; identical to SEQ ID NO: 472488
  Synthetic oligonucleotide

SEQ ID NO: 609759 - DNA, 54 bp, Artificial; identical to SEQ ID NO: 472490
  Synthetic oligonucleotide

SEQ ID NO: 609760 - DNA, 52 bp, Artificial; identical to SEQ ID NO: 472491
  Synthetic oligonucleotide

SEQ ID NO: 609761 - DNA, 59 bp, Artificial; identical to SEQ ID NO: 472492
  Synthetic oligonucleotide

SEQ ID NO: 609762 - DNA, 59 bp, Artificial; identical to SEQ ID NO: 472495
  Synthetic oligonucleotide

SEQ ID NO: 609763 - DNA, 54 bp, Artificial; identical to SEQ ID NO: 472497
  Synthetic oligonucleotide

SEQ ID NO: 609764 - DNA, 55 bp, Artificial; identical to SEQ ID NO: 472500
  Synthetic oligonucleotide

SEQ ID NO: 609765 - DNA, 50 bp, Artificial; identical to SEQ ID NO: 472502
  Synthetic oligonucleotide

SEQ ID NO: 609766 - DNA, 56 bp, Artificial; identical to SEQ ID NO: 472503
  Synthetic oligonucleotide

SEQ ID NO: 609767 - DNA, 55 bp, Artificial; identical to SEQ ID NO: 472504
  Synthetic oligonucleotide

SEQ ID NO: 609768 - DNA, 58 bp, Artificial; identical to SEQ ID NO: 472505
  Synthetic oligonucleotide

SEQ ID NO: 609769 - DNA, 60 bp, Artificial; identical to SEQ ID NO: 472506
  Synthetic oligonucleotide

SEQ ID NO: 609770 - DNA, 55 bp, Artificial; identical to SEQ ID NO: 472507
  Synthetic oligonucleotide

SEQ ID NO: 609771 - DNA, 50 bp, Artificial; identical to SEQ ID NO: 472509
  Synthetic oligonucleotide

SEQ ID NO: 609772 - DNA, 60 bp, Artificial; identical to SEQ ID NO: 472512
  Synthetic oligonucleotide

SEQ ID NO: 609773 - DNA, 60 bp, Artificial; identical to SEQ ID NO: 472514
  Synthetic oligonucleotide

SEQ ID NO: 609774 - DNA, 54 bp, Artificial; identical to SEQ ID NO: 472517
  Synthetic oligonucleotide

SEQ ID NO: 609775 - DNA, 56 bp, Artificial; identical to SEQ ID NO: 472521
  Synthetic oligonucleotide

SEQ ID NO: 609776 - DNA, 58 bp, Artificial; identical to SEQ ID NO: 472522
  Synthetic oligonucleotide

SEQ ID NO: 609777 - DNA, 55 bp, Artificial; identical to SEQ ID NO: 472526
  Synthetic oligonucleotide

SEQ ID NO: 609778 - DNA, 54 bp, Artificial; identical to SEQ ID NO: 472531
  Synthetic oligonucleotide

SEQ ID NO: 609779 - DNA, 60 bp, Artificial; identical to SEQ ID NO: 472532
  Synthetic oligonucleotide

SEQ ID NO: 609780 - DNA, 60 bp, Artificial; identical to SEQ ID NO: 9220
  Synthetic oligonucleotide

SEQ ID NO: 609781 - DNA, 57 bp, Artificial; identical to SEQ ID NO: 472542
  Synthetic oligonucleotide

SEQ ID NO: 609782 - DNA, 55 bp, Artificial; identical to SEQ ID NO: 472543
  Synthetic oligonucleotide

SEQ ID NO: 609783 - DNA, 60 bp, Artificial; identical to SEQ ID NO: 472544
  Synthetic oligonucleotide

SEQ ID NO: 609784 - DNA, 60 bp, Artificial; identical to SEQ ID NO: 472545
  Synthetic oligonucleotide

SEQ ID NO: 609785 - DNA, 58 bp, Artificial; identical to SEQ ID NO: 472546
  Synthetic oligonucleotide

SEQ ID NO: 609786 - DNA, 58 bp, Artificial; identical to SEQ ID NO: 472548
  Synthetic oligonucleotide

SEQ ID NO: 609787 - DNA, 52 bp, Artificial; identical to SEQ ID NO: 472549
  Synthetic oligonucleotide

SEQ ID NO: 609788 - DNA, 59 bp, Artificial; identical to SEQ ID NO: 472550
  Synthetic oligonucleotide

SEQ ID NO: 609789 - DNA, 54 bp, Artificial; identical to SEQ ID NO: 472551
  Synthetic oligonucleotide

SEQ ID NO: 609790 - DNA, 60 bp, Artificial; identical to SEQ ID NO: 472557
  Synthetic oligonucleotide

SEQ ID NO: 609791 - DNA, 55 bp, Artificial; identical to SEQ ID NO: 472558
  Synthetic oligonucleotide

SEQ ID NO: 609792 - DNA, 60 bp, Artificial; identical to SEQ ID NO: 472564
  Synthetic oligonucleotide

SEQ ID NO: 609793 - DNA, 53 bp, Artificial; identical to SEQ ID NO: 472566
  Synthetic oligonucleotide

SEQ ID NO: 609794 - DNA, 57 bp, Artificial; identical to SEQ ID NO: 472569
  Synthetic oligonucleotide

SEQ ID NO: 609795 - DNA, 60 bp, Artificial; identical to SEQ ID NO: 472570
  Synthetic oligonucleotide

SEQ ID NO: 609796 - DNA, 60 bp, Artificial; identical to SEQ ID NO: 472571
  Synthetic oligonucleotide

SEQ ID NO: 609797 - DNA, 60 bp, Artificial; identical to SEQ ID NO: 472573
  Synthetic oligonucleotide

SEQ ID NO: 609798 - DNA, 59 bp, Artificial; identical to SEQ ID NO: 472574
  Synthetic oligonucleotide

SEQ ID NO: 609799 - DNA, 54 bp, Artificial; identical to SEQ ID NO: 472575
  Synthetic oligonucleotide

SEQ ID NO: 609800 - DNA, 56 bp, Artificial; identical to SEQ ID NO: 472579
  Synthetic oligonucleotide

SEQ ID NO: 609801 - DNA, 54 bp, Artificial; identical to SEQ ID NO: 472583
  Synthetic oligonucleotide

SEQ ID NO: 609802 - DNA, 55 bp, Artificial; identical to SEQ ID NO: 472584
  Synthetic oligonucleotide

SEQ ID NO: 609803 - DNA, 55 bp, Artificial; identical to SEQ ID NO: 472585
  Synthetic oligonucleotide

SEQ ID NO: 609804 - DNA, 51 bp, Artificial; identical to SEQ ID NO: 472586
  Synthetic oligonucleotide

SEQ ID NO: 609805 - DNA, 60 bp, Artificial; identical to SEQ ID NO: 472587
  Synthetic oligonucleotide

SEQ ID NO: 609806 - DNA, 60 bp, Artificial; identical to SEQ ID NO: 472588
  Synthetic oligonucleotide

SEQ ID NO: 609807 - DNA, 59 bp, Artificial; identical to SEQ ID NO: 19260
  Synthetic oligonucleotide

SEQ ID NO: 609808 - DNA, 51 bp, Artificial; identical to SEQ ID NO: 472591
  Synthetic oligonucleotide

SEQ ID NO: 609809 - DNA, 60 bp, Artificial; identical to SEQ ID NO: 472594
  Synthetic oligonucleotide

SEQ ID NO: 609810 - DNA, 60 bp, Artificial; identical to SEQ ID NO: 472596
  Synthetic oligonucleotide

SEQ ID NO: 609811 - DNA, 59 bp, Artificial; identical to SEQ ID NO: 472597
  Synthetic oligonucleotide

SEQ ID NO: 609812 - DNA, 54 bp, Artificial; identical to SEQ ID NO: 472598
  Synthetic oligonucleotide

SEQ ID NO: 609813 - DNA, 54 bp, Artificial; identical to SEQ ID NO: 472599
  Synthetic oligonucleotide

SEQ ID NO: 609814 - DNA, 54 bp, Artificial; identical to SEQ ID NO: 472600
  Synthetic oligonucleotide

SEQ ID NO: 609815 - DNA, 55 bp, Artificial; identical to SEQ ID NO: 472601
  Synthetic oligonucleotide

SEQ ID NO: 609816 - DNA, 52 bp, Artificial; identical to SEQ ID NO: 18753
  Synthetic oligonucleotide

SEQ ID NO: 609817 - DNA, 53 bp, Artificial; identical to SEQ ID NO: 472604
  Synthetic oligonucleotide

SEQ ID NO: 609818 - DNA, 60 bp, Artificial; identical to SEQ ID NO: 6607
  Synthetic oligonucleotide

SEQ ID NO: 609819 - DNA, 55 bp, Artificial; identical to SEQ ID NO: 472619
  Synthetic oligonucleotide

SEQ ID NO: 609820 - DNA, 55 bp, Artificial; identical to SEQ ID NO: 472620
  Synthetic oligonucleotide

SEQ ID NO: 609821 - DNA, 60 bp, Artificial; identical to SEQ ID NO: 472623
  Synthetic oligonucleotide

SEQ ID NO: 609822 - DNA, 57 bp, Artificial; identical to SEQ ID NO: 18978
  Synthetic oligonucleotide

SEQ ID NO: 609823 - DNA, 55 bp, Artificial; identical to SEQ ID NO: 472627
  Synthetic oligonucleotide

SEQ ID NO: 609824 - DNA, 56 bp, Artificial; identical to SEQ ID NO: 472628
  Synthetic oligonucleotide

SEQ ID NO: 609825 - DNA, 53 bp, Artificial; identical to SEQ ID NO: 472633
  Synthetic oligonucleotide

SEQ ID NO: 609826 - DNA, 60 bp, Artificial; identical to SEQ ID NO: 14107
  Synthetic oligonucleotide

SEQ ID NO: 609827 - DNA, 55 bp, Artificial; identical to SEQ ID NO: 472639
  Synthetic oligonucleotide

SEQ ID NO: 609828 - DNA, 58 bp, Artificial; identical to SEQ ID NO: 472647
  Synthetic oligonucleotide

SEQ ID NO: 609829 - DNA, 59 bp, Artificial; identical to SEQ ID NO: 472648
  Synthetic oligonucleotide

SEQ ID NO: 609830 - DNA, 55 bp, Artificial; identical to SEQ ID NO: 472651
  Synthetic oligonucleotide

SEQ ID NO: 609831 - DNA, 53 bp, Artificial; identical to SEQ ID NO: 472653
  Synthetic oligonucleotide

SEQ ID NO: 609832 - DNA, 58 bp, Artificial; identical to SEQ ID NO: 472655
  Synthetic oligonucleotide

SEQ ID NO: 609833 - DNA, 55 bp, Artificial; identical to SEQ ID NO: 472656
  Synthetic oligonucleotide

SEQ ID NO: 609834 - DNA, 53 bp, Artificial; identical to SEQ ID NO: 472660
  Synthetic oligonucleotide

SEQ ID NO: 609835 - DNA, 50 bp, Artificial; identical to SEQ ID NO: 472663
  Synthetic oligonucleotide

SEQ ID NO: 609836 - DNA, 50 bp, Artificial; identical to SEQ ID NO: 472664
  Synthetic oligonucleotide

SEQ ID NO: 609837 - DNA, 53 bp, Artificial; identical to SEQ ID NO: 472669
  Synthetic oligonucleotide

SEQ ID NO: 609838 - DNA, 55 bp, Artificial; identical to SEQ ID NO: 472672
  Synthetic oligonucleotide

SEQ ID NO: 609839 - DNA, 60 bp, Artificial; identical to SEQ ID NO: 472677
  Synthetic oligonucleotide

SEQ ID NO: 609840 - DNA, 59 bp, Artificial; identical to SEQ ID NO: 472683
  Synthetic oligonucleotide

SEQ ID NO: 609841 - DNA, 57 bp, Artificial; identical to SEQ ID NO: 472685
  Synthetic oligonucleotide

SEQ ID NO: 609842 - DNA, 59 bp, Artificial; identical to SEQ ID NO: 472689
  Synthetic oligonucleotide

SEQ ID NO: 609843 - DNA, 52 bp, Artificial; identical to SEQ ID NO: 472690
  Synthetic oligonucleotide

SEQ ID NO: 609844 - DNA, 57 bp, Artificial; identical to SEQ ID NO: 18265
  Synthetic oligonucleotide

SEQ ID NO: 609845 - DNA, 55 bp, Artificial; identical to SEQ ID NO: 472702
  Synthetic oligonucleotide

SEQ ID NO: 609846 - DNA, 52 bp, Artificial; identical to SEQ ID NO: 472703
  Synthetic oligonucleotide

SEQ ID NO: 609847 - DNA, 60 bp, Artificial; identical to SEQ ID NO: 472707
  Synthetic oligonucleotide

SEQ ID NO: 609848 - DNA, 57 bp, Artificial; identical to SEQ ID NO: 19077
  Synthetic oligonucleotide

SEQ ID NO: 609849 - DNA, 54 bp, Artificial; identical to SEQ ID NO: 472715
  Synthetic oligonucleotide

SEQ ID NO: 609850 - DNA, 60 bp, Artificial; identical to SEQ ID NO: 472716
  Synthetic oligonucleotide

SEQ ID NO: 609851 - DNA, 60 bp, Artificial; identical to SEQ ID NO: 472718
  Synthetic oligonucleotide

SEQ ID NO: 609852 - DNA, 60 bp, Artificial; identical to SEQ ID NO: 472724
  Synthetic oligonucleotide

SEQ ID NO: 609853 - DNA, 55 bp, Artificial; identical to SEQ ID NO: 472730
  Synthetic oligonucleotide

SEQ ID NO: 609854 - DNA, 60 bp, Artificial; identical to SEQ ID NO: 472733
  Synthetic oligonucleotide

SEQ ID NO: 609855 - DNA, 53 bp, Artificial; identical to SEQ ID NO: 472738
  Synthetic oligonucleotide

SEQ ID NO: 609856 - DNA, 52 bp, Artificial; identical to SEQ ID NO: 472739
  Synthetic oligonucleotide

SEQ ID NO: 609857 - DNA, 60 bp, Artificial; identical to SEQ ID NO: 472740
  Synthetic oligonucleotide

SEQ ID NO: 609858 - DNA, 60 bp, Artificial; identical to SEQ ID NO: 472742
  Synthetic oligonucleotide

SEQ ID NO: 609859 - DNA, 60 bp, Artificial; identical to SEQ ID NO: 472743
  Synthetic oligonucleotide

SEQ ID NO: 609860 - DNA, 60 bp, Artificial; identical to SEQ ID NO: 472744
  Synthetic oligonucleotide

SEQ ID NO: 609861 - DNA, 50 bp, Artificial; identical to SEQ ID NO: 472747
  Synthetic oligonucleotide

SEQ ID NO: 609862 - DNA, 60 bp, Artificial; identical to SEQ ID NO: 472752
  Synthetic oligonucleotide

SEQ ID NO: 609863 - DNA, 56 bp, Artificial; identical to SEQ ID NO: 11518
  Synthetic oligonucleotide

SEQ ID NO: 609864 - DNA, 57 bp, Artificial; identical to SEQ ID NO: 472758
  Synthetic oligonucleotide

SEQ ID NO: 609865 - DNA, 51 bp, Artificial; identical to SEQ ID NO: 472763
  Synthetic oligonucleotide

SEQ ID NO: 609866 - DNA, 57 bp, Artificial; identical to SEQ ID NO: 472764
  Synthetic oligonucleotide

SEQ ID NO: 609867 - DNA, 59 bp, Artificial; identical to SEQ ID NO: 472767
  Synthetic oligonucleotide

SEQ ID NO: 609868 - DNA, 60 bp, Artificial; identical to SEQ ID NO: 13539
  Synthetic oligonucleotide

SEQ ID NO: 609869 - DNA, 56 bp, Artificial; identical to SEQ ID NO: 472769
  Synthetic oligonucleotide

SEQ ID NO: 609870 - DNA, 60 bp, Artificial; identical to SEQ ID NO: 472770
  Synthetic oligonucleotide

SEQ ID NO: 609871 - DNA, 55 bp, Artificial; identical to SEQ ID NO: 472774
  Synthetic oligonucleotide

SEQ ID NO: 609872 - DNA, 51 bp, Artificial; identical to SEQ ID NO: 14639
  Synthetic oligonucleotide

SEQ ID NO: 609873 - DNA, 59 bp, Artificial; identical to SEQ ID NO: 472785
  Synthetic oligonucleotide

SEQ ID NO: 609874 - DNA, 60 bp, Artificial; identical to SEQ ID NO: 472788
  Synthetic oligonucleotide

SEQ ID NO: 609875 - DNA, 60 bp, Artificial; identical to SEQ ID NO: 472792
  Synthetic oligonucleotide

SEQ ID NO: 609876 - DNA, 55 bp, Artificial; identical to SEQ ID NO: 472795
  Synthetic oligonucleotide

SEQ ID NO: 609877 - DNA, 50 bp, Artificial; identical to SEQ ID NO: 472796
  Synthetic oligonucleotide

SEQ ID NO: 609878 - DNA, 60 bp, Artificial; identical to SEQ ID NO: 472797
  Synthetic oligonucleotide

SEQ ID NO: 609879 - DNA, 60 bp, Artificial; identical to SEQ ID NO: 472802
  Synthetic oligonucleotide

SEQ ID NO: 609880 - DNA, 60 bp, Artificial; identical to SEQ ID NO: 472803
  Synthetic oligonucleotide

SEQ ID NO: 609881 - DNA, 55 bp, Artificial; identical to SEQ ID NO: 472805
  Synthetic oligonucleotide

SEQ ID NO: 609882 - DNA, 60 bp, Artificial; identical to SEQ ID NO: 472807
  Synthetic oligonucleotide

SEQ ID NO: 609883 - DNA, 60 bp, Artificial; identical to SEQ ID NO: 472811
  Synthetic oligonucleotide

SEQ ID NO: 609884 - DNA, 55 bp, Artificial; identical to SEQ ID NO: 472814
  Synthetic oligonucleotide

SEQ ID NO: 609885 - DNA, 60 bp, Artificial; identical to SEQ ID NO: 472815
  Synthetic oligonucleotide

SEQ ID NO: 609886 - DNA, 60 bp, Artificial; identical to SEQ ID NO: 472816
  Synthetic oligonucleotide

SEQ ID NO: 609887 - DNA, 53 bp, Artificial; identical to SEQ ID NO: 472817
  Synthetic oligonucleotide

SEQ ID NO: 609888 - DNA, 58 bp, Artificial; identical to SEQ ID NO: 472818
  Synthetic oligonucleotide

SEQ ID NO: 609889 - DNA, 58 bp, Artificial; identical to SEQ ID NO: 472819
  Synthetic oligonucleotide

SEQ ID NO: 609890 - DNA, 56 bp, Artificial; identical to SEQ ID NO: 472820
  Synthetic oligonucleotide

SEQ ID NO: 609891 - DNA, 54 bp, Artificial; identical to SEQ ID NO: 472824
  Synthetic oligonucleotide

SEQ ID NO: 609892 - DNA, 56 bp, Artificial; identical to SEQ ID NO: 472828
  Synthetic oligonucleotide

SEQ ID NO: 609893 - DNA, 60 bp, Artificial; identical to SEQ ID NO: 472829
  Synthetic oligonucleotide

SEQ ID NO: 609894 - DNA, 51 bp, Artificial; identical to SEQ ID NO: 472831
  Synthetic oligonucleotide

SEQ ID NO: 609895 - DNA, 55 bp, Artificial; identical to SEQ ID NO: 7969
  Synthetic oligonucleotide

SEQ ID NO: 609896 - DNA, 56 bp, Artificial; identical to SEQ ID NO: 472836
  Synthetic oligonucleotide

SEQ ID NO: 609897 - DNA, 55 bp, Artificial; identical to SEQ ID NO: 472837
  Synthetic oligonucleotide

SEQ ID NO: 609898 - DNA, 60 bp, Artificial; identical to SEQ ID NO: 472838
  Synthetic oligonucleotide

SEQ ID NO: 609899 - DNA, 60 bp, Artificial; identical to SEQ ID NO: 472840
  Synthetic oligonucleotide

SEQ ID NO: 609900 - DNA, 55 bp, Artificial; identical to SEQ ID NO: 472841
  Synthetic oligonucleotide

SEQ ID NO: 609901 - DNA, 58 bp, Artificial; identical to SEQ ID NO: 6440
  Synthetic oligonucleotide

SEQ ID NO: 609902 - DNA, 60 bp, Artificial; identical to SEQ ID NO: 472842
  Synthetic oligonucleotide

SEQ ID NO: 609903 - DNA, 60 bp, Artificial; identical to SEQ ID NO: 472843
  Synthetic oligonucleotide

SEQ ID NO: 609904 - DNA, 58 bp, Artificial; identical to SEQ ID NO: 472846
  Synthetic oligonucleotide

SEQ ID NO: 609905 - DNA, 55 bp, Artificial; identical to SEQ ID NO: 472847
  Synthetic oligonucleotide

SEQ ID NO: 609906 - DNA, 60 bp, Artificial; identical to SEQ ID NO: 472848
  Synthetic oligonucleotide

SEQ ID NO: 609907 - DNA, 58 bp, Artificial; identical to SEQ ID NO: 472849
  Synthetic oligonucleotide

SEQ ID NO: 609908 - DNA, 60 bp, Artificial; identical to SEQ ID NO: 472852
  Synthetic oligonucleotide

SEQ ID NO: 609909 - DNA, 58 bp, Artificial; identical to SEQ ID NO: 472853
  Synthetic oligonucleotide

SEQ ID NO: 609910 - DNA, 60 bp, Artificial; identical to SEQ ID NO: 472854
  Synthetic oligonucleotide

SEQ ID NO: 609911 - DNA, 60 bp, Artificial; identical to SEQ ID NO: 472856
  Synthetic oligonucleotide

SEQ ID NO: 609912 - DNA, 60 bp, Artificial; identical to SEQ ID NO: 472857
  Synthetic oligonucleotide

SEQ ID NO: 609913 - DNA, 60 bp, Artificial; identical to SEQ ID NO: 472862
  Synthetic oligonucleotide

SEQ ID NO: 609914 - DNA, 60 bp, Artificial; identical to SEQ ID NO: 472865
  Synthetic oligonucleotide

SEQ ID NO: 609915 - DNA, 55 bp, Artificial; identical to SEQ ID NO: 472866
  Synthetic oligonucleotide

SEQ ID NO: 609916 - DNA, 60 bp, Artificial; identical to SEQ ID NO: 472868
  Synthetic oligonucleotide

SEQ ID NO: 609917 - DNA, 60 bp, Artificial; identical to SEQ ID NO: 472869
  Synthetic oligonucleotide

SEQ ID NO: 609918 - DNA, 58 bp, Artificial; identical to SEQ ID NO: 472870
  Synthetic oligonucleotide

SEQ ID NO: 609919 - DNA, 53 bp, Artificial; identical to SEQ ID NO: 472871
  Synthetic oligonucleotide

SEQ ID NO: 609920 - DNA, 59 bp, Artificial; identical to SEQ ID NO: 472872
  Synthetic oligonucleotide

SEQ ID NO: 609921 - DNA, 55 bp, Artificial; identical to SEQ ID NO: 472873
  Synthetic oligonucleotide

SEQ ID NO: 609922 - DNA, 60 bp, Artificial; identical to SEQ ID NO: 472877
  Synthetic oligonucleotide

SEQ ID NO: 609923 - DNA, 59 bp, Artificial; identical to SEQ ID NO: 472880
  Synthetic oligonucleotide

SEQ ID NO: 609924 - DNA, 59 bp, Artificial; identical to SEQ ID NO: 472883
  Synthetic oligonucleotide

SEQ ID NO: 609925 - DNA, 60 bp, Artificial; identical to SEQ ID NO: 472884
  Synthetic oligonucleotide

SEQ ID NO: 609926 - DNA, 52 bp, Artificial; identical to SEQ ID NO: 472887
  Synthetic oligonucleotide

SEQ ID NO: 609927 - DNA, 60 bp, Artificial; identical to SEQ ID NO: 472888
  Synthetic oligonucleotide

SEQ ID NO: 609928 - DNA, 58 bp, Artificial; identical to SEQ ID NO: 472889
  Synthetic oligonucleotide

SEQ ID NO: 609929 - DNA, 55 bp, Artificial; identical to SEQ ID NO: 472892
  Synthetic oligonucleotide

SEQ ID NO: 609930 - DNA, 58 bp, Artificial; identical to SEQ ID NO: 472894
  Synthetic oligonucleotide

SEQ ID NO: 609931 - DNA, 52 bp, Artificial; identical to SEQ ID NO: 472896
  Synthetic oligonucleotide

SEQ ID NO: 609932 - DNA, 55 bp, Artificial; identical to SEQ ID NO: 472900
  Synthetic oligonucleotide

SEQ ID NO: 609933 - DNA, 57 bp, Artificial; identical to SEQ ID NO: 472903
  Synthetic oligonucleotide

SEQ ID NO: 609934 - DNA, 58 bp, Artificial; identical to SEQ ID NO: 472905
  Synthetic oligonucleotide

SEQ ID NO: 609935 - DNA, 60 bp, Artificial; identical to SEQ ID NO: 472907
  Synthetic oligonucleotide

SEQ ID NO: 609936 - DNA, 52 bp, Artificial; identical to SEQ ID NO: 472908
  Synthetic oligonucleotide

SEQ ID NO: 609937 - DNA, 56 bp, Artificial; identical to SEQ ID NO: 472909
  Synthetic oligonucleotide

SEQ ID NO: 609938 - DNA, 54 bp, Artificial; identical to SEQ ID NO: 472910
  Synthetic oligonucleotide

SEQ ID NO: 609939 - DNA, 56 bp, Artificial; identical to SEQ ID NO: 472911
  Synthetic oligonucleotide

SEQ ID NO: 609940 - DNA, 53 bp, Artificial; identical to SEQ ID NO: 472912
  Synthetic oligonucleotide

SEQ ID NO: 609941 - DNA, 53 bp, Artificial; identical to SEQ ID NO: 472914
  Synthetic oligonucleotide

SEQ ID NO: 609942 - DNA, 56 bp, Artificial; identical to SEQ ID NO: 472917
  Synthetic oligonucleotide

SEQ ID NO: 609943 - DNA, 59 bp, Artificial; identical to SEQ ID NO: 472921
  Synthetic oligonucleotide

SEQ ID NO: 609944 - DNA, 60 bp, Artificial; identical to SEQ ID NO: 472925
  Synthetic oligonucleotide

SEQ ID NO: 609945 - DNA, 51 bp, Artificial; identical to SEQ ID NO: 472926
  Synthetic oligonucleotide

SEQ ID NO: 609946 - DNA, 54 bp, Artificial; identical to SEQ ID NO: 472931
  Synthetic oligonucleotide

SEQ ID NO: 609947 - DNA, 60 bp, Artificial; identical to SEQ ID NO: 472933
  Synthetic oligonucleotide

SEQ ID NO: 609948 - DNA, 60 bp, Artificial; identical to SEQ ID NO: 472934
  Synthetic oligonucleotide

SEQ ID NO: 609949 - DNA, 54 bp, Artificial; identical to SEQ ID NO: 472936
  Synthetic oligonucleotide

SEQ ID NO: 609950 - DNA, 58 bp, Artificial; identical to SEQ ID NO: 472937
  Synthetic oligonucleotide

SEQ ID NO: 609951 - DNA, 54 bp, Artificial; identical to SEQ ID NO: 472942
  Synthetic oligonucleotide

SEQ ID NO: 609952 - DNA, 60 bp, Artificial; identical to SEQ ID NO: 472944
  Synthetic oligonucleotide

SEQ ID NO: 609953 - DNA, 53 bp, Artificial; identical to SEQ ID NO: 472945
  Synthetic oligonucleotide

SEQ ID NO: 609954 - DNA, 54 bp, Artificial; identical to SEQ ID NO: 472947
  Synthetic oligonucleotide

SEQ ID NO: 609955 - DNA, 60 bp, Artificial; identical to SEQ ID NO: 472952
  Synthetic oligonucleotide

SEQ ID NO: 609956 - DNA, 60 bp, Artificial; identical to SEQ ID NO: 472954
  Synthetic oligonucleotide

SEQ ID NO: 609957 - DNA, 60 bp, Artificial; identical to SEQ ID NO: 472960
  Synthetic oligonucleotide

SEQ ID NO: 609958 - DNA, 59 bp, Artificial; identical to SEQ ID NO: 472962
  Synthetic oligonucleotide

SEQ ID NO: 609959 - DNA, 58 bp, Artificial; identical to SEQ ID NO: 472964
  Synthetic oligonucleotide

SEQ ID NO: 609960 - DNA, 59 bp, Artificial; identical to SEQ ID NO: 472966
  Synthetic oligonucleotide

SEQ ID NO: 609961 - DNA, 55 bp, Artificial; identical to SEQ ID NO: 472968
  Synthetic oligonucleotide

SEQ ID NO: 609962 - DNA, 51 bp, Artificial; identical to SEQ ID NO: 10776
  Synthetic oligonucleotide

SEQ ID NO: 609963 - DNA, 60 bp, Artificial; identical to SEQ ID NO: 472970
  Synthetic oligonucleotide

SEQ ID NO: 609964 - DNA, 55 bp, Artificial; identical to SEQ ID NO: 472973
  Synthetic oligonucleotide

SEQ ID NO: 609965 - DNA, 52 bp, Artificial; identical to SEQ ID NO: 472975
  Synthetic oligonucleotide

SEQ ID NO: 609966 - DNA, 60 bp, Artificial; identical to SEQ ID NO: 472976
  Synthetic oligonucleotide

SEQ ID NO: 609967 - DNA, 54 bp, Artificial; identical to SEQ ID NO: 7664
  Synthetic oligonucleotide

SEQ ID NO: 609968 - DNA, 55 bp, Artificial; identical to SEQ ID NO: 472980
  Synthetic oligonucleotide

SEQ ID NO: 609969 - DNA, 60 bp, Artificial; identical to SEQ ID NO: 10799
  Synthetic oligonucleotide

SEQ ID NO: 609970 - DNA, 55 bp, Artificial; identical to SEQ ID NO: 472983
  Synthetic oligonucleotide

SEQ ID NO: 609971 - DNA, 60 bp, Artificial; identical to SEQ ID NO: 472984
  Synthetic oligonucleotide

SEQ ID NO: 609972 - DNA, 60 bp, Artificial; identical to SEQ ID NO: 472986
  Synthetic oligonucleotide

SEQ ID NO: 609973 - DNA, 58 bp, Artificial; identical to SEQ ID NO: 472987
  Synthetic oligonucleotide

SEQ ID NO: 609974 - DNA, 60 bp, Artificial; identical to SEQ ID NO: 472989
  Synthetic oligonucleotide

SEQ ID NO: 609975 - DNA, 57 bp, Artificial; identical to SEQ ID NO: 472992
  Synthetic oligonucleotide

SEQ ID NO: 609976 - DNA, 60 bp, Artificial; identical to SEQ ID NO: 472993
  Synthetic oligonucleotide

SEQ ID NO: 609977 - DNA, 60 bp, Artificial; identical to SEQ ID NO: 472994
  Synthetic oligonucleotide

SEQ ID NO: 609978 - DNA, 60 bp, Artificial; identical to SEQ ID NO: 472995
  Synthetic oligonucleotide

SEQ ID NO: 609979 - DNA, 56 bp, Artificial; identical to SEQ ID NO: 12854
  Synthetic oligonucleotide

SEQ ID NO: 609980 - DNA, 58 bp, Artificial; identical to SEQ ID NO: 472999
  Synthetic oligonucleotide

SEQ ID NO: 609981 - DNA, 60 bp, Artificial; identical to SEQ ID NO: 473003
  Synthetic oligonucleotide

SEQ ID NO: 609982 - DNA, 60 bp, Artificial; identical to SEQ ID NO: 473004
  Synthetic oligonucleotide

SEQ ID NO: 609983 - DNA, 57 bp, Artificial; identical to SEQ ID NO: 473008
  Synthetic oligonucleotide

SEQ ID NO: 609984 - DNA, 50 bp, Artificial; identical to SEQ ID NO: 473011
  Synthetic oligonucleotide

SEQ ID NO: 609985 - DNA, 60 bp, Artificial; identical to SEQ ID NO: 473017
  Synthetic oligonucleotide

SEQ ID NO: 609986 - DNA, 55 bp, Artificial; identical to SEQ ID NO: 473018
  Synthetic oligonucleotide

SEQ ID NO: 609987 - DNA, 60 bp, Artificial; identical to SEQ ID NO: 473021
  Synthetic oligonucleotide

SEQ ID NO: 609988 - DNA, 55 bp, Artificial; identical to SEQ ID NO: 473023
  Synthetic oligonucleotide

SEQ ID NO: 609989 - DNA, 60 bp, Artificial; identical to SEQ ID NO: 473024
  Synthetic oligonucleotide

SEQ ID NO: 609990 - DNA, 60 bp, Artificial; identical to SEQ ID NO: 473025
  Synthetic oligonucleotide

SEQ ID NO: 609991 - DNA, 60 bp, Artificial; identical to SEQ ID NO: 8648
  Synthetic oligonucleotide

SEQ ID NO: 609992 - DNA, 58 bp, Artificial; identical to SEQ ID NO: 473026
  Synthetic oligonucleotide

SEQ ID NO: 609993 - DNA, 60 bp, Artificial; identical to SEQ ID NO: 473030
  Synthetic oligonucleotide

SEQ ID NO: 609994 - DNA, 59 bp, Artificial; identical to SEQ ID NO: 473031
  Synthetic oligonucleotide

SEQ ID NO: 609995 - DNA, 60 bp, Artificial; identical to SEQ ID NO: 473033
  Synthetic oligonucleotide

SEQ ID NO: 609996 - DNA, 58 bp, Artificial; identical to SEQ ID NO: 473036
  Synthetic oligonucleotide

SEQ ID NO: 609997 - DNA, 58 bp, Artificial; identical to SEQ ID NO: 473042
  Synthetic oligonucleotide

SEQ ID NO: 609998 - DNA, 60 bp, Artificial; identical to SEQ ID NO: 473043
  Synthetic oligonucleotide

SEQ ID NO: 609999 - DNA, 60 bp, Artificial; identical to SEQ ID NO: 473044
  Synthetic oligonucleotide

SEQ ID NO: 610000 - DNA, 53 bp, Artificial; identical to SEQ ID NO: 473045
  Synthetic oligonucleotide

SEQ ID NO: 610001 - DNA, 57 bp, Artificial; identical to SEQ ID NO: 473046
  Synthetic oligonucleotide

SEQ ID NO: 610002 - DNA, 60 bp, Artificial; identical to SEQ ID NO: 473047
  Synthetic oligonucleotide

SEQ ID NO: 610003 - DNA, 55 bp, Artificial; identical to SEQ ID NO: 473048
  Synthetic oligonucleotide

SEQ ID NO: 610004 - DNA, 52 bp, Artificial; identical to SEQ ID NO: 473053
  Synthetic oligonucleotide

SEQ ID NO: 610005 - DNA, 57 bp, Artificial; identical to SEQ ID NO: 16641
  Synthetic oligonucleotide

SEQ ID NO: 610006 - DNA, 55 bp, Artificial; identical to SEQ ID NO: 473057
  Synthetic oligonucleotide

SEQ ID NO: 610007 - DNA, 55 bp, Artificial; identical to SEQ ID NO: 473059
  Synthetic oligonucleotide

SEQ ID NO: 610008 - DNA, 60 bp, Artificial; identical to SEQ ID NO: 473060
  Synthetic oligonucleotide

SEQ ID NO: 610009 - DNA, 60 bp, Artificial; identical to SEQ ID NO: 473061
  Synthetic oligonucleotide

SEQ ID NO: 610010 - DNA, 60 bp, Artificial; identical to SEQ ID NO: 473062
  Synthetic oligonucleotide

SEQ ID NO: 610011 - DNA, 59 bp, Artificial; identical to SEQ ID NO: 473064
  Synthetic oligonucleotide

SEQ ID NO: 610012 - DNA, 60 bp, Artificial; identical to SEQ ID NO: 473065
  Synthetic oligonucleotide

SEQ ID NO: 610013 - DNA, 58 bp, Artificial; identical to SEQ ID NO: 9436
  Synthetic oligonucleotide

SEQ ID NO: 610014 - DNA, 51 bp, Artificial; identical to SEQ ID NO: 473069
  Synthetic oligonucleotide

SEQ ID NO: 610015 - DNA, 58 bp, Artificial; identical to SEQ ID NO: 473070
  Synthetic oligonucleotide

SEQ ID NO: 610016 - DNA, 60 bp, Artificial; identical to SEQ ID NO: 473073
  Synthetic oligonucleotide

SEQ ID NO: 610017 - DNA, 54 bp, Artificial; identical to SEQ ID NO: 473074
  Synthetic oligonucleotide

SEQ ID NO: 610018 - DNA, 55 bp, Artificial; identical to SEQ ID NO: 473076
  Synthetic oligonucleotide

SEQ ID NO: 610019 - DNA, 56 bp, Artificial; identical to SEQ ID NO: 473077
  Synthetic oligonucleotide

SEQ ID NO: 610020 - DNA, 55 bp, Artificial; identical to SEQ ID NO: 7060
  Synthetic oligonucleotide

SEQ ID NO: 610021 - DNA, 55 bp, Artificial; identical to SEQ ID NO: 473080
  Synthetic oligonucleotide

SEQ ID NO: 610022 - DNA, 60 bp, Artificial; identical to SEQ ID NO: 473081
  Synthetic oligonucleotide

SEQ ID NO: 610023 - DNA, 60 bp, Artificial; identical to SEQ ID NO: 473085
  Synthetic oligonucleotide

SEQ ID NO: 610024 - DNA, 60 bp, Artificial; identical to SEQ ID NO: 473087
  Synthetic oligonucleotide

SEQ ID NO: 610025 - DNA, 60 bp, Artificial; identical to SEQ ID NO: 473094
  Synthetic oligonucleotide

SEQ ID NO: 610026 - DNA, 60 bp, Artificial; identical to SEQ ID NO: 473095
  Synthetic oligonucleotide

SEQ ID NO: 610027 - DNA, 60 bp, Artificial; identical to SEQ ID NO: 473096
  Synthetic oligonucleotide

SEQ ID NO: 610028 - DNA, 55 bp, Artificial; identical to SEQ ID NO: 473099
  Synthetic oligonucleotide

SEQ ID NO: 610029 - DNA, 60 bp, Artificial; identical to SEQ ID NO: 473100
  Synthetic oligonucleotide

SEQ ID NO: 610030 - DNA, 60 bp, Artificial; identical to SEQ ID NO: 473101
  Synthetic oligonucleotide

SEQ ID NO: 610031 - DNA, 60 bp, Artificial; identical to SEQ ID NO: 473103
  Synthetic oligonucleotide

SEQ ID NO: 610032 - DNA, 50 bp, Artificial; identical to SEQ ID NO: 13837
  Synthetic oligonucleotide

SEQ ID NO: 610033 - DNA, 50 bp, Artificial; identical to SEQ ID NO: 473105
  Synthetic oligonucleotide

SEQ ID NO: 610034 - DNA, 55 bp, Artificial; identical to SEQ ID NO: 473106
  Synthetic oligonucleotide

SEQ ID NO: 610035 - DNA, 60 bp, Artificial; identical to SEQ ID NO: 473107
  Synthetic oligonucleotide

SEQ ID NO: 610036 - DNA, 60 bp, Artificial; identical to SEQ ID NO: 473108
  Synthetic oligonucleotide

SEQ ID NO: 610037 - DNA, 55 bp, Artificial; identical to SEQ ID NO: 473111
  Synthetic oligonucleotide

SEQ ID NO: 610038 - DNA, 60 bp, Artificial; identical to SEQ ID NO: 8418
  Synthetic oligonucleotide

SEQ ID NO: 610039 - DNA, 51 bp, Artificial; identical to SEQ ID NO: 473120
  Synthetic oligonucleotide

SEQ ID NO: 610040 - DNA, 59 bp, Artificial; identical to SEQ ID NO: 473121
  Synthetic oligonucleotide

SEQ ID NO: 610041 - DNA, 55 bp, Artificial; identical to SEQ ID NO: 473123
  Synthetic oligonucleotide

SEQ ID NO: 610042 - DNA, 55 bp, Artificial; identical to SEQ ID NO: 473127
  Synthetic oligonucleotide

SEQ ID NO: 610043 - DNA, 58 bp, Artificial; identical to SEQ ID NO: 473128
  Synthetic oligonucleotide

SEQ ID NO: 610044 - DNA, 60 bp, Artificial; identical to SEQ ID NO: 14077
  Synthetic oligonucleotide

SEQ ID NO: 610045 - DNA, 57 bp, Artificial; identical to SEQ ID NO: 473131
  Synthetic oligonucleotide

SEQ ID NO: 610046 - DNA, 60 bp, Artificial; identical to SEQ ID NO: 6053
  Synthetic oligonucleotide

SEQ ID NO: 610047 - DNA, 55 bp, Artificial; identical to SEQ ID NO: 473137
  Synthetic oligonucleotide

SEQ ID NO: 610048 - DNA, 60 bp, Artificial; identical to SEQ ID NO: 473138
  Synthetic oligonucleotide

SEQ ID NO: 610049 - DNA, 55 bp, Artificial; identical to SEQ ID NO: 473139
  Synthetic oligonucleotide

SEQ ID NO: 610050 - DNA, 60 bp, Artificial; identical to SEQ ID NO: 473140
  Synthetic oligonucleotide

SEQ ID NO: 610051 - DNA, 60 bp, Artificial; identical to SEQ ID NO: 473142
  Synthetic oligonucleotide

SEQ ID NO: 610052 - DNA, 59 bp, Artificial; identical to SEQ ID NO: 473144
  Synthetic oligonucleotide

SEQ ID NO: 610053 - DNA, 60 bp, Artificial; identical to SEQ ID NO: 473146
  Synthetic oligonucleotide

SEQ ID NO: 610054 - DNA, 56 bp, Artificial; identical to SEQ ID NO: 473147
  Synthetic oligonucleotide

SEQ ID NO: 610055 - DNA, 57 bp, Artificial; identical to SEQ ID NO: 473150
  Synthetic oligonucleotide

SEQ ID NO: 610056 - DNA, 52 bp, Artificial; identical to SEQ ID NO: 473152
  Synthetic oligonucleotide

SEQ ID NO: 610057 - DNA, 55 bp, Artificial; identical to SEQ ID NO: 473157
  Synthetic oligonucleotide

SEQ ID NO: 610058 - DNA, 56 bp, Artificial; identical to SEQ ID NO: 473158
  Synthetic oligonucleotide

SEQ ID NO: 610059 - DNA, 53 bp, Artificial; identical to SEQ ID NO: 473159
  Synthetic oligonucleotide

SEQ ID NO: 610060 - DNA, 60 bp, Artificial; identical to SEQ ID NO: 473164
  Synthetic oligonucleotide

SEQ ID NO: 610061 - DNA, 55 bp, Artificial; identical to SEQ ID NO: 473169
  Synthetic oligonucleotide

SEQ ID NO: 610062 - DNA, 55 bp, Artificial; identical to SEQ ID NO: 473171
  Synthetic oligonucleotide

SEQ ID NO: 610063 - DNA, 55 bp, Artificial; identical to SEQ ID NO: 473174
  Synthetic oligonucleotide

SEQ ID NO: 610064 - DNA, 59 bp, Artificial; identical to SEQ ID NO: 473179
  Synthetic oligonucleotide

SEQ ID NO: 610065 - DNA, 60 bp, Artificial; identical to SEQ ID NO: 473189
  Synthetic oligonucleotide

SEQ ID NO: 610066 - DNA, 57 bp, Artificial; identical to SEQ ID NO: 473192
  Synthetic oligonucleotide

SEQ ID NO: 610067 - DNA, 57 bp, Artificial; identical to SEQ ID NO: 473193
  Synthetic oligonucleotide

SEQ ID NO: 610068 - DNA, 60 bp, Artificial; identical to SEQ ID NO: 473197
  Synthetic oligonucleotide

SEQ ID NO: 610069 - DNA, 60 bp, Artificial; identical to SEQ ID NO: 473198
  Synthetic oligonucleotide

SEQ ID NO: 610070 - DNA, 57 bp, Artificial; identical to SEQ ID NO: 473200
  Synthetic oligonucleotide

SEQ ID NO: 610071 - DNA, 60 bp, Artificial; identical to SEQ ID NO: 473203
  Synthetic oligonucleotide

SEQ ID NO: 610072 - DNA, 55 bp, Artificial; identical to SEQ ID NO: 473205
  Synthetic oligonucleotide

SEQ ID NO: 610073 - DNA, 58 bp, Artificial; identical to SEQ ID NO: 473207
  Synthetic oligonucleotide

SEQ ID NO: 610074 - DNA, 55 bp, Artificial; identical to SEQ ID NO: 473212
  Synthetic oligonucleotide

SEQ ID NO: 610075 - DNA, 60 bp, Artificial; identical to SEQ ID NO: 473213
  Synthetic oligonucleotide

SEQ ID NO: 610076 - DNA, 57 bp, Artificial; identical to SEQ ID NO: 473215
  Synthetic oligonucleotide

SEQ ID NO: 610077 - DNA, 54 bp, Artificial; identical to SEQ ID NO: 7726
  Synthetic oligonucleotide

SEQ ID NO: 610078 - DNA, 60 bp, Artificial; identical to SEQ ID NO: 473217
  Synthetic oligonucleotide

SEQ ID NO: 610079 - DNA, 54 bp, Artificial; identical to SEQ ID NO: 473218
  Synthetic oligonucleotide

SEQ ID NO: 610080 - DNA, 60 bp, Artificial; identical to SEQ ID NO: 473221
  Synthetic oligonucleotide

SEQ ID NO: 610081 - DNA, 56 bp, Artificial; identical to SEQ ID NO: 473224
  Synthetic oligonucleotide

SEQ ID NO: 610082 - DNA, 51 bp, Artificial; identical to SEQ ID NO: 473228
  Synthetic oligonucleotide

SEQ ID NO: 610083 - DNA, 56 bp, Artificial; identical to SEQ ID NO: 473230
  Synthetic oligonucleotide

SEQ ID NO: 610084 - DNA, 55 bp, Artificial; identical to SEQ ID NO: 473231
  Synthetic oligonucleotide

SEQ ID NO: 610085 - DNA, 58 bp, Artificial; identical to SEQ ID NO: 473233
  Synthetic oligonucleotide

SEQ ID NO: 610086 - DNA, 60 bp, Artificial; identical to SEQ ID NO: 473236
  Synthetic oligonucleotide

SEQ ID NO: 610087 - DNA, 49 bp, Artificial; identical to SEQ ID NO: 473240
  Synthetic oligonucleotide

SEQ ID NO: 610088 - DNA, 60 bp, Artificial; identical to SEQ ID NO: 473243
  Synthetic oligonucleotide

SEQ ID NO: 610089 - DNA, 54 bp, Artificial; identical to SEQ ID NO: 473244
  Synthetic oligonucleotide

SEQ ID NO: 610090 - DNA, 55 bp, Artificial; identical to SEQ ID NO: 473247
  Synthetic oligonucleotide

SEQ ID NO: 610091 - DNA, 51 bp, Artificial; identical to SEQ ID NO: 473248
  Synthetic oligonucleotide

SEQ ID NO: 610092 - DNA, 60 bp, Artificial; identical to SEQ ID NO: 473250
  Synthetic oligonucleotide

SEQ ID NO: 610093 - DNA, 59 bp, Artificial; identical to SEQ ID NO: 473251
  Synthetic oligonucleotide

SEQ ID NO: 610094 - DNA, 56 bp, Artificial; identical to SEQ ID NO: 473252
  Synthetic oligonucleotide

SEQ ID NO: 610095 - DNA, 55 bp, Artificial; identical to SEQ ID NO: 473253
  Synthetic oligonucleotide

SEQ ID NO: 610096 - DNA, 55 bp, Artificial; identical to SEQ ID NO: 473258
  Synthetic oligonucleotide

SEQ ID NO: 610097 - DNA, 60 bp, Artificial; identical to SEQ ID NO: 473259
  Synthetic oligonucleotide

SEQ ID NO: 610098 - DNA, 57 bp, Artificial; identical to SEQ ID NO: 473262
  Synthetic oligonucleotide

SEQ ID NO: 610099 - DNA, 57 bp, Artificial; identical to SEQ ID NO: 473263
  Synthetic oligonucleotide

SEQ ID NO: 610100 - DNA, 59 bp, Artificial; identical to SEQ ID NO: 473265
  Synthetic oligonucleotide

SEQ ID NO: 610101 - DNA, 51 bp, Artificial; identical to SEQ ID NO: 473267
  Synthetic oligonucleotide

SEQ ID NO: 610102 - DNA, 57 bp, Artificial; identical to SEQ ID NO: 473273
  Synthetic oligonucleotide

SEQ ID NO: 610103 - DNA, 57 bp, Artificial; identical to SEQ ID NO: 473275
  Synthetic oligonucleotide

SEQ ID NO: 610104 - DNA, 57 bp, Artificial; identical to SEQ ID NO: 473277
  Synthetic oligonucleotide

SEQ ID NO: 610105 - DNA, 59 bp, Artificial; identical to SEQ ID NO: 16409
  Synthetic oligonucleotide

SEQ ID NO: 610106 - DNA, 56 bp, Artificial; identical to SEQ ID NO: 473279
  Synthetic oligonucleotide

SEQ ID NO: 610107 - DNA, 58 bp, Artificial; identical to SEQ ID NO: 473281
  Synthetic oligonucleotide

SEQ ID NO: 610108 - DNA, 60 bp, Artificial; identical to SEQ ID NO: 108875
  Synthetic oligonucleotide

SEQ ID NO: 610109 - DNA, 55 bp, Artificial; identical to SEQ ID NO: 473283
  Synthetic oligonucleotide

SEQ ID NO: 610110 - DNA, 60 bp, Artificial; identical to SEQ ID NO: 473285
  Synthetic oligonucleotide

SEQ ID NO: 610111 - DNA, 60 bp, Artificial; identical to SEQ ID NO: 473289
  Synthetic oligonucleotide

SEQ ID NO: 610112 - DNA, 60 bp, Artificial; identical to SEQ ID NO: 473290
  Synthetic oligonucleotide

SEQ ID NO: 610113 - DNA, 56 bp, Artificial; identical to SEQ ID NO: 473293
  Synthetic oligonucleotide

SEQ ID NO: 610114 - DNA, 60 bp, Artificial; identical to SEQ ID NO: 473294
  Synthetic oligonucleotide

SEQ ID NO: 610115 - DNA, 55 bp, Artificial; identical to SEQ ID NO: 473295
  Synthetic oligonucleotide

SEQ ID NO: 610116 - DNA, 53 bp, Artificial; identical to SEQ ID NO: 473296
  Synthetic oligonucleotide

SEQ ID NO: 610117 - DNA, 55 bp, Artificial; identical to SEQ ID NO: 473298
  Synthetic oligonucleotide

SEQ ID NO: 610118 - DNA, 55 bp, Artificial; identical to SEQ ID NO: 473299
  Synthetic oligonucleotide

SEQ ID NO: 610119 - DNA, 55 bp, Artificial; identical to SEQ ID NO: 473300
  Synthetic oligonucleotide

SEQ ID NO: 610120 - DNA, 55 bp, Artificial; identical to SEQ ID NO: 473303
  Synthetic oligonucleotide

SEQ ID NO: 610121 - DNA, 56 bp, Artificial; identical to SEQ ID NO: 179
  Synthetic oligonucleotide

SEQ ID NO: 610122 - DNA, 60 bp, Artificial; identical to SEQ ID NO: 473306
  Synthetic oligonucleotide

SEQ ID NO: 610123 - DNA, 59 bp, Artificial; identical to SEQ ID NO: 473310
  Synthetic oligonucleotide

SEQ ID NO: 610124 - DNA, 60 bp, Artificial; identical to SEQ ID NO: 10283
  Synthetic oligonucleotide

SEQ ID NO: 610125 - DNA, 55 bp, Artificial; identical to SEQ ID NO: 473317
  Synthetic oligonucleotide

SEQ ID NO: 610126 - DNA, 60 bp, Artificial; identical to SEQ ID NO: 473320
  Synthetic oligonucleotide

SEQ ID NO: 610127 - DNA, 60 bp, Artificial; identical to SEQ ID NO: 473321
  Synthetic oligonucleotide

SEQ ID NO: 610128 - DNA, 58 bp, Artificial; identical to SEQ ID NO: 473322
  Synthetic oligonucleotide

SEQ ID NO: 610129 - DNA, 60 bp, Artificial; identical to SEQ ID NO: 473327
  Synthetic oligonucleotide

SEQ ID NO: 610130 - DNA, 59 bp, Artificial; identical to SEQ ID NO: 473333
  Synthetic oligonucleotide

SEQ ID NO: 610131 - DNA, 60 bp, Artificial; identical to SEQ ID NO: 473334
  Synthetic oligonucleotide

SEQ ID NO: 610132 - DNA, 57 bp, Artificial; identical to SEQ ID NO: 473338
  Synthetic oligonucleotide

SEQ ID NO: 610133 - DNA, 51 bp, Artificial; identical to SEQ ID NO: 473339
  Synthetic oligonucleotide

SEQ ID NO: 610134 - DNA, 57 bp, Artificial; identical to SEQ ID NO: 473342
  Synthetic oligonucleotide

SEQ ID NO: 610135 - DNA, 58 bp, Artificial; identical to SEQ ID NO: 473346
  Synthetic oligonucleotide

SEQ ID NO: 610136 - DNA, 57 bp, Artificial; identical to SEQ ID NO: 473347
  Synthetic oligonucleotide

SEQ ID NO: 610137 - DNA, 53 bp, Artificial; identical to SEQ ID NO: 473349
  Synthetic oligonucleotide

SEQ ID NO: 610138 - DNA, 60 bp, Artificial; identical to SEQ ID NO: 473350
  Synthetic oligonucleotide

SEQ ID NO: 610139 - DNA, 60 bp, Artificial; identical to SEQ ID NO: 12748
  Synthetic oligonucleotide

SEQ ID NO: 610140 - DNA, 55 bp, Artificial; identical to SEQ ID NO: 473351
  Synthetic oligonucleotide

SEQ ID NO: 610141 - DNA, 55 bp, Artificial; identical to SEQ ID NO: 473352
  Synthetic oligonucleotide

SEQ ID NO: 610142 - DNA, 59 bp, Artificial; identical to SEQ ID NO: 473354
  Synthetic oligonucleotide

SEQ ID NO: 610143 - DNA, 60 bp, Artificial; identical to SEQ ID NO: 473361
  Synthetic oligonucleotide

SEQ ID NO: 610144 - DNA, 57 bp, Artificial; identical to SEQ ID NO: 473362
  Synthetic oligonucleotide

SEQ ID NO: 610145 - DNA, 55 bp, Artificial; identical to SEQ ID NO: 473366
  Synthetic oligonucleotide

SEQ ID NO: 610146 - DNA, 58 bp, Artificial; identical to SEQ ID NO: 473375
  Synthetic oligonucleotide

SEQ ID NO: 610147 - DNA, 55 bp, Artificial; identical to SEQ ID NO: 473379
  Synthetic oligonucleotide

SEQ ID NO: 610148 - DNA, 58 bp, Artificial; identical to SEQ ID NO: 473383
  Synthetic oligonucleotide

SEQ ID NO: 610149 - DNA, 60 bp, Artificial; identical to SEQ ID NO: 473386
  Synthetic oligonucleotide

SEQ ID NO: 610150 - DNA, 59 bp, Artificial; identical to SEQ ID NO: 473391
  Synthetic oligonucleotide

SEQ ID NO: 610151 - DNA, 54 bp, Artificial; identical to SEQ ID NO: 473393
  Synthetic oligonucleotide

SEQ ID NO: 610152 - DNA, 55 bp, Artificial; identical to SEQ ID NO: 473395
  Synthetic oligonucleotide

SEQ ID NO: 610153 - DNA, 55 bp, Artificial; identical to SEQ ID NO: 473399
  Synthetic oligonucleotide

SEQ ID NO: 610154 - DNA, 60 bp, Artificial; identical to SEQ ID NO: 90721
  Synthetic oligonucleotide

SEQ ID NO: 610155 - DNA, 55 bp, Artificial; identical to SEQ ID NO: 473402
  Synthetic oligonucleotide

SEQ ID NO: 610156 - DNA, 53 bp, Artificial; identical to SEQ ID NO: 473405
  Synthetic oligonucleotide

SEQ ID NO: 610157 - DNA, 60 bp, Artificial; identical to SEQ ID NO: 473406
  Synthetic oligonucleotide

SEQ ID NO: 610158 - DNA, 56 bp, Artificial; identical to SEQ ID NO: 473408
  Synthetic oligonucleotide

SEQ ID NO: 610159 - DNA, 60 bp, Artificial; identical to SEQ ID NO: 473410
  Synthetic oligonucleotide

SEQ ID NO: 610160 - DNA, 53 bp, Artificial; identical to SEQ ID NO: 473411
  Synthetic oligonucleotide

SEQ ID NO: 610161 - DNA, 60 bp, Artificial; identical to SEQ ID NO: 473412
  Synthetic oligonucleotide

SEQ ID NO: 610162 - DNA, 60 bp, Artificial; identical to SEQ ID NO: 473416
  Synthetic oligonucleotide

SEQ ID NO: 610163 - DNA, 54 bp, Artificial; identical to SEQ ID NO: 473419
  Synthetic oligonucleotide

SEQ ID NO: 610164 - DNA, 55 bp, Artificial; identical to SEQ ID NO: 473421
  Synthetic oligonucleotide

SEQ ID NO: 610165 - DNA, 51 bp, Artificial; identical to SEQ ID NO: 473426
  Synthetic oligonucleotide

SEQ ID NO: 610166 - DNA, 60 bp, Artificial; identical to SEQ ID NO: 473430
  Synthetic oligonucleotide

SEQ ID NO: 610167 - DNA, 47 bp, Artificial; identical to SEQ ID NO: 473433
  Synthetic oligonucleotide

SEQ ID NO: 610168 - DNA, 57 bp, Artificial; identical to SEQ ID NO: 473434
  Synthetic oligonucleotide

SEQ ID NO: 610169 - DNA, 50 bp, Artificial; identical to SEQ ID NO: 10495
  Synthetic oligonucleotide

SEQ ID NO: 610170 - DNA, 58 bp, Artificial; identical to SEQ ID NO: 473442
  Synthetic oligonucleotide

SEQ ID NO: 610171 - DNA, 57 bp, Artificial; identical to SEQ ID NO: 473444
  Synthetic oligonucleotide

SEQ ID NO: 610172 - DNA, 55 bp, Artificial; identical to SEQ ID NO: 473445
  Synthetic oligonucleotide

SEQ ID NO: 610173 - DNA, 55 bp, Artificial; identical to SEQ ID NO: 473447
  Synthetic oligonucleotide

SEQ ID NO: 610174 - DNA, 60 bp, Artificial; identical to SEQ ID NO: 473448
  Synthetic oligonucleotide

SEQ ID NO: 610175 - DNA, 56 bp, Artificial; identical to SEQ ID NO: 473452
  Synthetic oligonucleotide

SEQ ID NO: 610176 - DNA, 55 bp, Artificial; identical to SEQ ID NO: 473458
  Synthetic oligonucleotide

SEQ ID NO: 610177 - DNA, 59 bp, Artificial; identical to SEQ ID NO: 473461
  Synthetic oligonucleotide

SEQ ID NO: 610178 - DNA, 59 bp, Artificial; identical to SEQ ID NO: 473462
  Synthetic oligonucleotide

SEQ ID NO: 610179 - DNA, 57 bp, Artificial; identical to SEQ ID NO: 473464
  Synthetic oligonucleotide

SEQ ID NO: 610180 - DNA, 55 bp, Artificial; identical to SEQ ID NO: 473465
  Synthetic oligonucleotide

SEQ ID NO: 610181 - DNA, 52 bp, Artificial; identical to SEQ ID NO: 473466
  Synthetic oligonucleotide

SEQ ID NO: 610182 - DNA, 60 bp, Artificial; identical to SEQ ID NO: 473467
  Synthetic oligonucleotide

SEQ ID NO: 610183 - DNA, 60 bp, Artificial; identical to SEQ ID NO: 473468
  Synthetic oligonucleotide

SEQ ID NO: 610184 - DNA, 56 bp, Artificial; identical to SEQ ID NO: 473470
  Synthetic oligonucleotide

SEQ ID NO: 610185 - DNA, 59 bp, Artificial; identical to SEQ ID NO: 473472
  Synthetic oligonucleotide

SEQ ID NO: 610186 - DNA, 55 bp, Artificial; identical to SEQ ID NO: 473473
  Synthetic oligonucleotide

SEQ ID NO: 610187 - DNA, 55 bp, Artificial; identical to SEQ ID NO: 473474
  Synthetic oligonucleotide

SEQ ID NO: 610188 - DNA, 60 bp, Artificial; identical to SEQ ID NO: 473475
  Synthetic oligonucleotide

SEQ ID NO: 610189 - DNA, 60 bp, Artificial; identical to SEQ ID NO: 473476
  Synthetic oligonucleotide

SEQ ID NO: 610190 - DNA, 60 bp, Artificial; identical to SEQ ID NO: 473479
  Synthetic oligonucleotide

SEQ ID NO: 610191 - DNA, 51 bp, Artificial; identical to SEQ ID NO: 473480
  Synthetic oligonucleotide

SEQ ID NO: 610192 - DNA, 60 bp, Artificial; identical to SEQ ID NO: 473481
  Synthetic oligonucleotide

SEQ ID NO: 610193 - DNA, 60 bp, Artificial; identical to SEQ ID NO: 473483
  Synthetic oligonucleotide

SEQ ID NO: 610194 - DNA, 59 bp, Artificial; identical to SEQ ID NO: 473486
  Synthetic oligonucleotide

SEQ ID NO: 610195 - DNA, 57 bp, Artificial; identical to SEQ ID NO: 19352
  Synthetic oligonucleotide

SEQ ID NO: 610196 - DNA, 60 bp, Artificial; identical to SEQ ID NO: 473487
  Synthetic oligonucleotide

SEQ ID NO: 610197 - DNA, 54 bp, Artificial; identical to SEQ ID NO: 473490
  Synthetic oligonucleotide

SEQ ID NO: 610198 - DNA, 60 bp, Artificial; identical to SEQ ID NO: 473492
  Synthetic oligonucleotide

SEQ ID NO: 610199 - DNA, 60 bp, Artificial; identical to SEQ ID NO: 473493
  Synthetic oligonucleotide

SEQ ID NO: 610200 - DNA, 55 bp, Artificial; identical to SEQ ID NO: 473496
  Synthetic oligonucleotide

SEQ ID NO: 610201 - DNA, 55 bp, Artificial; identical to SEQ ID NO: 473500
  Synthetic oligonucleotide

SEQ ID NO: 610202 - DNA, 60 bp, Artificial; identical to SEQ ID NO: 473505
  Synthetic oligonucleotide

SEQ ID NO: 610203 - DNA, 59 bp, Artificial; identical to SEQ ID NO: 473507
  Synthetic oligonucleotide

SEQ ID NO: 610204 - DNA, 56 bp, Artificial; identical to SEQ ID NO: 473509
  Synthetic oligonucleotide

SEQ ID NO: 610205 - DNA, 60 bp, Artificial; identical to SEQ ID NO: 473510
  Synthetic oligonucleotide

SEQ ID NO: 610206 - DNA, 55 bp, Artificial; identical to SEQ ID NO: 473512
  Synthetic oligonucleotide

SEQ ID NO: 610207 - DNA, 57 bp, Artificial; identical to SEQ ID NO: 473515
  Synthetic oligonucleotide

SEQ ID NO: 610208 - DNA, 60 bp, Artificial; identical to SEQ ID NO: 473519
  Synthetic oligonucleotide

SEQ ID NO: 610209 - DNA, 55 bp, Artificial; identical to SEQ ID NO: 473523
  Synthetic oligonucleotide

SEQ ID NO: 610210 - DNA, 59 bp, Artificial; identical to SEQ ID NO: 473524
  Synthetic oligonucleotide

SEQ ID NO: 610211 - DNA, 59 bp, Artificial; identical to SEQ ID NO: 473526
  Synthetic oligonucleotide

SEQ ID NO: 610212 - DNA, 59 bp, Artificial; identical to SEQ ID NO: 473528
  Synthetic oligonucleotide

SEQ ID NO: 610213 - DNA, 57 bp, Artificial; identical to SEQ ID NO: 473529
  Synthetic oligonucleotide

SEQ ID NO: 610214 - DNA, 58 bp, Artificial; identical to SEQ ID NO: 10603
  Synthetic oligonucleotide

SEQ ID NO: 610215 - DNA, 60 bp, Artificial; identical to SEQ ID NO: 10313
  Synthetic oligonucleotide

SEQ ID NO: 610216 - DNA, 57 bp, Artificial; identical to SEQ ID NO: 473533
  Synthetic oligonucleotide

SEQ ID NO: 610217 - DNA, 57 bp, Artificial; identical to SEQ ID NO: 473540
  Synthetic oligonucleotide

SEQ ID NO: 610218 - DNA, 58 bp, Artificial; identical to SEQ ID NO: 17843
  Synthetic oligonucleotide

SEQ ID NO: 610219 - DNA, 51 bp, Artificial; identical to SEQ ID NO: 473543
  Synthetic oligonucleotide

SEQ ID NO: 610220 - DNA, 57 bp, Artificial; identical to SEQ ID NO: 473544
  Synthetic oligonucleotide

SEQ ID NO: 610221 - DNA, 57 bp, Artificial; identical to SEQ ID NO: 473545
  Synthetic oligonucleotide

SEQ ID NO: 610222 - DNA, 59 bp, Artificial; identical to SEQ ID NO: 473548
  Synthetic oligonucleotide

SEQ ID NO: 610223 - DNA, 50 bp, Artificial; identical to SEQ ID NO: 473549
  Synthetic oligonucleotide

SEQ ID NO: 610224 - DNA, 56 bp, Artificial; identical to SEQ ID NO: 473550
  Synthetic oligonucleotide

SEQ ID NO: 610225 - DNA, 57 bp, Artificial; identical to SEQ ID NO: 473551
  Synthetic oligonucleotide

SEQ ID NO: 610226 - DNA, 60 bp, Artificial; identical to SEQ ID NO: 473552
  Synthetic oligonucleotide

SEQ ID NO: 610227 - DNA, 55 bp, Artificial; identical to SEQ ID NO: 473553
  Synthetic oligonucleotide

SEQ ID NO: 610228 - DNA, 59 bp, Artificial; identical to SEQ ID NO: 473560
  Synthetic oligonucleotide

SEQ ID NO: 610229 - DNA, 55 bp, Artificial; identical to SEQ ID NO: 473562
  Synthetic oligonucleotide

SEQ ID NO: 610230 - DNA, 54 bp, Artificial; identical to SEQ ID NO: 473563
  Synthetic oligonucleotide

SEQ ID NO: 610231 - DNA, 59 bp, Artificial; identical to SEQ ID NO: 473564
  Synthetic oligonucleotide

SEQ ID NO: 610232 - DNA, 53 bp, Artificial; identical to SEQ ID NO: 473568
  Synthetic oligonucleotide

SEQ ID NO: 610233 - DNA, 60 bp, Artificial; identical to SEQ ID NO: 473572
  Synthetic oligonucleotide

SEQ ID NO: 610234 - DNA, 60 bp, Artificial; identical to SEQ ID NO: 473573
  Synthetic oligonucleotide

SEQ ID NO: 610235 - DNA, 60 bp, Artificial; identical to SEQ ID NO: 473574
  Synthetic oligonucleotide

SEQ ID NO: 610236 - DNA, 55 bp, Artificial; identical to SEQ ID NO: 473576
  Synthetic oligonucleotide

SEQ ID NO: 610237 - DNA, 54 bp, Artificial; identical to SEQ ID NO: 473577
  Synthetic oligonucleotide

SEQ ID NO: 610238 - DNA, 60 bp, Artificial; identical to SEQ ID NO: 473585
  Synthetic oligonucleotide

SEQ ID NO: 610239 - DNA, 60 bp, Artificial; identical to SEQ ID NO: 473587
  Synthetic oligonucleotide

SEQ ID NO: 610240 - DNA, 60 bp, Artificial; identical to SEQ ID NO: 473592
  Synthetic oligonucleotide

SEQ ID NO: 610241 - DNA, 55 bp, Artificial; identical to SEQ ID NO: 473593
  Synthetic oligonucleotide

SEQ ID NO: 610242 - DNA, 54 bp, Artificial; identical to SEQ ID NO: 473597
  Synthetic oligonucleotide

SEQ ID NO: 610243 - DNA, 59 bp, Artificial; identical to SEQ ID NO: 473598
  Synthetic oligonucleotide

SEQ ID NO: 610244 - DNA, 50 bp, Artificial; identical to SEQ ID NO: 473599
  Synthetic oligonucleotide

SEQ ID NO: 610245 - DNA, 51 bp, Artificial; identical to SEQ ID NO: 473600
  Synthetic oligonucleotide

SEQ ID NO: 610246 - DNA, 60 bp, Artificial; identical to SEQ ID NO: 473602
  Synthetic oligonucleotide

SEQ ID NO: 610247 - DNA, 60 bp, Artificial; identical to SEQ ID NO: 473604
  Synthetic oligonucleotide

SEQ ID NO: 610248 - DNA, 58 bp, Artificial; identical to SEQ ID NO: 473605
  Synthetic oligonucleotide

SEQ ID NO: 610249 - DNA, 60 bp, Artificial; identical to SEQ ID NO: 473607
  Synthetic oligonucleotide

SEQ ID NO: 610250 - DNA, 60 bp, Artificial; identical to SEQ ID NO: 473611
  Synthetic oligonucleotide

SEQ ID NO: 610251 - DNA, 56 bp, Artificial; identical to SEQ ID NO: 473615
  Synthetic oligonucleotide

SEQ ID NO: 610252 - DNA, 56 bp, Artificial; identical to SEQ ID NO: 473616
  Synthetic oligonucleotide

SEQ ID NO: 610253 - DNA, 59 bp, Artificial; identical to SEQ ID NO: 473618
  Synthetic oligonucleotide

SEQ ID NO: 610254 - DNA, 60 bp, Artificial; identical to SEQ ID NO: 473619
  Synthetic oligonucleotide

SEQ ID NO: 610255 - DNA, 60 bp, Artificial; identical to SEQ ID NO: 473620
  Synthetic oligonucleotide

SEQ ID NO: 610256 - DNA, 57 bp, Artificial; identical to SEQ ID NO: 473622
  Synthetic oligonucleotide

SEQ ID NO: 610257 - DNA, 55 bp, Artificial; identical to SEQ ID NO: 473623
  Synthetic oligonucleotide

SEQ ID NO: 610258 - DNA, 59 bp, Artificial; identical to SEQ ID NO: 473624
  Synthetic oligonucleotide

SEQ ID NO: 610259 - DNA, 55 bp, Artificial; identical to SEQ ID NO: 473631
  Synthetic oligonucleotide

SEQ ID NO: 610260 - DNA, 54 bp, Artificial; identical to SEQ ID NO: 473636
  Synthetic oligonucleotide

SEQ ID NO: 610261 - DNA, 53 bp, Artificial; identical to SEQ ID NO: 473641
  Synthetic oligonucleotide

SEQ ID NO: 610262 - DNA, 55 bp, Artificial; identical to SEQ ID NO: 473642
  Synthetic oligonucleotide

SEQ ID NO: 610263 - DNA, 60 bp, Artificial; identical to SEQ ID NO: 13206
  Synthetic oligonucleotide

SEQ ID NO: 610264 - DNA, 60 bp, Artificial; identical to SEQ ID NO: 473646
  Synthetic oligonucleotide

SEQ ID NO: 610265 - DNA, 56 bp, Artificial; identical to SEQ ID NO: 473647
  Synthetic oligonucleotide

SEQ ID NO: 610266 - DNA, 55 bp, Artificial; identical to SEQ ID NO: 473648
  Synthetic oligonucleotide

SEQ ID NO: 610267 - DNA, 56 bp, Artificial; identical to SEQ ID NO: 473649
  Synthetic oligonucleotide

SEQ ID NO: 610268 - DNA, 51 bp, Artificial; identical to SEQ ID NO: 473651
  Synthetic oligonucleotide

SEQ ID NO: 610269 - DNA, 57 bp, Artificial; identical to SEQ ID NO: 284
  Synthetic oligonucleotide

SEQ ID NO: 610270 - DNA, 52 bp, Artificial; identical to SEQ ID NO: 473654
  Synthetic oligonucleotide

SEQ ID NO: 610271 - DNA, 57 bp, Artificial; identical to SEQ ID NO: 473658
  Synthetic oligonucleotide

SEQ ID NO: 610272 - DNA, 56 bp, Artificial; identical to SEQ ID NO: 473660
  Synthetic oligonucleotide

SEQ ID NO: 610273 - DNA, 60 bp, Artificial; identical to SEQ ID NO: 473661
  Synthetic oligonucleotide

SEQ ID NO: 610274 - DNA, 55 bp, Artificial; identical to SEQ ID NO: 473663
  Synthetic oligonucleotide

SEQ ID NO: 610275 - DNA, 54 bp, Artificial; identical to SEQ ID NO: 473664
  Synthetic oligonucleotide

SEQ ID NO: 610276 - DNA, 60 bp, Artificial; identical to SEQ ID NO: 473665
  Synthetic oligonucleotide

SEQ ID NO: 610277 - DNA, 60 bp, Artificial; identical to SEQ ID NO: 473669
  Synthetic oligonucleotide

SEQ ID NO: 610278 - DNA, 59 bp, Artificial; identical to SEQ ID NO: 473670
  Synthetic oligonucleotide

SEQ ID NO: 610279 - DNA, 60 bp, Artificial; identical to SEQ ID NO: 473674
  Synthetic oligonucleotide

SEQ ID NO: 610280 - DNA, 60 bp, Artificial; identical to SEQ ID NO: 473677
  Synthetic oligonucleotide

SEQ ID NO: 610281 - DNA, 52 bp, Artificial; identical to SEQ ID NO: 473678
  Synthetic oligonucleotide

SEQ ID NO: 610282 - DNA, 55 bp, Artificial; identical to SEQ ID NO: 473680
  Synthetic oligonucleotide

SEQ ID NO: 610283 - DNA, 55 bp, Artificial; identical to SEQ ID NO: 473683
  Synthetic oligonucleotide

SEQ ID NO: 610284 - DNA, 60 bp, Artificial; identical to SEQ ID NO: 473687
  Synthetic oligonucleotide

SEQ ID NO: 610285 - DNA, 60 bp, Artificial; identical to SEQ ID NO: 11140
  Synthetic oligonucleotide

SEQ ID NO: 610286 - DNA, 57 bp, Artificial; identical to SEQ ID NO: 19036
  Synthetic oligonucleotide

SEQ ID NO: 610287 - DNA, 57 bp, Artificial; identical to SEQ ID NO: 473691
  Synthetic oligonucleotide

SEQ ID NO: 610288 - DNA, 60 bp, Artificial; identical to SEQ ID NO: 473693
  Synthetic oligonucleotide

SEQ ID NO: 610289 - DNA, 56 bp, Artificial; identical to SEQ ID NO: 473694
  Synthetic oligonucleotide

SEQ ID NO: 610290 - DNA, 56 bp, Artificial; identical to SEQ ID NO: 473696
  Synthetic oligonucleotide

SEQ ID NO: 610291 - DNA, 57 bp, Artificial; identical to SEQ ID NO: 473697
  Synthetic oligonucleotide

SEQ ID NO: 610292 - DNA, 53 bp, Artificial; identical to SEQ ID NO: 473699
  Synthetic oligonucleotide

SEQ ID NO: 610293 - DNA, 60 bp, Artificial; identical to SEQ ID NO: 473701
  Synthetic oligonucleotide

SEQ ID NO: 610294 - DNA, 59 bp, Artificial; identical to SEQ ID NO: 7402
  Synthetic oligonucleotide

SEQ ID NO: 610295 - DNA, 55 bp, Artificial; identical to SEQ ID NO: 473702
  Synthetic oligonucleotide

SEQ ID NO: 610296 - DNA, 55 bp, Artificial; identical to SEQ ID NO: 473703
  Synthetic oligonucleotide

SEQ ID NO: 610297 - DNA, 60 bp, Artificial; identical to SEQ ID NO: 473704
  Synthetic oligonucleotide

SEQ ID NO: 610298 - DNA, 60 bp, Artificial; identical to SEQ ID NO: 473705
  Synthetic oligonucleotide

SEQ ID NO: 610299 - DNA, 60 bp, Artificial; identical to SEQ ID NO: 473706
  Synthetic oligonucleotide

SEQ ID NO: 610300 - DNA, 60 bp, Artificial; identical to SEQ ID NO: 473708
  Synthetic oligonucleotide

SEQ ID NO: 610301 - DNA, 55 bp, Artificial; identical to SEQ ID NO: 473710
  Synthetic oligonucleotide

SEQ ID NO: 610302 - DNA, 56 bp, Artificial; identical to SEQ ID NO: 473711
  Synthetic oligonucleotide

SEQ ID NO: 610303 - DNA, 60 bp, Artificial; identical to SEQ ID NO: 6125
  Synthetic oligonucleotide

SEQ ID NO: 610304 - DNA, 56 bp, Artificial; identical to SEQ ID NO: 473720
  Synthetic oligonucleotide

SEQ ID NO: 610305 - DNA, 57 bp, Artificial; identical to SEQ ID NO: 473722
  Synthetic oligonucleotide

SEQ ID NO: 610306 - DNA, 60 bp, Artificial; identical to SEQ ID NO: 473726
  Synthetic oligonucleotide

SEQ ID NO: 610307 - DNA, 57 bp, Artificial; identical to SEQ ID NO: 473728
  Synthetic oligonucleotide

SEQ ID NO: 610308 - DNA, 60 bp, Artificial; identical to SEQ ID NO: 473729
  Synthetic oligonucleotide

SEQ ID NO: 610309 - DNA, 58 bp, Artificial; identical to SEQ ID NO: 473731
  Synthetic oligonucleotide

SEQ ID NO: 610310 - DNA, 50 bp, Artificial; identical to SEQ ID NO: 473735
  Synthetic oligonucleotide

SEQ ID NO: 610311 - DNA, 60 bp, Artificial; identical to SEQ ID NO: 473736
  Synthetic oligonucleotide

SEQ ID NO: 610312 - DNA, 55 bp, Artificial; identical to SEQ ID NO: 473737
  Synthetic oligonucleotide

SEQ ID NO: 610313 - DNA, 60 bp, Artificial; identical to SEQ ID NO: 6693
  Synthetic oligonucleotide

SEQ ID NO: 610314 - DNA, 59 bp, Artificial; identical to SEQ ID NO: 473744
  Synthetic oligonucleotide

SEQ ID NO: 610315 - DNA, 60 bp, Artificial; identical to SEQ ID NO: 473746
  Synthetic oligonucleotide

SEQ ID NO: 610316 - DNA, 60 bp, Artificial; identical to SEQ ID NO: 9914
  Synthetic oligonucleotide

SEQ ID NO: 610317 - DNA, 58 bp, Artificial; identical to SEQ ID NO: 473747
  Synthetic oligonucleotide

SEQ ID NO: 610318 - DNA, 55 bp, Artificial; identical to SEQ ID NO: 473748
  Synthetic oligonucleotide

SEQ ID NO: 610319 - DNA, 60 bp, Artificial; identical to SEQ ID NO: 473753
  Synthetic oligonucleotide

SEQ ID NO: 610320 - DNA, 60 bp, Artificial; identical to SEQ ID NO: 473754
  Synthetic oligonucleotide

SEQ ID NO: 610321 - DNA, 55 bp, Artificial; identical to SEQ ID NO: 473758
  Synthetic oligonucleotide

SEQ ID NO: 610322 - DNA, 50 bp, Artificial; identical to SEQ ID NO: 473763
  Synthetic oligonucleotide

SEQ ID NO: 610323 - DNA, 51 bp, Artificial; identical to SEQ ID NO: 473764
  Synthetic oligonucleotide

SEQ ID NO: 610324 - DNA, 60 bp, Artificial; identical to SEQ ID NO: 473766
  Synthetic oligonucleotide

SEQ ID NO: 610325 - DNA, 60 bp, Artificial; identical to SEQ ID NO: 473769
  Synthetic oligonucleotide

SEQ ID NO: 610326 - DNA, 54 bp, Artificial; identical to SEQ ID NO: 473771
  Synthetic oligonucleotide

SEQ ID NO: 610327 - DNA, 56 bp, Artificial; identical to SEQ ID NO: 10233
  Synthetic oligonucleotide

SEQ ID NO: 610328 - DNA, 55 bp, Artificial; identical to SEQ ID NO: 473774
  Synthetic oligonucleotide

SEQ ID NO: 610329 - DNA, 58 bp, Artificial; identical to SEQ ID NO: 473775
  Synthetic oligonucleotide

SEQ ID NO: 610330 - DNA, 60 bp, Artificial; identical to SEQ ID NO: 473777
  Synthetic oligonucleotide

SEQ ID NO: 610331 - DNA, 53 bp, Artificial; identical to SEQ ID NO: 10618
  Synthetic oligonucleotide

SEQ ID NO: 610332 - DNA, 60 bp, Artificial; identical to SEQ ID NO: 473779
  Synthetic oligonucleotide

SEQ ID NO: 610333 - DNA, 57 bp, Artificial; identical to SEQ ID NO: 473786
  Synthetic oligonucleotide

SEQ ID NO: 610334 - DNA, 60 bp, Artificial; identical to SEQ ID NO: 473787
  Synthetic oligonucleotide

SEQ ID NO: 610335 - DNA, 60 bp, Artificial; identical to SEQ ID NO: 473788
  Synthetic oligonucleotide

SEQ ID NO: 610336 - DNA, 60 bp, Artificial; identical to SEQ ID NO: 473789
  Synthetic oligonucleotide

SEQ ID NO: 610337 - DNA, 60 bp, Artificial; identical to SEQ ID NO: 473790
  Synthetic oligonucleotide

SEQ ID NO: 610338 - DNA, 60 bp, Artificial; identical to SEQ ID NO: 15459
  Synthetic oligonucleotide

SEQ ID NO: 610339 - DNA, 54 bp, Artificial; identical to SEQ ID NO: 473792
  Synthetic oligonucleotide

SEQ ID NO: 610340 - DNA, 58 bp, Artificial; identical to SEQ ID NO: 473793
  Synthetic oligonucleotide

SEQ ID NO: 610341 - DNA, 58 bp, Artificial; identical to SEQ ID NO: 473795
  Synthetic oligonucleotide

SEQ ID NO: 610342 - DNA, 60 bp, Artificial; identical to SEQ ID NO: 473798
  Synthetic oligonucleotide

SEQ ID NO: 610343 - DNA, 55 bp, Artificial; identical to SEQ ID NO: 473799
  Synthetic oligonucleotide

SEQ ID NO: 610344 - DNA, 56 bp, Artificial; identical to SEQ ID NO: 473800
  Synthetic oligonucleotide

SEQ ID NO: 610345 - DNA, 55 bp, Artificial; identical to SEQ ID NO: 473804
  Synthetic oligonucleotide

SEQ ID NO: 610346 - DNA, 51 bp, Artificial; identical to SEQ ID NO: 473807
  Synthetic oligonucleotide

SEQ ID NO: 610347 - DNA, 55 bp, Artificial; identical to SEQ ID NO: 473809
  Synthetic oligonucleotide

SEQ ID NO: 610348 - DNA, 60 bp, Artificial; identical to SEQ ID NO: 473811
  Synthetic oligonucleotide

SEQ ID NO: 610349 - DNA, 60 bp, Artificial; identical to SEQ ID NO: 473812
  Synthetic oligonucleotide

SEQ ID NO: 610350 - DNA, 59 bp, Artificial; identical to SEQ ID NO: 473813
  Synthetic oligonucleotide

SEQ ID NO: 610351 - DNA, 59 bp, Artificial; identical to SEQ ID NO: 473814
  Synthetic oligonucleotide

SEQ ID NO: 610352 - DNA, 60 bp, Artificial; identical to SEQ ID NO: 9743
  Synthetic oligonucleotide

SEQ ID NO: 610353 - DNA, 55 bp, Artificial; identical to SEQ ID NO: 473819
  Synthetic oligonucleotide

SEQ ID NO: 610354 - DNA, 60 bp, Artificial; identical to SEQ ID NO: 14379
  Synthetic oligonucleotide

SEQ ID NO: 610355 - DNA, 59 bp, Artificial; identical to SEQ ID NO: 473821
  Synthetic oligonucleotide

SEQ ID NO: 610356 - DNA, 54 bp, Artificial; identical to SEQ ID NO: 473824
  Synthetic oligonucleotide

SEQ ID NO: 610357 - DNA, 55 bp, Artificial; identical to SEQ ID NO: 473826
  Synthetic oligonucleotide

SEQ ID NO: 610358 - DNA, 55 bp, Artificial; identical to SEQ ID NO: 473827
  Synthetic oligonucleotide

SEQ ID NO: 610359 - DNA, 55 bp, Artificial; identical to SEQ ID NO: 473828
  Synthetic oligonucleotide

SEQ ID NO: 610360 - DNA, 60 bp, Artificial; identical to SEQ ID NO: 12980
  Synthetic oligonucleotide

SEQ ID NO: 610361 - DNA, 54 bp, Artificial; identical to SEQ ID NO: 473832
  Synthetic oligonucleotide

SEQ ID NO: 610362 - DNA, 56 bp, Artificial; identical to SEQ ID NO: 473834
  Synthetic oligonucleotide

SEQ ID NO: 610363 - DNA, 58 bp, Artificial; identical to SEQ ID NO: 15354
  Synthetic oligonucleotide

SEQ ID NO: 610364 - DNA, 60 bp, Artificial; identical to SEQ ID NO: 473836
  Synthetic oligonucleotide

SEQ ID NO: 610365 - DNA, 60 bp, Artificial; identical to SEQ ID NO: 473837
  Synthetic oligonucleotide

SEQ ID NO: 610366 - DNA, 58 bp, Artificial; identical to SEQ ID NO: 473838
  Synthetic oligonucleotide

SEQ ID NO: 610367 - DNA, 58 bp, Artificial; identical to SEQ ID NO: 473839
  Synthetic oligonucleotide

SEQ ID NO: 610368 - DNA, 60 bp, Artificial; identical to SEQ ID NO: 473841
  Synthetic oligonucleotide

SEQ ID NO: 610369 - DNA, 55 bp, Artificial; identical to SEQ ID NO: 473842
  Synthetic oligonucleotide

SEQ ID NO: 610370 - DNA, 59 bp, Artificial; identical to SEQ ID NO: 473847
  Synthetic oligonucleotide

SEQ ID NO: 610371 - DNA, 60 bp, Artificial; identical to SEQ ID NO: 473849
  Synthetic oligonucleotide

SEQ ID NO: 610372 - DNA, 60 bp, Artificial; identical to SEQ ID NO: 473853
  Synthetic oligonucleotide

SEQ ID NO: 610373 - DNA, 60 bp, Artificial; identical to SEQ ID NO: 473855
  Synthetic oligonucleotide

SEQ ID NO: 610374 - DNA, 50 bp, Artificial; identical to SEQ ID NO: 473857
  Synthetic oligonucleotide

SEQ ID NO: 610375 - DNA, 52 bp, Artificial; identical to SEQ ID NO: 473858
  Synthetic oligonucleotide

SEQ ID NO: 610376 - DNA, 60 bp, Artificial; identical to SEQ ID NO: 473859
  Synthetic oligonucleotide

SEQ ID NO: 610377 - DNA, 55 bp, Artificial; identical to SEQ ID NO: 473860
  Synthetic oligonucleotide

SEQ ID NO: 610378 - DNA, 53 bp, Artificial; identical to SEQ ID NO: 473863
  Synthetic oligonucleotide

SEQ ID NO: 610379 - DNA, 55 bp, Artificial; identical to SEQ ID NO: 473864
  Synthetic oligonucleotide

SEQ ID NO: 610380 - DNA, 50 bp, Artificial; identical to SEQ ID NO: 473866
  Synthetic oligonucleotide

SEQ ID NO: 610381 - DNA, 60 bp, Artificial; identical to SEQ ID NO: 473868
  Synthetic oligonucleotide

SEQ ID NO: 610382 - DNA, 60 bp, Artificial; identical to SEQ ID NO: 13611
  Synthetic oligonucleotide

SEQ ID NO: 610383 - DNA, 55 bp, Artificial; identical to SEQ ID NO: 473870
  Synthetic oligonucleotide

SEQ ID NO: 610384 - DNA, 60 bp, Artificial; identical to SEQ ID NO: 473872
  Synthetic oligonucleotide

SEQ ID NO: 610385 - DNA, 60 bp, Artificial; identical to SEQ ID NO: 473883
  Synthetic oligonucleotide

SEQ ID NO: 610386 - DNA, 60 bp, Artificial; identical to SEQ ID NO: 473884
  Synthetic oligonucleotide

SEQ ID NO: 610387 - DNA, 59 bp, Artificial; identical to SEQ ID NO: 473885
  Synthetic oligonucleotide

SEQ ID NO: 610388 - DNA, 57 bp, Artificial; identical to SEQ ID NO: 473886
  Synthetic oligonucleotide

SEQ ID NO: 610389 - DNA, 56 bp, Artificial; identical to SEQ ID NO: 11438
  Synthetic oligonucleotide

SEQ ID NO: 610390 - DNA, 55 bp, Artificial; identical to SEQ ID NO: 473888
  Synthetic oligonucleotide

SEQ ID NO: 610391 - DNA, 60 bp, Artificial; identical to SEQ ID NO: 473896
  Synthetic oligonucleotide

SEQ ID NO: 610392 - DNA, 60 bp, Artificial; identical to SEQ ID NO: 473899
  Synthetic oligonucleotide

SEQ ID NO: 610393 - DNA, 54 bp, Artificial; identical to SEQ ID NO: 20369
  Synthetic oligonucleotide

SEQ ID NO: 610394 - DNA, 60 bp, Artificial; identical to SEQ ID NO: 473900
  Synthetic oligonucleotide

SEQ ID NO: 610395 - DNA, 60 bp, Artificial; identical to SEQ ID NO: 473902
  Synthetic oligonucleotide

SEQ ID NO: 610396 - DNA, 60 bp, Artificial; identical to SEQ ID NO: 473903
  Synthetic oligonucleotide

SEQ ID NO: 610397 - DNA, 55 bp, Artificial; identical to SEQ ID NO: 473906
  Synthetic oligonucleotide

SEQ ID NO: 610398 - DNA, 60 bp, Artificial; identical to SEQ ID NO: 473913
  Synthetic oligonucleotide

SEQ ID NO: 610399 - DNA, 60 bp, Artificial; identical to SEQ ID NO: 473918
  Synthetic oligonucleotide

SEQ ID NO: 610400 - DNA, 60 bp, Artificial; identical to SEQ ID NO: 473919
  Synthetic oligonucleotide

SEQ ID NO: 610401 - DNA, 60 bp, Artificial; identical to SEQ ID NO: 473922
  Synthetic oligonucleotide

SEQ ID NO: 610402 - DNA, 56 bp, Artificial; identical to SEQ ID NO: 473924
  Synthetic oligonucleotide

SEQ ID NO: 610403 - DNA, 52 bp, Artificial; identical to SEQ ID NO: 473925
  Synthetic oligonucleotide

SEQ ID NO: 610404 - DNA, 57 bp, Artificial; identical to SEQ ID NO: 473929
  Synthetic oligonucleotide

SEQ ID NO: 610405 - DNA, 59 bp, Artificial; identical to SEQ ID NO: 473935
  Synthetic oligonucleotide

SEQ ID NO: 610406 - DNA, 60 bp, Artificial; identical to SEQ ID NO: 473936
  Synthetic oligonucleotide

SEQ ID NO: 610407 - DNA, 55 bp, Artificial; identical to SEQ ID NO: 473941
  Synthetic oligonucleotide

SEQ ID NO: 610408 - DNA, 50 bp, Artificial; identical to SEQ ID NO: 473942
  Synthetic oligonucleotide

SEQ ID NO: 610409 - DNA, 56 bp, Artificial; identical to SEQ ID NO: 473946
  Synthetic oligonucleotide

SEQ ID NO: 610410 - DNA, 60 bp, Artificial; identical to SEQ ID NO: 473954
  Synthetic oligonucleotide

SEQ ID NO: 610411 - DNA, 60 bp, Artificial; identical to SEQ ID NO: 473959
  Synthetic oligonucleotide

SEQ ID NO: 610412 - DNA, 60 bp, Artificial; identical to SEQ ID NO: 473960
  Synthetic oligonucleotide

SEQ ID NO: 610413 - DNA, 60 bp, Artificial; identical to SEQ ID NO: 473961
  Synthetic oligonucleotide

SEQ ID NO: 610414 - DNA, 60 bp, Artificial; identical to SEQ ID NO: 473968
  Synthetic oligonucleotide

SEQ ID NO: 610415 - DNA, 60 bp, Artificial; identical to SEQ ID NO: 473970
  Synthetic oligonucleotide

SEQ ID NO: 610416 - DNA, 60 bp, Artificial; identical to SEQ ID NO: 473973
  Synthetic oligonucleotide

SEQ ID NO: 610417 - DNA, 60 bp, Artificial; identical to SEQ ID NO: 473975
  Synthetic oligonucleotide

SEQ ID NO: 610418 - DNA, 59 bp, Artificial; identical to SEQ ID NO: 473979
  Synthetic oligonucleotide

SEQ ID NO: 610419 - DNA, 55 bp, Artificial; identical to SEQ ID NO: 473980
  Synthetic oligonucleotide

SEQ ID NO: 610420 - DNA, 51 bp, Artificial; identical to SEQ ID NO: 473981
  Synthetic oligonucleotide

SEQ ID NO: 610421 - DNA, 60 bp, Artificial; identical to SEQ ID NO: 12101
  Synthetic oligonucleotide

SEQ ID NO: 610422 - DNA, 60 bp, Artificial; identical to SEQ ID NO: 473985
  Synthetic oligonucleotide

SEQ ID NO: 610423 - DNA, 59 bp, Artificial; identical to SEQ ID NO: 473988
  Synthetic oligonucleotide

SEQ ID NO: 610424 - DNA, 60 bp, Artificial; identical to SEQ ID NO: 473989
  Synthetic oligonucleotide

SEQ ID NO: 610425 - DNA, 56 bp, Artificial; identical to SEQ ID NO: 473990
  Synthetic oligonucleotide

SEQ ID NO: 610426 - DNA, 59 bp, Artificial; identical to SEQ ID NO: 473992
  Synthetic oligonucleotide

SEQ ID NO: 610427 - DNA, 60 bp, Artificial; identical to SEQ ID NO: 7828
  Synthetic oligonucleotide

SEQ ID NO: 610428 - DNA, 55 bp, Artificial; identical to SEQ ID NO: 473995
  Synthetic oligonucleotide

SEQ ID NO: 610429 - DNA, 60 bp, Artificial; identical to SEQ ID NO: 6297
  Synthetic oligonucleotide

SEQ ID NO: 610430 - DNA, 55 bp, Artificial; identical to SEQ ID NO: 473998
  Synthetic oligonucleotide

SEQ ID NO: 610431 - DNA, 55 bp, Artificial; identical to SEQ ID NO: 474008
  Synthetic oligonucleotide

SEQ ID NO: 610432 - DNA, 60 bp, Artificial; identical to SEQ ID NO: 474011
  Synthetic oligonucleotide

SEQ ID NO: 610433 - DNA, 55 bp, Artificial; identical to SEQ ID NO: 474013
  Synthetic oligonucleotide

SEQ ID NO: 610434 - DNA, 52 bp, Artificial; identical to SEQ ID NO: 474015
  Synthetic oligonucleotide

SEQ ID NO: 610435 - DNA, 55 bp, Artificial; identical to SEQ ID NO: 474016
  Synthetic oligonucleotide

SEQ ID NO: 610436 - DNA, 58 bp, Artificial; identical to SEQ ID NO: 474022
  Synthetic oligonucleotide

SEQ ID NO: 610437 - DNA, 60 bp, Artificial; identical to SEQ ID NO: 9895
  Synthetic oligonucleotide

SEQ ID NO: 610438 - DNA, 58 bp, Artificial; identical to SEQ ID NO: 17480
  Synthetic oligonucleotide

SEQ ID NO: 610439 - DNA, 56 bp, Artificial; identical to SEQ ID NO: 474029
  Synthetic oligonucleotide

SEQ ID NO: 610440 - DNA, 56 bp, Artificial; identical to SEQ ID NO: 474035
  Synthetic oligonucleotide

SEQ ID NO: 610441 - DNA, 60 bp, Artificial; identical to SEQ ID NO: 474036
  Synthetic oligonucleotide

SEQ ID NO: 610442 - DNA, 60 bp, Artificial; identical to SEQ ID NO: 474038
  Synthetic oligonucleotide

SEQ ID NO: 610443 - DNA, 60 bp, Artificial; identical to SEQ ID NO: 474040
  Synthetic oligonucleotide

SEQ ID NO: 610444 - DNA, 57 bp, Artificial; identical to SEQ ID NO: 474041
  Synthetic oligonucleotide

SEQ ID NO: 610445 - DNA, 60 bp, Artificial; identical to SEQ ID NO: 474044
  Synthetic oligonucleotide

SEQ ID NO: 610446 - DNA, 60 bp, Artificial; identical to SEQ ID NO: 474048
  Synthetic oligonucleotide

SEQ ID NO: 610447 - DNA, 59 bp, Artificial; identical to SEQ ID NO: 474058
  Synthetic oligonucleotide

SEQ ID NO: 610448 - DNA, 55 bp, Artificial; identical to SEQ ID NO: 474059
  Synthetic oligonucleotide

SEQ ID NO: 610449 - DNA, 60 bp, Artificial; identical to SEQ ID NO: 474061
  Synthetic oligonucleotide

SEQ ID NO: 610450 - DNA, 55 bp, Artificial; identical to SEQ ID NO: 474064
  Synthetic oligonucleotide

SEQ ID NO: 610451 - DNA, 59 bp, Artificial; identical to SEQ ID NO: 474066
  Synthetic oligonucleotide

SEQ ID NO: 610452 - DNA, 60 bp, Artificial; identical to SEQ ID NO: 474068
  Synthetic oligonucleotide

SEQ ID NO: 610453 - DNA, 59 bp, Artificial; identical to SEQ ID NO: 474071
  Synthetic oligonucleotide

SEQ ID NO: 610454 - DNA, 60 bp, Artificial; identical to SEQ ID NO: 474072
  Synthetic oligonucleotide

SEQ ID NO: 610455 - DNA, 60 bp, Artificial; identical to SEQ ID NO: 474073
  Synthetic oligonucleotide

SEQ ID NO: 610456 - DNA, 55 bp, Artificial; identical to SEQ ID NO: 474075
  Synthetic oligonucleotide

SEQ ID NO: 610457 - DNA, 57 bp, Artificial; identical to SEQ ID NO: 474076
  Synthetic oligonucleotide

SEQ ID NO: 610458 - DNA, 52 bp, Artificial; identical to SEQ ID NO: 474078
  Synthetic oligonucleotide

SEQ ID NO: 610459 - DNA, 58 bp, Artificial; identical to SEQ ID NO: 474080
  Synthetic oligonucleotide

SEQ ID NO: 610460 - DNA, 55 bp, Artificial; identical to SEQ ID NO: 474081
  Synthetic oligonucleotide

SEQ ID NO: 610461 - DNA, 60 bp, Artificial; identical to SEQ ID NO: 474083
  Synthetic oligonucleotide

SEQ ID NO: 610462 - DNA, 53 bp, Artificial; identical to SEQ ID NO: 474092
  Synthetic oligonucleotide

SEQ ID NO: 610463 - DNA, 58 bp, Artificial; identical to SEQ ID NO: 474096
  Synthetic oligonucleotide

SEQ ID NO: 610464 - DNA, 57 bp, Artificial; identical to SEQ ID NO: 16021
  Synthetic oligonucleotide

SEQ ID NO: 610465 - DNA, 53 bp, Artificial; identical to SEQ ID NO: 474098
  Synthetic oligonucleotide

SEQ ID NO: 610466 - DNA, 56 bp, Artificial; identical to SEQ ID NO: 474102
  Synthetic oligonucleotide

SEQ ID NO: 610467 - DNA, 60 bp, Artificial; identical to SEQ ID NO: 474103
  Synthetic oligonucleotide

SEQ ID NO: 610468 - DNA, 60 bp, Artificial; identical to SEQ ID NO: 474106
  Synthetic oligonucleotide

SEQ ID NO: 610469 - DNA, 55 bp, Artificial; identical to SEQ ID NO: 474107
  Synthetic oligonucleotide

SEQ ID NO: 610470 - DNA, 55 bp, Artificial; identical to SEQ ID NO: 474108
  Synthetic oligonucleotide

SEQ ID NO: 610471 - DNA, 60 bp, Artificial; identical to SEQ ID NO: 474109
  Synthetic oligonucleotide

SEQ ID NO: 610472 - DNA, 60 bp, Artificial; identical to SEQ ID NO: 474114
  Synthetic oligonucleotide

SEQ ID NO: 610473 - DNA, 60 bp, Artificial; identical to SEQ ID NO: 474115
  Synthetic oligonucleotide

SEQ ID NO: 610474 - DNA, 53 bp, Artificial; identical to SEQ ID NO: 474123
  Synthetic oligonucleotide

SEQ ID NO: 610475 - DNA, 59 bp, Artificial; identical to SEQ ID NO: 474125
  Synthetic oligonucleotide

SEQ ID NO: 610476 - DNA, 60 bp, Artificial; identical to SEQ ID NO: 474126
  Synthetic oligonucleotide

SEQ ID NO: 610477 - DNA, 60 bp, Artificial; identical to SEQ ID NO: 474127
  Synthetic oligonucleotide

SEQ ID NO: 610478 - DNA, 57 bp, Artificial; identical to SEQ ID NO: 474131
  Synthetic oligonucleotide

SEQ ID NO: 610479 - DNA, 55 bp, Artificial; identical to SEQ ID NO: 474132
  Synthetic oligonucleotide

SEQ ID NO: 610480 - DNA, 60 bp, Artificial; identical to SEQ ID NO: 474134
  Synthetic oligonucleotide

SEQ ID NO: 610481 - DNA, 60 bp, Artificial; identical to SEQ ID NO: 474135
  Synthetic oligonucleotide

SEQ ID NO: 610482 - DNA, 60 bp, Artificial; identical to SEQ ID NO: 474143
  Synthetic oligonucleotide

SEQ ID NO: 610483 - DNA, 58 bp, Artificial; identical to SEQ ID NO: 474147
  Synthetic oligonucleotide

SEQ ID NO: 610484 - DNA, 59 bp, Artificial; identical to SEQ ID NO: 474148
  Synthetic oligonucleotide

SEQ ID NO: 610485 - DNA, 60 bp, Artificial; identical to SEQ ID NO: 474149
  Synthetic oligonucleotide

SEQ ID NO: 610486 - DNA, 55 bp, Artificial; identical to SEQ ID NO: 474150
  Synthetic oligonucleotide

SEQ ID NO: 610487 - DNA, 52 bp, Artificial; identical to SEQ ID NO: 474151
  Synthetic oligonucleotide

SEQ ID NO: 610488 - DNA, 60 bp, Artificial; identical to SEQ ID NO: 474152
  Synthetic oligonucleotide

SEQ ID NO: 610489 - DNA, 60 bp, Artificial; identical to SEQ ID NO: 474153
  Synthetic oligonucleotide

SEQ ID NO: 610490 - DNA, 51 bp, Artificial; identical to SEQ ID NO: 474155
  Synthetic oligonucleotide

SEQ ID NO: 610491 - DNA, 53 bp, Artificial; identical to SEQ ID NO: 7777
  Synthetic oligonucleotide

SEQ ID NO: 610492 - DNA, 52 bp, Artificial; identical to SEQ ID NO: 13314
  Synthetic oligonucleotide

SEQ ID NO: 610493 - DNA, 60 bp, Artificial; identical to SEQ ID NO: 474157
  Synthetic oligonucleotide

SEQ ID NO: 610494 - DNA, 60 bp, Artificial; identical to SEQ ID NO: 474163
  Synthetic oligonucleotide

SEQ ID NO: 610495 - DNA, 50 bp, Artificial; identical to SEQ ID NO: 474164
  Synthetic oligonucleotide

SEQ ID NO: 610496 - DNA, 56 bp, Artificial; identical to SEQ ID NO: 474166
  Synthetic oligonucleotide

SEQ ID NO: 610497 - DNA, 60 bp, Artificial; identical to SEQ ID NO: 474168
  Synthetic oligonucleotide

SEQ ID NO: 610498 - DNA, 60 bp, Artificial; identical to SEQ ID NO: 474169
  Synthetic oligonucleotide

SEQ ID NO: 610499 - DNA, 57 bp, Artificial; identical to SEQ ID NO: 474172
  Synthetic oligonucleotide

SEQ ID NO: 610500 - DNA, 59 bp, Artificial; identical to SEQ ID NO: 474178
  Synthetic oligonucleotide

SEQ ID NO: 610501 - DNA, 60 bp, Artificial; identical to SEQ ID NO: 10316
  Synthetic oligonucleotide

SEQ ID NO: 610502 - DNA, 58 bp, Artificial; identical to SEQ ID NO: 474179
  Synthetic oligonucleotide

SEQ ID NO: 610503 - DNA, 60 bp, Artificial; identical to SEQ ID NO: 474180
  Synthetic oligonucleotide

SEQ ID NO: 610504 - DNA, 59 bp, Artificial; identical to SEQ ID NO: 474181
  Synthetic oligonucleotide

SEQ ID NO: 610505 - DNA, 60 bp, Artificial; identical to SEQ ID NO: 474184
  Synthetic oligonucleotide

SEQ ID NO: 610506 - DNA, 60 bp, Artificial; identical to SEQ ID NO: 474186
  Synthetic oligonucleotide

SEQ ID NO: 610507 - DNA, 60 bp, Artificial; identical to SEQ ID NO: 474187
  Synthetic oligonucleotide

SEQ ID NO: 610508 - DNA, 59 bp, Artificial; identical to SEQ ID NO: 474190
  Synthetic oligonucleotide

SEQ ID NO: 610509 - DNA, 60 bp, Artificial; identical to SEQ ID NO: 474191
  Synthetic oligonucleotide

SEQ ID NO: 610510 - DNA, 60 bp, Artificial; identical to SEQ ID NO: 474193
  Synthetic oligonucleotide

SEQ ID NO: 610511 - DNA, 60 bp, Artificial; identical to SEQ ID NO: 474194
  Synthetic oligonucleotide

SEQ ID NO: 610512 - DNA, 60 bp, Artificial; identical to SEQ ID NO: 474197
  Synthetic oligonucleotide

SEQ ID NO: 610513 - DNA, 60 bp, Artificial; identical to SEQ ID NO: 474198
  Synthetic oligonucleotide

SEQ ID NO: 610514 - DNA, 60 bp, Artificial; identical to SEQ ID NO: 474209
  Synthetic oligonucleotide

SEQ ID NO: 610515 - DNA, 60 bp, Artificial; identical to SEQ ID NO: 474210
  Synthetic oligonucleotide

SEQ ID NO: 610516 - DNA, 55 bp, Artificial; identical to SEQ ID NO: 474213
  Synthetic oligonucleotide

SEQ ID NO: 610517 - DNA, 60 bp, Artificial; identical to SEQ ID NO: 474215
  Synthetic oligonucleotide

SEQ ID NO: 610518 - DNA, 57 bp, Artificial; identical to SEQ ID NO: 474218
  Synthetic oligonucleotide

SEQ ID NO: 610519 - DNA, 60 bp, Artificial; identical to SEQ ID NO: 474227
  Synthetic oligonucleotide

SEQ ID NO: 610520 - DNA, 60 bp, Artificial; identical to SEQ ID NO: 474230
  Synthetic oligonucleotide

SEQ ID NO: 610521 - DNA, 58 bp, Artificial; identical to SEQ ID NO: 474233
  Synthetic oligonucleotide

SEQ ID NO: 610522 - DNA, 52 bp, Artificial; identical to SEQ ID NO: 474235
  Synthetic oligonucleotide

SEQ ID NO: 610523 - DNA, 60 bp, Artificial; identical to SEQ ID NO: 474243
  Synthetic oligonucleotide

SEQ ID NO: 610524 - DNA, 55 bp, Artificial; identical to SEQ ID NO: 474244
  Synthetic oligonucleotide

SEQ ID NO: 610525 - DNA, 59 bp, Artificial; identical to SEQ ID NO: 474245
  Synthetic oligonucleotide

SEQ ID NO: 610526 - DNA, 55 bp, Artificial; identical to SEQ ID NO: 474247
  Synthetic oligonucleotide

SEQ ID NO: 610527 - DNA, 55 bp, Artificial; identical to SEQ ID NO: 474250
  Synthetic oligonucleotide

SEQ ID NO: 610528 - DNA, 53 bp, Artificial; identical to SEQ ID NO: 474251
  Synthetic oligonucleotide

SEQ ID NO: 610529 - DNA, 60 bp, Artificial; identical to SEQ ID NO: 474252
  Synthetic oligonucleotide

SEQ ID NO: 610530 - DNA, 60 bp, Artificial; identical to SEQ ID NO: 8731
  Synthetic oligonucleotide

SEQ ID NO: 610531 - DNA, 60 bp, Artificial; identical to SEQ ID NO: 474253
  Synthetic oligonucleotide

SEQ ID NO: 610532 - DNA, 51 bp, Artificial; identical to SEQ ID NO: 474254
  Synthetic oligonucleotide

SEQ ID NO: 610533 - DNA, 59 bp, Artificial; identical to SEQ ID NO: 474258
  Synthetic oligonucleotide

SEQ ID NO: 610534 - DNA, 60 bp, Artificial; identical to SEQ ID NO: 474262
  Synthetic oligonucleotide

SEQ ID NO: 610535 - DNA, 50 bp, Artificial; identical to SEQ ID NO: 474264
  Synthetic oligonucleotide

SEQ ID NO: 610536 - DNA, 60 bp, Artificial; identical to SEQ ID NO: 474265
  Synthetic oligonucleotide

SEQ ID NO: 610537 - DNA, 60 bp, Artificial; identical to SEQ ID NO: 474266
  Synthetic oligonucleotide

SEQ ID NO: 610538 - DNA, 60 bp, Artificial; identical to SEQ ID NO: 474267
  Synthetic oligonucleotide

SEQ ID NO: 610539 - DNA, 59 bp, Artificial; identical to SEQ ID NO: 474268
  Synthetic oligonucleotide

SEQ ID NO: 610540 - DNA, 58 bp, Artificial; identical to SEQ ID NO: 474271
  Synthetic oligonucleotide

SEQ ID NO: 610541 - DNA, 60 bp, Artificial; identical to SEQ ID NO: 474276
  Synthetic oligonucleotide

SEQ ID NO: 610542 - DNA, 60 bp, Artificial; identical to SEQ ID NO: 12325
  Synthetic oligonucleotide

SEQ ID NO: 610543 - DNA, 58 bp, Artificial; identical to SEQ ID NO: 474282
  Synthetic oligonucleotide

SEQ ID NO: 610544 - DNA, 60 bp, Artificial; identical to SEQ ID NO: 474288
  Synthetic oligonucleotide

SEQ ID NO: 610545 - DNA, 57 bp, Artificial; identical to SEQ ID NO: 474289
  Synthetic oligonucleotide

SEQ ID NO: 610546 - DNA, 56 bp, Artificial; identical to SEQ ID NO: 474293
  Synthetic oligonucleotide

SEQ ID NO: 610547 - DNA, 55 bp, Artificial; identical to SEQ ID NO: 474294
  Synthetic oligonucleotide

SEQ ID NO: 610548 - DNA, 59 bp, Artificial; identical to SEQ ID NO: 474295
  Synthetic oligonucleotide

SEQ ID NO: 610549 - DNA, 55 bp, Artificial; identical to SEQ ID NO: 474297
  Synthetic oligonucleotide

SEQ ID NO: 610550 - DNA, 59 bp, Artificial; identical to SEQ ID NO: 474298
  Synthetic oligonucleotide

SEQ ID NO: 610551 - DNA, 57 bp, Artificial; identical to SEQ ID NO: 474301
  Synthetic oligonucleotide

SEQ ID NO: 610552 - DNA, 50 bp, Artificial; identical to SEQ ID NO: 474303
  Synthetic oligonucleotide

SEQ ID NO: 610553 - DNA, 56 bp, Artificial; identical to SEQ ID NO: 474308
  Synthetic oligonucleotide

SEQ ID NO: 610554 - DNA, 55 bp, Artificial; identical to SEQ ID NO: 474309
  Synthetic oligonucleotide

SEQ ID NO: 610555 - DNA, 57 bp, Artificial; identical to SEQ ID NO: 474312
  Synthetic oligonucleotide

SEQ ID NO: 610556 - DNA, 57 bp, Artificial; identical to SEQ ID NO: 474314
  Synthetic oligonucleotide

SEQ ID NO: 610557 - DNA, 60 bp, Artificial; identical to SEQ ID NO: 474321
  Synthetic oligonucleotide

SEQ ID NO: 610558 - DNA, 57 bp, Artificial; identical to SEQ ID NO: 474324
  Synthetic oligonucleotide

SEQ ID NO: 610559 - DNA, 51 bp, Artificial; identical to SEQ ID NO: 474326
  Synthetic oligonucleotide

SEQ ID NO: 610560 - DNA, 57 bp, Artificial; identical to SEQ ID NO: 474327
  Synthetic oligonucleotide

SEQ ID NO: 610561 - DNA, 58 bp, Artificial; identical to SEQ ID NO: 474329
  Synthetic oligonucleotide

SEQ ID NO: 610562 - DNA, 54 bp, Artificial; identical to SEQ ID NO: 474331
  Synthetic oligonucleotide

SEQ ID NO: 610563 - DNA, 60 bp, Artificial; identical to SEQ ID NO: 474334
  Synthetic oligonucleotide

SEQ ID NO: 610564 - DNA, 51 bp, Artificial; identical to SEQ ID NO: 474336
  Synthetic oligonucleotide

SEQ ID NO: 610565 - DNA, 60 bp, Artificial; identical to SEQ ID NO: 474338
  Synthetic oligonucleotide

SEQ ID NO: 610566 - DNA, 59 bp, Artificial; identical to SEQ ID NO: 474340
  Synthetic oligonucleotide

SEQ ID NO: 610567 - DNA, 60 bp, Artificial; identical to SEQ ID NO: 474343
  Synthetic oligonucleotide

SEQ ID NO: 610568 - DNA, 56 bp, Artificial; identical to SEQ ID NO: 18007
  Synthetic oligonucleotide

SEQ ID NO: 610569 - DNA, 60 bp, Artificial; identical to SEQ ID NO: 474352
  Synthetic oligonucleotide

SEQ ID NO: 610570 - DNA, 60 bp, Artificial; identical to SEQ ID NO: 474354
  Synthetic oligonucleotide

SEQ ID NO: 610571 - DNA, 55 bp, Artificial; identical to SEQ ID NO: 474355
  Synthetic oligonucleotide

SEQ ID NO: 610572 - DNA, 55 bp, Artificial; identical to SEQ ID NO: 474356
  Synthetic oligonucleotide

SEQ ID NO: 610573 - DNA, 56 bp, Artificial; identical to SEQ ID NO: 474360
  Synthetic oligonucleotide

SEQ ID NO: 610574 - DNA, 60 bp, Artificial; identical to SEQ ID NO: 11742
  Synthetic oligonucleotide

SEQ ID NO: 610575 - DNA, 60 bp, Artificial; identical to SEQ ID NO: 474363
  Synthetic oligonucleotide

SEQ ID NO: 610576 - DNA, 52 bp, Artificial; identical to SEQ ID NO: 474365
  Synthetic oligonucleotide

SEQ ID NO: 610577 - DNA, 55 bp, Artificial; identical to SEQ ID NO: 474366
  Synthetic oligonucleotide

SEQ ID NO: 610578 - DNA, 60 bp, Artificial; identical to SEQ ID NO: 474374
  Synthetic oligonucleotide

SEQ ID NO: 610579 - DNA, 57 bp, Artificial; identical to SEQ ID NO: 474377
  Synthetic oligonucleotide

SEQ ID NO: 610580 - DNA, 55 bp, Artificial; identical to SEQ ID NO: 474386
  Synthetic oligonucleotide

SEQ ID NO: 610581 - DNA, 54 bp, Artificial; identical to SEQ ID NO: 474387
  Synthetic oligonucleotide

SEQ ID NO: 610582 - DNA, 60 bp, Artificial; identical to SEQ ID NO: 474388
  Synthetic oligonucleotide

SEQ ID NO: 610583 - DNA, 55 bp, Artificial; identical to SEQ ID NO: 474389
  Synthetic oligonucleotide

SEQ ID NO: 610584 - DNA, 60 bp, Artificial; identical to SEQ ID NO: 474390
  Synthetic oligonucleotide

SEQ ID NO: 610585 - DNA, 50 bp, Artificial; identical to SEQ ID NO: 474392
  Synthetic oligonucleotide

SEQ ID NO: 610586 - DNA, 60 bp, Artificial; identical to SEQ ID NO: 474394
  Synthetic oligonucleotide

SEQ ID NO: 610587 - DNA, 58 bp, Artificial; identical to SEQ ID NO: 474396
  Synthetic oligonucleotide

SEQ ID NO: 610588 - DNA, 60 bp, Artificial; identical to SEQ ID NO: 474399
  Synthetic oligonucleotide

SEQ ID NO: 610589 - DNA, 60 bp, Artificial; identical to SEQ ID NO: 474400
  Synthetic oligonucleotide

SEQ ID NO: 610590 - DNA, 60 bp, Artificial; identical to SEQ ID NO: 474401
  Synthetic oligonucleotide

SEQ ID NO: 610591 - DNA, 59 bp, Artificial; identical to SEQ ID NO: 474405
  Synthetic oligonucleotide

SEQ ID NO: 610592 - DNA, 60 bp, Artificial; identical to SEQ ID NO: 474406
  Synthetic oligonucleotide

SEQ ID NO: 610593 - DNA, 60 bp, Artificial; identical to SEQ ID NO: 14655
  Synthetic oligonucleotide

SEQ ID NO: 610594 - DNA, 54 bp, Artificial; identical to SEQ ID NO: 474408
  Synthetic oligonucleotide

SEQ ID NO: 610595 - DNA, 57 bp, Artificial; identical to SEQ ID NO: 474409
  Synthetic oligonucleotide

SEQ ID NO: 610596 - DNA, 60 bp, Artificial; identical to SEQ ID NO: 474410
  Synthetic oligonucleotide

SEQ ID NO: 610597 - DNA, 55 bp, Artificial; identical to SEQ ID NO: 474411
  Synthetic oligonucleotide

SEQ ID NO: 610598 - DNA, 58 bp, Artificial; identical to SEQ ID NO: 474412
  Synthetic oligonucleotide

SEQ ID NO: 610599 - DNA, 60 bp, Artificial; identical to SEQ ID NO: 474415
  Synthetic oligonucleotide

SEQ ID NO: 610600 - DNA, 60 bp, Artificial; identical to SEQ ID NO: 9412
  Synthetic oligonucleotide

SEQ ID NO: 610601 - DNA, 53 bp, Artificial; identical to SEQ ID NO: 14821
  Synthetic oligonucleotide

SEQ ID NO: 610602 - DNA, 60 bp, Artificial; identical to SEQ ID NO: 474419
  Synthetic oligonucleotide

SEQ ID NO: 610603 - DNA, 60 bp, Artificial; identical to SEQ ID NO: 6090
  Synthetic oligonucleotide

SEQ ID NO: 610604 - DNA, 60 bp, Artificial; identical to SEQ ID NO: 474421
  Synthetic oligonucleotide

SEQ ID NO: 610605 - DNA, 60 bp, Artificial; identical to SEQ ID NO: 474426
  Synthetic oligonucleotide

SEQ ID NO: 610606 - DNA, 59 bp, Artificial; identical to SEQ ID NO: 474428
  Synthetic oligonucleotide

SEQ ID NO: 610607 - DNA, 55 bp, Artificial; identical to SEQ ID NO: 474430
  Synthetic oligonucleotide

SEQ ID NO: 610608 - DNA, 59 bp, Artificial; identical to SEQ ID NO: 474435
  Synthetic oligonucleotide

SEQ ID NO: 610609 - DNA, 59 bp, Artificial; identical to SEQ ID NO: 474436
  Synthetic oligonucleotide

SEQ ID NO: 610610 - DNA, 60 bp, Artificial; identical to SEQ ID NO: 474437
  Synthetic oligonucleotide

SEQ ID NO: 610611 - DNA, 58 bp, Artificial; identical to SEQ ID NO: 474440
  Synthetic oligonucleotide

SEQ ID NO: 610612 - DNA, 60 bp, Artificial; identical to SEQ ID NO: 474441
  Synthetic oligonucleotide

SEQ ID NO: 610613 - DNA, 58 bp, Artificial; identical to SEQ ID NO: 474445
  Synthetic oligonucleotide

SEQ ID NO: 610614 - DNA, 60 bp, Artificial; identical to SEQ ID NO: 474446
  Synthetic oligonucleotide

SEQ ID NO: 610615 - DNA, 51 bp, Artificial; identical to SEQ ID NO: 474448
  Synthetic oligonucleotide

SEQ ID NO: 610616 - DNA, 51 bp, Artificial; identical to SEQ ID NO: 14007
  Synthetic oligonucleotide

SEQ ID NO: 610617 - DNA, 55 bp, Artificial; identical to SEQ ID NO: 474451
  Synthetic oligonucleotide

SEQ ID NO: 610618 - DNA, 60 bp, Artificial; identical to SEQ ID NO: 68258
  Synthetic oligonucleotide

SEQ ID NO: 610619 - DNA, 56 bp, Artificial; identical to SEQ ID NO: 474464
  Synthetic oligonucleotide

SEQ ID NO: 610620 - DNA, 57 bp, Artificial; identical to SEQ ID NO: 474465
  Synthetic oligonucleotide

SEQ ID NO: 610621 - DNA, 55 bp, Artificial; identical to SEQ ID NO: 474466
  Synthetic oligonucleotide

SEQ ID NO: 610622 - DNA, 60 bp, Artificial; identical to SEQ ID NO: 474468
  Synthetic oligonucleotide

SEQ ID NO: 610623 - DNA, 50 bp, Artificial; identical to SEQ ID NO: 474469
  Synthetic oligonucleotide

SEQ ID NO: 610624 - DNA, 60 bp, Artificial; identical to SEQ ID NO: 474471
  Synthetic oligonucleotide

SEQ ID NO: 610625 - DNA, 60 bp, Artificial; identical to SEQ ID NO: 474472
  Synthetic oligonucleotide

SEQ ID NO: 610626 - DNA, 59 bp, Artificial; identical to SEQ ID NO: 474476
  Synthetic oligonucleotide

SEQ ID NO: 610627 - DNA, 60 bp, Artificial; identical to SEQ ID NO: 474479
  Synthetic oligonucleotide

SEQ ID NO: 610628 - DNA, 59 bp, Artificial; identical to SEQ ID NO: 474483
  Synthetic oligonucleotide

SEQ ID NO: 610629 - DNA, 53 bp, Artificial; identical to SEQ ID NO: 474485
  Synthetic oligonucleotide

SEQ ID NO: 610630 - DNA, 54 bp, Artificial; identical to SEQ ID NO: 474492
  Synthetic oligonucleotide

SEQ ID NO: 610631 - DNA, 55 bp, Artificial; identical to SEQ ID NO: 474493
  Synthetic oligonucleotide

SEQ ID NO: 610632 - DNA, 60 bp, Artificial; identical to SEQ ID NO: 474494
  Synthetic oligonucleotide

SEQ ID NO: 610633 - DNA, 60 bp, Artificial; identical to SEQ ID NO: 474495
  Synthetic oligonucleotide

SEQ ID NO: 610634 - DNA, 60 bp, Artificial; identical to SEQ ID NO: 474498
  Synthetic oligonucleotide

SEQ ID NO: 610635 - DNA, 55 bp, Artificial; identical to SEQ ID NO: 474503
  Synthetic oligonucleotide

SEQ ID NO: 610636 - DNA, 60 bp, Artificial; identical to SEQ ID NO: 474511
  Synthetic oligonucleotide

SEQ ID NO: 610637 - DNA, 60 bp, Artificial; identical to SEQ ID NO: 474512
  Synthetic oligonucleotide

SEQ ID NO: 610638 - DNA, 53 bp, Artificial; identical to SEQ ID NO: 474513
  Synthetic oligonucleotide

SEQ ID NO: 610639 - DNA, 58 bp, Artificial; identical to SEQ ID NO: 474514
  Synthetic oligonucleotide

SEQ ID NO: 610640 - DNA, 54 bp, Artificial; identical to SEQ ID NO: 474516
  Synthetic oligonucleotide

SEQ ID NO: 610641 - DNA, 59 bp, Artificial; identical to SEQ ID NO: 474518
  Synthetic oligonucleotide

SEQ ID NO: 610642 - DNA, 54 bp, Artificial; identical to SEQ ID NO: 474519
  Synthetic oligonucleotide

SEQ ID NO: 610643 - DNA, 60 bp, Artificial; identical to SEQ ID NO: 474521
  Synthetic oligonucleotide

SEQ ID NO: 610644 - DNA, 60 bp, Artificial; identical to SEQ ID NO: 474527
  Synthetic oligonucleotide

SEQ ID NO: 610645 - DNA, 55 bp, Artificial; identical to SEQ ID NO: 474529
  Synthetic oligonucleotide

SEQ ID NO: 610646 - DNA, 57 bp, Artificial; identical to SEQ ID NO: 16294
  Synthetic oligonucleotide

SEQ ID NO: 610647 - DNA, 55 bp, Artificial; identical to SEQ ID NO: 474531
  Synthetic oligonucleotide

SEQ ID NO: 610648 - DNA, 59 bp, Artificial; identical to SEQ ID NO: 474532
  Synthetic oligonucleotide

SEQ ID NO: 610649 - DNA, 58 bp, Artificial; identical to SEQ ID NO: 15941
  Synthetic oligonucleotide

SEQ ID NO: 610650 - DNA, 60 bp, Artificial; identical to SEQ ID NO: 474542
  Synthetic oligonucleotide

SEQ ID NO: 610651 - DNA, 53 bp, Artificial; identical to SEQ ID NO: 474548
  Synthetic oligonucleotide

SEQ ID NO: 610652 - DNA, 55 bp, Artificial; identical to SEQ ID NO: 474551
  Synthetic oligonucleotide

SEQ ID NO: 610653 - DNA, 60 bp, Artificial; identical to SEQ ID NO: 474552
  Synthetic oligonucleotide

SEQ ID NO: 610654 - DNA, 55 bp, Artificial; identical to SEQ ID NO: 474554
  Synthetic oligonucleotide

SEQ ID NO: 610655 - DNA, 56 bp, Artificial; identical to SEQ ID NO: 474558
  Synthetic oligonucleotide

SEQ ID NO: 610656 - DNA, 58 bp, Artificial; identical to SEQ ID NO: 474560
  Synthetic oligonucleotide

SEQ ID NO: 610657 - DNA, 58 bp, Artificial; identical to SEQ ID NO: 474561
  Synthetic oligonucleotide

SEQ ID NO: 610658 - DNA, 58 bp, Artificial; identical to SEQ ID NO: 474562
  Synthetic oligonucleotide

SEQ ID NO: 610659 - DNA, 56 bp, Artificial; identical to SEQ ID NO: 474563
  Synthetic oligonucleotide

SEQ ID NO: 610660 - DNA, 60 bp, Artificial; identical to SEQ ID NO: 474565
  Synthetic oligonucleotide

SEQ ID NO: 610661 - DNA, 59 bp, Artificial; identical to SEQ ID NO: 474567
  Synthetic oligonucleotide

SEQ ID NO: 610662 - DNA, 60 bp, Artificial; identical to SEQ ID NO: 474568
  Synthetic oligonucleotide

SEQ ID NO: 610663 - DNA, 59 bp, Artificial; identical to SEQ ID NO: 474569
  Synthetic oligonucleotide

SEQ ID NO: 610664 - DNA, 57 bp, Artificial; identical to SEQ ID NO: 474571
  Synthetic oligonucleotide

SEQ ID NO: 610665 - DNA, 60 bp, Artificial; identical to SEQ ID NO: 474573
  Synthetic oligonucleotide

SEQ ID NO: 610666 - DNA, 60 bp, Artificial; identical to SEQ ID NO: 474575
  Synthetic oligonucleotide

SEQ ID NO: 610667 - DNA, 56 bp, Artificial; identical to SEQ ID NO: 474576
  Synthetic oligonucleotide

SEQ ID NO: 610668 - DNA, 56 bp, Artificial; identical to SEQ ID NO: 474581
  Synthetic oligonucleotide

SEQ ID NO: 610669 - DNA, 60 bp, Artificial; identical to SEQ ID NO: 474583
  Synthetic oligonucleotide

SEQ ID NO: 610670 - DNA, 59 bp, Artificial; identical to SEQ ID NO: 474585
  Synthetic oligonucleotide

SEQ ID NO: 610671 - DNA, 60 bp, Artificial; identical to SEQ ID NO: 474588
  Synthetic oligonucleotide

SEQ ID NO: 610672 - DNA, 54 bp, Artificial; identical to SEQ ID NO: 474591
  Synthetic oligonucleotide

SEQ ID NO: 610673 - DNA, 59 bp, Artificial; identical to SEQ ID NO: 474592
  Synthetic oligonucleotide

SEQ ID NO: 610674 - DNA, 60 bp, Artificial; identical to SEQ ID NO: 15032
  Synthetic oligonucleotide

SEQ ID NO: 610675 - DNA, 59 bp, Artificial; identical to SEQ ID NO: 474593
  Synthetic oligonucleotide

SEQ ID NO: 610676 - DNA, 50 bp, Artificial; identical to SEQ ID NO: 474594
  Synthetic oligonucleotide

SEQ ID NO: 610677 - DNA, 58 bp, Artificial; identical to SEQ ID NO: 474595
  Synthetic oligonucleotide

SEQ ID NO: 610678 - DNA, 60 bp, Artificial; identical to SEQ ID NO: 474597
  Synthetic oligonucleotide

SEQ ID NO: 610679 - DNA, 60 bp, Artificial; identical to SEQ ID NO: 474599
  Synthetic oligonucleotide

SEQ ID NO: 610680 - DNA, 51 bp, Artificial; identical to SEQ ID NO: 474600
  Synthetic oligonucleotide

SEQ ID NO: 610681 - DNA, 55 bp, Artificial; identical to SEQ ID NO: 474604
  Synthetic oligonucleotide

SEQ ID NO: 610682 - DNA, 51 bp, Artificial; identical to SEQ ID NO: 474608
  Synthetic oligonucleotide

SEQ ID NO: 610683 - DNA, 58 bp, Artificial; identical to SEQ ID NO: 474609
  Synthetic oligonucleotide

SEQ ID NO: 610684 - DNA, 59 bp, Artificial; identical to SEQ ID NO: 474610
  Synthetic oligonucleotide

SEQ ID NO: 610685 - DNA, 60 bp, Artificial; identical to SEQ ID NO: 474612
  Synthetic oligonucleotide

SEQ ID NO: 610686 - DNA, 60 bp, Artificial; identical to SEQ ID NO: 474613
  Synthetic oligonucleotide

SEQ ID NO: 610687 - DNA, 60 bp, Artificial; identical to SEQ ID NO: 474614
  Synthetic oligonucleotide

SEQ ID NO: 610688 - DNA, 55 bp, Artificial; identical to SEQ ID NO: 474618
  Synthetic oligonucleotide

SEQ ID NO: 610689 - DNA, 55 bp, Artificial; identical to SEQ ID NO: 474620
  Synthetic oligonucleotide

SEQ ID NO: 610690 - DNA, 60 bp, Artificial; identical to SEQ ID NO: 474622
  Synthetic oligonucleotide

SEQ ID NO: 610691 - DNA, 56 bp, Artificial; identical to SEQ ID NO: 474625
  Synthetic oligonucleotide

SEQ ID NO: 610692 - DNA, 59 bp, Artificial; identical to SEQ ID NO: 474629
  Synthetic oligonucleotide

SEQ ID NO: 610693 - DNA, 58 bp, Artificial; identical to SEQ ID NO: 474635
  Synthetic oligonucleotide

SEQ ID NO: 610694 - DNA, 56 bp, Artificial; identical to SEQ ID NO: 474640
  Synthetic oligonucleotide

SEQ ID NO: 610695 - DNA, 51 bp, Artificial; identical to SEQ ID NO: 474646
  Synthetic oligonucleotide

SEQ ID NO: 610696 - DNA, 59 bp, Artificial; identical to SEQ ID NO: 474647
  Synthetic oligonucleotide

SEQ ID NO: 610697 - DNA, 60 bp, Artificial; identical to SEQ ID NO: 109837
  Synthetic oligonucleotide

SEQ ID NO: 610698 - DNA, 55 bp, Artificial; identical to SEQ ID NO: 474648
  Synthetic oligonucleotide

SEQ ID NO: 610699 - DNA, 55 bp, Artificial; identical to SEQ ID NO: 474650
  Synthetic oligonucleotide

SEQ ID NO: 610700 - DNA, 60 bp, Artificial; identical to SEQ ID NO: 474653
  Synthetic oligonucleotide

SEQ ID NO: 610701 - DNA, 60 bp, Artificial; identical to SEQ ID NO: 474654
  Synthetic oligonucleotide

SEQ ID NO: 610702 - DNA, 60 bp, Artificial; identical to SEQ ID NO: 474655
  Synthetic oligonucleotide

SEQ ID NO: 610703 - DNA, 60 bp, Artificial; identical to SEQ ID NO: 5783
  Synthetic oligonucleotide

SEQ ID NO: 610704 - DNA, 60 bp, Artificial; identical to SEQ ID NO: 474658
  Synthetic oligonucleotide

SEQ ID NO: 610705 - DNA, 55 bp, Artificial; identical to SEQ ID NO: 474661
  Synthetic oligonucleotide

SEQ ID NO: 610706 - DNA, 60 bp, Artificial; identical to SEQ ID NO: 474663
  Synthetic oligonucleotide

SEQ ID NO: 610707 - DNA, 52 bp, Artificial; identical to SEQ ID NO: 474668
  Synthetic oligonucleotide

SEQ ID NO: 610708 - DNA, 60 bp, Artificial; identical to SEQ ID NO: 87306
  Synthetic oligonucleotide

SEQ ID NO: 610709 - DNA, 55 bp, Artificial; identical to SEQ ID NO: 474673
  Synthetic oligonucleotide

SEQ ID NO: 610710 - DNA, 55 bp, Artificial; identical to SEQ ID NO: 474674
  Synthetic oligonucleotide

SEQ ID NO: 610711 - DNA, 54 bp, Artificial; identical to SEQ ID NO: 474677
  Synthetic oligonucleotide

SEQ ID NO: 610712 - DNA, 56 bp, Artificial; identical to SEQ ID NO: 474681
  Synthetic oligonucleotide

SEQ ID NO: 610713 - DNA, 55 bp, Artificial; identical to SEQ ID NO: 474682
  Synthetic oligonucleotide

SEQ ID NO: 610714 - DNA, 53 bp, Artificial; identical to SEQ ID NO: 474683
  Synthetic oligonucleotide

SEQ ID NO: 610715 - DNA, 56 bp, Artificial; identical to SEQ ID NO: 474686
  Synthetic oligonucleotide

SEQ ID NO: 610716 - DNA, 60 bp, Artificial; identical to SEQ ID NO: 474688
  Synthetic oligonucleotide

SEQ ID NO: 610717 - DNA, 60 bp, Artificial; identical to SEQ ID NO: 474692
  Synthetic oligonucleotide

SEQ ID NO: 610718 - DNA, 54 bp, Artificial; identical to SEQ ID NO: 18735
  Synthetic oligonucleotide

SEQ ID NO: 610719 - DNA, 55 bp, Artificial; identical to SEQ ID NO: 474694
  Synthetic oligonucleotide

SEQ ID NO: 610720 - DNA, 55 bp, Artificial; identical to SEQ ID NO: 474698
  Synthetic oligonucleotide

SEQ ID NO: 610721 - DNA, 56 bp, Artificial; identical to SEQ ID NO: 474699
  Synthetic oligonucleotide

SEQ ID NO: 610722 - DNA, 60 bp, Artificial; identical to SEQ ID NO: 474700
  Synthetic oligonucleotide

SEQ ID NO: 610723 - DNA, 58 bp, Artificial; identical to SEQ ID NO: 474704
  Synthetic oligonucleotide

SEQ ID NO: 610724 - DNA, 54 bp, Artificial; identical to SEQ ID NO: 474711
  Synthetic oligonucleotide

SEQ ID NO: 610725 - DNA, 60 bp, Artificial; identical to SEQ ID NO: 474714
  Synthetic oligonucleotide

SEQ ID NO: 610726 - DNA, 60 bp, Artificial; identical to SEQ ID NO: 474715
  Synthetic oligonucleotide

SEQ ID NO: 610727 - DNA, 55 bp, Artificial; identical to SEQ ID NO: 474717
  Synthetic oligonucleotide

SEQ ID NO: 610728 - DNA, 60 bp, Artificial; identical to SEQ ID NO: 474720
  Synthetic oligonucleotide

SEQ ID NO: 610729 - DNA, 58 bp, Artificial; identical to SEQ ID NO: 474721
  Synthetic oligonucleotide

SEQ ID NO: 610730 - DNA, 60 bp, Artificial; identical to SEQ ID NO: 474722
  Synthetic oligonucleotide

SEQ ID NO: 610731 - DNA, 51 bp, Artificial; identical to SEQ ID NO: 474726
  Synthetic oligonucleotide

SEQ ID NO: 610732 - DNA, 55 bp, Artificial; identical to SEQ ID NO: 474729
  Synthetic oligonucleotide

SEQ ID NO: 610733 - DNA, 53 bp, Artificial; identical to SEQ ID NO: 474730
  Synthetic oligonucleotide

SEQ ID NO: 610734 - DNA, 60 bp, Artificial; identical to SEQ ID NO: 474736
  Synthetic oligonucleotide

SEQ ID NO: 610735 - DNA, 60 bp, Artificial; identical to SEQ ID NO: 474737
  Synthetic oligonucleotide

SEQ ID NO: 610736 - DNA, 60 bp, Artificial; identical to SEQ ID NO: 474738
  Synthetic oligonucleotide

SEQ ID NO: 610737 - DNA, 60 bp, Artificial; identical to SEQ ID NO: 7772
  Synthetic oligonucleotide

SEQ ID NO: 610738 - DNA, 55 bp, Artificial; identical to SEQ ID NO: 474739
  Synthetic oligonucleotide

SEQ ID NO: 610739 - DNA, 54 bp, Artificial; identical to SEQ ID NO: 474741
  Synthetic oligonucleotide

SEQ ID NO: 610740 - DNA, 57 bp, Artificial; identical to SEQ ID NO: 474743
  Synthetic oligonucleotide

SEQ ID NO: 610741 - DNA, 60 bp, Artificial; identical to SEQ ID NO: 474745
  Synthetic oligonucleotide

SEQ ID NO: 610742 - DNA, 57 bp, Artificial; identical to SEQ ID NO: 474746
  Synthetic oligonucleotide

SEQ ID NO: 610743 - DNA, 59 bp, Artificial; identical to SEQ ID NO: 474748
  Synthetic oligonucleotide

SEQ ID NO: 610744 - DNA, 60 bp, Artificial; identical to SEQ ID NO: 474749
  Synthetic oligonucleotide

SEQ ID NO: 610745 - DNA, 60 bp, Artificial; identical to SEQ ID NO: 474750
  Synthetic oligonucleotide

SEQ ID NO: 610746 - DNA, 58 bp, Artificial; identical to SEQ ID NO: 474751
  Synthetic oligonucleotide

SEQ ID NO: 610747 - DNA, 60 bp, Artificial; identical to SEQ ID NO: 474753
  Synthetic oligonucleotide

SEQ ID NO: 610748 - DNA, 55 bp, Artificial; identical to SEQ ID NO: 474755
  Synthetic oligonucleotide

SEQ ID NO: 610749 - DNA, 60 bp, Artificial; identical to SEQ ID NO: 474763
  Synthetic oligonucleotide

SEQ ID NO: 610750 - DNA, 60 bp, Artificial; identical to SEQ ID NO: 474765
  Synthetic oligonucleotide

SEQ ID NO: 610751 - DNA, 50 bp, Artificial; identical to SEQ ID NO: 474770
  Synthetic oligonucleotide

SEQ ID NO: 610752 - DNA, 60 bp, Artificial; identical to SEQ ID NO: 474781
  Synthetic oligonucleotide

SEQ ID NO: 610753 - DNA, 60 bp, Artificial; identical to SEQ ID NO: 474784
  Synthetic oligonucleotide

SEQ ID NO: 610754 - DNA, 55 bp, Artificial; identical to SEQ ID NO: 474787
  Synthetic oligonucleotide

SEQ ID NO: 610755 - DNA, 52 bp, Artificial; identical to SEQ ID NO: 474789
  Synthetic oligonucleotide

SEQ ID NO: 610756 - DNA, 55 bp, Artificial; identical to SEQ ID NO: 474790
  Synthetic oligonucleotide

SEQ ID NO: 610757 - DNA, 60 bp, Artificial; identical to SEQ ID NO: 474793
  Synthetic oligonucleotide

SEQ ID NO: 610758 - DNA, 60 bp, Artificial; identical to SEQ ID NO: 474796
  Synthetic oligonucleotide

SEQ ID NO: 610759 - DNA, 57 bp, Artificial; identical to SEQ ID NO: 474798
  Synthetic oligonucleotide

SEQ ID NO: 610760 - DNA, 60 bp, Artificial; identical to SEQ ID NO: 474799
  Synthetic oligonucleotide

SEQ ID NO: 610761 - DNA, 60 bp, Artificial; identical to SEQ ID NO: 474800
  Synthetic oligonucleotide

SEQ ID NO: 610762 - DNA, 51 bp, Artificial; identical to SEQ ID NO: 474801
  Synthetic oligonucleotide

SEQ ID NO: 610763 - DNA, 56 bp, Artificial; identical to SEQ ID NO: 474802
  Synthetic oligonucleotide

SEQ ID NO: 610764 - DNA, 60 bp, Artificial; identical to SEQ ID NO: 474803
  Synthetic oligonucleotide

SEQ ID NO: 610765 - DNA, 60 bp, Artificial; identical to SEQ ID NO: 474804
  Synthetic oligonucleotide

SEQ ID NO: 610766 - DNA, 59 bp, Artificial; identical to SEQ ID NO: 474805
  Synthetic oligonucleotide

SEQ ID NO: 610767 - DNA, 52 bp, Artificial; identical to SEQ ID NO: 474808
  Synthetic oligonucleotide

SEQ ID NO: 610768 - DNA, 50 bp, Artificial; identical to SEQ ID NO: 474809
  Synthetic oligonucleotide

SEQ ID NO: 610769 - DNA, 60 bp, Artificial; identical to SEQ ID NO: 474815
  Synthetic oligonucleotide

SEQ ID NO: 610770 - DNA, 60 bp, Artificial; identical to SEQ ID NO: 474816
  Synthetic oligonucleotide

SEQ ID NO: 610771 - DNA, 60 bp, Artificial; identical to SEQ ID NO: 474817
  Synthetic oligonucleotide

SEQ ID NO: 610772 - DNA, 60 bp, Artificial; identical to SEQ ID NO: 474819
  Synthetic oligonucleotide

SEQ ID NO: 610773 - DNA, 60 bp, Artificial; identical to SEQ ID NO: 474821
  Synthetic oligonucleotide

SEQ ID NO: 610774 - DNA, 60 bp, Artificial; identical to SEQ ID NO: 474823
  Synthetic oligonucleotide

SEQ ID NO: 610775 - DNA, 55 bp, Artificial; identical to SEQ ID NO: 474824
  Synthetic oligonucleotide

SEQ ID NO: 610776 - DNA, 60 bp, Artificial; identical to SEQ ID NO: 10232
  Synthetic oligonucleotide

SEQ ID NO: 610777 - DNA, 58 bp, Artificial; identical to SEQ ID NO: 474825
  Synthetic oligonucleotide

SEQ ID NO: 610778 - DNA, 56 bp, Artificial; identical to SEQ ID NO: 474826
  Synthetic oligonucleotide

SEQ ID NO: 610779 - DNA, 58 bp, Artificial; identical to SEQ ID NO: 18256
  Synthetic oligonucleotide

SEQ ID NO: 610780 - DNA, 50 bp, Artificial; identical to SEQ ID NO: 474830
  Synthetic oligonucleotide

SEQ ID NO: 610781 - DNA, 60 bp, Artificial; identical to SEQ ID NO: 474833
  Synthetic oligonucleotide

SEQ ID NO: 610782 - DNA, 60 bp, Artificial; identical to SEQ ID NO: 474835
  Synthetic oligonucleotide

SEQ ID NO: 610783 - DNA, 60 bp, Artificial; identical to SEQ ID NO: 474837
  Synthetic oligonucleotide

SEQ ID NO: 610784 - DNA, 60 bp, Artificial; identical to SEQ ID NO: 474839
  Synthetic oligonucleotide

SEQ ID NO: 610785 - DNA, 51 bp, Artificial; identical to SEQ ID NO: 474840
  Synthetic oligonucleotide

SEQ ID NO: 610786 - DNA, 60 bp, Artificial; identical to SEQ ID NO: 474842
  Synthetic oligonucleotide

SEQ ID NO: 610787 - DNA, 60 bp, Artificial; identical to SEQ ID NO: 474843
  Synthetic oligonucleotide

SEQ ID NO: 610788 - DNA, 58 bp, Artificial; identical to SEQ ID NO: 474844
  Synthetic oligonucleotide

SEQ ID NO: 610789 - DNA, 60 bp, Artificial; identical to SEQ ID NO: 474845
  Synthetic oligonucleotide

SEQ ID NO: 610790 - DNA, 59 bp, Artificial; identical to SEQ ID NO: 474849
  Synthetic oligonucleotide

SEQ ID NO: 610791 - DNA, 60 bp, Artificial; identical to SEQ ID NO: 474850
  Synthetic oligonucleotide

SEQ ID NO: 610792 - DNA, 60 bp, Artificial; identical to SEQ ID NO: 474851
  Synthetic oligonucleotide

SEQ ID NO: 610793 - DNA, 55 bp, Artificial; identical to SEQ ID NO: 474854
  Synthetic oligonucleotide

SEQ ID NO: 610794 - DNA, 58 bp, Artificial; identical to SEQ ID NO: 474857
  Synthetic oligonucleotide

SEQ ID NO: 610795 - DNA, 60 bp, Artificial; identical to SEQ ID NO: 474859
  Synthetic oligonucleotide

SEQ ID NO: 610796 - DNA, 54 bp, Artificial; identical to SEQ ID NO: 474863
  Synthetic oligonucleotide

SEQ ID NO: 610797 - DNA, 55 bp, Artificial; identical to SEQ ID NO: 474866
  Synthetic oligonucleotide

SEQ ID NO: 610798 - DNA, 60 bp, Artificial; identical to SEQ ID NO: 474868
  Synthetic oligonucleotide

SEQ ID NO: 610799 - DNA, 59 bp, Artificial; identical to SEQ ID NO: 474871
  Synthetic oligonucleotide

SEQ ID NO: 610800 - DNA, 60 bp, Artificial; identical to SEQ ID NO: 474875
  Synthetic oligonucleotide

SEQ ID NO: 610801 - DNA, 60 bp, Artificial; identical to SEQ ID NO: 474876
  Synthetic oligonucleotide

SEQ ID NO: 610802 - DNA, 60 bp, Artificial; identical to SEQ ID NO: 474877
  Synthetic oligonucleotide

SEQ ID NO: 610803 - DNA, 60 bp, Artificial; identical to SEQ ID NO: 474878
  Synthetic oligonucleotide

SEQ ID NO: 610804 - DNA, 57 bp, Artificial; identical to SEQ ID NO: 19404
  Synthetic oligonucleotide

SEQ ID NO: 610805 - DNA, 60 bp, Artificial; identical to SEQ ID NO: 474879
  Synthetic oligonucleotide

SEQ ID NO: 610806 - DNA, 60 bp, Artificial; identical to SEQ ID NO: 474880
  Synthetic oligonucleotide

SEQ ID NO: 610807 - DNA, 60 bp, Artificial; identical to SEQ ID NO: 10193
  Synthetic oligonucleotide

SEQ ID NO: 610808 - DNA, 60 bp, Artificial; identical to SEQ ID NO: 474891
  Synthetic oligonucleotide

SEQ ID NO: 610809 - DNA, 60 bp, Artificial; identical to SEQ ID NO: 474893
  Synthetic oligonucleotide

SEQ ID NO: 610810 - DNA, 60 bp, Artificial; identical to SEQ ID NO: 474894
  Synthetic oligonucleotide

SEQ ID NO: 610811 - DNA, 60 bp, Artificial; identical to SEQ ID NO: 474895
  Synthetic oligonucleotide

SEQ ID NO: 610812 - DNA, 56 bp, Artificial; identical to SEQ ID NO: 474898
  Synthetic oligonucleotide

SEQ ID NO: 610813 - DNA, 59 bp, Artificial; identical to SEQ ID NO: 474900
  Synthetic oligonucleotide

SEQ ID NO: 610814 - DNA, 59 bp, Artificial; identical to SEQ ID NO: 474901
  Synthetic oligonucleotide

SEQ ID NO: 610815 - DNA, 60 bp, Artificial; identical to SEQ ID NO: 474903
  Synthetic oligonucleotide

SEQ ID NO: 610816 - DNA, 60 bp, Artificial; identical to SEQ ID NO: 474904
  Synthetic oligonucleotide

SEQ ID NO: 610817 - DNA, 60 bp, Artificial; identical to SEQ ID NO: 474905
  Synthetic oligonucleotide

SEQ ID NO: 610818 - DNA, 60 bp, Artificial; identical to SEQ ID NO: 474906
  Synthetic oligonucleotide

SEQ ID NO: 610819 - DNA, 55 bp, Artificial; identical to SEQ ID NO: 474908
  Synthetic oligonucleotide

SEQ ID NO: 610820 - DNA, 54 bp, Artificial; identical to SEQ ID NO: 474911
  Synthetic oligonucleotide

SEQ ID NO: 610821 - DNA, 58 bp, Artificial; identical to SEQ ID NO: 474913
  Synthetic oligonucleotide

SEQ ID NO: 610822 - DNA, 60 bp, Artificial; identical to SEQ ID NO: 474920
  Synthetic oligonucleotide

SEQ ID NO: 610823 - DNA, 60 bp, Artificial; identical to SEQ ID NO: 474922
  Synthetic oligonucleotide

SEQ ID NO: 610824 - DNA, 60 bp, Artificial; identical to SEQ ID NO: 474924
  Synthetic oligonucleotide

SEQ ID NO: 610825 - DNA, 60 bp, Artificial; identical to SEQ ID NO: 474927
  Synthetic oligonucleotide

SEQ ID NO: 610826 - DNA, 53 bp, Artificial; identical to SEQ ID NO: 474928
  Synthetic oligonucleotide

SEQ ID NO: 610827 - DNA, 59 bp, Artificial; identical to SEQ ID NO: 474929
  Synthetic oligonucleotide

SEQ ID NO: 610828 - DNA, 60 bp, Artificial; identical to SEQ ID NO: 474931
  Synthetic oligonucleotide

SEQ ID NO: 610829 - DNA, 58 bp, Artificial; identical to SEQ ID NO: 474932
  Synthetic oligonucleotide

SEQ ID NO: 610830 - DNA, 60 bp, Artificial; identical to SEQ ID NO: 474933
  Synthetic oligonucleotide

SEQ ID NO: 610831 - DNA, 60 bp, Artificial; identical to SEQ ID NO: 474935
  Synthetic oligonucleotide

SEQ ID NO: 610832 - DNA, 60 bp, Artificial; identical to SEQ ID NO: 474936
  Synthetic oligonucleotide

SEQ ID NO: 610833 - DNA, 60 bp, Artificial; identical to SEQ ID NO: 474937
  Synthetic oligonucleotide

SEQ ID NO: 610834 - DNA, 55 bp, Artificial; identical to SEQ ID NO: 474941
  Synthetic oligonucleotide

SEQ ID NO: 610835 - DNA, 52 bp, Artificial; identical to SEQ ID NO: 474942
  Synthetic oligonucleotide

SEQ ID NO: 610836 - DNA, 60 bp, Artificial; identical to SEQ ID NO: 474943
  Synthetic oligonucleotide

SEQ ID NO: 610837 - DNA, 59 bp, Artificial; identical to SEQ ID NO: 20126
  Synthetic oligonucleotide

SEQ ID NO: 610838 - DNA, 60 bp, Artificial; identical to SEQ ID NO: 474954
  Synthetic oligonucleotide

SEQ ID NO: 610839 - DNA, 54 bp, Artificial; identical to SEQ ID NO: 474958
  Synthetic oligonucleotide

SEQ ID NO: 610840 - DNA, 60 bp, Artificial; identical to SEQ ID NO: 474961
  Synthetic oligonucleotide

SEQ ID NO: 610841 - DNA, 59 bp, Artificial; identical to SEQ ID NO: 474966
  Synthetic oligonucleotide

SEQ ID NO: 610842 - DNA, 59 bp, Artificial; identical to SEQ ID NO: 474968
  Synthetic oligonucleotide

SEQ ID NO: 610843 - DNA, 55 bp, Artificial; identical to SEQ ID NO: 474969
  Synthetic oligonucleotide

SEQ ID NO: 610844 - DNA, 60 bp, Artificial; identical to SEQ ID NO: 474971
  Synthetic oligonucleotide

SEQ ID NO: 610845 - DNA, 50 bp, Artificial; identical to SEQ ID NO: 474976
  Synthetic oligonucleotide

SEQ ID NO: 610846 - DNA, 54 bp, Artificial; identical to SEQ ID NO: 474978
  Synthetic oligonucleotide

SEQ ID NO: 610847 - DNA, 60 bp, Artificial; identical to SEQ ID NO: 474984
  Synthetic oligonucleotide

SEQ ID NO: 610848 - DNA, 60 bp, Artificial; identical to SEQ ID NO: 474986
  Synthetic oligonucleotide

SEQ ID NO: 610849 - DNA, 60 bp, Artificial; identical to SEQ ID NO: 474988
  Synthetic oligonucleotide

SEQ ID NO: 610850 - DNA, 60 bp, Artificial; identical to SEQ ID NO: 474989
  Synthetic oligonucleotide

SEQ ID NO: 610851 - DNA, 53 bp, Artificial; identical to SEQ ID NO: 474991
  Synthetic oligonucleotide

SEQ ID NO: 610852 - DNA, 55 bp, Artificial; identical to SEQ ID NO: 474992
  Synthetic oligonucleotide

SEQ ID NO: 610853 - DNA, 55 bp, Artificial; identical to SEQ ID NO: 474995
  Synthetic oligonucleotide

SEQ ID NO: 610854 - DNA, 60 bp, Artificial; identical to SEQ ID NO: 474997
  Synthetic oligonucleotide

SEQ ID NO: 610855 - DNA, 55 bp, Artificial; identical to SEQ ID NO: 474999
  Synthetic oligonucleotide

SEQ ID NO: 610856 - DNA, 59 bp, Artificial; identical to SEQ ID NO: 475000
  Synthetic oligonucleotide

SEQ ID NO: 610857 - DNA, 59 bp, Artificial; identical to SEQ ID NO: 475012
  Synthetic oligonucleotide

SEQ ID NO: 610858 - DNA, 60 bp, Artificial; identical to SEQ ID NO: 475013
  Synthetic oligonucleotide

SEQ ID NO: 610859 - DNA, 60 bp, Artificial; identical to SEQ ID NO: 7161
  Synthetic oligonucleotide

SEQ ID NO: 610860 - DNA, 60 bp, Artificial; identical to SEQ ID NO: 475016
  Synthetic oligonucleotide

SEQ ID NO: 610861 - DNA, 59 bp, Artificial; identical to SEQ ID NO: 475018
  Synthetic oligonucleotide

SEQ ID NO: 610862 - DNA, 56 bp, Artificial; identical to SEQ ID NO: 475019
  Synthetic oligonucleotide

SEQ ID NO: 610863 - DNA, 60 bp, Artificial; identical to SEQ ID NO: 12458
  Synthetic oligonucleotide

SEQ ID NO: 610864 - DNA, 60 bp, Artificial; identical to SEQ ID NO: 475023
  Synthetic oligonucleotide

SEQ ID NO: 610865 - DNA, 58 bp, Artificial; identical to SEQ ID NO: 475024
  Synthetic oligonucleotide

SEQ ID NO: 610866 - DNA, 60 bp, Artificial; identical to SEQ ID NO: 475028
  Synthetic oligonucleotide

SEQ ID NO: 610867 - DNA, 59 bp, Artificial; identical to SEQ ID NO: 475035
  Synthetic oligonucleotide

SEQ ID NO: 610868 - DNA, 60 bp, Artificial; identical to SEQ ID NO: 475037
  Synthetic oligonucleotide

SEQ ID NO: 610869 - DNA, 55 bp, Artificial; identical to SEQ ID NO: 475043
  Synthetic oligonucleotide

SEQ ID NO: 610870 - DNA, 60 bp, Artificial; identical to SEQ ID NO: 475050
  Synthetic oligonucleotide

SEQ ID NO: 610871 - DNA, 54 bp, Artificial; identical to SEQ ID NO: 475051
  Synthetic oligonucleotide

SEQ ID NO: 610872 - DNA, 57 bp, Artificial; identical to SEQ ID NO: 475053
  Synthetic oligonucleotide

SEQ ID NO: 610873 - DNA, 60 bp, Artificial; identical to SEQ ID NO: 475056
  Synthetic oligonucleotide

SEQ ID NO: 610874 - DNA, 56 bp, Artificial; identical to SEQ ID NO: 475057
  Synthetic oligonucleotide

SEQ ID NO: 610875 - DNA, 60 bp, Artificial; identical to SEQ ID NO: 475058
  Synthetic oligonucleotide

SEQ ID NO: 610876 - DNA, 58 bp, Artificial; identical to SEQ ID NO: 475062
  Synthetic oligonucleotide

SEQ ID NO: 610877 - DNA, 56 bp, Artificial; identical to SEQ ID NO: 475065
  Synthetic oligonucleotide

SEQ ID NO: 610878 - DNA, 59 bp, Artificial; identical to SEQ ID NO: 475067
  Synthetic oligonucleotide

SEQ ID NO: 610879 - DNA, 53 bp, Artificial; identical to SEQ ID NO: 475070
  Synthetic oligonucleotide

SEQ ID NO: 610880 - DNA, 59 bp, Artificial; identical to SEQ ID NO: 475071
  Synthetic oligonucleotide

SEQ ID NO: 610881 - DNA, 57 bp, Artificial; identical to SEQ ID NO: 475074
  Synthetic oligonucleotide

SEQ ID NO: 610882 - DNA, 60 bp, Artificial; identical to SEQ ID NO: 475083
  Synthetic oligonucleotide

SEQ ID NO: 610883 - DNA, 60 bp, Artificial; identical to SEQ ID NO: 13225
  Synthetic oligonucleotide

SEQ ID NO: 610884 - DNA, 57 bp, Artificial; identical to SEQ ID NO: 20130
  Synthetic oligonucleotide

SEQ ID NO: 610885 - DNA, 57 bp, Artificial; identical to SEQ ID NO: 475090
  Synthetic oligonucleotide

SEQ ID NO: 610886 - DNA, 53 bp, Artificial; identical to SEQ ID NO: 475092
  Synthetic oligonucleotide

SEQ ID NO: 610887 - DNA, 55 bp, Artificial; identical to SEQ ID NO: 475094
  Synthetic oligonucleotide

SEQ ID NO: 610888 - DNA, 56 bp, Artificial; identical to SEQ ID NO: 475095
  Synthetic oligonucleotide

SEQ ID NO: 610889 - DNA, 60 bp, Artificial; identical to SEQ ID NO: 475097
  Synthetic oligonucleotide

SEQ ID NO: 610890 - DNA, 58 bp, Artificial; identical to SEQ ID NO: 475099
  Synthetic oligonucleotide

SEQ ID NO: 610891 - DNA, 60 bp, Artificial; identical to SEQ ID NO: 475102
  Synthetic oligonucleotide

SEQ ID NO: 610892 - DNA, 51 bp, Artificial; identical to SEQ ID NO: 475103
  Synthetic oligonucleotide

SEQ ID NO: 610893 - DNA, 55 bp, Artificial; identical to SEQ ID NO: 475104
  Synthetic oligonucleotide

SEQ ID NO: 610894 - DNA, 55 bp, Artificial; identical to SEQ ID NO: 475107
  Synthetic oligonucleotide

SEQ ID NO: 610895 - DNA, 59 bp, Artificial; identical to SEQ ID NO: 16160
  Synthetic oligonucleotide

SEQ ID NO: 610896 - DNA, 55 bp, Artificial; identical to SEQ ID NO: 475109
  Synthetic oligonucleotide

SEQ ID NO: 610897 - DNA, 60 bp, Artificial; identical to SEQ ID NO: 475110
  Synthetic oligonucleotide

SEQ ID NO: 610898 - DNA, 60 bp, Artificial; identical to SEQ ID NO: 14547
  Synthetic oligonucleotide

SEQ ID NO: 610899 - DNA, 60 bp, Artificial; identical to SEQ ID NO: 475112
  Synthetic oligonucleotide

SEQ ID NO: 610900 - DNA, 60 bp, Artificial; identical to SEQ ID NO: 475113
  Synthetic oligonucleotide

SEQ ID NO: 610901 - DNA, 60 bp, Artificial; identical to SEQ ID NO: 475114
  Synthetic oligonucleotide

SEQ ID NO: 610902 - DNA, 60 bp, Artificial; identical to SEQ ID NO: 475115
  Synthetic oligonucleotide

SEQ ID NO: 610903 - DNA, 60 bp, Artificial; identical to SEQ ID NO: 475119
  Synthetic oligonucleotide

SEQ ID NO: 610904 - DNA, 57 bp, Artificial; identical to SEQ ID NO: 475120
  Synthetic oligonucleotide

SEQ ID NO: 610905 - DNA, 54 bp, Artificial; identical to SEQ ID NO: 475125
  Synthetic oligonucleotide

SEQ ID NO: 610906 - DNA, 55 bp, Artificial; identical to SEQ ID NO: 475127
  Synthetic oligonucleotide

SEQ ID NO: 610907 - DNA, 59 bp, Artificial; identical to SEQ ID NO: 475133
  Synthetic oligonucleotide

SEQ ID NO: 610908 - DNA, 60 bp, Artificial; identical to SEQ ID NO: 475135
  Synthetic oligonucleotide

SEQ ID NO: 610909 - DNA, 60 bp, Artificial; identical to SEQ ID NO: 475136
  Synthetic oligonucleotide

SEQ ID NO: 610910 - DNA, 55 bp, Artificial; identical to SEQ ID NO: 475137
  Synthetic oligonucleotide

SEQ ID NO: 610911 - DNA, 54 bp, Artificial; identical to SEQ ID NO: 475139
  Synthetic oligonucleotide

SEQ ID NO: 610912 - DNA, 54 bp, Artificial; identical to SEQ ID NO: 475141
  Synthetic oligonucleotide

SEQ ID NO: 610913 - DNA, 57 bp, Artificial; identical to SEQ ID NO: 475142
  Synthetic oligonucleotide

SEQ ID NO: 610914 - DNA, 55 bp, Artificial; identical to SEQ ID NO: 475147
  Synthetic oligonucleotide

SEQ ID NO: 610915 - DNA, 55 bp, Artificial; identical to SEQ ID NO: 475148
  Synthetic oligonucleotide

SEQ ID NO: 610916 - DNA, 60 bp, Artificial; identical to SEQ ID NO: 475149
  Synthetic oligonucleotide

SEQ ID NO: 610917 - DNA, 56 bp, Artificial; identical to SEQ ID NO: 475150
  Synthetic oligonucleotide

SEQ ID NO: 610918 - DNA, 60 bp, Artificial; identical to SEQ ID NO: 475153
  Synthetic oligonucleotide

SEQ ID NO: 610919 - DNA, 57 bp, Artificial; identical to SEQ ID NO: 475156
  Synthetic oligonucleotide

SEQ ID NO: 610920 - DNA, 60 bp, Artificial; identical to SEQ ID NO: 475157
  Synthetic oligonucleotide

SEQ ID NO: 610921 - DNA, 60 bp, Artificial; identical to SEQ ID NO: 475159
  Synthetic oligonucleotide

SEQ ID NO: 610922 - DNA, 60 bp, Artificial; identical to SEQ ID NO: 475160
  Synthetic oligonucleotide

SEQ ID NO: 610923 - DNA, 60 bp, Artificial; identical to SEQ ID NO: 475162
  Synthetic oligonucleotide

SEQ ID NO: 610924 - DNA, 60 bp, Artificial; identical to SEQ ID NO: 475165
  Synthetic oligonucleotide

SEQ ID NO: 610925 - DNA, 50 bp, Artificial; identical to SEQ ID NO: 475167
  Synthetic oligonucleotide

SEQ ID NO: 610926 - DNA, 60 bp, Artificial; identical to SEQ ID NO: 475174
  Synthetic oligonucleotide

SEQ ID NO: 610927 - DNA, 59 bp, Artificial; identical to SEQ ID NO: 475175
  Synthetic oligonucleotide

SEQ ID NO: 610928 - DNA, 56 bp, Artificial; identical to SEQ ID NO: 475177
  Synthetic oligonucleotide

SEQ ID NO: 610929 - DNA, 53 bp, Artificial; identical to SEQ ID NO: 475182
  Synthetic oligonucleotide

SEQ ID NO: 610930 - DNA, 55 bp, Artificial; identical to SEQ ID NO: 475185
  Synthetic oligonucleotide

SEQ ID NO: 610931 - DNA, 60 bp, Artificial; identical to SEQ ID NO: 475186
  Synthetic oligonucleotide

SEQ ID NO: 610932 - DNA, 60 bp, Artificial; identical to SEQ ID NO: 475188
  Synthetic oligonucleotide

SEQ ID NO: 610933 - DNA, 60 bp, Artificial; identical to SEQ ID NO: 475192
  Synthetic oligonucleotide

SEQ ID NO: 610934 - DNA, 55 bp, Artificial; identical to SEQ ID NO: 475193
  Synthetic oligonucleotide

SEQ ID NO: 610935 - DNA, 60 bp, Artificial; identical to SEQ ID NO: 8207
  Synthetic oligonucleotide

SEQ ID NO: 610936 - DNA, 55 bp, Artificial; identical to SEQ ID NO: 475194
  Synthetic oligonucleotide

SEQ ID NO: 610937 - DNA, 60 bp, Artificial; identical to SEQ ID NO: 12289
  Synthetic oligonucleotide

SEQ ID NO: 610938 - DNA, 60 bp, Artificial; identical to SEQ ID NO: 475197
  Synthetic oligonucleotide

SEQ ID NO: 610939 - DNA, 51 bp, Artificial; identical to SEQ ID NO: 475198
  Synthetic oligonucleotide

SEQ ID NO: 610940 - DNA, 55 bp, Artificial; identical to SEQ ID NO: 475200
  Synthetic oligonucleotide

SEQ ID NO: 610941 - DNA, 60 bp, Artificial; identical to SEQ ID NO: 475201
  Synthetic oligonucleotide

SEQ ID NO: 610942 - DNA, 55 bp, Artificial; identical to SEQ ID NO: 475202
  Synthetic oligonucleotide

SEQ ID NO: 610943 - DNA, 59 bp, Artificial; identical to SEQ ID NO: 17202
  Synthetic oligonucleotide

SEQ ID NO: 610944 - DNA, 60 bp, Artificial; identical to SEQ ID NO: 475203
  Synthetic oligonucleotide

SEQ ID NO: 610945 - DNA, 60 bp, Artificial; identical to SEQ ID NO: 475204
  Synthetic oligonucleotide

SEQ ID NO: 610946 - DNA, 51 bp, Artificial; identical to SEQ ID NO: 475205
  Synthetic oligonucleotide

SEQ ID NO: 610947 - DNA, 60 bp, Artificial; identical to SEQ ID NO: 475208
  Synthetic oligonucleotide

SEQ ID NO: 610948 - DNA, 51 bp, Artificial; identical to SEQ ID NO: 475214
  Synthetic oligonucleotide

SEQ ID NO: 610949 - DNA, 60 bp, Artificial; identical to SEQ ID NO: 475215
  Synthetic oligonucleotide

SEQ ID NO: 610950 - DNA, 58 bp, Artificial; identical to SEQ ID NO: 475216
  Synthetic oligonucleotide

SEQ ID NO: 610951 - DNA, 59 bp, Artificial; identical to SEQ ID NO: 475217
  Synthetic oligonucleotide

SEQ ID NO: 610952 - DNA, 60 bp, Artificial; identical to SEQ ID NO: 475218
  Synthetic oligonucleotide

SEQ ID NO: 610953 - DNA, 55 bp, Artificial; identical to SEQ ID NO: 475225
  Synthetic oligonucleotide

SEQ ID NO: 610954 - DNA, 56 bp, Artificial; identical to SEQ ID NO: 475237
  Synthetic oligonucleotide

SEQ ID NO: 610955 - DNA, 58 bp, Artificial; identical to SEQ ID NO: 475240
  Synthetic oligonucleotide

SEQ ID NO: 610956 - DNA, 58 bp, Artificial; identical to SEQ ID NO: 475242
  Synthetic oligonucleotide

SEQ ID NO: 610957 - DNA, 60 bp, Artificial; identical to SEQ ID NO: 475244
  Synthetic oligonucleotide

SEQ ID NO: 610958 - DNA, 57 bp, Artificial; identical to SEQ ID NO: 475246
  Synthetic oligonucleotide

SEQ ID NO: 610959 - DNA, 55 bp, Artificial; identical to SEQ ID NO: 475248
  Synthetic oligonucleotide

SEQ ID NO: 610960 - DNA, 56 bp, Artificial; identical to SEQ ID NO: 475249
  Synthetic oligonucleotide

SEQ ID NO: 610961 - DNA, 56 bp, Artificial; identical to SEQ ID NO: 475250
  Synthetic oligonucleotide

SEQ ID NO: 610962 - DNA, 59 bp, Artificial; identical to SEQ ID NO: 475252
  Synthetic oligonucleotide

SEQ ID NO: 610963 - DNA, 60 bp, Artificial; identical to SEQ ID NO: 13088
  Synthetic oligonucleotide

SEQ ID NO: 610964 - DNA, 55 bp, Artificial; identical to SEQ ID NO: 475253
  Synthetic oligonucleotide

SEQ ID NO: 610965 - DNA, 55 bp, Artificial; identical to SEQ ID NO: 475255
  Synthetic oligonucleotide

SEQ ID NO: 610966 - DNA, 54 bp, Artificial; identical to SEQ ID NO: 16640
  Synthetic oligonucleotide

SEQ ID NO: 610967 - DNA, 50 bp, Artificial; identical to SEQ ID NO: 475261
  Synthetic oligonucleotide

SEQ ID NO: 610968 - DNA, 60 bp, Artificial; identical to SEQ ID NO: 475266
  Synthetic oligonucleotide

SEQ ID NO: 610969 - DNA, 59 bp, Artificial; identical to SEQ ID NO: 475268
  Synthetic oligonucleotide

SEQ ID NO: 610970 - DNA, 60 bp, Artificial; identical to SEQ ID NO: 475271
  Synthetic oligonucleotide

SEQ ID NO: 610971 - DNA, 55 bp, Artificial; identical to SEQ ID NO: 475272
  Synthetic oligonucleotide

SEQ ID NO: 610972 - DNA, 60 bp, Artificial; identical to SEQ ID NO: 10894
  Synthetic oligonucleotide

SEQ ID NO: 610973 - DNA, 55 bp, Artificial; identical to SEQ ID NO: 475276
  Synthetic oligonucleotide

SEQ ID NO: 610974 - DNA, 60 bp, Artificial; identical to SEQ ID NO: 475278
  Synthetic oligonucleotide

SEQ ID NO: 610975 - DNA, 60 bp, Artificial; identical to SEQ ID NO: 475280
  Synthetic oligonucleotide

SEQ ID NO: 610976 - DNA, 60 bp, Artificial; identical to SEQ ID NO: 475281
  Synthetic oligonucleotide

SEQ ID NO: 610977 - DNA, 60 bp, Artificial; identical to SEQ ID NO: 475282
  Synthetic oligonucleotide

SEQ ID NO: 610978 - DNA, 57 bp, Artificial; identical to SEQ ID NO: 6081
  Synthetic oligonucleotide

SEQ ID NO: 610979 - DNA, 54 bp, Artificial; identical to SEQ ID NO: 475284
  Synthetic oligonucleotide

SEQ ID NO: 610980 - DNA, 55 bp, Artificial; identical to SEQ ID NO: 475286
  Synthetic oligonucleotide

SEQ ID NO: 610981 - DNA, 56 bp, Artificial; identical to SEQ ID NO: 475287
  Synthetic oligonucleotide

SEQ ID NO: 610982 - DNA, 52 bp, Artificial; identical to SEQ ID NO: 475289
  Synthetic oligonucleotide

SEQ ID NO: 610983 - DNA, 56 bp, Artificial; identical to SEQ ID NO: 475291
  Synthetic oligonucleotide

SEQ ID NO: 610984 - DNA, 51 bp, Artificial; identical to SEQ ID NO: 475292
  Synthetic oligonucleotide

SEQ ID NO: 610985 - DNA, 55 bp, Artificial; identical to SEQ ID NO: 475305
  Synthetic oligonucleotide

SEQ ID NO: 610986 - DNA, 60 bp, Artificial; identical to SEQ ID NO: 475307
  Synthetic oligonucleotide

SEQ ID NO: 610987 - DNA, 53 bp, Artificial; identical to SEQ ID NO: 475312
  Synthetic oligonucleotide

SEQ ID NO: 610988 - DNA, 55 bp, Artificial; identical to SEQ ID NO: 475313
  Synthetic oligonucleotide

SEQ ID NO: 610989 - DNA, 54 bp, Artificial; identical to SEQ ID NO: 475314
  Synthetic oligonucleotide

SEQ ID NO: 610990 - DNA, 55 bp, Artificial; identical to SEQ ID NO: 475315
  Synthetic oligonucleotide

SEQ ID NO: 610991 - DNA, 60 bp, Artificial; identical to SEQ ID NO: 475316
  Synthetic oligonucleotide

SEQ ID NO: 610992 - DNA, 60 bp, Artificial; identical to SEQ ID NO: 475317
  Synthetic oligonucleotide

SEQ ID NO: 610993 - DNA, 60 bp, Artificial; identical to SEQ ID NO: 475319
  Synthetic oligonucleotide

SEQ ID NO: 610994 - DNA, 60 bp, Artificial; identical to SEQ ID NO: 475320
  Synthetic oligonucleotide

SEQ ID NO: 610995 - DNA, 53 bp, Artificial; identical to SEQ ID NO: 475323
  Synthetic oligonucleotide

SEQ ID NO: 610996 - DNA, 57 bp, Artificial; identical to SEQ ID NO: 18580
  Synthetic oligonucleotide

SEQ ID NO: 610997 - DNA, 52 bp, Artificial; identical to SEQ ID NO: 475325
  Synthetic oligonucleotide

SEQ ID NO: 610998 - DNA, 60 bp, Artificial; identical to SEQ ID NO: 475326
  Synthetic oligonucleotide

SEQ ID NO: 610999 - DNA, 57 bp, Artificial; identical to SEQ ID NO: 475328
  Synthetic oligonucleotide

SEQ ID NO: 611000 - DNA, 60 bp, Artificial; identical to SEQ ID NO: 475330
  Synthetic oligonucleotide

SEQ ID NO: 611001 - DNA, 60 bp, Artificial; identical to SEQ ID NO: 475332
  Synthetic oligonucleotide

SEQ ID NO: 611002 - DNA, 56 bp, Artificial; identical to SEQ ID NO: 475338
  Synthetic oligonucleotide

SEQ ID NO: 611003 - DNA, 59 bp, Artificial; identical to SEQ ID NO: 20389
  Synthetic oligonucleotide

SEQ ID NO: 611004 - DNA, 60 bp, Artificial; identical to SEQ ID NO: 475341
  Synthetic oligonucleotide

SEQ ID NO: 611005 - DNA, 60 bp, Artificial; identical to SEQ ID NO: 475343
  Synthetic oligonucleotide

SEQ ID NO: 611006 - DNA, 58 bp, Artificial; identical to SEQ ID NO: 475344
  Synthetic oligonucleotide

SEQ ID NO: 611007 - DNA, 55 bp, Artificial; identical to SEQ ID NO: 475346
  Synthetic oligonucleotide

SEQ ID NO: 611008 - DNA, 55 bp, Artificial; identical to SEQ ID NO: 475347
  Synthetic oligonucleotide

SEQ ID NO: 611009 - DNA, 58 bp, Artificial; identical to SEQ ID NO: 475351
  Synthetic oligonucleotide

SEQ ID NO: 611010 - DNA, 59 bp, Artificial; identical to SEQ ID NO: 475353
  Synthetic oligonucleotide

SEQ ID NO: 611011 - DNA, 60 bp, Artificial; identical to SEQ ID NO: 475354
  Synthetic oligonucleotide

SEQ ID NO: 611012 - DNA, 60 bp, Artificial; identical to SEQ ID NO: 475356
  Synthetic oligonucleotide

SEQ ID NO: 611013 - DNA, 55 bp, Artificial; identical to SEQ ID NO: 475360
  Synthetic oligonucleotide

SEQ ID NO: 611014 - DNA, 60 bp, Artificial; identical to SEQ ID NO: 475362
  Synthetic oligonucleotide

SEQ ID NO: 611015 - DNA, 60 bp, Artificial; identical to SEQ ID NO: 475365
  Synthetic oligonucleotide

SEQ ID NO: 611016 - DNA, 54 bp, Artificial; identical to SEQ ID NO: 475366
  Synthetic oligonucleotide

SEQ ID NO: 611017 - DNA, 54 bp, Artificial; identical to SEQ ID NO: 475368
  Synthetic oligonucleotide

SEQ ID NO: 611018 - DNA, 60 bp, Artificial; identical to SEQ ID NO: 475376
  Synthetic oligonucleotide

SEQ ID NO: 611019 - DNA, 53 bp, Artificial; identical to SEQ ID NO: 475377
  Synthetic oligonucleotide

SEQ ID NO: 611020 - DNA, 60 bp, Artificial; identical to SEQ ID NO: 475378
  Synthetic oligonucleotide

SEQ ID NO: 611021 - DNA, 59 bp, Artificial; identical to SEQ ID NO: 475379
  Synthetic oligonucleotide

SEQ ID NO: 611022 - DNA, 56 bp, Artificial; identical to SEQ ID NO: 19288
  Synthetic oligonucleotide

SEQ ID NO: 611023 - DNA, 60 bp, Artificial; identical to SEQ ID NO: 475382
  Synthetic oligonucleotide

SEQ ID NO: 611024 - DNA, 59 bp, Artificial; identical to SEQ ID NO: 475384
  Synthetic oligonucleotide

SEQ ID NO: 611025 - DNA, 58 bp, Artificial; identical to SEQ ID NO: 475386
  Synthetic oligonucleotide

SEQ ID NO: 611026 - DNA, 60 bp, Artificial; identical to SEQ ID NO: 475387
  Synthetic oligonucleotide

SEQ ID NO: 611027 - DNA, 57 bp, Artificial; identical to SEQ ID NO: 475391
  Synthetic oligonucleotide

SEQ ID NO: 611028 - DNA, 55 bp, Artificial; identical to SEQ ID NO: 475395
  Synthetic oligonucleotide

SEQ ID NO: 611029 - DNA, 57 bp, Artificial; identical to SEQ ID NO: 475396
  Synthetic oligonucleotide

SEQ ID NO: 611030 - DNA, 60 bp, Artificial; identical to SEQ ID NO: 475397
  Synthetic oligonucleotide

SEQ ID NO: 611031 - DNA, 60 bp, Artificial; identical to SEQ ID NO: 5767
  Synthetic oligonucleotide

SEQ ID NO: 611032 - DNA, 60 bp, Artificial; identical to SEQ ID NO: 475409
  Synthetic oligonucleotide

SEQ ID NO: 611033 - DNA, 52 bp, Artificial; identical to SEQ ID NO: 475411
  Synthetic oligonucleotide

SEQ ID NO: 611034 - DNA, 60 bp, Artificial; identical to SEQ ID NO: 475412
  Synthetic oligonucleotide

SEQ ID NO: 611035 - DNA, 60 bp, Artificial; identical to SEQ ID NO: 475414
  Synthetic oligonucleotide

SEQ ID NO: 611036 - DNA, 55 bp, Artificial; identical to SEQ ID NO: 475416
  Synthetic oligonucleotide

SEQ ID NO: 611037 - DNA, 60 bp, Artificial; identical to SEQ ID NO: 10591
  Synthetic oligonucleotide

SEQ ID NO: 611038 - DNA, 60 bp, Artificial; identical to SEQ ID NO: 475418
  Synthetic oligonucleotide

SEQ ID NO: 611039 - DNA, 59 bp, Artificial; identical to SEQ ID NO: 18510
  Synthetic oligonucleotide

SEQ ID NO: 611040 - DNA, 54 bp, Artificial; identical to SEQ ID NO: 475423
  Synthetic oligonucleotide

SEQ ID NO: 611041 - DNA, 56 bp, Artificial; identical to SEQ ID NO: 475425
  Synthetic oligonucleotide

SEQ ID NO: 611042 - DNA, 60 bp, Artificial; identical to SEQ ID NO: 475426
  Synthetic oligonucleotide

SEQ ID NO: 611043 - DNA, 55 bp, Artificial; identical to SEQ ID NO: 475428
  Synthetic oligonucleotide

SEQ ID NO: 611044 - DNA, 58 bp, Artificial; identical to SEQ ID NO: 475430
  Synthetic oligonucleotide

SEQ ID NO: 611045 - DNA, 60 bp, Artificial; identical to SEQ ID NO: 475431
  Synthetic oligonucleotide

SEQ ID NO: 611046 - DNA, 55 bp, Artificial; identical to SEQ ID NO: 475432
  Synthetic oligonucleotide

SEQ ID NO: 611047 - DNA, 60 bp, Artificial; identical to SEQ ID NO: 475433
  Synthetic oligonucleotide

SEQ ID NO: 611048 - DNA, 58 bp, Artificial; identical to SEQ ID NO: 475439
  Synthetic oligonucleotide

SEQ ID NO: 611049 - DNA, 55 bp, Artificial; identical to SEQ ID NO: 475440
  Synthetic oligonucleotide

SEQ ID NO: 611050 - DNA, 60 bp, Artificial; identical to SEQ ID NO: 475442
  Synthetic oligonucleotide

SEQ ID NO: 611051 - DNA, 55 bp, Artificial; identical to SEQ ID NO: 475448
  Synthetic oligonucleotide

SEQ ID NO: 611052 - DNA, 59 bp, Artificial; identical to SEQ ID NO: 475449
  Synthetic oligonucleotide

SEQ ID NO: 611053 - DNA, 60 bp, Artificial; identical to SEQ ID NO: 475455
  Synthetic oligonucleotide

SEQ ID NO: 611054 - DNA, 56 bp, Artificial; identical to SEQ ID NO: 475457
  Synthetic oligonucleotide

SEQ ID NO: 611055 - DNA, 56 bp, Artificial; identical to SEQ ID NO: 18063
  Synthetic oligonucleotide

SEQ ID NO: 611056 - DNA, 59 bp, Artificial; identical to SEQ ID NO: 475460
  Synthetic oligonucleotide

SEQ ID NO: 611057 - DNA, 53 bp, Artificial; identical to SEQ ID NO: 475461
  Synthetic oligonucleotide

SEQ ID NO: 611058 - DNA, 60 bp, Artificial; identical to SEQ ID NO: 475464
  Synthetic oligonucleotide

SEQ ID NO: 611059 - DNA, 55 bp, Artificial; identical to SEQ ID NO: 475466
  Synthetic oligonucleotide

SEQ ID NO: 611060 - DNA, 58 bp, Artificial; identical to SEQ ID NO: 475467
  Synthetic oligonucleotide

SEQ ID NO: 611061 - DNA, 53 bp, Artificial; identical to SEQ ID NO: 475469
  Synthetic oligonucleotide

SEQ ID NO: 611062 - DNA, 60 bp, Artificial; identical to SEQ ID NO: 475471
  Synthetic oligonucleotide

SEQ ID NO: 611063 - DNA, 52 bp, Artificial; identical to SEQ ID NO: 475472
  Synthetic oligonucleotide

SEQ ID NO: 611064 - DNA, 60 bp, Artificial; identical to SEQ ID NO: 475475
  Synthetic oligonucleotide

SEQ ID NO: 611065 - DNA, 50 bp, Artificial; identical to SEQ ID NO: 475477
  Synthetic oligonucleotide

SEQ ID NO: 611066 - DNA, 60 bp, Artificial; identical to SEQ ID NO: 475479
  Synthetic oligonucleotide

SEQ ID NO: 611067 - DNA, 57 bp, Artificial; identical to SEQ ID NO: 475480
  Synthetic oligonucleotide

SEQ ID NO: 611068 - DNA, 60 bp, Artificial; identical to SEQ ID NO: 475483
  Synthetic oligonucleotide

SEQ ID NO: 611069 - DNA, 51 bp, Artificial; identical to SEQ ID NO: 475484
  Synthetic oligonucleotide

SEQ ID NO: 611070 - DNA, 59 bp, Artificial; identical to SEQ ID NO: 475485
  Synthetic oligonucleotide

SEQ ID NO: 611071 - DNA, 60 bp, Artificial; identical to SEQ ID NO: 475486
  Synthetic oligonucleotide

SEQ ID NO: 611072 - DNA, 52 bp, Artificial; identical to SEQ ID NO: 475494
  Synthetic oligonucleotide

SEQ ID NO: 611073 - DNA, 58 bp, Artificial; identical to SEQ ID NO: 475495
  Synthetic oligonucleotide

SEQ ID NO: 611074 - DNA, 60 bp, Artificial; identical to SEQ ID NO: 475496
  Synthetic oligonucleotide

SEQ ID NO: 611075 - DNA, 57 bp, Artificial; identical to SEQ ID NO: 475499
  Synthetic oligonucleotide

SEQ ID NO: 611076 - DNA, 60 bp, Artificial; identical to SEQ ID NO: 475501
  Synthetic oligonucleotide

SEQ ID NO: 611077 - DNA, 58 bp, Artificial; identical to SEQ ID NO: 475503
  Synthetic oligonucleotide

SEQ ID NO: 611078 - DNA, 59 bp, Artificial; identical to SEQ ID NO: 16442
  Synthetic oligonucleotide

SEQ ID NO: 611079 - DNA, 58 bp, Artificial; identical to SEQ ID NO: 475507
  Synthetic oligonucleotide

SEQ ID NO: 611080 - DNA, 56 bp, Artificial; identical to SEQ ID NO: 475508
  Synthetic oligonucleotide

SEQ ID NO: 611081 - DNA, 58 bp, Artificial; identical to SEQ ID NO: 18689
  Synthetic oligonucleotide

SEQ ID NO: 611082 - DNA, 60 bp, Artificial; identical to SEQ ID NO: 475512
  Synthetic oligonucleotide

SEQ ID NO: 611083 - DNA, 60 bp, Artificial; identical to SEQ ID NO: 475513
  Synthetic oligonucleotide

SEQ ID NO: 611084 - DNA, 59 bp, Artificial; identical to SEQ ID NO: 475514
  Synthetic oligonucleotide

SEQ ID NO: 611085 - DNA, 54 bp, Artificial; identical to SEQ ID NO: 475515
  Synthetic oligonucleotide

SEQ ID NO: 611086 - DNA, 56 bp, Artificial; identical to SEQ ID NO: 475517
  Synthetic oligonucleotide

SEQ ID NO: 611087 - DNA, 59 bp, Artificial; identical to SEQ ID NO: 475518
  Synthetic oligonucleotide

SEQ ID NO: 611088 - DNA, 60 bp, Artificial; identical to SEQ ID NO: 475519
  Synthetic oligonucleotide

SEQ ID NO: 611089 - DNA, 60 bp, Artificial; identical to SEQ ID NO: 475522
  Synthetic oligonucleotide

SEQ ID NO: 611090 - DNA, 57 bp, Artificial; identical to SEQ ID NO: 475523
  Synthetic oligonucleotide

SEQ ID NO: 611091 - DNA, 55 bp, Artificial; identical to SEQ ID NO: 475527
  Synthetic oligonucleotide

SEQ ID NO: 611092 - DNA, 56 bp, Artificial; identical to SEQ ID NO: 10465
  Synthetic oligonucleotide

SEQ ID NO: 611093 - DNA, 50 bp, Artificial; identical to SEQ ID NO: 475535
  Synthetic oligonucleotide

SEQ ID NO: 611094 - DNA, 60 bp, Artificial; identical to SEQ ID NO: 475538
  Synthetic oligonucleotide

SEQ ID NO: 611095 - DNA, 60 bp, Artificial; identical to SEQ ID NO: 475542
  Synthetic oligonucleotide

SEQ ID NO: 611096 - DNA, 57 bp, Artificial; identical to SEQ ID NO: 475543
  Synthetic oligonucleotide

SEQ ID NO: 611097 - DNA, 57 bp, Artificial; identical to SEQ ID NO: 475544
  Synthetic oligonucleotide

SEQ ID NO: 611098 - DNA, 55 bp, Artificial; identical to SEQ ID NO: 475545
  Synthetic oligonucleotide

SEQ ID NO: 611099 - DNA, 60 bp, Artificial; identical to SEQ ID NO: 475549
  Synthetic oligonucleotide

SEQ ID NO: 611100 - DNA, 56 bp, Artificial; identical to SEQ ID NO: 475550
  Synthetic oligonucleotide

SEQ ID NO: 611101 - DNA, 60 bp, Artificial; identical to SEQ ID NO: 475551
  Synthetic oligonucleotide

SEQ ID NO: 611102 - DNA, 55 bp, Artificial; identical to SEQ ID NO: 475553
  Synthetic oligonucleotide

SEQ ID NO: 611103 - DNA, 53 bp, Artificial; identical to SEQ ID NO: 475555
  Synthetic oligonucleotide

SEQ ID NO: 611104 - DNA, 53 bp, Artificial; identical to SEQ ID NO: 475556
  Synthetic oligonucleotide

SEQ ID NO: 611105 - DNA, 55 bp, Artificial; identical to SEQ ID NO: 475558
  Synthetic oligonucleotide

SEQ ID NO: 611106 - DNA, 60 bp, Artificial; identical to SEQ ID NO: 475560
  Synthetic oligonucleotide

SEQ ID NO: 611107 - DNA, 52 bp, Artificial; identical to SEQ ID NO: 475561
  Synthetic oligonucleotide

SEQ ID NO: 611108 - DNA, 53 bp, Artificial; identical to SEQ ID NO: 475562
  Synthetic oligonucleotide

SEQ ID NO: 611109 - DNA, 51 bp, Artificial; identical to SEQ ID NO: 8705
  Synthetic oligonucleotide

SEQ ID NO: 611110 - DNA, 59 bp, Artificial; identical to SEQ ID NO: 475563
  Synthetic oligonucleotide

SEQ ID NO: 611111 - DNA, 57 bp, Artificial; identical to SEQ ID NO: 475564
  Synthetic oligonucleotide

SEQ ID NO: 611112 - DNA, 59 bp, Artificial; identical to SEQ ID NO: 17730
  Synthetic oligonucleotide

SEQ ID NO: 611113 - DNA, 60 bp, Artificial; identical to SEQ ID NO: 475565
  Synthetic oligonucleotide

SEQ ID NO: 611114 - DNA, 55 bp, Artificial; identical to SEQ ID NO: 475567
  Synthetic oligonucleotide

SEQ ID NO: 611115 - DNA, 60 bp, Artificial; identical to SEQ ID NO: 475578
  Synthetic oligonucleotide

SEQ ID NO: 611116 - DNA, 50 bp, Artificial; identical to SEQ ID NO: 475581
  Synthetic oligonucleotide

SEQ ID NO: 611117 - DNA, 55 bp, Artificial; identical to SEQ ID NO: 475582
  Synthetic oligonucleotide

SEQ ID NO: 611118 - DNA, 57 bp, Artificial; identical to SEQ ID NO: 19173
  Synthetic oligonucleotide

SEQ ID NO: 611119 - DNA, 60 bp, Artificial; identical to SEQ ID NO: 475586
  Synthetic oligonucleotide

SEQ ID NO: 611120 - DNA, 55 bp, Artificial; identical to SEQ ID NO: 475588
  Synthetic oligonucleotide

SEQ ID NO: 611121 - DNA, 59 bp, Artificial; identical to SEQ ID NO: 475591
  Synthetic oligonucleotide

SEQ ID NO: 611122 - DNA, 60 bp, Artificial; identical to SEQ ID NO: 475594
  Synthetic oligonucleotide

SEQ ID NO: 611123 - DNA, 52 bp, Artificial; identical to SEQ ID NO: 475598
  Synthetic oligonucleotide

SEQ ID NO: 611124 - DNA, 55 bp, Artificial; identical to SEQ ID NO: 475600
  Synthetic oligonucleotide

SEQ ID NO: 611125 - DNA, 56 bp, Artificial; identical to SEQ ID NO: 475601
  Synthetic oligonucleotide

SEQ ID NO: 611126 - DNA, 52 bp, Artificial; identical to SEQ ID NO: 475602
  Synthetic oligonucleotide

SEQ ID NO: 611127 - DNA, 58 bp, Artificial; identical to SEQ ID NO: 475604
  Synthetic oligonucleotide

SEQ ID NO: 611128 - DNA, 55 bp, Artificial; identical to SEQ ID NO: 475606
  Synthetic oligonucleotide

SEQ ID NO: 611129 - DNA, 53 bp, Artificial; identical to SEQ ID NO: 475610
  Synthetic oligonucleotide

SEQ ID NO: 611130 - DNA, 60 bp, Artificial; identical to SEQ ID NO: 475612
  Synthetic oligonucleotide

SEQ ID NO: 611131 - DNA, 60 bp, Artificial; identical to SEQ ID NO: 475613
  Synthetic oligonucleotide

SEQ ID NO: 611132 - DNA, 54 bp, Artificial; identical to SEQ ID NO: 475615
  Synthetic oligonucleotide

SEQ ID NO: 611133 - DNA, 60 bp, Artificial; identical to SEQ ID NO: 475616
  Synthetic oligonucleotide

SEQ ID NO: 611134 - DNA, 59 bp, Artificial; identical to SEQ ID NO: 475618
  Synthetic oligonucleotide

SEQ ID NO: 611135 - DNA, 60 bp, Artificial; identical to SEQ ID NO: 11898
  Synthetic oligonucleotide

SEQ ID NO: 611136 - DNA, 60 bp, Artificial; identical to SEQ ID NO: 475620
  Synthetic oligonucleotide

SEQ ID NO: 611137 - DNA, 60 bp, Artificial; identical to SEQ ID NO: 475622
  Synthetic oligonucleotide

SEQ ID NO: 611138 - DNA, 56 bp, Artificial; identical to SEQ ID NO: 475623
  Synthetic oligonucleotide

SEQ ID NO: 611139 - DNA, 54 bp, Artificial; identical to SEQ ID NO: 475626
  Synthetic oligonucleotide

SEQ ID NO: 611140 - DNA, 56 bp, Artificial; identical to SEQ ID NO: 475628
  Synthetic oligonucleotide

SEQ ID NO: 611141 - DNA, 55 bp, Artificial; identical to SEQ ID NO: 16451
  Synthetic oligonucleotide

SEQ ID NO: 611142 - DNA, 59 bp, Artificial; identical to SEQ ID NO: 475629
  Synthetic oligonucleotide

SEQ ID NO: 611143 - DNA, 56 bp, Artificial; identical to SEQ ID NO: 475633
  Synthetic oligonucleotide

SEQ ID NO: 611144 - DNA, 56 bp, Artificial; identical to SEQ ID NO: 475635
  Synthetic oligonucleotide

SEQ ID NO: 611145 - DNA, 55 bp, Artificial; identical to SEQ ID NO: 475636
  Synthetic oligonucleotide

SEQ ID NO: 611146 - DNA, 52 bp, Artificial; identical to SEQ ID NO: 12100
  Synthetic oligonucleotide

SEQ ID NO: 611147 - DNA, 57 bp, Artificial; identical to SEQ ID NO: 475649
  Synthetic oligonucleotide

SEQ ID NO: 611148 - DNA, 60 bp, Artificial; identical to SEQ ID NO: 475651
  Synthetic oligonucleotide

SEQ ID NO: 611149 - DNA, 60 bp, Artificial; identical to SEQ ID NO: 475652
  Synthetic oligonucleotide

SEQ ID NO: 611150 - DNA, 60 bp, Artificial; identical to SEQ ID NO: 475655
  Synthetic oligonucleotide

SEQ ID NO: 611151 - DNA, 55 bp, Artificial; identical to SEQ ID NO: 475656
  Synthetic oligonucleotide

SEQ ID NO: 611152 - DNA, 55 bp, Artificial; identical to SEQ ID NO: 475657
  Synthetic oligonucleotide

SEQ ID NO: 611153 - DNA, 56 bp, Artificial; identical to SEQ ID NO: 475658
  Synthetic oligonucleotide

SEQ ID NO: 611154 - DNA, 57 bp, Artificial; identical to SEQ ID NO: 475660
  Synthetic oligonucleotide

SEQ ID NO: 611155 - DNA, 56 bp, Artificial; identical to SEQ ID NO: 475663
  Synthetic oligonucleotide

SEQ ID NO: 611156 - DNA, 60 bp, Artificial; identical to SEQ ID NO: 475671
  Synthetic oligonucleotide

SEQ ID NO: 611157 - DNA, 58 bp, Artificial; identical to SEQ ID NO: 475680
  Synthetic oligonucleotide

SEQ ID NO: 611158 - DNA, 59 bp, Artificial; identical to SEQ ID NO: 16693
  Synthetic oligonucleotide

SEQ ID NO: 611159 - DNA, 60 bp, Artificial; identical to SEQ ID NO: 475683
  Synthetic oligonucleotide

SEQ ID NO: 611160 - DNA, 56 bp, Artificial; identical to SEQ ID NO: 475687
  Synthetic oligonucleotide

SEQ ID NO: 611161 - DNA, 56 bp, Artificial; identical to SEQ ID NO: 19610
  Synthetic oligonucleotide

SEQ ID NO: 611162 - DNA, 59 bp, Artificial; identical to SEQ ID NO: 475688
  Synthetic oligonucleotide

SEQ ID NO: 611163 - DNA, 53 bp, Artificial; identical to SEQ ID NO: 475690
  Synthetic oligonucleotide

SEQ ID NO: 611164 - DNA, 60 bp, Artificial; identical to SEQ ID NO: 475694
  Synthetic oligonucleotide

SEQ ID NO: 611165 - DNA, 50 bp, Artificial; identical to SEQ ID NO: 475695
  Synthetic oligonucleotide

SEQ ID NO: 611166 - DNA, 60 bp, Artificial; identical to SEQ ID NO: 11520
  Synthetic oligonucleotide

SEQ ID NO: 611167 - DNA, 60 bp, Artificial; identical to SEQ ID NO: 475696
  Synthetic oligonucleotide

SEQ ID NO: 611168 - DNA, 59 bp, Artificial; identical to SEQ ID NO: 475698
  Synthetic oligonucleotide

SEQ ID NO: 611169 - DNA, 60 bp, Artificial; identical to SEQ ID NO: 475700
  Synthetic oligonucleotide

SEQ ID NO: 611170 - DNA, 60 bp, Artificial; identical to SEQ ID NO: 475701
  Synthetic oligonucleotide

SEQ ID NO: 611171 - DNA, 53 bp, Artificial; identical to SEQ ID NO: 475703
  Synthetic oligonucleotide

SEQ ID NO: 611172 - DNA, 60 bp, Artificial; identical to SEQ ID NO: 475704
  Synthetic oligonucleotide

SEQ ID NO: 611173 - DNA, 55 bp, Artificial; identical to SEQ ID NO: 475706
  Synthetic oligonucleotide

SEQ ID NO: 611174 - DNA, 54 bp, Artificial; identical to SEQ ID NO: 475709
  Synthetic oligonucleotide

SEQ ID NO: 611175 - DNA, 55 bp, Artificial; identical to SEQ ID NO: 475711
  Synthetic oligonucleotide

SEQ ID NO: 611176 - DNA, 60 bp, Artificial; identical to SEQ ID NO: 5965
  Synthetic oligonucleotide

SEQ ID NO: 611177 - DNA, 60 bp, Artificial; identical to SEQ ID NO: 475714
  Synthetic oligonucleotide

SEQ ID NO: 611178 - DNA, 60 bp, Artificial; identical to SEQ ID NO: 475716
  Synthetic oligonucleotide

SEQ ID NO: 611179 - DNA, 55 bp, Artificial; identical to SEQ ID NO: 475718
  Synthetic oligonucleotide

SEQ ID NO: 611180 - DNA, 59 bp, Artificial; identical to SEQ ID NO: 475719
  Synthetic oligonucleotide

SEQ ID NO: 611181 - DNA, 57 bp, Artificial; identical to SEQ ID NO: 475722
  Synthetic oligonucleotide

SEQ ID NO: 611182 - DNA, 60 bp, Artificial; identical to SEQ ID NO: 14508
  Synthetic oligonucleotide

SEQ ID NO: 611183 - DNA, 60 bp, Artificial; identical to SEQ ID NO: 49786
  Synthetic oligonucleotide

SEQ ID NO: 611184 - DNA, 60 bp, Artificial; identical to SEQ ID NO: 475730
  Synthetic oligonucleotide

SEQ ID NO: 611185 - DNA, 60 bp, Artificial; identical to SEQ ID NO: 475731
  Synthetic oligonucleotide

SEQ ID NO: 611186 - DNA, 58 bp, Artificial; identical to SEQ ID NO: 15916
  Synthetic oligonucleotide

SEQ ID NO: 611187 - DNA, 54 bp, Artificial; identical to SEQ ID NO: 475736
  Synthetic oligonucleotide

SEQ ID NO: 611188 - DNA, 56 bp, Artificial; identical to SEQ ID NO: 475737
  Synthetic oligonucleotide

SEQ ID NO: 611189 - DNA, 54 bp, Artificial; identical to SEQ ID NO: 475741
  Synthetic oligonucleotide

SEQ ID NO: 611190 - DNA, 54 bp, Artificial; identical to SEQ ID NO: 475744
  Synthetic oligonucleotide

SEQ ID NO: 611191 - DNA, 55 bp, Artificial; identical to SEQ ID NO: 475746
  Synthetic oligonucleotide

SEQ ID NO: 611192 - DNA, 59 bp, Artificial; identical to SEQ ID NO: 475747
  Synthetic oligonucleotide

SEQ ID NO: 611193 - DNA, 56 bp, Artificial; identical to SEQ ID NO: 19893
  Synthetic oligonucleotide

SEQ ID NO: 611194 - DNA, 60 bp, Artificial; identical to SEQ ID NO: 475750
  Synthetic oligonucleotide

SEQ ID NO: 611195 - DNA, 53 bp, Artificial; identical to SEQ ID NO: 475751
  Synthetic oligonucleotide

SEQ ID NO: 611196 - DNA, 60 bp, Artificial; identical to SEQ ID NO: 475752
  Synthetic oligonucleotide

SEQ ID NO: 611197 - DNA, 55 bp, Artificial; identical to SEQ ID NO: 475755
  Synthetic oligonucleotide

SEQ ID NO: 611198 - DNA, 54 bp, Artificial; identical to SEQ ID NO: 475756
  Synthetic oligonucleotide

SEQ ID NO: 611199 - DNA, 57 bp, Artificial; identical to SEQ ID NO: 475758
  Synthetic oligonucleotide

SEQ ID NO: 611200 - DNA, 60 bp, Artificial; identical to SEQ ID NO: 475766
  Synthetic oligonucleotide

SEQ ID NO: 611201 - DNA, 60 bp, Artificial; identical to SEQ ID NO: 475769
  Synthetic oligonucleotide

SEQ ID NO: 611202 - DNA, 60 bp, Artificial; identical to SEQ ID NO: 475770
  Synthetic oligonucleotide

SEQ ID NO: 611203 - DNA, 55 bp, Artificial; identical to SEQ ID NO: 9544
  Synthetic oligonucleotide

SEQ ID NO: 611204 - DNA, 60 bp, Artificial; identical to SEQ ID NO: 475777
  Synthetic oligonucleotide

SEQ ID NO: 611205 - DNA, 58 bp, Artificial; identical to SEQ ID NO: 475782
  Synthetic oligonucleotide

SEQ ID NO: 611206 - DNA, 60 bp, Artificial; identical to SEQ ID NO: 475784
  Synthetic oligonucleotide

SEQ ID NO: 611207 - DNA, 57 bp, Artificial; identical to SEQ ID NO: 18668
  Synthetic oligonucleotide

SEQ ID NO: 611208 - DNA, 53 bp, Artificial; identical to SEQ ID NO: 475789
  Synthetic oligonucleotide

SEQ ID NO: 611209 - DNA, 60 bp, Artificial; identical to SEQ ID NO: 11428
  Synthetic oligonucleotide

SEQ ID NO: 611210 - DNA, 55 bp, Artificial; identical to SEQ ID NO: 475798
  Synthetic oligonucleotide

SEQ ID NO: 611211 - DNA, 60 bp, Artificial; identical to SEQ ID NO: 475801
  Synthetic oligonucleotide

SEQ ID NO: 611212 - DNA, 53 bp, Artificial; identical to SEQ ID NO: 475802
  Synthetic oligonucleotide

SEQ ID NO: 611213 - DNA, 56 bp, Artificial; identical to SEQ ID NO: 475805
  Synthetic oligonucleotide

SEQ ID NO: 611214 - DNA, 60 bp, Artificial; identical to SEQ ID NO: 475806
  Synthetic oligonucleotide

SEQ ID NO: 611215 - DNA, 60 bp, Artificial; identical to SEQ ID NO: 475810
  Synthetic oligonucleotide

SEQ ID NO: 611216 - DNA, 55 bp, Artificial; identical to SEQ ID NO: 475815
  Synthetic oligonucleotide

SEQ ID NO: 611217 - DNA, 58 bp, Artificial; identical to SEQ ID NO: 475818
  Synthetic oligonucleotide

SEQ ID NO: 611218 - DNA, 60 bp, Artificial; identical to SEQ ID NO: 475819
  Synthetic oligonucleotide

SEQ ID NO: 611219 - DNA, 55 bp, Artificial; identical to SEQ ID NO: 475822
  Synthetic oligonucleotide

SEQ ID NO: 611220 - DNA, 52 bp, Artificial; identical to SEQ ID NO: 475830
  Synthetic oligonucleotide

SEQ ID NO: 611221 - DNA, 59 bp, Artificial; identical to SEQ ID NO: 16113
  Synthetic oligonucleotide

SEQ ID NO: 611222 - DNA, 60 bp, Artificial; identical to SEQ ID NO: 475840
  Synthetic oligonucleotide

SEQ ID NO: 611223 - DNA, 58 bp, Artificial; identical to SEQ ID NO: 475841
  Synthetic oligonucleotide

SEQ ID NO: 611224 - DNA, 55 bp, Artificial; identical to SEQ ID NO: 475842
  Synthetic oligonucleotide

SEQ ID NO: 611225 - DNA, 51 bp, Artificial; identical to SEQ ID NO: 475843
  Synthetic oligonucleotide

SEQ ID NO: 611226 - DNA, 60 bp, Artificial; identical to SEQ ID NO: 475844
  Synthetic oligonucleotide

SEQ ID NO: 611227 - DNA, 60 bp, Artificial; identical to SEQ ID NO: 475847
  Synthetic oligonucleotide

SEQ ID NO: 611228 - DNA, 58 bp, Artificial; identical to SEQ ID NO: 475849
  Synthetic oligonucleotide

SEQ ID NO: 611229 - DNA, 59 bp, Artificial; identical to SEQ ID NO: 475850
  Synthetic oligonucleotide

SEQ ID NO: 611230 - DNA, 53 bp, Artificial; identical to SEQ ID NO: 475857
  Synthetic oligonucleotide

SEQ ID NO: 611231 - DNA, 56 bp, Artificial; identical to SEQ ID NO: 475858
  Synthetic oligonucleotide

SEQ ID NO: 611232 - DNA, 60 bp, Artificial; identical to SEQ ID NO: 475859
  Synthetic oligonucleotide

SEQ ID NO: 611233 - DNA, 54 bp, Artificial; identical to SEQ ID NO: 475860
  Synthetic oligonucleotide

SEQ ID NO: 611234 - DNA, 60 bp, Artificial; identical to SEQ ID NO: 475864
  Synthetic oligonucleotide

SEQ ID NO: 611235 - DNA, 52 bp, Artificial; identical to SEQ ID NO: 475866
  Synthetic oligonucleotide

SEQ ID NO: 611236 - DNA, 60 bp, Artificial; identical to SEQ ID NO: 475868
  Synthetic oligonucleotide

SEQ ID NO: 611237 - DNA, 60 bp, Artificial; identical to SEQ ID NO: 475869
  Synthetic oligonucleotide

SEQ ID NO: 611238 - DNA, 58 bp, Artificial; identical to SEQ ID NO: 475873
  Synthetic oligonucleotide

SEQ ID NO: 611239 - DNA, 58 bp, Artificial; identical to SEQ ID NO: 475874
  Synthetic oligonucleotide

SEQ ID NO: 611240 - DNA, 59 bp, Artificial; identical to SEQ ID NO: 475875
  Synthetic oligonucleotide

SEQ ID NO: 611241 - DNA, 60 bp, Artificial; identical to SEQ ID NO: 475876
  Synthetic oligonucleotide

SEQ ID NO: 611242 - DNA, 60 bp, Artificial; identical to SEQ ID NO: 13423
  Synthetic oligonucleotide

SEQ ID NO: 611243 - DNA, 56 bp, Artificial; identical to SEQ ID NO: 475878
  Synthetic oligonucleotide

SEQ ID NO: 611244 - DNA, 58 bp, Artificial; identical to SEQ ID NO: 475883
  Synthetic oligonucleotide

SEQ ID NO: 611245 - DNA, 60 bp, Artificial; identical to SEQ ID NO: 475884
  Synthetic oligonucleotide

SEQ ID NO: 611246 - DNA, 59 bp, Artificial; identical to SEQ ID NO: 475887
  Synthetic oligonucleotide

SEQ ID NO: 611247 - DNA, 58 bp, Artificial; identical to SEQ ID NO: 475891
  Synthetic oligonucleotide

SEQ ID NO: 611248 - DNA, 60 bp, Artificial; identical to SEQ ID NO: 475893
  Synthetic oligonucleotide

SEQ ID NO: 611249 - DNA, 60 bp, Artificial; identical to SEQ ID NO: 475897
  Synthetic oligonucleotide

SEQ ID NO: 611250 - DNA, 60 bp, Artificial; identical to SEQ ID NO: 475898
  Synthetic oligonucleotide

SEQ ID NO: 611251 - DNA, 59 bp, Artificial; identical to SEQ ID NO: 475900
  Synthetic oligonucleotide

SEQ ID NO: 611252 - DNA, 57 bp, Artificial; identical to SEQ ID NO: 475905
  Synthetic oligonucleotide

SEQ ID NO: 611253 - DNA, 60 bp, Artificial; identical to SEQ ID NO: 475906
  Synthetic oligonucleotide

SEQ ID NO: 611254 - DNA, 60 bp, Artificial; identical to SEQ ID NO: 475908
  Synthetic oligonucleotide

SEQ ID NO: 611255 - DNA, 60 bp, Artificial; identical to SEQ ID NO: 475917
  Synthetic oligonucleotide

SEQ ID NO: 611256 - DNA, 57 bp, Artificial; identical to SEQ ID NO: 475918
  Synthetic oligonucleotide

SEQ ID NO: 611257 - DNA, 59 bp, Artificial; identical to SEQ ID NO: 475921
  Synthetic oligonucleotide

SEQ ID NO: 611258 - DNA, 51 bp, Artificial; identical to SEQ ID NO: 475924
  Synthetic oligonucleotide

SEQ ID NO: 611259 - DNA, 60 bp, Artificial; identical to SEQ ID NO: 475930
  Synthetic oligonucleotide

SEQ ID NO: 611260 - DNA, 57 bp, Artificial; identical to SEQ ID NO: 475931
  Synthetic oligonucleotide

SEQ ID NO: 611261 - DNA, 60 bp, Artificial; identical to SEQ ID NO: 475934
  Synthetic oligonucleotide

SEQ ID NO: 611262 - DNA, 60 bp, Artificial; identical to SEQ ID NO: 475935
  Synthetic oligonucleotide

SEQ ID NO: 611263 - DNA, 60 bp, Artificial; identical to SEQ ID NO: 475938
  Synthetic oligonucleotide

SEQ ID NO: 611264 - DNA, 60 bp, Artificial; identical to SEQ ID NO: 475951
  Synthetic oligonucleotide

SEQ ID NO: 611265 - DNA, 57 bp, Artificial; identical to SEQ ID NO: 18997
  Synthetic oligonucleotide

SEQ ID NO: 611266 - DNA, 58 bp, Artificial; identical to SEQ ID NO: 475955
  Synthetic oligonucleotide

SEQ ID NO: 611267 - DNA, 53 bp, Artificial; identical to SEQ ID NO: 475957
  Synthetic oligonucleotide

SEQ ID NO: 611268 - DNA, 57 bp, Artificial; identical to SEQ ID NO: 475962
  Synthetic oligonucleotide

SEQ ID NO: 611269 - DNA, 60 bp, Artificial; identical to SEQ ID NO: 475963
  Synthetic oligonucleotide

SEQ ID NO: 611270 - DNA, 55 bp, Artificial; identical to SEQ ID NO: 475968
  Synthetic oligonucleotide

SEQ ID NO: 611271 - DNA, 57 bp, Artificial; identical to SEQ ID NO: 475971
  Synthetic oligonucleotide

SEQ ID NO: 611272 - DNA, 55 bp, Artificial; identical to SEQ ID NO: 475974
  Synthetic oligonucleotide

SEQ ID NO: 611273 - DNA, 54 bp, Artificial; identical to SEQ ID NO: 475976
  Synthetic oligonucleotide

SEQ ID NO: 611274 - DNA, 60 bp, Artificial; identical to SEQ ID NO: 475978
  Synthetic oligonucleotide

SEQ ID NO: 611275 - DNA, 60 bp, Artificial; identical to SEQ ID NO: 475981
  Synthetic oligonucleotide

SEQ ID NO: 611276 - DNA, 60 bp, Artificial; identical to SEQ ID NO: 475983
  Synthetic oligonucleotide

SEQ ID NO: 611277 - DNA, 55 bp, Artificial; identical to SEQ ID NO: 475984
  Synthetic oligonucleotide

SEQ ID NO: 611278 - DNA, 60 bp, Artificial; identical to SEQ ID NO: 475988
  Synthetic oligonucleotide

SEQ ID NO: 611279 - DNA, 60 bp, Artificial; identical to SEQ ID NO: 475999
  Synthetic oligonucleotide

SEQ ID NO: 611280 - DNA, 60 bp, Artificial; identical to SEQ ID NO: 476001
  Synthetic oligonucleotide

SEQ ID NO: 611281 - DNA, 55 bp, Artificial; identical to SEQ ID NO: 476005
  Synthetic oligonucleotide

SEQ ID NO: 611282 - DNA, 55 bp, Artificial; identical to SEQ ID NO: 476009
  Synthetic oligonucleotide

SEQ ID NO: 611283 - DNA, 60 bp, Artificial; identical to SEQ ID NO: 476013
  Synthetic oligonucleotide

SEQ ID NO: 611284 - DNA, 55 bp, Artificial; identical to SEQ ID NO: 476014
  Synthetic oligonucleotide

SEQ ID NO: 611285 - DNA, 56 bp, Artificial; identical to SEQ ID NO: 476016
  Synthetic oligonucleotide

SEQ ID NO: 611286 - DNA, 60 bp, Artificial; identical to SEQ ID NO: 476020
  Synthetic oligonucleotide

SEQ ID NO: 611287 - DNA, 51 bp, Artificial; identical to SEQ ID NO: 476025
  Synthetic oligonucleotide

SEQ ID NO: 611288 - DNA, 60 bp, Artificial; identical to SEQ ID NO: 476027
  Synthetic oligonucleotide

SEQ ID NO: 611289 - DNA, 60 bp, Artificial; identical to SEQ ID NO: 476028
  Synthetic oligonucleotide

SEQ ID NO: 611290 - DNA, 60 bp, Artificial; identical to SEQ ID NO: 476031
  Synthetic oligonucleotide

SEQ ID NO: 611291 - DNA, 60 bp, Artificial; identical to SEQ ID NO: 476034
  Synthetic oligonucleotide

SEQ ID NO: 611292 - DNA, 56 bp, Artificial; identical to SEQ ID NO: 476043
  Synthetic oligonucleotide

SEQ ID NO: 611293 - DNA, 53 bp, Artificial; identical to SEQ ID NO: 476044
  Synthetic oligonucleotide

SEQ ID NO: 611294 - DNA, 60 bp, Artificial; identical to SEQ ID NO: 476046
  Synthetic oligonucleotide

SEQ ID NO: 611295 - DNA, 60 bp, Artificial; identical to SEQ ID NO: 476048
  Synthetic oligonucleotide

SEQ ID NO: 611296 - DNA, 60 bp, Artificial; identical to SEQ ID NO: 476050
  Synthetic oligonucleotide

SEQ ID NO: 611297 - DNA, 55 bp, Artificial; identical to SEQ ID NO: 476057
  Synthetic oligonucleotide

SEQ ID NO: 611298 - DNA, 52 bp, Artificial; identical to SEQ ID NO: 476059
  Synthetic oligonucleotide

SEQ ID NO: 611299 - DNA, 56 bp, Artificial; identical to SEQ ID NO: 476060
  Synthetic oligonucleotide

SEQ ID NO: 611300 - DNA, 54 bp, Artificial; identical to SEQ ID NO: 476061
  Synthetic oligonucleotide

SEQ ID NO: 611301 - DNA, 57 bp, Artificial; identical to SEQ ID NO: 476063
  Synthetic oligonucleotide

SEQ ID NO: 611302 - DNA, 59 bp, Artificial; identical to SEQ ID NO: 476065
  Synthetic oligonucleotide

SEQ ID NO: 611303 - DNA, 60 bp, Artificial; identical to SEQ ID NO: 476070
  Synthetic oligonucleotide

SEQ ID NO: 611304 - DNA, 60 bp, Artificial; identical to SEQ ID NO: 476071
  Synthetic oligonucleotide

SEQ ID NO: 611305 - DNA, 52 bp, Artificial; identical to SEQ ID NO: 476073
  Synthetic oligonucleotide

SEQ ID NO: 611306 - DNA, 53 bp, Artificial; identical to SEQ ID NO: 476075
  Synthetic oligonucleotide

SEQ ID NO: 611307 - DNA, 53 bp, Artificial; identical to SEQ ID NO: 476081
  Synthetic oligonucleotide

SEQ ID NO: 611308 - DNA, 60 bp, Artificial; identical to SEQ ID NO: 476082
  Synthetic oligonucleotide

SEQ ID NO: 611309 - DNA, 60 bp, Artificial; identical to SEQ ID NO: 476086
  Synthetic oligonucleotide

SEQ ID NO: 611310 - DNA, 60 bp, Artificial; identical to SEQ ID NO: 476090
  Synthetic oligonucleotide

SEQ ID NO: 611311 - DNA, 52 bp, Artificial; identical to SEQ ID NO: 476092
  Synthetic oligonucleotide

SEQ ID NO: 611312 - DNA, 60 bp, Artificial; identical to SEQ ID NO: 476094
  Synthetic oligonucleotide

SEQ ID NO: 611313 - DNA, 55 bp, Artificial; identical to SEQ ID NO: 476102
  Synthetic oligonucleotide

SEQ ID NO: 611314 - DNA, 60 bp, Artificial; identical to SEQ ID NO: 476104
  Synthetic oligonucleotide

SEQ ID NO: 611315 - DNA, 55 bp, Artificial; identical to SEQ ID NO: 476105
  Synthetic oligonucleotide

SEQ ID NO: 611316 - DNA, 60 bp, Artificial; identical to SEQ ID NO: 476108
  Synthetic oligonucleotide

SEQ ID NO: 611317 - DNA, 60 bp, Artificial; identical to SEQ ID NO: 476109
  Synthetic oligonucleotide

SEQ ID NO: 611318 - DNA, 60 bp, Artificial; identical to SEQ ID NO: 476112
  Synthetic oligonucleotide

SEQ ID NO: 611319 - DNA, 56 bp, Artificial; identical to SEQ ID NO: 476118
  Synthetic oligonucleotide

SEQ ID NO: 611320 - DNA, 55 bp, Artificial; identical to SEQ ID NO: 476119
  Synthetic oligonucleotide

SEQ ID NO: 611321 - DNA, 52 bp, Artificial; identical to SEQ ID NO: 476124
  Synthetic oligonucleotide

SEQ ID NO: 611322 - DNA, 59 bp, Artificial; identical to SEQ ID NO: 476126
  Synthetic oligonucleotide

SEQ ID NO: 611323 - DNA, 60 bp, Artificial; identical to SEQ ID NO: 476130
  Synthetic oligonucleotide

SEQ ID NO: 611324 - DNA, 60 bp, Artificial; identical to SEQ ID NO: 476132
  Synthetic oligonucleotide

SEQ ID NO: 611325 - DNA, 53 bp, Artificial; identical to SEQ ID NO: 476134
  Synthetic oligonucleotide

SEQ ID NO: 611326 - DNA, 59 bp, Artificial; identical to SEQ ID NO: 476135
  Synthetic oligonucleotide

SEQ ID NO: 611327 - DNA, 60 bp, Artificial; identical to SEQ ID NO: 476137
  Synthetic oligonucleotide

SEQ ID NO: 611328 - DNA, 54 bp, Artificial; identical to SEQ ID NO: 476138
  Synthetic oligonucleotide

SEQ ID NO: 611329 - DNA, 55 bp, Artificial; identical to SEQ ID NO: 476141
  Synthetic oligonucleotide

SEQ ID NO: 611330 - DNA, 60 bp, Artificial; identical to SEQ ID NO: 476145
  Synthetic oligonucleotide

SEQ ID NO: 611331 - DNA, 55 bp, Artificial; identical to SEQ ID NO: 476147
  Synthetic oligonucleotide

SEQ ID NO: 611332 - DNA, 57 bp, Artificial; identical to SEQ ID NO: 476148
  Synthetic oligonucleotide

SEQ ID NO: 611333 - DNA, 60 bp, Artificial; identical to SEQ ID NO: 476150
  Synthetic oligonucleotide

SEQ ID NO: 611334 - DNA, 52 bp, Artificial; identical to SEQ ID NO: 476152
  Synthetic oligonucleotide

SEQ ID NO: 611335 - DNA, 55 bp, Artificial; identical to SEQ ID NO: 476156
  Synthetic oligonucleotide

SEQ ID NO: 611336 - DNA, 52 bp, Artificial; identical to SEQ ID NO: 476159
  Synthetic oligonucleotide

SEQ ID NO: 611337 - DNA, 55 bp, Artificial; identical to SEQ ID NO: 476165
  Synthetic oligonucleotide

SEQ ID NO: 611338 - DNA, 51 bp, Artificial; identical to SEQ ID NO: 476168
  Synthetic oligonucleotide

SEQ ID NO: 611339 - DNA, 57 bp, Artificial; identical to SEQ ID NO: 476170
  Synthetic oligonucleotide

SEQ ID NO: 611340 - DNA, 60 bp, Artificial; identical to SEQ ID NO: 476172
  Synthetic oligonucleotide

SEQ ID NO: 611341 - DNA, 53 bp, Artificial; identical to SEQ ID NO: 476175
  Synthetic oligonucleotide

SEQ ID NO: 611342 - DNA, 60 bp, Artificial; identical to SEQ ID NO: 476177
  Synthetic oligonucleotide

SEQ ID NO: 611343 - DNA, 60 bp, Artificial; identical to SEQ ID NO: 476179
  Synthetic oligonucleotide

SEQ ID NO: 611344 - DNA, 55 bp, Artificial; identical to SEQ ID NO: 476182
  Synthetic oligonucleotide

SEQ ID NO: 611345 - DNA, 54 bp, Artificial; identical to SEQ ID NO: 476183
  Synthetic oligonucleotide

SEQ ID NO: 611346 - DNA, 58 bp, Artificial; identical to SEQ ID NO: 476186
  Synthetic oligonucleotide

SEQ ID NO: 611347 - DNA, 60 bp, Artificial; identical to SEQ ID NO: 476191
  Synthetic oligonucleotide

SEQ ID NO: 611348 - DNA, 56 bp, Artificial; identical to SEQ ID NO: 476192
  Synthetic oligonucleotide

SEQ ID NO: 611349 - DNA, 60 bp, Artificial; identical to SEQ ID NO: 476196
  Synthetic oligonucleotide

SEQ ID NO: 611350 - DNA, 59 bp, Artificial; identical to SEQ ID NO: 476197
  Synthetic oligonucleotide

SEQ ID NO: 611351 - DNA, 60 bp, Artificial; identical to SEQ ID NO: 476198
  Synthetic oligonucleotide

SEQ ID NO: 611352 - DNA, 60 bp, Artificial; identical to SEQ ID NO: 476204
  Synthetic oligonucleotide

SEQ ID NO: 611353 - DNA, 60 bp, Artificial; identical to SEQ ID NO: 476206
  Synthetic oligonucleotide

SEQ ID NO: 611354 - DNA, 51 bp, Artificial; identical to SEQ ID NO: 476208
  Synthetic oligonucleotide

SEQ ID NO: 611355 - DNA, 60 bp, Artificial; identical to SEQ ID NO: 476211
  Synthetic oligonucleotide

SEQ ID NO: 611356 - DNA, 60 bp, Artificial; identical to SEQ ID NO: 476212
  Synthetic oligonucleotide

SEQ ID NO: 611357 - DNA, 58 bp, Artificial; identical to SEQ ID NO: 476218
  Synthetic oligonucleotide

SEQ ID NO: 611358 - DNA, 58 bp, Artificial; identical to SEQ ID NO: 476221
  Synthetic oligonucleotide

SEQ ID NO: 611359 - DNA, 59 bp, Artificial; identical to SEQ ID NO: 476223
  Synthetic oligonucleotide

SEQ ID NO: 611360 - DNA, 53 bp, Artificial; identical to SEQ ID NO: 476228
  Synthetic oligonucleotide

SEQ ID NO: 611361 - DNA, 57 bp, Artificial; identical to SEQ ID NO: 16369
  Synthetic oligonucleotide

SEQ ID NO: 611362 - DNA, 60 bp, Artificial; identical to SEQ ID NO: 476229
  Synthetic oligonucleotide

SEQ ID NO: 611363 - DNA, 55 bp, Artificial; identical to SEQ ID NO: 476232
  Synthetic oligonucleotide

SEQ ID NO: 611364 - DNA, 50 bp, Artificial; identical to SEQ ID NO: 476233
  Synthetic oligonucleotide

SEQ ID NO: 611365 - DNA, 58 bp, Artificial; identical to SEQ ID NO: 476234
  Synthetic oligonucleotide

SEQ ID NO: 611366 - DNA, 60 bp, Artificial; identical to SEQ ID NO: 119927
  Synthetic oligonucleotide

SEQ ID NO: 611367 - DNA, 60 bp, Artificial; identical to SEQ ID NO: 476238
  Synthetic oligonucleotide

SEQ ID NO: 611368 - DNA, 56 bp, Artificial; identical to SEQ ID NO: 476239
  Synthetic oligonucleotide

SEQ ID NO: 611369 - DNA, 51 bp, Artificial; identical to SEQ ID NO: 476240
  Synthetic oligonucleotide

SEQ ID NO: 611370 - DNA, 52 bp, Artificial; identical to SEQ ID NO: 476241
  Synthetic oligonucleotide

SEQ ID NO: 611371 - DNA, 57 bp, Artificial; identical to SEQ ID NO: 476243
  Synthetic oligonucleotide

SEQ ID NO: 611372 - DNA, 54 bp, Artificial; identical to SEQ ID NO: 476244
  Synthetic oligonucleotide

SEQ ID NO: 611373 - DNA, 55 bp, Artificial; identical to SEQ ID NO: 476245
  Synthetic oligonucleotide

SEQ ID NO: 611374 - DNA, 60 bp, Artificial; identical to SEQ ID NO: 476246
  Synthetic oligonucleotide

SEQ ID NO: 611375 - DNA, 55 bp, Artificial; identical to SEQ ID NO: 476248
  Synthetic oligonucleotide

SEQ ID NO: 611376 - DNA, 56 bp, Artificial; identical to SEQ ID NO: 476250
  Synthetic oligonucleotide

SEQ ID NO: 611377 - DNA, 59 bp, Artificial; identical to SEQ ID NO: 476255
  Synthetic oligonucleotide

SEQ ID NO: 611378 - DNA, 54 bp, Artificial; identical to SEQ ID NO: 476256
  Synthetic oligonucleotide

SEQ ID NO: 611379 - DNA, 56 bp, Artificial; identical to SEQ ID NO: 476257
  Synthetic oligonucleotide

SEQ ID NO: 611380 - DNA, 55 bp, Artificial; identical to SEQ ID NO: 476258
  Synthetic oligonucleotide

SEQ ID NO: 611381 - DNA, 57 bp, Artificial; identical to SEQ ID NO: 476259
  Synthetic oligonucleotide

SEQ ID NO: 611382 - DNA, 56 bp, Artificial; identical to SEQ ID NO: 476260
  Synthetic oligonucleotide

SEQ ID NO: 611383 - DNA, 56 bp, Artificial; identical to SEQ ID NO: 18498
  Synthetic oligonucleotide

SEQ ID NO: 611384 - DNA, 54 bp, Artificial; identical to SEQ ID NO: 476261
  Synthetic oligonucleotide

SEQ ID NO: 611385 - DNA, 54 bp, Artificial; identical to SEQ ID NO: 476262
  Synthetic oligonucleotide

SEQ ID NO: 611386 - DNA, 54 bp, Artificial; identical to SEQ ID NO: 18573
  Synthetic oligonucleotide

SEQ ID NO: 611387 - DNA, 58 bp, Artificial; identical to SEQ ID NO: 18639
  Synthetic oligonucleotide

SEQ ID NO: 611388 - DNA, 54 bp, Artificial; identical to SEQ ID NO: 476263
  Synthetic oligonucleotide

SEQ ID NO: 611389 - DNA, 51 bp, Artificial; identical to SEQ ID NO: 476264
  Synthetic oligonucleotide

SEQ ID NO: 611390 - DNA, 60 bp, Artificial; identical to SEQ ID NO: 476266
  Synthetic oligonucleotide

SEQ ID NO: 611391 - DNA, 60 bp, Artificial; identical to SEQ ID NO: 476267
  Synthetic oligonucleotide

SEQ ID NO: 611392 - DNA, 55 bp, Artificial; identical to SEQ ID NO: 476269
  Synthetic oligonucleotide

SEQ ID NO: 611393 - DNA, 54 bp, Artificial; identical to SEQ ID NO: 476271
  Synthetic oligonucleotide

SEQ ID NO: 611394 - DNA, 48 bp, Artificial; identical to SEQ ID NO: 476274
  Synthetic oligonucleotide

SEQ ID NO: 611395 - DNA, 56 bp, Artificial; identical to SEQ ID NO: 476277
  Synthetic oligonucleotide

SEQ ID NO: 611396 - DNA, 57 bp, Artificial; identical to SEQ ID NO: 16019
  Synthetic oligonucleotide

SEQ ID NO: 611397 - DNA, 57 bp, Artificial; identical to SEQ ID NO: 476280
  Synthetic oligonucleotide

SEQ ID NO: 611398 - DNA, 52 bp, Artificial; identical to SEQ ID NO: 476283
  Synthetic oligonucleotide

SEQ ID NO: 611399 - DNA, 52 bp, Artificial; identical to SEQ ID NO: 476286
  Synthetic oligonucleotide

SEQ ID NO: 611400 - DNA, 56 bp, Artificial; identical to SEQ ID NO: 476289
  Synthetic oligonucleotide

SEQ ID NO: 611401 - DNA, 57 bp, Artificial; identical to SEQ ID NO: 476290
  Synthetic oligonucleotide

SEQ ID NO: 611402 - DNA, 60 bp, Artificial; identical to SEQ ID NO: 476291
  Synthetic oligonucleotide

SEQ ID NO: 611403 - DNA, 57 bp, Artificial; identical to SEQ ID NO: 476293
  Synthetic oligonucleotide

SEQ ID NO: 611404 - DNA, 57 bp, Artificial; identical to SEQ ID NO: 476294
  Synthetic oligonucleotide

SEQ ID NO: 611405 - DNA, 55 bp, Artificial; identical to SEQ ID NO: 476298
  Synthetic oligonucleotide

SEQ ID NO: 611406 - DNA, 53 bp, Artificial; identical to SEQ ID NO: 476301
  Synthetic oligonucleotide

SEQ ID NO: 611407 - DNA, 60 bp, Artificial; identical to SEQ ID NO: 124193
  Synthetic oligonucleotide

SEQ ID NO: 611408 - DNA, 55 bp, Artificial; identical to SEQ ID NO: 476303
  Synthetic oligonucleotide

SEQ ID NO: 611409 - DNA, 59 bp, Artificial; identical to SEQ ID NO: 476304
  Synthetic oligonucleotide

SEQ ID NO: 611410 - DNA, 51 bp, Artificial; identical to SEQ ID NO: 476310
  Synthetic oligonucleotide

SEQ ID NO: 611411 - DNA, 55 bp, Artificial; identical to SEQ ID NO: 476311
  Synthetic oligonucleotide

SEQ ID NO: 611412 - DNA, 54 bp, Artificial; identical to SEQ ID NO: 476314
  Synthetic oligonucleotide

SEQ ID NO: 611413 - DNA, 52 bp, Artificial; identical to SEQ ID NO: 476315
  Synthetic oligonucleotide

SEQ ID NO: 611414 - DNA, 60 bp, Artificial; identical to SEQ ID NO: 476316
  Synthetic oligonucleotide

SEQ ID NO: 611415 - DNA, 60 bp, Artificial; identical to SEQ ID NO: 476317
  Synthetic oligonucleotide

SEQ ID NO: 611416 - DNA, 53 bp, Artificial; identical to SEQ ID NO: 476321
  Synthetic oligonucleotide

SEQ ID NO: 611417 - DNA, 58 bp, Artificial; identical to SEQ ID NO: 476322
  Synthetic oligonucleotide

SEQ ID NO: 611418 - DNA, 60 bp, Artificial; identical to SEQ ID NO: 476323
  Synthetic oligonucleotide

SEQ ID NO: 611419 - DNA, 60 bp, Artificial; identical to SEQ ID NO: 476324
  Synthetic oligonucleotide

SEQ ID NO: 611420 - DNA, 60 bp, Artificial; identical to SEQ ID NO: 476326
  Synthetic oligonucleotide

SEQ ID NO: 611421 - DNA, 60 bp, Artificial; identical to SEQ ID NO: 476329
  Synthetic oligonucleotide

SEQ ID NO: 611422 - DNA, 55 bp, Artificial; identical to SEQ ID NO: 476330
  Synthetic oligonucleotide

SEQ ID NO: 611423 - DNA, 57 bp, Artificial; identical to SEQ ID NO: 476332
  Synthetic oligonucleotide

SEQ ID NO: 611424 - DNA, 58 bp, Artificial; identical to SEQ ID NO: 476334
  Synthetic oligonucleotide

SEQ ID NO: 611425 - DNA, 50 bp, Artificial; identical to SEQ ID NO: 476335
  Synthetic oligonucleotide

SEQ ID NO: 611426 - DNA, 55 bp, Artificial; identical to SEQ ID NO: 16249
  Synthetic oligonucleotide

SEQ ID NO: 611427 - DNA, 55 bp, Artificial; identical to SEQ ID NO: 476341
  Synthetic oligonucleotide

SEQ ID NO: 611428 - DNA, 58 bp, Artificial; identical to SEQ ID NO: 476342
  Synthetic oligonucleotide

SEQ ID NO: 611429 - DNA, 54 bp, Artificial; identical to SEQ ID NO: 476344
  Synthetic oligonucleotide

SEQ ID NO: 611430 - DNA, 60 bp, Artificial; identical to SEQ ID NO: 476346
  Synthetic oligonucleotide

SEQ ID NO: 611431 - DNA, 55 bp, Artificial; identical to SEQ ID NO: 476347
  Synthetic oligonucleotide

SEQ ID NO: 611432 - DNA, 51 bp, Artificial; identical to SEQ ID NO: 476350
  Synthetic oligonucleotide

SEQ ID NO: 611433 - DNA, 50 bp, Artificial; identical to SEQ ID NO: 476351
  Synthetic oligonucleotide

SEQ ID NO: 611434 - DNA, 58 bp, Artificial; identical to SEQ ID NO: 476353
  Synthetic oligonucleotide

SEQ ID NO: 611435 - DNA, 60 bp, Artificial; identical to SEQ ID NO: 476354
  Synthetic oligonucleotide

SEQ ID NO: 611436 - DNA, 57 bp, Artificial; identical to SEQ ID NO: 476361
  Synthetic oligonucleotide

SEQ ID NO: 611437 - DNA, 56 bp, Artificial; identical to SEQ ID NO: 476362
  Synthetic oligonucleotide

SEQ ID NO: 611438 - DNA, 55 bp, Artificial; identical to SEQ ID NO: 476363
  Synthetic oligonucleotide

SEQ ID NO: 611439 - DNA, 60 bp, Artificial; identical to SEQ ID NO: 476365
  Synthetic oligonucleotide

SEQ ID NO: 611440 - DNA, 58 bp, Artificial; identical to SEQ ID NO: 476369
  Synthetic oligonucleotide

SEQ ID NO: 611441 - DNA, 56 bp, Artificial; identical to SEQ ID NO: 476370
  Synthetic oligonucleotide

SEQ ID NO: 611442 - DNA, 60 bp, Artificial; identical to SEQ ID NO: 476373
  Synthetic oligonucleotide

SEQ ID NO: 611443 - DNA, 59 bp, Artificial; identical to SEQ ID NO: 476375
  Synthetic oligonucleotide

SEQ ID NO: 611444 - DNA, 60 bp, Artificial; identical to SEQ ID NO: 476378
  Synthetic oligonucleotide

SEQ ID NO: 611445 - DNA, 59 bp, Artificial; identical to SEQ ID NO: 476381
  Synthetic oligonucleotide

SEQ ID NO: 611446 - DNA, 55 bp, Artificial; identical to SEQ ID NO: 476382
  Synthetic oligonucleotide

SEQ ID NO: 611447 - DNA, 60 bp, Artificial; identical to SEQ ID NO: 476386
  Synthetic oligonucleotide

SEQ ID NO: 611448 - DNA, 60 bp, Artificial; identical to SEQ ID NO: 476387
  Synthetic oligonucleotide

SEQ ID NO: 611449 - DNA, 56 bp, Artificial; identical to SEQ ID NO: 476391
  Synthetic oligonucleotide

SEQ ID NO: 611450 - DNA, 57 bp, Artificial; identical to SEQ ID NO: 476395
  Synthetic oligonucleotide

SEQ ID NO: 611451 - DNA, 57 bp, Artificial; identical to SEQ ID NO: 476396
  Synthetic oligonucleotide

SEQ ID NO: 611452 - DNA, 50 bp, Artificial; identical to SEQ ID NO: 476399
  Synthetic oligonucleotide

SEQ ID NO: 611453 - DNA, 55 bp, Artificial; identical to SEQ ID NO: 476400
  Synthetic oligonucleotide

SEQ ID NO: 611454 - DNA, 57 bp, Artificial; identical to SEQ ID NO: 476402
  Synthetic oligonucleotide

SEQ ID NO: 611455 - DNA, 58 bp, Artificial; identical to SEQ ID NO: 476403
  Synthetic oligonucleotide

SEQ ID NO: 611456 - DNA, 57 bp, Artificial; identical to SEQ ID NO: 476406
  Synthetic oligonucleotide

SEQ ID NO: 611457 - DNA, 55 bp, Artificial; identical to SEQ ID NO: 476407
  Synthetic oligonucleotide

SEQ ID NO: 611458 - DNA, 59 bp, Artificial; identical to SEQ ID NO: 476408
  Synthetic oligonucleotide

SEQ ID NO: 611459 - DNA, 59 bp, Artificial; identical to SEQ ID NO: 476410
  Synthetic oligonucleotide

SEQ ID NO: 611460 - DNA, 51 bp, Artificial; identical to SEQ ID NO: 476411
  Synthetic oligonucleotide

SEQ ID NO: 611461 - DNA, 59 bp, Artificial; identical to SEQ ID NO: 476413
  Synthetic oligonucleotide

SEQ ID NO: 611462 - DNA, 52 bp, Artificial; identical to SEQ ID NO: 476415
  Synthetic oligonucleotide

SEQ ID NO: 611463 - DNA, 55 bp, Artificial; identical to SEQ ID NO: 476419
  Synthetic oligonucleotide

SEQ ID NO: 611464 - DNA, 57 bp, Artificial; identical to SEQ ID NO: 476420
  Synthetic oligonucleotide

SEQ ID NO: 611465 - DNA, 56 bp, Artificial; identical to SEQ ID NO: 476424
  Synthetic oligonucleotide

SEQ ID NO: 611466 - DNA, 58 bp, Artificial; identical to SEQ ID NO: 476425
  Synthetic oligonucleotide

SEQ ID NO: 611467 - DNA, 54 bp, Artificial; identical to SEQ ID NO: 476427
  Synthetic oligonucleotide

SEQ ID NO: 611468 - DNA, 59 bp, Artificial; identical to SEQ ID NO: 476428
  Synthetic oligonucleotide

SEQ ID NO: 611469 - DNA, 60 bp, Artificial; identical to SEQ ID NO: 476429
  Synthetic oligonucleotide

SEQ ID NO: 611470 - DNA, 59 bp, Artificial; identical to SEQ ID NO: 476430
  Synthetic oligonucleotide

SEQ ID NO: 611471 - DNA, 60 bp, Artificial; identical to SEQ ID NO: 476431
  Synthetic oligonucleotide

SEQ ID NO: 611472 - DNA, 60 bp, Artificial; identical to SEQ ID NO: 476433
  Synthetic oligonucleotide

SEQ ID NO: 611473 - DNA, 52 bp, Artificial; identical to SEQ ID NO: 6766
  Synthetic oligonucleotide

SEQ ID NO: 611474 - DNA, 54 bp, Artificial; identical to SEQ ID NO: 476441
  Synthetic oligonucleotide

SEQ ID NO: 611475 - DNA, 51 bp, Artificial; identical to SEQ ID NO: 476444
  Synthetic oligonucleotide

SEQ ID NO: 611476 - DNA, 52 bp, Artificial; identical to SEQ ID NO: 476445
  Synthetic oligonucleotide

SEQ ID NO: 611477 - DNA, 55 bp, Artificial; identical to SEQ ID NO: 476446
  Synthetic oligonucleotide

SEQ ID NO: 611478 - DNA, 52 bp, Artificial; identical to SEQ ID NO: 476451
  Synthetic oligonucleotide

SEQ ID NO: 611479 - DNA, 52 bp, Artificial; identical to SEQ ID NO: 476452
  Synthetic oligonucleotide

SEQ ID NO: 611480 - DNA, 55 bp, Artificial; identical to SEQ ID NO: 476453
  Synthetic oligonucleotide

SEQ ID NO: 611481 - DNA, 54 bp, Artificial; identical to SEQ ID NO: 476454
  Synthetic oligonucleotide

SEQ ID NO: 611482 - DNA, 60 bp, Artificial; identical to SEQ ID NO: 476456
  Synthetic oligonucleotide

SEQ ID NO: 611483 - DNA, 54 bp, Artificial; identical to SEQ ID NO: 476459
  Synthetic oligonucleotide

SEQ ID NO: 611484 - DNA, 60 bp, Artificial; identical to SEQ ID NO: 476460
  Synthetic oligonucleotide

SEQ ID NO: 611485 - DNA, 55 bp, Artificial; identical to SEQ ID NO: 476462
  Synthetic oligonucleotide

SEQ ID NO: 611486 - DNA, 55 bp, Artificial; identical to SEQ ID NO: 476463
  Synthetic oligonucleotide

SEQ ID NO: 611487 - DNA, 56 bp, Artificial; identical to SEQ ID NO: 476464
  Synthetic oligonucleotide

SEQ ID NO: 611488 - DNA, 60 bp, Artificial; identical to SEQ ID NO: 476465
  Synthetic oligonucleotide

SEQ ID NO: 611489 - DNA, 60 bp, Artificial; identical to SEQ ID NO: 13046
  Synthetic oligonucleotide

SEQ ID NO: 611490 - DNA, 60 bp, Artificial; identical to SEQ ID NO: 476473
  Synthetic oligonucleotide

SEQ ID NO: 611491 - DNA, 53 bp, Artificial; identical to SEQ ID NO: 476478
  Synthetic oligonucleotide

SEQ ID NO: 611492 - DNA, 55 bp, Artificial; identical to SEQ ID NO: 14601
  Synthetic oligonucleotide

SEQ ID NO: 611493 - DNA, 53 bp, Artificial; identical to SEQ ID NO: 476480
  Synthetic oligonucleotide

SEQ ID NO: 611494 - DNA, 55 bp, Artificial; identical to SEQ ID NO: 476481
  Synthetic oligonucleotide

SEQ ID NO: 611495 - DNA, 57 bp, Artificial; identical to SEQ ID NO: 476482
  Synthetic oligonucleotide

SEQ ID NO: 611496 - DNA, 56 bp, Artificial; identical to SEQ ID NO: 476483
  Synthetic oligonucleotide

SEQ ID NO: 611497 - DNA, 60 bp, Artificial; identical to SEQ ID NO: 476486
  Synthetic oligonucleotide

SEQ ID NO: 611498 - DNA, 57 bp, Artificial; identical to SEQ ID NO: 476488
  Synthetic oligonucleotide

SEQ ID NO: 611499 - DNA, 55 bp, Artificial; identical to SEQ ID NO: 476489
  Synthetic oligonucleotide

SEQ ID NO: 611500 - DNA, 53 bp, Artificial; identical to SEQ ID NO: 476491
  Synthetic oligonucleotide

SEQ ID NO: 611501 - DNA, 53 bp, Artificial; identical to SEQ ID NO: 476494
  Synthetic oligonucleotide

SEQ ID NO: 611502 - DNA, 50 bp, Artificial; identical to SEQ ID NO: 476496
  Synthetic oligonucleotide

SEQ ID NO: 611503 - DNA, 59 bp, Artificial; identical to SEQ ID NO: 476497
  Synthetic oligonucleotide

SEQ ID NO: 611504 - DNA, 59 bp, Artificial; identical to SEQ ID NO: 476504
  Synthetic oligonucleotide

SEQ ID NO: 611505 - DNA, 55 bp, Artificial; identical to SEQ ID NO: 476505
  Synthetic oligonucleotide

SEQ ID NO: 611506 - DNA, 59 bp, Artificial; identical to SEQ ID NO: 476507
  Synthetic oligonucleotide

SEQ ID NO: 611507 - DNA, 59 bp, Artificial; identical to SEQ ID NO: 476508
  Synthetic oligonucleotide

SEQ ID NO: 611508 - DNA, 59 bp, Artificial; identical to SEQ ID NO: 18930
  Synthetic oligonucleotide

SEQ ID NO: 611509 - DNA, 56 bp, Artificial; identical to SEQ ID NO: 476509
  Synthetic oligonucleotide

SEQ ID NO: 611510 - DNA, 55 bp, Artificial; identical to SEQ ID NO: 476510
  Synthetic oligonucleotide

SEQ ID NO: 611511 - DNA, 55 bp, Artificial; identical to SEQ ID NO: 476513
  Synthetic oligonucleotide

SEQ ID NO: 611512 - DNA, 56 bp, Artificial; identical to SEQ ID NO: 476516
  Synthetic oligonucleotide

SEQ ID NO: 611513 - DNA, 57 bp, Artificial; identical to SEQ ID NO: 476521
  Synthetic oligonucleotide

SEQ ID NO: 611514 - DNA, 58 bp, Artificial; identical to SEQ ID NO: 476522
  Synthetic oligonucleotide

SEQ ID NO: 611515 - DNA, 60 bp, Artificial; identical to SEQ ID NO: 476523
  Synthetic oligonucleotide

SEQ ID NO: 611516 - DNA, 55 bp, Artificial; identical to SEQ ID NO: 476527
  Synthetic oligonucleotide

SEQ ID NO: 611517 - DNA, 51 bp, Artificial; identical to SEQ ID NO: 476528
  Synthetic oligonucleotide

SEQ ID NO: 611518 - DNA, 59 bp, Artificial; identical to SEQ ID NO: 476532
  Synthetic oligonucleotide

SEQ ID NO: 611519 - DNA, 60 bp, Artificial; identical to SEQ ID NO: 476533
  Synthetic oligonucleotide

SEQ ID NO: 611520 - DNA, 60 bp, Artificial; identical to SEQ ID NO: 476535
  Synthetic oligonucleotide

SEQ ID NO: 611521 - DNA, 59 bp, Artificial; identical to SEQ ID NO: 476536
  Synthetic oligonucleotide

SEQ ID NO: 611522 - DNA, 60 bp, Artificial; identical to SEQ ID NO: 476537
  Synthetic oligonucleotide

SEQ ID NO: 611523 - DNA, 58 bp, Artificial; identical to SEQ ID NO: 476541
  Synthetic oligonucleotide

SEQ ID NO: 611524 - DNA, 60 bp, Artificial; identical to SEQ ID NO: 476542
  Synthetic oligonucleotide

SEQ ID NO: 611525 - DNA, 60 bp, Artificial; identical to SEQ ID NO: 10827
  Synthetic oligonucleotide

SEQ ID NO: 611526 - DNA, 60 bp, Artificial; identical to SEQ ID NO: 476546
  Synthetic oligonucleotide

SEQ ID NO: 611527 - DNA, 51 bp, Artificial; identical to SEQ ID NO: 476547
  Synthetic oligonucleotide

SEQ ID NO: 611528 - DNA, 55 bp, Artificial; identical to SEQ ID NO: 476548
  Synthetic oligonucleotide

SEQ ID NO: 611529 - DNA, 57 bp, Artificial; identical to SEQ ID NO: 476549
  Synthetic oligonucleotide

SEQ ID NO: 611530 - DNA, 57 bp, Artificial; identical to SEQ ID NO: 476551
  Synthetic oligonucleotide

SEQ ID NO: 611531 - DNA, 58 bp, Artificial; identical to SEQ ID NO: 476556
  Synthetic oligonucleotide

SEQ ID NO: 611532 - DNA, 52 bp, Artificial; identical to SEQ ID NO: 476559
  Synthetic oligonucleotide

SEQ ID NO: 611533 - DNA, 55 bp, Artificial; identical to SEQ ID NO: 476565
  Synthetic oligonucleotide

SEQ ID NO: 611534 - DNA, 56 bp, Artificial; identical to SEQ ID NO: 476567
  Synthetic oligonucleotide

SEQ ID NO: 611535 - DNA, 60 bp, Artificial; identical to SEQ ID NO: 476573
  Synthetic oligonucleotide

SEQ ID NO: 611536 - DNA, 57 bp, Artificial; identical to SEQ ID NO: 476574
  Synthetic oligonucleotide

SEQ ID NO: 611537 - DNA, 56 bp, Artificial; identical to SEQ ID NO: 476575
  Synthetic oligonucleotide

SEQ ID NO: 611538 - DNA, 57 bp, Artificial; identical to SEQ ID NO: 476576
  Synthetic oligonucleotide

SEQ ID NO: 611539 - DNA, 59 bp, Artificial; identical to SEQ ID NO: 476578
  Synthetic oligonucleotide

SEQ ID NO: 611540 - DNA, 55 bp, Artificial; identical to SEQ ID NO: 476579
  Synthetic oligonucleotide

SEQ ID NO: 611541 - DNA, 60 bp, Artificial; identical to SEQ ID NO: 476580
  Synthetic oligonucleotide

SEQ ID NO: 611542 - DNA, 60 bp, Artificial; identical to SEQ ID NO: 476581
  Synthetic oligonucleotide

SEQ ID NO: 611543 - DNA, 60 bp, Artificial; identical to SEQ ID NO: 476582
  Synthetic oligonucleotide

SEQ ID NO: 611544 - DNA, 59 bp, Artificial; identical to SEQ ID NO: 476583
  Synthetic oligonucleotide

SEQ ID NO: 611545 - DNA, 59 bp, Artificial; identical to SEQ ID NO: 476585
  Synthetic oligonucleotide

SEQ ID NO: 611546 - DNA, 50 bp, Artificial; identical to SEQ ID NO: 476586
  Synthetic oligonucleotide

SEQ ID NO: 611547 - DNA, 52 bp, Artificial; identical to SEQ ID NO: 476588
  Synthetic oligonucleotide

SEQ ID NO: 611548 - DNA, 53 bp, Artificial; identical to SEQ ID NO: 476590
  Synthetic oligonucleotide

SEQ ID NO: 611549 - DNA, 56 bp, Artificial; identical to SEQ ID NO: 476591
  Synthetic oligonucleotide

SEQ ID NO: 611550 - DNA, 57 bp, Artificial; identical to SEQ ID NO: 476593
  Synthetic oligonucleotide

SEQ ID NO: 611551 - DNA, 60 bp, Artificial; identical to SEQ ID NO: 476596
  Synthetic oligonucleotide

SEQ ID NO: 611552 - DNA, 60 bp, Artificial; identical to SEQ ID NO: 476600
  Synthetic oligonucleotide

SEQ ID NO: 611553 - DNA, 55 bp, Artificial; identical to SEQ ID NO: 476602
  Synthetic oligonucleotide

SEQ ID NO: 611554 - DNA, 51 bp, Artificial; identical to SEQ ID NO: 476605
  Synthetic oligonucleotide

SEQ ID NO: 611555 - DNA, 59 bp, Artificial; identical to SEQ ID NO: 476607
  Synthetic oligonucleotide

SEQ ID NO: 611556 - DNA, 60 bp, Artificial; identical to SEQ ID NO: 6422
  Synthetic oligonucleotide

SEQ ID NO: 611557 - DNA, 60 bp, Artificial; identical to SEQ ID NO: 476613
  Synthetic oligonucleotide

SEQ ID NO: 611558 - DNA, 60 bp, Artificial; identical to SEQ ID NO: 476615
  Synthetic oligonucleotide

SEQ ID NO: 611559 - DNA, 60 bp, Artificial; identical to SEQ ID NO: 476619
  Synthetic oligonucleotide

SEQ ID NO: 611560 - DNA, 60 bp, Artificial; identical to SEQ ID NO: 476621
  Synthetic oligonucleotide

SEQ ID NO: 611561 - DNA, 58 bp, Artificial; identical to SEQ ID NO: 476622
  Synthetic oligonucleotide

SEQ ID NO: 611562 - DNA, 60 bp, Artificial; identical to SEQ ID NO: 476626
  Synthetic oligonucleotide

SEQ ID NO: 611563 - DNA, 59 bp, Artificial; identical to SEQ ID NO: 476627
  Synthetic oligonucleotide

SEQ ID NO: 611564 - DNA, 56 bp, Artificial; identical to SEQ ID NO: 476628
  Synthetic oligonucleotide

SEQ ID NO: 611565 - DNA, 55 bp, Artificial; identical to SEQ ID NO: 476630
  Synthetic oligonucleotide

SEQ ID NO: 611566 - DNA, 57 bp, Artificial; identical to SEQ ID NO: 476631
  Synthetic oligonucleotide

SEQ ID NO: 611567 - DNA, 57 bp, Artificial; identical to SEQ ID NO: 476632
  Synthetic oligonucleotide

SEQ ID NO: 611568 - DNA, 54 bp, Artificial; identical to SEQ ID NO: 476635
  Synthetic oligonucleotide

SEQ ID NO: 611569 - DNA, 54 bp, Artificial; identical to SEQ ID NO: 476638
  Synthetic oligonucleotide

SEQ ID NO: 611570 - DNA, 55 bp, Artificial; identical to SEQ ID NO: 476641
  Synthetic oligonucleotide

SEQ ID NO: 611571 - DNA, 51 bp, Artificial; identical to SEQ ID NO: 476643
  Synthetic oligonucleotide

SEQ ID NO: 611572 - DNA, 57 bp, Artificial; identical to SEQ ID NO: 476646
  Synthetic oligonucleotide

SEQ ID NO: 611573 - DNA, 52 bp, Artificial; identical to SEQ ID NO: 476648
  Synthetic oligonucleotide

SEQ ID NO: 611574 - DNA, 55 bp, Artificial; identical to SEQ ID NO: 476649
  Synthetic oligonucleotide

SEQ ID NO: 611575 - DNA, 56 bp, Artificial; identical to SEQ ID NO: 476652
  Synthetic oligonucleotide

SEQ ID NO: 611576 - DNA, 55 bp, Artificial; identical to SEQ ID NO: 476656
  Synthetic oligonucleotide

SEQ ID NO: 611577 - DNA, 53 bp, Artificial; identical to SEQ ID NO: 476659
  Synthetic oligonucleotide

SEQ ID NO: 611578 - DNA, 60 bp, Artificial; identical to SEQ ID NO: 476660
  Synthetic oligonucleotide

SEQ ID NO: 611579 - DNA, 59 bp, Artificial; identical to SEQ ID NO: 476663
  Synthetic oligonucleotide

SEQ ID NO: 611580 - DNA, 56 bp, Artificial; identical to SEQ ID NO: 476668
  Synthetic oligonucleotide

SEQ ID NO: 611581 - DNA, 55 bp, Artificial; identical to SEQ ID NO: 476670
  Synthetic oligonucleotide

SEQ ID NO: 611582 - DNA, 56 bp, Artificial; identical to SEQ ID NO: 476672
  Synthetic oligonucleotide

SEQ ID NO: 611583 - DNA, 56 bp, Artificial; identical to SEQ ID NO: 476673
  Synthetic oligonucleotide

SEQ ID NO: 611584 - DNA, 58 bp, Artificial; identical to SEQ ID NO: 476675
  Synthetic oligonucleotide

SEQ ID NO: 611585 - DNA, 57 bp, Artificial; identical to SEQ ID NO: 476680
  Synthetic oligonucleotide

SEQ ID NO: 611586 - DNA, 57 bp, Artificial; identical to SEQ ID NO: 476682
  Synthetic oligonucleotide

SEQ ID NO: 611587 - DNA, 56 bp, Artificial; identical to SEQ ID NO: 476683
  Synthetic oligonucleotide

SEQ ID NO: 611588 - DNA, 55 bp, Artificial; identical to SEQ ID NO: 476685
  Synthetic oligonucleotide

SEQ ID NO: 611589 - DNA, 54 bp, Artificial; identical to SEQ ID NO: 476688
  Synthetic oligonucleotide

SEQ ID NO: 611590 - DNA, 60 bp, Artificial; identical to SEQ ID NO: 476690
  Synthetic oligonucleotide

SEQ ID NO: 611591 - DNA, 55 bp, Artificial; identical to SEQ ID NO: 476692
  Synthetic oligonucleotide

SEQ ID NO: 611592 - DNA, 60 bp, Artificial; identical to SEQ ID NO: 476693
  Synthetic oligonucleotide

SEQ ID NO: 611593 - DNA, 60 bp, Artificial; identical to SEQ ID NO: 476694
  Synthetic oligonucleotide

SEQ ID NO: 611594 - DNA, 57 bp, Artificial; identical to SEQ ID NO: 476695
  Synthetic oligonucleotide

SEQ ID NO: 611595 - DNA, 57 bp, Artificial; identical to SEQ ID NO: 476696
  Synthetic oligonucleotide

SEQ ID NO: 611596 - DNA, 60 bp, Artificial; identical to SEQ ID NO: 476698
  Synthetic oligonucleotide

SEQ ID NO: 611597 - DNA, 57 bp, Artificial; identical to SEQ ID NO: 476700
  Synthetic oligonucleotide

SEQ ID NO: 611598 - DNA, 54 bp, Artificial; identical to SEQ ID NO: 476701
  Synthetic oligonucleotide

SEQ ID NO: 611599 - DNA, 60 bp, Artificial; identical to SEQ ID NO: 476704
  Synthetic oligonucleotide

SEQ ID NO: 611600 - DNA, 58 bp, Artificial; identical to SEQ ID NO: 476705
  Synthetic oligonucleotide

SEQ ID NO: 611601 - DNA, 60 bp, Artificial; identical to SEQ ID NO: 476713
  Synthetic oligonucleotide

SEQ ID NO: 611602 - DNA, 59 bp, Artificial; identical to SEQ ID NO: 476714
  Synthetic oligonucleotide

SEQ ID NO: 611603 - DNA, 54 bp, Artificial; identical to SEQ ID NO: 476721
  Synthetic oligonucleotide

SEQ ID NO: 611604 - DNA, 60 bp, Artificial; identical to SEQ ID NO: 10658
  Synthetic oligonucleotide

SEQ ID NO: 611605 - DNA, 58 bp, Artificial; identical to SEQ ID NO: 476725
  Synthetic oligonucleotide

SEQ ID NO: 611606 - DNA, 60 bp, Artificial; identical to SEQ ID NO: 6021
  Synthetic oligonucleotide

SEQ ID NO: 611607 - DNA, 51 bp, Artificial; identical to SEQ ID NO: 13946
  Synthetic oligonucleotide

SEQ ID NO: 611608 - DNA, 60 bp, Artificial; identical to SEQ ID NO: 476738
  Synthetic oligonucleotide

SEQ ID NO: 611609 - DNA, 60 bp, Artificial; identical to SEQ ID NO: 476739
  Synthetic oligonucleotide

SEQ ID NO: 611610 - DNA, 50 bp, Artificial; identical to SEQ ID NO: 476741
  Synthetic oligonucleotide

SEQ ID NO: 611611 - DNA, 60 bp, Artificial; identical to SEQ ID NO: 476743
  Synthetic oligonucleotide

SEQ ID NO: 611612 - DNA, 60 bp, Artificial; identical to SEQ ID NO: 13285
  Synthetic oligonucleotide

SEQ ID NO: 611613 - DNA, 58 bp, Artificial; identical to SEQ ID NO: 476744
  Synthetic oligonucleotide

SEQ ID NO: 611614 - DNA, 60 bp, Artificial; identical to SEQ ID NO: 476746
  Synthetic oligonucleotide

SEQ ID NO: 611615 - DNA, 59 bp, Artificial; identical to SEQ ID NO: 476748
  Synthetic oligonucleotide

SEQ ID NO: 611616 - DNA, 50 bp, Artificial; identical to SEQ ID NO: 476749
  Synthetic oligonucleotide

SEQ ID NO: 611617 - DNA, 55 bp, Artificial; identical to SEQ ID NO: 476754
  Synthetic oligonucleotide

SEQ ID NO: 611618 - DNA, 55 bp, Artificial; identical to SEQ ID NO: 476759
  Synthetic oligonucleotide

SEQ ID NO: 611619 - DNA, 50 bp, Artificial; identical to SEQ ID NO: 476766
  Synthetic oligonucleotide

SEQ ID NO: 611620 - DNA, 60 bp, Artificial; identical to SEQ ID NO: 476768
  Synthetic oligonucleotide

SEQ ID NO: 611621 - DNA, 50 bp, Artificial; identical to SEQ ID NO: 476770
  Synthetic oligonucleotide

SEQ ID NO: 611622 - DNA, 59 bp, Artificial; identical to SEQ ID NO: 18598
  Synthetic oligonucleotide

SEQ ID NO: 611623 - DNA, 60 bp, Artificial; identical to SEQ ID NO: 476772
  Synthetic oligonucleotide

SEQ ID NO: 611624 - DNA, 60 bp, Artificial; identical to SEQ ID NO: 476773
  Synthetic oligonucleotide

SEQ ID NO: 611625 - DNA, 52 bp, Artificial; identical to SEQ ID NO: 476776
  Synthetic oligonucleotide

SEQ ID NO: 611626 - DNA, 55 bp, Artificial; identical to SEQ ID NO: 476778
  Synthetic oligonucleotide

SEQ ID NO: 611627 - DNA, 50 bp, Artificial; identical to SEQ ID NO: 476780
  Synthetic oligonucleotide

SEQ ID NO: 611628 - DNA, 60 bp, Artificial; identical to SEQ ID NO: 476782
  Synthetic oligonucleotide

SEQ ID NO: 611629 - DNA, 60 bp, Artificial; identical to SEQ ID NO: 476784
  Synthetic oligonucleotide

SEQ ID NO: 611630 - DNA, 59 bp, Artificial; identical to SEQ ID NO: 476787
  Synthetic oligonucleotide

SEQ ID NO: 611631 - DNA, 54 bp, Artificial; identical to SEQ ID NO: 476789
  Synthetic oligonucleotide

SEQ ID NO: 611632 - DNA, 59 bp, Artificial; identical to SEQ ID NO: 476792
  Synthetic oligonucleotide

SEQ ID NO: 611633 - DNA, 55 bp, Artificial; identical to SEQ ID NO: 476793
  Synthetic oligonucleotide

SEQ ID NO: 611634 - DNA, 55 bp, Artificial; identical to SEQ ID NO: 476794
  Synthetic oligonucleotide

SEQ ID NO: 611635 - DNA, 56 bp, Artificial; identical to SEQ ID NO: 476799
  Synthetic oligonucleotide

SEQ ID NO: 611636 - DNA, 58 bp, Artificial; identical to SEQ ID NO: 16561
  Synthetic oligonucleotide

SEQ ID NO: 611637 - DNA, 60 bp, Artificial; identical to SEQ ID NO: 476800
  Synthetic oligonucleotide

SEQ ID NO: 611638 - DNA, 60 bp, Artificial; identical to SEQ ID NO: 476804
  Synthetic oligonucleotide

SEQ ID NO: 611639 - DNA, 60 bp, Artificial; identical to SEQ ID NO: 476805
  Synthetic oligonucleotide

SEQ ID NO: 611640 - DNA, 53 bp, Artificial; identical to SEQ ID NO: 476809
  Synthetic oligonucleotide

SEQ ID NO: 611641 - DNA, 55 bp, Artificial; identical to SEQ ID NO: 476810
  Synthetic oligonucleotide

SEQ ID NO: 611642 - DNA, 60 bp, Artificial; identical to SEQ ID NO: 8487
  Synthetic oligonucleotide

SEQ ID NO: 611643 - DNA, 59 bp, Artificial; identical to SEQ ID NO: 476815
  Synthetic oligonucleotide

SEQ ID NO: 611644 - DNA, 56 bp, Artificial; identical to SEQ ID NO: 20023
  Synthetic oligonucleotide

SEQ ID NO: 611645 - DNA, 54 bp, Artificial; identical to SEQ ID NO: 476822
  Synthetic oligonucleotide

SEQ ID NO: 611646 - DNA, 60 bp, Artificial; identical to SEQ ID NO: 476825
  Synthetic oligonucleotide

SEQ ID NO: 611647 - DNA, 60 bp, Artificial; identical to SEQ ID NO: 476829
  Synthetic oligonucleotide

SEQ ID NO: 611648 - DNA, 52 bp, Artificial; identical to SEQ ID NO: 476830
  Synthetic oligonucleotide

SEQ ID NO: 611649 - DNA, 60 bp, Artificial; identical to SEQ ID NO: 476833
  Synthetic oligonucleotide

SEQ ID NO: 611650 - DNA, 55 bp, Artificial; identical to SEQ ID NO: 476834
  Synthetic oligonucleotide

SEQ ID NO: 611651 - DNA, 55 bp, Artificial; identical to SEQ ID NO: 476835
  Synthetic oligonucleotide

SEQ ID NO: 611652 - DNA, 60 bp, Artificial; identical to SEQ ID NO: 476836
  Synthetic oligonucleotide

SEQ ID NO: 611653 - DNA, 57 bp, Artificial; identical to SEQ ID NO: 476837
  Synthetic oligonucleotide

SEQ ID NO: 611654 - DNA, 52 bp, Artificial; identical to SEQ ID NO: 476838
  Synthetic oligonucleotide

SEQ ID NO: 611655 - DNA, 60 bp, Artificial; identical to SEQ ID NO: 12555
  Synthetic oligonucleotide

SEQ ID NO: 611656 - DNA, 60 bp, Artificial; identical to SEQ ID NO: 476839
  Synthetic oligonucleotide

SEQ ID NO: 611657 - DNA, 57 bp, Artificial; identical to SEQ ID NO: 476840
  Synthetic oligonucleotide

SEQ ID NO: 611658 - DNA, 60 bp, Artificial; identical to SEQ ID NO: 476845
  Synthetic oligonucleotide

SEQ ID NO: 611659 - DNA, 58 bp, Artificial; identical to SEQ ID NO: 476847
  Synthetic oligonucleotide

SEQ ID NO: 611660 - DNA, 54 bp, Artificial; identical to SEQ ID NO: 476849
  Synthetic oligonucleotide

SEQ ID NO: 611661 - DNA, 53 bp, Artificial; identical to SEQ ID NO: 476854
  Synthetic oligonucleotide

SEQ ID NO: 611662 - DNA, 58 bp, Artificial; identical to SEQ ID NO: 476856
  Synthetic oligonucleotide

SEQ ID NO: 611663 - DNA, 58 bp, Artificial; identical to SEQ ID NO: 476862
  Synthetic oligonucleotide

SEQ ID NO: 611664 - DNA, 56 bp, Artificial; identical to SEQ ID NO: 476863
  Synthetic oligonucleotide

SEQ ID NO: 611665 - DNA, 54 bp, Artificial; identical to SEQ ID NO: 476867
  Synthetic oligonucleotide

SEQ ID NO: 611666 - DNA, 58 bp, Artificial; identical to SEQ ID NO: 476872
  Synthetic oligonucleotide

SEQ ID NO: 611667 - DNA, 59 bp, Artificial; identical to SEQ ID NO: 476874
  Synthetic oligonucleotide

SEQ ID NO: 611668 - DNA, 53 bp, Artificial; identical to SEQ ID NO: 476876
  Synthetic oligonucleotide

SEQ ID NO: 611669 - DNA, 56 bp, Artificial; identical to SEQ ID NO: 476879
  Synthetic oligonucleotide

SEQ ID NO: 611670 - DNA, 54 bp, Artificial; identical to SEQ ID NO: 476880
  Synthetic oligonucleotide

SEQ ID NO: 611671 - DNA, 59 bp, Artificial; identical to SEQ ID NO: 476883
  Synthetic oligonucleotide

SEQ ID NO: 611672 - DNA, 60 bp, Artificial; identical to SEQ ID NO: 476884
  Synthetic oligonucleotide

SEQ ID NO: 611673 - DNA, 57 bp, Artificial; identical to SEQ ID NO: 476887
  Synthetic oligonucleotide

SEQ ID NO: 611674 - DNA, 57 bp, Artificial; identical to SEQ ID NO: 476888
  Synthetic oligonucleotide

SEQ ID NO: 611675 - DNA, 56 bp, Artificial; identical to SEQ ID NO: 476897
  Synthetic oligonucleotide

SEQ ID NO: 611676 - DNA, 57 bp, Artificial; identical to SEQ ID NO: 17357
  Synthetic oligonucleotide

SEQ ID NO: 611677 - DNA, 57 bp, Artificial; identical to SEQ ID NO: 476898
  Synthetic oligonucleotide

SEQ ID NO: 611678 - DNA, 60 bp, Artificial; identical to SEQ ID NO: 476899
  Synthetic oligonucleotide

SEQ ID NO: 611679 - DNA, 60 bp, Artificial; identical to SEQ ID NO: 476900
  Synthetic oligonucleotide

SEQ ID NO: 611680 - DNA, 60 bp, Artificial; identical to SEQ ID NO: 476903
  Synthetic oligonucleotide

SEQ ID NO: 611681 - DNA, 57 bp, Artificial; identical to SEQ ID NO: 476906
  Synthetic oligonucleotide

SEQ ID NO: 611682 - DNA, 54 bp, Artificial; identical to SEQ ID NO: 476908
  Synthetic oligonucleotide

SEQ ID NO: 611683 - DNA, 55 bp, Artificial; identical to SEQ ID NO: 476910
  Synthetic oligonucleotide

SEQ ID NO: 611684 - DNA, 60 bp, Artificial; identical to SEQ ID NO: 12914
  Synthetic oligonucleotide

SEQ ID NO: 611685 - DNA, 56 bp, Artificial; identical to SEQ ID NO: 476912
  Synthetic oligonucleotide

SEQ ID NO: 611686 - DNA, 60 bp, Artificial; identical to SEQ ID NO: 476915
  Synthetic oligonucleotide

SEQ ID NO: 611687 - DNA, 60 bp, Artificial; identical to SEQ ID NO: 476917
  Synthetic oligonucleotide

SEQ ID NO: 611688 - DNA, 60 bp, Artificial; identical to SEQ ID NO: 476928
  Synthetic oligonucleotide

SEQ ID NO: 611689 - DNA, 50 bp, Artificial; identical to SEQ ID NO: 476933
  Synthetic oligonucleotide

SEQ ID NO: 611690 - DNA, 60 bp, Artificial; identical to SEQ ID NO: 476934
  Synthetic oligonucleotide

SEQ ID NO: 611691 - DNA, 60 bp, Artificial; identical to SEQ ID NO: 476936
  Synthetic oligonucleotide

SEQ ID NO: 611692 - DNA, 59 bp, Artificial; identical to SEQ ID NO: 476937
  Synthetic oligonucleotide

SEQ ID NO: 611693 - DNA, 60 bp, Artificial; identical to SEQ ID NO: 476941
  Synthetic oligonucleotide

SEQ ID NO: 611694 - DNA, 60 bp, Artificial; identical to SEQ ID NO: 476943
  Synthetic oligonucleotide

SEQ ID NO: 611695 - DNA, 59 bp, Artificial; identical to SEQ ID NO: 476945
  Synthetic oligonucleotide

SEQ ID NO: 611696 - DNA, 60 bp, Artificial; identical to SEQ ID NO: 476946
  Synthetic oligonucleotide

SEQ ID NO: 611697 - DNA, 60 bp, Artificial; identical to SEQ ID NO: 476947
  Synthetic oligonucleotide

SEQ ID NO: 611698 - DNA, 57 bp, Artificial; identical to SEQ ID NO: 476950
  Synthetic oligonucleotide

SEQ ID NO: 611699 - DNA, 55 bp, Artificial; identical to SEQ ID NO: 476953
  Synthetic oligonucleotide

SEQ ID NO: 611700 - DNA, 54 bp, Artificial; identical to SEQ ID NO: 476955
  Synthetic oligonucleotide

SEQ ID NO: 611701 - DNA, 52 bp, Artificial; identical to SEQ ID NO: 476956
  Synthetic oligonucleotide

SEQ ID NO: 611702 - DNA, 52 bp, Artificial; identical to SEQ ID NO: 476958
  Synthetic oligonucleotide

SEQ ID NO: 611703 - DNA, 55 bp, Artificial; identical to SEQ ID NO: 476963
  Synthetic oligonucleotide

SEQ ID NO: 611704 - DNA, 53 bp, Artificial; identical to SEQ ID NO: 476966
  Synthetic oligonucleotide

SEQ ID NO: 611705 - DNA, 53 bp, Artificial; identical to SEQ ID NO: 20291
  Synthetic oligonucleotide

SEQ ID NO: 611706 - DNA, 54 bp, Artificial; identical to SEQ ID NO: 476967
  Synthetic oligonucleotide

SEQ ID NO: 611707 - DNA, 55 bp, Artificial; identical to SEQ ID NO: 476968
  Synthetic oligonucleotide

SEQ ID NO: 611708 - DNA, 53 bp, Artificial; identical to SEQ ID NO: 476970
  Synthetic oligonucleotide

SEQ ID NO: 611709 - DNA, 59 bp, Artificial; identical to SEQ ID NO: 476971
  Synthetic oligonucleotide

SEQ ID NO: 611710 - DNA, 57 bp, Artificial; identical to SEQ ID NO: 476972
  Synthetic oligonucleotide

SEQ ID NO: 611711 - DNA, 51 bp, Artificial; identical to SEQ ID NO: 476975
  Synthetic oligonucleotide

SEQ ID NO: 611712 - DNA, 51 bp, Artificial; identical to SEQ ID NO: 476976
  Synthetic oligonucleotide

SEQ ID NO: 611713 - DNA, 55 bp, Artificial; identical to SEQ ID NO: 476977
  Synthetic oligonucleotide

SEQ ID NO: 611714 - DNA, 55 bp, Artificial; identical to SEQ ID NO: 476980
  Synthetic oligonucleotide

SEQ ID NO: 611715 - DNA, 60 bp, Artificial; identical to SEQ ID NO: 476981
  Synthetic oligonucleotide

SEQ ID NO: 611716 - DNA, 60 bp, Artificial; identical to SEQ ID NO: 476988
  Synthetic oligonucleotide

SEQ ID NO: 611717 - DNA, 58 bp, Artificial; identical to SEQ ID NO: 476997
  Synthetic oligonucleotide

SEQ ID NO: 611718 - DNA, 53 bp, Artificial; identical to SEQ ID NO: 477002
  Synthetic oligonucleotide

SEQ ID NO: 611719 - DNA, 58 bp, Artificial; identical to SEQ ID NO: 477004
  Synthetic oligonucleotide

SEQ ID NO: 611720 - DNA, 60 bp, Artificial; identical to SEQ ID NO: 477005
  Synthetic oligonucleotide

SEQ ID NO: 611721 - DNA, 60 bp, Artificial; identical to SEQ ID NO: 477009
  Synthetic oligonucleotide

SEQ ID NO: 611722 - DNA, 55 bp, Artificial; identical to SEQ ID NO: 477016
  Synthetic oligonucleotide

SEQ ID NO: 611723 - DNA, 50 bp, Artificial; identical to SEQ ID NO: 477017
  Synthetic oligonucleotide

SEQ ID NO: 611724 - DNA, 55 bp, Artificial; identical to SEQ ID NO: 477018
  Synthetic oligonucleotide

SEQ ID NO: 611725 - DNA, 58 bp, Artificial; identical to SEQ ID NO: 477021
  Synthetic oligonucleotide

SEQ ID NO: 611726 - DNA, 58 bp, Artificial; identical to SEQ ID NO: 477023
  Synthetic oligonucleotide

SEQ ID NO: 611727 - DNA, 54 bp, Artificial; identical to SEQ ID NO: 477024
  Synthetic oligonucleotide

SEQ ID NO: 611728 - DNA, 55 bp, Artificial; identical to SEQ ID NO: 477025
  Synthetic oligonucleotide

SEQ ID NO: 611729 - DNA, 56 bp, Artificial; identical to SEQ ID NO: 477027
  Synthetic oligonucleotide

SEQ ID NO: 611730 - DNA, 55 bp, Artificial; identical to SEQ ID NO: 477029
  Synthetic oligonucleotide

SEQ ID NO: 611731 - DNA, 58 bp, Artificial; identical to SEQ ID NO: 477030
  Synthetic oligonucleotide

SEQ ID NO: 611732 - DNA, 50 bp, Artificial; identical to SEQ ID NO: 477032
  Synthetic oligonucleotide

SEQ ID NO: 611733 - DNA, 60 bp, Artificial; identical to SEQ ID NO: 477034
  Synthetic oligonucleotide

SEQ ID NO: 611734 - DNA, 56 bp, Artificial; identical to SEQ ID NO: 477035
  Synthetic oligonucleotide

SEQ ID NO: 611735 - DNA, 60 bp, Artificial; identical to SEQ ID NO: 477038
  Synthetic oligonucleotide

SEQ ID NO: 611736 - DNA, 60 bp, Artificial; identical to SEQ ID NO: 477039
  Synthetic oligonucleotide

SEQ ID NO: 611737 - DNA, 55 bp, Artificial; identical to SEQ ID NO: 477041
  Synthetic oligonucleotide

SEQ ID NO: 611738 - DNA, 55 bp, Artificial; identical to SEQ ID NO: 477042
  Synthetic oligonucleotide

SEQ ID NO: 611739 - DNA, 52 bp, Artificial; identical to SEQ ID NO: 477045
  Synthetic oligonucleotide

SEQ ID NO: 611740 - DNA, 60 bp, Artificial; identical to SEQ ID NO: 477050
  Synthetic oligonucleotide

SEQ ID NO: 611741 - DNA, 55 bp, Artificial; identical to SEQ ID NO: 477051
  Synthetic oligonucleotide

SEQ ID NO: 611742 - DNA, 56 bp, Artificial; identical to SEQ ID NO: 477054
  Synthetic oligonucleotide

SEQ ID NO: 611743 - DNA, 60 bp, Artificial; identical to SEQ ID NO: 477056
  Synthetic oligonucleotide

SEQ ID NO: 611744 - DNA, 60 bp, Artificial; identical to SEQ ID NO: 11227
  Synthetic oligonucleotide

SEQ ID NO: 611745 - DNA, 55 bp, Artificial; identical to SEQ ID NO: 477063
  Synthetic oligonucleotide

SEQ ID NO: 611746 - DNA, 55 bp, Artificial; identical to SEQ ID NO: 477064
  Synthetic oligonucleotide

SEQ ID NO: 611747 - DNA, 59 bp, Artificial; identical to SEQ ID NO: 477065
  Synthetic oligonucleotide

SEQ ID NO: 611748 - DNA, 60 bp, Artificial; identical to SEQ ID NO: 477067
  Synthetic oligonucleotide

SEQ ID NO: 611749 - DNA, 60 bp, Artificial; identical to SEQ ID NO: 477068
  Synthetic oligonucleotide

SEQ ID NO: 611750 - DNA, 58 bp, Artificial; identical to SEQ ID NO: 477072
  Synthetic oligonucleotide

SEQ ID NO: 611751 - DNA, 57 bp, Artificial; identical to SEQ ID NO: 477073
  Synthetic oligonucleotide

SEQ ID NO: 611752 - DNA, 54 bp, Artificial; identical to SEQ ID NO: 477074
  Synthetic oligonucleotide

SEQ ID NO: 611753 - DNA, 60 bp, Artificial; identical to SEQ ID NO: 477078
  Synthetic oligonucleotide

SEQ ID NO: 611754 - DNA, 55 bp, Artificial; identical to SEQ ID NO: 477079
  Synthetic oligonucleotide

SEQ ID NO: 611755 - DNA, 60 bp, Artificial; identical to SEQ ID NO: 477083
  Synthetic oligonucleotide

SEQ ID NO: 611756 - DNA, 60 bp, Artificial; identical to SEQ ID NO: 477085
  Synthetic oligonucleotide

SEQ ID NO: 611757 - DNA, 56 bp, Artificial; identical to SEQ ID NO: 477089
  Synthetic oligonucleotide

SEQ ID NO: 611758 - DNA, 55 bp, Artificial; identical to SEQ ID NO: 477090
  Synthetic oligonucleotide

SEQ ID NO: 611759 - DNA, 55 bp, Artificial; identical to SEQ ID NO: 477092
  Synthetic oligonucleotide

SEQ ID NO: 611760 - DNA, 60 bp, Artificial; identical to SEQ ID NO: 477093
  Synthetic oligonucleotide

SEQ ID NO: 611761 - DNA, 53 bp, Artificial; identical to SEQ ID NO: 477094
  Synthetic oligonucleotide

SEQ ID NO: 611762 - DNA, 54 bp, Artificial; identical to SEQ ID NO: 477095
  Synthetic oligonucleotide

SEQ ID NO: 611763 - DNA, 54 bp, Artificial; identical to SEQ ID NO: 477097
  Synthetic oligonucleotide

SEQ ID NO: 611764 - DNA, 60 bp, Artificial; identical to SEQ ID NO: 477098
  Synthetic oligonucleotide

SEQ ID NO: 611765 - DNA, 60 bp, Artificial; identical to SEQ ID NO: 477101
  Synthetic oligonucleotide

SEQ ID NO: 611766 - DNA, 53 bp, Artificial; identical to SEQ ID NO: 477102
  Synthetic oligonucleotide

SEQ ID NO: 611767 - DNA, 50 bp, Artificial; identical to SEQ ID NO: 477103
  Synthetic oligonucleotide

SEQ ID NO: 611768 - DNA, 54 bp, Artificial; identical to SEQ ID NO: 477108
  Synthetic oligonucleotide

SEQ ID NO: 611769 - DNA, 60 bp, Artificial; identical to SEQ ID NO: 477110
  Synthetic oligonucleotide

SEQ ID NO: 611770 - DNA, 55 bp, Artificial; identical to SEQ ID NO: 20467
  Synthetic oligonucleotide

SEQ ID NO: 611771 - DNA, 53 bp, Artificial; identical to SEQ ID NO: 477114
  Synthetic oligonucleotide

SEQ ID NO: 611772 - DNA, 55 bp, Artificial; identical to SEQ ID NO: 477116
  Synthetic oligonucleotide

SEQ ID NO: 611773 - DNA, 54 bp, Artificial; identical to SEQ ID NO: 477117
  Synthetic oligonucleotide

SEQ ID NO: 611774 - DNA, 55 bp, Artificial; identical to SEQ ID NO: 477118
  Synthetic oligonucleotide

SEQ ID NO: 611775 - DNA, 60 bp, Artificial; identical to SEQ ID NO: 477123
  Synthetic oligonucleotide

SEQ ID NO: 611776 - DNA, 60 bp, Artificial; identical to SEQ ID NO: 477124
  Synthetic oligonucleotide

SEQ ID NO: 611777 - DNA, 58 bp, Artificial; identical to SEQ ID NO: 477125
  Synthetic oligonucleotide

SEQ ID NO: 611778 - DNA, 56 bp, Artificial; identical to SEQ ID NO: 477126
  Synthetic oligonucleotide

SEQ ID NO: 611779 - DNA, 52 bp, Artificial; identical to SEQ ID NO: 477130
  Synthetic oligonucleotide

SEQ ID NO: 611780 - DNA, 55 bp, Artificial; identical to SEQ ID NO: 9321
  Synthetic oligonucleotide

SEQ ID NO: 611781 - DNA, 55 bp, Artificial; identical to SEQ ID NO: 477136
  Synthetic oligonucleotide

SEQ ID NO: 611782 - DNA, 60 bp, Artificial; identical to SEQ ID NO: 477138
  Synthetic oligonucleotide

SEQ ID NO: 611783 - DNA, 58 bp, Artificial; identical to SEQ ID NO: 477139
  Synthetic oligonucleotide

SEQ ID NO: 611784 - DNA, 55 bp, Artificial; identical to SEQ ID NO: 477141
  Synthetic oligonucleotide

SEQ ID NO: 611785 - DNA, 60 bp, Artificial; identical to SEQ ID NO: 477143
  Synthetic oligonucleotide

SEQ ID NO: 611786 - DNA, 59 bp, Artificial; identical to SEQ ID NO: 477144
  Synthetic oligonucleotide

SEQ ID NO: 611787 - DNA, 60 bp, Artificial; identical to SEQ ID NO: 477145
  Synthetic oligonucleotide

SEQ ID NO: 611788 - DNA, 53 bp, Artificial; identical to SEQ ID NO: 477146
  Synthetic oligonucleotide

SEQ ID NO: 611789 - DNA, 60 bp, Artificial; identical to SEQ ID NO: 477148
  Synthetic oligonucleotide

SEQ ID NO: 611790 - DNA, 52 bp, Artificial; identical to SEQ ID NO: 477151
  Synthetic oligonucleotide

SEQ ID NO: 611791 - DNA, 52 bp, Artificial; identical to SEQ ID NO: 477152
  Synthetic oligonucleotide

SEQ ID NO: 611792 - DNA, 54 bp, Artificial; identical to SEQ ID NO: 477153
  Synthetic oligonucleotide

SEQ ID NO: 611793 - DNA, 55 bp, Artificial; identical to SEQ ID NO: 477155
  Synthetic oligonucleotide

SEQ ID NO: 611794 - DNA, 60 bp, Artificial; identical to SEQ ID NO: 477157
  Synthetic oligonucleotide

SEQ ID NO: 611795 - DNA, 60 bp, Artificial; identical to SEQ ID NO: 477158
  Synthetic oligonucleotide

SEQ ID NO: 611796 - DNA, 51 bp, Artificial; identical to SEQ ID NO: 477160
  Synthetic oligonucleotide

SEQ ID NO: 611797 - DNA, 55 bp, Artificial; identical to SEQ ID NO: 477161
  Synthetic oligonucleotide

SEQ ID NO: 611798 - DNA, 55 bp, Artificial; identical to SEQ ID NO: 477162
  Synthetic oligonucleotide

SEQ ID NO: 611799 - DNA, 56 bp, Artificial; identical to SEQ ID NO: 477163
  Synthetic oligonucleotide

SEQ ID NO: 611800 - DNA, 56 bp, Artificial; identical to SEQ ID NO: 477165
  Synthetic oligonucleotide

SEQ ID NO: 611801 - DNA, 60 bp, Artificial; identical to SEQ ID NO: 6511
  Synthetic oligonucleotide

SEQ ID NO: 611802 - DNA, 58 bp, Artificial; identical to SEQ ID NO: 477168
  Synthetic oligonucleotide

SEQ ID NO: 611803 - DNA, 60 bp, Artificial; identical to SEQ ID NO: 477171
  Synthetic oligonucleotide

SEQ ID NO: 611804 - DNA, 54 bp, Artificial; identical to SEQ ID NO: 477172
  Synthetic oligonucleotide

SEQ ID NO: 611805 - DNA, 59 bp, Artificial; identical to SEQ ID NO: 477174
  Synthetic oligonucleotide

SEQ ID NO: 611806 - DNA, 58 bp, Artificial; identical to SEQ ID NO: 477178
  Synthetic oligonucleotide

SEQ ID NO: 611807 - DNA, 55 bp, Artificial; identical to SEQ ID NO: 477180
  Synthetic oligonucleotide

SEQ ID NO: 611808 - DNA, 55 bp, Artificial; identical to SEQ ID NO: 477183
  Synthetic oligonucleotide

SEQ ID NO: 611809 - DNA, 57 bp, Artificial; identical to SEQ ID NO: 477184
  Synthetic oligonucleotide

SEQ ID NO: 611810 - DNA, 50 bp, Artificial; identical to SEQ ID NO: 477189
  Synthetic oligonucleotide

SEQ ID NO: 611811 - DNA, 56 bp, Artificial; identical to SEQ ID NO: 477191
  Synthetic oligonucleotide

SEQ ID NO: 611812 - DNA, 60 bp, Artificial; identical to SEQ ID NO: 477192
  Synthetic oligonucleotide

SEQ ID NO: 611813 - DNA, 60 bp, Artificial; identical to SEQ ID NO: 477193
  Synthetic oligonucleotide

SEQ ID NO: 611814 - DNA, 59 bp, Artificial; identical to SEQ ID NO: 477198
  Synthetic oligonucleotide

SEQ ID NO: 611815 - DNA, 58 bp, Artificial; identical to SEQ ID NO: 477203
  Synthetic oligonucleotide

SEQ ID NO: 611816 - DNA, 60 bp, Artificial; identical to SEQ ID NO: 477206
  Synthetic oligonucleotide

SEQ ID NO: 611817 - DNA, 60 bp, Artificial; identical to SEQ ID NO: 477207
  Synthetic oligonucleotide

SEQ ID NO: 611818 - DNA, 58 bp, Artificial; identical to SEQ ID NO: 477210
  Synthetic oligonucleotide

SEQ ID NO: 611819 - DNA, 58 bp, Artificial; identical to SEQ ID NO: 477211
  Synthetic oligonucleotide

SEQ ID NO: 611820 - DNA, 55 bp, Artificial; identical to SEQ ID NO: 477212
  Synthetic oligonucleotide

SEQ ID NO: 611821 - DNA, 55 bp, Artificial; identical to SEQ ID NO: 477213
  Synthetic oligonucleotide

SEQ ID NO: 611822 - DNA, 60 bp, Artificial; identical to SEQ ID NO: 477219
  Synthetic oligonucleotide

SEQ ID NO: 611823 - DNA, 58 bp, Artificial; identical to SEQ ID NO: 477220
  Synthetic oligonucleotide

SEQ ID NO: 611824 - DNA, 55 bp, Artificial; identical to SEQ ID NO: 5731
  Synthetic oligonucleotide

SEQ ID NO: 611825 - DNA, 59 bp, Artificial; identical to SEQ ID NO: 477222
  Synthetic oligonucleotide

SEQ ID NO: 611826 - DNA, 60 bp, Artificial; identical to SEQ ID NO: 477224
  Synthetic oligonucleotide

SEQ ID NO: 611827 - DNA, 60 bp, Artificial; identical to SEQ ID NO: 477225
  Synthetic oligonucleotide

SEQ ID NO: 611828 - DNA, 57 bp, Artificial; identical to SEQ ID NO: 477227
  Synthetic oligonucleotide

SEQ ID NO: 611829 - DNA, 54 bp, Artificial; identical to SEQ ID NO: 477229
  Synthetic oligonucleotide

SEQ ID NO: 611830 - DNA, 50 bp, Artificial; identical to SEQ ID NO: 477232
  Synthetic oligonucleotide

SEQ ID NO: 611831 - DNA, 56 bp, Artificial; identical to SEQ ID NO: 19259
  Synthetic oligonucleotide

SEQ ID NO: 611832 - DNA, 60 bp, Artificial; identical to SEQ ID NO: 477233
  Synthetic oligonucleotide

SEQ ID NO: 611833 - DNA, 60 bp, Artificial; identical to SEQ ID NO: 477235
  Synthetic oligonucleotide

SEQ ID NO: 611834 - DNA, 57 bp, Artificial; identical to SEQ ID NO: 477238
  Synthetic oligonucleotide

SEQ ID NO: 611835 - DNA, 60 bp, Artificial; identical to SEQ ID NO: 477239
  Synthetic oligonucleotide

SEQ ID NO: 611836 - DNA, 59 bp, Artificial; identical to SEQ ID NO: 477246
  Synthetic oligonucleotide

SEQ ID NO: 611837 - DNA, 59 bp, Artificial; identical to SEQ ID NO: 477248
  Synthetic oligonucleotide

SEQ ID NO: 611838 - DNA, 60 bp, Artificial; identical to SEQ ID NO: 477260
  Synthetic oligonucleotide

SEQ ID NO: 611839 - DNA, 56 bp, Artificial; identical to SEQ ID NO: 85
  Synthetic oligonucleotide

SEQ ID NO: 611840 - DNA, 57 bp, Artificial; identical to SEQ ID NO: 477265
  Synthetic oligonucleotide

SEQ ID NO: 611841 - DNA, 53 bp, Artificial; identical to SEQ ID NO: 477266
  Synthetic oligonucleotide

SEQ ID NO: 611842 - DNA, 55 bp, Artificial; identical to SEQ ID NO: 477268
  Synthetic oligonucleotide

SEQ ID NO: 611843 - DNA, 55 bp, Artificial; identical to SEQ ID NO: 477279
  Synthetic oligonucleotide

SEQ ID NO: 611844 - DNA, 54 bp, Artificial; identical to SEQ ID NO: 477281
  Synthetic oligonucleotide

SEQ ID NO: 611845 - DNA, 58 bp, Artificial; identical to SEQ ID NO: 477282
  Synthetic oligonucleotide

SEQ ID NO: 611846 - DNA, 60 bp, Artificial; identical to SEQ ID NO: 477284
  Synthetic oligonucleotide

SEQ ID NO: 611847 - DNA, 58 bp, Artificial; identical to SEQ ID NO: 477286
  Synthetic oligonucleotide

SEQ ID NO: 611848 - DNA, 52 bp, Artificial; identical to SEQ ID NO: 477288
  Synthetic oligonucleotide

SEQ ID NO: 611849 - DNA, 57 bp, Artificial; identical to SEQ ID NO: 20362
  Synthetic oligonucleotide

SEQ ID NO: 611850 - DNA, 55 bp, Artificial; identical to SEQ ID NO: 477291
  Synthetic oligonucleotide

SEQ ID NO: 611851 - DNA, 54 bp, Artificial; identical to SEQ ID NO: 477293
  Synthetic oligonucleotide

SEQ ID NO: 611852 - DNA, 60 bp, Artificial; identical to SEQ ID NO: 477296
  Synthetic oligonucleotide

SEQ ID NO: 611853 - DNA, 58 bp, Artificial; identical to SEQ ID NO: 477299
  Synthetic oligonucleotide

SEQ ID NO: 611854 - DNA, 52 bp, Artificial; identical to SEQ ID NO: 477300
  Synthetic oligonucleotide

SEQ ID NO: 611855 - DNA, 50 bp, Artificial; identical to SEQ ID NO: 477303
  Synthetic oligonucleotide

SEQ ID NO: 611856 - DNA, 57 bp, Artificial; identical to SEQ ID NO: 18891
  Synthetic oligonucleotide

SEQ ID NO: 611857 - DNA, 50 bp, Artificial; identical to SEQ ID NO: 477306
  Synthetic oligonucleotide

SEQ ID NO: 611858 - DNA, 56 bp, Artificial; identical to SEQ ID NO: 477308
  Synthetic oligonucleotide

SEQ ID NO: 611859 - DNA, 60 bp, Artificial; identical to SEQ ID NO: 477309
  Synthetic oligonucleotide

SEQ ID NO: 611860 - DNA, 56 bp, Artificial; identical to SEQ ID NO: 19620
  Synthetic oligonucleotide

SEQ ID NO: 611861 - DNA, 50 bp, Artificial; identical to SEQ ID NO: 477310
  Synthetic oligonucleotide

SEQ ID NO: 611862 - DNA, 55 bp, Artificial; identical to SEQ ID NO: 15890
  Synthetic oligonucleotide

SEQ ID NO: 611863 - DNA, 60 bp, Artificial; identical to SEQ ID NO: 477313
  Synthetic oligonucleotide

SEQ ID NO: 611864 - DNA, 59 bp, Artificial; identical to SEQ ID NO: 12990
  Synthetic oligonucleotide

SEQ ID NO: 611865 - DNA, 59 bp, Artificial; identical to SEQ ID NO: 477315
  Synthetic oligonucleotide

SEQ ID NO: 611866 - DNA, 52 bp, Artificial; identical to SEQ ID NO: 477317
  Synthetic oligonucleotide

SEQ ID NO: 611867 - DNA, 59 bp, Artificial; identical to SEQ ID NO: 477319
  Synthetic oligonucleotide

SEQ ID NO: 611868 - DNA, 60 bp, Artificial; identical to SEQ ID NO: 477320
  Synthetic oligonucleotide

SEQ ID NO: 611869 - DNA, 58 bp, Artificial; identical to SEQ ID NO: 477323
  Synthetic oligonucleotide

SEQ ID NO: 611870 - DNA, 60 bp, Artificial; identical to SEQ ID NO: 477324
  Synthetic oligonucleotide

SEQ ID NO: 611871 - DNA, 53 bp, Artificial; identical to SEQ ID NO: 477328
  Synthetic oligonucleotide

SEQ ID NO: 611872 - DNA, 60 bp, Artificial; identical to SEQ ID NO: 477332
  Synthetic oligonucleotide

SEQ ID NO: 611873 - DNA, 57 bp, Artificial; identical to SEQ ID NO: 477333
  Synthetic oligonucleotide

SEQ ID NO: 611874 - DNA, 50 bp, Artificial; identical to SEQ ID NO: 477335
  Synthetic oligonucleotide

SEQ ID NO: 611875 - DNA, 57 bp, Artificial; identical to SEQ ID NO: 477336
  Synthetic oligonucleotide

SEQ ID NO: 611876 - DNA, 59 bp, Artificial; identical to SEQ ID NO: 477338
  Synthetic oligonucleotide

SEQ ID NO: 611877 - DNA, 55 bp, Artificial; identical to SEQ ID NO: 477341
  Synthetic oligonucleotide

SEQ ID NO: 611878 - DNA, 60 bp, Artificial; identical to SEQ ID NO: 477345
  Synthetic oligonucleotide

SEQ ID NO: 611879 - DNA, 60 bp, Artificial; identical to SEQ ID NO: 477346
  Synthetic oligonucleotide

SEQ ID NO: 611880 - DNA, 54 bp, Artificial; identical to SEQ ID NO: 477349
  Synthetic oligonucleotide

SEQ ID NO: 611881 - DNA, 53 bp, Artificial; identical to SEQ ID NO: 19194
  Synthetic oligonucleotide

SEQ ID NO: 611882 - DNA, 56 bp, Artificial; identical to SEQ ID NO: 477350
  Synthetic oligonucleotide

SEQ ID NO: 611883 - DNA, 60 bp, Artificial; identical to SEQ ID NO: 477351
  Synthetic oligonucleotide

SEQ ID NO: 611884 - DNA, 53 bp, Artificial; identical to SEQ ID NO: 477354
  Synthetic oligonucleotide

SEQ ID NO: 611885 - DNA, 60 bp, Artificial; identical to SEQ ID NO: 477355
  Synthetic oligonucleotide

SEQ ID NO: 611886 - DNA, 54 bp, Artificial; identical to SEQ ID NO: 477358
  Synthetic oligonucleotide

SEQ ID NO: 611887 - DNA, 59 bp, Artificial; identical to SEQ ID NO: 477361
  Synthetic oligonucleotide

SEQ ID NO: 611888 - DNA, 60 bp, Artificial; identical to SEQ ID NO: 477362
  Synthetic oligonucleotide

SEQ ID NO: 611889 - DNA, 58 bp, Artificial; identical to SEQ ID NO: 477364
  Synthetic oligonucleotide

SEQ ID NO: 611890 - DNA, 53 bp, Artificial; identical to SEQ ID NO: 477367
  Synthetic oligonucleotide

SEQ ID NO: 611891 - DNA, 60 bp, Artificial; identical to SEQ ID NO: 477368
  Synthetic oligonucleotide

SEQ ID NO: 611892 - DNA, 60 bp, Artificial; identical to SEQ ID NO: 477370
  Synthetic oligonucleotide

SEQ ID NO: 611893 - DNA, 60 bp, Artificial; identical to SEQ ID NO: 477373
  Synthetic oligonucleotide

SEQ ID NO: 611894 - DNA, 60 bp, Artificial; identical to SEQ ID NO: 477375
  Synthetic oligonucleotide

SEQ ID NO: 611895 - DNA, 51 bp, Artificial; identical to SEQ ID NO: 477376
  Synthetic oligonucleotide

SEQ ID NO: 611896 - DNA, 58 bp, Artificial; identical to SEQ ID NO: 17408
  Synthetic oligonucleotide

SEQ ID NO: 611897 - DNA, 55 bp, Artificial; identical to SEQ ID NO: 477380
  Synthetic oligonucleotide

SEQ ID NO: 611898 - DNA, 59 bp, Artificial; identical to SEQ ID NO: 477384
  Synthetic oligonucleotide

SEQ ID NO: 611899 - DNA, 52 bp, Artificial; identical to SEQ ID NO: 477387
  Synthetic oligonucleotide

SEQ ID NO: 611900 - DNA, 55 bp, Artificial; identical to SEQ ID NO: 477389
  Synthetic oligonucleotide

SEQ ID NO: 611901 - DNA, 51 bp, Artificial; identical to SEQ ID NO: 477393
  Synthetic oligonucleotide

SEQ ID NO: 611902 - DNA, 54 bp, Artificial; identical to SEQ ID NO: 477396
  Synthetic oligonucleotide

SEQ ID NO: 611903 - DNA, 60 bp, Artificial; identical to SEQ ID NO: 477399
  Synthetic oligonucleotide

SEQ ID NO: 611904 - DNA, 53 bp, Artificial; identical to SEQ ID NO: 477402
  Synthetic oligonucleotide

SEQ ID NO: 611905 - DNA, 60 bp, Artificial; identical to SEQ ID NO: 477405
  Synthetic oligonucleotide

SEQ ID NO: 611906 - DNA, 55 bp, Artificial; identical to SEQ ID NO: 477408
  Synthetic oligonucleotide

SEQ ID NO: 611907 - DNA, 52 bp, Artificial; identical to SEQ ID NO: 477410
  Synthetic oligonucleotide

SEQ ID NO: 611908 - DNA, 60 bp, Artificial; identical to SEQ ID NO: 477413
  Synthetic oligonucleotide

SEQ ID NO: 611909 - DNA, 55 bp, Artificial; identical to SEQ ID NO: 477414
  Synthetic oligonucleotide

SEQ ID NO: 611910 - DNA, 56 bp, Artificial; identical to SEQ ID NO: 13853
  Synthetic oligonucleotide

SEQ ID NO: 611911 - DNA, 60 bp, Artificial; identical to SEQ ID NO: 477423
  Synthetic oligonucleotide

SEQ ID NO: 611912 - DNA, 54 bp, Artificial; identical to SEQ ID NO: 477425
  Synthetic oligonucleotide

SEQ ID NO: 611913 - DNA, 53 bp, Artificial; identical to SEQ ID NO: 477427
  Synthetic oligonucleotide

SEQ ID NO: 611914 - DNA, 53 bp, Artificial; identical to SEQ ID NO: 477428
  Synthetic oligonucleotide

SEQ ID NO: 611915 - DNA, 54 bp, Artificial; identical to SEQ ID NO: 477430
  Synthetic oligonucleotide

SEQ ID NO: 611916 - DNA, 55 bp, Artificial; identical to SEQ ID NO: 477431
  Synthetic oligonucleotide

SEQ ID NO: 611917 - DNA, 60 bp, Artificial; identical to SEQ ID NO: 477432
  Synthetic oligonucleotide

SEQ ID NO: 611918 - DNA, 55 bp, Artificial; identical to SEQ ID NO: 477435
  Synthetic oligonucleotide

SEQ ID NO: 611919 - DNA, 59 bp, Artificial; identical to SEQ ID NO: 477436
  Synthetic oligonucleotide

SEQ ID NO: 611920 - DNA, 60 bp, Artificial; identical to SEQ ID NO: 10580
  Synthetic oligonucleotide

SEQ ID NO: 611921 - DNA, 60 bp, Artificial; identical to SEQ ID NO: 477437
  Synthetic oligonucleotide

SEQ ID NO: 611922 - DNA, 58 bp, Artificial; identical to SEQ ID NO: 18863
  Synthetic oligonucleotide

SEQ ID NO: 611923 - DNA, 60 bp, Artificial; identical to SEQ ID NO: 477443
  Synthetic oligonucleotide

SEQ ID NO: 611924 - DNA, 55 bp, Artificial; identical to SEQ ID NO: 477448
  Synthetic oligonucleotide

SEQ ID NO: 611925 - DNA, 54 bp, Artificial; identical to SEQ ID NO: 477449
  Synthetic oligonucleotide

SEQ ID NO: 611926 - DNA, 57 bp, Artificial; identical to SEQ ID NO: 477451
  Synthetic oligonucleotide

SEQ ID NO: 611927 - DNA, 59 bp, Artificial; identical to SEQ ID NO: 477455
  Synthetic oligonucleotide

SEQ ID NO: 611928 - DNA, 60 bp, Artificial; identical to SEQ ID NO: 477456
  Synthetic oligonucleotide

SEQ ID NO: 611929 - DNA, 58 bp, Artificial; identical to SEQ ID NO: 477460
  Synthetic oligonucleotide

SEQ ID NO: 611930 - DNA, 60 bp, Artificial; identical to SEQ ID NO: 477462
  Synthetic oligonucleotide

SEQ ID NO: 611931 - DNA, 55 bp, Artificial; identical to SEQ ID NO: 477465
  Synthetic oligonucleotide

SEQ ID NO: 611932 - DNA, 60 bp, Artificial; identical to SEQ ID NO: 477470
  Synthetic oligonucleotide

SEQ ID NO: 611933 - DNA, 55 bp, Artificial; identical to SEQ ID NO: 477471
  Synthetic oligonucleotide

SEQ ID NO: 611934 - DNA, 60 bp, Artificial; identical to SEQ ID NO: 477473
  Synthetic oligonucleotide

SEQ ID NO: 611935 - DNA, 53 bp, Artificial; identical to SEQ ID NO: 477476
  Synthetic oligonucleotide

SEQ ID NO: 611936 - DNA, 57 bp, Artificial; identical to SEQ ID NO: 477479
  Synthetic oligonucleotide

SEQ ID NO: 611937 - DNA, 58 bp, Artificial; identical to SEQ ID NO: 477480
  Synthetic oligonucleotide

SEQ ID NO: 611938 - DNA, 55 bp, Artificial; identical to SEQ ID NO: 477483
  Synthetic oligonucleotide

SEQ ID NO: 611939 - DNA, 51 bp, Artificial; identical to SEQ ID NO: 477486
  Synthetic oligonucleotide

SEQ ID NO: 611940 - DNA, 52 bp, Artificial; identical to SEQ ID NO: 477492
  Synthetic oligonucleotide

SEQ ID NO: 611941 - DNA, 59 bp, Artificial; identical to SEQ ID NO: 477493
  Synthetic oligonucleotide

SEQ ID NO: 611942 - DNA, 54 bp, Artificial; identical to SEQ ID NO: 477494
  Synthetic oligonucleotide

SEQ ID NO: 611943 - DNA, 60 bp, Artificial; identical to SEQ ID NO: 477495
  Synthetic oligonucleotide

SEQ ID NO: 611944 - DNA, 60 bp, Artificial; identical to SEQ ID NO: 477497
  Synthetic oligonucleotide

SEQ ID NO: 611945 - DNA, 60 bp, Artificial; identical to SEQ ID NO: 477499
  Synthetic oligonucleotide

SEQ ID NO: 611946 - DNA, 56 bp, Artificial; identical to SEQ ID NO: 477501
  Synthetic oligonucleotide

SEQ ID NO: 611947 - DNA, 60 bp, Artificial; identical to SEQ ID NO: 477507
  Synthetic oligonucleotide

SEQ ID NO: 611948 - DNA, 60 bp, Artificial; identical to SEQ ID NO: 477508
  Synthetic oligonucleotide

SEQ ID NO: 611949 - DNA, 60 bp, Artificial; identical to SEQ ID NO: 477511
  Synthetic oligonucleotide

SEQ ID NO: 611950 - DNA, 55 bp, Artificial; identical to SEQ ID NO: 477513
  Synthetic oligonucleotide

SEQ ID NO: 611951 - DNA, 58 bp, Artificial; identical to SEQ ID NO: 477515
  Synthetic oligonucleotide

SEQ ID NO: 611952 - DNA, 60 bp, Artificial; identical to SEQ ID NO: 477516
  Synthetic oligonucleotide

SEQ ID NO: 611953 - DNA, 60 bp, Artificial; identical to SEQ ID NO: 477517
  Synthetic oligonucleotide

SEQ ID NO: 611954 - DNA, 56 bp, Artificial; identical to SEQ ID NO: 477519
  Synthetic oligonucleotide

SEQ ID NO: 611955 - DNA, 58 bp, Artificial; identical to SEQ ID NO: 19831
  Synthetic oligonucleotide

SEQ ID NO: 611956 - DNA, 53 bp, Artificial; identical to SEQ ID NO: 477521
  Synthetic oligonucleotide

SEQ ID NO: 611957 - DNA, 58 bp, Artificial; identical to SEQ ID NO: 477522
  Synthetic oligonucleotide

SEQ ID NO: 611958 - DNA, 55 bp, Artificial; identical to SEQ ID NO: 477525
  Synthetic oligonucleotide

SEQ ID NO: 611959 - DNA, 60 bp, Artificial; identical to SEQ ID NO: 477527
  Synthetic oligonucleotide

SEQ ID NO: 611960 - DNA, 57 bp, Artificial; identical to SEQ ID NO: 477531
  Synthetic oligonucleotide

SEQ ID NO: 611961 - DNA, 59 bp, Artificial; identical to SEQ ID NO: 477534
  Synthetic oligonucleotide

SEQ ID NO: 611962 - DNA, 60 bp, Artificial; identical to SEQ ID NO: 477537
  Synthetic oligonucleotide

SEQ ID NO: 611963 - DNA, 59 bp, Artificial; identical to SEQ ID NO: 477543
  Synthetic oligonucleotide

SEQ ID NO: 611964 - DNA, 53 bp, Artificial; identical to SEQ ID NO: 477544
  Synthetic oligonucleotide

SEQ ID NO: 611965 - DNA, 57 bp, Artificial; identical to SEQ ID NO: 477546
  Synthetic oligonucleotide

SEQ ID NO: 611966 - DNA, 51 bp, Artificial; identical to SEQ ID NO: 477547
  Synthetic oligonucleotide

SEQ ID NO: 611967 - DNA, 55 bp, Artificial; identical to SEQ ID NO: 477548
  Synthetic oligonucleotide

SEQ ID NO: 611968 - DNA, 56 bp, Artificial; identical to SEQ ID NO: 477549
  Synthetic oligonucleotide

SEQ ID NO: 611969 - DNA, 59 bp, Artificial; identical to SEQ ID NO: 477550
  Synthetic oligonucleotide

SEQ ID NO: 611970 - DNA, 59 bp, Artificial; identical to SEQ ID NO: 477551
  Synthetic oligonucleotide

SEQ ID NO: 611971 - DNA, 57 bp, Artificial; identical to SEQ ID NO: 477552
  Synthetic oligonucleotide

SEQ ID NO: 611972 - DNA, 59 bp, Artificial; identical to SEQ ID NO: 477553
  Synthetic oligonucleotide

SEQ ID NO: 611973 - DNA, 60 bp, Artificial; identical to SEQ ID NO: 477557
  Synthetic oligonucleotide

SEQ ID NO: 611974 - DNA, 51 bp, Artificial; identical to SEQ ID NO: 477560
  Synthetic oligonucleotide

SEQ ID NO: 611975 - DNA, 57 bp, Artificial; identical to SEQ ID NO: 477563
  Synthetic oligonucleotide

SEQ ID NO: 611976 - DNA, 58 bp, Artificial; identical to SEQ ID NO: 477564
  Synthetic oligonucleotide

SEQ ID NO: 611977 - DNA, 60 bp, Artificial; identical to SEQ ID NO: 477566
  Synthetic oligonucleotide

SEQ ID NO: 611978 - DNA, 55 bp, Artificial; identical to SEQ ID NO: 477567
  Synthetic oligonucleotide

SEQ ID NO: 611979 - DNA, 59 bp, Artificial; identical to SEQ ID NO: 477570
  Synthetic oligonucleotide

SEQ ID NO: 611980 - DNA, 52 bp, Artificial; identical to SEQ ID NO: 477572
  Synthetic oligonucleotide

SEQ ID NO: 611981 - DNA, 60 bp, Artificial; identical to SEQ ID NO: 6731
  Synthetic oligonucleotide

SEQ ID NO: 611982 - DNA, 60 bp, Artificial; identical to SEQ ID NO: 477574
  Synthetic oligonucleotide

SEQ ID NO: 611983 - DNA, 55 bp, Artificial; identical to SEQ ID NO: 477579
  Synthetic oligonucleotide

SEQ ID NO: 611984 - DNA, 60 bp, Artificial; identical to SEQ ID NO: 477582
  Synthetic oligonucleotide

SEQ ID NO: 611985 - DNA, 51 bp, Artificial; identical to SEQ ID NO: 477588
  Synthetic oligonucleotide

SEQ ID NO: 611986 - DNA, 59 bp, Artificial; identical to SEQ ID NO: 477591
  Synthetic oligonucleotide

SEQ ID NO: 611987 - DNA, 59 bp, Artificial; identical to SEQ ID NO: 477592
  Synthetic oligonucleotide

SEQ ID NO: 611988 - DNA, 58 bp, Artificial; identical to SEQ ID NO: 477601
  Synthetic oligonucleotide

SEQ ID NO: 611989 - DNA, 60 bp, Artificial; identical to SEQ ID NO: 477603
  Synthetic oligonucleotide

SEQ ID NO: 611990 - DNA, 60 bp, Artificial; identical to SEQ ID NO: 477604
  Synthetic oligonucleotide

SEQ ID NO: 611991 - DNA, 60 bp, Artificial; identical to SEQ ID NO: 477605
  Synthetic oligonucleotide

SEQ ID NO: 611992 - DNA, 60 bp, Artificial; identical to SEQ ID NO: 477607
  Synthetic oligonucleotide

SEQ ID NO: 611993 - DNA, 60 bp, Artificial; identical to SEQ ID NO: 477608
  Synthetic oligonucleotide

SEQ ID NO: 611994 - DNA, 60 bp, Artificial; identical to SEQ ID NO: 477609
  Synthetic oligonucleotide

SEQ ID NO: 611995 - DNA, 55 bp, Artificial; identical to SEQ ID NO: 477615
  Synthetic oligonucleotide

SEQ ID NO: 611996 - DNA, 53 bp, Artificial; identical to SEQ ID NO: 477619
  Synthetic oligonucleotide

SEQ ID NO: 611997 - DNA, 60 bp, Artificial; identical to SEQ ID NO: 477622
  Synthetic oligonucleotide

SEQ ID NO: 611998 - DNA, 57 bp, Artificial; identical to SEQ ID NO: 477624
  Synthetic oligonucleotide

SEQ ID NO: 611999 - DNA, 53 bp, Artificial; identical to SEQ ID NO: 477625
  Synthetic oligonucleotide

SEQ ID NO: 612000 - DNA, 60 bp, Artificial; identical to SEQ ID NO: 477627
  Synthetic oligonucleotide

SEQ ID NO: 612001 - DNA, 55 bp, Artificial; identical to SEQ ID NO: 477630
  Synthetic oligonucleotide

SEQ ID NO: 612002 - DNA, 60 bp, Artificial; identical to SEQ ID NO: 477631
  Synthetic oligonucleotide

SEQ ID NO: 612003 - DNA, 58 bp, Artificial; identical to SEQ ID NO: 477633
  Synthetic oligonucleotide

SEQ ID NO: 612004 - DNA, 51 bp, Artificial; identical to SEQ ID NO: 477634
  Synthetic oligonucleotide

SEQ ID NO: 612005 - DNA, 52 bp, Artificial; identical to SEQ ID NO: 477635
  Synthetic oligonucleotide

SEQ ID NO: 612006 - DNA, 56 bp, Artificial; identical to SEQ ID NO: 477640
  Synthetic oligonucleotide

SEQ ID NO: 612007 - DNA, 60 bp, Artificial; identical to SEQ ID NO: 477644
  Synthetic oligonucleotide

SEQ ID NO: 612008 - DNA, 52 bp, Artificial; identical to SEQ ID NO: 477645
  Synthetic oligonucleotide

SEQ ID NO: 612009 - DNA, 60 bp, Artificial; identical to SEQ ID NO: 477646
  Synthetic oligonucleotide

SEQ ID NO: 612010 - DNA, 55 bp, Artificial; identical to SEQ ID NO: 477652
  Synthetic oligonucleotide

SEQ ID NO: 612011 - DNA, 55 bp, Artificial; identical to SEQ ID NO: 477654
  Synthetic oligonucleotide

SEQ ID NO: 612012 - DNA, 58 bp, Artificial; identical to SEQ ID NO: 477656
  Synthetic oligonucleotide

SEQ ID NO: 612013 - DNA, 57 bp, Artificial; identical to SEQ ID NO: 477660
  Synthetic oligonucleotide

SEQ ID NO: 612014 - DNA, 55 bp, Artificial; identical to SEQ ID NO: 477662
  Synthetic oligonucleotide

SEQ ID NO: 612015 - DNA, 60 bp, Artificial; identical to SEQ ID NO: 477664
  Synthetic oligonucleotide

SEQ ID NO: 612016 - DNA, 51 bp, Artificial; identical to SEQ ID NO: 477666
  Synthetic oligonucleotide

SEQ ID NO: 612017 - DNA, 60 bp, Artificial; identical to SEQ ID NO: 15016
  Synthetic oligonucleotide

SEQ ID NO: 612018 - DNA, 57 bp, Artificial; identical to SEQ ID NO: 477669
  Synthetic oligonucleotide

SEQ ID NO: 612019 - DNA, 59 bp, Artificial; identical to SEQ ID NO: 477670
  Synthetic oligonucleotide

SEQ ID NO: 612020 - DNA, 59 bp, Artificial; identical to SEQ ID NO: 477671
  Synthetic oligonucleotide

SEQ ID NO: 612021 - DNA, 57 bp, Artificial; identical to SEQ ID NO: 477675
  Synthetic oligonucleotide

SEQ ID NO: 612022 - DNA, 50 bp, Artificial; identical to SEQ ID NO: 477676
  Synthetic oligonucleotide

SEQ ID NO: 612023 - DNA, 54 bp, Artificial; identical to SEQ ID NO: 477677
  Synthetic oligonucleotide

SEQ ID NO: 612024 - DNA, 60 bp, Artificial; identical to SEQ ID NO: 477679
  Synthetic oligonucleotide

SEQ ID NO: 612025 - DNA, 60 bp, Artificial; identical to SEQ ID NO: 13521
  Synthetic oligonucleotide

SEQ ID NO: 612026 - DNA, 60 bp, Artificial; identical to SEQ ID NO: 477682
  Synthetic oligonucleotide

SEQ ID NO: 612027 - DNA, 58 bp, Artificial; identical to SEQ ID NO: 477686
  Synthetic oligonucleotide

SEQ ID NO: 612028 - DNA, 60 bp, Artificial; identical to SEQ ID NO: 12176
  Synthetic oligonucleotide

SEQ ID NO: 612029 - DNA, 60 bp, Artificial; identical to SEQ ID NO: 477690
  Synthetic oligonucleotide

SEQ ID NO: 612030 - DNA, 60 bp, Artificial; identical to SEQ ID NO: 477694
  Synthetic oligonucleotide

SEQ ID NO: 612031 - DNA, 59 bp, Artificial; identical to SEQ ID NO: 477695
  Synthetic oligonucleotide

SEQ ID NO: 612032 - DNA, 54 bp, Artificial; identical to SEQ ID NO: 477696
  Synthetic oligonucleotide

SEQ ID NO: 612033 - DNA, 60 bp, Artificial; identical to SEQ ID NO: 477697
  Synthetic oligonucleotide

SEQ ID NO: 612034 - DNA, 54 bp, Artificial; identical to SEQ ID NO: 477698
  Synthetic oligonucleotide

SEQ ID NO: 612035 - DNA, 54 bp, Artificial; identical to SEQ ID NO: 477699
  Synthetic oligonucleotide

SEQ ID NO: 612036 - DNA, 60 bp, Artificial; identical to SEQ ID NO: 477702
  Synthetic oligonucleotide

SEQ ID NO: 612037 - DNA, 52 bp, Artificial; identical to SEQ ID NO: 477703
  Synthetic oligonucleotide

SEQ ID NO: 612038 - DNA, 60 bp, Artificial; identical to SEQ ID NO: 477706
  Synthetic oligonucleotide

SEQ ID NO: 612039 - DNA, 55 bp, Artificial; identical to SEQ ID NO: 477707
  Synthetic oligonucleotide

SEQ ID NO: 612040 - DNA, 60 bp, Artificial; identical to SEQ ID NO: 477709
  Synthetic oligonucleotide

SEQ ID NO: 612041 - DNA, 52 bp, Artificial; identical to SEQ ID NO: 477711
  Synthetic oligonucleotide

SEQ ID NO: 612042 - DNA, 60 bp, Artificial; identical to SEQ ID NO: 477712
  Synthetic oligonucleotide

SEQ ID NO: 612043 - DNA, 60 bp, Artificial; identical to SEQ ID NO: 477718
  Synthetic oligonucleotide

SEQ ID NO: 612044 - DNA, 60 bp, Artificial; identical to SEQ ID NO: 477720
  Synthetic oligonucleotide

SEQ ID NO: 612045 - DNA, 60 bp, Artificial; identical to SEQ ID NO: 477721
  Synthetic oligonucleotide

SEQ ID NO: 612046 - DNA, 57 bp, Artificial; identical to SEQ ID NO: 477724
  Synthetic oligonucleotide

SEQ ID NO: 612047 - DNA, 60 bp, Artificial; identical to SEQ ID NO: 477725
  Synthetic oligonucleotide

SEQ ID NO: 612048 - DNA, 60 bp, Artificial; identical to SEQ ID NO: 477728
  Synthetic oligonucleotide

SEQ ID NO: 612049 - DNA, 55 bp, Artificial; identical to SEQ ID NO: 477729
  Synthetic oligonucleotide

SEQ ID NO: 612050 - DNA, 51 bp, Artificial; identical to SEQ ID NO: 6716
  Synthetic oligonucleotide

SEQ ID NO: 612051 - DNA, 60 bp, Artificial; identical to SEQ ID NO: 477733
  Synthetic oligonucleotide

SEQ ID NO: 612052 - DNA, 60 bp, Artificial; identical to SEQ ID NO: 477734
  Synthetic oligonucleotide

SEQ ID NO: 612053 - DNA, 55 bp, Artificial; identical to SEQ ID NO: 477736
  Synthetic oligonucleotide

SEQ ID NO: 612054 - DNA, 60 bp, Artificial; identical to SEQ ID NO: 477739
  Synthetic oligonucleotide

SEQ ID NO: 612055 - DNA, 53 bp, Artificial; identical to SEQ ID NO: 477741
  Synthetic oligonucleotide

SEQ ID NO: 612056 - DNA, 58 bp, Artificial; identical to SEQ ID NO: 477742
  Synthetic oligonucleotide

SEQ ID NO: 612057 - DNA, 56 bp, Artificial; identical to SEQ ID NO: 477744
  Synthetic oligonucleotide

SEQ ID NO: 612058 - DNA, 55 bp, Artificial; identical to SEQ ID NO: 477746
  Synthetic oligonucleotide

SEQ ID NO: 612059 - DNA, 58 bp, Artificial; identical to SEQ ID NO: 477749
  Synthetic oligonucleotide

SEQ ID NO: 612060 - DNA, 57 bp, Artificial; identical to SEQ ID NO: 477753
  Synthetic oligonucleotide

SEQ ID NO: 612061 - DNA, 54 bp, Artificial; identical to SEQ ID NO: 477755
  Synthetic oligonucleotide

SEQ ID NO: 612062 - DNA, 60 bp, Artificial; identical to SEQ ID NO: 477757
  Synthetic oligonucleotide

SEQ ID NO: 612063 - DNA, 56 bp, Artificial; identical to SEQ ID NO: 477761
  Synthetic oligonucleotide

SEQ ID NO: 612064 - DNA, 55 bp, Artificial; identical to SEQ ID NO: 477762
  Synthetic oligonucleotide

SEQ ID NO: 612065 - DNA, 54 bp, Artificial; identical to SEQ ID NO: 477766
  Synthetic oligonucleotide

SEQ ID NO: 612066 - DNA, 57 bp, Artificial; identical to SEQ ID NO: 477768
  Synthetic oligonucleotide

SEQ ID NO: 612067 - DNA, 57 bp, Artificial; identical to SEQ ID NO: 477771
  Synthetic oligonucleotide

SEQ ID NO: 612068 - DNA, 60 bp, Artificial; identical to SEQ ID NO: 477772
  Synthetic oligonucleotide

SEQ ID NO: 612069 - DNA, 52 bp, Artificial; identical to SEQ ID NO: 477774
  Synthetic oligonucleotide

SEQ ID NO: 612070 - DNA, 60 bp, Artificial; identical to SEQ ID NO: 477777
  Synthetic oligonucleotide

SEQ ID NO: 612071 - DNA, 58 bp, Artificial; identical to SEQ ID NO: 477781
  Synthetic oligonucleotide

SEQ ID NO: 612072 - DNA, 59 bp, Artificial; identical to SEQ ID NO: 477784
  Synthetic oligonucleotide

SEQ ID NO: 612073 - DNA, 56 bp, Artificial; identical to SEQ ID NO: 477791
  Synthetic oligonucleotide

SEQ ID NO: 612074 - DNA, 60 bp, Artificial; identical to SEQ ID NO: 477795
  Synthetic oligonucleotide

SEQ ID NO: 612075 - DNA, 52 bp, Artificial; identical to SEQ ID NO: 477796
  Synthetic oligonucleotide

SEQ ID NO: 612076 - DNA, 55 bp, Artificial; identical to SEQ ID NO: 477797
  Synthetic oligonucleotide

SEQ ID NO: 612077 - DNA, 60 bp, Artificial; identical to SEQ ID NO: 477798
  Synthetic oligonucleotide

SEQ ID NO: 612078 - DNA, 58 bp, Artificial; identical to SEQ ID NO: 477800
  Synthetic oligonucleotide

SEQ ID NO: 612079 - DNA, 60 bp, Artificial; identical to SEQ ID NO: 477801
  Synthetic oligonucleotide

SEQ ID NO: 612080 - DNA, 55 bp, Artificial; identical to SEQ ID NO: 477802
  Synthetic oligonucleotide

SEQ ID NO: 612081 - DNA, 55 bp, Artificial; identical to SEQ ID NO: 477803
  Synthetic oligonucleotide

SEQ ID NO: 612082 - DNA, 51 bp, Artificial; identical to SEQ ID NO: 477805
  Synthetic oligonucleotide

SEQ ID NO: 612083 - DNA, 54 bp, Artificial; identical to SEQ ID NO: 20191
  Synthetic oligonucleotide

SEQ ID NO: 612084 - DNA, 53 bp, Artificial; identical to SEQ ID NO: 477806
  Synthetic oligonucleotide

SEQ ID NO: 612085 - DNA, 56 bp, Artificial; identical to SEQ ID NO: 477808
  Synthetic oligonucleotide

SEQ ID NO: 612086 - DNA, 58 bp, Artificial; identical to SEQ ID NO: 477815
  Synthetic oligonucleotide

SEQ ID NO: 612087 - DNA, 59 bp, Artificial; identical to SEQ ID NO: 477817
  Synthetic oligonucleotide

SEQ ID NO: 612088 - DNA, 59 bp, Artificial; identical to SEQ ID NO: 477819
  Synthetic oligonucleotide

SEQ ID NO: 612089 - DNA, 60 bp, Artificial; identical to SEQ ID NO: 477822
  Synthetic oligonucleotide

SEQ ID NO: 612090 - DNA, 57 bp, Artificial; identical to SEQ ID NO: 477823
  Synthetic oligonucleotide

SEQ ID NO: 612091 - DNA, 60 bp, Artificial; identical to SEQ ID NO: 477824
  Synthetic oligonucleotide

SEQ ID NO: 612092 - DNA, 53 bp, Artificial; identical to SEQ ID NO: 477829
  Synthetic oligonucleotide

SEQ ID NO: 612093 - DNA, 52 bp, Artificial; identical to SEQ ID NO: 477839
  Synthetic oligonucleotide

SEQ ID NO: 612094 - DNA, 60 bp, Artificial; identical to SEQ ID NO: 15596
  Synthetic oligonucleotide

SEQ ID NO: 612095 - DNA, 60 bp, Artificial; identical to SEQ ID NO: 477840
  Synthetic oligonucleotide

SEQ ID NO: 612096 - DNA, 56 bp, Artificial; identical to SEQ ID NO: 477843
  Synthetic oligonucleotide

SEQ ID NO: 612097 - DNA, 60 bp, Artificial; identical to SEQ ID NO: 477847
  Synthetic oligonucleotide

SEQ ID NO: 612098 - DNA, 58 bp, Artificial; identical to SEQ ID NO: 477850
  Synthetic oligonucleotide

SEQ ID NO: 612099 - DNA, 54 bp, Artificial; identical to SEQ ID NO: 477852
  Synthetic oligonucleotide

SEQ ID NO: 612100 - DNA, 56 bp, Artificial; identical to SEQ ID NO: 477854
  Synthetic oligonucleotide

SEQ ID NO: 612101 - DNA, 56 bp, Artificial; identical to SEQ ID NO: 19343
  Synthetic oligonucleotide

SEQ ID NO: 612102 - DNA, 60 bp, Artificial; identical to SEQ ID NO: 477863
  Synthetic oligonucleotide

SEQ ID NO: 612103 - DNA, 55 bp, Artificial; identical to SEQ ID NO: 477867
  Synthetic oligonucleotide

SEQ ID NO: 612104 - DNA, 57 bp, Artificial; identical to SEQ ID NO: 477868
  Synthetic oligonucleotide

SEQ ID NO: 612105 - DNA, 58 bp, Artificial; identical to SEQ ID NO: 477872
  Synthetic oligonucleotide

SEQ ID NO: 612106 - DNA, 55 bp, Artificial; identical to SEQ ID NO: 477876
  Synthetic oligonucleotide

SEQ ID NO: 612107 - DNA, 52 bp, Artificial; identical to SEQ ID NO: 477877
  Synthetic oligonucleotide

SEQ ID NO: 612108 - DNA, 60 bp, Artificial; identical to SEQ ID NO: 477878
  Synthetic oligonucleotide

SEQ ID NO: 612109 - DNA, 58 bp, Artificial; identical to SEQ ID NO: 477880
  Synthetic oligonucleotide

SEQ ID NO: 612110 - DNA, 60 bp, Artificial; identical to SEQ ID NO: 477881
  Synthetic oligonucleotide

SEQ ID NO: 612111 - DNA, 58 bp, Artificial; identical to SEQ ID NO: 477882
  Synthetic oligonucleotide

SEQ ID NO: 612112 - DNA, 55 bp, Artificial; identical to SEQ ID NO: 477883
  Synthetic oligonucleotide

SEQ ID NO: 612113 - DNA, 60 bp, Artificial; identical to SEQ ID NO: 477884
  Synthetic oligonucleotide

SEQ ID NO: 612114 - DNA, 56 bp, Artificial; identical to SEQ ID NO: 477885
  Synthetic oligonucleotide

SEQ ID NO: 612115 - DNA, 54 bp, Artificial; identical to SEQ ID NO: 477886
  Synthetic oligonucleotide

SEQ ID NO: 612116 - DNA, 55 bp, Artificial; identical to SEQ ID NO: 477887
  Synthetic oligonucleotide

SEQ ID NO: 612117 - DNA, 53 bp, Artificial; identical to SEQ ID NO: 477889
  Synthetic oligonucleotide

SEQ ID NO: 612118 - DNA, 59 bp, Artificial; identical to SEQ ID NO: 477891
  Synthetic oligonucleotide

SEQ ID NO: 612119 - DNA, 58 bp, Artificial; identical to SEQ ID NO: 477894
  Synthetic oligonucleotide

SEQ ID NO: 612120 - DNA, 55 bp, Artificial; identical to SEQ ID NO: 20260
  Synthetic oligonucleotide

SEQ ID NO: 612121 - DNA, 51 bp, Artificial; identical to SEQ ID NO: 477895
  Synthetic oligonucleotide

SEQ ID NO: 612122 - DNA, 55 bp, Artificial; identical to SEQ ID NO: 477896
  Synthetic oligonucleotide

SEQ ID NO: 612123 - DNA, 50 bp, Artificial; identical to SEQ ID NO: 477897
  Synthetic oligonucleotide

SEQ ID NO: 612124 - DNA, 58 bp, Artificial; identical to SEQ ID NO: 11828
  Synthetic oligonucleotide

SEQ ID NO: 612125 - DNA, 57 bp, Artificial; identical to SEQ ID NO: 477900
  Synthetic oligonucleotide

SEQ ID NO: 612126 - DNA, 54 bp, Artificial; identical to SEQ ID NO: 477901
  Synthetic oligonucleotide

SEQ ID NO: 612127 - DNA, 56 bp, Artificial; identical to SEQ ID NO: 477902
  Synthetic oligonucleotide

SEQ ID NO: 612128 - DNA, 60 bp, Artificial; identical to SEQ ID NO: 477903
  Synthetic oligonucleotide

SEQ ID NO: 612129 - DNA, 60 bp, Artificial; identical to SEQ ID NO: 477904
  Synthetic oligonucleotide

SEQ ID NO: 612130 - DNA, 58 bp, Artificial; identical to SEQ ID NO: 477905
  Synthetic oligonucleotide

SEQ ID NO: 612131 - DNA, 60 bp, Artificial; identical to SEQ ID NO: 477906
  Synthetic oligonucleotide

SEQ ID NO: 612132 - DNA, 60 bp, Artificial; identical to SEQ ID NO: 477909
  Synthetic oligonucleotide

SEQ ID NO: 612133 - DNA, 60 bp, Artificial; identical to SEQ ID NO: 477910
  Synthetic oligonucleotide

SEQ ID NO: 612134 - DNA, 51 bp, Artificial; identical to SEQ ID NO: 20261
  Synthetic oligonucleotide

SEQ ID NO: 612135 - DNA, 55 bp, Artificial; identical to SEQ ID NO: 6042
  Synthetic oligonucleotide

SEQ ID NO: 612136 - DNA, 53 bp, Artificial; identical to SEQ ID NO: 477914
  Synthetic oligonucleotide

SEQ ID NO: 612137 - DNA, 60 bp, Artificial; identical to SEQ ID NO: 477915
  Synthetic oligonucleotide

SEQ ID NO: 612138 - DNA, 51 bp, Artificial; identical to SEQ ID NO: 477916
  Synthetic oligonucleotide

SEQ ID NO: 612139 - DNA, 55 bp, Artificial; identical to SEQ ID NO: 477918
  Synthetic oligonucleotide

SEQ ID NO: 612140 - DNA, 60 bp, Artificial; identical to SEQ ID NO: 6922
  Synthetic oligonucleotide

SEQ ID NO: 612141 - DNA, 60 bp, Artificial; identical to SEQ ID NO: 477919
  Synthetic oligonucleotide

SEQ ID NO: 612142 - DNA, 56 bp, Artificial; identical to SEQ ID NO: 477921
  Synthetic oligonucleotide

SEQ ID NO: 612143 - DNA, 58 bp, Artificial; identical to SEQ ID NO: 477922
  Synthetic oligonucleotide

SEQ ID NO: 612144 - DNA, 57 bp, Artificial; identical to SEQ ID NO: 477923
  Synthetic oligonucleotide

SEQ ID NO: 612145 - DNA, 60 bp, Artificial; identical to SEQ ID NO: 477924
  Synthetic oligonucleotide

SEQ ID NO: 612146 - DNA, 57 bp, Artificial; identical to SEQ ID NO: 477925
  Synthetic oligonucleotide

SEQ ID NO: 612147 - DNA, 55 bp, Artificial; identical to SEQ ID NO: 477933
  Synthetic oligonucleotide

SEQ ID NO: 612148 - DNA, 58 bp, Artificial; identical to SEQ ID NO: 477935
  Synthetic oligonucleotide

SEQ ID NO: 612149 - DNA, 60 bp, Artificial; identical to SEQ ID NO: 477937
  Synthetic oligonucleotide

SEQ ID NO: 612150 - DNA, 56 bp, Artificial; identical to SEQ ID NO: 477940
  Synthetic oligonucleotide

SEQ ID NO: 612151 - DNA, 60 bp, Artificial; identical to SEQ ID NO: 477945
  Synthetic oligonucleotide

SEQ ID NO: 612152 - DNA, 60 bp, Artificial; identical to SEQ ID NO: 477947
  Synthetic oligonucleotide

SEQ ID NO: 612153 - DNA, 52 bp, Artificial; identical to SEQ ID NO: 477948
  Synthetic oligonucleotide

SEQ ID NO: 612154 - DNA, 60 bp, Artificial; identical to SEQ ID NO: 477952
  Synthetic oligonucleotide

SEQ ID NO: 612155 - DNA, 51 bp, Artificial; identical to SEQ ID NO: 477955
  Synthetic oligonucleotide

SEQ ID NO: 612156 - DNA, 60 bp, Artificial; identical to SEQ ID NO: 477958
  Synthetic oligonucleotide

SEQ ID NO: 612157 - DNA, 60 bp, Artificial; identical to SEQ ID NO: 477960
  Synthetic oligonucleotide

SEQ ID NO: 612158 - DNA, 53 bp, Artificial; identical to SEQ ID NO: 477964
  Synthetic oligonucleotide

SEQ ID NO: 612159 - DNA, 57 bp, Artificial; identical to SEQ ID NO: 477965
  Synthetic oligonucleotide

SEQ ID NO: 612160 - DNA, 54 bp, Artificial; identical to SEQ ID NO: 18528
  Synthetic oligonucleotide

SEQ ID NO: 612161 - DNA, 55 bp, Artificial; identical to SEQ ID NO: 477974
  Synthetic oligonucleotide

SEQ ID NO: 612162 - DNA, 52 bp, Artificial; identical to SEQ ID NO: 477976
  Synthetic oligonucleotide

SEQ ID NO: 612163 - DNA, 60 bp, Artificial; identical to SEQ ID NO: 477977
  Synthetic oligonucleotide

SEQ ID NO: 612164 - DNA, 60 bp, Artificial; identical to SEQ ID NO: 477978
  Synthetic oligonucleotide

SEQ ID NO: 612165 - DNA, 60 bp, Artificial; identical to SEQ ID NO: 477984
  Synthetic oligonucleotide

SEQ ID NO: 612166 - DNA, 59 bp, Artificial; identical to SEQ ID NO: 477986
  Synthetic oligonucleotide

SEQ ID NO: 612167 - DNA, 52 bp, Artificial; identical to SEQ ID NO: 477987
  Synthetic oligonucleotide

SEQ ID NO: 612168 - DNA, 58 bp, Artificial; identical to SEQ ID NO: 477990
  Synthetic oligonucleotide

SEQ ID NO: 612169 - DNA, 55 bp, Artificial; identical to SEQ ID NO: 477992
  Synthetic oligonucleotide

SEQ ID NO: 612170 - DNA, 55 bp, Artificial; identical to SEQ ID NO: 477994
  Synthetic oligonucleotide

SEQ ID NO: 612171 - DNA, 60 bp, Artificial; identical to SEQ ID NO: 477995
  Synthetic oligonucleotide

SEQ ID NO: 612172 - DNA, 55 bp, Artificial; identical to SEQ ID NO: 477996
  Synthetic oligonucleotide

SEQ ID NO: 612173 - DNA, 60 bp, Artificial; identical to SEQ ID NO: 478001
  Synthetic oligonucleotide

SEQ ID NO: 612174 - DNA, 56 bp, Artificial; identical to SEQ ID NO: 478005
  Synthetic oligonucleotide

SEQ ID NO: 612175 - DNA, 60 bp, Artificial; identical to SEQ ID NO: 478007
  Synthetic oligonucleotide

SEQ ID NO: 612176 - DNA, 53 bp, Artificial; identical to SEQ ID NO: 478013
  Synthetic oligonucleotide

SEQ ID NO: 612177 - DNA, 52 bp, Artificial; identical to SEQ ID NO: 478019
  Synthetic oligonucleotide

SEQ ID NO: 612178 - DNA, 52 bp, Artificial; identical to SEQ ID NO: 478021
  Synthetic oligonucleotide

SEQ ID NO: 612179 - DNA, 55 bp, Artificial; identical to SEQ ID NO: 478023
  Synthetic oligonucleotide

SEQ ID NO: 612180 - DNA, 55 bp, Artificial; identical to SEQ ID NO: 478027
  Synthetic oligonucleotide

SEQ ID NO: 612181 - DNA, 53 bp, Artificial; identical to SEQ ID NO: 478030
  Synthetic oligonucleotide

SEQ ID NO: 612182 - DNA, 55 bp, Artificial; identical to SEQ ID NO: 478031
  Synthetic oligonucleotide

SEQ ID NO: 612183 - DNA, 58 bp, Artificial; identical to SEQ ID NO: 478032
  Synthetic oligonucleotide

SEQ ID NO: 612184 - DNA, 60 bp, Artificial; identical to SEQ ID NO: 478034
  Synthetic oligonucleotide

SEQ ID NO: 612185 - DNA, 60 bp, Artificial; identical to SEQ ID NO: 478036
  Synthetic oligonucleotide

SEQ ID NO: 612186 - DNA, 50 bp, Artificial; identical to SEQ ID NO: 478037
  Synthetic oligonucleotide

SEQ ID NO: 612187 - DNA, 57 bp, Artificial; identical to SEQ ID NO: 478038
  Synthetic oligonucleotide

SEQ ID NO: 612188 - DNA, 60 bp, Artificial; identical to SEQ ID NO: 478040
  Synthetic oligonucleotide

SEQ ID NO: 612189 - DNA, 56 bp, Artificial; identical to SEQ ID NO: 478042
  Synthetic oligonucleotide

SEQ ID NO: 612190 - DNA, 58 bp, Artificial; identical to SEQ ID NO: 478043
  Synthetic oligonucleotide

SEQ ID NO: 612191 - DNA, 57 bp, Artificial; identical to SEQ ID NO: 20421
  Synthetic oligonucleotide

SEQ ID NO: 612192 - DNA, 54 bp, Artificial; identical to SEQ ID NO: 478044
  Synthetic oligonucleotide

SEQ ID NO: 612193 - DNA, 57 bp, Artificial; identical to SEQ ID NO: 478045
  Synthetic oligonucleotide

SEQ ID NO: 612194 - DNA, 49 bp, Artificial; identical to SEQ ID NO: 478047
  Synthetic oligonucleotide

SEQ ID NO: 612195 - DNA, 60 bp, Artificial; identical to SEQ ID NO: 478048
  Synthetic oligonucleotide

SEQ ID NO: 612196 - DNA, 60 bp, Artificial; identical to SEQ ID NO: 478049
  Synthetic oligonucleotide

SEQ ID NO: 612197 - DNA, 60 bp, Artificial; identical to SEQ ID NO: 478051
  Synthetic oligonucleotide

SEQ ID NO: 612198 - DNA, 59 bp, Artificial; identical to SEQ ID NO: 478052
  Synthetic oligonucleotide

SEQ ID NO: 612199 - DNA, 60 bp, Artificial; identical to SEQ ID NO: 478057
  Synthetic oligonucleotide

SEQ ID NO: 612200 - DNA, 56 bp, Artificial; identical to SEQ ID NO: 478058
  Synthetic oligonucleotide

SEQ ID NO: 612201 - DNA, 60 bp, Artificial; identical to SEQ ID NO: 478061
  Synthetic oligonucleotide

SEQ ID NO: 612202 - DNA, 60 bp, Artificial; identical to SEQ ID NO: 478063
  Synthetic oligonucleotide

SEQ ID NO: 612203 - DNA, 60 bp, Artificial; identical to SEQ ID NO: 478064
  Synthetic oligonucleotide

SEQ ID NO: 612204 - DNA, 60 bp, Artificial; identical to SEQ ID NO: 478070
  Synthetic oligonucleotide

SEQ ID NO: 612205 - DNA, 60 bp, Artificial; identical to SEQ ID NO: 478071
  Synthetic oligonucleotide

SEQ ID NO: 612206 - DNA, 54 bp, Artificial; identical to SEQ ID NO: 478078
  Synthetic oligonucleotide

SEQ ID NO: 612207 - DNA, 57 bp, Artificial; identical to SEQ ID NO: 478080
  Synthetic oligonucleotide

SEQ ID NO: 612208 - DNA, 55 bp, Artificial; identical to SEQ ID NO: 478081
  Synthetic oligonucleotide

SEQ ID NO: 612209 - DNA, 58 bp, Artificial; identical to SEQ ID NO: 478083
  Synthetic oligonucleotide

SEQ ID NO: 612210 - DNA, 55 bp, Artificial; identical to SEQ ID NO: 478086
  Synthetic oligonucleotide

SEQ ID NO: 612211 - DNA, 57 bp, Artificial; identical to SEQ ID NO: 17740
  Synthetic oligonucleotide

SEQ ID NO: 612212 - DNA, 60 bp, Artificial; identical to SEQ ID NO: 478087
  Synthetic oligonucleotide

SEQ ID NO: 612213 - DNA, 56 bp, Artificial; identical to SEQ ID NO: 478091
  Synthetic oligonucleotide

SEQ ID NO: 612214 - DNA, 60 bp, Artificial; identical to SEQ ID NO: 7865
  Synthetic oligonucleotide

SEQ ID NO: 612215 - DNA, 60 bp, Artificial; identical to SEQ ID NO: 478094
  Synthetic oligonucleotide

SEQ ID NO: 612216 - DNA, 60 bp, Artificial; identical to SEQ ID NO: 478097
  Synthetic oligonucleotide

SEQ ID NO: 612217 - DNA, 58 bp, Artificial; identical to SEQ ID NO: 478099
  Synthetic oligonucleotide

SEQ ID NO: 612218 - DNA, 60 bp, Artificial; identical to SEQ ID NO: 478101
  Synthetic oligonucleotide

SEQ ID NO: 612219 - DNA, 50 bp, Artificial; identical to SEQ ID NO: 478102
  Synthetic oligonucleotide

SEQ ID NO: 612220 - DNA, 53 bp, Artificial; identical to SEQ ID NO: 478103
  Synthetic oligonucleotide

SEQ ID NO: 612221 - DNA, 51 bp, Artificial; identical to SEQ ID NO: 5930
  Synthetic oligonucleotide

SEQ ID NO: 612222 - DNA, 60 bp, Artificial; identical to SEQ ID NO: 478104
  Synthetic oligonucleotide

SEQ ID NO: 612223 - DNA, 59 bp, Artificial; identical to SEQ ID NO: 478105
  Synthetic oligonucleotide

SEQ ID NO: 612224 - DNA, 58 bp, Artificial; identical to SEQ ID NO: 478106
  Synthetic oligonucleotide

SEQ ID NO: 612225 - DNA, 59 bp, Artificial; identical to SEQ ID NO: 478107
  Synthetic oligonucleotide

SEQ ID NO: 612226 - DNA, 60 bp, Artificial; identical to SEQ ID NO: 478108
  Synthetic oligonucleotide

SEQ ID NO: 612227 - DNA, 54 bp, Artificial; identical to SEQ ID NO: 478114
  Synthetic oligonucleotide

SEQ ID NO: 612228 - DNA, 57 bp, Artificial; identical to SEQ ID NO: 478115
  Synthetic oligonucleotide

SEQ ID NO: 612229 - DNA, 58 bp, Artificial; identical to SEQ ID NO: 478116
  Synthetic oligonucleotide

SEQ ID NO: 612230 - DNA, 56 bp, Artificial; identical to SEQ ID NO: 478117
  Synthetic oligonucleotide

SEQ ID NO: 612231 - DNA, 60 bp, Artificial; identical to SEQ ID NO: 478118
  Synthetic oligonucleotide

SEQ ID NO: 612232 - DNA, 60 bp, Artificial; identical to SEQ ID NO: 478120
  Synthetic oligonucleotide

SEQ ID NO: 612233 - DNA, 60 bp, Artificial; identical to SEQ ID NO: 478121
  Synthetic oligonucleotide

SEQ ID NO: 612234 - DNA, 55 bp, Artificial; identical to SEQ ID NO: 478122
  Synthetic oligonucleotide

SEQ ID NO: 612235 - DNA, 51 bp, Artificial; identical to SEQ ID NO: 478123
  Synthetic oligonucleotide

SEQ ID NO: 612236 - DNA, 59 bp, Artificial; identical to SEQ ID NO: 18203
  Synthetic oligonucleotide

SEQ ID NO: 612237 - DNA, 58 bp, Artificial; identical to SEQ ID NO: 478125
  Synthetic oligonucleotide

SEQ ID NO: 612238 - DNA, 54 bp, Artificial; identical to SEQ ID NO: 478127
  Synthetic oligonucleotide

SEQ ID NO: 612239 - DNA, 54 bp, Artificial; identical to SEQ ID NO: 11672
  Synthetic oligonucleotide

SEQ ID NO: 612240 - DNA, 60 bp, Artificial; identical to SEQ ID NO: 478133
  Synthetic oligonucleotide

SEQ ID NO: 612241 - DNA, 59 bp, Artificial; identical to SEQ ID NO: 478134
  Synthetic oligonucleotide

SEQ ID NO: 612242 - DNA, 56 bp, Artificial; identical to SEQ ID NO: 478139
  Synthetic oligonucleotide

SEQ ID NO: 612243 - DNA, 54 bp, Artificial; identical to SEQ ID NO: 478140
  Synthetic oligonucleotide

SEQ ID NO: 612244 - DNA, 60 bp, Artificial; identical to SEQ ID NO: 478142
  Synthetic oligonucleotide

SEQ ID NO: 612245 - DNA, 58 bp, Artificial; identical to SEQ ID NO: 478146
  Synthetic oligonucleotide

SEQ ID NO: 612246 - DNA, 60 bp, Artificial; identical to SEQ ID NO: 6888
  Synthetic oligonucleotide

SEQ ID NO: 612247 - DNA, 60 bp, Artificial; identical to SEQ ID NO: 478147
  Synthetic oligonucleotide

SEQ ID NO: 612248 - DNA, 52 bp, Artificial; identical to SEQ ID NO: 478148
  Synthetic oligonucleotide

SEQ ID NO: 612249 - DNA, 56 bp, Artificial; identical to SEQ ID NO: 478149
  Synthetic oligonucleotide

SEQ ID NO: 612250 - DNA, 60 bp, Artificial; identical to SEQ ID NO: 478150
  Synthetic oligonucleotide

SEQ ID NO: 612251 - DNA, 60 bp, Artificial; identical to SEQ ID NO: 478153
  Synthetic oligonucleotide

SEQ ID NO: 612252 - DNA, 60 bp, Artificial; identical to SEQ ID NO: 478154
  Synthetic oligonucleotide

SEQ ID NO: 612253 - DNA, 50 bp, Artificial; identical to SEQ ID NO: 478156
  Synthetic oligonucleotide

SEQ ID NO: 612254 - DNA, 58 bp, Artificial; identical to SEQ ID NO: 478157
  Synthetic oligonucleotide

SEQ ID NO: 612255 - DNA, 60 bp, Artificial; identical to SEQ ID NO: 478160
  Synthetic oligonucleotide

SEQ ID NO: 612256 - DNA, 60 bp, Artificial; identical to SEQ ID NO: 478161
  Synthetic oligonucleotide

SEQ ID NO: 612257 - DNA, 56 bp, Artificial; identical to SEQ ID NO: 478167
  Synthetic oligonucleotide

SEQ ID NO: 612258 - DNA, 50 bp, Artificial; identical to SEQ ID NO: 478170
  Synthetic oligonucleotide

SEQ ID NO: 612259 - DNA, 55 bp, Artificial; identical to SEQ ID NO: 478171
  Synthetic oligonucleotide

SEQ ID NO: 612260 - DNA, 56 bp, Artificial; identical to SEQ ID NO: 478172
  Synthetic oligonucleotide

SEQ ID NO: 612261 - DNA, 50 bp, Artificial; identical to SEQ ID NO: 478173
  Synthetic oligonucleotide

SEQ ID NO: 612262 - DNA, 56 bp, Artificial; identical to SEQ ID NO: 18867
  Synthetic oligonucleotide

SEQ ID NO: 612263 - DNA, 60 bp, Artificial; identical to SEQ ID NO: 478178
  Synthetic oligonucleotide

SEQ ID NO: 612264 - DNA, 60 bp, Artificial; identical to SEQ ID NO: 478180
  Synthetic oligonucleotide

SEQ ID NO: 612265 - DNA, 60 bp, Artificial; identical to SEQ ID NO: 478183
  Synthetic oligonucleotide

SEQ ID NO: 612266 - DNA, 57 bp, Artificial; identical to SEQ ID NO: 478186
  Synthetic oligonucleotide

SEQ ID NO: 612267 - DNA, 60 bp, Artificial; identical to SEQ ID NO: 478187
  Synthetic oligonucleotide

SEQ ID NO: 612268 - DNA, 56 bp, Artificial; identical to SEQ ID NO: 478189
  Synthetic oligonucleotide

SEQ ID NO: 612269 - DNA, 56 bp, Artificial; identical to SEQ ID NO: 478191
  Synthetic oligonucleotide

SEQ ID NO: 612270 - DNA, 60 bp, Artificial; identical to SEQ ID NO: 478192
  Synthetic oligonucleotide

SEQ ID NO: 612271 - DNA, 51 bp, Artificial; identical to SEQ ID NO: 478194
  Synthetic oligonucleotide

SEQ ID NO: 612272 - DNA, 52 bp, Artificial; identical to SEQ ID NO: 478198
  Synthetic oligonucleotide

SEQ ID NO: 612273 - DNA, 51 bp, Artificial; identical to SEQ ID NO: 478200
  Synthetic oligonucleotide

SEQ ID NO: 612274 - DNA, 60 bp, Artificial; identical to SEQ ID NO: 478203
  Synthetic oligonucleotide

SEQ ID NO: 612275 - DNA, 55 bp, Artificial; identical to SEQ ID NO: 478214
  Synthetic oligonucleotide

SEQ ID NO: 612276 - DNA, 60 bp, Artificial; identical to SEQ ID NO: 478215
  Synthetic oligonucleotide

SEQ ID NO: 612277 - DNA, 55 bp, Artificial; identical to SEQ ID NO: 18882
  Synthetic oligonucleotide

SEQ ID NO: 612278 - DNA, 58 bp, Artificial; identical to SEQ ID NO: 16837
  Synthetic oligonucleotide

SEQ ID NO: 612279 - DNA, 58 bp, Artificial; identical to SEQ ID NO: 478221
  Synthetic oligonucleotide

SEQ ID NO: 612280 - DNA, 60 bp, Artificial; identical to SEQ ID NO: 478223
  Synthetic oligonucleotide

SEQ ID NO: 612281 - DNA, 56 bp, Artificial; identical to SEQ ID NO: 18576
  Synthetic oligonucleotide

SEQ ID NO: 612282 - DNA, 52 bp, Artificial; identical to SEQ ID NO: 478234
  Synthetic oligonucleotide

SEQ ID NO: 612283 - DNA, 60 bp, Artificial; identical to SEQ ID NO: 478235
  Synthetic oligonucleotide

SEQ ID NO: 612284 - DNA, 60 bp, Artificial; identical to SEQ ID NO: 478236
  Synthetic oligonucleotide

SEQ ID NO: 612285 - DNA, 60 bp, Artificial; identical to SEQ ID NO: 478237
  Synthetic oligonucleotide

SEQ ID NO: 612286 - DNA, 60 bp, Artificial; identical to SEQ ID NO: 478239
  Synthetic oligonucleotide

SEQ ID NO: 612287 - DNA, 54 bp, Artificial; identical to SEQ ID NO: 478240
  Synthetic oligonucleotide

SEQ ID NO: 612288 - DNA, 57 bp, Artificial; identical to SEQ ID NO: 478243
  Synthetic oligonucleotide

SEQ ID NO: 612289 - DNA, 60 bp, Artificial; identical to SEQ ID NO: 478245
  Synthetic oligonucleotide

SEQ ID NO: 612290 - DNA, 59 bp, Artificial; identical to SEQ ID NO: 478246
  Synthetic oligonucleotide

SEQ ID NO: 612291 - DNA, 59 bp, Artificial; identical to SEQ ID NO: 478251
  Synthetic oligonucleotide

SEQ ID NO: 612292 - DNA, 58 bp, Artificial; identical to SEQ ID NO: 478253
  Synthetic oligonucleotide

SEQ ID NO: 612293 - DNA, 58 bp, Artificial; identical to SEQ ID NO: 478255
  Synthetic oligonucleotide

SEQ ID NO: 612294 - DNA, 60 bp, Artificial; identical to SEQ ID NO: 478256
  Synthetic oligonucleotide

SEQ ID NO: 612295 - DNA, 57 bp, Artificial; identical to SEQ ID NO: 478258
  Synthetic oligonucleotide

SEQ ID NO: 612296 - DNA, 60 bp, Artificial; identical to SEQ ID NO: 7610
  Synthetic oligonucleotide

SEQ ID NO: 612297 - DNA, 60 bp, Artificial; identical to SEQ ID NO: 13990
  Synthetic oligonucleotide

SEQ ID NO: 612298 - DNA, 55 bp, Artificial; identical to SEQ ID NO: 478260
  Synthetic oligonucleotide

SEQ ID NO: 612299 - DNA, 55 bp, Artificial; identical to SEQ ID NO: 478261
  Synthetic oligonucleotide

SEQ ID NO: 612300 - DNA, 51 bp, Artificial; identical to SEQ ID NO: 478264
  Synthetic oligonucleotide

SEQ ID NO: 612301 - DNA, 60 bp, Artificial; identical to SEQ ID NO: 478269
  Synthetic oligonucleotide

SEQ ID NO: 612302 - DNA, 59 bp, Artificial; identical to SEQ ID NO: 478270
  Synthetic oligonucleotide

SEQ ID NO: 612303 - DNA, 55 bp, Artificial; identical to SEQ ID NO: 478273
  Synthetic oligonucleotide

SEQ ID NO: 612304 - DNA, 59 bp, Artificial; identical to SEQ ID NO: 478278
  Synthetic oligonucleotide

SEQ ID NO: 612305 - DNA, 55 bp, Artificial; identical to SEQ ID NO: 478282
  Synthetic oligonucleotide

SEQ ID NO: 612306 - DNA, 55 bp, Artificial; identical to SEQ ID NO: 478283
  Synthetic oligonucleotide

SEQ ID NO: 612307 - DNA, 60 bp, Artificial; identical to SEQ ID NO: 478289
  Synthetic oligonucleotide

SEQ ID NO: 612308 - DNA, 50 bp, Artificial; identical to SEQ ID NO: 478292
  Synthetic oligonucleotide

SEQ ID NO: 612309 - DNA, 53 bp, Artificial; identical to SEQ ID NO: 478294
  Synthetic oligonucleotide

SEQ ID NO: 612310 - DNA, 60 bp, Artificial; identical to SEQ ID NO: 478298
  Synthetic oligonucleotide

SEQ ID NO: 612311 - DNA, 60 bp, Artificial; identical to SEQ ID NO: 478299
  Synthetic oligonucleotide

SEQ ID NO: 612312 - DNA, 60 bp, Artificial; identical to SEQ ID NO: 478303
  Synthetic oligonucleotide

SEQ ID NO: 612313 - DNA, 60 bp, Artificial; identical to SEQ ID NO: 478316
  Synthetic oligonucleotide

SEQ ID NO: 612314 - DNA, 59 bp, Artificial; identical to SEQ ID NO: 18240
  Synthetic oligonucleotide

SEQ ID NO: 612315 - DNA, 54 bp, Artificial; identical to SEQ ID NO: 478318
  Synthetic oligonucleotide

SEQ ID NO: 612316 - DNA, 53 bp, Artificial; identical to SEQ ID NO: 478319
  Synthetic oligonucleotide

SEQ ID NO: 612317 - DNA, 60 bp, Artificial; identical to SEQ ID NO: 478320
  Synthetic oligonucleotide

SEQ ID NO: 612318 - DNA, 60 bp, Artificial; identical to SEQ ID NO: 478322
  Synthetic oligonucleotide

SEQ ID NO: 612319 - DNA, 60 bp, Artificial; identical to SEQ ID NO: 478323
  Synthetic oligonucleotide

SEQ ID NO: 612320 - DNA, 58 bp, Artificial; identical to SEQ ID NO: 478324
  Synthetic oligonucleotide

SEQ ID NO: 612321 - DNA, 60 bp, Artificial; identical to SEQ ID NO: 478333
  Synthetic oligonucleotide

SEQ ID NO: 612322 - DNA, 55 bp, Artificial; identical to SEQ ID NO: 478334
  Synthetic oligonucleotide

SEQ ID NO: 612323 - DNA, 60 bp, Artificial; identical to SEQ ID NO: 478337
  Synthetic oligonucleotide

SEQ ID NO: 612324 - DNA, 55 bp, Artificial; identical to SEQ ID NO: 478340
  Synthetic oligonucleotide

SEQ ID NO: 612325 - DNA, 60 bp, Artificial; identical to SEQ ID NO: 478341
  Synthetic oligonucleotide

SEQ ID NO: 612326 - DNA, 55 bp, Artificial; identical to SEQ ID NO: 478342
  Synthetic oligonucleotide

SEQ ID NO: 612327 - DNA, 60 bp, Artificial; identical to SEQ ID NO: 478343
  Synthetic oligonucleotide

SEQ ID NO: 612328 - DNA, 60 bp, Artificial; identical to SEQ ID NO: 478347
  Synthetic oligonucleotide

SEQ ID NO: 612329 - DNA, 55 bp, Artificial; identical to SEQ ID NO: 478349
  Synthetic oligonucleotide

SEQ ID NO: 612330 - DNA, 60 bp, Artificial; identical to SEQ ID NO: 478350
  Synthetic oligonucleotide

SEQ ID NO: 612331 - DNA, 60 bp, Artificial; identical to SEQ ID NO: 478356
  Synthetic oligonucleotide

SEQ ID NO: 612332 - DNA, 60 bp, Artificial; identical to SEQ ID NO: 478359
  Synthetic oligonucleotide

SEQ ID NO: 612333 - DNA, 60 bp, Artificial; identical to SEQ ID NO: 478362
  Synthetic oligonucleotide

SEQ ID NO: 612334 - DNA, 56 bp, Artificial; identical to SEQ ID NO: 478368
  Synthetic oligonucleotide

SEQ ID NO: 612335 - DNA, 57 bp, Artificial; identical to SEQ ID NO: 478369
  Synthetic oligonucleotide

SEQ ID NO: 612336 - DNA, 51 bp, Artificial; identical to SEQ ID NO: 478372
  Synthetic oligonucleotide

SEQ ID NO: 612337 - DNA, 60 bp, Artificial; identical to SEQ ID NO: 478373
  Synthetic oligonucleotide

SEQ ID NO: 612338 - DNA, 56 bp, Artificial; identical to SEQ ID NO: 478374
  Synthetic oligonucleotide

SEQ ID NO: 612339 - DNA, 60 bp, Artificial; identical to SEQ ID NO: 478376
  Synthetic oligonucleotide

SEQ ID NO: 612340 - DNA, 54 bp, Artificial; identical to SEQ ID NO: 478381
  Synthetic oligonucleotide

SEQ ID NO: 612341 - DNA, 60 bp, Artificial; identical to SEQ ID NO: 478382
  Synthetic oligonucleotide

SEQ ID NO: 612342 - DNA, 52 bp, Artificial; identical to SEQ ID NO: 478383
  Synthetic oligonucleotide

SEQ ID NO: 612343 - DNA, 60 bp, Artificial; identical to SEQ ID NO: 478387
  Synthetic oligonucleotide

SEQ ID NO: 612344 - DNA, 60 bp, Artificial; identical to SEQ ID NO: 478388
  Synthetic oligonucleotide

SEQ ID NO: 612345 - DNA, 59 bp, Artificial; identical to SEQ ID NO: 478394
  Synthetic oligonucleotide

SEQ ID NO: 612346 - DNA, 56 bp, Artificial; identical to SEQ ID NO: 478398
  Synthetic oligonucleotide

SEQ ID NO: 612347 - DNA, 56 bp, Artificial; identical to SEQ ID NO: 478400
  Synthetic oligonucleotide

SEQ ID NO: 612348 - DNA, 54 bp, Artificial; identical to SEQ ID NO: 478406
  Synthetic oligonucleotide

SEQ ID NO: 612349 - DNA, 60 bp, Artificial; identical to SEQ ID NO: 478410
  Synthetic oligonucleotide

SEQ ID NO: 612350 - DNA, 57 bp, Artificial; identical to SEQ ID NO: 478411
  Synthetic oligonucleotide

SEQ ID NO: 612351 - DNA, 59 bp, Artificial; identical to SEQ ID NO: 478413
  Synthetic oligonucleotide

SEQ ID NO: 612352 - DNA, 57 bp, Artificial; identical to SEQ ID NO: 478414
  Synthetic oligonucleotide

SEQ ID NO: 612353 - DNA, 60 bp, Artificial; identical to SEQ ID NO: 478416
  Synthetic oligonucleotide

SEQ ID NO: 612354 - DNA, 60 bp, Artificial; identical to SEQ ID NO: 478420
  Synthetic oligonucleotide

SEQ ID NO: 612355 - DNA, 55 bp, Artificial; identical to SEQ ID NO: 478421
  Synthetic oligonucleotide

SEQ ID NO: 612356 - DNA, 55 bp, Artificial; identical to SEQ ID NO: 478422
  Synthetic oligonucleotide

SEQ ID NO: 612357 - DNA, 56 bp, Artificial; identical to SEQ ID NO: 478424
  Synthetic oligonucleotide

SEQ ID NO: 612358 - DNA, 51 bp, Artificial; identical to SEQ ID NO: 478429
  Synthetic oligonucleotide

SEQ ID NO: 612359 - DNA, 60 bp, Artificial; identical to SEQ ID NO: 478430
  Synthetic oligonucleotide

SEQ ID NO: 612360 - DNA, 53 bp, Artificial; identical to SEQ ID NO: 6178
  Synthetic oligonucleotide

SEQ ID NO: 612361 - DNA, 60 bp, Artificial; identical to SEQ ID NO: 478434
  Synthetic oligonucleotide

SEQ ID NO: 612362 - DNA, 55 bp, Artificial; identical to SEQ ID NO: 478435
  Synthetic oligonucleotide

SEQ ID NO: 612363 - DNA, 60 bp, Artificial; identical to SEQ ID NO: 478437
  Synthetic oligonucleotide

SEQ ID NO: 612364 - DNA, 59 bp, Artificial; identical to SEQ ID NO: 478439
  Synthetic oligonucleotide

SEQ ID NO: 612365 - DNA, 55 bp, Artificial; identical to SEQ ID NO: 478440
  Synthetic oligonucleotide

SEQ ID NO: 612366 - DNA, 56 bp, Artificial; identical to SEQ ID NO: 478442
  Synthetic oligonucleotide

SEQ ID NO: 612367 - DNA, 54 bp, Artificial; identical to SEQ ID NO: 478443
  Synthetic oligonucleotide

SEQ ID NO: 612368 - DNA, 51 bp, Artificial; identical to SEQ ID NO: 478444
  Synthetic oligonucleotide

SEQ ID NO: 612369 - DNA, 50 bp, Artificial; identical to SEQ ID NO: 478448
  Synthetic oligonucleotide

SEQ ID NO: 612370 - DNA, 52 bp, Artificial; identical to SEQ ID NO: 478450
  Synthetic oligonucleotide

SEQ ID NO: 612371 - DNA, 59 bp, Artificial; identical to SEQ ID NO: 478451
  Synthetic oligonucleotide

SEQ ID NO: 612372 - DNA, 58 bp, Artificial; identical to SEQ ID NO: 478452
  Synthetic oligonucleotide

SEQ ID NO: 612373 - DNA, 55 bp, Artificial; identical to SEQ ID NO: 478454
  Synthetic oligonucleotide

SEQ ID NO: 612374 - DNA, 52 bp, Artificial; identical to SEQ ID NO: 478455
  Synthetic oligonucleotide

SEQ ID NO: 612375 - DNA, 60 bp, Artificial; identical to SEQ ID NO: 478456
  Synthetic oligonucleotide

SEQ ID NO: 612376 - DNA, 58 bp, Artificial; identical to SEQ ID NO: 478458
  Synthetic oligonucleotide

SEQ ID NO: 612377 - DNA, 55 bp, Artificial; identical to SEQ ID NO: 478459
  Synthetic oligonucleotide

SEQ ID NO: 612378 - DNA, 55 bp, Artificial; identical to SEQ ID NO: 478460
  Synthetic oligonucleotide

SEQ ID NO: 612379 - DNA, 50 bp, Artificial; identical to SEQ ID NO: 478466
  Synthetic oligonucleotide

SEQ ID NO: 612380 - DNA, 55 bp, Artificial; identical to SEQ ID NO: 478467
  Synthetic oligonucleotide

SEQ ID NO: 612381 - DNA, 58 bp, Artificial; identical to SEQ ID NO: 478469
  Synthetic oligonucleotide

SEQ ID NO: 612382 - DNA, 52 bp, Artificial; identical to SEQ ID NO: 478472
  Synthetic oligonucleotide

SEQ ID NO: 612383 - DNA, 60 bp, Artificial; identical to SEQ ID NO: 478474
  Synthetic oligonucleotide

SEQ ID NO: 612384 - DNA, 58 bp, Artificial; identical to SEQ ID NO: 478475
  Synthetic oligonucleotide

SEQ ID NO: 612385 - DNA, 55 bp, Artificial; identical to SEQ ID NO: 478478
  Synthetic oligonucleotide

SEQ ID NO: 612386 - DNA, 60 bp, Artificial; identical to SEQ ID NO: 478479
  Synthetic oligonucleotide

SEQ ID NO: 612387 - DNA, 52 bp, Artificial; identical to SEQ ID NO: 478480
  Synthetic oligonucleotide

SEQ ID NO: 612388 - DNA, 54 bp, Artificial; identical to SEQ ID NO: 478481
  Synthetic oligonucleotide

SEQ ID NO: 612389 - DNA, 54 bp, Artificial; identical to SEQ ID NO: 478482
  Synthetic oligonucleotide

SEQ ID NO: 612390 - DNA, 55 bp, Artificial; identical to SEQ ID NO: 478483
  Synthetic oligonucleotide

SEQ ID NO: 612391 - DNA, 60 bp, Artificial; identical to SEQ ID NO: 478484
  Synthetic oligonucleotide

SEQ ID NO: 612392 - DNA, 52 bp, Artificial; identical to SEQ ID NO: 478486
  Synthetic oligonucleotide

SEQ ID NO: 612393 - DNA, 60 bp, Artificial; identical to SEQ ID NO: 478488
  Synthetic oligonucleotide

SEQ ID NO: 612394 - DNA, 59 bp, Artificial; identical to SEQ ID NO: 478491
  Synthetic oligonucleotide

SEQ ID NO: 612395 - DNA, 60 bp, Artificial; identical to SEQ ID NO: 478496
  Synthetic oligonucleotide

SEQ ID NO: 612396 - DNA, 60 bp, Artificial; identical to SEQ ID NO: 478497
  Synthetic oligonucleotide

SEQ ID NO: 612397 - DNA, 60 bp, Artificial; identical to SEQ ID NO: 478498
  Synthetic oligonucleotide

SEQ ID NO: 612398 - DNA, 52 bp, Artificial; identical to SEQ ID NO: 478503
  Synthetic oligonucleotide

SEQ ID NO: 612399 - DNA, 58 bp, Artificial; identical to SEQ ID NO: 16309
  Synthetic oligonucleotide

SEQ ID NO: 612400 - DNA, 52 bp, Artificial; identical to SEQ ID NO: 478504
  Synthetic oligonucleotide

SEQ ID NO: 612401 - DNA, 55 bp, Artificial; identical to SEQ ID NO: 478505
  Synthetic oligonucleotide

SEQ ID NO: 612402 - DNA, 60 bp, Artificial; identical to SEQ ID NO: 478508
  Synthetic oligonucleotide

SEQ ID NO: 612403 - DNA, 55 bp, Artificial; identical to SEQ ID NO: 478510
  Synthetic oligonucleotide

SEQ ID NO: 612404 - DNA, 54 bp, Artificial; identical to SEQ ID NO: 478511
  Synthetic oligonucleotide

SEQ ID NO: 612405 - DNA, 51 bp, Artificial; identical to SEQ ID NO: 478512
  Synthetic oligonucleotide

SEQ ID NO: 612406 - DNA, 60 bp, Artificial; identical to SEQ ID NO: 478513
  Synthetic oligonucleotide

SEQ ID NO: 612407 - DNA, 60 bp, Artificial; identical to SEQ ID NO: 478515
  Synthetic oligonucleotide

SEQ ID NO: 612408 - DNA, 54 bp, Artificial; identical to SEQ ID NO: 478520
  Synthetic oligonucleotide

SEQ ID NO: 612409 - DNA, 59 bp, Artificial; identical to SEQ ID NO: 478522
  Synthetic oligonucleotide

SEQ ID NO: 612410 - DNA, 57 bp, Artificial; identical to SEQ ID NO: 478524
  Synthetic oligonucleotide

SEQ ID NO: 612411 - DNA, 58 bp, Artificial; identical to SEQ ID NO: 478525
  Synthetic oligonucleotide

SEQ ID NO: 612412 - DNA, 53 bp, Artificial; identical to SEQ ID NO: 478527
  Synthetic oligonucleotide

SEQ ID NO: 612413 - DNA, 59 bp, Artificial; identical to SEQ ID NO: 478529
  Synthetic oligonucleotide

SEQ ID NO: 612414 - DNA, 60 bp, Artificial; identical to SEQ ID NO: 478531
  Synthetic oligonucleotide

SEQ ID NO: 612415 - DNA, 58 bp, Artificial; identical to SEQ ID NO: 478532
  Synthetic oligonucleotide

SEQ ID NO: 612416 - DNA, 55 bp, Artificial; identical to SEQ ID NO: 478533
  Synthetic oligonucleotide

SEQ ID NO: 612417 - DNA, 60 bp, Artificial; identical to SEQ ID NO: 478535
  Synthetic oligonucleotide

SEQ ID NO: 612418 - DNA, 52 bp, Artificial; identical to SEQ ID NO: 478536
  Synthetic oligonucleotide

SEQ ID NO: 612419 - DNA, 60 bp, Artificial; identical to SEQ ID NO: 478538
  Synthetic oligonucleotide

SEQ ID NO: 612420 - DNA, 60 bp, Artificial; identical to SEQ ID NO: 478540
  Synthetic oligonucleotide

SEQ ID NO: 612421 - DNA, 60 bp, Artificial; identical to SEQ ID NO: 478541
  Synthetic oligonucleotide

SEQ ID NO: 612422 - DNA, 60 bp, Artificial; identical to SEQ ID NO: 478543
  Synthetic oligonucleotide

SEQ ID NO: 612423 - DNA, 60 bp, Artificial; identical to SEQ ID NO: 478545
  Synthetic oligonucleotide

SEQ ID NO: 612424 - DNA, 55 bp, Artificial; identical to SEQ ID NO: 478548
  Synthetic oligonucleotide

SEQ ID NO: 612425 - DNA, 60 bp, Artificial; identical to SEQ ID NO: 478550
  Synthetic oligonucleotide

SEQ ID NO: 612426 - DNA, 58 bp, Artificial; identical to SEQ ID NO: 478551
  Synthetic oligonucleotide

SEQ ID NO: 612427 - DNA, 59 bp, Artificial; identical to SEQ ID NO: 478552
  Synthetic oligonucleotide

SEQ ID NO: 612428 - DNA, 60 bp, Artificial; identical to SEQ ID NO: 478553
  Synthetic oligonucleotide

SEQ ID NO: 612429 - DNA, 60 bp, Artificial; identical to SEQ ID NO: 478554
  Synthetic oligonucleotide

SEQ ID NO: 612430 - DNA, 55 bp, Artificial; identical to SEQ ID NO: 478555
  Synthetic oligonucleotide

SEQ ID NO: 612431 - DNA, 56 bp, Artificial; identical to SEQ ID NO: 478556
  Synthetic oligonucleotide

SEQ ID NO: 612432 - DNA, 55 bp, Artificial; identical to SEQ ID NO: 478562
  Synthetic oligonucleotide

SEQ ID NO: 612433 - DNA, 59 bp, Artificial; identical to SEQ ID NO: 478566
  Synthetic oligonucleotide

SEQ ID NO: 612434 - DNA, 56 bp, Artificial; identical to SEQ ID NO: 478568
  Synthetic oligonucleotide

SEQ ID NO: 612435 - DNA, 55 bp, Artificial; identical to SEQ ID NO: 478571
  Synthetic oligonucleotide

SEQ ID NO: 612436 - DNA, 56 bp, Artificial; identical to SEQ ID NO: 478572
  Synthetic oligonucleotide

SEQ ID NO: 612437 - DNA, 55 bp, Artificial; identical to SEQ ID NO: 478574
  Synthetic oligonucleotide

SEQ ID NO: 612438 - DNA, 60 bp, Artificial; identical to SEQ ID NO: 478578
  Synthetic oligonucleotide

SEQ ID NO: 612439 - DNA, 60 bp, Artificial; identical to SEQ ID NO: 478591
  Synthetic oligonucleotide

SEQ ID NO: 612440 - DNA, 52 bp, Artificial; identical to SEQ ID NO: 478592
  Synthetic oligonucleotide

SEQ ID NO: 612441 - DNA, 55 bp, Artificial; identical to SEQ ID NO: 478594
  Synthetic oligonucleotide

SEQ ID NO: 612442 - DNA, 54 bp, Artificial; identical to SEQ ID NO: 478599
  Synthetic oligonucleotide

SEQ ID NO: 612443 - DNA, 60 bp, Artificial; identical to SEQ ID NO: 478600
  Synthetic oligonucleotide

SEQ ID NO: 612444 - DNA, 60 bp, Artificial; identical to SEQ ID NO: 8153
  Synthetic oligonucleotide

SEQ ID NO: 612445 - DNA, 60 bp, Artificial; identical to SEQ ID NO: 478603
  Synthetic oligonucleotide

SEQ ID NO: 612446 - DNA, 55 bp, Artificial; identical to SEQ ID NO: 478605
  Synthetic oligonucleotide

SEQ ID NO: 612447 - DNA, 60 bp, Artificial; identical to SEQ ID NO: 9304
  Synthetic oligonucleotide

SEQ ID NO: 612448 - DNA, 54 bp, Artificial; identical to SEQ ID NO: 478606
  Synthetic oligonucleotide

SEQ ID NO: 612449 - DNA, 60 bp, Artificial; identical to SEQ ID NO: 478607
  Synthetic oligonucleotide

SEQ ID NO: 612450 - DNA, 51 bp, Artificial; identical to SEQ ID NO: 478612
  Synthetic oligonucleotide

SEQ ID NO: 612451 - DNA, 58 bp, Artificial; identical to SEQ ID NO: 478615
  Synthetic oligonucleotide

SEQ ID NO: 612452 - DNA, 60 bp, Artificial; identical to SEQ ID NO: 478617
  Synthetic oligonucleotide

SEQ ID NO: 612453 - DNA, 59 bp, Artificial; identical to SEQ ID NO: 478619
  Synthetic oligonucleotide

SEQ ID NO: 612454 - DNA, 55 bp, Artificial; identical to SEQ ID NO: 478622
  Synthetic oligonucleotide

SEQ ID NO: 612455 - DNA, 60 bp, Artificial; identical to SEQ ID NO: 478625
  Synthetic oligonucleotide

SEQ ID NO: 612456 - DNA, 56 bp, Artificial; identical to SEQ ID NO: 478627
  Synthetic oligonucleotide

SEQ ID NO: 612457 - DNA, 60 bp, Artificial; identical to SEQ ID NO: 478628
  Synthetic oligonucleotide

SEQ ID NO: 612458 - DNA, 60 bp, Artificial; identical to SEQ ID NO: 10314
  Synthetic oligonucleotide

SEQ ID NO: 612459 - DNA, 58 bp, Artificial; identical to SEQ ID NO: 478638
  Synthetic oligonucleotide

SEQ ID NO: 612460 - DNA, 55 bp, Artificial; identical to SEQ ID NO: 478640
  Synthetic oligonucleotide

SEQ ID NO: 612461 - DNA, 60 bp, Artificial; identical to SEQ ID NO: 478641
  Synthetic oligonucleotide

SEQ ID NO: 612462 - DNA, 55 bp, Artificial; identical to SEQ ID NO: 478642
  Synthetic oligonucleotide

SEQ ID NO: 612463 - DNA, 58 bp, Artificial; identical to SEQ ID NO: 478643
  Synthetic oligonucleotide

SEQ ID NO: 612464 - DNA, 60 bp, Artificial; identical to SEQ ID NO: 478646
  Synthetic oligonucleotide

SEQ ID NO: 612465 - DNA, 55 bp, Artificial; identical to SEQ ID NO: 478647
  Synthetic oligonucleotide

SEQ ID NO: 612466 - DNA, 59 bp, Artificial; identical to SEQ ID NO: 478650
  Synthetic oligonucleotide

SEQ ID NO: 612467 - DNA, 60 bp, Artificial; identical to SEQ ID NO: 478654
  Synthetic oligonucleotide

SEQ ID NO: 612468 - DNA, 53 bp, Artificial; identical to SEQ ID NO: 478655
  Synthetic oligonucleotide

SEQ ID NO: 612469 - DNA, 55 bp, Artificial; identical to SEQ ID NO: 478656
  Synthetic oligonucleotide

SEQ ID NO: 612470 - DNA, 56 bp, Artificial; identical to SEQ ID NO: 478657
  Synthetic oligonucleotide

SEQ ID NO: 612471 - DNA, 54 bp, Artificial; identical to SEQ ID NO: 478661
  Synthetic oligonucleotide

SEQ ID NO: 612472 - DNA, 58 bp, Artificial; identical to SEQ ID NO: 19535
  Synthetic oligonucleotide

SEQ ID NO: 612473 - DNA, 60 bp, Artificial; identical to SEQ ID NO: 478666
  Synthetic oligonucleotide

SEQ ID NO: 612474 - DNA, 59 bp, Artificial; identical to SEQ ID NO: 478667
  Synthetic oligonucleotide

SEQ ID NO: 612475 - DNA, 50 bp, Artificial; identical to SEQ ID NO: 478671
  Synthetic oligonucleotide

SEQ ID NO: 612476 - DNA, 60 bp, Artificial; identical to SEQ ID NO: 478674
  Synthetic oligonucleotide

SEQ ID NO: 612477 - DNA, 56 bp, Artificial; identical to SEQ ID NO: 478676
  Synthetic oligonucleotide

SEQ ID NO: 612478 - DNA, 60 bp, Artificial; identical to SEQ ID NO: 478681
  Synthetic oligonucleotide

SEQ ID NO: 612479 - DNA, 58 bp, Artificial; identical to SEQ ID NO: 478682
  Synthetic oligonucleotide

SEQ ID NO: 612480 - DNA, 55 bp, Artificial; identical to SEQ ID NO: 478683
  Synthetic oligonucleotide

SEQ ID NO: 612481 - DNA, 54 bp, Artificial; identical to SEQ ID NO: 478684
  Synthetic oligonucleotide

SEQ ID NO: 612482 - DNA, 55 bp, Artificial; identical to SEQ ID NO: 478685
  Synthetic oligonucleotide

SEQ ID NO: 612483 - DNA, 60 bp, Artificial; identical to SEQ ID NO: 478686
  Synthetic oligonucleotide

SEQ ID NO: 612484 - DNA, 53 bp, Artificial; identical to SEQ ID NO: 478687
  Synthetic oligonucleotide

SEQ ID NO: 612485 - DNA, 54 bp, Artificial; identical to SEQ ID NO: 478688
  Synthetic oligonucleotide

SEQ ID NO: 612486 - DNA, 59 bp, Artificial; identical to SEQ ID NO: 478690
  Synthetic oligonucleotide

SEQ ID NO: 612487 - DNA, 58 bp, Artificial; identical to SEQ ID NO: 478691
  Synthetic oligonucleotide

SEQ ID NO: 612488 - DNA, 59 bp, Artificial; identical to SEQ ID NO: 478694
  Synthetic oligonucleotide

SEQ ID NO: 612489 - DNA, 60 bp, Artificial; identical to SEQ ID NO: 7261
  Synthetic oligonucleotide

SEQ ID NO: 612490 - DNA, 60 bp, Artificial; identical to SEQ ID NO: 118136
  Synthetic oligonucleotide

SEQ ID NO: 612491 - DNA, 60 bp, Artificial; identical to SEQ ID NO: 478697
  Synthetic oligonucleotide

SEQ ID NO: 612492 - DNA, 55 bp, Artificial; identical to SEQ ID NO: 478699
  Synthetic oligonucleotide

SEQ ID NO: 612493 - DNA, 55 bp, Artificial; identical to SEQ ID NO: 478705
  Synthetic oligonucleotide

SEQ ID NO: 612494 - DNA, 59 bp, Artificial; identical to SEQ ID NO: 478706
  Synthetic oligonucleotide

SEQ ID NO: 612495 - DNA, 60 bp, Artificial; identical to SEQ ID NO: 478707
  Synthetic oligonucleotide

SEQ ID NO: 612496 - DNA, 57 bp, Artificial; identical to SEQ ID NO: 478708
  Synthetic oligonucleotide

SEQ ID NO: 612497 - DNA, 55 bp, Artificial; identical to SEQ ID NO: 478711
  Synthetic oligonucleotide

SEQ ID NO: 612498 - DNA, 59 bp, Artificial; identical to SEQ ID NO: 478712
  Synthetic oligonucleotide

SEQ ID NO: 612499 - DNA, 55 bp, Artificial; identical to SEQ ID NO: 478721
  Synthetic oligonucleotide

SEQ ID NO: 612500 - DNA, 52 bp, Artificial; identical to SEQ ID NO: 478722
  Synthetic oligonucleotide

SEQ ID NO: 612501 - DNA, 58 bp, Artificial; identical to SEQ ID NO: 478725
  Synthetic oligonucleotide

SEQ ID NO: 612502 - DNA, 60 bp, Artificial; identical to SEQ ID NO: 478728
  Synthetic oligonucleotide

SEQ ID NO: 612503 - DNA, 60 bp, Artificial; identical to SEQ ID NO: 478730
  Synthetic oligonucleotide

SEQ ID NO: 612504 - DNA, 50 bp, Artificial; identical to SEQ ID NO: 478732
  Synthetic oligonucleotide

SEQ ID NO: 612505 - DNA, 60 bp, Artificial; identical to SEQ ID NO: 478734
  Synthetic oligonucleotide

SEQ ID NO: 612506 - DNA, 51 bp, Artificial; identical to SEQ ID NO: 478740
  Synthetic oligonucleotide

SEQ ID NO: 612507 - DNA, 51 bp, Artificial; identical to SEQ ID NO: 478742
  Synthetic oligonucleotide

SEQ ID NO: 612508 - DNA, 55 bp, Artificial; identical to SEQ ID NO: 478743
  Synthetic oligonucleotide

SEQ ID NO: 612509 - DNA, 55 bp, Artificial; identical to SEQ ID NO: 478745
  Synthetic oligonucleotide

SEQ ID NO: 612510 - DNA, 60 bp, Artificial; identical to SEQ ID NO: 478752
  Synthetic oligonucleotide

SEQ ID NO: 612511 - DNA, 60 bp, Artificial; identical to SEQ ID NO: 478756
  Synthetic oligonucleotide

SEQ ID NO: 612512 - DNA, 59 bp, Artificial; identical to SEQ ID NO: 478757
  Synthetic oligonucleotide

SEQ ID NO: 612513 - DNA, 60 bp, Artificial; identical to SEQ ID NO: 478760
  Synthetic oligonucleotide

SEQ ID NO: 612514 - DNA, 60 bp, Artificial; identical to SEQ ID NO: 478761
  Synthetic oligonucleotide

SEQ ID NO: 612515 - DNA, 55 bp, Artificial; identical to SEQ ID NO: 478763
  Synthetic oligonucleotide

SEQ ID NO: 612516 - DNA, 55 bp, Artificial; identical to SEQ ID NO: 478770
  Synthetic oligonucleotide

SEQ ID NO: 612517 - DNA, 60 bp, Artificial; identical to SEQ ID NO: 9868
  Synthetic oligonucleotide

SEQ ID NO: 612518 - DNA, 58 bp, Artificial; identical to SEQ ID NO: 478773
  Synthetic oligonucleotide

SEQ ID NO: 612519 - DNA, 55 bp, Artificial; identical to SEQ ID NO: 478774
  Synthetic oligonucleotide

SEQ ID NO: 612520 - DNA, 60 bp, Artificial; identical to SEQ ID NO: 478778
  Synthetic oligonucleotide

SEQ ID NO: 612521 - DNA, 57 bp, Artificial; identical to SEQ ID NO: 478780
  Synthetic oligonucleotide

SEQ ID NO: 612522 - DNA, 60 bp, Artificial; identical to SEQ ID NO: 478782
  Synthetic oligonucleotide

SEQ ID NO: 612523 - DNA, 59 bp, Artificial; identical to SEQ ID NO: 478783
  Synthetic oligonucleotide

SEQ ID NO: 612524 - DNA, 51 bp, Artificial; identical to SEQ ID NO: 478784
  Synthetic oligonucleotide

SEQ ID NO: 612525 - DNA, 58 bp, Artificial; identical to SEQ ID NO: 478785
  Synthetic oligonucleotide

SEQ ID NO: 612526 - DNA, 60 bp, Artificial; identical to SEQ ID NO: 478788
  Synthetic oligonucleotide

SEQ ID NO: 612527 - DNA, 60 bp, Artificial; identical to SEQ ID NO: 12987
  Synthetic oligonucleotide

SEQ ID NO: 612528 - DNA, 60 bp, Artificial; identical to SEQ ID NO: 14350
  Synthetic oligonucleotide

SEQ ID NO: 612529 - DNA, 57 bp, Artificial; identical to SEQ ID NO: 478797
  Synthetic oligonucleotide

SEQ ID NO: 612530 - DNA, 55 bp, Artificial; identical to SEQ ID NO: 478798
  Synthetic oligonucleotide

SEQ ID NO: 612531 - DNA, 55 bp, Artificial; identical to SEQ ID NO: 478799
  Synthetic oligonucleotide

SEQ ID NO: 612532 - DNA, 60 bp, Artificial; identical to SEQ ID NO: 478801
  Synthetic oligonucleotide

SEQ ID NO: 612533 - DNA, 56 bp, Artificial; identical to SEQ ID NO: 478803
  Synthetic oligonucleotide

SEQ ID NO: 612534 - DNA, 60 bp, Artificial; identical to SEQ ID NO: 478805
  Synthetic oligonucleotide

SEQ ID NO: 612535 - DNA, 60 bp, Artificial; identical to SEQ ID NO: 478806
  Synthetic oligonucleotide

SEQ ID NO: 612536 - DNA, 60 bp, Artificial; identical to SEQ ID NO: 478807
  Synthetic oligonucleotide

SEQ ID NO: 612537 - DNA, 54 bp, Artificial; identical to SEQ ID NO: 478808
  Synthetic oligonucleotide

SEQ ID NO: 612538 - DNA, 59 bp, Artificial; identical to SEQ ID NO: 478809
  Synthetic oligonucleotide

SEQ ID NO: 612539 - DNA, 55 bp, Artificial; identical to SEQ ID NO: 478815
  Synthetic oligonucleotide

SEQ ID NO: 612540 - DNA, 59 bp, Artificial; identical to SEQ ID NO: 478816
  Synthetic oligonucleotide

SEQ ID NO: 612541 - DNA, 59 bp, Artificial; identical to SEQ ID NO: 478817
  Synthetic oligonucleotide

SEQ ID NO: 612542 - DNA, 55 bp, Artificial; identical to SEQ ID NO: 478818
  Synthetic oligonucleotide

SEQ ID NO: 612543 - DNA, 60 bp, Artificial; identical to SEQ ID NO: 478820
  Synthetic oligonucleotide

SEQ ID NO: 612544 - DNA, 60 bp, Artificial; identical to SEQ ID NO: 478821
  Synthetic oligonucleotide

SEQ ID NO: 612545 - DNA, 60 bp, Artificial; identical to SEQ ID NO: 478822
  Synthetic oligonucleotide

SEQ ID NO: 612546 - DNA, 55 bp, Artificial; identical to SEQ ID NO: 478823
  Synthetic oligonucleotide

SEQ ID NO: 612547 - DNA, 60 bp, Artificial; identical to SEQ ID NO: 478824
  Synthetic oligonucleotide

SEQ ID NO: 612548 - DNA, 59 bp, Artificial; identical to SEQ ID NO: 478825
  Synthetic oligonucleotide

SEQ ID NO: 612549 - DNA, 60 bp, Artificial; identical to SEQ ID NO: 6590
  Synthetic oligonucleotide

SEQ ID NO: 612550 - DNA, 60 bp, Artificial; identical to SEQ ID NO: 478830
  Synthetic oligonucleotide

SEQ ID NO: 612551 - DNA, 50 bp, Artificial; identical to SEQ ID NO: 478831
  Synthetic oligonucleotide

SEQ ID NO: 612552 - DNA, 52 bp, Artificial; identical to SEQ ID NO: 478833
  Synthetic oligonucleotide

SEQ ID NO: 612553 - DNA, 53 bp, Artificial; identical to SEQ ID NO: 478834
  Synthetic oligonucleotide

SEQ ID NO: 612554 - DNA, 60 bp, Artificial; identical to SEQ ID NO: 478839
  Synthetic oligonucleotide

SEQ ID NO: 612555 - DNA, 58 bp, Artificial; identical to SEQ ID NO: 478842
  Synthetic oligonucleotide

SEQ ID NO: 612556 - DNA, 60 bp, Artificial; identical to SEQ ID NO: 478843
  Synthetic oligonucleotide

SEQ ID NO: 612557 - DNA, 55 bp, Artificial; identical to SEQ ID NO: 13845
  Synthetic oligonucleotide

SEQ ID NO: 612558 - DNA, 53 bp, Artificial; identical to SEQ ID NO: 478847
  Synthetic oligonucleotide

SEQ ID NO: 612559 - DNA, 56 bp, Artificial; identical to SEQ ID NO: 478848
  Synthetic oligonucleotide

SEQ ID NO: 612560 - DNA, 57 bp, Artificial; identical to SEQ ID NO: 478851
  Synthetic oligonucleotide

SEQ ID NO: 612561 - DNA, 60 bp, Artificial; identical to SEQ ID NO: 478853
  Synthetic oligonucleotide

SEQ ID NO: 612562 - DNA, 60 bp, Artificial; identical to SEQ ID NO: 12433
  Synthetic oligonucleotide

SEQ ID NO: 612563 - DNA, 55 bp, Artificial; identical to SEQ ID NO: 478857
  Synthetic oligonucleotide

SEQ ID NO: 612564 - DNA, 60 bp, Artificial; identical to SEQ ID NO: 478860
  Synthetic oligonucleotide

SEQ ID NO: 612565 - DNA, 55 bp, Artificial; identical to SEQ ID NO: 6224
  Synthetic oligonucleotide

SEQ ID NO: 612566 - DNA, 59 bp, Artificial; identical to SEQ ID NO: 478861
  Synthetic oligonucleotide

SEQ ID NO: 612567 - DNA, 58 bp, Artificial; identical to SEQ ID NO: 478863
  Synthetic oligonucleotide

SEQ ID NO: 612568 - DNA, 51 bp, Artificial; identical to SEQ ID NO: 478864
  Synthetic oligonucleotide

SEQ ID NO: 612569 - DNA, 54 bp, Artificial; identical to SEQ ID NO: 478872
  Synthetic oligonucleotide

SEQ ID NO: 612570 - DNA, 59 bp, Artificial; identical to SEQ ID NO: 478875
  Synthetic oligonucleotide

SEQ ID NO: 612571 - DNA, 60 bp, Artificial; identical to SEQ ID NO: 478877
  Synthetic oligonucleotide

SEQ ID NO: 612572 - DNA, 55 bp, Artificial; identical to SEQ ID NO: 478878
  Synthetic oligonucleotide

SEQ ID NO: 612573 - DNA, 53 bp, Artificial; identical to SEQ ID NO: 478879
  Synthetic oligonucleotide

SEQ ID NO: 612574 - DNA, 53 bp, Artificial; identical to SEQ ID NO: 478881
  Synthetic oligonucleotide

SEQ ID NO: 612575 - DNA, 60 bp, Artificial; identical to SEQ ID NO: 478882
  Synthetic oligonucleotide

SEQ ID NO: 612576 - DNA, 55 bp, Artificial; identical to SEQ ID NO: 478884
  Synthetic oligonucleotide

SEQ ID NO: 612577 - DNA, 60 bp, Artificial; identical to SEQ ID NO: 478885
  Synthetic oligonucleotide

SEQ ID NO: 612578 - DNA, 52 bp, Artificial; identical to SEQ ID NO: 478886
  Synthetic oligonucleotide

SEQ ID NO: 612579 - DNA, 59 bp, Artificial; identical to SEQ ID NO: 478887
  Synthetic oligonucleotide

SEQ ID NO: 612580 - DNA, 55 bp, Artificial; identical to SEQ ID NO: 478888
  Synthetic oligonucleotide

SEQ ID NO: 612581 - DNA, 60 bp, Artificial; identical to SEQ ID NO: 478891
  Synthetic oligonucleotide

SEQ ID NO: 612582 - DNA, 60 bp, Artificial; identical to SEQ ID NO: 12192
  Synthetic oligonucleotide

SEQ ID NO: 612583 - DNA, 60 bp, Artificial; identical to SEQ ID NO: 478892
  Synthetic oligonucleotide

SEQ ID NO: 612584 - DNA, 60 bp, Artificial; identical to SEQ ID NO: 478895
  Synthetic oligonucleotide

SEQ ID NO: 612585 - DNA, 56 bp, Artificial; identical to SEQ ID NO: 478896
  Synthetic oligonucleotide

SEQ ID NO: 612586 - DNA, 57 bp, Artificial; identical to SEQ ID NO: 478898
  Synthetic oligonucleotide

SEQ ID NO: 612587 - DNA, 60 bp, Artificial; identical to SEQ ID NO: 478900
  Synthetic oligonucleotide

SEQ ID NO: 612588 - DNA, 55 bp, Artificial; identical to SEQ ID NO: 478902
  Synthetic oligonucleotide

SEQ ID NO: 612589 - DNA, 55 bp, Artificial; identical to SEQ ID NO: 478905
  Synthetic oligonucleotide

SEQ ID NO: 612590 - DNA, 55 bp, Artificial; identical to SEQ ID NO: 478907
  Synthetic oligonucleotide

SEQ ID NO: 612591 - DNA, 53 bp, Artificial; identical to SEQ ID NO: 478911
  Synthetic oligonucleotide

SEQ ID NO: 612592 - DNA, 60 bp, Artificial; identical to SEQ ID NO: 478912
  Synthetic oligonucleotide

SEQ ID NO: 612593 - DNA, 52 bp, Artificial; identical to SEQ ID NO: 478913
  Synthetic oligonucleotide

SEQ ID NO: 612594 - DNA, 54 bp, Artificial; identical to SEQ ID NO: 6143
  Synthetic oligonucleotide

SEQ ID NO: 612595 - DNA, 60 bp, Artificial; identical to SEQ ID NO: 478914
  Synthetic oligonucleotide

SEQ ID NO: 612596 - DNA, 60 bp, Artificial; identical to SEQ ID NO: 478916
  Synthetic oligonucleotide

SEQ ID NO: 612597 - DNA, 50 bp, Artificial; identical to SEQ ID NO: 478917
  Synthetic oligonucleotide

SEQ ID NO: 612598 - DNA, 54 bp, Artificial; identical to SEQ ID NO: 478919
  Synthetic oligonucleotide

SEQ ID NO: 612599 - DNA, 57 bp, Artificial; identical to SEQ ID NO: 478920
  Synthetic oligonucleotide

SEQ ID NO: 612600 - DNA, 60 bp, Artificial; identical to SEQ ID NO: 478927
  Synthetic oligonucleotide

SEQ ID NO: 612601 - DNA, 57 bp, Artificial; identical to SEQ ID NO: 478929
  Synthetic oligonucleotide

SEQ ID NO: 612602 - DNA, 59 bp, Artificial; identical to SEQ ID NO: 478930
  Synthetic oligonucleotide

SEQ ID NO: 612603 - DNA, 55 bp, Artificial; identical to SEQ ID NO: 478931
  Synthetic oligonucleotide

SEQ ID NO: 612604 - DNA, 55 bp, Artificial; identical to SEQ ID NO: 478932
  Synthetic oligonucleotide

SEQ ID NO: 612605 - DNA, 58 bp, Artificial; identical to SEQ ID NO: 478934
  Synthetic oligonucleotide

SEQ ID NO: 612606 - DNA, 60 bp, Artificial; identical to SEQ ID NO: 478935
  Synthetic oligonucleotide

SEQ ID NO: 612607 - DNA, 56 bp, Artificial; identical to SEQ ID NO: 478937
  Synthetic oligonucleotide

SEQ ID NO: 612608 - DNA, 53 bp, Artificial; identical to SEQ ID NO: 478939
  Synthetic oligonucleotide

SEQ ID NO: 612609 - DNA, 55 bp, Artificial; identical to SEQ ID NO: 478942
  Synthetic oligonucleotide

SEQ ID NO: 612610 - DNA, 51 bp, Artificial; identical to SEQ ID NO: 478943
  Synthetic oligonucleotide

SEQ ID NO: 612611 - DNA, 58 bp, Artificial; identical to SEQ ID NO: 478944
  Synthetic oligonucleotide

SEQ ID NO: 612612 - DNA, 60 bp, Artificial; identical to SEQ ID NO: 478947
  Synthetic oligonucleotide

SEQ ID NO: 612613 - DNA, 54 bp, Artificial; identical to SEQ ID NO: 478950
  Synthetic oligonucleotide

SEQ ID NO: 612614 - DNA, 53 bp, Artificial; identical to SEQ ID NO: 478952
  Synthetic oligonucleotide

SEQ ID NO: 612615 - DNA, 58 bp, Artificial; identical to SEQ ID NO: 478954
  Synthetic oligonucleotide

SEQ ID NO: 612616 - DNA, 60 bp, Artificial; identical to SEQ ID NO: 478955
  Synthetic oligonucleotide

SEQ ID NO: 612617 - DNA, 60 bp, Artificial; identical to SEQ ID NO: 478958
  Synthetic oligonucleotide

SEQ ID NO: 612618 - DNA, 60 bp, Artificial; identical to SEQ ID NO: 478959
  Synthetic oligonucleotide

SEQ ID NO: 612619 - DNA, 57 bp, Artificial; identical to SEQ ID NO: 478961
  Synthetic oligonucleotide

SEQ ID NO: 612620 - DNA, 50 bp, Artificial; identical to SEQ ID NO: 478962
  Synthetic oligonucleotide

SEQ ID NO: 612621 - DNA, 58 bp, Artificial; identical to SEQ ID NO: 478965
  Synthetic oligonucleotide

SEQ ID NO: 612622 - DNA, 60 bp, Artificial; identical to SEQ ID NO: 478967
  Synthetic oligonucleotide

SEQ ID NO: 612623 - DNA, 54 bp, Artificial; identical to SEQ ID NO: 478968
  Synthetic oligonucleotide

SEQ ID NO: 612624 - DNA, 60 bp, Artificial; identical to SEQ ID NO: 478970
  Synthetic oligonucleotide

SEQ ID NO: 612625 - DNA, 60 bp, Artificial; identical to SEQ ID NO: 478971
  Synthetic oligonucleotide

SEQ ID NO: 612626 - DNA, 55 bp, Artificial; identical to SEQ ID NO: 478972
  Synthetic oligonucleotide

SEQ ID NO: 612627 - DNA, 60 bp, Artificial; identical to SEQ ID NO: 9283
  Synthetic oligonucleotide

SEQ ID NO: 612628 - DNA, 60 bp, Artificial; identical to SEQ ID NO: 478973
  Synthetic oligonucleotide

SEQ ID NO: 612629 - DNA, 60 bp, Artificial; identical to SEQ ID NO: 478975
  Synthetic oligonucleotide

SEQ ID NO: 612630 - DNA, 60 bp, Artificial; identical to SEQ ID NO: 478978
  Synthetic oligonucleotide

SEQ ID NO: 612631 - DNA, 60 bp, Artificial; identical to SEQ ID NO: 478979
  Synthetic oligonucleotide

SEQ ID NO: 612632 - DNA, 55 bp, Artificial; identical to SEQ ID NO: 478982
  Synthetic oligonucleotide

SEQ ID NO: 612633 - DNA, 60 bp, Artificial; identical to SEQ ID NO: 478984
  Synthetic oligonucleotide

SEQ ID NO: 612634 - DNA, 60 bp, Artificial; identical to SEQ ID NO: 478986
  Synthetic oligonucleotide

SEQ ID NO: 612635 - DNA, 56 bp, Artificial; identical to SEQ ID NO: 478987
  Synthetic oligonucleotide

SEQ ID NO: 612636 - DNA, 60 bp, Artificial; identical to SEQ ID NO: 478988
  Synthetic oligonucleotide

SEQ ID NO: 612637 - DNA, 59 bp, Artificial; identical to SEQ ID NO: 478989
  Synthetic oligonucleotide

SEQ ID NO: 612638 - DNA, 55 bp, Artificial; identical to SEQ ID NO: 478991
  Synthetic oligonucleotide

SEQ ID NO: 612639 - DNA, 57 bp, Artificial; identical to SEQ ID NO: 478994
  Synthetic oligonucleotide

SEQ ID NO: 612640 - DNA, 60 bp, Artificial; identical to SEQ ID NO: 478995
  Synthetic oligonucleotide

SEQ ID NO: 612641 - DNA, 60 bp, Artificial; identical to SEQ ID NO: 478996
  Synthetic oligonucleotide

SEQ ID NO: 612642 - DNA, 60 bp, Artificial; identical to SEQ ID NO: 479000
  Synthetic oligonucleotide

SEQ ID NO: 612643 - DNA, 55 bp, Artificial; identical to SEQ ID NO: 479001
  Synthetic oligonucleotide

SEQ ID NO: 612644 - DNA, 60 bp, Artificial; identical to SEQ ID NO: 479003
  Synthetic oligonucleotide

SEQ ID NO: 612645 - DNA, 51 bp, Artificial; identical to SEQ ID NO: 479004
  Synthetic oligonucleotide

SEQ ID NO: 612646 - DNA, 60 bp, Artificial; identical to SEQ ID NO: 479005
  Synthetic oligonucleotide

SEQ ID NO: 612647 - DNA, 60 bp, Artificial; identical to SEQ ID NO: 9320
  Synthetic oligonucleotide

SEQ ID NO: 612648 - DNA, 60 bp, Artificial; identical to SEQ ID NO: 479010
  Synthetic oligonucleotide

SEQ ID NO: 612649 - DNA, 60 bp, Artificial; identical to SEQ ID NO: 7086
  Synthetic oligonucleotide

SEQ ID NO: 612650 - DNA, 58 bp, Artificial; identical to SEQ ID NO: 479013
  Synthetic oligonucleotide

SEQ ID NO: 612651 - DNA, 60 bp, Artificial; identical to SEQ ID NO: 479014
  Synthetic oligonucleotide

SEQ ID NO: 612652 - DNA, 57 bp, Artificial; identical to SEQ ID NO: 479015
  Synthetic oligonucleotide

SEQ ID NO: 612653 - DNA, 52 bp, Artificial; identical to SEQ ID NO: 479016
  Synthetic oligonucleotide

SEQ ID NO: 612654 - DNA, 60 bp, Artificial; identical to SEQ ID NO: 479017
  Synthetic oligonucleotide

SEQ ID NO: 612655 - DNA, 60 bp, Artificial; identical to SEQ ID NO: 479022
  Synthetic oligonucleotide

SEQ ID NO: 612656 - DNA, 55 bp, Artificial; identical to SEQ ID NO: 479023
  Synthetic oligonucleotide

SEQ ID NO: 612657 - DNA, 55 bp, Artificial; identical to SEQ ID NO: 479025
  Synthetic oligonucleotide

SEQ ID NO: 612658 - DNA, 55 bp, Artificial; identical to SEQ ID NO: 479027
  Synthetic oligonucleotide

SEQ ID NO: 612659 - DNA, 60 bp, Artificial; identical to SEQ ID NO: 479029
  Synthetic oligonucleotide

SEQ ID NO: 612660 - DNA, 50 bp, Artificial; identical to SEQ ID NO: 479036
  Synthetic oligonucleotide

SEQ ID NO: 612661 - DNA, 55 bp, Artificial; identical to SEQ ID NO: 479038
  Synthetic oligonucleotide

SEQ ID NO: 612662 - DNA, 55 bp, Artificial; identical to SEQ ID NO: 479040
  Synthetic oligonucleotide

SEQ ID NO: 612663 - DNA, 60 bp, Artificial; identical to SEQ ID NO: 479043
  Synthetic oligonucleotide

SEQ ID NO: 612664 - DNA, 60 bp, Artificial; identical to SEQ ID NO: 479044
  Synthetic oligonucleotide

SEQ ID NO: 612665 - DNA, 52 bp, Artificial; identical to SEQ ID NO: 479045
  Synthetic oligonucleotide

SEQ ID NO: 612666 - DNA, 59 bp, Artificial; identical to SEQ ID NO: 479051
  Synthetic oligonucleotide

SEQ ID NO: 612667 - DNA, 60 bp, Artificial; identical to SEQ ID NO: 479052
  Synthetic oligonucleotide

SEQ ID NO: 612668 - DNA, 60 bp, Artificial; identical to SEQ ID NO: 479055
  Synthetic oligonucleotide

SEQ ID NO: 612669 - DNA, 60 bp, Artificial; identical to SEQ ID NO: 479059
  Synthetic oligonucleotide

SEQ ID NO: 612670 - DNA, 60 bp, Artificial; identical to SEQ ID NO: 479060
  Synthetic oligonucleotide

SEQ ID NO: 612671 - DNA, 57 bp, Artificial; identical to SEQ ID NO: 479062
  Synthetic oligonucleotide

SEQ ID NO: 612672 - DNA, 54 bp, Artificial; identical to SEQ ID NO: 479070
  Synthetic oligonucleotide

SEQ ID NO: 612673 - DNA, 56 bp, Artificial; identical to SEQ ID NO: 479078
  Synthetic oligonucleotide

SEQ ID NO: 612674 - DNA, 50 bp, Artificial; identical to SEQ ID NO: 479080
  Synthetic oligonucleotide

SEQ ID NO: 612675 - DNA, 55 bp, Artificial; identical to SEQ ID NO: 479081
  Synthetic oligonucleotide

SEQ ID NO: 612676 - DNA, 60 bp, Artificial; identical to SEQ ID NO: 479082
  Synthetic oligonucleotide

SEQ ID NO: 612677 - DNA, 53 bp, Artificial; identical to SEQ ID NO: 479083
  Synthetic oligonucleotide

SEQ ID NO: 612678 - DNA, 59 bp, Artificial; identical to SEQ ID NO: 15986
  Synthetic oligonucleotide

SEQ ID NO: 612679 - DNA, 57 bp, Artificial; identical to SEQ ID NO: 479084
  Synthetic oligonucleotide

SEQ ID NO: 612680 - DNA, 55 bp, Artificial; identical to SEQ ID NO: 479086
  Synthetic oligonucleotide

SEQ ID NO: 612681 - DNA, 57 bp, Artificial; identical to SEQ ID NO: 479088
  Synthetic oligonucleotide

SEQ ID NO: 612682 - DNA, 60 bp, Artificial; identical to SEQ ID NO: 479089
  Synthetic oligonucleotide

SEQ ID NO: 612683 - DNA, 57 bp, Artificial; identical to SEQ ID NO: 479090
  Synthetic oligonucleotide

SEQ ID NO: 612684 - DNA, 60 bp, Artificial; identical to SEQ ID NO: 479098
  Synthetic oligonucleotide

SEQ ID NO: 612685 - DNA, 60 bp, Artificial; identical to SEQ ID NO: 479100
  Synthetic oligonucleotide

SEQ ID NO: 612686 - DNA, 51 bp, Artificial; identical to SEQ ID NO: 479103
  Synthetic oligonucleotide

SEQ ID NO: 612687 - DNA, 59 bp, Artificial; identical to SEQ ID NO: 479104
  Synthetic oligonucleotide

SEQ ID NO: 612688 - DNA, 60 bp, Artificial; identical to SEQ ID NO: 479108
  Synthetic oligonucleotide

SEQ ID NO: 612689 - DNA, 60 bp, Artificial; identical to SEQ ID NO: 11694
  Synthetic oligonucleotide

SEQ ID NO: 612690 - DNA, 51 bp, Artificial; identical to SEQ ID NO: 479111
  Synthetic oligonucleotide

SEQ ID NO: 612691 - DNA, 60 bp, Artificial; identical to SEQ ID NO: 479112
  Synthetic oligonucleotide

SEQ ID NO: 612692 - DNA, 56 bp, Artificial; identical to SEQ ID NO: 479113
  Synthetic oligonucleotide

SEQ ID NO: 612693 - DNA, 60 bp, Artificial; identical to SEQ ID NO: 479117
  Synthetic oligonucleotide

SEQ ID NO: 612694 - DNA, 50 bp, Artificial; identical to SEQ ID NO: 479121
  Synthetic oligonucleotide

SEQ ID NO: 612695 - DNA, 55 bp, Artificial; identical to SEQ ID NO: 479124
  Synthetic oligonucleotide

SEQ ID NO: 612696 - DNA, 55 bp, Artificial; identical to SEQ ID NO: 479125
  Synthetic oligonucleotide

SEQ ID NO: 612697 - DNA, 60 bp, Artificial; identical to SEQ ID NO: 479127
  Synthetic oligonucleotide

SEQ ID NO: 612698 - DNA, 60 bp, Artificial; identical to SEQ ID NO: 479131
  Synthetic oligonucleotide

SEQ ID NO: 612699 - DNA, 59 bp, Artificial; identical to SEQ ID NO: 479136
  Synthetic oligonucleotide

SEQ ID NO: 612700 - DNA, 58 bp, Artificial; identical to SEQ ID NO: 479139
  Synthetic oligonucleotide

SEQ ID NO: 612701 - DNA, 55 bp, Artificial; identical to SEQ ID NO: 479141
  Synthetic oligonucleotide

SEQ ID NO: 612702 - DNA, 60 bp, Artificial; identical to SEQ ID NO: 479143
  Synthetic oligonucleotide

SEQ ID NO: 612703 - DNA, 55 bp, Artificial; identical to SEQ ID NO: 479144
  Synthetic oligonucleotide

SEQ ID NO: 612704 - DNA, 60 bp, Artificial; identical to SEQ ID NO: 479148
  Synthetic oligonucleotide

SEQ ID NO: 612705 - DNA, 58 bp, Artificial; identical to SEQ ID NO: 479149
  Synthetic oligonucleotide

SEQ ID NO: 612706 - DNA, 60 bp, Artificial; identical to SEQ ID NO: 479150
  Synthetic oligonucleotide

SEQ ID NO: 612707 - DNA, 55 bp, Artificial; identical to SEQ ID NO: 479155
  Synthetic oligonucleotide

SEQ ID NO: 612708 - DNA, 55 bp, Artificial; identical to SEQ ID NO: 479159
  Synthetic oligonucleotide

SEQ ID NO: 612709 - DNA, 60 bp, Artificial; identical to SEQ ID NO: 479162
  Synthetic oligonucleotide

SEQ ID NO: 612710 - DNA, 60 bp, Artificial; identical to SEQ ID NO: 479163
  Synthetic oligonucleotide

SEQ ID NO: 612711 - DNA, 60 bp, Artificial; identical to SEQ ID NO: 479164
  Synthetic oligonucleotide

SEQ ID NO: 612712 - DNA, 60 bp, Artificial; identical to SEQ ID NO: 479165
  Synthetic oligonucleotide

SEQ ID NO: 612713 - DNA, 52 bp, Artificial; identical to SEQ ID NO: 479167
  Synthetic oligonucleotide

SEQ ID NO: 612714 - DNA, 56 bp, Artificial; identical to SEQ ID NO: 479170
  Synthetic oligonucleotide

SEQ ID NO: 612715 - DNA, 60 bp, Artificial; identical to SEQ ID NO: 479171
  Synthetic oligonucleotide

SEQ ID NO: 612716 - DNA, 60 bp, Artificial; identical to SEQ ID NO: 479172
  Synthetic oligonucleotide

SEQ ID NO: 612717 - DNA, 53 bp, Artificial; identical to SEQ ID NO: 479180
  Synthetic oligonucleotide

SEQ ID NO: 612718 - DNA, 54 bp, Artificial; identical to SEQ ID NO: 18545
  Synthetic oligonucleotide

SEQ ID NO: 612719 - DNA, 55 bp, Artificial; identical to SEQ ID NO: 479185
  Synthetic oligonucleotide

SEQ ID NO: 612720 - DNA, 55 bp, Artificial; identical to SEQ ID NO: 479186
  Synthetic oligonucleotide

SEQ ID NO: 612721 - DNA, 60 bp, Artificial; identical to SEQ ID NO: 479188
  Synthetic oligonucleotide

SEQ ID NO: 612722 - DNA, 60 bp, Artificial; identical to SEQ ID NO: 479191
  Synthetic oligonucleotide

SEQ ID NO: 612723 - DNA, 54 bp, Artificial; identical to SEQ ID NO: 479196
  Synthetic oligonucleotide

SEQ ID NO: 612724 - DNA, 59 bp, Artificial; identical to SEQ ID NO: 479198
  Synthetic oligonucleotide

SEQ ID NO: 612725 - DNA, 57 bp, Artificial; identical to SEQ ID NO: 479201
  Synthetic oligonucleotide

SEQ ID NO: 612726 - DNA, 50 bp, Artificial; identical to SEQ ID NO: 479204
  Synthetic oligonucleotide

SEQ ID NO: 612727 - DNA, 59 bp, Artificial; identical to SEQ ID NO: 479205
  Synthetic oligonucleotide

SEQ ID NO: 612728 - DNA, 60 bp, Artificial; identical to SEQ ID NO: 479206
  Synthetic oligonucleotide

SEQ ID NO: 612729 - DNA, 60 bp, Artificial; identical to SEQ ID NO: 479209
  Synthetic oligonucleotide

SEQ ID NO: 612730 - DNA, 55 bp, Artificial; identical to SEQ ID NO: 479211
  Synthetic oligonucleotide

SEQ ID NO: 612731 - DNA, 60 bp, Artificial; identical to SEQ ID NO: 479213
  Synthetic oligonucleotide

SEQ ID NO: 612732 - DNA, 60 bp, Artificial; identical to SEQ ID NO: 479218
  Synthetic oligonucleotide

SEQ ID NO: 612733 - DNA, 60 bp, Artificial; identical to SEQ ID NO: 479224
  Synthetic oligonucleotide

SEQ ID NO: 612734 - DNA, 60 bp, Artificial; identical to SEQ ID NO: 479229
  Synthetic oligonucleotide

SEQ ID NO: 612735 - DNA, 55 bp, Artificial; identical to SEQ ID NO: 479232
  Synthetic oligonucleotide

SEQ ID NO: 612736 - DNA, 60 bp, Artificial; identical to SEQ ID NO: 479234
  Synthetic oligonucleotide

SEQ ID NO: 612737 - DNA, 56 bp, Artificial; identical to SEQ ID NO: 479235
  Synthetic oligonucleotide

SEQ ID NO: 612738 - DNA, 60 bp, Artificial; identical to SEQ ID NO: 479236
  Synthetic oligonucleotide

SEQ ID NO: 612739 - DNA, 56 bp, Artificial; identical to SEQ ID NO: 479238
  Synthetic oligonucleotide

SEQ ID NO: 612740 - DNA, 55 bp, Artificial; identical to SEQ ID NO: 479241
  Synthetic oligonucleotide

SEQ ID NO: 612741 - DNA, 59 bp, Artificial; identical to SEQ ID NO: 479243
  Synthetic oligonucleotide

SEQ ID NO: 612742 - DNA, 56 bp, Artificial; identical to SEQ ID NO: 479251
  Synthetic oligonucleotide

SEQ ID NO: 612743 - DNA, 60 bp, Artificial; identical to SEQ ID NO: 479253
  Synthetic oligonucleotide

SEQ ID NO: 612744 - DNA, 53 bp, Artificial; identical to SEQ ID NO: 479255
  Synthetic oligonucleotide

SEQ ID NO: 612745 - DNA, 60 bp, Artificial; identical to SEQ ID NO: 45464
  Synthetic oligonucleotide

SEQ ID NO: 612746 - DNA, 55 bp, Artificial; identical to SEQ ID NO: 479262
  Synthetic oligonucleotide

SEQ ID NO: 612747 - DNA, 56 bp, Artificial; identical to SEQ ID NO: 479264
  Synthetic oligonucleotide

SEQ ID NO: 612748 - DNA, 50 bp, Artificial; identical to SEQ ID NO: 479266
  Synthetic oligonucleotide

SEQ ID NO: 612749 - DNA, 55 bp, Artificial; identical to SEQ ID NO: 479267
  Synthetic oligonucleotide

SEQ ID NO: 612750 - DNA, 58 bp, Artificial; identical to SEQ ID NO: 479269
  Synthetic oligonucleotide

SEQ ID NO: 612751 - DNA, 58 bp, Artificial; identical to SEQ ID NO: 479271
  Synthetic oligonucleotide

SEQ ID NO: 612752 - DNA, 55 bp, Artificial; identical to SEQ ID NO: 479276
  Synthetic oligonucleotide

SEQ ID NO: 612753 - DNA, 53 bp, Artificial; identical to SEQ ID NO: 479277
  Synthetic oligonucleotide

SEQ ID NO: 612754 - DNA, 60 bp, Artificial; identical to SEQ ID NO: 479281
  Synthetic oligonucleotide

SEQ ID NO: 612755 - DNA, 60 bp, Artificial; identical to SEQ ID NO: 479283
  Synthetic oligonucleotide

SEQ ID NO: 612756 - DNA, 59 bp, Artificial; identical to SEQ ID NO: 479285
  Synthetic oligonucleotide

SEQ ID NO: 612757 - DNA, 58 bp, Artificial; identical to SEQ ID NO: 479289
  Synthetic oligonucleotide

SEQ ID NO: 612758 - DNA, 58 bp, Artificial; identical to SEQ ID NO: 479294
  Synthetic oligonucleotide

SEQ ID NO: 612759 - DNA, 60 bp, Artificial; identical to SEQ ID NO: 479295
  Synthetic oligonucleotide

SEQ ID NO: 612760 - DNA, 56 bp, Artificial; identical to SEQ ID NO: 479297
  Synthetic oligonucleotide

SEQ ID NO: 612761 - DNA, 52 bp, Artificial; identical to SEQ ID NO: 479298
  Synthetic oligonucleotide

SEQ ID NO: 612762 - DNA, 58 bp, Artificial; identical to SEQ ID NO: 479305
  Synthetic oligonucleotide

SEQ ID NO: 612763 - DNA, 60 bp, Artificial; identical to SEQ ID NO: 479307
  Synthetic oligonucleotide

SEQ ID NO: 612764 - DNA, 60 bp, Artificial; identical to SEQ ID NO: 479313
  Synthetic oligonucleotide

SEQ ID NO: 612765 - DNA, 56 bp, Artificial; identical to SEQ ID NO: 479315
  Synthetic oligonucleotide

SEQ ID NO: 612766 - DNA, 50 bp, Artificial; identical to SEQ ID NO: 479319
  Synthetic oligonucleotide

SEQ ID NO: 612767 - DNA, 57 bp, Artificial; identical to SEQ ID NO: 479322
  Synthetic oligonucleotide

SEQ ID NO: 612768 - DNA, 59 bp, Artificial; identical to SEQ ID NO: 16627
  Synthetic oligonucleotide

SEQ ID NO: 612769 - DNA, 60 bp, Artificial; identical to SEQ ID NO: 479328
  Synthetic oligonucleotide

SEQ ID NO: 612770 - DNA, 60 bp, Artificial; identical to SEQ ID NO: 479331
  Synthetic oligonucleotide

SEQ ID NO: 612771 - DNA, 60 bp, Artificial; identical to SEQ ID NO: 479332
  Synthetic oligonucleotide

SEQ ID NO: 612772 - DNA, 60 bp, Artificial; identical to SEQ ID NO: 479339
  Synthetic oligonucleotide

SEQ ID NO: 612773 - DNA, 59 bp, Artificial; identical to SEQ ID NO: 479341
  Synthetic oligonucleotide

SEQ ID NO: 612774 - DNA, 58 bp, Artificial; identical to SEQ ID NO: 479343
  Synthetic oligonucleotide

SEQ ID NO: 612775 - DNA, 54 bp, Artificial; identical to SEQ ID NO: 479346
  Synthetic oligonucleotide

SEQ ID NO: 612776 - DNA, 59 bp, Artificial; identical to SEQ ID NO: 479347
  Synthetic oligonucleotide

SEQ ID NO: 612777 - DNA, 53 bp, Artificial; identical to SEQ ID NO: 479354
  Synthetic oligonucleotide

SEQ ID NO: 612778 - DNA, 57 bp, Artificial; identical to SEQ ID NO: 479356
  Synthetic oligonucleotide

SEQ ID NO: 612779 - DNA, 60 bp, Artificial; identical to SEQ ID NO: 479358
  Synthetic oligonucleotide

SEQ ID NO: 612780 - DNA, 52 bp, Artificial; identical to SEQ ID NO: 479359
  Synthetic oligonucleotide

SEQ ID NO: 612781 - DNA, 55 bp, Artificial; identical to SEQ ID NO: 479360
  Synthetic oligonucleotide

SEQ ID NO: 612782 - DNA, 57 bp, Artificial; identical to SEQ ID NO: 479362
  Synthetic oligonucleotide

SEQ ID NO: 612783 - DNA, 60 bp, Artificial; identical to SEQ ID NO: 479363
  Synthetic oligonucleotide

SEQ ID NO: 612784 - DNA, 57 bp, Artificial; identical to SEQ ID NO: 479364
  Synthetic oligonucleotide

SEQ ID NO: 612785 - DNA, 56 bp, Artificial; identical to SEQ ID NO: 479368
  Synthetic oligonucleotide

SEQ ID NO: 612786 - DNA, 55 bp, Artificial; identical to SEQ ID NO: 479369
  Synthetic oligonucleotide

SEQ ID NO: 612787 - DNA, 60 bp, Artificial; identical to SEQ ID NO: 479371
  Synthetic oligonucleotide

SEQ ID NO: 612788 - DNA, 57 bp, Artificial; identical to SEQ ID NO: 18363
  Synthetic oligonucleotide

SEQ ID NO: 612789 - DNA, 54 bp, Artificial; identical to SEQ ID NO: 479380
  Synthetic oligonucleotide

SEQ ID NO: 612790 - DNA, 60 bp, Artificial; identical to SEQ ID NO: 479381
  Synthetic oligonucleotide

SEQ ID NO: 612791 - DNA, 55 bp, Artificial; identical to SEQ ID NO: 479388
  Synthetic oligonucleotide

SEQ ID NO: 612792 - DNA, 58 bp, Artificial; identical to SEQ ID NO: 479389
  Synthetic oligonucleotide

SEQ ID NO: 612793 - DNA, 51 bp, Artificial; identical to SEQ ID NO: 479394
  Synthetic oligonucleotide

SEQ ID NO: 612794 - DNA, 59 bp, Artificial; identical to SEQ ID NO: 479396
  Synthetic oligonucleotide

SEQ ID NO: 612795 - DNA, 56 bp, Artificial; identical to SEQ ID NO: 479400
  Synthetic oligonucleotide

SEQ ID NO: 612796 - DNA, 60 bp, Artificial; identical to SEQ ID NO: 479401
  Synthetic oligonucleotide

SEQ ID NO: 612797 - DNA, 59 bp, Artificial; identical to SEQ ID NO: 479403
  Synthetic oligonucleotide

SEQ ID NO: 612798 - DNA, 55 bp, Artificial; identical to SEQ ID NO: 479404
  Synthetic oligonucleotide

SEQ ID NO: 612799 - DNA, 54 bp, Artificial; identical to SEQ ID NO: 479405
  Synthetic oligonucleotide

SEQ ID NO: 612800 - DNA, 55 bp, Artificial; identical to SEQ ID NO: 479406
  Synthetic oligonucleotide

SEQ ID NO: 612801 - DNA, 51 bp, Artificial; identical to SEQ ID NO: 479407
  Synthetic oligonucleotide

SEQ ID NO: 612802 - DNA, 60 bp, Artificial; identical to SEQ ID NO: 479408
  Synthetic oligonucleotide

SEQ ID NO: 612803 - DNA, 60 bp, Artificial; identical to SEQ ID NO: 479414
  Synthetic oligonucleotide

SEQ ID NO: 612804 - DNA, 55 bp, Artificial; identical to SEQ ID NO: 14988
  Synthetic oligonucleotide

SEQ ID NO: 612805 - DNA, 60 bp, Artificial; identical to SEQ ID NO: 13890
  Synthetic oligonucleotide

SEQ ID NO: 612806 - DNA, 60 bp, Artificial; identical to SEQ ID NO: 479415
  Synthetic oligonucleotide

SEQ ID NO: 612807 - DNA, 55 bp, Artificial; identical to SEQ ID NO: 479416
  Synthetic oligonucleotide

SEQ ID NO: 612808 - DNA, 58 bp, Artificial; identical to SEQ ID NO: 479419
  Synthetic oligonucleotide

SEQ ID NO: 612809 - DNA, 55 bp, Artificial; identical to SEQ ID NO: 479420
  Synthetic oligonucleotide

SEQ ID NO: 612810 - DNA, 60 bp, Artificial; identical to SEQ ID NO: 479424
  Synthetic oligonucleotide

SEQ ID NO: 612811 - DNA, 53 bp, Artificial; identical to SEQ ID NO: 479425
  Synthetic oligonucleotide

SEQ ID NO: 612812 - DNA, 60 bp, Artificial; identical to SEQ ID NO: 479427
  Synthetic oligonucleotide

SEQ ID NO: 612813 - DNA, 51 bp, Artificial; identical to SEQ ID NO: 479430
  Synthetic oligonucleotide

SEQ ID NO: 612814 - DNA, 55 bp, Artificial; identical to SEQ ID NO: 479431
  Synthetic oligonucleotide

SEQ ID NO: 612815 - DNA, 55 bp, Artificial; identical to SEQ ID NO: 479433
  Synthetic oligonucleotide

SEQ ID NO: 612816 - DNA, 60 bp, Artificial; identical to SEQ ID NO: 479435
  Synthetic oligonucleotide

SEQ ID NO: 612817 - DNA, 56 bp, Artificial; identical to SEQ ID NO: 479436
  Synthetic oligonucleotide

SEQ ID NO: 612818 - DNA, 60 bp, Artificial; identical to SEQ ID NO: 479439
  Synthetic oligonucleotide

SEQ ID NO: 612819 - DNA, 55 bp, Artificial; identical to SEQ ID NO: 479441
  Synthetic oligonucleotide

SEQ ID NO: 612820 - DNA, 54 bp, Artificial; identical to SEQ ID NO: 479442
  Synthetic oligonucleotide

SEQ ID NO: 612821 - DNA, 57 bp, Artificial; identical to SEQ ID NO: 479444
  Synthetic oligonucleotide

SEQ ID NO: 612822 - DNA, 55 bp, Artificial; identical to SEQ ID NO: 479445
  Synthetic oligonucleotide

SEQ ID NO: 612823 - DNA, 60 bp, Artificial; identical to SEQ ID NO: 479450
  Synthetic oligonucleotide

SEQ ID NO: 612824 - DNA, 56 bp, Artificial; identical to SEQ ID NO: 479452
  Synthetic oligonucleotide

SEQ ID NO: 612825 - DNA, 59 bp, Artificial; identical to SEQ ID NO: 479453
  Synthetic oligonucleotide

SEQ ID NO: 612826 - DNA, 54 bp, Artificial; identical to SEQ ID NO: 479455
  Synthetic oligonucleotide

SEQ ID NO: 612827 - DNA, 60 bp, Artificial; identical to SEQ ID NO: 479457
  Synthetic oligonucleotide

SEQ ID NO: 612828 - DNA, 60 bp, Artificial; identical to SEQ ID NO: 479467
  Synthetic oligonucleotide

SEQ ID NO: 612829 - DNA, 55 bp, Artificial; identical to SEQ ID NO: 479468
  Synthetic oligonucleotide

SEQ ID NO: 612830 - DNA, 55 bp, Artificial; identical to SEQ ID NO: 479469
  Synthetic oligonucleotide

SEQ ID NO: 612831 - DNA, 51 bp, Artificial; identical to SEQ ID NO: 479471
  Synthetic oligonucleotide

SEQ ID NO: 612832 - DNA, 55 bp, Artificial; identical to SEQ ID NO: 479472
  Synthetic oligonucleotide

SEQ ID NO: 612833 - DNA, 58 bp, Artificial; identical to SEQ ID NO: 479474
  Synthetic oligonucleotide

SEQ ID NO: 612834 - DNA, 60 bp, Artificial; identical to SEQ ID NO: 479477
  Synthetic oligonucleotide

SEQ ID NO: 612835 - DNA, 60 bp, Artificial; identical to SEQ ID NO: 479478
  Synthetic oligonucleotide

SEQ ID NO: 612836 - DNA, 59 bp, Artificial; identical to SEQ ID NO: 479480
  Synthetic oligonucleotide

SEQ ID NO: 612837 - DNA, 50 bp, Artificial; identical to SEQ ID NO: 479482
  Synthetic oligonucleotide

SEQ ID NO: 612838 - DNA, 60 bp, Artificial; identical to SEQ ID NO: 479483
  Synthetic oligonucleotide

SEQ ID NO: 612839 - DNA, 60 bp, Artificial; identical to SEQ ID NO: 479484
  Synthetic oligonucleotide

SEQ ID NO: 612840 - DNA, 55 bp, Artificial; identical to SEQ ID NO: 479485
  Synthetic oligonucleotide

SEQ ID NO: 612841 - DNA, 60 bp, Artificial; identical to SEQ ID NO: 479486
  Synthetic oligonucleotide

SEQ ID NO: 612842 - DNA, 60 bp, Artificial; identical to SEQ ID NO: 479490
  Synthetic oligonucleotide

SEQ ID NO: 612843 - DNA, 60 bp, Artificial; identical to SEQ ID NO: 479491
  Synthetic oligonucleotide

SEQ ID NO: 612844 - DNA, 56 bp, Artificial; identical to SEQ ID NO: 479493
  Synthetic oligonucleotide

SEQ ID NO: 612845 - DNA, 55 bp, Artificial; identical to SEQ ID NO: 479498
  Synthetic oligonucleotide

SEQ ID NO: 612846 - DNA, 55 bp, Artificial; identical to SEQ ID NO: 479501
  Synthetic oligonucleotide

SEQ ID NO: 612847 - DNA, 60 bp, Artificial; identical to SEQ ID NO: 479502
  Synthetic oligonucleotide

SEQ ID NO: 612848 - DNA, 54 bp, Artificial; identical to SEQ ID NO: 479505
  Synthetic oligonucleotide

SEQ ID NO: 612849 - DNA, 59 bp, Artificial; identical to SEQ ID NO: 479506
  Synthetic oligonucleotide

SEQ ID NO: 612850 - DNA, 60 bp, Artificial; identical to SEQ ID NO: 479511
  Synthetic oligonucleotide

SEQ ID NO: 612851 - DNA, 55 bp, Artificial; identical to SEQ ID NO: 479513
  Synthetic oligonucleotide

SEQ ID NO: 612852 - DNA, 57 bp, Artificial; identical to SEQ ID NO: 479515
  Synthetic oligonucleotide

SEQ ID NO: 612853 - DNA, 50 bp, Artificial; identical to SEQ ID NO: 479516
  Synthetic oligonucleotide

SEQ ID NO: 612854 - DNA, 57 bp, Artificial; identical to SEQ ID NO: 479519
  Synthetic oligonucleotide

SEQ ID NO: 612855 - DNA, 52 bp, Artificial; identical to SEQ ID NO: 479520
  Synthetic oligonucleotide

SEQ ID NO: 612856 - DNA, 60 bp, Artificial; identical to SEQ ID NO: 479521
  Synthetic oligonucleotide

SEQ ID NO: 612857 - DNA, 55 bp, Artificial; identical to SEQ ID NO: 479522
  Synthetic oligonucleotide

SEQ ID NO: 612858 - DNA, 58 bp, Artificial; identical to SEQ ID NO: 479524
  Synthetic oligonucleotide

SEQ ID NO: 612859 - DNA, 60 bp, Artificial; identical to SEQ ID NO: 479528
  Synthetic oligonucleotide

SEQ ID NO: 612860 - DNA, 57 bp, Artificial; identical to SEQ ID NO: 479531
  Synthetic oligonucleotide

SEQ ID NO: 612861 - DNA, 55 bp, Artificial; identical to SEQ ID NO: 479534
  Synthetic oligonucleotide

SEQ ID NO: 612862 - DNA, 55 bp, Artificial; identical to SEQ ID NO: 479535
  Synthetic oligonucleotide

SEQ ID NO: 612863 - DNA, 60 bp, Artificial; identical to SEQ ID NO: 479536
  Synthetic oligonucleotide

SEQ ID NO: 612864 - DNA, 58 bp, Artificial; identical to SEQ ID NO: 479538
  Synthetic oligonucleotide

SEQ ID NO: 612865 - DNA, 53 bp, Artificial; identical to SEQ ID NO: 479539
  Synthetic oligonucleotide

SEQ ID NO: 612866 - DNA, 52 bp, Artificial; identical to SEQ ID NO: 479541
  Synthetic oligonucleotide

SEQ ID NO: 612867 - DNA, 52 bp, Artificial; identical to SEQ ID NO: 19736
  Synthetic oligonucleotide

SEQ ID NO: 612868 - DNA, 55 bp, Artificial; identical to SEQ ID NO: 479542
  Synthetic oligonucleotide

SEQ ID NO: 612869 - DNA, 56 bp, Artificial; identical to SEQ ID NO: 479543
  Synthetic oligonucleotide

SEQ ID NO: 612870 - DNA, 55 bp, Artificial; identical to SEQ ID NO: 17421
  Synthetic oligonucleotide

SEQ ID NO: 612871 - DNA, 58 bp, Artificial; identical to SEQ ID NO: 479546
  Synthetic oligonucleotide

SEQ ID NO: 612872 - DNA, 58 bp, Artificial; identical to SEQ ID NO: 479550
  Synthetic oligonucleotide

SEQ ID NO: 612873 - DNA, 60 bp, Artificial; identical to SEQ ID NO: 479551
  Synthetic oligonucleotide

SEQ ID NO: 612874 - DNA, 54 bp, Artificial; identical to SEQ ID NO: 479552
  Synthetic oligonucleotide

SEQ ID NO: 612875 - DNA, 54 bp, Artificial; identical to SEQ ID NO: 479563
  Synthetic oligonucleotide

SEQ ID NO: 612876 - DNA, 55 bp, Artificial; identical to SEQ ID NO: 479564
  Synthetic oligonucleotide

SEQ ID NO: 612877 - DNA, 55 bp, Artificial; identical to SEQ ID NO: 479566
  Synthetic oligonucleotide

SEQ ID NO: 612878 - DNA, 51 bp, Artificial; identical to SEQ ID NO: 479575
  Synthetic oligonucleotide

SEQ ID NO: 612879 - DNA, 56 bp, Artificial; identical to SEQ ID NO: 479576
  Synthetic oligonucleotide

SEQ ID NO: 612880 - DNA, 60 bp, Artificial; identical to SEQ ID NO: 479579
  Synthetic oligonucleotide

SEQ ID NO: 612881 - DNA, 56 bp, Artificial; identical to SEQ ID NO: 479580
  Synthetic oligonucleotide

SEQ ID NO: 612882 - DNA, 52 bp, Artificial; identical to SEQ ID NO: 479583
  Synthetic oligonucleotide

SEQ ID NO: 612883 - DNA, 58 bp, Artificial; identical to SEQ ID NO: 479585
  Synthetic oligonucleotide

SEQ ID NO: 612884 - DNA, 59 bp, Artificial; identical to SEQ ID NO: 479587
  Synthetic oligonucleotide

SEQ ID NO: 612885 - DNA, 52 bp, Artificial; identical to SEQ ID NO: 479588
  Synthetic oligonucleotide

SEQ ID NO: 612886 - DNA, 60 bp, Artificial; identical to SEQ ID NO: 479593
  Synthetic oligonucleotide

SEQ ID NO: 612887 - DNA, 56 bp, Artificial; identical to SEQ ID NO: 479596
  Synthetic oligonucleotide

SEQ ID NO: 612888 - DNA, 58 bp, Artificial; identical to SEQ ID NO: 479597
  Synthetic oligonucleotide

SEQ ID NO: 612889 - DNA, 60 bp, Artificial; identical to SEQ ID NO: 479600
  Synthetic oligonucleotide

SEQ ID NO: 612890 - DNA, 56 bp, Artificial; identical to SEQ ID NO: 479602
  Synthetic oligonucleotide

SEQ ID NO: 612891 - DNA, 58 bp, Artificial; identical to SEQ ID NO: 479604
  Synthetic oligonucleotide

SEQ ID NO: 612892 - DNA, 58 bp, Artificial; identical to SEQ ID NO: 479614
  Synthetic oligonucleotide

SEQ ID NO: 612893 - DNA, 60 bp, Artificial; identical to SEQ ID NO: 15362
  Synthetic oligonucleotide

SEQ ID NO: 612894 - DNA, 60 bp, Artificial; identical to SEQ ID NO: 479616
  Synthetic oligonucleotide

SEQ ID NO: 612895 - DNA, 51 bp, Artificial; identical to SEQ ID NO: 479617
  Synthetic oligonucleotide

SEQ ID NO: 612896 - DNA, 58 bp, Artificial; identical to SEQ ID NO: 479619
  Synthetic oligonucleotide

SEQ ID NO: 612897 - DNA, 60 bp, Artificial; identical to SEQ ID NO: 479621
  Synthetic oligonucleotide

SEQ ID NO: 612898 - DNA, 55 bp, Artificial; identical to SEQ ID NO: 479622
  Synthetic oligonucleotide

SEQ ID NO: 612899 - DNA, 59 bp, Artificial; identical to SEQ ID NO: 479626
  Synthetic oligonucleotide

SEQ ID NO: 612900 - DNA, 60 bp, Artificial; identical to SEQ ID NO: 479629
  Synthetic oligonucleotide

SEQ ID NO: 612901 - DNA, 56 bp, Artificial; identical to SEQ ID NO: 20094
  Synthetic oligonucleotide

SEQ ID NO: 612902 - DNA, 58 bp, Artificial; identical to SEQ ID NO: 479636
  Synthetic oligonucleotide

SEQ ID NO: 612903 - DNA, 60 bp, Artificial; identical to SEQ ID NO: 14525
  Synthetic oligonucleotide

SEQ ID NO: 612904 - DNA, 59 bp, Artificial; identical to SEQ ID NO: 16487
  Synthetic oligonucleotide

SEQ ID NO: 612905 - DNA, 53 bp, Artificial; identical to SEQ ID NO: 479642
  Synthetic oligonucleotide

SEQ ID NO: 612906 - DNA, 60 bp, Artificial; identical to SEQ ID NO: 11557
  Synthetic oligonucleotide

SEQ ID NO: 612907 - DNA, 60 bp, Artificial; identical to SEQ ID NO: 479648
  Synthetic oligonucleotide

SEQ ID NO: 612908 - DNA, 56 bp, Artificial; identical to SEQ ID NO: 479649
  Synthetic oligonucleotide

SEQ ID NO: 612909 - DNA, 55 bp, Artificial; identical to SEQ ID NO: 479650
  Synthetic oligonucleotide

SEQ ID NO: 612910 - DNA, 55 bp, Artificial; identical to SEQ ID NO: 479652
  Synthetic oligonucleotide

SEQ ID NO: 612911 - DNA, 55 bp, Artificial; identical to SEQ ID NO: 479654
  Synthetic oligonucleotide

SEQ ID NO: 612912 - DNA, 60 bp, Artificial; identical to SEQ ID NO: 479659
  Synthetic oligonucleotide

SEQ ID NO: 612913 - DNA, 55 bp, Artificial; identical to SEQ ID NO: 479660
  Synthetic oligonucleotide

SEQ ID NO: 612914 - DNA, 50 bp, Artificial; identical to SEQ ID NO: 479662
  Synthetic oligonucleotide

SEQ ID NO: 612915 - DNA, 53 bp, Artificial; identical to SEQ ID NO: 479669
  Synthetic oligonucleotide

SEQ ID NO: 612916 - DNA, 54 bp, Artificial; identical to SEQ ID NO: 479670
  Synthetic oligonucleotide

SEQ ID NO: 612917 - DNA, 50 bp, Artificial; identical to SEQ ID NO: 479672
  Synthetic oligonucleotide

SEQ ID NO: 612918 - DNA, 54 bp, Artificial; identical to SEQ ID NO: 479673
  Synthetic oligonucleotide

SEQ ID NO: 612919 - DNA, 60 bp, Artificial; identical to SEQ ID NO: 479681
  Synthetic oligonucleotide

SEQ ID NO: 612920 - DNA, 60 bp, Artificial; identical to SEQ ID NO: 479682
  Synthetic oligonucleotide

SEQ ID NO: 612921 - DNA, 58 bp, Artificial; identical to SEQ ID NO: 479683
  Synthetic oligonucleotide

SEQ ID NO: 612922 - DNA, 55 bp, Artificial; identical to SEQ ID NO: 479684
  Synthetic oligonucleotide

SEQ ID NO: 612923 - DNA, 57 bp, Artificial; identical to SEQ ID NO: 479688
  Synthetic oligonucleotide

SEQ ID NO: 612924 - DNA, 57 bp, Artificial; identical to SEQ ID NO: 479690
  Synthetic oligonucleotide

SEQ ID NO: 612925 - DNA, 56 bp, Artificial; identical to SEQ ID NO: 13065
  Synthetic oligonucleotide

SEQ ID NO: 612926 - DNA, 60 bp, Artificial; identical to SEQ ID NO: 479691
  Synthetic oligonucleotide

SEQ ID NO: 612927 - DNA, 60 bp, Artificial; identical to SEQ ID NO: 479692
  Synthetic oligonucleotide

SEQ ID NO: 612928 - DNA, 57 bp, Artificial; identical to SEQ ID NO: 479694
  Synthetic oligonucleotide

SEQ ID NO: 612929 - DNA, 60 bp, Artificial; identical to SEQ ID NO: 12274
  Synthetic oligonucleotide

SEQ ID NO: 612930 - DNA, 57 bp, Artificial; identical to SEQ ID NO: 12838
  Synthetic oligonucleotide

SEQ ID NO: 612931 - DNA, 59 bp, Artificial; identical to SEQ ID NO: 479707
  Synthetic oligonucleotide

SEQ ID NO: 612932 - DNA, 60 bp, Artificial; identical to SEQ ID NO: 479708
  Synthetic oligonucleotide

SEQ ID NO: 612933 - DNA, 60 bp, Artificial; identical to SEQ ID NO: 479709
  Synthetic oligonucleotide

SEQ ID NO: 612934 - DNA, 60 bp, Artificial; identical to SEQ ID NO: 479711
  Synthetic oligonucleotide

SEQ ID NO: 612935 - DNA, 60 bp, Artificial; identical to SEQ ID NO: 479712
  Synthetic oligonucleotide

SEQ ID NO: 612936 - DNA, 51 bp, Artificial; identical to SEQ ID NO: 479715
  Synthetic oligonucleotide

SEQ ID NO: 612937 - DNA, 58 bp, Artificial; identical to SEQ ID NO: 479718
  Synthetic oligonucleotide

SEQ ID NO: 612938 - DNA, 60 bp, Artificial; identical to SEQ ID NO: 479719
  Synthetic oligonucleotide

SEQ ID NO: 612939 - DNA, 52 bp, Artificial; identical to SEQ ID NO: 479724
  Synthetic oligonucleotide

SEQ ID NO: 612940 - DNA, 53 bp, Artificial; identical to SEQ ID NO: 479726
  Synthetic oligonucleotide

SEQ ID NO: 612941 - DNA, 60 bp, Artificial; identical to SEQ ID NO: 479731
  Synthetic oligonucleotide

SEQ ID NO: 612942 - DNA, 55 bp, Artificial; identical to SEQ ID NO: 479734
  Synthetic oligonucleotide

SEQ ID NO: 612943 - DNA, 57 bp, Artificial; identical to SEQ ID NO: 479737
  Synthetic oligonucleotide

SEQ ID NO: 612944 - DNA, 52 bp, Artificial; identical to SEQ ID NO: 479739
  Synthetic oligonucleotide

SEQ ID NO: 612945 - DNA, 58 bp, Artificial; identical to SEQ ID NO: 479741
  Synthetic oligonucleotide

SEQ ID NO: 612946 - DNA, 59 bp, Artificial; identical to SEQ ID NO: 479744
  Synthetic oligonucleotide

SEQ ID NO: 612947 - DNA, 57 bp, Artificial; identical to SEQ ID NO: 479748
  Synthetic oligonucleotide

SEQ ID NO: 612948 - DNA, 59 bp, Artificial; identical to SEQ ID NO: 479751
  Synthetic oligonucleotide

SEQ ID NO: 612949 - DNA, 56 bp, Artificial; identical to SEQ ID NO: 479754
  Synthetic oligonucleotide

SEQ ID NO: 612950 - DNA, 55 bp, Artificial; identical to SEQ ID NO: 479757
  Synthetic oligonucleotide

SEQ ID NO: 612951 - DNA, 55 bp, Artificial; identical to SEQ ID NO: 479758
  Synthetic oligonucleotide

SEQ ID NO: 612952 - DNA, 60 bp, Artificial; identical to SEQ ID NO: 479765
  Synthetic oligonucleotide

SEQ ID NO: 612953 - DNA, 55 bp, Artificial; identical to SEQ ID NO: 479766
  Synthetic oligonucleotide

SEQ ID NO: 612954 - DNA, 60 bp, Artificial; identical to SEQ ID NO: 479767
  Synthetic oligonucleotide

SEQ ID NO: 612955 - DNA, 55 bp, Artificial; identical to SEQ ID NO: 479769
  Synthetic oligonucleotide

SEQ ID NO: 612956 - DNA, 60 bp, Artificial; identical to SEQ ID NO: 479770
  Synthetic oligonucleotide

SEQ ID NO: 612957 - DNA, 59 bp, Artificial; identical to SEQ ID NO: 479775
  Synthetic oligonucleotide

SEQ ID NO: 612958 - DNA, 60 bp, Artificial; identical to SEQ ID NO: 479777
  Synthetic oligonucleotide

SEQ ID NO: 612959 - DNA, 54 bp, Artificial; identical to SEQ ID NO: 479786
  Synthetic oligonucleotide

SEQ ID NO: 612960 - DNA, 55 bp, Artificial; identical to SEQ ID NO: 479787
  Synthetic oligonucleotide

SEQ ID NO: 612961 - DNA, 57 bp, Artificial; identical to SEQ ID NO: 479789
  Synthetic oligonucleotide

SEQ ID NO: 612962 - DNA, 55 bp, Artificial; identical to SEQ ID NO: 479791
  Synthetic oligonucleotide

SEQ ID NO: 612963 - DNA, 60 bp, Artificial; identical to SEQ ID NO: 479796
  Synthetic oligonucleotide

SEQ ID NO: 612964 - DNA, 57 bp, Artificial; identical to SEQ ID NO: 479797
  Synthetic oligonucleotide

SEQ ID NO: 612965 - DNA, 60 bp, Artificial; identical to SEQ ID NO: 479799
  Synthetic oligonucleotide

SEQ ID NO: 612966 - DNA, 60 bp, Artificial; identical to SEQ ID NO: 479800
  Synthetic oligonucleotide

SEQ ID NO: 612967 - DNA, 55 bp, Artificial; identical to SEQ ID NO: 479802
  Synthetic oligonucleotide

SEQ ID NO: 612968 - DNA, 58 bp, Artificial; identical to SEQ ID NO: 479805
  Synthetic oligonucleotide

SEQ ID NO: 612969 - DNA, 55 bp, Artificial; identical to SEQ ID NO: 479806
  Synthetic oligonucleotide

SEQ ID NO: 612970 - DNA, 51 bp, Artificial; identical to SEQ ID NO: 479808
  Synthetic oligonucleotide

SEQ ID NO: 612971 - DNA, 60 bp, Artificial; identical to SEQ ID NO: 479809
  Synthetic oligonucleotide

SEQ ID NO: 612972 - DNA, 60 bp, Artificial; identical to SEQ ID NO: 479813
  Synthetic oligonucleotide

SEQ ID NO: 612973 - DNA, 60 bp, Artificial; identical to SEQ ID NO: 479815
  Synthetic oligonucleotide

SEQ ID NO: 612974 - DNA, 60 bp, Artificial; identical to SEQ ID NO: 479819
  Synthetic oligonucleotide

SEQ ID NO: 612975 - DNA, 58 bp, Artificial; identical to SEQ ID NO: 479823
  Synthetic oligonucleotide

SEQ ID NO: 612976 - DNA, 55 bp, Artificial; identical to SEQ ID NO: 479824
  Synthetic oligonucleotide

SEQ ID NO: 612977 - DNA, 57 bp, Artificial; identical to SEQ ID NO: 479825
  Synthetic oligonucleotide

SEQ ID NO: 612978 - DNA, 55 bp, Artificial; identical to SEQ ID NO: 479826
  Synthetic oligonucleotide

SEQ ID NO: 612979 - DNA, 55 bp, Artificial; identical to SEQ ID NO: 479832
  Synthetic oligonucleotide

SEQ ID NO: 612980 - DNA, 60 bp, Artificial; identical to SEQ ID NO: 479839
  Synthetic oligonucleotide

SEQ ID NO: 612981 - DNA, 60 bp, Artificial; identical to SEQ ID NO: 479840
  Synthetic oligonucleotide

SEQ ID NO: 612982 - DNA, 60 bp, Artificial; identical to SEQ ID NO: 479842
  Synthetic oligonucleotide

SEQ ID NO: 612983 - DNA, 55 bp, Artificial; identical to SEQ ID NO: 479844
  Synthetic oligonucleotide

SEQ ID NO: 612984 - DNA, 60 bp, Artificial; identical to SEQ ID NO: 479848
  Synthetic oligonucleotide

SEQ ID NO: 612985 - DNA, 58 bp, Artificial; identical to SEQ ID NO: 479849
  Synthetic oligonucleotide

SEQ ID NO: 612986 - DNA, 53 bp, Artificial; identical to SEQ ID NO: 479851
  Synthetic oligonucleotide

SEQ ID NO: 612987 - DNA, 52 bp, Artificial; identical to SEQ ID NO: 479852
  Synthetic oligonucleotide

SEQ ID NO: 612988 - DNA, 55 bp, Artificial; identical to SEQ ID NO: 479854
  Synthetic oligonucleotide

SEQ ID NO: 612989 - DNA, 55 bp, Artificial; identical to SEQ ID NO: 479857
  Synthetic oligonucleotide

SEQ ID NO: 612990 - DNA, 56 bp, Artificial; identical to SEQ ID NO: 479859
  Synthetic oligonucleotide

SEQ ID NO: 612991 - DNA, 52 bp, Artificial; identical to SEQ ID NO: 479860
  Synthetic oligonucleotide

SEQ ID NO: 612992 - DNA, 57 bp, Artificial; identical to SEQ ID NO: 479861
  Synthetic oligonucleotide

SEQ ID NO: 612993 - DNA, 50 bp, Artificial; identical to SEQ ID NO: 10768
  Synthetic oligonucleotide

SEQ ID NO: 612994 - DNA, 51 bp, Artificial; identical to SEQ ID NO: 479863
  Synthetic oligonucleotide

SEQ ID NO: 612995 - DNA, 60 bp, Artificial; identical to SEQ ID NO: 479866
  Synthetic oligonucleotide

SEQ ID NO: 612996 - DNA, 60 bp, Artificial; identical to SEQ ID NO: 479870
  Synthetic oligonucleotide

SEQ ID NO: 612997 - DNA, 53 bp, Artificial; identical to SEQ ID NO: 479873
  Synthetic oligonucleotide

SEQ ID NO: 612998 - DNA, 60 bp, Artificial; identical to SEQ ID NO: 479875
  Synthetic oligonucleotide

SEQ ID NO: 612999 - DNA, 55 bp, Artificial; identical to SEQ ID NO: 479876
  Synthetic oligonucleotide

SEQ ID NO: 613000 - DNA, 58 bp, Artificial; identical to SEQ ID NO: 479877
  Synthetic oligonucleotide

SEQ ID NO: 613001 - DNA, 57 bp, Artificial; identical to SEQ ID NO: 479878
  Synthetic oligonucleotide

SEQ ID NO: 613002 - DNA, 60 bp, Artificial; identical to SEQ ID NO: 479880
  Synthetic oligonucleotide

SEQ ID NO: 613003 - DNA, 53 bp, Artificial; identical to SEQ ID NO: 479887
  Synthetic oligonucleotide

SEQ ID NO: 613004 - DNA, 55 bp, Artificial; identical to SEQ ID NO: 479891
  Synthetic oligonucleotide

SEQ ID NO: 613005 - DNA, 55 bp, Artificial; identical to SEQ ID NO: 479893
  Synthetic oligonucleotide

SEQ ID NO: 613006 - DNA, 60 bp, Artificial; identical to SEQ ID NO: 479896
  Synthetic oligonucleotide

SEQ ID NO: 613007 - DNA, 54 bp, Artificial; identical to SEQ ID NO: 479897
  Synthetic oligonucleotide

SEQ ID NO: 613008 - DNA, 57 bp, Artificial; identical to SEQ ID NO: 479899
  Synthetic oligonucleotide

SEQ ID NO: 613009 - DNA, 60 bp, Artificial; identical to SEQ ID NO: 479901
  Synthetic oligonucleotide

SEQ ID NO: 613010 - DNA, 50 bp, Artificial; identical to SEQ ID NO: 479902
  Synthetic oligonucleotide

SEQ ID NO: 613011 - DNA, 56 bp, Artificial; identical to SEQ ID NO: 479904
  Synthetic oligonucleotide

SEQ ID NO: 613012 - DNA, 60 bp, Artificial; identical to SEQ ID NO: 479905
  Synthetic oligonucleotide

SEQ ID NO: 613013 - DNA, 60 bp, Artificial; identical to SEQ ID NO: 479906
  Synthetic oligonucleotide

SEQ ID NO: 613014 - DNA, 60 bp, Artificial; identical to SEQ ID NO: 479907
  Synthetic oligonucleotide

SEQ ID NO: 613015 - DNA, 60 bp, Artificial; identical to SEQ ID NO: 479909
  Synthetic oligonucleotide

SEQ ID NO: 613016 - DNA, 56 bp, Artificial; identical to SEQ ID NO: 479910
  Synthetic oligonucleotide

SEQ ID NO: 613017 - DNA, 56 bp, Artificial; identical to SEQ ID NO: 479911
  Synthetic oligonucleotide

SEQ ID NO: 613018 - DNA, 57 bp, Artificial; identical to SEQ ID NO: 479920
  Synthetic oligonucleotide

SEQ ID NO: 613019 - DNA, 59 bp, Artificial; identical to SEQ ID NO: 479925
  Synthetic oligonucleotide

SEQ ID NO: 613020 - DNA, 60 bp, Artificial; identical to SEQ ID NO: 479933
  Synthetic oligonucleotide

SEQ ID NO: 613021 - DNA, 50 bp, Artificial; identical to SEQ ID NO: 479936
  Synthetic oligonucleotide

SEQ ID NO: 613022 - DNA, 59 bp, Artificial; identical to SEQ ID NO: 479944
  Synthetic oligonucleotide

SEQ ID NO: 613023 - DNA, 58 bp, Artificial; identical to SEQ ID NO: 479946
  Synthetic oligonucleotide

SEQ ID NO: 613024 - DNA, 56 bp, Artificial; identical to SEQ ID NO: 479948
  Synthetic oligonucleotide

SEQ ID NO: 613025 - DNA, 59 bp, Artificial; identical to SEQ ID NO: 479949
  Synthetic oligonucleotide

SEQ ID NO: 613026 - DNA, 55 bp, Artificial; identical to SEQ ID NO: 479950
  Synthetic oligonucleotide

SEQ ID NO: 613027 - DNA, 59 bp, Artificial; identical to SEQ ID NO: 479953
  Synthetic oligonucleotide

SEQ ID NO: 613028 - DNA, 60 bp, Artificial; identical to SEQ ID NO: 479956
  Synthetic oligonucleotide

SEQ ID NO: 613029 - DNA, 54 bp, Artificial; identical to SEQ ID NO: 479960
  Synthetic oligonucleotide

SEQ ID NO: 613030 - DNA, 52 bp, Artificial; identical to SEQ ID NO: 479961
  Synthetic oligonucleotide

SEQ ID NO: 613031 - DNA, 58 bp, Artificial; identical to SEQ ID NO: 479964
  Synthetic oligonucleotide

SEQ ID NO: 613032 - DNA, 60 bp, Artificial; identical to SEQ ID NO: 479971
  Synthetic oligonucleotide

SEQ ID NO: 613033 - DNA, 60 bp, Artificial; identical to SEQ ID NO: 479975
  Synthetic oligonucleotide

SEQ ID NO: 613034 - DNA, 60 bp, Artificial; identical to SEQ ID NO: 479976
  Synthetic oligonucleotide

SEQ ID NO: 613035 - DNA, 60 bp, Artificial; identical to SEQ ID NO: 479979
  Synthetic oligonucleotide

SEQ ID NO: 613036 - DNA, 55 bp, Artificial; identical to SEQ ID NO: 479980
  Synthetic oligonucleotide

SEQ ID NO: 613037 - DNA, 60 bp, Artificial; identical to SEQ ID NO: 479981
  Synthetic oligonucleotide

SEQ ID NO: 613038 - DNA, 55 bp, Artificial; identical to SEQ ID NO: 479982
  Synthetic oligonucleotide

SEQ ID NO: 613039 - DNA, 60 bp, Artificial; identical to SEQ ID NO: 479986
  Synthetic oligonucleotide

SEQ ID NO: 613040 - DNA, 60 bp, Artificial; identical to SEQ ID NO: 479990
  Synthetic oligonucleotide

SEQ ID NO: 613041 - DNA, 58 bp, Artificial; identical to SEQ ID NO: 479991
  Synthetic oligonucleotide

SEQ ID NO: 613042 - DNA, 60 bp, Artificial; identical to SEQ ID NO: 479992
  Synthetic oligonucleotide

SEQ ID NO: 613043 - DNA, 60 bp, Artificial; identical to SEQ ID NO: 479993
  Synthetic oligonucleotide

SEQ ID NO: 613044 - DNA, 52 bp, Artificial; identical to SEQ ID NO: 479995
  Synthetic oligonucleotide

SEQ ID NO: 613045 - DNA, 60 bp, Artificial; identical to SEQ ID NO: 479998
  Synthetic oligonucleotide

SEQ ID NO: 613046 - DNA, 60 bp, Artificial; identical to SEQ ID NO: 480000
  Synthetic oligonucleotide

SEQ ID NO: 613047 - DNA, 60 bp, Artificial; identical to SEQ ID NO: 480001
  Synthetic oligonucleotide

SEQ ID NO: 613048 - DNA, 60 bp, Artificial; identical to SEQ ID NO: 480003
  Synthetic oligonucleotide

SEQ ID NO: 613049 - DNA, 56 bp, Artificial; identical to SEQ ID NO: 480006
  Synthetic oligonucleotide

SEQ ID NO: 613050 - DNA, 55 bp, Artificial; identical to SEQ ID NO: 12831
  Synthetic oligonucleotide

SEQ ID NO: 613051 - DNA, 55 bp, Artificial; identical to SEQ ID NO: 480016
  Synthetic oligonucleotide

SEQ ID NO: 613052 - DNA, 50 bp, Artificial; identical to SEQ ID NO: 480017
  Synthetic oligonucleotide

SEQ ID NO: 613053 - DNA, 60 bp, Artificial; identical to SEQ ID NO: 480019
  Synthetic oligonucleotide

SEQ ID NO: 613054 - DNA, 60 bp, Artificial; identical to SEQ ID NO: 480022
  Synthetic oligonucleotide

SEQ ID NO: 613055 - DNA, 60 bp, Artificial; identical to SEQ ID NO: 480023
  Synthetic oligonucleotide

SEQ ID NO: 613056 - DNA, 54 bp, Artificial; identical to SEQ ID NO: 480025
  Synthetic oligonucleotide

SEQ ID NO: 613057 - DNA, 60 bp, Artificial; identical to SEQ ID NO: 10247
  Synthetic oligonucleotide

SEQ ID NO: 613058 - DNA, 59 bp, Artificial; identical to SEQ ID NO: 480027
  Synthetic oligonucleotide

SEQ ID NO: 613059 - DNA, 60 bp, Artificial; identical to SEQ ID NO: 480030
  Synthetic oligonucleotide

SEQ ID NO: 613060 - DNA, 56 bp, Artificial; identical to SEQ ID NO: 480031
  Synthetic oligonucleotide

SEQ ID NO: 613061 - DNA, 60 bp, Artificial; identical to SEQ ID NO: 480036
  Synthetic oligonucleotide

SEQ ID NO: 613062 - DNA, 60 bp, Artificial; identical to SEQ ID NO: 480038
  Synthetic oligonucleotide

SEQ ID NO: 613063 - DNA, 52 bp, Artificial; identical to SEQ ID NO: 480042
  Synthetic oligonucleotide

SEQ ID NO: 613064 - DNA, 54 bp, Artificial; identical to SEQ ID NO: 480043
  Synthetic oligonucleotide

SEQ ID NO: 613065 - DNA, 60 bp, Artificial; identical to SEQ ID NO: 480044
  Synthetic oligonucleotide

SEQ ID NO: 613066 - DNA, 57 bp, Artificial; identical to SEQ ID NO: 480048
  Synthetic oligonucleotide

SEQ ID NO: 613067 - DNA, 55 bp, Artificial; identical to SEQ ID NO: 480049
  Synthetic oligonucleotide

SEQ ID NO: 613068 - DNA, 60 bp, Artificial; identical to SEQ ID NO: 6246
  Synthetic oligonucleotide

SEQ ID NO: 613069 - DNA, 55 bp, Artificial; identical to SEQ ID NO: 480050
  Synthetic oligonucleotide

SEQ ID NO: 613070 - DNA, 55 bp, Artificial; identical to SEQ ID NO: 480051
  Synthetic oligonucleotide

SEQ ID NO: 613071 - DNA, 60 bp, Artificial; identical to SEQ ID NO: 480054
  Synthetic oligonucleotide

SEQ ID NO: 613072 - DNA, 60 bp, Artificial; identical to SEQ ID NO: 480055
  Synthetic oligonucleotide

SEQ ID NO: 613073 - DNA, 60 bp, Artificial; identical to SEQ ID NO: 480056
  Synthetic oligonucleotide

SEQ ID NO: 613074 - DNA, 52 bp, Artificial; identical to SEQ ID NO: 480058
  Synthetic oligonucleotide

SEQ ID NO: 613075 - DNA, 60 bp, Artificial; identical to SEQ ID NO: 480059
  Synthetic oligonucleotide

SEQ ID NO: 613076 - DNA, 60 bp, Artificial; identical to SEQ ID NO: 480061
  Synthetic oligonucleotide

SEQ ID NO: 613077 - DNA, 60 bp, Artificial; identical to SEQ ID NO: 480062
  Synthetic oligonucleotide

SEQ ID NO: 613078 - DNA, 60 bp, Artificial; identical to SEQ ID NO: 480066
  Synthetic oligonucleotide

SEQ ID NO: 613079 - DNA, 60 bp, Artificial; identical to SEQ ID NO: 480071
  Synthetic oligonucleotide

SEQ ID NO: 613080 - DNA, 51 bp, Artificial; identical to SEQ ID NO: 480073
  Synthetic oligonucleotide

SEQ ID NO: 613081 - DNA, 59 bp, Artificial; identical to SEQ ID NO: 480077
  Synthetic oligonucleotide

SEQ ID NO: 613082 - DNA, 59 bp, Artificial; identical to SEQ ID NO: 480078
  Synthetic oligonucleotide

SEQ ID NO: 613083 - DNA, 55 bp, Artificial; identical to SEQ ID NO: 480080
  Synthetic oligonucleotide

SEQ ID NO: 613084 - DNA, 60 bp, Artificial; identical to SEQ ID NO: 480081
  Synthetic oligonucleotide

SEQ ID NO: 613085 - DNA, 55 bp, Artificial; identical to SEQ ID NO: 480084
  Synthetic oligonucleotide

SEQ ID NO: 613086 - DNA, 55 bp, Artificial; identical to SEQ ID NO: 480088
  Synthetic oligonucleotide

SEQ ID NO: 613087 - DNA, 58 bp, Artificial; identical to SEQ ID NO: 480091
  Synthetic oligonucleotide

SEQ ID NO: 613088 - DNA, 55 bp, Artificial; identical to SEQ ID NO: 480097
  Synthetic oligonucleotide

SEQ ID NO: 613089 - DNA, 59 bp, Artificial; identical to SEQ ID NO: 480098
  Synthetic oligonucleotide

SEQ ID NO: 613090 - DNA, 56 bp, Artificial; identical to SEQ ID NO: 480102
  Synthetic oligonucleotide

SEQ ID NO: 613091 - DNA, 55 bp, Artificial; identical to SEQ ID NO: 480105
  Synthetic oligonucleotide

SEQ ID NO: 613092 - DNA, 52 bp, Artificial; identical to SEQ ID NO: 480110
  Synthetic oligonucleotide

SEQ ID NO: 613093 - DNA, 57 bp, Artificial; identical to SEQ ID NO: 480112
  Synthetic oligonucleotide

SEQ ID NO: 613094 - DNA, 55 bp, Artificial; identical to SEQ ID NO: 480113
  Synthetic oligonucleotide

SEQ ID NO: 613095 - DNA, 59 bp, Artificial; identical to SEQ ID NO: 480114
  Synthetic oligonucleotide

SEQ ID NO: 613096 - DNA, 55 bp, Artificial; identical to SEQ ID NO: 480121
  Synthetic oligonucleotide

SEQ ID NO: 613097 - DNA, 59 bp, Artificial; identical to SEQ ID NO: 480122
  Synthetic oligonucleotide

SEQ ID NO: 613098 - DNA, 55 bp, Artificial; identical to SEQ ID NO: 480124
  Synthetic oligonucleotide

SEQ ID NO: 613099 - DNA, 51 bp, Artificial; identical to SEQ ID NO: 480125
  Synthetic oligonucleotide

SEQ ID NO: 613100 - DNA, 55 bp, Artificial; identical to SEQ ID NO: 480127
  Synthetic oligonucleotide

SEQ ID NO: 613101 - DNA, 60 bp, Artificial; identical to SEQ ID NO: 480128
  Synthetic oligonucleotide

SEQ ID NO: 613102 - DNA, 60 bp, Artificial; identical to SEQ ID NO: 480129
  Synthetic oligonucleotide

SEQ ID NO: 613103 - DNA, 53 bp, Artificial; identical to SEQ ID NO: 480132
  Synthetic oligonucleotide

SEQ ID NO: 613104 - DNA, 57 bp, Artificial; identical to SEQ ID NO: 480133
  Synthetic oligonucleotide

SEQ ID NO: 613105 - DNA, 60 bp, Artificial; identical to SEQ ID NO: 480136
  Synthetic oligonucleotide

SEQ ID NO: 613106 - DNA, 55 bp, Artificial; identical to SEQ ID NO: 480137
  Synthetic oligonucleotide

SEQ ID NO: 613107 - DNA, 58 bp, Artificial; identical to SEQ ID NO: 480142
  Synthetic oligonucleotide

SEQ ID NO: 613108 - DNA, 54 bp, Artificial; identical to SEQ ID NO: 480143
  Synthetic oligonucleotide

SEQ ID NO: 613109 - DNA, 53 bp, Artificial; identical to SEQ ID NO: 480147
  Synthetic oligonucleotide

SEQ ID NO: 613110 - DNA, 60 bp, Artificial; identical to SEQ ID NO: 480148
  Synthetic oligonucleotide

SEQ ID NO: 613111 - DNA, 56 bp, Artificial; identical to SEQ ID NO: 480151
  Synthetic oligonucleotide

SEQ ID NO: 613112 - DNA, 50 bp, Artificial; identical to SEQ ID NO: 480152
  Synthetic oligonucleotide

SEQ ID NO: 613113 - DNA, 57 bp, Artificial; identical to SEQ ID NO: 480153
  Synthetic oligonucleotide

SEQ ID NO: 613114 - DNA, 60 bp, Artificial; identical to SEQ ID NO: 480154
  Synthetic oligonucleotide

SEQ ID NO: 613115 - DNA, 60 bp, Artificial; identical to SEQ ID NO: 480155
  Synthetic oligonucleotide

SEQ ID NO: 613116 - DNA, 50 bp, Artificial; identical to SEQ ID NO: 480156
  Synthetic oligonucleotide

SEQ ID NO: 613117 - DNA, 58 bp, Artificial; identical to SEQ ID NO: 480157
  Synthetic oligonucleotide

SEQ ID NO: 613118 - DNA, 55 bp, Artificial; identical to SEQ ID NO: 480158
  Synthetic oligonucleotide

SEQ ID NO: 613119 - DNA, 54 bp, Artificial; identical to SEQ ID NO: 480161
  Synthetic oligonucleotide

SEQ ID NO: 613120 - DNA, 51 bp, Artificial; identical to SEQ ID NO: 480162
  Synthetic oligonucleotide

SEQ ID NO: 613121 - DNA, 60 bp, Artificial; identical to SEQ ID NO: 480164
  Synthetic oligonucleotide

SEQ ID NO: 613122 - DNA, 53 bp, Artificial; identical to SEQ ID NO: 480165
  Synthetic oligonucleotide

SEQ ID NO: 613123 - DNA, 60 bp, Artificial; identical to SEQ ID NO: 480169
  Synthetic oligonucleotide

SEQ ID NO: 613124 - DNA, 60 bp, Artificial; identical to SEQ ID NO: 480171
  Synthetic oligonucleotide

SEQ ID NO: 613125 - DNA, 58 bp, Artificial; identical to SEQ ID NO: 480172
  Synthetic oligonucleotide

SEQ ID NO: 613126 - DNA, 55 bp, Artificial; identical to SEQ ID NO: 480173
  Synthetic oligonucleotide

SEQ ID NO: 613127 - DNA, 53 bp, Artificial; identical to SEQ ID NO: 480175
  Synthetic oligonucleotide

SEQ ID NO: 613128 - DNA, 49 bp, Artificial; identical to SEQ ID NO: 480176
  Synthetic oligonucleotide

SEQ ID NO: 613129 - DNA, 60 bp, Artificial; identical to SEQ ID NO: 480177
  Synthetic oligonucleotide

SEQ ID NO: 613130 - DNA, 57 bp, Artificial; identical to SEQ ID NO: 480181
  Synthetic oligonucleotide

SEQ ID NO: 613131 - DNA, 58 bp, Artificial; identical to SEQ ID NO: 480182
  Synthetic oligonucleotide

SEQ ID NO: 613132 - DNA, 55 bp, Artificial; identical to SEQ ID NO: 480184
  Synthetic oligonucleotide

SEQ ID NO: 613133 - DNA, 53 bp, Artificial; identical to SEQ ID NO: 480185
  Synthetic oligonucleotide

SEQ ID NO: 613134 - DNA, 53 bp, Artificial; identical to SEQ ID NO: 480186
  Synthetic oligonucleotide

SEQ ID NO: 613135 - DNA, 57 bp, Artificial; identical to SEQ ID NO: 480187
  Synthetic oligonucleotide

SEQ ID NO: 613136 - DNA, 58 bp, Artificial; identical to SEQ ID NO: 480188
  Synthetic oligonucleotide

SEQ ID NO: 613137 - DNA, 55 bp, Artificial; identical to SEQ ID NO: 480189
  Synthetic oligonucleotide

SEQ ID NO: 613138 - DNA, 59 bp, Artificial; identical to SEQ ID NO: 480190
  Synthetic oligonucleotide

SEQ ID NO: 613139 - DNA, 55 bp, Artificial; identical to SEQ ID NO: 480192
  Synthetic oligonucleotide

SEQ ID NO: 613140 - DNA, 60 bp, Artificial; identical to SEQ ID NO: 8414
  Synthetic oligonucleotide

SEQ ID NO: 613141 - DNA, 55 bp, Artificial; identical to SEQ ID NO: 480197
  Synthetic oligonucleotide

SEQ ID NO: 613142 - DNA, 55 bp, Artificial; identical to SEQ ID NO: 480198
  Synthetic oligonucleotide

SEQ ID NO: 613143 - DNA, 57 bp, Artificial; identical to SEQ ID NO: 480205
  Synthetic oligonucleotide

SEQ ID NO: 613144 - DNA, 52 bp, Artificial; identical to SEQ ID NO: 480209
  Synthetic oligonucleotide

SEQ ID NO: 613145 - DNA, 58 bp, Artificial; identical to SEQ ID NO: 480210
  Synthetic oligonucleotide

SEQ ID NO: 613146 - DNA, 54 bp, Artificial; identical to SEQ ID NO: 480212
  Synthetic oligonucleotide

SEQ ID NO: 613147 - DNA, 52 bp, Artificial; identical to SEQ ID NO: 480214
  Synthetic oligonucleotide

SEQ ID NO: 613148 - DNA, 53 bp, Artificial; identical to SEQ ID NO: 480216
  Synthetic oligonucleotide

SEQ ID NO: 613149 - DNA, 58 bp, Artificial; identical to SEQ ID NO: 480217
  Synthetic oligonucleotide

SEQ ID NO: 613150 - DNA, 60 bp, Artificial; identical to SEQ ID NO: 480218
  Synthetic oligonucleotide

SEQ ID NO: 613151 - DNA, 60 bp, Artificial; identical to SEQ ID NO: 480219
  Synthetic oligonucleotide

SEQ ID NO: 613152 - DNA, 55 bp, Artificial; identical to SEQ ID NO: 480220
  Synthetic oligonucleotide

SEQ ID NO: 613153 - DNA, 59 bp, Artificial; identical to SEQ ID NO: 480221
  Synthetic oligonucleotide

SEQ ID NO: 613154 - DNA, 56 bp, Artificial; identical to SEQ ID NO: 480224
  Synthetic oligonucleotide

SEQ ID NO: 613155 - DNA, 57 bp, Artificial; identical to SEQ ID NO: 480226
  Synthetic oligonucleotide

SEQ ID NO: 613156 - DNA, 55 bp, Artificial; identical to SEQ ID NO: 480228
  Synthetic oligonucleotide

SEQ ID NO: 613157 - DNA, 53 bp, Artificial; identical to SEQ ID NO: 480232
  Synthetic oligonucleotide

SEQ ID NO: 613158 - DNA, 60 bp, Artificial; identical to SEQ ID NO: 480233
  Synthetic oligonucleotide

SEQ ID NO: 613159 - DNA, 60 bp, Artificial; identical to SEQ ID NO: 15587
  Synthetic oligonucleotide

SEQ ID NO: 613160 - DNA, 56 bp, Artificial; identical to SEQ ID NO: 480236
  Synthetic oligonucleotide

SEQ ID NO: 613161 - DNA, 58 bp, Artificial; identical to SEQ ID NO: 480237
  Synthetic oligonucleotide

SEQ ID NO: 613162 - DNA, 59 bp, Artificial; identical to SEQ ID NO: 5770
  Synthetic oligonucleotide

SEQ ID NO: 613163 - DNA, 51 bp, Artificial; identical to SEQ ID NO: 480238
  Synthetic oligonucleotide

SEQ ID NO: 613164 - DNA, 55 bp, Artificial; identical to SEQ ID NO: 480240
  Synthetic oligonucleotide

SEQ ID NO: 613165 - DNA, 60 bp, Artificial; identical to SEQ ID NO: 6348
  Synthetic oligonucleotide

SEQ ID NO: 613166 - DNA, 54 bp, Artificial; identical to SEQ ID NO: 480245
  Synthetic oligonucleotide

SEQ ID NO: 613167 - DNA, 59 bp, Artificial; identical to SEQ ID NO: 480251
  Synthetic oligonucleotide

SEQ ID NO: 613168 - DNA, 59 bp, Artificial; identical to SEQ ID NO: 480252
  Synthetic oligonucleotide

SEQ ID NO: 613169 - DNA, 55 bp, Artificial; identical to SEQ ID NO: 480253
  Synthetic oligonucleotide

SEQ ID NO: 613170 - DNA, 58 bp, Artificial; identical to SEQ ID NO: 480255
  Synthetic oligonucleotide

SEQ ID NO: 613171 - DNA, 60 bp, Artificial; identical to SEQ ID NO: 480263
  Synthetic oligonucleotide

SEQ ID NO: 613172 - DNA, 60 bp, Artificial; identical to SEQ ID NO: 480266
  Synthetic oligonucleotide

SEQ ID NO: 613173 - DNA, 55 bp, Artificial; identical to SEQ ID NO: 480267
  Synthetic oligonucleotide

SEQ ID NO: 613174 - DNA, 60 bp, Artificial; identical to SEQ ID NO: 480270
  Synthetic oligonucleotide

SEQ ID NO: 613175 - DNA, 56 bp, Artificial; identical to SEQ ID NO: 480272
  Synthetic oligonucleotide

SEQ ID NO: 613176 - DNA, 60 bp, Artificial; identical to SEQ ID NO: 480275
  Synthetic oligonucleotide

SEQ ID NO: 613177 - DNA, 60 bp, Artificial; identical to SEQ ID NO: 480276
  Synthetic oligonucleotide

SEQ ID NO: 613178 - DNA, 55 bp, Artificial; identical to SEQ ID NO: 480280
  Synthetic oligonucleotide

SEQ ID NO: 613179 - DNA, 50 bp, Artificial; identical to SEQ ID NO: 480282
  Synthetic oligonucleotide

SEQ ID NO: 613180 - DNA, 55 bp, Artificial; identical to SEQ ID NO: 480286
  Synthetic oligonucleotide

SEQ ID NO: 613181 - DNA, 60 bp, Artificial; identical to SEQ ID NO: 480291
  Synthetic oligonucleotide

SEQ ID NO: 613182 - DNA, 57 bp, Artificial; identical to SEQ ID NO: 480292
  Synthetic oligonucleotide

SEQ ID NO: 613183 - DNA, 60 bp, Artificial; identical to SEQ ID NO: 480293
  Synthetic oligonucleotide

SEQ ID NO: 613184 - DNA, 60 bp, Artificial; identical to SEQ ID NO: 480299
  Synthetic oligonucleotide

SEQ ID NO: 613185 - DNA, 60 bp, Artificial; identical to SEQ ID NO: 480300
  Synthetic oligonucleotide

SEQ ID NO: 613186 - DNA, 58 bp, Artificial; identical to SEQ ID NO: 480302
  Synthetic oligonucleotide

SEQ ID NO: 613187 - DNA, 52 bp, Artificial; identical to SEQ ID NO: 480307
  Synthetic oligonucleotide

SEQ ID NO: 613188 - DNA, 52 bp, Artificial; identical to SEQ ID NO: 480310
  Synthetic oligonucleotide

SEQ ID NO: 613189 - DNA, 55 bp, Artificial; identical to SEQ ID NO: 480311
  Synthetic oligonucleotide

SEQ ID NO: 613190 - DNA, 60 bp, Artificial; identical to SEQ ID NO: 480319
  Synthetic oligonucleotide

SEQ ID NO: 613191 - DNA, 56 bp, Artificial; identical to SEQ ID NO: 480326
  Synthetic oligonucleotide

SEQ ID NO: 613192 - DNA, 52 bp, Artificial; identical to SEQ ID NO: 480328
  Synthetic oligonucleotide

SEQ ID NO: 613193 - DNA, 55 bp, Artificial; identical to SEQ ID NO: 480332
  Synthetic oligonucleotide

SEQ ID NO: 613194 - DNA, 55 bp, Artificial; identical to SEQ ID NO: 480334
  Synthetic oligonucleotide

SEQ ID NO: 613195 - DNA, 60 bp, Artificial; identical to SEQ ID NO: 480335
  Synthetic oligonucleotide

SEQ ID NO: 613196 - DNA, 52 bp, Artificial; identical to SEQ ID NO: 480338
  Synthetic oligonucleotide

SEQ ID NO: 613197 - DNA, 59 bp, Artificial; identical to SEQ ID NO: 480341
  Synthetic oligonucleotide

SEQ ID NO: 613198 - DNA, 54 bp, Artificial; identical to SEQ ID NO: 480343
  Synthetic oligonucleotide

SEQ ID NO: 613199 - DNA, 52 bp, Artificial; identical to SEQ ID NO: 480352
  Synthetic oligonucleotide

SEQ ID NO: 613200 - DNA, 59 bp, Artificial; identical to SEQ ID NO: 480357
  Synthetic oligonucleotide

SEQ ID NO: 613201 - DNA, 60 bp, Artificial; identical to SEQ ID NO: 480359
  Synthetic oligonucleotide

SEQ ID NO: 613202 - DNA, 53 bp, Artificial; identical to SEQ ID NO: 480361
  Synthetic oligonucleotide

SEQ ID NO: 613203 - DNA, 60 bp, Artificial; identical to SEQ ID NO: 480366
  Synthetic oligonucleotide

SEQ ID NO: 613204 - DNA, 56 bp, Artificial; identical to SEQ ID NO: 480371
  Synthetic oligonucleotide

SEQ ID NO: 613205 - DNA, 53 bp, Artificial; identical to SEQ ID NO: 480372
  Synthetic oligonucleotide

SEQ ID NO: 613206 - DNA, 54 bp, Artificial; identical to SEQ ID NO: 480373
  Synthetic oligonucleotide

SEQ ID NO: 613207 - DNA, 54 bp, Artificial; identical to SEQ ID NO: 480376
  Synthetic oligonucleotide

SEQ ID NO: 613208 - DNA, 55 bp, Artificial; identical to SEQ ID NO: 480377
  Synthetic oligonucleotide

SEQ ID NO: 613209 - DNA, 59 bp, Artificial; identical to SEQ ID NO: 480379
  Synthetic oligonucleotide

SEQ ID NO: 613210 - DNA, 57 bp, Artificial; identical to SEQ ID NO: 19443
  Synthetic oligonucleotide

SEQ ID NO: 613211 - DNA, 60 bp, Artificial; identical to SEQ ID NO: 480383
  Synthetic oligonucleotide

SEQ ID NO: 613212 - DNA, 59 bp, Artificial; identical to SEQ ID NO: 480387
  Synthetic oligonucleotide

SEQ ID NO: 613213 - DNA, 60 bp, Artificial; identical to SEQ ID NO: 480388
  Synthetic oligonucleotide

SEQ ID NO: 613214 - DNA, 58 bp, Artificial; identical to SEQ ID NO: 480389
  Synthetic oligonucleotide

SEQ ID NO: 613215 - DNA, 57 bp, Artificial; identical to SEQ ID NO: 480393
  Synthetic oligonucleotide

SEQ ID NO: 613216 - DNA, 51 bp, Artificial; identical to SEQ ID NO: 480396
  Synthetic oligonucleotide

SEQ ID NO: 613217 - DNA, 55 bp, Artificial; identical to SEQ ID NO: 480397
  Synthetic oligonucleotide

SEQ ID NO: 613218 - DNA, 60 bp, Artificial; identical to SEQ ID NO: 480399
  Synthetic oligonucleotide

SEQ ID NO: 613219 - DNA, 56 bp, Artificial; identical to SEQ ID NO: 480406
  Synthetic oligonucleotide

SEQ ID NO: 613220 - DNA, 58 bp, Artificial; identical to SEQ ID NO: 480407
  Synthetic oligonucleotide

SEQ ID NO: 613221 - DNA, 60 bp, Artificial; identical to SEQ ID NO: 480410
  Synthetic oligonucleotide

SEQ ID NO: 613222 - DNA, 53 bp, Artificial; identical to SEQ ID NO: 480413
  Synthetic oligonucleotide

SEQ ID NO: 613223 - DNA, 50 bp, Artificial; identical to SEQ ID NO: 480414
  Synthetic oligonucleotide

SEQ ID NO: 613224 - DNA, 55 bp, Artificial; identical to SEQ ID NO: 480417
  Synthetic oligonucleotide

SEQ ID NO: 613225 - DNA, 59 bp, Artificial; identical to SEQ ID NO: 480419
  Synthetic oligonucleotide

SEQ ID NO: 613226 - DNA, 50 bp, Artificial; identical to SEQ ID NO: 480423
  Synthetic oligonucleotide

SEQ ID NO: 613227 - DNA, 57 bp, Artificial; identical to SEQ ID NO: 480424
  Synthetic oligonucleotide

SEQ ID NO: 613228 - DNA, 60 bp, Artificial; identical to SEQ ID NO: 480425
  Synthetic oligonucleotide

SEQ ID NO: 613229 - DNA, 60 bp, Artificial; identical to SEQ ID NO: 480429
  Synthetic oligonucleotide

SEQ ID NO: 613230 - DNA, 55 bp, Artificial; identical to SEQ ID NO: 480432
  Synthetic oligonucleotide

SEQ ID NO: 613231 - DNA, 57 bp, Artificial; identical to SEQ ID NO: 480433
  Synthetic oligonucleotide

SEQ ID NO: 613232 - DNA, 60 bp, Artificial; identical to SEQ ID NO: 480436
  Synthetic oligonucleotide

SEQ ID NO: 613233 - DNA, 60 bp, Artificial; identical to SEQ ID NO: 480437
  Synthetic oligonucleotide

SEQ ID NO: 613234 - DNA, 51 bp, Artificial; identical to SEQ ID NO: 480443
  Synthetic oligonucleotide

SEQ ID NO: 613235 - DNA, 60 bp, Artificial; identical to SEQ ID NO: 11811
  Synthetic oligonucleotide

SEQ ID NO: 613236 - DNA, 59 bp, Artificial; identical to SEQ ID NO: 480452
  Synthetic oligonucleotide

SEQ ID NO: 613237 - DNA, 56 bp, Artificial; identical to SEQ ID NO: 480453
  Synthetic oligonucleotide

SEQ ID NO: 613238 - DNA, 60 bp, Artificial; identical to SEQ ID NO: 480455
  Synthetic oligonucleotide

SEQ ID NO: 613239 - DNA, 60 bp, Artificial; identical to SEQ ID NO: 480461
  Synthetic oligonucleotide

SEQ ID NO: 613240 - DNA, 55 bp, Artificial; identical to SEQ ID NO: 480463
  Synthetic oligonucleotide

SEQ ID NO: 613241 - DNA, 54 bp, Artificial; identical to SEQ ID NO: 480472
  Synthetic oligonucleotide

SEQ ID NO: 613242 - DNA, 55 bp, Artificial; identical to SEQ ID NO: 480473
  Synthetic oligonucleotide

SEQ ID NO: 613243 - DNA, 60 bp, Artificial; identical to SEQ ID NO: 480479
  Synthetic oligonucleotide

SEQ ID NO: 613244 - DNA, 55 bp, Artificial; identical to SEQ ID NO: 480480
  Synthetic oligonucleotide

SEQ ID NO: 613245 - DNA, 57 bp, Artificial; identical to SEQ ID NO: 480482
  Synthetic oligonucleotide

SEQ ID NO: 613246 - DNA, 55 bp, Artificial; identical to SEQ ID NO: 480484
  Synthetic oligonucleotide

SEQ ID NO: 613247 - DNA, 59 bp, Artificial; identical to SEQ ID NO: 480486
  Synthetic oligonucleotide

SEQ ID NO: 613248 - DNA, 60 bp, Artificial; identical to SEQ ID NO: 480490
  Synthetic oligonucleotide

SEQ ID NO: 613249 - DNA, 60 bp, Artificial; identical to SEQ ID NO: 480491
  Synthetic oligonucleotide

SEQ ID NO: 613250 - DNA, 55 bp, Artificial; identical to SEQ ID NO: 480492
  Synthetic oligonucleotide

SEQ ID NO: 613251 - DNA, 55 bp, Artificial; identical to SEQ ID NO: 480493
  Synthetic oligonucleotide

SEQ ID NO: 613252 - DNA, 60 bp, Artificial; identical to SEQ ID NO: 480494
  Synthetic oligonucleotide

SEQ ID NO: 613253 - DNA, 57 bp, Artificial; identical to SEQ ID NO: 480496
  Synthetic oligonucleotide

SEQ ID NO: 613254 - DNA, 55 bp, Artificial; identical to SEQ ID NO: 480497
  Synthetic oligonucleotide

SEQ ID NO: 613255 - DNA, 60 bp, Artificial; identical to SEQ ID NO: 480500
  Synthetic oligonucleotide

SEQ ID NO: 613256 - DNA, 60 bp, Artificial; identical to SEQ ID NO: 480501
  Synthetic oligonucleotide

SEQ ID NO: 613257 - DNA, 58 bp, Artificial; identical to SEQ ID NO: 480504
  Synthetic oligonucleotide

SEQ ID NO: 613258 - DNA, 55 bp, Artificial; identical to SEQ ID NO: 480508
  Synthetic oligonucleotide

SEQ ID NO: 613259 - DNA, 51 bp, Artificial; identical to SEQ ID NO: 480510
  Synthetic oligonucleotide

SEQ ID NO: 613260 - DNA, 56 bp, Artificial; identical to SEQ ID NO: 480518
  Synthetic oligonucleotide

SEQ ID NO: 613261 - DNA, 52 bp, Artificial; identical to SEQ ID NO: 480519
  Synthetic oligonucleotide

SEQ ID NO: 613262 - DNA, 60 bp, Artificial; identical to SEQ ID NO: 10803
  Synthetic oligonucleotide

SEQ ID NO: 613263 - DNA, 60 bp, Artificial; identical to SEQ ID NO: 480525
  Synthetic oligonucleotide

SEQ ID NO: 613264 - DNA, 59 bp, Artificial; identical to SEQ ID NO: 480529
  Synthetic oligonucleotide

SEQ ID NO: 613265 - DNA, 51 bp, Artificial; identical to SEQ ID NO: 480530
  Synthetic oligonucleotide

SEQ ID NO: 613266 - DNA, 58 bp, Artificial; identical to SEQ ID NO: 480531
  Synthetic oligonucleotide

SEQ ID NO: 613267 - DNA, 60 bp, Artificial; identical to SEQ ID NO: 480532
  Synthetic oligonucleotide

SEQ ID NO: 613268 - DNA, 58 bp, Artificial; identical to SEQ ID NO: 480533
  Synthetic oligonucleotide

SEQ ID NO: 613269 - DNA, 54 bp, Artificial; identical to SEQ ID NO: 480537
  Synthetic oligonucleotide

SEQ ID NO: 613270 - DNA, 52 bp, Artificial; identical to SEQ ID NO: 480538
  Synthetic oligonucleotide

SEQ ID NO: 613271 - DNA, 60 bp, Artificial; identical to SEQ ID NO: 12066
  Synthetic oligonucleotide

SEQ ID NO: 613272 - DNA, 60 bp, Artificial; identical to SEQ ID NO: 480543
  Synthetic oligonucleotide

SEQ ID NO: 613273 - DNA, 57 bp, Artificial; identical to SEQ ID NO: 480545
  Synthetic oligonucleotide

SEQ ID NO: 613274 - DNA, 55 bp, Artificial; identical to SEQ ID NO: 480546
  Synthetic oligonucleotide

SEQ ID NO: 613275 - DNA, 56 bp, Artificial; identical to SEQ ID NO: 480548
  Synthetic oligonucleotide

SEQ ID NO: 613276 - DNA, 55 bp, Artificial; identical to SEQ ID NO: 480549
  Synthetic oligonucleotide

SEQ ID NO: 613277 - DNA, 55 bp, Artificial; identical to SEQ ID NO: 480550
  Synthetic oligonucleotide

SEQ ID NO: 613278 - DNA, 60 bp, Artificial; identical to SEQ ID NO: 480552
  Synthetic oligonucleotide

SEQ ID NO: 613279 - DNA, 60 bp, Artificial; identical to SEQ ID NO: 480555
  Synthetic oligonucleotide

SEQ ID NO: 613280 - DNA, 55 bp, Artificial; identical to SEQ ID NO: 480556
  Synthetic oligonucleotide

SEQ ID NO: 613281 - DNA, 53 bp, Artificial; identical to SEQ ID NO: 480559
  Synthetic oligonucleotide

SEQ ID NO: 613282 - DNA, 54 bp, Artificial; identical to SEQ ID NO: 480560
  Synthetic oligonucleotide

SEQ ID NO: 613283 - DNA, 58 bp, Artificial; identical to SEQ ID NO: 480561
  Synthetic oligonucleotide

SEQ ID NO: 613284 - DNA, 60 bp, Artificial; identical to SEQ ID NO: 480562
  Synthetic oligonucleotide

SEQ ID NO: 613285 - DNA, 60 bp, Artificial; identical to SEQ ID NO: 480564
  Synthetic oligonucleotide

SEQ ID NO: 613286 - DNA, 59 bp, Artificial; identical to SEQ ID NO: 480565
  Synthetic oligonucleotide

SEQ ID NO: 613287 - DNA, 58 bp, Artificial; identical to SEQ ID NO: 480566
  Synthetic oligonucleotide

SEQ ID NO: 613288 - DNA, 60 bp, Artificial; identical to SEQ ID NO: 480567
  Synthetic oligonucleotide

SEQ ID NO: 613289 - DNA, 59 bp, Artificial; identical to SEQ ID NO: 480572
  Synthetic oligonucleotide

SEQ ID NO: 613290 - DNA, 59 bp, Artificial; identical to SEQ ID NO: 480573
  Synthetic oligonucleotide

SEQ ID NO: 613291 - DNA, 60 bp, Artificial; identical to SEQ ID NO: 480579
  Synthetic oligonucleotide

SEQ ID NO: 613292 - DNA, 60 bp, Artificial; identical to SEQ ID NO: 480580
  Synthetic oligonucleotide

SEQ ID NO: 613293 - DNA, 55 bp, Artificial; identical to SEQ ID NO: 480584
  Synthetic oligonucleotide

SEQ ID NO: 613294 - DNA, 55 bp, Artificial; identical to SEQ ID NO: 480585
  Synthetic oligonucleotide

SEQ ID NO: 613295 - DNA, 58 bp, Artificial; identical to SEQ ID NO: 480589
  Synthetic oligonucleotide

SEQ ID NO: 613296 - DNA, 55 bp, Artificial; identical to SEQ ID NO: 480599
  Synthetic oligonucleotide

SEQ ID NO: 613297 - DNA, 55 bp, Artificial; identical to SEQ ID NO: 480600
  Synthetic oligonucleotide

SEQ ID NO: 613298 - DNA, 55 bp, Artificial; identical to SEQ ID NO: 480605
  Synthetic oligonucleotide

SEQ ID NO: 613299 - DNA, 60 bp, Artificial; identical to SEQ ID NO: 480608
  Synthetic oligonucleotide

SEQ ID NO: 613300 - DNA, 60 bp, Artificial; identical to SEQ ID NO: 480609
  Synthetic oligonucleotide

SEQ ID NO: 613301 - DNA, 60 bp, Artificial; identical to SEQ ID NO: 480611
  Synthetic oligonucleotide

SEQ ID NO: 613302 - DNA, 50 bp, Artificial; identical to SEQ ID NO: 480621
  Synthetic oligonucleotide

SEQ ID NO: 613303 - DNA, 58 bp, Artificial; identical to SEQ ID NO: 480622
  Synthetic oligonucleotide

SEQ ID NO: 613304 - DNA, 60 bp, Artificial; identical to SEQ ID NO: 480624
  Synthetic oligonucleotide

SEQ ID NO: 613305 - DNA, 60 bp, Artificial; identical to SEQ ID NO: 480632
  Synthetic oligonucleotide

SEQ ID NO: 613306 - DNA, 60 bp, Artificial; identical to SEQ ID NO: 480633
  Synthetic oligonucleotide

SEQ ID NO: 613307 - DNA, 60 bp, Artificial; identical to SEQ ID NO: 480637
  Synthetic oligonucleotide

SEQ ID NO: 613308 - DNA, 51 bp, Artificial; identical to SEQ ID NO: 480638
  Synthetic oligonucleotide

SEQ ID NO: 613309 - DNA, 51 bp, Artificial; identical to SEQ ID NO: 480639
  Synthetic oligonucleotide

SEQ ID NO: 613310 - DNA, 58 bp, Artificial; identical to SEQ ID NO: 480640
  Synthetic oligonucleotide

SEQ ID NO: 613311 - DNA, 59 bp, Artificial; identical to SEQ ID NO: 480643
  Synthetic oligonucleotide

SEQ ID NO: 613312 - DNA, 59 bp, Artificial; identical to SEQ ID NO: 480644
  Synthetic oligonucleotide

SEQ ID NO: 613313 - DNA, 60 bp, Artificial; identical to SEQ ID NO: 480650
  Synthetic oligonucleotide

SEQ ID NO: 613314 - DNA, 59 bp, Artificial; identical to SEQ ID NO: 480651
  Synthetic oligonucleotide

SEQ ID NO: 613315 - DNA, 60 bp, Artificial; identical to SEQ ID NO: 480654
  Synthetic oligonucleotide

SEQ ID NO: 613316 - DNA, 55 bp, Artificial; identical to SEQ ID NO: 480655
  Synthetic oligonucleotide

SEQ ID NO: 613317 - DNA, 55 bp, Artificial; identical to SEQ ID NO: 480663
  Synthetic oligonucleotide

SEQ ID NO: 613318 - DNA, 55 bp, Artificial; identical to SEQ ID NO: 480664
  Synthetic oligonucleotide

SEQ ID NO: 613319 - DNA, 53 bp, Artificial; identical to SEQ ID NO: 480667
  Synthetic oligonucleotide

SEQ ID NO: 613320 - DNA, 55 bp, Artificial; identical to SEQ ID NO: 480670
  Synthetic oligonucleotide

SEQ ID NO: 613321 - DNA, 57 bp, Artificial; identical to SEQ ID NO: 480672
  Synthetic oligonucleotide

SEQ ID NO: 613322 - DNA, 60 bp, Artificial; identical to SEQ ID NO: 480673
  Synthetic oligonucleotide

SEQ ID NO: 613323 - DNA, 60 bp, Artificial; identical to SEQ ID NO: 480674
  Synthetic oligonucleotide

SEQ ID NO: 613324 - DNA, 53 bp, Artificial; identical to SEQ ID NO: 480678
  Synthetic oligonucleotide

SEQ ID NO: 613325 - DNA, 57 bp, Artificial; identical to SEQ ID NO: 480679
  Synthetic oligonucleotide

SEQ ID NO: 613326 - DNA, 56 bp, Artificial; identical to SEQ ID NO: 480681
  Synthetic oligonucleotide

SEQ ID NO: 613327 - DNA, 60 bp, Artificial; identical to SEQ ID NO: 480687
  Synthetic oligonucleotide

SEQ ID NO: 613328 - DNA, 60 bp, Artificial; identical to SEQ ID NO: 480688
  Synthetic oligonucleotide

SEQ ID NO: 613329 - DNA, 60 bp, Artificial; identical to SEQ ID NO: 480689
  Synthetic oligonucleotide

SEQ ID NO: 613330 - DNA, 58 bp, Artificial; identical to SEQ ID NO: 480690
  Synthetic oligonucleotide

SEQ ID NO: 613331 - DNA, 60 bp, Artificial; identical to SEQ ID NO: 480691
  Synthetic oligonucleotide

SEQ ID NO: 613332 - DNA, 55 bp, Artificial; identical to SEQ ID NO: 480692
  Synthetic oligonucleotide

SEQ ID NO: 613333 - DNA, 55 bp, Artificial; identical to SEQ ID NO: 480695
  Synthetic oligonucleotide

SEQ ID NO: 613334 - DNA, 56 bp, Artificial; identical to SEQ ID NO: 480698
  Synthetic oligonucleotide

SEQ ID NO: 613335 - DNA, 55 bp, Artificial; identical to SEQ ID NO: 480702
  Synthetic oligonucleotide

SEQ ID NO: 613336 - DNA, 60 bp, Artificial; identical to SEQ ID NO: 480708
  Synthetic oligonucleotide

SEQ ID NO: 613337 - DNA, 55 bp, Artificial; identical to SEQ ID NO: 480709
  Synthetic oligonucleotide

SEQ ID NO: 613338 - DNA, 60 bp, Artificial; identical to SEQ ID NO: 480712
  Synthetic oligonucleotide

SEQ ID NO: 613339 - DNA, 55 bp, Artificial; identical to SEQ ID NO: 480713
  Synthetic oligonucleotide

SEQ ID NO: 613340 - DNA, 55 bp, Artificial; identical to SEQ ID NO: 480716
  Synthetic oligonucleotide

SEQ ID NO: 613341 - DNA, 60 bp, Artificial; identical to SEQ ID NO: 480718
  Synthetic oligonucleotide

SEQ ID NO: 613342 - DNA, 59 bp, Artificial; identical to SEQ ID NO: 480721
  Synthetic oligonucleotide

SEQ ID NO: 613343 - DNA, 58 bp, Artificial; identical to SEQ ID NO: 480724
  Synthetic oligonucleotide

SEQ ID NO: 613344 - DNA, 59 bp, Artificial; identical to SEQ ID NO: 480728
  Synthetic oligonucleotide

SEQ ID NO: 613345 - DNA, 60 bp, Artificial; identical to SEQ ID NO: 480733
  Synthetic oligonucleotide

SEQ ID NO: 613346 - DNA, 52 bp, Artificial; identical to SEQ ID NO: 8730
  Synthetic oligonucleotide

SEQ ID NO: 613347 - DNA, 60 bp, Artificial; identical to SEQ ID NO: 480735
  Synthetic oligonucleotide

SEQ ID NO: 613348 - DNA, 55 bp, Artificial; identical to SEQ ID NO: 480738
  Synthetic oligonucleotide

SEQ ID NO: 613349 - DNA, 56 bp, Artificial; identical to SEQ ID NO: 480739
  Synthetic oligonucleotide

SEQ ID NO: 613350 - DNA, 52 bp, Artificial; identical to SEQ ID NO: 480741
  Synthetic oligonucleotide

SEQ ID NO: 613351 - DNA, 56 bp, Artificial; identical to SEQ ID NO: 480748
  Synthetic oligonucleotide

SEQ ID NO: 613352 - DNA, 60 bp, Artificial; identical to SEQ ID NO: 480750
  Synthetic oligonucleotide

SEQ ID NO: 613353 - DNA, 52 bp, Artificial; identical to SEQ ID NO: 480751
  Synthetic oligonucleotide

SEQ ID NO: 613354 - DNA, 57 bp, Artificial; identical to SEQ ID NO: 480753
  Synthetic oligonucleotide

SEQ ID NO: 613355 - DNA, 55 bp, Artificial; identical to SEQ ID NO: 480754
  Synthetic oligonucleotide

SEQ ID NO: 613356 - DNA, 56 bp, Artificial; identical to SEQ ID NO: 480755
  Synthetic oligonucleotide

SEQ ID NO: 613357 - DNA, 59 bp, Artificial; identical to SEQ ID NO: 480756
  Synthetic oligonucleotide

SEQ ID NO: 613358 - DNA, 60 bp, Artificial; identical to SEQ ID NO: 480758
  Synthetic oligonucleotide

SEQ ID NO: 613359 - DNA, 60 bp, Artificial; identical to SEQ ID NO: 10437
  Synthetic oligonucleotide

SEQ ID NO: 613360 - DNA, 55 bp, Artificial; identical to SEQ ID NO: 480759
  Synthetic oligonucleotide

SEQ ID NO: 613361 - DNA, 60 bp, Artificial; identical to SEQ ID NO: 480763
  Synthetic oligonucleotide

SEQ ID NO: 613362 - DNA, 56 bp, Artificial; identical to SEQ ID NO: 480765
  Synthetic oligonucleotide

SEQ ID NO: 613363 - DNA, 50 bp, Artificial; identical to SEQ ID NO: 480768
  Synthetic oligonucleotide

SEQ ID NO: 613364 - DNA, 56 bp, Artificial; identical to SEQ ID NO: 480770
  Synthetic oligonucleotide

SEQ ID NO: 613365 - DNA, 60 bp, Artificial; identical to SEQ ID NO: 6234
  Synthetic oligonucleotide

SEQ ID NO: 613366 - DNA, 60 bp, Artificial; identical to SEQ ID NO: 480775
  Synthetic oligonucleotide

SEQ ID NO: 613367 - DNA, 54 bp, Artificial; identical to SEQ ID NO: 480777
  Synthetic oligonucleotide

SEQ ID NO: 613368 - DNA, 59 bp, Artificial; identical to SEQ ID NO: 480782
  Synthetic oligonucleotide

SEQ ID NO: 613369 - DNA, 55 bp, Artificial; identical to SEQ ID NO: 480785
  Synthetic oligonucleotide

SEQ ID NO: 613370 - DNA, 52 bp, Artificial; identical to SEQ ID NO: 480787
  Synthetic oligonucleotide

SEQ ID NO: 613371 - DNA, 56 bp, Artificial; identical to SEQ ID NO: 480793
  Synthetic oligonucleotide

SEQ ID NO: 613372 - DNA, 51 bp, Artificial; identical to SEQ ID NO: 480794
  Synthetic oligonucleotide

SEQ ID NO: 613373 - DNA, 60 bp, Artificial; identical to SEQ ID NO: 480796
  Synthetic oligonucleotide

SEQ ID NO: 613374 - DNA, 55 bp, Artificial; identical to SEQ ID NO: 480798
  Synthetic oligonucleotide

SEQ ID NO: 613375 - DNA, 57 bp, Artificial; identical to SEQ ID NO: 480799
  Synthetic oligonucleotide

SEQ ID NO: 613376 - DNA, 55 bp, Artificial; identical to SEQ ID NO: 480804
  Synthetic oligonucleotide

SEQ ID NO: 613377 - DNA, 60 bp, Artificial; identical to SEQ ID NO: 480805
  Synthetic oligonucleotide

SEQ ID NO: 613378 - DNA, 59 bp, Artificial; identical to SEQ ID NO: 480808
  Synthetic oligonucleotide

SEQ ID NO: 613379 - DNA, 57 bp, Artificial; identical to SEQ ID NO: 480810
  Synthetic oligonucleotide

SEQ ID NO: 613380 - DNA, 60 bp, Artificial; identical to SEQ ID NO: 480811
  Synthetic oligonucleotide

SEQ ID NO: 613381 - DNA, 60 bp, Artificial; identical to SEQ ID NO: 7479
  Synthetic oligonucleotide

SEQ ID NO: 613382 - DNA, 60 bp, Artificial; identical to SEQ ID NO: 480816
  Synthetic oligonucleotide

SEQ ID NO: 613383 - DNA, 60 bp, Artificial; identical to SEQ ID NO: 480817
  Synthetic oligonucleotide

SEQ ID NO: 613384 - DNA, 52 bp, Artificial; identical to SEQ ID NO: 480818
  Synthetic oligonucleotide

SEQ ID NO: 613385 - DNA, 59 bp, Artificial; identical to SEQ ID NO: 480821
  Synthetic oligonucleotide

SEQ ID NO: 613386 - DNA, 55 bp, Artificial; identical to SEQ ID NO: 480826
  Synthetic oligonucleotide

SEQ ID NO: 613387 - DNA, 50 bp, Artificial; identical to SEQ ID NO: 480828
  Synthetic oligonucleotide

SEQ ID NO: 613388 - DNA, 55 bp, Artificial; identical to SEQ ID NO: 480829
  Synthetic oligonucleotide

SEQ ID NO: 613389 - DNA, 53 bp, Artificial; identical to SEQ ID NO: 480830
  Synthetic oligonucleotide

SEQ ID NO: 613390 - DNA, 58 bp, Artificial; identical to SEQ ID NO: 480831
  Synthetic oligonucleotide

SEQ ID NO: 613391 - DNA, 52 bp, Artificial; identical to SEQ ID NO: 480838
  Synthetic oligonucleotide

SEQ ID NO: 613392 - DNA, 60 bp, Artificial; identical to SEQ ID NO: 480839
  Synthetic oligonucleotide

SEQ ID NO: 613393 - DNA, 56 bp, Artificial; identical to SEQ ID NO: 480840
  Synthetic oligonucleotide

SEQ ID NO: 613394 - DNA, 60 bp, Artificial; identical to SEQ ID NO: 5795
  Synthetic oligonucleotide

SEQ ID NO: 613395 - DNA, 53 bp, Artificial; identical to SEQ ID NO: 480844
  Synthetic oligonucleotide

SEQ ID NO: 613396 - DNA, 57 bp, Artificial; identical to SEQ ID NO: 480848
  Synthetic oligonucleotide

SEQ ID NO: 613397 - DNA, 53 bp, Artificial; identical to SEQ ID NO: 480852
  Synthetic oligonucleotide

SEQ ID NO: 613398 - DNA, 58 bp, Artificial; identical to SEQ ID NO: 480853
  Synthetic oligonucleotide

SEQ ID NO: 613399 - DNA, 60 bp, Artificial; identical to SEQ ID NO: 480859
  Synthetic oligonucleotide

SEQ ID NO: 613400 - DNA, 55 bp, Artificial; identical to SEQ ID NO: 480860
  Synthetic oligonucleotide

SEQ ID NO: 613401 - DNA, 57 bp, Artificial; identical to SEQ ID NO: 480861
  Synthetic oligonucleotide

SEQ ID NO: 613402 - DNA, 60 bp, Artificial; identical to SEQ ID NO: 480872
  Synthetic oligonucleotide

SEQ ID NO: 613403 - DNA, 55 bp, Artificial; identical to SEQ ID NO: 480873
  Synthetic oligonucleotide

SEQ ID NO: 613404 - DNA, 54 bp, Artificial; identical to SEQ ID NO: 480874
  Synthetic oligonucleotide

SEQ ID NO: 613405 - DNA, 60 bp, Artificial; identical to SEQ ID NO: 480883
  Synthetic oligonucleotide

SEQ ID NO: 613406 - DNA, 60 bp, Artificial; identical to SEQ ID NO: 480887
  Synthetic oligonucleotide

SEQ ID NO: 613407 - DNA, 52 bp, Artificial; identical to SEQ ID NO: 480891
  Synthetic oligonucleotide

SEQ ID NO: 613408 - DNA, 54 bp, Artificial; identical to SEQ ID NO: 480892
  Synthetic oligonucleotide

SEQ ID NO: 613409 - DNA, 57 bp, Artificial; identical to SEQ ID NO: 480893
  Synthetic oligonucleotide

SEQ ID NO: 613410 - DNA, 54 bp, Artificial; identical to SEQ ID NO: 480896
  Synthetic oligonucleotide

SEQ ID NO: 613411 - DNA, 60 bp, Artificial; identical to SEQ ID NO: 480901
  Synthetic oligonucleotide

SEQ ID NO: 613412 - DNA, 59 bp, Artificial; identical to SEQ ID NO: 480902
  Synthetic oligonucleotide

SEQ ID NO: 613413 - DNA, 59 bp, Artificial; identical to SEQ ID NO: 480905
  Synthetic oligonucleotide

SEQ ID NO: 613414 - DNA, 59 bp, Artificial; identical to SEQ ID NO: 480906
  Synthetic oligonucleotide

SEQ ID NO: 613415 - DNA, 53 bp, Artificial; identical to SEQ ID NO: 480907
  Synthetic oligonucleotide

SEQ ID NO: 613416 - DNA, 59 bp, Artificial; identical to SEQ ID NO: 480908
  Synthetic oligonucleotide

SEQ ID NO: 613417 - DNA, 55 bp, Artificial; identical to SEQ ID NO: 480909
  Synthetic oligonucleotide

SEQ ID NO: 613418 - DNA, 51 bp, Artificial; identical to SEQ ID NO: 480910
  Synthetic oligonucleotide

SEQ ID NO: 613419 - DNA, 59 bp, Artificial; identical to SEQ ID NO: 480911
  Synthetic oligonucleotide

SEQ ID NO: 613420 - DNA, 60 bp, Artificial; identical to SEQ ID NO: 480913
  Synthetic oligonucleotide

SEQ ID NO: 613421 - DNA, 60 bp, Artificial; identical to SEQ ID NO: 480915
  Synthetic oligonucleotide

SEQ ID NO: 613422 - DNA, 60 bp, Artificial; identical to SEQ ID NO: 480916
  Synthetic oligonucleotide

SEQ ID NO: 613423 - DNA, 54 bp, Artificial; identical to SEQ ID NO: 480919
  Synthetic oligonucleotide

SEQ ID NO: 613424 - DNA, 55 bp, Artificial; identical to SEQ ID NO: 480921
  Synthetic oligonucleotide

SEQ ID NO: 613425 - DNA, 51 bp, Artificial; identical to SEQ ID NO: 480924
  Synthetic oligonucleotide

SEQ ID NO: 613426 - DNA, 60 bp, Artificial; identical to SEQ ID NO: 480925
  Synthetic oligonucleotide

SEQ ID NO: 613427 - DNA, 57 bp, Artificial; identical to SEQ ID NO: 480928
  Synthetic oligonucleotide

SEQ ID NO: 613428 - DNA, 60 bp, Artificial; identical to SEQ ID NO: 480930
  Synthetic oligonucleotide

SEQ ID NO: 613429 - DNA, 59 bp, Artificial; identical to SEQ ID NO: 480931
  Synthetic oligonucleotide

SEQ ID NO: 613430 - DNA, 59 bp, Artificial; identical to SEQ ID NO: 480932
  Synthetic oligonucleotide

SEQ ID NO: 613431 - DNA, 57 bp, Artificial; identical to SEQ ID NO: 480933
  Synthetic oligonucleotide

SEQ ID NO: 613432 - DNA, 59 bp, Artificial; identical to SEQ ID NO: 480934
  Synthetic oligonucleotide

SEQ ID NO: 613433 - DNA, 55 bp, Artificial; identical to SEQ ID NO: 480935
  Synthetic oligonucleotide

SEQ ID NO: 613434 - DNA, 55 bp, Artificial; identical to SEQ ID NO: 480936
  Synthetic oligonucleotide

SEQ ID NO: 613435 - DNA, 58 bp, Artificial; identical to SEQ ID NO: 480937
  Synthetic oligonucleotide

SEQ ID NO: 613436 - DNA, 59 bp, Artificial; identical to SEQ ID NO: 480940
  Synthetic oligonucleotide

SEQ ID NO: 613437 - DNA, 53 bp, Artificial; identical to SEQ ID NO: 480941
  Synthetic oligonucleotide

SEQ ID NO: 613438 - DNA, 53 bp, Artificial; identical to SEQ ID NO: 480942
  Synthetic oligonucleotide

SEQ ID NO: 613439 - DNA, 60 bp, Artificial; identical to SEQ ID NO: 480943
  Synthetic oligonucleotide

SEQ ID NO: 613440 - DNA, 58 bp, Artificial; identical to SEQ ID NO: 480944
  Synthetic oligonucleotide

SEQ ID NO: 613441 - DNA, 55 bp, Artificial; identical to SEQ ID NO: 480945
  Synthetic oligonucleotide

SEQ ID NO: 613442 - DNA, 60 bp, Artificial; identical to SEQ ID NO: 480946
  Synthetic oligonucleotide

SEQ ID NO: 613443 - DNA, 55 bp, Artificial; identical to SEQ ID NO: 480948
  Synthetic oligonucleotide

SEQ ID NO: 613444 - DNA, 60 bp, Artificial; identical to SEQ ID NO: 480951
  Synthetic oligonucleotide

SEQ ID NO: 613445 - DNA, 60 bp, Artificial; identical to SEQ ID NO: 480953
  Synthetic oligonucleotide

SEQ ID NO: 613446 - DNA, 60 bp, Artificial; identical to SEQ ID NO: 480956
  Synthetic oligonucleotide

SEQ ID NO: 613447 - DNA, 51 bp, Artificial; identical to SEQ ID NO: 480960
  Synthetic oligonucleotide

SEQ ID NO: 613448 - DNA, 52 bp, Artificial; identical to SEQ ID NO: 480964
  Synthetic oligonucleotide

SEQ ID NO: 613449 - DNA, 60 bp, Artificial; identical to SEQ ID NO: 480967
  Synthetic oligonucleotide

SEQ ID NO: 613450 - DNA, 60 bp, Artificial; identical to SEQ ID NO: 480968
  Synthetic oligonucleotide

SEQ ID NO: 613451 - DNA, 50 bp, Artificial; identical to SEQ ID NO: 480969
  Synthetic oligonucleotide

SEQ ID NO: 613452 - DNA, 54 bp, Artificial; identical to SEQ ID NO: 480970
  Synthetic oligonucleotide

SEQ ID NO: 613453 - DNA, 60 bp, Artificial; identical to SEQ ID NO: 480973
  Synthetic oligonucleotide

SEQ ID NO: 613454 - DNA, 54 bp, Artificial; identical to SEQ ID NO: 480976
  Synthetic oligonucleotide

SEQ ID NO: 613455 - DNA, 60 bp, Artificial; identical to SEQ ID NO: 480977
  Synthetic oligonucleotide

SEQ ID NO: 613456 - DNA, 60 bp, Artificial; identical to SEQ ID NO: 480978
  Synthetic oligonucleotide

SEQ ID NO: 613457 - DNA, 57 bp, Artificial; identical to SEQ ID NO: 480981
  Synthetic oligonucleotide

SEQ ID NO: 613458 - DNA, 55 bp, Artificial; identical to SEQ ID NO: 480992
  Synthetic oligonucleotide

SEQ ID NO: 613459 - DNA, 60 bp, Artificial; identical to SEQ ID NO: 480993
  Synthetic oligonucleotide

SEQ ID NO: 613460 - DNA, 53 bp, Artificial; identical to SEQ ID NO: 480999
  Synthetic oligonucleotide

SEQ ID NO: 613461 - DNA, 53 bp, Artificial; identical to SEQ ID NO: 481003
  Synthetic oligonucleotide

SEQ ID NO: 613462 - DNA, 58 bp, Artificial; identical to SEQ ID NO: 481004
  Synthetic oligonucleotide

SEQ ID NO: 613463 - DNA, 55 bp, Artificial; identical to SEQ ID NO: 481005
  Synthetic oligonucleotide

SEQ ID NO: 613464 - DNA, 60 bp, Artificial; identical to SEQ ID NO: 481006
  Synthetic oligonucleotide

SEQ ID NO: 613465 - DNA, 59 bp, Artificial; identical to SEQ ID NO: 481007
  Synthetic oligonucleotide

SEQ ID NO: 613466 - DNA, 55 bp, Artificial; identical to SEQ ID NO: 481009
  Synthetic oligonucleotide

SEQ ID NO: 613467 - DNA, 50 bp, Artificial; identical to SEQ ID NO: 481010
  Synthetic oligonucleotide

SEQ ID NO: 613468 - DNA, 60 bp, Artificial; identical to SEQ ID NO: 481011
  Synthetic oligonucleotide

SEQ ID NO: 613469 - DNA, 60 bp, Artificial; identical to SEQ ID NO: 481012
  Synthetic oligonucleotide

SEQ ID NO: 613470 - DNA, 59 bp, Artificial; identical to SEQ ID NO: 481013
  Synthetic oligonucleotide

SEQ ID NO: 613471 - DNA, 57 bp, Artificial; identical to SEQ ID NO: 481014
  Synthetic oligonucleotide

SEQ ID NO: 613472 - DNA, 55 bp, Artificial; identical to SEQ ID NO: 481015
  Synthetic oligonucleotide

SEQ ID NO: 613473 - DNA, 58 bp, Artificial; identical to SEQ ID NO: 481017
  Synthetic oligonucleotide

SEQ ID NO: 613474 - DNA, 55 bp, Artificial; identical to SEQ ID NO: 481018
  Synthetic oligonucleotide

SEQ ID NO: 613475 - DNA, 58 bp, Artificial; identical to SEQ ID NO: 481028
  Synthetic oligonucleotide

SEQ ID NO: 613476 - DNA, 55 bp, Artificial; identical to SEQ ID NO: 481030
  Synthetic oligonucleotide

SEQ ID NO: 613477 - DNA, 58 bp, Artificial; identical to SEQ ID NO: 481031
  Synthetic oligonucleotide

SEQ ID NO: 613478 - DNA, 60 bp, Artificial; identical to SEQ ID NO: 481032
  Synthetic oligonucleotide

SEQ ID NO: 613479 - DNA, 60 bp, Artificial; identical to SEQ ID NO: 481033
  Synthetic oligonucleotide

SEQ ID NO: 613480 - DNA, 60 bp, Artificial; identical to SEQ ID NO: 481038
  Synthetic oligonucleotide

SEQ ID NO: 613481 - DNA, 60 bp, Artificial; identical to SEQ ID NO: 481042
  Synthetic oligonucleotide

SEQ ID NO: 613482 - DNA, 58 bp, Artificial; identical to SEQ ID NO: 481043
  Synthetic oligonucleotide

SEQ ID NO: 613483 - DNA, 58 bp, Artificial; identical to SEQ ID NO: 481048
  Synthetic oligonucleotide

SEQ ID NO: 613484 - DNA, 57 bp, Artificial; identical to SEQ ID NO: 481049
  Synthetic oligonucleotide

SEQ ID NO: 613485 - DNA, 57 bp, Artificial; identical to SEQ ID NO: 481050
  Synthetic oligonucleotide

SEQ ID NO: 613486 - DNA, 55 bp, Artificial; identical to SEQ ID NO: 481051
  Synthetic oligonucleotide

SEQ ID NO: 613487 - DNA, 54 bp, Artificial; identical to SEQ ID NO: 481052
  Synthetic oligonucleotide

SEQ ID NO: 613488 - DNA, 60 bp, Artificial; identical to SEQ ID NO: 481054
  Synthetic oligonucleotide

SEQ ID NO: 613489 - DNA, 58 bp, Artificial; identical to SEQ ID NO: 481058
  Synthetic oligonucleotide

SEQ ID NO: 613490 - DNA, 56 bp, Artificial; identical to SEQ ID NO: 481059
  Synthetic oligonucleotide

SEQ ID NO: 613491 - DNA, 60 bp, Artificial; identical to SEQ ID NO: 481065
  Synthetic oligonucleotide

SEQ ID NO: 613492 - DNA, 60 bp, Artificial; identical to SEQ ID NO: 481066
  Synthetic oligonucleotide

SEQ ID NO: 613493 - DNA, 60 bp, Artificial; identical to SEQ ID NO: 481068
  Synthetic oligonucleotide

SEQ ID NO: 613494 - DNA, 60 bp, Artificial; identical to SEQ ID NO: 481069
  Synthetic oligonucleotide

SEQ ID NO: 613495 - DNA, 60 bp, Artificial; identical to SEQ ID NO: 481070
  Synthetic oligonucleotide

SEQ ID NO: 613496 - DNA, 59 bp, Artificial; identical to SEQ ID NO: 481073
  Synthetic oligonucleotide

SEQ ID NO: 613497 - DNA, 54 bp, Artificial; identical to SEQ ID NO: 481077
  Synthetic oligonucleotide

SEQ ID NO: 613498 - DNA, 55 bp, Artificial; identical to SEQ ID NO: 481080
  Synthetic oligonucleotide

SEQ ID NO: 613499 - DNA, 55 bp, Artificial; identical to SEQ ID NO: 481081
  Synthetic oligonucleotide

SEQ ID NO: 613500 - DNA, 57 bp, Artificial; identical to SEQ ID NO: 481082
  Synthetic oligonucleotide

SEQ ID NO: 613501 - DNA, 52 bp, Artificial; identical to SEQ ID NO: 481086
  Synthetic oligonucleotide

SEQ ID NO: 613502 - DNA, 60 bp, Artificial; identical to SEQ ID NO: 481087
  Synthetic oligonucleotide

SEQ ID NO: 613503 - DNA, 60 bp, Artificial; identical to SEQ ID NO: 481090
  Synthetic oligonucleotide

SEQ ID NO: 613504 - DNA, 54 bp, Artificial; identical to SEQ ID NO: 481092
  Synthetic oligonucleotide

SEQ ID NO: 613505 - DNA, 56 bp, Artificial; identical to SEQ ID NO: 11550
  Synthetic oligonucleotide

SEQ ID NO: 613506 - DNA, 60 bp, Artificial; identical to SEQ ID NO: 481103
  Synthetic oligonucleotide

SEQ ID NO: 613507 - DNA, 50 bp, Artificial; identical to SEQ ID NO: 481109
  Synthetic oligonucleotide

SEQ ID NO: 613508 - DNA, 58 bp, Artificial; identical to SEQ ID NO: 481110
  Synthetic oligonucleotide

SEQ ID NO: 613509 - DNA, 55 bp, Artificial; identical to SEQ ID NO: 481113
  Synthetic oligonucleotide

SEQ ID NO: 613510 - DNA, 52 bp, Artificial; identical to SEQ ID NO: 481115
  Synthetic oligonucleotide

SEQ ID NO: 613511 - DNA, 54 bp, Artificial; identical to SEQ ID NO: 481116
  Synthetic oligonucleotide

SEQ ID NO: 613512 - DNA, 57 bp, Artificial; identical to SEQ ID NO: 481119
  Synthetic oligonucleotide

SEQ ID NO: 613513 - DNA, 55 bp, Artificial; identical to SEQ ID NO: 481120
  Synthetic oligonucleotide

SEQ ID NO: 613514 - DNA, 59 bp, Artificial; identical to SEQ ID NO: 481121
  Synthetic oligonucleotide

SEQ ID NO: 613515 - DNA, 54 bp, Artificial; identical to SEQ ID NO: 481122
  Synthetic oligonucleotide

SEQ ID NO: 613516 - DNA, 54 bp, Artificial; identical to SEQ ID NO: 481123
  Synthetic oligonucleotide

SEQ ID NO: 613517 - DNA, 58 bp, Artificial; identical to SEQ ID NO: 481124
  Synthetic oligonucleotide

SEQ ID NO: 613518 - DNA, 60 bp, Artificial; identical to SEQ ID NO: 481126
  Synthetic oligonucleotide

SEQ ID NO: 613519 - DNA, 52 bp, Artificial; identical to SEQ ID NO: 481129
  Synthetic oligonucleotide

SEQ ID NO: 613520 - DNA, 55 bp, Artificial; identical to SEQ ID NO: 481131
  Synthetic oligonucleotide

SEQ ID NO: 613521 - DNA, 55 bp, Artificial; identical to SEQ ID NO: 481132
  Synthetic oligonucleotide

SEQ ID NO: 613522 - DNA, 60 bp, Artificial; identical to SEQ ID NO: 481134
  Synthetic oligonucleotide

SEQ ID NO: 613523 - DNA, 60 bp, Artificial; identical to SEQ ID NO: 8023
  Synthetic oligonucleotide

SEQ ID NO: 613524 - DNA, 55 bp, Artificial; identical to SEQ ID NO: 481135
  Synthetic oligonucleotide

SEQ ID NO: 613525 - DNA, 60 bp, Artificial; identical to SEQ ID NO: 481139
  Synthetic oligonucleotide

SEQ ID NO: 613526 - DNA, 60 bp, Artificial; identical to SEQ ID NO: 481141
  Synthetic oligonucleotide

SEQ ID NO: 613527 - DNA, 60 bp, Artificial; identical to SEQ ID NO: 481143
  Synthetic oligonucleotide

SEQ ID NO: 613528 - DNA, 52 bp, Artificial; identical to SEQ ID NO: 481144
  Synthetic oligonucleotide

SEQ ID NO: 613529 - DNA, 60 bp, Artificial; identical to SEQ ID NO: 481145
  Synthetic oligonucleotide

SEQ ID NO: 613530 - DNA, 60 bp, Artificial; identical to SEQ ID NO: 481146
  Synthetic oligonucleotide

SEQ ID NO: 613531 - DNA, 60 bp, Artificial; identical to SEQ ID NO: 481150
  Synthetic oligonucleotide

SEQ ID NO: 613532 - DNA, 60 bp, Artificial; identical to SEQ ID NO: 481152
  Synthetic oligonucleotide

SEQ ID NO: 613533 - DNA, 55 bp, Artificial; identical to SEQ ID NO: 481156
  Synthetic oligonucleotide

SEQ ID NO: 613534 - DNA, 60 bp, Artificial; identical to SEQ ID NO: 481164
  Synthetic oligonucleotide

SEQ ID NO: 613535 - DNA, 60 bp, Artificial; identical to SEQ ID NO: 481166
  Synthetic oligonucleotide

SEQ ID NO: 613536 - DNA, 60 bp, Artificial; identical to SEQ ID NO: 481167
  Synthetic oligonucleotide

SEQ ID NO: 613537 - DNA, 59 bp, Artificial; identical to SEQ ID NO: 481171
  Synthetic oligonucleotide

SEQ ID NO: 613538 - DNA, 60 bp, Artificial; identical to SEQ ID NO: 481174
  Synthetic oligonucleotide

SEQ ID NO: 613539 - DNA, 58 bp, Artificial; identical to SEQ ID NO: 481175
  Synthetic oligonucleotide

SEQ ID NO: 613540 - DNA, 51 bp, Artificial; identical to SEQ ID NO: 481178
  Synthetic oligonucleotide

SEQ ID NO: 613541 - DNA, 58 bp, Artificial; identical to SEQ ID NO: 481181
  Synthetic oligonucleotide

SEQ ID NO: 613542 - DNA, 60 bp, Artificial; identical to SEQ ID NO: 7753
  Synthetic oligonucleotide

SEQ ID NO: 613543 - DNA, 60 bp, Artificial; identical to SEQ ID NO: 481183
  Synthetic oligonucleotide

SEQ ID NO: 613544 - DNA, 59 bp, Artificial; identical to SEQ ID NO: 17983
  Synthetic oligonucleotide

SEQ ID NO: 613545 - DNA, 56 bp, Artificial; identical to SEQ ID NO: 481188
  Synthetic oligonucleotide

SEQ ID NO: 613546 - DNA, 54 bp, Artificial; identical to SEQ ID NO: 481189
  Synthetic oligonucleotide

SEQ ID NO: 613547 - DNA, 60 bp, Artificial; identical to SEQ ID NO: 481194
  Synthetic oligonucleotide

SEQ ID NO: 613548 - DNA, 60 bp, Artificial; identical to SEQ ID NO: 481197
  Synthetic oligonucleotide

SEQ ID NO: 613549 - DNA, 51 bp, Artificial; identical to SEQ ID NO: 481198
  Synthetic oligonucleotide

SEQ ID NO: 613550 - DNA, 57 bp, Artificial; identical to SEQ ID NO: 481202
  Synthetic oligonucleotide

SEQ ID NO: 613551 - DNA, 58 bp, Artificial; identical to SEQ ID NO: 481211
  Synthetic oligonucleotide

SEQ ID NO: 613552 - DNA, 57 bp, Artificial; identical to SEQ ID NO: 481213
  Synthetic oligonucleotide

SEQ ID NO: 613553 - DNA, 60 bp, Artificial; identical to SEQ ID NO: 481214
  Synthetic oligonucleotide

SEQ ID NO: 613554 - DNA, 59 bp, Artificial; identical to SEQ ID NO: 481216
  Synthetic oligonucleotide

SEQ ID NO: 613555 - DNA, 56 bp, Artificial; identical to SEQ ID NO: 20498
  Synthetic oligonucleotide

SEQ ID NO: 613556 - DNA, 52 bp, Artificial; identical to SEQ ID NO: 481217
  Synthetic oligonucleotide

SEQ ID NO: 613557 - DNA, 54 bp, Artificial; identical to SEQ ID NO: 481227
  Synthetic oligonucleotide

SEQ ID NO: 613558 - DNA, 60 bp, Artificial; identical to SEQ ID NO: 481231
  Synthetic oligonucleotide

SEQ ID NO: 613559 - DNA, 55 bp, Artificial; identical to SEQ ID NO: 481232
  Synthetic oligonucleotide

SEQ ID NO: 613560 - DNA, 56 bp, Artificial; identical to SEQ ID NO: 481234
  Synthetic oligonucleotide

SEQ ID NO: 613561 - DNA, 58 bp, Artificial; identical to SEQ ID NO: 481236
  Synthetic oligonucleotide

SEQ ID NO: 613562 - DNA, 60 bp, Artificial; identical to SEQ ID NO: 481239
  Synthetic oligonucleotide

SEQ ID NO: 613563 - DNA, 59 bp, Artificial; identical to SEQ ID NO: 481241
  Synthetic oligonucleotide

SEQ ID NO: 613564 - DNA, 54 bp, Artificial; identical to SEQ ID NO: 481242
  Synthetic oligonucleotide

SEQ ID NO: 613565 - DNA, 58 bp, Artificial; identical to SEQ ID NO: 481243
  Synthetic oligonucleotide

SEQ ID NO: 613566 - DNA, 52 bp, Artificial; identical to SEQ ID NO: 481244
  Synthetic oligonucleotide

SEQ ID NO: 613567 - DNA, 55 bp, Artificial; identical to SEQ ID NO: 481247
  Synthetic oligonucleotide

SEQ ID NO: 613568 - DNA, 55 bp, Artificial; identical to SEQ ID NO: 481248
  Synthetic oligonucleotide

SEQ ID NO: 613569 - DNA, 59 bp, Artificial; identical to SEQ ID NO: 481249
  Synthetic oligonucleotide

SEQ ID NO: 613570 - DNA, 57 bp, Artificial; identical to SEQ ID NO: 481250
  Synthetic oligonucleotide

SEQ ID NO: 613571 - DNA, 60 bp, Artificial; identical to SEQ ID NO: 481251
  Synthetic oligonucleotide

SEQ ID NO: 613572 - DNA, 52 bp, Artificial; identical to SEQ ID NO: 481252
  Synthetic oligonucleotide

SEQ ID NO: 613573 - DNA, 56 bp, Artificial; identical to SEQ ID NO: 481254
  Synthetic oligonucleotide

SEQ ID NO: 613574 - DNA, 60 bp, Artificial; identical to SEQ ID NO: 481255
  Synthetic oligonucleotide

SEQ ID NO: 613575 - DNA, 52 bp, Artificial; identical to SEQ ID NO: 481256
  Synthetic oligonucleotide

SEQ ID NO: 613576 - DNA, 60 bp, Artificial; identical to SEQ ID NO: 481257
  Synthetic oligonucleotide

SEQ ID NO: 613577 - DNA, 58 bp, Artificial; identical to SEQ ID NO: 481258
  Synthetic oligonucleotide

SEQ ID NO: 613578 - DNA, 57 bp, Artificial; identical to SEQ ID NO: 481259
  Synthetic oligonucleotide

SEQ ID NO: 613579 - DNA, 54 bp, Artificial; identical to SEQ ID NO: 481262
  Synthetic oligonucleotide

SEQ ID NO: 613580 - DNA, 60 bp, Artificial; identical to SEQ ID NO: 481263
  Synthetic oligonucleotide

SEQ ID NO: 613581 - DNA, 57 bp, Artificial; identical to SEQ ID NO: 16687
  Synthetic oligonucleotide

SEQ ID NO: 613582 - DNA, 60 bp, Artificial; identical to SEQ ID NO: 481266
  Synthetic oligonucleotide

SEQ ID NO: 613583 - DNA, 51 bp, Artificial; identical to SEQ ID NO: 7454
  Synthetic oligonucleotide

SEQ ID NO: 613584 - DNA, 59 bp, Artificial; identical to SEQ ID NO: 481270
  Synthetic oligonucleotide

SEQ ID NO: 613585 - DNA, 60 bp, Artificial; identical to SEQ ID NO: 481271
  Synthetic oligonucleotide

SEQ ID NO: 613586 - DNA, 55 bp, Artificial; identical to SEQ ID NO: 481273
  Synthetic oligonucleotide

SEQ ID NO: 613587 - DNA, 60 bp, Artificial; identical to SEQ ID NO: 481275
  Synthetic oligonucleotide

SEQ ID NO: 613588 - DNA, 60 bp, Artificial; identical to SEQ ID NO: 481276
  Synthetic oligonucleotide

SEQ ID NO: 613589 - DNA, 59 bp, Artificial; identical to SEQ ID NO: 481277
  Synthetic oligonucleotide

SEQ ID NO: 613590 - DNA, 58 bp, Artificial; identical to SEQ ID NO: 481278
  Synthetic oligonucleotide

SEQ ID NO: 613591 - DNA, 53 bp, Artificial; identical to SEQ ID NO: 481282
  Synthetic oligonucleotide

SEQ ID NO: 613592 - DNA, 52 bp, Artificial; identical to SEQ ID NO: 481288
  Synthetic oligonucleotide

SEQ ID NO: 613593 - DNA, 60 bp, Artificial; identical to SEQ ID NO: 481296
  Synthetic oligonucleotide

SEQ ID NO: 613594 - DNA, 59 bp, Artificial; identical to SEQ ID NO: 481300
  Synthetic oligonucleotide

SEQ ID NO: 613595 - DNA, 55 bp, Artificial; identical to SEQ ID NO: 481301
  Synthetic oligonucleotide

SEQ ID NO: 613596 - DNA, 56 bp, Artificial; identical to SEQ ID NO: 481302
  Synthetic oligonucleotide

SEQ ID NO: 613597 - DNA, 59 bp, Artificial; identical to SEQ ID NO: 481303
  Synthetic oligonucleotide

SEQ ID NO: 613598 - DNA, 55 bp, Artificial; identical to SEQ ID NO: 481304
  Synthetic oligonucleotide

SEQ ID NO: 613599 - DNA, 55 bp, Artificial; identical to SEQ ID NO: 481306
  Synthetic oligonucleotide

SEQ ID NO: 613600 - DNA, 60 bp, Artificial; identical to SEQ ID NO: 481308
  Synthetic oligonucleotide

SEQ ID NO: 613601 - DNA, 59 bp, Artificial; identical to SEQ ID NO: 481313
  Synthetic oligonucleotide

SEQ ID NO: 613602 - DNA, 60 bp, Artificial; identical to SEQ ID NO: 481315
  Synthetic oligonucleotide

SEQ ID NO: 613603 - DNA, 60 bp, Artificial; identical to SEQ ID NO: 481317
  Synthetic oligonucleotide

SEQ ID NO: 613604 - DNA, 60 bp, Artificial; identical to SEQ ID NO: 481319
  Synthetic oligonucleotide

SEQ ID NO: 613605 - DNA, 60 bp, Artificial; identical to SEQ ID NO: 481324
  Synthetic oligonucleotide

SEQ ID NO: 613606 - DNA, 60 bp, Artificial; identical to SEQ ID NO: 481325
  Synthetic oligonucleotide

SEQ ID NO: 613607 - DNA, 56 bp, Artificial; identical to SEQ ID NO: 481328
  Synthetic oligonucleotide

SEQ ID NO: 613608 - DNA, 59 bp, Artificial; identical to SEQ ID NO: 481329
  Synthetic oligonucleotide

SEQ ID NO: 613609 - DNA, 60 bp, Artificial; identical to SEQ ID NO: 481330
  Synthetic oligonucleotide

SEQ ID NO: 613610 - DNA, 57 bp, Artificial; identical to SEQ ID NO: 481331
  Synthetic oligonucleotide

SEQ ID NO: 613611 - DNA, 60 bp, Artificial; identical to SEQ ID NO: 481332
  Synthetic oligonucleotide

SEQ ID NO: 613612 - DNA, 60 bp, Artificial; identical to SEQ ID NO: 481333
  Synthetic oligonucleotide

SEQ ID NO: 613613 - DNA, 60 bp, Artificial; identical to SEQ ID NO: 481334
  Synthetic oligonucleotide

SEQ ID NO: 613614 - DNA, 55 bp, Artificial; identical to SEQ ID NO: 481343
  Synthetic oligonucleotide

SEQ ID NO: 613615 - DNA, 60 bp, Artificial; identical to SEQ ID NO: 481344
  Synthetic oligonucleotide

SEQ ID NO: 613616 - DNA, 55 bp, Artificial; identical to SEQ ID NO: 481345
  Synthetic oligonucleotide

SEQ ID NO: 613617 - DNA, 54 bp, Artificial; identical to SEQ ID NO: 481348
  Synthetic oligonucleotide

SEQ ID NO: 613618 - DNA, 59 bp, Artificial; identical to SEQ ID NO: 481351
  Synthetic oligonucleotide

SEQ ID NO: 613619 - DNA, 60 bp, Artificial; identical to SEQ ID NO: 481354
  Synthetic oligonucleotide

SEQ ID NO: 613620 - DNA, 50 bp, Artificial; identical to SEQ ID NO: 481355
  Synthetic oligonucleotide

SEQ ID NO: 613621 - DNA, 55 bp, Artificial; identical to SEQ ID NO: 481357
  Synthetic oligonucleotide

SEQ ID NO: 613622 - DNA, 55 bp, Artificial; identical to SEQ ID NO: 8165
  Synthetic oligonucleotide

SEQ ID NO: 613623 - DNA, 59 bp, Artificial; identical to SEQ ID NO: 481361
  Synthetic oligonucleotide

SEQ ID NO: 613624 - DNA, 53 bp, Artificial; identical to SEQ ID NO: 481364
  Synthetic oligonucleotide

SEQ ID NO: 613625 - DNA, 57 bp, Artificial; identical to SEQ ID NO: 481366
  Synthetic oligonucleotide

SEQ ID NO: 613626 - DNA, 56 bp, Artificial; identical to SEQ ID NO: 481368
  Synthetic oligonucleotide

SEQ ID NO: 613627 - DNA, 52 bp, Artificial; identical to SEQ ID NO: 481369
  Synthetic oligonucleotide

SEQ ID NO: 613628 - DNA, 50 bp, Artificial; identical to SEQ ID NO: 481370
  Synthetic oligonucleotide

SEQ ID NO: 613629 - DNA, 60 bp, Artificial; identical to SEQ ID NO: 481371
  Synthetic oligonucleotide

SEQ ID NO: 613630 - DNA, 60 bp, Artificial; identical to SEQ ID NO: 481372
  Synthetic oligonucleotide

SEQ ID NO: 613631 - DNA, 52 bp, Artificial; identical to SEQ ID NO: 481375
  Synthetic oligonucleotide

SEQ ID NO: 613632 - DNA, 55 bp, Artificial; identical to SEQ ID NO: 481376
  Synthetic oligonucleotide

SEQ ID NO: 613633 - DNA, 60 bp, Artificial; identical to SEQ ID NO: 481385
  Synthetic oligonucleotide

SEQ ID NO: 613634 - DNA, 57 bp, Artificial; identical to SEQ ID NO: 481386
  Synthetic oligonucleotide

SEQ ID NO: 613635 - DNA, 57 bp, Artificial; identical to SEQ ID NO: 481387
  Synthetic oligonucleotide

SEQ ID NO: 613636 - DNA, 55 bp, Artificial; identical to SEQ ID NO: 481388
  Synthetic oligonucleotide

SEQ ID NO: 613637 - DNA, 58 bp, Artificial; identical to SEQ ID NO: 481391
  Synthetic oligonucleotide

SEQ ID NO: 613638 - DNA, 58 bp, Artificial; identical to SEQ ID NO: 481394
  Synthetic oligonucleotide

SEQ ID NO: 613639 - DNA, 60 bp, Artificial; identical to SEQ ID NO: 481395
  Synthetic oligonucleotide

SEQ ID NO: 613640 - DNA, 56 bp, Artificial; identical to SEQ ID NO: 481400
  Synthetic oligonucleotide

SEQ ID NO: 613641 - DNA, 60 bp, Artificial; identical to SEQ ID NO: 481407
  Synthetic oligonucleotide

SEQ ID NO: 613642 - DNA, 60 bp, Artificial; identical to SEQ ID NO: 481412
  Synthetic oligonucleotide

SEQ ID NO: 613643 - DNA, 58 bp, Artificial; identical to SEQ ID NO: 481413
  Synthetic oligonucleotide

SEQ ID NO: 613644 - DNA, 55 bp, Artificial; identical to SEQ ID NO: 481414
  Synthetic oligonucleotide

SEQ ID NO: 613645 - DNA, 52 bp, Artificial; identical to SEQ ID NO: 481416
  Synthetic oligonucleotide

SEQ ID NO: 613646 - DNA, 60 bp, Artificial; identical to SEQ ID NO: 481417
  Synthetic oligonucleotide

SEQ ID NO: 613647 - DNA, 55 bp, Artificial; identical to SEQ ID NO: 481418
  Synthetic oligonucleotide

SEQ ID NO: 613648 - DNA, 55 bp, Artificial; identical to SEQ ID NO: 481419
  Synthetic oligonucleotide

SEQ ID NO: 613649 - DNA, 55 bp, Artificial; identical to SEQ ID NO: 481428
  Synthetic oligonucleotide

SEQ ID NO: 613650 - DNA, 58 bp, Artificial; identical to SEQ ID NO: 481429
  Synthetic oligonucleotide

SEQ ID NO: 613651 - DNA, 51 bp, Artificial; identical to SEQ ID NO: 481433
  Synthetic oligonucleotide

SEQ ID NO: 613652 - DNA, 60 bp, Artificial; identical to SEQ ID NO: 481435
  Synthetic oligonucleotide

SEQ ID NO: 613653 - DNA, 58 bp, Artificial; identical to SEQ ID NO: 481439
  Synthetic oligonucleotide

SEQ ID NO: 613654 - DNA, 59 bp, Artificial; identical to SEQ ID NO: 481440
  Synthetic oligonucleotide

SEQ ID NO: 613655 - DNA, 55 bp, Artificial; identical to SEQ ID NO: 17206
  Synthetic oligonucleotide

SEQ ID NO: 613656 - DNA, 55 bp, Artificial; identical to SEQ ID NO: 481442
  Synthetic oligonucleotide

SEQ ID NO: 613657 - DNA, 60 bp, Artificial; identical to SEQ ID NO: 481443
  Synthetic oligonucleotide

SEQ ID NO: 613658 - DNA, 58 bp, Artificial; identical to SEQ ID NO: 481446
  Synthetic oligonucleotide

SEQ ID NO: 613659 - DNA, 60 bp, Artificial; identical to SEQ ID NO: 481449
  Synthetic oligonucleotide

SEQ ID NO: 613660 - DNA, 60 bp, Artificial; identical to SEQ ID NO: 481451
  Synthetic oligonucleotide

SEQ ID NO: 613661 - DNA, 60 bp, Artificial; identical to SEQ ID NO: 481453
  Synthetic oligonucleotide

SEQ ID NO: 613662 - DNA, 60 bp, Artificial; identical to SEQ ID NO: 9009
  Synthetic oligonucleotide

SEQ ID NO: 613663 - DNA, 60 bp, Artificial; identical to SEQ ID NO: 481462
  Synthetic oligonucleotide

SEQ ID NO: 613664 - DNA, 54 bp, Artificial; identical to SEQ ID NO: 481468
  Synthetic oligonucleotide

SEQ ID NO: 613665 - DNA, 55 bp, Artificial; identical to SEQ ID NO: 481469
  Synthetic oligonucleotide

SEQ ID NO: 613666 - DNA, 51 bp, Artificial; identical to SEQ ID NO: 481471
  Synthetic oligonucleotide

SEQ ID NO: 613667 - DNA, 53 bp, Artificial; identical to SEQ ID NO: 481474
  Synthetic oligonucleotide

SEQ ID NO: 613668 - DNA, 60 bp, Artificial; identical to SEQ ID NO: 481475
  Synthetic oligonucleotide

SEQ ID NO: 613669 - DNA, 60 bp, Artificial; identical to SEQ ID NO: 481479
  Synthetic oligonucleotide

SEQ ID NO: 613670 - DNA, 55 bp, Artificial; identical to SEQ ID NO: 481483
  Synthetic oligonucleotide

SEQ ID NO: 613671 - DNA, 60 bp, Artificial; identical to SEQ ID NO: 481484
  Synthetic oligonucleotide

SEQ ID NO: 613672 - DNA, 50 bp, Artificial; identical to SEQ ID NO: 481485
  Synthetic oligonucleotide

SEQ ID NO: 613673 - DNA, 60 bp, Artificial; identical to SEQ ID NO: 481489
  Synthetic oligonucleotide

SEQ ID NO: 613674 - DNA, 58 bp, Artificial; identical to SEQ ID NO: 20436
  Synthetic oligonucleotide

SEQ ID NO: 613675 - DNA, 54 bp, Artificial; identical to SEQ ID NO: 481493
  Synthetic oligonucleotide

SEQ ID NO: 613676 - DNA, 60 bp, Artificial; identical to SEQ ID NO: 481494
  Synthetic oligonucleotide

SEQ ID NO: 613677 - DNA, 59 bp, Artificial; identical to SEQ ID NO: 481495
  Synthetic oligonucleotide

SEQ ID NO: 613678 - DNA, 60 bp, Artificial; identical to SEQ ID NO: 481502
  Synthetic oligonucleotide

SEQ ID NO: 613679 - DNA, 52 bp, Artificial; identical to SEQ ID NO: 481506
  Synthetic oligonucleotide

SEQ ID NO: 613680 - DNA, 59 bp, Artificial; identical to SEQ ID NO: 481508
  Synthetic oligonucleotide

SEQ ID NO: 613681 - DNA, 60 bp, Artificial; identical to SEQ ID NO: 481513
  Synthetic oligonucleotide

SEQ ID NO: 613682 - DNA, 59 bp, Artificial; identical to SEQ ID NO: 481516
  Synthetic oligonucleotide

SEQ ID NO: 613683 - DNA, 53 bp, Artificial; identical to SEQ ID NO: 481517
  Synthetic oligonucleotide

SEQ ID NO: 613684 - DNA, 55 bp, Artificial; identical to SEQ ID NO: 481519
  Synthetic oligonucleotide

SEQ ID NO: 613685 - DNA, 60 bp, Artificial; identical to SEQ ID NO: 481520
  Synthetic oligonucleotide

SEQ ID NO: 613686 - DNA, 56 bp, Artificial; identical to SEQ ID NO: 17232
  Synthetic oligonucleotide

SEQ ID NO: 613687 - DNA, 58 bp, Artificial; identical to SEQ ID NO: 481522
  Synthetic oligonucleotide

SEQ ID NO: 613688 - DNA, 55 bp, Artificial; identical to SEQ ID NO: 481527
  Synthetic oligonucleotide

SEQ ID NO: 613689 - DNA, 55 bp, Artificial; identical to SEQ ID NO: 481529
  Synthetic oligonucleotide

SEQ ID NO: 613690 - DNA, 60 bp, Artificial; identical to SEQ ID NO: 481531
  Synthetic oligonucleotide

SEQ ID NO: 613691 - DNA, 60 bp, Artificial; identical to SEQ ID NO: 481532
  Synthetic oligonucleotide

SEQ ID NO: 613692 - DNA, 60 bp, Artificial; identical to SEQ ID NO: 481533
  Synthetic oligonucleotide

SEQ ID NO: 613693 - DNA, 60 bp, Artificial; identical to SEQ ID NO: 481535
  Synthetic oligonucleotide

SEQ ID NO: 613694 - DNA, 60 bp, Artificial; identical to SEQ ID NO: 481536
  Synthetic oligonucleotide

SEQ ID NO: 613695 - DNA, 60 bp, Artificial; identical to SEQ ID NO: 481537
  Synthetic oligonucleotide

SEQ ID NO: 613696 - DNA, 60 bp, Artificial; identical to SEQ ID NO: 481540
  Synthetic oligonucleotide

SEQ ID NO: 613697 - DNA, 57 bp, Artificial; identical to SEQ ID NO: 481541
  Synthetic oligonucleotide

SEQ ID NO: 613698 - DNA, 54 bp, Artificial; identical to SEQ ID NO: 481551
  Synthetic oligonucleotide

SEQ ID NO: 613699 - DNA, 60 bp, Artificial; identical to SEQ ID NO: 481552
  Synthetic oligonucleotide

SEQ ID NO: 613700 - DNA, 57 bp, Artificial; identical to SEQ ID NO: 481553
  Synthetic oligonucleotide

SEQ ID NO: 613701 - DNA, 56 bp, Artificial; identical to SEQ ID NO: 481556
  Synthetic oligonucleotide

SEQ ID NO: 613702 - DNA, 60 bp, Artificial; identical to SEQ ID NO: 481564
  Synthetic oligonucleotide

SEQ ID NO: 613703 - DNA, 52 bp, Artificial; identical to SEQ ID NO: 481565
  Synthetic oligonucleotide

SEQ ID NO: 613704 - DNA, 58 bp, Artificial; identical to SEQ ID NO: 17891
  Synthetic oligonucleotide

SEQ ID NO: 613705 - DNA, 55 bp, Artificial; identical to SEQ ID NO: 481570
  Synthetic oligonucleotide

SEQ ID NO: 613706 - DNA, 55 bp, Artificial; identical to SEQ ID NO: 481575
  Synthetic oligonucleotide

SEQ ID NO: 613707 - DNA, 60 bp, Artificial; identical to SEQ ID NO: 481576
  Synthetic oligonucleotide

SEQ ID NO: 613708 - DNA, 60 bp, Artificial; identical to SEQ ID NO: 11175
  Synthetic oligonucleotide

SEQ ID NO: 613709 - DNA, 60 bp, Artificial; identical to SEQ ID NO: 481584
  Synthetic oligonucleotide

SEQ ID NO: 613710 - DNA, 60 bp, Artificial; identical to SEQ ID NO: 481586
  Synthetic oligonucleotide

SEQ ID NO: 613711 - DNA, 60 bp, Artificial; identical to SEQ ID NO: 481588
  Synthetic oligonucleotide

SEQ ID NO: 613712 - DNA, 60 bp, Artificial; identical to SEQ ID NO: 481591
  Synthetic oligonucleotide

SEQ ID NO: 613713 - DNA, 56 bp, Artificial; identical to SEQ ID NO: 481596
  Synthetic oligonucleotide

SEQ ID NO: 613714 - DNA, 60 bp, Artificial; identical to SEQ ID NO: 481599
  Synthetic oligonucleotide

SEQ ID NO: 613715 - DNA, 50 bp, Artificial; identical to SEQ ID NO: 481603
  Synthetic oligonucleotide

SEQ ID NO: 613716 - DNA, 60 bp, Artificial; identical to SEQ ID NO: 481605
  Synthetic oligonucleotide

SEQ ID NO: 613717 - DNA, 54 bp, Artificial; identical to SEQ ID NO: 481611
  Synthetic oligonucleotide

SEQ ID NO: 613718 - DNA, 54 bp, Artificial; identical to SEQ ID NO: 481612
  Synthetic oligonucleotide

SEQ ID NO: 613719 - DNA, 55 bp, Artificial; identical to SEQ ID NO: 16107
  Synthetic oligonucleotide

SEQ ID NO: 613720 - DNA, 55 bp, Artificial; identical to SEQ ID NO: 481616
  Synthetic oligonucleotide

SEQ ID NO: 613721 - DNA, 60 bp, Artificial; identical to SEQ ID NO: 481620
  Synthetic oligonucleotide

SEQ ID NO: 613722 - DNA, 55 bp, Artificial; identical to SEQ ID NO: 481622
  Synthetic oligonucleotide

SEQ ID NO: 613723 - DNA, 60 bp, Artificial; identical to SEQ ID NO: 481624
  Synthetic oligonucleotide

SEQ ID NO: 613724 - DNA, 60 bp, Artificial; identical to SEQ ID NO: 481626
  Synthetic oligonucleotide

SEQ ID NO: 613725 - DNA, 60 bp, Artificial; identical to SEQ ID NO: 481628
  Synthetic oligonucleotide

SEQ ID NO: 613726 - DNA, 60 bp, Artificial; identical to SEQ ID NO: 481630
  Synthetic oligonucleotide

SEQ ID NO: 613727 - DNA, 60 bp, Artificial; identical to SEQ ID NO: 481641
  Synthetic oligonucleotide

SEQ ID NO: 613728 - DNA, 60 bp, Artificial; identical to SEQ ID NO: 481642
  Synthetic oligonucleotide

SEQ ID NO: 613729 - DNA, 51 bp, Artificial; identical to SEQ ID NO: 481643
  Synthetic oligonucleotide

SEQ ID NO: 613730 - DNA, 60 bp, Artificial; identical to SEQ ID NO: 481648
  Synthetic oligonucleotide

SEQ ID NO: 613731 - DNA, 57 bp, Artificial; identical to SEQ ID NO: 481649
  Synthetic oligonucleotide

SEQ ID NO: 613732 - DNA, 60 bp, Artificial; identical to SEQ ID NO: 481650
  Synthetic oligonucleotide

SEQ ID NO: 613733 - DNA, 58 bp, Artificial; identical to SEQ ID NO: 481653
  Synthetic oligonucleotide

SEQ ID NO: 613734 - DNA, 55 bp, Artificial; identical to SEQ ID NO: 481656
  Synthetic oligonucleotide

SEQ ID NO: 613735 - DNA, 60 bp, Artificial; identical to SEQ ID NO: 481657
  Synthetic oligonucleotide

SEQ ID NO: 613736 - DNA, 60 bp, Artificial; identical to SEQ ID NO: 481663
  Synthetic oligonucleotide

SEQ ID NO: 613737 - DNA, 55 bp, Artificial; identical to SEQ ID NO: 481664
  Synthetic oligonucleotide

SEQ ID NO: 613738 - DNA, 60 bp, Artificial; identical to SEQ ID NO: 111169
  Synthetic oligonucleotide

SEQ ID NO: 613739 - DNA, 60 bp, Artificial; identical to SEQ ID NO: 481669
  Synthetic oligonucleotide

SEQ ID NO: 613740 - DNA, 60 bp, Artificial; identical to SEQ ID NO: 481673
  Synthetic oligonucleotide

SEQ ID NO: 613741 - DNA, 55 bp, Artificial; identical to SEQ ID NO: 481675
  Synthetic oligonucleotide

SEQ ID NO: 613742 - DNA, 60 bp, Artificial; identical to SEQ ID NO: 481679
  Synthetic oligonucleotide

SEQ ID NO: 613743 - DNA, 60 bp, Artificial; identical to SEQ ID NO: 481682
  Synthetic oligonucleotide

SEQ ID NO: 613744 - DNA, 50 bp, Artificial; identical to SEQ ID NO: 481683
  Synthetic oligonucleotide

SEQ ID NO: 613745 - DNA, 53 bp, Artificial; identical to SEQ ID NO: 481686
  Synthetic oligonucleotide

SEQ ID NO: 613746 - DNA, 58 bp, Artificial; identical to SEQ ID NO: 481689
  Synthetic oligonucleotide

SEQ ID NO: 613747 - DNA, 55 bp, Artificial; identical to SEQ ID NO: 18657
  Synthetic oligonucleotide

SEQ ID NO: 613748 - DNA, 54 bp, Artificial; identical to SEQ ID NO: 481695
  Synthetic oligonucleotide

SEQ ID NO: 613749 - DNA, 60 bp, Artificial; identical to SEQ ID NO: 481697
  Synthetic oligonucleotide

SEQ ID NO: 613750 - DNA, 55 bp, Artificial; identical to SEQ ID NO: 481702
  Synthetic oligonucleotide

SEQ ID NO: 613751 - DNA, 60 bp, Artificial; identical to SEQ ID NO: 481705
  Synthetic oligonucleotide

SEQ ID NO: 613752 - DNA, 55 bp, Artificial; identical to SEQ ID NO: 481711
  Synthetic oligonucleotide

SEQ ID NO: 613753 - DNA, 60 bp, Artificial; identical to SEQ ID NO: 481713
  Synthetic oligonucleotide

SEQ ID NO: 613754 - DNA, 60 bp, Artificial; identical to SEQ ID NO: 481717
  Synthetic oligonucleotide

SEQ ID NO: 613755 - DNA, 58 bp, Artificial; identical to SEQ ID NO: 7441
  Synthetic oligonucleotide

SEQ ID NO: 613756 - DNA, 58 bp, Artificial; identical to SEQ ID NO: 481719
  Synthetic oligonucleotide

SEQ ID NO: 613757 - DNA, 60 bp, Artificial; identical to SEQ ID NO: 481720
  Synthetic oligonucleotide

SEQ ID NO: 613758 - DNA, 60 bp, Artificial; identical to SEQ ID NO: 481721
  Synthetic oligonucleotide

SEQ ID NO: 613759 - DNA, 55 bp, Artificial; identical to SEQ ID NO: 481722
  Synthetic oligonucleotide

SEQ ID NO: 613760 - DNA, 56 bp, Artificial; identical to SEQ ID NO: 481723
  Synthetic oligonucleotide

SEQ ID NO: 613761 - DNA, 55 bp, Artificial; identical to SEQ ID NO: 481726
  Synthetic oligonucleotide

SEQ ID NO: 613762 - DNA, 60 bp, Artificial; identical to SEQ ID NO: 481729
  Synthetic oligonucleotide

SEQ ID NO: 613763 - DNA, 60 bp, Artificial; identical to SEQ ID NO: 481731
  Synthetic oligonucleotide

SEQ ID NO: 613764 - DNA, 51 bp, Artificial; identical to SEQ ID NO: 481733
  Synthetic oligonucleotide

SEQ ID NO: 613765 - DNA, 55 bp, Artificial; identical to SEQ ID NO: 481738
  Synthetic oligonucleotide

SEQ ID NO: 613766 - DNA, 55 bp, Artificial; identical to SEQ ID NO: 481739
  Synthetic oligonucleotide

SEQ ID NO: 613767 - DNA, 60 bp, Artificial; identical to SEQ ID NO: 481740
  Synthetic oligonucleotide

SEQ ID NO: 613768 - DNA, 60 bp, Artificial; identical to SEQ ID NO: 481742
  Synthetic oligonucleotide

SEQ ID NO: 613769 - DNA, 59 bp, Artificial; identical to SEQ ID NO: 481746
  Synthetic oligonucleotide

SEQ ID NO: 613770 - DNA, 52 bp, Artificial; identical to SEQ ID NO: 481747
  Synthetic oligonucleotide

SEQ ID NO: 613771 - DNA, 53 bp, Artificial; identical to SEQ ID NO: 481748
  Synthetic oligonucleotide

SEQ ID NO: 613772 - DNA, 50 bp, Artificial; identical to SEQ ID NO: 481752
  Synthetic oligonucleotide

SEQ ID NO: 613773 - DNA, 60 bp, Artificial; identical to SEQ ID NO: 481753
  Synthetic oligonucleotide

SEQ ID NO: 613774 - DNA, 57 bp, Artificial; identical to SEQ ID NO: 481754
  Synthetic oligonucleotide

SEQ ID NO: 613775 - DNA, 59 bp, Artificial; identical to SEQ ID NO: 481759
  Synthetic oligonucleotide

SEQ ID NO: 613776 - DNA, 60 bp, Artificial; identical to SEQ ID NO: 481761
  Synthetic oligonucleotide

SEQ ID NO: 613777 - DNA, 57 bp, Artificial; identical to SEQ ID NO: 481762
  Synthetic oligonucleotide

SEQ ID NO: 613778 - DNA, 60 bp, Artificial; identical to SEQ ID NO: 481763
  Synthetic oligonucleotide

SEQ ID NO: 613779 - DNA, 59 bp, Artificial; identical to SEQ ID NO: 481764
  Synthetic oligonucleotide

SEQ ID NO: 613780 - DNA, 60 bp, Artificial; identical to SEQ ID NO: 481765
  Synthetic oligonucleotide

SEQ ID NO: 613781 - DNA, 60 bp, Artificial; identical to SEQ ID NO: 481769
  Synthetic oligonucleotide

SEQ ID NO: 613782 - DNA, 55 bp, Artificial; identical to SEQ ID NO: 481770
  Synthetic oligonucleotide

SEQ ID NO: 613783 - DNA, 51 bp, Artificial; identical to SEQ ID NO: 481772
  Synthetic oligonucleotide

SEQ ID NO: 613784 - DNA, 59 bp, Artificial; identical to SEQ ID NO: 481776
  Synthetic oligonucleotide

SEQ ID NO: 613785 - DNA, 60 bp, Artificial; identical to SEQ ID NO: 481777
  Synthetic oligonucleotide

SEQ ID NO: 613786 - DNA, 50 bp, Artificial; identical to SEQ ID NO: 481780
  Synthetic oligonucleotide

SEQ ID NO: 613787 - DNA, 56 bp, Artificial; identical to SEQ ID NO: 481783
  Synthetic oligonucleotide

SEQ ID NO: 613788 - DNA, 60 bp, Artificial; identical to SEQ ID NO: 481786
  Synthetic oligonucleotide

SEQ ID NO: 613789 - DNA, 60 bp, Artificial; identical to SEQ ID NO: 481787
  Synthetic oligonucleotide

SEQ ID NO: 613790 - DNA, 55 bp, Artificial; identical to SEQ ID NO: 481789
  Synthetic oligonucleotide

SEQ ID NO: 613791 - DNA, 55 bp, Artificial; identical to SEQ ID NO: 481790
  Synthetic oligonucleotide

SEQ ID NO: 613792 - DNA, 55 bp, Artificial; identical to SEQ ID NO: 481795
  Synthetic oligonucleotide

SEQ ID NO: 613793 - DNA, 58 bp, Artificial; identical to SEQ ID NO: 481797
  Synthetic oligonucleotide

SEQ ID NO: 613794 - DNA, 60 bp, Artificial; identical to SEQ ID NO: 481798
  Synthetic oligonucleotide

SEQ ID NO: 613795 - DNA, 60 bp, Artificial; identical to SEQ ID NO: 481801
  Synthetic oligonucleotide

SEQ ID NO: 613796 - DNA, 55 bp, Artificial; identical to SEQ ID NO: 481802
  Synthetic oligonucleotide

SEQ ID NO: 613797 - DNA, 53 bp, Artificial; identical to SEQ ID NO: 481805
  Synthetic oligonucleotide

SEQ ID NO: 613798 - DNA, 60 bp, Artificial; identical to SEQ ID NO: 481807
  Synthetic oligonucleotide

SEQ ID NO: 613799 - DNA, 60 bp, Artificial; identical to SEQ ID NO: 481809
  Synthetic oligonucleotide

SEQ ID NO: 613800 - DNA, 60 bp, Artificial; identical to SEQ ID NO: 481813
  Synthetic oligonucleotide

SEQ ID NO: 613801 - DNA, 56 bp, Artificial; identical to SEQ ID NO: 481814
  Synthetic oligonucleotide

SEQ ID NO: 613802 - DNA, 60 bp, Artificial; identical to SEQ ID NO: 481816
  Synthetic oligonucleotide

SEQ ID NO: 613803 - DNA, 59 bp, Artificial; identical to SEQ ID NO: 481817
  Synthetic oligonucleotide

SEQ ID NO: 613804 - DNA, 60 bp, Artificial; identical to SEQ ID NO: 481820
  Synthetic oligonucleotide

SEQ ID NO: 613805 - DNA, 59 bp, Artificial; identical to SEQ ID NO: 481823
  Synthetic oligonucleotide

SEQ ID NO: 613806 - DNA, 60 bp, Artificial; identical to SEQ ID NO: 481825
  Synthetic oligonucleotide

SEQ ID NO: 613807 - DNA, 60 bp, Artificial; identical to SEQ ID NO: 481826
  Synthetic oligonucleotide

SEQ ID NO: 613808 - DNA, 53 bp, Artificial; identical to SEQ ID NO: 481829
  Synthetic oligonucleotide

SEQ ID NO: 613809 - DNA, 58 bp, Artificial; identical to SEQ ID NO: 481835
  Synthetic oligonucleotide

SEQ ID NO: 613810 - DNA, 60 bp, Artificial; identical to SEQ ID NO: 481836
  Synthetic oligonucleotide

SEQ ID NO: 613811 - DNA, 53 bp, Artificial; identical to SEQ ID NO: 481838
  Synthetic oligonucleotide

SEQ ID NO: 613812 - DNA, 55 bp, Artificial; identical to SEQ ID NO: 481840
  Synthetic oligonucleotide

SEQ ID NO: 613813 - DNA, 55 bp, Artificial; identical to SEQ ID NO: 16812
  Synthetic oligonucleotide

SEQ ID NO: 613814 - DNA, 57 bp, Artificial; identical to SEQ ID NO: 481842
  Synthetic oligonucleotide

SEQ ID NO: 613815 - DNA, 56 bp, Artificial; identical to SEQ ID NO: 481843
  Synthetic oligonucleotide

SEQ ID NO: 613816 - DNA, 57 bp, Artificial; identical to SEQ ID NO: 481847
  Synthetic oligonucleotide

SEQ ID NO: 613817 - DNA, 60 bp, Artificial; identical to SEQ ID NO: 481849
  Synthetic oligonucleotide

SEQ ID NO: 613818 - DNA, 58 bp, Artificial; identical to SEQ ID NO: 481850
  Synthetic oligonucleotide

SEQ ID NO: 613819 - DNA, 55 bp, Artificial; identical to SEQ ID NO: 481855
  Synthetic oligonucleotide

SEQ ID NO: 613820 - DNA, 60 bp, Artificial; identical to SEQ ID NO: 481856
  Synthetic oligonucleotide

SEQ ID NO: 613821 - DNA, 55 bp, Artificial; identical to SEQ ID NO: 481857
  Synthetic oligonucleotide

SEQ ID NO: 613822 - DNA, 56 bp, Artificial; identical to SEQ ID NO: 481858
  Synthetic oligonucleotide

SEQ ID NO: 613823 - DNA, 55 bp, Artificial; identical to SEQ ID NO: 481859
  Synthetic oligonucleotide

SEQ ID NO: 613824 - DNA, 60 bp, Artificial; identical to SEQ ID NO: 481862
  Synthetic oligonucleotide

SEQ ID NO: 613825 - DNA, 60 bp, Artificial; identical to SEQ ID NO: 481866
  Synthetic oligonucleotide

SEQ ID NO: 613826 - DNA, 60 bp, Artificial; identical to SEQ ID NO: 481867
  Synthetic oligonucleotide

SEQ ID NO: 613827 - DNA, 60 bp, Artificial; identical to SEQ ID NO: 481868
  Synthetic oligonucleotide

SEQ ID NO: 613828 - DNA, 56 bp, Artificial; identical to SEQ ID NO: 481870
  Synthetic oligonucleotide

SEQ ID NO: 613829 - DNA, 56 bp, Artificial; identical to SEQ ID NO: 481877
  Synthetic oligonucleotide

SEQ ID NO: 613830 - DNA, 60 bp, Artificial; identical to SEQ ID NO: 481881
  Synthetic oligonucleotide

SEQ ID NO: 613831 - DNA, 60 bp, Artificial; identical to SEQ ID NO: 481888
  Synthetic oligonucleotide

SEQ ID NO: 613832 - DNA, 55 bp, Artificial; identical to SEQ ID NO: 481889
  Synthetic oligonucleotide

SEQ ID NO: 613833 - DNA, 52 bp, Artificial; identical to SEQ ID NO: 481894
  Synthetic oligonucleotide

SEQ ID NO: 613834 - DNA, 60 bp, Artificial; identical to SEQ ID NO: 481895
  Synthetic oligonucleotide

SEQ ID NO: 613835 - DNA, 60 bp, Artificial; identical to SEQ ID NO: 481896
  Synthetic oligonucleotide

SEQ ID NO: 613836 - DNA, 58 bp, Artificial; identical to SEQ ID NO: 481898
  Synthetic oligonucleotide

SEQ ID NO: 613837 - DNA, 55 bp, Artificial; identical to SEQ ID NO: 481902
  Synthetic oligonucleotide

SEQ ID NO: 613838 - DNA, 58 bp, Artificial; identical to SEQ ID NO: 481903
  Synthetic oligonucleotide

SEQ ID NO: 613839 - DNA, 58 bp, Artificial; identical to SEQ ID NO: 481905
  Synthetic oligonucleotide

SEQ ID NO: 613840 - DNA, 60 bp, Artificial; identical to SEQ ID NO: 481909
  Synthetic oligonucleotide

SEQ ID NO: 613841 - DNA, 60 bp, Artificial; identical to SEQ ID NO: 481913
  Synthetic oligonucleotide

SEQ ID NO: 613842 - DNA, 60 bp, Artificial; identical to SEQ ID NO: 481915
  Synthetic oligonucleotide

SEQ ID NO: 613843 - DNA, 57 bp, Artificial; identical to SEQ ID NO: 481916
  Synthetic oligonucleotide

SEQ ID NO: 613844 - DNA, 60 bp, Artificial; identical to SEQ ID NO: 481922
  Synthetic oligonucleotide

SEQ ID NO: 613845 - DNA, 59 bp, Artificial; identical to SEQ ID NO: 481923
  Synthetic oligonucleotide

SEQ ID NO: 613846 - DNA, 51 bp, Artificial; identical to SEQ ID NO: 481924
  Synthetic oligonucleotide

SEQ ID NO: 613847 - DNA, 60 bp, Artificial; identical to SEQ ID NO: 481925
  Synthetic oligonucleotide

SEQ ID NO: 613848 - DNA, 60 bp, Artificial; identical to SEQ ID NO: 481933
  Synthetic oligonucleotide

SEQ ID NO: 613849 - DNA, 59 bp, Artificial; identical to SEQ ID NO: 481934
  Synthetic oligonucleotide

SEQ ID NO: 613850 - DNA, 58 bp, Artificial; identical to SEQ ID NO: 481936
  Synthetic oligonucleotide

SEQ ID NO: 613851 - DNA, 60 bp, Artificial; identical to SEQ ID NO: 481937
  Synthetic oligonucleotide

SEQ ID NO: 613852 - DNA, 53 bp, Artificial; identical to SEQ ID NO: 481938
  Synthetic oligonucleotide

SEQ ID NO: 613853 - DNA, 60 bp, Artificial; identical to SEQ ID NO: 481939
  Synthetic oligonucleotide

SEQ ID NO: 613854 - DNA, 56 bp, Artificial; identical to SEQ ID NO: 481943
  Synthetic oligonucleotide

SEQ ID NO: 613855 - DNA, 60 bp, Artificial; identical to SEQ ID NO: 9005
  Synthetic oligonucleotide

SEQ ID NO: 613856 - DNA, 60 bp, Artificial; identical to SEQ ID NO: 481946
  Synthetic oligonucleotide

SEQ ID NO: 613857 - DNA, 52 bp, Artificial; identical to SEQ ID NO: 481947
  Synthetic oligonucleotide

SEQ ID NO: 613858 - DNA, 55 bp, Artificial; identical to SEQ ID NO: 481952
  Synthetic oligonucleotide

SEQ ID NO: 613859 - DNA, 55 bp, Artificial; identical to SEQ ID NO: 481954
  Synthetic oligonucleotide

SEQ ID NO: 613860 - DNA, 60 bp, Artificial; identical to SEQ ID NO: 481957
  Synthetic oligonucleotide

SEQ ID NO: 613861 - DNA, 59 bp, Artificial; identical to SEQ ID NO: 481963
  Synthetic oligonucleotide

SEQ ID NO: 613862 - DNA, 60 bp, Artificial; identical to SEQ ID NO: 481965
  Synthetic oligonucleotide

SEQ ID NO: 613863 - DNA, 58 bp, Artificial; identical to SEQ ID NO: 481968
  Synthetic oligonucleotide

SEQ ID NO: 613864 - DNA, 57 bp, Artificial; identical to SEQ ID NO: 481970
  Synthetic oligonucleotide

SEQ ID NO: 613865 - DNA, 60 bp, Artificial; identical to SEQ ID NO: 481971
  Synthetic oligonucleotide

SEQ ID NO: 613866 - DNA, 60 bp, Artificial; identical to SEQ ID NO: 481974
  Synthetic oligonucleotide

SEQ ID NO: 613867 - DNA, 60 bp, Artificial; identical to SEQ ID NO: 481975
  Synthetic oligonucleotide

SEQ ID NO: 613868 - DNA, 58 bp, Artificial; identical to SEQ ID NO: 481979
  Synthetic oligonucleotide

SEQ ID NO: 613869 - DNA, 60 bp, Artificial; identical to SEQ ID NO: 481983
  Synthetic oligonucleotide

SEQ ID NO: 613870 - DNA, 60 bp, Artificial; identical to SEQ ID NO: 481984
  Synthetic oligonucleotide

SEQ ID NO: 613871 - DNA, 60 bp, Artificial; identical to SEQ ID NO: 481988
  Synthetic oligonucleotide

SEQ ID NO: 613872 - DNA, 60 bp, Artificial; identical to SEQ ID NO: 481990
  Synthetic oligonucleotide

SEQ ID NO: 613873 - DNA, 60 bp, Artificial; identical to SEQ ID NO: 481991
  Synthetic oligonucleotide

SEQ ID NO: 613874 - DNA, 53 bp, Artificial; identical to SEQ ID NO: 481994
  Synthetic oligonucleotide

SEQ ID NO: 613875 - DNA, 55 bp, Artificial; identical to SEQ ID NO: 16108
  Synthetic oligonucleotide

SEQ ID NO: 613876 - DNA, 57 bp, Artificial; identical to SEQ ID NO: 481998
  Synthetic oligonucleotide

SEQ ID NO: 613877 - DNA, 60 bp, Artificial; identical to SEQ ID NO: 482001
  Synthetic oligonucleotide

SEQ ID NO: 613878 - DNA, 60 bp, Artificial; identical to SEQ ID NO: 7387
  Synthetic oligonucleotide

SEQ ID NO: 613879 - DNA, 60 bp, Artificial; identical to SEQ ID NO: 482004
  Synthetic oligonucleotide

SEQ ID NO: 613880 - DNA, 57 bp, Artificial; identical to SEQ ID NO: 482011
  Synthetic oligonucleotide

SEQ ID NO: 613881 - DNA, 52 bp, Artificial; identical to SEQ ID NO: 482014
  Synthetic oligonucleotide

SEQ ID NO: 613882 - DNA, 52 bp, Artificial; identical to SEQ ID NO: 482016
  Synthetic oligonucleotide

SEQ ID NO: 613883 - DNA, 55 bp, Artificial; identical to SEQ ID NO: 482018
  Synthetic oligonucleotide

SEQ ID NO: 613884 - DNA, 60 bp, Artificial; identical to SEQ ID NO: 482023
  Synthetic oligonucleotide

SEQ ID NO: 613885 - DNA, 55 bp, Artificial; identical to SEQ ID NO: 482028
  Synthetic oligonucleotide

SEQ ID NO: 613886 - DNA, 56 bp, Artificial; identical to SEQ ID NO: 482029
  Synthetic oligonucleotide

SEQ ID NO: 613887 - DNA, 55 bp, Artificial; identical to SEQ ID NO: 482030
  Synthetic oligonucleotide

SEQ ID NO: 613888 - DNA, 55 bp, Artificial; identical to SEQ ID NO: 482031
  Synthetic oligonucleotide

SEQ ID NO: 613889 - DNA, 60 bp, Artificial; identical to SEQ ID NO: 482032
  Synthetic oligonucleotide

SEQ ID NO: 613890 - DNA, 60 bp, Artificial; identical to SEQ ID NO: 482033
  Synthetic oligonucleotide

SEQ ID NO: 613891 - DNA, 55 bp, Artificial; identical to SEQ ID NO: 482040
  Synthetic oligonucleotide

SEQ ID NO: 613892 - DNA, 54 bp, Artificial; identical to SEQ ID NO: 482041
  Synthetic oligonucleotide

SEQ ID NO: 613893 - DNA, 60 bp, Artificial; identical to SEQ ID NO: 482048
  Synthetic oligonucleotide

SEQ ID NO: 613894 - DNA, 60 bp, Artificial; identical to SEQ ID NO: 482050
  Synthetic oligonucleotide

SEQ ID NO: 613895 - DNA, 60 bp, Artificial; identical to SEQ ID NO: 482054
  Synthetic oligonucleotide

SEQ ID NO: 613896 - DNA, 60 bp, Artificial; identical to SEQ ID NO: 482056
  Synthetic oligonucleotide

SEQ ID NO: 613897 - DNA, 56 bp, Artificial; identical to SEQ ID NO: 482057
  Synthetic oligonucleotide

SEQ ID NO: 613898 - DNA, 60 bp, Artificial; identical to SEQ ID NO: 482059
  Synthetic oligonucleotide

SEQ ID NO: 613899 - DNA, 60 bp, Artificial; identical to SEQ ID NO: 10242
  Synthetic oligonucleotide

SEQ ID NO: 613900 - DNA, 52 bp, Artificial; identical to SEQ ID NO: 482063
  Synthetic oligonucleotide

SEQ ID NO: 613901 - DNA, 57 bp, Artificial; identical to SEQ ID NO: 482064
  Synthetic oligonucleotide

SEQ ID NO: 613902 - DNA, 60 bp, Artificial; identical to SEQ ID NO: 482065
  Synthetic oligonucleotide

SEQ ID NO: 613903 - DNA, 60 bp, Artificial; identical to SEQ ID NO: 482067
  Synthetic oligonucleotide

SEQ ID NO: 613904 - DNA, 57 bp, Artificial; identical to SEQ ID NO: 482068
  Synthetic oligonucleotide

SEQ ID NO: 613905 - DNA, 60 bp, Artificial; identical to SEQ ID NO: 482072
  Synthetic oligonucleotide

SEQ ID NO: 613906 - DNA, 60 bp, Artificial; identical to SEQ ID NO: 482076
  Synthetic oligonucleotide

SEQ ID NO: 613907 - DNA, 59 bp, Artificial; identical to SEQ ID NO: 482078
  Synthetic oligonucleotide

SEQ ID NO: 613908 - DNA, 60 bp, Artificial; identical to SEQ ID NO: 482080
  Synthetic oligonucleotide

SEQ ID NO: 613909 - DNA, 60 bp, Artificial; identical to SEQ ID NO: 482081
  Synthetic oligonucleotide

SEQ ID NO: 613910 - DNA, 60 bp, Artificial; identical to SEQ ID NO: 482083
  Synthetic oligonucleotide

SEQ ID NO: 613911 - DNA, 60 bp, Artificial; identical to SEQ ID NO: 482085
  Synthetic oligonucleotide

SEQ ID NO: 613912 - DNA, 60 bp, Artificial; identical to SEQ ID NO: 482086
  Synthetic oligonucleotide

SEQ ID NO: 613913 - DNA, 57 bp, Artificial; identical to SEQ ID NO: 482092
  Synthetic oligonucleotide

SEQ ID NO: 613914 - DNA, 60 bp, Artificial; identical to SEQ ID NO: 482096
  Synthetic oligonucleotide

SEQ ID NO: 613915 - DNA, 54 bp, Artificial; identical to SEQ ID NO: 482099
  Synthetic oligonucleotide

SEQ ID NO: 613916 - DNA, 55 bp, Artificial; identical to SEQ ID NO: 482101
  Synthetic oligonucleotide

SEQ ID NO: 613917 - DNA, 56 bp, Artificial; identical to SEQ ID NO: 482102
  Synthetic oligonucleotide

SEQ ID NO: 613918 - DNA, 60 bp, Artificial; identical to SEQ ID NO: 482104
  Synthetic oligonucleotide

SEQ ID NO: 613919 - DNA, 60 bp, Artificial; identical to SEQ ID NO: 482106
  Synthetic oligonucleotide

SEQ ID NO: 613920 - DNA, 50 bp, Artificial; identical to SEQ ID NO: 482108
  Synthetic oligonucleotide

SEQ ID NO: 613921 - DNA, 60 bp, Artificial; identical to SEQ ID NO: 482111
  Synthetic oligonucleotide

SEQ ID NO: 613922 - DNA, 58 bp, Artificial; identical to SEQ ID NO: 482112
  Synthetic oligonucleotide

SEQ ID NO: 613923 - DNA, 60 bp, Artificial; identical to SEQ ID NO: 482113
  Synthetic oligonucleotide

SEQ ID NO: 613924 - DNA, 58 bp, Artificial; identical to SEQ ID NO: 482114
  Synthetic oligonucleotide

SEQ ID NO: 613925 - DNA, 58 bp, Artificial; identical to SEQ ID NO: 482116
  Synthetic oligonucleotide

SEQ ID NO: 613926 - DNA, 54 bp, Artificial; identical to SEQ ID NO: 482117
  Synthetic oligonucleotide

SEQ ID NO: 613927 - DNA, 60 bp, Artificial; identical to SEQ ID NO: 482120
  Synthetic oligonucleotide

SEQ ID NO: 613928 - DNA, 60 bp, Artificial; identical to SEQ ID NO: 482121
  Synthetic oligonucleotide

SEQ ID NO: 613929 - DNA, 51 bp, Artificial; identical to SEQ ID NO: 482127
  Synthetic oligonucleotide

SEQ ID NO: 613930 - DNA, 60 bp, Artificial; identical to SEQ ID NO: 8898
  Synthetic oligonucleotide

SEQ ID NO: 613931 - DNA, 60 bp, Artificial; identical to SEQ ID NO: 482130
  Synthetic oligonucleotide

SEQ ID NO: 613932 - DNA, 60 bp, Artificial; identical to SEQ ID NO: 6171
  Synthetic oligonucleotide

SEQ ID NO: 613933 - DNA, 55 bp, Artificial; identical to SEQ ID NO: 482135
  Synthetic oligonucleotide

SEQ ID NO: 613934 - DNA, 56 bp, Artificial; identical to SEQ ID NO: 482139
  Synthetic oligonucleotide

SEQ ID NO: 613935 - DNA, 60 bp, Artificial; identical to SEQ ID NO: 9768
  Synthetic oligonucleotide

SEQ ID NO: 613936 - DNA, 55 bp, Artificial; identical to SEQ ID NO: 482143
  Synthetic oligonucleotide

SEQ ID NO: 613937 - DNA, 51 bp, Artificial; identical to SEQ ID NO: 482144
  Synthetic oligonucleotide

SEQ ID NO: 613938 - DNA, 56 bp, Artificial; identical to SEQ ID NO: 18133
  Synthetic oligonucleotide

SEQ ID NO: 613939 - DNA, 60 bp, Artificial; identical to SEQ ID NO: 482147
  Synthetic oligonucleotide

SEQ ID NO: 613940 - DNA, 59 bp, Artificial; identical to SEQ ID NO: 482150
  Synthetic oligonucleotide

SEQ ID NO: 613941 - DNA, 60 bp, Artificial; identical to SEQ ID NO: 482153
  Synthetic oligonucleotide

SEQ ID NO: 613942 - DNA, 57 bp, Artificial; identical to SEQ ID NO: 482155
  Synthetic oligonucleotide

SEQ ID NO: 613943 - DNA, 55 bp, Artificial; identical to SEQ ID NO: 482160
  Synthetic oligonucleotide

SEQ ID NO: 613944 - DNA, 55 bp, Artificial; identical to SEQ ID NO: 482161
  Synthetic oligonucleotide

SEQ ID NO: 613945 - DNA, 60 bp, Artificial; identical to SEQ ID NO: 482163
  Synthetic oligonucleotide

SEQ ID NO: 613946 - DNA, 60 bp, Artificial; identical to SEQ ID NO: 482164
  Synthetic oligonucleotide

SEQ ID NO: 613947 - DNA, 60 bp, Artificial; identical to SEQ ID NO: 482165
  Synthetic oligonucleotide

SEQ ID NO: 613948 - DNA, 60 bp, Artificial; identical to SEQ ID NO: 482168
  Synthetic oligonucleotide

SEQ ID NO: 613949 - DNA, 55 bp, Artificial; identical to SEQ ID NO: 482171
  Synthetic oligonucleotide

SEQ ID NO: 613950 - DNA, 55 bp, Artificial; identical to SEQ ID NO: 482172
  Synthetic oligonucleotide

SEQ ID NO: 613951 - DNA, 60 bp, Artificial; identical to SEQ ID NO: 482175
  Synthetic oligonucleotide

SEQ ID NO: 613952 - DNA, 60 bp, Artificial; identical to SEQ ID NO: 482178
  Synthetic oligonucleotide

SEQ ID NO: 613953 - DNA, 50 bp, Artificial; identical to SEQ ID NO: 482186
  Synthetic oligonucleotide

SEQ ID NO: 613954 - DNA, 53 bp, Artificial; identical to SEQ ID NO: 482187
  Synthetic oligonucleotide

SEQ ID NO: 613955 - DNA, 58 bp, Artificial; identical to SEQ ID NO: 482189
  Synthetic oligonucleotide

SEQ ID NO: 613956 - DNA, 58 bp, Artificial; identical to SEQ ID NO: 482190
  Synthetic oligonucleotide

SEQ ID NO: 613957 - DNA, 51 bp, Artificial; identical to SEQ ID NO: 482191
  Synthetic oligonucleotide

SEQ ID NO: 613958 - DNA, 51 bp, Artificial; identical to SEQ ID NO: 482192
  Synthetic oligonucleotide

SEQ ID NO: 613959 - DNA, 56 bp, Artificial; identical to SEQ ID NO: 482193
  Synthetic oligonucleotide

SEQ ID NO: 613960 - DNA, 55 bp, Artificial; identical to SEQ ID NO: 482194
  Synthetic oligonucleotide

SEQ ID NO: 613961 - DNA, 57 bp, Artificial; identical to SEQ ID NO: 482195
  Synthetic oligonucleotide

SEQ ID NO: 613962 - DNA, 57 bp, Artificial; identical to SEQ ID NO: 482196
  Synthetic oligonucleotide

SEQ ID NO: 613963 - DNA, 60 bp, Artificial; identical to SEQ ID NO: 482197
  Synthetic oligonucleotide

SEQ ID NO: 613964 - DNA, 51 bp, Artificial; identical to SEQ ID NO: 482198
  Synthetic oligonucleotide

SEQ ID NO: 613965 - DNA, 55 bp, Artificial; identical to SEQ ID NO: 482199
  Synthetic oligonucleotide

SEQ ID NO: 613966 - DNA, 60 bp, Artificial; identical to SEQ ID NO: 482201
  Synthetic oligonucleotide

SEQ ID NO: 613967 - DNA, 59 bp, Artificial; identical to SEQ ID NO: 482203
  Synthetic oligonucleotide

SEQ ID NO: 613968 - DNA, 52 bp, Artificial; identical to SEQ ID NO: 482204
  Synthetic oligonucleotide

SEQ ID NO: 613969 - DNA, 59 bp, Artificial; identical to SEQ ID NO: 482206
  Synthetic oligonucleotide

SEQ ID NO: 613970 - DNA, 46 bp, Artificial; identical to SEQ ID NO: 482207
  Synthetic oligonucleotide

SEQ ID NO: 613971 - DNA, 52 bp, Artificial; identical to SEQ ID NO: 482209
  Synthetic oligonucleotide

SEQ ID NO: 613972 - DNA, 55 bp, Artificial; identical to SEQ ID NO: 482214
  Synthetic oligonucleotide

SEQ ID NO: 613973 - DNA, 60 bp, Artificial; identical to SEQ ID NO: 482215
  Synthetic oligonucleotide

SEQ ID NO: 613974 - DNA, 58 bp, Artificial; identical to SEQ ID NO: 482218
  Synthetic oligonucleotide

SEQ ID NO: 613975 - DNA, 55 bp, Artificial; identical to SEQ ID NO: 482219
  Synthetic oligonucleotide

SEQ ID NO: 613976 - DNA, 59 bp, Artificial; identical to SEQ ID NO: 482221
  Synthetic oligonucleotide

SEQ ID NO: 613977 - DNA, 58 bp, Artificial; identical to SEQ ID NO: 482222
  Synthetic oligonucleotide

SEQ ID NO: 613978 - DNA, 57 bp, Artificial; identical to SEQ ID NO: 482223
  Synthetic oligonucleotide

SEQ ID NO: 613979 - DNA, 57 bp, Artificial; identical to SEQ ID NO: 482226
  Synthetic oligonucleotide

SEQ ID NO: 613980 - DNA, 60 bp, Artificial; identical to SEQ ID NO: 482227
  Synthetic oligonucleotide

SEQ ID NO: 613981 - DNA, 60 bp, Artificial; identical to SEQ ID NO: 482228
  Synthetic oligonucleotide

SEQ ID NO: 613982 - DNA, 60 bp, Artificial; identical to SEQ ID NO: 482229
  Synthetic oligonucleotide

SEQ ID NO: 613983 - DNA, 58 bp, Artificial; identical to SEQ ID NO: 482230
  Synthetic oligonucleotide

SEQ ID NO: 613984 - DNA, 58 bp, Artificial; identical to SEQ ID NO: 482234
  Synthetic oligonucleotide

SEQ ID NO: 613985 - DNA, 60 bp, Artificial; identical to SEQ ID NO: 482235
  Synthetic oligonucleotide

SEQ ID NO: 613986 - DNA, 58 bp, Artificial; identical to SEQ ID NO: 482236
  Synthetic oligonucleotide

SEQ ID NO: 613987 - DNA, 59 bp, Artificial; identical to SEQ ID NO: 482237
  Synthetic oligonucleotide

SEQ ID NO: 613988 - DNA, 59 bp, Artificial; identical to SEQ ID NO: 482238
  Synthetic oligonucleotide

SEQ ID NO: 613989 - DNA, 55 bp, Artificial; identical to SEQ ID NO: 482239
  Synthetic oligonucleotide

SEQ ID NO: 613990 - DNA, 59 bp, Artificial; identical to SEQ ID NO: 482240
  Synthetic oligonucleotide

SEQ ID NO: 613991 - DNA, 60 bp, Artificial; identical to SEQ ID NO: 482244
  Synthetic oligonucleotide

SEQ ID NO: 613992 - DNA, 56 bp, Artificial; identical to SEQ ID NO: 482245
  Synthetic oligonucleotide

SEQ ID NO: 613993 - DNA, 55 bp, Artificial; identical to SEQ ID NO: 482246
  Synthetic oligonucleotide

SEQ ID NO: 613994 - DNA, 60 bp, Artificial; identical to SEQ ID NO: 482247
  Synthetic oligonucleotide

SEQ ID NO: 613995 - DNA, 60 bp, Artificial; identical to SEQ ID NO: 482248
  Synthetic oligonucleotide

SEQ ID NO: 613996 - DNA, 60 bp, Artificial; identical to SEQ ID NO: 11460
  Synthetic oligonucleotide

SEQ ID NO: 613997 - DNA, 55 bp, Artificial; identical to SEQ ID NO: 482258
  Synthetic oligonucleotide

SEQ ID NO: 613998 - DNA, 53 bp, Artificial; identical to SEQ ID NO: 482259
  Synthetic oligonucleotide

SEQ ID NO: 613999 - DNA, 56 bp, Artificial; identical to SEQ ID NO: 482261
  Synthetic oligonucleotide

SEQ ID NO: 614000 - DNA, 60 bp, Artificial; identical to SEQ ID NO: 482262
  Synthetic oligonucleotide

SEQ ID NO: 614001 - DNA, 60 bp, Artificial; identical to SEQ ID NO: 482264
  Synthetic oligonucleotide

SEQ ID NO: 614002 - DNA, 55 bp, Artificial; identical to SEQ ID NO: 482268
  Synthetic oligonucleotide

SEQ ID NO: 614003 - DNA, 60 bp, Artificial; identical to SEQ ID NO: 482269
  Synthetic oligonucleotide

SEQ ID NO: 614004 - DNA, 58 bp, Artificial; identical to SEQ ID NO: 482270
  Synthetic oligonucleotide

SEQ ID NO: 614005 - DNA, 60 bp, Artificial; identical to SEQ ID NO: 482271
  Synthetic oligonucleotide

SEQ ID NO: 614006 - DNA, 60 bp, Artificial; identical to SEQ ID NO: 482273
  Synthetic oligonucleotide

SEQ ID NO: 614007 - DNA, 55 bp, Artificial; identical to SEQ ID NO: 482274
  Synthetic oligonucleotide

SEQ ID NO: 614008 - DNA, 60 bp, Artificial; identical to SEQ ID NO: 11585
  Synthetic oligonucleotide

SEQ ID NO: 614009 - DNA, 55 bp, Artificial; identical to SEQ ID NO: 482275
  Synthetic oligonucleotide

SEQ ID NO: 614010 - DNA, 55 bp, Artificial; identical to SEQ ID NO: 482276
  Synthetic oligonucleotide

SEQ ID NO: 614011 - DNA, 60 bp, Artificial; identical to SEQ ID NO: 482277
  Synthetic oligonucleotide

SEQ ID NO: 614012 - DNA, 60 bp, Artificial; identical to SEQ ID NO: 482281
  Synthetic oligonucleotide

SEQ ID NO: 614013 - DNA, 57 bp, Artificial; identical to SEQ ID NO: 13928
  Synthetic oligonucleotide

SEQ ID NO: 614014 - DNA, 60 bp, Artificial; identical to SEQ ID NO: 482287
  Synthetic oligonucleotide

SEQ ID NO: 614015 - DNA, 54 bp, Artificial; identical to SEQ ID NO: 482290
  Synthetic oligonucleotide

SEQ ID NO: 614016 - DNA, 59 bp, Artificial; identical to SEQ ID NO: 482291
  Synthetic oligonucleotide

SEQ ID NO: 614017 - DNA, 58 bp, Artificial; identical to SEQ ID NO: 482297
  Synthetic oligonucleotide

SEQ ID NO: 614018 - DNA, 56 bp, Artificial; identical to SEQ ID NO: 482300
  Synthetic oligonucleotide

SEQ ID NO: 614019 - DNA, 51 bp, Artificial; identical to SEQ ID NO: 482301
  Synthetic oligonucleotide

SEQ ID NO: 614020 - DNA, 56 bp, Artificial; identical to SEQ ID NO: 482304
  Synthetic oligonucleotide

SEQ ID NO: 614021 - DNA, 60 bp, Artificial; identical to SEQ ID NO: 7147
  Synthetic oligonucleotide

SEQ ID NO: 614022 - DNA, 51 bp, Artificial; identical to SEQ ID NO: 482305
  Synthetic oligonucleotide

SEQ ID NO: 614023 - DNA, 60 bp, Artificial; identical to SEQ ID NO: 482306
  Synthetic oligonucleotide

SEQ ID NO: 614024 - DNA, 51 bp, Artificial; identical to SEQ ID NO: 482307
  Synthetic oligonucleotide

SEQ ID NO: 614025 - DNA, 55 bp, Artificial; identical to SEQ ID NO: 482308
  Synthetic oligonucleotide

SEQ ID NO: 614026 - DNA, 54 bp, Artificial; identical to SEQ ID NO: 482310
  Synthetic oligonucleotide

SEQ ID NO: 614027 - DNA, 60 bp, Artificial; identical to SEQ ID NO: 482312
  Synthetic oligonucleotide

SEQ ID NO: 614028 - DNA, 60 bp, Artificial; identical to SEQ ID NO: 10950
  Synthetic oligonucleotide

SEQ ID NO: 614029 - DNA, 58 bp, Artificial; identical to SEQ ID NO: 482314
  Synthetic oligonucleotide

SEQ ID NO: 614030 - DNA, 54 bp, Artificial; identical to SEQ ID NO: 12877
  Synthetic oligonucleotide

SEQ ID NO: 614031 - DNA, 60 bp, Artificial; identical to SEQ ID NO: 482316
  Synthetic oligonucleotide

SEQ ID NO: 614032 - DNA, 60 bp, Artificial; identical to SEQ ID NO: 12891
  Synthetic oligonucleotide

SEQ ID NO: 614033 - DNA, 59 bp, Artificial; identical to SEQ ID NO: 482319
  Synthetic oligonucleotide

SEQ ID NO: 614034 - DNA, 59 bp, Artificial; identical to SEQ ID NO: 20511
  Synthetic oligonucleotide

SEQ ID NO: 614035 - DNA, 55 bp, Artificial; identical to SEQ ID NO: 482331
  Synthetic oligonucleotide

SEQ ID NO: 614036 - DNA, 59 bp, Artificial; identical to SEQ ID NO: 482332
  Synthetic oligonucleotide

SEQ ID NO: 614037 - DNA, 52 bp, Artificial; identical to SEQ ID NO: 482333
  Synthetic oligonucleotide

SEQ ID NO: 614038 - DNA, 60 bp, Artificial; identical to SEQ ID NO: 9095
  Synthetic oligonucleotide

SEQ ID NO: 614039 - DNA, 56 bp, Artificial; identical to SEQ ID NO: 482335
  Synthetic oligonucleotide

SEQ ID NO: 614040 - DNA, 56 bp, Artificial; identical to SEQ ID NO: 482336
  Synthetic oligonucleotide

SEQ ID NO: 614041 - DNA, 59 bp, Artificial; identical to SEQ ID NO: 482340
  Synthetic oligonucleotide

SEQ ID NO: 614042 - DNA, 60 bp, Artificial; identical to SEQ ID NO: 482344
  Synthetic oligonucleotide

SEQ ID NO: 614043 - DNA, 59 bp, Artificial; identical to SEQ ID NO: 482348
  Synthetic oligonucleotide

SEQ ID NO: 614044 - DNA, 55 bp, Artificial; identical to SEQ ID NO: 482349
  Synthetic oligonucleotide

SEQ ID NO: 614045 - DNA, 60 bp, Artificial; identical to SEQ ID NO: 482350
  Synthetic oligonucleotide

SEQ ID NO: 614046 - DNA, 60 bp, Artificial; identical to SEQ ID NO: 8115
  Synthetic oligonucleotide

SEQ ID NO: 614047 - DNA, 60 bp, Artificial; identical to SEQ ID NO: 482353
  Synthetic oligonucleotide

SEQ ID NO: 614048 - DNA, 57 bp, Artificial; identical to SEQ ID NO: 482354
  Synthetic oligonucleotide

SEQ ID NO: 614049 - DNA, 60 bp, Artificial; identical to SEQ ID NO: 482355
  Synthetic oligonucleotide

SEQ ID NO: 614050 - DNA, 60 bp, Artificial; identical to SEQ ID NO: 482357
  Synthetic oligonucleotide

SEQ ID NO: 614051 - DNA, 50 bp, Artificial; identical to SEQ ID NO: 482360
  Synthetic oligonucleotide

SEQ ID NO: 614052 - DNA, 60 bp, Artificial; identical to SEQ ID NO: 482361
  Synthetic oligonucleotide

SEQ ID NO: 614053 - DNA, 60 bp, Artificial; identical to SEQ ID NO: 482362
  Synthetic oligonucleotide

SEQ ID NO: 614054 - DNA, 60 bp, Artificial; identical to SEQ ID NO: 482367
  Synthetic oligonucleotide

SEQ ID NO: 614055 - DNA, 59 bp, Artificial; identical to SEQ ID NO: 482368
  Synthetic oligonucleotide

SEQ ID NO: 614056 - DNA, 52 bp, Artificial; identical to SEQ ID NO: 482370
  Synthetic oligonucleotide

SEQ ID NO: 614057 - DNA, 55 bp, Artificial; identical to SEQ ID NO: 482373
  Synthetic oligonucleotide

SEQ ID NO: 614058 - DNA, 52 bp, Artificial; identical to SEQ ID NO: 482375
  Synthetic oligonucleotide

SEQ ID NO: 614059 - DNA, 54 bp, Artificial; identical to SEQ ID NO: 482376
  Synthetic oligonucleotide

SEQ ID NO: 614060 - DNA, 57 bp, Artificial; identical to SEQ ID NO: 482377
  Synthetic oligonucleotide

SEQ ID NO: 614061 - DNA, 60 bp, Artificial; identical to SEQ ID NO: 482380
  Synthetic oligonucleotide

SEQ ID NO: 614062 - DNA, 55 bp, Artificial; identical to SEQ ID NO: 482382
  Synthetic oligonucleotide

SEQ ID NO: 614063 - DNA, 52 bp, Artificial; identical to SEQ ID NO: 482388
  Synthetic oligonucleotide

SEQ ID NO: 614064 - DNA, 60 bp, Artificial; identical to SEQ ID NO: 88010
  Synthetic oligonucleotide

SEQ ID NO: 614065 - DNA, 53 bp, Artificial; identical to SEQ ID NO: 482389
  Synthetic oligonucleotide

SEQ ID NO: 614066 - DNA, 52 bp, Artificial; identical to SEQ ID NO: 14617
  Synthetic oligonucleotide

SEQ ID NO: 614067 - DNA, 58 bp, Artificial; identical to SEQ ID NO: 482390
  Synthetic oligonucleotide

SEQ ID NO: 614068 - DNA, 58 bp, Artificial; identical to SEQ ID NO: 482392
  Synthetic oligonucleotide

SEQ ID NO: 614069 - DNA, 60 bp, Artificial; identical to SEQ ID NO: 482393
  Synthetic oligonucleotide

SEQ ID NO: 614070 - DNA, 60 bp, Artificial; identical to SEQ ID NO: 482396
  Synthetic oligonucleotide

SEQ ID NO: 614071 - DNA, 58 bp, Artificial; identical to SEQ ID NO: 482397
  Synthetic oligonucleotide

SEQ ID NO: 614072 - DNA, 55 bp, Artificial; identical to SEQ ID NO: 482399
  Synthetic oligonucleotide

SEQ ID NO: 614073 - DNA, 60 bp, Artificial; identical to SEQ ID NO: 7350
  Synthetic oligonucleotide

SEQ ID NO: 614074 - DNA, 60 bp, Artificial; identical to SEQ ID NO: 482403
  Synthetic oligonucleotide

SEQ ID NO: 614075 - DNA, 51 bp, Artificial; identical to SEQ ID NO: 482404
  Synthetic oligonucleotide

SEQ ID NO: 614076 - DNA, 51 bp, Artificial; identical to SEQ ID NO: 482406
  Synthetic oligonucleotide

SEQ ID NO: 614077 - DNA, 60 bp, Artificial; identical to SEQ ID NO: 482407
  Synthetic oligonucleotide

SEQ ID NO: 614078 - DNA, 56 bp, Artificial; identical to SEQ ID NO: 482409
  Synthetic oligonucleotide

SEQ ID NO: 614079 - DNA, 60 bp, Artificial; identical to SEQ ID NO: 482412
  Synthetic oligonucleotide

SEQ ID NO: 614080 - DNA, 60 bp, Artificial; identical to SEQ ID NO: 482414
  Synthetic oligonucleotide

SEQ ID NO: 614081 - DNA, 60 bp, Artificial; identical to SEQ ID NO: 482415
  Synthetic oligonucleotide

SEQ ID NO: 614082 - DNA, 55 bp, Artificial; identical to SEQ ID NO: 482416
  Synthetic oligonucleotide

SEQ ID NO: 614083 - DNA, 60 bp, Artificial; identical to SEQ ID NO: 482421
  Synthetic oligonucleotide

SEQ ID NO: 614084 - DNA, 55 bp, Artificial; identical to SEQ ID NO: 482422
  Synthetic oligonucleotide

SEQ ID NO: 614085 - DNA, 56 bp, Artificial; identical to SEQ ID NO: 482423
  Synthetic oligonucleotide

SEQ ID NO: 614086 - DNA, 52 bp, Artificial; identical to SEQ ID NO: 482429
  Synthetic oligonucleotide

SEQ ID NO: 614087 - DNA, 60 bp, Artificial; identical to SEQ ID NO: 482433
  Synthetic oligonucleotide

SEQ ID NO: 614088 - DNA, 55 bp, Artificial; identical to SEQ ID NO: 482435
  Synthetic oligonucleotide

SEQ ID NO: 614089 - DNA, 54 bp, Artificial; identical to SEQ ID NO: 482436
  Synthetic oligonucleotide

SEQ ID NO: 614090 - DNA, 58 bp, Artificial; identical to SEQ ID NO: 482437
  Synthetic oligonucleotide

SEQ ID NO: 614091 - DNA, 56 bp, Artificial; identical to SEQ ID NO: 482444
  Synthetic oligonucleotide

SEQ ID NO: 614092 - DNA, 54 bp, Artificial; identical to SEQ ID NO: 16375
  Synthetic oligonucleotide

SEQ ID NO: 614093 - DNA, 54 bp, Artificial; identical to SEQ ID NO: 482451
  Synthetic oligonucleotide

SEQ ID NO: 614094 - DNA, 60 bp, Artificial; identical to SEQ ID NO: 482452
  Synthetic oligonucleotide

SEQ ID NO: 614095 - DNA, 53 bp, Artificial; identical to SEQ ID NO: 482456
  Synthetic oligonucleotide

SEQ ID NO: 614096 - DNA, 59 bp, Artificial; identical to SEQ ID NO: 482457
  Synthetic oligonucleotide

SEQ ID NO: 614097 - DNA, 60 bp, Artificial; identical to SEQ ID NO: 6950
  Synthetic oligonucleotide

SEQ ID NO: 614098 - DNA, 55 bp, Artificial; identical to SEQ ID NO: 482464
  Synthetic oligonucleotide

SEQ ID NO: 614099 - DNA, 60 bp, Artificial; identical to SEQ ID NO: 482466
  Synthetic oligonucleotide

SEQ ID NO: 614100 - DNA, 55 bp, Artificial; identical to SEQ ID NO: 482467
  Synthetic oligonucleotide

SEQ ID NO: 614101 - DNA, 54 bp, Artificial; identical to SEQ ID NO: 482472
  Synthetic oligonucleotide

SEQ ID NO: 614102 - DNA, 60 bp, Artificial; identical to SEQ ID NO: 482473
  Synthetic oligonucleotide

SEQ ID NO: 614103 - DNA, 60 bp, Artificial; identical to SEQ ID NO: 482475
  Synthetic oligonucleotide

SEQ ID NO: 614104 - DNA, 60 bp, Artificial; identical to SEQ ID NO: 482476
  Synthetic oligonucleotide

SEQ ID NO: 614105 - DNA, 60 bp, Artificial; identical to SEQ ID NO: 482482
  Synthetic oligonucleotide

SEQ ID NO: 614106 - DNA, 60 bp, Artificial; identical to SEQ ID NO: 482483
  Synthetic oligonucleotide

SEQ ID NO: 614107 - DNA, 55 bp, Artificial; identical to SEQ ID NO: 482484
  Synthetic oligonucleotide

SEQ ID NO: 614108 - DNA, 60 bp, Artificial; identical to SEQ ID NO: 482485
  Synthetic oligonucleotide

SEQ ID NO: 614109 - DNA, 52 bp, Artificial; identical to SEQ ID NO: 482489
  Synthetic oligonucleotide

SEQ ID NO: 614110 - DNA, 58 bp, Artificial; identical to SEQ ID NO: 482490
  Synthetic oligonucleotide

SEQ ID NO: 614111 - DNA, 57 bp, Artificial; identical to SEQ ID NO: 482492
  Synthetic oligonucleotide

SEQ ID NO: 614112 - DNA, 55 bp, Artificial; identical to SEQ ID NO: 482495
  Synthetic oligonucleotide

SEQ ID NO: 614113 - DNA, 60 bp, Artificial; identical to SEQ ID NO: 482497
  Synthetic oligonucleotide

SEQ ID NO: 614114 - DNA, 60 bp, Artificial; identical to SEQ ID NO: 482498
  Synthetic oligonucleotide

SEQ ID NO: 614115 - DNA, 53 bp, Artificial; identical to SEQ ID NO: 482499
  Synthetic oligonucleotide

SEQ ID NO: 614116 - DNA, 50 bp, Artificial; identical to SEQ ID NO: 482500
  Synthetic oligonucleotide

SEQ ID NO: 614117 - DNA, 60 bp, Artificial; identical to SEQ ID NO: 9169
  Synthetic oligonucleotide

SEQ ID NO: 614118 - DNA, 60 bp, Artificial; identical to SEQ ID NO: 482504
  Synthetic oligonucleotide

SEQ ID NO: 614119 - DNA, 59 bp, Artificial; identical to SEQ ID NO: 482506
  Synthetic oligonucleotide

SEQ ID NO: 614120 - DNA, 60 bp, Artificial; identical to SEQ ID NO: 482507
  Synthetic oligonucleotide

SEQ ID NO: 614121 - DNA, 60 bp, Artificial; identical to SEQ ID NO: 482508
  Synthetic oligonucleotide

SEQ ID NO: 614122 - DNA, 60 bp, Artificial; identical to SEQ ID NO: 482512
  Synthetic oligonucleotide

SEQ ID NO: 614123 - DNA, 57 bp, Artificial; identical to SEQ ID NO: 20244
  Synthetic oligonucleotide

SEQ ID NO: 614124 - DNA, 57 bp, Artificial; identical to SEQ ID NO: 482514
  Synthetic oligonucleotide

SEQ ID NO: 614125 - DNA, 58 bp, Artificial; identical to SEQ ID NO: 482515
  Synthetic oligonucleotide

SEQ ID NO: 614126 - DNA, 52 bp, Artificial; identical to SEQ ID NO: 482519
  Synthetic oligonucleotide

SEQ ID NO: 614127 - DNA, 60 bp, Artificial; identical to SEQ ID NO: 482522
  Synthetic oligonucleotide

SEQ ID NO: 614128 - DNA, 58 bp, Artificial; identical to SEQ ID NO: 482523
  Synthetic oligonucleotide

SEQ ID NO: 614129 - DNA, 55 bp, Artificial; identical to SEQ ID NO: 482524
  Synthetic oligonucleotide

SEQ ID NO: 614130 - DNA, 60 bp, Artificial; identical to SEQ ID NO: 482525
  Synthetic oligonucleotide

SEQ ID NO: 614131 - DNA, 56 bp, Artificial; identical to SEQ ID NO: 482526
  Synthetic oligonucleotide

SEQ ID NO: 614132 - DNA, 57 bp, Artificial; identical to SEQ ID NO: 11855
  Synthetic oligonucleotide

SEQ ID NO: 614133 - DNA, 59 bp, Artificial; identical to SEQ ID NO: 482528
  Synthetic oligonucleotide

SEQ ID NO: 614134 - DNA, 60 bp, Artificial; identical to SEQ ID NO: 482531
  Synthetic oligonucleotide

SEQ ID NO: 614135 - DNA, 50 bp, Artificial; identical to SEQ ID NO: 482532
  Synthetic oligonucleotide

SEQ ID NO: 614136 - DNA, 55 bp, Artificial; identical to SEQ ID NO: 482533
  Synthetic oligonucleotide

SEQ ID NO: 614137 - DNA, 55 bp, Artificial; identical to SEQ ID NO: 482535
  Synthetic oligonucleotide

SEQ ID NO: 614138 - DNA, 57 bp, Artificial; identical to SEQ ID NO: 482536
  Synthetic oligonucleotide

SEQ ID NO: 614139 - DNA, 60 bp, Artificial; identical to SEQ ID NO: 12533
  Synthetic oligonucleotide

SEQ ID NO: 614140 - DNA, 58 bp, Artificial; identical to SEQ ID NO: 482540
  Synthetic oligonucleotide

SEQ ID NO: 614141 - DNA, 60 bp, Artificial; identical to SEQ ID NO: 482542
  Synthetic oligonucleotide

SEQ ID NO: 614142 - DNA, 55 bp, Artificial; identical to SEQ ID NO: 482548
  Synthetic oligonucleotide

SEQ ID NO: 614143 - DNA, 52 bp, Artificial; identical to SEQ ID NO: 482549
  Synthetic oligonucleotide

SEQ ID NO: 614144 - DNA, 56 bp, Artificial; identical to SEQ ID NO: 482552
  Synthetic oligonucleotide

SEQ ID NO: 614145 - DNA, 60 bp, Artificial; identical to SEQ ID NO: 482553
  Synthetic oligonucleotide

SEQ ID NO: 614146 - DNA, 55 bp, Artificial; identical to SEQ ID NO: 482557
  Synthetic oligonucleotide

SEQ ID NO: 614147 - DNA, 60 bp, Artificial; identical to SEQ ID NO: 482558
  Synthetic oligonucleotide

SEQ ID NO: 614148 - DNA, 60 bp, Artificial; identical to SEQ ID NO: 482560
  Synthetic oligonucleotide

SEQ ID NO: 614149 - DNA, 54 bp, Artificial; identical to SEQ ID NO: 482561
  Synthetic oligonucleotide

SEQ ID NO: 614150 - DNA, 51 bp, Artificial; identical to SEQ ID NO: 482565
  Synthetic oligonucleotide

SEQ ID NO: 614151 - DNA, 60 bp, Artificial; identical to SEQ ID NO: 482574
  Synthetic oligonucleotide

SEQ ID NO: 614152 - DNA, 59 bp, Artificial; identical to SEQ ID NO: 482575
  Synthetic oligonucleotide

SEQ ID NO: 614153 - DNA, 57 bp, Artificial; identical to SEQ ID NO: 482576
  Synthetic oligonucleotide

SEQ ID NO: 614154 - DNA, 59 bp, Artificial; identical to SEQ ID NO: 17122
  Synthetic oligonucleotide

SEQ ID NO: 614155 - DNA, 60 bp, Artificial; identical to SEQ ID NO: 482578
  Synthetic oligonucleotide

SEQ ID NO: 614156 - DNA, 51 bp, Artificial; identical to SEQ ID NO: 11196
  Synthetic oligonucleotide

SEQ ID NO: 614157 - DNA, 60 bp, Artificial; identical to SEQ ID NO: 482582
  Synthetic oligonucleotide

SEQ ID NO: 614158 - DNA, 54 bp, Artificial; identical to SEQ ID NO: 482584
  Synthetic oligonucleotide

SEQ ID NO: 614159 - DNA, 60 bp, Artificial; identical to SEQ ID NO: 482585
  Synthetic oligonucleotide

SEQ ID NO: 614160 - DNA, 60 bp, Artificial; identical to SEQ ID NO: 482586
  Synthetic oligonucleotide

SEQ ID NO: 614161 - DNA, 60 bp, Artificial; identical to SEQ ID NO: 482590
  Synthetic oligonucleotide

SEQ ID NO: 614162 - DNA, 60 bp, Artificial; identical to SEQ ID NO: 7832
  Synthetic oligonucleotide

SEQ ID NO: 614163 - DNA, 54 bp, Artificial; identical to SEQ ID NO: 10490
  Synthetic oligonucleotide

SEQ ID NO: 614164 - DNA, 60 bp, Artificial; identical to SEQ ID NO: 482592
  Synthetic oligonucleotide

SEQ ID NO: 614165 - DNA, 56 bp, Artificial; identical to SEQ ID NO: 482594
  Synthetic oligonucleotide

SEQ ID NO: 614166 - DNA, 51 bp, Artificial; identical to SEQ ID NO: 482595
  Synthetic oligonucleotide

SEQ ID NO: 614167 - DNA, 60 bp, Artificial; identical to SEQ ID NO: 482596
  Synthetic oligonucleotide

SEQ ID NO: 614168 - DNA, 56 bp, Artificial; identical to SEQ ID NO: 482597
  Synthetic oligonucleotide

SEQ ID NO: 614169 - DNA, 58 bp, Artificial; identical to SEQ ID NO: 482600
  Synthetic oligonucleotide

SEQ ID NO: 614170 - DNA, 60 bp, Artificial; identical to SEQ ID NO: 482606
  Synthetic oligonucleotide

SEQ ID NO: 614171 - DNA, 55 bp, Artificial; identical to SEQ ID NO: 482607
  Synthetic oligonucleotide

SEQ ID NO: 614172 - DNA, 60 bp, Artificial; identical to SEQ ID NO: 482610
  Synthetic oligonucleotide

SEQ ID NO: 614173 - DNA, 54 bp, Artificial; identical to SEQ ID NO: 482611
  Synthetic oligonucleotide

SEQ ID NO: 614174 - DNA, 60 bp, Artificial; identical to SEQ ID NO: 482615
  Synthetic oligonucleotide

SEQ ID NO: 614175 - DNA, 55 bp, Artificial; identical to SEQ ID NO: 482616
  Synthetic oligonucleotide

SEQ ID NO: 614176 - DNA, 60 bp, Artificial; identical to SEQ ID NO: 482617
  Synthetic oligonucleotide

SEQ ID NO: 614177 - DNA, 55 bp, Artificial; identical to SEQ ID NO: 482618
  Synthetic oligonucleotide

SEQ ID NO: 614178 - DNA, 55 bp, Artificial; identical to SEQ ID NO: 482619
  Synthetic oligonucleotide

SEQ ID NO: 614179 - DNA, 52 bp, Artificial; identical to SEQ ID NO: 482624
  Synthetic oligonucleotide

SEQ ID NO: 614180 - DNA, 51 bp, Artificial; identical to SEQ ID NO: 482629
  Synthetic oligonucleotide

SEQ ID NO: 614181 - DNA, 54 bp, Artificial; identical to SEQ ID NO: 482630
  Synthetic oligonucleotide

SEQ ID NO: 614182 - DNA, 60 bp, Artificial; identical to SEQ ID NO: 482632
  Synthetic oligonucleotide

SEQ ID NO: 614183 - DNA, 50 bp, Artificial; identical to SEQ ID NO: 482633
  Synthetic oligonucleotide

SEQ ID NO: 614184 - DNA, 58 bp, Artificial; identical to SEQ ID NO: 482635
  Synthetic oligonucleotide

SEQ ID NO: 614185 - DNA, 57 bp, Artificial; identical to SEQ ID NO: 482636
  Synthetic oligonucleotide

SEQ ID NO: 614186 - DNA, 54 bp, Artificial; identical to SEQ ID NO: 482640
  Synthetic oligonucleotide

SEQ ID NO: 614187 - DNA, 55 bp, Artificial; identical to SEQ ID NO: 482641
  Synthetic oligonucleotide

SEQ ID NO: 614188 - DNA, 54 bp, Artificial; identical to SEQ ID NO: 482642
  Synthetic oligonucleotide

SEQ ID NO: 614189 - DNA, 54 bp, Artificial; identical to SEQ ID NO: 482643
  Synthetic oligonucleotide

SEQ ID NO: 614190 - DNA, 60 bp, Artificial; identical to SEQ ID NO: 482644
  Synthetic oligonucleotide

SEQ ID NO: 614191 - DNA, 57 bp, Artificial; identical to SEQ ID NO: 482647
  Synthetic oligonucleotide

SEQ ID NO: 614192 - DNA, 60 bp, Artificial; identical to SEQ ID NO: 482648
  Synthetic oligonucleotide

SEQ ID NO: 614193 - DNA, 59 bp, Artificial; identical to SEQ ID NO: 482649
  Synthetic oligonucleotide

SEQ ID NO: 614194 - DNA, 60 bp, Artificial; identical to SEQ ID NO: 482650
  Synthetic oligonucleotide

SEQ ID NO: 614195 - DNA, 54 bp, Artificial; identical to SEQ ID NO: 17540
  Synthetic oligonucleotide

SEQ ID NO: 614196 - DNA, 60 bp, Artificial; identical to SEQ ID NO: 482652
  Synthetic oligonucleotide

SEQ ID NO: 614197 - DNA, 56 bp, Artificial; identical to SEQ ID NO: 19958
  Synthetic oligonucleotide

SEQ ID NO: 614198 - DNA, 60 bp, Artificial; identical to SEQ ID NO: 482655
  Synthetic oligonucleotide

SEQ ID NO: 614199 - DNA, 55 bp, Artificial; identical to SEQ ID NO: 482656
  Synthetic oligonucleotide

SEQ ID NO: 614200 - DNA, 59 bp, Artificial; identical to SEQ ID NO: 482657
  Synthetic oligonucleotide

SEQ ID NO: 614201 - DNA, 55 bp, Artificial; identical to SEQ ID NO: 482662
  Synthetic oligonucleotide

SEQ ID NO: 614202 - DNA, 58 bp, Artificial; identical to SEQ ID NO: 482667
  Synthetic oligonucleotide

SEQ ID NO: 614203 - DNA, 60 bp, Artificial; identical to SEQ ID NO: 482669
  Synthetic oligonucleotide

SEQ ID NO: 614204 - DNA, 60 bp, Artificial; identical to SEQ ID NO: 14763
  Synthetic oligonucleotide

SEQ ID NO: 614205 - DNA, 59 bp, Artificial; identical to SEQ ID NO: 482673
  Synthetic oligonucleotide

SEQ ID NO: 614206 - DNA, 55 bp, Artificial; identical to SEQ ID NO: 482675
  Synthetic oligonucleotide

SEQ ID NO: 614207 - DNA, 58 bp, Artificial; identical to SEQ ID NO: 482677
  Synthetic oligonucleotide

SEQ ID NO: 614208 - DNA, 57 bp, Artificial; identical to SEQ ID NO: 482682
  Synthetic oligonucleotide

SEQ ID NO: 614209 - DNA, 50 bp, Artificial; identical to SEQ ID NO: 482683
  Synthetic oligonucleotide

SEQ ID NO: 614210 - DNA, 55 bp, Artificial; identical to SEQ ID NO: 482690
  Synthetic oligonucleotide

SEQ ID NO: 614211 - DNA, 52 bp, Artificial; identical to SEQ ID NO: 482693
  Synthetic oligonucleotide

SEQ ID NO: 614212 - DNA, 55 bp, Artificial; identical to SEQ ID NO: 482694
  Synthetic oligonucleotide

SEQ ID NO: 614213 - DNA, 57 bp, Artificial; identical to SEQ ID NO: 482695
  Synthetic oligonucleotide

SEQ ID NO: 614214 - DNA, 55 bp, Artificial; identical to SEQ ID NO: 482697
  Synthetic oligonucleotide

SEQ ID NO: 614215 - DNA, 58 bp, Artificial; identical to SEQ ID NO: 482704
  Synthetic oligonucleotide

SEQ ID NO: 614216 - DNA, 57 bp, Artificial; identical to SEQ ID NO: 482709
  Synthetic oligonucleotide

SEQ ID NO: 614217 - DNA, 55 bp, Artificial; identical to SEQ ID NO: 482710
  Synthetic oligonucleotide

SEQ ID NO: 614218 - DNA, 60 bp, Artificial; identical to SEQ ID NO: 482712
  Synthetic oligonucleotide

SEQ ID NO: 614219 - DNA, 55 bp, Artificial; identical to SEQ ID NO: 482713
  Synthetic oligonucleotide

SEQ ID NO: 614220 - DNA, 60 bp, Artificial; identical to SEQ ID NO: 482715
  Synthetic oligonucleotide

SEQ ID NO: 614221 - DNA, 57 bp, Artificial; identical to SEQ ID NO: 482716
  Synthetic oligonucleotide

SEQ ID NO: 614222 - DNA, 55 bp, Artificial; identical to SEQ ID NO: 482718
  Synthetic oligonucleotide

SEQ ID NO: 614223 - DNA, 53 bp, Artificial; identical to SEQ ID NO: 482721
  Synthetic oligonucleotide

SEQ ID NO: 614224 - DNA, 56 bp, Artificial; identical to SEQ ID NO: 482722
  Synthetic oligonucleotide

SEQ ID NO: 614225 - DNA, 55 bp, Artificial; identical to SEQ ID NO: 482725
  Synthetic oligonucleotide

SEQ ID NO: 614226 - DNA, 55 bp, Artificial; identical to SEQ ID NO: 482726
  Synthetic oligonucleotide

SEQ ID NO: 614227 - DNA, 55 bp, Artificial; identical to SEQ ID NO: 482727
  Synthetic oligonucleotide

SEQ ID NO: 614228 - DNA, 59 bp, Artificial; identical to SEQ ID NO: 482728
  Synthetic oligonucleotide

SEQ ID NO: 614229 - DNA, 57 bp, Artificial; identical to SEQ ID NO: 482729
  Synthetic oligonucleotide

SEQ ID NO: 614230 - DNA, 53 bp, Artificial; identical to SEQ ID NO: 482730
  Synthetic oligonucleotide

SEQ ID NO: 614231 - DNA, 53 bp, Artificial; identical to SEQ ID NO: 482732
  Synthetic oligonucleotide

SEQ ID NO: 614232 - DNA, 60 bp, Artificial; identical to SEQ ID NO: 482733
  Synthetic oligonucleotide

SEQ ID NO: 614233 - DNA, 57 bp, Artificial; identical to SEQ ID NO: 482737
  Synthetic oligonucleotide

SEQ ID NO: 614234 - DNA, 59 bp, Artificial; identical to SEQ ID NO: 7569
  Synthetic oligonucleotide

SEQ ID NO: 614235 - DNA, 52 bp, Artificial; identical to SEQ ID NO: 482738
  Synthetic oligonucleotide

SEQ ID NO: 614236 - DNA, 53 bp, Artificial; identical to SEQ ID NO: 482739
  Synthetic oligonucleotide

SEQ ID NO: 614237 - DNA, 52 bp, Artificial; identical to SEQ ID NO: 482743
  Synthetic oligonucleotide

SEQ ID NO: 614238 - DNA, 57 bp, Artificial; identical to SEQ ID NO: 482744
  Synthetic oligonucleotide

SEQ ID NO: 614239 - DNA, 52 bp, Artificial; identical to SEQ ID NO: 482747
  Synthetic oligonucleotide

SEQ ID NO: 614240 - DNA, 53 bp, Artificial; identical to SEQ ID NO: 18740
  Synthetic oligonucleotide

SEQ ID NO: 614241 - DNA, 57 bp, Artificial; identical to SEQ ID NO: 482752
  Synthetic oligonucleotide

SEQ ID NO: 614242 - DNA, 56 bp, Artificial; identical to SEQ ID NO: 482753
  Synthetic oligonucleotide

SEQ ID NO: 614243 - DNA, 58 bp, Artificial; identical to SEQ ID NO: 482756
  Synthetic oligonucleotide

SEQ ID NO: 614244 - DNA, 54 bp, Artificial; identical to SEQ ID NO: 482759
  Synthetic oligonucleotide

SEQ ID NO: 614245 - DNA, 58 bp, Artificial; identical to SEQ ID NO: 482761
  Synthetic oligonucleotide

SEQ ID NO: 614246 - DNA, 57 bp, Artificial; identical to SEQ ID NO: 482762
  Synthetic oligonucleotide

SEQ ID NO: 614247 - DNA, 57 bp, Artificial; identical to SEQ ID NO: 482763
  Synthetic oligonucleotide

SEQ ID NO: 614248 - DNA, 60 bp, Artificial; identical to SEQ ID NO: 482764
  Synthetic oligonucleotide

SEQ ID NO: 614249 - DNA, 60 bp, Artificial; identical to SEQ ID NO: 482767
  Synthetic oligonucleotide

SEQ ID NO: 614250 - DNA, 54 bp, Artificial; identical to SEQ ID NO: 88
  Synthetic oligonucleotide

SEQ ID NO: 614251 - DNA, 59 bp, Artificial; identical to SEQ ID NO: 482769
  Synthetic oligonucleotide

SEQ ID NO: 614252 - DNA, 55 bp, Artificial; identical to SEQ ID NO: 482774
  Synthetic oligonucleotide

SEQ ID NO: 614253 - DNA, 57 bp, Artificial; identical to SEQ ID NO: 482776
  Synthetic oligonucleotide

SEQ ID NO: 614254 - DNA, 50 bp, Artificial; identical to SEQ ID NO: 482780
  Synthetic oligonucleotide

SEQ ID NO: 614255 - DNA, 52 bp, Artificial; identical to SEQ ID NO: 482786
  Synthetic oligonucleotide

SEQ ID NO: 614256 - DNA, 53 bp, Artificial; identical to SEQ ID NO: 482788
  Synthetic oligonucleotide

SEQ ID NO: 614257 - DNA, 59 bp, Artificial; identical to SEQ ID NO: 482789
  Synthetic oligonucleotide

SEQ ID NO: 614258 - DNA, 60 bp, Artificial; identical to SEQ ID NO: 482798
  Synthetic oligonucleotide

SEQ ID NO: 614259 - DNA, 58 bp, Artificial; identical to SEQ ID NO: 18208
  Synthetic oligonucleotide

SEQ ID NO: 614260 - DNA, 59 bp, Artificial; identical to SEQ ID NO: 482805
  Synthetic oligonucleotide

SEQ ID NO: 614261 - DNA, 60 bp, Artificial; identical to SEQ ID NO: 482806
  Synthetic oligonucleotide

SEQ ID NO: 614262 - DNA, 60 bp, Artificial; identical to SEQ ID NO: 482813
  Synthetic oligonucleotide

SEQ ID NO: 614263 - DNA, 59 bp, Artificial; identical to SEQ ID NO: 482814
  Synthetic oligonucleotide

SEQ ID NO: 614264 - DNA, 57 bp, Artificial; identical to SEQ ID NO: 482816
  Synthetic oligonucleotide

SEQ ID NO: 614265 - DNA, 54 bp, Artificial; identical to SEQ ID NO: 482817
  Synthetic oligonucleotide

SEQ ID NO: 614266 - DNA, 50 bp, Artificial; identical to SEQ ID NO: 6619
  Synthetic oligonucleotide

SEQ ID NO: 614267 - DNA, 58 bp, Artificial; identical to SEQ ID NO: 482818
  Synthetic oligonucleotide

SEQ ID NO: 614268 - DNA, 54 bp, Artificial; identical to SEQ ID NO: 482819
  Synthetic oligonucleotide

SEQ ID NO: 614269 - DNA, 50 bp, Artificial; identical to SEQ ID NO: 482822
  Synthetic oligonucleotide

SEQ ID NO: 614270 - DNA, 52 bp, Artificial; identical to SEQ ID NO: 482823
  Synthetic oligonucleotide

SEQ ID NO: 614271 - DNA, 60 bp, Artificial; identical to SEQ ID NO: 482824
  Synthetic oligonucleotide

SEQ ID NO: 614272 - DNA, 58 bp, Artificial; identical to SEQ ID NO: 482825
  Synthetic oligonucleotide

SEQ ID NO: 614273 - DNA, 57 bp, Artificial; identical to SEQ ID NO: 482827
  Synthetic oligonucleotide

SEQ ID NO: 614274 - DNA, 58 bp, Artificial; identical to SEQ ID NO: 482829
  Synthetic oligonucleotide

SEQ ID NO: 614275 - DNA, 59 bp, Artificial; identical to SEQ ID NO: 482830
  Synthetic oligonucleotide

SEQ ID NO: 614276 - DNA, 57 bp, Artificial; identical to SEQ ID NO: 482838
  Synthetic oligonucleotide

SEQ ID NO: 614277 - DNA, 60 bp, Artificial; identical to SEQ ID NO: 482840
  Synthetic oligonucleotide

SEQ ID NO: 614278 - DNA, 60 bp, Artificial; identical to SEQ ID NO: 482841
  Synthetic oligonucleotide

SEQ ID NO: 614279 - DNA, 57 bp, Artificial; identical to SEQ ID NO: 17784
  Synthetic oligonucleotide

SEQ ID NO: 614280 - DNA, 54 bp, Artificial; identical to SEQ ID NO: 482849
  Synthetic oligonucleotide

SEQ ID NO: 614281 - DNA, 56 bp, Artificial; identical to SEQ ID NO: 482850
  Synthetic oligonucleotide

SEQ ID NO: 614282 - DNA, 60 bp, Artificial; identical to SEQ ID NO: 482854
  Synthetic oligonucleotide

SEQ ID NO: 614283 - DNA, 57 bp, Artificial; identical to SEQ ID NO: 482857
  Synthetic oligonucleotide

SEQ ID NO: 614284 - DNA, 51 bp, Artificial; identical to SEQ ID NO: 482858
  Synthetic oligonucleotide

SEQ ID NO: 614285 - DNA, 54 bp, Artificial; identical to SEQ ID NO: 482861
  Synthetic oligonucleotide

SEQ ID NO: 614286 - DNA, 58 bp, Artificial; identical to SEQ ID NO: 482864
  Synthetic oligonucleotide

SEQ ID NO: 614287 - DNA, 59 bp, Artificial; identical to SEQ ID NO: 482865
  Synthetic oligonucleotide

SEQ ID NO: 614288 - DNA, 60 bp, Artificial; identical to SEQ ID NO: 482868
  Synthetic oligonucleotide

SEQ ID NO: 614289 - DNA, 60 bp, Artificial; identical to SEQ ID NO: 482869
  Synthetic oligonucleotide

SEQ ID NO: 614290 - DNA, 55 bp, Artificial; identical to SEQ ID NO: 482870
  Synthetic oligonucleotide

SEQ ID NO: 614291 - DNA, 60 bp, Artificial; identical to SEQ ID NO: 482871
  Synthetic oligonucleotide

SEQ ID NO: 614292 - DNA, 55 bp, Artificial; identical to SEQ ID NO: 482872
  Synthetic oligonucleotide

SEQ ID NO: 614293 - DNA, 59 bp, Artificial; identical to SEQ ID NO: 15511
  Synthetic oligonucleotide

SEQ ID NO: 614294 - DNA, 57 bp, Artificial; identical to SEQ ID NO: 482874
  Synthetic oligonucleotide

SEQ ID NO: 614295 - DNA, 60 bp, Artificial; identical to SEQ ID NO: 482878
  Synthetic oligonucleotide

SEQ ID NO: 614296 - DNA, 54 bp, Artificial; identical to SEQ ID NO: 482879
  Synthetic oligonucleotide

SEQ ID NO: 614297 - DNA, 59 bp, Artificial; identical to SEQ ID NO: 482882
  Synthetic oligonucleotide

SEQ ID NO: 614298 - DNA, 60 bp, Artificial; identical to SEQ ID NO: 482883
  Synthetic oligonucleotide

SEQ ID NO: 614299 - DNA, 60 bp, Artificial; identical to SEQ ID NO: 482887
  Synthetic oligonucleotide

SEQ ID NO: 614300 - DNA, 60 bp, Artificial; identical to SEQ ID NO: 482890
  Synthetic oligonucleotide

SEQ ID NO: 614301 - DNA, 56 bp, Artificial; identical to SEQ ID NO: 482891
  Synthetic oligonucleotide

SEQ ID NO: 614302 - DNA, 60 bp, Artificial; identical to SEQ ID NO: 482892
  Synthetic oligonucleotide

SEQ ID NO: 614303 - DNA, 55 bp, Artificial; identical to SEQ ID NO: 482899
  Synthetic oligonucleotide

SEQ ID NO: 614304 - DNA, 55 bp, Artificial; identical to SEQ ID NO: 482900
  Synthetic oligonucleotide

SEQ ID NO: 614305 - DNA, 60 bp, Artificial; identical to SEQ ID NO: 482902
  Synthetic oligonucleotide

SEQ ID NO: 614306 - DNA, 60 bp, Artificial; identical to SEQ ID NO: 482903
  Synthetic oligonucleotide

SEQ ID NO: 614307 - DNA, 51 bp, Artificial; identical to SEQ ID NO: 482904
  Synthetic oligonucleotide

SEQ ID NO: 614308 - DNA, 57 bp, Artificial; identical to SEQ ID NO: 482908
  Synthetic oligonucleotide

SEQ ID NO: 614309 - DNA, 55 bp, Artificial; identical to SEQ ID NO: 482910
  Synthetic oligonucleotide

SEQ ID NO: 614310 - DNA, 60 bp, Artificial; identical to SEQ ID NO: 482915
  Synthetic oligonucleotide

SEQ ID NO: 614311 - DNA, 60 bp, Artificial; identical to SEQ ID NO: 482916
  Synthetic oligonucleotide

SEQ ID NO: 614312 - DNA, 56 bp, Artificial; identical to SEQ ID NO: 482923
  Synthetic oligonucleotide

SEQ ID NO: 614313 - DNA, 58 bp, Artificial; identical to SEQ ID NO: 482924
  Synthetic oligonucleotide

SEQ ID NO: 614314 - DNA, 50 bp, Artificial; identical to SEQ ID NO: 482929
  Synthetic oligonucleotide

SEQ ID NO: 614315 - DNA, 53 bp, Artificial; identical to SEQ ID NO: 482930
  Synthetic oligonucleotide

SEQ ID NO: 614316 - DNA, 60 bp, Artificial; identical to SEQ ID NO: 482931
  Synthetic oligonucleotide

SEQ ID NO: 614317 - DNA, 56 bp, Artificial; identical to SEQ ID NO: 482935
  Synthetic oligonucleotide

SEQ ID NO: 614318 - DNA, 59 bp, Artificial; identical to SEQ ID NO: 482938
  Synthetic oligonucleotide

SEQ ID NO: 614319 - DNA, 53 bp, Artificial; identical to SEQ ID NO: 482939
  Synthetic oligonucleotide

SEQ ID NO: 614320 - DNA, 55 bp, Artificial; identical to SEQ ID NO: 482940
  Synthetic oligonucleotide

SEQ ID NO: 614321 - DNA, 52 bp, Artificial; identical to SEQ ID NO: 482942
  Synthetic oligonucleotide

SEQ ID NO: 614322 - DNA, 55 bp, Artificial; identical to SEQ ID NO: 482947
  Synthetic oligonucleotide

SEQ ID NO: 614323 - DNA, 52 bp, Artificial; identical to SEQ ID NO: 482948
  Synthetic oligonucleotide

SEQ ID NO: 614324 - DNA, 51 bp, Artificial; identical to SEQ ID NO: 482950
  Synthetic oligonucleotide

SEQ ID NO: 614325 - DNA, 56 bp, Artificial; identical to SEQ ID NO: 482951
  Synthetic oligonucleotide

SEQ ID NO: 614326 - DNA, 60 bp, Artificial; identical to SEQ ID NO: 482953
  Synthetic oligonucleotide

SEQ ID NO: 614327 - DNA, 60 bp, Artificial; identical to SEQ ID NO: 482964
  Synthetic oligonucleotide

SEQ ID NO: 614328 - DNA, 60 bp, Artificial; identical to SEQ ID NO: 482966
  Synthetic oligonucleotide

SEQ ID NO: 614329 - DNA, 60 bp, Artificial; identical to SEQ ID NO: 482968
  Synthetic oligonucleotide

SEQ ID NO: 614330 - DNA, 52 bp, Artificial; identical to SEQ ID NO: 482969
  Synthetic oligonucleotide

SEQ ID NO: 614331 - DNA, 50 bp, Artificial; identical to SEQ ID NO: 482971
  Synthetic oligonucleotide

SEQ ID NO: 614332 - DNA, 55 bp, Artificial; identical to SEQ ID NO: 482972
  Synthetic oligonucleotide

SEQ ID NO: 614333 - DNA, 55 bp, Artificial; identical to SEQ ID NO: 482980
  Synthetic oligonucleotide

SEQ ID NO: 614334 - DNA, 55 bp, Artificial; identical to SEQ ID NO: 482983
  Synthetic oligonucleotide

SEQ ID NO: 614335 - DNA, 60 bp, Artificial; identical to SEQ ID NO: 482987
  Synthetic oligonucleotide

SEQ ID NO: 614336 - DNA, 60 bp, Artificial; identical to SEQ ID NO: 482989
  Synthetic oligonucleotide

SEQ ID NO: 614337 - DNA, 54 bp, Artificial; identical to SEQ ID NO: 482990
  Synthetic oligonucleotide

SEQ ID NO: 614338 - DNA, 55 bp, Artificial; identical to SEQ ID NO: 482995
  Synthetic oligonucleotide

SEQ ID NO: 614339 - DNA, 60 bp, Artificial; identical to SEQ ID NO: 482999
  Synthetic oligonucleotide

SEQ ID NO: 614340 - DNA, 60 bp, Artificial; identical to SEQ ID NO: 483004
  Synthetic oligonucleotide

SEQ ID NO: 614341 - DNA, 57 bp, Artificial; identical to SEQ ID NO: 483006
  Synthetic oligonucleotide

SEQ ID NO: 614342 - DNA, 60 bp, Artificial; identical to SEQ ID NO: 483009
  Synthetic oligonucleotide

SEQ ID NO: 614343 - DNA, 50 bp, Artificial; identical to SEQ ID NO: 483013
  Synthetic oligonucleotide

SEQ ID NO: 614344 - DNA, 59 bp, Artificial; identical to SEQ ID NO: 483014
  Synthetic oligonucleotide

SEQ ID NO: 614345 - DNA, 58 bp, Artificial; identical to SEQ ID NO: 483016
  Synthetic oligonucleotide

SEQ ID NO: 614346 - DNA, 54 bp, Artificial; identical to SEQ ID NO: 483018
  Synthetic oligonucleotide

SEQ ID NO: 614347 - DNA, 57 bp, Artificial; identical to SEQ ID NO: 483023
  Synthetic oligonucleotide

SEQ ID NO: 614348 - DNA, 50 bp, Artificial; identical to SEQ ID NO: 483028
  Synthetic oligonucleotide

SEQ ID NO: 614349 - DNA, 60 bp, Artificial; identical to SEQ ID NO: 483035
  Synthetic oligonucleotide

SEQ ID NO: 614350 - DNA, 60 bp, Artificial; identical to SEQ ID NO: 483039
  Synthetic oligonucleotide

SEQ ID NO: 614351 - DNA, 55 bp, Artificial; identical to SEQ ID NO: 483045
  Synthetic oligonucleotide

SEQ ID NO: 614352 - DNA, 57 bp, Artificial; identical to SEQ ID NO: 483049
  Synthetic oligonucleotide

SEQ ID NO: 614353 - DNA, 53 bp, Artificial; identical to SEQ ID NO: 483050
  Synthetic oligonucleotide

SEQ ID NO: 614354 - DNA, 60 bp, Artificial; identical to SEQ ID NO: 483052
  Synthetic oligonucleotide

SEQ ID NO: 614355 - DNA, 54 bp, Artificial; identical to SEQ ID NO: 6013
  Synthetic oligonucleotide

SEQ ID NO: 614356 - DNA, 55 bp, Artificial; identical to SEQ ID NO: 483053
  Synthetic oligonucleotide

SEQ ID NO: 614357 - DNA, 56 bp, Artificial; identical to SEQ ID NO: 483054
  Synthetic oligonucleotide

SEQ ID NO: 614358 - DNA, 60 bp, Artificial; identical to SEQ ID NO: 483056
  Synthetic oligonucleotide

SEQ ID NO: 614359 - DNA, 60 bp, Artificial; identical to SEQ ID NO: 483057
  Synthetic oligonucleotide

SEQ ID NO: 614360 - DNA, 57 bp, Artificial; identical to SEQ ID NO: 483061
  Synthetic oligonucleotide

SEQ ID NO: 614361 - DNA, 60 bp, Artificial; identical to SEQ ID NO: 483062
  Synthetic oligonucleotide

SEQ ID NO: 614362 - DNA, 50 bp, Artificial; identical to SEQ ID NO: 483066
  Synthetic oligonucleotide

SEQ ID NO: 614363 - DNA, 55 bp, Artificial; identical to SEQ ID NO: 483067
  Synthetic oligonucleotide

SEQ ID NO: 614364 - DNA, 60 bp, Artificial; identical to SEQ ID NO: 483068
  Synthetic oligonucleotide

SEQ ID NO: 614365 - DNA, 58 bp, Artificial; identical to SEQ ID NO: 483069
  Synthetic oligonucleotide

SEQ ID NO: 614366 - DNA, 60 bp, Artificial; identical to SEQ ID NO: 483070
  Synthetic oligonucleotide

SEQ ID NO: 614367 - DNA, 53 bp, Artificial; identical to SEQ ID NO: 483071
  Synthetic oligonucleotide

SEQ ID NO: 614368 - DNA, 59 bp, Artificial; identical to SEQ ID NO: 483074
  Synthetic oligonucleotide

SEQ ID NO: 614369 - DNA, 60 bp, Artificial; identical to SEQ ID NO: 483075
  Synthetic oligonucleotide

SEQ ID NO: 614370 - DNA, 60 bp, Artificial; identical to SEQ ID NO: 483078
  Synthetic oligonucleotide

SEQ ID NO: 614371 - DNA, 56 bp, Artificial; identical to SEQ ID NO: 483080
  Synthetic oligonucleotide

SEQ ID NO: 614372 - DNA, 58 bp, Artificial; identical to SEQ ID NO: 483084
  Synthetic oligonucleotide

SEQ ID NO: 614373 - DNA, 50 bp, Artificial; identical to SEQ ID NO: 483086
  Synthetic oligonucleotide

SEQ ID NO: 614374 - DNA, 56 bp, Artificial; identical to SEQ ID NO: 483088
  Synthetic oligonucleotide

SEQ ID NO: 614375 - DNA, 60 bp, Artificial; identical to SEQ ID NO: 483089
  Synthetic oligonucleotide

SEQ ID NO: 614376 - DNA, 55 bp, Artificial; identical to SEQ ID NO: 483092
  Synthetic oligonucleotide

SEQ ID NO: 614377 - DNA, 60 bp, Artificial; identical to SEQ ID NO: 483097
  Synthetic oligonucleotide

SEQ ID NO: 614378 - DNA, 58 bp, Artificial; identical to SEQ ID NO: 483100
  Synthetic oligonucleotide

SEQ ID NO: 614379 - DNA, 56 bp, Artificial; identical to SEQ ID NO: 483102
  Synthetic oligonucleotide

SEQ ID NO: 614380 - DNA, 55 bp, Artificial; identical to SEQ ID NO: 483105
  Synthetic oligonucleotide

SEQ ID NO: 614381 - DNA, 58 bp, Artificial; identical to SEQ ID NO: 483106
  Synthetic oligonucleotide

SEQ ID NO: 614382 - DNA, 50 bp, Artificial; identical to SEQ ID NO: 483107
  Synthetic oligonucleotide

SEQ ID NO: 614383 - DNA, 55 bp, Artificial; identical to SEQ ID NO: 483108
  Synthetic oligonucleotide

SEQ ID NO: 614384 - DNA, 60 bp, Artificial; identical to SEQ ID NO: 483109
  Synthetic oligonucleotide

SEQ ID NO: 614385 - DNA, 52 bp, Artificial; identical to SEQ ID NO: 483114
  Synthetic oligonucleotide

SEQ ID NO: 614386 - DNA, 56 bp, Artificial; identical to SEQ ID NO: 483115
  Synthetic oligonucleotide

SEQ ID NO: 614387 - DNA, 60 bp, Artificial; identical to SEQ ID NO: 483116
  Synthetic oligonucleotide

SEQ ID NO: 614388 - DNA, 58 bp, Artificial; identical to SEQ ID NO: 483117
  Synthetic oligonucleotide

SEQ ID NO: 614389 - DNA, 56 bp, Artificial; identical to SEQ ID NO: 483118
  Synthetic oligonucleotide

SEQ ID NO: 614390 - DNA, 57 bp, Artificial; identical to SEQ ID NO: 483119
  Synthetic oligonucleotide

SEQ ID NO: 614391 - DNA, 57 bp, Artificial; identical to SEQ ID NO: 483121
  Synthetic oligonucleotide

SEQ ID NO: 614392 - DNA, 60 bp, Artificial; identical to SEQ ID NO: 483123
  Synthetic oligonucleotide

SEQ ID NO: 614393 - DNA, 60 bp, Artificial; identical to SEQ ID NO: 483124
  Synthetic oligonucleotide

SEQ ID NO: 614394 - DNA, 59 bp, Artificial; identical to SEQ ID NO: 483126
  Synthetic oligonucleotide

SEQ ID NO: 614395 - DNA, 55 bp, Artificial; identical to SEQ ID NO: 483129
  Synthetic oligonucleotide

SEQ ID NO: 614396 - DNA, 56 bp, Artificial; identical to SEQ ID NO: 483134
  Synthetic oligonucleotide

SEQ ID NO: 614397 - DNA, 60 bp, Artificial; identical to SEQ ID NO: 483135
  Synthetic oligonucleotide

SEQ ID NO: 614398 - DNA, 58 bp, Artificial; identical to SEQ ID NO: 483136
  Synthetic oligonucleotide

SEQ ID NO: 614399 - DNA, 60 bp, Artificial; identical to SEQ ID NO: 483137
  Synthetic oligonucleotide

SEQ ID NO: 614400 - DNA, 55 bp, Artificial; identical to SEQ ID NO: 483138
  Synthetic oligonucleotide

SEQ ID NO: 614401 - DNA, 60 bp, Artificial; identical to SEQ ID NO: 483140
  Synthetic oligonucleotide

SEQ ID NO: 614402 - DNA, 60 bp, Artificial; identical to SEQ ID NO: 483141
  Synthetic oligonucleotide

SEQ ID NO: 614403 - DNA, 60 bp, Artificial; identical to SEQ ID NO: 483143
  Synthetic oligonucleotide

SEQ ID NO: 614404 - DNA, 60 bp, Artificial; identical to SEQ ID NO: 483151
  Synthetic oligonucleotide

SEQ ID NO: 614405 - DNA, 60 bp, Artificial; identical to SEQ ID NO: 483152
  Synthetic oligonucleotide

SEQ ID NO: 614406 - DNA, 60 bp, Artificial; identical to SEQ ID NO: 483153
  Synthetic oligonucleotide

SEQ ID NO: 614407 - DNA, 60 bp, Artificial; identical to SEQ ID NO: 483154
  Synthetic oligonucleotide

SEQ ID NO: 614408 - DNA, 52 bp, Artificial; identical to SEQ ID NO: 483155
  Synthetic oligonucleotide

SEQ ID NO: 614409 - DNA, 55 bp, Artificial; identical to SEQ ID NO: 483157
  Synthetic oligonucleotide

SEQ ID NO: 614410 - DNA, 58 bp, Artificial; identical to SEQ ID NO: 483158
  Synthetic oligonucleotide

SEQ ID NO: 614411 - DNA, 53 bp, Artificial; identical to SEQ ID NO: 483169
  Synthetic oligonucleotide

SEQ ID NO: 614412 - DNA, 60 bp, Artificial; identical to SEQ ID NO: 483170
  Synthetic oligonucleotide

SEQ ID NO: 614413 - DNA, 55 bp, Artificial; identical to SEQ ID NO: 483171
  Synthetic oligonucleotide

SEQ ID NO: 614414 - DNA, 60 bp, Artificial; identical to SEQ ID NO: 483172
  Synthetic oligonucleotide

SEQ ID NO: 614415 - DNA, 55 bp, Artificial; identical to SEQ ID NO: 483173
  Synthetic oligonucleotide

SEQ ID NO: 614416 - DNA, 60 bp, Artificial; identical to SEQ ID NO: 483174
  Synthetic oligonucleotide

SEQ ID NO: 614417 - DNA, 59 bp, Artificial; identical to SEQ ID NO: 483175
  Synthetic oligonucleotide

SEQ ID NO: 614418 - DNA, 60 bp, Artificial; identical to SEQ ID NO: 483177
  Synthetic oligonucleotide

SEQ ID NO: 614419 - DNA, 60 bp, Artificial; identical to SEQ ID NO: 483178
  Synthetic oligonucleotide

SEQ ID NO: 614420 - DNA, 55 bp, Artificial; identical to SEQ ID NO: 483180
  Synthetic oligonucleotide

SEQ ID NO: 614421 - DNA, 60 bp, Artificial; identical to SEQ ID NO: 7640
  Synthetic oligonucleotide

SEQ ID NO: 614422 - DNA, 50 bp, Artificial; identical to SEQ ID NO: 483188
  Synthetic oligonucleotide

SEQ ID NO: 614423 - DNA, 60 bp, Artificial; identical to SEQ ID NO: 483190
  Synthetic oligonucleotide

SEQ ID NO: 614424 - DNA, 55 bp, Artificial; identical to SEQ ID NO: 483192
  Synthetic oligonucleotide

SEQ ID NO: 614425 - DNA, 55 bp, Artificial; identical to SEQ ID NO: 483193
  Synthetic oligonucleotide

SEQ ID NO: 614426 - DNA, 58 bp, Artificial; identical to SEQ ID NO: 483196
  Synthetic oligonucleotide

SEQ ID NO: 614427 - DNA, 55 bp, Artificial; identical to SEQ ID NO: 483202
  Synthetic oligonucleotide

SEQ ID NO: 614428 - DNA, 60 bp, Artificial; identical to SEQ ID NO: 483204
  Synthetic oligonucleotide

SEQ ID NO: 614429 - DNA, 60 bp, Artificial; identical to SEQ ID NO: 483205
  Synthetic oligonucleotide

SEQ ID NO: 614430 - DNA, 60 bp, Artificial; identical to SEQ ID NO: 483206
  Synthetic oligonucleotide

SEQ ID NO: 614431 - DNA, 59 bp, Artificial; identical to SEQ ID NO: 19237
  Synthetic oligonucleotide

SEQ ID NO: 614432 - DNA, 57 bp, Artificial; identical to SEQ ID NO: 483210
  Synthetic oligonucleotide

SEQ ID NO: 614433 - DNA, 52 bp, Artificial; identical to SEQ ID NO: 483212
  Synthetic oligonucleotide

SEQ ID NO: 614434 - DNA, 56 bp, Artificial; identical to SEQ ID NO: 483214
  Synthetic oligonucleotide

SEQ ID NO: 614435 - DNA, 60 bp, Artificial; identical to SEQ ID NO: 483219
  Synthetic oligonucleotide

SEQ ID NO: 614436 - DNA, 52 bp, Artificial; identical to SEQ ID NO: 483220
  Synthetic oligonucleotide

SEQ ID NO: 614437 - DNA, 60 bp, Artificial; identical to SEQ ID NO: 483223
  Synthetic oligonucleotide

SEQ ID NO: 614438 - DNA, 58 bp, Artificial; identical to SEQ ID NO: 483224
  Synthetic oligonucleotide

SEQ ID NO: 614439 - DNA, 55 bp, Artificial; identical to SEQ ID NO: 483226
  Synthetic oligonucleotide

SEQ ID NO: 614440 - DNA, 60 bp, Artificial; identical to SEQ ID NO: 483230
  Synthetic oligonucleotide

SEQ ID NO: 614441 - DNA, 60 bp, Artificial; identical to SEQ ID NO: 483239
  Synthetic oligonucleotide

SEQ ID NO: 614442 - DNA, 60 bp, Artificial; identical to SEQ ID NO: 483240
  Synthetic oligonucleotide

SEQ ID NO: 614443 - DNA, 57 bp, Artificial; identical to SEQ ID NO: 483242
  Synthetic oligonucleotide

SEQ ID NO: 614444 - DNA, 55 bp, Artificial; identical to SEQ ID NO: 483245
  Synthetic oligonucleotide

SEQ ID NO: 614445 - DNA, 59 bp, Artificial; identical to SEQ ID NO: 483247
  Synthetic oligonucleotide

SEQ ID NO: 614446 - DNA, 57 bp, Artificial; identical to SEQ ID NO: 483250
  Synthetic oligonucleotide

SEQ ID NO: 614447 - DNA, 60 bp, Artificial; identical to SEQ ID NO: 483251
  Synthetic oligonucleotide

SEQ ID NO: 614448 - DNA, 60 bp, Artificial; identical to SEQ ID NO: 483259
  Synthetic oligonucleotide

SEQ ID NO: 614449 - DNA, 60 bp, Artificial; identical to SEQ ID NO: 483260
  Synthetic oligonucleotide

SEQ ID NO: 614450 - DNA, 60 bp, Artificial; identical to SEQ ID NO: 483262
  Synthetic oligonucleotide

SEQ ID NO: 614451 - DNA, 56 bp, Artificial; identical to SEQ ID NO: 483263
  Synthetic oligonucleotide

SEQ ID NO: 614452 - DNA, 50 bp, Artificial; identical to SEQ ID NO: 483264
  Synthetic oligonucleotide

SEQ ID NO: 614453 - DNA, 54 bp, Artificial; identical to SEQ ID NO: 483269
  Synthetic oligonucleotide

SEQ ID NO: 614454 - DNA, 55 bp, Artificial; identical to SEQ ID NO: 483273
  Synthetic oligonucleotide

SEQ ID NO: 614455 - DNA, 55 bp, Artificial; identical to SEQ ID NO: 483274
  Synthetic oligonucleotide

SEQ ID NO: 614456 - DNA, 55 bp, Artificial; identical to SEQ ID NO: 483275
  Synthetic oligonucleotide

SEQ ID NO: 614457 - DNA, 51 bp, Artificial; identical to SEQ ID NO: 483277
  Synthetic oligonucleotide

SEQ ID NO: 614458 - DNA, 60 bp, Artificial; identical to SEQ ID NO: 483282
  Synthetic oligonucleotide

SEQ ID NO: 614459 - DNA, 54 bp, Artificial; identical to SEQ ID NO: 483287
  Synthetic oligonucleotide

SEQ ID NO: 614460 - DNA, 54 bp, Artificial; identical to SEQ ID NO: 483293
  Synthetic oligonucleotide

SEQ ID NO: 614461 - DNA, 55 bp, Artificial; identical to SEQ ID NO: 483297
  Synthetic oligonucleotide

SEQ ID NO: 614462 - DNA, 60 bp, Artificial; identical to SEQ ID NO: 483299
  Synthetic oligonucleotide

SEQ ID NO: 614463 - DNA, 55 bp, Artificial; identical to SEQ ID NO: 483300
  Synthetic oligonucleotide

SEQ ID NO: 614464 - DNA, 51 bp, Artificial; identical to SEQ ID NO: 14744
  Synthetic oligonucleotide

SEQ ID NO: 614465 - DNA, 56 bp, Artificial; identical to SEQ ID NO: 483301
  Synthetic oligonucleotide

SEQ ID NO: 614466 - DNA, 55 bp, Artificial; identical to SEQ ID NO: 483303
  Synthetic oligonucleotide

SEQ ID NO: 614467 - DNA, 57 bp, Artificial; identical to SEQ ID NO: 483304
  Synthetic oligonucleotide

SEQ ID NO: 614468 - DNA, 60 bp, Artificial; identical to SEQ ID NO: 8339
  Synthetic oligonucleotide

SEQ ID NO: 614469 - DNA, 53 bp, Artificial; identical to SEQ ID NO: 483306
  Synthetic oligonucleotide

SEQ ID NO: 614470 - DNA, 55 bp, Artificial; identical to SEQ ID NO: 483308
  Synthetic oligonucleotide

SEQ ID NO: 614471 - DNA, 57 bp, Artificial; identical to SEQ ID NO: 483311
  Synthetic oligonucleotide

SEQ ID NO: 614472 - DNA, 60 bp, Artificial; identical to SEQ ID NO: 483314
  Synthetic oligonucleotide

SEQ ID NO: 614473 - DNA, 60 bp, Artificial; identical to SEQ ID NO: 483318
  Synthetic oligonucleotide

SEQ ID NO: 614474 - DNA, 60 bp, Artificial; identical to SEQ ID NO: 7420
  Synthetic oligonucleotide

SEQ ID NO: 614475 - DNA, 60 bp, Artificial; identical to SEQ ID NO: 483321
  Synthetic oligonucleotide

SEQ ID NO: 614476 - DNA, 60 bp, Artificial; identical to SEQ ID NO: 483322
  Synthetic oligonucleotide

SEQ ID NO: 614477 - DNA, 60 bp, Artificial; identical to SEQ ID NO: 483324
  Synthetic oligonucleotide

SEQ ID NO: 614478 - DNA, 50 bp, Artificial; identical to SEQ ID NO: 483325
  Synthetic oligonucleotide

SEQ ID NO: 614479 - DNA, 55 bp, Artificial; identical to SEQ ID NO: 483327
  Synthetic oligonucleotide

SEQ ID NO: 614480 - DNA, 59 bp, Artificial; identical to SEQ ID NO: 11279
  Synthetic oligonucleotide

SEQ ID NO: 614481 - DNA, 60 bp, Artificial; identical to SEQ ID NO: 483333
  Synthetic oligonucleotide

SEQ ID NO: 614482 - DNA, 51 bp, Artificial; identical to SEQ ID NO: 483335
  Synthetic oligonucleotide

SEQ ID NO: 614483 - DNA, 60 bp, Artificial; identical to SEQ ID NO: 483336
  Synthetic oligonucleotide

SEQ ID NO: 614484 - DNA, 60 bp, Artificial; identical to SEQ ID NO: 11593
  Synthetic oligonucleotide

SEQ ID NO: 614485 - DNA, 55 bp, Artificial; identical to SEQ ID NO: 483338
  Synthetic oligonucleotide

SEQ ID NO: 614486 - DNA, 60 bp, Artificial; identical to SEQ ID NO: 483339
  Synthetic oligonucleotide

SEQ ID NO: 614487 - DNA, 60 bp, Artificial; identical to SEQ ID NO: 483344
  Synthetic oligonucleotide

SEQ ID NO: 614488 - DNA, 60 bp, Artificial; identical to SEQ ID NO: 483348
  Synthetic oligonucleotide

SEQ ID NO: 614489 - DNA, 60 bp, Artificial; identical to SEQ ID NO: 483350
  Synthetic oligonucleotide

SEQ ID NO: 614490 - DNA, 55 bp, Artificial; identical to SEQ ID NO: 483352
  Synthetic oligonucleotide

SEQ ID NO: 614491 - DNA, 55 bp, Artificial; identical to SEQ ID NO: 483353
  Synthetic oligonucleotide

SEQ ID NO: 614492 - DNA, 60 bp, Artificial; identical to SEQ ID NO: 15316
  Synthetic oligonucleotide

SEQ ID NO: 614493 - DNA, 53 bp, Artificial; identical to SEQ ID NO: 483354
  Synthetic oligonucleotide

SEQ ID NO: 614494 - DNA, 60 bp, Artificial; identical to SEQ ID NO: 483356
  Synthetic oligonucleotide

SEQ ID NO: 614495 - DNA, 55 bp, Artificial; identical to SEQ ID NO: 483358
  Synthetic oligonucleotide

SEQ ID NO: 614496 - DNA, 60 bp, Artificial; identical to SEQ ID NO: 483359
  Synthetic oligonucleotide

SEQ ID NO: 614497 - DNA, 59 bp, Artificial; identical to SEQ ID NO: 483362
  Synthetic oligonucleotide

SEQ ID NO: 614498 - DNA, 60 bp, Artificial; identical to SEQ ID NO: 483365
  Synthetic oligonucleotide

SEQ ID NO: 614499 - DNA, 53 bp, Artificial; identical to SEQ ID NO: 483366
  Synthetic oligonucleotide

SEQ ID NO: 614500 - DNA, 55 bp, Artificial; identical to SEQ ID NO: 483370
  Synthetic oligonucleotide

SEQ ID NO: 614501 - DNA, 60 bp, Artificial; identical to SEQ ID NO: 483372
  Synthetic oligonucleotide

SEQ ID NO: 614502 - DNA, 54 bp, Artificial; identical to SEQ ID NO: 483375
  Synthetic oligonucleotide

SEQ ID NO: 614503 - DNA, 55 bp, Artificial; identical to SEQ ID NO: 483376
  Synthetic oligonucleotide

SEQ ID NO: 614504 - DNA, 60 bp, Artificial; identical to SEQ ID NO: 483378
  Synthetic oligonucleotide

SEQ ID NO: 614505 - DNA, 60 bp, Artificial; identical to SEQ ID NO: 483379
  Synthetic oligonucleotide

SEQ ID NO: 614506 - DNA, 60 bp, Artificial; identical to SEQ ID NO: 483380
  Synthetic oligonucleotide

SEQ ID NO: 614507 - DNA, 60 bp, Artificial; identical to SEQ ID NO: 483381
  Synthetic oligonucleotide

SEQ ID NO: 614508 - DNA, 60 bp, Artificial; identical to SEQ ID NO: 483382
  Synthetic oligonucleotide

SEQ ID NO: 614509 - DNA, 57 bp, Artificial; identical to SEQ ID NO: 483383
  Synthetic oligonucleotide

SEQ ID NO: 614510 - DNA, 55 bp, Artificial; identical to SEQ ID NO: 483384
  Synthetic oligonucleotide

SEQ ID NO: 614511 - DNA, 56 bp, Artificial; identical to SEQ ID NO: 483387
  Synthetic oligonucleotide

SEQ ID NO: 614512 - DNA, 55 bp, Artificial; identical to SEQ ID NO: 483388
  Synthetic oligonucleotide

SEQ ID NO: 614513 - DNA, 54 bp, Artificial; identical to SEQ ID NO: 483394
  Synthetic oligonucleotide

SEQ ID NO: 614514 - DNA, 55 bp, Artificial; identical to SEQ ID NO: 483396
  Synthetic oligonucleotide

SEQ ID NO: 614515 - DNA, 50 bp, Artificial; identical to SEQ ID NO: 483397
  Synthetic oligonucleotide

SEQ ID NO: 614516 - DNA, 58 bp, Artificial; identical to SEQ ID NO: 483400
  Synthetic oligonucleotide

SEQ ID NO: 614517 - DNA, 55 bp, Artificial; identical to SEQ ID NO: 483402
  Synthetic oligonucleotide

SEQ ID NO: 614518 - DNA, 55 bp, Artificial; identical to SEQ ID NO: 483404
  Synthetic oligonucleotide

SEQ ID NO: 614519 - DNA, 56 bp, Artificial; identical to SEQ ID NO: 483409
  Synthetic oligonucleotide

SEQ ID NO: 614520 - DNA, 55 bp, Artificial; identical to SEQ ID NO: 483411
  Synthetic oligonucleotide

SEQ ID NO: 614521 - DNA, 60 bp, Artificial; identical to SEQ ID NO: 12519
  Synthetic oligonucleotide

SEQ ID NO: 614522 - DNA, 57 bp, Artificial; identical to SEQ ID NO: 483419
  Synthetic oligonucleotide

SEQ ID NO: 614523 - DNA, 60 bp, Artificial; identical to SEQ ID NO: 483420
  Synthetic oligonucleotide

SEQ ID NO: 614524 - DNA, 53 bp, Artificial; identical to SEQ ID NO: 483421
  Synthetic oligonucleotide

SEQ ID NO: 614525 - DNA, 55 bp, Artificial; identical to SEQ ID NO: 483424
  Synthetic oligonucleotide

SEQ ID NO: 614526 - DNA, 55 bp, Artificial; identical to SEQ ID NO: 483425
  Synthetic oligonucleotide

SEQ ID NO: 614527 - DNA, 60 bp, Artificial; identical to SEQ ID NO: 483426
  Synthetic oligonucleotide

SEQ ID NO: 614528 - DNA, 55 bp, Artificial; identical to SEQ ID NO: 483428
  Synthetic oligonucleotide

SEQ ID NO: 614529 - DNA, 60 bp, Artificial; identical to SEQ ID NO: 483429
  Synthetic oligonucleotide

SEQ ID NO: 614530 - DNA, 57 bp, Artificial; identical to SEQ ID NO: 483432
  Synthetic oligonucleotide

SEQ ID NO: 614531 - DNA, 55 bp, Artificial; identical to SEQ ID NO: 483433
  Synthetic oligonucleotide

SEQ ID NO: 614532 - DNA, 60 bp, Artificial; identical to SEQ ID NO: 483438
  Synthetic oligonucleotide

SEQ ID NO: 614533 - DNA, 60 bp, Artificial; identical to SEQ ID NO: 6084
  Synthetic oligonucleotide

SEQ ID NO: 614534 - DNA, 60 bp, Artificial; identical to SEQ ID NO: 483444
  Synthetic oligonucleotide

SEQ ID NO: 614535 - DNA, 60 bp, Artificial; identical to SEQ ID NO: 483448
  Synthetic oligonucleotide

SEQ ID NO: 614536 - DNA, 60 bp, Artificial; identical to SEQ ID NO: 483452
  Synthetic oligonucleotide

SEQ ID NO: 614537 - DNA, 51 bp, Artificial; identical to SEQ ID NO: 483459
  Synthetic oligonucleotide

SEQ ID NO: 614538 - DNA, 59 bp, Artificial; identical to SEQ ID NO: 483460
  Synthetic oligonucleotide

SEQ ID NO: 614539 - DNA, 60 bp, Artificial; identical to SEQ ID NO: 483462
  Synthetic oligonucleotide

SEQ ID NO: 614540 - DNA, 60 bp, Artificial; identical to SEQ ID NO: 483463
  Synthetic oligonucleotide

SEQ ID NO: 614541 - DNA, 55 bp, Artificial; identical to SEQ ID NO: 483472
  Synthetic oligonucleotide

SEQ ID NO: 614542 - DNA, 60 bp, Artificial; identical to SEQ ID NO: 483475
  Synthetic oligonucleotide

SEQ ID NO: 614543 - DNA, 60 bp, Artificial; identical to SEQ ID NO: 483476
  Synthetic oligonucleotide

SEQ ID NO: 614544 - DNA, 54 bp, Artificial; identical to SEQ ID NO: 483480
  Synthetic oligonucleotide

SEQ ID NO: 614545 - DNA, 60 bp, Artificial; identical to SEQ ID NO: 483482
  Synthetic oligonucleotide

SEQ ID NO: 614546 - DNA, 60 bp, Artificial; identical to SEQ ID NO: 483485
  Synthetic oligonucleotide

SEQ ID NO: 614547 - DNA, 50 bp, Artificial; identical to SEQ ID NO: 7256
  Synthetic oligonucleotide

SEQ ID NO: 614548 - DNA, 51 bp, Artificial; identical to SEQ ID NO: 483487
  Synthetic oligonucleotide

SEQ ID NO: 614549 - DNA, 60 bp, Artificial; identical to SEQ ID NO: 483492
  Synthetic oligonucleotide

SEQ ID NO: 614550 - DNA, 60 bp, Artificial; identical to SEQ ID NO: 483494
  Synthetic oligonucleotide

SEQ ID NO: 614551 - DNA, 57 bp, Artificial; identical to SEQ ID NO: 483497
  Synthetic oligonucleotide

SEQ ID NO: 614552 - DNA, 55 bp, Artificial; identical to SEQ ID NO: 483501
  Synthetic oligonucleotide

SEQ ID NO: 614553 - DNA, 60 bp, Artificial; identical to SEQ ID NO: 8516
  Synthetic oligonucleotide

SEQ ID NO: 614554 - DNA, 59 bp, Artificial; identical to SEQ ID NO: 483509
  Synthetic oligonucleotide

SEQ ID NO: 614555 - DNA, 60 bp, Artificial; identical to SEQ ID NO: 483512
  Synthetic oligonucleotide

SEQ ID NO: 614556 - DNA, 57 bp, Artificial; identical to SEQ ID NO: 483517
  Synthetic oligonucleotide

SEQ ID NO: 614557 - DNA, 55 bp, Artificial; identical to SEQ ID NO: 483523
  Synthetic oligonucleotide

SEQ ID NO: 614558 - DNA, 55 bp, Artificial; identical to SEQ ID NO: 483524
  Synthetic oligonucleotide

SEQ ID NO: 614559 - DNA, 55 bp, Artificial; identical to SEQ ID NO: 483526
  Synthetic oligonucleotide

SEQ ID NO: 614560 - DNA, 55 bp, Artificial; identical to SEQ ID NO: 483527
  Synthetic oligonucleotide

SEQ ID NO: 614561 - DNA, 57 bp, Artificial; identical to SEQ ID NO: 19754
  Synthetic oligonucleotide

SEQ ID NO: 614562 - DNA, 60 bp, Artificial; identical to SEQ ID NO: 483533
  Synthetic oligonucleotide

SEQ ID NO: 614563 - DNA, 52 bp, Artificial; identical to SEQ ID NO: 483534
  Synthetic oligonucleotide

SEQ ID NO: 614564 - DNA, 57 bp, Artificial; identical to SEQ ID NO: 6351
  Synthetic oligonucleotide

SEQ ID NO: 614565 - DNA, 51 bp, Artificial; identical to SEQ ID NO: 483540
  Synthetic oligonucleotide

SEQ ID NO: 614566 - DNA, 54 bp, Artificial; identical to SEQ ID NO: 483545
  Synthetic oligonucleotide

SEQ ID NO: 614567 - DNA, 59 bp, Artificial; identical to SEQ ID NO: 483549
  Synthetic oligonucleotide

SEQ ID NO: 614568 - DNA, 60 bp, Artificial; identical to SEQ ID NO: 483555
  Synthetic oligonucleotide

SEQ ID NO: 614569 - DNA, 60 bp, Artificial; identical to SEQ ID NO: 483557
  Synthetic oligonucleotide

SEQ ID NO: 614570 - DNA, 58 bp, Artificial; identical to SEQ ID NO: 483558
  Synthetic oligonucleotide

SEQ ID NO: 614571 - DNA, 55 bp, Artificial; identical to SEQ ID NO: 483559
  Synthetic oligonucleotide

SEQ ID NO: 614572 - DNA, 60 bp, Artificial; identical to SEQ ID NO: 483561
  Synthetic oligonucleotide

SEQ ID NO: 614573 - DNA, 60 bp, Artificial; identical to SEQ ID NO: 483573
  Synthetic oligonucleotide

SEQ ID NO: 614574 - DNA, 60 bp, Artificial; identical to SEQ ID NO: 483574
  Synthetic oligonucleotide

SEQ ID NO: 614575 - DNA, 55 bp, Artificial; identical to SEQ ID NO: 483576
  Synthetic oligonucleotide

SEQ ID NO: 614576 - DNA, 60 bp, Artificial; identical to SEQ ID NO: 9767
  Synthetic oligonucleotide

SEQ ID NO: 614577 - DNA, 60 bp, Artificial; identical to SEQ ID NO: 483578
  Synthetic oligonucleotide

SEQ ID NO: 614578 - DNA, 60 bp, Artificial; identical to SEQ ID NO: 483581
  Synthetic oligonucleotide

SEQ ID NO: 614579 - DNA, 57 bp, Artificial; identical to SEQ ID NO: 483583
  Synthetic oligonucleotide

SEQ ID NO: 614580 - DNA, 55 bp, Artificial; identical to SEQ ID NO: 483586
  Synthetic oligonucleotide

SEQ ID NO: 614581 - DNA, 50 bp, Artificial; identical to SEQ ID NO: 483592
  Synthetic oligonucleotide

SEQ ID NO: 614582 - DNA, 55 bp, Artificial; identical to SEQ ID NO: 483593
  Synthetic oligonucleotide

SEQ ID NO: 614583 - DNA, 60 bp, Artificial; identical to SEQ ID NO: 118118
  Synthetic oligonucleotide

SEQ ID NO: 614584 - DNA, 56 bp, Artificial; identical to SEQ ID NO: 483597
  Synthetic oligonucleotide

SEQ ID NO: 614585 - DNA, 54 bp, Artificial; identical to SEQ ID NO: 483599
  Synthetic oligonucleotide

SEQ ID NO: 614586 - DNA, 55 bp, Artificial; identical to SEQ ID NO: 20142
  Synthetic oligonucleotide

SEQ ID NO: 614587 - DNA, 54 bp, Artificial; identical to SEQ ID NO: 483602
  Synthetic oligonucleotide

SEQ ID NO: 614588 - DNA, 55 bp, Artificial; identical to SEQ ID NO: 483604
  Synthetic oligonucleotide

SEQ ID NO: 614589 - DNA, 56 bp, Artificial; identical to SEQ ID NO: 483605
  Synthetic oligonucleotide

SEQ ID NO: 614590 - DNA, 54 bp, Artificial; identical to SEQ ID NO: 483612
  Synthetic oligonucleotide

SEQ ID NO: 614591 - DNA, 55 bp, Artificial; identical to SEQ ID NO: 483613
  Synthetic oligonucleotide

SEQ ID NO: 614592 - DNA, 56 bp, Artificial; identical to SEQ ID NO: 483614
  Synthetic oligonucleotide

SEQ ID NO: 614593 - DNA, 59 bp, Artificial; identical to SEQ ID NO: 483616
  Synthetic oligonucleotide

SEQ ID NO: 614594 - DNA, 60 bp, Artificial; identical to SEQ ID NO: 483619
  Synthetic oligonucleotide

SEQ ID NO: 614595 - DNA, 60 bp, Artificial; identical to SEQ ID NO: 483623
  Synthetic oligonucleotide

SEQ ID NO: 614596 - DNA, 55 bp, Artificial; identical to SEQ ID NO: 483627
  Synthetic oligonucleotide

SEQ ID NO: 614597 - DNA, 48 bp, Artificial; identical to SEQ ID NO: 483633
  Synthetic oligonucleotide

SEQ ID NO: 614598 - DNA, 51 bp, Artificial; identical to SEQ ID NO: 483634
  Synthetic oligonucleotide

SEQ ID NO: 614599 - DNA, 58 bp, Artificial; identical to SEQ ID NO: 483635
  Synthetic oligonucleotide

SEQ ID NO: 614600 - DNA, 54 bp, Artificial; identical to SEQ ID NO: 18840
  Synthetic oligonucleotide

SEQ ID NO: 614601 - DNA, 53 bp, Artificial; identical to SEQ ID NO: 483638
  Synthetic oligonucleotide

SEQ ID NO: 614602 - DNA, 60 bp, Artificial; identical to SEQ ID NO: 483644
  Synthetic oligonucleotide

SEQ ID NO: 614603 - DNA, 58 bp, Artificial; identical to SEQ ID NO: 483645
  Synthetic oligonucleotide

SEQ ID NO: 614604 - DNA, 60 bp, Artificial; identical to SEQ ID NO: 483647
  Synthetic oligonucleotide

SEQ ID NO: 614605 - DNA, 53 bp, Artificial; identical to SEQ ID NO: 483649
  Synthetic oligonucleotide

SEQ ID NO: 614606 - DNA, 57 bp, Artificial; identical to SEQ ID NO: 483652
  Synthetic oligonucleotide

SEQ ID NO: 614607 - DNA, 50 bp, Artificial; identical to SEQ ID NO: 483655
  Synthetic oligonucleotide

SEQ ID NO: 614608 - DNA, 58 bp, Artificial; identical to SEQ ID NO: 483660
  Synthetic oligonucleotide

SEQ ID NO: 614609 - DNA, 55 bp, Artificial; identical to SEQ ID NO: 483668
  Synthetic oligonucleotide

SEQ ID NO: 614610 - DNA, 60 bp, Artificial; identical to SEQ ID NO: 483669
  Synthetic oligonucleotide

SEQ ID NO: 614611 - DNA, 56 bp, Artificial; identical to SEQ ID NO: 483673
  Synthetic oligonucleotide

SEQ ID NO: 614612 - DNA, 50 bp, Artificial; identical to SEQ ID NO: 483675
  Synthetic oligonucleotide

SEQ ID NO: 614613 - DNA, 54 bp, Artificial; identical to SEQ ID NO: 483676
  Synthetic oligonucleotide

SEQ ID NO: 614614 - DNA, 55 bp, Artificial; identical to SEQ ID NO: 483677
  Synthetic oligonucleotide

SEQ ID NO: 614615 - DNA, 60 bp, Artificial; identical to SEQ ID NO: 483681
  Synthetic oligonucleotide

SEQ ID NO: 614616 - DNA, 60 bp, Artificial; identical to SEQ ID NO: 483685
  Synthetic oligonucleotide

SEQ ID NO: 614617 - DNA, 60 bp, Artificial; identical to SEQ ID NO: 483686
  Synthetic oligonucleotide

SEQ ID NO: 614618 - DNA, 56 bp, Artificial; identical to SEQ ID NO: 483689
  Synthetic oligonucleotide

SEQ ID NO: 614619 - DNA, 55 bp, Artificial; identical to SEQ ID NO: 483691
  Synthetic oligonucleotide

SEQ ID NO: 614620 - DNA, 55 bp, Artificial; identical to SEQ ID NO: 483692
  Synthetic oligonucleotide

SEQ ID NO: 614621 - DNA, 50 bp, Artificial; identical to SEQ ID NO: 483693
  Synthetic oligonucleotide

SEQ ID NO: 614622 - DNA, 60 bp, Artificial; identical to SEQ ID NO: 483694
  Synthetic oligonucleotide

SEQ ID NO: 614623 - DNA, 58 bp, Artificial; identical to SEQ ID NO: 483696
  Synthetic oligonucleotide

SEQ ID NO: 614624 - DNA, 58 bp, Artificial; identical to SEQ ID NO: 483699
  Synthetic oligonucleotide

SEQ ID NO: 614625 - DNA, 55 bp, Artificial; identical to SEQ ID NO: 6026
  Synthetic oligonucleotide

SEQ ID NO: 614626 - DNA, 55 bp, Artificial; identical to SEQ ID NO: 483702
  Synthetic oligonucleotide

SEQ ID NO: 614627 - DNA, 58 bp, Artificial; identical to SEQ ID NO: 483705
  Synthetic oligonucleotide

SEQ ID NO: 614628 - DNA, 51 bp, Artificial; identical to SEQ ID NO: 483707
  Synthetic oligonucleotide

SEQ ID NO: 614629 - DNA, 59 bp, Artificial; identical to SEQ ID NO: 483708
  Synthetic oligonucleotide

SEQ ID NO: 614630 - DNA, 60 bp, Artificial; identical to SEQ ID NO: 483712
  Synthetic oligonucleotide

SEQ ID NO: 614631 - DNA, 52 bp, Artificial; identical to SEQ ID NO: 483714
  Synthetic oligonucleotide

SEQ ID NO: 614632 - DNA, 60 bp, Artificial; identical to SEQ ID NO: 483715
  Synthetic oligonucleotide

SEQ ID NO: 614633 - DNA, 55 bp, Artificial; identical to SEQ ID NO: 483716
  Synthetic oligonucleotide

SEQ ID NO: 614634 - DNA, 58 bp, Artificial; identical to SEQ ID NO: 483717
  Synthetic oligonucleotide

SEQ ID NO: 614635 - DNA, 59 bp, Artificial; identical to SEQ ID NO: 483718
  Synthetic oligonucleotide

SEQ ID NO: 614636 - DNA, 55 bp, Artificial; identical to SEQ ID NO: 483721
  Synthetic oligonucleotide

SEQ ID NO: 614637 - DNA, 56 bp, Artificial; identical to SEQ ID NO: 483722
  Synthetic oligonucleotide

SEQ ID NO: 614638 - DNA, 52 bp, Artificial; identical to SEQ ID NO: 483724
  Synthetic oligonucleotide

SEQ ID NO: 614639 - DNA, 50 bp, Artificial; identical to SEQ ID NO: 483728
  Synthetic oligonucleotide

SEQ ID NO: 614640 - DNA, 60 bp, Artificial; identical to SEQ ID NO: 483729
  Synthetic oligonucleotide

SEQ ID NO: 614641 - DNA, 56 bp, Artificial; identical to SEQ ID NO: 483733
  Synthetic oligonucleotide

SEQ ID NO: 614642 - DNA, 60 bp, Artificial; identical to SEQ ID NO: 10676
  Synthetic oligonucleotide

SEQ ID NO: 614643 - DNA, 55 bp, Artificial; identical to SEQ ID NO: 483735
  Synthetic oligonucleotide

SEQ ID NO: 614644 - DNA, 51 bp, Artificial; identical to SEQ ID NO: 483736
  Synthetic oligonucleotide

SEQ ID NO: 614645 - DNA, 60 bp, Artificial; identical to SEQ ID NO: 483737
  Synthetic oligonucleotide

SEQ ID NO: 614646 - DNA, 57 bp, Artificial; identical to SEQ ID NO: 483738
  Synthetic oligonucleotide

SEQ ID NO: 614647 - DNA, 56 bp, Artificial; identical to SEQ ID NO: 483739
  Synthetic oligonucleotide

SEQ ID NO: 614648 - DNA, 53 bp, Artificial; identical to SEQ ID NO: 483742
  Synthetic oligonucleotide

SEQ ID NO: 614649 - DNA, 55 bp, Artificial; identical to SEQ ID NO: 483745
  Synthetic oligonucleotide

SEQ ID NO: 614650 - DNA, 60 bp, Artificial; identical to SEQ ID NO: 483746
  Synthetic oligonucleotide

SEQ ID NO: 614651 - DNA, 55 bp, Artificial; identical to SEQ ID NO: 8713
  Synthetic oligonucleotide

SEQ ID NO: 614652 - DNA, 55 bp, Artificial; identical to SEQ ID NO: 483750
  Synthetic oligonucleotide

SEQ ID NO: 614653 - DNA, 60 bp, Artificial; identical to SEQ ID NO: 483751
  Synthetic oligonucleotide

SEQ ID NO: 614654 - DNA, 55 bp, Artificial; identical to SEQ ID NO: 483757
  Synthetic oligonucleotide

SEQ ID NO: 614655 - DNA, 57 bp, Artificial; identical to SEQ ID NO: 483764
  Synthetic oligonucleotide

SEQ ID NO: 614656 - DNA, 57 bp, Artificial; identical to SEQ ID NO: 483765
  Synthetic oligonucleotide

SEQ ID NO: 614657 - DNA, 56 bp, Artificial; identical to SEQ ID NO: 483767
  Synthetic oligonucleotide

SEQ ID NO: 614658 - DNA, 56 bp, Artificial; identical to SEQ ID NO: 483768
  Synthetic oligonucleotide

SEQ ID NO: 614659 - DNA, 54 bp, Artificial; identical to SEQ ID NO: 483769
  Synthetic oligonucleotide

SEQ ID NO: 614660 - DNA, 59 bp, Artificial; identical to SEQ ID NO: 483774
  Synthetic oligonucleotide

SEQ ID NO: 614661 - DNA, 60 bp, Artificial; identical to SEQ ID NO: 483775
  Synthetic oligonucleotide

SEQ ID NO: 614662 - DNA, 59 bp, Artificial; identical to SEQ ID NO: 483777
  Synthetic oligonucleotide

SEQ ID NO: 614663 - DNA, 58 bp, Artificial; identical to SEQ ID NO: 483784
  Synthetic oligonucleotide

SEQ ID NO: 614664 - DNA, 55 bp, Artificial; identical to SEQ ID NO: 483785
  Synthetic oligonucleotide

SEQ ID NO: 614665 - DNA, 52 bp, Artificial; identical to SEQ ID NO: 483789
  Synthetic oligonucleotide

SEQ ID NO: 614666 - DNA, 55 bp, Artificial; identical to SEQ ID NO: 5910
  Synthetic oligonucleotide

SEQ ID NO: 614667 - DNA, 58 bp, Artificial; identical to SEQ ID NO: 6789
  Synthetic oligonucleotide

SEQ ID NO: 614668 - DNA, 60 bp, Artificial; identical to SEQ ID NO: 483796
  Synthetic oligonucleotide

SEQ ID NO: 614669 - DNA, 60 bp, Artificial; identical to SEQ ID NO: 483799
  Synthetic oligonucleotide

SEQ ID NO: 614670 - DNA, 55 bp, Artificial; identical to SEQ ID NO: 483800
  Synthetic oligonucleotide

SEQ ID NO: 614671 - DNA, 60 bp, Artificial; identical to SEQ ID NO: 483801
  Synthetic oligonucleotide

SEQ ID NO: 614672 - DNA, 56 bp, Artificial; identical to SEQ ID NO: 483802
  Synthetic oligonucleotide

SEQ ID NO: 614673 - DNA, 55 bp, Artificial; identical to SEQ ID NO: 483803
  Synthetic oligonucleotide

SEQ ID NO: 614674 - DNA, 60 bp, Artificial; identical to SEQ ID NO: 483805
  Synthetic oligonucleotide

SEQ ID NO: 614675 - DNA, 58 bp, Artificial; identical to SEQ ID NO: 483806
  Synthetic oligonucleotide

SEQ ID NO: 614676 - DNA, 58 bp, Artificial; identical to SEQ ID NO: 483811
  Synthetic oligonucleotide

SEQ ID NO: 614677 - DNA, 60 bp, Artificial; identical to SEQ ID NO: 483812
  Synthetic oligonucleotide

SEQ ID NO: 614678 - DNA, 59 bp, Artificial; identical to SEQ ID NO: 483813
  Synthetic oligonucleotide

SEQ ID NO: 614679 - DNA, 52 bp, Artificial; identical to SEQ ID NO: 483814
  Synthetic oligonucleotide

SEQ ID NO: 614680 - DNA, 58 bp, Artificial; identical to SEQ ID NO: 483817
  Synthetic oligonucleotide

SEQ ID NO: 614681 - DNA, 55 bp, Artificial; identical to SEQ ID NO: 483818
  Synthetic oligonucleotide

SEQ ID NO: 614682 - DNA, 55 bp, Artificial; identical to SEQ ID NO: 483822
  Synthetic oligonucleotide

SEQ ID NO: 614683 - DNA, 52 bp, Artificial; identical to SEQ ID NO: 483823
  Synthetic oligonucleotide

SEQ ID NO: 614684 - DNA, 51 bp, Artificial; identical to SEQ ID NO: 483824
  Synthetic oligonucleotide

SEQ ID NO: 614685 - DNA, 59 bp, Artificial; identical to SEQ ID NO: 20263
  Synthetic oligonucleotide

SEQ ID NO: 614686 - DNA, 60 bp, Artificial; identical to SEQ ID NO: 483825
  Synthetic oligonucleotide

SEQ ID NO: 614687 - DNA, 55 bp, Artificial; identical to SEQ ID NO: 483826
  Synthetic oligonucleotide

SEQ ID NO: 614688 - DNA, 60 bp, Artificial; identical to SEQ ID NO: 483828
  Synthetic oligonucleotide

SEQ ID NO: 614689 - DNA, 58 bp, Artificial; identical to SEQ ID NO: 483833
  Synthetic oligonucleotide

SEQ ID NO: 614690 - DNA, 60 bp, Artificial; identical to SEQ ID NO: 6259
  Synthetic oligonucleotide

SEQ ID NO: 614691 - DNA, 55 bp, Artificial; identical to SEQ ID NO: 483837
  Synthetic oligonucleotide

SEQ ID NO: 614692 - DNA, 57 bp, Artificial; identical to SEQ ID NO: 483839
  Synthetic oligonucleotide

SEQ ID NO: 614693 - DNA, 52 bp, Artificial; identical to SEQ ID NO: 12009
  Synthetic oligonucleotide

SEQ ID NO: 614694 - DNA, 56 bp, Artificial; identical to SEQ ID NO: 483842
  Synthetic oligonucleotide

SEQ ID NO: 614695 - DNA, 52 bp, Artificial; identical to SEQ ID NO: 483843
  Synthetic oligonucleotide

SEQ ID NO: 614696 - DNA, 54 bp, Artificial; identical to SEQ ID NO: 483845
  Synthetic oligonucleotide

SEQ ID NO: 614697 - DNA, 57 bp, Artificial; identical to SEQ ID NO: 483846
  Synthetic oligonucleotide

SEQ ID NO: 614698 - DNA, 55 bp, Artificial; identical to SEQ ID NO: 483852
  Synthetic oligonucleotide

SEQ ID NO: 614699 - DNA, 60 bp, Artificial; identical to SEQ ID NO: 483853
  Synthetic oligonucleotide

SEQ ID NO: 614700 - DNA, 57 bp, Artificial; identical to SEQ ID NO: 483854
  Synthetic oligonucleotide

SEQ ID NO: 614701 - DNA, 60 bp, Artificial; identical to SEQ ID NO: 483855
  Synthetic oligonucleotide

SEQ ID NO: 614702 - DNA, 53 bp, Artificial; identical to SEQ ID NO: 483856
  Synthetic oligonucleotide

SEQ ID NO: 614703 - DNA, 54 bp, Artificial; identical to SEQ ID NO: 483858
  Synthetic oligonucleotide

SEQ ID NO: 614704 - DNA, 57 bp, Artificial; identical to SEQ ID NO: 483859
  Synthetic oligonucleotide

SEQ ID NO: 614705 - DNA, 54 bp, Artificial; identical to SEQ ID NO: 483861
  Synthetic oligonucleotide

SEQ ID NO: 614706 - DNA, 59 bp, Artificial; identical to SEQ ID NO: 483863
  Synthetic oligonucleotide

SEQ ID NO: 614707 - DNA, 60 bp, Artificial; identical to SEQ ID NO: 483867
  Synthetic oligonucleotide

SEQ ID NO: 614708 - DNA, 57 bp, Artificial; identical to SEQ ID NO: 483869
  Synthetic oligonucleotide

SEQ ID NO: 614709 - DNA, 53 bp, Artificial; identical to SEQ ID NO: 483871
  Synthetic oligonucleotide

SEQ ID NO: 614710 - DNA, 58 bp, Artificial; identical to SEQ ID NO: 483872
  Synthetic oligonucleotide

SEQ ID NO: 614711 - DNA, 59 bp, Artificial; identical to SEQ ID NO: 483873
  Synthetic oligonucleotide

SEQ ID NO: 614712 - DNA, 52 bp, Artificial; identical to SEQ ID NO: 483876
  Synthetic oligonucleotide

SEQ ID NO: 614713 - DNA, 58 bp, Artificial; identical to SEQ ID NO: 483880
  Synthetic oligonucleotide

SEQ ID NO: 614714 - DNA, 56 bp, Artificial; identical to SEQ ID NO: 483883
  Synthetic oligonucleotide

SEQ ID NO: 614715 - DNA, 55 bp, Artificial; identical to SEQ ID NO: 16787
  Synthetic oligonucleotide

SEQ ID NO: 614716 - DNA, 54 bp, Artificial; identical to SEQ ID NO: 483885
  Synthetic oligonucleotide

SEQ ID NO: 614717 - DNA, 60 bp, Artificial; identical to SEQ ID NO: 14385
  Synthetic oligonucleotide

SEQ ID NO: 614718 - DNA, 52 bp, Artificial; identical to SEQ ID NO: 483888
  Synthetic oligonucleotide

SEQ ID NO: 614719 - DNA, 58 bp, Artificial; identical to SEQ ID NO: 483890
  Synthetic oligonucleotide

SEQ ID NO: 614720 - DNA, 53 bp, Artificial; identical to SEQ ID NO: 483892
  Synthetic oligonucleotide

SEQ ID NO: 614721 - DNA, 60 bp, Artificial; identical to SEQ ID NO: 483893
  Synthetic oligonucleotide

SEQ ID NO: 614722 - DNA, 55 bp, Artificial; identical to SEQ ID NO: 483894
  Synthetic oligonucleotide

SEQ ID NO: 614723 - DNA, 51 bp, Artificial; identical to SEQ ID NO: 483896
  Synthetic oligonucleotide

SEQ ID NO: 614724 - DNA, 50 bp, Artificial; identical to SEQ ID NO: 483898
  Synthetic oligonucleotide

SEQ ID NO: 614725 - DNA, 59 bp, Artificial; identical to SEQ ID NO: 483899
  Synthetic oligonucleotide

SEQ ID NO: 614726 - DNA, 52 bp, Artificial; identical to SEQ ID NO: 483900
  Synthetic oligonucleotide

SEQ ID NO: 614727 - DNA, 56 bp, Artificial; identical to SEQ ID NO: 483905
  Synthetic oligonucleotide

SEQ ID NO: 614728 - DNA, 60 bp, Artificial; identical to SEQ ID NO: 13138
  Synthetic oligonucleotide

SEQ ID NO: 614729 - DNA, 55 bp, Artificial; identical to SEQ ID NO: 483907
  Synthetic oligonucleotide

SEQ ID NO: 614730 - DNA, 59 bp, Artificial; identical to SEQ ID NO: 483909
  Synthetic oligonucleotide

SEQ ID NO: 614731 - DNA, 58 bp, Artificial; identical to SEQ ID NO: 483910
  Synthetic oligonucleotide

SEQ ID NO: 614732 - DNA, 60 bp, Artificial; identical to SEQ ID NO: 483915
  Synthetic oligonucleotide

SEQ ID NO: 614733 - DNA, 60 bp, Artificial; identical to SEQ ID NO: 483918
  Synthetic oligonucleotide

SEQ ID NO: 614734 - DNA, 55 bp, Artificial; identical to SEQ ID NO: 483919
  Synthetic oligonucleotide

SEQ ID NO: 614735 - DNA, 57 bp, Artificial; identical to SEQ ID NO: 483922
  Synthetic oligonucleotide

SEQ ID NO: 614736 - DNA, 51 bp, Artificial; identical to SEQ ID NO: 483923
  Synthetic oligonucleotide

SEQ ID NO: 614737 - DNA, 54 bp, Artificial; identical to SEQ ID NO: 483925
  Synthetic oligonucleotide

SEQ ID NO: 614738 - DNA, 59 bp, Artificial; identical to SEQ ID NO: 483929
  Synthetic oligonucleotide

SEQ ID NO: 614739 - DNA, 60 bp, Artificial; identical to SEQ ID NO: 483931
  Synthetic oligonucleotide

SEQ ID NO: 614740 - DNA, 60 bp, Artificial; identical to SEQ ID NO: 483932
  Synthetic oligonucleotide

SEQ ID NO: 614741 - DNA, 60 bp, Artificial; identical to SEQ ID NO: 483934
  Synthetic oligonucleotide

SEQ ID NO: 614742 - DNA, 60 bp, Artificial; identical to SEQ ID NO: 483935
  Synthetic oligonucleotide

SEQ ID NO: 614743 - DNA, 50 bp, Artificial; identical to SEQ ID NO: 483938
  Synthetic oligonucleotide

SEQ ID NO: 614744 - DNA, 56 bp, Artificial; identical to SEQ ID NO: 483939
  Synthetic oligonucleotide

SEQ ID NO: 614745 - DNA, 56 bp, Artificial; identical to SEQ ID NO: 19728
  Synthetic oligonucleotide

SEQ ID NO: 614746 - DNA, 58 bp, Artificial; identical to SEQ ID NO: 483941
  Synthetic oligonucleotide

SEQ ID NO: 614747 - DNA, 55 bp, Artificial; identical to SEQ ID NO: 483944
  Synthetic oligonucleotide

SEQ ID NO: 614748 - DNA, 55 bp, Artificial; identical to SEQ ID NO: 483946
  Synthetic oligonucleotide

SEQ ID NO: 614749 - DNA, 60 bp, Artificial; identical to SEQ ID NO: 483947
  Synthetic oligonucleotide

SEQ ID NO: 614750 - DNA, 51 bp, Artificial; identical to SEQ ID NO: 483949
  Synthetic oligonucleotide

SEQ ID NO: 614751 - DNA, 58 bp, Artificial; identical to SEQ ID NO: 483951
  Synthetic oligonucleotide

SEQ ID NO: 614752 - DNA, 57 bp, Artificial; identical to SEQ ID NO: 483952
  Synthetic oligonucleotide

SEQ ID NO: 614753 - DNA, 58 bp, Artificial; identical to SEQ ID NO: 483956
  Synthetic oligonucleotide

SEQ ID NO: 614754 - DNA, 59 bp, Artificial; identical to SEQ ID NO: 483960
  Synthetic oligonucleotide

SEQ ID NO: 614755 - DNA, 53 bp, Artificial; identical to SEQ ID NO: 483961
  Synthetic oligonucleotide

SEQ ID NO: 614756 - DNA, 56 bp, Artificial; identical to SEQ ID NO: 483962
  Synthetic oligonucleotide

SEQ ID NO: 614757 - DNA, 57 bp, Artificial; identical to SEQ ID NO: 483965
  Synthetic oligonucleotide

SEQ ID NO: 614758 - DNA, 51 bp, Artificial; identical to SEQ ID NO: 6564
  Synthetic oligonucleotide

SEQ ID NO: 614759 - DNA, 57 bp, Artificial; identical to SEQ ID NO: 483967
  Synthetic oligonucleotide

SEQ ID NO: 614760 - DNA, 55 bp, Artificial; identical to SEQ ID NO: 483970
  Synthetic oligonucleotide

SEQ ID NO: 614761 - DNA, 59 bp, Artificial; identical to SEQ ID NO: 483971
  Synthetic oligonucleotide

SEQ ID NO: 614762 - DNA, 52 bp, Artificial; identical to SEQ ID NO: 483976
  Synthetic oligonucleotide

SEQ ID NO: 614763 - DNA, 59 bp, Artificial; identical to SEQ ID NO: 483977
  Synthetic oligonucleotide

SEQ ID NO: 614764 - DNA, 60 bp, Artificial; identical to SEQ ID NO: 483982
  Synthetic oligonucleotide

SEQ ID NO: 614765 - DNA, 55 bp, Artificial; identical to SEQ ID NO: 483985
  Synthetic oligonucleotide

SEQ ID NO: 614766 - DNA, 60 bp, Artificial; identical to SEQ ID NO: 6781
  Synthetic oligonucleotide

SEQ ID NO: 614767 - DNA, 54 bp, Artificial; identical to SEQ ID NO: 483986
  Synthetic oligonucleotide

SEQ ID NO: 614768 - DNA, 55 bp, Artificial; identical to SEQ ID NO: 483990
  Synthetic oligonucleotide

SEQ ID NO: 614769 - DNA, 59 bp, Artificial; identical to SEQ ID NO: 483991
  Synthetic oligonucleotide

SEQ ID NO: 614770 - DNA, 60 bp, Artificial; identical to SEQ ID NO: 483992
  Synthetic oligonucleotide

SEQ ID NO: 614771 - DNA, 51 bp, Artificial; identical to SEQ ID NO: 483993
  Synthetic oligonucleotide

SEQ ID NO: 614772 - DNA, 60 bp, Artificial; identical to SEQ ID NO: 483994
  Synthetic oligonucleotide

SEQ ID NO: 614773 - DNA, 58 bp, Artificial; identical to SEQ ID NO: 483999
  Synthetic oligonucleotide

SEQ ID NO: 614774 - DNA, 54 bp, Artificial; identical to SEQ ID NO: 484005
  Synthetic oligonucleotide

SEQ ID NO: 614775 - DNA, 52 bp, Artificial; identical to SEQ ID NO: 484006
  Synthetic oligonucleotide

SEQ ID NO: 614776 - DNA, 52 bp, Artificial; identical to SEQ ID NO: 484009
  Synthetic oligonucleotide

SEQ ID NO: 614777 - DNA, 50 bp, Artificial; identical to SEQ ID NO: 484012
  Synthetic oligonucleotide

SEQ ID NO: 614778 - DNA, 60 bp, Artificial; identical to SEQ ID NO: 484013
  Synthetic oligonucleotide

SEQ ID NO: 614779 - DNA, 55 bp, Artificial; identical to SEQ ID NO: 484015
  Synthetic oligonucleotide

SEQ ID NO: 614780 - DNA, 55 bp, Artificial; identical to SEQ ID NO: 484016
  Synthetic oligonucleotide

SEQ ID NO: 614781 - DNA, 57 bp, Artificial; identical to SEQ ID NO: 484017
  Synthetic oligonucleotide

SEQ ID NO: 614782 - DNA, 53 bp, Artificial; identical to SEQ ID NO: 484018
  Synthetic oligonucleotide

SEQ ID NO: 614783 - DNA, 52 bp, Artificial; identical to SEQ ID NO: 484019
  Synthetic oligonucleotide

SEQ ID NO: 614784 - DNA, 58 bp, Artificial; identical to SEQ ID NO: 484025
  Synthetic oligonucleotide

SEQ ID NO: 614785 - DNA, 60 bp, Artificial; identical to SEQ ID NO: 484026
  Synthetic oligonucleotide

SEQ ID NO: 614786 - DNA, 55 bp, Artificial; identical to SEQ ID NO: 484028
  Synthetic oligonucleotide

SEQ ID NO: 614787 - DNA, 60 bp, Artificial; identical to SEQ ID NO: 484029
  Synthetic oligonucleotide

SEQ ID NO: 614788 - DNA, 56 bp, Artificial; identical to SEQ ID NO: 484031
  Synthetic oligonucleotide

SEQ ID NO: 614789 - DNA, 52 bp, Artificial; identical to SEQ ID NO: 484033
  Synthetic oligonucleotide

SEQ ID NO: 614790 - DNA, 50 bp, Artificial; identical to SEQ ID NO: 484034
  Synthetic oligonucleotide

SEQ ID NO: 614791 - DNA, 56 bp, Artificial; identical to SEQ ID NO: 484039
  Synthetic oligonucleotide

SEQ ID NO: 614792 - DNA, 60 bp, Artificial; identical to SEQ ID NO: 484040
  Synthetic oligonucleotide

SEQ ID NO: 614793 - DNA, 60 bp, Artificial; identical to SEQ ID NO: 484043
  Synthetic oligonucleotide

SEQ ID NO: 614794 - DNA, 59 bp, Artificial; identical to SEQ ID NO: 484050
  Synthetic oligonucleotide

SEQ ID NO: 614795 - DNA, 60 bp, Artificial; identical to SEQ ID NO: 484051
  Synthetic oligonucleotide

SEQ ID NO: 614796 - DNA, 53 bp, Artificial; identical to SEQ ID NO: 484052
  Synthetic oligonucleotide

SEQ ID NO: 614797 - DNA, 50 bp, Artificial; identical to SEQ ID NO: 484054
  Synthetic oligonucleotide

SEQ ID NO: 614798 - DNA, 55 bp, Artificial; identical to SEQ ID NO: 484056
  Synthetic oligonucleotide

SEQ ID NO: 614799 - DNA, 56 bp, Artificial; identical to SEQ ID NO: 484059
  Synthetic oligonucleotide

SEQ ID NO: 614800 - DNA, 54 bp, Artificial; identical to SEQ ID NO: 484064
  Synthetic oligonucleotide

SEQ ID NO: 614801 - DNA, 58 bp, Artificial; identical to SEQ ID NO: 484066
  Synthetic oligonucleotide

SEQ ID NO: 614802 - DNA, 55 bp, Artificial; identical to SEQ ID NO: 484067
  Synthetic oligonucleotide

SEQ ID NO: 614803 - DNA, 60 bp, Artificial; identical to SEQ ID NO: 484069
  Synthetic oligonucleotide

SEQ ID NO: 614804 - DNA, 57 bp, Artificial; identical to SEQ ID NO: 484071
  Synthetic oligonucleotide

SEQ ID NO: 614805 - DNA, 51 bp, Artificial; identical to SEQ ID NO: 484075
  Synthetic oligonucleotide

SEQ ID NO: 614806 - DNA, 54 bp, Artificial; identical to SEQ ID NO: 16984
  Synthetic oligonucleotide

SEQ ID NO: 614807 - DNA, 56 bp, Artificial; identical to SEQ ID NO: 484078
  Synthetic oligonucleotide

SEQ ID NO: 614808 - DNA, 55 bp, Artificial; identical to SEQ ID NO: 484079
  Synthetic oligonucleotide

SEQ ID NO: 614809 - DNA, 60 bp, Artificial; identical to SEQ ID NO: 484084
  Synthetic oligonucleotide

SEQ ID NO: 614810 - DNA, 50 bp, Artificial; identical to SEQ ID NO: 484088
  Synthetic oligonucleotide

SEQ ID NO: 614811 - DNA, 58 bp, Artificial; identical to SEQ ID NO: 484089
  Synthetic oligonucleotide

SEQ ID NO: 614812 - DNA, 60 bp, Artificial; identical to SEQ ID NO: 484093
  Synthetic oligonucleotide

SEQ ID NO: 614813 - DNA, 57 bp, Artificial; identical to SEQ ID NO: 484094
  Synthetic oligonucleotide

SEQ ID NO: 614814 - DNA, 60 bp, Artificial; identical to SEQ ID NO: 484095
  Synthetic oligonucleotide

SEQ ID NO: 614815 - DNA, 58 bp, Artificial; identical to SEQ ID NO: 484098
  Synthetic oligonucleotide

SEQ ID NO: 614816 - DNA, 55 bp, Artificial; identical to SEQ ID NO: 484100
  Synthetic oligonucleotide

SEQ ID NO: 614817 - DNA, 59 bp, Artificial; identical to SEQ ID NO: 484101
  Synthetic oligonucleotide

SEQ ID NO: 614818 - DNA, 60 bp, Artificial; identical to SEQ ID NO: 484104
  Synthetic oligonucleotide

SEQ ID NO: 614819 - DNA, 60 bp, Artificial; identical to SEQ ID NO: 484105
  Synthetic oligonucleotide

SEQ ID NO: 614820 - DNA, 55 bp, Artificial; identical to SEQ ID NO: 484106
  Synthetic oligonucleotide

SEQ ID NO: 614821 - DNA, 49 bp, Artificial; identical to SEQ ID NO: 484113
  Synthetic oligonucleotide

SEQ ID NO: 614822 - DNA, 60 bp, Artificial; identical to SEQ ID NO: 484114
  Synthetic oligonucleotide

SEQ ID NO: 614823 - DNA, 60 bp, Artificial; identical to SEQ ID NO: 484116
  Synthetic oligonucleotide

SEQ ID NO: 614824 - DNA, 59 bp, Artificial; identical to SEQ ID NO: 484117
  Synthetic oligonucleotide

SEQ ID NO: 614825 - DNA, 58 bp, Artificial; identical to SEQ ID NO: 484119
  Synthetic oligonucleotide

SEQ ID NO: 614826 - DNA, 60 bp, Artificial; identical to SEQ ID NO: 484122
  Synthetic oligonucleotide

SEQ ID NO: 614827 - DNA, 54 bp, Artificial; identical to SEQ ID NO: 484123
  Synthetic oligonucleotide

SEQ ID NO: 614828 - DNA, 50 bp, Artificial; identical to SEQ ID NO: 484124
  Synthetic oligonucleotide

SEQ ID NO: 614829 - DNA, 60 bp, Artificial; identical to SEQ ID NO: 484127
  Synthetic oligonucleotide

SEQ ID NO: 614830 - DNA, 60 bp, Artificial; identical to SEQ ID NO: 484128
  Synthetic oligonucleotide

SEQ ID NO: 614831 - DNA, 60 bp, Artificial; identical to SEQ ID NO: 484129
  Synthetic oligonucleotide

SEQ ID NO: 614832 - DNA, 60 bp, Artificial; identical to SEQ ID NO: 484130
  Synthetic oligonucleotide

SEQ ID NO: 614833 - DNA, 52 bp, Artificial; identical to SEQ ID NO: 484138
  Synthetic oligonucleotide

SEQ ID NO: 614834 - DNA, 52 bp, Artificial; identical to SEQ ID NO: 484141
  Synthetic oligonucleotide

SEQ ID NO: 614835 - DNA, 55 bp, Artificial; identical to SEQ ID NO: 484142
  Synthetic oligonucleotide

SEQ ID NO: 614836 - DNA, 60 bp, Artificial; identical to SEQ ID NO: 484143
  Synthetic oligonucleotide

SEQ ID NO: 614837 - DNA, 56 bp, Artificial; identical to SEQ ID NO: 484145
  Synthetic oligonucleotide

SEQ ID NO: 614838 - DNA, 55 bp, Artificial; identical to SEQ ID NO: 484146
  Synthetic oligonucleotide

SEQ ID NO: 614839 - DNA, 60 bp, Artificial; identical to SEQ ID NO: 484148
  Synthetic oligonucleotide

SEQ ID NO: 614840 - DNA, 57 bp, Artificial; identical to SEQ ID NO: 484149
  Synthetic oligonucleotide

SEQ ID NO: 614841 - DNA, 58 bp, Artificial; identical to SEQ ID NO: 484151
  Synthetic oligonucleotide

SEQ ID NO: 614842 - DNA, 53 bp, Artificial; identical to SEQ ID NO: 484152
  Synthetic oligonucleotide

SEQ ID NO: 614843 - DNA, 58 bp, Artificial; identical to SEQ ID NO: 484156
  Synthetic oligonucleotide

SEQ ID NO: 614844 - DNA, 58 bp, Artificial; identical to SEQ ID NO: 484163
  Synthetic oligonucleotide

SEQ ID NO: 614845 - DNA, 54 bp, Artificial; identical to SEQ ID NO: 484164
  Synthetic oligonucleotide

SEQ ID NO: 614846 - DNA, 55 bp, Artificial; identical to SEQ ID NO: 484165
  Synthetic oligonucleotide

SEQ ID NO: 614847 - DNA, 60 bp, Artificial; identical to SEQ ID NO: 484166
  Synthetic oligonucleotide

SEQ ID NO: 614848 - DNA, 53 bp, Artificial; identical to SEQ ID NO: 484168
  Synthetic oligonucleotide

SEQ ID NO: 614849 - DNA, 51 bp, Artificial; identical to SEQ ID NO: 484169
  Synthetic oligonucleotide

SEQ ID NO: 614850 - DNA, 56 bp, Artificial; identical to SEQ ID NO: 10674
  Synthetic oligonucleotide

SEQ ID NO: 614851 - DNA, 55 bp, Artificial; identical to SEQ ID NO: 484176
  Synthetic oligonucleotide

SEQ ID NO: 614852 - DNA, 56 bp, Artificial; identical to SEQ ID NO: 484179
  Synthetic oligonucleotide

SEQ ID NO: 614853 - DNA, 60 bp, Artificial; identical to SEQ ID NO: 484182
  Synthetic oligonucleotide

SEQ ID NO: 614854 - DNA, 59 bp, Artificial; identical to SEQ ID NO: 484189
  Synthetic oligonucleotide

SEQ ID NO: 614855 - DNA, 55 bp, Artificial; identical to SEQ ID NO: 484191
  Synthetic oligonucleotide

SEQ ID NO: 614856 - DNA, 59 bp, Artificial; identical to SEQ ID NO: 484193
  Synthetic oligonucleotide

SEQ ID NO: 614857 - DNA, 60 bp, Artificial; identical to SEQ ID NO: 484194
  Synthetic oligonucleotide

SEQ ID NO: 614858 - DNA, 51 bp, Artificial; identical to SEQ ID NO: 484196
  Synthetic oligonucleotide

SEQ ID NO: 614859 - DNA, 59 bp, Artificial; identical to SEQ ID NO: 484197
  Synthetic oligonucleotide

SEQ ID NO: 614860 - DNA, 51 bp, Artificial; identical to SEQ ID NO: 484199
  Synthetic oligonucleotide

SEQ ID NO: 614861 - DNA, 55 bp, Artificial; identical to SEQ ID NO: 9072
  Synthetic oligonucleotide

SEQ ID NO: 614862 - DNA, 60 bp, Artificial; identical to SEQ ID NO: 484204
  Synthetic oligonucleotide

SEQ ID NO: 614863 - DNA, 51 bp, Artificial; identical to SEQ ID NO: 11717
  Synthetic oligonucleotide

SEQ ID NO: 614864 - DNA, 50 bp, Artificial; identical to SEQ ID NO: 484205
  Synthetic oligonucleotide

SEQ ID NO: 614865 - DNA, 57 bp, Artificial; identical to SEQ ID NO: 484206
  Synthetic oligonucleotide

SEQ ID NO: 614866 - DNA, 59 bp, Artificial; identical to SEQ ID NO: 484209
  Synthetic oligonucleotide

SEQ ID NO: 614867 - DNA, 54 bp, Artificial; identical to SEQ ID NO: 484212
  Synthetic oligonucleotide

SEQ ID NO: 614868 - DNA, 55 bp, Artificial; identical to SEQ ID NO: 484213
  Synthetic oligonucleotide

SEQ ID NO: 614869 - DNA, 55 bp, Artificial; identical to SEQ ID NO: 484224
  Synthetic oligonucleotide

SEQ ID NO: 614870 - DNA, 54 bp, Artificial; identical to SEQ ID NO: 484226
  Synthetic oligonucleotide

SEQ ID NO: 614871 - DNA, 60 bp, Artificial; identical to SEQ ID NO: 484231
  Synthetic oligonucleotide

SEQ ID NO: 614872 - DNA, 51 bp, Artificial; identical to SEQ ID NO: 484233
  Synthetic oligonucleotide

SEQ ID NO: 614873 - DNA, 60 bp, Artificial; identical to SEQ ID NO: 484237
  Synthetic oligonucleotide

SEQ ID NO: 614874 - DNA, 57 bp, Artificial; identical to SEQ ID NO: 484238
  Synthetic oligonucleotide

SEQ ID NO: 614875 - DNA, 60 bp, Artificial; identical to SEQ ID NO: 484243
  Synthetic oligonucleotide

SEQ ID NO: 614876 - DNA, 51 bp, Artificial; identical to SEQ ID NO: 484244
  Synthetic oligonucleotide

SEQ ID NO: 614877 - DNA, 55 bp, Artificial; identical to SEQ ID NO: 484248
  Synthetic oligonucleotide

SEQ ID NO: 614878 - DNA, 60 bp, Artificial; identical to SEQ ID NO: 484249
  Synthetic oligonucleotide

SEQ ID NO: 614879 - DNA, 59 bp, Artificial; identical to SEQ ID NO: 484250
  Synthetic oligonucleotide

SEQ ID NO: 614880 - DNA, 59 bp, Artificial; identical to SEQ ID NO: 484251
  Synthetic oligonucleotide

SEQ ID NO: 614881 - DNA, 60 bp, Artificial; identical to SEQ ID NO: 484252
  Synthetic oligonucleotide

SEQ ID NO: 614882 - DNA, 55 bp, Artificial; identical to SEQ ID NO: 484254
  Synthetic oligonucleotide

SEQ ID NO: 614883 - DNA, 60 bp, Artificial; identical to SEQ ID NO: 484255
  Synthetic oligonucleotide

SEQ ID NO: 614884 - DNA, 60 bp, Artificial; identical to SEQ ID NO: 484256
  Synthetic oligonucleotide

SEQ ID NO: 614885 - DNA, 57 bp, Artificial; identical to SEQ ID NO: 484260
  Synthetic oligonucleotide

SEQ ID NO: 614886 - DNA, 53 bp, Artificial; identical to SEQ ID NO: 484262
  Synthetic oligonucleotide

SEQ ID NO: 614887 - DNA, 55 bp, Artificial; identical to SEQ ID NO: 484265
  Synthetic oligonucleotide

SEQ ID NO: 614888 - DNA, 56 bp, Artificial; identical to SEQ ID NO: 11238
  Synthetic oligonucleotide

SEQ ID NO: 614889 - DNA, 60 bp, Artificial; identical to SEQ ID NO: 484268
  Synthetic oligonucleotide

SEQ ID NO: 614890 - DNA, 60 bp, Artificial; identical to SEQ ID NO: 484270
  Synthetic oligonucleotide

SEQ ID NO: 614891 - DNA, 53 bp, Artificial; identical to SEQ ID NO: 484271
  Synthetic oligonucleotide

SEQ ID NO: 614892 - DNA, 54 bp, Artificial; identical to SEQ ID NO: 9933
  Synthetic oligonucleotide

SEQ ID NO: 614893 - DNA, 57 bp, Artificial; identical to SEQ ID NO: 484275
  Synthetic oligonucleotide

SEQ ID NO: 614894 - DNA, 56 bp, Artificial; identical to SEQ ID NO: 484277
  Synthetic oligonucleotide

SEQ ID NO: 614895 - DNA, 60 bp, Artificial; identical to SEQ ID NO: 484280
  Synthetic oligonucleotide

SEQ ID NO: 614896 - DNA, 60 bp, Artificial; identical to SEQ ID NO: 484282
  Synthetic oligonucleotide

SEQ ID NO: 614897 - DNA, 60 bp, Artificial; identical to SEQ ID NO: 484284
  Synthetic oligonucleotide

SEQ ID NO: 614898 - DNA, 60 bp, Artificial; identical to SEQ ID NO: 484285
  Synthetic oligonucleotide

SEQ ID NO: 614899 - DNA, 60 bp, Artificial; identical to SEQ ID NO: 484286
  Synthetic oligonucleotide

SEQ ID NO: 614900 - DNA, 55 bp, Artificial; identical to SEQ ID NO: 484291
  Synthetic oligonucleotide

SEQ ID NO: 614901 - DNA, 52 bp, Artificial; identical to SEQ ID NO: 484294
  Synthetic oligonucleotide

SEQ ID NO: 614902 - DNA, 60 bp, Artificial; identical to SEQ ID NO: 484297
  Synthetic oligonucleotide

SEQ ID NO: 614903 - DNA, 55 bp, Artificial; identical to SEQ ID NO: 484299
  Synthetic oligonucleotide

SEQ ID NO: 614904 - DNA, 60 bp, Artificial; identical to SEQ ID NO: 484301
  Synthetic oligonucleotide

SEQ ID NO: 614905 - DNA, 59 bp, Artificial; identical to SEQ ID NO: 484302
  Synthetic oligonucleotide

SEQ ID NO: 614906 - DNA, 60 bp, Artificial; identical to SEQ ID NO: 12746
  Synthetic oligonucleotide

SEQ ID NO: 614907 - DNA, 53 bp, Artificial; identical to SEQ ID NO: 484304
  Synthetic oligonucleotide

SEQ ID NO: 614908 - DNA, 55 bp, Artificial; identical to SEQ ID NO: 484305
  Synthetic oligonucleotide

SEQ ID NO: 614909 - DNA, 55 bp, Artificial; identical to SEQ ID NO: 484306
  Synthetic oligonucleotide

SEQ ID NO: 614910 - DNA, 60 bp, Artificial; identical to SEQ ID NO: 484311
  Synthetic oligonucleotide

SEQ ID NO: 614911 - DNA, 60 bp, Artificial; identical to SEQ ID NO: 484316
  Synthetic oligonucleotide

SEQ ID NO: 614912 - DNA, 60 bp, Artificial; identical to SEQ ID NO: 484318
  Synthetic oligonucleotide

SEQ ID NO: 614913 - DNA, 60 bp, Artificial; identical to SEQ ID NO: 484321
  Synthetic oligonucleotide

SEQ ID NO: 614914 - DNA, 55 bp, Artificial; identical to SEQ ID NO: 484327
  Synthetic oligonucleotide

SEQ ID NO: 614915 - DNA, 60 bp, Artificial; identical to SEQ ID NO: 484329
  Synthetic oligonucleotide

SEQ ID NO: 614916 - DNA, 59 bp, Artificial; identical to SEQ ID NO: 484330
  Synthetic oligonucleotide

SEQ ID NO: 614917 - DNA, 55 bp, Artificial; identical to SEQ ID NO: 484331
  Synthetic oligonucleotide

SEQ ID NO: 614918 - DNA, 55 bp, Artificial; identical to SEQ ID NO: 484333
  Synthetic oligonucleotide

SEQ ID NO: 614919 - DNA, 58 bp, Artificial; identical to SEQ ID NO: 484334
  Synthetic oligonucleotide

SEQ ID NO: 614920 - DNA, 56 bp, Artificial; identical to SEQ ID NO: 484335
  Synthetic oligonucleotide

SEQ ID NO: 614921 - DNA, 53 bp, Artificial; identical to SEQ ID NO: 484340
  Synthetic oligonucleotide

SEQ ID NO: 614922 - DNA, 60 bp, Artificial; identical to SEQ ID NO: 484341
  Synthetic oligonucleotide

SEQ ID NO: 614923 - DNA, 54 bp, Artificial; identical to SEQ ID NO: 484342
  Synthetic oligonucleotide

SEQ ID NO: 614924 - DNA, 59 bp, Artificial; identical to SEQ ID NO: 484348
  Synthetic oligonucleotide

SEQ ID NO: 614925 - DNA, 55 bp, Artificial; identical to SEQ ID NO: 484349
  Synthetic oligonucleotide

SEQ ID NO: 614926 - DNA, 60 bp, Artificial; identical to SEQ ID NO: 484352
  Synthetic oligonucleotide

SEQ ID NO: 614927 - DNA, 60 bp, Artificial; identical to SEQ ID NO: 484353
  Synthetic oligonucleotide

SEQ ID NO: 614928 - DNA, 54 bp, Artificial; identical to SEQ ID NO: 484354
  Synthetic oligonucleotide

SEQ ID NO: 614929 - DNA, 60 bp, Artificial; identical to SEQ ID NO: 484359
  Synthetic oligonucleotide

SEQ ID NO: 614930 - DNA, 57 bp, Artificial; identical to SEQ ID NO: 484360
  Synthetic oligonucleotide

SEQ ID NO: 614931 - DNA, 60 bp, Artificial; identical to SEQ ID NO: 484362
  Synthetic oligonucleotide

SEQ ID NO: 614932 - DNA, 52 bp, Artificial; identical to SEQ ID NO: 484364
  Synthetic oligonucleotide

SEQ ID NO: 614933 - DNA, 60 bp, Artificial; identical to SEQ ID NO: 484365
  Synthetic oligonucleotide

SEQ ID NO: 614934 - DNA, 51 bp, Artificial; identical to SEQ ID NO: 484366
  Synthetic oligonucleotide

SEQ ID NO: 614935 - DNA, 53 bp, Artificial; identical to SEQ ID NO: 484367
  Synthetic oligonucleotide

SEQ ID NO: 614936 - DNA, 60 bp, Artificial; identical to SEQ ID NO: 484368
  Synthetic oligonucleotide

SEQ ID NO: 614937 - DNA, 59 bp, Artificial; identical to SEQ ID NO: 484371
  Synthetic oligonucleotide

SEQ ID NO: 614938 - DNA, 54 bp, Artificial; identical to SEQ ID NO: 484372
  Synthetic oligonucleotide

SEQ ID NO: 614939 - DNA, 56 bp, Artificial; identical to SEQ ID NO: 484374
  Synthetic oligonucleotide

SEQ ID NO: 614940 - DNA, 57 bp, Artificial; identical to SEQ ID NO: 484375
  Synthetic oligonucleotide

SEQ ID NO: 614941 - DNA, 55 bp, Artificial; identical to SEQ ID NO: 7819
  Synthetic oligonucleotide

SEQ ID NO: 614942 - DNA, 60 bp, Artificial; identical to SEQ ID NO: 484379
  Synthetic oligonucleotide

SEQ ID NO: 614943 - DNA, 55 bp, Artificial; identical to SEQ ID NO: 484381
  Synthetic oligonucleotide

SEQ ID NO: 614944 - DNA, 52 bp, Artificial; identical to SEQ ID NO: 484386
  Synthetic oligonucleotide

SEQ ID NO: 614945 - DNA, 56 bp, Artificial; identical to SEQ ID NO: 484389
  Synthetic oligonucleotide

SEQ ID NO: 614946 - DNA, 60 bp, Artificial; identical to SEQ ID NO: 484390
  Synthetic oligonucleotide

SEQ ID NO: 614947 - DNA, 53 bp, Artificial; identical to SEQ ID NO: 484391
  Synthetic oligonucleotide

SEQ ID NO: 614948 - DNA, 59 bp, Artificial; identical to SEQ ID NO: 484392
  Synthetic oligonucleotide

SEQ ID NO: 614949 - DNA, 60 bp, Artificial; identical to SEQ ID NO: 123353
  Synthetic oligonucleotide

SEQ ID NO: 614950 - DNA, 51 bp, Artificial; identical to SEQ ID NO: 484397
  Synthetic oligonucleotide

SEQ ID NO: 614951 - DNA, 55 bp, Artificial; identical to SEQ ID NO: 484401
  Synthetic oligonucleotide

SEQ ID NO: 614952 - DNA, 57 bp, Artificial; identical to SEQ ID NO: 15915
  Synthetic oligonucleotide

SEQ ID NO: 614953 - DNA, 57 bp, Artificial; identical to SEQ ID NO: 484406
  Synthetic oligonucleotide

SEQ ID NO: 614954 - DNA, 60 bp, Artificial; identical to SEQ ID NO: 484411
  Synthetic oligonucleotide

SEQ ID NO: 614955 - DNA, 58 bp, Artificial; identical to SEQ ID NO: 18518
  Synthetic oligonucleotide

SEQ ID NO: 614956 - DNA, 55 bp, Artificial; identical to SEQ ID NO: 484418
  Synthetic oligonucleotide

SEQ ID NO: 614957 - DNA, 60 bp, Artificial; identical to SEQ ID NO: 484420
  Synthetic oligonucleotide

SEQ ID NO: 614958 - DNA, 54 bp, Artificial; identical to SEQ ID NO: 484421
  Synthetic oligonucleotide

SEQ ID NO: 614959 - DNA, 53 bp, Artificial; identical to SEQ ID NO: 484422
  Synthetic oligonucleotide

SEQ ID NO: 614960 - DNA, 59 bp, Artificial; identical to SEQ ID NO: 484424
  Synthetic oligonucleotide

SEQ ID NO: 614961 - DNA, 54 bp, Artificial; identical to SEQ ID NO: 484425
  Synthetic oligonucleotide

SEQ ID NO: 614962 - DNA, 51 bp, Artificial; identical to SEQ ID NO: 484426
  Synthetic oligonucleotide

SEQ ID NO: 614963 - DNA, 60 bp, Artificial; identical to SEQ ID NO: 484427
  Synthetic oligonucleotide

SEQ ID NO: 614964 - DNA, 54 bp, Artificial; identical to SEQ ID NO: 484428
  Synthetic oligonucleotide

SEQ ID NO: 614965 - DNA, 60 bp, Artificial; identical to SEQ ID NO: 484429
  Synthetic oligonucleotide

SEQ ID NO: 614966 - DNA, 55 bp, Artificial; identical to SEQ ID NO: 484431
  Synthetic oligonucleotide

SEQ ID NO: 614967 - DNA, 59 bp, Artificial; identical to SEQ ID NO: 484433
  Synthetic oligonucleotide

SEQ ID NO: 614968 - DNA, 60 bp, Artificial; identical to SEQ ID NO: 484438
  Synthetic oligonucleotide

SEQ ID NO: 614969 - DNA, 54 bp, Artificial; identical to SEQ ID NO: 484440
  Synthetic oligonucleotide

SEQ ID NO: 614970 - DNA, 52 bp, Artificial; identical to SEQ ID NO: 484442
  Synthetic oligonucleotide

SEQ ID NO: 614971 - DNA, 60 bp, Artificial; identical to SEQ ID NO: 484443
  Synthetic oligonucleotide

SEQ ID NO: 614972 - DNA, 55 bp, Artificial; identical to SEQ ID NO: 484444
  Synthetic oligonucleotide

SEQ ID NO: 614973 - DNA, 60 bp, Artificial; identical to SEQ ID NO: 484446
  Synthetic oligonucleotide

SEQ ID NO: 614974 - DNA, 57 bp, Artificial; identical to SEQ ID NO: 484448
  Synthetic oligonucleotide

SEQ ID NO: 614975 - DNA, 57 bp, Artificial; identical to SEQ ID NO: 484452
  Synthetic oligonucleotide

SEQ ID NO: 614976 - DNA, 51 bp, Artificial; identical to SEQ ID NO: 20040
  Synthetic oligonucleotide

SEQ ID NO: 614977 - DNA, 60 bp, Artificial; identical to SEQ ID NO: 484457
  Synthetic oligonucleotide

SEQ ID NO: 614978 - DNA, 50 bp, Artificial; identical to SEQ ID NO: 484458
  Synthetic oligonucleotide

SEQ ID NO: 614979 - DNA, 59 bp, Artificial; identical to SEQ ID NO: 484460
  Synthetic oligonucleotide

SEQ ID NO: 614980 - DNA, 54 bp, Artificial; identical to SEQ ID NO: 484461
  Synthetic oligonucleotide

SEQ ID NO: 614981 - DNA, 51 bp, Artificial; identical to SEQ ID NO: 484464
  Synthetic oligonucleotide

SEQ ID NO: 614982 - DNA, 60 bp, Artificial; identical to SEQ ID NO: 484465
  Synthetic oligonucleotide

SEQ ID NO: 614983 - DNA, 53 bp, Artificial; identical to SEQ ID NO: 484466
  Synthetic oligonucleotide

SEQ ID NO: 614984 - DNA, 58 bp, Artificial; identical to SEQ ID NO: 484470
  Synthetic oligonucleotide

SEQ ID NO: 614985 - DNA, 57 bp, Artificial; identical to SEQ ID NO: 484475
  Synthetic oligonucleotide

SEQ ID NO: 614986 - DNA, 55 bp, Artificial; identical to SEQ ID NO: 484476
  Synthetic oligonucleotide

SEQ ID NO: 614987 - DNA, 51 bp, Artificial; identical to SEQ ID NO: 484477
  Synthetic oligonucleotide

SEQ ID NO: 614988 - DNA, 56 bp, Artificial; identical to SEQ ID NO: 484479
  Synthetic oligonucleotide

SEQ ID NO: 614989 - DNA, 58 bp, Artificial; identical to SEQ ID NO: 484484
  Synthetic oligonucleotide

SEQ ID NO: 614990 - DNA, 60 bp, Artificial; identical to SEQ ID NO: 484486
  Synthetic oligonucleotide

SEQ ID NO: 614991 - DNA, 60 bp, Artificial; identical to SEQ ID NO: 484487
  Synthetic oligonucleotide

SEQ ID NO: 614992 - DNA, 60 bp, Artificial; identical to SEQ ID NO: 484491
  Synthetic oligonucleotide

SEQ ID NO: 614993 - DNA, 57 bp, Artificial; identical to SEQ ID NO: 484492
  Synthetic oligonucleotide

SEQ ID NO: 614994 - DNA, 55 bp, Artificial; identical to SEQ ID NO: 484495
  Synthetic oligonucleotide

SEQ ID NO: 614995 - DNA, 56 bp, Artificial; identical to SEQ ID NO: 484496
  Synthetic oligonucleotide

SEQ ID NO: 614996 - DNA, 50 bp, Artificial; identical to SEQ ID NO: 484497
  Synthetic oligonucleotide

SEQ ID NO: 614997 - DNA, 56 bp, Artificial; identical to SEQ ID NO: 484501
  Synthetic oligonucleotide

SEQ ID NO: 614998 - DNA, 54 bp, Artificial; identical to SEQ ID NO: 484506
  Synthetic oligonucleotide

SEQ ID NO: 614999 - DNA, 59 bp, Artificial; identical to SEQ ID NO: 484510
  Synthetic oligonucleotide

SEQ ID NO: 615000 - DNA, 53 bp, Artificial; identical to SEQ ID NO: 484511
  Synthetic oligonucleotide

SEQ ID NO: 615001 - DNA, 60 bp, Artificial; identical to SEQ ID NO: 484516
  Synthetic oligonucleotide

SEQ ID NO: 615002 - DNA, 54 bp, Artificial; identical to SEQ ID NO: 484519
  Synthetic oligonucleotide

SEQ ID NO: 615003 - DNA, 56 bp, Artificial; identical to SEQ ID NO: 484522
  Synthetic oligonucleotide

SEQ ID NO: 615004 - DNA, 55 bp, Artificial; identical to SEQ ID NO: 484523
  Synthetic oligonucleotide

SEQ ID NO: 615005 - DNA, 55 bp, Artificial; identical to SEQ ID NO: 484524
  Synthetic oligonucleotide

SEQ ID NO: 615006 - DNA, 60 bp, Artificial; identical to SEQ ID NO: 15565
  Synthetic oligonucleotide

SEQ ID NO: 615007 - DNA, 60 bp, Artificial; identical to SEQ ID NO: 484525
  Synthetic oligonucleotide

SEQ ID NO: 615008 - DNA, 56 bp, Artificial; identical to SEQ ID NO: 484526
  Synthetic oligonucleotide

SEQ ID NO: 615009 - DNA, 59 bp, Artificial; identical to SEQ ID NO: 484530
  Synthetic oligonucleotide

SEQ ID NO: 615010 - DNA, 57 bp, Artificial; identical to SEQ ID NO: 484531
  Synthetic oligonucleotide

SEQ ID NO: 615011 - DNA, 55 bp, Artificial; identical to SEQ ID NO: 484535
  Synthetic oligonucleotide

SEQ ID NO: 615012 - DNA, 52 bp, Artificial; identical to SEQ ID NO: 484537
  Synthetic oligonucleotide

SEQ ID NO: 615013 - DNA, 60 bp, Artificial; identical to SEQ ID NO: 484540
  Synthetic oligonucleotide

SEQ ID NO: 615014 - DNA, 60 bp, Artificial; identical to SEQ ID NO: 484544
  Synthetic oligonucleotide

SEQ ID NO: 615015 - DNA, 58 bp, Artificial; identical to SEQ ID NO: 484547
  Synthetic oligonucleotide

SEQ ID NO: 615016 - DNA, 51 bp, Artificial; identical to SEQ ID NO: 484549
  Synthetic oligonucleotide

SEQ ID NO: 615017 - DNA, 56 bp, Artificial; identical to SEQ ID NO: 484551
  Synthetic oligonucleotide

SEQ ID NO: 615018 - DNA, 56 bp, Artificial; identical to SEQ ID NO: 484552
  Synthetic oligonucleotide

SEQ ID NO: 615019 - DNA, 57 bp, Artificial; identical to SEQ ID NO: 484553
  Synthetic oligonucleotide

SEQ ID NO: 615020 - DNA, 54 bp, Artificial; identical to SEQ ID NO: 484555
  Synthetic oligonucleotide

SEQ ID NO: 615021 - DNA, 56 bp, Artificial; identical to SEQ ID NO: 484559
  Synthetic oligonucleotide

SEQ ID NO: 615022 - DNA, 55 bp, Artificial; identical to SEQ ID NO: 484561
  Synthetic oligonucleotide

SEQ ID NO: 615023 - DNA, 58 bp, Artificial; identical to SEQ ID NO: 484564
  Synthetic oligonucleotide

SEQ ID NO: 615024 - DNA, 60 bp, Artificial; identical to SEQ ID NO: 484567
  Synthetic oligonucleotide

SEQ ID NO: 615025 - DNA, 57 bp, Artificial; identical to SEQ ID NO: 484570
  Synthetic oligonucleotide

SEQ ID NO: 615026 - DNA, 56 bp, Artificial; identical to SEQ ID NO: 484573
  Synthetic oligonucleotide

SEQ ID NO: 615027 - DNA, 55 bp, Artificial; identical to SEQ ID NO: 484574
  Synthetic oligonucleotide

SEQ ID NO: 615028 - DNA, 60 bp, Artificial; identical to SEQ ID NO: 484575
  Synthetic oligonucleotide

SEQ ID NO: 615029 - DNA, 55 bp, Artificial; identical to SEQ ID NO: 484577
  Synthetic oligonucleotide

SEQ ID NO: 615030 - DNA, 52 bp, Artificial; identical to SEQ ID NO: 484578
  Synthetic oligonucleotide

SEQ ID NO: 615031 - DNA, 58 bp, Artificial; identical to SEQ ID NO: 484580
  Synthetic oligonucleotide

SEQ ID NO: 615032 - DNA, 60 bp, Artificial; identical to SEQ ID NO: 484581
  Synthetic oligonucleotide

SEQ ID NO: 615033 - DNA, 51 bp, Artificial; identical to SEQ ID NO: 484583
  Synthetic oligonucleotide

SEQ ID NO: 615034 - DNA, 60 bp, Artificial; identical to SEQ ID NO: 484585
  Synthetic oligonucleotide

SEQ ID NO: 615035 - DNA, 54 bp, Artificial; identical to SEQ ID NO: 484586
  Synthetic oligonucleotide

SEQ ID NO: 615036 - DNA, 59 bp, Artificial; identical to SEQ ID NO: 484590
  Synthetic oligonucleotide

SEQ ID NO: 615037 - DNA, 57 bp, Artificial; identical to SEQ ID NO: 484593
  Synthetic oligonucleotide

SEQ ID NO: 615038 - DNA, 59 bp, Artificial; identical to SEQ ID NO: 484594
  Synthetic oligonucleotide

SEQ ID NO: 615039 - DNA, 50 bp, Artificial; identical to SEQ ID NO: 484596
  Synthetic oligonucleotide

SEQ ID NO: 615040 - DNA, 58 bp, Artificial; identical to SEQ ID NO: 484599
  Synthetic oligonucleotide

SEQ ID NO: 615041 - DNA, 55 bp, Artificial; identical to SEQ ID NO: 484600
  Synthetic oligonucleotide

SEQ ID NO: 615042 - DNA, 56 bp, Artificial; identical to SEQ ID NO: 484601
  Synthetic oligonucleotide

SEQ ID NO: 615043 - DNA, 50 bp, Artificial; identical to SEQ ID NO: 484607
  Synthetic oligonucleotide

SEQ ID NO: 615044 - DNA, 57 bp, Artificial; identical to SEQ ID NO: 484610
  Synthetic oligonucleotide

SEQ ID NO: 615045 - DNA, 57 bp, Artificial; identical to SEQ ID NO: 484611
  Synthetic oligonucleotide

SEQ ID NO: 615046 - DNA, 58 bp, Artificial; identical to SEQ ID NO: 484612
  Synthetic oligonucleotide

SEQ ID NO: 615047 - DNA, 59 bp, Artificial; identical to SEQ ID NO: 484614
  Synthetic oligonucleotide

SEQ ID NO: 615048 - DNA, 60 bp, Artificial; identical to SEQ ID NO: 484619
  Synthetic oligonucleotide

SEQ ID NO: 615049 - DNA, 52 bp, Artificial; identical to SEQ ID NO: 484623
  Synthetic oligonucleotide

SEQ ID NO: 615050 - DNA, 60 bp, Artificial; identical to SEQ ID NO: 484625
  Synthetic oligonucleotide

SEQ ID NO: 615051 - DNA, 60 bp, Artificial; identical to SEQ ID NO: 484629
  Synthetic oligonucleotide

SEQ ID NO: 615052 - DNA, 60 bp, Artificial; identical to SEQ ID NO: 484634
  Synthetic oligonucleotide

SEQ ID NO: 615053 - DNA, 60 bp, Artificial; identical to SEQ ID NO: 484635
  Synthetic oligonucleotide

SEQ ID NO: 615054 - DNA, 55 bp, Artificial; identical to SEQ ID NO: 484642
  Synthetic oligonucleotide

SEQ ID NO: 615055 - DNA, 59 bp, Artificial; identical to SEQ ID NO: 484644
  Synthetic oligonucleotide

SEQ ID NO: 615056 - DNA, 57 bp, Artificial; identical to SEQ ID NO: 484645
  Synthetic oligonucleotide

SEQ ID NO: 615057 - DNA, 57 bp, Artificial; identical to SEQ ID NO: 484646
  Synthetic oligonucleotide

SEQ ID NO: 615058 - DNA, 59 bp, Artificial; identical to SEQ ID NO: 484649
  Synthetic oligonucleotide

SEQ ID NO: 615059 - DNA, 55 bp, Artificial; identical to SEQ ID NO: 484654
  Synthetic oligonucleotide

SEQ ID NO: 615060 - DNA, 51 bp, Artificial; identical to SEQ ID NO: 484657
  Synthetic oligonucleotide

SEQ ID NO: 615061 - DNA, 57 bp, Artificial; identical to SEQ ID NO: 484658
  Synthetic oligonucleotide

SEQ ID NO: 615062 - DNA, 55 bp, Artificial; identical to SEQ ID NO: 484664
  Synthetic oligonucleotide

SEQ ID NO: 615063 - DNA, 52 bp, Artificial; identical to SEQ ID NO: 484667
  Synthetic oligonucleotide

SEQ ID NO: 615064 - DNA, 60 bp, Artificial; identical to SEQ ID NO: 484670
  Synthetic oligonucleotide

SEQ ID NO: 615065 - DNA, 52 bp, Artificial; identical to SEQ ID NO: 484678
  Synthetic oligonucleotide

SEQ ID NO: 615066 - DNA, 59 bp, Artificial; identical to SEQ ID NO: 484679
  Synthetic oligonucleotide

SEQ ID NO: 615067 - DNA, 52 bp, Artificial; identical to SEQ ID NO: 484682
  Synthetic oligonucleotide

SEQ ID NO: 615068 - DNA, 60 bp, Artificial; identical to SEQ ID NO: 484687
  Synthetic oligonucleotide

SEQ ID NO: 615069 - DNA, 60 bp, Artificial; identical to SEQ ID NO: 484689
  Synthetic oligonucleotide

SEQ ID NO: 615070 - DNA, 60 bp, Artificial; identical to SEQ ID NO: 484691
  Synthetic oligonucleotide

SEQ ID NO: 615071 - DNA, 53 bp, Artificial; identical to SEQ ID NO: 484692
  Synthetic oligonucleotide

SEQ ID NO: 615072 - DNA, 55 bp, Artificial; identical to SEQ ID NO: 484693
  Synthetic oligonucleotide

SEQ ID NO: 615073 - DNA, 55 bp, Artificial; identical to SEQ ID NO: 484694
  Synthetic oligonucleotide

SEQ ID NO: 615074 - DNA, 55 bp, Artificial; identical to SEQ ID NO: 484696
  Synthetic oligonucleotide

SEQ ID NO: 615075 - DNA, 55 bp, Artificial; identical to SEQ ID NO: 484701
  Synthetic oligonucleotide

SEQ ID NO: 615076 - DNA, 60 bp, Artificial; identical to SEQ ID NO: 484702
  Synthetic oligonucleotide

SEQ ID NO: 615077 - DNA, 59 bp, Artificial; identical to SEQ ID NO: 484703
  Synthetic oligonucleotide

SEQ ID NO: 615078 - DNA, 60 bp, Artificial; identical to SEQ ID NO: 484705
  Synthetic oligonucleotide

SEQ ID NO: 615079 - DNA, 60 bp, Artificial; identical to SEQ ID NO: 484707
  Synthetic oligonucleotide

SEQ ID NO: 615080 - DNA, 55 bp, Artificial; identical to SEQ ID NO: 484708
  Synthetic oligonucleotide

SEQ ID NO: 615081 - DNA, 56 bp, Artificial; identical to SEQ ID NO: 484709
  Synthetic oligonucleotide

SEQ ID NO: 615082 - DNA, 55 bp, Artificial; identical to SEQ ID NO: 484712
  Synthetic oligonucleotide

SEQ ID NO: 615083 - DNA, 58 bp, Artificial; identical to SEQ ID NO: 484713
  Synthetic oligonucleotide

SEQ ID NO: 615084 - DNA, 55 bp, Artificial; identical to SEQ ID NO: 484714
  Synthetic oligonucleotide

SEQ ID NO: 615085 - DNA, 60 bp, Artificial; identical to SEQ ID NO: 484715
  Synthetic oligonucleotide

SEQ ID NO: 615086 - DNA, 57 bp, Artificial; identical to SEQ ID NO: 484716
  Synthetic oligonucleotide

SEQ ID NO: 615087 - DNA, 55 bp, Artificial; identical to SEQ ID NO: 484719
  Synthetic oligonucleotide

SEQ ID NO: 615088 - DNA, 50 bp, Artificial; identical to SEQ ID NO: 484724
  Synthetic oligonucleotide

SEQ ID NO: 615089 - DNA, 60 bp, Artificial; identical to SEQ ID NO: 484725
  Synthetic oligonucleotide

SEQ ID NO: 615090 - DNA, 52 bp, Artificial; identical to SEQ ID NO: 484729
  Synthetic oligonucleotide

SEQ ID NO: 615091 - DNA, 60 bp, Artificial; identical to SEQ ID NO: 484730
  Synthetic oligonucleotide

SEQ ID NO: 615092 - DNA, 57 bp, Artificial; identical to SEQ ID NO: 484731
  Synthetic oligonucleotide

SEQ ID NO: 615093 - DNA, 55 bp, Artificial; identical to SEQ ID NO: 484732
  Synthetic oligonucleotide

SEQ ID NO: 615094 - DNA, 52 bp, Artificial; identical to SEQ ID NO: 484733
  Synthetic oligonucleotide

SEQ ID NO: 615095 - DNA, 58 bp, Artificial; identical to SEQ ID NO: 484746
  Synthetic oligonucleotide

SEQ ID NO: 615096 - DNA, 60 bp, Artificial; identical to SEQ ID NO: 484748
  Synthetic oligonucleotide

SEQ ID NO: 615097 - DNA, 58 bp, Artificial; identical to SEQ ID NO: 12724
  Synthetic oligonucleotide

SEQ ID NO: 615098 - DNA, 50 bp, Artificial; identical to SEQ ID NO: 484751
  Synthetic oligonucleotide

SEQ ID NO: 615099 - DNA, 60 bp, Artificial; identical to SEQ ID NO: 484752
  Synthetic oligonucleotide

SEQ ID NO: 615100 - DNA, 54 bp, Artificial; identical to SEQ ID NO: 484753
  Synthetic oligonucleotide

SEQ ID NO: 615101 - DNA, 57 bp, Artificial; identical to SEQ ID NO: 17695
  Synthetic oligonucleotide

SEQ ID NO: 615102 - DNA, 52 bp, Artificial; identical to SEQ ID NO: 484755
  Synthetic oligonucleotide

SEQ ID NO: 615103 - DNA, 60 bp, Artificial; identical to SEQ ID NO: 484756
  Synthetic oligonucleotide

SEQ ID NO: 615104 - DNA, 56 bp, Artificial; identical to SEQ ID NO: 484768
  Synthetic oligonucleotide

SEQ ID NO: 615105 - DNA, 59 bp, Artificial; identical to SEQ ID NO: 484773
  Synthetic oligonucleotide

SEQ ID NO: 615106 - DNA, 60 bp, Artificial; identical to SEQ ID NO: 484775
  Synthetic oligonucleotide

SEQ ID NO: 615107 - DNA, 58 bp, Artificial; identical to SEQ ID NO: 484777
  Synthetic oligonucleotide

SEQ ID NO: 615108 - DNA, 60 bp, Artificial; identical to SEQ ID NO: 484780
  Synthetic oligonucleotide

SEQ ID NO: 615109 - DNA, 57 bp, Artificial; identical to SEQ ID NO: 484785
  Synthetic oligonucleotide

SEQ ID NO: 615110 - DNA, 56 bp, Artificial; identical to SEQ ID NO: 484787
  Synthetic oligonucleotide

SEQ ID NO: 615111 - DNA, 58 bp, Artificial; identical to SEQ ID NO: 484789
  Synthetic oligonucleotide

SEQ ID NO: 615112 - DNA, 60 bp, Artificial; identical to SEQ ID NO: 484794
  Synthetic oligonucleotide

SEQ ID NO: 615113 - DNA, 60 bp, Artificial; identical to SEQ ID NO: 484795
  Synthetic oligonucleotide

SEQ ID NO: 615114 - DNA, 60 bp, Artificial; identical to SEQ ID NO: 14669
  Synthetic oligonucleotide

SEQ ID NO: 615115 - DNA, 53 bp, Artificial; identical to SEQ ID NO: 484796
  Synthetic oligonucleotide

SEQ ID NO: 615116 - DNA, 55 bp, Artificial; identical to SEQ ID NO: 484797
  Synthetic oligonucleotide

SEQ ID NO: 615117 - DNA, 56 bp, Artificial; identical to SEQ ID NO: 484798
  Synthetic oligonucleotide

SEQ ID NO: 615118 - DNA, 60 bp, Artificial; identical to SEQ ID NO: 63403
  Synthetic oligonucleotide

SEQ ID NO: 615119 - DNA, 60 bp, Artificial; identical to SEQ ID NO: 484799
  Synthetic oligonucleotide

SEQ ID NO: 615120 - DNA, 55 bp, Artificial; identical to SEQ ID NO: 484801
  Synthetic oligonucleotide

SEQ ID NO: 615121 - DNA, 60 bp, Artificial; identical to SEQ ID NO: 484804
  Synthetic oligonucleotide

SEQ ID NO: 615122 - DNA, 55 bp, Artificial; identical to SEQ ID NO: 20232
  Synthetic oligonucleotide

SEQ ID NO: 615123 - DNA, 60 bp, Artificial; identical to SEQ ID NO: 484807
  Synthetic oligonucleotide

SEQ ID NO: 615124 - DNA, 60 bp, Artificial; identical to SEQ ID NO: 484808
  Synthetic oligonucleotide

SEQ ID NO: 615125 - DNA, 55 bp, Artificial; identical to SEQ ID NO: 484814
  Synthetic oligonucleotide

SEQ ID NO: 615126 - DNA, 55 bp, Artificial; identical to SEQ ID NO: 484815
  Synthetic oligonucleotide

SEQ ID NO: 615127 - DNA, 60 bp, Artificial; identical to SEQ ID NO: 484816
  Synthetic oligonucleotide

SEQ ID NO: 615128 - DNA, 58 bp, Artificial; identical to SEQ ID NO: 484817
  Synthetic oligonucleotide

SEQ ID NO: 615129 - DNA, 60 bp, Artificial; identical to SEQ ID NO: 484824
  Synthetic oligonucleotide

SEQ ID NO: 615130 - DNA, 58 bp, Artificial; identical to SEQ ID NO: 484826
  Synthetic oligonucleotide

SEQ ID NO: 615131 - DNA, 50 bp, Artificial; identical to SEQ ID NO: 484830
  Synthetic oligonucleotide

SEQ ID NO: 615132 - DNA, 60 bp, Artificial; identical to SEQ ID NO: 484831
  Synthetic oligonucleotide

SEQ ID NO: 615133 - DNA, 50 bp, Artificial; identical to SEQ ID NO: 484835
  Synthetic oligonucleotide

SEQ ID NO: 615134 - DNA, 55 bp, Artificial; identical to SEQ ID NO: 484842
  Synthetic oligonucleotide

SEQ ID NO: 615135 - DNA, 60 bp, Artificial; identical to SEQ ID NO: 484843
  Synthetic oligonucleotide

SEQ ID NO: 615136 - DNA, 59 bp, Artificial; identical to SEQ ID NO: 484848
  Synthetic oligonucleotide

SEQ ID NO: 615137 - DNA, 60 bp, Artificial; identical to SEQ ID NO: 484849
  Synthetic oligonucleotide

SEQ ID NO: 615138 - DNA, 60 bp, Artificial; identical to SEQ ID NO: 484850
  Synthetic oligonucleotide

SEQ ID NO: 615139 - DNA, 60 bp, Artificial; identical to SEQ ID NO: 484854
  Synthetic oligonucleotide

SEQ ID NO: 615140 - DNA, 51 bp, Artificial; identical to SEQ ID NO: 484856
  Synthetic oligonucleotide

SEQ ID NO: 615141 - DNA, 58 bp, Artificial; identical to SEQ ID NO: 484861
  Synthetic oligonucleotide

SEQ ID NO: 615142 - DNA, 55 bp, Artificial; identical to SEQ ID NO: 484863
  Synthetic oligonucleotide

SEQ ID NO: 615143 - DNA, 60 bp, Artificial; identical to SEQ ID NO: 484864
  Synthetic oligonucleotide

SEQ ID NO: 615144 - DNA, 60 bp, Artificial; identical to SEQ ID NO: 484869
  Synthetic oligonucleotide

SEQ ID NO: 615145 - DNA, 58 bp, Artificial; identical to SEQ ID NO: 484870
  Synthetic oligonucleotide

SEQ ID NO: 615146 - DNA, 60 bp, Artificial; identical to SEQ ID NO: 484871
  Synthetic oligonucleotide

SEQ ID NO: 615147 - DNA, 60 bp, Artificial; identical to SEQ ID NO: 484873
  Synthetic oligonucleotide

SEQ ID NO: 615148 - DNA, 53 bp, Artificial; identical to SEQ ID NO: 484874
  Synthetic oligonucleotide

SEQ ID NO: 615149 - DNA, 56 bp, Artificial; identical to SEQ ID NO: 484876
  Synthetic oligonucleotide

SEQ ID NO: 615150 - DNA, 55 bp, Artificial; identical to SEQ ID NO: 484877
  Synthetic oligonucleotide

SEQ ID NO: 615151 - DNA, 60 bp, Artificial; identical to SEQ ID NO: 484879
  Synthetic oligonucleotide

SEQ ID NO: 615152 - DNA, 59 bp, Artificial; identical to SEQ ID NO: 484880
  Synthetic oligonucleotide

SEQ ID NO: 615153 - DNA, 55 bp, Artificial; identical to SEQ ID NO: 484885
  Synthetic oligonucleotide

SEQ ID NO: 615154 - DNA, 60 bp, Artificial; identical to SEQ ID NO: 484886
  Synthetic oligonucleotide

SEQ ID NO: 615155 - DNA, 54 bp, Artificial; identical to SEQ ID NO: 484889
  Synthetic oligonucleotide

SEQ ID NO: 615156 - DNA, 53 bp, Artificial; identical to SEQ ID NO: 484890
  Synthetic oligonucleotide

SEQ ID NO: 615157 - DNA, 59 bp, Artificial; identical to SEQ ID NO: 484891
  Synthetic oligonucleotide

SEQ ID NO: 615158 - DNA, 60 bp, Artificial; identical to SEQ ID NO: 484892
  Synthetic oligonucleotide

SEQ ID NO: 615159 - DNA, 60 bp, Artificial; identical to SEQ ID NO: 484893
  Synthetic oligonucleotide

SEQ ID NO: 615160 - DNA, 58 bp, Artificial; identical to SEQ ID NO: 484894
  Synthetic oligonucleotide

SEQ ID NO: 615161 - DNA, 59 bp, Artificial; identical to SEQ ID NO: 484899
  Synthetic oligonucleotide

SEQ ID NO: 615162 - DNA, 58 bp, Artificial; identical to SEQ ID NO: 484901
  Synthetic oligonucleotide

SEQ ID NO: 615163 - DNA, 60 bp, Artificial; identical to SEQ ID NO: 484905
  Synthetic oligonucleotide

SEQ ID NO: 615164 - DNA, 59 bp, Artificial; identical to SEQ ID NO: 484907
  Synthetic oligonucleotide

SEQ ID NO: 615165 - DNA, 54 bp, Artificial; identical to SEQ ID NO: 484911
  Synthetic oligonucleotide

SEQ ID NO: 615166 - DNA, 55 bp, Artificial; identical to SEQ ID NO: 484913
  Synthetic oligonucleotide

SEQ ID NO: 615167 - DNA, 60 bp, Artificial; identical to SEQ ID NO: 484914
  Synthetic oligonucleotide

SEQ ID NO: 615168 - DNA, 58 bp, Artificial; identical to SEQ ID NO: 484919
  Synthetic oligonucleotide

SEQ ID NO: 615169 - DNA, 57 bp, Artificial; identical to SEQ ID NO: 484920
  Synthetic oligonucleotide

SEQ ID NO: 615170 - DNA, 55 bp, Artificial; identical to SEQ ID NO: 484921
  Synthetic oligonucleotide

SEQ ID NO: 615171 - DNA, 60 bp, Artificial; identical to SEQ ID NO: 484924
  Synthetic oligonucleotide

SEQ ID NO: 615172 - DNA, 58 bp, Artificial; identical to SEQ ID NO: 484925
  Synthetic oligonucleotide

SEQ ID NO: 615173 - DNA, 57 bp, Artificial; identical to SEQ ID NO: 484929
  Synthetic oligonucleotide

SEQ ID NO: 615174 - DNA, 50 bp, Artificial; identical to SEQ ID NO: 484932
  Synthetic oligonucleotide

SEQ ID NO: 615175 - DNA, 60 bp, Artificial; identical to SEQ ID NO: 10458
  Synthetic oligonucleotide

SEQ ID NO: 615176 - DNA, 60 bp, Artificial; identical to SEQ ID NO: 484937
  Synthetic oligonucleotide

SEQ ID NO: 615177 - DNA, 60 bp, Artificial; identical to SEQ ID NO: 484938
  Synthetic oligonucleotide

SEQ ID NO: 615178 - DNA, 55 bp, Artificial; identical to SEQ ID NO: 484939
  Synthetic oligonucleotide

SEQ ID NO: 615179 - DNA, 58 bp, Artificial; identical to SEQ ID NO: 484941
  Synthetic oligonucleotide

SEQ ID NO: 615180 - DNA, 56 bp, Artificial; identical to SEQ ID NO: 484943
  Synthetic oligonucleotide

SEQ ID NO: 615181 - DNA, 60 bp, Artificial; identical to SEQ ID NO: 484945
  Synthetic oligonucleotide

SEQ ID NO: 615182 - DNA, 53 bp, Artificial; identical to SEQ ID NO: 484947
  Synthetic oligonucleotide

SEQ ID NO: 615183 - DNA, 54 bp, Artificial; identical to SEQ ID NO: 484948
  Synthetic oligonucleotide

SEQ ID NO: 615184 - DNA, 58 bp, Artificial; identical to SEQ ID NO: 484950
  Synthetic oligonucleotide

SEQ ID NO: 615185 - DNA, 55 bp, Artificial; identical to SEQ ID NO: 484951
  Synthetic oligonucleotide

SEQ ID NO: 615186 - DNA, 56 bp, Artificial; identical to SEQ ID NO: 18223
  Synthetic oligonucleotide

SEQ ID NO: 615187 - DNA, 55 bp, Artificial; identical to SEQ ID NO: 484955
  Synthetic oligonucleotide

SEQ ID NO: 615188 - DNA, 50 bp, Artificial; identical to SEQ ID NO: 484959
  Synthetic oligonucleotide

SEQ ID NO: 615189 - DNA, 60 bp, Artificial; identical to SEQ ID NO: 484961
  Synthetic oligonucleotide

SEQ ID NO: 615190 - DNA, 58 bp, Artificial; identical to SEQ ID NO: 484962
  Synthetic oligonucleotide

SEQ ID NO: 615191 - DNA, 58 bp, Artificial; identical to SEQ ID NO: 484964
  Synthetic oligonucleotide

SEQ ID NO: 615192 - DNA, 59 bp, Artificial; identical to SEQ ID NO: 484965
  Synthetic oligonucleotide

SEQ ID NO: 615193 - DNA, 60 bp, Artificial; identical to SEQ ID NO: 484966
  Synthetic oligonucleotide

SEQ ID NO: 615194 - DNA, 59 bp, Artificial; identical to SEQ ID NO: 484971
  Synthetic oligonucleotide

SEQ ID NO: 615195 - DNA, 58 bp, Artificial; identical to SEQ ID NO: 484973
  Synthetic oligonucleotide

SEQ ID NO: 615196 - DNA, 60 bp, Artificial; identical to SEQ ID NO: 484974
  Synthetic oligonucleotide

SEQ ID NO: 615197 - DNA, 58 bp, Artificial; identical to SEQ ID NO: 484978
  Synthetic oligonucleotide

SEQ ID NO: 615198 - DNA, 60 bp, Artificial; identical to SEQ ID NO: 484979
  Synthetic oligonucleotide

SEQ ID NO: 615199 - DNA, 52 bp, Artificial; identical to SEQ ID NO: 484980
  Synthetic oligonucleotide

SEQ ID NO: 615200 - DNA, 60 bp, Artificial; identical to SEQ ID NO: 484982
  Synthetic oligonucleotide

SEQ ID NO: 615201 - DNA, 60 bp, Artificial; identical to SEQ ID NO: 484983
  Synthetic oligonucleotide

SEQ ID NO: 615202 - DNA, 53 bp, Artificial; identical to SEQ ID NO: 484984
  Synthetic oligonucleotide

SEQ ID NO: 615203 - DNA, 55 bp, Artificial; identical to SEQ ID NO: 484988
  Synthetic oligonucleotide

SEQ ID NO: 615204 - DNA, 55 bp, Artificial; identical to SEQ ID NO: 484989
  Synthetic oligonucleotide

SEQ ID NO: 615205 - DNA, 56 bp, Artificial; identical to SEQ ID NO: 484991
  Synthetic oligonucleotide

SEQ ID NO: 615206 - DNA, 55 bp, Artificial; identical to SEQ ID NO: 20305
  Synthetic oligonucleotide

SEQ ID NO: 615207 - DNA, 60 bp, Artificial; identical to SEQ ID NO: 484999
  Synthetic oligonucleotide

SEQ ID NO: 615208 - DNA, 60 bp, Artificial; identical to SEQ ID NO: 485003
  Synthetic oligonucleotide

SEQ ID NO: 615209 - DNA, 60 bp, Artificial; identical to SEQ ID NO: 485005
  Synthetic oligonucleotide

SEQ ID NO: 615210 - DNA, 51 bp, Artificial; identical to SEQ ID NO: 485006
  Synthetic oligonucleotide

SEQ ID NO: 615211 - DNA, 56 bp, Artificial; identical to SEQ ID NO: 485007
  Synthetic oligonucleotide

SEQ ID NO: 615212 - DNA, 60 bp, Artificial; identical to SEQ ID NO: 485008
  Synthetic oligonucleotide

SEQ ID NO: 615213 - DNA, 60 bp, Artificial; identical to SEQ ID NO: 485010
  Synthetic oligonucleotide

SEQ ID NO: 615214 - DNA, 55 bp, Artificial; identical to SEQ ID NO: 485014
  Synthetic oligonucleotide

SEQ ID NO: 615215 - DNA, 60 bp, Artificial; identical to SEQ ID NO: 485016
  Synthetic oligonucleotide

SEQ ID NO: 615216 - DNA, 54 bp, Artificial; identical to SEQ ID NO: 485019
  Synthetic oligonucleotide

SEQ ID NO: 615217 - DNA, 60 bp, Artificial; identical to SEQ ID NO: 485023
  Synthetic oligonucleotide

SEQ ID NO: 615218 - DNA, 52 bp, Artificial; identical to SEQ ID NO: 485025
  Synthetic oligonucleotide

SEQ ID NO: 615219 - DNA, 60 bp, Artificial; identical to SEQ ID NO: 485026
  Synthetic oligonucleotide

SEQ ID NO: 615220 - DNA, 55 bp, Artificial; identical to SEQ ID NO: 485031
  Synthetic oligonucleotide

SEQ ID NO: 615221 - DNA, 53 bp, Artificial; identical to SEQ ID NO: 485033
  Synthetic oligonucleotide

SEQ ID NO: 615222 - DNA, 54 bp, Artificial; identical to SEQ ID NO: 485037
  Synthetic oligonucleotide

SEQ ID NO: 615223 - DNA, 60 bp, Artificial; identical to SEQ ID NO: 485039
  Synthetic oligonucleotide

SEQ ID NO: 615224 - DNA, 54 bp, Artificial; identical to SEQ ID NO: 485040
  Synthetic oligonucleotide

SEQ ID NO: 615225 - DNA, 55 bp, Artificial; identical to SEQ ID NO: 485043
  Synthetic oligonucleotide

SEQ ID NO: 615226 - DNA, 60 bp, Artificial; identical to SEQ ID NO: 485044
  Synthetic oligonucleotide

SEQ ID NO: 615227 - DNA, 59 bp, Artificial; identical to SEQ ID NO: 485045
  Synthetic oligonucleotide

SEQ ID NO: 615228 - DNA, 55 bp, Artificial; identical to SEQ ID NO: 485050
  Synthetic oligonucleotide

SEQ ID NO: 615229 - DNA, 58 bp, Artificial; identical to SEQ ID NO: 485051
  Synthetic oligonucleotide

SEQ ID NO: 615230 - DNA, 60 bp, Artificial; identical to SEQ ID NO: 485055
  Synthetic oligonucleotide

SEQ ID NO: 615231 - DNA, 55 bp, Artificial; identical to SEQ ID NO: 485062
  Synthetic oligonucleotide

SEQ ID NO: 615232 - DNA, 60 bp, Artificial; identical to SEQ ID NO: 485063
  Synthetic oligonucleotide

SEQ ID NO: 615233 - DNA, 60 bp, Artificial; identical to SEQ ID NO: 485064
  Synthetic oligonucleotide

SEQ ID NO: 615234 - DNA, 59 bp, Artificial; identical to SEQ ID NO: 19264
  Synthetic oligonucleotide

SEQ ID NO: 615235 - DNA, 60 bp, Artificial; identical to SEQ ID NO: 485065
  Synthetic oligonucleotide

SEQ ID NO: 615236 - DNA, 60 bp, Artificial; identical to SEQ ID NO: 485066
  Synthetic oligonucleotide

SEQ ID NO: 615237 - DNA, 60 bp, Artificial; identical to SEQ ID NO: 485069
  Synthetic oligonucleotide

SEQ ID NO: 615238 - DNA, 60 bp, Artificial; identical to SEQ ID NO: 485071
  Synthetic oligonucleotide

SEQ ID NO: 615239 - DNA, 56 bp, Artificial; identical to SEQ ID NO: 485072
  Synthetic oligonucleotide

SEQ ID NO: 615240 - DNA, 60 bp, Artificial; identical to SEQ ID NO: 485074
  Synthetic oligonucleotide

SEQ ID NO: 615241 - DNA, 53 bp, Artificial; identical to SEQ ID NO: 485075
  Synthetic oligonucleotide

SEQ ID NO: 615242 - DNA, 58 bp, Artificial; identical to SEQ ID NO: 17265
  Synthetic oligonucleotide

SEQ ID NO: 615243 - DNA, 56 bp, Artificial; identical to SEQ ID NO: 485077
  Synthetic oligonucleotide

SEQ ID NO: 615244 - DNA, 56 bp, Artificial; identical to SEQ ID NO: 485079
  Synthetic oligonucleotide

SEQ ID NO: 615245 - DNA, 52 bp, Artificial; identical to SEQ ID NO: 485083
  Synthetic oligonucleotide

SEQ ID NO: 615246 - DNA, 55 bp, Artificial; identical to SEQ ID NO: 485085
  Synthetic oligonucleotide

SEQ ID NO: 615247 - DNA, 54 bp, Artificial; identical to SEQ ID NO: 485089
  Synthetic oligonucleotide

SEQ ID NO: 615248 - DNA, 53 bp, Artificial; identical to SEQ ID NO: 485090
  Synthetic oligonucleotide

SEQ ID NO: 615249 - DNA, 57 bp, Artificial; identical to SEQ ID NO: 485092
  Synthetic oligonucleotide

SEQ ID NO: 615250 - DNA, 55 bp, Artificial; identical to SEQ ID NO: 485093
  Synthetic oligonucleotide

SEQ ID NO: 615251 - DNA, 56 bp, Artificial; identical to SEQ ID NO: 485095
  Synthetic oligonucleotide

SEQ ID NO: 615252 - DNA, 60 bp, Artificial; identical to SEQ ID NO: 485102
  Synthetic oligonucleotide

SEQ ID NO: 615253 - DNA, 60 bp, Artificial; identical to SEQ ID NO: 15281
  Synthetic oligonucleotide

SEQ ID NO: 615254 - DNA, 51 bp, Artificial; identical to SEQ ID NO: 485106
  Synthetic oligonucleotide

SEQ ID NO: 615255 - DNA, 55 bp, Artificial; identical to SEQ ID NO: 17692
  Synthetic oligonucleotide

SEQ ID NO: 615256 - DNA, 53 bp, Artificial; identical to SEQ ID NO: 485107
  Synthetic oligonucleotide

SEQ ID NO: 615257 - DNA, 60 bp, Artificial; identical to SEQ ID NO: 485112
  Synthetic oligonucleotide

SEQ ID NO: 615258 - DNA, 60 bp, Artificial; identical to SEQ ID NO: 485114
  Synthetic oligonucleotide

SEQ ID NO: 615259 - DNA, 60 bp, Artificial; identical to SEQ ID NO: 12950
  Synthetic oligonucleotide

SEQ ID NO: 615260 - DNA, 53 bp, Artificial; identical to SEQ ID NO: 485120
  Synthetic oligonucleotide

SEQ ID NO: 615261 - DNA, 60 bp, Artificial; identical to SEQ ID NO: 485122
  Synthetic oligonucleotide

SEQ ID NO: 615262 - DNA, 58 bp, Artificial; identical to SEQ ID NO: 485123
  Synthetic oligonucleotide

SEQ ID NO: 615263 - DNA, 58 bp, Artificial; identical to SEQ ID NO: 485125
  Synthetic oligonucleotide

SEQ ID NO: 615264 - DNA, 55 bp, Artificial; identical to SEQ ID NO: 485126
  Synthetic oligonucleotide

SEQ ID NO: 615265 - DNA, 50 bp, Artificial; identical to SEQ ID NO: 485127
  Synthetic oligonucleotide

SEQ ID NO: 615266 - DNA, 58 bp, Artificial; identical to SEQ ID NO: 485138
  Synthetic oligonucleotide

SEQ ID NO: 615267 - DNA, 55 bp, Artificial; identical to SEQ ID NO: 485140
  Synthetic oligonucleotide

SEQ ID NO: 615268 - DNA, 57 bp, Artificial; identical to SEQ ID NO: 485141
  Synthetic oligonucleotide

SEQ ID NO: 615269 - DNA, 58 bp, Artificial; identical to SEQ ID NO: 485142
  Synthetic oligonucleotide

SEQ ID NO: 615270 - DNA, 60 bp, Artificial; identical to SEQ ID NO: 485144
  Synthetic oligonucleotide

SEQ ID NO: 615271 - DNA, 55 bp, Artificial; identical to SEQ ID NO: 485146
  Synthetic oligonucleotide

SEQ ID NO: 615272 - DNA, 58 bp, Artificial; identical to SEQ ID NO: 485151
  Synthetic oligonucleotide

SEQ ID NO: 615273 - DNA, 57 bp, Artificial; identical to SEQ ID NO: 485153
  Synthetic oligonucleotide

SEQ ID NO: 615274 - DNA, 60 bp, Artificial; identical to SEQ ID NO: 485156
  Synthetic oligonucleotide

SEQ ID NO: 615275 - DNA, 55 bp, Artificial; identical to SEQ ID NO: 485158
  Synthetic oligonucleotide

SEQ ID NO: 615276 - DNA, 60 bp, Artificial; identical to SEQ ID NO: 10699
  Synthetic oligonucleotide

SEQ ID NO: 615277 - DNA, 58 bp, Artificial; identical to SEQ ID NO: 485159
  Synthetic oligonucleotide

SEQ ID NO: 615278 - DNA, 60 bp, Artificial; identical to SEQ ID NO: 485166
  Synthetic oligonucleotide

SEQ ID NO: 615279 - DNA, 55 bp, Artificial; identical to SEQ ID NO: 485168
  Synthetic oligonucleotide

SEQ ID NO: 615280 - DNA, 60 bp, Artificial; identical to SEQ ID NO: 485169
  Synthetic oligonucleotide

SEQ ID NO: 615281 - DNA, 55 bp, Artificial; identical to SEQ ID NO: 485170
  Synthetic oligonucleotide

SEQ ID NO: 615282 - DNA, 52 bp, Artificial; identical to SEQ ID NO: 485174
  Synthetic oligonucleotide

SEQ ID NO: 615283 - DNA, 50 bp, Artificial; identical to SEQ ID NO: 485178
  Synthetic oligonucleotide

SEQ ID NO: 615284 - DNA, 55 bp, Artificial; identical to SEQ ID NO: 485183
  Synthetic oligonucleotide

SEQ ID NO: 615285 - DNA, 50 bp, Artificial; identical to SEQ ID NO: 485191
  Synthetic oligonucleotide

SEQ ID NO: 615286 - DNA, 51 bp, Artificial; identical to SEQ ID NO: 485194
  Synthetic oligonucleotide

SEQ ID NO: 615287 - DNA, 58 bp, Artificial; identical to SEQ ID NO: 485196
  Synthetic oligonucleotide

SEQ ID NO: 615288 - DNA, 55 bp, Artificial; identical to SEQ ID NO: 485200
  Synthetic oligonucleotide

SEQ ID NO: 615289 - DNA, 59 bp, Artificial; identical to SEQ ID NO: 485201
  Synthetic oligonucleotide

SEQ ID NO: 615290 - DNA, 59 bp, Artificial; identical to SEQ ID NO: 485202
  Synthetic oligonucleotide

SEQ ID NO: 615291 - DNA, 55 bp, Artificial; identical to SEQ ID NO: 485205
  Synthetic oligonucleotide

SEQ ID NO: 615292 - DNA, 57 bp, Artificial; identical to SEQ ID NO: 485207
  Synthetic oligonucleotide

SEQ ID NO: 615293 - DNA, 51 bp, Artificial; identical to SEQ ID NO: 485210
  Synthetic oligonucleotide

SEQ ID NO: 615294 - DNA, 53 bp, Artificial; identical to SEQ ID NO: 485214
  Synthetic oligonucleotide

SEQ ID NO: 615295 - DNA, 52 bp, Artificial; identical to SEQ ID NO: 485215
  Synthetic oligonucleotide

SEQ ID NO: 615296 - DNA, 56 bp, Artificial; identical to SEQ ID NO: 485216
  Synthetic oligonucleotide

SEQ ID NO: 615297 - DNA, 54 bp, Artificial; identical to SEQ ID NO: 485217
  Synthetic oligonucleotide

SEQ ID NO: 615298 - DNA, 54 bp, Artificial; identical to SEQ ID NO: 16390
  Synthetic oligonucleotide

SEQ ID NO: 615299 - DNA, 56 bp, Artificial; identical to SEQ ID NO: 485227
  Synthetic oligonucleotide

SEQ ID NO: 615300 - DNA, 59 bp, Artificial; identical to SEQ ID NO: 485228
  Synthetic oligonucleotide

SEQ ID NO: 615301 - DNA, 50 bp, Artificial; identical to SEQ ID NO: 485231
  Synthetic oligonucleotide

SEQ ID NO: 615302 - DNA, 60 bp, Artificial; identical to SEQ ID NO: 485232
  Synthetic oligonucleotide

SEQ ID NO: 615303 - DNA, 60 bp, Artificial; identical to SEQ ID NO: 485233
  Synthetic oligonucleotide

SEQ ID NO: 615304 - DNA, 60 bp, Artificial; identical to SEQ ID NO: 485237
  Synthetic oligonucleotide

SEQ ID NO: 615305 - DNA, 60 bp, Artificial; identical to SEQ ID NO: 485242
  Synthetic oligonucleotide

SEQ ID NO: 615306 - DNA, 58 bp, Artificial; identical to SEQ ID NO: 485244
  Synthetic oligonucleotide

SEQ ID NO: 615307 - DNA, 55 bp, Artificial; identical to SEQ ID NO: 485249
  Synthetic oligonucleotide

SEQ ID NO: 615308 - DNA, 50 bp, Artificial; identical to SEQ ID NO: 485252
  Synthetic oligonucleotide

SEQ ID NO: 615309 - DNA, 54 bp, Artificial; identical to SEQ ID NO: 485253
  Synthetic oligonucleotide

SEQ ID NO: 615310 - DNA, 56 bp, Artificial; identical to SEQ ID NO: 485257
  Synthetic oligonucleotide

SEQ ID NO: 615311 - DNA, 57 bp, Artificial; identical to SEQ ID NO: 485259
  Synthetic oligonucleotide

SEQ ID NO: 615312 - DNA, 53 bp, Artificial; identical to SEQ ID NO: 485262
  Synthetic oligonucleotide

SEQ ID NO: 615313 - DNA, 60 bp, Artificial; identical to SEQ ID NO: 485266
  Synthetic oligonucleotide

SEQ ID NO: 615314 - DNA, 58 bp, Artificial; identical to SEQ ID NO: 485267
  Synthetic oligonucleotide

SEQ ID NO: 615315 - DNA, 59 bp, Artificial; identical to SEQ ID NO: 485270
  Synthetic oligonucleotide

SEQ ID NO: 615316 - DNA, 60 bp, Artificial; identical to SEQ ID NO: 485273
  Synthetic oligonucleotide

SEQ ID NO: 615317 - DNA, 56 bp, Artificial; identical to SEQ ID NO: 485277
  Synthetic oligonucleotide

SEQ ID NO: 615318 - DNA, 54 bp, Artificial; identical to SEQ ID NO: 485278
  Synthetic oligonucleotide

SEQ ID NO: 615319 - DNA, 59 bp, Artificial; identical to SEQ ID NO: 485281
  Synthetic oligonucleotide

SEQ ID NO: 615320 - DNA, 55 bp, Artificial; identical to SEQ ID NO: 485288
  Synthetic oligonucleotide

SEQ ID NO: 615321 - DNA, 55 bp, Artificial; identical to SEQ ID NO: 485290
  Synthetic oligonucleotide

SEQ ID NO: 615322 - DNA, 50 bp, Artificial; identical to SEQ ID NO: 485292
  Synthetic oligonucleotide

SEQ ID NO: 615323 - DNA, 51 bp, Artificial; identical to SEQ ID NO: 485293
  Synthetic oligonucleotide

SEQ ID NO: 615324 - DNA, 54 bp, Artificial; identical to SEQ ID NO: 485294
  Synthetic oligonucleotide

SEQ ID NO: 615325 - DNA, 60 bp, Artificial; identical to SEQ ID NO: 485295
  Synthetic oligonucleotide

SEQ ID NO: 615326 - DNA, 60 bp, Artificial; identical to SEQ ID NO: 485296
  Synthetic oligonucleotide

SEQ ID NO: 615327 - DNA, 55 bp, Artificial; identical to SEQ ID NO: 485297
  Synthetic oligonucleotide

SEQ ID NO: 615328 - DNA, 55 bp, Artificial; identical to SEQ ID NO: 485298
  Synthetic oligonucleotide

SEQ ID NO: 615329 - DNA, 60 bp, Artificial; identical to SEQ ID NO: 485301
  Synthetic oligonucleotide

SEQ ID NO: 615330 - DNA, 55 bp, Artificial; identical to SEQ ID NO: 485304
  Synthetic oligonucleotide

SEQ ID NO: 615331 - DNA, 55 bp, Artificial; identical to SEQ ID NO: 485311
  Synthetic oligonucleotide

SEQ ID NO: 615332 - DNA, 55 bp, Artificial; identical to SEQ ID NO: 485313
  Synthetic oligonucleotide

SEQ ID NO: 615333 - DNA, 56 bp, Artificial; identical to SEQ ID NO: 485316
  Synthetic oligonucleotide

SEQ ID NO: 615334 - DNA, 60 bp, Artificial; identical to SEQ ID NO: 485318
  Synthetic oligonucleotide

SEQ ID NO: 615335 - DNA, 60 bp, Artificial; identical to SEQ ID NO: 485319
  Synthetic oligonucleotide

SEQ ID NO: 615336 - DNA, 53 bp, Artificial; identical to SEQ ID NO: 485321
  Synthetic oligonucleotide

SEQ ID NO: 615337 - DNA, 58 bp, Artificial; identical to SEQ ID NO: 485325
  Synthetic oligonucleotide

SEQ ID NO: 615338 - DNA, 60 bp, Artificial; identical to SEQ ID NO: 485327
  Synthetic oligonucleotide

SEQ ID NO: 615339 - DNA, 50 bp, Artificial; identical to SEQ ID NO: 485332
  Synthetic oligonucleotide

SEQ ID NO: 615340 - DNA, 50 bp, Artificial; identical to SEQ ID NO: 485333
  Synthetic oligonucleotide

SEQ ID NO: 615341 - DNA, 55 bp, Artificial; identical to SEQ ID NO: 485334
  Synthetic oligonucleotide

SEQ ID NO: 615342 - DNA, 55 bp, Artificial; identical to SEQ ID NO: 485337
  Synthetic oligonucleotide

SEQ ID NO: 615343 - DNA, 59 bp, Artificial; identical to SEQ ID NO: 485338
  Synthetic oligonucleotide

SEQ ID NO: 615344 - DNA, 55 bp, Artificial; identical to SEQ ID NO: 485341
  Synthetic oligonucleotide

SEQ ID NO: 615345 - DNA, 60 bp, Artificial; identical to SEQ ID NO: 485343
  Synthetic oligonucleotide

SEQ ID NO: 615346 - DNA, 60 bp, Artificial; identical to SEQ ID NO: 485348
  Synthetic oligonucleotide

SEQ ID NO: 615347 - DNA, 60 bp, Artificial; identical to SEQ ID NO: 485351
  Synthetic oligonucleotide

SEQ ID NO: 615348 - DNA, 53 bp, Artificial; identical to SEQ ID NO: 485353
  Synthetic oligonucleotide

SEQ ID NO: 615349 - DNA, 59 bp, Artificial; identical to SEQ ID NO: 485355
  Synthetic oligonucleotide

SEQ ID NO: 615350 - DNA, 55 bp, Artificial; identical to SEQ ID NO: 485358
  Synthetic oligonucleotide

SEQ ID NO: 615351 - DNA, 53 bp, Artificial; identical to SEQ ID NO: 485359
  Synthetic oligonucleotide

SEQ ID NO: 615352 - DNA, 54 bp, Artificial; identical to SEQ ID NO: 485360
  Synthetic oligonucleotide

SEQ ID NO: 615353 - DNA, 54 bp, Artificial; identical to SEQ ID NO: 485362
  Synthetic oligonucleotide

SEQ ID NO: 615354 - DNA, 53 bp, Artificial; identical to SEQ ID NO: 485366
  Synthetic oligonucleotide

SEQ ID NO: 615355 - DNA, 59 bp, Artificial; identical to SEQ ID NO: 6017
  Synthetic oligonucleotide

SEQ ID NO: 615356 - DNA, 55 bp, Artificial; identical to SEQ ID NO: 485368
  Synthetic oligonucleotide

SEQ ID NO: 615357 - DNA, 60 bp, Artificial; identical to SEQ ID NO: 485369
  Synthetic oligonucleotide

SEQ ID NO: 615358 - DNA, 60 bp, Artificial; identical to SEQ ID NO: 485370
  Synthetic oligonucleotide

SEQ ID NO: 615359 - DNA, 50 bp, Artificial; identical to SEQ ID NO: 485372
  Synthetic oligonucleotide

SEQ ID NO: 615360 - DNA, 55 bp, Artificial; identical to SEQ ID NO: 485375
  Synthetic oligonucleotide

SEQ ID NO: 615361 - DNA, 60 bp, Artificial; identical to SEQ ID NO: 485376
  Synthetic oligonucleotide

SEQ ID NO: 615362 - DNA, 55 bp, Artificial; identical to SEQ ID NO: 485377
  Synthetic oligonucleotide

SEQ ID NO: 615363 - DNA, 56 bp, Artificial; identical to SEQ ID NO: 485379
  Synthetic oligonucleotide

SEQ ID NO: 615364 - DNA, 59 bp, Artificial; identical to SEQ ID NO: 485380
  Synthetic oligonucleotide

SEQ ID NO: 615365 - DNA, 60 bp, Artificial; identical to SEQ ID NO: 485382
  Synthetic oligonucleotide

SEQ ID NO: 615366 - DNA, 60 bp, Artificial; identical to SEQ ID NO: 485384
  Synthetic oligonucleotide

SEQ ID NO: 615367 - DNA, 60 bp, Artificial; identical to SEQ ID NO: 485385
  Synthetic oligonucleotide

SEQ ID NO: 615368 - DNA, 60 bp, Artificial; identical to SEQ ID NO: 485388
  Synthetic oligonucleotide

SEQ ID NO: 615369 - DNA, 60 bp, Artificial; identical to SEQ ID NO: 485390
  Synthetic oligonucleotide

SEQ ID NO: 615370 - DNA, 55 bp, Artificial; identical to SEQ ID NO: 485391
  Synthetic oligonucleotide

SEQ ID NO: 615371 - DNA, 55 bp, Artificial; identical to SEQ ID NO: 485392
  Synthetic oligonucleotide

SEQ ID NO: 615372 - DNA, 58 bp, Artificial; identical to SEQ ID NO: 485393
  Synthetic oligonucleotide

SEQ ID NO: 615373 - DNA, 60 bp, Artificial; identical to SEQ ID NO: 485398
  Synthetic oligonucleotide

SEQ ID NO: 615374 - DNA, 60 bp, Artificial; identical to SEQ ID NO: 485399
  Synthetic oligonucleotide

SEQ ID NO: 615375 - DNA, 54 bp, Artificial; identical to SEQ ID NO: 485405
  Synthetic oligonucleotide

SEQ ID NO: 615376 - DNA, 60 bp, Artificial; identical to SEQ ID NO: 485408
  Synthetic oligonucleotide

SEQ ID NO: 615377 - DNA, 59 bp, Artificial; identical to SEQ ID NO: 485409
  Synthetic oligonucleotide

SEQ ID NO: 615378 - DNA, 60 bp, Artificial; identical to SEQ ID NO: 485417
  Synthetic oligonucleotide

SEQ ID NO: 615379 - DNA, 60 bp, Artificial; identical to SEQ ID NO: 485418
  Synthetic oligonucleotide

SEQ ID NO: 615380 - DNA, 56 bp, Artificial; identical to SEQ ID NO: 485419
  Synthetic oligonucleotide

SEQ ID NO: 615381 - DNA, 57 bp, Artificial; identical to SEQ ID NO: 485422
  Synthetic oligonucleotide

SEQ ID NO: 615382 - DNA, 52 bp, Artificial; identical to SEQ ID NO: 18180
  Synthetic oligonucleotide

SEQ ID NO: 615383 - DNA, 50 bp, Artificial; identical to SEQ ID NO: 485428
  Synthetic oligonucleotide

SEQ ID NO: 615384 - DNA, 60 bp, Artificial; identical to SEQ ID NO: 485429
  Synthetic oligonucleotide

SEQ ID NO: 615385 - DNA, 60 bp, Artificial; identical to SEQ ID NO: 485430
  Synthetic oligonucleotide

SEQ ID NO: 615386 - DNA, 60 bp, Artificial; identical to SEQ ID NO: 485431
  Synthetic oligonucleotide

SEQ ID NO: 615387 - DNA, 60 bp, Artificial; identical to SEQ ID NO: 485433
  Synthetic oligonucleotide

SEQ ID NO: 615388 - DNA, 55 bp, Artificial; identical to SEQ ID NO: 485436
  Synthetic oligonucleotide

SEQ ID NO: 615389 - DNA, 55 bp, Artificial; identical to SEQ ID NO: 485439
  Synthetic oligonucleotide

SEQ ID NO: 615390 - DNA, 52 bp, Artificial; identical to SEQ ID NO: 485443
  Synthetic oligonucleotide

SEQ ID NO: 615391 - DNA, 60 bp, Artificial; identical to SEQ ID NO: 485444
  Synthetic oligonucleotide

SEQ ID NO: 615392 - DNA, 60 bp, Artificial; identical to SEQ ID NO: 485446
  Synthetic oligonucleotide

SEQ ID NO: 615393 - DNA, 55 bp, Artificial; identical to SEQ ID NO: 485447
  Synthetic oligonucleotide

SEQ ID NO: 615394 - DNA, 54 bp, Artificial; identical to SEQ ID NO: 485448
  Synthetic oligonucleotide

SEQ ID NO: 615395 - DNA, 60 bp, Artificial; identical to SEQ ID NO: 485449
  Synthetic oligonucleotide

SEQ ID NO: 615396 - DNA, 55 bp, Artificial; identical to SEQ ID NO: 485455
  Synthetic oligonucleotide

SEQ ID NO: 615397 - DNA, 60 bp, Artificial; identical to SEQ ID NO: 485456
  Synthetic oligonucleotide

SEQ ID NO: 615398 - DNA, 54 bp, Artificial; identical to SEQ ID NO: 485458
  Synthetic oligonucleotide

SEQ ID NO: 615399 - DNA, 52 bp, Artificial; identical to SEQ ID NO: 485467
  Synthetic oligonucleotide

SEQ ID NO: 615400 - DNA, 60 bp, Artificial; identical to SEQ ID NO: 485474
  Synthetic oligonucleotide

SEQ ID NO: 615401 - DNA, 57 bp, Artificial; identical to SEQ ID NO: 485475
  Synthetic oligonucleotide

SEQ ID NO: 615402 - DNA, 53 bp, Artificial; identical to SEQ ID NO: 485477
  Synthetic oligonucleotide

SEQ ID NO: 615403 - DNA, 51 bp, Artificial; identical to SEQ ID NO: 485478
  Synthetic oligonucleotide

SEQ ID NO: 615404 - DNA, 53 bp, Artificial; identical to SEQ ID NO: 485480
  Synthetic oligonucleotide

SEQ ID NO: 615405 - DNA, 49 bp, Artificial; identical to SEQ ID NO: 485481
  Synthetic oligonucleotide

SEQ ID NO: 615406 - DNA, 53 bp, Artificial; identical to SEQ ID NO: 485488
  Synthetic oligonucleotide

SEQ ID NO: 615407 - DNA, 53 bp, Artificial; identical to SEQ ID NO: 485489
  Synthetic oligonucleotide

SEQ ID NO: 615408 - DNA, 55 bp, Artificial; identical to SEQ ID NO: 485491
  Synthetic oligonucleotide

SEQ ID NO: 615409 - DNA, 60 bp, Artificial; identical to SEQ ID NO: 485495
  Synthetic oligonucleotide

SEQ ID NO: 615410 - DNA, 60 bp, Artificial; identical to SEQ ID NO: 485497
  Synthetic oligonucleotide

SEQ ID NO: 615411 - DNA, 60 bp, Artificial; identical to SEQ ID NO: 485498
  Synthetic oligonucleotide

SEQ ID NO: 615412 - DNA, 59 bp, Artificial; identical to SEQ ID NO: 485500
  Synthetic oligonucleotide

SEQ ID NO: 615413 - DNA, 59 bp, Artificial; identical to SEQ ID NO: 485501
  Synthetic oligonucleotide

SEQ ID NO: 615414 - DNA, 60 bp, Artificial; identical to SEQ ID NO: 485510
  Synthetic oligonucleotide

SEQ ID NO: 615415 - DNA, 55 bp, Artificial; identical to SEQ ID NO: 485512
  Synthetic oligonucleotide

SEQ ID NO: 615416 - DNA, 56 bp, Artificial; identical to SEQ ID NO: 485513
  Synthetic oligonucleotide

SEQ ID NO: 615417 - DNA, 60 bp, Artificial; identical to SEQ ID NO: 485514
  Synthetic oligonucleotide

SEQ ID NO: 615418 - DNA, 56 bp, Artificial; identical to SEQ ID NO: 485515
  Synthetic oligonucleotide

SEQ ID NO: 615419 - DNA, 56 bp, Artificial; identical to SEQ ID NO: 485519
  Synthetic oligonucleotide

SEQ ID NO: 615420 - DNA, 56 bp, Artificial; identical to SEQ ID NO: 485522
  Synthetic oligonucleotide

SEQ ID NO: 615421 - DNA, 55 bp, Artificial; identical to SEQ ID NO: 485523
  Synthetic oligonucleotide

SEQ ID NO: 615422 - DNA, 60 bp, Artificial; identical to SEQ ID NO: 485524
  Synthetic oligonucleotide

SEQ ID NO: 615423 - DNA, 54 bp, Artificial; identical to SEQ ID NO: 485526
  Synthetic oligonucleotide

SEQ ID NO: 615424 - DNA, 52 bp, Artificial; identical to SEQ ID NO: 485528
  Synthetic oligonucleotide

SEQ ID NO: 615425 - DNA, 60 bp, Artificial; identical to SEQ ID NO: 485530
  Synthetic oligonucleotide

SEQ ID NO: 615426 - DNA, 55 bp, Artificial; identical to SEQ ID NO: 485533
  Synthetic oligonucleotide

SEQ ID NO: 615427 - DNA, 53 bp, Artificial; identical to SEQ ID NO: 485534
  Synthetic oligonucleotide

SEQ ID NO: 615428 - DNA, 58 bp, Artificial; identical to SEQ ID NO: 485536
  Synthetic oligonucleotide

SEQ ID NO: 615429 - DNA, 59 bp, Artificial; identical to SEQ ID NO: 485539
  Synthetic oligonucleotide

SEQ ID NO: 615430 - DNA, 51 bp, Artificial; identical to SEQ ID NO: 485540
  Synthetic oligonucleotide

SEQ ID NO: 615431 - DNA, 51 bp, Artificial; identical to SEQ ID NO: 485541
  Synthetic oligonucleotide

SEQ ID NO: 615432 - DNA, 50 bp, Artificial; identical to SEQ ID NO: 485543
  Synthetic oligonucleotide

SEQ ID NO: 615433 - DNA, 51 bp, Artificial; identical to SEQ ID NO: 485544
  Synthetic oligonucleotide

SEQ ID NO: 615434 - DNA, 50 bp, Artificial; identical to SEQ ID NO: 485545
  Synthetic oligonucleotide

SEQ ID NO: 615435 - DNA, 51 bp, Artificial; identical to SEQ ID NO: 485547
  Synthetic oligonucleotide

SEQ ID NO: 615436 - DNA, 50 bp, Artificial; identical to SEQ ID NO: 485548
  Synthetic oligonucleotide

SEQ ID NO: 615437 - DNA, 59 bp, Artificial; identical to SEQ ID NO: 485549
  Synthetic oligonucleotide

SEQ ID NO: 615438 - DNA, 54 bp, Artificial; identical to SEQ ID NO: 485552
  Synthetic oligonucleotide

SEQ ID NO: 615439 - DNA, 60 bp, Artificial; identical to SEQ ID NO: 5804
  Synthetic oligonucleotide

SEQ ID NO: 615440 - DNA, 56 bp, Artificial; identical to SEQ ID NO: 17392
  Synthetic oligonucleotide

SEQ ID NO: 615441 - DNA, 59 bp, Artificial; identical to SEQ ID NO: 485559
  Synthetic oligonucleotide

SEQ ID NO: 615442 - DNA, 51 bp, Artificial; identical to SEQ ID NO: 485565
  Synthetic oligonucleotide

SEQ ID NO: 615443 - DNA, 55 bp, Artificial; identical to SEQ ID NO: 485569
  Synthetic oligonucleotide

SEQ ID NO: 615444 - DNA, 60 bp, Artificial; identical to SEQ ID NO: 485570
  Synthetic oligonucleotide

SEQ ID NO: 615445 - DNA, 53 bp, Artificial; identical to SEQ ID NO: 485571
  Synthetic oligonucleotide

SEQ ID NO: 615446 - DNA, 57 bp, Artificial; identical to SEQ ID NO: 485572
  Synthetic oligonucleotide

SEQ ID NO: 615447 - DNA, 60 bp, Artificial; identical to SEQ ID NO: 485573
  Synthetic oligonucleotide

SEQ ID NO: 615448 - DNA, 60 bp, Artificial; identical to SEQ ID NO: 485574
  Synthetic oligonucleotide

SEQ ID NO: 615449 - DNA, 58 bp, Artificial; identical to SEQ ID NO: 485575
  Synthetic oligonucleotide

SEQ ID NO: 615450 - DNA, 51 bp, Artificial; identical to SEQ ID NO: 485581
  Synthetic oligonucleotide

SEQ ID NO: 615451 - DNA, 55 bp, Artificial; identical to SEQ ID NO: 485584
  Synthetic oligonucleotide

SEQ ID NO: 615452 - DNA, 50 bp, Artificial; identical to SEQ ID NO: 485588
  Synthetic oligonucleotide

SEQ ID NO: 615453 - DNA, 56 bp, Artificial; identical to SEQ ID NO: 485598
  Synthetic oligonucleotide

SEQ ID NO: 615454 - DNA, 57 bp, Artificial; identical to SEQ ID NO: 485600
  Synthetic oligonucleotide

SEQ ID NO: 615455 - DNA, 60 bp, Artificial; identical to SEQ ID NO: 485601
  Synthetic oligonucleotide

SEQ ID NO: 615456 - DNA, 57 bp, Artificial; identical to SEQ ID NO: 16121
  Synthetic oligonucleotide

SEQ ID NO: 615457 - DNA, 60 bp, Artificial; identical to SEQ ID NO: 485603
  Synthetic oligonucleotide

SEQ ID NO: 615458 - DNA, 55 bp, Artificial; identical to SEQ ID NO: 485604
  Synthetic oligonucleotide

SEQ ID NO: 615459 - DNA, 52 bp, Artificial; identical to SEQ ID NO: 485608
  Synthetic oligonucleotide

SEQ ID NO: 615460 - DNA, 56 bp, Artificial; identical to SEQ ID NO: 485609
  Synthetic oligonucleotide

SEQ ID NO: 615461 - DNA, 55 bp, Artificial; identical to SEQ ID NO: 485610
  Synthetic oligonucleotide

SEQ ID NO: 615462 - DNA, 54 bp, Artificial; identical to SEQ ID NO: 485611
  Synthetic oligonucleotide

SEQ ID NO: 615463 - DNA, 55 bp, Artificial; identical to SEQ ID NO: 485612
  Synthetic oligonucleotide

SEQ ID NO: 615464 - DNA, 60 bp, Artificial; identical to SEQ ID NO: 13424
  Synthetic oligonucleotide

SEQ ID NO: 615465 - DNA, 55 bp, Artificial; identical to SEQ ID NO: 485621
  Synthetic oligonucleotide

SEQ ID NO: 615466 - DNA, 54 bp, Artificial; identical to SEQ ID NO: 485623
  Synthetic oligonucleotide

SEQ ID NO: 615467 - DNA, 53 bp, Artificial; identical to SEQ ID NO: 485624
  Synthetic oligonucleotide

SEQ ID NO: 615468 - DNA, 60 bp, Artificial; identical to SEQ ID NO: 485626
  Synthetic oligonucleotide

SEQ ID NO: 615469 - DNA, 60 bp, Artificial; identical to SEQ ID NO: 485629
  Synthetic oligonucleotide

SEQ ID NO: 615470 - DNA, 57 bp, Artificial; identical to SEQ ID NO: 485638
  Synthetic oligonucleotide

SEQ ID NO: 615471 - DNA, 52 bp, Artificial; identical to SEQ ID NO: 485640
  Synthetic oligonucleotide

SEQ ID NO: 615472 - DNA, 60 bp, Artificial; identical to SEQ ID NO: 485644
  Synthetic oligonucleotide

SEQ ID NO: 615473 - DNA, 59 bp, Artificial; identical to SEQ ID NO: 485645
  Synthetic oligonucleotide

SEQ ID NO: 615474 - DNA, 55 bp, Artificial; identical to SEQ ID NO: 485650
  Synthetic oligonucleotide

SEQ ID NO: 615475 - DNA, 51 bp, Artificial; identical to SEQ ID NO: 485651
  Synthetic oligonucleotide

SEQ ID NO: 615476 - DNA, 60 bp, Artificial; identical to SEQ ID NO: 13197
  Synthetic oligonucleotide

SEQ ID NO: 615477 - DNA, 55 bp, Artificial; identical to SEQ ID NO: 485654
  Synthetic oligonucleotide

SEQ ID NO: 615478 - DNA, 60 bp, Artificial; identical to SEQ ID NO: 8267
  Synthetic oligonucleotide

SEQ ID NO: 615479 - DNA, 50 bp, Artificial; identical to SEQ ID NO: 485658
  Synthetic oligonucleotide

SEQ ID NO: 615480 - DNA, 60 bp, Artificial; identical to SEQ ID NO: 485659
  Synthetic oligonucleotide

SEQ ID NO: 615481 - DNA, 60 bp, Artificial; identical to SEQ ID NO: 485660
  Synthetic oligonucleotide

SEQ ID NO: 615482 - DNA, 59 bp, Artificial; identical to SEQ ID NO: 485661
  Synthetic oligonucleotide

SEQ ID NO: 615483 - DNA, 55 bp, Artificial; identical to SEQ ID NO: 485664
  Synthetic oligonucleotide

SEQ ID NO: 615484 - DNA, 51 bp, Artificial; identical to SEQ ID NO: 485665
  Synthetic oligonucleotide

SEQ ID NO: 615485 - DNA, 53 bp, Artificial; identical to SEQ ID NO: 485668
  Synthetic oligonucleotide

SEQ ID NO: 615486 - DNA, 52 bp, Artificial; identical to SEQ ID NO: 485670
  Synthetic oligonucleotide

SEQ ID NO: 615487 - DNA, 54 bp, Artificial; identical to SEQ ID NO: 485671
  Synthetic oligonucleotide

SEQ ID NO: 615488 - DNA, 60 bp, Artificial; identical to SEQ ID NO: 485674
  Synthetic oligonucleotide

SEQ ID NO: 615489 - DNA, 60 bp, Artificial; identical to SEQ ID NO: 485676
  Synthetic oligonucleotide

SEQ ID NO: 615490 - DNA, 51 bp, Artificial; identical to SEQ ID NO: 485684
  Synthetic oligonucleotide

SEQ ID NO: 615491 - DNA, 60 bp, Artificial; identical to SEQ ID NO: 485688
  Synthetic oligonucleotide

SEQ ID NO: 615492 - DNA, 57 bp, Artificial; identical to SEQ ID NO: 485689
  Synthetic oligonucleotide

SEQ ID NO: 615493 - DNA, 60 bp, Artificial; identical to SEQ ID NO: 485693
  Synthetic oligonucleotide

SEQ ID NO: 615494 - DNA, 55 bp, Artificial; identical to SEQ ID NO: 485697
  Synthetic oligonucleotide

SEQ ID NO: 615495 - DNA, 51 bp, Artificial; identical to SEQ ID NO: 485699
  Synthetic oligonucleotide

SEQ ID NO: 615496 - DNA, 53 bp, Artificial; identical to SEQ ID NO: 485700
  Synthetic oligonucleotide

SEQ ID NO: 615497 - DNA, 60 bp, Artificial; identical to SEQ ID NO: 485702
  Synthetic oligonucleotide

SEQ ID NO: 615498 - DNA, 55 bp, Artificial; identical to SEQ ID NO: 485704
  Synthetic oligonucleotide

SEQ ID NO: 615499 - DNA, 55 bp, Artificial; identical to SEQ ID NO: 485705
  Synthetic oligonucleotide

SEQ ID NO: 615500 - DNA, 55 bp, Artificial; identical to SEQ ID NO: 485709
  Synthetic oligonucleotide

SEQ ID NO: 615501 - DNA, 50 bp, Artificial; identical to SEQ ID NO: 485710
  Synthetic oligonucleotide

SEQ ID NO: 615502 - DNA, 59 bp, Artificial; identical to SEQ ID NO: 485712
  Synthetic oligonucleotide

SEQ ID NO: 615503 - DNA, 50 bp, Artificial; identical to SEQ ID NO: 485716
  Synthetic oligonucleotide

SEQ ID NO: 615504 - DNA, 57 bp, Artificial; identical to SEQ ID NO: 485717
  Synthetic oligonucleotide

SEQ ID NO: 615505 - DNA, 56 bp, Artificial; identical to SEQ ID NO: 485720
  Synthetic oligonucleotide

SEQ ID NO: 615506 - DNA, 52 bp, Artificial; identical to SEQ ID NO: 485721
  Synthetic oligonucleotide

SEQ ID NO: 615507 - DNA, 59 bp, Artificial; identical to SEQ ID NO: 485722
  Synthetic oligonucleotide

SEQ ID NO: 615508 - DNA, 58 bp, Artificial; identical to SEQ ID NO: 16133
  Synthetic oligonucleotide

SEQ ID NO: 615509 - DNA, 53 bp, Artificial; identical to SEQ ID NO: 485725
  Synthetic oligonucleotide

SEQ ID NO: 615510 - DNA, 54 bp, Artificial; identical to SEQ ID NO: 485728
  Synthetic oligonucleotide

SEQ ID NO: 615511 - DNA, 52 bp, Artificial; identical to SEQ ID NO: 485730
  Synthetic oligonucleotide

SEQ ID NO: 615512 - DNA, 55 bp, Artificial; identical to SEQ ID NO: 485734
  Synthetic oligonucleotide

SEQ ID NO: 615513 - DNA, 55 bp, Artificial; identical to SEQ ID NO: 485737
  Synthetic oligonucleotide

SEQ ID NO: 615514 - DNA, 52 bp, Artificial; identical to SEQ ID NO: 485738
  Synthetic oligonucleotide

SEQ ID NO: 615515 - DNA, 55 bp, Artificial; identical to SEQ ID NO: 485742
  Synthetic oligonucleotide

SEQ ID NO: 615516 - DNA, 55 bp, Artificial; identical to SEQ ID NO: 485745
  Synthetic oligonucleotide

SEQ ID NO: 615517 - DNA, 60 bp, Artificial; identical to SEQ ID NO: 485746
  Synthetic oligonucleotide

SEQ ID NO: 615518 - DNA, 60 bp, Artificial; identical to SEQ ID NO: 485747
  Synthetic oligonucleotide

SEQ ID NO: 615519 - DNA, 52 bp, Artificial; identical to SEQ ID NO: 485748
  Synthetic oligonucleotide

SEQ ID NO: 615520 - DNA, 54 bp, Artificial; identical to SEQ ID NO: 485752
  Synthetic oligonucleotide

SEQ ID NO: 615521 - DNA, 53 bp, Artificial; identical to SEQ ID NO: 485753
  Synthetic oligonucleotide

SEQ ID NO: 615522 - DNA, 50 bp, Artificial; identical to SEQ ID NO: 485754
  Synthetic oligonucleotide

SEQ ID NO: 615523 - DNA, 58 bp, Artificial; identical to SEQ ID NO: 485756
  Synthetic oligonucleotide

SEQ ID NO: 615524 - DNA, 51 bp, Artificial; identical to SEQ ID NO: 485757
  Synthetic oligonucleotide

SEQ ID NO: 615525 - DNA, 51 bp, Artificial; identical to SEQ ID NO: 485760
  Synthetic oligonucleotide

SEQ ID NO: 615526 - DNA, 50 bp, Artificial; identical to SEQ ID NO: 485762
  Synthetic oligonucleotide

SEQ ID NO: 615527 - DNA, 60 bp, Artificial; identical to SEQ ID NO: 485763
  Synthetic oligonucleotide

SEQ ID NO: 615528 - DNA, 55 bp, Artificial; identical to SEQ ID NO: 485771
  Synthetic oligonucleotide

SEQ ID NO: 615529 - DNA, 60 bp, Artificial; identical to SEQ ID NO: 485773
  Synthetic oligonucleotide

SEQ ID NO: 615530 - DNA, 51 bp, Artificial; identical to SEQ ID NO: 485781
  Synthetic oligonucleotide

SEQ ID NO: 615531 - DNA, 54 bp, Artificial; identical to SEQ ID NO: 485786
  Synthetic oligonucleotide

SEQ ID NO: 615532 - DNA, 51 bp, Artificial; identical to SEQ ID NO: 485792
  Synthetic oligonucleotide

SEQ ID NO: 615533 - DNA, 55 bp, Artificial; identical to SEQ ID NO: 485802
  Synthetic oligonucleotide

SEQ ID NO: 615534 - DNA, 50 bp, Artificial; identical to SEQ ID NO: 485804
  Synthetic oligonucleotide

SEQ ID NO: 615535 - DNA, 60 bp, Artificial; identical to SEQ ID NO: 485805
  Synthetic oligonucleotide

SEQ ID NO: 615536 - DNA, 56 bp, Artificial; identical to SEQ ID NO: 485806
  Synthetic oligonucleotide

SEQ ID NO: 615537 - DNA, 53 bp, Artificial; identical to SEQ ID NO: 485807
  Synthetic oligonucleotide

SEQ ID NO: 615538 - DNA, 55 bp, Artificial; identical to SEQ ID NO: 485808
  Synthetic oligonucleotide

SEQ ID NO: 615539 - DNA, 55 bp, Artificial; identical to SEQ ID NO: 485810
  Synthetic oligonucleotide

SEQ ID NO: 615540 - DNA, 50 bp, Artificial; identical to SEQ ID NO: 485813
  Synthetic oligonucleotide

SEQ ID NO: 615541 - DNA, 60 bp, Artificial; identical to SEQ ID NO: 485815
  Synthetic oligonucleotide

SEQ ID NO: 615542 - DNA, 56 bp, Artificial; identical to SEQ ID NO: 485816
  Synthetic oligonucleotide

SEQ ID NO: 615543 - DNA, 54 bp, Artificial; identical to SEQ ID NO: 485818
  Synthetic oligonucleotide

SEQ ID NO: 615544 - DNA, 60 bp, Artificial; identical to SEQ ID NO: 485819
  Synthetic oligonucleotide

SEQ ID NO: 615545 - DNA, 53 bp, Artificial; identical to SEQ ID NO: 485820
  Synthetic oligonucleotide

SEQ ID NO: 615546 - DNA, 60 bp, Artificial; identical to SEQ ID NO: 485821
  Synthetic oligonucleotide

SEQ ID NO: 615547 - DNA, 53 bp, Artificial; identical to SEQ ID NO: 485824
  Synthetic oligonucleotide

SEQ ID NO: 615548 - DNA, 59 bp, Artificial; identical to SEQ ID NO: 485826
  Synthetic oligonucleotide

SEQ ID NO: 615549 - DNA, 60 bp, Artificial; identical to SEQ ID NO: 485828
  Synthetic oligonucleotide

SEQ ID NO: 615550 - DNA, 53 bp, Artificial; identical to SEQ ID NO: 485829
  Synthetic oligonucleotide

SEQ ID NO: 615551 - DNA, 54 bp, Artificial; identical to SEQ ID NO: 485834
  Synthetic oligonucleotide

SEQ ID NO: 615552 - DNA, 60 bp, Artificial; identical to SEQ ID NO: 485837
  Synthetic oligonucleotide

SEQ ID NO: 615553 - DNA, 60 bp, Artificial; identical to SEQ ID NO: 485843
  Synthetic oligonucleotide

SEQ ID NO: 615554 - DNA, 58 bp, Artificial; identical to SEQ ID NO: 485846
  Synthetic oligonucleotide

SEQ ID NO: 615555 - DNA, 51 bp, Artificial; identical to SEQ ID NO: 485850
  Synthetic oligonucleotide

SEQ ID NO: 615556 - DNA, 50 bp, Artificial; identical to SEQ ID NO: 485852
  Synthetic oligonucleotide

SEQ ID NO: 615557 - DNA, 50 bp, Artificial; identical to SEQ ID NO: 485853
  Synthetic oligonucleotide

SEQ ID NO: 615558 - DNA, 54 bp, Artificial; identical to SEQ ID NO: 485856
  Synthetic oligonucleotide

SEQ ID NO: 615559 - DNA, 54 bp, Artificial; identical to SEQ ID NO: 485857
  Synthetic oligonucleotide

SEQ ID NO: 615560 - DNA, 55 bp, Artificial; identical to SEQ ID NO: 485860
  Synthetic oligonucleotide

SEQ ID NO: 615561 - DNA, 53 bp, Artificial; identical to SEQ ID NO: 485864
  Synthetic oligonucleotide

SEQ ID NO: 615562 - DNA, 59 bp, Artificial; identical to SEQ ID NO: 485866
  Synthetic oligonucleotide

SEQ ID NO: 615563 - DNA, 55 bp, Artificial; identical to SEQ ID NO: 485868
  Synthetic oligonucleotide

SEQ ID NO: 615564 - DNA, 57 bp, Artificial; identical to SEQ ID NO: 485871
  Synthetic oligonucleotide

SEQ ID NO: 615565 - DNA, 51 bp, Artificial; identical to SEQ ID NO: 485872
  Synthetic oligonucleotide

SEQ ID NO: 615566 - DNA, 60 bp, Artificial; identical to SEQ ID NO: 485875
  Synthetic oligonucleotide

SEQ ID NO: 615567 - DNA, 53 bp, Artificial; identical to SEQ ID NO: 485880
  Synthetic oligonucleotide

SEQ ID NO: 615568 - DNA, 53 bp, Artificial; identical to SEQ ID NO: 485881
  Synthetic oligonucleotide

SEQ ID NO: 615569 - DNA, 59 bp, Artificial; identical to SEQ ID NO: 485887
  Synthetic oligonucleotide

SEQ ID NO: 615570 - DNA, 58 bp, Artificial; identical to SEQ ID NO: 485888
  Synthetic oligonucleotide

SEQ ID NO: 615571 - DNA, 54 bp, Artificial; identical to SEQ ID NO: 485890
  Synthetic oligonucleotide

SEQ ID NO: 615572 - DNA, 55 bp, Artificial; identical to SEQ ID NO: 485891
  Synthetic oligonucleotide

SEQ ID NO: 615573 - DNA, 60 bp, Artificial; identical to SEQ ID NO: 485893
  Synthetic oligonucleotide

SEQ ID NO: 615574 - DNA, 59 bp, Artificial; identical to SEQ ID NO: 485895
  Synthetic oligonucleotide

SEQ ID NO: 615575 - DNA, 57 bp, Artificial; identical to SEQ ID NO: 19412
  Synthetic oligonucleotide

SEQ ID NO: 615576 - DNA, 55 bp, Artificial; identical to SEQ ID NO: 485897
  Synthetic oligonucleotide

SEQ ID NO: 615577 - DNA, 53 bp, Artificial; identical to SEQ ID NO: 485898
  Synthetic oligonucleotide

SEQ ID NO: 615578 - DNA, 51 bp, Artificial; identical to SEQ ID NO: 485901
  Synthetic oligonucleotide

SEQ ID NO: 615579 - DNA, 60 bp, Artificial; identical to SEQ ID NO: 485902
  Synthetic oligonucleotide

SEQ ID NO: 615580 - DNA, 53 bp, Artificial; identical to SEQ ID NO: 485904
  Synthetic oligonucleotide

SEQ ID NO: 615581 - DNA, 58 bp, Artificial; identical to SEQ ID NO: 485905
  Synthetic oligonucleotide

SEQ ID NO: 615582 - DNA, 52 bp, Artificial; identical to SEQ ID NO: 14220
  Synthetic oligonucleotide

SEQ ID NO: 615583 - DNA, 52 bp, Artificial; identical to SEQ ID NO: 485909
  Synthetic oligonucleotide

SEQ ID NO: 615584 - DNA, 55 bp, Artificial; identical to SEQ ID NO: 485911
  Synthetic oligonucleotide

SEQ ID NO: 615585 - DNA, 50 bp, Artificial; identical to SEQ ID NO: 485913
  Synthetic oligonucleotide

SEQ ID NO: 615586 - DNA, 54 bp, Artificial; identical to SEQ ID NO: 485915
  Synthetic oligonucleotide

SEQ ID NO: 615587 - DNA, 59 bp, Artificial; identical to SEQ ID NO: 485920
  Synthetic oligonucleotide

SEQ ID NO: 615588 - DNA, 55 bp, Artificial; identical to SEQ ID NO: 485922
  Synthetic oligonucleotide

SEQ ID NO: 615589 - DNA, 60 bp, Artificial; identical to SEQ ID NO: 485926
  Synthetic oligonucleotide

SEQ ID NO: 615590 - DNA, 56 bp, Artificial; identical to SEQ ID NO: 18241
  Synthetic oligonucleotide

SEQ ID NO: 615591 - DNA, 55 bp, Artificial; identical to SEQ ID NO: 485927
  Synthetic oligonucleotide

SEQ ID NO: 615592 - DNA, 56 bp, Artificial; identical to SEQ ID NO: 485931
  Synthetic oligonucleotide

SEQ ID NO: 615593 - DNA, 56 bp, Artificial; identical to SEQ ID NO: 485934
  Synthetic oligonucleotide

SEQ ID NO: 615594 - DNA, 53 bp, Artificial; identical to SEQ ID NO: 485937
  Synthetic oligonucleotide

SEQ ID NO: 615595 - DNA, 53 bp, Artificial; identical to SEQ ID NO: 485941
  Synthetic oligonucleotide

SEQ ID NO: 615596 - DNA, 59 bp, Artificial; identical to SEQ ID NO: 19234
  Synthetic oligonucleotide

SEQ ID NO: 615597 - DNA, 55 bp, Artificial; identical to SEQ ID NO: 485948
  Synthetic oligonucleotide

SEQ ID NO: 615598 - DNA, 60 bp, Artificial; identical to SEQ ID NO: 485949
  Synthetic oligonucleotide

SEQ ID NO: 615599 - DNA, 60 bp, Artificial; identical to SEQ ID NO: 485952
  Synthetic oligonucleotide

SEQ ID NO: 615600 - DNA, 60 bp, Artificial; identical to SEQ ID NO: 485954
  Synthetic oligonucleotide

SEQ ID NO: 615601 - DNA, 60 bp, Artificial; identical to SEQ ID NO: 485958
  Synthetic oligonucleotide

SEQ ID NO: 615602 - DNA, 53 bp, Artificial; identical to SEQ ID NO: 485959
  Synthetic oligonucleotide

SEQ ID NO: 615603 - DNA, 52 bp, Artificial; identical to SEQ ID NO: 485963
  Synthetic oligonucleotide

SEQ ID NO: 615604 - DNA, 55 bp, Artificial; identical to SEQ ID NO: 485965
  Synthetic oligonucleotide

SEQ ID NO: 615605 - DNA, 53 bp, Artificial; identical to SEQ ID NO: 485966
  Synthetic oligonucleotide

SEQ ID NO: 615606 - DNA, 60 bp, Artificial; identical to SEQ ID NO: 169
  Synthetic oligonucleotide

SEQ ID NO: 615607 - DNA, 54 bp, Artificial; identical to SEQ ID NO: 485970
  Synthetic oligonucleotide

SEQ ID NO: 615608 - DNA, 55 bp, Artificial; identical to SEQ ID NO: 485981
  Synthetic oligonucleotide

SEQ ID NO: 615609 - DNA, 54 bp, Artificial; identical to SEQ ID NO: 485983
  Synthetic oligonucleotide

SEQ ID NO: 615610 - DNA, 54 bp, Artificial; identical to SEQ ID NO: 485986
  Synthetic oligonucleotide

SEQ ID NO: 615611 - DNA, 52 bp, Artificial; identical to SEQ ID NO: 485987
  Synthetic oligonucleotide

SEQ ID NO: 615612 - DNA, 60 bp, Artificial; identical to SEQ ID NO: 485992
  Synthetic oligonucleotide

SEQ ID NO: 615613 - DNA, 55 bp, Artificial; identical to SEQ ID NO: 485997
  Synthetic oligonucleotide

SEQ ID NO: 615614 - DNA, 54 bp, Artificial; identical to SEQ ID NO: 485998
  Synthetic oligonucleotide

SEQ ID NO: 615615 - DNA, 59 bp, Artificial; identical to SEQ ID NO: 486010
  Synthetic oligonucleotide

SEQ ID NO: 615616 - DNA, 55 bp, Artificial; identical to SEQ ID NO: 486011
  Synthetic oligonucleotide

SEQ ID NO: 615617 - DNA, 55 bp, Artificial; identical to SEQ ID NO: 486012
  Synthetic oligonucleotide

SEQ ID NO: 615618 - DNA, 51 bp, Artificial; identical to SEQ ID NO: 486014
  Synthetic oligonucleotide

SEQ ID NO: 615619 - DNA, 55 bp, Artificial; identical to SEQ ID NO: 486016
  Synthetic oligonucleotide

SEQ ID NO: 615620 - DNA, 56 bp, Artificial; identical to SEQ ID NO: 486017
  Synthetic oligonucleotide

SEQ ID NO: 615621 - DNA, 59 bp, Artificial; identical to SEQ ID NO: 486020
  Synthetic oligonucleotide

SEQ ID NO: 615622 - DNA, 54 bp, Artificial; identical to SEQ ID NO: 486024
  Synthetic oligonucleotide

SEQ ID NO: 615623 - DNA, 60 bp, Artificial; identical to SEQ ID NO: 486025
  Synthetic oligonucleotide

SEQ ID NO: 615624 - DNA, 51 bp, Artificial; identical to SEQ ID NO: 486026
  Synthetic oligonucleotide

SEQ ID NO: 615625 - DNA, 50 bp, Artificial; identical to SEQ ID NO: 486031
  Synthetic oligonucleotide

SEQ ID NO: 615626 - DNA, 51 bp, Artificial; identical to SEQ ID NO: 486032
  Synthetic oligonucleotide

SEQ ID NO: 615627 - DNA, 50 bp, Artificial; identical to SEQ ID NO: 486034
  Synthetic oligonucleotide

SEQ ID NO: 615628 - DNA, 60 bp, Artificial; identical to SEQ ID NO: 486037
  Synthetic oligonucleotide

SEQ ID NO: 615629 - DNA, 54 bp, Artificial; identical to SEQ ID NO: 486038
  Synthetic oligonucleotide

SEQ ID NO: 615630 - DNA, 53 bp, Artificial; identical to SEQ ID NO: 486039
  Synthetic oligonucleotide

SEQ ID NO: 615631 - DNA, 60 bp, Artificial; identical to SEQ ID NO: 486040
  Synthetic oligonucleotide

SEQ ID NO: 615632 - DNA, 52 bp, Artificial; identical to SEQ ID NO: 486041
  Synthetic oligonucleotide

SEQ ID NO: 615633 - DNA, 58 bp, Artificial; identical to SEQ ID NO: 486043
  Synthetic oligonucleotide

SEQ ID NO: 615634 - DNA, 56 bp, Artificial; identical to SEQ ID NO: 486048
  Synthetic oligonucleotide

SEQ ID NO: 615635 - DNA, 56 bp, Artificial; identical to SEQ ID NO: 19550
  Synthetic oligonucleotide

SEQ ID NO: 615636 - DNA, 57 bp, Artificial; identical to SEQ ID NO: 486051
  Synthetic oligonucleotide

SEQ ID NO: 615637 - DNA, 60 bp, Artificial; identical to SEQ ID NO: 486055
  Synthetic oligonucleotide

SEQ ID NO: 615638 - DNA, 58 bp, Artificial; identical to SEQ ID NO: 486056
  Synthetic oligonucleotide

SEQ ID NO: 615639 - DNA, 55 bp, Artificial; identical to SEQ ID NO: 486060
  Synthetic oligonucleotide

SEQ ID NO: 615640 - DNA, 59 bp, Artificial; identical to SEQ ID NO: 486061
  Synthetic oligonucleotide

SEQ ID NO: 615641 - DNA, 57 bp, Artificial; identical to SEQ ID NO: 486064
  Synthetic oligonucleotide

SEQ ID NO: 615642 - DNA, 60 bp, Artificial; identical to SEQ ID NO: 486065
  Synthetic oligonucleotide

SEQ ID NO: 615643 - DNA, 52 bp, Artificial; identical to SEQ ID NO: 486066
  Synthetic oligonucleotide

SEQ ID NO: 615644 - DNA, 60 bp, Artificial; identical to SEQ ID NO: 486069
  Synthetic oligonucleotide

SEQ ID NO: 615645 - DNA, 57 bp, Artificial; identical to SEQ ID NO: 486070
  Synthetic oligonucleotide

SEQ ID NO: 615646 - DNA, 54 bp, Artificial; identical to SEQ ID NO: 486071
  Synthetic oligonucleotide

SEQ ID NO: 615647 - DNA, 60 bp, Artificial; identical to SEQ ID NO: 486077
  Synthetic oligonucleotide

SEQ ID NO: 615648 - DNA, 55 bp, Artificial; identical to SEQ ID NO: 486078
  Synthetic oligonucleotide

SEQ ID NO: 615649 - DNA, 59 bp, Artificial; identical to SEQ ID NO: 486081
  Synthetic oligonucleotide

SEQ ID NO: 615650 - DNA, 60 bp, Artificial; identical to SEQ ID NO: 486085
  Synthetic oligonucleotide

SEQ ID NO: 615651 - DNA, 57 bp, Artificial; identical to SEQ ID NO: 486086
  Synthetic oligonucleotide

SEQ ID NO: 615652 - DNA, 60 bp, Artificial; identical to SEQ ID NO: 486087
  Synthetic oligonucleotide

SEQ ID NO: 615653 - DNA, 60 bp, Artificial; identical to SEQ ID NO: 486089
  Synthetic oligonucleotide

SEQ ID NO: 615654 - DNA, 57 bp, Artificial; identical to SEQ ID NO: 486090
  Synthetic oligonucleotide

SEQ ID NO: 615655 - DNA, 56 bp, Artificial; identical to SEQ ID NO: 486091
  Synthetic oligonucleotide

SEQ ID NO: 615656 - DNA, 54 bp, Artificial; identical to SEQ ID NO: 486095
  Synthetic oligonucleotide

SEQ ID NO: 615657 - DNA, 58 bp, Artificial; identical to SEQ ID NO: 486096
  Synthetic oligonucleotide

SEQ ID NO: 615658 - DNA, 59 bp, Artificial; identical to SEQ ID NO: 486097
  Synthetic oligonucleotide

SEQ ID NO: 615659 - DNA, 57 bp, Artificial; identical to SEQ ID NO: 486099
  Synthetic oligonucleotide

SEQ ID NO: 615660 - DNA, 54 bp, Artificial; identical to SEQ ID NO: 486102
  Synthetic oligonucleotide

SEQ ID NO: 615661 - DNA, 59 bp, Artificial; identical to SEQ ID NO: 486104
  Synthetic oligonucleotide

SEQ ID NO: 615662 - DNA, 53 bp, Artificial; identical to SEQ ID NO: 486111
  Synthetic oligonucleotide

SEQ ID NO: 615663 - DNA, 60 bp, Artificial; identical to SEQ ID NO: 486112
  Synthetic oligonucleotide

SEQ ID NO: 615664 - DNA, 48 bp, Artificial; identical to SEQ ID NO: 486114
  Synthetic oligonucleotide

SEQ ID NO: 615665 - DNA, 49 bp, Artificial; identical to SEQ ID NO: 246256
  Synthetic oligonucleotide

SEQ ID NO: 615666 - DNA, 52 bp, Artificial; identical to SEQ ID NO: 178289
  Synthetic oligonucleotide

SEQ ID NO: 615667 - DNA, 52 bp, Artificial; identical to SEQ ID NO: 142718
  Synthetic oligonucleotide

SEQ ID NO: 615668 - DNA, 50 bp, Artificial; identical to SEQ ID NO: 206637
  Synthetic oligonucleotide

SEQ ID NO: 615669 - DNA, 55 bp, Artificial; identical to SEQ ID NO: 209118
  Synthetic oligonucleotide

SEQ ID NO: 615670 - DNA, 50 bp, Artificial; identical to SEQ ID NO: 254910
  Synthetic oligonucleotide

SEQ ID NO: 615671 - DNA, 54 bp, Artificial; identical to SEQ ID NO: 243102
  Synthetic oligonucleotide

SEQ ID NO: 615672 - DNA, 52 bp, Artificial; identical to SEQ ID NO: 206899
  Synthetic oligonucleotide

SEQ ID NO: 615673 - DNA, 52 bp, Artificial; identical to SEQ ID NO: 243103
  Synthetic oligonucleotide

SEQ ID NO: 615674 - DNA, 54 bp, Artificial; identical to SEQ ID NO: 151175
  Synthetic oligonucleotide

SEQ ID NO: 615675 - DNA, 52 bp, Artificial; identical to SEQ ID NO: 151174
  Synthetic oligonucleotide

SEQ ID NO: 615676 - DNA, 58 bp, Artificial; identical to SEQ ID NO: 178292
  Synthetic oligonucleotide

SEQ ID NO: 615677 - DNA, 54 bp, Artificial; identical to SEQ ID NO: 151173
  Synthetic oligonucleotide

SEQ ID NO: 615678 - DNA, 52 bp, Artificial; identical to SEQ ID NO: 151168
  Synthetic oligonucleotide

SEQ ID NO: 615679 - DNA, 54 bp, Artificial; identical to SEQ ID NO: 187987
  Synthetic oligonucleotide

SEQ ID NO: 615680 - DNA, 58 bp, Artificial; identical to SEQ ID NO: 247333
  Synthetic oligonucleotide

SEQ ID NO: 615681 - DNA, 54 bp, Artificial; identical to SEQ ID NO: 201055
  Synthetic oligonucleotide

SEQ ID NO: 615682 - DNA, 52 bp, Artificial; identical to SEQ ID NO: 151166
  Synthetic oligonucleotide

SEQ ID NO: 615683 - DNA, 57 bp, Artificial; identical to SEQ ID NO: 147157
  Synthetic oligonucleotide

SEQ ID NO: 615684 - DNA, 59 bp, Artificial; identical to SEQ ID NO: 167725
  Synthetic oligonucleotide

SEQ ID NO: 615685 - DNA, 54 bp, Artificial; identical to SEQ ID NO: 201048
  Synthetic oligonucleotide

SEQ ID NO: 615686 - DNA, 51 bp, Artificial; identical to SEQ ID NO: 247329
  Synthetic oligonucleotide

SEQ ID NO: 615687 - DNA, 53 bp, Artificial; identical to SEQ ID NO: 243155
  Synthetic oligonucleotide

SEQ ID NO: 615688 - DNA, 58 bp, Artificial; identical to SEQ ID NO: 151161
  Synthetic oligonucleotide

SEQ ID NO: 615689 - DNA, 60 bp, Artificial; identical to SEQ ID NO: 237881
  Synthetic oligonucleotide

SEQ ID NO: 615690 - DNA, 57 bp, Artificial; identical to SEQ ID NO: 151159
  Synthetic oligonucleotide

SEQ ID NO: 615691 - DNA, 57 bp, Artificial; identical to SEQ ID NO: 141878
  Synthetic oligonucleotide

SEQ ID NO: 615692 - DNA, 54 bp, Artificial; identical to SEQ ID NO: 201047
  Synthetic oligonucleotide

SEQ ID NO: 615693 - DNA, 52 bp, Artificial; identical to SEQ ID NO: 243112
  Synthetic oligonucleotide

SEQ ID NO: 615694 - DNA, 53 bp, Artificial; identical to SEQ ID NO: 217221
  Synthetic oligonucleotide

SEQ ID NO: 615695 - DNA, 50 bp, Artificial; identical to SEQ ID NO: 176124
  Synthetic oligonucleotide

SEQ ID NO: 615696 - DNA, 53 bp, Artificial; identical to SEQ ID NO: 170091
  Synthetic oligonucleotide

SEQ ID NO: 615697 - DNA, 54 bp, Artificial; identical to SEQ ID NO: 246044
  Synthetic oligonucleotide

SEQ ID NO: 615698 - DNA, 50 bp, Artificial; identical to SEQ ID NO: 204043
  Synthetic oligonucleotide

SEQ ID NO: 615699 - DNA, 57 bp, Artificial; identical to SEQ ID NO: 147001
  Synthetic oligonucleotide

SEQ ID NO: 615700 - DNA, 51 bp, Artificial; identical to SEQ ID NO: 243897
  Synthetic oligonucleotide

SEQ ID NO: 615701 - DNA, 55 bp, Artificial; identical to SEQ ID NO: 171287
  Synthetic oligonucleotide

SEQ ID NO: 615702 - DNA, 55 bp, Artificial; identical to SEQ ID NO: 161930
  Synthetic oligonucleotide

SEQ ID NO: 615703 - DNA, 60 bp, Artificial; identical to SEQ ID NO: 266072
  Synthetic oligonucleotide

SEQ ID NO: 615704 - DNA, 57 bp, Artificial; identical to SEQ ID NO: 201043
  Synthetic oligonucleotide

SEQ ID NO: 615705 - DNA, 52 bp, Artificial; identical to SEQ ID NO: 237072
  Synthetic oligonucleotide

SEQ ID NO: 615706 - DNA, 56 bp, Artificial; identical to SEQ ID NO: 178302
  Synthetic oligonucleotide

SEQ ID NO: 615707 - DNA, 53 bp, Artificial; identical to SEQ ID NO: 199806
  Synthetic oligonucleotide

SEQ ID NO: 615708 - DNA, 54 bp, Artificial; identical to SEQ ID NO: 141880
  Synthetic oligonucleotide

SEQ ID NO: 615709 - DNA, 52 bp, Artificial; identical to SEQ ID NO: 155200
  Synthetic oligonucleotide

SEQ ID NO: 615710 - DNA, 51 bp, Artificial; identical to SEQ ID NO: 141321
  Synthetic oligonucleotide

SEQ ID NO: 615711 - DNA, 55 bp, Artificial; identical to SEQ ID NO: 262807
  Synthetic oligonucleotide

SEQ ID NO: 615712 - DNA, 58 bp, Artificial; identical to SEQ ID NO: 171037
  Synthetic oligonucleotide

SEQ ID NO: 615713 - DNA, 51 bp, Artificial; identical to SEQ ID NO: 201034
  Synthetic oligonucleotide

SEQ ID NO: 615714 - DNA, 52 bp, Artificial; identical to SEQ ID NO: 162330
  Synthetic oligonucleotide

SEQ ID NO: 615715 - DNA, 53 bp, Artificial; identical to SEQ ID NO: 203924
  Synthetic oligonucleotide

SEQ ID NO: 615716 - DNA, 54 bp, Artificial; identical to SEQ ID NO: 266259
  Synthetic oligonucleotide

SEQ ID NO: 615717 - DNA, 50 bp, Artificial; identical to SEQ ID NO: 174671
  Synthetic oligonucleotide

SEQ ID NO: 615718 - DNA, 55 bp, Artificial; identical to SEQ ID NO: 181835
  Synthetic oligonucleotide

SEQ ID NO: 615719 - DNA, 55 bp, Artificial; identical to SEQ ID NO: 220648
  Synthetic oligonucleotide

SEQ ID NO: 615720 - DNA, 54 bp, Artificial; identical to SEQ ID NO: 178310
  Synthetic oligonucleotide

SEQ ID NO: 615721 - DNA, 56 bp, Artificial; identical to SEQ ID NO: 237901
  Synthetic oligonucleotide

SEQ ID NO: 615722 - DNA, 54 bp, Artificial; identical to SEQ ID NO: 216603
  Synthetic oligonucleotide

SEQ ID NO: 615723 - DNA, 53 bp, Artificial; identical to SEQ ID NO: 157457
  Synthetic oligonucleotide

SEQ ID NO: 615724 - DNA, 52 bp, Artificial; identical to SEQ ID NO: 243278
  Synthetic oligonucleotide

SEQ ID NO: 615725 - DNA, 60 bp, Artificial; identical to SEQ ID NO: 147000
  Synthetic oligonucleotide

SEQ ID NO: 615726 - DNA, 59 bp, Artificial; identical to SEQ ID NO: 247345
  Synthetic oligonucleotide

SEQ ID NO: 615727 - DNA, 53 bp, Artificial; identical to SEQ ID NO: 259008
  Synthetic oligonucleotide

SEQ ID NO: 615728 - DNA, 52 bp, Artificial; identical to SEQ ID NO: 185995
  Synthetic oligonucleotide

SEQ ID NO: 615729 - DNA, 54 bp, Artificial; identical to SEQ ID NO: 243083
  Synthetic oligonucleotide

SEQ ID NO: 615730 - DNA, 57 bp, Artificial; identical to SEQ ID NO: 244016
  Synthetic oligonucleotide

SEQ ID NO: 615731 - DNA, 53 bp, Artificial; identical to SEQ ID NO: 212973
  Synthetic oligonucleotide

SEQ ID NO: 615732 - DNA, 54 bp, Artificial; identical to SEQ ID NO: 202450
  Synthetic oligonucleotide

SEQ ID NO: 615733 - DNA, 58 bp, Artificial; identical to SEQ ID NO: 217222
  Synthetic oligonucleotide

SEQ ID NO: 615734 - DNA, 54 bp, Artificial; identical to SEQ ID NO: 202945
  Synthetic oligonucleotide

SEQ ID NO: 615735 - DNA, 52 bp, Artificial; identical to SEQ ID NO: 202525
  Synthetic oligonucleotide

SEQ ID NO: 615736 - DNA, 53 bp, Artificial; identical to SEQ ID NO: 174851
  Synthetic oligonucleotide

SEQ ID NO: 615737 - DNA, 51 bp, Artificial; identical to SEQ ID NO: 152341
  Synthetic oligonucleotide

SEQ ID NO: 615738 - DNA, 53 bp, Artificial; identical to SEQ ID NO: 225185
  Synthetic oligonucleotide

SEQ ID NO: 615739 - DNA, 51 bp, Artificial; identical to SEQ ID NO: 164784
  Synthetic oligonucleotide

SEQ ID NO: 615740 - DNA, 55 bp, Artificial; identical to SEQ ID NO: 174360
  Synthetic oligonucleotide

SEQ ID NO: 615741 - DNA, 52 bp, Artificial; identical to SEQ ID NO: 149625
  Synthetic oligonucleotide

SEQ ID NO: 615742 - DNA, 55 bp, Artificial; identical to SEQ ID NO: 181845
  Synthetic oligonucleotide

SEQ ID NO: 615743 - DNA, 51 bp, Artificial; identical to SEQ ID NO: 157697
  Synthetic oligonucleotide

SEQ ID NO: 615744 - DNA, 52 bp, Artificial; identical to SEQ ID NO: 149636
  Synthetic oligonucleotide

SEQ ID NO: 615745 - DNA, 51 bp, Artificial; identical to SEQ ID NO: 147240
  Synthetic oligonucleotide

SEQ ID NO: 615746 - DNA, 58 bp, Artificial; identical to SEQ ID NO: 178266
  Synthetic oligonucleotide

SEQ ID NO: 615747 - DNA, 53 bp, Artificial; identical to SEQ ID NO: 190790
  Synthetic oligonucleotide

SEQ ID NO: 615748 - DNA, 54 bp, Artificial; identical to SEQ ID NO: 187998
  Synthetic oligonucleotide

SEQ ID NO: 615749 - DNA, 50 bp, Artificial; identical to SEQ ID NO: 196559
  Synthetic oligonucleotide

SEQ ID NO: 615750 - DNA, 51 bp, Artificial; identical to SEQ ID NO: 193793
  Synthetic oligonucleotide

SEQ ID NO: 615751 - DNA, 54 bp, Artificial; identical to SEQ ID NO: 256371
  Synthetic oligonucleotide

SEQ ID NO: 615752 - DNA, 53 bp, Artificial; identical to SEQ ID NO: 266750
  Synthetic oligonucleotide

SEQ ID NO: 615753 - DNA, 50 bp, Artificial; identical to SEQ ID NO: 207731
  Synthetic oligonucleotide

SEQ ID NO: 615754 - DNA, 55 bp, Artificial; identical to SEQ ID NO: 181803
  Synthetic oligonucleotide

SEQ ID NO: 615755 - DNA, 53 bp, Artificial; identical to SEQ ID NO: 170090
  Synthetic oligonucleotide

SEQ ID NO: 615756 - DNA, 52 bp, Artificial; identical to SEQ ID NO: 217224
  Synthetic oligonucleotide

SEQ ID NO: 615757 - DNA, 54 bp, Artificial; identical to SEQ ID NO: 149281
  Synthetic oligonucleotide

SEQ ID NO: 615758 - DNA, 53 bp, Artificial; identical to SEQ ID NO: 224199
  Synthetic oligonucleotide

SEQ ID NO: 615759 - DNA, 55 bp, Artificial; identical to SEQ ID NO: 198432
  Synthetic oligonucleotide

SEQ ID NO: 615760 - DNA, 59 bp, Artificial; identical to SEQ ID NO: 243904
  Synthetic oligonucleotide

SEQ ID NO: 615761 - DNA, 50 bp, Artificial; identical to SEQ ID NO: 216857
  Synthetic oligonucleotide

SEQ ID NO: 615762 - DNA, 54 bp, Artificial; identical to SEQ ID NO: 184996
  Synthetic oligonucleotide

SEQ ID NO: 615763 - DNA, 51 bp, Artificial; identical to SEQ ID NO: 255229
  Synthetic oligonucleotide

SEQ ID NO: 615764 - DNA, 52 bp, Artificial; identical to SEQ ID NO: 188137
  Synthetic oligonucleotide

SEQ ID NO: 615765 - DNA, 55 bp, Artificial; identical to SEQ ID NO: 164435
  Synthetic oligonucleotide

SEQ ID NO: 615766 - DNA, 52 bp, Artificial; identical to SEQ ID NO: 206439
  Synthetic oligonucleotide

SEQ ID NO: 615767 - DNA, 58 bp, Artificial; identical to SEQ ID NO: 238781
  Synthetic oligonucleotide

SEQ ID NO: 615768 - DNA, 52 bp, Artificial; identical to SEQ ID NO: 246516
  Synthetic oligonucleotide

SEQ ID NO: 615769 - DNA, 55 bp, Artificial; identical to SEQ ID NO: 217561
  Synthetic oligonucleotide

SEQ ID NO: 615770 - DNA, 54 bp, Artificial; identical to SEQ ID NO: 185007
  Synthetic oligonucleotide

SEQ ID NO: 615771 - DNA, 52 bp, Artificial; identical to SEQ ID NO: 185964
  Synthetic oligonucleotide

SEQ ID NO: 615772 - DNA, 52 bp, Artificial; identical to SEQ ID NO: 190832
  Synthetic oligonucleotide

SEQ ID NO: 615773 - DNA, 52 bp, Artificial; identical to SEQ ID NO: 165114
  Synthetic oligonucleotide

SEQ ID NO: 615774 - DNA, 52 bp, Artificial; identical to SEQ ID NO: 192116
  Synthetic oligonucleotide

SEQ ID NO: 615775 - DNA, 54 bp, Artificial; identical to SEQ ID NO: 197454
  Synthetic oligonucleotide

SEQ ID NO: 615776 - DNA, 55 bp, Artificial; identical to SEQ ID NO: 155416
  Synthetic oligonucleotide

SEQ ID NO: 615777 - DNA, 56 bp, Artificial; identical to SEQ ID NO: 194173
  Synthetic oligonucleotide

SEQ ID NO: 615778 - DNA, 51 bp, Artificial; identical to SEQ ID NO: 239374
  Synthetic oligonucleotide

SEQ ID NO: 615779 - DNA, 53 bp, Artificial; identical to SEQ ID NO: 238780
  Synthetic oligonucleotide

SEQ ID NO: 615780 - DNA, 56 bp, Artificial; identical to SEQ ID NO: 224384
  Synthetic oligonucleotide

SEQ ID NO: 615781 - DNA, 53 bp, Artificial; identical to SEQ ID NO: 240746
  Synthetic oligonucleotide

SEQ ID NO: 615782 - DNA, 52 bp, Artificial; identical to SEQ ID NO: 170156
  Synthetic oligonucleotide

SEQ ID NO: 615783 - DNA, 54 bp, Artificial; identical to SEQ ID NO: 220749
  Synthetic oligonucleotide

SEQ ID NO: 615784 - DNA, 52 bp, Artificial; identical to SEQ ID NO: 157542
  Synthetic oligonucleotide

SEQ ID NO: 615785 - DNA, 50 bp, Artificial; identical to SEQ ID NO: 191243
  Synthetic oligonucleotide

SEQ ID NO: 615786 - DNA, 54 bp, Artificial; identical to SEQ ID NO: 148908
  Synthetic oligonucleotide

SEQ ID NO: 615787 - DNA, 56 bp, Artificial; identical to SEQ ID NO: 247278
  Synthetic oligonucleotide

SEQ ID NO: 615788 - DNA, 55 bp, Artificial; identical to SEQ ID NO: 148920
  Synthetic oligonucleotide

SEQ ID NO: 615789 - DNA, 52 bp, Artificial; identical to SEQ ID NO: 187310
  Synthetic oligonucleotide

SEQ ID NO: 615790 - DNA, 55 bp, Artificial; identical to SEQ ID NO: 178279
  Synthetic oligonucleotide

SEQ ID NO: 615791 - DNA, 55 bp, Artificial; identical to SEQ ID NO: 258924
  Synthetic oligonucleotide

SEQ ID NO: 615792 - DNA, 56 bp, Artificial; identical to SEQ ID NO: 151109
  Synthetic oligonucleotide

SEQ ID NO: 615793 - DNA, 56 bp, Artificial; identical to SEQ ID NO: 238777
  Synthetic oligonucleotide

SEQ ID NO: 615794 - DNA, 59 bp, Artificial; identical to SEQ ID NO: 170939
  Synthetic oligonucleotide

SEQ ID NO: 615795 - DNA, 55 bp, Artificial; identical to SEQ ID NO: 194901
  Synthetic oligonucleotide

SEQ ID NO: 615796 - DNA, 53 bp, Artificial; identical to SEQ ID NO: 153611
  Synthetic oligonucleotide

SEQ ID NO: 615797 - DNA, 50 bp, Artificial; identical to SEQ ID NO: 142654
  Synthetic oligonucleotide

SEQ ID NO: 615798 - DNA, 57 bp, Artificial; identical to SEQ ID NO: 201041
  Synthetic oligonucleotide

SEQ ID NO: 615799 - DNA, 51 bp, Artificial; identical to SEQ ID NO: 223682
  Synthetic oligonucleotide

SEQ ID NO: 615800 - DNA, 50 bp, Artificial; identical to SEQ ID NO: 193883
  Synthetic oligonucleotide

SEQ ID NO: 615801 - DNA, 51 bp, Artificial; identical to SEQ ID NO: 243292
  Synthetic oligonucleotide

SEQ ID NO: 615802 - DNA, 53 bp, Artificial; identical to SEQ ID NO: 209573
  Synthetic oligonucleotide

SEQ ID NO: 615803 - DNA, 55 bp, Artificial; identical to SEQ ID NO: 187752
  Synthetic oligonucleotide

SEQ ID NO: 615804 - DNA, 54 bp, Artificial; identical to SEQ ID NO: 184984
  Synthetic oligonucleotide

SEQ ID NO: 615805 - DNA, 58 bp, Artificial; identical to SEQ ID NO: 266070
  Synthetic oligonucleotide

SEQ ID NO: 615806 - DNA, 50 bp, Artificial; identical to SEQ ID NO: 187117
  Synthetic oligonucleotide

SEQ ID NO: 615807 - DNA, 55 bp, Artificial; identical to SEQ ID NO: 168784
  Synthetic oligonucleotide

SEQ ID NO: 615808 - DNA, 51 bp, Artificial; identical to SEQ ID NO: 186608
  Synthetic oligonucleotide

SEQ ID NO: 615809 - DNA, 52 bp, Artificial; identical to SEQ ID NO: 199860
  Synthetic oligonucleotide

SEQ ID NO: 615810 - DNA, 53 bp, Artificial; identical to SEQ ID NO: 185728
  Synthetic oligonucleotide

SEQ ID NO: 615811 - DNA, 52 bp, Artificial; identical to SEQ ID NO: 243094
  Synthetic oligonucleotide

SEQ ID NO: 615812 - DNA, 53 bp, Artificial; identical to SEQ ID NO: 149329
  Synthetic oligonucleotide

SEQ ID NO: 615813 - DNA, 51 bp, Artificial; identical to SEQ ID NO: 170208
  Synthetic oligonucleotide

SEQ ID NO: 615814 - DNA, 60 bp, Artificial; identical to SEQ ID NO: 247263
  Synthetic oligonucleotide

SEQ ID NO: 615815 - DNA, 54 bp, Artificial; identical to SEQ ID NO: 233781
  Synthetic oligonucleotide

SEQ ID NO: 615816 - DNA, 56 bp, Artificial; identical to SEQ ID NO: 180034
  Synthetic oligonucleotide

SEQ ID NO: 615817 - DNA, 58 bp, Artificial; identical to SEQ ID NO: 238774
  Synthetic oligonucleotide

SEQ ID NO: 615818 - DNA, 53 bp, Artificial; identical to SEQ ID NO: 144535
  Synthetic oligonucleotide

SEQ ID NO: 615819 - DNA, 54 bp, Artificial; identical to SEQ ID NO: 164796
  Synthetic oligonucleotide

SEQ ID NO: 615820 - DNA, 54 bp, Artificial; identical to SEQ ID NO: 142610
  Synthetic oligonucleotide

SEQ ID NO: 615821 - DNA, 52 bp, Artificial; identical to SEQ ID NO: 211585
  Synthetic oligonucleotide

SEQ ID NO: 615822 - DNA, 58 bp, Artificial; identical to SEQ ID NO: 217216
  Synthetic oligonucleotide

SEQ ID NO: 615823 - DNA, 51 bp, Artificial; identical to SEQ ID NO: 216701
  Synthetic oligonucleotide

SEQ ID NO: 615824 - DNA, 59 bp, Artificial; identical to SEQ ID NO: 179480
  Synthetic oligonucleotide

SEQ ID NO: 615825 - DNA, 55 bp, Artificial; identical to SEQ ID NO: 217550
  Synthetic oligonucleotide

SEQ ID NO: 615826 - DNA, 53 bp, Artificial; identical to SEQ ID NO: 194971
  Synthetic oligonucleotide

SEQ ID NO: 615827 - DNA, 51 bp, Artificial; identical to SEQ ID NO: 203018
  Synthetic oligonucleotide

SEQ ID NO: 615828 - DNA, 52 bp, Artificial; identical to SEQ ID NO: 167120
  Synthetic oligonucleotide

SEQ ID NO: 615829 - DNA, 53 bp, Artificial; identical to SEQ ID NO: 216670
  Synthetic oligonucleotide

SEQ ID NO: 615830 - DNA, 51 bp, Artificial; identical to SEQ ID NO: 141318
  Synthetic oligonucleotide

SEQ ID NO: 615831 - DNA, 55 bp, Artificial; identical to SEQ ID NO: 224906
  Synthetic oligonucleotide

SEQ ID NO: 615832 - DNA, 50 bp, Artificial; identical to SEQ ID NO: 241323
  Synthetic oligonucleotide

SEQ ID NO: 615833 - DNA, 50 bp, Artificial; identical to SEQ ID NO: 176334
  Synthetic oligonucleotide

SEQ ID NO: 615834 - DNA, 53 bp, Artificial; identical to SEQ ID NO: 181872
  Synthetic oligonucleotide

SEQ ID NO: 615835 - DNA, 60 bp, Artificial; identical to SEQ ID NO: 178353
  Synthetic oligonucleotide

SEQ ID NO: 615836 - DNA, 55 bp, Artificial; identical to SEQ ID NO: 181873
  Synthetic oligonucleotide

SEQ ID NO: 615837 - DNA, 55 bp, Artificial; identical to SEQ ID NO: 211318
  Synthetic oligonucleotide

SEQ ID NO: 615838 - DNA, 57 bp, Artificial; identical to SEQ ID NO: 179806
  Synthetic oligonucleotide

SEQ ID NO: 615839 - DNA, 52 bp, Artificial; identical to SEQ ID NO: 247918
  Synthetic oligonucleotide

SEQ ID NO: 615840 - DNA, 55 bp, Artificial; identical to SEQ ID NO: 266069
  Synthetic oligonucleotide

SEQ ID NO: 615841 - DNA, 50 bp, Artificial; identical to SEQ ID NO: 165551
  Synthetic oligonucleotide

SEQ ID NO: 615842 - DNA, 53 bp, Artificial; identical to SEQ ID NO: 223623
  Synthetic oligonucleotide

SEQ ID NO: 615843 - DNA, 54 bp, Artificial; identical to SEQ ID NO: 160367
  Synthetic oligonucleotide

SEQ ID NO: 615844 - DNA, 60 bp, Artificial; identical to SEQ ID NO: 248543
  Synthetic oligonucleotide

SEQ ID NO: 615845 - DNA, 53 bp, Artificial; identical to SEQ ID NO: 246259
  Synthetic oligonucleotide

SEQ ID NO: 615846 - DNA, 55 bp, Artificial; identical to SEQ ID NO: 181875
  Synthetic oligonucleotide

SEQ ID NO: 615847 - DNA, 55 bp, Artificial; identical to SEQ ID NO: 254975
  Synthetic oligonucleotide

SEQ ID NO: 615848 - DNA, 55 bp, Artificial; identical to SEQ ID NO: 160795
  Synthetic oligonucleotide

SEQ ID NO: 615849 - DNA, 50 bp, Artificial; identical to SEQ ID NO: 160650
  Synthetic oligonucleotide

SEQ ID NO: 615850 - DNA, 50 bp, Artificial; identical to SEQ ID NO: 204053
  Synthetic oligonucleotide

SEQ ID NO: 615851 - DNA, 54 bp, Artificial; identical to SEQ ID NO: 187764
  Synthetic oligonucleotide

SEQ ID NO: 615852 - DNA, 51 bp, Artificial; identical to SEQ ID NO: 186592
  Synthetic oligonucleotide

SEQ ID NO: 615853 - DNA, 54 bp, Artificial; identical to SEQ ID NO: 246241
  Synthetic oligonucleotide

SEQ ID NO: 615854 - DNA, 50 bp, Artificial; identical to SEQ ID NO: 223908
  Synthetic oligonucleotide

SEQ ID NO: 615855 - DNA, 55 bp, Artificial; identical to SEQ ID NO: 181880
  Synthetic oligonucleotide

SEQ ID NO: 615856 - DNA, 60 bp, Artificial; identical to SEQ ID NO: 238769
  Synthetic oligonucleotide

SEQ ID NO: 615857 - DNA, 54 bp, Artificial; identical to SEQ ID NO: 216552
  Synthetic oligonucleotide

SEQ ID NO: 615858 - DNA, 51 bp, Artificial; identical to SEQ ID NO: 255236
  Synthetic oligonucleotide

SEQ ID NO: 615859 - DNA, 54 bp, Artificial; identical to SEQ ID NO: 180022
  Synthetic oligonucleotide

SEQ ID NO: 615860 - DNA, 51 bp, Artificial; identical to SEQ ID NO: 223748
  Synthetic oligonucleotide

SEQ ID NO: 615861 - DNA, 54 bp, Artificial; identical to SEQ ID NO: 202431
  Synthetic oligonucleotide

SEQ ID NO: 615862 - DNA, 57 bp, Artificial; identical to SEQ ID NO: 187247
  Synthetic oligonucleotide

SEQ ID NO: 615863 - DNA, 52 bp, Artificial; identical to SEQ ID NO: 243862
  Synthetic oligonucleotide

SEQ ID NO: 615864 - DNA, 54 bp, Artificial; identical to SEQ ID NO: 247259
  Synthetic oligonucleotide

SEQ ID NO: 615865 - DNA, 52 bp, Artificial; identical to SEQ ID NO: 151154
  Synthetic oligonucleotide

SEQ ID NO: 615866 - DNA, 51 bp, Artificial; identical to SEQ ID NO: 200051
  Synthetic oligonucleotide

SEQ ID NO: 615867 - DNA, 53 bp, Artificial; identical to SEQ ID NO: 170064
  Synthetic oligonucleotide

SEQ ID NO: 615868 - DNA, 59 bp, Artificial; identical to SEQ ID NO: 194168
  Synthetic oligonucleotide

SEQ ID NO: 615869 - DNA, 50 bp, Artificial; identical to SEQ ID NO: 149186
  Synthetic oligonucleotide

SEQ ID NO: 615870 - DNA, 54 bp, Artificial; identical to SEQ ID NO: 209214
  Synthetic oligonucleotide

SEQ ID NO: 615871 - DNA, 54 bp, Artificial; identical to SEQ ID NO: 239324
  Synthetic oligonucleotide

SEQ ID NO: 615872 - DNA, 56 bp, Artificial; identical to SEQ ID NO: 217322
  Synthetic oligonucleotide

SEQ ID NO: 615873 - DNA, 55 bp, Artificial; identical to SEQ ID NO: 240431
  Synthetic oligonucleotide

SEQ ID NO: 615874 - DNA, 50 bp, Artificial; identical to SEQ ID NO: 149974
  Synthetic oligonucleotide

SEQ ID NO: 615875 - DNA, 55 bp, Artificial; identical to SEQ ID NO: 171297
  Synthetic oligonucleotide

SEQ ID NO: 615876 - DNA, 55 bp, Artificial; identical to SEQ ID NO: 240430
  Synthetic oligonucleotide

SEQ ID NO: 615877 - DNA, 53 bp, Artificial; identical to SEQ ID NO: 255428
  Synthetic oligonucleotide

SEQ ID NO: 615878 - DNA, 53 bp, Artificial; identical to SEQ ID NO: 154398
  Synthetic oligonucleotide

SEQ ID NO: 615879 - DNA, 52 bp, Artificial; identical to SEQ ID NO: 174893
  Synthetic oligonucleotide

SEQ ID NO: 615880 - DNA, 60 bp, Artificial; identical to SEQ ID NO: 201050
  Synthetic oligonucleotide

SEQ ID NO: 615881 - DNA, 57 bp, Artificial; identical to SEQ ID NO: 208917
  Synthetic oligonucleotide

SEQ ID NO: 615882 - DNA, 55 bp, Artificial; identical to SEQ ID NO: 160879
  Synthetic oligonucleotide

SEQ ID NO: 615883 - DNA, 60 bp, Artificial; identical to SEQ ID NO: 151138
  Synthetic oligonucleotide

SEQ ID NO: 615884 - DNA, 58 bp, Artificial; identical to SEQ ID NO: 165356
  Synthetic oligonucleotide

SEQ ID NO: 615885 - DNA, 60 bp, Artificial; identical to SEQ ID NO: 194166
  Synthetic oligonucleotide

SEQ ID NO: 615886 - DNA, 51 bp, Artificial; identical to SEQ ID NO: 225276
  Synthetic oligonucleotide

SEQ ID NO: 615887 - DNA, 60 bp, Artificial; identical to SEQ ID NO: 178363
  Synthetic oligonucleotide

SEQ ID NO: 615888 - DNA, 58 bp, Artificial; identical to SEQ ID NO: 253530
  Synthetic oligonucleotide

SEQ ID NO: 615889 - DNA, 54 bp, Artificial; identical to SEQ ID NO: 166960
  Synthetic oligonucleotide

SEQ ID NO: 615890 - DNA, 57 bp, Artificial; identical to SEQ ID NO: 201081
  Synthetic oligonucleotide

SEQ ID NO: 615891 - DNA, 50 bp, Artificial; identical to SEQ ID NO: 196562
  Synthetic oligonucleotide

SEQ ID NO: 615892 - DNA, 55 bp, Artificial; identical to SEQ ID NO: 144878
  Synthetic oligonucleotide

SEQ ID NO: 615893 - DNA, 53 bp, Artificial; identical to SEQ ID NO: 217211
  Synthetic oligonucleotide

SEQ ID NO: 615894 - DNA, 52 bp, Artificial; identical to SEQ ID NO: 194165
  Synthetic oligonucleotide

SEQ ID NO: 615895 - DNA, 55 bp, Artificial; identical to SEQ ID NO: 240418
  Synthetic oligonucleotide

SEQ ID NO: 615896 - DNA, 55 bp, Artificial; identical to SEQ ID NO: 153462
  Synthetic oligonucleotide

SEQ ID NO: 615897 - DNA, 55 bp, Artificial; identical to SEQ ID NO: 253714
  Synthetic oligonucleotide

SEQ ID NO: 615898 - DNA, 55 bp, Artificial; identical to SEQ ID NO: 170888
  Synthetic oligonucleotide

SEQ ID NO: 615899 - DNA, 55 bp, Artificial; identical to SEQ ID NO: 237874
  Synthetic oligonucleotide

SEQ ID NO: 615900 - DNA, 50 bp, Artificial; identical to SEQ ID NO: 240731
  Synthetic oligonucleotide

SEQ ID NO: 615901 - DNA, 57 bp, Artificial; identical to SEQ ID NO: 238761
  Synthetic oligonucleotide

SEQ ID NO: 615902 - DNA, 59 bp, Artificial; identical to SEQ ID NO: 178369
  Synthetic oligonucleotide

SEQ ID NO: 615903 - DNA, 52 bp, Artificial; identical to SEQ ID NO: 248545
  Synthetic oligonucleotide

SEQ ID NO: 615904 - DNA, 51 bp, Artificial; identical to SEQ ID NO: 167608
  Synthetic oligonucleotide

SEQ ID NO: 615905 - DNA, 53 bp, Artificial; identical to SEQ ID NO: 178319
  Synthetic oligonucleotide

SEQ ID NO: 615906 - DNA, 54 bp, Artificial; identical to SEQ ID NO: 149230
  Synthetic oligonucleotide

SEQ ID NO: 615907 - DNA, 53 bp, Artificial; identical to SEQ ID NO: 201009
  Synthetic oligonucleotide

SEQ ID NO: 615908 - DNA, 55 bp, Artificial; identical to SEQ ID NO: 194833
  Synthetic oligonucleotide

SEQ ID NO: 615909 - DNA, 54 bp, Artificial; identical to SEQ ID NO: 159882
  Synthetic oligonucleotide

SEQ ID NO: 615910 - DNA, 55 bp, Artificial; identical to SEQ ID NO: 240408
  Synthetic oligonucleotide

SEQ ID NO: 615911 - DNA, 51 bp, Artificial; identical to SEQ ID NO: 266029
  Synthetic oligonucleotide

SEQ ID NO: 615912 - DNA, 49 bp, Artificial; identical to SEQ ID NO: 165423
  Synthetic oligonucleotide

SEQ ID NO: 615913 - DNA, 54 bp, Artificial; identical to SEQ ID NO: 266031
  Synthetic oligonucleotide

SEQ ID NO: 615914 - DNA, 52 bp, Artificial; identical to SEQ ID NO: 193782
  Synthetic oligonucleotide

SEQ ID NO: 615915 - DNA, 51 bp, Artificial; identical to SEQ ID NO: 241047
  Synthetic oligonucleotide

SEQ ID NO: 615916 - DNA, 53 bp, Artificial; identical to SEQ ID NO: 188033
  Synthetic oligonucleotide

SEQ ID NO: 615917 - DNA, 50 bp, Artificial; identical to SEQ ID NO: 181851
  Synthetic oligonucleotide

SEQ ID NO: 615918 - DNA, 59 bp, Artificial; identical to SEQ ID NO: 194161
  Synthetic oligonucleotide

SEQ ID NO: 615919 - DNA, 54 bp, Artificial; identical to SEQ ID NO: 188433
  Synthetic oligonucleotide

SEQ ID NO: 615920 - DNA, 57 bp, Artificial; identical to SEQ ID NO: 207058
  Synthetic oligonucleotide

SEQ ID NO: 615921 - DNA, 54 bp, Artificial; identical to SEQ ID NO: 207706
  Synthetic oligonucleotide

SEQ ID NO: 615922 - DNA, 55 bp, Artificial; identical to SEQ ID NO: 171238
  Synthetic oligonucleotide

SEQ ID NO: 615923 - DNA, 55 bp, Artificial; identical to SEQ ID NO: 155414
  Synthetic oligonucleotide

SEQ ID NO: 615924 - DNA, 60 bp, Artificial; identical to SEQ ID NO: 162450
  Synthetic oligonucleotide

SEQ ID NO: 615925 - DNA, 55 bp, Artificial; identical to SEQ ID NO: 148768
  Synthetic oligonucleotide

SEQ ID NO: 615926 - DNA, 60 bp, Artificial; identical to SEQ ID NO: 178326
  Synthetic oligonucleotide

SEQ ID NO: 615927 - DNA, 52 bp, Artificial; identical to SEQ ID NO: 206891
  Synthetic oligonucleotide

SEQ ID NO: 615928 - DNA, 52 bp, Artificial; identical to SEQ ID NO: 157521
  Synthetic oligonucleotide

SEQ ID NO: 615929 - DNA, 50 bp, Artificial; identical to SEQ ID NO: 255834
  Synthetic oligonucleotide

SEQ ID NO: 615930 - DNA, 55 bp, Artificial; identical to SEQ ID NO: 144877
  Synthetic oligonucleotide

SEQ ID NO: 615931 - DNA, 55 bp, Artificial; identical to SEQ ID NO: 237877
  Synthetic oligonucleotide

SEQ ID NO: 615932 - DNA, 53 bp, Artificial; identical to SEQ ID NO: 157439
  Synthetic oligonucleotide

SEQ ID NO: 615933 - DNA, 50 bp, Artificial; identical to SEQ ID NO: 244196
  Synthetic oligonucleotide

SEQ ID NO: 615934 - DNA, 50 bp, Artificial; identical to SEQ ID NO: 220895
  Synthetic oligonucleotide

SEQ ID NO: 615935 - DNA, 50 bp, Artificial; identical to SEQ ID NO: 238812
  Synthetic oligonucleotide

SEQ ID NO: 615936 - DNA, 53 bp, Artificial; identical to SEQ ID NO: 149363
  Synthetic oligonucleotide

SEQ ID NO: 615937 - DNA, 51 bp, Artificial; identical to SEQ ID NO: 248061
  Synthetic oligonucleotide

SEQ ID NO: 615938 - DNA, 60 bp, Artificial; identical to SEQ ID NO: 178333
  Synthetic oligonucleotide

SEQ ID NO: 615939 - DNA, 51 bp, Artificial; identical to SEQ ID NO: 144574
  Synthetic oligonucleotide

SEQ ID NO: 615940 - DNA, 55 bp, Artificial; identical to SEQ ID NO: 151751
  Synthetic oligonucleotide

SEQ ID NO: 615941 - DNA, 52 bp, Artificial; identical to SEQ ID NO: 174890
  Synthetic oligonucleotide

SEQ ID NO: 615942 - DNA, 52 bp, Artificial; identical to SEQ ID NO: 249669
  Synthetic oligonucleotide

SEQ ID NO: 615943 - DNA, 55 bp, Artificial; identical to SEQ ID NO: 244203
  Synthetic oligonucleotide

SEQ ID NO: 615944 - DNA, 51 bp, Artificial; identical to SEQ ID NO: 149713
  Synthetic oligonucleotide

SEQ ID NO: 615945 - DNA, 53 bp, Artificial; identical to SEQ ID NO: 200997
  Synthetic oligonucleotide

SEQ ID NO: 615946 - DNA, 54 bp, Artificial; identical to SEQ ID NO: 192049
  Synthetic oligonucleotide

SEQ ID NO: 615947 - DNA, 55 bp, Artificial; identical to SEQ ID NO: 254969
  Synthetic oligonucleotide

SEQ ID NO: 615948 - DNA, 58 bp, Artificial; identical to SEQ ID NO: 178336
  Synthetic oligonucleotide

SEQ ID NO: 615949 - DNA, 55 bp, Artificial; identical to SEQ ID NO: 181854
  Synthetic oligonucleotide

SEQ ID NO: 615950 - DNA, 52 bp, Artificial; identical to SEQ ID NO: 203968
  Synthetic oligonucleotide

SEQ ID NO: 615951 - DNA, 53 bp, Artificial; identical to SEQ ID NO: 178338
  Synthetic oligonucleotide

SEQ ID NO: 615952 - DNA, 52 bp, Artificial; identical to SEQ ID NO: 147019
  Synthetic oligonucleotide

SEQ ID NO: 615953 - DNA, 60 bp, Artificial; identical to SEQ ID NO: 165445
  Synthetic oligonucleotide

SEQ ID NO: 615954 - DNA, 53 bp, Artificial; identical to SEQ ID NO: 201030
  Synthetic oligonucleotide

SEQ ID NO: 615955 - DNA, 56 bp, Artificial; identical to SEQ ID NO: 248563
  Synthetic oligonucleotide

SEQ ID NO: 615956 - DNA, 51 bp, Artificial; identical to SEQ ID NO: 149717
  Synthetic oligonucleotide

SEQ ID NO: 615957 - DNA, 55 bp, Artificial; identical to SEQ ID NO: 151752
  Synthetic oligonucleotide

SEQ ID NO: 615958 - DNA, 55 bp, Artificial; identical to SEQ ID NO: 149038
  Synthetic oligonucleotide

SEQ ID NO: 615959 - DNA, 55 bp, Artificial; identical to SEQ ID NO: 181857
  Synthetic oligonucleotide

SEQ ID NO: 615960 - DNA, 50 bp, Artificial; identical to SEQ ID NO: 266315
  Synthetic oligonucleotide

SEQ ID NO: 615961 - DNA, 50 bp, Artificial; identical to SEQ ID NO: 176311
  Synthetic oligonucleotide

SEQ ID NO: 615962 - DNA, 55 bp, Artificial; identical to SEQ ID NO: 156972
  Synthetic oligonucleotide

SEQ ID NO: 615963 - DNA, 55 bp, Artificial; identical to SEQ ID NO: 153519
  Synthetic oligonucleotide

SEQ ID NO: 615964 - DNA, 55 bp, Artificial; identical to SEQ ID NO: 190435
  Synthetic oligonucleotide

SEQ ID NO: 615965 - DNA, 55 bp, Artificial; identical to SEQ ID NO: 164432
  Synthetic oligonucleotide

SEQ ID NO: 615966 - DNA, 56 bp, Artificial; identical to SEQ ID NO: 147345
  Synthetic oligonucleotide

SEQ ID NO: 615967 - DNA, 55 bp, Artificial; identical to SEQ ID NO: 142519
  Synthetic oligonucleotide

SEQ ID NO: 615968 - DNA, 56 bp, Artificial; identical to SEQ ID NO: 201235
  Synthetic oligonucleotide

SEQ ID NO: 615969 - DNA, 55 bp, Artificial; identical to SEQ ID NO: 240324
  Synthetic oligonucleotide

SEQ ID NO: 615970 - DNA, 49 bp, Artificial; identical to SEQ ID NO: 209778
  Synthetic oligonucleotide

SEQ ID NO: 615971 - DNA, 54 bp, Artificial; identical to SEQ ID NO: 147010
  Synthetic oligonucleotide

SEQ ID NO: 615972 - DNA, 51 bp, Artificial; identical to SEQ ID NO: 149721
  Synthetic oligonucleotide

SEQ ID NO: 615973 - DNA, 55 bp, Artificial; identical to SEQ ID NO: 254971
  Synthetic oligonucleotide

SEQ ID NO: 615974 - DNA, 60 bp, Artificial; identical to SEQ ID NO: 238808
  Synthetic oligonucleotide

SEQ ID NO: 615975 - DNA, 57 bp, Artificial; identical to SEQ ID NO: 165301
  Synthetic oligonucleotide

SEQ ID NO: 615976 - DNA, 55 bp, Artificial; identical to SEQ ID NO: 219676
  Synthetic oligonucleotide

SEQ ID NO: 615977 - DNA, 56 bp, Artificial; identical to SEQ ID NO: 212532
  Synthetic oligonucleotide

SEQ ID NO: 615978 - DNA, 55 bp, Artificial; identical to SEQ ID NO: 164431
  Synthetic oligonucleotide

SEQ ID NO: 615979 - DNA, 50 bp, Artificial; identical to SEQ ID NO: 147024
  Synthetic oligonucleotide

SEQ ID NO: 615980 - DNA, 55 bp, Artificial; identical to SEQ ID NO: 240323
  Synthetic oligonucleotide

SEQ ID NO: 615981 - DNA, 55 bp, Artificial; identical to SEQ ID NO: 144874
  Synthetic oligonucleotide

SEQ ID NO: 615982 - DNA, 52 bp, Artificial; identical to SEQ ID NO: 197562
  Synthetic oligonucleotide

SEQ ID NO: 615983 - DNA, 51 bp, Artificial; identical to SEQ ID NO: 157788
  Synthetic oligonucleotide

SEQ ID NO: 615984 - DNA, 51 bp, Artificial; identical to SEQ ID NO: 160534
  Synthetic oligonucleotide

SEQ ID NO: 615985 - DNA, 55 bp, Artificial; identical to SEQ ID NO: 207618
  Synthetic oligonucleotide

SEQ ID NO: 615986 - DNA, 60 bp, Artificial; identical to SEQ ID NO: 238806
  Synthetic oligonucleotide

SEQ ID NO: 615987 - DNA, 56 bp, Artificial; identical to SEQ ID NO: 243866
  Synthetic oligonucleotide

SEQ ID NO: 615988 - DNA, 55 bp, Artificial; identical to SEQ ID NO: 153341
  Synthetic oligonucleotide

SEQ ID NO: 615989 - DNA, 52 bp, Artificial; identical to SEQ ID NO: 258151
  Synthetic oligonucleotide

SEQ ID NO: 615990 - DNA, 59 bp, Artificial; identical to SEQ ID NO: 206888
  Synthetic oligonucleotide

SEQ ID NO: 615991 - DNA, 52 bp, Artificial; identical to SEQ ID NO: 243139
  Synthetic oligonucleotide

SEQ ID NO: 615992 - DNA, 55 bp, Artificial; identical to SEQ ID NO: 221454
  Synthetic oligonucleotide

SEQ ID NO: 615993 - DNA, 60 bp, Artificial; identical to SEQ ID NO: 178178
  Synthetic oligonucleotide

SEQ ID NO: 615994 - DNA, 55 bp, Artificial; identical to SEQ ID NO: 254857
  Synthetic oligonucleotide

SEQ ID NO: 615995 - DNA, 53 bp, Artificial; identical to SEQ ID NO: 243867
  Synthetic oligonucleotide

SEQ ID NO: 615996 - DNA, 56 bp, Artificial; identical to SEQ ID NO: 221233
  Synthetic oligonucleotide

SEQ ID NO: 615997 - DNA, 60 bp, Artificial; identical to SEQ ID NO: 194158
  Synthetic oligonucleotide

SEQ ID NO: 615998 - DNA, 55 bp, Artificial; identical to SEQ ID NO: 171264
  Synthetic oligonucleotide

SEQ ID NO: 615999 - DNA, 54 bp, Artificial; identical to SEQ ID NO: 155921
  Synthetic oligonucleotide

SEQ ID NO: 616000 - DNA, 52 bp, Artificial; identical to SEQ ID NO: 194828
  Synthetic oligonucleotide

SEQ ID NO: 616001 - DNA, 54 bp, Artificial; identical to SEQ ID NO: 202837
  Synthetic oligonucleotide

SEQ ID NO: 616002 - DNA, 51 bp, Artificial; identical to SEQ ID NO: 238805
  Synthetic oligonucleotide

SEQ ID NO: 616003 - DNA, 55 bp, Artificial; identical to SEQ ID NO: 181861
  Synthetic oligonucleotide

SEQ ID NO: 616004 - DNA, 60 bp, Artificial; identical to SEQ ID NO: 266047
  Synthetic oligonucleotide

SEQ ID NO: 616005 - DNA, 60 bp, Artificial; identical to SEQ ID NO: 203316
  Synthetic oligonucleotide

SEQ ID NO: 616006 - DNA, 55 bp, Artificial; identical to SEQ ID NO: 164430
  Synthetic oligonucleotide

SEQ ID NO: 616007 - DNA, 55 bp, Artificial; identical to SEQ ID NO: 221456
  Synthetic oligonucleotide

SEQ ID NO: 616008 - DNA, 55 bp, Artificial; identical to SEQ ID NO: 217541
  Synthetic oligonucleotide

SEQ ID NO: 616009 - DNA, 55 bp, Artificial; identical to SEQ ID NO: 144873
  Synthetic oligonucleotide

SEQ ID NO: 616010 - DNA, 53 bp, Artificial; identical to SEQ ID NO: 167070
  Synthetic oligonucleotide

SEQ ID NO: 616011 - DNA, 60 bp, Artificial; identical to SEQ ID NO: 147021
  Synthetic oligonucleotide

SEQ ID NO: 616012 - DNA, 58 bp, Artificial; identical to SEQ ID NO: 238803
  Synthetic oligonucleotide

SEQ ID NO: 616013 - DNA, 55 bp, Artificial; identical to SEQ ID NO: 240316
  Synthetic oligonucleotide

SEQ ID NO: 616014 - DNA, 58 bp, Artificial; identical to SEQ ID NO: 201024
  Synthetic oligonucleotide

SEQ ID NO: 616015 - DNA, 55 bp, Artificial; identical to SEQ ID NO: 254827
  Synthetic oligonucleotide

SEQ ID NO: 616016 - DNA, 60 bp, Artificial; identical to SEQ ID NO: 238801
  Synthetic oligonucleotide

SEQ ID NO: 616017 - DNA, 56 bp, Artificial; identical to SEQ ID NO: 159900
  Synthetic oligonucleotide

SEQ ID NO: 616018 - DNA, 59 bp, Artificial; identical to SEQ ID NO: 187265
  Synthetic oligonucleotide

SEQ ID NO: 616019 - DNA, 60 bp, Artificial; identical to SEQ ID NO: 248501
  Synthetic oligonucleotide

SEQ ID NO: 616020 - DNA, 55 bp, Artificial; identical to SEQ ID NO: 170900
  Synthetic oligonucleotide

SEQ ID NO: 616021 - DNA, 58 bp, Artificial; identical to SEQ ID NO: 178186
  Synthetic oligonucleotide

SEQ ID NO: 616022 - DNA, 55 bp, Artificial; identical to SEQ ID NO: 211333
  Synthetic oligonucleotide

SEQ ID NO: 616023 - DNA, 55 bp, Artificial; identical to SEQ ID NO: 198403
  Synthetic oligonucleotide

SEQ ID NO: 616024 - DNA, 55 bp, Artificial; identical to SEQ ID NO: 149099
  Synthetic oligonucleotide

SEQ ID NO: 616025 - DNA, 60 bp, Artificial; identical to SEQ ID NO: 178187
  Synthetic oligonucleotide

SEQ ID NO: 616026 - DNA, 60 bp, Artificial; identical to SEQ ID NO: 201022
  Synthetic oligonucleotide

SEQ ID NO: 616027 - DNA, 50 bp, Artificial; identical to SEQ ID NO: 201019
  Synthetic oligonucleotide

SEQ ID NO: 616028 - DNA, 55 bp, Artificial; identical to SEQ ID NO: 154390
  Synthetic oligonucleotide

SEQ ID NO: 616029 - DNA, 55 bp, Artificial; identical to SEQ ID NO: 181864
  Synthetic oligonucleotide

SEQ ID NO: 616030 - DNA, 51 bp, Artificial; identical to SEQ ID NO: 178189
  Synthetic oligonucleotide

SEQ ID NO: 616031 - DNA, 51 bp, Artificial; identical to SEQ ID NO: 186518
  Synthetic oligonucleotide

SEQ ID NO: 616032 - DNA, 53 bp, Artificial; identical to SEQ ID NO: 185808
  Synthetic oligonucleotide

SEQ ID NO: 616033 - DNA, 55 bp, Artificial; identical to SEQ ID NO: 181868
  Synthetic oligonucleotide

SEQ ID NO: 616034 - DNA, 55 bp, Artificial; identical to SEQ ID NO: 194826
  Synthetic oligonucleotide

SEQ ID NO: 616035 - DNA, 57 bp, Artificial; identical to SEQ ID NO: 171002
  Synthetic oligonucleotide

SEQ ID NO: 616036 - DNA, 54 bp, Artificial; identical to SEQ ID NO: 212948
  Synthetic oligonucleotide

SEQ ID NO: 616037 - DNA, 55 bp, Artificial; identical to SEQ ID NO: 156970
  Synthetic oligonucleotide

SEQ ID NO: 616038 - DNA, 60 bp, Artificial; identical to SEQ ID NO: 238800
  Synthetic oligonucleotide

SEQ ID NO: 616039 - DNA, 58 bp, Artificial; identical to SEQ ID NO: 248492
  Synthetic oligonucleotide

SEQ ID NO: 616040 - DNA, 51 bp, Artificial; identical to SEQ ID NO: 211664
  Synthetic oligonucleotide

SEQ ID NO: 616041 - DNA, 59 bp, Artificial; identical to SEQ ID NO: 178195
  Synthetic oligonucleotide

SEQ ID NO: 616042 - DNA, 54 bp, Artificial; identical to SEQ ID NO: 216574
  Synthetic oligonucleotide

SEQ ID NO: 616043 - DNA, 56 bp, Artificial; identical to SEQ ID NO: 238799
  Synthetic oligonucleotide

SEQ ID NO: 616044 - DNA, 58 bp, Artificial; identical to SEQ ID NO: 206886
  Synthetic oligonucleotide

SEQ ID NO: 616045 - DNA, 54 bp, Artificial; identical to SEQ ID NO: 211304
  Synthetic oligonucleotide

SEQ ID NO: 616046 - DNA, 56 bp, Artificial; identical to SEQ ID NO: 179966
  Synthetic oligonucleotide

SEQ ID NO: 616047 - DNA, 55 bp, Artificial; identical to SEQ ID NO: 142165
  Synthetic oligonucleotide

SEQ ID NO: 616048 - DNA, 60 bp, Artificial; identical to SEQ ID NO: 150895
  Synthetic oligonucleotide

SEQ ID NO: 616049 - DNA, 53 bp, Artificial; identical to SEQ ID NO: 201014
  Synthetic oligonucleotide

SEQ ID NO: 616050 - DNA, 54 bp, Artificial; identical to SEQ ID NO: 205493
  Synthetic oligonucleotide

SEQ ID NO: 616051 - DNA, 55 bp, Artificial; identical to SEQ ID NO: 247723
  Synthetic oligonucleotide

SEQ ID NO: 616052 - DNA, 55 bp, Artificial; identical to SEQ ID NO: 156969
  Synthetic oligonucleotide

SEQ ID NO: 616053 - DNA, 60 bp, Artificial; identical to SEQ ID NO: 178201
  Synthetic oligonucleotide

SEQ ID NO: 616054 - DNA, 53 bp, Artificial; identical to SEQ ID NO: 203898
  Synthetic oligonucleotide

SEQ ID NO: 616055 - DNA, 59 bp, Artificial; identical to SEQ ID NO: 150899
  Synthetic oligonucleotide

SEQ ID NO: 616056 - DNA, 51 bp, Artificial; identical to SEQ ID NO: 241053
  Synthetic oligonucleotide

SEQ ID NO: 616057 - DNA, 53 bp, Artificial; identical to SEQ ID NO: 256356
  Synthetic oligonucleotide

SEQ ID NO: 616058 - DNA, 50 bp, Artificial; identical to SEQ ID NO: 261897
  Synthetic oligonucleotide

SEQ ID NO: 616059 - DNA, 57 bp, Artificial; identical to SEQ ID NO: 222857
  Synthetic oligonucleotide

SEQ ID NO: 616060 - DNA, 53 bp, Artificial; identical to SEQ ID NO: 201012
  Synthetic oligonucleotide

SEQ ID NO: 616061 - DNA, 54 bp, Artificial; identical to SEQ ID NO: 171255
  Synthetic oligonucleotide

SEQ ID NO: 616062 - DNA, 55 bp, Artificial; identical to SEQ ID NO: 208365
  Synthetic oligonucleotide

SEQ ID NO: 616063 - DNA, 51 bp, Artificial; identical to SEQ ID NO: 149722
  Synthetic oligonucleotide

SEQ ID NO: 616064 - DNA, 55 bp, Artificial; identical to SEQ ID NO: 202850
  Synthetic oligonucleotide

SEQ ID NO: 616065 - DNA, 55 bp, Artificial; identical to SEQ ID NO: 188373
  Synthetic oligonucleotide

SEQ ID NO: 616066 - DNA, 50 bp, Artificial; identical to SEQ ID NO: 246823
  Synthetic oligonucleotide

SEQ ID NO: 616067 - DNA, 54 bp, Artificial; identical to SEQ ID NO: 212848
  Synthetic oligonucleotide

SEQ ID NO: 616068 - DNA, 51 bp, Artificial; identical to SEQ ID NO: 146473
  Synthetic oligonucleotide

SEQ ID NO: 616069 - DNA, 54 bp, Artificial; identical to SEQ ID NO: 185155
  Synthetic oligonucleotide

SEQ ID NO: 616070 - DNA, 50 bp, Artificial; identical to SEQ ID NO: 237279
  Synthetic oligonucleotide

SEQ ID NO: 616071 - DNA, 60 bp, Artificial; identical to SEQ ID NO: 206885
  Synthetic oligonucleotide

SEQ ID NO: 616072 - DNA, 60 bp, Artificial; identical to SEQ ID NO: 201016
  Synthetic oligonucleotide

SEQ ID NO: 616073 - DNA, 53 bp, Artificial; identical to SEQ ID NO: 178153
  Synthetic oligonucleotide

SEQ ID NO: 616074 - DNA, 56 bp, Artificial; identical to SEQ ID NO: 224180
  Synthetic oligonucleotide

SEQ ID NO: 616075 - DNA, 52 bp, Artificial; identical to SEQ ID NO: 157572
  Synthetic oligonucleotide

SEQ ID NO: 616076 - DNA, 49 bp, Artificial; identical to SEQ ID NO: 152962
  Synthetic oligonucleotide

SEQ ID NO: 616077 - DNA, 57 bp, Artificial; identical to SEQ ID NO: 159940
  Synthetic oligonucleotide

SEQ ID NO: 616078 - DNA, 52 bp, Artificial; identical to SEQ ID NO: 247915
  Synthetic oligonucleotide

SEQ ID NO: 616079 - DNA, 59 bp, Artificial; identical to SEQ ID NO: 210806
  Synthetic oligonucleotide

SEQ ID NO: 616080 - DNA, 55 bp, Artificial; identical to SEQ ID NO: 156968
  Synthetic oligonucleotide

SEQ ID NO: 616081 - DNA, 53 bp, Artificial; identical to SEQ ID NO: 256569
  Synthetic oligonucleotide

SEQ ID NO: 616082 - DNA, 53 bp, Artificial; identical to SEQ ID NO: 185762
  Synthetic oligonucleotide

SEQ ID NO: 616083 - DNA, 55 bp, Artificial; identical to SEQ ID NO: 201018
  Synthetic oligonucleotide

SEQ ID NO: 616084 - DNA, 60 bp, Artificial; identical to SEQ ID NO: 237852
  Synthetic oligonucleotide

SEQ ID NO: 616085 - DNA, 52 bp, Artificial; identical to SEQ ID NO: 223688
  Synthetic oligonucleotide

SEQ ID NO: 616086 - DNA, 55 bp, Artificial; identical to SEQ ID NO: 181742
  Synthetic oligonucleotide

SEQ ID NO: 616087 - DNA, 53 bp, Artificial; identical to SEQ ID NO: 209636
  Synthetic oligonucleotide

SEQ ID NO: 616088 - DNA, 50 bp, Artificial; identical to SEQ ID NO: 244101
  Synthetic oligonucleotide

SEQ ID NO: 616089 - DNA, 50 bp, Artificial; identical to SEQ ID NO: 266327
  Synthetic oligonucleotide

SEQ ID NO: 616090 - DNA, 56 bp, Artificial; identical to SEQ ID NO: 247306
  Synthetic oligonucleotide

SEQ ID NO: 616091 - DNA, 50 bp, Artificial; identical to SEQ ID NO: 223888
  Synthetic oligonucleotide

SEQ ID NO: 616092 - DNA, 50 bp, Artificial; identical to SEQ ID NO: 187700
  Synthetic oligonucleotide

SEQ ID NO: 616093 - DNA, 52 bp, Artificial; identical to SEQ ID NO: 165723
  Synthetic oligonucleotide

SEQ ID NO: 616094 - DNA, 57 bp, Artificial; identical to SEQ ID NO: 247301
  Synthetic oligonucleotide

SEQ ID NO: 616095 - DNA, 54 bp, Artificial; identical to SEQ ID NO: 201113
  Synthetic oligonucleotide

SEQ ID NO: 616096 - DNA, 48 bp, Artificial; identical to SEQ ID NO: 149311
  Synthetic oligonucleotide

SEQ ID NO: 616097 - DNA, 55 bp, Artificial; identical to SEQ ID NO: 243872
  Synthetic oligonucleotide

SEQ ID NO: 616098 - DNA, 53 bp, Artificial; identical to SEQ ID NO: 208702
  Synthetic oligonucleotide

SEQ ID NO: 616099 - DNA, 53 bp, Artificial; identical to SEQ ID NO: 160416
  Synthetic oligonucleotide

SEQ ID NO: 616100 - DNA, 60 bp, Artificial; identical to SEQ ID NO: 247293
  Synthetic oligonucleotide

SEQ ID NO: 616101 - DNA, 59 bp, Artificial; identical to SEQ ID NO: 178159
  Synthetic oligonucleotide

SEQ ID NO: 616102 - DNA, 54 bp, Artificial; identical to SEQ ID NO: 238792
  Synthetic oligonucleotide

SEQ ID NO: 616103 - DNA, 55 bp, Artificial; identical to SEQ ID NO: 249314
  Synthetic oligonucleotide

SEQ ID NO: 616104 - DNA, 56 bp, Artificial; identical to SEQ ID NO: 234531
  Synthetic oligonucleotide

SEQ ID NO: 616105 - DNA, 60 bp, Artificial; identical to SEQ ID NO: 178164
  Synthetic oligonucleotide

SEQ ID NO: 616106 - DNA, 52 bp, Artificial; identical to SEQ ID NO: 246526
  Synthetic oligonucleotide

SEQ ID NO: 616107 - DNA, 51 bp, Artificial; identical to SEQ ID NO: 151285
  Synthetic oligonucleotide

SEQ ID NO: 616108 - DNA, 60 bp, Artificial; identical to SEQ ID NO: 141868
  Synthetic oligonucleotide

SEQ ID NO: 616109 - DNA, 55 bp, Artificial; identical to SEQ ID NO: 211360
  Synthetic oligonucleotide

SEQ ID NO: 616110 - DNA, 50 bp, Artificial; identical to SEQ ID NO: 165532
  Synthetic oligonucleotide

SEQ ID NO: 616111 - DNA, 53 bp, Artificial; identical to SEQ ID NO: 216637
  Synthetic oligonucleotide

SEQ ID NO: 616112 - DNA, 54 bp, Artificial; identical to SEQ ID NO: 185163
  Synthetic oligonucleotide

SEQ ID NO: 616113 - DNA, 60 bp, Artificial; identical to SEQ ID NO: 238790
  Synthetic oligonucleotide

SEQ ID NO: 616114 - DNA, 55 bp, Artificial; identical to SEQ ID NO: 233644
  Synthetic oligonucleotide

SEQ ID NO: 616115 - DNA, 55 bp, Artificial; identical to SEQ ID NO: 238789
  Synthetic oligonucleotide

SEQ ID NO: 616116 - DNA, 51 bp, Artificial; identical to SEQ ID NO: 238788
  Synthetic oligonucleotide

SEQ ID NO: 616117 - DNA, 53 bp, Artificial; identical to SEQ ID NO: 178166
  Synthetic oligonucleotide

SEQ ID NO: 616118 - DNA, 53 bp, Artificial; identical to SEQ ID NO: 149300
  Synthetic oligonucleotide

SEQ ID NO: 616119 - DNA, 55 bp, Artificial; identical to SEQ ID NO: 142517
  Synthetic oligonucleotide

SEQ ID NO: 616120 - DNA, 55 bp, Artificial; identical to SEQ ID NO: 148923
  Synthetic oligonucleotide

SEQ ID NO: 616121 - DNA, 58 bp, Artificial; identical to SEQ ID NO: 243877
  Synthetic oligonucleotide

SEQ ID NO: 616122 - DNA, 54 bp, Artificial; identical to SEQ ID NO: 160369
  Synthetic oligonucleotide

SEQ ID NO: 616123 - DNA, 55 bp, Artificial; identical to SEQ ID NO: 207057
  Synthetic oligonucleotide

SEQ ID NO: 616124 - DNA, 55 bp, Artificial; identical to SEQ ID NO: 218225
  Synthetic oligonucleotide

SEQ ID NO: 616125 - DNA, 60 bp, Artificial; identical to SEQ ID NO: 243881
  Synthetic oligonucleotide

SEQ ID NO: 616126 - DNA, 57 bp, Artificial; identical to SEQ ID NO: 208973
  Synthetic oligonucleotide

SEQ ID NO: 616127 - DNA, 56 bp, Artificial; identical to SEQ ID NO: 238785
  Synthetic oligonucleotide

SEQ ID NO: 616128 - DNA, 52 bp, Artificial; identical to SEQ ID NO: 151757
  Synthetic oligonucleotide

SEQ ID NO: 616129 - DNA, 55 bp, Artificial; identical to SEQ ID NO: 181746
  Synthetic oligonucleotide

SEQ ID NO: 616130 - DNA, 55 bp, Artificial; identical to SEQ ID NO: 218874
  Synthetic oligonucleotide

SEQ ID NO: 616131 - DNA, 57 bp, Artificial; identical to SEQ ID NO: 194197
  Synthetic oligonucleotide

SEQ ID NO: 616132 - DNA, 55 bp, Artificial; identical to SEQ ID NO: 254902
  Synthetic oligonucleotide

SEQ ID NO: 616133 - DNA, 59 bp, Artificial; identical to SEQ ID NO: 206882
  Synthetic oligonucleotide

SEQ ID NO: 616134 - DNA, 51 bp, Artificial; identical to SEQ ID NO: 169082
  Synthetic oligonucleotide

SEQ ID NO: 616135 - DNA, 55 bp, Artificial; identical to SEQ ID NO: 211371
  Synthetic oligonucleotide

SEQ ID NO: 616136 - DNA, 55 bp, Artificial; identical to SEQ ID NO: 181750
  Synthetic oligonucleotide

SEQ ID NO: 616137 - DNA, 51 bp, Artificial; identical to SEQ ID NO: 193797
  Synthetic oligonucleotide

SEQ ID NO: 616138 - DNA, 57 bp, Artificial; identical to SEQ ID NO: 201005
  Synthetic oligonucleotide

SEQ ID NO: 616139 - DNA, 55 bp, Artificial; identical to SEQ ID NO: 244341
  Synthetic oligonucleotide

SEQ ID NO: 616140 - DNA, 55 bp, Artificial; identical to SEQ ID NO: 234292
  Synthetic oligonucleotide

SEQ ID NO: 616141 - DNA, 52 bp, Artificial; identical to SEQ ID NO: 238723
  Synthetic oligonucleotide

SEQ ID NO: 616142 - DNA, 55 bp, Artificial; identical to SEQ ID NO: 148924
  Synthetic oligonucleotide

SEQ ID NO: 616143 - DNA, 54 bp, Artificial; identical to SEQ ID NO: 174797
  Synthetic oligonucleotide

SEQ ID NO: 616144 - DNA, 57 bp, Artificial; identical to SEQ ID NO: 237938
  Synthetic oligonucleotide

SEQ ID NO: 616145 - DNA, 52 bp, Artificial; identical to SEQ ID NO: 195229
  Synthetic oligonucleotide

SEQ ID NO: 616146 - DNA, 55 bp, Artificial; identical to SEQ ID NO: 217585
  Synthetic oligonucleotide

SEQ ID NO: 616147 - DNA, 52 bp, Artificial; identical to SEQ ID NO: 186134
  Synthetic oligonucleotide

SEQ ID NO: 616148 - DNA, 55 bp, Artificial; identical to SEQ ID NO: 197223
  Synthetic oligonucleotide

SEQ ID NO: 616149 - DNA, 60 bp, Artificial; identical to SEQ ID NO: 155663
  Synthetic oligonucleotide

SEQ ID NO: 616150 - DNA, 55 bp, Artificial; identical to SEQ ID NO: 235125
  Synthetic oligonucleotide

SEQ ID NO: 616151 - DNA, 55 bp, Artificial; identical to SEQ ID NO: 257851
  Synthetic oligonucleotide

SEQ ID NO: 616152 - DNA, 55 bp, Artificial; identical to SEQ ID NO: 168764
  Synthetic oligonucleotide

SEQ ID NO: 616153 - DNA, 52 bp, Artificial; identical to SEQ ID NO: 240854
  Synthetic oligonucleotide

SEQ ID NO: 616154 - DNA, 58 bp, Artificial; identical to SEQ ID NO: 243884
  Synthetic oligonucleotide

SEQ ID NO: 616155 - DNA, 58 bp, Artificial; identical to SEQ ID NO: 141869
  Synthetic oligonucleotide

SEQ ID NO: 616156 - DNA, 53 bp, Artificial; identical to SEQ ID NO: 185788
  Synthetic oligonucleotide

SEQ ID NO: 616157 - DNA, 57 bp, Artificial; identical to SEQ ID NO: 178246
  Synthetic oligonucleotide

SEQ ID NO: 616158 - DNA, 60 bp, Artificial; identical to SEQ ID NO: 171714
  Synthetic oligonucleotide

SEQ ID NO: 616159 - DNA, 53 bp, Artificial; identical to SEQ ID NO: 208730
  Synthetic oligonucleotide

SEQ ID NO: 616160 - DNA, 57 bp, Artificial; identical to SEQ ID NO: 238720
  Synthetic oligonucleotide

SEQ ID NO: 616161 - DNA, 55 bp, Artificial; identical to SEQ ID NO: 198421
  Synthetic oligonucleotide

SEQ ID NO: 616162 - DNA, 53 bp, Artificial; identical to SEQ ID NO: 164902
  Synthetic oligonucleotide

SEQ ID NO: 616163 - DNA, 59 bp, Artificial; identical to SEQ ID NO: 179360
  Synthetic oligonucleotide

SEQ ID NO: 616164 - DNA, 55 bp, Artificial; identical to SEQ ID NO: 240367
  Synthetic oligonucleotide

SEQ ID NO: 616165 - DNA, 60 bp, Artificial; identical to SEQ ID NO: 243886
  Synthetic oligonucleotide

SEQ ID NO: 616166 - DNA, 55 bp, Artificial; identical to SEQ ID NO: 151758
  Synthetic oligonucleotide

SEQ ID NO: 616167 - DNA, 57 bp, Artificial; identical to SEQ ID NO: 238718
  Synthetic oligonucleotide

SEQ ID NO: 616168 - DNA, 56 bp, Artificial; identical to SEQ ID NO: 210856
  Synthetic oligonucleotide

SEQ ID NO: 616169 - DNA, 54 bp, Artificial; identical to SEQ ID NO: 190622
  Synthetic oligonucleotide

SEQ ID NO: 616170 - DNA, 60 bp, Artificial; identical to SEQ ID NO: 238716
  Synthetic oligonucleotide

SEQ ID NO: 616171 - DNA, 54 bp, Artificial; identical to SEQ ID NO: 243137
  Synthetic oligonucleotide

SEQ ID NO: 616172 - DNA, 55 bp, Artificial; identical to SEQ ID NO: 205975
  Synthetic oligonucleotide

SEQ ID NO: 616173 - DNA, 50 bp, Artificial; identical to SEQ ID NO: 150887
  Synthetic oligonucleotide

SEQ ID NO: 616174 - DNA, 50 bp, Artificial; identical to SEQ ID NO: 256361
  Synthetic oligonucleotide

SEQ ID NO: 616175 - DNA, 52 bp, Artificial; identical to SEQ ID NO: 237061
  Synthetic oligonucleotide

SEQ ID NO: 616176 - DNA, 54 bp, Artificial; identical to SEQ ID NO: 188436
  Synthetic oligonucleotide

SEQ ID NO: 616177 - DNA, 53 bp, Artificial; identical to SEQ ID NO: 240353
  Synthetic oligonucleotide

SEQ ID NO: 616178 - DNA, 60 bp, Artificial; identical to SEQ ID NO: 207847
  Synthetic oligonucleotide

SEQ ID NO: 616179 - DNA, 60 bp, Artificial; identical to SEQ ID NO: 152964
  Synthetic oligonucleotide

SEQ ID NO: 616180 - DNA, 60 bp, Artificial; identical to SEQ ID NO: 178258
  Synthetic oligonucleotide

SEQ ID NO: 616181 - DNA, 55 bp, Artificial; identical to SEQ ID NO: 178260
  Synthetic oligonucleotide

SEQ ID NO: 616182 - DNA, 58 bp, Artificial; identical to SEQ ID NO: 238711
  Synthetic oligonucleotide

SEQ ID NO: 616183 - DNA, 55 bp, Artificial; identical to SEQ ID NO: 254904
  Synthetic oligonucleotide

SEQ ID NO: 616184 - DNA, 52 bp, Artificial; identical to SEQ ID NO: 199934
  Synthetic oligonucleotide

SEQ ID NO: 616185 - DNA, 58 bp, Artificial; identical to SEQ ID NO: 243889
  Synthetic oligonucleotide

SEQ ID NO: 616186 - DNA, 60 bp, Artificial; identical to SEQ ID NO: 152525
  Synthetic oligonucleotide

SEQ ID NO: 616187 - DNA, 52 bp, Artificial; identical to SEQ ID NO: 206879
  Synthetic oligonucleotide

SEQ ID NO: 616188 - DNA, 60 bp, Artificial; identical to SEQ ID NO: 194191
  Synthetic oligonucleotide

SEQ ID NO: 616189 - DNA, 51 bp, Artificial; identical to SEQ ID NO: 185766
  Synthetic oligonucleotide

SEQ ID NO: 616190 - DNA, 55 bp, Artificial; identical to SEQ ID NO: 146287
  Synthetic oligonucleotide

SEQ ID NO: 616191 - DNA, 57 bp, Artificial; identical to SEQ ID NO: 159970
  Synthetic oligonucleotide

SEQ ID NO: 616192 - DNA, 54 bp, Artificial; identical to SEQ ID NO: 205613
  Synthetic oligonucleotide

SEQ ID NO: 616193 - DNA, 54 bp, Artificial; identical to SEQ ID NO: 238707
  Synthetic oligonucleotide

SEQ ID NO: 616194 - DNA, 56 bp, Artificial; identical to SEQ ID NO: 187304
  Synthetic oligonucleotide

SEQ ID NO: 616195 - DNA, 58 bp, Artificial; identical to SEQ ID NO: 239266
  Synthetic oligonucleotide

SEQ ID NO: 616196 - DNA, 58 bp, Artificial; identical to SEQ ID NO: 256365
  Synthetic oligonucleotide

SEQ ID NO: 616197 - DNA, 56 bp, Artificial; identical to SEQ ID NO: 243892
  Synthetic oligonucleotide

SEQ ID NO: 616198 - DNA, 54 bp, Artificial; identical to SEQ ID NO: 185194
  Synthetic oligonucleotide

SEQ ID NO: 616199 - DNA, 55 bp, Artificial; identical to SEQ ID NO: 212846
  Synthetic oligonucleotide

SEQ ID NO: 616200 - DNA, 50 bp, Artificial; identical to SEQ ID NO: 255920
  Synthetic oligonucleotide

SEQ ID NO: 616201 - DNA, 55 bp, Artificial; identical to SEQ ID NO: 148946
  Synthetic oligonucleotide

SEQ ID NO: 616202 - DNA, 59 bp, Artificial; identical to SEQ ID NO: 201011
  Synthetic oligonucleotide

SEQ ID NO: 616203 - DNA, 56 bp, Artificial; identical to SEQ ID NO: 238706
  Synthetic oligonucleotide

SEQ ID NO: 616204 - DNA, 57 bp, Artificial; identical to SEQ ID NO: 247296
  Synthetic oligonucleotide

SEQ ID NO: 616205 - DNA, 50 bp, Artificial; identical to SEQ ID NO: 152514
  Synthetic oligonucleotide

SEQ ID NO: 616206 - DNA, 50 bp, Artificial; identical to SEQ ID NO: 165667
  Synthetic oligonucleotide

SEQ ID NO: 616207 - DNA, 54 bp, Artificial; identical to SEQ ID NO: 157134
  Synthetic oligonucleotide

SEQ ID NO: 616208 - DNA, 54 bp, Artificial; identical to SEQ ID NO: 218228
  Synthetic oligonucleotide

SEQ ID NO: 616209 - DNA, 55 bp, Artificial; identical to SEQ ID NO: 168765
  Synthetic oligonucleotide

SEQ ID NO: 616210 - DNA, 55 bp, Artificial; identical to SEQ ID NO: 201046
  Synthetic oligonucleotide

SEQ ID NO: 616211 - DNA, 52 bp, Artificial; identical to SEQ ID NO: 239278
  Synthetic oligonucleotide

SEQ ID NO: 616212 - DNA, 53 bp, Artificial; identical to SEQ ID NO: 152010
  Synthetic oligonucleotide

SEQ ID NO: 616213 - DNA, 54 bp, Artificial; identical to SEQ ID NO: 178215
  Synthetic oligonucleotide

SEQ ID NO: 616214 - DNA, 52 bp, Artificial; identical to SEQ ID NO: 165100
  Synthetic oligonucleotide

SEQ ID NO: 616215 - DNA, 56 bp, Artificial; identical to SEQ ID NO: 197839
  Synthetic oligonucleotide

SEQ ID NO: 616216 - DNA, 54 bp, Artificial; identical to SEQ ID NO: 224226
  Synthetic oligonucleotide

SEQ ID NO: 616217 - DNA, 57 bp, Artificial; identical to SEQ ID NO: 201037
  Synthetic oligonucleotide

SEQ ID NO: 616218 - DNA, 50 bp, Artificial; identical to SEQ ID NO: 158267
  Synthetic oligonucleotide

SEQ ID NO: 616219 - DNA, 55 bp, Artificial; identical to SEQ ID NO: 238702
  Synthetic oligonucleotide

SEQ ID NO: 616220 - DNA, 53 bp, Artificial; identical to SEQ ID NO: 216657
  Synthetic oligonucleotide

SEQ ID NO: 616221 - DNA, 55 bp, Artificial; identical to SEQ ID NO: 257940
  Synthetic oligonucleotide

SEQ ID NO: 616222 - DNA, 53 bp, Artificial; identical to SEQ ID NO: 211345
  Synthetic oligonucleotide

SEQ ID NO: 616223 - DNA, 59 bp, Artificial; identical to SEQ ID NO: 150947
  Synthetic oligonucleotide

SEQ ID NO: 616224 - DNA, 60 bp, Artificial; identical to SEQ ID NO: 178219
  Synthetic oligonucleotide

SEQ ID NO: 616225 - DNA, 55 bp, Artificial; identical to SEQ ID NO: 149006
  Synthetic oligonucleotide

SEQ ID NO: 616226 - DNA, 55 bp, Artificial; identical to SEQ ID NO: 187691
  Synthetic oligonucleotide

SEQ ID NO: 616227 - DNA, 54 bp, Artificial; identical to SEQ ID NO: 149007
  Synthetic oligonucleotide

SEQ ID NO: 616228 - DNA, 52 bp, Artificial; identical to SEQ ID NO: 143684
  Synthetic oligonucleotide

SEQ ID NO: 616229 - DNA, 53 bp, Artificial; identical to SEQ ID NO: 149318
  Synthetic oligonucleotide

SEQ ID NO: 616230 - DNA, 58 bp, Artificial; identical to SEQ ID NO: 159847
  Synthetic oligonucleotide

SEQ ID NO: 616231 - DNA, 55 bp, Artificial; identical to SEQ ID NO: 174656
  Synthetic oligonucleotide

SEQ ID NO: 616232 - DNA, 55 bp, Artificial; identical to SEQ ID NO: 221460
  Synthetic oligonucleotide

SEQ ID NO: 616233 - DNA, 54 bp, Artificial; identical to SEQ ID NO: 233812
  Synthetic oligonucleotide

SEQ ID NO: 616234 - DNA, 56 bp, Artificial; identical to SEQ ID NO: 238755
  Synthetic oligonucleotide

SEQ ID NO: 616235 - DNA, 49 bp, Artificial; identical to SEQ ID NO: 152537
  Synthetic oligonucleotide

SEQ ID NO: 616236 - DNA, 53 bp, Artificial; identical to SEQ ID NO: 258103
  Synthetic oligonucleotide

SEQ ID NO: 616237 - DNA, 60 bp, Artificial; identical to SEQ ID NO: 217220
  Synthetic oligonucleotide

SEQ ID NO: 616238 - DNA, 51 bp, Artificial; identical to SEQ ID NO: 242458
  Synthetic oligonucleotide

SEQ ID NO: 616239 - DNA, 54 bp, Artificial; identical to SEQ ID NO: 233773
  Synthetic oligonucleotide

SEQ ID NO: 616240 - DNA, 56 bp, Artificial; identical to SEQ ID NO: 174957
  Synthetic oligonucleotide

SEQ ID NO: 616241 - DNA, 60 bp, Artificial; identical to SEQ ID NO: 194188
  Synthetic oligonucleotide

SEQ ID NO: 616242 - DNA, 54 bp, Artificial; identical to SEQ ID NO: 150920
  Synthetic oligonucleotide

SEQ ID NO: 616243 - DNA, 55 bp, Artificial; identical to SEQ ID NO: 153369
  Synthetic oligonucleotide

SEQ ID NO: 616244 - DNA, 53 bp, Artificial; identical to SEQ ID NO: 257057
  Synthetic oligonucleotide

SEQ ID NO: 616245 - DNA, 54 bp, Artificial; identical to SEQ ID NO: 142862
  Synthetic oligonucleotide

SEQ ID NO: 616246 - DNA, 54 bp, Artificial; identical to SEQ ID NO: 141210
  Synthetic oligonucleotide

SEQ ID NO: 616247 - DNA, 54 bp, Artificial; identical to SEQ ID NO: 150924
  Synthetic oligonucleotide

SEQ ID NO: 616248 - DNA, 58 bp, Artificial; identical to SEQ ID NO: 247297
  Synthetic oligonucleotide

SEQ ID NO: 616249 - DNA, 51 bp, Artificial; identical to SEQ ID NO: 186697
  Synthetic oligonucleotide

SEQ ID NO: 616250 - DNA, 52 bp, Artificial; identical to SEQ ID NO: 160523
  Synthetic oligonucleotide

SEQ ID NO: 616251 - DNA, 59 bp, Artificial; identical to SEQ ID NO: 238754
  Synthetic oligonucleotide

SEQ ID NO: 616252 - DNA, 51 bp, Artificial; identical to SEQ ID NO: 141341
  Synthetic oligonucleotide

SEQ ID NO: 616253 - DNA, 55 bp, Artificial; identical to SEQ ID NO: 181782
  Synthetic oligonucleotide

SEQ ID NO: 616254 - DNA, 55 bp, Artificial; identical to SEQ ID NO: 181787
  Synthetic oligonucleotide

SEQ ID NO: 616255 - DNA, 55 bp, Artificial; identical to SEQ ID NO: 208149
  Synthetic oligonucleotide

SEQ ID NO: 616256 - DNA, 53 bp, Artificial; identical to SEQ ID NO: 157466
  Synthetic oligonucleotide

SEQ ID NO: 616257 - DNA, 55 bp, Artificial; identical to SEQ ID NO: 181788
  Synthetic oligonucleotide

SEQ ID NO: 616258 - DNA, 55 bp, Artificial; identical to SEQ ID NO: 212845
  Synthetic oligonucleotide

SEQ ID NO: 616259 - DNA, 51 bp, Artificial; identical to SEQ ID NO: 216811
  Synthetic oligonucleotide

SEQ ID NO: 616260 - DNA, 53 bp, Artificial; identical to SEQ ID NO: 208723
  Synthetic oligonucleotide

SEQ ID NO: 616261 - DNA, 55 bp, Artificial; identical to SEQ ID NO: 240510
  Synthetic oligonucleotide

SEQ ID NO: 616262 - DNA, 55 bp, Artificial; identical to SEQ ID NO: 247300
  Synthetic oligonucleotide

SEQ ID NO: 616263 - DNA, 53 bp, Artificial; identical to SEQ ID NO: 207626
  Synthetic oligonucleotide

SEQ ID NO: 616264 - DNA, 55 bp, Artificial; identical to SEQ ID NO: 149020
  Synthetic oligonucleotide

SEQ ID NO: 616265 - DNA, 53 bp, Artificial; identical to SEQ ID NO: 254867
  Synthetic oligonucleotide

SEQ ID NO: 616266 - DNA, 52 bp, Artificial; identical to SEQ ID NO: 243243
  Synthetic oligonucleotide

SEQ ID NO: 616267 - DNA, 55 bp, Artificial; identical to SEQ ID NO: 171398
  Synthetic oligonucleotide

SEQ ID NO: 616268 - DNA, 55 bp, Artificial; identical to SEQ ID NO: 245744
  Synthetic oligonucleotide

SEQ ID NO: 616269 - DNA, 55 bp, Artificial; identical to SEQ ID NO: 164424
  Synthetic oligonucleotide

SEQ ID NO: 616270 - DNA, 55 bp, Artificial; identical to SEQ ID NO: 144446
  Synthetic oligonucleotide

SEQ ID NO: 616271 - DNA, 58 bp, Artificial; identical to SEQ ID NO: 162428
  Synthetic oligonucleotide

SEQ ID NO: 616272 - DNA, 58 bp, Artificial; identical to SEQ ID NO: 256411
  Synthetic oligonucleotide

SEQ ID NO: 616273 - DNA, 51 bp, Artificial; identical to SEQ ID NO: 200048
  Synthetic oligonucleotide

SEQ ID NO: 616274 - DNA, 56 bp, Artificial; identical to SEQ ID NO: 150820
  Synthetic oligonucleotide

SEQ ID NO: 616275 - DNA, 57 bp, Artificial; identical to SEQ ID NO: 237861
  Synthetic oligonucleotide

SEQ ID NO: 616276 - DNA, 59 bp, Artificial; identical to SEQ ID NO: 238752
  Synthetic oligonucleotide

SEQ ID NO: 616277 - DNA, 55 bp, Artificial; identical to SEQ ID NO: 202849
  Synthetic oligonucleotide

SEQ ID NO: 616278 - DNA, 58 bp, Artificial; identical to SEQ ID NO: 217161
  Synthetic oligonucleotide

SEQ ID NO: 616279 - DNA, 55 bp, Artificial; identical to SEQ ID NO: 207627
  Synthetic oligonucleotide

SEQ ID NO: 616280 - DNA, 54 bp, Artificial; identical to SEQ ID NO: 202433
  Synthetic oligonucleotide

SEQ ID NO: 616281 - DNA, 55 bp, Artificial; identical to SEQ ID NO: 198495
  Synthetic oligonucleotide

SEQ ID NO: 616282 - DNA, 55 bp, Artificial; identical to SEQ ID NO: 254868
  Synthetic oligonucleotide

SEQ ID NO: 616283 - DNA, 51 bp, Artificial; identical to SEQ ID NO: 246658
  Synthetic oligonucleotide

SEQ ID NO: 616284 - DNA, 52 bp, Artificial; identical to SEQ ID NO: 145041
  Synthetic oligonucleotide

SEQ ID NO: 616285 - DNA, 55 bp, Artificial; identical to SEQ ID NO: 197228
  Synthetic oligonucleotide

SEQ ID NO: 616286 - DNA, 54 bp, Artificial; identical to SEQ ID NO: 152023
  Synthetic oligonucleotide

SEQ ID NO: 616287 - DNA, 55 bp, Artificial; identical to SEQ ID NO: 245746
  Synthetic oligonucleotide

SEQ ID NO: 616288 - DNA, 55 bp, Artificial; identical to SEQ ID NO: 217573
  Synthetic oligonucleotide

SEQ ID NO: 616289 - DNA, 54 bp, Artificial; identical to SEQ ID NO: 197461
  Synthetic oligonucleotide

SEQ ID NO: 616290 - DNA, 55 bp, Artificial; identical to SEQ ID NO: 225186
  Synthetic oligonucleotide

SEQ ID NO: 616291 - DNA, 57 bp, Artificial; identical to SEQ ID NO: 152088
  Synthetic oligonucleotide

SEQ ID NO: 616292 - DNA, 60 bp, Artificial; identical to SEQ ID NO: 217160
  Synthetic oligonucleotide

SEQ ID NO: 616293 - DNA, 55 bp, Artificial; identical to SEQ ID NO: 209346
  Synthetic oligonucleotide

SEQ ID NO: 616294 - DNA, 52 bp, Artificial; identical to SEQ ID NO: 186181
  Synthetic oligonucleotide

SEQ ID NO: 616295 - DNA, 56 bp, Artificial; identical to SEQ ID NO: 256414
  Synthetic oligonucleotide

SEQ ID NO: 616296 - DNA, 52 bp, Artificial; identical to SEQ ID NO: 255450
  Synthetic oligonucleotide

SEQ ID NO: 616297 - DNA, 54 bp, Artificial; identical to SEQ ID NO: 164717
  Synthetic oligonucleotide

SEQ ID NO: 616298 - DNA, 55 bp, Artificial; identical to SEQ ID NO: 162433
  Synthetic oligonucleotide

SEQ ID NO: 616299 - DNA, 54 bp, Artificial; identical to SEQ ID NO: 242504
  Synthetic oligonucleotide

SEQ ID NO: 616300 - DNA, 50 bp, Artificial; identical to SEQ ID NO: 192192
  Synthetic oligonucleotide

SEQ ID NO: 616301 - DNA, 59 bp, Artificial; identical to SEQ ID NO: 256541
  Synthetic oligonucleotide

SEQ ID NO: 616302 - DNA, 54 bp, Artificial; identical to SEQ ID NO: 162189
  Synthetic oligonucleotide

SEQ ID NO: 616303 - DNA, 52 bp, Artificial; identical to SEQ ID NO: 152469
  Synthetic oligonucleotide

SEQ ID NO: 616304 - DNA, 57 bp, Artificial; identical to SEQ ID NO: 170879
  Synthetic oligonucleotide

SEQ ID NO: 616305 - DNA, 59 bp, Artificial; identical to SEQ ID NO: 190575
  Synthetic oligonucleotide

SEQ ID NO: 616306 - DNA, 55 bp, Artificial; identical to SEQ ID NO: 198499
  Synthetic oligonucleotide

SEQ ID NO: 616307 - DNA, 50 bp, Artificial; identical to SEQ ID NO: 186988
  Synthetic oligonucleotide

SEQ ID NO: 616308 - DNA, 55 bp, Artificial; identical to SEQ ID NO: 181802
  Synthetic oligonucleotide

SEQ ID NO: 616309 - DNA, 55 bp, Artificial; identical to SEQ ID NO: 197229
  Synthetic oligonucleotide

SEQ ID NO: 616310 - DNA, 53 bp, Artificial; identical to SEQ ID NO: 211351
  Synthetic oligonucleotide

SEQ ID NO: 616311 - DNA, 55 bp, Artificial; identical to SEQ ID NO: 203613
  Synthetic oligonucleotide

SEQ ID NO: 616312 - DNA, 51 bp, Artificial; identical to SEQ ID NO: 238747
  Synthetic oligonucleotide

SEQ ID NO: 616313 - DNA, 52 bp, Artificial; identical to SEQ ID NO: 261835
  Synthetic oligonucleotide

SEQ ID NO: 616314 - DNA, 55 bp, Artificial; identical to SEQ ID NO: 198502
  Synthetic oligonucleotide

SEQ ID NO: 616315 - DNA, 60 bp, Artificial; identical to SEQ ID NO: 170902
  Synthetic oligonucleotide

SEQ ID NO: 616316 - DNA, 53 bp, Artificial; identical to SEQ ID NO: 185795
  Synthetic oligonucleotide

SEQ ID NO: 616317 - DNA, 55 bp, Artificial; identical to SEQ ID NO: 142163
  Synthetic oligonucleotide

SEQ ID NO: 616318 - DNA, 51 bp, Artificial; identical to SEQ ID NO: 193803
  Synthetic oligonucleotide

SEQ ID NO: 616319 - DNA, 54 bp, Artificial; identical to SEQ ID NO: 196262
  Synthetic oligonucleotide

SEQ ID NO: 616320 - DNA, 52 bp, Artificial; identical to SEQ ID NO: 168969
  Synthetic oligonucleotide

SEQ ID NO: 616321 - DNA, 55 bp, Artificial; identical to SEQ ID NO: 249595
  Synthetic oligonucleotide

SEQ ID NO: 616322 - DNA, 55 bp, Artificial; identical to SEQ ID NO: 201892
  Synthetic oligonucleotide

SEQ ID NO: 616323 - DNA, 53 bp, Artificial; identical to SEQ ID NO: 246235
  Synthetic oligonucleotide

SEQ ID NO: 616324 - DNA, 53 bp, Artificial; identical to SEQ ID NO: 199799
  Synthetic oligonucleotide

SEQ ID NO: 616325 - DNA, 54 bp, Artificial; identical to SEQ ID NO: 194186
  Synthetic oligonucleotide

SEQ ID NO: 616326 - DNA, 55 bp, Artificial; identical to SEQ ID NO: 208647
  Synthetic oligonucleotide

SEQ ID NO: 616327 - DNA, 52 bp, Artificial; identical to SEQ ID NO: 160524
  Synthetic oligonucleotide

SEQ ID NO: 616328 - DNA, 48 bp, Artificial; identical to SEQ ID NO: 200895
  Synthetic oligonucleotide

SEQ ID NO: 616329 - DNA, 53 bp, Artificial; identical to SEQ ID NO: 242544
  Synthetic oligonucleotide

SEQ ID NO: 616330 - DNA, 54 bp, Artificial; identical to SEQ ID NO: 156958
  Synthetic oligonucleotide

SEQ ID NO: 616331 - DNA, 54 bp, Artificial; identical to SEQ ID NO: 247252
  Synthetic oligonucleotide

SEQ ID NO: 616332 - DNA, 60 bp, Artificial; identical to SEQ ID NO: 238744
  Synthetic oligonucleotide

SEQ ID NO: 616333 - DNA, 53 bp, Artificial; identical to SEQ ID NO: 211564
  Synthetic oligonucleotide

SEQ ID NO: 616334 - DNA, 56 bp, Artificial; identical to SEQ ID NO: 178541
  Synthetic oligonucleotide

SEQ ID NO: 616335 - DNA, 55 bp, Artificial; identical to SEQ ID NO: 201515
  Synthetic oligonucleotide

SEQ ID NO: 616336 - DNA, 50 bp, Artificial; identical to SEQ ID NO: 246870
  Synthetic oligonucleotide

SEQ ID NO: 616337 - DNA, 55 bp, Artificial; identical to SEQ ID NO: 224917
  Synthetic oligonucleotide

SEQ ID NO: 616338 - DNA, 51 bp, Artificial; identical to SEQ ID NO: 174963
  Synthetic oligonucleotide

SEQ ID NO: 616339 - DNA, 51 bp, Artificial; identical to SEQ ID NO: 246673
  Synthetic oligonucleotide

SEQ ID NO: 616340 - DNA, 54 bp, Artificial; identical to SEQ ID NO: 142725
  Synthetic oligonucleotide

SEQ ID NO: 616341 - DNA, 58 bp, Artificial; identical to SEQ ID NO: 144729
  Synthetic oligonucleotide

SEQ ID NO: 616342 - DNA, 54 bp, Artificial; identical to SEQ ID NO: 244310
  Synthetic oligonucleotide

SEQ ID NO: 616343 - DNA, 60 bp, Artificial; identical to SEQ ID NO: 200894
  Synthetic oligonucleotide

SEQ ID NO: 616344 - DNA, 50 bp, Artificial; identical to SEQ ID NO: 150076
  Synthetic oligonucleotide

SEQ ID NO: 616345 - DNA, 50 bp, Artificial; identical to SEQ ID NO: 233894
  Synthetic oligonucleotide

SEQ ID NO: 616346 - DNA, 56 bp, Artificial; identical to SEQ ID NO: 212422
  Synthetic oligonucleotide

SEQ ID NO: 616347 - DNA, 52 bp, Artificial; identical to SEQ ID NO: 243902
  Synthetic oligonucleotide

SEQ ID NO: 616348 - DNA, 59 bp, Artificial; identical to SEQ ID NO: 257476
  Synthetic oligonucleotide

SEQ ID NO: 616349 - DNA, 55 bp, Artificial; identical to SEQ ID NO: 156955
  Synthetic oligonucleotide

SEQ ID NO: 616350 - DNA, 57 bp, Artificial; identical to SEQ ID NO: 201206
  Synthetic oligonucleotide

SEQ ID NO: 616351 - DNA, 56 bp, Artificial; identical to SEQ ID NO: 200890
  Synthetic oligonucleotide

SEQ ID NO: 616352 - DNA, 48 bp, Artificial; identical to SEQ ID NO: 208487
  Synthetic oligonucleotide

SEQ ID NO: 616353 - DNA, 52 bp, Artificial; identical to SEQ ID NO: 165078
  Synthetic oligonucleotide

SEQ ID NO: 616354 - DNA, 53 bp, Artificial; identical to SEQ ID NO: 171355
  Synthetic oligonucleotide

SEQ ID NO: 616355 - DNA, 55 bp, Artificial; identical to SEQ ID NO: 249245
  Synthetic oligonucleotide

SEQ ID NO: 616356 - DNA, 52 bp, Artificial; identical to SEQ ID NO: 200889
  Synthetic oligonucleotide

SEQ ID NO: 616357 - DNA, 58 bp, Artificial; identical to SEQ ID NO: 178501
  Synthetic oligonucleotide

SEQ ID NO: 616358 - DNA, 57 bp, Artificial; identical to SEQ ID NO: 162439
  Synthetic oligonucleotide

SEQ ID NO: 616359 - DNA, 55 bp, Artificial; identical to SEQ ID NO: 150831
  Synthetic oligonucleotide

SEQ ID NO: 616360 - DNA, 55 bp, Artificial; identical to SEQ ID NO: 181770
  Synthetic oligonucleotide

SEQ ID NO: 616361 - DNA, 55 bp, Artificial; identical to SEQ ID NO: 178507
  Synthetic oligonucleotide

SEQ ID NO: 616362 - DNA, 53 bp, Artificial; identical to SEQ ID NO: 141240
  Synthetic oligonucleotide

SEQ ID NO: 616363 - DNA, 55 bp, Artificial; identical to SEQ ID NO: 224299
  Synthetic oligonucleotide

SEQ ID NO: 616364 - DNA, 51 bp, Artificial; identical to SEQ ID NO: 157806
  Synthetic oligonucleotide

SEQ ID NO: 616365 - DNA, 50 bp, Artificial; identical to SEQ ID NO: 255953
  Synthetic oligonucleotide

SEQ ID NO: 616366 - DNA, 50 bp, Artificial; identical to SEQ ID NO: 238740
  Synthetic oligonucleotide

SEQ ID NO: 616367 - DNA, 59 bp, Artificial; identical to SEQ ID NO: 150796
  Synthetic oligonucleotide

SEQ ID NO: 616368 - DNA, 52 bp, Artificial; identical to SEQ ID NO: 202438
  Synthetic oligonucleotide

SEQ ID NO: 616369 - DNA, 55 bp, Artificial; identical to SEQ ID NO: 141871
  Synthetic oligonucleotide

SEQ ID NO: 616370 - DNA, 55 bp, Artificial; identical to SEQ ID NO: 156953
  Synthetic oligonucleotide

SEQ ID NO: 616371 - DNA, 52 bp, Artificial; identical to SEQ ID NO: 181778
  Synthetic oligonucleotide

SEQ ID NO: 616372 - DNA, 55 bp, Artificial; identical to SEQ ID NO: 224918
  Synthetic oligonucleotide

SEQ ID NO: 616373 - DNA, 55 bp, Artificial; identical to SEQ ID NO: 161269
  Synthetic oligonucleotide

SEQ ID NO: 616374 - DNA, 56 bp, Artificial; identical to SEQ ID NO: 178509
  Synthetic oligonucleotide

SEQ ID NO: 616375 - DNA, 55 bp, Artificial; identical to SEQ ID NO: 224919
  Synthetic oligonucleotide

SEQ ID NO: 616376 - DNA, 51 bp, Artificial; identical to SEQ ID NO: 258205
  Synthetic oligonucleotide

SEQ ID NO: 616377 - DNA, 52 bp, Artificial; identical to SEQ ID NO: 224350
  Synthetic oligonucleotide

SEQ ID NO: 616378 - DNA, 56 bp, Artificial; identical to SEQ ID NO: 201980
  Synthetic oligonucleotide

SEQ ID NO: 616379 - DNA, 58 bp, Artificial; identical to SEQ ID NO: 256418
  Synthetic oligonucleotide

SEQ ID NO: 616380 - DNA, 55 bp, Artificial; identical to SEQ ID NO: 257641
  Synthetic oligonucleotide

SEQ ID NO: 616381 - DNA, 50 bp, Artificial; identical to SEQ ID NO: 142515
  Synthetic oligonucleotide

SEQ ID NO: 616382 - DNA, 55 bp, Artificial; identical to SEQ ID NO: 211240
  Synthetic oligonucleotide

SEQ ID NO: 616383 - DNA, 51 bp, Artificial; identical to SEQ ID NO: 165221
  Synthetic oligonucleotide

SEQ ID NO: 616384 - DNA, 55 bp, Artificial; identical to SEQ ID NO: 160796
  Synthetic oligonucleotide

SEQ ID NO: 616385 - DNA, 55 bp, Artificial; identical to SEQ ID NO: 168769
  Synthetic oligonucleotide

SEQ ID NO: 616386 - DNA, 55 bp, Artificial; identical to SEQ ID NO: 156952
  Synthetic oligonucleotide

SEQ ID NO: 616387 - DNA, 54 bp, Artificial; identical to SEQ ID NO: 223505
  Synthetic oligonucleotide

SEQ ID NO: 616388 - DNA, 53 bp, Artificial; identical to SEQ ID NO: 246252
  Synthetic oligonucleotide

SEQ ID NO: 616389 - DNA, 55 bp, Artificial; identical to SEQ ID NO: 257662
  Synthetic oligonucleotide

SEQ ID NO: 616390 - DNA, 54 bp, Artificial; identical to SEQ ID NO: 247817
  Synthetic oligonucleotide

SEQ ID NO: 616391 - DNA, 55 bp, Artificial; identical to SEQ ID NO: 171099
  Synthetic oligonucleotide

SEQ ID NO: 616392 - DNA, 50 bp, Artificial; identical to SEQ ID NO: 204094
  Synthetic oligonucleotide

SEQ ID NO: 616393 - DNA, 55 bp, Artificial; identical to SEQ ID NO: 249281
  Synthetic oligonucleotide

SEQ ID NO: 616394 - DNA, 51 bp, Artificial; identical to SEQ ID NO: 178576
  Synthetic oligonucleotide

SEQ ID NO: 616395 - DNA, 50 bp, Artificial; identical to SEQ ID NO: 200440
  Synthetic oligonucleotide

SEQ ID NO: 616396 - DNA, 53 bp, Artificial; identical to SEQ ID NO: 157156
  Synthetic oligonucleotide

SEQ ID NO: 616397 - DNA, 55 bp, Artificial; identical to SEQ ID NO: 224921
  Synthetic oligonucleotide

SEQ ID NO: 616398 - DNA, 55 bp, Artificial; identical to SEQ ID NO: 153318
  Synthetic oligonucleotide

SEQ ID NO: 616399 - DNA, 53 bp, Artificial; identical to SEQ ID NO: 164948
  Synthetic oligonucleotide

SEQ ID NO: 616400 - DNA, 55 bp, Artificial; identical to SEQ ID NO: 257474
  Synthetic oligonucleotide

SEQ ID NO: 616401 - DNA, 56 bp, Artificial; identical to SEQ ID NO: 180053
  Synthetic oligonucleotide

SEQ ID NO: 616402 - DNA, 52 bp, Artificial; identical to SEQ ID NO: 149602
  Synthetic oligonucleotide

SEQ ID NO: 616403 - DNA, 55 bp, Artificial; identical to SEQ ID NO: 148418
  Synthetic oligonucleotide

SEQ ID NO: 616404 - DNA, 55 bp, Artificial; identical to SEQ ID NO: 182021
  Synthetic oligonucleotide

SEQ ID NO: 616405 - DNA, 54 bp, Artificial; identical to SEQ ID NO: 255121
  Synthetic oligonucleotide

SEQ ID NO: 616406 - DNA, 55 bp, Artificial; identical to SEQ ID NO: 224926
  Synthetic oligonucleotide

SEQ ID NO: 616407 - DNA, 51 bp, Artificial; identical to SEQ ID NO: 165226
  Synthetic oligonucleotide

SEQ ID NO: 616408 - DNA, 51 bp, Artificial; identical to SEQ ID NO: 206504
  Synthetic oligonucleotide

SEQ ID NO: 616409 - DNA, 54 bp, Artificial; identical to SEQ ID NO: 166087
  Synthetic oligonucleotide

SEQ ID NO: 616410 - DNA, 60 bp, Artificial; identical to SEQ ID NO: 141873
  Synthetic oligonucleotide

SEQ ID NO: 616411 - DNA, 55 bp, Artificial; identical to SEQ ID NO: 146289
  Synthetic oligonucleotide

SEQ ID NO: 616412 - DNA, 49 bp, Artificial; identical to SEQ ID NO: 144867
  Synthetic oligonucleotide

SEQ ID NO: 616413 - DNA, 55 bp, Artificial; identical to SEQ ID NO: 224928
  Synthetic oligonucleotide

SEQ ID NO: 616414 - DNA, 50 bp, Artificial; identical to SEQ ID NO: 158445
  Synthetic oligonucleotide

SEQ ID NO: 616415 - DNA, 54 bp, Artificial; identical to SEQ ID NO: 257473
  Synthetic oligonucleotide

SEQ ID NO: 616416 - DNA, 51 bp, Artificial; identical to SEQ ID NO: 189678
  Synthetic oligonucleotide

SEQ ID NO: 616417 - DNA, 55 bp, Artificial; identical to SEQ ID NO: 165678
  Synthetic oligonucleotide

SEQ ID NO: 616418 - DNA, 55 bp, Artificial; identical to SEQ ID NO: 201894
  Synthetic oligonucleotide

SEQ ID NO: 616419 - DNA, 52 bp, Artificial; identical to SEQ ID NO: 153633
  Synthetic oligonucleotide

SEQ ID NO: 616420 - DNA, 55 bp, Artificial; identical to SEQ ID NO: 168815
  Synthetic oligonucleotide

SEQ ID NO: 616421 - DNA, 55 bp, Artificial; identical to SEQ ID NO: 146290
  Synthetic oligonucleotide

SEQ ID NO: 616422 - DNA, 53 bp, Artificial; identical to SEQ ID NO: 185697
  Synthetic oligonucleotide

SEQ ID NO: 616423 - DNA, 55 bp, Artificial; identical to SEQ ID NO: 157017
  Synthetic oligonucleotide

SEQ ID NO: 616424 - DNA, 52 bp, Artificial; identical to SEQ ID NO: 186173
  Synthetic oligonucleotide

SEQ ID NO: 616425 - DNA, 54 bp, Artificial; identical to SEQ ID NO: 194181
  Synthetic oligonucleotide

SEQ ID NO: 616426 - DNA, 51 bp, Artificial; identical to SEQ ID NO: 186640
  Synthetic oligonucleotide

SEQ ID NO: 616427 - DNA, 58 bp, Artificial; identical to SEQ ID NO: 179670
  Synthetic oligonucleotide

SEQ ID NO: 616428 - DNA, 60 bp, Artificial; identical to SEQ ID NO: 203305
  Synthetic oligonucleotide

SEQ ID NO: 616429 - DNA, 51 bp, Artificial; identical to SEQ ID NO: 157728
  Synthetic oligonucleotide

SEQ ID NO: 616430 - DNA, 57 bp, Artificial; identical to SEQ ID NO: 203063
  Synthetic oligonucleotide

SEQ ID NO: 616431 - DNA, 51 bp, Artificial; identical to SEQ ID NO: 161374
  Synthetic oligonucleotide

SEQ ID NO: 616432 - DNA, 58 bp, Artificial; identical to SEQ ID NO: 200884
  Synthetic oligonucleotide

SEQ ID NO: 616433 - DNA, 58 bp, Artificial; identical to SEQ ID NO: 187264
  Synthetic oligonucleotide

SEQ ID NO: 616434 - DNA, 58 bp, Artificial; identical to SEQ ID NO: 207027
  Synthetic oligonucleotide

SEQ ID NO: 616435 - DNA, 52 bp, Artificial; identical to SEQ ID NO: 221465
  Synthetic oligonucleotide

SEQ ID NO: 616436 - DNA, 57 bp, Artificial; identical to SEQ ID NO: 178545
  Synthetic oligonucleotide

SEQ ID NO: 616437 - DNA, 55 bp, Artificial; identical to SEQ ID NO: 240535
  Synthetic oligonucleotide

SEQ ID NO: 616438 - DNA, 53 bp, Artificial; identical to SEQ ID NO: 212842
  Synthetic oligonucleotide

SEQ ID NO: 616439 - DNA, 60 bp, Artificial; identical to SEQ ID NO: 210794
  Synthetic oligonucleotide

SEQ ID NO: 616440 - DNA, 51 bp, Artificial; identical to SEQ ID NO: 186177
  Synthetic oligonucleotide

SEQ ID NO: 616441 - DNA, 55 bp, Artificial; identical to SEQ ID NO: 148424
  Synthetic oligonucleotide

SEQ ID NO: 616442 - DNA, 50 bp, Artificial; identical to SEQ ID NO: 255879
  Synthetic oligonucleotide

SEQ ID NO: 616443 - DNA, 52 bp, Artificial; identical to SEQ ID NO: 186178
  Synthetic oligonucleotide

SEQ ID NO: 616444 - DNA, 55 bp, Artificial; identical to SEQ ID NO: 245824
  Synthetic oligonucleotide

SEQ ID NO: 616445 - DNA, 50 bp, Artificial; identical to SEQ ID NO: 200499
  Synthetic oligonucleotide

SEQ ID NO: 616446 - DNA, 57 bp, Artificial; identical to SEQ ID NO: 179789
  Synthetic oligonucleotide

SEQ ID NO: 616447 - DNA, 58 bp, Artificial; identical to SEQ ID NO: 179665
  Synthetic oligonucleotide

SEQ ID NO: 616448 - DNA, 54 bp, Artificial; identical to SEQ ID NO: 243034
  Synthetic oligonucleotide

SEQ ID NO: 616449 - DNA, 55 bp, Artificial; identical to SEQ ID NO: 142194
  Synthetic oligonucleotide

SEQ ID NO: 616450 - DNA, 50 bp, Artificial; identical to SEQ ID NO: 216962
  Synthetic oligonucleotide

SEQ ID NO: 616451 - DNA, 50 bp, Artificial; identical to SEQ ID NO: 150810
  Synthetic oligonucleotide

SEQ ID NO: 616452 - DNA, 55 bp, Artificial; identical to SEQ ID NO: 259522
  Synthetic oligonucleotide

SEQ ID NO: 616453 - DNA, 50 bp, Artificial; identical to SEQ ID NO: 150090
  Synthetic oligonucleotide

SEQ ID NO: 616454 - DNA, 52 bp, Artificial; identical to SEQ ID NO: 203935
  Synthetic oligonucleotide

SEQ ID NO: 616455 - DNA, 52 bp, Artificial; identical to SEQ ID NO: 144730
  Synthetic oligonucleotide

SEQ ID NO: 616456 - DNA, 55 bp, Artificial; identical to SEQ ID NO: 244289
  Synthetic oligonucleotide

SEQ ID NO: 616457 - DNA, 60 bp, Artificial; identical to SEQ ID NO: 154214
  Synthetic oligonucleotide

SEQ ID NO: 616458 - DNA, 56 bp, Artificial; identical to SEQ ID NO: 201897
  Synthetic oligonucleotide

SEQ ID NO: 616459 - DNA, 55 bp, Artificial; identical to SEQ ID NO: 151762
  Synthetic oligonucleotide

SEQ ID NO: 616460 - DNA, 53 bp, Artificial; identical to SEQ ID NO: 157463
  Synthetic oligonucleotide

SEQ ID NO: 616461 - DNA, 60 bp, Artificial; identical to SEQ ID NO: 150858
  Synthetic oligonucleotide

SEQ ID NO: 616462 - DNA, 55 bp, Artificial; identical to SEQ ID NO: 181987
  Synthetic oligonucleotide

SEQ ID NO: 616463 - DNA, 52 bp, Artificial; identical to SEQ ID NO: 237868
  Synthetic oligonucleotide

SEQ ID NO: 616464 - DNA, 54 bp, Artificial; identical to SEQ ID NO: 190682
  Synthetic oligonucleotide

SEQ ID NO: 616465 - DNA, 55 bp, Artificial; identical to SEQ ID NO: 164421
  Synthetic oligonucleotide

SEQ ID NO: 616466 - DNA, 54 bp, Artificial; identical to SEQ ID NO: 249436
  Synthetic oligonucleotide

SEQ ID NO: 616467 - DNA, 55 bp, Artificial; identical to SEQ ID NO: 164420
  Synthetic oligonucleotide

SEQ ID NO: 616468 - DNA, 56 bp, Artificial; identical to SEQ ID NO: 239218
  Synthetic oligonucleotide

SEQ ID NO: 616469 - DNA, 50 bp, Artificial; identical to SEQ ID NO: 172841
  Synthetic oligonucleotide

SEQ ID NO: 616470 - DNA, 53 bp, Artificial; identical to SEQ ID NO: 171000
  Synthetic oligonucleotide

SEQ ID NO: 616471 - DNA, 53 bp, Artificial; identical to SEQ ID NO: 196164
  Synthetic oligonucleotide

SEQ ID NO: 616472 - DNA, 55 bp, Artificial; identical to SEQ ID NO: 198460
  Synthetic oligonucleotide

SEQ ID NO: 616473 - DNA, 54 bp, Artificial; identical to SEQ ID NO: 237867
  Synthetic oligonucleotide

SEQ ID NO: 616474 - DNA, 55 bp, Artificial; identical to SEQ ID NO: 255122
  Synthetic oligonucleotide

SEQ ID NO: 616475 - DNA, 55 bp, Artificial; identical to SEQ ID NO: 243896
  Synthetic oligonucleotide

SEQ ID NO: 616476 - DNA, 55 bp, Artificial; identical to SEQ ID NO: 144448
  Synthetic oligonucleotide

SEQ ID NO: 616477 - DNA, 50 bp, Artificial; identical to SEQ ID NO: 141392
  Synthetic oligonucleotide

SEQ ID NO: 616478 - DNA, 52 bp, Artificial; identical to SEQ ID NO: 203010
  Synthetic oligonucleotide

SEQ ID NO: 616479 - DNA, 59 bp, Artificial; identical to SEQ ID NO: 178563
  Synthetic oligonucleotide

SEQ ID NO: 616480 - DNA, 56 bp, Artificial; identical to SEQ ID NO: 180041
  Synthetic oligonucleotide

SEQ ID NO: 616481 - DNA, 51 bp, Artificial; identical to SEQ ID NO: 157782
  Synthetic oligonucleotide

SEQ ID NO: 616482 - DNA, 54 bp, Artificial; identical to SEQ ID NO: 223512
  Synthetic oligonucleotide

SEQ ID NO: 616483 - DNA, 55 bp, Artificial; identical to SEQ ID NO: 164419
  Synthetic oligonucleotide

SEQ ID NO: 616484 - DNA, 56 bp, Artificial; identical to SEQ ID NO: 179737
  Synthetic oligonucleotide

SEQ ID NO: 616485 - DNA, 54 bp, Artificial; identical to SEQ ID NO: 266050
  Synthetic oligonucleotide

SEQ ID NO: 616486 - DNA, 52 bp, Artificial; identical to SEQ ID NO: 157658
  Synthetic oligonucleotide

SEQ ID NO: 616487 - DNA, 59 bp, Artificial; identical to SEQ ID NO: 141890
  Synthetic oligonucleotide

SEQ ID NO: 616488 - DNA, 60 bp, Artificial; identical to SEQ ID NO: 238895
  Synthetic oligonucleotide

SEQ ID NO: 616489 - DNA, 50 bp, Artificial; identical to SEQ ID NO: 158486
  Synthetic oligonucleotide

SEQ ID NO: 616490 - DNA, 56 bp, Artificial; identical to SEQ ID NO: 178406
  Synthetic oligonucleotide

SEQ ID NO: 616491 - DNA, 52 bp, Artificial; identical to SEQ ID NO: 236478
  Synthetic oligonucleotide

SEQ ID NO: 616492 - DNA, 56 bp, Artificial; identical to SEQ ID NO: 200913
  Synthetic oligonucleotide

SEQ ID NO: 616493 - DNA, 60 bp, Artificial; identical to SEQ ID NO: 257472
  Synthetic oligonucleotide

SEQ ID NO: 616494 - DNA, 55 bp, Artificial; identical to SEQ ID NO: 154424
  Synthetic oligonucleotide

SEQ ID NO: 616495 - DNA, 60 bp, Artificial; identical to SEQ ID NO: 150860
  Synthetic oligonucleotide

SEQ ID NO: 616496 - DNA, 55 bp, Artificial; identical to SEQ ID NO: 160797
  Synthetic oligonucleotide

SEQ ID NO: 616497 - DNA, 51 bp, Artificial; identical to SEQ ID NO: 248518
  Synthetic oligonucleotide

SEQ ID NO: 616498 - DNA, 55 bp, Artificial; identical to SEQ ID NO: 148381
  Synthetic oligonucleotide

SEQ ID NO: 616499 - DNA, 54 bp, Artificial; identical to SEQ ID NO: 238579
  Synthetic oligonucleotide

SEQ ID NO: 616500 - DNA, 60 bp, Artificial; identical to SEQ ID NO: 243894
  Synthetic oligonucleotide

SEQ ID NO: 616501 - DNA, 56 bp, Artificial; identical to SEQ ID NO: 178414
  Synthetic oligonucleotide

SEQ ID NO: 616502 - DNA, 51 bp, Artificial; identical to SEQ ID NO: 215231
  Synthetic oligonucleotide

SEQ ID NO: 616503 - DNA, 50 bp, Artificial; identical to SEQ ID NO: 210428
  Synthetic oligonucleotide

SEQ ID NO: 616504 - DNA, 55 bp, Artificial; identical to SEQ ID NO: 168817
  Synthetic oligonucleotide

SEQ ID NO: 616505 - DNA, 55 bp, Artificial; identical to SEQ ID NO: 187936
  Synthetic oligonucleotide

SEQ ID NO: 616506 - DNA, 56 bp, Artificial; identical to SEQ ID NO: 152923
  Synthetic oligonucleotide

SEQ ID NO: 616507 - DNA, 53 bp, Artificial; identical to SEQ ID NO: 164418
  Synthetic oligonucleotide

SEQ ID NO: 616508 - DNA, 53 bp, Artificial; identical to SEQ ID NO: 199551
  Synthetic oligonucleotide

SEQ ID NO: 616509 - DNA, 55 bp, Artificial; identical to SEQ ID NO: 174693
  Synthetic oligonucleotide

SEQ ID NO: 616510 - DNA, 55 bp, Artificial; identical to SEQ ID NO: 245830
  Synthetic oligonucleotide

SEQ ID NO: 616511 - DNA, 58 bp, Artificial; identical to SEQ ID NO: 179437
  Synthetic oligonucleotide

SEQ ID NO: 616512 - DNA, 52 bp, Artificial; identical to SEQ ID NO: 149600
  Synthetic oligonucleotide

SEQ ID NO: 616513 - DNA, 60 bp, Artificial; identical to SEQ ID NO: 224145
  Synthetic oligonucleotide

SEQ ID NO: 616514 - DNA, 52 bp, Artificial; identical to SEQ ID NO: 151765
  Synthetic oligonucleotide

SEQ ID NO: 616515 - DNA, 55 bp, Artificial; identical to SEQ ID NO: 182003
  Synthetic oligonucleotide

SEQ ID NO: 616516 - DNA, 55 bp, Artificial; identical to SEQ ID NO: 203395
  Synthetic oligonucleotide

SEQ ID NO: 616517 - DNA, 60 bp, Artificial; identical to SEQ ID NO: 222851
  Synthetic oligonucleotide

SEQ ID NO: 616518 - DNA, 55 bp, Artificial; identical to SEQ ID NO: 215154
  Synthetic oligonucleotide

SEQ ID NO: 616519 - DNA, 53 bp, Artificial; identical to SEQ ID NO: 170086
  Synthetic oligonucleotide

SEQ ID NO: 616520 - DNA, 55 bp, Artificial; identical to SEQ ID NO: 205477
  Synthetic oligonucleotide

SEQ ID NO: 616521 - DNA, 55 bp, Artificial; identical to SEQ ID NO: 245838
  Synthetic oligonucleotide

SEQ ID NO: 616522 - DNA, 59 bp, Artificial; identical to SEQ ID NO: 159913
  Synthetic oligonucleotide

SEQ ID NO: 616523 - DNA, 54 bp, Artificial; identical to SEQ ID NO: 249648
  Synthetic oligonucleotide

SEQ ID NO: 616524 - DNA, 54 bp, Artificial; identical to SEQ ID NO: 182057
  Synthetic oligonucleotide

SEQ ID NO: 616525 - DNA, 57 bp, Artificial; identical to SEQ ID NO: 150836
  Synthetic oligonucleotide

SEQ ID NO: 616526 - DNA, 57 bp, Artificial; identical to SEQ ID NO: 152926
  Synthetic oligonucleotide

SEQ ID NO: 616527 - DNA, 53 bp, Artificial; identical to SEQ ID NO: 148464
  Synthetic oligonucleotide

SEQ ID NO: 616528 - DNA, 52 bp, Artificial; identical to SEQ ID NO: 199942
  Synthetic oligonucleotide

SEQ ID NO: 616529 - DNA, 60 bp, Artificial; identical to SEQ ID NO: 178378
  Synthetic oligonucleotide

SEQ ID NO: 616530 - DNA, 55 bp, Artificial; identical to SEQ ID NO: 198469
  Synthetic oligonucleotide

SEQ ID NO: 616531 - DNA, 51 bp, Artificial; identical to SEQ ID NO: 211259
  Synthetic oligonucleotide

SEQ ID NO: 616532 - DNA, 51 bp, Artificial; identical to SEQ ID NO: 178380
  Synthetic oligonucleotide

SEQ ID NO: 616533 - DNA, 53 bp, Artificial; identical to SEQ ID NO: 243900
  Synthetic oligonucleotide

SEQ ID NO: 616534 - DNA, 56 bp, Artificial; identical to SEQ ID NO: 178382
  Synthetic oligonucleotide

SEQ ID NO: 616535 - DNA, 55 bp, Artificial; identical to SEQ ID NO: 148465
  Synthetic oligonucleotide

SEQ ID NO: 616536 - DNA, 55 bp, Artificial; identical to SEQ ID NO: 182061
  Synthetic oligonucleotide

SEQ ID NO: 616537 - DNA, 53 bp, Artificial; identical to SEQ ID NO: 199640
  Synthetic oligonucleotide

SEQ ID NO: 616538 - DNA, 51 bp, Artificial; identical to SEQ ID NO: 206499
  Synthetic oligonucleotide

SEQ ID NO: 616539 - DNA, 52 bp, Artificial; identical to SEQ ID NO: 200907
  Synthetic oligonucleotide

SEQ ID NO: 616540 - DNA, 54 bp, Artificial; identical to SEQ ID NO: 199628
  Synthetic oligonucleotide

SEQ ID NO: 616541 - DNA, 55 bp, Artificial; identical to SEQ ID NO: 148486
  Synthetic oligonucleotide

SEQ ID NO: 616542 - DNA, 50 bp, Artificial; identical to SEQ ID NO: 246852
  Synthetic oligonucleotide

SEQ ID NO: 616543 - DNA, 51 bp, Artificial; identical to SEQ ID NO: 187024
  Synthetic oligonucleotide

SEQ ID NO: 616544 - DNA, 54 bp, Artificial; identical to SEQ ID NO: 149221
  Synthetic oligonucleotide

SEQ ID NO: 616545 - DNA, 60 bp, Artificial; identical to SEQ ID NO: 238889
  Synthetic oligonucleotide

SEQ ID NO: 616546 - DNA, 60 bp, Artificial; identical to SEQ ID NO: 238888
  Synthetic oligonucleotide

SEQ ID NO: 616547 - DNA, 57 bp, Artificial; identical to SEQ ID NO: 144322
  Synthetic oligonucleotide

SEQ ID NO: 616548 - DNA, 52 bp, Artificial; identical to SEQ ID NO: 247581
  Synthetic oligonucleotide

SEQ ID NO: 616549 - DNA, 55 bp, Artificial; identical to SEQ ID NO: 234431
  Synthetic oligonucleotide

SEQ ID NO: 616550 - DNA, 55 bp, Artificial; identical to SEQ ID NO: 245786
  Synthetic oligonucleotide

SEQ ID NO: 616551 - DNA, 57 bp, Artificial; identical to SEQ ID NO: 179754
  Synthetic oligonucleotide

SEQ ID NO: 616552 - DNA, 50 bp, Artificial; identical to SEQ ID NO: 203437
  Synthetic oligonucleotide

SEQ ID NO: 616553 - DNA, 59 bp, Artificial; identical to SEQ ID NO: 178392
  Synthetic oligonucleotide

SEQ ID NO: 616554 - DNA, 59 bp, Artificial; identical to SEQ ID NO: 178393
  Synthetic oligonucleotide

SEQ ID NO: 616555 - DNA, 55 bp, Artificial; identical to SEQ ID NO: 257669
  Synthetic oligonucleotide

SEQ ID NO: 616556 - DNA, 55 bp, Artificial; identical to SEQ ID NO: 180069
  Synthetic oligonucleotide

SEQ ID NO: 616557 - DNA, 59 bp, Artificial; identical to SEQ ID NO: 141887
  Synthetic oligonucleotide

SEQ ID NO: 616558 - DNA, 54 bp, Artificial; identical to SEQ ID NO: 153569
  Synthetic oligonucleotide

SEQ ID NO: 616559 - DNA, 55 bp, Artificial; identical to SEQ ID NO: 197880
  Synthetic oligonucleotide

SEQ ID NO: 616560 - DNA, 48 bp, Artificial; identical to SEQ ID NO: 243020
  Synthetic oligonucleotide

SEQ ID NO: 616561 - DNA, 56 bp, Artificial; identical to SEQ ID NO: 243875
  Synthetic oligonucleotide

SEQ ID NO: 616562 - DNA, 59 bp, Artificial; identical to SEQ ID NO: 178399
  Synthetic oligonucleotide

SEQ ID NO: 616563 - DNA, 60 bp, Artificial; identical to SEQ ID NO: 159849
  Synthetic oligonucleotide

SEQ ID NO: 616564 - DNA, 55 bp, Artificial; identical to SEQ ID NO: 237859
  Synthetic oligonucleotide

SEQ ID NO: 616565 - DNA, 52 bp, Artificial; identical to SEQ ID NO: 243220
  Synthetic oligonucleotide

SEQ ID NO: 616566 - DNA, 55 bp, Artificial; identical to SEQ ID NO: 157001
  Synthetic oligonucleotide

SEQ ID NO: 616567 - DNA, 57 bp, Artificial; identical to SEQ ID NO: 151055
  Synthetic oligonucleotide

SEQ ID NO: 616568 - DNA, 52 bp, Artificial; identical to SEQ ID NO: 224878
  Synthetic oligonucleotide

SEQ ID NO: 616569 - DNA, 60 bp, Artificial; identical to SEQ ID NO: 206076
  Synthetic oligonucleotide

SEQ ID NO: 616570 - DNA, 52 bp, Artificial; identical to SEQ ID NO: 205685
  Synthetic oligonucleotide

SEQ ID NO: 616571 - DNA, 55 bp, Artificial; identical to SEQ ID NO: 244273
  Synthetic oligonucleotide

SEQ ID NO: 616572 - DNA, 56 bp, Artificial; identical to SEQ ID NO: 239513
  Synthetic oligonucleotide

SEQ ID NO: 616573 - DNA, 51 bp, Artificial; identical to SEQ ID NO: 165233
  Synthetic oligonucleotide

SEQ ID NO: 616574 - DNA, 60 bp, Artificial; identical to SEQ ID NO: 142703
  Synthetic oligonucleotide

SEQ ID NO: 616575 - DNA, 60 bp, Artificial; identical to SEQ ID NO: 238887
  Synthetic oligonucleotide

SEQ ID NO: 616576 - DNA, 50 bp, Artificial; identical to SEQ ID NO: 246848
  Synthetic oligonucleotide

SEQ ID NO: 616577 - DNA, 60 bp, Artificial; identical to SEQ ID NO: 224142
  Synthetic oligonucleotide

SEQ ID NO: 616578 - DNA, 54 bp, Artificial; identical to SEQ ID NO: 217145
  Synthetic oligonucleotide

SEQ ID NO: 616579 - DNA, 54 bp, Artificial; identical to SEQ ID NO: 255199
  Synthetic oligonucleotide

SEQ ID NO: 616580 - DNA, 50 bp, Artificial; identical to SEQ ID NO: 158425
  Synthetic oligonucleotide

SEQ ID NO: 616581 - DNA, 53 bp, Artificial; identical to SEQ ID NO: 238886
  Synthetic oligonucleotide

SEQ ID NO: 616582 - DNA, 50 bp, Artificial; identical to SEQ ID NO: 167742
  Synthetic oligonucleotide

SEQ ID NO: 616583 - DNA, 55 bp, Artificial; identical to SEQ ID NO: 201519
  Synthetic oligonucleotide

SEQ ID NO: 616584 - DNA, 57 bp, Artificial; identical to SEQ ID NO: 165256
  Synthetic oligonucleotide

SEQ ID NO: 616585 - DNA, 53 bp, Artificial; identical to SEQ ID NO: 240753
  Synthetic oligonucleotide

SEQ ID NO: 616586 - DNA, 54 bp, Artificial; identical to SEQ ID NO: 155513
  Synthetic oligonucleotide

SEQ ID NO: 616587 - DNA, 55 bp, Artificial; identical to SEQ ID NO: 164455
  Synthetic oligonucleotide

SEQ ID NO: 616588 - DNA, 57 bp, Artificial; identical to SEQ ID NO: 237858
  Synthetic oligonucleotide

SEQ ID NO: 616589 - DNA, 50 bp, Artificial; identical to SEQ ID NO: 206907
  Synthetic oligonucleotide

SEQ ID NO: 616590 - DNA, 54 bp, Artificial; identical to SEQ ID NO: 238885
  Synthetic oligonucleotide

SEQ ID NO: 616591 - DNA, 55 bp, Artificial; identical to SEQ ID NO: 205523
  Synthetic oligonucleotide

SEQ ID NO: 616592 - DNA, 56 bp, Artificial; identical to SEQ ID NO: 209119
  Synthetic oligonucleotide

SEQ ID NO: 616593 - DNA, 57 bp, Artificial; identical to SEQ ID NO: 201898
  Synthetic oligonucleotide

SEQ ID NO: 616594 - DNA, 55 bp, Artificial; identical to SEQ ID NO: 247342
  Synthetic oligonucleotide

SEQ ID NO: 616595 - DNA, 58 bp, Artificial; identical to SEQ ID NO: 178463
  Synthetic oligonucleotide

SEQ ID NO: 616596 - DNA, 59 bp, Artificial; identical to SEQ ID NO: 206906
  Synthetic oligonucleotide

SEQ ID NO: 616597 - DNA, 56 bp, Artificial; identical to SEQ ID NO: 142704
  Synthetic oligonucleotide

SEQ ID NO: 616598 - DNA, 54 bp, Artificial; identical to SEQ ID NO: 156996
  Synthetic oligonucleotide

SEQ ID NO: 616599 - DNA, 51 bp, Artificial; identical to SEQ ID NO: 154650
  Synthetic oligonucleotide

SEQ ID NO: 616600 - DNA, 59 bp, Artificial; identical to SEQ ID NO: 237890
  Synthetic oligonucleotide

SEQ ID NO: 616601 - DNA, 54 bp, Artificial; identical to SEQ ID NO: 238884
  Synthetic oligonucleotide

SEQ ID NO: 616602 - DNA, 57 bp, Artificial; identical to SEQ ID NO: 238883
  Synthetic oligonucleotide

SEQ ID NO: 616603 - DNA, 58 bp, Artificial; identical to SEQ ID NO: 200900
  Synthetic oligonucleotide

SEQ ID NO: 616604 - DNA, 55 bp, Artificial; identical to SEQ ID NO: 249269
  Synthetic oligonucleotide

SEQ ID NO: 616605 - DNA, 53 bp, Artificial; identical to SEQ ID NO: 234479
  Synthetic oligonucleotide

SEQ ID NO: 616606 - DNA, 52 bp, Artificial; identical to SEQ ID NO: 160527
  Synthetic oligonucleotide

SEQ ID NO: 616607 - DNA, 59 bp, Artificial; identical to SEQ ID NO: 168102
  Synthetic oligonucleotide

SEQ ID NO: 616608 - DNA, 50 bp, Artificial; identical to SEQ ID NO: 165355
  Synthetic oligonucleotide

SEQ ID NO: 616609 - DNA, 51 bp, Artificial; identical to SEQ ID NO: 218379
  Synthetic oligonucleotide

SEQ ID NO: 616610 - DNA, 55 bp, Artificial; identical to SEQ ID NO: 247758
  Synthetic oligonucleotide

SEQ ID NO: 616611 - DNA, 55 bp, Artificial; identical to SEQ ID NO: 221438
  Synthetic oligonucleotide

SEQ ID NO: 616612 - DNA, 50 bp, Artificial; identical to SEQ ID NO: 241428
  Synthetic oligonucleotide

SEQ ID NO: 616613 - DNA, 55 bp, Artificial; identical to SEQ ID NO: 266038
  Synthetic oligonucleotide

SEQ ID NO: 616614 - DNA, 54 bp, Artificial; identical to SEQ ID NO: 243893
  Synthetic oligonucleotide

SEQ ID NO: 616615 - DNA, 55 bp, Artificial; identical to SEQ ID NO: 208497
  Synthetic oligonucleotide

SEQ ID NO: 616616 - DNA, 55 bp, Artificial; identical to SEQ ID NO: 178467
  Synthetic oligonucleotide

SEQ ID NO: 616617 - DNA, 55 bp, Artificial; identical to SEQ ID NO: 151769
  Synthetic oligonucleotide

SEQ ID NO: 616618 - DNA, 52 bp, Artificial; identical to SEQ ID NO: 165049
  Synthetic oligonucleotide

SEQ ID NO: 616619 - DNA, 55 bp, Artificial; identical to SEQ ID NO: 212841
  Synthetic oligonucleotide

SEQ ID NO: 616620 - DNA, 55 bp, Artificial; identical to SEQ ID NO: 255106
  Synthetic oligonucleotide

SEQ ID NO: 616621 - DNA, 60 bp, Artificial; identical to SEQ ID NO: 243890
  Synthetic oligonucleotide

SEQ ID NO: 616622 - DNA, 55 bp, Artificial; identical to SEQ ID NO: 182072
  Synthetic oligonucleotide

SEQ ID NO: 616623 - DNA, 55 bp, Artificial; identical to SEQ ID NO: 162441
  Synthetic oligonucleotide

SEQ ID NO: 616624 - DNA, 54 bp, Artificial; identical to SEQ ID NO: 193594
  Synthetic oligonucleotide

SEQ ID NO: 616625 - DNA, 59 bp, Artificial; identical to SEQ ID NO: 179431
  Synthetic oligonucleotide

SEQ ID NO: 616626 - DNA, 56 bp, Artificial; identical to SEQ ID NO: 238877
  Synthetic oligonucleotide

SEQ ID NO: 616627 - DNA, 60 bp, Artificial; identical to SEQ ID NO: 159851
  Synthetic oligonucleotide

SEQ ID NO: 616628 - DNA, 55 bp, Artificial; identical to SEQ ID NO: 164454
  Synthetic oligonucleotide

SEQ ID NO: 616629 - DNA, 54 bp, Artificial; identical to SEQ ID NO: 207914
  Synthetic oligonucleotide

SEQ ID NO: 616630 - DNA, 55 bp, Artificial; identical to SEQ ID NO: 245652
  Synthetic oligonucleotide

SEQ ID NO: 616631 - DNA, 55 bp, Artificial; identical to SEQ ID NO: 168795
  Synthetic oligonucleotide

SEQ ID NO: 616632 - DNA, 55 bp, Artificial; identical to SEQ ID NO: 242629
  Synthetic oligonucleotide

SEQ ID NO: 616633 - DNA, 51 bp, Artificial; identical to SEQ ID NO: 243348
  Synthetic oligonucleotide

SEQ ID NO: 616634 - DNA, 53 bp, Artificial; identical to SEQ ID NO: 197517
  Synthetic oligonucleotide

SEQ ID NO: 616635 - DNA, 51 bp, Artificial; identical to SEQ ID NO: 192179
  Synthetic oligonucleotide

SEQ ID NO: 616636 - DNA, 55 bp, Artificial; identical to SEQ ID NO: 156991
  Synthetic oligonucleotide

SEQ ID NO: 616637 - DNA, 54 bp, Artificial; identical to SEQ ID NO: 243059
  Synthetic oligonucleotide

SEQ ID NO: 616638 - DNA, 55 bp, Artificial; identical to SEQ ID NO: 148319
  Synthetic oligonucleotide

SEQ ID NO: 616639 - DNA, 60 bp, Artificial; identical to SEQ ID NO: 243883
  Synthetic oligonucleotide

SEQ ID NO: 616640 - DNA, 60 bp, Artificial; identical to SEQ ID NO: 233767
  Synthetic oligonucleotide

SEQ ID NO: 616641 - DNA, 55 bp, Artificial; identical to SEQ ID NO: 242622
  Synthetic oligonucleotide

SEQ ID NO: 616642 - DNA, 52 bp, Artificial; identical to SEQ ID NO: 157633
  Synthetic oligonucleotide

SEQ ID NO: 616643 - DNA, 55 bp, Artificial; identical to SEQ ID NO: 151039
  Synthetic oligonucleotide

SEQ ID NO: 616644 - DNA, 60 bp, Artificial; identical to SEQ ID NO: 217144
  Synthetic oligonucleotide

SEQ ID NO: 616645 - DNA, 52 bp, Artificial; identical to SEQ ID NO: 221442
  Synthetic oligonucleotide

SEQ ID NO: 616646 - DNA, 53 bp, Artificial; identical to SEQ ID NO: 188804
  Synthetic oligonucleotide

SEQ ID NO: 616647 - DNA, 52 bp, Artificial; identical to SEQ ID NO: 151043
  Synthetic oligonucleotide

SEQ ID NO: 616648 - DNA, 54 bp, Artificial; identical to SEQ ID NO: 240499
  Synthetic oligonucleotide

SEQ ID NO: 616649 - DNA, 51 bp, Artificial; identical to SEQ ID NO: 243347
  Synthetic oligonucleotide

SEQ ID NO: 616650 - DNA, 57 bp, Artificial; identical to SEQ ID NO: 166158
  Synthetic oligonucleotide

SEQ ID NO: 616651 - DNA, 55 bp, Artificial; identical to SEQ ID NO: 198309
  Synthetic oligonucleotide

SEQ ID NO: 616652 - DNA, 55 bp, Artificial; identical to SEQ ID NO: 244343
  Synthetic oligonucleotide

SEQ ID NO: 616653 - DNA, 50 bp, Artificial; identical to SEQ ID NO: 211459
  Synthetic oligonucleotide

SEQ ID NO: 616654 - DNA, 55 bp, Artificial; identical to SEQ ID NO: 217493
  Synthetic oligonucleotide

SEQ ID NO: 616655 - DNA, 60 bp, Artificial; identical to SEQ ID NO: 256292
  Synthetic oligonucleotide

SEQ ID NO: 616656 - DNA, 54 bp, Artificial; identical to SEQ ID NO: 211517
  Synthetic oligonucleotide

SEQ ID NO: 616657 - DNA, 55 bp, Artificial; identical to SEQ ID NO: 164453
  Synthetic oligonucleotide

SEQ ID NO: 616658 - DNA, 52 bp, Artificial; identical to SEQ ID NO: 209665
  Synthetic oligonucleotide

SEQ ID NO: 616659 - DNA, 50 bp, Artificial; identical to SEQ ID NO: 200412
  Synthetic oligonucleotide

SEQ ID NO: 616660 - DNA, 54 bp, Artificial; identical to SEQ ID NO: 238610
  Synthetic oligonucleotide

SEQ ID NO: 616661 - DNA, 55 bp, Artificial; identical to SEQ ID NO: 220633
  Synthetic oligonucleotide

SEQ ID NO: 616662 - DNA, 53 bp, Artificial; identical to SEQ ID NO: 199734
  Synthetic oligonucleotide

SEQ ID NO: 616663 - DNA, 52 bp, Artificial; identical to SEQ ID NO: 203928
  Synthetic oligonucleotide

SEQ ID NO: 616664 - DNA, 55 bp, Artificial; identical to SEQ ID NO: 164452
  Synthetic oligonucleotide

SEQ ID NO: 616665 - DNA, 60 bp, Artificial; identical to SEQ ID NO: 209121
  Synthetic oligonucleotide

SEQ ID NO: 616666 - DNA, 58 bp, Artificial; identical to SEQ ID NO: 217140
  Synthetic oligonucleotide

SEQ ID NO: 616667 - DNA, 51 bp, Artificial; identical to SEQ ID NO: 243880
  Synthetic oligonucleotide

SEQ ID NO: 616668 - DNA, 58 bp, Artificial; identical to SEQ ID NO: 178430
  Synthetic oligonucleotide

SEQ ID NO: 616669 - DNA, 57 bp, Artificial; identical to SEQ ID NO: 191732
  Synthetic oligonucleotide

SEQ ID NO: 616670 - DNA, 51 bp, Artificial; identical to SEQ ID NO: 211636
  Synthetic oligonucleotide

SEQ ID NO: 616671 - DNA, 57 bp, Artificial; identical to SEQ ID NO: 238870
  Synthetic oligonucleotide

SEQ ID NO: 616672 - DNA, 54 bp, Artificial; identical to SEQ ID NO: 240645
  Synthetic oligonucleotide

SEQ ID NO: 616673 - DNA, 54 bp, Artificial; identical to SEQ ID NO: 182039
  Synthetic oligonucleotide

SEQ ID NO: 616674 - DNA, 53 bp, Artificial; identical to SEQ ID NO: 240484
  Synthetic oligonucleotide

SEQ ID NO: 616675 - DNA, 53 bp, Artificial; identical to SEQ ID NO: 206392
  Synthetic oligonucleotide

SEQ ID NO: 616676 - DNA, 52 bp, Artificial; identical to SEQ ID NO: 240932
  Synthetic oligonucleotide

SEQ ID NO: 616677 - DNA, 53 bp, Artificial; identical to SEQ ID NO: 221443
  Synthetic oligonucleotide

SEQ ID NO: 616678 - DNA, 51 bp, Artificial; identical to SEQ ID NO: 238924
  Synthetic oligonucleotide

SEQ ID NO: 616679 - DNA, 55 bp, Artificial; identical to SEQ ID NO: 178435
  Synthetic oligonucleotide

SEQ ID NO: 616680 - DNA, 57 bp, Artificial; identical to SEQ ID NO: 188309
  Synthetic oligonucleotide

SEQ ID NO: 616681 - DNA, 55 bp, Artificial; identical to SEQ ID NO: 151730
  Synthetic oligonucleotide

SEQ ID NO: 616682 - DNA, 50 bp, Artificial; identical to SEQ ID NO: 152176
  Synthetic oligonucleotide

SEQ ID NO: 616683 - DNA, 55 bp, Artificial; identical to SEQ ID NO: 240479
  Synthetic oligonucleotide

SEQ ID NO: 616684 - DNA, 51 bp, Artificial; identical to SEQ ID NO: 208500
  Synthetic oligonucleotide

SEQ ID NO: 616685 - DNA, 51 bp, Artificial; identical to SEQ ID NO: 186442
  Synthetic oligonucleotide

SEQ ID NO: 616686 - DNA, 55 bp, Artificial; identical to SEQ ID NO: 148322
  Synthetic oligonucleotide

SEQ ID NO: 616687 - DNA, 55 bp, Artificial; identical to SEQ ID NO: 237853
  Synthetic oligonucleotide

SEQ ID NO: 616688 - DNA, 53 bp, Artificial; identical to SEQ ID NO: 194130
  Synthetic oligonucleotide

SEQ ID NO: 616689 - DNA, 55 bp, Artificial; identical to SEQ ID NO: 209353
  Synthetic oligonucleotide

SEQ ID NO: 616690 - DNA, 57 bp, Artificial; identical to SEQ ID NO: 178441
  Synthetic oligonucleotide

SEQ ID NO: 616691 - DNA, 59 bp, Artificial; identical to SEQ ID NO: 170887
  Synthetic oligonucleotide

SEQ ID NO: 616692 - DNA, 59 bp, Artificial; identical to SEQ ID NO: 206904
  Synthetic oligonucleotide

SEQ ID NO: 616693 - DNA, 55 bp, Artificial; identical to SEQ ID NO: 218875
  Synthetic oligonucleotide

SEQ ID NO: 616694 - DNA, 55 bp, Artificial; identical to SEQ ID NO: 191913
  Synthetic oligonucleotide

SEQ ID NO: 616695 - DNA, 53 bp, Artificial; identical to SEQ ID NO: 209354
  Synthetic oligonucleotide

SEQ ID NO: 616696 - DNA, 60 bp, Artificial; identical to SEQ ID NO: 238920
  Synthetic oligonucleotide

SEQ ID NO: 616697 - DNA, 51 bp, Artificial; identical to SEQ ID NO: 149764
  Synthetic oligonucleotide

SEQ ID NO: 616698 - DNA, 55 bp, Artificial; identical to SEQ ID NO: 207646
  Synthetic oligonucleotide

SEQ ID NO: 616699 - DNA, 57 bp, Artificial; identical to SEQ ID NO: 187272
  Synthetic oligonucleotide

SEQ ID NO: 616700 - DNA, 55 bp, Artificial; identical to SEQ ID NO: 148277
  Synthetic oligonucleotide

SEQ ID NO: 616701 - DNA, 53 bp, Artificial; identical to SEQ ID NO: 246253
  Synthetic oligonucleotide

SEQ ID NO: 616702 - DNA, 52 bp, Artificial; identical to SEQ ID NO: 240913
  Synthetic oligonucleotide

SEQ ID NO: 616703 - DNA, 56 bp, Artificial; identical to SEQ ID NO: 256295
  Synthetic oligonucleotide

SEQ ID NO: 616704 - DNA, 60 bp, Artificial; identical to SEQ ID NO: 238918
  Synthetic oligonucleotide

SEQ ID NO: 616705 - DNA, 59 bp, Artificial; identical to SEQ ID NO: 239190
  Synthetic oligonucleotide

SEQ ID NO: 616706 - DNA, 60 bp, Artificial; identical to SEQ ID NO: 178443
  Synthetic oligonucleotide

SEQ ID NO: 616707 - DNA, 54 bp, Artificial; identical to SEQ ID NO: 240675
  Synthetic oligonucleotide

SEQ ID NO: 616708 - DNA, 56 bp, Artificial; identical to SEQ ID NO: 151099
  Synthetic oligonucleotide

SEQ ID NO: 616709 - DNA, 55 bp, Artificial; identical to SEQ ID NO: 168804
  Synthetic oligonucleotide

SEQ ID NO: 616710 - DNA, 60 bp, Artificial; identical to SEQ ID NO: 152932
  Synthetic oligonucleotide

SEQ ID NO: 616711 - DNA, 55 bp, Artificial; identical to SEQ ID NO: 217491
  Synthetic oligonucleotide

SEQ ID NO: 616712 - DNA, 52 bp, Artificial; identical to SEQ ID NO: 202844
  Synthetic oligonucleotide

SEQ ID NO: 616713 - DNA, 54 bp, Artificial; identical to SEQ ID NO: 198320
  Synthetic oligonucleotide

SEQ ID NO: 616714 - DNA, 58 bp, Artificial; identical to SEQ ID NO: 200855
  Synthetic oligonucleotide

SEQ ID NO: 616715 - DNA, 51 bp, Artificial; identical to SEQ ID NO: 256300
  Synthetic oligonucleotide

SEQ ID NO: 616716 - DNA, 55 bp, Artificial; identical to SEQ ID NO: 197199
  Synthetic oligonucleotide

SEQ ID NO: 616717 - DNA, 55 bp, Artificial; identical to SEQ ID NO: 153418
  Synthetic oligonucleotide

SEQ ID NO: 616718 - DNA, 58 bp, Artificial; identical to SEQ ID NO: 206902
  Synthetic oligonucleotide

SEQ ID NO: 616719 - DNA, 60 bp, Artificial; identical to SEQ ID NO: 238916
  Synthetic oligonucleotide

SEQ ID NO: 616720 - DNA, 51 bp, Artificial; identical to SEQ ID NO: 243237
  Synthetic oligonucleotide

SEQ ID NO: 616721 - DNA, 55 bp, Artificial; identical to SEQ ID NO: 164451
  Synthetic oligonucleotide

SEQ ID NO: 616722 - DNA, 57 bp, Artificial; identical to SEQ ID NO: 159856
  Synthetic oligonucleotide

SEQ ID NO: 616723 - DNA, 53 bp, Artificial; identical to SEQ ID NO: 188477
  Synthetic oligonucleotide

SEQ ID NO: 616724 - DNA, 52 bp, Artificial; identical to SEQ ID NO: 218876
  Synthetic oligonucleotide

SEQ ID NO: 616725 - DNA, 54 bp, Artificial; identical to SEQ ID NO: 223515
  Synthetic oligonucleotide

SEQ ID NO: 616726 - DNA, 54 bp, Artificial; identical to SEQ ID NO: 151100
  Synthetic oligonucleotide

SEQ ID NO: 616727 - DNA, 53 bp, Artificial; identical to SEQ ID NO: 255370
  Synthetic oligonucleotide

SEQ ID NO: 616728 - DNA, 51 bp, Artificial; identical to SEQ ID NO: 170195
  Synthetic oligonucleotide

SEQ ID NO: 616729 - DNA, 52 bp, Artificial; identical to SEQ ID NO: 151102
  Synthetic oligonucleotide

SEQ ID NO: 616730 - DNA, 55 bp, Artificial; identical to SEQ ID NO: 263313
  Synthetic oligonucleotide

SEQ ID NO: 616731 - DNA, 54 bp, Artificial; identical to SEQ ID NO: 243064
  Synthetic oligonucleotide

SEQ ID NO: 616732 - DNA, 50 bp, Artificial; identical to SEQ ID NO: 233892
  Synthetic oligonucleotide

SEQ ID NO: 616733 - DNA, 60 bp, Artificial; identical to SEQ ID NO: 243878
  Synthetic oligonucleotide

SEQ ID NO: 616734 - DNA, 60 bp, Artificial; identical to SEQ ID NO: 253264
  Synthetic oligonucleotide

SEQ ID NO: 616735 - DNA, 55 bp, Artificial; identical to SEQ ID NO: 182045
  Synthetic oligonucleotide

SEQ ID NO: 616736 - DNA, 56 bp, Artificial; identical to SEQ ID NO: 206852
  Synthetic oligonucleotide

SEQ ID NO: 616737 - DNA, 51 bp, Artificial; identical to SEQ ID NO: 161369
  Synthetic oligonucleotide

SEQ ID NO: 616738 - DNA, 55 bp, Artificial; identical to SEQ ID NO: 194894
  Synthetic oligonucleotide

SEQ ID NO: 616739 - DNA, 55 bp, Artificial; identical to SEQ ID NO: 182047
  Synthetic oligonucleotide

SEQ ID NO: 616740 - DNA, 52 bp, Artificial; identical to SEQ ID NO: 266275
  Synthetic oligonucleotide

SEQ ID NO: 616741 - DNA, 55 bp, Artificial; identical to SEQ ID NO: 222647
  Synthetic oligonucleotide

SEQ ID NO: 616742 - DNA, 55 bp, Artificial; identical to SEQ ID NO: 194875
  Synthetic oligonucleotide

SEQ ID NO: 616743 - DNA, 52 bp, Artificial; identical to SEQ ID NO: 157623
  Synthetic oligonucleotide

SEQ ID NO: 616744 - DNA, 60 bp, Artificial; identical to SEQ ID NO: 170925
  Synthetic oligonucleotide

SEQ ID NO: 616745 - DNA, 56 bp, Artificial; identical to SEQ ID NO: 256301
  Synthetic oligonucleotide

SEQ ID NO: 616746 - DNA, 51 bp, Artificial; identical to SEQ ID NO: 246627
  Synthetic oligonucleotide

SEQ ID NO: 616747 - DNA, 50 bp, Artificial; identical to SEQ ID NO: 233891
  Synthetic oligonucleotide

SEQ ID NO: 616748 - DNA, 58 bp, Artificial; identical to SEQ ID NO: 160905
  Synthetic oligonucleotide

SEQ ID NO: 616749 - DNA, 53 bp, Artificial; identical to SEQ ID NO: 238911
  Synthetic oligonucleotide

SEQ ID NO: 616750 - DNA, 52 bp, Artificial; identical to SEQ ID NO: 165054
  Synthetic oligonucleotide

SEQ ID NO: 616751 - DNA, 52 bp, Artificial; identical to SEQ ID NO: 151104
  Synthetic oligonucleotide

SEQ ID NO: 616752 - DNA, 55 bp, Artificial; identical to SEQ ID NO: 207643
  Synthetic oligonucleotide

SEQ ID NO: 616753 - DNA, 60 bp, Artificial; identical to SEQ ID NO: 247327
  Synthetic oligonucleotide

SEQ ID NO: 616754 - DNA, 56 bp, Artificial; identical to SEQ ID NO: 243873
  Synthetic oligonucleotide

SEQ ID NO: 616755 - DNA, 55 bp, Artificial; identical to SEQ ID NO: 210854
  Synthetic oligonucleotide

SEQ ID NO: 616756 - DNA, 53 bp, Artificial; identical to SEQ ID NO: 220759
  Synthetic oligonucleotide

SEQ ID NO: 616757 - DNA, 60 bp, Artificial; identical to SEQ ID NO: 238908
  Synthetic oligonucleotide

SEQ ID NO: 616758 - DNA, 55 bp, Artificial; identical to SEQ ID NO: 154088
  Synthetic oligonucleotide

SEQ ID NO: 616759 - DNA, 55 bp, Artificial; identical to SEQ ID NO: 266136
  Synthetic oligonucleotide

SEQ ID NO: 616760 - DNA, 55 bp, Artificial; identical to SEQ ID NO: 224134
  Synthetic oligonucleotide

SEQ ID NO: 616761 - DNA, 51 bp, Artificial; identical to SEQ ID NO: 233871
  Synthetic oligonucleotide

SEQ ID NO: 616762 - DNA, 53 bp, Artificial; identical to SEQ ID NO: 190752
  Synthetic oligonucleotide

SEQ ID NO: 616763 - DNA, 55 bp, Artificial; identical to SEQ ID NO: 148287
  Synthetic oligonucleotide

SEQ ID NO: 616764 - DNA, 55 bp, Artificial; identical to SEQ ID NO: 238907
  Synthetic oligonucleotide

SEQ ID NO: 616765 - DNA, 57 bp, Artificial; identical to SEQ ID NO: 238906
  Synthetic oligonucleotide

SEQ ID NO: 616766 - DNA, 60 bp, Artificial; identical to SEQ ID NO: 151073
  Synthetic oligonucleotide

SEQ ID NO: 616767 - DNA, 60 bp, Artificial; identical to SEQ ID NO: 206850
  Synthetic oligonucleotide

SEQ ID NO: 616768 - DNA, 55 bp, Artificial; identical to SEQ ID NO: 203498
  Synthetic oligonucleotide

SEQ ID NO: 616769 - DNA, 57 bp, Artificial; identical to SEQ ID NO: 178453
  Synthetic oligonucleotide

SEQ ID NO: 616770 - DNA, 54 bp, Artificial; identical to SEQ ID NO: 160371
  Synthetic oligonucleotide

SEQ ID NO: 616771 - DNA, 56 bp, Artificial; identical to SEQ ID NO: 210796
  Synthetic oligonucleotide

SEQ ID NO: 616772 - DNA, 54 bp, Artificial; identical to SEQ ID NO: 170008
  Synthetic oligonucleotide

SEQ ID NO: 616773 - DNA, 55 bp, Artificial; identical to SEQ ID NO: 201065
  Synthetic oligonucleotide

SEQ ID NO: 616774 - DNA, 54 bp, Artificial; identical to SEQ ID NO: 196982
  Synthetic oligonucleotide

SEQ ID NO: 616775 - DNA, 55 bp, Artificial; identical to SEQ ID NO: 154405
  Synthetic oligonucleotide

SEQ ID NO: 616776 - DNA, 59 bp, Artificial; identical to SEQ ID NO: 247331
  Synthetic oligonucleotide

SEQ ID NO: 616777 - DNA, 55 bp, Artificial; identical to SEQ ID NO: 174686
  Synthetic oligonucleotide

SEQ ID NO: 616778 - DNA, 60 bp, Artificial; identical to SEQ ID NO: 151076
  Synthetic oligonucleotide

SEQ ID NO: 616779 - DNA, 56 bp, Artificial; identical to SEQ ID NO: 252766
  Synthetic oligonucleotide

SEQ ID NO: 616780 - DNA, 60 bp, Artificial; identical to SEQ ID NO: 151077
  Synthetic oligonucleotide

SEQ ID NO: 616781 - DNA, 54 bp, Artificial; identical to SEQ ID NO: 238594
  Synthetic oligonucleotide

SEQ ID NO: 616782 - DNA, 57 bp, Artificial; identical to SEQ ID NO: 187366
  Synthetic oligonucleotide

SEQ ID NO: 616783 - DNA, 60 bp, Artificial; identical to SEQ ID NO: 248488
  Synthetic oligonucleotide

SEQ ID NO: 616784 - DNA, 51 bp, Artificial; identical to SEQ ID NO: 160930
  Synthetic oligonucleotide

SEQ ID NO: 616785 - DNA, 53 bp, Artificial; identical to SEQ ID NO: 157462
  Synthetic oligonucleotide

SEQ ID NO: 616786 - DNA, 55 bp, Artificial; identical to SEQ ID NO: 202249
  Synthetic oligonucleotide

SEQ ID NO: 616787 - DNA, 54 bp, Artificial; identical to SEQ ID NO: 216588
  Synthetic oligonucleotide

SEQ ID NO: 616788 - DNA, 53 bp, Artificial; identical to SEQ ID NO: 151080
  Synthetic oligonucleotide

SEQ ID NO: 616789 - DNA, 54 bp, Artificial; identical to SEQ ID NO: 234440
  Synthetic oligonucleotide

SEQ ID NO: 616790 - DNA, 59 bp, Artificial; identical to SEQ ID NO: 242502
  Synthetic oligonucleotide

SEQ ID NO: 616791 - DNA, 55 bp, Artificial; identical to SEQ ID NO: 181924
  Synthetic oligonucleotide

SEQ ID NO: 616792 - DNA, 51 bp, Artificial; identical to SEQ ID NO: 218917
  Synthetic oligonucleotide

SEQ ID NO: 616793 - DNA, 53 bp, Artificial; identical to SEQ ID NO: 247150
  Synthetic oligonucleotide

SEQ ID NO: 616794 - DNA, 55 bp, Artificial; identical to SEQ ID NO: 156912
  Synthetic oligonucleotide

SEQ ID NO: 616795 - DNA, 55 bp, Artificial; identical to SEQ ID NO: 255135
  Synthetic oligonucleotide

SEQ ID NO: 616796 - DNA, 50 bp, Artificial; identical to SEQ ID NO: 165364
  Synthetic oligonucleotide

SEQ ID NO: 616797 - DNA, 55 bp, Artificial; identical to SEQ ID NO: 164448
  Synthetic oligonucleotide

SEQ ID NO: 616798 - DNA, 51 bp, Artificial; identical to SEQ ID NO: 169058
  Synthetic oligonucleotide

SEQ ID NO: 616799 - DNA, 55 bp, Artificial; identical to SEQ ID NO: 181926
  Synthetic oligonucleotide

SEQ ID NO: 616800 - DNA, 51 bp, Artificial; identical to SEQ ID NO: 202557
  Synthetic oligonucleotide

SEQ ID NO: 616801 - DNA, 55 bp, Artificial; identical to SEQ ID NO: 234325
  Synthetic oligonucleotide

SEQ ID NO: 616802 - DNA, 58 bp, Artificial; identical to SEQ ID NO: 200853
  Synthetic oligonucleotide

SEQ ID NO: 616803 - DNA, 54 bp, Artificial; identical to SEQ ID NO: 200852
  Synthetic oligonucleotide

SEQ ID NO: 616804 - DNA, 53 bp, Artificial; identical to SEQ ID NO: 209644
  Synthetic oligonucleotide

SEQ ID NO: 616805 - DNA, 55 bp, Artificial; identical to SEQ ID NO: 203339
  Synthetic oligonucleotide

SEQ ID NO: 616806 - DNA, 57 bp, Artificial; identical to SEQ ID NO: 201901
  Synthetic oligonucleotide

SEQ ID NO: 616807 - DNA, 55 bp, Artificial; identical to SEQ ID NO: 156911
  Synthetic oligonucleotide

SEQ ID NO: 616808 - DNA, 55 bp, Artificial; identical to SEQ ID NO: 212838
  Synthetic oligonucleotide

SEQ ID NO: 616809 - DNA, 54 bp, Artificial; identical to SEQ ID NO: 174681
  Synthetic oligonucleotide

SEQ ID NO: 616810 - DNA, 54 bp, Artificial; identical to SEQ ID NO: 152016
  Synthetic oligonucleotide

SEQ ID NO: 616811 - DNA, 55 bp, Artificial; identical to SEQ ID NO: 203504
  Synthetic oligonucleotide

SEQ ID NO: 616812 - DNA, 56 bp, Artificial; identical to SEQ ID NO: 257471
  Synthetic oligonucleotide

SEQ ID NO: 616813 - DNA, 50 bp, Artificial; identical to SEQ ID NO: 176850
  Synthetic oligonucleotide

SEQ ID NO: 616814 - DNA, 55 bp, Artificial; identical to SEQ ID NO: 244232
  Synthetic oligonucleotide

SEQ ID NO: 616815 - DNA, 54 bp, Artificial; identical to SEQ ID NO: 207701
  Synthetic oligonucleotide

SEQ ID NO: 616816 - DNA, 57 bp, Artificial; identical to SEQ ID NO: 177848
  Synthetic oligonucleotide

SEQ ID NO: 616817 - DNA, 51 bp, Artificial; identical to SEQ ID NO: 248013
  Synthetic oligonucleotide

SEQ ID NO: 616818 - DNA, 50 bp, Artificial; identical to SEQ ID NO: 152173
  Synthetic oligonucleotide

SEQ ID NO: 616819 - DNA, 59 bp, Artificial; identical to SEQ ID NO: 200851
  Synthetic oligonucleotide

SEQ ID NO: 616820 - DNA, 50 bp, Artificial; identical to SEQ ID NO: 165476
  Synthetic oligonucleotide

SEQ ID NO: 616821 - DNA, 55 bp, Artificial; identical to SEQ ID NO: 255149
  Synthetic oligonucleotide

SEQ ID NO: 616822 - DNA, 51 bp, Artificial; identical to SEQ ID NO: 149799
  Synthetic oligonucleotide

SEQ ID NO: 616823 - DNA, 55 bp, Artificial; identical to SEQ ID NO: 153428
  Synthetic oligonucleotide

SEQ ID NO: 616824 - DNA, 56 bp, Artificial; identical to SEQ ID NO: 159860
  Synthetic oligonucleotide

SEQ ID NO: 616825 - DNA, 58 bp, Artificial; identical to SEQ ID NO: 166097
  Synthetic oligonucleotide

SEQ ID NO: 616826 - DNA, 58 bp, Artificial; identical to SEQ ID NO: 157210
  Synthetic oligonucleotide

SEQ ID NO: 616827 - DNA, 53 bp, Artificial; identical to SEQ ID NO: 150981
  Synthetic oligonucleotide

SEQ ID NO: 616828 - DNA, 55 bp, Artificial; identical to SEQ ID NO: 150982
  Synthetic oligonucleotide

SEQ ID NO: 616829 - DNA, 52 bp, Artificial; identical to SEQ ID NO: 157617
  Synthetic oligonucleotide

SEQ ID NO: 616830 - DNA, 55 bp, Artificial; identical to SEQ ID NO: 168709
  Synthetic oligonucleotide

SEQ ID NO: 616831 - DNA, 55 bp, Artificial; identical to SEQ ID NO: 144450
  Synthetic oligonucleotide

SEQ ID NO: 616832 - DNA, 52 bp, Artificial; identical to SEQ ID NO: 174861
  Synthetic oligonucleotide

SEQ ID NO: 616833 - DNA, 55 bp, Artificial; identical to SEQ ID NO: 202843
  Synthetic oligonucleotide

SEQ ID NO: 616834 - DNA, 53 bp, Artificial; identical to SEQ ID NO: 150983
  Synthetic oligonucleotide

SEQ ID NO: 616835 - DNA, 55 bp, Artificial; identical to SEQ ID NO: 245664
  Synthetic oligonucleotide

SEQ ID NO: 616836 - DNA, 60 bp, Artificial; identical to SEQ ID NO: 224129
  Synthetic oligonucleotide

SEQ ID NO: 616837 - DNA, 57 bp, Artificial; identical to SEQ ID NO: 201971
  Synthetic oligonucleotide

SEQ ID NO: 616838 - DNA, 53 bp, Artificial; identical to SEQ ID NO: 239483
  Synthetic oligonucleotide

SEQ ID NO: 616839 - DNA, 54 bp, Artificial; identical to SEQ ID NO: 217135
  Synthetic oligonucleotide

SEQ ID NO: 616840 - DNA, 52 bp, Artificial; identical to SEQ ID NO: 146453
  Synthetic oligonucleotide

SEQ ID NO: 616841 - DNA, 55 bp, Artificial; identical to SEQ ID NO: 217530
  Synthetic oligonucleotide

SEQ ID NO: 616842 - DNA, 51 bp, Artificial; identical to SEQ ID NO: 207642
  Synthetic oligonucleotide

SEQ ID NO: 616843 - DNA, 57 bp, Artificial; identical to SEQ ID NO: 150986
  Synthetic oligonucleotide

SEQ ID NO: 616844 - DNA, 57 bp, Artificial; identical to SEQ ID NO: 217284
  Synthetic oligonucleotide

SEQ ID NO: 616845 - DNA, 60 bp, Artificial; identical to SEQ ID NO: 206847
  Synthetic oligonucleotide

SEQ ID NO: 616846 - DNA, 55 bp, Artificial; identical to SEQ ID NO: 153433
  Synthetic oligonucleotide

SEQ ID NO: 616847 - DNA, 55 bp, Artificial; identical to SEQ ID NO: 216392
  Synthetic oligonucleotide

SEQ ID NO: 616848 - DNA, 60 bp, Artificial; identical to SEQ ID NO: 209091
  Synthetic oligonucleotide

SEQ ID NO: 616849 - DNA, 56 bp, Artificial; identical to SEQ ID NO: 187260
  Synthetic oligonucleotide

SEQ ID NO: 616850 - DNA, 52 bp, Artificial; identical to SEQ ID NO: 247941
  Synthetic oligonucleotide

SEQ ID NO: 616851 - DNA, 54 bp, Artificial; identical to SEQ ID NO: 161281
  Synthetic oligonucleotide

SEQ ID NO: 616852 - DNA, 55 bp, Artificial; identical to SEQ ID NO: 208512
  Synthetic oligonucleotide

SEQ ID NO: 616853 - DNA, 55 bp, Artificial; identical to SEQ ID NO: 220664
  Synthetic oligonucleotide

SEQ ID NO: 616854 - DNA, 57 bp, Artificial; identical to SEQ ID NO: 200879
  Synthetic oligonucleotide

SEQ ID NO: 616855 - DNA, 60 bp, Artificial; identical to SEQ ID NO: 200877
  Synthetic oligonucleotide

SEQ ID NO: 616856 - DNA, 52 bp, Artificial; identical to SEQ ID NO: 198287
  Synthetic oligonucleotide

SEQ ID NO: 616857 - DNA, 60 bp, Artificial; identical to SEQ ID NO: 248550
  Synthetic oligonucleotide

SEQ ID NO: 616858 - DNA, 51 bp, Artificial; identical to SEQ ID NO: 240989
  Synthetic oligonucleotide

SEQ ID NO: 616859 - DNA, 55 bp, Artificial; identical to SEQ ID NO: 148377
  Synthetic oligonucleotide

SEQ ID NO: 616860 - DNA, 54 bp, Artificial; identical to SEQ ID NO: 221488
  Synthetic oligonucleotide

SEQ ID NO: 616861 - DNA, 51 bp, Artificial; identical to SEQ ID NO: 154633
  Synthetic oligonucleotide

SEQ ID NO: 616862 - DNA, 56 bp, Artificial; identical to SEQ ID NO: 248547
  Synthetic oligonucleotide

SEQ ID NO: 616863 - DNA, 57 bp, Artificial; identical to SEQ ID NO: 238841
  Synthetic oligonucleotide

SEQ ID NO: 616864 - DNA, 50 bp, Artificial; identical to SEQ ID NO: 177089
  Synthetic oligonucleotide

SEQ ID NO: 616865 - DNA, 51 bp, Artificial; identical to SEQ ID NO: 238840
  Synthetic oligonucleotide

SEQ ID NO: 616866 - DNA, 51 bp, Artificial; identical to SEQ ID NO: 206522
  Synthetic oligonucleotide

SEQ ID NO: 616867 - DNA, 59 bp, Artificial; identical to SEQ ID NO: 179348
  Synthetic oligonucleotide

SEQ ID NO: 616868 - DNA, 55 bp, Artificial; identical to SEQ ID NO: 234323
  Synthetic oligonucleotide

SEQ ID NO: 616869 - DNA, 55 bp, Artificial; identical to SEQ ID NO: 224886
  Synthetic oligonucleotide

SEQ ID NO: 616870 - DNA, 54 bp, Artificial; identical to SEQ ID NO: 149172
  Synthetic oligonucleotide

SEQ ID NO: 616871 - DNA, 60 bp, Artificial; identical to SEQ ID NO: 206843
  Synthetic oligonucleotide

SEQ ID NO: 616872 - DNA, 57 bp, Artificial; identical to SEQ ID NO: 161419
  Synthetic oligonucleotide

SEQ ID NO: 616873 - DNA, 55 bp, Artificial; identical to SEQ ID NO: 156894
  Synthetic oligonucleotide

SEQ ID NO: 616874 - DNA, 52 bp, Artificial; identical to SEQ ID NO: 174812
  Synthetic oligonucleotide

SEQ ID NO: 616875 - DNA, 60 bp, Artificial; identical to SEQ ID NO: 247145
  Synthetic oligonucleotide

SEQ ID NO: 616876 - DNA, 53 bp, Artificial; identical to SEQ ID NO: 240827
  Synthetic oligonucleotide

SEQ ID NO: 616877 - DNA, 60 bp, Artificial; identical to SEQ ID NO: 224175
  Synthetic oligonucleotide

SEQ ID NO: 616878 - DNA, 57 bp, Artificial; identical to SEQ ID NO: 152941
  Synthetic oligonucleotide

SEQ ID NO: 616879 - DNA, 55 bp, Artificial; identical to SEQ ID NO: 156892
  Synthetic oligonucleotide

SEQ ID NO: 616880 - DNA, 55 bp, Artificial; identical to SEQ ID NO: 188147
  Synthetic oligonucleotide

SEQ ID NO: 616881 - DNA, 55 bp, Artificial; identical to SEQ ID NO: 191062
  Synthetic oligonucleotide

SEQ ID NO: 616882 - DNA, 58 bp, Artificial; identical to SEQ ID NO: 237844
  Synthetic oligonucleotide

SEQ ID NO: 616883 - DNA, 55 bp, Artificial; identical to SEQ ID NO: 249429
  Synthetic oligonucleotide

SEQ ID NO: 616884 - DNA, 60 bp, Artificial; identical to SEQ ID NO: 238832
  Synthetic oligonucleotide

SEQ ID NO: 616885 - DNA, 54 bp, Artificial; identical to SEQ ID NO: 201905
  Synthetic oligonucleotide

SEQ ID NO: 616886 - DNA, 54 bp, Artificial; identical to SEQ ID NO: 181908
  Synthetic oligonucleotide

SEQ ID NO: 616887 - DNA, 55 bp, Artificial; identical to SEQ ID NO: 164447
  Synthetic oligonucleotide

SEQ ID NO: 616888 - DNA, 52 bp, Artificial; identical to SEQ ID NO: 233844
  Synthetic oligonucleotide

SEQ ID NO: 616889 - DNA, 55 bp, Artificial; identical to SEQ ID NO: 208558
  Synthetic oligonucleotide

SEQ ID NO: 616890 - DNA, 52 bp, Artificial; identical to SEQ ID NO: 197612
  Synthetic oligonucleotide

SEQ ID NO: 616891 - DNA, 55 bp, Artificial; identical to SEQ ID NO: 157310
  Synthetic oligonucleotide

SEQ ID NO: 616892 - DNA, 59 bp, Artificial; identical to SEQ ID NO: 203332
  Synthetic oligonucleotide

SEQ ID NO: 616893 - DNA, 51 bp, Artificial; identical to SEQ ID NO: 233866
  Synthetic oligonucleotide

SEQ ID NO: 616894 - DNA, 55 bp, Artificial; identical to SEQ ID NO: 142182
  Synthetic oligonucleotide

SEQ ID NO: 616895 - DNA, 51 bp, Artificial; identical to SEQ ID NO: 191231
  Synthetic oligonucleotide

SEQ ID NO: 616896 - DNA, 55 bp, Artificial; identical to SEQ ID NO: 169974
  Synthetic oligonucleotide

SEQ ID NO: 616897 - DNA, 60 bp, Artificial; identical to SEQ ID NO: 171723
  Synthetic oligonucleotide

SEQ ID NO: 616898 - DNA, 55 bp, Artificial; identical to SEQ ID NO: 168681
  Synthetic oligonucleotide

SEQ ID NO: 616899 - DNA, 55 bp, Artificial; identical to SEQ ID NO: 194890
  Synthetic oligonucleotide

SEQ ID NO: 616900 - DNA, 51 bp, Artificial; identical to SEQ ID NO: 200158
  Synthetic oligonucleotide

SEQ ID NO: 616901 - DNA, 59 bp, Artificial; identical to SEQ ID NO: 170906
  Synthetic oligonucleotide

SEQ ID NO: 616902 - DNA, 60 bp, Artificial; identical to SEQ ID NO: 170970
  Synthetic oligonucleotide

SEQ ID NO: 616903 - DNA, 52 bp, Artificial; identical to SEQ ID NO: 247144
  Synthetic oligonucleotide

SEQ ID NO: 616904 - DNA, 60 bp, Artificial; identical to SEQ ID NO: 177824
  Synthetic oligonucleotide

SEQ ID NO: 616905 - DNA, 59 bp, Artificial; identical to SEQ ID NO: 237842
  Synthetic oligonucleotide

SEQ ID NO: 616906 - DNA, 51 bp, Artificial; identical to SEQ ID NO: 141326
  Synthetic oligonucleotide

SEQ ID NO: 616907 - DNA, 54 bp, Artificial; identical to SEQ ID NO: 194962
  Synthetic oligonucleotide

SEQ ID NO: 616908 - DNA, 54 bp, Artificial; identical to SEQ ID NO: 181911
  Synthetic oligonucleotide

SEQ ID NO: 616909 - DNA, 58 bp, Artificial; identical to SEQ ID NO: 179686
  Synthetic oligonucleotide

SEQ ID NO: 616910 - DNA, 51 bp, Artificial; identical to SEQ ID NO: 186491
  Synthetic oligonucleotide

SEQ ID NO: 616911 - DNA, 60 bp, Artificial; identical to SEQ ID NO: 152232
  Synthetic oligonucleotide

SEQ ID NO: 616912 - DNA, 54 bp, Artificial; identical to SEQ ID NO: 243755
  Synthetic oligonucleotide

SEQ ID NO: 616913 - DNA, 53 bp, Artificial; identical to SEQ ID NO: 194963
  Synthetic oligonucleotide

SEQ ID NO: 616914 - DNA, 55 bp, Artificial; identical to SEQ ID NO: 168682
  Synthetic oligonucleotide

SEQ ID NO: 616915 - DNA, 59 bp, Artificial; identical to SEQ ID NO: 247141
  Synthetic oligonucleotide

SEQ ID NO: 616916 - DNA, 55 bp, Artificial; identical to SEQ ID NO: 190281
  Synthetic oligonucleotide

SEQ ID NO: 616917 - DNA, 60 bp, Artificial; identical to SEQ ID NO: 212427
  Synthetic oligonucleotide

SEQ ID NO: 616918 - DNA, 58 bp, Artificial; identical to SEQ ID NO: 190587
  Synthetic oligonucleotide

SEQ ID NO: 616919 - DNA, 58 bp, Artificial; identical to SEQ ID NO: 238827
  Synthetic oligonucleotide

SEQ ID NO: 616920 - DNA, 53 bp, Artificial; identical to SEQ ID NO: 211536
  Synthetic oligonucleotide

SEQ ID NO: 616921 - DNA, 60 bp, Artificial; identical to SEQ ID NO: 177830
  Synthetic oligonucleotide

SEQ ID NO: 616922 - DNA, 60 bp, Artificial; identical to SEQ ID NO: 248536
  Synthetic oligonucleotide

SEQ ID NO: 616923 - DNA, 52 bp, Artificial; identical to SEQ ID NO: 141303
  Synthetic oligonucleotide

SEQ ID NO: 616924 - DNA, 50 bp, Artificial; identical to SEQ ID NO: 152167
  Synthetic oligonucleotide

SEQ ID NO: 616925 - DNA, 60 bp, Artificial; identical to SEQ ID NO: 238825
  Synthetic oligonucleotide

SEQ ID NO: 616926 - DNA, 55 bp, Artificial; identical to SEQ ID NO: 148350
  Synthetic oligonucleotide

SEQ ID NO: 616927 - DNA, 51 bp, Artificial; identical to SEQ ID NO: 186490
  Synthetic oligonucleotide

SEQ ID NO: 616928 - DNA, 52 bp, Artificial; identical to SEQ ID NO: 209675
  Synthetic oligonucleotide

SEQ ID NO: 616929 - DNA, 56 bp, Artificial; identical to SEQ ID NO: 238868
  Synthetic oligonucleotide

SEQ ID NO: 616930 - DNA, 55 bp, Artificial; identical to SEQ ID NO: 153376
  Synthetic oligonucleotide

SEQ ID NO: 616931 - DNA, 55 bp, Artificial; identical to SEQ ID NO: 160247
  Synthetic oligonucleotide

SEQ ID NO: 616932 - DNA, 52 bp, Artificial; identical to SEQ ID NO: 202531
  Synthetic oligonucleotide

SEQ ID NO: 616933 - DNA, 55 bp, Artificial; identical to SEQ ID NO: 154324
  Synthetic oligonucleotide

SEQ ID NO: 616934 - DNA, 55 bp, Artificial; identical to SEQ ID NO: 148640
  Synthetic oligonucleotide

SEQ ID NO: 616935 - DNA, 59 bp, Artificial; identical to SEQ ID NO: 160883
  Synthetic oligonucleotide

SEQ ID NO: 616936 - DNA, 57 bp, Artificial; identical to SEQ ID NO: 168267
  Synthetic oligonucleotide

SEQ ID NO: 616937 - DNA, 55 bp, Artificial; identical to SEQ ID NO: 189312
  Synthetic oligonucleotide

SEQ ID NO: 616938 - DNA, 59 bp, Artificial; identical to SEQ ID NO: 151021
  Synthetic oligonucleotide

SEQ ID NO: 616939 - DNA, 55 bp, Artificial; identical to SEQ ID NO: 160799
  Synthetic oligonucleotide

SEQ ID NO: 616940 - DNA, 55 bp, Artificial; identical to SEQ ID NO: 238820
  Synthetic oligonucleotide

SEQ ID NO: 616941 - DNA, 55 bp, Artificial; identical to SEQ ID NO: 225515
  Synthetic oligonucleotide

SEQ ID NO: 616942 - DNA, 55 bp, Artificial; identical to SEQ ID NO: 181915
  Synthetic oligonucleotide

SEQ ID NO: 616943 - DNA, 55 bp, Artificial; identical to SEQ ID NO: 146292
  Synthetic oligonucleotide

SEQ ID NO: 616944 - DNA, 52 bp, Artificial; identical to SEQ ID NO: 160526
  Synthetic oligonucleotide

SEQ ID NO: 616945 - DNA, 50 bp, Artificial; identical to SEQ ID NO: 246806
  Synthetic oligonucleotide

SEQ ID NO: 616946 - DNA, 52 bp, Artificial; identical to SEQ ID NO: 157626
  Synthetic oligonucleotide

SEQ ID NO: 616947 - DNA, 51 bp, Artificial; identical to SEQ ID NO: 205726
  Synthetic oligonucleotide

SEQ ID NO: 616948 - DNA, 55 bp, Artificial; identical to SEQ ID NO: 167507
  Synthetic oligonucleotide

SEQ ID NO: 616949 - DNA, 55 bp, Artificial; identical to SEQ ID NO: 170959
  Synthetic oligonucleotide

SEQ ID NO: 616950 - DNA, 52 bp, Artificial; identical to SEQ ID NO: 157627
  Synthetic oligonucleotide

SEQ ID NO: 616951 - DNA, 55 bp, Artificial; identical to SEQ ID NO: 148641
  Synthetic oligonucleotide

SEQ ID NO: 616952 - DNA, 55 bp, Artificial; identical to SEQ ID NO: 218212
  Synthetic oligonucleotide

SEQ ID NO: 616953 - DNA, 55 bp, Artificial; identical to SEQ ID NO: 259049
  Synthetic oligonucleotide

SEQ ID NO: 616954 - DNA, 60 bp, Artificial; identical to SEQ ID NO: 151026
  Synthetic oligonucleotide

SEQ ID NO: 616955 - DNA, 59 bp, Artificial; identical to SEQ ID NO: 150989
  Synthetic oligonucleotide

SEQ ID NO: 616956 - DNA, 51 bp, Artificial; identical to SEQ ID NO: 174911
  Synthetic oligonucleotide

SEQ ID NO: 616957 - DNA, 55 bp, Artificial; identical to SEQ ID NO: 168686
  Synthetic oligonucleotide

SEQ ID NO: 616958 - DNA, 54 bp, Artificial; identical to SEQ ID NO: 194961
  Synthetic oligonucleotide

SEQ ID NO: 616959 - DNA, 53 bp, Artificial; identical to SEQ ID NO: 247172
  Synthetic oligonucleotide

SEQ ID NO: 616960 - DNA, 57 bp, Artificial; identical to SEQ ID NO: 177899
  Synthetic oligonucleotide

SEQ ID NO: 616961 - DNA, 53 bp, Artificial; identical to SEQ ID NO: 266673
  Synthetic oligonucleotide

SEQ ID NO: 616962 - DNA, 51 bp, Artificial; identical to SEQ ID NO: 216806
  Synthetic oligonucleotide

SEQ ID NO: 616963 - DNA, 51 bp, Artificial; identical to SEQ ID NO: 239230
  Synthetic oligonucleotide

SEQ ID NO: 616964 - DNA, 48 bp, Artificial; identical to SEQ ID NO: 247737
  Synthetic oligonucleotide

SEQ ID NO: 616965 - DNA, 51 bp, Artificial; identical to SEQ ID NO: 144589
  Synthetic oligonucleotide

SEQ ID NO: 616966 - DNA, 55 bp, Artificial; identical to SEQ ID NO: 240050
  Synthetic oligonucleotide

SEQ ID NO: 616967 - DNA, 54 bp, Artificial; identical to SEQ ID NO: 243756
  Synthetic oligonucleotide

SEQ ID NO: 616968 - DNA, 54 bp, Artificial; identical to SEQ ID NO: 187289
  Synthetic oligonucleotide

SEQ ID NO: 616969 - DNA, 55 bp, Artificial; identical to SEQ ID NO: 198362
  Synthetic oligonucleotide

SEQ ID NO: 616970 - DNA, 57 bp, Artificial; identical to SEQ ID NO: 171019
  Synthetic oligonucleotide

SEQ ID NO: 616971 - DNA, 54 bp, Artificial; identical to SEQ ID NO: 205309
  Synthetic oligonucleotide

SEQ ID NO: 616972 - DNA, 60 bp, Artificial; identical to SEQ ID NO: 217132
  Synthetic oligonucleotide

SEQ ID NO: 616973 - DNA, 58 bp, Artificial; identical to SEQ ID NO: 217131
  Synthetic oligonucleotide

SEQ ID NO: 616974 - DNA, 55 bp, Artificial; identical to SEQ ID NO: 187297
  Synthetic oligonucleotide

SEQ ID NO: 616975 - DNA, 56 bp, Artificial; identical to SEQ ID NO: 203379
  Synthetic oligonucleotide

SEQ ID NO: 616976 - DNA, 48 bp, Artificial; identical to SEQ ID NO: 141801
  Synthetic oligonucleotide

SEQ ID NO: 616977 - DNA, 52 bp, Artificial; identical to SEQ ID NO: 191911
  Synthetic oligonucleotide

SEQ ID NO: 616978 - DNA, 55 bp, Artificial; identical to SEQ ID NO: 190384
  Synthetic oligonucleotide

SEQ ID NO: 616979 - DNA, 51 bp, Artificial; identical to SEQ ID NO: 204030
  Synthetic oligonucleotide

SEQ ID NO: 616980 - DNA, 55 bp, Artificial; identical to SEQ ID NO: 181970
  Synthetic oligonucleotide

SEQ ID NO: 616981 - DNA, 52 bp, Artificial; identical to SEQ ID NO: 218292
  Synthetic oligonucleotide

SEQ ID NO: 616982 - DNA, 51 bp, Artificial; identical to SEQ ID NO: 208704
  Synthetic oligonucleotide

SEQ ID NO: 616983 - DNA, 52 bp, Artificial; identical to SEQ ID NO: 190819
  Synthetic oligonucleotide

SEQ ID NO: 616984 - DNA, 53 bp, Artificial; identical to SEQ ID NO: 247391
  Synthetic oligonucleotide

SEQ ID NO: 616985 - DNA, 55 bp, Artificial; identical to SEQ ID NO: 148652
  Synthetic oligonucleotide

SEQ ID NO: 616986 - DNA, 55 bp, Artificial; identical to SEQ ID NO: 259052
  Synthetic oligonucleotide

SEQ ID NO: 616987 - DNA, 51 bp, Artificial; identical to SEQ ID NO: 171698
  Synthetic oligonucleotide

SEQ ID NO: 616988 - DNA, 50 bp, Artificial; identical to SEQ ID NO: 165427
  Synthetic oligonucleotide

SEQ ID NO: 616989 - DNA, 51 bp, Artificial; identical to SEQ ID NO: 164842
  Synthetic oligonucleotide

SEQ ID NO: 616990 - DNA, 53 bp, Artificial; identical to SEQ ID NO: 199732
  Synthetic oligonucleotide

SEQ ID NO: 616991 - DNA, 52 bp, Artificial; identical to SEQ ID NO: 157630
  Synthetic oligonucleotide

SEQ ID NO: 616992 - DNA, 55 bp, Artificial; identical to SEQ ID NO: 160876
  Synthetic oligonucleotide

SEQ ID NO: 616993 - DNA, 53 bp, Artificial; identical to SEQ ID NO: 221724
  Synthetic oligonucleotide

SEQ ID NO: 616994 - DNA, 50 bp, Artificial; identical to SEQ ID NO: 209820
  Synthetic oligonucleotide

SEQ ID NO: 616995 - DNA, 52 bp, Artificial; identical to SEQ ID NO: 218366
  Synthetic oligonucleotide

SEQ ID NO: 616996 - DNA, 60 bp, Artificial; identical to SEQ ID NO: 141806
  Synthetic oligonucleotide

SEQ ID NO: 616997 - DNA, 50 bp, Artificial; identical to SEQ ID NO: 150001
  Synthetic oligonucleotide

SEQ ID NO: 616998 - DNA, 52 bp, Artificial; identical to SEQ ID NO: 199889
  Synthetic oligonucleotide

SEQ ID NO: 616999 - DNA, 55 bp, Artificial; identical to SEQ ID NO: 208564
  Synthetic oligonucleotide

SEQ ID NO: 617000 - DNA, 55 bp, Artificial; identical to SEQ ID NO: 196243
  Synthetic oligonucleotide

SEQ ID NO: 617001 - DNA, 60 bp, Artificial; identical to SEQ ID NO: 200974
  Synthetic oligonucleotide

SEQ ID NO: 617002 - DNA, 55 bp, Artificial; identical to SEQ ID NO: 221499
  Synthetic oligonucleotide

SEQ ID NO: 617003 - DNA, 55 bp, Artificial; identical to SEQ ID NO: 203783
  Synthetic oligonucleotide

SEQ ID NO: 617004 - DNA, 60 bp, Artificial; identical to SEQ ID NO: 224172
  Synthetic oligonucleotide

SEQ ID NO: 617005 - DNA, 53 bp, Artificial; identical to SEQ ID NO: 181972
  Synthetic oligonucleotide

SEQ ID NO: 617006 - DNA, 55 bp, Artificial; identical to SEQ ID NO: 208565
  Synthetic oligonucleotide

SEQ ID NO: 617007 - DNA, 51 bp, Artificial; identical to SEQ ID NO: 148610
  Synthetic oligonucleotide

SEQ ID NO: 617008 - DNA, 59 bp, Artificial; identical to SEQ ID NO: 179356
  Synthetic oligonucleotide

SEQ ID NO: 617009 - DNA, 54 bp, Artificial; identical to SEQ ID NO: 150997
  Synthetic oligonucleotide

SEQ ID NO: 617010 - DNA, 58 bp, Artificial; identical to SEQ ID NO: 177910
  Synthetic oligonucleotide

SEQ ID NO: 617011 - DNA, 54 bp, Artificial; identical to SEQ ID NO: 156890
  Synthetic oligonucleotide

SEQ ID NO: 617012 - DNA, 60 bp, Artificial; identical to SEQ ID NO: 151000
  Synthetic oligonucleotide

SEQ ID NO: 617013 - DNA, 56 bp, Artificial; identical to SEQ ID NO: 207063
  Synthetic oligonucleotide

SEQ ID NO: 617014 - DNA, 57 bp, Artificial; identical to SEQ ID NO: 191097
  Synthetic oligonucleotide

SEQ ID NO: 617015 - DNA, 60 bp, Artificial; identical to SEQ ID NO: 234175
  Synthetic oligonucleotide

SEQ ID NO: 617016 - DNA, 60 bp, Artificial; identical to SEQ ID NO: 237875
  Synthetic oligonucleotide

SEQ ID NO: 617017 - DNA, 55 bp, Artificial; identical to SEQ ID NO: 233639
  Synthetic oligonucleotide

SEQ ID NO: 617018 - DNA, 55 bp, Artificial; identical to SEQ ID NO: 148623
  Synthetic oligonucleotide

SEQ ID NO: 617019 - DNA, 51 bp, Artificial; identical to SEQ ID NO: 200195
  Synthetic oligonucleotide

SEQ ID NO: 617020 - DNA, 58 bp, Artificial; identical to SEQ ID NO: 151005
  Synthetic oligonucleotide

SEQ ID NO: 617021 - DNA, 52 bp, Artificial; identical to SEQ ID NO: 246556
  Synthetic oligonucleotide

SEQ ID NO: 617022 - DNA, 57 bp, Artificial; identical to SEQ ID NO: 217183
  Synthetic oligonucleotide

SEQ ID NO: 617023 - DNA, 53 bp, Artificial; identical to SEQ ID NO: 164814
  Synthetic oligonucleotide

SEQ ID NO: 617024 - DNA, 50 bp, Artificial; identical to SEQ ID NO: 241192
  Synthetic oligonucleotide

SEQ ID NO: 617025 - DNA, 55 bp, Artificial; identical to SEQ ID NO: 221503
  Synthetic oligonucleotide

SEQ ID NO: 617026 - DNA, 55 bp, Artificial; identical to SEQ ID NO: 224887
  Synthetic oligonucleotide

SEQ ID NO: 617027 - DNA, 55 bp, Artificial; identical to SEQ ID NO: 240035
  Synthetic oligonucleotide

SEQ ID NO: 617028 - DNA, 54 bp, Artificial; identical to SEQ ID NO: 197443
  Synthetic oligonucleotide

SEQ ID NO: 617029 - DNA, 58 bp, Artificial; identical to SEQ ID NO: 203369
  Synthetic oligonucleotide

SEQ ID NO: 617030 - DNA, 55 bp, Artificial; identical to SEQ ID NO: 255004
  Synthetic oligonucleotide

SEQ ID NO: 617031 - DNA, 50 bp, Artificial; identical to SEQ ID NO: 192190
  Synthetic oligonucleotide

SEQ ID NO: 617032 - DNA, 55 bp, Artificial; identical to SEQ ID NO: 198377
  Synthetic oligonucleotide

SEQ ID NO: 617033 - DNA, 51 bp, Artificial; identical to SEQ ID NO: 204027
  Synthetic oligonucleotide

SEQ ID NO: 617034 - DNA, 60 bp, Artificial; identical to SEQ ID NO: 238864
  Synthetic oligonucleotide

SEQ ID NO: 617035 - DNA, 51 bp, Artificial; identical to SEQ ID NO: 186455
  Synthetic oligonucleotide

SEQ ID NO: 617036 - DNA, 59 bp, Artificial; identical to SEQ ID NO: 238862
  Synthetic oligonucleotide

SEQ ID NO: 617037 - DNA, 59 bp, Artificial; identical to SEQ ID NO: 151003
  Synthetic oligonucleotide

SEQ ID NO: 617038 - DNA, 55 bp, Artificial; identical to SEQ ID NO: 148625
  Synthetic oligonucleotide

SEQ ID NO: 617039 - DNA, 56 bp, Artificial; identical to SEQ ID NO: 244062
  Synthetic oligonucleotide

SEQ ID NO: 617040 - DNA, 51 bp, Artificial; identical to SEQ ID NO: 162360
  Synthetic oligonucleotide

SEQ ID NO: 617041 - DNA, 55 bp, Artificial; identical to SEQ ID NO: 217517
  Synthetic oligonucleotide

SEQ ID NO: 617042 - DNA, 54 bp, Artificial; identical to SEQ ID NO: 184990
  Synthetic oligonucleotide

SEQ ID NO: 617043 - DNA, 58 bp, Artificial; identical to SEQ ID NO: 150999
  Synthetic oligonucleotide

SEQ ID NO: 617044 - DNA, 50 bp, Artificial; identical to SEQ ID NO: 206659
  Synthetic oligonucleotide

SEQ ID NO: 617045 - DNA, 55 bp, Artificial; identical to SEQ ID NO: 220658
  Synthetic oligonucleotide

SEQ ID NO: 617046 - DNA, 50 bp, Artificial; identical to SEQ ID NO: 188168
  Synthetic oligonucleotide

SEQ ID NO: 617047 - DNA, 50 bp, Artificial; identical to SEQ ID NO: 149953
  Synthetic oligonucleotide

SEQ ID NO: 617048 - DNA, 56 bp, Artificial; identical to SEQ ID NO: 197883
  Synthetic oligonucleotide

SEQ ID NO: 617049 - DNA, 58 bp, Artificial; identical to SEQ ID NO: 247161
  Synthetic oligonucleotide

SEQ ID NO: 617050 - DNA, 60 bp, Artificial; identical to SEQ ID NO: 170967
  Synthetic oligonucleotide

SEQ ID NO: 617051 - DNA, 59 bp, Artificial; identical to SEQ ID NO: 165978
  Synthetic oligonucleotide

SEQ ID NO: 617052 - DNA, 51 bp, Artificial; identical to SEQ ID NO: 233864
  Synthetic oligonucleotide

SEQ ID NO: 617053 - DNA, 58 bp, Artificial; identical to SEQ ID NO: 238861
  Synthetic oligonucleotide

SEQ ID NO: 617054 - DNA, 57 bp, Artificial; identical to SEQ ID NO: 239417
  Synthetic oligonucleotide

SEQ ID NO: 617055 - DNA, 55 bp, Artificial; identical to SEQ ID NO: 240095
  Synthetic oligonucleotide

SEQ ID NO: 617056 - DNA, 51 bp, Artificial; identical to SEQ ID NO: 154027
  Synthetic oligonucleotide

SEQ ID NO: 617057 - DNA, 55 bp, Artificial; identical to SEQ ID NO: 256288
  Synthetic oligonucleotide

SEQ ID NO: 617058 - DNA, 55 bp, Artificial; identical to SEQ ID NO: 169916
  Synthetic oligonucleotide

SEQ ID NO: 617059 - DNA, 60 bp, Artificial; identical to SEQ ID NO: 212433
  Synthetic oligonucleotide

SEQ ID NO: 617060 - DNA, 55 bp, Artificial; identical to SEQ ID NO: 169224
  Synthetic oligonucleotide

SEQ ID NO: 617061 - DNA, 55 bp, Artificial; identical to SEQ ID NO: 225188
  Synthetic oligonucleotide

SEQ ID NO: 617062 - DNA, 60 bp, Artificial; identical to SEQ ID NO: 141808
  Synthetic oligonucleotide

SEQ ID NO: 617063 - DNA, 55 bp, Artificial; identical to SEQ ID NO: 187860
  Synthetic oligonucleotide

SEQ ID NO: 617064 - DNA, 57 bp, Artificial; identical to SEQ ID NO: 208251
  Synthetic oligonucleotide

SEQ ID NO: 617065 - DNA, 53 bp, Artificial; identical to SEQ ID NO: 238857
  Synthetic oligonucleotide

SEQ ID NO: 617066 - DNA, 56 bp, Artificial; identical to SEQ ID NO: 187301
  Synthetic oligonucleotide

SEQ ID NO: 617067 - DNA, 55 bp, Artificial; identical to SEQ ID NO: 155410
  Synthetic oligonucleotide

SEQ ID NO: 617068 - DNA, 54 bp, Artificial; identical to SEQ ID NO: 143787
  Synthetic oligonucleotide

SEQ ID NO: 617069 - DNA, 52 bp, Artificial; identical to SEQ ID NO: 165103
  Synthetic oligonucleotide

SEQ ID NO: 617070 - DNA, 55 bp, Artificial; identical to SEQ ID NO: 181939
  Synthetic oligonucleotide

SEQ ID NO: 617071 - DNA, 55 bp, Artificial; identical to SEQ ID NO: 160245
  Synthetic oligonucleotide

SEQ ID NO: 617072 - DNA, 55 bp, Artificial; identical to SEQ ID NO: 260223
  Synthetic oligonucleotide

SEQ ID NO: 617073 - DNA, 58 bp, Artificial; identical to SEQ ID NO: 150994
  Synthetic oligonucleotide

SEQ ID NO: 617074 - DNA, 54 bp, Artificial; identical to SEQ ID NO: 199582
  Synthetic oligonucleotide

SEQ ID NO: 617075 - DNA, 55 bp, Artificial; identical to SEQ ID NO: 221506
  Synthetic oligonucleotide

SEQ ID NO: 617076 - DNA, 53 bp, Artificial; identical to SEQ ID NO: 150993
  Synthetic oligonucleotide

SEQ ID NO: 617077 - DNA, 59 bp, Artificial; identical to SEQ ID NO: 243758
  Synthetic oligonucleotide

SEQ ID NO: 617078 - DNA, 52 bp, Artificial; identical to SEQ ID NO: 165105
  Synthetic oligonucleotide

SEQ ID NO: 617079 - DNA, 55 bp, Artificial; identical to SEQ ID NO: 245619
  Synthetic oligonucleotide

SEQ ID NO: 617080 - DNA, 55 bp, Artificial; identical to SEQ ID NO: 190392
  Synthetic oligonucleotide

SEQ ID NO: 617081 - DNA, 53 bp, Artificial; identical to SEQ ID NO: 244149
  Synthetic oligonucleotide

SEQ ID NO: 617082 - DNA, 52 bp, Artificial; identical to SEQ ID NO: 203943
  Synthetic oligonucleotide

SEQ ID NO: 617083 - DNA, 53 bp, Artificial; identical to SEQ ID NO: 218909
  Synthetic oligonucleotide

SEQ ID NO: 617084 - DNA, 56 bp, Artificial; identical to SEQ ID NO: 147047
  Synthetic oligonucleotide

SEQ ID NO: 617085 - DNA, 55 bp, Artificial; identical to SEQ ID NO: 255007
  Synthetic oligonucleotide

SEQ ID NO: 617086 - DNA, 55 bp, Artificial; identical to SEQ ID NO: 198382
  Synthetic oligonucleotide

SEQ ID NO: 617087 - DNA, 55 bp, Artificial; identical to SEQ ID NO: 144861
  Synthetic oligonucleotide

SEQ ID NO: 617088 - DNA, 55 bp, Artificial; identical to SEQ ID NO: 245626
  Synthetic oligonucleotide

SEQ ID NO: 617089 - DNA, 54 bp, Artificial; identical to SEQ ID NO: 217671
  Synthetic oligonucleotide

SEQ ID NO: 617090 - DNA, 55 bp, Artificial; identical to SEQ ID NO: 190393
  Synthetic oligonucleotide

SEQ ID NO: 617091 - DNA, 58 bp, Artificial; identical to SEQ ID NO: 239309
  Synthetic oligonucleotide

SEQ ID NO: 617092 - DNA, 55 bp, Artificial; identical to SEQ ID NO: 168693
  Synthetic oligonucleotide

SEQ ID NO: 617093 - DNA, 55 bp, Artificial; identical to SEQ ID NO: 190394
  Synthetic oligonucleotide

SEQ ID NO: 617094 - DNA, 56 bp, Artificial; identical to SEQ ID NO: 266064
  Synthetic oligonucleotide

SEQ ID NO: 617095 - DNA, 51 bp, Artificial; identical to SEQ ID NO: 200966
  Synthetic oligonucleotide

SEQ ID NO: 617096 - DNA, 53 bp, Artificial; identical to SEQ ID NO: 162286
  Synthetic oligonucleotide

SEQ ID NO: 617097 - DNA, 51 bp, Artificial; identical to SEQ ID NO: 241032
  Synthetic oligonucleotide

SEQ ID NO: 617098 - DNA, 59 bp, Artificial; identical to SEQ ID NO: 151025
  Synthetic oligonucleotide

SEQ ID NO: 617099 - DNA, 58 bp, Artificial; identical to SEQ ID NO: 171719
  Synthetic oligonucleotide

SEQ ID NO: 617100 - DNA, 54 bp, Artificial; identical to SEQ ID NO: 201718
  Synthetic oligonucleotide

SEQ ID NO: 617101 - DNA, 55 bp, Artificial; identical to SEQ ID NO: 156946
  Synthetic oligonucleotide

SEQ ID NO: 617102 - DNA, 55 bp, Artificial; identical to SEQ ID NO: 202246
  Synthetic oligonucleotide

SEQ ID NO: 617103 - DNA, 55 bp, Artificial; identical to SEQ ID NO: 247752
  Synthetic oligonucleotide

SEQ ID NO: 617104 - DNA, 55 bp, Artificial; identical to SEQ ID NO: 266179
  Synthetic oligonucleotide

SEQ ID NO: 617105 - DNA, 52 bp, Artificial; identical to SEQ ID NO: 237043
  Synthetic oligonucleotide

SEQ ID NO: 617106 - DNA, 57 bp, Artificial; identical to SEQ ID NO: 142706
  Synthetic oligonucleotide

SEQ ID NO: 617107 - DNA, 60 bp, Artificial; identical to SEQ ID NO: 243759
  Synthetic oligonucleotide

SEQ ID NO: 617108 - DNA, 53 bp, Artificial; identical to SEQ ID NO: 197523
  Synthetic oligonucleotide

SEQ ID NO: 617109 - DNA, 53 bp, Artificial; identical to SEQ ID NO: 208570
  Synthetic oligonucleotide

SEQ ID NO: 617110 - DNA, 53 bp, Artificial; identical to SEQ ID NO: 218908
  Synthetic oligonucleotide

SEQ ID NO: 617111 - DNA, 60 bp, Artificial; identical to SEQ ID NO: 248556
  Synthetic oligonucleotide

SEQ ID NO: 617112 - DNA, 53 bp, Artificial; identical to SEQ ID NO: 255373
  Synthetic oligonucleotide

SEQ ID NO: 617113 - DNA, 55 bp, Artificial; identical to SEQ ID NO: 238491
  Synthetic oligonucleotide

SEQ ID NO: 617114 - DNA, 57 bp, Artificial; identical to SEQ ID NO: 219498
  Synthetic oligonucleotide

SEQ ID NO: 617115 - DNA, 55 bp, Artificial; identical to SEQ ID NO: 181942
  Synthetic oligonucleotide

SEQ ID NO: 617116 - DNA, 54 bp, Artificial; identical to SEQ ID NO: 218313
  Synthetic oligonucleotide

SEQ ID NO: 617117 - DNA, 60 bp, Artificial; identical to SEQ ID NO: 217186
  Synthetic oligonucleotide

SEQ ID NO: 617118 - DNA, 54 bp, Artificial; identical to SEQ ID NO: 257506
  Synthetic oligonucleotide

SEQ ID NO: 617119 - DNA, 52 bp, Artificial; identical to SEQ ID NO: 149565
  Synthetic oligonucleotide

SEQ ID NO: 617120 - DNA, 53 bp, Artificial; identical to SEQ ID NO: 151020
  Synthetic oligonucleotide

SEQ ID NO: 617121 - DNA, 58 bp, Artificial; identical to SEQ ID NO: 217189
  Synthetic oligonucleotide

SEQ ID NO: 617122 - DNA, 51 bp, Artificial; identical to SEQ ID NO: 246670
  Synthetic oligonucleotide

SEQ ID NO: 617123 - DNA, 50 bp, Artificial; identical to SEQ ID NO: 255949
  Synthetic oligonucleotide

SEQ ID NO: 617124 - DNA, 58 bp, Artificial; identical to SEQ ID NO: 194288
  Synthetic oligonucleotide

SEQ ID NO: 617125 - DNA, 51 bp, Artificial; identical to SEQ ID NO: 149789
  Synthetic oligonucleotide

SEQ ID NO: 617126 - DNA, 55 bp, Artificial; identical to SEQ ID NO: 247155
  Synthetic oligonucleotide

SEQ ID NO: 617127 - DNA, 58 bp, Artificial; identical to SEQ ID NO: 224164
  Synthetic oligonucleotide

SEQ ID NO: 617128 - DNA, 55 bp, Artificial; identical to SEQ ID NO: 202842
  Synthetic oligonucleotide

SEQ ID NO: 617129 - DNA, 55 bp, Artificial; identical to SEQ ID NO: 217191
  Synthetic oligonucleotide

SEQ ID NO: 617130 - DNA, 59 bp, Artificial; identical to SEQ ID NO: 141809
  Synthetic oligonucleotide

SEQ ID NO: 617131 - DNA, 52 bp, Artificial; identical to SEQ ID NO: 217665
  Synthetic oligonucleotide

SEQ ID NO: 617132 - DNA, 50 bp, Artificial; identical to SEQ ID NO: 165895
  Synthetic oligonucleotide

SEQ ID NO: 617133 - DNA, 51 bp, Artificial; identical to SEQ ID NO: 177875
  Synthetic oligonucleotide

SEQ ID NO: 617134 - DNA, 54 bp, Artificial; identical to SEQ ID NO: 243931
  Synthetic oligonucleotide

SEQ ID NO: 617135 - DNA, 55 bp, Artificial; identical to SEQ ID NO: 148692
  Synthetic oligonucleotide

SEQ ID NO: 617136 - DNA, 56 bp, Artificial; identical to SEQ ID NO: 243760
  Synthetic oligonucleotide

SEQ ID NO: 617137 - DNA, 55 bp, Artificial; identical to SEQ ID NO: 148695
  Synthetic oligonucleotide

SEQ ID NO: 617138 - DNA, 50 bp, Artificial; identical to SEQ ID NO: 193952
  Synthetic oligonucleotide

SEQ ID NO: 617139 - DNA, 54 bp, Artificial; identical to SEQ ID NO: 243761
  Synthetic oligonucleotide

SEQ ID NO: 617140 - DNA, 52 bp, Artificial; identical to SEQ ID NO: 206451
  Synthetic oligonucleotide

SEQ ID NO: 617141 - DNA, 58 bp, Artificial; identical to SEQ ID NO: 200963
  Synthetic oligonucleotide

SEQ ID NO: 617142 - DNA, 54 bp, Artificial; identical to SEQ ID NO: 238848
  Synthetic oligonucleotide

SEQ ID NO: 617143 - DNA, 55 bp, Artificial; identical to SEQ ID NO: 255065
  Synthetic oligonucleotide

SEQ ID NO: 617144 - DNA, 55 bp, Artificial; identical to SEQ ID NO: 243762
  Synthetic oligonucleotide

SEQ ID NO: 617145 - DNA, 55 bp, Artificial; identical to SEQ ID NO: 244233
  Synthetic oligonucleotide

SEQ ID NO: 617146 - DNA, 60 bp, Artificial; identical to SEQ ID NO: 177879
  Synthetic oligonucleotide

SEQ ID NO: 617147 - DNA, 56 bp, Artificial; identical to SEQ ID NO: 256333
  Synthetic oligonucleotide

SEQ ID NO: 617148 - DNA, 60 bp, Artificial; identical to SEQ ID NO: 197614
  Synthetic oligonucleotide

SEQ ID NO: 617149 - DNA, 55 bp, Artificial; identical to SEQ ID NO: 234314
  Synthetic oligonucleotide

SEQ ID NO: 617150 - DNA, 60 bp, Artificial; identical to SEQ ID NO: 237879
  Synthetic oligonucleotide

SEQ ID NO: 617151 - DNA, 60 bp, Artificial; identical to SEQ ID NO: 238847
  Synthetic oligonucleotide

SEQ ID NO: 617152 - DNA, 55 bp, Artificial; identical to SEQ ID NO: 160244
  Synthetic oligonucleotide

SEQ ID NO: 617153 - DNA, 50 bp, Artificial; identical to SEQ ID NO: 144605
  Synthetic oligonucleotide

SEQ ID NO: 617154 - DNA, 55 bp, Artificial; identical to SEQ ID NO: 201279
  Synthetic oligonucleotide

SEQ ID NO: 617155 - DNA, 54 bp, Artificial; identical to SEQ ID NO: 243043
  Synthetic oligonucleotide

SEQ ID NO: 617156 - DNA, 54 bp, Artificial; identical to SEQ ID NO: 243763
  Synthetic oligonucleotide

SEQ ID NO: 617157 - DNA, 56 bp, Artificial; identical to SEQ ID NO: 151016
  Synthetic oligonucleotide

SEQ ID NO: 617158 - DNA, 60 bp, Artificial; identical to SEQ ID NO: 187302
  Synthetic oligonucleotide

SEQ ID NO: 617159 - DNA, 59 bp, Artificial; identical to SEQ ID NO: 201471
  Synthetic oligonucleotide

SEQ ID NO: 617160 - DNA, 51 bp, Artificial; identical to SEQ ID NO: 160565
  Synthetic oligonucleotide

SEQ ID NO: 617161 - DNA, 52 bp, Artificial; identical to SEQ ID NO: 188489
  Synthetic oligonucleotide

SEQ ID NO: 617162 - DNA, 52 bp, Artificial; identical to SEQ ID NO: 151015
  Synthetic oligonucleotide

SEQ ID NO: 617163 - DNA, 55 bp, Artificial; identical to SEQ ID NO: 194706
  Synthetic oligonucleotide

SEQ ID NO: 617164 - DNA, 55 bp, Artificial; identical to SEQ ID NO: 205506
  Synthetic oligonucleotide

SEQ ID NO: 617165 - DNA, 55 bp, Artificial; identical to SEQ ID NO: 152350
  Synthetic oligonucleotide

SEQ ID NO: 617166 - DNA, 52 bp, Artificial; identical to SEQ ID NO: 200956
  Synthetic oligonucleotide

SEQ ID NO: 617167 - DNA, 55 bp, Artificial; identical to SEQ ID NO: 181947
  Synthetic oligonucleotide

SEQ ID NO: 617168 - DNA, 51 bp, Artificial; identical to SEQ ID NO: 189669
  Synthetic oligonucleotide

SEQ ID NO: 617169 - DNA, 60 bp, Artificial; identical to SEQ ID NO: 200994
  Synthetic oligonucleotide

SEQ ID NO: 617170 - DNA, 60 bp, Artificial; identical to SEQ ID NO: 257469
  Synthetic oligonucleotide

SEQ ID NO: 617171 - DNA, 55 bp, Artificial; identical to SEQ ID NO: 169227
  Synthetic oligonucleotide

SEQ ID NO: 617172 - DNA, 53 bp, Artificial; identical to SEQ ID NO: 201908
  Synthetic oligonucleotide

SEQ ID NO: 617173 - DNA, 60 bp, Artificial; identical to SEQ ID NO: 152099
  Synthetic oligonucleotide

SEQ ID NO: 617174 - DNA, 52 bp, Artificial; identical to SEQ ID NO: 157637
  Synthetic oligonucleotide

SEQ ID NO: 617175 - DNA, 57 bp, Artificial; identical to SEQ ID NO: 151014
  Synthetic oligonucleotide

SEQ ID NO: 617176 - DNA, 53 bp, Artificial; identical to SEQ ID NO: 199705
  Synthetic oligonucleotide

SEQ ID NO: 617177 - DNA, 52 bp, Artificial; identical to SEQ ID NO: 208807
  Synthetic oligonucleotide

SEQ ID NO: 617178 - DNA, 59 bp, Artificial; identical to SEQ ID NO: 177889
  Synthetic oligonucleotide

SEQ ID NO: 617179 - DNA, 55 bp, Artificial; identical to SEQ ID NO: 244193
  Synthetic oligonucleotide

SEQ ID NO: 617180 - DNA, 50 bp, Artificial; identical to SEQ ID NO: 176602
  Synthetic oligonucleotide

SEQ ID NO: 617181 - DNA, 55 bp, Artificial; identical to SEQ ID NO: 243764
  Synthetic oligonucleotide

SEQ ID NO: 617182 - DNA, 55 bp, Artificial; identical to SEQ ID NO: 191060
  Synthetic oligonucleotide

SEQ ID NO: 617183 - DNA, 55 bp, Artificial; identical to SEQ ID NO: 148707
  Synthetic oligonucleotide

SEQ ID NO: 617184 - DNA, 51 bp, Artificial; identical to SEQ ID NO: 149787
  Synthetic oligonucleotide

SEQ ID NO: 617185 - DNA, 56 bp, Artificial; identical to SEQ ID NO: 248554
  Synthetic oligonucleotide

SEQ ID NO: 617186 - DNA, 60 bp, Artificial; identical to SEQ ID NO: 166013
  Synthetic oligonucleotide

SEQ ID NO: 617187 - DNA, 60 bp, Artificial; identical to SEQ ID NO: 177890
  Synthetic oligonucleotide

SEQ ID NO: 617188 - DNA, 58 bp, Artificial; identical to SEQ ID NO: 243970
  Synthetic oligonucleotide

SEQ ID NO: 617189 - DNA, 60 bp, Artificial; identical to SEQ ID NO: 194152
  Synthetic oligonucleotide

SEQ ID NO: 617190 - DNA, 55 bp, Artificial; identical to SEQ ID NO: 198332
  Synthetic oligonucleotide

SEQ ID NO: 617191 - DNA, 57 bp, Artificial; identical to SEQ ID NO: 150966
  Synthetic oligonucleotide

SEQ ID NO: 617192 - DNA, 50 bp, Artificial; identical to SEQ ID NO: 171921
  Synthetic oligonucleotide

SEQ ID NO: 617193 - DNA, 54 bp, Artificial; identical to SEQ ID NO: 211515
  Synthetic oligonucleotide

SEQ ID NO: 617194 - DNA, 51 bp, Artificial; identical to SEQ ID NO: 167612
  Synthetic oligonucleotide

SEQ ID NO: 617195 - DNA, 55 bp, Artificial; identical to SEQ ID NO: 235131
  Synthetic oligonucleotide

SEQ ID NO: 617196 - DNA, 53 bp, Artificial; identical to SEQ ID NO: 185458
  Synthetic oligonucleotide

SEQ ID NO: 617197 - DNA, 55 bp, Artificial; identical to SEQ ID NO: 217662
  Synthetic oligonucleotide

SEQ ID NO: 617198 - DNA, 55 bp, Artificial; identical to SEQ ID NO: 201261
  Synthetic oligonucleotide

SEQ ID NO: 617199 - DNA, 53 bp, Artificial; identical to SEQ ID NO: 146400
  Synthetic oligonucleotide

SEQ ID NO: 617200 - DNA, 55 bp, Artificial; identical to SEQ ID NO: 154369
  Synthetic oligonucleotide

SEQ ID NO: 617201 - DNA, 55 bp, Artificial; identical to SEQ ID NO: 245628
  Synthetic oligonucleotide

SEQ ID NO: 617202 - DNA, 54 bp, Artificial; identical to SEQ ID NO: 200986
  Synthetic oligonucleotide

SEQ ID NO: 617203 - DNA, 56 bp, Artificial; identical to SEQ ID NO: 238844
  Synthetic oligonucleotide

SEQ ID NO: 617204 - DNA, 59 bp, Artificial; identical to SEQ ID NO: 200985
  Synthetic oligonucleotide

SEQ ID NO: 617205 - DNA, 55 bp, Artificial; identical to SEQ ID NO: 221475
  Synthetic oligonucleotide

SEQ ID NO: 617206 - DNA, 55 bp, Artificial; identical to SEQ ID NO: 156942
  Synthetic oligonucleotide

SEQ ID NO: 617207 - DNA, 55 bp, Artificial; identical to SEQ ID NO: 243766
  Synthetic oligonucleotide

SEQ ID NO: 617208 - DNA, 60 bp, Artificial; identical to SEQ ID NO: 166016
  Synthetic oligonucleotide

SEQ ID NO: 617209 - DNA, 52 bp, Artificial; identical to SEQ ID NO: 192114
  Synthetic oligonucleotide

SEQ ID NO: 617210 - DNA, 56 bp, Artificial; identical to SEQ ID NO: 142514
  Synthetic oligonucleotide

SEQ ID NO: 617211 - DNA, 55 bp, Artificial; identical to SEQ ID NO: 191059
  Synthetic oligonucleotide

SEQ ID NO: 617212 - DNA, 50 bp, Artificial; identical to SEQ ID NO: 176587
  Synthetic oligonucleotide

SEQ ID NO: 617213 - DNA, 58 bp, Artificial; identical to SEQ ID NO: 247108
  Synthetic oligonucleotide

SEQ ID NO: 617214 - DNA, 55 bp, Artificial; identical to SEQ ID NO: 191908
  Synthetic oligonucleotide

SEQ ID NO: 617215 - DNA, 52 bp, Artificial; identical to SEQ ID NO: 186096
  Synthetic oligonucleotide

SEQ ID NO: 617216 - DNA, 50 bp, Artificial; identical to SEQ ID NO: 243404
  Synthetic oligonucleotide

SEQ ID NO: 617217 - DNA, 57 bp, Artificial; identical to SEQ ID NO: 243768
  Synthetic oligonucleotide

SEQ ID NO: 617218 - DNA, 58 bp, Artificial; identical to SEQ ID NO: 233929
  Synthetic oligonucleotide

SEQ ID NO: 617219 - DNA, 51 bp, Artificial; identical to SEQ ID NO: 255676
  Synthetic oligonucleotide

SEQ ID NO: 617220 - DNA, 60 bp, Artificial; identical to SEQ ID NO: 201910
  Synthetic oligonucleotide

SEQ ID NO: 617221 - DNA, 50 bp, Artificial; identical to SEQ ID NO: 241187
  Synthetic oligonucleotide

SEQ ID NO: 617222 - DNA, 55 bp, Artificial; identical to SEQ ID NO: 148661
  Synthetic oligonucleotide

SEQ ID NO: 617223 - DNA, 58 bp, Artificial; identical to SEQ ID NO: 217197
  Synthetic oligonucleotide

SEQ ID NO: 617224 - DNA, 56 bp, Artificial; identical to SEQ ID NO: 161442
  Synthetic oligonucleotide

SEQ ID NO: 617225 - DNA, 55 bp, Artificial; identical to SEQ ID NO: 181474
  Synthetic oligonucleotide

SEQ ID NO: 617226 - DNA, 53 bp, Artificial; identical to SEQ ID NO: 162285
  Synthetic oligonucleotide

SEQ ID NO: 617227 - DNA, 53 bp, Artificial; identical to SEQ ID NO: 147165
  Synthetic oligonucleotide

SEQ ID NO: 617228 - DNA, 55 bp, Artificial; identical to SEQ ID NO: 197247
  Synthetic oligonucleotide

SEQ ID NO: 617229 - DNA, 55 bp, Artificial; identical to SEQ ID NO: 194739
  Synthetic oligonucleotide

SEQ ID NO: 617230 - DNA, 55 bp, Artificial; identical to SEQ ID NO: 244126
  Synthetic oligonucleotide

SEQ ID NO: 617231 - DNA, 59 bp, Artificial; identical to SEQ ID NO: 256536
  Synthetic oligonucleotide

SEQ ID NO: 617232 - DNA, 60 bp, Artificial; identical to SEQ ID NO: 253519
  Synthetic oligonucleotide

SEQ ID NO: 617233 - DNA, 51 bp, Artificial; identical to SEQ ID NO: 146476
  Synthetic oligonucleotide

SEQ ID NO: 617234 - DNA, 54 bp, Artificial; identical to SEQ ID NO: 255215
  Synthetic oligonucleotide

SEQ ID NO: 617235 - DNA, 55 bp, Artificial; identical to SEQ ID NO: 188370
  Synthetic oligonucleotide

SEQ ID NO: 617236 - DNA, 56 bp, Artificial; identical to SEQ ID NO: 212491
  Synthetic oligonucleotide

SEQ ID NO: 617237 - DNA, 56 bp, Artificial; identical to SEQ ID NO: 200981
  Synthetic oligonucleotide

SEQ ID NO: 617238 - DNA, 55 bp, Artificial; identical to SEQ ID NO: 208536
  Synthetic oligonucleotide

SEQ ID NO: 617239 - DNA, 60 bp, Artificial; identical to SEQ ID NO: 203334
  Synthetic oligonucleotide

SEQ ID NO: 617240 - DNA, 50 bp, Artificial; identical to SEQ ID NO: 209826
  Synthetic oligonucleotide

SEQ ID NO: 617241 - DNA, 55 bp, Artificial; identical to SEQ ID NO: 255087
  Synthetic oligonucleotide

SEQ ID NO: 617242 - DNA, 51 bp, Artificial; identical to SEQ ID NO: 252726
  Synthetic oligonucleotide

SEQ ID NO: 617243 - DNA, 56 bp, Artificial; identical to SEQ ID NO: 168311
  Synthetic oligonucleotide

SEQ ID NO: 617244 - DNA, 54 bp, Artificial; identical to SEQ ID NO: 190683
  Synthetic oligonucleotide

SEQ ID NO: 617245 - DNA, 55 bp, Artificial; identical to SEQ ID NO: 164439
  Synthetic oligonucleotide

SEQ ID NO: 617246 - DNA, 51 bp, Artificial; identical to SEQ ID NO: 200130
  Synthetic oligonucleotide

SEQ ID NO: 617247 - DNA, 55 bp, Artificial; identical to SEQ ID NO: 198344
  Synthetic oligonucleotide

SEQ ID NO: 617248 - DNA, 55 bp, Artificial; identical to SEQ ID NO: 221477
  Synthetic oligonucleotide

SEQ ID NO: 617249 - DNA, 55 bp, Artificial; identical to SEQ ID NO: 181475
  Synthetic oligonucleotide

SEQ ID NO: 617250 - DNA, 55 bp, Artificial; identical to SEQ ID NO: 143731
  Synthetic oligonucleotide

SEQ ID NO: 617251 - DNA, 55 bp, Artificial; identical to SEQ ID NO: 224890
  Synthetic oligonucleotide

SEQ ID NO: 617252 - DNA, 55 bp, Artificial; identical to SEQ ID NO: 238073
  Synthetic oligonucleotide

SEQ ID NO: 617253 - DNA, 54 bp, Artificial; identical to SEQ ID NO: 177748
  Synthetic oligonucleotide

SEQ ID NO: 617254 - DNA, 55 bp, Artificial; identical to SEQ ID NO: 156938
  Synthetic oligonucleotide

SEQ ID NO: 617255 - DNA, 60 bp, Artificial; identical to SEQ ID NO: 256338
  Synthetic oligonucleotide

SEQ ID NO: 617256 - DNA, 55 bp, Artificial; identical to SEQ ID NO: 181482
  Synthetic oligonucleotide

SEQ ID NO: 617257 - DNA, 55 bp, Artificial; identical to SEQ ID NO: 244141
  Synthetic oligonucleotide

SEQ ID NO: 617258 - DNA, 58 bp, Artificial; identical to SEQ ID NO: 147162
  Synthetic oligonucleotide

SEQ ID NO: 617259 - DNA, 60 bp, Artificial; identical to SEQ ID NO: 187291
  Synthetic oligonucleotide

SEQ ID NO: 617260 - DNA, 60 bp, Artificial; identical to SEQ ID NO: 200980
  Synthetic oligonucleotide

SEQ ID NO: 617261 - DNA, 55 bp, Artificial; identical to SEQ ID NO: 188970
  Synthetic oligonucleotide

SEQ ID NO: 617262 - DNA, 55 bp, Artificial; identical to SEQ ID NO: 191057
  Synthetic oligonucleotide

SEQ ID NO: 617263 - DNA, 60 bp, Artificial; identical to SEQ ID NO: 150963
  Synthetic oligonucleotide

SEQ ID NO: 617264 - DNA, 55 bp, Artificial; identical to SEQ ID NO: 244105
  Synthetic oligonucleotide

SEQ ID NO: 617265 - DNA, 53 bp, Artificial; identical to SEQ ID NO: 253811
  Synthetic oligonucleotide

SEQ ID NO: 617266 - DNA, 55 bp, Artificial; identical to SEQ ID NO: 142123
  Synthetic oligonucleotide

SEQ ID NO: 617267 - DNA, 55 bp, Artificial; identical to SEQ ID NO: 164438
  Synthetic oligonucleotide

SEQ ID NO: 617268 - DNA, 55 bp, Artificial; identical to SEQ ID NO: 171512
  Synthetic oligonucleotide

SEQ ID NO: 617269 - DNA, 51 bp, Artificial; identical to SEQ ID NO: 167552
  Synthetic oligonucleotide

SEQ ID NO: 617270 - DNA, 53 bp, Artificial; identical to SEQ ID NO: 208541
  Synthetic oligonucleotide

SEQ ID NO: 617271 - DNA, 51 bp, Artificial; identical to SEQ ID NO: 149786
  Synthetic oligonucleotide

SEQ ID NO: 617272 - DNA, 60 bp, Artificial; identical to SEQ ID NO: 141813
  Synthetic oligonucleotide

SEQ ID NO: 617273 - DNA, 55 bp, Artificial; identical to SEQ ID NO: 164437
  Synthetic oligonucleotide

SEQ ID NO: 617274 - DNA, 55 bp, Artificial; identical to SEQ ID NO: 255048
  Synthetic oligonucleotide

SEQ ID NO: 617275 - DNA, 54 bp, Artificial; identical to SEQ ID NO: 249139
  Synthetic oligonucleotide

SEQ ID NO: 617276 - DNA, 51 bp, Artificial; identical to SEQ ID NO: 205739
  Synthetic oligonucleotide

SEQ ID NO: 617277 - DNA, 54 bp, Artificial; identical to SEQ ID NO: 149273
  Synthetic oligonucleotide

SEQ ID NO: 617278 - DNA, 53 bp, Artificial; identical to SEQ ID NO: 233829
  Synthetic oligonucleotide

SEQ ID NO: 617279 - DNA, 59 bp, Artificial; identical to SEQ ID NO: 242374
  Synthetic oligonucleotide

SEQ ID NO: 617280 - DNA, 52 bp, Artificial; identical to SEQ ID NO: 206448
  Synthetic oligonucleotide

SEQ ID NO: 617281 - DNA, 58 bp, Artificial; identical to SEQ ID NO: 239247
  Synthetic oligonucleotide

SEQ ID NO: 617282 - DNA, 50 bp, Artificial; identical to SEQ ID NO: 209785
  Synthetic oligonucleotide

SEQ ID NO: 617283 - DNA, 60 bp, Artificial; identical to SEQ ID NO: 177707
  Synthetic oligonucleotide

SEQ ID NO: 617284 - DNA, 51 bp, Artificial; identical to SEQ ID NO: 216772
  Synthetic oligonucleotide

SEQ ID NO: 617285 - DNA, 55 bp, Artificial; identical to SEQ ID NO: 236443
  Synthetic oligonucleotide

SEQ ID NO: 617286 - DNA, 51 bp, Artificial; identical to SEQ ID NO: 149785
  Synthetic oligonucleotide

SEQ ID NO: 617287 - DNA, 51 bp, Artificial; identical to SEQ ID NO: 200139
  Synthetic oligonucleotide

SEQ ID NO: 617288 - DNA, 55 bp, Artificial; identical to SEQ ID NO: 187478
  Synthetic oligonucleotide

SEQ ID NO: 617289 - DNA, 51 bp, Artificial; identical to SEQ ID NO: 246652
  Synthetic oligonucleotide

SEQ ID NO: 617290 - DNA, 56 bp, Artificial; identical to SEQ ID NO: 150955
  Synthetic oligonucleotide

SEQ ID NO: 617291 - DNA, 58 bp, Artificial; identical to SEQ ID NO: 177710
  Synthetic oligonucleotide

SEQ ID NO: 617292 - DNA, 55 bp, Artificial; identical to SEQ ID NO: 198356
  Synthetic oligonucleotide

SEQ ID NO: 617293 - DNA, 55 bp, Artificial; identical to SEQ ID NO: 202245
  Synthetic oligonucleotide

SEQ ID NO: 617294 - DNA, 56 bp, Artificial; identical to SEQ ID NO: 150950
  Synthetic oligonucleotide

SEQ ID NO: 617295 - DNA, 58 bp, Artificial; identical to SEQ ID NO: 242372
  Synthetic oligonucleotide

SEQ ID NO: 617296 - DNA, 59 bp, Artificial; identical to SEQ ID NO: 177714
  Synthetic oligonucleotide

SEQ ID NO: 617297 - DNA, 51 bp, Artificial; identical to SEQ ID NO: 186427
  Synthetic oligonucleotide

SEQ ID NO: 617298 - DNA, 51 bp, Artificial; identical to SEQ ID NO: 216778
  Synthetic oligonucleotide

SEQ ID NO: 617299 - DNA, 55 bp, Artificial; identical to SEQ ID NO: 242370
  Synthetic oligonucleotide

SEQ ID NO: 617300 - DNA, 55 bp, Artificial; identical to SEQ ID NO: 255057
  Synthetic oligonucleotide

SEQ ID NO: 617301 - DNA, 52 bp, Artificial; identical to SEQ ID NO: 149552
  Synthetic oligonucleotide

SEQ ID NO: 617302 - DNA, 60 bp, Artificial; identical to SEQ ID NO: 177720
  Synthetic oligonucleotide

SEQ ID NO: 617303 - DNA, 50 bp, Artificial; identical to SEQ ID NO: 150053
  Synthetic oligonucleotide

SEQ ID NO: 617304 - DNA, 57 bp, Artificial; identical to SEQ ID NO: 247106
  Synthetic oligonucleotide

SEQ ID NO: 617305 - DNA, 53 bp, Artificial; identical to SEQ ID NO: 246266
  Synthetic oligonucleotide

SEQ ID NO: 617306 - DNA, 55 bp, Artificial; identical to SEQ ID NO: 156930
  Synthetic oligonucleotide

SEQ ID NO: 617307 - DNA, 50 bp, Artificial; identical to SEQ ID NO: 161414
  Synthetic oligonucleotide

SEQ ID NO: 617308 - DNA, 48 bp, Artificial; identical to SEQ ID NO: 179799
  Synthetic oligonucleotide

SEQ ID NO: 617309 - DNA, 55 bp, Artificial; identical to SEQ ID NO: 253553
  Synthetic oligonucleotide

SEQ ID NO: 617310 - DNA, 55 bp, Artificial; identical to SEQ ID NO: 210852
  Synthetic oligonucleotide

SEQ ID NO: 617311 - DNA, 58 bp, Artificial; identical to SEQ ID NO: 142733
  Synthetic oligonucleotide

SEQ ID NO: 617312 - DNA, 54 bp, Artificial; identical to SEQ ID NO: 185169
  Synthetic oligonucleotide

SEQ ID NO: 617313 - DNA, 55 bp, Artificial; identical to SEQ ID NO: 156928
  Synthetic oligonucleotide

SEQ ID NO: 617314 - DNA, 53 bp, Artificial; identical to SEQ ID NO: 149441
  Synthetic oligonucleotide

SEQ ID NO: 617315 - DNA, 53 bp, Artificial; identical to SEQ ID NO: 212954
  Synthetic oligonucleotide

SEQ ID NO: 617316 - DNA, 58 bp, Artificial; identical to SEQ ID NO: 166500
  Synthetic oligonucleotide

SEQ ID NO: 617317 - DNA, 54 bp, Artificial; identical to SEQ ID NO: 197392
  Synthetic oligonucleotide

SEQ ID NO: 617318 - DNA, 51 bp, Artificial; identical to SEQ ID NO: 192243
  Synthetic oligonucleotide

SEQ ID NO: 617319 - DNA, 55 bp, Artificial; identical to SEQ ID NO: 255063
  Synthetic oligonucleotide

SEQ ID NO: 617320 - DNA, 51 bp, Artificial; identical to SEQ ID NO: 255688
  Synthetic oligonucleotide

SEQ ID NO: 617321 - DNA, 55 bp, Artificial; identical to SEQ ID NO: 237884
  Synthetic oligonucleotide

SEQ ID NO: 617322 - DNA, 52 bp, Artificial; identical to SEQ ID NO: 144544
  Synthetic oligonucleotide

SEQ ID NO: 617323 - DNA, 54 bp, Artificial; identical to SEQ ID NO: 150977
  Synthetic oligonucleotide

SEQ ID NO: 617324 - DNA, 54 bp, Artificial; identical to SEQ ID NO: 243054
  Synthetic oligonucleotide

SEQ ID NO: 617325 - DNA, 56 bp, Artificial; identical to SEQ ID NO: 210775
  Synthetic oligonucleotide

SEQ ID NO: 617326 - DNA, 55 bp, Artificial; identical to SEQ ID NO: 150975
  Synthetic oligonucleotide

SEQ ID NO: 617327 - DNA, 55 bp, Artificial; identical to SEQ ID NO: 154366
  Synthetic oligonucleotide

SEQ ID NO: 617328 - DNA, 55 bp, Artificial; identical to SEQ ID NO: 238214
  Synthetic oligonucleotide

SEQ ID NO: 617329 - DNA, 57 bp, Artificial; identical to SEQ ID NO: 256347
  Synthetic oligonucleotide

SEQ ID NO: 617330 - DNA, 55 bp, Artificial; identical to SEQ ID NO: 198683
  Synthetic oligonucleotide

SEQ ID NO: 617331 - DNA, 53 bp, Artificial; identical to SEQ ID NO: 185543
  Synthetic oligonucleotide

SEQ ID NO: 617332 - DNA, 55 bp, Artificial; identical to SEQ ID NO: 218248
  Synthetic oligonucleotide

SEQ ID NO: 617333 - DNA, 51 bp, Artificial; identical to SEQ ID NO: 200119
  Synthetic oligonucleotide

SEQ ID NO: 617334 - DNA, 56 bp, Artificial; identical to SEQ ID NO: 256348
  Synthetic oligonucleotide

SEQ ID NO: 617335 - DNA, 53 bp, Artificial; identical to SEQ ID NO: 149434
  Synthetic oligonucleotide

SEQ ID NO: 617336 - DNA, 55 bp, Artificial; identical to SEQ ID NO: 202840
  Synthetic oligonucleotide

SEQ ID NO: 617337 - DNA, 51 bp, Artificial; identical to SEQ ID NO: 241018
  Synthetic oligonucleotide

SEQ ID NO: 617338 - DNA, 55 bp, Artificial; identical to SEQ ID NO: 255064
  Synthetic oligonucleotide

SEQ ID NO: 617339 - DNA, 52 bp, Artificial; identical to SEQ ID NO: 144542
  Synthetic oligonucleotide

SEQ ID NO: 617340 - DNA, 56 bp, Artificial; identical to SEQ ID NO: 208285
  Synthetic oligonucleotide

SEQ ID NO: 617341 - DNA, 55 bp, Artificial; identical to SEQ ID NO: 144895
  Synthetic oligonucleotide

SEQ ID NO: 617342 - DNA, 56 bp, Artificial; identical to SEQ ID NO: 152044
  Synthetic oligonucleotide

SEQ ID NO: 617343 - DNA, 60 bp, Artificial; identical to SEQ ID NO: 151083
  Synthetic oligonucleotide

SEQ ID NO: 617344 - DNA, 51 bp, Artificial; identical to SEQ ID NO: 206513
  Synthetic oligonucleotide

SEQ ID NO: 617345 - DNA, 55 bp, Artificial; identical to SEQ ID NO: 181459
  Synthetic oligonucleotide

SEQ ID NO: 617346 - DNA, 55 bp, Artificial; identical to SEQ ID NO: 198685
  Synthetic oligonucleotide

SEQ ID NO: 617347 - DNA, 58 bp, Artificial; identical to SEQ ID NO: 247447
  Synthetic oligonucleotide

SEQ ID NO: 617348 - DNA, 53 bp, Artificial; identical to SEQ ID NO: 209605
  Synthetic oligonucleotide

SEQ ID NO: 617349 - DNA, 55 bp, Artificial; identical to SEQ ID NO: 197245
  Synthetic oligonucleotide

SEQ ID NO: 617350 - DNA, 60 bp, Artificial; identical to SEQ ID NO: 194149
  Synthetic oligonucleotide

SEQ ID NO: 617351 - DNA, 60 bp, Artificial; identical to SEQ ID NO: 177798
  Synthetic oligonucleotide

SEQ ID NO: 617352 - DNA, 55 bp, Artificial; identical to SEQ ID NO: 151739
  Synthetic oligonucleotide

SEQ ID NO: 617353 - DNA, 54 bp, Artificial; identical to SEQ ID NO: 177799
  Synthetic oligonucleotide

SEQ ID NO: 617354 - DNA, 55 bp, Artificial; identical to SEQ ID NO: 148501
  Synthetic oligonucleotide

SEQ ID NO: 617355 - DNA, 55 bp, Artificial; identical to SEQ ID NO: 148509
  Synthetic oligonucleotide

SEQ ID NO: 617356 - DNA, 55 bp, Artificial; identical to SEQ ID NO: 239565
  Synthetic oligonucleotide

SEQ ID NO: 617357 - DNA, 56 bp, Artificial; identical to SEQ ID NO: 239564
  Synthetic oligonucleotide

SEQ ID NO: 617358 - DNA, 51 bp, Artificial; identical to SEQ ID NO: 149743
  Synthetic oligonucleotide

SEQ ID NO: 617359 - DNA, 60 bp, Artificial; identical to SEQ ID NO: 201469
  Synthetic oligonucleotide

SEQ ID NO: 617360 - DNA, 56 bp, Artificial; identical to SEQ ID NO: 225545
  Synthetic oligonucleotide

SEQ ID NO: 617361 - DNA, 60 bp, Artificial; identical to SEQ ID NO: 212450
  Synthetic oligonucleotide

SEQ ID NO: 617362 - DNA, 55 bp, Artificial; identical to SEQ ID NO: 181463
  Synthetic oligonucleotide

SEQ ID NO: 617363 - DNA, 55 bp, Artificial; identical to SEQ ID NO: 181466
  Synthetic oligonucleotide

SEQ ID NO: 617364 - DNA, 55 bp, Artificial; identical to SEQ ID NO: 181467
  Synthetic oligonucleotide

SEQ ID NO: 617365 - DNA, 55 bp, Artificial; identical to SEQ ID NO: 221481
  Synthetic oligonucleotide

SEQ ID NO: 617366 - DNA, 51 bp, Artificial; identical to SEQ ID NO: 253337
  Synthetic oligonucleotide

SEQ ID NO: 617367 - DNA, 49 bp, Artificial; identical to SEQ ID NO: 191267
  Synthetic oligonucleotide

SEQ ID NO: 617368 - DNA, 55 bp, Artificial; identical to SEQ ID NO: 217655
  Synthetic oligonucleotide

SEQ ID NO: 617369 - DNA, 56 bp, Artificial; identical to SEQ ID NO: 242361
  Synthetic oligonucleotide

SEQ ID NO: 617370 - DNA, 60 bp, Artificial; identical to SEQ ID NO: 177809
  Synthetic oligonucleotide

SEQ ID NO: 617371 - DNA, 60 bp, Artificial; identical to SEQ ID NO: 177753
  Synthetic oligonucleotide

SEQ ID NO: 617372 - DNA, 55 bp, Artificial; identical to SEQ ID NO: 181515
  Synthetic oligonucleotide

SEQ ID NO: 617373 - DNA, 54 bp, Artificial; identical to SEQ ID NO: 168197
  Synthetic oligonucleotide

SEQ ID NO: 617374 - DNA, 55 bp, Artificial; identical to SEQ ID NO: 148572
  Synthetic oligonucleotide

SEQ ID NO: 617375 - DNA, 55 bp, Artificial; identical to SEQ ID NO: 198686
  Synthetic oligonucleotide

SEQ ID NO: 617376 - DNA, 60 bp, Artificial; identical to SEQ ID NO: 170935
  Synthetic oligonucleotide

SEQ ID NO: 617377 - DNA, 56 bp, Artificial; identical to SEQ ID NO: 152562
  Synthetic oligonucleotide

SEQ ID NO: 617378 - DNA, 54 bp, Artificial; identical to SEQ ID NO: 155510
  Synthetic oligonucleotide

SEQ ID NO: 617379 - DNA, 52 bp, Artificial; identical to SEQ ID NO: 141274
  Synthetic oligonucleotide

SEQ ID NO: 617380 - DNA, 55 bp, Artificial; identical to SEQ ID NO: 254581
  Synthetic oligonucleotide

SEQ ID NO: 617381 - DNA, 60 bp, Artificial; identical to SEQ ID NO: 209083
  Synthetic oligonucleotide

SEQ ID NO: 617382 - DNA, 50 bp, Artificial; identical to SEQ ID NO: 258335
  Synthetic oligonucleotide

SEQ ID NO: 617383 - DNA, 56 bp, Artificial; identical to SEQ ID NO: 242359
  Synthetic oligonucleotide

SEQ ID NO: 617384 - DNA, 58 bp, Artificial; identical to SEQ ID NO: 151074
  Synthetic oligonucleotide

SEQ ID NO: 617385 - DNA, 53 bp, Artificial; identical to SEQ ID NO: 185457
  Synthetic oligonucleotide

SEQ ID NO: 617386 - DNA, 53 bp, Artificial; identical to SEQ ID NO: 242500
  Synthetic oligonucleotide

SEQ ID NO: 617387 - DNA, 50 bp, Artificial; identical to SEQ ID NO: 151071
  Synthetic oligonucleotide

SEQ ID NO: 617388 - DNA, 55 bp, Artificial; identical to SEQ ID NO: 254584
  Synthetic oligonucleotide

SEQ ID NO: 617389 - DNA, 54 bp, Artificial; identical to SEQ ID NO: 156924
  Synthetic oligonucleotide

SEQ ID NO: 617390 - DNA, 54 bp, Artificial; identical to SEQ ID NO: 167043
  Synthetic oligonucleotide

SEQ ID NO: 617391 - DNA, 52 bp, Artificial; identical to SEQ ID NO: 246545
  Synthetic oligonucleotide

SEQ ID NO: 617392 - DNA, 54 bp, Artificial; identical to SEQ ID NO: 187999
  Synthetic oligonucleotide

SEQ ID NO: 617393 - DNA, 55 bp, Artificial; identical to SEQ ID NO: 144455
  Synthetic oligonucleotide

SEQ ID NO: 617394 - DNA, 55 bp, Artificial; identical to SEQ ID NO: 151740
  Synthetic oligonucleotide

SEQ ID NO: 617395 - DNA, 58 bp, Artificial; identical to SEQ ID NO: 179445
  Synthetic oligonucleotide

SEQ ID NO: 617396 - DNA, 60 bp, Artificial; identical to SEQ ID NO: 208296
  Synthetic oligonucleotide

SEQ ID NO: 617397 - DNA, 60 bp, Artificial; identical to SEQ ID NO: 217176
  Synthetic oligonucleotide

SEQ ID NO: 617398 - DNA, 60 bp, Artificial; identical to SEQ ID NO: 242357
  Synthetic oligonucleotide

SEQ ID NO: 617399 - DNA, 60 bp, Artificial; identical to SEQ ID NO: 212452
  Synthetic oligonucleotide

SEQ ID NO: 617400 - DNA, 50 bp, Artificial; identical to SEQ ID NO: 176557
  Synthetic oligonucleotide

SEQ ID NO: 617401 - DNA, 60 bp, Artificial; identical to SEQ ID NO: 168778
  Synthetic oligonucleotide

SEQ ID NO: 617402 - DNA, 54 bp, Artificial; identical to SEQ ID NO: 203882
  Synthetic oligonucleotide

SEQ ID NO: 617403 - DNA, 55 bp, Artificial; identical to SEQ ID NO: 253233
  Synthetic oligonucleotide

SEQ ID NO: 617404 - DNA, 54 bp, Artificial; identical to SEQ ID NO: 147056
  Synthetic oligonucleotide

SEQ ID NO: 617405 - DNA, 57 bp, Artificial; identical to SEQ ID NO: 151066
  Synthetic oligonucleotide

SEQ ID NO: 617406 - DNA, 55 bp, Artificial; identical to SEQ ID NO: 198689
  Synthetic oligonucleotide

SEQ ID NO: 617407 - DNA, 52 bp, Artificial; identical to SEQ ID NO: 199940
  Synthetic oligonucleotide

SEQ ID NO: 617408 - DNA, 53 bp, Artificial; identical to SEQ ID NO: 141242
  Synthetic oligonucleotide

SEQ ID NO: 617409 - DNA, 60 bp, Artificial; identical to SEQ ID NO: 248502
  Synthetic oligonucleotide

SEQ ID NO: 617410 - DNA, 53 bp, Artificial; identical to SEQ ID NO: 149433
  Synthetic oligonucleotide

SEQ ID NO: 617411 - DNA, 52 bp, Artificial; identical to SEQ ID NO: 190835
  Synthetic oligonucleotide

SEQ ID NO: 617412 - DNA, 55 bp, Artificial; identical to SEQ ID NO: 217175
  Synthetic oligonucleotide

SEQ ID NO: 617413 - DNA, 55 bp, Artificial; identical to SEQ ID NO: 187468
  Synthetic oligonucleotide

SEQ ID NO: 617414 - DNA, 55 bp, Artificial; identical to SEQ ID NO: 187460
  Synthetic oligonucleotide

SEQ ID NO: 617415 - DNA, 55 bp, Artificial; identical to SEQ ID NO: 148574
  Synthetic oligonucleotide

SEQ ID NO: 617416 - DNA, 53 bp, Artificial; identical to SEQ ID NO: 221716
  Synthetic oligonucleotide

SEQ ID NO: 617417 - DNA, 59 bp, Artificial; identical to SEQ ID NO: 170958
  Synthetic oligonucleotide

SEQ ID NO: 617418 - DNA, 55 bp, Artificial; identical to SEQ ID NO: 245705
  Synthetic oligonucleotide

SEQ ID NO: 617419 - DNA, 58 bp, Artificial; identical to SEQ ID NO: 242355
  Synthetic oligonucleotide

SEQ ID NO: 617420 - DNA, 54 bp, Artificial; identical to SEQ ID NO: 253259
  Synthetic oligonucleotide

SEQ ID NO: 617421 - DNA, 55 bp, Artificial; identical to SEQ ID NO: 257746
  Synthetic oligonucleotide

SEQ ID NO: 617422 - DNA, 50 bp, Artificial; identical to SEQ ID NO: 193136
  Synthetic oligonucleotide

SEQ ID NO: 617423 - DNA, 55 bp, Artificial; identical to SEQ ID NO: 148581
  Synthetic oligonucleotide

SEQ ID NO: 617424 - DNA, 55 bp, Artificial; identical to SEQ ID NO: 181524
  Synthetic oligonucleotide

SEQ ID NO: 617425 - DNA, 55 bp, Artificial; identical to SEQ ID NO: 168719
  Synthetic oligonucleotide

SEQ ID NO: 617426 - DNA, 55 bp, Artificial; identical to SEQ ID NO: 253235
  Synthetic oligonucleotide

SEQ ID NO: 617427 - DNA, 50 bp, Artificial; identical to SEQ ID NO: 176745
  Synthetic oligonucleotide

SEQ ID NO: 617428 - DNA, 60 bp, Artificial; identical to SEQ ID NO: 247101
  Synthetic oligonucleotide

SEQ ID NO: 617429 - DNA, 50 bp, Artificial; identical to SEQ ID NO: 234687
  Synthetic oligonucleotide

SEQ ID NO: 617430 - DNA, 55 bp, Artificial; identical to SEQ ID NO: 238143
  Synthetic oligonucleotide

SEQ ID NO: 617431 - DNA, 52 bp, Artificial; identical to SEQ ID NO: 240873
  Synthetic oligonucleotide

SEQ ID NO: 617432 - DNA, 55 bp, Artificial; identical to SEQ ID NO: 224899
  Synthetic oligonucleotide

SEQ ID NO: 617433 - DNA, 55 bp, Artificial; identical to SEQ ID NO: 191907
  Synthetic oligonucleotide

SEQ ID NO: 617434 - DNA, 50 bp, Artificial; identical to SEQ ID NO: 206648
  Synthetic oligonucleotide

SEQ ID NO: 617435 - DNA, 55 bp, Artificial; identical to SEQ ID NO: 245706
  Synthetic oligonucleotide

SEQ ID NO: 617436 - DNA, 54 bp, Artificial; identical to SEQ ID NO: 149244
  Synthetic oligonucleotide

SEQ ID NO: 617437 - DNA, 50 bp, Artificial; identical to SEQ ID NO: 206647
  Synthetic oligonucleotide

SEQ ID NO: 617438 - DNA, 60 bp, Artificial; identical to SEQ ID NO: 151096
  Synthetic oligonucleotide

SEQ ID NO: 617439 - DNA, 50 bp, Artificial; identical to SEQ ID NO: 165869
  Synthetic oligonucleotide

SEQ ID NO: 617440 - DNA, 60 bp, Artificial; identical to SEQ ID NO: 242411
  Synthetic oligonucleotide

SEQ ID NO: 617441 - DNA, 52 bp, Artificial; identical to SEQ ID NO: 167101
  Synthetic oligonucleotide

SEQ ID NO: 617442 - DNA, 54 bp, Artificial; identical to SEQ ID NO: 199517
  Synthetic oligonucleotide

SEQ ID NO: 617443 - DNA, 54 bp, Artificial; identical to SEQ ID NO: 265982
  Synthetic oligonucleotide

SEQ ID NO: 617444 - DNA, 51 bp, Artificial; identical to SEQ ID NO: 266306
  Synthetic oligonucleotide

SEQ ID NO: 617445 - DNA, 55 bp, Artificial; identical to SEQ ID NO: 164393
  Synthetic oligonucleotide

SEQ ID NO: 617446 - DNA, 52 bp, Artificial; identical to SEQ ID NO: 186063
  Synthetic oligonucleotide

SEQ ID NO: 617447 - DNA, 57 bp, Artificial; identical to SEQ ID NO: 151094
  Synthetic oligonucleotide

SEQ ID NO: 617448 - DNA, 55 bp, Artificial; identical to SEQ ID NO: 187394
  Synthetic oligonucleotide

SEQ ID NO: 617449 - DNA, 51 bp, Artificial; identical to SEQ ID NO: 256317
  Synthetic oligonucleotide

SEQ ID NO: 617450 - DNA, 52 bp, Artificial; identical to SEQ ID NO: 141264
  Synthetic oligonucleotide

SEQ ID NO: 617451 - DNA, 53 bp, Artificial; identical to SEQ ID NO: 201647
  Synthetic oligonucleotide

SEQ ID NO: 617452 - DNA, 55 bp, Artificial; identical to SEQ ID NO: 254569
  Synthetic oligonucleotide

SEQ ID NO: 617453 - DNA, 60 bp, Artificial; identical to SEQ ID NO: 242407
  Synthetic oligonucleotide

SEQ ID NO: 617454 - DNA, 58 bp, Artificial; identical to SEQ ID NO: 200922
  Synthetic oligonucleotide

SEQ ID NO: 617455 - DNA, 55 bp, Artificial; identical to SEQ ID NO: 191056
  Synthetic oligonucleotide

SEQ ID NO: 617456 - DNA, 59 bp, Artificial; identical to SEQ ID NO: 151092
  Synthetic oligonucleotide

SEQ ID NO: 617457 - DNA, 55 bp, Artificial; identical to SEQ ID NO: 166345
  Synthetic oligonucleotide

SEQ ID NO: 617458 - DNA, 50 bp, Artificial; identical to SEQ ID NO: 200498
  Synthetic oligonucleotide

SEQ ID NO: 617459 - DNA, 54 bp, Artificial; identical to SEQ ID NO: 243049
  Synthetic oligonucleotide

SEQ ID NO: 617460 - DNA, 53 bp, Artificial; identical to SEQ ID NO: 194144
  Synthetic oligonucleotide

SEQ ID NO: 617461 - DNA, 50 bp, Artificial; identical to SEQ ID NO: 255791
  Synthetic oligonucleotide

SEQ ID NO: 617462 - DNA, 58 bp, Artificial; identical to SEQ ID NO: 242405
  Synthetic oligonucleotide

SEQ ID NO: 617463 - DNA, 54 bp, Artificial; identical to SEQ ID NO: 240634
  Synthetic oligonucleotide

SEQ ID NO: 617464 - DNA, 51 bp, Artificial; identical to SEQ ID NO: 193791
  Synthetic oligonucleotide

SEQ ID NO: 617465 - DNA, 54 bp, Artificial; identical to SEQ ID NO: 243978
  Synthetic oligonucleotide

SEQ ID NO: 617466 - DNA, 54 bp, Artificial; identical to SEQ ID NO: 197237
  Synthetic oligonucleotide

SEQ ID NO: 617467 - DNA, 53 bp, Artificial; identical to SEQ ID NO: 217174
  Synthetic oligonucleotide

SEQ ID NO: 617468 - DNA, 55 bp, Artificial; identical to SEQ ID NO: 188955
  Synthetic oligonucleotide

SEQ ID NO: 617469 - DNA, 50 bp, Artificial; identical to SEQ ID NO: 223940
  Synthetic oligonucleotide

SEQ ID NO: 617470 - DNA, 52 bp, Artificial; identical to SEQ ID NO: 153618
  Synthetic oligonucleotide

SEQ ID NO: 617471 - DNA, 60 bp, Artificial; identical to SEQ ID NO: 237862
  Synthetic oligonucleotide

SEQ ID NO: 617472 - DNA, 55 bp, Artificial; identical to SEQ ID NO: 154357
  Synthetic oligonucleotide

SEQ ID NO: 617473 - DNA, 55 bp, Artificial; identical to SEQ ID NO: 153406
  Synthetic oligonucleotide

SEQ ID NO: 617474 - DNA, 58 bp, Artificial; identical to SEQ ID NO: 242402
  Synthetic oligonucleotide

SEQ ID NO: 617475 - DNA, 50 bp, Artificial; identical to SEQ ID NO: 165984
  Synthetic oligonucleotide

SEQ ID NO: 617476 - DNA, 55 bp, Artificial; identical to SEQ ID NO: 201648
  Synthetic oligonucleotide

SEQ ID NO: 617477 - DNA, 53 bp, Artificial; identical to SEQ ID NO: 216626
  Synthetic oligonucleotide

SEQ ID NO: 617478 - DNA, 57 bp, Artificial; identical to SEQ ID NO: 224366
  Synthetic oligonucleotide

SEQ ID NO: 617479 - DNA, 50 bp, Artificial; identical to SEQ ID NO: 209081
  Synthetic oligonucleotide

SEQ ID NO: 617480 - DNA, 50 bp, Artificial; identical to SEQ ID NO: 248122
  Synthetic oligonucleotide

SEQ ID NO: 617481 - DNA, 53 bp, Artificial; identical to SEQ ID NO: 144999
  Synthetic oligonucleotide

SEQ ID NO: 617482 - DNA, 55 bp, Artificial; identical to SEQ ID NO: 151085
  Synthetic oligonucleotide

SEQ ID NO: 617483 - DNA, 54 bp, Artificial; identical to SEQ ID NO: 212832
  Synthetic oligonucleotide

SEQ ID NO: 617484 - DNA, 52 bp, Artificial; identical to SEQ ID NO: 255517
  Synthetic oligonucleotide

SEQ ID NO: 617485 - DNA, 54 bp, Artificial; identical to SEQ ID NO: 149251
  Synthetic oligonucleotide

SEQ ID NO: 617486 - DNA, 52 bp, Artificial; identical to SEQ ID NO: 205723
  Synthetic oligonucleotide

SEQ ID NO: 617487 - DNA, 60 bp, Artificial; identical to SEQ ID NO: 242399
  Synthetic oligonucleotide

SEQ ID NO: 617488 - DNA, 57 bp, Artificial; identical to SEQ ID NO: 243790
  Synthetic oligonucleotide

SEQ ID NO: 617489 - DNA, 60 bp, Artificial; identical to SEQ ID NO: 178077
  Synthetic oligonucleotide

SEQ ID NO: 617490 - DNA, 55 bp, Artificial; identical to SEQ ID NO: 211060
  Synthetic oligonucleotide

SEQ ID NO: 617491 - DNA, 52 bp, Artificial; identical to SEQ ID NO: 149576
  Synthetic oligonucleotide

SEQ ID NO: 617492 - DNA, 55 bp, Artificial; identical to SEQ ID NO: 217171
  Synthetic oligonucleotide

SEQ ID NO: 617493 - DNA, 56 bp, Artificial; identical to SEQ ID NO: 242398
  Synthetic oligonucleotide

SEQ ID NO: 617494 - DNA, 54 bp, Artificial; identical to SEQ ID NO: 149272
  Synthetic oligonucleotide

SEQ ID NO: 617495 - DNA, 58 bp, Artificial; identical to SEQ ID NO: 178079
  Synthetic oligonucleotide

SEQ ID NO: 617496 - DNA, 57 bp, Artificial; identical to SEQ ID NO: 242396
  Synthetic oligonucleotide

SEQ ID NO: 617497 - DNA, 52 bp, Artificial; identical to SEQ ID NO: 258187
  Synthetic oligonucleotide

SEQ ID NO: 617498 - DNA, 51 bp, Artificial; identical to SEQ ID NO: 186457
  Synthetic oligonucleotide

SEQ ID NO: 617499 - DNA, 58 bp, Artificial; identical to SEQ ID NO: 200918
  Synthetic oligonucleotide

SEQ ID NO: 617500 - DNA, 59 bp, Artificial; identical to SEQ ID NO: 200955
  Synthetic oligonucleotide

SEQ ID NO: 617501 - DNA, 57 bp, Artificial; identical to SEQ ID NO: 178081
  Synthetic oligonucleotide

SEQ ID NO: 617502 - DNA, 50 bp, Artificial; identical to SEQ ID NO: 223854
  Synthetic oligonucleotide

SEQ ID NO: 617503 - DNA, 51 bp, Artificial; identical to SEQ ID NO: 223738
  Synthetic oligonucleotide

SEQ ID NO: 617504 - DNA, 53 bp, Artificial; identical to SEQ ID NO: 202445
  Synthetic oligonucleotide

SEQ ID NO: 617505 - DNA, 55 bp, Artificial; identical to SEQ ID NO: 162224
  Synthetic oligonucleotide

SEQ ID NO: 617506 - DNA, 53 bp, Artificial; identical to SEQ ID NO: 201652
  Synthetic oligonucleotide

SEQ ID NO: 617507 - DNA, 55 bp, Artificial; identical to SEQ ID NO: 247096
  Synthetic oligonucleotide

SEQ ID NO: 617508 - DNA, 52 bp, Artificial; identical to SEQ ID NO: 151040
  Synthetic oligonucleotide

SEQ ID NO: 617509 - DNA, 57 bp, Artificial; identical to SEQ ID NO: 179842
  Synthetic oligonucleotide

SEQ ID NO: 617510 - DNA, 54 bp, Artificial; identical to SEQ ID NO: 207584
  Synthetic oligonucleotide

SEQ ID NO: 617511 - DNA, 52 bp, Artificial; identical to SEQ ID NO: 190830
  Synthetic oligonucleotide

SEQ ID NO: 617512 - DNA, 57 bp, Artificial; identical to SEQ ID NO: 247531
  Synthetic oligonucleotide

SEQ ID NO: 617513 - DNA, 53 bp, Artificial; identical to SEQ ID NO: 160802
  Synthetic oligonucleotide

SEQ ID NO: 617514 - DNA, 52 bp, Artificial; identical to SEQ ID NO: 171681
  Synthetic oligonucleotide

SEQ ID NO: 617515 - DNA, 55 bp, Artificial; identical to SEQ ID NO: 143688
  Synthetic oligonucleotide

SEQ ID NO: 617516 - DNA, 51 bp, Artificial; identical to SEQ ID NO: 247473
  Synthetic oligonucleotide

SEQ ID NO: 617517 - DNA, 54 bp, Artificial; identical to SEQ ID NO: 159832
  Synthetic oligonucleotide

SEQ ID NO: 617518 - DNA, 55 bp, Artificial; identical to SEQ ID NO: 181490
  Synthetic oligonucleotide

SEQ ID NO: 617519 - DNA, 55 bp, Artificial; identical to SEQ ID NO: 239299
  Synthetic oligonucleotide

SEQ ID NO: 617520 - DNA, 53 bp, Artificial; identical to SEQ ID NO: 243078
  Synthetic oligonucleotide

SEQ ID NO: 617521 - DNA, 52 bp, Artificial; identical to SEQ ID NO: 239179
  Synthetic oligonucleotide

SEQ ID NO: 617522 - DNA, 50 bp, Artificial; identical to SEQ ID NO: 200442
  Synthetic oligonucleotide

SEQ ID NO: 617523 - DNA, 48 bp, Artificial; identical to SEQ ID NO: 209080
  Synthetic oligonucleotide

SEQ ID NO: 617524 - DNA, 59 bp, Artificial; identical to SEQ ID NO: 247129
  Synthetic oligonucleotide

SEQ ID NO: 617525 - DNA, 52 bp, Artificial; identical to SEQ ID NO: 200952
  Synthetic oligonucleotide

SEQ ID NO: 617526 - DNA, 55 bp, Artificial; identical to SEQ ID NO: 238146
  Synthetic oligonucleotide

SEQ ID NO: 617527 - DNA, 53 bp, Artificial; identical to SEQ ID NO: 160238
  Synthetic oligonucleotide

SEQ ID NO: 617528 - DNA, 51 bp, Artificial; identical to SEQ ID NO: 162357
  Synthetic oligonucleotide

SEQ ID NO: 617529 - DNA, 52 bp, Artificial; identical to SEQ ID NO: 193785
  Synthetic oligonucleotide

SEQ ID NO: 617530 - DNA, 54 bp, Artificial; identical to SEQ ID NO: 240641
  Synthetic oligonucleotide

SEQ ID NO: 617531 - DNA, 56 bp, Artificial; identical to SEQ ID NO: 179933
  Synthetic oligonucleotide

SEQ ID NO: 617532 - DNA, 57 bp, Artificial; identical to SEQ ID NO: 210784
  Synthetic oligonucleotide

SEQ ID NO: 617533 - DNA, 55 bp, Artificial; identical to SEQ ID NO: 170978
  Synthetic oligonucleotide

SEQ ID NO: 617534 - DNA, 51 bp, Artificial; identical to SEQ ID NO: 157739
  Synthetic oligonucleotide

SEQ ID NO: 617535 - DNA, 51 bp, Artificial; identical to SEQ ID NO: 169025
  Synthetic oligonucleotide

SEQ ID NO: 617536 - DNA, 55 bp, Artificial; identical to SEQ ID NO: 222655
  Synthetic oligonucleotide

SEQ ID NO: 617537 - DNA, 52 bp, Artificial; identical to SEQ ID NO: 223680
  Synthetic oligonucleotide

SEQ ID NO: 617538 - DNA, 55 bp, Artificial; identical to SEQ ID NO: 148552
  Synthetic oligonucleotide

SEQ ID NO: 617539 - DNA, 57 bp, Artificial; identical to SEQ ID NO: 167210
  Synthetic oligonucleotide

SEQ ID NO: 617540 - DNA, 60 bp, Artificial; identical to SEQ ID NO: 163901
  Synthetic oligonucleotide

SEQ ID NO: 617541 - DNA, 50 bp, Artificial; identical to SEQ ID NO: 209140
  Synthetic oligonucleotide

SEQ ID NO: 617542 - DNA, 53 bp, Artificial; identical to SEQ ID NO: 240819
  Synthetic oligonucleotide

SEQ ID NO: 617543 - DNA, 54 bp, Artificial; identical to SEQ ID NO: 181501
  Synthetic oligonucleotide

SEQ ID NO: 617544 - DNA, 60 bp, Artificial; identical to SEQ ID NO: 247128
  Synthetic oligonucleotide

SEQ ID NO: 617545 - DNA, 55 bp, Artificial; identical to SEQ ID NO: 247127
  Synthetic oligonucleotide

SEQ ID NO: 617546 - DNA, 56 bp, Artificial; identical to SEQ ID NO: 258901
  Synthetic oligonucleotide

SEQ ID NO: 617547 - DNA, 55 bp, Artificial; identical to SEQ ID NO: 242385
  Synthetic oligonucleotide

SEQ ID NO: 617548 - DNA, 55 bp, Artificial; identical to SEQ ID NO: 243784
  Synthetic oligonucleotide

SEQ ID NO: 617549 - DNA, 52 bp, Artificial; identical to SEQ ID NO: 186045
  Synthetic oligonucleotide

SEQ ID NO: 617550 - DNA, 55 bp, Artificial; identical to SEQ ID NO: 148564
  Synthetic oligonucleotide

SEQ ID NO: 617551 - DNA, 60 bp, Artificial; identical to SEQ ID NO: 163890
  Synthetic oligonucleotide

SEQ ID NO: 617552 - DNA, 60 bp, Artificial; identical to SEQ ID NO: 151036
  Synthetic oligonucleotide

SEQ ID NO: 617553 - DNA, 55 bp, Artificial; identical to SEQ ID NO: 190370
  Synthetic oligonucleotide

SEQ ID NO: 617554 - DNA, 55 bp, Artificial; identical to SEQ ID NO: 156918
  Synthetic oligonucleotide

SEQ ID NO: 617555 - DNA, 56 bp, Artificial; identical to SEQ ID NO: 266063
  Synthetic oligonucleotide

SEQ ID NO: 617556 - DNA, 57 bp, Artificial; identical to SEQ ID NO: 247125
  Synthetic oligonucleotide

SEQ ID NO: 617557 - DNA, 57 bp, Artificial; identical to SEQ ID NO: 248491
  Synthetic oligonucleotide

SEQ ID NO: 617558 - DNA, 56 bp, Artificial; identical to SEQ ID NO: 142711
  Synthetic oligonucleotide

SEQ ID NO: 617559 - DNA, 58 bp, Artificial; identical to SEQ ID NO: 206871
  Synthetic oligonucleotide

SEQ ID NO: 617560 - DNA, 49 bp, Artificial; identical to SEQ ID NO: 194140
  Synthetic oligonucleotide

SEQ ID NO: 617561 - DNA, 51 bp, Artificial; identical to SEQ ID NO: 186398
  Synthetic oligonucleotide

SEQ ID NO: 617562 - DNA, 55 bp, Artificial; identical to SEQ ID NO: 242566
  Synthetic oligonucleotide

SEQ ID NO: 617563 - DNA, 60 bp, Artificial; identical to SEQ ID NO: 153028
  Synthetic oligonucleotide

SEQ ID NO: 617564 - DNA, 51 bp, Artificial; identical to SEQ ID NO: 266271
  Synthetic oligonucleotide

SEQ ID NO: 617565 - DNA, 55 bp, Artificial; identical to SEQ ID NO: 242324
  Synthetic oligonucleotide

SEQ ID NO: 617566 - DNA, 51 bp, Artificial; identical to SEQ ID NO: 241055
  Synthetic oligonucleotide

SEQ ID NO: 617567 - DNA, 50 bp, Artificial; identical to SEQ ID NO: 206645
  Synthetic oligonucleotide

SEQ ID NO: 617568 - DNA, 60 bp, Artificial; identical to SEQ ID NO: 178048
  Synthetic oligonucleotide

SEQ ID NO: 617569 - DNA, 50 bp, Artificial; identical to SEQ ID NO: 170288
  Synthetic oligonucleotide

SEQ ID NO: 617570 - DNA, 60 bp, Artificial; identical to SEQ ID NO: 217167
  Synthetic oligonucleotide

SEQ ID NO: 617571 - DNA, 51 bp, Artificial; identical to SEQ ID NO: 195246
  Synthetic oligonucleotide

SEQ ID NO: 617572 - DNA, 53 bp, Artificial; identical to SEQ ID NO: 209113
  Synthetic oligonucleotide

SEQ ID NO: 617573 - DNA, 55 bp, Artificial; identical to SEQ ID NO: 254623
  Synthetic oligonucleotide

SEQ ID NO: 617574 - DNA, 55 bp, Artificial; identical to SEQ ID NO: 242617
  Synthetic oligonucleotide

SEQ ID NO: 617575 - DNA, 53 bp, Artificial; identical to SEQ ID NO: 151035
  Synthetic oligonucleotide

SEQ ID NO: 617576 - DNA, 55 bp, Artificial; identical to SEQ ID NO: 222656
  Synthetic oligonucleotide

SEQ ID NO: 617577 - DNA, 57 bp, Artificial; identical to SEQ ID NO: 256632
  Synthetic oligonucleotide

SEQ ID NO: 617578 - DNA, 54 bp, Artificial; identical to SEQ ID NO: 159962
  Synthetic oligonucleotide

SEQ ID NO: 617579 - DNA, 48 bp, Artificial; identical to SEQ ID NO: 240274
  Synthetic oligonucleotide

SEQ ID NO: 617580 - DNA, 55 bp, Artificial; identical to SEQ ID NO: 221487
  Synthetic oligonucleotide

SEQ ID NO: 617581 - DNA, 51 bp, Artificial; identical to SEQ ID NO: 216773
  Synthetic oligonucleotide

SEQ ID NO: 617582 - DNA, 60 bp, Artificial; identical to SEQ ID NO: 168900
  Synthetic oligonucleotide

SEQ ID NO: 617583 - DNA, 56 bp, Artificial; identical to SEQ ID NO: 141781
  Synthetic oligonucleotide

SEQ ID NO: 617584 - DNA, 50 bp, Artificial; identical to SEQ ID NO: 192188
  Synthetic oligonucleotide

SEQ ID NO: 617585 - DNA, 53 bp, Artificial; identical to SEQ ID NO: 201857
  Synthetic oligonucleotide

SEQ ID NO: 617586 - DNA, 57 bp, Artificial; identical to SEQ ID NO: 256325
  Synthetic oligonucleotide

SEQ ID NO: 617587 - DNA, 55 bp, Artificial; identical to SEQ ID NO: 245726
  Synthetic oligonucleotide

SEQ ID NO: 617588 - DNA, 53 bp, Artificial; identical to SEQ ID NO: 239578
  Synthetic oligonucleotide

SEQ ID NO: 617589 - DNA, 57 bp, Artificial; identical to SEQ ID NO: 242321
  Synthetic oligonucleotide

SEQ ID NO: 617590 - DNA, 55 bp, Artificial; identical to SEQ ID NO: 234307
  Synthetic oligonucleotide

SEQ ID NO: 617591 - DNA, 58 bp, Artificial; identical to SEQ ID NO: 247433
  Synthetic oligonucleotide

SEQ ID NO: 617592 - DNA, 55 bp, Artificial; identical to SEQ ID NO: 243782
  Synthetic oligonucleotide

SEQ ID NO: 617593 - DNA, 56 bp, Artificial; identical to SEQ ID NO: 242320
  Synthetic oligonucleotide

SEQ ID NO: 617594 - DNA, 55 bp, Artificial; identical to SEQ ID NO: 254626
  Synthetic oligonucleotide

SEQ ID NO: 617595 - DNA, 57 bp, Artificial; identical to SEQ ID NO: 212455
  Synthetic oligonucleotide

SEQ ID NO: 617596 - DNA, 55 bp, Artificial; identical to SEQ ID NO: 151293
  Synthetic oligonucleotide

SEQ ID NO: 617597 - DNA, 55 bp, Artificial; identical to SEQ ID NO: 212830
  Synthetic oligonucleotide

SEQ ID NO: 617598 - DNA, 53 bp, Artificial; identical to SEQ ID NO: 154579
  Synthetic oligonucleotide

SEQ ID NO: 617599 - DNA, 52 bp, Artificial; identical to SEQ ID NO: 153405
  Synthetic oligonucleotide

SEQ ID NO: 617600 - DNA, 52 bp, Artificial; identical to SEQ ID NO: 168954
  Synthetic oligonucleotide

SEQ ID NO: 617601 - DNA, 55 bp, Artificial; identical to SEQ ID NO: 254639
  Synthetic oligonucleotide

SEQ ID NO: 617602 - DNA, 55 bp, Artificial; identical to SEQ ID NO: 144456
  Synthetic oligonucleotide

SEQ ID NO: 617603 - DNA, 55 bp, Artificial; identical to SEQ ID NO: 249122
  Synthetic oligonucleotide

SEQ ID NO: 617604 - DNA, 55 bp, Artificial; identical to SEQ ID NO: 198674
  Synthetic oligonucleotide

SEQ ID NO: 617605 - DNA, 52 bp, Artificial; identical to SEQ ID NO: 190827
  Synthetic oligonucleotide

SEQ ID NO: 617606 - DNA, 52 bp, Artificial; identical to SEQ ID NO: 255288
  Synthetic oligonucleotide

SEQ ID NO: 617607 - DNA, 56 bp, Artificial; identical to SEQ ID NO: 202937
  Synthetic oligonucleotide

SEQ ID NO: 617608 - DNA, 60 bp, Artificial; identical to SEQ ID NO: 151031
  Synthetic oligonucleotide

SEQ ID NO: 617609 - DNA, 55 bp, Artificial; identical to SEQ ID NO: 181383
  Synthetic oligonucleotide

SEQ ID NO: 617610 - DNA, 59 bp, Artificial; identical to SEQ ID NO: 248584
  Synthetic oligonucleotide

SEQ ID NO: 617611 - DNA, 54 bp, Artificial; identical to SEQ ID NO: 194942
  Synthetic oligonucleotide

SEQ ID NO: 617612 - DNA, 60 bp, Artificial; identical to SEQ ID NO: 206869
  Synthetic oligonucleotide

SEQ ID NO: 617613 - DNA, 55 bp, Artificial; identical to SEQ ID NO: 160235
  Synthetic oligonucleotide

SEQ ID NO: 617614 - DNA, 55 bp, Artificial; identical to SEQ ID NO: 254641
  Synthetic oligonucleotide

SEQ ID NO: 617615 - DNA, 56 bp, Artificial; identical to SEQ ID NO: 239574
  Synthetic oligonucleotide

SEQ ID NO: 617616 - DNA, 59 bp, Artificial; identical to SEQ ID NO: 187266
  Synthetic oligonucleotide

SEQ ID NO: 617617 - DNA, 56 bp, Artificial; identical to SEQ ID NO: 189660
  Synthetic oligonucleotide

SEQ ID NO: 617618 - DNA, 53 bp, Artificial; identical to SEQ ID NO: 197482
  Synthetic oligonucleotide

SEQ ID NO: 617619 - DNA, 57 bp, Artificial; identical to SEQ ID NO: 247119
  Synthetic oligonucleotide

SEQ ID NO: 617620 - DNA, 60 bp, Artificial; identical to SEQ ID NO: 151029
  Synthetic oligonucleotide

SEQ ID NO: 617621 - DNA, 53 bp, Artificial; identical to SEQ ID NO: 199821
  Synthetic oligonucleotide

SEQ ID NO: 617622 - DNA, 54 bp, Artificial; identical to SEQ ID NO: 247782
  Synthetic oligonucleotide

SEQ ID NO: 617623 - DNA, 59 bp, Artificial; identical to SEQ ID NO: 237843
  Synthetic oligonucleotide

SEQ ID NO: 617624 - DNA, 55 bp, Artificial; identical to SEQ ID NO: 245678
  Synthetic oligonucleotide

SEQ ID NO: 617625 - DNA, 52 bp, Artificial; identical to SEQ ID NO: 240896
  Synthetic oligonucleotide

SEQ ID NO: 617626 - DNA, 52 bp, Artificial; identical to SEQ ID NO: 200943
  Synthetic oligonucleotide

SEQ ID NO: 617627 - DNA, 50 bp, Artificial; identical to SEQ ID NO: 200468
  Synthetic oligonucleotide

SEQ ID NO: 617628 - DNA, 60 bp, Artificial; identical to SEQ ID NO: 141783
  Synthetic oligonucleotide

SEQ ID NO: 617629 - DNA, 53 bp, Artificial; identical to SEQ ID NO: 149412
  Synthetic oligonucleotide

SEQ ID NO: 617630 - DNA, 54 bp, Artificial; identical to SEQ ID NO: 209208
  Synthetic oligonucleotide

SEQ ID NO: 617631 - DNA, 54 bp, Artificial; identical to SEQ ID NO: 168955
  Synthetic oligonucleotide

SEQ ID NO: 617632 - DNA, 52 bp, Artificial; identical to SEQ ID NO: 187018
  Synthetic oligonucleotide

SEQ ID NO: 617633 - DNA, 52 bp, Artificial; identical to SEQ ID NO: 199511
  Synthetic oligonucleotide

SEQ ID NO: 617634 - DNA, 55 bp, Artificial; identical to SEQ ID NO: 148568
  Synthetic oligonucleotide

SEQ ID NO: 617635 - DNA, 60 bp, Artificial; identical to SEQ ID NO: 237886
  Synthetic oligonucleotide

SEQ ID NO: 617636 - DNA, 55 bp, Artificial; identical to SEQ ID NO: 254601
  Synthetic oligonucleotide

SEQ ID NO: 617637 - DNA, 52 bp, Artificial; identical to SEQ ID NO: 187019
  Synthetic oligonucleotide

SEQ ID NO: 617638 - DNA, 55 bp, Artificial; identical to SEQ ID NO: 181388
  Synthetic oligonucleotide

SEQ ID NO: 617639 - DNA, 56 bp, Artificial; identical to SEQ ID NO: 142712
  Synthetic oligonucleotide

SEQ ID NO: 617640 - DNA, 50 bp, Artificial; identical to SEQ ID NO: 150425
  Synthetic oligonucleotide

SEQ ID NO: 617641 - DNA, 51 bp, Artificial; identical to SEQ ID NO: 144565
  Synthetic oligonucleotide

SEQ ID NO: 617642 - DNA, 52 bp, Artificial; identical to SEQ ID NO: 213034
  Synthetic oligonucleotide

SEQ ID NO: 617643 - DNA, 55 bp, Artificial; identical to SEQ ID NO: 249156
  Synthetic oligonucleotide

SEQ ID NO: 617644 - DNA, 55 bp, Artificial; identical to SEQ ID NO: 148545
  Synthetic oligonucleotide

SEQ ID NO: 617645 - DNA, 52 bp, Artificial; identical to SEQ ID NO: 193772
  Synthetic oligonucleotide

SEQ ID NO: 617646 - DNA, 59 bp, Artificial; identical to SEQ ID NO: 206866
  Synthetic oligonucleotide

SEQ ID NO: 617647 - DNA, 60 bp, Artificial; identical to SEQ ID NO: 141786
  Synthetic oligonucleotide

SEQ ID NO: 617648 - DNA, 51 bp, Artificial; identical to SEQ ID NO: 216765
  Synthetic oligonucleotide

SEQ ID NO: 617649 - DNA, 60 bp, Artificial; identical to SEQ ID NO: 242313
  Synthetic oligonucleotide

SEQ ID NO: 617650 - DNA, 58 bp, Artificial; identical to SEQ ID NO: 242312
  Synthetic oligonucleotide

SEQ ID NO: 617651 - DNA, 55 bp, Artificial; identical to SEQ ID NO: 242631
  Synthetic oligonucleotide

SEQ ID NO: 617652 - DNA, 53 bp, Artificial; identical to SEQ ID NO: 199765
  Synthetic oligonucleotide

SEQ ID NO: 617653 - DNA, 55 bp, Artificial; identical to SEQ ID NO: 210788
  Synthetic oligonucleotide

SEQ ID NO: 617654 - DNA, 48 bp, Artificial; identical to SEQ ID NO: 217187
  Synthetic oligonucleotide

SEQ ID NO: 617655 - DNA, 56 bp, Artificial; identical to SEQ ID NO: 247600
  Synthetic oligonucleotide

SEQ ID NO: 617656 - DNA, 51 bp, Artificial; identical to SEQ ID NO: 157761
  Synthetic oligonucleotide

SEQ ID NO: 617657 - DNA, 55 bp, Artificial; identical to SEQ ID NO: 161276
  Synthetic oligonucleotide

SEQ ID NO: 617658 - DNA, 55 bp, Artificial; identical to SEQ ID NO: 209111
  Synthetic oligonucleotide

SEQ ID NO: 617659 - DNA, 55 bp, Artificial; identical to SEQ ID NO: 198757
  Synthetic oligonucleotide

SEQ ID NO: 617660 - DNA, 55 bp, Artificial; identical to SEQ ID NO: 157090
  Synthetic oligonucleotide

SEQ ID NO: 617661 - DNA, 54 bp, Artificial; identical to SEQ ID NO: 194945
  Synthetic oligonucleotide

SEQ ID NO: 617662 - DNA, 50 bp, Artificial; identical to SEQ ID NO: 241261
  Synthetic oligonucleotide

SEQ ID NO: 617663 - DNA, 52 bp, Artificial; identical to SEQ ID NO: 258952
  Synthetic oligonucleotide

SEQ ID NO: 617664 - DNA, 60 bp, Artificial; identical to SEQ ID NO: 256482
  Synthetic oligonucleotide

SEQ ID NO: 617665 - DNA, 55 bp, Artificial; identical to SEQ ID NO: 224962
  Synthetic oligonucleotide

SEQ ID NO: 617666 - DNA, 60 bp, Artificial; identical to SEQ ID NO: 178131
  Synthetic oligonucleotide

SEQ ID NO: 617667 - DNA, 55 bp, Artificial; identical to SEQ ID NO: 242311
  Synthetic oligonucleotide

SEQ ID NO: 617668 - DNA, 51 bp, Artificial; identical to SEQ ID NO: 248038
  Synthetic oligonucleotide

SEQ ID NO: 617669 - DNA, 50 bp, Artificial; identical to SEQ ID NO: 152202
  Synthetic oligonucleotide

SEQ ID NO: 617670 - DNA, 55 bp, Artificial; identical to SEQ ID NO: 217618
  Synthetic oligonucleotide

SEQ ID NO: 617671 - DNA, 54 bp, Artificial; identical to SEQ ID NO: 185074
  Synthetic oligonucleotide

SEQ ID NO: 617672 - DNA, 54 bp, Artificial; identical to SEQ ID NO: 240616
  Synthetic oligonucleotide

SEQ ID NO: 617673 - DNA, 52 bp, Artificial; identical to SEQ ID NO: 157614
  Synthetic oligonucleotide

SEQ ID NO: 617674 - DNA, 56 bp, Artificial; identical to SEQ ID NO: 178133
  Synthetic oligonucleotide

SEQ ID NO: 617675 - DNA, 60 bp, Artificial; identical to SEQ ID NO: 156587
  Synthetic oligonucleotide

SEQ ID NO: 617676 - DNA, 60 bp, Artificial; identical to SEQ ID NO: 248472
  Synthetic oligonucleotide

SEQ ID NO: 617677 - DNA, 52 bp, Artificial; identical to SEQ ID NO: 145045
  Synthetic oligonucleotide

SEQ ID NO: 617678 - DNA, 55 bp, Artificial; identical to SEQ ID NO: 224963
  Synthetic oligonucleotide

SEQ ID NO: 617679 - DNA, 60 bp, Artificial; identical to SEQ ID NO: 168489
  Synthetic oligonucleotide

SEQ ID NO: 617680 - DNA, 60 bp, Artificial; identical to SEQ ID NO: 242310
  Synthetic oligonucleotide

SEQ ID NO: 617681 - DNA, 55 bp, Artificial; identical to SEQ ID NO: 153403
  Synthetic oligonucleotide

SEQ ID NO: 617682 - DNA, 60 bp, Artificial; identical to SEQ ID NO: 194229
  Synthetic oligonucleotide

SEQ ID NO: 617683 - DNA, 55 bp, Artificial; identical to SEQ ID NO: 170919
  Synthetic oligonucleotide

SEQ ID NO: 617684 - DNA, 53 bp, Artificial; identical to SEQ ID NO: 240785
  Synthetic oligonucleotide

SEQ ID NO: 617685 - DNA, 55 bp, Artificial; identical to SEQ ID NO: 171610
  Synthetic oligonucleotide

SEQ ID NO: 617686 - DNA, 60 bp, Artificial; identical to SEQ ID NO: 224298
  Synthetic oligonucleotide

SEQ ID NO: 617687 - DNA, 55 bp, Artificial; identical to SEQ ID NO: 189003
  Synthetic oligonucleotide

SEQ ID NO: 617688 - DNA, 56 bp, Artificial; identical to SEQ ID NO: 256652
  Synthetic oligonucleotide

SEQ ID NO: 617689 - DNA, 55 bp, Artificial; identical to SEQ ID NO: 200937
  Synthetic oligonucleotide

SEQ ID NO: 617690 - DNA, 51 bp, Artificial; identical to SEQ ID NO: 160835
  Synthetic oligonucleotide

SEQ ID NO: 617691 - DNA, 55 bp, Artificial; identical to SEQ ID NO: 208445
  Synthetic oligonucleotide

SEQ ID NO: 617692 - DNA, 55 bp, Artificial; identical to SEQ ID NO: 155404
  Synthetic oligonucleotide

SEQ ID NO: 617693 - DNA, 52 bp, Artificial; identical to SEQ ID NO: 252909
  Synthetic oligonucleotide

SEQ ID NO: 617694 - DNA, 51 bp, Artificial; identical to SEQ ID NO: 165207
  Synthetic oligonucleotide

SEQ ID NO: 617695 - DNA, 55 bp, Artificial; identical to SEQ ID NO: 160806
  Synthetic oligonucleotide

SEQ ID NO: 617696 - DNA, 55 bp, Artificial; identical to SEQ ID NO: 211199
  Synthetic oligonucleotide

SEQ ID NO: 617697 - DNA, 55 bp, Artificial; identical to SEQ ID NO: 249154
  Synthetic oligonucleotide

SEQ ID NO: 617698 - DNA, 51 bp, Artificial; identical to SEQ ID NO: 165205
  Synthetic oligonucleotide

SEQ ID NO: 617699 - DNA, 54 bp, Artificial; identical to SEQ ID NO: 152019
  Synthetic oligonucleotide

SEQ ID NO: 617700 - DNA, 52 bp, Artificial; identical to SEQ ID NO: 266061
  Synthetic oligonucleotide

SEQ ID NO: 617701 - DNA, 53 bp, Artificial; identical to SEQ ID NO: 166956
  Synthetic oligonucleotide

SEQ ID NO: 617702 - DNA, 55 bp, Artificial; identical to SEQ ID NO: 148598
  Synthetic oligonucleotide

SEQ ID NO: 617703 - DNA, 56 bp, Artificial; identical to SEQ ID NO: 194233
  Synthetic oligonucleotide

SEQ ID NO: 617704 - DNA, 52 bp, Artificial; identical to SEQ ID NO: 153401
  Synthetic oligonucleotide

SEQ ID NO: 617705 - DNA, 55 bp, Artificial; identical to SEQ ID NO: 249153
  Synthetic oligonucleotide

SEQ ID NO: 617706 - DNA, 55 bp, Artificial; identical to SEQ ID NO: 181397
  Synthetic oligonucleotide

SEQ ID NO: 617707 - DNA, 55 bp, Artificial; identical to SEQ ID NO: 212829
  Synthetic oligonucleotide

SEQ ID NO: 617708 - DNA, 51 bp, Artificial; identical to SEQ ID NO: 234518
  Synthetic oligonucleotide

SEQ ID NO: 617709 - DNA, 54 bp, Artificial; identical to SEQ ID NO: 265709
  Synthetic oligonucleotide

SEQ ID NO: 617710 - DNA, 52 bp, Artificial; identical to SEQ ID NO: 217133
  Synthetic oligonucleotide

SEQ ID NO: 617711 - DNA, 55 bp, Artificial; identical to SEQ ID NO: 157077
  Synthetic oligonucleotide

SEQ ID NO: 617712 - DNA, 53 bp, Artificial; identical to SEQ ID NO: 209109
  Synthetic oligonucleotide

SEQ ID NO: 617713 - DNA, 55 bp, Artificial; identical to SEQ ID NO: 208452
  Synthetic oligonucleotide

SEQ ID NO: 617714 - DNA, 51 bp, Artificial; identical to SEQ ID NO: 186441
  Synthetic oligonucleotide

SEQ ID NO: 617715 - DNA, 58 bp, Artificial; identical to SEQ ID NO: 247460
  Synthetic oligonucleotide

SEQ ID NO: 617716 - DNA, 55 bp, Artificial; identical to SEQ ID NO: 245981
  Synthetic oligonucleotide

SEQ ID NO: 617717 - DNA, 55 bp, Artificial; identical to SEQ ID NO: 157113
  Synthetic oligonucleotide

SEQ ID NO: 617718 - DNA, 60 bp, Artificial; identical to SEQ ID NO: 224248
  Synthetic oligonucleotide

SEQ ID NO: 617719 - DNA, 59 bp, Artificial; identical to SEQ ID NO: 190009
  Synthetic oligonucleotide

SEQ ID NO: 617720 - DNA, 53 bp, Artificial; identical to SEQ ID NO: 185687
  Synthetic oligonucleotide

SEQ ID NO: 617721 - DNA, 55 bp, Artificial; identical to SEQ ID NO: 153398
  Synthetic oligonucleotide

SEQ ID NO: 617722 - DNA, 53 bp, Artificial; identical to SEQ ID NO: 157297
  Synthetic oligonucleotide

SEQ ID NO: 617723 - DNA, 52 bp, Artificial; identical to SEQ ID NO: 165002
  Synthetic oligonucleotide

SEQ ID NO: 617724 - DNA, 55 bp, Artificial; identical to SEQ ID NO: 157109
  Synthetic oligonucleotide

SEQ ID NO: 617725 - DNA, 57 bp, Artificial; identical to SEQ ID NO: 151053
  Synthetic oligonucleotide

SEQ ID NO: 617726 - DNA, 53 bp, Artificial; identical to SEQ ID NO: 195015
  Synthetic oligonucleotide

SEQ ID NO: 617727 - DNA, 58 bp, Artificial; identical to SEQ ID NO: 242306
  Synthetic oligonucleotide

SEQ ID NO: 617728 - DNA, 58 bp, Artificial; identical to SEQ ID NO: 206862
  Synthetic oligonucleotide

SEQ ID NO: 617729 - DNA, 55 bp, Artificial; identical to SEQ ID NO: 254497
  Synthetic oligonucleotide

SEQ ID NO: 617730 - DNA, 51 bp, Artificial; identical to SEQ ID NO: 186879
  Synthetic oligonucleotide

SEQ ID NO: 617731 - DNA, 51 bp, Artificial; identical to SEQ ID NO: 233981
  Synthetic oligonucleotide

SEQ ID NO: 617732 - DNA, 55 bp, Artificial; identical to SEQ ID NO: 142131
  Synthetic oligonucleotide

SEQ ID NO: 617733 - DNA, 55 bp, Artificial; identical to SEQ ID NO: 168745
  Synthetic oligonucleotide

SEQ ID NO: 617734 - DNA, 55 bp, Artificial; identical to SEQ ID NO: 157105
  Synthetic oligonucleotide

SEQ ID NO: 617735 - DNA, 51 bp, Artificial; identical to SEQ ID NO: 167139
  Synthetic oligonucleotide

SEQ ID NO: 617736 - DNA, 53 bp, Artificial; identical to SEQ ID NO: 170092
  Synthetic oligonucleotide

SEQ ID NO: 617737 - DNA, 51 bp, Artificial; identical to SEQ ID NO: 154639
  Synthetic oligonucleotide

SEQ ID NO: 617738 - DNA, 55 bp, Artificial; identical to SEQ ID NO: 148597
  Synthetic oligonucleotide

SEQ ID NO: 617739 - DNA, 49 bp, Artificial; identical to SEQ ID NO: 142714
  Synthetic oligonucleotide

SEQ ID NO: 617740 - DNA, 55 bp, Artificial; identical to SEQ ID NO: 146295
  Synthetic oligonucleotide

SEQ ID NO: 617741 - DNA, 54 bp, Artificial; identical to SEQ ID NO: 261933
  Synthetic oligonucleotide

SEQ ID NO: 617742 - DNA, 55 bp, Artificial; identical to SEQ ID NO: 164383
  Synthetic oligonucleotide

SEQ ID NO: 617743 - DNA, 50 bp, Artificial; identical to SEQ ID NO: 160601
  Synthetic oligonucleotide

SEQ ID NO: 617744 - DNA, 55 bp, Artificial; identical to SEQ ID NO: 153396
  Synthetic oligonucleotide

SEQ ID NO: 617745 - DNA, 59 bp, Artificial; identical to SEQ ID NO: 141789
  Synthetic oligonucleotide

SEQ ID NO: 617746 - DNA, 56 bp, Artificial; identical to SEQ ID NO: 178103
  Synthetic oligonucleotide

SEQ ID NO: 617747 - DNA, 60 bp, Artificial; identical to SEQ ID NO: 162437
  Synthetic oligonucleotide

SEQ ID NO: 617748 - DNA, 54 bp, Artificial; identical to SEQ ID NO: 157172
  Synthetic oligonucleotide

SEQ ID NO: 617749 - DNA, 58 bp, Artificial; identical to SEQ ID NO: 200946
  Synthetic oligonucleotide

SEQ ID NO: 617750 - DNA, 55 bp, Artificial; identical to SEQ ID NO: 233637
  Synthetic oligonucleotide

SEQ ID NO: 617751 - DNA, 54 bp, Artificial; identical to SEQ ID NO: 242302
  Synthetic oligonucleotide

SEQ ID NO: 617752 - DNA, 54 bp, Artificial; identical to SEQ ID NO: 252898
  Synthetic oligonucleotide

SEQ ID NO: 617753 - DNA, 58 bp, Artificial; identical to SEQ ID NO: 191672
  Synthetic oligonucleotide

SEQ ID NO: 617754 - DNA, 55 bp, Artificial; identical to SEQ ID NO: 167014
  Synthetic oligonucleotide

SEQ ID NO: 617755 - DNA, 54 bp, Artificial; identical to SEQ ID NO: 178109
  Synthetic oligonucleotide

SEQ ID NO: 617756 - DNA, 55 bp, Artificial; identical to SEQ ID NO: 162132
  Synthetic oligonucleotide

SEQ ID NO: 617757 - DNA, 55 bp, Artificial; identical to SEQ ID NO: 203767
  Synthetic oligonucleotide

SEQ ID NO: 617758 - DNA, 60 bp, Artificial; identical to SEQ ID NO: 217134
  Synthetic oligonucleotide

SEQ ID NO: 617759 - DNA, 54 bp, Artificial; identical to SEQ ID NO: 174638
  Synthetic oligonucleotide

SEQ ID NO: 617760 - DNA, 55 bp, Artificial; identical to SEQ ID NO: 205441
  Synthetic oligonucleotide

SEQ ID NO: 617761 - DNA, 50 bp, Artificial; identical to SEQ ID NO: 218392
  Synthetic oligonucleotide

SEQ ID NO: 617762 - DNA, 50 bp, Artificial; identical to SEQ ID NO: 165955
  Synthetic oligonucleotide

SEQ ID NO: 617763 - DNA, 60 bp, Artificial; identical to SEQ ID NO: 178112
  Synthetic oligonucleotide

SEQ ID NO: 617764 - DNA, 52 bp, Artificial; identical to SEQ ID NO: 209692
  Synthetic oligonucleotide

SEQ ID NO: 617765 - DNA, 59 bp, Artificial; identical to SEQ ID NO: 242300
  Synthetic oligonucleotide

SEQ ID NO: 617766 - DNA, 55 bp, Artificial; identical to SEQ ID NO: 170897
  Synthetic oligonucleotide

SEQ ID NO: 617767 - DNA, 55 bp, Artificial; identical to SEQ ID NO: 198715
  Synthetic oligonucleotide

SEQ ID NO: 617768 - DNA, 55 bp, Artificial; identical to SEQ ID NO: 257578
  Synthetic oligonucleotide

SEQ ID NO: 617769 - DNA, 51 bp, Artificial; identical to SEQ ID NO: 241045
  Synthetic oligonucleotide

SEQ ID NO: 617770 - DNA, 55 bp, Artificial; identical to SEQ ID NO: 207594
  Synthetic oligonucleotide

SEQ ID NO: 617771 - DNA, 53 bp, Artificial; identical to SEQ ID NO: 240795
  Synthetic oligonucleotide

SEQ ID NO: 617772 - DNA, 52 bp, Artificial; identical to SEQ ID NO: 240628
  Synthetic oligonucleotide

SEQ ID NO: 617773 - DNA, 55 bp, Artificial; identical to SEQ ID NO: 240179
  Synthetic oligonucleotide

SEQ ID NO: 617774 - DNA, 50 bp, Artificial; identical to SEQ ID NO: 158966
  Synthetic oligonucleotide

SEQ ID NO: 617775 - DNA, 55 bp, Artificial; identical to SEQ ID NO: 201653
  Synthetic oligonucleotide

SEQ ID NO: 617776 - DNA, 55 bp, Artificial; identical to SEQ ID NO: 198719
  Synthetic oligonucleotide

SEQ ID NO: 617777 - DNA, 52 bp, Artificial; identical to SEQ ID NO: 256450
  Synthetic oligonucleotide

SEQ ID NO: 617778 - DNA, 55 bp, Artificial; identical to SEQ ID NO: 166633
  Synthetic oligonucleotide

SEQ ID NO: 617779 - DNA, 56 bp, Artificial; identical to SEQ ID NO: 239354
  Synthetic oligonucleotide

SEQ ID NO: 617780 - DNA, 55 bp, Artificial; identical to SEQ ID NO: 207595
  Synthetic oligonucleotide

SEQ ID NO: 617781 - DNA, 54 bp, Artificial; identical to SEQ ID NO: 255297
  Synthetic oligonucleotide

SEQ ID NO: 617782 - DNA, 55 bp, Artificial; identical to SEQ ID NO: 160229
  Synthetic oligonucleotide

SEQ ID NO: 617783 - DNA, 60 bp, Artificial; identical to SEQ ID NO: 178119
  Synthetic oligonucleotide

SEQ ID NO: 617784 - DNA, 58 bp, Artificial; identical to SEQ ID NO: 243777
  Synthetic oligonucleotide

SEQ ID NO: 617785 - DNA, 55 bp, Artificial; identical to SEQ ID NO: 181422
  Synthetic oligonucleotide

SEQ ID NO: 617786 - DNA, 57 bp, Artificial; identical to SEQ ID NO: 147208
  Synthetic oligonucleotide

SEQ ID NO: 617787 - DNA, 60 bp, Artificial; identical to SEQ ID NO: 247227
  Synthetic oligonucleotide

SEQ ID NO: 617788 - DNA, 53 bp, Artificial; identical to SEQ ID NO: 185581
  Synthetic oligonucleotide

SEQ ID NO: 617789 - DNA, 55 bp, Artificial; identical to SEQ ID NO: 224967
  Synthetic oligonucleotide

SEQ ID NO: 617790 - DNA, 55 bp, Artificial; identical to SEQ ID NO: 173576
  Synthetic oligonucleotide

SEQ ID NO: 617791 - DNA, 55 bp, Artificial; identical to SEQ ID NO: 257134
  Synthetic oligonucleotide

SEQ ID NO: 617792 - DNA, 54 bp, Artificial; identical to SEQ ID NO: 141792
  Synthetic oligonucleotide

SEQ ID NO: 617793 - DNA, 51 bp, Artificial; identical to SEQ ID NO: 186781
  Synthetic oligonucleotide

SEQ ID NO: 617794 - DNA, 55 bp, Artificial; identical to SEQ ID NO: 181432
  Synthetic oligonucleotide

SEQ ID NO: 617795 - DNA, 55 bp, Artificial; identical to SEQ ID NO: 206858
  Synthetic oligonucleotide

SEQ ID NO: 617796 - DNA, 55 bp, Artificial; identical to SEQ ID NO: 256447
  Synthetic oligonucleotide

SEQ ID NO: 617797 - DNA, 55 bp, Artificial; identical to SEQ ID NO: 164381
  Synthetic oligonucleotide

SEQ ID NO: 617798 - DNA, 55 bp, Artificial; identical to SEQ ID NO: 212828
  Synthetic oligonucleotide

SEQ ID NO: 617799 - DNA, 51 bp, Artificial; identical to SEQ ID NO: 186790
  Synthetic oligonucleotide

SEQ ID NO: 617800 - DNA, 53 bp, Artificial; identical to SEQ ID NO: 143808
  Synthetic oligonucleotide

SEQ ID NO: 617801 - DNA, 50 bp, Artificial; identical to SEQ ID NO: 155646
  Synthetic oligonucleotide

SEQ ID NO: 617802 - DNA, 60 bp, Artificial; identical to SEQ ID NO: 141793
  Synthetic oligonucleotide

SEQ ID NO: 617803 - DNA, 56 bp, Artificial; identical to SEQ ID NO: 177957
  Synthetic oligonucleotide

SEQ ID NO: 617804 - DNA, 54 bp, Artificial; identical to SEQ ID NO: 202446
  Synthetic oligonucleotide

SEQ ID NO: 617805 - DNA, 60 bp, Artificial; identical to SEQ ID NO: 200925
  Synthetic oligonucleotide

SEQ ID NO: 617806 - DNA, 55 bp, Artificial; identical to SEQ ID NO: 190379
  Synthetic oligonucleotide

SEQ ID NO: 617807 - DNA, 55 bp, Artificial; identical to SEQ ID NO: 181434
  Synthetic oligonucleotide

SEQ ID NO: 617808 - DNA, 53 bp, Artificial; identical to SEQ ID NO: 199771
  Synthetic oligonucleotide

SEQ ID NO: 617809 - DNA, 53 bp, Artificial; identical to SEQ ID NO: 197488
  Synthetic oligonucleotide

SEQ ID NO: 617810 - DNA, 53 bp, Artificial; identical to SEQ ID NO: 236991
  Synthetic oligonucleotide

SEQ ID NO: 617811 - DNA, 55 bp, Artificial; identical to SEQ ID NO: 203811
  Synthetic oligonucleotide

SEQ ID NO: 617812 - DNA, 55 bp, Artificial; identical to SEQ ID NO: 146299
  Synthetic oligonucleotide

SEQ ID NO: 617813 - DNA, 51 bp, Artificial; identical to SEQ ID NO: 190912
  Synthetic oligonucleotide

SEQ ID NO: 617814 - DNA, 52 bp, Artificial; identical to SEQ ID NO: 253329
  Synthetic oligonucleotide

SEQ ID NO: 617815 - DNA, 51 bp, Artificial; identical to SEQ ID NO: 152127
  Synthetic oligonucleotide

SEQ ID NO: 617816 - DNA, 51 bp, Artificial; identical to SEQ ID NO: 186799
  Synthetic oligonucleotide

SEQ ID NO: 617817 - DNA, 54 bp, Artificial; identical to SEQ ID NO: 243775
  Synthetic oligonucleotide

SEQ ID NO: 617818 - DNA, 55 bp, Artificial; identical to SEQ ID NO: 181444
  Synthetic oligonucleotide

SEQ ID NO: 617819 - DNA, 56 bp, Artificial; identical to SEQ ID NO: 253704
  Synthetic oligonucleotide

SEQ ID NO: 617820 - DNA, 55 bp, Artificial; identical to SEQ ID NO: 211163
  Synthetic oligonucleotide

SEQ ID NO: 617821 - DNA, 50 bp, Artificial; identical to SEQ ID NO: 204065
  Synthetic oligonucleotide

SEQ ID NO: 617822 - DNA, 54 bp, Artificial; identical to SEQ ID NO: 157184
  Synthetic oligonucleotide

SEQ ID NO: 617823 - DNA, 55 bp, Artificial; identical to SEQ ID NO: 201262
  Synthetic oligonucleotide

SEQ ID NO: 617824 - DNA, 60 bp, Artificial; identical to SEQ ID NO: 200929
  Synthetic oligonucleotide

SEQ ID NO: 617825 - DNA, 52 bp, Artificial; identical to SEQ ID NO: 199921
  Synthetic oligonucleotide

SEQ ID NO: 617826 - DNA, 55 bp, Artificial; identical to SEQ ID NO: 157038
  Synthetic oligonucleotide

SEQ ID NO: 617827 - DNA, 52 bp, Artificial; identical to SEQ ID NO: 188043
  Synthetic oligonucleotide

SEQ ID NO: 617828 - DNA, 50 bp, Artificial; identical to SEQ ID NO: 255829
  Synthetic oligonucleotide

SEQ ID NO: 617829 - DNA, 55 bp, Artificial; identical to SEQ ID NO: 217605
  Synthetic oligonucleotide

SEQ ID NO: 617830 - DNA, 60 bp, Artificial; identical to SEQ ID NO: 150843
  Synthetic oligonucleotide

SEQ ID NO: 617831 - DNA, 55 bp, Artificial; identical to SEQ ID NO: 245956
  Synthetic oligonucleotide

SEQ ID NO: 617832 - DNA, 57 bp, Artificial; identical to SEQ ID NO: 150842
  Synthetic oligonucleotide

SEQ ID NO: 617833 - DNA, 52 bp, Artificial; identical to SEQ ID NO: 197605
  Synthetic oligonucleotide

SEQ ID NO: 617834 - DNA, 52 bp, Artificial; identical to SEQ ID NO: 217143
  Synthetic oligonucleotide

SEQ ID NO: 617835 - DNA, 53 bp, Artificial; identical to SEQ ID NO: 234483
  Synthetic oligonucleotide

SEQ ID NO: 617836 - DNA, 51 bp, Artificial; identical to SEQ ID NO: 247225
  Synthetic oligonucleotide

SEQ ID NO: 617837 - DNA, 56 bp, Artificial; identical to SEQ ID NO: 247223
  Synthetic oligonucleotide

SEQ ID NO: 617838 - DNA, 60 bp, Artificial; identical to SEQ ID NO: 242350
  Synthetic oligonucleotide

SEQ ID NO: 617839 - DNA, 51 bp, Artificial; identical to SEQ ID NO: 216840
  Synthetic oligonucleotide

SEQ ID NO: 617840 - DNA, 58 bp, Artificial; identical to SEQ ID NO: 247220
  Synthetic oligonucleotide

SEQ ID NO: 617841 - DNA, 55 bp, Artificial; identical to SEQ ID NO: 142252
  Synthetic oligonucleotide

SEQ ID NO: 617842 - DNA, 53 bp, Artificial; identical to SEQ ID NO: 164379
  Synthetic oligonucleotide

SEQ ID NO: 617843 - DNA, 54 bp, Artificial; identical to SEQ ID NO: 167046
  Synthetic oligonucleotide

SEQ ID NO: 617844 - DNA, 57 bp, Artificial; identical to SEQ ID NO: 200976
  Synthetic oligonucleotide

SEQ ID NO: 617845 - DNA, 50 bp, Artificial; identical to SEQ ID NO: 210605
  Synthetic oligonucleotide

SEQ ID NO: 617846 - DNA, 51 bp, Artificial; identical to SEQ ID NO: 200099
  Synthetic oligonucleotide

SEQ ID NO: 617847 - DNA, 55 bp, Artificial; identical to SEQ ID NO: 197143
  Synthetic oligonucleotide

SEQ ID NO: 617848 - DNA, 55 bp, Artificial; identical to SEQ ID NO: 249428
  Synthetic oligonucleotide

SEQ ID NO: 617849 - DNA, 58 bp, Artificial; identical to SEQ ID NO: 147119
  Synthetic oligonucleotide

SEQ ID NO: 617850 - DNA, 55 bp, Artificial; identical to SEQ ID NO: 181410
  Synthetic oligonucleotide

SEQ ID NO: 617851 - DNA, 54 bp, Artificial; identical to SEQ ID NO: 242347
  Synthetic oligonucleotide

SEQ ID NO: 617852 - DNA, 55 bp, Artificial; identical to SEQ ID NO: 212827
  Synthetic oligonucleotide

SEQ ID NO: 617853 - DNA, 59 bp, Artificial; identical to SEQ ID NO: 194239
  Synthetic oligonucleotide

SEQ ID NO: 617854 - DNA, 60 bp, Artificial; identical to SEQ ID NO: 256437
  Synthetic oligonucleotide

SEQ ID NO: 617855 - DNA, 55 bp, Artificial; identical to SEQ ID NO: 188368
  Synthetic oligonucleotide

SEQ ID NO: 617856 - DNA, 53 bp, Artificial; identical to SEQ ID NO: 181412
  Synthetic oligonucleotide

SEQ ID NO: 617857 - DNA, 52 bp, Artificial; identical to SEQ ID NO: 266752
  Synthetic oligonucleotide

SEQ ID NO: 617858 - DNA, 50 bp, Artificial; identical to SEQ ID NO: 241227
  Synthetic oligonucleotide

SEQ ID NO: 617859 - DNA, 55 bp, Artificial; identical to SEQ ID NO: 148657
  Synthetic oligonucleotide

SEQ ID NO: 617860 - DNA, 55 bp, Artificial; identical to SEQ ID NO: 181416
  Synthetic oligonucleotide

SEQ ID NO: 617861 - DNA, 51 bp, Artificial; identical to SEQ ID NO: 233858
  Synthetic oligonucleotide

SEQ ID NO: 617862 - DNA, 55 bp, Artificial; identical to SEQ ID NO: 198565
  Synthetic oligonucleotide

SEQ ID NO: 617863 - DNA, 55 bp, Artificial; identical to SEQ ID NO: 212826
  Synthetic oligonucleotide

SEQ ID NO: 617864 - DNA, 55 bp, Artificial; identical to SEQ ID NO: 197144
  Synthetic oligonucleotide

SEQ ID NO: 617865 - DNA, 59 bp, Artificial; identical to SEQ ID NO: 197093
  Synthetic oligonucleotide

SEQ ID NO: 617866 - DNA, 55 bp, Artificial; identical to SEQ ID NO: 238081
  Synthetic oligonucleotide

SEQ ID NO: 617867 - DNA, 55 bp, Artificial; identical to SEQ ID NO: 253132
  Synthetic oligonucleotide

SEQ ID NO: 617868 - DNA, 55 bp, Artificial; identical to SEQ ID NO: 202236
  Synthetic oligonucleotide

SEQ ID NO: 617869 - DNA, 55 bp, Artificial; identical to SEQ ID NO: 198574
  Synthetic oligonucleotide

SEQ ID NO: 617870 - DNA, 54 bp, Artificial; identical to SEQ ID NO: 202950
  Synthetic oligonucleotide

SEQ ID NO: 617871 - DNA, 55 bp, Artificial; identical to SEQ ID NO: 225189
  Synthetic oligonucleotide

SEQ ID NO: 617872 - DNA, 50 bp, Artificial; identical to SEQ ID NO: 209790
  Synthetic oligonucleotide

SEQ ID NO: 617873 - DNA, 59 bp, Artificial; identical to SEQ ID NO: 256435
  Synthetic oligonucleotide

SEQ ID NO: 617874 - DNA, 52 bp, Artificial; identical to SEQ ID NO: 143814
  Synthetic oligonucleotide

SEQ ID NO: 617875 - DNA, 56 bp, Artificial; identical to SEQ ID NO: 168198
  Synthetic oligonucleotide

SEQ ID NO: 617876 - DNA, 50 bp, Artificial; identical to SEQ ID NO: 243426
  Synthetic oligonucleotide

SEQ ID NO: 617877 - DNA, 55 bp, Artificial; identical to SEQ ID NO: 168685
  Synthetic oligonucleotide

SEQ ID NO: 617878 - DNA, 55 bp, Artificial; identical to SEQ ID NO: 254471
  Synthetic oligonucleotide

SEQ ID NO: 617879 - DNA, 55 bp, Artificial; identical to SEQ ID NO: 171554
  Synthetic oligonucleotide

SEQ ID NO: 617880 - DNA, 52 bp, Artificial; identical to SEQ ID NO: 199972
  Synthetic oligonucleotide

SEQ ID NO: 617881 - DNA, 60 bp, Artificial; identical to SEQ ID NO: 165389
  Synthetic oligonucleotide

SEQ ID NO: 617882 - DNA, 51 bp, Artificial; identical to SEQ ID NO: 223736
  Synthetic oligonucleotide

SEQ ID NO: 617883 - DNA, 53 bp, Artificial; identical to SEQ ID NO: 177943
  Synthetic oligonucleotide

SEQ ID NO: 617884 - DNA, 55 bp, Artificial; identical to SEQ ID NO: 215574
  Synthetic oligonucleotide

SEQ ID NO: 617885 - DNA, 59 bp, Artificial; identical to SEQ ID NO: 166069
  Synthetic oligonucleotide

SEQ ID NO: 617886 - DNA, 53 bp, Artificial; identical to SEQ ID NO: 185611
  Synthetic oligonucleotide

SEQ ID NO: 617887 - DNA, 60 bp, Artificial; identical to SEQ ID NO: 150871
  Synthetic oligonucleotide

SEQ ID NO: 617888 - DNA, 51 bp, Artificial; identical to SEQ ID NO: 190905
  Synthetic oligonucleotide

SEQ ID NO: 617889 - DNA, 51 bp, Artificial; identical to SEQ ID NO: 157703
  Synthetic oligonucleotide

SEQ ID NO: 617890 - DNA, 52 bp, Artificial; identical to SEQ ID NO: 188495
  Synthetic oligonucleotide

SEQ ID NO: 617891 - DNA, 60 bp, Artificial; identical to SEQ ID NO: 200863
  Synthetic oligonucleotide

SEQ ID NO: 617892 - DNA, 60 bp, Artificial; identical to SEQ ID NO: 247218
  Synthetic oligonucleotide

SEQ ID NO: 617893 - DNA, 55 bp, Artificial; identical to SEQ ID NO: 203824
  Synthetic oligonucleotide

SEQ ID NO: 617894 - DNA, 55 bp, Artificial; identical to SEQ ID NO: 249089
  Synthetic oligonucleotide

SEQ ID NO: 617895 - DNA, 55 bp, Artificial; identical to SEQ ID NO: 148697
  Synthetic oligonucleotide

SEQ ID NO: 617896 - DNA, 55 bp, Artificial; identical to SEQ ID NO: 167303
  Synthetic oligonucleotide

SEQ ID NO: 617897 - DNA, 54 bp, Artificial; identical to SEQ ID NO: 164765
  Synthetic oligonucleotide

SEQ ID NO: 617898 - DNA, 56 bp, Artificial; identical to SEQ ID NO: 197884
  Synthetic oligonucleotide

SEQ ID NO: 617899 - DNA, 57 bp, Artificial; identical to SEQ ID NO: 247215
  Synthetic oligonucleotide

SEQ ID NO: 617900 - DNA, 52 bp, Artificial; identical to SEQ ID NO: 186154
  Synthetic oligonucleotide

SEQ ID NO: 617901 - DNA, 55 bp, Artificial; identical to SEQ ID NO: 157035
  Synthetic oligonucleotide

SEQ ID NO: 617902 - DNA, 60 bp, Artificial; identical to SEQ ID NO: 174447
  Synthetic oligonucleotide

SEQ ID NO: 617903 - DNA, 55 bp, Artificial; identical to SEQ ID NO: 157034
  Synthetic oligonucleotide

SEQ ID NO: 617904 - DNA, 54 bp, Artificial; identical to SEQ ID NO: 185021
  Synthetic oligonucleotide

SEQ ID NO: 617905 - DNA, 55 bp, Artificial; identical to SEQ ID NO: 240210
  Synthetic oligonucleotide

SEQ ID NO: 617906 - DNA, 55 bp, Artificial; identical to SEQ ID NO: 146300
  Synthetic oligonucleotide

SEQ ID NO: 617907 - DNA, 52 bp, Artificial; identical to SEQ ID NO: 149678
  Synthetic oligonucleotide

SEQ ID NO: 617908 - DNA, 58 bp, Artificial; identical to SEQ ID NO: 178009
  Synthetic oligonucleotide

SEQ ID NO: 617909 - DNA, 52 bp, Artificial; identical to SEQ ID NO: 209391
  Synthetic oligonucleotide

SEQ ID NO: 617910 - DNA, 55 bp, Artificial; identical to SEQ ID NO: 247214
  Synthetic oligonucleotide

SEQ ID NO: 617911 - DNA, 56 bp, Artificial; identical to SEQ ID NO: 242343
  Synthetic oligonucleotide

SEQ ID NO: 617912 - DNA, 53 bp, Artificial; identical to SEQ ID NO: 164827
  Synthetic oligonucleotide

SEQ ID NO: 617913 - DNA, 55 bp, Artificial; identical to SEQ ID NO: 224970
  Synthetic oligonucleotide

SEQ ID NO: 617914 - DNA, 57 bp, Artificial; identical to SEQ ID NO: 239428
  Synthetic oligonucleotide

SEQ ID NO: 617915 - DNA, 53 bp, Artificial; identical to SEQ ID NO: 191174
  Synthetic oligonucleotide

SEQ ID NO: 617916 - DNA, 60 bp, Artificial; identical to SEQ ID NO: 151279
  Synthetic oligonucleotide

SEQ ID NO: 617917 - DNA, 54 bp, Artificial; identical to SEQ ID NO: 202443
  Synthetic oligonucleotide

SEQ ID NO: 617918 - DNA, 58 bp, Artificial; identical to SEQ ID NO: 237934
  Synthetic oligonucleotide

SEQ ID NO: 617919 - DNA, 56 bp, Artificial; identical to SEQ ID NO: 256429
  Synthetic oligonucleotide

SEQ ID NO: 617920 - DNA, 55 bp, Artificial; identical to SEQ ID NO: 208427
  Synthetic oligonucleotide

SEQ ID NO: 617921 - DNA, 57 bp, Artificial; identical to SEQ ID NO: 205508
  Synthetic oligonucleotide

SEQ ID NO: 617922 - DNA, 60 bp, Artificial; identical to SEQ ID NO: 174491
  Synthetic oligonucleotide

SEQ ID NO: 617923 - DNA, 55 bp, Artificial; identical to SEQ ID NO: 143696
  Synthetic oligonucleotide

SEQ ID NO: 617924 - DNA, 52 bp, Artificial; identical to SEQ ID NO: 206436
  Synthetic oligonucleotide

SEQ ID NO: 617925 - DNA, 60 bp, Artificial; identical to SEQ ID NO: 150862
  Synthetic oligonucleotide

SEQ ID NO: 617926 - DNA, 59 bp, Artificial; identical to SEQ ID NO: 147080
  Synthetic oligonucleotide

SEQ ID NO: 617927 - DNA, 58 bp, Artificial; identical to SEQ ID NO: 178013
  Synthetic oligonucleotide

SEQ ID NO: 617928 - DNA, 53 bp, Artificial; identical to SEQ ID NO: 203921
  Synthetic oligonucleotide

SEQ ID NO: 617929 - DNA, 55 bp, Artificial; identical to SEQ ID NO: 173574
  Synthetic oligonucleotide

SEQ ID NO: 617930 - DNA, 54 bp, Artificial; identical to SEQ ID NO: 142716
  Synthetic oligonucleotide

SEQ ID NO: 617931 - DNA, 56 bp, Artificial; identical to SEQ ID NO: 178018
  Synthetic oligonucleotide

SEQ ID NO: 617932 - DNA, 55 bp, Artificial; identical to SEQ ID NO: 247559
  Synthetic oligonucleotide

SEQ ID NO: 617933 - DNA, 59 bp, Artificial; identical to SEQ ID NO: 179292
  Synthetic oligonucleotide

SEQ ID NO: 617934 - DNA, 55 bp, Artificial; identical to SEQ ID NO: 157030
  Synthetic oligonucleotide

SEQ ID NO: 617935 - DNA, 55 bp, Artificial; identical to SEQ ID NO: 209392
  Synthetic oligonucleotide

SEQ ID NO: 617936 - DNA, 52 bp, Artificial; identical to SEQ ID NO: 200843
  Synthetic oligonucleotide

SEQ ID NO: 617937 - DNA, 54 bp, Artificial; identical to SEQ ID NO: 200847
  Synthetic oligonucleotide

SEQ ID NO: 617938 - DNA, 55 bp, Artificial; identical to SEQ ID NO: 181653
  Synthetic oligonucleotide

SEQ ID NO: 617939 - DNA, 58 bp, Artificial; identical to SEQ ID NO: 239176
  Synthetic oligonucleotide

SEQ ID NO: 617940 - DNA, 52 bp, Artificial; identical to SEQ ID NO: 255529
  Synthetic oligonucleotide

SEQ ID NO: 617941 - DNA, 55 bp, Artificial; identical to SEQ ID NO: 240221
  Synthetic oligonucleotide

SEQ ID NO: 617942 - DNA, 59 bp, Artificial; identical to SEQ ID NO: 170961
  Synthetic oligonucleotide

SEQ ID NO: 617943 - DNA, 57 bp, Artificial; identical to SEQ ID NO: 159903
  Synthetic oligonucleotide

SEQ ID NO: 617944 - DNA, 55 bp, Artificial; identical to SEQ ID NO: 246007
  Synthetic oligonucleotide

SEQ ID NO: 617945 - DNA, 50 bp, Artificial; identical to SEQ ID NO: 206585
  Synthetic oligonucleotide

SEQ ID NO: 617946 - DNA, 55 bp, Artificial; identical to SEQ ID NO: 246010
  Synthetic oligonucleotide

SEQ ID NO: 617947 - DNA, 59 bp, Artificial; identical to SEQ ID NO: 201864
  Synthetic oligonucleotide

SEQ ID NO: 617948 - DNA, 55 bp, Artificial; identical to SEQ ID NO: 154501
  Synthetic oligonucleotide

SEQ ID NO: 617949 - DNA, 55 bp, Artificial; identical to SEQ ID NO: 164376
  Synthetic oligonucleotide

SEQ ID NO: 617950 - DNA, 53 bp, Artificial; identical to SEQ ID NO: 202974
  Synthetic oligonucleotide

SEQ ID NO: 617951 - DNA, 54 bp, Artificial; identical to SEQ ID NO: 200859
  Synthetic oligonucleotide

SEQ ID NO: 617952 - DNA, 57 bp, Artificial; identical to SEQ ID NO: 141798
  Synthetic oligonucleotide

SEQ ID NO: 617953 - DNA, 50 bp, Artificial; identical to SEQ ID NO: 177042
  Synthetic oligonucleotide

SEQ ID NO: 617954 - DNA, 53 bp, Artificial; identical to SEQ ID NO: 211579
  Synthetic oligonucleotide

SEQ ID NO: 617955 - DNA, 55 bp, Artificial; identical to SEQ ID NO: 260011
  Synthetic oligonucleotide

SEQ ID NO: 617956 - DNA, 57 bp, Artificial; identical to SEQ ID NO: 150859
  Synthetic oligonucleotide

SEQ ID NO: 617957 - DNA, 60 bp, Artificial; identical to SEQ ID NO: 193107
  Synthetic oligonucleotide

SEQ ID NO: 617958 - DNA, 54 bp, Artificial; identical to SEQ ID NO: 181658
  Synthetic oligonucleotide

SEQ ID NO: 617959 - DNA, 52 bp, Artificial; identical to SEQ ID NO: 170102
  Synthetic oligonucleotide

SEQ ID NO: 617960 - DNA, 58 bp, Artificial; identical to SEQ ID NO: 155754
  Synthetic oligonucleotide

SEQ ID NO: 617961 - DNA, 55 bp, Artificial; identical to SEQ ID NO: 224234
  Synthetic oligonucleotide

SEQ ID NO: 617962 - DNA, 56 bp, Artificial; identical to SEQ ID NO: 178030
  Synthetic oligonucleotide

SEQ ID NO: 617963 - DNA, 55 bp, Artificial; identical to SEQ ID NO: 181659
  Synthetic oligonucleotide

SEQ ID NO: 617964 - DNA, 55 bp, Artificial; identical to SEQ ID NO: 174776
  Synthetic oligonucleotide

SEQ ID NO: 617965 - DNA, 55 bp, Artificial; identical to SEQ ID NO: 148639
  Synthetic oligonucleotide

SEQ ID NO: 617966 - DNA, 55 bp, Artificial; identical to SEQ ID NO: 148343
  Synthetic oligonucleotide

SEQ ID NO: 617967 - DNA, 52 bp, Artificial; identical to SEQ ID NO: 191905
  Synthetic oligonucleotide

SEQ ID NO: 617968 - DNA, 53 bp, Artificial; identical to SEQ ID NO: 222705
  Synthetic oligonucleotide

SEQ ID NO: 617969 - DNA, 55 bp, Artificial; identical to SEQ ID NO: 224972
  Synthetic oligonucleotide

SEQ ID NO: 617970 - DNA, 52 bp, Artificial; identical to SEQ ID NO: 209687
  Synthetic oligonucleotide

SEQ ID NO: 617971 - DNA, 55 bp, Artificial; identical to SEQ ID NO: 217371
  Synthetic oligonucleotide

SEQ ID NO: 617972 - DNA, 53 bp, Artificial; identical to SEQ ID NO: 146434
  Synthetic oligonucleotide

SEQ ID NO: 617973 - DNA, 54 bp, Artificial; identical to SEQ ID NO: 216591
  Synthetic oligonucleotide

SEQ ID NO: 617974 - DNA, 54 bp, Artificial; identical to SEQ ID NO: 171017
  Synthetic oligonucleotide

SEQ ID NO: 617975 - DNA, 56 bp, Artificial; identical to SEQ ID NO: 239534
  Synthetic oligonucleotide

SEQ ID NO: 617976 - DNA, 55 bp, Artificial; identical to SEQ ID NO: 146301
  Synthetic oligonucleotide

SEQ ID NO: 617977 - DNA, 55 bp, Artificial; identical to SEQ ID NO: 202835
  Synthetic oligonucleotide

SEQ ID NO: 617978 - DNA, 55 bp, Artificial; identical to SEQ ID NO: 164416
  Synthetic oligonucleotide

SEQ ID NO: 617979 - DNA, 54 bp, Artificial; identical to SEQ ID NO: 199587
  Synthetic oligonucleotide

SEQ ID NO: 617980 - DNA, 51 bp, Artificial; identical to SEQ ID NO: 225275
  Synthetic oligonucleotide

SEQ ID NO: 617981 - DNA, 55 bp, Artificial; identical to SEQ ID NO: 191054
  Synthetic oligonucleotide

SEQ ID NO: 617982 - DNA, 52 bp, Artificial; identical to SEQ ID NO: 240895
  Synthetic oligonucleotide

SEQ ID NO: 617983 - DNA, 60 bp, Artificial; identical to SEQ ID NO: 256457
  Synthetic oligonucleotide

SEQ ID NO: 617984 - DNA, 53 bp, Artificial; identical to SEQ ID NO: 205681
  Synthetic oligonucleotide

SEQ ID NO: 617985 - DNA, 60 bp, Artificial; identical to SEQ ID NO: 206986
  Synthetic oligonucleotide

SEQ ID NO: 617986 - DNA, 57 bp, Artificial; identical to SEQ ID NO: 177980
  Synthetic oligonucleotide

SEQ ID NO: 617987 - DNA, 50 bp, Artificial; identical to SEQ ID NO: 170338
  Synthetic oligonucleotide

SEQ ID NO: 617988 - DNA, 54 bp, Artificial; identical to SEQ ID NO: 203859
  Synthetic oligonucleotide

SEQ ID NO: 617989 - DNA, 56 bp, Artificial; identical to SEQ ID NO: 180073
  Synthetic oligonucleotide

SEQ ID NO: 617990 - DNA, 51 bp, Artificial; identical to SEQ ID NO: 255663
  Synthetic oligonucleotide

SEQ ID NO: 617991 - DNA, 55 bp, Artificial; identical to SEQ ID NO: 210900
  Synthetic oligonucleotide

SEQ ID NO: 617992 - DNA, 51 bp, Artificial; identical to SEQ ID NO: 246595
  Synthetic oligonucleotide

SEQ ID NO: 617993 - DNA, 54 bp, Artificial; identical to SEQ ID NO: 194955
  Synthetic oligonucleotide

SEQ ID NO: 617994 - DNA, 55 bp, Artificial; identical to SEQ ID NO: 144840
  Synthetic oligonucleotide

SEQ ID NO: 617995 - DNA, 60 bp, Artificial; identical to SEQ ID NO: 141800
  Synthetic oligonucleotide

SEQ ID NO: 617996 - DNA, 55 bp, Artificial; identical to SEQ ID NO: 188367
  Synthetic oligonucleotide

SEQ ID NO: 617997 - DNA, 60 bp, Artificial; identical to SEQ ID NO: 150809
  Synthetic oligonucleotide

SEQ ID NO: 617998 - DNA, 55 bp, Artificial; identical to SEQ ID NO: 148342
  Synthetic oligonucleotide

SEQ ID NO: 617999 - DNA, 52 bp, Artificial; identical to SEQ ID NO: 141300
  Synthetic oligonucleotide

SEQ ID NO: 618000 - DNA, 60 bp, Artificial; identical to SEQ ID NO: 242335
  Synthetic oligonucleotide

SEQ ID NO: 618001 - DNA, 54 bp, Artificial; identical to SEQ ID NO: 193246
  Synthetic oligonucleotide

SEQ ID NO: 618002 - DNA, 53 bp, Artificial; identical to SEQ ID NO: 185602
  Synthetic oligonucleotide

SEQ ID NO: 618003 - DNA, 55 bp, Artificial; identical to SEQ ID NO: 240177
  Synthetic oligonucleotide

SEQ ID NO: 618004 - DNA, 55 bp, Artificial; identical to SEQ ID NO: 201773
  Synthetic oligonucleotide

SEQ ID NO: 618005 - DNA, 60 bp, Artificial; identical to SEQ ID NO: 242332
  Synthetic oligonucleotide

SEQ ID NO: 618006 - DNA, 55 bp, Artificial; identical to SEQ ID NO: 181626
  Synthetic oligonucleotide

SEQ ID NO: 618007 - DNA, 55 bp, Artificial; identical to SEQ ID NO: 244237
  Synthetic oligonucleotide

SEQ ID NO: 618008 - DNA, 58 bp, Artificial; identical to SEQ ID NO: 257158
  Synthetic oligonucleotide

SEQ ID NO: 618009 - DNA, 55 bp, Artificial; identical to SEQ ID NO: 225190
  Synthetic oligonucleotide

SEQ ID NO: 618010 - DNA, 55 bp, Artificial; identical to SEQ ID NO: 198619
  Synthetic oligonucleotide

SEQ ID NO: 618011 - DNA, 55 bp, Artificial; identical to SEQ ID NO: 142239
  Synthetic oligonucleotide

SEQ ID NO: 618012 - DNA, 51 bp, Artificial; identical to SEQ ID NO: 165236
  Synthetic oligonucleotide

SEQ ID NO: 618013 - DNA, 50 bp, Artificial; identical to SEQ ID NO: 234677
  Synthetic oligonucleotide

SEQ ID NO: 618014 - DNA, 50 bp, Artificial; identical to SEQ ID NO: 160954
  Synthetic oligonucleotide

SEQ ID NO: 618015 - DNA, 52 bp, Artificial; identical to SEQ ID NO: 238134
  Synthetic oligonucleotide

SEQ ID NO: 618016 - DNA, 52 bp, Artificial; identical to SEQ ID NO: 218913
  Synthetic oligonucleotide

SEQ ID NO: 618017 - DNA, 57 bp, Artificial; identical to SEQ ID NO: 209165
  Synthetic oligonucleotide

SEQ ID NO: 618018 - DNA, 60 bp, Artificial; identical to SEQ ID NO: 177991
  Synthetic oligonucleotide

SEQ ID NO: 618019 - DNA, 50 bp, Artificial; identical to SEQ ID NO: 152196
  Synthetic oligonucleotide

SEQ ID NO: 618020 - DNA, 53 bp, Artificial; identical to SEQ ID NO: 247236
  Synthetic oligonucleotide

SEQ ID NO: 618021 - DNA, 60 bp, Artificial; identical to SEQ ID NO: 142708
  Synthetic oligonucleotide

SEQ ID NO: 618022 - DNA, 51 bp, Artificial; identical to SEQ ID NO: 254547
  Synthetic oligonucleotide

SEQ ID NO: 618023 - DNA, 55 bp, Artificial; identical to SEQ ID NO: 193230
  Synthetic oligonucleotide

SEQ ID NO: 618024 - DNA, 58 bp, Artificial; identical to SEQ ID NO: 150807
  Synthetic oligonucleotide

SEQ ID NO: 618025 - DNA, 60 bp, Artificial; identical to SEQ ID NO: 233423
  Synthetic oligonucleotide

SEQ ID NO: 618026 - DNA, 53 bp, Artificial; identical to SEQ ID NO: 157404
  Synthetic oligonucleotide

SEQ ID NO: 618027 - DNA, 52 bp, Artificial; identical to SEQ ID NO: 242328
  Synthetic oligonucleotide

SEQ ID NO: 618028 - DNA, 54 bp, Artificial; identical to SEQ ID NO: 203664
  Synthetic oligonucleotide

SEQ ID NO: 618029 - DNA, 54 bp, Artificial; identical to SEQ ID NO: 164706
  Synthetic oligonucleotide

SEQ ID NO: 618030 - DNA, 55 bp, Artificial; identical to SEQ ID NO: 177998
  Synthetic oligonucleotide

SEQ ID NO: 618031 - DNA, 55 bp, Artificial; identical to SEQ ID NO: 210864
  Synthetic oligonucleotide

SEQ ID NO: 618032 - DNA, 58 bp, Artificial; identical to SEQ ID NO: 266066
  Synthetic oligonucleotide

SEQ ID NO: 618033 - DNA, 54 bp, Artificial; identical to SEQ ID NO: 202947
  Synthetic oligonucleotide

SEQ ID NO: 618034 - DNA, 60 bp, Artificial; identical to SEQ ID NO: 256466
  Synthetic oligonucleotide

SEQ ID NO: 618035 - DNA, 56 bp, Artificial; identical to SEQ ID NO: 178002
  Synthetic oligonucleotide

SEQ ID NO: 618036 - DNA, 53 bp, Artificial; identical to SEQ ID NO: 164965
  Synthetic oligonucleotide

SEQ ID NO: 618037 - DNA, 55 bp, Artificial; identical to SEQ ID NO: 169301
  Synthetic oligonucleotide

SEQ ID NO: 618038 - DNA, 56 bp, Artificial; identical to SEQ ID NO: 144719
  Synthetic oligonucleotide

SEQ ID NO: 618039 - DNA, 55 bp, Artificial; identical to SEQ ID NO: 224977
  Synthetic oligonucleotide

SEQ ID NO: 618040 - DNA, 51 bp, Artificial; identical to SEQ ID NO: 216735
  Synthetic oligonucleotide

SEQ ID NO: 618041 - DNA, 55 bp, Artificial; identical to SEQ ID NO: 203670
  Synthetic oligonucleotide

SEQ ID NO: 618042 - DNA, 54 bp, Artificial; identical to SEQ ID NO: 257651
  Synthetic oligonucleotide

SEQ ID NO: 618043 - DNA, 54 bp, Artificial; identical to SEQ ID NO: 148332
  Synthetic oligonucleotide

SEQ ID NO: 618044 - DNA, 58 bp, Artificial; identical to SEQ ID NO: 212421
  Synthetic oligonucleotide

SEQ ID NO: 618045 - DNA, 53 bp, Artificial; identical to SEQ ID NO: 150805
  Synthetic oligonucleotide

SEQ ID NO: 618046 - DNA, 54 bp, Artificial; identical to SEQ ID NO: 256470
  Synthetic oligonucleotide

SEQ ID NO: 618047 - DNA, 52 bp, Artificial; identical to SEQ ID NO: 149673
  Synthetic oligonucleotide

SEQ ID NO: 618048 - DNA, 55 bp, Artificial; identical to SEQ ID NO: 157576
  Synthetic oligonucleotide

SEQ ID NO: 618049 - DNA, 55 bp, Artificial; identical to SEQ ID NO: 203673
  Synthetic oligonucleotide

SEQ ID NO: 618050 - DNA, 51 bp, Artificial; identical to SEQ ID NO: 165235
  Synthetic oligonucleotide

SEQ ID NO: 618051 - DNA, 58 bp, Artificial; identical to SEQ ID NO: 209101
  Synthetic oligonucleotide

SEQ ID NO: 618052 - DNA, 55 bp, Artificial; identical to SEQ ID NO: 164414
  Synthetic oligonucleotide

SEQ ID NO: 618053 - DNA, 53 bp, Artificial; identical to SEQ ID NO: 168170
  Synthetic oligonucleotide

SEQ ID NO: 618054 - DNA, 55 bp, Artificial; identical to SEQ ID NO: 164413
  Synthetic oligonucleotide

SEQ ID NO: 618055 - DNA, 57 bp, Artificial; identical to SEQ ID NO: 239421
  Synthetic oligonucleotide

SEQ ID NO: 618056 - DNA, 54 bp, Artificial; identical to SEQ ID NO: 179144
  Synthetic oligonucleotide

SEQ ID NO: 618057 - DNA, 54 bp, Artificial; identical to SEQ ID NO: 212875
  Synthetic oligonucleotide

SEQ ID NO: 618058 - DNA, 59 bp, Artificial; identical to SEQ ID NO: 179432
  Synthetic oligonucleotide

SEQ ID NO: 618059 - DNA, 58 bp, Artificial; identical to SEQ ID NO: 252820
  Synthetic oligonucleotide

SEQ ID NO: 618060 - DNA, 56 bp, Artificial; identical to SEQ ID NO: 190698
  Synthetic oligonucleotide

SEQ ID NO: 618061 - DNA, 53 bp, Artificial; identical to SEQ ID NO: 205426
  Synthetic oligonucleotide

SEQ ID NO: 618062 - DNA, 50 bp, Artificial; identical to SEQ ID NO: 205453
  Synthetic oligonucleotide

SEQ ID NO: 618063 - DNA, 54 bp, Artificial; identical to SEQ ID NO: 224271
  Synthetic oligonucleotide

SEQ ID NO: 618064 - DNA, 50 bp, Artificial; identical to SEQ ID NO: 176227
  Synthetic oligonucleotide

SEQ ID NO: 618065 - DNA, 55 bp, Artificial; identical to SEQ ID NO: 220599
  Synthetic oligonucleotide

SEQ ID NO: 618066 - DNA, 52 bp, Artificial; identical to SEQ ID NO: 203940
  Synthetic oligonucleotide

SEQ ID NO: 618067 - DNA, 60 bp, Artificial; identical to SEQ ID NO: 224269
  Synthetic oligonucleotide

SEQ ID NO: 618068 - DNA, 54 bp, Artificial; identical to SEQ ID NO: 184948
  Synthetic oligonucleotide

SEQ ID NO: 618069 - DNA, 60 bp, Artificial; identical to SEQ ID NO: 224268
  Synthetic oligonucleotide

SEQ ID NO: 618070 - DNA, 55 bp, Artificial; identical to SEQ ID NO: 142280
  Synthetic oligonucleotide

SEQ ID NO: 618071 - DNA, 51 bp, Artificial; identical to SEQ ID NO: 249110
  Synthetic oligonucleotide

SEQ ID NO: 618072 - DNA, 54 bp, Artificial; identical to SEQ ID NO: 190434
  Synthetic oligonucleotide

SEQ ID NO: 618073 - DNA, 53 bp, Artificial; identical to SEQ ID NO: 185608
  Synthetic oligonucleotide

SEQ ID NO: 618074 - DNA, 55 bp, Artificial; identical to SEQ ID NO: 181700
  Synthetic oligonucleotide

SEQ ID NO: 618075 - DNA, 55 bp, Artificial; identical to SEQ ID NO: 157071
  Synthetic oligonucleotide

SEQ ID NO: 618076 - DNA, 54 bp, Artificial; identical to SEQ ID NO: 164701
  Synthetic oligonucleotide

SEQ ID NO: 618077 - DNA, 48 bp, Artificial; identical to SEQ ID NO: 205728
  Synthetic oligonucleotide

SEQ ID NO: 618078 - DNA, 56 bp, Artificial; identical to SEQ ID NO: 179155
  Synthetic oligonucleotide

SEQ ID NO: 618079 - DNA, 50 bp, Artificial; identical to SEQ ID NO: 186922
  Synthetic oligonucleotide

SEQ ID NO: 618080 - DNA, 51 bp, Artificial; identical to SEQ ID NO: 248014
  Synthetic oligonucleotide

SEQ ID NO: 618081 - DNA, 54 bp, Artificial; identical to SEQ ID NO: 207726
  Synthetic oligonucleotide

SEQ ID NO: 618082 - DNA, 53 bp, Artificial; identical to SEQ ID NO: 240187
  Synthetic oligonucleotide

SEQ ID NO: 618083 - DNA, 54 bp, Artificial; identical to SEQ ID NO: 207727
  Synthetic oligonucleotide

SEQ ID NO: 618084 - DNA, 55 bp, Artificial; identical to SEQ ID NO: 249101
  Synthetic oligonucleotide

SEQ ID NO: 618085 - DNA, 57 bp, Artificial; identical to SEQ ID NO: 222762
  Synthetic oligonucleotide

SEQ ID NO: 618086 - DNA, 52 bp, Artificial; identical to SEQ ID NO: 205713
  Synthetic oligonucleotide

SEQ ID NO: 618087 - DNA, 52 bp, Artificial; identical to SEQ ID NO: 246022
  Synthetic oligonucleotide

SEQ ID NO: 618088 - DNA, 55 bp, Artificial; identical to SEQ ID NO: 197908
  Synthetic oligonucleotide

SEQ ID NO: 618089 - DNA, 55 bp, Artificial; identical to SEQ ID NO: 240199
  Synthetic oligonucleotide

SEQ ID NO: 618090 - DNA, 60 bp, Artificial; identical to SEQ ID NO: 194210
  Synthetic oligonucleotide

SEQ ID NO: 618091 - DNA, 54 bp, Artificial; identical to SEQ ID NO: 185161
  Synthetic oligonucleotide

SEQ ID NO: 618092 - DNA, 56 bp, Artificial; identical to SEQ ID NO: 224267
  Synthetic oligonucleotide

SEQ ID NO: 618093 - DNA, 60 bp, Artificial; identical to SEQ ID NO: 179121
  Synthetic oligonucleotide

SEQ ID NO: 618094 - DNA, 56 bp, Artificial; identical to SEQ ID NO: 207061
  Synthetic oligonucleotide

SEQ ID NO: 618095 - DNA, 55 bp, Artificial; identical to SEQ ID NO: 181669
  Synthetic oligonucleotide

SEQ ID NO: 618096 - DNA, 55 bp, Artificial; identical to SEQ ID NO: 181670
  Synthetic oligonucleotide

SEQ ID NO: 618097 - DNA, 55 bp, Artificial; identical to SEQ ID NO: 190436
  Synthetic oligonucleotide

SEQ ID NO: 618098 - DNA, 55 bp, Artificial; identical to SEQ ID NO: 171548
  Synthetic oligonucleotide

SEQ ID NO: 618099 - DNA, 53 bp, Artificial; identical to SEQ ID NO: 157400
  Synthetic oligonucleotide

SEQ ID NO: 618100 - DNA, 54 bp, Artificial; identical to SEQ ID NO: 159944
  Synthetic oligonucleotide

SEQ ID NO: 618101 - DNA, 56 bp, Artificial; identical to SEQ ID NO: 210795
  Synthetic oligonucleotide

SEQ ID NO: 618102 - DNA, 57 bp, Artificial; identical to SEQ ID NO: 209167
  Synthetic oligonucleotide

SEQ ID NO: 618103 - DNA, 57 bp, Artificial; identical to SEQ ID NO: 142707
  Synthetic oligonucleotide

SEQ ID NO: 618104 - DNA, 54 bp, Artificial; identical to SEQ ID NO: 150803
  Synthetic oligonucleotide

SEQ ID NO: 618105 - DNA, 51 bp, Artificial; identical to SEQ ID NO: 216787
  Synthetic oligonucleotide

SEQ ID NO: 618106 - DNA, 58 bp, Artificial; identical to SEQ ID NO: 203308
  Synthetic oligonucleotide

SEQ ID NO: 618107 - DNA, 55 bp, Artificial; identical to SEQ ID NO: 242497
  Synthetic oligonucleotide

SEQ ID NO: 618108 - DNA, 55 bp, Artificial; identical to SEQ ID NO: 197998
  Synthetic oligonucleotide

SEQ ID NO: 618109 - DNA, 55 bp, Artificial; identical to SEQ ID NO: 257624
  Synthetic oligonucleotide

SEQ ID NO: 618110 - DNA, 55 bp, Artificial; identical to SEQ ID NO: 249733
  Synthetic oligonucleotide

SEQ ID NO: 618111 - DNA, 50 bp, Artificial; identical to SEQ ID NO: 224396
  Synthetic oligonucleotide

SEQ ID NO: 618112 - DNA, 54 bp, Artificial; identical to SEQ ID NO: 216602
  Synthetic oligonucleotide

SEQ ID NO: 618113 - DNA, 55 bp, Artificial; identical to SEQ ID NO: 202232
  Synthetic oligonucleotide

SEQ ID NO: 618114 - DNA, 52 bp, Artificial; identical to SEQ ID NO: 255262
  Synthetic oligonucleotide

SEQ ID NO: 618115 - DNA, 55 bp, Artificial; identical to SEQ ID NO: 157057
  Synthetic oligonucleotide

SEQ ID NO: 618116 - DNA, 55 bp, Artificial; identical to SEQ ID NO: 159398
  Synthetic oligonucleotide

SEQ ID NO: 618117 - DNA, 54 bp, Artificial; identical to SEQ ID NO: 179317
  Synthetic oligonucleotide

SEQ ID NO: 618118 - DNA, 54 bp, Artificial; identical to SEQ ID NO: 240579
  Synthetic oligonucleotide

SEQ ID NO: 618119 - DNA, 60 bp, Artificial; identical to SEQ ID NO: 142724
  Synthetic oligonucleotide

SEQ ID NO: 618120 - DNA, 57 bp, Artificial; identical to SEQ ID NO: 256438
  Synthetic oligonucleotide

SEQ ID NO: 618121 - DNA, 60 bp, Artificial; identical to SEQ ID NO: 150802
  Synthetic oligonucleotide

SEQ ID NO: 618122 - DNA, 50 bp, Artificial; identical to SEQ ID NO: 160627
  Synthetic oligonucleotide

SEQ ID NO: 618123 - DNA, 52 bp, Artificial; identical to SEQ ID NO: 186009
  Synthetic oligonucleotide

SEQ ID NO: 618124 - DNA, 55 bp, Artificial; identical to SEQ ID NO: 224979
  Synthetic oligonucleotide

SEQ ID NO: 618125 - DNA, 56 bp, Artificial; identical to SEQ ID NO: 222718
  Synthetic oligonucleotide

SEQ ID NO: 618126 - DNA, 54 bp, Artificial; identical to SEQ ID NO: 171553
  Synthetic oligonucleotide

SEQ ID NO: 618127 - DNA, 55 bp, Artificial; identical to SEQ ID NO: 217363
  Synthetic oligonucleotide

SEQ ID NO: 618128 - DNA, 55 bp, Artificial; identical to SEQ ID NO: 181680
  Synthetic oligonucleotide

SEQ ID NO: 618129 - DNA, 58 bp, Artificial; identical to SEQ ID NO: 150798
  Synthetic oligonucleotide

SEQ ID NO: 618130 - DNA, 55 bp, Artificial; identical to SEQ ID NO: 240254
  Synthetic oligonucleotide

SEQ ID NO: 618131 - DNA, 51 bp, Artificial; identical to SEQ ID NO: 253378
  Synthetic oligonucleotide

SEQ ID NO: 618132 - DNA, 60 bp, Artificial; identical to SEQ ID NO: 237845
  Synthetic oligonucleotide

SEQ ID NO: 618133 - DNA, 54 bp, Artificial; identical to SEQ ID NO: 199591
  Synthetic oligonucleotide

SEQ ID NO: 618134 - DNA, 51 bp, Artificial; identical to SEQ ID NO: 187257
  Synthetic oligonucleotide

SEQ ID NO: 618135 - DNA, 55 bp, Artificial; identical to SEQ ID NO: 249221
  Synthetic oligonucleotide

SEQ ID NO: 618136 - DNA, 51 bp, Artificial; identical to SEQ ID NO: 189650
  Synthetic oligonucleotide

SEQ ID NO: 618137 - DNA, 55 bp, Artificial; identical to SEQ ID NO: 238614
  Synthetic oligonucleotide

SEQ ID NO: 618138 - DNA, 52 bp, Artificial; identical to SEQ ID NO: 189163
  Synthetic oligonucleotide

SEQ ID NO: 618139 - DNA, 59 bp, Artificial; identical to SEQ ID NO: 179187
  Synthetic oligonucleotide

SEQ ID NO: 618140 - DNA, 55 bp, Artificial; identical to SEQ ID NO: 181688
  Synthetic oligonucleotide

SEQ ID NO: 618141 - DNA, 58 bp, Artificial; identical to SEQ ID NO: 238653
  Synthetic oligonucleotide

SEQ ID NO: 618142 - DNA, 58 bp, Artificial; identical to SEQ ID NO: 187298
  Synthetic oligonucleotide

SEQ ID NO: 618143 - DNA, 58 bp, Artificial; identical to SEQ ID NO: 166233
  Synthetic oligonucleotide

SEQ ID NO: 618144 - DNA, 55 bp, Artificial; identical to SEQ ID NO: 160283
  Synthetic oligonucleotide

SEQ ID NO: 618145 - DNA, 52 bp, Artificial; identical to SEQ ID NO: 208396
  Synthetic oligonucleotide

SEQ ID NO: 618146 - DNA, 54 bp, Artificial; identical to SEQ ID NO: 171661
  Synthetic oligonucleotide

SEQ ID NO: 618147 - DNA, 50 bp, Artificial; identical to SEQ ID NO: 170660
  Synthetic oligonucleotide

SEQ ID NO: 618148 - DNA, 51 bp, Artificial; identical to SEQ ID NO: 213049
  Synthetic oligonucleotide

SEQ ID NO: 618149 - DNA, 53 bp, Artificial; identical to SEQ ID NO: 166011
  Synthetic oligonucleotide

SEQ ID NO: 618150 - DNA, 52 bp, Artificial; identical to SEQ ID NO: 192265
  Synthetic oligonucleotide

SEQ ID NO: 618151 - DNA, 55 bp, Artificial; identical to SEQ ID NO: 212872
  Synthetic oligonucleotide

SEQ ID NO: 618152 - DNA, 55 bp, Artificial; identical to SEQ ID NO: 224983
  Synthetic oligonucleotide

SEQ ID NO: 618153 - DNA, 52 bp, Artificial; identical to SEQ ID NO: 201663
  Synthetic oligonucleotide

SEQ ID NO: 618154 - DNA, 55 bp, Artificial; identical to SEQ ID NO: 142265
  Synthetic oligonucleotide

SEQ ID NO: 618155 - DNA, 52 bp, Artificial; identical to SEQ ID NO: 185983
  Synthetic oligonucleotide

SEQ ID NO: 618156 - DNA, 60 bp, Artificial; identical to SEQ ID NO: 247186
  Synthetic oligonucleotide

SEQ ID NO: 618157 - DNA, 59 bp, Artificial; identical to SEQ ID NO: 205531
  Synthetic oligonucleotide

SEQ ID NO: 618158 - DNA, 51 bp, Artificial; identical to SEQ ID NO: 254521
  Synthetic oligonucleotide

SEQ ID NO: 618159 - DNA, 55 bp, Artificial; identical to SEQ ID NO: 233632
  Synthetic oligonucleotide

SEQ ID NO: 618160 - DNA, 54 bp, Artificial; identical to SEQ ID NO: 238572
  Synthetic oligonucleotide

SEQ ID NO: 618161 - DNA, 53 bp, Artificial; identical to SEQ ID NO: 168926
  Synthetic oligonucleotide

SEQ ID NO: 618162 - DNA, 60 bp, Artificial; identical to SEQ ID NO: 179159
  Synthetic oligonucleotide

SEQ ID NO: 618163 - DNA, 55 bp, Artificial; identical to SEQ ID NO: 164411
  Synthetic oligonucleotide

SEQ ID NO: 618164 - DNA, 55 bp, Artificial; identical to SEQ ID NO: 151422
  Synthetic oligonucleotide

SEQ ID NO: 618165 - DNA, 55 bp, Artificial; identical to SEQ ID NO: 203628
  Synthetic oligonucleotide

SEQ ID NO: 618166 - DNA, 60 bp, Artificial; identical to SEQ ID NO: 224254
  Synthetic oligonucleotide

SEQ ID NO: 618167 - DNA, 60 bp, Artificial; identical to SEQ ID NO: 248500
  Synthetic oligonucleotide

SEQ ID NO: 618168 - DNA, 51 bp, Artificial; identical to SEQ ID NO: 189647
  Synthetic oligonucleotide

SEQ ID NO: 618169 - DNA, 58 bp, Artificial; identical to SEQ ID NO: 248562
  Synthetic oligonucleotide

SEQ ID NO: 618170 - DNA, 52 bp, Artificial; identical to SEQ ID NO: 211628
  Synthetic oligonucleotide

SEQ ID NO: 618171 - DNA, 55 bp, Artificial; identical to SEQ ID NO: 257978
  Synthetic oligonucleotide

SEQ ID NO: 618172 - DNA, 50 bp, Artificial; identical to SEQ ID NO: 153804
  Synthetic oligonucleotide

SEQ ID NO: 618173 - DNA, 51 bp, Artificial; identical to SEQ ID NO: 205729
  Synthetic oligonucleotide

SEQ ID NO: 618174 - DNA, 52 bp, Artificial; identical to SEQ ID NO: 247906
  Synthetic oligonucleotide

SEQ ID NO: 618175 - DNA, 55 bp, Artificial; identical to SEQ ID NO: 224252
  Synthetic oligonucleotide

SEQ ID NO: 618176 - DNA, 55 bp, Artificial; identical to SEQ ID NO: 161273
  Synthetic oligonucleotide

SEQ ID NO: 618177 - DNA, 55 bp, Artificial; identical to SEQ ID NO: 249229
  Synthetic oligonucleotide

SEQ ID NO: 618178 - DNA, 51 bp, Artificial; identical to SEQ ID NO: 237194
  Synthetic oligonucleotide

SEQ ID NO: 618179 - DNA, 55 bp, Artificial; identical to SEQ ID NO: 212868
  Synthetic oligonucleotide

SEQ ID NO: 618180 - DNA, 55 bp, Artificial; identical to SEQ ID NO: 249223
  Synthetic oligonucleotide

SEQ ID NO: 618181 - DNA, 54 bp, Artificial; identical to SEQ ID NO: 185066
  Synthetic oligonucleotide

SEQ ID NO: 618182 - DNA, 55 bp, Artificial; identical to SEQ ID NO: 256484
  Synthetic oligonucleotide

SEQ ID NO: 618183 - DNA, 55 bp, Artificial; identical to SEQ ID NO: 215157
  Synthetic oligonucleotide

SEQ ID NO: 618184 - DNA, 55 bp, Artificial; identical to SEQ ID NO: 197914
  Synthetic oligonucleotide

SEQ ID NO: 618185 - DNA, 55 bp, Artificial; identical to SEQ ID NO: 240266
  Synthetic oligonucleotide

SEQ ID NO: 618186 - DNA, 56 bp, Artificial; identical to SEQ ID NO: 187293
  Synthetic oligonucleotide

SEQ ID NO: 618187 - DNA, 54 bp, Artificial; identical to SEQ ID NO: 191669
  Synthetic oligonucleotide

SEQ ID NO: 618188 - DNA, 53 bp, Artificial; identical to SEQ ID NO: 223607
  Synthetic oligonucleotide

SEQ ID NO: 618189 - DNA, 55 bp, Artificial; identical to SEQ ID NO: 171515
  Synthetic oligonucleotide

SEQ ID NO: 618190 - DNA, 57 bp, Artificial; identical to SEQ ID NO: 247185
  Synthetic oligonucleotide

SEQ ID NO: 618191 - DNA, 55 bp, Artificial; identical to SEQ ID NO: 210994
  Synthetic oligonucleotide

SEQ ID NO: 618192 - DNA, 52 bp, Artificial; identical to SEQ ID NO: 247916
  Synthetic oligonucleotide

SEQ ID NO: 618193 - DNA, 55 bp, Artificial; identical to SEQ ID NO: 157062
  Synthetic oligonucleotide

SEQ ID NO: 618194 - DNA, 52 bp, Artificial; identical to SEQ ID NO: 249179
  Synthetic oligonucleotide

SEQ ID NO: 618195 - DNA, 50 bp, Artificial; identical to SEQ ID NO: 236511
  Synthetic oligonucleotide

SEQ ID NO: 618196 - DNA, 55 bp, Artificial; identical to SEQ ID NO: 205417
  Synthetic oligonucleotide

SEQ ID NO: 618197 - DNA, 51 bp, Artificial; identical to SEQ ID NO: 186780
  Synthetic oligonucleotide

SEQ ID NO: 618198 - DNA, 55 bp, Artificial; identical to SEQ ID NO: 157068
  Synthetic oligonucleotide

SEQ ID NO: 618199 - DNA, 52 bp, Artificial; identical to SEQ ID NO: 157482
  Synthetic oligonucleotide

SEQ ID NO: 618200 - DNA, 51 bp, Artificial; identical to SEQ ID NO: 248540
  Synthetic oligonucleotide

SEQ ID NO: 618201 - DNA, 55 bp, Artificial; identical to SEQ ID NO: 208460
  Synthetic oligonucleotide

SEQ ID NO: 618202 - DNA, 54 bp, Artificial; identical to SEQ ID NO: 157072
  Synthetic oligonucleotide

SEQ ID NO: 618203 - DNA, 55 bp, Artificial; identical to SEQ ID NO: 181536
  Synthetic oligonucleotide

SEQ ID NO: 618204 - DNA, 55 bp, Artificial; identical to SEQ ID NO: 210988
  Synthetic oligonucleotide

SEQ ID NO: 618205 - DNA, 55 bp, Artificial; identical to SEQ ID NO: 217351
  Synthetic oligonucleotide

SEQ ID NO: 618206 - DNA, 55 bp, Artificial; identical to SEQ ID NO: 167476
  Synthetic oligonucleotide

SEQ ID NO: 618207 - DNA, 54 bp, Artificial; identical to SEQ ID NO: 181537
  Synthetic oligonucleotide

SEQ ID NO: 618208 - DNA, 55 bp, Artificial; identical to SEQ ID NO: 237878
  Synthetic oligonucleotide

SEQ ID NO: 618209 - DNA, 58 bp, Artificial; identical to SEQ ID NO: 179050
  Synthetic oligonucleotide

SEQ ID NO: 618210 - DNA, 55 bp, Artificial; identical to SEQ ID NO: 249172
  Synthetic oligonucleotide

SEQ ID NO: 618211 - DNA, 55 bp, Artificial; identical to SEQ ID NO: 254768
  Synthetic oligonucleotide

SEQ ID NO: 618212 - DNA, 55 bp, Artificial; identical to SEQ ID NO: 162133
  Synthetic oligonucleotide

SEQ ID NO: 618213 - DNA, 56 bp, Artificial; identical to SEQ ID NO: 256660
  Synthetic oligonucleotide

SEQ ID NO: 618214 - DNA, 52 bp, Artificial; identical to SEQ ID NO: 192113
  Synthetic oligonucleotide

SEQ ID NO: 618215 - DNA, 51 bp, Artificial; identical to SEQ ID NO: 246639
  Synthetic oligonucleotide

SEQ ID NO: 618216 - DNA, 54 bp, Artificial; identical to SEQ ID NO: 193182
  Synthetic oligonucleotide

SEQ ID NO: 618217 - DNA, 56 bp, Artificial; identical to SEQ ID NO: 179053
  Synthetic oligonucleotide

SEQ ID NO: 618218 - DNA, 53 bp, Artificial; identical to SEQ ID NO: 179054
  Synthetic oligonucleotide

SEQ ID NO: 618219 - DNA, 55 bp, Artificial; identical to SEQ ID NO: 161279
  Synthetic oligonucleotide

SEQ ID NO: 618220 - DNA, 53 bp, Artificial; identical to SEQ ID NO: 145002
  Synthetic oligonucleotide

SEQ ID NO: 618221 - DNA, 50 bp, Artificial; identical to SEQ ID NO: 247182
  Synthetic oligonucleotide

SEQ ID NO: 618222 - DNA, 50 bp, Artificial; identical to SEQ ID NO: 206610
  Synthetic oligonucleotide

SEQ ID NO: 618223 - DNA, 50 bp, Artificial; identical to SEQ ID NO: 187120
  Synthetic oligonucleotide

SEQ ID NO: 618224 - DNA, 55 bp, Artificial; identical to SEQ ID NO: 168759
  Synthetic oligonucleotide

SEQ ID NO: 618225 - DNA, 55 bp, Artificial; identical to SEQ ID NO: 202832
  Synthetic oligonucleotide

SEQ ID NO: 618226 - DNA, 55 bp, Artificial; identical to SEQ ID NO: 164410
  Synthetic oligonucleotide

SEQ ID NO: 618227 - DNA, 58 bp, Artificial; identical to SEQ ID NO: 243724
  Synthetic oligonucleotide

SEQ ID NO: 618228 - DNA, 55 bp, Artificial; identical to SEQ ID NO: 181543
  Synthetic oligonucleotide

SEQ ID NO: 618229 - DNA, 58 bp, Artificial; identical to SEQ ID NO: 144308
  Synthetic oligonucleotide

SEQ ID NO: 618230 - DNA, 50 bp, Artificial; identical to SEQ ID NO: 192084
  Synthetic oligonucleotide

SEQ ID NO: 618231 - DNA, 51 bp, Artificial; identical to SEQ ID NO: 209098
  Synthetic oligonucleotide

SEQ ID NO: 618232 - DNA, 55 bp, Artificial; identical to SEQ ID NO: 206980
  Synthetic oligonucleotide

SEQ ID NO: 618233 - DNA, 51 bp, Artificial; identical to SEQ ID NO: 208865
  Synthetic oligonucleotide

SEQ ID NO: 618234 - DNA, 55 bp, Artificial; identical to SEQ ID NO: 245846
  Synthetic oligonucleotide

SEQ ID NO: 618235 - DNA, 55 bp, Artificial; identical to SEQ ID NO: 162139
  Synthetic oligonucleotide

SEQ ID NO: 618236 - DNA, 50 bp, Artificial; identical to SEQ ID NO: 176264
  Synthetic oligonucleotide

SEQ ID NO: 618237 - DNA, 53 bp, Artificial; identical to SEQ ID NO: 185508
  Synthetic oligonucleotide

SEQ ID NO: 618238 - DNA, 54 bp, Artificial; identical to SEQ ID NO: 168754
  Synthetic oligonucleotide

SEQ ID NO: 618239 - DNA, 55 bp, Artificial; identical to SEQ ID NO: 238085
  Synthetic oligonucleotide

SEQ ID NO: 618240 - DNA, 55 bp, Artificial; identical to SEQ ID NO: 207651
  Synthetic oligonucleotide

SEQ ID NO: 618241 - DNA, 54 bp, Artificial; identical to SEQ ID NO: 208688
  Synthetic oligonucleotide

SEQ ID NO: 618242 - DNA, 55 bp, Artificial; identical to SEQ ID NO: 237872
  Synthetic oligonucleotide

SEQ ID NO: 618243 - DNA, 53 bp, Artificial; identical to SEQ ID NO: 223608
  Synthetic oligonucleotide

SEQ ID NO: 618244 - DNA, 55 bp, Artificial; identical to SEQ ID NO: 196136
  Synthetic oligonucleotide

SEQ ID NO: 618245 - DNA, 55 bp, Artificial; identical to SEQ ID NO: 233629
  Synthetic oligonucleotide

SEQ ID NO: 618246 - DNA, 50 bp, Artificial; identical to SEQ ID NO: 158990
  Synthetic oligonucleotide

SEQ ID NO: 618247 - DNA, 55 bp, Artificial; identical to SEQ ID NO: 233949
  Synthetic oligonucleotide

SEQ ID NO: 618248 - DNA, 55 bp, Artificial; identical to SEQ ID NO: 161280
  Synthetic oligonucleotide

SEQ ID NO: 618249 - DNA, 51 bp, Artificial; identical to SEQ ID NO: 193790
  Synthetic oligonucleotide

SEQ ID NO: 618250 - DNA, 53 bp, Artificial; identical to SEQ ID NO: 179695
  Synthetic oligonucleotide

SEQ ID NO: 618251 - DNA, 54 bp, Artificial; identical to SEQ ID NO: 201865
  Synthetic oligonucleotide

SEQ ID NO: 618252 - DNA, 55 bp, Artificial; identical to SEQ ID NO: 197134
  Synthetic oligonucleotide

SEQ ID NO: 618253 - DNA, 54 bp, Artificial; identical to SEQ ID NO: 181551
  Synthetic oligonucleotide

SEQ ID NO: 618254 - DNA, 50 bp, Artificial; identical to SEQ ID NO: 154034
  Synthetic oligonucleotide

SEQ ID NO: 618255 - DNA, 55 bp, Artificial; identical to SEQ ID NO: 168788
  Synthetic oligonucleotide

SEQ ID NO: 618256 - DNA, 60 bp, Artificial; identical to SEQ ID NO: 141857
  Synthetic oligonucleotide

SEQ ID NO: 618257 - DNA, 55 bp, Artificial; identical to SEQ ID NO: 253119
  Synthetic oligonucleotide

SEQ ID NO: 618258 - DNA, 53 bp, Artificial; identical to SEQ ID NO: 145004
  Synthetic oligonucleotide

SEQ ID NO: 618259 - DNA, 55 bp, Artificial; identical to SEQ ID NO: 181554
  Synthetic oligonucleotide

SEQ ID NO: 618260 - DNA, 55 bp, Artificial; identical to SEQ ID NO: 249162
  Synthetic oligonucleotide

SEQ ID NO: 618261 - DNA, 55 bp, Artificial; identical to SEQ ID NO: 249200
  Synthetic oligonucleotide

SEQ ID NO: 618262 - DNA, 58 bp, Artificial; identical to SEQ ID NO: 224603
  Synthetic oligonucleotide

SEQ ID NO: 618263 - DNA, 54 bp, Artificial; identical to SEQ ID NO: 200901
  Synthetic oligonucleotide

SEQ ID NO: 618264 - DNA, 50 bp, Artificial; identical to SEQ ID NO: 194055
  Synthetic oligonucleotide

SEQ ID NO: 618265 - DNA, 50 bp, Artificial; identical to SEQ ID NO: 197779
  Synthetic oligonucleotide

SEQ ID NO: 618266 - DNA, 55 bp, Artificial; identical to SEQ ID NO: 181557
  Synthetic oligonucleotide

SEQ ID NO: 618267 - DNA, 52 bp, Artificial; identical to SEQ ID NO: 152062
  Synthetic oligonucleotide

SEQ ID NO: 618268 - DNA, 59 bp, Artificial; identical to SEQ ID NO: 243727
  Synthetic oligonucleotide

SEQ ID NO: 618269 - DNA, 53 bp, Artificial; identical to SEQ ID NO: 201943
  Synthetic oligonucleotide

SEQ ID NO: 618270 - DNA, 54 bp, Artificial; identical to SEQ ID NO: 200899
  Synthetic oligonucleotide

SEQ ID NO: 618271 - DNA, 55 bp, Artificial; identical to SEQ ID NO: 181601
  Synthetic oligonucleotide

SEQ ID NO: 618272 - DNA, 59 bp, Artificial; identical to SEQ ID NO: 179032
  Synthetic oligonucleotide

SEQ ID NO: 618273 - DNA, 60 bp, Artificial; identical to SEQ ID NO: 256446
  Synthetic oligonucleotide

SEQ ID NO: 618274 - DNA, 54 bp, Artificial; identical to SEQ ID NO: 185121
  Synthetic oligonucleotide

SEQ ID NO: 618275 - DNA, 57 bp, Artificial; identical to SEQ ID NO: 239420
  Synthetic oligonucleotide

SEQ ID NO: 618276 - DNA, 55 bp, Artificial; identical to SEQ ID NO: 174752
  Synthetic oligonucleotide

SEQ ID NO: 618277 - DNA, 55 bp, Artificial; identical to SEQ ID NO: 254746
  Synthetic oligonucleotide

SEQ ID NO: 618278 - DNA, 58 bp, Artificial; identical to SEQ ID NO: 249163
  Synthetic oligonucleotide

SEQ ID NO: 618279 - DNA, 55 bp, Artificial; identical to SEQ ID NO: 244256
  Synthetic oligonucleotide

SEQ ID NO: 618280 - DNA, 55 bp, Artificial; identical to SEQ ID NO: 150817
  Synthetic oligonucleotide

SEQ ID NO: 618281 - DNA, 55 bp, Artificial; identical to SEQ ID NO: 187258
  Synthetic oligonucleotide

SEQ ID NO: 618282 - DNA, 58 bp, Artificial; identical to SEQ ID NO: 206977
  Synthetic oligonucleotide

SEQ ID NO: 618283 - DNA, 52 bp, Artificial; identical to SEQ ID NO: 166189
  Synthetic oligonucleotide

SEQ ID NO: 618284 - DNA, 55 bp, Artificial; identical to SEQ ID NO: 257985
  Synthetic oligonucleotide

SEQ ID NO: 618285 - DNA, 51 bp, Artificial; identical to SEQ ID NO: 200186
  Synthetic oligonucleotide

SEQ ID NO: 618286 - DNA, 51 bp, Artificial; identical to SEQ ID NO: 152136
  Synthetic oligonucleotide

SEQ ID NO: 618287 - DNA, 50 bp, Artificial; identical to SEQ ID NO: 210664
  Synthetic oligonucleotide

SEQ ID NO: 618288 - DNA, 54 bp, Artificial; identical to SEQ ID NO: 255269
  Synthetic oligonucleotide

SEQ ID NO: 618289 - DNA, 60 bp, Artificial; identical to SEQ ID NO: 171406
  Synthetic oligonucleotide

SEQ ID NO: 618290 - DNA, 54 bp, Artificial; identical to SEQ ID NO: 233972
  Synthetic oligonucleotide

SEQ ID NO: 618291 - DNA, 52 bp, Artificial; identical to SEQ ID NO: 150816
  Synthetic oligonucleotide

SEQ ID NO: 618292 - DNA, 55 bp, Artificial; identical to SEQ ID NO: 249199
  Synthetic oligonucleotide

SEQ ID NO: 618293 - DNA, 50 bp, Artificial; identical to SEQ ID NO: 153582
  Synthetic oligonucleotide

SEQ ID NO: 618294 - DNA, 50 bp, Artificial; identical to SEQ ID NO: 187119
  Synthetic oligonucleotide

SEQ ID NO: 618295 - DNA, 54 bp, Artificial; identical to SEQ ID NO: 160380
  Synthetic oligonucleotide

SEQ ID NO: 618296 - DNA, 52 bp, Artificial; identical to SEQ ID NO: 244258
  Synthetic oligonucleotide

SEQ ID NO: 618297 - DNA, 55 bp, Artificial; identical to SEQ ID NO: 197975
  Synthetic oligonucleotide

SEQ ID NO: 618298 - DNA, 57 bp, Artificial; identical to SEQ ID NO: 201477
  Synthetic oligonucleotide

SEQ ID NO: 618299 - DNA, 53 bp, Artificial; identical to SEQ ID NO: 153593
  Synthetic oligonucleotide

SEQ ID NO: 618300 - DNA, 57 bp, Artificial; identical to SEQ ID NO: 153002
  Synthetic oligonucleotide

SEQ ID NO: 618301 - DNA, 55 bp, Artificial; identical to SEQ ID NO: 197978
  Synthetic oligonucleotide

SEQ ID NO: 618302 - DNA, 55 bp, Artificial; identical to SEQ ID NO: 174784
  Synthetic oligonucleotide

SEQ ID NO: 618303 - DNA, 55 bp, Artificial; identical to SEQ ID NO: 257987
  Synthetic oligonucleotide

SEQ ID NO: 618304 - DNA, 56 bp, Artificial; identical to SEQ ID NO: 243729
  Synthetic oligonucleotide

SEQ ID NO: 618305 - DNA, 60 bp, Artificial; identical to SEQ ID NO: 174271
  Synthetic oligonucleotide

SEQ ID NO: 618306 - DNA, 52 bp, Artificial; identical to SEQ ID NO: 191200
  Synthetic oligonucleotide

SEQ ID NO: 618307 - DNA, 53 bp, Artificial; identical to SEQ ID NO: 253278
  Synthetic oligonucleotide

SEQ ID NO: 618308 - DNA, 55 bp, Artificial; identical to SEQ ID NO: 245853
  Synthetic oligonucleotide

SEQ ID NO: 618309 - DNA, 55 bp, Artificial; identical to SEQ ID NO: 188365
  Synthetic oligonucleotide

SEQ ID NO: 618310 - DNA, 60 bp, Artificial; identical to SEQ ID NO: 203079
  Synthetic oligonucleotide

SEQ ID NO: 618311 - DNA, 60 bp, Artificial; identical to SEQ ID NO: 179039
  Synthetic oligonucleotide

SEQ ID NO: 618312 - DNA, 57 bp, Artificial; identical to SEQ ID NO: 239442
  Synthetic oligonucleotide

SEQ ID NO: 618313 - DNA, 51 bp, Artificial; identical to SEQ ID NO: 186883
  Synthetic oligonucleotide

SEQ ID NO: 618314 - DNA, 50 bp, Artificial; identical to SEQ ID NO: 187111
  Synthetic oligonucleotide

SEQ ID NO: 618315 - DNA, 55 bp, Artificial; identical to SEQ ID NO: 245856
  Synthetic oligonucleotide

SEQ ID NO: 618316 - DNA, 50 bp, Artificial; identical to SEQ ID NO: 150402
  Synthetic oligonucleotide

SEQ ID NO: 618317 - DNA, 55 bp, Artificial; identical to SEQ ID NO: 148283
  Synthetic oligonucleotide

SEQ ID NO: 618318 - DNA, 50 bp, Artificial; identical to SEQ ID NO: 187100
  Synthetic oligonucleotide

SEQ ID NO: 618319 - DNA, 59 bp, Artificial; identical to SEQ ID NO: 201064
  Synthetic oligonucleotide

SEQ ID NO: 618320 - DNA, 57 bp, Artificial; identical to SEQ ID NO: 239432
  Synthetic oligonucleotide

SEQ ID NO: 618321 - DNA, 55 bp, Artificial; identical to SEQ ID NO: 188998
  Synthetic oligonucleotide

SEQ ID NO: 618322 - DNA, 54 bp, Artificial; identical to SEQ ID NO: 160381
  Synthetic oligonucleotide

SEQ ID NO: 618323 - DNA, 50 bp, Artificial; identical to SEQ ID NO: 200262
  Synthetic oligonucleotide

SEQ ID NO: 618324 - DNA, 55 bp, Artificial; identical to SEQ ID NO: 181621
  Synthetic oligonucleotide

SEQ ID NO: 618325 - DNA, 57 bp, Artificial; identical to SEQ ID NO: 187369
  Synthetic oligonucleotide

SEQ ID NO: 618326 - DNA, 55 bp, Artificial; identical to SEQ ID NO: 181622
  Synthetic oligonucleotide

SEQ ID NO: 618327 - DNA, 52 bp, Artificial; identical to SEQ ID NO: 255477
  Synthetic oligonucleotide

SEQ ID NO: 618328 - DNA, 55 bp, Artificial; identical to SEQ ID NO: 224940
  Synthetic oligonucleotide

SEQ ID NO: 618329 - DNA, 51 bp, Artificial; identical to SEQ ID NO: 171522
  Synthetic oligonucleotide

SEQ ID NO: 618330 - DNA, 51 bp, Artificial; identical to SEQ ID NO: 222732
  Synthetic oligonucleotide

SEQ ID NO: 618331 - DNA, 55 bp, Artificial; identical to SEQ ID NO: 171786
  Synthetic oligonucleotide

SEQ ID NO: 618332 - DNA, 55 bp, Artificial; identical to SEQ ID NO: 157037
  Synthetic oligonucleotide

SEQ ID NO: 618333 - DNA, 55 bp, Artificial; identical to SEQ ID NO: 225193
  Synthetic oligonucleotide

SEQ ID NO: 618334 - DNA, 54 bp, Artificial; identical to SEQ ID NO: 243731
  Synthetic oligonucleotide

SEQ ID NO: 618335 - DNA, 55 bp, Artificial; identical to SEQ ID NO: 181579
  Synthetic oligonucleotide

SEQ ID NO: 618336 - DNA, 51 bp, Artificial; identical to SEQ ID NO: 154673
  Synthetic oligonucleotide

SEQ ID NO: 618337 - DNA, 55 bp, Artificial; identical to SEQ ID NO: 157040
  Synthetic oligonucleotide

SEQ ID NO: 618338 - DNA, 51 bp, Artificial; identical to SEQ ID NO: 203090
  Synthetic oligonucleotide

SEQ ID NO: 618339 - DNA, 55 bp, Artificial; identical to SEQ ID NO: 240096
  Synthetic oligonucleotide

SEQ ID NO: 618340 - DNA, 55 bp, Artificial; identical to SEQ ID NO: 249910
  Synthetic oligonucleotide

SEQ ID NO: 618341 - DNA, 59 bp, Artificial; identical to SEQ ID NO: 234231
  Synthetic oligonucleotide

SEQ ID NO: 618342 - DNA, 55 bp, Artificial; identical to SEQ ID NO: 240025
  Synthetic oligonucleotide

SEQ ID NO: 618343 - DNA, 51 bp, Artificial; identical to SEQ ID NO: 238685
  Synthetic oligonucleotide

SEQ ID NO: 618344 - DNA, 53 bp, Artificial; identical to SEQ ID NO: 190805
  Synthetic oligonucleotide

SEQ ID NO: 618345 - DNA, 56 bp, Artificial; identical to SEQ ID NO: 238684
  Synthetic oligonucleotide

SEQ ID NO: 618346 - DNA, 55 bp, Artificial; identical to SEQ ID NO: 181580
  Synthetic oligonucleotide

SEQ ID NO: 618347 - DNA, 60 bp, Artificial; identical to SEQ ID NO: 179101
  Synthetic oligonucleotide

SEQ ID NO: 618348 - DNA, 51 bp, Artificial; identical to SEQ ID NO: 189188
  Synthetic oligonucleotide

SEQ ID NO: 618349 - DNA, 54 bp, Artificial; identical to SEQ ID NO: 149158
  Synthetic oligonucleotide

SEQ ID NO: 618350 - DNA, 55 bp, Artificial; identical to SEQ ID NO: 212865
  Synthetic oligonucleotide

SEQ ID NO: 618351 - DNA, 55 bp, Artificial; identical to SEQ ID NO: 217437
  Synthetic oligonucleotide

SEQ ID NO: 618352 - DNA, 55 bp, Artificial; identical to SEQ ID NO: 253169
  Synthetic oligonucleotide

SEQ ID NO: 618353 - DNA, 56 bp, Artificial; identical to SEQ ID NO: 249108
  Synthetic oligonucleotide

SEQ ID NO: 618354 - DNA, 55 bp, Artificial; identical to SEQ ID NO: 155400
  Synthetic oligonucleotide

SEQ ID NO: 618355 - DNA, 60 bp, Artificial; identical to SEQ ID NO: 150925
  Synthetic oligonucleotide

SEQ ID NO: 618356 - DNA, 60 bp, Artificial; identical to SEQ ID NO: 212858
  Synthetic oligonucleotide

SEQ ID NO: 618357 - DNA, 55 bp, Artificial; identical to SEQ ID NO: 197902
  Synthetic oligonucleotide

SEQ ID NO: 618358 - DNA, 50 bp, Artificial; identical to SEQ ID NO: 175284
  Synthetic oligonucleotide

SEQ ID NO: 618359 - DNA, 53 bp, Artificial; identical to SEQ ID NO: 217481
  Synthetic oligonucleotide

SEQ ID NO: 618360 - DNA, 60 bp, Artificial; identical to SEQ ID NO: 159664
  Synthetic oligonucleotide

SEQ ID NO: 618361 - DNA, 58 bp, Artificial; identical to SEQ ID NO: 194224
  Synthetic oligonucleotide

SEQ ID NO: 618362 - DNA, 60 bp, Artificial; identical to SEQ ID NO: 215140
  Synthetic oligonucleotide

SEQ ID NO: 618363 - DNA, 53 bp, Artificial; identical to SEQ ID NO: 188074
  Synthetic oligonucleotide

SEQ ID NO: 618364 - DNA, 55 bp, Artificial; identical to SEQ ID NO: 153384
  Synthetic oligonucleotide

SEQ ID NO: 618365 - DNA, 57 bp, Artificial; identical to SEQ ID NO: 206975
  Synthetic oligonucleotide

SEQ ID NO: 618366 - DNA, 57 bp, Artificial; identical to SEQ ID NO: 238680
  Synthetic oligonucleotide

SEQ ID NO: 618367 - DNA, 54 bp, Artificial; identical to SEQ ID NO: 201866
  Synthetic oligonucleotide

SEQ ID NO: 618368 - DNA, 55 bp, Artificial; identical to SEQ ID NO: 143769
  Synthetic oligonucleotide

SEQ ID NO: 618369 - DNA, 55 bp, Artificial; identical to SEQ ID NO: 175657
  Synthetic oligonucleotide

SEQ ID NO: 618370 - DNA, 57 bp, Artificial; identical to SEQ ID NO: 179791
  Synthetic oligonucleotide

SEQ ID NO: 618371 - DNA, 53 bp, Artificial; identical to SEQ ID NO: 255361
  Synthetic oligonucleotide

SEQ ID NO: 618372 - DNA, 59 bp, Artificial; identical to SEQ ID NO: 194221
  Synthetic oligonucleotide

SEQ ID NO: 618373 - DNA, 50 bp, Artificial; identical to SEQ ID NO: 175692
  Synthetic oligonucleotide

SEQ ID NO: 618374 - DNA, 51 bp, Artificial; identical to SEQ ID NO: 188522
  Synthetic oligonucleotide

SEQ ID NO: 618375 - DNA, 53 bp, Artificial; identical to SEQ ID NO: 181584
  Synthetic oligonucleotide

SEQ ID NO: 618376 - DNA, 55 bp, Artificial; identical to SEQ ID NO: 197925
  Synthetic oligonucleotide

SEQ ID NO: 618377 - DNA, 56 bp, Artificial; identical to SEQ ID NO: 238679
  Synthetic oligonucleotide

SEQ ID NO: 618378 - DNA, 55 bp, Artificial; identical to SEQ ID NO: 171529
  Synthetic oligonucleotide

SEQ ID NO: 618379 - DNA, 53 bp, Artificial; identical to SEQ ID NO: 197476
  Synthetic oligonucleotide

SEQ ID NO: 618380 - DNA, 59 bp, Artificial; identical to SEQ ID NO: 224514
  Synthetic oligonucleotide

SEQ ID NO: 618381 - DNA, 50 bp, Artificial; identical to SEQ ID NO: 146529
  Synthetic oligonucleotide

SEQ ID NO: 618382 - DNA, 51 bp, Artificial; identical to SEQ ID NO: 248016
  Synthetic oligonucleotide

SEQ ID NO: 618383 - DNA, 54 bp, Artificial; identical to SEQ ID NO: 224941
  Synthetic oligonucleotide

SEQ ID NO: 618384 - DNA, 55 bp, Artificial; identical to SEQ ID NO: 217475
  Synthetic oligonucleotide

SEQ ID NO: 618385 - DNA, 58 bp, Artificial; identical to SEQ ID NO: 179108
  Synthetic oligonucleotide

SEQ ID NO: 618386 - DNA, 55 bp, Artificial; identical to SEQ ID NO: 181585
  Synthetic oligonucleotide

SEQ ID NO: 618387 - DNA, 55 bp, Artificial; identical to SEQ ID NO: 220622
  Synthetic oligonucleotide

SEQ ID NO: 618388 - DNA, 55 bp, Artificial; identical to SEQ ID NO: 155399
  Synthetic oligonucleotide

SEQ ID NO: 618389 - DNA, 54 bp, Artificial; identical to SEQ ID NO: 223533
  Synthetic oligonucleotide

SEQ ID NO: 618390 - DNA, 60 bp, Artificial; identical to SEQ ID NO: 141824
  Synthetic oligonucleotide

SEQ ID NO: 618391 - DNA, 59 bp, Artificial; identical to SEQ ID NO: 150921
  Synthetic oligonucleotide

SEQ ID NO: 618392 - DNA, 51 bp, Artificial; identical to SEQ ID NO: 169072
  Synthetic oligonucleotide

SEQ ID NO: 618393 - DNA, 60 bp, Artificial; identical to SEQ ID NO: 253912
  Synthetic oligonucleotide

SEQ ID NO: 618394 - DNA, 51 bp, Artificial; identical to SEQ ID NO: 149729
  Synthetic oligonucleotide

SEQ ID NO: 618395 - DNA, 55 bp, Artificial; identical to SEQ ID NO: 187649
  Synthetic oligonucleotide

SEQ ID NO: 618396 - DNA, 50 bp, Artificial; identical to SEQ ID NO: 187110
  Synthetic oligonucleotide

SEQ ID NO: 618397 - DNA, 59 bp, Artificial; identical to SEQ ID NO: 209102
  Synthetic oligonucleotide

SEQ ID NO: 618398 - DNA, 56 bp, Artificial; identical to SEQ ID NO: 247207
  Synthetic oligonucleotide

SEQ ID NO: 618399 - DNA, 54 bp, Artificial; identical to SEQ ID NO: 190668
  Synthetic oligonucleotide

SEQ ID NO: 618400 - DNA, 55 bp, Artificial; identical to SEQ ID NO: 161278
  Synthetic oligonucleotide

SEQ ID NO: 618401 - DNA, 59 bp, Artificial; identical to SEQ ID NO: 205675
  Synthetic oligonucleotide

SEQ ID NO: 618402 - DNA, 53 bp, Artificial; identical to SEQ ID NO: 246313
  Synthetic oligonucleotide

SEQ ID NO: 618403 - DNA, 60 bp, Artificial; identical to SEQ ID NO: 179064
  Synthetic oligonucleotide

SEQ ID NO: 618404 - DNA, 59 bp, Artificial; identical to SEQ ID NO: 200936
  Synthetic oligonucleotide

SEQ ID NO: 618405 - DNA, 55 bp, Artificial; identical to SEQ ID NO: 157092
  Synthetic oligonucleotide

SEQ ID NO: 618406 - DNA, 55 bp, Artificial; identical to SEQ ID NO: 198185
  Synthetic oligonucleotide

SEQ ID NO: 618407 - DNA, 54 bp, Artificial; identical to SEQ ID NO: 199662
  Synthetic oligonucleotide

SEQ ID NO: 618408 - DNA, 55 bp, Artificial; identical to SEQ ID NO: 240134
  Synthetic oligonucleotide

SEQ ID NO: 618409 - DNA, 50 bp, Artificial; identical to SEQ ID NO: 241730
  Synthetic oligonucleotide

SEQ ID NO: 618410 - DNA, 51 bp, Artificial; identical to SEQ ID NO: 157740
  Synthetic oligonucleotide

SEQ ID NO: 618411 - DNA, 55 bp, Artificial; identical to SEQ ID NO: 181592
  Synthetic oligonucleotide

SEQ ID NO: 618412 - DNA, 53 bp, Artificial; identical to SEQ ID NO: 171428
  Synthetic oligonucleotide

SEQ ID NO: 618413 - DNA, 56 bp, Artificial; identical to SEQ ID NO: 159879
  Synthetic oligonucleotide

SEQ ID NO: 618414 - DNA, 55 bp, Artificial; identical to SEQ ID NO: 211442
  Synthetic oligonucleotide

SEQ ID NO: 618415 - DNA, 55 bp, Artificial; identical to SEQ ID NO: 181597
  Synthetic oligonucleotide

SEQ ID NO: 618416 - DNA, 50 bp, Artificial; identical to SEQ ID NO: 187108
  Synthetic oligonucleotide

SEQ ID NO: 618417 - DNA, 52 bp, Artificial; identical to SEQ ID NO: 255481
  Synthetic oligonucleotide

SEQ ID NO: 618418 - DNA, 55 bp, Artificial; identical to SEQ ID NO: 244307
  Synthetic oligonucleotide

SEQ ID NO: 618419 - DNA, 60 bp, Artificial; identical to SEQ ID NO: 179076
  Synthetic oligonucleotide

SEQ ID NO: 618420 - DNA, 57 bp, Artificial; identical to SEQ ID NO: 179077
  Synthetic oligonucleotide

SEQ ID NO: 618421 - DNA, 55 bp, Artificial; identical to SEQ ID NO: 161285
  Synthetic oligonucleotide

SEQ ID NO: 618422 - DNA, 56 bp, Artificial; identical to SEQ ID NO: 151309
  Synthetic oligonucleotide

SEQ ID NO: 618423 - DNA, 56 bp, Artificial; identical to SEQ ID NO: 200941
  Synthetic oligonucleotide

SEQ ID NO: 618424 - DNA, 55 bp, Artificial; identical to SEQ ID NO: 182546
  Synthetic oligonucleotide

SEQ ID NO: 618425 - DNA, 57 bp, Artificial; identical to SEQ ID NO: 248613
  Synthetic oligonucleotide

SEQ ID NO: 618426 - DNA, 60 bp, Artificial; identical to SEQ ID NO: 237876
  Synthetic oligonucleotide

SEQ ID NO: 618427 - DNA, 50 bp, Artificial; identical to SEQ ID NO: 187106
  Synthetic oligonucleotide

SEQ ID NO: 618428 - DNA, 56 bp, Artificial; identical to SEQ ID NO: 209107
  Synthetic oligonucleotide

SEQ ID NO: 618429 - DNA, 56 bp, Artificial; identical to SEQ ID NO: 200945
  Synthetic oligonucleotide

SEQ ID NO: 618430 - DNA, 60 bp, Artificial; identical to SEQ ID NO: 179085
  Synthetic oligonucleotide

SEQ ID NO: 618431 - DNA, 55 bp, Artificial; identical to SEQ ID NO: 153382
  Synthetic oligonucleotide

SEQ ID NO: 618432 - DNA, 55 bp, Artificial; identical to SEQ ID NO: 157081
  Synthetic oligonucleotide

SEQ ID NO: 618433 - DNA, 55 bp, Artificial; identical to SEQ ID NO: 188997
  Synthetic oligonucleotide

SEQ ID NO: 618434 - DNA, 55 bp, Artificial; identical to SEQ ID NO: 157078
  Synthetic oligonucleotide

SEQ ID NO: 618435 - DNA, 50 bp, Artificial; identical to SEQ ID NO: 246964
  Synthetic oligonucleotide

SEQ ID NO: 618436 - DNA, 51 bp, Artificial; identical to SEQ ID NO: 237107
  Synthetic oligonucleotide

SEQ ID NO: 618437 - DNA, 50 bp, Artificial; identical to SEQ ID NO: 194041
  Synthetic oligonucleotide

SEQ ID NO: 618438 - DNA, 52 bp, Artificial; identical to SEQ ID NO: 186241
  Synthetic oligonucleotide

SEQ ID NO: 618439 - DNA, 55 bp, Artificial; identical to SEQ ID NO: 205466
  Synthetic oligonucleotide

SEQ ID NO: 618440 - DNA, 55 bp, Artificial; identical to SEQ ID NO: 194240
  Synthetic oligonucleotide

SEQ ID NO: 618441 - DNA, 55 bp, Artificial; identical to SEQ ID NO: 148995
  Synthetic oligonucleotide

SEQ ID NO: 618442 - DNA, 52 bp, Artificial; identical to SEQ ID NO: 179270
  Synthetic oligonucleotide

SEQ ID NO: 618443 - DNA, 55 bp, Artificial; identical to SEQ ID NO: 254790
  Synthetic oligonucleotide

SEQ ID NO: 618444 - DNA, 55 bp, Artificial; identical to SEQ ID NO: 249189
  Synthetic oligonucleotide

SEQ ID NO: 618445 - DNA, 53 bp, Artificial; identical to SEQ ID NO: 164408
  Synthetic oligonucleotide

SEQ ID NO: 618446 - DNA, 59 bp, Artificial; identical to SEQ ID NO: 249074
  Synthetic oligonucleotide

SEQ ID NO: 618447 - DNA, 55 bp, Artificial; identical to SEQ ID NO: 182567
  Synthetic oligonucleotide

SEQ ID NO: 618448 - DNA, 60 bp, Artificial; identical to SEQ ID NO: 179226
  Synthetic oligonucleotide

SEQ ID NO: 618449 - DNA, 53 bp, Artificial; identical to SEQ ID NO: 167477
  Synthetic oligonucleotide

SEQ ID NO: 618450 - DNA, 60 bp, Artificial; identical to SEQ ID NO: 207801
  Synthetic oligonucleotide

SEQ ID NO: 618451 - DNA, 58 bp, Artificial; identical to SEQ ID NO: 171484
  Synthetic oligonucleotide

SEQ ID NO: 618452 - DNA, 54 bp, Artificial; identical to SEQ ID NO: 169349
  Synthetic oligonucleotide

SEQ ID NO: 618453 - DNA, 55 bp, Artificial; identical to SEQ ID NO: 240154
  Synthetic oligonucleotide

SEQ ID NO: 618454 - DNA, 53 bp, Artificial; identical to SEQ ID NO: 185559
  Synthetic oligonucleotide

SEQ ID NO: 618455 - DNA, 55 bp, Artificial; identical to SEQ ID NO: 148967
  Synthetic oligonucleotide

SEQ ID NO: 618456 - DNA, 52 bp, Artificial; identical to SEQ ID NO: 193787
  Synthetic oligonucleotide

SEQ ID NO: 618457 - DNA, 58 bp, Artificial; identical to SEQ ID NO: 212803
  Synthetic oligonucleotide

SEQ ID NO: 618458 - DNA, 53 bp, Artificial; identical to SEQ ID NO: 185562
  Synthetic oligonucleotide

SEQ ID NO: 618459 - DNA, 53 bp, Artificial; identical to SEQ ID NO: 185189
  Synthetic oligonucleotide

SEQ ID NO: 618460 - DNA, 55 bp, Artificial; identical to SEQ ID NO: 156678
  Synthetic oligonucleotide

SEQ ID NO: 618461 - DNA, 55 bp, Artificial; identical to SEQ ID NO: 224945
  Synthetic oligonucleotide

SEQ ID NO: 618462 - DNA, 55 bp, Artificial; identical to SEQ ID NO: 208634
  Synthetic oligonucleotide

SEQ ID NO: 618463 - DNA, 55 bp, Artificial; identical to SEQ ID NO: 160873
  Synthetic oligonucleotide

SEQ ID NO: 618464 - DNA, 60 bp, Artificial; identical to SEQ ID NO: 208151
  Synthetic oligonucleotide

SEQ ID NO: 618465 - DNA, 56 bp, Artificial; identical to SEQ ID NO: 179717
  Synthetic oligonucleotide

SEQ ID NO: 618466 - DNA, 55 bp, Artificial; identical to SEQ ID NO: 161282
  Synthetic oligonucleotide

SEQ ID NO: 618467 - DNA, 52 bp, Artificial; identical to SEQ ID NO: 154608
  Synthetic oligonucleotide

SEQ ID NO: 618468 - DNA, 56 bp, Artificial; identical to SEQ ID NO: 262737
  Synthetic oligonucleotide

SEQ ID NO: 618469 - DNA, 51 bp, Artificial; identical to SEQ ID NO: 186818
  Synthetic oligonucleotide

SEQ ID NO: 618470 - DNA, 55 bp, Artificial; identical to SEQ ID NO: 164407
  Synthetic oligonucleotide

SEQ ID NO: 618471 - DNA, 55 bp, Artificial; identical to SEQ ID NO: 182531
  Synthetic oligonucleotide

SEQ ID NO: 618472 - DNA, 55 bp, Artificial; identical to SEQ ID NO: 249187
  Synthetic oligonucleotide

SEQ ID NO: 618473 - DNA, 55 bp, Artificial; identical to SEQ ID NO: 168762
  Synthetic oligonucleotide

SEQ ID NO: 618474 - DNA, 54 bp, Artificial; identical to SEQ ID NO: 156680
  Synthetic oligonucleotide

SEQ ID NO: 618475 - DNA, 58 bp, Artificial; identical to SEQ ID NO: 254034
  Synthetic oligonucleotide

SEQ ID NO: 618476 - DNA, 55 bp, Artificial; identical to SEQ ID NO: 164406
  Synthetic oligonucleotide

SEQ ID NO: 618477 - DNA, 57 bp, Artificial; identical to SEQ ID NO: 168534
  Synthetic oligonucleotide

SEQ ID NO: 618478 - DNA, 55 bp, Artificial; identical to SEQ ID NO: 182536
  Synthetic oligonucleotide

SEQ ID NO: 618479 - DNA, 54 bp, Artificial; identical to SEQ ID NO: 187309
  Synthetic oligonucleotide

SEQ ID NO: 618480 - DNA, 60 bp, Artificial; identical to SEQ ID NO: 242439
  Synthetic oligonucleotide

SEQ ID NO: 618481 - DNA, 55 bp, Artificial; identical to SEQ ID NO: 156681
  Synthetic oligonucleotide

SEQ ID NO: 618482 - DNA, 60 bp, Artificial; identical to SEQ ID NO: 179235
  Synthetic oligonucleotide

SEQ ID NO: 618483 - DNA, 53 bp, Artificial; identical to SEQ ID NO: 190806
  Synthetic oligonucleotide

SEQ ID NO: 618484 - DNA, 54 bp, Artificial; identical to SEQ ID NO: 185158
  Synthetic oligonucleotide

SEQ ID NO: 618485 - DNA, 58 bp, Artificial; identical to SEQ ID NO: 171495
  Synthetic oligonucleotide

SEQ ID NO: 618486 - DNA, 51 bp, Artificial; identical to SEQ ID NO: 141830
  Synthetic oligonucleotide

SEQ ID NO: 618487 - DNA, 55 bp, Artificial; identical to SEQ ID NO: 155435
  Synthetic oligonucleotide

SEQ ID NO: 618488 - DNA, 53 bp, Artificial; identical to SEQ ID NO: 200951
  Synthetic oligonucleotide

SEQ ID NO: 618489 - DNA, 55 bp, Artificial; identical to SEQ ID NO: 164405
  Synthetic oligonucleotide

SEQ ID NO: 618490 - DNA, 55 bp, Artificial; identical to SEQ ID NO: 198152
  Synthetic oligonucleotide

SEQ ID NO: 618491 - DNA, 60 bp, Artificial; identical to SEQ ID NO: 206999
  Synthetic oligonucleotide

SEQ ID NO: 618492 - DNA, 51 bp, Artificial; identical to SEQ ID NO: 165182
  Synthetic oligonucleotide

SEQ ID NO: 618493 - DNA, 55 bp, Artificial; identical to SEQ ID NO: 164404
  Synthetic oligonucleotide

SEQ ID NO: 618494 - DNA, 58 bp, Artificial; identical to SEQ ID NO: 150915
  Synthetic oligonucleotide

SEQ ID NO: 618495 - DNA, 54 bp, Artificial; identical to SEQ ID NO: 185152
  Synthetic oligonucleotide

SEQ ID NO: 618496 - DNA, 55 bp, Artificial; identical to SEQ ID NO: 207658
  Synthetic oligonucleotide

SEQ ID NO: 618497 - DNA, 54 bp, Artificial; identical to SEQ ID NO: 170030
  Synthetic oligonucleotide

SEQ ID NO: 618498 - DNA, 55 bp, Artificial; identical to SEQ ID NO: 221369
  Synthetic oligonucleotide

SEQ ID NO: 618499 - DNA, 60 bp, Artificial; identical to SEQ ID NO: 179222
  Synthetic oligonucleotide

SEQ ID NO: 618500 - DNA, 51 bp, Artificial; identical to SEQ ID NO: 186805
  Synthetic oligonucleotide

SEQ ID NO: 618501 - DNA, 55 bp, Artificial; identical to SEQ ID NO: 217466
  Synthetic oligonucleotide

SEQ ID NO: 618502 - DNA, 55 bp, Artificial; identical to SEQ ID NO: 245925
  Synthetic oligonucleotide

SEQ ID NO: 618503 - DNA, 53 bp, Artificial; identical to SEQ ID NO: 198162
  Synthetic oligonucleotide

SEQ ID NO: 618504 - DNA, 55 bp, Artificial; identical to SEQ ID NO: 202830
  Synthetic oligonucleotide

SEQ ID NO: 618505 - DNA, 55 bp, Artificial; identical to SEQ ID NO: 211474
  Synthetic oligonucleotide

SEQ ID NO: 618506 - DNA, 55 bp, Artificial; identical to SEQ ID NO: 238510
  Synthetic oligonucleotide

SEQ ID NO: 618507 - DNA, 55 bp, Artificial; identical to SEQ ID NO: 245928
  Synthetic oligonucleotide

SEQ ID NO: 618508 - DNA, 51 bp, Artificial; identical to SEQ ID NO: 152105
  Synthetic oligonucleotide

SEQ ID NO: 618509 - DNA, 53 bp, Artificial; identical to SEQ ID NO: 199751
  Synthetic oligonucleotide

SEQ ID NO: 618510 - DNA, 55 bp, Artificial; identical to SEQ ID NO: 257845
  Synthetic oligonucleotide

SEQ ID NO: 618511 - DNA, 51 bp, Artificial; identical to SEQ ID NO: 154675
  Synthetic oligonucleotide

SEQ ID NO: 618512 - DNA, 55 bp, Artificial; identical to SEQ ID NO: 197127
  Synthetic oligonucleotide

SEQ ID NO: 618513 - DNA, 51 bp, Artificial; identical to SEQ ID NO: 240996
  Synthetic oligonucleotide

SEQ ID NO: 618514 - DNA, 54 bp, Artificial; identical to SEQ ID NO: 194905
  Synthetic oligonucleotide

SEQ ID NO: 618515 - DNA, 55 bp, Artificial; identical to SEQ ID NO: 151803
  Synthetic oligonucleotide

SEQ ID NO: 618516 - DNA, 60 bp, Artificial; identical to SEQ ID NO: 151533
  Synthetic oligonucleotide

SEQ ID NO: 618517 - DNA, 52 bp, Artificial; identical to SEQ ID NO: 167103
  Synthetic oligonucleotide

SEQ ID NO: 618518 - DNA, 53 bp, Artificial; identical to SEQ ID NO: 246316
  Synthetic oligonucleotide

SEQ ID NO: 618519 - DNA, 54 bp, Artificial; identical to SEQ ID NO: 238590
  Synthetic oligonucleotide

SEQ ID NO: 618520 - DNA, 53 bp, Artificial; identical to SEQ ID NO: 182595
  Synthetic oligonucleotide

SEQ ID NO: 618521 - DNA, 55 bp, Artificial; identical to SEQ ID NO: 238519
  Synthetic oligonucleotide

SEQ ID NO: 618522 - DNA, 55 bp, Artificial; identical to SEQ ID NO: 182602
  Synthetic oligonucleotide

SEQ ID NO: 618523 - DNA, 60 bp, Artificial; identical to SEQ ID NO: 217138
  Synthetic oligonucleotide

SEQ ID NO: 618524 - DNA, 55 bp, Artificial; identical to SEQ ID NO: 238531
  Synthetic oligonucleotide

SEQ ID NO: 618525 - DNA, 51 bp, Artificial; identical to SEQ ID NO: 225035
  Synthetic oligonucleotide

SEQ ID NO: 618526 - DNA, 52 bp, Artificial; identical to SEQ ID NO: 154606
  Synthetic oligonucleotide

SEQ ID NO: 618527 - DNA, 54 bp, Artificial; identical to SEQ ID NO: 240122
  Synthetic oligonucleotide

SEQ ID NO: 618528 - DNA, 52 bp, Artificial; identical to SEQ ID NO: 186219
  Synthetic oligonucleotide

SEQ ID NO: 618529 - DNA, 51 bp, Artificial; identical to SEQ ID NO: 206996
  Synthetic oligonucleotide

SEQ ID NO: 618530 - DNA, 60 bp, Artificial; identical to SEQ ID NO: 150913
  Synthetic oligonucleotide

SEQ ID NO: 618531 - DNA, 53 bp, Artificial; identical to SEQ ID NO: 205683
  Synthetic oligonucleotide

SEQ ID NO: 618532 - DNA, 55 bp, Artificial; identical to SEQ ID NO: 144836
  Synthetic oligonucleotide

SEQ ID NO: 618533 - DNA, 54 bp, Artificial; identical to SEQ ID NO: 246115
  Synthetic oligonucleotide

SEQ ID NO: 618534 - DNA, 53 bp, Artificial; identical to SEQ ID NO: 168890
  Synthetic oligonucleotide

SEQ ID NO: 618535 - DNA, 54 bp, Artificial; identical to SEQ ID NO: 142726
  Synthetic oligonucleotide

SEQ ID NO: 618536 - DNA, 54 bp, Artificial; identical to SEQ ID NO: 164788
  Synthetic oligonucleotide

SEQ ID NO: 618537 - DNA, 55 bp, Artificial; identical to SEQ ID NO: 197122
  Synthetic oligonucleotide

SEQ ID NO: 618538 - DNA, 50 bp, Artificial; identical to SEQ ID NO: 165694
  Synthetic oligonucleotide

SEQ ID NO: 618539 - DNA, 50 bp, Artificial; identical to SEQ ID NO: 203901
  Synthetic oligonucleotide

SEQ ID NO: 618540 - DNA, 57 bp, Artificial; identical to SEQ ID NO: 179265
  Synthetic oligonucleotide

SEQ ID NO: 618541 - DNA, 55 bp, Artificial; identical to SEQ ID NO: 160280
  Synthetic oligonucleotide

SEQ ID NO: 618542 - DNA, 55 bp, Artificial; identical to SEQ ID NO: 182604
  Synthetic oligonucleotide

SEQ ID NO: 618543 - DNA, 55 bp, Artificial; identical to SEQ ID NO: 234229
  Synthetic oligonucleotide

SEQ ID NO: 618544 - DNA, 52 bp, Artificial; identical to SEQ ID NO: 194796
  Synthetic oligonucleotide

SEQ ID NO: 618545 - DNA, 53 bp, Artificial; identical to SEQ ID NO: 201869
  Synthetic oligonucleotide

SEQ ID NO: 618546 - DNA, 57 bp, Artificial; identical to SEQ ID NO: 266035
  Synthetic oligonucleotide

SEQ ID NO: 618547 - DNA, 52 bp, Artificial; identical to SEQ ID NO: 246470
  Synthetic oligonucleotide

SEQ ID NO: 618548 - DNA, 55 bp, Artificial; identical to SEQ ID NO: 198265
  Synthetic oligonucleotide

SEQ ID NO: 618549 - DNA, 55 bp, Artificial; identical to SEQ ID NO: 242434
  Synthetic oligonucleotide

SEQ ID NO: 618550 - DNA, 60 bp, Artificial; identical to SEQ ID NO: 217155
  Synthetic oligonucleotide

SEQ ID NO: 618551 - DNA, 52 bp, Artificial; identical to SEQ ID NO: 206397
  Synthetic oligonucleotide

SEQ ID NO: 618552 - DNA, 53 bp, Artificial; identical to SEQ ID NO: 208716
  Synthetic oligonucleotide

SEQ ID NO: 618553 - DNA, 58 bp, Artificial; identical to SEQ ID NO: 179252
  Synthetic oligonucleotide

SEQ ID NO: 618554 - DNA, 55 bp, Artificial; identical to SEQ ID NO: 182608
  Synthetic oligonucleotide

SEQ ID NO: 618555 - DNA, 56 bp, Artificial; identical to SEQ ID NO: 253086
  Synthetic oligonucleotide

SEQ ID NO: 618556 - DNA, 60 bp, Artificial; identical to SEQ ID NO: 208262
  Synthetic oligonucleotide

SEQ ID NO: 618557 - DNA, 52 bp, Artificial; identical to SEQ ID NO: 168979
  Synthetic oligonucleotide

SEQ ID NO: 618558 - DNA, 54 bp, Artificial; identical to SEQ ID NO: 248585
  Synthetic oligonucleotide

SEQ ID NO: 618559 - DNA, 58 bp, Artificial; identical to SEQ ID NO: 225346
  Synthetic oligonucleotide

SEQ ID NO: 618560 - DNA, 54 bp, Artificial; identical to SEQ ID NO: 249008
  Synthetic oligonucleotide

SEQ ID NO: 618561 - DNA, 55 bp, Artificial; identical to SEQ ID NO: 253184
  Synthetic oligonucleotide

SEQ ID NO: 618562 - DNA, 56 bp, Artificial; identical to SEQ ID NO: 187294
  Synthetic oligonucleotide

SEQ ID NO: 618563 - DNA, 50 bp, Artificial; identical to SEQ ID NO: 198218
  Synthetic oligonucleotide

SEQ ID NO: 618564 - DNA, 56 bp, Artificial; identical to SEQ ID NO: 194232
  Synthetic oligonucleotide

SEQ ID NO: 618565 - DNA, 55 bp, Artificial; identical to SEQ ID NO: 182570
  Synthetic oligonucleotide

SEQ ID NO: 618566 - DNA, 60 bp, Artificial; identical to SEQ ID NO: 203322
  Synthetic oligonucleotide

SEQ ID NO: 618567 - DNA, 57 bp, Artificial; identical to SEQ ID NO: 171528
  Synthetic oligonucleotide

SEQ ID NO: 618568 - DNA, 57 bp, Artificial; identical to SEQ ID NO: 150942
  Synthetic oligonucleotide

SEQ ID NO: 618569 - DNA, 55 bp, Artificial; identical to SEQ ID NO: 156688
  Synthetic oligonucleotide

SEQ ID NO: 618570 - DNA, 55 bp, Artificial; identical to SEQ ID NO: 174751
  Synthetic oligonucleotide

SEQ ID NO: 618571 - DNA, 51 bp, Artificial; identical to SEQ ID NO: 149757
  Synthetic oligonucleotide

SEQ ID NO: 618572 - DNA, 53 bp, Artificial; identical to SEQ ID NO: 162306
  Synthetic oligonucleotide

SEQ ID NO: 618573 - DNA, 50 bp, Artificial; identical to SEQ ID NO: 189261
  Synthetic oligonucleotide

SEQ ID NO: 618574 - DNA, 55 bp, Artificial; identical to SEQ ID NO: 224950
  Synthetic oligonucleotide

SEQ ID NO: 618575 - DNA, 56 bp, Artificial; identical to SEQ ID NO: 248644
  Synthetic oligonucleotide

SEQ ID NO: 618576 - DNA, 52 bp, Artificial; identical to SEQ ID NO: 141290
  Synthetic oligonucleotide

SEQ ID NO: 618577 - DNA, 51 bp, Artificial; identical to SEQ ID NO: 186742
  Synthetic oligonucleotide

SEQ ID NO: 618578 - DNA, 58 bp, Artificial; identical to SEQ ID NO: 262761
  Synthetic oligonucleotide

SEQ ID NO: 618579 - DNA, 55 bp, Artificial; identical to SEQ ID NO: 182573
  Synthetic oligonucleotide

SEQ ID NO: 618580 - DNA, 60 bp, Artificial; identical to SEQ ID NO: 168933
  Synthetic oligonucleotide

SEQ ID NO: 618581 - DNA, 52 bp, Artificial; identical to SEQ ID NO: 159220
  Synthetic oligonucleotide

SEQ ID NO: 618582 - DNA, 51 bp, Artificial; identical to SEQ ID NO: 171687
  Synthetic oligonucleotide

SEQ ID NO: 618583 - DNA, 52 bp, Artificial; identical to SEQ ID NO: 150939
  Synthetic oligonucleotide

SEQ ID NO: 618584 - DNA, 55 bp, Artificial; identical to SEQ ID NO: 182577
  Synthetic oligonucleotide

SEQ ID NO: 618585 - DNA, 53 bp, Artificial; identical to SEQ ID NO: 221691
  Synthetic oligonucleotide

SEQ ID NO: 618586 - DNA, 57 bp, Artificial; identical to SEQ ID NO: 224367
  Synthetic oligonucleotide

SEQ ID NO: 618587 - DNA, 55 bp, Artificial; identical to SEQ ID NO: 222663
  Synthetic oligonucleotide

SEQ ID NO: 618588 - DNA, 55 bp, Artificial; identical to SEQ ID NO: 225195
  Synthetic oligonucleotide

SEQ ID NO: 618589 - DNA, 60 bp, Artificial; identical to SEQ ID NO: 203323
  Synthetic oligonucleotide

SEQ ID NO: 618590 - DNA, 55 bp, Artificial; identical to SEQ ID NO: 244297
  Synthetic oligonucleotide

SEQ ID NO: 618591 - DNA, 55 bp, Artificial; identical to SEQ ID NO: 142237
  Synthetic oligonucleotide

SEQ ID NO: 618592 - DNA, 54 bp, Artificial; identical to SEQ ID NO: 141957
  Synthetic oligonucleotide

SEQ ID NO: 618593 - DNA, 60 bp, Artificial; identical to SEQ ID NO: 170143
  Synthetic oligonucleotide

SEQ ID NO: 618594 - DNA, 55 bp, Artificial; identical to SEQ ID NO: 179384
  Synthetic oligonucleotide

SEQ ID NO: 618595 - DNA, 53 bp, Artificial; identical to SEQ ID NO: 197471
  Synthetic oligonucleotide

SEQ ID NO: 618596 - DNA, 52 bp, Artificial; identical to SEQ ID NO: 149077
  Synthetic oligonucleotide

SEQ ID NO: 618597 - DNA, 57 bp, Artificial; identical to SEQ ID NO: 217208
  Synthetic oligonucleotide

SEQ ID NO: 618598 - DNA, 55 bp, Artificial; identical to SEQ ID NO: 190417
  Synthetic oligonucleotide

SEQ ID NO: 618599 - DNA, 55 bp, Artificial; identical to SEQ ID NO: 249180
  Synthetic oligonucleotide

SEQ ID NO: 618600 - DNA, 53 bp, Artificial; identical to SEQ ID NO: 197469
  Synthetic oligonucleotide

SEQ ID NO: 618601 - DNA, 55 bp, Artificial; identical to SEQ ID NO: 141833
  Synthetic oligonucleotide

SEQ ID NO: 618602 - DNA, 50 bp, Artificial; identical to SEQ ID NO: 234589
  Synthetic oligonucleotide

SEQ ID NO: 618603 - DNA, 60 bp, Artificial; identical to SEQ ID NO: 197115
  Synthetic oligonucleotide

SEQ ID NO: 618604 - DNA, 59 bp, Artificial; identical to SEQ ID NO: 153040
  Synthetic oligonucleotide

SEQ ID NO: 618605 - DNA, 51 bp, Artificial; identical to SEQ ID NO: 200183
  Synthetic oligonucleotide

SEQ ID NO: 618606 - DNA, 52 bp, Artificial; identical to SEQ ID NO: 160923
  Synthetic oligonucleotide

SEQ ID NO: 618607 - DNA, 55 bp, Artificial; identical to SEQ ID NO: 173571
  Synthetic oligonucleotide

SEQ ID NO: 618608 - DNA, 53 bp, Artificial; identical to SEQ ID NO: 243188
  Synthetic oligonucleotide

SEQ ID NO: 618609 - DNA, 54 bp, Artificial; identical to SEQ ID NO: 208484
  Synthetic oligonucleotide

SEQ ID NO: 618610 - DNA, 60 bp, Artificial; identical to SEQ ID NO: 155134
  Synthetic oligonucleotide

SEQ ID NO: 618611 - DNA, 55 bp, Artificial; identical to SEQ ID NO: 182587
  Synthetic oligonucleotide

SEQ ID NO: 618612 - DNA, 59 bp, Artificial; identical to SEQ ID NO: 224714
  Synthetic oligonucleotide

SEQ ID NO: 618613 - DNA, 54 bp, Artificial; identical to SEQ ID NO: 211495
  Synthetic oligonucleotide

SEQ ID NO: 618614 - DNA, 52 bp, Artificial; identical to SEQ ID NO: 175672
  Synthetic oligonucleotide

SEQ ID NO: 618615 - DNA, 55 bp, Artificial; identical to SEQ ID NO: 207681
  Synthetic oligonucleotide

SEQ ID NO: 618616 - DNA, 52 bp, Artificial; identical to SEQ ID NO: 205715
  Synthetic oligonucleotide

SEQ ID NO: 618617 - DNA, 60 bp, Artificial; identical to SEQ ID NO: 170154
  Synthetic oligonucleotide

SEQ ID NO: 618618 - DNA, 55 bp, Artificial; identical to SEQ ID NO: 209108
  Synthetic oligonucleotide

SEQ ID NO: 618619 - DNA, 55 bp, Artificial; identical to SEQ ID NO: 211232
  Synthetic oligonucleotide

SEQ ID NO: 618620 - DNA, 58 bp, Artificial; identical to SEQ ID NO: 200906
  Synthetic oligonucleotide

SEQ ID NO: 618621 - DNA, 52 bp, Artificial; identical to SEQ ID NO: 220796
  Synthetic oligonucleotide

SEQ ID NO: 618622 - DNA, 53 bp, Artificial; identical to SEQ ID NO: 254720
  Synthetic oligonucleotide

SEQ ID NO: 618623 - DNA, 55 bp, Artificial; identical to SEQ ID NO: 198034
  Synthetic oligonucleotide

SEQ ID NO: 618624 - DNA, 50 bp, Artificial; identical to SEQ ID NO: 176677
  Synthetic oligonucleotide

SEQ ID NO: 618625 - DNA, 55 bp, Artificial; identical to SEQ ID NO: 266037
  Synthetic oligonucleotide

SEQ ID NO: 618626 - DNA, 55 bp, Artificial; identical to SEQ ID NO: 178746
  Synthetic oligonucleotide

SEQ ID NO: 618627 - DNA, 57 bp, Artificial; identical to SEQ ID NO: 147146
  Synthetic oligonucleotide

SEQ ID NO: 618628 - DNA, 54 bp, Artificial; identical to SEQ ID NO: 147269
  Synthetic oligonucleotide

SEQ ID NO: 618629 - DNA, 55 bp, Artificial; identical to SEQ ID NO: 182454
  Synthetic oligonucleotide

SEQ ID NO: 618630 - DNA, 51 bp, Artificial; identical to SEQ ID NO: 186886
  Synthetic oligonucleotide

SEQ ID NO: 618631 - DNA, 55 bp, Artificial; identical to SEQ ID NO: 187579
  Synthetic oligonucleotide

SEQ ID NO: 618632 - DNA, 53 bp, Artificial; identical to SEQ ID NO: 208697
  Synthetic oligonucleotide

SEQ ID NO: 618633 - DNA, 54 bp, Artificial; identical to SEQ ID NO: 239595
  Synthetic oligonucleotide

SEQ ID NO: 618634 - DNA, 55 bp, Artificial; identical to SEQ ID NO: 242423
  Synthetic oligonucleotide

SEQ ID NO: 618635 - DNA, 60 bp, Artificial; identical to SEQ ID NO: 170176
  Synthetic oligonucleotide

SEQ ID NO: 618636 - DNA, 59 bp, Artificial; identical to SEQ ID NO: 159143
  Synthetic oligonucleotide

SEQ ID NO: 618637 - DNA, 50 bp, Artificial; identical to SEQ ID NO: 217411
  Synthetic oligonucleotide

SEQ ID NO: 618638 - DNA, 55 bp, Artificial; identical to SEQ ID NO: 164403
  Synthetic oligonucleotide

SEQ ID NO: 618639 - DNA, 55 bp, Artificial; identical to SEQ ID NO: 212862
  Synthetic oligonucleotide

SEQ ID NO: 618640 - DNA, 54 bp, Artificial; identical to SEQ ID NO: 238602
  Synthetic oligonucleotide

SEQ ID NO: 618641 - DNA, 55 bp, Artificial; identical to SEQ ID NO: 146306
  Synthetic oligonucleotide

SEQ ID NO: 618642 - DNA, 59 bp, Artificial; identical to SEQ ID NO: 233778
  Synthetic oligonucleotide

SEQ ID NO: 618643 - DNA, 60 bp, Artificial; identical to SEQ ID NO: 210793
  Synthetic oligonucleotide

SEQ ID NO: 618644 - DNA, 54 bp, Artificial; identical to SEQ ID NO: 149134
  Synthetic oligonucleotide

SEQ ID NO: 618645 - DNA, 51 bp, Artificial; identical to SEQ ID NO: 186860
  Synthetic oligonucleotide

SEQ ID NO: 618646 - DNA, 47 bp, Artificial; identical to SEQ ID NO: 239586
  Synthetic oligonucleotide

SEQ ID NO: 618647 - DNA, 52 bp, Artificial; identical to SEQ ID NO: 186339
  Synthetic oligonucleotide

SEQ ID NO: 618648 - DNA, 52 bp, Artificial; identical to SEQ ID NO: 170148
  Synthetic oligonucleotide

SEQ ID NO: 618649 - DNA, 57 bp, Artificial; identical to SEQ ID NO: 187356
  Synthetic oligonucleotide

SEQ ID NO: 618650 - DNA, 52 bp, Artificial; identical to SEQ ID NO: 240933
  Synthetic oligonucleotide

SEQ ID NO: 618651 - DNA, 55 bp, Artificial; identical to SEQ ID NO: 191049
  Synthetic oligonucleotide

SEQ ID NO: 618652 - DNA, 51 bp, Artificial; identical to SEQ ID NO: 193607
  Synthetic oligonucleotide

SEQ ID NO: 618653 - DNA, 60 bp, Artificial; identical to SEQ ID NO: 170187
  Synthetic oligonucleotide

SEQ ID NO: 618654 - DNA, 53 bp, Artificial; identical to SEQ ID NO: 221690
  Synthetic oligonucleotide

SEQ ID NO: 618655 - DNA, 54 bp, Artificial; identical to SEQ ID NO: 178707
  Synthetic oligonucleotide

SEQ ID NO: 618656 - DNA, 55 bp, Artificial; identical to SEQ ID NO: 212861
  Synthetic oligonucleotide

SEQ ID NO: 618657 - DNA, 50 bp, Artificial; identical to SEQ ID NO: 241747
  Synthetic oligonucleotide

SEQ ID NO: 618658 - DNA, 50 bp, Artificial; identical to SEQ ID NO: 175269
  Synthetic oligonucleotide

SEQ ID NO: 618659 - DNA, 59 bp, Artificial; identical to SEQ ID NO: 192246
  Synthetic oligonucleotide

SEQ ID NO: 618660 - DNA, 50 bp, Artificial; identical to SEQ ID NO: 150517
  Synthetic oligonucleotide

SEQ ID NO: 618661 - DNA, 55 bp, Artificial; identical to SEQ ID NO: 141834
  Synthetic oligonucleotide

SEQ ID NO: 618662 - DNA, 57 bp, Artificial; identical to SEQ ID NO: 170198
  Synthetic oligonucleotide

SEQ ID NO: 618663 - DNA, 55 bp, Artificial; identical to SEQ ID NO: 146307
  Synthetic oligonucleotide

SEQ ID NO: 618664 - DNA, 50 bp, Artificial; identical to SEQ ID NO: 208033
  Synthetic oligonucleotide

SEQ ID NO: 618665 - DNA, 56 bp, Artificial; identical to SEQ ID NO: 180013
  Synthetic oligonucleotide

SEQ ID NO: 618666 - DNA, 60 bp, Artificial; identical to SEQ ID NO: 153277
  Synthetic oligonucleotide

SEQ ID NO: 618667 - DNA, 55 bp, Artificial; identical to SEQ ID NO: 168707
  Synthetic oligonucleotide

SEQ ID NO: 618668 - DNA, 55 bp, Artificial; identical to SEQ ID NO: 208591
  Synthetic oligonucleotide

SEQ ID NO: 618669 - DNA, 54 bp, Artificial; identical to SEQ ID NO: 249237
  Synthetic oligonucleotide

SEQ ID NO: 618670 - DNA, 53 bp, Artificial; identical to SEQ ID NO: 171605
  Synthetic oligonucleotide

SEQ ID NO: 618671 - DNA, 54 bp, Artificial; identical to SEQ ID NO: 190646
  Synthetic oligonucleotide

SEQ ID NO: 618672 - DNA, 53 bp, Artificial; identical to SEQ ID NO: 151808
  Synthetic oligonucleotide

SEQ ID NO: 618673 - DNA, 53 bp, Artificial; identical to SEQ ID NO: 201872
  Synthetic oligonucleotide

SEQ ID NO: 618674 - DNA, 53 bp, Artificial; identical to SEQ ID NO: 201873
  Synthetic oligonucleotide

SEQ ID NO: 618675 - DNA, 54 bp, Artificial; identical to SEQ ID NO: 240486
  Synthetic oligonucleotide

SEQ ID NO: 618676 - DNA, 59 bp, Artificial; identical to SEQ ID NO: 206945
  Synthetic oligonucleotide

SEQ ID NO: 618677 - DNA, 50 bp, Artificial; identical to SEQ ID NO: 170649
  Synthetic oligonucleotide

SEQ ID NO: 618678 - DNA, 54 bp, Artificial; identical to SEQ ID NO: 156661
  Synthetic oligonucleotide

SEQ ID NO: 618679 - DNA, 59 bp, Artificial; identical to SEQ ID NO: 150929
  Synthetic oligonucleotide

SEQ ID NO: 618680 - DNA, 54 bp, Artificial; identical to SEQ ID NO: 246113
  Synthetic oligonucleotide

SEQ ID NO: 618681 - DNA, 50 bp, Artificial; identical to SEQ ID NO: 150472
  Synthetic oligonucleotide

SEQ ID NO: 618682 - DNA, 60 bp, Artificial; identical to SEQ ID NO: 178721
  Synthetic oligonucleotide

SEQ ID NO: 618683 - DNA, 55 bp, Artificial; identical to SEQ ID NO: 249203
  Synthetic oligonucleotide

SEQ ID NO: 618684 - DNA, 60 bp, Artificial; identical to SEQ ID NO: 248897
  Synthetic oligonucleotide

SEQ ID NO: 618685 - DNA, 52 bp, Artificial; identical to SEQ ID NO: 197630
  Synthetic oligonucleotide

SEQ ID NO: 618686 - DNA, 52 bp, Artificial; identical to SEQ ID NO: 186363
  Synthetic oligonucleotide

SEQ ID NO: 618687 - DNA, 60 bp, Artificial; identical to SEQ ID NO: 243736
  Synthetic oligonucleotide

SEQ ID NO: 618688 - DNA, 55 bp, Artificial; identical to SEQ ID NO: 263363
  Synthetic oligonucleotide

SEQ ID NO: 618689 - DNA, 51 bp, Artificial; identical to SEQ ID NO: 243320
  Synthetic oligonucleotide

SEQ ID NO: 618690 - DNA, 55 bp, Artificial; identical to SEQ ID NO: 178725
  Synthetic oligonucleotide

SEQ ID NO: 618691 - DNA, 51 bp, Artificial; identical to SEQ ID NO: 248067
  Synthetic oligonucleotide

SEQ ID NO: 618692 - DNA, 51 bp, Artificial; identical to SEQ ID NO: 225254
  Synthetic oligonucleotide

SEQ ID NO: 618693 - DNA, 55 bp, Artificial; identical to SEQ ID NO: 148788
  Synthetic oligonucleotide

SEQ ID NO: 618694 - DNA, 52 bp, Artificial; identical to SEQ ID NO: 236479
  Synthetic oligonucleotide

SEQ ID NO: 618695 - DNA, 51 bp, Artificial; identical to SEQ ID NO: 200010
  Synthetic oligonucleotide

SEQ ID NO: 618696 - DNA, 55 bp, Artificial; identical to SEQ ID NO: 245895
  Synthetic oligonucleotide

SEQ ID NO: 618697 - DNA, 60 bp, Artificial; identical to SEQ ID NO: 170210
  Synthetic oligonucleotide

SEQ ID NO: 618698 - DNA, 50 bp, Artificial; identical to SEQ ID NO: 209807
  Synthetic oligonucleotide

SEQ ID NO: 618699 - DNA, 55 bp, Artificial; identical to SEQ ID NO: 182475
  Synthetic oligonucleotide

SEQ ID NO: 618700 - DNA, 55 bp, Artificial; identical to SEQ ID NO: 164402
  Synthetic oligonucleotide

SEQ ID NO: 618701 - DNA, 55 bp, Artificial; identical to SEQ ID NO: 253155
  Synthetic oligonucleotide

SEQ ID NO: 618702 - DNA, 60 bp, Artificial; identical to SEQ ID NO: 252752
  Synthetic oligonucleotide

SEQ ID NO: 618703 - DNA, 55 bp, Artificial; identical to SEQ ID NO: 198129
  Synthetic oligonucleotide

SEQ ID NO: 618704 - DNA, 55 bp, Artificial; identical to SEQ ID NO: 156662
  Synthetic oligonucleotide

SEQ ID NO: 618705 - DNA, 55 bp, Artificial; identical to SEQ ID NO: 245897
  Synthetic oligonucleotide

SEQ ID NO: 618706 - DNA, 55 bp, Artificial; identical to SEQ ID NO: 253158
  Synthetic oligonucleotide

SEQ ID NO: 618707 - DNA, 55 bp, Artificial; identical to SEQ ID NO: 168698
  Synthetic oligonucleotide

SEQ ID NO: 618708 - DNA, 55 bp, Artificial; identical to SEQ ID NO: 221376
  Synthetic oligonucleotide

SEQ ID NO: 618709 - DNA, 50 bp, Artificial; identical to SEQ ID NO: 188566
  Synthetic oligonucleotide

SEQ ID NO: 618710 - DNA, 55 bp, Artificial; identical to SEQ ID NO: 211352
  Synthetic oligonucleotide

SEQ ID NO: 618711 - DNA, 55 bp, Artificial; identical to SEQ ID NO: 190418
  Synthetic oligonucleotide

SEQ ID NO: 618712 - DNA, 55 bp, Artificial; identical to SEQ ID NO: 249497
  Synthetic oligonucleotide

SEQ ID NO: 618713 - DNA, 55 bp, Artificial; identical to SEQ ID NO: 254690
  Synthetic oligonucleotide

SEQ ID NO: 618714 - DNA, 57 bp, Artificial; identical to SEQ ID NO: 178787
  Synthetic oligonucleotide

SEQ ID NO: 618715 - DNA, 55 bp, Artificial; identical to SEQ ID NO: 182433
  Synthetic oligonucleotide

SEQ ID NO: 618716 - DNA, 55 bp, Artificial; identical to SEQ ID NO: 247466
  Synthetic oligonucleotide

SEQ ID NO: 618717 - DNA, 54 bp, Artificial; identical to SEQ ID NO: 157153
  Synthetic oligonucleotide

SEQ ID NO: 618718 - DNA, 55 bp, Artificial; identical to SEQ ID NO: 182434
  Synthetic oligonucleotide

SEQ ID NO: 618719 - DNA, 50 bp, Artificial; identical to SEQ ID NO: 161707
  Synthetic oligonucleotide

SEQ ID NO: 618720 - DNA, 50 bp, Artificial; identical to SEQ ID NO: 146525
  Synthetic oligonucleotide

SEQ ID NO: 618721 - DNA, 57 bp, Artificial; identical to SEQ ID NO: 242415
  Synthetic oligonucleotide

SEQ ID NO: 618722 - DNA, 52 bp, Artificial; identical to SEQ ID NO: 206435
  Synthetic oligonucleotide

SEQ ID NO: 618723 - DNA, 51 bp, Artificial; identical to SEQ ID NO: 152137
  Synthetic oligonucleotide

SEQ ID NO: 618724 - DNA, 56 bp, Artificial; identical to SEQ ID NO: 212538
  Synthetic oligonucleotide

SEQ ID NO: 618725 - DNA, 50 bp, Artificial; identical to SEQ ID NO: 246671
  Synthetic oligonucleotide

SEQ ID NO: 618726 - DNA, 55 bp, Artificial; identical to SEQ ID NO: 187563
  Synthetic oligonucleotide

SEQ ID NO: 618727 - DNA, 60 bp, Artificial; identical to SEQ ID NO: 153310
  Synthetic oligonucleotide

SEQ ID NO: 618728 - DNA, 51 bp, Artificial; identical to SEQ ID NO: 167174
  Synthetic oligonucleotide

SEQ ID NO: 618729 - DNA, 54 bp, Artificial; identical to SEQ ID NO: 242549
  Synthetic oligonucleotide

SEQ ID NO: 618730 - DNA, 53 bp, Artificial; identical to SEQ ID NO: 240709
  Synthetic oligonucleotide

SEQ ID NO: 618731 - DNA, 56 bp, Artificial; identical to SEQ ID NO: 200995
  Synthetic oligonucleotide

SEQ ID NO: 618732 - DNA, 56 bp, Artificial; identical to SEQ ID NO: 247194
  Synthetic oligonucleotide

SEQ ID NO: 618733 - DNA, 56 bp, Artificial; identical to SEQ ID NO: 248875
  Synthetic oligonucleotide

SEQ ID NO: 618734 - DNA, 55 bp, Artificial; identical to SEQ ID NO: 254703
  Synthetic oligonucleotide

SEQ ID NO: 618735 - DNA, 57 bp, Artificial; identical to SEQ ID NO: 150885
  Synthetic oligonucleotide

SEQ ID NO: 618736 - DNA, 60 bp, Artificial; identical to SEQ ID NO: 242413
  Synthetic oligonucleotide

SEQ ID NO: 618737 - DNA, 53 bp, Artificial; identical to SEQ ID NO: 240710
  Synthetic oligonucleotide

SEQ ID NO: 618738 - DNA, 55 bp, Artificial; identical to SEQ ID NO: 150884
  Synthetic oligonucleotide

SEQ ID NO: 618739 - DNA, 55 bp, Artificial; identical to SEQ ID NO: 217939
  Synthetic oligonucleotide

SEQ ID NO: 618740 - DNA, 60 bp, Artificial; identical to SEQ ID NO: 142722
  Synthetic oligonucleotide

SEQ ID NO: 618741 - DNA, 50 bp, Artificial; identical to SEQ ID NO: 149753
  Synthetic oligonucleotide

SEQ ID NO: 618742 - DNA, 55 bp, Artificial; identical to SEQ ID NO: 254727
  Synthetic oligonucleotide

SEQ ID NO: 618743 - DNA, 58 bp, Artificial; identical to SEQ ID NO: 243739
  Synthetic oligonucleotide

SEQ ID NO: 618744 - DNA, 50 bp, Artificial; identical to SEQ ID NO: 202598
  Synthetic oligonucleotide

SEQ ID NO: 618745 - DNA, 53 bp, Artificial; identical to SEQ ID NO: 246319
  Synthetic oligonucleotide

SEQ ID NO: 618746 - DNA, 59 bp, Artificial; identical to SEQ ID NO: 209088
  Synthetic oligonucleotide

SEQ ID NO: 618747 - DNA, 59 bp, Artificial; identical to SEQ ID NO: 238643
  Synthetic oligonucleotide

SEQ ID NO: 618748 - DNA, 52 bp, Artificial; identical to SEQ ID NO: 149376
  Synthetic oligonucleotide

SEQ ID NO: 618749 - DNA, 51 bp, Artificial; identical to SEQ ID NO: 147352
  Synthetic oligonucleotide

SEQ ID NO: 618750 - DNA, 55 bp, Artificial; identical to SEQ ID NO: 202867
  Synthetic oligonucleotide

SEQ ID NO: 618751 - DNA, 55 bp, Artificial; identical to SEQ ID NO: 190421
  Synthetic oligonucleotide

SEQ ID NO: 618752 - DNA, 53 bp, Artificial; identical to SEQ ID NO: 208691
  Synthetic oligonucleotide

SEQ ID NO: 618753 - DNA, 54 bp, Artificial; identical to SEQ ID NO: 194222
  Synthetic oligonucleotide

SEQ ID NO: 618754 - DNA, 53 bp, Artificial; identical to SEQ ID NO: 246321
  Synthetic oligonucleotide

SEQ ID NO: 618755 - DNA, 55 bp, Artificial; identical to SEQ ID NO: 244286
  Synthetic oligonucleotide

SEQ ID NO: 618756 - DNA, 52 bp, Artificial; identical to SEQ ID NO: 237851
  Synthetic oligonucleotide

SEQ ID NO: 618757 - DNA, 55 bp, Artificial; identical to SEQ ID NO: 198142
  Synthetic oligonucleotide

SEQ ID NO: 618758 - DNA, 51 bp, Artificial; identical to SEQ ID NO: 182443
  Synthetic oligonucleotide

SEQ ID NO: 618759 - DNA, 56 bp, Artificial; identical to SEQ ID NO: 180021
  Synthetic oligonucleotide

SEQ ID NO: 618760 - DNA, 58 bp, Artificial; identical to SEQ ID NO: 178801
  Synthetic oligonucleotide

SEQ ID NO: 618761 - DNA, 57 bp, Artificial; identical to SEQ ID NO: 238642
  Synthetic oligonucleotide

SEQ ID NO: 618762 - DNA, 55 bp, Artificial; identical to SEQ ID NO: 188987
  Synthetic oligonucleotide

SEQ ID NO: 618763 - DNA, 52 bp, Artificial; identical to SEQ ID NO: 189505
  Synthetic oligonucleotide

SEQ ID NO: 618764 - DNA, 53 bp, Artificial; identical to SEQ ID NO: 170232
  Synthetic oligonucleotide

SEQ ID NO: 618765 - DNA, 58 bp, Artificial; identical to SEQ ID NO: 257465
  Synthetic oligonucleotide

SEQ ID NO: 618766 - DNA, 56 bp, Artificial; identical to SEQ ID NO: 212692
  Synthetic oligonucleotide

SEQ ID NO: 618767 - DNA, 54 bp, Artificial; identical to SEQ ID NO: 190296
  Synthetic oligonucleotide

SEQ ID NO: 618768 - DNA, 60 bp, Artificial; identical to SEQ ID NO: 159871
  Synthetic oligonucleotide

SEQ ID NO: 618769 - DNA, 50 bp, Artificial; identical to SEQ ID NO: 241739
  Synthetic oligonucleotide

SEQ ID NO: 618770 - DNA, 53 bp, Artificial; identical to SEQ ID NO: 238639
  Synthetic oligonucleotide

SEQ ID NO: 618771 - DNA, 51 bp, Artificial; identical to SEQ ID NO: 241042
  Synthetic oligonucleotide

SEQ ID NO: 618772 - DNA, 58 bp, Artificial; identical to SEQ ID NO: 247195
  Synthetic oligonucleotide

SEQ ID NO: 618773 - DNA, 52 bp, Artificial; identical to SEQ ID NO: 203007
  Synthetic oligonucleotide

SEQ ID NO: 618774 - DNA, 55 bp, Artificial; identical to SEQ ID NO: 175709
  Synthetic oligonucleotide

SEQ ID NO: 618775 - DNA, 54 bp, Artificial; identical to SEQ ID NO: 212681
  Synthetic oligonucleotide

SEQ ID NO: 618776 - DNA, 60 bp, Artificial; identical to SEQ ID NO: 196552
  Synthetic oligonucleotide

SEQ ID NO: 618777 - DNA, 56 bp, Artificial; identical to SEQ ID NO: 209226
  Synthetic oligonucleotide

SEQ ID NO: 618778 - DNA, 56 bp, Artificial; identical to SEQ ID NO: 200999
  Synthetic oligonucleotide

SEQ ID NO: 618779 - DNA, 56 bp, Artificial; identical to SEQ ID NO: 247197
  Synthetic oligonucleotide

SEQ ID NO: 618780 - DNA, 55 bp, Artificial; identical to SEQ ID NO: 146310
  Synthetic oligonucleotide

SEQ ID NO: 618781 - DNA, 57 bp, Artificial; identical to SEQ ID NO: 238636
  Synthetic oligonucleotide

SEQ ID NO: 618782 - DNA, 57 bp, Artificial; identical to SEQ ID NO: 150881
  Synthetic oligonucleotide

SEQ ID NO: 618783 - DNA, 60 bp, Artificial; identical to SEQ ID NO: 238635
  Synthetic oligonucleotide

SEQ ID NO: 618784 - DNA, 53 bp, Artificial; identical to SEQ ID NO: 187276
  Synthetic oligonucleotide

SEQ ID NO: 618785 - DNA, 49 bp, Artificial; identical to SEQ ID NO: 243439
  Synthetic oligonucleotide

SEQ ID NO: 618786 - DNA, 54 bp, Artificial; identical to SEQ ID NO: 202439
  Synthetic oligonucleotide

SEQ ID NO: 618787 - DNA, 55 bp, Artificial; identical to SEQ ID NO: 203689
  Synthetic oligonucleotide

SEQ ID NO: 618788 - DNA, 55 bp, Artificial; identical to SEQ ID NO: 249218
  Synthetic oligonucleotide

SEQ ID NO: 618789 - DNA, 53 bp, Artificial; identical to SEQ ID NO: 212983
  Synthetic oligonucleotide

SEQ ID NO: 618790 - DNA, 57 bp, Artificial; identical to SEQ ID NO: 150877
  Synthetic oligonucleotide

SEQ ID NO: 618791 - DNA, 55 bp, Artificial; identical to SEQ ID NO: 174738
  Synthetic oligonucleotide

SEQ ID NO: 618792 - DNA, 56 bp, Artificial; identical to SEQ ID NO: 217212
  Synthetic oligonucleotide

SEQ ID NO: 618793 - DNA, 58 bp, Artificial; identical to SEQ ID NO: 187325
  Synthetic oligonucleotide

SEQ ID NO: 618794 - DNA, 60 bp, Artificial; identical to SEQ ID NO: 187248
  Synthetic oligonucleotide

SEQ ID NO: 618795 - DNA, 59 bp, Artificial; identical to SEQ ID NO: 209096
  Synthetic oligonucleotide

SEQ ID NO: 618796 - DNA, 60 bp, Artificial; identical to SEQ ID NO: 166111
  Synthetic oligonucleotide

SEQ ID NO: 618797 - DNA, 59 bp, Artificial; identical to SEQ ID NO: 150876
  Synthetic oligonucleotide

SEQ ID NO: 618798 - DNA, 55 bp, Artificial; identical to SEQ ID NO: 197189
  Synthetic oligonucleotide

SEQ ID NO: 618799 - DNA, 52 bp, Artificial; identical to SEQ ID NO: 157580
  Synthetic oligonucleotide

SEQ ID NO: 618800 - DNA, 54 bp, Artificial; identical to SEQ ID NO: 223530
  Synthetic oligonucleotide

SEQ ID NO: 618801 - DNA, 52 bp, Artificial; identical to SEQ ID NO: 142636
  Synthetic oligonucleotide

SEQ ID NO: 618802 - DNA, 56 bp, Artificial; identical to SEQ ID NO: 239553
  Synthetic oligonucleotide

SEQ ID NO: 618803 - DNA, 56 bp, Artificial; identical to SEQ ID NO: 210786
  Synthetic oligonucleotide

SEQ ID NO: 618804 - DNA, 54 bp, Artificial; identical to SEQ ID NO: 240599
  Synthetic oligonucleotide

SEQ ID NO: 618805 - DNA, 60 bp, Artificial; identical to SEQ ID NO: 141837
  Synthetic oligonucleotide

SEQ ID NO: 618806 - DNA, 56 bp, Artificial; identical to SEQ ID NO: 266104
  Synthetic oligonucleotide

SEQ ID NO: 618807 - DNA, 50 bp, Artificial; identical to SEQ ID NO: 215324
  Synthetic oligonucleotide

SEQ ID NO: 618808 - DNA, 60 bp, Artificial; identical to SEQ ID NO: 187249
  Synthetic oligonucleotide

SEQ ID NO: 618809 - DNA, 55 bp, Artificial; identical to SEQ ID NO: 216515
  Synthetic oligonucleotide

SEQ ID NO: 618810 - DNA, 58 bp, Artificial; identical to SEQ ID NO: 144715
  Synthetic oligonucleotide

SEQ ID NO: 618811 - DNA, 55 bp, Artificial; identical to SEQ ID NO: 201278
  Synthetic oligonucleotide

SEQ ID NO: 618812 - DNA, 52 bp, Artificial; identical to SEQ ID NO: 186336
  Synthetic oligonucleotide

SEQ ID NO: 618813 - DNA, 60 bp, Artificial; identical to SEQ ID NO: 166100
  Synthetic oligonucleotide

SEQ ID NO: 618814 - DNA, 55 bp, Artificial; identical to SEQ ID NO: 245907
  Synthetic oligonucleotide

SEQ ID NO: 618815 - DNA, 55 bp, Artificial; identical to SEQ ID NO: 201878
  Synthetic oligonucleotide

SEQ ID NO: 618816 - DNA, 55 bp, Artificial; identical to SEQ ID NO: 188982
  Synthetic oligonucleotide

SEQ ID NO: 618817 - DNA, 51 bp, Artificial; identical to SEQ ID NO: 209762
  Synthetic oligonucleotide

SEQ ID NO: 618818 - DNA, 55 bp, Artificial; identical to SEQ ID NO: 254803
  Synthetic oligonucleotide

SEQ ID NO: 618819 - DNA, 58 bp, Artificial; identical to SEQ ID NO: 224326
  Synthetic oligonucleotide

SEQ ID NO: 618820 - DNA, 56 bp, Artificial; identical to SEQ ID NO: 170254
  Synthetic oligonucleotide

SEQ ID NO: 618821 - DNA, 51 bp, Artificial; identical to SEQ ID NO: 193799
  Synthetic oligonucleotide

SEQ ID NO: 618822 - DNA, 60 bp, Artificial; identical to SEQ ID NO: 238631
  Synthetic oligonucleotide

SEQ ID NO: 618823 - DNA, 54 bp, Artificial; identical to SEQ ID NO: 201879
  Synthetic oligonucleotide

SEQ ID NO: 618824 - DNA, 53 bp, Artificial; identical to SEQ ID NO: 217266
  Synthetic oligonucleotide

SEQ ID NO: 618825 - DNA, 55 bp, Artificial; identical to SEQ ID NO: 225196
  Synthetic oligonucleotide

SEQ ID NO: 618826 - DNA, 54 bp, Artificial; identical to SEQ ID NO: 208679
  Synthetic oligonucleotide

SEQ ID NO: 618827 - DNA, 55 bp, Artificial; identical to SEQ ID NO: 254465
  Synthetic oligonucleotide

SEQ ID NO: 618828 - DNA, 57 bp, Artificial; identical to SEQ ID NO: 166089
  Synthetic oligonucleotide

SEQ ID NO: 618829 - DNA, 54 bp, Artificial; identical to SEQ ID NO: 160278
  Synthetic oligonucleotide

SEQ ID NO: 618830 - DNA, 52 bp, Artificial; identical to SEQ ID NO: 220807
  Synthetic oligonucleotide

SEQ ID NO: 618831 - DNA, 59 bp, Artificial; identical to SEQ ID NO: 141839
  Synthetic oligonucleotide

SEQ ID NO: 618832 - DNA, 53 bp, Artificial; identical to SEQ ID NO: 185528
  Synthetic oligonucleotide

SEQ ID NO: 618833 - DNA, 57 bp, Artificial; identical to SEQ ID NO: 147130
  Synthetic oligonucleotide

SEQ ID NO: 618834 - DNA, 52 bp, Artificial; identical to SEQ ID NO: 150873
  Synthetic oligonucleotide

SEQ ID NO: 618835 - DNA, 54 bp, Artificial; identical to SEQ ID NO: 146371
  Synthetic oligonucleotide

SEQ ID NO: 618836 - DNA, 55 bp, Artificial; identical to SEQ ID NO: 182513
  Synthetic oligonucleotide

SEQ ID NO: 618837 - DNA, 54 bp, Artificial; identical to SEQ ID NO: 190300
  Synthetic oligonucleotide

SEQ ID NO: 618838 - DNA, 55 bp, Artificial; identical to SEQ ID NO: 205447
  Synthetic oligonucleotide

SEQ ID NO: 618839 - DNA, 55 bp, Artificial; identical to SEQ ID NO: 182516
  Synthetic oligonucleotide

SEQ ID NO: 618840 - DNA, 55 bp, Artificial; identical to SEQ ID NO: 171564
  Synthetic oligonucleotide

SEQ ID NO: 618841 - DNA, 54 bp, Artificial; identical to SEQ ID NO: 188011
  Synthetic oligonucleotide

SEQ ID NO: 618842 - DNA, 55 bp, Artificial; identical to SEQ ID NO: 182518
  Synthetic oligonucleotide

SEQ ID NO: 618843 - DNA, 60 bp, Artificial; identical to SEQ ID NO: 206939
  Synthetic oligonucleotide

SEQ ID NO: 618844 - DNA, 52 bp, Artificial; identical to SEQ ID NO: 211342
  Synthetic oligonucleotide

SEQ ID NO: 618845 - DNA, 58 bp, Artificial; identical to SEQ ID NO: 208047
  Synthetic oligonucleotide

SEQ ID NO: 618846 - DNA, 59 bp, Artificial; identical to SEQ ID NO: 150909
  Synthetic oligonucleotide

SEQ ID NO: 618847 - DNA, 53 bp, Artificial; identical to SEQ ID NO: 199647
  Synthetic oligonucleotide

SEQ ID NO: 618848 - DNA, 52 bp, Artificial; identical to SEQ ID NO: 247929
  Synthetic oligonucleotide

SEQ ID NO: 618849 - DNA, 55 bp, Artificial; identical to SEQ ID NO: 245912
  Synthetic oligonucleotide

SEQ ID NO: 618850 - DNA, 50 bp, Artificial; identical to SEQ ID NO: 174233
  Synthetic oligonucleotide

SEQ ID NO: 618851 - DNA, 60 bp, Artificial; identical to SEQ ID NO: 254289
  Synthetic oligonucleotide

SEQ ID NO: 618852 - DNA, 60 bp, Artificial; identical to SEQ ID NO: 217228
  Synthetic oligonucleotide

SEQ ID NO: 618853 - DNA, 60 bp, Artificial; identical to SEQ ID NO: 141838
  Synthetic oligonucleotide

SEQ ID NO: 618854 - DNA, 60 bp, Artificial; identical to SEQ ID NO: 170265
  Synthetic oligonucleotide

SEQ ID NO: 618855 - DNA, 55 bp, Artificial; identical to SEQ ID NO: 240500
  Synthetic oligonucleotide

SEQ ID NO: 618856 - DNA, 56 bp, Artificial; identical to SEQ ID NO: 238626
  Synthetic oligonucleotide

SEQ ID NO: 618857 - DNA, 54 bp, Artificial; identical to SEQ ID NO: 249966
  Synthetic oligonucleotide

SEQ ID NO: 618858 - DNA, 53 bp, Artificial; identical to SEQ ID NO: 197467
  Synthetic oligonucleotide

SEQ ID NO: 618859 - DNA, 50 bp, Artificial; identical to SEQ ID NO: 141422
  Synthetic oligonucleotide

SEQ ID NO: 618860 - DNA, 58 bp, Artificial; identical to SEQ ID NO: 203326
  Synthetic oligonucleotide

SEQ ID NO: 618861 - DNA, 54 bp, Artificial; identical to SEQ ID NO: 208586
  Synthetic oligonucleotide

SEQ ID NO: 618862 - DNA, 55 bp, Artificial; identical to SEQ ID NO: 254502
  Synthetic oligonucleotide

SEQ ID NO: 618863 - DNA, 53 bp, Artificial; identical to SEQ ID NO: 205680
  Synthetic oligonucleotide

SEQ ID NO: 618864 - DNA, 54 bp, Artificial; identical to SEQ ID NO: 247910
  Synthetic oligonucleotide

SEQ ID NO: 618865 - DNA, 55 bp, Artificial; identical to SEQ ID NO: 142532
  Synthetic oligonucleotide

SEQ ID NO: 618866 - DNA, 57 bp, Artificial; identical to SEQ ID NO: 178767
  Synthetic oligonucleotide

SEQ ID NO: 618867 - DNA, 55 bp, Artificial; identical to SEQ ID NO: 156671
  Synthetic oligonucleotide

SEQ ID NO: 618868 - DNA, 55 bp, Artificial; identical to SEQ ID NO: 148736
  Synthetic oligonucleotide

SEQ ID NO: 618869 - DNA, 55 bp, Artificial; identical to SEQ ID NO: 254565
  Synthetic oligonucleotide

SEQ ID NO: 618870 - DNA, 52 bp, Artificial; identical to SEQ ID NO: 203933
  Synthetic oligonucleotide

SEQ ID NO: 618871 - DNA, 51 bp, Artificial; identical to SEQ ID NO: 202543
  Synthetic oligonucleotide

SEQ ID NO: 618872 - DNA, 54 bp, Artificial; identical to SEQ ID NO: 257503
  Synthetic oligonucleotide

SEQ ID NO: 618873 - DNA, 54 bp, Artificial; identical to SEQ ID NO: 178770
  Synthetic oligonucleotide

SEQ ID NO: 618874 - DNA, 55 bp, Artificial; identical to SEQ ID NO: 240450
  Synthetic oligonucleotide

SEQ ID NO: 618875 - DNA, 51 bp, Artificial; identical to SEQ ID NO: 146479
  Synthetic oligonucleotide

SEQ ID NO: 618876 - DNA, 55 bp, Artificial; identical to SEQ ID NO: 171568
  Synthetic oligonucleotide

SEQ ID NO: 618877 - DNA, 53 bp, Artificial; identical to SEQ ID NO: 187254
  Synthetic oligonucleotide

SEQ ID NO: 618878 - DNA, 60 bp, Artificial; identical to SEQ ID NO: 238623
  Synthetic oligonucleotide

SEQ ID NO: 618879 - DNA, 52 bp, Artificial; identical to SEQ ID NO: 170145
  Synthetic oligonucleotide

SEQ ID NO: 618880 - DNA, 56 bp, Artificial; identical to SEQ ID NO: 150903
  Synthetic oligonucleotide

SEQ ID NO: 618881 - DNA, 52 bp, Artificial; identical to SEQ ID NO: 240922
  Synthetic oligonucleotide

SEQ ID NO: 618882 - DNA, 58 bp, Artificial; identical to SEQ ID NO: 239329
  Synthetic oligonucleotide

SEQ ID NO: 618883 - DNA, 55 bp, Artificial; identical to SEQ ID NO: 191085
  Synthetic oligonucleotide

SEQ ID NO: 618884 - DNA, 56 bp, Artificial; identical to SEQ ID NO: 187390
  Synthetic oligonucleotide

SEQ ID NO: 618885 - DNA, 55 bp, Artificial; identical to SEQ ID NO: 166078
  Synthetic oligonucleotide

SEQ ID NO: 618886 - DNA, 50 bp, Artificial; identical to SEQ ID NO: 241682
  Synthetic oligonucleotide

SEQ ID NO: 618887 - DNA, 55 bp, Artificial; identical to SEQ ID NO: 244327
  Synthetic oligonucleotide

SEQ ID NO: 618888 - DNA, 55 bp, Artificial; identical to SEQ ID NO: 244319
  Synthetic oligonucleotide

SEQ ID NO: 618889 - DNA, 60 bp, Artificial; identical to SEQ ID NO: 242494
  Synthetic oligonucleotide

SEQ ID NO: 618890 - DNA, 55 bp, Artificial; identical to SEQ ID NO: 151811
  Synthetic oligonucleotide

SEQ ID NO: 618891 - DNA, 60 bp, Artificial; identical to SEQ ID NO: 252942
  Synthetic oligonucleotide

SEQ ID NO: 618892 - DNA, 54 bp, Artificial; identical to SEQ ID NO: 255166
  Synthetic oligonucleotide

SEQ ID NO: 618893 - DNA, 54 bp, Artificial; identical to SEQ ID NO: 154902
  Synthetic oligonucleotide

SEQ ID NO: 618894 - DNA, 55 bp, Artificial; identical to SEQ ID NO: 208581
  Synthetic oligonucleotide

SEQ ID NO: 618895 - DNA, 51 bp, Artificial; identical to SEQ ID NO: 157678
  Synthetic oligonucleotide

SEQ ID NO: 618896 - DNA, 53 bp, Artificial; identical to SEQ ID NO: 185503
  Synthetic oligonucleotide

SEQ ID NO: 618897 - DNA, 55 bp, Artificial; identical to SEQ ID NO: 199320
  Synthetic oligonucleotide

SEQ ID NO: 618898 - DNA, 55 bp, Artificial; identical to SEQ ID NO: 161277
  Synthetic oligonucleotide

SEQ ID NO: 618899 - DNA, 55 bp, Artificial; identical to SEQ ID NO: 174734
  Synthetic oligonucleotide

SEQ ID NO: 618900 - DNA, 55 bp, Artificial; identical to SEQ ID NO: 197195
  Synthetic oligonucleotide

SEQ ID NO: 618901 - DNA, 55 bp, Artificial; identical to SEQ ID NO: 191084
  Synthetic oligonucleotide

SEQ ID NO: 618902 - DNA, 55 bp, Artificial; identical to SEQ ID NO: 221418
  Synthetic oligonucleotide

SEQ ID NO: 618903 - DNA, 55 bp, Artificial; identical to SEQ ID NO: 182498
  Synthetic oligonucleotide

SEQ ID NO: 618904 - DNA, 59 bp, Artificial; identical to SEQ ID NO: 178626
  Synthetic oligonucleotide

SEQ ID NO: 618905 - DNA, 50 bp, Artificial; identical to SEQ ID NO: 192225
  Synthetic oligonucleotide

SEQ ID NO: 618906 - DNA, 55 bp, Artificial; identical to SEQ ID NO: 249080
  Synthetic oligonucleotide

SEQ ID NO: 618907 - DNA, 53 bp, Artificial; identical to SEQ ID NO: 199795
  Synthetic oligonucleotide

SEQ ID NO: 618908 - DNA, 50 bp, Artificial; identical to SEQ ID NO: 224048
  Synthetic oligonucleotide

SEQ ID NO: 618909 - DNA, 57 bp, Artificial; identical to SEQ ID NO: 178629
  Synthetic oligonucleotide

SEQ ID NO: 618910 - DNA, 57 bp, Artificial; identical to SEQ ID NO: 243991
  Synthetic oligonucleotide

SEQ ID NO: 618911 - DNA, 53 bp, Artificial; identical to SEQ ID NO: 157350
  Synthetic oligonucleotide

SEQ ID NO: 618912 - DNA, 55 bp, Artificial; identical to SEQ ID NO: 253173
  Synthetic oligonucleotide

SEQ ID NO: 618913 - DNA, 58 bp, Artificial; identical to SEQ ID NO: 179698
  Synthetic oligonucleotide

SEQ ID NO: 618914 - DNA, 56 bp, Artificial; identical to SEQ ID NO: 247176
  Synthetic oligonucleotide

SEQ ID NO: 618915 - DNA, 53 bp, Artificial; identical to SEQ ID NO: 240465
  Synthetic oligonucleotide

SEQ ID NO: 618916 - DNA, 55 bp, Artificial; identical to SEQ ID NO: 182732
  Synthetic oligonucleotide

SEQ ID NO: 618917 - DNA, 60 bp, Artificial; identical to SEQ ID NO: 210783
  Synthetic oligonucleotide

SEQ ID NO: 618918 - DNA, 51 bp, Artificial; identical to SEQ ID NO: 209716
  Synthetic oligonucleotide

SEQ ID NO: 618919 - DNA, 55 bp, Artificial; identical to SEQ ID NO: 254582
  Synthetic oligonucleotide

SEQ ID NO: 618920 - DNA, 51 bp, Artificial; identical to SEQ ID NO: 157690
  Synthetic oligonucleotide

SEQ ID NO: 618921 - DNA, 55 bp, Artificial; identical to SEQ ID NO: 161270
  Synthetic oligonucleotide

SEQ ID NO: 618922 - DNA, 58 bp, Artificial; identical to SEQ ID NO: 247877
  Synthetic oligonucleotide

SEQ ID NO: 618923 - DNA, 58 bp, Artificial; identical to SEQ ID NO: 224125
  Synthetic oligonucleotide

SEQ ID NO: 618924 - DNA, 53 bp, Artificial; identical to SEQ ID NO: 246322
  Synthetic oligonucleotide

SEQ ID NO: 618925 - DNA, 60 bp, Artificial; identical to SEQ ID NO: 178636
  Synthetic oligonucleotide

SEQ ID NO: 618926 - DNA, 51 bp, Artificial; identical to SEQ ID NO: 209231
  Synthetic oligonucleotide

SEQ ID NO: 618927 - DNA, 55 bp, Artificial; identical to SEQ ID NO: 187532
  Synthetic oligonucleotide

SEQ ID NO: 618928 - DNA, 52 bp, Artificial; identical to SEQ ID NO: 223645
  Synthetic oligonucleotide

SEQ ID NO: 618929 - DNA, 50 bp, Artificial; identical to SEQ ID NO: 233887
  Synthetic oligonucleotide

SEQ ID NO: 618930 - DNA, 57 bp, Artificial; identical to SEQ ID NO: 239140
  Synthetic oligonucleotide

SEQ ID NO: 618931 - DNA, 53 bp, Artificial; identical to SEQ ID NO: 157348
  Synthetic oligonucleotide

SEQ ID NO: 618932 - DNA, 60 bp, Artificial; identical to SEQ ID NO: 201881
  Synthetic oligonucleotide

SEQ ID NO: 618933 - DNA, 52 bp, Artificial; identical to SEQ ID NO: 186298
  Synthetic oligonucleotide

SEQ ID NO: 618934 - DNA, 55 bp, Artificial; identical to SEQ ID NO: 216532
  Synthetic oligonucleotide

SEQ ID NO: 618935 - DNA, 56 bp, Artificial; identical to SEQ ID NO: 239141
  Synthetic oligonucleotide

SEQ ID NO: 618936 - DNA, 50 bp, Artificial; identical to SEQ ID NO: 266358
  Synthetic oligonucleotide

SEQ ID NO: 618937 - DNA, 55 bp, Artificial; identical to SEQ ID NO: 164398
  Synthetic oligonucleotide

SEQ ID NO: 618938 - DNA, 58 bp, Artificial; identical to SEQ ID NO: 217164
  Synthetic oligonucleotide

SEQ ID NO: 618939 - DNA, 55 bp, Artificial; identical to SEQ ID NO: 182743
  Synthetic oligonucleotide

SEQ ID NO: 618940 - DNA, 55 bp, Artificial; identical to SEQ ID NO: 148906
  Synthetic oligonucleotide

SEQ ID NO: 618941 - DNA, 55 bp, Artificial; identical to SEQ ID NO: 215195
  Synthetic oligonucleotide

SEQ ID NO: 618942 - DNA, 55 bp, Artificial; identical to SEQ ID NO: 216509
  Synthetic oligonucleotide

SEQ ID NO: 618943 - DNA, 55 bp, Artificial; identical to SEQ ID NO: 238399
  Synthetic oligonucleotide

SEQ ID NO: 618944 - DNA, 53 bp, Artificial; identical to SEQ ID NO: 185842
  Synthetic oligonucleotide

SEQ ID NO: 618945 - DNA, 55 bp, Artificial; identical to SEQ ID NO: 221420
  Synthetic oligonucleotide

SEQ ID NO: 618946 - DNA, 55 bp, Artificial; identical to SEQ ID NO: 245915
  Synthetic oligonucleotide

SEQ ID NO: 618947 - DNA, 52 bp, Artificial; identical to SEQ ID NO: 186312
  Synthetic oligonucleotide

SEQ ID NO: 618948 - DNA, 60 bp, Artificial; identical to SEQ ID NO: 187290
  Synthetic oligonucleotide

SEQ ID NO: 618949 - DNA, 58 bp, Artificial; identical to SEQ ID NO: 154592
  Synthetic oligonucleotide

SEQ ID NO: 618950 - DNA, 52 bp, Artificial; identical to SEQ ID NO: 218364
  Synthetic oligonucleotide

SEQ ID NO: 618951 - DNA, 54 bp, Artificial; identical to SEQ ID NO: 185095
  Synthetic oligonucleotide

SEQ ID NO: 618952 - DNA, 56 bp, Artificial; identical to SEQ ID NO: 225544
  Synthetic oligonucleotide

SEQ ID NO: 618953 - DNA, 55 bp, Artificial; identical to SEQ ID NO: 201476
  Synthetic oligonucleotide

SEQ ID NO: 618954 - DNA, 55 bp, Artificial; identical to SEQ ID NO: 233626
  Synthetic oligonucleotide

SEQ ID NO: 618955 - DNA, 54 bp, Artificial; identical to SEQ ID NO: 168845
  Synthetic oligonucleotide

SEQ ID NO: 618956 - DNA, 60 bp, Artificial; identical to SEQ ID NO: 178604
  Synthetic oligonucleotide

SEQ ID NO: 618957 - DNA, 60 bp, Artificial; identical to SEQ ID NO: 205286
  Synthetic oligonucleotide

SEQ ID NO: 618958 - DNA, 53 bp, Artificial; identical to SEQ ID NO: 246323
  Synthetic oligonucleotide

SEQ ID NO: 618959 - DNA, 51 bp, Artificial; identical to SEQ ID NO: 246655
  Synthetic oligonucleotide

SEQ ID NO: 618960 - DNA, 55 bp, Artificial; identical to SEQ ID NO: 152611
  Synthetic oligonucleotide

SEQ ID NO: 618961 - DNA, 56 bp, Artificial; identical to SEQ ID NO: 239149
  Synthetic oligonucleotide

SEQ ID NO: 618962 - DNA, 55 bp, Artificial; identical to SEQ ID NO: 182715
  Synthetic oligonucleotide

SEQ ID NO: 618963 - DNA, 59 bp, Artificial; identical to SEQ ID NO: 179435
  Synthetic oligonucleotide

SEQ ID NO: 618964 - DNA, 55 bp, Artificial; identical to SEQ ID NO: 257932
  Synthetic oligonucleotide

SEQ ID NO: 618965 - DNA, 55 bp, Artificial; identical to SEQ ID NO: 174733
  Synthetic oligonucleotide

SEQ ID NO: 618966 - DNA, 55 bp, Artificial; identical to SEQ ID NO: 245307
  Synthetic oligonucleotide

SEQ ID NO: 618967 - DNA, 60 bp, Artificial; identical to SEQ ID NO: 191252
  Synthetic oligonucleotide

SEQ ID NO: 618968 - DNA, 52 bp, Artificial; identical to SEQ ID NO: 258173
  Synthetic oligonucleotide

SEQ ID NO: 618969 - DNA, 60 bp, Artificial; identical to SEQ ID NO: 178613
  Synthetic oligonucleotide

SEQ ID NO: 618970 - DNA, 53 bp, Artificial; identical to SEQ ID NO: 170309
  Synthetic oligonucleotide

SEQ ID NO: 618971 - DNA, 59 bp, Artificial; identical to SEQ ID NO: 141826
  Synthetic oligonucleotide

SEQ ID NO: 618972 - DNA, 55 bp, Artificial; identical to SEQ ID NO: 207463
  Synthetic oligonucleotide

SEQ ID NO: 618973 - DNA, 52 bp, Artificial; identical to SEQ ID NO: 223642
  Synthetic oligonucleotide

SEQ ID NO: 618974 - DNA, 55 bp, Artificial; identical to SEQ ID NO: 182720
  Synthetic oligonucleotide

SEQ ID NO: 618975 - DNA, 55 bp, Artificial; identical to SEQ ID NO: 224956
  Synthetic oligonucleotide

SEQ ID NO: 618976 - DNA, 57 bp, Artificial; identical to SEQ ID NO: 201025
  Synthetic oligonucleotide

SEQ ID NO: 618977 - DNA, 52 bp, Artificial; identical to SEQ ID NO: 255493
  Synthetic oligonucleotide

SEQ ID NO: 618978 - DNA, 57 bp, Artificial; identical to SEQ ID NO: 239150
  Synthetic oligonucleotide

SEQ ID NO: 618979 - DNA, 55 bp, Artificial; identical to SEQ ID NO: 238422
  Synthetic oligonucleotide

SEQ ID NO: 618980 - DNA, 53 bp, Artificial; identical to SEQ ID NO: 255410
  Synthetic oligonucleotide

SEQ ID NO: 618981 - DNA, 52 bp, Artificial; identical to SEQ ID NO: 246486
  Synthetic oligonucleotide

SEQ ID NO: 618982 - DNA, 54 bp, Artificial; identical to SEQ ID NO: 144461
  Synthetic oligonucleotide

SEQ ID NO: 618983 - DNA, 50 bp, Artificial; identical to SEQ ID NO: 262742
  Synthetic oligonucleotide

SEQ ID NO: 618984 - DNA, 52 bp, Artificial; identical to SEQ ID NO: 234495
  Synthetic oligonucleotide

SEQ ID NO: 618985 - DNA, 57 bp, Artificial; identical to SEQ ID NO: 247247
  Synthetic oligonucleotide

SEQ ID NO: 618986 - DNA, 58 bp, Artificial; identical to SEQ ID NO: 178676
  Synthetic oligonucleotide

SEQ ID NO: 618987 - DNA, 51 bp, Artificial; identical to SEQ ID NO: 197663
  Synthetic oligonucleotide

SEQ ID NO: 618988 - DNA, 55 bp, Artificial; identical to SEQ ID NO: 179675
  Synthetic oligonucleotide

SEQ ID NO: 618989 - DNA, 55 bp, Artificial; identical to SEQ ID NO: 216541
  Synthetic oligonucleotide

SEQ ID NO: 618990 - DNA, 60 bp, Artificial; identical to SEQ ID NO: 150897
  Synthetic oligonucleotide

SEQ ID NO: 618991 - DNA, 51 bp, Artificial; identical to SEQ ID NO: 165166
  Synthetic oligonucleotide

SEQ ID NO: 618992 - DNA, 55 bp, Artificial; identical to SEQ ID NO: 249143
  Synthetic oligonucleotide

SEQ ID NO: 618993 - DNA, 51 bp, Artificial; identical to SEQ ID NO: 186419
  Synthetic oligonucleotide

SEQ ID NO: 618994 - DNA, 60 bp, Artificial; identical to SEQ ID NO: 162423
  Synthetic oligonucleotide

SEQ ID NO: 618995 - DNA, 55 bp, Artificial; identical to SEQ ID NO: 218374
  Synthetic oligonucleotide

SEQ ID NO: 618996 - DNA, 50 bp, Artificial; identical to SEQ ID NO: 223769
  Synthetic oligonucleotide

SEQ ID NO: 618997 - DNA, 60 bp, Artificial; identical to SEQ ID NO: 237869
  Synthetic oligonucleotide

SEQ ID NO: 618998 - DNA, 57 bp, Artificial; identical to SEQ ID NO: 178680
  Synthetic oligonucleotide

SEQ ID NO: 618999 - DNA, 51 bp, Artificial; identical to SEQ ID NO: 157686
  Synthetic oligonucleotide

SEQ ID NO: 619000 - DNA, 54 bp, Artificial; identical to SEQ ID NO: 199555
  Synthetic oligonucleotide

SEQ ID NO: 619001 - DNA, 60 bp, Artificial; identical to SEQ ID NO: 141825
  Synthetic oligonucleotide

SEQ ID NO: 619002 - DNA, 56 bp, Artificial; identical to SEQ ID NO: 243925
  Synthetic oligonucleotide

SEQ ID NO: 619003 - DNA, 54 bp, Artificial; identical to SEQ ID NO: 247822
  Synthetic oligonucleotide

SEQ ID NO: 619004 - DNA, 55 bp, Artificial; identical to SEQ ID NO: 156715
  Synthetic oligonucleotide

SEQ ID NO: 619005 - DNA, 55 bp, Artificial; identical to SEQ ID NO: 150894
  Synthetic oligonucleotide

SEQ ID NO: 619006 - DNA, 51 bp, Artificial; identical to SEQ ID NO: 253368
  Synthetic oligonucleotide

SEQ ID NO: 619007 - DNA, 60 bp, Artificial; identical to SEQ ID NO: 150892
  Synthetic oligonucleotide

SEQ ID NO: 619008 - DNA, 57 bp, Artificial; identical to SEQ ID NO: 147004
  Synthetic oligonucleotide

SEQ ID NO: 619009 - DNA, 56 bp, Artificial; identical to SEQ ID NO: 201882
  Synthetic oligonucleotide

SEQ ID NO: 619010 - DNA, 52 bp, Artificial; identical to SEQ ID NO: 178684
  Synthetic oligonucleotide

SEQ ID NO: 619011 - DNA, 55 bp, Artificial; identical to SEQ ID NO: 164514
  Synthetic oligonucleotide

SEQ ID NO: 619012 - DNA, 55 bp, Artificial; identical to SEQ ID NO: 147007
  Synthetic oligonucleotide

SEQ ID NO: 619013 - DNA, 51 bp, Artificial; identical to SEQ ID NO: 187055
  Synthetic oligonucleotide

SEQ ID NO: 619014 - DNA, 57 bp, Artificial; identical to SEQ ID NO: 239152
  Synthetic oligonucleotide

SEQ ID NO: 619015 - DNA, 57 bp, Artificial; identical to SEQ ID NO: 239153
  Synthetic oligonucleotide

SEQ ID NO: 619016 - DNA, 60 bp, Artificial; identical to SEQ ID NO: 144707
  Synthetic oligonucleotide

SEQ ID NO: 619017 - DNA, 55 bp, Artificial; identical to SEQ ID NO: 178686
  Synthetic oligonucleotide

SEQ ID NO: 619018 - DNA, 55 bp, Artificial; identical to SEQ ID NO: 244250
  Synthetic oligonucleotide

SEQ ID NO: 619019 - DNA, 50 bp, Artificial; identical to SEQ ID NO: 243746
  Synthetic oligonucleotide

SEQ ID NO: 619020 - DNA, 50 bp, Artificial; identical to SEQ ID NO: 167217
  Synthetic oligonucleotide

SEQ ID NO: 619021 - DNA, 51 bp, Artificial; identical to SEQ ID NO: 210356
  Synthetic oligonucleotide

SEQ ID NO: 619022 - DNA, 55 bp, Artificial; identical to SEQ ID NO: 260224
  Synthetic oligonucleotide

SEQ ID NO: 619023 - DNA, 55 bp, Artificial; identical to SEQ ID NO: 182786
  Synthetic oligonucleotide

SEQ ID NO: 619024 - DNA, 55 bp, Artificial; identical to SEQ ID NO: 182787
  Synthetic oligonucleotide

SEQ ID NO: 619025 - DNA, 55 bp, Artificial; identical to SEQ ID NO: 148832
  Synthetic oligonucleotide

SEQ ID NO: 619026 - DNA, 60 bp, Artificial; identical to SEQ ID NO: 253031
  Synthetic oligonucleotide

SEQ ID NO: 619027 - DNA, 54 bp, Artificial; identical to SEQ ID NO: 266039
  Synthetic oligonucleotide

SEQ ID NO: 619028 - DNA, 55 bp, Artificial; identical to SEQ ID NO: 156718
  Synthetic oligonucleotide

SEQ ID NO: 619029 - DNA, 51 bp, Artificial; identical to SEQ ID NO: 149339
  Synthetic oligonucleotide

SEQ ID NO: 619030 - DNA, 53 bp, Artificial; identical to SEQ ID NO: 190798
  Synthetic oligonucleotide

SEQ ID NO: 619031 - DNA, 55 bp, Artificial; identical to SEQ ID NO: 164513
  Synthetic oligonucleotide

SEQ ID NO: 619032 - DNA, 56 bp, Artificial; identical to SEQ ID NO: 247566
  Synthetic oligonucleotide

SEQ ID NO: 619033 - DNA, 55 bp, Artificial; identical to SEQ ID NO: 208620
  Synthetic oligonucleotide

SEQ ID NO: 619034 - DNA, 55 bp, Artificial; identical to SEQ ID NO: 172966
  Synthetic oligonucleotide

SEQ ID NO: 619035 - DNA, 55 bp, Artificial; identical to SEQ ID NO: 169470
  Synthetic oligonucleotide

SEQ ID NO: 619036 - DNA, 51 bp, Artificial; identical to SEQ ID NO: 199989
  Synthetic oligonucleotide

SEQ ID NO: 619037 - DNA, 60 bp, Artificial; identical to SEQ ID NO: 152530
  Synthetic oligonucleotide

SEQ ID NO: 619038 - DNA, 52 bp, Artificial; identical to SEQ ID NO: 211587
  Synthetic oligonucleotide

SEQ ID NO: 619039 - DNA, 53 bp, Artificial; identical to SEQ ID NO: 153587
  Synthetic oligonucleotide

SEQ ID NO: 619040 - DNA, 55 bp, Artificial; identical to SEQ ID NO: 254890
  Synthetic oligonucleotide

SEQ ID NO: 619041 - DNA, 55 bp, Artificial; identical to SEQ ID NO: 218877
  Synthetic oligonucleotide

SEQ ID NO: 619042 - DNA, 59 bp, Artificial; identical to SEQ ID NO: 178692
  Synthetic oligonucleotide

SEQ ID NO: 619043 - DNA, 50 bp, Artificial; identical to SEQ ID NO: 192224
  Synthetic oligonucleotide

SEQ ID NO: 619044 - DNA, 59 bp, Artificial; identical to SEQ ID NO: 179402
  Synthetic oligonucleotide

SEQ ID NO: 619045 - DNA, 50 bp, Artificial; identical to SEQ ID NO: 150480
  Synthetic oligonucleotide

SEQ ID NO: 619046 - DNA, 50 bp, Artificial; identical to SEQ ID NO: 246882
  Synthetic oligonucleotide

SEQ ID NO: 619047 - DNA, 58 bp, Artificial; identical to SEQ ID NO: 239156
  Synthetic oligonucleotide

SEQ ID NO: 619048 - DNA, 50 bp, Artificial; identical to SEQ ID NO: 152163
  Synthetic oligonucleotide

SEQ ID NO: 619049 - DNA, 51 bp, Artificial; identical to SEQ ID NO: 218381
  Synthetic oligonucleotide

SEQ ID NO: 619050 - DNA, 60 bp, Artificial; identical to SEQ ID NO: 222651
  Synthetic oligonucleotide

SEQ ID NO: 619051 - DNA, 57 bp, Artificial; identical to SEQ ID NO: 166147
  Synthetic oligonucleotide

SEQ ID NO: 619052 - DNA, 55 bp, Artificial; identical to SEQ ID NO: 205592
  Synthetic oligonucleotide

SEQ ID NO: 619053 - DNA, 54 bp, Artificial; identical to SEQ ID NO: 157229
  Synthetic oligonucleotide

SEQ ID NO: 619054 - DNA, 54 bp, Artificial; identical to SEQ ID NO: 149160
  Synthetic oligonucleotide

SEQ ID NO: 619055 - DNA, 55 bp, Artificial; identical to SEQ ID NO: 218836
  Synthetic oligonucleotide

SEQ ID NO: 619056 - DNA, 55 bp, Artificial; identical to SEQ ID NO: 169932
  Synthetic oligonucleotide

SEQ ID NO: 619057 - DNA, 60 bp, Artificial; identical to SEQ ID NO: 147014
  Synthetic oligonucleotide

SEQ ID NO: 619058 - DNA, 53 bp, Artificial; identical to SEQ ID NO: 191177
  Synthetic oligonucleotide

SEQ ID NO: 619059 - DNA, 55 bp, Artificial; identical to SEQ ID NO: 218837
  Synthetic oligonucleotide

SEQ ID NO: 619060 - DNA, 55 bp, Artificial; identical to SEQ ID NO: 142020
  Synthetic oligonucleotide

SEQ ID NO: 619061 - DNA, 55 bp, Artificial; identical to SEQ ID NO: 224591
  Synthetic oligonucleotide

SEQ ID NO: 619062 - DNA, 51 bp, Artificial; identical to SEQ ID NO: 255621
  Synthetic oligonucleotide

SEQ ID NO: 619063 - DNA, 58 bp, Artificial; identical to SEQ ID NO: 178696
  Synthetic oligonucleotide

SEQ ID NO: 619064 - DNA, 59 bp, Artificial; identical to SEQ ID NO: 236514
  Synthetic oligonucleotide

SEQ ID NO: 619065 - DNA, 51 bp, Artificial; identical to SEQ ID NO: 165173
  Synthetic oligonucleotide

SEQ ID NO: 619066 - DNA, 55 bp, Artificial; identical to SEQ ID NO: 160274
  Synthetic oligonucleotide

SEQ ID NO: 619067 - DNA, 60 bp, Artificial; identical to SEQ ID NO: 247224
  Synthetic oligonucleotide

SEQ ID NO: 619068 - DNA, 52 bp, Artificial; identical to SEQ ID NO: 233831
  Synthetic oligonucleotide

SEQ ID NO: 619069 - DNA, 53 bp, Artificial; identical to SEQ ID NO: 185876
  Synthetic oligonucleotide

SEQ ID NO: 619070 - DNA, 53 bp, Artificial; identical to SEQ ID NO: 216632
  Synthetic oligonucleotide

SEQ ID NO: 619071 - DNA, 55 bp, Artificial; identical to SEQ ID NO: 239158
  Synthetic oligonucleotide

SEQ ID NO: 619072 - DNA, 51 bp, Artificial; identical to SEQ ID NO: 210350
  Synthetic oligonucleotide

SEQ ID NO: 619073 - DNA, 52 bp, Artificial; identical to SEQ ID NO: 157529
  Synthetic oligonucleotide

SEQ ID NO: 619074 - DNA, 53 bp, Artificial; identical to SEQ ID NO: 199802
  Synthetic oligonucleotide

SEQ ID NO: 619075 - DNA, 52 bp, Artificial; identical to SEQ ID NO: 211598
  Synthetic oligonucleotide

SEQ ID NO: 619076 - DNA, 55 bp, Artificial; identical to SEQ ID NO: 156723
  Synthetic oligonucleotide

SEQ ID NO: 619077 - DNA, 51 bp, Artificial; identical to SEQ ID NO: 223541
  Synthetic oligonucleotide

SEQ ID NO: 619078 - DNA, 56 bp, Artificial; identical to SEQ ID NO: 201772
  Synthetic oligonucleotide

SEQ ID NO: 619079 - DNA, 53 bp, Artificial; identical to SEQ ID NO: 205678
  Synthetic oligonucleotide

SEQ ID NO: 619080 - DNA, 55 bp, Artificial; identical to SEQ ID NO: 169943
  Synthetic oligonucleotide

SEQ ID NO: 619081 - DNA, 50 bp, Artificial; identical to SEQ ID NO: 187155
  Synthetic oligonucleotide

SEQ ID NO: 619082 - DNA, 58 bp, Artificial; identical to SEQ ID NO: 206929
  Synthetic oligonucleotide

SEQ ID NO: 619083 - DNA, 55 bp, Artificial; identical to SEQ ID NO: 224960
  Synthetic oligonucleotide

SEQ ID NO: 619084 - DNA, 55 bp, Artificial; identical to SEQ ID NO: 254961
  Synthetic oligonucleotide

SEQ ID NO: 619085 - DNA, 55 bp, Artificial; identical to SEQ ID NO: 148865
  Synthetic oligonucleotide

SEQ ID NO: 619086 - DNA, 51 bp, Artificial; identical to SEQ ID NO: 239120
  Synthetic oligonucleotide

SEQ ID NO: 619087 - DNA, 60 bp, Artificial; identical to SEQ ID NO: 200896
  Synthetic oligonucleotide

SEQ ID NO: 619088 - DNA, 55 bp, Artificial; identical to SEQ ID NO: 164509
  Synthetic oligonucleotide

SEQ ID NO: 619089 - DNA, 53 bp, Artificial; identical to SEQ ID NO: 239122
  Synthetic oligonucleotide

SEQ ID NO: 619090 - DNA, 51 bp, Artificial; identical to SEQ ID NO: 152117
  Synthetic oligonucleotide

SEQ ID NO: 619091 - DNA, 50 bp, Artificial; identical to SEQ ID NO: 202591
  Synthetic oligonucleotide

SEQ ID NO: 619092 - DNA, 56 bp, Artificial; identical to SEQ ID NO: 179958
  Synthetic oligonucleotide

SEQ ID NO: 619093 - DNA, 51 bp, Artificial; identical to SEQ ID NO: 155605
  Synthetic oligonucleotide

SEQ ID NO: 619094 - DNA, 55 bp, Artificial; identical to SEQ ID NO: 207454
  Synthetic oligonucleotide

SEQ ID NO: 619095 - DNA, 58 bp, Artificial; identical to SEQ ID NO: 200888
  Synthetic oligonucleotide

SEQ ID NO: 619096 - DNA, 55 bp, Artificial; identical to SEQ ID NO: 148911
  Synthetic oligonucleotide

SEQ ID NO: 619097 - DNA, 50 bp, Artificial; identical to SEQ ID NO: 200885
  Synthetic oligonucleotide

SEQ ID NO: 619098 - DNA, 52 bp, Artificial; identical to SEQ ID NO: 149528
  Synthetic oligonucleotide

SEQ ID NO: 619099 - DNA, 55 bp, Artificial; identical to SEQ ID NO: 194811
  Synthetic oligonucleotide

SEQ ID NO: 619100 - DNA, 50 bp, Artificial; identical to SEQ ID NO: 241487
  Synthetic oligonucleotide

SEQ ID NO: 619101 - DNA, 54 bp, Artificial; identical to SEQ ID NO: 203861
  Synthetic oligonucleotide

SEQ ID NO: 619102 - DNA, 55 bp, Artificial; identical to SEQ ID NO: 182747
  Synthetic oligonucleotide

SEQ ID NO: 619103 - DNA, 57 bp, Artificial; identical to SEQ ID NO: 179646
  Synthetic oligonucleotide

SEQ ID NO: 619104 - DNA, 53 bp, Artificial; identical to SEQ ID NO: 209621
  Synthetic oligonucleotide

SEQ ID NO: 619105 - DNA, 60 bp, Artificial; identical to SEQ ID NO: 203350
  Synthetic oligonucleotide

SEQ ID NO: 619106 - DNA, 50 bp, Artificial; identical to SEQ ID NO: 165605
  Synthetic oligonucleotide

SEQ ID NO: 619107 - DNA, 58 bp, Artificial; identical to SEQ ID NO: 201167
  Synthetic oligonucleotide

SEQ ID NO: 619108 - DNA, 57 bp, Artificial; identical to SEQ ID NO: 167010
  Synthetic oligonucleotide

SEQ ID NO: 619109 - DNA, 53 bp, Artificial; identical to SEQ ID NO: 199583
  Synthetic oligonucleotide

SEQ ID NO: 619110 - DNA, 50 bp, Artificial; identical to SEQ ID NO: 206735
  Synthetic oligonucleotide

SEQ ID NO: 619111 - DNA, 51 bp, Artificial; identical to SEQ ID NO: 243748
  Synthetic oligonucleotide

SEQ ID NO: 619112 - DNA, 53 bp, Artificial; identical to SEQ ID NO: 243750
  Synthetic oligonucleotide

SEQ ID NO: 619113 - DNA, 53 bp, Artificial; identical to SEQ ID NO: 243057
  Synthetic oligonucleotide

SEQ ID NO: 619114 - DNA, 53 bp, Artificial; identical to SEQ ID NO: 240765
  Synthetic oligonucleotide

SEQ ID NO: 619115 - DNA, 53 bp, Artificial; identical to SEQ ID NO: 223609
  Synthetic oligonucleotide

SEQ ID NO: 619116 - DNA, 50 bp, Artificial; identical to SEQ ID NO: 145145
  Synthetic oligonucleotide

SEQ ID NO: 619117 - DNA, 58 bp, Artificial; identical to SEQ ID NO: 203356
  Synthetic oligonucleotide

SEQ ID NO: 619118 - DNA, 58 bp, Artificial; identical to SEQ ID NO: 215361
  Synthetic oligonucleotide

SEQ ID NO: 619119 - DNA, 56 bp, Artificial; identical to SEQ ID NO: 194581
  Synthetic oligonucleotide

SEQ ID NO: 619120 - DNA, 60 bp, Artificial; identical to SEQ ID NO: 206926
  Synthetic oligonucleotide

SEQ ID NO: 619121 - DNA, 54 bp, Artificial; identical to SEQ ID NO: 157216
  Synthetic oligonucleotide

SEQ ID NO: 619122 - DNA, 58 bp, Artificial; identical to SEQ ID NO: 178662
  Synthetic oligonucleotide

SEQ ID NO: 619123 - DNA, 56 bp, Artificial; identical to SEQ ID NO: 243828
  Synthetic oligonucleotide

SEQ ID NO: 619124 - DNA, 60 bp, Artificial; identical to SEQ ID NO: 239129
  Synthetic oligonucleotide

SEQ ID NO: 619125 - DNA, 52 bp, Artificial; identical to SEQ ID NO: 149533
  Synthetic oligonucleotide

SEQ ID NO: 619126 - DNA, 55 bp, Artificial; identical to SEQ ID NO: 249977
  Synthetic oligonucleotide

SEQ ID NO: 619127 - DNA, 53 bp, Artificial; identical to SEQ ID NO: 234254
  Synthetic oligonucleotide

SEQ ID NO: 619128 - DNA, 55 bp, Artificial; identical to SEQ ID NO: 178664
  Synthetic oligonucleotide

SEQ ID NO: 619129 - DNA, 52 bp, Artificial; identical to SEQ ID NO: 146445
  Synthetic oligonucleotide

SEQ ID NO: 619130 - DNA, 51 bp, Artificial; identical to SEQ ID NO: 141363
  Synthetic oligonucleotide

SEQ ID NO: 619131 - DNA, 54 bp, Artificial; identical to SEQ ID NO: 192028
  Synthetic oligonucleotide

SEQ ID NO: 619132 - DNA, 55 bp, Artificial; identical to SEQ ID NO: 164508
  Synthetic oligonucleotide

SEQ ID NO: 619133 - DNA, 59 bp, Artificial; identical to SEQ ID NO: 201916
  Synthetic oligonucleotide

SEQ ID NO: 619134 - DNA, 55 bp, Artificial; identical to SEQ ID NO: 254924
  Synthetic oligonucleotide

SEQ ID NO: 619135 - DNA, 59 bp, Artificial; identical to SEQ ID NO: 151130
  Synthetic oligonucleotide

SEQ ID NO: 619136 - DNA, 53 bp, Artificial; identical to SEQ ID NO: 217195
  Synthetic oligonucleotide

SEQ ID NO: 619137 - DNA, 55 bp, Artificial; identical to SEQ ID NO: 167007
  Synthetic oligonucleotide

SEQ ID NO: 619138 - DNA, 56 bp, Artificial; identical to SEQ ID NO: 169954
  Synthetic oligonucleotide

SEQ ID NO: 619139 - DNA, 53 bp, Artificial; identical to SEQ ID NO: 240528
  Synthetic oligonucleotide

SEQ ID NO: 619140 - DNA, 55 bp, Artificial; identical to SEQ ID NO: 156726
  Synthetic oligonucleotide

SEQ ID NO: 619141 - DNA, 55 bp, Artificial; identical to SEQ ID NO: 182764
  Synthetic oligonucleotide

SEQ ID NO: 619142 - DNA, 52 bp, Artificial; identical to SEQ ID NO: 212999
  Synthetic oligonucleotide

SEQ ID NO: 619143 - DNA, 53 bp, Artificial; identical to SEQ ID NO: 152531
  Synthetic oligonucleotide

SEQ ID NO: 619144 - DNA, 54 bp, Artificial; identical to SEQ ID NO: 174795
  Synthetic oligonucleotide

SEQ ID NO: 619145 - DNA, 55 bp, Artificial; identical to SEQ ID NO: 261585
  Synthetic oligonucleotide

SEQ ID NO: 619146 - DNA, 55 bp, Artificial; identical to SEQ ID NO: 182634
  Synthetic oligonucleotide

SEQ ID NO: 619147 - DNA, 55 bp, Artificial; identical to SEQ ID NO: 199312
  Synthetic oligonucleotide

SEQ ID NO: 619148 - DNA, 52 bp, Artificial; identical to SEQ ID NO: 170140
  Synthetic oligonucleotide

SEQ ID NO: 619149 - DNA, 60 bp, Artificial; identical to SEQ ID NO: 192260
  Synthetic oligonucleotide

SEQ ID NO: 619150 - DNA, 55 bp, Artificial; identical to SEQ ID NO: 154151
  Synthetic oligonucleotide

SEQ ID NO: 619151 - DNA, 51 bp, Artificial; identical to SEQ ID NO: 186632
  Synthetic oligonucleotide

SEQ ID NO: 619152 - DNA, 53 bp, Artificial; identical to SEQ ID NO: 185746
  Synthetic oligonucleotide

SEQ ID NO: 619153 - DNA, 55 bp, Artificial; identical to SEQ ID NO: 143747
  Synthetic oligonucleotide

SEQ ID NO: 619154 - DNA, 52 bp, Artificial; identical to SEQ ID NO: 149507
  Synthetic oligonucleotide

SEQ ID NO: 619155 - DNA, 55 bp, Artificial; identical to SEQ ID NO: 178675
  Synthetic oligonucleotide

SEQ ID NO: 619156 - DNA, 52 bp, Artificial; identical to SEQ ID NO: 167096
  Synthetic oligonucleotide

SEQ ID NO: 619157 - DNA, 51 bp, Artificial; identical to SEQ ID NO: 165161
  Synthetic oligonucleotide

SEQ ID NO: 619158 - DNA, 54 bp, Artificial; identical to SEQ ID NO: 174728
  Synthetic oligonucleotide

SEQ ID NO: 619159 - DNA, 53 bp, Artificial; identical to SEQ ID NO: 247837
  Synthetic oligonucleotide

SEQ ID NO: 619160 - DNA, 51 bp, Artificial; identical to SEQ ID NO: 218382
  Synthetic oligonucleotide

SEQ ID NO: 619161 - DNA, 50 bp, Artificial; identical to SEQ ID NO: 239135
  Synthetic oligonucleotide

SEQ ID NO: 619162 - DNA, 51 bp, Artificial; identical to SEQ ID NO: 255614
  Synthetic oligonucleotide

SEQ ID NO: 619163 - DNA, 55 bp, Artificial; identical to SEQ ID NO: 247736
  Synthetic oligonucleotide

SEQ ID NO: 619164 - DNA, 53 bp, Artificial; identical to SEQ ID NO: 202975
  Synthetic oligonucleotide

SEQ ID NO: 619165 - DNA, 53 bp, Artificial; identical to SEQ ID NO: 185751
  Synthetic oligonucleotide

SEQ ID NO: 619166 - DNA, 54 bp, Artificial; identical to SEQ ID NO: 143695
  Synthetic oligonucleotide

SEQ ID NO: 619167 - DNA, 55 bp, Artificial; identical to SEQ ID NO: 149090
  Synthetic oligonucleotide

SEQ ID NO: 619168 - DNA, 55 bp, Artificial; identical to SEQ ID NO: 199449
  Synthetic oligonucleotide

SEQ ID NO: 619169 - DNA, 53 bp, Artificial; identical to SEQ ID NO: 207742
  Synthetic oligonucleotide

SEQ ID NO: 619170 - DNA, 60 bp, Artificial; identical to SEQ ID NO: 201914
  Synthetic oligonucleotide

SEQ ID NO: 619171 - DNA, 60 bp, Artificial; identical to SEQ ID NO: 151139
  Synthetic oligonucleotide

SEQ ID NO: 619172 - DNA, 50 bp, Artificial; identical to SEQ ID NO: 210777
  Synthetic oligonucleotide

SEQ ID NO: 619173 - DNA, 53 bp, Artificial; identical to SEQ ID NO: 164874
  Synthetic oligonucleotide

SEQ ID NO: 619174 - DNA, 58 bp, Artificial; identical to SEQ ID NO: 213025
  Synthetic oligonucleotide

SEQ ID NO: 619175 - DNA, 54 bp, Artificial; identical to SEQ ID NO: 249515
  Synthetic oligonucleotide

SEQ ID NO: 619176 - DNA, 53 bp, Artificial; identical to SEQ ID NO: 199486
  Synthetic oligonucleotide

SEQ ID NO: 619177 - DNA, 58 bp, Artificial; identical to SEQ ID NO: 151140
  Synthetic oligonucleotide

SEQ ID NO: 619178 - DNA, 55 bp, Artificial; identical to SEQ ID NO: 194810
  Synthetic oligonucleotide

SEQ ID NO: 619179 - DNA, 52 bp, Artificial; identical to SEQ ID NO: 255499
  Synthetic oligonucleotide

SEQ ID NO: 619180 - DNA, 59 bp, Artificial; identical to SEQ ID NO: 200858
  Synthetic oligonucleotide

SEQ ID NO: 619181 - DNA, 55 bp, Artificial; identical to SEQ ID NO: 166106
  Synthetic oligonucleotide

SEQ ID NO: 619182 - DNA, 55 bp, Artificial; identical to SEQ ID NO: 166846
  Synthetic oligonucleotide

SEQ ID NO: 619183 - DNA, 55 bp, Artificial; identical to SEQ ID NO: 182617
  Synthetic oligonucleotide

SEQ ID NO: 619184 - DNA, 55 bp, Artificial; identical to SEQ ID NO: 194807
  Synthetic oligonucleotide

SEQ ID NO: 619185 - DNA, 53 bp, Artificial; identical to SEQ ID NO: 191741
  Synthetic oligonucleotide

SEQ ID NO: 619186 - DNA, 56 bp, Artificial; identical to SEQ ID NO: 265906
  Synthetic oligonucleotide

SEQ ID NO: 619187 - DNA, 57 bp, Artificial; identical to SEQ ID NO: 196904
  Synthetic oligonucleotide

SEQ ID NO: 619188 - DNA, 55 bp, Artificial; identical to SEQ ID NO: 168785
  Synthetic oligonucleotide

SEQ ID NO: 619189 - DNA, 60 bp, Artificial; identical to SEQ ID NO: 239136
  Synthetic oligonucleotide

SEQ ID NO: 619190 - DNA, 60 bp, Artificial; identical to SEQ ID NO: 178947
  Synthetic oligonucleotide

SEQ ID NO: 619191 - DNA, 53 bp, Artificial; identical to SEQ ID NO: 220775
  Synthetic oligonucleotide

SEQ ID NO: 619192 - DNA, 51 bp, Artificial; identical to SEQ ID NO: 186643
  Synthetic oligonucleotide

SEQ ID NO: 619193 - DNA, 55 bp, Artificial; identical to SEQ ID NO: 238377
  Synthetic oligonucleotide

SEQ ID NO: 619194 - DNA, 53 bp, Artificial; identical to SEQ ID NO: 141861
  Synthetic oligonucleotide

SEQ ID NO: 619195 - DNA, 60 bp, Artificial; identical to SEQ ID NO: 178950
  Synthetic oligonucleotide

SEQ ID NO: 619196 - DNA, 54 bp, Artificial; identical to SEQ ID NO: 174803
  Synthetic oligonucleotide

SEQ ID NO: 619197 - DNA, 51 bp, Artificial; identical to SEQ ID NO: 161356
  Synthetic oligonucleotide

SEQ ID NO: 619198 - DNA, 50 bp, Artificial; identical to SEQ ID NO: 150272
  Synthetic oligonucleotide

SEQ ID NO: 619199 - DNA, 55 bp, Artificial; identical to SEQ ID NO: 148973
  Synthetic oligonucleotide

SEQ ID NO: 619200 - DNA, 51 bp, Artificial; identical to SEQ ID NO: 200205
  Synthetic oligonucleotide

SEQ ID NO: 619201 - DNA, 50 bp, Artificial; identical to SEQ ID NO: 151243
  Synthetic oligonucleotide

SEQ ID NO: 619202 - DNA, 54 bp, Artificial; identical to SEQ ID NO: 167047
  Synthetic oligonucleotide

SEQ ID NO: 619203 - DNA, 52 bp, Artificial; identical to SEQ ID NO: 237073
  Synthetic oligonucleotide

SEQ ID NO: 619204 - DNA, 55 bp, Artificial; identical to SEQ ID NO: 244270
  Synthetic oligonucleotide

SEQ ID NO: 619205 - DNA, 51 bp, Artificial; identical to SEQ ID NO: 154656
  Synthetic oligonucleotide

SEQ ID NO: 619206 - DNA, 55 bp, Artificial; identical to SEQ ID NO: 197172
  Synthetic oligonucleotide

SEQ ID NO: 619207 - DNA, 54 bp, Artificial; identical to SEQ ID NO: 247123
  Synthetic oligonucleotide

SEQ ID NO: 619208 - DNA, 55 bp, Artificial; identical to SEQ ID NO: 238367
  Synthetic oligonucleotide

SEQ ID NO: 619209 - DNA, 58 bp, Artificial; identical to SEQ ID NO: 142719
  Synthetic oligonucleotide

SEQ ID NO: 619210 - DNA, 60 bp, Artificial; identical to SEQ ID NO: 168767
  Synthetic oligonucleotide

SEQ ID NO: 619211 - DNA, 53 bp, Artificial; identical to SEQ ID NO: 222666
  Synthetic oligonucleotide

SEQ ID NO: 619212 - DNA, 60 bp, Artificial; identical to SEQ ID NO: 161663
  Synthetic oligonucleotide

SEQ ID NO: 619213 - DNA, 51 bp, Artificial; identical to SEQ ID NO: 241025
  Synthetic oligonucleotide

SEQ ID NO: 619214 - DNA, 55 bp, Artificial; identical to SEQ ID NO: 148942
  Synthetic oligonucleotide

SEQ ID NO: 619215 - DNA, 52 bp, Artificial; identical to SEQ ID NO: 188115
  Synthetic oligonucleotide

SEQ ID NO: 619216 - DNA, 55 bp, Artificial; identical to SEQ ID NO: 148472
  Synthetic oligonucleotide

SEQ ID NO: 619217 - DNA, 52 bp, Artificial; identical to SEQ ID NO: 193763
  Synthetic oligonucleotide

SEQ ID NO: 619218 - DNA, 51 bp, Artificial; identical to SEQ ID NO: 170188
  Synthetic oligonucleotide

SEQ ID NO: 619219 - DNA, 51 bp, Artificial; identical to SEQ ID NO: 187054
  Synthetic oligonucleotide

SEQ ID NO: 619220 - DNA, 54 bp, Artificial; identical to SEQ ID NO: 255165
  Synthetic oligonucleotide

SEQ ID NO: 619221 - DNA, 54 bp, Artificial; identical to SEQ ID NO: 246102
  Synthetic oligonucleotide

SEQ ID NO: 619222 - DNA, 56 bp, Artificial; identical to SEQ ID NO: 147315
  Synthetic oligonucleotide

SEQ ID NO: 619223 - DNA, 55 bp, Artificial; identical to SEQ ID NO: 254894
  Synthetic oligonucleotide

SEQ ID NO: 619224 - DNA, 54 bp, Artificial; identical to SEQ ID NO: 209571
  Synthetic oligonucleotide

SEQ ID NO: 619225 - DNA, 50 bp, Artificial; identical to SEQ ID NO: 165527
  Synthetic oligonucleotide

SEQ ID NO: 619226 - DNA, 55 bp, Artificial; identical to SEQ ID NO: 172964
  Synthetic oligonucleotide

SEQ ID NO: 619227 - DNA, 51 bp, Artificial; identical to SEQ ID NO: 243366
  Synthetic oligonucleotide

SEQ ID NO: 619228 - DNA, 60 bp, Artificial; identical to SEQ ID NO: 238998
  Synthetic oligonucleotide

SEQ ID NO: 619229 - DNA, 51 bp, Artificial; identical to SEQ ID NO: 178954
  Synthetic oligonucleotide

SEQ ID NO: 619230 - DNA, 56 bp, Artificial; identical to SEQ ID NO: 247578
  Synthetic oligonucleotide

SEQ ID NO: 619231 - DNA, 55 bp, Artificial; identical to SEQ ID NO: 168777
  Synthetic oligonucleotide

SEQ ID NO: 619232 - DNA, 54 bp, Artificial; identical to SEQ ID NO: 185172
  Synthetic oligonucleotide

SEQ ID NO: 619233 - DNA, 57 bp, Artificial; identical to SEQ ID NO: 178957
  Synthetic oligonucleotide

SEQ ID NO: 619234 - DNA, 55 bp, Artificial; identical to SEQ ID NO: 208609
  Synthetic oligonucleotide

SEQ ID NO: 619235 - DNA, 55 bp, Artificial; identical to SEQ ID NO: 155431
  Synthetic oligonucleotide

SEQ ID NO: 619236 - DNA, 54 bp, Artificial; identical to SEQ ID NO: 203865
  Synthetic oligonucleotide

SEQ ID NO: 619237 - DNA, 50 bp, Artificial; identical to SEQ ID NO: 155629
  Synthetic oligonucleotide

SEQ ID NO: 619238 - DNA, 50 bp, Artificial; identical to SEQ ID NO: 241472
  Synthetic oligonucleotide

SEQ ID NO: 619239 - DNA, 53 bp, Artificial; identical to SEQ ID NO: 178962
  Synthetic oligonucleotide

SEQ ID NO: 619240 - DNA, 53 bp, Artificial; identical to SEQ ID NO: 185714
  Synthetic oligonucleotide

SEQ ID NO: 619241 - DNA, 55 bp, Artificial; identical to SEQ ID NO: 240339
  Synthetic oligonucleotide

SEQ ID NO: 619242 - DNA, 55 bp, Artificial; identical to SEQ ID NO: 152356
  Synthetic oligonucleotide

SEQ ID NO: 619243 - DNA, 55 bp, Artificial; identical to SEQ ID NO: 191082
  Synthetic oligonucleotide

SEQ ID NO: 619244 - DNA, 53 bp, Artificial; identical to SEQ ID NO: 258096
  Synthetic oligonucleotide

SEQ ID NO: 619245 - DNA, 52 bp, Artificial; identical to SEQ ID NO: 245315
  Synthetic oligonucleotide

SEQ ID NO: 619246 - DNA, 50 bp, Artificial; identical to SEQ ID NO: 209811
  Synthetic oligonucleotide

SEQ ID NO: 619247 - DNA, 52 bp, Artificial; identical to SEQ ID NO: 203941
  Synthetic oligonucleotide

SEQ ID NO: 619248 - DNA, 59 bp, Artificial; identical to SEQ ID NO: 254167
  Synthetic oligonucleotide

SEQ ID NO: 619249 - DNA, 51 bp, Artificial; identical to SEQ ID NO: 186717
  Synthetic oligonucleotide

SEQ ID NO: 619250 - DNA, 50 bp, Artificial; identical to SEQ ID NO: 202590
  Synthetic oligonucleotide

SEQ ID NO: 619251 - DNA, 58 bp, Artificial; identical to SEQ ID NO: 200848
  Synthetic oligonucleotide

SEQ ID NO: 619252 - DNA, 55 bp, Artificial; identical to SEQ ID NO: 182690
  Synthetic oligonucleotide

SEQ ID NO: 619253 - DNA, 56 bp, Artificial; identical to SEQ ID NO: 253142
  Synthetic oligonucleotide

SEQ ID NO: 619254 - DNA, 55 bp, Artificial; identical to SEQ ID NO: 200844
  Synthetic oligonucleotide

SEQ ID NO: 619255 - DNA, 60 bp, Artificial; identical to SEQ ID NO: 238992
  Synthetic oligonucleotide

SEQ ID NO: 619256 - DNA, 55 bp, Artificial; identical to SEQ ID NO: 143776
  Synthetic oligonucleotide

SEQ ID NO: 619257 - DNA, 55 bp, Artificial; identical to SEQ ID NO: 156728
  Synthetic oligonucleotide

SEQ ID NO: 619258 - DNA, 51 bp, Artificial; identical to SEQ ID NO: 206524
  Synthetic oligonucleotide

SEQ ID NO: 619259 - DNA, 54 bp, Artificial; identical to SEQ ID NO: 203870
  Synthetic oligonucleotide

SEQ ID NO: 619260 - DNA, 55 bp, Artificial; identical to SEQ ID NO: 217896
  Synthetic oligonucleotide

SEQ ID NO: 619261 - DNA, 55 bp, Artificial; identical to SEQ ID NO: 169426
  Synthetic oligonucleotide

SEQ ID NO: 619262 - DNA, 55 bp, Artificial; identical to SEQ ID NO: 156729
  Synthetic oligonucleotide

SEQ ID NO: 619263 - DNA, 51 bp, Artificial; identical to SEQ ID NO: 165158
  Synthetic oligonucleotide

SEQ ID NO: 619264 - DNA, 60 bp, Artificial; identical to SEQ ID NO: 221167
  Synthetic oligonucleotide

SEQ ID NO: 619265 - DNA, 58 bp, Artificial; identical to SEQ ID NO: 224403
  Synthetic oligonucleotide

SEQ ID NO: 619266 - DNA, 50 bp, Artificial; identical to SEQ ID NO: 146520
  Synthetic oligonucleotide

SEQ ID NO: 619267 - DNA, 55 bp, Artificial; identical to SEQ ID NO: 166820
  Synthetic oligonucleotide

SEQ ID NO: 619268 - DNA, 55 bp, Artificial; identical to SEQ ID NO: 156730
  Synthetic oligonucleotide

SEQ ID NO: 619269 - DNA, 56 bp, Artificial; identical to SEQ ID NO: 203769
  Synthetic oligonucleotide

SEQ ID NO: 619270 - DNA, 54 bp, Artificial; identical to SEQ ID NO: 182691
  Synthetic oligonucleotide

SEQ ID NO: 619271 - DNA, 57 bp, Artificial; identical to SEQ ID NO: 203758
  Synthetic oligonucleotide

SEQ ID NO: 619272 - DNA, 60 bp, Artificial; identical to SEQ ID NO: 254200
  Synthetic oligonucleotide

SEQ ID NO: 619273 - DNA, 60 bp, Artificial; identical to SEQ ID NO: 178917
  Synthetic oligonucleotide

SEQ ID NO: 619274 - DNA, 55 bp, Artificial; identical to SEQ ID NO: 161867
  Synthetic oligonucleotide

SEQ ID NO: 619275 - DNA, 51 bp, Artificial; identical to SEQ ID NO: 186735
  Synthetic oligonucleotide

SEQ ID NO: 619276 - DNA, 59 bp, Artificial; identical to SEQ ID NO: 247446
  Synthetic oligonucleotide

SEQ ID NO: 619277 - DNA, 54 bp, Artificial; identical to SEQ ID NO: 153553
  Synthetic oligonucleotide

SEQ ID NO: 619278 - DNA, 55 bp, Artificial; identical to SEQ ID NO: 205590
  Synthetic oligonucleotide

SEQ ID NO: 619279 - DNA, 54 bp, Artificial; identical to SEQ ID NO: 249251
  Synthetic oligonucleotide

SEQ ID NO: 619280 - DNA, 55 bp, Artificial; identical to SEQ ID NO: 212860
  Synthetic oligonucleotide

SEQ ID NO: 619281 - DNA, 59 bp, Artificial; identical to SEQ ID NO: 156631
  Synthetic oligonucleotide

SEQ ID NO: 619282 - DNA, 51 bp, Artificial; identical to SEQ ID NO: 162367
  Synthetic oligonucleotide

SEQ ID NO: 619283 - DNA, 55 bp, Artificial; identical to SEQ ID NO: 161271
  Synthetic oligonucleotide

SEQ ID NO: 619284 - DNA, 55 bp, Artificial; identical to SEQ ID NO: 245327
  Synthetic oligonucleotide

SEQ ID NO: 619285 - DNA, 55 bp, Artificial; identical to SEQ ID NO: 178922
  Synthetic oligonucleotide

SEQ ID NO: 619286 - DNA, 55 bp, Artificial; identical to SEQ ID NO: 206962
  Synthetic oligonucleotide

SEQ ID NO: 619287 - DNA, 58 bp, Artificial; identical to SEQ ID NO: 257463
  Synthetic oligonucleotide

SEQ ID NO: 619288 - DNA, 50 bp, Artificial; identical to SEQ ID NO: 237069
  Synthetic oligonucleotide

SEQ ID NO: 619289 - DNA, 51 bp, Artificial; identical to SEQ ID NO: 151149
  Synthetic oligonucleotide

SEQ ID NO: 619290 - DNA, 55 bp, Artificial; identical to SEQ ID NO: 167300
  Synthetic oligonucleotide

SEQ ID NO: 619291 - DNA, 60 bp, Artificial; identical to SEQ ID NO: 201472
  Synthetic oligonucleotide

SEQ ID NO: 619292 - DNA, 54 bp, Artificial; identical to SEQ ID NO: 191150
  Synthetic oligonucleotide

SEQ ID NO: 619293 - DNA, 60 bp, Artificial; identical to SEQ ID NO: 266044
  Synthetic oligonucleotide

SEQ ID NO: 619294 - DNA, 55 bp, Artificial; identical to SEQ ID NO: 161272
  Synthetic oligonucleotide

SEQ ID NO: 619295 - DNA, 55 bp, Artificial; identical to SEQ ID NO: 187834
  Synthetic oligonucleotide

SEQ ID NO: 619296 - DNA, 51 bp, Artificial; identical to SEQ ID NO: 243338
  Synthetic oligonucleotide

SEQ ID NO: 619297 - DNA, 58 bp, Artificial; identical to SEQ ID NO: 151151
  Synthetic oligonucleotide

SEQ ID NO: 619298 - DNA, 53 bp, Artificial; identical to SEQ ID NO: 153438
  Synthetic oligonucleotide

SEQ ID NO: 619299 - DNA, 55 bp, Artificial; identical to SEQ ID NO: 242607
  Synthetic oligonucleotide

SEQ ID NO: 619300 - DNA, 60 bp, Artificial; identical to SEQ ID NO: 178924
  Synthetic oligonucleotide

SEQ ID NO: 619301 - DNA, 52 bp, Artificial; identical to SEQ ID NO: 189166
  Synthetic oligonucleotide

SEQ ID NO: 619302 - DNA, 55 bp, Artificial; identical to SEQ ID NO: 164507
  Synthetic oligonucleotide

SEQ ID NO: 619303 - DNA, 55 bp, Artificial; identical to SEQ ID NO: 203708
  Synthetic oligonucleotide

SEQ ID NO: 619304 - DNA, 51 bp, Artificial; identical to SEQ ID NO: 149734
  Synthetic oligonucleotide

SEQ ID NO: 619305 - DNA, 56 bp, Artificial; identical to SEQ ID NO: 212522
  Synthetic oligonucleotide

SEQ ID NO: 619306 - DNA, 56 bp, Artificial; identical to SEQ ID NO: 238989
  Synthetic oligonucleotide

SEQ ID NO: 619307 - DNA, 60 bp, Artificial; identical to SEQ ID NO: 254223
  Synthetic oligonucleotide

SEQ ID NO: 619308 - DNA, 54 bp, Artificial; identical to SEQ ID NO: 255174
  Synthetic oligonucleotide

SEQ ID NO: 619309 - DNA, 55 bp, Artificial; identical to SEQ ID NO: 224798
  Synthetic oligonucleotide

SEQ ID NO: 619310 - DNA, 55 bp, Artificial; identical to SEQ ID NO: 156700
  Synthetic oligonucleotide

SEQ ID NO: 619311 - DNA, 52 bp, Artificial; identical to SEQ ID NO: 189167
  Synthetic oligonucleotide

SEQ ID NO: 619312 - DNA, 53 bp, Artificial; identical to SEQ ID NO: 164873
  Synthetic oligonucleotide

SEQ ID NO: 619313 - DNA, 54 bp, Artificial; identical to SEQ ID NO: 187296
  Synthetic oligonucleotide

SEQ ID NO: 619314 - DNA, 51 bp, Artificial; identical to SEQ ID NO: 186696
  Synthetic oligonucleotide

SEQ ID NO: 619315 - DNA, 55 bp, Artificial; identical to SEQ ID NO: 151778
  Synthetic oligonucleotide

SEQ ID NO: 619316 - DNA, 55 bp, Artificial; identical to SEQ ID NO: 245282
  Synthetic oligonucleotide

SEQ ID NO: 619317 - DNA, 52 bp, Artificial; identical to SEQ ID NO: 200968
  Synthetic oligonucleotide

SEQ ID NO: 619318 - DNA, 52 bp, Artificial; identical to SEQ ID NO: 153647
  Synthetic oligonucleotide

SEQ ID NO: 619319 - DNA, 57 bp, Artificial; identical to SEQ ID NO: 169988
  Synthetic oligonucleotide

SEQ ID NO: 619320 - DNA, 56 bp, Artificial; identical to SEQ ID NO: 192253
  Synthetic oligonucleotide

SEQ ID NO: 619321 - DNA, 52 bp, Artificial; identical to SEQ ID NO: 219489
  Synthetic oligonucleotide

SEQ ID NO: 619322 - DNA, 52 bp, Artificial; identical to SEQ ID NO: 238987
  Synthetic oligonucleotide

SEQ ID NO: 619323 - DNA, 51 bp, Artificial; identical to SEQ ID NO: 246558
  Synthetic oligonucleotide

SEQ ID NO: 619324 - DNA, 54 bp, Artificial; identical to SEQ ID NO: 246100
  Synthetic oligonucleotide

SEQ ID NO: 619325 - DNA, 60 bp, Artificial; identical to SEQ ID NO: 152955
  Synthetic oligonucleotide

SEQ ID NO: 619326 - DNA, 57 bp, Artificial; identical to SEQ ID NO: 243834
  Synthetic oligonucleotide

SEQ ID NO: 619327 - DNA, 60 bp, Artificial; identical to SEQ ID NO: 194492
  Synthetic oligonucleotide

SEQ ID NO: 619328 - DNA, 57 bp, Artificial; identical to SEQ ID NO: 242493
  Synthetic oligonucleotide

SEQ ID NO: 619329 - DNA, 50 bp, Artificial; identical to SEQ ID NO: 167910
  Synthetic oligonucleotide

SEQ ID NO: 619330 - DNA, 50 bp, Artificial; identical to SEQ ID NO: 258292
  Synthetic oligonucleotide

SEQ ID NO: 619331 - DNA, 51 bp, Artificial; identical to SEQ ID NO: 253116
  Synthetic oligonucleotide

SEQ ID NO: 619332 - DNA, 54 bp, Artificial; identical to SEQ ID NO: 240569
  Synthetic oligonucleotide

SEQ ID NO: 619333 - DNA, 55 bp, Artificial; identical to SEQ ID NO: 202280
  Synthetic oligonucleotide

SEQ ID NO: 619334 - DNA, 56 bp, Artificial; identical to SEQ ID NO: 247109
  Synthetic oligonucleotide

SEQ ID NO: 619335 - DNA, 55 bp, Artificial; identical to SEQ ID NO: 194761
  Synthetic oligonucleotide

SEQ ID NO: 619336 - DNA, 51 bp, Artificial; identical to SEQ ID NO: 157723
  Synthetic oligonucleotide

SEQ ID NO: 619337 - DNA, 50 bp, Artificial; identical to SEQ ID NO: 256019
  Synthetic oligonucleotide

SEQ ID NO: 619338 - DNA, 53 bp, Artificial; identical to SEQ ID NO: 188093
  Synthetic oligonucleotide

SEQ ID NO: 619339 - DNA, 53 bp, Artificial; identical to SEQ ID NO: 157378
  Synthetic oligonucleotide

SEQ ID NO: 619340 - DNA, 55 bp, Artificial; identical to SEQ ID NO: 240349
  Synthetic oligonucleotide

SEQ ID NO: 619341 - DNA, 56 bp, Artificial; identical to SEQ ID NO: 187383
  Synthetic oligonucleotide

SEQ ID NO: 619342 - DNA, 53 bp, Artificial; identical to SEQ ID NO: 249657
  Synthetic oligonucleotide

SEQ ID NO: 619343 - DNA, 60 bp, Artificial; identical to SEQ ID NO: 238983
  Synthetic oligonucleotide

SEQ ID NO: 619344 - DNA, 60 bp, Artificial; identical to SEQ ID NO: 257105
  Synthetic oligonucleotide

SEQ ID NO: 619345 - DNA, 55 bp, Artificial; identical to SEQ ID NO: 146313
  Synthetic oligonucleotide

SEQ ID NO: 619346 - DNA, 53 bp, Artificial; identical to SEQ ID NO: 197508
  Synthetic oligonucleotide

SEQ ID NO: 619347 - DNA, 53 bp, Artificial; identical to SEQ ID NO: 155210
  Synthetic oligonucleotide

SEQ ID NO: 619348 - DNA, 55 bp, Artificial; identical to SEQ ID NO: 253800
  Synthetic oligonucleotide

SEQ ID NO: 619349 - DNA, 51 bp, Artificial; identical to SEQ ID NO: 200116
  Synthetic oligonucleotide

SEQ ID NO: 619350 - DNA, 52 bp, Artificial; identical to SEQ ID NO: 193605
  Synthetic oligonucleotide

SEQ ID NO: 619351 - DNA, 51 bp, Artificial; identical to SEQ ID NO: 165342
  Synthetic oligonucleotide

SEQ ID NO: 619352 - DNA, 55 bp, Artificial; identical to SEQ ID NO: 257965
  Synthetic oligonucleotide

SEQ ID NO: 619353 - DNA, 51 bp, Artificial; identical to SEQ ID NO: 243383
  Synthetic oligonucleotide

SEQ ID NO: 619354 - DNA, 56 bp, Artificial; identical to SEQ ID NO: 247622
  Synthetic oligonucleotide

SEQ ID NO: 619355 - DNA, 60 bp, Artificial; identical to SEQ ID NO: 151105
  Synthetic oligonucleotide

SEQ ID NO: 619356 - DNA, 55 bp, Artificial; identical to SEQ ID NO: 162157
  Synthetic oligonucleotide

SEQ ID NO: 619357 - DNA, 60 bp, Artificial; identical to SEQ ID NO: 224314
  Synthetic oligonucleotide

SEQ ID NO: 619358 - DNA, 51 bp, Artificial; identical to SEQ ID NO: 152624
  Synthetic oligonucleotide

SEQ ID NO: 619359 - DNA, 52 bp, Artificial; identical to SEQ ID NO: 246443
  Synthetic oligonucleotide

SEQ ID NO: 619360 - DNA, 55 bp, Artificial; identical to SEQ ID NO: 194760
  Synthetic oligonucleotide

SEQ ID NO: 619361 - DNA, 57 bp, Artificial; identical to SEQ ID NO: 151106
  Synthetic oligonucleotide

SEQ ID NO: 619362 - DNA, 53 bp, Artificial; identical to SEQ ID NO: 192087
  Synthetic oligonucleotide

SEQ ID NO: 619363 - DNA, 55 bp, Artificial; identical to SEQ ID NO: 245289
  Synthetic oligonucleotide

SEQ ID NO: 619364 - DNA, 58 bp, Artificial; identical to SEQ ID NO: 200965
  Synthetic oligonucleotide

SEQ ID NO: 619365 - DNA, 57 bp, Artificial; identical to SEQ ID NO: 151108
  Synthetic oligonucleotide

SEQ ID NO: 619366 - DNA, 53 bp, Artificial; identical to SEQ ID NO: 240769
  Synthetic oligonucleotide

SEQ ID NO: 619367 - DNA, 51 bp, Artificial; identical to SEQ ID NO: 197666
  Synthetic oligonucleotide

SEQ ID NO: 619368 - DNA, 54 bp, Artificial; identical to SEQ ID NO: 178996
  Synthetic oligonucleotide

SEQ ID NO: 619369 - DNA, 51 bp, Artificial; identical to SEQ ID NO: 161403
  Synthetic oligonucleotide

SEQ ID NO: 619370 - DNA, 59 bp, Artificial; identical to SEQ ID NO: 239103
  Synthetic oligonucleotide

SEQ ID NO: 619371 - DNA, 52 bp, Artificial; identical to SEQ ID NO: 220814
  Synthetic oligonucleotide

SEQ ID NO: 619372 - DNA, 56 bp, Artificial; identical to SEQ ID NO: 194459
  Synthetic oligonucleotide

SEQ ID NO: 619373 - DNA, 58 bp, Artificial; identical to SEQ ID NO: 144344
  Synthetic oligonucleotide

SEQ ID NO: 619374 - DNA, 55 bp, Artificial; identical to SEQ ID NO: 261863
  Synthetic oligonucleotide

SEQ ID NO: 619375 - DNA, 51 bp, Artificial; identical to SEQ ID NO: 169401
  Synthetic oligonucleotide

SEQ ID NO: 619376 - DNA, 55 bp, Artificial; identical to SEQ ID NO: 191929
  Synthetic oligonucleotide

SEQ ID NO: 619377 - DNA, 60 bp, Artificial; identical to SEQ ID NO: 254278
  Synthetic oligonucleotide

SEQ ID NO: 619378 - DNA, 52 bp, Artificial; identical to SEQ ID NO: 237067
  Synthetic oligonucleotide

SEQ ID NO: 619379 - DNA, 56 bp, Artificial; identical to SEQ ID NO: 194448
  Synthetic oligonucleotide

SEQ ID NO: 619380 - DNA, 60 bp, Artificial; identical to SEQ ID NO: 213003
  Synthetic oligonucleotide

SEQ ID NO: 619381 - DNA, 54 bp, Artificial; identical to SEQ ID NO: 194912
  Synthetic oligonucleotide

SEQ ID NO: 619382 - DNA, 56 bp, Artificial; identical to SEQ ID NO: 238978
  Synthetic oligonucleotide

SEQ ID NO: 619383 - DNA, 51 bp, Artificial; identical to SEQ ID NO: 209725
  Synthetic oligonucleotide

SEQ ID NO: 619384 - DNA, 55 bp, Artificial; identical to SEQ ID NO: 164504
  Synthetic oligonucleotide

SEQ ID NO: 619385 - DNA, 60 bp, Artificial; identical to SEQ ID NO: 160020
  Synthetic oligonucleotide

SEQ ID NO: 619386 - DNA, 56 bp, Artificial; identical to SEQ ID NO: 200978
  Synthetic oligonucleotide

SEQ ID NO: 619387 - DNA, 52 bp, Artificial; identical to SEQ ID NO: 165036
  Synthetic oligonucleotide

SEQ ID NO: 619388 - DNA, 50 bp, Artificial; identical to SEQ ID NO: 189211
  Synthetic oligonucleotide

SEQ ID NO: 619389 - DNA, 57 bp, Artificial; identical to SEQ ID NO: 247722
  Synthetic oligonucleotide

SEQ ID NO: 619390 - DNA, 52 bp, Artificial; identical to SEQ ID NO: 186248
  Synthetic oligonucleotide

SEQ ID NO: 619391 - DNA, 54 bp, Artificial; identical to SEQ ID NO: 246096
  Synthetic oligonucleotide

SEQ ID NO: 619392 - DNA, 51 bp, Artificial; identical to SEQ ID NO: 246611
  Synthetic oligonucleotide

SEQ ID NO: 619393 - DNA, 55 bp, Artificial; identical to SEQ ID NO: 243836
  Synthetic oligonucleotide

SEQ ID NO: 619394 - DNA, 55 bp, Artificial; identical to SEQ ID NO: 255052
  Synthetic oligonucleotide

SEQ ID NO: 619395 - DNA, 54 bp, Artificial; identical to SEQ ID NO: 238574
  Synthetic oligonucleotide

SEQ ID NO: 619396 - DNA, 55 bp, Artificial; identical to SEQ ID NO: 152357
  Synthetic oligonucleotide

SEQ ID NO: 619397 - DNA, 55 bp, Artificial; identical to SEQ ID NO: 154155
  Synthetic oligonucleotide

SEQ ID NO: 619398 - DNA, 60 bp, Artificial; identical to SEQ ID NO: 205320
  Synthetic oligonucleotide

SEQ ID NO: 619399 - DNA, 55 bp, Artificial; identical to SEQ ID NO: 151779
  Synthetic oligonucleotide

SEQ ID NO: 619400 - DNA, 53 bp, Artificial; identical to SEQ ID NO: 141784
  Synthetic oligonucleotide

SEQ ID NO: 619401 - DNA, 56 bp, Artificial; identical to SEQ ID NO: 239023
  Synthetic oligonucleotide

SEQ ID NO: 619402 - DNA, 54 bp, Artificial; identical to SEQ ID NO: 256645
  Synthetic oligonucleotide

SEQ ID NO: 619403 - DNA, 52 bp, Artificial; identical to SEQ ID NO: 152966
  Synthetic oligonucleotide

SEQ ID NO: 619404 - DNA, 55 bp, Artificial; identical to SEQ ID NO: 217178
  Synthetic oligonucleotide

SEQ ID NO: 619405 - DNA, 59 bp, Artificial; identical to SEQ ID NO: 200934
  Synthetic oligonucleotide

SEQ ID NO: 619406 - DNA, 56 bp, Artificial; identical to SEQ ID NO: 179931
  Synthetic oligonucleotide

SEQ ID NO: 619407 - DNA, 53 bp, Artificial; identical to SEQ ID NO: 179007
  Synthetic oligonucleotide

SEQ ID NO: 619408 - DNA, 55 bp, Artificial; identical to SEQ ID NO: 168728
  Synthetic oligonucleotide

SEQ ID NO: 619409 - DNA, 59 bp, Artificial; identical to SEQ ID NO: 211369
  Synthetic oligonucleotide

SEQ ID NO: 619410 - DNA, 53 bp, Artificial; identical to SEQ ID NO: 187363
  Synthetic oligonucleotide

SEQ ID NO: 619411 - DNA, 55 bp, Artificial; identical to SEQ ID NO: 160812
  Synthetic oligonucleotide

SEQ ID NO: 619412 - DNA, 60 bp, Artificial; identical to SEQ ID NO: 255555
  Synthetic oligonucleotide

SEQ ID NO: 619413 - DNA, 55 bp, Artificial; identical to SEQ ID NO: 221397
  Synthetic oligonucleotide

SEQ ID NO: 619414 - DNA, 53 bp, Artificial; identical to SEQ ID NO: 149428
  Synthetic oligonucleotide

SEQ ID NO: 619415 - DNA, 55 bp, Artificial; identical to SEQ ID NO: 197357
  Synthetic oligonucleotide

SEQ ID NO: 619416 - DNA, 55 bp, Artificial; identical to SEQ ID NO: 161268
  Synthetic oligonucleotide

SEQ ID NO: 619417 - DNA, 50 bp, Artificial; identical to SEQ ID NO: 188723
  Synthetic oligonucleotide

SEQ ID NO: 619418 - DNA, 55 bp, Artificial; identical to SEQ ID NO: 164503
  Synthetic oligonucleotide

SEQ ID NO: 619419 - DNA, 50 bp, Artificial; identical to SEQ ID NO: 241491
  Synthetic oligonucleotide

SEQ ID NO: 619420 - DNA, 52 bp, Artificial; identical to SEQ ID NO: 212988
  Synthetic oligonucleotide

SEQ ID NO: 619421 - DNA, 50 bp, Artificial; identical to SEQ ID NO: 167865
  Synthetic oligonucleotide

SEQ ID NO: 619422 - DNA, 55 bp, Artificial; identical to SEQ ID NO: 194750
  Synthetic oligonucleotide

SEQ ID NO: 619423 - DNA, 51 bp, Artificial; identical to SEQ ID NO: 241012
  Synthetic oligonucleotide

SEQ ID NO: 619424 - DNA, 60 bp, Artificial; identical to SEQ ID NO: 193108
  Synthetic oligonucleotide

SEQ ID NO: 619425 - DNA, 60 bp, Artificial; identical to SEQ ID NO: 194415
  Synthetic oligonucleotide

SEQ ID NO: 619426 - DNA, 51 bp, Artificial; identical to SEQ ID NO: 170183
  Synthetic oligonucleotide

SEQ ID NO: 619427 - DNA, 50 bp, Artificial; identical to SEQ ID NO: 160615
  Synthetic oligonucleotide

SEQ ID NO: 619428 - DNA, 52 bp, Artificial; identical to SEQ ID NO: 145026
  Synthetic oligonucleotide

SEQ ID NO: 619429 - DNA, 53 bp, Artificial; identical to SEQ ID NO: 195002
  Synthetic oligonucleotide

SEQ ID NO: 619430 - DNA, 52 bp, Artificial; identical to SEQ ID NO: 186237
  Synthetic oligonucleotide

SEQ ID NO: 619431 - DNA, 57 bp, Artificial; identical to SEQ ID NO: 239014
  Synthetic oligonucleotide

SEQ ID NO: 619432 - DNA, 60 bp, Artificial; identical to SEQ ID NO: 217130
  Synthetic oligonucleotide

SEQ ID NO: 619433 - DNA, 57 bp, Artificial; identical to SEQ ID NO: 247160
  Synthetic oligonucleotide

SEQ ID NO: 619434 - DNA, 54 bp, Artificial; identical to SEQ ID NO: 192032
  Synthetic oligonucleotide

SEQ ID NO: 619435 - DNA, 57 bp, Artificial; identical to SEQ ID NO: 166140
  Synthetic oligonucleotide

SEQ ID NO: 619436 - DNA, 53 bp, Artificial; identical to SEQ ID NO: 202977
  Synthetic oligonucleotide

SEQ ID NO: 619437 - DNA, 54 bp, Artificial; identical to SEQ ID NO: 247162
  Synthetic oligonucleotide

SEQ ID NO: 619438 - DNA, 52 bp, Artificial; identical to SEQ ID NO: 186236
  Synthetic oligonucleotide

SEQ ID NO: 619439 - DNA, 57 bp, Artificial; identical to SEQ ID NO: 152977
  Synthetic oligonucleotide

SEQ ID NO: 619440 - DNA, 60 bp, Artificial; identical to SEQ ID NO: 206957
  Synthetic oligonucleotide

SEQ ID NO: 619441 - DNA, 53 bp, Artificial; identical to SEQ ID NO: 164821
  Synthetic oligonucleotide

SEQ ID NO: 619442 - DNA, 52 bp, Artificial; identical to SEQ ID NO: 170136
  Synthetic oligonucleotide

SEQ ID NO: 619443 - DNA, 51 bp, Artificial; identical to SEQ ID NO: 142644
  Synthetic oligonucleotide

SEQ ID NO: 619444 - DNA, 57 bp, Artificial; identical to SEQ ID NO: 243839
  Synthetic oligonucleotide

SEQ ID NO: 619445 - DNA, 54 bp, Artificial; identical to SEQ ID NO: 157231
  Synthetic oligonucleotide

SEQ ID NO: 619446 - DNA, 57 bp, Artificial; identical to SEQ ID NO: 170032
  Synthetic oligonucleotide

SEQ ID NO: 619447 - DNA, 58 bp, Artificial; identical to SEQ ID NO: 252831
  Synthetic oligonucleotide

SEQ ID NO: 619448 - DNA, 55 bp, Artificial; identical to SEQ ID NO: 152533
  Synthetic oligonucleotide

SEQ ID NO: 619449 - DNA, 59 bp, Artificial; identical to SEQ ID NO: 239013
  Synthetic oligonucleotide

SEQ ID NO: 619450 - DNA, 56 bp, Artificial; identical to SEQ ID NO: 151300
  Synthetic oligonucleotide

SEQ ID NO: 619451 - DNA, 60 bp, Artificial; identical to SEQ ID NO: 151113
  Synthetic oligonucleotide

SEQ ID NO: 619452 - DNA, 58 bp, Artificial; identical to SEQ ID NO: 151114
  Synthetic oligonucleotide

SEQ ID NO: 619453 - DNA, 60 bp, Artificial; identical to SEQ ID NO: 179015
  Synthetic oligonucleotide

SEQ ID NO: 619454 - DNA, 59 bp, Artificial; identical to SEQ ID NO: 209115
  Synthetic oligonucleotide

SEQ ID NO: 619455 - DNA, 60 bp, Artificial; identical to SEQ ID NO: 266046
  Synthetic oligonucleotide

SEQ ID NO: 619456 - DNA, 55 bp, Artificial; identical to SEQ ID NO: 254540
  Synthetic oligonucleotide

SEQ ID NO: 619457 - DNA, 54 bp, Artificial; identical to SEQ ID NO: 169328
  Synthetic oligonucleotide

SEQ ID NO: 619458 - DNA, 55 bp, Artificial; identical to SEQ ID NO: 265829
  Synthetic oligonucleotide

SEQ ID NO: 619459 - DNA, 55 bp, Artificial; identical to SEQ ID NO: 208600
  Synthetic oligonucleotide

SEQ ID NO: 619460 - DNA, 60 bp, Artificial; identical to SEQ ID NO: 257462
  Synthetic oligonucleotide

SEQ ID NO: 619461 - DNA, 52 bp, Artificial; identical to SEQ ID NO: 186233
  Synthetic oligonucleotide

SEQ ID NO: 619462 - DNA, 54 bp, Artificial; identical to SEQ ID NO: 170026
  Synthetic oligonucleotide

SEQ ID NO: 619463 - DNA, 51 bp, Artificial; identical to SEQ ID NO: 149742
  Synthetic oligonucleotide

SEQ ID NO: 619464 - DNA, 50 bp, Artificial; identical to SEQ ID NO: 167864
  Synthetic oligonucleotide

SEQ ID NO: 619465 - DNA, 55 bp, Artificial; identical to SEQ ID NO: 245360
  Synthetic oligonucleotide

SEQ ID NO: 619466 - DNA, 54 bp, Artificial; identical to SEQ ID NO: 188448
  Synthetic oligonucleotide

SEQ ID NO: 619467 - DNA, 50 bp, Artificial; identical to SEQ ID NO: 176466
  Synthetic oligonucleotide

SEQ ID NO: 619468 - DNA, 55 bp, Artificial; identical to SEQ ID NO: 238379
  Synthetic oligonucleotide

SEQ ID NO: 619469 - DNA, 60 bp, Artificial; identical to SEQ ID NO: 144324
  Synthetic oligonucleotide

SEQ ID NO: 619470 - DNA, 59 bp, Artificial; identical to SEQ ID NO: 170043
  Synthetic oligonucleotide

SEQ ID NO: 619471 - DNA, 60 bp, Artificial; identical to SEQ ID NO: 225391
  Synthetic oligonucleotide

SEQ ID NO: 619472 - DNA, 57 bp, Artificial; identical to SEQ ID NO: 209082
  Synthetic oligonucleotide

SEQ ID NO: 619473 - DNA, 52 bp, Artificial; identical to SEQ ID NO: 247170
  Synthetic oligonucleotide

SEQ ID NO: 619474 - DNA, 55 bp, Artificial; identical to SEQ ID NO: 182184
  Synthetic oligonucleotide

SEQ ID NO: 619475 - DNA, 60 bp, Artificial; identical to SEQ ID NO: 224281
  Synthetic oligonucleotide

SEQ ID NO: 619476 - DNA, 55 bp, Artificial; identical to SEQ ID NO: 245367
  Synthetic oligonucleotide

SEQ ID NO: 619477 - DNA, 53 bp, Artificial; identical to SEQ ID NO: 155209
  Synthetic oligonucleotide

SEQ ID NO: 619478 - DNA, 60 bp, Artificial; identical to SEQ ID NO: 239012
  Synthetic oligonucleotide

SEQ ID NO: 619479 - DNA, 60 bp, Artificial; identical to SEQ ID NO: 178970
  Synthetic oligonucleotide

SEQ ID NO: 619480 - DNA, 51 bp, Artificial; identical to SEQ ID NO: 246606
  Synthetic oligonucleotide

SEQ ID NO: 619481 - DNA, 55 bp, Artificial; identical to SEQ ID NO: 224800
  Synthetic oligonucleotide

SEQ ID NO: 619482 - DNA, 60 bp, Artificial; identical to SEQ ID NO: 178972
  Synthetic oligonucleotide

SEQ ID NO: 619483 - DNA, 60 bp, Artificial; identical to SEQ ID NO: 212980
  Synthetic oligonucleotide

SEQ ID NO: 619484 - DNA, 54 bp, Artificial; identical to SEQ ID NO: 207719
  Synthetic oligonucleotide

SEQ ID NO: 619485 - DNA, 58 bp, Artificial; identical to SEQ ID NO: 187333
  Synthetic oligonucleotide

SEQ ID NO: 619486 - DNA, 55 bp, Artificial; identical to SEQ ID NO: 182185
  Synthetic oligonucleotide

SEQ ID NO: 619487 - DNA, 53 bp, Artificial; identical to SEQ ID NO: 209612
  Synthetic oligonucleotide

SEQ ID NO: 619488 - DNA, 52 bp, Artificial; identical to SEQ ID NO: 168949
  Synthetic oligonucleotide

SEQ ID NO: 619489 - DNA, 53 bp, Artificial; identical to SEQ ID NO: 205672
  Synthetic oligonucleotide

SEQ ID NO: 619490 - DNA, 54 bp, Artificial; identical to SEQ ID NO: 197365
  Synthetic oligonucleotide

SEQ ID NO: 619491 - DNA, 52 bp, Artificial; identical to SEQ ID NO: 160495
  Synthetic oligonucleotide

SEQ ID NO: 619492 - DNA, 55 bp, Artificial; identical to SEQ ID NO: 189049
  Synthetic oligonucleotide

SEQ ID NO: 619493 - DNA, 55 bp, Artificial; identical to SEQ ID NO: 194780
  Synthetic oligonucleotide

SEQ ID NO: 619494 - DNA, 53 bp, Artificial; identical to SEQ ID NO: 253277
  Synthetic oligonucleotide

SEQ ID NO: 619495 - DNA, 56 bp, Artificial; identical to SEQ ID NO: 243923
  Synthetic oligonucleotide

SEQ ID NO: 619496 - DNA, 52 bp, Artificial; identical to SEQ ID NO: 149535
  Synthetic oligonucleotide

SEQ ID NO: 619497 - DNA, 58 bp, Artificial; identical to SEQ ID NO: 208817
  Synthetic oligonucleotide

SEQ ID NO: 619498 - DNA, 53 bp, Artificial; identical to SEQ ID NO: 258905
  Synthetic oligonucleotide

SEQ ID NO: 619499 - DNA, 60 bp, Artificial; identical to SEQ ID NO: 247134
  Synthetic oligonucleotide

SEQ ID NO: 619500 - DNA, 54 bp, Artificial; identical to SEQ ID NO: 240601
  Synthetic oligonucleotide

SEQ ID NO: 619501 - DNA, 55 bp, Artificial; identical to SEQ ID NO: 182239
  Synthetic oligonucleotide

SEQ ID NO: 619502 - DNA, 60 bp, Artificial; identical to SEQ ID NO: 203703
  Synthetic oligonucleotide

SEQ ID NO: 619503 - DNA, 57 bp, Artificial; identical to SEQ ID NO: 239008
  Synthetic oligonucleotide

SEQ ID NO: 619504 - DNA, 58 bp, Artificial; identical to SEQ ID NO: 141810
  Synthetic oligonucleotide

SEQ ID NO: 619505 - DNA, 53 bp, Artificial; identical to SEQ ID NO: 185712
  Synthetic oligonucleotide

SEQ ID NO: 619506 - DNA, 55 bp, Artificial; identical to SEQ ID NO: 257885
  Synthetic oligonucleotide

SEQ ID NO: 619507 - DNA, 56 bp, Artificial; identical to SEQ ID NO: 257482
  Synthetic oligonucleotide

SEQ ID NO: 619508 - DNA, 53 bp, Artificial; identical to SEQ ID NO: 205616
  Synthetic oligonucleotide

SEQ ID NO: 619509 - DNA, 53 bp, Artificial; identical to SEQ ID NO: 170069
  Synthetic oligonucleotide

SEQ ID NO: 619510 - DNA, 55 bp, Artificial; identical to SEQ ID NO: 187896
  Synthetic oligonucleotide

SEQ ID NO: 619511 - DNA, 52 bp, Artificial; identical to SEQ ID NO: 141271
  Synthetic oligonucleotide

SEQ ID NO: 619512 - DNA, 50 bp, Artificial; identical to SEQ ID NO: 172847
  Synthetic oligonucleotide

SEQ ID NO: 619513 - DNA, 53 bp, Artificial; identical to SEQ ID NO: 199747
  Synthetic oligonucleotide

SEQ ID NO: 619514 - DNA, 57 bp, Artificial; identical to SEQ ID NO: 249296
  Synthetic oligonucleotide

SEQ ID NO: 619515 - DNA, 50 bp, Artificial; identical to SEQ ID NO: 209822
  Synthetic oligonucleotide

SEQ ID NO: 619516 - DNA, 60 bp, Artificial; identical to SEQ ID NO: 170054
  Synthetic oligonucleotide

SEQ ID NO: 619517 - DNA, 50 bp, Artificial; identical to SEQ ID NO: 162385
  Synthetic oligonucleotide

SEQ ID NO: 619518 - DNA, 55 bp, Artificial; identical to SEQ ID NO: 265979
  Synthetic oligonucleotide

SEQ ID NO: 619519 - DNA, 55 bp, Artificial; identical to SEQ ID NO: 160269
  Synthetic oligonucleotide

SEQ ID NO: 619520 - DNA, 55 bp, Artificial; identical to SEQ ID NO: 240360
  Synthetic oligonucleotide

SEQ ID NO: 619521 - DNA, 55 bp, Artificial; identical to SEQ ID NO: 201474
  Synthetic oligonucleotide

SEQ ID NO: 619522 - DNA, 55 bp, Artificial; identical to SEQ ID NO: 164502
  Synthetic oligonucleotide

SEQ ID NO: 619523 - DNA, 51 bp, Artificial; identical to SEQ ID NO: 212946
  Synthetic oligonucleotide

SEQ ID NO: 619524 - DNA, 50 bp, Artificial; identical to SEQ ID NO: 170736
  Synthetic oligonucleotide

SEQ ID NO: 619525 - DNA, 60 bp, Artificial; identical to SEQ ID NO: 243861
  Synthetic oligonucleotide

SEQ ID NO: 619526 - DNA, 50 bp, Artificial; identical to SEQ ID NO: 160736
  Synthetic oligonucleotide

SEQ ID NO: 619527 - DNA, 54 bp, Artificial; identical to SEQ ID NO: 141804
  Synthetic oligonucleotide

SEQ ID NO: 619528 - DNA, 55 bp, Artificial; identical to SEQ ID NO: 239007
  Synthetic oligonucleotide

SEQ ID NO: 619529 - DNA, 60 bp, Artificial; identical to SEQ ID NO: 239006
  Synthetic oligonucleotide

SEQ ID NO: 619530 - DNA, 54 bp, Artificial; identical to SEQ ID NO: 160366
  Synthetic oligonucleotide

SEQ ID NO: 619531 - DNA, 55 bp, Artificial; identical to SEQ ID NO: 261936
  Synthetic oligonucleotide

SEQ ID NO: 619532 - DNA, 55 bp, Artificial; identical to SEQ ID NO: 182247
  Synthetic oligonucleotide

SEQ ID NO: 619533 - DNA, 56 bp, Artificial; identical to SEQ ID NO: 212958
  Synthetic oligonucleotide

SEQ ID NO: 619534 - DNA, 49 bp, Artificial; identical to SEQ ID NO: 247136
  Synthetic oligonucleotide

SEQ ID NO: 619535 - DNA, 55 bp, Artificial; identical to SEQ ID NO: 146315
  Synthetic oligonucleotide

SEQ ID NO: 619536 - DNA, 56 bp, Artificial; identical to SEQ ID NO: 164734
  Synthetic oligonucleotide

SEQ ID NO: 619537 - DNA, 50 bp, Artificial; identical to SEQ ID NO: 176349
  Synthetic oligonucleotide

SEQ ID NO: 619538 - DNA, 56 bp, Artificial; identical to SEQ ID NO: 201796
  Synthetic oligonucleotide

SEQ ID NO: 619539 - DNA, 60 bp, Artificial; identical to SEQ ID NO: 141883
  Synthetic oligonucleotide

SEQ ID NO: 619540 - DNA, 54 bp, Artificial; identical to SEQ ID NO: 194928
  Synthetic oligonucleotide

SEQ ID NO: 619541 - DNA, 51 bp, Artificial; identical to SEQ ID NO: 223768
  Synthetic oligonucleotide

SEQ ID NO: 619542 - DNA, 55 bp, Artificial; identical to SEQ ID NO: 220722
  Synthetic oligonucleotide

SEQ ID NO: 619543 - DNA, 60 bp, Artificial; identical to SEQ ID NO: 239003
  Synthetic oligonucleotide

SEQ ID NO: 619544 - DNA, 54 bp, Artificial; identical to SEQ ID NO: 200923
  Synthetic oligonucleotide

SEQ ID NO: 619545 - DNA, 56 bp, Artificial; identical to SEQ ID NO: 206952
  Synthetic oligonucleotide

SEQ ID NO: 619546 - DNA, 55 bp, Artificial; identical to SEQ ID NO: 200921
  Synthetic oligonucleotide

SEQ ID NO: 619547 - DNA, 52 bp, Artificial; identical to SEQ ID NO: 211597
  Synthetic oligonucleotide

SEQ ID NO: 619548 - DNA, 55 bp, Artificial; identical to SEQ ID NO: 199339
  Synthetic oligonucleotide

SEQ ID NO: 619549 - DNA, 50 bp, Artificial; identical to SEQ ID NO: 215477
  Synthetic oligonucleotide

SEQ ID NO: 619550 - DNA, 60 bp, Artificial; identical to SEQ ID NO: 239002
  Synthetic oligonucleotide

SEQ ID NO: 619551 - DNA, 60 bp, Artificial; identical to SEQ ID NO: 160131
  Synthetic oligonucleotide

SEQ ID NO: 619552 - DNA, 55 bp, Artificial; identical to SEQ ID NO: 199344
  Synthetic oligonucleotide

SEQ ID NO: 619553 - DNA, 55 bp, Artificial; identical to SEQ ID NO: 217148
  Synthetic oligonucleotide

SEQ ID NO: 619554 - DNA, 52 bp, Artificial; identical to SEQ ID NO: 155572
  Synthetic oligonucleotide

SEQ ID NO: 619555 - DNA, 55 bp, Artificial; identical to SEQ ID NO: 164498
  Synthetic oligonucleotide

SEQ ID NO: 619556 - DNA, 56 bp, Artificial; identical to SEQ ID NO: 212504
  Synthetic oligonucleotide

SEQ ID NO: 619557 - DNA, 55 bp, Artificial; identical to SEQ ID NO: 199343
  Synthetic oligonucleotide

SEQ ID NO: 619558 - DNA, 59 bp, Artificial; identical to SEQ ID NO: 187305
  Synthetic oligonucleotide

SEQ ID NO: 619559 - DNA, 52 bp, Artificial; identical to SEQ ID NO: 165000
  Synthetic oligonucleotide

SEQ ID NO: 619560 - DNA, 55 bp, Artificial; identical to SEQ ID NO: 182219
  Synthetic oligonucleotide

SEQ ID NO: 619561 - DNA, 51 bp, Artificial; identical to SEQ ID NO: 170179
  Synthetic oligonucleotide

SEQ ID NO: 619562 - DNA, 55 bp, Artificial; identical to SEQ ID NO: 240364
  Synthetic oligonucleotide

SEQ ID NO: 619563 - DNA, 57 bp, Artificial; identical to SEQ ID NO: 247537
  Synthetic oligonucleotide

SEQ ID NO: 619564 - DNA, 57 bp, Artificial; identical to SEQ ID NO: 238951
  Synthetic oligonucleotide

SEQ ID NO: 619565 - DNA, 55 bp, Artificial; identical to SEQ ID NO: 172959
  Synthetic oligonucleotide

SEQ ID NO: 619566 - DNA, 53 bp, Artificial; identical to SEQ ID NO: 189128
  Synthetic oligonucleotide

SEQ ID NO: 619567 - DNA, 58 bp, Artificial; identical to SEQ ID NO: 243860
  Synthetic oligonucleotide

SEQ ID NO: 619568 - DNA, 54 bp, Artificial; identical to SEQ ID NO: 157171
  Synthetic oligonucleotide

SEQ ID NO: 619569 - DNA, 60 bp, Artificial; identical to SEQ ID NO: 160142
  Synthetic oligonucleotide

SEQ ID NO: 619570 - DNA, 57 bp, Artificial; identical to SEQ ID NO: 178841
  Synthetic oligonucleotide

SEQ ID NO: 619571 - DNA, 52 bp, Artificial; identical to SEQ ID NO: 193757
  Synthetic oligonucleotide

SEQ ID NO: 619572 - DNA, 52 bp, Artificial; identical to SEQ ID NO: 199956
  Synthetic oligonucleotide

SEQ ID NO: 619573 - DNA, 53 bp, Artificial; identical to SEQ ID NO: 157373
  Synthetic oligonucleotide

SEQ ID NO: 619574 - DNA, 57 bp, Artificial; identical to SEQ ID NO: 203394
  Synthetic oligonucleotide

SEQ ID NO: 619575 - DNA, 56 bp, Artificial; identical to SEQ ID NO: 151117
  Synthetic oligonucleotide

SEQ ID NO: 619576 - DNA, 55 bp, Artificial; identical to SEQ ID NO: 156610
  Synthetic oligonucleotide

SEQ ID NO: 619577 - DNA, 55 bp, Artificial; identical to SEQ ID NO: 199387
  Synthetic oligonucleotide

SEQ ID NO: 619578 - DNA, 50 bp, Artificial; identical to SEQ ID NO: 193981
  Synthetic oligonucleotide

SEQ ID NO: 619579 - DNA, 53 bp, Artificial; identical to SEQ ID NO: 157372
  Synthetic oligonucleotide

SEQ ID NO: 619580 - DNA, 50 bp, Artificial; identical to SEQ ID NO: 216914
  Synthetic oligonucleotide

SEQ ID NO: 619581 - DNA, 55 bp, Artificial; identical to SEQ ID NO: 247725
  Synthetic oligonucleotide

SEQ ID NO: 619582 - DNA, 55 bp, Artificial; identical to SEQ ID NO: 153431
  Synthetic oligonucleotide

SEQ ID NO: 619583 - DNA, 55 bp, Artificial; identical to SEQ ID NO: 190032
  Synthetic oligonucleotide

SEQ ID NO: 619584 - DNA, 58 bp, Artificial; identical to SEQ ID NO: 160153
  Synthetic oligonucleotide

SEQ ID NO: 619585 - DNA, 60 bp, Artificial; identical to SEQ ID NO: 151118
  Synthetic oligonucleotide

SEQ ID NO: 619586 - DNA, 55 bp, Artificial; identical to SEQ ID NO: 245340
  Synthetic oligonucleotide

SEQ ID NO: 619587 - DNA, 60 bp, Artificial; identical to SEQ ID NO: 166811
  Synthetic oligonucleotide

SEQ ID NO: 619588 - DNA, 51 bp, Artificial; identical to SEQ ID NO: 241006
  Synthetic oligonucleotide

SEQ ID NO: 619589 - DNA, 55 bp, Artificial; identical to SEQ ID NO: 182231
  Synthetic oligonucleotide

SEQ ID NO: 619590 - DNA, 53 bp, Artificial; identical to SEQ ID NO: 185880
  Synthetic oligonucleotide

SEQ ID NO: 619591 - DNA, 55 bp, Artificial; identical to SEQ ID NO: 168773
  Synthetic oligonucleotide

SEQ ID NO: 619592 - DNA, 55 bp, Artificial; identical to SEQ ID NO: 156611
  Synthetic oligonucleotide

SEQ ID NO: 619593 - DNA, 59 bp, Artificial; identical to SEQ ID NO: 238944
  Synthetic oligonucleotide

SEQ ID NO: 619594 - DNA, 60 bp, Artificial; identical to SEQ ID NO: 178855
  Synthetic oligonucleotide

SEQ ID NO: 619595 - DNA, 60 bp, Artificial; identical to SEQ ID NO: 212936
  Synthetic oligonucleotide

SEQ ID NO: 619596 - DNA, 52 bp, Artificial; identical to SEQ ID NO: 257941
  Synthetic oligonucleotide

SEQ ID NO: 619597 - DNA, 60 bp, Artificial; identical to SEQ ID NO: 209094
  Synthetic oligonucleotide

SEQ ID NO: 619598 - DNA, 55 bp, Artificial; identical to SEQ ID NO: 254792
  Synthetic oligonucleotide

SEQ ID NO: 619599 - DNA, 55 bp, Artificial; identical to SEQ ID NO: 199284
  Synthetic oligonucleotide

SEQ ID NO: 619600 - DNA, 55 bp, Artificial; identical to SEQ ID NO: 160813
  Synthetic oligonucleotide

SEQ ID NO: 619601 - DNA, 55 bp, Artificial; identical to SEQ ID NO: 199271
  Synthetic oligonucleotide

SEQ ID NO: 619602 - DNA, 60 bp, Artificial; identical to SEQ ID NO: 249263
  Synthetic oligonucleotide

SEQ ID NO: 619603 - DNA, 55 bp, Artificial; identical to SEQ ID NO: 168776
  Synthetic oligonucleotide

SEQ ID NO: 619604 - DNA, 56 bp, Artificial; identical to SEQ ID NO: 238941
  Synthetic oligonucleotide

SEQ ID NO: 619605 - DNA, 55 bp, Artificial; identical to SEQ ID NO: 154187
  Synthetic oligonucleotide

SEQ ID NO: 619606 - DNA, 60 bp, Artificial; identical to SEQ ID NO: 178806
  Synthetic oligonucleotide

SEQ ID NO: 619607 - DNA, 55 bp, Artificial; identical to SEQ ID NO: 200944
  Synthetic oligonucleotide

SEQ ID NO: 619608 - DNA, 60 bp, Artificial; identical to SEQ ID NO: 203692
  Synthetic oligonucleotide

SEQ ID NO: 619609 - DNA, 55 bp, Artificial; identical to SEQ ID NO: 178807
  Synthetic oligonucleotide

SEQ ID NO: 619610 - DNA, 60 bp, Artificial; identical to SEQ ID NO: 151122
  Synthetic oligonucleotide

SEQ ID NO: 619611 - DNA, 56 bp, Artificial; identical to SEQ ID NO: 147336
  Synthetic oligonucleotide

SEQ ID NO: 619612 - DNA, 56 bp, Artificial; identical to SEQ ID NO: 247602
  Synthetic oligonucleotide

SEQ ID NO: 619613 - DNA, 60 bp, Artificial; identical to SEQ ID NO: 200950
  Synthetic oligonucleotide

SEQ ID NO: 619614 - DNA, 55 bp, Artificial; identical to SEQ ID NO: 224809
  Synthetic oligonucleotide

SEQ ID NO: 619615 - DNA, 55 bp, Artificial; identical to SEQ ID NO: 238353
  Synthetic oligonucleotide

SEQ ID NO: 619616 - DNA, 50 bp, Artificial; identical to SEQ ID NO: 193977
  Synthetic oligonucleotide

SEQ ID NO: 619617 - DNA, 54 bp, Artificial; identical to SEQ ID NO: 197447
  Synthetic oligonucleotide

SEQ ID NO: 619618 - DNA, 59 bp, Artificial; identical to SEQ ID NO: 160175
  Synthetic oligonucleotide

SEQ ID NO: 619619 - DNA, 59 bp, Artificial; identical to SEQ ID NO: 194737
  Synthetic oligonucleotide

SEQ ID NO: 619620 - DNA, 60 bp, Artificial; identical to SEQ ID NO: 178814
  Synthetic oligonucleotide

SEQ ID NO: 619621 - DNA, 51 bp, Artificial; identical to SEQ ID NO: 157706
  Synthetic oligonucleotide

SEQ ID NO: 619622 - DNA, 55 bp, Artificial; identical to SEQ ID NO: 148336
  Synthetic oligonucleotide

SEQ ID NO: 619623 - DNA, 55 bp, Artificial; identical to SEQ ID NO: 188362
  Synthetic oligonucleotide

SEQ ID NO: 619624 - DNA, 60 bp, Artificial; identical to SEQ ID NO: 238939
  Synthetic oligonucleotide

SEQ ID NO: 619625 - DNA, 57 bp, Artificial; identical to SEQ ID NO: 201208
  Synthetic oligonucleotide

SEQ ID NO: 619626 - DNA, 52 bp, Artificial; identical to SEQ ID NO: 211584
  Synthetic oligonucleotide

SEQ ID NO: 619627 - DNA, 60 bp, Artificial; identical to SEQ ID NO: 217229
  Synthetic oligonucleotide

SEQ ID NO: 619628 - DNA, 55 bp, Artificial; identical to SEQ ID NO: 153430
  Synthetic oligonucleotide

SEQ ID NO: 619629 - DNA, 58 bp, Artificial; identical to SEQ ID NO: 238938
  Synthetic oligonucleotide

SEQ ID NO: 619630 - DNA, 55 bp, Artificial; identical to SEQ ID NO: 199303
  Synthetic oligonucleotide

SEQ ID NO: 619631 - DNA, 58 bp, Artificial; identical to SEQ ID NO: 233579
  Synthetic oligonucleotide

SEQ ID NO: 619632 - DNA, 53 bp, Artificial; identical to SEQ ID NO: 149490
  Synthetic oligonucleotide

SEQ ID NO: 619633 - DNA, 51 bp, Artificial; identical to SEQ ID NO: 237196
  Synthetic oligonucleotide

SEQ ID NO: 619634 - DNA, 52 bp, Artificial; identical to SEQ ID NO: 246452
  Synthetic oligonucleotide

SEQ ID NO: 619635 - DNA, 55 bp, Artificial; identical to SEQ ID NO: 249286
  Synthetic oligonucleotide

SEQ ID NO: 619636 - DNA, 55 bp, Artificial; identical to SEQ ID NO: 245358
  Synthetic oligonucleotide

SEQ ID NO: 619637 - DNA, 51 bp, Artificial; identical to SEQ ID NO: 142878
  Synthetic oligonucleotide

SEQ ID NO: 619638 - DNA, 50 bp, Artificial; identical to SEQ ID NO: 206006
  Synthetic oligonucleotide

SEQ ID NO: 619639 - DNA, 55 bp, Artificial; identical to SEQ ID NO: 152358
  Synthetic oligonucleotide

SEQ ID NO: 619640 - DNA, 60 bp, Artificial; identical to SEQ ID NO: 200932
  Synthetic oligonucleotide

SEQ ID NO: 619641 - DNA, 52 bp, Artificial; identical to SEQ ID NO: 237065
  Synthetic oligonucleotide

SEQ ID NO: 619642 - DNA, 60 bp, Artificial; identical to SEQ ID NO: 191678
  Synthetic oligonucleotide

SEQ ID NO: 619643 - DNA, 58 bp, Artificial; identical to SEQ ID NO: 191705
  Synthetic oligonucleotide

SEQ ID NO: 619644 - DNA, 60 bp, Artificial; identical to SEQ ID NO: 178890
  Synthetic oligonucleotide

SEQ ID NO: 619645 - DNA, 55 bp, Artificial; identical to SEQ ID NO: 162138
  Synthetic oligonucleotide

SEQ ID NO: 619646 - DNA, 59 bp, Artificial; identical to SEQ ID NO: 266049
  Synthetic oligonucleotide

SEQ ID NO: 619647 - DNA, 56 bp, Artificial; identical to SEQ ID NO: 209248
  Synthetic oligonucleotide

SEQ ID NO: 619648 - DNA, 54 bp, Artificial; identical to SEQ ID NO: 164792
  Synthetic oligonucleotide

SEQ ID NO: 619649 - DNA, 55 bp, Artificial; identical to SEQ ID NO: 182079
  Synthetic oligonucleotide

SEQ ID NO: 619650 - DNA, 60 bp, Artificial; identical to SEQ ID NO: 238934
  Synthetic oligonucleotide

SEQ ID NO: 619651 - DNA, 55 bp, Artificial; identical to SEQ ID NO: 156582
  Synthetic oligonucleotide

SEQ ID NO: 619652 - DNA, 60 bp, Artificial; identical to SEQ ID NO: 238603
  Synthetic oligonucleotide

SEQ ID NO: 619653 - DNA, 60 bp, Artificial; identical to SEQ ID NO: 225146
  Synthetic oligonucleotide

SEQ ID NO: 619654 - DNA, 58 bp, Artificial; identical to SEQ ID NO: 209155
  Synthetic oligonucleotide

SEQ ID NO: 619655 - DNA, 52 bp, Artificial; identical to SEQ ID NO: 185374
  Synthetic oligonucleotide

SEQ ID NO: 619656 - DNA, 54 bp, Artificial; identical to SEQ ID NO: 247786
  Synthetic oligonucleotide

SEQ ID NO: 619657 - DNA, 55 bp, Artificial; identical to SEQ ID NO: 182081
  Synthetic oligonucleotide

SEQ ID NO: 619658 - DNA, 53 bp, Artificial; identical to SEQ ID NO: 185368
  Synthetic oligonucleotide

SEQ ID NO: 619659 - DNA, 57 bp, Artificial; identical to SEQ ID NO: 237952
  Synthetic oligonucleotide

SEQ ID NO: 619660 - DNA, 52 bp, Artificial; identical to SEQ ID NO: 186321
  Synthetic oligonucleotide

SEQ ID NO: 619661 - DNA, 58 bp, Artificial; identical to SEQ ID NO: 178900
  Synthetic oligonucleotide

SEQ ID NO: 619662 - DNA, 52 bp, Artificial; identical to SEQ ID NO: 258179
  Synthetic oligonucleotide

SEQ ID NO: 619663 - DNA, 55 bp, Artificial; identical to SEQ ID NO: 202278
  Synthetic oligonucleotide

SEQ ID NO: 619664 - DNA, 60 bp, Artificial; identical to SEQ ID NO: 178902
  Synthetic oligonucleotide

SEQ ID NO: 619665 - DNA, 55 bp, Artificial; identical to SEQ ID NO: 249299
  Synthetic oligonucleotide

SEQ ID NO: 619666 - DNA, 55 bp, Artificial; identical to SEQ ID NO: 152359
  Synthetic oligonucleotide

SEQ ID NO: 619667 - DNA, 59 bp, Artificial; identical to SEQ ID NO: 164656
  Synthetic oligonucleotide

SEQ ID NO: 619668 - DNA, 53 bp, Artificial; identical to SEQ ID NO: 212965
  Synthetic oligonucleotide

SEQ ID NO: 619669 - DNA, 55 bp, Artificial; identical to SEQ ID NO: 208572
  Synthetic oligonucleotide

SEQ ID NO: 619670 - DNA, 59 bp, Artificial; identical to SEQ ID NO: 178904
  Synthetic oligonucleotide

SEQ ID NO: 619671 - DNA, 58 bp, Artificial; identical to SEQ ID NO: 194703
  Synthetic oligonucleotide

SEQ ID NO: 619672 - DNA, 53 bp, Artificial; identical to SEQ ID NO: 208742
  Synthetic oligonucleotide

SEQ ID NO: 619673 - DNA, 55 bp, Artificial; identical to SEQ ID NO: 182153
  Synthetic oligonucleotide

SEQ ID NO: 619674 - DNA, 53 bp, Artificial; identical to SEQ ID NO: 208739
  Synthetic oligonucleotide

SEQ ID NO: 619675 - DNA, 55 bp, Artificial; identical to SEQ ID NO: 168799
  Synthetic oligonucleotide

SEQ ID NO: 619676 - DNA, 53 bp, Artificial; identical to SEQ ID NO: 149448
  Synthetic oligonucleotide

SEQ ID NO: 619677 - DNA, 60 bp, Artificial; identical to SEQ ID NO: 217201
  Synthetic oligonucleotide

SEQ ID NO: 619678 - DNA, 55 bp, Artificial; identical to SEQ ID NO: 151785
  Synthetic oligonucleotide

SEQ ID NO: 619679 - DNA, 55 bp, Artificial; identical to SEQ ID NO: 160266
  Synthetic oligonucleotide

SEQ ID NO: 619680 - DNA, 55 bp, Artificial; identical to SEQ ID NO: 154173
  Synthetic oligonucleotide

SEQ ID NO: 619681 - DNA, 56 bp, Artificial; identical to SEQ ID NO: 208078
  Synthetic oligonucleotide

SEQ ID NO: 619682 - DNA, 55 bp, Artificial; identical to SEQ ID NO: 178858
  Synthetic oligonucleotide

SEQ ID NO: 619683 - DNA, 57 bp, Artificial; identical to SEQ ID NO: 178861
  Synthetic oligonucleotide

SEQ ID NO: 619684 - DNA, 55 bp, Artificial; identical to SEQ ID NO: 155788
  Synthetic oligonucleotide

SEQ ID NO: 619685 - DNA, 59 bp, Artificial; identical to SEQ ID NO: 200972
  Synthetic oligonucleotide

SEQ ID NO: 619686 - DNA, 55 bp, Artificial; identical to SEQ ID NO: 234379
  Synthetic oligonucleotide

SEQ ID NO: 619687 - DNA, 60 bp, Artificial; identical to SEQ ID NO: 178864
  Synthetic oligonucleotide

SEQ ID NO: 619688 - DNA, 55 bp, Artificial; identical to SEQ ID NO: 245188
  Synthetic oligonucleotide

SEQ ID NO: 619689 - DNA, 55 bp, Artificial; identical to SEQ ID NO: 182133
  Synthetic oligonucleotide

SEQ ID NO: 619690 - DNA, 50 bp, Artificial; identical to SEQ ID NO: 152261
  Synthetic oligonucleotide

SEQ ID NO: 619691 - DNA, 55 bp, Artificial; identical to SEQ ID NO: 153710
  Synthetic oligonucleotide

SEQ ID NO: 619692 - DNA, 55 bp, Artificial; identical to SEQ ID NO: 234378
  Synthetic oligonucleotide

SEQ ID NO: 619693 - DNA, 58 bp, Artificial; identical to SEQ ID NO: 179689
  Synthetic oligonucleotide

SEQ ID NO: 619694 - DNA, 51 bp, Artificial; identical to SEQ ID NO: 200150
  Synthetic oligonucleotide

SEQ ID NO: 619695 - DNA, 60 bp, Artificial; identical to SEQ ID NO: 211336
  Synthetic oligonucleotide

SEQ ID NO: 619696 - DNA, 50 bp, Artificial; identical to SEQ ID NO: 165796
  Synthetic oligonucleotide

SEQ ID NO: 619697 - DNA, 55 bp, Artificial; identical to SEQ ID NO: 219690
  Synthetic oligonucleotide

SEQ ID NO: 619698 - DNA, 54 bp, Artificial; identical to SEQ ID NO: 164533
  Synthetic oligonucleotide

SEQ ID NO: 619699 - DNA, 50 bp, Artificial; identical to SEQ ID NO: 255974
  Synthetic oligonucleotide

SEQ ID NO: 619700 - DNA, 55 bp, Artificial; identical to SEQ ID NO: 203696
  Synthetic oligonucleotide

SEQ ID NO: 619701 - DNA, 55 bp, Artificial; identical to SEQ ID NO: 225198
  Synthetic oligonucleotide

SEQ ID NO: 619702 - DNA, 51 bp, Artificial; identical to SEQ ID NO: 186554
  Synthetic oligonucleotide

SEQ ID NO: 619703 - DNA, 59 bp, Artificial; identical to SEQ ID NO: 205331
  Synthetic oligonucleotide

SEQ ID NO: 619704 - DNA, 60 bp, Artificial; identical to SEQ ID NO: 156276
  Synthetic oligonucleotide

SEQ ID NO: 619705 - DNA, 60 bp, Artificial; identical to SEQ ID NO: 153721
  Synthetic oligonucleotide

SEQ ID NO: 619706 - DNA, 50 bp, Artificial; identical to SEQ ID NO: 202477
  Synthetic oligonucleotide

SEQ ID NO: 619707 - DNA, 55 bp, Artificial; identical to SEQ ID NO: 188990
  Synthetic oligonucleotide

SEQ ID NO: 619708 - DNA, 55 bp, Artificial; identical to SEQ ID NO: 212857
  Synthetic oligonucleotide

SEQ ID NO: 619709 - DNA, 52 bp, Artificial; identical to SEQ ID NO: 217157
  Synthetic oligonucleotide

SEQ ID NO: 619710 - DNA, 55 bp, Artificial; identical to SEQ ID NO: 156588
  Synthetic oligonucleotide

SEQ ID NO: 619711 - DNA, 55 bp, Artificial; identical to SEQ ID NO: 249301
  Synthetic oligonucleotide

SEQ ID NO: 619712 - DNA, 52 bp, Artificial; identical to SEQ ID NO: 236993
  Synthetic oligonucleotide

SEQ ID NO: 619713 - DNA, 51 bp, Artificial; identical to SEQ ID NO: 223763
  Synthetic oligonucleotide

SEQ ID NO: 619714 - DNA, 55 bp, Artificial; identical to SEQ ID NO: 182378
  Synthetic oligonucleotide

SEQ ID NO: 619715 - DNA, 55 bp, Artificial; identical to SEQ ID NO: 249498
  Synthetic oligonucleotide

SEQ ID NO: 619716 - DNA, 54 bp, Artificial; identical to SEQ ID NO: 149247
  Synthetic oligonucleotide

SEQ ID NO: 619717 - DNA, 56 bp, Artificial; identical to SEQ ID NO: 211324
  Synthetic oligonucleotide

SEQ ID NO: 619718 - DNA, 56 bp, Artificial; identical to SEQ ID NO: 151810
  Synthetic oligonucleotide

SEQ ID NO: 619719 - DNA, 54 bp, Artificial; identical to SEQ ID NO: 254777
  Synthetic oligonucleotide

SEQ ID NO: 619720 - DNA, 50 bp, Artificial; identical to SEQ ID NO: 241569
  Synthetic oligonucleotide

SEQ ID NO: 619721 - DNA, 52 bp, Artificial; identical to SEQ ID NO: 164983
  Synthetic oligonucleotide

SEQ ID NO: 619722 - DNA, 51 bp, Artificial; identical to SEQ ID NO: 253341
  Synthetic oligonucleotide

SEQ ID NO: 619723 - DNA, 57 bp, Artificial; identical to SEQ ID NO: 146992
  Synthetic oligonucleotide

SEQ ID NO: 619724 - DNA, 55 bp, Artificial; identical to SEQ ID NO: 188361
  Synthetic oligonucleotide

SEQ ID NO: 619725 - DNA, 56 bp, Artificial; identical to SEQ ID NO: 146993
  Synthetic oligonucleotide

SEQ ID NO: 619726 - DNA, 53 bp, Artificial; identical to SEQ ID NO: 182383
  Synthetic oligonucleotide

SEQ ID NO: 619727 - DNA, 52 bp, Artificial; identical to SEQ ID NO: 203970
  Synthetic oligonucleotide

SEQ ID NO: 619728 - DNA, 50 bp, Artificial; identical to SEQ ID NO: 165820
  Synthetic oligonucleotide

SEQ ID NO: 619729 - DNA, 50 bp, Artificial; identical to SEQ ID NO: 241567
  Synthetic oligonucleotide

SEQ ID NO: 619730 - DNA, 53 bp, Artificial; identical to SEQ ID NO: 208733
  Synthetic oligonucleotide

SEQ ID NO: 619731 - DNA, 53 bp, Artificial; identical to SEQ ID NO: 203900
  Synthetic oligonucleotide

SEQ ID NO: 619732 - DNA, 57 bp, Artificial; identical to SEQ ID NO: 209191
  Synthetic oligonucleotide

SEQ ID NO: 619733 - DNA, 55 bp, Artificial; identical to SEQ ID NO: 203693
  Synthetic oligonucleotide

SEQ ID NO: 619734 - DNA, 60 bp, Artificial; identical to SEQ ID NO: 202793
  Synthetic oligonucleotide

SEQ ID NO: 619735 - DNA, 51 bp, Artificial; identical to SEQ ID NO: 263527
  Synthetic oligonucleotide

SEQ ID NO: 619736 - DNA, 60 bp, Artificial; identical to SEQ ID NO: 181994
  Synthetic oligonucleotide

SEQ ID NO: 619737 - DNA, 55 bp, Artificial; identical to SEQ ID NO: 240309
  Synthetic oligonucleotide

SEQ ID NO: 619738 - DNA, 55 bp, Artificial; identical to SEQ ID NO: 217137
  Synthetic oligonucleotide

SEQ ID NO: 619739 - DNA, 53 bp, Artificial; identical to SEQ ID NO: 262812
  Synthetic oligonucleotide

SEQ ID NO: 619740 - DNA, 54 bp, Artificial; identical to SEQ ID NO: 155206
  Synthetic oligonucleotide

SEQ ID NO: 619741 - DNA, 55 bp, Artificial; identical to SEQ ID NO: 217713
  Synthetic oligonucleotide

SEQ ID NO: 619742 - DNA, 55 bp, Artificial; identical to SEQ ID NO: 208593
  Synthetic oligonucleotide

SEQ ID NO: 619743 - DNA, 60 bp, Artificial; identical to SEQ ID NO: 247339
  Synthetic oligonucleotide

SEQ ID NO: 619744 - DNA, 55 bp, Artificial; identical to SEQ ID NO: 156593
  Synthetic oligonucleotide

SEQ ID NO: 619745 - DNA, 60 bp, Artificial; identical to SEQ ID NO: 156243
  Synthetic oligonucleotide

SEQ ID NO: 619746 - DNA, 52 bp, Artificial; identical to SEQ ID NO: 186256
  Synthetic oligonucleotide

SEQ ID NO: 619747 - DNA, 51 bp, Artificial; identical to SEQ ID NO: 210340
  Synthetic oligonucleotide

SEQ ID NO: 619748 - DNA, 58 bp, Artificial; identical to SEQ ID NO: 146999
  Synthetic oligonucleotide

SEQ ID NO: 619749 - DNA, 58 bp, Artificial; identical to SEQ ID NO: 257919
  Synthetic oligonucleotide

SEQ ID NO: 619750 - DNA, 55 bp, Artificial; identical to SEQ ID NO: 167289
  Synthetic oligonucleotide

SEQ ID NO: 619751 - DNA, 52 bp, Artificial; identical to SEQ ID NO: 186211
  Synthetic oligonucleotide

SEQ ID NO: 619752 - DNA, 55 bp, Artificial; identical to SEQ ID NO: 182428
  Synthetic oligonucleotide

SEQ ID NO: 619753 - DNA, 58 bp, Artificial; identical to SEQ ID NO: 164623
  Synthetic oligonucleotide

SEQ ID NO: 619754 - DNA, 55 bp, Artificial; identical to SEQ ID NO: 191078
  Synthetic oligonucleotide

SEQ ID NO: 619755 - DNA, 53 bp, Artificial; identical to SEQ ID NO: 233810
  Synthetic oligonucleotide

SEQ ID NO: 619756 - DNA, 55 bp, Artificial; identical to SEQ ID NO: 211330
  Synthetic oligonucleotide

SEQ ID NO: 619757 - DNA, 51 bp, Artificial; identical to SEQ ID NO: 225263
  Synthetic oligonucleotide

SEQ ID NO: 619758 - DNA, 51 bp, Artificial; identical to SEQ ID NO: 186729
  Synthetic oligonucleotide

SEQ ID NO: 619759 - DNA, 54 bp, Artificial; identical to SEQ ID NO: 258074
  Synthetic oligonucleotide

SEQ ID NO: 619760 - DNA, 55 bp, Artificial; identical to SEQ ID NO: 203690
  Synthetic oligonucleotide

SEQ ID NO: 619761 - DNA, 55 bp, Artificial; identical to SEQ ID NO: 187959
  Synthetic oligonucleotide

SEQ ID NO: 619762 - DNA, 55 bp, Artificial; identical to SEQ ID NO: 182392
  Synthetic oligonucleotide

SEQ ID NO: 619763 - DNA, 59 bp, Artificial; identical to SEQ ID NO: 247349
  Synthetic oligonucleotide

SEQ ID NO: 619764 - DNA, 55 bp, Artificial; identical to SEQ ID NO: 182395
  Synthetic oligonucleotide

SEQ ID NO: 619765 - DNA, 54 bp, Artificial; identical to SEQ ID NO: 185243
  Synthetic oligonucleotide

SEQ ID NO: 619766 - DNA, 55 bp, Artificial; identical to SEQ ID NO: 245211
  Synthetic oligonucleotide

SEQ ID NO: 619767 - DNA, 51 bp, Artificial; identical to SEQ ID NO: 141316
  Synthetic oligonucleotide

SEQ ID NO: 619768 - DNA, 56 bp, Artificial; identical to SEQ ID NO: 225135
  Synthetic oligonucleotide

SEQ ID NO: 619769 - DNA, 54 bp, Artificial; identical to SEQ ID NO: 192033
  Synthetic oligonucleotide

SEQ ID NO: 619770 - DNA, 55 bp, Artificial; identical to SEQ ID NO: 154090
  Synthetic oligonucleotide

SEQ ID NO: 619771 - DNA, 59 bp, Artificial; identical to SEQ ID NO: 247271
  Synthetic oligonucleotide

SEQ ID NO: 619772 - DNA, 55 bp, Artificial; identical to SEQ ID NO: 154091
  Synthetic oligonucleotide

SEQ ID NO: 619773 - DNA, 56 bp, Artificial; identical to SEQ ID NO: 200881
  Synthetic oligonucleotide

SEQ ID NO: 619774 - DNA, 60 bp, Artificial; identical to SEQ ID NO: 181616
  Synthetic oligonucleotide

SEQ ID NO: 619775 - DNA, 56 bp, Artificial; identical to SEQ ID NO: 147309
  Synthetic oligonucleotide

SEQ ID NO: 619776 - DNA, 60 bp, Artificial; identical to SEQ ID NO: 151157
  Synthetic oligonucleotide

SEQ ID NO: 619777 - DNA, 55 bp, Artificial; identical to SEQ ID NO: 142008
  Synthetic oligonucleotide

SEQ ID NO: 619778 - DNA, 51 bp, Artificial; identical to SEQ ID NO: 223760
  Synthetic oligonucleotide

SEQ ID NO: 619779 - DNA, 55 bp, Artificial; identical to SEQ ID NO: 155426
  Synthetic oligonucleotide

SEQ ID NO: 619780 - DNA, 51 bp, Artificial; identical to SEQ ID NO: 237103
  Synthetic oligonucleotide

SEQ ID NO: 619781 - DNA, 58 bp, Artificial; identical to SEQ ID NO: 200887
  Synthetic oligonucleotide

SEQ ID NO: 619782 - DNA, 50 bp, Artificial; identical to SEQ ID NO: 154915
  Synthetic oligonucleotide

SEQ ID NO: 619783 - DNA, 55 bp, Artificial; identical to SEQ ID NO: 168749
  Synthetic oligonucleotide

SEQ ID NO: 619784 - DNA, 51 bp, Artificial; identical to SEQ ID NO: 246742
  Synthetic oligonucleotide

SEQ ID NO: 619785 - DNA, 58 bp, Artificial; identical to SEQ ID NO: 249196
  Synthetic oligonucleotide

SEQ ID NO: 619786 - DNA, 55 bp, Artificial; identical to SEQ ID NO: 224821
  Synthetic oligonucleotide

SEQ ID NO: 619787 - DNA, 52 bp, Artificial; identical to SEQ ID NO: 240875
  Synthetic oligonucleotide

SEQ ID NO: 619788 - DNA, 56 bp, Artificial; identical to SEQ ID NO: 201021
  Synthetic oligonucleotide

SEQ ID NO: 619789 - DNA, 54 bp, Artificial; identical to SEQ ID NO: 197281
  Synthetic oligonucleotide

SEQ ID NO: 619790 - DNA, 60 bp, Artificial; identical to SEQ ID NO: 151158
  Synthetic oligonucleotide

SEQ ID NO: 619791 - DNA, 55 bp, Artificial; identical to SEQ ID NO: 215554
  Synthetic oligonucleotide

SEQ ID NO: 619792 - DNA, 58 bp, Artificial; identical to SEQ ID NO: 141862
  Synthetic oligonucleotide

SEQ ID NO: 619793 - DNA, 60 bp, Artificial; identical to SEQ ID NO: 257908
  Synthetic oligonucleotide

SEQ ID NO: 619794 - DNA, 58 bp, Artificial; identical to SEQ ID NO: 247442
  Synthetic oligonucleotide

SEQ ID NO: 619795 - DNA, 60 bp, Artificial; identical to SEQ ID NO: 181794
  Synthetic oligonucleotide

SEQ ID NO: 619796 - DNA, 54 bp, Artificial; identical to SEQ ID NO: 164530
  Synthetic oligonucleotide

SEQ ID NO: 619797 - DNA, 55 bp, Artificial; identical to SEQ ID NO: 238955
  Synthetic oligonucleotide

SEQ ID NO: 619798 - DNA, 50 bp, Artificial; identical to SEQ ID NO: 216878
  Synthetic oligonucleotide

SEQ ID NO: 619799 - DNA, 55 bp, Artificial; identical to SEQ ID NO: 190285
  Synthetic oligonucleotide

SEQ ID NO: 619800 - DNA, 56 bp, Artificial; identical to SEQ ID NO: 217256
  Synthetic oligonucleotide

SEQ ID NO: 619801 - DNA, 55 bp, Artificial; identical to SEQ ID NO: 233621
  Synthetic oligonucleotide

SEQ ID NO: 619802 - DNA, 60 bp, Artificial; identical to SEQ ID NO: 160308
  Synthetic oligonucleotide

SEQ ID NO: 619803 - DNA, 53 bp, Artificial; identical to SEQ ID NO: 154570
  Synthetic oligonucleotide

SEQ ID NO: 619804 - DNA, 54 bp, Artificial; identical to SEQ ID NO: 255292
  Synthetic oligonucleotide

SEQ ID NO: 619805 - DNA, 52 bp, Artificial; identical to SEQ ID NO: 186308
  Synthetic oligonucleotide

SEQ ID NO: 619806 - DNA, 59 bp, Artificial; identical to SEQ ID NO: 238954
  Synthetic oligonucleotide

SEQ ID NO: 619807 - DNA, 53 bp, Artificial; identical to SEQ ID NO: 170071
  Synthetic oligonucleotide

SEQ ID NO: 619808 - DNA, 56 bp, Artificial; identical to SEQ ID NO: 179306
  Synthetic oligonucleotide

SEQ ID NO: 619809 - DNA, 51 bp, Artificial; identical to SEQ ID NO: 243353
  Synthetic oligonucleotide

SEQ ID NO: 619810 - DNA, 55 bp, Artificial; identical to SEQ ID NO: 248530
  Synthetic oligonucleotide

SEQ ID NO: 619811 - DNA, 51 bp, Artificial; identical to SEQ ID NO: 241049
  Synthetic oligonucleotide

SEQ ID NO: 619812 - DNA, 53 bp, Artificial; identical to SEQ ID NO: 246273
  Synthetic oligonucleotide

SEQ ID NO: 619813 - DNA, 54 bp, Artificial; identical to SEQ ID NO: 162257
  Synthetic oligonucleotide

SEQ ID NO: 619814 - DNA, 51 bp, Artificial; identical to SEQ ID NO: 170169
  Synthetic oligonucleotide

SEQ ID NO: 619815 - DNA, 55 bp, Artificial; identical to SEQ ID NO: 182262
  Synthetic oligonucleotide

SEQ ID NO: 619816 - DNA, 52 bp, Artificial; identical to SEQ ID NO: 165038
  Synthetic oligonucleotide

SEQ ID NO: 619817 - DNA, 60 bp, Artificial; identical to SEQ ID NO: 217168
  Synthetic oligonucleotide

SEQ ID NO: 619818 - DNA, 55 bp, Artificial; identical to SEQ ID NO: 202276
  Synthetic oligonucleotide

SEQ ID NO: 619819 - DNA, 54 bp, Artificial; identical to SEQ ID NO: 141203
  Synthetic oligonucleotide

SEQ ID NO: 619820 - DNA, 54 bp, Artificial; identical to SEQ ID NO: 185325
  Synthetic oligonucleotide

SEQ ID NO: 619821 - DNA, 57 bp, Artificial; identical to SEQ ID NO: 248519
  Synthetic oligonucleotide

SEQ ID NO: 619822 - DNA, 49 bp, Artificial; identical to SEQ ID NO: 237004
  Synthetic oligonucleotide

SEQ ID NO: 619823 - DNA, 54 bp, Artificial; identical to SEQ ID NO: 185365
  Synthetic oligonucleotide

SEQ ID NO: 619824 - DNA, 54 bp, Artificial; identical to SEQ ID NO: 199618
  Synthetic oligonucleotide

SEQ ID NO: 619825 - DNA, 54 bp, Artificial; identical to SEQ ID NO: 201355
  Synthetic oligonucleotide

SEQ ID NO: 619826 - DNA, 55 bp, Artificial; identical to SEQ ID NO: 201017
  Synthetic oligonucleotide

SEQ ID NO: 619827 - DNA, 54 bp, Artificial; identical to SEQ ID NO: 164698
  Synthetic oligonucleotide

SEQ ID NO: 619828 - DNA, 56 bp, Artificial; identical to SEQ ID NO: 191754
  Synthetic oligonucleotide

SEQ ID NO: 619829 - DNA, 54 bp, Artificial; identical to SEQ ID NO: 149198
  Synthetic oligonucleotide

SEQ ID NO: 619830 - DNA, 60 bp, Artificial; identical to SEQ ID NO: 164600
  Synthetic oligonucleotide

SEQ ID NO: 619831 - DNA, 60 bp, Artificial; identical to SEQ ID NO: 201042
  Synthetic oligonucleotide

SEQ ID NO: 619832 - DNA, 51 bp, Artificial; identical to SEQ ID NO: 149724
  Synthetic oligonucleotide

SEQ ID NO: 619833 - DNA, 57 bp, Artificial; identical to SEQ ID NO: 193181
  Synthetic oligonucleotide

SEQ ID NO: 619834 - DNA, 55 bp, Artificial; identical to SEQ ID NO: 162245
  Synthetic oligonucleotide

SEQ ID NO: 619835 - DNA, 58 bp, Artificial; identical to SEQ ID NO: 243856
  Synthetic oligonucleotide

SEQ ID NO: 619836 - DNA, 56 bp, Artificial; identical to SEQ ID NO: 239090
  Synthetic oligonucleotide

SEQ ID NO: 619837 - DNA, 58 bp, Artificial; identical to SEQ ID NO: 175191
  Synthetic oligonucleotide

SEQ ID NO: 619838 - DNA, 55 bp, Artificial; identical to SEQ ID NO: 245180
  Synthetic oligonucleotide

SEQ ID NO: 619839 - DNA, 52 bp, Artificial; identical to SEQ ID NO: 186274
  Synthetic oligonucleotide

SEQ ID NO: 619840 - DNA, 52 bp, Artificial; identical to SEQ ID NO: 209670
  Synthetic oligonucleotide

SEQ ID NO: 619841 - DNA, 51 bp, Artificial; identical to SEQ ID NO: 152115
  Synthetic oligonucleotide

SEQ ID NO: 619842 - DNA, 51 bp, Artificial; identical to SEQ ID NO: 241034
  Synthetic oligonucleotide

SEQ ID NO: 619843 - DNA, 55 bp, Artificial; identical to SEQ ID NO: 172958
  Synthetic oligonucleotide

SEQ ID NO: 619844 - DNA, 54 bp, Artificial; identical to SEQ ID NO: 199562
  Synthetic oligonucleotide

SEQ ID NO: 619845 - DNA, 56 bp, Artificial; identical to SEQ ID NO: 171052
  Synthetic oligonucleotide

SEQ ID NO: 619846 - DNA, 60 bp, Artificial; identical to SEQ ID NO: 239085
  Synthetic oligonucleotide

SEQ ID NO: 619847 - DNA, 52 bp, Artificial; identical to SEQ ID NO: 253813
  Synthetic oligonucleotide

SEQ ID NO: 619848 - DNA, 55 bp, Artificial; identical to SEQ ID NO: 154747
  Synthetic oligonucleotide

SEQ ID NO: 619849 - DNA, 53 bp, Artificial; identical to SEQ ID NO: 208711
  Synthetic oligonucleotide

SEQ ID NO: 619850 - DNA, 60 bp, Artificial; identical to SEQ ID NO: 187244
  Synthetic oligonucleotide

SEQ ID NO: 619851 - DNA, 50 bp, Artificial; identical to SEQ ID NO: 175311
  Synthetic oligonucleotide

SEQ ID NO: 619852 - DNA, 54 bp, Artificial; identical to SEQ ID NO: 185353
  Synthetic oligonucleotide

SEQ ID NO: 619853 - DNA, 55 bp, Artificial; identical to SEQ ID NO: 249289
  Synthetic oligonucleotide

SEQ ID NO: 619854 - DNA, 60 bp, Artificial; identical to SEQ ID NO: 217165
  Synthetic oligonucleotide

SEQ ID NO: 619855 - DNA, 53 bp, Artificial; identical to SEQ ID NO: 192092
  Synthetic oligonucleotide

SEQ ID NO: 619856 - DNA, 55 bp, Artificial; identical to SEQ ID NO: 166914
  Synthetic oligonucleotide

SEQ ID NO: 619857 - DNA, 60 bp, Artificial; identical to SEQ ID NO: 224124
  Synthetic oligonucleotide

SEQ ID NO: 619858 - DNA, 54 bp, Artificial; identical to SEQ ID NO: 153541
  Synthetic oligonucleotide

SEQ ID NO: 619859 - DNA, 51 bp, Artificial; identical to SEQ ID NO: 204000
  Synthetic oligonucleotide

SEQ ID NO: 619860 - DNA, 51 bp, Artificial; identical to SEQ ID NO: 206511
  Synthetic oligonucleotide

SEQ ID NO: 619861 - DNA, 57 bp, Artificial; identical to SEQ ID NO: 239083
  Synthetic oligonucleotide

SEQ ID NO: 619862 - DNA, 55 bp, Artificial; identical to SEQ ID NO: 160261
  Synthetic oligonucleotide

SEQ ID NO: 619863 - DNA, 50 bp, Artificial; identical to SEQ ID NO: 200335
  Synthetic oligonucleotide

SEQ ID NO: 619864 - DNA, 55 bp, Artificial; identical to SEQ ID NO: 254561
  Synthetic oligonucleotide

SEQ ID NO: 619865 - DNA, 55 bp, Artificial; identical to SEQ ID NO: 188994
  Synthetic oligonucleotide

SEQ ID NO: 619866 - DNA, 59 bp, Artificial; identical to SEQ ID NO: 151162
  Synthetic oligonucleotide

SEQ ID NO: 619867 - DNA, 60 bp, Artificial; identical to SEQ ID NO: 237015
  Synthetic oligonucleotide

SEQ ID NO: 619868 - DNA, 53 bp, Artificial; identical to SEQ ID NO: 240735
  Synthetic oligonucleotide

SEQ ID NO: 619869 - DNA, 54 bp, Artificial; identical to SEQ ID NO: 243115
  Synthetic oligonucleotide

SEQ ID NO: 619870 - DNA, 55 bp, Artificial; identical to SEQ ID NO: 203748
  Synthetic oligonucleotide

SEQ ID NO: 619871 - DNA, 53 bp, Artificial; identical to SEQ ID NO: 208712
  Synthetic oligonucleotide

SEQ ID NO: 619872 - DNA, 56 bp, Artificial; identical to SEQ ID NO: 257521
  Synthetic oligonucleotide

SEQ ID NO: 619873 - DNA, 60 bp, Artificial; identical to SEQ ID NO: 217166
  Synthetic oligonucleotide

SEQ ID NO: 619874 - DNA, 55 bp, Artificial; identical to SEQ ID NO: 245245
  Synthetic oligonucleotide

SEQ ID NO: 619875 - DNA, 51 bp, Artificial; identical to SEQ ID NO: 203998
  Synthetic oligonucleotide

SEQ ID NO: 619876 - DNA, 53 bp, Artificial; identical to SEQ ID NO: 185835
  Synthetic oligonucleotide

SEQ ID NO: 619877 - DNA, 59 bp, Artificial; identical to SEQ ID NO: 147051
  Synthetic oligonucleotide

SEQ ID NO: 619878 - DNA, 55 bp, Artificial; identical to SEQ ID NO: 151866
  Synthetic oligonucleotide

SEQ ID NO: 619879 - DNA, 54 bp, Artificial; identical to SEQ ID NO: 143790
  Synthetic oligonucleotide

SEQ ID NO: 619880 - DNA, 55 bp, Artificial; identical to SEQ ID NO: 258010
  Synthetic oligonucleotide

SEQ ID NO: 619881 - DNA, 59 bp, Artificial; identical to SEQ ID NO: 248497
  Synthetic oligonucleotide

SEQ ID NO: 619882 - DNA, 55 bp, Artificial; identical to SEQ ID NO: 233619
  Synthetic oligonucleotide

SEQ ID NO: 619883 - DNA, 56 bp, Artificial; identical to SEQ ID NO: 147325
  Synthetic oligonucleotide

SEQ ID NO: 619884 - DNA, 55 bp, Artificial; identical to SEQ ID NO: 203743
  Synthetic oligonucleotide

SEQ ID NO: 619885 - DNA, 56 bp, Artificial; identical to SEQ ID NO: 205353
  Synthetic oligonucleotide

SEQ ID NO: 619886 - DNA, 58 bp, Artificial; identical to SEQ ID NO: 170785
  Synthetic oligonucleotide

SEQ ID NO: 619887 - DNA, 55 bp, Artificial; identical to SEQ ID NO: 245248
  Synthetic oligonucleotide

SEQ ID NO: 619888 - DNA, 56 bp, Artificial; identical to SEQ ID NO: 156132
  Synthetic oligonucleotide

SEQ ID NO: 619889 - DNA, 55 bp, Artificial; identical to SEQ ID NO: 238419
  Synthetic oligonucleotide

SEQ ID NO: 619890 - DNA, 55 bp, Artificial; identical to SEQ ID NO: 149041
  Synthetic oligonucleotide

SEQ ID NO: 619891 - DNA, 55 bp, Artificial; identical to SEQ ID NO: 142482
  Synthetic oligonucleotide

SEQ ID NO: 619892 - DNA, 53 bp, Artificial; identical to SEQ ID NO: 218341
  Synthetic oligonucleotide

SEQ ID NO: 619893 - DNA, 50 bp, Artificial; identical to SEQ ID NO: 207916
  Synthetic oligonucleotide

SEQ ID NO: 619894 - DNA, 53 bp, Artificial; identical to SEQ ID NO: 234484
  Synthetic oligonucleotide

SEQ ID NO: 619895 - DNA, 55 bp, Artificial; identical to SEQ ID NO: 197386
  Synthetic oligonucleotide

SEQ ID NO: 619896 - DNA, 59 bp, Artificial; identical to SEQ ID NO: 192268
  Synthetic oligonucleotide

SEQ ID NO: 619897 - DNA, 57 bp, Artificial; identical to SEQ ID NO: 161928
  Synthetic oligonucleotide

SEQ ID NO: 619898 - DNA, 54 bp, Artificial; identical to SEQ ID NO: 162254
  Synthetic oligonucleotide

SEQ ID NO: 619899 - DNA, 54 bp, Artificial; identical to SEQ ID NO: 182302
  Synthetic oligonucleotide

SEQ ID NO: 619900 - DNA, 58 bp, Artificial; identical to SEQ ID NO: 247294
  Synthetic oligonucleotide

SEQ ID NO: 619901 - DNA, 56 bp, Artificial; identical to SEQ ID NO: 224376
  Synthetic oligonucleotide

SEQ ID NO: 619902 - DNA, 51 bp, Artificial; identical to SEQ ID NO: 216781
  Synthetic oligonucleotide

SEQ ID NO: 619903 - DNA, 60 bp, Artificial; identical to SEQ ID NO: 256753
  Synthetic oligonucleotide

SEQ ID NO: 619904 - DNA, 55 bp, Artificial; identical to SEQ ID NO: 234345
  Synthetic oligonucleotide

SEQ ID NO: 619905 - DNA, 52 bp, Artificial; identical to SEQ ID NO: 199842
  Synthetic oligonucleotide

SEQ ID NO: 619906 - DNA, 52 bp, Artificial; identical to SEQ ID NO: 165014
  Synthetic oligonucleotide

SEQ ID NO: 619907 - DNA, 55 bp, Artificial; identical to SEQ ID NO: 188359
  Synthetic oligonucleotide

SEQ ID NO: 619908 - DNA, 54 bp, Artificial; identical to SEQ ID NO: 167026
  Synthetic oligonucleotide

SEQ ID NO: 619909 - DNA, 51 bp, Artificial; identical to SEQ ID NO: 170171
  Synthetic oligonucleotide

SEQ ID NO: 619910 - DNA, 56 bp, Artificial; identical to SEQ ID NO: 180007
  Synthetic oligonucleotide

SEQ ID NO: 619911 - DNA, 60 bp, Artificial; identical to SEQ ID NO: 248486
  Synthetic oligonucleotide

SEQ ID NO: 619912 - DNA, 53 bp, Artificial; identical to SEQ ID NO: 170073
  Synthetic oligonucleotide

SEQ ID NO: 619913 - DNA, 57 bp, Artificial; identical to SEQ ID NO: 182260
  Synthetic oligonucleotide

SEQ ID NO: 619914 - DNA, 57 bp, Artificial; identical to SEQ ID NO: 151169
  Synthetic oligonucleotide

SEQ ID NO: 619915 - DNA, 52 bp, Artificial; identical to SEQ ID NO: 240910
  Synthetic oligonucleotide

SEQ ID NO: 619916 - DNA, 60 bp, Artificial; identical to SEQ ID NO: 194603
  Synthetic oligonucleotide

SEQ ID NO: 619917 - DNA, 54 bp, Artificial; identical to SEQ ID NO: 240605
  Synthetic oligonucleotide

SEQ ID NO: 619918 - DNA, 55 bp, Artificial; identical to SEQ ID NO: 169199
  Synthetic oligonucleotide

SEQ ID NO: 619919 - DNA, 53 bp, Artificial; identical to SEQ ID NO: 170074
  Synthetic oligonucleotide

SEQ ID NO: 619920 - DNA, 56 bp, Artificial; identical to SEQ ID NO: 182271
  Synthetic oligonucleotide

SEQ ID NO: 619921 - DNA, 53 bp, Artificial; identical to SEQ ID NO: 144280
  Synthetic oligonucleotide

SEQ ID NO: 619922 - DNA, 52 bp, Artificial; identical to SEQ ID NO: 199855
  Synthetic oligonucleotide

SEQ ID NO: 619923 - DNA, 53 bp, Artificial; identical to SEQ ID NO: 162297
  Synthetic oligonucleotide

SEQ ID NO: 619924 - DNA, 55 bp, Artificial; identical to SEQ ID NO: 144824
  Synthetic oligonucleotide

SEQ ID NO: 619925 - DNA, 55 bp, Artificial; identical to SEQ ID NO: 155086
  Synthetic oligonucleotide

SEQ ID NO: 619926 - DNA, 52 bp, Artificial; identical to SEQ ID NO: 210846
  Synthetic oligonucleotide

SEQ ID NO: 619927 - DNA, 57 bp, Artificial; identical to SEQ ID NO: 224117
  Synthetic oligonucleotide

SEQ ID NO: 619928 - DNA, 55 bp, Artificial; identical to SEQ ID NO: 202858
  Synthetic oligonucleotide

SEQ ID NO: 619929 - DNA, 54 bp, Artificial; identical to SEQ ID NO: 168836
  Synthetic oligonucleotide

SEQ ID NO: 619930 - DNA, 59 bp, Artificial; identical to SEQ ID NO: 200845
  Synthetic oligonucleotide

SEQ ID NO: 619931 - DNA, 51 bp, Artificial; identical to SEQ ID NO: 149723
  Synthetic oligonucleotide

SEQ ID NO: 619932 - DNA, 55 bp, Artificial; identical to SEQ ID NO: 151674
  Synthetic oligonucleotide

SEQ ID NO: 619933 - DNA, 53 bp, Artificial; identical to SEQ ID NO: 153603
  Synthetic oligonucleotide

SEQ ID NO: 619934 - DNA, 55 bp, Artificial; identical to SEQ ID NO: 191077
  Synthetic oligonucleotide

SEQ ID NO: 619935 - DNA, 53 bp, Artificial; identical to SEQ ID NO: 199810
  Synthetic oligonucleotide

SEQ ID NO: 619936 - DNA, 56 bp, Artificial; identical to SEQ ID NO: 197897
  Synthetic oligonucleotide

SEQ ID NO: 619937 - DNA, 55 bp, Artificial; identical to SEQ ID NO: 245259
  Synthetic oligonucleotide

SEQ ID NO: 619938 - DNA, 55 bp, Artificial; identical to SEQ ID NO: 166876
  Synthetic oligonucleotide

SEQ ID NO: 619939 - DNA, 60 bp, Artificial; identical to SEQ ID NO: 239076
  Synthetic oligonucleotide

SEQ ID NO: 619940 - DNA, 53 bp, Artificial; identical to SEQ ID NO: 152360
  Synthetic oligonucleotide

SEQ ID NO: 619941 - DNA, 55 bp, Artificial; identical to SEQ ID NO: 144823
  Synthetic oligonucleotide

SEQ ID NO: 619942 - DNA, 55 bp, Artificial; identical to SEQ ID NO: 144463
  Synthetic oligonucleotide

SEQ ID NO: 619943 - DNA, 53 bp, Artificial; identical to SEQ ID NO: 154131
  Synthetic oligonucleotide

SEQ ID NO: 619944 - DNA, 55 bp, Artificial; identical to SEQ ID NO: 162186
  Synthetic oligonucleotide

SEQ ID NO: 619945 - DNA, 57 bp, Artificial; identical to SEQ ID NO: 239073
  Synthetic oligonucleotide

SEQ ID NO: 619946 - DNA, 52 bp, Artificial; identical to SEQ ID NO: 218363
  Synthetic oligonucleotide

SEQ ID NO: 619947 - DNA, 55 bp, Artificial; identical to SEQ ID NO: 153424
  Synthetic oligonucleotide

SEQ ID NO: 619948 - DNA, 50 bp, Artificial; identical to SEQ ID NO: 150297
  Synthetic oligonucleotide

SEQ ID NO: 619949 - DNA, 52 bp, Artificial; identical to SEQ ID NO: 213004
  Synthetic oligonucleotide

SEQ ID NO: 619950 - DNA, 55 bp, Artificial; identical to SEQ ID NO: 182360
  Synthetic oligonucleotide

SEQ ID NO: 619951 - DNA, 58 bp, Artificial; identical to SEQ ID NO: 152540
  Synthetic oligonucleotide

SEQ ID NO: 619952 - DNA, 54 bp, Artificial; identical to SEQ ID NO: 185314
  Synthetic oligonucleotide

SEQ ID NO: 619953 - DNA, 55 bp, Artificial; identical to SEQ ID NO: 148787
  Synthetic oligonucleotide

SEQ ID NO: 619954 - DNA, 54 bp, Artificial; identical to SEQ ID NO: 211496
  Synthetic oligonucleotide

SEQ ID NO: 619955 - DNA, 58 bp, Artificial; identical to SEQ ID NO: 247287
  Synthetic oligonucleotide

SEQ ID NO: 619956 - DNA, 54 bp, Artificial; identical to SEQ ID NO: 238591
  Synthetic oligonucleotide

SEQ ID NO: 619957 - DNA, 56 bp, Artificial; identical to SEQ ID NO: 237048
  Synthetic oligonucleotide

SEQ ID NO: 619958 - DNA, 59 bp, Artificial; identical to SEQ ID NO: 182382
  Synthetic oligonucleotide

SEQ ID NO: 619959 - DNA, 51 bp, Artificial; identical to SEQ ID NO: 248053
  Synthetic oligonucleotide

SEQ ID NO: 619960 - DNA, 57 bp, Artificial; identical to SEQ ID NO: 171057
  Synthetic oligonucleotide

SEQ ID NO: 619961 - DNA, 50 bp, Artificial; identical to SEQ ID NO: 237415
  Synthetic oligonucleotide

SEQ ID NO: 619962 - DNA, 53 bp, Artificial; identical to SEQ ID NO: 161315
  Synthetic oligonucleotide

SEQ ID NO: 619963 - DNA, 52 bp, Artificial; identical to SEQ ID NO: 186301
  Synthetic oligonucleotide

SEQ ID NO: 619964 - DNA, 57 bp, Artificial; identical to SEQ ID NO: 168378
  Synthetic oligonucleotide

SEQ ID NO: 619965 - DNA, 50 bp, Artificial; identical to SEQ ID NO: 165704
  Synthetic oligonucleotide

SEQ ID NO: 619966 - DNA, 53 bp, Artificial; identical to SEQ ID NO: 190703
  Synthetic oligonucleotide

SEQ ID NO: 619967 - DNA, 51 bp, Artificial; identical to SEQ ID NO: 247302
  Synthetic oligonucleotide

SEQ ID NO: 619968 - DNA, 55 bp, Artificial; identical to SEQ ID NO: 249311
  Synthetic oligonucleotide

SEQ ID NO: 619969 - DNA, 52 bp, Artificial; identical to SEQ ID NO: 248464
  Synthetic oligonucleotide

SEQ ID NO: 619970 - DNA, 55 bp, Artificial; identical to SEQ ID NO: 156640
  Synthetic oligonucleotide

SEQ ID NO: 619971 - DNA, 60 bp, Artificial; identical to SEQ ID NO: 200975
  Synthetic oligonucleotide

SEQ ID NO: 619972 - DNA, 58 bp, Artificial; identical to SEQ ID NO: 165134
  Synthetic oligonucleotide

SEQ ID NO: 619973 - DNA, 58 bp, Artificial; identical to SEQ ID NO: 239119
  Synthetic oligonucleotide

SEQ ID NO: 619974 - DNA, 60 bp, Artificial; identical to SEQ ID NO: 203068
  Synthetic oligonucleotide

SEQ ID NO: 619975 - DNA, 53 bp, Artificial; identical to SEQ ID NO: 247845
  Synthetic oligonucleotide

SEQ ID NO: 619976 - DNA, 50 bp, Artificial; identical to SEQ ID NO: 170697
  Synthetic oligonucleotide

SEQ ID NO: 619977 - DNA, 60 bp, Artificial; identical to SEQ ID NO: 207255
  Synthetic oligonucleotide

SEQ ID NO: 619978 - DNA, 55 bp, Artificial; identical to SEQ ID NO: 180375
  Synthetic oligonucleotide

SEQ ID NO: 619979 - DNA, 55 bp, Artificial; identical to SEQ ID NO: 190295
  Synthetic oligonucleotide

SEQ ID NO: 619980 - DNA, 55 bp, Artificial; identical to SEQ ID NO: 236471
  Synthetic oligonucleotide

SEQ ID NO: 619981 - DNA, 54 bp, Artificial; identical to SEQ ID NO: 188817
  Synthetic oligonucleotide

SEQ ID NO: 619982 - DNA, 52 bp, Artificial; identical to SEQ ID NO: 224115
  Synthetic oligonucleotide

SEQ ID NO: 619983 - DNA, 54 bp, Artificial; identical to SEQ ID NO: 185311
  Synthetic oligonucleotide

SEQ ID NO: 619984 - DNA, 52 bp, Artificial; identical to SEQ ID NO: 209693
  Synthetic oligonucleotide

SEQ ID NO: 619985 - DNA, 55 bp, Artificial; identical to SEQ ID NO: 148905
  Synthetic oligonucleotide

SEQ ID NO: 619986 - DNA, 55 bp, Artificial; identical to SEQ ID NO: 191924
  Synthetic oligonucleotide

SEQ ID NO: 619987 - DNA, 55 bp, Artificial; identical to SEQ ID NO: 245271
  Synthetic oligonucleotide

SEQ ID NO: 619988 - DNA, 54 bp, Artificial; identical to SEQ ID NO: 174483
  Synthetic oligonucleotide

SEQ ID NO: 619989 - DNA, 54 bp, Artificial; identical to SEQ ID NO: 253042
  Synthetic oligonucleotide

SEQ ID NO: 619990 - DNA, 53 bp, Artificial; identical to SEQ ID NO: 209134
  Synthetic oligonucleotide

SEQ ID NO: 619991 - DNA, 55 bp, Artificial; identical to SEQ ID NO: 188358
  Synthetic oligonucleotide

SEQ ID NO: 619992 - DNA, 54 bp, Artificial; identical to SEQ ID NO: 164707
  Synthetic oligonucleotide

SEQ ID NO: 619993 - DNA, 55 bp, Artificial; identical to SEQ ID NO: 171782
  Synthetic oligonucleotide

SEQ ID NO: 619994 - DNA, 54 bp, Artificial; identical to SEQ ID NO: 194291
  Synthetic oligonucleotide

SEQ ID NO: 619995 - DNA, 55 bp, Artificial; identical to SEQ ID NO: 180386
  Synthetic oligonucleotide

SEQ ID NO: 619996 - DNA, 51 bp, Artificial; identical to SEQ ID NO: 167180
  Synthetic oligonucleotide

SEQ ID NO: 619997 - DNA, 52 bp, Artificial; identical to SEQ ID NO: 218912
  Synthetic oligonucleotide

SEQ ID NO: 619998 - DNA, 55 bp, Artificial; identical to SEQ ID NO: 238394
  Synthetic oligonucleotide

SEQ ID NO: 619999 - DNA, 53 bp, Artificial; identical to SEQ ID NO: 212990
  Synthetic oligonucleotide

SEQ ID NO: 620000 - DNA, 52 bp, Artificial; identical to SEQ ID NO: 240848
  Synthetic oligonucleotide

SEQ ID NO: 620001 - DNA, 56 bp, Artificial; identical to SEQ ID NO: 200973
  Synthetic oligonucleotide

SEQ ID NO: 620002 - DNA, 53 bp, Artificial; identical to SEQ ID NO: 247851
  Synthetic oligonucleotide

SEQ ID NO: 620003 - DNA, 53 bp, Artificial; identical to SEQ ID NO: 197489
  Synthetic oligonucleotide

SEQ ID NO: 620004 - DNA, 53 bp, Artificial; identical to SEQ ID NO: 147054
  Synthetic oligonucleotide

SEQ ID NO: 620005 - DNA, 52 bp, Artificial; identical to SEQ ID NO: 165029
  Synthetic oligonucleotide

SEQ ID NO: 620006 - DNA, 54 bp, Artificial; identical to SEQ ID NO: 189089
  Synthetic oligonucleotide

SEQ ID NO: 620007 - DNA, 56 bp, Artificial; identical to SEQ ID NO: 197888
  Synthetic oligonucleotide

SEQ ID NO: 620008 - DNA, 55 bp, Artificial; identical to SEQ ID NO: 244083
  Synthetic oligonucleotide

SEQ ID NO: 620009 - DNA, 51 bp, Artificial; identical to SEQ ID NO: 240976
  Synthetic oligonucleotide

SEQ ID NO: 620010 - DNA, 58 bp, Artificial; identical to SEQ ID NO: 187243
  Synthetic oligonucleotide

SEQ ID NO: 620011 - DNA, 55 bp, Artificial; identical to SEQ ID NO: 180437
  Synthetic oligonucleotide

SEQ ID NO: 620012 - DNA, 52 bp, Artificial; identical to SEQ ID NO: 255510
  Synthetic oligonucleotide

SEQ ID NO: 620013 - DNA, 60 bp, Artificial; identical to SEQ ID NO: 243847
  Synthetic oligonucleotide

SEQ ID NO: 620014 - DNA, 54 bp, Artificial; identical to SEQ ID NO: 160407
  Synthetic oligonucleotide

SEQ ID NO: 620015 - DNA, 55 bp, Artificial; identical to SEQ ID NO: 233618
  Synthetic oligonucleotide

SEQ ID NO: 620016 - DNA, 54 bp, Artificial; identical to SEQ ID NO: 154556
  Synthetic oligonucleotide

SEQ ID NO: 620017 - DNA, 55 bp, Artificial; identical to SEQ ID NO: 220679
  Synthetic oligonucleotide

SEQ ID NO: 620018 - DNA, 55 bp, Artificial; identical to SEQ ID NO: 238395
  Synthetic oligonucleotide

SEQ ID NO: 620019 - DNA, 54 bp, Artificial; identical to SEQ ID NO: 157189
  Synthetic oligonucleotide

SEQ ID NO: 620020 - DNA, 52 bp, Artificial; identical to SEQ ID NO: 149499
  Synthetic oligonucleotide

SEQ ID NO: 620021 - DNA, 55 bp, Artificial; identical to SEQ ID NO: 244111
  Synthetic oligonucleotide

SEQ ID NO: 620022 - DNA, 60 bp, Artificial; identical to SEQ ID NO: 257886
  Synthetic oligonucleotide

SEQ ID NO: 620023 - DNA, 55 bp, Artificial; identical to SEQ ID NO: 218878
  Synthetic oligonucleotide

SEQ ID NO: 620024 - DNA, 55 bp, Artificial; identical to SEQ ID NO: 245218
  Synthetic oligonucleotide

SEQ ID NO: 620025 - DNA, 55 bp, Artificial; identical to SEQ ID NO: 144860
  Synthetic oligonucleotide

SEQ ID NO: 620026 - DNA, 58 bp, Artificial; identical to SEQ ID NO: 147176
  Synthetic oligonucleotide

SEQ ID NO: 620027 - DNA, 53 bp, Artificial; identical to SEQ ID NO: 189137
  Synthetic oligonucleotide

SEQ ID NO: 620028 - DNA, 59 bp, Artificial; identical to SEQ ID NO: 239116
  Synthetic oligonucleotide

SEQ ID NO: 620029 - DNA, 55 bp, Artificial; identical to SEQ ID NO: 180455
  Synthetic oligonucleotide

SEQ ID NO: 620030 - DNA, 52 bp, Artificial; identical to SEQ ID NO: 260237
  Synthetic oligonucleotide

SEQ ID NO: 620031 - DNA, 55 bp, Artificial; identical to SEQ ID NO: 244139
  Synthetic oligonucleotide

SEQ ID NO: 620032 - DNA, 55 bp, Artificial; identical to SEQ ID NO: 203741
  Synthetic oligonucleotide

SEQ ID NO: 620033 - DNA, 55 bp, Artificial; identical to SEQ ID NO: 220682
  Synthetic oligonucleotide

SEQ ID NO: 620034 - DNA, 55 bp, Artificial; identical to SEQ ID NO: 208627
  Synthetic oligonucleotide

SEQ ID NO: 620035 - DNA, 54 bp, Artificial; identical to SEQ ID NO: 259523
  Synthetic oligonucleotide

SEQ ID NO: 620036 - DNA, 52 bp, Artificial; identical to SEQ ID NO: 170106
  Synthetic oligonucleotide

SEQ ID NO: 620037 - DNA, 60 bp, Artificial; identical to SEQ ID NO: 141867
  Synthetic oligonucleotide

SEQ ID NO: 620038 - DNA, 60 bp, Artificial; identical to SEQ ID NO: 165090
  Synthetic oligonucleotide

SEQ ID NO: 620039 - DNA, 60 bp, Artificial; identical to SEQ ID NO: 247347
  Synthetic oligonucleotide

SEQ ID NO: 620040 - DNA, 57 bp, Artificial; identical to SEQ ID NO: 171056
  Synthetic oligonucleotide

SEQ ID NO: 620041 - DNA, 58 bp, Artificial; identical to SEQ ID NO: 266052
  Synthetic oligonucleotide

SEQ ID NO: 620042 - DNA, 53 bp, Artificial; identical to SEQ ID NO: 164960
  Synthetic oligonucleotide

SEQ ID NO: 620043 - DNA, 50 bp, Artificial; identical to SEQ ID NO: 241528
  Synthetic oligonucleotide

SEQ ID NO: 620044 - DNA, 52 bp, Artificial; identical to SEQ ID NO: 249246
  Synthetic oligonucleotide

SEQ ID NO: 620045 - DNA, 59 bp, Artificial; identical to SEQ ID NO: 180994
  Synthetic oligonucleotide

SEQ ID NO: 620046 - DNA, 57 bp, Artificial; identical to SEQ ID NO: 212359
  Synthetic oligonucleotide

SEQ ID NO: 620047 - DNA, 50 bp, Artificial; identical to SEQ ID NO: 223995
  Synthetic oligonucleotide

SEQ ID NO: 620048 - DNA, 55 bp, Artificial; identical to SEQ ID NO: 249279
  Synthetic oligonucleotide

SEQ ID NO: 620049 - DNA, 53 bp, Artificial; identical to SEQ ID NO: 237104
  Synthetic oligonucleotide

SEQ ID NO: 620050 - DNA, 56 bp, Artificial; identical to SEQ ID NO: 211280
  Synthetic oligonucleotide

SEQ ID NO: 620051 - DNA, 50 bp, Artificial; identical to SEQ ID NO: 144649
  Synthetic oligonucleotide

SEQ ID NO: 620052 - DNA, 60 bp, Artificial; identical to SEQ ID NO: 253186
  Synthetic oligonucleotide

SEQ ID NO: 620053 - DNA, 59 bp, Artificial; identical to SEQ ID NO: 201919
  Synthetic oligonucleotide

SEQ ID NO: 620054 - DNA, 59 bp, Artificial; identical to SEQ ID NO: 239113
  Synthetic oligonucleotide

SEQ ID NO: 620055 - DNA, 55 bp, Artificial; identical to SEQ ID NO: 245222
  Synthetic oligonucleotide

SEQ ID NO: 620056 - DNA, 53 bp, Artificial; identical to SEQ ID NO: 217180
  Synthetic oligonucleotide

SEQ ID NO: 620057 - DNA, 53 bp, Artificial; identical to SEQ ID NO: 170077
  Synthetic oligonucleotide

SEQ ID NO: 620058 - DNA, 57 bp, Artificial; identical to SEQ ID NO: 159820
  Synthetic oligonucleotide

SEQ ID NO: 620059 - DNA, 55 bp, Artificial; identical to SEQ ID NO: 255028
  Synthetic oligonucleotide

SEQ ID NO: 620060 - DNA, 52 bp, Artificial; identical to SEQ ID NO: 161113
  Synthetic oligonucleotide

SEQ ID NO: 620061 - DNA, 51 bp, Artificial; identical to SEQ ID NO: 165276
  Synthetic oligonucleotide

SEQ ID NO: 620062 - DNA, 54 bp, Artificial; identical to SEQ ID NO: 258077
  Synthetic oligonucleotide

SEQ ID NO: 620063 - DNA, 57 bp, Artificial; identical to SEQ ID NO: 191691
  Synthetic oligonucleotide

SEQ ID NO: 620064 - DNA, 55 bp, Artificial; identical to SEQ ID NO: 245223
  Synthetic oligonucleotide

SEQ ID NO: 620065 - DNA, 60 bp, Artificial; identical to SEQ ID NO: 248419
  Synthetic oligonucleotide

SEQ ID NO: 620066 - DNA, 56 bp, Artificial; identical to SEQ ID NO: 171079
  Synthetic oligonucleotide

SEQ ID NO: 620067 - DNA, 55 bp, Artificial; identical to SEQ ID NO: 224777
  Synthetic oligonucleotide

SEQ ID NO: 620068 - DNA, 55 bp, Artificial; identical to SEQ ID NO: 238292
  Synthetic oligonucleotide

SEQ ID NO: 620069 - DNA, 55 bp, Artificial; identical to SEQ ID NO: 180550
  Synthetic oligonucleotide

SEQ ID NO: 620070 - DNA, 51 bp, Artificial; identical to SEQ ID NO: 255728
  Synthetic oligonucleotide

SEQ ID NO: 620071 - DNA, 57 bp, Artificial; identical to SEQ ID NO: 179733
  Synthetic oligonucleotide

SEQ ID NO: 620072 - DNA, 52 bp, Artificial; identical to SEQ ID NO: 168766
  Synthetic oligonucleotide

SEQ ID NO: 620073 - DNA, 59 bp, Artificial; identical to SEQ ID NO: 200961
  Synthetic oligonucleotide

SEQ ID NO: 620074 - DNA, 55 bp, Artificial; identical to SEQ ID NO: 202272
  Synthetic oligonucleotide

SEQ ID NO: 620075 - DNA, 58 bp, Artificial; identical to SEQ ID NO: 200992
  Synthetic oligonucleotide

SEQ ID NO: 620076 - DNA, 55 bp, Artificial; identical to SEQ ID NO: 148825
  Synthetic oligonucleotide

SEQ ID NO: 620077 - DNA, 60 bp, Artificial; identical to SEQ ID NO: 257875
  Synthetic oligonucleotide

SEQ ID NO: 620078 - DNA, 55 bp, Artificial; identical to SEQ ID NO: 249275
  Synthetic oligonucleotide

SEQ ID NO: 620079 - DNA, 55 bp, Artificial; identical to SEQ ID NO: 224778
  Synthetic oligonucleotide

SEQ ID NO: 620080 - DNA, 53 bp, Artificial; identical to SEQ ID NO: 218328
  Synthetic oligonucleotide

SEQ ID NO: 620081 - DNA, 53 bp, Artificial; identical to SEQ ID NO: 258087
  Synthetic oligonucleotide

SEQ ID NO: 620082 - DNA, 56 bp, Artificial; identical to SEQ ID NO: 144309
  Synthetic oligonucleotide

SEQ ID NO: 620083 - DNA, 55 bp, Artificial; identical to SEQ ID NO: 194763
  Synthetic oligonucleotide

SEQ ID NO: 620084 - DNA, 54 bp, Artificial; identical to SEQ ID NO: 248408
  Synthetic oligonucleotide

SEQ ID NO: 620085 - DNA, 55 bp, Artificial; identical to SEQ ID NO: 238298
  Synthetic oligonucleotide

SEQ ID NO: 620086 - DNA, 50 bp, Artificial; identical to SEQ ID NO: 260147
  Synthetic oligonucleotide

SEQ ID NO: 620087 - DNA, 52 bp, Artificial; identical to SEQ ID NO: 256509
  Synthetic oligonucleotide

SEQ ID NO: 620088 - DNA, 53 bp, Artificial; identical to SEQ ID NO: 220762
  Synthetic oligonucleotide

SEQ ID NO: 620089 - DNA, 55 bp, Artificial; identical to SEQ ID NO: 205601
  Synthetic oligonucleotide

SEQ ID NO: 620090 - DNA, 55 bp, Artificial; identical to SEQ ID NO: 198826
  Synthetic oligonucleotide

SEQ ID NO: 620091 - DNA, 58 bp, Artificial; identical to SEQ ID NO: 207913
  Synthetic oligonucleotide

SEQ ID NO: 620092 - DNA, 57 bp, Artificial; identical to SEQ ID NO: 180672
  Synthetic oligonucleotide

SEQ ID NO: 620093 - DNA, 55 bp, Artificial; identical to SEQ ID NO: 255022
  Synthetic oligonucleotide

SEQ ID NO: 620094 - DNA, 60 bp, Artificial; identical to SEQ ID NO: 247317
  Synthetic oligonucleotide

SEQ ID NO: 620095 - DNA, 60 bp, Artificial; identical to SEQ ID NO: 161848
  Synthetic oligonucleotide

SEQ ID NO: 620096 - DNA, 55 bp, Artificial; identical to SEQ ID NO: 164526
  Synthetic oligonucleotide

SEQ ID NO: 620097 - DNA, 55 bp, Artificial; identical to SEQ ID NO: 166891
  Synthetic oligonucleotide

SEQ ID NO: 620098 - DNA, 55 bp, Artificial; identical to SEQ ID NO: 141166
  Synthetic oligonucleotide

SEQ ID NO: 620099 - DNA, 55 bp, Artificial; identical to SEQ ID NO: 224779
  Synthetic oligonucleotide

SEQ ID NO: 620100 - DNA, 55 bp, Artificial; identical to SEQ ID NO: 148227
  Synthetic oligonucleotide

SEQ ID NO: 620101 - DNA, 54 bp, Artificial; identical to SEQ ID NO: 258081
  Synthetic oligonucleotide

SEQ ID NO: 620102 - DNA, 55 bp, Artificial; identical to SEQ ID NO: 162217
  Synthetic oligonucleotide

SEQ ID NO: 620103 - DNA, 55 bp, Artificial; identical to SEQ ID NO: 240434
  Synthetic oligonucleotide

SEQ ID NO: 620104 - DNA, 55 bp, Artificial; identical to SEQ ID NO: 198830
  Synthetic oligonucleotide

SEQ ID NO: 620105 - DNA, 51 bp, Artificial; identical to SEQ ID NO: 188357
  Synthetic oligonucleotide

SEQ ID NO: 620106 - DNA, 55 bp, Artificial; identical to SEQ ID NO: 223473
  Synthetic oligonucleotide

SEQ ID NO: 620107 - DNA, 55 bp, Artificial; identical to SEQ ID NO: 240435
  Synthetic oligonucleotide

SEQ ID NO: 620108 - DNA, 51 bp, Artificial; identical to SEQ ID NO: 208867
  Synthetic oligonucleotide

SEQ ID NO: 620109 - DNA, 54 bp, Artificial; identical to SEQ ID NO: 185246
  Synthetic oligonucleotide

SEQ ID NO: 620110 - DNA, 52 bp, Artificial; identical to SEQ ID NO: 191779
  Synthetic oligonucleotide

SEQ ID NO: 620111 - DNA, 48 bp, Artificial; identical to SEQ ID NO: 217300
  Synthetic oligonucleotide

SEQ ID NO: 620112 - DNA, 53 bp, Artificial; identical to SEQ ID NO: 222708
  Synthetic oligonucleotide

SEQ ID NO: 620113 - DNA, 59 bp, Artificial; identical to SEQ ID NO: 248397
  Synthetic oligonucleotide

SEQ ID NO: 620114 - DNA, 58 bp, Artificial; identical to SEQ ID NO: 193141
  Synthetic oligonucleotide

SEQ ID NO: 620115 - DNA, 51 bp, Artificial; identical to SEQ ID NO: 146486
  Synthetic oligonucleotide

SEQ ID NO: 620116 - DNA, 59 bp, Artificial; identical to SEQ ID NO: 161253
  Synthetic oligonucleotide

SEQ ID NO: 620117 - DNA, 60 bp, Artificial; identical to SEQ ID NO: 239107
  Synthetic oligonucleotide

SEQ ID NO: 620118 - DNA, 55 bp, Artificial; identical to SEQ ID NO: 191921
  Synthetic oligonucleotide

SEQ ID NO: 620119 - DNA, 54 bp, Artificial; identical to SEQ ID NO: 189084
  Synthetic oligonucleotide

SEQ ID NO: 620120 - DNA, 59 bp, Artificial; identical to SEQ ID NO: 181349
  Synthetic oligonucleotide

SEQ ID NO: 620121 - DNA, 55 bp, Artificial; identical to SEQ ID NO: 180371
  Synthetic oligonucleotide

SEQ ID NO: 620122 - DNA, 60 bp, Artificial; identical to SEQ ID NO: 161264
  Synthetic oligonucleotide

SEQ ID NO: 620123 - DNA, 52 bp, Artificial; identical to SEQ ID NO: 248276
  Synthetic oligonucleotide

SEQ ID NO: 620124 - DNA, 55 bp, Artificial; identical to SEQ ID NO: 148890
  Synthetic oligonucleotide

SEQ ID NO: 620125 - DNA, 50 bp, Artificial; identical to SEQ ID NO: 150329
  Synthetic oligonucleotide

SEQ ID NO: 620126 - DNA, 50 bp, Artificial; identical to SEQ ID NO: 165721
  Synthetic oligonucleotide

SEQ ID NO: 620127 - DNA, 53 bp, Artificial; identical to SEQ ID NO: 161112
  Synthetic oligonucleotide

SEQ ID NO: 620128 - DNA, 55 bp, Artificial; identical to SEQ ID NO: 180332
  Synthetic oligonucleotide

SEQ ID NO: 620129 - DNA, 57 bp, Artificial; identical to SEQ ID NO: 200947
  Synthetic oligonucleotide

SEQ ID NO: 620130 - DNA, 53 bp, Artificial; identical to SEQ ID NO: 240745
  Synthetic oligonucleotide

SEQ ID NO: 620131 - DNA, 59 bp, Artificial; identical to SEQ ID NO: 141816
  Synthetic oligonucleotide

SEQ ID NO: 620132 - DNA, 53 bp, Artificial; identical to SEQ ID NO: 247328
  Synthetic oligonucleotide

SEQ ID NO: 620133 - DNA, 60 bp, Artificial; identical to SEQ ID NO: 247330
  Synthetic oligonucleotide

SEQ ID NO: 620134 - DNA, 58 bp, Artificial; identical to SEQ ID NO: 152914
  Synthetic oligonucleotide

SEQ ID NO: 620135 - DNA, 55 bp, Artificial; identical to SEQ ID NO: 238305
  Synthetic oligonucleotide

SEQ ID NO: 620136 - DNA, 55 bp, Artificial; identical to SEQ ID NO: 247735
  Synthetic oligonucleotide

SEQ ID NO: 620137 - DNA, 55 bp, Artificial; identical to SEQ ID NO: 235129
  Synthetic oligonucleotide

SEQ ID NO: 620138 - DNA, 55 bp, Artificial; identical to SEQ ID NO: 212853
  Synthetic oligonucleotide

SEQ ID NO: 620139 - DNA, 50 bp, Artificial; identical to SEQ ID NO: 204014
  Synthetic oligonucleotide

SEQ ID NO: 620140 - DNA, 54 bp, Artificial; identical to SEQ ID NO: 141214
  Synthetic oligonucleotide

SEQ ID NO: 620141 - DNA, 56 bp, Artificial; identical to SEQ ID NO: 152915
  Synthetic oligonucleotide

SEQ ID NO: 620142 - DNA, 49 bp, Artificial; identical to SEQ ID NO: 262760
  Synthetic oligonucleotide

SEQ ID NO: 620143 - DNA, 52 bp, Artificial; identical to SEQ ID NO: 186337
  Synthetic oligonucleotide

SEQ ID NO: 620144 - DNA, 54 bp, Artificial; identical to SEQ ID NO: 190671
  Synthetic oligonucleotide

SEQ ID NO: 620145 - DNA, 53 bp, Artificial; identical to SEQ ID NO: 152048
  Synthetic oligonucleotide

SEQ ID NO: 620146 - DNA, 51 bp, Artificial; identical to SEQ ID NO: 216844
  Synthetic oligonucleotide

SEQ ID NO: 620147 - DNA, 55 bp, Artificial; identical to SEQ ID NO: 181450
  Synthetic oligonucleotide

SEQ ID NO: 620148 - DNA, 55 bp, Artificial; identical to SEQ ID NO: 180345
  Synthetic oligonucleotide

SEQ ID NO: 620149 - DNA, 57 bp, Artificial; identical to SEQ ID NO: 181483
  Synthetic oligonucleotide

SEQ ID NO: 620150 - DNA, 55 bp, Artificial; identical to SEQ ID NO: 156621
  Synthetic oligonucleotide

SEQ ID NO: 620151 - DNA, 52 bp, Artificial; identical to SEQ ID NO: 206427
  Synthetic oligonucleotide

SEQ ID NO: 620152 - DNA, 56 bp, Artificial; identical to SEQ ID NO: 181516
  Synthetic oligonucleotide

SEQ ID NO: 620153 - DNA, 54 bp, Artificial; identical to SEQ ID NO: 149189
  Synthetic oligonucleotide

SEQ ID NO: 620154 - DNA, 53 bp, Artificial; identical to SEQ ID NO: 144856
  Synthetic oligonucleotide

SEQ ID NO: 620155 - DNA, 51 bp, Artificial; identical to SEQ ID NO: 240998
  Synthetic oligonucleotide

SEQ ID NO: 620156 - DNA, 55 bp, Artificial; identical to SEQ ID NO: 180352
  Synthetic oligonucleotide

SEQ ID NO: 620157 - DNA, 54 bp, Artificial; identical to SEQ ID NO: 246227
  Synthetic oligonucleotide

SEQ ID NO: 620158 - DNA, 59 bp, Artificial; identical to SEQ ID NO: 181550
  Synthetic oligonucleotide

SEQ ID NO: 620159 - DNA, 55 bp, Artificial; identical to SEQ ID NO: 168726
  Synthetic oligonucleotide

SEQ ID NO: 620160 - DNA, 56 bp, Artificial; identical to SEQ ID NO: 181561
  Synthetic oligonucleotide

SEQ ID NO: 620161 - DNA, 54 bp, Artificial; identical to SEQ ID NO: 180575
  Synthetic oligonucleotide

SEQ ID NO: 620162 - DNA, 55 bp, Artificial; identical to SEQ ID NO: 247335
  Synthetic oligonucleotide

SEQ ID NO: 620163 - DNA, 55 bp, Artificial; identical to SEQ ID NO: 239524
  Synthetic oligonucleotide

SEQ ID NO: 620164 - DNA, 56 bp, Artificial; identical to SEQ ID NO: 239097
  Synthetic oligonucleotide

SEQ ID NO: 620165 - DNA, 49 bp, Artificial; identical to SEQ ID NO: 257864
  Synthetic oligonucleotide

SEQ ID NO: 620166 - DNA, 55 bp, Artificial; identical to SEQ ID NO: 180584
  Synthetic oligonucleotide

SEQ ID NO: 620167 - DNA, 51 bp, Artificial; identical to SEQ ID NO: 248033
  Synthetic oligonucleotide

SEQ ID NO: 620168 - DNA, 55 bp, Artificial; identical to SEQ ID NO: 168687
  Synthetic oligonucleotide

SEQ ID NO: 620169 - DNA, 50 bp, Artificial; identical to SEQ ID NO: 177008
  Synthetic oligonucleotide

SEQ ID NO: 620170 - DNA, 55 bp, Artificial; identical to SEQ ID NO: 148205
  Synthetic oligonucleotide

SEQ ID NO: 620171 - DNA, 58 bp, Artificial; identical to SEQ ID NO: 161408
  Synthetic oligonucleotide

SEQ ID NO: 620172 - DNA, 49 bp, Artificial; identical to SEQ ID NO: 162037
  Synthetic oligonucleotide

SEQ ID NO: 620173 - DNA, 52 bp, Artificial; identical to SEQ ID NO: 186213
  Synthetic oligonucleotide

SEQ ID NO: 620174 - DNA, 53 bp, Artificial; identical to SEQ ID NO: 164525
  Synthetic oligonucleotide

SEQ ID NO: 620175 - DNA, 51 bp, Artificial; identical to SEQ ID NO: 192135
  Synthetic oligonucleotide

SEQ ID NO: 620176 - DNA, 53 bp, Artificial; identical to SEQ ID NO: 255148
  Synthetic oligonucleotide

SEQ ID NO: 620177 - DNA, 52 bp, Artificial; identical to SEQ ID NO: 190065
  Synthetic oligonucleotide

SEQ ID NO: 620178 - DNA, 51 bp, Artificial; identical to SEQ ID NO: 157852
  Synthetic oligonucleotide

SEQ ID NO: 620179 - DNA, 56 bp, Artificial; identical to SEQ ID NO: 237970
  Synthetic oligonucleotide

SEQ ID NO: 620180 - DNA, 50 bp, Artificial; identical to SEQ ID NO: 154972
  Synthetic oligonucleotide

SEQ ID NO: 620181 - DNA, 50 bp, Artificial; identical to SEQ ID NO: 152538
  Synthetic oligonucleotide

SEQ ID NO: 620182 - DNA, 53 bp, Artificial; identical to SEQ ID NO: 225232
  Synthetic oligonucleotide

SEQ ID NO: 620183 - DNA, 52 bp, Artificial; identical to SEQ ID NO: 186292
  Synthetic oligonucleotide

SEQ ID NO: 620184 - DNA, 55 bp, Artificial; identical to SEQ ID NO: 248165
  Synthetic oligonucleotide

SEQ ID NO: 620185 - DNA, 55 bp, Artificial; identical to SEQ ID NO: 171437
  Synthetic oligonucleotide

SEQ ID NO: 620186 - DNA, 55 bp, Artificial; identical to SEQ ID NO: 168702
  Synthetic oligonucleotide

SEQ ID NO: 620187 - DNA, 55 bp, Artificial; identical to SEQ ID NO: 221585
  Synthetic oligonucleotide

SEQ ID NO: 620188 - DNA, 55 bp, Artificial; identical to SEQ ID NO: 208655
  Synthetic oligonucleotide

SEQ ID NO: 620189 - DNA, 55 bp, Artificial; identical to SEQ ID NO: 255578
  Synthetic oligonucleotide

SEQ ID NO: 620190 - DNA, 53 bp, Artificial; identical to SEQ ID NO: 202979
  Synthetic oligonucleotide

SEQ ID NO: 620191 - DNA, 52 bp, Artificial; identical to SEQ ID NO: 162348
  Synthetic oligonucleotide

SEQ ID NO: 620192 - DNA, 54 bp, Artificial; identical to SEQ ID NO: 239046
  Synthetic oligonucleotide

SEQ ID NO: 620193 - DNA, 53 bp, Artificial; identical to SEQ ID NO: 148182
  Synthetic oligonucleotide

SEQ ID NO: 620194 - DNA, 54 bp, Artificial; identical to SEQ ID NO: 224783
  Synthetic oligonucleotide

SEQ ID NO: 620195 - DNA, 53 bp, Artificial; identical to SEQ ID NO: 255600
  Synthetic oligonucleotide

SEQ ID NO: 620196 - DNA, 51 bp, Artificial; identical to SEQ ID NO: 200928
  Synthetic oligonucleotide

SEQ ID NO: 620197 - DNA, 54 bp, Artificial; identical to SEQ ID NO: 185259
  Synthetic oligonucleotide

SEQ ID NO: 620198 - DNA, 50 bp, Artificial; identical to SEQ ID NO: 246893
  Synthetic oligonucleotide

SEQ ID NO: 620199 - DNA, 50 bp, Artificial; identical to SEQ ID NO: 143936
  Synthetic oligonucleotide

SEQ ID NO: 620200 - DNA, 52 bp, Artificial; identical to SEQ ID NO: 180624
  Synthetic oligonucleotide

SEQ ID NO: 620201 - DNA, 51 bp, Artificial; identical to SEQ ID NO: 220825
  Synthetic oligonucleotide

SEQ ID NO: 620202 - DNA, 52 bp, Artificial; identical to SEQ ID NO: 149232
  Synthetic oligonucleotide

SEQ ID NO: 620203 - DNA, 50 bp, Artificial; identical to SEQ ID NO: 243393
  Synthetic oligonucleotide

SEQ ID NO: 620204 - DNA, 51 bp, Artificial; identical to SEQ ID NO: 149929
  Synthetic oligonucleotide

SEQ ID NO: 620205 - DNA, 60 bp, Artificial; identical to SEQ ID NO: 181193
  Synthetic oligonucleotide

SEQ ID NO: 620206 - DNA, 50 bp, Artificial; identical to SEQ ID NO: 150299
  Synthetic oligonucleotide

SEQ ID NO: 620207 - DNA, 58 bp, Artificial; identical to SEQ ID NO: 179658
  Synthetic oligonucleotide

SEQ ID NO: 620208 - DNA, 55 bp, Artificial; identical to SEQ ID NO: 245240
  Synthetic oligonucleotide

SEQ ID NO: 620209 - DNA, 57 bp, Artificial; identical to SEQ ID NO: 181227
  Synthetic oligonucleotide

SEQ ID NO: 620210 - DNA, 59 bp, Artificial; identical to SEQ ID NO: 181249
  Synthetic oligonucleotide

SEQ ID NO: 620211 - DNA, 52 bp, Artificial; identical to SEQ ID NO: 209657
  Synthetic oligonucleotide

SEQ ID NO: 620212 - DNA, 54 bp, Artificial; identical to SEQ ID NO: 220754
  Synthetic oligonucleotide

SEQ ID NO: 620213 - DNA, 54 bp, Artificial; identical to SEQ ID NO: 209597
  Synthetic oligonucleotide

SEQ ID NO: 620214 - DNA, 50 bp, Artificial; identical to SEQ ID NO: 209775
  Synthetic oligonucleotide

SEQ ID NO: 620215 - DNA, 50 bp, Artificial; identical to SEQ ID NO: 150301
  Synthetic oligonucleotide

SEQ ID NO: 620216 - DNA, 55 bp, Artificial; identical to SEQ ID NO: 148769
  Synthetic oligonucleotide

SEQ ID NO: 620217 - DNA, 58 bp, Artificial; identical to SEQ ID NO: 247504
  Synthetic oligonucleotide

SEQ ID NO: 620218 - DNA, 57 bp, Artificial; identical to SEQ ID NO: 187277
  Synthetic oligonucleotide

SEQ ID NO: 620219 - DNA, 50 bp, Artificial; identical to SEQ ID NO: 246896
  Synthetic oligonucleotide

SEQ ID NO: 620220 - DNA, 55 bp, Artificial; identical to SEQ ID NO: 171497
  Synthetic oligonucleotide

SEQ ID NO: 620221 - DNA, 55 bp, Artificial; identical to SEQ ID NO: 156623
  Synthetic oligonucleotide

SEQ ID NO: 620222 - DNA, 53 bp, Artificial; identical to SEQ ID NO: 185556
  Synthetic oligonucleotide

SEQ ID NO: 620223 - DNA, 58 bp, Artificial; identical to SEQ ID NO: 165012
  Synthetic oligonucleotide

SEQ ID NO: 620224 - DNA, 52 bp, Artificial; identical to SEQ ID NO: 243277
  Synthetic oligonucleotide

SEQ ID NO: 620225 - DNA, 56 bp, Artificial; identical to SEQ ID NO: 141788
  Synthetic oligonucleotide

SEQ ID NO: 620226 - DNA, 53 bp, Artificial; identical to SEQ ID NO: 156210
  Synthetic oligonucleotide

SEQ ID NO: 620227 - DNA, 55 bp, Artificial; identical to SEQ ID NO: 142493
  Synthetic oligonucleotide

SEQ ID NO: 620228 - DNA, 55 bp, Artificial; identical to SEQ ID NO: 202856
  Synthetic oligonucleotide

SEQ ID NO: 620229 - DNA, 56 bp, Artificial; identical to SEQ ID NO: 143662
  Synthetic oligonucleotide

SEQ ID NO: 620230 - DNA, 55 bp, Artificial; identical to SEQ ID NO: 263164
  Synthetic oligonucleotide

SEQ ID NO: 620231 - DNA, 51 bp, Artificial; identical to SEQ ID NO: 208868
  Synthetic oligonucleotide

SEQ ID NO: 620232 - DNA, 55 bp, Artificial; identical to SEQ ID NO: 155424
  Synthetic oligonucleotide

SEQ ID NO: 620233 - DNA, 52 bp, Artificial; identical to SEQ ID NO: 186995
  Synthetic oligonucleotide

SEQ ID NO: 620234 - DNA, 54 bp, Artificial; identical to SEQ ID NO: 188021
  Synthetic oligonucleotide

SEQ ID NO: 620235 - DNA, 53 bp, Artificial; identical to SEQ ID NO: 244810
  Synthetic oligonucleotide

SEQ ID NO: 620236 - DNA, 52 bp, Artificial; identical to SEQ ID NO: 143819
  Synthetic oligonucleotide

SEQ ID NO: 620237 - DNA, 51 bp, Artificial; identical to SEQ ID NO: 215221
  Synthetic oligonucleotide

SEQ ID NO: 620238 - DNA, 59 bp, Artificial; identical to SEQ ID NO: 172769
  Synthetic oligonucleotide

SEQ ID NO: 620239 - DNA, 60 bp, Artificial; identical to SEQ ID NO: 257853
  Synthetic oligonucleotide

SEQ ID NO: 620240 - DNA, 58 bp, Artificial; identical to SEQ ID NO: 187269
  Synthetic oligonucleotide

SEQ ID NO: 620241 - DNA, 57 bp, Artificial; identical to SEQ ID NO: 204002
  Synthetic oligonucleotide

SEQ ID NO: 620242 - DNA, 53 bp, Artificial; identical to SEQ ID NO: 148571
  Synthetic oligonucleotide

SEQ ID NO: 620243 - DNA, 55 bp, Artificial; identical to SEQ ID NO: 212851
  Synthetic oligonucleotide

SEQ ID NO: 620244 - DNA, 54 bp, Artificial; identical to SEQ ID NO: 190681
  Synthetic oligonucleotide

SEQ ID NO: 620245 - DNA, 55 bp, Artificial; identical to SEQ ID NO: 207446
  Synthetic oligonucleotide

SEQ ID NO: 620246 - DNA, 55 bp, Artificial; identical to SEQ ID NO: 220697
  Synthetic oligonucleotide

SEQ ID NO: 620247 - DNA, 55 bp, Artificial; identical to SEQ ID NO: 238276
  Synthetic oligonucleotide

SEQ ID NO: 620248 - DNA, 55 bp, Artificial; identical to SEQ ID NO: 217877
  Synthetic oligonucleotide

SEQ ID NO: 620249 - DNA, 57 bp, Artificial; identical to SEQ ID NO: 209116
  Synthetic oligonucleotide

SEQ ID NO: 620250 - DNA, 60 bp, Artificial; identical to SEQ ID NO: 148538
  Synthetic oligonucleotide

SEQ ID NO: 620251 - DNA, 60 bp, Artificial; identical to SEQ ID NO: 223395
  Synthetic oligonucleotide

SEQ ID NO: 620252 - DNA, 55 bp, Artificial; identical to SEQ ID NO: 244832
  Synthetic oligonucleotide

SEQ ID NO: 620253 - DNA, 60 bp, Artificial; identical to SEQ ID NO: 203991
  Synthetic oligonucleotide

SEQ ID NO: 620254 - DNA, 59 bp, Artificial; identical to SEQ ID NO: 244843
  Synthetic oligonucleotide

SEQ ID NO: 620255 - DNA, 55 bp, Artificial; identical to SEQ ID NO: 249124
  Synthetic oligonucleotide

SEQ ID NO: 620256 - DNA, 55 bp, Artificial; identical to SEQ ID NO: 200933
  Synthetic oligonucleotide

SEQ ID NO: 620257 - DNA, 59 bp, Artificial; identical to SEQ ID NO: 223384
  Synthetic oligonucleotide

SEQ ID NO: 620258 - DNA, 55 bp, Artificial; identical to SEQ ID NO: 190356
  Synthetic oligonucleotide

SEQ ID NO: 620259 - DNA, 52 bp, Artificial; identical to SEQ ID NO: 149213
  Synthetic oligonucleotide

SEQ ID NO: 620260 - DNA, 55 bp, Artificial; identical to SEQ ID NO: 203732
  Synthetic oligonucleotide

SEQ ID NO: 620261 - DNA, 51 bp, Artificial; identical to SEQ ID NO: 190914
  Synthetic oligonucleotide

SEQ ID NO: 620262 - DNA, 55 bp, Artificial; identical to SEQ ID NO: 160820
  Synthetic oligonucleotide

SEQ ID NO: 620263 - DNA, 55 bp, Artificial; identical to SEQ ID NO: 239041
  Synthetic oligonucleotide

SEQ ID NO: 620264 - DNA, 54 bp, Artificial; identical to SEQ ID NO: 211526
  Synthetic oligonucleotide

SEQ ID NO: 620265 - DNA, 55 bp, Artificial; identical to SEQ ID NO: 187943
  Synthetic oligonucleotide

SEQ ID NO: 620266 - DNA, 55 bp, Artificial; identical to SEQ ID NO: 209443
  Synthetic oligonucleotide

SEQ ID NO: 620267 - DNA, 54 bp, Artificial; identical to SEQ ID NO: 157167
  Synthetic oligonucleotide

SEQ ID NO: 620268 - DNA, 55 bp, Artificial; identical to SEQ ID NO: 161865
  Synthetic oligonucleotide

SEQ ID NO: 620269 - DNA, 52 bp, Artificial; identical to SEQ ID NO: 223660
  Synthetic oligonucleotide

SEQ ID NO: 620270 - DNA, 55 bp, Artificial; identical to SEQ ID NO: 152354
  Synthetic oligonucleotide

SEQ ID NO: 620271 - DNA, 52 bp, Artificial; identical to SEQ ID NO: 247961
  Synthetic oligonucleotide

SEQ ID NO: 620272 - DNA, 54 bp, Artificial; identical to SEQ ID NO: 157168
  Synthetic oligonucleotide

SEQ ID NO: 620273 - DNA, 55 bp, Artificial; identical to SEQ ID NO: 190358
  Synthetic oligonucleotide

SEQ ID NO: 620274 - DNA, 54 bp, Artificial; identical to SEQ ID NO: 243055
  Synthetic oligonucleotide

SEQ ID NO: 620275 - DNA, 54 bp, Artificial; identical to SEQ ID NO: 211269
  Synthetic oligonucleotide

SEQ ID NO: 620276 - DNA, 50 bp, Artificial; identical to SEQ ID NO: 189827
  Synthetic oligonucleotide

SEQ ID NO: 620277 - DNA, 56 bp, Artificial; identical to SEQ ID NO: 247614
  Synthetic oligonucleotide

SEQ ID NO: 620278 - DNA, 55 bp, Artificial; identical to SEQ ID NO: 240394
  Synthetic oligonucleotide

SEQ ID NO: 620279 - DNA, 50 bp, Artificial; identical to SEQ ID NO: 152363
  Synthetic oligonucleotide

SEQ ID NO: 620280 - DNA, 53 bp, Artificial; identical to SEQ ID NO: 244854
  Synthetic oligonucleotide

SEQ ID NO: 620281 - DNA, 53 bp, Artificial; identical to SEQ ID NO: 200983
  Synthetic oligonucleotide

SEQ ID NO: 620282 - DNA, 53 bp, Artificial; identical to SEQ ID NO: 202855
  Synthetic oligonucleotide

SEQ ID NO: 620283 - DNA, 55 bp, Artificial; identical to SEQ ID NO: 180491
  Synthetic oligonucleotide

SEQ ID NO: 620284 - DNA, 52 bp, Artificial; identical to SEQ ID NO: 195054
  Synthetic oligonucleotide

SEQ ID NO: 620285 - DNA, 58 bp, Artificial; identical to SEQ ID NO: 257488
  Synthetic oligonucleotide

SEQ ID NO: 620286 - DNA, 53 bp, Artificial; identical to SEQ ID NO: 149357
  Synthetic oligonucleotide

SEQ ID NO: 620287 - DNA, 55 bp, Artificial; identical to SEQ ID NO: 253707
  Synthetic oligonucleotide

SEQ ID NO: 620288 - DNA, 54 bp, Artificial; identical to SEQ ID NO: 164979
  Synthetic oligonucleotide

SEQ ID NO: 620289 - DNA, 55 bp, Artificial; identical to SEQ ID NO: 162244
  Synthetic oligonucleotide

SEQ ID NO: 620290 - DNA, 59 bp, Artificial; identical to SEQ ID NO: 239036
  Synthetic oligonucleotide

SEQ ID NO: 620291 - DNA, 59 bp, Artificial; identical to SEQ ID NO: 239035
  Synthetic oligonucleotide

SEQ ID NO: 620292 - DNA, 53 bp, Artificial; identical to SEQ ID NO: 192051
  Synthetic oligonucleotide

SEQ ID NO: 620293 - DNA, 57 bp, Artificial; identical to SEQ ID NO: 148482
  Synthetic oligonucleotide

SEQ ID NO: 620294 - DNA, 55 bp, Artificial; identical to SEQ ID NO: 197279
  Synthetic oligonucleotide

SEQ ID NO: 620295 - DNA, 55 bp, Artificial; identical to SEQ ID NO: 257946
  Synthetic oligonucleotide

SEQ ID NO: 620296 - DNA, 53 bp, Artificial; identical to SEQ ID NO: 185540
  Synthetic oligonucleotide

SEQ ID NO: 620297 - DNA, 55 bp, Artificial; identical to SEQ ID NO: 179458
  Synthetic oligonucleotide

SEQ ID NO: 620298 - DNA, 52 bp, Artificial; identical to SEQ ID NO: 146449
  Synthetic oligonucleotide

SEQ ID NO: 620299 - DNA, 55 bp, Artificial; identical to SEQ ID NO: 254884
  Synthetic oligonucleotide

SEQ ID NO: 620300 - DNA, 55 bp, Artificial; identical to SEQ ID NO: 244094
  Synthetic oligonucleotide

SEQ ID NO: 620301 - DNA, 55 bp, Artificial; identical to SEQ ID NO: 207442
  Synthetic oligonucleotide

SEQ ID NO: 620302 - DNA, 55 bp, Artificial; identical to SEQ ID NO: 254880
  Synthetic oligonucleotide

SEQ ID NO: 620303 - DNA, 55 bp, Artificial; identical to SEQ ID NO: 171500
  Synthetic oligonucleotide

SEQ ID NO: 620304 - DNA, 55 bp, Artificial; identical to SEQ ID NO: 202063
  Synthetic oligonucleotide

SEQ ID NO: 620305 - DNA, 53 bp, Artificial; identical to SEQ ID NO: 257129
  Synthetic oligonucleotide

SEQ ID NO: 620306 - DNA, 54 bp, Artificial; identical to SEQ ID NO: 255193
  Synthetic oligonucleotide

SEQ ID NO: 620307 - DNA, 53 bp, Artificial; identical to SEQ ID NO: 255316
  Synthetic oligonucleotide

SEQ ID NO: 620308 - DNA, 50 bp, Artificial; identical to SEQ ID NO: 144195
  Synthetic oligonucleotide

SEQ ID NO: 620309 - DNA, 55 bp, Artificial; identical to SEQ ID NO: 167322
  Synthetic oligonucleotide

SEQ ID NO: 620310 - DNA, 53 bp, Artificial; identical to SEQ ID NO: 149351
  Synthetic oligonucleotide

SEQ ID NO: 620311 - DNA, 57 bp, Artificial; identical to SEQ ID NO: 239363
  Synthetic oligonucleotide

SEQ ID NO: 620312 - DNA, 60 bp, Artificial; identical to SEQ ID NO: 239034
  Synthetic oligonucleotide

SEQ ID NO: 620313 - DNA, 50 bp, Artificial; identical to SEQ ID NO: 196734
  Synthetic oligonucleotide

SEQ ID NO: 620314 - DNA, 52 bp, Artificial; identical to SEQ ID NO: 193113
  Synthetic oligonucleotide

SEQ ID NO: 620315 - DNA, 55 bp, Artificial; identical to SEQ ID NO: 171501
  Synthetic oligonucleotide

SEQ ID NO: 620316 - DNA, 56 bp, Artificial; identical to SEQ ID NO: 212658
  Synthetic oligonucleotide

SEQ ID NO: 620317 - DNA, 55 bp, Artificial; identical to SEQ ID NO: 180480
  Synthetic oligonucleotide

SEQ ID NO: 620318 - DNA, 53 bp, Artificial; identical to SEQ ID NO: 218327
  Synthetic oligonucleotide

SEQ ID NO: 620319 - DNA, 55 bp, Artificial; identical to SEQ ID NO: 180481
  Synthetic oligonucleotide

SEQ ID NO: 620320 - DNA, 57 bp, Artificial; identical to SEQ ID NO: 187268
  Synthetic oligonucleotide

SEQ ID NO: 620321 - DNA, 56 bp, Artificial; identical to SEQ ID NO: 148438
  Synthetic oligonucleotide

SEQ ID NO: 620322 - DNA, 55 bp, Artificial; identical to SEQ ID NO: 184393
  Synthetic oligonucleotide

SEQ ID NO: 620323 - DNA, 53 bp, Artificial; identical to SEQ ID NO: 144538
  Synthetic oligonucleotide

SEQ ID NO: 620324 - DNA, 59 bp, Artificial; identical to SEQ ID NO: 191823
  Synthetic oligonucleotide

SEQ ID NO: 620325 - DNA, 50 bp, Artificial; identical to SEQ ID NO: 220962
  Synthetic oligonucleotide

SEQ ID NO: 620326 - DNA, 51 bp, Artificial; identical to SEQ ID NO: 200110
  Synthetic oligonucleotide

SEQ ID NO: 620327 - DNA, 54 bp, Artificial; identical to SEQ ID NO: 243042
  Synthetic oligonucleotide

SEQ ID NO: 620328 - DNA, 55 bp, Artificial; identical to SEQ ID NO: 253241
  Synthetic oligonucleotide

SEQ ID NO: 620329 - DNA, 53 bp, Artificial; identical to SEQ ID NO: 237029
  Synthetic oligonucleotide

SEQ ID NO: 620330 - DNA, 51 bp, Artificial; identical to SEQ ID NO: 142637
  Synthetic oligonucleotide

SEQ ID NO: 620331 - DNA, 57 bp, Artificial; identical to SEQ ID NO: 243794
  Synthetic oligonucleotide

SEQ ID NO: 620332 - DNA, 55 bp, Artificial; identical to SEQ ID NO: 211305
  Synthetic oligonucleotide

SEQ ID NO: 620333 - DNA, 54 bp, Artificial; identical to SEQ ID NO: 185424
  Synthetic oligonucleotide

SEQ ID NO: 620334 - DNA, 57 bp, Artificial; identical to SEQ ID NO: 208088
  Synthetic oligonucleotide

SEQ ID NO: 620335 - DNA, 56 bp, Artificial; identical to SEQ ID NO: 211258
  Synthetic oligonucleotide

SEQ ID NO: 620336 - DNA, 55 bp, Artificial; identical to SEQ ID NO: 225204
  Synthetic oligonucleotide

SEQ ID NO: 620337 - DNA, 51 bp, Artificial; identical to SEQ ID NO: 193870
  Synthetic oligonucleotide

SEQ ID NO: 620338 - DNA, 54 bp, Artificial; identical to SEQ ID NO: 173657
  Synthetic oligonucleotide

SEQ ID NO: 620339 - DNA, 55 bp, Artificial; identical to SEQ ID NO: 187746
  Synthetic oligonucleotide

SEQ ID NO: 620340 - DNA, 60 bp, Artificial; identical to SEQ ID NO: 255700
  Synthetic oligonucleotide

SEQ ID NO: 620341 - DNA, 54 bp, Artificial; identical to SEQ ID NO: 257842
  Synthetic oligonucleotide

SEQ ID NO: 620342 - DNA, 53 bp, Artificial; identical to SEQ ID NO: 194978
  Synthetic oligonucleotide

SEQ ID NO: 620343 - DNA, 56 bp, Artificial; identical to SEQ ID NO: 225543
  Synthetic oligonucleotide

SEQ ID NO: 620344 - DNA, 55 bp, Artificial; identical to SEQ ID NO: 244086
  Synthetic oligonucleotide

SEQ ID NO: 620345 - DNA, 51 bp, Artificial; identical to SEQ ID NO: 210352
  Synthetic oligonucleotide

SEQ ID NO: 620346 - DNA, 53 bp, Artificial; identical to SEQ ID NO: 185527
  Synthetic oligonucleotide

SEQ ID NO: 620347 - DNA, 50 bp, Artificial; identical to SEQ ID NO: 196736
  Synthetic oligonucleotide

SEQ ID NO: 620348 - DNA, 51 bp, Artificial; identical to SEQ ID NO: 203013
  Synthetic oligonucleotide

SEQ ID NO: 620349 - DNA, 55 bp, Artificial; identical to SEQ ID NO: 146253
  Synthetic oligonucleotide

SEQ ID NO: 620350 - DNA, 58 bp, Artificial; identical to SEQ ID NO: 183927
  Synthetic oligonucleotide

SEQ ID NO: 620351 - DNA, 54 bp, Artificial; identical to SEQ ID NO: 162251
  Synthetic oligonucleotide

SEQ ID NO: 620352 - DNA, 53 bp, Artificial; identical to SEQ ID NO: 209651
  Synthetic oligonucleotide

SEQ ID NO: 620353 - DNA, 55 bp, Artificial; identical to SEQ ID NO: 166955
  Synthetic oligonucleotide

SEQ ID NO: 620354 - DNA, 60 bp, Artificial; identical to SEQ ID NO: 239027
  Synthetic oligonucleotide

SEQ ID NO: 620355 - DNA, 60 bp, Artificial; identical to SEQ ID NO: 200964
  Synthetic oligonucleotide

SEQ ID NO: 620356 - DNA, 58 bp, Artificial; identical to SEQ ID NO: 243800
  Synthetic oligonucleotide

SEQ ID NO: 620357 - DNA, 50 bp, Artificial; identical to SEQ ID NO: 154038
  Synthetic oligonucleotide

SEQ ID NO: 620358 - DNA, 50 bp, Artificial; identical to SEQ ID NO: 170712
  Synthetic oligonucleotide

SEQ ID NO: 620359 - DNA, 55 bp, Artificial; identical to SEQ ID NO: 151682
  Synthetic oligonucleotide

SEQ ID NO: 620360 - DNA, 55 bp, Artificial; identical to SEQ ID NO: 156826
  Synthetic oligonucleotide

SEQ ID NO: 620361 - DNA, 51 bp, Artificial; identical to SEQ ID NO: 246686
  Synthetic oligonucleotide

SEQ ID NO: 620362 - DNA, 60 bp, Artificial; identical to SEQ ID NO: 162081
  Synthetic oligonucleotide

SEQ ID NO: 620363 - DNA, 52 bp, Artificial; identical to SEQ ID NO: 147195
  Synthetic oligonucleotide

SEQ ID NO: 620364 - DNA, 60 bp, Artificial; identical to SEQ ID NO: 244910
  Synthetic oligonucleotide

SEQ ID NO: 620365 - DNA, 60 bp, Artificial; identical to SEQ ID NO: 244921
  Synthetic oligonucleotide

SEQ ID NO: 620366 - DNA, 59 bp, Artificial; identical to SEQ ID NO: 194392
  Synthetic oligonucleotide

SEQ ID NO: 620367 - DNA, 60 bp, Artificial; identical to SEQ ID NO: 156265
  Synthetic oligonucleotide

SEQ ID NO: 620368 - DNA, 60 bp, Artificial; identical to SEQ ID NO: 184005
  Synthetic oligonucleotide

SEQ ID NO: 620369 - DNA, 55 bp, Artificial; identical to SEQ ID NO: 151955
  Synthetic oligonucleotide

SEQ ID NO: 620370 - DNA, 55 bp, Artificial; identical to SEQ ID NO: 164517
  Synthetic oligonucleotide

SEQ ID NO: 620371 - DNA, 50 bp, Artificial; identical to SEQ ID NO: 167194
  Synthetic oligonucleotide

SEQ ID NO: 620372 - DNA, 50 bp, Artificial; identical to SEQ ID NO: 192214
  Synthetic oligonucleotide

SEQ ID NO: 620373 - DNA, 55 bp, Artificial; identical to SEQ ID NO: 164946
  Synthetic oligonucleotide

SEQ ID NO: 620374 - DNA, 58 bp, Artificial; identical to SEQ ID NO: 191699
  Synthetic oligonucleotide

SEQ ID NO: 620375 - DNA, 51 bp, Artificial; identical to SEQ ID NO: 186862
  Synthetic oligonucleotide

SEQ ID NO: 620376 - DNA, 56 bp, Artificial; identical to SEQ ID NO: 164933
  Synthetic oligonucleotide

SEQ ID NO: 620377 - DNA, 53 bp, Artificial; identical to SEQ ID NO: 149312
  Synthetic oligonucleotide

SEQ ID NO: 620378 - DNA, 59 bp, Artificial; identical to SEQ ID NO: 200967
  Synthetic oligonucleotide

SEQ ID NO: 620379 - DNA, 56 bp, Artificial; identical to SEQ ID NO: 184060
  Synthetic oligonucleotide

SEQ ID NO: 620380 - DNA, 56 bp, Artificial; identical to SEQ ID NO: 200969
  Synthetic oligonucleotide

SEQ ID NO: 620381 - DNA, 54 bp, Artificial; identical to SEQ ID NO: 155517
  Synthetic oligonucleotide

SEQ ID NO: 620382 - DNA, 54 bp, Artificial; identical to SEQ ID NO: 240574
  Synthetic oligonucleotide

SEQ ID NO: 620383 - DNA, 55 bp, Artificial; identical to SEQ ID NO: 141842
  Synthetic oligonucleotide

SEQ ID NO: 620384 - DNA, 55 bp, Artificial; identical to SEQ ID NO: 240405
  Synthetic oligonucleotide

SEQ ID NO: 620385 - DNA, 50 bp, Artificial; identical to SEQ ID NO: 165986
  Synthetic oligonucleotide

SEQ ID NO: 620386 - DNA, 59 bp, Artificial; identical to SEQ ID NO: 154092
  Synthetic oligonucleotide

SEQ ID NO: 620387 - DNA, 57 bp, Artificial; identical to SEQ ID NO: 244954
  Synthetic oligonucleotide

SEQ ID NO: 620388 - DNA, 53 bp, Artificial; identical to SEQ ID NO: 212952
  Synthetic oligonucleotide

SEQ ID NO: 620389 - DNA, 57 bp, Artificial; identical to SEQ ID NO: 202074
  Synthetic oligonucleotide

SEQ ID NO: 620390 - DNA, 57 bp, Artificial; identical to SEQ ID NO: 194281
  Synthetic oligonucleotide

SEQ ID NO: 620391 - DNA, 51 bp, Artificial; identical to SEQ ID NO: 188507
  Synthetic oligonucleotide

SEQ ID NO: 620392 - DNA, 52 bp, Artificial; identical to SEQ ID NO: 149496
  Synthetic oligonucleotide

SEQ ID NO: 620393 - DNA, 55 bp, Artificial; identical to SEQ ID NO: 218879
  Synthetic oligonucleotide

SEQ ID NO: 620394 - DNA, 60 bp, Artificial; identical to SEQ ID NO: 247832
  Synthetic oligonucleotide

SEQ ID NO: 620395 - DNA, 54 bp, Artificial; identical to SEQ ID NO: 189082
  Synthetic oligonucleotide

SEQ ID NO: 620396 - DNA, 57 bp, Artificial; identical to SEQ ID NO: 267321
  Synthetic oligonucleotide

SEQ ID NO: 620397 - DNA, 60 bp, Artificial; identical to SEQ ID NO: 170951
  Synthetic oligonucleotide

SEQ ID NO: 620398 - DNA, 54 bp, Artificial; identical to SEQ ID NO: 164748
  Synthetic oligonucleotide

SEQ ID NO: 620399 - DNA, 55 bp, Artificial; identical to SEQ ID NO: 164516
  Synthetic oligonucleotide

SEQ ID NO: 620400 - DNA, 55 bp, Artificial; identical to SEQ ID NO: 189489
  Synthetic oligonucleotide

SEQ ID NO: 620401 - DNA, 56 bp, Artificial; identical to SEQ ID NO: 207555
  Synthetic oligonucleotide

SEQ ID NO: 620402 - DNA, 54 bp, Artificial; identical to SEQ ID NO: 185401
  Synthetic oligonucleotide

SEQ ID NO: 620403 - DNA, 50 bp, Artificial; identical to SEQ ID NO: 253614
  Synthetic oligonucleotide

SEQ ID NO: 620404 - DNA, 55 bp, Artificial; identical to SEQ ID NO: 208601
  Synthetic oligonucleotide

SEQ ID NO: 620405 - DNA, 55 bp, Artificial; identical to SEQ ID NO: 148932
  Synthetic oligonucleotide

SEQ ID NO: 620406 - DNA, 51 bp, Artificial; identical to SEQ ID NO: 258196
  Synthetic oligonucleotide

SEQ ID NO: 620407 - DNA, 55 bp, Artificial; identical to SEQ ID NO: 202854
  Synthetic oligonucleotide

SEQ ID NO: 620408 - DNA, 53 bp, Artificial; identical to SEQ ID NO: 194976
  Synthetic oligonucleotide

SEQ ID NO: 620409 - DNA, 53 bp, Artificial; identical to SEQ ID NO: 188067
  Synthetic oligonucleotide

SEQ ID NO: 620410 - DNA, 54 bp, Artificial; identical to SEQ ID NO: 184715
  Synthetic oligonucleotide

SEQ ID NO: 620411 - DNA, 55 bp, Artificial; identical to SEQ ID NO: 240400
  Synthetic oligonucleotide

SEQ ID NO: 620412 - DNA, 54 bp, Artificial; identical to SEQ ID NO: 246248
  Synthetic oligonucleotide

SEQ ID NO: 620413 - DNA, 52 bp, Artificial; identical to SEQ ID NO: 193602
  Synthetic oligonucleotide

SEQ ID NO: 620414 - DNA, 55 bp, Artificial; identical to SEQ ID NO: 238279
  Synthetic oligonucleotide

SEQ ID NO: 620415 - DNA, 53 bp, Artificial; identical to SEQ ID NO: 237028
  Synthetic oligonucleotide

SEQ ID NO: 620416 - DNA, 57 bp, Artificial; identical to SEQ ID NO: 207925
  Synthetic oligonucleotide

SEQ ID NO: 620417 - DNA, 51 bp, Artificial; identical to SEQ ID NO: 153707
  Synthetic oligonucleotide

SEQ ID NO: 620418 - DNA, 54 bp, Artificial; identical to SEQ ID NO: 248598
  Synthetic oligonucleotide

SEQ ID NO: 620419 - DNA, 55 bp, Artificial; identical to SEQ ID NO: 249150
  Synthetic oligonucleotide

SEQ ID NO: 620420 - DNA, 55 bp, Artificial; identical to SEQ ID NO: 200866
  Synthetic oligonucleotide

SEQ ID NO: 620421 - DNA, 57 bp, Artificial; identical to SEQ ID NO: 200872
  Synthetic oligonucleotide

SEQ ID NO: 620422 - DNA, 59 bp, Artificial; identical to SEQ ID NO: 234120
  Synthetic oligonucleotide

SEQ ID NO: 620423 - DNA, 55 bp, Artificial; identical to SEQ ID NO: 190322
  Synthetic oligonucleotide

SEQ ID NO: 620424 - DNA, 55 bp, Artificial; identical to SEQ ID NO: 189010
  Synthetic oligonucleotide

SEQ ID NO: 620425 - DNA, 55 bp, Artificial; identical to SEQ ID NO: 164475
  Synthetic oligonucleotide

SEQ ID NO: 620426 - DNA, 59 bp, Artificial; identical to SEQ ID NO: 200876
  Synthetic oligonucleotide

SEQ ID NO: 620427 - DNA, 53 bp, Artificial; identical to SEQ ID NO: 223630
  Synthetic oligonucleotide

SEQ ID NO: 620428 - DNA, 52 bp, Artificial; identical to SEQ ID NO: 223664
  Synthetic oligonucleotide

SEQ ID NO: 620429 - DNA, 55 bp, Artificial; identical to SEQ ID NO: 245511
  Synthetic oligonucleotide

SEQ ID NO: 620430 - DNA, 59 bp, Artificial; identical to SEQ ID NO: 141905
  Synthetic oligonucleotide

SEQ ID NO: 620431 - DNA, 59 bp, Artificial; identical to SEQ ID NO: 255733
  Synthetic oligonucleotide

SEQ ID NO: 620432 - DNA, 55 bp, Artificial; identical to SEQ ID NO: 142488
  Synthetic oligonucleotide

SEQ ID NO: 620433 - DNA, 51 bp, Artificial; identical to SEQ ID NO: 241139
  Synthetic oligonucleotide

SEQ ID NO: 620434 - DNA, 55 bp, Artificial; identical to SEQ ID NO: 245512
  Synthetic oligonucleotide

SEQ ID NO: 620435 - DNA, 58 bp, Artificial; identical to SEQ ID NO: 252931
  Synthetic oligonucleotide

SEQ ID NO: 620436 - DNA, 51 bp, Artificial; identical to SEQ ID NO: 215214
  Synthetic oligonucleotide

SEQ ID NO: 620437 - DNA, 52 bp, Artificial; identical to SEQ ID NO: 216723
  Synthetic oligonucleotide

SEQ ID NO: 620438 - DNA, 57 bp, Artificial; identical to SEQ ID NO: 237936
  Synthetic oligonucleotide

SEQ ID NO: 620439 - DNA, 59 bp, Artificial; identical to SEQ ID NO: 191867
  Synthetic oligonucleotide

SEQ ID NO: 620440 - DNA, 52 bp, Artificial; identical to SEQ ID NO: 246468
  Synthetic oligonucleotide

SEQ ID NO: 620441 - DNA, 53 bp, Artificial; identical to SEQ ID NO: 215196
  Synthetic oligonucleotide

SEQ ID NO: 620442 - DNA, 56 bp, Artificial; identical to SEQ ID NO: 243808
  Synthetic oligonucleotide

SEQ ID NO: 620443 - DNA, 57 bp, Artificial; identical to SEQ ID NO: 217141
  Synthetic oligonucleotide

SEQ ID NO: 620444 - DNA, 55 bp, Artificial; identical to SEQ ID NO: 254893
  Synthetic oligonucleotide

SEQ ID NO: 620445 - DNA, 53 bp, Artificial; identical to SEQ ID NO: 217142
  Synthetic oligonucleotide

SEQ ID NO: 620446 - DNA, 51 bp, Artificial; identical to SEQ ID NO: 155599
  Synthetic oligonucleotide

SEQ ID NO: 620447 - DNA, 53 bp, Artificial; identical to SEQ ID NO: 161111
  Synthetic oligonucleotide

SEQ ID NO: 620448 - DNA, 58 bp, Artificial; identical to SEQ ID NO: 255766
  Synthetic oligonucleotide

SEQ ID NO: 620449 - DNA, 60 bp, Artificial; identical to SEQ ID NO: 207533
  Synthetic oligonucleotide

SEQ ID NO: 620450 - DNA, 58 bp, Artificial; identical to SEQ ID NO: 184849
  Synthetic oligonucleotide

SEQ ID NO: 620451 - DNA, 57 bp, Artificial; identical to SEQ ID NO: 207522
  Synthetic oligonucleotide

SEQ ID NO: 620452 - DNA, 55 bp, Artificial; identical to SEQ ID NO: 240389
  Synthetic oligonucleotide

SEQ ID NO: 620453 - DNA, 58 bp, Artificial; identical to SEQ ID NO: 239066
  Synthetic oligonucleotide

SEQ ID NO: 620454 - DNA, 56 bp, Artificial; identical to SEQ ID NO: 147860
  Synthetic oligonucleotide

SEQ ID NO: 620455 - DNA, 55 bp, Artificial; identical to SEQ ID NO: 187689
  Synthetic oligonucleotide

SEQ ID NO: 620456 - DNA, 54 bp, Artificial; identical to SEQ ID NO: 212286
  Synthetic oligonucleotide

SEQ ID NO: 620457 - DNA, 53 bp, Artificial; identical to SEQ ID NO: 159897
  Synthetic oligonucleotide

SEQ ID NO: 620458 - DNA, 58 bp, Artificial; identical to SEQ ID NO: 211247
  Synthetic oligonucleotide

SEQ ID NO: 620459 - DNA, 53 bp, Artificial; identical to SEQ ID NO: 240749
  Synthetic oligonucleotide

SEQ ID NO: 620460 - DNA, 52 bp, Artificial; identical to SEQ ID NO: 213012
  Synthetic oligonucleotide

SEQ ID NO: 620461 - DNA, 60 bp, Artificial; identical to SEQ ID NO: 184860
  Synthetic oligonucleotide

SEQ ID NO: 620462 - DNA, 50 bp, Artificial; identical to SEQ ID NO: 189829
  Synthetic oligonucleotide

SEQ ID NO: 620463 - DNA, 55 bp, Artificial; identical to SEQ ID NO: 203726
  Synthetic oligonucleotide

SEQ ID NO: 620464 - DNA, 60 bp, Artificial; identical to SEQ ID NO: 223340
  Synthetic oligonucleotide

SEQ ID NO: 620465 - DNA, 55 bp, Artificial; identical to SEQ ID NO: 180239
  Synthetic oligonucleotide

SEQ ID NO: 620466 - DNA, 50 bp, Artificial; identical to SEQ ID NO: 200405
  Synthetic oligonucleotide

SEQ ID NO: 620467 - DNA, 55 bp, Artificial; identical to SEQ ID NO: 164474
  Synthetic oligonucleotide

SEQ ID NO: 620468 - DNA, 55 bp, Artificial; identical to SEQ ID NO: 201656
  Synthetic oligonucleotide

SEQ ID NO: 620469 - DNA, 60 bp, Artificial; identical to SEQ ID NO: 141822
  Synthetic oligonucleotide

SEQ ID NO: 620470 - DNA, 59 bp, Artificial; identical to SEQ ID NO: 167264
  Synthetic oligonucleotide

SEQ ID NO: 620471 - DNA, 59 bp, Artificial; identical to SEQ ID NO: 262769
  Synthetic oligonucleotide

SEQ ID NO: 620472 - DNA, 56 bp, Artificial; identical to SEQ ID NO: 152343
  Synthetic oligonucleotide

SEQ ID NO: 620473 - DNA, 52 bp, Artificial; identical to SEQ ID NO: 240894
  Synthetic oligonucleotide

SEQ ID NO: 620474 - DNA, 55 bp, Artificial; identical to SEQ ID NO: 244227
  Synthetic oligonucleotide

SEQ ID NO: 620475 - DNA, 55 bp, Artificial; identical to SEQ ID NO: 254860
  Synthetic oligonucleotide

SEQ ID NO: 620476 - DNA, 55 bp, Artificial; identical to SEQ ID NO: 199225
  Synthetic oligonucleotide

SEQ ID NO: 620477 - DNA, 54 bp, Artificial; identical to SEQ ID NO: 161878
  Synthetic oligonucleotide

SEQ ID NO: 620478 - DNA, 60 bp, Artificial; identical to SEQ ID NO: 208107
  Synthetic oligonucleotide

SEQ ID NO: 620479 - DNA, 55 bp, Artificial; identical to SEQ ID NO: 201482
  Synthetic oligonucleotide

SEQ ID NO: 620480 - DNA, 56 bp, Artificial; identical to SEQ ID NO: 141828
  Synthetic oligonucleotide

SEQ ID NO: 620481 - DNA, 51 bp, Artificial; identical to SEQ ID NO: 223752
  Synthetic oligonucleotide

SEQ ID NO: 620482 - DNA, 55 bp, Artificial; identical to SEQ ID NO: 187675
  Synthetic oligonucleotide

SEQ ID NO: 620483 - DNA, 53 bp, Artificial; identical to SEQ ID NO: 202482
  Synthetic oligonucleotide

SEQ ID NO: 620484 - DNA, 52 bp, Artificial; identical to SEQ ID NO: 185962
  Synthetic oligonucleotide

SEQ ID NO: 620485 - DNA, 54 bp, Artificial; identical to SEQ ID NO: 157173
  Synthetic oligonucleotide

SEQ ID NO: 620486 - DNA, 59 bp, Artificial; identical to SEQ ID NO: 206080
  Synthetic oligonucleotide

SEQ ID NO: 620487 - DNA, 54 bp, Artificial; identical to SEQ ID NO: 265712
  Synthetic oligonucleotide

SEQ ID NO: 620488 - DNA, 58 bp, Artificial; identical to SEQ ID NO: 238393
  Synthetic oligonucleotide

SEQ ID NO: 620489 - DNA, 58 bp, Artificial; identical to SEQ ID NO: 200854
  Synthetic oligonucleotide

SEQ ID NO: 620490 - DNA, 57 bp, Artificial; identical to SEQ ID NO: 179876
  Synthetic oligonucleotide

SEQ ID NO: 620491 - DNA, 55 bp, Artificial; identical to SEQ ID NO: 222653
  Synthetic oligonucleotide

SEQ ID NO: 620492 - DNA, 54 bp, Artificial; identical to SEQ ID NO: 185372
  Synthetic oligonucleotide

SEQ ID NO: 620493 - DNA, 59 bp, Artificial; identical to SEQ ID NO: 211236
  Synthetic oligonucleotide

SEQ ID NO: 620494 - DNA, 60 bp, Artificial; identical to SEQ ID NO: 257830
  Synthetic oligonucleotide

SEQ ID NO: 620495 - DNA, 51 bp, Artificial; identical to SEQ ID NO: 225256
  Synthetic oligonucleotide

SEQ ID NO: 620496 - DNA, 54 bp, Artificial; identical to SEQ ID NO: 233780
  Synthetic oligonucleotide

SEQ ID NO: 620497 - DNA, 55 bp, Artificial; identical to SEQ ID NO: 160199
  Synthetic oligonucleotide

SEQ ID NO: 620498 - DNA, 55 bp, Artificial; identical to SEQ ID NO: 180273
  Synthetic oligonucleotide

SEQ ID NO: 620499 - DNA, 52 bp, Artificial; identical to SEQ ID NO: 240898
  Synthetic oligonucleotide

SEQ ID NO: 620500 - DNA, 55 bp, Artificial; identical to SEQ ID NO: 254967
  Synthetic oligonucleotide

SEQ ID NO: 620501 - DNA, 55 bp, Artificial; identical to SEQ ID NO: 142344
  Synthetic oligonucleotide

SEQ ID NO: 620502 - DNA, 54 bp, Artificial; identical to SEQ ID NO: 255235
  Synthetic oligonucleotide

SEQ ID NO: 620503 - DNA, 54 bp, Artificial; identical to SEQ ID NO: 218300
  Synthetic oligonucleotide

SEQ ID NO: 620504 - DNA, 54 bp, Artificial; identical to SEQ ID NO: 149268
  Synthetic oligonucleotide

SEQ ID NO: 620505 - DNA, 55 bp, Artificial; identical to SEQ ID NO: 243819
  Synthetic oligonucleotide

SEQ ID NO: 620506 - DNA, 60 bp, Artificial; identical to SEQ ID NO: 224969
  Synthetic oligonucleotide

SEQ ID NO: 620507 - DNA, 50 bp, Artificial; identical to SEQ ID NO: 170526
  Synthetic oligonucleotide

SEQ ID NO: 620508 - DNA, 55 bp, Artificial; identical to SEQ ID NO: 249086
  Synthetic oligonucleotide

SEQ ID NO: 620509 - DNA, 60 bp, Artificial; identical to SEQ ID NO: 187255
  Synthetic oligonucleotide

SEQ ID NO: 620510 - DNA, 60 bp, Artificial; identical to SEQ ID NO: 200862
  Synthetic oligonucleotide

SEQ ID NO: 620511 - DNA, 55 bp, Artificial; identical to SEQ ID NO: 249969
  Synthetic oligonucleotide

SEQ ID NO: 620512 - DNA, 55 bp, Artificial; identical to SEQ ID NO: 156833
  Synthetic oligonucleotide

SEQ ID NO: 620513 - DNA, 55 bp, Artificial; identical to SEQ ID NO: 154278
  Synthetic oligonucleotide

SEQ ID NO: 620514 - DNA, 57 bp, Artificial; identical to SEQ ID NO: 157487
  Synthetic oligonucleotide

SEQ ID NO: 620515 - DNA, 55 bp, Artificial; identical to SEQ ID NO: 164472
  Synthetic oligonucleotide

SEQ ID NO: 620516 - DNA, 53 bp, Artificial; identical to SEQ ID NO: 188051
  Synthetic oligonucleotide

SEQ ID NO: 620517 - DNA, 60 bp, Artificial; identical to SEQ ID NO: 234087
  Synthetic oligonucleotide

SEQ ID NO: 620518 - DNA, 54 bp, Artificial; identical to SEQ ID NO: 147760
  Synthetic oligonucleotide

SEQ ID NO: 620519 - DNA, 51 bp, Artificial; identical to SEQ ID NO: 215224
  Synthetic oligonucleotide

SEQ ID NO: 620520 - DNA, 57 bp, Artificial; identical to SEQ ID NO: 159965
  Synthetic oligonucleotide

SEQ ID NO: 620521 - DNA, 55 bp, Artificial; identical to SEQ ID NO: 203724
  Synthetic oligonucleotide

SEQ ID NO: 620522 - DNA, 59 bp, Artificial; identical to SEQ ID NO: 184493
  Synthetic oligonucleotide

SEQ ID NO: 620523 - DNA, 55 bp, Artificial; identical to SEQ ID NO: 172953
  Synthetic oligonucleotide

SEQ ID NO: 620524 - DNA, 51 bp, Artificial; identical to SEQ ID NO: 237160
  Synthetic oligonucleotide

SEQ ID NO: 620525 - DNA, 54 bp, Artificial; identical to SEQ ID NO: 160411
  Synthetic oligonucleotide

SEQ ID NO: 620526 - DNA, 54 bp, Artificial; identical to SEQ ID NO: 212625
  Synthetic oligonucleotide

SEQ ID NO: 620527 - DNA, 54 bp, Artificial; identical to SEQ ID NO: 225527
  Synthetic oligonucleotide

SEQ ID NO: 620528 - DNA, 56 bp, Artificial; identical to SEQ ID NO: 239058
  Synthetic oligonucleotide

SEQ ID NO: 620529 - DNA, 60 bp, Artificial; identical to SEQ ID NO: 184515
  Synthetic oligonucleotide

SEQ ID NO: 620530 - DNA, 59 bp, Artificial; identical to SEQ ID NO: 238404
  Synthetic oligonucleotide

SEQ ID NO: 620531 - DNA, 56 bp, Artificial; identical to SEQ ID NO: 184537
  Synthetic oligonucleotide

SEQ ID NO: 620532 - DNA, 60 bp, Artificial; identical to SEQ ID NO: 153410
  Synthetic oligonucleotide

SEQ ID NO: 620533 - DNA, 55 bp, Artificial; identical to SEQ ID NO: 190326
  Synthetic oligonucleotide

SEQ ID NO: 620534 - DNA, 57 bp, Artificial; identical to SEQ ID NO: 179763
  Synthetic oligonucleotide

SEQ ID NO: 620535 - DNA, 55 bp, Artificial; identical to SEQ ID NO: 191072
  Synthetic oligonucleotide

SEQ ID NO: 620536 - DNA, 58 bp, Artificial; identical to SEQ ID NO: 191901
  Synthetic oligonucleotide

SEQ ID NO: 620537 - DNA, 58 bp, Artificial; identical to SEQ ID NO: 239327
  Synthetic oligonucleotide

SEQ ID NO: 620538 - DNA, 56 bp, Artificial; identical to SEQ ID NO: 243815
  Synthetic oligonucleotide

SEQ ID NO: 620539 - DNA, 51 bp, Artificial; identical to SEQ ID NO: 186856
  Synthetic oligonucleotide

SEQ ID NO: 620540 - DNA, 55 bp, Artificial; identical to SEQ ID NO: 142343
  Synthetic oligonucleotide

SEQ ID NO: 620541 - DNA, 60 bp, Artificial; identical to SEQ ID NO: 212603
  Synthetic oligonucleotide

SEQ ID NO: 620542 - DNA, 51 bp, Artificial; identical to SEQ ID NO: 193864
  Synthetic oligonucleotide

SEQ ID NO: 620543 - DNA, 54 bp, Artificial; identical to SEQ ID NO: 255230
  Synthetic oligonucleotide

SEQ ID NO: 620544 - DNA, 55 bp, Artificial; identical to SEQ ID NO: 180254
  Synthetic oligonucleotide

SEQ ID NO: 620545 - DNA, 55 bp, Artificial; identical to SEQ ID NO: 174416
  Synthetic oligonucleotide

SEQ ID NO: 620546 - DNA, 51 bp, Artificial; identical to SEQ ID NO: 233865
  Synthetic oligonucleotide

SEQ ID NO: 620547 - DNA, 55 bp, Artificial; identical to SEQ ID NO: 168683
  Synthetic oligonucleotide

SEQ ID NO: 620548 - DNA, 55 bp, Artificial; identical to SEQ ID NO: 180257
  Synthetic oligonucleotide

SEQ ID NO: 620549 - DNA, 60 bp, Artificial; identical to SEQ ID NO: 239054
  Synthetic oligonucleotide

SEQ ID NO: 620550 - DNA, 52 bp, Artificial; identical to SEQ ID NO: 170129
  Synthetic oligonucleotide

SEQ ID NO: 620551 - DNA, 54 bp, Artificial; identical to SEQ ID NO: 203723
  Synthetic oligonucleotide

SEQ ID NO: 620552 - DNA, 54 bp, Artificial; identical to SEQ ID NO: 149199
  Synthetic oligonucleotide

SEQ ID NO: 620553 - DNA, 55 bp, Artificial; identical to SEQ ID NO: 184671
  Synthetic oligonucleotide

SEQ ID NO: 620554 - DNA, 54 bp, Artificial; identical to SEQ ID NO: 239053
  Synthetic oligonucleotide

SEQ ID NO: 620555 - DNA, 53 bp, Artificial; identical to SEQ ID NO: 246286
  Synthetic oligonucleotide

SEQ ID NO: 620556 - DNA, 55 bp, Artificial; identical to SEQ ID NO: 180261
  Synthetic oligonucleotide

SEQ ID NO: 620557 - DNA, 55 bp, Artificial; identical to SEQ ID NO: 243814
  Synthetic oligonucleotide

SEQ ID NO: 620558 - DNA, 59 bp, Artificial; identical to SEQ ID NO: 184704
  Synthetic oligonucleotide

SEQ ID NO: 620559 - DNA, 52 bp, Artificial; identical to SEQ ID NO: 217150
  Synthetic oligonucleotide

SEQ ID NO: 620560 - DNA, 57 bp, Artificial; identical to SEQ ID NO: 239052
  Synthetic oligonucleotide

SEQ ID NO: 620561 - DNA, 58 bp, Artificial; identical to SEQ ID NO: 238415
  Synthetic oligonucleotide

SEQ ID NO: 620562 - DNA, 60 bp, Artificial; identical to SEQ ID NO: 200908
  Synthetic oligonucleotide

SEQ ID NO: 620563 - DNA, 55 bp, Artificial; identical to SEQ ID NO: 156835
  Synthetic oligonucleotide

SEQ ID NO: 620564 - DNA, 51 bp, Artificial; identical to SEQ ID NO: 220801
  Synthetic oligonucleotide

SEQ ID NO: 620565 - DNA, 60 bp, Artificial; identical to SEQ ID NO: 200909
  Synthetic oligonucleotide

SEQ ID NO: 620566 - DNA, 55 bp, Artificial; identical to SEQ ID NO: 159997
  Synthetic oligonucleotide

SEQ ID NO: 620567 - DNA, 55 bp, Artificial; identical to SEQ ID NO: 180262
  Synthetic oligonucleotide

SEQ ID NO: 620568 - DNA, 56 bp, Artificial; identical to SEQ ID NO: 183027
  Synthetic oligonucleotide

SEQ ID NO: 620569 - DNA, 50 bp, Artificial; identical to SEQ ID NO: 256071
  Synthetic oligonucleotide

SEQ ID NO: 620570 - DNA, 51 bp, Artificial; identical to SEQ ID NO: 206530
  Synthetic oligonucleotide

SEQ ID NO: 620571 - DNA, 55 bp, Artificial; identical to SEQ ID NO: 156837
  Synthetic oligonucleotide

SEQ ID NO: 620572 - DNA, 55 bp, Artificial; identical to SEQ ID NO: 199077
  Synthetic oligonucleotide

SEQ ID NO: 620573 - DNA, 54 bp, Artificial; identical to SEQ ID NO: 243100
  Synthetic oligonucleotide

SEQ ID NO: 620574 - DNA, 60 bp, Artificial; identical to SEQ ID NO: 164212
  Synthetic oligonucleotide

SEQ ID NO: 620575 - DNA, 59 bp, Artificial; identical to SEQ ID NO: 266056
  Synthetic oligonucleotide

SEQ ID NO: 620576 - DNA, 55 bp, Artificial; identical to SEQ ID NO: 148403
  Synthetic oligonucleotide

SEQ ID NO: 620577 - DNA, 60 bp, Artificial; identical to SEQ ID NO: 148138
  Synthetic oligonucleotide

SEQ ID NO: 620578 - DNA, 59 bp, Artificial; identical to SEQ ID NO: 183038
  Synthetic oligonucleotide

SEQ ID NO: 620579 - DNA, 50 bp, Artificial; identical to SEQ ID NO: 193865
  Synthetic oligonucleotide

SEQ ID NO: 620580 - DNA, 55 bp, Artificial; identical to SEQ ID NO: 183060
  Synthetic oligonucleotide

SEQ ID NO: 620581 - DNA, 55 bp, Artificial; identical to SEQ ID NO: 200910
  Synthetic oligonucleotide

SEQ ID NO: 620582 - DNA, 54 bp, Artificial; identical to SEQ ID NO: 239051
  Synthetic oligonucleotide

SEQ ID NO: 620583 - DNA, 53 bp, Artificial; identical to SEQ ID NO: 192053
  Synthetic oligonucleotide

SEQ ID NO: 620584 - DNA, 55 bp, Artificial; identical to SEQ ID NO: 153416
  Synthetic oligonucleotide

SEQ ID NO: 620585 - DNA, 53 bp, Artificial; identical to SEQ ID NO: 245009
  Synthetic oligonucleotide

SEQ ID NO: 620586 - DNA, 52 bp, Artificial; identical to SEQ ID NO: 185910
  Synthetic oligonucleotide

SEQ ID NO: 620587 - DNA, 59 bp, Artificial; identical to SEQ ID NO: 200911
  Synthetic oligonucleotide

SEQ ID NO: 620588 - DNA, 50 bp, Artificial; identical to SEQ ID NO: 237591
  Synthetic oligonucleotide

SEQ ID NO: 620589 - DNA, 55 bp, Artificial; identical to SEQ ID NO: 156838
  Synthetic oligonucleotide

SEQ ID NO: 620590 - DNA, 56 bp, Artificial; identical to SEQ ID NO: 203388
  Synthetic oligonucleotide

SEQ ID NO: 620591 - DNA, 55 bp, Artificial; identical to SEQ ID NO: 180162
  Synthetic oligonucleotide

SEQ ID NO: 620592 - DNA, 58 bp, Artificial; identical to SEQ ID NO: 249096
  Synthetic oligonucleotide

SEQ ID NO: 620593 - DNA, 53 bp, Artificial; identical to SEQ ID NO: 205540
  Synthetic oligonucleotide

SEQ ID NO: 620594 - DNA, 54 bp, Artificial; identical to SEQ ID NO: 149229
  Synthetic oligonucleotide

SEQ ID NO: 620595 - DNA, 55 bp, Artificial; identical to SEQ ID NO: 225203
  Synthetic oligonucleotide

SEQ ID NO: 620596 - DNA, 53 bp, Artificial; identical to SEQ ID NO: 180175
  Synthetic oligonucleotide

SEQ ID NO: 620597 - DNA, 55 bp, Artificial; identical to SEQ ID NO: 222650
  Synthetic oligonucleotide

SEQ ID NO: 620598 - DNA, 52 bp, Artificial; identical to SEQ ID NO: 169381
  Synthetic oligonucleotide

SEQ ID NO: 620599 - DNA, 56 bp, Artificial; identical to SEQ ID NO: 207074
  Synthetic oligonucleotide

SEQ ID NO: 620600 - DNA, 54 bp, Artificial; identical to SEQ ID NO: 164470
  Synthetic oligonucleotide

SEQ ID NO: 620601 - DNA, 58 bp, Artificial; identical to SEQ ID NO: 243813
  Synthetic oligonucleotide

SEQ ID NO: 620602 - DNA, 55 bp, Artificial; identical to SEQ ID NO: 209462
  Synthetic oligonucleotide

SEQ ID NO: 620603 - DNA, 52 bp, Artificial; identical to SEQ ID NO: 246404
  Synthetic oligonucleotide

SEQ ID NO: 620604 - DNA, 55 bp, Artificial; identical to SEQ ID NO: 212794
  Synthetic oligonucleotide

SEQ ID NO: 620605 - DNA, 60 bp, Artificial; identical to SEQ ID NO: 183160
  Synthetic oligonucleotide

SEQ ID NO: 620606 - DNA, 54 bp, Artificial; identical to SEQ ID NO: 257819
  Synthetic oligonucleotide

SEQ ID NO: 620607 - DNA, 55 bp, Artificial; identical to SEQ ID NO: 147253
  Synthetic oligonucleotide

SEQ ID NO: 620608 - DNA, 60 bp, Artificial; identical to SEQ ID NO: 148127
  Synthetic oligonucleotide

SEQ ID NO: 620609 - DNA, 59 bp, Artificial; identical to SEQ ID NO: 223717
  Synthetic oligonucleotide

SEQ ID NO: 620610 - DNA, 58 bp, Artificial; identical to SEQ ID NO: 191707
  Synthetic oligonucleotide

SEQ ID NO: 620611 - DNA, 60 bp, Artificial; identical to SEQ ID NO: 255467
  Synthetic oligonucleotide

SEQ ID NO: 620612 - DNA, 60 bp, Artificial; identical to SEQ ID NO: 239049
  Synthetic oligonucleotide

SEQ ID NO: 620613 - DNA, 50 bp, Artificial; identical to SEQ ID NO: 150340
  Synthetic oligonucleotide

SEQ ID NO: 620614 - DNA, 55 bp, Artificial; identical to SEQ ID NO: 148473
  Synthetic oligonucleotide

SEQ ID NO: 620615 - DNA, 59 bp, Artificial; identical to SEQ ID NO: 168159
  Synthetic oligonucleotide

SEQ ID NO: 620616 - DNA, 52 bp, Artificial; identical to SEQ ID NO: 246405
  Synthetic oligonucleotide

SEQ ID NO: 620617 - DNA, 60 bp, Artificial; identical to SEQ ID NO: 148105
  Synthetic oligonucleotide

SEQ ID NO: 620618 - DNA, 57 bp, Artificial; identical to SEQ ID NO: 209114
  Synthetic oligonucleotide

SEQ ID NO: 620619 - DNA, 54 bp, Artificial; identical to SEQ ID NO: 265768
  Synthetic oligonucleotide

SEQ ID NO: 620620 - DNA, 59 bp, Artificial; identical to SEQ ID NO: 233924
  Synthetic oligonucleotide

SEQ ID NO: 620621 - DNA, 55 bp, Artificial; identical to SEQ ID NO: 207549
  Synthetic oligonucleotide

SEQ ID NO: 620622 - DNA, 60 bp, Artificial; identical to SEQ ID NO: 191912
  Synthetic oligonucleotide

SEQ ID NO: 620623 - DNA, 55 bp, Artificial; identical to SEQ ID NO: 257966
  Synthetic oligonucleotide

SEQ ID NO: 620624 - DNA, 56 bp, Artificial; identical to SEQ ID NO: 187267
  Synthetic oligonucleotide

SEQ ID NO: 620625 - DNA, 56 bp, Artificial; identical to SEQ ID NO: 180090
  Synthetic oligonucleotide

SEQ ID NO: 620626 - DNA, 52 bp, Artificial; identical to SEQ ID NO: 225201
  Synthetic oligonucleotide

SEQ ID NO: 620627 - DNA, 57 bp, Artificial; identical to SEQ ID NO: 203958
  Synthetic oligonucleotide

SEQ ID NO: 620628 - DNA, 51 bp, Artificial; identical to SEQ ID NO: 170191
  Synthetic oligonucleotide

SEQ ID NO: 620629 - DNA, 53 bp, Artificial; identical to SEQ ID NO: 246290
  Synthetic oligonucleotide

SEQ ID NO: 620630 - DNA, 50 bp, Artificial; identical to SEQ ID NO: 242462
  Synthetic oligonucleotide

SEQ ID NO: 620631 - DNA, 55 bp, Artificial; identical to SEQ ID NO: 151650
  Synthetic oligonucleotide

SEQ ID NO: 620632 - DNA, 60 bp, Artificial; identical to SEQ ID NO: 209110
  Synthetic oligonucleotide

SEQ ID NO: 620633 - DNA, 51 bp, Artificial; identical to SEQ ID NO: 186829
  Synthetic oligonucleotide

SEQ ID NO: 620634 - DNA, 51 bp, Artificial; identical to SEQ ID NO: 145059
  Synthetic oligonucleotide

SEQ ID NO: 620635 - DNA, 56 bp, Artificial; identical to SEQ ID NO: 148094
  Synthetic oligonucleotide

SEQ ID NO: 620636 - DNA, 51 bp, Artificial; identical to SEQ ID NO: 245021
  Synthetic oligonucleotide

SEQ ID NO: 620637 - DNA, 52 bp, Artificial; identical to SEQ ID NO: 216601
  Synthetic oligonucleotide

SEQ ID NO: 620638 - DNA, 57 bp, Artificial; identical to SEQ ID NO: 147247
  Synthetic oligonucleotide

SEQ ID NO: 620639 - DNA, 54 bp, Artificial; identical to SEQ ID NO: 240803
  Synthetic oligonucleotide

SEQ ID NO: 620640 - DNA, 55 bp, Artificial; identical to SEQ ID NO: 142858
  Synthetic oligonucleotide

SEQ ID NO: 620641 - DNA, 54 bp, Artificial; identical to SEQ ID NO: 246194
  Synthetic oligonucleotide

SEQ ID NO: 620642 - DNA, 52 bp, Artificial; identical to SEQ ID NO: 201655
  Synthetic oligonucleotide

SEQ ID NO: 620643 - DNA, 53 bp, Artificial; identical to SEQ ID NO: 223616
  Synthetic oligonucleotide

SEQ ID NO: 620644 - DNA, 51 bp, Artificial; identical to SEQ ID NO: 241125
  Synthetic oligonucleotide

SEQ ID NO: 620645 - DNA, 54 bp, Artificial; identical to SEQ ID NO: 243114
  Synthetic oligonucleotide

SEQ ID NO: 620646 - DNA, 55 bp, Artificial; identical to SEQ ID NO: 233675
  Synthetic oligonucleotide

SEQ ID NO: 620647 - DNA, 53 bp, Artificial; identical to SEQ ID NO: 217156
  Synthetic oligonucleotide

SEQ ID NO: 620648 - DNA, 53 bp, Artificial; identical to SEQ ID NO: 152054
  Synthetic oligonucleotide

SEQ ID NO: 620649 - DNA, 56 bp, Artificial; identical to SEQ ID NO: 217251
  Synthetic oligonucleotide

SEQ ID NO: 620650 - DNA, 55 bp, Artificial; identical to SEQ ID NO: 153414
  Synthetic oligonucleotide

SEQ ID NO: 620651 - DNA, 53 bp, Artificial; identical to SEQ ID NO: 207399
  Synthetic oligonucleotide

SEQ ID NO: 620652 - DNA, 55 bp, Artificial; identical to SEQ ID NO: 171472
  Synthetic oligonucleotide

SEQ ID NO: 620653 - DNA, 60 bp, Artificial; identical to SEQ ID NO: 255478
  Synthetic oligonucleotide

SEQ ID NO: 620654 - DNA, 51 bp, Artificial; identical to SEQ ID NO: 246709
  Synthetic oligonucleotide

SEQ ID NO: 620655 - DNA, 53 bp, Artificial; identical to SEQ ID NO: 255309
  Synthetic oligonucleotide

SEQ ID NO: 620656 - DNA, 55 bp, Artificial; identical to SEQ ID NO: 194768
  Synthetic oligonucleotide

SEQ ID NO: 620657 - DNA, 57 bp, Artificial; identical to SEQ ID NO: 148059
  Synthetic oligonucleotide

SEQ ID NO: 620658 - DNA, 54 bp, Artificial; identical to SEQ ID NO: 190655
  Synthetic oligonucleotide

SEQ ID NO: 620659 - DNA, 52 bp, Artificial; identical to SEQ ID NO: 164468
  Synthetic oligonucleotide

SEQ ID NO: 620660 - DNA, 51 bp, Artificial; identical to SEQ ID NO: 197452
  Synthetic oligonucleotide

SEQ ID NO: 620661 - DNA, 50 bp, Artificial; identical to SEQ ID NO: 142700
  Synthetic oligonucleotide

SEQ ID NO: 620662 - DNA, 55 bp, Artificial; identical to SEQ ID NO: 245043
  Synthetic oligonucleotide

SEQ ID NO: 620663 - DNA, 52 bp, Artificial; identical to SEQ ID NO: 165120
  Synthetic oligonucleotide

SEQ ID NO: 620664 - DNA, 59 bp, Artificial; identical to SEQ ID NO: 243809
  Synthetic oligonucleotide

SEQ ID NO: 620665 - DNA, 60 bp, Artificial; identical to SEQ ID NO: 203936
  Synthetic oligonucleotide

SEQ ID NO: 620666 - DNA, 48 bp, Artificial; identical to SEQ ID NO: 183238
  Synthetic oligonucleotide

SEQ ID NO: 620667 - DNA, 53 bp, Artificial; identical to SEQ ID NO: 202107
  Synthetic oligonucleotide

SEQ ID NO: 620668 - DNA, 50 bp, Artificial; identical to SEQ ID NO: 187278
  Synthetic oligonucleotide

SEQ ID NO: 620669 - DNA, 55 bp, Artificial; identical to SEQ ID NO: 194769
  Synthetic oligonucleotide

SEQ ID NO: 620670 - DNA, 57 bp, Artificial; identical to SEQ ID NO: 154658
  Synthetic oligonucleotide

SEQ ID NO: 620671 - DNA, 54 bp, Artificial; identical to SEQ ID NO: 191869
  Synthetic oligonucleotide

SEQ ID NO: 620672 - DNA, 55 bp, Artificial; identical to SEQ ID NO: 224792
  Synthetic oligonucleotide

SEQ ID NO: 620673 - DNA, 60 bp, Artificial; identical to SEQ ID NO: 148048
  Synthetic oligonucleotide

SEQ ID NO: 620674 - DNA, 56 bp, Artificial; identical to SEQ ID NO: 166210
  Synthetic oligonucleotide

SEQ ID NO: 620675 - DNA, 55 bp, Artificial; identical to SEQ ID NO: 172951
  Synthetic oligonucleotide

SEQ ID NO: 620676 - DNA, 54 bp, Artificial; identical to SEQ ID NO: 254936
  Synthetic oligonucleotide

SEQ ID NO: 620677 - DNA, 58 bp, Artificial; identical to SEQ ID NO: 179687
  Synthetic oligonucleotide

SEQ ID NO: 620678 - DNA, 55 bp, Artificial; identical to SEQ ID NO: 194771
  Synthetic oligonucleotide

SEQ ID NO: 620679 - DNA, 58 bp, Artificial; identical to SEQ ID NO: 187279
  Synthetic oligonucleotide

SEQ ID NO: 620680 - DNA, 55 bp, Artificial; identical to SEQ ID NO: 146254
  Synthetic oligonucleotide

SEQ ID NO: 620681 - DNA, 54 bp, Artificial; identical to SEQ ID NO: 211308
  Synthetic oligonucleotide

SEQ ID NO: 620682 - DNA, 58 bp, Artificial; identical to SEQ ID NO: 179691
  Synthetic oligonucleotide

SEQ ID NO: 620683 - DNA, 53 bp, Artificial; identical to SEQ ID NO: 246294
  Synthetic oligonucleotide

SEQ ID NO: 620684 - DNA, 60 bp, Artificial; identical to SEQ ID NO: 217159
  Synthetic oligonucleotide

SEQ ID NO: 620685 - DNA, 55 bp, Artificial; identical to SEQ ID NO: 148440
  Synthetic oligonucleotide

SEQ ID NO: 620686 - DNA, 57 bp, Artificial; identical to SEQ ID NO: 240759
  Synthetic oligonucleotide

SEQ ID NO: 620687 - DNA, 52 bp, Artificial; identical to SEQ ID NO: 160503
  Synthetic oligonucleotide

SEQ ID NO: 620688 - DNA, 56 bp, Artificial; identical to SEQ ID NO: 166206
  Synthetic oligonucleotide

SEQ ID NO: 620689 - DNA, 53 bp, Artificial; identical to SEQ ID NO: 149447
  Synthetic oligonucleotide

SEQ ID NO: 620690 - DNA, 55 bp, Artificial; identical to SEQ ID NO: 240748
  Synthetic oligonucleotide

SEQ ID NO: 620691 - DNA, 54 bp, Artificial; identical to SEQ ID NO: 254938
  Synthetic oligonucleotide

SEQ ID NO: 620692 - DNA, 55 bp, Artificial; identical to SEQ ID NO: 188395
  Synthetic oligonucleotide

SEQ ID NO: 620693 - DNA, 60 bp, Artificial; identical to SEQ ID NO: 164179
  Synthetic oligonucleotide

SEQ ID NO: 620694 - DNA, 56 bp, Artificial; identical to SEQ ID NO: 217162
  Synthetic oligonucleotide

SEQ ID NO: 620695 - DNA, 54 bp, Artificial; identical to SEQ ID NO: 243811
  Synthetic oligonucleotide

SEQ ID NO: 620696 - DNA, 55 bp, Artificial; identical to SEQ ID NO: 148447
  Synthetic oligonucleotide

SEQ ID NO: 620697 - DNA, 57 bp, Artificial; identical to SEQ ID NO: 240737
  Synthetic oligonucleotide

SEQ ID NO: 620698 - DNA, 55 bp, Artificial; identical to SEQ ID NO: 258932
  Synthetic oligonucleotide

SEQ ID NO: 620699 - DNA, 55 bp, Artificial; identical to SEQ ID NO: 245590
  Synthetic oligonucleotide

SEQ ID NO: 620700 - DNA, 55 bp, Artificial; identical to SEQ ID NO: 155420
  Synthetic oligonucleotide

SEQ ID NO: 620701 - DNA, 55 bp, Artificial; identical to SEQ ID NO: 187827
  Synthetic oligonucleotide

SEQ ID NO: 620702 - DNA, 60 bp, Artificial; identical to SEQ ID NO: 243812
  Synthetic oligonucleotide

SEQ ID NO: 620703 - DNA, 51 bp, Artificial; identical to SEQ ID NO: 162377
  Synthetic oligonucleotide

SEQ ID NO: 620704 - DNA, 55 bp, Artificial; identical to SEQ ID NO: 238291
  Synthetic oligonucleotide

SEQ ID NO: 620705 - DNA, 52 bp, Artificial; identical to SEQ ID NO: 200891
  Synthetic oligonucleotide

SEQ ID NO: 620706 - DNA, 56 bp, Artificial; identical to SEQ ID NO: 247522
  Synthetic oligonucleotide

SEQ ID NO: 620707 - DNA, 53 bp, Artificial; identical to SEQ ID NO: 233825
  Synthetic oligonucleotide

SEQ ID NO: 620708 - DNA, 54 bp, Artificial; identical to SEQ ID NO: 218302
  Synthetic oligonucleotide

SEQ ID NO: 620709 - DNA, 55 bp, Artificial; identical to SEQ ID NO: 180183
  Synthetic oligonucleotide

SEQ ID NO: 620710 - DNA, 52 bp, Artificial; identical to SEQ ID NO: 209684
  Synthetic oligonucleotide

SEQ ID NO: 620711 - DNA, 60 bp, Artificial; identical to SEQ ID NO: 208118
  Synthetic oligonucleotide

SEQ ID NO: 620712 - DNA, 55 bp, Artificial; identical to SEQ ID NO: 261586
  Synthetic oligonucleotide

SEQ ID NO: 620713 - DNA, 58 bp, Artificial; identical to SEQ ID NO: 162092
  Synthetic oligonucleotide

SEQ ID NO: 620714 - DNA, 51 bp, Artificial; identical to SEQ ID NO: 170192
  Synthetic oligonucleotide

SEQ ID NO: 620715 - DNA, 55 bp, Artificial; identical to SEQ ID NO: 161110
  Synthetic oligonucleotide

SEQ ID NO: 620716 - DNA, 56 bp, Artificial; identical to SEQ ID NO: 182838
  Synthetic oligonucleotide

SEQ ID NO: 620717 - DNA, 55 bp, Artificial; identical to SEQ ID NO: 223650
  Synthetic oligonucleotide

SEQ ID NO: 620718 - DNA, 53 bp, Artificial; identical to SEQ ID NO: 240438
  Synthetic oligonucleotide

SEQ ID NO: 620719 - DNA, 57 bp, Artificial; identical to SEQ ID NO: 155154
  Synthetic oligonucleotide

SEQ ID NO: 620720 - DNA, 55 bp, Artificial; identical to SEQ ID NO: 215530
  Synthetic oligonucleotide

SEQ ID NO: 620721 - DNA, 50 bp, Artificial; identical to SEQ ID NO: 241519
  Synthetic oligonucleotide

SEQ ID NO: 620722 - DNA, 53 bp, Artificial; identical to SEQ ID NO: 234467
  Synthetic oligonucleotide

SEQ ID NO: 620723 - DNA, 57 bp, Artificial; identical to SEQ ID NO: 182860
  Synthetic oligonucleotide

SEQ ID NO: 620724 - DNA, 55 bp, Artificial; identical to SEQ ID NO: 164465
  Synthetic oligonucleotide

SEQ ID NO: 620725 - DNA, 56 bp, Artificial; identical to SEQ ID NO: 194324
  Synthetic oligonucleotide

SEQ ID NO: 620726 - DNA, 52 bp, Artificial; identical to SEQ ID NO: 149521
  Synthetic oligonucleotide

SEQ ID NO: 620727 - DNA, 55 bp, Artificial; identical to SEQ ID NO: 242944
  Synthetic oligonucleotide

SEQ ID NO: 620728 - DNA, 53 bp, Artificial; identical to SEQ ID NO: 160448
  Synthetic oligonucleotide

SEQ ID NO: 620729 - DNA, 55 bp, Artificial; identical to SEQ ID NO: 224793
  Synthetic oligonucleotide

SEQ ID NO: 620730 - DNA, 50 bp, Artificial; identical to SEQ ID NO: 177021
  Synthetic oligonucleotide

SEQ ID NO: 620731 - DNA, 55 bp, Artificial; identical to SEQ ID NO: 188394
  Synthetic oligonucleotide

SEQ ID NO: 620732 - DNA, 60 bp, Artificial; identical to SEQ ID NO: 255511
  Synthetic oligonucleotide

SEQ ID NO: 620733 - DNA, 50 bp, Artificial; identical to SEQ ID NO: 241520
  Synthetic oligonucleotide

SEQ ID NO: 620734 - DNA, 53 bp, Artificial; identical to SEQ ID NO: 199804
  Synthetic oligonucleotide

SEQ ID NO: 620735 - DNA, 60 bp, Artificial; identical to SEQ ID NO: 243816
  Synthetic oligonucleotide

SEQ ID NO: 620736 - DNA, 55 bp, Artificial; identical to SEQ ID NO: 152609
  Synthetic oligonucleotide

SEQ ID NO: 620737 - DNA, 50 bp, Artificial; identical to SEQ ID NO: 206070
  Synthetic oligonucleotide

SEQ ID NO: 620738 - DNA, 55 bp, Artificial; identical to SEQ ID NO: 221628
  Synthetic oligonucleotide

SEQ ID NO: 620739 - DNA, 58 bp, Artificial; identical to SEQ ID NO: 200892
  Synthetic oligonucleotide

SEQ ID NO: 620740 - DNA, 50 bp, Artificial; identical to SEQ ID NO: 192210
  Synthetic oligonucleotide

SEQ ID NO: 620741 - DNA, 53 bp, Artificial; identical to SEQ ID NO: 192055
  Synthetic oligonucleotide

SEQ ID NO: 620742 - DNA, 55 bp, Artificial; identical to SEQ ID NO: 144422
  Synthetic oligonucleotide

SEQ ID NO: 620743 - DNA, 54 bp, Artificial; identical to SEQ ID NO: 238426
  Synthetic oligonucleotide

SEQ ID NO: 620744 - DNA, 54 bp, Artificial; identical to SEQ ID NO: 243125
  Synthetic oligonucleotide

SEQ ID NO: 620745 - DNA, 57 bp, Artificial; identical to SEQ ID NO: 148004
  Synthetic oligonucleotide

SEQ ID NO: 620746 - DNA, 53 bp, Artificial; identical to SEQ ID NO: 240602
  Synthetic oligonucleotide

SEQ ID NO: 620747 - DNA, 57 bp, Artificial; identical to SEQ ID NO: 155408
  Synthetic oligonucleotide

SEQ ID NO: 620748 - DNA, 49 bp, Artificial; identical to SEQ ID NO: 160741
  Synthetic oligonucleotide

SEQ ID NO: 620749 - DNA, 55 bp, Artificial; identical to SEQ ID NO: 152364
  Synthetic oligonucleotide

SEQ ID NO: 620750 - DNA, 55 bp, Artificial; identical to SEQ ID NO: 188393
  Synthetic oligonucleotide

SEQ ID NO: 620751 - DNA, 53 bp, Artificial; identical to SEQ ID NO: 191923
  Synthetic oligonucleotide

SEQ ID NO: 620752 - DNA, 53 bp, Artificial; identical to SEQ ID NO: 216635
  Synthetic oligonucleotide

SEQ ID NO: 620753 - DNA, 52 bp, Artificial; identical to SEQ ID NO: 149505
  Synthetic oligonucleotide

SEQ ID NO: 620754 - DNA, 54 bp, Artificial; identical to SEQ ID NO: 216554
  Synthetic oligonucleotide

SEQ ID NO: 620755 - DNA, 57 bp, Artificial; identical to SEQ ID NO: 141835
  Synthetic oligonucleotide

SEQ ID NO: 620756 - DNA, 60 bp, Artificial; identical to SEQ ID NO: 182982
  Synthetic oligonucleotide

SEQ ID NO: 620757 - DNA, 55 bp, Artificial; identical to SEQ ID NO: 234360
  Synthetic oligonucleotide

SEQ ID NO: 620758 - DNA, 60 bp, Artificial; identical to SEQ ID NO: 147971
  Synthetic oligonucleotide

SEQ ID NO: 620759 - DNA, 57 bp, Artificial; identical to SEQ ID NO: 187367
  Synthetic oligonucleotide

SEQ ID NO: 620760 - DNA, 55 bp, Artificial; identical to SEQ ID NO: 245421
  Synthetic oligonucleotide

SEQ ID NO: 620761 - DNA, 55 bp, Artificial; identical to SEQ ID NO: 181124
  Synthetic oligonucleotide

SEQ ID NO: 620762 - DNA, 54 bp, Artificial; identical to SEQ ID NO: 218903
  Synthetic oligonucleotide

SEQ ID NO: 620763 - DNA, 55 bp, Artificial; identical to SEQ ID NO: 190332
  Synthetic oligonucleotide

SEQ ID NO: 620764 - DNA, 52 bp, Artificial; identical to SEQ ID NO: 233848
  Synthetic oligonucleotide

SEQ ID NO: 620765 - DNA, 58 bp, Artificial; identical to SEQ ID NO: 203914
  Synthetic oligonucleotide

SEQ ID NO: 620766 - DNA, 59 bp, Artificial; identical to SEQ ID NO: 238437
  Synthetic oligonucleotide

SEQ ID NO: 620767 - DNA, 55 bp, Artificial; identical to SEQ ID NO: 169860
  Synthetic oligonucleotide

SEQ ID NO: 620768 - DNA, 53 bp, Artificial; identical to SEQ ID NO: 164853
  Synthetic oligonucleotide

SEQ ID NO: 620769 - DNA, 51 bp, Artificial; identical to SEQ ID NO: 149951
  Synthetic oligonucleotide

SEQ ID NO: 620770 - DNA, 55 bp, Artificial; identical to SEQ ID NO: 240425
  Synthetic oligonucleotide

SEQ ID NO: 620771 - DNA, 55 bp, Artificial; identical to SEQ ID NO: 183615
  Synthetic oligonucleotide

SEQ ID NO: 620772 - DNA, 60 bp, Artificial; identical to SEQ ID NO: 266058
  Synthetic oligonucleotide

SEQ ID NO: 620773 - DNA, 55 bp, Artificial; identical to SEQ ID NO: 151652
  Synthetic oligonucleotide

SEQ ID NO: 620774 - DNA, 60 bp, Artificial; identical to SEQ ID NO: 160759
  Synthetic oligonucleotide

SEQ ID NO: 620775 - DNA, 55 bp, Artificial; identical to SEQ ID NO: 166917
  Synthetic oligonucleotide

SEQ ID NO: 620776 - DNA, 59 bp, Artificial; identical to SEQ ID NO: 179459
  Synthetic oligonucleotide

SEQ ID NO: 620777 - DNA, 51 bp, Artificial; identical to SEQ ID NO: 237156
  Synthetic oligonucleotide

SEQ ID NO: 620778 - DNA, 57 bp, Artificial; identical to SEQ ID NO: 141965
  Synthetic oligonucleotide

SEQ ID NO: 620779 - DNA, 55 bp, Artificial; identical to SEQ ID NO: 254916
  Synthetic oligonucleotide

SEQ ID NO: 620780 - DNA, 56 bp, Artificial; identical to SEQ ID NO: 191740
  Synthetic oligonucleotide

SEQ ID NO: 620781 - DNA, 54 bp, Artificial; identical to SEQ ID NO: 185286
  Synthetic oligonucleotide

SEQ ID NO: 620782 - DNA, 50 bp, Artificial; identical to SEQ ID NO: 150229
  Synthetic oligonucleotide

SEQ ID NO: 620783 - DNA, 60 bp, Artificial; identical to SEQ ID NO: 206878
  Synthetic oligonucleotide

SEQ ID NO: 620784 - DNA, 60 bp, Artificial; identical to SEQ ID NO: 152321
  Synthetic oligonucleotide

SEQ ID NO: 620785 - DNA, 54 bp, Artificial; identical to SEQ ID NO: 212943
  Synthetic oligonucleotide

SEQ ID NO: 620786 - DNA, 55 bp, Artificial; identical to SEQ ID NO: 199123
  Synthetic oligonucleotide

SEQ ID NO: 620787 - DNA, 60 bp, Artificial; identical to SEQ ID NO: 217230
  Synthetic oligonucleotide

SEQ ID NO: 620788 - DNA, 55 bp, Artificial; identical to SEQ ID NO: 148362
  Synthetic oligonucleotide

SEQ ID NO: 620789 - DNA, 55 bp, Artificial; identical to SEQ ID NO: 181132
  Synthetic oligonucleotide

SEQ ID NO: 620790 - DNA, 60 bp, Artificial; identical to SEQ ID NO: 183661
  Synthetic oligonucleotide

SEQ ID NO: 620791 - DNA, 58 bp, Artificial; identical to SEQ ID NO: 240670
  Synthetic oligonucleotide

SEQ ID NO: 620792 - DNA, 60 bp, Artificial; identical to SEQ ID NO: 242525
  Synthetic oligonucleotide

SEQ ID NO: 620793 - DNA, 55 bp, Artificial; identical to SEQ ID NO: 153412
  Synthetic oligonucleotide

SEQ ID NO: 620794 - DNA, 53 bp, Artificial; identical to SEQ ID NO: 155542
  Synthetic oligonucleotide

SEQ ID NO: 620795 - DNA, 60 bp, Artificial; identical to SEQ ID NO: 257808
  Synthetic oligonucleotide

SEQ ID NO: 620796 - DNA, 54 bp, Artificial; identical to SEQ ID NO: 166214
  Synthetic oligonucleotide

SEQ ID NO: 620797 - DNA, 53 bp, Artificial; identical to SEQ ID NO: 242932
  Synthetic oligonucleotide

SEQ ID NO: 620798 - DNA, 54 bp, Artificial; identical to SEQ ID NO: 238596
  Synthetic oligonucleotide

SEQ ID NO: 620799 - DNA, 59 bp, Artificial; identical to SEQ ID NO: 240659
  Synthetic oligonucleotide

SEQ ID NO: 620800 - DNA, 53 bp, Artificial; identical to SEQ ID NO: 172794
  Synthetic oligonucleotide

SEQ ID NO: 620801 - DNA, 57 bp, Artificial; identical to SEQ ID NO: 154125
  Synthetic oligonucleotide

SEQ ID NO: 620802 - DNA, 54 bp, Artificial; identical to SEQ ID NO: 185283
  Synthetic oligonucleotide

SEQ ID NO: 620803 - DNA, 52 bp, Artificial; identical to SEQ ID NO: 188958
  Synthetic oligonucleotide

SEQ ID NO: 620804 - DNA, 55 bp, Artificial; identical to SEQ ID NO: 153409
  Synthetic oligonucleotide

SEQ ID NO: 620805 - DNA, 60 bp, Artificial; identical to SEQ ID NO: 153510
  Synthetic oligonucleotide

SEQ ID NO: 620806 - DNA, 51 bp, Artificial; identical to SEQ ID NO: 246733
  Synthetic oligonucleotide

SEQ ID NO: 620807 - DNA, 53 bp, Artificial; identical to SEQ ID NO: 249113
  Synthetic oligonucleotide

SEQ ID NO: 620808 - DNA, 55 bp, Artificial; identical to SEQ ID NO: 154275
  Synthetic oligonucleotide

SEQ ID NO: 620809 - DNA, 60 bp, Artificial; identical to SEQ ID NO: 183727
  Synthetic oligonucleotide

SEQ ID NO: 620810 - DNA, 60 bp, Artificial; identical to SEQ ID NO: 223617
  Synthetic oligonucleotide

SEQ ID NO: 620811 - DNA, 53 bp, Artificial; identical to SEQ ID NO: 179673
  Synthetic oligonucleotide

SEQ ID NO: 620812 - DNA, 55 bp, Artificial; identical to SEQ ID NO: 152608
  Synthetic oligonucleotide

SEQ ID NO: 620813 - DNA, 53 bp, Artificial; identical to SEQ ID NO: 162103
  Synthetic oligonucleotide

SEQ ID NO: 620814 - DNA, 55 bp, Artificial; identical to SEQ ID NO: 181092
  Synthetic oligonucleotide

SEQ ID NO: 620815 - DNA, 55 bp, Artificial; identical to SEQ ID NO: 181106
  Synthetic oligonucleotide

SEQ ID NO: 620816 - DNA, 54 bp, Artificial; identical to SEQ ID NO: 199527
  Synthetic oligonucleotide

SEQ ID NO: 620817 - DNA, 51 bp, Artificial; identical to SEQ ID NO: 203987
  Synthetic oligonucleotide

SEQ ID NO: 620818 - DNA, 60 bp, Artificial; identical to SEQ ID NO: 208140
  Synthetic oligonucleotide

SEQ ID NO: 620819 - DNA, 55 bp, Artificial; identical to SEQ ID NO: 190337
  Synthetic oligonucleotide

SEQ ID NO: 620820 - DNA, 55 bp, Artificial; identical to SEQ ID NO: 199131
  Synthetic oligonucleotide

SEQ ID NO: 620821 - DNA, 52 bp, Artificial; identical to SEQ ID NO: 258158
  Synthetic oligonucleotide

SEQ ID NO: 620822 - DNA, 51 bp, Artificial; identical to SEQ ID NO: 241160
  Synthetic oligonucleotide

SEQ ID NO: 620823 - DNA, 60 bp, Artificial; identical to SEQ ID NO: 170098
  Synthetic oligonucleotide

SEQ ID NO: 620824 - DNA, 55 bp, Artificial; identical to SEQ ID NO: 179964
  Synthetic oligonucleotide

SEQ ID NO: 620825 - DNA, 54 bp, Artificial; identical to SEQ ID NO: 183805
  Synthetic oligonucleotide

SEQ ID NO: 620826 - DNA, 55 bp, Artificial; identical to SEQ ID NO: 153408
  Synthetic oligonucleotide

SEQ ID NO: 620827 - DNA, 55 bp, Artificial; identical to SEQ ID NO: 245422
  Synthetic oligonucleotide

SEQ ID NO: 620828 - DNA, 60 bp, Artificial; identical to SEQ ID NO: 149249
  Synthetic oligonucleotide

SEQ ID NO: 620829 - DNA, 51 bp, Artificial; identical to SEQ ID NO: 239508
  Synthetic oligonucleotide

SEQ ID NO: 620830 - DNA, 60 bp, Artificial; identical to SEQ ID NO: 244499
  Synthetic oligonucleotide

SEQ ID NO: 620831 - DNA, 55 bp, Artificial; identical to SEQ ID NO: 221042
  Synthetic oligonucleotide

SEQ ID NO: 620832 - DNA, 55 bp, Artificial; identical to SEQ ID NO: 219629
  Synthetic oligonucleotide

SEQ ID NO: 620833 - DNA, 55 bp, Artificial; identical to SEQ ID NO: 209424
  Synthetic oligonucleotide

SEQ ID NO: 620834 - DNA, 55 bp, Artificial; identical to SEQ ID NO: 258036
  Synthetic oligonucleotide

SEQ ID NO: 620835 - DNA, 55 bp, Artificial; identical to SEQ ID NO: 187767
  Synthetic oligonucleotide

SEQ ID NO: 620836 - DNA, 54 bp, Artificial; identical to SEQ ID NO: 144517
  Synthetic oligonucleotide

SEQ ID NO: 620837 - DNA, 56 bp, Artificial; identical to SEQ ID NO: 248626
  Synthetic oligonucleotide

SEQ ID NO: 620838 - DNA, 50 bp, Artificial; identical to SEQ ID NO: 200244
  Synthetic oligonucleotide

SEQ ID NO: 620839 - DNA, 54 bp, Artificial; identical to SEQ ID NO: 164134
  Synthetic oligonucleotide

SEQ ID NO: 620840 - DNA, 53 bp, Artificial; identical to SEQ ID NO: 154566
  Synthetic oligonucleotide

SEQ ID NO: 620841 - DNA, 52 bp, Artificial; identical to SEQ ID NO: 202118
  Synthetic oligonucleotide

SEQ ID NO: 620842 - DNA, 51 bp, Artificial; identical to SEQ ID NO: 209763
  Synthetic oligonucleotide

SEQ ID NO: 620843 - DNA, 55 bp, Artificial; identical to SEQ ID NO: 148331
  Synthetic oligonucleotide

SEQ ID NO: 620844 - DNA, 54 bp, Artificial; identical to SEQ ID NO: 174432
  Synthetic oligonucleotide

SEQ ID NO: 620845 - DNA, 54 bp, Artificial; identical to SEQ ID NO: 169996
  Synthetic oligonucleotide

SEQ ID NO: 620846 - DNA, 52 bp, Artificial; identical to SEQ ID NO: 246422
  Synthetic oligonucleotide

SEQ ID NO: 620847 - DNA, 55 bp, Artificial; identical to SEQ ID NO: 169858
  Synthetic oligonucleotide

SEQ ID NO: 620848 - DNA, 55 bp, Artificial; identical to SEQ ID NO: 156812
  Synthetic oligonucleotide

SEQ ID NO: 620849 - DNA, 50 bp, Artificial; identical to SEQ ID NO: 171709
  Synthetic oligonucleotide

SEQ ID NO: 620850 - DNA, 50 bp, Artificial; identical to SEQ ID NO: 189838
  Synthetic oligonucleotide

SEQ ID NO: 620851 - DNA, 51 bp, Artificial; identical to SEQ ID NO: 220856
  Synthetic oligonucleotide

SEQ ID NO: 620852 - DNA, 56 bp, Artificial; identical to SEQ ID NO: 149216
  Synthetic oligonucleotide

SEQ ID NO: 620853 - DNA, 55 bp, Artificial; identical to SEQ ID NO: 202852
  Synthetic oligonucleotide

SEQ ID NO: 620854 - DNA, 52 bp, Artificial; identical to SEQ ID NO: 202996
  Synthetic oligonucleotide

SEQ ID NO: 620855 - DNA, 55 bp, Artificial; identical to SEQ ID NO: 156814
  Synthetic oligonucleotide

SEQ ID NO: 620856 - DNA, 54 bp, Artificial; identical to SEQ ID NO: 183304
  Synthetic oligonucleotide

SEQ ID NO: 620857 - DNA, 54 bp, Artificial; identical to SEQ ID NO: 157234
  Synthetic oligonucleotide

SEQ ID NO: 620858 - DNA, 51 bp, Artificial; identical to SEQ ID NO: 243349
  Synthetic oligonucleotide

SEQ ID NO: 620859 - DNA, 60 bp, Artificial; identical to SEQ ID NO: 255544
  Synthetic oligonucleotide

SEQ ID NO: 620860 - DNA, 50 bp, Artificial; identical to SEQ ID NO: 150235
  Synthetic oligonucleotide

SEQ ID NO: 620861 - DNA, 55 bp, Artificial; identical to SEQ ID NO: 148631
  Synthetic oligonucleotide

SEQ ID NO: 620862 - DNA, 55 bp, Artificial; identical to SEQ ID NO: 199138
  Synthetic oligonucleotide

SEQ ID NO: 620863 - DNA, 56 bp, Artificial; identical to SEQ ID NO: 201020
  Synthetic oligonucleotide

SEQ ID NO: 620864 - DNA, 57 bp, Artificial; identical to SEQ ID NO: 243822
  Synthetic oligonucleotide

SEQ ID NO: 620865 - DNA, 51 bp, Artificial; identical to SEQ ID NO: 255758
  Synthetic oligonucleotide

SEQ ID NO: 620866 - DNA, 55 bp, Artificial; identical to SEQ ID NO: 199142
  Synthetic oligonucleotide

SEQ ID NO: 620867 - DNA, 55 bp, Artificial; identical to SEQ ID NO: 257108
  Synthetic oligonucleotide

SEQ ID NO: 620868 - DNA, 54 bp, Artificial; identical to SEQ ID NO: 246183
  Synthetic oligonucleotide

SEQ ID NO: 620869 - DNA, 52 bp, Artificial; identical to SEQ ID NO: 149523
  Synthetic oligonucleotide

SEQ ID NO: 620870 - DNA, 50 bp, Artificial; identical to SEQ ID NO: 209823
  Synthetic oligonucleotide

SEQ ID NO: 620871 - DNA, 54 bp, Artificial; identical to SEQ ID NO: 246182
  Synthetic oligonucleotide

SEQ ID NO: 620872 - DNA, 55 bp, Artificial; identical to SEQ ID NO: 249106
  Synthetic oligonucleotide

SEQ ID NO: 620873 - DNA, 55 bp, Artificial; identical to SEQ ID NO: 207548
  Synthetic oligonucleotide

SEQ ID NO: 620874 - DNA, 55 bp, Artificial; identical to SEQ ID NO: 153407
  Synthetic oligonucleotide

SEQ ID NO: 620875 - DNA, 55 bp, Artificial; identical to SEQ ID NO: 188960
  Synthetic oligonucleotide

SEQ ID NO: 620876 - DNA, 55 bp, Artificial; identical to SEQ ID NO: 234354
  Synthetic oligonucleotide

SEQ ID NO: 620877 - DNA, 53 bp, Artificial; identical to SEQ ID NO: 149390
  Synthetic oligonucleotide

SEQ ID NO: 620878 - DNA, 54 bp, Artificial; identical to SEQ ID NO: 244543
  Synthetic oligonucleotide

SEQ ID NO: 620879 - DNA, 58 bp, Artificial; identical to SEQ ID NO: 149181
  Synthetic oligonucleotide

SEQ ID NO: 620880 - DNA, 55 bp, Artificial; identical to SEQ ID NO: 181177
  Synthetic oligonucleotide

SEQ ID NO: 620881 - DNA, 54 bp, Artificial; identical to SEQ ID NO: 243060
  Synthetic oligonucleotide

SEQ ID NO: 620882 - DNA, 51 bp, Artificial; identical to SEQ ID NO: 146487
  Synthetic oligonucleotide

SEQ ID NO: 620883 - DNA, 55 bp, Artificial; identical to SEQ ID NO: 254992
  Synthetic oligonucleotide

SEQ ID NO: 620884 - DNA, 55 bp, Artificial; identical to SEQ ID NO: 148680
  Synthetic oligonucleotide

SEQ ID NO: 620885 - DNA, 50 bp, Artificial; identical to SEQ ID NO: 176754
  Synthetic oligonucleotide

SEQ ID NO: 620886 - DNA, 60 bp, Artificial; identical to SEQ ID NO: 234386
  Synthetic oligonucleotide

SEQ ID NO: 620887 - DNA, 54 bp, Artificial; identical to SEQ ID NO: 212548
  Synthetic oligonucleotide

SEQ ID NO: 620888 - DNA, 60 bp, Artificial; identical to SEQ ID NO: 183404
  Synthetic oligonucleotide

SEQ ID NO: 620889 - DNA, 53 bp, Artificial; identical to SEQ ID NO: 221703
  Synthetic oligonucleotide

SEQ ID NO: 620890 - DNA, 55 bp, Artificial; identical to SEQ ID NO: 183415
  Synthetic oligonucleotide

SEQ ID NO: 620891 - DNA, 55 bp, Artificial; identical to SEQ ID NO: 171482
  Synthetic oligonucleotide

SEQ ID NO: 620892 - DNA, 55 bp, Artificial; identical to SEQ ID NO: 245389
  Synthetic oligonucleotide

SEQ ID NO: 620893 - DNA, 52 bp, Artificial; identical to SEQ ID NO: 188504
  Synthetic oligonucleotide

SEQ ID NO: 620894 - DNA, 59 bp, Artificial; identical to SEQ ID NO: 147101
  Synthetic oligonucleotide

SEQ ID NO: 620895 - DNA, 58 bp, Artificial; identical to SEQ ID NO: 240615
  Synthetic oligonucleotide

SEQ ID NO: 620896 - DNA, 60 bp, Artificial; identical to SEQ ID NO: 208163
  Synthetic oligonucleotide

SEQ ID NO: 620897 - DNA, 55 bp, Artificial; identical to SEQ ID NO: 168737
  Synthetic oligonucleotide

SEQ ID NO: 620898 - DNA, 55 bp, Artificial; identical to SEQ ID NO: 249104
  Synthetic oligonucleotide

SEQ ID NO: 620899 - DNA, 52 bp, Artificial; identical to SEQ ID NO: 199954
  Synthetic oligonucleotide

SEQ ID NO: 620900 - DNA, 60 bp, Artificial; identical to SEQ ID NO: 244565
  Synthetic oligonucleotide

SEQ ID NO: 620901 - DNA, 54 bp, Artificial; identical to SEQ ID NO: 199669
  Synthetic oligonucleotide

SEQ ID NO: 620902 - DNA, 56 bp, Artificial; identical to SEQ ID NO: 243824
  Synthetic oligonucleotide

SEQ ID NO: 620903 - DNA, 56 bp, Artificial; identical to SEQ ID NO: 209103
  Synthetic oligonucleotide

SEQ ID NO: 620904 - DNA, 57 bp, Artificial; identical to SEQ ID NO: 164101
  Synthetic oligonucleotide

SEQ ID NO: 620905 - DNA, 54 bp, Artificial; identical to SEQ ID NO: 185218
  Synthetic oligonucleotide

SEQ ID NO: 620906 - DNA, 55 bp, Artificial; identical to SEQ ID NO: 142369
  Synthetic oligonucleotide

SEQ ID NO: 620907 - DNA, 52 bp, Artificial; identical to SEQ ID NO: 170209
  Synthetic oligonucleotide

SEQ ID NO: 620908 - DNA, 54 bp, Artificial; identical to SEQ ID NO: 258062
  Synthetic oligonucleotide

SEQ ID NO: 620909 - DNA, 52 bp, Artificial; identical to SEQ ID NO: 221737
  Synthetic oligonucleotide

SEQ ID NO: 620910 - DNA, 50 bp, Artificial; identical to SEQ ID NO: 241585
  Synthetic oligonucleotide

SEQ ID NO: 620911 - DNA, 55 bp, Artificial; identical to SEQ ID NO: 260189
  Synthetic oligonucleotide

SEQ ID NO: 620912 - DNA, 55 bp, Artificial; identical to SEQ ID NO: 240420
  Synthetic oligonucleotide

SEQ ID NO: 620913 - DNA, 51 bp, Artificial; identical to SEQ ID NO: 237151
  Synthetic oligonucleotide

SEQ ID NO: 620914 - DNA, 56 bp, Artificial; identical to SEQ ID NO: 207084
  Synthetic oligonucleotide

SEQ ID NO: 620915 - DNA, 55 bp, Artificial; identical to SEQ ID NO: 148685
  Synthetic oligonucleotide

SEQ ID NO: 620916 - DNA, 55 bp, Artificial; identical to SEQ ID NO: 142361
  Synthetic oligonucleotide

SEQ ID NO: 620917 - DNA, 56 bp, Artificial; identical to SEQ ID NO: 203405
  Synthetic oligonucleotide

SEQ ID NO: 620918 - DNA, 55 bp, Artificial; identical to SEQ ID NO: 203653
  Synthetic oligonucleotide

SEQ ID NO: 620919 - DNA, 54 bp, Artificial; identical to SEQ ID NO: 246178
  Synthetic oligonucleotide

SEQ ID NO: 620920 - DNA, 52 bp, Artificial; identical to SEQ ID NO: 216424
  Synthetic oligonucleotide

SEQ ID NO: 620921 - DNA, 53 bp, Artificial; identical to SEQ ID NO: 149385
  Synthetic oligonucleotide

SEQ ID NO: 620922 - DNA, 55 bp, Artificial; identical to SEQ ID NO: 190574
  Synthetic oligonucleotide

SEQ ID NO: 620923 - DNA, 53 bp, Artificial; identical to SEQ ID NO: 154565
  Synthetic oligonucleotide

SEQ ID NO: 620924 - DNA, 51 bp, Artificial; identical to SEQ ID NO: 265992
  Synthetic oligonucleotide

SEQ ID NO: 620925 - DNA, 50 bp, Artificial; identical to SEQ ID NO: 200249
  Synthetic oligonucleotide

SEQ ID NO: 620926 - DNA, 52 bp, Artificial; identical to SEQ ID NO: 197568
  Synthetic oligonucleotide

SEQ ID NO: 620927 - DNA, 54 bp, Artificial; identical to SEQ ID NO: 167535
  Synthetic oligonucleotide

SEQ ID NO: 620928 - DNA, 60 bp, Artificial; identical to SEQ ID NO: 141832
  Synthetic oligonucleotide

SEQ ID NO: 620929 - DNA, 52 bp, Artificial; identical to SEQ ID NO: 193752
  Synthetic oligonucleotide

SEQ ID NO: 620930 - DNA, 55 bp, Artificial; identical to SEQ ID NO: 148698
  Synthetic oligonucleotide

SEQ ID NO: 620931 - DNA, 59 bp, Artificial; identical to SEQ ID NO: 202915
  Synthetic oligonucleotide

SEQ ID NO: 620932 - DNA, 53 bp, Artificial; identical to SEQ ID NO: 164090
  Synthetic oligonucleotide

SEQ ID NO: 620933 - DNA, 52 bp, Artificial; identical to SEQ ID NO: 165115
  Synthetic oligonucleotide

SEQ ID NO: 620934 - DNA, 54 bp, Artificial; identical to SEQ ID NO: 225206
  Synthetic oligonucleotide

SEQ ID NO: 620935 - DNA, 59 bp, Artificial; identical to SEQ ID NO: 164068
  Synthetic oligonucleotide

SEQ ID NO: 620936 - DNA, 58 bp, Artificial; identical to SEQ ID NO: 170320
  Synthetic oligonucleotide

SEQ ID NO: 620937 - DNA, 55 bp, Artificial; identical to SEQ ID NO: 207546
  Synthetic oligonucleotide

SEQ ID NO: 620938 - DNA, 55 bp, Artificial; identical to SEQ ID NO: 254972
  Synthetic oligonucleotide

SEQ ID NO: 620939 - DNA, 59 bp, Artificial; identical to SEQ ID NO: 194226
  Synthetic oligonucleotide

SEQ ID NO: 620940 - DNA, 56 bp, Artificial; identical to SEQ ID NO: 256011
  Synthetic oligonucleotide

SEQ ID NO: 620941 - DNA, 55 bp, Artificial; identical to SEQ ID NO: 154271
  Synthetic oligonucleotide

SEQ ID NO: 620942 - DNA, 51 bp, Artificial; identical to SEQ ID NO: 154670
  Synthetic oligonucleotide

SEQ ID NO: 620943 - DNA, 55 bp, Artificial; identical to SEQ ID NO: 190571
  Synthetic oligonucleotide

SEQ ID NO: 620944 - DNA, 54 bp, Artificial; identical to SEQ ID NO: 201608
  Synthetic oligonucleotide

SEQ ID NO: 620945 - DNA, 55 bp, Artificial; identical to SEQ ID NO: 238335
  Synthetic oligonucleotide

SEQ ID NO: 620946 - DNA, 57 bp, Artificial; identical to SEQ ID NO: 206833
  Synthetic oligonucleotide

SEQ ID NO: 620947 - DNA, 53 bp, Artificial; identical to SEQ ID NO: 141831
  Synthetic oligonucleotide

SEQ ID NO: 620948 - DNA, 55 bp, Artificial; identical to SEQ ID NO: 162242
  Synthetic oligonucleotide

SEQ ID NO: 620949 - DNA, 54 bp, Artificial; identical to SEQ ID NO: 197330
  Synthetic oligonucleotide

SEQ ID NO: 620950 - DNA, 50 bp, Artificial; identical to SEQ ID NO: 150239
  Synthetic oligonucleotide

SEQ ID NO: 620951 - DNA, 54 bp, Artificial; identical to SEQ ID NO: 168869
  Synthetic oligonucleotide

SEQ ID NO: 620952 - DNA, 55 bp, Artificial; identical to SEQ ID NO: 211314
  Synthetic oligonucleotide

SEQ ID NO: 620953 - DNA, 56 bp, Artificial; identical to SEQ ID NO: 243827
  Synthetic oligonucleotide

SEQ ID NO: 620954 - DNA, 58 bp, Artificial; identical to SEQ ID NO: 240537
  Synthetic oligonucleotide

SEQ ID NO: 620955 - DNA, 57 bp, Artificial; identical to SEQ ID NO: 191729
  Synthetic oligonucleotide

SEQ ID NO: 620956 - DNA, 54 bp, Artificial; identical to SEQ ID NO: 174826
  Synthetic oligonucleotide

SEQ ID NO: 620957 - DNA, 57 bp, Artificial; identical to SEQ ID NO: 240526
  Synthetic oligonucleotide

SEQ ID NO: 620958 - DNA, 55 bp, Artificial; identical to SEQ ID NO: 153336
  Synthetic oligonucleotide

SEQ ID NO: 620959 - DNA, 55 bp, Artificial; identical to SEQ ID NO: 224851
  Synthetic oligonucleotide

SEQ ID NO: 620960 - DNA, 52 bp, Artificial; identical to SEQ ID NO: 246415
  Synthetic oligonucleotide

SEQ ID NO: 620961 - DNA, 55 bp, Artificial; identical to SEQ ID NO: 224852
  Synthetic oligonucleotide

SEQ ID NO: 620962 - DNA, 58 bp, Artificial; identical to SEQ ID NO: 149093
  Synthetic oligonucleotide

SEQ ID NO: 620963 - DNA, 51 bp, Artificial; identical to SEQ ID NO: 248065
  Synthetic oligonucleotide

SEQ ID NO: 620964 - DNA, 57 bp, Artificial; identical to SEQ ID NO: 183549
  Synthetic oligonucleotide

SEQ ID NO: 620965 - DNA, 50 bp, Artificial; identical to SEQ ID NO: 143926
  Synthetic oligonucleotide

SEQ ID NO: 620966 - DNA, 60 bp, Artificial; identical to SEQ ID NO: 159800
  Synthetic oligonucleotide

SEQ ID NO: 620967 - DNA, 55 bp, Artificial; identical to SEQ ID NO: 183571
  Synthetic oligonucleotide

SEQ ID NO: 620968 - DNA, 59 bp, Artificial; identical to SEQ ID NO: 187256
  Synthetic oligonucleotide

SEQ ID NO: 620969 - DNA, 53 bp, Artificial; identical to SEQ ID NO: 164045
  Synthetic oligonucleotide

SEQ ID NO: 620970 - DNA, 59 bp, Artificial; identical to SEQ ID NO: 233935
  Synthetic oligonucleotide

SEQ ID NO: 620971 - DNA, 51 bp, Artificial; identical to SEQ ID NO: 193877
  Synthetic oligonucleotide

SEQ ID NO: 620972 - DNA, 58 bp, Artificial; identical to SEQ ID NO: 244610
  Synthetic oligonucleotide

SEQ ID NO: 620973 - DNA, 55 bp, Artificial; identical to SEQ ID NO: 164459
  Synthetic oligonucleotide

SEQ ID NO: 620974 - DNA, 55 bp, Artificial; identical to SEQ ID NO: 162241
  Synthetic oligonucleotide

SEQ ID NO: 620975 - DNA, 55 bp, Artificial; identical to SEQ ID NO: 240409
  Synthetic oligonucleotide

SEQ ID NO: 620976 - DNA, 59 bp, Artificial; identical to SEQ ID NO: 241115
  Synthetic oligonucleotide

SEQ ID NO: 620977 - DNA, 56 bp, Artificial; identical to SEQ ID NO: 241104
  Synthetic oligonucleotide

SEQ ID NO: 620978 - DNA, 60 bp, Artificial; identical to SEQ ID NO: 243806
  Synthetic oligonucleotide

SEQ ID NO: 620979 - DNA, 60 bp, Artificial; identical to SEQ ID NO: 170431
  Synthetic oligonucleotide

SEQ ID NO: 620980 - DNA, 60 bp, Artificial; identical to SEQ ID NO: 164034
  Synthetic oligonucleotide

SEQ ID NO: 620981 - DNA, 56 bp, Artificial; identical to SEQ ID NO: 197875
  Synthetic oligonucleotide

SEQ ID NO: 620982 - DNA, 55 bp, Artificial; identical to SEQ ID NO: 266211
  Synthetic oligonucleotide

SEQ ID NO: 620983 - DNA, 55 bp, Artificial; identical to SEQ ID NO: 261820
  Synthetic oligonucleotide

SEQ ID NO: 620984 - DNA, 55 bp, Artificial; identical to SEQ ID NO: 218880
  Synthetic oligonucleotide

SEQ ID NO: 620985 - DNA, 60 bp, Artificial; identical to SEQ ID NO: 177350
  Synthetic oligonucleotide

SEQ ID NO: 620986 - DNA, 55 bp, Artificial; identical to SEQ ID NO: 142352
  Synthetic oligonucleotide

SEQ ID NO: 620987 - DNA, 58 bp, Artificial; identical to SEQ ID NO: 241093
  Synthetic oligonucleotide

SEQ ID NO: 620988 - DNA, 55 bp, Artificial; identical to SEQ ID NO: 161780
  Synthetic oligonucleotide

SEQ ID NO: 620989 - DNA, 54 bp, Artificial; identical to SEQ ID NO: 246215
  Synthetic oligonucleotide

SEQ ID NO: 620990 - DNA, 54 bp, Artificial; identical to SEQ ID NO: 246213
  Synthetic oligonucleotide

SEQ ID NO: 620991 - DNA, 57 bp, Artificial; identical to SEQ ID NO: 149082
  Synthetic oligonucleotide

SEQ ID NO: 620992 - DNA, 60 bp, Artificial; identical to SEQ ID NO: 217223
  Synthetic oligonucleotide

SEQ ID NO: 620993 - DNA, 54 bp, Artificial; identical to SEQ ID NO: 211512
  Synthetic oligonucleotide

SEQ ID NO: 620994 - DNA, 54 bp, Artificial; identical to SEQ ID NO: 181083
  Synthetic oligonucleotide

SEQ ID NO: 620995 - DNA, 51 bp, Artificial; identical to SEQ ID NO: 186384
  Synthetic oligonucleotide

SEQ ID NO: 620996 - DNA, 60 bp, Artificial; identical to SEQ ID NO: 164012
  Synthetic oligonucleotide

SEQ ID NO: 620997 - DNA, 53 bp, Artificial; identical to SEQ ID NO: 215197
  Synthetic oligonucleotide

SEQ ID NO: 620998 - DNA, 53 bp, Artificial; identical to SEQ ID NO: 240730
  Synthetic oligonucleotide

SEQ ID NO: 620999 - DNA, 57 bp, Artificial; identical to SEQ ID NO: 241071
  Synthetic oligonucleotide

SEQ ID NO: 621000 - DNA, 59 bp, Artificial; identical to SEQ ID NO: 244621
  Synthetic oligonucleotide

SEQ ID NO: 621001 - DNA, 56 bp, Artificial; identical to SEQ ID NO: 209104
  Synthetic oligonucleotide

SEQ ID NO: 621002 - DNA, 50 bp, Artificial; identical to SEQ ID NO: 155689
  Synthetic oligonucleotide

SEQ ID NO: 621003 - DNA, 60 bp, Artificial; identical to SEQ ID NO: 177383
  Synthetic oligonucleotide

SEQ ID NO: 621004 - DNA, 55 bp, Artificial; identical to SEQ ID NO: 148656
  Synthetic oligonucleotide

SEQ ID NO: 621005 - DNA, 55 bp, Artificial; identical to SEQ ID NO: 160190
  Synthetic oligonucleotide

SEQ ID NO: 621006 - DNA, 54 bp, Artificial; identical to SEQ ID NO: 246208
  Synthetic oligonucleotide

SEQ ID NO: 621007 - DNA, 51 bp, Artificial; identical to SEQ ID NO: 189197
  Synthetic oligonucleotide

SEQ ID NO: 621008 - DNA, 52 bp, Artificial; identical to SEQ ID NO: 240880
  Synthetic oligonucleotide

SEQ ID NO: 621009 - DNA, 55 bp, Artificial; identical to SEQ ID NO: 164458
  Synthetic oligonucleotide

SEQ ID NO: 621010 - DNA, 54 bp, Artificial; identical to SEQ ID NO: 164766
  Synthetic oligonucleotide

SEQ ID NO: 621011 - DNA, 60 bp, Artificial; identical to SEQ ID NO: 206822
  Synthetic oligonucleotide

SEQ ID NO: 621012 - DNA, 51 bp, Artificial; identical to SEQ ID NO: 249682
  Synthetic oligonucleotide

SEQ ID NO: 621013 - DNA, 55 bp, Artificial; identical to SEQ ID NO: 203652
  Synthetic oligonucleotide

SEQ ID NO: 621014 - DNA, 56 bp, Artificial; identical to SEQ ID NO: 239588
  Synthetic oligonucleotide

SEQ ID NO: 621015 - DNA, 60 bp, Artificial; identical to SEQ ID NO: 248541
  Synthetic oligonucleotide

SEQ ID NO: 621016 - DNA, 60 bp, Artificial; identical to SEQ ID NO: 243804
  Synthetic oligonucleotide

SEQ ID NO: 621017 - DNA, 51 bp, Artificial; identical to SEQ ID NO: 200032
  Synthetic oligonucleotide

SEQ ID NO: 621018 - DNA, 60 bp, Artificial; identical to SEQ ID NO: 149059
  Synthetic oligonucleotide

SEQ ID NO: 621019 - DNA, 54 bp, Artificial; identical to SEQ ID NO: 203651
  Synthetic oligonucleotide

SEQ ID NO: 621020 - DNA, 55 bp, Artificial; identical to SEQ ID NO: 249215
  Synthetic oligonucleotide

SEQ ID NO: 621021 - DNA, 54 bp, Artificial; identical to SEQ ID NO: 212944
  Synthetic oligonucleotide

SEQ ID NO: 621022 - DNA, 52 bp, Artificial; identical to SEQ ID NO: 189172
  Synthetic oligonucleotide

SEQ ID NO: 621023 - DNA, 55 bp, Artificial; identical to SEQ ID NO: 149048
  Synthetic oligonucleotide

SEQ ID NO: 621024 - DNA, 53 bp, Artificial; identical to SEQ ID NO: 233821
  Synthetic oligonucleotide

SEQ ID NO: 621025 - DNA, 51 bp, Artificial; identical to SEQ ID NO: 243331
  Synthetic oligonucleotide

SEQ ID NO: 621026 - DNA, 60 bp, Artificial; identical to SEQ ID NO: 256033
  Synthetic oligonucleotide

SEQ ID NO: 621027 - DNA, 50 bp, Artificial; identical to SEQ ID NO: 189341
  Synthetic oligonucleotide

SEQ ID NO: 621028 - DNA, 58 bp, Artificial; identical to SEQ ID NO: 149493
  Synthetic oligonucleotide

SEQ ID NO: 621029 - DNA, 55 bp, Artificial; identical to SEQ ID NO: 141823
  Synthetic oligonucleotide

SEQ ID NO: 621030 - DNA, 53 bp, Artificial; identical to SEQ ID NO: 188079
  Synthetic oligonucleotide

SEQ ID NO: 621031 - DNA, 55 bp, Artificial; identical to SEQ ID NO: 156824
  Synthetic oligonucleotide

SEQ ID NO: 621032 - DNA, 54 bp, Artificial; identical to SEQ ID NO: 241026
  Synthetic oligonucleotide

SEQ ID NO: 621033 - DNA, 59 bp, Artificial; identical to SEQ ID NO: 262780
  Synthetic oligonucleotide

SEQ ID NO: 621034 - DNA, 54 bp, Artificial; identical to SEQ ID NO: 201031
  Synthetic oligonucleotide

SEQ ID NO: 621035 - DNA, 55 bp, Artificial; identical to SEQ ID NO: 181289
  Synthetic oligonucleotide

SEQ ID NO: 621036 - DNA, 55 bp, Artificial; identical to SEQ ID NO: 266207
  Synthetic oligonucleotide

SEQ ID NO: 621037 - DNA, 57 bp, Artificial; identical to SEQ ID NO: 224382
  Synthetic oligonucleotide

SEQ ID NO: 621038 - DNA, 58 bp, Artificial; identical to SEQ ID NO: 238459
  Synthetic oligonucleotide

SEQ ID NO: 621039 - DNA, 55 bp, Artificial; identical to SEQ ID NO: 245480
  Synthetic oligonucleotide

SEQ ID NO: 621040 - DNA, 57 bp, Artificial; identical to SEQ ID NO: 187285
  Synthetic oligonucleotide

SEQ ID NO: 621041 - DNA, 50 bp, Artificial; identical to SEQ ID NO: 176789
  Synthetic oligonucleotide

SEQ ID NO: 621042 - DNA, 55 bp, Artificial; identical to SEQ ID NO: 249210
  Synthetic oligonucleotide

SEQ ID NO: 621043 - DNA, 58 bp, Artificial; identical to SEQ ID NO: 187286
  Synthetic oligonucleotide

SEQ ID NO: 621044 - DNA, 55 bp, Artificial; identical to SEQ ID NO: 208222
  Synthetic oligonucleotide

SEQ ID NO: 621045 - DNA, 52 bp, Artificial; identical to SEQ ID NO: 163979
  Synthetic oligonucleotide

SEQ ID NO: 621046 - DNA, 52 bp, Artificial; identical to SEQ ID NO: 191202
  Synthetic oligonucleotide

SEQ ID NO: 621047 - DNA, 52 bp, Artificial; identical to SEQ ID NO: 185340
  Synthetic oligonucleotide

SEQ ID NO: 621048 - DNA, 53 bp, Artificial; identical to SEQ ID NO: 197513
  Synthetic oligonucleotide

SEQ ID NO: 621049 - DNA, 60 bp, Artificial; identical to SEQ ID NO: 206800
  Synthetic oligonucleotide

SEQ ID NO: 621050 - DNA, 58 bp, Artificial; identical to SEQ ID NO: 234364
  Synthetic oligonucleotide

SEQ ID NO: 621051 - DNA, 55 bp, Artificial; identical to SEQ ID NO: 148535
  Synthetic oligonucleotide

SEQ ID NO: 621052 - DNA, 58 bp, Artificial; identical to SEQ ID NO: 241004
  Synthetic oligonucleotide

SEQ ID NO: 621053 - DNA, 55 bp, Artificial; identical to SEQ ID NO: 219627
  Synthetic oligonucleotide

SEQ ID NO: 621054 - DNA, 51 bp, Artificial; identical to SEQ ID NO: 186505
  Synthetic oligonucleotide

SEQ ID NO: 621055 - DNA, 50 bp, Artificial; identical to SEQ ID NO: 165914
  Synthetic oligonucleotide

SEQ ID NO: 621056 - DNA, 57 bp, Artificial; identical to SEQ ID NO: 209213
  Synthetic oligonucleotide

SEQ ID NO: 621057 - DNA, 51 bp, Artificial; identical to SEQ ID NO: 202546
  Synthetic oligonucleotide

SEQ ID NO: 621058 - DNA, 58 bp, Artificial; identical to SEQ ID NO: 240993
  Synthetic oligonucleotide

SEQ ID NO: 621059 - DNA, 59 bp, Artificial; identical to SEQ ID NO: 243797
  Synthetic oligonucleotide

SEQ ID NO: 621060 - DNA, 59 bp, Artificial; identical to SEQ ID NO: 159802
  Synthetic oligonucleotide

SEQ ID NO: 621061 - DNA, 55 bp, Artificial; identical to SEQ ID NO: 148542
  Synthetic oligonucleotide

SEQ ID NO: 621062 - DNA, 51 bp, Artificial; identical to SEQ ID NO: 249686
  Synthetic oligonucleotide

SEQ ID NO: 621063 - DNA, 60 bp, Artificial; identical to SEQ ID NO: 159803
  Synthetic oligonucleotide

SEQ ID NO: 621064 - DNA, 52 bp, Artificial; identical to SEQ ID NO: 263526
  Synthetic oligonucleotide

SEQ ID NO: 621065 - DNA, 59 bp, Artificial; identical to SEQ ID NO: 243795
  Synthetic oligonucleotide

SEQ ID NO: 621066 - DNA, 56 bp, Artificial; identical to SEQ ID NO: 149438
  Synthetic oligonucleotide

SEQ ID NO: 621067 - DNA, 55 bp, Artificial; identical to SEQ ID NO: 168729
  Synthetic oligonucleotide

SEQ ID NO: 621068 - DNA, 60 bp, Artificial; identical to SEQ ID NO: 240960
  Synthetic oligonucleotide

SEQ ID NO: 621069 - DNA, 54 bp, Artificial; identical to SEQ ID NO: 242957
  Synthetic oligonucleotide

SEQ ID NO: 621070 - DNA, 60 bp, Artificial; identical to SEQ ID NO: 206789
  Synthetic oligonucleotide

SEQ ID NO: 621071 - DNA, 54 bp, Artificial; identical to SEQ ID NO: 199578
  Synthetic oligonucleotide

SEQ ID NO: 621072 - DNA, 50 bp, Artificial; identical to SEQ ID NO: 202638
  Synthetic oligonucleotide

SEQ ID NO: 621073 - DNA, 55 bp, Artificial; identical to SEQ ID NO: 209496
  Synthetic oligonucleotide

SEQ ID NO: 621074 - DNA, 60 bp, Artificial; identical to SEQ ID NO: 200998
  Synthetic oligonucleotide

SEQ ID NO: 621075 - DNA, 53 bp, Artificial; identical to SEQ ID NO: 215192
  Synthetic oligonucleotide

SEQ ID NO: 621076 - DNA, 54 bp, Artificial; identical to SEQ ID NO: 218310
  Synthetic oligonucleotide

SEQ ID NO: 621077 - DNA, 54 bp, Artificial; identical to SEQ ID NO: 149236
  Synthetic oligonucleotide

SEQ ID NO: 621078 - DNA, 57 bp, Artificial; identical to SEQ ID NO: 179837
  Synthetic oligonucleotide

SEQ ID NO: 621079 - DNA, 50 bp, Artificial; identical to SEQ ID NO: 158082
  Synthetic oligonucleotide

SEQ ID NO: 621080 - DNA, 55 bp, Artificial; identical to SEQ ID NO: 201310
  Synthetic oligonucleotide

SEQ ID NO: 621081 - DNA, 55 bp, Artificial; identical to SEQ ID NO: 156868
  Synthetic oligonucleotide

SEQ ID NO: 621082 - DNA, 57 bp, Artificial; identical to SEQ ID NO: 147039
  Synthetic oligonucleotide

SEQ ID NO: 621083 - DNA, 55 bp, Artificial; identical to SEQ ID NO: 164495
  Synthetic oligonucleotide

SEQ ID NO: 621084 - DNA, 51 bp, Artificial; identical to SEQ ID NO: 160570
  Synthetic oligonucleotide

SEQ ID NO: 621085 - DNA, 50 bp, Artificial; identical to SEQ ID NO: 160683
  Synthetic oligonucleotide

SEQ ID NO: 621086 - DNA, 55 bp, Artificial; identical to SEQ ID NO: 181268
  Synthetic oligonucleotide

SEQ ID NO: 621087 - DNA, 55 bp, Artificial; identical to SEQ ID NO: 258037
  Synthetic oligonucleotide

SEQ ID NO: 621088 - DNA, 53 bp, Artificial; identical to SEQ ID NO: 156731
  Synthetic oligonucleotide

SEQ ID NO: 621089 - DNA, 55 bp, Artificial; identical to SEQ ID NO: 258006
  Synthetic oligonucleotide

SEQ ID NO: 621090 - DNA, 55 bp, Artificial; identical to SEQ ID NO: 160823
  Synthetic oligonucleotide

SEQ ID NO: 621091 - DNA, 50 bp, Artificial; identical to SEQ ID NO: 165921
  Synthetic oligonucleotide

SEQ ID NO: 621092 - DNA, 60 bp, Artificial; identical to SEQ ID NO: 238481
  Synthetic oligonucleotide

SEQ ID NO: 621093 - DNA, 52 bp, Artificial; identical to SEQ ID NO: 254856
  Synthetic oligonucleotide

SEQ ID NO: 621094 - DNA, 56 bp, Artificial; identical to SEQ ID NO: 166812
  Synthetic oligonucleotide

SEQ ID NO: 621095 - DNA, 59 bp, Artificial; identical to SEQ ID NO: 209112
  Synthetic oligonucleotide

SEQ ID NO: 621096 - DNA, 55 bp, Artificial; identical to SEQ ID NO: 156870
  Synthetic oligonucleotide

SEQ ID NO: 621097 - DNA, 60 bp, Artificial; identical to SEQ ID NO: 201000
  Synthetic oligonucleotide

SEQ ID NO: 621098 - DNA, 57 bp, Artificial; identical to SEQ ID NO: 201205
  Synthetic oligonucleotide

SEQ ID NO: 621099 - DNA, 55 bp, Artificial; identical to SEQ ID NO: 203650
  Synthetic oligonucleotide

SEQ ID NO: 621100 - DNA, 54 bp, Artificial; identical to SEQ ID NO: 185329
  Synthetic oligonucleotide

SEQ ID NO: 621101 - DNA, 60 bp, Artificial; identical to SEQ ID NO: 176660
  Synthetic oligonucleotide

SEQ ID NO: 621102 - DNA, 60 bp, Artificial; identical to SEQ ID NO: 217206
  Synthetic oligonucleotide

SEQ ID NO: 621103 - DNA, 60 bp, Artificial; identical to SEQ ID NO: 243791
  Synthetic oligonucleotide

SEQ ID NO: 621104 - DNA, 55 bp, Artificial; identical to SEQ ID NO: 161041
  Synthetic oligonucleotide

SEQ ID NO: 621105 - DNA, 56 bp, Artificial; identical to SEQ ID NO: 257517
  Synthetic oligonucleotide

SEQ ID NO: 621106 - DNA, 57 bp, Artificial; identical to SEQ ID NO: 239389
  Synthetic oligonucleotide

SEQ ID NO: 621107 - DNA, 55 bp, Artificial; identical to SEQ ID NO: 181334
  Synthetic oligonucleotide

SEQ ID NO: 621108 - DNA, 59 bp, Artificial; identical to SEQ ID NO: 240926
  Synthetic oligonucleotide

SEQ ID NO: 621109 - DNA, 50 bp, Artificial; identical to SEQ ID NO: 176574
  Synthetic oligonucleotide

SEQ ID NO: 621110 - DNA, 60 bp, Artificial; identical to SEQ ID NO: 240915
  Synthetic oligonucleotide

SEQ ID NO: 621111 - DNA, 57 bp, Artificial; identical to SEQ ID NO: 256044
  Synthetic oligonucleotide

SEQ ID NO: 621112 - DNA, 51 bp, Artificial; identical to SEQ ID NO: 206494
  Synthetic oligonucleotide

SEQ ID NO: 621113 - DNA, 55 bp, Artificial; identical to SEQ ID NO: 211356
  Synthetic oligonucleotide

SEQ ID NO: 621114 - DNA, 57 bp, Artificial; identical to SEQ ID NO: 149416
  Synthetic oligonucleotide

SEQ ID NO: 621115 - DNA, 51 bp, Artificial; identical to SEQ ID NO: 186472
  Synthetic oligonucleotide

SEQ ID NO: 621116 - DNA, 55 bp, Artificial; identical to SEQ ID NO: 194775
  Synthetic oligonucleotide

SEQ ID NO: 621117 - DNA, 50 bp, Artificial; identical to SEQ ID NO: 171929
  Synthetic oligonucleotide

SEQ ID NO: 621118 - DNA, 54 bp, Artificial; identical to SEQ ID NO: 209586
  Synthetic oligonucleotide

SEQ ID NO: 621119 - DNA, 53 bp, Artificial; identical to SEQ ID NO: 185529
  Synthetic oligonucleotide

SEQ ID NO: 621120 - DNA, 57 bp, Artificial; identical to SEQ ID NO: 191956
  Synthetic oligonucleotide

SEQ ID NO: 621121 - DNA, 60 bp, Artificial; identical to SEQ ID NO: 170542
  Synthetic oligonucleotide

SEQ ID NO: 621122 - DNA, 55 bp, Artificial; identical to SEQ ID NO: 249202
  Synthetic oligonucleotide

SEQ ID NO: 621123 - DNA, 55 bp, Artificial; identical to SEQ ID NO: 188390
  Synthetic oligonucleotide

SEQ ID NO: 621124 - DNA, 58 bp, Artificial; identical to SEQ ID NO: 152299
  Synthetic oligonucleotide

SEQ ID NO: 621125 - DNA, 53 bp, Artificial; identical to SEQ ID NO: 223626
  Synthetic oligonucleotide

SEQ ID NO: 621126 - DNA, 60 bp, Artificial; identical to SEQ ID NO: 188264
  Synthetic oligonucleotide

SEQ ID NO: 621127 - DNA, 55 bp, Artificial; identical to SEQ ID NO: 188967
  Synthetic oligonucleotide

SEQ ID NO: 621128 - DNA, 60 bp, Artificial; identical to SEQ ID NO: 206386
  Synthetic oligonucleotide

SEQ ID NO: 621129 - DNA, 57 bp, Artificial; identical to SEQ ID NO: 147262
  Synthetic oligonucleotide

SEQ ID NO: 621130 - DNA, 55 bp, Artificial; identical to SEQ ID NO: 154268
  Synthetic oligonucleotide

SEQ ID NO: 621131 - DNA, 55 bp, Artificial; identical to SEQ ID NO: 164494
  Synthetic oligonucleotide

SEQ ID NO: 621132 - DNA, 55 bp, Artificial; identical to SEQ ID NO: 156872
  Synthetic oligonucleotide

SEQ ID NO: 621133 - DNA, 60 bp, Artificial; identical to SEQ ID NO: 202140
  Synthetic oligonucleotide

SEQ ID NO: 621134 - DNA, 54 bp, Artificial; identical to SEQ ID NO: 185350
  Synthetic oligonucleotide

SEQ ID NO: 621135 - DNA, 55 bp, Artificial; identical to SEQ ID NO: 181316
  Synthetic oligonucleotide

SEQ ID NO: 621136 - DNA, 54 bp, Artificial; identical to SEQ ID NO: 177194
  Synthetic oligonucleotide

SEQ ID NO: 621137 - DNA, 50 bp, Artificial; identical to SEQ ID NO: 150245
  Synthetic oligonucleotide

SEQ ID NO: 621138 - DNA, 60 bp, Artificial; identical to SEQ ID NO: 153621
  Synthetic oligonucleotide

SEQ ID NO: 621139 - DNA, 53 bp, Artificial; identical to SEQ ID NO: 209611
  Synthetic oligonucleotide

SEQ ID NO: 621140 - DNA, 55 bp, Artificial; identical to SEQ ID NO: 156873
  Synthetic oligonucleotide

SEQ ID NO: 621141 - DNA, 55 bp, Artificial; identical to SEQ ID NO: 240325
  Synthetic oligonucleotide

SEQ ID NO: 621142 - DNA, 55 bp, Artificial; identical to SEQ ID NO: 148579
  Synthetic oligonucleotide

SEQ ID NO: 621143 - DNA, 55 bp, Artificial; identical to SEQ ID NO: 224853
  Synthetic oligonucleotide

SEQ ID NO: 621144 - DNA, 55 bp, Artificial; identical to SEQ ID NO: 164493
  Synthetic oligonucleotide

SEQ ID NO: 621145 - DNA, 60 bp, Artificial; identical to SEQ ID NO: 201006
  Synthetic oligonucleotide

SEQ ID NO: 621146 - DNA, 55 bp, Artificial; identical to SEQ ID NO: 181324
  Synthetic oligonucleotide

SEQ ID NO: 621147 - DNA, 55 bp, Artificial; identical to SEQ ID NO: 245495
  Synthetic oligonucleotide

SEQ ID NO: 621148 - DNA, 51 bp, Artificial; identical to SEQ ID NO: 258221
  Synthetic oligonucleotide

SEQ ID NO: 621149 - DNA, 55 bp, Artificial; identical to SEQ ID NO: 243845
  Synthetic oligonucleotide

SEQ ID NO: 621150 - DNA, 50 bp, Artificial; identical to SEQ ID NO: 206668
  Synthetic oligonucleotide

SEQ ID NO: 621151 - DNA, 57 bp, Artificial; identical to SEQ ID NO: 224308
  Synthetic oligonucleotide

SEQ ID NO: 621152 - DNA, 58 bp, Artificial; identical to SEQ ID NO: 177239
  Synthetic oligonucleotide

SEQ ID NO: 621153 - DNA, 53 bp, Artificial; identical to SEQ ID NO: 190548
  Synthetic oligonucleotide

SEQ ID NO: 621154 - DNA, 54 bp, Artificial; identical to SEQ ID NO: 167053
  Synthetic oligonucleotide

SEQ ID NO: 621155 - DNA, 51 bp, Artificial; identical to SEQ ID NO: 209087
  Synthetic oligonucleotide

SEQ ID NO: 621156 - DNA, 60 bp, Artificial; identical to SEQ ID NO: 240871
  Synthetic oligonucleotide

SEQ ID NO: 621157 - DNA, 55 bp, Artificial; identical to SEQ ID NO: 195190
  Synthetic oligonucleotide

SEQ ID NO: 621158 - DNA, 51 bp, Artificial; identical to SEQ ID NO: 206558
  Synthetic oligonucleotide

SEQ ID NO: 621159 - DNA, 56 bp, Artificial; identical to SEQ ID NO: 208174
  Synthetic oligonucleotide

SEQ ID NO: 621160 - DNA, 55 bp, Artificial; identical to SEQ ID NO: 181203
  Synthetic oligonucleotide

SEQ ID NO: 621161 - DNA, 51 bp, Artificial; identical to SEQ ID NO: 157832
  Synthetic oligonucleotide

SEQ ID NO: 621162 - DNA, 59 bp, Artificial; identical to SEQ ID NO: 243846
  Synthetic oligonucleotide

SEQ ID NO: 621163 - DNA, 57 bp, Artificial; identical to SEQ ID NO: 244010
  Synthetic oligonucleotide

SEQ ID NO: 621164 - DNA, 60 bp, Artificial; identical to SEQ ID NO: 155101
  Synthetic oligonucleotide

SEQ ID NO: 621165 - DNA, 58 bp, Artificial; identical to SEQ ID NO: 201008
  Synthetic oligonucleotide

SEQ ID NO: 621166 - DNA, 55 bp, Artificial; identical to SEQ ID NO: 151657
  Synthetic oligonucleotide

SEQ ID NO: 621167 - DNA, 54 bp, Artificial; identical to SEQ ID NO: 217830
  Synthetic oligonucleotide

SEQ ID NO: 621168 - DNA, 55 bp, Artificial; identical to SEQ ID NO: 169857
  Synthetic oligonucleotide

SEQ ID NO: 621169 - DNA, 52 bp, Artificial; identical to SEQ ID NO: 258138
  Synthetic oligonucleotide

SEQ ID NO: 621170 - DNA, 52 bp, Artificial; identical to SEQ ID NO: 206449
  Synthetic oligonucleotide

SEQ ID NO: 621171 - DNA, 56 bp, Artificial; identical to SEQ ID NO: 244699
  Synthetic oligonucleotide

SEQ ID NO: 621172 - DNA, 55 bp, Artificial; identical to SEQ ID NO: 169856
  Synthetic oligonucleotide

SEQ ID NO: 621173 - DNA, 55 bp, Artificial; identical to SEQ ID NO: 194776
  Synthetic oligonucleotide

SEQ ID NO: 621174 - DNA, 51 bp, Artificial; identical to SEQ ID NO: 149839
  Synthetic oligonucleotide

SEQ ID NO: 621175 - DNA, 55 bp, Artificial; identical to SEQ ID NO: 205534
  Synthetic oligonucleotide

SEQ ID NO: 621176 - DNA, 59 bp, Artificial; identical to SEQ ID NO: 253375
  Synthetic oligonucleotide

SEQ ID NO: 621177 - DNA, 53 bp, Artificial; identical to SEQ ID NO: 157341
  Synthetic oligonucleotide

SEQ ID NO: 621178 - DNA, 60 bp, Artificial; identical to SEQ ID NO: 156698
  Synthetic oligonucleotide

SEQ ID NO: 621179 - DNA, 52 bp, Artificial; identical to SEQ ID NO: 223635
  Synthetic oligonucleotide

SEQ ID NO: 621180 - DNA, 60 bp, Artificial; identical to SEQ ID NO: 141855
  Synthetic oligonucleotide

SEQ ID NO: 621181 - DNA, 59 bp, Artificial; identical to SEQ ID NO: 256077
  Synthetic oligonucleotide

SEQ ID NO: 621182 - DNA, 57 bp, Artificial; identical to SEQ ID NO: 141853
  Synthetic oligonucleotide

SEQ ID NO: 621183 - DNA, 53 bp, Artificial; identical to SEQ ID NO: 216665
  Synthetic oligonucleotide

SEQ ID NO: 621184 - DNA, 60 bp, Artificial; identical to SEQ ID NO: 191031
  Synthetic oligonucleotide

SEQ ID NO: 621185 - DNA, 52 bp, Artificial; identical to SEQ ID NO: 206447
  Synthetic oligonucleotide

SEQ ID NO: 621186 - DNA, 55 bp, Artificial; identical to SEQ ID NO: 187785
  Synthetic oligonucleotide

SEQ ID NO: 621187 - DNA, 57 bp, Artificial; identical to SEQ ID NO: 155364
  Synthetic oligonucleotide

SEQ ID NO: 621188 - DNA, 54 bp, Artificial; identical to SEQ ID NO: 243849
  Synthetic oligonucleotide

SEQ ID NO: 621189 - DNA, 55 bp, Artificial; identical to SEQ ID NO: 144264
  Synthetic oligonucleotide

SEQ ID NO: 621190 - DNA, 55 bp, Artificial; identical to SEQ ID NO: 164492
  Synthetic oligonucleotide

SEQ ID NO: 621191 - DNA, 55 bp, Artificial; identical to SEQ ID NO: 238492
  Synthetic oligonucleotide

SEQ ID NO: 621192 - DNA, 55 bp, Artificial; identical to SEQ ID NO: 253125
  Synthetic oligonucleotide

SEQ ID NO: 621193 - DNA, 50 bp, Artificial; identical to SEQ ID NO: 170547
  Synthetic oligonucleotide

SEQ ID NO: 621194 - DNA, 52 bp, Artificial; identical to SEQ ID NO: 152080
  Synthetic oligonucleotide

SEQ ID NO: 621195 - DNA, 60 bp, Artificial; identical to SEQ ID NO: 240838
  Synthetic oligonucleotide

SEQ ID NO: 621196 - DNA, 55 bp, Artificial; identical to SEQ ID NO: 166901
  Synthetic oligonucleotide

SEQ ID NO: 621197 - DNA, 55 bp, Artificial; identical to SEQ ID NO: 181219
  Synthetic oligonucleotide

SEQ ID NO: 621198 - DNA, 60 bp, Artificial; identical to SEQ ID NO: 153665
  Synthetic oligonucleotide

SEQ ID NO: 621199 - DNA, 59 bp, Artificial; identical to SEQ ID NO: 178027
  Synthetic oligonucleotide

SEQ ID NO: 621200 - DNA, 55 bp, Artificial; identical to SEQ ID NO: 224856
  Synthetic oligonucleotide

SEQ ID NO: 621201 - DNA, 60 bp, Artificial; identical to SEQ ID NO: 149382
  Synthetic oligonucleotide

SEQ ID NO: 621202 - DNA, 57 bp, Artificial; identical to SEQ ID NO: 178049
  Synthetic oligonucleotide

SEQ ID NO: 621203 - DNA, 55 bp, Artificial; identical to SEQ ID NO: 164491
  Synthetic oligonucleotide

SEQ ID NO: 621204 - DNA, 55 bp, Artificial; identical to SEQ ID NO: 168697
  Synthetic oligonucleotide

SEQ ID NO: 621205 - DNA, 55 bp, Artificial; identical to SEQ ID NO: 181184
  Synthetic oligonucleotide

SEQ ID NO: 621206 - DNA, 55 bp, Artificial; identical to SEQ ID NO: 149371
  Synthetic oligonucleotide

SEQ ID NO: 621207 - DNA, 60 bp, Artificial; identical to SEQ ID NO: 223517
  Synthetic oligonucleotide

SEQ ID NO: 621208 - DNA, 52 bp, Artificial; identical to SEQ ID NO: 174860
  Synthetic oligonucleotide

SEQ ID NO: 621209 - DNA, 54 bp, Artificial; identical to SEQ ID NO: 216584
  Synthetic oligonucleotide

SEQ ID NO: 621210 - DNA, 56 bp, Artificial; identical to SEQ ID NO: 207077
  Synthetic oligonucleotide

SEQ ID NO: 621211 - DNA, 54 bp, Artificial; identical to SEQ ID NO: 185292
  Synthetic oligonucleotide

SEQ ID NO: 621212 - DNA, 57 bp, Artificial; identical to SEQ ID NO: 151688
  Synthetic oligonucleotide

SEQ ID NO: 621213 - DNA, 55 bp, Artificial; identical to SEQ ID NO: 211359
  Synthetic oligonucleotide

SEQ ID NO: 621214 - DNA, 50 bp, Artificial; identical to SEQ ID NO: 236515
  Synthetic oligonucleotide

SEQ ID NO: 621215 - DNA, 54 bp, Artificial; identical to SEQ ID NO: 240215
  Synthetic oligonucleotide

SEQ ID NO: 621216 - DNA, 54 bp, Artificial; identical to SEQ ID NO: 149266
  Synthetic oligonucleotide

SEQ ID NO: 621217 - DNA, 53 bp, Artificial; identical to SEQ ID NO: 181199
  Synthetic oligonucleotide

SEQ ID NO: 621218 - DNA, 55 bp, Artificial; identical to SEQ ID NO: 166831
  Synthetic oligonucleotide

SEQ ID NO: 621219 - DNA, 58 bp, Artificial; identical to SEQ ID NO: 201164
  Synthetic oligonucleotide

SEQ ID NO: 621220 - DNA, 50 bp, Artificial; identical to SEQ ID NO: 176986
  Synthetic oligonucleotide

SEQ ID NO: 621221 - DNA, 54 bp, Artificial; identical to SEQ ID NO: 170002
  Synthetic oligonucleotide

SEQ ID NO: 621222 - DNA, 54 bp, Artificial; identical to SEQ ID NO: 181258
  Synthetic oligonucleotide

SEQ ID NO: 621223 - DNA, 50 bp, Artificial; identical to SEQ ID NO: 210531
  Synthetic oligonucleotide

SEQ ID NO: 621224 - DNA, 60 bp, Artificial; identical to SEQ ID NO: 248841
  Synthetic oligonucleotide

SEQ ID NO: 621225 - DNA, 55 bp, Artificial; identical to SEQ ID NO: 148561
  Synthetic oligonucleotide

SEQ ID NO: 621226 - DNA, 54 bp, Artificial; identical to SEQ ID NO: 190098
  Synthetic oligonucleotide

SEQ ID NO: 621227 - DNA, 60 bp, Artificial; identical to SEQ ID NO: 194039
  Synthetic oligonucleotide

SEQ ID NO: 621228 - DNA, 52 bp, Artificial; identical to SEQ ID NO: 168824
  Synthetic oligonucleotide

SEQ ID NO: 621229 - DNA, 55 bp, Artificial; identical to SEQ ID NO: 156876
  Synthetic oligonucleotide

SEQ ID NO: 621230 - DNA, 55 bp, Artificial; identical to SEQ ID NO: 148565
  Synthetic oligonucleotide

SEQ ID NO: 621231 - DNA, 51 bp, Artificial; identical to SEQ ID NO: 149841
  Synthetic oligonucleotide

SEQ ID NO: 621232 - DNA, 55 bp, Artificial; identical to SEQ ID NO: 175361
  Synthetic oligonucleotide

SEQ ID NO: 621233 - DNA, 52 bp, Artificial; identical to SEQ ID NO: 155566
  Synthetic oligonucleotide

SEQ ID NO: 621234 - DNA, 58 bp, Artificial; identical to SEQ ID NO: 156365
  Synthetic oligonucleotide

SEQ ID NO: 621235 - DNA, 55 bp, Artificial; identical to SEQ ID NO: 152367
  Synthetic oligonucleotide

SEQ ID NO: 621236 - DNA, 55 bp, Artificial; identical to SEQ ID NO: 142288
  Synthetic oligonucleotide

SEQ ID NO: 621237 - DNA, 54 bp, Artificial; identical to SEQ ID NO: 185312
  Synthetic oligonucleotide

SEQ ID NO: 621238 - DNA, 59 bp, Artificial; identical to SEQ ID NO: 239181
  Synthetic oligonucleotide

SEQ ID NO: 621239 - DNA, 59 bp, Artificial; identical to SEQ ID NO: 153610
  Synthetic oligonucleotide

SEQ ID NO: 621240 - DNA, 56 bp, Artificial; identical to SEQ ID NO: 248819
  Synthetic oligonucleotide

SEQ ID NO: 621241 - DNA, 60 bp, Artificial; identical to SEQ ID NO: 253331
  Synthetic oligonucleotide

SEQ ID NO: 621242 - DNA, 60 bp, Artificial; identical to SEQ ID NO: 203891
  Synthetic oligonucleotide

SEQ ID NO: 621243 - DNA, 57 bp, Artificial; identical to SEQ ID NO: 256594
  Synthetic oligonucleotide

SEQ ID NO: 621244 - DNA, 52 bp, Artificial; identical to SEQ ID NO: 186081
  Synthetic oligonucleotide

SEQ ID NO: 621245 - DNA, 55 bp, Artificial; identical to SEQ ID NO: 212790
  Synthetic oligonucleotide

SEQ ID NO: 621246 - DNA, 53 bp, Artificial; identical to SEQ ID NO: 240783
  Synthetic oligonucleotide

SEQ ID NO: 621247 - DNA, 52 bp, Artificial; identical to SEQ ID NO: 211637
  Synthetic oligonucleotide

SEQ ID NO: 621248 - DNA, 57 bp, Artificial; identical to SEQ ID NO: 177683
  Synthetic oligonucleotide

SEQ ID NO: 621249 - DNA, 54 bp, Artificial; identical to SEQ ID NO: 154265
  Synthetic oligonucleotide

SEQ ID NO: 621250 - DNA, 59 bp, Artificial; identical to SEQ ID NO: 240182
  Synthetic oligonucleotide

SEQ ID NO: 621251 - DNA, 60 bp, Artificial; identical to SEQ ID NO: 238504
  Synthetic oligonucleotide

SEQ ID NO: 621252 - DNA, 55 bp, Artificial; identical to SEQ ID NO: 188388
  Synthetic oligonucleotide

SEQ ID NO: 621253 - DNA, 51 bp, Artificial; identical to SEQ ID NO: 157834
  Synthetic oligonucleotide

SEQ ID NO: 621254 - DNA, 54 bp, Artificial; identical to SEQ ID NO: 197456
  Synthetic oligonucleotide

SEQ ID NO: 621255 - DNA, 55 bp, Artificial; identical to SEQ ID NO: 168787
  Synthetic oligonucleotide

SEQ ID NO: 621256 - DNA, 60 bp, Artificial; identical to SEQ ID NO: 201051
  Synthetic oligonucleotide

SEQ ID NO: 621257 - DNA, 52 bp, Artificial; identical to SEQ ID NO: 247951
  Synthetic oligonucleotide

SEQ ID NO: 621258 - DNA, 53 bp, Artificial; identical to SEQ ID NO: 247841
  Synthetic oligonucleotide

SEQ ID NO: 621259 - DNA, 55 bp, Artificial; identical to SEQ ID NO: 220942
  Synthetic oligonucleotide

SEQ ID NO: 621260 - DNA, 50 bp, Artificial; identical to SEQ ID NO: 189338
  Synthetic oligonucleotide

SEQ ID NO: 621261 - DNA, 53 bp, Artificial; identical to SEQ ID NO: 141230
  Synthetic oligonucleotide

SEQ ID NO: 621262 - DNA, 55 bp, Artificial; identical to SEQ ID NO: 161779
  Synthetic oligonucleotide

SEQ ID NO: 621263 - DNA, 55 bp, Artificial; identical to SEQ ID NO: 156879
  Synthetic oligonucleotide

SEQ ID NO: 621264 - DNA, 55 bp, Artificial; identical to SEQ ID NO: 144423
  Synthetic oligonucleotide

SEQ ID NO: 621265 - DNA, 51 bp, Artificial; identical to SEQ ID NO: 240159
  Synthetic oligonucleotide

SEQ ID NO: 621266 - DNA, 58 bp, Artificial; identical to SEQ ID NO: 171184
  Synthetic oligonucleotide

SEQ ID NO: 621267 - DNA, 55 bp, Artificial; identical to SEQ ID NO: 197302
  Synthetic oligonucleotide

SEQ ID NO: 621268 - DNA, 53 bp, Artificial; identical to SEQ ID NO: 258085
  Synthetic oligonucleotide

SEQ ID NO: 621269 - DNA, 55 bp, Artificial; identical to SEQ ID NO: 225064
  Synthetic oligonucleotide

SEQ ID NO: 621270 - DNA, 56 bp, Artificial; identical to SEQ ID NO: 166199
  Synthetic oligonucleotide

SEQ ID NO: 621271 - DNA, 55 bp, Artificial; identical to SEQ ID NO: 202174
  Synthetic oligonucleotide

SEQ ID NO: 621272 - DNA, 54 bp, Artificial; identical to SEQ ID NO: 209580
  Synthetic oligonucleotide

SEQ ID NO: 621273 - DNA, 60 bp, Artificial; identical to SEQ ID NO: 212470
  Synthetic oligonucleotide

SEQ ID NO: 621274 - DNA, 60 bp, Artificial; identical to SEQ ID NO: 188891
  Synthetic oligonucleotide

SEQ ID NO: 621275 - DNA, 51 bp, Artificial; identical to SEQ ID NO: 157875
  Synthetic oligonucleotide

SEQ ID NO: 621276 - DNA, 60 bp, Artificial; identical to SEQ ID NO: 177772
  Synthetic oligonucleotide

SEQ ID NO: 621277 - DNA, 55 bp, Artificial; identical to SEQ ID NO: 249182
  Synthetic oligonucleotide

SEQ ID NO: 621278 - DNA, 52 bp, Artificial; identical to SEQ ID NO: 243251
  Synthetic oligonucleotide

SEQ ID NO: 621279 - DNA, 55 bp, Artificial; identical to SEQ ID NO: 205572
  Synthetic oligonucleotide

SEQ ID NO: 621280 - DNA, 55 bp, Artificial; identical to SEQ ID NO: 240369
  Synthetic oligonucleotide

SEQ ID NO: 621281 - DNA, 58 bp, Artificial; identical to SEQ ID NO: 141942
  Synthetic oligonucleotide

SEQ ID NO: 621282 - DNA, 56 bp, Artificial; identical to SEQ ID NO: 175357
  Synthetic oligonucleotide

SEQ ID NO: 621283 - DNA, 53 bp, Artificial; identical to SEQ ID NO: 170084
  Synthetic oligonucleotide

SEQ ID NO: 621284 - DNA, 52 bp, Artificial; identical to SEQ ID NO: 186108
  Synthetic oligonucleotide

SEQ ID NO: 621285 - DNA, 50 bp, Artificial; identical to SEQ ID NO: 200264
  Synthetic oligonucleotide

SEQ ID NO: 621286 - DNA, 55 bp, Artificial; identical to SEQ ID NO: 239491
  Synthetic oligonucleotide

SEQ ID NO: 621287 - DNA, 56 bp, Artificial; identical to SEQ ID NO: 201044
  Synthetic oligonucleotide

SEQ ID NO: 621288 - DNA, 59 bp, Artificial; identical to SEQ ID NO: 149293
  Synthetic oligonucleotide

SEQ ID NO: 621289 - DNA, 55 bp, Artificial; identical to SEQ ID NO: 159984
  Synthetic oligonucleotide

SEQ ID NO: 621290 - DNA, 55 bp, Artificial; identical to SEQ ID NO: 180744
  Synthetic oligonucleotide

SEQ ID NO: 621291 - DNA, 55 bp, Artificial; identical to SEQ ID NO: 180750
  Synthetic oligonucleotide

SEQ ID NO: 621292 - DNA, 53 bp, Artificial; identical to SEQ ID NO: 199830
  Synthetic oligonucleotide

SEQ ID NO: 621293 - DNA, 52 bp, Artificial; identical to SEQ ID NO: 240851
  Synthetic oligonucleotide

SEQ ID NO: 621294 - DNA, 53 bp, Artificial; identical to SEQ ID NO: 199108
  Synthetic oligonucleotide

SEQ ID NO: 621295 - DNA, 57 bp, Artificial; identical to SEQ ID NO: 237945
  Synthetic oligonucleotide

SEQ ID NO: 621296 - DNA, 60 bp, Artificial; identical to SEQ ID NO: 177860
  Synthetic oligonucleotide

SEQ ID NO: 621297 - DNA, 54 bp, Artificial; identical to SEQ ID NO: 171801
  Synthetic oligonucleotide

SEQ ID NO: 621298 - DNA, 55 bp, Artificial; identical to SEQ ID NO: 207535
  Synthetic oligonucleotide

SEQ ID NO: 621299 - DNA, 55 bp, Artificial; identical to SEQ ID NO: 199109
  Synthetic oligonucleotide

SEQ ID NO: 621300 - DNA, 52 bp, Artificial; identical to SEQ ID NO: 255577
  Synthetic oligonucleotide

SEQ ID NO: 621301 - DNA, 55 bp, Artificial; identical to SEQ ID NO: 142319
  Synthetic oligonucleotide

SEQ ID NO: 621302 - DNA, 60 bp, Artificial; identical to SEQ ID NO: 177883
  Synthetic oligonucleotide

SEQ ID NO: 621303 - DNA, 60 bp, Artificial; identical to SEQ ID NO: 141797
  Synthetic oligonucleotide

SEQ ID NO: 621304 - DNA, 60 bp, Artificial; identical to SEQ ID NO: 266059
  Synthetic oligonucleotide

SEQ ID NO: 621305 - DNA, 57 bp, Artificial; identical to SEQ ID NO: 238526
  Synthetic oligonucleotide

SEQ ID NO: 621306 - DNA, 58 bp, Artificial; identical to SEQ ID NO: 201040
  Synthetic oligonucleotide

SEQ ID NO: 621307 - DNA, 60 bp, Artificial; identical to SEQ ID NO: 177894
  Synthetic oligonucleotide

SEQ ID NO: 621308 - DNA, 54 bp, Artificial; identical to SEQ ID NO: 185296
  Synthetic oligonucleotide

SEQ ID NO: 621309 - DNA, 57 bp, Artificial; identical to SEQ ID NO: 147041
  Synthetic oligonucleotide

SEQ ID NO: 621310 - DNA, 55 bp, Artificial; identical to SEQ ID NO: 160805
  Synthetic oligonucleotide

SEQ ID NO: 621311 - DNA, 55 bp, Artificial; identical to SEQ ID NO: 180799
  Synthetic oligonucleotide

SEQ ID NO: 621312 - DNA, 59 bp, Artificial; identical to SEQ ID NO: 266060
  Synthetic oligonucleotide

SEQ ID NO: 621313 - DNA, 60 bp, Artificial; identical to SEQ ID NO: 203880
  Synthetic oligonucleotide

SEQ ID NO: 621314 - DNA, 55 bp, Artificial; identical to SEQ ID NO: 224863
  Synthetic oligonucleotide

SEQ ID NO: 621315 - DNA, 58 bp, Artificial; identical to SEQ ID NO: 225518
  Synthetic oligonucleotide

SEQ ID NO: 621316 - DNA, 60 bp, Artificial; identical to SEQ ID NO: 179216
  Synthetic oligonucleotide

SEQ ID NO: 621317 - DNA, 52 bp, Artificial; identical to SEQ ID NO: 253309
  Synthetic oligonucleotide

SEQ ID NO: 621318 - DNA, 54 bp, Artificial; identical to SEQ ID NO: 246202
  Synthetic oligonucleotide

SEQ ID NO: 621319 - DNA, 51 bp, Artificial; identical to SEQ ID NO: 246704
  Synthetic oligonucleotide

SEQ ID NO: 621320 - DNA, 60 bp, Artificial; identical to SEQ ID NO: 156498
  Synthetic oligonucleotide

SEQ ID NO: 621321 - DNA, 55 bp, Artificial; identical to SEQ ID NO: 234088
  Synthetic oligonucleotide

SEQ ID NO: 621322 - DNA, 53 bp, Artificial; identical to SEQ ID NO: 168782
  Synthetic oligonucleotide

SEQ ID NO: 621323 - DNA, 53 bp, Artificial; identical to SEQ ID NO: 194989
  Synthetic oligonucleotide

SEQ ID NO: 621324 - DNA, 55 bp, Artificial; identical to SEQ ID NO: 245458
  Synthetic oligonucleotide

SEQ ID NO: 621325 - DNA, 53 bp, Artificial; identical to SEQ ID NO: 207122
  Synthetic oligonucleotide

SEQ ID NO: 621326 - DNA, 52 bp, Artificial; identical to SEQ ID NO: 253311
  Synthetic oligonucleotide

SEQ ID NO: 621327 - DNA, 52 bp, Artificial; identical to SEQ ID NO: 247971
  Synthetic oligonucleotide

SEQ ID NO: 621328 - DNA, 54 bp, Artificial; identical to SEQ ID NO: 255192
  Synthetic oligonucleotide

SEQ ID NO: 621329 - DNA, 53 bp, Artificial; identical to SEQ ID NO: 179858
  Synthetic oligonucleotide

SEQ ID NO: 621330 - DNA, 52 bp, Artificial; identical to SEQ ID NO: 149540
  Synthetic oligonucleotide

SEQ ID NO: 621331 - DNA, 52 bp, Artificial; identical to SEQ ID NO: 149546
  Synthetic oligonucleotide

SEQ ID NO: 621332 - DNA, 55 bp, Artificial; identical to SEQ ID NO: 156848
  Synthetic oligonucleotide

SEQ ID NO: 621333 - DNA, 55 bp, Artificial; identical to SEQ ID NO: 222648
  Synthetic oligonucleotide

SEQ ID NO: 621334 - DNA, 57 bp, Artificial; identical to SEQ ID NO: 171706
  Synthetic oligonucleotide

SEQ ID NO: 621335 - DNA, 55 bp, Artificial; identical to SEQ ID NO: 238319
  Synthetic oligonucleotide

SEQ ID NO: 621336 - DNA, 55 bp, Artificial; identical to SEQ ID NO: 156849
  Synthetic oligonucleotide

SEQ ID NO: 621337 - DNA, 55 bp, Artificial; identical to SEQ ID NO: 212788
  Synthetic oligonucleotide

SEQ ID NO: 621338 - DNA, 55 bp, Artificial; identical to SEQ ID NO: 225063
  Synthetic oligonucleotide

SEQ ID NO: 621339 - DNA, 59 bp, Artificial; identical to SEQ ID NO: 179882
  Synthetic oligonucleotide

SEQ ID NO: 621340 - DNA, 60 bp, Artificial; identical to SEQ ID NO: 141791
  Synthetic oligonucleotide

SEQ ID NO: 621341 - DNA, 60 bp, Artificial; identical to SEQ ID NO: 205742
  Synthetic oligonucleotide

SEQ ID NO: 621342 - DNA, 52 bp, Artificial; identical to SEQ ID NO: 149508
  Synthetic oligonucleotide

SEQ ID NO: 621343 - DNA, 60 bp, Artificial; identical to SEQ ID NO: 148771
  Synthetic oligonucleotide

SEQ ID NO: 621344 - DNA, 60 bp, Artificial; identical to SEQ ID NO: 223595
  Synthetic oligonucleotide

SEQ ID NO: 621345 - DNA, 55 bp, Artificial; identical to SEQ ID NO: 180781
  Synthetic oligonucleotide

SEQ ID NO: 621346 - DNA, 54 bp, Artificial; identical to SEQ ID NO: 194924
  Synthetic oligonucleotide

SEQ ID NO: 621347 - DNA, 52 bp, Artificial; identical to SEQ ID NO: 157628
  Synthetic oligonucleotide

SEQ ID NO: 621348 - DNA, 51 bp, Artificial; identical to SEQ ID NO: 241095
  Synthetic oligonucleotide

SEQ ID NO: 621349 - DNA, 55 bp, Artificial; identical to SEQ ID NO: 164488
  Synthetic oligonucleotide

SEQ ID NO: 621350 - DNA, 52 bp, Artificial; identical to SEQ ID NO: 205691
  Synthetic oligonucleotide

SEQ ID NO: 621351 - DNA, 60 bp, Artificial; identical to SEQ ID NO: 262802
  Synthetic oligonucleotide

SEQ ID NO: 621352 - DNA, 55 bp, Artificial; identical to SEQ ID NO: 249183
  Synthetic oligonucleotide

SEQ ID NO: 621353 - DNA, 55 bp, Artificial; identical to SEQ ID NO: 168771
  Synthetic oligonucleotide

SEQ ID NO: 621354 - DNA, 51 bp, Artificial; identical to SEQ ID NO: 216797
  Synthetic oligonucleotide

SEQ ID NO: 621355 - DNA, 60 bp, Artificial; identical to SEQ ID NO: 234475
  Synthetic oligonucleotide

SEQ ID NO: 621356 - DNA, 53 bp, Artificial; identical to SEQ ID NO: 237020
  Synthetic oligonucleotide

SEQ ID NO: 621357 - DNA, 56 bp, Artificial; identical to SEQ ID NO: 155728
  Synthetic oligonucleotide

SEQ ID NO: 621358 - DNA, 50 bp, Artificial; identical to SEQ ID NO: 246941
  Synthetic oligonucleotide

SEQ ID NO: 621359 - DNA, 60 bp, Artificial; identical to SEQ ID NO: 141790
  Synthetic oligonucleotide

SEQ ID NO: 621360 - DNA, 51 bp, Artificial; identical to SEQ ID NO: 149845
  Synthetic oligonucleotide

SEQ ID NO: 621361 - DNA, 55 bp, Artificial; identical to SEQ ID NO: 224865
  Synthetic oligonucleotide

SEQ ID NO: 621362 - DNA, 51 bp, Artificial; identical to SEQ ID NO: 186653
  Synthetic oligonucleotide

SEQ ID NO: 621363 - DNA, 60 bp, Artificial; identical to SEQ ID NO: 168154
  Synthetic oligonucleotide

SEQ ID NO: 621364 - DNA, 56 bp, Artificial; identical to SEQ ID NO: 148737
  Synthetic oligonucleotide

SEQ ID NO: 621365 - DNA, 54 bp, Artificial; identical to SEQ ID NO: 234410
  Synthetic oligonucleotide

SEQ ID NO: 621366 - DNA, 58 bp, Artificial; identical to SEQ ID NO: 211213
  Synthetic oligonucleotide

SEQ ID NO: 621367 - DNA, 55 bp, Artificial; identical to SEQ ID NO: 155368
  Synthetic oligonucleotide

SEQ ID NO: 621368 - DNA, 53 bp, Artificial; identical to SEQ ID NO: 168917
  Synthetic oligonucleotide

SEQ ID NO: 621369 - DNA, 58 bp, Artificial; identical to SEQ ID NO: 207100
  Synthetic oligonucleotide

SEQ ID NO: 621370 - DNA, 60 bp, Artificial; identical to SEQ ID NO: 212367
  Synthetic oligonucleotide

SEQ ID NO: 621371 - DNA, 51 bp, Artificial; identical to SEQ ID NO: 157881
  Synthetic oligonucleotide

SEQ ID NO: 621372 - DNA, 54 bp, Artificial; identical to SEQ ID NO: 199636
  Synthetic oligonucleotide

SEQ ID NO: 621373 - DNA, 57 bp, Artificial; identical to SEQ ID NO: 194006
  Synthetic oligonucleotide

SEQ ID NO: 621374 - DNA, 55 bp, Artificial; identical to SEQ ID NO: 156852
  Synthetic oligonucleotide

SEQ ID NO: 621375 - DNA, 55 bp, Artificial; identical to SEQ ID NO: 202807
  Synthetic oligonucleotide

SEQ ID NO: 621376 - DNA, 51 bp, Artificial; identical to SEQ ID NO: 216763
  Synthetic oligonucleotide

SEQ ID NO: 621377 - DNA, 55 bp, Artificial; identical to SEQ ID NO: 162237
  Synthetic oligonucleotide

SEQ ID NO: 621378 - DNA, 55 bp, Artificial; identical to SEQ ID NO: 156855
  Synthetic oligonucleotide

SEQ ID NO: 621379 - DNA, 53 bp, Artificial; identical to SEQ ID NO: 205775
  Synthetic oligonucleotide

SEQ ID NO: 621380 - DNA, 52 bp, Artificial; identical to SEQ ID NO: 188829
  Synthetic oligonucleotide

SEQ ID NO: 621381 - DNA, 51 bp, Artificial; identical to SEQ ID NO: 266274
  Synthetic oligonucleotide

SEQ ID NO: 621382 - DNA, 52 bp, Artificial; identical to SEQ ID NO: 223655
  Synthetic oligonucleotide

SEQ ID NO: 621383 - DNA, 55 bp, Artificial; identical to SEQ ID NO: 245473
  Synthetic oligonucleotide

SEQ ID NO: 621384 - DNA, 51 bp, Artificial; identical to SEQ ID NO: 141367
  Synthetic oligonucleotide

SEQ ID NO: 621385 - DNA, 57 bp, Artificial; identical to SEQ ID NO: 191667
  Synthetic oligonucleotide

SEQ ID NO: 621386 - DNA, 55 bp, Artificial; identical to SEQ ID NO: 202806
  Synthetic oligonucleotide

SEQ ID NO: 621387 - DNA, 53 bp, Artificial; identical to SEQ ID NO: 208696
  Synthetic oligonucleotide

SEQ ID NO: 621388 - DNA, 55 bp, Artificial; identical to SEQ ID NO: 154094
  Synthetic oligonucleotide

SEQ ID NO: 621389 - DNA, 58 bp, Artificial; identical to SEQ ID NO: 199159
  Synthetic oligonucleotide

SEQ ID NO: 621390 - DNA, 60 bp, Artificial; identical to SEQ ID NO: 257764
  Synthetic oligonucleotide

SEQ ID NO: 621391 - DNA, 55 bp, Artificial; identical to SEQ ID NO: 220898
  Synthetic oligonucleotide

SEQ ID NO: 621392 - DNA, 56 bp, Artificial; identical to SEQ ID NO: 245365
  Synthetic oligonucleotide

SEQ ID NO: 621393 - DNA, 55 bp, Artificial; identical to SEQ ID NO: 164487
  Synthetic oligonucleotide

SEQ ID NO: 621394 - DNA, 60 bp, Artificial; identical to SEQ ID NO: 181549
  Synthetic oligonucleotide

SEQ ID NO: 621395 - DNA, 52 bp, Artificial; identical to SEQ ID NO: 167126
  Synthetic oligonucleotide

SEQ ID NO: 621396 - DNA, 54 bp, Artificial; identical to SEQ ID NO: 181660
  Synthetic oligonucleotide

SEQ ID NO: 621397 - DNA, 55 bp, Artificial; identical to SEQ ID NO: 234845
  Synthetic oligonucleotide

SEQ ID NO: 621398 - DNA, 54 bp, Artificial; identical to SEQ ID NO: 238569
  Synthetic oligonucleotide

SEQ ID NO: 621399 - DNA, 60 bp, Artificial; identical to SEQ ID NO: 203869
  Synthetic oligonucleotide

SEQ ID NO: 621400 - DNA, 55 bp, Artificial; identical to SEQ ID NO: 144849
  Synthetic oligonucleotide

SEQ ID NO: 621401 - DNA, 60 bp, Artificial; identical to SEQ ID NO: 141782
  Synthetic oligonucleotide

SEQ ID NO: 621402 - DNA, 55 bp, Artificial; identical to SEQ ID NO: 153330
  Synthetic oligonucleotide

SEQ ID NO: 621403 - DNA, 53 bp, Artificial; identical to SEQ ID NO: 208200
  Synthetic oligonucleotide

SEQ ID NO: 621404 - DNA, 56 bp, Artificial; identical to SEQ ID NO: 205232
  Synthetic oligonucleotide

SEQ ID NO: 621405 - DNA, 55 bp, Artificial; identical to SEQ ID NO: 180674
  Synthetic oligonucleotide

SEQ ID NO: 621406 - DNA, 54 bp, Artificial; identical to SEQ ID NO: 157225
  Synthetic oligonucleotide

SEQ ID NO: 621407 - DNA, 55 bp, Artificial; identical to SEQ ID NO: 217824
  Synthetic oligonucleotide

SEQ ID NO: 621408 - DNA, 60 bp, Artificial; identical to SEQ ID NO: 199148
  Synthetic oligonucleotide

SEQ ID NO: 621409 - DNA, 55 bp, Artificial; identical to SEQ ID NO: 180676
  Synthetic oligonucleotide

SEQ ID NO: 621410 - DNA, 53 bp, Artificial; identical to SEQ ID NO: 191179
  Synthetic oligonucleotide

SEQ ID NO: 621411 - DNA, 50 bp, Artificial; identical to SEQ ID NO: 203047
  Synthetic oligonucleotide

SEQ ID NO: 621412 - DNA, 60 bp, Artificial; identical to SEQ ID NO: 237348
  Synthetic oligonucleotide

SEQ ID NO: 621413 - DNA, 55 bp, Artificial; identical to SEQ ID NO: 148323
  Synthetic oligonucleotide

SEQ ID NO: 621414 - DNA, 55 bp, Artificial; identical to SEQ ID NO: 222646
  Synthetic oligonucleotide

SEQ ID NO: 621415 - DNA, 55 bp, Artificial; identical to SEQ ID NO: 156859
  Synthetic oligonucleotide

SEQ ID NO: 621416 - DNA, 57 bp, Artificial; identical to SEQ ID NO: 201073
  Synthetic oligonucleotide

SEQ ID NO: 621417 - DNA, 52 bp, Artificial; identical to SEQ ID NO: 208745
  Synthetic oligonucleotide

SEQ ID NO: 621418 - DNA, 54 bp, Artificial; identical to SEQ ID NO: 185361
  Synthetic oligonucleotide

SEQ ID NO: 621419 - DNA, 55 bp, Artificial; identical to SEQ ID NO: 240355
  Synthetic oligonucleotide

SEQ ID NO: 621420 - DNA, 57 bp, Artificial; identical to SEQ ID NO: 187375
  Synthetic oligonucleotide

SEQ ID NO: 621421 - DNA, 59 bp, Artificial; identical to SEQ ID NO: 224991
  Synthetic oligonucleotide

SEQ ID NO: 621422 - DNA, 51 bp, Artificial; identical to SEQ ID NO: 237175
  Synthetic oligonucleotide

SEQ ID NO: 621423 - DNA, 55 bp, Artificial; identical to SEQ ID NO: 142422
  Synthetic oligonucleotide

SEQ ID NO: 621424 - DNA, 55 bp, Artificial; identical to SEQ ID NO: 221534
  Synthetic oligonucleotide

SEQ ID NO: 621425 - DNA, 57 bp, Artificial; identical to SEQ ID NO: 148693
  Synthetic oligonucleotide

SEQ ID NO: 621426 - DNA, 54 bp, Artificial; identical to SEQ ID NO: 244059
  Synthetic oligonucleotide

SEQ ID NO: 621427 - DNA, 59 bp, Artificial; identical to SEQ ID NO: 262665
  Synthetic oligonucleotide

SEQ ID NO: 621428 - DNA, 54 bp, Artificial; identical to SEQ ID NO: 258068
  Synthetic oligonucleotide

SEQ ID NO: 621429 - DNA, 55 bp, Artificial; identical to SEQ ID NO: 209474
  Synthetic oligonucleotide

SEQ ID NO: 621430 - DNA, 55 bp, Artificial; identical to SEQ ID NO: 168753
  Synthetic oligonucleotide

SEQ ID NO: 621431 - DNA, 55 bp, Artificial; identical to SEQ ID NO: 255120
  Synthetic oligonucleotide

SEQ ID NO: 621432 - DNA, 60 bp, Artificial; identical to SEQ ID NO: 184770
  Synthetic oligonucleotide

SEQ ID NO: 621433 - DNA, 50 bp, Artificial; identical to SEQ ID NO: 176899
  Synthetic oligonucleotide

SEQ ID NO: 621434 - DNA, 51 bp, Artificial; identical to SEQ ID NO: 255709
  Synthetic oligonucleotide

SEQ ID NO: 621435 - DNA, 56 bp, Artificial; identical to SEQ ID NO: 142715
  Synthetic oligonucleotide

SEQ ID NO: 621436 - DNA, 58 bp, Artificial; identical to SEQ ID NO: 164467
  Synthetic oligonucleotide

SEQ ID NO: 621437 - DNA, 53 bp, Artificial; identical to SEQ ID NO: 167540
  Synthetic oligonucleotide

SEQ ID NO: 621438 - DNA, 54 bp, Artificial; identical to SEQ ID NO: 201312
  Synthetic oligonucleotide

SEQ ID NO: 621439 - DNA, 60 bp, Artificial; identical to SEQ ID NO: 248764
  Synthetic oligonucleotide

SEQ ID NO: 621440 - DNA, 59 bp, Artificial; identical to SEQ ID NO: 177216
  Synthetic oligonucleotide

SEQ ID NO: 621441 - DNA, 50 bp, Artificial; identical to SEQ ID NO: 191240
  Synthetic oligonucleotide

SEQ ID NO: 621442 - DNA, 52 bp, Artificial; identical to SEQ ID NO: 195041
  Synthetic oligonucleotide

SEQ ID NO: 621443 - DNA, 54 bp, Artificial; identical to SEQ ID NO: 217825
  Synthetic oligonucleotide

SEQ ID NO: 621444 - DNA, 60 bp, Artificial; identical to SEQ ID NO: 255833
  Synthetic oligonucleotide

SEQ ID NO: 621445 - DNA, 55 bp, Artificial; identical to SEQ ID NO: 249186
  Synthetic oligonucleotide

SEQ ID NO: 621446 - DNA, 56 bp, Artificial; identical to SEQ ID NO: 171206
  Synthetic oligonucleotide

SEQ ID NO: 621447 - DNA, 54 bp, Artificial; identical to SEQ ID NO: 257142
  Synthetic oligonucleotide

SEQ ID NO: 621448 - DNA, 55 bp, Artificial; identical to SEQ ID NO: 148457
  Synthetic oligonucleotide

SEQ ID NO: 621449 - DNA, 60 bp, Artificial; identical to SEQ ID NO: 177549
  Synthetic oligonucleotide

SEQ ID NO: 621450 - DNA, 51 bp, Artificial; identical to SEQ ID NO: 193973
  Synthetic oligonucleotide

SEQ ID NO: 621451 - DNA, 55 bp, Artificial; identical to SEQ ID NO: 155369
  Synthetic oligonucleotide

SEQ ID NO: 621452 - DNA, 51 bp, Artificial; identical to SEQ ID NO: 220862
  Synthetic oligonucleotide

SEQ ID NO: 621453 - DNA, 55 bp, Artificial; identical to SEQ ID NO: 238328
  Synthetic oligonucleotide

SEQ ID NO: 621454 - DNA, 55 bp, Artificial; identical to SEQ ID NO: 156860
  Synthetic oligonucleotide

SEQ ID NO: 621455 - DNA, 52 bp, Artificial; identical to SEQ ID NO: 186056
  Synthetic oligonucleotide

SEQ ID NO: 621456 - DNA, 57 bp, Artificial; identical to SEQ ID NO: 178105
  Synthetic oligonucleotide

SEQ ID NO: 621457 - DNA, 55 bp, Artificial; identical to SEQ ID NO: 207534
  Synthetic oligonucleotide

SEQ ID NO: 621458 - DNA, 55 bp, Artificial; identical to SEQ ID NO: 208193
  Synthetic oligonucleotide

SEQ ID NO: 621459 - DNA, 55 bp, Artificial; identical to SEQ ID NO: 155370
  Synthetic oligonucleotide

SEQ ID NO: 621460 - DNA, 50 bp, Artificial; identical to SEQ ID NO: 176181
  Synthetic oligonucleotide

SEQ ID NO: 621461 - DNA, 53 bp, Artificial; identical to SEQ ID NO: 239223
  Synthetic oligonucleotide

SEQ ID NO: 621462 - DNA, 55 bp, Artificial; identical to SEQ ID NO: 188387
  Synthetic oligonucleotide

SEQ ID NO: 621463 - DNA, 55 bp, Artificial; identical to SEQ ID NO: 180659
  Synthetic oligonucleotide

SEQ ID NO: 621464 - DNA, 57 bp, Artificial; identical to SEQ ID NO: 191692
  Synthetic oligonucleotide

SEQ ID NO: 621465 - DNA, 55 bp, Artificial; identical to SEQ ID NO: 156861
  Synthetic oligonucleotide

SEQ ID NO: 621466 - DNA, 55 bp, Artificial; identical to SEQ ID NO: 267322
  Synthetic oligonucleotide

SEQ ID NO: 621467 - DNA, 60 bp, Artificial; identical to SEQ ID NO: 178660
  Synthetic oligonucleotide

SEQ ID NO: 621468 - DNA, 59 bp, Artificial; identical to SEQ ID NO: 159814
  Synthetic oligonucleotide

SEQ ID NO: 621469 - DNA, 57 bp, Artificial; identical to SEQ ID NO: 178771
  Synthetic oligonucleotide

SEQ ID NO: 621470 - DNA, 55 bp, Artificial; identical to SEQ ID NO: 143663
  Synthetic oligonucleotide

SEQ ID NO: 621471 - DNA, 57 bp, Artificial; identical to SEQ ID NO: 154381
  Synthetic oligonucleotide

SEQ ID NO: 621472 - DNA, 55 bp, Artificial; identical to SEQ ID NO: 142459
  Synthetic oligonucleotide

SEQ ID NO: 621473 - DNA, 55 bp, Artificial; identical to SEQ ID NO: 199110
  Synthetic oligonucleotide

SEQ ID NO: 621474 - DNA, 51 bp, Artificial; identical to SEQ ID NO: 241096
  Synthetic oligonucleotide

SEQ ID NO: 621475 - DNA, 55 bp, Artificial; identical to SEQ ID NO: 257868
  Synthetic oligonucleotide

SEQ ID NO: 621476 - DNA, 55 bp, Artificial; identical to SEQ ID NO: 245452
  Synthetic oligonucleotide

SEQ ID NO: 621477 - DNA, 50 bp, Artificial; identical to SEQ ID NO: 155698
  Synthetic oligonucleotide

SEQ ID NO: 621478 - DNA, 54 bp, Artificial; identical to SEQ ID NO: 185343
  Synthetic oligonucleotide

SEQ ID NO: 621479 - DNA, 54 bp, Artificial; identical to SEQ ID NO: 203836
  Synthetic oligonucleotide

SEQ ID NO: 621480 - DNA, 53 bp, Artificial; identical to SEQ ID NO: 197486
  Synthetic oligonucleotide

SEQ ID NO: 621481 - DNA, 60 bp, Artificial; identical to SEQ ID NO: 212363
  Synthetic oligonucleotide

SEQ ID NO: 621482 - DNA, 49 bp, Artificial; identical to SEQ ID NO: 184771
  Synthetic oligonucleotide

SEQ ID NO: 621483 - DNA, 52 bp, Artificial; identical to SEQ ID NO: 155565
  Synthetic oligonucleotide

SEQ ID NO: 621484 - DNA, 60 bp, Artificial; identical to SEQ ID NO: 239971
  Synthetic oligonucleotide

SEQ ID NO: 621485 - DNA, 59 bp, Artificial; identical to SEQ ID NO: 171008
  Synthetic oligonucleotide

SEQ ID NO: 621486 - DNA, 55 bp, Artificial; identical to SEQ ID NO: 166868
  Synthetic oligonucleotide

SEQ ID NO: 621487 - DNA, 53 bp, Artificial; identical to SEQ ID NO: 185699
  Synthetic oligonucleotide

SEQ ID NO: 621488 - DNA, 52 bp, Artificial; identical to SEQ ID NO: 149516
  Synthetic oligonucleotide

SEQ ID NO: 621489 - DNA, 54 bp, Artificial; identical to SEQ ID NO: 247790
  Synthetic oligonucleotide

SEQ ID NO: 621490 - DNA, 55 bp, Artificial; identical to SEQ ID NO: 155372
  Synthetic oligonucleotide

SEQ ID NO: 621491 - DNA, 55 bp, Artificial; identical to SEQ ID NO: 174560
  Synthetic oligonucleotide

SEQ ID NO: 621492 - DNA, 59 bp, Artificial; identical to SEQ ID NO: 184993
  Synthetic oligonucleotide

SEQ ID NO: 621493 - DNA, 57 bp, Artificial; identical to SEQ ID NO: 187817
  Synthetic oligonucleotide

SEQ ID NO: 621494 - DNA, 60 bp, Artificial; identical to SEQ ID NO: 205797
  Synthetic oligonucleotide

SEQ ID NO: 621495 - DNA, 55 bp, Artificial; identical to SEQ ID NO: 148981
  Synthetic oligonucleotide

SEQ ID NO: 621496 - DNA, 50 bp, Artificial; identical to SEQ ID NO: 193992
  Synthetic oligonucleotide

SEQ ID NO: 621497 - DNA, 55 bp, Artificial; identical to SEQ ID NO: 221086
  Synthetic oligonucleotide

SEQ ID NO: 621498 - DNA, 55 bp, Artificial; identical to SEQ ID NO: 245489
  Synthetic oligonucleotide

SEQ ID NO: 621499 - DNA, 55 bp, Artificial; identical to SEQ ID NO: 239926
  Synthetic oligonucleotide

SEQ ID NO: 621500 - DNA, 50 bp, Artificial; identical to SEQ ID NO: 225311
  Synthetic oligonucleotide

SEQ ID NO: 621501 - DNA, 51 bp, Artificial; identical to SEQ ID NO: 246745
  Synthetic oligonucleotide

SEQ ID NO: 621502 - DNA, 60 bp, Artificial; identical to SEQ ID NO: 148626
  Synthetic oligonucleotide

SEQ ID NO: 621503 - DNA, 55 bp, Artificial; identical to SEQ ID NO: 164456
  Synthetic oligonucleotide

SEQ ID NO: 621504 - DNA, 50 bp, Artificial; identical to SEQ ID NO: 192207
  Synthetic oligonucleotide

SEQ ID NO: 621505 - DNA, 55 bp, Artificial; identical to SEQ ID NO: 142445
  Synthetic oligonucleotide

SEQ ID NO: 621506 - DNA, 55 bp, Artificial; identical to SEQ ID NO: 202805
  Synthetic oligonucleotide

SEQ ID NO: 621507 - DNA, 54 bp, Artificial; identical to SEQ ID NO: 157228
  Synthetic oligonucleotide

SEQ ID NO: 621508 - DNA, 60 bp, Artificial; identical to SEQ ID NO: 148604
  Synthetic oligonucleotide

SEQ ID NO: 621509 - DNA, 53 bp, Artificial; identical to SEQ ID NO: 160451
  Synthetic oligonucleotide

SEQ ID NO: 621510 - DNA, 51 bp, Artificial; identical to SEQ ID NO: 209721
  Synthetic oligonucleotide

SEQ ID NO: 621511 - DNA, 52 bp, Artificial; identical to SEQ ID NO: 240515
  Synthetic oligonucleotide

SEQ ID NO: 621512 - DNA, 52 bp, Artificial; identical to SEQ ID NO: 221739
  Synthetic oligonucleotide

SEQ ID NO: 621513 - DNA, 54 bp, Artificial; identical to SEQ ID NO: 168830
  Synthetic oligonucleotide

SEQ ID NO: 621514 - DNA, 53 bp, Artificial; identical to SEQ ID NO: 149154
  Synthetic oligonucleotide

SEQ ID NO: 621515 - DNA, 60 bp, Artificial; identical to SEQ ID NO: 199115
  Synthetic oligonucleotide

SEQ ID NO: 621516 - DNA, 55 bp, Artificial; identical to SEQ ID NO: 212787
  Synthetic oligonucleotide

SEQ ID NO: 621517 - DNA, 52 bp, Artificial; identical to SEQ ID NO: 143824
  Synthetic oligonucleotide

SEQ ID NO: 621518 - DNA, 55 bp, Artificial; identical to SEQ ID NO: 169951
  Synthetic oligonucleotide

SEQ ID NO: 621519 - DNA, 60 bp, Artificial; identical to SEQ ID NO: 257753
  Synthetic oligonucleotide

SEQ ID NO: 621520 - DNA, 52 bp, Artificial; identical to SEQ ID NO: 246546
  Synthetic oligonucleotide

SEQ ID NO: 621521 - DNA, 55 bp, Artificial; identical to SEQ ID NO: 188384
  Synthetic oligonucleotide

SEQ ID NO: 621522 - DNA, 51 bp, Artificial; identical to SEQ ID NO: 253398
  Synthetic oligonucleotide

SEQ ID NO: 621523 - DNA, 54 bp, Artificial; identical to SEQ ID NO: 141183
  Synthetic oligonucleotide

SEQ ID NO: 621524 - DNA, 51 bp, Artificial; identical to SEQ ID NO: 170164
  Synthetic oligonucleotide

SEQ ID NO: 621525 - DNA, 50 bp, Artificial; identical to SEQ ID NO: 176247
  Synthetic oligonucleotide

SEQ ID NO: 621526 - DNA, 56 bp, Artificial; identical to SEQ ID NO: 147348
  Synthetic oligonucleotide

SEQ ID NO: 621527 - DNA, 55 bp, Artificial; identical to SEQ ID NO: 154260
  Synthetic oligonucleotide

SEQ ID NO: 621528 - DNA, 57 bp, Artificial; identical to SEQ ID NO: 185659
  Synthetic oligonucleotide

SEQ ID NO: 621529 - DNA, 55 bp, Artificial; identical to SEQ ID NO: 242910
  Synthetic oligonucleotide

SEQ ID NO: 621530 - DNA, 55 bp, Artificial; identical to SEQ ID NO: 261939
  Synthetic oligonucleotide

SEQ ID NO: 621531 - DNA, 52 bp, Artificial; identical to SEQ ID NO: 169004
  Synthetic oligonucleotide

SEQ ID NO: 621532 - DNA, 60 bp, Artificial; identical to SEQ ID NO: 199104
  Synthetic oligonucleotide

SEQ ID NO: 621533 - DNA, 60 bp, Artificial; identical to SEQ ID NO: 240492
  Synthetic oligonucleotide

SEQ ID NO: 621534 - DNA, 60 bp, Artificial; identical to SEQ ID NO: 243855
  Synthetic oligonucleotide

SEQ ID NO: 621535 - DNA, 52 bp, Artificial; identical to SEQ ID NO: 208797
  Synthetic oligonucleotide

SEQ ID NO: 621536 - DNA, 55 bp, Artificial; identical to SEQ ID NO: 211365
  Synthetic oligonucleotide

SEQ ID NO: 621537 - DNA, 51 bp, Artificial; identical to SEQ ID NO: 210364
  Synthetic oligonucleotide

SEQ ID NO: 621538 - DNA, 55 bp, Artificial; identical to SEQ ID NO: 242903
  Synthetic oligonucleotide

SEQ ID NO: 621539 - DNA, 56 bp, Artificial; identical to SEQ ID NO: 186104
  Synthetic oligonucleotide

SEQ ID NO: 621540 - DNA, 55 bp, Artificial; identical to SEQ ID NO: 174557
  Synthetic oligonucleotide

SEQ ID NO: 621541 - DNA, 55 bp, Artificial; identical to SEQ ID NO: 257874
  Synthetic oligonucleotide

SEQ ID NO: 621542 - DNA, 54 bp, Artificial; identical to SEQ ID NO: 169990
  Synthetic oligonucleotide

SEQ ID NO: 621543 - DNA, 57 bp, Artificial; identical to SEQ ID NO: 179740
  Synthetic oligonucleotide

SEQ ID NO: 621544 - DNA, 50 bp, Artificial; identical to SEQ ID NO: 243389
  Synthetic oligonucleotide

SEQ ID NO: 621545 - DNA, 51 bp, Artificial; identical to SEQ ID NO: 174301
  Synthetic oligonucleotide

SEQ ID NO: 621546 - DNA, 59 bp, Artificial; identical to SEQ ID NO: 179479
  Synthetic oligonucleotide

SEQ ID NO: 621547 - DNA, 54 bp, Artificial; identical to SEQ ID NO: 142612
  Synthetic oligonucleotide

SEQ ID NO: 621548 - DNA, 54 bp, Artificial; identical to SEQ ID NO: 180710
  Synthetic oligonucleotide

SEQ ID NO: 621549 - DNA, 60 bp, Artificial; identical to SEQ ID NO: 248741
  Synthetic oligonucleotide

SEQ ID NO: 621550 - DNA, 54 bp, Artificial; identical to SEQ ID NO: 218309
  Synthetic oligonucleotide

SEQ ID NO: 621551 - DNA, 53 bp, Artificial; identical to SEQ ID NO: 185719
  Synthetic oligonucleotide

SEQ ID NO: 621552 - DNA, 59 bp, Artificial; identical to SEQ ID NO: 217240
  Synthetic oligonucleotide

SEQ ID NO: 621553 - DNA, 55 bp, Artificial; identical to SEQ ID NO: 164445
  Synthetic oligonucleotide

SEQ ID NO: 621554 - DNA, 59 bp, Artificial; identical to SEQ ID NO: 153599
  Synthetic oligonucleotide

SEQ ID NO: 621555 - DNA, 60 bp, Artificial; identical to SEQ ID NO: 243857
  Synthetic oligonucleotide

SEQ ID NO: 621556 - DNA, 60 bp, Artificial; identical to SEQ ID NO: 248730
  Synthetic oligonucleotide

SEQ ID NO: 621557 - DNA, 55 bp, Artificial; identical to SEQ ID NO: 168770
  Synthetic oligonucleotide

SEQ ID NO: 621558 - DNA, 60 bp, Artificial; identical to SEQ ID NO: 141805
  Synthetic oligonucleotide

SEQ ID NO: 621559 - DNA, 55 bp, Artificial; identical to SEQ ID NO: 208188
  Synthetic oligonucleotide

SEQ ID NO: 621560 - DNA, 55 bp, Artificial; identical to SEQ ID NO: 144848
  Synthetic oligonucleotide

SEQ ID NO: 621561 - DNA, 55 bp, Artificial; identical to SEQ ID NO: 257877
  Synthetic oligonucleotide

SEQ ID NO: 621562 - DNA, 55 bp, Artificial; identical to SEQ ID NO: 187773
  Synthetic oligonucleotide

SEQ ID NO: 621563 - DNA, 58 bp, Artificial; identical to SEQ ID NO: 243986
  Synthetic oligonucleotide

SEQ ID NO: 621564 - DNA, 55 bp, Artificial; identical to SEQ ID NO: 156751
  Synthetic oligonucleotide

SEQ ID NO: 621565 - DNA, 54 bp, Artificial; identical to SEQ ID NO: 199568
  Synthetic oligonucleotide

SEQ ID NO: 621566 - DNA, 60 bp, Artificial; identical to SEQ ID NO: 217768
  Synthetic oligonucleotide

SEQ ID NO: 621567 - DNA, 58 bp, Artificial; identical to SEQ ID NO: 201962
  Synthetic oligonucleotide

SEQ ID NO: 621568 - DNA, 55 bp, Artificial; identical to SEQ ID NO: 196930
  Synthetic oligonucleotide

SEQ ID NO: 621569 - DNA, 53 bp, Artificial; identical to SEQ ID NO: 243205
  Synthetic oligonucleotide

SEQ ID NO: 621570 - DNA, 55 bp, Artificial; identical to SEQ ID NO: 249190
  Synthetic oligonucleotide

SEQ ID NO: 621571 - DNA, 55 bp, Artificial; identical to SEQ ID NO: 209485
  Synthetic oligonucleotide

SEQ ID NO: 621572 - DNA, 51 bp, Artificial; identical to SEQ ID NO: 186722
  Synthetic oligonucleotide

SEQ ID NO: 621573 - DNA, 58 bp, Artificial; identical to SEQ ID NO: 207011
  Synthetic oligonucleotide

SEQ ID NO: 621574 - DNA, 52 bp, Artificial; identical to SEQ ID NO: 215208
  Synthetic oligonucleotide

SEQ ID NO: 621575 - DNA, 60 bp, Artificial; identical to SEQ ID NO: 176327
  Synthetic oligonucleotide

SEQ ID NO: 621576 - DNA, 59 bp, Artificial; identical to SEQ ID NO: 207000
  Synthetic oligonucleotide

SEQ ID NO: 621577 - DNA, 50 bp, Artificial; identical to SEQ ID NO: 233895
  Synthetic oligonucleotide

SEQ ID NO: 621578 - DNA, 55 bp, Artificial; identical to SEQ ID NO: 142437
  Synthetic oligonucleotide

SEQ ID NO: 621579 - DNA, 55 bp, Artificial; identical to SEQ ID NO: 141803
  Synthetic oligonucleotide

SEQ ID NO: 621580 - DNA, 58 bp, Artificial; identical to SEQ ID NO: 243859
  Synthetic oligonucleotide

SEQ ID NO: 621581 - DNA, 56 bp, Artificial; identical to SEQ ID NO: 243844
  Synthetic oligonucleotide

SEQ ID NO: 621582 - DNA, 57 bp, Artificial; identical to SEQ ID NO: 255900
  Synthetic oligonucleotide

SEQ ID NO: 621583 - DNA, 55 bp, Artificial; identical to SEQ ID NO: 169161
  Synthetic oligonucleotide

SEQ ID NO: 621584 - DNA, 53 bp, Artificial; identical to SEQ ID NO: 265835
  Synthetic oligonucleotide

SEQ ID NO: 621585 - DNA, 51 bp, Artificial; identical to SEQ ID NO: 205744
  Synthetic oligonucleotide

SEQ ID NO: 621586 - DNA, 50 bp, Artificial; identical to SEQ ID NO: 241471
  Synthetic oligonucleotide

SEQ ID NO: 621587 - DNA, 55 bp, Artificial; identical to SEQ ID NO: 180944
  Synthetic oligonucleotide

SEQ ID NO: 621588 - DNA, 55 bp, Artificial; identical to SEQ ID NO: 164486
  Synthetic oligonucleotide

SEQ ID NO: 621589 - DNA, 60 bp, Artificial; identical to SEQ ID NO: 217779
  Synthetic oligonucleotide

SEQ ID NO: 621590 - DNA, 60 bp, Artificial; identical to SEQ ID NO: 141888
  Synthetic oligonucleotide

SEQ ID NO: 621591 - DNA, 59 bp, Artificial; identical to SEQ ID NO: 223362
  Synthetic oligonucleotide

SEQ ID NO: 621592 - DNA, 60 bp, Artificial; identical to SEQ ID NO: 243842
  Synthetic oligonucleotide

SEQ ID NO: 621593 - DNA, 52 bp, Artificial; identical to SEQ ID NO: 195049
  Synthetic oligonucleotide

SEQ ID NO: 621594 - DNA, 58 bp, Artificial; identical to SEQ ID NO: 160341
  Synthetic oligonucleotide

SEQ ID NO: 621595 - DNA, 51 bp, Artificial; identical to SEQ ID NO: 165262
  Synthetic oligonucleotide

SEQ ID NO: 621596 - DNA, 54 bp, Artificial; identical to SEQ ID NO: 194782
  Synthetic oligonucleotide

SEQ ID NO: 621597 - DNA, 60 bp, Artificial; identical to SEQ ID NO: 149004
  Synthetic oligonucleotide

SEQ ID NO: 621598 - DNA, 60 bp, Artificial; identical to SEQ ID NO: 148993
  Synthetic oligonucleotide

SEQ ID NO: 621599 - DNA, 55 bp, Artificial; identical to SEQ ID NO: 161038
  Synthetic oligonucleotide

SEQ ID NO: 621600 - DNA, 56 bp, Artificial; identical to SEQ ID NO: 187404
  Synthetic oligonucleotide

SEQ ID NO: 621601 - DNA, 59 bp, Artificial; identical to SEQ ID NO: 187806
  Synthetic oligonucleotide

SEQ ID NO: 621602 - DNA, 55 bp, Artificial; identical to SEQ ID NO: 255137
  Synthetic oligonucleotide

SEQ ID NO: 621603 - DNA, 53 bp, Artificial; identical to SEQ ID NO: 157446
  Synthetic oligonucleotide

SEQ ID NO: 621604 - DNA, 58 bp, Artificial; identical to SEQ ID NO: 245442
  Synthetic oligonucleotide

SEQ ID NO: 621605 - DNA, 55 bp, Artificial; identical to SEQ ID NO: 199107
  Synthetic oligonucleotide

SEQ ID NO: 621606 - DNA, 60 bp, Artificial; identical to SEQ ID NO: 240448
  Synthetic oligonucleotide

SEQ ID NO: 621607 - DNA, 58 bp, Artificial; identical to SEQ ID NO: 240437
  Synthetic oligonucleotide

SEQ ID NO: 621608 - DNA, 60 bp, Artificial; identical to SEQ ID NO: 217790
  Synthetic oligonucleotide

SEQ ID NO: 621609 - DNA, 58 bp, Artificial; identical to SEQ ID NO: 197670
  Synthetic oligonucleotide

SEQ ID NO: 621610 - DNA, 60 bp, Artificial; identical to SEQ ID NO: 162159
  Synthetic oligonucleotide

SEQ ID NO: 621611 - DNA, 60 bp, Artificial; identical to SEQ ID NO: 181993
  Synthetic oligonucleotide

SEQ ID NO: 621612 - DNA, 55 bp, Artificial; identical to SEQ ID NO: 199106
  Synthetic oligonucleotide

SEQ ID NO: 621613 - DNA, 54 bp, Artificial; identical to SEQ ID NO: 164776
  Synthetic oligonucleotide

SEQ ID NO: 621614 - DNA, 60 bp, Artificial; identical to SEQ ID NO: 223406
  Synthetic oligonucleotide

SEQ ID NO: 621615 - DNA, 58 bp, Artificial; identical to SEQ ID NO: 187794
  Synthetic oligonucleotide

SEQ ID NO: 621616 - DNA, 60 bp, Artificial; identical to SEQ ID NO: 141889
  Synthetic oligonucleotide

SEQ ID NO: 621617 - DNA, 60 bp, Artificial; identical to SEQ ID NO: 240426
  Synthetic oligonucleotide

SEQ ID NO: 621618 - DNA, 60 bp, Artificial; identical to SEQ ID NO: 148982
  Synthetic oligonucleotide

SEQ ID NO: 621619 - DNA, 58 bp, Artificial; identical to SEQ ID NO: 203375
  Synthetic oligonucleotide

SEQ ID NO: 621620 - DNA, 55 bp, Artificial; identical to SEQ ID NO: 202803
  Synthetic oligonucleotide

SEQ ID NO: 621621 - DNA, 52 bp, Artificial; identical to SEQ ID NO: 220794
  Synthetic oligonucleotide

SEQ ID NO: 621622 - DNA, 50 bp, Artificial; identical to SEQ ID NO: 200292
  Synthetic oligonucleotide

SEQ ID NO: 621623 - DNA, 55 bp, Artificial; identical to SEQ ID NO: 245416
  Synthetic oligonucleotide

SEQ ID NO: 621624 - DNA, 58 bp, Artificial; identical to SEQ ID NO: 240415
  Synthetic oligonucleotide

SEQ ID NO: 621625 - DNA, 55 bp, Artificial; identical to SEQ ID NO: 257880
  Synthetic oligonucleotide

SEQ ID NO: 621626 - DNA, 57 bp, Artificial; identical to SEQ ID NO: 265965
  Synthetic oligonucleotide

SEQ ID NO: 621627 - DNA, 58 bp, Artificial; identical to SEQ ID NO: 240404
  Synthetic oligonucleotide

SEQ ID NO: 621628 - DNA, 55 bp, Artificial; identical to SEQ ID NO: 257881
  Synthetic oligonucleotide

SEQ ID NO: 621629 - DNA, 55 bp, Artificial; identical to SEQ ID NO: 156756
  Synthetic oligonucleotide

SEQ ID NO: 621630 - DNA, 54 bp, Artificial; identical to SEQ ID NO: 143666
  Synthetic oligonucleotide

SEQ ID NO: 621631 - DNA, 54 bp, Artificial; identical to SEQ ID NO: 185214
  Synthetic oligonucleotide

SEQ ID NO: 621632 - DNA, 55 bp, Artificial; identical to SEQ ID NO: 149064
  Synthetic oligonucleotide

SEQ ID NO: 621633 - DNA, 51 bp, Artificial; identical to SEQ ID NO: 193836
  Synthetic oligonucleotide

SEQ ID NO: 621634 - DNA, 57 bp, Artificial; identical to SEQ ID NO: 240381
  Synthetic oligonucleotide

SEQ ID NO: 621635 - DNA, 51 bp, Artificial; identical to SEQ ID NO: 192175
  Synthetic oligonucleotide

SEQ ID NO: 621636 - DNA, 55 bp, Artificial; identical to SEQ ID NO: 207563
  Synthetic oligonucleotide

SEQ ID NO: 621637 - DNA, 55 bp, Artificial; identical to SEQ ID NO: 180953
  Synthetic oligonucleotide

SEQ ID NO: 621638 - DNA, 56 bp, Artificial; identical to SEQ ID NO: 244050
  Synthetic oligonucleotide

SEQ ID NO: 621639 - DNA, 51 bp, Artificial; identical to SEQ ID NO: 183104
  Synthetic oligonucleotide

SEQ ID NO: 621640 - DNA, 60 bp, Artificial; identical to SEQ ID NO: 240359
  Synthetic oligonucleotide

SEQ ID NO: 621641 - DNA, 55 bp, Artificial; identical to SEQ ID NO: 149057
  Synthetic oligonucleotide

SEQ ID NO: 621642 - DNA, 55 bp, Artificial; identical to SEQ ID NO: 242724
  Synthetic oligonucleotide

SEQ ID NO: 621643 - DNA, 54 bp, Artificial; identical to SEQ ID NO: 223540
  Synthetic oligonucleotide

SEQ ID NO: 621644 - DNA, 55 bp, Artificial; identical to SEQ ID NO: 211367
  Synthetic oligonucleotide

SEQ ID NO: 621645 - DNA, 53 bp, Artificial; identical to SEQ ID NO: 157450
  Synthetic oligonucleotide

SEQ ID NO: 621646 - DNA, 60 bp, Artificial; identical to SEQ ID NO: 243837
  Synthetic oligonucleotide

SEQ ID NO: 621647 - DNA, 60 bp, Artificial; identical to SEQ ID NO: 183437
  Synthetic oligonucleotide

SEQ ID NO: 621648 - DNA, 52 bp, Artificial; identical to SEQ ID NO: 149054
  Synthetic oligonucleotide

SEQ ID NO: 621649 - DNA, 52 bp, Artificial; identical to SEQ ID NO: 157592
  Synthetic oligonucleotide

SEQ ID NO: 621650 - DNA, 55 bp, Artificial; identical to SEQ ID NO: 168818
  Synthetic oligonucleotide

SEQ ID NO: 621651 - DNA, 55 bp, Artificial; identical to SEQ ID NO: 238530
  Synthetic oligonucleotide

SEQ ID NO: 621652 - DNA, 51 bp, Artificial; identical to SEQ ID NO: 200012
  Synthetic oligonucleotide

SEQ ID NO: 621653 - DNA, 50 bp, Artificial; identical to SEQ ID NO: 150285
  Synthetic oligonucleotide

SEQ ID NO: 621654 - DNA, 50 bp, Artificial; identical to SEQ ID NO: 203049
  Synthetic oligonucleotide

SEQ ID NO: 621655 - DNA, 55 bp, Artificial; identical to SEQ ID NO: 180917
  Synthetic oligonucleotide

SEQ ID NO: 621656 - DNA, 55 bp, Artificial; identical to SEQ ID NO: 201157
  Synthetic oligonucleotide

SEQ ID NO: 621657 - DNA, 53 bp, Artificial; identical to SEQ ID NO: 255331
  Synthetic oligonucleotide

SEQ ID NO: 621658 - DNA, 54 bp, Artificial; identical to SEQ ID NO: 194921
  Synthetic oligonucleotide

SEQ ID NO: 621659 - DNA, 60 bp, Artificial; identical to SEQ ID NO: 205830
  Synthetic oligonucleotide

SEQ ID NO: 621660 - DNA, 50 bp, Artificial; identical to SEQ ID NO: 241482
  Synthetic oligonucleotide

SEQ ID NO: 621661 - DNA, 55 bp, Artificial; identical to SEQ ID NO: 209487
  Synthetic oligonucleotide

SEQ ID NO: 621662 - DNA, 53 bp, Artificial; identical to SEQ ID NO: 185798
  Synthetic oligonucleotide

SEQ ID NO: 621663 - DNA, 56 bp, Artificial; identical to SEQ ID NO: 168124
  Synthetic oligonucleotide

SEQ ID NO: 621664 - DNA, 56 bp, Artificial; identical to SEQ ID NO: 224408
  Synthetic oligonucleotide

SEQ ID NO: 621665 - DNA, 51 bp, Artificial; identical to SEQ ID NO: 146460
  Synthetic oligonucleotide

SEQ ID NO: 621666 - DNA, 49 bp, Artificial; identical to SEQ ID NO: 194116
  Synthetic oligonucleotide

SEQ ID NO: 621667 - DNA, 60 bp, Artificial; identical to SEQ ID NO: 223983
  Synthetic oligonucleotide

SEQ ID NO: 621668 - DNA, 55 bp, Artificial; identical to SEQ ID NO: 233666
  Synthetic oligonucleotide

SEQ ID NO: 621669 - DNA, 55 bp, Artificial; identical to SEQ ID NO: 225060
  Synthetic oligonucleotide

SEQ ID NO: 621670 - DNA, 52 bp, Artificial; identical to SEQ ID NO: 186187
  Synthetic oligonucleotide

SEQ ID NO: 621671 - DNA, 51 bp, Artificial; identical to SEQ ID NO: 209655
  Synthetic oligonucleotide

SEQ ID NO: 621672 - DNA, 53 bp, Artificial; identical to SEQ ID NO: 185802
  Synthetic oligonucleotide

SEQ ID NO: 621673 - DNA, 52 bp, Artificial; identical to SEQ ID NO: 221740
  Synthetic oligonucleotide

SEQ ID NO: 621674 - DNA, 60 bp, Artificial; identical to SEQ ID NO: 159231
  Synthetic oligonucleotide

SEQ ID NO: 621675 - DNA, 55 bp, Artificial; identical to SEQ ID NO: 156761
  Synthetic oligonucleotide

SEQ ID NO: 621676 - DNA, 55 bp, Artificial; identical to SEQ ID NO: 219624
  Synthetic oligonucleotide

SEQ ID NO: 621677 - DNA, 50 bp, Artificial; identical to SEQ ID NO: 154979
  Synthetic oligonucleotide

SEQ ID NO: 621678 - DNA, 50 bp, Artificial; identical to SEQ ID NO: 168060
  Synthetic oligonucleotide

SEQ ID NO: 621679 - DNA, 60 bp, Artificial; identical to SEQ ID NO: 171251
  Synthetic oligonucleotide

SEQ ID NO: 621680 - DNA, 55 bp, Artificial; identical to SEQ ID NO: 257835
  Synthetic oligonucleotide

SEQ ID NO: 621681 - DNA, 60 bp, Artificial; identical to SEQ ID NO: 199093
  Synthetic oligonucleotide

SEQ ID NO: 621682 - DNA, 55 bp, Artificial; identical to SEQ ID NO: 257837
  Synthetic oligonucleotide

SEQ ID NO: 621683 - DNA, 55 bp, Artificial; identical to SEQ ID NO: 168801
  Synthetic oligonucleotide

SEQ ID NO: 621684 - DNA, 55 bp, Artificial; identical to SEQ ID NO: 142386
  Synthetic oligonucleotide

SEQ ID NO: 621685 - DNA, 55 bp, Artificial; identical to SEQ ID NO: 257838
  Synthetic oligonucleotide

SEQ ID NO: 621686 - DNA, 54 bp, Artificial; identical to SEQ ID NO: 224039
  Synthetic oligonucleotide

SEQ ID NO: 621687 - DNA, 50 bp, Artificial; identical to SEQ ID NO: 246812
  Synthetic oligonucleotide

SEQ ID NO: 621688 - DNA, 54 bp, Artificial; identical to SEQ ID NO: 255955
  Synthetic oligonucleotide

SEQ ID NO: 621689 - DNA, 59 bp, Artificial; identical to SEQ ID NO: 141895
  Synthetic oligonucleotide

SEQ ID NO: 621690 - DNA, 55 bp, Artificial; identical to SEQ ID NO: 174555
  Synthetic oligonucleotide

SEQ ID NO: 621691 - DNA, 57 bp, Artificial; identical to SEQ ID NO: 248617
  Synthetic oligonucleotide

SEQ ID NO: 621692 - DNA, 55 bp, Artificial; identical to SEQ ID NO: 173637
  Synthetic oligonucleotide

SEQ ID NO: 621693 - DNA, 60 bp, Artificial; identical to SEQ ID NO: 224083
  Synthetic oligonucleotide

SEQ ID NO: 621694 - DNA, 56 bp, Artificial; identical to SEQ ID NO: 153543
  Synthetic oligonucleotide

SEQ ID NO: 621695 - DNA, 55 bp, Artificial; identical to SEQ ID NO: 180984
  Synthetic oligonucleotide

SEQ ID NO: 621696 - DNA, 55 bp, Artificial; identical to SEQ ID NO: 180986
  Synthetic oligonucleotide

SEQ ID NO: 621697 - DNA, 51 bp, Artificial; identical to SEQ ID NO: 145057
  Synthetic oligonucleotide

SEQ ID NO: 621698 - DNA, 51 bp, Artificial; identical to SEQ ID NO: 157890
  Synthetic oligonucleotide

SEQ ID NO: 621699 - DNA, 50 bp, Artificial; identical to SEQ ID NO: 160677
  Synthetic oligonucleotide

SEQ ID NO: 621700 - DNA, 54 bp, Artificial; identical to SEQ ID NO: 169979
  Synthetic oligonucleotide

SEQ ID NO: 621701 - DNA, 55 bp, Artificial; identical to SEQ ID NO: 156732
  Synthetic oligonucleotide

SEQ ID NO: 621702 - DNA, 51 bp, Artificial; identical to SEQ ID NO: 199986
  Synthetic oligonucleotide

SEQ ID NO: 621703 - DNA, 55 bp, Artificial; identical to SEQ ID NO: 255003
  Synthetic oligonucleotide

SEQ ID NO: 621704 - DNA, 55 bp, Artificial; identical to SEQ ID NO: 156733
  Synthetic oligonucleotide

SEQ ID NO: 621705 - DNA, 56 bp, Artificial; identical to SEQ ID NO: 144584
  Synthetic oligonucleotide

SEQ ID NO: 621706 - DNA, 55 bp, Artificial; identical to SEQ ID NO: 245586
  Synthetic oligonucleotide

SEQ ID NO: 621707 - DNA, 55 bp, Artificial; identical to SEQ ID NO: 191067
  Synthetic oligonucleotide

SEQ ID NO: 621708 - DNA, 54 bp, Artificial; identical to SEQ ID NO: 240293
  Synthetic oligonucleotide

SEQ ID NO: 621709 - DNA, 55 bp, Artificial; identical to SEQ ID NO: 148918
  Synthetic oligonucleotide

SEQ ID NO: 621710 - DNA, 60 bp, Artificial; identical to SEQ ID NO: 148915
  Synthetic oligonucleotide

SEQ ID NO: 621711 - DNA, 55 bp, Artificial; identical to SEQ ID NO: 255006
  Synthetic oligonucleotide

SEQ ID NO: 621712 - DNA, 55 bp, Artificial; identical to SEQ ID NO: 253179
  Synthetic oligonucleotide

SEQ ID NO: 621713 - DNA, 55 bp, Artificial; identical to SEQ ID NO: 240525
  Synthetic oligonucleotide

SEQ ID NO: 621714 - DNA, 53 bp, Artificial; identical to SEQ ID NO: 152434
  Synthetic oligonucleotide

SEQ ID NO: 621715 - DNA, 55 bp, Artificial; identical to SEQ ID NO: 195189
  Synthetic oligonucleotide

SEQ ID NO: 621716 - DNA, 55 bp, Artificial; identical to SEQ ID NO: 215543
  Synthetic oligonucleotide

SEQ ID NO: 621717 - DNA, 53 bp, Artificial; identical to SEQ ID NO: 246292
  Synthetic oligonucleotide

SEQ ID NO: 621718 - DNA, 60 bp, Artificial; identical to SEQ ID NO: 171262
  Synthetic oligonucleotide

SEQ ID NO: 621719 - DNA, 55 bp, Artificial; identical to SEQ ID NO: 221541
  Synthetic oligonucleotide

SEQ ID NO: 621720 - DNA, 55 bp, Artificial; identical to SEQ ID NO: 211373
  Synthetic oligonucleotide

SEQ ID NO: 621721 - DNA, 52 bp, Artificial; identical to SEQ ID NO: 191206
  Synthetic oligonucleotide

SEQ ID NO: 621722 - DNA, 55 bp, Artificial; identical to SEQ ID NO: 199103
  Synthetic oligonucleotide

SEQ ID NO: 621723 - DNA, 60 bp, Artificial; identical to SEQ ID NO: 240270
  Synthetic oligonucleotide

SEQ ID NO: 621724 - DNA, 50 bp, Artificial; identical to SEQ ID NO: 212785
  Synthetic oligonucleotide

SEQ ID NO: 621725 - DNA, 52 bp, Artificial; identical to SEQ ID NO: 168998
  Synthetic oligonucleotide

SEQ ID NO: 621726 - DNA, 55 bp, Artificial; identical to SEQ ID NO: 187774
  Synthetic oligonucleotide

SEQ ID NO: 621727 - DNA, 50 bp, Artificial; identical to SEQ ID NO: 142717
  Synthetic oligonucleotide

SEQ ID NO: 621728 - DNA, 60 bp, Artificial; identical to SEQ ID NO: 257731
  Synthetic oligonucleotide

SEQ ID NO: 621729 - DNA, 58 bp, Artificial; identical to SEQ ID NO: 164345
  Synthetic oligonucleotide

SEQ ID NO: 621730 - DNA, 60 bp, Artificial; identical to SEQ ID NO: 148893
  Synthetic oligonucleotide

SEQ ID NO: 621731 - DNA, 55 bp, Artificial; identical to SEQ ID NO: 164484
  Synthetic oligonucleotide

SEQ ID NO: 621732 - DNA, 54 bp, Artificial; identical to SEQ ID NO: 245499
  Synthetic oligonucleotide

SEQ ID NO: 621733 - DNA, 51 bp, Artificial; identical to SEQ ID NO: 167609
  Synthetic oligonucleotide

SEQ ID NO: 621734 - DNA, 55 bp, Artificial; identical to SEQ ID NO: 249195
  Synthetic oligonucleotide

SEQ ID NO: 621735 - DNA, 53 bp, Artificial; identical to SEQ ID NO: 149333
  Synthetic oligonucleotide

SEQ ID NO: 621736 - DNA, 55 bp, Artificial; identical to SEQ ID NO: 154256
  Synthetic oligonucleotide

SEQ ID NO: 621737 - DNA, 54 bp, Artificial; identical to SEQ ID NO: 164768
  Synthetic oligonucleotide

SEQ ID NO: 621738 - DNA, 52 bp, Artificial; identical to SEQ ID NO: 187000
  Synthetic oligonucleotide

SEQ ID NO: 621739 - DNA, 53 bp, Artificial; identical to SEQ ID NO: 149335
  Synthetic oligonucleotide

SEQ ID NO: 621740 - DNA, 55 bp, Artificial; identical to SEQ ID NO: 205561
  Synthetic oligonucleotide

SEQ ID NO: 621741 - DNA, 53 bp, Artificial; identical to SEQ ID NO: 167669
  Synthetic oligonucleotide

SEQ ID NO: 621742 - DNA, 55 bp, Artificial; identical to SEQ ID NO: 160184
  Synthetic oligonucleotide

SEQ ID NO: 621743 - DNA, 55 bp, Artificial; identical to SEQ ID NO: 148844
  Synthetic oligonucleotide

SEQ ID NO: 621744 - DNA, 51 bp, Artificial; identical to SEQ ID NO: 169414
  Synthetic oligonucleotide

SEQ ID NO: 621745 - DNA, 60 bp, Artificial; identical to SEQ ID NO: 255966
  Synthetic oligonucleotide

SEQ ID NO: 621746 - DNA, 53 bp, Artificial; identical to SEQ ID NO: 194998
  Synthetic oligonucleotide

SEQ ID NO: 621747 - DNA, 51 bp, Artificial; identical to SEQ ID NO: 170167
  Synthetic oligonucleotide

SEQ ID NO: 621748 - DNA, 52 bp, Artificial; identical to SEQ ID NO: 153628
  Synthetic oligonucleotide

SEQ ID NO: 621749 - DNA, 52 bp, Artificial; identical to SEQ ID NO: 243253
  Synthetic oligonucleotide

SEQ ID NO: 621750 - DNA, 57 bp, Artificial; identical to SEQ ID NO: 209199
  Synthetic oligonucleotide

SEQ ID NO: 621751 - DNA, 59 bp, Artificial; identical to SEQ ID NO: 258175
  Synthetic oligonucleotide

SEQ ID NO: 621752 - DNA, 55 bp, Artificial; identical to SEQ ID NO: 153326
  Synthetic oligonucleotide

SEQ ID NO: 621753 - DNA, 55 bp, Artificial; identical to SEQ ID NO: 187776
  Synthetic oligonucleotide

SEQ ID NO: 621754 - DNA, 59 bp, Artificial; identical to SEQ ID NO: 154436
  Synthetic oligonucleotide

SEQ ID NO: 621755 - DNA, 51 bp, Artificial; identical to SEQ ID NO: 223723
  Synthetic oligonucleotide

SEQ ID NO: 621756 - DNA, 55 bp, Artificial; identical to SEQ ID NO: 174550
  Synthetic oligonucleotide

SEQ ID NO: 621757 - DNA, 55 bp, Artificial; identical to SEQ ID NO: 221542
  Synthetic oligonucleotide

SEQ ID NO: 621758 - DNA, 51 bp, Artificial; identical to SEQ ID NO: 165266
  Synthetic oligonucleotide

SEQ ID NO: 621759 - DNA, 51 bp, Artificial; identical to SEQ ID NO: 197701
  Synthetic oligonucleotide

SEQ ID NO: 621760 - DNA, 55 bp, Artificial; identical to SEQ ID NO: 199102
  Synthetic oligonucleotide

SEQ ID NO: 621761 - DNA, 55 bp, Artificial; identical to SEQ ID NO: 144606
  Synthetic oligonucleotide

SEQ ID NO: 621762 - DNA, 55 bp, Artificial; identical to SEQ ID NO: 265969
  Synthetic oligonucleotide

SEQ ID NO: 621763 - DNA, 54 bp, Artificial; identical to SEQ ID NO: 240248
  Synthetic oligonucleotide

SEQ ID NO: 621764 - DNA, 60 bp, Artificial; identical to SEQ ID NO: 153499
  Synthetic oligonucleotide

SEQ ID NO: 621765 - DNA, 53 bp, Artificial; identical to SEQ ID NO: 170085
  Synthetic oligonucleotide

SEQ ID NO: 621766 - DNA, 53 bp, Artificial; identical to SEQ ID NO: 188086
  Synthetic oligonucleotide

SEQ ID NO: 621767 - DNA, 50 bp, Artificial; identical to SEQ ID NO: 173602
  Synthetic oligonucleotide

SEQ ID NO: 621768 - DNA, 55 bp, Artificial; identical to SEQ ID NO: 180959
  Synthetic oligonucleotide

SEQ ID NO: 621769 - DNA, 60 bp, Artificial; identical to SEQ ID NO: 179827
  Synthetic oligonucleotide

SEQ ID NO: 621770 - DNA, 55 bp, Artificial; identical to SEQ ID NO: 179838
  Synthetic oligonucleotide

SEQ ID NO: 621771 - DNA, 51 bp, Artificial; identical to SEQ ID NO: 248017
  Synthetic oligonucleotide

SEQ ID NO: 621772 - DNA, 55 bp, Artificial; identical to SEQ ID NO: 196914
  Synthetic oligonucleotide

SEQ ID NO: 621773 - DNA, 55 bp, Artificial; identical to SEQ ID NO: 208183
  Synthetic oligonucleotide

SEQ ID NO: 621774 - DNA, 53 bp, Artificial; identical to SEQ ID NO: 247891
  Synthetic oligonucleotide

SEQ ID NO: 621775 - DNA, 55 bp, Artificial; identical to SEQ ID NO: 179849
  Synthetic oligonucleotide

SEQ ID NO: 621776 - DNA, 60 bp, Artificial; identical to SEQ ID NO: 240237
  Synthetic oligonucleotide

SEQ ID NO: 621777 - DNA, 55 bp, Artificial; identical to SEQ ID NO: 144845
  Synthetic oligonucleotide

SEQ ID NO: 621778 - DNA, 58 bp, Artificial; identical to SEQ ID NO: 162170
  Synthetic oligonucleotide

SEQ ID NO: 621779 - DNA, 59 bp, Artificial; identical to SEQ ID NO: 258163
  Synthetic oligonucleotide

SEQ ID NO: 621780 - DNA, 55 bp, Artificial; identical to SEQ ID NO: 179871
  Synthetic oligonucleotide

SEQ ID NO: 621781 - DNA, 55 bp, Artificial; identical to SEQ ID NO: 161778
  Synthetic oligonucleotide

SEQ ID NO: 621782 - DNA, 60 bp, Artificial; identical to SEQ ID NO: 199048
  Synthetic oligonucleotide

SEQ ID NO: 621783 - DNA, 55 bp, Artificial; identical to SEQ ID NO: 217828
  Synthetic oligonucleotide

SEQ ID NO: 621784 - DNA, 55 bp, Artificial; identical to SEQ ID NO: 199037
  Synthetic oligonucleotide

SEQ ID NO: 621785 - DNA, 57 bp, Artificial; identical to SEQ ID NO: 179883
  Synthetic oligonucleotide

SEQ ID NO: 621786 - DNA, 58 bp, Artificial; identical to SEQ ID NO: 245510
  Synthetic oligonucleotide

SEQ ID NO: 621787 - DNA, 52 bp, Artificial; identical to SEQ ID NO: 240226
  Synthetic oligonucleotide

SEQ ID NO: 621788 - DNA, 55 bp, Artificial; identical to SEQ ID NO: 253146
  Synthetic oligonucleotide

SEQ ID NO: 621789 - DNA, 50 bp, Artificial; identical to SEQ ID NO: 160676
  Synthetic oligonucleotide

SEQ ID NO: 621790 - DNA, 60 bp, Artificial; identical to SEQ ID NO: 141870
  Synthetic oligonucleotide

SEQ ID NO: 621791 - DNA, 52 bp, Artificial; identical to SEQ ID NO: 208800
  Synthetic oligonucleotide

SEQ ID NO: 621792 - DNA, 55 bp, Artificial; identical to SEQ ID NO: 212784
  Synthetic oligonucleotide

SEQ ID NO: 621793 - DNA, 52 bp, Artificial; identical to SEQ ID NO: 218356
  Synthetic oligonucleotide

SEQ ID NO: 621794 - DNA, 51 bp, Artificial; identical to SEQ ID NO: 200044
  Synthetic oligonucleotide

SEQ ID NO: 621795 - DNA, 55 bp, Artificial; identical to SEQ ID NO: 180964
  Synthetic oligonucleotide

SEQ ID NO: 621796 - DNA, 57 bp, Artificial; identical to SEQ ID NO: 164290
  Synthetic oligonucleotide

SEQ ID NO: 621797 - DNA, 50 bp, Artificial; identical to SEQ ID NO: 146547
  Synthetic oligonucleotide

SEQ ID NO: 621798 - DNA, 55 bp, Artificial; identical to SEQ ID NO: 194749
  Synthetic oligonucleotide

SEQ ID NO: 621799 - DNA, 53 bp, Artificial; identical to SEQ ID NO: 223599
  Synthetic oligonucleotide

SEQ ID NO: 621800 - DNA, 59 bp, Artificial; identical to SEQ ID NO: 148848
  Synthetic oligonucleotide

SEQ ID NO: 621801 - DNA, 55 bp, Artificial; identical to SEQ ID NO: 161777
  Synthetic oligonucleotide

SEQ ID NO: 621802 - DNA, 55 bp, Artificial; identical to SEQ ID NO: 199101
  Synthetic oligonucleotide

SEQ ID NO: 621803 - DNA, 55 bp, Artificial; identical to SEQ ID NO: 203631
  Synthetic oligonucleotide

SEQ ID NO: 621804 - DNA, 55 bp, Artificial; identical to SEQ ID NO: 164483
  Synthetic oligonucleotide

SEQ ID NO: 621805 - DNA, 55 bp, Artificial; identical to SEQ ID NO: 164482
  Synthetic oligonucleotide

SEQ ID NO: 621806 - DNA, 52 bp, Artificial; identical to SEQ ID NO: 155557
  Synthetic oligonucleotide

SEQ ID NO: 621807 - DNA, 53 bp, Artificial; identical to SEQ ID NO: 223601
  Synthetic oligonucleotide

SEQ ID NO: 621808 - DNA, 50 bp, Artificial; identical to SEQ ID NO: 176486
  Synthetic oligonucleotide

SEQ ID NO: 621809 - DNA, 52 bp, Artificial; identical to SEQ ID NO: 152091
  Synthetic oligonucleotide

SEQ ID NO: 621810 - DNA, 58 bp, Artificial; identical to SEQ ID NO: 144617
  Synthetic oligonucleotide

SEQ ID NO: 621811 - DNA, 55 bp, Artificial; identical to SEQ ID NO: 209493
  Synthetic oligonucleotide

SEQ ID NO: 621812 - DNA, 54 bp, Artificial; identical to SEQ ID NO: 189083
  Synthetic oligonucleotide

SEQ ID NO: 621813 - DNA, 53 bp, Artificial; identical to SEQ ID NO: 195220
  Synthetic oligonucleotide

SEQ ID NO: 621814 - DNA, 54 bp, Artificial; identical to SEQ ID NO: 240590
  Synthetic oligonucleotide

SEQ ID NO: 621815 - DNA, 52 bp, Artificial; identical to SEQ ID NO: 185917
  Synthetic oligonucleotide

SEQ ID NO: 621816 - DNA, 55 bp, Artificial; identical to SEQ ID NO: 160419
  Synthetic oligonucleotide

SEQ ID NO: 621817 - DNA, 60 bp, Artificial; identical to SEQ ID NO: 209484
  Synthetic oligonucleotide

SEQ ID NO: 621818 - DNA, 53 bp, Artificial; identical to SEQ ID NO: 161313
  Synthetic oligonucleotide

SEQ ID NO: 621819 - DNA, 54 bp, Artificial; identical to SEQ ID NO: 149128
  Synthetic oligonucleotide

SEQ ID NO: 621820 - DNA, 60 bp, Artificial; identical to SEQ ID NO: 199026
  Synthetic oligonucleotide

SEQ ID NO: 621821 - DNA, 59 bp, Artificial; identical to SEQ ID NO: 150746
  Synthetic oligonucleotide

SEQ ID NO: 621822 - DNA, 54 bp, Artificial; identical to SEQ ID NO: 199611
  Synthetic oligonucleotide

SEQ ID NO: 621823 - DNA, 55 bp, Artificial; identical to SEQ ID NO: 148849
  Synthetic oligonucleotide

SEQ ID NO: 621824 - DNA, 53 bp, Artificial; identical to SEQ ID NO: 219553
  Synthetic oligonucleotide

SEQ ID NO: 621825 - DNA, 53 bp, Artificial; identical to SEQ ID NO: 222710
  Synthetic oligonucleotide

SEQ ID NO: 621826 - DNA, 60 bp, Artificial; identical to SEQ ID NO: 199015
  Synthetic oligonucleotide

SEQ ID NO: 621827 - DNA, 53 bp, Artificial; identical to SEQ ID NO: 245532
  Synthetic oligonucleotide

SEQ ID NO: 621828 - DNA, 60 bp, Artificial; identical to SEQ ID NO: 171284
  Synthetic oligonucleotide

SEQ ID NO: 621829 - DNA, 59 bp, Artificial; identical to SEQ ID NO: 159935
  Synthetic oligonucleotide

SEQ ID NO: 621830 - DNA, 54 bp, Artificial; identical to SEQ ID NO: 202455
  Synthetic oligonucleotide

SEQ ID NO: 621831 - DNA, 56 bp, Artificial; identical to SEQ ID NO: 194109
  Synthetic oligonucleotide

SEQ ID NO: 621832 - DNA, 57 bp, Artificial; identical to SEQ ID NO: 187370
  Synthetic oligonucleotide

SEQ ID NO: 621833 - DNA, 55 bp, Artificial; identical to SEQ ID NO: 148862
  Synthetic oligonucleotide

SEQ ID NO: 621834 - DNA, 60 bp, Artificial; identical to SEQ ID NO: 144628
  Synthetic oligonucleotide

SEQ ID NO: 621835 - DNA, 55 bp, Artificial; identical to SEQ ID NO: 249164
  Synthetic oligonucleotide

SEQ ID NO: 621836 - DNA, 55 bp, Artificial; identical to SEQ ID NO: 245592
  Synthetic oligonucleotide

SEQ ID NO: 621837 - DNA, 55 bp, Artificial; identical to SEQ ID NO: 224874
  Synthetic oligonucleotide

SEQ ID NO: 621838 - DNA, 55 bp, Artificial; identical to SEQ ID NO: 180970
  Synthetic oligonucleotide

SEQ ID NO: 621839 - DNA, 60 bp, Artificial; identical to SEQ ID NO: 254778
  Synthetic oligonucleotide

SEQ ID NO: 621840 - DNA, 52 bp, Artificial; identical to SEQ ID NO: 221741
  Synthetic oligonucleotide

SEQ ID NO: 621841 - DNA, 54 bp, Artificial; identical to SEQ ID NO: 265634
  Synthetic oligonucleotide

SEQ ID NO: 621842 - DNA, 60 bp, Artificial; identical to SEQ ID NO: 223950
  Synthetic oligonucleotide

SEQ ID NO: 621843 - DNA, 55 bp, Artificial; identical to SEQ ID NO: 180973
  Synthetic oligonucleotide

SEQ ID NO: 621844 - DNA, 55 bp, Artificial; identical to SEQ ID NO: 142404
  Synthetic oligonucleotide

SEQ ID NO: 621845 - DNA, 56 bp, Artificial; identical to SEQ ID NO: 179325
  Synthetic oligonucleotide

SEQ ID NO: 621846 - DNA, 60 bp, Artificial; identical to SEQ ID NO: 179461
  Synthetic oligonucleotide

SEQ ID NO: 621847 - DNA, 60 bp, Artificial; identical to SEQ ID NO: 245554
  Synthetic oligonucleotide

SEQ ID NO: 621848 - DNA, 54 bp, Artificial; identical to SEQ ID NO: 246083
  Synthetic oligonucleotide

SEQ ID NO: 621849 - DNA, 58 bp, Artificial; identical to SEQ ID NO: 150723
  Synthetic oligonucleotide

SEQ ID NO: 621850 - DNA, 55 bp, Artificial; identical to SEQ ID NO: 166860
  Synthetic oligonucleotide

SEQ ID NO: 621851 - DNA, 53 bp, Artificial; identical to SEQ ID NO: 261882
  Synthetic oligonucleotide

SEQ ID NO: 621852 - DNA, 52 bp, Artificial; identical to SEQ ID NO: 199891
  Synthetic oligonucleotide

SEQ ID NO: 621853 - DNA, 48 bp, Artificial; identical to SEQ ID NO: 211375
  Synthetic oligonucleotide

SEQ ID NO: 621854 - DNA, 55 bp, Artificial; identical to SEQ ID NO: 242715
  Synthetic oligonucleotide

SEQ ID NO: 621855 - DNA, 58 bp, Artificial; identical to SEQ ID NO: 258902
  Synthetic oligonucleotide

SEQ ID NO: 621856 - DNA, 55 bp, Artificial; identical to SEQ ID NO: 241781
  Synthetic oligonucleotide

SEQ ID NO: 621857 - DNA, 57 bp, Artificial; identical to SEQ ID NO: 151733
  Synthetic oligonucleotide

SEQ ID NO: 621858 - DNA, 55 bp, Artificial; identical to SEQ ID NO: 245545
  Synthetic oligonucleotide

SEQ ID NO: 621859 - DNA, 55 bp, Artificial; identical to SEQ ID NO: 257852
  Synthetic oligonucleotide

SEQ ID NO: 621860 - DNA, 58 bp, Artificial; identical to SEQ ID NO: 254789
  Synthetic oligonucleotide

SEQ ID NO: 621861 - DNA, 56 bp, Artificial; identical to SEQ ID NO: 241780
  Synthetic oligonucleotide

SEQ ID NO: 621862 - DNA, 52 bp, Artificial; identical to SEQ ID NO: 171678
  Synthetic oligonucleotide

SEQ ID NO: 621863 - DNA, 51 bp, Artificial; identical to SEQ ID NO: 165268
  Synthetic oligonucleotide

SEQ ID NO: 621864 - DNA, 58 bp, Artificial; identical to SEQ ID NO: 239345
  Synthetic oligonucleotide

SEQ ID NO: 621865 - DNA, 56 bp, Artificial; identical to SEQ ID NO: 257513
  Synthetic oligonucleotide

SEQ ID NO: 621866 - DNA, 54 bp, Artificial; identical to SEQ ID NO: 185428
  Synthetic oligonucleotide

SEQ ID NO: 621867 - DNA, 53 bp, Artificial; identical to SEQ ID NO: 225227
  Synthetic oligonucleotide

SEQ ID NO: 621868 - DNA, 56 bp, Artificial; identical to SEQ ID NO: 179996
  Synthetic oligonucleotide

SEQ ID NO: 621869 - DNA, 60 bp, Artificial; identical to SEQ ID NO: 266053
  Synthetic oligonucleotide

SEQ ID NO: 621870 - DNA, 60 bp, Artificial; identical to SEQ ID NO: 243833
  Synthetic oligonucleotide

SEQ ID NO: 621871 - DNA, 55 bp, Artificial; identical to SEQ ID NO: 224876
  Synthetic oligonucleotide

SEQ ID NO: 621872 - DNA, 60 bp, Artificial; identical to SEQ ID NO: 254800
  Synthetic oligonucleotide

SEQ ID NO: 621873 - DNA, 58 bp, Artificial; identical to SEQ ID NO: 150712
  Synthetic oligonucleotide

SEQ ID NO: 621874 - DNA, 60 bp, Artificial; identical to SEQ ID NO: 150701
  Synthetic oligonucleotide

SEQ ID NO: 621875 - DNA, 55 bp, Artificial; identical to SEQ ID NO: 160183
  Synthetic oligonucleotide

SEQ ID NO: 621876 - DNA, 55 bp, Artificial; identical to SEQ ID NO: 156739
  Synthetic oligonucleotide

SEQ ID NO: 621877 - DNA, 55 bp, Artificial; identical to SEQ ID NO: 151662
  Synthetic oligonucleotide

SEQ ID NO: 621878 - DNA, 60 bp, Artificial; identical to SEQ ID NO: 174680
  Synthetic oligonucleotide

SEQ ID NO: 621879 - DNA, 55 bp, Artificial; identical to SEQ ID NO: 168731
  Synthetic oligonucleotide

SEQ ID NO: 621880 - DNA, 58 bp, Artificial; identical to SEQ ID NO: 241779
  Synthetic oligonucleotide

SEQ ID NO: 621881 - DNA, 53 bp, Artificial; identical to SEQ ID NO: 258093
  Synthetic oligonucleotide

SEQ ID NO: 621882 - DNA, 53 bp, Artificial; identical to SEQ ID NO: 192066
  Synthetic oligonucleotide

SEQ ID NO: 621883 - DNA, 54 bp, Artificial; identical to SEQ ID NO: 143794
  Synthetic oligonucleotide

SEQ ID NO: 621884 - DNA, 55 bp, Artificial; identical to SEQ ID NO: 164481
  Synthetic oligonucleotide

SEQ ID NO: 621885 - DNA, 55 bp, Artificial; identical to SEQ ID NO: 203629
  Synthetic oligonucleotide

SEQ ID NO: 621886 - DNA, 54 bp, Artificial; identical to SEQ ID NO: 185390
  Synthetic oligonucleotide

SEQ ID NO: 621887 - DNA, 58 bp, Artificial; identical to SEQ ID NO: 203314
  Synthetic oligonucleotide

SEQ ID NO: 621888 - DNA, 54 bp, Artificial; identical to SEQ ID NO: 142615
  Synthetic oligonucleotide

SEQ ID NO: 621889 - DNA, 51 bp, Artificial; identical to SEQ ID NO: 200057
  Synthetic oligonucleotide

SEQ ID NO: 621890 - DNA, 55 bp, Artificial; identical to SEQ ID NO: 245232
  Synthetic oligonucleotide

SEQ ID NO: 621891 - DNA, 55 bp, Artificial; identical to SEQ ID NO: 203303
  Synthetic oligonucleotide

SEQ ID NO: 621892 - DNA, 55 bp, Artificial; identical to SEQ ID NO: 180851
  Synthetic oligonucleotide

SEQ ID NO: 621893 - DNA, 53 bp, Artificial; identical to SEQ ID NO: 185803
  Synthetic oligonucleotide

SEQ ID NO: 621894 - DNA, 58 bp, Artificial; identical to SEQ ID NO: 171295
  Synthetic oligonucleotide

SEQ ID NO: 621895 - DNA, 58 bp, Artificial; identical to SEQ ID NO: 151755
  Synthetic oligonucleotide

SEQ ID NO: 621896 - DNA, 60 bp, Artificial; identical to SEQ ID NO: 171306
  Synthetic oligonucleotide

SEQ ID NO: 621897 - DNA, 55 bp, Artificial; identical to SEQ ID NO: 266678
  Synthetic oligonucleotide

SEQ ID NO: 621898 - DNA, 58 bp, Artificial; identical to SEQ ID NO: 180193
  Synthetic oligonucleotide

SEQ ID NO: 621899 - DNA, 51 bp, Artificial; identical to SEQ ID NO: 141315
  Synthetic oligonucleotide

SEQ ID NO: 621900 - DNA, 50 bp, Artificial; identical to SEQ ID NO: 165371
  Synthetic oligonucleotide

SEQ ID NO: 621901 - DNA, 54 bp, Artificial; identical to SEQ ID NO: 208084
  Synthetic oligonucleotide

SEQ ID NO: 621902 - DNA, 57 bp, Artificial; identical to SEQ ID NO: 150690
  Synthetic oligonucleotide

SEQ ID NO: 621903 - DNA, 50 bp, Artificial; identical to SEQ ID NO: 246804
  Synthetic oligonucleotide

SEQ ID NO: 621904 - DNA, 55 bp, Artificial; identical to SEQ ID NO: 155398
  Synthetic oligonucleotide

SEQ ID NO: 621905 - DNA, 52 bp, Artificial; identical to SEQ ID NO: 185992
  Synthetic oligonucleotide

SEQ ID NO: 621906 - DNA, 55 bp, Artificial; identical to SEQ ID NO: 161776
  Synthetic oligonucleotide

SEQ ID NO: 621907 - DNA, 55 bp, Artificial; identical to SEQ ID NO: 173635
  Synthetic oligonucleotide

SEQ ID NO: 621908 - DNA, 55 bp, Artificial; identical to SEQ ID NO: 249165
  Synthetic oligonucleotide

SEQ ID NO: 621909 - DNA, 60 bp, Artificial; identical to SEQ ID NO: 211191
  Synthetic oligonucleotide

SEQ ID NO: 621910 - DNA, 57 bp, Artificial; identical to SEQ ID NO: 201192
  Synthetic oligonucleotide

SEQ ID NO: 621911 - DNA, 51 bp, Artificial; identical to SEQ ID NO: 154665
  Synthetic oligonucleotide

SEQ ID NO: 621912 - DNA, 51 bp, Artificial; identical to SEQ ID NO: 237166
  Synthetic oligonucleotide

SEQ ID NO: 621913 - DNA, 54 bp, Artificial; identical to SEQ ID NO: 243830
  Synthetic oligonucleotide

SEQ ID NO: 621914 - DNA, 57 bp, Artificial; identical to SEQ ID NO: 168179
  Synthetic oligonucleotide

SEQ ID NO: 621915 - DNA, 55 bp, Artificial; identical to SEQ ID NO: 168718
  Synthetic oligonucleotide

SEQ ID NO: 621916 - DNA, 55 bp, Artificial; identical to SEQ ID NO: 164480
  Synthetic oligonucleotide

SEQ ID NO: 621917 - DNA, 55 bp, Artificial; identical to SEQ ID NO: 199097
  Synthetic oligonucleotide

SEQ ID NO: 621918 - DNA, 57 bp, Artificial; identical to SEQ ID NO: 212519
  Synthetic oligonucleotide

SEQ ID NO: 621919 - DNA, 55 bp, Artificial; identical to SEQ ID NO: 172785
  Synthetic oligonucleotide

SEQ ID NO: 621920 - DNA, 60 bp, Artificial; identical to SEQ ID NO: 150679
  Synthetic oligonucleotide

SEQ ID NO: 621921 - DNA, 57 bp, Artificial; identical to SEQ ID NO: 180249
  Synthetic oligonucleotide

SEQ ID NO: 621922 - DNA, 55 bp, Artificial; identical to SEQ ID NO: 260188
  Synthetic oligonucleotide

SEQ ID NO: 621923 - DNA, 56 bp, Artificial; identical to SEQ ID NO: 150668
  Synthetic oligonucleotide

SEQ ID NO: 621924 - DNA, 55 bp, Artificial; identical to SEQ ID NO: 199096
  Synthetic oligonucleotide

SEQ ID NO: 621925 - DNA, 55 bp, Artificial; identical to SEQ ID NO: 156747
  Synthetic oligonucleotide

SEQ ID NO: 621926 - DNA, 60 bp, Artificial; identical to SEQ ID NO: 164267
  Synthetic oligonucleotide

SEQ ID NO: 621927 - DNA, 53 bp, Artificial; identical to SEQ ID NO: 240760
  Synthetic oligonucleotide

SEQ ID NO: 621928 - DNA, 55 bp, Artificial; identical to SEQ ID NO: 180861
  Synthetic oligonucleotide

SEQ ID NO: 621929 - DNA, 54 bp, Artificial; identical to SEQ ID NO: 206922
  Synthetic oligonucleotide

SEQ ID NO: 621930 - DNA, 54 bp, Artificial; identical to SEQ ID NO: 185373
  Synthetic oligonucleotide

SEQ ID NO: 621931 - DNA, 55 bp, Artificial; identical to SEQ ID NO: 199095
  Synthetic oligonucleotide

SEQ ID NO: 621932 - DNA, 55 bp, Artificial; identical to SEQ ID NO: 211337
  Synthetic oligonucleotide

SEQ ID NO: 621933 - DNA, 52 bp, Artificial; identical to SEQ ID NO: 149652
  Synthetic oligonucleotide

SEQ ID NO: 621934 - DNA, 60 bp, Artificial; identical to SEQ ID NO: 153454
  Synthetic oligonucleotide

SEQ ID NO: 621935 - DNA, 51 bp, Artificial; identical to SEQ ID NO: 145054
  Synthetic oligonucleotide

SEQ ID NO: 621936 - DNA, 53 bp, Artificial; identical to SEQ ID NO: 185420
  Synthetic oligonucleotide

SEQ ID NO: 621937 - DNA, 51 bp, Artificial; identical to SEQ ID NO: 241147
  Synthetic oligonucleotide

SEQ ID NO: 621938 - DNA, 50 bp, Artificial; identical to SEQ ID NO: 176362
  Synthetic oligonucleotide

SEQ ID NO: 621939 - DNA, 54 bp, Artificial; identical to SEQ ID NO: 149167
  Synthetic oligonucleotide

SEQ ID NO: 621940 - DNA, 52 bp, Artificial; identical to SEQ ID NO: 237076
  Synthetic oligonucleotide

SEQ ID NO: 621941 - DNA, 53 bp, Artificial; identical to SEQ ID NO: 168935
  Synthetic oligonucleotide

SEQ ID NO: 621942 - DNA, 55 bp, Artificial; identical to SEQ ID NO: 217829
  Synthetic oligonucleotide

SEQ ID NO: 621943 - DNA, 50 bp, Artificial; identical to SEQ ID NO: 243433
  Synthetic oligonucleotide

SEQ ID NO: 621944 - DNA, 57 bp, Artificial; identical to SEQ ID NO: 171317
  Synthetic oligonucleotide

SEQ ID NO: 621945 - DNA, 53 bp, Artificial; identical to SEQ ID NO: 164971
  Synthetic oligonucleotide

SEQ ID NO: 621946 - DNA, 51 bp, Artificial; identical to SEQ ID NO: 149817
  Synthetic oligonucleotide

SEQ ID NO: 621947 - DNA, 55 bp, Artificial; identical to SEQ ID NO: 187779
  Synthetic oligonucleotide

SEQ ID NO: 621948 - DNA, 55 bp, Artificial; identical to SEQ ID NO: 156788
  Synthetic oligonucleotide

SEQ ID NO: 621949 - DNA, 54 bp, Artificial; identical to SEQ ID NO: 217801
  Synthetic oligonucleotide

SEQ ID NO: 621950 - DNA, 54 bp, Artificial; identical to SEQ ID NO: 225509
  Synthetic oligonucleotide

SEQ ID NO: 621951 - DNA, 60 bp, Artificial; identical to SEQ ID NO: 243753
  Synthetic oligonucleotide

SEQ ID NO: 621952 - DNA, 60 bp, Artificial; identical to SEQ ID NO: 175079
  Synthetic oligonucleotide

SEQ ID NO: 621953 - DNA, 51 bp, Artificial; identical to SEQ ID NO: 241772
  Synthetic oligonucleotide

SEQ ID NO: 621954 - DNA, 60 bp, Artificial; identical to SEQ ID NO: 180383
  Synthetic oligonucleotide

SEQ ID NO: 621955 - DNA, 56 bp, Artificial; identical to SEQ ID NO: 241771
  Synthetic oligonucleotide

SEQ ID NO: 621956 - DNA, 59 bp, Artificial; identical to SEQ ID NO: 160452
  Synthetic oligonucleotide

SEQ ID NO: 621957 - DNA, 54 bp, Artificial; identical to SEQ ID NO: 241769
  Synthetic oligonucleotide

SEQ ID NO: 621958 - DNA, 55 bp, Artificial; identical to SEQ ID NO: 199094
  Synthetic oligonucleotide

SEQ ID NO: 621959 - DNA, 56 bp, Artificial; identical to SEQ ID NO: 241768
  Synthetic oligonucleotide

SEQ ID NO: 621960 - DNA, 54 bp, Artificial; identical to SEQ ID NO: 207704
  Synthetic oligonucleotide

SEQ ID NO: 621961 - DNA, 53 bp, Artificial; identical to SEQ ID NO: 157433
  Synthetic oligonucleotide

SEQ ID NO: 621962 - DNA, 56 bp, Artificial; identical to SEQ ID NO: 241767
  Synthetic oligonucleotide

SEQ ID NO: 621963 - DNA, 52 bp, Artificial; identical to SEQ ID NO: 253162
  Synthetic oligonucleotide

SEQ ID NO: 621964 - DNA, 53 bp, Artificial; identical to SEQ ID NO: 202428
  Synthetic oligonucleotide

SEQ ID NO: 621965 - DNA, 55 bp, Artificial; identical to SEQ ID NO: 245599
  Synthetic oligonucleotide

SEQ ID NO: 621966 - DNA, 53 bp, Artificial; identical to SEQ ID NO: 243158
  Synthetic oligonucleotide

SEQ ID NO: 621967 - DNA, 55 bp, Artificial; identical to SEQ ID NO: 202193
  Synthetic oligonucleotide

SEQ ID NO: 621968 - DNA, 50 bp, Artificial; identical to SEQ ID NO: 180405
  Synthetic oligonucleotide

SEQ ID NO: 621969 - DNA, 56 bp, Artificial; identical to SEQ ID NO: 245610
  Synthetic oligonucleotide

SEQ ID NO: 621970 - DNA, 54 bp, Artificial; identical to SEQ ID NO: 245621
  Synthetic oligonucleotide

SEQ ID NO: 621971 - DNA, 51 bp, Artificial; identical to SEQ ID NO: 152106
  Synthetic oligonucleotide

SEQ ID NO: 621972 - DNA, 51 bp, Artificial; identical to SEQ ID NO: 160533
  Synthetic oligonucleotide

SEQ ID NO: 621973 - DNA, 53 bp, Artificial; identical to SEQ ID NO: 243148
  Synthetic oligonucleotide

SEQ ID NO: 621974 - DNA, 54 bp, Artificial; identical to SEQ ID NO: 142511
  Synthetic oligonucleotide

SEQ ID NO: 621975 - DNA, 55 bp, Artificial; identical to SEQ ID NO: 164479
  Synthetic oligonucleotide

SEQ ID NO: 621976 - DNA, 57 bp, Artificial; identical to SEQ ID NO: 241766
  Synthetic oligonucleotide

SEQ ID NO: 621977 - DNA, 52 bp, Artificial; identical to SEQ ID NO: 180439
  Synthetic oligonucleotide

SEQ ID NO: 621978 - DNA, 52 bp, Artificial; identical to SEQ ID NO: 197589
  Synthetic oligonucleotide

SEQ ID NO: 621979 - DNA, 53 bp, Artificial; identical to SEQ ID NO: 245632
  Synthetic oligonucleotide

SEQ ID NO: 621980 - DNA, 53 bp, Artificial; identical to SEQ ID NO: 188138
  Synthetic oligonucleotide

SEQ ID NO: 621981 - DNA, 50 bp, Artificial; identical to SEQ ID NO: 192222
  Synthetic oligonucleotide

SEQ ID NO: 621982 - DNA, 53 bp, Artificial; identical to SEQ ID NO: 202489
  Synthetic oligonucleotide

SEQ ID NO: 621983 - DNA, 55 bp, Artificial; identical to SEQ ID NO: 241765
  Synthetic oligonucleotide

SEQ ID NO: 621984 - DNA, 52 bp, Artificial; identical to SEQ ID NO: 206889
  Synthetic oligonucleotide

SEQ ID NO: 621985 - DNA, 60 bp, Artificial; identical to SEQ ID NO: 243752
  Synthetic oligonucleotide

SEQ ID NO: 621986 - DNA, 52 bp, Artificial; identical to SEQ ID NO: 161288
  Synthetic oligonucleotide

SEQ ID NO: 621987 - DNA, 55 bp, Artificial; identical to SEQ ID NO: 148823
  Synthetic oligonucleotide

SEQ ID NO: 621988 - DNA, 51 bp, Artificial; identical to SEQ ID NO: 186591
  Synthetic oligonucleotide

SEQ ID NO: 621989 - DNA, 55 bp, Artificial; identical to SEQ ID NO: 194752
  Synthetic oligonucleotide

SEQ ID NO: 621990 - DNA, 51 bp, Artificial; identical to SEQ ID NO: 186594
  Synthetic oligonucleotide

SEQ ID NO: 621991 - DNA, 56 bp, Artificial; identical to SEQ ID NO: 248653
  Synthetic oligonucleotide

SEQ ID NO: 621992 - DNA, 57 bp, Artificial; identical to SEQ ID NO: 147224
  Synthetic oligonucleotide

SEQ ID NO: 621993 - DNA, 51 bp, Artificial; identical to SEQ ID NO: 142642
  Synthetic oligonucleotide

SEQ ID NO: 621994 - DNA, 53 bp, Artificial; identical to SEQ ID NO: 205676
  Synthetic oligonucleotide

SEQ ID NO: 621995 - DNA, 51 bp, Artificial; identical to SEQ ID NO: 141913
  Synthetic oligonucleotide

SEQ ID NO: 621996 - DNA, 55 bp, Artificial; identical to SEQ ID NO: 180835
  Synthetic oligonucleotide

SEQ ID NO: 621997 - DNA, 60 bp, Artificial; identical to SEQ ID NO: 243751
  Synthetic oligonucleotide

SEQ ID NO: 621998 - DNA, 54 bp, Artificial; identical to SEQ ID NO: 216568
  Synthetic oligonucleotide

SEQ ID NO: 621999 - DNA, 51 bp, Artificial; identical to SEQ ID NO: 243355
  Synthetic oligonucleotide

SEQ ID NO: 622000 - DNA, 52 bp, Artificial; identical to SEQ ID NO: 247981
  Synthetic oligonucleotide

SEQ ID NO: 622001 - DNA, 60 bp, Artificial; identical to SEQ ID NO: 141882
  Synthetic oligonucleotide

SEQ ID NO: 622002 - DNA, 60 bp, Artificial; identical to SEQ ID NO: 245654
  Synthetic oligonucleotide

SEQ ID NO: 622003 - DNA, 54 bp, Artificial; identical to SEQ ID NO: 185395
  Synthetic oligonucleotide

SEQ ID NO: 622004 - DNA, 56 bp, Artificial; identical to SEQ ID NO: 194106
  Synthetic oligonucleotide

SEQ ID NO: 622005 - DNA, 54 bp, Artificial; identical to SEQ ID NO: 185394
  Synthetic oligonucleotide

SEQ ID NO: 622006 - DNA, 52 bp, Artificial; identical to SEQ ID NO: 155556
  Synthetic oligonucleotide

SEQ ID NO: 622007 - DNA, 60 bp, Artificial; identical to SEQ ID NO: 245054
  Synthetic oligonucleotide

SEQ ID NO: 622008 - DNA, 55 bp, Artificial; identical to SEQ ID NO: 254638
  Synthetic oligonucleotide

SEQ ID NO: 622009 - DNA, 50 bp, Artificial; identical to SEQ ID NO: 210511
  Synthetic oligonucleotide

SEQ ID NO: 622010 - DNA, 51 bp, Artificial; identical to SEQ ID NO: 200018
  Synthetic oligonucleotide

SEQ ID NO: 622011 - DNA, 50 bp, Artificial; identical to SEQ ID NO: 242463
  Synthetic oligonucleotide

SEQ ID NO: 622012 - DNA, 55 bp, Artificial; identical to SEQ ID NO: 216395
  Synthetic oligonucleotide

SEQ ID NO: 622013 - DNA, 55 bp, Artificial; identical to SEQ ID NO: 187783
  Synthetic oligonucleotide

SEQ ID NO: 622014 - DNA, 55 bp, Artificial; identical to SEQ ID NO: 156790
  Synthetic oligonucleotide

SEQ ID NO: 622015 - DNA, 56 bp, Artificial; identical to SEQ ID NO: 245065
  Synthetic oligonucleotide

SEQ ID NO: 622016 - DNA, 60 bp, Artificial; identical to SEQ ID NO: 192236
  Synthetic oligonucleotide

SEQ ID NO: 622017 - DNA, 55 bp, Artificial; identical to SEQ ID NO: 180890
  Synthetic oligonucleotide

SEQ ID NO: 622018 - DNA, 55 bp, Artificial; identical to SEQ ID NO: 180892
  Synthetic oligonucleotide

SEQ ID NO: 622019 - DNA, 53 bp, Artificial; identical to SEQ ID NO: 198982
  Synthetic oligonucleotide

SEQ ID NO: 622020 - DNA, 55 bp, Artificial; identical to SEQ ID NO: 180895
  Synthetic oligonucleotide

SEQ ID NO: 622021 - DNA, 58 bp, Artificial; identical to SEQ ID NO: 198971
  Synthetic oligonucleotide

SEQ ID NO: 622022 - DNA, 54 bp, Artificial; identical to SEQ ID NO: 161037
  Synthetic oligonucleotide

SEQ ID NO: 622023 - DNA, 57 bp, Artificial; identical to SEQ ID NO: 142713
  Synthetic oligonucleotide

SEQ ID NO: 622024 - DNA, 53 bp, Artificial; identical to SEQ ID NO: 240757
  Synthetic oligonucleotide

SEQ ID NO: 622025 - DNA, 55 bp, Artificial; identical to SEQ ID NO: 217823
  Synthetic oligonucleotide

SEQ ID NO: 622026 - DNA, 60 bp, Artificial; identical to SEQ ID NO: 198960
  Synthetic oligonucleotide

SEQ ID NO: 622027 - DNA, 51 bp, Artificial; identical to SEQ ID NO: 188537
  Synthetic oligonucleotide

SEQ ID NO: 622028 - DNA, 51 bp, Artificial; identical to SEQ ID NO: 243357
  Synthetic oligonucleotide

SEQ ID NO: 622029 - DNA, 60 bp, Artificial; identical to SEQ ID NO: 237459
  Synthetic oligonucleotide

SEQ ID NO: 622030 - DNA, 49 bp, Artificial; identical to SEQ ID NO: 199393
  Synthetic oligonucleotide

SEQ ID NO: 622031 - DNA, 51 bp, Artificial; identical to SEQ ID NO: 160182
  Synthetic oligonucleotide

SEQ ID NO: 622032 - DNA, 59 bp, Artificial; identical to SEQ ID NO: 239169
  Synthetic oligonucleotide

SEQ ID NO: 622033 - DNA, 56 bp, Artificial; identical to SEQ ID NO: 179803
  Synthetic oligonucleotide

SEQ ID NO: 622034 - DNA, 55 bp, Artificial; identical to SEQ ID NO: 159937
  Synthetic oligonucleotide

SEQ ID NO: 622035 - DNA, 58 bp, Artificial; identical to SEQ ID NO: 199381
  Synthetic oligonucleotide

SEQ ID NO: 622036 - DNA, 52 bp, Artificial; identical to SEQ ID NO: 202990
  Synthetic oligonucleotide

SEQ ID NO: 622037 - DNA, 54 bp, Artificial; identical to SEQ ID NO: 192043
  Synthetic oligonucleotide

SEQ ID NO: 622038 - DNA, 50 bp, Artificial; identical to SEQ ID NO: 158275
  Synthetic oligonucleotide

SEQ ID NO: 622039 - DNA, 60 bp, Artificial; identical to SEQ ID NO: 202748
  Synthetic oligonucleotide

SEQ ID NO: 622040 - DNA, 60 bp, Artificial; identical to SEQ ID NO: 199370
  Synthetic oligonucleotide

SEQ ID NO: 622041 - DNA, 53 bp, Artificial; identical to SEQ ID NO: 188163
  Synthetic oligonucleotide

SEQ ID NO: 622042 - DNA, 54 bp, Artificial; identical to SEQ ID NO: 185421
  Synthetic oligonucleotide

SEQ ID NO: 622043 - DNA, 52 bp, Artificial; identical to SEQ ID NO: 169001
  Synthetic oligonucleotide

SEQ ID NO: 622044 - DNA, 52 bp, Artificial; identical to SEQ ID NO: 218357
  Synthetic oligonucleotide

SEQ ID NO: 622045 - DNA, 52 bp, Artificial; identical to SEQ ID NO: 142609
  Synthetic oligonucleotide

SEQ ID NO: 622046 - DNA, 60 bp, Artificial; identical to SEQ ID NO: 194105
  Synthetic oligonucleotide

SEQ ID NO: 622047 - DNA, 60 bp, Artificial; identical to SEQ ID NO: 242522
  Synthetic oligonucleotide

SEQ ID NO: 622048 - DNA, 56 bp, Artificial; identical to SEQ ID NO: 224353
  Synthetic oligonucleotide

SEQ ID NO: 622049 - DNA, 60 bp, Artificial; identical to SEQ ID NO: 180082
  Synthetic oligonucleotide

SEQ ID NO: 622050 - DNA, 59 bp, Artificial; identical to SEQ ID NO: 179391
  Synthetic oligonucleotide

SEQ ID NO: 622051 - DNA, 55 bp, Artificial; identical to SEQ ID NO: 242701
  Synthetic oligonucleotide

SEQ ID NO: 622052 - DNA, 55 bp, Artificial; identical to SEQ ID NO: 242699
  Synthetic oligonucleotide

SEQ ID NO: 622053 - DNA, 57 bp, Artificial; identical to SEQ ID NO: 164245
  Synthetic oligonucleotide

SEQ ID NO: 622054 - DNA, 58 bp, Artificial; identical to SEQ ID NO: 180105
  Synthetic oligonucleotide

SEQ ID NO: 622055 - DNA, 57 bp, Artificial; identical to SEQ ID NO: 180116
  Synthetic oligonucleotide

SEQ ID NO: 622056 - DNA, 55 bp, Artificial; identical to SEQ ID NO: 199090
  Synthetic oligonucleotide

SEQ ID NO: 622057 - DNA, 60 bp, Artificial; identical to SEQ ID NO: 243745
  Synthetic oligonucleotide

SEQ ID NO: 622058 - DNA, 53 bp, Artificial; identical to SEQ ID NO: 188822
  Synthetic oligonucleotide

SEQ ID NO: 622059 - DNA, 57 bp, Artificial; identical to SEQ ID NO: 243742
  Synthetic oligonucleotide

SEQ ID NO: 622060 - DNA, 55 bp, Artificial; identical to SEQ ID NO: 148833
  Synthetic oligonucleotide

SEQ ID NO: 622061 - DNA, 55 bp, Artificial; identical to SEQ ID NO: 180904
  Synthetic oligonucleotide

SEQ ID NO: 622062 - DNA, 60 bp, Artificial; identical to SEQ ID NO: 243741
  Synthetic oligonucleotide

SEQ ID NO: 622063 - DNA, 58 bp, Artificial; identical to SEQ ID NO: 243740
  Synthetic oligonucleotide

SEQ ID NO: 622064 - DNA, 55 bp, Artificial; identical to SEQ ID NO: 180906
  Synthetic oligonucleotide

SEQ ID NO: 622065 - DNA, 53 bp, Artificial; identical to SEQ ID NO: 192072
  Synthetic oligonucleotide

SEQ ID NO: 622066 - DNA, 55 bp, Artificial; identical to SEQ ID NO: 199089
  Synthetic oligonucleotide

SEQ ID NO: 622067 - DNA, 55 bp, Artificial; identical to SEQ ID NO: 240538
  Synthetic oligonucleotide

SEQ ID NO: 622068 - DNA, 55 bp, Artificial; identical to SEQ ID NO: 166843
  Synthetic oligonucleotide

SEQ ID NO: 622069 - DNA, 60 bp, Artificial; identical to SEQ ID NO: 187772
  Synthetic oligonucleotide

SEQ ID NO: 622070 - DNA, 60 bp, Artificial; identical to SEQ ID NO: 199348
  Synthetic oligonucleotide

SEQ ID NO: 622071 - DNA, 59 bp, Artificial; identical to SEQ ID NO: 203292
  Synthetic oligonucleotide

SEQ ID NO: 622072 - DNA, 55 bp, Artificial; identical to SEQ ID NO: 241757
  Synthetic oligonucleotide

SEQ ID NO: 622073 - DNA, 60 bp, Artificial; identical to SEQ ID NO: 245087
  Synthetic oligonucleotide

SEQ ID NO: 622074 - DNA, 59 bp, Artificial; identical to SEQ ID NO: 180160
  Synthetic oligonucleotide

SEQ ID NO: 622075 - DNA, 54 bp, Artificial; identical to SEQ ID NO: 216576
  Synthetic oligonucleotide

SEQ ID NO: 622076 - DNA, 50 bp, Artificial; identical to SEQ ID NO: 180182
  Synthetic oligonucleotide

SEQ ID NO: 622077 - DNA, 55 bp, Artificial; identical to SEQ ID NO: 180910
  Synthetic oligonucleotide

SEQ ID NO: 622078 - DNA, 55 bp, Artificial; identical to SEQ ID NO: 208189
  Synthetic oligonucleotide

SEQ ID NO: 622079 - DNA, 52 bp, Artificial; identical to SEQ ID NO: 186019
  Synthetic oligonucleotide

SEQ ID NO: 622080 - DNA, 55 bp, Artificial; identical to SEQ ID NO: 180868
  Synthetic oligonucleotide

SEQ ID NO: 622081 - DNA, 60 bp, Artificial; identical to SEQ ID NO: 150612
  Synthetic oligonucleotide

SEQ ID NO: 622082 - DNA, 51 bp, Artificial; identical to SEQ ID NO: 233872
  Synthetic oligonucleotide

SEQ ID NO: 622083 - DNA, 60 bp, Artificial; identical to SEQ ID NO: 187761
  Synthetic oligonucleotide

SEQ ID NO: 622084 - DNA, 55 bp, Artificial; identical to SEQ ID NO: 191874
  Synthetic oligonucleotide

SEQ ID NO: 622085 - DNA, 55 bp, Artificial; identical to SEQ ID NO: 211340
  Synthetic oligonucleotide

SEQ ID NO: 622086 - DNA, 56 bp, Artificial; identical to SEQ ID NO: 180009
  Synthetic oligonucleotide

SEQ ID NO: 622087 - DNA, 60 bp, Artificial; identical to SEQ ID NO: 160475
  Synthetic oligonucleotide

SEQ ID NO: 622088 - DNA, 54 bp, Artificial; identical to SEQ ID NO: 185388
  Synthetic oligonucleotide

SEQ ID NO: 622089 - DNA, 59 bp, Artificial; identical to SEQ ID NO: 178561
  Synthetic oligonucleotide

SEQ ID NO: 622090 - DNA, 53 bp, Artificial; identical to SEQ ID NO: 212995
  Synthetic oligonucleotide

SEQ ID NO: 622091 - DNA, 60 bp, Artificial; identical to SEQ ID NO: 178572
  Synthetic oligonucleotide

SEQ ID NO: 622092 - DNA, 60 bp, Artificial; identical to SEQ ID NO: 191053
  Synthetic oligonucleotide

SEQ ID NO: 622093 - DNA, 53 bp, Artificial; identical to SEQ ID NO: 164952
  Synthetic oligonucleotide

SEQ ID NO: 622094 - DNA, 57 bp, Artificial; identical to SEQ ID NO: 247545
  Synthetic oligonucleotide

SEQ ID NO: 622095 - DNA, 57 bp, Artificial; identical to SEQ ID NO: 147228
  Synthetic oligonucleotide

SEQ ID NO: 622096 - DNA, 55 bp, Artificial; identical to SEQ ID NO: 191875
  Synthetic oligonucleotide

SEQ ID NO: 622097 - DNA, 55 bp, Artificial; identical to SEQ ID NO: 148840
  Synthetic oligonucleotide

SEQ ID NO: 622098 - DNA, 55 bp, Artificial; identical to SEQ ID NO: 144841
  Synthetic oligonucleotide

SEQ ID NO: 622099 - DNA, 58 bp, Artificial; identical to SEQ ID NO: 142702
  Synthetic oligonucleotide

SEQ ID NO: 622100 - DNA, 55 bp, Artificial; identical to SEQ ID NO: 180877
  Synthetic oligonucleotide

SEQ ID NO: 622101 - DNA, 53 bp, Artificial; identical to SEQ ID NO: 167076
  Synthetic oligonucleotide

SEQ ID NO: 622102 - DNA, 55 bp, Artificial; identical to SEQ ID NO: 242748
  Synthetic oligonucleotide

SEQ ID NO: 622103 - DNA, 55 bp, Artificial; identical to SEQ ID NO: 257920
  Synthetic oligonucleotide

SEQ ID NO: 622104 - DNA, 53 bp, Artificial; identical to SEQ ID NO: 180878
  Synthetic oligonucleotide

SEQ ID NO: 622105 - DNA, 54 bp, Artificial; identical to SEQ ID NO: 221517
  Synthetic oligonucleotide

SEQ ID NO: 622106 - DNA, 55 bp, Artificial; identical to SEQ ID NO: 174592
  Synthetic oligonucleotide

SEQ ID NO: 622107 - DNA, 55 bp, Artificial; identical to SEQ ID NO: 164234
  Synthetic oligonucleotide

SEQ ID NO: 622108 - DNA, 56 bp, Artificial; identical to SEQ ID NO: 157198
  Synthetic oligonucleotide

SEQ ID NO: 622109 - DNA, 52 bp, Artificial; identical to SEQ ID NO: 150590
  Synthetic oligonucleotide

SEQ ID NO: 622110 - DNA, 53 bp, Artificial; identical to SEQ ID NO: 191668
  Synthetic oligonucleotide

SEQ ID NO: 622111 - DNA, 55 bp, Artificial; identical to SEQ ID NO: 203281
  Synthetic oligonucleotide

SEQ ID NO: 622112 - DNA, 51 bp, Artificial; identical to SEQ ID NO: 208872
  Synthetic oligonucleotide

SEQ ID NO: 622113 - DNA, 55 bp, Artificial; identical to SEQ ID NO: 263316
  Synthetic oligonucleotide

SEQ ID NO: 622114 - DNA, 52 bp, Artificial; identical to SEQ ID NO: 217268
  Synthetic oligonucleotide

SEQ ID NO: 622115 - DNA, 55 bp, Artificial; identical to SEQ ID NO: 156793
  Synthetic oligonucleotide

SEQ ID NO: 622116 - DNA, 55 bp, Artificial; identical to SEQ ID NO: 224827
  Synthetic oligonucleotide

SEQ ID NO: 622117 - DNA, 54 bp, Artificial; identical to SEQ ID NO: 144306
  Synthetic oligonucleotide

SEQ ID NO: 622118 - DNA, 55 bp, Artificial; identical to SEQ ID NO: 156795
  Synthetic oligonucleotide

SEQ ID NO: 622119 - DNA, 58 bp, Artificial; identical to SEQ ID NO: 202296
  Synthetic oligonucleotide

SEQ ID NO: 622120 - DNA, 55 bp, Artificial; identical to SEQ ID NO: 153320
  Synthetic oligonucleotide

SEQ ID NO: 622121 - DNA, 55 bp, Artificial; identical to SEQ ID NO: 212782
  Synthetic oligonucleotide

SEQ ID NO: 622122 - DNA, 56 bp, Artificial; identical to SEQ ID NO: 241814
  Synthetic oligonucleotide

SEQ ID NO: 622123 - DNA, 54 bp, Artificial; identical to SEQ ID NO: 245109
  Synthetic oligonucleotide

SEQ ID NO: 622124 - DNA, 54 bp, Artificial; identical to SEQ ID NO: 211499
  Synthetic oligonucleotide

SEQ ID NO: 622125 - DNA, 60 bp, Artificial; identical to SEQ ID NO: 153432
  Synthetic oligonucleotide

SEQ ID NO: 622126 - DNA, 54 bp, Artificial; identical to SEQ ID NO: 202797
  Synthetic oligonucleotide

SEQ ID NO: 622127 - DNA, 60 bp, Artificial; identical to SEQ ID NO: 241812
  Synthetic oligonucleotide

SEQ ID NO: 622128 - DNA, 56 bp, Artificial; identical to SEQ ID NO: 237962
  Synthetic oligonucleotide

SEQ ID NO: 622129 - DNA, 51 bp, Artificial; identical to SEQ ID NO: 202434
  Synthetic oligonucleotide

SEQ ID NO: 622130 - DNA, 55 bp, Artificial; identical to SEQ ID NO: 212778
  Synthetic oligonucleotide

SEQ ID NO: 622131 - DNA, 54 bp, Artificial; identical to SEQ ID NO: 141273
  Synthetic oligonucleotide

SEQ ID NO: 622132 - DNA, 55 bp, Artificial; identical to SEQ ID NO: 156796
  Synthetic oligonucleotide

SEQ ID NO: 622133 - DNA, 55 bp, Artificial; identical to SEQ ID NO: 215545
  Synthetic oligonucleotide

SEQ ID NO: 622134 - DNA, 51 bp, Artificial; identical to SEQ ID NO: 200030
  Synthetic oligonucleotide

SEQ ID NO: 622135 - DNA, 55 bp, Artificial; identical to SEQ ID NO: 249620
  Synthetic oligonucleotide

SEQ ID NO: 622136 - DNA, 54 bp, Artificial; identical to SEQ ID NO: 157137
  Synthetic oligonucleotide

SEQ ID NO: 622137 - DNA, 56 bp, Artificial; identical to SEQ ID NO: 147136
  Synthetic oligonucleotide

SEQ ID NO: 622138 - DNA, 55 bp, Artificial; identical to SEQ ID NO: 199088
  Synthetic oligonucleotide

SEQ ID NO: 622139 - DNA, 55 bp, Artificial; identical to SEQ ID NO: 258152
  Synthetic oligonucleotide

SEQ ID NO: 622140 - DNA, 53 bp, Artificial; identical to SEQ ID NO: 216664
  Synthetic oligonucleotide

SEQ ID NO: 622141 - DNA, 50 bp, Artificial; identical to SEQ ID NO: 176211
  Synthetic oligonucleotide

SEQ ID NO: 622142 - DNA, 51 bp, Artificial; identical to SEQ ID NO: 149827
  Synthetic oligonucleotide

SEQ ID NO: 622143 - DNA, 57 bp, Artificial; identical to SEQ ID NO: 239440
  Synthetic oligonucleotide

SEQ ID NO: 622144 - DNA, 52 bp, Artificial; identical to SEQ ID NO: 149656
  Synthetic oligonucleotide

SEQ ID NO: 622145 - DNA, 55 bp, Artificial; identical to SEQ ID NO: 189488
  Synthetic oligonucleotide

SEQ ID NO: 622146 - DNA, 55 bp, Artificial; identical to SEQ ID NO: 224829
  Synthetic oligonucleotide

SEQ ID NO: 622147 - DNA, 53 bp, Artificial; identical to SEQ ID NO: 172784
  Synthetic oligonucleotide

SEQ ID NO: 622148 - DNA, 53 bp, Artificial; identical to SEQ ID NO: 188465
  Synthetic oligonucleotide

SEQ ID NO: 622149 - DNA, 55 bp, Artificial; identical to SEQ ID NO: 148869
  Synthetic oligonucleotide

SEQ ID NO: 622150 - DNA, 50 bp, Artificial; identical to SEQ ID NO: 196302
  Synthetic oligonucleotide

SEQ ID NO: 622151 - DNA, 53 bp, Artificial; identical to SEQ ID NO: 150546
  Synthetic oligonucleotide

SEQ ID NO: 622152 - DNA, 56 bp, Artificial; identical to SEQ ID NO: 164256
  Synthetic oligonucleotide

SEQ ID NO: 622153 - DNA, 54 bp, Artificial; identical to SEQ ID NO: 187786
  Synthetic oligonucleotide

SEQ ID NO: 622154 - DNA, 53 bp, Artificial; identical to SEQ ID NO: 192073
  Synthetic oligonucleotide

SEQ ID NO: 622155 - DNA, 51 bp, Artificial; identical to SEQ ID NO: 255730
  Synthetic oligonucleotide

SEQ ID NO: 622156 - DNA, 60 bp, Artificial; identical to SEQ ID NO: 199315
  Synthetic oligonucleotide

SEQ ID NO: 622157 - DNA, 55 bp, Artificial; identical to SEQ ID NO: 245173
  Synthetic oligonucleotide

SEQ ID NO: 622158 - DNA, 60 bp, Artificial; identical to SEQ ID NO: 199304
  Synthetic oligonucleotide

SEQ ID NO: 622159 - DNA, 53 bp, Artificial; identical to SEQ ID NO: 149330
  Synthetic oligonucleotide

SEQ ID NO: 622160 - DNA, 60 bp, Artificial; identical to SEQ ID NO: 203270
  Synthetic oligonucleotide

SEQ ID NO: 622161 - DNA, 54 bp, Artificial; identical to SEQ ID NO: 142596
  Synthetic oligonucleotide

SEQ ID NO: 622162 - DNA, 48 bp, Artificial; identical to SEQ ID NO: 148877
  Synthetic oligonucleotide

SEQ ID NO: 622163 - DNA, 50 bp, Artificial; identical to SEQ ID NO: 191876
  Synthetic oligonucleotide

SEQ ID NO: 622164 - DNA, 60 bp, Artificial; identical to SEQ ID NO: 224369
  Synthetic oligonucleotide

SEQ ID NO: 622165 - DNA, 53 bp, Artificial; identical to SEQ ID NO: 164275
  Synthetic oligonucleotide

SEQ ID NO: 622166 - DNA, 56 bp, Artificial; identical to SEQ ID NO: 210813
  Synthetic oligonucleotide

SEQ ID NO: 622167 - DNA, 54 bp, Artificial; identical to SEQ ID NO: 150526
  Synthetic oligonucleotide

SEQ ID NO: 622168 - DNA, 52 bp, Artificial; identical to SEQ ID NO: 191207
  Synthetic oligonucleotide

SEQ ID NO: 622169 - DNA, 55 bp, Artificial; identical to SEQ ID NO: 196902
  Synthetic oligonucleotide

SEQ ID NO: 622170 - DNA, 53 bp, Artificial; identical to SEQ ID NO: 199826
  Synthetic oligonucleotide

SEQ ID NO: 622171 - DNA, 51 bp, Artificial; identical to SEQ ID NO: 149828
  Synthetic oligonucleotide

SEQ ID NO: 622172 - DNA, 55 bp, Artificial; identical to SEQ ID NO: 184320
  Synthetic oligonucleotide

SEQ ID NO: 622173 - DNA, 55 bp, Artificial; identical to SEQ ID NO: 164274
  Synthetic oligonucleotide

SEQ ID NO: 622174 - DNA, 59 bp, Artificial; identical to SEQ ID NO: 243737
  Synthetic oligonucleotide

SEQ ID NO: 622175 - DNA, 60 bp, Artificial; identical to SEQ ID NO: 241811
  Synthetic oligonucleotide

SEQ ID NO: 622176 - DNA, 52 bp, Artificial; identical to SEQ ID NO: 265967
  Synthetic oligonucleotide

SEQ ID NO: 622177 - DNA, 55 bp, Artificial; identical to SEQ ID NO: 217831
  Synthetic oligonucleotide

SEQ ID NO: 622178 - DNA, 58 bp, Artificial; identical to SEQ ID NO: 171041
  Synthetic oligonucleotide

SEQ ID NO: 622179 - DNA, 54 bp, Artificial; identical to SEQ ID NO: 245169
  Synthetic oligonucleotide

SEQ ID NO: 622180 - DNA, 56 bp, Artificial; identical to SEQ ID NO: 217857
  Synthetic oligonucleotide

SEQ ID NO: 622181 - DNA, 57 bp, Artificial; identical to SEQ ID NO: 187739
  Synthetic oligonucleotide

SEQ ID NO: 622182 - DNA, 55 bp, Artificial; identical to SEQ ID NO: 263367
  Synthetic oligonucleotide

SEQ ID NO: 622183 - DNA, 55 bp, Artificial; identical to SEQ ID NO: 249169
  Synthetic oligonucleotide

SEQ ID NO: 622184 - DNA, 57 bp, Artificial; identical to SEQ ID NO: 239471
  Synthetic oligonucleotide

SEQ ID NO: 622185 - DNA, 55 bp, Artificial; identical to SEQ ID NO: 257923
  Synthetic oligonucleotide

SEQ ID NO: 622186 - DNA, 51 bp, Artificial; identical to SEQ ID NO: 155589
  Synthetic oligonucleotide

SEQ ID NO: 622187 - DNA, 59 bp, Artificial; identical to SEQ ID NO: 179487
  Synthetic oligonucleotide

SEQ ID NO: 622188 - DNA, 53 bp, Artificial; identical to SEQ ID NO: 235141
  Synthetic oligonucleotide

SEQ ID NO: 622189 - DNA, 54 bp, Artificial; identical to SEQ ID NO: 154119
  Synthetic oligonucleotide

SEQ ID NO: 622190 - DNA, 55 bp, Artificial; identical to SEQ ID NO: 238542
  Synthetic oligonucleotide

SEQ ID NO: 622191 - DNA, 60 bp, Artificial; identical to SEQ ID NO: 167523
  Synthetic oligonucleotide

SEQ ID NO: 622192 - DNA, 50 bp, Artificial; identical to SEQ ID NO: 176298
  Synthetic oligonucleotide

SEQ ID NO: 622193 - DNA, 57 bp, Artificial; identical to SEQ ID NO: 170984
  Synthetic oligonucleotide

SEQ ID NO: 622194 - DNA, 55 bp, Artificial; identical to SEQ ID NO: 161774
  Synthetic oligonucleotide

SEQ ID NO: 622195 - DNA, 60 bp, Artificial; identical to SEQ ID NO: 241807
  Synthetic oligonucleotide

SEQ ID NO: 622196 - DNA, 53 bp, Artificial; identical to SEQ ID NO: 168938
  Synthetic oligonucleotide

SEQ ID NO: 622197 - DNA, 55 bp, Artificial; identical to SEQ ID NO: 168724
  Synthetic oligonucleotide

SEQ ID NO: 622198 - DNA, 56 bp, Artificial; identical to SEQ ID NO: 179845
  Synthetic oligonucleotide

SEQ ID NO: 622199 - DNA, 55 bp, Artificial; identical to SEQ ID NO: 242733
  Synthetic oligonucleotide

SEQ ID NO: 622200 - DNA, 59 bp, Artificial; identical to SEQ ID NO: 150968
  Synthetic oligonucleotide

SEQ ID NO: 622201 - DNA, 54 bp, Artificial; identical to SEQ ID NO: 240576
  Synthetic oligonucleotide

SEQ ID NO: 622202 - DNA, 52 bp, Artificial; identical to SEQ ID NO: 170119
  Synthetic oligonucleotide

SEQ ID NO: 622203 - DNA, 60 bp, Artificial; identical to SEQ ID NO: 150957
  Synthetic oligonucleotide

SEQ ID NO: 622204 - DNA, 60 bp, Artificial; identical to SEQ ID NO: 150945
  Synthetic oligonucleotide

SEQ ID NO: 622205 - DNA, 60 bp, Artificial; identical to SEQ ID NO: 154358
  Synthetic oligonucleotide

SEQ ID NO: 622206 - DNA, 50 bp, Artificial; identical to SEQ ID NO: 146545
  Synthetic oligonucleotide

SEQ ID NO: 622207 - DNA, 60 bp, Artificial; identical to SEQ ID NO: 224480
  Synthetic oligonucleotide

SEQ ID NO: 622208 - DNA, 54 bp, Artificial; identical to SEQ ID NO: 238558
  Synthetic oligonucleotide

SEQ ID NO: 622209 - DNA, 53 bp, Artificial; identical to SEQ ID NO: 208701
  Synthetic oligonucleotide

SEQ ID NO: 622210 - DNA, 55 bp, Artificial; identical to SEQ ID NO: 184356
  Synthetic oligonucleotide

SEQ ID NO: 622211 - DNA, 60 bp, Artificial; identical to SEQ ID NO: 202329
  Synthetic oligonucleotide

SEQ ID NO: 622212 - DNA, 55 bp, Artificial; identical to SEQ ID NO: 148743
  Synthetic oligonucleotide

SEQ ID NO: 622213 - DNA, 50 bp, Artificial; identical to SEQ ID NO: 143963
  Synthetic oligonucleotide

SEQ ID NO: 622214 - DNA, 55 bp, Artificial; identical to SEQ ID NO: 225059
  Synthetic oligonucleotide

SEQ ID NO: 622215 - DNA, 57 bp, Artificial; identical to SEQ ID NO: 241805
  Synthetic oligonucleotide

SEQ ID NO: 622216 - DNA, 56 bp, Artificial; identical to SEQ ID NO: 217868
  Synthetic oligonucleotide

SEQ ID NO: 622217 - DNA, 53 bp, Artificial; identical to SEQ ID NO: 243189
  Synthetic oligonucleotide

SEQ ID NO: 622218 - DNA, 54 bp, Artificial; identical to SEQ ID NO: 168721
  Synthetic oligonucleotide

SEQ ID NO: 622219 - DNA, 55 bp, Artificial; identical to SEQ ID NO: 156800
  Synthetic oligonucleotide

SEQ ID NO: 622220 - DNA, 55 bp, Artificial; identical to SEQ ID NO: 205211
  Synthetic oligonucleotide

SEQ ID NO: 622221 - DNA, 55 bp, Artificial; identical to SEQ ID NO: 202189
  Synthetic oligonucleotide

SEQ ID NO: 622222 - DNA, 55 bp, Artificial; identical to SEQ ID NO: 154096
  Synthetic oligonucleotide

SEQ ID NO: 622223 - DNA, 55 bp, Artificial; identical to SEQ ID NO: 146266
  Synthetic oligonucleotide

SEQ ID NO: 622224 - DNA, 51 bp, Artificial; identical to SEQ ID NO: 169418
  Synthetic oligonucleotide

SEQ ID NO: 622225 - DNA, 58 bp, Artificial; identical to SEQ ID NO: 199282
  Synthetic oligonucleotide

SEQ ID NO: 622226 - DNA, 53 bp, Artificial; identical to SEQ ID NO: 240693
  Synthetic oligonucleotide

SEQ ID NO: 622227 - DNA, 55 bp, Artificial; identical to SEQ ID NO: 148744
  Synthetic oligonucleotide

SEQ ID NO: 622228 - DNA, 53 bp, Artificial; identical to SEQ ID NO: 164970
  Synthetic oligonucleotide

SEQ ID NO: 622229 - DNA, 54 bp, Artificial; identical to SEQ ID NO: 185419
  Synthetic oligonucleotide

SEQ ID NO: 622230 - DNA, 60 bp, Artificial; identical to SEQ ID NO: 241803
  Synthetic oligonucleotide

SEQ ID NO: 622231 - DNA, 53 bp, Artificial; identical to SEQ ID NO: 216687
  Synthetic oligonucleotide

SEQ ID NO: 622232 - DNA, 54 bp, Artificial; identical to SEQ ID NO: 185417
  Synthetic oligonucleotide

SEQ ID NO: 622233 - DNA, 50 bp, Artificial; identical to SEQ ID NO: 194065
  Synthetic oligonucleotide

SEQ ID NO: 622234 - DNA, 50 bp, Artificial; identical to SEQ ID NO: 241685
  Synthetic oligonucleotide

SEQ ID NO: 622235 - DNA, 56 bp, Artificial; identical to SEQ ID NO: 211158
  Synthetic oligonucleotide

SEQ ID NO: 622236 - DNA, 55 bp, Artificial; identical to SEQ ID NO: 245158
  Synthetic oligonucleotide

SEQ ID NO: 622237 - DNA, 55 bp, Artificial; identical to SEQ ID NO: 209492
  Synthetic oligonucleotide

SEQ ID NO: 622238 - DNA, 56 bp, Artificial; identical to SEQ ID NO: 199270
  Synthetic oligonucleotide

SEQ ID NO: 622239 - DNA, 56 bp, Artificial; identical to SEQ ID NO: 209254
  Synthetic oligonucleotide

SEQ ID NO: 622240 - DNA, 55 bp, Artificial; identical to SEQ ID NO: 240444
  Synthetic oligonucleotide

SEQ ID NO: 622241 - DNA, 55 bp, Artificial; identical to SEQ ID NO: 184329
  Synthetic oligonucleotide

SEQ ID NO: 622242 - DNA, 53 bp, Artificial; identical to SEQ ID NO: 249171
  Synthetic oligonucleotide

SEQ ID NO: 622243 - DNA, 60 bp, Artificial; identical to SEQ ID NO: 196893
  Synthetic oligonucleotide

SEQ ID NO: 622244 - DNA, 54 bp, Artificial; identical to SEQ ID NO: 185398
  Synthetic oligonucleotide

SEQ ID NO: 622245 - DNA, 59 bp, Artificial; identical to SEQ ID NO: 171673
  Synthetic oligonucleotide

SEQ ID NO: 622246 - DNA, 55 bp, Artificial; identical to SEQ ID NO: 164273
  Synthetic oligonucleotide

SEQ ID NO: 622247 - DNA, 55 bp, Artificial; identical to SEQ ID NO: 253157
  Synthetic oligonucleotide

SEQ ID NO: 622248 - DNA, 55 bp, Artificial; identical to SEQ ID NO: 202795
  Synthetic oligonucleotide

SEQ ID NO: 622249 - DNA, 55 bp, Artificial; identical to SEQ ID NO: 240443
  Synthetic oligonucleotide

SEQ ID NO: 622250 - DNA, 53 bp, Artificial; identical to SEQ ID NO: 246329
  Synthetic oligonucleotide

SEQ ID NO: 622251 - DNA, 59 bp, Artificial; identical to SEQ ID NO: 245176
  Synthetic oligonucleotide

SEQ ID NO: 622252 - DNA, 53 bp, Artificial; identical to SEQ ID NO: 237014
  Synthetic oligonucleotide

SEQ ID NO: 622253 - DNA, 55 bp, Artificial; identical to SEQ ID NO: 218824
  Synthetic oligonucleotide

SEQ ID NO: 622254 - DNA, 60 bp, Artificial; identical to SEQ ID NO: 241799
  Synthetic oligonucleotide

SEQ ID NO: 622255 - DNA, 50 bp, Artificial; identical to SEQ ID NO: 173698
  Synthetic oligonucleotide

SEQ ID NO: 622256 - DNA, 55 bp, Artificial; identical to SEQ ID NO: 196899
  Synthetic oligonucleotide

SEQ ID NO: 622257 - DNA, 53 bp, Artificial; identical to SEQ ID NO: 153592
  Synthetic oligonucleotide

SEQ ID NO: 622258 - DNA, 55 bp, Artificial; identical to SEQ ID NO: 240506
  Synthetic oligonucleotide

SEQ ID NO: 622259 - DNA, 55 bp, Artificial; identical to SEQ ID NO: 212777
  Synthetic oligonucleotide

SEQ ID NO: 622260 - DNA, 59 bp, Artificial; identical to SEQ ID NO: 162258
  Synthetic oligonucleotide

SEQ ID NO: 622261 - DNA, 56 bp, Artificial; identical to SEQ ID NO: 159921
  Synthetic oligonucleotide

SEQ ID NO: 622262 - DNA, 56 bp, Artificial; identical to SEQ ID NO: 239569
  Synthetic oligonucleotide

SEQ ID NO: 622263 - DNA, 55 bp, Artificial; identical to SEQ ID NO: 253156
  Synthetic oligonucleotide

SEQ ID NO: 622264 - DNA, 60 bp, Artificial; identical to SEQ ID NO: 159609
  Synthetic oligonucleotide

SEQ ID NO: 622265 - DNA, 48 bp, Artificial; identical to SEQ ID NO: 243730
  Synthetic oligonucleotide

SEQ ID NO: 622266 - DNA, 55 bp, Artificial; identical to SEQ ID NO: 148745
  Synthetic oligonucleotide

SEQ ID NO: 622267 - DNA, 57 bp, Artificial; identical to SEQ ID NO: 166108
  Synthetic oligonucleotide

SEQ ID NO: 622268 - DNA, 55 bp, Artificial; identical to SEQ ID NO: 161773
  Synthetic oligonucleotide

SEQ ID NO: 622269 - DNA, 57 bp, Artificial; identical to SEQ ID NO: 241795
  Synthetic oligonucleotide

SEQ ID NO: 622270 - DNA, 54 bp, Artificial; identical to SEQ ID NO: 242656
  Synthetic oligonucleotide

SEQ ID NO: 622271 - DNA, 55 bp, Artificial; identical to SEQ ID NO: 169922
  Synthetic oligonucleotide

SEQ ID NO: 622272 - DNA, 55 bp, Artificial; identical to SEQ ID NO: 242655
  Synthetic oligonucleotide

SEQ ID NO: 622273 - DNA, 55 bp, Artificial; identical to SEQ ID NO: 234107
  Synthetic oligonucleotide

SEQ ID NO: 622274 - DNA, 53 bp, Artificial; identical to SEQ ID NO: 199237
  Synthetic oligonucleotide

SEQ ID NO: 622275 - DNA, 54 bp, Artificial; identical to SEQ ID NO: 167013
  Synthetic oligonucleotide

SEQ ID NO: 622276 - DNA, 55 bp, Artificial; identical to SEQ ID NO: 184285
  Synthetic oligonucleotide

SEQ ID NO: 622277 - DNA, 59 bp, Artificial; identical to SEQ ID NO: 217879
  Synthetic oligonucleotide

SEQ ID NO: 622278 - DNA, 53 bp, Artificial; identical to SEQ ID NO: 241794
  Synthetic oligonucleotide

SEQ ID NO: 622279 - DNA, 55 bp, Artificial; identical to SEQ ID NO: 169923
  Synthetic oligonucleotide

SEQ ID NO: 622280 - DNA, 51 bp, Artificial; identical to SEQ ID NO: 174300
  Synthetic oligonucleotide

SEQ ID NO: 622281 - DNA, 55 bp, Artificial; identical to SEQ ID NO: 164272
  Synthetic oligonucleotide

SEQ ID NO: 622282 - DNA, 55 bp, Artificial; identical to SEQ ID NO: 211147
  Synthetic oligonucleotide

SEQ ID NO: 622283 - DNA, 58 bp, Artificial; identical to SEQ ID NO: 150890
  Synthetic oligonucleotide

SEQ ID NO: 622284 - DNA, 55 bp, Artificial; identical to SEQ ID NO: 207503
  Synthetic oligonucleotide

SEQ ID NO: 622285 - DNA, 56 bp, Artificial; identical to SEQ ID NO: 150879
  Synthetic oligonucleotide

SEQ ID NO: 622286 - DNA, 54 bp, Artificial; identical to SEQ ID NO: 150868
  Synthetic oligonucleotide

SEQ ID NO: 622287 - DNA, 55 bp, Artificial; identical to SEQ ID NO: 201313
  Synthetic oligonucleotide

SEQ ID NO: 622288 - DNA, 58 bp, Artificial; identical to SEQ ID NO: 199226
  Synthetic oligonucleotide

SEQ ID NO: 622289 - DNA, 55 bp, Artificial; identical to SEQ ID NO: 191025
  Synthetic oligonucleotide

SEQ ID NO: 622290 - DNA, 54 bp, Artificial; identical to SEQ ID NO: 185389
  Synthetic oligonucleotide

SEQ ID NO: 622291 - DNA, 55 bp, Artificial; identical to SEQ ID NO: 164271
  Synthetic oligonucleotide

SEQ ID NO: 622292 - DNA, 57 bp, Artificial; identical to SEQ ID NO: 212351
  Synthetic oligonucleotide

SEQ ID NO: 622293 - DNA, 52 bp, Artificial; identical to SEQ ID NO: 233850
  Synthetic oligonucleotide

SEQ ID NO: 622294 - DNA, 50 bp, Artificial; identical to SEQ ID NO: 141433
  Synthetic oligonucleotide

SEQ ID NO: 622295 - DNA, 54 bp, Artificial; identical to SEQ ID NO: 144956
  Synthetic oligonucleotide

SEQ ID NO: 622296 - DNA, 53 bp, Artificial; identical to SEQ ID NO: 197496
  Synthetic oligonucleotide

SEQ ID NO: 622297 - DNA, 55 bp, Artificial; identical to SEQ ID NO: 194757
  Synthetic oligonucleotide

SEQ ID NO: 622298 - DNA, 58 bp, Artificial; identical to SEQ ID NO: 241792
  Synthetic oligonucleotide

SEQ ID NO: 622299 - DNA, 55 bp, Artificial; identical to SEQ ID NO: 194758
  Synthetic oligonucleotide

SEQ ID NO: 622300 - DNA, 54 bp, Artificial; identical to SEQ ID NO: 199621
  Synthetic oligonucleotide

SEQ ID NO: 622301 - DNA, 54 bp, Artificial; identical to SEQ ID NO: 243032
  Synthetic oligonucleotide

SEQ ID NO: 622302 - DNA, 59 bp, Artificial; identical to SEQ ID NO: 203259
  Synthetic oligonucleotide

SEQ ID NO: 622303 - DNA, 55 bp, Artificial; identical to SEQ ID NO: 153317
  Synthetic oligonucleotide

SEQ ID NO: 622304 - DNA, 60 bp, Artificial; identical to SEQ ID NO: 150834
  Synthetic oligonucleotide

SEQ ID NO: 622305 - DNA, 54 bp, Artificial; identical to SEQ ID NO: 243719
  Synthetic oligonucleotide

SEQ ID NO: 622306 - DNA, 60 bp, Artificial; identical to SEQ ID NO: 206802
  Synthetic oligonucleotide

SEQ ID NO: 622307 - DNA, 58 bp, Artificial; identical to SEQ ID NO: 237922
  Synthetic oligonucleotide

SEQ ID NO: 622308 - DNA, 56 bp, Artificial; identical to SEQ ID NO: 150823
  Synthetic oligonucleotide

SEQ ID NO: 622309 - DNA, 57 bp, Artificial; identical to SEQ ID NO: 243772
  Synthetic oligonucleotide

SEQ ID NO: 622310 - DNA, 60 bp, Artificial; identical to SEQ ID NO: 211136
  Synthetic oligonucleotide

SEQ ID NO: 622311 - DNA, 58 bp, Artificial; identical to SEQ ID NO: 211125
  Synthetic oligonucleotide

SEQ ID NO: 622312 - DNA, 54 bp, Artificial; identical to SEQ ID NO: 185432
  Synthetic oligonucleotide

SEQ ID NO: 622313 - DNA, 55 bp, Artificial; identical to SEQ ID NO: 254475
  Synthetic oligonucleotide

SEQ ID NO: 622314 - DNA, 52 bp, Artificial; identical to SEQ ID NO: 246494
  Synthetic oligonucleotide

SEQ ID NO: 622315 - DNA, 59 bp, Artificial; identical to SEQ ID NO: 206801
  Synthetic oligonucleotide

SEQ ID NO: 622316 - DNA, 52 bp, Artificial; identical to SEQ ID NO: 216758
  Synthetic oligonucleotide

SEQ ID NO: 622317 - DNA, 56 bp, Artificial; identical to SEQ ID NO: 164356
  Synthetic oligonucleotide

SEQ ID NO: 622318 - DNA, 50 bp, Artificial; identical to SEQ ID NO: 142768
  Synthetic oligonucleotide

SEQ ID NO: 622319 - DNA, 51 bp, Artificial; identical to SEQ ID NO: 237959
  Synthetic oligonucleotide

SEQ ID NO: 622320 - DNA, 55 bp, Artificial; identical to SEQ ID NO: 211348
  Synthetic oligonucleotide

SEQ ID NO: 622321 - DNA, 51 bp, Artificial; identical to SEQ ID NO: 174950
  Synthetic oligonucleotide

SEQ ID NO: 622322 - DNA, 58 bp, Artificial; identical to SEQ ID NO: 187728
  Synthetic oligonucleotide

SEQ ID NO: 622323 - DNA, 54 bp, Artificial; identical to SEQ ID NO: 238576
  Synthetic oligonucleotide

SEQ ID NO: 622324 - DNA, 52 bp, Artificial; identical to SEQ ID NO: 156771
  Synthetic oligonucleotide

SEQ ID NO: 622325 - DNA, 55 bp, Artificial; identical to SEQ ID NO: 196965
  Synthetic oligonucleotide

SEQ ID NO: 622326 - DNA, 51 bp, Artificial; identical to SEQ ID NO: 154672
  Synthetic oligonucleotide

SEQ ID NO: 622327 - DNA, 55 bp, Artificial; identical to SEQ ID NO: 207502
  Synthetic oligonucleotide

SEQ ID NO: 622328 - DNA, 59 bp, Artificial; identical to SEQ ID NO: 217890
  Synthetic oligonucleotide

SEQ ID NO: 622329 - DNA, 55 bp, Artificial; identical to SEQ ID NO: 168720
  Synthetic oligonucleotide

SEQ ID NO: 622330 - DNA, 53 bp, Artificial; identical to SEQ ID NO: 199768
  Synthetic oligonucleotide

SEQ ID NO: 622331 - DNA, 55 bp, Artificial; identical to SEQ ID NO: 151712
  Synthetic oligonucleotide

SEQ ID NO: 622332 - DNA, 51 bp, Artificial; identical to SEQ ID NO: 189668
  Synthetic oligonucleotide

SEQ ID NO: 622333 - DNA, 50 bp, Artificial; identical to SEQ ID NO: 162380
  Synthetic oligonucleotide

SEQ ID NO: 622334 - DNA, 56 bp, Artificial; identical to SEQ ID NO: 141284
  Synthetic oligonucleotide

SEQ ID NO: 622335 - DNA, 55 bp, Artificial; identical to SEQ ID NO: 217836
  Synthetic oligonucleotide

SEQ ID NO: 622336 - DNA, 55 bp, Artificial; identical to SEQ ID NO: 184464
  Synthetic oligonucleotide

SEQ ID NO: 622337 - DNA, 55 bp, Artificial; identical to SEQ ID NO: 241790
  Synthetic oligonucleotide

SEQ ID NO: 622338 - DNA, 58 bp, Artificial; identical to SEQ ID NO: 166855
  Synthetic oligonucleotide

SEQ ID NO: 622339 - DNA, 57 bp, Artificial; identical to SEQ ID NO: 144865
  Synthetic oligonucleotide

SEQ ID NO: 622340 - DNA, 52 bp, Artificial; identical to SEQ ID NO: 246493
  Synthetic oligonucleotide

SEQ ID NO: 622341 - DNA, 53 bp, Artificial; identical to SEQ ID NO: 171894
  Synthetic oligonucleotide

SEQ ID NO: 622342 - DNA, 59 bp, Artificial; identical to SEQ ID NO: 141295
  Synthetic oligonucleotide

SEQ ID NO: 622343 - DNA, 55 bp, Artificial; identical to SEQ ID NO: 242642
  Synthetic oligonucleotide

SEQ ID NO: 622344 - DNA, 55 bp, Artificial; identical to SEQ ID NO: 211349
  Synthetic oligonucleotide

SEQ ID NO: 622345 - DNA, 53 bp, Artificial; identical to SEQ ID NO: 199764
  Synthetic oligonucleotide

SEQ ID NO: 622346 - DNA, 57 bp, Artificial; identical to SEQ ID NO: 239371
  Synthetic oligonucleotide

SEQ ID NO: 622347 - DNA, 54 bp, Artificial; identical to SEQ ID NO: 216415
  Synthetic oligonucleotide

SEQ ID NO: 622348 - DNA, 51 bp, Artificial; identical to SEQ ID NO: 160519
  Synthetic oligonucleotide

SEQ ID NO: 622349 - DNA, 56 bp, Artificial; identical to SEQ ID NO: 190931
  Synthetic oligonucleotide

SEQ ID NO: 622350 - DNA, 54 bp, Artificial; identical to SEQ ID NO: 217901
  Synthetic oligonucleotide

SEQ ID NO: 622351 - DNA, 53 bp, Artificial; identical to SEQ ID NO: 149370
  Synthetic oligonucleotide

SEQ ID NO: 622352 - DNA, 51 bp, Artificial; identical to SEQ ID NO: 209748
  Synthetic oligonucleotide

SEQ ID NO: 622353 - DNA, 56 bp, Artificial; identical to SEQ ID NO: 197859
  Synthetic oligonucleotide

SEQ ID NO: 622354 - DNA, 50 bp, Artificial; identical to SEQ ID NO: 210400
  Synthetic oligonucleotide

SEQ ID NO: 622355 - DNA, 52 bp, Artificial; identical to SEQ ID NO: 165099
  Synthetic oligonucleotide

SEQ ID NO: 622356 - DNA, 55 bp, Artificial; identical to SEQ ID NO: 217838
  Synthetic oligonucleotide

SEQ ID NO: 622357 - DNA, 56 bp, Artificial; identical to SEQ ID NO: 241786
  Synthetic oligonucleotide

SEQ ID NO: 622358 - DNA, 51 bp, Artificial; identical to SEQ ID NO: 150790
  Synthetic oligonucleotide

SEQ ID NO: 622359 - DNA, 55 bp, Artificial; identical to SEQ ID NO: 161035
  Synthetic oligonucleotide

SEQ ID NO: 622360 - DNA, 53 bp, Artificial; identical to SEQ ID NO: 149111
  Synthetic oligonucleotide

SEQ ID NO: 622361 - DNA, 55 bp, Artificial; identical to SEQ ID NO: 240501
  Synthetic oligonucleotide

SEQ ID NO: 622362 - DNA, 60 bp, Artificial; identical to SEQ ID NO: 212350
  Synthetic oligonucleotide

SEQ ID NO: 622363 - DNA, 60 bp, Artificial; identical to SEQ ID NO: 162407
  Synthetic oligonucleotide

SEQ ID NO: 622364 - DNA, 55 bp, Artificial; identical to SEQ ID NO: 217839
  Synthetic oligonucleotide

SEQ ID NO: 622365 - DNA, 52 bp, Artificial; identical to SEQ ID NO: 217912
  Synthetic oligonucleotide

SEQ ID NO: 622366 - DNA, 53 bp, Artificial; identical to SEQ ID NO: 218334
  Synthetic oligonucleotide

SEQ ID NO: 622367 - DNA, 55 bp, Artificial; identical to SEQ ID NO: 164269
  Synthetic oligonucleotide

SEQ ID NO: 622368 - DNA, 50 bp, Artificial; identical to SEQ ID NO: 210402
  Synthetic oligonucleotide

SEQ ID NO: 622369 - DNA, 51 bp, Artificial; identical to SEQ ID NO: 184481
  Synthetic oligonucleotide

SEQ ID NO: 622370 - DNA, 53 bp, Artificial; identical to SEQ ID NO: 246317
  Synthetic oligonucleotide

SEQ ID NO: 622371 - DNA, 55 bp, Artificial; identical to SEQ ID NO: 189052
  Synthetic oligonucleotide

SEQ ID NO: 622372 - DNA, 55 bp, Artificial; identical to SEQ ID NO: 169154
  Synthetic oligonucleotide

SEQ ID NO: 622373 - DNA, 60 bp, Artificial; identical to SEQ ID NO: 150779
  Synthetic oligonucleotide

SEQ ID NO: 622374 - DNA, 60 bp, Artificial; identical to SEQ ID NO: 199204
  Synthetic oligonucleotide

SEQ ID NO: 622375 - DNA, 56 bp, Artificial; identical to SEQ ID NO: 211114
  Synthetic oligonucleotide

SEQ ID NO: 622376 - DNA, 51 bp, Artificial; identical to SEQ ID NO: 206797
  Synthetic oligonucleotide

SEQ ID NO: 622377 - DNA, 50 bp, Artificial; identical to SEQ ID NO: 187112
  Synthetic oligonucleotide

SEQ ID NO: 622378 - DNA, 52 bp, Artificial; identical to SEQ ID NO: 160505
  Synthetic oligonucleotide

SEQ ID NO: 622379 - DNA, 54 bp, Artificial; identical to SEQ ID NO: 248619
  Synthetic oligonucleotide

SEQ ID NO: 622380 - DNA, 59 bp, Artificial; identical to SEQ ID NO: 142701
  Synthetic oligonucleotide

SEQ ID NO: 622381 - DNA, 52 bp, Artificial; identical to SEQ ID NO: 162418
  Synthetic oligonucleotide

SEQ ID NO: 622382 - DNA, 53 bp, Artificial; identical to SEQ ID NO: 199143
  Synthetic oligonucleotide

SEQ ID NO: 622383 - DNA, 51 bp, Artificial; identical to SEQ ID NO: 186691
  Synthetic oligonucleotide

SEQ ID NO: 622384 - DNA, 52 bp, Artificial; identical to SEQ ID NO: 169009
  Synthetic oligonucleotide

SEQ ID NO: 622385 - DNA, 55 bp, Artificial; identical to SEQ ID NO: 253152
  Synthetic oligonucleotide

SEQ ID NO: 622386 - DNA, 55 bp, Artificial; identical to SEQ ID NO: 201609
  Synthetic oligonucleotide

SEQ ID NO: 622387 - DNA, 50 bp, Artificial; identical to SEQ ID NO: 146544
  Synthetic oligonucleotide

SEQ ID NO: 622388 - DNA, 55 bp, Artificial; identical to SEQ ID NO: 156777
  Synthetic oligonucleotide

SEQ ID NO: 622389 - DNA, 55 bp, Artificial; identical to SEQ ID NO: 254532
  Synthetic oligonucleotide

SEQ ID NO: 622390 - DNA, 52 bp, Artificial; identical to SEQ ID NO: 243240
  Synthetic oligonucleotide

SEQ ID NO: 622391 - DNA, 51 bp, Artificial; identical to SEQ ID NO: 186678
  Synthetic oligonucleotide

SEQ ID NO: 622392 - DNA, 55 bp, Artificial; identical to SEQ ID NO: 201610
  Synthetic oligonucleotide

SEQ ID NO: 622393 - DNA, 56 bp, Artificial; identical to SEQ ID NO: 234608
  Synthetic oligonucleotide

SEQ ID NO: 622394 - DNA, 60 bp, Artificial; identical to SEQ ID NO: 245243
  Synthetic oligonucleotide

SEQ ID NO: 622395 - DNA, 55 bp, Artificial; identical to SEQ ID NO: 153314
  Synthetic oligonucleotide

SEQ ID NO: 622396 - DNA, 55 bp, Artificial; identical to SEQ ID NO: 245931
  Synthetic oligonucleotide

SEQ ID NO: 622397 - DNA, 49 bp, Artificial; identical to SEQ ID NO: 243783
  Synthetic oligonucleotide

SEQ ID NO: 622398 - DNA, 56 bp, Artificial; identical to SEQ ID NO: 243785
  Synthetic oligonucleotide

SEQ ID NO: 622399 - DNA, 53 bp, Artificial; identical to SEQ ID NO: 208197
  Synthetic oligonucleotide

SEQ ID NO: 622400 - DNA, 56 bp, Artificial; identical to SEQ ID NO: 150757
  Synthetic oligonucleotide

SEQ ID NO: 622401 - DNA, 52 bp, Artificial; identical to SEQ ID NO: 166184
  Synthetic oligonucleotide

SEQ ID NO: 622402 - DNA, 55 bp, Artificial; identical to SEQ ID NO: 262794
  Synthetic oligonucleotide

SEQ ID NO: 622403 - DNA, 55 bp, Artificial; identical to SEQ ID NO: 156778
  Synthetic oligonucleotide

SEQ ID NO: 622404 - DNA, 55 bp, Artificial; identical to SEQ ID NO: 265825
  Synthetic oligonucleotide

SEQ ID NO: 622405 - DNA, 58 bp, Artificial; identical to SEQ ID NO: 152487
  Synthetic oligonucleotide

SEQ ID NO: 622406 - DNA, 54 bp, Artificial; identical to SEQ ID NO: 241404
  Synthetic oligonucleotide

SEQ ID NO: 622407 - DNA, 55 bp, Artificial; identical to SEQ ID NO: 218823
  Synthetic oligonucleotide

SEQ ID NO: 622408 - DNA, 55 bp, Artificial; identical to SEQ ID NO: 233662
  Synthetic oligonucleotide

SEQ ID NO: 622409 - DNA, 55 bp, Artificial; identical to SEQ ID NO: 184413
  Synthetic oligonucleotide

SEQ ID NO: 622410 - DNA, 51 bp, Artificial; identical to SEQ ID NO: 215226
  Synthetic oligonucleotide

SEQ ID NO: 622411 - DNA, 54 bp, Artificial; identical to SEQ ID NO: 199193
  Synthetic oligonucleotide

SEQ ID NO: 622412 - DNA, 51 bp, Artificial; identical to SEQ ID NO: 160536
  Synthetic oligonucleotide

SEQ ID NO: 622413 - DNA, 58 bp, Artificial; identical to SEQ ID NO: 239242
  Synthetic oligonucleotide

SEQ ID NO: 622414 - DNA, 53 bp, Artificial; identical to SEQ ID NO: 168940
  Synthetic oligonucleotide

SEQ ID NO: 622415 - DNA, 50 bp, Artificial; identical to SEQ ID NO: 209779
  Synthetic oligonucleotide

SEQ ID NO: 622416 - DNA, 55 bp, Artificial; identical to SEQ ID NO: 156782
  Synthetic oligonucleotide

SEQ ID NO: 622417 - DNA, 55 bp, Artificial; identical to SEQ ID NO: 240497
  Synthetic oligonucleotide

SEQ ID NO: 622418 - DNA, 52 bp, Artificial; identical to SEQ ID NO: 213023
  Synthetic oligonucleotide

SEQ ID NO: 622419 - DNA, 59 bp, Artificial; identical to SEQ ID NO: 209130
  Synthetic oligonucleotide

SEQ ID NO: 622420 - DNA, 52 bp, Artificial; identical to SEQ ID NO: 245863
  Synthetic oligonucleotide

SEQ ID NO: 622421 - DNA, 55 bp, Artificial; identical to SEQ ID NO: 164268
  Synthetic oligonucleotide

SEQ ID NO: 622422 - DNA, 55 bp, Artificial; identical to SEQ ID NO: 147748
  Synthetic oligonucleotide

SEQ ID NO: 622423 - DNA, 51 bp, Artificial; identical to SEQ ID NO: 186730
  Synthetic oligonucleotide

SEQ ID NO: 622424 - DNA, 59 bp, Artificial; identical to SEQ ID NO: 241370
  Synthetic oligonucleotide

SEQ ID NO: 622425 - DNA, 54 bp, Artificial; identical to SEQ ID NO: 246071
  Synthetic oligonucleotide

SEQ ID NO: 622426 - DNA, 55 bp, Artificial; identical to SEQ ID NO: 174348
  Synthetic oligonucleotide

SEQ ID NO: 622427 - DNA, 58 bp, Artificial; identical to SEQ ID NO: 241359
  Synthetic oligonucleotide

SEQ ID NO: 622428 - DNA, 50 bp, Artificial; identical to SEQ ID NO: 200223
  Synthetic oligonucleotide

SEQ ID NO: 622429 - DNA, 55 bp, Artificial; identical to SEQ ID NO: 245893
  Synthetic oligonucleotide

SEQ ID NO: 622430 - DNA, 55 bp, Artificial; identical to SEQ ID NO: 184025
  Synthetic oligonucleotide

SEQ ID NO: 622431 - DNA, 57 bp, Artificial; identical to SEQ ID NO: 241348
  Synthetic oligonucleotide

SEQ ID NO: 622432 - DNA, 53 bp, Artificial; identical to SEQ ID NO: 217934
  Synthetic oligonucleotide

SEQ ID NO: 622433 - DNA, 51 bp, Artificial; identical to SEQ ID NO: 189670
  Synthetic oligonucleotide

SEQ ID NO: 622434 - DNA, 55 bp, Artificial; identical to SEQ ID NO: 190543
  Synthetic oligonucleotide

SEQ ID NO: 622435 - DNA, 53 bp, Artificial; identical to SEQ ID NO: 208695
  Synthetic oligonucleotide

SEQ ID NO: 622436 - DNA, 53 bp, Artificial; identical to SEQ ID NO: 250002
  Synthetic oligonucleotide

SEQ ID NO: 622437 - DNA, 55 bp, Artificial; identical to SEQ ID NO: 240496
  Synthetic oligonucleotide

SEQ ID NO: 622438 - DNA, 55 bp, Artificial; identical to SEQ ID NO: 254549
  Synthetic oligonucleotide

SEQ ID NO: 622439 - DNA, 60 bp, Artificial; identical to SEQ ID NO: 241337
  Synthetic oligonucleotide

SEQ ID NO: 622440 - DNA, 55 bp, Artificial; identical to SEQ ID NO: 201314
  Synthetic oligonucleotide

SEQ ID NO: 622441 - DNA, 57 bp, Artificial; identical to SEQ ID NO: 147526
  Synthetic oligonucleotide

SEQ ID NO: 622442 - DNA, 55 bp, Artificial; identical to SEQ ID NO: 164266
  Synthetic oligonucleotide

SEQ ID NO: 622443 - DNA, 55 bp, Artificial; identical to SEQ ID NO: 187787
  Synthetic oligonucleotide

SEQ ID NO: 622444 - DNA, 50 bp, Artificial; identical to SEQ ID NO: 200217
  Synthetic oligonucleotide

SEQ ID NO: 622445 - DNA, 55 bp, Artificial; identical to SEQ ID NO: 217841
  Synthetic oligonucleotide

SEQ ID NO: 622446 - DNA, 53 bp, Artificial; identical to SEQ ID NO: 199139
  Synthetic oligonucleotide

SEQ ID NO: 622447 - DNA, 55 bp, Artificial; identical to SEQ ID NO: 184023
  Synthetic oligonucleotide

SEQ ID NO: 622448 - DNA, 57 bp, Artificial; identical to SEQ ID NO: 223672
  Synthetic oligonucleotide

SEQ ID NO: 622449 - DNA, 55 bp, Artificial; identical to SEQ ID NO: 168714
  Synthetic oligonucleotide

SEQ ID NO: 622450 - DNA, 55 bp, Artificial; identical to SEQ ID NO: 148725
  Synthetic oligonucleotide

SEQ ID NO: 622451 - DNA, 55 bp, Artificial; identical to SEQ ID NO: 184012
  Synthetic oligonucleotide

SEQ ID NO: 622452 - DNA, 55 bp, Artificial; identical to SEQ ID NO: 238449
  Synthetic oligonucleotide

SEQ ID NO: 622453 - DNA, 57 bp, Artificial; identical to SEQ ID NO: 199182
  Synthetic oligonucleotide

SEQ ID NO: 622454 - DNA, 58 bp, Artificial; identical to SEQ ID NO: 216505
  Synthetic oligonucleotide

SEQ ID NO: 622455 - DNA, 52 bp, Artificial; identical to SEQ ID NO: 240950
  Synthetic oligonucleotide

SEQ ID NO: 622456 - DNA, 56 bp, Artificial; identical to SEQ ID NO: 151577
  Synthetic oligonucleotide

SEQ ID NO: 622457 - DNA, 55 bp, Artificial; identical to SEQ ID NO: 245872
  Synthetic oligonucleotide

SEQ ID NO: 622458 - DNA, 55 bp, Artificial; identical to SEQ ID NO: 209490
  Synthetic oligonucleotide

SEQ ID NO: 622459 - DNA, 54 bp, Artificial; identical to SEQ ID NO: 202340
  Synthetic oligonucleotide

SEQ ID NO: 622460 - DNA, 60 bp, Artificial; identical to SEQ ID NO: 177390
  Synthetic oligonucleotide

SEQ ID NO: 622461 - DNA, 54 bp, Artificial; identical to SEQ ID NO: 241326
  Synthetic oligonucleotide

SEQ ID NO: 622462 - DNA, 54 bp, Artificial; identical to SEQ ID NO: 185239
  Synthetic oligonucleotide

SEQ ID NO: 622463 - DNA, 59 bp, Artificial; identical to SEQ ID NO: 198726
  Synthetic oligonucleotide

SEQ ID NO: 622464 - DNA, 51 bp, Artificial; identical to SEQ ID NO: 161394
  Synthetic oligonucleotide

SEQ ID NO: 622465 - DNA, 54 bp, Artificial; identical to SEQ ID NO: 260231
  Synthetic oligonucleotide

SEQ ID NO: 622466 - DNA, 55 bp, Artificial; identical to SEQ ID NO: 148730
  Synthetic oligonucleotide

SEQ ID NO: 622467 - DNA, 60 bp, Artificial; identical to SEQ ID NO: 254611
  Synthetic oligonucleotide

SEQ ID NO: 622468 - DNA, 55 bp, Artificial; identical to SEQ ID NO: 257928
  Synthetic oligonucleotide

SEQ ID NO: 622469 - DNA, 55 bp, Artificial; identical to SEQ ID NO: 249173
  Synthetic oligonucleotide

SEQ ID NO: 622470 - DNA, 55 bp, Artificial; identical to SEQ ID NO: 253151
  Synthetic oligonucleotide

SEQ ID NO: 622471 - DNA, 60 bp, Artificial; identical to SEQ ID NO: 147304
  Synthetic oligonucleotide

SEQ ID NO: 622472 - DNA, 56 bp, Artificial; identical to SEQ ID NO: 217757
  Synthetic oligonucleotide

SEQ ID NO: 622473 - DNA, 60 bp, Artificial; identical to SEQ ID NO: 211635
  Synthetic oligonucleotide

SEQ ID NO: 622474 - DNA, 59 bp, Artificial; identical to SEQ ID NO: 243769
  Synthetic oligonucleotide

SEQ ID NO: 622475 - DNA, 55 bp, Artificial; identical to SEQ ID NO: 164265
  Synthetic oligonucleotide

SEQ ID NO: 622476 - DNA, 60 bp, Artificial; identical to SEQ ID NO: 258141
  Synthetic oligonucleotide

SEQ ID NO: 622477 - DNA, 55 bp, Artificial; identical to SEQ ID NO: 253150
  Synthetic oligonucleotide

SEQ ID NO: 622478 - DNA, 54 bp, Artificial; identical to SEQ ID NO: 154555
  Synthetic oligonucleotide

SEQ ID NO: 622479 - DNA, 55 bp, Artificial; identical to SEQ ID NO: 143675
  Synthetic oligonucleotide

SEQ ID NO: 622480 - DNA, 55 bp, Artificial; identical to SEQ ID NO: 245977
  Synthetic oligonucleotide

SEQ ID NO: 622481 - DNA, 60 bp, Artificial; identical to SEQ ID NO: 177393
  Synthetic oligonucleotide

SEQ ID NO: 622482 - DNA, 56 bp, Artificial; identical to SEQ ID NO: 258130
  Synthetic oligonucleotide

SEQ ID NO: 622483 - DNA, 55 bp, Artificial; identical to SEQ ID NO: 144947
  Synthetic oligonucleotide

SEQ ID NO: 622484 - DNA, 54 bp, Artificial; identical to SEQ ID NO: 164699
  Synthetic oligonucleotide

SEQ ID NO: 622485 - DNA, 55 bp, Artificial; identical to SEQ ID NO: 253148
  Synthetic oligonucleotide

SEQ ID NO: 622486 - DNA, 52 bp, Artificial; identical to SEQ ID NO: 219486
  Synthetic oligonucleotide

SEQ ID NO: 622487 - DNA, 56 bp, Artificial; identical to SEQ ID NO: 187717
  Synthetic oligonucleotide

SEQ ID NO: 622488 - DNA, 60 bp, Artificial; identical to SEQ ID NO: 194981
  Synthetic oligonucleotide

SEQ ID NO: 622489 - DNA, 55 bp, Artificial; identical to SEQ ID NO: 253147
  Synthetic oligonucleotide

SEQ ID NO: 622490 - DNA, 54 bp, Artificial; identical to SEQ ID NO: 253243
  Synthetic oligonucleotide

SEQ ID NO: 622491 - DNA, 55 bp, Artificial; identical to SEQ ID NO: 194762
  Synthetic oligonucleotide

SEQ ID NO: 622492 - DNA, 58 bp, Artificial; identical to SEQ ID NO: 223783
  Synthetic oligonucleotide

SEQ ID NO: 622493 - DNA, 52 bp, Artificial; identical to SEQ ID NO: 186165
  Synthetic oligonucleotide

SEQ ID NO: 622494 - DNA, 55 bp, Artificial; identical to SEQ ID NO: 148803
  Synthetic oligonucleotide

SEQ ID NO: 622495 - DNA, 56 bp, Artificial; identical to SEQ ID NO: 253131
  Synthetic oligonucleotide

SEQ ID NO: 622496 - DNA, 55 bp, Artificial; identical to SEQ ID NO: 217842
  Synthetic oligonucleotide

SEQ ID NO: 622497 - DNA, 59 bp, Artificial; identical to SEQ ID NO: 241293
  Synthetic oligonucleotide

SEQ ID NO: 622498 - DNA, 50 bp, Artificial; identical to SEQ ID NO: 188167
  Synthetic oligonucleotide

SEQ ID NO: 622499 - DNA, 53 bp, Artificial; identical to SEQ ID NO: 185750
  Synthetic oligonucleotide

SEQ ID NO: 622500 - DNA, 55 bp, Artificial; identical to SEQ ID NO: 234103
  Synthetic oligonucleotide

SEQ ID NO: 622501 - DNA, 60 bp, Artificial; identical to SEQ ID NO: 241282
  Synthetic oligonucleotide

SEQ ID NO: 622502 - DNA, 55 bp, Artificial; identical to SEQ ID NO: 187788
  Synthetic oligonucleotide

SEQ ID NO: 622503 - DNA, 55 bp, Artificial; identical to SEQ ID NO: 209489
  Synthetic oligonucleotide

SEQ ID NO: 622504 - DNA, 55 bp, Artificial; identical to SEQ ID NO: 202794
  Synthetic oligonucleotide

SEQ ID NO: 622505 - DNA, 50 bp, Artificial; identical to SEQ ID NO: 194068
  Synthetic oligonucleotide

SEQ ID NO: 622506 - DNA, 55 bp, Artificial; identical to SEQ ID NO: 148775
  Synthetic oligonucleotide

SEQ ID NO: 622507 - DNA, 54 bp, Artificial; identical to SEQ ID NO: 153549
  Synthetic oligonucleotide

SEQ ID NO: 622508 - DNA, 56 bp, Artificial; identical to SEQ ID NO: 201136
  Synthetic oligonucleotide

SEQ ID NO: 622509 - DNA, 55 bp, Artificial; identical to SEQ ID NO: 187789
  Synthetic oligonucleotide

SEQ ID NO: 622510 - DNA, 55 bp, Artificial; identical to SEQ ID NO: 234102
  Synthetic oligonucleotide

SEQ ID NO: 622511 - DNA, 60 bp, Artificial; identical to SEQ ID NO: 177404
  Synthetic oligonucleotide

SEQ ID NO: 622512 - DNA, 55 bp, Artificial; identical to SEQ ID NO: 164263
  Synthetic oligonucleotide

SEQ ID NO: 622513 - DNA, 52 bp, Artificial; identical to SEQ ID NO: 149629
  Synthetic oligonucleotide

SEQ ID NO: 622514 - DNA, 55 bp, Artificial; identical to SEQ ID NO: 142398
  Synthetic oligonucleotide

SEQ ID NO: 622515 - DNA, 55 bp, Artificial; identical to SEQ ID NO: 202790
  Synthetic oligonucleotide

SEQ ID NO: 622516 - DNA, 56 bp, Artificial; identical to SEQ ID NO: 265914
  Synthetic oligonucleotide

SEQ ID NO: 622517 - DNA, 60 bp, Artificial; identical to SEQ ID NO: 197215
  Synthetic oligonucleotide

SEQ ID NO: 622518 - DNA, 50 bp, Artificial; identical to SEQ ID NO: 260014
  Synthetic oligonucleotide

SEQ ID NO: 622519 - DNA, 57 bp, Artificial; identical to SEQ ID NO: 197193
  Synthetic oligonucleotide

SEQ ID NO: 622520 - DNA, 55 bp, Artificial; identical to SEQ ID NO: 241259
  Synthetic oligonucleotide

SEQ ID NO: 622521 - DNA, 54 bp, Artificial; identical to SEQ ID NO: 149127
  Synthetic oligonucleotide

SEQ ID NO: 622522 - DNA, 55 bp, Artificial; identical to SEQ ID NO: 191877
  Synthetic oligonucleotide

SEQ ID NO: 622523 - DNA, 56 bp, Artificial; identical to SEQ ID NO: 262766
  Synthetic oligonucleotide

SEQ ID NO: 622524 - DNA, 56 bp, Artificial; identical to SEQ ID NO: 147079
  Synthetic oligonucleotide

SEQ ID NO: 622525 - DNA, 59 bp, Artificial; identical to SEQ ID NO: 243767
  Synthetic oligonucleotide

SEQ ID NO: 622526 - DNA, 60 bp, Artificial; identical to SEQ ID NO: 224703
  Synthetic oligonucleotide

SEQ ID NO: 622527 - DNA, 53 bp, Artificial; identical to SEQ ID NO: 185336
  Synthetic oligonucleotide

SEQ ID NO: 622528 - DNA, 56 bp, Artificial; identical to SEQ ID NO: 224354
  Synthetic oligonucleotide

SEQ ID NO: 622529 - DNA, 55 bp, Artificial; identical to SEQ ID NO: 202186
  Synthetic oligonucleotide

SEQ ID NO: 622530 - DNA, 55 bp, Artificial; identical to SEQ ID NO: 245681
  Synthetic oligonucleotide

SEQ ID NO: 622531 - DNA, 55 bp, Artificial; identical to SEQ ID NO: 164262
  Synthetic oligonucleotide

SEQ ID NO: 622532 - DNA, 55 bp, Artificial; identical to SEQ ID NO: 211235
  Synthetic oligonucleotide

SEQ ID NO: 622533 - DNA, 54 bp, Artificial; identical to SEQ ID NO: 242520
  Synthetic oligonucleotide

SEQ ID NO: 622534 - DNA, 55 bp, Artificial; identical to SEQ ID NO: 202184
  Synthetic oligonucleotide

SEQ ID NO: 622535 - DNA, 55 bp, Artificial; identical to SEQ ID NO: 191024
  Synthetic oligonucleotide

SEQ ID NO: 622536 - DNA, 56 bp, Artificial; identical to SEQ ID NO: 144843
  Synthetic oligonucleotide

SEQ ID NO: 622537 - DNA, 55 bp, Artificial; identical to SEQ ID NO: 183951
  Synthetic oligonucleotide

SEQ ID NO: 622538 - DNA, 55 bp, Artificial; identical to SEQ ID NO: 164261
  Synthetic oligonucleotide

SEQ ID NO: 622539 - DNA, 55 bp, Artificial; identical to SEQ ID NO: 148784
  Synthetic oligonucleotide

SEQ ID NO: 622540 - DNA, 51 bp, Artificial; identical to SEQ ID NO: 208844
  Synthetic oligonucleotide

SEQ ID NO: 622541 - DNA, 50 bp, Artificial; identical to SEQ ID NO: 150518
  Synthetic oligonucleotide

SEQ ID NO: 622542 - DNA, 54 bp, Artificial; identical to SEQ ID NO: 156785
  Synthetic oligonucleotide

SEQ ID NO: 622543 - DNA, 50 bp, Artificial; identical to SEQ ID NO: 165400
  Synthetic oligonucleotide

SEQ ID NO: 622544 - DNA, 55 bp, Artificial; identical to SEQ ID NO: 257936
  Synthetic oligonucleotide

SEQ ID NO: 622545 - DNA, 60 bp, Artificial; identical to SEQ ID NO: 258119
  Synthetic oligonucleotide

SEQ ID NO: 622546 - DNA, 55 bp, Artificial; identical to SEQ ID NO: 209488
  Synthetic oligonucleotide

SEQ ID NO: 622547 - DNA, 58 bp, Artificial; identical to SEQ ID NO: 153821
  Synthetic oligonucleotide

SEQ ID NO: 622548 - DNA, 54 bp, Artificial; identical to SEQ ID NO: 174581
  Synthetic oligonucleotide

SEQ ID NO: 622549 - DNA, 50 bp, Artificial; identical to SEQ ID NO: 241742
  Synthetic oligonucleotide

SEQ ID NO: 622550 - DNA, 58 bp, Artificial; identical to SEQ ID NO: 241237
  Synthetic oligonucleotide

SEQ ID NO: 622551 - DNA, 55 bp, Artificial; identical to SEQ ID NO: 254772
  Synthetic oligonucleotide

SEQ ID NO: 622552 - DNA, 60 bp, Artificial; identical to SEQ ID NO: 241226
  Synthetic oligonucleotide

SEQ ID NO: 622553 - DNA, 55 bp, Artificial; identical to SEQ ID NO: 149055
  Synthetic oligonucleotide

SEQ ID NO: 622554 - DNA, 50 bp, Artificial; identical to SEQ ID NO: 194070
  Synthetic oligonucleotide

SEQ ID NO: 622555 - DNA, 55 bp, Artificial; identical to SEQ ID NO: 199133
  Synthetic oligonucleotide

SEQ ID NO: 622556 - DNA, 55 bp, Artificial; identical to SEQ ID NO: 222645
  Synthetic oligonucleotide

SEQ ID NO: 622557 - DNA, 55 bp, Artificial; identical to SEQ ID NO: 211237
  Synthetic oligonucleotide

SEQ ID NO: 622558 - DNA, 55 bp, Artificial; identical to SEQ ID NO: 254775
  Synthetic oligonucleotide

SEQ ID NO: 622559 - DNA, 56 bp, Artificial; identical to SEQ ID NO: 194914
  Synthetic oligonucleotide

SEQ ID NO: 622560 - DNA, 55 bp, Artificial; identical to SEQ ID NO: 218822
  Synthetic oligonucleotide

SEQ ID NO: 622561 - DNA, 55 bp, Artificial; identical to SEQ ID NO: 146268
  Synthetic oligonucleotide

SEQ ID NO: 622562 - DNA, 53 bp, Artificial; identical to SEQ ID NO: 188078
  Synthetic oligonucleotide

SEQ ID NO: 622563 - DNA, 54 bp, Artificial; identical to SEQ ID NO: 246084
  Synthetic oligonucleotide

SEQ ID NO: 622564 - DNA, 55 bp, Artificial; identical to SEQ ID NO: 217843
  Synthetic oligonucleotide

SEQ ID NO: 622565 - DNA, 55 bp, Artificial; identical to SEQ ID NO: 240490
  Synthetic oligonucleotide

SEQ ID NO: 622566 - DNA, 55 bp, Artificial; identical to SEQ ID NO: 254736
  Synthetic oligonucleotide

SEQ ID NO: 622567 - DNA, 51 bp, Artificial; identical to SEQ ID NO: 152474
  Synthetic oligonucleotide

SEQ ID NO: 622568 - DNA, 55 bp, Artificial; identical to SEQ ID NO: 219653
  Synthetic oligonucleotide

SEQ ID NO: 622569 - DNA, 50 bp, Artificial; identical to SEQ ID NO: 200241
  Synthetic oligonucleotide

SEQ ID NO: 622570 - DNA, 55 bp, Artificial; identical to SEQ ID NO: 217844
  Synthetic oligonucleotide

SEQ ID NO: 622571 - DNA, 57 bp, Artificial; identical to SEQ ID NO: 160597
  Synthetic oligonucleotide

SEQ ID NO: 622572 - DNA, 54 bp, Artificial; identical to SEQ ID NO: 242541
  Synthetic oligonucleotide

SEQ ID NO: 622573 - DNA, 60 bp, Artificial; identical to SEQ ID NO: 248586
  Synthetic oligonucleotide

SEQ ID NO: 622574 - DNA, 55 bp, Artificial; identical to SEQ ID NO: 183996
  Synthetic oligonucleotide

SEQ ID NO: 622575 - DNA, 55 bp, Artificial; identical to SEQ ID NO: 257135
  Synthetic oligonucleotide

SEQ ID NO: 622576 - DNA, 60 bp, Artificial; identical to SEQ ID NO: 187706
  Synthetic oligonucleotide

SEQ ID NO: 622577 - DNA, 55 bp, Artificial; identical to SEQ ID NO: 183998
  Synthetic oligonucleotide

SEQ ID NO: 622578 - DNA, 58 bp, Artificial; identical to SEQ ID NO: 209152
  Synthetic oligonucleotide

SEQ ID NO: 622579 - DNA, 55 bp, Artificial; identical to SEQ ID NO: 184006
  Synthetic oligonucleotide

SEQ ID NO: 622580 - DNA, 54 bp, Artificial; identical to SEQ ID NO: 168750
  Synthetic oligonucleotide

SEQ ID NO: 622581 - DNA, 50 bp, Artificial; identical to SEQ ID NO: 142649
  Synthetic oligonucleotide

SEQ ID NO: 622582 - DNA, 54 bp, Artificial; identical to SEQ ID NO: 172813
  Synthetic oligonucleotide

SEQ ID NO: 622583 - DNA, 52 bp, Artificial; identical to SEQ ID NO: 202373
  Synthetic oligonucleotide

SEQ ID NO: 622584 - DNA, 52 bp, Artificial; identical to SEQ ID NO: 169375
  Synthetic oligonucleotide

SEQ ID NO: 622585 - DNA, 55 bp, Artificial; identical to SEQ ID NO: 194805
  Synthetic oligonucleotide

SEQ ID NO: 622586 - DNA, 55 bp, Artificial; identical to SEQ ID NO: 193560
  Synthetic oligonucleotide

SEQ ID NO: 622587 - DNA, 52 bp, Artificial; identical to SEQ ID NO: 212389
  Synthetic oligonucleotide

SEQ ID NO: 622588 - DNA, 55 bp, Artificial; identical to SEQ ID NO: 155389
  Synthetic oligonucleotide

SEQ ID NO: 622589 - DNA, 55 bp, Artificial; identical to SEQ ID NO: 238454
  Synthetic oligonucleotide

SEQ ID NO: 622590 - DNA, 54 bp, Artificial; identical to SEQ ID NO: 208166
  Synthetic oligonucleotide

SEQ ID NO: 622591 - DNA, 55 bp, Artificial; identical to SEQ ID NO: 211239
  Synthetic oligonucleotide

SEQ ID NO: 622592 - DNA, 55 bp, Artificial; identical to SEQ ID NO: 183988
  Synthetic oligonucleotide

SEQ ID NO: 622593 - DNA, 55 bp, Artificial; identical to SEQ ID NO: 149060
  Synthetic oligonucleotide

SEQ ID NO: 622594 - DNA, 52 bp, Artificial; identical to SEQ ID NO: 149633
  Synthetic oligonucleotide

SEQ ID NO: 622595 - DNA, 54 bp, Artificial; identical to SEQ ID NO: 197449
  Synthetic oligonucleotide

SEQ ID NO: 622596 - DNA, 52 bp, Artificial; identical to SEQ ID NO: 266793
  Synthetic oligonucleotide

SEQ ID NO: 622597 - DNA, 55 bp, Artificial; identical to SEQ ID NO: 156779
  Synthetic oligonucleotide

SEQ ID NO: 622598 - DNA, 54 bp, Artificial; identical to SEQ ID NO: 152422
  Synthetic oligonucleotide

SEQ ID NO: 622599 - DNA, 53 bp, Artificial; identical to SEQ ID NO: 157461
  Synthetic oligonucleotide

SEQ ID NO: 622600 - DNA, 55 bp, Artificial; identical to SEQ ID NO: 253183
  Synthetic oligonucleotide

SEQ ID NO: 622601 - DNA, 57 bp, Artificial; identical to SEQ ID NO: 241148
  Synthetic oligonucleotide

SEQ ID NO: 622602 - DNA, 53 bp, Artificial; identical to SEQ ID NO: 192062
  Synthetic oligonucleotide

SEQ ID NO: 622603 - DNA, 55 bp, Artificial; identical to SEQ ID NO: 233661
  Synthetic oligonucleotide

SEQ ID NO: 622604 - DNA, 59 bp, Artificial; identical to SEQ ID NO: 224791
  Synthetic oligonucleotide

SEQ ID NO: 622605 - DNA, 55 bp, Artificial; identical to SEQ ID NO: 254747
  Synthetic oligonucleotide

SEQ ID NO: 622606 - DNA, 55 bp, Artificial; identical to SEQ ID NO: 149068
  Synthetic oligonucleotide

SEQ ID NO: 622607 - DNA, 60 bp, Artificial; identical to SEQ ID NO: 151944
  Synthetic oligonucleotide

SEQ ID NO: 622608 - DNA, 55 bp, Artificial; identical to SEQ ID NO: 149069
  Synthetic oligonucleotide

SEQ ID NO: 622609 - DNA, 60 bp, Artificial; identical to SEQ ID NO: 164478
  Synthetic oligonucleotide

SEQ ID NO: 622610 - DNA, 54 bp, Artificial; identical to SEQ ID NO: 255270
  Synthetic oligonucleotide

SEQ ID NO: 622611 - DNA, 55 bp, Artificial; identical to SEQ ID NO: 174272
  Synthetic oligonucleotide

SEQ ID NO: 622612 - DNA, 59 bp, Artificial; identical to SEQ ID NO: 245331
  Synthetic oligonucleotide

SEQ ID NO: 622613 - DNA, 54 bp, Artificial; identical to SEQ ID NO: 198681
  Synthetic oligonucleotide

SEQ ID NO: 622614 - DNA, 55 bp, Artificial; identical to SEQ ID NO: 242820
  Synthetic oligonucleotide

SEQ ID NO: 622615 - DNA, 55 bp, Artificial; identical to SEQ ID NO: 149071
  Synthetic oligonucleotide

SEQ ID NO: 622616 - DNA, 52 bp, Artificial; identical to SEQ ID NO: 188135
  Synthetic oligonucleotide

SEQ ID NO: 622617 - DNA, 55 bp, Artificial; identical to SEQ ID NO: 190550
  Synthetic oligonucleotide

SEQ ID NO: 622618 - DNA, 55 bp, Artificial; identical to SEQ ID NO: 149073
  Synthetic oligonucleotide

SEQ ID NO: 622619 - DNA, 50 bp, Artificial; identical to SEQ ID NO: 142647
  Synthetic oligonucleotide

SEQ ID NO: 622620 - DNA, 59 bp, Artificial; identical to SEQ ID NO: 150415
  Synthetic oligonucleotide

SEQ ID NO: 622621 - DNA, 55 bp, Artificial; identical to SEQ ID NO: 222643
  Synthetic oligonucleotide

SEQ ID NO: 622622 - DNA, 53 bp, Artificial; identical to SEQ ID NO: 212981
  Synthetic oligonucleotide

SEQ ID NO: 622623 - DNA, 55 bp, Artificial; identical to SEQ ID NO: 241726
  Synthetic oligonucleotide

SEQ ID NO: 622624 - DNA, 52 bp, Artificial; identical to SEQ ID NO: 221743
  Synthetic oligonucleotide

SEQ ID NO: 622625 - DNA, 55 bp, Artificial; identical to SEQ ID NO: 174579
  Synthetic oligonucleotide

SEQ ID NO: 622626 - DNA, 53 bp, Artificial; identical to SEQ ID NO: 234456
  Synthetic oligonucleotide

SEQ ID NO: 622627 - DNA, 60 bp, Artificial; identical to SEQ ID NO: 198670
  Synthetic oligonucleotide

SEQ ID NO: 622628 - DNA, 55 bp, Artificial; identical to SEQ ID NO: 149076
  Synthetic oligonucleotide

SEQ ID NO: 622629 - DNA, 55 bp, Artificial; identical to SEQ ID NO: 245663
  Synthetic oligonucleotide

SEQ ID NO: 622630 - DNA, 60 bp, Artificial; identical to SEQ ID NO: 258097
  Synthetic oligonucleotide

SEQ ID NO: 622631 - DNA, 55 bp, Artificial; identical to SEQ ID NO: 184169
  Synthetic oligonucleotide

SEQ ID NO: 622632 - DNA, 53 bp, Artificial; identical to SEQ ID NO: 266278
  Synthetic oligonucleotide

SEQ ID NO: 622633 - DNA, 55 bp, Artificial; identical to SEQ ID NO: 224832
  Synthetic oligonucleotide

SEQ ID NO: 622634 - DNA, 54 bp, Artificial; identical to SEQ ID NO: 149163
  Synthetic oligonucleotide

SEQ ID NO: 622635 - DNA, 55 bp, Artificial; identical to SEQ ID NO: 245811
  Synthetic oligonucleotide

SEQ ID NO: 622636 - DNA, 58 bp, Artificial; identical to SEQ ID NO: 177379
  Synthetic oligonucleotide

SEQ ID NO: 622637 - DNA, 55 bp, Artificial; identical to SEQ ID NO: 257945
  Synthetic oligonucleotide

SEQ ID NO: 622638 - DNA, 55 bp, Artificial; identical to SEQ ID NO: 254817
  Synthetic oligonucleotide

SEQ ID NO: 622639 - DNA, 53 bp, Artificial; identical to SEQ ID NO: 151716
  Synthetic oligonucleotide

SEQ ID NO: 622640 - DNA, 54 bp, Artificial; identical to SEQ ID NO: 224833
  Synthetic oligonucleotide

SEQ ID NO: 622641 - DNA, 55 bp, Artificial; identical to SEQ ID NO: 254820
  Synthetic oligonucleotide

SEQ ID NO: 622642 - DNA, 55 bp, Artificial; identical to SEQ ID NO: 168743
  Synthetic oligonucleotide

SEQ ID NO: 622643 - DNA, 51 bp, Artificial; identical to SEQ ID NO: 186647
  Synthetic oligonucleotide

SEQ ID NO: 622644 - DNA, 55 bp, Artificial; identical to SEQ ID NO: 254782
  Synthetic oligonucleotide

SEQ ID NO: 622645 - DNA, 55 bp, Artificial; identical to SEQ ID NO: 177382
  Synthetic oligonucleotide

SEQ ID NO: 622646 - DNA, 55 bp, Artificial; identical to SEQ ID NO: 224834
  Synthetic oligonucleotide

SEQ ID NO: 622647 - DNA, 56 bp, Artificial; identical to SEQ ID NO: 177384
  Synthetic oligonucleotide

SEQ ID NO: 622648 - DNA, 55 bp, Artificial; identical to SEQ ID NO: 184153
  Synthetic oligonucleotide

SEQ ID NO: 622649 - DNA, 55 bp, Artificial; identical to SEQ ID NO: 151717
  Synthetic oligonucleotide

SEQ ID NO: 622650 - DNA, 51 bp, Artificial; identical to SEQ ID NO: 205759
  Synthetic oligonucleotide

SEQ ID NO: 622651 - DNA, 52 bp, Artificial; identical to SEQ ID NO: 184200
  Synthetic oligonucleotide

SEQ ID NO: 622652 - DNA, 55 bp, Artificial; identical to SEQ ID NO: 184202
  Synthetic oligonucleotide

SEQ ID NO: 622653 - DNA, 55 bp, Artificial; identical to SEQ ID NO: 202789
  Synthetic oligonucleotide

SEQ ID NO: 622654 - DNA, 55 bp, Artificial; identical to SEQ ID NO: 240482
  Synthetic oligonucleotide

SEQ ID NO: 622655 - DNA, 60 bp, Artificial; identical to SEQ ID NO: 241703
  Synthetic oligonucleotide

SEQ ID NO: 622656 - DNA, 58 bp, Artificial; identical to SEQ ID NO: 241692
  Synthetic oligonucleotide

SEQ ID NO: 622657 - DNA, 60 bp, Artificial; identical to SEQ ID NO: 153810
  Synthetic oligonucleotide

SEQ ID NO: 622658 - DNA, 55 bp, Artificial; identical to SEQ ID NO: 240480
  Synthetic oligonucleotide

SEQ ID NO: 622659 - DNA, 54 bp, Artificial; identical to SEQ ID NO: 209576
  Synthetic oligonucleotide

SEQ ID NO: 622660 - DNA, 55 bp, Artificial; identical to SEQ ID NO: 224835
  Synthetic oligonucleotide

SEQ ID NO: 622661 - DNA, 54 bp, Artificial; identical to SEQ ID NO: 160403
  Synthetic oligonucleotide

SEQ ID NO: 622662 - DNA, 55 bp, Artificial; identical to SEQ ID NO: 142400
  Synthetic oligonucleotide

SEQ ID NO: 622663 - DNA, 55 bp, Artificial; identical to SEQ ID NO: 262793
  Synthetic oligonucleotide

SEQ ID NO: 622664 - DNA, 55 bp, Artificial; identical to SEQ ID NO: 168742
  Synthetic oligonucleotide

SEQ ID NO: 622665 - DNA, 55 bp, Artificial; identical to SEQ ID NO: 151718
  Synthetic oligonucleotide

SEQ ID NO: 622666 - DNA, 55 bp, Artificial; identical to SEQ ID NO: 240476
  Synthetic oligonucleotide

SEQ ID NO: 622667 - DNA, 55 bp, Artificial; identical to SEQ ID NO: 242858
  Synthetic oligonucleotide

SEQ ID NO: 622668 - DNA, 55 bp, Artificial; identical to SEQ ID NO: 184211
  Synthetic oligonucleotide

SEQ ID NO: 622669 - DNA, 55 bp, Artificial; identical to SEQ ID NO: 160176
  Synthetic oligonucleotide

SEQ ID NO: 622670 - DNA, 57 bp, Artificial; identical to SEQ ID NO: 237939
  Synthetic oligonucleotide

SEQ ID NO: 622671 - DNA, 53 bp, Artificial; identical to SEQ ID NO: 212776
  Synthetic oligonucleotide

SEQ ID NO: 622672 - DNA, 53 bp, Artificial; identical to SEQ ID NO: 194975
  Synthetic oligonucleotide

SEQ ID NO: 622673 - DNA, 56 bp, Artificial; identical to SEQ ID NO: 143728
  Synthetic oligonucleotide

SEQ ID NO: 622674 - DNA, 51 bp, Artificial; identical to SEQ ID NO: 199127
  Synthetic oligonucleotide

SEQ ID NO: 622675 - DNA, 52 bp, Artificial; identical to SEQ ID NO: 234511
  Synthetic oligonucleotide

SEQ ID NO: 622676 - DNA, 55 bp, Artificial; identical to SEQ ID NO: 233660
  Synthetic oligonucleotide

SEQ ID NO: 622677 - DNA, 56 bp, Artificial; identical to SEQ ID NO: 244023
  Synthetic oligonucleotide

SEQ ID NO: 622678 - DNA, 55 bp, Artificial; identical to SEQ ID NO: 224837
  Synthetic oligonucleotide

SEQ ID NO: 622679 - DNA, 55 bp, Artificial; identical to SEQ ID NO: 199125
  Synthetic oligonucleotide

SEQ ID NO: 622680 - DNA, 58 bp, Artificial; identical to SEQ ID NO: 243985
  Synthetic oligonucleotide

SEQ ID NO: 622681 - DNA, 55 bp, Artificial; identical to SEQ ID NO: 215542
  Synthetic oligonucleotide

SEQ ID NO: 622682 - DNA, 55 bp, Artificial; identical to SEQ ID NO: 198659
  Synthetic oligonucleotide

SEQ ID NO: 622683 - DNA, 56 bp, Artificial; identical to SEQ ID NO: 242517
  Synthetic oligonucleotide

SEQ ID NO: 622684 - DNA, 51 bp, Artificial; identical to SEQ ID NO: 246782
  Synthetic oligonucleotide

SEQ ID NO: 622685 - DNA, 52 bp, Artificial; identical to SEQ ID NO: 241659
  Synthetic oligonucleotide

SEQ ID NO: 622686 - DNA, 55 bp, Artificial; identical to SEQ ID NO: 164259
  Synthetic oligonucleotide

SEQ ID NO: 622687 - DNA, 55 bp, Artificial; identical to SEQ ID NO: 149030
  Synthetic oligonucleotide

SEQ ID NO: 622688 - DNA, 58 bp, Artificial; identical to SEQ ID NO: 206788
  Synthetic oligonucleotide

SEQ ID NO: 622689 - DNA, 58 bp, Artificial; identical to SEQ ID NO: 206787
  Synthetic oligonucleotide

SEQ ID NO: 622690 - DNA, 55 bp, Artificial; identical to SEQ ID NO: 221568
  Synthetic oligonucleotide

SEQ ID NO: 622691 - DNA, 50 bp, Artificial; identical to SEQ ID NO: 209773
  Synthetic oligonucleotide

SEQ ID NO: 622692 - DNA, 52 bp, Artificial; identical to SEQ ID NO: 188381
  Synthetic oligonucleotide

SEQ ID NO: 622693 - DNA, 55 bp, Artificial; identical to SEQ ID NO: 254665
  Synthetic oligonucleotide

SEQ ID NO: 622694 - DNA, 60 bp, Artificial; identical to SEQ ID NO: 203237
  Synthetic oligonucleotide

SEQ ID NO: 622695 - DNA, 59 bp, Artificial; identical to SEQ ID NO: 241637
  Synthetic oligonucleotide

SEQ ID NO: 622696 - DNA, 55 bp, Artificial; identical to SEQ ID NO: 217847
  Synthetic oligonucleotide

SEQ ID NO: 622697 - DNA, 51 bp, Artificial; identical to SEQ ID NO: 243373
  Synthetic oligonucleotide

SEQ ID NO: 622698 - DNA, 53 bp, Artificial; identical to SEQ ID NO: 240702
  Synthetic oligonucleotide

SEQ ID NO: 622699 - DNA, 55 bp, Artificial; identical to SEQ ID NO: 162119
  Synthetic oligonucleotide

SEQ ID NO: 622700 - DNA, 54 bp, Artificial; identical to SEQ ID NO: 177454
  Synthetic oligonucleotide

SEQ ID NO: 622701 - DNA, 60 bp, Artificial; identical to SEQ ID NO: 209450
  Synthetic oligonucleotide

SEQ ID NO: 622702 - DNA, 55 bp, Artificial; identical to SEQ ID NO: 240473
  Synthetic oligonucleotide

SEQ ID NO: 622703 - DNA, 55 bp, Artificial; identical to SEQ ID NO: 187762
  Synthetic oligonucleotide

SEQ ID NO: 622704 - DNA, 55 bp, Artificial; identical to SEQ ID NO: 245795
  Synthetic oligonucleotide

SEQ ID NO: 622705 - DNA, 55 bp, Artificial; identical to SEQ ID NO: 187763
  Synthetic oligonucleotide

SEQ ID NO: 622706 - DNA, 60 bp, Artificial; identical to SEQ ID NO: 177456
  Synthetic oligonucleotide

SEQ ID NO: 622707 - DNA, 52 bp, Artificial; identical to SEQ ID NO: 166844
  Synthetic oligonucleotide

SEQ ID NO: 622708 - DNA, 59 bp, Artificial; identical to SEQ ID NO: 212385
  Synthetic oligonucleotide

SEQ ID NO: 622709 - DNA, 55 bp, Artificial; identical to SEQ ID NO: 196954
  Synthetic oligonucleotide

SEQ ID NO: 622710 - DNA, 55 bp, Artificial; identical to SEQ ID NO: 199121
  Synthetic oligonucleotide

SEQ ID NO: 622711 - DNA, 60 bp, Artificial; identical to SEQ ID NO: 206775
  Synthetic oligonucleotide

SEQ ID NO: 622712 - DNA, 55 bp, Artificial; identical to SEQ ID NO: 167004
  Synthetic oligonucleotide

SEQ ID NO: 622713 - DNA, 58 bp, Artificial; identical to SEQ ID NO: 217724
  Synthetic oligonucleotide

SEQ ID NO: 622714 - DNA, 55 bp, Artificial; identical to SEQ ID NO: 208168
  Synthetic oligonucleotide

SEQ ID NO: 622715 - DNA, 60 bp, Artificial; identical to SEQ ID NO: 162440
  Synthetic oligonucleotide

SEQ ID NO: 622716 - DNA, 55 bp, Artificial; identical to SEQ ID NO: 203677
  Synthetic oligonucleotide

SEQ ID NO: 622717 - DNA, 55 bp, Artificial; identical to SEQ ID NO: 149042
  Synthetic oligonucleotide

SEQ ID NO: 622718 - DNA, 55 bp, Artificial; identical to SEQ ID NO: 257884
  Synthetic oligonucleotide

SEQ ID NO: 622719 - DNA, 52 bp, Artificial; identical to SEQ ID NO: 160507
  Synthetic oligonucleotide

SEQ ID NO: 622720 - DNA, 55 bp, Artificial; identical to SEQ ID NO: 189053
  Synthetic oligonucleotide

SEQ ID NO: 622721 - DNA, 55 bp, Artificial; identical to SEQ ID NO: 201611
  Synthetic oligonucleotide

SEQ ID NO: 622722 - DNA, 50 bp, Artificial; identical to SEQ ID NO: 243436
  Synthetic oligonucleotide

SEQ ID NO: 622723 - DNA, 60 bp, Artificial; identical to SEQ ID NO: 211624
  Synthetic oligonucleotide

SEQ ID NO: 622724 - DNA, 55 bp, Artificial; identical to SEQ ID NO: 184092
  Synthetic oligonucleotide

SEQ ID NO: 622725 - DNA, 55 bp, Artificial; identical to SEQ ID NO: 224839
  Synthetic oligonucleotide

SEQ ID NO: 622726 - DNA, 60 bp, Artificial; identical to SEQ ID NO: 224503
  Synthetic oligonucleotide

SEQ ID NO: 622727 - DNA, 50 bp, Artificial; identical to SEQ ID NO: 167642
  Synthetic oligonucleotide

SEQ ID NO: 622728 - DNA, 60 bp, Artificial; identical to SEQ ID NO: 241603
  Synthetic oligonucleotide

SEQ ID NO: 622729 - DNA, 55 bp, Artificial; identical to SEQ ID NO: 188380
  Synthetic oligonucleotide

SEQ ID NO: 622730 - DNA, 60 bp, Artificial; identical to SEQ ID NO: 255200
  Synthetic oligonucleotide

SEQ ID NO: 622731 - DNA, 55 bp, Artificial; identical to SEQ ID NO: 194806
  Synthetic oligonucleotide

SEQ ID NO: 622732 - DNA, 55 bp, Artificial; identical to SEQ ID NO: 241592
  Synthetic oligonucleotide

SEQ ID NO: 622733 - DNA, 52 bp, Artificial; identical to SEQ ID NO: 190822
  Synthetic oligonucleotide

SEQ ID NO: 622734 - DNA, 55 bp, Artificial; identical to SEQ ID NO: 160172
  Synthetic oligonucleotide

SEQ ID NO: 622735 - DNA, 55 bp, Artificial; identical to SEQ ID NO: 254656
  Synthetic oligonucleotide

SEQ ID NO: 622736 - DNA, 56 bp, Artificial; identical to SEQ ID NO: 147173
  Synthetic oligonucleotide

SEQ ID NO: 622737 - DNA, 51 bp, Artificial; identical to SEQ ID NO: 199984
  Synthetic oligonucleotide

SEQ ID NO: 622738 - DNA, 55 bp, Artificial; identical to SEQ ID NO: 233657
  Synthetic oligonucleotide

SEQ ID NO: 622739 - DNA, 50 bp, Artificial; identical to SEQ ID NO: 246831
  Synthetic oligonucleotide

SEQ ID NO: 622740 - DNA, 55 bp, Artificial; identical to SEQ ID NO: 156770
  Synthetic oligonucleotide

SEQ ID NO: 622741 - DNA, 55 bp, Artificial; identical to SEQ ID NO: 233655
  Synthetic oligonucleotide

SEQ ID NO: 622742 - DNA, 52 bp, Artificial; identical to SEQ ID NO: 174870
  Synthetic oligonucleotide

SEQ ID NO: 622743 - DNA, 57 bp, Artificial; identical to SEQ ID NO: 187683
  Synthetic oligonucleotide

SEQ ID NO: 622744 - DNA, 50 bp, Artificial; identical to SEQ ID NO: 210387
  Synthetic oligonucleotide

SEQ ID NO: 622745 - DNA, 55 bp, Artificial; identical to SEQ ID NO: 169930
  Synthetic oligonucleotide

SEQ ID NO: 622746 - DNA, 58 bp, Artificial; identical to SEQ ID NO: 243864
  Synthetic oligonucleotide

SEQ ID NO: 622747 - DNA, 55 bp, Artificial; identical to SEQ ID NO: 149415
  Synthetic oligonucleotide

SEQ ID NO: 622748 - DNA, 50 bp, Artificial; identical to SEQ ID NO: 206706
  Synthetic oligonucleotide

SEQ ID NO: 622749 - DNA, 55 bp, Artificial; identical to SEQ ID NO: 142402
  Synthetic oligonucleotide

SEQ ID NO: 622750 - DNA, 52 bp, Artificial; identical to SEQ ID NO: 246522
  Synthetic oligonucleotide

SEQ ID NO: 622751 - DNA, 54 bp, Artificial; identical to SEQ ID NO: 246094
  Synthetic oligonucleotide

SEQ ID NO: 622752 - DNA, 58 bp, Artificial; identical to SEQ ID NO: 159939
  Synthetic oligonucleotide

SEQ ID NO: 622753 - DNA, 55 bp, Artificial; identical to SEQ ID NO: 207493
  Synthetic oligonucleotide

SEQ ID NO: 622754 - DNA, 60 bp, Artificial; identical to SEQ ID NO: 206753
  Synthetic oligonucleotide

SEQ ID NO: 622755 - DNA, 55 bp, Artificial; identical to SEQ ID NO: 245738
  Synthetic oligonucleotide

SEQ ID NO: 622756 - DNA, 55 bp, Artificial; identical to SEQ ID NO: 257887
  Synthetic oligonucleotide

SEQ ID NO: 622757 - DNA, 55 bp, Artificial; identical to SEQ ID NO: 199117
  Synthetic oligonucleotide

SEQ ID NO: 622758 - DNA, 54 bp, Artificial; identical to SEQ ID NO: 245736
  Synthetic oligonucleotide

SEQ ID NO: 622759 - DNA, 55 bp, Artificial; identical to SEQ ID NO: 245775
  Synthetic oligonucleotide

SEQ ID NO: 622760 - DNA, 55 bp, Artificial; identical to SEQ ID NO: 253180
  Synthetic oligonucleotide

SEQ ID NO: 622761 - DNA, 60 bp, Artificial; identical to SEQ ID NO: 174425
  Synthetic oligonucleotide

SEQ ID NO: 622762 - DNA, 54 bp, Artificial; identical to SEQ ID NO: 240125
  Synthetic oligonucleotide

SEQ ID NO: 622763 - DNA, 55 bp, Artificial; identical to SEQ ID NO: 169151
  Synthetic oligonucleotide

SEQ ID NO: 622764 - DNA, 53 bp, Artificial; identical to SEQ ID NO: 243950
  Synthetic oligonucleotide

SEQ ID NO: 622765 - DNA, 55 bp, Artificial; identical to SEQ ID NO: 190593
  Synthetic oligonucleotide

SEQ ID NO: 622766 - DNA, 55 bp, Artificial; identical to SEQ ID NO: 199116
  Synthetic oligonucleotide

SEQ ID NO: 622767 - DNA, 60 bp, Artificial; identical to SEQ ID NO: 241581
  Synthetic oligonucleotide

SEQ ID NO: 622768 - DNA, 51 bp, Artificial; identical to SEQ ID NO: 243367
  Synthetic oligonucleotide

SEQ ID NO: 622769 - DNA, 55 bp, Artificial; identical to SEQ ID NO: 199114
  Synthetic oligonucleotide

SEQ ID NO: 622770 - DNA, 55 bp, Artificial; identical to SEQ ID NO: 221573
  Synthetic oligonucleotide

SEQ ID NO: 622771 - DNA, 55 bp, Artificial; identical to SEQ ID NO: 254718
  Synthetic oligonucleotide

SEQ ID NO: 622772 - DNA, 50 bp, Artificial; identical to SEQ ID NO: 206704
  Synthetic oligonucleotide

SEQ ID NO: 622773 - DNA, 60 bp, Artificial; identical to SEQ ID NO: 266041
  Synthetic oligonucleotide

SEQ ID NO: 622774 - DNA, 55 bp, Artificial; identical to SEQ ID NO: 218881
  Synthetic oligonucleotide

SEQ ID NO: 622775 - DNA, 55 bp, Artificial; identical to SEQ ID NO: 207492
  Synthetic oligonucleotide

SEQ ID NO: 622776 - DNA, 51 bp, Artificial; identical to SEQ ID NO: 154302
  Synthetic oligonucleotide

SEQ ID NO: 622777 - DNA, 55 bp, Artificial; identical to SEQ ID NO: 174573
  Synthetic oligonucleotide

SEQ ID NO: 622778 - DNA, 55 bp, Artificial; identical to SEQ ID NO: 196952
  Synthetic oligonucleotide

SEQ ID NO: 622779 - DNA, 57 bp, Artificial; identical to SEQ ID NO: 204124
  Synthetic oligonucleotide

SEQ ID NO: 622780 - DNA, 54 bp, Artificial; identical to SEQ ID NO: 191748
  Synthetic oligonucleotide

SEQ ID NO: 622781 - DNA, 55 bp, Artificial; identical to SEQ ID NO: 245767
  Synthetic oligonucleotide

SEQ ID NO: 622782 - DNA, 55 bp, Artificial; identical to SEQ ID NO: 249177
  Synthetic oligonucleotide

SEQ ID NO: 622783 - DNA, 55 bp, Artificial; identical to SEQ ID NO: 238458
  Synthetic oligonucleotide

SEQ ID NO: 622784 - DNA, 55 bp, Artificial; identical to SEQ ID NO: 156803
  Synthetic oligonucleotide

SEQ ID NO: 622785 - DNA, 55 bp, Artificial; identical to SEQ ID NO: 218883
  Synthetic oligonucleotide

SEQ ID NO: 622786 - DNA, 55 bp, Artificial; identical to SEQ ID NO: 194808
  Synthetic oligonucleotide

SEQ ID NO: 622787 - DNA, 54 bp, Artificial; identical to SEQ ID NO: 155525
  Synthetic oligonucleotide

SEQ ID NO: 622788 - DNA, 55 bp, Artificial; identical to SEQ ID NO: 184080
  Synthetic oligonucleotide

SEQ ID NO: 622789 - DNA, 55 bp, Artificial; identical to SEQ ID NO: 194809
  Synthetic oligonucleotide

SEQ ID NO: 622790 - DNA, 55 bp, Artificial; identical to SEQ ID NO: 199112
  Synthetic oligonucleotide

SEQ ID NO: 622791 - DNA, 51 bp, Artificial; identical to SEQ ID NO: 154028
  Synthetic oligonucleotide

SEQ ID NO: 622792 - DNA, 60 bp, Artificial; identical to SEQ ID NO: 174635
  Synthetic oligonucleotide

SEQ ID NO: 622793 - DNA, 55 bp, Artificial; identical to SEQ ID NO: 174572
  Synthetic oligonucleotide

SEQ ID NO: 622794 - DNA, 60 bp, Artificial; identical to SEQ ID NO: 141339
  Synthetic oligonucleotide

SEQ ID NO: 622795 - DNA, 55 bp, Artificial; identical to SEQ ID NO: 240124
  Synthetic oligonucleotide

SEQ ID NO: 622796 - DNA, 55 bp, Artificial; identical to SEQ ID NO: 164258
  Synthetic oligonucleotide

SEQ ID NO: 622797 - DNA, 57 bp, Artificial; identical to SEQ ID NO: 198637
  Synthetic oligonucleotide

SEQ ID NO: 622798 - DNA, 55 bp, Artificial; identical to SEQ ID NO: 224842
  Synthetic oligonucleotide

SEQ ID NO: 622799 - DNA, 53 bp, Artificial; identical to SEQ ID NO: 202487
  Synthetic oligonucleotide

SEQ ID NO: 622800 - DNA, 55 bp, Artificial; identical to SEQ ID NO: 142855
  Synthetic oligonucleotide

SEQ ID NO: 622801 - DNA, 55 bp, Artificial; identical to SEQ ID NO: 144943
  Synthetic oligonucleotide

SEQ ID NO: 622802 - DNA, 55 bp, Artificial; identical to SEQ ID NO: 242777
  Synthetic oligonucleotide

SEQ ID NO: 622803 - DNA, 55 bp, Artificial; identical to SEQ ID NO: 245685
  Synthetic oligonucleotide

SEQ ID NO: 622804 - DNA, 52 bp, Artificial; identical to SEQ ID NO: 186083
  Synthetic oligonucleotide

SEQ ID NO: 622805 - DNA, 53 bp, Artificial; identical to SEQ ID NO: 164904
  Synthetic oligonucleotide

SEQ ID NO: 622806 - DNA, 55 bp, Artificial; identical to SEQ ID NO: 234100
  Synthetic oligonucleotide

SEQ ID NO: 622807 - DNA, 55 bp, Artificial; identical to SEQ ID NO: 184911
  Synthetic oligonucleotide

SEQ ID NO: 622808 - DNA, 55 bp, Artificial; identical to SEQ ID NO: 174571
  Synthetic oligonucleotide

SEQ ID NO: 622809 - DNA, 55 bp, Artificial; identical to SEQ ID NO: 149049
  Synthetic oligonucleotide

SEQ ID NO: 622810 - DNA, 54 bp, Artificial; identical to SEQ ID NO: 207530
  Synthetic oligonucleotide

SEQ ID NO: 622811 - DNA, 55 bp, Artificial; identical to SEQ ID NO: 156802
  Synthetic oligonucleotide

SEQ ID NO: 622812 - DNA, 55 bp, Artificial; identical to SEQ ID NO: 168735
  Synthetic oligonucleotide

SEQ ID NO: 622813 - DNA, 50 bp, Artificial; identical to SEQ ID NO: 142656
  Synthetic oligonucleotide

SEQ ID NO: 622814 - DNA, 51 bp, Artificial; identical to SEQ ID NO: 174303
  Synthetic oligonucleotide

SEQ ID NO: 622815 - DNA, 50 bp, Artificial; identical to SEQ ID NO: 187113
  Synthetic oligonucleotide

SEQ ID NO: 622816 - DNA, 50 bp, Artificial; identical to SEQ ID NO: 259541
  Synthetic oligonucleotide

SEQ ID NO: 622817 - DNA, 55 bp, Artificial; identical to SEQ ID NO: 241537
  Synthetic oligonucleotide

SEQ ID NO: 622818 - DNA, 56 bp, Artificial; identical to SEQ ID NO: 242516
  Synthetic oligonucleotide

SEQ ID NO: 622819 - DNA, 55 bp, Artificial; identical to SEQ ID NO: 167003
  Synthetic oligonucleotide

SEQ ID NO: 622820 - DNA, 52 bp, Artificial; identical to SEQ ID NO: 243247
  Synthetic oligonucleotide

SEQ ID NO: 622821 - DNA, 56 bp, Artificial; identical to SEQ ID NO: 239538
  Synthetic oligonucleotide

SEQ ID NO: 622822 - DNA, 55 bp, Artificial; identical to SEQ ID NO: 217798
  Synthetic oligonucleotide

SEQ ID NO: 622823 - DNA, 55 bp, Artificial; identical to SEQ ID NO: 164295
  Synthetic oligonucleotide

SEQ ID NO: 622824 - DNA, 60 bp, Artificial; identical to SEQ ID NO: 163946
  Synthetic oligonucleotide

SEQ ID NO: 622825 - DNA, 60 bp, Artificial; identical to SEQ ID NO: 241526
  Synthetic oligonucleotide

SEQ ID NO: 622826 - DNA, 56 bp, Artificial; identical to SEQ ID NO: 159974
  Synthetic oligonucleotide

SEQ ID NO: 622827 - DNA, 51 bp, Artificial; identical to SEQ ID NO: 206548
  Synthetic oligonucleotide

SEQ ID NO: 622828 - DNA, 55 bp, Artificial; identical to SEQ ID NO: 161031
  Synthetic oligonucleotide

SEQ ID NO: 622829 - DNA, 54 bp, Artificial; identical to SEQ ID NO: 155526
  Synthetic oligonucleotide

SEQ ID NO: 622830 - DNA, 60 bp, Artificial; identical to SEQ ID NO: 241515
  Synthetic oligonucleotide

SEQ ID NO: 622831 - DNA, 58 bp, Artificial; identical to SEQ ID NO: 241504
  Synthetic oligonucleotide

SEQ ID NO: 622832 - DNA, 51 bp, Artificial; identical to SEQ ID NO: 165325
  Synthetic oligonucleotide

SEQ ID NO: 622833 - DNA, 60 bp, Artificial; identical to SEQ ID NO: 247032
  Synthetic oligonucleotide

SEQ ID NO: 622834 - DNA, 57 bp, Artificial; identical to SEQ ID NO: 224362
  Synthetic oligonucleotide

SEQ ID NO: 622835 - DNA, 55 bp, Artificial; identical to SEQ ID NO: 149103
  Synthetic oligonucleotide

SEQ ID NO: 622836 - DNA, 52 bp, Artificial; identical to SEQ ID NO: 261595
  Synthetic oligonucleotide

SEQ ID NO: 622837 - DNA, 55 bp, Artificial; identical to SEQ ID NO: 196950
  Synthetic oligonucleotide

SEQ ID NO: 622838 - DNA, 55 bp, Artificial; identical to SEQ ID NO: 249596
  Synthetic oligonucleotide

SEQ ID NO: 622839 - DNA, 54 bp, Artificial; identical to SEQ ID NO: 246061
  Synthetic oligonucleotide

SEQ ID NO: 622840 - DNA, 59 bp, Artificial; identical to SEQ ID NO: 247043
  Synthetic oligonucleotide

SEQ ID NO: 622841 - DNA, 55 bp, Artificial; identical to SEQ ID NO: 196947
  Synthetic oligonucleotide

SEQ ID NO: 622842 - DNA, 51 bp, Artificial; identical to SEQ ID NO: 146271
  Synthetic oligonucleotide

SEQ ID NO: 622843 - DNA, 55 bp, Artificial; identical to SEQ ID NO: 149083
  Synthetic oligonucleotide

SEQ ID NO: 622844 - DNA, 57 bp, Artificial; identical to SEQ ID NO: 191756
  Synthetic oligonucleotide

SEQ ID NO: 622845 - DNA, 55 bp, Artificial; identical to SEQ ID NO: 151720
  Synthetic oligonucleotide

SEQ ID NO: 622846 - DNA, 52 bp, Artificial; identical to SEQ ID NO: 243874
  Synthetic oligonucleotide

SEQ ID NO: 622847 - DNA, 60 bp, Artificial; identical to SEQ ID NO: 204013
  Synthetic oligonucleotide

SEQ ID NO: 622848 - DNA, 55 bp, Artificial; identical to SEQ ID NO: 257899
  Synthetic oligonucleotide

SEQ ID NO: 622849 - DNA, 52 bp, Artificial; identical to SEQ ID NO: 210827
  Synthetic oligonucleotide

SEQ ID NO: 622850 - DNA, 57 bp, Artificial; identical to SEQ ID NO: 177422
  Synthetic oligonucleotide

SEQ ID NO: 622851 - DNA, 55 bp, Artificial; identical to SEQ ID NO: 254676
  Synthetic oligonucleotide

SEQ ID NO: 622852 - DNA, 53 bp, Artificial; identical to SEQ ID NO: 185542
  Synthetic oligonucleotide

SEQ ID NO: 622853 - DNA, 54 bp, Artificial; identical to SEQ ID NO: 164732
  Synthetic oligonucleotide

SEQ ID NO: 622854 - DNA, 58 bp, Artificial; identical to SEQ ID NO: 206823
  Synthetic oligonucleotide

SEQ ID NO: 622855 - DNA, 54 bp, Artificial; identical to SEQ ID NO: 164731
  Synthetic oligonucleotide

SEQ ID NO: 622856 - DNA, 55 bp, Artificial; identical to SEQ ID NO: 254798
  Synthetic oligonucleotide

SEQ ID NO: 622857 - DNA, 59 bp, Artificial; identical to SEQ ID NO: 241481
  Synthetic oligonucleotide

SEQ ID NO: 622858 - DNA, 55 bp, Artificial; identical to SEQ ID NO: 196946
  Synthetic oligonucleotide

SEQ ID NO: 622859 - DNA, 55 bp, Artificial; identical to SEQ ID NO: 184817
  Synthetic oligonucleotide

SEQ ID NO: 622860 - DNA, 55 bp, Artificial; identical to SEQ ID NO: 201612
  Synthetic oligonucleotide

SEQ ID NO: 622861 - DNA, 55 bp, Artificial; identical to SEQ ID NO: 154300
  Synthetic oligonucleotide

SEQ ID NO: 622862 - DNA, 51 bp, Artificial; identical to SEQ ID NO: 165326
  Synthetic oligonucleotide

SEQ ID NO: 622863 - DNA, 55 bp, Artificial; identical to SEQ ID NO: 202396
  Synthetic oligonucleotide

SEQ ID NO: 622864 - DNA, 58 bp, Artificial; identical to SEQ ID NO: 237503
  Synthetic oligonucleotide

SEQ ID NO: 622865 - DNA, 57 bp, Artificial; identical to SEQ ID NO: 210822
  Synthetic oligonucleotide

SEQ ID NO: 622866 - DNA, 55 bp, Artificial; identical to SEQ ID NO: 194815
  Synthetic oligonucleotide

SEQ ID NO: 622867 - DNA, 51 bp, Artificial; identical to SEQ ID NO: 209718
  Synthetic oligonucleotide

SEQ ID NO: 622868 - DNA, 54 bp, Artificial; identical to SEQ ID NO: 188029
  Synthetic oligonucleotide

SEQ ID NO: 622869 - DNA, 51 bp, Artificial; identical to SEQ ID NO: 165327
  Synthetic oligonucleotide

SEQ ID NO: 622870 - DNA, 55 bp, Artificial; identical to SEQ ID NO: 199045
  Synthetic oligonucleotide

SEQ ID NO: 622871 - DNA, 55 bp, Artificial; identical to SEQ ID NO: 249178
  Synthetic oligonucleotide

SEQ ID NO: 622872 - DNA, 57 bp, Artificial; identical to SEQ ID NO: 148748
  Synthetic oligonucleotide

SEQ ID NO: 622873 - DNA, 55 bp, Artificial; identical to SEQ ID NO: 217712
  Synthetic oligonucleotide

SEQ ID NO: 622874 - DNA, 56 bp, Artificial; identical to SEQ ID NO: 148637
  Synthetic oligonucleotide

SEQ ID NO: 622875 - DNA, 50 bp, Artificial; identical to SEQ ID NO: 150534
  Synthetic oligonucleotide

SEQ ID NO: 622876 - DNA, 58 bp, Artificial; identical to SEQ ID NO: 148415
  Synthetic oligonucleotide

SEQ ID NO: 622877 - DNA, 52 bp, Artificial; identical to SEQ ID NO: 246517
  Synthetic oligonucleotide

SEQ ID NO: 622878 - DNA, 55 bp, Artificial; identical to SEQ ID NO: 254802
  Synthetic oligonucleotide

SEQ ID NO: 622879 - DNA, 58 bp, Artificial; identical to SEQ ID NO: 243961
  Synthetic oligonucleotide

SEQ ID NO: 622880 - DNA, 54 bp, Artificial; identical to SEQ ID NO: 242553
  Synthetic oligonucleotide

SEQ ID NO: 622881 - DNA, 60 bp, Artificial; identical to SEQ ID NO: 255322
  Synthetic oligonucleotide

SEQ ID NO: 622882 - DNA, 57 bp, Artificial; identical to SEQ ID NO: 148304
  Synthetic oligonucleotide

SEQ ID NO: 622883 - DNA, 55 bp, Artificial; identical to SEQ ID NO: 254762
  Synthetic oligonucleotide

SEQ ID NO: 622884 - DNA, 58 bp, Artificial; identical to SEQ ID NO: 247066
  Synthetic oligonucleotide

SEQ ID NO: 622885 - DNA, 54 bp, Artificial; identical to SEQ ID NO: 185323
  Synthetic oligonucleotide

SEQ ID NO: 622886 - DNA, 60 bp, Artificial; identical to SEQ ID NO: 201829
  Synthetic oligonucleotide

SEQ ID NO: 622887 - DNA, 60 bp, Artificial; identical to SEQ ID NO: 177429
  Synthetic oligonucleotide

SEQ ID NO: 622888 - DNA, 53 bp, Artificial; identical to SEQ ID NO: 255328
  Synthetic oligonucleotide

SEQ ID NO: 622889 - DNA, 51 bp, Artificial; identical to SEQ ID NO: 149896
  Synthetic oligonucleotide

SEQ ID NO: 622890 - DNA, 55 bp, Artificial; identical to SEQ ID NO: 202178
  Synthetic oligonucleotide

SEQ ID NO: 622891 - DNA, 55 bp, Artificial; identical to SEQ ID NO: 242770
  Synthetic oligonucleotide

SEQ ID NO: 622892 - DNA, 55 bp, Artificial; identical to SEQ ID NO: 168732
  Synthetic oligonucleotide

SEQ ID NO: 622893 - DNA, 55 bp, Artificial; identical to SEQ ID NO: 240118
  Synthetic oligonucleotide

SEQ ID NO: 622894 - DNA, 55 bp, Artificial; identical to SEQ ID NO: 217804
  Synthetic oligonucleotide

SEQ ID NO: 622895 - DNA, 55 bp, Artificial; identical to SEQ ID NO: 266228
  Synthetic oligonucleotide

SEQ ID NO: 622896 - DNA, 57 bp, Artificial; identical to SEQ ID NO: 161926
  Synthetic oligonucleotide

SEQ ID NO: 622897 - DNA, 55 bp, Artificial; identical to SEQ ID NO: 216397
  Synthetic oligonucleotide

SEQ ID NO: 622898 - DNA, 55 bp, Artificial; identical to SEQ ID NO: 148952
  Synthetic oligonucleotide

SEQ ID NO: 622899 - DNA, 55 bp, Artificial; identical to SEQ ID NO: 245762
  Synthetic oligonucleotide

SEQ ID NO: 622900 - DNA, 55 bp, Artificial; identical to SEQ ID NO: 211244
  Synthetic oligonucleotide

SEQ ID NO: 622901 - DNA, 55 bp, Artificial; identical to SEQ ID NO: 188377
  Synthetic oligonucleotide

SEQ ID NO: 622902 - DNA, 55 bp, Artificial; identical to SEQ ID NO: 266792
  Synthetic oligonucleotide

SEQ ID NO: 622903 - DNA, 55 bp, Artificial; identical to SEQ ID NO: 254520
  Synthetic oligonucleotide

SEQ ID NO: 622904 - DNA, 54 bp, Artificial; identical to SEQ ID NO: 185300
  Synthetic oligonucleotide

SEQ ID NO: 622905 - DNA, 59 bp, Artificial; identical to SEQ ID NO: 177432
  Synthetic oligonucleotide

SEQ ID NO: 622906 - DNA, 57 bp, Artificial; identical to SEQ ID NO: 187672
  Synthetic oligonucleotide

SEQ ID NO: 622907 - DNA, 55 bp, Artificial; identical to SEQ ID NO: 169156
  Synthetic oligonucleotide

SEQ ID NO: 622908 - DNA, 60 bp, Artificial; identical to SEQ ID NO: 243891
  Synthetic oligonucleotide

SEQ ID NO: 622909 - DNA, 53 bp, Artificial; identical to SEQ ID NO: 199801
  Synthetic oligonucleotide

SEQ ID NO: 622910 - DNA, 56 bp, Artificial; identical to SEQ ID NO: 224404
  Synthetic oligonucleotide

SEQ ID NO: 622911 - DNA, 55 bp, Artificial; identical to SEQ ID NO: 211245
  Synthetic oligonucleotide

SEQ ID NO: 622912 - DNA, 54 bp, Artificial; identical to SEQ ID NO: 194817
  Synthetic oligonucleotide

SEQ ID NO: 622913 - DNA, 55 bp, Artificial; identical to SEQ ID NO: 240117
  Synthetic oligonucleotide

SEQ ID NO: 622914 - DNA, 55 bp, Artificial; identical to SEQ ID NO: 184833
  Synthetic oligonucleotide

SEQ ID NO: 622915 - DNA, 55 bp, Artificial; identical to SEQ ID NO: 199041
  Synthetic oligonucleotide

SEQ ID NO: 622916 - DNA, 55 bp, Artificial; identical to SEQ ID NO: 184841
  Synthetic oligonucleotide

SEQ ID NO: 622917 - DNA, 60 bp, Artificial; identical to SEQ ID NO: 247088
  Synthetic oligonucleotide

SEQ ID NO: 622918 - DNA, 59 bp, Artificial; identical to SEQ ID NO: 141361
  Synthetic oligonucleotide

SEQ ID NO: 622919 - DNA, 55 bp, Artificial; identical to SEQ ID NO: 148974
  Synthetic oligonucleotide

SEQ ID NO: 622920 - DNA, 52 bp, Artificial; identical to SEQ ID NO: 186090
  Synthetic oligonucleotide

SEQ ID NO: 622921 - DNA, 54 bp, Artificial; identical to SEQ ID NO: 206820
  Synthetic oligonucleotide

SEQ ID NO: 622922 - DNA, 60 bp, Artificial; identical to SEQ ID NO: 153676
  Synthetic oligonucleotide

SEQ ID NO: 622923 - DNA, 55 bp, Artificial; identical to SEQ ID NO: 156792
  Synthetic oligonucleotide

SEQ ID NO: 622924 - DNA, 55 bp, Artificial; identical to SEQ ID NO: 142581
  Synthetic oligonucleotide

SEQ ID NO: 622925 - DNA, 55 bp, Artificial; identical to SEQ ID NO: 164293
  Synthetic oligonucleotide

SEQ ID NO: 622926 - DNA, 55 bp, Artificial; identical to SEQ ID NO: 148939
  Synthetic oligonucleotide

SEQ ID NO: 622927 - DNA, 50 bp, Artificial; identical to SEQ ID NO: 187107
  Synthetic oligonucleotide

SEQ ID NO: 622928 - DNA, 50 bp, Artificial; identical to SEQ ID NO: 176647
  Synthetic oligonucleotide

SEQ ID NO: 622929 - DNA, 55 bp, Artificial; identical to SEQ ID NO: 224843
  Synthetic oligonucleotide

SEQ ID NO: 622930 - DNA, 57 bp, Artificial; identical to SEQ ID NO: 179703
  Synthetic oligonucleotide

SEQ ID NO: 622931 - DNA, 55 bp, Artificial; identical to SEQ ID NO: 144427
  Synthetic oligonucleotide

SEQ ID NO: 622932 - DNA, 55 bp, Artificial; identical to SEQ ID NO: 156791
  Synthetic oligonucleotide

SEQ ID NO: 622933 - DNA, 52 bp, Artificial; identical to SEQ ID NO: 202497
  Synthetic oligonucleotide

SEQ ID NO: 622934 - DNA, 55 bp, Artificial; identical to SEQ ID NO: 174568
  Synthetic oligonucleotide

SEQ ID NO: 622935 - DNA, 55 bp, Artificial; identical to SEQ ID NO: 156789
  Synthetic oligonucleotide

SEQ ID NO: 622936 - DNA, 60 bp, Artificial; identical to SEQ ID NO: 147438
  Synthetic oligonucleotide

SEQ ID NO: 622937 - DNA, 58 bp, Artificial; identical to SEQ ID NO: 147427
  Synthetic oligonucleotide

SEQ ID NO: 622938 - DNA, 55 bp, Artificial; identical to SEQ ID NO: 142405
  Synthetic oligonucleotide

SEQ ID NO: 622939 - DNA, 60 bp, Artificial; identical to SEQ ID NO: 242242
  Synthetic oligonucleotide

SEQ ID NO: 622940 - DNA, 51 bp, Artificial; identical to SEQ ID NO: 174960
  Synthetic oligonucleotide

SEQ ID NO: 622941 - DNA, 55 bp, Artificial; identical to SEQ ID NO: 142406
  Synthetic oligonucleotide

SEQ ID NO: 622942 - DNA, 55 bp, Artificial; identical to SEQ ID NO: 254588
  Synthetic oligonucleotide

SEQ ID NO: 622943 - DNA, 55 bp, Artificial; identical to SEQ ID NO: 156748
  Synthetic oligonucleotide

SEQ ID NO: 622944 - DNA, 55 bp, Artificial; identical to SEQ ID NO: 224844
  Synthetic oligonucleotide

SEQ ID NO: 622945 - DNA, 52 bp, Artificial; identical to SEQ ID NO: 143826
  Synthetic oligonucleotide

SEQ ID NO: 622946 - DNA, 58 bp, Artificial; identical to SEQ ID NO: 242231
  Synthetic oligonucleotide

SEQ ID NO: 622947 - DNA, 55 bp, Artificial; identical to SEQ ID NO: 184835
  Synthetic oligonucleotide

SEQ ID NO: 622948 - DNA, 55 bp, Artificial; identical to SEQ ID NO: 196943
  Synthetic oligonucleotide

SEQ ID NO: 622949 - DNA, 54 bp, Artificial; identical to SEQ ID NO: 255185
  Synthetic oligonucleotide

SEQ ID NO: 622950 - DNA, 55 bp, Artificial; identical to SEQ ID NO: 218820
  Synthetic oligonucleotide

SEQ ID NO: 622951 - DNA, 55 bp, Artificial; identical to SEQ ID NO: 184829
  Synthetic oligonucleotide

SEQ ID NO: 622952 - DNA, 55 bp, Artificial; identical to SEQ ID NO: 242811
  Synthetic oligonucleotide

SEQ ID NO: 622953 - DNA, 56 bp, Artificial; identical to SEQ ID NO: 239403
  Synthetic oligonucleotide

SEQ ID NO: 622954 - DNA, 52 bp, Artificial; identical to SEQ ID NO: 243234
  Synthetic oligonucleotide

SEQ ID NO: 622955 - DNA, 50 bp, Artificial; identical to SEQ ID NO: 194083
  Synthetic oligonucleotide

SEQ ID NO: 622956 - DNA, 55 bp, Artificial; identical to SEQ ID NO: 147044
  Synthetic oligonucleotide

SEQ ID NO: 622957 - DNA, 56 bp, Artificial; identical to SEQ ID NO: 198615
  Synthetic oligonucleotide

SEQ ID NO: 622958 - DNA, 55 bp, Artificial; identical to SEQ ID NO: 207517
  Synthetic oligonucleotide

SEQ ID NO: 622959 - DNA, 55 bp, Artificial; identical to SEQ ID NO: 171779
  Synthetic oligonucleotide

SEQ ID NO: 622960 - DNA, 55 bp, Artificial; identical to SEQ ID NO: 184826
  Synthetic oligonucleotide

SEQ ID NO: 622961 - DNA, 53 bp, Artificial; identical to SEQ ID NO: 185502
  Synthetic oligonucleotide

SEQ ID NO: 622962 - DNA, 55 bp, Artificial; identical to SEQ ID NO: 184865
  Synthetic oligonucleotide

SEQ ID NO: 622963 - DNA, 60 bp, Artificial; identical to SEQ ID NO: 242208
  Synthetic oligonucleotide

SEQ ID NO: 622964 - DNA, 51 bp, Artificial; identical to SEQ ID NO: 241064
  Synthetic oligonucleotide

SEQ ID NO: 622965 - DNA, 60 bp, Artificial; identical to SEQ ID NO: 242186
  Synthetic oligonucleotide

SEQ ID NO: 622966 - DNA, 54 bp, Artificial; identical to SEQ ID NO: 193851
  Synthetic oligonucleotide

SEQ ID NO: 622967 - DNA, 55 bp, Artificial; identical to SEQ ID NO: 207516
  Synthetic oligonucleotide

SEQ ID NO: 622968 - DNA, 58 bp, Artificial; identical to SEQ ID NO: 242175
  Synthetic oligonucleotide

SEQ ID NO: 622969 - DNA, 60 bp, Artificial; identical to SEQ ID NO: 147393
  Synthetic oligonucleotide

SEQ ID NO: 622970 - DNA, 51 bp, Artificial; identical to SEQ ID NO: 215233
  Synthetic oligonucleotide

SEQ ID NO: 622971 - DNA, 59 bp, Artificial; identical to SEQ ID NO: 201118
  Synthetic oligonucleotide

SEQ ID NO: 622972 - DNA, 55 bp, Artificial; identical to SEQ ID NO: 206816
  Synthetic oligonucleotide

SEQ ID NO: 622973 - DNA, 55 bp, Artificial; identical to SEQ ID NO: 202172
  Synthetic oligonucleotide

SEQ ID NO: 622974 - DNA, 52 bp, Artificial; identical to SEQ ID NO: 149686
  Synthetic oligonucleotide

SEQ ID NO: 622975 - DNA, 55 bp, Artificial; identical to SEQ ID NO: 164289
  Synthetic oligonucleotide

SEQ ID NO: 622976 - DNA, 57 bp, Artificial; identical to SEQ ID NO: 262763
  Synthetic oligonucleotide

SEQ ID NO: 622977 - DNA, 60 bp, Artificial; identical to SEQ ID NO: 247121
  Synthetic oligonucleotide

SEQ ID NO: 622978 - DNA, 55 bp, Artificial; identical to SEQ ID NO: 240112
  Synthetic oligonucleotide

SEQ ID NO: 622979 - DNA, 55 bp, Artificial; identical to SEQ ID NO: 211246
  Synthetic oligonucleotide

SEQ ID NO: 622980 - DNA, 53 bp, Artificial; identical to SEQ ID NO: 185553
  Synthetic oligonucleotide

SEQ ID NO: 622981 - DNA, 55 bp, Artificial; identical to SEQ ID NO: 195184
  Synthetic oligonucleotide

SEQ ID NO: 622982 - DNA, 55 bp, Artificial; identical to SEQ ID NO: 171778
  Synthetic oligonucleotide

SEQ ID NO: 622983 - DNA, 60 bp, Artificial; identical to SEQ ID NO: 198592
  Synthetic oligonucleotide

SEQ ID NO: 622984 - DNA, 59 bp, Artificial; identical to SEQ ID NO: 237914
  Synthetic oligonucleotide

SEQ ID NO: 622985 - DNA, 51 bp, Artificial; identical to SEQ ID NO: 186390
  Synthetic oligonucleotide

SEQ ID NO: 622986 - DNA, 59 bp, Artificial; identical to SEQ ID NO: 239228
  Synthetic oligonucleotide

SEQ ID NO: 622987 - DNA, 53 bp, Artificial; identical to SEQ ID NO: 253808
  Synthetic oligonucleotide

SEQ ID NO: 622988 - DNA, 55 bp, Artificial; identical to SEQ ID NO: 149003
  Synthetic oligonucleotide

SEQ ID NO: 622989 - DNA, 55 bp, Artificial; identical to SEQ ID NO: 191020
  Synthetic oligonucleotide

SEQ ID NO: 622990 - DNA, 55 bp, Artificial; identical to SEQ ID NO: 196941
  Synthetic oligonucleotide

SEQ ID NO: 622991 - DNA, 55 bp, Artificial; identical to SEQ ID NO: 184819
  Synthetic oligonucleotide

SEQ ID NO: 622992 - DNA, 55 bp, Artificial; identical to SEQ ID NO: 156743
  Synthetic oligonucleotide

SEQ ID NO: 622993 - DNA, 55 bp, Artificial; identical to SEQ ID NO: 184799
  Synthetic oligonucleotide

SEQ ID NO: 622994 - DNA, 55 bp, Artificial; identical to SEQ ID NO: 164288
  Synthetic oligonucleotide

SEQ ID NO: 622995 - DNA, 58 bp, Artificial; identical to SEQ ID NO: 247132
  Synthetic oligonucleotide

SEQ ID NO: 622996 - DNA, 51 bp, Artificial; identical to SEQ ID NO: 187033
  Synthetic oligonucleotide

SEQ ID NO: 622997 - DNA, 55 bp, Artificial; identical to SEQ ID NO: 149008
  Synthetic oligonucleotide

SEQ ID NO: 622998 - DNA, 60 bp, Artificial; identical to SEQ ID NO: 258075
  Synthetic oligonucleotide

SEQ ID NO: 622999 - DNA, 54 bp, Artificial; identical to SEQ ID NO: 190599
  Synthetic oligonucleotide

SEQ ID NO: 623000 - DNA, 55 bp, Artificial; identical to SEQ ID NO: 164287
  Synthetic oligonucleotide

SEQ ID NO: 623001 - DNA, 53 bp, Artificial; identical to SEQ ID NO: 167083
  Synthetic oligonucleotide

SEQ ID NO: 623002 - DNA, 55 bp, Artificial; identical to SEQ ID NO: 199038
  Synthetic oligonucleotide

SEQ ID NO: 623003 - DNA, 56 bp, Artificial; identical to SEQ ID NO: 180085
  Synthetic oligonucleotide

SEQ ID NO: 623004 - DNA, 55 bp, Artificial; identical to SEQ ID NO: 149014
  Synthetic oligonucleotide

SEQ ID NO: 623005 - DNA, 55 bp, Artificial; identical to SEQ ID NO: 211249
  Synthetic oligonucleotide

SEQ ID NO: 623006 - DNA, 55 bp, Artificial; identical to SEQ ID NO: 149016
  Synthetic oligonucleotide

SEQ ID NO: 623007 - DNA, 54 bp, Artificial; identical to SEQ ID NO: 247770
  Synthetic oligonucleotide

SEQ ID NO: 623008 - DNA, 59 bp, Artificial; identical to SEQ ID NO: 239173
  Synthetic oligonucleotide

SEQ ID NO: 623009 - DNA, 55 bp, Artificial; identical to SEQ ID NO: 194820
  Synthetic oligonucleotide

SEQ ID NO: 623010 - DNA, 58 bp, Artificial; identical to SEQ ID NO: 242142
  Synthetic oligonucleotide

SEQ ID NO: 623011 - DNA, 55 bp, Artificial; identical to SEQ ID NO: 236465
  Synthetic oligonucleotide

SEQ ID NO: 623012 - DNA, 51 bp, Artificial; identical to SEQ ID NO: 243306
  Synthetic oligonucleotide

SEQ ID NO: 623013 - DNA, 55 bp, Artificial; identical to SEQ ID NO: 207513
  Synthetic oligonucleotide

SEQ ID NO: 623014 - DNA, 55 bp, Artificial; identical to SEQ ID NO: 143679
  Synthetic oligonucleotide

SEQ ID NO: 623015 - DNA, 55 bp, Artificial; identical to SEQ ID NO: 224846
  Synthetic oligonucleotide

SEQ ID NO: 623016 - DNA, 52 bp, Artificial; identical to SEQ ID NO: 145040
  Synthetic oligonucleotide

SEQ ID NO: 623017 - DNA, 60 bp, Artificial; identical to SEQ ID NO: 254977
  Synthetic oligonucleotide

SEQ ID NO: 623018 - DNA, 55 bp, Artificial; identical to SEQ ID NO: 187814
  Synthetic oligonucleotide

SEQ ID NO: 623019 - DNA, 55 bp, Artificial; identical to SEQ ID NO: 179778
  Synthetic oligonucleotide

SEQ ID NO: 623020 - DNA, 55 bp, Artificial; identical to SEQ ID NO: 160860
  Synthetic oligonucleotide

SEQ ID NO: 623021 - DNA, 52 bp, Artificial; identical to SEQ ID NO: 247978
  Synthetic oligonucleotide

SEQ ID NO: 623022 - DNA, 55 bp, Artificial; identical to SEQ ID NO: 169937
  Synthetic oligonucleotide

SEQ ID NO: 623023 - DNA, 51 bp, Artificial; identical to SEQ ID NO: 189673
  Synthetic oligonucleotide

SEQ ID NO: 623024 - DNA, 59 bp, Artificial; identical to SEQ ID NO: 171040
  Synthetic oligonucleotide

SEQ ID NO: 623025 - DNA, 54 bp, Artificial; identical to SEQ ID NO: 171892
  Synthetic oligonucleotide

SEQ ID NO: 623026 - DNA, 57 bp, Artificial; identical to SEQ ID NO: 202384
  Synthetic oligonucleotide

SEQ ID NO: 623027 - DNA, 55 bp, Artificial; identical to SEQ ID NO: 184935
  Synthetic oligonucleotide

SEQ ID NO: 623028 - DNA, 54 bp, Artificial; identical to SEQ ID NO: 188010
  Synthetic oligonucleotide

SEQ ID NO: 623029 - DNA, 55 bp, Artificial; identical to SEQ ID NO: 160225
  Synthetic oligonucleotide

SEQ ID NO: 623030 - DNA, 51 bp, Artificial; identical to SEQ ID NO: 200000
  Synthetic oligonucleotide

SEQ ID NO: 623031 - DNA, 51 bp, Artificial; identical to SEQ ID NO: 157891
  Synthetic oligonucleotide

SEQ ID NO: 623032 - DNA, 55 bp, Artificial; identical to SEQ ID NO: 155388
  Synthetic oligonucleotide

SEQ ID NO: 623033 - DNA, 59 bp, Artificial; identical to SEQ ID NO: 141372
  Synthetic oligonucleotide

SEQ ID NO: 623034 - DNA, 57 bp, Artificial; identical to SEQ ID NO: 193184
  Synthetic oligonucleotide

SEQ ID NO: 623035 - DNA, 51 bp, Artificial; identical to SEQ ID NO: 246789
  Synthetic oligonucleotide

SEQ ID NO: 623036 - DNA, 55 bp, Artificial; identical to SEQ ID NO: 255098
  Synthetic oligonucleotide

SEQ ID NO: 623037 - DNA, 55 bp, Artificial; identical to SEQ ID NO: 156768
  Synthetic oligonucleotide

SEQ ID NO: 623038 - DNA, 55 bp, Artificial; identical to SEQ ID NO: 249224
  Synthetic oligonucleotide

SEQ ID NO: 623039 - DNA, 55 bp, Artificial; identical to SEQ ID NO: 190601
  Synthetic oligonucleotide

SEQ ID NO: 623040 - DNA, 56 bp, Artificial; identical to SEQ ID NO: 239249
  Synthetic oligonucleotide

SEQ ID NO: 623041 - DNA, 57 bp, Artificial; identical to SEQ ID NO: 142508
  Synthetic oligonucleotide

SEQ ID NO: 623042 - DNA, 60 bp, Artificial; identical to SEQ ID NO: 193828
  Synthetic oligonucleotide

SEQ ID NO: 623043 - DNA, 57 bp, Artificial; identical to SEQ ID NO: 144720
  Synthetic oligonucleotide

SEQ ID NO: 623044 - DNA, 55 bp, Artificial; identical to SEQ ID NO: 212821
  Synthetic oligonucleotide

SEQ ID NO: 623045 - DNA, 55 bp, Artificial; identical to SEQ ID NO: 238424
  Synthetic oligonucleotide

SEQ ID NO: 623046 - DNA, 53 bp, Artificial; identical to SEQ ID NO: 185491
  Synthetic oligonucleotide

SEQ ID NO: 623047 - DNA, 55 bp, Artificial; identical to SEQ ID NO: 187818
  Synthetic oligonucleotide

SEQ ID NO: 623048 - DNA, 52 bp, Artificial; identical to SEQ ID NO: 243232
  Synthetic oligonucleotide

SEQ ID NO: 623049 - DNA, 55 bp, Artificial; identical to SEQ ID NO: 187819
  Synthetic oligonucleotide

SEQ ID NO: 623050 - DNA, 55 bp, Artificial; identical to SEQ ID NO: 184907
  Synthetic oligonucleotide

SEQ ID NO: 623051 - DNA, 55 bp, Artificial; identical to SEQ ID NO: 196940
  Synthetic oligonucleotide

SEQ ID NO: 623052 - DNA, 60 bp, Artificial; identical to SEQ ID NO: 247154
  Synthetic oligonucleotide

SEQ ID NO: 623053 - DNA, 55 bp, Artificial; identical to SEQ ID NO: 148985
  Synthetic oligonucleotide

SEQ ID NO: 623054 - DNA, 55 bp, Artificial; identical to SEQ ID NO: 199036
  Synthetic oligonucleotide

SEQ ID NO: 623055 - DNA, 55 bp, Artificial; identical to SEQ ID NO: 212820
  Synthetic oligonucleotide

SEQ ID NO: 623056 - DNA, 60 bp, Artificial; identical to SEQ ID NO: 177245
  Synthetic oligonucleotide

SEQ ID NO: 623057 - DNA, 55 bp, Artificial; identical to SEQ ID NO: 208172
  Synthetic oligonucleotide

SEQ ID NO: 623058 - DNA, 52 bp, Artificial; identical to SEQ ID NO: 213020
  Synthetic oligonucleotide

SEQ ID NO: 623059 - DNA, 55 bp, Artificial; identical to SEQ ID NO: 245785
  Synthetic oligonucleotide

SEQ ID NO: 623060 - DNA, 55 bp, Artificial; identical to SEQ ID NO: 245794
  Synthetic oligonucleotide

SEQ ID NO: 623061 - DNA, 60 bp, Artificial; identical to SEQ ID NO: 177247
  Synthetic oligonucleotide

SEQ ID NO: 623062 - DNA, 55 bp, Artificial; identical to SEQ ID NO: 255109
  Synthetic oligonucleotide

SEQ ID NO: 623063 - DNA, 57 bp, Artificial; identical to SEQ ID NO: 206814
  Synthetic oligonucleotide

SEQ ID NO: 623064 - DNA, 55 bp, Artificial; identical to SEQ ID NO: 240109
  Synthetic oligonucleotide

SEQ ID NO: 623065 - DNA, 60 bp, Artificial; identical to SEQ ID NO: 147349
  Synthetic oligonucleotide

SEQ ID NO: 623066 - DNA, 55 bp, Artificial; identical to SEQ ID NO: 221582
  Synthetic oligonucleotide

SEQ ID NO: 623067 - DNA, 54 bp, Artificial; identical to SEQ ID NO: 203902
  Synthetic oligonucleotide

SEQ ID NO: 623068 - DNA, 55 bp, Artificial; identical to SEQ ID NO: 245804
  Synthetic oligonucleotide

SEQ ID NO: 623069 - DNA, 57 bp, Artificial; identical to SEQ ID NO: 177252
  Synthetic oligonucleotide

SEQ ID NO: 623070 - DNA, 58 bp, Artificial; identical to SEQ ID NO: 144307
  Synthetic oligonucleotide

SEQ ID NO: 623071 - DNA, 55 bp, Artificial; identical to SEQ ID NO: 161030
  Synthetic oligonucleotide

SEQ ID NO: 623072 - DNA, 53 bp, Artificial; identical to SEQ ID NO: 185480
  Synthetic oligonucleotide

SEQ ID NO: 623073 - DNA, 57 bp, Artificial; identical to SEQ ID NO: 171062
  Synthetic oligonucleotide

SEQ ID NO: 623074 - DNA, 55 bp, Artificial; identical to SEQ ID NO: 234097
  Synthetic oligonucleotide

SEQ ID NO: 623075 - DNA, 55 bp, Artificial; identical to SEQ ID NO: 162171
  Synthetic oligonucleotide

SEQ ID NO: 623076 - DNA, 55 bp, Artificial; identical to SEQ ID NO: 191880
  Synthetic oligonucleotide

SEQ ID NO: 623077 - DNA, 55 bp, Artificial; identical to SEQ ID NO: 205547
  Synthetic oligonucleotide

SEQ ID NO: 623078 - DNA, 55 bp, Artificial; identical to SEQ ID NO: 144798
  Synthetic oligonucleotide

SEQ ID NO: 623079 - DNA, 55 bp, Artificial; identical to SEQ ID NO: 153309
  Synthetic oligonucleotide

SEQ ID NO: 623080 - DNA, 55 bp, Artificial; identical to SEQ ID NO: 240108
  Synthetic oligonucleotide

SEQ ID NO: 623081 - DNA, 55 bp, Artificial; identical to SEQ ID NO: 233651
  Synthetic oligonucleotide

SEQ ID NO: 623082 - DNA, 55 bp, Artificial; identical to SEQ ID NO: 153308
  Synthetic oligonucleotide

SEQ ID NO: 623083 - DNA, 51 bp, Artificial; identical to SEQ ID NO: 189674
  Synthetic oligonucleotide

SEQ ID NO: 623084 - DNA, 60 bp, Artificial; identical to SEQ ID NO: 255023
  Synthetic oligonucleotide

SEQ ID NO: 623085 - DNA, 55 bp, Artificial; identical to SEQ ID NO: 156762
  Synthetic oligonucleotide

SEQ ID NO: 623086 - DNA, 55 bp, Artificial; identical to SEQ ID NO: 156760
  Synthetic oligonucleotide

SEQ ID NO: 623087 - DNA, 53 bp, Artificial; identical to SEQ ID NO: 199034
  Synthetic oligonucleotide

SEQ ID NO: 623088 - DNA, 55 bp, Artificial; identical to SEQ ID NO: 196938
  Synthetic oligonucleotide

SEQ ID NO: 623089 - DNA, 56 bp, Artificial; identical to SEQ ID NO: 166225
  Synthetic oligonucleotide

SEQ ID NO: 623090 - DNA, 53 bp, Artificial; identical to SEQ ID NO: 161314
  Synthetic oligonucleotide

SEQ ID NO: 623091 - DNA, 55 bp, Artificial; identical to SEQ ID NO: 202825
  Synthetic oligonucleotide

SEQ ID NO: 623092 - DNA, 55 bp, Artificial; identical to SEQ ID NO: 164282
  Synthetic oligonucleotide

SEQ ID NO: 623093 - DNA, 56 bp, Artificial; identical to SEQ ID NO: 201109
  Synthetic oligonucleotide

SEQ ID NO: 623094 - DNA, 58 bp, Artificial; identical to SEQ ID NO: 147338
  Synthetic oligonucleotide

SEQ ID NO: 623095 - DNA, 58 bp, Artificial; identical to SEQ ID NO: 171046
  Synthetic oligonucleotide

SEQ ID NO: 623096 - DNA, 60 bp, Artificial; identical to SEQ ID NO: 196882
  Synthetic oligonucleotide

SEQ ID NO: 623097 - DNA, 54 bp, Artificial; identical to SEQ ID NO: 242097
  Synthetic oligonucleotide

SEQ ID NO: 623098 - DNA, 55 bp, Artificial; identical to SEQ ID NO: 184577
  Synthetic oligonucleotide

SEQ ID NO: 623099 - DNA, 56 bp, Artificial; identical to SEQ ID NO: 147306
  Synthetic oligonucleotide

SEQ ID NO: 623100 - DNA, 53 bp, Artificial; identical to SEQ ID NO: 243150
  Synthetic oligonucleotide

SEQ ID NO: 623101 - DNA, 55 bp, Artificial; identical to SEQ ID NO: 166993
  Synthetic oligonucleotide

SEQ ID NO: 623102 - DNA, 55 bp, Artificial; identical to SEQ ID NO: 151729
  Synthetic oligonucleotide

SEQ ID NO: 623103 - DNA, 55 bp, Artificial; identical to SEQ ID NO: 151689
  Synthetic oligonucleotide

SEQ ID NO: 623104 - DNA, 58 bp, Artificial; identical to SEQ ID NO: 224352
  Synthetic oligonucleotide

SEQ ID NO: 623105 - DNA, 59 bp, Artificial; identical to SEQ ID NO: 147074
  Synthetic oligonucleotide

SEQ ID NO: 623106 - DNA, 60 bp, Artificial; identical to SEQ ID NO: 171073
  Synthetic oligonucleotide

SEQ ID NO: 623107 - DNA, 52 bp, Artificial; identical to SEQ ID NO: 157604
  Synthetic oligonucleotide

SEQ ID NO: 623108 - DNA, 55 bp, Artificial; identical to SEQ ID NO: 242790
  Synthetic oligonucleotide

SEQ ID NO: 623109 - DNA, 55 bp, Artificial; identical to SEQ ID NO: 174509
  Synthetic oligonucleotide

SEQ ID NO: 623110 - DNA, 50 bp, Artificial; identical to SEQ ID NO: 150503
  Synthetic oligonucleotide

SEQ ID NO: 623111 - DNA, 53 bp, Artificial; identical to SEQ ID NO: 164281
  Synthetic oligonucleotide

SEQ ID NO: 623112 - DNA, 51 bp, Artificial; identical to SEQ ID NO: 177264
  Synthetic oligonucleotide

SEQ ID NO: 623113 - DNA, 60 bp, Artificial; identical to SEQ ID NO: 242086
  Synthetic oligonucleotide

SEQ ID NO: 623114 - DNA, 55 bp, Artificial; identical to SEQ ID NO: 194783
  Synthetic oligonucleotide

SEQ ID NO: 623115 - DNA, 60 bp, Artificial; identical to SEQ ID NO: 187650
  Synthetic oligonucleotide

SEQ ID NO: 623116 - DNA, 57 bp, Artificial; identical to SEQ ID NO: 211613
  Synthetic oligonucleotide

SEQ ID NO: 623117 - DNA, 55 bp, Artificial; identical to SEQ ID NO: 217808
  Synthetic oligonucleotide

SEQ ID NO: 623118 - DNA, 53 bp, Artificial; identical to SEQ ID NO: 148999
  Synthetic oligonucleotide

SEQ ID NO: 623119 - DNA, 59 bp, Artificial; identical to SEQ ID NO: 242963
  Synthetic oligonucleotide

SEQ ID NO: 623120 - DNA, 55 bp, Artificial; identical to SEQ ID NO: 148407
  Synthetic oligonucleotide

SEQ ID NO: 623121 - DNA, 53 bp, Artificial; identical to SEQ ID NO: 199813
  Synthetic oligonucleotide

SEQ ID NO: 623122 - DNA, 55 bp, Artificial; identical to SEQ ID NO: 166990
  Synthetic oligonucleotide

SEQ ID NO: 623123 - DNA, 55 bp, Artificial; identical to SEQ ID NO: 242791
  Synthetic oligonucleotide

SEQ ID NO: 623124 - DNA, 55 bp, Artificial; identical to SEQ ID NO: 219648
  Synthetic oligonucleotide

SEQ ID NO: 623125 - DNA, 55 bp, Artificial; identical to SEQ ID NO: 211251
  Synthetic oligonucleotide

SEQ ID NO: 623126 - DNA, 55 bp, Artificial; identical to SEQ ID NO: 148408
  Synthetic oligonucleotide

SEQ ID NO: 623127 - DNA, 55 bp, Artificial; identical to SEQ ID NO: 217809
  Synthetic oligonucleotide

SEQ ID NO: 623128 - DNA, 55 bp, Artificial; identical to SEQ ID NO: 245806
  Synthetic oligonucleotide

SEQ ID NO: 623129 - DNA, 54 bp, Artificial; identical to SEQ ID NO: 219706
  Synthetic oligonucleotide

SEQ ID NO: 623130 - DNA, 55 bp, Artificial; identical to SEQ ID NO: 187820
  Synthetic oligonucleotide

SEQ ID NO: 623131 - DNA, 53 bp, Artificial; identical to SEQ ID NO: 191183
  Synthetic oligonucleotide

SEQ ID NO: 623132 - DNA, 55 bp, Artificial; identical to SEQ ID NO: 152327
  Synthetic oligonucleotide

SEQ ID NO: 623133 - DNA, 58 bp, Artificial; identical to SEQ ID NO: 239318
  Synthetic oligonucleotide

SEQ ID NO: 623134 - DNA, 56 bp, Artificial; identical to SEQ ID NO: 171044
  Synthetic oligonucleotide

SEQ ID NO: 623135 - DNA, 53 bp, Artificial; identical to SEQ ID NO: 185653
  Synthetic oligonucleotide

SEQ ID NO: 623136 - DNA, 60 bp, Artificial; identical to SEQ ID NO: 177270
  Synthetic oligonucleotide

SEQ ID NO: 623137 - DNA, 56 bp, Artificial; identical to SEQ ID NO: 152521
  Synthetic oligonucleotide

SEQ ID NO: 623138 - DNA, 55 bp, Artificial; identical to SEQ ID NO: 221545
  Synthetic oligonucleotide

SEQ ID NO: 623139 - DNA, 55 bp, Artificial; identical to SEQ ID NO: 219646
  Synthetic oligonucleotide

SEQ ID NO: 623140 - DNA, 55 bp, Artificial; identical to SEQ ID NO: 196935
  Synthetic oligonucleotide

SEQ ID NO: 623141 - DNA, 53 bp, Artificial; identical to SEQ ID NO: 203918
  Synthetic oligonucleotide

SEQ ID NO: 623142 - DNA, 55 bp, Artificial; identical to SEQ ID NO: 196276
  Synthetic oligonucleotide

SEQ ID NO: 623143 - DNA, 55 bp, Artificial; identical to SEQ ID NO: 233650
  Synthetic oligonucleotide

SEQ ID NO: 623144 - DNA, 55 bp, Artificial; identical to SEQ ID NO: 253178
  Synthetic oligonucleotide

SEQ ID NO: 623145 - DNA, 55 bp, Artificial; identical to SEQ ID NO: 146275
  Synthetic oligonucleotide

SEQ ID NO: 623146 - DNA, 57 bp, Artificial; identical to SEQ ID NO: 211602
  Synthetic oligonucleotide

SEQ ID NO: 623147 - DNA, 60 bp, Artificial; identical to SEQ ID NO: 201360
  Synthetic oligonucleotide

SEQ ID NO: 623148 - DNA, 54 bp, Artificial; identical to SEQ ID NO: 255176
  Synthetic oligonucleotide

SEQ ID NO: 623149 - DNA, 55 bp, Artificial; identical to SEQ ID NO: 249228
  Synthetic oligonucleotide

SEQ ID NO: 623150 - DNA, 55 bp, Artificial; identical to SEQ ID NO: 245809
  Synthetic oligonucleotide

SEQ ID NO: 623151 - DNA, 52 bp, Artificial; identical to SEQ ID NO: 141311
  Synthetic oligonucleotide

SEQ ID NO: 623152 - DNA, 55 bp, Artificial; identical to SEQ ID NO: 144937
  Synthetic oligonucleotide

SEQ ID NO: 623153 - DNA, 55 bp, Artificial; identical to SEQ ID NO: 257904
  Synthetic oligonucleotide

SEQ ID NO: 623154 - DNA, 55 bp, Artificial; identical to SEQ ID NO: 234096
  Synthetic oligonucleotide

SEQ ID NO: 623155 - DNA, 54 bp, Artificial; identical to SEQ ID NO: 242513
  Synthetic oligonucleotide

SEQ ID NO: 623156 - DNA, 55 bp, Artificial; identical to SEQ ID NO: 221546
  Synthetic oligonucleotide

SEQ ID NO: 623157 - DNA, 53 bp, Artificial; identical to SEQ ID NO: 265961
  Synthetic oligonucleotide

SEQ ID NO: 623158 - DNA, 55 bp, Artificial; identical to SEQ ID NO: 190580
  Synthetic oligonucleotide

SEQ ID NO: 623159 - DNA, 56 bp, Artificial; identical to SEQ ID NO: 248629
  Synthetic oligonucleotide

SEQ ID NO: 623160 - DNA, 54 bp, Artificial; identical to SEQ ID NO: 248435
  Synthetic oligonucleotide

SEQ ID NO: 623161 - DNA, 60 bp, Artificial; identical to SEQ ID NO: 198581
  Synthetic oligonucleotide

SEQ ID NO: 623162 - DNA, 55 bp, Artificial; identical to SEQ ID NO: 184525
  Synthetic oligonucleotide

SEQ ID NO: 623163 - DNA, 60 bp, Artificial; identical to SEQ ID NO: 212383
  Synthetic oligonucleotide

SEQ ID NO: 623164 - DNA, 54 bp, Artificial; identical to SEQ ID NO: 248434
  Synthetic oligonucleotide

SEQ ID NO: 623165 - DNA, 52 bp, Artificial; identical to SEQ ID NO: 247974
  Synthetic oligonucleotide

SEQ ID NO: 623166 - DNA, 55 bp, Artificial; identical to SEQ ID NO: 254831
  Synthetic oligonucleotide

SEQ ID NO: 623167 - DNA, 55 bp, Artificial; identical to SEQ ID NO: 208177
  Synthetic oligonucleotide

SEQ ID NO: 623168 - DNA, 55 bp, Artificial; identical to SEQ ID NO: 263352
  Synthetic oligonucleotide

SEQ ID NO: 623169 - DNA, 58 bp, Artificial; identical to SEQ ID NO: 266030
  Synthetic oligonucleotide

SEQ ID NO: 623170 - DNA, 55 bp, Artificial; identical to SEQ ID NO: 250009
  Synthetic oligonucleotide

SEQ ID NO: 623171 - DNA, 54 bp, Artificial; identical to SEQ ID NO: 254946
  Synthetic oligonucleotide

SEQ ID NO: 623172 - DNA, 55 bp, Artificial; identical to SEQ ID NO: 191898
  Synthetic oligonucleotide

SEQ ID NO: 623173 - DNA, 57 bp, Artificial; identical to SEQ ID NO: 248612
  Synthetic oligonucleotide

SEQ ID NO: 623174 - DNA, 60 bp, Artificial; identical to SEQ ID NO: 171106
  Synthetic oligonucleotide

SEQ ID NO: 623175 - DNA, 53 bp, Artificial; identical to SEQ ID NO: 208076
  Synthetic oligonucleotide

SEQ ID NO: 623176 - DNA, 55 bp, Artificial; identical to SEQ ID NO: 143680
  Synthetic oligonucleotide

SEQ ID NO: 623177 - DNA, 55 bp, Artificial; identical to SEQ ID NO: 194785
  Synthetic oligonucleotide

SEQ ID NO: 623178 - DNA, 55 bp, Artificial; identical to SEQ ID NO: 211253
  Synthetic oligonucleotide

SEQ ID NO: 623179 - DNA, 51 bp, Artificial; identical to SEQ ID NO: 205727
  Synthetic oligonucleotide

SEQ ID NO: 623180 - DNA, 52 bp, Artificial; identical to SEQ ID NO: 207514
  Synthetic oligonucleotide

SEQ ID NO: 623181 - DNA, 55 bp, Artificial; identical to SEQ ID NO: 190582
  Synthetic oligonucleotide

SEQ ID NO: 623182 - DNA, 55 bp, Artificial; identical to SEQ ID NO: 202823
  Synthetic oligonucleotide

SEQ ID NO: 623183 - DNA, 53 bp, Artificial; identical to SEQ ID NO: 194786
  Synthetic oligonucleotide

SEQ ID NO: 623184 - DNA, 60 bp, Artificial; identical to SEQ ID NO: 147327
  Synthetic oligonucleotide

SEQ ID NO: 623185 - DNA, 55 bp, Artificial; identical to SEQ ID NO: 190583
  Synthetic oligonucleotide

SEQ ID NO: 623186 - DNA, 55 bp, Artificial; identical to SEQ ID NO: 147316
  Synthetic oligonucleotide

SEQ ID NO: 623187 - DNA, 54 bp, Artificial; identical to SEQ ID NO: 189058
  Synthetic oligonucleotide

SEQ ID NO: 623188 - DNA, 52 bp, Artificial; identical to SEQ ID NO: 167108
  Synthetic oligonucleotide

SEQ ID NO: 623189 - DNA, 55 bp, Artificial; identical to SEQ ID NO: 240098
  Synthetic oligonucleotide

SEQ ID NO: 623190 - DNA, 54 bp, Artificial; identical to SEQ ID NO: 167045
  Synthetic oligonucleotide

SEQ ID NO: 623191 - DNA, 53 bp, Artificial; identical to SEQ ID NO: 190585
  Synthetic oligonucleotide

SEQ ID NO: 623192 - DNA, 55 bp, Artificial; identical to SEQ ID NO: 193557
  Synthetic oligonucleotide

SEQ ID NO: 623193 - DNA, 54 bp, Artificial; identical to SEQ ID NO: 177336
  Synthetic oligonucleotide

SEQ ID NO: 623194 - DNA, 51 bp, Artificial; identical to SEQ ID NO: 157884
  Synthetic oligonucleotide

SEQ ID NO: 623195 - DNA, 55 bp, Artificial; identical to SEQ ID NO: 184519
  Synthetic oligonucleotide

SEQ ID NO: 623196 - DNA, 55 bp, Artificial; identical to SEQ ID NO: 212819
  Synthetic oligonucleotide

SEQ ID NO: 623197 - DNA, 53 bp, Artificial; identical to SEQ ID NO: 211565
  Synthetic oligonucleotide

SEQ ID NO: 623198 - DNA, 54 bp, Artificial; identical to SEQ ID NO: 245658
  Synthetic oligonucleotide

SEQ ID NO: 623199 - DNA, 55 bp, Artificial; identical to SEQ ID NO: 265960
  Synthetic oligonucleotide

SEQ ID NO: 623200 - DNA, 55 bp, Artificial; identical to SEQ ID NO: 151693
  Synthetic oligonucleotide

SEQ ID NO: 623201 - DNA, 55 bp, Artificial; identical to SEQ ID NO: 217810
  Synthetic oligonucleotide

SEQ ID NO: 623202 - DNA, 55 bp, Artificial; identical to SEQ ID NO: 169967
  Synthetic oligonucleotide

SEQ ID NO: 623203 - DNA, 60 bp, Artificial; identical to SEQ ID NO: 224230
  Synthetic oligonucleotide

SEQ ID NO: 623204 - DNA, 55 bp, Artificial; identical to SEQ ID NO: 169968
  Synthetic oligonucleotide

SEQ ID NO: 623205 - DNA, 55 bp, Artificial; identical to SEQ ID NO: 148431
  Synthetic oligonucleotide

SEQ ID NO: 623206 - DNA, 55 bp, Artificial; identical to SEQ ID NO: 148379
  Synthetic oligonucleotide

SEQ ID NO: 623207 - DNA, 55 bp, Artificial; identical to SEQ ID NO: 184505
  Synthetic oligonucleotide

SEQ ID NO: 623208 - DNA, 52 bp, Artificial; identical to SEQ ID NO: 186157
  Synthetic oligonucleotide

SEQ ID NO: 623209 - DNA, 58 bp, Artificial; identical to SEQ ID NO: 187639
  Synthetic oligonucleotide

SEQ ID NO: 623210 - DNA, 55 bp, Artificial; identical to SEQ ID NO: 242792
  Synthetic oligonucleotide

SEQ ID NO: 623211 - DNA, 55 bp, Artificial; identical to SEQ ID NO: 194787
  Synthetic oligonucleotide

SEQ ID NO: 623212 - DNA, 55 bp, Artificial; identical to SEQ ID NO: 218818
  Synthetic oligonucleotide

SEQ ID NO: 623213 - DNA, 52 bp, Artificial; identical to SEQ ID NO: 216708
  Synthetic oligonucleotide

SEQ ID NO: 623214 - DNA, 57 bp, Artificial; identical to SEQ ID NO: 141384
  Synthetic oligonucleotide

SEQ ID NO: 623215 - DNA, 55 bp, Artificial; identical to SEQ ID NO: 199031
  Synthetic oligonucleotide

SEQ ID NO: 623216 - DNA, 53 bp, Artificial; identical to SEQ ID NO: 258043
  Synthetic oligonucleotide

SEQ ID NO: 623217 - DNA, 53 bp, Artificial; identical to SEQ ID NO: 253284
  Synthetic oligonucleotide

SEQ ID NO: 623218 - DNA, 51 bp, Artificial; identical to SEQ ID NO: 177347
  Synthetic oligonucleotide

SEQ ID NO: 623219 - DNA, 55 bp, Artificial; identical to SEQ ID NO: 155387
  Synthetic oligonucleotide

SEQ ID NO: 623220 - DNA, 53 bp, Artificial; identical to SEQ ID NO: 216633
  Synthetic oligonucleotide

SEQ ID NO: 623221 - DNA, 53 bp, Artificial; identical to SEQ ID NO: 185666
  Synthetic oligonucleotide

SEQ ID NO: 623222 - DNA, 55 bp, Artificial; identical to SEQ ID NO: 169158
  Synthetic oligonucleotide

SEQ ID NO: 623223 - DNA, 55 bp, Artificial; identical to SEQ ID NO: 143682
  Synthetic oligonucleotide

SEQ ID NO: 623224 - DNA, 55 bp, Artificial; identical to SEQ ID NO: 217811
  Synthetic oligonucleotide

SEQ ID NO: 623225 - DNA, 54 bp, Artificial; identical to SEQ ID NO: 157221
  Synthetic oligonucleotide

SEQ ID NO: 623226 - DNA, 55 bp, Artificial; identical to SEQ ID NO: 212818
  Synthetic oligonucleotide

SEQ ID NO: 623227 - DNA, 55 bp, Artificial; identical to SEQ ID NO: 253174
  Synthetic oligonucleotide

SEQ ID NO: 623228 - DNA, 55 bp, Artificial; identical to SEQ ID NO: 254932
  Synthetic oligonucleotide

SEQ ID NO: 623229 - DNA, 55 bp, Artificial; identical to SEQ ID NO: 184729
  Synthetic oligonucleotide

SEQ ID NO: 623230 - DNA, 55 bp, Artificial; identical to SEQ ID NO: 171140
  Synthetic oligonucleotide

SEQ ID NO: 623231 - DNA, 52 bp, Artificial; identical to SEQ ID NO: 190717
  Synthetic oligonucleotide

SEQ ID NO: 623232 - DNA, 54 bp, Artificial; identical to SEQ ID NO: 246088
  Synthetic oligonucleotide

SEQ ID NO: 623233 - DNA, 52 bp, Artificial; identical to SEQ ID NO: 243280
  Synthetic oligonucleotide

SEQ ID NO: 623234 - DNA, 55 bp, Artificial; identical to SEQ ID NO: 261587
  Synthetic oligonucleotide

SEQ ID NO: 623235 - DNA, 53 bp, Artificial; identical to SEQ ID NO: 261963
  Synthetic oligonucleotide

SEQ ID NO: 623236 - DNA, 59 bp, Artificial; identical to SEQ ID NO: 255089
  Synthetic oligonucleotide

SEQ ID NO: 623237 - DNA, 52 bp, Artificial; identical to SEQ ID NO: 223690
  Synthetic oligonucleotide

SEQ ID NO: 623238 - DNA, 58 bp, Artificial; identical to SEQ ID NO: 147293
  Synthetic oligonucleotide

SEQ ID NO: 623239 - DNA, 55 bp, Artificial; identical to SEQ ID NO: 148391
  Synthetic oligonucleotide

SEQ ID NO: 623240 - DNA, 52 bp, Artificial; identical to SEQ ID NO: 208770
  Synthetic oligonucleotide

SEQ ID NO: 623241 - DNA, 54 bp, Artificial; identical to SEQ ID NO: 217679
  Synthetic oligonucleotide

SEQ ID NO: 623242 - DNA, 55 bp, Artificial; identical to SEQ ID NO: 191018
  Synthetic oligonucleotide

SEQ ID NO: 623243 - DNA, 55 bp, Artificial; identical to SEQ ID NO: 169159
  Synthetic oligonucleotide

SEQ ID NO: 623244 - DNA, 55 bp, Artificial; identical to SEQ ID NO: 223438
  Synthetic oligonucleotide

SEQ ID NO: 623245 - DNA, 55 bp, Artificial; identical to SEQ ID NO: 168679
  Synthetic oligonucleotide

SEQ ID NO: 623246 - DNA, 55 bp, Artificial; identical to SEQ ID NO: 265822
  Synthetic oligonucleotide

SEQ ID NO: 623247 - DNA, 55 bp, Artificial; identical to SEQ ID NO: 207515
  Synthetic oligonucleotide

SEQ ID NO: 623248 - DNA, 59 bp, Artificial; identical to SEQ ID NO: 212378
  Synthetic oligonucleotide

SEQ ID NO: 623249 - DNA, 55 bp, Artificial; identical to SEQ ID NO: 151694
  Synthetic oligonucleotide

SEQ ID NO: 623250 - DNA, 55 bp, Artificial; identical to SEQ ID NO: 152329
  Synthetic oligonucleotide

SEQ ID NO: 623251 - DNA, 55 bp, Artificial; identical to SEQ ID NO: 203666
  Synthetic oligonucleotide

SEQ ID NO: 623252 - DNA, 58 bp, Artificial; identical to SEQ ID NO: 179654
  Synthetic oligonucleotide

SEQ ID NO: 623253 - DNA, 59 bp, Artificial; identical to SEQ ID NO: 239208
  Synthetic oligonucleotide

SEQ ID NO: 623254 - DNA, 55 bp, Artificial; identical to SEQ ID NO: 249239
  Synthetic oligonucleotide

SEQ ID NO: 623255 - DNA, 55 bp, Artificial; identical to SEQ ID NO: 144939
  Synthetic oligonucleotide

SEQ ID NO: 623256 - DNA, 55 bp, Artificial; identical to SEQ ID NO: 238430
  Synthetic oligonucleotide

SEQ ID NO: 623257 - DNA, 54 bp, Artificial; identical to SEQ ID NO: 185225
  Synthetic oligonucleotide

SEQ ID NO: 623258 - DNA, 55 bp, Artificial; identical to SEQ ID NO: 223440
  Synthetic oligonucleotide

SEQ ID NO: 623259 - DNA, 53 bp, Artificial; identical to SEQ ID NO: 164934
  Synthetic oligonucleotide

SEQ ID NO: 623260 - DNA, 55 bp, Artificial; identical to SEQ ID NO: 223441
  Synthetic oligonucleotide

SEQ ID NO: 623261 - DNA, 55 bp, Artificial; identical to SEQ ID NO: 211217
  Synthetic oligonucleotide

SEQ ID NO: 623262 - DNA, 55 bp, Artificial; identical to SEQ ID NO: 233648
  Synthetic oligonucleotide

SEQ ID NO: 623263 - DNA, 53 bp, Artificial; identical to SEQ ID NO: 237017
  Synthetic oligonucleotide

SEQ ID NO: 623264 - DNA, 56 bp, Artificial; identical to SEQ ID NO: 203680
  Synthetic oligonucleotide

SEQ ID NO: 623265 - DNA, 55 bp, Artificial; identical to SEQ ID NO: 161839
  Synthetic oligonucleotide

SEQ ID NO: 623266 - DNA, 55 bp, Artificial; identical to SEQ ID NO: 254913
  Synthetic oligonucleotide

SEQ ID NO: 623267 - DNA, 56 bp, Artificial; identical to SEQ ID NO: 175324
  Synthetic oligonucleotide

SEQ ID NO: 623268 - DNA, 55 bp, Artificial; identical to SEQ ID NO: 144430
  Synthetic oligonucleotide

SEQ ID NO: 623269 - DNA, 55 bp, Artificial; identical to SEQ ID NO: 184761
  Synthetic oligonucleotide

SEQ ID NO: 623270 - DNA, 55 bp, Artificial; identical to SEQ ID NO: 257901
  Synthetic oligonucleotide

SEQ ID NO: 623271 - DNA, 55 bp, Artificial; identical to SEQ ID NO: 184753
  Synthetic oligonucleotide

SEQ ID NO: 623272 - DNA, 55 bp, Artificial; identical to SEQ ID NO: 191897
  Synthetic oligonucleotide

SEQ ID NO: 623273 - DNA, 52 bp, Artificial; identical to SEQ ID NO: 246530
  Synthetic oligonucleotide

SEQ ID NO: 623274 - DNA, 54 bp, Artificial; identical to SEQ ID NO: 255180
  Synthetic oligonucleotide

SEQ ID NO: 623275 - DNA, 55 bp, Artificial; identical to SEQ ID NO: 208179
  Synthetic oligonucleotide

SEQ ID NO: 623276 - DNA, 60 bp, Artificial; identical to SEQ ID NO: 224282
  Synthetic oligonucleotide

SEQ ID NO: 623277 - DNA, 60 bp, Artificial; identical to SEQ ID NO: 247165
  Synthetic oligonucleotide

SEQ ID NO: 623278 - DNA, 60 bp, Artificial; identical to SEQ ID NO: 192200
  Synthetic oligonucleotide

SEQ ID NO: 623279 - DNA, 56 bp, Artificial; identical to SEQ ID NO: 212523
  Synthetic oligonucleotide

SEQ ID NO: 623280 - DNA, 55 bp, Artificial; identical to SEQ ID NO: 174505
  Synthetic oligonucleotide

SEQ ID NO: 623281 - DNA, 55 bp, Artificial; identical to SEQ ID NO: 161768
  Synthetic oligonucleotide

SEQ ID NO: 623282 - DNA, 54 bp, Artificial; identical to SEQ ID NO: 254918
  Synthetic oligonucleotide

SEQ ID NO: 623283 - DNA, 51 bp, Artificial; identical to SEQ ID NO: 237112
  Synthetic oligonucleotide

SEQ ID NO: 623284 - DNA, 53 bp, Artificial; identical to SEQ ID NO: 161316
  Synthetic oligonucleotide

SEQ ID NO: 623285 - DNA, 54 bp, Artificial; identical to SEQ ID NO: 218817
  Synthetic oligonucleotide

SEQ ID NO: 623286 - DNA, 55 bp, Artificial; identical to SEQ ID NO: 199029
  Synthetic oligonucleotide

SEQ ID NO: 623287 - DNA, 55 bp, Artificial; identical to SEQ ID NO: 189059
  Synthetic oligonucleotide

SEQ ID NO: 623288 - DNA, 55 bp, Artificial; identical to SEQ ID NO: 199028
  Synthetic oligonucleotide

SEQ ID NO: 623289 - DNA, 55 bp, Artificial; identical to SEQ ID NO: 221551
  Synthetic oligonucleotide

SEQ ID NO: 623290 - DNA, 55 bp, Artificial; identical to SEQ ID NO: 245671
  Synthetic oligonucleotide

SEQ ID NO: 623291 - DNA, 52 bp, Artificial; identical to SEQ ID NO: 198570
  Synthetic oligonucleotide

SEQ ID NO: 623292 - DNA, 55 bp, Artificial; identical to SEQ ID NO: 194788
  Synthetic oligonucleotide

SEQ ID NO: 623293 - DNA, 55 bp, Artificial; identical to SEQ ID NO: 156856
  Synthetic oligonucleotide

SEQ ID NO: 623294 - DNA, 53 bp, Artificial; identical to SEQ ID NO: 157326
  Synthetic oligonucleotide

SEQ ID NO: 623295 - DNA, 55 bp, Artificial; identical to SEQ ID NO: 156851
  Synthetic oligonucleotide

SEQ ID NO: 623296 - DNA, 55 bp, Artificial; identical to SEQ ID NO: 245629
  Synthetic oligonucleotide

SEQ ID NO: 623297 - DNA, 55 bp, Artificial; identical to SEQ ID NO: 194789
  Synthetic oligonucleotide

SEQ ID NO: 623298 - DNA, 60 bp, Artificial; identical to SEQ ID NO: 248427
  Synthetic oligonucleotide

SEQ ID NO: 623299 - DNA, 55 bp, Artificial; identical to SEQ ID NO: 187829
  Synthetic oligonucleotide

SEQ ID NO: 623300 - DNA, 53 bp, Artificial; identical to SEQ ID NO: 207518
  Synthetic oligonucleotide

SEQ ID NO: 623301 - DNA, 55 bp, Artificial; identical to SEQ ID NO: 152605
  Synthetic oligonucleotide

SEQ ID NO: 623302 - DNA, 55 bp, Artificial; identical to SEQ ID NO: 245633
  Synthetic oligonucleotide

SEQ ID NO: 623303 - DNA, 59 bp, Artificial; identical to SEQ ID NO: 171151
  Synthetic oligonucleotide

SEQ ID NO: 623304 - DNA, 54 bp, Artificial; identical to SEQ ID NO: 160652
  Synthetic oligonucleotide

SEQ ID NO: 623305 - DNA, 55 bp, Artificial; identical to SEQ ID NO: 152330
  Synthetic oligonucleotide

SEQ ID NO: 623306 - DNA, 52 bp, Artificial; identical to SEQ ID NO: 206481
  Synthetic oligonucleotide

SEQ ID NO: 623307 - DNA, 55 bp, Artificial; identical to SEQ ID NO: 245639
  Synthetic oligonucleotide

SEQ ID NO: 623308 - DNA, 54 bp, Artificial; identical to SEQ ID NO: 185273
  Synthetic oligonucleotide

SEQ ID NO: 623309 - DNA, 55 bp, Artificial; identical to SEQ ID NO: 168713
  Synthetic oligonucleotide

SEQ ID NO: 623310 - DNA, 58 bp, Artificial; identical to SEQ ID NO: 151566
  Synthetic oligonucleotide

SEQ ID NO: 623311 - DNA, 55 bp, Artificial; identical to SEQ ID NO: 245719
  Synthetic oligonucleotide

SEQ ID NO: 623312 - DNA, 55 bp, Artificial; identical to SEQ ID NO: 171638
  Synthetic oligonucleotide

SEQ ID NO: 623313 - DNA, 55 bp, Artificial; identical to SEQ ID NO: 168712
  Synthetic oligonucleotide

SEQ ID NO: 623314 - DNA, 57 bp, Artificial; identical to SEQ ID NO: 179822
  Synthetic oligonucleotide

SEQ ID NO: 623315 - DNA, 51 bp, Artificial; identical to SEQ ID NO: 186752
  Synthetic oligonucleotide

SEQ ID NO: 623316 - DNA, 56 bp, Artificial; identical to SEQ ID NO: 209417
  Synthetic oligonucleotide

SEQ ID NO: 623317 - DNA, 52 bp, Artificial; identical to SEQ ID NO: 199938
  Synthetic oligonucleotide

SEQ ID NO: 623318 - DNA, 55 bp, Artificial; identical to SEQ ID NO: 249242
  Synthetic oligonucleotide

SEQ ID NO: 623319 - DNA, 55 bp, Artificial; identical to SEQ ID NO: 184646
  Synthetic oligonucleotide

SEQ ID NO: 623320 - DNA, 55 bp, Artificial; identical to SEQ ID NO: 223443
  Synthetic oligonucleotide

SEQ ID NO: 623321 - DNA, 55 bp, Artificial; identical to SEQ ID NO: 221554
  Synthetic oligonucleotide

SEQ ID NO: 623322 - DNA, 59 bp, Artificial; identical to SEQ ID NO: 242974
  Synthetic oligonucleotide

SEQ ID NO: 623323 - DNA, 55 bp, Artificial; identical to SEQ ID NO: 208181
  Synthetic oligonucleotide

SEQ ID NO: 623324 - DNA, 57 bp, Artificial; identical to SEQ ID NO: 224359
  Synthetic oligonucleotide

SEQ ID NO: 623325 - DNA, 55 bp, Artificial; identical to SEQ ID NO: 223444
  Synthetic oligonucleotide

SEQ ID NO: 623326 - DNA, 51 bp, Artificial; identical to SEQ ID NO: 210348
  Synthetic oligonucleotide

SEQ ID NO: 623327 - DNA, 55 bp, Artificial; identical to SEQ ID NO: 208182
  Synthetic oligonucleotide

SEQ ID NO: 623328 - DNA, 55 bp, Artificial; identical to SEQ ID NO: 184686
  Synthetic oligonucleotide

SEQ ID NO: 623329 - DNA, 53 bp, Artificial; identical to SEQ ID NO: 184683
  Synthetic oligonucleotide

SEQ ID NO: 623330 - DNA, 55 bp, Artificial; identical to SEQ ID NO: 156844
  Synthetic oligonucleotide

SEQ ID NO: 623331 - DNA, 55 bp, Artificial; identical to SEQ ID NO: 171641
  Synthetic oligonucleotide

SEQ ID NO: 623332 - DNA, 55 bp, Artificial; identical to SEQ ID NO: 223445
  Synthetic oligonucleotide

SEQ ID NO: 623333 - DNA, 55 bp, Artificial; identical to SEQ ID NO: 189487
  Synthetic oligonucleotide

SEQ ID NO: 623334 - DNA, 55 bp, Artificial; identical to SEQ ID NO: 220654
  Synthetic oligonucleotide

SEQ ID NO: 623335 - DNA, 55 bp, Artificial; identical to SEQ ID NO: 184675
  Synthetic oligonucleotide

SEQ ID NO: 623336 - DNA, 60 bp, Artificial; identical to SEQ ID NO: 177618
  Synthetic oligonucleotide

SEQ ID NO: 623337 - DNA, 52 bp, Artificial; identical to SEQ ID NO: 186145
  Synthetic oligonucleotide

SEQ ID NO: 623338 - DNA, 54 bp, Artificial; identical to SEQ ID NO: 144504
  Synthetic oligonucleotide

SEQ ID NO: 623339 - DNA, 55 bp, Artificial; identical to SEQ ID NO: 238434
  Synthetic oligonucleotide

SEQ ID NO: 623340 - DNA, 58 bp, Artificial; identical to SEQ ID NO: 212499
  Synthetic oligonucleotide

SEQ ID NO: 623341 - DNA, 55 bp, Artificial; identical to SEQ ID NO: 164231
  Synthetic oligonucleotide

SEQ ID NO: 623342 - DNA, 55 bp, Artificial; identical to SEQ ID NO: 152331
  Synthetic oligonucleotide

SEQ ID NO: 623343 - DNA, 60 bp, Artificial; identical to SEQ ID NO: 177619
  Synthetic oligonucleotide

SEQ ID NO: 623344 - DNA, 55 bp, Artificial; identical to SEQ ID NO: 207525
  Synthetic oligonucleotide

SEQ ID NO: 623345 - DNA, 53 bp, Artificial; identical to SEQ ID NO: 245679
  Synthetic oligonucleotide

SEQ ID NO: 623346 - DNA, 60 bp, Artificial; identical to SEQ ID NO: 237514
  Synthetic oligonucleotide

SEQ ID NO: 623347 - DNA, 55 bp, Artificial; identical to SEQ ID NO: 199023
  Synthetic oligonucleotide

SEQ ID NO: 623348 - DNA, 51 bp, Artificial; identical to SEQ ID NO: 193858
  Synthetic oligonucleotide

SEQ ID NO: 623349 - DNA, 55 bp, Artificial; identical to SEQ ID NO: 143683
  Synthetic oligonucleotide

SEQ ID NO: 623350 - DNA, 55 bp, Artificial; identical to SEQ ID NO: 201621
  Synthetic oligonucleotide

SEQ ID NO: 623351 - DNA, 52 bp, Artificial; identical to SEQ ID NO: 246535
  Synthetic oligonucleotide

SEQ ID NO: 623352 - DNA, 54 bp, Artificial; identical to SEQ ID NO: 156882
  Synthetic oligonucleotide

SEQ ID NO: 623353 - DNA, 55 bp, Artificial; identical to SEQ ID NO: 258938
  Synthetic oligonucleotide

SEQ ID NO: 623354 - DNA, 55 bp, Artificial; identical to SEQ ID NO: 240147
  Synthetic oligonucleotide

SEQ ID NO: 623355 - DNA, 55 bp, Artificial; identical to SEQ ID NO: 240146
  Synthetic oligonucleotide

SEQ ID NO: 623356 - DNA, 54 bp, Artificial; identical to SEQ ID NO: 191896
  Synthetic oligonucleotide

SEQ ID NO: 623357 - DNA, 54 bp, Artificial; identical to SEQ ID NO: 212815
  Synthetic oligonucleotide

SEQ ID NO: 623358 - DNA, 60 bp, Artificial; identical to SEQ ID NO: 217668
  Synthetic oligonucleotide

SEQ ID NO: 623359 - DNA, 55 bp, Artificial; identical to SEQ ID NO: 183175
  Synthetic oligonucleotide

SEQ ID NO: 623360 - DNA, 54 bp, Artificial; identical to SEQ ID NO: 217813
  Synthetic oligonucleotide

SEQ ID NO: 623361 - DNA, 52 bp, Artificial; identical to SEQ ID NO: 237040
  Synthetic oligonucleotide

SEQ ID NO: 623362 - DNA, 55 bp, Artificial; identical to SEQ ID NO: 233647
  Synthetic oligonucleotide

SEQ ID NO: 623363 - DNA, 60 bp, Artificial; identical to SEQ ID NO: 254944
  Synthetic oligonucleotide

SEQ ID NO: 623364 - DNA, 54 bp, Artificial; identical to SEQ ID NO: 255164
  Synthetic oligonucleotide

SEQ ID NO: 623365 - DNA, 55 bp, Artificial; identical to SEQ ID NO: 212374
  Synthetic oligonucleotide

SEQ ID NO: 623366 - DNA, 55 bp, Artificial; identical to SEQ ID NO: 249204
  Synthetic oligonucleotide

SEQ ID NO: 623367 - DNA, 55 bp, Artificial; identical to SEQ ID NO: 148485
  Synthetic oligonucleotide

SEQ ID NO: 623368 - DNA, 55 bp, Artificial; identical to SEQ ID NO: 248426
  Synthetic oligonucleotide

SEQ ID NO: 623369 - DNA, 55 bp, Artificial; identical to SEQ ID NO: 211220
  Synthetic oligonucleotide

SEQ ID NO: 623370 - DNA, 53 bp, Artificial; identical to SEQ ID NO: 149452
  Synthetic oligonucleotide

SEQ ID NO: 623371 - DNA, 58 bp, Artificial; identical to SEQ ID NO: 224157
  Synthetic oligonucleotide

SEQ ID NO: 623372 - DNA, 55 bp, Artificial; identical to SEQ ID NO: 156875
  Synthetic oligonucleotide

SEQ ID NO: 623373 - DNA, 53 bp, Artificial; identical to SEQ ID NO: 246351
  Synthetic oligonucleotide

SEQ ID NO: 623374 - DNA, 52 bp, Artificial; identical to SEQ ID NO: 146446
  Synthetic oligonucleotide

SEQ ID NO: 623375 - DNA, 60 bp, Artificial; identical to SEQ ID NO: 147238
  Synthetic oligonucleotide

SEQ ID NO: 623376 - DNA, 56 bp, Artificial; identical to SEQ ID NO: 198548
  Synthetic oligonucleotide

SEQ ID NO: 623377 - DNA, 55 bp, Artificial; identical to SEQ ID NO: 164229
  Synthetic oligonucleotide

SEQ ID NO: 623378 - DNA, 55 bp, Artificial; identical to SEQ ID NO: 161028
  Synthetic oligonucleotide

SEQ ID NO: 623379 - DNA, 59 bp, Artificial; identical to SEQ ID NO: 258052
  Synthetic oligonucleotide

SEQ ID NO: 623380 - DNA, 54 bp, Artificial; identical to SEQ ID NO: 255179
  Synthetic oligonucleotide

SEQ ID NO: 623381 - DNA, 55 bp, Artificial; identical to SEQ ID NO: 199021
  Synthetic oligonucleotide

SEQ ID NO: 623382 - DNA, 55 bp, Artificial; identical to SEQ ID NO: 174498
  Synthetic oligonucleotide

SEQ ID NO: 623383 - DNA, 55 bp, Artificial; identical to SEQ ID NO: 169164
  Synthetic oligonucleotide

SEQ ID NO: 623384 - DNA, 54 bp, Artificial; identical to SEQ ID NO: 157267
  Synthetic oligonucleotide

SEQ ID NO: 623385 - DNA, 54 bp, Artificial; identical to SEQ ID NO: 185265
  Synthetic oligonucleotide

SEQ ID NO: 623386 - DNA, 53 bp, Artificial; identical to SEQ ID NO: 223621
  Synthetic oligonucleotide

SEQ ID NO: 623387 - DNA, 55 bp, Artificial; identical to SEQ ID NO: 168704
  Synthetic oligonucleotide

SEQ ID NO: 623388 - DNA, 55 bp, Artificial; identical to SEQ ID NO: 212813
  Synthetic oligonucleotide

SEQ ID NO: 623389 - DNA, 55 bp, Artificial; identical to SEQ ID NO: 208225
  Synthetic oligonucleotide

SEQ ID NO: 623390 - DNA, 51 bp, Artificial; identical to SEQ ID NO: 186817
  Synthetic oligonucleotide

SEQ ID NO: 623391 - DNA, 55 bp, Artificial; identical to SEQ ID NO: 209475
  Synthetic oligonucleotide

SEQ ID NO: 623392 - DNA, 54 bp, Artificial; identical to SEQ ID NO: 199020
  Synthetic oligonucleotide

SEQ ID NO: 623393 - DNA, 55 bp, Artificial; identical to SEQ ID NO: 257898
  Synthetic oligonucleotide

SEQ ID NO: 623394 - DNA, 55 bp, Artificial; identical to SEQ ID NO: 242796
  Synthetic oligonucleotide

SEQ ID NO: 623395 - DNA, 55 bp, Artificial; identical to SEQ ID NO: 225056
  Synthetic oligonucleotide

SEQ ID NO: 623396 - DNA, 55 bp, Artificial; identical to SEQ ID NO: 148436
  Synthetic oligonucleotide

SEQ ID NO: 623397 - DNA, 51 bp, Artificial; identical to SEQ ID NO: 209711
  Synthetic oligonucleotide

SEQ ID NO: 623398 - DNA, 55 bp, Artificial; identical to SEQ ID NO: 171642
  Synthetic oligonucleotide

SEQ ID NO: 623399 - DNA, 51 bp, Artificial; identical to SEQ ID NO: 186819
  Synthetic oligonucleotide

SEQ ID NO: 623400 - DNA, 55 bp, Artificial; identical to SEQ ID NO: 205292
  Synthetic oligonucleotide

SEQ ID NO: 623401 - DNA, 55 bp, Artificial; identical to SEQ ID NO: 221558
  Synthetic oligonucleotide

SEQ ID NO: 623402 - DNA, 55 bp, Artificial; identical to SEQ ID NO: 221559
  Synthetic oligonucleotide

SEQ ID NO: 623403 - DNA, 51 bp, Artificial; identical to SEQ ID NO: 200017
  Synthetic oligonucleotide

SEQ ID NO: 623404 - DNA, 55 bp, Artificial; identical to SEQ ID NO: 190470
  Synthetic oligonucleotide

SEQ ID NO: 623405 - DNA, 55 bp, Artificial; identical to SEQ ID NO: 199018
  Synthetic oligonucleotide

SEQ ID NO: 623406 - DNA, 54 bp, Artificial; identical to SEQ ID NO: 199080
  Synthetic oligonucleotide

SEQ ID NO: 623407 - DNA, 55 bp, Artificial; identical to SEQ ID NO: 199079
  Synthetic oligonucleotide

SEQ ID NO: 623408 - DNA, 51 bp, Artificial; identical to SEQ ID NO: 203027
  Synthetic oligonucleotide

SEQ ID NO: 623409 - DNA, 59 bp, Artificial; identical to SEQ ID NO: 147682
  Synthetic oligonucleotide

SEQ ID NO: 623410 - DNA, 55 bp, Artificial; identical to SEQ ID NO: 148441
  Synthetic oligonucleotide

SEQ ID NO: 623411 - DNA, 52 bp, Artificial; identical to SEQ ID NO: 221745
  Synthetic oligonucleotide

SEQ ID NO: 623412 - DNA, 55 bp, Artificial; identical to SEQ ID NO: 249206
  Synthetic oligonucleotide

SEQ ID NO: 623413 - DNA, 53 bp, Artificial; identical to SEQ ID NO: 255418
  Synthetic oligonucleotide

SEQ ID NO: 623414 - DNA, 55 bp, Artificial; identical to SEQ ID NO: 250007
  Synthetic oligonucleotide

SEQ ID NO: 623415 - DNA, 55 bp, Artificial; identical to SEQ ID NO: 156863
  Synthetic oligonucleotide

SEQ ID NO: 623416 - DNA, 59 bp, Artificial; identical to SEQ ID NO: 164968
  Synthetic oligonucleotide

SEQ ID NO: 623417 - DNA, 56 bp, Artificial; identical to SEQ ID NO: 211591
  Synthetic oligonucleotide

SEQ ID NO: 623418 - DNA, 57 bp, Artificial; identical to SEQ ID NO: 242020
  Synthetic oligonucleotide

SEQ ID NO: 623419 - DNA, 55 bp, Artificial; identical to SEQ ID NO: 242799
  Synthetic oligonucleotide

SEQ ID NO: 623420 - DNA, 53 bp, Artificial; identical to SEQ ID NO: 244687
  Synthetic oligonucleotide

SEQ ID NO: 623421 - DNA, 55 bp, Artificial; identical to SEQ ID NO: 223449
  Synthetic oligonucleotide

SEQ ID NO: 623422 - DNA, 57 bp, Artificial; identical to SEQ ID NO: 166133
  Synthetic oligonucleotide

SEQ ID NO: 623423 - DNA, 53 bp, Artificial; identical to SEQ ID NO: 185592
  Synthetic oligonucleotide

SEQ ID NO: 623424 - DNA, 51 bp, Artificial; identical to SEQ ID NO: 237108
  Synthetic oligonucleotide

SEQ ID NO: 623425 - DNA, 59 bp, Artificial; identical to SEQ ID NO: 144340
  Synthetic oligonucleotide

SEQ ID NO: 623426 - DNA, 60 bp, Artificial; identical to SEQ ID NO: 234419
  Synthetic oligonucleotide

SEQ ID NO: 623427 - DNA, 55 bp, Artificial; identical to SEQ ID NO: 240142
  Synthetic oligonucleotide

SEQ ID NO: 623428 - DNA, 55 bp, Artificial; identical to SEQ ID NO: 194793
  Synthetic oligonucleotide

SEQ ID NO: 623429 - DNA, 55 bp, Artificial; identical to SEQ ID NO: 148451
  Synthetic oligonucleotide

SEQ ID NO: 623430 - DNA, 59 bp, Artificial; identical to SEQ ID NO: 198515
  Synthetic oligonucleotide

SEQ ID NO: 623431 - DNA, 59 bp, Artificial; identical to SEQ ID NO: 239243
  Synthetic oligonucleotide

SEQ ID NO: 623432 - DNA, 54 bp, Artificial; identical to SEQ ID NO: 149125
  Synthetic oligonucleotide

SEQ ID NO: 623433 - DNA, 60 bp, Artificial; identical to SEQ ID NO: 241998
  Synthetic oligonucleotide

SEQ ID NO: 623434 - DNA, 60 bp, Artificial; identical to SEQ ID NO: 241986
  Synthetic oligonucleotide

SEQ ID NO: 623435 - DNA, 52 bp, Artificial; identical to SEQ ID NO: 177636
  Synthetic oligonucleotide

SEQ ID NO: 623436 - DNA, 52 bp, Artificial; identical to SEQ ID NO: 177637
  Synthetic oligonucleotide

SEQ ID NO: 623437 - DNA, 55 bp, Artificial; identical to SEQ ID NO: 142856
  Synthetic oligonucleotide

SEQ ID NO: 623438 - DNA, 60 bp, Artificial; identical to SEQ ID NO: 258918
  Synthetic oligonucleotide

SEQ ID NO: 623439 - DNA, 55 bp, Artificial; identical to SEQ ID NO: 233585
  Synthetic oligonucleotide

SEQ ID NO: 623440 - DNA, 60 bp, Artificial; identical to SEQ ID NO: 244798
  Synthetic oligonucleotide

SEQ ID NO: 623441 - DNA, 60 bp, Artificial; identical to SEQ ID NO: 198949
  Synthetic oligonucleotide

SEQ ID NO: 623442 - DNA, 54 bp, Artificial; identical to SEQ ID NO: 149132
  Synthetic oligonucleotide

SEQ ID NO: 623443 - DNA, 53 bp, Artificial; identical to SEQ ID NO: 191895
  Synthetic oligonucleotide

SEQ ID NO: 623444 - DNA, 56 bp, Artificial; identical to SEQ ID NO: 161969
  Synthetic oligonucleotide

SEQ ID NO: 623445 - DNA, 57 bp, Artificial; identical to SEQ ID NO: 177585
  Synthetic oligonucleotide

SEQ ID NO: 623446 - DNA, 55 bp, Artificial; identical to SEQ ID NO: 205290
  Synthetic oligonucleotide

SEQ ID NO: 623447 - DNA, 55 bp, Artificial; identical to SEQ ID NO: 254891
  Synthetic oligonucleotide

SEQ ID NO: 623448 - DNA, 55 bp, Artificial; identical to SEQ ID NO: 151700
  Synthetic oligonucleotide

SEQ ID NO: 623449 - DNA, 55 bp, Artificial; identical to SEQ ID NO: 245975
  Synthetic oligonucleotide

SEQ ID NO: 623450 - DNA, 58 bp, Artificial; identical to SEQ ID NO: 198936
  Synthetic oligonucleotide

SEQ ID NO: 623451 - DNA, 54 bp, Artificial; identical to SEQ ID NO: 241975
  Synthetic oligonucleotide

SEQ ID NO: 623452 - DNA, 55 bp, Artificial; identical to SEQ ID NO: 246034
  Synthetic oligonucleotide

SEQ ID NO: 623453 - DNA, 57 bp, Artificial; identical to SEQ ID NO: 154008
  Synthetic oligonucleotide

SEQ ID NO: 623454 - DNA, 55 bp, Artificial; identical to SEQ ID NO: 249209
  Synthetic oligonucleotide

SEQ ID NO: 623455 - DNA, 55 bp, Artificial; identical to SEQ ID NO: 242802
  Synthetic oligonucleotide

SEQ ID NO: 623456 - DNA, 55 bp, Artificial; identical to SEQ ID NO: 211226
  Synthetic oligonucleotide

SEQ ID NO: 623457 - DNA, 52 bp, Artificial; identical to SEQ ID NO: 246490
  Synthetic oligonucleotide

SEQ ID NO: 623458 - DNA, 55 bp, Artificial; identical to SEQ ID NO: 246058
  Synthetic oligonucleotide

SEQ ID NO: 623459 - DNA, 55 bp, Artificial; identical to SEQ ID NO: 161766
  Synthetic oligonucleotide

SEQ ID NO: 623460 - DNA, 56 bp, Artificial; identical to SEQ ID NO: 166202
  Synthetic oligonucleotide

SEQ ID NO: 623461 - DNA, 55 bp, Artificial; identical to SEQ ID NO: 183101
  Synthetic oligonucleotide

SEQ ID NO: 623462 - DNA, 55 bp, Artificial; identical to SEQ ID NO: 183106
  Synthetic oligonucleotide

SEQ ID NO: 623463 - DNA, 52 bp, Artificial; identical to SEQ ID NO: 188124
  Synthetic oligonucleotide

SEQ ID NO: 623464 - DNA, 53 bp, Artificial; identical to SEQ ID NO: 185622
  Synthetic oligonucleotide

SEQ ID NO: 623465 - DNA, 55 bp, Artificial; identical to SEQ ID NO: 183114
  Synthetic oligonucleotide

SEQ ID NO: 623466 - DNA, 55 bp, Artificial; identical to SEQ ID NO: 188332
  Synthetic oligonucleotide

SEQ ID NO: 623467 - DNA, 54 bp, Artificial; identical to SEQ ID NO: 197444
  Synthetic oligonucleotide

SEQ ID NO: 623468 - DNA, 55 bp, Artificial; identical to SEQ ID NO: 156823
  Synthetic oligonucleotide

SEQ ID NO: 623469 - DNA, 51 bp, Artificial; identical to SEQ ID NO: 225274
  Synthetic oligonucleotide

SEQ ID NO: 623470 - DNA, 55 bp, Artificial; identical to SEQ ID NO: 193556
  Synthetic oligonucleotide

SEQ ID NO: 623471 - DNA, 55 bp, Artificial; identical to SEQ ID NO: 190473
  Synthetic oligonucleotide

SEQ ID NO: 623472 - DNA, 58 bp, Artificial; identical to SEQ ID NO: 198914
  Synthetic oligonucleotide

SEQ ID NO: 623473 - DNA, 55 bp, Artificial; identical to SEQ ID NO: 148306
  Synthetic oligonucleotide

SEQ ID NO: 623474 - DNA, 55 bp, Artificial; identical to SEQ ID NO: 199074
  Synthetic oligonucleotide

SEQ ID NO: 623475 - DNA, 58 bp, Artificial; identical to SEQ ID NO: 248594
  Synthetic oligonucleotide

SEQ ID NO: 623476 - DNA, 55 bp, Artificial; identical to SEQ ID NO: 191017
  Synthetic oligonucleotide

SEQ ID NO: 623477 - DNA, 60 bp, Artificial; identical to SEQ ID NO: 147660
  Synthetic oligonucleotide

SEQ ID NO: 623478 - DNA, 55 bp, Artificial; identical to SEQ ID NO: 169165
  Synthetic oligonucleotide

SEQ ID NO: 623479 - DNA, 58 bp, Artificial; identical to SEQ ID NO: 225502
  Synthetic oligonucleotide

SEQ ID NO: 623480 - DNA, 50 bp, Artificial; identical to SEQ ID NO: 216433
  Synthetic oligonucleotide

SEQ ID NO: 623481 - DNA, 60 bp, Artificial; identical to SEQ ID NO: 170817
  Synthetic oligonucleotide

SEQ ID NO: 623482 - DNA, 53 bp, Artificial; identical to SEQ ID NO: 195003
  Synthetic oligonucleotide

SEQ ID NO: 623483 - DNA, 57 bp, Artificial; identical to SEQ ID NO: 239433
  Synthetic oligonucleotide

SEQ ID NO: 623484 - DNA, 60 bp, Artificial; identical to SEQ ID NO: 263536
  Synthetic oligonucleotide

SEQ ID NO: 623485 - DNA, 55 bp, Artificial; identical to SEQ ID NO: 156819
  Synthetic oligonucleotide

SEQ ID NO: 623486 - DNA, 60 bp, Artificial; identical to SEQ ID NO: 177595
  Synthetic oligonucleotide

SEQ ID NO: 623487 - DNA, 55 bp, Artificial; identical to SEQ ID NO: 161027
  Synthetic oligonucleotide

SEQ ID NO: 623488 - DNA, 55 bp, Artificial; identical to SEQ ID NO: 217816
  Synthetic oligonucleotide

SEQ ID NO: 623489 - DNA, 55 bp, Artificial; identical to SEQ ID NO: 196798
  Synthetic oligonucleotide

SEQ ID NO: 623490 - DNA, 54 bp, Artificial; identical to SEQ ID NO: 199631
  Synthetic oligonucleotide

SEQ ID NO: 623491 - DNA, 50 bp, Artificial; identical to SEQ ID NO: 187141
  Synthetic oligonucleotide

SEQ ID NO: 623492 - DNA, 55 bp, Artificial; identical to SEQ ID NO: 156817
  Synthetic oligonucleotide

SEQ ID NO: 623493 - DNA, 60 bp, Artificial; identical to SEQ ID NO: 159953
  Synthetic oligonucleotide

SEQ ID NO: 623494 - DNA, 53 bp, Artificial; identical to SEQ ID NO: 157291
  Synthetic oligonucleotide

SEQ ID NO: 623495 - DNA, 55 bp, Artificial; identical to SEQ ID NO: 254898
  Synthetic oligonucleotide

SEQ ID NO: 623496 - DNA, 55 bp, Artificial; identical to SEQ ID NO: 194795
  Synthetic oligonucleotide

SEQ ID NO: 623497 - DNA, 55 bp, Artificial; identical to SEQ ID NO: 233584
  Synthetic oligonucleotide

SEQ ID NO: 623498 - DNA, 55 bp, Artificial; identical to SEQ ID NO: 152333
  Synthetic oligonucleotide

SEQ ID NO: 623499 - DNA, 60 bp, Artificial; identical to SEQ ID NO: 177600
  Synthetic oligonucleotide

SEQ ID NO: 623500 - DNA, 55 bp, Artificial; identical to SEQ ID NO: 205287
  Synthetic oligonucleotide

SEQ ID NO: 623501 - DNA, 55 bp, Artificial; identical to SEQ ID NO: 196753
  Synthetic oligonucleotide

SEQ ID NO: 623502 - DNA, 58 bp, Artificial; identical to SEQ ID NO: 147638
  Synthetic oligonucleotide

SEQ ID NO: 623503 - DNA, 60 bp, Artificial; identical to SEQ ID NO: 222847
  Synthetic oligonucleotide

SEQ ID NO: 623504 - DNA, 55 bp, Artificial; identical to SEQ ID NO: 171646
  Synthetic oligonucleotide

SEQ ID NO: 623505 - DNA, 55 bp, Artificial; identical to SEQ ID NO: 254901
  Synthetic oligonucleotide

SEQ ID NO: 623506 - DNA, 55 bp, Artificial; identical to SEQ ID NO: 207732
  Synthetic oligonucleotide

SEQ ID NO: 623507 - DNA, 55 bp, Artificial; identical to SEQ ID NO: 199073
  Synthetic oligonucleotide

SEQ ID NO: 623508 - DNA, 55 bp, Artificial; identical to SEQ ID NO: 203661
  Synthetic oligonucleotide

SEQ ID NO: 623509 - DNA, 55 bp, Artificial; identical to SEQ ID NO: 191015
  Synthetic oligonucleotide

SEQ ID NO: 623510 - DNA, 55 bp, Artificial; identical to SEQ ID NO: 183140
  Synthetic oligonucleotide

SEQ ID NO: 623511 - DNA, 55 bp, Artificial; identical to SEQ ID NO: 173612
  Synthetic oligonucleotide

SEQ ID NO: 623512 - DNA, 55 bp, Artificial; identical to SEQ ID NO: 199072
  Synthetic oligonucleotide

SEQ ID NO: 623513 - DNA, 55 bp, Artificial; identical to SEQ ID NO: 196764
  Synthetic oligonucleotide

SEQ ID NO: 623514 - DNA, 60 bp, Artificial; identical to SEQ ID NO: 147626
  Synthetic oligonucleotide

SEQ ID NO: 623515 - DNA, 51 bp, Artificial; identical to SEQ ID NO: 243294
  Synthetic oligonucleotide

SEQ ID NO: 623516 - DNA, 55 bp, Artificial; identical to SEQ ID NO: 162176
  Synthetic oligonucleotide

SEQ ID NO: 623517 - DNA, 50 bp, Artificial; identical to SEQ ID NO: 150396
  Synthetic oligonucleotide

SEQ ID NO: 623518 - DNA, 60 bp, Artificial; identical to SEQ ID NO: 170819
  Synthetic oligonucleotide

SEQ ID NO: 623519 - DNA, 55 bp, Artificial; identical to SEQ ID NO: 171648
  Synthetic oligonucleotide

SEQ ID NO: 623520 - DNA, 56 bp, Artificial; identical to SEQ ID NO: 179936
  Synthetic oligonucleotide

SEQ ID NO: 623521 - DNA, 52 bp, Artificial; identical to SEQ ID NO: 255538
  Synthetic oligonucleotide

SEQ ID NO: 623522 - DNA, 55 bp, Artificial; identical to SEQ ID NO: 148314
  Synthetic oligonucleotide

SEQ ID NO: 623523 - DNA, 55 bp, Artificial; identical to SEQ ID NO: 188329
  Synthetic oligonucleotide

SEQ ID NO: 623524 - DNA, 53 bp, Artificial; identical to SEQ ID NO: 238727
  Synthetic oligonucleotide

SEQ ID NO: 623525 - DNA, 57 bp, Artificial; identical to SEQ ID NO: 179793
  Synthetic oligonucleotide

SEQ ID NO: 623526 - DNA, 60 bp, Artificial; identical to SEQ ID NO: 202670
  Synthetic oligonucleotide

SEQ ID NO: 623527 - DNA, 55 bp, Artificial; identical to SEQ ID NO: 209471
  Synthetic oligonucleotide

SEQ ID NO: 623528 - DNA, 55 bp, Artificial; identical to SEQ ID NO: 183123
  Synthetic oligonucleotide

SEQ ID NO: 623529 - DNA, 53 bp, Artificial; identical to SEQ ID NO: 233807
  Synthetic oligonucleotide

SEQ ID NO: 623530 - DNA, 55 bp, Artificial; identical to SEQ ID NO: 246004
  Synthetic oligonucleotide

SEQ ID NO: 623531 - DNA, 55 bp, Artificial; identical to SEQ ID NO: 260186
  Synthetic oligonucleotide

SEQ ID NO: 623532 - DNA, 55 bp, Artificial; identical to SEQ ID NO: 209470
  Synthetic oligonucleotide

SEQ ID NO: 623533 - DNA, 53 bp, Artificial; identical to SEQ ID NO: 154596
  Synthetic oligonucleotide

SEQ ID NO: 623534 - DNA, 60 bp, Artificial; identical to SEQ ID NO: 242985
  Synthetic oligonucleotide

SEQ ID NO: 623535 - DNA, 57 bp, Artificial; identical to SEQ ID NO: 209395
  Synthetic oligonucleotide

SEQ ID NO: 623536 - DNA, 55 bp, Artificial; identical to SEQ ID NO: 209469
  Synthetic oligonucleotide

SEQ ID NO: 623537 - DNA, 51 bp, Artificial; identical to SEQ ID NO: 172822
  Synthetic oligonucleotide

SEQ ID NO: 623538 - DNA, 55 bp, Artificial; identical to SEQ ID NO: 242804
  Synthetic oligonucleotide

SEQ ID NO: 623539 - DNA, 58 bp, Artificial; identical to SEQ ID NO: 147604
  Synthetic oligonucleotide

SEQ ID NO: 623540 - DNA, 55 bp, Artificial; identical to SEQ ID NO: 160221
  Synthetic oligonucleotide

SEQ ID NO: 623541 - DNA, 55 bp, Artificial; identical to SEQ ID NO: 253121
  Synthetic oligonucleotide

SEQ ID NO: 623542 - DNA, 55 bp, Artificial; identical to SEQ ID NO: 171651
  Synthetic oligonucleotide

SEQ ID NO: 623543 - DNA, 55 bp, Artificial; identical to SEQ ID NO: 171652
  Synthetic oligonucleotide

SEQ ID NO: 623544 - DNA, 55 bp, Artificial; identical to SEQ ID NO: 183323
  Synthetic oligonucleotide

SEQ ID NO: 623545 - DNA, 55 bp, Artificial; identical to SEQ ID NO: 191893
  Synthetic oligonucleotide

SEQ ID NO: 623546 - DNA, 55 bp, Artificial; identical to SEQ ID NO: 202226
  Synthetic oligonucleotide

SEQ ID NO: 623547 - DNA, 58 bp, Artificial; identical to SEQ ID NO: 147028
  Synthetic oligonucleotide

SEQ ID NO: 623548 - DNA, 55 bp, Artificial; identical to SEQ ID NO: 147582
  Synthetic oligonucleotide

SEQ ID NO: 623549 - DNA, 55 bp, Artificial; identical to SEQ ID NO: 209468
  Synthetic oligonucleotide

SEQ ID NO: 623550 - DNA, 57 bp, Artificial; identical to SEQ ID NO: 245131
  Synthetic oligonucleotide

SEQ ID NO: 623551 - DNA, 55 bp, Artificial; identical to SEQ ID NO: 174496
  Synthetic oligonucleotide

SEQ ID NO: 623552 - DNA, 55 bp, Artificial; identical to SEQ ID NO: 148288
  Synthetic oligonucleotide

SEQ ID NO: 623553 - DNA, 55 bp, Artificial; identical to SEQ ID NO: 240135
  Synthetic oligonucleotide

SEQ ID NO: 623554 - DNA, 50 bp, Artificial; identical to SEQ ID NO: 165650
  Synthetic oligonucleotide

SEQ ID NO: 623555 - DNA, 55 bp, Artificial; identical to SEQ ID NO: 242805
  Synthetic oligonucleotide

SEQ ID NO: 623556 - DNA, 52 bp, Artificial; identical to SEQ ID NO: 185961
  Synthetic oligonucleotide

SEQ ID NO: 623557 - DNA, 56 bp, Artificial; identical to SEQ ID NO: 242996
  Synthetic oligonucleotide

SEQ ID NO: 623558 - DNA, 52 bp, Artificial; identical to SEQ ID NO: 171751
  Synthetic oligonucleotide

SEQ ID NO: 623559 - DNA, 54 bp, Artificial; identical to SEQ ID NO: 223453
  Synthetic oligonucleotide

SEQ ID NO: 623560 - DNA, 52 bp, Artificial; identical to SEQ ID NO: 243008
  Synthetic oligonucleotide

SEQ ID NO: 623561 - DNA, 58 bp, Artificial; identical to SEQ ID NO: 167241
  Synthetic oligonucleotide

SEQ ID NO: 623562 - DNA, 55 bp, Artificial; identical to SEQ ID NO: 242809
  Synthetic oligonucleotide

SEQ ID NO: 623563 - DNA, 55 bp, Artificial; identical to SEQ ID NO: 142580
  Synthetic oligonucleotide

SEQ ID NO: 623564 - DNA, 56 bp, Artificial; identical to SEQ ID NO: 144360
  Synthetic oligonucleotide

SEQ ID NO: 623565 - DNA, 50 bp, Artificial; identical to SEQ ID NO: 246871
  Synthetic oligonucleotide

SEQ ID NO: 623566 - DNA, 55 bp, Artificial; identical to SEQ ID NO: 164221
  Synthetic oligonucleotide

SEQ ID NO: 623567 - DNA, 54 bp, Artificial; identical to SEQ ID NO: 240607
  Synthetic oligonucleotide

SEQ ID NO: 623568 - DNA, 55 bp, Artificial; identical to SEQ ID NO: 234619
  Synthetic oligonucleotide

SEQ ID NO: 623569 - DNA, 52 bp, Artificial; identical to SEQ ID NO: 243233
  Synthetic oligonucleotide

SEQ ID NO: 623570 - DNA, 55 bp, Artificial; identical to SEQ ID NO: 154288
  Synthetic oligonucleotide

SEQ ID NO: 623571 - DNA, 55 bp, Artificial; identical to SEQ ID NO: 208226
  Synthetic oligonucleotide

SEQ ID NO: 623572 - DNA, 55 bp, Artificial; identical to SEQ ID NO: 221154
  Synthetic oligonucleotide

SEQ ID NO: 623573 - DNA, 54 bp, Artificial; identical to SEQ ID NO: 222877
  Synthetic oligonucleotide

SEQ ID NO: 623574 - DNA, 54 bp, Artificial; identical to SEQ ID NO: 258054
  Synthetic oligonucleotide

SEQ ID NO: 623575 - DNA, 55 bp, Artificial; identical to SEQ ID NO: 257894
  Synthetic oligonucleotide

SEQ ID NO: 623576 - DNA, 55 bp, Artificial; identical to SEQ ID NO: 245884
  Synthetic oligonucleotide

SEQ ID NO: 623577 - DNA, 60 bp, Artificial; identical to SEQ ID NO: 187617
  Synthetic oligonucleotide

SEQ ID NO: 623578 - DNA, 60 bp, Artificial; identical to SEQ ID NO: 238693
  Synthetic oligonucleotide

SEQ ID NO: 623579 - DNA, 55 bp, Artificial; identical to SEQ ID NO: 212811
  Synthetic oligonucleotide

SEQ ID NO: 623580 - DNA, 55 bp, Artificial; identical to SEQ ID NO: 190474
  Synthetic oligonucleotide

SEQ ID NO: 623581 - DNA, 55 bp, Artificial; identical to SEQ ID NO: 148292
  Synthetic oligonucleotide

SEQ ID NO: 623582 - DNA, 50 bp, Artificial; identical to SEQ ID NO: 150409
  Synthetic oligonucleotide

SEQ ID NO: 623583 - DNA, 55 bp, Artificial; identical to SEQ ID NO: 242810
  Synthetic oligonucleotide

SEQ ID NO: 623584 - DNA, 55 bp, Artificial; identical to SEQ ID NO: 160220
  Synthetic oligonucleotide

SEQ ID NO: 623585 - DNA, 52 bp, Artificial; identical to SEQ ID NO: 165052
  Synthetic oligonucleotide

SEQ ID NO: 623586 - DNA, 55 bp, Artificial; identical to SEQ ID NO: 234653
  Synthetic oligonucleotide

SEQ ID NO: 623587 - DNA, 55 bp, Artificial; identical to SEQ ID NO: 162180
  Synthetic oligonucleotide

SEQ ID NO: 623588 - DNA, 59 bp, Artificial; identical to SEQ ID NO: 147034
  Synthetic oligonucleotide

SEQ ID NO: 623589 - DNA, 52 bp, Artificial; identical to SEQ ID NO: 238682
  Synthetic oligonucleotide

SEQ ID NO: 623590 - DNA, 54 bp, Artificial; identical to SEQ ID NO: 207709
  Synthetic oligonucleotide

SEQ ID NO: 623591 - DNA, 55 bp, Artificial; identical to SEQ ID NO: 196890
  Synthetic oligonucleotide

SEQ ID NO: 623592 - DNA, 59 bp, Artificial; identical to SEQ ID NO: 187606
  Synthetic oligonucleotide

SEQ ID NO: 623593 - DNA, 55 bp, Artificial; identical to SEQ ID NO: 183223
  Synthetic oligonucleotide

SEQ ID NO: 623594 - DNA, 55 bp, Artificial; identical to SEQ ID NO: 188328
  Synthetic oligonucleotide

SEQ ID NO: 623595 - DNA, 60 bp, Artificial; identical to SEQ ID NO: 237559
  Synthetic oligonucleotide

SEQ ID NO: 623596 - DNA, 55 bp, Artificial; identical to SEQ ID NO: 183222
  Synthetic oligonucleotide

SEQ ID NO: 623597 - DNA, 55 bp, Artificial; identical to SEQ ID NO: 164219
  Synthetic oligonucleotide

SEQ ID NO: 623598 - DNA, 54 bp, Artificial; identical to SEQ ID NO: 209582
  Synthetic oligonucleotide

SEQ ID NO: 623599 - DNA, 52 bp, Artificial; identical to SEQ ID NO: 169007
  Synthetic oligonucleotide

SEQ ID NO: 623600 - DNA, 60 bp, Artificial; identical to SEQ ID NO: 177695
  Synthetic oligonucleotide

SEQ ID NO: 623601 - DNA, 52 bp, Artificial; identical to SEQ ID NO: 157659
  Synthetic oligonucleotide

SEQ ID NO: 623602 - DNA, 54 bp, Artificial; identical to SEQ ID NO: 198892
  Synthetic oligonucleotide

SEQ ID NO: 623603 - DNA, 55 bp, Artificial; identical to SEQ ID NO: 183280
  Synthetic oligonucleotide

SEQ ID NO: 623604 - DNA, 60 bp, Artificial; identical to SEQ ID NO: 198881
  Synthetic oligonucleotide

SEQ ID NO: 623605 - DNA, 55 bp, Artificial; identical to SEQ ID NO: 265704
  Synthetic oligonucleotide

SEQ ID NO: 623606 - DNA, 53 bp, Artificial; identical to SEQ ID NO: 258128
  Synthetic oligonucleotide

SEQ ID NO: 623607 - DNA, 60 bp, Artificial; identical to SEQ ID NO: 177642
  Synthetic oligonucleotide

SEQ ID NO: 623608 - DNA, 60 bp, Artificial; identical to SEQ ID NO: 177643
  Synthetic oligonucleotide

SEQ ID NO: 623609 - DNA, 50 bp, Artificial; identical to SEQ ID NO: 186967
  Synthetic oligonucleotide

SEQ ID NO: 623610 - DNA, 55 bp, Artificial; identical to SEQ ID NO: 207531
  Synthetic oligonucleotide

SEQ ID NO: 623611 - DNA, 55 bp, Artificial; identical to SEQ ID NO: 212809
  Synthetic oligonucleotide

SEQ ID NO: 623612 - DNA, 60 bp, Artificial; identical to SEQ ID NO: 170820
  Synthetic oligonucleotide

SEQ ID NO: 623613 - DNA, 55 bp, Artificial; identical to SEQ ID NO: 148351
  Synthetic oligonucleotide

SEQ ID NO: 623614 - DNA, 55 bp, Artificial; identical to SEQ ID NO: 183262
  Synthetic oligonucleotide

SEQ ID NO: 623615 - DNA, 51 bp, Artificial; identical to SEQ ID NO: 149864
  Synthetic oligonucleotide

SEQ ID NO: 623616 - DNA, 58 bp, Artificial; identical to SEQ ID NO: 187347
  Synthetic oligonucleotide

SEQ ID NO: 623617 - DNA, 55 bp, Artificial; identical to SEQ ID NO: 260184
  Synthetic oligonucleotide

SEQ ID NO: 623618 - DNA, 55 bp, Artificial; identical to SEQ ID NO: 249214
  Synthetic oligonucleotide

SEQ ID NO: 623619 - DNA, 55 bp, Artificial; identical to SEQ ID NO: 199066
  Synthetic oligonucleotide

SEQ ID NO: 623620 - DNA, 50 bp, Artificial; identical to SEQ ID NO: 176182
  Synthetic oligonucleotide

SEQ ID NO: 623621 - DNA, 55 bp, Artificial; identical to SEQ ID NO: 164257
  Synthetic oligonucleotide

SEQ ID NO: 623622 - DNA, 55 bp, Artificial; identical to SEQ ID NO: 207490
  Synthetic oligonucleotide

SEQ ID NO: 623623 - DNA, 58 bp, Artificial; identical to SEQ ID NO: 147538
  Synthetic oligonucleotide

SEQ ID NO: 623624 - DNA, 59 bp, Artificial; identical to SEQ ID NO: 198870
  Synthetic oligonucleotide

SEQ ID NO: 623625 - DNA, 50 bp, Artificial; identical to SEQ ID NO: 210414
  Synthetic oligonucleotide

SEQ ID NO: 623626 - DNA, 55 bp, Artificial; identical to SEQ ID NO: 154286
  Synthetic oligonucleotide

SEQ ID NO: 623627 - DNA, 53 bp, Artificial; identical to SEQ ID NO: 188040
  Synthetic oligonucleotide

SEQ ID NO: 623628 - DNA, 55 bp, Artificial; identical to SEQ ID NO: 258941
  Synthetic oligonucleotide

SEQ ID NO: 623629 - DNA, 59 bp, Artificial; identical to SEQ ID NO: 177656
  Synthetic oligonucleotide

SEQ ID NO: 623630 - DNA, 55 bp, Artificial; identical to SEQ ID NO: 223454
  Synthetic oligonucleotide

SEQ ID NO: 623631 - DNA, 55 bp, Artificial; identical to SEQ ID NO: 144436
  Synthetic oligonucleotide

SEQ ID NO: 623632 - DNA, 50 bp, Artificial; identical to SEQ ID NO: 216953
  Synthetic oligonucleotide

SEQ ID NO: 623633 - DNA, 55 bp, Artificial; identical to SEQ ID NO: 190479
  Synthetic oligonucleotide

SEQ ID NO: 623634 - DNA, 55 bp, Artificial; identical to SEQ ID NO: 245859
  Synthetic oligonucleotide

SEQ ID NO: 623635 - DNA, 55 bp, Artificial; identical to SEQ ID NO: 220609
  Synthetic oligonucleotide

SEQ ID NO: 623636 - DNA, 55 bp, Artificial; identical to SEQ ID NO: 208227
  Synthetic oligonucleotide

SEQ ID NO: 623637 - DNA, 55 bp, Artificial; identical to SEQ ID NO: 169166
  Synthetic oligonucleotide

SEQ ID NO: 623638 - DNA, 55 bp, Artificial; identical to SEQ ID NO: 255099
  Synthetic oligonucleotide

SEQ ID NO: 623639 - DNA, 55 bp, Artificial; identical to SEQ ID NO: 245861
  Synthetic oligonucleotide

SEQ ID NO: 623640 - DNA, 55 bp, Artificial; identical to SEQ ID NO: 164255
  Synthetic oligonucleotide

SEQ ID NO: 623641 - DNA, 53 bp, Artificial; identical to SEQ ID NO: 174495
  Synthetic oligonucleotide

SEQ ID NO: 623642 - DNA, 60 bp, Artificial; identical to SEQ ID NO: 254600
  Synthetic oligonucleotide

SEQ ID NO: 623643 - DNA, 55 bp, Artificial; identical to SEQ ID NO: 182864
  Synthetic oligonucleotide

SEQ ID NO: 623644 - DNA, 60 bp, Artificial; identical to SEQ ID NO: 177663
  Synthetic oligonucleotide

SEQ ID NO: 623645 - DNA, 51 bp, Artificial; identical to SEQ ID NO: 154652
  Synthetic oligonucleotide

SEQ ID NO: 623646 - DNA, 54 bp, Artificial; identical to SEQ ID NO: 185380
  Synthetic oligonucleotide

SEQ ID NO: 623647 - DNA, 55 bp, Artificial; identical to SEQ ID NO: 221158
  Synthetic oligonucleotide

SEQ ID NO: 623648 - DNA, 55 bp, Artificial; identical to SEQ ID NO: 148359
  Synthetic oligonucleotide

SEQ ID NO: 623649 - DNA, 55 bp, Artificial; identical to SEQ ID NO: 249217
  Synthetic oligonucleotide

SEQ ID NO: 623650 - DNA, 59 bp, Artificial; identical to SEQ ID NO: 248420
  Synthetic oligonucleotide

SEQ ID NO: 623651 - DNA, 55 bp, Artificial; identical to SEQ ID NO: 164254
  Synthetic oligonucleotide

SEQ ID NO: 623652 - DNA, 55 bp, Artificial; identical to SEQ ID NO: 201322
  Synthetic oligonucleotide

SEQ ID NO: 623653 - DNA, 59 bp, Artificial; identical to SEQ ID NO: 237137
  Synthetic oligonucleotide

SEQ ID NO: 623654 - DNA, 55 bp, Artificial; identical to SEQ ID NO: 156836
  Synthetic oligonucleotide

SEQ ID NO: 623655 - DNA, 55 bp, Artificial; identical to SEQ ID NO: 142375
  Synthetic oligonucleotide

SEQ ID NO: 623656 - DNA, 53 bp, Artificial; identical to SEQ ID NO: 185517
  Synthetic oligonucleotide

SEQ ID NO: 623657 - DNA, 60 bp, Artificial; identical to SEQ ID NO: 203570
  Synthetic oligonucleotide

SEQ ID NO: 623658 - DNA, 55 bp, Artificial; identical to SEQ ID NO: 240056
  Synthetic oligonucleotide

SEQ ID NO: 623659 - DNA, 53 bp, Artificial; identical to SEQ ID NO: 203913
  Synthetic oligonucleotide

SEQ ID NO: 623660 - DNA, 52 bp, Artificial; identical to SEQ ID NO: 182908
  Synthetic oligonucleotide

SEQ ID NO: 623661 - DNA, 58 bp, Artificial; identical to SEQ ID NO: 151314
  Synthetic oligonucleotide

SEQ ID NO: 623662 - DNA, 55 bp, Artificial; identical to SEQ ID NO: 182910
  Synthetic oligonucleotide

SEQ ID NO: 623663 - DNA, 59 bp, Artificial; identical to SEQ ID NO: 256532
  Synthetic oligonucleotide

SEQ ID NO: 623664 - DNA, 55 bp, Artificial; identical to SEQ ID NO: 255131
  Synthetic oligonucleotide

SEQ ID NO: 623665 - DNA, 51 bp, Artificial; identical to SEQ ID NO: 246695
  Synthetic oligonucleotide

SEQ ID NO: 623666 - DNA, 55 bp, Artificial; identical to SEQ ID NO: 245929
  Synthetic oligonucleotide

SEQ ID NO: 623667 - DNA, 55 bp, Artificial; identical to SEQ ID NO: 168808
  Synthetic oligonucleotide

SEQ ID NO: 623668 - DNA, 55 bp, Artificial; identical to SEQ ID NO: 153367
  Synthetic oligonucleotide

SEQ ID NO: 623669 - DNA, 50 bp, Artificial; identical to SEQ ID NO: 216952
  Synthetic oligonucleotide

SEQ ID NO: 623670 - DNA, 54 bp, Artificial; identical to SEQ ID NO: 255168
  Synthetic oligonucleotide

SEQ ID NO: 623671 - DNA, 55 bp, Artificial; identical to SEQ ID NO: 209467
  Synthetic oligonucleotide

SEQ ID NO: 623672 - DNA, 55 bp, Artificial; identical to SEQ ID NO: 196888
  Synthetic oligonucleotide

SEQ ID NO: 623673 - DNA, 59 bp, Artificial; identical to SEQ ID NO: 141406
  Synthetic oligonucleotide

SEQ ID NO: 623674 - DNA, 60 bp, Artificial; identical to SEQ ID NO: 165045
  Synthetic oligonucleotide

SEQ ID NO: 623675 - DNA, 55 bp, Artificial; identical to SEQ ID NO: 255025
  Synthetic oligonucleotide

SEQ ID NO: 623676 - DNA, 57 bp, Artificial; identical to SEQ ID NO: 197148
  Synthetic oligonucleotide

SEQ ID NO: 623677 - DNA, 55 bp, Artificial; identical to SEQ ID NO: 255027
  Synthetic oligonucleotide

SEQ ID NO: 623678 - DNA, 55 bp, Artificial; identical to SEQ ID NO: 242812
  Synthetic oligonucleotide

SEQ ID NO: 623679 - DNA, 59 bp, Artificial; identical to SEQ ID NO: 166058
  Synthetic oligonucleotide

SEQ ID NO: 623680 - DNA, 60 bp, Artificial; identical to SEQ ID NO: 161992
  Synthetic oligonucleotide

SEQ ID NO: 623681 - DNA, 55 bp, Artificial; identical to SEQ ID NO: 207491
  Synthetic oligonucleotide

SEQ ID NO: 623682 - DNA, 55 bp, Artificial; identical to SEQ ID NO: 182809
  Synthetic oligonucleotide

SEQ ID NO: 623683 - DNA, 55 bp, Artificial; identical to SEQ ID NO: 189011
  Synthetic oligonucleotide

SEQ ID NO: 623684 - DNA, 58 bp, Artificial; identical to SEQ ID NO: 238660
  Synthetic oligonucleotide

SEQ ID NO: 623685 - DNA, 53 bp, Artificial; identical to SEQ ID NO: 240830
  Synthetic oligonucleotide

SEQ ID NO: 623686 - DNA, 53 bp, Artificial; identical to SEQ ID NO: 157300
  Synthetic oligonucleotide

SEQ ID NO: 623687 - DNA, 54 bp, Artificial; identical to SEQ ID NO: 185413
  Synthetic oligonucleotide

SEQ ID NO: 623688 - DNA, 55 bp, Artificial; identical to SEQ ID NO: 182815
  Synthetic oligonucleotide

SEQ ID NO: 623689 - DNA, 53 bp, Artificial; identical to SEQ ID NO: 185680
  Synthetic oligonucleotide

SEQ ID NO: 623690 - DNA, 55 bp, Artificial; identical to SEQ ID NO: 156834
  Synthetic oligonucleotide

SEQ ID NO: 623691 - DNA, 57 bp, Artificial; identical to SEQ ID NO: 209187
  Synthetic oligonucleotide

SEQ ID NO: 623692 - DNA, 55 bp, Artificial; identical to SEQ ID NO: 148367
  Synthetic oligonucleotide

SEQ ID NO: 623693 - DNA, 55 bp, Artificial; identical to SEQ ID NO: 242813
  Synthetic oligonucleotide

SEQ ID NO: 623694 - DNA, 55 bp, Artificial; identical to SEQ ID NO: 257141
  Synthetic oligonucleotide

SEQ ID NO: 623695 - DNA, 58 bp, Artificial; identical to SEQ ID NO: 203384
  Synthetic oligonucleotide

SEQ ID NO: 623696 - DNA, 55 bp, Artificial; identical to SEQ ID NO: 212807
  Synthetic oligonucleotide

SEQ ID NO: 623697 - DNA, 54 bp, Artificial; identical to SEQ ID NO: 154283
  Synthetic oligonucleotide

SEQ ID NO: 623698 - DNA, 55 bp, Artificial; identical to SEQ ID NO: 182801
  Synthetic oligonucleotide

SEQ ID NO: 623699 - DNA, 55 bp, Artificial; identical to SEQ ID NO: 182852
  Synthetic oligonucleotide

SEQ ID NO: 623700 - DNA, 58 bp, Artificial; identical to SEQ ID NO: 172780
  Synthetic oligonucleotide

SEQ ID NO: 623701 - DNA, 55 bp, Artificial; identical to SEQ ID NO: 245940
  Synthetic oligonucleotide

SEQ ID NO: 623702 - DNA, 53 bp, Artificial; identical to SEQ ID NO: 246338
  Synthetic oligonucleotide

SEQ ID NO: 623703 - DNA, 58 bp, Artificial; identical to SEQ ID NO: 159531
  Synthetic oligonucleotide

SEQ ID NO: 623704 - DNA, 55 bp, Artificial; identical to SEQ ID NO: 182857
  Synthetic oligonucleotide

SEQ ID NO: 623705 - DNA, 55 bp, Artificial; identical to SEQ ID NO: 182861
  Synthetic oligonucleotide

SEQ ID NO: 623706 - DNA, 55 bp, Artificial; identical to SEQ ID NO: 195182
  Synthetic oligonucleotide

SEQ ID NO: 623707 - DNA, 55 bp, Artificial; identical to SEQ ID NO: 199062
  Synthetic oligonucleotide

SEQ ID NO: 623708 - DNA, 51 bp, Artificial; identical to SEQ ID NO: 174917
  Synthetic oligonucleotide

SEQ ID NO: 623709 - DNA, 55 bp, Artificial; identical to SEQ ID NO: 146278
  Synthetic oligonucleotide

SEQ ID NO: 623710 - DNA, 54 bp, Artificial; identical to SEQ ID NO: 149168
  Synthetic oligonucleotide

SEQ ID NO: 623711 - DNA, 53 bp, Artificial; identical to SEQ ID NO: 240832
  Synthetic oligonucleotide

SEQ ID NO: 623712 - DNA, 52 bp, Artificial; identical to SEQ ID NO: 186273
  Synthetic oligonucleotide

SEQ ID NO: 623713 - DNA, 55 bp, Artificial; identical to SEQ ID NO: 209521
  Synthetic oligonucleotide

SEQ ID NO: 623714 - DNA, 55 bp, Artificial; identical to SEQ ID NO: 156832
  Synthetic oligonucleotide

SEQ ID NO: 623715 - DNA, 55 bp, Artificial; identical to SEQ ID NO: 187792
  Synthetic oligonucleotide

SEQ ID NO: 623716 - DNA, 55 bp, Artificial; identical to SEQ ID NO: 209520
  Synthetic oligonucleotide

SEQ ID NO: 623717 - DNA, 55 bp, Artificial; identical to SEQ ID NO: 191013
  Synthetic oligonucleotide

SEQ ID NO: 623718 - DNA, 55 bp, Artificial; identical to SEQ ID NO: 151704
  Synthetic oligonucleotide

SEQ ID NO: 623719 - DNA, 55 bp, Artificial; identical to SEQ ID NO: 182828
  Synthetic oligonucleotide

SEQ ID NO: 623720 - DNA, 60 bp, Artificial; identical to SEQ ID NO: 242430
  Synthetic oligonucleotide

SEQ ID NO: 623721 - DNA, 60 bp, Artificial; identical to SEQ ID NO: 207633
  Synthetic oligonucleotide

SEQ ID NO: 623722 - DNA, 55 bp, Artificial; identical to SEQ ID NO: 164251
  Synthetic oligonucleotide

SEQ ID NO: 623723 - DNA, 55 bp, Artificial; identical to SEQ ID NO: 245944
  Synthetic oligonucleotide

SEQ ID NO: 623724 - DNA, 54 bp, Artificial; identical to SEQ ID NO: 191892
  Synthetic oligonucleotide

SEQ ID NO: 623725 - DNA, 60 bp, Artificial; identical to SEQ ID NO: 242419
  Synthetic oligonucleotide

SEQ ID NO: 623726 - DNA, 58 bp, Artificial; identical to SEQ ID NO: 201107
  Synthetic oligonucleotide

SEQ ID NO: 623727 - DNA, 55 bp, Artificial; identical to SEQ ID NO: 233582
  Synthetic oligonucleotide

SEQ ID NO: 623728 - DNA, 55 bp, Artificial; identical to SEQ ID NO: 193555
  Synthetic oligonucleotide

SEQ ID NO: 623729 - DNA, 51 bp, Artificial; identical to SEQ ID NO: 243308
  Synthetic oligonucleotide

SEQ ID NO: 623730 - DNA, 55 bp, Artificial; identical to SEQ ID NO: 142378
  Synthetic oligonucleotide

SEQ ID NO: 623731 - DNA, 55 bp, Artificial; identical to SEQ ID NO: 171658
  Synthetic oligonucleotide

SEQ ID NO: 623732 - DNA, 55 bp, Artificial; identical to SEQ ID NO: 242815
  Synthetic oligonucleotide

SEQ ID NO: 623733 - DNA, 55 bp, Artificial; identical to SEQ ID NO: 166953
  Synthetic oligonucleotide

SEQ ID NO: 623734 - DNA, 55 bp, Artificial; identical to SEQ ID NO: 203834
  Synthetic oligonucleotide

SEQ ID NO: 623735 - DNA, 59 bp, Artificial; identical to SEQ ID NO: 179352
  Synthetic oligonucleotide

SEQ ID NO: 623736 - DNA, 52 bp, Artificial; identical to SEQ ID NO: 203948
  Synthetic oligonucleotide

SEQ ID NO: 623737 - DNA, 55 bp, Artificial; identical to SEQ ID NO: 142379
  Synthetic oligonucleotide

SEQ ID NO: 623738 - DNA, 53 bp, Artificial; identical to SEQ ID NO: 185565
  Synthetic oligonucleotide

SEQ ID NO: 623739 - DNA, 55 bp, Artificial; identical to SEQ ID NO: 183063
  Synthetic oligonucleotide

SEQ ID NO: 623740 - DNA, 55 bp, Artificial; identical to SEQ ID NO: 257891
  Synthetic oligonucleotide

SEQ ID NO: 623741 - DNA, 55 bp, Artificial; identical to SEQ ID NO: 233581
  Synthetic oligonucleotide

SEQ ID NO: 623742 - DNA, 55 bp, Artificial; identical to SEQ ID NO: 164248
  Synthetic oligonucleotide

SEQ ID NO: 623743 - DNA, 53 bp, Artificial; identical to SEQ ID NO: 174855
  Synthetic oligonucleotide

SEQ ID NO: 623744 - DNA, 52 bp, Artificial; identical to SEQ ID NO: 190824
  Synthetic oligonucleotide

SEQ ID NO: 623745 - DNA, 55 bp, Artificial; identical to SEQ ID NO: 245901
  Synthetic oligonucleotide

SEQ ID NO: 623746 - DNA, 53 bp, Artificial; identical to SEQ ID NO: 234449
  Synthetic oligonucleotide

SEQ ID NO: 623747 - DNA, 55 bp, Artificial; identical to SEQ ID NO: 146279
  Synthetic oligonucleotide

SEQ ID NO: 623748 - DNA, 55 bp, Artificial; identical to SEQ ID NO: 174493
  Synthetic oligonucleotide

SEQ ID NO: 623749 - DNA, 59 bp, Artificial; identical to SEQ ID NO: 242386
  Synthetic oligonucleotide

SEQ ID NO: 623750 - DNA, 55 bp, Artificial; identical to SEQ ID NO: 191012
  Synthetic oligonucleotide

SEQ ID NO: 623751 - DNA, 55 bp, Artificial; identical to SEQ ID NO: 211231
  Synthetic oligonucleotide

SEQ ID NO: 623752 - DNA, 56 bp, Artificial; identical to SEQ ID NO: 179880
  Synthetic oligonucleotide

SEQ ID NO: 623753 - DNA, 55 bp, Artificial; identical to SEQ ID NO: 156635
  Synthetic oligonucleotide

SEQ ID NO: 623754 - DNA, 55 bp, Artificial; identical to SEQ ID NO: 245905
  Synthetic oligonucleotide

SEQ ID NO: 623755 - DNA, 60 bp, Artificial; identical to SEQ ID NO: 144373
  Synthetic oligonucleotide

SEQ ID NO: 623756 - DNA, 50 bp, Artificial; identical to SEQ ID NO: 196803
  Synthetic oligonucleotide

SEQ ID NO: 623757 - DNA, 51 bp, Artificial; identical to SEQ ID NO: 170162
  Synthetic oligonucleotide

SEQ ID NO: 623758 - DNA, 55 bp, Artificial; identical to SEQ ID NO: 242816
  Synthetic oligonucleotide

SEQ ID NO: 623759 - DNA, 55 bp, Artificial; identical to SEQ ID NO: 257890
  Synthetic oligonucleotide

SEQ ID NO: 623760 - DNA, 60 bp, Artificial; identical to SEQ ID NO: 242364
  Synthetic oligonucleotide

SEQ ID NO: 623761 - DNA, 53 bp, Artificial; identical to SEQ ID NO: 164826
  Synthetic oligonucleotide

SEQ ID NO: 623762 - DNA, 60 bp, Artificial; identical to SEQ ID NO: 211580
  Synthetic oligonucleotide

SEQ ID NO: 623763 - DNA, 56 bp, Artificial; identical to SEQ ID NO: 222902
  Synthetic oligonucleotide

SEQ ID NO: 623764 - DNA, 53 bp, Artificial; identical to SEQ ID NO: 164832
  Synthetic oligonucleotide

SEQ ID NO: 623765 - DNA, 55 bp, Artificial; identical to SEQ ID NO: 153365
  Synthetic oligonucleotide

SEQ ID NO: 623766 - DNA, 55 bp, Artificial; identical to SEQ ID NO: 164246
  Synthetic oligonucleotide

SEQ ID NO: 623767 - DNA, 54 bp, Artificial; identical to SEQ ID NO: 177471
  Synthetic oligonucleotide

SEQ ID NO: 623768 - DNA, 55 bp, Artificial; identical to SEQ ID NO: 183044
  Synthetic oligonucleotide

SEQ ID NO: 623769 - DNA, 54 bp, Artificial; identical to SEQ ID NO: 188814
  Synthetic oligonucleotide

SEQ ID NO: 623770 - DNA, 53 bp, Artificial; identical to SEQ ID NO: 164244
  Synthetic oligonucleotide

SEQ ID NO: 623771 - DNA, 55 bp, Artificial; identical to SEQ ID NO: 161765
  Synthetic oligonucleotide

SEQ ID NO: 623772 - DNA, 59 bp, Artificial; identical to SEQ ID NO: 207005
  Synthetic oligonucleotide

SEQ ID NO: 623773 - DNA, 55 bp, Artificial; identical to SEQ ID NO: 183059
  Synthetic oligonucleotide

SEQ ID NO: 623774 - DNA, 55 bp, Artificial; identical to SEQ ID NO: 151705
  Synthetic oligonucleotide

SEQ ID NO: 623775 - DNA, 59 bp, Artificial; identical to SEQ ID NO: 211569
  Synthetic oligonucleotide

SEQ ID NO: 623776 - DNA, 55 bp, Artificial; identical to SEQ ID NO: 255008
  Synthetic oligonucleotide

SEQ ID NO: 623777 - DNA, 55 bp, Artificial; identical to SEQ ID NO: 146280
  Synthetic oligonucleotide

SEQ ID NO: 623778 - DNA, 55 bp, Artificial; identical to SEQ ID NO: 182973
  Synthetic oligonucleotide

SEQ ID NO: 623779 - DNA, 60 bp, Artificial; identical to SEQ ID NO: 192228
  Synthetic oligonucleotide

SEQ ID NO: 623780 - DNA, 55 bp, Artificial; identical to SEQ ID NO: 233971
  Synthetic oligonucleotide

SEQ ID NO: 623781 - DNA, 55 bp, Artificial; identical to SEQ ID NO: 156633
  Synthetic oligonucleotide

SEQ ID NO: 623782 - DNA, 55 bp, Artificial; identical to SEQ ID NO: 156632
  Synthetic oligonucleotide

SEQ ID NO: 623783 - DNA, 50 bp, Artificial; identical to SEQ ID NO: 200355
  Synthetic oligonucleotide

SEQ ID NO: 623784 - DNA, 55 bp, Artificial; identical to SEQ ID NO: 182952
  Synthetic oligonucleotide

SEQ ID NO: 623785 - DNA, 55 bp, Artificial; identical to SEQ ID NO: 196885
  Synthetic oligonucleotide

SEQ ID NO: 623786 - DNA, 55 bp, Artificial; identical to SEQ ID NO: 255071
  Synthetic oligonucleotide

SEQ ID NO: 623787 - DNA, 59 bp, Artificial; identical to SEQ ID NO: 141417
  Synthetic oligonucleotide

SEQ ID NO: 623788 - DNA, 55 bp, Artificial; identical to SEQ ID NO: 160218
  Synthetic oligonucleotide

SEQ ID NO: 623789 - DNA, 55 bp, Artificial; identical to SEQ ID NO: 201628
  Synthetic oligonucleotide

SEQ ID NO: 623790 - DNA, 55 bp, Artificial; identical to SEQ ID NO: 234819
  Synthetic oligonucleotide

SEQ ID NO: 623791 - DNA, 55 bp, Artificial; identical to SEQ ID NO: 182992
  Synthetic oligonucleotide

SEQ ID NO: 623792 - DNA, 55 bp, Artificial; identical to SEQ ID NO: 209518
  Synthetic oligonucleotide

SEQ ID NO: 623793 - DNA, 58 bp, Artificial; identical to SEQ ID NO: 157976
  Synthetic oligonucleotide

SEQ ID NO: 623794 - DNA, 55 bp, Artificial; identical to SEQ ID NO: 169169
  Synthetic oligonucleotide

SEQ ID NO: 623795 - DNA, 55 bp, Artificial; identical to SEQ ID NO: 148330
  Synthetic oligonucleotide

SEQ ID NO: 623796 - DNA, 51 bp, Artificial; identical to SEQ ID NO: 213038
  Synthetic oligonucleotide

SEQ ID NO: 623797 - DNA, 53 bp, Artificial; identical to SEQ ID NO: 189112
  Synthetic oligonucleotide

SEQ ID NO: 623798 - DNA, 56 bp, Artificial; identical to SEQ ID NO: 258041
  Synthetic oligonucleotide

SEQ ID NO: 623799 - DNA, 55 bp, Artificial; identical to SEQ ID NO: 148335
  Synthetic oligonucleotide

SEQ ID NO: 623800 - DNA, 55 bp, Artificial; identical to SEQ ID NO: 142380
  Synthetic oligonucleotide

SEQ ID NO: 623801 - DNA, 55 bp, Artificial; identical to SEQ ID NO: 171613
  Synthetic oligonucleotide

SEQ ID NO: 623802 - DNA, 55 bp, Artificial; identical to SEQ ID NO: 191011
  Synthetic oligonucleotide

SEQ ID NO: 623803 - DNA, 55 bp, Artificial; identical to SEQ ID NO: 205281
  Synthetic oligonucleotide

SEQ ID NO: 623804 - DNA, 55 bp, Artificial; identical to SEQ ID NO: 240042
  Synthetic oligonucleotide

SEQ ID NO: 623805 - DNA, 51 bp, Artificial; identical to SEQ ID NO: 260245
  Synthetic oligonucleotide

SEQ ID NO: 623806 - DNA, 50 bp, Artificial; identical to SEQ ID NO: 170501
  Synthetic oligonucleotide

SEQ ID NO: 623807 - DNA, 55 bp, Artificial; identical to SEQ ID NO: 155382
  Synthetic oligonucleotide

SEQ ID NO: 623808 - DNA, 60 bp, Artificial; identical to SEQ ID NO: 243041
  Synthetic oligonucleotide

SEQ ID NO: 623809 - DNA, 55 bp, Artificial; identical to SEQ ID NO: 212806
  Synthetic oligonucleotide

SEQ ID NO: 623810 - DNA, 55 bp, Artificial; identical to SEQ ID NO: 156626
  Synthetic oligonucleotide

SEQ ID NO: 623811 - DNA, 55 bp, Artificial; identical to SEQ ID NO: 255082
  Synthetic oligonucleotide

SEQ ID NO: 623812 - DNA, 54 bp, Artificial; identical to SEQ ID NO: 156625
  Synthetic oligonucleotide

SEQ ID NO: 623813 - DNA, 55 bp, Artificial; identical to SEQ ID NO: 161764
  Synthetic oligonucleotide

SEQ ID NO: 623814 - DNA, 55 bp, Artificial; identical to SEQ ID NO: 160775
  Synthetic oligonucleotide

SEQ ID NO: 623815 - DNA, 55 bp, Artificial; identical to SEQ ID NO: 249496
  Synthetic oligonucleotide

SEQ ID NO: 623816 - DNA, 55 bp, Artificial; identical to SEQ ID NO: 182988
  Synthetic oligonucleotide

SEQ ID NO: 623817 - DNA, 55 bp, Artificial; identical to SEQ ID NO: 234808
  Synthetic oligonucleotide

SEQ ID NO: 623818 - DNA, 56 bp, Artificial; identical to SEQ ID NO: 248415
  Synthetic oligonucleotide

SEQ ID NO: 623819 - DNA, 54 bp, Artificial; identical to SEQ ID NO: 157269
  Synthetic oligonucleotide

SEQ ID NO: 623820 - DNA, 55 bp, Artificial; identical to SEQ ID NO: 255085
  Synthetic oligonucleotide

SEQ ID NO: 623821 - DNA, 56 bp, Artificial; identical to SEQ ID NO: 237170
  Synthetic oligonucleotide

SEQ ID NO: 623822 - DNA, 50 bp, Artificial; identical to SEQ ID NO: 176741
  Synthetic oligonucleotide

SEQ ID NO: 623823 - DNA, 60 bp, Artificial; identical to SEQ ID NO: 141428
  Synthetic oligonucleotide

SEQ ID NO: 623824 - DNA, 55 bp, Artificial; identical to SEQ ID NO: 221161
  Synthetic oligonucleotide

SEQ ID NO: 623825 - DNA, 55 bp, Artificial; identical to SEQ ID NO: 153364
  Synthetic oligonucleotide

SEQ ID NO: 623826 - DNA, 55 bp, Artificial; identical to SEQ ID NO: 183737
  Synthetic oligonucleotide

SEQ ID NO: 623827 - DNA, 55 bp, Artificial; identical to SEQ ID NO: 212805
  Synthetic oligonucleotide

SEQ ID NO: 623828 - DNA, 55 bp, Artificial; identical to SEQ ID NO: 205280
  Synthetic oligonucleotide

SEQ ID NO: 623829 - DNA, 55 bp, Artificial; identical to SEQ ID NO: 155381
  Synthetic oligonucleotide

SEQ ID NO: 623830 - DNA, 55 bp, Artificial; identical to SEQ ID NO: 162185
  Synthetic oligonucleotide

SEQ ID NO: 623831 - DNA, 55 bp, Artificial; identical to SEQ ID NO: 193554
  Synthetic oligonucleotide

SEQ ID NO: 623832 - DNA, 55 bp, Artificial; identical to SEQ ID NO: 187795
  Synthetic oligonucleotide

SEQ ID NO: 623833 - DNA, 55 bp, Artificial; identical to SEQ ID NO: 155380
  Synthetic oligonucleotide

SEQ ID NO: 623834 - DNA, 55 bp, Artificial; identical to SEQ ID NO: 255043
  Synthetic oligonucleotide

SEQ ID NO: 623835 - DNA, 55 bp, Artificial; identical to SEQ ID NO: 164241
  Synthetic oligonucleotide

SEQ ID NO: 623836 - DNA, 60 bp, Artificial; identical to SEQ ID NO: 205908
  Synthetic oligonucleotide

SEQ ID NO: 623837 - DNA, 55 bp, Artificial; identical to SEQ ID NO: 164240
  Synthetic oligonucleotide

SEQ ID NO: 623838 - DNA, 55 bp, Artificial; identical to SEQ ID NO: 144917
  Synthetic oligonucleotide

SEQ ID NO: 623839 - DNA, 55 bp, Artificial; identical to SEQ ID NO: 189021
  Synthetic oligonucleotide

SEQ ID NO: 623840 - DNA, 55 bp, Artificial; identical to SEQ ID NO: 155477
  Synthetic oligonucleotide

SEQ ID NO: 623841 - DNA, 52 bp, Artificial; identical to SEQ ID NO: 247965
  Synthetic oligonucleotide

SEQ ID NO: 623842 - DNA, 55 bp, Artificial; identical to SEQ ID NO: 215540
  Synthetic oligonucleotide

SEQ ID NO: 623843 - DNA, 55 bp, Artificial; identical to SEQ ID NO: 238493
  Synthetic oligonucleotide

SEQ ID NO: 623844 - DNA, 55 bp, Artificial; identical to SEQ ID NO: 171616
  Synthetic oligonucleotide

SEQ ID NO: 623845 - DNA, 55 bp, Artificial; identical to SEQ ID NO: 238494
  Synthetic oligonucleotide

SEQ ID NO: 623846 - DNA, 57 bp, Artificial; identical to SEQ ID NO: 154041
  Synthetic oligonucleotide

SEQ ID NO: 623847 - DNA, 55 bp, Artificial; identical to SEQ ID NO: 164355
  Synthetic oligonucleotide

SEQ ID NO: 623848 - DNA, 55 bp, Artificial; identical to SEQ ID NO: 254580
  Synthetic oligonucleotide

SEQ ID NO: 623849 - DNA, 55 bp, Artificial; identical to SEQ ID NO: 151946
  Synthetic oligonucleotide

SEQ ID NO: 623850 - DNA, 55 bp, Artificial; identical to SEQ ID NO: 245922
  Synthetic oligonucleotide

SEQ ID NO: 623851 - DNA, 55 bp, Artificial; identical to SEQ ID NO: 212804
  Synthetic oligonucleotide

SEQ ID NO: 623852 - DNA, 55 bp, Artificial; identical to SEQ ID NO: 190481
  Synthetic oligonucleotide

SEQ ID NO: 623853 - DNA, 57 bp, Artificial; identical to SEQ ID NO: 201058
  Synthetic oligonucleotide

SEQ ID NO: 623854 - DNA, 55 bp, Artificial; identical to SEQ ID NO: 183785
  Synthetic oligonucleotide

SEQ ID NO: 623855 - DNA, 55 bp, Artificial; identical to SEQ ID NO: 199057
  Synthetic oligonucleotide

SEQ ID NO: 623856 - DNA, 60 bp, Artificial; identical to SEQ ID NO: 224141
  Synthetic oligonucleotide

SEQ ID NO: 623857 - DNA, 55 bp, Artificial; identical to SEQ ID NO: 183789
  Synthetic oligonucleotide

SEQ ID NO: 623858 - DNA, 55 bp, Artificial; identical to SEQ ID NO: 223458
  Synthetic oligonucleotide

SEQ ID NO: 623859 - DNA, 56 bp, Artificial; identical to SEQ ID NO: 179995
  Synthetic oligonucleotide

SEQ ID NO: 623860 - DNA, 50 bp, Artificial; identical to SEQ ID NO: 177567
  Synthetic oligonucleotide

SEQ ID NO: 623861 - DNA, 54 bp, Artificial; identical to SEQ ID NO: 188326
  Synthetic oligonucleotide

SEQ ID NO: 623862 - DNA, 55 bp, Artificial; identical to SEQ ID NO: 199055
  Synthetic oligonucleotide

SEQ ID NO: 623863 - DNA, 55 bp, Artificial; identical to SEQ ID NO: 207497
  Synthetic oligonucleotide

SEQ ID NO: 623864 - DNA, 50 bp, Artificial; identical to SEQ ID NO: 241617
  Synthetic oligonucleotide

SEQ ID NO: 623865 - DNA, 55 bp, Artificial; identical to SEQ ID NO: 245301
  Synthetic oligonucleotide

SEQ ID NO: 623866 - DNA, 55 bp, Artificial; identical to SEQ ID NO: 183770
  Synthetic oligonucleotide

SEQ ID NO: 623867 - DNA, 56 bp, Artificial; identical to SEQ ID NO: 242319
  Synthetic oligonucleotide

SEQ ID NO: 623868 - DNA, 59 bp, Artificial; identical to SEQ ID NO: 165123
  Synthetic oligonucleotide

SEQ ID NO: 623869 - DNA, 57 bp, Artificial; identical to SEQ ID NO: 159959
  Synthetic oligonucleotide

SEQ ID NO: 623870 - DNA, 54 bp, Artificial; identical to SEQ ID NO: 243124
  Synthetic oligonucleotide

SEQ ID NO: 623871 - DNA, 55 bp, Artificial; identical to SEQ ID NO: 148345
  Synthetic oligonucleotide

SEQ ID NO: 623872 - DNA, 55 bp, Artificial; identical to SEQ ID NO: 213302
  Synthetic oligonucleotide

SEQ ID NO: 623873 - DNA, 55 bp, Artificial; identical to SEQ ID NO: 171620
  Synthetic oligonucleotide

SEQ ID NO: 623874 - DNA, 60 bp, Artificial; identical to SEQ ID NO: 258903
  Synthetic oligonucleotide

SEQ ID NO: 623875 - DNA, 59 bp, Artificial; identical to SEQ ID NO: 198859
  Synthetic oligonucleotide

SEQ ID NO: 623876 - DNA, 60 bp, Artificial; identical to SEQ ID NO: 246020
  Synthetic oligonucleotide

SEQ ID NO: 623877 - DNA, 55 bp, Artificial; identical to SEQ ID NO: 191048
  Synthetic oligonucleotide

SEQ ID NO: 623878 - DNA, 55 bp, Artificial; identical to SEQ ID NO: 199054
  Synthetic oligonucleotide

SEQ ID NO: 623879 - DNA, 57 bp, Artificial; identical to SEQ ID NO: 242297
  Synthetic oligonucleotide

SEQ ID NO: 623880 - DNA, 60 bp, Artificial; identical to SEQ ID NO: 203558
  Synthetic oligonucleotide

SEQ ID NO: 623881 - DNA, 55 bp, Artificial; identical to SEQ ID NO: 220587
  Synthetic oligonucleotide

SEQ ID NO: 623882 - DNA, 53 bp, Artificial; identical to SEQ ID NO: 212964
  Synthetic oligonucleotide

SEQ ID NO: 623883 - DNA, 55 bp, Artificial; identical to SEQ ID NO: 199053
  Synthetic oligonucleotide

SEQ ID NO: 623884 - DNA, 55 bp, Artificial; identical to SEQ ID NO: 242758
  Synthetic oligonucleotide

SEQ ID NO: 623885 - DNA, 55 bp, Artificial; identical to SEQ ID NO: 191047
  Synthetic oligonucleotide

SEQ ID NO: 623886 - DNA, 60 bp, Artificial; identical to SEQ ID NO: 187595
  Synthetic oligonucleotide

SEQ ID NO: 623887 - DNA, 55 bp, Artificial; identical to SEQ ID NO: 194798
  Synthetic oligonucleotide

SEQ ID NO: 623888 - DNA, 55 bp, Artificial; identical to SEQ ID NO: 164353
  Synthetic oligonucleotide

SEQ ID NO: 623889 - DNA, 55 bp, Artificial; identical to SEQ ID NO: 217818
  Synthetic oligonucleotide

SEQ ID NO: 623890 - DNA, 60 bp, Artificial; identical to SEQ ID NO: 192229
  Synthetic oligonucleotide

SEQ ID NO: 623891 - DNA, 53 bp, Artificial; identical to SEQ ID NO: 188036
  Synthetic oligonucleotide

SEQ ID NO: 623892 - DNA, 53 bp, Artificial; identical to SEQ ID NO: 143812
  Synthetic oligonucleotide

SEQ ID NO: 623893 - DNA, 50 bp, Artificial; identical to SEQ ID NO: 210419
  Synthetic oligonucleotide

SEQ ID NO: 623894 - DNA, 56 bp, Artificial; identical to SEQ ID NO: 239486
  Synthetic oligonucleotide

SEQ ID NO: 623895 - DNA, 55 bp, Artificial; identical to SEQ ID NO: 215537
  Synthetic oligonucleotide

SEQ ID NO: 623896 - DNA, 55 bp, Artificial; identical to SEQ ID NO: 233578
  Synthetic oligonucleotide

SEQ ID NO: 623897 - DNA, 55 bp, Artificial; identical to SEQ ID NO: 191891
  Synthetic oligonucleotide

SEQ ID NO: 623898 - DNA, 55 bp, Artificial; identical to SEQ ID NO: 148645
  Synthetic oligonucleotide

SEQ ID NO: 623899 - DNA, 55 bp, Artificial; identical to SEQ ID NO: 196879
  Synthetic oligonucleotide

SEQ ID NO: 623900 - DNA, 55 bp, Artificial; identical to SEQ ID NO: 164351
  Synthetic oligonucleotide

SEQ ID NO: 623901 - DNA, 57 bp, Artificial; identical to SEQ ID NO: 243052
  Synthetic oligonucleotide

SEQ ID NO: 623902 - DNA, 54 bp, Artificial; identical to SEQ ID NO: 141188
  Synthetic oligonucleotide

SEQ ID NO: 623903 - DNA, 52 bp, Artificial; identical to SEQ ID NO: 160509
  Synthetic oligonucleotide

SEQ ID NO: 623904 - DNA, 52 bp, Artificial; identical to SEQ ID NO: 190482
  Synthetic oligonucleotide

SEQ ID NO: 623905 - DNA, 52 bp, Artificial; identical to SEQ ID NO: 261596
  Synthetic oligonucleotide

SEQ ID NO: 623906 - DNA, 55 bp, Artificial; identical to SEQ ID NO: 148648
  Synthetic oligonucleotide

SEQ ID NO: 623907 - DNA, 55 bp, Artificial; identical to SEQ ID NO: 151970
  Synthetic oligonucleotide

SEQ ID NO: 623908 - DNA, 51 bp, Artificial; identical to SEQ ID NO: 206533
  Synthetic oligonucleotide

SEQ ID NO: 623909 - DNA, 55 bp, Artificial; identical to SEQ ID NO: 164349
  Synthetic oligonucleotide

SEQ ID NO: 623910 - DNA, 59 bp, Artificial; identical to SEQ ID NO: 147460
  Synthetic oligonucleotide

SEQ ID NO: 623911 - DNA, 55 bp, Artificial; identical to SEQ ID NO: 205274
  Synthetic oligonucleotide

SEQ ID NO: 623912 - DNA, 55 bp, Artificial; identical to SEQ ID NO: 183706
  Synthetic oligonucleotide

SEQ ID NO: 623913 - DNA, 55 bp, Artificial; identical to SEQ ID NO: 164348
  Synthetic oligonucleotide

SEQ ID NO: 623914 - DNA, 55 bp, Artificial; identical to SEQ ID NO: 164347
  Synthetic oligonucleotide

SEQ ID NO: 623915 - DNA, 56 bp, Artificial; identical to SEQ ID NO: 177582
  Synthetic oligonucleotide

SEQ ID NO: 623916 - DNA, 56 bp, Artificial; identical to SEQ ID NO: 212539
  Synthetic oligonucleotide

SEQ ID NO: 623917 - DNA, 55 bp, Artificial; identical to SEQ ID NO: 154220
  Synthetic oligonucleotide

SEQ ID NO: 623918 - DNA, 55 bp, Artificial; identical to SEQ ID NO: 189026
  Synthetic oligonucleotide

SEQ ID NO: 623919 - DNA, 53 bp, Artificial; identical to SEQ ID NO: 153583
  Synthetic oligonucleotide

SEQ ID NO: 623920 - DNA, 55 bp, Artificial; identical to SEQ ID NO: 148602
  Synthetic oligonucleotide

SEQ ID NO: 623921 - DNA, 55 bp, Artificial; identical to SEQ ID NO: 144438
  Synthetic oligonucleotide

SEQ ID NO: 623922 - DNA, 55 bp, Artificial; identical to SEQ ID NO: 188325
  Synthetic oligonucleotide

SEQ ID NO: 623923 - DNA, 52 bp, Artificial; identical to SEQ ID NO: 165110
  Synthetic oligonucleotide

SEQ ID NO: 623924 - DNA, 55 bp, Artificial; identical to SEQ ID NO: 183707
  Synthetic oligonucleotide

SEQ ID NO: 623925 - DNA, 55 bp, Artificial; identical to SEQ ID NO: 156651
  Synthetic oligonucleotide

SEQ ID NO: 623926 - DNA, 55 bp, Artificial; identical to SEQ ID NO: 202220
  Synthetic oligonucleotide

SEQ ID NO: 623927 - DNA, 59 bp, Artificial; identical to SEQ ID NO: 242275
  Synthetic oligonucleotide

SEQ ID NO: 623928 - DNA, 53 bp, Artificial; identical to SEQ ID NO: 160216
  Synthetic oligonucleotide

SEQ ID NO: 623929 - DNA, 55 bp, Artificial; identical to SEQ ID NO: 242761
  Synthetic oligonucleotide

SEQ ID NO: 623930 - DNA, 55 bp, Artificial; identical to SEQ ID NO: 265702
  Synthetic oligonucleotide

SEQ ID NO: 623931 - DNA, 55 bp, Artificial; identical to SEQ ID NO: 183702
  Synthetic oligonucleotide

SEQ ID NO: 623932 - DNA, 55 bp, Artificial; identical to SEQ ID NO: 189027
  Synthetic oligonucleotide

SEQ ID NO: 623933 - DNA, 51 bp, Artificial; identical to SEQ ID NO: 192161
  Synthetic oligonucleotide

SEQ ID NO: 623934 - DNA, 55 bp, Artificial; identical to SEQ ID NO: 217819
  Synthetic oligonucleotide

SEQ ID NO: 623935 - DNA, 50 bp, Artificial; identical to SEQ ID NO: 169469
  Synthetic oligonucleotide

SEQ ID NO: 623936 - DNA, 55 bp, Artificial; identical to SEQ ID NO: 146282
  Synthetic oligonucleotide

SEQ ID NO: 623937 - DNA, 55 bp, Artificial; identical to SEQ ID NO: 183695
  Synthetic oligonucleotide

SEQ ID NO: 623938 - DNA, 55 bp, Artificial; identical to SEQ ID NO: 144916
  Synthetic oligonucleotide

SEQ ID NO: 623939 - DNA, 60 bp, Artificial; identical to SEQ ID NO: 177532
  Synthetic oligonucleotide

SEQ ID NO: 623940 - DNA, 50 bp, Artificial; identical to SEQ ID NO: 246862
  Synthetic oligonucleotide

SEQ ID NO: 623941 - DNA, 57 bp, Artificial; identical to SEQ ID NO: 209190
  Synthetic oligonucleotide

SEQ ID NO: 623942 - DNA, 55 bp, Artificial; identical to SEQ ID NO: 169170
  Synthetic oligonucleotide

SEQ ID NO: 623943 - DNA, 55 bp, Artificial; identical to SEQ ID NO: 220565
  Synthetic oligonucleotide

SEQ ID NO: 623944 - DNA, 59 bp, Artificial; identical to SEQ ID NO: 159927
  Synthetic oligonucleotide

SEQ ID NO: 623945 - DNA, 54 bp, Artificial; identical to SEQ ID NO: 160393
  Synthetic oligonucleotide

SEQ ID NO: 623946 - DNA, 55 bp, Artificial; identical to SEQ ID NO: 217646
  Synthetic oligonucleotide

SEQ ID NO: 623947 - DNA, 55 bp, Artificial; identical to SEQ ID NO: 164346
  Synthetic oligonucleotide

SEQ ID NO: 623948 - DNA, 55 bp, Artificial; identical to SEQ ID NO: 154097
  Synthetic oligonucleotide

SEQ ID NO: 623949 - DNA, 55 bp, Artificial; identical to SEQ ID NO: 183895
  Synthetic oligonucleotide

SEQ ID NO: 623950 - DNA, 55 bp, Artificial; identical to SEQ ID NO: 191043
  Synthetic oligonucleotide

SEQ ID NO: 623951 - DNA, 50 bp, Artificial; identical to SEQ ID NO: 177032
  Synthetic oligonucleotide

SEQ ID NO: 623952 - DNA, 55 bp, Artificial; identical to SEQ ID NO: 261867
  Synthetic oligonucleotide

SEQ ID NO: 623953 - DNA, 55 bp, Artificial; identical to SEQ ID NO: 254564
  Synthetic oligonucleotide

SEQ ID NO: 623954 - DNA, 54 bp, Artificial; identical to SEQ ID NO: 164791
  Synthetic oligonucleotide

SEQ ID NO: 623955 - DNA, 55 bp, Artificial; identical to SEQ ID NO: 183865
  Synthetic oligonucleotide

SEQ ID NO: 623956 - DNA, 50 bp, Artificial; identical to SEQ ID NO: 253445
  Synthetic oligonucleotide

SEQ ID NO: 623957 - DNA, 55 bp, Artificial; identical to SEQ ID NO: 142382
  Synthetic oligonucleotide

SEQ ID NO: 623958 - DNA, 55 bp, Artificial; identical to SEQ ID NO: 183923
  Synthetic oligonucleotide

SEQ ID NO: 623959 - DNA, 53 bp, Artificial; identical to SEQ ID NO: 160420
  Synthetic oligonucleotide

SEQ ID NO: 623960 - DNA, 60 bp, Artificial; identical to SEQ ID NO: 237192
  Synthetic oligonucleotide

SEQ ID NO: 623961 - DNA, 55 bp, Artificial; identical to SEQ ID NO: 164343
  Synthetic oligonucleotide

SEQ ID NO: 623962 - DNA, 55 bp, Artificial; identical to SEQ ID NO: 242762
  Synthetic oligonucleotide

SEQ ID NO: 623963 - DNA, 54 bp, Artificial; identical to SEQ ID NO: 223488
  Synthetic oligonucleotide

SEQ ID NO: 623964 - DNA, 55 bp, Artificial; identical to SEQ ID NO: 238501
  Synthetic oligonucleotide

SEQ ID NO: 623965 - DNA, 55 bp, Artificial; identical to SEQ ID NO: 183924
  Synthetic oligonucleotide

SEQ ID NO: 623966 - DNA, 55 bp, Artificial; identical to SEQ ID NO: 183928
  Synthetic oligonucleotide

SEQ ID NO: 623967 - DNA, 55 bp, Artificial; identical to SEQ ID NO: 183931
  Synthetic oligonucleotide

SEQ ID NO: 623968 - DNA, 51 bp, Artificial; identical to SEQ ID NO: 203988
  Synthetic oligonucleotide

SEQ ID NO: 623969 - DNA, 52 bp, Artificial; identical to SEQ ID NO: 202219
  Synthetic oligonucleotide

SEQ ID NO: 623970 - DNA, 55 bp, Artificial; identical to SEQ ID NO: 212801
  Synthetic oligonucleotide

SEQ ID NO: 623971 - DNA, 55 bp, Artificial; identical to SEQ ID NO: 142383
  Synthetic oligonucleotide

SEQ ID NO: 623972 - DNA, 55 bp, Artificial; identical to SEQ ID NO: 160215
  Synthetic oligonucleotide

SEQ ID NO: 623973 - DNA, 52 bp, Artificial; identical to SEQ ID NO: 152074
  Synthetic oligonucleotide

SEQ ID NO: 623974 - DNA, 55 bp, Artificial; identical to SEQ ID NO: 223411
  Synthetic oligonucleotide

SEQ ID NO: 623975 - DNA, 60 bp, Artificial; identical to SEQ ID NO: 217635
  Synthetic oligonucleotide

SEQ ID NO: 623976 - DNA, 55 bp, Artificial; identical to SEQ ID NO: 220876
  Synthetic oligonucleotide

SEQ ID NO: 623977 - DNA, 55 bp, Artificial; identical to SEQ ID NO: 183918
  Synthetic oligonucleotide

SEQ ID NO: 623978 - DNA, 58 bp, Artificial; identical to SEQ ID NO: 247506
  Synthetic oligonucleotide

SEQ ID NO: 623979 - DNA, 56 bp, Artificial; identical to SEQ ID NO: 207080
  Synthetic oligonucleotide

SEQ ID NO: 623980 - DNA, 60 bp, Artificial; identical to SEQ ID NO: 224207
  Synthetic oligonucleotide

SEQ ID NO: 623981 - DNA, 51 bp, Artificial; identical to SEQ ID NO: 186668
  Synthetic oligonucleotide

SEQ ID NO: 623982 - DNA, 53 bp, Artificial; identical to SEQ ID NO: 233982
  Synthetic oligonucleotide

SEQ ID NO: 623983 - DNA, 51 bp, Artificial; identical to SEQ ID NO: 186669
  Synthetic oligonucleotide

SEQ ID NO: 623984 - DNA, 55 bp, Artificial; identical to SEQ ID NO: 148607
  Synthetic oligonucleotide

SEQ ID NO: 623985 - DNA, 57 bp, Artificial; identical to SEQ ID NO: 213291
  Synthetic oligonucleotide

SEQ ID NO: 623986 - DNA, 55 bp, Artificial; identical to SEQ ID NO: 173632
  Synthetic oligonucleotide

SEQ ID NO: 623987 - DNA, 56 bp, Artificial; identical to SEQ ID NO: 168196
  Synthetic oligonucleotide

SEQ ID NO: 623988 - DNA, 55 bp, Artificial; identical to SEQ ID NO: 205316
  Synthetic oligonucleotide

SEQ ID NO: 623989 - DNA, 55 bp, Artificial; identical to SEQ ID NO: 156647
  Synthetic oligonucleotide

SEQ ID NO: 623990 - DNA, 55 bp, Artificial; identical to SEQ ID NO: 254568
  Synthetic oligonucleotide

SEQ ID NO: 623991 - DNA, 55 bp, Artificial; identical to SEQ ID NO: 234753
  Synthetic oligonucleotide

SEQ ID NO: 623992 - DNA, 55 bp, Artificial; identical to SEQ ID NO: 168796
  Synthetic oligonucleotide

SEQ ID NO: 623993 - DNA, 55 bp, Artificial; identical to SEQ ID NO: 174489
  Synthetic oligonucleotide

SEQ ID NO: 623994 - DNA, 60 bp, Artificial; identical to SEQ ID NO: 146994
  Synthetic oligonucleotide

SEQ ID NO: 623995 - DNA, 55 bp, Artificial; identical to SEQ ID NO: 257944
  Synthetic oligonucleotide

SEQ ID NO: 623996 - DNA, 55 bp, Artificial; identical to SEQ ID NO: 254570
  Synthetic oligonucleotide

SEQ ID NO: 623997 - DNA, 50 bp, Artificial; identical to SEQ ID NO: 219612
  Synthetic oligonucleotide

SEQ ID NO: 623998 - DNA, 58 bp, Artificial; identical to SEQ ID NO: 152891
  Synthetic oligonucleotide

SEQ ID NO: 623999 - DNA, 55 bp, Artificial; identical to SEQ ID NO: 196876
  Synthetic oligonucleotide

SEQ ID NO: 624000 - DNA, 55 bp, Artificial; identical to SEQ ID NO: 205315
  Synthetic oligonucleotide

SEQ ID NO: 624001 - DNA, 55 bp, Artificial; identical to SEQ ID NO: 183862
  Synthetic oligonucleotide

SEQ ID NO: 624002 - DNA, 54 bp, Artificial; identical to SEQ ID NO: 240596
  Synthetic oligonucleotide

SEQ ID NO: 624003 - DNA, 57 bp, Artificial; identical to SEQ ID NO: 186449
  Synthetic oligonucleotide

SEQ ID NO: 624004 - DNA, 56 bp, Artificial; identical to SEQ ID NO: 144345
  Synthetic oligonucleotide

SEQ ID NO: 624005 - DNA, 55 bp, Artificial; identical to SEQ ID NO: 154219
  Synthetic oligonucleotide

SEQ ID NO: 624006 - DNA, 55 bp, Artificial; identical to SEQ ID NO: 240090
  Synthetic oligonucleotide

SEQ ID NO: 624007 - DNA, 55 bp, Artificial; identical to SEQ ID NO: 238502
  Synthetic oligonucleotide

SEQ ID NO: 624008 - DNA, 54 bp, Artificial; identical to SEQ ID NO: 185335
  Synthetic oligonucleotide

SEQ ID NO: 624009 - DNA, 55 bp, Artificial; identical to SEQ ID NO: 171623
  Synthetic oligonucleotide

SEQ ID NO: 624010 - DNA, 57 bp, Artificial; identical to SEQ ID NO: 255445
  Synthetic oligonucleotide

SEQ ID NO: 624011 - DNA, 55 bp, Artificial; identical to SEQ ID NO: 242764
  Synthetic oligonucleotide

SEQ ID NO: 624012 - DNA, 50 bp, Artificial; identical to SEQ ID NO: 176230
  Synthetic oligonucleotide

SEQ ID NO: 624013 - DNA, 54 bp, Artificial; identical to SEQ ID NO: 265958
  Synthetic oligonucleotide

SEQ ID NO: 624014 - DNA, 55 bp, Artificial; identical to SEQ ID NO: 190484
  Synthetic oligonucleotide

SEQ ID NO: 624015 - DNA, 60 bp, Artificial; identical to SEQ ID NO: 186560
  Synthetic oligonucleotide

SEQ ID NO: 624016 - DNA, 60 bp, Artificial; identical to SEQ ID NO: 186571
  Synthetic oligonucleotide

SEQ ID NO: 624017 - DNA, 50 bp, Artificial; identical to SEQ ID NO: 256219
  Synthetic oligonucleotide

SEQ ID NO: 624018 - DNA, 60 bp, Artificial; identical to SEQ ID NO: 266062
  Synthetic oligonucleotide

SEQ ID NO: 624019 - DNA, 49 bp, Artificial; identical to SEQ ID NO: 262722
  Synthetic oligonucleotide

SEQ ID NO: 624020 - DNA, 55 bp, Artificial; identical to SEQ ID NO: 186593
  Synthetic oligonucleotide

SEQ ID NO: 624021 - DNA, 55 bp, Artificial; identical to SEQ ID NO: 225053
  Synthetic oligonucleotide

SEQ ID NO: 624022 - DNA, 51 bp, Artificial; identical to SEQ ID NO: 157843
  Synthetic oligonucleotide

SEQ ID NO: 624023 - DNA, 54 bp, Artificial; identical to SEQ ID NO: 190680
  Synthetic oligonucleotide

SEQ ID NO: 624024 - DNA, 57 bp, Artificial; identical to SEQ ID NO: 164612
  Synthetic oligonucleotide

SEQ ID NO: 624025 - DNA, 53 bp, Artificial; identical to SEQ ID NO: 258125
  Synthetic oligonucleotide

SEQ ID NO: 624026 - DNA, 60 bp, Artificial; identical to SEQ ID NO: 142664
  Synthetic oligonucleotide

SEQ ID NO: 624027 - DNA, 55 bp, Artificial; identical to SEQ ID NO: 142579
  Synthetic oligonucleotide

SEQ ID NO: 624028 - DNA, 52 bp, Artificial; identical to SEQ ID NO: 157528
  Synthetic oligonucleotide

SEQ ID NO: 624029 - DNA, 55 bp, Artificial; identical to SEQ ID NO: 153361
  Synthetic oligonucleotide

SEQ ID NO: 624030 - DNA, 55 bp, Artificial; identical to SEQ ID NO: 190486
  Synthetic oligonucleotide

SEQ ID NO: 624031 - DNA, 60 bp, Artificial; identical to SEQ ID NO: 224210
  Synthetic oligonucleotide

SEQ ID NO: 624032 - DNA, 55 bp, Artificial; identical to SEQ ID NO: 211285
  Synthetic oligonucleotide

SEQ ID NO: 624033 - DNA, 57 bp, Artificial; identical to SEQ ID NO: 198848
  Synthetic oligonucleotide

SEQ ID NO: 624034 - DNA, 60 bp, Artificial; identical to SEQ ID NO: 146983
  Synthetic oligonucleotide

SEQ ID NO: 624035 - DNA, 55 bp, Artificial; identical to SEQ ID NO: 221166
  Synthetic oligonucleotide

SEQ ID NO: 624036 - DNA, 58 bp, Artificial; identical to SEQ ID NO: 174857
  Synthetic oligonucleotide

SEQ ID NO: 624037 - DNA, 52 bp, Artificial; identical to SEQ ID NO: 243256
  Synthetic oligonucleotide

SEQ ID NO: 624038 - DNA, 52 bp, Artificial; identical to SEQ ID NO: 216717
  Synthetic oligonucleotide

SEQ ID NO: 624039 - DNA, 55 bp, Artificial; identical to SEQ ID NO: 183475
  Synthetic oligonucleotide

SEQ ID NO: 624040 - DNA, 52 bp, Artificial; identical to SEQ ID NO: 190836
  Synthetic oligonucleotide

SEQ ID NO: 624041 - DNA, 58 bp, Artificial; identical to SEQ ID NO: 179424
  Synthetic oligonucleotide

SEQ ID NO: 624042 - DNA, 60 bp, Artificial; identical to SEQ ID NO: 247521
  Synthetic oligonucleotide

SEQ ID NO: 624043 - DNA, 50 bp, Artificial; identical to SEQ ID NO: 152907
  Synthetic oligonucleotide

SEQ ID NO: 624044 - DNA, 56 bp, Artificial; identical to SEQ ID NO: 221533
  Synthetic oligonucleotide

SEQ ID NO: 624045 - DNA, 55 bp, Artificial; identical to SEQ ID NO: 169859
  Synthetic oligonucleotide

SEQ ID NO: 624046 - DNA, 55 bp, Artificial; identical to SEQ ID NO: 199233
  Synthetic oligonucleotide

SEQ ID NO: 624047 - DNA, 55 bp, Artificial; identical to SEQ ID NO: 234730
  Synthetic oligonucleotide

SEQ ID NO: 624048 - DNA, 52 bp, Artificial; identical to SEQ ID NO: 217613
  Synthetic oligonucleotide

SEQ ID NO: 624049 - DNA, 59 bp, Artificial; identical to SEQ ID NO: 186193
  Synthetic oligonucleotide

SEQ ID NO: 624050 - DNA, 55 bp, Artificial; identical to SEQ ID NO: 242765
  Synthetic oligonucleotide

SEQ ID NO: 624051 - DNA, 58 bp, Artificial; identical to SEQ ID NO: 247532
  Synthetic oligonucleotide

SEQ ID NO: 624052 - DNA, 55 bp, Artificial; identical to SEQ ID NO: 156599
  Synthetic oligonucleotide

SEQ ID NO: 624053 - DNA, 55 bp, Artificial; identical to SEQ ID NO: 183369
  Synthetic oligonucleotide

SEQ ID NO: 624054 - DNA, 55 bp, Artificial; identical to SEQ ID NO: 170825
  Synthetic oligonucleotide

SEQ ID NO: 624055 - DNA, 57 bp, Artificial; identical to SEQ ID NO: 201977
  Synthetic oligonucleotide

SEQ ID NO: 624056 - DNA, 57 bp, Artificial; identical to SEQ ID NO: 170826
  Synthetic oligonucleotide

SEQ ID NO: 624057 - DNA, 53 bp, Artificial; identical to SEQ ID NO: 185767
  Synthetic oligonucleotide

SEQ ID NO: 624058 - DNA, 55 bp, Artificial; identical to SEQ ID NO: 265821
  Synthetic oligonucleotide

SEQ ID NO: 624059 - DNA, 55 bp, Artificial; identical to SEQ ID NO: 253115
  Synthetic oligonucleotide

SEQ ID NO: 624060 - DNA, 53 bp, Artificial; identical to SEQ ID NO: 217312
  Synthetic oligonucleotide

SEQ ID NO: 624061 - DNA, 57 bp, Artificial; identical to SEQ ID NO: 217287
  Synthetic oligonucleotide

SEQ ID NO: 624062 - DNA, 60 bp, Artificial; identical to SEQ ID NO: 186249
  Synthetic oligonucleotide

SEQ ID NO: 624063 - DNA, 51 bp, Artificial; identical to SEQ ID NO: 205733
  Synthetic oligonucleotide

SEQ ID NO: 624064 - DNA, 55 bp, Artificial; identical to SEQ ID NO: 164341
  Synthetic oligonucleotide

SEQ ID NO: 624065 - DNA, 55 bp, Artificial; identical to SEQ ID NO: 254640
  Synthetic oligonucleotide

SEQ ID NO: 624066 - DNA, 59 bp, Artificial; identical to SEQ ID NO: 141461
  Synthetic oligonucleotide

SEQ ID NO: 624067 - DNA, 51 bp, Artificial; identical to SEQ ID NO: 241105
  Synthetic oligonucleotide

SEQ ID NO: 624068 - DNA, 55 bp, Artificial; identical to SEQ ID NO: 253114
  Synthetic oligonucleotide

SEQ ID NO: 624069 - DNA, 55 bp, Artificial; identical to SEQ ID NO: 187800
  Synthetic oligonucleotide

SEQ ID NO: 624070 - DNA, 55 bp, Artificial; identical to SEQ ID NO: 202816
  Synthetic oligonucleotide

SEQ ID NO: 624071 - DNA, 52 bp, Artificial; identical to SEQ ID NO: 149680
  Synthetic oligonucleotide

SEQ ID NO: 624072 - DNA, 55 bp, Artificial; identical to SEQ ID NO: 202217
  Synthetic oligonucleotide

SEQ ID NO: 624073 - DNA, 55 bp, Artificial; identical to SEQ ID NO: 183608
  Synthetic oligonucleotide

SEQ ID NO: 624074 - DNA, 60 bp, Artificial; identical to SEQ ID NO: 208729
  Synthetic oligonucleotide

SEQ ID NO: 624075 - DNA, 53 bp, Artificial; identical to SEQ ID NO: 164865
  Synthetic oligonucleotide

SEQ ID NO: 624076 - DNA, 57 bp, Artificial; identical to SEQ ID NO: 186282
  Synthetic oligonucleotide

SEQ ID NO: 624077 - DNA, 55 bp, Artificial; identical to SEQ ID NO: 259528
  Synthetic oligonucleotide

SEQ ID NO: 624078 - DNA, 55 bp, Artificial; identical to SEQ ID NO: 183587
  Synthetic oligonucleotide

SEQ ID NO: 624079 - DNA, 55 bp, Artificial; identical to SEQ ID NO: 199232
  Synthetic oligonucleotide

SEQ ID NO: 624080 - DNA, 52 bp, Artificial; identical to SEQ ID NO: 192098
  Synthetic oligonucleotide

SEQ ID NO: 624081 - DNA, 53 bp, Artificial; identical to SEQ ID NO: 186304
  Synthetic oligonucleotide

SEQ ID NO: 624082 - DNA, 55 bp, Artificial; identical to SEQ ID NO: 245359
  Synthetic oligonucleotide

SEQ ID NO: 624083 - DNA, 59 bp, Artificial; identical to SEQ ID NO: 247554
  Synthetic oligonucleotide

SEQ ID NO: 624084 - DNA, 60 bp, Artificial; identical to SEQ ID NO: 240281
  Synthetic oligonucleotide

SEQ ID NO: 624085 - DNA, 54 bp, Artificial; identical to SEQ ID NO: 245362
  Synthetic oligonucleotide

SEQ ID NO: 624086 - DNA, 55 bp, Artificial; identical to SEQ ID NO: 196873
  Synthetic oligonucleotide

SEQ ID NO: 624087 - DNA, 55 bp, Artificial; identical to SEQ ID NO: 171625
  Synthetic oligonucleotide

SEQ ID NO: 624088 - DNA, 55 bp, Artificial; identical to SEQ ID NO: 183578
  Synthetic oligonucleotide

SEQ ID NO: 624089 - DNA, 58 bp, Artificial; identical to SEQ ID NO: 201155
  Synthetic oligonucleotide

SEQ ID NO: 624090 - DNA, 51 bp, Artificial; identical to SEQ ID NO: 152128
  Synthetic oligonucleotide

SEQ ID NO: 624091 - DNA, 54 bp, Artificial; identical to SEQ ID NO: 207698
  Synthetic oligonucleotide

SEQ ID NO: 624092 - DNA, 56 bp, Artificial; identical to SEQ ID NO: 244051
  Synthetic oligonucleotide

SEQ ID NO: 624093 - DNA, 55 bp, Artificial; identical to SEQ ID NO: 242767
  Synthetic oligonucleotide

SEQ ID NO: 624094 - DNA, 54 bp, Artificial; identical to SEQ ID NO: 146380
  Synthetic oligonucleotide

SEQ ID NO: 624095 - DNA, 55 bp, Artificial; identical to SEQ ID NO: 203828
  Synthetic oligonucleotide

SEQ ID NO: 624096 - DNA, 60 bp, Artificial; identical to SEQ ID NO: 240059
  Synthetic oligonucleotide

SEQ ID NO: 624097 - DNA, 55 bp, Artificial; identical to SEQ ID NO: 221168
  Synthetic oligonucleotide

SEQ ID NO: 624098 - DNA, 55 bp, Artificial; identical to SEQ ID NO: 189032
  Synthetic oligonucleotide

SEQ ID NO: 624099 - DNA, 60 bp, Artificial; identical to SEQ ID NO: 151145
  Synthetic oligonucleotide

SEQ ID NO: 624100 - DNA, 50 bp, Artificial; identical to SEQ ID NO: 157962
  Synthetic oligonucleotide

SEQ ID NO: 624101 - DNA, 55 bp, Artificial; identical to SEQ ID NO: 233577
  Synthetic oligonucleotide

SEQ ID NO: 624102 - DNA, 55 bp, Artificial; identical to SEQ ID NO: 217870
  Synthetic oligonucleotide

SEQ ID NO: 624103 - DNA, 55 bp, Artificial; identical to SEQ ID NO: 147099
  Synthetic oligonucleotide

SEQ ID NO: 624104 - DNA, 55 bp, Artificial; identical to SEQ ID NO: 183636
  Synthetic oligonucleotide

SEQ ID NO: 624105 - DNA, 50 bp, Artificial; identical to SEQ ID NO: 258256
  Synthetic oligonucleotide

SEQ ID NO: 624106 - DNA, 55 bp, Artificial; identical to SEQ ID NO: 144270
  Synthetic oligonucleotide

SEQ ID NO: 624107 - DNA, 54 bp, Artificial; identical to SEQ ID NO: 185418
  Synthetic oligonucleotide

SEQ ID NO: 624108 - DNA, 55 bp, Artificial; identical to SEQ ID NO: 202216
  Synthetic oligonucleotide

SEQ ID NO: 624109 - DNA, 55 bp, Artificial; identical to SEQ ID NO: 156591
  Synthetic oligonucleotide

SEQ ID NO: 624110 - DNA, 53 bp, Artificial; identical to SEQ ID NO: 203911
  Synthetic oligonucleotide

SEQ ID NO: 624111 - DNA, 55 bp, Artificial; identical to SEQ ID NO: 167344
  Synthetic oligonucleotide

SEQ ID NO: 624112 - DNA, 55 bp, Artificial; identical to SEQ ID NO: 164338
  Synthetic oligonucleotide

SEQ ID NO: 624113 - DNA, 55 bp, Artificial; identical to SEQ ID NO: 189033
  Synthetic oligonucleotide

SEQ ID NO: 624114 - DNA, 55 bp, Artificial; identical to SEQ ID NO: 199229
  Synthetic oligonucleotide

SEQ ID NO: 624115 - DNA, 55 bp, Artificial; identical to SEQ ID NO: 183530
  Synthetic oligonucleotide

SEQ ID NO: 624116 - DNA, 53 bp, Artificial; identical to SEQ ID NO: 222706
  Synthetic oligonucleotide

SEQ ID NO: 624117 - DNA, 57 bp, Artificial; identical to SEQ ID NO: 151134
  Synthetic oligonucleotide

SEQ ID NO: 624118 - DNA, 53 bp, Artificial; identical to SEQ ID NO: 240085
  Synthetic oligonucleotide

SEQ ID NO: 624119 - DNA, 54 bp, Artificial; identical to SEQ ID NO: 174825
  Synthetic oligonucleotide

SEQ ID NO: 624120 - DNA, 56 bp, Artificial; identical to SEQ ID NO: 217313
  Synthetic oligonucleotide

SEQ ID NO: 624121 - DNA, 55 bp, Artificial; identical to SEQ ID NO: 183532
  Synthetic oligonucleotide

SEQ ID NO: 624122 - DNA, 52 bp, Artificial; identical to SEQ ID NO: 165125
  Synthetic oligonucleotide

SEQ ID NO: 624123 - DNA, 54 bp, Artificial; identical to SEQ ID NO: 185406
  Synthetic oligonucleotide

SEQ ID NO: 624124 - DNA, 50 bp, Artificial; identical to SEQ ID NO: 176377
  Synthetic oligonucleotide

SEQ ID NO: 624125 - DNA, 50 bp, Artificial; identical to SEQ ID NO: 183539
  Synthetic oligonucleotide

SEQ ID NO: 624126 - DNA, 60 bp, Artificial; identical to SEQ ID NO: 198825
  Synthetic oligonucleotide

SEQ ID NO: 624127 - DNA, 60 bp, Artificial; identical to SEQ ID NO: 176150
  Synthetic oligonucleotide

SEQ ID NO: 624128 - DNA, 57 bp, Artificial; identical to SEQ ID NO: 176161
  Synthetic oligonucleotide

SEQ ID NO: 624129 - DNA, 60 bp, Artificial; identical to SEQ ID NO: 151123
  Synthetic oligonucleotide

SEQ ID NO: 624130 - DNA, 53 bp, Artificial; identical to SEQ ID NO: 157367
  Synthetic oligonucleotide

SEQ ID NO: 624131 - DNA, 51 bp, Artificial; identical to SEQ ID NO: 241112
  Synthetic oligonucleotide

SEQ ID NO: 624132 - DNA, 55 bp, Artificial; identical to SEQ ID NO: 142578
  Synthetic oligonucleotide

SEQ ID NO: 624133 - DNA, 55 bp, Artificial; identical to SEQ ID NO: 240080
  Synthetic oligonucleotide

SEQ ID NO: 624134 - DNA, 55 bp, Artificial; identical to SEQ ID NO: 205313
  Synthetic oligonucleotide

SEQ ID NO: 624135 - DNA, 55 bp, Artificial; identical to SEQ ID NO: 183563
  Synthetic oligonucleotide

SEQ ID NO: 624136 - DNA, 50 bp, Artificial; identical to SEQ ID NO: 158468
  Synthetic oligonucleotide

SEQ ID NO: 624137 - DNA, 55 bp, Artificial; identical to SEQ ID NO: 207508
  Synthetic oligonucleotide

SEQ ID NO: 624138 - DNA, 55 bp, Artificial; identical to SEQ ID NO: 199227
  Synthetic oligonucleotide

SEQ ID NO: 624139 - DNA, 55 bp, Artificial; identical to SEQ ID NO: 161762
  Synthetic oligonucleotide

SEQ ID NO: 624140 - DNA, 55 bp, Artificial; identical to SEQ ID NO: 215536
  Synthetic oligonucleotide

SEQ ID NO: 624141 - DNA, 51 bp, Artificial; identical to SEQ ID NO: 243300
  Synthetic oligonucleotide

SEQ ID NO: 624142 - DNA, 59 bp, Artificial; identical to SEQ ID NO: 170997
  Synthetic oligonucleotide

SEQ ID NO: 624143 - DNA, 55 bp, Artificial; identical to SEQ ID NO: 245388
  Synthetic oligonucleotide

SEQ ID NO: 624144 - DNA, 54 bp, Artificial; identical to SEQ ID NO: 225216
  Synthetic oligonucleotide

SEQ ID NO: 624145 - DNA, 55 bp, Artificial; identical to SEQ ID NO: 209514
  Synthetic oligonucleotide

SEQ ID NO: 624146 - DNA, 60 bp, Artificial; identical to SEQ ID NO: 239614
  Synthetic oligonucleotide

SEQ ID NO: 624147 - DNA, 59 bp, Artificial; identical to SEQ ID NO: 239503
  Synthetic oligonucleotide

SEQ ID NO: 624148 - DNA, 58 bp, Artificial; identical to SEQ ID NO: 255689
  Synthetic oligonucleotide

SEQ ID NO: 624149 - DNA, 58 bp, Artificial; identical to SEQ ID NO: 179668
  Synthetic oligonucleotide

SEQ ID NO: 624150 - DNA, 50 bp, Artificial; identical to SEQ ID NO: 189850
  Synthetic oligonucleotide

SEQ ID NO: 624151 - DNA, 55 bp, Artificial; identical to SEQ ID NO: 203827
  Synthetic oligonucleotide

SEQ ID NO: 624152 - DNA, 54 bp, Artificial; identical to SEQ ID NO: 207702
  Synthetic oligonucleotide

SEQ ID NO: 624153 - DNA, 50 bp, Artificial; identical to SEQ ID NO: 165566
  Synthetic oligonucleotide

SEQ ID NO: 624154 - DNA, 58 bp, Artificial; identical to SEQ ID NO: 217233
  Synthetic oligonucleotide

SEQ ID NO: 624155 - DNA, 60 bp, Artificial; identical to SEQ ID NO: 176250
  Synthetic oligonucleotide

SEQ ID NO: 624156 - DNA, 55 bp, Artificial; identical to SEQ ID NO: 183547
  Synthetic oligonucleotide

SEQ ID NO: 624157 - DNA, 55 bp, Artificial; identical to SEQ ID NO: 183558
  Synthetic oligonucleotide

SEQ ID NO: 624158 - DNA, 58 bp, Artificial; identical to SEQ ID NO: 151112
  Synthetic oligonucleotide

SEQ ID NO: 624159 - DNA, 58 bp, Artificial; identical to SEQ ID NO: 208740
  Synthetic oligonucleotide

SEQ ID NO: 624160 - DNA, 60 bp, Artificial; identical to SEQ ID NO: 190986
  Synthetic oligonucleotide

SEQ ID NO: 624161 - DNA, 55 bp, Artificial; identical to SEQ ID NO: 209513
  Synthetic oligonucleotide

SEQ ID NO: 624162 - DNA, 55 bp, Artificial; identical to SEQ ID NO: 240079
  Synthetic oligonucleotide

SEQ ID NO: 624163 - DNA, 55 bp, Artificial; identical to SEQ ID NO: 148658
  Synthetic oligonucleotide

SEQ ID NO: 624164 - DNA, 54 bp, Artificial; identical to SEQ ID NO: 255184
  Synthetic oligonucleotide

SEQ ID NO: 624165 - DNA, 57 bp, Artificial; identical to SEQ ID NO: 239170
  Synthetic oligonucleotide

SEQ ID NO: 624166 - DNA, 50 bp, Artificial; identical to SEQ ID NO: 165568
  Synthetic oligonucleotide

SEQ ID NO: 624167 - DNA, 55 bp, Artificial; identical to SEQ ID NO: 245357
  Synthetic oligonucleotide

SEQ ID NO: 624168 - DNA, 52 bp, Artificial; identical to SEQ ID NO: 145032
  Synthetic oligonucleotide

SEQ ID NO: 624169 - DNA, 50 bp, Artificial; identical to SEQ ID NO: 256263
  Synthetic oligonucleotide

SEQ ID NO: 624170 - DNA, 57 bp, Artificial; identical to SEQ ID NO: 239059
  Synthetic oligonucleotide

SEQ ID NO: 624171 - DNA, 50 bp, Artificial; identical to SEQ ID NO: 256265
  Synthetic oligonucleotide

SEQ ID NO: 624172 - DNA, 55 bp, Artificial; identical to SEQ ID NO: 245203
  Synthetic oligonucleotide

SEQ ID NO: 624173 - DNA, 58 bp, Artificial; identical to SEQ ID NO: 256570
  Synthetic oligonucleotide

SEQ ID NO: 624174 - DNA, 54 bp, Artificial; identical to SEQ ID NO: 247576
  Synthetic oligonucleotide

SEQ ID NO: 624175 - DNA, 55 bp, Artificial; identical to SEQ ID NO: 201951
  Synthetic oligonucleotide

SEQ ID NO: 624176 - DNA, 55 bp, Artificial; identical to SEQ ID NO: 205312
  Synthetic oligonucleotide

SEQ ID NO: 624177 - DNA, 55 bp, Artificial; identical to SEQ ID NO: 156617
  Synthetic oligonucleotide

SEQ ID NO: 624178 - DNA, 55 bp, Artificial; identical to SEQ ID NO: 211289
  Synthetic oligonucleotide

SEQ ID NO: 624179 - DNA, 55 bp, Artificial; identical to SEQ ID NO: 189036
  Synthetic oligonucleotide

SEQ ID NO: 624180 - DNA, 51 bp, Artificial; identical to SEQ ID NO: 237139
  Synthetic oligonucleotide

SEQ ID NO: 624181 - DNA, 55 bp, Artificial; identical to SEQ ID NO: 183546
  Synthetic oligonucleotide

SEQ ID NO: 624182 - DNA, 51 bp, Artificial; identical to SEQ ID NO: 186575
  Synthetic oligonucleotide

SEQ ID NO: 624183 - DNA, 55 bp, Artificial; identical to SEQ ID NO: 169861
  Synthetic oligonucleotide

SEQ ID NO: 624184 - DNA, 55 bp, Artificial; identical to SEQ ID NO: 183570
  Synthetic oligonucleotide

SEQ ID NO: 624185 - DNA, 53 bp, Artificial; identical to SEQ ID NO: 212961
  Synthetic oligonucleotide

SEQ ID NO: 624186 - DNA, 55 bp, Artificial; identical to SEQ ID NO: 225052
  Synthetic oligonucleotide

SEQ ID NO: 624187 - DNA, 55 bp, Artificial; identical to SEQ ID NO: 148672
  Synthetic oligonucleotide

SEQ ID NO: 624188 - DNA, 56 bp, Artificial; identical to SEQ ID NO: 239499
  Synthetic oligonucleotide

SEQ ID NO: 624189 - DNA, 51 bp, Artificial; identical to SEQ ID NO: 206573
  Synthetic oligonucleotide

SEQ ID NO: 624190 - DNA, 59 bp, Artificial; identical to SEQ ID NO: 192234
  Synthetic oligonucleotide

SEQ ID NO: 624191 - DNA, 55 bp, Artificial; identical to SEQ ID NO: 188322
  Synthetic oligonucleotide

SEQ ID NO: 624192 - DNA, 53 bp, Artificial; identical to SEQ ID NO: 217601
  Synthetic oligonucleotide

SEQ ID NO: 624193 - DNA, 53 bp, Artificial; identical to SEQ ID NO: 152254
  Synthetic oligonucleotide

SEQ ID NO: 624194 - DNA, 60 bp, Artificial; identical to SEQ ID NO: 238837
  Synthetic oligonucleotide

SEQ ID NO: 624195 - DNA, 60 bp, Artificial; identical to SEQ ID NO: 256520
  Synthetic oligonucleotide

SEQ ID NO: 624196 - DNA, 53 bp, Artificial; identical to SEQ ID NO: 149445
  Synthetic oligonucleotide

SEQ ID NO: 624197 - DNA, 53 bp, Artificial; identical to SEQ ID NO: 246360
  Synthetic oligonucleotide

SEQ ID NO: 624198 - DNA, 55 bp, Artificial; identical to SEQ ID NO: 179929
  Synthetic oligonucleotide

SEQ ID NO: 624199 - DNA, 51 bp, Artificial; identical to SEQ ID NO: 160544
  Synthetic oligonucleotide

SEQ ID NO: 624200 - DNA, 55 bp, Artificial; identical to SEQ ID NO: 245253
  Synthetic oligonucleotide

SEQ ID NO: 624201 - DNA, 56 bp, Artificial; identical to SEQ ID NO: 233954
  Synthetic oligonucleotide

SEQ ID NO: 624202 - DNA, 51 bp, Artificial; identical to SEQ ID NO: 186533
  Synthetic oligonucleotide

SEQ ID NO: 624203 - DNA, 55 bp, Artificial; identical to SEQ ID NO: 142387
  Synthetic oligonucleotide

SEQ ID NO: 624204 - DNA, 55 bp, Artificial; identical to SEQ ID NO: 162161
  Synthetic oligonucleotide

SEQ ID NO: 624205 - DNA, 58 bp, Artificial; identical to SEQ ID NO: 142731
  Synthetic oligonucleotide

SEQ ID NO: 624206 - DNA, 59 bp, Artificial; identical to SEQ ID NO: 217590
  Synthetic oligonucleotide

SEQ ID NO: 624207 - DNA, 55 bp, Artificial; identical to SEQ ID NO: 253112
  Synthetic oligonucleotide

SEQ ID NO: 624208 - DNA, 55 bp, Artificial; identical to SEQ ID NO: 243063
  Synthetic oligonucleotide

SEQ ID NO: 624209 - DNA, 53 bp, Artificial; identical to SEQ ID NO: 240787
  Synthetic oligonucleotide

SEQ ID NO: 624210 - DNA, 59 bp, Artificial; identical to SEQ ID NO: 142663
  Synthetic oligonucleotide

SEQ ID NO: 624211 - DNA, 54 bp, Artificial; identical to SEQ ID NO: 261879
  Synthetic oligonucleotide

SEQ ID NO: 624212 - DNA, 54 bp, Artificial; identical to SEQ ID NO: 156613
  Synthetic oligonucleotide

SEQ ID NO: 624213 - DNA, 52 bp, Artificial; identical to SEQ ID NO: 247963
  Synthetic oligonucleotide

SEQ ID NO: 624214 - DNA, 54 bp, Artificial; identical to SEQ ID NO: 260015
  Synthetic oligonucleotide

SEQ ID NO: 624215 - DNA, 59 bp, Artificial; identical to SEQ ID NO: 239191
  Synthetic oligonucleotide

SEQ ID NO: 624216 - DNA, 54 bp, Artificial; identical to SEQ ID NO: 192047
  Synthetic oligonucleotide

SEQ ID NO: 624217 - DNA, 58 bp, Artificial; identical to SEQ ID NO: 192235
  Synthetic oligonucleotide

SEQ ID NO: 624218 - DNA, 51 bp, Artificial; identical to SEQ ID NO: 170241
  Synthetic oligonucleotide

SEQ ID NO: 624219 - DNA, 55 bp, Artificial; identical to SEQ ID NO: 142577
  Synthetic oligonucleotide

SEQ ID NO: 624220 - DNA, 55 bp, Artificial; identical to SEQ ID NO: 207554
  Synthetic oligonucleotide

SEQ ID NO: 624221 - DNA, 55 bp, Artificial; identical to SEQ ID NO: 148676
  Synthetic oligonucleotide

SEQ ID NO: 624222 - DNA, 57 bp, Artificial; identical to SEQ ID NO: 221466
  Synthetic oligonucleotide

SEQ ID NO: 624223 - DNA, 55 bp, Artificial; identical to SEQ ID NO: 217873
  Synthetic oligonucleotide

SEQ ID NO: 624224 - DNA, 55 bp, Artificial; identical to SEQ ID NO: 142388
  Synthetic oligonucleotide

SEQ ID NO: 624225 - DNA, 57 bp, Artificial; identical to SEQ ID NO: 238726
  Synthetic oligonucleotide

SEQ ID NO: 624226 - DNA, 57 bp, Artificial; identical to SEQ ID NO: 238615
  Synthetic oligonucleotide

SEQ ID NO: 624227 - DNA, 55 bp, Artificial; identical to SEQ ID NO: 183647
  Synthetic oligonucleotide

SEQ ID NO: 624228 - DNA, 53 bp, Artificial; identical to SEQ ID NO: 157371
  Synthetic oligonucleotide

SEQ ID NO: 624229 - DNA, 55 bp, Artificial; identical to SEQ ID NO: 205304
  Synthetic oligonucleotide

SEQ ID NO: 624230 - DNA, 50 bp, Artificial; identical to SEQ ID NO: 176301
  Synthetic oligonucleotide

SEQ ID NO: 624231 - DNA, 60 bp, Artificial; identical to SEQ ID NO: 234397
  Synthetic oligonucleotide

SEQ ID NO: 624232 - DNA, 60 bp, Artificial; identical to SEQ ID NO: 242108
  Synthetic oligonucleotide

SEQ ID NO: 624233 - DNA, 55 bp, Artificial; identical to SEQ ID NO: 261940
  Synthetic oligonucleotide

SEQ ID NO: 624234 - DNA, 55 bp, Artificial; identical to SEQ ID NO: 222121
  Synthetic oligonucleotide

SEQ ID NO: 624235 - DNA, 55 bp, Artificial; identical to SEQ ID NO: 188321
  Synthetic oligonucleotide

SEQ ID NO: 624236 - DNA, 55 bp, Artificial; identical to SEQ ID NO: 242771
  Synthetic oligonucleotide

SEQ ID NO: 624237 - DNA, 50 bp, Artificial; identical to SEQ ID NO: 160702
  Synthetic oligonucleotide

SEQ ID NO: 624238 - DNA, 53 bp, Artificial; identical to SEQ ID NO: 149442
  Synthetic oligonucleotide

SEQ ID NO: 624239 - DNA, 55 bp, Artificial; identical to SEQ ID NO: 160213
  Synthetic oligonucleotide

SEQ ID NO: 624240 - DNA, 55 bp, Artificial; identical to SEQ ID NO: 242772
  Synthetic oligonucleotide

SEQ ID NO: 624241 - DNA, 55 bp, Artificial; identical to SEQ ID NO: 199223
  Synthetic oligonucleotide

SEQ ID NO: 624242 - DNA, 60 bp, Artificial; identical to SEQ ID NO: 243085
  Synthetic oligonucleotide

SEQ ID NO: 624243 - DNA, 54 bp, Artificial; identical to SEQ ID NO: 149144
  Synthetic oligonucleotide

SEQ ID NO: 624244 - DNA, 55 bp, Artificial; identical to SEQ ID NO: 183639
  Synthetic oligonucleotide

SEQ ID NO: 624245 - DNA, 51 bp, Artificial; identical to SEQ ID NO: 151090
  Synthetic oligonucleotide

SEQ ID NO: 624246 - DNA, 52 bp, Artificial; identical to SEQ ID NO: 202513
  Synthetic oligonucleotide

SEQ ID NO: 624247 - DNA, 60 bp, Artificial; identical to SEQ ID NO: 186771
  Synthetic oligonucleotide

SEQ ID NO: 624248 - DNA, 55 bp, Artificial; identical to SEQ ID NO: 243908
  Synthetic oligonucleotide

SEQ ID NO: 624249 - DNA, 55 bp, Artificial; identical to SEQ ID NO: 199222
  Synthetic oligonucleotide

SEQ ID NO: 624250 - DNA, 55 bp, Artificial; identical to SEQ ID NO: 242773
  Synthetic oligonucleotide

SEQ ID NO: 624251 - DNA, 55 bp, Artificial; identical to SEQ ID NO: 156608
  Synthetic oligonucleotide

SEQ ID NO: 624252 - DNA, 60 bp, Artificial; identical to SEQ ID NO: 186782
  Synthetic oligonucleotide

SEQ ID NO: 624253 - DNA, 57 bp, Artificial; identical to SEQ ID NO: 179831
  Synthetic oligonucleotide

SEQ ID NO: 624254 - DNA, 53 bp, Artificial; identical to SEQ ID NO: 170830
  Synthetic oligonucleotide

SEQ ID NO: 624255 - DNA, 49 bp, Artificial; identical to SEQ ID NO: 209384
  Synthetic oligonucleotide

SEQ ID NO: 624256 - DNA, 54 bp, Artificial; identical to SEQ ID NO: 242470
  Synthetic oligonucleotide

SEQ ID NO: 624257 - DNA, 52 bp, Artificial; identical to SEQ ID NO: 183632
  Synthetic oligonucleotide

SEQ ID NO: 624258 - DNA, 54 bp, Artificial; identical to SEQ ID NO: 185015
  Synthetic oligonucleotide

SEQ ID NO: 624259 - DNA, 55 bp, Artificial; identical to SEQ ID NO: 190447
  Synthetic oligonucleotide

SEQ ID NO: 624260 - DNA, 55 bp, Artificial; identical to SEQ ID NO: 168819
  Synthetic oligonucleotide

SEQ ID NO: 624261 - DNA, 55 bp, Artificial; identical to SEQ ID NO: 211292
  Synthetic oligonucleotide

SEQ ID NO: 624262 - DNA, 54 bp, Artificial; identical to SEQ ID NO: 168843
  Synthetic oligonucleotide

SEQ ID NO: 624263 - DNA, 50 bp, Artificial; identical to SEQ ID NO: 176480
  Synthetic oligonucleotide

SEQ ID NO: 624264 - DNA, 55 bp, Artificial; identical to SEQ ID NO: 148536
  Synthetic oligonucleotide

SEQ ID NO: 624265 - DNA, 55 bp, Artificial; identical to SEQ ID NO: 183603
  Synthetic oligonucleotide

SEQ ID NO: 624266 - DNA, 57 bp, Artificial; identical to SEQ ID NO: 198803
  Synthetic oligonucleotide

SEQ ID NO: 624267 - DNA, 60 bp, Artificial; identical to SEQ ID NO: 243096
  Synthetic oligonucleotide

SEQ ID NO: 624268 - DNA, 60 bp, Artificial; identical to SEQ ID NO: 186882
  Synthetic oligonucleotide

SEQ ID NO: 624269 - DNA, 55 bp, Artificial; identical to SEQ ID NO: 245224
  Synthetic oligonucleotide

SEQ ID NO: 624270 - DNA, 54 bp, Artificial; identical to SEQ ID NO: 253263
  Synthetic oligonucleotide

SEQ ID NO: 624271 - DNA, 55 bp, Artificial; identical to SEQ ID NO: 174539
  Synthetic oligonucleotide

SEQ ID NO: 624272 - DNA, 51 bp, Artificial; identical to SEQ ID NO: 149875
  Synthetic oligonucleotide

SEQ ID NO: 624273 - DNA, 54 bp, Artificial; identical to SEQ ID NO: 221118
  Synthetic oligonucleotide

SEQ ID NO: 624274 - DNA, 55 bp, Artificial; identical to SEQ ID NO: 183407
  Synthetic oligonucleotide

SEQ ID NO: 624275 - DNA, 50 bp, Artificial; identical to SEQ ID NO: 176440
  Synthetic oligonucleotide

SEQ ID NO: 624276 - DNA, 55 bp, Artificial; identical to SEQ ID NO: 205303
  Synthetic oligonucleotide

SEQ ID NO: 624277 - DNA, 55 bp, Artificial; identical to SEQ ID NO: 164372
  Synthetic oligonucleotide

SEQ ID NO: 624278 - DNA, 60 bp, Artificial; identical to SEQ ID NO: 192237
  Synthetic oligonucleotide

SEQ ID NO: 624279 - DNA, 55 bp, Artificial; identical to SEQ ID NO: 208206
  Synthetic oligonucleotide

SEQ ID NO: 624280 - DNA, 53 bp, Artificial; identical to SEQ ID NO: 185765
  Synthetic oligonucleotide

SEQ ID NO: 624281 - DNA, 58 bp, Artificial; identical to SEQ ID NO: 209174
  Synthetic oligonucleotide

SEQ ID NO: 624282 - DNA, 55 bp, Artificial; identical to SEQ ID NO: 189391
  Synthetic oligonucleotide

SEQ ID NO: 624283 - DNA, 55 bp, Artificial; identical to SEQ ID NO: 201324
  Synthetic oligonucleotide

SEQ ID NO: 624284 - DNA, 59 bp, Artificial; identical to SEQ ID NO: 186948
  Synthetic oligonucleotide

SEQ ID NO: 624285 - DNA, 59 bp, Artificial; identical to SEQ ID NO: 256431
  Synthetic oligonucleotide

SEQ ID NO: 624286 - DNA, 55 bp, Artificial; identical to SEQ ID NO: 142576
  Synthetic oligonucleotide

SEQ ID NO: 624287 - DNA, 60 bp, Artificial; identical to SEQ ID NO: 206531
  Synthetic oligonucleotide

SEQ ID NO: 624288 - DNA, 55 bp, Artificial; identical to SEQ ID NO: 198792
  Synthetic oligonucleotide

SEQ ID NO: 624289 - DNA, 51 bp, Artificial; identical to SEQ ID NO: 246735
  Synthetic oligonucleotide

SEQ ID NO: 624290 - DNA, 54 bp, Artificial; identical to SEQ ID NO: 188007
  Synthetic oligonucleotide

SEQ ID NO: 624291 - DNA, 59 bp, Artificial; identical to SEQ ID NO: 215162
  Synthetic oligonucleotide

SEQ ID NO: 624292 - DNA, 55 bp, Artificial; identical to SEQ ID NO: 148540
  Synthetic oligonucleotide

SEQ ID NO: 624293 - DNA, 55 bp, Artificial; identical to SEQ ID NO: 168814
  Synthetic oligonucleotide

SEQ ID NO: 624294 - DNA, 50 bp, Artificial; identical to SEQ ID NO: 192198
  Synthetic oligonucleotide

SEQ ID NO: 624295 - DNA, 60 bp, Artificial; identical to SEQ ID NO: 209373
  Synthetic oligonucleotide

SEQ ID NO: 624296 - DNA, 53 bp, Artificial; identical to SEQ ID NO: 172797
  Synthetic oligonucleotide

SEQ ID NO: 624297 - DNA, 55 bp, Artificial; identical to SEQ ID NO: 249424
  Synthetic oligonucleotide

SEQ ID NO: 624298 - DNA, 55 bp, Artificial; identical to SEQ ID NO: 194691
  Synthetic oligonucleotide

SEQ ID NO: 624299 - DNA, 53 bp, Artificial; identical to SEQ ID NO: 160415
  Synthetic oligonucleotide

SEQ ID NO: 624300 - DNA, 50 bp, Artificial; identical to SEQ ID NO: 150450
  Synthetic oligonucleotide

SEQ ID NO: 624301 - DNA, 55 bp, Artificial; identical to SEQ ID NO: 258998
  Synthetic oligonucleotide

SEQ ID NO: 624302 - DNA, 55 bp, Artificial; identical to SEQ ID NO: 190451
  Synthetic oligonucleotide

SEQ ID NO: 624303 - DNA, 55 bp, Artificial; identical to SEQ ID NO: 160777
  Synthetic oligonucleotide

SEQ ID NO: 624304 - DNA, 55 bp, Artificial; identical to SEQ ID NO: 223415
  Synthetic oligonucleotide

SEQ ID NO: 624305 - DNA, 55 bp, Artificial; identical to SEQ ID NO: 156603
  Synthetic oligonucleotide

SEQ ID NO: 624306 - DNA, 55 bp, Artificial; identical to SEQ ID NO: 166970
  Synthetic oligonucleotide

SEQ ID NO: 624307 - DNA, 54 bp, Artificial; identical to SEQ ID NO: 243036
  Synthetic oligonucleotide

SEQ ID NO: 624308 - DNA, 55 bp, Artificial; identical to SEQ ID NO: 166967
  Synthetic oligonucleotide

SEQ ID NO: 624309 - DNA, 57 bp, Artificial; identical to SEQ ID NO: 240836
  Synthetic oligonucleotide

SEQ ID NO: 624310 - DNA, 59 bp, Artificial; identical to SEQ ID NO: 243130
  Synthetic oligonucleotide

SEQ ID NO: 624311 - DNA, 55 bp, Artificial; identical to SEQ ID NO: 183391
  Synthetic oligonucleotide

SEQ ID NO: 624312 - DNA, 55 bp, Artificial; identical to SEQ ID NO: 183388
  Synthetic oligonucleotide

SEQ ID NO: 624313 - DNA, 55 bp, Artificial; identical to SEQ ID NO: 164369
  Synthetic oligonucleotide

SEQ ID NO: 624314 - DNA, 55 bp, Artificial; identical to SEQ ID NO: 148489
  Synthetic oligonucleotide

SEQ ID NO: 624315 - DNA, 57 bp, Artificial; identical to SEQ ID NO: 147128
  Synthetic oligonucleotide

SEQ ID NO: 624316 - DNA, 55 bp, Artificial; identical to SEQ ID NO: 242776
  Synthetic oligonucleotide

SEQ ID NO: 624317 - DNA, 57 bp, Artificial; identical to SEQ ID NO: 247610
  Synthetic oligonucleotide

SEQ ID NO: 624318 - DNA, 55 bp, Artificial; identical to SEQ ID NO: 146349
  Synthetic oligonucleotide

SEQ ID NO: 624319 - DNA, 53 bp, Artificial; identical to SEQ ID NO: 199693
  Synthetic oligonucleotide

SEQ ID NO: 624320 - DNA, 55 bp, Artificial; identical to SEQ ID NO: 245238
  Synthetic oligonucleotide

SEQ ID NO: 624321 - DNA, 55 bp, Artificial; identical to SEQ ID NO: 233573
  Synthetic oligonucleotide

SEQ ID NO: 624322 - DNA, 55 bp, Artificial; identical to SEQ ID NO: 196853
  Synthetic oligonucleotide

SEQ ID NO: 624323 - DNA, 55 bp, Artificial; identical to SEQ ID NO: 156601
  Synthetic oligonucleotide

SEQ ID NO: 624324 - DNA, 51 bp, Artificial; identical to SEQ ID NO: 191224
  Synthetic oligonucleotide

SEQ ID NO: 624325 - DNA, 54 bp, Artificial; identical to SEQ ID NO: 198770
  Synthetic oligonucleotide

SEQ ID NO: 624326 - DNA, 55 bp, Artificial; identical to SEQ ID NO: 183481
  Synthetic oligonucleotide

SEQ ID NO: 624327 - DNA, 55 bp, Artificial; identical to SEQ ID NO: 153356
  Synthetic oligonucleotide

SEQ ID NO: 624328 - DNA, 56 bp, Artificial; identical to SEQ ID NO: 247620
  Synthetic oligonucleotide

SEQ ID NO: 624329 - DNA, 55 bp, Artificial; identical to SEQ ID NO: 219634
  Synthetic oligonucleotide

SEQ ID NO: 624330 - DNA, 55 bp, Artificial; identical to SEQ ID NO: 183480
  Synthetic oligonucleotide

SEQ ID NO: 624331 - DNA, 55 bp, Artificial; identical to SEQ ID NO: 199217
  Synthetic oligonucleotide

SEQ ID NO: 624332 - DNA, 60 bp, Artificial; identical to SEQ ID NO: 142384
  Synthetic oligonucleotide

SEQ ID NO: 624333 - DNA, 52 bp, Artificial; identical to SEQ ID NO: 186222
  Synthetic oligonucleotide

SEQ ID NO: 624334 - DNA, 55 bp, Artificial; identical to SEQ ID NO: 242778
  Synthetic oligonucleotide

SEQ ID NO: 624335 - DNA, 54 bp, Artificial; identical to SEQ ID NO: 258030
  Synthetic oligonucleotide

SEQ ID NO: 624336 - DNA, 55 bp, Artificial; identical to SEQ ID NO: 217875
  Synthetic oligonucleotide

SEQ ID NO: 624337 - DNA, 60 bp, Artificial; identical to SEQ ID NO: 241931
  Synthetic oligonucleotide

SEQ ID NO: 624338 - DNA, 60 bp, Artificial; identical to SEQ ID NO: 241920
  Synthetic oligonucleotide

SEQ ID NO: 624339 - DNA, 55 bp, Artificial; identical to SEQ ID NO: 223416
  Synthetic oligonucleotide

SEQ ID NO: 624340 - DNA, 55 bp, Artificial; identical to SEQ ID NO: 254773
  Synthetic oligonucleotide

SEQ ID NO: 624341 - DNA, 51 bp, Artificial; identical to SEQ ID NO: 202556
  Synthetic oligonucleotide

SEQ ID NO: 624342 - DNA, 55 bp, Artificial; identical to SEQ ID NO: 183439
  Synthetic oligonucleotide

SEQ ID NO: 624343 - DNA, 56 bp, Artificial; identical to SEQ ID NO: 207081
  Synthetic oligonucleotide

SEQ ID NO: 624344 - DNA, 60 bp, Artificial; identical to SEQ ID NO: 247621
  Synthetic oligonucleotide

SEQ ID NO: 624345 - DNA, 60 bp, Artificial; identical to SEQ ID NO: 167461
  Synthetic oligonucleotide

SEQ ID NO: 624346 - DNA, 54 bp, Artificial; identical to SEQ ID NO: 155205
  Synthetic oligonucleotide

SEQ ID NO: 624347 - DNA, 55 bp, Artificial; identical to SEQ ID NO: 164365
  Synthetic oligonucleotide

SEQ ID NO: 624348 - DNA, 55 bp, Artificial; identical to SEQ ID NO: 207556
  Synthetic oligonucleotide

SEQ ID NO: 624349 - DNA, 60 bp, Artificial; identical to SEQ ID NO: 151034
  Synthetic oligonucleotide

SEQ ID NO: 624350 - DNA, 55 bp, Artificial; identical to SEQ ID NO: 257931
  Synthetic oligonucleotide

SEQ ID NO: 624351 - DNA, 50 bp, Artificial; identical to SEQ ID NO: 176189
  Synthetic oligonucleotide

SEQ ID NO: 624352 - DNA, 60 bp, Artificial; identical to SEQ ID NO: 170831
  Synthetic oligonucleotide

SEQ ID NO: 624353 - DNA, 55 bp, Artificial; identical to SEQ ID NO: 164364
  Synthetic oligonucleotide

SEQ ID NO: 624354 - DNA, 55 bp, Artificial; identical to SEQ ID NO: 221141
  Synthetic oligonucleotide

SEQ ID NO: 624355 - DNA, 55 bp, Artificial; identical to SEQ ID NO: 183468
  Synthetic oligonucleotide

SEQ ID NO: 624356 - DNA, 60 bp, Artificial; identical to SEQ ID NO: 221311
  Synthetic oligonucleotide

SEQ ID NO: 624357 - DNA, 60 bp, Artificial; identical to SEQ ID NO: 152243
  Synthetic oligonucleotide

SEQ ID NO: 624358 - DNA, 55 bp, Artificial; identical to SEQ ID NO: 242779
  Synthetic oligonucleotide

SEQ ID NO: 624359 - DNA, 55 bp, Artificial; identical to SEQ ID NO: 191038
  Synthetic oligonucleotide

SEQ ID NO: 624360 - DNA, 53 bp, Artificial; identical to SEQ ID NO: 188481
  Synthetic oligonucleotide

SEQ ID NO: 624361 - DNA, 55 bp, Artificial; identical to SEQ ID NO: 257929
  Synthetic oligonucleotide

SEQ ID NO: 624362 - DNA, 60 bp, Artificial; identical to SEQ ID NO: 185471
  Synthetic oligonucleotide

SEQ ID NO: 624363 - DNA, 55 bp, Artificial; identical to SEQ ID NO: 152337
  Synthetic oligonucleotide

SEQ ID NO: 624364 - DNA, 56 bp, Artificial; identical to SEQ ID NO: 244055
  Synthetic oligonucleotide

SEQ ID NO: 624365 - DNA, 55 bp, Artificial; identical to SEQ ID NO: 171631
  Synthetic oligonucleotide

SEQ ID NO: 624366 - DNA, 55 bp, Artificial; identical to SEQ ID NO: 148514
  Synthetic oligonucleotide

SEQ ID NO: 624367 - DNA, 55 bp, Artificial; identical to SEQ ID NO: 168768
  Synthetic oligonucleotide

SEQ ID NO: 624368 - DNA, 60 bp, Artificial; identical to SEQ ID NO: 185482
  Synthetic oligonucleotide

SEQ ID NO: 624369 - DNA, 59 bp, Artificial; identical to SEQ ID NO: 185493
  Synthetic oligonucleotide

SEQ ID NO: 624370 - DNA, 55 bp, Artificial; identical to SEQ ID NO: 254749
  Synthetic oligonucleotide

SEQ ID NO: 624371 - DNA, 55 bp, Artificial; identical to SEQ ID NO: 223418
  Synthetic oligonucleotide

SEQ ID NO: 624372 - DNA, 50 bp, Artificial; identical to SEQ ID NO: 167778
  Synthetic oligonucleotide

SEQ ID NO: 624373 - DNA, 55 bp, Artificial; identical to SEQ ID NO: 164363
  Synthetic oligonucleotide

SEQ ID NO: 624374 - DNA, 58 bp, Artificial; identical to SEQ ID NO: 239253
  Synthetic oligonucleotide

SEQ ID NO: 624375 - DNA, 55 bp, Artificial; identical to SEQ ID NO: 190454
  Synthetic oligonucleotide

SEQ ID NO: 624376 - DNA, 55 bp, Artificial; identical to SEQ ID NO: 221142
  Synthetic oligonucleotide

SEQ ID NO: 624377 - DNA, 55 bp, Artificial; identical to SEQ ID NO: 207557
  Synthetic oligonucleotide

SEQ ID NO: 624378 - DNA, 60 bp, Artificial; identical to SEQ ID NO: 241909
  Synthetic oligonucleotide

SEQ ID NO: 624379 - DNA, 55 bp, Artificial; identical to SEQ ID NO: 142390
  Synthetic oligonucleotide

SEQ ID NO: 624380 - DNA, 55 bp, Artificial; identical to SEQ ID NO: 156712
  Synthetic oligonucleotide

SEQ ID NO: 624381 - DNA, 54 bp, Artificial; identical to SEQ ID NO: 185070
  Synthetic oligonucleotide

SEQ ID NO: 624382 - DNA, 60 bp, Artificial; identical to SEQ ID NO: 154137
  Synthetic oligonucleotide

SEQ ID NO: 624383 - DNA, 53 bp, Artificial; identical to SEQ ID NO: 168916
  Synthetic oligonucleotide

SEQ ID NO: 624384 - DNA, 59 bp, Artificial; identical to SEQ ID NO: 185515
  Synthetic oligonucleotide

SEQ ID NO: 624385 - DNA, 55 bp, Artificial; identical to SEQ ID NO: 238468
  Synthetic oligonucleotide

SEQ ID NO: 624386 - DNA, 55 bp, Artificial; identical to SEQ ID NO: 183840
  Synthetic oligonucleotide

SEQ ID NO: 624387 - DNA, 60 bp, Artificial; identical to SEQ ID NO: 206520
  Synthetic oligonucleotide

SEQ ID NO: 624388 - DNA, 51 bp, Artificial; identical to SEQ ID NO: 157729
  Synthetic oligonucleotide

SEQ ID NO: 624389 - DNA, 55 bp, Artificial; identical to SEQ ID NO: 156711
  Synthetic oligonucleotide

SEQ ID NO: 624390 - DNA, 57 bp, Artificial; identical to SEQ ID NO: 248615
  Synthetic oligonucleotide

SEQ ID NO: 624391 - DNA, 57 bp, Artificial; identical to SEQ ID NO: 210839
  Synthetic oligonucleotide

SEQ ID NO: 624392 - DNA, 54 bp, Artificial; identical to SEQ ID NO: 148584
  Synthetic oligonucleotide

SEQ ID NO: 624393 - DNA, 60 bp, Artificial; identical to SEQ ID NO: 241898
  Synthetic oligonucleotide

SEQ ID NO: 624394 - DNA, 55 bp, Artificial; identical to SEQ ID NO: 223419
  Synthetic oligonucleotide

SEQ ID NO: 624395 - DNA, 55 bp, Artificial; identical to SEQ ID NO: 142391
  Synthetic oligonucleotide

SEQ ID NO: 624396 - DNA, 51 bp, Artificial; identical to SEQ ID NO: 169399
  Synthetic oligonucleotide

SEQ ID NO: 624397 - DNA, 55 bp, Artificial; identical to SEQ ID NO: 240269
  Synthetic oligonucleotide

SEQ ID NO: 624398 - DNA, 55 bp, Artificial; identical to SEQ ID NO: 253107
  Synthetic oligonucleotide

SEQ ID NO: 624399 - DNA, 55 bp, Artificial; identical to SEQ ID NO: 174538
  Synthetic oligonucleotide

SEQ ID NO: 624400 - DNA, 54 bp, Artificial; identical to SEQ ID NO: 164719
  Synthetic oligonucleotide

SEQ ID NO: 624401 - DNA, 55 bp, Artificial; identical to SEQ ID NO: 171632
  Synthetic oligonucleotide

SEQ ID NO: 624402 - DNA, 59 bp, Artificial; identical to SEQ ID NO: 222629
  Synthetic oligonucleotide

SEQ ID NO: 624403 - DNA, 52 bp, Artificial; identical to SEQ ID NO: 167116
  Synthetic oligonucleotide

SEQ ID NO: 624404 - DNA, 55 bp, Artificial; identical to SEQ ID NO: 152338
  Synthetic oligonucleotide

SEQ ID NO: 624405 - DNA, 55 bp, Artificial; identical to SEQ ID NO: 199216
  Synthetic oligonucleotide

SEQ ID NO: 624406 - DNA, 55 bp, Artificial; identical to SEQ ID NO: 199214
  Synthetic oligonucleotide

SEQ ID NO: 624407 - DNA, 55 bp, Artificial; identical to SEQ ID NO: 183861
  Synthetic oligonucleotide

SEQ ID NO: 624408 - DNA, 51 bp, Artificial; identical to SEQ ID NO: 149879
  Synthetic oligonucleotide

SEQ ID NO: 624409 - DNA, 55 bp, Artificial; identical to SEQ ID NO: 199213
  Synthetic oligonucleotide

SEQ ID NO: 624410 - DNA, 55 bp, Artificial; identical to SEQ ID NO: 257139
  Synthetic oligonucleotide

SEQ ID NO: 624411 - DNA, 55 bp, Artificial; identical to SEQ ID NO: 187808
  Synthetic oligonucleotide

SEQ ID NO: 624412 - DNA, 55 bp, Artificial; identical to SEQ ID NO: 156708
  Synthetic oligonucleotide

SEQ ID NO: 624413 - DNA, 55 bp, Artificial; identical to SEQ ID NO: 254753
  Synthetic oligonucleotide

SEQ ID NO: 624414 - DNA, 60 bp, Artificial; identical to SEQ ID NO: 247643
  Synthetic oligonucleotide

SEQ ID NO: 624415 - DNA, 55 bp, Artificial; identical to SEQ ID NO: 156705
  Synthetic oligonucleotide

SEQ ID NO: 624416 - DNA, 60 bp, Artificial; identical to SEQ ID NO: 256664
  Synthetic oligonucleotide

SEQ ID NO: 624417 - DNA, 60 bp, Artificial; identical to SEQ ID NO: 185060
  Synthetic oligonucleotide

SEQ ID NO: 624418 - DNA, 51 bp, Artificial; identical to SEQ ID NO: 188552
  Synthetic oligonucleotide

SEQ ID NO: 624419 - DNA, 51 bp, Artificial; identical to SEQ ID NO: 200177
  Synthetic oligonucleotide

SEQ ID NO: 624420 - DNA, 55 bp, Artificial; identical to SEQ ID NO: 171634
  Synthetic oligonucleotide

SEQ ID NO: 624421 - DNA, 57 bp, Artificial; identical to SEQ ID NO: 209361
  Synthetic oligonucleotide

SEQ ID NO: 624422 - DNA, 55 bp, Artificial; identical to SEQ ID NO: 254821
  Synthetic oligonucleotide

SEQ ID NO: 624423 - DNA, 55 bp, Artificial; identical to SEQ ID NO: 265956
  Synthetic oligonucleotide

SEQ ID NO: 624424 - DNA, 59 bp, Artificial; identical to SEQ ID NO: 154148
  Synthetic oligonucleotide

SEQ ID NO: 624425 - DNA, 52 bp, Artificial; identical to SEQ ID NO: 254779
  Synthetic oligonucleotide

SEQ ID NO: 624426 - DNA, 55 bp, Artificial; identical to SEQ ID NO: 153350
  Synthetic oligonucleotide

SEQ ID NO: 624427 - DNA, 55 bp, Artificial; identical to SEQ ID NO: 148589
  Synthetic oligonucleotide

SEQ ID NO: 624428 - DNA, 55 bp, Artificial; identical to SEQ ID NO: 152339
  Synthetic oligonucleotide

SEQ ID NO: 624429 - DNA, 55 bp, Artificial; identical to SEQ ID NO: 183901
  Synthetic oligonucleotide

SEQ ID NO: 624430 - DNA, 55 bp, Artificial; identical to SEQ ID NO: 218811
  Synthetic oligonucleotide

SEQ ID NO: 624431 - DNA, 53 bp, Artificial; identical to SEQ ID NO: 247870
  Synthetic oligonucleotide

SEQ ID NO: 624432 - DNA, 55 bp, Artificial; identical to SEQ ID NO: 160210
  Synthetic oligonucleotide

SEQ ID NO: 624433 - DNA, 55 bp, Artificial; identical to SEQ ID NO: 148590
  Synthetic oligonucleotide

SEQ ID NO: 624434 - DNA, 55 bp, Artificial; identical to SEQ ID NO: 156704
  Synthetic oligonucleotide

SEQ ID NO: 624435 - DNA, 50 bp, Artificial; identical to SEQ ID NO: 246797
  Synthetic oligonucleotide

SEQ ID NO: 624436 - DNA, 55 bp, Artificial; identical to SEQ ID NO: 188789
  Synthetic oligonucleotide

SEQ ID NO: 624437 - DNA, 55 bp, Artificial; identical to SEQ ID NO: 154217
  Synthetic oligonucleotide

SEQ ID NO: 624438 - DNA, 53 bp, Artificial; identical to SEQ ID NO: 153606
  Synthetic oligonucleotide

SEQ ID NO: 624439 - DNA, 58 bp, Artificial; identical to SEQ ID NO: 185149
  Synthetic oligonucleotide

SEQ ID NO: 624440 - DNA, 52 bp, Artificial; identical to SEQ ID NO: 155553
  Synthetic oligonucleotide

SEQ ID NO: 624441 - DNA, 55 bp, Artificial; identical to SEQ ID NO: 161761
  Synthetic oligonucleotide

SEQ ID NO: 624442 - DNA, 56 bp, Artificial; identical to SEQ ID NO: 142662
  Synthetic oligonucleotide

SEQ ID NO: 624443 - DNA, 50 bp, Artificial; identical to SEQ ID NO: 213192
  Synthetic oligonucleotide

SEQ ID NO: 624444 - DNA, 60 bp, Artificial; identical to SEQ ID NO: 151001
  Synthetic oligonucleotide

SEQ ID NO: 624445 - DNA, 60 bp, Artificial; identical to SEQ ID NO: 203525
  Synthetic oligonucleotide

SEQ ID NO: 624446 - DNA, 55 bp, Artificial; identical to SEQ ID NO: 183874
  Synthetic oligonucleotide

SEQ ID NO: 624447 - DNA, 52 bp, Artificial; identical to SEQ ID NO: 237226
  Synthetic oligonucleotide

SEQ ID NO: 624448 - DNA, 55 bp, Artificial; identical to SEQ ID NO: 164359
  Synthetic oligonucleotide

SEQ ID NO: 624449 - DNA, 55 bp, Artificial; identical to SEQ ID NO: 249112
  Synthetic oligonucleotide

SEQ ID NO: 624450 - DNA, 55 bp, Artificial; identical to SEQ ID NO: 172773
  Synthetic oligonucleotide

SEQ ID NO: 624451 - DNA, 55 bp, Artificial; identical to SEQ ID NO: 156702
  Synthetic oligonucleotide

SEQ ID NO: 624452 - DNA, 55 bp, Artificial; identical to SEQ ID NO: 245513
  Synthetic oligonucleotide

SEQ ID NO: 624453 - DNA, 55 bp, Artificial; identical to SEQ ID NO: 154216
  Synthetic oligonucleotide

SEQ ID NO: 624454 - DNA, 55 bp, Artificial; identical to SEQ ID NO: 201285
  Synthetic oligonucleotide

SEQ ID NO: 624455 - DNA, 60 bp, Artificial; identical to SEQ ID NO: 162400
  Synthetic oligonucleotide

SEQ ID NO: 624456 - DNA, 55 bp, Artificial; identical to SEQ ID NO: 189389
  Synthetic oligonucleotide

SEQ ID NO: 624457 - DNA, 54 bp, Artificial; identical to SEQ ID NO: 247778
  Synthetic oligonucleotide

SEQ ID NO: 624458 - DNA, 57 bp, Artificial; identical to SEQ ID NO: 166141
  Synthetic oligonucleotide

SEQ ID NO: 624459 - DNA, 55 bp, Artificial; identical to SEQ ID NO: 208209
  Synthetic oligonucleotide

SEQ ID NO: 624460 - DNA, 55 bp, Artificial; identical to SEQ ID NO: 183884
  Synthetic oligonucleotide

SEQ ID NO: 624461 - DNA, 58 bp, Artificial; identical to SEQ ID NO: 237237
  Synthetic oligonucleotide

SEQ ID NO: 624462 - DNA, 55 bp, Artificial; identical to SEQ ID NO: 156701
  Synthetic oligonucleotide

SEQ ID NO: 624463 - DNA, 55 bp, Artificial; identical to SEQ ID NO: 221147
  Synthetic oligonucleotide

SEQ ID NO: 624464 - DNA, 59 bp, Artificial; identical to SEQ ID NO: 147216
  Synthetic oligonucleotide

SEQ ID NO: 624465 - DNA, 54 bp, Artificial; identical to SEQ ID NO: 167041
  Synthetic oligonucleotide

SEQ ID NO: 624466 - DNA, 54 bp, Artificial; identical to SEQ ID NO: 209588
  Synthetic oligonucleotide

SEQ ID NO: 624467 - DNA, 57 bp, Artificial; identical to SEQ ID NO: 167285
  Synthetic oligonucleotide

SEQ ID NO: 624468 - DNA, 55 bp, Artificial; identical to SEQ ID NO: 207559
  Synthetic oligonucleotide

SEQ ID NO: 624469 - DNA, 55 bp, Artificial; identical to SEQ ID NO: 189388
  Synthetic oligonucleotide

SEQ ID NO: 624470 - DNA, 60 bp, Artificial; identical to SEQ ID NO: 241842
  Synthetic oligonucleotide

SEQ ID NO: 624471 - DNA, 60 bp, Artificial; identical to SEQ ID NO: 171740
  Synthetic oligonucleotide

SEQ ID NO: 624472 - DNA, 54 bp, Artificial; identical to SEQ ID NO: 233792
  Synthetic oligonucleotide

SEQ ID NO: 624473 - DNA, 55 bp, Artificial; identical to SEQ ID NO: 153349
  Synthetic oligonucleotide

SEQ ID NO: 624474 - DNA, 60 bp, Artificial; identical to SEQ ID NO: 234331
  Synthetic oligonucleotide

SEQ ID NO: 624475 - DNA, 55 bp, Artificial; identical to SEQ ID NO: 169893
  Synthetic oligonucleotide

SEQ ID NO: 624476 - DNA, 60 bp, Artificial; identical to SEQ ID NO: 147205
  Synthetic oligonucleotide

SEQ ID NO: 624477 - DNA, 51 bp, Artificial; identical to SEQ ID NO: 167135
  Synthetic oligonucleotide

SEQ ID NO: 624478 - DNA, 55 bp, Artificial; identical to SEQ ID NO: 202211
  Synthetic oligonucleotide

SEQ ID NO: 624479 - DNA, 60 bp, Artificial; identical to SEQ ID NO: 147194
  Synthetic oligonucleotide

SEQ ID NO: 624480 - DNA, 58 bp, Artificial; identical to SEQ ID NO: 179652
  Synthetic oligonucleotide

SEQ ID NO: 624481 - DNA, 59 bp, Artificial; identical to SEQ ID NO: 174458
  Synthetic oligonucleotide

SEQ ID NO: 624482 - DNA, 60 bp, Artificial; identical to SEQ ID NO: 185260
  Synthetic oligonucleotide

SEQ ID NO: 624483 - DNA, 55 bp, Artificial; identical to SEQ ID NO: 190456
  Synthetic oligonucleotide

SEQ ID NO: 624484 - DNA, 58 bp, Artificial; identical to SEQ ID NO: 212498
  Synthetic oligonucleotide

SEQ ID NO: 624485 - DNA, 54 bp, Artificial; identical to SEQ ID NO: 180044
  Synthetic oligonucleotide

SEQ ID NO: 624486 - DNA, 51 bp, Artificial; identical to SEQ ID NO: 223820
  Synthetic oligonucleotide

SEQ ID NO: 624487 - DNA, 55 bp, Artificial; identical to SEQ ID NO: 245591
  Synthetic oligonucleotide

SEQ ID NO: 624488 - DNA, 60 bp, Artificial; identical to SEQ ID NO: 206597
  Synthetic oligonucleotide

SEQ ID NO: 624489 - DNA, 51 bp, Artificial; identical to SEQ ID NO: 192158
  Synthetic oligonucleotide

SEQ ID NO: 624490 - DNA, 58 bp, Artificial; identical to SEQ ID NO: 147182
  Synthetic oligonucleotide

SEQ ID NO: 624491 - DNA, 60 bp, Artificial; identical to SEQ ID NO: 248404
  Synthetic oligonucleotide

SEQ ID NO: 624492 - DNA, 59 bp, Artificial; identical to SEQ ID NO: 241820
  Synthetic oligonucleotide

SEQ ID NO: 624493 - DNA, 59 bp, Artificial; identical to SEQ ID NO: 147160
  Synthetic oligonucleotide

SEQ ID NO: 624494 - DNA, 54 bp, Artificial; identical to SEQ ID NO: 243021
  Synthetic oligonucleotide

SEQ ID NO: 624495 - DNA, 52 bp, Artificial; identical to SEQ ID NO: 246511
  Synthetic oligonucleotide

SEQ ID NO: 624496 - DNA, 60 bp, Artificial; identical to SEQ ID NO: 152454
  Synthetic oligonucleotide

SEQ ID NO: 624497 - DNA, 56 bp, Artificial; identical to SEQ ID NO: 179961
  Synthetic oligonucleotide

SEQ ID NO: 624498 - DNA, 60 bp, Artificial; identical to SEQ ID NO: 185905
  Synthetic oligonucleotide

SEQ ID NO: 624499 - DNA, 55 bp, Artificial; identical to SEQ ID NO: 151923
  Synthetic oligonucleotide

SEQ ID NO: 624500 - DNA, 53 bp, Artificial; identical to SEQ ID NO: 174850
  Synthetic oligonucleotide

SEQ ID NO: 624501 - DNA, 55 bp, Artificial; identical to SEQ ID NO: 199211
  Synthetic oligonucleotide

SEQ ID NO: 624502 - DNA, 58 bp, Artificial; identical to SEQ ID NO: 152443
  Synthetic oligonucleotide

SEQ ID NO: 624503 - DNA, 59 bp, Artificial; identical to SEQ ID NO: 179453
  Synthetic oligonucleotide

SEQ ID NO: 624504 - DNA, 55 bp, Artificial; identical to SEQ ID NO: 199210
  Synthetic oligonucleotide

SEQ ID NO: 624505 - DNA, 55 bp, Artificial; identical to SEQ ID NO: 168757
  Synthetic oligonucleotide

SEQ ID NO: 624506 - DNA, 55 bp, Artificial; identical to SEQ ID NO: 156699
  Synthetic oligonucleotide

SEQ ID NO: 624507 - DNA, 51 bp, Artificial; identical to SEQ ID NO: 165320
  Synthetic oligonucleotide

SEQ ID NO: 624508 - DNA, 55 bp, Artificial; identical to SEQ ID NO: 153347
  Synthetic oligonucleotide

SEQ ID NO: 624509 - DNA, 55 bp, Artificial; identical to SEQ ID NO: 266160
  Synthetic oligonucleotide

SEQ ID NO: 624510 - DNA, 55 bp, Artificial; identical to SEQ ID NO: 183728
  Synthetic oligonucleotide

SEQ ID NO: 624511 - DNA, 55 bp, Artificial; identical to SEQ ID NO: 254668
  Synthetic oligonucleotide

SEQ ID NO: 624512 - DNA, 55 bp, Artificial; identical to SEQ ID NO: 249115
  Synthetic oligonucleotide

SEQ ID NO: 624513 - DNA, 55 bp, Artificial; identical to SEQ ID NO: 238475
  Synthetic oligonucleotide

SEQ ID NO: 624514 - DNA, 55 bp, Artificial; identical to SEQ ID NO: 245609
  Synthetic oligonucleotide

SEQ ID NO: 624515 - DNA, 55 bp, Artificial; identical to SEQ ID NO: 202210
  Synthetic oligonucleotide

SEQ ID NO: 624516 - DNA, 58 bp, Artificial; identical to SEQ ID NO: 147138
  Synthetic oligonucleotide

SEQ ID NO: 624517 - DNA, 53 bp, Artificial; identical to SEQ ID NO: 149422
  Synthetic oligonucleotide

SEQ ID NO: 624518 - DNA, 55 bp, Artificial; identical to SEQ ID NO: 188788
  Synthetic oligonucleotide

SEQ ID NO: 624519 - DNA, 53 bp, Artificial; identical to SEQ ID NO: 185481
  Synthetic oligonucleotide

SEQ ID NO: 624520 - DNA, 55 bp, Artificial; identical to SEQ ID NO: 153346
  Synthetic oligonucleotide

SEQ ID NO: 624521 - DNA, 60 bp, Artificial; identical to SEQ ID NO: 258008
  Synthetic oligonucleotide

SEQ ID NO: 624522 - DNA, 55 bp, Artificial; identical to SEQ ID NO: 183745
  Synthetic oligonucleotide

SEQ ID NO: 624523 - DNA, 55 bp, Artificial; identical to SEQ ID NO: 183741
  Synthetic oligonucleotide

SEQ ID NO: 624524 - DNA, 55 bp, Artificial; identical to SEQ ID NO: 168752
  Synthetic oligonucleotide

SEQ ID NO: 624525 - DNA, 55 bp, Artificial; identical to SEQ ID NO: 254672
  Synthetic oligonucleotide

SEQ ID NO: 624526 - DNA, 57 bp, Artificial; identical to SEQ ID NO: 166148
  Synthetic oligonucleotide

SEQ ID NO: 624527 - DNA, 55 bp, Artificial; identical to SEQ ID NO: 221150
  Synthetic oligonucleotide

SEQ ID NO: 624528 - DNA, 53 bp, Artificial; identical to SEQ ID NO: 149420
  Synthetic oligonucleotide

SEQ ID NO: 624529 - DNA, 60 bp, Artificial; identical to SEQ ID NO: 186027
  Synthetic oligonucleotide

SEQ ID NO: 624530 - DNA, 54 bp, Artificial; identical to SEQ ID NO: 205625
  Synthetic oligonucleotide

SEQ ID NO: 624531 - DNA, 60 bp, Artificial; identical to SEQ ID NO: 219487
  Synthetic oligonucleotide

SEQ ID NO: 624532 - DNA, 53 bp, Artificial; identical to SEQ ID NO: 144986
  Synthetic oligonucleotide

SEQ ID NO: 624533 - DNA, 55 bp, Artificial; identical to SEQ ID NO: 253105
  Synthetic oligonucleotide

SEQ ID NO: 624534 - DNA, 53 bp, Artificial; identical to SEQ ID NO: 209604
  Synthetic oligonucleotide

SEQ ID NO: 624535 - DNA, 55 bp, Artificial; identical to SEQ ID NO: 257925
  Synthetic oligonucleotide

SEQ ID NO: 624536 - DNA, 60 bp, Artificial; identical to SEQ ID NO: 247698
  Synthetic oligonucleotide

SEQ ID NO: 624537 - DNA, 56 bp, Artificial; identical to SEQ ID NO: 155703
  Synthetic oligonucleotide

SEQ ID NO: 624538 - DNA, 55 bp, Artificial; identical to SEQ ID NO: 148555
  Synthetic oligonucleotide

SEQ ID NO: 624539 - DNA, 55 bp, Artificial; identical to SEQ ID NO: 218809
  Synthetic oligonucleotide

SEQ ID NO: 624540 - DNA, 60 bp, Artificial; identical to SEQ ID NO: 243163
  Synthetic oligonucleotide

SEQ ID NO: 624541 - DNA, 53 bp, Artificial; identical to SEQ ID NO: 255439
  Synthetic oligonucleotide

SEQ ID NO: 624542 - DNA, 53 bp, Artificial; identical to SEQ ID NO: 157380
  Synthetic oligonucleotide

SEQ ID NO: 624543 - DNA, 56 bp, Artificial; identical to SEQ ID NO: 237259
  Synthetic oligonucleotide

SEQ ID NO: 624544 - DNA, 56 bp, Artificial; identical to SEQ ID NO: 159816
  Synthetic oligonucleotide

SEQ ID NO: 624545 - DNA, 55 bp, Artificial; identical to SEQ ID NO: 211257
  Synthetic oligonucleotide

SEQ ID NO: 624546 - DNA, 60 bp, Artificial; identical to SEQ ID NO: 241776
  Synthetic oligonucleotide

SEQ ID NO: 624547 - DNA, 59 bp, Artificial; identical to SEQ ID NO: 186071
  Synthetic oligonucleotide

SEQ ID NO: 624548 - DNA, 53 bp, Artificial; identical to SEQ ID NO: 207729
  Synthetic oligonucleotide

SEQ ID NO: 624549 - DNA, 55 bp, Artificial; identical to SEQ ID NO: 234193
  Synthetic oligonucleotide

SEQ ID NO: 624550 - DNA, 57 bp, Artificial; identical to SEQ ID NO: 201221
  Synthetic oligonucleotide

SEQ ID NO: 624551 - DNA, 60 bp, Artificial; identical to SEQ ID NO: 241764
  Synthetic oligonucleotide

SEQ ID NO: 624552 - DNA, 59 bp, Artificial; identical to SEQ ID NO: 243174
  Synthetic oligonucleotide

SEQ ID NO: 624553 - DNA, 55 bp, Artificial; identical to SEQ ID NO: 161025
  Synthetic oligonucleotide

SEQ ID NO: 624554 - DNA, 55 bp, Artificial; identical to SEQ ID NO: 234192
  Synthetic oligonucleotide

SEQ ID NO: 624555 - DNA, 55 bp, Artificial; identical to SEQ ID NO: 144062
  Synthetic oligonucleotide

SEQ ID NO: 624556 - DNA, 55 bp, Artificial; identical to SEQ ID NO: 207561
  Synthetic oligonucleotide

SEQ ID NO: 624557 - DNA, 56 bp, Artificial; identical to SEQ ID NO: 146363
  Synthetic oligonucleotide

SEQ ID NO: 624558 - DNA, 55 bp, Artificial; identical to SEQ ID NO: 254649
  Synthetic oligonucleotide

SEQ ID NO: 624559 - DNA, 55 bp, Artificial; identical to SEQ ID NO: 151926
  Synthetic oligonucleotide

SEQ ID NO: 624560 - DNA, 52 bp, Artificial; identical to SEQ ID NO: 162340
  Synthetic oligonucleotide

SEQ ID NO: 624561 - DNA, 55 bp, Artificial; identical to SEQ ID NO: 174270
  Synthetic oligonucleotide

SEQ ID NO: 624562 - DNA, 54 bp, Artificial; identical to SEQ ID NO: 216578
  Synthetic oligonucleotide

SEQ ID NO: 624563 - DNA, 55 bp, Artificial; identical to SEQ ID NO: 164767
  Synthetic oligonucleotide

SEQ ID NO: 624564 - DNA, 55 bp, Artificial; identical to SEQ ID NO: 191037
  Synthetic oligonucleotide

SEQ ID NO: 624565 - DNA, 56 bp, Artificial; identical to SEQ ID NO: 247615
  Synthetic oligonucleotide

SEQ ID NO: 624566 - DNA, 50 bp, Artificial; identical to SEQ ID NO: 200389
  Synthetic oligonucleotide

SEQ ID NO: 624567 - DNA, 55 bp, Artificial; identical to SEQ ID NO: 207562
  Synthetic oligonucleotide

SEQ ID NO: 624568 - DNA, 50 bp, Artificial; identical to SEQ ID NO: 170594
  Synthetic oligonucleotide

SEQ ID NO: 624569 - DNA, 55 bp, Artificial; identical to SEQ ID NO: 245560
  Synthetic oligonucleotide

SEQ ID NO: 624570 - DNA, 58 bp, Artificial; identical to SEQ ID NO: 166064
  Synthetic oligonucleotide

SEQ ID NO: 624571 - DNA, 57 bp, Artificial; identical to SEQ ID NO: 243196
  Synthetic oligonucleotide

SEQ ID NO: 624572 - DNA, 53 bp, Artificial; identical to SEQ ID NO: 202466
  Synthetic oligonucleotide

SEQ ID NO: 624573 - DNA, 55 bp, Artificial; identical to SEQ ID NO: 254731
  Synthetic oligonucleotide

SEQ ID NO: 624574 - DNA, 57 bp, Artificial; identical to SEQ ID NO: 167284
  Synthetic oligonucleotide

SEQ ID NO: 624575 - DNA, 55 bp, Artificial; identical to SEQ ID NO: 142392
  Synthetic oligonucleotide

SEQ ID NO: 624576 - DNA, 54 bp, Artificial; identical to SEQ ID NO: 164762
  Synthetic oligonucleotide

SEQ ID NO: 624577 - DNA, 55 bp, Artificial; identical to SEQ ID NO: 144269
  Synthetic oligonucleotide

SEQ ID NO: 624578 - DNA, 54 bp, Artificial; identical to SEQ ID NO: 168856
  Synthetic oligonucleotide

SEQ ID NO: 624579 - DNA, 55 bp, Artificial; identical to SEQ ID NO: 169862
  Synthetic oligonucleotide

SEQ ID NO: 624580 - DNA, 52 bp, Artificial; identical to SEQ ID NO: 165059
  Synthetic oligonucleotide

SEQ ID NO: 624581 - DNA, 55 bp, Artificial; identical to SEQ ID NO: 249495
  Synthetic oligonucleotide

SEQ ID NO: 624582 - DNA, 60 bp, Artificial; identical to SEQ ID NO: 170834
  Synthetic oligonucleotide

SEQ ID NO: 624583 - DNA, 55 bp, Artificial; identical to SEQ ID NO: 240262
  Synthetic oligonucleotide

SEQ ID NO: 624584 - DNA, 60 bp, Artificial; identical to SEQ ID NO: 164778
  Synthetic oligonucleotide

SEQ ID NO: 624585 - DNA, 60 bp, Artificial; identical to SEQ ID NO: 225520
  Synthetic oligonucleotide

SEQ ID NO: 624586 - DNA, 52 bp, Artificial; identical to SEQ ID NO: 206473
  Synthetic oligonucleotide

SEQ ID NO: 624587 - DNA, 53 bp, Artificial; identical to SEQ ID NO: 149417
  Synthetic oligonucleotide

SEQ ID NO: 624588 - DNA, 53 bp, Artificial; identical to SEQ ID NO: 247868
  Synthetic oligonucleotide

SEQ ID NO: 624589 - DNA, 58 bp, Artificial; identical to SEQ ID NO: 217255
  Synthetic oligonucleotide

SEQ ID NO: 624590 - DNA, 55 bp, Artificial; identical to SEQ ID NO: 245561
  Synthetic oligonucleotide

SEQ ID NO: 624591 - DNA, 53 bp, Artificial; identical to SEQ ID NO: 185673
  Synthetic oligonucleotide

SEQ ID NO: 624592 - DNA, 55 bp, Artificial; identical to SEQ ID NO: 148562
  Synthetic oligonucleotide

SEQ ID NO: 624593 - DNA, 55 bp, Artificial; identical to SEQ ID NO: 249494
  Synthetic oligonucleotide

SEQ ID NO: 624594 - DNA, 56 bp, Artificial; identical to SEQ ID NO: 188072
  Synthetic oligonucleotide

SEQ ID NO: 624595 - DNA, 50 bp, Artificial; identical to SEQ ID NO: 165479
  Synthetic oligonucleotide

SEQ ID NO: 624596 - DNA, 56 bp, Artificial; identical to SEQ ID NO: 239297
  Synthetic oligonucleotide

SEQ ID NO: 624597 - DNA, 53 bp, Artificial; identical to SEQ ID NO: 258099
  Synthetic oligonucleotide

SEQ ID NO: 624598 - DNA, 51 bp, Artificial; identical to SEQ ID NO: 192157
  Synthetic oligonucleotide

SEQ ID NO: 624599 - DNA, 54 bp, Artificial; identical to SEQ ID NO: 162401
  Synthetic oligonucleotide

SEQ ID NO: 624600 - DNA, 60 bp, Artificial; identical to SEQ ID NO: 241614
  Synthetic oligonucleotide

SEQ ID NO: 624601 - DNA, 55 bp, Artificial; identical to SEQ ID NO: 187697
  Synthetic oligonucleotide

SEQ ID NO: 624602 - DNA, 56 bp, Artificial; identical to SEQ ID NO: 241503
  Synthetic oligonucleotide

SEQ ID NO: 624603 - DNA, 52 bp, Artificial; identical to SEQ ID NO: 201372
  Synthetic oligonucleotide

SEQ ID NO: 624604 - DNA, 55 bp, Artificial; identical to SEQ ID NO: 191036
  Synthetic oligonucleotide

SEQ ID NO: 624605 - DNA, 60 bp, Artificial; identical to SEQ ID NO: 241392
  Synthetic oligonucleotide

SEQ ID NO: 624606 - DNA, 55 bp, Artificial; identical to SEQ ID NO: 254693
  Synthetic oligonucleotide

SEQ ID NO: 624607 - DNA, 51 bp, Artificial; identical to SEQ ID NO: 167145
  Synthetic oligonucleotide

SEQ ID NO: 624608 - DNA, 55 bp, Artificial; identical to SEQ ID NO: 199207
  Synthetic oligonucleotide

SEQ ID NO: 624609 - DNA, 55 bp, Artificial; identical to SEQ ID NO: 164314
  Synthetic oligonucleotide

SEQ ID NO: 624610 - DNA, 54 bp, Artificial; identical to SEQ ID NO: 254694
  Synthetic oligonucleotide

SEQ ID NO: 624611 - DNA, 56 bp, Artificial; identical to SEQ ID NO: 179323
  Synthetic oligonucleotide

SEQ ID NO: 624612 - DNA, 57 bp, Artificial; identical to SEQ ID NO: 172835
  Synthetic oligonucleotide

SEQ ID NO: 624613 - DNA, 55 bp, Artificial; identical to SEQ ID NO: 166963
  Synthetic oligonucleotide

SEQ ID NO: 624614 - DNA, 59 bp, Artificial; identical to SEQ ID NO: 188061
  Synthetic oligonucleotide

SEQ ID NO: 624615 - DNA, 60 bp, Artificial; identical to SEQ ID NO: 185748
  Synthetic oligonucleotide

SEQ ID NO: 624616 - DNA, 51 bp, Artificial; identical to SEQ ID NO: 242454
  Synthetic oligonucleotide

SEQ ID NO: 624617 - DNA, 55 bp, Artificial; identical to SEQ ID NO: 187699
  Synthetic oligonucleotide

SEQ ID NO: 624618 - DNA, 54 bp, Artificial; identical to SEQ ID NO: 160778
  Synthetic oligonucleotide

SEQ ID NO: 624619 - DNA, 54 bp, Artificial; identical to SEQ ID NO: 266262
  Synthetic oligonucleotide

SEQ ID NO: 624620 - DNA, 50 bp, Artificial; identical to SEQ ID NO: 167761
  Synthetic oligonucleotide

SEQ ID NO: 624621 - DNA, 54 bp, Artificial; identical to SEQ ID NO: 164752
  Synthetic oligonucleotide

SEQ ID NO: 624622 - DNA, 55 bp, Artificial; identical to SEQ ID NO: 245571
  Synthetic oligonucleotide

SEQ ID NO: 624623 - DNA, 56 bp, Artificial; identical to SEQ ID NO: 147339
  Synthetic oligonucleotide

SEQ ID NO: 624624 - DNA, 55 bp, Artificial; identical to SEQ ID NO: 202208
  Synthetic oligonucleotide

SEQ ID NO: 624625 - DNA, 59 bp, Artificial; identical to SEQ ID NO: 241281
  Synthetic oligonucleotide

SEQ ID NO: 624626 - DNA, 53 bp, Artificial; identical to SEQ ID NO: 188054
  Synthetic oligonucleotide

SEQ ID NO: 624627 - DNA, 55 bp, Artificial; identical to SEQ ID NO: 151929
  Synthetic oligonucleotide

SEQ ID NO: 624628 - DNA, 51 bp, Artificial; identical to SEQ ID NO: 241080
  Synthetic oligonucleotide

SEQ ID NO: 624629 - DNA, 55 bp, Artificial; identical to SEQ ID NO: 161835
  Synthetic oligonucleotide

SEQ ID NO: 624630 - DNA, 55 bp, Artificial; identical to SEQ ID NO: 233567
  Synthetic oligonucleotide

SEQ ID NO: 624631 - DNA, 53 bp, Artificial; identical to SEQ ID NO: 216715
  Synthetic oligonucleotide

SEQ ID NO: 624632 - DNA, 55 bp, Artificial; identical to SEQ ID NO: 187701
  Synthetic oligonucleotide

SEQ ID NO: 624633 - DNA, 60 bp, Artificial; identical to SEQ ID NO: 255222
  Synthetic oligonucleotide

SEQ ID NO: 624634 - DNA, 55 bp, Artificial; identical to SEQ ID NO: 221191
  Synthetic oligonucleotide

SEQ ID NO: 624635 - DNA, 55 bp, Artificial; identical to SEQ ID NO: 245572
  Synthetic oligonucleotide

SEQ ID NO: 624636 - DNA, 55 bp, Artificial; identical to SEQ ID NO: 164313
  Synthetic oligonucleotide

SEQ ID NO: 624637 - DNA, 55 bp, Artificial; identical to SEQ ID NO: 164311
  Synthetic oligonucleotide

SEQ ID NO: 624638 - DNA, 55 bp, Artificial; identical to SEQ ID NO: 164310
  Synthetic oligonucleotide

SEQ ID NO: 624639 - DNA, 55 bp, Artificial; identical to SEQ ID NO: 241170
  Synthetic oligonucleotide

SEQ ID NO: 624640 - DNA, 50 bp, Artificial; identical to SEQ ID NO: 167771
  Synthetic oligonucleotide

SEQ ID NO: 624641 - DNA, 60 bp, Artificial; identical to SEQ ID NO: 185815
  Synthetic oligonucleotide

SEQ ID NO: 624642 - DNA, 55 bp, Artificial; identical to SEQ ID NO: 209509
  Synthetic oligonucleotide

SEQ ID NO: 624643 - DNA, 55 bp, Artificial; identical to SEQ ID NO: 151930
  Synthetic oligonucleotide

SEQ ID NO: 624644 - DNA, 55 bp, Artificial; identical to SEQ ID NO: 156721
  Synthetic oligonucleotide

SEQ ID NO: 624645 - DNA, 60 bp, Artificial; identical to SEQ ID NO: 257997
  Synthetic oligonucleotide

SEQ ID NO: 624646 - DNA, 55 bp, Artificial; identical to SEQ ID NO: 172772
  Synthetic oligonucleotide

SEQ ID NO: 624647 - DNA, 60 bp, Artificial; identical to SEQ ID NO: 177159
  Synthetic oligonucleotide

SEQ ID NO: 624648 - DNA, 55 bp, Artificial; identical to SEQ ID NO: 183012
  Synthetic oligonucleotide

SEQ ID NO: 624649 - DNA, 55 bp, Artificial; identical to SEQ ID NO: 199205
  Synthetic oligonucleotide

SEQ ID NO: 624650 - DNA, 60 bp, Artificial; identical to SEQ ID NO: 241059
  Synthetic oligonucleotide

SEQ ID NO: 624651 - DNA, 55 bp, Artificial; identical to SEQ ID NO: 190461
  Synthetic oligonucleotide

SEQ ID NO: 624652 - DNA, 55 bp, Artificial; identical to SEQ ID NO: 188317
  Synthetic oligonucleotide

SEQ ID NO: 624653 - DNA, 57 bp, Artificial; identical to SEQ ID NO: 157398
  Synthetic oligonucleotide

SEQ ID NO: 624654 - DNA, 55 bp, Artificial; identical to SEQ ID NO: 245579
  Synthetic oligonucleotide

SEQ ID NO: 624655 - DNA, 56 bp, Artificial; identical to SEQ ID NO: 256640
  Synthetic oligonucleotide

SEQ ID NO: 624656 - DNA, 55 bp, Artificial; identical to SEQ ID NO: 148570
  Synthetic oligonucleotide

SEQ ID NO: 624657 - DNA, 56 bp, Artificial; identical to SEQ ID NO: 201225
  Synthetic oligonucleotide

SEQ ID NO: 624658 - DNA, 57 bp, Artificial; identical to SEQ ID NO: 187352
  Synthetic oligonucleotide

SEQ ID NO: 624659 - DNA, 55 bp, Artificial; identical to SEQ ID NO: 220776
  Synthetic oligonucleotide

SEQ ID NO: 624660 - DNA, 55 bp, Artificial; identical to SEQ ID NO: 202206
  Synthetic oligonucleotide

SEQ ID NO: 624661 - DNA, 59 bp, Artificial; identical to SEQ ID NO: 207002
  Synthetic oligonucleotide

SEQ ID NO: 624662 - DNA, 52 bp, Artificial; identical to SEQ ID NO: 237049
  Synthetic oligonucleotide

SEQ ID NO: 624663 - DNA, 50 bp, Artificial; identical to SEQ ID NO: 176810
  Synthetic oligonucleotide

SEQ ID NO: 624664 - DNA, 60 bp, Artificial; identical to SEQ ID NO: 177165
  Synthetic oligonucleotide

SEQ ID NO: 624665 - DNA, 55 bp, Artificial; identical to SEQ ID NO: 169904
  Synthetic oligonucleotide

SEQ ID NO: 624666 - DNA, 55 bp, Artificial; identical to SEQ ID NO: 253101
  Synthetic oligonucleotide

SEQ ID NO: 624667 - DNA, 60 bp, Artificial; identical to SEQ ID NO: 142396
  Synthetic oligonucleotide

SEQ ID NO: 624668 - DNA, 51 bp, Artificial; identical to SEQ ID NO: 200151
  Synthetic oligonucleotide

SEQ ID NO: 624669 - DNA, 59 bp, Artificial; identical to SEQ ID NO: 237900
  Synthetic oligonucleotide

SEQ ID NO: 624670 - DNA, 55 bp, Artificial; identical to SEQ ID NO: 238478
  Synthetic oligonucleotide

SEQ ID NO: 624671 - DNA, 54 bp, Artificial; identical to SEQ ID NO: 144972
  Synthetic oligonucleotide

SEQ ID NO: 624672 - DNA, 50 bp, Artificial; identical to SEQ ID NO: 237489
  Synthetic oligonucleotide

SEQ ID NO: 624673 - DNA, 54 bp, Artificial; identical to SEQ ID NO: 185154
  Synthetic oligonucleotide

SEQ ID NO: 624674 - DNA, 55 bp, Artificial; identical to SEQ ID NO: 254707
  Synthetic oligonucleotide

SEQ ID NO: 624675 - DNA, 55 bp, Artificial; identical to SEQ ID NO: 202205
  Synthetic oligonucleotide

SEQ ID NO: 624676 - DNA, 58 bp, Artificial; identical to SEQ ID NO: 254178
  Synthetic oligonucleotide

SEQ ID NO: 624677 - DNA, 55 bp, Artificial; identical to SEQ ID NO: 222683
  Synthetic oligonucleotide

SEQ ID NO: 624678 - DNA, 55 bp, Artificial; identical to SEQ ID NO: 188355
  Synthetic oligonucleotide

SEQ ID NO: 624679 - DNA, 55 bp, Artificial; identical to SEQ ID NO: 159863
  Synthetic oligonucleotide

SEQ ID NO: 624680 - DNA, 60 bp, Artificial; identical to SEQ ID NO: 147105
  Synthetic oligonucleotide

SEQ ID NO: 624681 - DNA, 55 bp, Artificial; identical to SEQ ID NO: 182850
  Synthetic oligonucleotide

SEQ ID NO: 624682 - DNA, 55 bp, Artificial; identical to SEQ ID NO: 162164
  Synthetic oligonucleotide

SEQ ID NO: 624683 - DNA, 55 bp, Artificial; identical to SEQ ID NO: 254706
  Synthetic oligonucleotide

SEQ ID NO: 624684 - DNA, 51 bp, Artificial; identical to SEQ ID NO: 170202
  Synthetic oligonucleotide

SEQ ID NO: 624685 - DNA, 55 bp, Artificial; identical to SEQ ID NO: 207567
  Synthetic oligonucleotide

SEQ ID NO: 624686 - DNA, 55 bp, Artificial; identical to SEQ ID NO: 160206
  Synthetic oligonucleotide

SEQ ID NO: 624687 - DNA, 49 bp, Artificial; identical to SEQ ID NO: 211535
  Synthetic oligonucleotide

SEQ ID NO: 624688 - DNA, 55 bp, Artificial; identical to SEQ ID NO: 207568
  Synthetic oligonucleotide

SEQ ID NO: 624689 - DNA, 52 bp, Artificial; identical to SEQ ID NO: 237950
  Synthetic oligonucleotide

SEQ ID NO: 624690 - DNA, 55 bp, Artificial; identical to SEQ ID NO: 182796
  Synthetic oligonucleotide

SEQ ID NO: 624691 - DNA, 57 bp, Artificial; identical to SEQ ID NO: 164800
  Synthetic oligonucleotide

SEQ ID NO: 624692 - DNA, 59 bp, Artificial; identical to SEQ ID NO: 205201
  Synthetic oligonucleotide

SEQ ID NO: 624693 - DNA, 55 bp, Artificial; identical to SEQ ID NO: 156717
  Synthetic oligonucleotide

SEQ ID NO: 624694 - DNA, 60 bp, Artificial; identical to SEQ ID NO: 206697
  Synthetic oligonucleotide

SEQ ID NO: 624695 - DNA, 55 bp, Artificial; identical to SEQ ID NO: 166107
  Synthetic oligonucleotide

SEQ ID NO: 624696 - DNA, 50 bp, Artificial; identical to SEQ ID NO: 167202
  Synthetic oligonucleotide

SEQ ID NO: 624697 - DNA, 55 bp, Artificial; identical to SEQ ID NO: 203822
  Synthetic oligonucleotide

SEQ ID NO: 624698 - DNA, 52 bp, Artificial; identical to SEQ ID NO: 170126
  Synthetic oligonucleotide

SEQ ID NO: 624699 - DNA, 53 bp, Artificial; identical to SEQ ID NO: 223424
  Synthetic oligonucleotide

SEQ ID NO: 624700 - DNA, 55 bp, Artificial; identical to SEQ ID NO: 242788
  Synthetic oligonucleotide

SEQ ID NO: 624701 - DNA, 51 bp, Artificial; identical to SEQ ID NO: 221795
  Synthetic oligonucleotide

SEQ ID NO: 624702 - DNA, 51 bp, Artificial; identical to SEQ ID NO: 187041
  Synthetic oligonucleotide

SEQ ID NO: 624703 - DNA, 50 bp, Artificial; identical to SEQ ID NO: 241664
  Synthetic oligonucleotide

SEQ ID NO: 624704 - DNA, 50 bp, Artificial; identical to SEQ ID NO: 152994
  Synthetic oligonucleotide

SEQ ID NO: 624705 - DNA, 56 bp, Artificial; identical to SEQ ID NO: 244388
  Synthetic oligonucleotide

SEQ ID NO: 624706 - DNA, 55 bp, Artificial; identical to SEQ ID NO: 182911
  Synthetic oligonucleotide

SEQ ID NO: 624707 - DNA, 55 bp, Artificial; identical to SEQ ID NO: 197068
  Synthetic oligonucleotide

SEQ ID NO: 624708 - DNA, 54 bp, Artificial; identical to SEQ ID NO: 162402
  Synthetic oligonucleotide

SEQ ID NO: 624709 - DNA, 50 bp, Artificial; identical to SEQ ID NO: 258290
  Synthetic oligonucleotide

SEQ ID NO: 624710 - DNA, 59 bp, Artificial; identical to SEQ ID NO: 191989
  Synthetic oligonucleotide

SEQ ID NO: 624711 - DNA, 53 bp, Artificial; identical to SEQ ID NO: 170798
  Synthetic oligonucleotide

SEQ ID NO: 624712 - DNA, 52 bp, Artificial; identical to SEQ ID NO: 156716
  Synthetic oligonucleotide

SEQ ID NO: 624713 - DNA, 55 bp, Artificial; identical to SEQ ID NO: 257917
  Synthetic oligonucleotide

SEQ ID NO: 624714 - DNA, 57 bp, Artificial; identical to SEQ ID NO: 188039
  Synthetic oligonucleotide

SEQ ID NO: 624715 - DNA, 57 bp, Artificial; identical to SEQ ID NO: 147060
  Synthetic oligonucleotide

SEQ ID NO: 624716 - DNA, 55 bp, Artificial; identical to SEQ ID NO: 160205
  Synthetic oligonucleotide

SEQ ID NO: 624717 - DNA, 55 bp, Artificial; identical to SEQ ID NO: 174260
  Synthetic oligonucleotide

SEQ ID NO: 624718 - DNA, 56 bp, Artificial; identical to SEQ ID NO: 206708
  Synthetic oligonucleotide

SEQ ID NO: 624719 - DNA, 55 bp, Artificial; identical to SEQ ID NO: 207570
  Synthetic oligonucleotide

SEQ ID NO: 624720 - DNA, 52 bp, Artificial; identical to SEQ ID NO: 202995
  Synthetic oligonucleotide

SEQ ID NO: 624721 - DNA, 55 bp, Artificial; identical to SEQ ID NO: 182925
  Synthetic oligonucleotide

SEQ ID NO: 624722 - DNA, 54 bp, Artificial; identical to SEQ ID NO: 142575
  Synthetic oligonucleotide

SEQ ID NO: 624723 - DNA, 55 bp, Artificial; identical to SEQ ID NO: 254698
  Synthetic oligonucleotide

SEQ ID NO: 624724 - DNA, 50 bp, Artificial; identical to SEQ ID NO: 192197
  Synthetic oligonucleotide

SEQ ID NO: 624725 - DNA, 55 bp, Artificial; identical to SEQ ID NO: 245419
  Synthetic oligonucleotide

SEQ ID NO: 624726 - DNA, 56 bp, Artificial; identical to SEQ ID NO: 239548
  Synthetic oligonucleotide

SEQ ID NO: 624727 - DNA, 55 bp, Artificial; identical to SEQ ID NO: 154211
  Synthetic oligonucleotide

SEQ ID NO: 624728 - DNA, 59 bp, Artificial; identical to SEQ ID NO: 239537
  Synthetic oligonucleotide

SEQ ID NO: 624729 - DNA, 50 bp, Artificial; identical to SEQ ID NO: 194048
  Synthetic oligonucleotide

SEQ ID NO: 624730 - DNA, 55 bp, Artificial; identical to SEQ ID NO: 207571
  Synthetic oligonucleotide

SEQ ID NO: 624731 - DNA, 55 bp, Artificial; identical to SEQ ID NO: 254695
  Synthetic oligonucleotide

SEQ ID NO: 624732 - DNA, 55 bp, Artificial; identical to SEQ ID NO: 202203
  Synthetic oligonucleotide

SEQ ID NO: 624733 - DNA, 55 bp, Artificial; identical to SEQ ID NO: 194696
  Synthetic oligonucleotide

SEQ ID NO: 624734 - DNA, 59 bp, Artificial; identical to SEQ ID NO: 239526
  Synthetic oligonucleotide

SEQ ID NO: 624735 - DNA, 54 bp, Artificial; identical to SEQ ID NO: 160204
  Synthetic oligonucleotide

SEQ ID NO: 624736 - DNA, 57 bp, Artificial; identical to SEQ ID NO: 194111
  Synthetic oligonucleotide

SEQ ID NO: 624737 - DNA, 53 bp, Artificial; identical to SEQ ID NO: 164308
  Synthetic oligonucleotide
